United States Patent Application Publication US 2007/0083945 A1 - sequence listing, part 17

SEQ ID NO: 112282 - DNA, 384 bp, Glycine max
  unsure (1)..(384): unsure at all n locations
agcttgttcaaagttggtgtactatttatgacattgnataaggtgtctacatccaccaaaacaaatagaactattaatgattgagaaagcttgcccgagccaaaagtgttcagcaaatctacttccctcttgcatgcacttgttcaccaacaaaacatattataggttcctcatgaggttgcataagatcatgagaaacgtctaatttttcaaagatagactagtataaaatgttagcaaaacttccctaatcaattagagttttttggactgctaaaccagctattacaattgtaaccaccataagctcatcttgaattgatcatttccaatgaagtcaacatcaatgaatgtaattgcttgtaaagatttgcaagaagtttc

SEQ ID NO: 112283 - DNA, 429 bp, Glycine max
tccatcacatatatcctcatatgtaggttccctgtccctaactatggtgttaaaatggtaaattttataataaactccccacacctatcgtgagctaccctgcggattcctcgtcatgtcacttgaagattcctttttgtccttgctcgttgattccactcaagcctctaccatgccaaaacgaaggagacttagtatggattttagaaagctagtgacagtgctctgggtcaaacacccacatcactacatgaaagagctgagagcatttcgggttttacaaaggaacatcatttggaaattccgaccatgccaatgtgaccggggttcagtgtaggttacgaaaataacatgtatttcatgaaaggataacgtttacaaagtctctttctctaaggtttttcaaaggaagcataagacatgcaatgg

SEQ ID NO: 112284 - DNA, 418 bp, Glycine max
  unsure (1)..(418): unsure at all n locations
ctcagcttctcaccantttttataaatagggggaggattttattgttnaagggantcaccccttaagcacttttctctctttacaatttgctaggaaaaattgtttccgtgaagaatatccatgccgaggcgctttcgaaacgttaccgtaacgtctccgagaggaatgtctcgaaggtttctaccatttttcgacgggcctcattcattctttcatacgtcttcgaccttcaatgggtaagtaccttcgaaccaagcttttcgattcattctatgtacccgtggtggttcacatggtgtttcgtgttttttgtgctgaattcatttactttttatacccccttttgacgtgcttaaacccttttattataatcatttctcgctaacccgaaattaaatatatttccaccgattatgt

SEQ ID NO: 112285 - DNA, 379 bp, Glycine max
agctattgactatacctaatattttttttgtttatagaccacaggaggagcgtgatcttgatcatgaagagcaaacgaattagagcctggtgatgaaatgggcatcgccagggttgcaattggaacaacttctaagcctatgacatttgaagcttctactgatgatgcttctgcttcgggttctacttcattttgttgaacttctgattgggttttgacatccaagaaccttggttttggccaagggatttcagtttcttcatcttgggatagcaaccgtgcgaggtatgacttttggttctatttgattgcgttaaggaataaggacaaacttaaaagtagctcctttggttcttgaaatagattaaggaccaaactt

SEQ ID NO: 112286 - DNA, 398 bp, Glycine max
ataaaactcagctttaaagaaaggattgggcctgtttttattgtgaccacgaattacactcacaagagtcaattatagtcgtctggcgattgaatataacatcatgatcatggatcactatagactttacggaagactataagagataaacattcatggacacaagagccactaatacaggtaagatttttctccccaactttgaggacaagtaactatacaaaagcatcttgaaagtcatatgattagcattacgcacaaccttacgaagtcaaatgccaatcaatctatgacatccgataactagaaatatactcgatctcaactttgaatatggaattccaagatatcaaatacatactgacactcgtaatcataaaactctaacacaatacaca

SEQ ID NO: 112287 - DNA, 376 bp, Glycine max
agctagagatgtgtctcaatctgcttttttgaagcggggccaataccatcctccacatactacgcgtttactttacagatggctgtgatatagatatgtgtgtacgaattgtgaacgtctagcatcaacatgattattcaaacatttttagcatgaaaattatttttgttctgatgttaacactactgttgatttatataaaacacatcaatcaagatgtagcttctccaagttggaggatcttgtaggtcttcaccacaataaagtacgtccaaattcacatgatgggacattgatacgagtatataaaaaaaaaataagtcttttagttatttaattaaaattttatgaaaattagtttacaaatatatttaaa

SEQ ID NO: 112288 - DNA, 399 bp, Glycine max
taatacgagaagagaaactataacaagatctttttatcacacatatcaaaaacatgagcaagggccacggctccttctttactaataattaagctcaagagtgtcactccttattataatgattaaaaaaaatacacatttctcttatttatatattttattaattattcattcttttttatcttaatgatcatatttcaactataaggaactgacaacatctttttagtagtactataatcacttttgaattgatagattatcttttaggtcttattgagttacataagatgtattttctttctttagtaataaatttcactctcaatacttgaatcactattatgggtctccttaaaatatattgtattaaataagtttaaattagatctaactaaa

SEQ ID NO: 112289 - DNA, 371 bp, Glycine max
  unsure (1)..(371): unsure at all n locations
agctatacgtagtacgtagtgtattttntgtctgtcgacaagcatatattcatcatctctgaaggaaaactgtttaatggttcatacgtgttcggtgcagaactagtagcactctaaaaactacgccgttgtcataggccttttcattgactatagtttaaaaaatgcaataatgaagataagcatctttgactggcgctaagaatttcaagtagaaaagaaaccattacatgtaagcttcggcggttatccataatcaggtcattcttgatttccctcaaacggctcccctcttttacaggattctgaatgtgtttgagtggttcttccggaaaagaatattttggaagttccttatacacgtaaatttc

SEQ ID NO: 112290 - DNA, 422 bp, Glycine max
  unsure (1)..(422): unsure at all n locations
ntctgacatcaacaacctgtttccatgccatcattaacatcaaacaaagctgaagtaattctctcaaaggtgggtagcctctgaatttcagcccattgtaacgcttctccggcgtcgttatcaacttcttgttgcacaggattgatgcttgaaactctctggaaactagaggcatgacttctaaatgaggaccttatgttccttcctatctctgctaactcatttctcagagactctatctcatccgcacctgccagctgtgccatctcaacacaacactaaggggattaaaactcagatatgtgtggaatgcatcatattttgatcctcttctgaacattatatagaaacttccatgctgtgtttgtaagcttgatattggcctctttgatgatgcaatgcatnttgtcatgtgaatgggg

SEQ ID NO: 112291 - DNA, 392 bp, Glycine max
  unsure (1)..(392): unsure at all n locations
tactcagcttcccgatccgacttgaaggatctgnatactgccttcttaaggcaatatcagtataacttcgatatggctcccgatcgcactcaactgcagaatatgttcaaaaaagaggcgaaacctttaaaaaatacgcccagcggtggagggatttggcggcacaagtagctcctccgatggttgagagagagatgatcaccatgatggtagacactctgccagtgttctactatgagaagctagtaggttatatgctatccagcttcgcggacctattgttcgctggggaaagaatcgaagtagggttgaaaagaggaaagtccgattacgtttcctccacgagtgcgaatgccaaaagaatcggggcaacaggggcaaaaagaaaggaa

SEQ ID NO: 112292 - DNA, 428 bp, Glycine max
tactcagcttttatccaggcactctctaggttgtgaagctccttcttctatggcttattccctagtggatggcgcctcctctcacctcttctcctttatcttcccgtgcatcttcatggtgtaaaatcaccattgaaagacctcattgaagctcatagatctatcctccattgaagcttcacaagagagcttacatcaagtggtaatcagaggtgctccttaaacctccattaattttcagctttaccttctcctccattggtgggtcttcatttttctccatgtatctcctcacatgtcttgtgctaattgttgttaacatgattctttagaatttctaccgattaaacttgctatagaagctagatttgattttctatggctcaaatattcttgttcttgttcttgaaccatgaattatgttgagt

SEQ ID NO: 112293 - DNA, 410 bp, Glycine max
cgacaataagcttgtactcgaatgtctgattgagtcccaaatatatcgagacggtcgaaattgaatgtaggatctctgaaccaaattcaaacgacaatagctgtttactcggacgactgagtgagtcccgtaacatagcgagacgctcgaaattgaatgttgaacctctgagacaattcaaacgacaataactttttacgcggatgtctgattgagtctcgtcatatatcgagacgctcaaaattgaatgttgaagccctgagccaattcacacgacaataactttttactcggatgttagattgagtcccgtaatatatcgagacgctcgaaattgaatgttgaacctctgagccaattaaacgacaataactttatactcggatgtctgattgagtctcggcatatat

SEQ ID NO: 112294 - DNA, 438 bp, Glycine max
  unsure (1)..(438): unsure at all n locations
gcaccacanatactcagctgctcctgaatctgttcggatgctgaattcactttcctctngaatcttgaagagttcttcaactgtcctcttgaatcttgaagtgttccttgattctatcttgaacatcttgaactcattcttggattgacctgtgagatttttgtcatcaccttttgttatcatctttggtatcatcaaaacatctttgaatcaatcttgattcatcatgaagctttgcttctacacccgctaggtgggaggctcatgtgctangcttatcttttttcggaaagcattgtggcacattcttgttggttacaaaagtttattgtcataaattacgaataaatactccacttggaacttgtaagaacagtgtttgcttactttatcatgtttgcaattccttagtgagtttgaaattgccattgcacaatt

SEQ ID NO: 112295 - DNA, 430 bp, Glycine max
  unsure (1)..(430): unsure at all n locations
ttattgcttctcgaatactactcttgcttttaattctgggttaatnttaattcccatgaacaattggctcattttattctatactctttttctgcacctccatctctgactataaacttggttatatgaccggttgctattatttctttgtgcaattaccctctggaattggaggtttcacctcattaatggctctttaattcccccttatctcttattggttgttgagattatgtgtatcaattttggttgggaatttcctataaataaatgtctttgctttattatttggtcacgcttcttcttgattcttgttcttcatcaactatccaaaaaatcttcaatcatcactcttaaacactaactttgttcttgatggctaaagatggttaaatagatgatgaagactttgagtctatctggattatgt

SEQ ID NO: 112296 - DNA, 336 bp, Glycine max
ctggccgatatcttgctgtggaacaccttcaaatatatggatatacccaagtctgagatcctcccacatgatgaccccatgttcaattttgttggggaacaggttaggacaaagggttgtatttggctttacaccaagtttaggcatgataggtcattacaaaaaaaactaaagatatgatacatcacagtgcatgctcacacattgtacaacattttcctcggccttccttcgctcaatgtcctcagcatagttgtttcaacccttcacctcacgatgaagttcccgtcgaacagcaagaccattataattgtgcattgccgaccaaaggacaac

SEQ ID NO: 112297 - DNA, 417 bp, Glycine max
  unsure (1)..(417): unsure at all n locations
tctggtgggacatcttgacttgctttccaatctgacattcaccacagattctgccttcttctattttcagattgggaatgcctctaacagcacctttgtcaatgattttcttcatgcctcttaagtgcagatgtccaaatctttgatgccatatattgacttcatcttctttggagactagacatgtggaggagtaactggtttcttgaggtgtccataggtaacagttgtcctttgatctgctgcccttcattaggacttcactcttctcatttgtcaccaagcattctgactttgtgaaggtacattgagtccttcatcacacaactgactgatgctgatcaaattcgcagtcagtcccttcaccagcagtactttgttcagactangaagttcttcatggactagctttcccat

SEQ ID NO: 112298 - DNA, 418 bp, Glycine max
  unsure (1)..(418): unsure at all n locations
ngcttctacaactntaaatgagcgatcacttcatatcctttcatgtcttgacgaagttaccattattttttttcttccttaatgatgaggacatgaccaagagcaagggcaaggatccaattgaaggacttggaggacctatgacaagggctagatcaaggaaagcaaaggaagctcttcaacaagtgttgtccatactatttgaatacaagcccaagtttcaaggagaaaagtccaaggttgtgagttgtatcatgacccaaatggaggaggactaaatggtgccacttcgtctcaattttagagtgttttgtttgtctaaataatggcccaatccatgtaaagttggctgaccaaaaatatgttttgggttaatcaactaaaggggctttagtttggtttagttcaagttgtaata

SEQ ID NO: 112299 - DNA, 431 bp, Glycine max
  unsure (1)..(431): unsure at all n locations
cttgaaaatataatatcttgatttcaaaaatacccattttttctccccctttggcaacatcaaaaaggccaaagtgcataaaataaaacatacatgaataatttgaaaacatacatacaacacaataccaaatgtaagtatataccactagacatatatatcataaaaataattaagtttaacacacataaccataaacaaccaaaagcaagtaaatataatcatcatgttcagtcatactaagcaaatattaaaagaaatactaagtgttcaaatgtcataaaaacatagccaaatacaaggctttagaaacaaaatatagtaataatctaaatctatgaggatggtggtggaagatcaaagcactgatgaacataactaacatcctcctcaagtttggtgatacgtgtgtccatccctgcanatcgtgc

SEQ ID NO: 112300 - DNA, 354 bp, Glycine max
tgttaaagaacttagaagaaatcaagaataatcttgttcgcacatcgttcccatgtatgacatccactccacaaagtttgaagtagaggaaaccttcaatcctattacgcaacgtggcagacaaaagtgggcagataacttgaatggtcattattgtcaatgcggaaggtattccgcgtttcactatccatgttcacacattattgcagcttgtggttacgtgagcatgaactactacccatatatacatggtggttacacaaatgagcacattttccaaaacttactccgcacaaaaggggcctttttgggaatgaagcggctatttctccttctatgacgcatggacactta

SEQ ID NO: 112301 - DNA, 365 bp, Glycine max
  unsure (1)..(365): unsure at all n locations
atactccgcttggacagtctcgatatntaccaatcatggtgtatgtgtgaatgtgaatgggggatcggagctgttaactctcatagttgagtgaggctcacaagagacactagatacctataggcgaaactcttttgagtcataatggaatatcccagtcgtatgctcaaaaaatagtaccttatttcactccactcttatatctctgcttccttgtataataacatatttgggttaacttgcgcaccttagaatcaggtccctaactgtcctcatagctcacatattcacgaagaaaacttcatatatagaaccagtacggctagagaagaatgagcagtccctccataccttagttggtgcac

SEQ ID NO: 112302 - DNA, 435 bp, Glycine max
  unsure (1)..(435): unsure at all n locations
attcacatgtacttccaaggtgtatttgttacctacatcacacacatttccttngctaaattcacatacatgcatactctaagcactttggctatcacaaattgcatacgtgcacatcttggtatttctcatacctatacatacacaaacttcatgatgaatctngactatctacacaataaagtgctacatntcatgccttnttcaaagtgttntactacctaaagccgcatgcaaattgaagtatattttcttttgctttactaaaatgtattcaaattaaaaaggtatttttgtatgtattttcttacataacatgcaaacatattatagatttttgtaaacacttttgactacaaaaatatatgtcatacatncagtatttgctccatacccaagtgtaattgccaaggatttgtcctatctaactcacat

SEQ ID NO: 112303 - DNA, 120 bp, Glycine max
  unsure (1)..(120): unsure at all n locations
atgactctgagttcccgaatgcattttccaacggatatgttcgggtatgtcattgaattgatattttgatttatttattttgtaanggcatgtacttatactgatattnttctctttatc

SEQ ID NO: 112304 - DNA, 287 bp, Glycine max
  unsure (1)..(287): unsure at all n locations
atatgtacttncaaggtgtatntggtatttacatcaaagcattttggggtaccaaaaactgcacatgcgctcatcttggtatttctaatacccatacatatacaaacttcacgatgaatcttgactacctacacaataaggtgctacctttcatgcttnnttttcaagtnttgctacctaaagccacatgcaaattcaagcatattttcctttgctgactaanatngattcaaatagaaggatatattttttgtatatgtntcttacataacatgcacatattatta

SEQ ID NO: 112305 - DNA, 333 bp, Glycine max
ccttaaccactattacttactgacgtaaatctgtacctgttattctgaccttacacagccgtctgtcgagaaaggtgacaccaactttcttacaatttaaaaacactgcaagcgtatcatctctccagctggtaaactcaaaatgctaatccaaagctggtttacctggaattgacctgctagatactactatttgacatataataagttatattttggctgattaggccatatgagtaggcctaaattagatttacctgattaggccaacagtttgataggagttgatcactgctatatatatgggatggaaaatattatggacgcatcata

SEQ ID NO: 112306 - DNA, 426 bp, Glycine max
  unsure (1)..(426): unsure at all n locations
ctcagcttgtattaattcaacgctcgttatacggtactcatcgacttccgagtaaagtaatgggcgttgaattggctgagagcttcagcattcaatttcgagtgtntcgatatattctggggctcaatcggacatccgagtaaaaagatattgctcgttngaattgctcagagcttcagtattcaatttcaagcgtgtcgatatattacgcgactcaatcaaacatcccgagttaaaagttattgtcgtttgaatttgctcagagcatcaacattcaatntcgagcgtgtcgatatattatggggctcaatcagacatccgagttaaaagttattggcgtttgaatttgctcagagcctcacgcattaattttcagcggttcgatatattacgggactcaatcagacatncgactaataaagtatc

SEQ ID NO: 112307 - DNA, 242 bp, Glycine max
  unsure (1)..(242): unsure at all n locations
gatgcctaaatagtggtgtgtgggggtggtagatggtattttcttctgttcggaattgggtgttgatgattttggggtttgacttgtgagaagtgttgctttgtgcctgatgagtcttgaacttatggacacgtggagattgtgntgctgaatattttactttatgttgncttttgtggtgacaggaatcaacaataggggcagcgttcttttcgtaggcactggcaataaatgacgcgacg

SEQ ID NO: 112308 - DNA, 294 bp, Glycine max
  unsure (1)..(294): unsure at all n locations
atgcaacttgtagatactatggcagaaatattacgataannaaaaagtgtttcactatatggcctgaattaatcagaaaggtacaattcctatctatgaatataccttcagaatttataaattataataaagatgttccacnttcatttactatttagcaacttttttcatctaanatctaatggtggcacccttaatcaatgtaggatgtgnttggtttgtgaaaaatatttttgttctcactaataattacaaaaaagttacttagttntaaagaaattattgcanaaatac

SEQ ID NO: 112309 - DNA, 419 bp, Glycine max
  unsure (1)..(419): unsure at all n locations
gcttggtaatcgattacacacatattataatctattaccagagggagatttcagaanatattctcaactgtcacatcttttcatttggttcttgaatggctatcaaaggcctatatatatgtgacttgagacacgaatttgctaagagttttcagaacaaaaagatcttatcctcttcaaaagcaaaatcgttttatcctcttacaaattccttggccaaaacacttgtgattcgataaggaattatttgagtgctcaaattgttcaatctatctctttcaagagagaattcttcttctctgcttctntattctgaanagggattaagaagaccgagggtctcttgtgaaaagaattctaacacaagggaagatgtcctgtgtgctagaacgtgtaaaggaattacaagatagggactc

SEQ ID NO: 112310 - DNA, 224 bp, Glycine max
  unsure (1)..(224): unsure at all n locations
tttacagtttgaccccacaaataacttcactatgcactgacatattattaacaggtattgacggagaactanaacataatggataaagttagaactagatcagtcaaatttgtgggactaagtaaaactgaaaagtcaggatanaaaatataccctaaatgtgctctgatactctgactctaacataaatgtgctatatttcatctagctataatgaagtatat

SEQ ID NO: 112311 - DNA, 493 bp, Glycine max
  unsure (1)..(493): unsure at all n locations
tctgagtcacctgcngcatgcaagctactaagaggttcacttgaggtcttcttcctatgcaatgacgttctctaacgtgaacactntcttttttatttatnnttaatttttatgaatttatctaatgttatggaatgtcttaattngttaatatttattattaaatttcttattatatttaagtgaagaaattaatgatatatgtaaagtgataattatatttgatttagaattaattntacataagccaaatgagtgcaacttgtgcatagtgcataccccctanttcttagttntaataatttaatatttttgtcgacaatcgattgtcttattgtaaanaatcaattntataacataatcgttgatatcaaattgattgtaaanaatatttatcatctccctttttcttttttcaacgtactatattttcacttgttttattcattgattctattttttttcttatttcatctaactgttcttttcctct

SEQ ID NO: 112312 - DNA, 250 bp, Glycine max
catcttacgccatgaagctgtggtctctcctaacgaattttttcgaagcattaatgtggggtattataacatgcttcaaacctcatgaaatatgcgctcatggcatgaagacttataacaccacatgagctgattatatattagcaaaacatgtgagttatcagtgtcatactaactcttgtgagagcgagaatatggctttcaagcatgtttctgagcccttttttgcctctacatgagactgtcttca

SEQ ID NO: 112313 - DNA, 190 bp, Glycine max
aacctttgcattgactctctaaagcaagagaactctatttctgaattggatttagcttaccgttctcagtttgaacaactcttctatgttacaatctgacactttacgcatactgggtattcaaaagggtgctataaacactatggactctaaggttggacgttggaccaacattagactgtcatctcta

SEQ ID NO: 112314 - DNA, 176 bp, Glycine max
  unsure (1)..(176): unsure at all n locations
tgttctgttacaaattcaacttttgtgtagtcaatcctgttctgttacaaattcaacttttgtgtagtcaatcctgtgctgttaaaaattcaaattttgagacaacctgttctgttacaaattcaacttttgtgtagtcaacctgtcctgttanatctcaattcctgtgtcaatct

SEQ ID NO: 112315 - DNA, 193 bp, Glycine max
  unsure (1)..(193): unsure at all n locations
aatgtaatacatcttgcttcttacaatctatttatctgaagagacaacttaactgatttttataactaatgtcaagatgtctaaatgttgatctgcaccattggctttatccttatgtgctnactgatcacatccactatgatttggatttgangaacattgaacttagtttatgtcattactgatttatcat

SEQ ID NO: 112316 - DNA, 503 bp, Glycine max
  unsure (1)..(503): unsure at all n locations
agctnatggcacctatgtacaaacataacagatctggntccatttctgtttttgagggcaacacttcacatgaccatcggcataccaaatctattgaacagcgaatccaaacattaacatatatgattataaacttattcaatcggttatacttttaaaggtaagtgtacgtctaactcacacgaataatattgttttcaataactgtgcaccagaagagtgaataaatgagaatattagaagaataacattttcccttcaactctcacgcaaggcagtaagtcttacagttcactagccagaagcttaaatgctagctcttactgctctcatataccctagaaaatgagtgctacagtcgcgaaaccatcagaaagaaatattangacctatntggtctgcacaatgctatgattttattnctaacaaatcttcgatacagacatacagtaaaacaagtacactttgtataatagtaacacaagtatgaaacagaaatattg

SEQ ID NO: 112317 - DNA, 451 bp, Glycine max
  unsure (1)..(451): unsure at all n locations
agcttgaagcaacatgctcactcatgcgagctgttgctttctccagaagattcctgatgggcccaaggctaaatagcaccccccctaaatagatcagctcacccnctccattnntgagttttggctcgtttcctttcgaaacatcacgaaacattacggatcgcacgacaattggctntaagcagctcaacgtgaccagcaaatatctgcgtgtaacgccatgaaattagggtatgacaaagagtgacatanagcttcaaaagccaacagatgttgtaacgccatganatntcgataactganaagatngttgatgtacttcttatgttatttgattacttgataaatttggattagttgaagtattgtatgtattatccttatgcaacttcttggcatggatattaggttatgtggangttgattggatctgcgtggaactatgtgattc

SEQ ID NO: 112318 - DNA, 213 bp, Glycine max
  unsure (1)..(213): unsure at all n locations
attaagaaagctgattgaagaaaaagactggagaagaatattagaataacagaacttgttttgatgttaaacaaagaagaggaaaaatccttttttgacatgagtcttttgcatcctcttatttgtgagaatgagtntaaataataattaaatttttttataaactttttttcttatttttacaataatattatttaaaattggatattttta

SEQ ID NO: 112319 - DNA, 220 bp, Glycine max
  unsure (1)..(220): unsure at all n locations
gcagctgacattcatntcgagcgttccgatatattactggactcaatcggacactctagtataaagttattgggggtggaatttggtcagagcttcaacattcaatttcgagagttttgatatattatccggactcaatcagacattcgagtaaaaagttattctcgcttgaatntgctcacggcttcggtattcaatttccagcgtcttgatatattac

SEQ ID NO: 112320 - DNA, 217 bp, Glycine max
  unsure (1)..(217): unsure at all n locations
gctcacgnactcncacgtagcccatatactcgtgtctctaacaccaagtcccataatactctaagcttcacaaatgcagcaaaaacatcaaagacagctatccagcacaaacagagcaagagaaacttgtcacaatcaccaaatacagtttttcacgtaaaacacagaacaattgttcatccattcgtaaccgtggatcgactcaactttactggag

SEQ ID NO: 112321 - DNA, 58 bp, Glycine max
agcaaaaaggaaggaattcaatcaaagacaaaagaaaagaattcatcatgaaaaaaag

SEQ ID NO: 112322 - DNA, 489 bp, Glycine max
  unsure (1)..(489): unsure at all n locations
cacacaaagcgcagtcctcttttgtgttgtttcgtaatggtgccttgacctttcctttttccattccgcctctgggcatgctggtgcacagttctcgccaccactattgtgacctttgccgcttttcttatttttctgcctcagtgcatgcttctccttcngcctcaaggtgttcacgggtgaacaatacccgacaatactacgggccttcgttggctgtcgccaagccatgtttattgggctcaacaacaattgaaatcatctttcgtttctattttggttatcacaattgtgacaagcttggcccatatgtaactaatgtaaatcctatttgctcattataaagtaaaggatgagtgtggtgtggtcatnctaaacacacaattacactaaacanttttatatcttataatgtgactttgaatcttaccccaccttcannaagtagctcacaggatgaattgtcttcacttatattctcactctatc

SEQ ID NO: 112323 - DNA, 415 bp, Glycine max
  unsure (1)..(415): unsure at all n locations
agttggaagaaatgagattgactatgtatgaatcttcaacgctgtataaagagagggttaaaacttaccatgatanacagctgctaaagaagaattttcaaccaggacaatatgtgctactattcaattcaaggctgaaattgttccctgngaagctcanatctaaatggtccggaccatttaccatcaacanagtcagaccatatggagcagtagagctttgtgatcctcaatccaaggatccagacagaacatgggtagtgaatggacaaagggtaaagttgtaccatggtggacaaaggttaaagttgtaccattgtggaactattgaaagaataactcactgtctatccttccaagaatcatcacagaactatgcgtcaagctaatgacattaaacaagttcttactggga

SEQ ID NO: 112324 - DNA, 361 bp, Glycine max
  unsure (1)..(361): unsure at all n locations
gaacgactagatgtgagtaataatctttgcatggatctctgaatttataatgaaattattaacgagagcatgatgaaggccatgattgtacatacacaagccttttgaccaaaaagcttaccttanattntaattctatcatttgcaccctttttgagctgaatgagtgtgtcaataaatcaaaccctaaacctaaatgattctctctagataccttgtttagattctacgagagcatatagttcaaggcaaatctaccncaaaatttggtggaatggaaaagaaagcaaatgacaagaataaagtgtgctgatgtaacaaggtcaaaagcatatagttcaatgcaaattcattgggatgc

SEQ ID NO: 112325 - DNA, 410 bp, Glycine max
  unsure (1)..(410): unsure at all n locations
aatttgagccaaattttataacaagttattatatggtattttgtatttgggccctttgtgaccttattacttggtggacctcttnntagtgtgttgagtctttcatgaaggggttagtataaatagcctatatttgactctgagaagactaagactcatcttatcgaaagggataaactcggtgtgttagaacctctctcgctatcgagatcatttctttattcttatcttgagttgctaatcaagtggcaaatccttccttttaactcatcaatcatcatgaattatggcattgttcttcatccctagtctngagtngggtaatctnccatagaattagtaatctttaattaattatccctagaaatgattatccttttgctannatgtagatccatgatgcacaccta

SEQ ID NO: 112326 - DNA, 226 bp, Glycine max
tacatatgttttagatggtctcatgatgtctatagcatacacagtgtctgaggaatgtaaacccatttatttgctatacattggtaatgaatattaatgtttcggctgtgagaacatatctcataaggaacgctgttctccacattacgcagagcactaacggagggaaatttacggctacactacttgtaaactcgcaatattacagaactggttatactagaaa

SEQ ID NO: 112327 - DNA, 358 bp, Glycine max
  unsure (1)..(358): unsure at all n locations
atcctctgagtcacctgcggcatcaagcttatggtaanacaatanggctttgggcttcctcattcatttcattaaaggcttccttaacttcctcaaattcagaatctacctcaatttcttcaatggttgaggagtncatctgtgaatcatccattaagcacacatttgcaatttcttcttcactagaagaagtggaggatattgatgcatntgtttcccaagctatataggacttttnttggtttccatccttcttccctttctttacaacanatatgtntttgnggaaacagacaattcngcttgatgtgcccttacattcaaagcatatgaagggtgtgtggtttccactttcttc

SEQ ID NO: 112328 - DNA, 496 bp, Glycine max
  unsure (1)..(496): unsure at all n locations
atacctctgttananaataatcnnaattgctctctttttacccttaacttacccatgctcatccaattatttctttaaaagaattcattctatatagttaaataatcaacatcccttcaaaaatcataacactgtcatctgaaagtaatttcaaaaattgattaataccatggccacaaccatcgatctatggtgtctntggtcccttcatcgccacgatggcggtggtggtggcagtggtagttgcaacaatctcaataatcttattattcttctaaatagaagcaacaacttccttttgcatatacttctcatcatgcttggcgagaacctntgtggncaaaaaatagcactctatctttctcgccttcttggaaacattctttcgcaacacctncttcttgatcnntctcgtcnnacagtttacgagccctttcacataacagagtgccattccttgagnaaatcagcacgatccctcgtccataccatgatg

SEQ ID NO: 112329 - DNA, 305 bp, Glycine max
  unsure (1)..(305): unsure at all n locations
gtactttggatttggtacgaccatgctctcctgattccagctgggaaattggcgagtggaggaacgcctcggcatttacgcaacaagcataatgtanacctttacagttttaaaagctctatagttgggcctaggctntagagttttcatcttgntaaggctttgtgtctttttgttttgaatttataatacaaggatctttcttcatctgttcctggtctctacccattctcattcatctgcanntgttacttcttttctaaacggcagatcgatgacaagtccncgaaggactaatacctgga

SEQ ID NO: 112330 - DNA, 467 bp, Glycine max
  unsure (1)..(467): unsure at all n locations
aagagaatcttnctgtcatgtttccaattcaacattgaatactgaaggcaggggaaggactacccagaagggtcagaatggtcgaggcagatcaaagtcaagaggggaaggtcagagaaaatttcatagtgacgttacttgctgaattgtgacaagagaggtcactttagcaatcagtgcaaggcaccaaagaagaacaagtcgcacaanaacaagaagcgcgatgatgatgaatccgcanatgcaccaactggtgaactngatgatgcattaatttgcagtttggatagttctgtngattcatggatcatggactcangtgcgtcattccacactanctcctctaaagattattgtctaactatatttttggaaaattggaaaagttatcttgcagatggaanatctcttgacattgttggaagaagtgatatcaacatcaagacctctagtggatccctatggac

SEQ ID NO: 112331 - DNA, 467 bp, Glycine max
  unsure (1)..(467): unsure at all n locations
acctgcggcatgcaagctatctcatgtcagacaccctaatatcagcagttgtaaacaatcacaatntactnggngccaacttaaagtggaattaaacaaggaatatacttaaagtgcataaaaaagntaaataatgctcaaaataggcaatcctagcttanatcttaccctttccttgatgtcacccaaagtcagcaagtacagcttatagaattcctctctgaatgcaaccacaaacctatattaagtttagaaaccaaccagaataagaacattagaatctgtttgatttgtatanaattaagggacaacaagatacatctactatattatagtattttcacttttaaaggactaaagacgaattatcgaccataatngatatattagcattnggatatcactaactcattgtacttagtctgtctctcaacttgcaattacaacttcattgcaactcaacattt

SEQ ID NO: 112332 - DNA, 321 bp, Glycine max
  unsure (1)..(321): unsure at all n locations
atcatgattctttaaaaataaaagataaaaatatttcaattaacaaataagtgactaaaattatgaatttttaaaagtgaagatagatatcttattaaaaanaaggcgactaaccacagattgagaatagagacaaatactttacctatataatttatataatatttaaaatctcaaatgttctcaataatgaaaatacccttctttataatagattatgatagattaagtactagattgttccattgaaatgttcctgccctgagccattacctaccttttgacgtaaatggctggtcagagctatgagtactatgatca

SEQ ID NO: 112333 - DNA, 247 bp, Glycine max
  unsure (1)..(247): unsure at all n locations
agctatgagaatcaaaantgatccaaatatttttggtatgataaaagtaaaaattcatatagaatgagagaattaaannataattaatccatcaatttattactttatatatgtgactgtggacttttctattagatatcaatatttatttattatacttngcaaaaagaagtggtaacatacatatttacatatttaggaagaaactcaatgatgcaatcctacccccctccccaaggacattgga

SEQ ID NO: 112334 - DNA, 313 bp, Glycine max
  unsure (1)..(313): unsure at all n locations
ccttatctcgctcttggtctcattggagacttatattgcttcattacatgactgaatcttgtctgctccatctgtcttacttccccatctggctgttcagtgctctatcgtcggacacctgaggctatattcatattngcctngttaatactcaattgctatacatgtctatgtgctctttggacaattatccacattggattatcagtcacgacacactgtgatgtatatctattcattgctacctanggattggctgcttttagtatatgcttgatcacattttattttttgtttgaatagatagacccat

SEQ ID NO: 112335 - DNA, 517 bp, Glycine max
  unsure (1)..(517): unsure at all n locations
agctntctaggcataccaatgtctacaactntatgctctattctgtccatgatcaaggtttcatcattcatgcaagttgaatatctttcttcaagctttctatagccaccagaaacaacttaattccatttctggaactccagatacgatgtccaaaatgaacacatcctgttggaaaaatttcattgagtttggtgcaacaatggtgttcttcatgattactcatactagttctatcttgaaaaatgctattcttgtnctagagaatggtagtgagataatgactagaagcaagaggattgattctaaagagaatgagggcccctctctaaaaacaacaaatgatgtcctcacttgagaagatgaagctnnctangaagattaagatncctactggtgggtgtgacaatctggggaattctaccttgaattntgtaaacgatcattttgaataatatatatataagattatccggggtatatttatattatatatatatattatatattatatata

SEQ ID NO: 112336 - DNA, 270 bp, Glycine max
  unsure (1)..(270): unsure at all n locations
ttggaatcaactccgatgagtatcaacaatggcttatcaaagatcaaacactcttcacttggttgctatccaccctctccgatggtgtacttcctcgtgtgcttgagtgtagacacgcacatgaagtctgggacaagatccacaaatacttcaactctgtactcaaatctcgtgctcgtcaattgagatctgaactcaagaacacgaagaaactctcaagatccgtcaatgaataccttctgcgcatcanatcgatggtgaactcactcg

SEQ ID NO: 112337 - DNA, 366 bp, Glycine max
accactggctgacttagctgcttagagtatctgtttatgtgcccctactcacaatttataatttacatgtccctattttcacacctaaactcatttaagcaacttacaaaccaggctgcacctagcgcattatttcggaattagccaaagaaaatcttaactgtttgtatactttataaaactcattatggaattaagctacctagtttgaacccaggactattttacctaaattcaaaaatacacatttacgttagcaggagactcaatttgactaaacacttatggctactcaaacacgataggtagatgaagaccctgctgtaactccaatctaatacagataatctaattacttaatgagaa

SEQ ID NO: 112338 - DNA, 386 bp, Glycine max
  unsure (1)..(386): unsure at all n locations
taccccagcattacttatatattctcatgctnttggcaatcaaaacgttacgctctacttctaacaacgtaatgtaaagagtaaaatcgttcacttcaaattctaagattatttccagtctcacttaanatcccatttcatgacactagtgatcaaataaaatcaagcgttacgagtagaatgaaataccaaccacgagtagaaaagacttatcatatatatatccatagggatatataagggtacaaagaatacatcccgtccttaagaanaactaaccgatcattgcncagagcacaagacttacaagagaaatgacgaaggatgtgatccacagtcacaactctacagctcctcggctcacttttcctttctcattctattcc

SEQ ID NO: 112339 - DNA, 319 bp, Glycine max
  unsure (1)..(319): unsure at all n locations
cttcaacatgaatcatgtctccaagggcatcaccactggcagcatctatcatacttctctccatattactgacgccttcattttatattgcaaaataanctattctgaaatctgatggtgggggcaactggcacatagtatnttaaatctaatccagtactcatacaagctctctccactgagtggctaatacatgatatatcctcctgatggctggggtcctgacacagggataatttntctaagatactctcttaaggtcatccacctcgtgatggaccttggagcaaggtaatacagccagtcctttgccactcat

SEQ ID NO: 112340 - DNA, 233 bp, Glycine max
  unsure (1)..(233): unsure at all n locations
ttttaagagataacttatacaaacacattctaattcacagtataatatgtctntctccaatatttcagctttcaggagattgtccctttaaatgctggaaatgtgctggtattagaggataatgagcctgctgcanaatggcttgctttatcaaccaatcactcaatggttcttcagatttggcttctaaaggactataaccgaccgcgtcttttgggggccattgttctcac

SEQ ID NO: 112341 - DNA, 372 bp, Glycine max
  unsure (1)..(372): unsure at all n locations
tatgtttctctaatcatatcatntatcacaatgatgttgataggtatattggtcacataagtcatatctcgatgcgttgcagcatctttgtatctttgaaacaatatcaaataaaagaatttaanaatatttttgtaaagggcttgacgaccttgtcaatgaaagaaaattgaagttttggtctcaccataagtgggaaaacaatacaaaaagtgaaaagaatatatatttctctcttaccaanagtgaaaaaatatgcacagagtgaacatacataattctcattttaatttatccacattanggtgactgctaacatatgatggtaattaattgaatgtaatatgctatttgaataatnntttgctatat

SEQ ID NO: 112342 - DNA, 167 bp, Glycine max
atgatcacccctatccagcagtcagatctcatagtgtctaggttatgaactgtaacatgaggactgccaagtggatattatgtgcacggggacagcaatgtactccttaattatgatggcttcatcataatattcatcctaattcctatatgtgaatcaagtgctat

SEQ ID NO: 112343 - DNA, 291 bp, Glycine max
  unsure (1)..(291): unsure at all n locations
tgttaatactatcattggatgtacacgagtggtgaatctcttacattaccaataaatttattaagaaatatctcctctattacttaaatgagtgataactaatctatcctgtccaaagtatctacatatcntggcaacagcactgcattgatactctaatatttggctagctaggagttgtgaaatcatataatactatgcaaaatattatcangagcagcatactttgaatgattatcaatctaacatggtgaattatttgtatcttaaaaatgtatatatacactactc

SEQ ID NO: 112344 - DNA, 477 bp, Glycine max
  unsure (1)..(477): unsure at all n locations
gataagcctatcggagtcttaaatgcagttctatatgcccataaagcatcatccagtttgagtgaccaatccttcctagtagaggccatagtcttttctaaaatcttcttcaattccctatntgacacttccgcttagccattggtctaagggtgatagggtgatgctaccttgtgtgttacattatattgcttcaacaccttctgtaactgaatatagcagaaatgtgtgcctccatcacttattaaaattctgggtaccccanatcgtgaaaagatgttnttctttagaaacttcactatagtcttggcatcattatgtggggtagccactgcttcaacccatttagacacatagtctgcagctactagaatatanttcatttcaaaggatgaanggaaatggcctacnaaatcaatcccctagtagtcaaagacttcaacctncataatattctatagaagtattcattccttt

SEQ ID NO: 112345 - DNA, 380 bp, Glycine max
  unsure (1)..(380): unsure at all n locations
aaattaataagattatcatatatcatacactatgagtagataacttaaaagttttttaaattgtcaatcataaaaccctttctctcatatttaattaacaacatatatatgactctaccacacaagacgaacacgcgctggagaatcttgtagtaccagcatctcatcctttgatttggagttcaacagcgacttgtcaacagtgaagctagcaccagccttcttattgntcttttcagtagcagaattgacatattccttcacgcagcctatagtacgaaagacaaaactcgtcttttagtttagctgttacttcgtagaattatgagagatgatgataaacgtctattcccaaataacatgggattaggttgaaagag

SEQ ID NO: 112346 - DNA, 457 bp, Glycine max
  unsure (1)..(457): unsure at all n locations
agctngtgcaaatcaaatcactcctacatctcatctctatcatgcantttctntctttacccactcctcancgtttggttttttagggaaaaacaccataactaaacgcgccgcaagggatccctatcgcaccagatccaaatctagaacgatgggtgatcaagaggagacgcaggaacagatgaaagccgacatgtcggctctgaaagaacaaatggcctccatgatggaggccatgttaggtatgaagcagctcatggagaagaacgcggccactgccgccgctgtcagttcggctgccgaagcagacccgactctcttggcaactacgcaccatcctccctcanacatagtaggacggggaagggacacactgnggcacgatggcagccctcacctgngatacaaccgagcggcttacccttatggattgccgcccaactattcaccacccatc

SEQ ID NO: 112347 - DNA, 389 bp, Glycine max
  unsure (1)..(389): unsure at all n locations
ttctaatgactcctctgccgcttccacataaggcatagaggatgggcagctcaccaagatgtcttcctcgcctgatacgatgaccagatgcccttccactacgaatttcaacttttggtggagtgttgagggaacaactcctactgagtggatccacgggcgctccaacagacagctgtanggngggttaatatccattatttgaaggtaactngacangtgtgagggcctatctgtactgngagatcgatctctcccctaacctctcngcgggtgccatcgaaggcacgaaccaccattgaacttggctttaagtgngaggcatngaatggtaatntctccanagtgctcttaggcatcacgttcaaactggaaccattatcgatgag

SEQ ID NO: 112348 - DNA, 283 bp, Glycine max
  unsure (1)..(283): unsure at all n locations
ctcagcaccaaattttcttcaatcaactttganatttctcctcctgggacaaccaattacccttgggagttccacttttagaaccaagtggtatcataccagcatatctagacctcacagagatatataaagcggcatttgaacgtgtttactccttaagagcaattgcatcctatcgttggtgaaaacaacataacaacaccaacaccatggacacgcctattacccatttcagactcaaaatcacctggatgtagatggaaaactctttctggtgtacatg

SEQ ID NO: 112349 - DNA, 362 bp, Glycine max
  unsure (1)..(362): unsure at all n locations
cttaaaacgggactgatccatttacttncaaagtttcatggccttgcaggtgaagacccgcacaaacatctgaaagaattggtgaagacccgcacaaacatctgaaagaattccatattgtctgctccaccatgaaacccccagatgtccaggaagatcacatatttctgaaggcttttcctcattctttagagggaatggcaaatgactggctatattaccttgctccaaggtccatcacgagctgggatgaacctcagagagtattcttagaaaaatttntcccaagcagaccatacgttcctccaccaatctagcagcaacaacaacaacaacaacagccccagaaacaacnaaacagt

SEQ ID NO: 112350 - DNA, 375 bp, Glycine max
  unsure (1)..(375): unsure at all n locations
agcttcaacgctntcttactggtatntctggtntctattaaaactagtttcaacgcgcggtctaactagcatttctttnttctaataagctataactaataataataataaataatagtaatagtaagactattatccatatgtgacaattatccatatgtgacacggaatgcatcttttccactattatccatatgtgacaattatccatatgtgacaattttaaggtgtgtttgatttttggtttggacacttaaacaaacactcatccttcatcgtacgctatacccancgttcacgaatcntaatttctattcattaaaatgtgattcttatgaaaacatttcattcaagcaattaattcaaagctttaaa

SEQ ID NO: 112351 - DNA, 226 bp, Glycine max
ctgtaaacccctgacttgacgttcttgtcttcttatgctgaggaaactgccatcttcagtctgcttacttgaatgctggcttcaactcactcatcttacctaaaagtctaagctcgactaccatttacatttatccacaatctacgttacagatttcctagaatctacatactcagatgttagtaacatctgagcctaacaaccacctgaatttcactcttcaaaa

SEQ ID NO: 112352 - DNA, 334 bp, Glycine max
  unsure (1)..(334): unsure at all n locations
gctggtgccaccgtcaaccgagccggtgccggcatggatgctccattcaccggccacaaatccatggctggcttcctcacgaggaagaccaacaatgacattaccttcatcgctagcaacggtggaagagtacaatgcatgcacgtaagacaactccacacatatatacacacaacaggcaccaaacagattaaaagtcatctaacacatntatatatgctccaaaatgttacttgatttaacactgtagtcataagttacttaaataacatgatagtcataggaaaatgtgcacatgtgcgtgtttgttaactaacctattcatgcaaatact

SEQ ID NO: 112353 - DNA, 159 bp, Glycine max
ctcaatcatggctgttcccacagaaaccacatacttcctcttgtacaacggaagcatgtccgaacatccctttcccaagccaagtaatattcctttttccaagtctatacgttctgactaaacgtactgaaggcctgcgtgacactttcataagggcca

SEQ ID NO: 112354 - DNA, 234 bp, Glycine max
  unsure (1)..(234): unsure at all n locations
aatagaatagtgntttttattttttttttttttgatgaccttccaaaaaacatccctttttgcagggtaatcaggaatgttgctagcctgatcatcaaggcctccctgtggtaataaagtaccgatttaactcaactaaatacactgcggacatgtcccttcctctttctatagaaattattataagtttaaattaatacctcaggaagtcatttttctttaatgcaaaaaatg

SEQ ID NO: 112355 - DNA, 441 bp, Glycine max
  unsure (1)..(441): unsure at all n locations
acaagccaagacttggcaaagagactaaatgctttcaatctagcttttgatgaaaggtacaagaagcaatctaattgggtaatatccgatgagatcttganggaaaatgtatgcaagcattnggtggaaggtattataccaatttacagggcctatgtaagaattatngttgtcaatagaaaatgatgctaaggttgacaagcatatgaaatatagggcgcagagnttgagaacaagatacgtctatgtttcaccgaacagaggaagctagtgcattaacaggcagactgattagaaaatnaacaagtagtcatagtttccttgatctactgctctataatgctggaggataaactaatgtggagtgagaaaatcaatcattacagtgtactacatgtatacatattattttaaaaaatgactcacttgatttatatcttt

SEQ ID NO: 112356 - DNA, 258 bp, Glycine max
agcacgcgctcactatcacggtcaccacttgaaatcttttacagacagagcaaactacacacttcagtaggcaagcaaggactccattctaataataaagatgtttataataatgagttaaaagagaattataataaatagaattatgtataatatgatgaaaataaagattatattgtgataaaaaaaatgcttataaatataatatagacctcttatcgtgcgttaatgcggctcttctatcgtttctctcttaac

SEQ ID NO: 112357 - DNA, 192 bp, Glycine max
ctttctacttgaagtatagggctctgtaacaaactcccaaacaataggatcgatttctttactcaagaatacacttatcgctctcatacagccgaaaattgtgaactcgagaacttctatctgaagctagtttgtttcttcagctacaagttcctgggaactcttttaaacagcctcaatttccctaatcca

SEQ ID NO: 112358 - DNA, 140 bp, Glycine max
tatcatttaaaggaggtttcattgagtgaagagtggtgcgtgctctggtattcattgtggctcgttcaactttctctttctcgcgaaacgcggaagagtgaagaaaagtgcaatatctgcttcagaaaaaaaaagttact

SEQ ID NO: 112359 - DNA, 518 bp, Glycine max
  unsure (1)..(518): unsure at all n locations
tgctcttctaccacctttcctttcttctaccgatatctaggcgtaagcttcataccattccaaaggccttagtcgagctctctagatagagactgactngacttcttcagtgtaatggagtccttgcttacaatanggaactcacaaaattctcatagganggaggaagacatgctaacagaatcattgcagatctttgtcttccatcttgacatcaatgntgcatagctccattagaacataaattagttcatcaggaatgtccttcagtggcataccttcccttattcagaggccaaacaaatgtcctttcaaaagtaacattgtngcatattgatttatcatgaagagtntctcccanttgagccaaaacccccacaatagatattcttcagaaacttcataaagaacctcatcagatagagataagatattagcgaatgcacctttcctcttgaactctagactaactatcactactgaaacgtcttcgacacggtaatccacatcaagatgtt

SEQ ID NO: 112360 - DNA, 489 bp, Glycine max
  unsure (1)..(489): unsure at all n locations
agctngacacaatttctggaatctttcccagtactcatatatagcttctccactaagttatctaatgccttacatgtcttttctgatggcagtggtcctagatgcagggaagaatttctccaagaacaccctcttaaggtcatcccagctgaaaatggacctgngagcaaggtagtatagccaatcttttgtcactccctccagaaaatgaggaaaagcctttagaaagatatgatcttcttggacatccggcggcttcatggtgaaacaaaaaatatggaactccttaagaatgcttatagggatcttcacctgcagaccatgaaactngggcagcaaatgtattatttcagtcttgagaacatatggaacaccctcatcaggatattgaatgccaagctnttcatagtgaaataggtgcagtcatctccctaagagtcctctcatgaggtggagggtgagccatgttctcaatataaaaaatagtag

SEQ ID NO: 112361 - DNA, 364 bp, Glycine max
  unsure (1)..(364): unsure at all n locations
atctgaggatcacttganattagtgagaaaaatcgnttccgtgaagaaaattcaagccgaggcgcttncgtaactcgttcgagacgtatccgtgggtgatntcgtgaagattatccgccatccttcgttcgntcttcgttgttcttcagtcttcaaccgggaagttcccgaaatcaaacctttcaatacattctatgtacccttgggtggtcccatnntgtttgcgtaccctttatttcatttcatttaccttccgtacccccttctgacaagctntagtcatttatttaagtcattctctcgcctaatcaaacaataaaataaatttccactgatcatttgaattgtaacatctgttaatttc

SEQ ID NO: 112362 - DNA, 436 bp, Glycine max
  unsure (1)..(436): unsure at all n locations
agcttctaaagggaaatctcataaananattactaatcttctcctccacctcganaggggggaaaatataanaatgaatcatttacacttatngaataatttattttaaagtcataataaaaagtcataaccttctgaaaatgtatttgaaaataaaaatatatttccaaaaaaacaaaggcttgatatacatcatgacgtcggaactttttgcaacantaaatgacgacatttacatgcacctaatacaatataaatgaaagacttgatatacatcatgtataacatgtaagcaataaggattttggggtgaataaatcacagttaatttgtanatntataccactccaattgtataattacatacctcctagataagaatcatgaactcattggttagactaaatagttaaagctacattcattttcactcatt

SEQ ID NO: 112363 - DNA, 176 bp, Glycine max
ttccaactaagcttcctttttaaacaagaggataactattaagtttaaaaagacagagttcatatgtaataagaccacttgtcatagaatgccattatttcattgactgtaactctttgagttatttctgaaggattttccatgatgactttttgtatgaccttagcggactctat

SEQ ID NO: 112364 - DNA, 318 bp, Glycine max
  unsure (1)..(318): unsure at all n locations
ctgttccttcgcatgtatgggctttcccatcgggactactacgaagctcgcagccacgcgtatggagcatgcccttaacatcgcgtgacttcccggttactgctggatangcatatgagagctgccgtccactcttatcttgcttgccgagtgcagagtacaaccagcgtatgacctgtgcccgtgttccatcatgtaaacactcaccgcaggtactatatgcagtctctgacgctgtaatacgtagcgggacgttcaccacaagcgataacgtatgtctaacttatctaactgagatattgtatactgctatccgtg

SEQ ID NO: 112365 - DNA, 389 bp, Glycine max
  unsure (1)..(389): unsure at all n locations
cacccgtcatatgtggtacttngtgtcgatcagcgatggcgcaagtcaactcttccacttccacaagtcaaacataaacacaccatccccagttgcccacctttaaaattgagctcacgcactccacatagcccttattctcgttcctcttagcaccgggtccccatcaaccccttcaagctttcacaatatacaaacaattcaatttcatttgtcatgaaactaccctaaaccaagaaaatagagtggaggcaaaaaactctgcacaaaactcattcaaattccacagttttccctactcacataccccaataacattctcttcgttccgattcgttaaccatttgatcgccttgaaaatttactggaggttctagtacagaaattac

SEQ ID NO: 112366 - DNA, 273 bp, Glycine max
  unsure (1)..(273): unsure at all n locations
tgatgattttcaccatggagatgcagcggaagataaatgagaagaggtgaaaggaggcgtcaaccactaanggaatagccatagaagaaggagcttcaccaccaagagagtgtcttggataagaagcttatagaggaagcttcaatggaggaaaagaaagagagagaggggggagcatgaaaatgaacgatgaaaagagggagagaagttgaactttgaagtgtgtctcataagacactcattcatcaaagntacaacaagtgttacacatgc

SEQ ID NO: 112367 - DNA, 225 bp, Glycine max
tcatattaaaacactatcattatatgataaaaaaacaccatcttatagatagtttctatgatatacaaagaaattctgattgtatactcatcacaacttttaatttttatttaactctactcatactataatttaataagcttaactaatttgtaacacctttaatgtgcactcttcacatcacacaatctagtggctaaagatccatctcatcatacccataat

SEQ ID NO: 112368 - DNA, 285 bp, Glycine max
tcttcactattatactacttgatattatttgtgatctttcaagattactgattacaacatgcagtatgagtgatagagcgtagaatcagtactgactattttgctactgtcaacatgcccatgacttggttattccactatcaatcaatgagtatcaagaggggtttgtgctatgtattgattgagttatgactccgccattattttgttctagtagatatgatactgcgacttaatatgtgagcattctcttgttcataagaattccaattgtatattgttgta

SEQ ID NO: 112369 - DNA, 398 bp, Glycine max
  unsure (1)..(398): unsure at all n locations
agcttccccttacctaaatagtcctctaggttntcaagtcctttaagaangaagcaaggatgagcttagtgaattctgagtgaacctcctcaacttgtgatctaaggcctgctctttgatcctaggccaacatcaaagaagtctcacaacaagatcctcacacaacccataaaagagctcatgcaaaagagaagatgggctcaagggaccaaaaaagagaggaatttgttactcatctactgaaatcaagcaagggacttctatgattcagagaanacaagctaccattgctcggngattatcatgcaatgcaactntaggggagaaaagttntgagcacaaaaaagagtgaggagaanaaagaagaagatggagatgattttgaagtgttaaatgtt

SEQ ID NO: 112370 - DNA, 273 bp, Glycine max
  unsure (1)..(273): unsure at all n locations
cacaatctcacaacccacacacgggtatatccctcangggaaaccctctctttagccattcccctctttcttgttattagtcatctatcaccttcgtccattaacccctgaagtgaaagtctctcatggttatgagaggctaaactccttttgttggaaagcctgangccaaactcttgtaatataattctttcttatttatctgttaatgcaattctatttctattacttctctatacttttctactattatgggctgatcacccatatact

SEQ ID NO: 112371 - DNA, 258 bp, Glycine max
agcttcttattttttggaggtgaatactctcttttccatggcttattagaagatggtgcctcttctcacctattctcctttatcttccactgcaactccatggctgaaaatcaccattgaaggacctcatcgaagcttaaagatccagcctcatagaagcttctcaagcaagcttccatcaagtggtatcagagcacaagaacttcaagtaggttgctccttaaacctccattaatttttagctttaccttctcctcc

SEQ ID NO: 112372 - DNA, 224 bp, Glycine max
cttgcatttggaatcgcgaaagcctcactccatctttatgatttttacctgacatctgggacaaacaaattaaacgtaacaagataacttattgttgctgtttgaatacctcacccactcaagagtgttacacacttagggctttgtctatgatgaaacactcttggattttatcactctgggtccccttgagttcttatgcagtttaagagatttttgcctca

SEQ ID NO: 112373 - DNA, 256 bp, Glycine max
agcttcaacatcagaccacttccagggtgctggaactacttcacatggacttgatggggcctatgcaagttgaaagccttggaggaaagaggtatgcctatgttgttgtggatgatttctccagatttacctgggtcaactttatcagagaaaaatcagacacctttgaagtattcaaggagttgagtctaagacttcaaagagaaaaagactgtgtgatcaagagaatcaggagtgaccatggcagagagtttga

SEQ ID NO: 112374 - DNA, 357 bp, Glycine max
ttcgccgaccttggtgattcttgactctatctcatggaaacgcgtgtgcacttgtcactccaaagtatcatacctctcaccaacaaatgtttgaagaccatggaccctatccaaaatcttttgaagaatagaggaatcttctgcaccatgtccttcttcatcaacaggtcgagcacccttgtttacccaagaaccatcatgctcattcttattaccaaaggatgcagtgacagcggcacctattcgaaaggatctcttgagtggaacataatgttcagaatcaagagggacgttaaaatggttgatgaagagggtgactatatgtggactttgccttgaagaatttaatcccaatgt

SEQ ID NO: 112375 - DNA, 255 bp, Glycine max
agcttgaagatgtttttaaaactagtctaagtatatttatatttattatattgatttgttgatattattaattttgaaatgtaaaatgtaaaatataatttaattttaaattttgattctgtaaattatttacccatgtatagtgttaaaattaataaattacaattacaagtaacaaattggattgatctagtaagtcttaagtaagctagtttcaagtatgtatttgtgtgtgtgtgtatatatatatatatc

SEQ ID NO: 112376 - DNA, 433 bp, Glycine max
  unsure (1)..(433): unsure at all n locations
gcatcatgtgacactatgaaacccagcttngtatttatcctttaggctcaagtcaccctccctccatttatctttccaaaacttgagtcttgacccatcacccaccttccatctgaaattgttaatgaggctattgttgtgatgttgttgaaaaacaaacctcaagtccttccaccattgagaaaaatgagcactgtccctaccagaacatagggtattccaccctccatatttagatagcaagactctagcccaaagctgattgtggttgtttgccaattcccaaccccatttaccaagcaaggcttcattgaacttggttaggtctttaatccctagccctcctttgctcttgggaagacacacagtgtcccaatttacccatgcaatcctggctgcctcaacaccccctccccatagaaaattcctctgg

SEQ ID NO: 112377 - DNA, 256 bp, Glycine max
agcttagccgaattcagatcgaattgaagttggcttagctcatccttggctagcttagcggaccaaatcagcctcagatgcaagggttgggcgctaagcgcttgagactcacgcttagcgcatgaccaaagatgtgcttagcgcgaggcttgcgcttagcgaaagcactgtttttttctcagaaaaaatgttttctgagttatttttcagtcctttttccaagaaattgaaacccttatgttaaacattcaaagat

SEQ ID NO: 112378 - DNA, 404 bp, Glycine max
  unsure (1)..(404): unsure at all n locations
gtgcggatntggtcttcgccagtgaaaggatctatgtgggtccgaaaagaggcaaatttgatcatcctactacgacgactgaaaaaactggggcaaatgaagagggtgagaaagagggagaaacccatgctgtgactgccattcctatacgaccaagttgtccaccaaacccaacaatgtcattactcagccaataacaaacctcctccttaccccaccacccagttatccacaaaggccatccctaaatcaaccacaaagtctgtctaccgcacttccaatgacgaagaccacctttagcacaaaccaaaaaaaaacaccaacaaaaaggaattttgcagcaaaaagcttgtagggttcaccccagattccgttgtcatatgctaaacttgatcccatatcta

SEQ ID NO: 112379 - DNA, 404 bp, Glycine max
ttgcttgccactaacataattgaagaaatgggttctacgtttgcaaaatgacatgatgtcatcaagaagtctcaggtttgcttaatatttttatcagtatataaaagaatcccagatcttcttgcttctagttatggagcagaaattccctaataaacctaggtttatccagattgtacaattaactaattaagatatttaaaatccctaaatcttatttacagggtgatcgaatcaactaaataaaaactatataactaattacttactaattcacctagctacatagtattagttgtgactagtataattatattttcgaattgaaatgcatatttataattgattactaagttggcgttcaactatttattagagtattgaataatatggctgttgtctat

SEQ ID NO: 112380 - DNA, 242 bp, Glycine max
catacaaaaaggaagctctgataccacttgtgacacaagggggctcatatatcttaaaaagggggggttgaaaaaagatatcccaaactacttccccaattaaaaagctattacactagcttttcaagattataaatacccttaacaatgaacttcttaaatattaattcgaataaaacaatttgaatatgaatataaagcgataataaacaaaggagattaagggaaaacaaagagcaaac

SEQ ID NO: 112381 - DNA, 395 bp, Glycine max
ttgatgttgttattgtagacaatatcacaaattaaacaatatgttggggagagctctgcaaccaaatcctttatagagaacatggaaaaacaatatgttataagcaaaggggaggcacttgtaaagggagttgggttaaggatgtagcaaacaatgaatttctattcttgggctttcattgtatgtgtttgagttgttgtggttagagccggaagagcaaccccaggagacataataactgcactgatgagtattatctttcgtgccatgtaaggaagaaaccaccttcaggattgtttagaatggagaaaatggttaatatttaatgactaagtaacaaaactctccttgtgaattgcaaatctctcacttatgcaacacctgacatgcaaata

SEQ ID NO: 112382 - DNA, 160 bp, Glycine max
agaaagcaaacatgcaattttttttatcacctagaggcccgggaacaaacacgaaaagacctaaaacggggcaccaaacaaagaggaacaaacccaggagggaaaaaaagaaacacccacgcctggaagtagcgcagaaacaccacaaaaaccaacaccg

SEQ ID NO: 112383 - DNA, 253 bp, Glycine max
agcttattctaagatcatagaagtcgtgggtagttttctggaccacaaaatttatgtagccttttgactttttttttttttttccggatgtttaacttatttgtctagttcatagcaatttgtttgtgtaccatgaatattcgatgaatgtgttgtatggactcttcagcaattgacatttatttgttttatttcagttctaaggttgaaaacaaaaacttcgaaaatgacgctacaattgaaagcaatgttg

SEQ ID NO: 112384 - DNA, 398 bp, Glycine max
tagaagggagatataagggggattggttggttaaaaaagaagagaaatgaaaaaaaaccgcgggttctatttctcttgctaacaaaaactaataaattaacagttaacatttacacataaaaaatctaacaagcttagaactttaattttatgtgtcatcacaatcacaattcttataaatattgaaaaattacagagtggccgcaattgtagtcacaaaaggattcctaataaaaccctaaggtatcaccaccacaaactttagtcttttaagccgattaagagactaattattactcttgaatctagttacacttaaaattctatgttcctctctaataattatacactgcaaaaatgaaactcaaatcctctccacaaacattttatatatttag

SEQ ID NO: 112385 - DNA, 281 bp, Glycine max
agcttgtttattatcttagaaaaaatcagagaacaagtctatgtctcgcacatacgtttcgcgatcctctgtatataccactccagacaacgggtgtgggaaggcatcgtgtaaacccttcgaataccttatcaactccaaaccgtgggaggcacaaaagtgggcagttaacttgaatggccattattgtcaacgcggaaagtattatgcgctacactatccatgttcacacattattgcaacttggggttacgtgagcatgaactacttccaatatatag

SEQ ID NO: 112386 - DNA, 394 bp, Glycine max
gggcatagcgtgggaatggaccttctcgcttatccaatatgctggcttagcgagcatccgctaagcgcaacactccagggctgaccgcgaggaagaatccagaagatgaagagtcgcacatgtttgctgagcgcaccgcttcatctctctaagtgcatcgctccagttcatctgctctgagagaaaggcgcgcttagccacaaaaatcactaacgtgcgctaagcggggcatacgtgcgctaagtgcacgagcatgaacaacgccacctatttatgcccgacatcagattttgtgaacggagtttggactgcgatttagagcattgcatgtctaaggtttcttgagagagaaacgcccaagtcctagagagtgctgaaagatattgctgtgtga

SEQ ID NO: 112387 - DNA, 254 bp, Glycine max
agctactctgacttccgtcgtataaatggacgctcttcccttctccatgccttcgtctgtttttcttgcttgtctccttacacgaagcaatttgttgaaactcatttcattttatacatattgttacatctcttataaagacaaaaatttcatgacgttactctttcactttaataactttacgaatatgctttggttttattatttcaaacattcaattttaagacttttatccaataagttaagttataaat

SEQ ID NO: 112388 - DNA, 394 bp, Glycine max
tgttcctcagctagcattgttttgcttaagatcacaaacaggagaattgttgatgttattgcatccaaactgtatttttactattcgtatagctatgaccttacaagagatcttgctgaaattcgggggtgagttaggtgctaatctttggaattttgaatttttggaattatgtgtccaacaacctctttgcattgcactgatttgtcactccctgccatgatgagctgggacaagtatgtttcaaacttacttgagcttttttatataagggcttagtattgcatgatgcccatatagtgttacttagagatttctatcaaaataagttataatagatggctagctgcctttcaggttccagaattgcaacttggaacctccaccaggacac

SEQ ID NO: 112389 - DNA, 249 bp, Glycine max
atcttgactatcctgcaatgcttgcacctatcgaggttaccactctcaacattagacaatacttgtccatacttgggggctccaagaactcgcggccctcttacttgtcaaggattctaccccaaacattagacaatttcccttgatactgaataacctctttcgcccataagccaactcaaaacttggggggcttatgtactatccggggtccacaaaatacatgtgtcaagctacgtggcactctga

SEQ ID NO: 112390 - DNA, 392 bp, Glycine max
  unsure (1)..(392): unsure at all n locations
ntntgttttcgatcttaaagtatttcctcatatgataagtgaaagacaaatctttcaatatatgattagatagtgaagacggatagcctttacaaatttaaacatatatgcttgaacacaagtatcaaaaataatttgaaacatcttaaaaacgtaagtattacaagtaaaatttttagaaaatgatactcaccccttaaggtttgtcaaaatgacagtataaactctaaagtggactaaagattggcacttaacccattaacaaatattaatcattgtaaagtatttgaaagcaaaaaaaaaaaaattgattgtattaatggttgaatacttatatacagggtaattgcctatcaaaaacttatataaaggtatgggtaaaatattttaaa

SEQ ID NO: 112391 - DNA, 249 bp, Glycine max
agctttattttagggcaatttaacaaaatctgtgtatgaaaaggagctcatggctttagtcttagctattcaacactggaggcactatctgttgggcaggccctttgtggtttacactgaccataaaagtttgaaacattttttacaataaagactgacatcacctgatcaacagtgctggttggccaagcttttgggctatcaatttgaggttaaatataagccggggttagagaataaggcggcaga

SEQ ID NO: 112392 - DNA, 388 bp, Glycine max
  unsure (1)..(388): unsure at all n locations
tggggacctgaatgctttgcaaaagtggtgagttggtacgaaaccttngtaaaagtggataaaggtattaaggagctagaaagtctagacacgttaaggattgttgctagagtctcagaagttggaatcgctaatagatgagataaaattaaaaatcaatggataggcgtgttggttaagggttataaaggatacaagataccaaaagatgcaatgcaattgttggaagtgggaaagacatgataactagacaaaggaaggctttttggagagtgacattggcataaaaattgcatccttgggcttggattttgatggagatatggaaggggaagaggaagatgtggttgaacaatataataaccattatcatatggggagcagtgag

SEQ ID NO: 112393 - DNA, 258 bp, Glycine max
agcttgtaggattatggggtacccatcacatgtggtactaggtggcggtcggccgatggtgcacaacaagttttccacattcacaaagcgcgcataaacccaccatcccctgttgcccacctccaactgagctcacgtactcccacgtagcccatatcctcgtttctctcaacatcgggtccccatcaatcctgccaagctttcccaacatccaagtaatacaacattcaaacagcacaaattatcacagccaagcaa

SEQ ID NO: 112394 - DNA, 363 bp, Glycine max
aagctttggctgtggcatcaggttgtgtcctatccaatttttattaaaataaggttctgcgagagctgactcagactcactgtcatagtttcatatcagcatcctcgtaccagtttagcagggttatcgcttatattgctgatctagggccggtcatgacctagcttgacacgcatcatgtatatagcaatcttgatgaaataccgtttcaacctttcatgacgctatcaatctggggacaataaggcttactccaggaattcttgaacatatgcatctataagctcacaaagactatacgtctgttagggctttgagacaacataacgctagccttacgattgtgcgccacatagattgatt

SEQ ID NO: 112395 - DNA, 287 bp, Glycine max
ccagggatccatatcaacctgcatgcatgcaagcttatgggtttataaaagctcaaaaaaagtgataatttcatataaaactatatttccaagaggatcacttagtcattagaaggagaattaaatagtaatacacaaattcactacgtcttttttgcacaaataaaaacttgcttatgatattttattttcaagttattgtatggaaattaaaaatttaattaagagctaggcttttcatcttaattactcagataaaatagataatccaacaaaaaatctctaat

SEQ ID NO: 112396 - DNA, 327 bp, Glycine max
tatagtctacgcatttagaccgcgttttgtgatccgacaagagcgattgatttcttttttaatgaatgacaatgctctgcaaatgaagacataatcccgtaggctttcatgtcacagtttgagcagccacgaacacttacaatgatggacgatccatggagcatgttttgcggagaatctgattgtcctggatccggaggaaagccaccttcctgttatgatttcaagtttatgaaagaaccttctactgcaccatccagtgattgatcacttgttttgatctgctactactgatcacgctggcattgattttgagccagaaaaatt

SEQ ID NO: 112397 - DNA, 258 bp, Glycine max
agcttcttatatctattaaagcttgaagcgtaaccatgttcttaacatcaaagtaagccactttaatgcacacatcatctaagagctaacatcaaagggaaactcgttataacccccaaagtttagaaaagtgcacataagagctttaattaagcatcaatgataaagtaaattaaaactacatggagaggaaaatgggaaagggatgaggtgaaatttaaaactaatcatcctataatatttgtttcaaccgttaga

SEQ ID NO: 112398 - DNA, 393 bp, Glycine max
gctttcttctcttcagtcatctactatctaactgttcttaatggtttgtcctagttagatcagttcagttttttttttccaataaaagagagtctcttcaaaagactcatttatggtatcttcctcgatgcatatcagaataaaagaaaatatatatatcttttgcttgtgtagaagattgccaaatggaaagaaaacatagcatgtcgttagaggagaatccaggtgggcattaggaaagcttcttcaacaataagaatcaaaactactacaaggcttattctaacaggggtgcagctcgtgcatttggaacagttagcggagaatccaggtggacattatgaaagcttcttcaacaataagaatcaaaactactacaaggcttattctaac

SEQ ID NO: 112399 - DNA, 409 bp, Glycine max
  unsure (1)..(409): unsure at all n locations
cttgcggatntggtctntgccagtgaaaggatctatgtgggtctgaaaaaaggcaaatttagtcatcctgcttggacgaatgagaaaactggggcaaatgaagagggtgaggatgaaggagaagcctgtgctgtgactgccattccaatacagccaagtttcccaccaacccaacaatgtcattactcagccaataacaaaccttctccttacccaccgcccagttatccacaaaggccatccctaaaatcaaccacaaagcctacctaccgcacttccaatgacaaacaccacctttagcgtaaaccaaaacaccaaccaagaaatgaattttgcagctagaaagccttagaattcaccccaattctagtgtcctatgctgacttgctcccatatctacttgataatt

SEQ ID NO: 112400 - DNA, 254 bp, Glycine max
agcttgtataattcaccccaattccagtgtcctatgctgacttgctcccatatctacttgataattcaatggtagccataaccctagccaaggttcatcaacctccatttctccgagaatacgactcgaacgcaacgtgtgcttgtcacggagaagccccggggcgttccattgagcatggtagggctctgaagcgtaaggtgcaaggtctaattgatgcgggctggctgaaatttgaggagaattgcgtgtaa

SEQ ID NO: 112401 - DNA, 400 bp, Glycine max
gttgcagatttggtcttcgccagtgaaaggatcaatgtgggtccgaaaagaggcaaatttgatcatcctactaggacgactgagaaaactggggcaaatgaagagggtgagaaagagggagaaacccatgctgtgactgccattcctatacggccaagtttcccaccaacccaacaatgtcattactcagtcaataacaaacctcctccttacccaccacccagttatccacaaagaccatccctaaatcaaccacaaagtctgtctaccgcacttccaatgacgaacaccacctttcgcacaaaccaaaaacaccaaccaaaaaatgaatttttgcagcgagaaagtctgtagaattcaccccgattccgttgtcatatgctaaacttgatcccatatc

SEQ ID NO: 112402 - DNA, 254 bp, Glycine max
agcttgcattaaattctaacgacaataacttttcactcggaagtccgattgagtcccgtcaaacgcttgaaatttaaaaccgaagctcgtagcatatacgaacgacaataactttttattctgaagtccgattgagtccaataacatatcgagatgctcaaaattgaaaacagaagctcgttgcaaattcgaacgacaataacgttttactcggatgttcaattgagtcccgtaatatatcgaggcgctggaaa

SEQ ID NO: 112403 - DNA, 395 bp, Glycine max
  unsure (1)..(395): unsure at all n locations
tttgttttcaattntgagcgtctcgatatgttacgggactcaatcggacttccgagtgaaaagttattgtcgttagaatttgctacgatcttcgattttaaatatcgagcgtctcaatatgttacgggactcaatcagacttccgagtgaaaagttattgtcgttcgaatttgctacgagcttcggttttaaatttcgagcgtctcgatatattacaggactcaatcggacttccgagagaaaagttattgtcgttcaaatttgctacgagcttctgttttaaatttcgagcgtctcgatatattacaggactcaatcggacttccgagtgaaaagttattgtcgttcgaatttgatacgagcttcggttttaaatttcgagcgtgtcgatatat

SEQ ID NO: 112404 - DNA, 252 bp, Glycine max
agctttttttacccgagaagcttcttcacaatagtttcttttagacttcacaccagtttgttccaaacatgaaatttatttttacctaaaactagtcttgcttttgcttactttaattggtgaaatttgttttgcttatgaggtgtttgacaaaatgtttctaacataattaatgtcttttttggtttaattttttagtttcagtttttgtatattgtcccttttttggtataaggctggactaggttgcat

SEQ ID NO: 112405 - DNA, 397 bp, Glycine max
  unsure (1)..(397): unsure at all n locations
ntgttgtaactatatttgctacaaccatatttgttgcaaccagaattgctaaaacaaatgaagaatatatgatccattaatattataaatatgacagaaaaaataaatatgaaaaaaaggtgaaacaaataacaatgtccctaaaagtaataccttaagaatttctaacactagtagtcctaacacttggagtcctaatattagcagtatttaaagctaaacaaaacaactctaaaatttttgaacgattttgattagctcggttcggttttgatcggatctataaatctaaacccgtgacccaatccgtacatgaacgattttgatcggttcaattcggttttgacctaaatacataaatgacccaacccaaactattcggatcggtttgggtcaa

SEQ ID NO: 112406 - DNA, 253 bp, Glycine max
agctttactattttgagaatatccaaggaaaataccttcatctgacttaacatcaaattttcctaaattatcttttccattattcaatacaaaacatttacagccaaagatatgaagatgtgagatgtttggttttatgccattgaacaattcatatggagttttctttaaaatgggtcttattaaagccctatttaaaatgtagcatgcagtgttaacgacttcagcccaaaagtattttggaagaggagta

SEQ ID NO: 112407 - DNA, 111 bp, Glycine max
  unsure (1)..(111): unsure at all n locations
tgtaacgccactggcaatggcatgaatggtgtttctcccctctggcancagcggggcgaggtctgttgaacgcgtggagagacgagagagatccgtaaatgtcggttgact

SEQ ID NO: 112408 - DNA, 254 bp, Glycine max
agcttattttacaacaatgaacagagaaaatgaaatactgaagaagtacatgtagtgggggtgtctcctccacctctagaaacctcacaatcactcaaaatctcatccaaagctccgcaagatggcttcctcatcaagcttagatatctctcagtctctccacaaccaaaactaaaaactaaaaaaaaaacctaaaaactctcttccaaattcgagatttaagcttaaataggcaattctgtcggtggccacat

SEQ ID NO: 112409 - DNA, 393 bp, Glycine max
  unsure (1)..(393): unsure at all n locations
ttctctgcgaggtacgtatgtctactntgtgttctttgtgggacgttgtacctgtgtgcacgatggtagaagtattctacgtttggaaagagcgatgtggttattgcacgattgtttatgtctgctatagttgagtgggtgttcatgttttatagttttttatgctaagctgctacttctgcggattcggctcttctttttttctgtgtgcatcccatacctagcacatgcccacataaacccaatgctcaatgtagcaagaccgttgatttcagttacacttagatgctccacattgacaacatcacaagagaatgtgcatttcatttgacttcaccctcgttctgcgtactggcgagactgtctcatatactctattaaccattgatgatt

SEQ ID NO: 112410 - DNA, 253 bp, Glycine max
tgcttttcatttgagccagcagaggaggagcatacaacctatttcactcaagtcacacccacggaattcaagcacaagagacttgatcattgccatcttgaaagaatgctaaacatgaaaaaaaggaaatatgcaaaagaaaatttgaagaagtttcaaatggaggaatgcaaatctgctagcacactaatgaatcaaaaggagaagttccgaaaagaagaaggtgttgataacattgatgaaggatattatg

SEQ ID NO: 112411 - DNA, 389 bp, Glycine max
tattttaataagctaaagaaaacttacaatatctaaggtcacaagtcatttccataaatccatatacgcttgtataaatgctccctagaagataaatttgaggaacttgtctatttctccttttgtgtgattatagtcttttatctttgaacttttgctgaactataggttatctgcaactcatatgatatggaaccatatttcagaaaaggatgagagactctgcacctaccggcaatgtacttgagcctttaaatgctgccagagaagttgttggggatgttgattcaataagtatgtgattccttatcacagcttctttttcttcttcttctaattaggggttgatctctatttcattctttttgcatatatttattagaagatga

SEQ ID NO: 112412 - DNA, 250 bp, Glycine max
agctttatttgtggccatattgacgtcccttagttcatcatactcttttcagactttgatggctatggacttgaacttctcttcaactacccgggctctttcaagctctgcctttagggcttgtacctcatcactttcttctgaagctttaacctcatcgtctctcacagtctttagatttgggagccaatccaatccttgtgttcggactctcagccacttatgatagccgccgatgatcccattactg

SEQ ID NO: 112413 - DNA, 258 bp, Glycine max
agcttcatgatgttgaatcaagattgattcaaggagttttgatgataacaaagatgatgacaaaaagcccaagagaatgagttcaagattgaatcaagaacactttaagaatcaagaggaaatttgatttcaagattcaagaatcaagtttcaagatttaagtttcaagaatcaagaatcaagaataatcaagttgaagattcaagaatcaagaaaagactcaattaaggtaagtactaaaaagtttttcaaaacatt

SEQ ID NO: 112414 - DNA, 402 bp, Glycine max
  unsure (1)..(402): unsure at all n locations
tgctctaaatttacattgatgtttgtatttatgggaggaggttatatgccatctttgccttaagagtagtgtcccactggtaaaattaactttccaaatgtttgccttcgcaggaatggccccgaggaagcttgcctcaaagaggtccaggaaggacaaggcggccgaaggaactagttccgctccggagtacgacagtcaccgctttatgagcgctgtacaccatcagcgcttcgaagccatcaagggatggtcgtttctccgggagcgacgcgtccagctcatggacgacgagtatactgattttcacgacgaaatatggcgccggcggcgggcatcactggttactcctatggccaagtttgatccagaaatatgccttgagttntatgccaatgcttg

SEQ ID NO: 112415 - DNA, 257 bp, Glycine max
agcttggttaacttcttcttcactacatcaagaatcatcgggttgagtcttctctgtggctgtcttactggtttagccccatcctctaaatttattcgatgtatacatgtggatgggctaataccaggaatgtccaccagggtccagcctatagccttcttatgcttcttgagaactgataacaacttctcctcttgctcaccggctagggagacagatataattactggaaaacttttgctatcatccaagtaagg

SEQ ID NO: 112416 - DNA, 402 bp, Glycine max
tctcagtttcagatgatgcagatgggtttgtagctacctcatgcactcctctaatgactatggcatcatttctggcgctaaactgctgggagttggaggccatcttctcaattaaatttctggcttcagcaggagtcatgtctccatgggctccaccactggcagcatctatcatacttctctccatattactgagtccttcataaaaatattggagaagaagttgttctgaaatctgatggtgggggcaactggcacatagtttcttaaatctctcccagtactcatacaggctctctccactgagttgtctaatacctgagatatccttcctgatggctgtggtcctggaagcagggaaaattttttctaagaatactctcttaaggtcatcccagctcg

SEQ ID NO: 112417 - DNA, 109 bp, Glycine max
agcttttttttttgtggccacaaaggcggcccatagttcaaaatacgatctgaatactttgaaggctatgggctttaacttctcttcaactacccgggctcattcaagc

SEQ ID NO: 112418 - DNA, 396 bp, Glycine max
acatggtatgaaagataattcttaagtagtcatataatcataattccttgtactaatgttgtgttgtaattgataatattcttataattaatttcaaaacaattcaatatatatatatatgtttcattaaatttgctctgtaaccacattttttgttaatctaaaaaacattataacttgaattacttcttaatggataatattgattcatatttcattagtttactcatagtagaactgagataaaattagtaaaagttaaatataattttaattctatatataatatattaaataataaattaatatacaaaataattataagaaaaatgaattaaatagattttaaattgttttaaaaggattatattacattcttttgagataaaaattcat

SEQ ID NO: 112419 - DNA, 246 bp, Glycine max
agcttcatgctttttgttataacagctttacactcttctttggaatttatcttgggattagctccaaagctgctggatgacatcccatctaacatttgggccatatgacccagactaaccgcacggataatcaaggcgagactcccttctcttatggggggacatggtcacttgcataaactgatgtaaagtctcctgcaatttggcggtcctttgaacaaaattaggcccttgacgaggcggcct

SEQ ID NO: 112420 - DNA, 256 bp, Glycine max
gcagcagcaagcatactttggtcccccccaacgaggagaaaaaaagaaaagaccgacccaagggtgccataatgtgaaaaaaaaaccaccaaagaccataagcagaacaaaacgcccgcgtacgataggagagctgcttaccgcaggaacaaggagggacctagaaggtaacgccagaaccattgcaaaaccaacaacgtatccatatattgaggcaactcagatcttcaaaacggaggctatgactttctaaaac

SEQ ID NO: 112421 - DNA, 252 bp, Glycine max
agcttttattgtttgagttggttataggatctcaatcttcaatttcagtcttaatcatacttaaactccttctcacctcttcccaatatgtattatgccaaaatcaaacctaagttttctcccgcaaactcaacagtgttttgccaattgagcaacggagagttacacccactgcattaaattttagagtttaatgtacatatataacagttgatgaataaaaaacattcctttgaatgttaacaagatata

SEQ ID NO: 112422 - DNA, 401 bp, Glycine max
cgactctaagaatactaagctggagatgatggatttatgtaacatctttgtcaattctgttaaagtcagttatgtcgatgtacctacttgccatttttatgtagttacttatttctaccgaaaattggacatgttctcttctaaataaattacatatgcacaacttgttaaatacaataaattcgtatattcactaaagataaagacaattaattcatatttttactaatgattaatacaataagtcaaatactataactaattagtcagtctcaacatagacatatagtgaacaagttaattgaaaatattggcattaatacatcccaaccattatcaacagtcttctctgtcatgccctcctctgtgtcctccccgtaccctattattgttacaggaac

SEQ ID NO: 112423 - DNA, 168 bp, Glycine max
  unsure (1)..(168): unsure at all n locations
gtttgggggtgaaaagtggttgaaaataaaaatttagtggnnaaatttggttaaaaagttttttaaaaatgtaaattattaagcctaggtataggatggctatatttaatggggatgttattaaaggctctacaatcagaacacatgcgccatgtcccatccttttta

SEQ ID NO: 112424 - DNA, 335 bp, Glycine max
gaaggcatgtaacccaccatcttctcatattttaacattggtaacgcgtctactatcagtgttatcatctccctttccatcatcgggggcgctacttgagctaccagatccctccaccattgggagtattctttgaaagattcatgctccctctttaatcatttatgccattacaccttatctggagtcttatgacaattgaactcatactacctaatgaatgaaaccatacggtctttccataaacggacctggggatgctttagatcggtgtaccatgtgatggatgtcttcttcatctattattgtcaacatgcccaaaatgttatattttt

SEQ ID NO: 112425 - DNA, 250 bp, Glycine max
agctttctaaagtttgtttcaaaactttgtttttctgcaagtggaaattctgcagaaaacaaaagtgtgctatctttcatcccttcttcctcttgacaaaagattcaaaggactaaccgcctgagaattcttttgattctcccttccccctcttggcaaaagattcaaaggactaaccgcctgagaattcttttgattcttccctttccttttaaacaaaagaattcaaaggactaaccgcctgagatat

SEQ ID NO: 112426 - DNA, 250 bp, Glycine max
tttttttgttaagtggctaatgaaataaaactattaagcttgtaatatataagggtcgcgtgatagttgctatggccgaattaatattttaaatattttaacttttgtaattaataattaaatgtatttaattaatattatatgtaataaaatatatataaatcatcttttagtattcatcttgtaaacaatatatcattttgtgagttttttgaatacaattatgttatgcataagtagtgattatatg

SEQ ID NO: 112427 - DNA, 300 bp, Glycine max
tggcatgcaagtctttgtatctttcatggttggcctcccccctatcctcttaacaattaaggaataacgaaaaaggatttggaaacttttacaccatcaaattggctcatctaatgggagctgggtacctatttaaacaaggggtgggttgagaacaaattacacgagaagaaaaaaggattggaaattttttaatgtaaaagggggaaggtgtgtaatttgctttcaacacaatactaggggagagaaatacacgttatatcttttcaaacttctagcttcctttgtgttgggaaaaaa

SEQ ID NO: 112428 - DNA, 329 bp, Glycine max
gaatactcaagcgttgatacttactgtttatgcgattaccacattctgcccaactacaaggccatttattccagtatgtttattgatggaatttgtgcgaaaaacatccaatagccccatatatggtccatacatccatcctgccccataaaacaaaagcaaaatagtgaatcgtcacagtgattaatcacatctcaagtgttgtacccattaaaggtcaaaaagcataccaatagccataacctcaatcctaatgtgtgtgacaagtggctttggtctaactctagttgtgtgcccagcatattccattaacaatagaagtgccgcaa

SEQ ID NO: 112429 - DNA, 256 bp, Glycine max
agcttaactttttcaaacatggcaagttcaacatcctttcaacaaatttcttcacaaataactatcatgaagcagaaacctagcaaaactacccatcatatctcccaaaacccaatacccacgaaaatcaagtgagaaagaagtctacccaaacctgaaatttcaaggttccacacgtagagatgcgcttcacgactccgaaaatgccttcctttcgcgatttggagcagaaatgggcaccaaaggttggagcttt

SEQ ID NO: 112430 - DNA, 399 bp, Glycine max
  unsure (1)..(399): unsure at all n locations
ttgcaactnttcgtccctggcacaattgtcaagattcaaactattcctgtactggacgagttcaaccaaccaatcccaaacaaggtcatattccatcgactttttggtcatttaaggcatgcattgatgcgtttgcattttgtaaacccattgtgcaaatcgatggaacatggctatatggaagatacaaagggacgttgatagttgcaattgcacaagatggcgctaacaacatatttccattggcatttgccattgttgagggtgagacagtaaatgggtgacactttttttttgtgaaacttgagaacacatgtgacaccacaacatggtatatggttaatctctaacacgcgcgagtcaatcaaaactgctttcatacaacctgatagtgggttg

SEQ ID NO: 112431 - DNA, 257 bp, Glycine max
agcttccatcatttggtaatcagagcacaagaggttcaagtaggtgctccttaaacctccattaattttttgctttaccttctcttccattgttttttcttcattttttctccatgtatcccctcaaatttcttgttctaaatgttgttaacatgattctttagagttttcaccgattaaacttgctatagaagctagattttattttctatggttcaaatttcttgctcttattcttgaaccatgaattgtgttgg

SEQ ID NO: 112432 - DNA, 403 bp, Glycine max
tgcctaattaacctgaaattgagagaaaatgattattaaactcacaaaatagaattattaagtatttattacctatacttaatagaaaatacttataacactacaaaataaccataaattggaagagtttgatacaatttacacacattttatacacaaaatttagtcgtattcaccgactaatagtttacacacctgttcatagtaaacacatatcttttcgcactagacacctattcactgaaatagctttaccaagtgacacaagttccccgagagtttgatactcggttcttaccgttttatactatttgcgtgatccggtgcacttgccaaaagcgaacacatacactatttcttggattctcgtagctagataaggaaatcatgctactctcaccac

SEQ ID NO: 112433 - DNA, 255 bp, Glycine max
agcttgccgcccagctcgcccaggcgagcaaggttgcttcctccagaagcaacagccttctggaggactcttctggagggcccaagtgggcctggttgctatttgcacccccatttttactaaatgcacccccttttctattttttgtaattctttttccgtaacgttacgaaactttacgaatttcgtaacgatacttattttctttccgcaaggttacgaatccttacggattatgtatttactcttttttag

SEQ ID NO: 112434 - DNA, 395 bp, Glycine max
tctttgggaccttgaacaagcaatcaactcctctttcagaaccatgctatgtgctcgcgactggtccctttcttcccttcgcaacttgagttcattattgctaccccatagagctccgcgaaatttgttccggccatactcttccttgcgagccctcttggtttcttgttcaagggctcttgcggtaattgcattctcttcccgtaacccggcacactccttccgaacgtgtgtagcagccaacttgaacttctccttggcgagttttgcctttcctaactcgcttttgagagcttggacttcttcgtcctcttccggtgcttcaaaattctcttcgctgacgacttttaacttggcgagccaatctaaacctcgtatgcgaactttcagccatt

SEQ ID NO: 112435 - DNA, 419 bp, Glycine max
  unsure (1)..(419): unsure at all n locations
tgacactatangaaactcacagcttcaagttgaactcattatatatcacatggttattttaggctcctccttaataaagccgtcagcctgatattaaagatctttgtaggctatcaaacaacttctatgaatgaggcccacgatgagcatagcattacccttacatgtgacttcattgaaagaggcttcaaggacactggtgtctcgacaggactaacaaccttccacttcctaggtcctacatcgaagttcgtcgcattcgttgagagaaagcacaccattaattcttatacactccacccatcttctactctttaataggggaagaagatcaatcttcaacgttctcaaaagcaaggaatattcaactaccatagcttcacttaactgggatatctctaaatatctttcactaaata

SEQ ID NO: 112436 - DNA, 255 bp, Glycine max
agcttttgttaaaaatattgaaatattattctcaattcaaaaaataatttttattcatcataacggcaatcttattttttttttcttattctttcatttaacattaacttttcatttatttatttgaaatatggtaagctcacaataggaatctgactccaagatattgtaacacagtttgggtatagatccagtatatatcgtttcccaagtcaggtctaattcttgttgaaaaacattaaaacaaccgtatcc

SEQ ID NO: 112437 - DNA, 399 bp, Glycine max
  unsure (1)..(399): unsure at all n locations
nttggttcagaactgctttcgaagatggcgtgttataaaacactttgtcaaaaacgggtcatgatcacttgatgatttttagtgagtccatagaaatttctaagttatgtccatccgaccagtagagttaggctcacgatcttggttgtacgtaacaaagggcatattgttattattgtctaacagatgtcaaatatgttctagttcatccttccatcttatagcaaatgatctactgacttcatcctaaggctacatttaacaagcaaactaatacaagcgaatgtattatatcacatcatgtgtatttgagaatagtcttgaaatttataacttgatccataatatgaattctattgaaaatttcctctattttttgtgctaatcttcatcattatt

SEQ ID NO: 112438 - DNA, 254 bp, Glycine max
agctttctttttatactcatttcataacggcacttaaaattttttcagttggatggaaaggctacttgtgttttactgatttcatatggcttatactcatttcatatgaaaattaaaaaatatctagaaattttgttaatgaaagtccgatgacattttaaatccaatgtacatcattccacaggaaacaaagctattgatataaggagtaagcactacatagtataacctaggatacaaagctattgatatta

SEQ ID NO: 112439 - DNA, 397 bp, Glycine max
tattatttgtcatccaactaattcttcttttaccaagttgactcattttaaaataaaatgatacctttagactcaaattgtgacttcataccgaagtccacaatcaaattaaatctcatatcttacttaaatcattaagtataaaataatttgtaccaacaattttttatttatttaaatcttttaaaattacagaaaactagacatgattttttaaaaagtattacagataaaaaagtggaagggaatattttaagatattatttgttactaattatattattttttcagtagttattatagacaattaatgatgcattacaatatcaataaatatttgtgtaaaactgtgtatactcgtaatatatattatatatagcagctaaattatttacta

SEQ ID NO: 112440 - DNA, 387 bp, Glycine max
ttggttaacctcgggaatcggtattttattgccatacgaattgcatgagaactaacattgggggggaaatcgatactagcgaatcataatctctcgccacttttaatatcacttaaatcactctgttgcaatagttcatgcgtgctctcttaaaatcaaaaaccacaacaatacttcaatcttcatttaattatctctattgcacagcctaataatcgtgactattttgggactacaactggtctttaatgtacgatattccgacttaggaccatgatactactatgtagggtacacttacccttgcgcgagtattacttttacgcatcaagtctctaacgccattgctaaggacttgttgcacagatttcctgagtaccttaactt

SEQ ID NO: 112441 - DNA, 349 bp, Glycine max
tataagaaacatgatggtgattatcattcattttgacacttctcactctgcattatggcataatgcaaagctaggatcccctttattctgactactccctaactagtactgctgaatcctcgtaaattgcaatagcgtggaggaagaaccattgttacaacattatcttggatcaaatggttagtaggagaggtaaaacacctacatggccaagacaccattggcaacagcatcaatcttcaatcaccattcacattgctgagcttaaacttgtgtagctcacactctaatgccttgacaatctctgctttctctgcacgaagtacgggaaaatctacatggaacgatt

SEQ ID NO: 112442 - DNA, 254 bp, Glycine max
agcttgccacccttctcgcccaggcgagcaaggttgcttcctccagaagcaacagccttctggagggcccaagtgggcctggttgctatttgcacccccatttttactaaacacaccccctgcccactttttttggtgattcttttttcgtaaagttacggaaacttacgaatttcgcaacgatacttgttttctttccgtaatgttacggaaccttgcggattacataatcatcccttttttgacttacggaa

SEQ ID NO: 112443 - DNA, 388 bp, Glycine max
tattaagatactaagattatgaacgatgaaatcctatcctatgttttcttaaattaaatcaagtcgttattattttcataatttacgtatttccgacgcactaaatttcgttatttttgtatttcccgtatttctgttatttctgtcatttccattatttttgtaaatccgctatttttacttttcttttactttaaaggtgcctttagttaatcaaaccaaaaccaatgacatttgattaaatttgtacataactattaaactgataacctttatccaaatgaattaagtaaactcaagttcttgtggagacgaactcttttataaatgtgaaacctacaatgtcaattggtacgcttgtcaaaagtcttaacaacgtcatggcgct

SEQ ID NO: 112444 - DNA, 254 bp, Glycine max
catcttaattttctcaaccaacccaggcctgaaagctcacaaaacaaccatcactaaggtcacttacgaactcaaaaattgaactgaatgccccacaccaaaatagtctacatacaggcccacaaaagacacaacatgaaaaacagcgaaagttaaaaacaatgcacacaaacaaccctctatgcaacaaataaaggaacataactgtacaaaatatataaccacgaaatcaatagtccggaatacacccgaat

SEQ ID NO: 112445 - DNA, 390 bp, Glycine max
tgatcttgaactaattttgaagcattgcttgtttgttgaagtcaccttgtattaatcttgaagcaatgcttaacctttgaatgttcgttgaagtaatttttgaacgcacccttgctttattattctttgacatcatcaaaatcatgtattcatacattcacataacgagttttacgttggctgtcaaaggctcagcacaaccctctttatttacttgggcttggaaccagctttgataccataaacttcgtaccccattgcccagaggctcttcgctatgcgaagatatgggggagggatattggacgcaaccttatccttgcatatgcaaagaggctgttctcggaaccagctatgataccttatgtagagtttctttgaaatgaaaca

SEQ ID NO: 112446 - DNA, 251 bp, Glycine max
agctttgccaatattagtctcaagctaattaattttatacaattaattaacgtggaatgatgtggcagggtcctcgttcaattcctttgcagctacgtaactcttcctctctatgctctcgtgacacaggtatcaattcattccacacataacttgttgtttatttaatcttttcatttcaattttttattataaaattttcatatttattcatcaaagtaatcatatacagcgtttattaactatcacta

SEQ ID NO: 112447 - DNA, 257 bp, Glycine max
agcttgccgcccagctcgcccaggcgagcaaggttgcttcctccaaaagcaacagccttttggttgctatttgcacccctctttttactaaatgcacccccctatctattttttttgtaattctttttctgtaacgttacgaaactttacgaatttcgtaacgatacttattttctttccgcaaggttacgaatccttacggattatgtatttactcttttttagctttcgaagaagttacggaaactcacggattg

SEQ ID NO: 112448 - DNA, 422 bp, Glycine max
acaccatagagaactcaagcttcttaacttgataaagtcttcttgctagagcggcttagtgattatgtcacctacttggtcttgagacttcacatattctgcaatgtacatcctttcttgctatgcactcccttatgtagtggtaacgagtattaatatgtttgctttgatcatggaacactggattcttagcttgaataatggctggcttattatccacaaagatcttggaaggcttttcttgtgacatgcctaactattttaacaaattcttgagcaagactgcatggcaaacacatgaagtagtagctatgtattctgccttataagttgaaagagttattattggctacttttttgacatccaagtgaacgttgaattccccatgaaaaacacaaattcactggtacttatccaatca

SEQ ID NO: 112449 - DNA, 256 bp, Glycine max
agctttagagaaagaacaaaatggatgacataaacaaattcaaataattaattagacaagttagagattcaagttgtgaacctgtagatgtgcagtacgcagatctgctccacagaagctagagtctactaagcaagcatctgcagaatagcagtttcaaacaaactaacttcattcccaagtatactgtttaatatatcaacacaaacaaatgcatgatgcacttctcattacatttcagtgtaaccaagaaaat

SEQ ID NO: 112450 - DNA, 400 bp, Glycine max
tgtcagggccccagccgggacaagtgttgtccgggctgcttctatcaagttgtctaggatggacatgctttttgtattacaagcaaagtcagacgtgtcaagtgaaaggagtccctaattttgacaactctaccattttctaacttttggagaatgcattaaaggaaaatgttctcgtttttccttttgctacaggcgaatgttgcgcacgggcgttacttttgcatacgtgtcactcgtggaatgggcacgtactggagacacggtacgtgggtgagtggagctccatcgtggtgcaaaatttttgggcatcatttcagctcctgccagttactgaagggttgcacctccactttaaatggagtgtacatttggttttggatcaccgtcacttttgaat

SEQ ID NO: 112451 - DNA, 255 bp, Glycine max
agcttgactttttttttacgtgcaagacccttgtgatgaaaggtggtgcgtggttttgcaaggcaaaacaattggtgttaatgtaaaagatgatgattcatacatggacacctatgttagtcctttgaccgctcaaatcactcctaacattgaccgataaaaataagctgtcaactttcatgctaatcgaaatgatcatgatgaaggagaattgattaacatcgtctaatgtaattttctacagagacagaggtt

SEQ ID NO: 112452 - DNA, 402 bp, Glycine max
  unsure (1)..(402): unsure at all n locations
ngataggttcaggtccaggtgctgctactggtggaggcactttgaattggntgtcagacctcaaggtgatgacactcacattttttggattctgcacagtttgtgaagacaatttgtcagaatnttgggactgagcttggttcaactgagtagccatctgccccatctgatttgtcagactctgaatggaggctcttgtctctttctaaaattgcatattctggattgtcatttgtctcactaactcttctaaggaaggttgagaaggtgcctcagttacttgttgtctttgttgttgttgttgttgttgttgttgttgcattggaggaggaacatatggcttgcttggactagcagcattctggaatgtacggacaggctgttgttgttgtggacgacttg

SEQ ID NO: 112453 - DNA, 251 bp, Glycine max
agctttttttctctggctcatcttggtggtgaagctccttcttccatggcttattccctaatgggtggcgcctcctctcacctcttctcatttgtcttccgctgcatctccatggtggaaaatcaccattaaaggacctcattgaagctcaaagatccagcctccatagaatccccacaagcaagcttccatcaaaactatcatataaattttagtcatgatagtcaccaagaattaaaggattggttggg

SEQ ID NO: 112454 - DNA, 403 bp, Glycine max
  unsure (1)..(403): unsure at all n locations
ntgccaggcttcaggtagattctcttgcttcctttgcatattatttccattgcctctaatgtattaatccgtcttcatgggagagaaataccttcataagaaagcacttatggattggttccatgtagtgatgttgttctcaggtagtgaacacaaccagtcttatgccttcctattgaaagggaaaggaaaaacatagagtgtgatgtactttgtcagtgcacagttatgtctcatcgtattggtcaacttgatgaactttcttaagtgttgcatagaatctgcatggatggtgccactaaacgggttgttccctagcatatgtagaaacccatgcttgaagtcaaatgtgactcccttagttagatcaggcttccttcaaggtagtagtgaggtagtccat

SEQ ID NO: 112455 - DNA, 254 bp, Glycine max
agctttttttctattttcctataaatagggggagaagtgaaggggaaaaatgttcagccctcctggtaattcgagatcacttgagattagtgaaaaaaatcatttccgtgaagaaaatccaagccgaggcgcttccgtaacgtttccgtgggtgattttgcgaagattttcgaccattcttcaacgttcttctttcgttcttcgttgttcttcggtcttcaaccagtaagttcccgaaataaaacttttcaatt

SEQ ID NO: 112456 - DNA, 397 bp, Glycine max
  unsure (1)..(397): unsure at all n locations
ntgtccgcaaaaatcactaaaaaccgttttaatgtccaactccttaaacagtcttctttgcttttatcggttaacatggaccgttcaaaagcataaaatcaagacgtaactttaccgcttttgcaagaactacgtaggtctgattttctcatcgcaattgaggatacgtaagagcaaaagccccgcttttgtcgaccaccccaagagatcgttaatggtccaatgccttaacgttcctctcctttcaaaaaccaagagatcattaatgatccaatgccttaacgtttctctctcctttcaaaaccaagagatcattaatggtccaacgccttaacgtttctctcctttcaaaagaatcaaaagatagtttaatggtccaatgcctaaaacgactttt

SEQ ID NO: 112457 - DNA, 252 bp, Glycine max
agcttaaatttaatctagtaacattaagaaggataagttttaattattcaaggtacattaataattaattcaaacccccttcttaattattctgaggccacttgatccaactcttaacaattttgcgtgatatctctcttctccttctatcatgtgaactttcctatttgaatagaatttcttgaatccttcttaacaagatagaaccccattattgaacaacatctcatttctcatcctccataaactcca

SEQ ID NO: 112458 - DNA, 397 bp, Glycine max
tgtccttggtttagacatgattgatacatgatttgggacttgtaggattcaatttgggaaaaattggatgagggaaagtgtgatttcgaaaatctgcacttatgcagaattttgctgtcaaataggtgcagcagaattttggctttgtgcagaaaatgttatgtatttgctggttgtggaaagagtagtacagattgggctctggaagttttctagcagatcccaacggtcataatgtagatttatgtgctagagacttctagtaaaattttcgagtcgatccaacggttaacgaattggaacgaagagaatgttactggggtatttgtatacgaagagaatgtgttgtgggcagagttttctgcctttgcctattttgcttggttttgttagttca

SEQ ID NO: 112459 - DNA, 251 bp, Glycine max
agcttcaagaaaaagatggcctcagcaaattccttatttccagaagggaattctatcaatagacctccaatctttaatggagagggttaccactactggaaaacccgaatgcaaatttttattgaggcgatagatctaaatatctgggaagccatagaaatagggccttatatacccaccacagtagaaagagtttcaatagatggtagttcatcaagtgaaagcataaccatagaaaaacctagagatag

SEQ ID NO: 112460 - DNA, 399 bp, Glycine max
tggtgttgaacctgaaaaggaaataattgtacgttgcaaggaccaattcttctgaaatcaaacatgttgtaaggtgaaagcacccaaatagattttagtaaagttatttgaaacattttaaatcactgttcaagagtaatgatcaaagcactaattcctccttttttgctttcgtacaacctcactctaaaagatatgcttactaagtttctaatatcaaaatttttgtcttcattaattcctaactatagctttcccatctaaagcttttaacttgacgcccaagtatcctccaattagattatagtcttgcctcttgtgtccttcaaaattgtcttatgctataattacaaacaagttaatacaaatggtgatattgatcatatatataaaaccttg

SEQ ID NO: 112461 - DNA, 251 bp, Glycine max
agcttcaacattcaactccgagcgtctcgttatattatacgactcaattagacatccgagtaaaaagttattgtcgtttgaatttgctcagagattcaacattcaatttcgagcgtctcgatatatgacgggactcaatcagacatctgagtaaaaagatattgtcgtcttaattggctgagagcttctacattcaatttcgagcgtctcgatatatgacgggactcaatcaggcatccgagtaaaaagtt

SEQ ID NO: 112462 - DNA, 397 bp, Glycine max
tgccttgccccttgatatatttgagggactcatggtcactatgaatgacaaattccttgggataaaggtagtgttgccatgttttcaaagcccgtactaagacatacaattccttatcataagttgaatagttaaaggtaggaccacttaacttttcactaaaataagcaattggatggccttcttgcatcaacacaccgtataactccttaaaattttatttatgtgcttgtatctctttaattatagttgtctttattttatgcagatttcttaaattataattataattattgttatgctttgttcttatttaattaattacgtgccatttgattgtatatggctaagattaaaaggatgatccagtttcgaaagaaggatgcagaaagtattt

SEQ ID NO: 112463 - DNA, 251 bp, Glycine max
agcttgcttagctagatctacagattataaatacattcttcaacaagaaaaacacaaatttcacctatctttctctctctctctaaacttcgtccaaaaaccctagaaactcctcttccactatccacgaccaccggtggccaccacaagccgtcgttgggttccgctagatcatcgcatggagaggaacacttcaatcagagtggaatcctcaaaatccacctcaaggattaggtagaaaaacaagcttt

SEQ ID NO: 112464 - DNA, 399 bp, Glycine max
  unsure (1)..(399): unsure at all n locations
tcctcggggccattcctgcgaaggcaaacatttggaaagttagttttaccaagaaatgctacccttaaaacaaaaatggcatacaacctcctccaataaatacaaacatcaatgtaaatttagagcaagcttatgcgcatacttctttacgaacgttcacttgcacaagacattcttataactaagaaaaatgcacccatatacaatcaaggcaccttcgttaccaagattatttacatgtacttccaaggtgtatttgttacctacatcacatgcacttccttggctaaatntacatacatgcatactcaaagcatttggggtaccaaatattgcacatgtgcacattccggtatttctaatatttacgcatatacaaactttgtgatgaatcttggc

SEQ ID NO: 112465 - DNA, 251 bp, Glycine max
agctttgaatgctctattcaaaggagttgacaagaatatcttcagactgatcaacacatgcacagtggccaaggatgcatgggagatcctgaaaacctctcatgaaggaacctccaaagtgaagatgtccagattgcagctgttggctacaaaattcgaaaatctgaagatgaaggaggaagaatgtattcatgacttccacatgaacattcttgaaattgccaatgcctgcactgccttgggagaaagga

SEQ ID NO: 112466 - DNA, 393 bp, Glycine max
tctagccaaatggacatatctccccatcctctctaccagttttctatctacattttaagcacacatatatctcaaaacatcattattgaaccctaaatcaacatgggcagttttgcttacattaaacatgtcaagtttagcataattacaataatttccttcacaaacaactaccctaaagcaataacctagtagaactacccattatagctcccaagaacccaacacctgttggatcgagtggcctcaaaataattaagaagggggggttgaattaattattcctaaacctttactaattaaaaatttactcttttaaggcttttacttatgttgttaagggaataaggagtagaagagaaacttaacagaaagtaaaagcgggaattaaat

SEQ ID NO: 112467 - DNA, 248 bp, Glycine max
agctttgatgactaaaataaaaaaatagtcagatttcttgagagattttcggtgacaagggtgaaattttgagagatttgattagtgctcttgtgttgatgactataataacatgcttttgacattaacagggtgagataggtgatgggcaggacgtacttgtgagagtacattctgaatgtctcattggggacatttttggggcaacatgtcaatgtaaaaaccaattaaaacttgcattgaagcaa

SEQ ID NO: 112468 - DNA, 391 bp, Glycine max
ttctaacgaaaacaaaacacactctaagacatgccacaagaacgagcttctattcgataagcttatcaaggtctaaatggctagcatgcttctcttcagcattctgaatgcaagaccaatcttgattgcagtgcttatagtcaacctgtaacgcacaagttaagcattatacacacaaaatgtaacaaatgcgcaccttgtttcatcacacatggttcccttgaaatccttactctgtttatggttaagcaagtgtgcttattggagacttgtctttattggcaagagtggtggttaatagcttagggcatgcttggataaactttttcatcaacatttttagaagaaaataataaaataagcatcttcctagactaaaattaacacaact

SEQ ID NO: 112469 - DNA, 256 bp, Glycine max
agcttggaggatcaatatacaggaacatcttccttgtatttaagcaaataattttttaattaaagatctttgaatgttgttagaaattatcactatgagtgtaagtttttggtacctatcaattcattagtcttcaagttagaaatttattgatttccaccccttgcaaactcaacatttgttataaaaagtttaaaatttagagagaaagcgtttgtttttatttattattaaatttgcttcacaaccctttgca

SEQ ID NO: 112470 - DNA, 403 bp, Glycine max
ttagttcactgcttcaagtagtgcacgatatgctttcatatgaaaatacgttgcctaaaagttactatcaggccaagaagatactatgtccgatgggcatggagtatcagaagattcatgctagccccaatgattgcatactgtacaaacatgaatttgaagaaatgtccaaatgccctaggtgtggggtatcacggtacaaagtcaaggatgatgaggagggtagtagtgatgaaaactcaaagaagggcccctagcaaaggtgttgtggtatctgccaatcgttccaaggtttaagcatctttttgctaatggatattatgcaaaagaccttacatggcatgcaaatggcagaaattgtgatggaatggtccgtcattctgctgattgctcccagtggaag

SEQ ID NO: 112471 - DNA, 246 bp, Glycine max
agctttgaaggtgtgtaacccaccatcttttcatagtagagtatcgataatgtgtctaccatcacgatcatcgtctccctttccatcattgggggtaccacctgggccgccagatccctccaccttttgggcgtgttctttgaaagatccgtccccctttttgcaaatgttctgtagttgcatcctatccggaaccatatcaaaattgaactgatactgcctaacaaaggcaaccattaggccctt

SEQ ID NO: 112472 - DNA, 314 bp, Glycine max
aaggttgaaggacttatcctaggatattgtcgtaatggtgaacacaagctaacgttaaacactatagaggaatgggcgttgtcaatgatagcaatgattctatcaatgatctatattgagtggtgatcgacttatgagattatgcgttctgaccaagacatgctattggatgcatggatgactacacttgttttgtatttttcatatcgaatttcgataacagacttcttacatacttcggttgaaggaagtatataccatagctagtttgtcttatgtgtagtccagggatgaattcctattatactagtatg

SEQ ID NO: 112473 - DNA, 250 bp, Glycine max
agctaccctactttttttccatgtaaaggagatgcatttaagatttgtatatccaaacggacattctttattacttgccccctaaccataactgcaagtagatctcgtcactttccttattgattataatggattctcatatccaatgattccatggccaaacatattttaccgaaaaccaatgtgcaattaaccaatttacctacaatacttcttttaacaattctctatatataatggcaaatttgac

SEQ ID NO: 112474 - DNA, 404 bp, Glycine max
tatgctgcaaacatctaaaatagacctcctcaacctcagttgcaaaatcagccacaacagaacaattatgacctctccagcaacaggtacaatcccgggtggaggaatcatcccaatcttagatggtcgaatccttcacaacaacaaccttattttcaaaatgttgctgacccaagcagaccatacattccgccccaatccagcagcaacaacaaccacaacaacaaccccagaaacagataacaattgaggcttctccgcaatcttcccttgaagaacttgtgaggcaaatgactatgcaaaacatgcagtttcaacaagataccagagcctccattcaaagcttaactaattaaatgggacaattggctacacagttaaatcaacaacagtcccagaattct

SEQ ID NO: 112475 - DNA, 250 bp, Glycine max
agcttttttttgttaagcagataaaaaaaatcgtgacttagttgacatatgacaaaaaagagtataattttaaattttgaaagaaaatatttgtttcctctttcaataaatatttttttaaaagttgaattgaatggagcttttaagtattgttgatcccaatagctatggaattacctgtcgaaccttggtaaaagtgaaagataatgctaattattgtcttgagggtattagttaaagaacttaaaag

SEQ ID NO: 112476 - DNA, 401 bp, Glycine max
tgacgaatcttatggaacctatagacatgcctctatcattgtctaactacacatgtgagcccgcttagaggttagggatgcgtttatcgcacttggggttagaatgaacatgtgtaacgatctttagaagattaaaatgagattcattttgcgatatttattgaattataattcttcctttatgattataattacaatattttgtgtttgacggaccaattgatgcccttatgtgaattgattaataaaattgaatgctcatggtgtttccgtgtttttggcctatgattttgatttcttcgattctgatatgattatgcgaaattgtctgaggggttttactcctcatgttgcgagaaacatttttgtataattcgtctgtgctttggataagatttact

SEQ ID NO: 112477 - DNA, 399 bp, Glycine max
tcttatccaaggctcatcttggtggtgaagctctttcttacatggcttattctctagaggatggcgcctcctctctcctcttctccattgccttccgctgcatctccatggtggaaaatcaccattaaaggacctcattgaagctcaaagatccagcctccatataagccccacatgcacgctcccatcaagtggtaatcagagcacaagagcttcaagaggtgctccttaaacctccattaattgtttctctttacctactcttccattgttgtttcttcatttttctccatgtatctcctcacatgtctagttctaaatgtagctaacatgaatctttagagcttccaccgatttaacttgctcttaaagctatatgtgattttctatggttcaaat

SEQ ID NO: 112478 - DNA, 254 bp, Glycine max
agcttagttcataccctcggcatttaatttaacaacctaagttgatcatgcacctaaaagtaatgtctgaacatgtgtaaagatcattacccattcaagattcaaaatcacaaagaatagtcattgtggcatttcatcaaacagttggtgtgcgcatgttaaaacatgtacaaataagggataaggagcaatatgacatgcaaattcataaaagaatcaaggataggactagagccatctattacaactaccaa

SEQ ID NO: 112479 - DNA, 399 bp, Glycine max
tgatatgatgaagtgttgaacggtgaaacttcctgcttttatcgttgaccacagagtggtacctggagatatgtctcgggggtcatgagaccttggggacgttaggtggggtgctattgcccgaaaccaagcttgaccaatcccgacccaaccctggcatagtcggtcagtgagaacctgtgatgtacctaaacaggcgagctcctggcagtcaacagatcataggaacacagaccacaaagcacgggggcttgtggtggctggccaactgtgaaacttgattgatatgtgagatatggtctctggtaatcgattaccaaaggtgggtaatcgattacaacgcttaaaaatgaatgcatgaggctcagattgtctctggttatcgattaccatagggtg

SEQ ID NO: 112480 - DNA, 252 bp, Glycine max
agctttagtcctcatgttgtttatgttgctccccctatctctaacaaagataacattagccacaacatcattcttagccaaatcaaatcccgaggagaagctggtcatatacctcttggtctccaatgaaattgtgagtgcggccgtcgtttaggagcatggagaagttcaaaaaccaatttatttaataacttgagtccaacacgagactgagaccaaataccaactcatagagaaagttgtgctagcttt

SEQ ID NO: 112481 - DNA, 398 bp, Glycine max
  unsure (1)..(398): unsure at all n locations
nttaccaattcaaaatacacagacaattttagagacataaagggaatgagatttgagttttgaaatgcttgaattcattcgaaactctcatcaaaaaagaaattcatatctatgaacttagggtcaatgatacaacgagaggagaagaggtttgtgtaccatatacgttgttcttctgatgaaaacaatgaggatgaggaaatggaggaaggaattggagtatcctgagcctcggagtgctattggcttctacttgaagaacccttgtgcttcttttatggttcgccatttgagagacttattcaaaatttcaatcggttgaaatgaaataggatgaaaaaagatgaattttgggctttgtggggcgtgatttggataagaaatgagtaagttatggc

SEQ ID NO: 112482 - DNA, 251 bp, Glycine max
agcttttctattcattctatgcacccatggtggtccacattgtgttttgtgtatttctattcttgtttcatttacctttttataccccctcttgacgtgcttaagccattttacttaagtcatttctcgcttaacttaaaaataaaataaatttccaccgaacgtttgaattgtattatccgttaacttcggttaagatgaattccgaccgttcggtcgtgccgtaaccacgttggaaatcaaaaagaggt

SEQ ID NO: 112483 - DNA, 397 bp, Glycine max
tccatcaactttgcttgctttattggtgttggagaaaaaaccatacggctttaggtcttagagacttaatttcttcttgttctttggtaagggagtattgtatcttcatcttcttccaccaatcttcatctcttaagctcatttttctcactactttcttgttttggtaaaaaaatggtggtttaggtgttgctacacactaaatgaagctttcttgatccacttctcattccatttccacttccaatccctacgtatggagaggtttctactctttcccataagccatgttgttttctatctactttgggttagaatgggttattgggattactattgtgccattgggctcttgaacttcctacaaaatgggaaaatgatgatttttcaagtgtgg

SEQ ID NO: 112484 - DNA, 250 bp, Glycine max
agctttgaaaagttttgtttttcaccttctcgctaaaccaatctgctggcttagcgagcgtccgctaagcgcaacacccatgggctaagcacgaggaagactctgaagaagatgagttgtacaggttcgctaagcgcaccgcttcatctcgctaagcgcaccgcttcattccatccgctaagtgagaaaggcacgtgctaagccaaaattcattaatctgcgctaagcggtccataattgcgctaagtgc

SEQ ID NO: 112485 - DNA, 393 bp, Glycine max
  unsure (1)..(393): unsure at all n locations
ntgatctaccaccaccaccgccaccatcatcttagttttctattatgtttaacattattagtactttgatttctagccatgtatttggctatattattatgacatttgaacaatttagtatttcatttatttgcatagtatgattgaacaattatgaattatgttaaatgactatgtggtttttatatatttgatctattcatgttacttgcttcatgattggtttatatttttcaatgaatatcttgtgaatgattagtaatgtatgtatgttttatatttgttacgcactttggctttttgttgatgccaaagggggagagaaatggggattaaatcaagaactcacataagtaattaacttaatttcaagtgaagcataaactcaaaaac

SEQ ID NO: 112486 - DNA, 251 bp, Glycine max
agcttgaattcttctatcatatcctgattaaggttattgtttatgatataccaagtaatagattgtggatctgatattgtgagaagggtatacccgaactgtagcagagggttactttcaagtcactttgaaataaaatagatttgttgcatgataaatagtaaaaaaaggaactccatcactttctatccgctattatgtcactcaattataacaaacaatagccttatcccaccaggtatccactttta

SEQ ID NO: 112487 - DNA, 365 bp, Glycine max
tcacttcctaatgtgtattctttatttcgattttatacctctatagcctaaggtatttgcctccatgttataccatttgtagcaaagggcattgacatttatcttattgtgtaactgctgttgatgctggcttattttgactattctgtgttctgcttgcagggtaatttgatactttctgatattgggctagctgaaaaacgaatatatcacgctgctctcaatggtaataatagcctgcctagtgttttgcatcacaaagacgaatgataatttcatggccccccgtctcaaatgaaatgtagttcccgtcgagttttagtttcaaacttagtatctgcttatgaatggacagcttgtgtgtg

SEQ ID NO: 112488 - DNA, 247 bp, Glycine max
ttcttgtcataaagggaagcaagtgaaaaactcctttcaaattaaaaacgatgtttctactacaaaaccccttgaactacttcacatcgatatatttggcccctctagaactatgagtttaggtggaaattactatggcttagtaatagtggatgattactcaaggttcacttggactttgattttgaaaaccaaaaaaagaaccttttgatgctttacgcaaacttgccatggtgattcaaaatga

SEQ ID NO: 112489 - DNA, 388 bp, Glycine max
tggaaaaagggtaatcatcaaaacccatgtcatatttcacataaccaccactctgcaccccatattgggtgccatacaaagagagaatcatggcaagtgcgagcacaaagcacaaggctaggaagagacccattatagggtgaagcttgaagaagtgatgaaaacggatcccaaatgatttaatcattctgagagggtgaaagggcgaatttttgggctttcgggttcgctttatggcggttcctgattctaagtcgaattcggtttttgggtatgcgggaaaggacttgggggcttgggatccaaaagggtaattgttcattgtaatggggttttttctatgatttgggagagagtgaagcgaagcaacggaatcattggatcacag

SEQ ID NO: 112490 - DNA, 249 bp, Glycine max
agcttataatatttcgatacgccccaaattaaacattggaaactctcgggaaattcaagtagtcatatcttttcacacggatgttccgattccggcgcctaatatgtcgggaggctttcaatcgagcatcgatcgctcttgagaaattagactggtttaactttgtacaaggaagctcctgtgaaccccatatggtcataacttttcacactgtggaacattatacgcttatagaagctttgtacactc

SEQ ID NO: 112491 - DNA, 353 bp, Glycine max
  unsure (1)..(353): unsure at all n locations
acaccaaagaanacccaagcttctcgacatatgatgcgctcgaatctgacatctaagtgattttgtttgaccatataaagggcacgagagtatgcgatgtttaattcctagcgaatcgatatatgctaagcctgagcctgacattcaagagaaatgtcatgtccatttgtatttgcgatgagcttatgtagttcaaatccgagccacatgatatgtgatgcacccgaatctgacatccatatgaaaagacctggccatttgaatgtcaccagaggttgcaatgtttaaatctcaacgacattaaatattatgaacctgaacttgtacttcagaagaaacgactctaccattgg

SEQ ID NO: 112492 - DNA, 254 bp, Glycine max
  unsure (1)..(254): unsure at all n locations
agcttntattctttcccatatgagtacataccttattcaagtgttggagtgttcacaagtggttacctgcctaagaacatctctaattaaagtttgcaagtctctcaaacccattatgtttgaagccgacatgttgtatcattaatgctttattcttaggccgataaaaaccaatgctttattcttcttgagtagagtgatacatggacacctcttcattagaattattccattaacatttttctttctttcta

SEQ ID NO: 112493 - DNA, 403 bp, Glycine max
  unsure (1)..(403): unsure at all n locations
ntcatcaagtggtaatcagagcacaagagcttcttgttagcgctccttaaacctccattaattgtttgctttaccttctcttccatttttgttttttggggctgaaacctaaaccataaaattcttacaaaaatattaaagtagaagaaaacctcaaaaatgtagagtgacttgttcacctattgtagttttgtcatagaagtcatgtctagtcatgaaacttgtcacataagatttcttatgttgtgctgaatttttttttcttgtttctttgcctaattcatttgttcatgagtgtatgaaataaatttatcctattatttgatttgagtcaaatctttcatgttaattagtccttaacatgttcatgcaaaattcttagagagtctgtgattgtgaacct

SEQ ID NO: 112494 - DNA, 252 bp, Glycine max
agctttcattctcttccatatgagtacataccttattcaagtgttggagtgatcacaagtggttacctgcctaagaacatctctaattaaagttggcaagtctctcaaacccattatgtttgaagccgacatgttggataattaatgctttattcttaggccgataaaaaccaatgctttattcttgccgagtaaagtgatacatggacaccttcttcattagaattattccattaacatttttctttcttt

SEQ ID NO: 112495 - DNA, 402 bp, Glycine max
atccatcaagctggaagtaggagcacgagagcttttgttagctctcatgaaacctccattaatgtgatgctttacctaatctaccatttatgctttttgtggctgacacctataccataaaattcttacagaaatattaaggtggacaaaaacctcaaaaatgtatagagacttgttcacctattgtagattaggcatagaaggcatgtctagtcatgaaacttgtgacataagatttcttatgttgcgctgaattttggtatcttgaagctttgcctaatacatatgttcatgagtgtatgaaataaatatatcctattatttgatttgagtcaaatctttcatgttaattagcccttaacatgttcatgcataattctaatagagactgtgattgtgaac

SEQ ID NO: 112496 - DNA, 246 bp, Glycine max
tgcaacttttttaatttgttaaaaccttctcgctaaaccaatctgctggcttaacgagcgtccgctaagcgcaacacccatgggctaagcacgaggaagactctgaaaaagatgagttgtacaggttcgctaagcgcaccgcttcatctcgctaagcgcaccgcttcatgacatacgctaagtgagaaaggctcgtgctaagccaaaattcattaatctgcgctaagcggtccataattgcgctaa

SEQ ID NO: 112497 - DNA, 253 bp, Glycine max
agctttttttgcagatccctcatgtaagactaggcttaaactaaacaacattattgttacagcataatttaaaccaaaacttaacccacagatcccttatgtaaggctaagtttcaatcctgcttcaatcaagttctaaggcaacagtacattttccaatgctaaagtcacctaactgtgcacacaaatgagtgatcaaaccaaaagcatacaaacattaagcattaaaggaagcattgaacacagaatacat

SEQ ID NO: 112498 - DNA, 401 bp, Glycine max
  unsure (1)..(401): unsure at all n locations
ntgatgatatggtcttcaccaatgaaatgattatagtgggactaaaaagaggaaaatctgatcatcatgctttgataaatgccaaaacaactagggcaaacgaagagggtgagaatgagggagaagcccatgctgtgactgccattcctatatgaccaagttttccaccaacccaacaatgtcattactcagccaataacaacccatctccttacccaccacccaattatgcacaaaggccatccctaaatcaaaccacaaaacccacctaccacacaaccaatgctaaaccccacttttagcacgaaccgaagcaccaaccaaaagggaattttgcagcaaaaaaccttatggtttgctcccatatctactcgattattcaatggtagccataaccctac

SEQ ID NO: 112499 - DNA, 254 bp, Glycine max
agctttcaacaaatgtcttcacaaataatcatcacacagcagaaccctagcaagattacccatcatatctccccaaaaccccatacccacgaaatttaagagagaaagaagtccacccaaacctgaattttcaaagtcccactcgtagccacgcacttcacgactccgaaaatgccctcctttcgcgatttggagcagaaatgagcaccaaaggttggagctttgttgggcaacaatggtggatgggagaaaag

SEQ ID NO: 112500 - DNA, 395 bp, Glycine max
  unsure (1)..(395): unsure at all n locations
ntatgatgctgctntgctttaacttatgttgtatgttctttgtttcacagagaaggtcgaagaacacactaaagtgacgatttttatgactacaggtgtgttgtcgatgttctgcgttttccaagagttccatttgttgcagtttttttatataatggttaaacttttcttgcatgtactttgtttcacagacaaggtcgaagaacacactaaagcttcaatttttatctcaaaaaaacggttatttttatgacaacaggtgtgttttctttgtagttttatcaaagcttaatttttttggttatttttttgggtgttcctgatccttctcctaccttgatggtgctttctttgttttccctcccagtcttctacgttttctctcatttcgaatt

SEQ ID NO: 112501 - DNA, 251 bp, Glycine max
agctttatttaaacaaacatctaatcattccagtccactcaattcatacatttgctcattcaagtcattcacaaacacctcattcataagaaatcacaccacaaaatatcataatcaatcagttcactgttcaaacatgcttttgtacaagaagcatcaccggatgacaccgatcaaacatttcctaatagacatcatccaaatattattcagggattgaattgaaaacacaattttcgacatcggtagtt

SEQ ID NO: 112502 - DNA, 396 bp, Glycine max
tcaggttgcttattgactccagattgctgcatagaaggacagagatctgtatggcgatctgcaaaagaacatagaccacagactcttgcaacaggtgcagatttctgattcatggcaagctgagttactaggttgaccaaggcatcaagttttccctcaagctttttatttttagtagatgaagatgaatctgtggccacctcatggactcctttaaggacaatagcatcatttcttgcactgaattgttgggagttggaagccatcttctcaatcaaattcctaacctcagcaggagtcatatcaccaagagctctaccactagcagcatcaatcatactcctctccatgttgctaagtccctcatagaaatattgaagaaggagttggtcagaa

SEQ ID NO: 112503 - DNA, 250 bp, Glycine max
agcttgtgcttccaataccctgatgaggatgtcccatatattcttaaaactggactgatccattttcttccaaagtttcatggccttgcaagtgaagacccacacaagcatctgaaagaattccatattgtctgctccaccatgaaaccaccaaatgtccaggaagatctcatatttatgaaggcctttccacattctttaaagggagtggcaaaggaccggctatattaccttgctccaaggtccatca

SEQ ID NO: 112504 - DNA, 283 bp, Glycine max
tagcttgaaatctagtggttactgttcatattaaacatgattttactgtgcttcacaacttattaatcaataataactagagacaaatataacataggtacaataataattagagtgttgtatctgtttatatatgtggttcaaaatttgttatagctggcatattaactactaaaaaagggttttccacgacagttaaaaaaggcttttaacgatggttattataataatcgtctttaaaggttttaactttcaaagacagttaatagcaaacaaccgtctt

SEQ ID NO: 112505 - DNA, 246 bp, Glycine max
ttaaggggcacccgccagatgggggaccacaaaggaaaaagggccgaaggcacaaaaacaacactccccaccgccccaaggcaaaaataaaccacaaccatccccggacgcctacctcctaaaagagcggaacccactcctacgaaagcccctagaaccgtaccaatcaacaccgggaccccaacaacccccccaagctgccataaaaatcaaacaaacacgaagtcataaatcatgaaactaacc

SEQ ID NO: 112506 - DNA, 252 bp, Glycine max
atcttgtcttgcatgtggcacataatcatgaatatgaacaagtgaaacgatgatttcccttcaaaaatattaattgaaaatacattattttcattaagcaatatttaaatacattctataatctaattatgaaacatagaaaaatcaaatgcaattcaatttcaacacaataaagtaatcataaacaatcaattacagacttatataccttgtattagattcatgtataccattaccatatcttgcactaat

SEQ ID NO: 112507 - DNA, 247 bp, Glycine max
attttgccacccagcacgcccaggcgagctaaggtgcttcctccaaaaggcaccgccttttgaaaaactttctggaaggcccaagcgggcctggtagctatatgcatccccctgtatactaaaaacaccccctggcttattaatgctgaaactttatctgtaacgttacggaaaccaacgaattacgtaacgaaacttggatttcttccgtaatggtactaaaccttacggatcacgtaatcaaccc

SEQ ID NO: 112508 - DNA, 389 bp, Glycine max
tcaaccaagaggggatggtccatttcaagtacttgaaacgataaatgataatgcgtacaagattgaattgcccggtgagtataatgtgagtactacatttaatgtgtctgacctaactctttttgatgtagatggagaagccgatttgaggacaaatccttttgaagatggagagagtgataaggacaaggcaaggaataagggcaagaaacctttaaaaggacttggaagacctatggcaagggctagaacaaagaatgccaaggaagctcttcaacaagtgttaaccatgctatctgaatttaggcccaaggtaaaagtggagaagcttcggattgtaattgcaccatgttccaagaagagtatagggtgccacttttgtcgagtgg

SEQ ID NO: 112509 - DNA, 257 bp, Glycine max
agcttgcaaatccatattatcaccactactagaggagaagccttcaggttgtttcatataaagctccttctctaaaccaccattaagaaaggttgttttcacatccattttttgcaactcaaggtcaaaatgagcaactagtgccaagataatataaagagaatctttcttagatacaggagaaaaagtatttatgtagtggattccttctttttaagtaaatcccttagcaatgagtcttgccttgtatctctcaa

SEQ ID NO: 112510 - DNA, 395 bp, Glycine max
aactcaagcttgatgtcaataaaggcactaccaatgttatttatttgggatgaatcatttctacatttaagggtctatttattcacacgaaaagatggaaaataatgaatacatgtactaagttaattcagcaatcgctcggggtgtgtggaaaaggcttagtcaaaaaaattatacacttaatgaaaaaatcgaatataaattctcttaaaataaattatttttcacatgtgaatatagtgaatctttaggcaactgtatcaactctttgagttatgctgtctaagtgattatcaaatattttattttatcctttttgttaaaacatttaaaagaaaaaacaacaattttgaatttccaaatttttagcattaaatttgtgtatttataacaat

SEQ ID NO: 112511 - DNA, 253 bp, Glycine max
agcttggaatgatgcttcaatggaggaaaagaaagagggagagaaagagagaggggggggagcacgaaattgaaggaagaaaaaaagggagagaagttgaactttgagttgtgtctcacaagactctcattcatcaaagttacaacaagtgttacacatgcttctatttatagactaggtagcttccttgagaatctttcttgagaaaacttccttgagaagcttctttgagaaaacttccttgagaagctag

SEQ ID NO: 112512 - DNA, 253 bp, Glycine max
agcttttgctccttcgcgtggcttttaagacttcttctttcccgattaattcctctcattaaattaccatagctccaccaaacgtatcctagtaattaaattcaatcctacaaacaccaccattcatgttcttccttttccttcttctctccctctttcaatcataggctatgacatgagtctcacaaaatcctaaccctacaacctaatcatttcatacccttcaattcaacacctttcccaaattaagcta

SEQ ID NO: 112513 - DNA, 403 bp, Glycine max
  unsure (1)..(403): unsure at all n locations
nttcatgcgtatttattgccactgcaatataatgtgtaaattatattctgtatcatttactagtcttcttatggttcctttatcatgattcacgagtgcatcgacgtccagctgaggttcttgggcaagtccatgttgctgcacgaatgcgacctgtggatgctttgtgggctttggcctatggtggtcccttgtctttgcttcccttgacaataagcaatgtacatgagtatacactggaacctcagcaagagaatttacccttgtcttcggccactgcatctcttgctgccccaatatttagaattatattcacagctattcaacatccaatgaacaatgaagagctggctcatggcagagggccagaggttctatcaaaaattttgaatcatcttcttca

SEQ ID NO: 112514 - DNA, 154 bp, Glycine max
cctgcatgccatgcattctttgtttaatggcctactacaccgaattatgttcacggccttgtgcttggtctccaagggtataaccgcgtatgcccccacattattttccactgaccacaaatgccaaaaacatgtattgaattaggaaaatttt

SEQ ID NO: 112515 - DNA, 392 bp, Glycine max
tcattcttagaatgaagtaagtatatatacatatatcgggaataatcatctataaaggttatgaagtatctcagactatttgcatccatgtttggacaacatatgtctgtatatatgatttctaataaatttgaactcctctttgcaccctttttagactagtgagtttgcttacccttaatgcaatctacacaagtgtcaaaatcagcaaaatccaaagtactaagtactccttcatttactaattgcttgattctctcaatagagatatgttttaatctctggtgccacaacatagaggatgcttcattcacaataaatcgttgttatcccacagaaacgtgcattgaagtagcggtacttttcaattcaactgaataaagaccataaac

SEQ ID NO: 112516 - DNA, 259 bp, Glycine max
agcttatctttattatagcgcgctaaactcaaccttcattgacacacaacaggggcttaaacacatcagcctgggccttaaccttatgtcaaaggacgtgacaaacagtaaacatatctggcgctctagccagacaggtcaggcttaacactgagacaaaattttaaaaatcagaagtgtctaaacattgatgacgttcagcgccttcctcattcatgtttcatcaaaagtgacgaacgcacttagcgcgacatggtcg

SEQ ID NO: 112517 - DNA, 245 bp, Glycine max
agctttttttggagtcatgccaaaggaagagtgaaaactgttattataagtgaactctatcaatggaagaaaactcttcaagctttccttctgctgtaagacacatgctcttaaaaggtcctccaatgactgaatggttcgttcagtttggccatcattctgaggatggtaggctgaactcattctaagcttggttcccaatgctatgttcaagctcttccaaaacctagaggtaaatctaggat

SEQ ID NO: 112518 - DNA, 396 bp, Glycine max
tcaccaagaagaaaccgaataggtgaacttgtggaccaccgaggaaaataaagaggtgaaggtaggaaccggtatgaccgcgcctatccgccaaggcttgataacccttcttgaagagtatcaagatgtctttgcgtggtcgtatcaagacatgcccggtctggatttcgacattgcgcagcataagttgcctttaaatcctgggtcttctccggttaagcaaaagttatgaaaaatgaaacccgagatgtctttaaaaattaaagaaaaagcaaggaagtagttcgatgcatgatgcttatctgtggcacggtacctggagcgggtggccaacattgtcccactcccgaaaaaagacggcaaggttcgaatgtgtgtatactaccgggacttgaa

SEQ ID NO: 112519 - DNA, 247 bp, Glycine max
agcttgattaagtagtacaatttttgctcaacataaattctatgaaatatttgctgctatttttttccgttctgtttttagtaccaactttcctattataatttacaccttttgattgtttacaagttactagcttaaactttgtgcaggtgggtgttatcatcatgcctagaaaacatattatggggcatgcagatgaaagagccttcaaaacattggttattctcatctctgcatcattattctc

SEQ ID NO: 112520 - DNA, 374 bp, Glycine max
taaggtgagtgtttcatttcaaagttgtgtatttgcacttacaagctgccgttttcattcccaaccttgcacccattgccacctctcactcttctgcaagaaaataaaatggagaagacccatgtgagaaaaaaaaaaaaacctcataaaacaccattgaaagtagcatcatcataacatacaaaatacagagagagagagaagaagcatacgggcgaggacgaatggtccagaagacagagtaagtccaatctgagttgagacacacacttctgagggcctcatgaagggccatcatcccaacagcttctttgctcctatctgtttttggtgttgttgatcctgagcccaccatctatctctctctctctctc

SEQ ID NO: 112521 - DNA, 165 bp, Glycine max
accgaacaggaaacccgaagggccacacacaaaaatgagaccgtcaaacctaacaacaaaaccagaccaaagacaaagagaccaaataacccaaccgcgaaaacaagccaccaaaaaaaggcccaaaaaacacaaccaacgaagcaaaagcaaagaaacaatgcg

SEQ ID NO: 112522 - DNA, 263 bp, Glycine max
tatagctacctgcaagcctgcaatcttggccatactcgccaatggcacctgcgagttgcatgtcttccacttaaaaaaacgacaccatgcaaaaattactttaacaaacccactttgggaatatgtttctaaaattaacccctagcgggaaatttgccggtgtgaggaaaagcataattgcttcaatccacctgagcttatcaaatactttattgtcaagggtggtatctattcatggaaacatgcccttcagggagaccaat

SEQ ID NO: 112523 - DNA, 405 bp, Glycine max
tcaatgggattattgtcagcagctctacaaatttgctctgattgaccatcaacactgaccccgctattttgcacactacttttatcatcctgagactttcgttgtagaaagagatactagatttgatatccataatccctctctcaagattgagaacaattctatacttgtggtacccacgagctagcaaaccttaatgtgtctgaagcactgtcatctgcgaagattgtttgtcttaaccacgatatgaaagttctattgtgctcttgcaacaacctcatcatgttcatttttgggtgaatacgacacagatgttcgttgtgagcatctatgttagggattacctcagctgtgttgtgtaatacatatagatgagcttgtgtcagcttgtggcgatccttggtt

SEQ ID NO: 112524 - DNA, 178 bp, Glycine max
aattgttattaactgatccactaaaaatttttacacggctgtataacttaatggcggacctacaaccacttgagggtgtgcacttgcccccccccatttttaaaatataatagaatgtcaaaaaagatatacaccaaacgcaattactaaaataaaacaagaacccatcgatttattt

SEQ ID NO: 112525 - DNA, 285 bp, Glycine max
gccataaaaattatatccttgtttgtaaatattatgatttaactaaatttttagaaaggtccattcattgaaagtctacctctcaacaaaatccttattttaccctgcagacattactacttctaaagtttaaaaatgaatgcccatttggcttctaaccggtgcatttattttagacttactaagtttcaaaaggatgagttttaaatcttaaaaaatagtttatggcatgcgaaaatacttaaaaacttttaactttacttaatgttatacagcattttacat

SEQ ID NO: 112526 - DNA, 355 bp, Glycine max
  unsure (1)..(355): unsure at all n locations
ctggtggtcacatatatggggtttcatggtttttaaacttcttcaacatgtatgctctgatatttggtcatgcctgctctgattgacacatattctctaataccatgcacaaaggtaaatgaaactcactaataagttcatatatcttaacataatctgcgtatacatatngataacatatttgctttgattatgtctttgaaagcatatatcttaacaaagttgttgtatatcaaagttacattcttcagatacacaaacaaagagtaagtggtgtgcaacaatacactctaaacacttatggtaccttgaatcttatcttttcatcttaacttttttggtataaaaaatatat

SEQ ID NO: 112527 - DNA, 353 bp, Glycine max
tggtatttagtaattatgaatatcatgagatgtttttttggaaattcaaccaccgggcaacctgtatatgggttcaatgccaggagtccattgtggaaatcaatatgggcatcatttggtttaaaacgtattaaaaaaaggttaaagtgcctgggtccttggttagtgtcaaattgcaagggattgccttatttaaaatcccgggtaaatgtaaccattgattcttatcccctaagttctgagtataaatttagagtttggcttttgactaccattatcttgcattaattatcttctctgtttaatataatttgtttaggggagtgagatgctgtttcagctagtctcagata

SEQ ID NO: 112528 - DNA, 384 bp, Glycine max
tcgttgcaagccagtggttggaggagaaggctttatggtgaagttgatttggggagtgcataatcatgaattggctaagtcattagttggacatccatatgcggggcgattgacaaaagctgaaaaaacacttattgctgatatgacgaagtccatggtgaagccaaaaaacattcttctaactctaaaggaacacaatgtcaatagctgtacgaccattaaatagatatacaatgcaagaagtgcattccgttcttccataagaggaagcgatcttgaaatgcaacatctgatgaagcttcttgaacgtgatcagtatattcattggcatagaataaaggacgaagacgtggttcatgatatcttttggtgtcaccttgatgc

SEQ ID NO: 112529 - DNA, 150 bp, Glycine max
cgaaacaaacacatattggacgcaaactctatcccgaagtcgacctccgacctcgtgattttcgaacttttaccatcaaaaaaggcaaggtgaccttttctcccttatcaaaagaagtgcccatcccagacatcccacacgtgtctcaac

SEQ ID NO: 112530 - DNA, 388 bp, Glycine max
  unsure (1)..(388): unsure at all n locations
ntgaacaatatacttggccttcatttaactgtctttgggcttggcggccacgctcaacaaagtactttcgacacctactgtacgttgatttcaccaatgcttgttattggaatgttgcgacaatcctttaaaaccttattgatacattctgagaggttcgttgtcatgtggccatatcgacgtccttctctatcgtaagccatcgtccatttttcctttgagatgcgatcaatccatgttgctatggctggactcagttcacgaaatttttctaaattttgatcaaaaaatgtgcttgcatggagtgtaagctgcataaaattagttatgaataacaattttaagtataaatgaaagtaaaataaacgtgaccagcaaatatgaaatc

SEQ ID NO: 112531 - DNA, 198 bp, Glycine max
acgagtcatcaagttttgtctgctagcacccatttacatattataagtctctgagtttaaaatctttacatatttaacggcttaacccatgtttaaagtcctttacccaactttagacagagacattcttggcttgcgcaccactaggtacttatgataaattcctaggggttgtgaaagggtagaaaagtagcttta

SEQ ID NO: 112532 - DNA, 348 bp, Glycine max
tgtcatcgtgagacatcagaggctagtattttaattaatgggggtaagaaaaattcaccaaattgatagaaaaaaatctaaaatcatacatcttaagcaaataaagcatgctagcccccaacattattgcattttgattccatctttagacattcaaattgttggttatttttcctgttatcttttcctttgccttagtctaaatttcaaacttacaattcggtatctctttcttcttttgtttctcctcatttcttaataattggatttgcatcacttaagtacaaccaaagtccctctggatttaattgttgaacttcaatttcaatctttactactttgtgataa

SEQ ID NO: 112533 - DNA, 241 bp, Glycine max
cttgggtgcccctgaaaggattttctttttatataccttgtctttaacccattcaaaatcccttgcaatattgtgctactcatttccctcaataggatctgactaatgattaaacagacttacctgttgatcctattggcctgactcgttgctttttttgcgccctactcttctctctctttggaccttaacaaatcctatcttctatatctctagtactaacagactgcggtttcctcaa

SEQ ID NO: 112534 - DNA, 378 bp, Glycine max
  unsure (1)..(378): unsure at all n locations
ngaaattgaacaacggaagctctctagaaactctaatggtcataacttatcacacggaggtccgattgaggcacataatatatcgagacgcacgaaattaaacaacgaatactctcgagaaattcaaatggtcgtaacttgtcacacggaagtccgattcaggcgcataatatatcgagaagcttgaaattgaaccacgaatgctctccagaaattcgaatggtcataacttgtcacacggatgtccgattcaggcgcatactatatctagacgctcgaaattgaactacgaaagctctggagaaattcatatgggcataacttgtcacacggaagttcgatttaggcgcataatacattgagacgctcgaaatgaac

SEQ ID NO: 112535 - DNA, 380 bp, Glycine max
tcttagtgtatcaatttattattggtttgagttgctggatacgcggattctgacatcagtgatatgtctaattaaaatttgttgtatgtgtttaattactaatttatttcttacacttttactttgtaatgtatttaaccaacataatataattatatactattatattcacagttatttcggtgtgaatttaaaataagccaccctgataaatatatattatgtggtgtgaattatggatagtttaatcataaaatgtttagtgaattgcacgatcaatttttttttccaattcaaacctaaggactttataacaaaattttgttttgatttttaatttatgcttaatctttctaattcaatccgtaatttcttactta

SEQ ID NO: 112536 - DNA, 360 bp, Glycine max
  unsure (1)..(360): unsure at all n locations
ntgtcctcagatccctcttgttggactagacttataccaaacagcattattgttacaacatacttaaaaccaaaacttaatccacaaatccctcttgtaagactaagtttcaattatgcttcattcaagttctaaagcaacaatacattttgcaatgttcaaatcacctaactaggcacacaaatggctgatcagaccaggagcatacaaaatttaagcactgaacacaagaaacataatcaattagatatgaaaataattacataagttgttcagtagaaatccctaacaagggtgtttagccagccattacagatgaaaccctaacaataataagcttacaaaacctatgtatctcta

SEQ ID NO: 112537 - DNA, 427 bp, Glycine max
  unsure (1)..(427): unsure at all n locations
ccggatcttagcactgggctcagctgtcgcatctgantactgcaaatataatattacatataccttattatagtaatgtatattgaattaataatcgggtataacatcatgtctctaaaaaaatatgttcatttttaattgaaatataatgatattcttataaatataattattgcaataaatattttacctgattatatgttgtgtttactaaaccactaacatgcttttcagtactaaattgattaagtaattgacagactatatccttgaaagtctgtttttacaattattttatatgagagatgacttacttttttttatttccgcactcctttagagactggttatcaaataactaccactgctgcaagataataattagaaattcctataattattgctccaagccttgtattatataaat

SEQ ID NO: 112538 - DNA, 371 bp, Glycine max
tgccacccagctcgcccaggcgatcaagggtgctttcttcaaaagaaacacccttctggaggaaagatcttgaaaggccaaatgggccaaaattctattttcacccccctttttactaaatgcaccccccttctattttttttggaattctttttccgtaatgttacgaaactttacgaaattttgaacgatacttatttttctttcgcaagggtacgaatccttaccaattatgtatttacttcgttttagctttcgaagaagttacggaaactcacggattgcacaaaaacacctcttttcgacttccgccacattaccgaatttcacggatcgcgcaagcctgctttctttttgattccgagacgtct

SEQ ID NO: 112539 - DNA, 379 bp, Glycine max
  unsure (1)..(379): unsure at all n locations
taagcattccactctaaccaaagcaccaaatgcctgctaatagaaaatttcttcaaagtcctaccccaattttttttcactgcaagtgtttcaaaaaatttgattagacatttaatcttataaaactaagtaatatagagttctatgactattaagggtgtttataacctatacaatccaattaactcagcctgcaccaaactaatttgacatgtgtggttntagaaattagactcagaatgttcagagttggtttaggttttatttcagttgtctccttgtcctatatcttctaaatcttatttttcttaataattctatattaatgataagacttcttgacttcatggataacattttgcatatattgataatattt

SEQ ID NO: 112540 - DNA, 97 bp, Glycine max
tacacacaatatgcctgttaatcatgatacacgtctttacccctccttatatgattacctactcacaaccattcacagacatcatgtaaagaagaat

SEQ ID NO: 112541 - DNA, 389 bp, Glycine max
tgcgtctacacatatataatatggatcgtgtgttggacatgcattaagggtttactatcagaacttgatatcatttttgttgaatctcttctactaaacaagggagaaacctattgagccacttaagaatctgtcactctgaagaagcatgtatttaaaaagagcgagagaattcacgcttaaattggaagattctattatttcaagccattctaaaatcaaagctagaattcaacgaaccacaagcattaatacacaatacattttcttagaataaataaaacgcttaataatgacaaagcttgaccaaccttggcaaattctatgcttaggttatgagcgagtgattggaatagaacacatccaggaagctgataaaaaaattcctg

SEQ ID NO: 112542 - DNA, 202 bp, Glycine max
  unsure (1)..(202): unsure at all n locations
gaaaaaagggaccaattcgatnaggggaagggactgattgctcaacctttctaagtcgcatgtccatctttttaaccaggctctgaacttttggaactctgaaactttgaactctgaactactactcccccccttacactctctggactcttaaatctagactacttctcctctttatctactctctgagaactgactctcc

SEQ ID NO: 112543 - DNA, 392 bp, Glycine max
ttttggagtagaaacatgggaccaactcattttatttcaaaaaaaaggaagtcgtatctagtcaagggctgagagaccatacaagtttcctaacgatttctaattatgtgggccattaagtctatcatatgctgacaatagccgagaagcccatgaatctcttcgggggcggagtaggtgtctgccatcgccttggccttggctaacaatcggggaagttcttgactcccgttcaaggtaagagcaaaccgatccatccacatggttgcctcttggtgtaaagagtcgatcacccttcctctagcctctttttccgcatacacttgggcatactcatccgcgattctatgctcgtgggccgtggctagacctaactcttcttggtacttggg

SEQ ID NO: 112544 - DNA, 378 bp, Glycine max
  unsure (1)..(378): unsure at all n locations
tgacctataaaactcagcttgattttatctaaaaaaagaagagattnttatcaccaccggggccattttttttggtaattatttggggggtcctgaaccctcttctaccctgatggggccttctttggtttcccttcccggggtttggcgtttctttcatttgaattgtggggcttttttaaattattgcttaatcttttatttcatgttctttggtctatggtttcttccatttcttccttgcatgttgattgttatgtccccttatccccttatttgatgtatacaggtttcaattttttgatcaggaacatactaaagctttgatttttatctcaaaaaaagcagagatttttatcacaacaggtgcgatttttt

SEQ ID NO: 112545 - DNA, 372 bp, Glycine max
  unsure (1)..(372): unsure at all n locations
agtcaatttgtgattagtggagctgaaatttctctgcatatangcatctganttacgaacctttggtgtatgacgatgacataagaagccagatttagacgtaaatctatcgagttatgggtgagaaccaatcaatgcaaatccctctctacagctgatgaagcgtgtacttctcatggactgacatgctgtgagaaaatttctcttttctctatgcactacttgatgagcaccatgtaatacaaagccgtactgttatattgaatatgtttttcaagcctcatttgtagctctctttgcgtcttgacaaggaaatccactcctcaagttatttcttagtgattatctacccaactagactactacagaatc

SEQ ID NO: 112546 - DNA, 382 bp, Glycine max
  unsure (1)..(382): unsure at all n locations
ttccataaatnttattccattattacatggagttttcaatttcttaggccagagtggttccatttttaaattgtggaaacacgacgtagattatcaggtattatccattttactacttattcttaattatttttttatcaatcccaagtcttcttttttttcactggtgggaggcacattgggggggcggggcatcccacaccaaagggtttattttctttcttcttttctctttaccaatttggttttcatttggggtttattataaaattttgctttgccatgtataacaactttttattggtgttccctcaccaactcttttaattaccttccccaggttttccattgcatgctaacattgtttttgctcaaaaagaaa

SEQ ID NO: 112547 - DNA, 189 bp, Glycine max
attaaagtgttcggctctataataagagatataatttttatattgtttatctcagaaaactaaatgtctataataactaacgtttaatcttggggaaaaattggaaataaatttttcttccaagtgtttttttatattaggggaaacatcttatatgccgttgttgctctcaaaatttaaaattctttt

SEQ ID NO: 112548 - DNA, 385 bp, Glycine max
  unsure (1)..(385): unsure at all n locations
tatgcacttagacatgtatccacatgcaaatgttatagaccttggaattggtgatacgacacaacccttaataacaattgtaacatctaacatgggtgatggtagctttgaaagttattaaattctttatgctgaattaacagaaaataatgcatgtatgtaaacaagtgactntgagaattaatatgtttacctgatagggtaattaagcgccatcaaaccgcatgtataaattaattctatgaatgagatgagagtgtgtataaatgaggcccatatatgaatatttcattcatcatgaattaacccgcggctagtgtctcatgaaaagtcgaaggaaaaagataacttgaagttgaatatttgattcatcatgaattaacct

SEQ ID NO: 112549 - DNA, 95 bp, Glycine max
ccaaatagtgaatgcatcgtggtgtctcctgactcatctcaccttacttagcatctttcttgttgactccacaattacttaactactttttactt

SEQ ID NO: 112550 - DNA, 384 bp, Glycine max
tttggtgcaagtagacagacatgacagttgtcattattcttgttgggctaatcgggaatctagaagggggtgaatagattcttttgaaatctttaccacttcgttagttaactcaattaaaatgaccctcttgattaatcaactttttctcaaaagattgttccaaaaagattatcacaatcaagaaaacaatgaaaacaagatcatatgaaaaacatagttttatggtcctttaacatcaatgttgaacaagtgacctcaataacttaagaggggggtgaattaagtttacaaatttcccctaatcaaatttttaattccctcttgaaatagaatatgcagacttaatatgaatgaagtaaagagcaattcaattgatacttt

SEQ ID NO: 112551 - DNA, 380 bp, Glycine max
ttttggtcaaaaggcttgtatatgcacaatcattgtcgtcatcatgtcctcatttataaatttcattctaaaattcagagattcatgcaaagattattactcacagctagttgttcactcacagtgtaagatcacactgtcatcggttttggttcaagctcttctttctcaattaatctatctactgactaacaattctaattgcaagttcacattcttgttctttctttgtctaacatacacacttgttcaaactcatgaaaaggaacacaaactccatcataatcatgcattcaattcaaaataaaagcatacaaccattttcacaaatcaataaaagtgcttcactgccatatcattaaacaccaagttaaactgtt

SEQ ID NO: 112552 - DNA, 378 bp, Glycine max
ttgtcctcagatccctcttgttggactagacttataccaaacagcattattgttacaacatacttaaaaccaaaacttaatccacaaatccctcttgtaagactaaagtttaattatgcttcattcaagttctaaggcaacaatacattttgcaatgttcaaatcacctaactaggcacacaaatggctgatcagaccaggagcatacaaaatttaagcactgaacacaagaaacataatcaattagatatgaaaataattacataagttgttcagtagaaatccctaacaagggtgtttagccagccattacagatgaaaccctaacaataataagcttacaaaacctatgtatctctacaaaagctgctcctcttg

SEQ ID NO: 112553 - DNA, 357 bp, Glycine max
tctccttccatgacttattctctagtggatgacgtcttctttaacctcttctcctttatctttcgctgcaattccatggctaaaaatcaccattgaaagaccttattgaagctcaaagatctaacctccataaaagcttcataagcaagcttccaacaaggggtatcagagcacaagagcttcaagtaggtgctccttaaacctccactaattttcagctttactttctcctccattgatgtttcttcgtttctctccatgtatctcctcacgtgtcttgtgctgaatgttgttaacataattttttagaagttccaccgattaagcttgctatagaagctagatgtgattttctat

SEQ ID NO: 112554 - DNA, 379 bp, Glycine max
  unsure (1)..(379): unsure at all n locations
tctcttataaattaaaattagtttttgcattagccaatttatagaaatttttatcattttaaccttttcaaaagcttattttaacttctttttttgacacgagcttattttaacttatgcataaactaattgtaacttataggaagagaaattcaattcattntacagtctaattttcttcttatataagtgcttaatgaaaaccttatccaaacagggcttgaaatattttaaactaaagccagttattttagttatttcatgtataataagtctccgacatttgcacaaatagaagtaatctaagactagccactaatgctgtcagactcatgtaaaccttaaagtgtcactgatgttattcctgcgtttgatttct

SEQ ID NO: 112555 - DNA, 377 bp, Glycine max
tcccgcaagatttatgaaaagatcttagagttgaccatagcagagatatccatagaagccattgcatcactcacccaatactacgaccaggctttgagatgcttcacgttcggagacttccaattagtaccaaccattgaagaatttgaggaaattctaggatgtcctctcgggggaagaaaaccatatctttcctccgggtgtctcccctctttgagcaaaattgcaactgtggtcaaggattcagcaagaggtttggaccgcataaaacagactcggaacggcatagcgggcctaccacgaaggtacctagaagacaaggcaaggggtatggccaatcaaggagattgggtcccgtttatggatgtgttagcttt

SEQ ID NO: 112556 - DNA, 359 bp, Glycine max
tcaggaccgacgcaagggaccacgctcgcttgcacagtccaacccccttctacacccttacaccaccaaccattcaaacaccaccagccattctaaccccagccaccaagccacacacatgtccacccctgtggctgtcacttcacccaaccctaaccacaaattacctatcaagcgcctctcccctgaagcattggttgtccgccgtgaccggggtctttgttaccattgcgatgaacagtggaccaggggtcatcgctgcaaccctcgtctccatttgctaattgctgacgacgacgaggacagtaccaacccctcgcaggaactccaacccaatactccctcagctcagcttcaat

SEQ ID NO: 112557 - DNA, 334 bp, Glycine max
cccttgttctgcttaaatctacagtttatgctgcaatttacatggttccttgagaaaaagaaaagaccctcaatcatgtagtttccttgattatgatactttcttgtgggtaggactatatctctgtgctggtgtaaatacttataagttcgggaaatctatgaatacaaagaatattgtatattgggatgtgaggctttttcaataatgttggggcaaaggacttccttcatactttttattaataaaagagttggagaagactaatcttgaattcttgggatctttggcaggaagcatctacacccggcctcccgaggattgactatgactc

SEQ ID NO: 112558 - DNA, 407 bp, Glycine max
  unsure (1)..(407): unsure at all n locations
gtgacactataaaactaagcttgcagaaagactaaattttaaaagattatgttgagaaataaaatgggattaatgaccagtgattgggtcacgttgtattaggaaacacttaaagggagtctgggcctgaattcctaaattaaataagtttttaaagttcatgtgttcaaatttgtaacatgttgacattagactggactgttgtatatggtccattgtcatttatgttatatttctttgntatgttttcctttatatgtttttaagtgttgtaacctagaaacattatgtaatgaatattttaaaagtgatatttgtcatggtatttttatgatcttgtgtgtatgtctattgtagtggattttccttttttgaaattttgatttgtagattaaattgaaagatat

SEQ ID NO: 112559 - DNA, 368 bp, Glycine max
  unsure (1)..(368): unsure at all n locations
tgaagngaggaagtgtggaagagtgagtcttcctacttttattctttgaccacaaaatggtacctggagatatctcgtgggaatcaagaaaccttggggacgtcaaggggggtgttattgcccaaaaccaagcttgaccaatcccgacccaacccgggcatagtcagtcagtgagaacctgtgatgtacctaaacaggcgaacttctcgcagtcaaccgataaaagaacaaagaccacaaagcaaggaggcttgtgtggtgactggccagctatggatcttgagtgatatttggaagatggcttctggtaatcgattacaaagggtgtgtaatcgattacaaggcttaaaaatggggtcaagaagttg

SEQ ID NO: 112560 - DNA, 93 bp, Glycine max
  unsure (1)..(93): unsure at all n locations
ttccttactagtaagctactactacctgtgcttgctgcnactctgaggctccgctaacttgcagtaaatcatataaagattctggtacataca

SEQ ID NO: 112561 - DNA, 374 bp, Glycine max
  unsure (1)..(374): unsure at all n locations
tctacatccactacaaaatcatcaaaagaatatttgaaaatgttaaatacaaaagtaatatataataagggattcatctattggcacagtggaaattaatatatgtagaacttttgggaaggatatcaataattatacatgcatataaatatataatggtaatacaattaccgtaattaattaaaaaaaatgttacataaaattagtcattntattctttagcaatctaaaatgtataaaaatcaagttttatttctaatgaaataaaatttataacaatttaatttaatttcctgtagaacgggtaggcctatatatctaattagaattaattatatggaaagccaagtgatgaaactcttttttgttctttg

SEQ ID NO: 112562 - DNA, 240 bp, Glycine max
attatggcggactagtaacgatggagattggctcctctatacacgattgctagcagttttttttttacacctgtttttttttccaactgaacacgcatttggagcacagttatctttcacccatagaacacgcatttggatgccagtaccatttaattcggagccgttatttacgaagatcagattacccaacctttttttgttatctaattgactatgaaatgtatctgttcctagggg

SEQ ID NO: 112563 - DNA, 386 bp, Glycine max
tcactgcttccactaagctctggtgatcagaaacagaagcctccacaaggtgagcaccttgcttcttgaatgaaagcagcatctgcaccttctcaatgtcaagaccaatctctggacgttgaagaacataagtttcatggccttgttctaaacttgccttcactattctcctcccaacatacccagttccacccacaacaagaaccttgctctttcccattgcctctagctccttaatactagtttatttgacacttgcaaaatcgaccaacaaaggccaactatatataaacactttatgataattaaactcaacctttacctgcacgtttagtttggtcttttttgtgcataataatatatattttgagaccactattattctt

SEQ ID NO: 112564 - DNA, 388 bp, Glycine max
tactcaaaaagccccagataatacctcaggatcttgttgaagttctgcggcatcaataacaagtggtgcctttccaatttcacgaagctcggtgtatatacaaaccagctctggcaaaccccactcataaaaagatggagggacaaccttatcaaaggatggctggacatacacaattaggtgaggtagacaagaataatcaggcagtaaccagagaaatagataaccacccaatatcacaaaaattaatgaaatatttgcagcaccttatatacattacttaaacatgatgctcataggcttttcacaagccaaccttttttgatgtagatagatgatagatctgtatgtttttggaccaataccacatgtgcagatgtgaaacaac

SEQ ID NO: 112565 - DNA, 382 bp, Glycine max
tcgtagtcagaaaccaacaaaggcgagttaacctaagagcttatgtctccccaactaatgctttctgttgaagtactagtgtttgggctaccatttgttgccacgtccatggtttccaatccataaaaaacccgcattgacccatctatttgttgctgctgattcacacaggccaagtcactggccatggaaaaattcccaaacccttgaagcacgtttgatgtgtgacacgtgtccgtggttaccatgctcactgtggaaggatgtaaatcatgtaactggttttgtattaaggaaatgtcacgtgatgagtgttgtgaattcatggtggtggcagtgactatgttgttgctagggaagtgtttgatgaatgatgatgttt

SEQ ID NO: 112566 - DNA, 371 bp, Glycine max
tgagcagttataattatatggcacattaatgcataacatagaaataatttcctgcttccttttttctaatgcacttctttagcaaggtacacacttttctgcctctctcaagtcattaaaattccctcaggcctcggggcatccttaactgcaagacaagctaacaagaaaattcacactttcgcaagacttctttcatcacggaataaacacaacaacaaaagtcttatcccaatgggtgaagtcgatcacataaatcacacaatgccattgagcttaattaaagaccaaattcttaggaatattattcactgtgaaattccacttaacaatttgctattcatcttttcctcaattaatgtcacaccaat

SEQ ID NO: 112567 - DNA, 374 bp, Glycine max
taccccgcatgtcacctgactttactggttatgacgacaaaaggtgcagaagacgatgttagtcatcgcacattaatgggctcgttttccccttgtttacgaaaggtgcgggtaaccatatggtaaccccgcatgtcacctgacttcacgggtcaggacgacaaaaggtgcagaagaagatgtatgtctctgcgcgtcaacgctcgtttgcccctagttgacgaaaggtgcgggtaaccataagctaaccctgcatgtcatctgacttcacgagtcagtacgacaaaaggtgcagaagacgatgttagtgttcgcgcgtcaacgggctcgttttcccctggttgatgaaaggtgcggataaccataaggtaact

SEQ ID NO: 112568 - DNA, 334 bp, Glycine max
  unsure (1)..(334): unsure at all n locations
ctctagagtcttacgagtgagttacctgtctagatgaaatanattaatctcaatcaaattcagatacacacatatgctcaatgccgatgacaatgccctttctaatatcatgaagctctattttcaggacaaggtgtaatacctgattgcctagcatgcctttgtacaatatgttcttcacaaccctacatgggaaactcacttactcatgaatcaatgatgaatttggacacactaattctaaaacaanaaaatccacaaatcaagctacttaaacgctggaagttaaaataacatttcttaaaataaaactataacactgattagttaacga

SEQ ID NO: 112569 - DNA, 356 bp, Glycine max
ttgaaaagtgttgtttttcaccttctcgctaagccaatctgctggcttagcgagcgtccgctaagcacaacactcatgggctaagcgtgaggaagactttggaagaagatgagctgtacaagttcgctaagcgcactgcttcatcttactaatcacatcgcttcagtccatccgctaagcgagaaaggcacgcgctaagccaaaattcgctaatatgcactaagcggtccataattgcgctaagcgcacgagcacgaacaaggccacctatttaagtttgaaattagattttagagagagagagagaagtttgattgggattcagagctttgcatgtctagagattctagagagag

SEQ ID NO: 112570 - DNA, 376 bp, Glycine max
tgaaattgaacaacggaagttgtcgatatattctaatgggcataacttatcacacgaaagatcgattcacgcgcataatatatcgagacgctcgaaattgaacaacggaagctctcgagaaattcaaatggtcattacgttttaaacggaagtttgattcaggtgcataatgtatcgagaagcttgaaattgaacaacggaagctctcgagaaattcaaatggacataacttttcaaattgaagtccgatttaggcgcataatatatcgagaaggtcgaaattgaacaacagaagcctttcgagaatttaaatggtcattacttgttacacggaagtccgatttaagcgcctaatatatccagacgcttcgaattg

SEQ ID NO: 112571 - DNA, 378 bp, Glycine max
  unsure (1)..(378): unsure at all n locations
ntntcagagccaattcctgcgaggacaaacatttggaaagttaatttacaaggaaatgctattttaaaacaaaaacggcatgctaatctttttgatttaaaacaaacttgtgcacacattttcttaaagaaaaacatttatgaacgtgcatatgcgcaaaatgtcttgccatttatatcaatatacaaggatattcaaaacattctagctaccacacatattcttttgaaaagaattcatatatgcatgctcaaggtattgtgccaaaattacacatgcccatattcagagtactttgctaccaaaaattacatacgcacatctgaagtattttattaacataaaaatttttgtcgcttcatccacatttatttatac

SEQ ID NO: 112572 - DNA, 372 bp, Glycine max
  unsure (1)..(372): unsure at all n locations
ntgcgaaaagcttgccgctggagctgacccataaactgccctaactcttttagactggtgattcctaggctcttgaccttgacttgataaaactttttgccagtttgatttgttcccatgtttactaaagtgaaaaaaaatcggtgcgaatcaaaacttcgacatctatcatgggtggaatggatgaatgcatgaagaaatgcatatgacacagatgcaatttatgaatacgggagcccgagaaattgtttccttcttagatatagtgcccgacgcatgtatttaagaaggtgacacggaccctccgttggtttgccaaagagaggggatcaagacagaacctgtgtgtgatgcatatgtgaaaggcacaac

SEQ ID NO: 112573 - DNA, 158 bp, Glycine max
tcaaagaatactcatgacataacggcaaagaaaaaaactctatctcttcgcattccaccagtttacatcacttctccacattccagctctataacacacttacgctcagaaacctacctcaaaaacacaagattgccaagcgagtaccaatctgattc

SEQ ID NO: 112574 - DNA, 390 bp, Glycine max
ggaaggtaggagaagatgagtggagggagggagagagaggggaacaaaattttaagagagagaagaggcagaatgaggtatgaactttgaagtctaatttctcaaaatcaaagttgaaaaaatgcacacacaatgcctttatttatagcgtaagtgtcacacaaaattggagggaaattcgaatttctattcaaatttcacttgaatttgaatttgaatttaaatttgtggaaccaaatttggagccaaaatttcactaattatgattagtgaattttagctatggtttatcccactaatccaagatcaaatccaagattctccactaagtgtacttaggtgtcatgaggcatgtaaagcatgaaggacatgcacaaagtacgactatat

SEQ ID NO: 112575 - DNA, 355 bp, Glycine max
gataagacattccttaaattaaactccttatgcgtctcctgcccatgatgatagcttctgctcgtgacaatttacaataagaagaggttgtttaataaattctctaatagctcactgtgcaaagttttctgtcacctgccagctaaccatgatacaatgtaaccactatcatgttaacccgttataaatgctactatactttggagcgcctccttcactcacgtctatactagatacagactgataagtaaacaattcttatccaaacgctgaaaagccaactcaggctttgttgggcaattaactaaatctaactagtacaaaaaaaaatctcatgattttctctctatctgac

SEQ ID NO: 112576 - DNA, 384 bp, Glycine max
tatgactggatcgcattggattgtgctgtgagccaaacaagttataagaatttcgttttaatctgaattttcaagcatatatatttgtaattaaggtttatacatgttttaatccttaataatatagcaaaatcctttaattttttttgttagttttaagtttataaatttatttttcttaagaatagacttaacgtgacacgtatctaaacatgttacatcagtattttctttgatgggataagtttaaatgtaatatgctatgtcattagtaaatgatgatagaaatcatttttaaattgtataaagataccagtcattcaagcttgcattcatctctttctgacaagataaatgtaagtaaatatgtaagtaattttgagt

SEQ ID NO: 112577 - DNA, 341 bp, Glycine max
tccatttttcaatttgagcatcttgaaatattacacggctcgatcagacaaccgagttaaaaggtattggtgttagaattttctaatagctttccgtttcaattaccaaccgttccatatcctaacggacccaatcggacatccgaagtcaaaagttattttcgtttgacttttcttagagcatccgttttcaattacgagcgtcttgatatattacagggctcgatcatacatccgagttaaaatttattgtcgttagatttttctcagagcttccgttttcaattacgagtgtctcgatatcctacgggacacaatcggacatccgagtcataagttat

SEQ ID NO: 112578 - DNA, 384 bp, Glycine max
  unsure (1)..(384): unsure at all n locations
ntcataagtgaaatcaggtgcagccatttcccttagtgtcctctcacaaagtggaagttgaaccatatttttagaatgttcaaaattataatgctcaaaatcaagatgttcaaaattacccaccacagaatgctcaaactcaccaataatacaatgctcangatgctcaaaaggtacaaaatgttcaaggtaatcaagatgcacactatgcctaactaatctatgaaatgtcctatctatttcaagatcaaagggttgtaagtcacctggattgcctctagtcatgcactacatgcagcagttcatgtgtttctcacacagggcaaaagaggtgggttaaaactacagctatactcaaacaatatctaaatgaggtgaaatttt

SEQ ID NO: 112579 - DNA, 411 bp, Glycine max
tactttaatatatagcaacataacgcgcgaaaacacatcagtggaaattgttgttattaagattattaaattcaaaatcagaactctatgcataaactaattatattgcataggtcacgacgttattctttcattatgatcccatattaataatcattattttttgttgtgaccaaggaagaagaaatcaagtatgctttattacgtaaattaacgctgtcatgcaatctatacaaaatagagaatctgccccattatgctcacattcactctagtgctcatatatggtggtctttttgagagaggaggatctaatttttggttggaagtatgtctgacccaaccaagcatttctaaataaataaggtgttacacattttccaccacacctaattatttatctgggacaat

SEQ ID NO: 112580 - DNA, 384 bp, Glycine max
tatgcccatatttatgacgcaaactcgcaaaggaagtttaatagaaggatgaataagaaacttgaatttcaagggttcatcaaatgattattaaccaataccggtggggttggaaacacttccaaaccacattccacggggaaatttggctttccagggaaaaaaacaaaagctatgtgagggaaacttttctttttaacgccaattgctattcccccaactcgtacacacacactacattattgaatatatgtgagcattatgtaagcatatgcccatatttatgatgcaaaggaaatttaattaaagggataaatacgaacttgaatttcaaggcttctttaaatgcaataaaggcttccttgctctttttcttgatcacat

SEQ ID NO: 112581 - DNA, 381 bp, Glycine max
  unsure (1)..(381): unsure at all n locations
taagttaattgataatattnttattctacatttgtaattaaggaaaggaattaagagcaaaggacttctagaggattttgatatgagaaattgtatttttacaccatccttcctcaacctaattttgtaccttttaataaggataaactaattttgtaccttttaataaggataaactattataacaggtcattgaacaccaaaattgataatatctcaaatgaagtgatcctaacgatgcatgatgatttgaggttgacacaaaagactaaaagtgcaattaactttactttttttattttttcttattacattaatcattttatctcatatgttgtattacataaaaatataatttattatatcaaaatcctccaaaag

SEQ ID NO: 112582 - DNA, 291 bp, Glycine max
acacggtcactgacatgactttagaagactgttgcttaaggaacggcaattcttcaagtactcaagtgcgttacgtaaaatgacgcgcacttcaaatcggttcatatctttatataatatgttaaaaaactatcgtgctgccataataacaccttgttgtgtttagattcctggagagcatgtaaggaccagcattttatctaaaggattctgcgtatttaaccttaaaatatatactgaaactattttaacgaagcacgaggaatagttatgaaaaaaaatcaatgtgct

SEQ ID NO: 112583 - DNA, 375 bp, Glycine max
tataatgattaattacaaactgttatatttttttagataaaatatgtatgtgacttatgatatacctcatttttgtttttaatctcttataattgtttttcgtacttgccttctaatatttgaaattttttattttaaaaatgatgaccatatttgttaaatgttcatgatttattcttgaagatttttgagccaccacaagtcacaaattatatttttaaaaagttatgtcctcaacatgtgaaatctaatagtaggcataaaaaataaaatttttcaaaaaatatcaaggaataaattttttttatcataaattaaaaacaaaattaaatttattatcaggattacaaatatatcttaatatcttttgtaact

SEQ ID NO: 112584 - DNA, 307 bp, Glycine max
tctctgagtcacctgcggctgcagcttgcaccactcgccagcagctactcgccaggcattgttgttctctaacacacctctgagatcttgaggccaggggctgtgctcttccctcatttataaacacccaccttttggattttttctagtacgaactacattgaacaactgttcttcgatgtcagacttgggacataacctccttgactagaagttgactccaagggcaagctcttgatccgggtgaaacctaggatgcaaatatttttttcgagtccaattctatggatatgggcagacttaagac

SEQ ID NO: 112585 - DNA, 377 bp, Glycine max
  unsure (1)..(377): unsure at all n locations
tctcccccaattttctataaatagtgggagaagtgaagtgaaaaagggttcagccccttaggcacttctctctctttcgaatttgcttggaaaaattgtttccgtgaagaaaatccaagccgaggcgcttccgaaacttttccgtaaggaatttcgcgaaagtttcgaccgttcttcgacgttcttcattcgttcttcatcgntcttcgatcttcaacgggtaagtacctcgaaccaagcttttcgattcattctatgtacccgtggtggtccacattgtgttttgtgtatttttattctcgtttcatttactttttatacccccttttgacgtgcttaagccattttatttaagtcatttctcgcttaacctaaaa

SEQ ID NO: 112586 - DNA, 379 bp, Glycine max
tttatatataaaaatgatgacactttagcaattcaactgttaaattctgtaatgtaagaatatttaaattattcaaaatttaaatgtgtttgtaatacaatttaaattagtaaatttattgttatttaagaatgtatttcattaaaatcttttaaaaaggcataatagagaaacaatcatttcttttaagttaagattttacattttaagaaattaatattgattggaatattatacataaaattttaaatttatgatttaccaaagattttatatttggacagatcttcgtatttaactaaaatttatccaagagccttattgagtattaaggtattttgtggaatgaaaacttttgcataactaacaattagcattt

SEQ ID NO: 112587 - DNA, 387 bp, Glycine max
ggacctatgatactcagctgttggagaatagtcttcatatgatatgatttctgagcctttaagacccagcgttcaatatgtttgaattcttgcctctaccaatcattttaatacaagtgaaatgtaccacttggtataagtgcgggcctttacatttgcatctgcgcttggtacccaagtgagtattctgtgatggggtatgataaatatgtaatgaaattattcatgaattttcatgagagctattccttgacagttgatacttgatagtaatatcccaagtatccattctgactttacctaaagcatcgttatccacgctccttttttccttccttttaatacttctttaaatcaatattcatggcagttacctaatttgttaca

SEQ ID NO: 112588 - DNA, 371 bp, Glycine max
tgtaatcggttacaacttgtgtgtaaagagtctcttcttaaaattcaaatttcaagtctaaagagtcacaactctttagaaaaataattttgtaatcaattacaccattttaataatcaattatcagtaaggaattttcaaaaataactcccaacagtcacatctattcaaatgtttttgaatggccatcaaaggcttatatataggtgacttgggacacaaaatttctcaagaatttttactgcacaaagagtctcatcctctcaaaaactaaattatcttatcctctaaaacattctttggccaaacacttgcaaattcaataaggaatcttgagtgatcttcaattgttatatctttatcttaaaaga

SEQ ID NO: 112589 - DNA, 312 bp, Glycine max
  unsure (1)..(312): unsure at all n locations
gtgttgactacaaggctacatcttgtctctatatgacacaatacatgtcatttgagctcatcggttctctgattgaaggcacccaatcctctaatgattcattgtgctaagatctatcctgattgtgataatgcccgaatatagaagagggtgataatttaatgaaccttactaataaatcttcttctaatgtctaatcattcgcttactcaaatagaagtagacaaatgaactccaagtaacatatagtccacgatanatgtgagaaaaaaaatttatgtgaactctctatcacacggctgatttactaac

SEQ ID NO: 112590 - DNA, 371 bp, Glycine max
  unsure (1)..(371): unsure at all n locations
tctcccncattttctataatagggggagaagtgatgtataaaatggttcagccccttaggcacttctttctctctcgaaataggttaggaaaattagttccgtgaagaaaatctaagccgaggcgcttccgttacgtttccgtgagtaattacgcgaaaattctcgaccgttcttcaagattcttcgtacgtttttcgttttcttcagtcttcaacgggtaaagtccttaaaccaagcttttcaattcattctatgtacccgtggtggttcacattttgtttcatgtatttttattctcgttttcatttactttttatacccccttttaatgtgcttaagccacttatttaagtcttctttcgcttaatct

SEQ ID NO: 112591 - DNA, 384 bp, Glycine max
  unsure (1)..(384): unsure at all n locations
tcctcgtggcttctttgagaaactttctcaagatgcttctttgttaagctagatccttatctatccacacccctctattaactaaattaacttccttaaaataattacggatgaaaataacgcaacaaataatcaaacatcaaacataattactaataatatatagatatatatatcaaggtgttacatttattcttttcacaagtgttgagggaagaagcctagagtttcaagaacctctggattataagtcaaatccttttcaagggggagggaatgatgcaatcctaccccctaagggcattggatagaagacaacaagaagattgggccagagatgcaagaaaaggccctanggttctcatgagccttagagtagatttc

SEQ ID NO: 112592 - DNA, 385 bp, Glycine max
taagaccttctaaataggatcttgacatgacaggaggcattctgaagcatatgtacatacctgaccaggccactgcttatccctctaaactccacattagtagatgcattgacatcaagatggtgcgtgacagaacctacccaaggctacctatctatgatgaggggaaaaaaggcttcaagctctacttcaacaaagaaattcctaacaaaagtcagaaggtatagttagtcaactacccatgagactagaagcctatcttccaaggtcaaaagctcatcaaagagcttgatgttgatgatgttgactttatggaatcaaaccatgtggaataacaccaagggtgcaagctcgtccaactctgagcacatgcctactacaaacc

SEQ ID NO: 112593 - DNA, 119 bp, Glycine max
ccctttactaacacccttgtttttgtgtcttttcgaaatacgaactacaattctacatctgttcttcgtaagacggaactgcgtaatatatcctttactacgatgtaagactactatat

SEQ ID NO: 112594 - DNA, 385 bp, Glycine max
tagtaaagctaagcactaacaatctccccctttggcaatatttgtctaaaacatacttagacacttcctgagcaggtacgaacagttatgcaagtgggatcagcaacttccattatcagagtaatcaagcacagcggaatctgtagtctagacaagttgcaagtcgtttccaggatgtcaagacatctcacatgacatctgctttctgcttctgctccccctgtctccatgcttactgcaacatcttctatcagctactagtcttctccaggatgtcaagacgtctcctgtgacatcagctatctgctccccctgtctccatgctcttactgcagcatcttctagtagcttccatcagtcatcatcagcagcagcagtctccccc

SEQ ID NO: 112595 - DNA, 384 bp, Glycine max
cttctgtctttatatatgctttgtgttagacagacacattcacaaataagactttcatctggataatacctctttccgtgtacattgtacttgatgaaatatgaaaaggttcagattatctagaacattatatttatacacttttctataatttaactgctatatgtctgctaacatttattaaagagtttatataatctctttattgagtggaaaaaactgcatacataactctcctttcattatatacattgactgcatacatctcttttttttttcattcatgactgctcacacatcatttaatattttgtgtaagttacctttatatagtactttttttattatacacattgtcttataattgtaaatattttataaata

SEQ ID NO: 112596 - DNA, 130 bp, Glycine max
tgttcatgtgaaatctcaacaccaagttgtcgatgtcttcacaaagcctttactgcttctagctttctcttcctttatccgcaagttgggactcattaacatttactctccaacttgagggggggggggg

SEQ ID NO: 112597 - DNA, 379 bp, Glycine max
  unsure (1)..(379): unsure at all n locations
ngtgactatattntgtgttggatgcangtacgttatgaaaaggcaaggagatacctaactagcatgaggaaaaagcagcctgtgccatttgctcaaaaatttcccaatgcagaccctttagcactaaggctactggaaaagatgttggcttttgatccaaaaaaccgacctactgctgaagaggtatgctacattgtgctctattgcttatttatgtgcattgaaatgtatcgtagttgaatccttgactagttcttgagtttgtcttttcatttggacagtaaaatgtataaagaatcataacattgaatagcactttataatattgggtcttgactttcatgctcaagatttttttaaatgtntgtgttgttaggct

SEQ ID NO: 112598 - DNA, 371 bp, Glycine max
tctatataagctgaaccattttatcaataaacacaagttgagttctattcagaaaattagagattatctcttttatcttagtgagagtgattctcctaaattcttgagtgattcaagaacaccttggctgtatcaaaggactttcacaacctttgtgtgtcgccctcgctggaaagagtgattcttttcttcctttcatcatcacccttgttctttcaaaccacaattccagaaaatccacctctacccagaattatctcgtggccataactcccattttacgcactcaaattaagtgattcttgagcctaaattgaatgtcaaaacgagacctttcacctcgtgttggaatcacctcatttggagccctg

SEQ ID NO: 112599 - DNA, 131 bp, Glycine max
ggatctagcacgcgctcactgtcaatgtcctttattcatacatgtgagtagaacttatcatatgacgggcgcaaatggcagtacttgatgccttatgtcatgcgagatttgcttactatcatgtaacaaat

SEQ ID NO: 112600 - DNA, 320 bp, Glycine max
  unsure (1)..(320): unsure at all n locations
ntgagactgttgggtatgacttcaagtggtgaatctgaacgaaatggttaagagggtattggcatgttttcctccaactgagttctctgttgcagttcatgtggatggtgcaagcaagttgtttgatcagacgtgttttctggatgttaagggatacttgcgcgaagagaagagccaccaatggcttggaatgggtggttctcttgtctaccaaaaatttgccaagacttgtgactgtggttcacctagatcaactctgaagtgctgggaagaggaagatgaagaagagtagttttcttaagtgtctttattatgtcctt

SEQ ID NO: 112601 - DNA, 364 bp, Glycine max
  unsure (1)..(364): unsure at all n locations
ntgaggattttcaaacgacaataactttttactctgatgtctgattgagtcccgtaatatatcgagatgctctaaattgactgttgaagctctgaccaaattcaaacgacgataactttttactcggatgtttgattgagtcctgtaatatatcgagacgctcgaaattgactgttgaagctctcagcaaattcaaacgacaataactttttactcggatgtctgattgagtcctgtaatacatcgagatgctcgaaattgaatgttgaagctctcagcaaattcaaacgacaataacttttttactcagatgtctgattgagtcccataatatattgagacgatcgaaatttgatttctgaag

SEQ ID NO: 112602 - DNA, 375 bp, Glycine max
  unsure (1)..(375): unsure at all n locations
ttcgtgtgaacggaagngactctatgcattcgtattcgcatttctacgctctatggcactggagatcgacatgcctagcattgcagctcgatccatctcatggacaatgacttgcacgatgtatattcaatttgaaaactctatatactcaatttgctgactggatatcgattacaccaatgttgtaatcgattacccgagagtatacactctatggtgaaggggttcgacgcaaaggcatgagctattggaatgttcgatgcaaatgatttttatacttatcttgatagagccttgatgtggaaaatgaatgatgagtcgtgaatcttgcacatgatccttgtgatcatgaacgcataatctggattctatgat

SEQ ID NO: 112603 - DNA, 135 bp, Glycine max
aatggccgtcagatgtatgagagacatctttttgtgacgtattacaccgcgaccaattgaacgattttgctttatcacgctttcgactcccaagtaaggggaaaatagtgacatacacatttgactcgtatattg

SEQ ID NO: 112604 - DNA, 287 bp, Glycine max
cttttttagagtgttatagtaatctttcgttttgttcttagctataatctaaactttttatcctaccatgtctaacatcttttcccttaatttgtgctcttgaatcaactataattaccatcttgcactacttcatggcttggtcatctctgtgctacattgcaaattcttataatgtcttatttaagcctgaatgctcgtatttttcacaaaagaatatacaatatactgctgatgaccaggacgtgtataagtagcgaaataactaaaaacgtgtttccatgacc

SEQ ID NO: 112605 - DNA, 373 bp, Glycine max
  unsure (1)..(373): unsure at all n locations
ttaggatcaaactattttttctcgattgttcttcattcttcttcctctttttcacttttgtttttccattttcttggacaaaattttgtgccttttccattggtgatgatcatggaaggctaaacacttcatcaatccaaggatccactccaaccaaggctgaatttgagttctggtttagtatttctaatctttgtcaatgttcatctttctcttcaatcctattttcgattttcatgataatgattatgcttangattganaatggattaggttatggattcattttctaattttgaaatttattcccagattgcttgaatgattttccaacctaatttgcaatctcgaacaatttagggattgattcgat

SEQ ID NO: 112606 - DNA, 391 bp, Glycine max
  unsure (1)..(391): unsure at all n locations
tttgtgtgatgtttnttcactcttgcctttaactagtcactctctcttaagttcttggatgaatcaaattggacgaacaagccagtagaacaggaaagacaacttaattatcatacaaactcaataaaaaaaacaacttaattcataagcagaagacaaaaggacatggacaacacaaaatagctagaattgaaaggagaaatagcaaaaatgacatgtaaacttctaatggtcataacttttgctacgattgtccatttgaggcccactatatatcaaagtgctcagaattgaaaggagatcaaacacccaatcatttggtccactatttttttcctaaaaatgcctctaactgccttaaatccatgtttaaagatcaaacaccaatttt

SEQ ID NO: 112607 - DNA, 377 bp, Glycine max
  unsure (1)..(377): unsure at all n locations
nttatatggaccttagccacctaacaaactcctaacggtctaaccgccatgctaccggcaactgggttcgaaatccttcgaacctatctagcctaactaactcgatattaattgcatggcttccttactcacgcccgtagtcctctaaataagaaggaggcgctattctccgtttgggccttgctaaagacacccctccattgttgtcttccccttgttctgctaatggcaccccttgcgtctgctgcgtatcactcccctgcccttcaaaccagaccttgtccttgaggtcatgaagtgtttgaaactcagaccagtcttcccatgaagcgtcctctggtgggagccccacccactgtaccaacaccatgcgtcgt

SEQ ID NO: 112608 - DNA, 382 bp, Glycine max
  unsure (1)..(382): unsure at all n locations
taagaccccaagctnttagtttcaaggcaaggaaatatagcttatgtctaaaaatctgaatttttgttttaaaagtagaaaggcatgaaagttaggatatgcttgtgaaagttttacccgaatttggctgccccatgaggagtactttgcacctaggtagcatggaaaatacctttcaatggtatgtaaatatgtgtgtaaatataggtagcatggaaaacacctttcaatggtgtgtatatgtgtgaatatatggcataaaattccttgcaaagtgtgaatgagtagcagaaaaatgtctttcaacatatgcgtatttgaggataggtagcattaggagccttttagaaaatgtacccatatcaaaaagggcctaggacgc

SEQ ID NO: 112609 - DNA, 200 bp, Glycine max
tgaactcagaatctcagctgtacagagatgacacccaacagattataccttggagttatcaagttcaccatattcgcaatggagtacccctgcgtctcatacgaatcaccacatatcatgtgtggaacaggtatctactgctgaactgggaaggaggaaccattacgtgggtgaggtgttcgatttcctatggactgttt

SEQ ID NO: 112610 - DNA, 187 bp, Glycine max
cttattgtctatgtctcgctcacggagcctaccacttcatctcttgcccggtgtcacatggtcggatttctttgttcattcttcgacccttgcggctaacattattaatcatttcctaccaaaaaaatttccccatgtgatgatatctactcgtaagatcacgcgtgccgacactgataaaaagaat

SEQ ID NO: 112611 - DNA, 378 bp, Glycine max
  unsure (1)..(378): unsure at all n locations
ctttaacatcggntactaaccaatgttgaaagtatcaacgttgaaagtattattgttaacatcggttatttaacatcagttaacgttttaacatcgggtttttaaaaaaccaatgttgttattaggaattttttttaatatattgtctattttttcaataaatccaaaaattaatttgcaaattttaaatcataccacacagcataacatatataatttgaattatattttgaaacagtttttagtagaaaaactccatgacaaatttattaataactatgaataaaaaatgttcaatgttaaaaggagacatggattgtaaaaaatttaaagcaaactagtaaactaagtaaactaaaattacaaatttgcctaaca

SEQ ID NO: 112612 - DNA, 380 bp, Glycine max
ttaacattatcatgaacattgcctaaacatacatttattccaagagcgaaaggcttgtttcgagagacgaagcttgctacccaatacaaacattggacaaccagcaatggattggttccaagtagtagagacaagttgttcatagtcgttgtgctccaaccacatcttctgaaatcgaaaggaagctgggccaggtttttcacctctctaaaaagtcaataacaacggagtatgatcaggatgcactctagtgagaacattacaagagaaaattccaaaaggagatgcttgcgtcattccaaaaacctctatctagtctcatatcaattcacttattgtccaagtgaaagaatttccaagagactacaagtccaccagga

SEQ ID NO: 112613 - DNA, 328 bp, Glycine max
  unsure (1)..(328): unsure at all n locations
cttagtcactgagctgcagctgattcttggcactaatgctgcgatctgtctactgttctgggaatgtatcgtccattccacacatacaccgagctaaggtnagctgggtgctatgagtgactactacataatgcgtggccctgccgttccatcggaacctgcggccgctgatatgatngcaaccaaccttgcgcgccgggcgtgaccattctatgttgcagctatatcgattctgcatcatcgttttttactatcaagcgacaccagcgttaaggcccatactgctanaaataccccgctgcctcagcagctgtgaatcatacatctg

SEQ ID NO: 112614 - DNA, 373 bp, Glycine max
tatatattatgtagtatttgtgtagagtgttgttttaaaaacagaaagactgtgttgtatttgttattataaagttacattgagtggttatgtaatattaattgcttggtacgttgcttcagtatgatcatactacttacataaaccttacctacctgacccgagtagataaagcaaaatcaacatttttactttgcaggtatagttaatcaataacttttaaaaataaattattctgctcaataacttttatgtatattaaattaattttaataatctaatcattgaattaaatgtttttttattgaacagtcgaagtctatcagatattcattaaaccgggcaattttaacctatccttttagtagttact

SEQ ID NO: 112615 - DNA, 253 bp, Glycine max
  unsure (1)..(253): unsure at all n locations
tctcatacacttgcatcacgtaatcaattatacttcacanaacagacttatgcatcatcaaagtgatacgctcttggttgacacaacacatggatggaatcctgtggcttcaagtcttgacatcaaccctatgggagcttggaattcaacaatattgatttaaagtctactcaacgctactgatcactttactaaaatgctccatacggatgtacagtctctttgacttacagcttttgtgaacaactgacct

SEQ ID NO: 112616 - DNA, 377 bp, Glycine max
gtaagcattgtccattgatgatccatttcttttcaaaattctcttctctagggtccatcaattctactgctccgtgaggtctgacttctttgattatgaacggccctgaccacttggacttcagcttacctgagaatagccttaatctcgagttaaaaagtagtacttgttgccctggctggaattctttcctttgtagcttcttgtcatgatacgccttcatcttttgcttgtagattttggatgactcgtaggcgttcagtcccatttcttctaattccagtaactttagattcctcttttctccgcatgcactgtcatcgaaattaagcaatttgaaagcccaatatgctttgtgctctagctccactggtaag

SEQ ID NO: 112617 - DNA, 148 bp, Glycine max
ctactgctttgttgtataggcactatacatcttcttggagacactactactctaggagtgcagtcatagaatgtaggtctacctataagctccacccctttacttttgtattgcttatatagtataaaatggggatagattttcttag

SEQ ID NO: 112618 - DNA, 314 bp, Glycine max
tatacggataaccactctggtatttccgcccgtcaacgtgactcaattgtgagtatgacagatcatgtgagcgcggaagatgacgtaaatctccgcgtgtcaacgggcttgtcggccacggttgacgaaaggcgcagaagacgacgttagtctctgcgtgctgtcaagcttttcgtcttacagacagcaaaaaagaatgtttatacggataaccactcgggtatttccgctcgtcagcgtgactcaaatgtgagtatgacagatcttgtgatcgcggaagatgacgtaaatctccgcgtgtcaacaggcttgtc

SEQ ID NO: 112619 - DNA, 314 bp, Glycine max
atcatacactattgatcataccatactgtctaaataaaatgaactcaagtttactttcaatgttagtttctaaagtatactctcgaaggcttctgacaactaaagcttaagcaggttgttgcatttatcataatcttcttacacttactttcatcatcttcacctgatccttgactttttctttgtcaaacttttgttcaactgaactggcatctttatcttctcttgcaaaatcccagcaacgctatctttggtttctcttcaaacaaacacccgatttggtctctctgtaataacactcgaatttatttctc

SEQ ID NO: 112620 - DNA, 386 bp, Glycine max
  unsure (1)..(386): unsure at all n locations
ngcttctacatggaatttgcgaaagtgcttctccaaacggcaaagtaaattccagtttcttgaagatatcaaaaaatctggccaaatgtcgctctttatctttcgaggagggtacccacgaataaagtacctccttgtattcaataagaatagcctctttcttcttttctatgttaaccttactcttgcccttcttcttctcagtctcaacaaccttctctttttgtttttcatttttcaactttttcttctttttcttttgtttcttcttctttttctttttcttccttcttctttattttctcttgacagtctcttattggtgtctccccttcttcatcaccttctgcttcctcaacaatttctttaaattcaactaaatcatc

SEQ ID NO: 112621 - DNA, 386 bp, Glycine max
  unsure (1)..(386): unsure at all n locations
tctgtccgtggtgattaaggtttaagcttttgacatggatggttaagcattgaattgttgttttgcttctgctcttgatggttaagccttgttgtttctgctaagtggttaaactttgagaaatagtttctgcttggtggttaagctttgataatttcatggattaataatgatttgagcttctaccaaatggtcttgttgttgatttcgcttgatggttaagctttgatgctttctttggactcttggaagaagattgagaaagctgaagttggtcgaagatttttagaagtttatgtnttggtcgatgtatttccggcatgtttagctatattttaaattttttaactttattttcatttcctttgatattgatgtattgtctt

SEQ ID NO: 112622 - DNA, 379 bp, Glycine max
tatggtggcatacaagccttattgactgtgcatgtgcgctcaacgcacactctcaaaaccaagggtgtaacgtctgctatagtacacacaatctgtgtagcttatcacgccttaagaatggcattgtggcattgtacaaaaataaaccaccttaggcattttctttagtctggacaccacatagggagctactgtgtcttcaataatcccgatttctagcacaaactgctttatcggtctctcacggacgttaggggctatcttgctcatttgctgtggcttagataccaacatgctgtgatgtcaagatctctactatccacccaatattatttcataagaatcgaccactctatctgcatatagctatgaacacggc

SEQ ID NO: 112623 - DNA, 388 bp, Glycine max
tccccatccacccaccttcctttcatcttcaacatccactcaaggaactttcttccttcaagaaaatgagtctttttgcaagcttgcaagcctcactctcctatcttttttggcacgtgaagaagtataaaaagccggaaagaatgggaaatggtttcattttttcttttctacatgctgatagtggtgacttcactaccaaagttcttgttttgatttctcttgatgtatttgagaagtggctacaattttctctttagaaaaataattatttttcagttgggaatgtctaaatattaagggtagactatgtccaagaaaatacatactatacttgagtaatgtgttgtgatttaaaaatgaaaaaacaccttatttttccttacat

SEQ ID NO: 112624 - DNA, 379 bp, Glycine max
  unsure (1)..(379): unsure at all n locations
tgcagctgtatgcgctgccgaagaggagacaagtgatgttgtgacctctgctgaaacggttaatcaaggggcgagtatggaattggcaccggcaccggaacctccggcgtcgccgttgaagaaacgaaagcccaaggaaaagaaagttcctgccacttctttttctatggctcttgggtcagcgttatttattttcattggaatttcatcactgtgatatgttgcattgcgtttggctgttttgaattgtgatgaatctgcattaactacttgtaactcaattgcttgttgttgttattatgaaattgtaggtttgctgggctatgagcacgtcttgcgtgggggacacttcangaatttgcccagaagcttgcctttg

SEQ ID NO: 112625 - DNA, 376 bp, Glycine max
tgtggtatagtgcataaaaaagaatactttcgctccacttgcggcgcctcggattctgactaatgatggcggcttgcatttctgttatgctcactattcaaacgggctgaaacaatatcacgtgcatgataatgcggcatcagcctatcaccctcaaactaatggtcaaactgaagtatacaaccgagaattatcgaatatattacaaaatacagtcgcgtcaaacacacaagatgggtcaataaaatcgtaagatgcactgtgtgcttatagaactacatagcaaaccccaattgggttatctcctttttaactggtttatagacaattatgtcatttaccaggtgcaacgtaacacagatcctatagggctctc

SEQ ID NO: 112626 - DNA, 111 bp, Glycine max
gaaaagttgaatattgccggatcaacaaagaatttttgactaagttgaaatctacaacggcctatagatcttctaactagacaaacatgtcttgatttgattgctgatgcc

SEQ ID NO: 112627 - DNA, 378 bp, Glycine max
  unsure (1)..(378): unsure at all n locations
tgccgccacggagtttttcgactatgctcttgtgtggtggaacaagctacaaaaggagagagcaagaaatgaagagccaatggttgatacatggacggagatgaaaaagatcatgaagaagcggtatgtgccggctagttactcaagggacttgaaattcaagctccaaaaactaacccaaggcaacaagggggttgaggagtatttcaaggaaatggatgtgctcatgattcaagaaaagattgaagaagatgaggaggtaactatggctcgatttcttaatggtttgactaatgatatccgtgatattgttgagctgcaggagtntgttgaaatggatgatttgcttcacanagcaatccaagtagagcaacaatt

SEQ ID NO: 112628 - DNA, 381 bp, Glycine max
  unsure (1)..(381): unsure at all n locations
tacccaaaagttagaagcatcttcccgggcatgtgttggtgttcttggagaacttccataacctggaagacctgcttttgctgaatacttatcagccttgacctaacaagcaaatgaaaaagcaaaaacaaatcacgacttgtttgattctcttctcaattntgttttaaaaaaagtatttaaaacaattcaacactattcaacaaccaaaaatagaaacatctagattctagaagatgttttctcatcttatttcatcttatttgacttaatcaattccacactccattgagtgtcttgcgccttcctccaccatctgaacaacctttttagtagcattttgaaaactgaaaacaaattttgaaatagaactcaaacgta

SEQ ID NO: 112629 - DNA, 372 bp, Glycine max
tgcttgtggggcttctatggaggctgtatctttgagcttcaatgaggtcctttaatggtgattttccaccatcgagatgcaacagaagacaaaggagaagaggtgagaggaggcgccatccactatggaataagccatggaagaaggagctttaccaccaagatgagccttggataagaagcttggagaggatgcttcaatggaggaaaagaaagagggagagaaagagagaggggggagcacgaaattgaatgaaggaaaagggagaaaagttgaactttgagttgtgtctcacaagactctcattcatcaaagttacaacaagtattacacatgcttctatttatagactaggtagcttccttgagaagc

SEQ ID NO: 112630 - DNA, 374 bp, Glycine max
taacatattaattaactaaatattctttttttacaagtccaagtctaattttttaattaaacataccatgttttaaagaggccaaatcatagcccctgtaagtagcttgacctattcgcatccctaagcctaggagtgatataaggtgagtttggttaagcttttttttatatagaaaaaatcacttattttatataaaaaaaacacttgttataaaattttggatgtatgtataaacttatttaaaaaagcggaagttgaaaataagctaaaagcagcttattgataagctgctccaaataagctggtgcagaaacaagaattggaaaaaacacggaggtgggttaatgaaaattttggatgggactacccct

SEQ ID NO: 112631 - DNA, 246 bp, Glycine max
gggtgataaatcaacttccataattttacttttagtcaacctacatgacttaattgtcatacattgttattaacattataaagtaggaaagtcactgtttctgtcgcccctggcctcagccacacgtgatcctttgaaacttcattacctagcactctggtcatttcaaaactgttatctaataagagaagatttgaatatcacacctaattatatgagtgcagttaagaaattttaaaaccttgt

SEQ ID NO: 112632 - DNA, 375 bp, Glycine max
cttggaaagtgttgttttcaccttctcgctaagctaatctactggcttagcgagcatccactaagcgtaacactcctgggctaagcatgaggaagaatccaaaagaagatgagttttacaagtttgctaagcgcaccacttcatctcactaagcgcaccacttcagttcatccgctaagcgtgaaaggcgcgctaagccaaaaatcactaacgtgcgctaagcggtccataagtgcgctaagcgcatcaacacaaacaaggccacctatttaagcctgaaatcagattttgtgaagagagtttggactaggattcagagctttgcatgtctagggtttctagagagagaaaggtccaagttccagagagttttga

SEQ ID NO: 112633 - DNA, 376 bp, Glycine max
tggctctagaccttgtcattggacccttcaactcatgatatgcttctatgtccttatgctctttggatatccctttatcatcccctccttcttgacaataattcatactcaaatttgcattcaaaacatctatattacaagaagaaagatcaacaacattgaaactagaactcactccatactcacttggcaagtcaatcttgcaggtattgtcattaatcctcctcatagaccttgaaagtaccatcacccctaggttggagtttagatttcctttgtgaaggaaatctagtctaacttaattgtactcaaacctaatctacatgttcaaataccaaaggctttcgccctttgtatactcttcgtgcatattgct

SEQ ID NO: 112634 - DNA, 389 bp, Glycine max
  unsure (1)..(389): unsure at all n locations
ttgactctanctatattttgcaaagtatgagactaaatattacctaagtaaaatttaaagatttactaactttcctttaagttagttgtgtacttaaaatagttattaatgacttttatgtcatatatgtaattgcaaggagtgtntttattttgaaattttgataataaacatttagaatcaaattgatcataacataatactctttctgatcttttttattataagaattaagtaaaatacactatcacttatttcttataaaaaaatcagaggtaatattaaatttaggaagcaaacgattaaaatagttaataaccaatatgttaaaattactagccgctcaaattggcacaatgaatatcatancaattgatttaattaattat

SEQ ID NO: 112635 - DNA, 201 bp, Glycine max
  unsure (1)..(201): unsure at all n locations
tcactcggctctacctactgtcttttaattaaatactttagaatattagttttaattgaatatttaaaaaattaatgatacaggtgtatttatatcaaattgaagattttatatatataaacatttttaatcttaattctcttttatcttctgcatgncttttcctttctcccttaaattagaaattaggccccggcaata

SEQ ID NO: 112636 - DNA, 387 bp, Glycine max
  unsure (1)..(387): unsure at all n locations
nttatccaaagtggccaaacaagggatcattctatgtgactcaaagtcagaccctgagttaaagatgaaccaaaagggttttgttgatgaagccagtttggtaagggcaatgtttatctctgatcaacctttattaaatgaagaaagacatgtttcctctccaactattgtaatcagctcacaagatgcaccatctgtgatcaagtatgcaaaaagccataagaagccaacagccaccatcaaatttcaacgaacatttgttggaataaagccagcaccagctgttaccatttactcttcaagaggtccttcaccaagctatcatggggtcttgaagcctgacataatggcacctggctctaatgttcttgctgcttatgttcctac

SEQ ID NO: 112637 - DNA, 410 bp, Glycine max
tatcaggaccttaaatctcagcttaaagttgcccgagtcattcatccctatgagatgttgttgaagtattggcgatcaaaattgccattccttggattataagggtgaaccaaacttatgcttttacaaaaagggtcatcaagtcaagttgaaatatggaagtaaccgtcttgcaaattggggcaaaagatgaatcgagtcacatcactgcttcgtctactgccaaacatatttaggattgttgatgtccttgttacttccagtttcaccttgacaaagatgtcatggaccatgttgaaaatctaaattgattcaaccccatatcctgcgtaaaaattcgcaatacttcaactgtacatcattcgcatgcatccatgcttttcattggttgcattgctcattacattctt

SEQ ID NO: 112638 - DNA, 397 bp, Glycine max
ttacacctgcgctgcactactctctgctgaccgtaggcccgtgctaccactatgccctacgcgactatgcacttcaattctccctaccgctactgactacgggagcccttaccatgcgactagccactgcactttgctatgagctctttactgaatgcaattatataatcatggcttctaaacacttacctaacagatattcagatctcaacaccatatgagactattagttgaaatatttatcaaagtatcgttagcactacgaagtacaattagagcatctcctttggtttaaaataatagagtagccaaactgtgactaatcaacacggagagcactccagttctcagaattatgatatatatatatatataacctgttaataatcaaattatc

SEQ ID NO: 112639 - DNA, 366 bp, Glycine max
tttattggattctacatttcaagagaaaaaaacagctgaaactcttgtgagtaaagggtctccaaagaaaaccaaaaacaactgaacaagcaacaattgcagaaacacaaaggaatatttgcattcattcatcatcatttcatctctaattcctcggtccaacaaatcatgaaacaacgtgtctctgttagcatcttcagaaacttggcaatgttccataaatggataagataactcgaaaataaaagctcaaaactttctgaaacaaatgagaaaaatggtccattgatttgatgaaaatccccacaaaattatgaaatattcaaaaacccatttccaaatttcacccaaataccaaacttgaac

SEQ ID NO: 112640 - DNA, 373 bp, Glycine max
tctacttatgtggcagggcgggcttccttcactttcttgtctccaatgcgagctctgaccactggtcttccttcccgcgatgctttttttcatgtccgcctgaatgggcttataacctaaaccatacttcccacgatttccttgggtttttatcaggctagttatgccgccattgtctttgcctaaacccatcccgggttcataaccgttccccaacataactcgggccatcattaccgccgcatcggacagacaaggttgcccaaagagggagtccacggaggaaatgctgaccacctcaaaagactggaaagcggtttctaacgattcttctgcggcttccacataaggcatggaggatgggcagcttacc

SEQ ID NO: 112641 - DNA, 395 bp, Glycine max
  unsure (1)..(395): unsure at all n locations
gctatacacttcgttgcattgttgggtgacagggtaaataccattatgccactgctccaagtctcaaatgactagactaagtctatactacatgtcctgcaacatggattacaactctgaaacaatagccatggacatatcactttacatgatanagacctttaaaactatacacccaaatggatcttccttgtgtttgggcccaacaaaccatgtaacaccaggatctcgatcatgaatcatcagagctactaattgctttctacagcagacaatttgctctttattagcataatgttgatgttaagtttgcccaagcctaacctcttctaacacaattatactagcccatattttaaaactttgaaacttcgaatcattatttcagtattttc

SEQ ID NO: 112642 - DNA, 378 bp, Glycine max
ttcaccccataatttcaccaaatacggtcatgtttgctatgaaccactgtactccttaatgaatgatgctctactacatcctaacacaaggtaaatgcgttctattaccatctcaaatcacactctcaccacctagctggtaacgcgctccttcacaatccacatgacccactccctaacaatttcaggaataattgaaggtccatggtctgactcttctaatgactgcatgctcatatcgggcatatgagtctacgcatttcagattgaatacgcatatacaatggatcaactgctaccgctgacgaacatagaattccacattctagtatcaaccactggataatataaatgcactgatcaatcaagccatgctct

SEQ ID NO: 112643 - DNA, 253 bp, Glycine max
  unsure (1)..(253): unsure at all n locations
ctgcagctttacgtattagcattctactataatgtaatgatcaacacatggtgattcttatacgtaaaaaactacgacgtacgtttacacgtaaccaaaaaggnaatatataaatatcaattctganatatataaatataaattcttgataatatcaatatcatcgatgtttttggagttcttatgatgctattcaaggaatagctaataactcaatactctcgaagactaaccgttagcacctaacgctttg

SEQ ID NO: 112644 - DNA, 374 bp, Glycine max
tcaagaaaaagatggcctcagcaaattccttatttccaaaagggaattctatcaatagacctccaatctttaatggagagggttaccactactggaaaacccgaatgcaaatttttattgaggcaatagatctaaatatttgggaagccatagaaatagggccttatatacccaccacagtggaaagagtttcaatagatggtagttcatcaagtgaaagcataactatagaaaaacctagagatagatggtctgaagaggatagaaaacgagtacaatacaacttaaaagccaaaaatataataacatctgccctgggaatggatgaatatttcagggtttcaaattgtaagagtgctaaggaaatgtgggac

SEQ ID NO: 112645 - DNA, 367 bp, Glycine max
tatgctgcaaacatttataatagacctcctcatctacaaaaccaacaacaacagaataattatgacctttcaagcaatagatacaatccacgttggaggagtcatccaaatctgagatggacaagtcctccaacacaacaacaacaagctgtccctccttttcaaaatgttgctggtctaagcaagccatatgttcctcctccaatacagcagcagtcaccacaaagacaacaagcgactgaagcccctcctcaaccttccttagaagagttagtgaggcaaatgaccatccataatatgcaatttcagcaagagacaagagctttcattcatagtctgacaaatcaaatggggcagatggctactc

SEQ ID NO: 112646 - DNA, 373 bp, Glycine max
  unsure (1)..(373): unsure at all n locations
ntactatgcatggaataaccgatgaaaattccttcatctgacttagcatcaaactttcctaaattttcttttccattgtttaatacaaagcatttgcaaccaaaaacatgaaggtgtgaaatgttgggttttctaccattaaacagttcatatggagttttctttaaaatgggtcttattaaagccctattcatgatataacatgcattattaacggcttcagcccaaaaatattttggaagaggagtgtaatttaataaggttctagcaatttcttccaaagatctatttttcctttcaacaactccattttgttgaggggttctaggtgcagaaaagttatgttcaatgccatgcttatcacaaaataatt

SEQ ID NO: 112647 - DNA, 330 bp, Glycine max
  unsure (1)..(330): unsure at all n locations
tctcctcacacacttcacctttttctgacagtcttcttttctttggattcacccctcggattgattgattgatcnggactctctcacagactggtgaaggctctggataccgccaaaccctgttccgatggcactccgctcatatacacaaacgtcttacagttgttatatcatactataatctatctctctctttctacactcgttatatgcaccatcatctggcgattctaaccacgttgcgttagtgtaacctacgtcctcgattgcacgttttcttttctgctagtcttctgatatattttacgacacaacggaatcatccggatg

SEQ ID NO: 112648 - DNA, 355 bp, Glycine max
tctgttacggaatacttgtgcgaattgagcattgtcatagtgattgaagcaataagtcttatatagctatataatacgtgtatttaccggcttttagtcacttgctcaactgcacaaagtaaatacttttaatgatcttgaccactatctgataaaaattactgtcgtggaccctattttatccattggtgacaacaaacgtgtgctgtttttttatggttgcactgtatctgaatcttgtttaactaatgtacacggaactgctctgactataactaacattagtgatatgtgaagtattatgagttggggcgattttgggcattaaatatgactttatcgctgtaatttttca

SEQ ID NO: 112649 - DNA, 144 bp, Glycine max
tgccctgtcggaatatcagcttattggttttaacctctcaacacggcgattctgtgttgtggggccccggagactttgtgttctttgaggatgtataggctggtaacatcatgttttaacaagctctgattgacgaaacactgt

SEQ ID NO: 112650 - DNA, 163 bp, Glycine max
cgccttacccggcacttggactttggtaatctttttcttttgggaacgatgtagcaaatctggtattaggatatcggcaatacaaagctctgccgagactaatctgtgatcaattattgatccagtgagaaatgctcccaagtgggacactaaccttggttct

SEQ ID NO: 112651 - DNA, 263 bp, Glycine max
  unsure (1)..(263): unsure at all n locations
actcatgcacacgtntaaagtaacacatntatgcacatgtgtatgtgtagaatatcctactatntatatcaacatagaggccatccaacacattctaattgtcatacatatatatgcantttgaaagaacacacattctcacgctcaaggcattgcgtcaaaattacacttaactatgtnctaaacattngctatcacaaactacctacacacacttcgaatatatataccatacanactntcattggttcactcacacttat

SEQ ID NO: 112652 - DNA, 304 bp, Glycine max
acctactaataataattaagcgcacataacttgatatctactgggacaacacttaacatcaattgaaggtaaatattgcctgatcatctcttgatcatcaaaaaatttttaactaaacttgaaatcttcaatggcccatagattttaactagacatctgtttgatatgtctgtatacctttcactgactcttttgttattccttttagctataataaacattcattgtgcgtcactctcctgagattgcatagaattctgttcctgactagcaactgagaagctaatccctcctcactaaccgt

SEQ ID NO: 112653 - DNA, 232 bp, Glycine max
  unsure (1)..(232): unsure at all n locations
tcactattgcagcggcttctacttctgtncacgcagcctgatatggtttcttcacatgctatttatgtcgctgaatggttatagctaacatactccacaattctggtttatangcagtatccgcatgcttgctaacctccggtcatacgtccactactggcatttacgcgtcgcaacagtgcaaaggatccgagaagctacactcaaatgaacggttacatcttggttccta

SEQ ID NO: 112654 - DNA, 269 bp, Glycine max
cacataggctccatcttataaatattgtgagatacaaaagaaaaaccttccactgttatggatgataactccgactactgaataatgtataagaatattaggagcaagaaattaatcattcacaataaatctgcattacttaacttaacatctgaaaacaacctggaacgactcactcatcaaaaaatccaggtgaacatactgaatacactgatcacgctctcttaattgaactcacatgacaaagagtcatttctcagcatagtggt

SEQ ID NO: 112655 - DNA, 313 bp, Glycine max
tgtcagactccggaatcaacataacataatgtaacttattcttcattctcgaactcgaacttgacctcgtcatttccgaacattcacaatcaaaagaagtctaggtgacttttttctctcttttacaaaggaggtgcgcctcccacaccgtgtctctacacacttgagaatcgaggcatggctgggtttccccattataacctcttgttttggattttaaatcgacacatttacactgtttttcagtcacctcatctataccttgtagatgcgatatattccactctgttcgggcgactaagctaatttgtcc

SEQ ID NO: 112656 - DNA, 290 bp, Glycine max
  unsure (1)..(290): unsure at all n locations
aactcagctgcataaatcactctgaccgtcttttcttatttcctctggaaacagtagattggttaaatgacttgccattggtccctaatcatggataatggttattcaccttagttgaattaatcacttgttcttctaccctccgatcattatatgccaagagtatggttactatgctatgactatattantcatactgcacctggccttcatagttggtgttaaaactatacttcttacttaatgaatgctcatcaagttttggggcacaattagatgatactctttta

SEQ ID NO: 112657 - DNA, 326 bp, Glycine max
tggaagatggattaaagatagatatggatatagttattactctagctatctccagaacgactgttcaacaaaaaaaaactagaatatgtacctttgatactcttaccttaattattaatattttgtaggaatattactagaaatgttgttgctcgaaggttaaccaccaagaaacctgagtctatataatctcaactaactgtctgctcagcaatttttccaaatggcagtctagtgctaacaaactttttgcaactcacgcagggaagttacacttgactttattaatgaattcacactctaatactgatgccctcattttcact

SEQ ID NO: 112658 - DNA, 406 bp, Glycine max
  unsure (1)..(406): unsure at all n locations
ccttatctgctctggccggtgaagccaaggaccttcctctttaatttaattctcgaacacaaactatgatgccacatggataacactcattngctgcagatccatgttcaatatatccgatgataggtcaccagcatgcttggtaactctactttattattttcactgctaggctatagtgattactataaaaataatgagtagtctttattatattctctgtaggcttcaaaaatatcatcaaatctgacatatgattctagacattggaggtggatnatatntggtacaatcatttaacaaaggtcgaaataatgatgtctaccatttaatattctattcaagagaaaatttgattgtttttaaaacttactcttctacccccttctgtgtatcttccttcaac

SEQ ID NO: 112659 - DNA, 362 bp, Glycine max
tattcacatagtcttatactttatttttatggagtttacctgatttatattattttgctgaattctaattcttacatctttatagctctattttctactaaaaaatgatgttgtcatgacattagattttacatttttgaggtatgaaaaatcttagattagctcagttattgattctttatctaaaatattgaatctatgtattataacagctatatatttatttattctcctacccgttgacatataatatttatcacttctccaatgcgaaggcttatattcgaatttaatattaaagatactacatacatagtctccgttatctttaactgaattcatgagataaatttgatgtgctt

SEQ ID NO: 112660 - DNA, 114 bp, Glycine max
ccccgagattaagagccaacacattcttactctagtcttcaaattgttaggacgttatgaccctgtgtctggctaccagaacaaagtggggagtcacctcccttttgttgttgt

SEQ ID NO: 112661 - DNA, 220 bp, Glycine max
cccattatcatcatttatcatatgctgatgctttctgtgacactactatcagacccttcattattgaaatcttgacaatatagctcccaagcgcatatcttcaatacatcttattgctgaactcttccccagcaagttggctgctaatgctgtgactattatactgtcactttttgcatttgacatgcttctgtgaatacactacttgtatgctccttta

SEQ ID NO: 112662 - DNA, 210 bp, Glycine max
  unsure (1)..(210): unsure at all n locations
tctggctnctaaaacacttggagtattcaatactatttccaaaaagtatctcataacacctcccttaagtaaatatcctgcgtggaattctcttagtcgcagcacccattatgctcttttcttgaagaccctttatgctaagttggaaatcactatcacttcttggttcaactctaccttggactattatcacttttggtacccatttta

SEQ ID NO: 112663 - DNA, 223 bp, Glycine max
ttttcccccccgagaaaatcctaatgcgtctcatgaatttctttaaaacttaataatatcgaagataaacagtcctccattaagcaaacatataccttgcctggatgataatattaggttcaatgtagatctaggaagtggcctcttttacctgaagactctagttaaaactggatatgcctatctgatttaatatcaacgattatgaatataactgcaaaat

SEQ ID NO: 112664 - DNA, 355 bp, Glycine max
acactcgtcactacagcactatgattgctttaatctgtttgcttgtgatcacttatgcttttctttggcattattatactttgcatgttttccctattatttcgtccatctttatacttaagttggtggtcagtgtgatgttaatgtatatttttaccactttgacaatgtctactaattatgaactgctataaataaaagctattctctgctattgtatggctggtatatatctcagtcttcaaacttcaagttctttcctcccgctataatcatagcaacagagctgtttactgtatatctttgaccttgtttgtctatttccgtgccctttttcattaattttctgattttg

SEQ ID NO: 112665 - DNA, 171 bp, Glycine max
atggggacttcttctcaggatttcaaacttcagagttctaaactttagactccgtttatgactggacctgtgactggataagctgaaccataagtactcttctttttctatcggtccctttttttccttcttctctggctctcacttttcagtatttgggacctctcagtt

SEQ ID NO: 112666 - DNA, 114 bp, Glycine max
catatgacctcacacaatcacctgagagatacctattcatgcagctacacacaccagcgtctctcaagcgtgccacactcatctccatcccaacaccacacactggctccactc

SEQ ID NO: 112667 - DNA, 386 bp, Glycine max
  unsure (1)..(386): unsure at all n locations
agcacggctcacangctgtgaataaataatactttcttcttatgcttatgcgtatgctaagtaaagtctctgtgaattaaaaaatagtaagtatgccggtatatcaaaaaatttgtagactttacataaattattgctttagataaatttatcttttttaatagcctttttattcttgatcttgattatacttatcaagattgtacattttgatgcgtcttcaatttatcttttgtgatcctgttaacatatgtagcgttacacttatgtgagcagacttttgcggacttaaaacttcgatgtaccactggttctacacttcttagtgtttcttccccccggtttgttgtttaaaatttggttctttttcccttacctcctctttt

SEQ ID NO: 112668 - DNA, 329 bp, Glycine max
ttatctagctgctcctcatatgtcttgatacccgaatgcattctttgcctctttttgcgcgaaggatgactgctctcctgtaaggtcataaaaagcctgtctaattaacgcaatactgcattattttagagagtgcgaactattattgaaatttgccactgaatcaaagttggatgctgctaacctgttagacgaatgtaatgaccgcgctggataagtcaatatatcatactgcagccctcatgaacctcatgcttgcagatacatacacttcactcagctctttatcgcatctcttgtaccaatttgcattttgtttgtttttgaga

SEQ ID NO: 112669 - DNA, 137 bp, Glycine max
atttagcatttgtattttcctataaaccttttctctacactatatcaccacaagtctcctctaataataatgagcatactgtctcaaatccctagactttgttttctaaactaaactcgcggtgttataaaagttct

SEQ ID NO: 112670 - DNA, 204 bp, Glycine max
gtacaaaagaaccactaaggcttctgatgtggacacctcggaggcacggatcgattgtccaagatcccgaccccactattagaaccaaacgaaacactacttataagcgatgtcccggagtacccccttccaggaactacagcacgatgttatgctagctacttccttttcttggcaggtctttcctcatgaagaaactcattt

SEQ ID NO: 112671 - DNA, 324 bp, Glycine max
gcttacttataggcttatgtgttccctggacccgaacagaaaaggagagcctcctggatacctgaaagactccacaatacctgtaaactgagatttctgggaaaaaggaaaaaaagggacccattagagaaaggaaatgattagttgtcaattcttttagtcaaggtcctctttttacagactctaattttgaactctgaactttaactctaactatatccccctttatacccctgactctaaatctaactatatcctcttttctatcctgaaactatatcccctactatcctcaactaataaacttcaattaccatcgtactt

SEQ ID NO: 112672 - DNA, 152 bp, Glycine max
tcaaagaatattcctgacatgaacggcataaggagaagaaaccttgatgctcttcgcattcacaccaattttatagcatacaacttctctaccacaccagtatccaagcctcctaattacacaagctgctacgacttcatacaacacactta

SEQ ID NO: 112673 - DNA, 276 bp, Glycine max
  unsure (1)..(276): unsure at all n locations
gtcttagcccgcgctcactaagtgctgtaatatatatatatacattcttgcctnttgctttgatgcagatgatgctaagtgttnaagtactgctgtgaattaaagaaaactagttaagaagcccagtatttcagaaaatttgtaacttcacataattttatgtttagtaactttatcttttttaatatccctttcattcttgtactgtttatactaatatagatgtatatatttgttgcgtcttcaatttattttttatagtactgttaaatatgt

SEQ ID NO: 112674 - DNA, 295 bp, Glycine max
  unsure (1)..(295): unsure at all n locations
ataattaagctgcaatccctggcacttatctattatgatgagttgctgaaactaatttatttgaaactttggacaactggaaatcaagntatagaaatgctgctgaacctgcttagaacgaaagtgctaaatgaacacgtctgactggagttaagatcanagtataatcactacctgtcaggcacctcttgagagctatcatagtcttcgtctagagtacaatcacacgtccaaccatgctctttaatcagcaattctcattgtacctcaatttgcacatattgttttggttttt

SEQ ID NO: 112675 - DNA, 351 bp, Glycine max
  unsure (1)..(351): unsure at all n locations
gccttaccactgatgtactatgtctatggctggatgtctagtaagagattatctgcttcattgtgaaggccattgcatcaaagcgtggtgtggaagttgcaagattgtgtgcttatcacgctatgagcttgctgaactcataaatgggcatcacgtacaatgatcaggatgtctgggcttagtggaaactggatttgtgagtgtacaagttctgcttgttgttgctgtggatactggcgtgatggtttgtgatgctggactggagatgtggaccggtgaaaacagttggctctggactactactgagggccnggatgggttcccttggttgaactggtccatccccgccat

SEQ ID NO: 112676 - DNA, 494 bp, Glycine max
  unsure (1)..(494): unsure at all n locations
aactcagctgaatgacatnttcagcgacatgcaactgatgtgtatatgtntttnttctttccgacatgaagaataatatgtgatgattatgtcatgtgcattctagtactatatctcactgtaggataatcattatatgtactanagtagtgaagtgttacaggatatagctgttactgcttattaatcagatacactagttctaaacttctgtataagtcaagatgacctcttctattcactaactcaacttcttctgcatggatcatcataaacgtaatctacactctaatgtctttgcattcttatctgctcattgtaatgactacagtatgtgtttcagaaaatatgtcacacttgtgctcttgtctaatgactctacagcagacacttattccattatagactgttggtcttacacttgcactatgacttacatctgacaaatgcttatgaattaatgtttttcttttcctgtttcactaatcacacaa

SEQ ID NO: 112677 - DNA, 229 bp, Glycine max
  unsure (1)..(229): unsure at all n locations
cacttctcatggcacgagtgtcaacatgcactntatataataatcatattgtgggtcgtgctatttatgacacatacgtatttcacacataannaatttgtgtgaagcattntacgacacctattcatgtacatatattntgaccaactttttcatgctacatcctatatatatatacacacatttntttggaaaggcttctttggtacctactcacaaatacacatat

SEQ ID NO: 112678 - DNA, 363 bp, Glycine max
tcctgaccgttacctgcgtaatgctggaggattggcttcggacatgctgacatgagcctgatttatccactacttctttatcgcattcaccctccccttctgtaactgcttgaaactccttgaatatctgcagcgtatgcatgagccgctccagcttccgcagctggagtaatgcctgcctactggaaagcaccacctttacgcgatacggcctaggtgaatatatacctgagatacgcgctggacgtacatacaagcaacggctgctggcactttgacgcagtgcatgcttgtattgtaagtggatcactctgctgattggaaaaagtcaattgacttggtacacttattgtttacagttcg

SEQ ID NO: 112679 - DNA, 51 bp, Glycine max
acagtatgtctaacacctcagactgagctgaaaattcatttaaggctaaga

SEQ ID NO: 112680 - DNA, 224 bp, Glycine max
ctgactatcctccccctgaccctacttaccgcataagacttctccacagccgactctagaacatatcaccattcaaagtggagaataagaaatggagaaaaaaaatatagaagaaatggaaaaagaaaatgatgaaacagagaagatcctcaacaaataagaaactctacatagaagcattcacatcccactctctgattctcctacaagaaacacccctcttc

SEQ ID NO: 112681 - DNA, 239 bp, Glycine max
  unsure (1)..(239): unsure at all n locations
ccttatcgaatgtatgctcatcctttttattcgnggcgctgatgtagagcatttagactcagtgtacattccgaattcactacaaagaagctcttcactgagtttcgaaaccagactcaagacccttactaacgaggaaaataggacttatcctccagtatacttaattaattcatgccactcgtgctcttcctatctactgtccgacaaccagtacctttaataataaactctcattg

SEQ ID NO: 112682 - DNA, 302 bp, Glycine max
  unsure (1)..(302): unsure at all n locations
ctgctatatgngaatgctgctagatcataatggcagatcatcatattacttggtactggtattgatcttattactgctttaatgtataatctgaattgataattgtgatgttttactagaattcaaaattcattttgaccacatatgcttaattaatggaacacctgctttgtctactctgatcccttctaagtagtgtgaagctggtagactacatcactaagattacaatggtctataccatgtctgataagagtgtgtgcggtgcacgatctactgcacttgtagtctcacaataccat

SEQ ID NO: 112683 - DNA, 63 bp, Glycine max
ttttttaaaaaactctagtcacaactaaattacctctgacatttcacccccagccctaagtca

SEQ ID NO: 112684 - DNA, 327 bp, Glycine max
  unsure (1)..(327): unsure at all n locations
gatcgtaccaaacaatacataaaattctaaagatntgaattgaattcaatgtgtatcattcccttgttgtattgatatcaggacaaactctaagtaacttgaaagcatgacttcaaacataactggtaatcgatatcaaacattgaatcgatacaggagaaattttgaaatatttgaaagccattttaaagtttgaagcacagacttaatgactgtatgaaataagtttgtcatctacccaggctaataaatcagtatggctaatgcaaagctaggtatacctagtatcagcctgcaatatcctatttgcttatagttatttggctg

SEQ ID NO: 112685 - DNA, 115 bp, Glycine max
  unsure (1)..(115): unsure at all n locations
tctattcgggttgatatatactgagacttctctaaatagaagtgaactatataaaaatcgggtacttcttctcttgatcttatctntcttcctcattctncagctgagttaatta

SEQ ID NO: 112686 - DNA, 401 bp, Glycine max
ttagcacgcgctgcacaacaacttctgttctctctgtacatttctaggaccggttcactgaactaaactctttagcagagtgagtgagatcctctggatggtgaaaaatgaaaactctatccgtcactctaaaaactggagaaccaggacacttcctcccacacagatagacttatccgattctcaacagaatcttggcttataactgctggctcttactgaactgaacctaaccgattgtagctgaaaatcatacaaacacctgatgatctcctaaatctggtaggctaaaatacctggcctcaccagagtgctagtctcgttcatatctgatgcatctgtgctaactactgctcaggttctctacaccttacgtaaatctgccagtgtagaaaagtcaa

SEQ ID NO: 112687 - DNA, 247 bp, Glycine max
gtatctgaacaccttgtgtatcttgctcataacctgatctcactcgaaagattgattttgctgtactgacgtggggggatccttatgctcgaaggtacgatgtatccttggcttactacccactgaatgtggcttattttactttctatgcgcgtcattccatgatttgagtgtgaagtaaattgctgtctgagggatggccttaaggttagttagcaccatgtcttcggaaaaaaaaccagttttt

SEQ ID NO: 112688 - DNA, 85 bp, Glycine max
aggctcatagattcctggagaaacttccacacaatgttggtaaacttaaagactcatgagaaaataaaaaagaatgctgaattag

SEQ ID NO: 112689 - DNA, 308 bp, Glycine max
agactaccactatcaaaaacctttcttctcatccaaaaatatttccgccactggtggcattccattccgaaaagttagagtgtacctcccaagaactggtgcatgtctctacgagcaactccttgtcagcacagggaccatcccggaaccgcttattgcctggtatatgcttctgacgtgctgtgctcactctttacttatagattctgttctcaagggaaaaaccgttctcttcattcctcctgttagaacatacctagtctccacatgcagacagacgctaccttttaaagtttggttaacttgaa

SEQ ID NO: 112690 - DNA, 392 bp, Glycine max
  unsure (1)..(392): unsure at all n locations
atgttgatgccttcgcagcatattatggcttcactgaacatggactaacngaccaactgaccacatctctaaacatattaaccactgaacttatanatactgacccaatgggaccaacctactgaangcaagtaaatcagtcacctaatgaacatcggagtctttgatatcacatgttacaactaaagacacctttgataacactcttctaatactaattcataaacaaccatctcagatgctacanaagtgctaaaaggatactactactatctatcaaacgactctactgaccatcacatcgcttacatactatttaccggaggagattatgtgatgtgcaagaactctctagatgcacatgctactcttatactcagtgtcaatcttgc

SEQ ID NO: 112691 - DNA, 195 bp, Glycine max
tacctaagactttggtgcctaattggtttgttgctgatttctgggtattttgttaaactagttttttgtttatgtacatcattattcttcttgttatatttaataatttttatataatctgtcatttctttattttgttctcaactttttttttttttttttcttttttttttatttttatttttattttttttt

SEQ ID NO: 112692 - DNA, 407 bp, Glycine max
  unsure (1)..(407): unsure at all n locations
agctgagaacgccaactcctctanatcgattaggctaacagtggttgtcttctctgcctaggccttcaaaccgtacgcgcttatgattcacttacacgttttcctcacgaggctgagcggccttacggaggcttcctacaacaaccaccatcttttcagatcttctatgttaccgagaatgtgcctcacaatactcgtaaccatatatggctacgagagggaaatcaccttatacttgctaatatctgaattgaagatatgttataaatcacaaatggggactacgtttatacctatttacaaaagtatatacactaaaataacataattggaaagttgatcaattacacagttatactaaagtagtcgatcaccactacagaattntcactgatcttaccctacag

SEQ ID NO: 112693 - DNA, 361 bp, Glycine max
aacttccacgggctttttatatatatatatttgattcatgttattctgaatgagaacacactaatccatgtgttatttcactggagattttaatctaaacagtaaaattcctctatcaggataatatactgattaattatatgaggaatattttactatgttaatataatgaaatcttatcttcttttataaaatatcagttccgcctgaatgtttatttctgtaatatgaaatttagaaatatctcatttctgacaattttctatataaaaatattatattaaactcaagcttacatttgcaaccccgtacaatatcttaaattgagaaaggtctggacaagggctattttccaagttac

SEQ ID NO: 112694 - DNA, 292 bp, Glycine max
  unsure (1)..(292): unsure at all n locations
tgtattcccccttagcattctcatgtcactntctancatanggagagagnaaagtgtggaatacagtgagtgatgtggtggagatagagnaaaacatgatgtgagaatgtgaagtgggaataacattactcggggtttacannattgntcatagtagcaattgtagtacagaatatgccctacatatataatagacatctattctttgtgtgactngagattaatnttcaagccccttgatgagatatcatatgatcatagaaaatgaatggacctgcatatgatatgatga

SEQ ID NO: 112695 - DNA, 133 bp, Glycine max
tgctgtgcacacacactcgtattagccgcttgaagcaatcactctgcttaagataacgttaaagatacacccattaacaccgtctgttgcattacgcgttgagatcattgtgtgcaataactcgtcatacacg

SEQ ID NO: 112696 - DNA, 394 bp, Glycine max
gctttatgcctgtaatgtgttcaactgagtcatgtgtagtttcattaatggcgggaccatatcctgattattcttgacttaatataacttttgtacccatgaaaaatagttagtagcaatttgttatatttaaatatcctttacagtttattcctaatgttctcttatgttataagagatatcagcagagttctaagaaatataattatgcattaaattgaaataatcttaaaacgacattattttagaggtatatattgcacaaagaaaggagtgagcttagtgtgtctgttttgagctatatgtcaaaataatctgcgtgttataaacattcgtctgatctagacctacacagccttagacctacacacctgaacctatgtgacttctatct

SEQ ID NO: 112697 - DNA, 351 bp, Glycine max
cctcgcctccaccttatttaaagataaatatttactatattactgactcaaaatcaatgggagggtattttcagactcgaccagatgtcatctccgtctgaaacgcgcatcattgcaccagacatcgtactaaataggactactaggcgttactaaaacaatgcttcgtcatgatttattgattttgtaccccatgtgtcattgacatatcttttccccccccccgccccccctcatcaatttataatgtcactcacgctaaacatcttctctacacagcgcgttgtcattaatacatccgtttcccataacctaaattatgatttaatccctggtgtatagttctcctac

SEQ ID NO: 112698 - DNA, 232 bp, Glycine max
taagtagtagaaccttgatgctctgcacaattcacaccccattttactacatacaccttctacccaccagatccaagcctctaatacacaattgctcgactcatgcaaccacttgccaactaacacacatattgattgccaaactgtaataccaatctgccagtgctgtcctttctgtataaggacctaccaccagtatacctcatttagtcatcaccacggtctatggaga

SEQ ID NO: 112699 - DNA, 362 bp, Glycine max
  unsure (1)..(362): unsure at all n locations
ctgtcagtctaccgtgaatcagacataagacaatgaagtctgcaaaacatcaaccttcagatctacgaaacgtctgaacttcgagcctcgtaattttccgaacatttcacaatcaagaaagactgctangngctgccctttcttttacttcctcctattatacaaatagggagtgtgcgccactgccagcacaggtgttctcaaacaccgctctgagaactctgagccaatggctgggcatgccccattactgtccccttgttttgtatctttttaagacgaactcattcgacatctgttcttctatgtacgacttgcgtactatctccttttactcgatgtcgacctctatatcacatctc

SEQ ID NO: 112700 - DNA, 316 bp, Glycine max
ctcctcttatattgtctttgccaatgtgagtgacctcttcataattctgctccagacatttcaggtcccctgacatattattttctatacgatctctaaaattaaaaacttttattatggggcatggcatgttaatttctctatagtttcctgtgtaacgaaactctatgtggctgacggatttaatctttgatcacgagctgacagatccacctctctataacaacttatatacttgcttggtatggacaataattaagtgcgctctcgctactgacagtccttaactgctcttgtgtcactcagatgcacatct

SEQ ID NO: 112701 - DNA, 254 bp, Glycine max
tagacttaactcactacacgctgaataccttcccgaatagaatagtgtctctggaatcagtgaataacatctctggtgaatattcccctgtcctcctctgttttcaatgagacttaaagaaaggacaatatggaagcgtttggttgttatttacttactctaagaaaataaataaatggccccatatcttgcttgaaacactcctcatgacttgataaagttacattatttgtgaacatgataataatataaag

SEQ ID NO: 112702 - DNA, 260 bp, Glycine max
  unsure (1)..(260): unsure at all n locations
ttcatctcgctcactaggtcgtcagcgtacaagacttgcgagcacacctaggcaacgccacgctatatcttcccacacatacttatagcccgaattcaacaatcgcataatatctgccaacgngaagatgaaacttgatcctgcngtcactctaagatcccggtccgactcaatcngctatatgatctttacatcatggcgcgttacacgctgatggaaactgcgtccactaatgctgacaatcccttgcactgctatac

SEQ ID NO: 112703 - DNA, 377 bp, Glycine max
ttaactcacttccaaatatgattattgtggcctatatatactagccagctttatttttatagagcatatgatttgacatctaataatttcttcacatagaaactaaatattggaaaatcacacacttcccaaagaatctggaatagaattctacactatttatgtaacatgacgtctcttacatatattctgtatctgcatctattactactaaatttttaccatgatgggttatatgtggcagatataatgaaaaaatcataactatagatacttatacgaggatggtagctaagattgggtcgcagagtgttatctaatgtcgtaaaacagtaaaatgtgtaatactcactcataactttaaacctttttttttt

SEQ ID NO: 112704 - DNA, 108 bp, Glycine max
aggccttatctaactgaggtgttacctctctccactgtgtacagctcgtgcgctatctcgtagtacagaaattgaaaagatagtgtgctgtcctgacgaaggcttcac

SEQ ID NO: 112705 - DNA, 341 bp, Glycine max
tgatttgccaaatggtggtaaaagtaggtagtttgcttttggaattttaaccttaaatggattaagccagcattgaccaaaattggtaaaactactttttccaaaattgattattcctatttaaaccgttaaaataatgggctaacttcaattattaatgggcctacctccctagaatacgtctatcagaaaaacttccagagaatttctcactagagacaattacattgaactaatgcacaagcaattttgctatatgaaaattagctctacagttctattttttatcaagctttccaaactaatatacaccacacacccctcatttataagcacaaaac

SEQ ID NO: 112706 - DNA, 344 bp, Glycine max
agcttctcgatatattatgcgcccgaattataactttcgttttaaagttatgaccatatgaatctctccactgcattccgtgggacaagtgatgccttttttaatctctcgatagcattcgttggtcaaattcgagcgtcttgatatattatgcccttgaatcggacttccgtgtgacacgtcatgaccaattgaatatggcgagagcctccggttgttaacttcgagcgctctattatttatggctccaatttgacatccgtgtgacaagttatgtgcccattaaattctctagagcatatactgtgtaattacggctcccctaaatagtctgcgcgctaata

SEQ ID NO: 112707 - DNA, 353 bp, Glycine max
accgtgtggaaactgttattaagtcttttttaaaaagttccagttcttaggcaaaggccttttttttactcttccaaaaaaactcctttaagtaaccctgtgctcttttgtcacctcgtttgccgcggccttgaaagcttttaacctcagacccactgtaagtgttgtaattatcccaactatttacatatgaatacatatatcgttgttctctatactcccgtttccattcctaccaattgttttccgaactttttattcagcatacttggaatcgagcccatgcttaattctagaacgaagtgctccagacgattattccgtgttaacagaatcggttgaggagctgatct

SEQ ID NO: 112708 - DNA, 402 bp, Glycine max
  unsure (1)..(402): unsure at all n locations
agctngagaggattgatggngacccggcgttgagaggaacgatgattatggctacgtgggagtacaggagctcagttggaggtggacaacaagggatggtgggtttatgtgtgatttgtggatgtggagaattgtcttgcaccatcacccgaccgccacctagtaccacatgtgatggataccccataatcctacaagcttgaaatgaagaagtgtggaagggtgagacttcctacttttattcgttgaccacagagtggtacctggagatatgtcgcgggggtcaagagaccttggggacgtcaggtggggtgctattgcccaaaaccaagcttgaccaatcccgacccaacccgggtatagtccgtcagtgagaacctgtgatgtacctaaacaggcgag

SEQ ID NO: 112709 - DNA, 327 bp, Glycine max
ctttaacgaactaaactaacccttaacctttctcttgaacttgcattcacacttggaaccatcttgtgcctttggcgtccataaaacctagttacctgcattcacaattctccctccttttgatgatgaccaccctctgaaagagtaaaaaatgtttgtggccgaactgtcatcccccttaattctgcaatgatgtgcttagtcgaaaaaaaatatattgtcagaatatatgttcacgaaaaaaaaattccctttaccttacatatatctttgaggccaaaccttatcaaccaatgtgagattcttttaacaaataaaactaagcct

SEQ ID NO: 112710 - DNA, 395 bp, Glycine max
  unsure (1)..(395): unsure at all n locations
agctttataagttntacatgaggttaatttaagaaataataaatatatattgttaaataaattaactgtaatgtgaatatagttaagacataataaatatatattggttccttataagaaaaaagttatagtttaaaataagttctaagaagcggaggtagtaataaatacatttttaaaaaaagatgaagaattttaagtgtgattaagttttacattaagaattaattttataattgatctaaaaaattaaaacttgtaagaatacttgaagtttaactgggaataaaaaatcttaattatcctaattaaaaaaaaagtgtgttgtgaatatantttgtgttaattaaaaacaatttaatttctttacaaaaatatctgaaatgaaatgaaat

SEQ ID NO: 112711 - DNA, 382 bp, Glycine max
  unsure (1)..(382): unsure at all n locations
agcttgtcaaatgagaaacaagttaatatattttttcaaagtaaaaatattggttatactataaaaccccttgaactacttcatatggatttatggatttatttggaccatcaagaactatgagtttagatggcaactactatggcttaataaattgtgatgattattctaggtacanctggaatttgttcttgaaaaccaaaaatgatgtttttgaggctttcaacacacttgccaaagttattcaaaatgagaaaggtttgaatattgtttcaattagaggtgatcatggaggtgaatttcaaaatgcgttttttgaaaagttctctgaagaaaatggaattcaccataattttctgtcccaagaacacctcaacaaaat

SEQ ID NO: 112712 - DNA, 264 bp, Glycine max
cctctgtttcttcgaaaacctttgtgtataagcatgtaccaccaataaaacattgtaacatctcttgatgatgctaagactcgagatacatctctgcccctctatgatattttcatattcgttatcaaaagtaatcagcccgctgttgatatcaggaagcaaccattggtatcatatacatgagaatcactcctgtcagtttactagaacatgtcaacaaatattcaccataactattcctaattgtgttgtatgcaactacgg

SEQ ID NO: 112713 - DNA, 388 bp, Glycine max
  unsure (1)..(388): unsure at all n locations
agcttcgtccttagatccctttgttggtccatcgacctcaataacttaagagggatagacttagaatgtagaataagcaacaatcaatttaataatgttctttaaatatgcaagacaaaattgattgcaacaaaataaatgagataagggaagagagaatgtaaacacagtttttatactggttcggcaaagtccgtgcctatgtccagtactcaagtaaccctcttgagattttccactccctttgtaaaaatccgtttacaaagtctgaaccacacagggacaacccatcccttgtgttcaggaatcattacaacttaagagaccctcagtcccttaatcaatctctttgaatgagaaganagaaagaagaattctttcttgaaga

SEQ ID NO: 112714 - DNA, 414 bp, Glycine max
  unsure (1)..(414): unsure at all n locations
gcccgggatcttaagcaccgcggctgcagcttctaaggaagttttcttaagaattcttctcaaggaagntntctcatgaaaacttctcaaggaagctacctagtctataaatagaagcatgtgtaacacttgttgtaactttgatgaatgagagtcttgtgagacacaactcaaagttcaaattctctccctttttcttccttcaatttcatgatcccccctctctctttctctccttctttcttttcctctattgaagcatcctctccaagcttattatccaaggctcatcttggtggtgaagctccttcttccatggcttattccctagtggttggcgcctcctctcacctcttttcctttgtcttccgctgcatctccatggtggaaaatcaacattaaaggacctcattg

SEQ ID NO: 112715 - DNA, 317 bp, Glycine max
aacaaaaaagaattttgttttatcaaagggactacaagcgggtgaacagaaacatgtggagctactagattgctagggaagttatgctaacttgggttgaagagttcctttgtaatccaaaagaggtatttacagggatggaaactaagaagtgaatctttgacactttctttagtggggcaactcaaccttggatcatcaaccttgattgataaaaatgtactgatatgaccaccgtgacaattattcaagataataatttcacatcatggactggtttgcttgctttaagacatatggttctgtaaggtttaact

SEQ ID NO: 112716 - DNA, 359 bp, Glycine max
tcagattaacagccttctggaagaatcttctagagggcccaagtgggccttggttgctatttgcaccccccatttatattaagtacaccccctgcctttttttggtgattcttttttcgtaaagttacggaaacttacaaatttcgtaacgatacttggtttctttccgtaatgttacggaaccttgcggattacataatcatccccttttttgacttacggaatgttacggaacctcactaattgtgcaacaatgcttccatttgatctctggtgtgtcacggaaccttacggattgtgcatcaataatttcttttggtttccggcatgtcccggaatttcacaaattgcctaatgat

SEQ ID NO: 112717 - DNA, 409 bp, Glycine max
tgcaagcttccagatccgatcatggaaagacttggcgactacccttattaggcagtaccaatacaataccgatatggctcccgatcggaaccagcttcagagtatgaccaagcgagaacatgagtccattaaggaatatgcccaaagggggagggatctcgcagcccaagtcgtcccgcccattacggagagggagatgatcacaatcatggtaaatacgttgcctacgttctactatgaaaagctgataggctacatgccagctaactttgcggatctcgtcttcgccggagaaagaattgaatcaggactgagaaaaggaaagttcgaatatgcctccaacacggcccccaataacaacagaagagccccagtgctgggcacgcaaaaaaaggaaggagatactcac

SEQ ID NO: 112718 - DNA, 203 bp, Glycine max
agaatacttgttttattctcgattaaattatgggttgaaataagaatacctgtgtcattggaaatgaaattagttgaattaaagaggctgtaaaaggagttagttcctaaaaaaagaaatgtttacagtatgatctcactgatattgtggaacctatcttgatacattgaatctactgttgatgtctatgtctcactaagata

SEQ ID NO: 112719 - DNA, 395 bp, Glycine max
agcttgtttttgcactaaatgagggcctgccgtaccttccaacttcttttctttccaacctaccatatctgaggtggatgatttatttggctgagccatatgggggtcaagtccacttcaacaatggtgctggtagtggctattgcagccccattgacctcattatctccttatgcttatcatggcctccatcattgtgactattttctttttcaaggccttcgtgtcggccttcatttgctcttgcacctcctctacttcacccattactctagctctagcacaggtttggtaagggcgccgcaaagcgtgttttttccttttgataacaatgattaagttcattttttcttcaaggaaagaatgcaatgagcaatgcaaccaatgataagcat

SEQ ID NO: 112720 - DNA, 153 bp, Glycine max
  unsure (1)..(153): unsure at all n locations
ctctgacccgacatattcggacactctgtgtcacaacaaagtngaaacaactcttcacgcctctacataagcttgtggatatggggcaccatatatgtgtacttgtggcatcggtgatggncanataactctccacttcacagtcaacataac

SEQ ID NO: 112721 - DNA, 391 bp, Glycine max
  unsure (1)..(391): unsure at all n locations
agctnattcagctttctttggnttatctttacttctttagagggtgcagttccttctgagaatcataaaaaaaaattatgttgtagttcaaaatatatcacaaaatactataattccacatttgtttggaataattctgactcgtgtttgtatacaattgtgatatgtgctatgcaaagttttatgcttttggttaaataaactccttttgagaaaatagcttaccctaatgagatataaatcgatttggcatcagtgcataaatcatgagattctcttaccgctctaatatgtgattttattaccaaattaattactgcattaatttcggattatattacttctttttaatgtcgatttaattctttgatattcattttcttttcggtgc

SEQ ID NO: 112722 - DNA, 191 bp, Glycine max
ttcctacaagctttatagccatgaaaatgtccagataaaagttattgctttctcgtattgtaacgaataacacgtgtaacccttatcgtttcatcttcggttacccgcttctgttatattcgcgttagtggtcaattcagtcgtcactggtccgcactcttggacacttttcataatacgccaattgctat

SEQ ID NO: 112723 - DNA, 127 bp, Glycine max
tgaaaccctttagattttactgcgcccttttttacgatcttcccgattccggaaaagttcactcatgatggcaacaatttttagtctgccctgcaacccgccatgggaatcactttgacttgacctt

SEQ ID NO: 112724 - DNA, 391 bp, Glycine max
  unsure (1)..(391): unsure at all n locations
agcttatataacaatatatgcatatattatntctttctcaagaaacaattctgcaaccattgcagtgcaatttaataaaacatattttttattattcacaatgaagtcaataaaagaatttgtaataaaaaaagagcacacacacggtgttttatttttggaacagacttttttcccaaaaacaagagatatcatatatctaataatctaatataatgactacgcatctcggcatgttttagattgaataaaacacatattttttacaacacttgcaatatatntgatggctccaagcaaaaacatatttatttttagaagaaaaacagatttcaagtataattacacaaaagacccatgactctgatgacaattgatagttacatagaag

SEQ ID NO: 112725 - DNA, 249 bp, Glycine max
  unsure (1)..(249): unsure at all n locations
atatatatcaactaatgctgatcagtaagtcactactgtcaaagtccttcnaatatatcagaaatgngaactgctaagcacatatgcaaaggtcttccatcctngagtgatattattgctacatcaatccataatagtcccattaacaggtgaagatctcttttgataaaactactgctcatcccgccttgtattgctccgtttctctaatctaaatgaaacatatacaatcatttaatagtgcaagat

SEQ ID NO: 112726 - DNA, 392 bp, Glycine max
agcttatctcaaatacaaaatttttgattgaccatcatggcccctccacccccatcaggaggttttggaaccggcatgcgagagaaaaaacctcgttgctcaagagttgtcatatacaacaacgttgttgaagatcgtgactccaaaagttataattgtgccttctctaattgatttgtttgccccaaatatacatttattaattaattgatatttatttgaattcaaattatattaacttaaatgtgatttgtaattgaatcaatcagctatgaagcactacatgatggcataagtcatccaaaactagaaaataattattgaatgtcacatgtactccaaaactattagtggattcataaatttattttaattgatgattgattgattac

SEQ ID NO: 112727 - DNA, 387 bp, Glycine max
agcttgtagttgctggaaatccttcttgaagattagtggagagcactgatgggtggaacacagcttctgttgtgggaacattctcagggcctaagcatcgcttggccacagcagcaactgtgaaggacgggaaggtgtatctgaaccatatggttggaattggatacccaaaaaagaagcatgcaattgttgaggcagttttttaacgcatactttctagaaatctaaacattggggaactgggaatgtggggatcatacatttacaggacgtttagttgaaatttggtgtacctttgcttatttatgtttggttttgttgcattacttggcctcagacctcaatgcttttcccttgaatctcaacctaacataagatgctcgatcg

SEQ ID NO: 112728 - DNA, 389 bp, Glycine max
  unsure (1)..(389): unsure at all n locations
agcttgtcaaagttggggcaattttagtgnttgctntatcctaacttcgatttggatccctttttgttgaaaaattgtttagcacttcctttaatcctaaaatttcaatatccaaatagcaatgactgttgtgaatttaaaaaaattactcttttgcactcatttagagtagtatatccacataaaacaagcataaaaagttgagtgaaaaaaaaagacagtggcaaagattgagagaggtagagagacatagatgaaaatgtgaatggagtgtagtgaaagagacttaatcctataataactgcgttatcccctaggagagaaaaagacacaagataagtgagtctcacctgattgatatggccaacttatttcatgtgtctttcttt

SEQ ID NO: 112729 - DNA, 326 bp, Glycine max
  unsure (1)..(326): unsure at all n locations
aaattggacatccgngtcaaaaggtatgaccattccaatttctcgagagccttcgtagttcaatttccgagagggtctcgaatatatttattcttcccccgaattcgggaccattcgctgtgataaagttaatgacacaatttaaatttctccaatcggcttcggttcttcaatctcccgaggcattttaatattattattggcctcaatatccgaacattcagtgtggaaatgctctgacccattcaaattctctcgagaagctcccgctggtcaacttcgagccgcttgatatattgtgtccccgaatggacatctgtgtgaaa

SEQ ID NO: 112730 - DNA, 338 bp, Glycine max
  unsure (1)..(338): unsure at all n locations
aaagaaaatccccaaagaaaaaacggtccgattggattttttattattttatttaaagaatattttattattattaatattattatttctcccttctttttggttnttaacaagtgggttatgggccgtgaaagattggtcggattttattctaacaaaaaattaaaaagatgtttcaactcaaatgatcggtgtaaatttattttatcttttattaggcgagaaaatgacttaaataaatgactaaagcatgttcaaagggggtacggaaagcgaacgaaatataaataaaagcacgctaaacaagtggggaccactaagggtacatataatgaaat

SEQ ID NO: 112731 - DNA, 403 bp, Glycine max
  unsure (1)..(403): unsure at all n locations
gcttcgatggagtngaaactccaggggtataggagcaatcattgggttactcttgaggttgaatcatggttggaataaaagccgtatgtgccaataaaggtgctgtttggctgacttttggcactccaaattgggagcgcatggaggtgtgtgagaaatccgatgggggagcagtggctggatctggacatgttgacctaagacgccccaaatccagtggttgtctactggaaaatttgtcggagttgcaatggcagccaatgacaatggttggaaaagttgtcgacaaaactgaatatcataaaatgtagaaaagaataggatccaccagggacaacggtgcacacattttcccgggtaagggacgattgtcgtgatacctctgtaaggctttggataccat

SEQ ID NO: 112732 - DNA, 177 bp, Glycine max
tctgctcttaagcatactcatctgcctgattgtggagtgagcatctctatcaatctacctcacaggtctatacagactcacctgcactcatatctcttctgtgtagtctctaaaatgaaagatgtcgaattgtgtagacttgcccatctgatcttcatctatcactcttccttgtgc

SEQ ID NO: 112733 - DNA, 328 bp, Glycine max
ctgtcccaaaaatccttttcatggcaaacaccccaaactgaaaccagggaaaccctttatatggaaacttaaaccatacctacaccttacaaaattacaagacacctaacaacactaaccccagccctaaccccacatttacaatttaaccttaaacaccaatatatttaacacctacccaacactagctattatgaacctttggacattgctcctcggcaacggcgccaaatttgatcgatgttgtacccgaatcaaataaacttgaaaatgcagtaactaggaagtgatcctaagtcgtttcccaacgagcaaagaataaccaaat

SEQ ID NO: 112734 - DNA, 85 bp, Glycine max
tccccaagcctcgactgttacctgctccttttctcaaacttattctacttgatttgtcgcaatgatttaaacatgctcatctggt

SEQ ID NO: 112735 - DNA, 171 bp, Glycine max
gatgctatctcacaaattggggcttatgggaattccttcaccacttgtcctccaagtacactaaactgtacttacacactgtaaatactgtaatcattatggtctaccagcttgagtatctgaactctttcaacttatcttgataaatatctattaaatggataaattacc

SEQ ID NO: 112736 - DNA, 112 bp, Glycine max
  unsure (1)..(112): unsure at all n locations
tgttatgtgtgcagtcctacgatgccacaaccatgtatcatctatcttacttaccanacaactcagctcatganatgatgcatgnntcaatgttaacatatagatattacct

SEQ ID NO: 112737 - DNA, 397 bp, Glycine max
cagccttggtggttttaaaaataagcctattagtgatctaaaatggcatctcaataaattggcttcaacacaaagtgagctttgataattgaagcaagaaaatgaaagacttggttcaagttataaagccaccgggtgtgtttgggtttctacatctcttaatattcattattacaaatctttgcaagatgagtttgaaaagtttaaaaaggatcactataaagaactacgaaactgcaaactgagctttcctatcttaaagatcattttagaaaaatgaataaaggaaagagtgatcttaatcacttactttgtgtgcaaaagaaaattgacctttctaagaaaaccaagtttgcatcctccgaaaaggtgaacccaaatagagtctccaaaaaag

SEQ ID NO: 112738 - DNA, 234 bp, Glycine max
ctactcctactttatctactactctggagagactgactactcccccttaactactacctgcaaacaaatgcaaatctctcaacctaagccatcagtaacttctctatgcaatcagcaagagaaacattatttcagatcggttctactggtaacactagtataacgagctctgtttccacatgagttacaactgtgtgatgttctcctgagatctatcagtttcttgcctctacg

SEQ ID NO: 112739 - DNA, 385 bp, Glycine max
  unsure (1)..(385): unsure at all n locations
agctngaccaatcccgacccaacccgggcatagtcggtcagtgagaacctgtgatgtacctaagcaggcgaactcctggcagtcaacagataaaaggaacaaagaccacaaagcaaggaggcttgtggtggctggccagctgtgaaacttgattgatatgtgagatatggtctctggtaatcgattaccaagggtgggtaatcgattacaaggcttaaaaatgaagacaggaggctaagatggtctctggtaatcgattaccaaggggtgtaatcgattaccaggcttgaaaacgaggtcaggaagccatgagggcttctggtaatcgattaccaagggggtgtaatcgattaccaggcttataaaagggactggaacattgtgg

SEQ ID NO: 112740 - DNA, 276 bp, Glycine max
cttatctcactgggatccacggcaagattagtgctgcagatctggactattagtaggagtatataatacattacactagtagataggactacttgagattctgctgtctggctgctattttcaaaaatacttacttgatgcattttggaaaaatgttgctgtagcgctagaaaatgtggtgtgatgtgtatgtcttgagttatgttggaatagagattaattgataatactgataaactgcactatgttatgtatttattaagaggtggtggtacc

SEQ ID NO: 112741 - DNA, 411 bp, Glycine max
  unsure (1)..(411): unsure at all n locations
gatccttaagcaccgcngctgcagctataagataaaattgccttaatcttttctttatatgcatgtgaaataggatgcatcaacaagaatcaagccaaggctattgggcaagcaatcaatggggcaaaacacaccaaaagattataatgatggatggctcaaattctcacagaggtaaaatcatcactttcaaattgaactttcaaaactatcatgacatgtagagaagaatcaaggatttcaagtcacaaaatgtcaagaactttntatttcaaaacaattacccatttcttgaacatatcctataattcaaagaaaaacatgcaaagtcgtacgtgcacacaaaattgacccaaaatattaaactaaaaatccgacgaaactaacaacattaacaaattaacacaacta

SEQ ID NO: 112742 - DNA, 103 bp, Glycine max
ctatacgggactgaagttgaggctactctccaactttatagctcacctgttctgacttagaaaccttctctttcttttcaatctttaagtcagtctttctcgc

SEQ ID NO: 112743 - DNA, 409 bp, Glycine max
tgccgggaccttaagtcaccgcggctgcaagcttattttctccataggtctctaatatatgggcatggagcaaacacactacgtgacattgccatgcatatctttgcaaagtcatgtttatggacatctctgttgggttattatttgatggcattaccatgcttgttgtctaaatgttttttttgtactatcgaccacatgcccttacgcatgtgtacccgtattgtgttatcactcatatattgcatttgtttcattcatttgcacgggaattcgggaggtccgcatcaccttcttgaatgcatgcatggggcaccatggtaatgactgtaaatgaaccatgatgctcaatgccttgcaaataagaagagatgatcgttcgggctctcatgtctataaaatgcatttg

SEQ ID NO: 112744 - DNA, 382 bp, Glycine max
agcttactaagctacgtcatcttctgattgagtatatatctttaattcaatggaaggatattggaggcatgacatccctacaagagataccttcagtgattatagatgatgatggagtggtcattagagaggtaggaaagctaaagcagttaaaggaactgttggtggtaaaacttaggggaaaacacgaaaagactttgtgttccgtaataaatgagatgccactcttggagaaactagatatttatacagctgatgagagtgaagtaattgacttgtacattacgtcacctatgtctacacttaggaagcttgtcctatgggggacgttaacaaggtttccaaattggatttcacagttcccaaatcttatgcaactgta

SEQ ID NO: 112745 - DNA, 52 bp, Glycine max
ctgattctatgctgtgatactgttataatctattgatatctagatatacata

SEQ ID NO: 112746 - DNA, 365 bp, Glycine max
  unsure (1)..(365): unsure at all n locations
agcttctgtnaacgtgacacggtatngttttggaatnttttcaaattaattcattaatgataaccgtgttttacaattggagcgtttgaaatattggggtaagaaacaattgacttggaggttaaaactagaagaaagctgaagcttaaagtttagagagagaccttgtgtgtgtgggggacatagttgtgaagaacacgctggctgtgtctggactaatacctgagtcaaccgaattggcccatgtacttaagcctcagatgtaagctatgcgcgcgtatcattcttcatactcttcttctccattggcaaatgaaccccatctgcagttaagctatgcattacactacaggattttcctttta

SEQ ID NO: 112747 - DNA, 444 bp, Glycine max
ctcgttcgcgccgatcttagactcaactggaagccttccagcctttcctttttgaaccaataccccttaacccaataaaattcatcttgggcctttttcccacaactcttattaatgggagaaaaatgttcattttaagcataccaatcccttatattatcaaatcctaaaatttgaactcctaaggaaccaaacaatgtgtgtcttctaaaaaaggcatcaactaccacatttggttttccctttttgtatttgataacatatggaaattgctctaagtactctacccattttgcatgccttttggttaacttgctttgccctctaatgtacttaagtgattgatgatcactatgaatgacaaattccttggaaacaaggtaatgttcccaagtttggagggctcttattaaggcataaagctctttatcataggtggggtag

SEQ ID NO: 112748 - DNA, 214 bp, Glycine max
  unsure (1)..(214): unsure at all n locations
tttctagatgtgactcgtgactgggctgacttctagatctgtttgaatatgcctagaagaaaaagaccctcagaatactaactacctgagctgtaactgagaanaatatagaagaaaaccatttgcttaacttaatagtattaatgcagtaaaacccctacttttgctagtccatgagaatattatcatctattatatggacactgcaatcatt

SEQ ID NO: 112749 - DNA, 330 bp, Glycine max
tatgacggacccgagcataacccggttgaaggagtaaagctcaatgttcctccctttaatggtagaagtgatccaaatgcctacctggactgggaaatgaaaactgagcacgtatttgcctgcaatgactacactgatgcgcagatagtcaagctagcaacagttgaattctccgactatgcccttgtttggtggcataaataccaaagaaaaatgttgagagaggaacggcgagaggtggatacatggactgagatgaaaagggtgatgagaaaaaggtatgtgcccactaactataacagaaccatgcgacagaaactccaagggctg

SEQ ID NO: 112750 - DNA, 394 bp, Glycine max
  unsure (1)..(394): unsure at all n locations
ctgctgcctgtttgcgtcttaccttatgaatctggatagaggtgctgttcaagccgctatgctcactctatctagtgatgtaaggagacactactttcctaaatagcattgatgcttctgctcacacagccatccacattgagctacctcattcaaatttgaagttgcaccagttgggatagtacttgctagacatgagctctctgttttccatgaacacantctgacctattgaggctcatgctaatctacatgcataactgtacctggtcactcctcgcgagcatctatccgatctgtccaagatcccgatccctagtatgagaactgaaacgaagacactcacttataggtcgatgttcctggagtacccactcgcagcggctacagcact

SEQ ID NO: 112751 - DNA, 403 bp, Glycine max
  unsure (1)..(403): unsure at all n locations
agcttganagctntgataagacaggacacactgttgtgttctactataagctaaaacagatacaataatctattctaagatacacataattataacactccccctcaagctggagcatataaattgtatgctccaagcttggaacatataatctgaatcctaggcccccttaagggtttagtcaaaatatctgctggctgatcactggagttaatgaactcagtgacaatttctttagacagtaatttctcccgaatgaagtgacaatcaatctcaatatgcttagtcctctcatggaagacagggtttgaagcgatgtgaagagcagcttgattatcacaatatagcttcatttgcatcactttgcagaaattcaactcttcaagaatttgcttaacccaca

SEQ ID NO: 112752 - DNA, 343 bp, Glycine max
gtcgctattctgcaccttgcttgtcaggcttgcgaatgctttctccgtaccgacctcttcaacgggtacgcactgatttctgcagttgcttctatccttgaactgactctctctctcggctaaattttgtacattactgcaccattaactgattacttacatctgccacatgagctcatgctacttacttctacggtcctgctagatctgtgctgattggccaatctcagagaacgcttcgcgctccttggccatgtatcaccgatgatacaccttctcacgagtggttcataaagactttcttctggacacgtgtacctcgcaatgcatattctacaacagt

SEQ ID NO: 112753 - DNA, 336 bp, Glycine max
agcttcgtggaagcacatgcccggatatatgtttttcgactatgcaattctagcagaggtataattctatataacagagcaaattttctgtgttttaacatttgtatcttacctacttgacattattattggatacagctagacttgttatggttttatgctaggtcttctttttgattaatgacatattactgctctggtcacaacaaatctgaacaaagtaattgatgataattactacccatttgataatgcaaaacggataaacttgcggcacataccaattggtattggatgacagggtcttgttgatactttatactccttggcatggca

SEQ ID NO: 112754 - DNA, 387 bp, Glycine max
ttggagtataaacatgggacctactcattttaattcaaaaagaaagtcgtatctagtcaaggtctgaaaaacctatacaaatttcctaacgatttctaattatgtgggccattaagtctatcatatgctgacaatagtcgaaaagcccatgaatttcttcgggggcggagtaagtatccgccatcgccttggccttggctaacaatcggggaagttcttgactctcgttcaaggtaagagcaaaccgatccatccacatggttgcctcttggtgtaaagagtcaatcacccttcctctagcctctttttccgcatatacctgggcatactcgtccgcgaccctatgctcgtgggccgtggctagacctaactcttcttggtacttgg

SEQ ID NO: 112755 - DNA, 300 bp, Glycine max
  unsure (1)..(300): unsure at all n locations
ttatctagcttgtgagattaaaaagtcatcaattaaattgggaactcaacatcacgacgttaactaatatgtatatgaatcaaggagaactctccctggtttgagattcattgtcttctgtgaagagtttgcttgagaaatcttgtgactctgagcctagtatttctatatgagatgtgggtccggctcgttatccaggttactgtcgtatctcttgtaaggacgctattagtctgttccgattatgtgttacagacggcaactatggttggctgngctgtgtactaaagatcgcagtgt

SEQ ID NO: 112756 - DNA, 328 bp, Glycine max
aaaccttcattaattttcagctttaccttctcctccatttttggttcttcatttttctccatgtatctcctcacatgactttgtttgaattttgttaacatgattttttagaatttccaccgattaaacttgctatagaagatagatttgattttctatggttcaaatttcttgctcttgttcttgaaccacgaattgtgttgagtttaggttcctttgagtcttgtcttgctattttttgtgggtgaaacctaaaccataaaattcttacaaaaacattaaagtagaagaaaacctcaaaaatatagagtgacttgttcacctattg

SEQ ID NO: 112757 - DNA, 126 bp, Glycine max
ctcagctctcccgatgccttttaactatcgcactcactacataccctcatacaacgcactcaacaacctccccccctctaccctgcttgccataaataactactcatatgctgataacaagagaaa

SEQ ID NO: 112758 - DNA, 396 bp, Glycine max
  unsure (1)..(396): unsure at all n locations
agctagcattttgtggaagattaaacctctgaagggtatattagagcacctcactgtgctattaacatcaaaccaagtaaatattatacccttgcaaaggatagtttagtacaccctcggtgaaataaatccaactacaataccacaacattaaacaataataaagaatttaacttggaataagaaaacactcatgaaatgattagatcattatagcccagtaaagggccccaagatcaacgggttcaaaaaaactgtacacgatctcatccacaaaatatttttactcacaaaattttaaaaagaaaatataaacaaaacaaactaaaaatagagagttagggggtatattgaattaggattttaaaaaactattttaacataaaanaacttgtg

SEQ ID NO: 112759 - DNA, 390 bp, Glycine max
taagcttgaatatatggatcatcaacatttgctcatgttaatgctgagtataacaccttcatgtttttcaaggaaagagttatttgtctcaaacagaagattaccatgcagctgactgcataaaaagaataacccaaccaaggtaacattaaatcataaattaataataaaaaaaaagaatatgccagcgccccagaagacaataaaggggtgtaaaatgtaaataagagcacaagagaacctaatagtttggcgctcagcttctaagacactccaaatgagtttctcactgtcagtcacaggagcaatcatagatcctactttattgagaatttaatctgcaacatgtgaacttaaaaatgaatgactgccgaaagaatcattttcctt

SEQ ID NO: 112760 - DNA, 138 bp, Glycine max
actttttgcaggcttacgacttaatatatacgaattacacatgttttggacaacaatctttttacttgatcaaaaaattgatctttccttcagctagctgataaaccaaagccacgcaaataatgactctatgtcatg

SEQ ID NO: 112761 - DNA, 395 bp, Glycine max
  unsure (1)..(395): unsure at all n locations
agctntgagccataatcctgactcaccttattttttgtacccaggtgagaatgtcaatccttaccctcggaagcaaaaaagaaaagaaggaaaatttccaatcaaagagaaagcaaaaagaaaagaaggaaaatttccaatcaaagagaaagcgaaaagaaaagaaaggaaattcccaatcaaagaatgggagaaagtaaaaaaagaagaagaaaaaggaaggaaagaaagttcctgatcaaagagacagaagaaatgtgcagaaagatcttttgaccagacaatatctgaacaatacagaattgtcaccaaattaacaaaaggaaggaaaggaaaccatgacctanagtggtcttctccctttgattaccaaccaaaatcctgtgcgtcggtga

SEQ ID NO: 112762 - DNA, 290 bp, Glycine max
gatcttgactcatgagtcttatttatttcacatgaatgctcgaacaagaatatgtaagagccctcacaggataccatgaaagactaccctaattcttgataaacttgaggtcttttgagaaaataaggagaaaaaaggggacctgattagattaaaggtgagtgacttatatttacaactctatttaaatcacaggtcaatctcttttgatggtctcttaaactttgaactcttaaacttttaaaatcttaatgactttcaccccttatactccctaaatctaaatctaa

SEQ ID NO: 112763 - DNA, 411 bp, Glycine max
  unsure (1)..(411): unsure at all n locations
ccgggatccttaagtcacctgcagctgcagcttacatcaaccctttcatgtgctggaactacttcacatggatttgatggggcctatgcaagttgaaagccttggaggaaagaggtatgcctatgttgttgtggatgatttctccagatttacctgggtaaactntatcagagagaaatcagaaacctttgaagtattcaaagagttgagtctaagacttcaaagagagaaagactgtgtcatcaagagaatcaggagtgaccatggcagagaatttgaaaacagcaggttcactgaattctgcacatctgaaggcatcactcatgagttctctgcagccattacaccacaacagaatgggatagttgagaggaaaaacaggaccttgcaagaggctgctcgggtcatgct

SEQ ID NO: 112764 - DNA, 376 bp, Glycine max
gcctgatcaaaccaacatctaaacatttctagtccactcaattcatacatttgctcattcaaggcaatcacaaacactcatttcatatcaaaccaaccacagaaacatgattcaatcatttcattggtcaaacaagctttttggacaggccatcaacactaaaaataccagaaattaaatgactaaaattttaagcaaaataataactaataactataatggtcaaaattttcagaaatttaaacaaaaaaaaaaattaaacatcctactcattctatggctaatcttcatttaaatttagcactggagaagctggtacatcctgaaaaatgggctgctctggctccatggctggtgctgatggctgggaatcctc

SEQ ID NO: 112765 - DNA, 361 bp, Glycine max
  unsure (1)..(361): unsure at all n locations
ctgcaagctaannaaaaggggggaagaactttcgtctcattttagttcaagagaaagatggtgcatacgtaataagacagcttctcctataaccgaatatgccatagagtttatcgggttagtgagaaaacgctctccagcagcagatcactctcttggcaggacactaatgagtacactggccaccatgaaagtcgtagggacccatactatgcctgacctggcatttagagacaacattgcagcagacttacgacccgagaatgacttgaatgaaacttctttgctcagtctttctgaaccattactgctggagatggcccatccaatgagtttttatccatgaaagaaaatattggaa

SEQ ID NO: 112766 - DNA, 394 bp, Glycine max
agcttgtaagtatatattggtataatttttctgttccattatgcttttttatgtcttagaggatacttcctcgctgacatcttttgtcttgaatggaattgccatgacaggtttattggtactgtctttgatatttggtattgaaatgtgttgtgggaagtaattcctattggattaactcaccatccttcacttgccagtttgttatgacatttgttgctggatcacctatgatgtcttgtttccaagggtaatctatattctttctgatggcataaacatgaaaccaatcaaagaaaaggacattaattttgactctttcgacaaattctgaaaacttgtcttggacttgttttctgtttgtacccttggaatgttggaaaaaccatctcct

SEQ ID NO: 112767 - DNA, 350 bp, Glycine max
ttactactttatgagaatataatattactcttactagtataatcatctagacatatagtagcggattctaattatacacttatactaactaaatgatcaggctctgatcttttgatactactagaattgtatatatcgaagaaataatatgcacgcttattggcataattatatgaatggaactcatacgactccatgagatagcatttatgaaacattatctatatatttatacatcttatatatagagaaaaaagttattttcactgtgtctattctctctcatctgacaaaagttataatgtactggaaaaatataatctgtaatggatcacactataaaattgtat

SEQ ID NO: 112768 - DNA, 405 bp, Glycine max
agcttggagaggatgcttcaatggaggaattgaaacagggatatgaagagagaggggggagcacgaaattgaaggaagaaaaagggagagaaagtgaactttgagttgtgtctcacaagactctcattcatcaaagttaccacaaggggtacacatgcttttatttatagactaggtagcttccttgagaagatttcttgagaaaacttccttgagaagcttctttgagaaaacttccttgagaagctagagcttagctacacacacccctctcataactaagctcacctccttgagaagcttccttaagaagattcctaaagaagctagagcttagctacacatacctctctaatagctaagctcacctccttgagatgagaagctagaacttagctgcacacc

SEQ ID NO: 112769 - DNA, 297 bp, Glycine max
cctttcatttcatgggtaatcttatatagataaatgggtgctataaaactatatcatgttatattaataattcgtatgtattgaaccgttgaatttgaatgaacatcataatgaacttgtttgaatttgcatgaacttgtatgagtgtctatgaacaagatgaacattgttacaccctaaggatattacccgaattatgcttatctctctagaatgtgaaaattaaaaacatttatacgatgttttcatgtggaagctaccatataaacattgcaacttgaatccatatgaaaatat

SEQ ID NO: 112770 - DNA, 390 bp, Glycine max
  unsure (1)..(390): unsure at all n locations
cagcttcanaggaagatgaagaagtcctatctctttaattagaacctgggaaggcaagacttcgcaaggagaaattcaagtcagctgctacacacatccggaaagagtgcaccgagttacaagaggaaaacgcggccactgcaagagcccttgaacaagaaaccaaaagggcccccaaggaggaatatggtcgagagaaattccgaggagcattgtggggcagcaacaatgagctcaaactccgaagagaggagagagatcggtcacgggtgcatagcatgatcttaanagaagagttagttgcttgcgtgaggtccaaaaggagtttggctcaacacgtggaagccacggagcaaagcatgctatctatcatagggcaatacaaggaag

SEQ ID NO: 112771 - DNA, 388 bp, Glycine max
agcttgaaccttctgttgtgcaatgctattgaaaaattgtggtacacttgaacttgaatagtcttcaagggtcattctccttggctgctcaaccatgatagtgtctcctctaacttctgtatgaaattgcccttgagtaggaaaactagaagatgcctcagaaaattgaggttcttctcctggagttgctactgcttctaagtcttgcaaaaatcttctaattctctttgtgtttcgtctcctgcaaatagcgttgatctgcaaatctatgggaattaaatcacctgcagcaaatctcctttgcataaagaacaaccagaacatcaattatccaattccaaagaacaaaaaaatgtgcagtagctaaaatatacacaaaaagaatcaa

SEQ ID NO: 112772 - DNA, 111 bp, Glycine max
  unsure (1)..(111): unsure at all n locations
ccctgccttttggatctttcgaagtcgaactcaattctacgatctgttcttcgtatgttcggaacctgngatacatatcatctcttttgactacngatgtacgacctacta

SEQ ID NO: 112773 - DNA, 373 bp, Glycine max
cctgcggcatgcaagctccgagaatgtgtgatgacattcccttttgccaagcttgaaagagcccggtagtcaataagaaagttaaggccattatcatcaaagcctgaatagagttagatgaactaagggacgccaatatggccattgatgaagccttggaatgagaaaccaagatggcccgaaaggaataacacgacctatacatagtttgaggggctttatagggcagctataatgagctcaagctccgaagaggtgaaaggaatcatcactggtctaatgcatgatctggaaggacgaactaaaggcttgccttaagtcgaaaagaaatttgtccttacagttatagtgagactgaagggaatatgtgggc

SEQ ID NO: 112774 - DNA, 181 bp, Glycine max
gaatttcaatgctctcccttgcctatgaattatgctgagcagctagatattcttattaaaaaccatgttcaaaattcttataattggctctcaaccattcgcgtcggaattccagataccctcaggaaccgttttttaaaacggttacatattttcagaaatgaatctttttaaactgggt

SEQ ID NO: 112775 - DNA, 383 bp, Glycine max
  unsure (1)..(383): unsure at all n locations
agcttgcccttgcatatgacacatgtggttctgattataatgatttcgaactttgtgttcgtgggagcaaatggttaagaggtggatcctttctttggaggcatatgaatggacatccttggacatgaagatgcaatcctttccttggaggcatcatgtgatgttntattttggagttgtgcgatttagccattggacctttcaaatgtgaaaagtttacaagtattttcataataaaattaattgaagaattttaaatgaactaaaataaaatcttttgcttgagttagttccaagttttcatgtaacggcaacaagttgctaaggaactaattttgaacaataataaataaacaagagactgaaaatggttaaaattttta

SEQ ID NO: 112776 - DNA, 315 bp, Glycine max
ttaacctcccacctttaatccgtggaccccaaatgggacctctgaaatatttctggggggccaaaaaactttgggaccgcaagggggggggttttttcccaaacccaactttgcccaatcccgaccaaccccggccttagtcagtcaggagaacctgtgatgtaccttaacaggcgaacctcctgcagtccacaaataaaagaacttagaccccaagcaggaggcttgtgtggggctggccactgtgaacttgattgaatatgggatattgctctggtatcaataccaggggggtatcgattacaagcttaaaat

SEQ ID NO: 112777 - DNA, 376 bp, Glycine max
  unsure (1)..(376): unsure at all n locations
atcactcctacatttcctctctaacattgcttttctttctttacccactcctcacgtttggttttttagggaaaaacaccataactaaaccccccgcaagggatccctatcgcaccaaatccaaatctaaaacgatgggtgatcaagaggagacgcaggaacaaatgaaagccgacatgtcggctctgaaagaacaaatggcctccatgatggaggccatgttaagtatgaagcagctcatggagaaaaacgcggccactgccgccgctgtcagttccgctgccgaagcagacccgactctcttggcaactacgcaccatcctncctcaaacatagtaggacggggaagggacacactgtggcacgatggcagccc

SEQ ID NO: 112778 - DNA, 409 bp, Glycine max
ctaacgtgatatcattggttcatccatgaattataagtatatgtgatcatcaatggaacatccagaaatgatcatttatatgtgaacctttggcctgattactcttgatcatacaaagaatttgaaatctttactaattctgcaacttgtattatagaatcctctaatactaaactctgtgcttgatcttgacgtgctgataactgaagcctttatcatctccatcttgctataactcaacaagttgttcattcctttgtaaattatctgaaaacatatgttctgattgctctctctcccttgtgatggaatgttactttcacgttttcctgactaaacagttgatatcaattttatgcatattgtacacacactatgttacattcctgagaattcccttacctactta

SEQ ID NO: 112779 - DNA, 410 bp, Glycine max
  unsure (1)..(410): unsure at all n locations
gcaagcttgctgaatataaagggcaccaanaattgggttgaacagttacaggcttattaccttacctttccaaggtggtggaacccaattcaaacaccgggcactttattacattgacaccatacaacaggtaaaatatatactctattaattgcaggggagactattatttgcttttagtgttgagtctttatatacaaatccggatcaccttttgctgcatgttcaataaagccatattgtatgtgctattttaccttaaggcactaaaagtattagattctcaagatattaaatgcttgttattcttattaaaattatatattaaagacacattatcacaacccaaaaaacaaaaactttaatgtcgatttcaacttgtagtgggcatgcttcttgctgatccaaca

SEQ ID NO: 112780 - DNA, 332 bp, Glycine max
  unsure (1)..(332): unsure at all n locations
cacattcccaaatgggcataacccaccatccccttgtgcccaacctccactgaactcacgtactcccacgtagccccatatccttgtttctctcaacaccgggtccccatcaatccttccaagctttccccaacatccaggttaaacaaaattcaaacagcacaaactatcacagccaaaaaaacagggcaaaggcagaaaactctgcccaaaacaccaaccaaaatcacagctnttcccacttaaagaccccagtaacatttccttcgtttcaatttgttaaaccgttggatcaactcgaaaattttactggaagtctctagtacataagc

SEQ ID NO: 112781 - DNA, 357 bp, Glycine max
  unsure (1)..(357): unsure at all n locations
tgtgctgtactggaccactgctgatataattgactgcgagggttgtgtggtcttgtacactcaacttgctcatccaactgacatgacagctgagctatgtganaattatataacctctcacctcacacaaatcaccacacagacaatatgactctcagcacagatacaccctgatggagaatacnctacctagatgtcagcctagcacacacagagctgtcttcttcaatgtgtgccagcaacatcttctcacatcaagagacaccaacacacgtggcctcactctcaactgagcagctcactcgtacaaacactctcactatacatgcatgtcatgatccgcgattcatcttacgc

SEQ ID NO: 112782 - DNA, 398 bp, Glycine max
  unsure (1)..(398): unsure at all n locations
agctntagcagttagttgatttcctttttatttggaactatttaatggaaagaatagntatagttaatattgtaaaattgaaagtggaaaatgaatccacttggtggctccattgttaatgataggcactggagtgaggaaaagtatgggaccacaaatagatagaatgggtattgaacgcgtcttcgttgtacccttccatttaataatattcatttttaaataaaagtttgaagtgaacgcgttttcgttcttcttaatgtttttattgtgggatgcttcttaagtgacagacagcactagcaggataagttccttcctgattcaacctattcctctctctcacttataaaaagaacagaccaacaacacctttgttctttattttaaaaaccaac

SEQ ID NO: 112783 - DNA, 349 bp, Glycine max
  unsure (1)..(349): unsure at all n locations
tctcactaccttgatgagaccagtataccatatatagacaccaggcttgccaattcaattctcttaaagactaatcaggtgttccaaagagctttttgaggaccttatttaggcttatggaaatggcttatatataactcgtataaaaactctgttttgttatttcaatatctnttttggtcaaatttttatggcataagctcgtgtgataagagcttacagaacaaccacttaattcagttgttacccaaacacatattcttacttaggaattttgcagacacattttgagtgcaaaatataaacttaaagttataagcttcatgtccacgaataggattcatcggta

SEQ ID NO: 112784 - DNA, 336 bp, Glycine max
tcattacaaccaggcaatgatgtgaattccttaggttgtgtcatgtacactttctctttcaactcactattaaggaaagtgttttcacatccattcgccatattttataatcatagtatgctgcttatgctaggtaaaatctgaattgatttgagcattgccacaccaagaaatgttttgtcataatctattccttcatgttgacgatatcctttagcaacaaggtgagccttataggtctcgacctttccatctgctccaatcttttcttgaaacccatttatggatcatatccttgaagcttaactaaagccatacttgtcgacttattgatct

SEQ ID NO: 112785 - DNA, 394 bp, Glycine max
ttaagtcacctgcagcatgcaagcttcaggttctgctggaagcgcttttacgtgcgatacaaagaaattccagggaaactctgcgccctcactattaaatcaggaacttaaacagatgttggcttctggtgaaaccgggaatgtggattactatgctttgattggtgtccgacgaggatgttcccggtcggagttggagagggcacacttgttgctatccttgcggcacaagcctgataaggcaactgggttcatcgaaaggtgcgagcttgcggatgagcgtgatgttgagtctgttaaagagagggtgaagatgtcgtcgttgttgttatatatattggttcagaagggtcacactaatgtcatgggtaacattatggatgaggatgctgct

SEQ ID NO: 112786 - DNA, 283 bp, Glycine max
  unsure (1)..(283): unsure at all n locations
tcccttatttatatnctattgatcgtttaccaatctttaaagatggctgggggagagattacaatatcacattttctaataactgtttgaagaataactgttttaccatgtactatacgccattacatctcagttggatgaaggtaaaattcttcatgtatattcgacatgtatgagatagtaccatcagaatacctccacagatggaacagtacttaacttagttgactctcctcttccaacttttaacgacaccctcacttttcaccttcgtctttcactc

SEQ ID NO: 112787 - DNA, 303 bp, Glycine max
tgtgaaataagctagtgtgatttttggacaaaaaccggggcgatgattcttttttaatagtaggcaaacagtcggaggaccattggcggatctaaaaccctgagtttatgcgggccattttaaatatataggaccggggtttcaaatatataggattagggggagcaaaaataaaatttaaaatactaatatattaccaaagtcctgcacacccttgcttatatgcaggtccgccactgcggaggactatattaccttatttatttggatgataatatgcttttgggtcgtgctgttggcggg

SEQ ID NO: 112788 - DNA, 148 bp, Glycine max
tactcgcctgaaatatgaaactgaaaagaactggcaaacaacagaaatgtgtgcagctctaaatgcgctgaccaatctgcagccaaaatataagagtctataactgaatattactccgagcagcacgaacatatactggctacgcatg

SEQ ID NO: 112789 - DNA, 388 bp, Glycine max
agcttgtttagatattttatgactaatttctttttttatatttgcgtcttattctaatataatagatcacttttcattttattcttctaactttttgatgtgcaaaattgttaattaaaatctaataatcatgtcatttcaagtttttaatatcttattcaatagtaacttattcaactactatctagtaatataatttatcacaagttataaaaagaatcaatttctaaaaattatcatatatagagagaatttatctctaaatttccattctttaatattattttaaaatgtatctaagatgaaaatgataatgtttataaaaaaaatagtgaaggatttttagtaaagttttttctccagatatatgcatgtttataaggaatag

SEQ ID NO: 112790 - DNA, 382 bp, Glycine max
  unsure (1)..(382): unsure at all n locations
agcttccctgctatggagagctaaattctcagttggntcttcctatggggtacttgatgtaaatactttcatatctatctaatgatgttttatgtgttcattatgctatcagtacttaattctagtgtgcctttgccttgatcattcacttgcatgcttagttagggtcactaaacactgngaaatggtttgatccttagaacttgatagaacgggactaacttatcgtattttcacgagacatcgaggtacggtagcttagtttttgttatgttatgtcttaatgcggttctggttaagtttagtccaacaagaggaatctgaggatgacgcttgattatgattaggctaaacatgcgcgagacatcgggttttagtagtc

SEQ ID NO: 112791 - DNA, 123 bp, Glycine max
tatctaatccttgtgacaactaacaacacttgattttttaacaactaccatcttgaactatattctatcaacaagacatctttcatgtaatactacaacccaatgtgataaccaactactatt

SEQ ID NO: 112792 - DNA, 387 bp, Glycine max
  unsure (1)..(387): unsure at all n locations
agcttggagtacacactaagcttgcaatgcgtgcgaagcgagctgttcaattcttccaacttatcttcaaggccttttttcccaagtttntgtatcaattttacctccaaagcacttgaaatcatcttcttttgaattctaccaatcaaaaattgaaaagatgttaatttcttcttcatttcctttaaaaaataataaagtaaagaaattacactcatttattagccaaaattgactatcaaattagctcatattttgcacttatcaactcccccaaattaaaacatttgtttttcctcaagcaaaagacaagttctaagtgtgccaatacatgagataatcgcgaatcctttcaaacttttaattgcctgattctgagctcgcatt

SEQ ID NO: 112793 - DNA, 208 bp, Glycine max
gcttatctacggtgcaatgcgcatttgtgatagacgctgtcttgacacttctcagcatgatcttttggataacataataatgctaggagctctatggattcactggtaactaagaatatcttccaatagtagatatttattatccagaatatgaaattttgattcctagaagaaagaaactgtttacagactcgggtgtgtatggatg

SEQ ID NO: 112794 - DNA, 192 bp, Glycine max
  unsure (1)..(192): unsure at all n locations
gagttactatcaaaatacttnttcatgagaaatatatttaaaaatactttatgaataattctcaatcatgtaattcacatatcatattatgcacaaacattaaaacatgtaaataatcaattttatcaaaacaatcaacataagtatgaagagtattgattttatgaaatatatgaacgaatatttcatgca

SEQ ID NO: 112795 - DNA, 386 bp, Glycine max
  unsure (1)..(386): unsure at all n locations
ttaagtcaccgcggctgcagcctgactggcgagtggatttagccttaatttcactttatttattagtccattccatttaagaatgagaaatcccaaaaaaaaaaacgtcgaatggattttccctttattntaactaaaaggccttttttgaatattattttacctctttttttgattccaacgtggttactgcacgaccgaacggtcggaattcatttaaaccgaataacggatgaacgattcaacgatcagtggaaattattttattttagataggcgagaatgactaaataatggctaagccgtcaagggggtataaagcgatgaaacaagataaaatcatgaacaaatgggaccacacggtcataaatgattgaaagctggtt

SEQ ID NO: 112796 - DNA, 273 bp, Glycine max
  unsure (1)..(273): unsure at all n locations
aaaacctttcttggggccccgacggaccattcttctcttcccaacttggagtcaacattgcttccccaatgaagcttccgtgaaaatttgtttctgcgcataccttttcctggcaaccctcttgtggctattggctaaagagctcttgcggnaattgcattctcttttccgaaacccgtgcacacttcctttccgaacgtgtggatgcagcccacattgaactcctccttggcgaggtttgtctttcctaactcgctttcgagagcttggact

SEQ ID NO: 112797 - DNA, 307 bp, Glycine max
  unsure (1)..(307): unsure at all n locations
gtgtcataatggcatgtagttccctgacattacgtggagctgcgctgcaacccggggcaaaataacttactgaaaaagctattggatggtggtttttgtgataacactgcacctatggcaaaacctgatgcatctatntcgagggtgaatggaatagataaatcaagtgatattagaacaggggcatgagtcattgcatgtttgagtttctcaaaagcttcatgtgattcaaaagtccaatcgaattgatccttgtgcaacaatttggttaatggggccgcgataagagcatactgatgaatgaatt

SEQ ID NO: 112798 - DNA, 418 bp, Glycine max
  unsure (1)..(418): unsure at all n locations
accagccgcatgcaagcctgcngcttgaaatgtcggctgatgtattcaaacttattattcctctatgactccgattcatttttcttaataaaagcacttagcttctcgaaataattggcaagtgagaattacaatcatgtattttctcatacaaaattatattcttatttttcctatgcacttggggtgcanaagctgaggaccctctagggcgattctgcaatgaaaacaccatcattggcagtggaggaaaattatcagccaatattgataaaatattgactgaaatagccctcaaaactccctccactggttttgttgccaccacatatggcaaagaccaagacaaagtgtacgcactcgctcaatgtaggggagatgtancacccaggattgctccaattgcatccaagatgca

SEQ ID NO: 112799 - DNA, 217 bp, Glycine max
atgacggctcttgctctagtctctatctgcgatgtggatgagctcttataatctacccaggcttacaactcacctgaatatatctcttctgtgtatcttaattgaagagtcattggtagcttgccatttatttctctacacttccttgtctgctagttatgcgctacaaaatcaatccttagctcctgaagcggcagatacatttctctcaaggaac

SEQ ID NO: 112800 - DNA, 257 bp, Glycine max
  unsure (1)..(257): unsure at all n locations
tattctcatttggggatccccattgattttaaattattgaacaaaccaattcgcaatgaaaattgtaagggatgtgggattgtgtgatgattaacattatgcttaagttttttcagtgttaaacatccttaaaagacacatatgtgcatgcattctgaggtgctcaaaatgaagctcagaaaggttgtctcaaaactattgtcaagggtaaaagccccataagatcttttgaagcccatatgcatgnataagagtgc

SEQ ID NO: 112801 - DNA, 388 bp, Glycine max
  unsure (1)..(388): unsure at all n locations
agctngacccattagctgctacttctatttttctgggattcaagccaaacactaagggatatatcacacttgatctaaaaactagggccatttctgtctctaggaatgtcattttctatgaagattgttttccttttactgctcaaaataagcctgatctcataactatgtttcttgtgccattttcttctcctcatagcatcattgatgcgtttaatgacttacctttagaactctaactgatcatgccattgatgaacctaacaccattattcccgaccttgctatctcacaaagagccacccagacacctagaaggtccatgaggcagatacaaaggctaagtaaatataaagactttcacatcacttatccactatcaactgct

SEQ ID NO: 112802 - DNA, 355 bp, Glycine max
  unsure (1)..(355): unsure at all n locations
acttatcatgatatgaaataagaaagactggtgtctccagncactcttatgcactactgacgagtactatggttgacagctgcttgcataaacattatctattttcattaacaatgtcgcaatatcttttgtcaaaacaattgacttatatctacccttcattacttcctttcccacattgcgtactgaggcaccaaataaggttaaactttatgctacacaatcgtgaagaagctgctgacacattatactcattgctgacatgttcacgatgatcattcattcattcatctccctgtatactaattgtgccagataactcactccgcaaacaaatgatccgacttttggagat

SEQ ID NO: 112803 - DNA, 285 bp, Glycine max
  unsure (1)..(285): unsure at all n locations
attggttactacacctcattgccacattatatggtcacacgttgtgcatgtccttcatgctttacatgcctcatgccacctaagcacacttagtggaaaatcttggaattgatcttggattagtgggctgaaccataactaaaattcactaatcataattagtgaaattttgtctccaaagtttgggtccacaaattcaatttcaaattcaagtgaaatttgaatttttnttctcctttccctccaattttgtgtgacacttacgctataaatagaggtcatgtg

SEQ ID NO: 112804 - DNA, 385 bp, Glycine max
  unsure (1)..(385): unsure at all n locations
agcttgcttgnaaacttcttggatgttatatatttgagcttcactaaggtcctttaatggtgattttcaaccatggagttgcagtggaagataaaggagaaaaggggagaagagacgtcatccactagggaataagcataggaagaagaagtttcaccaccaagagagtgtcttggataaaaagcttagagatgaagcttcaatggaggaagagaatgagagagagagagaaagagagagagagaagtggcatggaaaattgaaggaagaaagggagagaagttgaactttgaagtatgtctcctaagactctcattcatcaaagttatgacaagtgttacacatgcttctatttatagcctaggtagcttccttaagaagcttc

SEQ ID NO: 112805 - DNA, 326 bp, Glycine max
tacactttcgcctgggagtttctgtatcttgagagctcctactttctttctcgtgcttctgtgaatacatgagactcttactcaatcactctaacttcacactctcattgtaaaacagatgttttaatttactttgctttgctgttgacatcgcctcttctaactcttgagatttttatcaccttgatatatggaacattttagcttattttaaatcttttaccctaaaacctacttgaaggaaagatcttttttttacggaattttcatttatcctaaatacattcttttatgttccgattttccggccattaacagaattttct

SEQ ID NO: 112806 - DNA, 379 bp, Glycine max
  unsure (1)..(379): unsure at all n locations
agcttgaatgtgtgtaacccaccatttttcataatagaacactagtaatatgtctactatcattgntattatttctttcttcgtcattgagggaaacacttgggttgccagatccttccaccttttgggtgtattctttgaaagatccgtgccccctttttgcacatgtgttgtagttgcatcctatccgaagacattatactgacactgcctaacgaaggaaaccattatgtccttccaagaatggactcgggaaggttccaagttagtgtaccaggtaacagctaccctagtaagactttcttggaaggaatgtatcaacaattcctcatcttttgcgtatgcccctatnttnaaacaatacgtctttagatggttc

SEQ ID NO: 112807 - DNA, 345 bp, Glycine max
  unsure (1)..(345): unsure at all n locations
aaagggggaagaatgtgaatgtatgtatacatgattntgatgatgcccaagaagaattcaacaaggctgcttcaaatggataacctttggcttcagaataattcaagaatgattcaacaaaccaaaccttgtttcaagattcactaaagaccaagccttgcctttaaacaaagtcctttcaagacatgcaatgcttttggtatcgattaccaggaagtgtaatcaattaccaaatgacagggttgagaaatagctgctgaaaaaggttttgaatttgaagattaacatgtaatcattaccatatgtctgtaatcgattaccaccacagaacattggaaattcaaa

SEQ ID NO: 112808 - DNA, 302 bp, Glycine max
  unsure (1)..(302): unsure at all n locations
agcttggtatcatacatgtattgtatcattaccactaccagtttgaatataaataagagatgtactctccaatggtntctaagatttctcaggtatactnctccatggtntcttactgacataaagtcataaacaagacttactgcatttacactgattacttacacttgacattttgactctcttctcttttccttgcagagcttctagtttctgttcaaaatgtcttacaaaacaaaggtctaattttatctctctccttgcaaaaatcacaggctacgctgatctttggctctctcatt

SEQ ID NO: 112809 - DNA, 354 bp, Glycine max
  unsure (1)..(354): unsure at all n locations
gatgatgacaaaangcctcaaaggcaagatcacttcatgaataccaagatgaatacctttcagaataagttccagaatgagtccagaacactttcagggatcagaggaaatttgatttgagaatcaagagaagacttaatcaagataagtattaaaaagtttttcaaaacattgagtggcacaagaagtttcacaaaatcattaccaaagagttttactctttggtaatcgattaccagtggttttaaaacgttaagatttttaaaattcaaaatgaggagtcacatctggtgatgtgtaatcaattacccctttatggtantcgattaccagtgactggttttgaaaaattca

SEQ ID NO: 112810 - DNA, 281 bp, Glycine max
tagacaaatctatattagtctggacatcttctccatactctgtatgatggttaagcatggattatgtaaatacttgaatatatccaataaacttttgtagaccagaaatatgcatatggtaaaattagttactatatatatatgtgaaaaaggcactattgctaacttagcatagcacgaattattgtaaatcatgattatatgtagggtttaaatacaattgtgaatgtgaaggaaataaacaagtctaattattagtcataatggttctatttctgaat

SEQ ID NO: 112811 - DNA, 183 bp, Glycine max
ttgtacaatgcttccatctccaccatcaccttggatcacacttacatcttatacaaactgatgaaatagctttggaagcatatctttggagactacaatcaaagccttgaacatgcgtgatggggccccgaggaggagtatcctgtgaacggtgcgactccatactgattttcgtaattgcaa

SEQ ID NO: 112812 - DNA, 159 bp, Glycine max
ggtgtaatttctaatagaactctcttgtagattcgtgcgaattaaaataacccaatattctcttattgcagaccacgcccaaatggatgctcctgctctccttggaattaggaatgacttttttaaactttaatcaaggctttccctaaaatttgggcg

SEQ ID NO: 112813 - DNA, 402 bp, Glycine max
  unsure (1)..(402): unsure at all n locations
agcttgcaaggatctcatgctagatntatatacctattaatggataagaagaagagataattgattcttaaattaaagaaagatagaaagaggacctcttcttttagtgtcttttgttttacctacatttttgagagttttgagaaaaaaatgggccttatgagagtctattagttgtggaggagcgcagaanacacaactgggacaaattctggccaagtttctttctctttattaggatttctagtttttccatggccatgaacgactagtctccctagtctgagattatgatgtagtcatacttttgtaccccttttttgattttaatgaaacccttaatgttttttagtcaattaaatcttttttattgttccttatncattaattggaattgatcac

SEQ ID NO: 112814 - DNA, 155 bp, Glycine max
actactttagttatttgggttggtacgcatgcggcaggatattgggtgataaatcattgtttatttaggataaataaagcattctattgttggtagttcacaaagtcattgatatatctgttatgtataaacttgttggtttttatttagcaata

SEQ ID NO: 112815 - DNA, 380 bp, Glycine max
  unsure (1)..(380): unsure at all n locations
agcttctttacttaattatttttagttttttaaaatattaatgaaatatcaaaattattcatacattataataagtagtttatattaattcacttcaatttaaaatgatntaaattcatttcttgtgagagtttttttctatcattttaaagtggcaatcttgacagcaaagttataaaacacttttgtatatatggactatggtctatggagggagggtggttgattgtttatacgtgtgaaacatttttttttattgtgtcgtgtgggatgtaggctttccttttcagaaggaaaccaagtgaaaaggaggagaaaaatgaatttactactaaacagaaagcagacgtgtaaacatcatttattttcagtcaccaatc

SEQ ID NO: 112816 - DNA, 144 bp, Glycine max
ttatctactgaaaagatgtttcgcactcacttagcccaacactggctgtgttcttcaatactagagaaaataccccctgtgggatcagtatttgattccaactagtggtaggaataaggggtttcatactttgcttatgaacct

SEQ ID NO: 112817 - DNA, 317 bp, Glycine max
atcttgatacacactattcactccttatggatgtgtaattaatgcatagacttgcctcacaagtgagttttacaaccttaggaaagatccacaatcaaaaaggaatggaaaaaagatactctaccaacaaaccacccatgttcagaggtgccaaatatgattactagaaggaacaaatgaaagctcattttgagtccattcacattgacctatgggatatggtagcaaatggaaatcacattccatatgacgatgagttaaacgaaattcttagaagccaatagatggaggagtaaaaactcaaatttttgctcaac

SEQ ID NO: 112818 - DNA, 376 bp, Glycine max
  unsure (1)..(376): unsure at all n locations
agcttagtacgcatgatattccttttattttacattgtatcctcatttatcactcatccccttcttatgtaatacacttgacaccatcattgaagagggtacaattaaaatactcacctcccatatgttattggcaccatcattttcatatttgtacataacaccgcaacatacatttttcttttctctttttgcaaaaaaaatactttattttatgctgttcaagacttccaggcttacaaatttacaaggagaaaatgcaatcacgggtggaaatgagtcaagttaggttaggctttaccttanacaggcttggcttatttacctgacttggaaggcttttttttttataaaggctcgaccttgcccttttaac

SEQ ID NO: 112819 - DNA, 206 bp, Glycine max
ctagccttatctcctgttggcatagcttttgacctgttatacatcctattttttgactgcacatgactttaattttgatttccatttaactcgggtacattgtacgtgatcatagtgttgtctatcactattgagggacttacacctaatttatgatgtgactgtactagttgtgacaattaaatacactatgatgacttattgtc

SEQ ID NO: 112820 - DNA, 392 bp, Glycine max
  unsure (1)..(392): unsure at all n locations
caagcttaggatatctcactaagtagcttgtttggcaggccaaattgagtctttattcatccattactccttgggactttcttcgatacaattcgttatgtatttttagtggctttcaacaggaatcaaaatttctctcaattaatataattcttctatcaacaaacaaatattaattgttagtctattaatattttattaacagaatacatcaaatcattgaacttttttttcttttttaggtatccaacaaatcttatatctctcaacatttaacaaactatgttagtttctttcttatatttaaatgcaggtgggtataccanagtgaacacttggctttgaaacaccaaaagaatctcataatctcatattatggtgatcacgaccta

SEQ ID NO: 112821 - DNA, 288 bp, Glycine max
tgaaatgaaagctcgcctgttacttctagcgccgtaaaaataacccttgctcaccattactttccttacacctttgctcaagactgcatggggttatcttattacttctctcatttttgaattgactgtgttgaactgttcactgtataaatcttttttgctttaccccccccattttcaacctaaatactcgtttttgttgaccaaaataaaatggatgccttccctcattgtatgtaatttctttttttccccccaattttcaactatatgttcttttcgtgatta

SEQ ID NO: 112822 - DNA, 382 bp, Glycine max
  unsure (1)..(382): unsure at all n locations
agcttcactaatgactcatangaacttgtgaaatgaggaaatctctaccttcccctcagggggtaggactccgaaaaatacttcttcaagaattctcactccctcctcccaagttctcaaattgttttccttgaacaaatgaaaccatatttttgcttcactggccaaggaaaaagagaacaaattaaggcgaatgacatcttctggaacccctacaatcttcactgtattacatatctctatgtaagtagtcaaatgagcatatggatcttcatttggcagaccatggaagaggtttccttgaatcaactgtatgagggagtgtggatatgaaatattggccgcttgaacttctggtcatgcaatattggtgaaatactat

SEQ ID NO: 112823 - DNA, 280 bp, Glycine max
atgctactgatatctttaccttacctgttcttctgtgactactcactaggaaactgattacttctacgaattgagcttgatgttgcgatatatggggtttgttatgacactgttgtgcttctatgagtttggctctgatgctgtatgtaatgtgactcgacaagtgtttcagcttataaaaatcacaaaagaacatagtatataacttagcaatgaaactgtcactagtattactactttttcttttttaacctttctgccttctgatactatctttctc

SEQ ID NO: 112824 - DNA, 344 bp, Glycine max
  unsure (1)..(344): unsure at all n locations
agcttgtttgtgcttctgatgcttggttgttaggaccttctanaaccaactcctatggacggacactcagaaagcgtccacttctggttatgatggaagggataatgttgagcattgtgaaatcactcaagtgttacatacagttaagaagtatcactttgatgatgcttgcgtctactttacaaagcatgttgacaactacttgttcattcaatgcctactccaacttcctatcattgaacatgaggggacttgtaatttgaagatgactgaaaaaaaatgataaatcatgtgactcaggtctaagaagcatgccaaaagagggatgtgtcgttgttgctatg

SEQ ID NO: 112825 - DNA, 375 bp, Glycine max
acttgagcattgttgatttttttttaggagtcgagttacagccaggaaattgggaggggcgtgattgcccaacatgttatcaaataaagaccaagcctcataggtcttggaatggttaaacaaggcctccaacatgacattgcatggggcaggggtcatcctaaactggcggtccaacaaggacctgtaggagtccatggcattcttgtccctgcccttgctgaagaaccattccataaaagtggcattgacaacgccatcatagacgaggcaacgctccttgagctcgtcgaagagttcgatggccttgtcgatattgtccaaatggagaaagccatatatgagattgttgtaacgatggaatcagcaccgtgg

SEQ ID NO: 112826 - DNA, 340 bp, Glycine max
  unsure (1)..(340): unsure at all n locations
agcttgttcttattgntgcttctccatcatagctctcggaaattatctcggccatgctctttcttgcgagccctcttagtttcttgttcaaaggctcttgtagtaaccgcattttcctctcgtaactcgacacactcttttcatatgtatgtagcggctgacttggaattttctttggcgagtcttgcctttcctaactctgattgtagagcatggacttccacatccttttccggagctctaaaggactcctcgctgaaaattttcaacttggagagccaacctaattcctcgggtatgaactcttagccatacatgatattcaccgatgatgccttac

SEQ ID NO: 112827 - DNA, 216 bp, Glycine max
gctatgccgccgttgttttttcctaaacccatcccgggttcataaccgttccccaacataactcgggccatcattaccgctgcatcggacagacaaggctgcccaaagagggagtccacggaggaaatgctgaccacctcaaaagactggaaagcagtttctaacgattcttctacggcttccacataaggcatggaggatgggcagcttaccaag

SEQ ID NO: 112828 - DNA, 354 bp, Glycine max
ctgctctaaaattaccttgatggttggatttaattgaggaggtggatgcccattttggtttaaagggagcatttcttggtaaaactaacttttcaaaatgttgccttcgcaagaatggacccgaagaagcttgcctcaaagaggtccaggaaagacaaggcggccgaaggaactagtttcactccggagtacgacagttacccgctttatgagcgctgtacaccagcagcgcttcgaggccatcaagggatggtcgtttctccgggagcgacgcgtccagctcagggacgacgagtatactgatttccaggaggaaataaggcgccggcggtgggcatcactggttactcccat

SEQ ID NO: 112829 - DNA, 202 bp, Glycine max
tgttaactttttggggctagctcacttattaaccgctgtcttatcagacactatatctgctacgccctctgcgggcagactatatcactgaatatgccaaagaaatctcattttttggatgaacatatggatcgtaggtttgtgaagggaactttgcattatggtgtgatgaatcaaatacagatgatagtgctgaaataaa

SEQ ID NO: 112830 - DNA, 365 bp, Glycine max
tggaggatgaatctatgagcttcaataatgttcttcaatgtgtgattcccactttgtagatgcagcgaaaaacaaaggagaagaggtgagaggaggcgccatccactagggaataagccatcgaagaaggagcttcgccaccaagaatgtaccttggataagaagcttggagaggatgcttcaatggagaaaagaaagagagagagaaagagagaggggagagcatgaaattgaaggagtaaaagagggaaagaagttgaactttgagttgtgtctcacaagactcttattcatcaaagttacaacaagtgttacacatgcttctatttatagcctaagtagcttccttgagaagcttctttgag

SEQ ID NO: 112831 - DNA, 357 bp, Glycine max
gtctaagaaatatgtaggtagccttttccctacttctagagcagcattaagcgatccatcaaccgctaagcgcatgtccctctataatcaagatgcactattttagctaaaccggccgagagccaggcttagtgagagttgtagggtatttgttctgcagaactcgctaagtggccctatctgcgcgctaagccaatcccttttctgtgttaaaaaaaaaattgaatttcaaacgttggctaagagcgcagatccgctaagcgagcctctttaagaaacaaaatgtctctctggctcgcttagcaaggtaatccgctaaacgagaggatcgaaatttgcttaagtgagtgtaacgtc

SEQ ID NO: 112832 - DNA, 276 bp, Glycine max
aaatggcaaccaaataacacaaatgaacctcgtgcaatactaagagaatgtgagtcaaaccccataatgaggggcacaaatcccgggtcatagggaaccgagcgagcccaccgtaaaacatcatctcgggtgccaaagacctacaacggaacccggacatattaatttttatacaaaacatacattcaaccaaataactcaaactaatgaacatcattacctgagaagattaaaagcatctaaacaatcaacatgtgatggtccactcacaccaca

SEQ ID NO: 112833 - DNA, 381 bp, Glycine max
gactcaagctttgagccaaaatcctgactcacctaaacctttattaggtgttttgccaatccttaccctcggacgcaaaatataaaagttagaccatagggaaaatctccaatcaaaggaaaaaggagaaggaaaatttcccatcaaagaggaagcaaaaaaaggagagaaggaaaattttcaatcaaaggaaaaaagagaggaaaggaaattcccaatcaaagagtgggagaaagcacaatgaaaagaaagaaaaattcccaatcaaagaatgggagaaagaaaaaaagaagaaagctcctggtcaaagaaaccagaataaatgtgccgaaaggtccttggaccagaccatatcctaacaatacataattgttctccaaa

SEQ ID NO: 112834 - DNA, 292 bp, Glycine max
  unsure (1)..(292): unsure at all n locations
gtaggttgtgaatatgatgtaataatataagatattgtgataggagctgggtaacacatggaagctcctaatatctcccacacatntttgggtgggccattcttggatggccttgattttctcagggtccacttggaccccatttctaccaactacaaaacctaagaaaactatattatctacacaaaaggtacacttctctatatttgcatagagggtgtttttcctaaggactgaaagaacttgcctgagatgtcctcagtgatcatctaggctcctattgtacactaaa

SEQ ID NO: 112835 - DNA, 356 bp, Glycine max
tataagaacaaaattgcctctatcatttccaaatatgcatgtgaattaggaagcatcaacaagaatcaagccaaggctattgtgcaagcaatcaatggggcaaaacacaccaaatgattatgatgatggatggctcaaattctcacaaaggtaaactcatcactttcaaattgagctttcaaaactatcatgacatgtagaggagaatcaaagatttcaagtcacaaaatgtcaaaaacttttattttcaaaacaattacccatttcttgaacatatcctataattcaaagaaaaacatgcaaagtagtacatgcgcacggaattggcccaaaatattaaactaaaaatccgacga

SEQ ID NO: 112836 - DNA, 243 bp, Glycine max
agcttctctcgagaatgatttcttgaccacataggggcccttataaaatgtgtgcatttgccaagcctgtcttttttttttttgtttggaaaaatcttcttcaaaactaaaacccccgctggaaatggccggtgaggcaccttcctctcaaagtgctttaatctcttttggcataacgagccacggaaaaatggcattcaaccttttctcctcaatgagatttaattgctcaaaatgactttg

SEQ ID NO: 112837 - DNA, 358 bp, Glycine max
tgcatttggaattgcgaaagccccaattcatcattatgattagtacctgacatctcaaacaaacaaatcaaacgtaacaagacaattatagtttctgtttgaatacctcacccactcaagtgtatcacacaattatggcttttctctaatgaaacactcttgccttttaccactctaattccccttgagttcttaggcaattcaagagattatggccacaacaaagaacaattcaccaatatgtgtaaggtaaggctagagagacaaggaaaaggttaaccaagaaaaaggctaacaatgtttttaggcacaaatgaaggaaataaaattcagaatttaggaattcaagtaacaatcc

SEQ ID NO: 112838 - DNA, 377 bp, Glycine max
agctttgagccataatcctaactctctatataccttgacccaagatgtaaatgtcatccttaccctcggatgcccaatagaagagaaggaaaatttcccatcacagaaaaaagaagagaaggaaaatttccattccataaaaaaagagaaggaaaattcccaatctaaaaaataaaagagagaaggaaaattcccaatcaaagagtgggagaaagcgaaaagaaaagaaagataattctcaaccaaagagtgggagaaagtaaaaggaaggaaagaaagctcctgatcaaggatcgaaagaaatcagaagaaatgtgcagataggtcttttgaccggacaatatctgtacaatacagaattgtcaccaaatgaacaa

SEQ ID NO: 112839 - DNA, 356 bp, Glycine max
tcacaaagtaaatcatctttatataacaagcttggtaatcctcttacgagatcatgcttttgtagttttgagattaatctcaagctagcatgtccaagctttttgtgccacaccaagtgattttcctttatggatagtcggcaggttacattttgttcataaggatcaccaaggtgccacaatagttccttacgacacaccctttctagttgaaggaaacattgtgtccatagaaaccatgcatgagagtcaggcattggaacatacacatttctcttgtcatgtgtcatgagtagagtagccactatctgggtaccatggtggcatgtctttttccggttaaagatatatgccac

SEQ ID NO: 112840 - DNA, 372 bp, Glycine max
  unsure (1)..(372): unsure at all n locations
agcttggagaagttcgantaaaatcattttacgttcaacctgggttactatcctaacatgccgataagaaagggtcccttaataaaggaaataaagaagcctatcccatttacaagggtagagaccactaatggagagggtccctatctgtcacattatcaagagctttgtcagtgcggggtggatgcatgaggatcaagttgttgtactgggcaaagaaacctatcaaggccagtcaaactgggtgcaatcgtgctctccgggctttaaatagaagaattggcggatcatggagcgacccgagattttcgtgtcaaatccaatgtaatcacatattttgaaccctattgctgggcctaggctttagggtct

SEQ ID NO: 112841 - DNA, 357 bp, Glycine max
tctccccgtggttctcgttcttcttcagccagttctccactcatggctccttccacctcttctcattctgacacacattggcccattgccatcaggaaaggtattcgctctactcgtaatcctcatcctatttataatttcttaagttaccatcgtttgtctccttcttatagttcctttgttttctcattggcctccattactattccttccactgtccgtgaggcacttgatcatcctggctggagacaggctatggttgatgggatgcagactcttgaagataatggtacttgggagcttgttcctcttcctcctggtaagaccactgtgggttgtagatgggtctacactgtt

SEQ ID NO: 112842 - DNA, 375 bp, Glycine max
agcttgtgcaaatcaaatcttctcctttattttatctctagcatgcattgtatgttgtctcgtcctttgtcacgggaagccggaaggtccatctcaccttcttaattgtacacatggggcactgcgcccccaaatgcgcaagtaaaaagagataattttccgggctctcgtgtccgtaaaatgcattcatatcatgcatcgcataagcatctcttcataacatcataatggacgtatcctgcatttgcatgagtcatggcatcatcatgcatatgcattcaacaaactttttggtctgcaaaattgcataccatttgttttcatgtttgctcatccttgcgttttcctctacaaaacaaaaacaaaaaaggggga

SEQ ID NO: 112843 - DNA, 361 bp, Glycine max
tgtctcagcgtttaggcgagacagagaccaacttgttagctatcatcgccaagtacgaagaagagttaggtctagccacggcccacgagcatagaatcgcggatgagtatgctcaagtatatgcggaaaaagaggctagaggaagggtgatcgactctttacaccaagaggcaaccatgtggatggatcggtttgctcttaccttgaacgggagtcaagaacttccccgattgttagccaaggccaaggcgatggcagacacctactccgcccccgaagagattcatgggcttctcagctattgtcagcatatgatagacttaatggcccacataattagaaatcgttaggaaacttgtat

SEQ ID NO: 112844 - DNA, 249 bp, Glycine max
taaccaagcttgaccaatcccgacccaacccgggcatagtcggtcagtgagaacctgtgatgtacctaaacaggcgagctcctggcagtcaacagataaaaggaacaaagaccacaaagcaaggaggcttgtggtggctggccagctgtgaattttgtgtgatatgtggattatggcctctggtaatcgattaccaagggtgggtaatcgattacaaggcttaaaattgaagacaggaggctaagatgg

SEQ ID NO: 112845 - DNA, 346 bp, Glycine max
tctagccaaatggacttaccttgaattaattcctttgatagcccttttgagccttgtttccctttccttgttttgaagctcactacaagccttaagtgaaaaaccatgatattaccatatccttaaggaattttggagctttggaattgttttgggaataagtgtggggggtttttgtttcattggacaacttgttttgttggctatgcttcatgatgtattttgggccatacttgatgtacattgtatattggttaaatgttggacatgctgaatgaaatgttgtttctcaaaggctaaagagttaaaaaaaaaattcgaaaaaagaaaaagaaaagcaataaag

SEQ ID NO: 112846 - DNA, 374 bp, Glycine max
agcttgagcttaagtgttagatttttttctacttgcataacctcctagaaaagtgcatgagcatacatgttattgatatatcaacgcataacttaaaacatgcgaagctaattcaattcctttctaactttaatagatgagaaggattgtgctatgtaacagcttctccgtgaagttcatcttttctaattgattatccaactcatcatgagtcacctatgaaacaataaaacattctctataataatggcagttaatgagtctaaagaatggtataggaacagtctcaatgttatgaaatacatcctttcttctgctgtgtagtcttagatgcttgacttagcttctgaagggctagtggcaccagaaaaact

SEQ ID NO: 112847 - DNA, 349 bp, Glycine max
tttaaatagccatatagtcatcaaccaccccctctcacaactaatggagaacaaggatgccaaataagccattaatttgaaatcaggcaggtatacacttaatgagaacaaatgagaggaaaagaaaaaacaatcttgttggtgagggttttattatatggcacatcagtcatcactgaccaaaacacgatcaacctaaagaggaaaatttgttgaaaagaaagatcacaattctcacaagcccccaaaatctatcaactacaccaaaacctatgagtttgatcaatattgcaattgaaaccaatgcacatcaacagaaatgtcttctattatgagaaagattatgttt

SEQ ID NO: 112848 - DNA, 189 bp, Glycine max
cacttacaacgcgaaaccactttctttttcgtcaaaacaggcatgtgcaataaagctattcttttgatggcgattgaggaatcttaaaagctcgacttcatttattcttcataggattccacaaatcctatgagaaggactctgcaaaaaaaacaaaatcgcacatacagtattaaatgaaagcttaaa

SEQ ID NO: 112849 - DNA, 355 bp, Glycine max
  unsure (1)..(355): unsure at all n locations
attatattgnnnnttacttcgtttatttgtatctgttgttggcagattttttttttgtacaaaacttgttggaggacccatttggagaagagtcaatagcaatgtcccccaattcagaataaaaaaaaagatatttggatttagtgacttgacataagctaattaactccatttggggatgacttaaggaaaccctcgggagaagaattttgaggcctttaaccttacttaagcgaaccacatttgggggctacttaatcgagtcttgggagaaaggtcaggagctactcgctttatcgagtcctatttgggaacctctttagctaacattatcaaagggacttacgtgtgaaaa

SEQ ID NO: 112850 - DNA, 196 bp, Glycine max
  unsure (1)..(196): unsure at all n locations
tggatttttttattttgtaatcaaccgtaaactaaagacggaaagttattcgatttcaaaatttttcaatctatatgtctaaaggaaannaactcactttttcgtctgggtttttttttattcgtcttctgaacaccgtattgatatntgatttttttaatcgtatttgaacaactaaaataaaaaaaaaaaaaac

SEQ ID NO: 112851 - DNA, 367 bp, Glycine max
tctatataagctgaaccattttatcaataaacacatgttgagttttattcataaaattagagtttatctcttttatcttagtgagagtgattctcctaaattcttgagtgattcaagaacaccctggctgtatcaaaggactttcacaacctttgtgtgttgccctcgccagaaagagtgattctttccttcctttcatcttcaaccttgttctttcaaaccacaattccaaaaaatccacttccacccagaattatctcgtggccataactctcgttttgcgcactcaaattaagtgattcttgagcctaaattgaatttcaagacgagacctttcacctcgttttggaatcacctcatttggagt

SEQ ID NO: 112852 - DNA, 378 bp, Glycine max
  unsure (1)..(378): unsure at all n locations
ctgcaagctttaaaaaaccagagatatttttgttgatcctcttaangaagcttctagaaaagcctcatgaagctccctcgggaaaaacgccttccaacctttatttaccgtgggatcttctcgatatttgggctgcaacttcacaagaaaattgtccatgatctgaccgttgggatctttgagaagatatctggagtgtgctaaaagcctcttaatgaagcttctagaggaagcctcttaatgaagcttctagagaaaactacatgaagttgcctcggtaaaaacgctgtccagccttcgttaaccggtggatcttctctaaatttggtttgaaacttcacaagacaattgttcatgatctgaccgttgggatctttc

SEQ ID NO: 112853 - DNA, 373 bp, Glycine max
agctcgcgttgaggtacttacccgttgaagactgaagatcgatgaagatctattgaagaacgtctaataaccgtcctataccttcgcgaaatcactcgcggaaacgttactgaaacgttacggaagcgcctccgcttggattttcttcacggaaacaatattcctaagcaaattcgaaagagagagaagtgcctaaggggctgaacccttttctacttcacttctccccctatttatagaagattaggggagaagcttgccacccagctcgcccaagcgagcagggttgcttcctccagaaacaatagccttctggaggaatcttctggagggcccaagtgggcctggttgctatttgcacccccattttact

SEQ ID NO: 112854 - DNA, 230 bp, Glycine max
tgtttagagtagattgacaaaaaataaaccgattaaatcttagatctacacttgttcttgcatttctatggttcaaattttgtagatctactcttgaatcttgtttttgtgttgattttaggttctatcatttttcattcataatattcttgtgctgaaccttagatctaaatgttcttccaaaatactgattagaaaagaaatcacaaaaatctaagtgtaaatcactt

SEQ ID NO: 112855 - DNA, 358 bp, Glycine max
tctcaaggaggtgagcttagtttttagatgggtgtgtgtagctaatctctagcttctcaaagaagcttctcaaggaagttttcttaaggaagcttctcaaggaagctacctagtctataaattgttataactttgatgaaggaaagtcttatgagatacacttcaaagttccacttctctccctcttttattcctacaatttcgtgctccccctttctctctttcttttcctccattaaagcatcatcttcaagcttcttatccaaggtaattcttggtggtgaggctccttcttccttggcttattccctagtggatggtgcctcccctctcctcttctcctttgccttccactgca

SEQ ID NO: 112856 - DNA, 357 bp, Glycine max
ttggttcatacgttgctagtgggaagatcaactttgaatttggattaggtgactgtcgctcttagagaaaatgagataatgatgagaactgaaaatgttgataatgaacacaatgcaatagttatagtggagtctgagcgggggagaaatcattcaaggagacatgatgggccaagaggaagatcaaaattgcaatcgcgtccacaatgagatatgagtaacatagaatgttactattgtggtgagaatggtcatatgcaagtgaggtgcaaacaaatgaaggagaacttgaaaaaattaagagatatgaacaaagatggcaccaactcccaagctaatgtagtaaaaagtgttgaa

SEQ ID NO: 112857 - DNA, 371 bp, Glycine max
  unsure (1)..(371): unsure at all n locations
agctatgacaagacaattctcactgtttgtctttttcaacgagaaaaaatagggaaatcggctctgtagatacacnctatgtatgccccatgattatagatattgaggatcagggtaaaatcaaatcaaaaacattgttaggggctcttgaactattatatttcgactaggcttcacgtgatatataattaagaggtattgattctttttttagtaacttaaaaaattttctctgtgaaaaaataacttaaatgttttaaatgtgtcatataaaaagagtgattcatatcatgaatacgcgggtggataagatcacctaataaattttctattcaagaggagtgagaaaatttaatttaagtgacctatta

SEQ ID NO: 112858 - DNA, 375 bp, Glycine max
cactataaatactcaagcctgcatatagaaattatttaatgatgatccatgttttatgctcaacctggcatatcaagaaaggctctctttacttttctgttacaatcattgtaatcaatattgatccttatcaccatgcaaaagtactgcataccaaagaaaacaaatatgattcaaatggtatttatataactaacttaattaagaaaaccaaaagatggtgattagagcttgccttgaatgtcatgaaaacaatcatagagagagagatattaacaagaatttgaaaattcaaaatagtatgagtgagctagcaaaggcagagtgaatcttaaaagctaagcatcaataaaacttctagagccaaaaatgatt

SEQ ID NO: 112859 - DNA, 374 bp, Glycine max
agctaaatgtatgcccgatttattcatttcttatgagaatcttgggaagaattggtatcagaattgccattcctacgattatagggggtgaaccaagccttttgctttatacagaaagtgtttaatatagttcatgttgaaaatatggaaataaacctgtttgcgaaattggggcaaaaagatgaatcgagtcacatcatctacttcatctactgccaaacatatttaggaattgttgatgtgcttgttacttacagtttcactttgacaaagatgtcatggaccatggtgaaaatctaaattggttcaaccccatatcctgcgtaaaaatttgcgatacttcaactgtgccttattcgcatgcatcctgcttt

SEQ ID NO: 112860 - DNA, 360 bp, Glycine max
tatgattttaaatgtccatttcacaataacattgttataattaatttagttttagggtagattttttttactgggtggagtgggtttaataatcttgctaaagttttacgaattttatgaacttttttttgacaaaaaaagaagaattttatgaacttaagaaatttgtattggattctatatttcaaaaattttgaaatacaccttcattgaaagaatattgttctaaattttttagtagtgttttcacactacactacgagcatacctataaatttttttcttctaaaaccttaataaaccaagggctcatttgggggtggtttataagtttttttttttgttttaaaatgtaatttt

SEQ ID NO: 112861 - DNA, 376 bp, Glycine max
  unsure (1)..(376): unsure at all n locations
agcttgtctccacctatcttttctttttatatgccccaancaccatcgcggggtttgcaaaatcatcatcccctccaatgtcacctactccggcacatttttccatatgaagctccccctagatgaatcctgaagaccgaacggacctccgccacttggtgttcggaatcgcggtgtcgaccaagctatgggaccaaaggaagagctacatcaaacttaggtacagaattatggacatgcgcgacattatgtggctcaacgagaaggtgaaatcgaaggaaaacaacagcgacgtgctcccgccgctgagaatcttcgatgacatggtgatgtttatgtatacaaacaggcaagggcaccgattgacaattatgat

SEQ ID NO: 112862 - DNA, 361 bp, Glycine max
tcttgcgtagccgctcttggtgctcagaaaatttcataaacaaatccctcttattactagctattttgaatactttagttcctgaatgtacaaccttcaaattgttgctcgttcccctctttcttttctgcaaaaaagaaaatcaaatgctatgaaaacatggatgaagtcctaagaaaatcaatatcaaagaaaacatggatgaaatcacaattaaaaagcacaactacctatcttgcagagtcctttggttaatttgtcttgtctccttatgtggtggggttttgtttaataatgttatacttttgccttccaaaaaaaacttatcactaatcctcttttcattaatccaattttgtat

SEQ ID NO: 112863 - DNA, 238 bp, Glycine max
tttcatactgatacttatggtaacgcgagagtttctaaactttacaggaatttaaacaaagagctttttagaaaagaatgaaacaatgagtgctttcagaatcagtgctgcatattcttagaagcctttaatgttccctaacatggaaggctacttccttacaataattgaacttgtttggttcattgtaccccaacatggatctgcagaatgacattggaaactttgggattccacc

SEQ ID NO: 112864 - DNA, 367 bp, Glycine max
  unsure (1)..(367): unsure at all n locations
ngatatgtgtgttgattntagccttagtaccatttttggntatnaatcaagatcatctcagagaaaacttctcgaagaaaaatcgttcgatacgattcttttctatctactctcatttaaagatatcttcgatgtacttcataaattatatatgcttcttttatcgattagctcgatgtttactaccgtgtaacgaatcgaattaaattttgcctattacagcgcttaaaacttagacttacaagcgcgtaataatcgcgcttgaaatttcattctcatctatttattgaggcaatgaaaacgcgcttaaaactgatcgcgttaaagctcgattaaaaattggaagaaaaagatgactgaaattgag

SEQ ID NO: 112865 - DNA, 347 bp, Glycine max
tagccctagaggggatggacctttttaagtttttgagaggatcaataacaatgcctataggttggacctcccaaaagagtatggagtcagcaccacttttaacatttctgatttaattccttttgcaggtggagctgatattgatgaggaggaactaacagatttgaggtcaaatcctcttcaaggggaaggggatgatgcaatcctccctaggaagggacctgtctgtcactagagccatgagcaagaggctccaagaggattgggctagagttgctgaagaaggccctagggttctcatgaacctcagggtagatttctgagcccatgggccaaagttgggtcca

SEQ ID NO: 112866 - DNA, 367 bp, Glycine max
  unsure (1)..(367): unsure at all n locations
cgcttcaccctcttaatcttggaccttgtcatatgacctctaatcccatgtaaaggatcattanacagattggttgcacctctatcaaactaactccctaactaactaatttccactaatacatacagttactacttagaaggaagtgatgagccttgattaggcccatctaatctacctaattaaactaattacacaaagcaaagttcaaatttgcagcccaattattcaagtgcagaggttttgactttcaagtccaatttgactcttgaaatagtagaattggcctaagcttatttgtgacaaaattgaatttctttttcttatctttggagggactactcacaaaatccatttaaaattcttt

SEQ ID NO: 112867 - DNA, 225 bp, Glycine max
cgaaaccttacgaatttcgtaacgatacttattttctttccgtaaggttacaaatccttatggatcatgtatttactccttttttagcattcgaagaaattacggaaactcacggattgcgcgacaacacctccttttggtttccgcctcattacggaatttcacggtttacgtaaacctgcttccctttgatttccggcgtgtctcgggacttacatatcgtgc

SEQ ID NO: 112868 - DNA, 387 bp, Glycine max
cactatccaaactcaagcttaactcatcatcttgaatgattctagttacaaaactttaaaaatgttctcgagatatatatagccaaatagcactctgtttacgagagatatatatattgatatttcactcttgattctaaccaatcacgaatacactattagaaattacactttcaacatcggttatttagggcattttacatcagttctaaaaccagtgttgaaagtgtcgatgttgaatgtatcattgttaacatcggttttggaaaaccgatattaacataaatatgataacatcggttttctaaatatctgatgttaaacacaatgaactacaacaaaaaaagtgtatgcatgatgaacattgacatcgattttgtagtaaaa

SEQ ID NO: 112869 - DNA, 447 bp, Glycine max
  unsure (1)..(447): unsure at all n locations
agcttgcacatatattntatgttacttggttaaatatatattcatcaaaccataaagtgggcgagcaactggtttctgaaaatacccttgagttttggtatacaggatacaagttaaagaaggtcattatggttaacctaagcacacctcaatttttcaaaagaaatacagggaaaaggatacagaagtatgagtacagaaatgggaaatattatctgttcccttcttctcaaaccctctcccgtggaattttctttttaaaatgtagggctttgagatcccattattctaccagaaggggaaataagcgagttctcacatacaatggtctaatcttaaagggggtaggaaaatctttcacccatacagtaaacagtcttaacaggggtaccagctaactttagggtgtgggtcatgtgtgaattgtgttcaaagagggcattcaac

SEQ ID NO: 112870 - DNA, 369 bp, Glycine max
  unsure (1)..(369): unsure at all n locations
ctntntggagtagaaacatgggaccaactcattttatttcaaaaagtcgtatctagtctaggtctgagagaccatacaagtttcctagcgatttctaattatgtgggtcattaagtctatcatatgctgacaatagccgagaagcccatgaatttcttcgggggcggagtaggtgtccgccatcgccttggccttggctaacaattggggaagttcttgactcccgttcaaggtaagagcaaaccgatccatccacatggttgcctcttggtgtaaagagtcgatcacccttcctctagcctctttttccgcgtatacttgggcatactcgtccgcgaccctatgctcgtgggccgtggctagacctaa

SEQ ID NO: 112871 - DNA, 371 bp, Glycine max
gccttataaaaatactgcatgcagaattcatggttctcttcaaaacggtggatttctgaaaacgaccggaaaatatttgattggtatttgattgaatattcccattttttttggccccaccttgcttattaattggaagaaaaaaaggaaaaggttattttaaaaaagaaaattcgttaatctcacaataaaagcttaataaaaaaatgaaaatgcactagtctgtgtgcttcttatcttttacatgctaaacagacgaagcagacttacttgttcgatgatacaagaagttaggcacttaatgactgtgtgtaaacctcgaagttcatctgaaacttagagtccaaccaatcagattatgtggaactttc

SEQ ID NO: 112872 - DNA, 368 bp, Glycine max
  unsure (1)..(368): unsure at all n locations
tgnggaatgttcctcaaatgatgaggctgaaatatggggtgtttatcatggtatgaagattgcgaggcagtataatattaagggtgtttatggtcatatttctaaggcagcataacattccaatgagggatgagattgcaaggcaacatgattttggtaaaattgttgtggcgttagactcgctgaaagctattggttttgtgcaggatggttgtcctactctttcatgtttccctctgtgtcatgagttgcaagctctaacctctgctacaaatcactcatactgaccagcctgctgattcctttgccaactacggtttatccatgaaccaagctgcatcgattttttgtgcttctccctccttttg

SEQ ID NO: 112873 - DNA, 200 bp, Glycine max
ccttactttgaagaccaaaaagtttcaagatcgttaaaatggtatgtttttaaatattattggaagtgaatgtggaggtacttacctctggccttgtgggagagctcatttttcttgaaggctatgtctatttttagtaaaaggctttttcatatttttaacagctgaacctctattgctatgaaaaatgttgcctttga

SEQ ID NO: 112874 - DNA, 226 bp, Glycine max
gaggcaatgagccaccagaagcttacgccgcaaacatttataatagaccccctcagcagcaaaaccaacaacaacagaataattatgatctttcaagcaacagatacaatccaggtgggagaaatcatccaaatctgagatgggcaagccctccacaacaacaacattgcccctcctttccagaatgttgctggtccaagcaagccatatgttcctcctccaatac

SEQ ID NO: 112875 - DNA, 322 bp, Glycine max
ttttttttcttttttacactgggcagctagtgggaccaaacacccccaatgcacggatgtgtgcttaactccttatgctcaaggctcaaggcatgaacataaatgcgcttatcgcgaagctttgcactctactaaaggaccaattttcacaaaaaagatttactaaactatttttcattccttttctccacaaattgaaacccttatttttacctcccaaaacaggaagatattcccctcgttcaaattttattgcctgttccatataatttaaagctctagaaataaataaatgctaattatattctatttcccccctctg

SEQ ID NO: 112876 - DNA, 253 bp, Glycine max
cttctctgtatgtctggacttggaatcattaaaaatttgtgcagattccacaagtactttaacttttttcaacaatttgaggctttctagtctaactcactcttgcatatcatattaatgataatgcatcacataattcaaaactgtagagttgctatgattatttaccttttggtggagcaggtttcgtgatgaagtgctgacaacctccacatgtaatctatcattggtgggaggctcgtccaccataaac

SEQ ID NO: 112877 - DNA, 355 bp, Glycine max
tgatctttttgggaacttatattttacttctctcttctttacttttactatttacttttgccaagagcttatattttatttctctcttcttttttacttttactatttacttttgccaagagcttatattttacttagctttcatataatgggatgaatggcatcattgttggcattatccatcgcatattttactttcgctttcatagagtagtcagctgaatggcatcattgaattcgtagtacgaaacaaagaaaatggtgtgaatggtaataaactttttaaattattcttaatcaacactagtttctgcctaaatgtatatgttcctttggagctctccccatcttcttt

SEQ ID NO: 112878 - DNA, 370 bp, Glycine max
  unsure (1)..(370): unsure at all n locations
agcttgctctaaatttacattgatgtttgtatntattggagggggttgtatgccattttgttttaagggtagcatttcttggtaaaaactaactttccaaatgtttgccttcgcaagaatggccccgaggaagcttgcctcaaagaagtccaagaaggacaaggcggccgaaggaactagttccgctccggagtacgacagtcaccgctttatgagcgttgtacaccagcagcgcttctaggccatcaagggatggtcgtttctccgagagcgacgcgtccagctcagggacgacgagtatactgatttccaggaggaaatagggcaccggcggtgggcatcactggttactcccatggccaagttcgat

SEQ ID NO: 112879 - DNA, 359 bp, Glycine max
tacccattctgttttagggtttttatgatgatgcttgtgatgcttgtatgctgaaatggctgatggaaaactgatagggatgaagggtagaattaacctatggttaaaaagtgagaatgtagtgatatgagtggaaaaatgtgatgctttaaggatttgaaaagccaaatctggatttagtggtaattggaggttaaagtgagttaatcctagtttgaaatttcatttaggactgtgggaaagtttgggctgtacaaaggaggaaaatgaatgaccaaagtgagggcaagagccatttctatggtaaattgggtgttgaggagtcaaattttgattcagtagagtttcgtcgtaaaacc

SEQ ID NO: 112880 - DNA, 373 bp, Glycine max
  unsure (1)..(373): unsure at all n locations
agctagagatgatgaantgtttaatggttaacccaacagccatgagggctgaccaagagaggcacctagagatatgtcacgggggacaggaaaccatggggacataatgtgtggtgctatctgaccaaaaccaaacttgaccaatccctgacccacccgggcatgactagtcagcgagaaccttggaagtacctaagcaggcagagctcctggcagtcaacagatgaaaggaaaacaataccacaaatcaaggatgctagtggaggccggccagatgtgaatttatgcgtaatggtaagatttggcctctggtaataaatgaaccagagggtggaaagttagtacaaggcttaacaatgaacacagggggcta

SEQ ID NO: 112881 - DNA, 356 bp, Glycine max
tagacgaaggcatctcaccctctccttaacacttcctctctctctttccaccacttgcttctctctatacttttcaatgtgactcattatttccactctctctaaattgtcctttttttttgtcattcgtcactcgaaaaaacaaatatttctatttatgttttaatttttatttatgtgtgtttttatcatgtcacagtatttatcgttttatcttttctgagaaattaattaatcatttttaataaaattctatttttttcaattatgtgttttgaattcataaaacttaccgctgaaatcttatttgttgagaaatatcaaatcccgtatgagggtcactccttaaaatataa

SEQ ID NO: 112882 - DNA, 375 bp, Glycine max
agctttttcaagtagatgttaaaagtgcttttttaaatggctatattgaagaagagtgtatgttagacaacccattggctttgaagatcatagacttccaaaccatgtttctaaacttcaaaaggctttatatggtttgaaacagacaccttctacttggtatgacaaactgggatcttttcttttagaaaatggctttatgaaaggaaaagtagatacaactttatttaaaagaaaagttggcaaggatttcattatagttcaaatatacattgatgatattatctttagagctactaatgaatctctgtgcaaggatttctcttatcttatgaagagtgagtttgaaataagcatgatgggagaacttaagtt

SEQ ID NO: 112883 - DNA, 355 bp, Glycine max
tgaagaggaagtcatcgtgagagcttgagatgtttctatgagtgattgtgaggtcctagaggtggaggagacatccccactacttgtatttcttcaatccttcatctttctcttctctttgttgtaaaggaagcttcccaaatatggagagctaaatcctctgttggttcttccttgtaggtacttgatgtaaagacttgtatatctatttaatgatgttttatgtgttttatgtgttctctgtgctatcagtacttcatttcagtgtgcttttgccttgatcacatagatgcatgctttgttaggatcatttaacagtggaaaatggtctaattcttagaacttgataggacaa

SEQ ID NO: 112884 - DNA, 222 bp, Glycine max
gaaaagaaagaaaattcccaatcaaagaatgggagaaagtaaaaaggaagaagaagaaggaaagaaagctcctgatcagggatcgaaggaaaacagaagaaatgtgcagaaaggtctttggaccggacaatatctgaacaatacagaattgtcaccaaatgaacaaaaagaaggaaaggaaaccacgacctaaaatggtcttctccctttgattaccaacca

SEQ ID NO: 112885 - DNA, 345 bp, Glycine max
tctactataccaacttagtgggatttgactccttacacgtccctcacaaatggctatgccttctcgagttaacttgattaattaacctttgcctttgtgctgagaagcctccactcgaatagtacctacattatggaatccaaggtttgtgagtttttgtttggcgacatggacttcttggttcacacgcctgttttttattaggttagttgttgagaaccttccttcgccttatggctgcctaatcttccatatctgaccaaatttgattctagatgtactttttgggttagctggaataattgatagggttttgcagtctggaaagaacttcaacaaaatggc

SEQ ID NO: 112886 - DNA, 372 bp, Glycine max
agcttgctctaaatttacattgatgtttgtatttattggagggggttgtatgcatttttgttttaagggtagcatttcttggtaaaaactaactttccaaatgtttgccttcgcaggaatggccccgaggaagcttgcctcaaagaggtccaagaaggacaaggcggccgaagggactagttccgctccggagtacgacagtcaccgctttaggagcgctgtacaccagcagcgcttcgaggccatcaagggatggtcgtttctccaggagcgacgcgtccagctcagggacgacgagtatactgatttccaggaggaaatagggcgccggcggtgggcatcactgtttactcccatggccaagttcgatcc

SEQ ID NO: 112887 - DNA, 343 bp, Glycine max
tggttcgaggtacttacccgttgaagatcgaagaacgaatgaagaacgaatgaagaacgtcgaagaacggttgaaacctttgcgagattccttacggaaaacgttacggaaacgtttcggaagcgcctcgacttagattttcttcacggaaacaatttttccaagcaaattcgaaagagagagaagtgcctaaggggctgaaccccttccttcttgccttcctcccctatttatagcaaaataggggaggtggttgccgcccagctcgcccaggcgagctcagctcgcccaggcgagcagggttgcttcctccagaagcaaccgccttctggaggaatattcc

SEQ ID NO: 112888 - DNA, 353 bp, Glycine max
  unsure (1)..(353): unsure at all n locations
atttttttttttaannaaaananggnaaaganattttggatttatttctttttttaatttgatgggaaaattggttccctgaaaaaaattctagccgaggcgctttcgaaacgtttccgtaacgtttccgtaaggaatttcgcgaaagtttcgatcattcttcgactttcttcatcgttcttcggtcttcaacgggtaagtacctcgaaccaagcttttcgattcattctatgtacccgtggtggtccacattgtgtttcgtgtatttttattctcgtttcatttactttttataccccctttttgacgtgcttaagccattttatttaagtcatttctcgcttaacctaaaa

SEQ ID NO: 112889 - DNA, 366 bp, Glycine max
tctaaactttatacaagaatgaagctctgataccacttgttagacaagtggcctcatatatcttaagaagggggggttgaattaagatattccaaactgtttcccctaattaaaaatctatttcacttttttttttactcaagttatgaattcccttaatgacaatcttcttaaatattaattcaaatgaaacaatttgaatatgaatataaagcaataataaataaaggagattaagggaagagaaaatgcaaactcagttttatactggttcggccacacccttgtgcctacgtccagtccccaagcaacccgcttgagagttccactatcttgtaaattccttttacaagttctaaacacaca

SEQ ID NO: 112890 - DNA, 204 bp, Glycine max
tcgagtcacatcactgcttcgtctactgcccaacatatttaggattggtgatgtccttgttacttccagtttcaccttgacaaagatgtcatggaccatgttgaaaatctaaattgattcaaccccatatcctgcgtaaaaattcgcaatacttcgactgtacatcattcgcatgcatccatgcttttcattggttgcattgct

SEQ ID NO: 112891 - DNA, 374 bp, Glycine max
cttgagccaatatcctgactcaccataaaccttgactccaggtgagaatgtcaatccttaccctcggaagcggaaagaatagaagggaaatttccaatcaaagaaaaggaaagaaggaagatttccaatcaaagagaaagcaaaaaaagaaaagaaggaaaattccccaatcaaagagtgggagaaagcaaaaagaaaagaaagaaaattcccaatcaaagaatgggagaaagtaaaaaaggaagaagaagaaggaaagaaagctcctgatcagggatcgaaggaaaacagaagaaatgtgcagaaaggtctttggaccggacaatatctgaacaatacagaattgtcaccaaatgaacaaaaagaaggaaagg

SEQ ID NO: 112892 - DNA, 223 bp, Glycine max
tttaaggggataattgggtaatgaactctttctttagtaatatattaattatgttcattttgaatatctttggacttaatttatgcctcaaatataccaggcaattatttactgatatattcctattaagggagatattaactggatgttatgttatgatgatcctgaccaccccgcacggagatcattcaaatcaatgaataaattctgtgtttttgacaat

SEQ ID NO: 112893 - DNA, 370 bp, Glycine max
ttgtcgatttagtttttgccggtgaaaggatcgtattgggtctgagaagaggcaaatttgattattctgctttgatgaataggaagcctggggcaaatggagagaataagaaggagggagaaacccatgttgtggttgctattcctacatggtcaaattttccattagcctgacaatatcaatactcggccaatatcagtccttctcattacccaccaccctaccagccaagaatgcccatccacaaaggccatccccaaatcggccacaaaatccacctgatgcacatctaataatatgcataaatttgatgtccttgtctctcattctctcacaattacatctttacttatttaactttcactggaat

SEQ ID NO: 112894 - DNA, 253 bp, Glycine max
ggttgacaggtccaccgggttacctctagatgtccataagatcacatctttctgaaggtctttcctcattctatagagggagtggcaaaggactggctatattaccttgctccaaggtccatcacgagctgggatgacctcaagagagtattcttagaaaaaattttccctgcttccaggaccatgcccatcagaaaggatatttcaggcattaggcaactcagtggagagagcctatatgaatactgggaga

SEQ ID NO: 112895 - DNA, 356 bp, Glycine max
tgaagtagttctcccatctccttctctgattatcatctctgattccctatctagagaaactattgctccccctgattcaccagctagagaagcagttgatccccctgattccccaattggaaaagctattgatctttcttattcctcatccagagaagctgttgctctctctgattccccagtttttttatctgatagatgaggaggatgctcggactctgttgatctctctgattataactatattagtttcagtacattattttgagtaattttggtttctgattataattatgtacttatactttctgtgattagccactatgcttgttttgaagcatatggaacaatttgac

SEQ ID NO: 112896 - DNA, 238 bp, Glycine max
ggtgagcccccagggagcaaaacaaagggtgtctcctagagagggcatcagctaccacatttggttttccctttttgaatttgaaaacatatggaaattgctctaggtactctacccatttttcatgcctcttggataacttgctttgccctctaatgtactcaagtgattgacgaccactatgaatgacaaattccttggaaacaagggaatgttcccaagttcggagggctcctat

SEQ ID NO: 112897 - DNA, 357 bp, Glycine max
  unsure (1)..(357): unsure at all n locations
ntgactagttcagaataaacaggtaatttcagatacatgaatggaataagattggagttttcaaatgcttgaaagcattcaaaattctcatttgagaagaactccatatctatgaattttgggtctataatggaacgagaggaaaagaggtttgtgtaccatatatgctgttcctctgatgagaacaatggtccacagggaatgaagggaggaattggggtttcctgtgacccggaatgccgctgactttgacatgatgtgcctttccacttcttcgatggttcctccctttgaggagttttttctagatttcaatcggttcaaatgaaaatgagtgtaaaatagataaaggttggg

SEQ ID NO: 112898 - DNA, 343 bp, Glycine max
cctgaaaccaggaccttaaaactcagcttgttttgagaacgaatttatatccaattttatcccaaaaccacctaggataaacacgaaaaaaatgtgaatcgatcttacacactctaaatcagattaccggattacgctcatgtcccacagagaaatgaatgatttaaaaacactcaatgtctcaagagaaaattgttcgcactaccaatttaacaagaacttcctctattaccaattttaaagagattcttgataatatattattaatccgcattttaaattccaaagatatgtaattttaataatacttacaataacgcgataatacatcttttatttatat

SEQ ID NO: 112899 - DNA, 374 bp, Glycine max
agcttccatcaagtggtaatcagagctcaagagcttcaagtaggtgctccttaaactccattaattttttttctttaccttctcttccattgttgtttcttcatttttctccatgtatctcctcacatgtcttgttctaaatgttgttaacatgattctttagagtttccaccgattaaacttgctatagaagttagatttgattttctatggttcaaatttcttgttcttgttcttgaaccatgaattgtgttgagtttatgttcctttgagttttgtcttgttattttttgtggctgaaacctaaaccataaaattcttacaaaaacattaaagtagaagaaaaccttaaaaatctagagtgacttgttcac

SEQ ID NO: 112900 - DNA, 359 bp, Glycine max
tcttatccaaggctcatcttggtggtgaagctccttcttccatggcttattccctagtggatggcgcctcttctcacctcttctcctttgtcttccgctgcatctccatggtggaaaatcaccattaaaggacctcattgaagctcaaagatccagcctccatagaagccccacaagaaagcttccatcaccataaaccaaggaatacggcgttgccctagtagaagttcataccgaggatctatatccgtgcagggcgaaaggcagcatctcatgccaatctttgtatgacaccgtcatcttctgaataatcttcttaatatttttatttgcaacctctacagccccattcatctttg

SEQ ID NO: 112901 - DNA, 367 bp, Glycine max
agcttgtcttagcgtttattctatactatataccagcatgttagccatcgtcagcagtaccaagaagaattaaatctagctgcagcccacgagcacaaagtggcggacgagtatgccccagtgtacgcggaaaaggaggctagaggaagggtgatcgactcattacattaagaggaaacaatgtggatggaccgatttgctcttaccttgaacgggagttaagaactttcccgattgctagccaaggccaaagcaatggcggacttctactccgcccccgaggagacccacgcacttctcagctattgctagcatatgatagaattaatggcccatataattagaaaccgctaggaagtttgtattg

SEQ ID NO: 112902 - DNA, 360 bp, Glycine max
tctcagcattgcaaacaaaatatgtcttcttgttactgacattcctaactctcgaattgttcaaaaaatacttgtaacaattctagaaaaataagaagccacattaacttccttggagaactcaaaagatctttctactatcaccttggcagagcttttgaccgcacttcaggctttggaacaaagaagactcatgagacaagaaggtactactgaaggggatttggtacctaaatcacaggacaaaaaaaagaagggcaagtcaggaagtttcaaccacaaaaatggtagcaaatcctctcatgattttccatcatgtcccttttgtaaaaaaaaataaaacattcttcctccgatgaa

SEQ ID NO: 112903 - DNA, 233 bp, Glycine max
aaagattgaaattttggttacctgcctgagaccacctttgctatttctgtccatctattaccaaatattttttgagcctacagaaaaaatggcaaaatataagatcacatttatccatgtgtagtaaagtgcagatagtgccatccacaggagtatacatatatacatatgagatccaggttggtttggttgtgacctactcctaataataggctatggtggtgctctatact

SEQ ID NO: 112904 - DNA, 340 bp, Glycine max
tcatgatgtatcaagattgattcaaagaagatttgttgataacaaaggtgatgacaaaaagctcaaaggttaagaacacttcatgatgatctcaagaatcaaaaaatgagttcaagatgttcaagattgaatcaagaacatttcaaggttcaaagagaaaacttggtttcaagaatcaagttccaagaatcaagattcaagactcaagagaagacttaatccagataagtatgaaaaagttttttttaaaaactgggtagcacatggatttttcttaaaacttgtttaccaaagagtatttactctctggtaatcgattaccacattgttgtaatcaatc

SEQ ID NO: 112905 - DNA, 325 bp, Glycine max
gctctgatttctcttgttagacaagcggcctcagatatctttataaagggggggttgaactaagatatcaaagattattccccaattaaagtttaactctcttcttgagttaacaatttacccttaatatgaattacctcaaaacataattcaaagtaaacttctttatagcaaaagataaatgacaattaataaaagaagtttaagggaagagagaatgcatactcagattttatactggttcggccacgtcctgtgcctacattcagtccacaagcaactcacttgagattttcactatcttgtaaaatgcctcttacaaagt

SEQ ID NO: 112906 - DNA, 289 bp, Glycine max
tacattctaacttcgttgcctcatcctcctacactattatgatgaagggttggctcaattcttaccaagggtaacttatcactctcaattgagttttcaaaactatcatgacctgtagaagaaaaacaaggatttcaaatcacaaaatgtcaagagacttttattttcaaaacaattacccatttcttgaacatatcctataattcaaagaaaaatatgcaaagttgtacatgcaaacagaattgacctaaaatattaaactagaaacccaacagaactaacaaaacta

SEQ ID NO: 112907 - DNA, 372 bp, Glycine max
gctcttgcaagctggaatcatttatcctatctccgacagccaatgggtgagtcccgtccatgtagtcccgaaaaagactggcctcacagtgatcagaaatgagaaggaggagctgattcctactcgggtgcggaacagttggagagtctgcattgactatatgaggctgaaccaggttaccaaaaaggaccattttcccctgccattcattgaccaaatgcttgaacgcctggcaggtaaatcccactactgtttccttgatggtttttctggttatatgcaaattactattgctcctgaggatcaggaaaagaccacattcacctgccccttcggcacttttgcttataggaggatgcctttcggcctgtg

SEQ ID NO: 112908 - DNA, 270 bp, Glycine max
ttttacccgaggcatgcttcatggtatctcttcttcttagaagctttcattaaagccggcttccttccagaaggcttcctctgtggcttcctttgaagatcctttctcacagagactttctttgataaggctagatcctctatctaatccataccccctctattaaactaaatttaacttttcttaaaaaaaaattaccggatgaaaattgacgcatcataatatcaaacttcaaacataattactaataatatatacatatatatatca

SEQ ID NO: 112909 - DNA, 366 bp, Glycine max
  unsure (1)..(366): unsure at all n locations
tcgtacatgagtncttagatatgggctatttattgcagcctttagtttcaaaaaatacatgtgtttgttagttattgtgtgcaaaattatattgactatgtaagagtttggtgttactcattgaataaatacttgaatgttgtatgactaagtaaatttaactaatattttgatgcattaatgcttatcaaccacaaggtttcagttttacactgaatgcatgtatacttcatgcaatgtttatacttaatgtcttaagtagatgtagtgtaactcaagtttagtgtgactttgattcaaatttctgttgtggataaatggtatgacaatgaaatggtgcaacctttattttcaatcatgataatc

SEQ ID NO: 112910 - DNA, 326 bp, Glycine max
ttttactctccaatcttctctccgacatagcccatatctttcaactctttcctaccgaaattgtcctggagtacttagctctgtcatttttctcaaaaagtgtttggtcaactctttctccttcaagaaaaagttctttgtgcaaaaactggtgctattcatcctttttcattctctttctccctttgccaaaagaacaacaggacctaaccgtctgaattcttaggggactctcttctcccttacaaaagattcaaaggactaaccgcctggaaattcttttgattcttccttacccataaggaaaagatttaaaggactaaccg

SEQ ID NO: 112911 - DNA, 308 bp, Glycine max
actggactaaagaaaaacatattccaatcccaattcaggtgagatcgctagaacaaaaaatagaaagaaatagaaaatatataattaccaaccataaatgaagataaaaggattggcatatccagcatcatcttgaacaaaaaattgaccacctcgtctccaccaccacaaatatcgcacctttgccatctcagatttccaaagtcgtttcttaccccaaacctgtcttcaactccgatgattccatgttcgacttctttagaaatgtgattaccaagggccaaaccttaaaagttgtgaatgcgttg

SEQ ID NO: 112912 - DNA, 158 bp, Glycine max
ccgtgaaaaacccaaactttttggtcaatgaagagctgattggaaccttaaaggttcatgaataggacttcacaaaagaagtaccgaaaggcaatcattggctttaaaccacaaaaattccaagcattttctacatgaatgaaatcttatccaaattt

SEQ ID NO: 112913 - DNA, 374 bp, Glycine max
aagctttcttgtacctattatctgattgaaaaaaagcttttcctctatgtttttattggcgcgagccaacgatcgtccagggaaagatgttactggtggcgaggatccctatgttgaagagaaacttcgttaactacatgggccttaccatgtcctgtgataaaaagtccaatcctcactggaatcaaggttttgccttctctaacgaaaggattccagctttttgttttggaggttgtgatctaacacaatgatattgtggtggaatactatgcaaggagagtgatgtttgatattaatgaaatcccaaaactatacttcccttttcttatctacgtttcattcaccacatttttctatatcttactaattct

SEQ ID NO: 112914 - DNA, 322 bp, Glycine max
  unsure (1)..(322): unsure at all n locations
cgccccggatccttagagcacctgcagctgcatatgattataaatctacattttttcccaggccacccgagggatantacagggcaacgctccctaagcaatcgcactaacgcatagttgtggtcaattaagcaccgatgccaatagtagtgtcctgcccttgaaaaaaatgacgataaaaatgcggaagtgaatttgcgcaatgctccttttagcaatccgggcacctaatggaacaatatgacaaatggcgcagactggaccgttgctttgcccggttcattatcgaattttggtatataacttgagaatctatagtgta

SEQ ID NO: 112915 - DNA, 312 bp, Glycine max
tataataccaaatatacgataatgaaaccgggtctttggcaagcggtccagtcttgcgccaatttgatcatattgttccattaagtgcctcggatttgctaaaaaggtagcaattgcggcatattcacttgccgcatctttatcatcattatatttcaaggcgcaggaacaaataatattgacaacgtgtgcttaaattaccacaccagctggatattattgtctttgcaaaatgctatccactctgcacccggtgatttatcagttattatgtaattaatatgactaaaatcagctaactggacaaaagct

SEQ ID NO: 112916 - DNA, 277 bp, Glycine max
acattcttgttcaatgttctcaaaatagaaacaatccatattgcaccaactaaatcaacaatgcagataacatcgattgttcacacgacaatgaatcattacgtcctctattgaagtgtaagttatttattaaaagctctcatagaaaaaaatgggttatttaaaaaacataaaaaaatcacatttttaaggtgtatttttcaaaaaatcacaacgaaattgtatttttgtatgggatttctagaaactacataacgaaaatgaaactttgttgtgt

SEQ ID NO: 112917 - DNA, 359 bp, Glycine max
ttatgagcatcactgatgtctgcaacataatcattatcagcttcattatctgcggcatcatcatcaactacaccaaaggtgtcaccccccctaacagaaggacattggcctcttggccaaacaacttgggctagaaatatctctagtgtcatcatcggctgttggagggagagatggtgcaggctctgcatcagtaggtactggccatggtggaggctatgcaacatagggaggagctgcttcagctggcaaaaaggcggagatgtctggccagtaggtggaggagagacacttggaggaaggaccactagtggaatgtctagagtggctcgggccctgacctgttttggcctcaagaa

SEQ ID NO: 112918 - DNA, 374 bp, Glycine max
ggacctaataaactcaagctcttaatatctttattagactcgattaacctttcccctaacattgtaacactaagcttcttaataatctttcatttggctcgattaaccaagcccctaacattgtgacttatactcgttttcatatattgtgttattttctttcttcatactgtatattcctcctttctctttatttatatatatatatatatatatatatatatatatatatatatatatacttctatttaggaatttatatattcgacattttatgtgattataattgttgcgaaatgtaaatacattttatgtattgaatgtaaacctacctatataatggcaacttatcccaaatttattctgacacatta

SEQ ID NO: 112919 - DNA, 374 bp, Glycine max
aacttgcattaggaattgctaaagctcttctccatcattaggaatagtacctgactctgaaactaacaaatcaaacgtaacaagacaattatagttgctgtttgaatacctcacccactcaagtgtatcacacaattatggcttatctctaatgaaacacttttgccttttaccactctaattccccttgagttcttaggcaattcaagagattatggccacaacaaagaacaattcaccaatatgtgtaaggtaaggctatagagacaaggaaaaggttaaccaagaaaaaggctaacaatgtttttaggcacaaatgaaggaaataaaattcagaagttatgaattcaagtaacaatccttcatgcaaacaa

SEQ ID NO: 112920 - DNA, 359 bp, Glycine max
tgagatgaggaagtgttgaatggtgaaactttttgcttttattgttgaccacagagtggtacctggagatatgtcgcgggggtcaggagaccttggggacgtcaggtggggtgctattgcccaaaaccaagcttgaccaatcccgacccaacccgggcatagtcggtcagtgagaacctgtgatgtacctaagcaggcgagctcctggtagtcaacagataaaaggaaaacaagaccacaaagcaaggaggcttgtggtggctggccagctgtgaatcttgtgtgatatatggaggattgcctatggtaatcgattaccaagggtgtgtaatcgattacaaggcttaaaattgaagaca

SEQ ID NO: 112921 - DNA, 145 bp, Glycine max
gtataccctgtcaagccagctgggccaatttggaaaaccatatataatatgaactatatcctgaaattcatcatataatgtgatttcagaacaaagaaaggggaaaatgagactcatcgatatgtaagataggctttgctttcag

SEQ ID NO: 112922 - DNA, 350 bp, Glycine max
  unsure (1)..(350): unsure at all n locations
cttgacttttatcatcaagagattatanatatgtgatcatggcatgaatttcaaatagattaacaatcaagaaatctatctttcaatcttctctcaacaacattcaatatcttgcaattctttctacaagattttttgattcatttctcttcatctttctaaaagtttttgttcaacactttcttctccaagaaaagattttttataaaaaacttgtgctattcatctttttcattctcttcttcctttgccaaaagaacgaagaactaaccgcttgaattcttttgagtctctcttctccctttccaagagaattcaaaggacctcgcctgagaattcttttgattctt

SEQ ID NO: 112923 - DNA, 369 bp, Glycine max
agcttgcccttgcatatgacacatgttgttctgattataatgatttcgaacttgtgttcgtgggagcaaatggttaagaagtggatcctttctttggaggcatatgaatggacatccttggacatgaagatgcaatcctttccttggaggcatcatgtgatgttttattttggagttgtgcgatttagccattggacctttcaaatgtgaaaagtttacaagtattttcataataaaattaattgaagaattttaaatgaactaaaataaaatcttttgcttgagttagttccaagttttcatgtaacggcaacaagttgctaaggaactaattttgaacaataataaataaacaagagactgaaaatg

SEQ ID NO: 112924 - DNA, 349 bp, Glycine max
ctggatctatatgccataaagaggttccacagactcaaagttcattgctcaggtttggaaccagatgagaagcccctaacagacgaagtgcatcatgaagtggtatgttgctatgagactctaaatcatacccttttcactatttagactcctttcaacatggtatgcttgtggaagagggagttcaatgttgtgtctaacctcaaattttgttttgttgtgtgcttacctcactccaaattcatcttcactcatcatgttcaaactataattgaaaaagtgaattctgatgttgaggatgcaactaataagagatttcttgctatagaagtctatgatcctccaccct

SEQ ID NO: 112925 - DNA, 378 bp, Glycine max
tgcagctttcaatatctgcggacacattcgacattctattaaaaaattaatggcatttgaatttcacagagcttccattttcaatttcgagtgtctcgacatattacaggactccattggacatcccgggtaaaagttattgtccgttgaatttgctacgagcttccgttttcaattacgagcctctcgatatattacgggactcaatcagacatcttagtaacaagttattatcgttagaattttctcagagcttccattttcaattgcgagtgtctcgatatatttcgggattccttcgtacatccgagtaaaaagtaattgttgtttgattttgctcaaagcttctgttctgaacttcaagcgtctcgatctact

SEQ ID NO: 112926 - DNA, 367 bp, Glycine max
tatataagctaaaccattttataataaacatttttgagttttattcagaaaatttgagtttatctcttttatcttagtgagagtgattctcctaaattcttgagtgattcaagaacaccctggttgtatcaaaggactttcacaacctttgtgtgttgccctcgctggaaagagtgattctttccttcctttcatcttcacccttgttctttcaaaccacaattcctgaaaatccacctcttcccagaattatctcgtggccataactcccgttttacgcaatcaaattaagtgattcttgagcctaaattgaatttcaaaacgagacctttcacctcgttttggaatcatctcatttggagccctg

SEQ ID NO: 112927 - DNA, 277 bp, Glycine max
  unsure (1)..(277): unsure at all n locations
ttatcacattggggtatataaacatttgaaaaaattttaaagaacaatgggggtaatttggggggtttatttttcctatataatgataactatgaattggcttatgttgacaggtcaattgatgcccttatacgaaattggatgatntaatttgagtgtttggctttcaaggttagaaacctataaatttaagaattcttgattcttgcatgttttcttgaaattgatttacgggatttgtttctcatgatgcgaccacatactcagtgctattcat

SEQ ID NO: 112928 - DNA, 366 bp, Glycine max
  unsure (1)..(366): unsure at all n locations
tgtaccaattggtccattgttgacatgtcatgttttntcaattgtttctacaaaatcaattggacaatattgggaagaagatctctcttgcatgagttggctcgatcaacaacctcgtgattctgtgttgtatgttgcctttggtagtttcactcattttgatcaaaaccaattcaacgaactagctcttggattggacctcaccaatagaccttttctttgggttgtgcgtcaagacattaagagggtataccctaatgaattcttgggaagtaaaggtaagattgttggttgggctcctcaacaaaaggtgttaagccaccctgctgtagcatgttttgtcacccattgtggttggaattctat

SEQ ID NO: 112929 - DNA, 158 bp, Glycine max
caaagaaatttggcaagcattaacatcaagccgcatgctagcccgagatcagtgccctaagcccaccggtgccttcagccaggctaagctcaagattggcgctaaacccaatttcacttactcgtgcctaacacgagggtggcactaagtgcaacgtc

SEQ ID NO: 112930 - DNA, 368 bp, Glycine max
cgccacccagctcgcccaggcgagcaagtttgcttcctccaataacaacagccttattgaggaatcttctggagggcccaagtgggcttggttgctacttgcacccccccttttactaaatgcaccccccttctatttttttgtaattctttttctgtaactttacgaaactttacgaatttcataacgatacttattttccttccgcaaggttacgaatccttacggattatgtatttactcttttcttgctttcaaaggagttacggaaactcacggattgcgcagaaacacctcttttcgatttctgccacattacggaatttcacggatcgcgcaagcctgcttccttttgatttctgagacgt

SEQ ID NO: 112931 - DNA, 375 bp, Glycine max
  unsure (1)..(375): unsure at all n locations
agcttancttcacatacctctctaatatctaagcttccctncctgagaagaaaagctagagctaactatacacaaccctataataagctaaagctcacccccatggacaaaacctgaaaatacaaaaaaaggtcttactacaaagactaactcaaatgcccccaaaaacaagggctaaaaccctatactactagaatggcccaaatacaaggcccgacgaaggaaaaacctattctaatatttacaaagacaagcgagctcatacttagcccatgggctcgaaatctaccctaaggctcatgagaaccctagggccttcccttggatctctagcccaatctacttggagtcttctacccaatgcccttgcggagt

SEQ ID NO: 112932 - DNA, 388 bp, Glycine max
  unsure (1)..(388): unsure at all n locations
tatcgaatacccagcttgctcgagaagcttctatggaagctagatctttgagattcaataatgaccttcaatggtgattttcagccatggagttgtagcanaagataaaggagaagaggtgagaggaggctccatccactagagaataagccatggaaagagaagcttcaccaccaagagtgccttggataagaagcttatagaggaagcttcaatggaggaagagaatgacaaagagagagagagagagagagagaaagtgacatggaaattgaaggagaatagggagagaagttgaactttgaagtgcgtctcacaagtttcacagtcatcaaagttatgacaagtgttacacatgtctctatttatagcatagcacatgggaagc

SEQ ID NO: 112933 - DNA, 381 bp, Glycine max
agcttacctgggttgtcttcaacactgtctatccttctataccagaagtcaactgaagtgaacagacttttgtactattgcctctgttgtatgcttctcaaacccaagtttgaaacctaacacaaacaaagccaaggacttgaggacagaaaagaaacaaactataactataattaaatcaagaatcttcaactgcaacacaaattgagtacaaaggctaacaaaagcagaccctctacagagactgccatatatgtgagcaccttctaaaacaagcaagttacaacagtgtattatagtttgactaaccatgttcatgaggttgaccatccacaatgacacgctcccatggtttttccacaatattcacaatagcaccag

SEQ ID NO: 112934 - DNA, 371 bp, Glycine max
tgaggatctagtcttggatgatcttgcagcacggtgcaagctcttttctagcacatcatcacaatgaatctggtcttggaggcattgatggagaggtgaccttggtccctctcgcgacggcttgagaaccctagaggggagttaaagagtgagaatacagagtgtgaaaaagtatagggagctagacatcaaatataaaaaaaaagcataaaaccttctaagacagttttgttgacaaattttacaaaaccgtcttagaatgacaatcttctaagacagttttcataaaatcgtcctcattgacaaatttcgtatttacaaaactgtcaccacctatattctaagacggtttttgaggatccatcttcatt

SEQ ID NO: 112935 - DNA, 392 bp, Glycine max
cggacttaagcaccgccgctgcatctagatttaaagattttttcttttttcaaagaacaagcgagacaccggatgctgttggtttacatgactcacaatagaaagaatcttctgaagtaaatacagtgttaaaaagtgcgggagcgggataatattatctctatttctcttttccttaattaaaagtctaaggattctattggtagaggtggaagatggtagaaaaggaatgaaataaacaggaagacttacacttttattttttcctttaatttaaaatttacatcttatttcttttcactctccaaaacatataccaaaagttgatcttgaaatagatactcaatttcaagctttcctaattacaatcattggcctgatcttatttttgg

SEQ ID NO: 112936 - DNA, 360 bp, Glycine max
ttcttcataatcacaagagtttttttagaaaattttgaaataagtgtctcgtaaagactaagaatactttacgcataagctaaatcatttttttaataaactaaattattttaacttctctaaaaaaaactaactttaacttaaaattattttatttttttctttttatattctttatccataagttcttatggacaaacttatttgaggccaacatatgaattgtaagtatagctttgatggtatgtgcaaggtgagaagagagggtatgttattcccaccaccccacccccacccccgctttttacactttgcatcaccagcctatatttttgtaatttgtttctataaagtaacatt

SEQ ID NO: 112937 - DNA, 371 bp, Glycine max
agcttaagggtgaaaccttgcagaacttttatgaatgacttccaaatggatttcaatagaatttccttagtgtataagaattatgagatgcataaatagggttttaaggttatgttaagatttaagtatgaattccttgcactttaattgatgttattgaattgttattgtctcaattagagattgggaagacttgtgatcatcgggcaaatggtgtgctggaaactttggttggtgtgtacttgtatgatgaatttcaaaattattagtgtgactaaggattatgaaatccttgagggggagcaaatagaccaaggcatgagtgcatttgtagaaactagaattcaactctagtattattaaagactcat

SEQ ID NO: 112938 - DNA, 356 bp, Glycine max
  unsure (1)..(356): unsure at all n locations
ntnttgctgcaaaattcatttcttggttggtgttttggtttgcgcttggcattggatttgtggccagcaaactttgtggatgatttagggatggcctttgtggatgactaggtggtgggtaatgagaagggatgatattggctgagcgatgacattgttgggctggtgggaagtttggtcgtatagcaaaggcagtcacaacatgggtttctccctcattctcaccctcttcatttgccctaattttctcatttgtcagagcaggatgatcaaatttgcctcttttcaaacccacttcgatcctttcgccggtgaagaccaaatctgtgaagcttgaaggtgcgtaccccaccatt

SEQ ID NO: 112939 - DNA, 347 bp, Glycine max
agcttggttcgaggtactttcccgttgttgatcgaagaacgatgaagaacgaatgtgaacgtcgtagatcggttgaaacctttgcgagatttctcatggataacgttgccgacacgtttcggaagcgcctcgtcttatagtttcttcacggatacgttttgtccacgcaatttctaaagagagataagtgccataggggctgaaccccttccttgttgccttcctcccctatttatttcaaataaggggaggtggccgccgctcagctcggccaggctagcaggggtgcttcctccagtaactaccgccttctggaggaatttctttgtggggcctagtgggcctgg

SEQ ID NO: 112940 - DNA, 357 bp, Glycine max
tgtagaatggctagacatgatacatgtcagggtttggtttggttcaaggataaaagggatgccccacattattttcatgacacatatgcaaaaatgatgatctggaaattttatgcaaaactggttatgcatgcacctatgcggacgctcaagtgtcaaattttatggtcatgtgatgctagggctcaggatacatttcctctattttaaatcaacccaatgtttccaaaatatgttcttttatcgatttgtgcattccttcaagtccactttgggcgtccggggaaattttcacagcattcacccttcagatgtagacacttttttttttccaaaaactatctatgatcagcgaat

SEQ ID NO: 112941 - DNA, 366 bp, Glycine max
  unsure (1)..(366): unsure at all n locations
agcttcaacaaaaccatattcttgtttgtcagtcgntgnaaccccgtacaatctcctcctgagatgtgcatgacaaaaccctacatgtttttgagttgcattgtaccaggaccagattaccccatagcaggcatagacgtgtttctacaacctttaattgatgatttgaagaggttgtgggttggagaatggacatatgatatttcaagaaaacaaaatttctaatgatagctgctttgatgtggaccattaacgactttcccgcatatggtttgttgtctggatggagttctcatggtagatatgcatggccacattgtatggaacatacaaaggcttttactttggataatggaaggaatagtt

SEQ ID NO: 112942 - DNA, 361 bp, Glycine max
tgcagtggaaaccagctcaagcctttcagattttaatattaagtttgttattttaacaaaaattgatcctccaccaaataactgtcttcgtccctagtttaatagttttcactcttgcacgagagtctagagtttttggccatatttaaaaaaaatgtcttaataagtatttatgaaaaaaaacaagataaaataagttaaattttttatgtataaataatttataaaatctctctcatttaatttatctaaaatttaattttaaaaaatattttattttatctttttattttcttcttttataagtattttttttttttgtaaattatctaaacaaaatctcaatataaatcaatttggg

SEQ ID NO: 112943 - DNA, 373 bp, Glycine max
agcttttcaaatggggaaaatgctctctttcactttcttctacatcatattcaaattgtccaaataaataataaagtcatctcgactcaaagaaagtcatattagtctcatacaattaatatagaacctatatcctaatgtcacatcctatcagagcgtggtgttcccgtgttctctagcatgaggttcttcatagtcatccacctattcatctgctcccccgaacacaagttcaagatcatcacaggatccaaacacaacaacacacagggagtgagttatcacattcctagctaatagagaaacaagacaattaaatatatatattatattaatgagataccacttgcttaaacatagctcacgttacttc

SEQ ID NO: 112944 - DNA, 370 bp, Glycine max
  unsure (1)..(370): unsure at all n locations
gagacttcctgctatggatagcttttttctcttttggngcttaccatggggggcatgaagtaaatactcttcatatctatctaaagaaggtttatgggtccattatgccatcagaacctaattctagtgtgcctttgccttgatcattcacttgcatgcttaattagggtcactaaacactgggaaatggtttgatccttataacttgatagaacgggactaacttatcgtattttcacgagacatcgaggtacgggagcttagtttttgttatgttatgtcttaatgcggctctggttaagtttaatccaacaagaagaatctgaagatgacgcttgattaggattatgctaaacatgcgccagacatc

SEQ ID NO: 112945 - DNA, 347 bp, Glycine max
  unsure (1)..(347): unsure at all n locations
ntatcctcagatccctcttgttggactagacttataccaaacaacattattgtaacaatatatttaaaaccaaaacttaatccgcagatccctcttgtaagactaagtttcaattctacttcattcaagatctaaggcaacaatacatttcccaatgctaaaatcacctaaccaagcacacaaatggttgattagaccaagagcttacataatttaagcactaaaagggctttagttaggtttagttcaagttgtaataagggctcaattggcaacctaggcatcagccttttgggagaccaaatggtggctgacttgttggctgttgggggtaacttttggttgcc

SEQ ID NO: 112946 - DNA, 368 bp, Glycine max
gcagcatgcaagactatcatggatggtactcaactatttccacttagaatctctataaatgtacggagcatgataaaaacaacattagtcgctattcccttttctgcattaggacccccttctaatctgaatatgaaataaactcatcttcccatctatgcttatatgttactagcaacagggaaataaggggctcatggtattctaaggtcaaaggaacctcaaaccatgaaaaatgtactgaaattcaaatagattatttcctcccccctattcatgagttatttaaacaagctaataactgtttgaaggaatcatcaagcacaattatcctaatataattgtttcctgcaatactctaacaaaat

SEQ ID NO: 112947 - DNA, 347 bp, Glycine max
tgttctggtagatattttattgttcattggattttctgttcctcattggaatttggatggatatgcatgtttttaaggctttttagtttgatactttgatggcaacaaatcaagatgaaatgagtgaccttagtgctttttttttttccagcataccggtaccattttaagagttgtaatgctaattttttagccttataatttacctgtttattagacgaaaaccctaaccattgtccatgaagtgttctaatgtttcatttttctttgattcatttgaagaaaaatatgttcatggcaacccttatctaataattaataatcccgaataaataattttaatatgc

SEQ ID NO: 112948 - DNA, 349 bp, Glycine max
tcctatagatgccgatattggccatagtcacgtgccaggtttgcttactacctgcaacacattattctggcgataggtgaaggttacaaaggttgggacgccttccttaactcgctctttaaccctactatcttgacgcatgatctcgctatgcctgatccaacgctgttcctacttaaaggacctcaatgatatgtctccttcccttcatcaagtgcactttaagacatacacttacgctagggggatcctagctgtcatggaacaaagcataggagatcttctaatcttctatgcccgtctgcacaatctgcttccccgtgtctaccctcaatcttgctgtagacat

SEQ ID NO: 112949 - DNA, 349 bp, Glycine max
  unsure (1)..(349): unsure at all n locations
ccactttttaacgagagcagattatttgcatgtttaatttgatgggcatgtaccgaaaacaatcaatcatttttattatttaaacctcttgaattnttactaatttttttatattccagaataacctaacatgcacttttagatctcggggctgtcttctcatgtatgaaatgcataaattttttggaatatatatatatattattgaatngaataacacctcatttggatagttataattcttcattcctaatgtaactgtatactaataagtttaattattaccaaatctctaccaaatataataataaaatatcccatctactaaagtttgagactttatatacac

SEQ ID NO: 112950 - DNA, 385 bp, Glycine max
atcacgtgaccttgtaacactcaagctcttaattagttgcagttaattgataggttcacatatatggaagaaaaacaacagatcttaattaggaccatttcgatgaaattgactcattacaactatgactttaacaatgatgattataaaaggtgcatgcatgttatgttgcatgtgaatctagtttaagaccatgcaataatgcaaacaagtatacatttcaactaaaatgctaccatgaaatgtttataagccaattaagaaaatgcaagctcaccaattgcatcaacagtggtttttccattggaaaaccttccagaaggtccaccagggaagtcaatcccataaggcaagtaatcagccctagccaaagattggagctggt

SEQ ID NO: 112951 - DNA, 280 bp, Glycine max
ctttttcttccttttttctttcttcaattttcgtgctccccccttttctttttcttctcctctttcctttcctccattgaagcatcctctccaagcttcttatccaaggctcatcttgggggtgaagctccttcttccaaggcttatttcctagtggatggcgcctcctctctcctcttctcctttgtcttccgcttcatctccatggtgaaaaatcaccatcaaaggacctcattgaagctcaaagatccagcctccatagaagccccacaagcaagct

SEQ ID NO: 112952 - DNA, 366 bp, Glycine max
tgaaggcaaactggatgcattggttaacttggttacccagctggccttgagtcagaaatctgtacctgttgcaaggggttgtggtttgtgctcctctgctgaccaccatacagacctttgcccttccatgcagcaacctggagcaattgagcagcctgaagcttatgctgcaaatatttacaatagacctcctcaacctcagcagcaaaatcaaccacagcagaacaattatgacctctccagcaacagatacaaccctggatggaagaatcaccctaacctcagatggtccagccctcagcaacaacaacaacagcctgctccttcctttcaaaatgctgctggcccaagcagaccatacattcc

SEQ ID NO: 112953 - DNA, 283 bp, Glycine max
ccctatatgtttctcatcacctttcaagaaaaaccgccctggagtgcatttaccttacccgcgaaggatggaactccaaatgcacaggtttatgcagcaatgtactggccagcaagcggacaatcattggggtcaaatgcaactaaatgtgacctttcaactgatacactatgcaccataatgtattacctatcaccataatgtattatctatcaccataatgtattacttctcataccctaatttcatccggggatgattggttgccaacatttgcaacccg

SEQ ID NO: 112954 - DNA, 351 bp, Glycine max
  unsure (1)..(351): unsure at all n locations
gactcaaacttcattactagncctataggcagtggacatctcgcatcatataaatatatatgcatctatatatatatatgagtgtatatatagatcaattcttcaatgcccacgccatgaatcatcaatcgttgaaatcatggcaatgttaggattaattggatactttaagcttattggaaaacttctatttccattttaactttggaaatctctttcctttttatatttttttatcatagaaagcatggttatcaaactctccagttaactcgctaactcttatgagtttacgagtccacttatactctgcgagttgactcttgagtaaactctttttttagtagactt

SEQ ID NO: 112955 - DNA, 59 bp, Glycine max
ggatccacaatccacctgcagcttgcacgaaaaaaaaatatttattttttttgacacca

SEQ ID NO: 112956 - DNA, 353 bp, Glycine max
tgtttgagaagcttctatagttgctggatctttgtacttcaaggaggtccttcaatggtgattttcaaccatggagttgcagtggaagtataatgagaacatgtgagaataggtgccatccactagggaataagccatggaaggaggagcttcaccaccaagagagtgtcttcgataagaagcttatagaggaagcttctatggaggaagaaaatatgtgtgtgtgtgtgatagagagaggggcatggatttgaaggagaattattgatagaagttgaactttgaagtgtgtctcacaagtatctcattcatcaaatttatgacaagtgttacacatgcttctatttataacc

SEQ ID NO: 112957 - DNA, 375 bp, Glycine max
agctatagcatggcctccatgatatttttcatttgattttttaaggccgataggtcgccttcatctgttcttgcactccctcttcattatccatctttctggatcgagtgttataggggtgcctttgcgcttttttagttgtggtgagttccctaaagaaacaaacagtggtgagtatgccaccaaaacatgaatatgctaatgaatgctcagagcacttggatccacctcaaggccttttttagataacgtgatgagtttcagaatttctctttttataaaaaaggaacaaagcttttatctagccaagatcatacaaaagtgttacaacagaacctaacagtttctaattatatgggccatcaaatctatcat

SEQ ID NO: 112958 - DNA, 260 bp, Glycine max
tgcttgagaagcttctatggatgctgaatctttgagcttcaataaggtccttcaatggtgattttcaaccatggagttgtagcggaagataaaggagaagaggtgagaggaggcaccatccgctagagaataagcaatggaaggaaaagcttcaccaccaagagagtgccttggataagaagcttagagaggaagcttcaatggaggaagagaatgagagagagggggggtttttttcttcctcttcttgttcgtctttc

SEQ ID NO: 112959 - DNA, 373 bp, Glycine max
agcttgaagtaagaataacatgtgttttctcgtacatgtgaaatgcaagtatgattggataccttaaatatgatggtgctcactgatatgtgtacacccctttttttaaaataaattaaaaggtttatctaaaaattaatagactctttagaaattaaataaatgagagaagatgagttgtgtcaattaaaataagggttgcatagtattagaaaataaatatcataaaatgatgtattagaaaataaaggatgttttaattggctatttatttaatgaaagagtaaaatagagttcctttttataaaataataaaataaaaaatagaggaaatagtatacttagagtaccctatatgaaaaacgagacatat

SEQ ID NO: 112960 - DNA, 353 bp, Glycine max
tcttgctagcactacaaatggctgccgaagcatagaatccatattttaggtggggtgacaacagcttgggtgcatttgcaaccattaaccatctccactttcaggtactcagtactgatcaactcgagatcactgcaatgcactattcttcatgatgattatcggcttgttagaataagtgctctaccagtattcaaattgacatttagtgatttgaacaaacccacgcatattacttggctcttccttttccaattgagaaggcccctactaagaaaattgccaagttaagcggtggtgtgataatatctaaactgttaaactatccactctgaggccttggcattgatggc

SEQ ID NO: 112961 - DNA, 369 bp, Glycine max
  unsure (1)..(369): unsure at all n locations
agctttgagctcaagtttgttacttttattaatntccgagttattcactagatttggctacaccaaaattagaagtttattttaaagataaaatttaagattataaagttataactgttaataaaaaatgtatcaatcttttttgttattttctcatcaataattataattatgcactttatttttcttatccataaatgagatagtgttgctgggaattactaactaattaaaaaattgacaaaaaagatgaagaagataaacacgatgatgacaaattgactcaacaaagttagagaaaagccgtttgagtttgaatacttggttcgtataatgtaaggctccataggaacaaaaacgagacgcatg

SEQ ID NO: 112962 - DNA, 343 bp, Glycine max
  unsure (1)..(343): unsure at all n locations
tgatagcnttacctttgcctccataagcttcattcctttntcactcatgtgtccaagtctttgatgccatagggttgaattgttgacagcctcagtaacttttaccatatcctcatctgcaatcatgtaaagagatccttgcttctttccacgagctacaacgagattgtcttttgttaccttccaagcttcatctccaaaagtggtgtaatgctcctcatcatccaactgccctatagatattaaatttctctttaaggcaggaatatgtctgacattgtgcaatgtgcatagggatccactggaggtcttgatgtcaatatcacctcttccgacaatgtcc

SEQ ID NO: 112963 - DNA, 350 bp, Glycine max
  unsure (1)..(350): unsure at all n locations
ntataaattgataacaaaataagcacatgcaattgtccatacagctaaggcacggatcaaaccaagatgtgtgcatgatttaggaaaaaaaaaaggcaaaataaagcaagtcaaagaaatttatttttgggttgtgcctcatcatgagttgttccttttggggctgtgcctcgtcatgagttatctcactgtgttttctcttcttccccattttttgctagaaaatctgccatacccaagaaccaaaatcatataacaaaaatggtactgaaattatatgcataataaacttacgtttgcacttcagcaatttaagtttcaatgtcttcttcaattgaatttttctctgg

SEQ ID NO: 112964 - DNA, 360 bp, Glycine max
agctttcttgaataagggcaagtttgttccttcagttcgcgaatttatattgagcgccgttgtttgacacgctggttagtggatttgagcacgcggtaaaatcgttgcaagtgggaccggggatgtcacctgttgcacagattaaccctttggtttctcgtgcgcactgcgacaaagtgtgttcattcctcgacgatgcgcaggcacagcaagcagagctgattctcgggtcgaatggaccagccggagaggggtattatgttgcgccaacgctggtggtaaatcccgatgctaaattgcgcttaactcaagaagaggtgtttggtccggtggtaaacctggtgcgagtagcggatggag

SEQ ID NO: 112965 - DNA, 357 bp, Glycine max
cctcagctcaaccatgttaaccatccttacaccttttttttctatactcattcatttagcgcatttccacttgcattccaaagtgtccaatcctccaccaacaaatgtttgaataccatcaaacctttccaaaatcttcgaaagaagagatgcatgtttcagaattcgaaatcttgaatatataggtgcatggacgcattgtaatccattacacaaatatggtaatcgatttccaaagagctgcattgccataaataactgcttgatatctaatacactattatggttatcgattaccaacggttattttatccattaaacataaaccaaaacgctttcttacagaaaaaaaatttt

SEQ ID NO: 112966 - DNA, 391 bp, Glycine max
ctccgtagataactacgagcgtctcgatatatgatgcgcctgaatcggacatccgagtgataagttatgaccatttgaatttctggagagcttctgttgttgaatttcgagcgtctcgatatgtgatgtgcctgaatcggaccttcgtgtgaaaagttatgagcattttaatttctcgagagcttccgttgttcaatttcgagcgtctcgatatgtgatgtgcctgaatcgggcctccgcgtgaaaagggatgaccatttgaatttctcgagagctttcgttgttcaatgtcgagcgtctggatatatgatgcgcctgaatcggacattcgagtgaaaagttatgaccattttaatttctcgagagcttccgttgttcaatttccagcgtt

SEQ ID NO: 112967 - DNA, 362 bp, Glycine max
gcttatagtatggaggagataaaacatccttatcattgtctccttcagtacgaagaattctttatgcggcttttagatgaagaaaggtatgagcctccgtaaagtgacacacaactcccaccgcatatataatatcgggccttgtattggttagataccttaaaactcttcacaagactcttgaagacacgggagtctaccttctctccttcatcaaactttgataacttcaagccaccttccataggtgtgttcacgggattgcaatcaagcatattaaatttcttcaacacttcttttgtgtagcttccttgtgagacaaagatatcattctctatttgcttcacttccattcccaagta

SEQ ID NO: 112968 - DNA, 328 bp, Glycine max
  unsure (1)..(328): unsure at all n locations
aaacccaagctttattaaccccactttgaaatcccctactttcaatgtgaaactatcccataccccaattggaaccctgacacagggctttctatgaaattatttactctgtgacgaaaaagttggtaaattcatttttgtataaaaaaatttgtgcttctcttgtgggtggactggtggtggcaaagcaaatacaaacggttatttaccttgtgctataaaaaacacgtacggtatattactagtaacagagttgaacaatggaacctcccttttgtatgggcgtttataatgggtctttntttttttttaaattcaattattcaag

SEQ ID NO: 112969 - DNA, 368 bp, Glycine max
  unsure (1)..(368): unsure at all n locations
ntgtgttgagtgtagacttacccgagggttctttttctttcacgatggtacgtgaaatntaatttttttttccatatctaattaattttaaggtacaaataaaagaaatatcaattacttatttcaattatataaaaatgtgcactttttatggtattgcggcaaactaccaaacacagaccaaccaacctaataccaaaaacagtgatgctacataaagtcatgcacatcattcaaaggatacctggtgaaagtcttctgctttaatagtttctctagttcagataatccatctccatcagaatagttaatttggacactagtttcacctactacttgcttgtcagatgattcatttgcaatcaatt

SEQ ID NO: 112970 - DNA, 327 bp, Glycine max
  unsure (1)..(327): unsure at all n locations
tggttggttcagggtaaaaggatcccccaatatttcatgacacaaatgccaaaattatgatttggaaactttatgccaaactggtcatgcctgcgcctatgccgacgctcaagtgtcaaattcttatggtctggtgatgctagggttcaagattcatttcctctattttaaatcaacccaacgtttccaaaatatgttcttttatcaatttgtgcattcatccgagtccattttgggcgtctgggaaaatcttcacagcattcaccctttaggtgtatacacattttttcaaaaactagctatgatcagcgaatntttcttttaaag

SEQ ID NO: 112971 - DNA, 347 bp, Glycine max
tatgctgcaaacatttattatatacctcctcatcaacaaaaccaacaacaacagaataattatgacctttcaagcaatagatacaatccaggttggaggagtcatccaaatctgagatggacaagtcctccaacacaacaacaacaggctgtccctccttttcagaatgttgctggtctaagcaagccatatgttcctcctccaatacagcagcagtcaccacaaagacaacaagcgactgaggcccctcctcaaccttccttagaagagttagtgaggcaaatgaccatccagaatatgcaatttcagcaagagacaagagctttcattcatagtctgacaaatca

SEQ ID NO: 112972 - DNA, 375 bp, Glycine max
agcttttgcaaaagaattatctcgttttttaatgctcatgcatacgcatgcacatgatatttggtatcttgtgacagggacaggatcgctttaaaccatggtcaaataccgcgtcaaatcccagacagagattaatccagggtaatgatagcgtgaccacgatttgctgcgcaatgtcatttcctgctttcaggtactcagggacaggcacaaattgacgctaggctcgtgatccacagatcgctgtcccgcgtccggcttcggacgatcgagaagcgctactaagagggagcctagtatcctttaaattcctacctattattattgttatgatcatgtgcctaacttaccctacgagtttcaagatagcgaaca

SEQ ID NO: 112973 - DNA, 360 bp, Glycine max
ttcaactgaatttgcaacgttccaattgatttataaatggtgtaatcgattacaagatattggtaatcgattaccagtgtatctgaacattgaaattcaaaatcaattgtgaagagtcatatcctttcataaaaagctttgtgtaatcgattacatggttttggtaatcgattaccagtgacaagttttgaataaaaatcaagagatataactcttccaatgattttcaggtttttctaaaggttataactcttctaatggttttcttgaccagacatgaagagtatataaaagcaagaccttgacttgcatttcaaatacaattattacaacttttaacatactcttttacaaccttta

SEQ ID NO: 112974 - DNA, 374 bp, Glycine max
agcttataagaacaaaattgcctcaattatttccaaatatgcatgtgaattaggaacatcaacatgaatcaagccaaggctattgtgcaagcaatcaatggggcaaaacacaccaaatgattatgatgatggatggctcaaattctcacaaaggtaaactcatcactttcaaattgagctttcaaaactatcatgacatgtagaggagaatcaaggatttcaagtcacaaaatgtgaagaacttttattttcaaaacaattacccatttcttgaacatatcctataattcaaagaaaaacatgcaaagtcgtacatgcacacaaaattgacccaaaatattaaactaaaaatccgacgaaactaacaacattaa

SEQ ID NO: 112975 - DNA, 358 bp, Glycine max
tgtagaacggctggacatgatatatgtcagagttgttggttggcctatggttcaaggataaaggggatattccacattatttccatgacacacatgcaacaatgatgattatgaaattttatacaaaactggtcatgcatgcacccatgtggacactcaagcatcaagtttttatggtcatgtgacactagggcttacgattcatttttcctattaaagtcaacccaatgtttccaaaacatgttcttttatcaattcatgcattcatccagtccattttgggcattttttctggaaaattttcacaccattcacccttcatgtgcatacacattttttcaacaaaaccctttgtttt

SEQ ID NO: 112976 - DNA, 373 bp, Glycine max
agcttgccaagagaaggagtccactgttgaaatgcttaccacctcaaaagactggaagcggtttctaatgactcctctgcggcctccacataaggcatagaggatgggcagctcaccaagatgtcttcctcgcctgatacgatgaccagatgcccttccactatgaatttcaacttttggtggagtgtagagggaacaactcccattgagtggatccatggccgccccaacagacagctgtaggggggggttaatatccattatttggaaggtaacttgacaggtgtgagggcctatctgtaccaggagatcgatctcccccctaacctctcggcgggtgccgtcgaaggcacgaaccaccattgaactcggc

SEQ ID NO: 112977 - DNA, 361 bp, Glycine max
tccttgagaagattcctaaatatgctagagcttagctacacacacctctctaataactaagctcacctccttgataagcttccttgagaagattcccagaaaaactagagcttagctacacacacctctctaataactaagctcacctctttaagatgagaagctagagcttagctacacacctcctataatagctaagctcacccccatgccaaaatacatgaaaatacaaaaaaagtccctactacatagactactcaaaatgccctgaaatacaaggctaaaaccctatattactagaatggccaaaatacaagcccaaaaaagaaggaaaaacctattctaatatttacaaaaaaga

SEQ ID NO: 112978 - DNA, 372 bp, Glycine max
agcttcactcaatgacttattatgttattgggaaatgaggacatctcaccttccctctatggagtacgactccaacaaatactgcttaaggaattctgaactccctccttccaaggtctcaaattgttttccttgagcaaaagacaccatatctttgcttcactggccaaggaaaaagagaacagattaaggcgagtgacatcttctggaacccctacaatcttcactgtgtcacatatctctatgtaagtagtcaaatgaacatatggatcttcatttggcagaccatggaagaggtttccttgaatcaactgtatgagggagtgtggatatgaaatattggccgcttgaacttctggtcatgcaatattg

SEQ ID NO: 112979 - DNA, 355 bp, Glycine max
tctagccagatggacttaccttgaattaatctttttgatagcccttttgagccatgtttccctttccttgttatgaagctcactacaagcattaagggaagaaccatgatatcaccatatccttaaggaattttggagctttggaattgttttgcgaataagtatggggggtttttgtttcattggacaacttgttttgatggctatgcttcatgatgtattttgggccatacttgatgtacattgtatattggttaaatgttggacatgctgaatcaaatgttgattctcaaaggctatagagtcaaaaaaaaatcgaaaaaagaaaaagaaaagcaataaagttgactgaata

SEQ ID NO: 112980 - DNA, 371 bp, Glycine max
agctttaaagctttatcttcatgtattttctcctatctcgaacacaaacttgtggtctaagtgtgttaggatatgcacaagaaaatacaatttatataccttaagagagaagtagaaacactcaattttatattggttcacttaatctaagctacgtctagttctatttcacaatcatatgaaggattctactaatcataactcactcctagaaaatgatgaatagcaaccaaaatcagcgaccaacaaaagttggtgaccaatagtgactaaaaatatcatttgtcattttcccaaatcagtgattgtattggtgatcaatgtttgtgtaacaacccacataattgctaatctagctgcaatattgttta

SEQ ID NO: 112981 - DNA, 347 bp, Glycine max
tgcatgaccaagtttcttatgccatacccaattttcttttctgacaaaaagtaggcaagacacattttgatatgatagctcacctaatctaatcttatattgattacctttccttttagaaaaaaaaagtagggacccatcattgttttggatgatgcactcatccttcttacaggaaacatcatatccactgccacataatttacttatgcttagtagattgtgttttagcccttcaaaaaataaaaaattatcaatagaaggatatggaggtatgataacgattgtcgaattgttcaaaaacaaatttagtagggaattttgtagcataggattaacctaggttg

SEQ ID NO: 112982 - DNA, 365 bp, Glycine max
  unsure (1)..(365): unsure at all n locations
aactngccaaggtgagttgctgttttttcttcaccccccattttcttaaataacgctgaggcggctgaaggaaaggggttctatgtccagaggtccaaatttgagaacaaaagaataaaaaaagaagcttaaacaccgtcgaatcgcgactgtaatcgatttctatatcattcttcggtcgttctttggttgttcttcggtccttgtccgggtagtttttatttttaagttttgaattcactctatgaacccttaggggtcctttttattgttttgtgcatcttcatctccttctcctatcatcgatgatcacttttgttttgtaaagtaagttttaaccgatcgttagtaccacatcttatctt

SEQ ID NO: 112983 - DNA, 350 bp, Glycine max
tcctcggggccatttcctgtgaaggcaaaaatttggaaagttagttttaccagtgggacactactcttaaaacaagaatggcatacaacctcctcccataaatacaaacatcaatgtaaatttagagccagcttatgcgcatgtttccttacgaacgttcacttgcggaagacatcctattaactaagaaaaatgcacccatatacaatcaaggtagcttcattacctagattatttacatgtacttccaaggtgtatttgttatttacatcacacacgcctccttggctgaatttacatacatgcatactcaaagcattttggggtaccaaaaactgcacatgcgctca

SEQ ID NO: 112984 - DNA, 296 bp, Glycine max
ttgctgatataagcttctttttctaaaggatcaaagcgagtctgaaaagaggcaaatttaatcatcctgcttgaacaaatgagaaaactggggcaaataaagagggtgagaatgtagaagaaacccatgctgcgactgccattcctatacggccaagtttcccaccaacccaacaatgtcattgctcaaccaataacaacccttctccttacctaccacccagttatccacaaaggccatccctaaatcaaccacaaaacccatcttccacacaaccaatgctaagcaccaccttt

SEQ ID NO: 112985 - DNA, 303 bp, Glycine max
agcttctatctctttggacttaccttgaattaattcctttgatagcccttttgagccttgtttccctttccttgttttgaagctcactacaagccttaagtgaaaaaccatgatatcaccatatccttaaggaattttggagctttggaattgttttgggaataagtgtggggggtttttgtttcattggataatatgttttgttggctatgcttcatgatgtattttggcccatacttgatgtacattgtatattggttaaatgttggaaatgcggaatgagatgctgtttctcaaatgcta

SEQ ID NO: 112986 - DNA, 302 bp, Glycine max
tggatttccttttattagggtttctttccttcctaagatggagccaaacccagtctccctcattatcatctagctcttttcttcctctattgcctttagttgaatacacctttgattggttctctattctgttcttaaccctctcatgcaacttctttacaaattctgacctacattccccttctttatgtataaaagaagtatccagtgggaggggaatgaggtctaacggtgttaggggattgaacccatagacaacctcaaaaggggactgcttggtggttctatgaacccccctgttg

SEQ ID NO: 112987 - DNA, 304 bp, Glycine max
agctagggctctctttttactctccgacttttggggttcattgctagctatcttatacttatcccaagtttcagagtttctacacctagaccactccttgaaacactcgttttttactctaactttgctctgaacattttcattccaccagacatatggtattttaaatccacttcaaaattgaattcctcttaaaaattcccatcaaaagacttaaatttgtgtggaatcctgtctgttatatgatagttatgatgctatttgttctattcacctgagacgtaaaaatatattttgcaacttt

SEQ ID NO: 112988 - DNA, 292 bp, Glycine max
  unsure (1)..(292): unsure at all n locations
tgactaatgcacaatgtaangcctttttcttttgtagaagattgtataacttcttaagatcatacacaatgcaattatatttgcttaaaaaagggatagatctgaacccatcctaaagacatagcgattaatagatgtttattgaggggcacctgcaacttctaaagtgcgttaagaagaaacatatgaccataaagatgatcagagatccacacaagtgtgataatcatttagcttccaaattccaacggctccccgtgattttctagccaatacaaacggacttagacaa

SEQ ID NO: 112989 - DNA, 312 bp, Glycine max
agcttgtaggattatggggtacccatcacatgtggtactaggtggcggtcgggcgatggtgcacaacaagttttccacatccacaatgcgcgcataaacccaccatcccctgttgcccacctccaactgagctcacgtactcccacgtagcccatatcctcgtttctctcaacaccgggtccccatcaatcctcccaagcttccccaacatcaaagtaatacaacattcacacagcataagctatcacagccaagtaaaacagggcaaaggcagaaaactctgctcaaaacaccaaccaaaatcacagcttt

SEQ ID NO: 112990 - DNA, 304 bp, Glycine max
tgtctcatcgtttatgcgagtctgtttcctacatgctagctatcatcgcatagaagagttatgtctagccacggcccacgagcatatgattgcggacgaatatgccctattatacacggaaaaagatgctataagaagggtgatcgactctttacaccattaggcaaccatgtggatggatcggtttgctcttaccttgaatgggagtcaagaacttccccgattgtttgccaatgccaaagcgatggctgacacctactccgcccccgaagagattcatgggcttctcggctattgtcagcat

SEQ ID NO: 112991 - DNA, 310 bp, Glycine max
agcttacacaagaagctaaactatcaactacatgtgataagttgtatccttgcaaaccaacaaagcaagacaaggagtgatagtatagaaggcttatagacttgattaagcaactcgatgtcaccatttctttcaccgatgccatagacatgatgtcggaatacttaaacctcttaaaagaccccataactaagaagaagagtttgaaagactatggcatagtgacttttgaggaggattgtggtgccatcttggagaatccaaaaaagctaggtgatctcgatagttttactattcctatatcaattat

SEQ ID NO: 112992 - DNA, 302 bp, Glycine max
ttatgagggtgccttattgattgttgttttaccttcctaacacaatctttaccctatccctcccccaaattatgggcatatcatgactaaaacccttatgctctcttaaaccctaagcaaggtaagagataattaaaaataggcttaggggtgtttagaaaaaacattatcatttttggctcaaataaggtgcaaggggtaaatttttttcaaaggttggctttttggctaagtggctaaaaataaaaggaaataggaccttgatcatttccacctcatgtaattaatctaacagtctaact

SEQ ID NO: 112993 - DNA, 298 bp, Glycine max
  unsure (1)..(298): unsure at all n locations
agctngaccttttacttttttatcatcaatcgagaaaccccgaacgaaccactcaagagcgtaattccaacttcaatgatctgaaaatcacgccccgaccgaaagaaagccaaacgagttgccaacagcacaaaagactgttgaagacataacaagagttatgggaacaaaagtggggggcaagaagtccaggacatagaaagcgacatcggggatcctgcaacaagaaatctggaccagacatgatatccagcctagaacagtgaaaagcccaaaaagaaacccagaaaaacgttgg

SEQ ID NO: 112994 - DNA, 299 bp, Glycine max
ttgctgatttaatggtctctttctaaaggatcaaagggagcctgaaaagaggcaaatttaatcatcctgcttgaacaaatgagaaaactggggcaaataaagagggtgagaatgtataagaaacccatgctgcgactgccattcctatacggccaagtttcccaccaacccaacaatgtcattgctcaaccaataacaacccttctgcttacctaccacccagttatccacaaaggccatccctaaatcaaccacaaaacccatcttgcacactaccaatgcttaacaccacctttagc

SEQ ID NO: 112995 - DNA, 310 bp, Glycine max
atccagaacgatatgttatacacatcttcttcaacctttgtgattcttgactccatttcattgaagcgcatatccacttgcaattccaaagtgtcaaacctctcaccaacaaagggttgaagaccatcaaacctgtgcttcttcaccaacatttctagcacccttcttcacccatgagccatcatgctcctttatataaccaaaggatgctatgactgaagcgcctataaggaatgatctcttgattggaacataaggttcagaatcaagagggatgttgaagtgttgaaggaaaagggtaacaagatga

SEQ ID NO: 112996 - DNA, 297 bp, Glycine max
tcaactcgctaggcgttttctttttctattaaaattctgaatgtcttttcttcacttattggcatctactcgttggtcgagtttatccttgctaggcgagttcttcaataattgaatttctacaattcttttcctacttcagtgtcctttactcactattccagctggtactcgctaggcgagttcttcagatgacttgacacttttctttctctcttgaactgacatgtggccttgtttatgcacttgcgctcgctaagcgagtcatcatggatgacaactgcatttggtgctata

SEQ ID NO: 112997 - DNA, 310 bp, Glycine max
agcttgttttttcccttgatatatttgagggactcatggtcactatgaatgacaaattccttgggataaaggtagtgttgccatgttttcaaagcccgtactaaggcatacaactccttatcataagttgaatagttaagggtaggaccacttaacttttcactaaaataagcaattggatggccttcttgcatcaacacagctccaatcccaacatttgaagcatcacactcaatttcaaaagatttttgaaagtttggcaacgcaagtatgggggcattagttagcttttgcttaagaacattgaaag

SEQ ID NO: 112998 - DNA, 296 bp, Glycine max
tctacgagattcaattcctttttccgacgaggaggatagattaccttcttgtagttataccttacgcctggccaagtacttttaattggtaacgatctggccctatcctacaccctttgtgatgctttaatataggttgacgggcgggatctctcattaagaatgcatgttgatggaacagatatgtatcaaccattatgctacttttacactttgggtttgagtctaacttcgtctatcgggatgctatctatttgttctatctacatacaaagactggacttcatagatatgga

SEQ ID NO: 112999 - DNA, 291 bp, Glycine max
gaaccccaagaaaccagcggcaggatcctttcatttttccaaggagaccaagagaggacgaacccaggcgaacaaccaaacaccccacaaaccccaagggggccggcaacccgaaaaaaaaggcaggccgcccccgaagaaaacaccagaggcccacggacgaaccacaggggaaacgcacccccccgggccagcaggaagccgaaaaaaacgtgcagcacaccaaagacaaaaaccatgcaccaaaaaccaccaaaccgaaggggggaagcccaagccccacaacaaaac

SEQ ID NO: 113000 - DNA, 307 bp, Glycine max
tgtctcatcgtttatgcgattctggttctctttttgctagctatcatcgcaaagaagagttaggtctagccacggcccacgagcatatgattgcggacgaatatgcccaagtatacgcggaaaaagaggctagaggaagggtgatcgactctttacaccaagaggcaaccatgtggatggatcggtttgctcttaccttgaatgggagtcaagaacttccccgattgttagccaaggccaaagcgatggcatacacctactccgcccccgaagaaattcatgggcttctcggctattgtcagcatat

SEQ ID NO: 113001 - DNA, 298 bp, Glycine max
tgtaagttacaaaatatagtttttctagagaaataaaatgcatccttttgtatttaatcattttattagattatgtaacaactaccaactaactttaattaaaataagttttattctctttatatatcaaggtttggacgtgttggcatggcatcattaattggtgaaagaagattctctttctctctctgtctatatatatatgtatatatatggatcaagcttgcactatggtttataggcggacaaaataatgtgattaaatgaataactgcagtataatttcaaggatcaacct

SEQ ID NO: 113002 - DNA, 302 bp, Glycine max
agctttattatatcctgatgaagaaggcgttgatccaactggttacaaacagtgggtaggctcactgagatacctctgcaatagcagaccagatatctgttatgccgtaggcgtgctgagtaaattcatgaataggccaaagaaatctcatttcttggctgccaagagggttctaaggtatgtgaagggaactatgcagtatggtgtgatgtttccaagtagtgttgatggtgctgagatgaaattgattggttactcagatgctgattggtgtggggacaggacagataggagaagcacat

SEQ ID NO: 113003 - DNA, 298 bp, Glycine max
ttctaaagttttctggttttctcaaccttgaaaacaaaagtctggtattcatttttctttctcttctccctttgccaaaaataatttgccaaggactaactgcctgaattctttttgtgtctctcttctcccttttccaaaagaacaaaggactaaccgcctgagttctttagtgtctccctcctcctttgtcaaagaattcaaaatgacacaatctgaaaattcttttgattcttccctttccctaaaacaaaagatttcaaaggactaaccgcctgagaattcttttgtttcccct

SEQ ID NO: 113004 - DNA, 304 bp, Glycine max
ttcttcctcatttttcctaaatgacatttcaaactaggattaactcactttaacctccaaataccactaaatccagatttggccttccaactctaaaaaaaactcactcttttcccactcataacaccatattctcactttctaaccctaggttaactctacccttcatccctagcagttttccataagcaatttcagcacaccaacatcaaaagcatcatcataaaaaccctaaaactgaatgggtaagcttaactcactcaaacataacaagtttagcatgctttcgtcaaatctcttcaca

SEQ ID NO: 113005 - DNA, 291 bp, Glycine max
tgctctaaatttacattgatgtttgtatttattggaagaggttgtatgccatttttgttttaagggtagcatttcttggtaaaactaactttccaaatgtttgccttcgcatgaaatggccctgaggaagctcgcctcaaagaggtccaggaaggacaaggcggccgaaggaactagttccgctcctgagtatgacagtcaccgctttatgagcgctgtacaccatcagcgctgcgaggccatcaagggatggtcgtttctccgagagcgacgcgtccaactcatggacga

SEQ ID NO: 113006 - DNA, 302 bp, Glycine max
ttctttaaagcttactggatgcattggttaacttgggtaacccagctggccttgaatcaaaaatctgttcctgtcgcaagggtttgtggtttgtgctcctctgctgaccaccatacagacctttgcccttccatgcagcaacctggagcaattgagcagcctgaagcttatgctgcaaacatttacaatagacctcctcaacctcagcagcaaaatcaaccatagcagaacaattatgacctctctagcaacagatacaaccctgaatggaggaatcaccctaacctcagatggtccagccc

SEQ ID NO: 113007 - DNA, 261 bp, Glycine max
cccagaagaaaagaaaaacggattcacgcaacccccgaccggggcgtacacaccaagacagccgcgaacggccaacgggcggaaaaacccaagaggagagcgacacgcgggcgaaaagaacaaaaggcgaaaccgccggggtgaaaagggggccactacaagcttggtagaaaagcaaaacggaacgaggacgaaagacctcggaaatccccccacgcaagaacaaagaatgggaaagaacaaacacccgggaaacccaaa

SEQ ID NO: 113008 - DNA, 306 bp, Glycine max
agcttgttctgtcctctaagcgaggaatgcactgggcctagcttgcgcgctaagtgagctgactaaatctttaactttttttcaagtttttgcatcaatttttctccaaagcacttgaaatcttcttcttttaacttttgctaatcaaaaactacaaagatattaatttctttattatttcattaaaaacaccggtaaagtaaaaaaattgcaatcattcttagccaatattgactatcaaattaactcaaattttgcagttatcacaaggtatgttatgtgtggcttcattgggcataattactt

SEQ ID NO: 113009 - DNA, 312 bp, Glycine max
agcttataagatcattattgcctcaatcatttccaaatatgcatgtgaattaagacgcatcaacaagaatcaagccaaggctattgtgcaagcaatcaatggggcaaaacacaccaaatgattatgatgatggatggctcaaattctcacaaaggtaaaatcatcactttcaaattgagctttcaaaactatcatgacatgtagagaagaatcaaggatttcaagtcacaaaatgtcaagaacttttattttcaaaacaattacccatttcttgaacatatcctataattcaaagaaaaacatgcaaagtcg

SEQ ID NO: 113010 - DNA, 305 bp, Glycine max
taacactaccttcaattcttgtgctgtaggttttggggcatcagtagctgctgcaacttcagggtcagtcgaccttttcaatgatatattggctctgccatcagtgattgcaacaatcatcacacgtccaacgtcaccacttttctccgcatttaatccaactctaacagcctaaatattttcataaataagaattaataagcttaaaaagacttagctaaaccaattaaaatgtgatccagaagtcacattttcatataaccggtaatccctttttccttaaaaatgtcaatattaagaaatca

SEQ ID NO: 113011 - DNA, 309 bp, Glycine max
agcttggtgaatttcactgatttccatggaaggttcggtccgggttatgagcctacacatgtcgacaaaagaagggtcgccttagaaaggaaagaaaaaagcttggcccatttacaagggcagggaccacaagtggagtgggtccccatttgtcacattgacgaaagctctgtcagcgcgggatggatgcatgatgatcaggttgctgtgctggacgaagtaacccatcaagaccagccaaactgggtgcagccgtgctccctgggctttgaattgaagaattggcggatcatggagcgactcgagatt

SEQ ID NO: 113012 - DNA, 301 bp, Glycine max
tagaacataatgtgacaatttctattactttacatgactctaagacaacatggattaagtgatttacacttagatttttgtgttttttttttctaatcaatattttggaagaaaatttagatctaacattcagcacaataatattatgaatgaaaaatgatagaacctaaaatcaacacaaaaacatgattcaagagtagatctacaaaatttgaaccatagaaatgcaagaacaagtgtagatctaagatttaatcggtttatttttttttgaatctactctaaatagaaccaaaccaca

SEQ ID NO: 113013 - DNA, 300 bp, Glycine max
ttgccataaaccatttttaattttataggcctattggggtcttgaaggcagtcttgtaagcctatagtgcatcatccatcttgcttggccaatcctttctagtgggagctatagttttctccaaaatcttctttaatttcctggtgggaaaactttaacttgaccatttgtttgtgggtgatacagtgaggctattttgtgtgtgacattgtaatggctcagcaccttctgaagttggctgttacaaaagtgagagcccccatcattgattatgacccccggcaccccaaagcgagcaat

SEQ ID NO: 113014 - DNA, 241 bp, Glycine max
  unsure (1)..(241): unsure at all n locations
agctncatagatcttctttttactacaaaagaaaccgggcacatatttgcagtttctacattaggggtgagtgtaccagaggagctgagtgcccttatagacatgagatgccagaaactggggaattgtctcaacaaaatattaaagatcgttattatgggtatgtatggttaaaaatgacttccttctttagacttttcttacttaatgtcttttttatatgctcatttttttccaattt

SEQ ID NO: 113015 - DNA, 289 bp, Glycine max
tcgaatttaacgactttgttctgcttctatttaacgaatacaatagcggctaaatttatcgtggaaactcctctgttttttgtggctttcatttgctagaacgtgctcgtttcttttttctaacttaaccagacatctcagagttgcgtgtcagtggtggtcgatgaacttacataagatgtgtgctaaagctaaagcccttgaacatcatttagttgattttgcttttttcatttaagaaattaaagatactgatggaactctgtgaaaagcaaactaccctttaaaa

SEQ ID NO: 113016 - DNA, 310 bp, Glycine max
agctttttatttttgaaatggaacttatgagactaaaccaacatgaagaaaatgacaaaaaaaaggaattgcacttaaagcctcatcttccattcaagaagaaagtgacaaagaagacttgaatgaaatagaagaagatgatgatttcagtctcttcataaagagattcaataaatttctaaggaacaaaggaaatcaaagaagaacaaacttcaatccaaagaaaaaaggagaaaattcatcttctgttccaaagtgttatgaatgtaattaacatggacatctaagagttgattgccttagttccaag

SEQ ID NO: 113017 - DNA, 277 bp, Glycine max
acttgttgatccaggatctttctttctactcgatggaaagcttttgcacttaactatatctaggtcagatatatgttattgggggcacaaattaagtcagtttgtgttcaacccctatatcaaccacatgcatgctactaacatgttacttcggtaccttaagcacactgttattcaaggtattctttttagggccaacttagacacaaaattacatgcatatgtggatgcaggataacgatcatgtcctgaaagtataagatcaaccactggcttc

SEQ ID NO: 113018 - DNA, 309 bp, Glycine max
agcttggttcttggtacttacccgttgaagatcgaagaacgatgaagaacgaatgaagaacgtcgaagaacggttgaaatctttgcgaaattcctcacggaaaacgtttcggaagtgcctcggcttagattttcttcacggaaacaatttttccaagcaaattcgaaagagagaaaagtgcctcagggctgaaccccttccttcttgccttcctcccctatttatagcaaaataggggaggtggttgccgcccagctcgcccaggcgagctcagctcgcccaggcgagcagggttgcttcctccagaag

SEQ ID NO: 113019 - DNA, 301 bp, Glycine max
tatgcgcatacttcttcacgttcgttcacttacacaagacattcttataactaagaaaaatgcacccatatacaatcaaggcaccttcgttacctagattatttacatgtacttccaaggagtatttgttacctacatcacacacatttcctttgctaaattcacatacatgcatactctaagcactttggctatcaaaaattcacatacatgcatactctaaagccgcatgcaaattcaagtatattttcttttgctcactaaaattgtattcaaattaaaaggtatttttgtaatgcat

SEQ ID NO: 113020 - DNA, 303 bp, Glycine max
agcttgcttatttttttatggggtattggtagagtttatccgttaatgatatgggctattgagttggggaggattgattttggaacttgtcgtggtgcagaagttagttcaagtgcgaacactactagaaaaagagctttttgcgatgcacttacgacatcggtccaacaaaactgtcgaagtatattaaatggtgcatttgtgtaattacaacgaaagtgtgcaccttgccaattttatggttgacattggcacaactcccttgaaggttgttggaagggactcgagagtgaggaaactaga

SEQ ID NO: 113021 - DNA, 299 bp, Glycine max
tgatacatagtgagttttggttcttgttcaagtcaaaatgagagcttacatggaaatggctgctcacaagaaatcgaatgggccaccattggagaagcagaggctaataagaaaatcaccattacttttgactatccaacactcaaaatgatcaagcacttgaaaccaatcaaagaaggagcttaaccacattggcaacctccaaggaagtctaatccacaacttttgcaatagatcaagggagagattgagaaaatgttgggagttggctttatcagaacaactgaatatacaaagtg

SEQ ID NO: 113022 - DNA, 284 bp, Glycine max
atctttatgcttctatgccaccaaaatgccagaagaatttcaagaaaacttcaatctcaacagaggacaaggtcaatggataatacaatgacggcggaaatgaaaaaggtcagactttcaaagtgtaggtgtctttttttattcttatgctgaatataattgctattgctattgccaactgtttagatttcaacctataagttttatttgattccgaaagtaattcctctgttttttgcttctcatacccactctttaatttggaatatacgcattttttgttg

SEQ ID NO: 113023 - DNA, 257 bp, Glycine max
agacctaaatatatcgaaagaacctcaccgtctcttgtgaaggatgtattttgcggacagcgaacccaaatcctctccctcaaacacgacatgtgatggcaatatttacttatatttttaaaagtatattatgcatttaatttaaatttatttaacaaaataccaaatatataattatagacttattctactcaataaatacttttaatttagcagtctaattcataagtttctatatgtacaaggagtaattaaaa

SEQ ID NO: 113024 - DNA, 304 bp, Glycine max
agcttgttgtgttttcaaaactgactcattgactcccatttctattatctgaattaagcagtaacattattttggtaaatttttttcctgttgaatgataaaggaaataagtatgactctatttgccactatgatcaatgaatattcattgacacaacctaagaaacttgtctagataatttattagcataaatgtcaattcaaaacagctttgggagtgtggatagtagtatataccttaagaggacaacatagagtttctcattcgtatttctctcaaatatcacttaaaagaagaagaaat

SEQ ID NO: 113025 - DNA, 291 bp, Glycine max
ctcgttaacagtgtatttctgtttctcacgaattgcgaaattaaaatcatccctaaagcgcctccttactcacattgagccctgtcactgttactgcttcttttcctcttgattaaatcactatcctcgttacaaaccctgaatgacaagattcaaaactaatcattctttgactattctaactattatacctgatatcatcagaattagaaactatatgggtaggttcttgaggtatttaaacttgttagcctgcaatggaaggcttcggaatgaactagaatgatagaa

SEQ ID NO: 113026 - DNA, 309 bp, Glycine max
  unsure (1)..(309): unsure at all n locations
agcttgtaacatatttttttattgtacnggccaanctttcaagcatgcgttatataatttaaacagacagtatttcattgcttaactcatgaaaaatgaattagaaaggtcacttacagagctaatactgggttgtctttttgcagcagagatttctggagaattcaaaagcagaggatttgtatcagagtatggttcagtcatagcaaacattagattatacaggtaagaatctcaattctcaatcttgaactaaacaagttaaatagcacattgtgcacacattaacatagaaaggccctgtgttat

SEQ ID NO: 113027 - DNA, 305 bp, Glycine max
  unsure (1)..(305): unsure at all n locations
tgtatagtgtccatcacctactctttttcctgttcaccnagacacctaatcttccttatcagcattttgctcttcaaaactctatatggctcgccaccataatgaccatctatgatgcaccaaaaatggaaggaggacatatacaggaaaacagaaaacaataaatctaaaaatttcaagatacagagtatggttaagaaacagtaagatttttttaatgttttttattatttaaaaaaagttgaaaaattaaaaaaacatgagaaataagtagtaacactaacatattataaacagaaataatc

SEQ ID NO: 113028 - DNA, 310 bp, Glycine max
agcttgcttgtggggcttctatggaggctggatctttgagcttcaatggggtcctttaatggtgattttccaccatggagatgcagcggaagacaaaggaaaggaggtgagaggaggcgccatccattaaggaataagccatagaagaaggagcttcaccaccaagatgagccttggataagaagcttggaggggatgcttcaatggaggaaaagaaagagggagagaaagagagaggggggagcacgaaattgaaggaagaaaaagggagagaagttgaactttgagttgtgtctcacaagactctcat

SEQ ID NO: 113029 - DNA, 324 bp, Glycine max
caggaccttaaatctcagcttaaggctaagtctttatgtttctccccctatctctaacaatctccctctttttggctttggtgatgccaaacttgaatttgtcattaagtgcatttggagggtctaagtcttgagactagagacttgcttttcttagtctacttgaaaatttcttaacactaagagaagtatcaattcatatcatcatcatcattatcaagtgtagataagtatcattatatatcttcataatgatgcaatgctaatgcagtatattcttccctttttgcacaatgcaatatgttgaaaaaatgcttatgcagt

SEQ ID NO: 113030 - DNA, 311 bp, Glycine max
agcttgaaattgaactaaggattctctcgagaaattcaaatggtcataacttatcacacggaagtccgattcaggcacatactatatcgagactctcgaaattgaacaacgaaagctctcgagatattcaaatggccataacatgtcaaacgaaagtccgattcaggcgcataatatatatatacgctcgaaattgaacaacgaaagctctcgacaaattcaaatggtcataacttgtcacacggaagctctaaagaaattcatattgtgataacttttcaaacggaacaccgattcaggcgcataatata

SEQ ID NO: 113031 - DNA, 302 bp, Glycine max
tctcgatatattatgcgccatatatctgactttcatttgaaaagttatgacaatttgaatttctcgagagcttccgttgttcaatttcaagcttctcgatatattatgcgtttgaatcggacttccgtgtgataagttatgaccatttgaatttctcgagagcttgtgttgttcaatttctagcttctcgatatattatgcacctgaatcagactttcgtttgaaaagttatgaccatttgaatttctcgagagcttccgttgtgcaatttctagcgtctcgatatattatgcgcctgaatc

SEQ ID NO: 113032 - DNA, 309 bp, Glycine max
agcttactctggcatattccttgattacgtcatgcatctctccatggcatcgtaaataggcatatcattcctgcatcatatttgtgcattgcattttcataaatcactgcattatcatacgccttcatttagcatgcttttgttcggccaactacatatattctacttccatcattcgcatgtcatgttcactcgtgcatgatcctggcatcttcctctgcaaaaaaaaaaaaaaaaaaaaaaaccaatgaacaaaaagaaagtcccaccacattcttagttacatgtgttgggtaccatgatgatggc

SEQ ID NO: 113033 - DNA, 301 bp, Glycine max
tcataccaaagcaactcaaattctttgtatctaaaacccctcaatttagtggattttcaaggtttgggaagcgaaaatgagaatggggtaaatttggagcaaactctcacctcacacaagtctattacattaatctaaatttgctcaaactggttttacacctaaaattccaccgaatcaaaatttgactcctcaacacccaattttaccctagaaatgggtattgttttcactttggtcactcatattcctcatttgcacagtctaagctttctcttaagtcctaaatgacatttcacac

SEQ ID NO: 113034 - DNA, 309 bp, Glycine max
  unsure (1)..(309): unsure at all n locations
agctttntattgtaatcttgatattcaggacaacactctgatttatgaggtttttgggacaaaaatggtcattgaccagtcccttttccatgacttaactaaattacccagtgatggtgtaccatttgaaggtacactgaatgacgactggaaatttgatttctctgcccatgatgcccgccagttggtttgcaccaacaatgcggatatgactggacgtcttcttgccgggtcattggcttttgaaagccgcatccttcactatttaattgtgtgtattctgcttccacggtcttccaaccttgccca

SEQ ID NO: 113035 - DNA, 298 bp, Glycine max
ttgagaatttctgaaactgcctctttctttcttatttcaggcttaaataggtggccttgttggtgcttgcacgcttattgcaactttggctcgcttagcgcgcataagtgaatttcagcttggcgctcgtcttctcgcttagcgaatgcatgcaatctgtgcgcttagcgggatgagccctcacttagcgcatgtgtccagctcatcctttcttccagattcttccttgcgcttagccgcaagagtgcgctcagcggatggctcgctaagccgacaaattgtcttagcaagaaactaa

SEQ ID NO: 113036 - DNA, 307 bp, Glycine max
agcttcttctttttaattaccacatatcctccaatggccgagcagatgaagtggatgcaggataccgacagtggaaacttgaaatccaatttctgcaaaagagaaataaaaaaaaaaaacttaaatttaaaggatttgttacaatccatacaaattgagaaattaataaatgtggagggagcaatgaagagtgatatacctttatcctcaaaaatagaaaaagaacataaaagatctaaacaatctgaggatcaacatcatgcaagctcctaacaaaaaaaaaaaccttcatcccacacatcaaagc

SEQ ID NO: 113037 - DNA, 301 bp, Glycine max
ttatcctgctccaaatctttcttacaatggtacatgagaacataggtttttggggtttaaataaagaactcttttttaagcatgtgatatgatggatatgcctctattttcaacatcagagaaggacattatatttttatattctaaaggattattttaatactattatgagaatttatgtattgtatttaaattatttataacaaaaattttatcaagaaaattgaaagatataaacgtgaaactcgcaaaacaaattaaaattatattcccgtttgaaacattaaaaaaaataggaatg

SEQ ID NO: 113038 - DNA, 302 bp, Glycine max
agcttaataggtatggcggtgctaagggatatttcccttcataggagaaggtagaaaaattgtttaagaatgagtgctcttttgatatcacattttgtcgcaatgattttccttcttaacaatcttcttggaggaatccttttcctctttttccttccccttggcctttgaagacaaggccatactatccttctttttcttttggttttctagtttttcttccgcatccctcttatctttcatagttagttgatccttgaccacctgtgaaggtgtctaaggatgcaacacaaatttagagc

SEQ ID NO: 113039 - DNA, 300 bp, Glycine max
tgcttgagaacctttttttgttgctttgtctttgatcttcaatgatgtcctttaatggtgatgttcaaccatggagttgcagcggaagattaaggagaagatgagagaggaggcgccatccactttataattagccatggaaggagaagcttcaccatcgaaagagtgccttggattagaagcttagagaggaagcttcaatggaggaaaagaatatgagagagagagagagagaaagaaagaaagtggcgtggagaattgtatgaagaaaggaagagaagttaaactttgaaaagtgtc

SEQ ID NO: 113040 - DNA, 298 bp, Glycine max
agcttatattttttttcaccaacaatgatggacacaactgatagttatttatgtctcttgataaatcggcttgaaagaaaaatattcatcttaagatgcgcttaagattttcaacaaaaataacatgagttacttactatgatcagccaacaaatgttgttataaattataatagcttatgataattgcttggagggttttttagtcgctacaatgttattggcacgacatcaattgccgggaagattccaataataaacatttttaaaaaaaaattaattcattttattttgtcctt

SEQ ID NO: 113041 - DNA, 299 bp, Glycine max
  unsure (1)..(299): unsure at all n locations
tgttatcatcaaatttttatttctatttnacatcgctacttcatcattgatgtggaggtcaattcatcaaataaaacaaagtgtcatagttaacagtggattgctaacaaaaatgctactttataaatttatcaagctactgatcctctggaatactgtctaaagatggcttccaagaattcactccctcatcatcaaattcaccaacatctgaaactcttcctcctctcaacttcacagcatgtaataattgctccaatgaagtgtgttcatccttgaacctcaacatccttttcaac

SEQ ID NO: 113042 - DNA, 287 bp, Glycine max
agcaactttttttttgtttttgccacgaaggaacagacaccaacgccatcaataagaaatgtgttaatggagtcacatagtatgaacacacagggggccagaaaaaataaataatgacttactgtataacccttcaacctcgcttggcatgttttttaattcatcaacccacttttgattataatgtaagataatgactaactactccaatgtagttcggatcaagagatggaaaccccaacacgaagacttagtcctaggagagatcccaagtggcttgggatgat

SEQ ID NO: 113043 - DNA, 305 bp, Glycine max
aactttaataccagcttaatgaggtaaactttttttcttttattactcttcatcttctattcctgaacaagtttattttgataagacatgtccactttggttttttgttacttggtgatatatgatttcaattttgggtaattttatatcacctattgacttcagattatattatcaatatatttgtagggctaccaactcaattaactgttagattaacaatgtagccaaattatatattaaggtcttggttaatctatcatagaacgtgtgtgattttatttttataaaaattactataaaag

SEQ ID NO: 113044 - DNA, 307 bp, Glycine max
  unsure (1)..(307): unsure at all n locations
angcntatattatttataattgcctcgatcatttccaaatatgcatgtgaattaggaagcatcaacaagaatcaagccaaggctattgtgcaagcaatcaatgggggcaaaacacaccaaatgattatgatgatggatggctcaaattctcacaaaggtaaactcatcactttcaaattgagctttcaaaactatcatgacatgtagaggagaatcaaggatttcaagtcacaaaatgtcaagaacttttattttcaaaacaattacccatttcttgaacatattctataattcaaagaaaaacatg

SEQ ID NO: 113045 - DNA, 281 bp, Glycine max
tcaagagtgttcttctctgtttgtgtatgctgttacaagtgctgcctatcctatttcagcccccactattaataataatagctctaatgtaaatgtctgattatgaaacttcttctctaagcgcttgcaatctctggcatgctatgtttgggcatactaatgatcatgttatgaaacttgctctcagtcatttgaatatttcttcatcaaataaaaattccacaaagttttgcgctccttgtagtatgggctaagctcacagattaccctccaattcgttt

SEQ ID NO: 113046 - DNA, 325 bp, Glycine max
gatctctaatcacctgcagcatgcattcttttcgtcttcgttcgcgtgtatgacatccactccacagggtttgaagtataagaaaccttcaatcctattacgcaacgtggcggacaaaagtgggcaattaacttgaatggtcattattatcaatgcggaaggaattctgcgcttcactgtccatgttcacatattattacagcttgtggttacgtgagcctgaactactaccaatatatagatgttgtttatacaaatgagcacatcttaaaagcttactccccacaatggtggcctcttgggaatgaagcggctattccttctt

SEQ ID NO: 113047 - DNA, 297 bp, Glycine max
tcatctgcatctactccccatttgaatttatctttcttaagcaaattagtcaaaggtgttgtaattactgcataagatttgataaattttttgtaatatccagtgagcccgagaaagcctcttaattgtttaatgttaacaggtgttggccaatccaaaactgtatgtactttgtctttatccattgacacaccttggcctgaaacaatatgtcccatgtaatccacttttggcaacccgaatgaacatttggatagtttgacatataactggtgcttctacaacaattgaaggact

SEQ ID NO: 113048 - DNA, 254 bp, Glycine max
ccacggcacaaagacacacacaagcccaaggcccgcctggcccagaaaaaagaccagacggggcggcgcaacacccctggggacccccagtagcacccacgggggaaaaacacgaagagagcctaggatgccccgccggggggaggaagccaaacccacacacagggatcaatcgcgacacaacgggaaagcagaagagaaccaccaacccggagcaagaagccgacagacgaaaccaatcccacagggggcgg

SEQ ID NO: 113049 - DNA, 311 bp, Glycine max
agctttctaagtctcttaaggactaacttcaacatttatcttggatttcttggagtcttgtccttgatcaaccataagaagtgcgtttctttggcatcatcaaaacttcatgatatatttgcttatacaatctcctcctttttgatgatgacaatatcctgaaatcaagataaactacatgcaattgataatgcgttcacacaacccttactccccctaacttttggaatttatgcctaagtttataaatcttacccttgttctctccccctttggcaacatcaaaaagccaaaaatggttaaagaaaaaa

SEQ ID NO: 113050 - DNA, 302 bp, Glycine max
ttgaagaagcgtcaaagtaggttttttgggtcaagacaatggaagaagagatacagatgatcaagaaaaatagcacatgggagttagtaaatcgtccccatggaaaagatatcattggggttaagtgggtctataagacaaagctcaaccctgatggcaccatacagaaacacaatgcgaggctagtatctaatggttacttacagcaacccagaattgactataatgagacatttgcactagtagctcatcttgataccataagagctctaatagctcttgcgtcacaaaaaggatgagta

SEQ ID NO: 113051 - DNA, 305 bp, Glycine max
agcttaccatttttttttatttccttaaagacctcctttccacctaggctcttccttaaggctgaacgcttcatttatcatatgtaggttgcattcaataaactctctcaacagcttgtgctttgctacttgcacaccgggtactttaaggtcacttggccccttcttatgccggctattgataacatgacctgcttgcaatgccatgactaagagatgcatggtgacatctgggtctcggttgcaaaaattcactgatacttttccaaacctctctatgaagggccaaagggactctttcttct

SEQ ID NO: 113052 - DNA, 217 bp, Glycine max
acactacatccctaagcgacccccccgcgccgccactgcaatcaaagatccaagagaggggcgcacatgcacgccataacagcgggagcgaagggggggatgcaacccgccacgcaccacctaaggcacataatgcccaagagggaaagggagaccgaccatacaacaaggaccaacgacaaaagaacgaatatatctggacagccaacaaaagagg

SEQ ID NO: 113053 - DNA, 311 bp, Glycine max
agctttttgcatagcttacggtaaaatctgggacctagccatggtagaagtctccacagaggccattgcctccctcgcccagtattatgatcagccgttgaggtgcttcacctttggggacttccagctatcacccatggtggaagaatttgaagagatcctaggatgccctctaggggggaggaaaccatacctcttcacagggttctatccctcattagctagaatttccaagatagtccaaatctcggcgcaggaattagaccataggaagcaaatcgaaaatggggtggttggaatacggagaaaat

SEQ ID NO: 113054 - DNA, 304 bp, Glycine max
tatgctgcaaacatttataatttctttctcttctgcaaaaccaacaacagcaaaataattatgatctttcaagcattaaatacaatccaggtttaagaaatcatccaaaattgagatggacaagtcctccacaacaacaacagcttgtccctcctttctataatgctgctggtccaagcaagccatatgttcctcctccattacatcaacaacaacagtcacaactaagacaacaatgcatcggatgctcctcctcaaccttccttaaaagagttagtgaggcaaatgaacatccatattatgc

SEQ ID NO: 113055 - DNA, 302 bp, Glycine max
agcttatggatttgttctacatgattatttttattttcatgaacacaggttcattttcttgctttctctggcaacgcttaaatttttttgtgttcctgagccttttctgacgttgctttctcttggttgtcttgcattttgggttcagatagggtgcattgggtattcttgcgatcaacagtctctacttgggacgccgattcctgtgggggaatttcacatggggatgcttatatgaggcttgtctcgtttttcaaagaatatccaattggcaaaaacttttttttttactcttccccccc

SEQ ID NO: 113056 - DNA, 302 bp, Glycine max
tatgattagttgacttatcattctttttaaatactgtaggtatgcatatcagacaggttaagttggtaattagttttacctgatgcacaatacttactctctcacatcttttgctagctctttttaacccaaccaattctccatttcatgtttggaggaaccacttggtgttgacaagttactgagcatgaataccattgataggatttagaggttctcgtctggttattgccatcctagaatagataacttgggcatgggaaaccgctagattgaaagacgaatttgcagcacatctaaca

SEQ ID NO: 113057 - DNA, 305 bp, Glycine max
  unsure (1)..(305): unsure at all n locations
agctactttatatttatcaaggcgncggctccaaagaagaggaacgattatagattccactggtttaggctttggtactaacgtcaataagaagttaacgatggatatatgagaatgaaataaagtgagtttgtgagctagggtatatgatgccaatacatgaattgaatttatagaacaaatctaacagtaaaacaatttatttggtgggatctaggccattgatttagtgtgcatggtgagttagtgcatgatgccaatacatgaattgtatttatagaaaaaatctaccagtggcacaattc

SEQ ID NO: 113058 - DNA, 296 bp, Glycine max
tgtaataaccagaaattattttttgttatatgaacccaaacaaagtctattatcaatggcagtgatgcaaaaccacttgtttagatgactgagtatagatctcttccctggtgtatttatatagttacttgtacaatttaattttctttaatgccttctacaagcaatatgtgttgggcaatgcactgtacaaagggatgtttcaaattgtggtggaaatgggttgaataactcatcaatatacttataagttcattaattttatcaatatattacaaaaacattttcaacaaatt

SEQ ID NO: 113059 - DNA, 308 bp, Glycine max
agcttttaatgcatctctccttatattcctcaaagccacctattataaaaatgaaaacacatacatgcaatttagctgaaatatttatcgcttattctgaaagcttaagatataaagctatatgatttgcatagcatgtcatattgcagtactacatccgaacaataagcactcttctcatacattagtaactttaattggagaagaagaaagtccaaaagttgattcataaaacctattgtataaattggctatagattgttattagagaaactaagttatgcttcaagaattttatactgatatta

SEQ ID NO: 113060 - DNA, 301 bp, Glycine max
tgaatcttccttggtctggttcttgttcatatgcaatgctcccaaatactctcaagtgatcaactcttggcttcactccactccatgcttcttgtggtgtttgatctttgacattctttgttggggagcgattggacaaataaacggctcatgcatcagcttcagcccaaaattcctttggcatatttttagccttcaacatacatctagtcatattaagaatagttctattttttctctccgctaccccattttgttgtggagatctaggaatcgttagagggcgacgaatcccatattt

SEQ ID NO: 113061 - DNA, 306 bp, Glycine max
agcttcttgtttttactacatgtagctgcctcggtaaaaatgcttcccagcctttgttaaccgttggatcttctcgaaattgggttttctacttcacaagacacttgtccatgatcggaccgttgggatctttgagaagatgtctggagtgtgctagaagcttccgttcccgagagcatctcatatttaagcatttcagccattgctttcgtgtagcttaggaaaaacgtcatttcttcttctttctttcttccaaagccatttctaaagttccaagaactttctccatcacccacatccaccatt

SEQ ID NO: 113062 - DNA, 301 bp, Glycine max
tcccaagtttttaagttattttctaaaactgtcctaaacaaagttcccaaagtcctattaacaacttccgtttgcccatcggtttgtgggtgacaagtggttgaaaataacaatttagtgcccaacttgctccacaaagtcctccaaaaatgcaaatcatcaagcctaggtataggatgcctatatttaatggtgatgttattaagggctctacaatcagaacacatgcgccatgtcccatcctttttatggaccaaaatcactgggacagcacatggactcatactatctcttacccaac

SEQ ID NO: 113063 - DNA, 308 bp, Glycine max
agcttgttccttatttctttatagcaacatcaatatatccacgagcaaggggcgacatcaggtacaggttgggaatgacagttccagtggagattattttttggagggtgaaatagacatgactgcaaatttatgaaggatatagaaggtctgatcgtccaactgcagcgactagacacctagaattgggagcgagattcaagtgggggatatacaattgggaatgcttatatgatgcttgatagggattcgacaaatgaaaatcaggatggagagtttactacattatggaagttaaaaatcccaag

SEQ ID NO: 113064 - DNA, 300 bp, Glycine max
tctatagaaggttcgttccttttttttctacaatttcatcacctctcaatgagctggtgaagaagaatgtggcatttacctggggtgaaaaacaagagcaagcctttgctttgcttaaagaaaagcttactatggcacttgttctagctcctcttgacttttctaaaacttttgagctagaatatgatgcctccggagtgggagttggagcagttttgttactgttggatcgagtggcctcagaataattaagaagggggggttgaattaattatttctagaactttactaattaaaaat

SEQ ID NO: 113065 - DNA, 221 bp, Glycine max
agcttcctctttgtcattttgcgaaggcaaacatttggaaagttagttttaccagtgggacattactcttaaagcaaaaatggcatataacctcctcccataaatacaaacatcaatgtaaatttagagcaagcttatgcgcatatttccttacaaacgttctcttgcgcaagacattctattaaccgaaaaaaaatgcacccatgtacaatcaaggcaac

SEQ ID NO: 113066 - DNA, 232 bp, Glycine max
tataatatatcgatacgctcttttttttacatcgaaaactctcgggatattcaaatagtcataactattcacaccgatgtgcgattcaggcgcataatatggcgagaggctcgaaaatgaacaacggaagcgctcgagaaatgcaactggtaaaacctttaaaacggttgtgccatatagggagaccacctatggggaagctgaaaattgatcaacggaaaggggggacaaa

SEQ ID NO: 113067 - DNA, 301 bp, Glycine max
ttcttttgcattcaataccctgatgaagatgtcccatatgttcttaaaactggactaatccatttgcttccaaagtttcatggccttgcgagtgaagacccgcacaaacatctgaaacaatttcatattgtctgctctaccttgaaacccccggatgtccaggaggatcacatatttctgaaggcttttccttattctttagagggagtggcaaaggactggctttattaccttgctccacggtccatcacaagctgggatgacctcaagagagtattcttagaaaaaattttccctgctt

SEQ ID NO: 113068 - DNA, 296 bp, Glycine max
ttcatcatctatcatgtgttcttctactgctctaatataactttgccgaccctctccacaagggtcaatggatcctcgtcaaacgacttgaacctggtggggctagactgccagtagaatgggaaacagggctctctgtcaaggttgaacatcaatggcaagctattatccacgatatcagtatctaggaccttgaagaaacggtccttgaagcagcgaaatacgttcgagttaaactcgaacaacttcttatatacgctgtttatagagacccaaccgattttgcccatcaactt

SEQ ID NO: 113069 - DNA, 304 bp, Glycine max
  unsure (1)..(304): unsure at all n locations
ttgctttgcccataataagggaatngaaactattacaacgtccaatgccttagacggtccttttaattttatcactctaaatgaaccggcttaaagtctaaaaccaacacctcacgtaattttcttgctttctcaaagcactatgtaggtctgagttcctcatcacaattgaggatacataggagcaaaagccccacttttgtcgaccccaaaagataaaaaacataataaaggggaaaataaaataaaataaagccatgattttgcacatttgattaaaagcgtcgacccttgtgacggacgc

SEQ ID NO: 113070 - DNA, 287 bp, Glycine max
tgaaaatctcaatgtttcatctctttcaagtaagcacaacaacaagctcatggttcaagagttggagagactccccttacctcttgtagactccacgaaatttagaaggaagaatgaagaatattcaggttttccaaagttttccttcatgggtaatacaaaatggcagttacaagttattggagaaactagagcaagagaatgaagacaaatcaagcttaggatgaagaatgaatctcatttacctaaacttggtgactcaagggatcaagaacacaaagaacctg

SEQ ID NO: 113071 - DNA, 313 bp, Glycine max
agcttgccaaatggtttctttgtttctcaaagctttattcaagacaaagaaatcaaagatattcaagatggatgatcaagacagtttctagagtcttaggaagagtatattaaataggaagggaattccaattgaagaagcaaaaggtttggctaagaaatttaagttaaaaagtatttttcaagagatttactctctggtaatcgattaccataggatgtaatcgattactagtggccaaaactgatttacaacagctattaaaatttgaattcaaaatttgcactgtgtaatcgattacacatatatggta

SEQ ID NO: 113072 - DNA, 305 bp, Glycine max
tgcctagttaacctgaaattgagagaaaatgattattaaatacataaaatggaagtactaagtatttattacctatacttaacagaaaatacttataacactacaaaataaccataaattggaagagtttgatacaatttacataagttttatacacaaaagttagtcgtactcaccgactaacaactccaccaaatttacagttttgcttgtcctcaagcaaaaaaagaacaactcacttgtcctcaagtgacaataacatgtagtgactatgtacaaaggtgtatgcaacaaaagttacttat

SEQ ID NO: 113073 - DNA, 312 bp, Glycine max
agcttatgcgcttattttcttacgaacgttcgcttgcacaagacattcttttaactaagaaaaatgcacccatatacaatcaaggcagcttcgttacctagattatttacatgtacttccaaggtatatttgttacttacatcacacacatctccttggctaaatttacatacatgcatactcaaagcattttggggtgccaaaaattgcacatgtgcacatcttggtatttctaatacctatacatacacaaacttcatgacgaatattgactatctacacaataaagtgctacatttcatgctcttttca

SEQ ID NO: 113074 - DNA, 304 bp, Glycine max
tccatcaagtggtatcagatctctttatcttcaagtaggtgctccttaaacctcgattaatttttttttctttaccttctcttccattgttttttcttcatttttctccatgtatgtcctcacatgtcttgttctaaatgctgttaacatgattctttagagtttccaccgattaaacttgctatagaaactagatttgattttctatggttcaaatttcttgttcttgttcttgaaccatgaattgtgttgagtttaagttcctttgagttttgtcttgttattttttgtggctgaaacctaa

SEQ ID NO: 113075 - DNA, 309 bp, Glycine max
agctttaatttttgctaatttttgaagggataagacttcaaaagattttcttcacaaaggccaataagctatggtgtaagctctcattgacaaggctttgtgacacttgaatgacccccttggcagccaattttaacctaccaagccataccacagatgggtagtttttctttttgcaaaactaccgaaaattgaaagggtagattttgccaaaaatgagtatttttgcttcttatcaaaactagtaaatcttttcttaaccgcctaagttattatgctaatatcccaaggaatacatgtacccaaagt

SEQ ID NO: 113076 - DNA, 305 bp, Glycine max
tataagaacaaaattgcctctttcatttccttatatgcatgtgaattaggacgcatcaacaagaatcaagccaatgctattgtgcaagcaatcaatggggcaaaacacaccaaatgattatgatgatggatggcttaaattctcacaaaggtaaactcatcactttcaaattgggctttcaaaactatcatgacatgtagaggagaatcaaggatttcaagtcacaaaatgtcaaaaacttttattttcaaaacaattacccatttcttgaacatatcctataattcaaagaaaaacatgcaaag

SEQ ID NO: 113077 - DNA, 312 bp, Glycine max
agctttacaacatattttattaatgacccactaacctagaattaaaataacttaatgccattaacctagggaattaaaaaaaacttaatggctgagtgtaactgaaattgtggcaaccaaaggtcacccccaacagccagcaagtcagccaccatttggtctcccaaaaggctgatgcctaggttgccaattgggcccttattacaacttgaactaaacctactaaagcccttttagttgattaacccaaaacatatttttggtcagccaactttacaaggattgggccattatttagacaaactaaacact

SEQ ID NO: 113078 - DNA, 303 bp, Glycine max
tgtattgttccccaatttatggtttttttggagtaaattttgtaaataaatcttgttttatggttaaccctgtctctagaacatttccattggatttaatgatgaaacctgtgcattttcaggtgaaaaagaggctaagttttgaattgcaaaaagtatcagttgggctaagctcagctgttgggctaagcgcatggtcacaaattctgagcctatttaaagcctattttgtgcagaattatggtacacaccttttgagacttcgcacagaattttcagaggcatcggtgcatagcatttcat

SEQ ID NO: 113079 - DNA, 309 bp, Glycine max
agcttaaaacccctttttcattactaaacaagctgaaattaatcacaatcacaagcaagatatcctaactgcatgcaagaggtaagaatgaaaatagaaaagggaaagaaaagctgggttacctcccagtaagtgctcttttaacgtcactagcttgacgcatcgtcttgttatccaagatccaaaagagttcctacttcaaggaccttcttctcaggtcttttttcctccattacatgcactttgaaatagacattttggtgaggtggatctttgtcctcctgaaacaaatcaaagctaatcttctga

SEQ ID NO: 113080 - DNA, 256 bp, Glycine max
caacgagctggggaagaaaaaagggggaagaaccgggggcgaaaaacaagagcaagccgagagcagggctcaaagaaaagacaactaagggaccggacgtagcgccaccggaccattaaaagacgaaagaacaagaacgtgatgcctctggagagggagaaggagcagaataggacaaagcgggcaccacgagcgcttatgcgagcgaaaaactgcgaagagccaccctcaacgaccccacctatcaggaagagcc

SEQ ID NO: 113081 - DNA, 308 bp, Glycine max
agctttgtactttgtgcttgaaggccacatactgcactatagaatgccccaaaacaccaccgtgataggcacaagttgcattgggattgtaccatcggggaaaaagagattgatagaccttcctggggctcaccacagccatttggttgctgagcaaagatggtagtaggtcagcataggccattggtatcggggtgaactccaatggctttctttctgggaaattcctcctcgagtttgtgtttgtgttgggattgatttttccagttggtcaagattgtgtgggaaacaaattttgtgagggaggc

SEQ ID NO: 113082 - DNA, 302 bp, Glycine max
tcagaggaaaatcgtgctctttacctttacacgaacactaaccttgctgtctccattttttttttatcaatatacgactaaaaatgatttttaccaagtaattacattatgttatttaggttcatatgtcaactgaagaaacatgcatttgttccgctcacggcaacaactcaacgggagacatggatatcactggaaaaatatgatacctggaagaaagaataaaggtgattcttactttacaagcttcatcatattgtttctgtttaatggactcaatatttgtaacctattaaatgtct

SEQ ID NO: 113083 - DNA, 306 bp, Glycine max
agcttctttgttttacatcttgacccgctttccaatctgtcattcaccacagattctgccttcttctattttcagattgggaatgcctctaacagcacctttgacaatgattttcttcatgcctcttaagtgcagatgtccaaatctttgatgccatattttgacttcatcttctttggaggatagacatgtggaggagtagctggtttcttggggtgtccataggtaacaattgtcctttgatctgctgcccttcattagaacttcactcttctcatttgtcaccaagcattctgactttgtgaa

SEQ ID NO: 113084 - DNA, 300 bp, Glycine max
  unsure (1)..(300): unsure at all n locations
tgtaggattatggggttcccttttatgtggnactaggtggcggacgggcgatggtgcaaaacaattctccacatacacaaatcacgtattacccaccatacactgttgcccacctccaacagagctcacgtactcctacgtagcccttatcctcgttcctctgcaatgccgggtccccatcaatcctcccaagcttacacaacatccaagtaattcaacattcaatcatcacaaactaacacagccaagaaaacagggcaaaggcagaaaactctgaccaaaacacaaaccaacatcaca

SEQ ID NO: 113085 - DNA, 306 bp, Glycine max
agcttctcccctattttgctataaatagggggagaagtgaagaagaaaagggttcagccccttaggcacttctctctctctcgaaattactgaggaaaattatttccgtgaagaaaatccaagccgaggcgcttccataacgtttctgtaatgtttccgtgagtaattatgcgaagattctcaaccgttcttcaagatttatcgtccgttcttcgttttcttcagtcttcaacgggtaagtaccttaaaccaagtttttcaattcattctatgtacccgtggtggtccacattttgtttcatgtat

SEQ ID NO: 113086 - DNA, 297 bp, Glycine max
tccatcacaaaatacctgcttctctctctaagcctggttctgggccagcttatcttaaataatgcatcttgattacagaggggtaggcacttagcagttgatggatcgcttaacgctactttggccgcaaggaattgggcttagctggcatgagtagcacttagctcaatgaaccctaatttatgccgcatcaaaatgggcttagcggcgacgtctcgcgcttatccagataatacaatgcactaagcgagcatgccatcgcttagcccaattcaaatcgaattgaaatgggcttag

SEQ ID NO: 113087 - DNA, 307 bp, Glycine max
agcttagcaaatggacctggttgttgcccaatttcatcatatcttccgtaatactctccacctctatcatatctaataattttcacatttatgtctaattgcctttttacttcattctagcagatttctaaggcatctattgcctaagaaatctcgggcaataagtagacataatcgtaacatgaacaatcatcaataatggtgataaagtatcatttctttccgaaagaactaacatcaaaaggtccacaaatattagtatgcacaatttcaagaagctgagtgcttcttgtaactcctttttttg

SEQ ID NO: 113088 - DNA, 298 bp, Glycine max
ttcaacttgtgaaaggcaagttttattgattggtaatgatagcttggatgacatgttcctacctcttgaacaaagatggaatccatcattatttaaacctgattcagacaacaatgttatagttgagtgataaccctagaatataagtacatgcagaaactaaacaaagacagcaatacatattttgcaaagctgttgatagggaatggaaagtcaggaagcaggcactcatgctctctagtgtgggaccagtaggtattctgtatattggataccttcatagtatatgtagcaaaac

SEQ ID NO: 113089 - DNA, 304 bp, Glycine max
ttcttctcgcttagcttacggtaagatctgggacctagccatggcataagtctccacagaggccattgcctccctcgcccaatattatgaccagttgttgaggtgcttcacctttggggacttccaactatcacccacggtggaagagtttgaagaaatcctgggatgccctctgggaggaaggaaaccatacctcttctcgggattctatccctctttagctagaatttctaagatagtccaaatctcgacgcaggaattagaccacagaaagcaagtcgaaaatggggtggttggagtacca

SEQ ID NO: 113090 - DNA, 299 bp, Glycine max
ttcttaagaaaactttcttgttaagcttctttgagaaaacttccttgagaagctagagcttagctacacacacccatctaaaaactaaccccacctccttgagaagctagagcttagctacacacactcatctaaaaactaagctcacctccttgacaaaatacatgaaaatacaaaaaaaaagtccctactacaaagactacccaaaatgccctcaaatacaaggctaaaaccctatcctacaagaatggccaaaatacaaggcccaaaagaaggaaaaacctattcaaatatttaca

SEQ ID NO: 113091 - DNA, 329 bp, Glycine max
ccgggatcctcaaagtcgagctgccgcatgctttttttactttttaagcaagaaaaagtaaggtccaaacataaactttctgtataggaagtttaacctctctcttctacctatctaataaacctgtttacacactttggcttaaagttgcacgaatgataagagagaatcaagatgataaattggtaccgggacgtgagagtctctagcgtttctcttggcatcagtggcggagaagacagtgtaaacaagaataaaagtgccaacaatctcggctccaaggccatcacccttggtgtatccatgactcacaaaattggctccacctt

SEQ ID NO: 113092 - DNA, 294 bp, Glycine max
ttgaaaccacttctatctctttcacttatgccataaaattactctcggacaatcccttactgctcaagcgattacaagtaagtatatatgttaaaaatattattaaaacctactttcatggctttttcttttttacgtacctcgtgttttgactctacactaaatgaaaagaccctctgtattgtgccttttaggaggaacatgaagccatcctcacacaacgtgaagatcctatctcctgaatcacatggaaagaatacaagtcaatgacattcacatttcaagtggaggatc

SEQ ID NO: 113093 - DNA, 309 bp, Glycine max
agcttgtccaattgttttacattttaaaaattatttttttgagcaaaaaaaaattgtttccacctcaagacttttacaattgttacatcttgatctatttgtcccaactagatatgcctttattagaggaaaaaggtataaacttgtgatagtggacaactattctagattgatatgggttatgttcctagcccacaaagatgattcttttagagtcttctttaaattctataaaagagtccaaaatggaaaaaaatgcattacttcagtcgaaagtgatcatattgaagaatttgacaataaaaattt

SEQ ID NO: 113094 - DNA, 306 bp, Glycine max
cgctttgatctaccaccaccaccgtttctttcattttatctttctaataattacaatattactaacactttattttctagccgtgtatttgactatattatgacatctgaacaatttactatatctttatttgcatggcatgattgaacaattatgaattatgttatatgaatacgtggtttttataaatttgatctatccatgtttcttgcttcatgattggcttatattcttcaatgaatgccttgtgaatgattagtgcctatatgaatgtgccatacttgttacgcactttggctttttgtt

SEQ ID NO: 113095 - DNA, 314 bp, Glycine max
  unsure (1)..(314): unsure at all n locations
cacgcaagcaagccnacacgctgatgtaaccgccagcggcgcggccgagacacaacccaacgacccgcgagtcaacgcggcgaagcgccgaagaagcacgagagaacgccgaagccgaccccaagcgacgccgcgagaacacccagaaacacgcccacaaaaaacaaccgcacggagacggcgcaagcctccggcaccacgacgaacgacacggcagccggagcgccacggcgccgggccgaaagcgcgtgaagaagacccacggagcggaacccggcacaaaaaccgaaacccaccacgcagagctacccgcc

SEQ ID NO: 113096 - DNA, 254 bp, Glycine max
acgcccgcccaaccccgaaacggaaaccaccagaagccggaagagaggagaaacagcagaagccgaaccgaacggaatacccaaaatgccagagacagccgacatagccgccctcgtgaacacgccagcatgcatccccaccctcgacacaactccctgggaaggaaaaatcaaacaccggggagtactactcaacaactcttagcataatagatagaggctcgatcatgaccaactcaacaagatcaaccttt

SEQ ID NO: 113097 - DNA, 312 bp, Glycine max
agcttgtaggattattgggtacccatcacatgtggtactaggtggcggtcgggcgatggtgcacaacaagtttcccacatccacaatgcgcgcataaacccaccatcccctgttgcccacctccaactgagctcacgtactcccacgtagcccatatcctcgtttctctcaacaccgggtccccatcaatcctcccaagtttccacaacatccaagcaaaacaacattcaaacagcataagctatcacagccaagcaaaacagagcaaaggcagaaaactctgctcaacacatcaaccaaaatcacagcttt

SEQ ID NO: 113098 - DNA, 301 bp, Glycine max
ttatgaagttttctggtttttctattctttataacttgtgctattcatcttttcattctcttctccctttgccaaaaaaaattcgccaaggactaaccgcctgaattctttttgtgtctctcttcttccttttcctaaagaacaaagaactaaccgcctgaattcttttgtgtctcccttcttccttgtcaaagaattcaaaatgacatagtctgagaattcttttgattcttccctttccctaatacaaaagtgttcaaaggactaaccgcctgataattcttttgtatccccattcaca

SEQ ID NO: 113099 - DNA, 311 bp, Glycine max
  unsure (1)..(311): unsure at all n locations
agcnnaccgtccgtacgctctccgaacagaacccacaaaccgcaaggcttggtataacttgggattgcttcacaaacatgagggccgaataagtgatgctgccgactgcttccaagcagcttccatgctcgaagaatctgatcccatcgaaagttttagctctttaccttgacaggattcaattcctaaacagttaactctgcagccatcagtgagatttatctcatcttgtttttctgttgatacatcttctgagttcaatgggacacataaaaagagcttaggaactgtattcctttttttttaaaatt

SEQ ID NO: 113100 - DNA, 253 bp, Glycine max
ttggttgggaaattcgcgagcaaaccattgatgaagtgctacactctctgagtgaactacatcgaatggttctttctggttttgttccagaaactgttcccatgctttgttgtatcgccacttacccggctccccttcgtgacaatggatgttatgtgaaaagggtgcattagcattagcatctgcttggtgattgattgttgagtctgaaacactttcttcttggggtggataggtgaaaatatgaaccttg

SEQ ID NO: 113101 - DNA, 310 bp, Glycine max
agcttgcctaattattctgatattgagagaaaatgattattaaacacacaaaatgaaaatactaagtatttattacctatacttaacagaaaatacttataacactacaaaataaccataaattgggagagtttgatacaatttatacaagttttatacacaaaagttagtcattttcaccgactaacaattaccagaaacctgtaatcgattactagtgaaaaaattcaaaaaaagctttttaaaaagacacatttcttcaaactattttgaaaaggcacgaagggcctatatatatgtgtgtttgatt

SEQ ID NO: 113102 - DNA, 300 bp, Glycine max
tttgtatcctagaaacaccattaattgtttttaacctaacctcattacaagcctaaaaaatccttcggattcatttttgtgtgttcattactgtttgataggagattaaatgcaaaggttggaactcgtgctggttgtccatgatggaataagccaaaaaagagtttgagtgaaacaatgactgtgaggttttggttgatgatccttccttgatttctcatgcttactagcttatttcaactgtgactctaatacttgtgctcttatctttgaaaaaactgcatgcttgtgagaagtaat

SEQ ID NO: 113103 - DNA, 277 bp, Glycine max
caaagagaagacaaagagcaaacgacacggcacccacccaagaaaaaggagaaacaacacaacccgcagcaaaacaccacaagcggcaagcccggcccacgaccaaaaagacagggacaaagacaccgaaggacaagcggacaaaaccgatataggaagtgagcaaaaacgccagaaacggcgcaaggcgggacaaaaggagacaacggggcaaaaaaaaacacgaaacaagccgaacaccaccaaaagagagggagctgcctggagacaacagaaa

SEQ ID NO: 113104 - DNA, 301 bp, Glycine max
  unsure (1)..(301): unsure at all n locations
tggtttcaattatcatttggttgtatcgtnanaaaacaaccgtgagaatcttgaatgtagacttcaaagtctgtaatcgatgacatagagtgcatgtaatccattactagagctaaaattcaaatttcaaatatgaagagatacaactcttcagaaaataactgtgtgatcgattaccaccaaagacctatatataggtgacttggacacgaatttcctaagagttttttttctgaactgaaatgttttatctcttaaaaagattccttggtcaaacacttgcatattcaataaggaatct

SEQ ID NO: 113105 - DNA, 305 bp, Glycine max
agcttaatggttaaacctttcagaacgtgtatgaatgacttccaaatggatttcaattagaatttccttagtgtataagaattatgagatgcataaataggtttttaaggttatgttaggatttaagtatgaattccttgcactttaattgatgttattgaattgttattgtctcaattagagattgggaggacttgtgatcatcgggcaaatggtgtgctggaaactttggttggtgtgtacttgtatgatgaatttcaaaattattagtgtgactaaggattatgaaatccttgagggggagc

SEQ ID NO: 113106 - DNA, 287 bp, Glycine max
tttttgctgcaaaattcttttcttgtgttggtgttttggtttgcgcttggcattggatttgtggccagcaaactttgtggatgatttagggatggcctttgtggatgactaggtggtgggtaatgagaagggatgatattggctgagcgatgacattgttgggctggtgggaagtttggtcgtatatcataggcttttacaacatgggtttcttcctcattctcaccctgttcattttccctatttttcttattttgtatattagggtgaccatattgtttcttttt

SEQ ID NO: 113107 - DNA, 308 bp, Glycine max
agcttatgtcttttaatttctccagccaccacttatacttgtagatacaaatggacaacatgcatgagaagacaccaaaataacacgaatgaaaatataataaatatgacataattgtaatagcatcatcaccttccatgttcttcttcttatgttccataaactggcacagttctaataagagagaatgtctcttgagctagcagtgacttcttggatcaaccttgctgcctttttctaggccacatatatcttaccaaactataagcaagttggattccaatgtagtttgattgaactttttgata

SEQ ID NO: 113108 - DNA, 299 bp, Glycine max
tgtaccatttaaactttattctctactcaattactcagacaacaccgcttataatactaccattctaccaacaaaatctgacttgggtagaattaaccgaatagatggtcagtttgaatcataatagggtggcttcgacattgtgaatttaactttcttgttgctcactatagtatcactttttaattcaactagtggtagacccacgaacttataagacttttacattgctgatctattttattgacttaaggcacaaagatgcatgctaaaataccttatggccactatgtttgatt

SEQ ID NO: 113109 - DNA, 314 bp, Glycine max
  unsure (1)..(314): unsure at all n locations
aaccgggaccccaaaacnaccgcagcagcaaacagttgactcattatcaanccagcaaaaaacaagaaaagcgacacaagaagcacaaagagacaaagcaacacagaacaacgaagacccccccacacgaacaagaagcccaaaagacgacaaagagaaaaacgcacaacgggaagaccaggaagcncacacgaagggaagaanaacaaaacacaaaacaccaaaaaaaaccaaaagaacagaccacaccacagaccagaccnaaaaaccaccacaaagngcaaaaagaagacggggaagagaccacaacacaa

SEQ ID NO: 113110 - DNA, 303 bp, Glycine max
  unsure (1)..(303): unsure at all n locations
agctcattaagttgtttgtttatcnccatttattaggatgtcaaagagtaaaaaaaagtgtttttgttctaagatgcaatatacctttgtttgtaggtcatgccattgtgaaaaatcctacaattcctagaatgtttccaaatatgtttccactggttacaagtcgggtatatttttgtttctttttgccaactcttgttatgtaatgcgatgttttttcatttatttcacattgtattgttgaggtccacaaaattgatgtggcaagtgacgaggctctctaatatgcacgttaaccctcct

SEQ ID NO: 113111 - DNA, 322 bp, Glycine max
  unsure (1)..(322): unsure at all n locations
tgacgctatactatactctacccactccccaaaataatgggtatttatttttattctcaancactaaaagccttttcgccataaaccacatgtttattcttgcaaagtgcacaaaaaaactcaagacgctataattatcccgagagaatagactaaatgtcgagctcgaatatccatctataagatgctcaaagagttagtcattgtgcatacacaaaccacaaatctttatgatttatatagaattagtcgcgactatacaataaaaaatattggattacatcaaacctatggtagaagatgatttataagagatagaagt

SEQ ID NO: 113112 - DNA, 300 bp, Glycine max
ttcttccctgctttgaaagctaaatcctcagttggttcttcctatggggtacttgatgtaaatactttcatatctatctaatgatgttttatgtgttcattatgctatcagtacttaattctagtgtgcctttgccttgatcattcacttgcatgcttagttagggtcactaaacactgggaaatggtttgatccttagaacttgatagaacgggactaacttatcgtattttcacgagacatcgaggtacggtagcttagtttttgttatgttatgtcttaatgcggttctggttaagt

SEQ ID NO: 113113 - DNA, 297 bp, Glycine max
ttatcctcagttccctcttgtgtgactagacttagaccaaacaacattattgtaacaatatatttaaaaccaaaacttaatccgcagatccctcttgtgagactaagtttcaattctacttcattcaagatctaaggcaacaatacatttcccaatgctaaaatcacctaaccaagcacacaaatggttgattagaccaagagcttacataatttaagcactaaaagggctttagttaggtttagttcaagttgtaataagggctcaattggcaacctatgcatcagccttttggga

SEQ ID NO: 113114 - DNA, 300 bp, Glycine max
atcttttcactcttgaaacccaaaccacattggcagcttgagaatcacctccaagtccaagatacaccaaattggagagattcccaatctgagatggaatcttccccatcactccagtaagagagaggtccaggtgagtcaaggaggtcattgcacaaaggaaagaaggaattgccataccttctaaataattggcgctcaaatcaagatatcgaagcttatagagattcccgatctgagagggtactgttccgttggcaaaaacagaactcaggtcaagatacaccaaatttgagagat

SEQ ID NO: 113115 - DNA, 274 bp, Glycine max
ttaataaaggactgtgcactgggcttctgtctcatacccccattacacttcagttgtaccgtcagcttgcttccctacttttattaatttcgtgcacgtttatacgtgagttgaatctttcccgcgaggaccaaaagatacaaaatatcgtaaatattagaaccataacgaatgtcttaaactatagggactaaaaaagattatcacaactataaagactaataggatagttaaatcaaaataaaataaactagtgcaaaataatggtggtatg

SEQ ID NO: 113116 - DNA, 311 bp, Glycine max
  unsure (1)..(311): unsure at all n locations
agcttgaggtttttttttggttatcaaaggagaccattttcctctctctttgatgttgnttagttgagcaatgaagtagtaagcacttcttctagctacctttgactccatttttttttctcatagagcacccatgagagctcatgaaaatttttttttaggtttttgaatctgtttgtgcttttttgggtttttggtgatgttgctatgatgggcttgttgtcgaagtggaggaaagatcctccttggacccaaagttcattcctttctccttcttcacaaagttctctttttgcttctataaaggtaag

SEQ ID NO: 113117 - DNA, 305 bp, Glycine max
tcatgctgttcaattgcttcttatttctgcttataagggcaaaggtctgtgtggtggttggcagaagagcataaaccacagagtctggcgataggtgtagattttttattcatggccagttgggttaccatgttgtctcaacctacccttcggcgggagggcgactcgagggctcacgggtgcgtcttccaagaaaggaaaatgcaaggagtcgccaccaacgtttattcgaggaaaacgtcggaaaaaccggaaaagacgtggtctacgaactttaagtgtgaaaggtttaggagttgttttta

SEQ ID NO: 113118 - DNA, 309 bp, Glycine max
agcttcacaagttatcttccatcaaggaattaaacttcaatgttcagacttctttagaggcactaaatttcgtgctcttctcttcctctcccttcattcatcttcttctaccttcaagctcttatccatggcttcctatggtggtgagcttcttctagagtcatcttctatttgaagtggcatctccattcatcgttctccttctccattccgctgcaatcagacctcaagaaacaaaggaatccattgatgaagaagatccaaggcctacaagctctacatggagctatgatcgaggccgtacccgaa

SEQ ID NO: 113119 - DNA, 304 bp, Glycine max
taacaccccttgttcattacttttctaactaaaatttcacaatcacaagcaagatatcctaactacatgcaagagataagaatgaaagatagaaaagggaaagaaaaaagctggttgcctcccagtaagccttcttttaatgtcactagcttgacgcatcgtcctgttatccaggatccaagtgagttcctacttcaaggaccttcttctcaggtctcttttcctccatcacatgcactttcagacagacattttggcgaggtggatctttgtcctcatggaacaaatcaaagctgatcttttg

SEQ ID NO: 113120 - DNA, 305 bp, Glycine max
acaagtatctgaaccccaccacggcacaggaagcaggaacaacccgccggaaacctaaacaacgaaacggaaaggacaaaccgaacgccgaacacaaaacgagggcgatgcaaaccccaagcacctgtgaggaaaacaaagacccagccaagaagaagggcacgaacagcagagaccagatgcaccacgggggagcaccccaaccaaccaacagcaaacccaagggcccgaagacgccacacaccacccgagccaaagaacccaaaaaagagaacgaaaaacccaaacaagggccggaccacccc

SEQ ID NO: 113121 - DNA, 212 bp, Glycine max
ccaaaccccagcaagggaaggaagacgaagaccgcgacagaccagaagaacgggacaaaaaagccgcaccaagggaaagcgaagggcaccgccgaaggagacgacaggaacagaaagaaggagacagacaggacgcaagcgccgagggggacaagcacgatacagaaggccgaaacgcaggaggcgaaagacagaacagccacagacaagaa

SEQ ID NO: 113122 - DNA, 310 bp, Glycine max
agcttctgcattatttttttagttctagagagagaaagcttccagagagtttgagagaatttgttgtgtgaagatccgcaaagaccagagctggaagaggaagtcgtcctgagagcttgagatgagtttgtgagtgattgtgaggtcctagaggtggaggagacatcctcactacttgtatatctgcaatctttcattctcttctctttgttgtaaaggaagctttctagttatggaaagctaaatcctctgttggatcttccttgtaagtacttgatgtaaatatctttttatctatttaatgatgttt

SEQ ID NO: 113123 - DNA, 301 bp, Glycine max
tctcccccaattttctataattttgtggagaagtgaagtagaaaagggttcagcccctttggcacttctttctctttcgaatttgcttaagaaaattgttttcgtgaagaaaatccaagccgatgcgctttcgtaacgtttccgatagtgatttcgcgaatgttttcgaccgttcttcgacgttcttcattcattcttcatcgttcttcagtcttcaacgggtaagtacctcaaaccaagcttttcaattcattctatgtacccgtggtggtccacatttggtttcatgtatttttattct

SEQ ID NO: 113124 - DNA, 309 bp, Glycine max
agctggtttctttaatcccccccccttttgatgatgacaactctgaaatcaagaaacacacacacacacactttttcctagtcgatcactcacataaatttccattctccccctttgtttttgagtttatgcttcatttgaaatttagttaattacttatgtgagttcttgatttattccctatttctctccccctttggcatcaacaaaaagccaaagtgtgtaacaagtataagacacacatatactattaatcattcacaaggcatacattgaagaatataaaccaatcatgaagcaagaaacatg

SEQ ID NO: 113125 - DNA, 299 bp, Glycine max
tgtttgagaagcttcttatttgctggatctttgagcttcaaggaggtccttcaatggtgattttcaaccatggagttgcagtggaagataaaggagaagaggtgagaagaggtgccatccactatggaataagccatggaaggaggagcttcaccaccaagagagtgtcttcgataagaagcttagagaggaagcttcaatggaggaagaaaatatgtgtgtgtgtgtgagagagagaggggcatggatttgaaggagaattatgaagagaagttgaactttgaagtgtgtctcacaag

SEQ ID NO: 113126 - DNA, 307 bp, Glycine max
  unsure (1)..(307): unsure at all n locations
agctnattactattatgttttacactaattcttacactataaatgattttgtattacatgtgatttttattgattgatttttaaattataattatattatagaaaattgagtggccatttgaatatagcttctacatataaaataaaaatattgagttttaaaatattaaatacatataatttgtatataataaatagttaatagaagaatatcacttaaaaataaaaattactcatcaaaataatacaaatggtatgtcttgtgaccaatttttatatttttatcctcagataaattatataatat

SEQ ID NO: 113127 - DNA, 301 bp, Glycine max
tgagttagaggaagattactttcattgggagcccactctctttccctacttcatcttcattccttatcccttcaccttttacacatttgagcccttcatgaccatgaagggctaaacaatccgttgttgggggagcttttcaccaaactcttttgatgtaaaaactcttattatctatttaatattattgctagtttcattgtttcttcctgtgtttatttccatgtatttggtttgatcatccatttatatgttatgttagggtttaagcattggggaatgtgggtaatccttataactg

SEQ ID NO: 113128 - DNA, 307 bp, Glycine max
  unsure (1)..(307): unsure at all n locations
agctngaagtttgaattttttgtnnctgcaagtacatgtgagatgcaagtatgatttgtatacctttaatatgatggtgctcactgatatgtgtacacccctttttttaaaataaattaaaaggtttatttaaaaattaatagagtttttagaaattaaataaatgagagaagatgagttgtgttaattaaaataagggtttcatagtattagaaaataaatatcataaaatgatgttttagaaaataaaggatgttttaattggttatttatttaatgaaagagtaaaatagagttcctttttata

SEQ ID NO: 113129 - DNA, 299 bp, Glycine max
tcttgcttgcacttcttatgttctgtttaagcaaggaatccatattttaggttgggttacaacagcttgggtgcatttgcaaccattaaccatctccactttcaggtactcattactgatcaactcgagatcactgcaatgcactattcttcatgttgattattggcttgtttgaattagtgttctagcagtattcaaattgacattttgtgattttgacaaacccatgcatattacttggctcttccttttccaattgagaaggcccctactaagaaaattgccaagttaagcggtgg

SEQ ID NO: 113130 - DNA, 303 bp, Glycine max
tgcttttgaattatctaacagattcggcctaatgttcatgagaatgactgctacaaacaatattaagacaaatctccctctgattgaaagtgctaaagagtttatggggttagtgggaaagcgctctcaaacaactgacaagtcttttgctaggacattagtgagtacactgaccaccatgaagtttgatggttcacgcactacgtatgaacatgtcattgagatgacaaatattacagcaaaacttaagaccttgagaatgactgtgaataagaacttccttattcagtttagttttacctc

SEQ ID NO: 113131 - DNA, 294 bp, Glycine max
tattgatggattcctttttgtttgtgtgtctcagtgtaacccaagacattgaataacggcgccgcaaattagcaaatgattgtcagagagagacaagaaagttccagcacatgattcataagtcaaaattcaggataacagtaggacaagacactctacagtctacagaaataagtaaaaggaaaaaactactaagttaaacaacctaaaactgattattttttataaaaagatgaattattttttaattaagattaatgttgaaactgaaatatgtacactgatgcccatgtt

SEQ ID NO: 113132 - DNA, 299 bp, Glycine max
  unsure (1)..(299): unsure at all n locations
tgctttttgagtctcttgatgccatngtggaggaagttggagaagagaatgttgttcaagttgtaatcgataatgagagcaactatgttttagcgggtaagttgttggaggagaaaagaaaacctatttattggactccttgtgcagctcattgtattgatttgatgcttgaagatattgggaagcttcccttgataaggaagacaattagaaggggaattaatctagttgggtttatctatgcccattctagtaccttaagtttgttgagaaattttacaaacaagagggaattggtg

SEQ ID NO: 113133 - DNA, 292 bp, Glycine max
tgttcgcacatctttctcgtttttgacatccactccacaatgtttgaagtagaggagaccttcaatcctattacgcaacgtggcggacaaaagtgggcagttaacttgaacggtcattattgttaatgcggaaggtattttgcgcttcactatccatgttcacatattattgcagcttgtggttacgtgagcctgaactactaccaatatatagatgttgcttatacaaatgggcacatcttaaaagcttactctgcacaatggtggcctcttgggaatgaagcggctattc

SEQ ID NO: 113134 - DNA, 311 bp, Glycine max
agcttggaaattttctttaatttttcaacaggaaaagggtccttcatagaggggggaacactaagatgaaggtgctcaacagtgacatactgggatcaatataaggtgtatcacagaacttcatttcctccaagttacaactactgtatcacatgcgtctataaataaactttggatcattctcgagaatcggacaaaggaaaccgaacatgcaaatcttttttaagataaccacactgggggactaaggcttaccttcgctgatccatatttaaactaatcacactttcttgacatcattcatgatgttc

SEQ ID NO: 113135 - DNA, 303 bp, Glycine max
tgaacatgcgcttgacacattttcttttctttttgtaactcacgtcgccgttttattatagcgcttatccacctgccatgtcttatgtgtttcacatttcacctgcatatgtttttacaccttgtatccctctctaactactgtaacgaaaaattgtttgcttctcacgtcgatagctgaattgaaggtgctgggacgcaaatgtcatagagaacccccttttggttggcaataacctatgaactccggtgccacacttgtaagctggtactcggctacactatgttggtttttcattgccac

SEQ ID NO: 113136 - DNA, 335 bp, Glycine max
cccgggatcctaatcacctgcacgcatgcagctagccgtttactcttatggaagctggaactttgatccttcatagggtcccccatcggggattttccaccatagaggtgccacggatgattttggacaagagggtaatagaggcgttcttccctatggaataaaccctcaaaagatgagcttcaccccctgagagtgtcttggagaaaaaactctgagaggaagcttttatggacgaacaaaatgatatacagagaggggggggggaacaaaatttaatgagaataaaagggagaaaagctgcactttaagtgggtctacccccttttcactcc

SEQ ID NO: 113137 - DNA, 271 bp, Glycine max
atacactatcttaatttgatcctccgggatctttcctcttattgaaagatgccgcccacgtgtatttcaagacaccgcatatcattaaacgcagaactggggattatatcttcaaactaaataaatcatactcgcagtaacggaatcacctgtgtgcttgagagaaacactggcctggggaagagagaaccatgggctatttttttttaattactgccaacgggggagtgtgatgatgtctatgctggcatactttgagtgttaccatggc

SEQ ID NO: 113138 - DNA, 309 bp, Glycine max
agcttcacatgatgatgctgttttaacatttcctaaccgacatcatgcaaatttcgttcacggattggattgaaaactcaatagccgacatccgtcgtgaagtagctccgtttgatatttttcagcagacattgagcaatttttttttacaaacgctcgcgggccgataaagtttttttttacggcagaggaagttttcttgttttggtgttgcaaaaaaaatttacaatgtaggtcggctaggtttttttgtgcgaggtcaaccgaccttttgtttgggccgaaactggcatgttcccatttattcgg

SEQ ID NO: 113139 - DNA, 300 bp, Glycine max
tcaacctataggagacggaccttttctgtgttggagaagatcaacgacaatgcgttcaagattgacttgcctagtgagtataatgtaagtgccactttcaatgtgtctgatctatctctttttgatgcagatggaggagccttggatttgaggacaaatccttttcaagaaggagggagtgatgaggacataaccaagggctaggaccatgaaccacttgaatgtcccatgaccagaggcagactttaacaatgcccaacacgtcatttagacaatgctggtcatttgtttagctgtcat

SEQ ID NO: 113140 - DNA, 308 bp, Glycine max
atcttcctcgtttttttttcctgcaaaagcaaacatttggaaagttagttttaccaatgaatgctactcttaaaacaaaaatggcatacaacctcctccaataaatacaaacatcaatgtaaatttagagcaagcttatgcgcatacttctttacgaacgttcacttgcacaagacattcttataactaagaaaaatgcactcacatacaatcaaggcaccttcgttacctggattgtttatatgtacttccaaggtgtatttgttacctacatctcatgcacatccttggctaaatttacatacatg

SEQ ID NO: 113141 - DNA, 326 bp, Glycine max
gtgacactatccaactactaagcttgacaggtagagtcatagttttatgtttgaaaataaataaaaaatagcataagtgagtttcattatttttaaactgattttttttttcattctctcacatatcaaacccaatttccttattcctgtcggtgcaatattatttgatttatttccacctctcgttctatacacaacgaaaaaagaaaatagcatagaaataaataaaagatagaaagagagataagtagaaattagtacgaactagtacgtgcaggattcattgttttaaaacttatttttactttatttctccttcactaaat

SEQ ID NO: 113142 - DNA, 298 bp, Glycine max
ttcttgttgaatggctagacatgatacatatcagggcttggtttggttcaaggataaaagggatgccccacattatttccatgacacaaatgcaaaaatgatgatttggaaactttatgcaaaactggtcatgcatgcgcctatgcggacgctcaagtgtcaaatttttatggtcgggtgatgctagggttcaagattcatttcctctattttaaatcaacccaacgtttccaaaatatgttcttttatcaatttgtgcattcatccgagtccattttgggcgtctgggaaaatcttc

SEQ ID NO: 113143 - DNA, 294 bp, Glycine max
tatgctgcaatcatttttaattttcctcctcagcaacaaaaccaacatctacagaattattatgacctttcaagcaatagatacaatccaggttggaggagtcatccaaatctgagatggacaagtcctccaacacaacaacaacaggctgtccctccttttcagaatgttgctggtctaagcaagccatatgttcctcctccaatacagcagcagtcaccacaaagacaacaagcgactgaggcccctcctcaaccttccttagaagagttagtgaggcaaatgaccatccat

SEQ ID NO: 113144 - DNA, 314 bp, Glycine max
  unsure (1)..(314): unsure at all n locations
naagcttttttcttttttaattatcacgtttgaaaatgctcatgcatacgcatgcacatgcatatttgttatcttgtgacagggacaggatcgctttaagcaatggtcaaataccgcgtcaaatccaagacagagatgaatcgaggtaagtgatagcgtgaccacgatttgctgcgcaatgtcatttcctgctttcaggtactcagggacaggcacaaattgacgctaggctcgtgatccacaaatcgctgtcccgcgtccggctccggacgatcgagaagcgctactaagaggtagcctagtatcctttaaat

SEQ ID NO: 113145 - DNA, 294 bp, Glycine max
ttcaactgaatttgcatcgtttctattgatttaaaaatggtgtaatcgattacaagatattggtaatcgattaccagtgtatctgaacattgaaattcaaaatcaattgtgaagagtcatatcctttcataaaaagctttgtgtaatcgattacatggttttggtaatcgattaccagtgacaagttttgaataaaaatcaagagatataactcttccaatgattttcaggtttttctaaaggttataactcttctaatggttttcttgaccagacatgaagagtatataaaag

SEQ ID NO: 113146 - DNA, 310 bp, Glycine max
  unsure (1)..(310): unsure at all n locations
agcttttctttttcaataaatttgnctattgactaaccattctaattgcagacttacatacttgttctttctttgtgtaacacacatacttgctcaaactcatgaagagaaacataaactccatcataatcatgcattcaaaccaaaatcaattcatacaccaattttcacaaaaggataaaagtgtttcactacaatatcatcaaaatcaggtcaaactatatgctttagaataagcatagtagctaatcacagaaattataagtacataattataaacagaaaccaaagttactcaaaacaaagtact

SEQ ID NO: 113147 - DNA, 301 bp, Glycine max
tgaccaaacggtccttgttactattttctcatataccaacagaagaagaagaagaagaagggtgtttcttacatggtgtgaattcagaggtggagtagtagtagcaatccatgtcattggtgtaagactgatcttccacacctttgttcctctccctcatggctttcttcagatggaggagcttcaaaagtaaagtgaaaaaatatgggaaggggtttttggtttggtttagtttagtttagctctgagagaaagagaaagaaaaaaagggacaccaaataatacttggcttgtagaagca

SEQ ID NO: 113148 - DNA, 306 bp, Glycine max
agctttttattttctgtagatgaagatgaatttgtggccacctcatagactcctctaaggacaataacatcatttcatgcactgaattgtagggagttggaagccatcttctcaatcaaattcctagcctcagcaggggtcatatcaccaagagctccaccactgtcagcatcaatcatactcctctccatgttgctaagtccctcatagaaatattgaagaagaagttgctcagaaatctggtggtgagggcagcttgcacacaatttcttgaatctttcctagtactcatacaagctttctcca

SEQ ID NO: 113149 - DNA, 298 bp, Glycine max
tgttcgcattttagtgtagatttctccgagactatttttagtctcacaagttatccagaactacgtaggtctgagttcctcattgaggatacgtatgagcaagagcctcgcttttgttggtcgccccacaatttctgtcatactgacactggagtcacgtgacatgcggagatacccgagtggttatccgtttaaactttcttttgatatctctaagactcaaagaatgatagcacgcagagactaacgtcgtcttctgcaccctttgtcaatcgcgaccaacaagcccgttgacact

SEQ ID NO: 113150 - DNA, 307 bp, Glycine max
agcttcactctttgactcatcaggaaactggtgaaatgaggaaatctctaccttcccctcagtggtgtaggactccgagaaatacttcttcaaggaattctcaactccctcctcccaagttctcaaattgttttccttgaacaaatgaaaccatatttttgcttcactggccaaggaaaaagagaacaaattaaggcgaatgacatcttctggaacccctacaatcttcactgtattacatatctctatgtaagtagtcaaatgagcatatggatcttcatttggcagaccatggaagaggtttcct

SEQ ID NO: 113151 - DNA, 297 bp, Glycine max
tctagccaaatggacttaccttgaattaattcctttgatagcccttttgagccttgtttccctttccttgttttgaagctcactacaagcattaagtgaaaaaccatgatatcaccatatccttaaggaattttggagctttggaattgttttgcgaataagtatggggggtttttgtttcattggacaacttgttttgttggctatgcttcatgatgtattttgggccatacttgatgtacattgtatattggttaaatgttggacatgctgaatcaaatgttgtttctcaaaggc

SEQ ID NO: 113152 - DNA, 282 bp, Glycine max
aagatctggcggaatccgcgattcccgcgaattgcatagttgctcaaactgggaaaatccccagcaggaccggttctgggaatatctctgggcatggtccaaaaaagtcccacccatgcaaaaaccaatcgggaaaatcgccaattgtgccggtcgtgaaataaagtaaccttgaatgcctgaagcgggcattttggcgcccaaacacctaggtccaagcctcaccgaaatcccaattggtataacctcccggatcaacaggaaccgaaaattccctcccct

SEQ ID NO: 113153 - DNA, 294 bp, Glycine max
tgtgcttgactcatcttttctttgaagtggagtccctaatcatatttcttccttctccattccgctgccattgaacttcaagaagcaaaggactccattgctgaagaagatccaaggcctacaagctccatatggagctacatcatgcggtatcaagagcatcttcttctaagtgatgttcttttgcttcctctaccattttgttcggtcaattcactttaattccatgttcttcatcttatttctccatgtatatcctccattatgttgtggtttggtgctgttaaagaatat

SEQ ID NO: 113154 - DNA, 297 bp, Glycine max
agcttttgcactgttgaagcaaggggcggagcgaaaatggaacaaaaatccatgagatagagaatgaaagaatggatatgcgtgttgttgaataaaaagggcattgggaatatactgtgtgtgttgcgaatgtgaagtgaaggggatggaacatgaggctcggaacttggttgtgaaaatttgagggatggatcttcttagtgcctcaattgattttttattttttctagccccggagggatatggatgaaatgaatttttttttttgtttacttttacataccctatgacaaacaa

SEQ ID NO: 113155 - DNA, 291 bp, Glycine max
ggcctttggggtggttttttttctcatctaaacatatgacatacatacgcattccacgtataaatggaaagatattaagagtccacatcaagatgaatacactatttcacaacatcattcaatgttagatccatctatgattcctagctcatttataatatagaagaacctatgtctagaggttccgcaaagatgtcagctagttattgctcattatcaacaaattcaatgcaacaatcaccatttgatacatgatctcttagaaaacaaggcctaatttctatatgctta

SEQ ID NO: 113156 - DNA, 326 bp, Glycine max
agctttaggatgggcagacatgatacatgtcatgtgttgggttgggttaaggggaaaagggatgccccaaattttttcctgaacatatgcaaaatggtgattgggaactttattcacaactggtcatgcccgccctatggggcactaaatgtaaaattttatggcatgggatgtagggctcaagaatcattcctctttttaaatcacccaatattcccaaaatgtcttttacaattgggcattatcgagtcatttgggtctcagaaaattacagcttccccttcagtggcacacattttttcaaaaccactatgtcgggaattcca

SEQ ID NO: 113157 - DNA, 453 bp, Glycine max
aactaagcatgctagcgttatgcgaacgagacaacatgctatctgtcatcgtcaagtaccaagaagagttaggtctagccacggcccacgagcatagaatcgcggatgagtatgctcaagtatacgcggaaaaagaggctagaggaagggtgatcgactctttacaccaagaggcaaccatgtggatggatcggtttgctcttaccttaaacgggagtcaagaacttccccgcttgttagccaaggccaaggcgatggcagacacctactccgcccccgaagagattcatgggcttctcggctattgtcagcatatgatagacttaatggcccacataattagaaatcgttaggaaacttgtatggtctctcagaccttgactagatacgactttctttttgaaataaaatgagttggtcccatgtttctactccaaaaagcttgtgcaaatc

SEQ ID NO: 113158 - DNA, 397 bp, Glycine max
  unsure (1)..(397): unsure at all n locations
tagtgagagcaaatgagaataatgtatnccgaatgtgtttttatcttctttttcgcgtaaatggagtgatgagaggtccaattatcaatatgcttacattgtactctaataatcacctttgagcgagcctaattcaatgatatagactctatgaagatgaaagtttacgccctcaaacacccaattctgattatcacctttcataccttgaaaactcactagattatgctggatttggatacctatattttgatatacttttgtctaagggttggaactaactggaacatgatttatacatggtttaggacttgtaagatccaatttgactcggattggatatctataagctagattttataaatctgcataattatgcataagagttgtccaataa

SEQ ID NO: 113159 - DNA, 386 bp, Glycine max
agcttggggtagattgggtttgaaagttgctaaaaatttcaagtctgccttaatgatgaaaatgagggggtctttgtgtaataaattatttaaggaatcaagtgaatgccattggttgcttggggaatggcattgaattgattctgaattgaacaaagttggggaagcttggggaaattggccactggttgcttgtgaatttaacttctaaagtgctgcataatcaacatagttggtctcttatatttgttgttacaattgataatctatggaagaattttaaagaataagttgggcactatgttggaaacctcttgacaaattagaatcaagtcaatgccatttccttaagttcacgaagactagaacattcagttgctccacaa

SEQ ID NO: 113160 - DNA, 429 bp, Glycine max
  unsure (1)..(429): unsure at all n locations
tactaagcttaagaaaagggcaaactcccttccaaaatctgatntcatgcttaaatatgtggctntgttcatgctcgtgcgcttagtgcaattctgaactgcttagcgcgcattagtgaatttcggcttagcgcggcttttctcactcagcggatggattgaagcagtgcgcttagcaggatgacccttcgctcaaggaacatgcacaactcatccttcttccagattcttcctcgcgcttagccgaggattattgcgctcagcggttggctcgctaagccaatttgttggcttagcgagagggtgaaaatcaacacttcaaaacttgcctaattaacctgaaattaagagaaaatgattattaaacacacaaaatggaagtactaagtatttcttacctatctttactcanaagaaatataacactac

SEQ ID NO: 113161 - DNA, 356 bp, Glycine max
gcttgtggactataccttacaccaatcacagccgtttttcttgtctggatcggatttaaaacggggttcatcaacagcttccgcttcctaaaacgactggagggcgatggacgggctttgtcctctatgggtttatggaagtctaacatgaccttcgagaagggaacccattgaatcttccaaggacgatagatcgggccttatttggtccagcccaccttttcattaaccattttttggatcgagtgtattagggtgccttggcgtttcctagtatgaagacatcctaagaaaaaacacgggaagatgccccaaacatgaatatcaatgatgatcgagcacttgatccccccaag

SEQ ID NO: 113162 - DNA, 333 bp, Glycine max
  unsure (1)..(333): unsure at all n locations
nganatgaggaagtgcggaagggtgagacttccttcttttatcgttgtccacagagaggtacctggagatatgtcgtgagggtcaagagaccttggggacgtcaagtggggtgctattgcccaaaaccaagcttgaccaattccgacccaacccgggcatagtcagtcagtgagaacctgtgatgtacctatacaggtgagctcctggcagtcaacagataaaagaaacgaagaccacgaatcatggaggcttgtgtggtggctggccagctgtgaactttgagtgttatatggggtatggcatctggtgatcgattaccaagggtgtctaat

SEQ ID NO: 113163 - DNA, 404 bp, Glycine max
agcttggctttccaagttcagcctgctcttgtgatttcaatatatttttgttggtacaacaactctatatagataaaagatattttttcattgcatcaaacaaaaggatattacaagtcaagaaataaaaaatcaatccaaacattttaatttttaaccaccttaacgctggtaataacatctgtggcacccattctgactcttgctgaaccattggtctgacatgaagttattttatcaaatacataaattataactatttaaagcaaaagattaaaataaaatatcaatggtacaccaatgacaaatcatcataataccctgccaaatgtcaactgattaaagcattacctggggaatcactccagtttcaacagagaatggtcgatatgtcaatctctttc

SEQ ID NO: 113164 - DNA, 455 bp, Glycine max
  unsure (1)..(455): unsure at all n locations
tatctcaatgatgattatgtcactaacccgccactatcacaaacaagccacattntgtagaggtcatagatttgctagaaacgacaaaatagaagtgtgacttatttggtagaacaagccaatagggttcattggtgtgccaaagtgtccctctttctctctctatcaagctttggccagccagcacatctctctctaaaaaatggaccctactttggaaaatcttgcagttgcttttcctagtccttcatcatcccccccaacagccataaaaggccttaccctcttcacacccccaaaaaaaattccaatcctctctcaactcccaagatttggctntgtgtctttgtgtgctcatttttcactaaacaccaacccaacctcatacacaaacattcttaattttgatttnttggtattattttctttgtttggtaattacttatattaagcat

SEQ ID NO: 113165 - DNA, 391 bp, Glycine max
  unsure (1)..(391): unsure at all n locations
ctgcagcttatagtgcggtttggatatattgtcaaacgttcgcgatatgccaaaatgatattccgagtactttggatttggtacgaccatgctctcctaatntccagctgggaaattggcgagtggaggaacgccccggcatttacgcaacaagcataatgtaaacctttacggttttaaaagctctatagttggccctaggctttagagtttttccttttgttaaggctttgtgtcttttgtttttgaatttataatacaaggatctttcttcatctgttcctggtctctacccattctcattcatttgcatgtttacttctttttctgaaacggcagatccgatgacgagtcccccgaaggtactaatacctgggacccgtctatcgac

SEQ ID NO: 113166 - DNA, 430 bp, Glycine max
  unsure (1)..(430): unsure at all n locations
taaataggctctgaatccgcgacgntgttcttatcactaccttcgcgcttagcacgagtaagtggatttgagcttagcaccaatcatgcgctgagcctggctaaagacaaccatcgcgcttagcgagtagatctcgcgcttagcatgcggcctttgtggcgtcccgaaataatgactggtttaatagtaataaattaaatagcagaaaccatgggaaattntttttttctctctctcttttttttcacactgtcattcatttcatggtaattaaattcagaaggaaaattatcactatagagtcttgaatggccagttcacaactctattcggattcatttctttctgatcactcataacctctaaaactatattgctatttccaaaatatactagccatcattntanggtgtcacgtgaaaaataataa

SEQ ID NO: 113167 - DNA, 358 bp, Glycine max
agctagcaccatatatgtcttcagtttttatatcaagcaaaaaatttgaaacacaacagatgtcagatgaatgaatgccagacagctttatgaggaaactataatttacaggtcgacatacactagtcaaggagaaggttgatcaataatgcttattattgcttcatcgtgacctgtgatcagaaagctcttttaaattatcctgctcctctttgatgcatggttcatccactgccattgagtccacccccaacacctgataacatgcaattataacaccaccagagtgatcttataaacgagaaatttaagtttatgcagcccaaaacattcaaccttggagcatgatatctccttg

SEQ ID NO: 113168 - DNA, 429 bp, Glycine max
  unsure (1)..(429): unsure at all n locations
tcaacataganatttagtcagccttcttgtgttntgcttgcagggtgaaaaaaagatacttgcttatgaatatgtgcacaaccaaggtctccactatattctctttgctaggttcatctttctgaattatgtcatactttgcatgcctgctttgattttattttaattttttgcttccagtttttgccctgttggccagttcagtatatacataataaccgatcaacgtgtcaatgtttcttctaaatgactacatttttcatatgacttgaatattttgtccaatttgtagatcctgaaaagcaaaggaagttggattgtgggacaccttacaagactattgaagggattactctaaacattcgatatttcataaagatttagcctaanatatacatcgtgatcttaaagtaataacttattgtggat

SEQ ID NO: 113169 - DNA, 127 bp, Glycine max
  unsure (1)..(127): unsure at all n locations
agcttcattgctaaagaattatgaatttctaatggcncgggatgacaactcacaatgtctacaaggtgtacttgccataccaaaaatgatgaacagccactttagaaggatatttccatgattgtgt

SEQ ID NO: 113170 - DNA, 299 bp, Glycine max
tgactaggccaggtgagggagacctaagtttcacgttatctattagccaatatgatgaacaaagagatatgcattagagacaacgatcgactgatgattcgctttactaaaaaagattattgtgataatgatattattattacacctctatttttgattaacaacgtggtgacggcacgaccgtacggtcggacttcagcttaaacgatattaactgatgatacgcttcaaacgatcggtggtgatttatattatctttagattaagcgagaaatgacttaaataaatggctcatgcac

SEQ ID NO: 113171 - DNA, 398 bp, Glycine max
agctagcatgaattactttcttctctttttcaagcatattcttcttgattcaacaaaatcttcatgatttacattctccccctttttgatgatgacaaccacctataggttaggagcaacaacatagaaaatatctatttgcatatagtttactcccacttggttttacaatgattgcttatatgagacaattgaagatttcatatttttcatatataaaaagttgtctcataaaaaatagataattttttcttattatctgatcttttatctttctctcccccgttgccaacataaaaaacaaatcatgaatagagaggagaaaaatgttaccacttgttgtaatggattataatcaagtgataccaagaggcatttaaccattcattcaatattga

SEQ ID NO: 113172 - DNA, 442 bp, Glycine max
  unsure (1)..(442): unsure at all n locations
tctcccatattttgctataaataggggattaagtgattattaaaagggttcagccccttaggcacttctctctctctcgaaattgctgatgaaaattatttccgtgaagaaaatccaagctgaggcgcttccgtaacgtttccgtgaggaattacgcgaagattctcgaccgttcttcaagattcatcattcgttcttcgttttcttcagtcttcaacgggtaagtacctcaaaccaagcttttcaattcattctatgtacccgtggtggtccacattntgtttcatgtatttttattctcgttttcatttactttttatacccncttttgacgtgcttaagccatttatttaagtcatttctcgcctaatctaaaaataaaataaatttccaccgatcgttngaattgtatcatccgttaattttggtaaaatgaattccg

SEQ ID NO: 113173 - DNA, 289 bp, Glycine max
gcatgcaactttttaaatttttgagtttgattagggagaggtaatgccttttgcttaaagcactccactgtaaactacttcaaatgttgcctcatagaatgcccgagaagctgcctaagagtccagaagaaatgcggcgaagactattccccccgagtcaaagcacctcttagagcttgtcccacccgctgaaccataaggaggcgttttcggacaaacgtcactaaggcaaaagatctgttcaagagaaataggcccgggtggccactgtattcatgcaatttacaaa

SEQ ID NO: 113174 - DNA, 429 bp, Glycine max
  unsure (1)..(429): unsure at all n locations
ngcacaacaagtaactataattttttttgggtacaaaatgaagtaacaaactaactaaattccactaatatatacaattactactcaaaaggaagggatgggccttgattangcccctctaatctacctagttaaactaattacacaaagaaaaacccaaatcacaacccaattattcaagtgcaaaggttttgacttccatgcccaatttgacccatgaaatggcagaattggcccaaacatatttgttacaaaattgaagatctttttcttatatttccagggactactcatatgctccatttgaggttctatattgtcctataggccctacacaagacatatatgtcaagtaagcacaaaaatccaaaaataagccacaattatcaattgagatcaatcatttgcctaagaccaanaaccgagtta

SEQ ID NO: 113175 - DNA, 219 bp, Glycine max
gttactcctgatggaagacgattctgcatatttttatagacggcatatacttagatgtaagggactccatacatcacagaccttatgtgccctgtatgagggtctgatgtgcaacaatagaaaaaccgtataccttattgtactgaggaatactgaagattaggactattaactttaggccaacaaattattgatgtgcgttgaattgacgattcttag

SEQ ID NO: 113176 - DNA, 309 bp, Glycine max
gctcatgatggaataagattgattcttttatagtttgatgataacaaaggtgatgacataaagctcaaagggtcagaacacttcatgataaccaagatgatgatctcaaaaatccaagaataagttcaagatgttcaagattgaatcaagaacacttcaaggttcaagaggaaatttgacttcaagacaaaagaatcaagttccaagactcaagatcaagattcaatgtagaagcaaagcttcatggagaatcaaaggtgattcaaaggtgttttgatgataaccatgatgatacaaaagatgatgaca

SEQ ID NO: 113177 - DNA, 433 bp, Glycine max
  unsure (1)..(433): unsure at all n locations
gggaccactcatttatntcaaaaggaagtcgtatccagtttatgtctgagagaccatacaagtttcctaacgatttctaattatgtgggccattaagtctatcatatgctgacaatagccgagaagcccatgaatctcttcgggggtggagtaggtgtctgccatcgccttggccttggctaacaagcggggaagttcttgacttccgttcaaggtaagagcaaaccggtccatccacatggttgcctcttggtgtaaagagtcgatcacccttcctctagcctctttttccgcatatacttgagcatactcatccgcgattctatgctcgtgggccgtggctagacctaactcttcttggtacttggcgatgatagctagcatgttggtctccgtctcgcataaacgctgagacaagcttcttttggacctt

SEQ ID NO: 113178 - DNA, 412 bp, Glycine max
ggatccttgagtcaccgcggctgcagcttctccctatttgctataaatttggaagaagtgaagaagaaaagggttcagccccttaagcacttctctctctttcgaatttgcttaggaaaattgtttccgtgaagaaaatccaagccgaggcgctttcgtaacgtttccgtgagaaattacgcgaagattctcgaccggtcttcaagattcatcgttcgttcttcgctttcttccgtcttcaacgggttagtacctcaaaccaagcttttcaattcattatatgtacccgtggtggtccacattttgtttcatgtattttcattctcgttttcatatactttttatacccccttttgacgtgcttaagccatttatttaagtcatttctcgcttaatctaaaaattaaataaa

SEQ ID NO: 113179 - DNA, 444 bp, Glycine max
  unsure (1)..(444): unsure at all n locations
tgtaatcaattacacacatactgtaatcgattaccagatgagttnttcataanacattcttaacagtcacatctttttatctgtttcttaaatggccatcaaaggcttatatatatgtgacttgagacacgaatttaacaagattttttcagaacaaaaaggttttatcctcttaaaaagcaaaattgttttatcctcttacaaattccttggccaaaacacttgtgattcaataaggaattatttgagtgctcaaattgatcaatctatctctttcaagagagatttcttcttcttttcttctttattctgaaaagggattaagagaccgagggtctcttgttgtgaaagaattctatacacaaaggaagtattgtccttgtgtgttagaactcgaaaaggatttacaagaagtggaactctaagcgggtgctggggactgga

SEQ ID NO: 113180 - DNA, 405 bp, Glycine max
  unsure (1)..(405): unsure at all n locations
gctttccgtactcatagcaaattattaagtttttgtctttatctttcctttctttggacattcttcttgaggagtttttccacttaaagcctcctttgtttctccatgtcttgtggatatttcgagaaataaaggtgagctcatcttcatctgagtcttcctcatattcattatcagatgaatcatcaactttatgaactttggacgaacttctcaagacttgttctctggttgatgatgccttcttattcttctgactactgagagccagagacttttctcttttggatccattgtcctgctgaagttcttgttcatgaaccttgagggtattaacaagttcctcnaaggacatcgagtcaagattctttaatactctcagcgttgttacatacattctccatt

SEQ ID NO: 113181 - DNA, 453 bp, Glycine max
  unsure (1)..(453): unsure at all n locations
cngaaatgttaaccaacgaactgttcaatagaagtgttgagacataaatgattcttgctaatttgctttgaactttgcacattaataatgttcttgatgtgctaagattgattcaacaaaacttgacaatatttcattgcattattatgtggcgagcaagggttgtctccaatgtggttgagaaaagcacaattctttctggaattaacctttttccatgctctaaatccttctctagtaaatacatttgacctaagacgaccacttggctttttacaaaagacataacatggcaaacaataagttgtgtcagtaggagaatactctagccaagaaggaaacattttaaaccaagtagattggaatcttctaggatgcttctctccaaaaagaggataattttcatatttgcattgctatgaaccccattttagataagctctttngaattta

SEQ ID NO: 113182 - DNA, 381 bp, Glycine max
agcttgttggattatggggcacccttcttatgtggtactaggtggcgatcgggcaatggtgcaaatcaactctcccacatccacaaatcaaacatgaacccaccattcccaattgcccacctttaactgaactcacgtactcctacgtagcccttatcctcgttcctctcagcaccgggtccccatcaacccctccaagctttcataatatccgagcaatccaattccaactatcatgaactaccctaaactagaaaacagggcaaaggcattaaactctgcccaaaacacattcacattttacagctttccttactcaaataccccagtaacattcacttcgttcccattcgataatcgtggatcgacttgaaactttat

SEQ ID NO: 113183 - DNA, 428 bp, Glycine max
  unsure (1)..(428): unsure at all n locations
ntaatacacaaattcccccaacaaaggatttactattttctcaactcattcccatgaggggcataaaaatagacaatggaggataggaaaatggagaaaaaaaatgaagaaaatggaaaatgaaagtaaatgggagggttagatgccacataaaaccttaggttaattccccttttttcccaatgttaaaaatgtcttatatagcctaagaatctttgtttttccttttttgcgaaacaggtagctcacttagcacaaacatcactcactaagtggaccatcacttttacactgacgaaagttacatctagcttaatgttagggatttttttaaatagtattaggacttgcattcaagtcgtctaccaaaggactagtgattatctgggcaattccaattaaaagactaagggtttgtaaagtatctc

SEQ ID NO: 113184 - DNA, 345 bp, Glycine max
agcttctcatctttagagtgcgcgcccatcttgcgacagtacattttgagatggtttttgggacaggtcatccctttatacttgtcgaagttcggcactttgaacttcggggggataacaacatcgggtactaaacaaagatctgtcatgtttgcgaacgaatagtccccaaatccttccacggctctcaatctttcctcgaggagatcgagcttcctcctttcttcagttgccgggggcggtccttccgtggacaaaactattggttgtgtcgtgatgttgggctgaggcaacgtccttggtgacagcccttccgggatcgggggatagaactcgacatccctt

SEQ ID NO: 113185 - DNA, 440 bp, Glycine max
  unsure (1)..(440): unsure at all n locations
ntgtccttagatccctcttgttggactagacttagaccaaacaacattattgtaacaacatacttaaaaccaaaacttaatccgtagatccctcttgtaagacaaactttcaattctacttcattcaagttctaagggaacaatacatttctcaatgttaaaatcacctaactaggcacacaaatggttgatcagaccaagagcattcaaaatttaagcactgaaataggcactgtggtgtgctatggaattctgtgccctgngcattgtaccctaattctgcacaaaacaggctntaaataggcattgaattcgcaacgttgcatttagcgccaccctcatgcttagcgcgaagtaagtggattgagcttagcgccagtcgtgcgctgagccaggctgaagacaactgttgcgcttagtgcactgaagctgcacttatc

SEQ ID NO: 113186 - DNA, 242 bp, Glycine max
  unsure (1)..(242): unsure at all n locations
agcttacctctataggtatcttctatgttngattctaaacatttaaatttattcttggaggtcttcctgatgagtatgattcttttggttttggtatacgaaattgggaccattctattagagtatgaaccccacattgaaagatcaaggaaaagaaccttaagttcaaataatctcactgaaggtctttttggcaggtccttttatcaaaggcaattttgcccctactaaaaacctaattt

SEQ ID NO: 113187 - DNA, 92 bp, Glycine max
tgagtgacaaaccagaatatctcttgtatatctgcccagcatgcatttactgctcctctatcctaaaggaacaaactcctcccatattgctc

SEQ ID NO: 113188 - DNA, 382 bp, Glycine max
  unsure (1)..(382): unsure at all n locations
tgcctctatgatgtgagataatgctatctttgtcgtctgttcttanttacctactgagtctctcggagaaccatacaggaacgtcatacacctacagatcttcaatgctctcaagggatagtgatttgtacacgaaccactctttctgctaagggacaactaaattacggatatgccggaggagatatgtcgactgacgctgtcttcactaaacaccgccattgtcatgcacgatgcatagacagtcacctaataaaatgccaatgctagtgcaaaagaagatggccctcatgacctcacgccttgcgcaaagaaggagataatatctcttgatgcctatacaatcggactgatcctgaggtgtgcgctaacgctgacacta

SEQ ID NO: 113189 - DNA, 362 bp, Glycine max
agcttcaggctgttcattttcttattattgttgcacataagggcaaaggtctgtgtggtggtcggcagaagagcattaaacaaatagtttggcggttggtgcatatttttgattcatggccagtttgggttaccaagttaaccaaggcatctagtttaccttctagctttttagtatcacctgatgaagatgaattcagggctacttcatgcactcctctaatgacaatatcatcaattttggcactgaatagctgggagttggatgccatcttctcaataaaatttctggctttagcaggggtcatgtctccaagggctccaccatgggcagcatctatcatacttctctgcatgttgctg

SEQ ID NO: 113190 - DNA, 427 bp, Glycine max
  unsure (1)..(427): unsure at all n locations
gcttgaagcagntcccccatctnctcctctaattatcatctcttacacatcatcagatgaagcggctacccctcctgattcaccagatgtagaaacagttgacccccctgcttccccaattggaggaattgctgatctttctaattcgtcatctggagaagttgttgctcttactaattccccagtttaaacgctgttgacattgttgattcttgatgatacttttttctttttggcttattattataattatggtttcagtacagtatttcctttatgtctactggcgccatctacgtacactgctagttttatttatgggtagttagtttgctcatcctgaagcatnttgaacagcttgactttttcttgatgacatggcaacaaaccacttttttctttttgtgtaaaatgggcgctgtcttta

SEQ ID NO: 113191 - DNA, 389 bp, Glycine max
caatgattgcatactgtacaggcatgaattccaagaaatgtcccaatgccctatctatgggacttcacggtacgaagtgaaagatgaaaaaaaaagtagttctgatgaaaactccaacaagggccccccaacaaaagttttgtggtatcttccaatcattccaaggtttaagcgttcttttgctaacgaagacgacgcaaaaaaccttacatggcatgcaaatggaaggatttctgatggaatggtccgtcatccggctgattgctcccagtggaagaagattgatggtttgtatccggatttcgggaatgagccaagaaatcttagacttggactagccagtgatggaatgaatccatatggcaccttaagcactcaacatagttcat

SEQ ID NO: 113192 - DNA, 447 bp, Glycine max
  unsure (1)..(447): unsure at all n locations
ggtaagaagtatagcaatataggagaatgtttntggttgattgataatgacttacattttaatcatgggttaaggagttgtacaactgatggagatatattacacttagtgagggatgcttttgaaaatgagaatgagataaatgtttattttcatcatgaagtagatccaattttagaagtcccacagatgttgtacttggaatgtcatccaattccagaagctgttgagaataaggatgatttagatgatgtacctattgctggccatgaggaaggtaagttttaattcatctgtacttggtccaacatcgttaccataattaattaatatgatttatttttacttgatcaccattgatgcanatgttggtggtggagagagagaggttggtgacggtgagcagagagatgttggcgagcagagggatgctgatgctagtgagca

SEQ ID NO: 113193 - DNA, 365 bp, Glycine max
agcttcattgcttcgtggtctatgctcttttattgttgtctgccaagagctcccctgtttaggtacgtcacaagttctcactgactgactatgcccggattgggtcgggattggtcaaacttggttttgggcaataacaccccacctgatgttcccaatgtctcttgacttccgcgacatatcttcaagtacctctctgtggtcaacaaacaaaagtaggaagactaactcattcacgctttctcacatcaagcttgttggattatggggtacccgtcatatgtgatactaggtggccatcgggccatggagcaaatcaactctccccacttccaaaatcaaacatgaacccccattcccagttg

SEQ ID NO: 113194 - DNA, 472 bp, Glycine max
acactctaaaactaagcttcctaggctcttataactactattctcaaagcctctataggctcttcctaagtattcttttgaaaaccatctccaggcttcaacctgagtattcttttgaaaagtatctttaggcttcacttgagagttcttttaaaagccactctaggcttcatccaagatttcctaagcctctgcaagctttacccaagtattattttaaaaaattgtctctaggcttcaaatccaaagtagcaactgctacttaactcacacaacacttcaatgtgcttactcacaaccttcaaaagcagtaatacccttatttctcttttggttctctatccataatgggttgttttttaggacaaatacctaatacaacttttgttgtgggttgtttctatgaatacaattgatccctccttcttccttacctagaacaacttccacacaatttaaattcaaaattatg

SEQ ID NO: 113195 - DNA, 398 bp, Glycine max
  unsure (1)..(398): unsure at all n locations
agcttatgcgcatatttncttacgaactttcacttgcacaagacattctattaaccaaaaaaatgcacccatatacaatcaaagcagcttcgttacctaaattatttacatgcacccccaaagtggatttggtacttacatcacacacatcttcttggctgaatttacatacatgcatactcaaagcatttcggggtaccaaaaattgcacatgcgctcatcttggtatttctaatacctatacatatacaaacttcatgatgaatcttgactacctacacaataaggtgctacatttcatgctcttttttttttcaagtttttactacctaaagccgcatgcaaattcaaacatatnttcctttgctgactaaaattgtattcaaattaaaaggtat

SEQ ID NO: 113196 - DNA, 426 bp, Glycine max
  unsure (1)..(426): unsure at all n locations
tgttgttctccattgcactgaagaccgtgacaggtacgtttcatctacctgtgttgntctattgaactaaagaccgtgaccgtgctangtctgtttctggaactcgtggttaagctaaggactntttttggtttttggtgcaaggattggcaaactggtggtcacctgaggtacatttgactggtagtacgtggtctttgtggtcagctgaggtacatttcacctaaagtacaatctcgccggcattgttgctgttgggttcgaggtaagcttcatgtcttcattgtaactttgtgcttccgcgtatgtggtctttgtgctctntgttcttacagattgttagttaagtttttaattagttattactactanggtttggaatgcangtagtcttgcttggaaagntggtcaaaatattgccttatt

SEQ ID NO: 113197 - DNA, 396 bp, Glycine max
  unsure (1)..(396): unsure at all n locations
agctttantcaaacagaataatttgaatatgtcatttatttgggcggtgaaaaagcataacaaaactttttgtgattggtttaaagataccaatcttgcagatgagaatgcttcaaaaacattaagaaaactagcagatgggcctaaaaaaaatgttataacctggcaaggatacgacataaacaggtattcantttacacaaaagcacaagatgacaaaagtacaatgcagaacaacggggtcaccctaagggctgaatctcaacactttgcaagtgtcaatgacgccaatccctgtgtagcttccatcccttactttgggttcattgatgaaatttgggagcttaattatgtgaaatttacagtatgtgttttcaaatgtaaatgggttgacag

SEQ ID NO: 113198 - DNA, 455 bp, Glycine max
  unsure (1)..(455): unsure at all n locations
tcatgcttaagtatgtatggcaaaacttcattactgttgctcaagacttacaagtgagcttgtaacaaatgttctacacttggagtgatcacatgcagtcctcttgaacccttacctcccactttgtcatcatgctgagactcangaaggccaacaggtttagccttctcaatgtattntgaacaaaattcaatggtttcttctgcaatgtacctctcaacaatagatgcttctggtcgataaagattctntgtataccattttaagatcttcatgtatcgctcaactgggtacatccaccgtagataaacaggaccacaacatttgatttctctgactagatgccaatcaagtgaatcatgatgttcaagaaagcatggggaaaatacatctccaactagcacagtataattgcgggcttcattttcaactcatcanacttgacaggatcaatg

SEQ ID NO: 113199 - DNA, 406 bp, Glycine max
agcttatggtaagatctgggacctatccatggcatatgtctccacagaggccattgcctccttcgcccaatattatgaccagactttgaggtgcttcacctttggggacttccagttaacacccatggtggaagagttttaaaagatcctgggatgccctctggaaggaaggaaaccatatctcttctcaagattctattcctccttagctagaatttctaaaatagtcaaaatctcgacacatgaattggaccacggaaagcaagtcgaaaatggggtagttagggtacaaaggaaatgtttggaagcaaaggcaagagtcttggcaagtcaaggtgaatgggccccgctcatggacatcttaacacttttgatcttcggggtggtcctctttcaaatgtggatg

SEQ ID NO: 113200 - DNA, 469 bp, Glycine max
  unsure (1)..(469): unsure at all n locations
tgacacttaaatctcagcttccgcgccacaatgcgttccatttgcattacggagggctttggggctccattccggaccctatttctgcggggtaagggttttgtggctggaactggaattggaggttttctttgctcagaatctttgttctgtggaactgtggaattatggaattagccacaataagtttggttgtagtagaaaggttagataagcaaaacatggcgacgggtctccgtgtttttgctgataataaatgtttactctaaacggataagacctggccactatcaaaattcgaataactcccaacactttttttcccctttatttatatgaatttaattaaagtatatcaaagttatttgtggagaaactttntaataaactcttacaagtaaagaaataaggcctgatctgaaaatgtaaagagtttattttctgtacatagttaaattttacataatct

SEQ ID NO: 113201 - DNA, 388 bp, Glycine max
  unsure (1)..(388): unsure at all n locations
cagctatgaatattaatcttgttgcatttatttcaagcgtgatccatacagggttgttgtctttgaaaaaagaaagaatttttctaataacatggtctcatctgcttaggttgataccacaatgttataggaaactaggaatctgtcttaaacaaaatattttatagacagggatttatgctaacaaagccctaggcacatttcctactgccccttcgtactacccaaaaagttaacaatgttcaacaatataattctccctctccactgtttaatnatcttntctctatcccacccacgccccacgatttttcttgagatagtttggatatatctatatatacataaattccattgacatgactgtccttaaggatagaattaatta

SEQ ID NO: 113202 - DNA, 458 bp, Glycine max
  unsure (1)..(458): unsure at all n locations
gacctataaaactcagcttcaaatatcgagattggttaatagctcttgggacatcacgagcatcactcgaaaatttgtcattntatagtcagcaatatgttggttaagatatagaatagacaatacaagacctttttattagtctattgatatgtaaaatatgtatgtaatatgttaaatttttaattgaaatttaatctacactttataatttacagagtcattttccaaaggtgaaattttttccccatttccaatgaatcaaagacaatatttaattatatttcttactaactagttcatattttaaaaaatttgaaagcttgtatttatttaataaataatataataagacattcttattttcctaaagaaaagtgggtttatgtatatgaaaacttaaaacttatgattatttcataataaaanaaatcctctagagaacattattatcaaat

SEQ ID NO: 113203 - DNA, 395 bp, Glycine max
agcttcattatgagctagcaaccttttctaataaatctattaagttttcatcctctgaacaaacctttttgcactaacttcaaatcaaccagtttgtcttacaaggagcttaagtttttgaaaacacaattcaacctccacttcttgtgttattttattcacttcagtcctttactcccttagaagttgcacacaattcgaaccttacggtctcacgaaatcctagagaccaatgcgatatggttctctagtgaacatcactcatgaggatcaagattcctatctaggcttacagacacattacactctaggcccccaattgcggcaattttaccaatgtacactttctctctccacaaaattctcaaagtacactactttgagaattttttccc

SEQ ID NO: 113204 - DNA, 430 bp, Glycine max
  unsure (1)..(430): unsure at all n locations
tgtnggtgaacgaatataatatttgtgtgtgtcgtattctctgtaagtggtattgcaattgatggatatgcggtcataaacatgtctctctgtaagtggtattacagttgatggatttgcggtcatcatcactaatgatctacaagtcatcaaagagggttgtgccaaatcctttgctccctttccaacaggtataccaccattctttttggacttgctaagatgttaatcaagtcatgggaacttaacaccatgtcagttttgattgggtcatctggctatattgctgcagctgagtttttttcctaaatttatttgcttatgggttatatttttggttcctaacttacgaatatattgcttgtgcttttaccatangcaagagtaatcctttgtaagtgctgaaattattcttcgttanggcccactc

SEQ ID NO: 113205 - DNA, 386 bp, Glycine max
  unsure (1)..(386): unsure at all n locations
agcttttangggttcttgccttgtctttgcttggagtgtacatacccctaggtggagttaatagggaggcttttgttggaaatttggatcaaaacaatctattaaacactttggactcgttttctggtggtggtattggtagacttggggtatgctcccttggcattgttccctttatcaatgcacaaattgttttccagcttcttgcacaagtatatcccaaattgcaagatcttcaaaagagagaaggtgaggctggaagaaagaaagttctgcagtacactcgatatgcttcagttggatttgccattgtgcaggtcagcaatttgtgaacttttgtttgggataattttttgaaaaaaaaaaagatntattttgtttactaa

SEQ ID NO: 113206 - DNA, 442 bp, Glycine max
tctaaggaagcttatgaagaaagcctcttaaggaagtttctcaaggaggtgagcttagctattagagggggtgtgtatagttaagctccagcttctcaaggaagctttcatttaattagtgacctaggctataaatagaaacatgtgtaacacttgtcataactttgatgaatgagagtctcgtgagacatacttcaaagttcaacttctctccctctttttctccttcaatttcgtgcccccccttctctctctctctcatttttttcctccactgaagcttcctctctaagcttcttatccaaggcactctcttggtggtgaagttcctcctcccatggcttattccctagtggatagcgcctcctctcaccacttctcctttatcttccgctgcatctccatgggtgaaaatcaccattgaaggacctcattgaagctc

SEQ ID NO: 113207 - DNA, 217 bp, Glycine max
cattaaatatgaatttggtaataccctggccaaagcggggaacaattttttatgcacctttgggcttaacccgcttgactggttttaccaaaatatgaagcttaattttattgatacttaatttcccgaatggccgggaaaaatttctttttaagcaacgcccaatattcgtgggataatcccttggtacgctggtgttttttacaattcacccacg

SEQ ID NO: 113208 - DNA, 352 bp, Glycine max
agcttgtttgtggattttctatggatgctggatctttgagcttcaatgaggtcctttaatggtgatctttcaccatggagatgcagcgaaagacaaaggataagaagttagaggcggcgccatccactatggaataagccatggaagaaggagctttaccaccaagaagagccttggattagaagcttggaaaggatgcttccttggaggaaaagatagacggagagaaagagagaggggggagcacgaaattgatggaagacaaagggagagaagttgaactttggatttgtgtctcacaagactctcattattcaaagtacaacaagtgttcacatgcttttatttataa

SEQ ID NO: 113209 - DNA, 395 bp, Glycine max
  unsure (1)..(395): unsure at all n locations
tgagatgaggaagtgtttaatggttatacttcctgcttttattgntgaccacagaatggtacctggagatatgtctcgcgggtcaggagaccttggggacgtcatgtggggtgctattgcccaaaaccaagcttgaccaatcccgacccaacccagacatagtcggtcactgagaacctgtgatgtacctaagcatgcgagctcctggcagtctacatataaaaggaacaaagaccacaacacatggaggcttgtggtggctggccagctgtgaaacttgattgatatgtgagatatggtctctggtcatcgattaccaatggtgggtaatctactacaaagcttaataataagacatgggctaagaggactctggtatcgattacccgggatgt

SEQ ID NO: 113210 - DNA, 279 bp, Glycine max
caataaaacatgggatcttcgcccttttgcctactcattggaaggctattggtttttaatggttatattgttgaaatacaatgttgatggctctgtaccagacataaactaaactggttgcctaagggtattctcaaccaccacgacttgatataatgagacattcagttccgttatcatacacgtaaccattcaaacggtcttgagcattgttgttaccacaaaatggaatatactacaagtagacgttaacgatgctttccttaatggttccattca

SEQ ID NO: 113211 - DNA, 426 bp, Glycine max
  unsure (1)..(426): unsure at all n locations
ngaaggcaaactggatgcgttggtctacttggtaacttatctggccttgaatcagaaatctgtacctgtcgcaagggtttgtggcttgtgctcctctgctgaccaccatacagacctttgcccttccatgcagcaacctagagcaattgagcagcctgaagcttatgctgcaaatatttacaatagacctcctcaacctcagcagcaaaatcaaccacagcagagcaattatgacctttccagcaacagatacaaccctggatggaggaatcaccctaacctcagatggtccaaccctcagcaacaacaacaacagcctgctccttccttccaaaatgctgctggcccaagcagaccatacattcctccaccaatccaacaacagcaacaaccncagaaacagccaacaggtgaggcccctccaca

SEQ ID NO: 113212 - DNA, 427 bp, Glycine max
ctaaacatacacttgttatattcttactcacaatataatacccttcattatagtttacgtctttaaggcatgaatgtggtataaccttttcttgaaaaataaataggcataattgcactaaatactcttaatgcttattacacccaaaatccctctcatatgggaaattactgccctttactttatgtaatgttctcacacccctacacccttggttgcataagaaattacagatacctcccctactttctgtacaaaccttacacaaagtcgcctggtagatattataaaacatgcaattccccaaacaaaaatggtgttagtgtaacaagcaataacaataaatgagttgaataatccgcacctatgaagcacggacttcgacaccaatgccgcgacacgactaaattcttatacataagacacg

SEQ ID NO: 113213 - DNA, 388 bp, Glycine max
  unsure (1)..(388): unsure at all n locations
agctngtctcttcacactccaacaacttcatcattttgtcatcccccagaagccacaacctttgttcaaaactgttgatggttcaccaaattacatgaagcccaacagccagtcacatgcaaaaaaagaacctttttctgttaagccaaaggaacactcaacctggttctgattttaagaatcttcctagaaaaattttcagtgatttcaaagcttgcatgtgttaaaaaacctgcaaaagccttgacaagaacatctaatagtttgagtttggtgagaacattgaccaaaaccactagtttcaaggcttctagagcttgttctaaaaaatccacccaggctgttatgtgtgctgcaccacaaagagctacatgttcttcaactttga

SEQ ID NO: 113214 - DNA, 471 bp, Glycine max
  unsure (1)..(471): unsure at all n locations
acactctagagaactcaagcttattacgtgttgatgattataacacatgtatatgtatatgaattgttgaaataaattaggaatttaatagttcaaataataaaattaaattgaaggaaatattaatatatcaagattcaacgataaatactttcaatgcaatattagtttaattatttattaactatttttaattgaaaataatatagttcaatttcatagatacatgttttgtgtcatgtaaatattaatattgtgtgatttttatatgatttatgaggtgtgataacatgttgcgttgggattataatattgtaattgagattggatgtacgtcataaattgagtatgtgttgaattgtaagatacatgtgtattgagatnttttacccattgagttgtgagctatgaactatataatcacacaattgtaagaccctttaagggcgacgagttaatacacaatgagta

SEQ ID NO: 113215 - DNA, 398 bp, Glycine max
agcttttgtccattgattccacatcctccaccatgaccaacgtcgtgccatcgccaaagtgtgtcatgccatcgcttgaatgtccacatgtgttgactactaatatttttgtggctctaagtcatgaattaaatacttaaagacctttggaactttacaaacaaacttgtattgcaaatatattttaatgttctaacataacaggtatactacatacatttgaaatctaacattatacaaattaaacaaaaaccctcaaatctgacataacaggtatattgcaaggagtcactacaaaaatcatttgaaaaaattaattgtggaccaagacagatgacaactatatgtaccttaaagggaaccagcaaatgagagggtacatagggattggaggttgg

SEQ ID NO: 113216 - DNA, 446 bp, Glycine max
tagaagcttagaaatcaagtgattaagtgattaagtggtaattaagtgatcatcaattccaaaacatagggggagtatgaaatgagtgaacgcaatatatcttgcatatacattgcttgtatcttgatttcaggaattaaattgtcatcatcaaaaaggaggagattgtagaagcaaatactttgcctttgatgttttgatgatgccatatgatcatgatgttttgatgccttatgaaaatgcacttttcaagtttaattcaatacaaaaatccaagaataacggatacaacatcaagaagatctctagtgttttaagaagggaattccaaattgaaactgcaaaaggtttggccaagaaatttaaacaaaaatgtctttttcaagagatttactctctggtaattgattaccagaggatgtaattaattaccagtggccaaaatg

SEQ ID NO: 113217 - DNA, 383 bp, Glycine max
  unsure (1)..(383): unsure at all n locations
agcttntnttggaccctgaaccagcatttctactttttttcagaaccatgctatgggctcgcgaatgggccctttcttcccttcgcaacttgagttcattattgctccccttagagcctcgcgaaaattgttcccgccatactcttgctagggagccctcttggctcttgtcagggctttgcgaattgcttctttcccgaacccggacactccttccgaacgtgtggtgcaaccaactggaacttttccttggcgagttttgcctttccttactcgcttttgagagcttggacttcttccgtctcttccggtgcttcaaaattctcttcgctgacgacttttaacttggcgagccaatctatacctcgtatgcgaactttcag

SEQ ID NO: 113218 - DNA, 441 bp, Glycine max
  unsure (1)..(441): unsure at all n locations
tctgttntcattacgagcctctcgattatggtaggactcactctttcatctgagtaaaaatngattgtcttttgaatttccaacgagctttcgttttcaattatgagcgtctcgatatattgtgggattcaatcggacatccgagtaaaaatttattgtcatttaaactttctacgaacttccgctttaattacaagcgtctcgatatactacaagagacaatcggacatccgagtaaaaatttattgtcgtttgaatttgctcaaagtttctgttttcaattttgagcgtctcgatatattacgggactcaatcggatattggagttaaaagttcttgtggtttcatttgctacgacctttctgtttcaatttcgagcatctcgatatattaccggactcaatctgacatccgagtaaaaattatggtcgctgaattgat

SEQ ID NO: 113219 - DNA, 388 bp, Glycine max
  unsure (1)..(388): unsure at all n locations
agcttgacaggttcaagtgcaggtgctgctactggtggaggcacttgaatttggttgccagacctcaaggtgatggccctcacatttttcagattttgcacagtttgtgaaggcaatttgtcaaaattttgggactgaacttgattcatctgagtagccatctgtcccatctgatttgtcagactctaaatgaaggctcttgtctcttgctgaaattgcatattctggatggtcatttgcctcactaactcttctaaggaaaggtgaggaggagcctcacgtgctggttgtctttgttgtgattgctgctgctgttgttgttgctacattggaggaggaacatatggcttgcttggaccagcgacattcttgaaagganggacaggct

SEQ ID NO: 113220 - DNA, 451 bp, Glycine max
  unsure (1)..(451): unsure at all n locations
tgcattcggactcttgactctcagcttcttaatgaatttctgttattgaaaacaaccagcaatcacctgcttcctctttgtccactaaccctcacttattggcgtcgccttctccatattcccaccgtatgaaacttgatgctccacgctttgatgggaagacccatctggttggatccttaaaataacgtagttcttcaaataccatgccacaccataccataaatgactcaccattgcttccttctacatagatggacctactttacttatctgcaagtagactagacattatgtttaatgtatgcatgtgtgcaagatatcaatcagatccaaagttttcacatttaatggcaataaaaagaattataagatatttattaggaacagttagtttaggattatggtatcctaagaattctntatgcaacctagtaggatactcagattc

SEQ ID NO: 113221 - DNA, 389 bp, Glycine max
  unsure (1)..(389): unsure at all n locations
agctttcaactaacgtcttatattcacttcccaaatttcctagntcattcatgagaatacaggaggtgctattaatggaacattgcttggaagccatttacaaaactgggtattcttaaaacaggttggattttctctaactctgtttttggtttatgttttctctctacactcaaggttctcactcagtccctcaagatcaaataagctctgataccaattgttgacctgcattcttgtaaattgctttggcctccccctctcatatttacccctattcttctacaccccatatactgttacctccccctaaacatagagatatgaaacagatgatgatcatcaaaggagagatagaatagtcgacaagaatttgagtgtggatgtta

SEQ ID NO: 113222 - DNA, 436 bp, Glycine max
tagaacaatggttgcatccagggacactatttgcatatcatttgagaacactaaaccttgatcaaagattaaatatcatgattgatgttgcttttgcattagaatatcttcatcatgaatgtgtgcaatcgatcattcattgtgatttaaagccaagcaatgtccttcttgatgatggcatgattgctcgtgtgagtgatttgggcgtagcaagaattatctcaaccattaatggtactagttctacacaaacaagtatagttgggatgaagggaactactggctatgctcctctaggtatgttcttaaattttgaatcattgttgttgttttttggttgaattcccctatctttcgatgaacacttgatatttattcactaattgcatagtattgaaatttttttctatatatcttagagtatggaatgggttct

SEQ ID NO: 113223 - DNA, 295 bp, Glycine max
agcttgccacccagctcgcccaggcgagcatggttgcttcctccaaaacaacagccttctggaggaatctttttggaggcccaagtgggcctggttgcttttgcacccccatttttactaaatacaccccctgccttttttggtgattctttttttcgtaaagttacggaaacttacgaatttcgtacaatacttgttttctttccgtaatgttacggaaccttgcggatcacataatcatcccctttttgacttacggaatgttacggaacctcactaattgtgcaacaatgct

SEQ ID NO: 113224 - DNA, 439 bp, Glycine max
  unsure (1)..(439): unsure at all n locations
ngtagctgaagttcttgagaggtgctgaatatggttatgcaataacaaaagacacattcccctgctttcatttactggaagttcaaaggtacttcatctctctcttattttgattaaacattgtaatctttatttttatgtgtttacaacgtacattaaattttcatgatagtatttttatgttacgacctctactagttagctatcaagtgtaatttattataattttttgtaattcattgttttgttggttccattggtttttattctaaatacctattcttattttataacatatatggtagtagttgtaacataaaaattagtattgaatcttaggttatgcttcttcccccaccaattattccttttagttagaataattattatnagctttcttcttaatttatattataattttgngggggacttacttttt

SEQ ID NO: 113225 - DNA, 389 bp, Glycine max
agcttcgtccgcagatccttcatgttttattgggcctaaactaaacaacattattgtaagaacataattaaaaccaaaacttaatatgcagatcacttatgtaaggctaaagttcggtcctacttcaatcaagttctaaggcaacagtacatttcccaatgctaaagtcacctaactgtgcacacaaatgggtgatcagaccaaaagcatacatacatcaagcattggacatagaaaacacaatccattagatattatgtatttacatcagttggtcattagaaatccccaactagggtgtatagccagccattacaaagaaaccctaacaattaatgaaattaaaaacagagaatgattgtttcttacacaagaaggagtattcctcc

SEQ ID NO: 113226 - DNA, 417 bp, Glycine max
  unsure (1)..(417): unsure at all n locations
cttgtgtaatcgattacacttatttggttatcgattactattgaatgtttctgaaaaaatcaaaagacgtaactcttcaaaagggttttgactttttcaaattggtttaaagtttttctaaaagttataactcttttgaatggtcctcttgaccagacatggacagtctataaaagcaagactttgtttttttcaaaatctctttgaacttcttcttcttctttgtaccaaaagctttctgaagttttctagttttccaaaccttgaaaacttgtgctattcatccttntcattctcttctccctttgccaaaaagaattcgccaaggactaaccgcctgaattatgttgtgtctcttttctcccttttccagaagaacaaaggactaatcgcctgaattcttttgtgtctcccttc

SEQ ID NO: 113227 - DNA, 389 bp, Glycine max
  unsure (1)..(389): unsure at all n locations
agcttcttagttgaagtgctntgaatgttgagttgngacaaaaacaaaccatagtatatcatactatcataagataaaatntaggtgcagtttcattgcttctagtgttgatctttaattaaaattagaattttatcctaataacccaatgataaaggtgtagattaatcttgaaacactattgaggtgaaattacatttttttttatttggatcctcagtataatccaagttaagctggatgaactcatttaagagagcaaaacccttctggtgcattnttttttcattctcattactcaaaccccataccttatttaagtaaaaccgagcttcttgtcacttgaaccaatgctaggtgaaattattaaagttaaactattcatttgt

SEQ ID NO: 113228 - DNA, 464 bp, Glycine max
  unsure (1)..(464): unsure at all n locations
gacctataaaactaagcttgtatataaatgaactaaacttaagcaatgcacaatttgatttatttgttttatgaatcgactcaatagatagataaatagatatgaactgaacttaagctatgtacaatgagatttgtttggtttatgaatgaactcgatagatagatagatagataaacagacaaacaaacaaacacatatatataataatatatttattgggtaaatacccatttacgtctttaaatatgttaggcgctgacaattaagtcccataaagatgaaaaattaaaattttgtcctcgaatatgtacaaagtgcaataaatttgtaatattattaagtttcatcaattaactcaaatggttgtgtctatgtgacacctttggtgatgatgtgacaactaaccattgtcacatgtcattcacctagttgtcatgtgtcaataaatntactttttaatt

SEQ ID NO: 113229 - DNA, 407 bp, Glycine max
  unsure (1)..(407): unsure at all n locations
ggatcctcccaggcgacctgcatgcctcgccgcttaacaaaacctatttctatcatgttcttggnctaaggctcaccaaacccaaggatcacccttggtgagccctttcgtttactaaattcattcttccacaggaactcaaggtacgaagggtctatccttgataatcttttctatttctaacttttatttgtgtacgaatataagtatataaaaaatccaaagtctgaccttggtacataaacccaaggtttacccttgatacacacttttacaaaacccaaggcaccccttggttcgctcactcgcaacaactacaatgaccagcaccaacagtccaagttcaaccaaatgaactaccaacagactatttggctagaccttcaatcaggtggagtcatacttgc

SEQ ID NO: 113230 - DNA, 457 bp, Glycine max
  unsure (1)..(457): unsure at all n locations
ctatagacccctcaagcttctaactatctctttaatgttattactattgttctctgcttctatctgcgtttatgntacatatttgtggtttgatcacccatttatatgttttgttaggctttgagtattagaaaatgcttaaagtccttagaacttggtagaatagctagaagtctgcatttctaggaatagtgtgcagtaatctagtaagtgttgcatcttgtgcgtagtgcagcccgcttagaatgagtttgttgaggaatcaaaaacaaaactaagagggttaggctctttcatgtgaggaattatggtttgagtaatttgacggtgcaagaacattaaagtaatattgaatagagaaaaacccatttagttacagcaagagaaagttcagtagaatactccctgatgttttatcttgaatttgnttggtttacagttcggcgttgtttgttat

SEQ ID NO: 113231 - DNA, 234 bp, Glycine max
  unsure (1)..(234): unsure at all n locations
agcttgaaatgaggaagtgcggaaaggtgaaacttccttcttttatcgncgaccacaaactggtacctggacatatgtcgcgggggtcaagaaaccttggggacgttaagtggggtgctattgtccaaaaccaagcttgaccaatcccgacacaaccccggcatagtcangtcagtgagaacctgtgatggtcctaatcaggtgagcttctggcacttacagataaaaaaacta

SEQ ID NO: 113232 - DNA, 441 bp, Glycine max
  unsure (1)..(441): unsure at all n locations
ctcgagcttcttctggacgctgaacaggcaactaactcctctntcttaaccatgccatgtgctcgcgactggtccctttcttcccttcgcaacttgagttcactattgctaccccatagagctccgcgaaatttgttccggccatactcttccttgcgagccctcttggtctcttgttcaagggctcttgcggtaattgcattctcttcccgtaacccggcacactccttccgaacgtgtgtagcggccaacttgaacttctccttggcaagttttgcctttcctaactcgcttttgagagcttggacttctttgtcttcttccggtgcttcaaaattctcttcgctgacgacttttaacttggcgagccaatctaaacctcgtatatgaactttcagccattcgtggtacccaccaatgatgccattacgaatgcctcta

SEQ ID NO: 113233 - DNA, 381 bp, Glycine max
agcttcttgaactatctttaaaataattaacgaaccaaaattaactccagttagccacttaaattggattaatgatataagagggtagtttggagttgattataaaattgaagtctctatgctcccgaccttattcaaaaatacgaagcttcttaactatcggcaaaattatagacgaaacaaaattaaattacatggcaatctcaaatgaaactttcgtaagaatgaataggacgacatattcaactagattaaatcatattattaagaagaaaataagataatagtgaaggaatgaagtcaatgaactataggtacttgttgagcttcgattttgtgttttcttgatcttgagtcacttatctatttagaaatgatcat

SEQ ID NO: 113234 - DNA, 439 bp, Glycine max
ttttggagaaatgaaatacatcacatacttgtcctccttatgtcggacaatatttgttttcttcgttgttgcagtcggtcacaaagatacccaatgctacagatctgaacccaaaatgcaagaaaaccaagagaaaacaacatcagagaaggctcaggaacaccaaaaaatttaagctttgacagagaaagcaagcacacgaacctgtattcatggagtttgaagataaaaatcaaagcttttgtcttgcaaaggaagaacaatactcaaccacaattaaataaggttgaggaacacaaaaaaattcaatcttttgtaccaacagaacccagaaatcaaatatatcacaatgaacacgttggagaaggcttagaaacacaaaataaaggcataacacccaaaaaaaatcaaatccaaatcaaatagtatttgtacatga

SEQ ID NO: 113235 - DNA, 404 bp, Glycine max
acctgcggcatgcaagcttattgatggaatccatagtggagtgtgtctcattgtaacccaagacattgaagaacggcgccgcaaattatacaatgattgtcagagagagacaagaaagttccaacacatgattcataagtcaaaattcaagataacagtatgacaagacactctacagtctacagaaataagtaaaaggaaaaaactactaagttaaacaacctataactgattattttttataaaaagatgaattattttttaattaagtttaatgttgaaactgaaatatgtacactgatgcccatgttaaccagcactcttataatgtaaaagcagatccctatttgactcataaaaatagataactataattaatgtataacattattttaaattaagta

SEQ ID NO: 113236 - DNA, 453 bp, Glycine max
cttgagaagcaaggaaggtagcttccttgggaagcaaggaagaaagcttccttgaaaagctagaggggggctactcccacccctccaatagctaagctcacccccatgcctaaatacatgaaaatacaaaaaaaaatccctacttcaaagactactcaaaatgccctgaaatacaaggctaaaaccctatactactagggtgcccttaacttgtagggtatcttacaaacctaaaatggccaaaatacaaggcccaaaagaaggaaaacctattctaatattcacaaagaaaaatggacccaaccttggcccatgggctcagaaatctaccctgaggttcatgagaaccctagggccttcttcagcaactctagcccaatcctcttggagccccttgctcgtagatctggtgactgatcccttcctagggaggattgcatcagtcccaatata

SEQ ID NO: 113237 - DNA, 399 bp, Glycine max
  unsure (1)..(399): unsure at all n locations
agctngcacctcttcactctcctcaggcatttcaacctcttccccactcagactctttagccttgggagctaagttatcccttgcgttctagacttcaaccatttgggatagccggctattacacgattgctacttcccctaaggtctttatcttttctttctactttattccatgccttacggattctctgaagtgtctttgcattcacttcattgaaacctcacacgatgaaaggcgcgataatctcctctgatggtgcacctctcataaggtaacccaactgtcttatggtcaacacgggattataattaatataacccctcatccctatcaaagggatatttggatatccttcacatgagcataacactcctgcccctccttctntccaccatgg

SEQ ID NO: 113238 - DNA, 453 bp, Glycine max
  unsure (1)..(453): unsure at all n locations
ctttggtacaaagaagaagaagaagttcaaagagattcaaggcttgttaaggattgattagaaaagtgttcaagatattttaaatgcaaaaaaaaaccttgcttttatagactctccatgtctggtcaagaagaccattcagaagagttataacttttagaaaaacttaaaacccatttgaaaaaagtcaaaacctttttgcagagttacatctttagatttttcagaaacaaacactggtaatcgattaccaaataagtgtaatcgattacacaaagcttttgagtgaaacaatgtgactcttcacttttaaatttgaatntcaacgttcaaggacactggtaatcgattaccaaaatattgtaatcgattacaaccttttgaaaatatttggaacgttgtaaattccgtttgaaaacttttcaaactcattntgctactggtaattgatta

SEQ ID NO: 113239 - DNA, 410 bp, Glycine max
  unsure (1)..(410): unsure at all n locations
acctgcggctgcagcttattctacgcctgaaaaagatgatgaactatctgcacaaaaaagaaagcctcctgatcatggaggagctaacaaaattttcatgcaggtggacctttttctaatagttctgacttgcagtacccttttaatccttttccatttccacctagaacaatntcaaacaaaaagatggaagaagtggaataagagatcttggagaccttcaggaaagtaaaggtgaacatacctctgctagatgccatcaagcaaattccaagatatgccaagtttctaaaggagctgtgcacccacaaaaggaggctcaaaggaaatgaaaggattagcatgggctgaaatgtgtcagcattgataggtaaatctgttcctcacattcctgagaaatgtaaggaccc

SEQ ID NO: 113240 - DNA, 420 bp, Glycine max
  unsure (1)..(420): unsure at all n locations
actcggtgttgagagaaaagatgatatgggctacgtgggagttcgtgagctcagttggaggtgggcaacangggatggtgggtttatgcgcgctctgtggatgtggaaaacttgttgtgcaccatcgcccgaccgccacctaataccacatgtgatgggtaccccataatcctacaagcttgagatgaagaagtgttgaagggtgaaacttcctgctttattgttgaccacaaagtggtacctggagatatgtcgcgggggtcatgagaccttgtngacgtcaggtggggtgctattgcccaaaaccaagcttgaccaatcccgacccaacccgggcatagtcagtcagtgagaacctgtgatgttcctaaacaagcgagctcctggcagttcacaaataaaatgaacaaagaccacaaa

SEQ ID NO: 113241 - DNA, 349 bp, Glycine max
cccgtcacagactctacggtacatgctcctctgccgaccaccacacagaccttagcccttctgtgcaacaatctgaaactatggaacagcctgatgcccatgctacaaaacattacaagagaactgcctaaccttatcaacacaatcagccacaacagaacaattatgacctctttagcaacaggaacaatcccgagtagaggaatcatcccaaccttagatgggcgaatcccttacaacatgatcaccatccaccatcaccctatgttcttaatgctactggcccatgcagaccatacgatcctccaccaaccaccagcaacaacagaacagtcccagatacacaaac

SEQ ID NO: 113242 - DNA, 314 bp, Glycine max
ctgaggcatgcaagctcgacaagaaagcaaaacccgtatttcttgttatgtaataccacaaccgcaaaggcctacagaaaccacccaccacagaccacacacaaaacgacagcagcgacgccgaaatcccggagaaagaacgaagggactggaaaaatgatgacaagcccgacgtccacgaggagaaagaagacgcggatcgaaaaacccatcagcggaaccagatcccatcacacacgcaccacaggtggaaagccgccgaatggagcccgagggacatgagaaagccacacctgatcacaaatggagaaacg

SEQ ID NO: 113243 - DNA, 427 bp, Glycine max
  unsure (1)..(427): unsure at all n locations
aactacgcctctaaaagggatatttcagactacaagatgactttttatttttatatatgcactacatagatcaagtgacagtaacttggacaactgtgcaaactgatgtgggatttcaccagaaaaattagctacagaaaggtttaaatatcttaactgtgaatactcaccaatgctcgatgggatntgagattgaatgaagtgattatcagcaagatcaagactttgaaggtgtttgaggtgaaagaggctgctattagcacccattgtaccaaaaatctgactgctactgggatcaatgccaacgacatgacctgctttctcatcacattgaatgccatcccatgagcagcaatcaatgttgcattccaagatactactttaggataactgaaaggattattagaagacttactaataacaaacc

SEQ ID NO: 113244 - DNA, 381 bp, Glycine max
agcttatggcgcattaaattgattttattctgagctggatgaagccaagcgtttatcataagcctgtgtacattctgtgtaaaaatctgctatattagagagatattgggaaaggcaatgagtgggttacgaggttgcaaatcaaaattggaattacatggaatgtctactggagagctttgattaaaattagaatggtgattggccttaaattataatgaaatcaacggttaagaatgggtgtaatttttgtaaaatcctcatatatatatatatttatatatatatatatatatgacatttcttaatctttgtcctgttattatatcatatcatttattatatctactattttctcttatttcttgttcctacgtggtg

SEQ ID NO: 113245 - DNA, 446 bp, Glycine max
  unsure (1)..(446): unsure at all n locations
tgttctgtttcttgatcacctgttggagaatccatttggaaactcttactactcagcccagcacctcctttctcgttctctggtccttcaagcacatgacccctttttggtatttcaagactggttagatctcttccaaaaatctggaattgcctcgtcttatgtcccactggtgcagaagtcctcttggtttccatcaaatnggccttctcttcagcctccaagccactcatgttctcagtgaagtcctcttccgatgagtgatattcctcatcaactgaagtcatctgcacatagcatagagaatttcctcagaatattntctcatgtcgtttaaacatctaaagcactaganaggaatgcatagcctttaaatnttgataccttgacataagaaagctgcacgtcattctccagaaggaatgaaatatattccttgaaattct

SEQ ID NO: 113246 - DNA, 455 bp, Glycine max
  unsure (1)..(455): unsure at all n locations
gacctatgaatctcagcttgcataggctcattcaatcacttagtgcaccatatgtttgtggatccattccttaaaagcccgagggagttatgaaacaaagtattaatattttgcttaataccatatcaaagagaagaagtaatatgtgcccaagtgaaatgatgattgtttgcaactctagctcacaacgttaaagcccattgcacatctgtagaaactagctcccaatcaagttgccttgttgatatccaagaccaatgataaacctgaatttgactatatttngatgtgaattatcatgtcatatccatgcatattgatatatgttattatggcaaactgatggttgggtattaattcgtgaaagacatgtgcttaagacgctaaatgtggaaaagaactaagaatcatgaactttttcacctaattagaagatcatattccacgtgattttg

SEQ ID NO: 113247 - DNA, 265 bp, Glycine max
  unsure (1)..(265): unsure at all n locations
agcttatantcaagtaggattgtctgtttttctaaacatctaaggctcacaacaagcattagcctatgtaaatttctcttcgacatgactactcaaatgagtagcaagtaggaattatcaccaatatgtcatagtttgcactacacctatgagcatatattaagctccacttgccaaagttgaaaatgaaaatggccatctgcgtccaaaaattatgcgagtacatatctccggcgataggtatagttgtcattgacaaacaaga

SEQ ID NO: 113248 - DNA, 310 bp, Glycine max
  unsure (1)..(310): unsure at all n locations
ctccgctttacgtcttacctgttgcaagtactggatatacttcacatggacttgaatgtgcctatgcaagtggaaagcctcctaggaaagaggtatgcctatgaccttcgggatgatgactgcacatttacctgngtcaactttgtcagagagaagtcacactcctttgaagtattcaacgagtcgagtctatgacttctgagagaacatgactgtgtcatcaatagaatcatgagtgaccatggcagacagtatcagtacagcaatgtgcactgcattctgcacctctgaaagcatcactcatgagttc

SEQ ID NO: 113249 - DNA, 390 bp, Glycine max
agcttcttatccaaggctcatcttggtggtgaagctccttcttccatggcttattccttaatggatggcgcctcctctcacctcttttcctttggctttcgctgcatctccatggtagaaaatcaccattaaaggaccccattgaagctcaaagatccagcctccatagaagccccacaagcaagcttccatcaagtggtaatcagagcacaagagcttcaagtaggtgctccttaaacctccattaattttttgctttaccctctcttccattgttgtttcttcattttttctccatgtatctcctcacatgtcttgtgataaatgtttttaacatgattctttagagtttccaccgattaaacttgctctagaagctatatttgattt

SEQ ID NO: 113250 - DNA, 233 bp, Glycine max
agcttgtagtattaccggggaatcgcctgttcatattgctttaaagtctttagaggctactacctcgatgacatcgtttggtccgaatagaattgccacgacaggtctattggtactgactctgataattggtacttgatattgtgtcgcaggaagtaattctgcaacgatatatatatatcatatatatctatatttacatatacatatatatatacatatatatgtatata

SEQ ID NO: 113251 - DNA, 351 bp, Glycine max
agcttctacttatgtggtttcgctgtgcttccctcactttctagtgcacaacaccagactttaacactgctattctttcccgcaatgctatttttcatatacgcctgagtgggcgataacccaaaacatacttcccacgatattcttttgcatttataaagctagctatgccaccggtgcctttgtctaaaaccattccgggttcgtaatactttcccaacataactcgggcaaatataactgctgcatctgacaaacaaggctgcccagagaaggagtccatggaggaaatgctgaccccctcaaagactggaaagtggtttctaacgaatcttttgctgcttccacata

SEQ ID NO: 113252 - DNA, 445 bp, Glycine max
aaactcagcttcttgagaaacttcctgagggctagagcttacttccatacccctctaataactaagctcacctccttgagaagattcctaatgaagctagagcttagctacacacacctctctaatagctaagctcacctccttgagatgagaagctagaacttagctacacaccccctataatagctaagctcacccccatgacaaaatacatgataatacaaaaaaaaatccctactacaaagactactcaaaatgcctcgaaatacaaggctaaaaccctatactactagaatggccaaaatacaaggtctaaacgaaggagaaaaaatctattctattatttacaaagataagcaggctcatacttagcccatgggctcaaaatctaccctaaggctcatgagaaccctagggcctttctttgatctttggccaattactt

SEQ ID NO: 113253 - DNA, 328 bp, Glycine max
acggccctcttatgtttaaactaactgaaattgagtttcgaccgcagaaccctcttgtaagactagactttgcttaagcagctgatcaaaggttaacctaatttagcctaagccttgcccgctgatccctcttgtaagactaggcctagactaacaacatttttgtaacaacattacttaaaccattacttaacccgcagaaccctcttgtaagactaaattttgatcctgggtcaatcagggtctaaggcaacaagtcatttcccaatgctaaagtcccctacttatctcacaatgggtggatcaaccaaagcattcaaacattagc

SEQ ID NO: 113254 - DNA, 416 bp, Glycine max
  unsure (1)..(416): unsure at all n locations
ggccgcccagctcgcccaggcgagcaaggttgcttcctctagtgggcctggttgctatttgcaccccccctttttactaaatgcaccccactactatttttttttgtaattctttttccgtaacgttacgaaactttgcgaatttcgtaacgatacttattttccttccgcaaggttacgaatccttacagattatgtatttactctnttttagctttcgaagaagttacggaaactcacggattgcgcaaaaacacctcttttcgatttccgccacattacggaatttcacggatcgcgcaagcctgcttccttttgatttctgagacgtctcgggacttcatttattgcatgtcatcaagtaataatccccggatgaaattanggtatgacagctggtccaaaatttaattgga

SEQ ID NO: 113255 - DNA, 293 bp, Glycine max
  unsure (1)..(293): unsure at all n locations
cttgatctagctggattcatgggcaccatctagacttggcattttgtctctgcgttcatgctacagacgcacactcccatttttgcaaaaccgtcttcgagtgtgatcggagcagctcctagatcgcttgtggggcgcacgactagacttntattgcgttagagtgggagcacataccttgccgcattgattcatggtgctgctcngcctcacgtctctcttttcaaatgcctgatgtataaacacgagcgccaacgcttacccattctcgttcacaatttgatacatgccct

SEQ ID NO: 113256 - DNA, 391 bp, Glycine max
  unsure (1)..(391): unsure at all n locations
gctnganggaaaacttgatgccttggtcaacctaataactcaacttgcaatggaaaaaaaatctggacctggtgcaagaatcgggggtctatgttcttctgaagaacaccatacagatcttttgtcttctttgccgcaatttggaatcaatgagcaacctgaagcttatgctgcaaacatttattatagccccctcagccgcaaaaccaacaacagcaaaataattatgatctttcaagcaataaatacaatccaggtttaagaaatcatccaaaattgagatggacaagtcctccacaacaacaacagcttgtccctcctttctagaatgctgctggtccaagcaagccatatgttcctcctccaatacagcaacaacaacagtcacaac

SEQ ID NO: 113257 - DNA, 441 bp, Glycine max
  unsure (1)..(441): unsure at all n locations
agtagatgccactcttctccagagttttgaaggatatgctgactanggaaacacaagtatattcaccaggaaaagattgttgtggaaggaaattgtagtgttgtgattcanaagatccttccaccgaagcatgaagaccctgngagtgtaaccattccttgttcaattggagaagtcactgtgggaaaggcttttattgacctgngagccagtattaacttaatgccactctccgtgtgcagaaggttgggagagttggagatcatgctcactangatgactttacaacttgttgaccgctccattaccagaccatatggagtaattgaagatgtgctagtcagagtaaaacattttatcttcccggcagactntgtggtaatggatatctataaagataatgacattcttgtaatattaggaaggccattcatgctaact

SEQ ID NO: 113258 - DNA, 392 bp, Glycine max
  unsure (1)..(392): unsure at all n locations
agctngacacgatagctctctgcaaaaacaacaacttatgatatctagggatggtggtatgatctatgccctaatctttaacccagaattatatccagaaaaaccttagaatggaatgaaaatatcaaaaccatccatcgaaaaattgcgtatgaactccccgatgaactgattgcattggtgctttactttgaatctttcatatagaactagaaccatcattagttcctcatccaattcggaggattgaactcgttattctagtgtgatgccaatggttctcattgaaaaaataacagttgaagtttgtcctttcatgctttttatgattctggatctatggattggtaatgacanaactgcatcaagattatgcgctcatcctgttcact

SEQ ID NO: 113259 - DNA, 458 bp, Glycine max
  unsure (1)..(458): unsure at all n locations
actctagatactaagctgcttcttaaaaaaaaatagtattctctccaatttgttacgttctccacttaaatctgaatccttgcaaatataatatttagatggaatattacattaaaaagaaaagacaggatagattgattaccggtaaagtaaagcagttatgtttttattgggccgaaataataagaggagccacgagtgtctataggtggccaccaactgcataataatagtacatgctatgcttgctaatgttacggggtccaagtccaacacatccgtgattttgataaataccaacgacggttgcgcgagctcacagttactaatctcacgcacattctttctctctctaaattctgcaccacaatccgcaaaatgaccaaatacttcttgctgtgaatgtcgaanatgcctgcaggcacaacatgtgaagtgatgcanaacggcaacacttg

SEQ ID NO: 113260 - DNA, 398 bp, Glycine max
agcttaagagcgtgtaacccaccatcttcttatagtttaacactggtaatgtgtctactatcattggtatcatctccctcttcatcattgggggcgctacttgagctaccagatttctccacctttgggtgtattcttaaagattcatgctccttcttacacatgttttgtagctacctcctatcccgagctatatcagaattgtactaatactgcctaatgaaggccaccattaggtccttcctagaatggacccgggaaagttctaaattagtataccaggtgatggctgccccaataagactttcttggaagaaatgcatcaacagtttctcatctttcgcgtacgcccccatctcccgacagtacattttcaggtgattcttggggcaagtagt

SEQ ID NO: 113261 - DNA, 401 bp, Glycine max
aagcttgtgtattatggggtacccattttatgttgtactaggtggcggtcgggcgatggtgctaaacaattcttcacatccacaaatgacgtataacccaccattccctgttggccacctccaactgagctcacgtacttccacgtaaccctatattcgatcctctctacgcctggttcccatcaatctctccacgcttacacaacatccaggtaattccacatccaatcatcatggactctacaataccagcataacagggcaaaggcagaaaactctgtccaaaacacataccaattatacagcttttcacatacaaataccccagtaacacttttcttcttttcaattcggtacccgttggatcgactcttaaattttactgggaagtcctattacat

SEQ ID NO: 113262 - DNA, 438 bp, Glycine max
  unsure (1)..(438): unsure at all n locations
agacactatagcaatgtgaagctcctggtttagctttacccgagtatactctactctttgtatgtgaatgtgacgctagcggagttggcattggggctgttntgatacagaacataaagcctatagcttatttctcggagaaattgggaggagccagattgaactattgcacctatgacaaagagttctatgccattgtaagagctcttgatcattggaatcattatttgcggtctaatcactatatattgcattcagatcatgagtcattgaagtatatcaatgggccgcagaagttgagtcccaggcatgctaaatgggttgaatttcttcaatcttttaatttctcttcaaaatacaaagatggtaagagtaatgtggtggctgatgcactctcaaggaggtatgctataatttcaaatcttggaactcgttact

SEQ ID NO: 113263 - DNA, 360 bp, Glycine max
  unsure (1)..(360): unsure at all n locations
agctngcacaagtaactaattttgtttttggtaaaaaatgaagtaaatatgataagggaccacttaagatcatcttgaaaacaagtataaaaagaaaggaacttgacactaaccacgacctgcagatagaaccaaagttattcaaagaaacttgaccctaaccgcgacctgtcagtagaaccaatgttatcaaacgagcatgaccctaactacgacttgccggtaaaaccaacactatcagtntttaacccaagaacaagggaaaaactctcacaatagaaaaactctcaacatttattaatattcaaaatctacctaacaaagtgttttaaggagtctatttataactcctactaataa

SEQ ID NO: 113264 - DNA, 406 bp, Glycine max
  unsure (1)..(406): unsure at all n locations
ntttggagtagaaacatgggaccaactcattntatttcataaaaagaaatcatatctagtcaaggtctgagagaccatacaagtttcctaacgatttctaattatgtgggccattaagtctatcatatgctgacaatagccgagaagcccatgaatctcttcgggggcggagtaggtgtctgccatcgccttggccttggctaacaatcggggaagttcttgactcccgttcaaggtaagagcaaaccgatccatccacatggttgcctcttggtgtaaagagtcgatcacccttcctctagcctctttttccgcatatacttgggcatactcatccgcgattctatgctcgtgggccgtggctagacccaactcttcttggtacttggcgatgatagctaacatg

SEQ ID NO: 113265 - DNA, 284 bp, Glycine max
  unsure (1)..(284): unsure at all n locations
agcttgtgcanatcanatcactcctacatttcatctctagcatgcattttctttctttacccactccttacgttggtttttaaggaaaaacacctaactaacccgccgaagggatccctatcgcaccagatccaaatctagaacgatgggtgatcaagaggagacgcatgaacagatgaaagccgacatgtctgctctgaaagacaaatggcctccatgatggaggccatgttaagtatgaagcagctcatagagaagaacgcggccaccgccgccgctgtcag

SEQ ID NO: 113266 - DNA, 431 bp, Glycine max
  unsure (1)..(431): unsure at all n locations
tctntgagaanacttccttgagaagctagagcttagctacacacacccatctaacaactaagctcacgtccttgagaagctggagcttagctacacatccatctaaaaactaagctgacctccttgacaacatacatgaaaatgcaaaaaaaaagtccctactacaaaaactactcaaaattccctgaaatacaaggctaaaaccctattctactagaatggccaaaatacaaggcccaaaagaaggaaaaaaacctattctaatatttacatagaagagtggatccaaccttgacccatgggctcaaaaatctaccttaaggttcatgagaaccctagggccttctttagtagctctagcccaagcctcttggagtcttctatccaatacccttggggggtaggaataccttggccgacaatgagctgat

SEQ ID NO: 113267 - DNA, 388 bp, Glycine max
  unsure (1)..(388): unsure at all n locations
agctttcaaattcttacctaacaagttccttanaagntgagatatagtttaatttaccagaacgacgggcataacacatgggctcaaactttctctaacccatccattttccatcaagctctccacttgtctttggctctcttttgcttcttccggattacttctatatgctggcctatttgttaccgaaactcctagcatgacataaatntggtgctctatccctctcaaaggaggtaacccatgtctttggagaagacatcccanaactacttcaataattcctccacacctataggcaaagaactagcaatagaagacaaacaataatcatgaggcattagtaaatacataggtttcctagctagcatcactctcttcatctctt

SEQ ID NO: 113268 - DNA, 394 bp, Glycine max
ctttgacggactataccaagctctaggaaccagggacggataaagatctatatataggcttgctaagggtagagagaggaagactagagatttggatcaagtaaagtgtgttaaggatgaagaaggcaaagtcttattgcatgaaaaagatatcaaggaaaggtggaaggcgtatttccacaacttatttaatgatggatatggatatgactctagcagtctagacacaagagaagaggaccagaactataagtactatcgtcggattcagaaacaggaagtaaaggaagcgttgaaaagaatgagtaatggttaggcggtggggccagacaacatacctattgaagtgtggaaaactcttggagatagaggtcttgagtggctcaccgaactc

SEQ ID NO: 113269 - DNA, 413 bp, Glycine max
  unsure (1)..(413): unsure at all n locations
cccgggatcctctaagcaccgcggctgcagcttgttgcttcttatatgttgttttcctctcagatctttccattcttttcttgaaactcgggtaatcaactctcagatgtcccggttgattacattcataacactttggaacaaaagaagaatcctctcctcttttctttgggtagaagtttgatcctctttgattttctttgtttcttaggaatttatttaatctctttacgaagaaattgaaatcatcatctcttctatttcattcaagtcttctttatcactttcttcttgaactgaagataaatctttaagtgtgattcctttctttttcttgtcattttcttcatgttgatttagtctcatgagttccatttcgtgttcctgaagctttccanaaagagttgcaagac

SEQ ID NO: 113270 - DNA, 417 bp, Glycine max
  unsure (1)..(417): unsure at all n locations
tataagaaacgaaatgccgaaatcatttccaaatatgcatgtgaattangaagcatcaacaagaatcaagccaaggctattgtgcaagcaatcaatggggcaaaacacaccaaaaaattatgatgatggatgactcgaattctcacaaaggtaaacttatcactttcaaattgagctttcaaaactatcatgacatgtaaaggaaaagcaaggatttcaagtcacaaaatgtcaacaaacttttattttcagaacaattacccattacttgaacatatcctataattcanagacaaacatgcaaatntaacacaacaaaactaagaaaattaaactaatttaacacgactaacataaccaaaaccaaagaacacattccccccnccccccaatacttaaacaacacattgtcctcaa

SEQ ID NO: 113271 - DNA, 417 bp, Glycine max
  unsure (1)..(417): unsure at all n locations
gatccctagangcacccgcggcatgcaagcttctatagaaggttttttcctattttctctacaattgcatcacctctcaatgagcttctgaagaacaatgtggcattttacctgtggtgaaaaacaagagcaagcctttgttttgctcaaagaaaaacttactaaggcacctattctagctcttcctgacttttctaaaactttcgagctacaatgggatgcctctggagtgggagttggagctatattgttacaaggtgggcaccctattgcttattttagtgtaaaacttcattgtgccaccctcaactaccccacctatgataaagagctttatgccttaataagagccctcctaaattgggaacattaccttgttttcaaggaattngtcattcatagtgatcatcaatcact

SEQ ID NO: 113272 - DNA, 378 bp, Glycine max
  unsure (1)..(378): unsure at all n locations
acactatagaaactcagcttccagttatggagagctaaatcctctgttggttctttcttgtaggtacttaatgtaaatacctgtatatctattttatgatgttttatgtgttctctgtgctatcagtacatcagttcaatgttcttttgccttgatcacgtagatgcatgctttgttaggatcattcaacagtggaaactaatttgatccttagaaattgataggacaagtctagtttatcgtattatcatgggggatcggggtacggtaacctggttggttgtatgtntgtcttaatgcggttctggtcgagtttagtccaacgagaggaatttgaagatgatgcttgaacaggattaggctagactatcatgagca

SEQ ID NO: 113273 - DNA, 340 bp, Glycine max
ccccgggaccttaagtcacctgcggcatgcagcttgttaataattttttaactttttcgaaacagaccgccatccaacaaactgcttttctcttacctgccagcacttcttcttcctctttcttaaggacccttcatcctaatcttcaaatctataacttctcattcttacaaattactaaacagaggaaacttcattttttcaatcttacaacccactgaataaaatctacgaaatactccaaggaaatcattaaagaaaaagctcactcccccccgtgagacatgcgcaccactctgggaccaccaccacctattctttttctacatgtattactctt

SEQ ID NO: 113274 - DNA, 430 bp, Glycine max
  unsure (1)..(430): unsure at all n locations
tggatggctatcttgcaagagttctcatgcttgccttccacaattggcattgcagagtaccaatgctcgccgcataagtgatttagaaccgatactttaaaacatcttatctcacccattcatagccagcaacagtaaaaggacgatggtgacccagcactgtggttactccgcacataaggggatgccctatcgtccctaccaccactcttccttgccccgaagaacataagggagacaaattatggtgatcaaacaagttccccgaccggagaagcagctgaaggctacaccctcccatgaaagtaagaagtgcctccaccagcatggtgtgataccctcaacctctccaaggaagaagagtcgctatcagaagccccacgacgagtctcctctgangagaaaccgctaatggagatgacctttcggt

SEQ ID NO: 113275 - DNA, 346 bp, Glycine max
  unsure (1)..(346): unsure at all n locations
tgatccctgagcaccgcggctgcgctttatctacgagaaattattctgtctcagcctcttagacatgctcatttgcacgatgctggattgaaccactttcataattctgttaacagggtagtttccaggctcccactgcagctctatatacttatctcatgtgctgagccttcataaaatttggaaaaaagctgtctaaatctggggtgaggaactggccataattttaaaatctctcccagtattcatatacgctctctccattgagttgtctaatacttgaaatatcctttctgatggtcggggtcctagaagcangaaaaatttttctatgaatctctcttga

SEQ ID NO: 113276 - DNA, 436 bp, Glycine max
  unsure (1)..(436): unsure at all n locations
gcctctaaggaggtgagcttacttatgagaggggtgtgtgtanctaagctctanctccttattgaagttntctcaaagaagcttctcaaggaagttttctcaagaaagcttctcaaggaagctacctagtctataaatagaagcatgtgtaacacttgttgtaactntgatgaatgagagtcttgtgagacatacttcaaagatccacttctctccctcttttattccttcaatttcgtgctcccgcctctctctttctctccctctttcttttcctccattgaagcatccttccaagcttcttatccaaggctcatcttggtggtgaagctccttcttccatggcttattccctagtggatggcgcctcctctcacctcttctcctttgtcttccgctgcatttccatggtggaaaatcaccattataggacctc

SEQ ID NO: 113277 - DNA, 369 bp, Glycine max
agctttttattcttgtgagaggattaatctatttgggcaatgaaaaactctctttaaaattctggtttccaggtaccctttatgggccttcataaaacaattgatagaatggacttttggaaattattttctgaaaatcccctctgggtaatcattaccagacttgggtatccattacagggttttaaaaatttgaataaaacgctcaataaactgctggtaatcaattaccattcatgtgtaatcaattacacgttataaattttgaatcaaatttctagtgactgttataaacattttcaactgctggtaatcgattaccagagagcaaatctcagtttgaaatgatagaattctttggtcaaacct

SEQ ID NO: 113278 - DNA, 438 bp, Glycine max
  unsure (1)..(438): unsure at all n locations
ngtgcaaatcaagtcactcccgcgtgttatctctagcatgcattgtatgttggtctcgtcctttgtcacgggaagccggaaggtccatatcaccttcttaattgtacacatggggcactgcgcccccaaatgcacaagtaagaagagataattttccgggctctcgtgtccgtaaaatgcattcatatcatgcatcgcataagcatctcttcataacatcataatggacatatcctgcatttgtccgttatcatattccagcctcacattntgcatgagtcatggcatcatcatgcatatgcgttcaacagactttttgatctgcaaaattgcataccatttgttttcatgtttgctcatccttgcgttttcctctacaaaacaaaaacaaaagaagaggaagcgtgaaacttcacactacattcttagtttcatgtg

SEQ ID NO: 113279 - DNA, 412 bp, Glycine max
  unsure (1)..(412): unsure at all n locations
tgatccctaagcaccgcngctgcagctttaactttgtgtttcgctgggtcccaaaaactgtgagcctttcattctttgctcatttattttttacttagttttttttgcttttgacggaaaaaaagcctgacccttgtctgtttccgatgttgtggacttctgctgttgggctggatactaaagatgtcgactttctgttatcctggataaaaaaaaatgtgttggtgttgtttgtgtattttttatcttctacagattattttgggtcgttttcactttgttaggttcattgagggtatgggnttgatgcctgatctatatgtttatgtattttaatttttggttttttttgttcgagctaatgtttatttgttcgcctgattcttggatcgatggttactattatttcttg

SEQ ID NO: 113280 - DNA, 445 bp, Glycine max
  unsure (1)..(445): unsure at all n locations
gtcaacctcnggttgtagaagaacaacctctgcttcatatcagtgaacaacctataggcttgcttcaaatgtgaaatgagcgacaaggttatggttcaaaatagtgaactcaaatgcgaatgcagcttanggtgttcacaactataaattttattttttatnttctttcttttttattttgatttacaatggttttttaatataaaccggcgtaaattttattacacaaaacattctaaggcggttttcaataaccgccttataatgtgcgtcgtggattccaatatttatcacaataattacaaaattaccaccgtaccactttctaaagcggttcccttataaccgtggtagatacgatgtcttaaaaaggcttttttgtagtagtgatagtgtggataatgagntgaaaatcttatcgaacaatcgagtgcagatattattg

SEQ ID NO: 113281 - DNA, 404 bp, Glycine max
agcttatacatatacattccagcattttcttatctttcctgactgagaatcacccacgaagcttcacttgacgcacccctgctatggcctaaatcacctccttgagatgagaagcgtgagcttagctacggctttgaattccacgctccaaccctatactactagaatgggcaaaatgcaaggtccatagcccaaaagaaagaacacttattcttattttagcaagacaagtggaccccgccttggcctttgtggctataaatataccctgaggttcatgagaaccctagagcctcctttaggtactctacccaatccttttagagccttctgctaatggctctggcgactgggtcctttctagggagggatgcttcactttccattaacaaacccgagctcct

SEQ ID NO: 113282 - DNA, 418 bp, Glycine max
  unsure (1)..(418): unsure at all n locations
tcggccccgggatcttaatcacctgagctgcagcttcttcctttccatgaccggcattggtcaagatcctacacatgttggtcagttggacaaaagtaatggatacccatgacaaattcaccatcatctttacttctagttgggagccattgattaacttcacacattagacctctcctagcttcccctgataatgaagaaaataccttaccaggttcttaaacctaactgcatactctgccaccgacatgctcccctctttcgactctaagaactccatctctttcctatttttcacgtcttctggaaaatacttctctagataagtgtgtctgaaagtccccgatgggacaatagcaccacctgctccctccanacgtggacgagtgttctcccaccagtactctgcctcatctgc

SEQ ID NO: 113283 - DNA, 419 bp, Glycine max
  unsure (1)..(419): unsure at all n locations
nggtgtaggagttgtagagctagaagtggcaatgccatgatacttgtagctttggaaagttagtggaacttggaggtttaccaagaggtagtcttggttgttgagataaccactataaactcgttgtgcctgtttattttgttactctttttacatataaactaacctagggtttgaatttgattttgtctgaaaactcttgttttgccaaatttgtattcatcgtctaaacatgtttttgtgaaaatttgttttgttttacaaagttatattttagatgatacttttttagtcgtgaaaaaggctttaaagtttttaaaatcgcaatttaacccatattattngtgatattgcctttacagttaggtattggagctcaacctctataggttgagcacctgatgatgtctagaggacta

SEQ ID NO: 113284 - DNA, 341 bp, Glycine max
tttacaaaaattatattgggaactggaagcaaagcatgaattatcctcatttagaaagcattcaacacatgccattaaaagtgacaaccatggctcaaaaaccttgggtccttctaataaacgaagtgatgcatataaaagatatttctctaattaagaatggtcttgtgttctatgctgaaaactaaagtactaaacctccgacccttgtagattaaactaattaaaccaagcctcatccttacatccctcttggtggactaagcttaatttaacaacatttaatcacacattattaaaaaccaaaattctgcatctatccctagcaatgcaatatctac

SEQ ID NO: 113285 - DNA, 454 bp, Glycine max
cgaccttagaaactcagcttcccaacatccaagcaaaacaacattctatcagcacatgctatcacagcctagcaaaacagaacaaaggcagaatactctgctcaacacatcaaccaaaatcacagcttttctcacttaaagaccacagtaacaattccttcgatccaattcattaaccgttggatcgactccaaaattttaatgggagtctatagtgcataagcctacatttggaccgttgggatctactggcaaacatccagaactcattctgcactatactttccacagccaaccacacacaagcattttctctgcacttgtgcaaaattctgttgcacaatttctcagcaaatattctgcctaagtgcagatttcgaaaatcacacttcctctcatccaatcttgcccaaatcaattcctacaagttccagatcatgtatcaatcatgcct

SEQ ID NO: 113286 - DNA, 385 bp, Glycine max
agcttgttctccggcatttgcacaatgctctcaacattagaagaggatccttggggaaccttatcccgacgaagacactggcgtaaacttatcttttcctgtttggactaagcttggaacgctgggggcatggacaattcacttcccatgatacattggatgccactgtgttcgatgcctatatgacataatcttgattggaattgaagccatccttcctctttacttgaatgttaaggagcatgctaatcacgtctgactcgaacatctttctcgacatgcgtgaaatgcttacaatgtctaatgtaaagacaagactctgtctgtgtaacatagactatcgacccaatcttccatatgcctctgttactgatatacatctttt

SEQ ID NO: 113287 - DNA, 401 bp, Glycine max
  unsure (1)..(401): unsure at all n locations
gacctatgaaactcagctgtgccngacgagatggtgcttggcatgttctgctcatgattgctgacgatgcctacaacattgatttaccgggtgagtatatattaatccctactttgaatgtggctggactatctctcttcggtgctcgtgatgatttagatgatttgatggcaaatgcttttcaagacggaggaagtgattaggacatataagaccaatcccaagctcacaaggaagcccaagaccctttacaaggcatacgagggtccatgacaagagcaagggctataaagacccaagatgctttgccacacatagtggctaatttgagggcgatcctattgtatgaggggacccaacatctagaggcctgcatgcgtgggtagctagacacatgtatt

SEQ ID NO: 113288 - DNA, 395 bp, Glycine max
agcttgtaggattatggggtacctatcacatgtggtactaagtggcggtcgggcgatggtgcacaacaagttttccacatccacaatgcgcgcataaacccaccatcccctgttgcccaccttcaactgagctcacgtactcccacgtagcccatatcctcgtttctctcaagaccgggtccccatcaatcctcccaagcttccacaacatccaagcaaaacaacattcaaacagcacaagctatcacagccaagcaaaatagagcaaaggcagaaaactctaccaaaacaccaaccaaatcacagcttttctcacttaaagaccccagtaacaattccttcaatccaattcgttaaccgttggatcgactccaaaattttactggaagtctata

SEQ ID NO: 113289 - DNA, 448 bp, Glycine max
  unsure (1)..(448): unsure at all n locations
tcatgatgaatcaacaatgattcanaggtggtttgatgataacaatgatgacaacaaaagatgatgacaaaggtaatgaacaaaaagctcaaaagatcaaagaacaactcaagtgaatcaaagaacaactcaagtgaatcaaagaacatctcaagtgaatcaagaacaagtcaagagttcaagaatcaagaagaattcaagacccaagaagaaagcctacaatcaagaatcaagattcaagatctcaagaatcaagatcaatattcaagactcaagattcaagaatgaagaaaagactcaatcaagataagtattaaaaagtttttttaaaactttgaatagcacatgagtttttgacaaaacctntaccaaagaagtnttactctctggtaatcgattaccatattggtgtaatcgattaccagtagccaaatgaagtttgaaaagt

SEQ ID NO: 113290 - DNA, 326 bp, Glycine max
ataacttctatataaggagtgtaatcttatatgtcgtgattgtgtataactttatgctttattatatcagctcatctatgtgtattaataattcaatttcggtggtaggatgattagttatcccattattctgcatcgcttttaaatttattctccaacgtgtctaaaatagacatgtgaataaaagaaattaaggactgtgccgtggactttgttacaactaaaggtataaactagaatccagtaccatccgtttcatcatgtggagtgcttaaaaatcgagtgtcgttgataatttatggacttagaacattttgcgcacattt

SEQ ID NO: 113291 - DNA, 343 bp, Glycine max
  unsure (1)..(343): unsure at all n locations
agctttcatgaatatgtggaaaactttatatctataggggactaaaaatgtggtactgttcttatgttgcacttgcacttaactgatatttatgttccatatgtggcctttgtttttgcctaaattggggatgaactgcatttgatgggctatgcaagtggaaacctggatgggcgtatactgtctgaaaaattgaatgcccactctttcttcttgcatgcagagtggagtatacttatatggcatctgtgtgtttgcactgcgggttagagcgactgtgttagagagctcggatcctaccttaatgggacactggcgctatgaaatnacctcttgaactgtt

SEQ ID NO: 113292 - DNA, 305 bp, Glycine max
ctcagcttgcgactgaccatacatgtcgtgttcatcgtcatgtcactagactcagagcttggccaacaatgtggacataacagggccgtaattatgagtctttacaaatagatatctacatgaatttaatcaccaataacctcgagcacatggctatctttatccataatatattcactaatgtactgagtatatgattaattcaatctctacgttcttaatgattatacaaataactataggtccttcgtttatacttactgcgcactgttagctcctatcatgaataatgctcatctatttgt

SEQ ID NO: 113293 - DNA, 368 bp, Glycine max
tgcagcttgtctagggtgatgcaaacgttaacaacttgctaactttattgccaagtaccaagaaaattatgccttacccacggccaccaacatataatctgggatgattatgctcaagtttattcgggaacaagaggcttaaggaagggtgatcgactttttacaccaagaggctaccatgtggatggaccggtttgcttttaccttgaatgggagtcaagaactttcccgtttgttatccaaagccaatgcgatggcagacacctacttcacctccgaagagattcatgggcttctcggctattgccacatatgatagacttaatggccacataattagaaatccgtatgaaacttgtatggtctct

SEQ ID NO: 113294 - DNA, 398 bp, Glycine max
gacgcatcaactttaatcaagccatggcttttttgcatgctataaatggggcgcaacttaccacatgattataatgatggatggctcaaactctcacaaatgtaaaatcatcactttcaaattgagccttcaaaactattcatgacatgtagagaagaatcaatgatttcaagtcacaaaatgtcataaacttttattttcaaaacaattacccatgttttgaacattcctataatctatagaaaacatgctaagtcttcgtgcacaccaaattgacgctaaatattataactgaaatccgacgacactcacaacattaacaaattaacactactaacaaatttacagatccaccagactagtagaatcaaagtactctcccctcccatcttaaacac

SEQ ID NO: 113295 - DNA, 393 bp, Glycine max
  unsure (1)..(393): unsure at all n locations
agctntaacctcatcgtctctcacagtctttagatttgggagccaatccaatccttgtgttcggactctcagccacttatgatagccgtcgatgatcccattactgcttcccctaagctctctgtcctttcttcacgccgcatcccatgccttgcaaactccttggagtaccctcgcgttgtggtcactgaaacctcgtgcgatgaaaggcatgatgctttcgtctgatggcactcctctcatgggacatccttcgcatgaagatagaatcctgattctttcttccttctagcgagggaaccatttaacagacgcccctccatgctaaccaagagttggtcccaattcgcctttcctttttcgacgcacgagcggtaaccttgtagcggatag

SEQ ID NO: 113296 - DNA, 432 bp, Glycine max
  unsure (1)..(432): unsure at all n locations
ngccacccagctcgcccaggcgagctcagcttgcccatgtgagcagggttgcttcctccagaagcaacagccttctggaggaatcttctggagggcccaagtgggcttggttgctatttgcatccccatttttactaaatacacccccctgcttttttttgtgattcttttttcgtaaagttacgaaaacttacgaatttcgtaacgatacttgttttctttccgtaatgttacggaaccttgcggatcacataatcatcccctttttgacttatggaatgttacggaacctcactaattgtgaaacgatgcttccatttgatcttcagtgtgtcacggaaccttacagattgtgcatcaatattttcttttggttcccggcatgtccctgaatttcacaaattgcttaatgatgggtgccaagcacctcac

SEQ ID NO: 113297 - DNA, 401 bp, Glycine max
  unsure (1)..(401): unsure at all n locations
agcttaggaggatgaagctaaggtgattgttgtcttttgaaatnatgcaaaatgtaagtgtcgcgaatttgttacaacttttaattcagttaataaccctgcacttaactatagattatgtagtacttccttgaaaaccacattggttgttgaatttagcggtcttccttctttatcatgaataagaactttcatttcacttttgctctgaacttttaagaatgacacattaagctatgcatgactgaaaactgtgtgaggaagatataatccaacacattgaagagattgaccttgagatttattgattttcatggcatatgacacaataaatgggatctatcttctagtcatcttgaatggccaaggagattgagatagtgataatgacattcgtggga

SEQ ID NO: 113298 - DNA, 450 bp, Glycine max
  unsure (1)..(450): unsure at all n locations
actcaagcttggatagtcatcgaggcgcaccatgggtagaccttgggtntgatgttctttatagaattgncaaagctcaccaagggcagaccttgggtttgaggagcctcggagaatcattgaggctcatcaaaggcggaccttgggtttgacgaaccttataaagtcatcgaggctcaccaagggcggaccttgtggttgaggagccttggagattcatcgaggctcaccaagggcgaacctatggcttcacagagtactaaatgaaatcttaaaatcttaccaaagcttagcatttgtgtgcttctatttgatctatcaaatgtaagtacaatgcatccatcttatggcatataagacacgtctttcaaactttgtaatatttgcattaattcaaaatatntganggtcctaatctgtcttatgactattaagattatactcaatctg

SEQ ID NO: 113299 - DNA, 362 bp, Glycine max
  unsure (1)..(362): unsure at all n locations
agcttggattgattctgtctgacgaatatattaatggnttagtaattnnaaactaccaacgttataacattaagagccatgatctgattaaaagaagatatatttctattgcttcagcttgtatgttacaagacctaacatttctccctacttctatcatttttacttacttttcattttatagtttttacataaaagtacttctaattttggttgaaattatcaatcatatatgttctctcaacaatgcttcttttgtgacttaattcacgctaacattagtttcttgtgttcatactcaattcttctgtttaatttttaatacttgcgatccgtgcgctttcggcaactgaattccttga

SEQ ID NO: 113300 - DNA, 421 bp, Glycine max
  unsure (1)..(421): unsure at all n locations
taataaagtccttagtgatccatgttgtgtgtgtgtgaaattgcattggatgagatgatgtgcacagttgggatgtgtaacttcaattgaatgggaatgaaaaccatccagctgaaacactttgattcttgattgaaacactagcagaagtgaaaatttttctacttattcattgttgagtgtcatgcttgttaatctcttaaacttataagtgtattctctttatgatttcatcatgtaaaccatagcaagtgcgagctcaatgtaacatcacatttttcataaataaattaaaaaggtttttatttaaaaataaatagtnctagaaaaatgatgagggttttgtattaaattaataaggagagataactttattaattaaaattatggtgtgaagacaatataaaatgattttattatt

SEQ ID NO: 113301 - DNA, 349 bp, Glycine max
  unsure (1)..(349): unsure at all n locations
agcttgcttgtggggcttctatggatgctggatctttgagcttcaataagggcctttaatggtgattttccaccatggaaatgcagcggaagacaaaagagaaaaggtgagaggaagcgccatccactagggaataagccatggaagaaggagcttcaccaccaagaaaagccttggataagaagcttggagaggatgattcaatggaggaaaagaaagagggagagaaagagagaagggggagcacgaaattgaaggaataaaagagggagagaagtggaaatttgaagtatgtctcacaagactctcattcatcanaggtacaataagtgttacacatgcttctatt

SEQ ID NO: 113302 - DNA, 445 bp, Glycine max
ggagcacgctggttttatcagcaacagtgagcacactacccttagaacgattcgaaaaaaagcccgaaatcaaaacaaaagtgaggaatctcactaagatgagaaagaaactcgagctagcacccactccaaccccacggcgggccccacataaatcccaccgaacgaagaaggcccgtaatacgatgctggaaaagaaaaccctgagctcgaactcgaagtccttggctaagtaactccttgatgacagtgtatgtcaatttgagaaagttcccatttctcgcaagttcaattgaagacctagacaagccaatggtgaagtgagaagcactgagagagagggttgggctacaatgacttacctgtcagcgacatgggctgacaacgaatgtgcaatagaggcacgatagtcatggaggcacaatggtcgcagaggcacaacaag

SEQ ID NO: 113303 - DNA, 388 bp, Glycine max
  unsure (1)..(388): unsure at all n locations
agctngttaaagaacttatgataaatttataacaagcttgttcgcacattgttcgcgtgtatgatatccactcgacaaggtttgagaacaggaagaccttcaatctctataaacgtaaccgtggtcggacaaaaagtgggcagttaacttgaatggccattattgtcaatgcggaaggtattctgcgcttcactatccatgttcacacattattgcagcttgtggttacgtgagcatgaactactaccaatatatagatgttgtttacacaaatgagcacatcttaaaagcatactccgcacagtggtggcctcttgggaatgaagcggcaattcctccttctgatgatgcatggacacttatccttgacccaactacaattcgtgcg

SEQ ID NO: 113304 - DNA, 449 bp, Glycine max
  unsure (1)..(449): unsure at all n locations
ntgagaactgctacaaaaactgtgatagcgttgtttctgagaaggtgaattgatgttggtacgtgcggattggtggtgatgatggagtgcatgactgacgtttgtaaagaccttgtgaaatcacacatccaaatattttcaaggatacaagtttgtacctccactaaccttccaacactagtcttagactcaatacatgctcttaacaacaaggacataagcatgaatacatgattaattccaccatatacatcatcaacacatcataaatttcataacacttacacctttttcatggagagtcaacaacaatgttattgttgggtccggaacaccaagctttaactacaaaacaagtataaccctccagaagattttaagtattcataacaccttataataattcttaaaaaacaaaatgtagacattgttcactacacactcttaag

SEQ ID NO: 113305 - DNA, 394 bp, Glycine max
cccgggtcctctaatcacctgcagcatgcaagctttttttttctattacctgtcttctgactaaaaattctaattgccatctcacactcctgtgctttctttgtctaacatacacacttcgcttaacttatgaaaagaaacccaatcttcatcataaccatgcatttaatcccaaatcaaattataacacccatttcacataaagataaaagtgtttcactgcatattcatcatgactaagtcaaactgttccgtatgcttcaaaccatgcatactagctattcacaaaaaacacaaggttataaagagcattaccaagatcactaaaacaatgtacttgaatatattagtatgatcagtccaaaagcaaatcattaggaattataagtcctga

SEQ ID NO: 113306 - DNA, 368 bp, Glycine max
  unsure (1)..(368): unsure at all n locations
gtagtagcgcgggttctggatacttttttctagncgttacnatgtgcgacgatgatattccgagtactttggatatgtgacgaccatgccctcctgatttccatctgggaaattggcgagtggaggaacgcctcagatttacgcaacaagcttaatgtgaacctttacggcttgaatagctctatagttgggcctaggtcttaaagtttatccatttgctaaggccttgtgtcttctgtttgtgaatttataatacaaggatctgtcttcatctgctactggtctatacccatgctcattcattggcatgtttactctttttctgaaacgacagatcccatgactagtccaccgaagtactaatacct

SEQ ID NO: 113307 - DNA, 371 bp, Glycine max
  unsure (1)..(371): unsure at all n locations
agctntaatgaaggcttcttcnatgttgccattgagaaagaattctacacaaacttgtatgacccaaaagatagatcacccaagcaggtgcgggtcaggggttatctaattaaatttgatgatgatactttgaatacttttgttgaagaccccactgattgtagaagaggtggagaatttatgtgcttattcgatatttgcacttctgaggcctgatcctcaagagttagctgcttacctctttatcccagggaggggatttgaactgaatgctgatggtctccccttgaagaacttaaggaagaacatgtctacttctccttagacatggagtgttttttttattgaagtgggtcctgacctcctcattt

SEQ ID NO: 113308 - DNA, 413 bp, Glycine max
  unsure (1)..(413): unsure at all n locations
cttgctgacaattgtcttcttgcacttaaaccaaatgctatagaatgtaccaatgcaattagttcatttgcgattcttaatagaaacttcaaaacttgaacataatgtattgagagaacatactgtgaatttggttaacattaaatatgaagtaaaatcataatcatatttaagagcaaacatgtgaacatttttctaaaatcatgttcactggtattcgaatttaactttggattatccaacatgaattcaaacactcacatcatgtatatcagaagcaaaataaagtgtcactcanattatcaaaagtaacaaacctattgcacaagcttgacgcacaaagtgaaggatacaaagtcggcttcaattntctgtcttggtgttgactattatcttgtcttgtttatgacaaa

SEQ ID NO: 113309 - DNA, 404 bp, Glycine max
  unsure (1)..(404): unsure at all n locations
ccgggatccttaagcaccgcggctgcaagctgaggcctattatcttctttatctatggannccnctggcttcttggaagatgaatggcactggaatggaaaatgaaatgagtgaggaacgccccttcaatgagaagaagagtctataagaaagcccaccacccataatgagtgcccatgggataaagattcttggatggaagaaggagatgaatgaaaggaaaggatgagaagagcacacaattttgtgctctacaagagctctgacatctgaagtttaatattcacataatcaaagttgaaaaaaatgcacacatatgacctctatttatatgtcatacaaaattggagggaaatntgaatttccattcaaatttcacttgaatntgaaattgaatttgtgga

SEQ ID NO: 113310 - DNA, 389 bp, Glycine max
  unsure (1)..(389): unsure at all n locations
tcatgatgaatcaagatgantcatgatgtttgatgtattacaagatgatgacgaaaagctcaaaagtcaagaacacttcatgatcacaaagatcatgatctccagaatcttagaatgcttcatgataaccaagatgatgatctcacgaatcaaagaatgagttccgggattgatcaagaacacttcaaggttcaaaagggaaatttgtttcaataatcaagaatcaagtttcaagattcaagttccatgaattaagatcaagattcaagactaaagattcaagagtcacgagaagactctatcatgataagtattaaatagttttcaaaaactaagagcacatgaattttctaaaaaacctttaaccaaagagttttactctctataat

SEQ ID NO: 113311 - DNA, 244 bp, Glycine max
gctcttaatctctcctcgtctgaatcaactaactcatctgacatcattttccaataatggtcgattggaatgtccatttgttcttgtactctggctgattgcaaatgtatttcgaccggaagtacaacatcgtgcccataagtcagtcgaaatggcgttgtattaagtgattccttatgagaatttctacatgcccatagaacttgatctaacgtttattccaatttcttggcttttgggcaat

SEQ ID NO: 113312 - DNA, 392 bp, Glycine max
gaccttaataccagctgtcgatatagaacactctcgactgggatcttgtatcattattgagcgcatgtccttgtactcaagttcaactttaccacaagttgagacatcaaccaccaaatctttgagaagaaggaatcttttcaccatgtcttcttattaacaagtcgagcaccctttttcatccaaaaaccataatgctcgtgtttgtttaccaaaggatgctgtgacagcaacacctattagaaaggatctctggattggaacataatggttagaatcaagacggactgtaaagtgtttaaggaagagggtgactagatgtggatgtgacaatggagcatttaatcgcaatgccatatgcatgccatatcggactaagtgtgtccaatcat

SEQ ID NO: 113313 - DNA, 384 bp, Glycine max
caggtctctgatgcaacatacatgattatttaactaggcctaatgataaattgtgttaattatgtctcccaagtatgaaaataaagctcattcaatagccaatccacatgctgccacaagttcatgacaacacctttcatagcttcaacgtggatagcaagtttgaacaatccttatcaccttcggccactgaagttaaccacaaccttggctccattaggaagggttggacacactttctctatatatgccaatgcatgagatgtttccagagctggaattatgccttcaagtcgtgaaactctcttaatagctacacatacatataatccgaataatgagatacacatacattatctgatacaagagaagcatttacatcta

SEQ ID NO: 113314 - DNA, 258 bp, Glycine max
gtgctaataatcctctcctacacacccccattaccgcacgtgttgctccatgcttaactacttctgcattaactacttcttcgtccagatctaaatctgccgctagtacttgcaatgctatcaattgcactccactacatatacatctccttctgtttttacacgattcttatgaacggggacctcaacctttggaaaaggaaggctgcattatatgttcaccttaatttatagcaaattttgtttgccttatatgcc

SEQ ID NO: 113315 - DNA, 424 bp, Glycine max
aaataacttaatgccattaacctaaggaattaaaataacttaatggctgagtgtaactgaaattgtggcaaccaaaagtcacccccaacatccaacatgttagccaccatttggtctcccaaaatgctgatgcctatgttgccaattgggcccttattacaacttgaactaaacctaactaaagccctcttatttgattaacccaaaacaaatttttggtcagccaactttacaatgattgggccattatttatacaaactaaacactctaaaattgaaacaaagtggtgtcatttagtcctgctccatttgggccatgatacaactcacaaccttggactttactccttgaaacttgggcttgtattcaataatatggacaacatttgttgaagagcttccttggcttttcttgctctaaccc

SEQ ID NO: 113316 - DNA, 465 bp, Glycine max
  unsure (1)..(465): unsure at all n locations
ctgctgctgatgaacaaccacattctaccctttgtctcttctacaaattctntcttcctacacttatactgaccgctcctttcacaagcatttaacacaaaagaagttcttcctctactaccagtatgtgtgctatacctcgtaatgattgcaacnaaattcgttgtgtagggcaaccgatcgatcccacaacatatcatcatcttgtgtaccaaagacctacaacacaaccctgacatattaatttttatacaaaacatacattcaaccaaatgactcaacctatatgaacatcattacctgagaagtattaaaagcttccgaacaatcaaaatgtgagggtacattcacaccatattcgtgttcattttcataatccatatcaacttcttgagacatcgtattgacatacgtgcattgatcttcgtcaatcttaatgacaaataaattaattacaactacata

SEQ ID NO: 113317 - DNA, 225 bp, Glycine max
ctgagctcacgaacaccacacgaaccccttatactcggtcggctcaaccgcgggggccccatcaagcctccccagcttgcacaacatccagagcactggcacagtccatcatcatggactaaccaaaccaagcaaaacaaggctaatgtagagaacggcgcccataacacaaactataatcacagcgtgtaacatacacacaccccaacaacattctctttgtac

SEQ ID NO: 113318 - DNA, 402 bp, Glycine max
gctgagtctagtcttacatgagggatctacagacgaaactaattttaaatacttgatgatccggtgtgctttccggtaaacccccattgaaatttccttgagacataagtgcacaaaaagtaactgcaatggggagcgagcaaagtatttatggcgctgttgccggggaactaaactgttagtagagtgtagttcagtttacaacattgctctaatttaactttttcaattgtgttattcttttgactaacatagtaggttagtacatttattgttcttttgaactggataactgctatactgttcctgtatgcaaagaaaatcttctacaggtgatgtgattcccattgatgtggagattaacgccacttgctgaagcataatcaaagaaaattataattt

SEQ ID NO: 113319 - DNA, 425 bp, Glycine max
atatctagtcaaggtctgagagaccatacaagtttcctaacgatttctaattatgtgggccattaagtctatcatatgctgacaatagccgagaagcccatgaatctcttctgcggcggagtaggtgtctgccatcgccttggccttggctaacaatcggagaagttcttgactcccgttcaaggtaagggcaaaccgatccatccacatggttgcctcttggtgtaaagagtcgatcacccttcctctagcactcttttccgcgtatacttgggcatactcatccgtgattctatgctcgtgggctgtggctaaacctaactcttcttggtacttggcgatgatagctagcatgttggtctcctgctcgcataaacgctgagacaagcttcatttggaccttgaacaggcaactaacttctctt

SEQ ID NO: 113320 - DNA, 493 bp, Glycine max
gatcttatatcacctgctgcatgcaagcttgtctcatcgtctatgcgagacagaatctttatgttagctatcatcgccaagtaccaagaagagttgggtctatccactgcccacgagcatataatcgcggatgagtatgcccaagtatatgcggaaaaaaaagctagaggaagggtgatcgactctttacaccaataggcaaccatgtggatggatcggtttgctcttaccttgaacgggagtcaagaacttccccgattgttagccaaggccaatgcgatggcagacacctactccgcccccgaagagattcatgggcttctcggctattgtcagcatatgatagacttaatggcccacataattagaaatcgttaggaaacttgtatggtctctcagaccttgactagatatgaattctttgttgaaataaaatgagtgggtccatgtttctactccaaaatacttgtgcaaatcaaatcactcctacatc

SEQ ID NO: 113321 - DNA, 343 bp, Glycine max
  unsure (1)..(343): unsure at all n locations
tactaagcttganggatatggggtacccatcacatgtggtactatgtggtggtctggcgatggtgcacaacaagttttccacatccacaaattgcgcataaacccaccatcccctgttgcccacctccaactgagctcacgtactcccacgtagcccatatcttcgtttctctcaacaccgggtccccatcaatcctcccaagctttccccaacatccaggtaattcaacatccaaatcatcacaaactaacaaaccaagcaaaacagggcaaaggcagaaaactctgcccaaaacacaactcaaaatcacagctgttcacatacaaataccccagtaacatt

SEQ ID NO: 113322 - DNA, 486 bp, Glycine max
  unsure (1)..(486): unsure at all n locations
gatcttaagtcacctgctgcatgcaagcttcctctgtgccatttcataagtcacgctcttttgccattgatgcatttcaccgaacacttggtgggcacgcgtntatgcgtctatatcaagagaactgggacaatgtggcatgtcccattgttccaaaatgcattatatgcctatggccatcccatacacacccctaattcaacttaatcaagcaagaaaacaaaccataattgccctatatatttgagcacactcccactatttatagcaccaaaatgagatcaaaatacaccaatgaaaagctagaaagcttatggatggaacacttacttgttggtgatgaacaaaagcgcaaaatggaatcaaaaaatgcgaataaggatgaccctatggctgcaaactcgtcaatcccgtgggtatggcttttgaatagggggaaaagaaggttttgaatgcaaaaacgcacccactntcgtcattcttata

SEQ ID NO: 113323 - DNA, 345 bp, Glycine max
  unsure (1)..(345): unsure at all n locations
gcatgctttgatccaaaatccagactcaccatttttcttgtcccatggtgagaatgtcaatccgtaccctctgtatcttatatatataatggatatattccaatcaatcgaaataagagaggatatgatattgncaatctaagagtgggtgaccgccacctgaacagacagaatattnccaattaatggattggtgtgattgaaaattagatagaatgatgaacaaacggtagatagttcccgatctaagaaaacattagatatctgcataaaggtcgttggaccggacaatatctgaactatacattattgtctccaaatgtacatattgatggattggatacc

SEQ ID NO: 113324 - DNA, 448 bp, Glycine max
  unsure (1)..(448): unsure at all n locations
tcacctgcatgcatgcanactgcacaacaagtaataaatctattttttacaaaaatgaactaactaactaacttccactaatatatatagtgaatactcacaatgaagggatgggtccttattaagcccatctaatctacctaactatacttattactcaaaacaaatgccataccctcaacctcattattcaagttcacaggttctaaattccaatcccaatttgatcctctaaatatcaaaattggccaactcctctttcttaaaatatataataatcttttctatacttttttggactacttacacacacctttatgagctttgttgtgatctctatgcctccacaatgcatatacgtattgttatcaaaaaaacataaaatttactattatttctaattcatcccaacatttcctttataccaaaacttattaacgtctaaaaa

SEQ ID NO: 113325 - DNA, 454 bp, Glycine max
  unsure (1)..(454): unsure at all n locations
agtcgacctgctgtctgcaagcttctttttagacctagatccgtcttctttcctggccgacgccgactgtcatgtttgtcgatcaatatcggtgaataatattttcttgccgaggtgggctaatgttttcctggccgaataattgggaacatgccagtttcggccgaaacgaaacatcggttgagctcgcacgatataacctatccgacctacatgtgtatgtttttcatgcaactccgaaacaagaaaacttgccctgccgtaagaaaaaacattatgggccagcgagcatttttttaaaataaaaaattgcggaatgtcggctgaaaaatagttgtcggggccatttcacgaccgatgtcggctattgagtttttattcaatccctgaatgatatctgcatgatgtcgatccggaaatgtntgatcggcggcatccaatgatgcttactttt

SEQ ID NO: 113326 - DNA, 296 bp, Glycine max
  unsure (1)..(296): unsure at all n locations
ngagatgaggaagcgtagaagggtgaaactgtcttgttttattgtcgaccacanaatggtacctggagatatgttacaggggtcacgataccatgtggacgtcaagtggggcgctattgcccaaaaccaatcttgaccaatcccgactcaacccaggcatagttggtcaatgagaaccatgtatgtacctaagcaggcgaactcctggctgtctgcagataaatggaaaacaagaccactaatcaaggaggcttgtggtggcatggccagctgcgaatttcgtgaacatgtggatt

SEQ ID NO: 113327 - DNA, 453 bp, Glycine max
  unsure (1)..(453): unsure at all n locations
atctacctttcttttgttgtatgagagtgtttacgccacggtgttacttgttaatatggatgcgtaaatctaaccggcaagtgtaccgagttgtgcaagtaataataaaatggtaagaactgagtatcgaactcagggaacttgtttcatttggtaaagcatcattcggtaagcaggcatgtgtgcaaagaattgattatcatgaattaaaaacaattgtggtttctattctaatcaaaacagtaaatgtgagcaagtgggtgtgagaacaaatatgtaaaagtgttgggtcctcctactgaaatacttgatgcaattaaatgtatttctctatttntaaaggtattcctgcgttttatgctgagagctaaaataccatacaccgatgtctcgtgagtttgcactaattctaattaaacctcattctcagatgtctcttgttgaacttatcct

SEQ ID NO: 113328 - DNA, 215 bp, Glycine max
tctaagctgttatggggagcacggaattggctcatttcaacttcttttgttttcaatgaccttggatagcgagaagagtggcttggcatttgttataggtcctaatggtgtagaatgtgaggttattggtaataattcatatgggcttttcttttgattgaaagaaaaggaatttataggtgtcagggatctactcattgcttataggaagaatg

SEQ ID NO: 113329 - DNA, 454 bp, Glycine max
ctgcagctatgctgaaacattttaatagacctcctcttcagcaaaaccaacaatagtagaataattatgacctttcaagcaatagatacaatccaggttggaggaatcatccaaatctgagatgtacaagtcctccacaacaacaatagtctgtccctccttttcagaatgctgcttgtccaagcaagccatatgttcctcctccaataatacagcagtcacaacaaagacatcaagcaactgatgctcctcctcaaccttccttataagagttagtgaggcaaatgaccatcataatatgcaatttcatcaagagacaagagcctccattcagagtctaacaaatcagatggggcagatggctactcagttgaaccaagctcagtcccaaaattatgacaaattgccttcgcatactgtgtagaatccaaaaaatgtgagtgccatcaccttg

SEQ ID NO: 113330 - DNA, 424 bp, Glycine max
  unsure (1)..(424): unsure at all n locations
cacgaaaacattaaaattttcgtattactacgaaatcgaaaaggggggaggtgcaaagttttacaaaaacaaaagcaaattcacaaacctaacagaaaaggatcaatgattgaaacgagggtttggtttctcaaaacgaaagaaagaggctatgtctctgtctgggagtgaatcaaatgaaacaaatgaagttgaaactacggtttgatttgatgatgggaaagagtggagggaaaaagtggacggagaaatgaaaagtcaagcgagggagaaacgaagagtcgaggctagggatttcaaattaaagcacacgcacacaaaaacaacgacgtttttgtataaaagcccgacattgtttgtgttccccctaggacattataangcggtttcgtgaacccgtcttataatgtgtgttataaaaaaa

SEQ ID NO: 113331 - DNA, 441 bp, Glycine max
gctgcagctatgctgatatattacaatagaccttctctttctcattctcataatcaatcacagcagaacaattatgacctctccatcaacagatacaatcccggatggaggaatcaccctaatatcagatggtctagccctcaacaacaacaacagcagcctacaccttccttccaaaatgttactggctcaagcagaccatacattcctccaccaatccaacaacagcaacagccccagaaacaacatacagttgaggctcctccgcaaccttccctcgaagaacttttgaggcaaatgattatgcaaaacatgcagtttcaacaagagaccagagcctccattcagagcttaactaatcagatgggacaattggctacacagttaaatcaacaacagtcccataattctgacaagctgccttctcaatctgtccagaat

SEQ ID NO: 113332 - DNA, 408 bp, Glycine max
  unsure (1)..(408): unsure at all n locations
gagcacgaaattgaacgaagaaaaagggagagaagttgaacttttgagttgtgtctcacaagactctcattcatcaaagttacaacaagtgttacacatgcttctatttatagactaggtagcttccttgagaagctttcttgagaaaacttccttgagaagcttctttgagaaaacttccttgagaagctagagcttagctacacacacccctctaataactaagctcacctccttgacaagcttccttgagaagattcctaaagaagttagagcttagctacatacaccccctataatagctaagctcacccncatgccaaaatacatgaaaatataaaaaaagttcctatttcaaagactactcaaaatgcccttgaatacaaggctaaaaccctatactactag

SEQ ID NO: 113333 - DNA, 222 bp, Glycine max
aagctctgcatccaccccaattcgttcttcaaaatcttcacttgctctcttacccatgacagctgtgaaacagacaccgtcgccactgctgcttgtccaccagcagccccgtcagcttggtaacgaccgttgacacagcaacctcgggcatcctatgttggcttcttctcttctctgcttctcccaacaagactagagactagatcctctgcaaatgggggg

SEQ ID NO: 113334 - DNA, 377 bp, Glycine max
  unsure (1)..(377): unsure at all n locations
accatgcgtgattcctcaccataactaatgacgcgggccatttattctataatatgcatgcaacaccacgcactcgcattaatctcttctccggtggtacatggtgtatgcctttcgcacttggaccacatctaacagagcgtgcgattgttctgtgagatcccttctaaaagcaagaacataacacggccatccacatcgttgatctatggggtatatatttaagaaccctatctctaacctatttcatcgcaaactccggtgcatacacacacgctcatgtatgctctagtgctccagctacagctaccacttaccgctacttggcnataatatctaccaagacgtttttcttctaccctaccgcttagacgagc

SEQ ID NO: 113335 - DNA, 461 bp, Glycine max
  unsure (1)..(461): unsure at all n locations
gcaagctttgccctatttgcttaaatatgtgtattttgataaaanaagggttcagccacttagcacttctctctctttctaatatgcttaggaaaattgttgtcgtgaataaaatccatgccgaggcgcttccgtaacgtttccgtgagatattacgcgaatattcttgaccgttcttcaagattcatcgttcgttcttcgctttcttccgtcttcaacgggtaagtacctcaaaccaagcttttcaattcattatatgtacccgtggtggtccacattttgtttcatgtatattcattctcgctttcatttacttcttatacccccttttgacgtgcttaaaccatttatgtaagtcatttctcgcttaatctaanaataaaataaatttccaccgatcgtttgaattgtatcatccagtactttcgtttggatgaattctgaccagttggtcgtgccgt

SEQ ID NO: 113336 - DNA, 448 bp, Glycine max
  unsure (1)..(448): unsure at all n locations
cacatactgtaagcgattaccagatgtatgttttcattaaacattcttaacagtcacatctttgtatctgtgtcttaaatggccatcaaaggcttatatatatgtgactcgagacacgaattttacaagattttttcataacaaaaaggttttatcctcttaataagcaaaattgctgtatcctcttacaaattccttggccaaaacacttgtgatgcaataaggaattatttgagtgctcacattgatcaatctatctctttcaagagagatttcttcttcgtttcttctttattctgaacagggattaagagaccgagggtctcttgttgtgaaagaatactaaacacgaaggaagtattgtccttgtgtgtntagaacttgtaaacggaatttacaagatagtggaactctcaagcgggtcgcttgtggactggacgtatgcaca

SEQ ID NO: 113337 - DNA, 411 bp, Glycine max
gatcttaatcacctgctgctgctgcttcacatacttgatacccattctaattttctcaaacagaggttcaagactagaatgacctccatggccgatatagagcaaattggagagattcccaatctgagatggaatcttccccatgaatccagtataatagaggtcgagctgagtcaaggagctcattgtcccaatgaaagaatgaattgccataccttctccaaggaaataattgtcgctcaagtcaagatatcgaagcttagagagattcccgatctgagagggtactcttccgttggcaacttctctcatgtcaagatacaccaaatttgagagattcccaatctgaggaggaatcttcccatagaatccactatcagagaggtcgaggtgagtcaaggaagtcattgt

SEQ ID NO: 113338 - DNA, 352 bp, Glycine max
  unsure (1)..(352): unsure at all n locations
cacattgaactctcttggagcctaatatacatcatagattcatagtatcatacattgtcaagtatcaccatcattgtcaatttggtaacaaatatgtctaaatattgattccaactagaaaataaaccacagagattcatatttaatcacatgttatgaatatttgaggtcaacaatgtctaggaaaccaatttaaatgaaattgttgtgcagggctcacaaaaagctntcatccgtttctgcatgggaaaacagcaagaaagctgctgtggaggctgacctgaaaaagattgaagtaagaattaatttcattagtaattctatcatgttttatgtgttcattttcttctat

SEQ ID NO: 113339 - DNA, 464 bp, Glycine max
  unsure (1)..(464): unsure at all n locations
gcaagcttgtaggattatggtgtacccatcacatgtggttctatgtggcggtcgggcgatggtgcacaacaagctttccacatacacaatgcgcgcataaacccaccatcccctgttgcccacctccaactgagctcacgtactcccacgtagcccatatcctcgtttctctcaacaccgggtccccatcaatcctctcaagcttccacaacatccaagcaaaacaacattcaaacagcgcaagctatcacagccaagcaaaacagagcaaaggcagaaaactctgctcaacacatcaaccaaaatcacagttnttcccactcatagaccccggtaacaattccttcgatccaattcgttaaccgttggatcgactccaaaattgtactggaagtctatagtgtataaacctacattttgaccgttgggatatactatcaaacatccagaactcattctgcact

SEQ ID NO: 113340 - DNA, 427 bp, Glycine max
  unsure (1)..(427): unsure at all n locations
tcggctgcgcagcaacacngggatgatagagatggatattctttgttgatttgncattgaccacaagacgtgcgtatctattacacgagtgataagccttctggtaatcgattacaggacgttgttaatgattacgagctgccctgtcttgtgtaatcgattgcactggatggtattcgattactagaccgtaaactaggctaggtcctcaacaaaagtacctatgttcatggctgaaactctaatattgtacaaatcactactaatgcacttactttgatctgcagactttaattcactgtgtttatatatcctacataataacttgcattatgaaagtggatcaaggtcatttttacataatcatggtcgatgaagaactatcctacatccttttttctaaagaatacctctaaaggctgattcc

SEQ ID NO: 113341 - DNA, 372 bp, Glycine max
gtgcgcgcccttctttctacagtacatcttgagatggttgttgggacaggtcatccctttataattgtcgaaggtcggcactttgatacttggggggataacaacatcgggtactaagcaaagatctgtcatgtttgcgaaccaatagtccccatatcacttcacggctctctatctttcctccatgagatcgagcttcctcctttcttcatctgccgggggcgagtcttccgtggacaaaactattggttgtgtcgcgatgttgggctgacgcaacgtcctgtgtgacggcccttcagggatcggaggatacaactcgacatccacttcagcatattcttgatggtctctgtggacctcgtagcgctgttg

SEQ ID NO: 113342 - DNA, 438 bp, Glycine max
cttgtccttagatccctcttgttggctagacgtagactcttctacattattgtaacaacatacttaagaccaaaacttaatccgtagatccctcttgtaagacaaactttcaattctacttcattcaaggactaagggaacaatacatttgtcaatgttaaaatcacctatctaggcacacaaatggttgatcagaccaagagcattcaaaatttaagcactgaaataagcactgcggtgtgctatggaattctgtgccctgggcattgtaccctaattctgctcaaaacacgctttaaatatgcattgaattcgcaacgttgcatttagcgccaccctcatgcttagcgcgagtaagtggattttagcttatcgccagtcgtgcgctgagccaagctgaagacaactgttgcgcttattgcactgaagctgcactta

SEQ ID NO: 113343 - DNA, 458 bp, Glycine max
agcttataatatattgatacgctcgaaattattcctcggaagctctccagatattcaaatggtcataactattcacacggatgttcgattatggcgaatcacatatcgagacgcttaaaattgaacagcggaagctctcgagaaattcaaatggtcataacttttaacactgaggtccgattcaggattataatatatacagacgctcgaaattaaacattggaaggtctcgagaaattcaattggttatcacttttcacacggatgtccgattcgggcgtataatatgtcgacacgctcgaaattgaacaacggaagctctcgagatattcaaatggtcataacttttcacacggatctccaattcacgcgcatcacatatcgagactctcaaaattgaacagcggaagctgttgagaaattaaatggtcataacttttaactcggatgtccgattc

SEQ ID NO: 113344 - DNA, 435 bp, Glycine max
caatagatctgttcatagcaccactaattgttctccttttgaagttgcttattggtttaacccactaacttctcttgaacttttgcctatgcctaatgtttctgtttttaagcataaagaatgtcaagcaaaggcggactatgtgaagaagcttcatgagagagtctaagatcaaattgagaggaaaaataaaagctatgctaaacaagccaacaaacggagaaagaacgttgtctccgaacccggagatagagtttgggtgcacatgataaaagaaagggttccggaacataggatatcaaagcttctaccaacgtgagatggaccatctcacgtgcttgatagaatcaatgacaatgcttacaaagttgagctgcccggtgagtataatggtaattccaccttcaatgtctctgatttatctctttttgacgc

SEQ ID NO: 113345 - DNA, 479 bp, Glycine max
  unsure (1)..(479): unsure at all n locations
atccttaagtcacctgctgcatgcaagcttcttgtgtcaatatttttctaaatggatttctcaaattcctaagntgtagaaaaaggaatattgtctgccaagaaaaaacacaaactaaatcaagattattgcagaaaaattaaagcattgttttccttcattcgaagttgaacccaccagaattgtagaaagcaacccctaccctttaccgggagtcgatgactatttataactattactttgacatcaaagaagagttcaacccaatacttaatttctgtcctagttgatcccgagacaacattaaaacctattcaaaccaaaaaggaattattctcaaaaccaagaggaaaatattacaccatggaaatcccagtacatattcttcccaaaatttcatttgcatgcagcattgtatttgtataaaaagatgttgagttgagtcacagttgtttcattcattcaatccatcccttgat

SEQ ID NO: 113346 - DNA, 421 bp, Glycine max
  unsure (1)..(421): unsure at all n locations
gactttttatactttngggactaaattttgtattttcattnttaggaacgtacttgtcagtggaccgggaagacaaaaagtcaaaaaaatattatgacaaatatgtccttatgttggcaatccatattgacaatcatttcagtgacaaatttgttcctccatgccatggaagctattttattaacggtaacagacaaaagttaacatcatgatattttatattttcatcttttaggaacgcatttgtcagcgaattacacgttgaagaacaaaaatgactatntattcaaaaaaaataaagacggagaaagagttgtggaaatgggaggtggtggcatgggtcttcctgactcggattcaatggttggtagagggaagcactcttctnctctttcattttgcatctctttctctctctacc

SEQ ID NO: 113347 - DNA, 483 bp, Glycine max
  unsure (1)..(483): unsure at all n locations
ctgctgcatgcaagctttcaatgatttctcctgttgtctatctcatgatgcacttcaaattcagatcaatgagataatcttgaaatgcaaaagatgttgcaatttggagtgataggttttatattccactcttattttagacagtttttaattntcgcaggtaactttatatctcgattaattaatttttccaggtaattatccttgtatttatctgtgatcattgtcatccttagcctcacacttagtgttagtgcagttttattaggtaagtatcatcttctggagcaccgctgtgtggacattctcttcgaatatttttatttttcccaggttattacttactagtagtacccatggtaaatgttggggttgactagtgtgtaccaacatgtcatcatttattaaatattaatactaaaatagcttgtaaaaaatatgatattaattactacttatcagaatatattgttactcacaaaa

SEQ ID NO: 113348 - DNA, 325 bp, Glycine max
tctcccttttcagaatttacttgctccacttttgaacaattccttatacttagaggtggtggtgatttccttttcccacctatttctcctttctcccatatttattatccttcaacttttccttcttcttttctcattactatttctctccttctctcttcaatattactttattttcccctaatatcgtttttttctctaaaccataatctttttaatcaatattctatcttttccagccatatccattttaacctcataaaccaatctctttttcccttcctatcccgcctatactttatttccctcatgtcttttttttttc

SEQ ID NO: 113349 - DNA, 437 bp, Glycine max
ttatcaatgctgctgcatctttaacccctttaatgatggctgtttttcttttaagaaaagaagaaaagagaagatgagagaagaagaacaatcaactaacaatgttcttttaatgcgttagatcaaatcgattgcaacaaaataaatgagataagggaagagagaaatgcaaactccatttatactggttcggtcacttatcgtgcctacgtccaatcctcaatcaactcacttgatattctcactaacttcgttaataaaccgttttacaacttctgaacacccaatgaatccctttcccttgtgttcatgatactcacaattcatgagacaaccagtctcttgattacaacttactctctgagatgaatataaagatttctctcctgtagagtggattatacaatcttgatgttcgtggatgaacacacattaaa

SEQ ID NO: 113350 - DNA, 393 bp, Glycine max
gcttgtgtctttttaatgtgagaccggtatccctttctctcctctgagacaagccgtaagaaaccatgttttttttgtgctttcaagtgagtgcagattcggtacactgttattccacgatctgtttctccttctttagttgtgtagacaacccatatgctctatttatttgacagggtggtccaaaagactcatgttttctgcctctacctgctattgcttttcctgtgggcgttggcttcagttaggggtcataattatctatctaccaaagcatatcttgtagcaactcattcgctaggaagcttgtaaattattgttgttacccactctgggatggcaatcaaatagtaagggtgtacttggtctgaaattgatttatatgatggcatt

SEQ ID NO: 113351 - DNA, 423 bp, Glycine max
gttaacaataaacttgatcttgtttaaataaatgagtttgaatgaatatttaatacgctaaatttgaataattcacaaataactgaagttttttttaacatataacacgtattctttttttacagtaattctattcatgtcatgttagatattaaatacgagtatctattcgagtgaaaaatatttgaacttcgattcaacacattgaaagaaattaatcttttttattaaacccaaaccattggtaaataactgaagctatttacacccttaaattaagtaatgttaaaatggaatgtaacataaactgagttcactaaaaaatgtggaaataaaataatgggtatagcaatattttagcagacagaagacagtttgcacccgttgttcttttatattgagaaaccatcatgggtttttttt

SEQ ID NO: 113352 - DNA, 454 bp, Glycine max
tcatttctgatcctttggaccatatggactttgtggcttcatcattaataatatccctagcatgctatctaccaaatagatgatccttgttttaacaatccccccacttataattatgttattcttaaatcctcaccatggtggaatcaagttaatgatatatttcttccccttttttcgtgcttctcagaagggcattcattgtttcaaaacattgtaaaactaatgttgtcacacaataacattataaacacaagtatcataacaaatacatctattcattaatttaatctacaatctcttcattatacctctccaagtgttcagctgtatgtttaaagatgtcaaatcatggtttacatcaagacttttatctgtgtattaatccttcaaaatgttaaaatacttcctctaataccaaattaatctcttaaaatacaaaatactcaccaac

SEQ ID NO: 113353 - DNA, 229 bp, Glycine max
  unsure (1)..(229): unsure at all n locations
ccattgcctacttnggcgaatattattaccatactttgaggtgctgtaactttgtggacttcacattatcacccatggtggaagaatatttagatatcccgggatgccctctggaaggaatgaaaccatatctcttctcaagactctattcctccttacccagaatgtcttaaatngtcaagatctccacacatgaattggaccactgaaagcaagtcgcatatagggt

SEQ ID NO: 113354 - DNA, 362 bp, Glycine max
ttacggagggctttgtggctccattccggaccctaattctgcggggtcaggagtttgtggctggaactggaattggacgttttctttgctcacaatctttggtttctggaactagcgaaattatggaatttaaccgcactacgtttggctgctatataaaggattgataagccaaacatggcgacaggccatcccgtttttgctgataataaatgtttactcctaacggatgatacctagccactatcaaaattcggataactcccaacactatttttccccctgattcatatgacattaattaaacgatattcaagtcatttgtggagaaacctttttaataactcttactagtaagaaat

SEQ ID NO: 113355 - DNA, 395 bp, Glycine max
gatccataaaaggttgatgtcattgataaatgatagatatcttctaataacatgtactcatctgctaatgttgataccacaacgccctacgaaactatgaatctgtctaaaactaaatatttttgagacacggactcacgctcacatatcccttggctcattttctactgccctttggtctaccacaaattaaacatgttcacaatattattttcttctcactgttaattatttttgtctatccacccgccccatgattttcttgaatagtagatttatcttatagcataaatccattgctgactttcctaagatcgattcatatcctgcattaaaagtattcgtctttcttgtttttatatcttttcacgtgcttatatattatactataaaaa

SEQ ID NO: 113356 - DNA, 331 bp, Glycine max
  unsure (1)..(331): unsure at all n locations
gnccaanatatcaaaaaanggntaatagctcgtgggacttcttgagcatcactcgaaaatagtcatttatagtcagcgatatgttgggtaagatatagaatagacaatacaagacctactgatagtgctattgatatgtgaaacatggatgtaatatgtctgaatttgtaattgagattgaatctacactttatgatttacagaggcatcttccaaaagtggaaatattaccccattttcaatgaatcaaagacaacatgtaattatatttcttactaactagttcatattttaaaatatttgaaagctcgattttatttaataaataata

SEQ ID NO: 113357 - DNA, 319 bp, Glycine max
  unsure (1)..(319): unsure at all n locations
agcttagaagtntagactaactatgcattttgtcttcagctacttcctgcactgtcaaacagtgccacagtgcattcaagttgccaatatcgctttttgtgtcgtctcttccggtgttagtggttaatgaatttcctcgataatatctcgtcgcaccgcaattgtattattttgaatctttggttattccttgattttaatttggcttaacatggtttaacatgcttcagtggttcaaattatgcacttcttattttggtccgctgatagaaatatgctattcttatctctcatattgtgaaatatcatttgtaatctc

SEQ ID NO: 113358 - DNA, 398 bp, Glycine max
ctgatgatgtcgagaagaaatcacatgtgtgtcatcatcaataatgtggagaatgtgaatgtatgtatacacgactttgatgatgtcaaaagaagaatcaaacaaagttgcttcaaaagataatcatggcttctagattaatacaagattgcttcaacaaacaaagctgtgcttctagagatactcaagatcaagccttgccttgaaacaaagtgttgtcaagacatgccaagcttcgtgtatcgattaccaggctgcgttatcgattactagaagacagggttgagaaatagctctttaaaaagggtttgaatttgattctcaacatgtaatcgatgtccagttgagaattttcaaaaaatatccacagtcacattttctcttgatattgaatggca

SEQ ID NO: 113359 - DNA, 64 bp, Glycine max
aaaacgcttgaaaagagaaaaaacaattttttaggaagaaatgggtctatagaaatacacaacc

SEQ ID NO: 113360 - DNA, 491 bp, Glycine max
  unsure (1)..(491): unsure at all n locations
atcctcttagtcacctgctgcatgcaagactttatggtttcttgccttgcaaggctttgattgtacatacccctangtggagttaatagggaggcttttgttggaaatttggatcagaacagtctattaagcactttggactcgttttctggtggtggtattggtagacttggggtatgctcccttggcattgttcccttcatcatatgcacagattgttttccagcttcttgcacaagtatatcccaaattgcaagatcttcaaaagagagaaggtgaggctggaagaaagaaagttctgcagtacactcgatatgcttcagttggatttgccattgtgcaggtcagcaatntgtgaacttttgtttgggataattntttgaaaaaaaaaaagatgtattgtgtttactaactttatgcaaaatgaaggagattcttgcctgataattcatgctgtttaattcactatgcagtcttcatattactaattg

SEQ ID NO: 113361 - DNA, 291 bp, Glycine max
  unsure (1)..(291): unsure at all n locations
gctatgaagaaagcctcttaggaagtttcttatgttgtgagcttagctattagagggggtgtgtatagttaaactccaacttctcacggaagcnttcatttaaatagtgacctatgctataaatagaaacatgtgtgacactggtcataactttgatgaatgatagtctcttgagacacacttcaaagttcaacctctcttcctgcttntgtccttaattttatgcacccccttatctacactctatttttttcgtcactgatacttctttttagctattatccaagcact

SEQ ID NO: 113362 - DNA, 437 bp, Glycine max
agcttcatgatgatgaacaacaattttgatgatgccaaaagcccaaataattgattcaagatttcaagatcaagcatttataatccattccatgattcaagattcaagagaagaaatcaagaagcaacaagtcaagacttcatataggataagtattaaaagatttttttaaaaccaaatatcacagtttggttttacaaaagaattttctcaaatgttctaagttaccagagtgattactctcaagtaatcgacttccagttggcagtaattgtataccagtgactagtttgggttaaaaatgtttcaaatgatttgtaacgtccaaaatgatttgatatagtgtattgattcactttttaggatcgattacagtgaattgacgtggaatcaaatcattgtgaattacaactttctaaatcattgtgtatttttca

SEQ ID NO: 113363 - DNA, 192 bp, Glycine max
agctttactgaatgagagcacccgtcgttgtttccttgatcagatgctggatcctaatcgcttctagacatcgaaagcagacctcatggttctgacacagatataagcgcgcgatcctccccctgtgcctcccattatgacggctattggtcctaaaccgtgccatcagtcgatattctttgtggatcggtc

SEQ ID NO: 113364 - DNA, 415 bp, Glycine max
  unsure (1)..(415): unsure at all n locations
ctgcagcttaaagcatgtggcatatctagaagtgcttgcgtttgaaattctataattccatgtttgtgtatcaactgtacaaaatacctgcataaaaattattgtcttattaggaaaatgaanggtaaaaagcaaagattaatgaaagttgaacaagaccaatttttccaagataagcatctacactagaaattacattaaatgcatgcatttgacaataatacactaacaacatatatgtaagcatgtaataatacataggcagattatttttttataagaaaacaggttatgtttggacgcatgaaattgttcaaatatacagtgagccctttacattgaagtgagaatttgaagatgaatcattgaacctgttacttttgtttggacccatattaaaaaaaaaagaaaaaag

SEQ ID NO: 113365 - DNA, 461 bp, Glycine max
  unsure (1)..(461): unsure at all n locations
ttatagtatcatgttgcattgtttatacatgtgaagtttgtgcatgatgttcaattctagatgtagtatccggaggtgccatcttgtgtgacgtcttttgttgttttcgaagatgaacaaaaggcaccatcatgtggaatttgatcagtcgttgttgctttccagagatgaataggaggcaccatccaagatggcatatccattgcaattatgtttataatagatgcgatttgaattgtgataaaattgcaaagtggatgcaatagaaactaaaaaattaagaaagaagcactaagaatattaaaggaaagacaagctgttaacattaaatgaaagctaacangtacaatttgcattgaaattacgaaaggattgctttgattttcattcttgatctaggccatagtcaactcgaaatagccaatagttactcctattgtttcactcacacttgcaatgac

SEQ ID NO: 113366 - DNA, 461 bp, Glycine max
  unsure (1)..(461): unsure at all n locations
cgcagctctgtttacgtgacgcgaaattattattcttatattccacaagcataaacttattggcctgtgttcttttaaggaacccaaagaatctagatttgattattgtgagggccttaattattttctctttttttttnttttgctttcttcttaggcctcccttttctgcttcactttcttttacttttcccttttcgcctacgctttctgggacctaaaaacgaaaatgaaagacatgacaaagaccttaatttgttacagaacagcagattgttcctcacatggactcattgcatttatactgcgctatctctatctctttcttttttatcatggaataaaattaaaatcaatagtcaaattcgtacatgaaagcatgaaatactaataaattaattcttcacaagataaaaatttaaatttaatctcttcatgcataaaaaatatgacaaattaat

SEQ ID NO: 113367 - DNA, 378 bp, Glycine max
ccttgacttggtagaacctcttgcctgtttgatttgttcccatgcttgctaaagtgagacaaaagctggtgcaaatcaaaactccgatatctcatggatggatgcatgaaggaatgcatataacacagatgcaatctaataatgcgggggtccggggaattcgtccccttcttagacacaacgtctatgggtagcaaagtgccccaacgtacgtttttaacaaggcgacacggaccctccgttggtttgtttacacaatggatcaagacagaacccatatgcgatgcctatgcaaaagacacaatgcgggaatgtacacagttagacaatattcactgaacataagcaaaagggtatatgatacttatgcatggcagt

SEQ ID NO: 113368 - DNA, 404 bp, Glycine max
  unsure (1)..(404): unsure at all n locations
cctatcaatatatggagtatgctgatgatanctgttatgtgggtgaggctgcttatgagaatgtctatgctttaaaggccttacttaaaggctttgaactggcttctggcctaaagattaattttgcttaaattcaatttgggatcatagaaggtggagttaattgcgctttggaagcagctcataccatgaattgtagataaatggattatccttttcattatctaagcattcctattggtgctaatccttcaagccagctggtgtgggagcctctcatctataaattcaaatctaaatcattcaaatgggcccagaaagatatatccatgggtgggaagatcacccttataaattctgtcctgaatgctcgttcaatttatcttctcttccttttcaacata

SEQ ID NO: 113369 - DNA, 440 bp, Glycine max
gagtcttcacaaataaccatcatgaatcatattactaacaaaactacccatcatatctcccaaatccccatacccactattatcatttgagaaagaagtccaccctaacctgttattgtgaagtcccactcgtatacacgcacttcacgaccccgaatatgccctcctttcacgatttgtggcagatatgatggccaaaggttgaagctttgtgtggagcttcaatggtggaggaagaagaagagaatggcaacgtgagggagagagagagctgtctgaaataatgtggggctgagtgaagagagagagagttgctttttgattttaaaaaaaaggctttttcctcatttcttattattttattataaactatgccacatgtctccatttgagtggagcatatatggcccattttccctgttgactgtgacccatactca

SEQ ID NO: 113370 - DNA, 423 bp, Glycine max
agctagttatgagaggggtgtgtgtagctaagctctatcttctcaaggaacttttctcaaagaagcttctcaaggaagttttctcaagaaagcttctcaaggaagctacctagtctataaatagaagcatgtgtaacacttgttgtaactttgatgaatgagagtcttgtgagacacaactcaaagatcaacttctctccctttttcttccttcaatttcatgctcccccttctatctttctctccctctttcttttcctccattgaagcatcctctccaagcttcttatccaaggcttatcttggtggtgaagctcattctttcatggcttattccctaagggatgacgcctcctctcacctattctcctttgtcttccgctgcatcttcatggtggaaaatcaccattaaaggatctcatt

SEQ ID NO: 113371 - DNA, 478 bp, Glycine max
ctgcaagcttgtagaattcaccccaattccaatgtcttatgctgacttgctcccatatctacttgataattcaatggtagccataaccccaaccaatgttcatcaacctccgtttctccgataatacgactcgtacgcaacgtgtgcttgtcatggagaaacgtcggggcgttccattgagcattgtatggccctgaatcgtaatgtgcaaggtctaattgatgcgggctggctgaaatttgaggagaatcacgtgtaaatcctgacattgacaagagatgccacacatggggaaattgtgaaagctgttgttagatgtctccaatgactcatcatgattctcaagtttgtaccattattgtaaaccacagttacaatgttaaatgatatggatatctttgtccctcatcctctcacaaacgcatctttgcttattcaactttcaccggaatgtgggtgcaagccattggtctgtttg

SEQ ID NO: 113372 - DNA, 443 bp, Glycine max
  unsure (1)..(443): unsure at all n locations
tgctgatgttctccatatgctgatgatacgatattttttggagaagcatctatggcaaatgtcaaaactgtgaaggttattctcaggagtttttgagctggtttctggattgagaattaattntgctaagagcaaatttggagctgttggtcaatctgaggagtggtgtcttcatgctgcaaactatcttaactgtgctntgcttcaatttcctttctcttatttaggaatttcgattgctgtcaatcccaaaaaaagggttgtgtgggatcctgtcattaggaaatttgaagataggttgaataggtggaataagagaaacatatccatggctggcagactcactcttattaaggcttgtttaacagcactacccttgttgtacttatccttnttcanggcccctaanacagccattaatatgttatcttccattcaaagac

SEQ ID NO: 113373 - DNA, 484 bp, Glycine max
  unsure (1)..(484): unsure at all n locations
ctgctgcatgcaagcttgccacccatctcgcccaggcgatctgtttttcttcctccanaatcaacagccttctggaggaatcttttggagggcccaagtgggcctggttgctatttgcaccctcatttttactaaatacaccccctgccttttttggtgattctttttttcgtaaagttacggaaacttacgaatttcgtaacaatacttggtttctttccgtaatgttacggaaccttgcggatcacataatcatcccctttttgacttacggaatgttacggaacctcactaattgtgcaacaatgcattcatttgatttccggtgtgtcacggaaccttacggattgtgcatcaatattttcttttgaattctggcatgtcccggaacttcacaaaaatgcctaatgatgggtgccaagcacctcacaatgaccaaacaaatagtacatgtcatcaatcaaatgtccccggacgaaattag

SEQ ID NO: 113374 - DNA, 345 bp, Glycine max
ctcagctgtactgagtctcgaagggctgacgcggaattgttattctataaacacactcccctgctctcattgactggaagctcatagggactccatctctctcttattttgattaaacatagggctcattatatttatgtgtttacaacgtacattaaattctcatgatagcatttttatgttacgacctctactagttagctatcaagcgtaatctattctagatctccgtaacccattggaatgatggtaccattgcccttaattctaaatacctattcttatgttataacatatgtggtagtggttgtaacatgagcattatcattgaatcttttgttatgc

SEQ ID NO: 113375 - DNA, 463 bp, Glycine max
gatacttaagtcacctgctgcatgcaagcttcgtccgcagatccctgatgtaagactgggcctaaactaaacagcattattgtaagaacataattaaaaccaaaacttaatatgcagatcacttatgtaaggctaagtttcggtcctacttcaatcaagttctaaggcaacagtacatttcccaatgctaaagtcacctaactgtgcacacaaatgggtgatctgaccatatgcatacaaacatcaagcattgaacatagaaaacacaatcaattagatattatgtatttacatcagttgttcattataaatccccaactatggtgtttagccagccattacaaagaaaccctaacaataaatgaaattaaaaacagagaatgatagttccctacacaagatggagtattactactactttttgaacatctcaaactactctctactcaatatctgtctcaat

SEQ ID NO: 113376 - DNA, 415 bp, Glycine max
  unsure (1)..(415): unsure at all n locations
acacttaaatactcagcttgtgtatcgatacacttatttggtaatcgattactattgtatgttntctgaaaaatcaaaagacgtaactcttcataagggttttgactttttcaaattggtttaaagtttttctaaaagttataactcttttgaatggtcctcttgaccagacatggacagtctataaaagcaagactttgtttttgtcaaaatctctttgaacttcttcttcttctttgtaccaaaagctttctgaagttttctagttttccaaaccttgaaaacttgtgctattcatccttttcattctcttctccctttgccaaaaagaattcgccaaggactaaccgcctgaattattttgtgtctcttttctcccctttccaaaagaacaaaggactaatcgcctgaattc

SEQ ID NO: 113377 - DNA, 422 bp, Glycine max
  unsure (1)..(422): unsure at all n locations
acctgctgcatgcaagcttctatgattgtggtcttaacccgtctattaatttattaagctagattggttctgaaaatccatgagtgggcgcctttcttaataacccacgatatctttccaaagcctcactcaaggactcgtctggaaattgatgaaagaatgagatggcaacttttccttcagtagtcttggactctgggaaatatttcttcaagaattgttcaaccacttcatcccaagtcttaagactgttacctttaaatgaatggagccatcttttcatctctccagacaaagaaaatgaaaacaagctcaatctaacagcatcctcatgcacaccatccaatttgacagtgtngcanatctcaatataagtggctagatgtgcatacaggtcttcattgggcataccatgaaacaaa

SEQ ID NO: 113378 - DNA, 392 bp, Glycine max
  unsure (1)..(392): unsure at all n locations
tgtccaattagatatttttttttctttcttcaatttctagattnagagctgacggactagttgatcaacataatatattcacctaaatttatttctgcaatgtattggtgactaattgaagatgtatttgtatctcacgtgtctgatatgcagatgataacttcatttcactgcatatctgcatctatgatctaataggttctagacttataattactattggggtggcctttcatgagaggattctttacttgcatgctcaatggtggtgctggatgctcataacttctctctgatatgcccgccttccaagtcagatttctcttgaagagaacttgtttactgttttcttaatgctctagaaatgcatctaatgaagagatgttctctct

SEQ ID NO: 113379 - DNA, 489 bp, Glycine max
tcctcttagtcacctgctgcatgcaagcttctggtgggacatcttgacttgcttcccaatctgacattcaccacagattctgccttcttctattttcagattgggaatgcctctaacagcacctttgtcaatgattttcttcatgcctcttaagtgcagatgtccaaatctttgatgccatattttgacttcatcttctttggaggatagacatgtggaggagtaactggtttcttgaggtgtccataggtaacagttgtcctttgatctgctgcccttcattagaacttcactcttctcattggtcaccaagcattctgactttgtgaagtttacattgaatccttcatcacacaactgactgatgctgatcaagtttgcagtcagtcccttcaccatcagtactttgttcagactaggaagtccatcatggactatctttcccattccagtgatctttcctttatagccatctccaaatgtcacata

SEQ ID NO: 113380 - DNA, 498 bp, Glycine max
  unsure (1)..(498): unsure at all n locations
ctttagtgacctatgatactcagcttccagtatgaggagatgagaatgcaaaaaaattgttcataatagagcaagaatggcagctctaaggttgccccaaatggcttcattttgaagggcgtgattgttgaacaagtgcacaaatttgtcacaagtagtaaagttaaaatgaaagtctgagtgtcgaatccacatagactttgtttgtacttaggtaggtgaatatataatttttcaagcaataaataaattggtttaaaaggttgtgaagaaacagtaaagtaaattgacataaattaaattaaaatacacaagaaagaaaaataaacataaaaggaaattaattaattaaaacataaaagatgagagaaaccaataatattgcagaagttaattcagaagatgagaatgttgggggcttagcctaccagagctactcttgatgtaatggtaatcatntttctctacttatgtttattcctattttcacttgcatct

SEQ ID NO: 113381 - DNA, 417 bp, Glycine max
  unsure (1)..(417): unsure at all n locations
agcttgagcacatgaattgcacgtatattntttcatgcgttgaacatattcatttgaggattgaacacactttcattggcttcaggattgtatgctgtctctgacttaattatttactttttttgttgaagtataattagattaattcatcattgggtttctatattcatttggctaatgagtatgtctgacttaacatgatttgctattggattgacccctttatcttatttgagttcctccccactcctagtgtgtgaaatgtccaatgtctttctaaccaaatttcaaacctcagtgtaggttgaaatagacatcaaacgtcttttttccttggctctttattgcaagaactctagacatgattgggtctgtatctgaactatattcaggcttaacctcgaaaatctcctctct

SEQ ID NO: 113382 - DNA, 368 bp, Glycine max
tgacgagacaatgtgaggtgtctctgaatatctactgtttgatcactcgagactgcacagttggagaagctaaacatgaactacatgtctctctcatgtgaagattacctttacaatagcttataagtttagaagcgctagttagtttgtatatcaataataaactttcttgtcctacatctaatgtaagtgagacaagataaagtcgatgaagcaacccatttgatctaataactgtgaactgattgtagccaattggcacacacaaatatttagcaagcatgtacacaatttctaggtataacccgtcgccactttgtgatcattaacaattataaacgaatcatatttcctgagatagagctatt

SEQ ID NO: 113383 - DNA, 494 bp, Glycine max
  unsure (1)..(494): unsure at all n locations
tcgtaccggatccttaatcacctgctgcatgcaagcttcttgaactatcataaaaataataaacgaacaaaaattaactcagttaagccactaaaattggattattgatataagagggtagtttgtagttgattataaatttgaagtctctatgctcccgacattatacaaaaatacgaagcttcttaaactatcgtcaaaataatagacgaacaaaaattaaattacatggcaatctcaaatgaaactttcgtaagaatgaataggacgacatattcaactagattaaatcatattattaagaagaaaataagataatagtgaaggaatgaagtcaatgaactataggtacttgttgagcttcgattttgtgttttcttgatcttgagtcacttatctatttagaaatgatcataagaaactcagcctttctcacctttcgctaaagaattaaacgaganatctctgaaaataagaaagagaatagaactact

SEQ ID NO: 113384 - DNA, 407 bp, Glycine max
  unsure (1)..(407): unsure at all n locations
ctntggaganatgaaatacatcacanacttgtcctccaaatgtctgacaatatttgttttcttcgttgttgcagtcggtcacaaagatacccaatgctacagatctgaacccaaaatgcaagaaaaccaagagaaaacaacatcagagaaggctcangaacaccaaaaaatttaagctttgacagagaaagcaagcacacgaacctgtattcatggagtttgaagataaaaatcaaagcttttgtcttgcaaaggaagaacaatactcaaccacaattaaataaaggtgaggaacacaaaaaaattcaatcttttgtaccaacagaacccagaaatcaaatatatcacaatgaacacgttggagaaggcttagaaacacaaaataaaggcattacacccaaaaaaaa

SEQ ID NO: 113385 - DNA, 408 bp, Glycine max
  unsure (1)..(408): unsure at all n locations
atgtgaaattggtagagtgttggaggctaggacatgcatgaattctcttaataattttggcttcacagtccctttcaattattccttgtttattagaacgggagaagggaagaagcattggcattacttgaagaagttggagaagagaaatccattatagatcagctaacgtgtggaagcattgttcatggtttactgcgcaagggtcaattagaagatgcattatccaatgaggatgccatgaaaccgataggcatatcacctaccatccatgtttaaacatcactaatagttcatttctttaaagagaaacaagtagagaaagctattgagactcttgaggagatgatacattccggttatgaaccaaccattgttacatatttngcacttataggtgggtacatg

SEQ ID NO: 113386 - DNA, 267 bp, Glycine max
agtacgacactcaccgatgtatgagcgtcgtcaccaacacctctttgaatccatcctggatggccattgctcctggagcgacgcgttcatctcatggacgacaagtatactgatcttcacgaggaaatatggcgccggcgtgggtcacctctgtttactcctatggccatgtatggcccaaaaatattccttgaatgtgatgctaatgcttggccaacagacgatggcgtgcgcgacacgagatcctgagttatgggtcaccggatc

SEQ ID NO: 113387 - DNA, 406 bp, Glycine max
gcacaagatacaccatccgcgcaaacataactgagttaagactacgtttctcgttgtgtcatacaaatatgtcctcctcactcagaatcaaattaatacttctaaagtcatgaccttttgttatatccagcaagcataatataatttctcctaatgatatagagatttctggcattcccatctccacaaacaatttccctcccaccggtcaccttaacctaacaccctggcttttatggcttctacaaggttgtataatctagtatgcttcctatatgtgaaaataaagcactttcacccgaaggtcttgagaaaataatagtatgcactatccccacaacccccagccaccttttgacacacatatatgccagattctttcttcctctcatatgtctctctgttt

SEQ ID NO: 113388 - DNA, 493 bp, Glycine max
  unsure (1)..(493): unsure at all n locations
taccggatcttaagtcacctgctgcatgcaagcttgtcaggtttcctaactcttttggtatgttgccagtgatgccattcccttgcaaagaactaatacaagtacaatatgcatcaatttacttccccatcatcaaaaattgagcgagtagaatggccaaaaataattttagtattatggagttgaccaagattgtgtgaatattntttgtaatagaaatccttacagagctgtaagatattttagaactcctatccttgggttcaagtatcctgtgaatcccatatatgctagtgatctgaaatgaagcaatttatatattacacagcaagcacgaattaaagatttaaaaatgtgaaatatataattttctaaaatgaatagtgacagccaacatcttcagcaaatcatataattaaaagaaaacaacatcatataatactaaaatatcttacacttgcatgacattgttgtttgagtcacagtatacacg

SEQ ID NO: 113389 - DNA, 443 bp, Glycine max
  unsure (1)..(443): unsure at all n locations
cgtatccatcgacagaagcttatattcttaagagtatcatagngggtattggaattatttaacagtcaaaacaagtgacttctcgtaatgtgaatttagctganaaaaaatattacttgggaaacctattagtggatgaacatggattcatttagttacttaaggggtgattttagaatgaaaagcaataattttccttgatgaagtcgaaatgcgattttacctgaaaaaaaggattacctgatcgagaaacctattattagttgatgaacatgaattcatttggttacttaagagatgattntagaataaaaagatgaacaatttccttgatgtgaccatttggaatgtaagatgtcccaaccattggctagcttattgcagaanattaagtatttaaccaagtatattgatgataaacaattgcacaagtgactcctaca

SEQ ID NO: 113390 - DNA, 427 bp, Glycine max
  unsure (1)..(427): unsure at all n locations
ctttatgtcaggtcacattaactntagtttgtatttttgggtattgtacatcttcctctccaacttgatttctcaatttctatcacatacactcctcacttggcttaaaagtatttattctcttttaattataaaaatttatttagtaacaacataatattgtgtgtattattaacaaagaacaatgtctctcaaaatattgtgacaaattttgacaccaaagtggtatagccagtatattgaataaatcctaaatttctctcaaaataatgaagactcaaattcaattaaaaaaaaagataatagactagaataatagacaatttaaaaaatcaaaaataaaagttaaaatataaaattattagtagtttaaaaatattgagacatgttgttttgggtaattactatatgaaatatacttacaaca

SEQ ID NO: 113391 - DNA, 452 bp, Glycine max
  unsure (1)..(452): unsure at all n locations
tactcagctatagaatnttgacctgaccaagannaatctaataagtatggatgtaagtttcatggagaatgagaagtggagctggaatgataaaaaaataaataaatcagcaaactgatgatntgaatcaagaagagttagttgatcatcctcctgttcgcggcactagattaattattggcatatattagaggtgcaattttattgtgcttgaaccagcaggatatcatgaagcagaanaaaaaaatcctaaatggatggatgctatgtagaaagagctcgctatgataaaaaaaaaaaataaatcacacctgggaattagttgaaagacctcaacattagaaggtgattggagtaaagtgggtgttcanaaaaaaggagaatgcagattgctcaattaaaaaatataaagcaaggctagtgggtaaagagtatgttcaagtttctggagt

SEQ ID NO: 113392 - DNA, 475 bp, Glycine max
agcttccttaagaagattcctaaataagctagagcttatctacacatacctctctaatagctaagctcacctccttgagatgagaagctagagcttagctacacaccccctataatatctaagctcacccccatgaaaaaatacatgaaaatacaaaaaaaaagtccctactacaaagactactcaaaatgcctcataatacaaggctaaaaccctatactactagaatggccaaaatacaaggcctaaatgaaggaaaaaaacctattctaatatttacaaagataagcgggctcatacttagcccatgggctcaaaatctaccctaaggctcatgataaccctatggccttcccttggatctctggcccaatctacttggagtcttctatctaatgcccttgtggggtaggattgcatcatggatcaacaacaagaatgttgttagtttgattataagtgaaaatcgacatgg

SEQ ID NO: 113393 - DNA, 422 bp, Glycine max
  unsure (1)..(422): unsure at all n locations
ttgtttgatcacctaaccattcccattcatccgatccttgctgctgaatgtgtataccttcaatatcctttaaaaaattgactgctgactcaatttcattttcaaacagcgatcttctccatagaaattgccattcccagcctgactgcatgtgttgtcccatgtgtctgatgatttggttttgctgtgtagatatttggtacaatctaggatacctctcagctagaggttgctgctgctgattccatttatcttcccaaagcctgaacttatcacctcctacaattttccacctcatgttgctgtgaactatgtctccatgctgtgctgaattaacagtttgttttaaatctttccaccatatagattgatgcccttcccttccttcttcatacaagctcctccagccnccatactttgac

SEQ ID NO: 113394 - DNA, 466 bp, Glycine max
agcttctgcatgtctagagagttgtagttagttatatgtccaagttccagagagttagagagattttgttgtgtgaagatctgcagagactagagctagaagatgaagccgtcctaagagcttgagatgagtttgtgagtgattgtgaggtcctagaggtgaaggagacatccccactacttgtatttctgcaatctttcatctttctcttctctttgttggaaaggaagcttcctagttatggaaaactaaatcctttgttggatcttccttgtaggtacttgatgtaaatatctttttttttatctatttaatgatgttgtgtgtgttcactatgctatcataacttcattctaccatgcttttgccttgatcacatatatgcatgtgtgtttatgatcattcatcagtggaaactggtctgattcttataacttgatatgacagggctatgttgtcgtactat

SEQ ID NO: 113395 - DNA, 411 bp, Glycine max
atgtctcatatggccacgactaatatttgttgcatcaagacatagcaatcatgagactttaagcctaccaacttaagatctttaaactacacaaggattttaatatttgaagagtatccttgtgggactttgacctgacacagacactgacaaaaattgatcttctcctttttggacaaagtatgacaagctggaggcaagtatattttttttaccatcagaccttggatgtaactgcgattgtatacccatctcagctagatcttgacgagtatttaaaccatctttcatcttgccttgaatgttaatgagtgtcccaatgacgctatcacatacatttttctccacatgcataacatgattaacatcaatacactgtctaacatctagatcagaccagtacggaagatc

SEQ ID NO: 113396 - DNA, 485 bp, Glycine max
  unsure (1)..(485): unsure at all n locations
cacctgcggcatgcaagcttctatagaaagttcgttcctaatttctctactttgcctcacctctcaatgagctggtgaagaagaatgtggcatttacctgnggtgaaaaacaagagcaagcctttgctttactcaaataaaaccttactatgacacctgttctatctcttcctgactcttctaaaacttttgagctaaaatgtgatgcctctggagtgcaagttggagctgtattgtacaaggtggacaccctattgcttattttagtgaaaaacttcatggtgtcaccctcaactaccccacctatgataaagagctttatgccttaataagagccctccatacttgagaacacttaccttgttccatgtaatttgtcattcatagtgatcatcaatcacttatgtacattagatggcaaagcaagttaaacaaatgcgttgcaaatgggtagagtacctacagcaatgtccatatgttatcaa

SEQ ID NO: 113397 - DNA, 297 bp, Glycine max
  unsure (1)..(297): unsure at all n locations
taaatacttagtacttccattctgtgtgtataacaatcattatctcctcaattcaagaccattacgccactctgataagtgttgagttatcaccttctcgctaagtcaatctgttggcttagccagcatccgctaagcaaaacactcattggctaatcacgaggaataatctggaagaagaagagctataaatgttctctgagcgcaccgctttatcttactaagcgcacacgttcantacatccgttgagcaagaagagcacgtgctcagccgaaatatactaatgtacactaagc

SEQ ID NO: 113398 - DNA, 480 bp, Glycine max
  unsure (1)..(480): unsure at all n locations
gtcacctgctgcatgcaagcttatatctctccattatatatgtntttgtgtgtatatnctacagcttgcctaagtatttaatagcattattgttatctaccataaaaccacccatgttttattatcaggaataattttgactaatgttttccctataagcgtctactagcttcttattcataaaaaagaaagaagtctgtgggagttctcaaaataaacattctccctaaataaactattgaccgactcagattaagataatatgggcagattttagaagaccttaaaactaacataaagggaaaagaatactccagaacacaatcattaaagaacaaacctcaagatccttcaacaaataaaaagcagcttctccttttgcagtttttttatttgccccctttccttcacgaaccaatatggcatttggaagtggtacactaacctcaacatgcattgctgatcccacttgttcacaat

SEQ ID NO: 113399 - DNA, 452 bp, Glycine max
  unsure (1)..(452): unsure at all n locations
gatccttaatctcctgctgcatgcaagcttgcctcaaagaggtccaggaaggacatttctgccgaatgaactaattccgctcctgagtatgacattcaccgctttatgatcgccgtacaccatcatcgcttcgaggccatcaatggatggtcatttctccgggagcgacgcgtccatctcatggacgacgagtttacggatttccaagatgatatatgtcgccggcggtgggcctcactagttacccccatggtcaagttcgatccataaatattcctctaattgtatgccaatgcttggccaacataggagggcgtgcatgacatgaagtcctgtgtaaggggtcagtggatcccatttgatgcagatgctatcggcacactcttggatatccgttggtgctggaagatggccatgaatgcgattatggtcatatgaagaaccngtctaat

SEQ ID NO: 113400 - DNA, 483 bp, Glycine max
cgctgcatgcaagcttatcgtaatcgattacatagttctttttgagacaatgattgatttttttaggaatctctgctttaatcagttaccatgtgatataatcgatcacttctcttataaaaagtgtttcagaagtaatcaagaacactttaatcgattacgttgaggatctaaccgattacattgttcttgaaagttttctagtttttgggaaaaatactttaatcgattgaaatgataatataattggttactttgttgaaataattgattacattgtatatttaattgattacaggtgattataattgttttctctataaatagccaccttgtgttctcacttcatagtacaagttcatgaagtgcgaaattatgagctaaaataactgaaagaagagaagattagtgcttagaaatagtaactcacaacttctaatctttgattatgaagatcattttgtgaaaagtgagtcgtgatat

SEQ ID NO: 113401 - DNA, 442 bp, Glycine max
ttactaaggatgtgtcgcatatatggaattgatcatccgactcaaatgcgaactttatgtcaaggtttaagacctcagacaaagcttatgttgaatgcttctgcaagtggaacaatgtatactaaaatagaaaatgaagctattggtttcattgaaaacatgatgaagaatgattctttaattcatcatgatagaggaactccacataagaagataaaaggaatgtttgagaatgattcaccatctacattgctagctcaaaacaaaattctcactcaataaattgaagcttttaaaaaaacagctttcacaggttcctcaacaaattcaagccatgcacaatgtgttagtctagaaccaaccaacattgatttgtgatctttatggaggagagtatccaaatggtcaatgctaatattccttattctaacacttttttacc

SEQ ID NO: 113402 - DNA, 502 bp, Glycine max
ctcgtacccgggatcctcttagtcacctgcatgctgctagcttgtgtttgggcaacagcaccccacctgtcgtccccaatgtctcctgacccccgcgacatatctccatgtaccactctgtggtcaacgaataaaagtatgaagtctcacccttccacacttcctcatttcaagcttgtaggattatggggtacccatcacatgtggtactatgtggcggtcgggcgatggtgctagtcaactctccacatccacaaatcacacataaacccaccatcctcagttgcccaccttcattgagctcacgtactcccacgtatcccttatcctcgttcctctcaatgttgggtccgcatcaatcctctcaagcttccacaacatccaagtaattcaacatgcaatcatcatgaactaacacagccaagaaaactgagcatatgcagatatctttgcccaaaacacatatcaatatcacagcttttcacactcaaataccccaata

SEQ ID NO: 113403 - DNA, 365 bp, Glycine max
  unsure (1)..(365): unsure at all n locations
ccaagaattgattctgtctaagagctcgcagaagctccctgtgaccctttcttgggcagaggaagatgcgttgaaaactcattcttctgcatatgttgcatcccaagaggggcaaaaggaagctgacaagattgtcgcattgcctggccaaccctatggggtgaattttgaccaatattcaggctatgtcactgttgatccagaggccggaagagcacttttctattattattgggagtctccatataacctcttcaccaaacctttagtattgtggctaaatggaagtaaaaaacaaaactgacattgcttcaacattatctttncatgtgcttaaattcctatgcatatctgccattttttaa

SEQ ID NO: 113404 - DNA, 394 bp, Glycine max
  unsure (1)..(394): unsure at all n locations
actgttttgtccaaagtggttttacaaaggtttangatgtataaagtctcattttctataaaaatctcattttctatacatgtagttgtgtctccccatataaacatgttttattttaagtgatggtatttaaagtgattccttctttgagaatgaagatatttcttttaaccttatgtattcaaattgttttaaaaagggttggtgtttaaacttgttatctgattatgttatcgtgttttccctcaacggtagattttgtcttcaaaaacaggttgtttttattatttcaattgcaatgtcttccattgggttttcttatcctttcatgcagagcaaacaacctctttccatgtatgatttatctngtacaaccctatgtgttcgaaaatca

SEQ ID NO: 113405 - DNA, 298 bp, Glycine max
ctcaaatatgggtgagtaggaatgactcactttgggcccttatgggattctttgctttatggaaactatggggacggggagaaccttggagcggtcatggaaatcatgtggagattcacatgtgactttactgtaagggccttctttcttctatttcttgtaaaaaacaaatcttactcatctcgctacaaatcaaatacacctaaaattgttgtgcttcttaaatatatattatgtattgtaaacagaaatattacaacggcgcgtgtgtgtgtgtgtgtgcccgtgtgtgtctcca

SEQ ID NO: 113406 - DNA, 419 bp, Glycine max
  unsure (1)..(419): unsure at all n locations
tgaatgcgttatcagatatgtacgatatttcgtctatagccaacaaagtatacttgatgcgtgggttgttcaaccttaagatgggagaaggtatctctataactaatcatattaatgaatttaatactattcttgcccagttgaagttggtgcagatcaaatttgatgatgatgtgaaagcattgattctattgtcatcactatcggatagttgggttgcaactgtcactgcagtttgtatttctacaagagagaacacattaaagcttagtgacattcgtgacttgatcttaagtgaagatgttcccaagatagatttaggagaatcttctagtcatgtttccaatttatcattgtatacttgaggcagatgaaagactanccataagggtcagaatggtcgagctatatcaaagtca

SEQ ID NO: 113407 - DNA, 399 bp, Glycine max
cgcagagactaacgtcaacttctgcgagcttcgtttatctcggccgacaggcctgttgacacgtggagatttacgtcatcttccgcgctcacaagatctgtcatactgacttttgagtcacgctgacgagcggaaatacccgaggggttatccgtataaactctttgcattcaggaagaatgaaagcctgatatcacgcatagactaacgtcgtcttctgcgcccttcttcaatcgcggccgacaagcccgttgacatgcggagatttacgtcatctaccacgctcacaagatctgtcgtactgacttttgagacacgctgacgggcggatatacccgagtggtatccgtataaacctttgttgtctgtagacgaaagcctgatagcaccagaactaac

SEQ ID NO: 113408 - DNA, 485 bp, Glycine max
  unsure (1)..(485): unsure at all n locations
tcacctgctgcatgcaagcttaatcttaagcgatcactagtgttttatatttntctttaaagaaatngaaagttaataaacaaaaccaactcataacataatttctctccatcaaaagtcacttgagatcgttcaatgtccaacgccttaacgaccttgttgtttttgttatttaaaatgaatctttcagaagcatataaccaattcaacacagaaactttctcactttcaagaactacgtaggcctgaattcctcatcgcacctgaggatacgtgggagcaatggcacccccttgtcgaccccaaataataaagaaacataaaaagggaaaatacataattntgaagtcacgttgcgcacactcgattaaaggttgtcgtcccttgtgatgggcgtgtgggatgctaatacatttcccatgcgtaaacaactctcatacccttatttntaaaattcgtatgcctctttctaatnttgtctaatg

SEQ ID NO: 113409 - DNA, 459 bp, Glycine max
  unsure (1)..(459): unsure at all n locations
gactgagtcataagaaaatataatatgtgaccatggtattgatattgtaatcatctntttcaacatctctttcaacaatcaagaaatctatctttcaatcttctttctcaacatcattcaactctttcaacagatnttttctgattctttttctcttcatctttctaaaaagttttgttcaaaactttttcttccaagtaaagttctttgttcaaaaacttgtgctattcatctttttcattctcttctccctttgccaaaagaacaaaggactaactgcctgaattcttttgtgtctctgttctccctttgcaagagaattcaaaggaccccgcctgagaattcttttgattcttcccttccctttaaacaaaagatctcaaaggactaaccgcctgagatatcttttgtttcccctttacaaagattcaaaggactaaccgcctgagaattctttgt

SEQ ID NO: 113410 - DNA, 330 bp, Glycine max
tgctaagcctacattctatggcttagcgagttcatgagtctctatagttttgtgatgaactcgctaagcctgcaactatgcgcttaacgaattcatacgatctgggttttcctatgcgtttctgggtttgtagtgatgaattcgctaagccggcatgtcgcgcttagcgagttcatgagtttaagtttgatattcttacttttctgagtttttgtttcatgagtctttgttcttcgccatgtagcaaagctgagttcttcccacaatctgttgctcgctaagcgcctgtacgcactaagcgagcatcacgattttctatttgattctata

SEQ ID NO: 113411 - DNA, 471 bp, Glycine max
  unsure (1)..(471): unsure at all n locations
agacttgganaatgatttctatacaaaagtttgtcgtataaagtgactaacaacatgctactttcggattataccattgtgattgagactgagtgtatgtgataaattgagtatgtattgacttgtagtatatatgtgcattgagtggtgagctatgaaatgtacaatcacatgactataataccctttaatggcgacgagttaatgcatgacgagtattgtgatgggaaccaccgtggggacccgacgagtttaatcactagcgcaatgagataaaattattttgagaacaattgaggattcgtgtgttttgtacagtttatagatagagtctgtgtgctagaatgttttttgggttggatctgaattaggagggaaataccctgaccgactctttgaagtctatgccttatcggtaaatacacccagtttgagggctcttttaatcttatgccgatcccaaatggttgg

SEQ ID NO: 113412 - DNA, 287 bp, Glycine max
  unsure (1)..(287): unsure at all n locations
gctnttgacaataccaataactatggctgacactaactatntacttttaaacaaaacaagccatatattctggtcgagaaaacatatactacgagtgattttctttttaaatgattatgaaaatgaattatccgcatctccatgttcccctcctatccattcaaaagaataagacaaggaattntgttggtcaaacaaatatcaaaataacaatgtcaaaacaacaattatgtacaatgatttataatttattccccacaccatctatagaaaaaaataaacacctt

SEQ ID NO: 113413 - DNA, 405 bp, Glycine max
  unsure (1)..(405): unsure at all n locations
agctngcacaagtaactaaattggttgttggttaattatgaagtaaatatgataagggaccacttaggatcatcttgaaaacaagtataaaaagaaaggaacttgacactaaccacgacctgcatatatgaaccaaagttattcaaagaaacttgaccctaaccgcgacctgtcagtataaccaatgttatcaaacgagcatgaccctaactacgacttgccggtaaaaccaacactatcagtttttaacccaagaacaagggaaaaactctcacaatagaaaaactctcaaattttattaatattcaaaatctacctaacaaagtgttttaaggagtctatttataactcctactaataacccttaattatgcccaatgaccaataactaacctaataatttaa

SEQ ID NO: 113414 - DNA, 405 bp, Glycine max
  unsure (1)..(405): unsure at all n locations
ggaccaactcatttatttcaaattaataaatcatatctagtcaaggtctgagagaccatacaagtttcctaacgatttctaattatgtgggccattaagtctatcatatgctgacaatagccgagaagcccatgaatctcttcgggggcggagtaggtgtctgccatcgccttggccttggctaacaatcggggaagttcttgactcccgttcaaggtaagagcaaaccgatccatccacatggttgcctcttggtgtaaagagtcgatcacccttcctctagcctctttntccgcatatacttgggcatactcatccgcgattctatgctcgtgggccgtggctagacccaactcttcttggtacttggcgatgatagcttacatgttggtttctgtctcgcat

SEQ ID NO: 113415 - DNA, 449 bp, Glycine max
  unsure (1)..(449): unsure at all n locations
gcctgctgcatgcaagcttcctctgtttgctgcgaggatcattatttctttatcttctctcaatctttacgaagtctccaatatcatttacttataaaatgaaaacattcatcacttagtgtaagtggtattagagctaaatattcttggtaatgtagaaaccagacaatgtgtgcaactgatgataattaatgttaataaaagtacaagttaatcagtaagacatacgcacgataggaaatataccatataaaataaatgtacacagaaagaaaattttgttgagctaataagtgagtgaagaaattatataaaaacggacaagttaaacacataaattataataacctggacacctaatattgtggattcaaggtaatcngaaattacgtaaaaatttacttgttgacggatgttccaatatcctagcactcttatatttccctaat

SEQ ID NO: 113416 - DNA, 397 bp, Glycine max
atgaaatcatattattccaatgatatgggatatgactcaaatccataacactgctattgctgctaggcctgcctggcttcaaattaaccaggttgaaaaccttcatatttcaccaccaaactccattatctcattcttcatctacttgatagctgaaactaacatttaggctcgctcctacagcttttcctgccacctaagacatgggctgcatttccctgaacttctatcaccccctcactgtgcttaagtcagaggataaagccttgtgagatcaacctgatgcgatcctatggtctgttaggagctccctcattcggggcatctttcagaaacgcttaacttatcttgacagagtgccagaccagtgtactaacataacagagcatccttgact

SEQ ID NO: 113417 - DNA, 504 bp, Glycine max
ctcgtacccgtgatcctcttagtcacctgctgcatgcaagtcttggctgcgcacgagctccgatttcgtgagtatttatagaagatgacgtattgtaatcgattacaggtattggtaatcgattacatgcccaataagccttctggtaatcgattacaggatgttgtaatcgattacaggctgcctgttcatgtgtaatcgattacactgattggtaatcgattaccagagcctatcctaggctagtttctaagagaatatctatatttatgctcaaatacatcctatatgtctaattttcactactaatacactaaattcaatcattcaattactatatacacaagaaatcataaattctatcataaaaacaagaattcaaacaagatcaaccaaaataatctacaatcaaaaggtaaaaagtaaatcaaccaatcaatcaaccaatcaatcaaccaatcaatcaaccaatcaattcctattgttctaaatctcttacatcta

SEQ ID NO: 113418 - DNA, 333 bp, Glycine max
  unsure (1)..(333): unsure at all n locations
tactaagctctatatattaatcaaggatcacacatccccacagttgcattttttatntcatatatggtctatgacgcatcttgccttttctgttctggtgatatcatagtctccttttaactcaacttcttgttgtttaatttattctataataccaaaagtgtctttcagtatccaaaaataaattattctttatggacatatctggtcaatttctaaataggactttaactgtttttatctattggcaagaggaacgtgttattttttgttagcaaagggattctaaccctatgacctctccctggtatccttttatttttggcaccaaca

SEQ ID NO: 113419 - DNA, 494 bp, Glycine max
atcctcttagtcacctgctgcatgcaagcttgaagaggatgctttaatggaggaaaataaagagagaaggggggagcacgaaattgaaggaataacagagggaaagaagtggaactttgaagtgtatctcataagactttcattcatcaaagttacaacaagtgttacacatgcttttatttatagactaggtagcttccttgagaagctttcttaagaaaacttcattgagaagctttcttaagaaaacttccttgagaagtttctttgagaaaacttccttgagaagctagagtttagctacacacacccatctaaaaactaagctcacctccttgagaagcttccttgagaagctagagcttatctacacacacccatctaaaaactaagctcacctccttgagaagctttcttgagaagctagagcttatctacacacccctattatagctaagctcacccgcatgacaaataaacatgataatacaaaa

SEQ ID NO: 113420 - DNA, 350 bp, Glycine max
  unsure (1)..(350): unsure at all n locations
ctgactngagttatcaagagactataaatatgtggccatggtatgaatntcaataatcaatgatctatcatatctttcaatcaatctctcaatattttctttcatctccttcaacagattatttctgattcatcttctcttcatctttctaaaagtttttgttcaatactttttctttccagaaaagttctttgataaaaaacttgtgttaatcaatcttttcattctcttcgtcctttgccccaagaacaaaagactaaccgcctgaattcttatgagtttctcttctcccttacaaaagattcataggactaaccgactgagaattcttttgattctttcctttccct

SEQ ID NO: 113421 - DNA, 426 bp, Glycine max
  unsure (1)..(426): unsure at all n locations
gaaagatcaatccgactatgaataaaatgtatatgaaattcccagttcttatggcaatggatgacctatacctttatgtaccaaatntctaatgcactggtatttaactctctcttaatgttaacctgcttagaaactgatattacacatgacttttcataacttcaactttgtatatttgtttgaggacattaagctttaaagttagtcagcaattaaattttcagggattttattttactgtccaactcctaaaaaatggttgtgcaaaggttgttgcattcttaaactgagattttaaagaaatgtgtagtttgggcaagttagtggtttcctaagatagctctcacgtactttggagcatattgaagtgtggtgatttcccgtggagtataaacttcacctgtttactacaaacctcacctc

SEQ ID NO: 113422 - DNA, 72 bp, Glycine max
ttctcaaaaaatttctccacctcgtcccagtcttagactggttccttaatgaatgtagacttcttttgcttc

SEQ ID NO: 113423 - DNA, 419 bp, Glycine max
atgaaaactctcttctaaattctgtttgcaagtcacctttgatggccactcataatacatttgatagatgtgactcttggaaattatcctgtgaaaatgccctctggtaatcgattacaagacatgtgtaatcgattacacgtttttataatttgaataaaacgctcaataaactgctggtaatcaattaccatccatgtgtaatcaattacacgttataaattttgaattcaaatttctagtgactgttataaacattttcaactgctggtaatcgattaccacagagcaaatctcagtttgaaatgatagaattctttgcgcaaaccttgtgttttttgaatttggaaacttcttcctaagattatatagatcaacttgatcatatatctggattctctcggattctggtcttgaat

SEQ ID NO: 113424 - DNA, 246 bp, Glycine max
  unsure (1)..(246): unsure at all n locations
gcacgggaagccggaaggtcctcaccactctcttaattggacacatggggcactgcgcccccaaatgcacaagttagaagagataatngacccggctctcgtgtccccaaaatgcatacataacaagcatcacataaacatatcttcataacatgaaaaaggacatatacagccaattgccgatatatataccagcctgacatactgcatgaggcaagggatcatcatgcatatgcggacaacaaa

SEQ ID NO: 113425 - DNA, 253 bp, Glycine max
ctttaacttgtgtttcgctgggtaccttttctgtgttccttccattctttgctaatttatttttacttaatttttttgcttccgacggataaaaggcgtgacctttgtctgtttccgatgttgtggacttctgctgttgtgctggatactaaatatgtcgactttctgttatcctggattagaaatcaatgtgtcggtgttgttggtctcatcattatctactacaggctattttgggtcattcatactaatg

SEQ ID NO: 113426 - DNA, 376 bp, Glycine max
  unsure (1)..(376): unsure at all n locations
tcgcttattttcttgaacaacctaaggcttgcttcanatgtgaaatgagcgacaaggttatggttcaaaatagtgaactcaaatgcgaatgcagcttanggtgttcagaactaanattttatcttttattctttttcttttttattttgatttacaatgtgtttttaatataaaccggcgtaaattttattacacaaaacattctaaggcggntttcaataaccgccttacaatgtgcgtcgtggattccaaattttatcacaataattacataaataccaccgtaccactttcttaagcggatcccttattaccgtggtataaacgatggcgtaataaggccttttttttgttgtgcttggggggaacccattca

SEQ ID NO: 113427 - DNA, 449 bp, Glycine max
ctgctgcttatgatgatgaaccaagcaatgttgatgatgctctaagcccaaatgattgattcaagatttcaagatcaagcatcaagaattcaatccaagattcaagattcaagagaagaaatcaagaagcaacaagtcgagacttcatataggataagtattaaaagattttttcaaaaaccaaatagcacaatgttgttttacaaaagaagtttctcaaatgttctgagttaccagagtgattactctctggtaatcgattaccagttggcaataatcgattaccagtgaccagattggttttcaaaatgttttcaaatgatttgtaacgttccaaaatgaatttcaaatagtgtaatcgattacactatattagtaattgattacaagtgaatctgaacgttggaattcaaatccaattgtgaagagtcaacttttcatataataca

SEQ ID NO: 113428 - DNA, 438 bp, Glycine max
aaaaataacacatttctatatacgataaacaagtgcttaatatataacgtggcttacttctaaatgtaacgttaatttagttggtagtggtacaaatatattaatagtaacgccatttcatcattagctcatgcagaaatgcagatcatacacaatgaccataacaatttcaatgcagcatgcaacgtttctaatcagacaacaccatcaaaaattccatgtcatctatatgacttatttatcgggcttcaaaaaaaaaaaagaaaaattacatatatgttacttactggaaagcaaaacacaaaataaataaatgatgaagttgctaaaaaatgattgcatattagttcctagatctttattaaataatattaacatttaattctgtcttaacattatggttgtgacacaacttaattagaggttcaacatattggt

SEQ ID NO: 113429 - DNA, 427 bp, Glycine max
  unsure (1)..(427): unsure at all n locations
cttggttcanacgttgcttgtgggaaagtcttctttgaatttggatgaagtgatcgccactcttatagaaaatgagagaatgatgagaactaaaaatgttgatgatgaacacaatgcaatagttgtggtggagtttgagctanggaagaatcaatcaaggagacatgatgggccaagatgaatatcataatcgcaatcgcgtccgcaacgagatatgagtaacctaaaatgttactattgtggtgagaatggtcatgtgcaagtgaggttcaaaaaaatgaaggacttgaaaaaatagagacatatgaacaaagatggcgccaactcccaaactaatgtagtaaaaagtgttcaagatgaagatgatttgttttttggcaacanacgatgaaggttgctaaataaaatgggtgatggtggaaaaatg

SEQ ID NO: 113430 - DNA, 472 bp, Glycine max
tatgtgtgatgcatccattatgcattggggctgtccttgctcataaaattgataaattgcctagggtgatatattatacttctaggactttggatgttgcccaagcgaattatactactattgagaaagagctactagccatagtttttgctcttgaaaaatttcgttcttatttgcttggtactcgcattattgtttatactgaccatgcagctttaaagtacttgttgaagaaggctgattcaaagcctaggttgatccgatggatgctttggctccaagaatttgacttggagatccgtgataggagcggagcacaaaatttagttgctgatcatttgagtcggatcgaacgtgtgtttgatgaggattcacccattcgggatgatttcccagatgatcatttatatatactatatagtatttctgattctctttctactccctggtttactaacattgtcaattattt

SEQ ID NO: 113431 - DNA, 458 bp, Glycine max
gcaagcttcttccctttcccatgaccggcattgtcttagatcctacacatgttggtcagttgtacaaagttatggataccatgacaattcaccatcatcttcacttctagttggaggccattgataaacttcacacatttatacctctccctagcttccccctgataatgaggaaaataccttaccaggttctcaaacctatctgcatactctgccaccgacatgctcccctctttcgactctaagaactccatctctttcctatttttcacgtcttctggaaaatacttctctagaaaagtgtgtctgaaagtccccgatgggacaatagcaccacctgctccctccaaacgtggacgagtgttctcccaccagtactctgcctcatctgccagcatgtgattagaaaacaacacctttgtctagtccttatagaagcaaagcttcacggtgaatca

SEQ ID NO: 113432 - DNA, 417 bp, Glycine max
  unsure (1)..(417): unsure at all n locations
tctttggaaagttagtggaacttggaggtttaccaagaggtagtcttggttgttgagataaccactataaactcgttgtgcctgtttattttgttactctttttacatataaactaacctanggtttgaatttgattttgtctgaaaactctcgttttgccaaatttgtattcatcgtctaaacatgtttttgtgaaaatttgttttgttttacaaagttatattttagatgatacttttttagtcgtgaaaaaggctgtaaagtttttaaaatcgcaatttaacccatattattgtgatatttgcctttacagttaggtattggagctcaacctctaaaggttgagcacctgatgatgtctagaggactatccttataatgccaccaaacttcataagagaagactatccttatcg

SEQ ID NO: 113433 - DNA, 470 bp, Glycine max
  unsure (1)..(470): unsure at all n locations
ggatcttatatcacctgcggcatgcaagacttgttcaataatcaggcattgggttgtcttaatataataattgggaattgaagtaaaagtatgatatatcctaanttgaaaagcagtcaacgcaagcaattattagtgacaacagtggtttaaaagcgttgggtctttctaataaacgagttgatgcatataaagatatttctctaattaagaatgttcttgtgttctatgctgaagactaaagtactaaacctcgatcccttgtaagtttagactaatttaaaccaagcttcatccttacatccctcttgttggactaggcttaatttaaacaacattataatcacatcataattaataaccaaaaatcctgctatctatccctagcaatgcagttatctagccctactctatcaagttcttaggatacagtacacttgccagtgcttaagttccttacagtacacacc

SEQ ID NO: 113434 - DNA, 379 bp, Glycine max
ctaagctcccacaacatccaagccaaacaacattcatacagcacaagctatcatagccaagctaaacagaacaaaggcggaagactctgctcaacacatcaaccaaaatcacagcgtttctcacttaaagaccacagtaacaattccttcgatccaatgtattaaccgttggatcgactccaaaaatttaatgggagtctatagtgcataagcctacatatggaccgctgggatctactggcaaacatccagaactcattctgcactagacttttcacagccaaccacacacaagcattgtctctgcacttgtgcaacaatctgttgcacaatatctcatacaaaattctgcataagtgcagatttcgaaaataacact

SEQ ID NO: 113435 - DNA, 487 bp, Glycine max
  unsure (1)..(487): unsure at all n locations
cacctgctgcatgcaagcttaagctccttcaactgcacaaggctcttaatatttgaagagtatccttgtggaaccttcacccgacgaagacactgacaaaaacttatcttctcctttntggacaaagtatggcaagctgggggcaagtaaattttcttcccatcagacattggatgcaactgtgatcgtatgcccatatcatctagatcttgacgggtattcaagccatccttcgtctttccttgaatgttaaggagcatcccaatcacactgtcacaaacatttttctcgacatgcataacatcaatacaatgtctaatgtcaagatcagaccagtacggaagatcaaagaaaatcgacctcttcttgcatatgcaactcttacttatatccttcttttgggtctttccaaatacattattcaggtgttgaacccgctgatatacctgctcaccagtcaacggtatcggcgaaatatcatgctctt

SEQ ID NO: 113436 - DNA, 383 bp, Glycine max
  unsure (1)..(383): unsure at all n locations
tgtgcacagaggagatggtccttntaagtactggccatgtttgatgataatgcctacaaaattgatttaccgggtgagtatagtataagccctacttttaatgtggctggtctatctcttttcggtgctcgtgatgatttaattgatttgagggcaaatgcttttcaagaaggaggaagtgatgaggacataaaagaccaaacccaagctcagaaggaagcccaagacccaatacaaggcatatgagggcccatgacaagagcaagggctaaaaagacccaagaagctttgcaacaaatagtggctaatttgagggcgatccaattgtatgaggggacccaacatctaaaggcctgcatgcgtgggttgctagttacatgtat

SEQ ID NO: 113437 - DNA, 487 bp, Glycine max
cacctgctgcatgcaagcttgcttaagaagatgcctaaagaagcttgtgcttatctacacatacctctctaatagctaagctcacctccttgagatgagaagccagagcttatctacacactgatggaagcttgcttgtggggcttgcttgtgaggcttctatggaggctggatctttgagcctcaatgaggtcctttaatggtgattttccaccatggagatgcagcggaagacaaaggataagacgtaagatgcggcgccatccactatggaataatccatggaagaaggagcttcatcaccaagatgagccttggataataagcttggagaggatgcttcaatggagcataagatagatggagacaaagagaaaggcgggagcatgatattgaaggaagaatataggagatgagctgaactttgagttgtgtctaacaagactctcattcatataaagtacaacaagtgttacacattcttcta

SEQ ID NO: 113438 - DNA, 399 bp, Glycine max
atcctcttagtcacctgcatgctgcaagcttgttaaggaggtgagcatagttttgatatgtgtgtgtgctgattagctcttgctgatcaaggattattgctcatagaaacttctcaagcacctgctctccataaagctgcgtatggaatcttcctagactataattagaatcctgtgtaacacttgttgtcactttgatgaatgataatcttgtgagacacaaatatgacgattaaacttcttacggtgagtaatcatacatgcgatggaatgactccagtatattgagtttgggccatgcttatgaaccaatgcctttcagttacatatatacggatcatctagaaactcacccctcacttcttgttgctgatgtagtactccctcatctcactacct

SEQ ID NO: 113439 - DNA, 223 bp, Glycine max
catgatggctgacatgaactgatatatttgcaaccaatatttaacccctatatccgacaattagcctccctttgtctccatacgctaaagcaagttccaactggcccaaataacacgtgaacaaaacatatttaagactctttcagggacttagtccacaacatatagttggtgaactaaatttccaatgcattggcccttctttatcatacgtacactcaaa

SEQ ID NO: 113440 - DNA, 326 bp, Glycine max
  unsure (1)..(326): unsure at all n locations
agcttgcatgaaagtgtgggagactatatatatttagtggacgaacgctgccctacattcttgatgtggcactatcacctaactgatgcttatattccatatgtggccatgcttggcctcagacataatgtttgggccttgcttggaactgatgccgttactgtgtaaaatatatgccactcttctactacatgcggcttggagtatgcctatatggaacccgtgtatatagaccgccatcgagagcatcactctattggagtctncgatactactctatatggtacatgtgggcatatgattatatgctcaatcatcagttacca

SEQ ID NO: 113441 - DNA, 144 bp, Glycine max
tccctggaccgaagaggctgaagagccagacaatggccagacagaacacaggggatctgttatttatgagtctaagaagaagagttatccacatgtattaaatcatcaaatccctgtggcacacgcccatctatttccattaat

SEQ ID NO: 113442 - DNA, 457 bp, Glycine max
ggatccttaatcaccgctgctgcagcttaaggaacatggactcttacattttaatttgaattttaacgtccaaggacactggtaatcgattaccaaaaaattgtaattgattacagccttttgaaaatattgggaacgttgtaaattcaagttgaaaatattttcaaactcattttgctactggtaatcgattacaacaatatggtaactgattaccagagagtaaaaactctttggtaaaggttctgtcaaaaactcatgtgctattcaaagttttgaaaaaacttcttaatacttatcttgattgagtcttttcttcattcttgaatcttgagtcttgaatcttgatcttgattcttgagatcttgagtcttgattcttgattcttcagatcttgagtcttgattcttgagatcttgaatcttggttgtaagcctctttcttgagtcttgaattc

SEQ ID NO: 113443 - DNA, 421 bp, Glycine max
  unsure (1)..(421): unsure at all n locations
gacacatctcttcaaaccatttttataatgcacaatgggcctatatatatgtatgtctaacttcgaaaagcaagagagagatattccaaaagaacttaattgtcaaatactctntcaacaactcttatgcaaacacttgaaaatctattgagaattcatctaggaacttcaaattgtattatcatctctaaaagagagaaaatcctataggatcttcaatttgtatcgtccactctaaggagagaaatctttctgttcatcccagaaagtcagttgtaatcaagagactggttgtctcttggattgtgagaattgtaatcaagagacgggttgtctcttggaaaatcttgaacacaagggtgagggatcccaaggtgtgttaaaagtttgtaaggattacagagatagtggaaatcttaat

SEQ ID NO: 113444 - DNA, 464 bp, Glycine max
cataaacacttctctggatttctttgttgaaatcgctggtgctggcagcttgaacatactaacttgtataaattactgggaattggtcactacgtgtgagctgaaatatttactaaattttctagacatctggaccaatattatgaaaaatgaaccaaacgatttggattaaaggaaaaaattattaatatcacaaaagttggctgaaaaatcagtgtccaggaaaaaaaagtgaaaagaaactgtgcttgttgtttttgctcaaaatttgttttataattggtgcctattttataccaatcctagttgtgaaatttcaattgaaaattattgtgaatacaagtccaaaactagaggttgcttgagtctttgttttaagttgttctttactctactctagagacattctgaggttctcttggagcactagctttcttttatgtgcttttcattgctttaattgg

SEQ ID NO: 113445 - DNA, 393 bp, Glycine max
tcaacctcagcagctaaatcaaccacagcagaacaattatgacctctccagcaacagatacaaccctggatggaggaatcaccctaacctcagatggtccagccctcagcaacaacaacaacagcctgctccttccttccaaaatgctgctggcccaagcagaccatacattcctccaccaatccaacaacagcaacaaccccagaaacaaccaacagttgaggcccctccacaaccttccctcgaagaacttgtgaggcaaatgactatgcagaacatgcagtttcagcaagagaccagagcctccattcagagcttaaccaatcagatgggacaattggctacccaattgaatcaacaacaagcccagaattatgacgagctgccttctca

SEQ ID NO: 113446 - DNA, 443 bp, Glycine max
  unsure (1)..(443): unsure at all n locations
atggtgtcaacccgntagatattttctttttcgaatagattaagatgnttttgcttcaatattacactaaatccgtcttcctgatcatcatgttttaaaccgttttttttttatctaacattaacatggtataatcattatgcattaaatgtacaactttatcccatgccaatacaatttagcctcaattgtatatatgttgaatcgaattaataatttttttttatttttatttttatatcatcgtgaaattacaaacataaatctatattttaacgtttagtttcacatagatgtaactactaaaaatcaggaagtaaaattttggttcttactttcagttaacaatacttttagggaccaacattaaattagtgtataatttaatgcactaacttttatatgattaattacttgttaatacagtaactacaaaataaaaa

SEQ ID NO: 113447 - DNA, 238 bp, Glycine max
ctctgttctctctactctctcaatgtctctaataggtattttattccctgttctgtgttctctaattcttctaagccccgcccattaatttttatggcttaattaagtttttcatacctggaatatagtccgttttaaaagaactaccatacattcattttctcccccaagtacctggaaaaatattgcattgcattttagtacttgccgtcacgctgcatttgttaagtgatgatgt

SEQ ID NO: 113448 - DNA, 445 bp, Glycine max
  unsure (1)..(445): unsure at all n locations
gatccttaagtcacctgctgcatgcatgcttgccacccagctcgcccattcgttctcttctctcccaggcgagcaaggttgcttcctccagaatcaatatccttctggaggaatattctggagggcccaagtgagcctggttgctatttgcactcccatttttactaaatacacccccctgccctttttttggtgattcttttttcgtaaaattacggaaacttacgaatttcgtaacgatacttgttttctttccgtaatgttacggaaccttgcggattacataatcatcccctttttgacttacggaatgttacggaacctcactatttgtgcaacgatgcttccttttgatttacaatgtgtcacggaaccttacggattgtgcatcaatattntactttgatttccggcacgtcacggaatttcacaaattgcctaatga

SEQ ID NO: 113449 - DNA, 418 bp, Glycine max
ctttagctcaacccttatacaagagaaagggaagcaccagcttcccattaactttactagtcgcatactctataacaccgacaagtgctaccatgatagagaaggtggatctagcactcattaactcagctcgacgtctcaagccatacttccagagtcaccacgtgatagtcaaaacgaaataccctatcaaacaggttttgcgaaagcctaaattggcagggaggatggtagcatggtcaatagaactttgagagttcgatctccaatatgaaccttacggccccatgaagacacaatccatggcagactttcatgcaaaatatgttggaaacgaccaaaccaccccagactggtggagcctctacgttgacagtatgtccaacgtgaatggaagcggggcaagaatcattctcga

SEQ ID NO: 113450 - DNA, 430 bp, Glycine max
gatccttaagtcaccgcggctgcaagctgatgataacttgatgcgatggtcattctgttaactcaacttggcatgaataataaatctacacctgttgcaagatgctgtggactatgctacttctcgaatcaccattcatatctgtgaccttcttcgatgccacctggagtcattgaacttcctgaagctgatgctgcaggcatttatcataaaccttcacagcagcgttgacagcgtcagcgatatatgtatgaccgttcacgcaacagatgcaatacaggttggaggaatcatccgaatccgtgatggacatgccttcctcatgatcaacagtctgtccctccttttcagaatggcgctggtgcaagcaagccatatgttactcctccattgcaacgacgtcaatatcggctgctgcaacaaggactac

SEQ ID NO: 113451 - DNA, 305 bp, Glycine max
  unsure (1)..(305): unsure at all n locations
agtagcttacctttccaagaagccaatctatgattcaccttttacatgacatcataagatcggatttggtcacttgatcaggcaaaaattgaagacccaagcactttcctaagcgatgagcgcacataatcccacgatactggacatctcatgttgaagccattaaagcgactcatgtgagcaagtgaacatacactgtggctgggctcactttgatgtcatagactccacaaaattcatgcaaaaccgcatatacaactctntcttggtcatttgacgccccacagaatacgagaacatcattt

SEQ ID NO: 113452 - DNA, 477 bp, Glycine max
  unsure (1)..(477): unsure at all n locations
atcctcttagtcacctgctgcatgcaagcttgtgcaatcaaatcactcctacatttcatctctagcatgcattttctttctttacccactcctcacgtttggttgtttatggaaaaacaccatatcttaacgcgccgcaaggtatccctatcgcaccagatccaaatctagaacgatgggtgatcaataggagacgcatgaacagatgaaagccgacatgtctgctctgaaagaacagatggcctccatgatggaggccatgttaagtatgaagcagctcatagagaagaacgcggccaccgccgccgctgtcagttcggctgccgaagcagacccgactctcttgtgaactactcaccatcctccctcatacatagtatgacggtgaatggacacactggggcacgatggcagccctcacctgngatacaaccgagtggcttacccttatggattgccgccaactattcaccaccc

SEQ ID NO: 113453 - DNA, 377 bp, Glycine max
tactcagcttaggttgctcaattgctccatgttgctgcatggaagggcaaatgtctgtatggtggtcagcataggagcacaaaccacatacccttgcgacatgtacagatttctgatttaaggccagctgggttaccaagttaaccaatgcatccagtttgccttcaagcttcttagtttcagatgatgcagatgggtttgtagctacctcatgcactcctctaatgactatggcatcatttctggcgctaaactgctgggaagtggaggccatcttctcaattaaatatctggcttcagcaagagtcatgttttcaagggctccaccactggcagcatctatcatacttcttctcataataactgggcccttcata

SEQ ID NO: 113454 - DNA, 369 bp, Glycine max
  unsure (1)..(369): unsure at all n locations
gagaggatgcttcaatggggaaaaatagatggagagaaagagagaggggggggggggggccctcnncttgttttacccccgagaccctccttcttttacgntcgtggctgtcaataggggcactatcctgaatggccattattgtcaatgcggaatgtattctgcgcttcactatccattgttcacaccattattgcatccttgtggttacgtgagcatgaactactaccaatatatagatgttgattacacaaatgagcacatctttttatcatactccgctcagtggtggcctctcgggaatgaagcggcaattcctccttctgatgatgcatggacacttatcactgacccatctacaactcttgc

SEQ ID NO: 113455 - DNA, 457 bp, Glycine max
  unsure (1)..(457): unsure at all n locations
tgtatagttccncaatttatggttattatgtagtgatttttgttaataaatcttatttaatggttaatgttgtctctagaacatttcctttggatttaatgttgaaatctgtgtattttcaggtgaaaaagagattaagttttgaattgcaaaatgtagcagttgggctaagcgcatatccactactaagtgcagcttcaacgtgcttagcgcaaaagagaatctggaagagcatcatcatcaaagccgcgccgctaagcacgagattagtgtgctaagcgcagcaggtgccttcagccaggctaagctcgagactggcgctaagcctaatttcacttactcgtgctaagcatgagggtggcgctaagcgcagcgtcgcgaatttagagcctatttatagcctgtcttgtgcaaaattanggtacatcattttttacagcttttacatcttttacaa

SEQ ID NO: 113456 - DNA, 469 bp, Glycine max
  unsure (1)..(469): unsure at all n locations
gatccttatattcacctgctgcatgcaagcttattctatatacagagcatccttgcctttttttttagaggacaaaacaaataatataacagaattaacttccatatggatttcagtcacaactcaacactaacaatgaacatagaaaataaggtaaaattgtacaagttgaacattatttttattttcactgttaacaaaattaactaaatattgagatacattcataaactgcgcaacacctgngtaaacatctagttattaactaaatatagagatacacttgattgtaaatggaatcgctactagaaaatagtcttttaaaatcggttaattattaatgacttttaaaatcgatgttgttttctgctcaacaacatttgtttctagaagaacggatgttgtcatgcattcacaacattgatttttctaaaaaccaatggttgttttttggaatgtattttaatat

SEQ ID NO: 113457 - DNA, 448 bp, Glycine max
  unsure (1)..(448): unsure at all n locations
aaacacagcaacacanaatctaggtgtcccataccgcctttatttaatatatnttctaggtttgagaagtgaaattgagaatgaggtaaatttgaagcaaactctcacctcaaacaagtctataacatcaatctaaacttgctcaaactggatttacacctaaaattccaccgaatcaaaatttgactcctccacacccaatgttgccctagaaatggctcttggttcactatggtcatttgtttttctctctagcacagtccaagctttctcataagtcctaaatgacatttcaagctaggattaactcactttaacctccatttaccacagaatccagatttaaccttccaactctcaaggcctcactctttttccactcataacaccacattctcactgtctaaccctaggttaactctacccttcatctctaacagttttccat

SEQ ID NO: 113458 - DNA, 454 bp, Glycine max
  unsure (1)..(454): unsure at all n locations
ctgcaagcttatgcacggaaaatgtaattatgaaattgagatgcccgattaaacaccatttcctagttaaccatgcattatgtaccatgttcaattatttttttaagtgaaacgggtttatgatcccaacatggttggctcgtggtgcctaacacatgaaactaagaatgtagtgtgaagtttcacgcttcccccttttttgttnttgttttgtagaggaaaacgcaaggatgagcaaacatgaaaacaaatggtatgcaattttgcagatcaaaaagtttgttgaacgcatatgcatgatgatgccatgactcatgcaaaatgtgaggctggaatatgataacggacaaatgcaggatatgtccattatgatgttatgaagagatgcttatgcgatgcatgatatgaatgcattttacggacacgagagcccggaaaattatctcttcttact

SEQ ID NO: 113459 - DNA, 402 bp, Glycine max
  unsure (1)..(402): unsure at all n locations
ctcagcttgaagtctattaatcttaagatttcatgttatgtattcatatcacaagagaatattctaagacaaaatgaacaagtgttgtaacattgtcagtccactggataaagcaaactcgagtaaattaagtgaatcttatctctactaagatagtgattttcattgtattcaagggtactgagtaaacacttattgagtgattggaatacattttctatcaaacacatattgtttgtgaaagccagaagtggcttagtgaccaagaatacttgggtcttaatcttatggggagaataagtgtagtgccaaatgtgacaaagtgacaaacaatacctgttgtaaaaaaattngcatacagaatacttggttgtgatccaagaattgattaatggaaccctt

SEQ ID NO: 113460 - DNA, 307 bp, Glycine max
tgaatgcagcatcgatgttgcctttgtgaataaattctacacaaacttgtatgacccattagatatatcacccaagcgggcgcagtgcatgggttatctaattaaatttgatgatgatactatgtacactttttttgtagaccccattgattgatgaagatgtggagatattatgtgcgtattcgagaattgcactgctgaagcctgatcctcaggaattagctgctaatctctgtttaccacggaggggattagaactgaatgctgatggtctactcttgaagagcctatagaataacattatttc

SEQ ID NO: 113461 - DNA, 404 bp, Glycine max
  unsure (1)..(404): unsure at all n locations
ntgctgacaattntcttcttgcacttaaaccaaatgcaaattaatgcaccaatgcaattagttcatttgcaattgttaatagaaacttcaaaacttgaacataatgtattgagagaacatactgtgaatttgggtaaaagttaatatgaagttaaatcataatcatatttaagagcaaacatgtgaacatttttctaaaatcatgttcactggtatctgaatttcactctggattatccaacatgaattcaaacactcacataatgtatatcagaagcaaaataaagtgtcactcaaattatcaaagaatacaaacctattgcacaagcttgacgcacaaagtgaaggataccaagtccgcctccattctatgtgctgggtaaacatttatcttgttttggttt

SEQ ID NO: 113462 - DNA, 433 bp, Glycine max
  unsure (1)..(433): unsure at all n locations
agcttatgcagacaacatcaataatattcctgttctacggaanaaccaacaacaggaggataatttgtacgttatgcaccttgctctgtcacattacaatgtatcagtcgtggtgtgagtgtcagttccatccaacatgatctacttcctgtccgctcttctataacgctggatatcgagactggcatgttatctatactacgatgctgacgaatctttacttgatctactatcatcgcgagcgacaacacaacgtgctgtatacaaaagtgaggtgcaaatgaccatactatctctgctgtatctgtggaagacttgggactaccttagattctagcttacgagttgggactcatgagtgattatagaaacgctaacttgaccattaagacttacgaattgaccttctaaatgagcttgctcagctatgcgt

SEQ ID NO: 113463 - DNA, 178 bp, Glycine max
ctcatggggctccctaaccgttttatgggacgagcacgtgtattgatactaccatcccctgtgcctataaacggaacgactgaggataccgcacatgagagggaagctggctgcttttcttccttccatcgaggaaaccagatgattgtgctgccttctatcccaaccaagtattggt

SEQ ID NO: 113464 - DNA, 149 bp, Glycine max
atggacctccaaaatgtttatggcaaactctgtgctcttctgggtacacatacacacctgcgtaaattgaactggattcgttacaccctacgaggtgcgatcctctaaactactgcctctcgaggttttgacctaacgaatatccccct

SEQ ID NO: 113465 - DNA, 253 bp, Glycine max
ttcaacaaatgtcttcacaaataatcatcacacagcagaaaactaacaaatctacccatcatatctcccaaaaccccatacccacgaaaatcaaaggagaaagaagtccacccaaacctgaaatttcgaagtcccactcgtagccacgcacttcacgactccaaaaatgccctcctttcgcgatttggagcagaaatgagcaccaaaggttggagctttgttggggtttcaatggagaatggaggagaaggaa

SEQ ID NO: 113466 - DNA, 293 bp, Glycine max
agcttataaaatatatttttttttctgattctaagaaaatttgtgaaatcaagagattcactttggccaaacgtaatgtgttctgattgggtgataattggcagtgccatttttttgttttaaatttttcaggcgacccattcattcatcgttatcatttatcagttgtcactatcacttcaatttttttttttccattcaactaaaatcttggtcctccttattcacaacacaacgaccaaatcctacgcgacgtgtcgttaaaccaaaccaggtgcgcatcgcgcacactg

SEQ ID NO: 113467 - DNA, 302 bp, Glycine max
ctgcagcatgcaagcttatcctagtcgatgttttttagtaatagcaaagtaccaatatatatgtgatataattgttttaaaaaagataacttcaactgtataacagaaatttaagattttgttagattgtcactgagaacaggaatgttttgttccggtggaaataatggatttcaatacgcttacagtagacattattgcattcatccaaggctttaggctagaaaattttatgggttttcacagtactgttttgggtaaaatggatacaagacagaaatttgatgttgacattggttcta

SEQ ID NO: 113468 - DNA, 255 bp, Glycine max
tctaccttactacctctgaaaatctttttgttatcattcttgcatttttctaacacaaaattcttacacttatatgctagagttggtgatgcttacccaaagtttttaactttggcatgttaatttcctaaggactcactactagaaaatatatatttaacatcaatcattaataaacatcaatttaaagaaaatcaattttaaaaaattcatggtagcattgacagataatatattttttgataggtttttatt

SEQ ID NO: 113469 - DNA, 294 bp, Glycine max
agcttgcttctacacacccaagaagaataagattgttgtgattctaggcatcaacaacaaaaaaaatgctaaatgagtgtttctaaaggattccttcatccctggatgatgtgttagcttcaacagtttgcagccagaaacctctttgatcaagtggattggactagcttccttgaaaagtttagtgcttgacactatggtctgatgtagctctatgtggagcctgtaggccttggatctttttcatcaatgaagtccttttacttcttaaattttaatggtagtgaaatgaaa

SEQ ID NO: 113470 - DNA, 256 bp, Glycine max
tgaaagctcaaaagaagactcaaagtttcattggttgtgtaatgcaatgaagaagtcagcatgctcactggatgaagagaaaaaattcaagacatgatatgtaatcaacaaataaaggataagaagaatgttgcagacatgaacatctgcacaatgaacatgacatgaagaacaacattgtttcaacacttagaaaggattttcatcaacaagatgagttcattttgggcattgtatctcgagtttcaaaaatgca

SEQ ID NO: 113471 - DNA, 293 bp, Glycine max
agcttgtaattcctgatcctcagataacataggtggtaaaggttgggactggaatgagtcaccaatggctttcttgaggagagatacatgaaagatcggatgaattttactgtgagatggaagatccaacttataagcaacagtacccaccttattaaacacctggaaaggaccataaaaccgaggggagagtttttcattaatccttttagccaaggatcttctcctgtaaggttgcatcttcaagaacacccaatcaccgactgcatattctatgtcccgactgtgtctat

SEQ ID NO: 113472 - DNA, 259 bp, Glycine max
tggctagacacacccctgtaatagctaagctcacatgcatgccaaaatacatgaaaatgcttagttacacacacccctctaatagctaagctcacccccatgccaaaatacatgaaaatacaaaaaagtccctactacaaagactactcataatgccctgaaatacaaggctaaaaccctatactagtagaatagccaaaaaacaaggccaaaaagaaggaaaacatattataatgtttacaaagaagagtgaacccaa

SEQ ID NO: 113473 - DNA, 291 bp, Glycine max
agcttattccgaggacagtttattatcatgcacaacctggaagagttggctcataacaggccaatcataactatggagcattttcttgagcaagtagcctggcctgaagctcaacttccattggtgagacccaacgaggctactccgcctgagcccacctgtgcaggttgatccagagccaactaacccacaatctctagtggtaaatccactatcttctcttgagcgtgaagtagttcccccatctccacctctgattatcatctccgatgcatcatctgatgaagcagc

SEQ ID NO: 113474 - DNA, 252 bp, Glycine max
ttcgacaaatgtcttcacaaataatcatcacacagcagaaaactaacaaatctacccatcatatctcccaaaaccccatacccacgaaaatcaaaggagaaagaagtccacccaaacctgaaatttcgaagtcccactcgtagccacgcacttcacgactccaaaaatgccctcctttcgcgatttggagcagaaatgagcaccaaaggttggagctttgttggggtttcaatggagaatggaggagaagga

SEQ ID NO: 113475 - DNA, 285 bp, Glycine max
  unsure (1)..(285): unsure at all n locations
agcttgttacaaatgtggtaaacccaacaaaaatgaaaataaagatggttctggttgtgtggttgcgtcnaaaaacctcaatggcatccaacggaggctcgtagttgcaacgggtgttcacccgtaaataaagcaaagcacacccttatgtggaaggaagcgatttcagtgtgacgcttgctggagatgtgtcacgcatcgtgtgcgtcaacttctttcgctggaaaggggtcactgtggcaatgtgttgagttggctgcgcacgtggatggcgtggtgttcttg

SEQ ID NO: 113476 - DNA, 290 bp, Glycine max
agctttacaagtgtttacatactgaatatacatagtttaggtgaaaccaattctctgtggatacgatactcggtctttccgttttatactacttgtacgaatcggtacactagccgacaacaatctaacaagtttttggcgccgttgttggggaatttctttccacttagatagtatgatttagtttgaaaatatttattctttattctttgattatttcttgtgaatagttagaattcaattttatctcttgacttgcgacaggagatttagctccattagatttggag

SEQ ID NO: 113477 - DNA, 254 bp, Glycine max
tagctacacacacccctctaataactaagctcacctccttgagaagcttccttgagaagattcctaaagaagttagagcttatctacgcacacaccccatgccaaaatacatgaaaatataaaaaaaaagtccctacgacaaagactactcaaaatgccatgaaatacaagactaaaaccctatactactagaatgaccaaaatacaaggcccaaaagaagaaaaaacttattctaatatttacaaagaagaga

SEQ ID NO: 113478 - DNA, 291 bp, Glycine max
agcttctgaaaacgaaacgttacgtaccgcagaacgtattcgcagtcgggtggagaaaaccaaactgaaagccgcaaacggcgaagatattgccctctcactttccatcggtgccgccatgtttaatggtcatcctgactatgagcgcctcattcaaatagccgatgaagctctgtatatcgccaaaagacgaggtagaaaccgtgttgaactctggaaagccagtctttagatgcgccaggatgcagaggtaatcatgaagctaaccgatgcggataatgccgccgatgg

SEQ ID NO: 113479 - DNA, 256 bp, Glycine max
tccgcgatgacccagcgcccaatattttcgatttcaccaatctcttctgcgagaggaataaaccgtgaagggggcacatgaccatgcaggggatcgtgccagcgagcaagggcttcgatgccgtacagttcacccgtttctgcgaagatttgcggctggtaaaccagtttcagttggttattgctaatcgcttctttcagcgctgcgcctaaaaccaaacgctcttttaccatttcgttcatcgccgggctgaaga

SEQ ID NO: 113480 - DNA, 288 bp, Glycine max
agctttccggatttggtcttcgccagtgaaaggatcgatgtgggtccgaaaagaggcaaatttgatcatcctactaagacgactgagaaaactggggcaaatgaagagggtgagaaaaagggagaaacccatgctgtgactgccattcctatacggccaagtttcccaccaacccaacaatgtcattactcagccaataacaaacctcctccttacccaccgcccagttatccacaaaggtcatccctaaatcaaccacaaagtctgtctaccgcacttccaatgatg

SEQ ID NO: 113481 - DNA, 250 bp, Glycine max
tgtttcttgcaattccaagatacaagagagctttctaatagatggcatgtcctacttgtgcttttcctatctagtttgcaccctgcaaaatcagaatctggacttctagttagatttagggaggtacctttgggataccagaaaccaacaatggttgtgcccttaaggtacttaatgatccttttaacagctgccaagtgagattccttaggattagcttgataccttgcacacaagcaaacactaagca

SEQ ID NO: 113482 - DNA, 287 bp, Glycine max
agctttttggtacaatgaagaagaagaagttcaaagagattcaggacttgtaaaagattgattgaataagtgtaaaaagtgtattgaaaagcaaatcaaagccttgcatttatagactcttcatgtctggccaagaggaccatttagaagagttataacttttagaaaaacttaaaaccaatttgaaaaagtcaaaaaccttttgaagagttacatcttttgatttattcagaaatagttaccggtaatcgattaccaaatcagtgtaatcgattacacaaggcttt

SEQ ID NO: 113483 - DNA, 250 bp, Glycine max
tcttagtttcagatgatgcatatgggtttgtagctacctcatgcactcctctaatgactatggcatcatttctggcgctaaactgctgggagttggaggccatcttctcaattaaatttttggcttcagcaggggtcatgtctccaagggctccaccactggcagcatctatcatacttctctccatattactgagtccttcttaaaaatattggagaagaagctgttctgaaatctgatggtgggggca

SEQ ID NO: 113484 - DNA, 291 bp, Glycine max
agcttttaatgtgttttttaaaattacaggagggaaataaagagaatatgctccattttattttttaaaatgacattttacattggttatgttattaaacgatatagaaagtcactatacaacatcagctataggaaaaccgatgtacaaaacacactttctacatcggttttagacaaaacccgatattgtattggtactttttacattagttaaaaccacaaccaatgtggtaattggcagatttacaaatttcgacacacttcctacatttttagtaacaactgatgt

SEQ ID NO: 113485 - DNA, 252 bp, Glycine max
tagacatcgggaagagcttttttataacatatgtaggcttataaaaatagcatacctcttataaactcttttaatttatttccataaatttcttgatagaacatatcaaaataaacctttttctgtatatcaataaatctcatgattaaatttactacataaactcacacatgataagaatttaacaaacagtcacttaattaaacttaatacccaaaagcattgaagatcttgcatgataagctcaaactt

SEQ ID NO: 113486 - DNA, 298 bp, Glycine max
cttgcaacctttttaagctcgggtctgggagacaaaggtcaagcgttcgcgatatgcgaggatgatattccgagtactttggatttggtacgaccatgccctcctgatttccagctgggaaattggcgagtggaggaacgccccggcatttacgcaacgagcataatgtaaacctttacggttttaaaagctctatagttgggcctaggctttagagtttttccttttgttaaggctttgtgtcttttgtttttgaatttataatacaaggatctttcttcatctgttcctggtctct

SEQ ID NO: 113487 - DNA, 254 bp, Glycine max
tcttatccaaggcaattcttggtggtgaagctccttcttccttggcttattccctagcggatggtgcctcccctctcctcttctcctttgccttccgctgcatctccatggtgaaaaatcaccattgaaggacctcattgaagctcaaagatccagcctccatagaagctccacaagcaagcttccatcaagtggtaatcagagcacaagagcttcaagtaggtgctccttaaacctccattaattttttgctt

SEQ ID NO: 113488 - DNA, 287 bp, Glycine max
agcttaatttatcttcccatggaaggaagatggctaagttcagtaggtctactccagagattgaataccttgtggctgccagtggactaagtcctttgatcgcatgttccctagatacgagcaattgaggacttatgtctgctttcgtggaacattggcataaggaaactaatattttccatttgcccgtaggagaggtgactatcaccttggatgacatggtggtgttgctacatttaccgatcataggggcgttctatagcttcgagcagcttcatatcgacgat

SEQ ID NO: 113489 - DNA, 255 bp, Glycine max
tcactgaattgcttgtgttattgaaaaagatacttcctaaagataagacgttgccgaagaatcactatgaggcaaagaagattttatgtccagttggaatggagtaccaaaaaatccatgcatgccctaatgattgtattttgtatagatatcaatttacagaaatgtgaagtgccccacatgtgggctatcatgatacaaagccaagtatgacaaatttagtgatgatacaaacaacaattgtccaacaaaggt

SEQ ID NO: 113490 - DNA, 293 bp, Glycine max
tagctttggcttttaaaaaatcaacacttattgtaggtgaaatggttggaccaatggaattacaaggcctaatccttatcctaatcttttggattagtgtgttaacttcctagattagtgtgctaacctcccttgggatatgtgtactcagagtgaaccttgcatagagttcactcacacagagacaaattacactatgactcaatgcaaattgcaactcttgcgcagacggaaatctagcttatataatttttatttctttgtcaagctttaataaatcaatagcacgcaca

SEQ ID NO: 113491 - DNA, 255 bp, Glycine max
tctcaaggaggtgagcttacttatgagaggggtgtgtgtagttaagctctagcttctcaaggaagttttctcaagaaagcttctcaaggaagttttcttaagaaagcttctcaaggaagcttcctagtctataaatagaagcacgtgtaacacttgttgtaactttgatgaatgaaagtcttatgagatacacttcaaagttccacttctttccctcttttattccttcaatttcgtgctccccccttctctctt

SEQ ID NO: 113492 - DNA, 292 bp, Glycine max
agcttgctaacccatggaagctcctaatatctcccacactttttggggtgggccattcttggatggccttgattttctcagggtccacttggaccccatttctaccaactacaaaacctaagaaaactatattatctacacaaaaggtacacttctctatatttgcatagagggtgtttttcctaaggactgaaagaacttgtctgagatgtcctaagtgatcatctagggtcctactatacactaaaatatcatcaaaataaacaactacaaatctacctatgaaatccct

SEQ ID NO: 113493 - DNA, 259 bp, Glycine max
tttatgtgaaaggatgtgactcttcacatttgaatttgaatttgaacgttcaaaggcactggtaatcgattaccaaaacattgtaatcgattacaactttttgaaattaatgggaatgttgtaaattcaatttgaaaactttttcaaaacaattttgctactggtaatcgattacaacaatctggtaatcgattaccagagagtaaaaactctttgggaaacatgttttgagaaaaatcatgttctactcaatttttga

SEQ ID NO: 113494 - DNA, 288 bp, Glycine max
agcttgacttctgtgttaagcccaatttctcccttatttcctatttgggcttagcgtgccatgctcactcagcccaattaccgctctatcttgaattaggcttagcgccctagtggcgctaagccacctcttctcttgattccatagggtgctaagcgcaacattcgcggcttaacaccttcatcccttttgtgcattggaactaagcgcgacccttgtggcttaacgccttcattccttttgtctattgacactaagcatgaacctcgtggcgtagtgccctcattc

SEQ ID NO: 113495 - DNA, 253 bp, Glycine max
tgaggatggagactttccaagctatttatcttctctctcaaagaggctctctaactttctagctttcccactctaagaagtggattcactcttgtcttggatggttaggaatgaaggctcctacccttatttatactactccaccaccacaatcaatggtggagattacttgtatcctagggtggagattaattctctagaatgctccacacattctaggagtctctacactattctacttctttccatactc

SEQ ID NO: 113496 - DNA, 252 bp, Glycine max
tctccaaggcatagattctgcaatcaaaagtaggactatcaaaatgagaatgtcataccctaatttcgtccggggacctttgcttgatgacatgcgacttttctttggtccttgcaaggtgcttggcacccatcattaggcaatttgtgaaattccaggacatgccggaaaacaaaaaaatattgatgcacaatccgtaagtttccgtgacacaccggaaatcaaatggaagcaccgttgcttaattaagtg

SEQ ID NO: 113497 - DNA, 287 bp, Glycine max
agcttagccttactgcgtcttctggcacaccaaaatttttgacaggattgtatatctcaatatatgttgtcgaatatgcatatgggtcctcgttgggtagaccatgaaataaattccgttgtatcagctgaattaaaaaatgtgggtatgtgatgttgtgagcttgcacctctggccgcacaatacttgtaaagaattgctgcacaataaagcttgaggattccttaagagtgactctgcgaggttagatcttcagccatcctatgaacttcagatgcacttgtgtg

SEQ ID NO: 113498 - DNA, 253 bp, Glycine max
tctccttccttttcctataaataggggaaggagggaagaacaaaaatgttcaaccctcctggtatctgagattcacttaaaattagtgagaaaaattgtttccgtgaagaaaatccatgccgaggcgcttccgtaacacttccgtggcgtttccgtgagtgatttcgcgaagattttcaaccgttcttcgtcgttcttcgttcgttctttggtcttcaaccggtaagttcctgaaatcaaacttttcaattca

SEQ ID NO: 113499 - DNA, 287 bp, Glycine max
agctttagaaacctacacggcgatccaacgggactagcacaaagaaatataaatcgtttgatttgatgttatcaacaactcagaataattttttttggcaatcctcgtcttttcgaactagccaatggaatgtcattataggtacatgacccactttttattcgatgtatgttctttcaatttgaaattgggttgagatctagagaaaaccaacaactaaactcacccatgtaatgtactccatttatttaatgtgtttaaattatcagttcttaatttgagatata

SEQ ID NO: 113500 - DNA, 253 bp, Glycine max
tcttttctctaccacttgtcatccataaattgatgggcaaacaaaggtagtgaatgggtctctatccacccttttaagggcttttctgaaaggaacccataagtcttaggattagtatcttccttatgtagaattttcctacaacagggggattcatagaacaaccaagcaatccccttttgaggttatctatgggttcaatcctctaacaccctaagacctaattcccctcccacttgacacttcttttata

SEQ ID NO: 113501 - DNA, 292 bp, Glycine max
agcttaatccattaacatttcacaccggtattgcaaatcttcattctgtacttggtgtctgaactcggcattccttaaaccttctcctaggacttatcgaaaacctatgaggggtaaacgacatccaagatctgaacgagatgatctccattaagcagacgcattatgtcgcgcacacctactctgatgggtgagaaccgacttgatattgaactgtccactcattgggctgtcggaggggactctttccatgacgaaaggacacgcatttatgcaagcattaaatgcccca

SEQ ID NO: 113502 - DNA, 257 bp, Glycine max
ttggcgcttgagccttgttatagggctaaaggtgaacctttgaaactcattggatctgcgaacctaagagctgtgattcctactgacttccatgatgacgggcccacttacatttttgatgaataaggagagaaacgcggcgaatggttggatggggagccaaagaaatatttttgacccacaggaggcagaattgattgaaatgctcccattgctatgacctgaatcaagccctgcggtcatgtctagaatcccca

SEQ ID NO: 113503 - DNA, 286 bp, Glycine max
agcttgaaatgaggaagtgtggaagggtgagacttccttcttttattgttgaccacagagtggtacctggagatatgtcgcgggggtcagtagaccttatgggcgtcaggtggggtgctattgcccaaaaccaagcttgaccaatcccgacccaacccgggcatagtcagtcaatgagaacctgtgatgtacctaagcaggcgagctcctggcagtcaacagataaaaggaactaagaccacaaagcaaggaggcttgtgtggtggctggccagctgtgaactttg

SEQ ID NO: 113504 - DNA, 250 bp, Glycine max
ttatcctgccttttctctgacacgtaaaaaattaccaagcagttagtgtggtccaatgaaccaagggttttagaatctcaaaacaaaacactcacgcgaacatagtaaacacgttcgtccttctatccctatagataaaaagctaaaaagatccttttcattccccaataatttcgaaattattatttttacaatacaaaaggcagggccaataaaaaatctttcaattcccaacagattatataacaaa

SEQ ID NO: 113505 - DNA, 284 bp, Glycine max
agcttcttgggtcaatattcttctaaatggaaatctcaaattcctaagttgtagaaaaaggaatattgtctgccaagaaaaaacacaaactaaatcaagattattgcagaaaaattaaagcattgttttccttcattcgaagttgaacccaccagaattgttgaaagcaacccctaccctttaccgggagtcgatgactatttataactattactttgacatcaaagaagagttcaacccaatacttaatttctgtcctagttgatcccgagacaacatttaaa

SEQ ID NO: 113506 - DNA, 251 bp, Glycine max
tggatatatttgtcgtactttttatacttttgggactaaagttggttttttcatttttaggaacgtacttgtcaggggaccggtaagacaaattgtgaaaaaattattatgacaaatatgtccttatgttggcaatccatattgacaatcatttcagtgacaaatttgttcctccatgccatggaagctattttattaacggtgacagacaaaggttaacatcatgatattttatattttcatcttttagg

SEQ ID NO: 113507 - DNA, 293 bp, Glycine max
agctttgttgtgtcctctcccctcaacgggaatctcttcttccgcaaacgcgatgtaattgttggtggttatatgatttacgatgcctttgaaaccctccactgagatatcatgtgctacatgggcatcgttaaggaccttcatcaacagcgcacgatgaggctcggagtttatgagtagttcaagcaaagaaatccttgctggagttttattcagtttctcgactaccttaaactcgctttgttggatgaggcggaggaactcatgtgcctcttccaaagtcactgtttttc

SEQ ID NO: 113508 - DNA, 254 bp, Glycine max
tggacttcctgtgttttgggaacctctccttcctcaggtgtacccaaacccaatcacctggttcaagcacgactttctttctgcttttgttggcttgccttgcatagctcgcatttttcttttcaatttgaaccttcacttgctcatgcaacttcttcacatactcagctttagcctgtgcatccttatgcttaaacatagcaatgttaggcataggcaacaaatcaagaggagtcaaaggattaaatccatac

SEQ ID NO: 113509 - DNA, 250 bp, Glycine max
  unsure (1)..(250): unsure at all n locations
agcttanatgcataacaagagaggttacacgcagaagaagagagctcgagcaaaataggtcgcatttgatataatttaaaatgtaagtccaacatcggttttcaatacaaaaccgatgttaacaaaatgatattaactgatcatacgtaaacatcagttttcaaaaattcaatgttaatgaacttatgttaacattggttttcttcaaacccaatgttaacaaagtgacgtttacatttttttttgtatt

SEQ ID NO: 113510 - DNA, 252 bp, Glycine max
tatgatatttgttaatattttcttactaattatggttatttgattttttttgtattaatttcttttataataaactcacccctcacaattttgtaccgtgtggttgtgatgatcacgaacctttgttcgtgggagcagaatgacaacagtagagtacgagaagtgagattcttttgtggccgccaagccgacgtgatgacgttgggattattttgggaaagagttatgttttgttaatcaactcctccatag

SEQ ID NO: 113511 - DNA, 292 bp, Glycine max
agcttctgcctctttctctcgagtccctctcttcttctcttcttctctaagttcttccctgaactcgcgttctccttctctgcgagttcctcaagctttctcaaggtctcgcatatcgcggaggttccctagccctcgaaagctaggtatcagttgcacatgtcaaggattctgaagcagtgatgcaaagagcaataaatggccacaggttatttttcctatcttggtttactacaatgctttctaaactttctagaattgttatggctaaagcaaagaaagcaaacgcatc

SEQ ID NO: 113512 - DNA, 251 bp, Glycine max
tctagaagttggaatcttcattttgatgaaattataagatagtttggattcataaagaacgaagatgaaccttgtgtctacaagaaggttagggggagtaggggtgttcatggtgtggtttggttcggtttttatgcaaaaagttctccaaacccaacataaaataaagatgtgttttggtttggctcagtttaaatataacatcgaatctaaacaaaaccaaaccaatcatatttgaattttgcggtttt

SEQ ID NO: 113513 - DNA, 253 bp, Glycine max
tgtgccttaacactctatgggggggtgctatgtatgccgtactggctttagtgcactgatcgatgccatggtccctgactgaccactggtgctgctgtctttcaatggtgaccactacctcttgtcccaagatttggaagcgggggcctatgtgaataagcgtgatataacatgggtttctttctctaataggatcttttggaggccttgaaaactatcattgtgaaggacctctgataaccatggaatcaca

SEQ ID NO: 113514 - DNA, 239 bp, Glycine max
ttctagggtaaatttgggtgttgaagagtcacattttgattcgaagagattttatgtgcaaatccagtttgagcaagtttagattgatgttatatacttgtgtgaggtgagagtttgctccaaatttacctcattctcaatttgacttctcaagcctagaaaatccattaaattgagaggttttggacacctagattttgtgttgctgtggtttgaagcttgactttggtttacacatg

SEQ ID NO: 113515 - DNA, 287 bp, Glycine max
agcttgtccttggtttagacatgattggtacatgatttgggacttgtaggattcaatttgagcaaaattggatgagggaaagagtggttttcgaaatctgcactttatgcagaattttgctgttgaaatgtgcagcaaaattttgtataagtgcagaaaaatgcttgtatatggctggttgtgaaaagggtagtacatatggggttctggatatttgatagcggatcccaacggtcaaaatgtagatttatgtactagagacttccagtaaaattttcgagtcaatc

SEQ ID NO: 113516 - DNA, 245 bp, Glycine max
tgaccaatcccgacccaacccgggcatagtcggtcagtgagaacctgtgatgtacctaagcaggcgagctcctggcagtcaacagataaaaggaacaaagaccacaaagcaaggaggcttgtggtagctggccaactgtgaattttgtgtgatatatgggttgaggcttctggtaatcgattaccaagggggtgtaatcgattacaaggcttaaaaatgaagacaggaggctaagatggcctctg

SEQ ID NO: 113517 - DNA, 288 bp, Glycine max
agctttaattattaggcctaagcctctgaacgaaaatacttatgccaggggccttgcctagaccatcctgagttgagaaaacgctgagaatttgaattgcaagtgctttataacgtagaatccgcaattctatcataagactatgatatgagtttgactagacatttgatatgggttttgaagtgacttacaactttagcttttttgttaaaaaatgttattactggtagagataaatatttattatactattttactcaatacatggggtctttcttgcctatatat

SEQ ID NO: 113518 - DNA, 252 bp, Glycine max
tatcctttccccctcttccttatctcaaactccatcgcacctttgtggtcaagtcagcgttgtcgcattagcgcaactagggcatcgcaccacatttcgtcatggacaagtaacaaacttattaagaggggttgaagccatgcatgtaattcggattgcctgatccataagttacacttttttcttagtttccaacaatattttttatttcaaatacttcgtttctaggctgaatttgtattgttggaaaaa

SEQ ID NO: 113519 - DNA, 248 bp, Glycine max
agcttcttcttccatggctcatcccctggtggatgacgcctcctctaacttcttctcctttatcttccagagtaactccatggctaaaaatcaccattgaaggacctcattatagctcaaagatctagcctccatagaagcttctcaagaaagcttccataaaaatggatttgatctacgaggatactcaggtacttcaatcaaatgctgactgacgttgaaatcggccgtacttaatacacctaata

SEQ ID NO: 113520 - DNA, 290 bp, Glycine max
agcttgtcgttgttggagaacataatcaatctaactttagtgatggagaacacaatcaacatgaagataaaataggttattagagatcgcagttgatcaatatactccacatatagttgagtctaaataaacaagctcaaaataactcaattttattctttccttgttaagttaattagaaggaataaggcacttaatttttgttatcacaactcaggttgttacttacttttatatgtttgacttttagaaaacttctctacgtttactcctcaattcctcaaatcaaa

SEQ ID NO: 113521 - DNA, 248 bp, Glycine max
tgagctatcagaagacttgtttattcatttagtgttgatttctctaccttcacagtttagtcagtttaagatctcttataactgttagaaggagaaatgggctcttaatgagctcatttcataccgtgtgcaagaaaaggaaaggctgaagcaagaaaggactgaaagtgctcatgttgtgagtacctctaaagacaaaggcaaaagaaaaaggactgaggagcccaagaatgaagttgttaatggtc

SEQ ID NO: 113522 - DNA, 244 bp, Glycine max
agcttgatgatggagaggctcaagaacgcttgtgccatcttgccagatgagtgattctgaagtctactttcctgctttccgactgctgaccaagaggcaaaatgcacgtgaatgattagttatgcggcctaactgaacttcatataagaggcttatatttatgaatccattggattaccgtgttgccctatcttgatctcccaatgatgactcttgaatgacctttggtcccccattgattact

SEQ ID NO: 113523 - DNA, 246 bp, Glycine max
tgtcacctatggcgctatcttttggggactaaccgcttataaaatgggactatccccaaaagcacttcaatctcttttcaataagaagaggaaaattattaactggatgaaaagacaacccgcagcacttacctaacgccatcaagagtaatcacactacgcttctctaccgttcaccatggaccatagatcgtgcttatctaaatgcatacaacccctggtaattacctccaaccatcgtgtcaa

SEQ ID NO: 113524 - DNA, 284 bp, Glycine max
agcttgacaaatgtgttaaacaatatcattctttagagataattatataatacatgatctgatctatagccattatatctgcatgtaaccctgattatagtgttagcaattaaatcattattcgctagaagtaattacagtatattcataaggtgattgtgtattaaaagtttttcatcatctattatccacaatagtggtggttccaaactgaaatgaatttgtctcttctctggacattattgaagcaggtaatcttctcttcaggcaagggaaaaaactaa

SEQ ID NO: 113525 - DNA, 251 bp, Glycine max
tgtgaaatcaatggaatccaagattccgcttgacacaagtttttcagttctgttcttagaaatgtgacctaagcgcttatgccataatgctcatgagtttgtattattaattctacgcttagtaccacgcaattctgcattaaaggattcaccataggaagctacagtatcaagtaaatatagattatcattaaccaagagtgaactagttccaacaatatctgaattaaaaggcaacttgaacacattgt

SEQ ID NO: 113526 - DNA, 292 bp, Glycine max
agctttatccattactcctctctttgttaaacaataaaacgctaatgatccaaaactaattgccatcttctaatattgttgttggttactttgtttcaatgaaaaggctttaattctcaaaagtgacctcattttataattctgaattaaatccaacactttttttccccagctcgatcaatatatataactcatgtttcaccaatacaatgcagtgtgattccatctgatatgcatcatgattttggataccttggtcccgtggaccattactgtctcttgttgttttgtt

SEQ ID NO: 113527 - DNA, 271 bp, Glycine max
  unsure (1)..(271): unsure at all n locations
ggacactataaatactaggcgtnnnagtgtacccaccactataaatataaaggaaatttaacatattaaccaatttctgaaagggaataaacttataaaagcacaggctcaggaccaacaatttgaaaaggacaagcaccaccagatataaattcaacagttcataggtagatataaaaataatgaaaaatgctagttaaatggcacaagaaattacgaatgacattgtattaaatatgatgtggaacccatatcatttcatgaatccaag

SEQ ID NO: 113528 - DNA, 292 bp, Glycine max
  unsure (1)..(292): unsure at all n locations
agcttctttnttatacctctatcggccgactttcctggcctacgccgactgtcatttttttcgatcgatatcggtgaaaaatattttttttgccgaggtgggctaatgttttcctggcctaataaatcggaacatgccagtttcggccgaaatgaaacatcggttgagctcgcacggaaaaacctagccgacctacaatgtaagttttatatgcaacaccgaaacaagaaaacttcccctgccgtaagaaaaaacattatcggccagcgagcgttttttataaaaaaaaatt

SEQ ID NO: 113529 - DNA, 255 bp, Glycine max
tcgaacctccgttggagttgtttgttgttgccactccataaccgactccaccttgttcggatccaccgcaaccccgtccttagaaatcacgtgccctaaaaactgcactttctccaaccaaaagtcacattttgacagtttggcgaacagtttcctatccctcagaatatgcaacacaatcctcaagtgcttctcatgctcctccttattcctcgaatacactaggatatcatcaatgaacacaaccacgaactg

SEQ ID NO: 113530 - DNA, 287 bp, Glycine max
agcttgcatgattttcatctccctctttctcaagcaaattcttcttgatatcatcaaaatcttcatgatttacattctccccctttttgatgatgacaaccacctgtaggttaggagcaacaacaaagaaaatatctatttgcatatagtttactcccccttggttttacaatgattgcttatatgagacaattgaagatttcatatttttcatatataaaaagttgtctcataaaacaatagataatttttcttactattttatcttttatctttctctccccctt

SEQ ID NO: 113531 - DNA, 257 bp, Glycine max
tgtactgcttttaccctattcatagtgtacagggcctctaccatttccacagatctattacgcactgcaagagcaacctataaacataggtaaaaatgtcactgaaaagaacaacatgttcagtaataatgttgcacaaggaaattgcagtgcattcaataaggtagattcacaaaaaaagacataaccttgtgcaactttctatggaattttaagcagtattactaaatatgtggcccatttattagacaaaaaca

SEQ ID NO: 113532 - DNA, 293 bp, Glycine max
  unsure (1)..(293): unsure at all n locations
agcttatgctaattttttatgtttngncttatattttgcagatggcttctaggaaaagaaaggcaccctctacacctacccaagccagatttgatagatccagattcacttcctaagagggttgggagagatgcactgacattgtggtgccgcttttaccaaaaagaaatgtggtagtctacaatacaaagtttgatgagttcaaggaggaactcgagagatgccattgggatcaggagttgactgactttctggacgacaacattaatgttgccattgtaaaagaattctat

SEQ ID NO: 113533 - DNA, 257 bp, Glycine max
tgtgcatccaataccctgatgatgatgtcccatatgttcttaaaactggactaattcatttgcttccaaagtttcatggccttgcaggtgaagacccgcacaaaaatttgaaagaatttcacattgtctgctccaccatgaaacccccagatgtccaagaggatcacatatttctgaaggcttttcctcactcattagagggagtggcaaaggactggctgtattaccttgctccaaggtccatcacgagctgggat

SEQ ID NO: 113534 - DNA, 320 bp, Glycine max
tttccccttatttcttttttttacgggggagaacttgatagttgaaaaatggtttcaacccctttatgccacttttcttttctttcgaatttgccttacgaaaaattgttttcccgtgaataaaaattcaagcccgaggccgcttccggtaacgttttccgttaacgttttccgtgaactgatttccacgtatggtttttctgacccgttctttcgacgttctatcatttctttgttcacacgttcttcagttctttaactgggttagttctctcaaaccaagctttttgattcattctatgtaccacgttggaaaccaa

SEQ ID NO: 113535 - DNA, 283 bp, Glycine max
gacctattaatactcaagctttgaaccaaaatcctgactcttcattttttcttgacccagggtgagaatgtcaatccttaccctcggaagcaaaaaaagaatataagggaaatttccaatcaaagaaaaagagaaggaaaatttccaatgaaagcaaaaaaagaaaggaagggaaatttccaatcaaagaaaaaaagaaggaaaattccccaatcaaagagcgggagaaagcaaaaagaaaagaaaggaaattcccaatcaaaagaatgggagaaagtaaaag

SEQ ID NO: 113536 - DNA, 290 bp, Glycine max
atcttcctattatcttcacaactcattcgatatcgcgaggctttttactcttctacttgtgagggttgtgtgccattgtgaaccattatcgcatcgtcggcaccatctaccgtcaaacctacggcctctagatgcgtgacttctccttgaaaacaagcattctgacaatgtcgctttcctatcccattaggtggttgttgttttccctaccccttatgaaaactcttctatggaataccaaatttaacatgttttttttggtgatttttagtctagatgatctaataaaa

SEQ ID NO: 113537 - DNA, 254 bp, Glycine max
tgatcgatccactgctttgtttggcagatctactattggagaacattctatgcatgaaaagctgcgagcaccctcctggcctctgcattttcgatccttacttccacattctggctgcttgtggccttcagccgtgccatgtgcctgctcatagttttccatctgctccatcagcgatgggtccccaccgtggttcctcaaattcattggtgattttctgagaggccttggcatcggaaaggaatttgggcagg

SEQ ID NO: 113538 - DNA, 313 bp, Glycine max
  unsure (1)..(313): unsure at all n locations
gatttctaaacccacctgaggcatgcaagcttggntatctcatttttcactatatcaagaatcactgggttgaatcttctttgtggccgtcttactggtttagccccatcctctaaatttattcgatgcatacatgtggatgggctaatactaggaatgtccgccagggtccagcctataaccttcttatgcttcttgagaactgataatagcctctcgtcttgctcgtcagcaagggaggcagatataattactggaaaacttttgctatcatccaagtaagcatattttaaatttgatggtagaggcttca

SEQ ID NO: 113539 - DNA, 252 bp, Glycine max
tgtccacacgacactctaacttatggaactgtgctgagttcatcgggaccacccggttgtgcacgtaatagcccccttcccataggtgatcagcctgggagcccaaaactgttccctaccaggtgacaagccccctctgtacaaagtacacttgaccacaattactctatttcctgtgtcgtatcagctaggatcatggccaaaagtaagtgccaaagaccatggaccaattaaagcgcctaagcatcccct

SEQ ID NO: 113540 - DNA, 262 bp, Glycine max
ttgcttctgatctacacaccatttttctccaccatcatcttagtttcctattatgctatattattagcactctgatttccatcgttgtattttggctatatcattatgatatttgaacaatttactatttccttatttgcatggtatgtttgaacaaatattaaatatgttaattggctatgtggattttatacttaatctattcatcattgctgcttcatgatttggttgatatttttccataaatgttgcatggatgctt

SEQ ID NO: 113541 - DNA, 291 bp, Glycine max
agcttgcttctacatttggaagctgataacaagcccatgagacagcctcaaagaagattgaatcccataatgaaagaagaagtaagaaaagaagtgctcaagttgctacaggcagggctcatctatccaatttcggacagttcatgggttagtcctgttcaagttgttcccaaaaagggaggtatgacagtagtcaagaatgaaagagatgagctaattcctacaagaacagtcaccgaatggagaatgtgtattgattacaggaagcttaatgaagccacaaggaaagat

SEQ ID NO: 113542 - DNA, 172 bp, Glycine max
  unsure (1)..(172): unsure at all n locations
aagaatttggtttgggagtttttgttatttattttggtggggaatatttaattgttggtttatttaatttaatgaatattttgtttgggttggggtgttaagtgattaaaaaaaaangttaaatttaaattaaattggtttgattttatggtaaatttgtaattattttgaa

SEQ ID NO: 113543 - DNA, 296 bp, Glycine max
catgcaagctgtgagctcttcatcttcctgtcttatcattaattcctttttaatctcattgaactatgtgtggtagattaccacatttttttctggtaacagcttcctgggtacaattatatcagtatatctctcccaaccttcttgagaggtgaacctagactggttatatctgacttgggaaggtgtaaaaggagccttccttttcttagatgccatctgtgtagaaatcaagactttttgatgttttgatgatgccaaaggttcatgtgcttctcatgtctaattcaagagga

SEQ ID NO: 113544 - DNA, 255 bp, Glycine max
tataagaacaaaattgcctcaatctttttcaaatatgcatgtgaattaggaagcataaacaagaatcaagccaaggctattgttcaagcaatcaatggggcaaaacacaccaaatgattatgatgatggatggctcaaattctcacaaaggtaaactcatcactttcaaattgagctttcaaaactatcatgacatgtagaggagaatcaaggatttcaagtcacaaaatgtcaagaacttttattttcaaaaca

SEQ ID NO: 113545 - DNA, 324 bp, Glycine max
accccgggatcctttaaatcgaccctgagcctgcaagcttatcctaaatgacacttcttgtaccaccaagttcctaactcagtcatttttaaagtcctgttgattgagtacaatgtgacttgcaacagtttggtgagtaattaaacactcatttttttatcaaatgttaaaatcatatacatatctaacatgaatttaatgttaatttcaggatatgccaagtaccatgagtattaatgaaagctatgggattcacccatctgaatttggaagggattacggagtgcatgattgtttataatcattggaggaagactgaaaaaa

SEQ ID NO: 113546 - DNA, 254 bp, Glycine max
tacaaatctattttaagtccaagcccatgaactaaataaaataaaatctggacaagataagataagattggatgaaataatatctggataaaataaaatctggataagataagatttgattaaataaaattgtctgctctcttcaagtccaagcccaatttcggattcaagcccaattacgtataattctcttgaaattaaattaaaaacacaaaattagtctagtagacccaaatgataaaactgcataatta

SEQ ID NO: 113547 - DNA, 294 bp, Glycine max
agcttccttaagaagattctttaagaagctagagcttagctacacatgcctctctaatagctaagctcagctccttgagatgagaagctagagcttagctacacaccccctaaaatagctaagctcacccccatgacaaaatacatgaaaatacaaaaaattccctactacaaagactactcaaaatgcctcgaaatacaaggctaaaaccctatactacaagaatggccaaaatacaaggcctaaacgaaggaaaaacctattctaatatttacaaagataagcgggctcata

SEQ ID NO: 113548 - DNA, 257 bp, Glycine max
tccaattgctcgaaaaatcggtttttttttgcaccgtttgattttccaaaacgaccttctttagttctcctatggtacttgtaaatgttctcgaatttctccttgcacttcttcgcactcctattataacctagctccgataatttcctgaatatatacacatacatacaaacctctaattaattcattcaaaaacaaaattgttcagcagactatacattatacatttatgtgtaacattattattactaattaag

SEQ ID NO: 113549 - DNA, 292 bp, Glycine max
agctttggaaaaggctattttcaccttctcgctaagccaatctgctggcttagggagcatccgctaagcgcaacattcctgggctaagcacgaggaagaatccagaagaagatgagttgtgcaggttcgctaagtgcaccgcttcagttcatccgctaagcgagaaaggcgcgcaaagccaaaaatcactaacgtgtgctaagcgcacgagcacgaacaaggccacctatttaagcctgaaatcagattttgagaggggagtttggactgggattcaaagctttgtatgtct

SEQ ID NO: 113550 - DNA, 257 bp, Glycine max
tgttaaagtctctcgctcttattgtctagaagacaaagaaggaataatcgtctagaccatcattaagaggtccgtccaaagcaccaagtgtagctagctcctctaatgaagacttcaaaggacaatctgatgaggacgacgagctagccttcatctcgagaaaaatctgaaagatgtggaagaacaagggtggatctaaatagaagaacttctccaagaaggtgttcaatgaaaagaaagacaaagataaaagctcc

SEQ ID NO: 113551 - DNA, 292 bp, Glycine max
agcttctcaaggtagttttctcaagaaagcttctcaaggaagctacctagtctataaatagaagcatgtgtaacacttgttgtaactttgatgaatgagagtcttgtgagacacaactcaaagttcaacttctctccctttttcttccttcaatttcgtgctcccccctctctctttctctccctctttcttttcctccattgaagcatcctctccaagcttctaatccaaggctcatcttgatggtgaagctccttcttccatggcttattccttaatggatgacgcctcc

SEQ ID NO: 113552 - DNA, 254 bp, Glycine max
  unsure (1)..(254): unsure at all n locations
attattgcttaatgtagtttttgttttgcttncacaataaaacacattgccaaaaagttactatgaggcacagaacatactgtgatcgatgggtatgaagtatcaaaaaattcatgcatgtcctaatgattgcatattgtacataaatgagtttgaagaaatgcataaatgccctaagtgtagggtatcatggttcaaagtgaaggatgatgaacgtattagtgatgagagcacaaaggaaggccctccaacaa

SEQ ID NO: 113553 - DNA, 294 bp, Glycine max
aacattgtacttttccccttgtatttcaacaataagaggtgctgtttacggaatcaccattaaattaatcactctctaatatgcattaaatcagaaaaatttcaggattaaattaaggatacatacccccttaacgtctctatataaatgagcaagttcctagcctattaaacataccagcacctaatttcacaaacaagtaaaaaacctaccaattacgtgaagccagtgagtgatattcaaggagatgagtggccaaaactcccatcaatcaaacacctcaaaacattattc

SEQ ID NO: 113554 - DNA, 250 bp, Glycine max
tgtgatatttgttaatgctttcttactaattatgggtatttgactttggtattaatttattttataataaactcaccccttgtaattttgtaccgtgtggttggtacctgtgatgatcgcgaacctttgttcgtgggagcagaatgacaacagtatagtatgagaagtgaggttcttttgtggagctgctaaaccgacgtgatgacgttgggattattttgggagagagttgtgttttgctaatcaactc

SEQ ID NO: 113555 - DNA, 290 bp, Glycine max
agcttagacggttataagtaaatcaattatactcttccaagctccatttttcttcttctcataatctaatacaatgtgacaaaagactcagaatatgcacaaatggctatagacaattatatattaacctttcatgcatgttctttagttttatatagacaaatggcattacatttagcaaaaagttaaaacactatagctaagagaaacctaaacttggatggcaccttcccacttaagacctactccaagggtacgtgacggcaccaatgaatacctttaatcattga

SEQ ID NO: 113556 - DNA, 252 bp, Glycine max
cttcgtgaccagcgaggcttcggttaattgcaggaaggagagaaggattactttgaatggtgatgacatttgttgggccttggcaacactaggctttgatgactatgctgaaccaatgagaaggtacttgcatagatatagagaggttgaggtagaccataataataaggtcaatcttcaagaaagagagaataatagtcctgaagagaaggacgatgaagtatttcaattgagtaatagaggggttaggtt

SEQ ID NO: 113557 - DNA, 289 bp, Glycine max
agcttgtaggattatggggtacccatcacatgtggtactaggtggcggtcgggcgatggtgcacaacaagttttccacatccacaaagcgcgcataaacccaccatcccctgttgcccacctccaactgagctcacgtactcccacgtagcccatatcctcgtttctctcaacaccgggtccccatcaatcctcccaagcttccacaacatccaagcaaaacaacattcaaacagcataagctatcacggccaagcaaaacagagcaaaggcagaaaactctgccaaaa

SEQ ID NO: 113558 - DNA, 254 bp, Glycine max
tgccaacccatggaagctcctaatatctcccacactttttggggtgggccattcttggatggccttgattttctcaggatccacttggaccctatttctaccaactacaaaccctaagaaaactatattatctacacaaaaagtacacttctctatatttgcatagagggtgtttttcctaaggactaaaagaacttgcctgagatgtcctaagtgatcatctaggctcctactgtacactaaaatatcatcaa

SEQ ID NO: 113559 - DNA, 290 bp, Glycine max
agcttgtggctggcgctttttttggatggaaacattgaactgcctagtataatagagatggaaaaggacgtgaaattgtgggaagacaatttgaaactttatggtggaaggtattattggaaaatatgcattgctcattgtgccatttgggatcacgatcaattatgcaaagacatgaagcataaccctagaaggaagaaaggccttttttcagagttgtttgaaccatatggccacactgattacgcgagtcttacttgtaaatgacaatttgcaagcaattaaatttg

SEQ ID NO: 113560 - DNA, 257 bp, Glycine max
  unsure (1)..(257): unsure at all n locations
tgtggctgcattcanaggtttttagattatgtcaggagaagctgatcgatcgtacgtatgcttttagcaacgaaagtgaaaaatcgcgaattaaaatatgatgatttcaacgacggtgatgggtataaaccggagtagtcttgttacaaacaaacacgggtcttataaaatcgcctttgtagcattcacatcaaaggcgattttataaaaaccgtcaaacaccttcataaagttgattaaaatttcaaaaatatcac

SEQ ID NO: 113561 - DNA, 286 bp, Glycine max
  unsure (1)..(286): unsure at all n locations
agcttgcttaatnggtgtcgcatcttgatccgcgacgcgttcacctcttcataggaggggggatgtgcataaatagactgagttcgcggctgctcacaccatgctatccgaaatcggatttgatgtaatacggggtgcatcttgaggcctctaccatgcattatcatgggtgggccaactggcctctcatatgtcattaaacattatgggccttatgctgtaataaagcaggactctccaattctttcattgcaactgtgtcaggccacaagcaaatatggtggct

SEQ ID NO: 113562 - DNA, 247 bp, Glycine max
tgcgcggcggcgcgtctaatcctgccgacccccggaacccacgctccattcttccctatagggcaccgcgaaccagtcacctggccgccactttactttttcaaaaccgtcaaaattggaacctgctcgccaccgtcttttctaaagccgatcgccttgacttgcttgacgtcacagcgaatatgaacaaacacatggatgctcacgacccgaactctaccaaactgccctccgacataccctgcct

SEQ ID NO: 113563 - DNA, 311 bp, Glycine max
gggatcctaagtcactgcagcatgcaagcttcaagacttatacagcatttcaactaaaacaaaatagataaaaaaaaaaacggggtaaataatcaaatttgcccctaaaagtgtcatgggatgacaaattatttccggaaagatggaaaatacaaatttagtcccaaaatgtggaaaaaaaaattgacaaattaatattcaagaaccaattctcacaataagttatattcttcaaggatcaattcgaatttgtcattaaattctctagagaactaatcacatcttcaggacggagttagcatcaccctccc

SEQ ID NO: 113564 - DNA, 254 bp, Glycine max
ttgatgtaagactattgtaatctttgaaagcacaatacagaaatggggtttttttatagggttgaagctaaaacacatttctcactcaaagatcttccacacaatcagtggcatagcttcaactaaaattttgggagagccaaaataaaattggctaaaatagaaagttgggtatttattatattttaggctttaatttgggtccttgggtttaaaaagttttattattgcatatgacaaaaaaaatattcatt

SEQ ID NO: 113565 - DNA, 292 bp, Glycine max
agcttgtgtcttattttaagtgaaacataactcacctgaattgtttattttgaaaatgctaaatgacgttacggtcttaattgagtgcgagatccatgtgtaagacgattgatatttgcaaatgaattataaatgataaacatgtgaaatgaaatggattgtatatgacatggctatataatacttattttcacaaaacatgtttcatgtgtctaagaatatctgtacttttatttagaattgcgaaaacagcctgcatgcgtattgattgcgtctggatcctgtgaagacc

SEQ ID NO: 113566 - DNA, 254 bp, Glycine max
tgtcttctcctgtgtcaagggttgccccgatctcaacaccggatctgatgcacctcagaatttgctccaaaaggtcagagtccatctgatagtttggatcatacactaaatcatcaaagtctttttacattttataaagagtcctacattaagaaaaaggaatgaaaaggcattatctatgtaacagactatctgggcattttagtacattgaaacctctagggtctgaaaatcataaactaggacagttccag

SEQ ID NO: 113567 - DNA, 293 bp, Glycine max
gcataatgcttcttcttttgatcacagatccctcaataaaatgtacttcctctacacgagatgttagtttattaaaacaatttaagattttaattaacatacaccagtaatagaaaaaaagaacgtattcaataacattgttttatataatactaaccaactttacaacaaaaatactttaaaatcgcataatactttctaaggaatgccaatctaacaaatctataatacacgaaagagggacttcacaaaaaagtgttaaatatttccattcaatgtcaaaaattgaataa

SEQ ID NO: 113568 - DNA, 292 bp, Glycine max
agcttaccaccattggaggccatatataagagcttggaggaagaataagatgaatgatgggagaggaagagaagaacacgaaattttgtgctctaaaagagctctgaaatctgaagtttaattttcaaatgatcaaagttaaaaaaatgcacacacatgacctctatttatagcctaagtgtcacacaaaattggaggaaaatttgaatttctattcaaatttcacttggatttgaaattgaatttgtggagagttgtttacaaacaataatcgtaaacaaagcgactaaga

SEQ ID NO: 113569 - DNA, 258 bp, Glycine max
tgtccatggtgatgtttttaggccaccaaataactcagatttgctgtgtgtttatgttggaactggtgttcagttttttgggatgattctagtaacaatgctgtttgctgtcctggggttcctttctccttcaaaccgaggcgggctaatgacagccatgctcttgctttttgttttcatggggatttttgctggttatgcctctgcccgcatatataaaatgttcaaaggaacagagtggaagagtattgccctcac

SEQ ID NO: 113570 - DNA, 291 bp, Glycine max
agcttatatgtttggcttttaatgtaggtcaacatgtttaggaggtgtttgtttcacagtataattatatttgagaatgttattcccatggatatgtttggttaatatttagttattttgaagaaaaaaaagttaaaatttatataattaataaattaaaaaaagcaaaagtgaaagagaaagagaaaggtaaaagaaagtaatgggaataggtagttattgttctttccaatgggaatatagataccatactcttcccctactctgcaaatacaaattgtttgcaacaag

SEQ ID NO: 113571 - DNA, 251 bp, Glycine max
tgtgctaataggttctattgatactatttgtttctgaacttcttcctttacgacaaagtacttcaattccatatgcttaacacccttagtgtacttgtcgttcttagagaaaatactgttgtggagttatatcaatacattttcaacggtctaacaatattgtcgacaattccaagccttaaaataaagttccacagccaattagtctgaattgttgcctcaaaacatgctacaaattcagcttccatagt

SEQ ID NO: 113572 - DNA, 288 bp, Glycine max
agcttcacaagcaagcttccatcataaacactccttttcactttctgtatataatcatttgtttaattttaatcttgattttagtgattgataaagttgattatataaaaatatatttctataagaaaaaaaatgagaaaaatggttatgcagctacagtggcagatccaggaccctaggttagcaaggatattttgttttaaaaaaaggtataataattgttagatttaattacttatttagtccttatactatttttatatttcaatccttatatatataaaatag

SEQ ID NO: 113573 - DNA, 251 bp, Glycine max
tatcaaaacaagctcttttttgcttattccaataagtttcatggtcaaatttatatcttaagctctcatgtgcatatttctgtaaaagcttctttaattatattcctttatgtatttccatttagactaatcaaagcttgacattattaggatcatgttgcaagctgtcttcaagagagagagcgtgttattcggcaggggggccaagtacattggcaagttgatacttggagggttggtcttcctgcact

SEQ ID NO: 113574 - DNA, 292 bp, Glycine max
agcttttcctcatattaagcactaatatctttttaacgtataactaaatggggtaatcattcaaataaaaaaaatgaaacatgaaaataaatgaaaaggtacaaacatatagaattaggggtgtaaaatataaaattttaaaaaaatataaattatttttattgaaataaaggggtgcatttgtccactctcaaacacatacatggccgcccctaaatttaaaacaagtccaaaattgtcatggtgccattttctatatcagttgttaaacaattgatataaaaagcctttc

SEQ ID NO: 113575 - DNA, 290 bp, Glycine max
agctttacaaaagtccactttgaaggccggcatgttcttctttgactttgtagccccatcaagaaattcgttgaagagcagaacgccatctaaaatctgacgacttcataagaatgttgctttgctagaggagatcaccggaggccacacttttttgatgtgatcaacaggcaactttgatataatattcacaatattgcctatcagagcaatcaatcaaaaatttgattaagattgaggggaatcaaccttcggaatcaatgcgatcaatgactaggtgaaagcctttg

SEQ ID NO: 113576 - DNA, 255 bp, Glycine max
tgtcaatgaattcgtaattgtggccaaaaatgccatggaagcgggtatatatactatacacacacacacacacacatatatatatatatatatatatatatatataatttgatcttaattaattattaccggtgggaagattaatgacataaaaataagaagtgtcatgatcatgtattcatgtggtacaggttttgatggaatagaactacatggagcaaatgggtacttgctggatcagttcctaaaggacaa

SEQ ID NO: 113577 - DNA, 289 bp, Glycine max
agcttggatgggttgattttgaccctgcgctgataggaacaatggatagggctacgcatgaatgcttgaactcagttgaaaggtgggcaaccgagaatggacagcttatattagacttgtggaactgggaaagtagatttgtgccatcggctgatcgccacctaatgccacatattaccggctcccatataatgcactaatcttgatgtgataaagctgtgaaaactcagtcttcctacttttgtttgttgaccacacagtggtacctgaagatatgtcacgggggtct

SEQ ID NO: 113578 - DNA, 254 bp, Glycine max
tgatcgtgcgctaagcctgtctttttaagctaaacgcatattgcataaaatttttgtgctgcaaaaagcgctgagccccatatgctcacgggactttacaacgtcctatggggcttaccacaagggtatgctaaacgcttgggttctaaaaccaaacgacatgtgggcacgctaagcgcaactgtgcgctaagcgcgccatacgaattggagtttttaaaaatcaaaggtagaggcactttgggtgctaccttt

SEQ ID NO: 113579 - DNA, 285 bp, Glycine max
agcttgaaggtgtgtaacccaccattttcttgtagtagaacatcggtaacgtgtctactatcattgttatcatttctttctccttcattaggggcgctacttgagctgccatatccttccacctttgggcatattccttgaaagattcgtgctcctttttgcacatgttatgtagctgcgttctatccggagccatatccaaattgtactgacactgcctaacaaaggtgaccattaggtcattccaagaatggactcgggaaggttccaaattagtgtaccagg

SEQ ID NO: 113580 - DNA, 248 bp, Glycine max
tgagcttggttcaaccccgtaatccaaggaatggaaattctgattgccaatacttcaacaacatctcatagggatgaatgactcgggcatactttaagctatgcatggaaaatgtaattatgaaattgagatgcccgaagaaacatcctttcttagttaaacatgcattaggtaccatgttcaatcattttgtttttaagtgaaatgggtttatgatcccaacatggttggctcatggtaccgaatat

SEQ ID NO: 113581 - DNA, 285 bp, Glycine max
agcttgaagaggatgctttaatggaggaaaagaaagagagaaggggggagcacgaaattgaaggaataacagagggaaagaagtggaactttgaagtgtatctcataagactttcattcatcaaagttacaacaagtgttacacatgcttttatttatagactaggtagcttccttgagaagctttcttaagaaaacttcattgagaagctttcttaagaaaacttccttgagaagtttctttgagaaaacttccttgagaagctagagtttagctacacacacc

SEQ ID NO: 113582 - DNA, 254 bp, Glycine max
ttgacttgagttatcattatattataaatatgtggccatggcatgaatttcaataatcaatgatctatcatatctttcaatcaatctttcaatattttctttcatctctttcaacagattttttctgattcatcttctcttcatctttctaaaagtttttgttcaatactttttctttcaagaaaagttctttgataaaaaacttgtgttattcatctttttcattctcttctccctttgccaaaagaacgaag

SEQ ID NO: 113583 - DNA, 257 bp, Glycine max
tctttatacatgtattctatctattaaatcaatattcttataaatatacctaaaattatagacacaatacaccttaaaccctatacctacctataacttataataaatgtatcatattcaattgtttttttgatgatggagtttcttgttgtcaaataacatttgcataaattaagaggattgtgaaaatgccaaactaaaacccaatgatagaaatttcaatacctacttaagcaatggagagatagacgcaaact

SEQ ID NO: 113584 - DNA, 320 bp, Glycine max
gcttaaaacaatatacttggccatctcttaattgactttgggctgggcgcaccatcgatcatacacaagtatctttccggcctcctaactataattgtagacttggacccaccgcttgtatatttgagaatgactcgcgacacattctttacaacacgctttatatcagcaccattcgtgatacagttggtatggtcatgtgacacatattcggcgtgccagatgtatcgtaagccatgctccatttgtcctttgaaagtccagcaatccatcttgctatggctggactccatagacaaattttttttaagtcttgatca

SEQ ID NO: 113585 - DNA, 254 bp, Glycine max
ttagctccttcaagtgcacaaggctcttaatattagaagagattccttgtggaaccttcacccgactaagacactgacaaaaacttatcttctccttttgggacaaagtatggcaggctgggggcaagtaaattttcatgccatcaaaccttggatgcaactgtgatcgtatgcccatattatctagatcttaacgggtattcaagccatcctttgtcttgccttgaatgttaaggagcgtcccaatcacactg

SEQ ID NO: 113586 - DNA, 293 bp, Glycine max
gcttcaaatgggtcacccactagttggcacttcaaagttacggcacttgtcagtcatgtgagggcgaccacgatcaacacagccgtagaaattactacctaatactataatgtaaagcgcttctcttgtatgcatcaacatatttatattggtgcttcctattatacacaagcaaacttgcataacttcgatgctagattccaatatacataccccagaaaccctaaataaatcaatccccagaaagcaagctataaacatcattgaggcattgtttgcgacattcataatca

SEQ ID NO: 113587 - DNA, 257 bp, Glycine max
tgtaatcgattacacacatattgtaatctattaccagaggagattttcagaaaatattctcaacagtcacatcttttcatttggttcttgaatgaccatcaaaggcctatatatatgtgacttgagacacgaatttgctaagagttttttataacaacatgtgtttattatctcaaaaagcaaaatcgttttatcctcttaagaattccttggccaattcaattgcaattcattaaggaatcatttgagtgctcaaa

SEQ ID NO: 113588 - DNA, 289 bp, Glycine max
agcttaaagtggttaacaagcctttggccaacccttcttgagcttgtgtgtgtggtaggggggcataggagcactcaacttcattgtacattttcccccctactgctttccttagttaactaaccctttaggttagttattggttggttactttaccactcaatagttgtcatgacaactgttgttagttaggacagttagtctaacaatatatacttggaaactttactgaatcattaggttttacaattcaataacaaaaaactcttaacagaatttttcctaaacc

SEQ ID NO: 113589 - DNA, 256 bp, Glycine max
tgtccaaatggcgtttctcttttttaatggattctcaagtctagggaaataggtaatgtgttattttaaatcttaaaagttctttcaaatcttcaattgttcaagaatttaatctatagttctgggtcatagtttagtgcaccccctatatgctctatttgtgatctgggtttatttgaaagtgtgtagtaagagttttaatggctcatgtagttgtttcctcgtttctttttacacttctgcaggtggtcttccg

SEQ ID NO: 113590 - DNA, 295 bp, Glycine max
agcttgattgacattcatcattcgagacacggtcttttaccattatgttgcccatttattggtacaacttgaccgttcgacaacccaccttaacacaacatttaataagtcccatgaggatccttgcttttgcgaatatccctcatgacacctgagcttcaccaccaaggtgagctttgtatagaatcccttgaataattcttaaatggatgatgctttattttgcaagataaataactgtgggatctccactgtttgagaaaaaaatcggcgattgctttcacttgcacatgcg

SEQ ID NO: 113591 - DNA, 275 bp, Glycine max
atatctcacacaagcttgtgagcggacactatgtaccttttttagtccgcataggggatagcgcatatgtcatgtcataaaaattacttgaaattcccattgggaacctgctaaaaccattcttcttccgtgactcttagacgcactcttgggtcttctaggctaagccttaactgtagaatggaccaagaccgtagcattactatgtatgaattaccaacgactgggatgccgcatgacgatggcggagggaaataaaggttgcaaatgatcta

SEQ ID NO: 113592 - DNA, 276 bp, Glycine max
agcttgtctctttaacaccgacccgtcttggcgcttatccaacacctgatcgtcagctgggctataatatggatccggttaccggttctcatttgacttgccctggtgtgggaagccattgtttctcatcacacattaatacctttccctttcatacgcctggttgggaagaaaaaaccttacctagatctcaaacctaactgaacactctgccaccaatatgctgtcccgtttagactttttttactccaactacgacctataacctaagccttc

SEQ ID NO: 113593 - DNA, 233 bp, Glycine max
tggggtaagatatgctaaactttaagtggctatgtccagctgactcgagtccttcgaaagggtatctggaagatgaaggttaaccaaaaggaatcttaagcctgtgaagattacctcaattaactcctattcgccctggaaggatctgacgatgattccttgtttgcttccctctggctagggatcgaggttgactgataactgctgtatcgccaaacacgtattcatgattg

SEQ ID NO: 113594 - DNA, 291 bp, Glycine max
agctttgcggatttggtcttcgctggcgaaatgatcgaagtgggtctaaaaagaggcaaatctgatcatcatgctttgataaatgcaaaaaaaacaagagcaagtgaagaaggtgagaatgagggagaaacccatgttgtgactgccattcctatacagccaagtttcccaccaacccaacaatggcattactcagccaataacaaaaccttctcactacccaccacccaatcatccacaaaggccatctctaaatcaaccacaaagcctgtctaccccacaaccaatgct

SEQ ID NO: 113595 - DNA, 251 bp, Glycine max
tggttcgaggtacttacccgttgaagatcgaagaacgatgaagaacgaatgaagaacgtcgaagaacggttcaaacctttgcgagattcctcacggaaaacgttacggaaacgtttcggaagcgcctcggcttagattttcttcacggaaacgatttttccaagcaaattcgaaagagagagaagtgcctaaggggctggaccccttccttcttcatttcctcccctatttatagcaaaataggggaggtg

SEQ ID NO: 113596 - DNA, 270 bp, Glycine max
agcttttggtcaagtgtcttgtatatacaacaatggccttctgtcataccctaatttcggccggggacctttgcttgatgacatgcgacctttctttggtccttgtgaggggcttggcccccatcattaggcaatttgtgaatgttcacgacatgccgaaaaaccaaaaaaatattgatgcacaatccgtaagtttccgtgacacaccgaaaatcaaatggaagcttcgttgcataattaagtgacgttccatacattacgtctgttaac

SEQ ID NO: 113597 - DNA, 253 bp, Glycine max
tcgacattttggatcatttttttcaaattagagattgttcttcttccttcaatcaagccaaatataatgggtttccgtttacctgctgttcgacgggcatcgttcacggctagccaagcatcttcaaaatctgtacaagttccaaagggctatcttgcagtgtatgttggggagaaacaaaagcggtttgaggttcccgtatcatacttgaatcaaccttcattccaagatcttttgtatcaagctgaggaag

SEQ ID NO: 113598 - DNA, 290 bp, Glycine max
agcttgttagattatggggtacctatcacatgtggtactaggtggcggtcgggcgatggtgcacaacaatgttttccacatccacaatgcgcgcataaacccaccatcccctgttgcccacctccaactgagcttacgtacttccacaaataccatatcctccttgttctaaagaccgggtccccatcaatcctcccaagcttccacaacatccatgcaaaacaacttttaaacagctcaagctatcacaggcaagctaaatagagcataggcagaaaaactcttaccaa

SEQ ID NO: 113599 - DNA, 252 bp, Glycine max
tcatggtgaaccacctatttttttttaggcggaaagaagaccgcaatgatgtccgctgcttatgatgaccttcggcgtgggcaaattgccgctatgatcgggcattcttctatgtgctgctcggagctaatttagctgtatcaaagaacatactctattttttacacagcgattcgggagattatggaatcaaatatgagattccatgacccaaggaagaaagcctatctttccatattcaagacttttgat

SEQ ID NO: 113600 - DNA, 285 bp, Glycine max
agcttctccccaattttctataaatagggggagaagtgaagtgaaaaagggttcagccccttaggcacttctctctctttcgaatttgcttagaaaaattgtttccgtgaagaaaatctaagtcgaggtgcttccgtaacgtttccgtaacgtttccgtgagtgatttcgcgaaggttttcgaccgttcttcgacgttcttcattcgttcttcatcgatcttcggtcttcaacgggtaagtacctcgaaccaagcttttcgaatcattctatgtacccgtggtgg

SEQ ID NO: 113601 - DNA, 248 bp, Glycine max
ggcatgtcacctactttcttctcatagtagaacactagttatgagcctactatcaatggtaccatctccctttccatcattgtgggccctacttgagctgccaaatccctccaccgttgggcatattctttgaaagaaacatgcttttttttacacatgctctataactgcatcctatatggagccatatctgaattgtactgatactgtctaacgaaggcaaccattatgtccttccaaaaatggac

SEQ ID NO: 113602 - DNA, 282 bp, Glycine max
agcttgccacccagggttgcttcctccagaagcaacagccttctggaggaatcttctggagggcgcaagtgggcctggttgctatttgcacccccatttttactaagtacaccccctgccttttttggtgattctttttttgtaaagttacggaaacttacgaatttcgtaacgatacttgttttctttccgtaatgttacggaaccttgcggattacataatcatcccctttttttgacttacggaatgttacgaaacctcactaattgtgcaacaatgct

SEQ ID NO: 113603 - DNA, 251 bp, Glycine max
tctttgagaaaacttccttgagaagctagagcttagctacacacacccctctaaaagctaagctcacctccttgagaagctagaagctagagcttagctacacaccccctatgatagctaagctcacccgcatgacaaaatacatgaaaatacaaaaaggtccctactacaaagactactcaaaacgccttgaaatacaaggctaaaaccctatactactagaatggccaaaatacaaggcccaaaagaag

SEQ ID NO: 113604 - DNA, 286 bp, Glycine max
agcttgaaatgatgaagtgtggaagggtgagacttccttcttttattgttgaccacagagtggtacctggagatatgtcgcgggggtcaggagaccttggggacgtcaggtggggtgctattgcccaaaaccaagcttgaccaatcccgacccaacccgggcatattcactcagtgagaacctgtgatgtacctaaacaggcgagctcctggcagtcaacagataaaagaacaaagaccacaaagcaagggggcttgtatggtggctggccagctgtgaatcttgt

SEQ ID NO: 113605 - DNA, 273 bp, Glycine max
gtgacactataaatctcagcttggcacccagctcgcttttttgagctaggttgctccctctataagcaaccgccttctggaggaattttctggaaggcccaagtgggcctggttgctatttgcacccccattttcactaaatacacccccttgctcttttttggtgattctttttccataatgctacgaaactttacgaatttcgtaaagatgctttgttttcttttccgaatgtttcgaaaccttacggattacgtaatcatcccctttttg

SEQ ID NO: 113606 - DNA, 291 bp, Glycine max
agctttacgcacttggtatttgatgcaaaagacgaatatgactatggttatgatgactacaaatgatacacatgtctcaagagaatcctgcggtccatatgccctgttgagggaagggacaataattctgcacccttggattttcaaaccccaaaaagatttggcaatcactacttcataaacattcttgaagggaaagacttgttaggttctgacaatgttcttattagccatgacttacttggaaagattacagagcaggagtgggattatgcctctaaagaaaaaatt

SEQ ID NO: 113607 - DNA, 255 bp, Glycine max
tgctttgctatgggattattgcttgacgataaggaatatattgaggctttaagagaagcatgccattggggtattggccaattcttaagaagattttttgtaataatgctcatatctaatagcattgaaagaccaaatcaagtatggactgaaacatgggagtgtctaattgatggtattcttcaccaatagaaaagaataagaaccatgccaagtaatgtatagtaaaccttatattcttttattgaatgtaat

SEQ ID NO: 113608 - DNA, 291 bp, Glycine max
  unsure (1)..(291): unsure at all n locations
agcttatacatgattttatgtattaggngtggggatgatgatgcggttgattatgttgagaaggtggtcaacaatggtgaggacacagtgacaacaataagatcaatggatgacattcatgaccttttcatagttgggagaggtcaaggggtgatatcaccactcactgcaggactcactgattggagtgagtgtcctgagacaggggcaattggggatatgctagcatcttcaaattttgcagccactacttcagtgttggtggtgcaacaatatgttggggatggttca

SEQ ID NO: 113609 - DNA, 255 bp, Glycine max
tacattttatggctaatctgtttggttttaatgccatacaagatgggaaatcgggttcatttgatgtacctcaccgtgttggctgatctcgaacgagtcaagtgatataattggggctctgcttgtctagcaacgttgtacagggaaatgtgttgggccactgaccctgattcccaaaccatgggcaactgtgcataatcgttgcaatcttgggcatggtattgcatgcctttcattgcagcaagacttaattga

SEQ ID NO: 113610 - DNA, 293 bp, Glycine max
agcttggaatgatatgaaaagactcttgcagttggttggaactaagatcgacaagttaaaggtttgtcaaacgaacaagagtattactttcttgtaaatgtgtgagaaaatttttggaaagattcaaatgagcaagatatccaagttgcgaaatccagttaggtattggtccttcgatcccgttgtcagatagatcaagatatattaatatggactgatttatcaagaaactaggaattcgtctcaacttacaggaagccaacattatatgcgtcatatgaggaaagggtgac

SEQ ID NO: 113611 - DNA, 258 bp, Glycine max
tttcttttagtcgttttgctaggatttccaagcgttagagagaagaagaatagattagagtctcaatttcactatctccatgcgagggatatttctctctctaaaaacattatttcacaaatccctatggtgaaaaggtgagaaaatgagtttcaaatgtggtatccaaattttaggatgatccagcagttaacgaatccaagatggtagttttaatgagatatgtttgggtgtatgaaaaagagagagtttggagaa

SEQ ID NO: 113612 - DNA, 234 bp, Glycine max
tttttaggaaaaaccactggcgttttggcgcgcccccaagttacctgggaatttgggatgggggtcacgaaacccttgggacgccaggaggggtggtattggagaaaaccagtctaggccaatcccggcccaacccgggaataggccgtcagtgaaaacccagtgctgccactcgaccgggcacctcctggaaattaacataaaagaggacgctggaccagtaggcgaggccgc

SEQ ID NO: 113613 - DNA, 287 bp, Glycine max
  unsure (1)..(287): unsure at all n locations
agcttgagatgatgaagnntngaagggtgaaacttcctgcttttattcgttgaccacagagtggtacctggagatatgtcgcgggggtcaggagaccttggggatgtcaggtggggtgctattgcccaaaaccaagcttgaccaatcccgacccaacccgggcatattcagtcagtgagaacctgtgatgtacctaaacaggcgagctcctggcagtcaacagataaaaggaacaaagaccacaaagcaaggaggcttgtggtggctggccagctgtgaatcttgtg

SEQ ID NO: 113614 - DNA, 253 bp, Glycine max
tggttcgagttacttacccgttgaagatcgaagaacgataaagaacgaatgaagaacgtcaaagaacggtcgaaaccttcgcgaaaatcctcacggaaacgtttctgaagcgcctcggcttggatttttttcacggaaacaatttttccaagcaaattcgaaagagagagaagtgcctaaggggctgaaccctttttcacttcacttctccccctatttatagaaaattgggggagaagcttgccacctagct

SEQ ID NO: 113615 - DNA, 217 bp, Glycine max
  unsure (1)..(217): unsure at all n locations
agctnaccnttttctttttctttaaaggaagttatccttgcattgttatgaatatggggacctaaacttaatacaggtaagacgaggcttatcaaaatctcataagctctactccagtttatacaattgaatcacagggtccattggtgcaaaaattactaggacttggctgcgaatgcgggaatttcaatatttgattataatgcccatagaacaa

SEQ ID NO: 113616 - DNA, 254 bp, Glycine max
tctaaactttatacattattgaagctctgataccactagttagacaagtggcctcagatatcttaagaagggggggttgaattaagatatcccaaaatacttccccaattaaaaatctatttcactttcttttcaagttataaattcccttaacaatgaacttcttaaatattaattcaaataaaacaatttgaatatgaacataaatcaataataaacaaaggagattaagggaagagaaagtgcaaactcag

SEQ ID NO: 113617 - DNA, 290 bp, Glycine max
agcttgacttgttcaggtgcaggtgctgctactggtggaggcacttgaatttggttgccaaacctcaaggtgatggcactcacatttttcagattttgcacagtttgtgaaggcaatttgtcagaattttgggactgggcttggttcaactgagtagccatctgccccatctgatttgtcagactttgaatggaggctcttgtctcttgctgaaattgcatattctggataatcatttgcctcactaactcttgcactgaattattgggagttggaagccatcttctcaa

SEQ ID NO: 113618 - DNA, 256 bp, Glycine max
tgagatgaggaagtgttgaagggtgaaacttcctgcttttattgttgaccacagagtggtacctggagatatgtcgtgggggtcaggagaccttggggacgtcaggtggggtgctattgcccaaaaccaagcttgaccaatcccgacccaacccgggcatagtcggtcagtgagaacctgtgatgtacctaaacaggcgagctcctggcagtcaacagataaaaggaacaaagaccacaaagcaaggaggcttgtg

SEQ ID NO: 113619 - DNA, 288 bp, Glycine max
agcttatgctgcaaacatttataatagacctcctcaacggaaaaaccaacaacagcagaataattatgacctttcaagcaataaatacaatccaggttgaaggaatcatccaaatttgagatggacaagtcctccacaacaacaacaacagcctgtccctccttttcagaatgctgctggtccaagcaagccatatattcctcctccaatacagaagcagtcaaaacaaatacaacaagtaactgaggctcctcctcaacctttcttagaagagttagtgaggcaaat

SEQ ID NO: 113620 - DNA, 254 bp, Glycine max
tcgaagttctcctcgttgataactttcaacttggagagccaatctaaccctcgtgtatgaactcttagccattcatgataaccaccgatgatgccattacggatgcccctaagttctttatctttcctcaacgagcttttccacaccttgtggactctttgtacaaccttgagactttgcgcaccaaaatctctcacaaggaaaggcgagaggctctctcccgttggtgctcccctcatggggtaccctagctg

SEQ ID NO: 113621 - DNA, 347 bp, Glycine max
  unsure (1)..(347): unsure at all n locations
gatagcccntttgagccttgtttccctttccttgttttgaagctcactacaagccttaagtgaaaaaccatgatattaccatatccttaatgaattttggagctttggaattgttttgggaataagtggggggggttttggtttcattggacaacttgttttgttggctatgcttcatgatgtattttgggccatacttgatgtacattgtatattggttaaatgtttgacatgctgaatgaaatgttgtttctcaaaggctaaagagttcacaaaaaaaatcgaataaaagaaaaagaaaagcactaaagttgagtgaataaaatcttaaatggcacaagaatgat

SEQ ID NO: 113622 - DNA, 378 bp, Glycine max
  unsure (1)..(378): unsure at all n locations
gcttgatgtgccataatggntggtagtaataaaggggatttttattctggccttgactgtagcaccttcagtgattgtcaccttgcatgcgattatgatacctgttgcgatcattatgaaagtattaaccgacgcgcatttctcatactcggccaagttgtattgggtatcaacagcttgagatatcctttcgggctcgatggaaacatgaaaatatcattgacttagaagcttcatgggtgaaaggattgttcagtcgaagaacacgactattctcataccttggcttgaaatgtcctttatgtggtggctctggaaagacatcacaacaggagatgaacctaagtactgttccctcttgaaaacataaaaaagctt

SEQ ID NO: 113623 - DNA, 376 bp, Glycine max
agcttgctacgacgcaccgaagaagggtgagactgttgtggattcttggcatgaacaacaaatgatacgctgaatatatgtctctgaaggattgatacctccctgaatgatatggtggcgctatcagcctgcacccagctacgcctatgatcacccggaccggacttactctctcgaaaagaacatggcatgtcactatggtcgcgatctcctgtatgtggaccctgtaaggctcggatacctctcatcaatgaagcccgttgcgtggctaagcctattggaatcgagatggatatatagattatggccactagtaatcgataagcaacgccgcgtcattgataacatggcttaagaataaacacacgacactaag

SEQ ID NO: 113624 - DNA, 136 bp, Glycine max
tgaaccccaacgcatggggggattttgaaaccacgggctgataacccctccattcacttaggaccaagctaactgacccatctatttggatcatcagcaccaataagctatgtaaggctatcccctccgggcaatc

SEQ ID NO: 113625 - DNA, 384 bp, Glycine max
gcccgagatgaggaagtgttgaagggtgaaacttcctgcttttattgttgaccacagagtggtacctggagatatgttgcgggggtcaagaaaccttggggacgtcaagtggggtgctattgcccaaaaccaatcttgaccaatcccgacccaacccgggcatattcggtcagtgagaacctgtgatgtacctaaacaggcgagctcctggcagtcaacagattaaaggaacaaagaccacaaatcaaggaggcttgtggtggctggccaactgtgaattttgtgtgatatgtggattatggcctctggtaatcgattaccaagggtgggtgatcgattacaaggcttaaaagtgaagacaggaggctaagatggtctctggtg

SEQ ID NO: 113626 - DNA, 368 bp, Glycine max
ctgtgaggttttttataccatacgacaatgatgaaattagtgctgaaaaacatgagggtgggttgaatggttttccttattcaattagagcatcactatgttgtgaatataaacccggattgttgtctgatataaaacaagcactagatgctctccatcttatgataacaagggcagatattgcaaccttggaaggcaggatgaagaatgtctttgtgataattagttgcaaagaacagaactttgaagatgccgcataccgtctgtttcttgccgtttctgttcaccaagctctcaattctgtgctcaacagattttctgtttcagaagacattttatgaaccatgaaaaaaagaatgaattctata

SEQ ID NO: 113627 - DNA, 343 bp, Glycine max
  unsure (1)..(343): unsure at all n locations
tggaaaaggaatacgggggagttaatactgttcatattataaatcacaaataactcaataaaaaaggtaaaccccaaagatatatgtcatttgtataacactcatatcaccgacggcttgaaccaactaatggaagattatttcaacttaacaagaggtcttgaattcgagtcctaagtatatatgccattgtgttaatgcagcctacaatgtgtntatctgatctcaaatcaaacataattgtctactgtgaaaaatacctgttatctaaaaaaaatacaataaattattggttcataaattatagagtaaaccctcacttttaacaacctacttgacatct

SEQ ID NO: 113628 - DNA, 346 bp, Glycine max
cttaatatttgaaaaagatccctggggaaccctcacccgacgaaaacaccgaccaaatcttatcttctcccttttggaacaagtatggcaggctgaaggcaaataaattttcttcccatcaaaccttggatgcaactgtgatcgtatgcccatattaactaaatcttgatgggtattcaagccatccttcgtcttgccttgaatgttaaggagcgtcccaatcacactgtcacaaacatttttctccacatgcataacatcaataaaatgtctaacgtcaagatcagaccagtacggaagatcaaagaatatggacctcttcttccatatgcaactcttactttta

SEQ ID NO: 113629 - DNA, 379 bp, Glycine max
agctttaatgatatggtcttcaccatagaaaggatcaaaatgggtctaaaaagaggcaaatctgatcatcatgctttgataaatgcaaaaaaaaaaaactagggcaaatgaagagggtgagaatgaaggagaggaccatgctgtgactgccattcctatacagccaagtttcccaccaacccaacaatgtcattactcagccaataaacaaaccttctccttacccaccgcccagttatccacaaaggccatccctaaaatcaaccacaaagcctacctaccgtacttccaatgacaaacaccacctttagcgtttaccataacaccaaccaagaaatgaattttgcagcgagaaagccctataattcactccaattcc

SEQ ID NO: 113630 - DNA, 378 bp, Glycine max
gcttctgcttatgtggcagggcgggctgccctcactttcttgtctacaacgcgagctctgaccactgctctgccttcccgcgatgcttcttttcatatacgcctgagtgggcttatagcctaaaccatacttcccacgattttctttggcatttatcaagctagttatgtcgccggagtctttgcctaaacccattccgggttcgaaaccgttccccaacataactcgggccatcattaccgatgcatctgacaggcaaagctgcccaaagaaagagtccatataggaaatgcttaccacctcaaaagactggaaagcggtttctaacgattcctcttgcggcttcacataaagcatacaggatgggcaacttaccaa

SEQ ID NO: 113631 - DNA, 374 bp, Glycine max
agcttgtaattctagctcattcagattttgttaaaacttgttataagtgaaaacacatggtggctatttatagagaaaccagttataaccgcctataatcgattaaatatacaatgtaatccattattttgaagaagtaatcgattatattagtatttcaatcgattaaagtgttcttcccaaaaacgggaaagctttcaacaaatatgtaatcgattagatccttaatgtaatcaattgaaatgttcttgatcacttctaaaacatcttttaagagagaagtaatcaattatatcacctggtaatcaattaaagcagagactcctcaaaaatcaatcattctctcaaaaagaactgtgtaattgattactatg

SEQ ID NO: 113632 - DNA, 205 bp, Glycine max
gcgagttgatgaactctgtcactcaaaatggcatgatcgctggctgacatattctcaattagctcaattgcctcttcacgggttttcaactttatattccccctgctgaagcatctaacaaatgcttgatatgtggactctatccatctattaacatattcaatttcattggctcacaaaacccatgggtgggagtcttttttaa

SEQ ID NO: 113633 - DNA, 373 bp, Glycine max
agcttttaatggaggcttcagtactcttatggttagaaagagatatacttgtatgaattgtgtaagggtttcttccagtatgcttgtcttctcatataaattctacctaggcatgacattagaagtattcctttgctcttgaccttgtcctatgcttggatgaggtatgtatccttgattgttatagttgttgtagttcccttgcctttgattgttcatatactaaacttcctcatgaatcttagcacattcaattgttgcatggcctcctccacaagattcataaataaaacatttgaatttaggagtagaggcaattatttgaagcttgaaatgctgaggaagataagtgatttgttgtgtaagctcttca

SEQ ID NO: 113634 - DNA, 388 bp, Glycine max
aatactcagcttcttataagctgaaccatgttatcaattaacacatgttgagttttattaagaaaaattagagtttatctcttttatcttagtgagagtgattctcctaagttcttgagtgattcaagaacaccctggctatatcaaaggtctttcacatcctttgtatgttgccctcgtcggaaagagtgattttttccttccaccatttcatcttcaaccttgttccttcaaaccacaatttccagaaaatccaattctgcccagaattatctcgtgaccataactttcgttttactcgttcaaattaagtgactctcgagccaaaattaatactcaaaacgagaccgttcacctcgttttggaatcaccttcattggagccctat

SEQ ID NO: 113635 - DNA, 372 bp, Glycine max
agcttgtatgattatggggtacccatcacatgtggtactaggtggcggtcgggcgatggtgcacaacaagttttccacatccacaatgcgcgcataaacccaccatcccctgttgcccacctccaactgagctcacgtactcccacgtagcccatatcctcgtttctctcaacaccgggtccccatcaatcctcccaagcttccacaacatccaagcaaaacaacattcacacagcacaagctatcacagccaagcaaaacaaagcaaaggcagaaaactctgccaaaacaccaaccaaaaatcacagcttttcccactcaaagaccccagtaacaattccttcgatccaatttgttaaccgttggatcgac

SEQ ID NO: 113636 - DNA, 264 bp, Glycine max
cctccattttgagaggggaggggctcgatattttatgtgcctgaatcggaccggtgtgtttaggtgttatgaccatatgaatttctcgagagcatattttgaacaacttcaagcggctctattctgtagaagtgcttgaatcggacctccgattgaaatttaaataccattggatttttgcgagaacattcgttgtgcggcttaatcgtccaaaatgttatacgtcttatcagaccttcgcattggaaataaggactgtttgta

SEQ ID NO: 113637 - DNA, 382 bp, Glycine max
  unsure (1)..(382): unsure at all n locations
agcttggaagtcgatatctatacagattcatattcacagtgtgttgaatcatatatatctcatactcatactattgttacacataagtctatttctatactttgcttgaagacaaacaatattctaggtacaggggaggcgataagtgtcataattcacacattgctgggattaaaacgttcgcacttatcatttgattgtgataatattgttagaaacttacctcatatcgagtggatgatatatattgtacaattactaatgatgatatgtaaacttgtgagattcatacatgaatctgtcggtttacgatggttgtttgttggatccaaatatgggctaatcaagtgtctttangcataagtaatcaactcgtctgggg

SEQ ID NO: 113638 - DNA, 418 bp, Glycine max
  unsure (1)..(418): unsure at all n locations
aaaaaaattgatcttgangactgagatctctaatcacctgcggctgcagcttaacctttggccatcatttctactccaattcgtgaaaagagagcattttcggtgtcgtgaagtgcgtggctacgagtgggacttcgaaacttcaggtttgggtggacttctttctctcttaaatttcgtgggtatggggctttgggagatatgatgggtagtcttgctagttttctgcttcatgatagttatttgtgaagaaacttgttgaaagcttgttgaaattgccatgtttggatgagttagacatacccattctgttttagggttgtgtgatgatgtctgcgatgtttcatctccaaatcgcccacggtaaacttgtatacaccaaatccacatattaaactcccatctcaacactcattct

SEQ ID NO: 113639 - DNA, 381 bp, Glycine max
agcttctgtgagacacatgttttattatccggaggatgttatttggtttgaggtgaaaatacattacccattgtctggattctttaaattatacttgttggatggtagtgaagtttacatataaaaaattgtttccaatgtcacccctaatgagatttgtaatgtgggtggtgattgcagcctgttgagcttttttaaataaatacagcttaagattcaaatcacatacaaaacacatttgaatgcctggaaacagagtatataaacaaacaaaacatttggcaaatactattctttgaatgccaaatcaaacgcagcattcaaagatagttattagcagataaccgtctttgaatgtcaaatcagaaggaggattcaaag

SEQ ID NO: 113640 - DNA, 351 bp, Glycine max
ttcaaactcaactaattatactacccaagcaatcacactgtatgctcttgtcatccagctatgttctattctgatcaggtacatggacatgagttaggcacccaaatactttaaagttatctactttaggtttgattccactccacatctcttctggagttttatctttcactgacaatgtaagactcctgttgtgaacatgaactgtccattttgcagcttctggccaaaaaacctttggtacttgtttgtcacaaatcatgcaccggaccatattcataatggttccatttttacactcccctacaccgtttttgtttggagtgtcataaattctgaatttccctccta

SEQ ID NO: 113641 - DNA, 368 bp, Glycine max
aagctcgcctaaagaggtccaggaaggacaaggcagccgatggatctagttccgctccggagtatgacagtcaccgctttaggagcgctgtacaccagcagcgctttgaggccatcaagggatggtcatttctccgggagcgacgcgtccagctcagggatgacgagtatactgatttccaggaggaaatagggcgccgacggtgggtaccactggttactcctatggccaagtttgatccagaaatagtccttgaattttatgccaatgcttggccgacagaagagggcgtgcatgacattagatcctgggtcaaggggcagtccatccccatttatgccctccctcttctgagtcgctcttattta

SEQ ID NO: 113642 - DNA, 368 bp, Glycine max
aatatgctctactatcttgcacaagcattatatcacattaatgatacatgttgcttggcttatcatcaccataaatgcttttgacaccatgcatcgacatacatacaccactaattttattatgtcttgatacttgttcgagttaaacatttggtctcatcatgatcttctaattaccaagaatcgatcattaagttacatcgttaactttgatatcaattattcgaaaacataaacgagaagatggggtcaaataccagaaatatttttatcaatgaattacaaattaatcacacaagtgaatttatcatcacatccaatccaaaatcttaaaacattgagtttgtaatctttatcacttatatatt

SEQ ID NO: 113643 - DNA, 363 bp, Glycine max
gggctaaaaatgaattgcgccttaagctgctttggggcaataaggaagaatgagcagaggcagattgaggcatcacgatacctgaatggtaaaatactgtccttacctttttcattcttgggtatccccattggggataatccaagatatagtgaccttcgggatcctatagtccgaaaatatgagagaaaattagctatatgggaacacagacacatctcatttggcgggagagtgactctcataaatgctgtcctagcgtcaattcctatgtactatttttgcttgttcagggtaacttcaataataatatctagactggaatccatttaaaagcaatatctttggagaggaggtgtggat

SEQ ID NO: 113644 - DNA, 311 bp, Glycine max
agcttgacgaaggttctttttccatttatagaatgatttacgattaggactgagatggccatgctctctgacgtcaataacacttatatggagaaggatgaagagcgccctattcgcactataccacctctatgttggaattgaacggggatcactgcattgattgacaggatattagcctgatacagattgggataaggcactaagagtgatcatctggagtgaacgcataccgtgctttcgtcgattaatcatacgcgatacactggtgtgtggatgaccacgatgattctagcgcatggggatgacca

SEQ ID NO: 113645 - DNA, 375 bp, Glycine max
agcttttaactgaatttgcaacattccaaatgttttttaaatggtgtaatcgattacaatatattggtaatcgattactagtgtatctaaaagttgaaattcaaattcaattgtgaagagtcacatcttttcataaaatgctttgtgtaatcgattacatggttatggtaatcgattacaactgacaagttctgaataaaaagtcaagagatgtaactcttctaatggttttcaggtttttctcaaggttataactcttccaatggttttcttgaccagacatgaagagtctataaaagcaataccttgacttgcatttcaataacttttaagaacaactattagaatttcttgaacaacttttgagaaatcttg

SEQ ID NO: 113646 - DNA, 372 bp, Glycine max
gcttagctgaattaaatcaaatcgaagttagcttagctcaaccttggccagcttagcggaccaaatcagcctcagatacaagggttgggttctaagcgctcaagactcgcagcttagcgcatgaacagagatgcgcttagcgcaaggcttatgcttagcggaaggactattttttcaaaaagattttctaagttttaaacttagtcctctcccaagaaattggaacccttatgttaaacattcaaagattggctgatatactcctatgttcaacttacatagcaagttcctaatgatcaaatgcatgaaatactaactcaacatagatgtaaactgggttgcctccatgaagcgcttctttaacgtcattag

SEQ ID NO: 113647 - DNA, 377 bp, Glycine max
agcttataatctaagcacatccactttgaattcttcacttcagagaaattatagaactcaaacacaagcggcttcttaataacatgaacaccagaaaacttgaattcaatagatgtacatggaaattgaaagtcaacatacttccctaggcaagcaggttgatgaaataccctaaggacaaaaaagacaacagctgcagctgtgttcaagcagccttcaaataatagaaacctcaacccaaccacattatcaacaaaaagcatctccaaacaaactctatgccacttggtcataactgtaccaaaccgaagcagcaaaacactgtaaagcaaccacaaattttctgattgaaaaacgtcattcaacaccaaatgcat

SEQ ID NO: 113648 - DNA, 380 bp, Glycine max
tatcagaaggggaatggtaaaataccacctcaagctgatattaagaaggtggcaaagtgtttcttttgcaagaagaagggacacatgaaaaagaattgccccgggttccagaaatggcttgagaagaaaggtaaatcaatctcattagtatgttatgaatctaatatggttagtgttaatattaacacctggtggattgattctggatctactattcatattgcaaattctttacagggtatgcaaaacctaaggaaaccagtgggaagtgagcaaagcattttatcatgcaataagctatgctcacatgtggaggccattggaacttgcattatgacttttagtagtggctttatttttaaattagaaaggactttttt

SEQ ID NO: 113649 - DNA, 370 bp, Glycine max
agcttacaaaaccatgatcatatgtcattgaggcatttcaccgagcacttggttggcgcacgtttatacataaattgcaagagaatgggagcaatgtggcatcccccattgcttcagaatacaacctatgcctaatgccttttcatccaaatcctcaattcaagaaaacaagcaccaaagcaaaccaaaattgcctcacaaatataagcatgttctcacaatttaaggcaccaaaagatgaagaaagcacatcaatgggaagcaaaaacatcaaggatggaatacttacttgttggagtgaattgaaacaccaaaaatgaaagcataaggcaaccaaaagtggcttgagggggcaagaaccgcaagcctt

SEQ ID NO: 113650 - DNA, 378 bp, Glycine max
tcaacctttggccatcatttctaccccaaatcccatataaggagggcattttcggggtcgtgaagtgcgtggctactagtgggacttcgaaaattcatgtttgggtggacttctttctcctttgattttcgtgggtatggggttttgggagatatgatgggtagttttgttagttttctgcttcatgatggttatttgtgaagactcttgttgaaagcttgttgaaattgccatgtttggatgagttaaagatacccattctgttttagggttttcgcgaagatgtttgtgatgtatatatgctgaaattgcttatggaaactgtttaagattaatggtagagttaacctatggttagaaagtgagaatttggtgttg

SEQ ID NO: 113651 - DNA, 377 bp, Glycine max
agcttcatcctcagatccctcttgtttgactaggcccaattgagacaaccctcttatgtttagactaacttaaactgagtttcgtctgcatatccctcttgtaagactagactcagctcaagcagcttacgaaagtttagcctaatttagcctaagcttcgtccacagatccctcttgttagactaggcctagactaaacaacattattgtaacaacataattaaaaccaaaacttaatccgcagatccctcttgtgagactaagtttcgattctacttcaatcaagctctaaggcaacattgcattctccaattgttaagtcacctaactatgcacacaattggatgatcaaaccaaaagcatacaaacattttgc

SEQ ID NO: 113652 - DNA, 369 bp, Glycine max
agcttctatccaaatggacttaccttgaattaattcctttgatagcccctttgagcctatgttcccctttctttgttttgaagctcattacaagccttaagtgaaaaaccatgatatcaccttacccttaaggaattttggagctttggaattgtttttggaataagctgggaataagtgtggggggtatgtttcattggaagatatgatttttggccatgcttgatgtatctgtatattgcctagttcttgctttaatcttcaaattcgttcttcaaaaaaaattcaaaaaaaaaagaagaaaagaagtgaagttgaataaatgaggtcttgttatgaagacttgatttgggagccttgattgatttt

SEQ ID NO: 113653 - DNA, 380 bp, Glycine max
tctccacttgtaacttgggctaaaattcaaatagcatggttaacacttgttgaagagcttccttggccttctttgttctagcccttgccatatgtcctccaagtccttctaaaggttccttgcccttattccttggtctcttgagggttactcctataagctggcctattatgcaaagaagctcccagcacgagatcaatttaatgatcaattcccctcaatggtggcaacctacttggaacacttgatggaaacacctcctcaaattcctgcaaaagagttttcacactataaggcaattcaaagttgtcaaaagtgttagtggtcaaaacataatttttgcaaatcaacaagtataggggctgttttgaatgaaacaa

SEQ ID NO: 113654 - DNA, 370 bp, Glycine max
agcttcatacctccatcattgtcaattgtgtttagaccacctccaattatgccttcagcaccaattcaaattatattctcaaatgtatcatcccataggatgaacaaactgaattacgtgagcttcatactcacacgagggctaccctgctgccaagattcgaagaagtgaaatatgagatatgtttgtcttttgttaataatagattatgactaattattataatttggataaatttgtaatgattgacaaactgttataatgtttatttttgtacattggtagaatgtttattttggaaaatttctattatgaccacattagatagtgacaaaatcaagttgagtctcatttttttgtaaggattaat

SEQ ID NO: 113655 - DNA, 373 bp, Glycine max
  unsure (1)..(373): unsure at all n locations
taccaatctgttgtaatccaagtccataaataaattaaaataaaatctagataagataagatctagatgagatcaaatctaaataatatctatataagataagatctaattttgtagaataaaatagttttccctcttcaagtccaagcccaattctggattcaagcccaatatttcattaattcctgaaattagattaaaaacatcaaattagctgaatgggcccaaataataaaactgtctaattaatttgacaattaagactaatcagtacctaaaatggtccaaaaagggttaagaaatatgagaaaataatggcacatcaatcatcatgaatctcttgttgaaaatgcagagtncttctctcagatga

SEQ ID NO: 113656 - DNA, 405 bp, Glycine max
cctgcatgcatgcaagctctatatagacttcagagcttctatcgttgagagatctcatctagccgttgtctaatagctttggtgcttgacacgaggtcattactatgcaaagagagagtatggaccacaaacactttctgcaacatatcttcagagaagtacaatctatcagtgtcacccaatgctcagagctgacttttattgtatggaccgaaagaaatgttaacaatataagataaaaggaattaagaatttcaagacaagacaatttaaatattttcttttgtgcgctatggcacgagtttcttactaagcatatggatgttactttctgatgattgtttttagtacttaagaatcaagtaatggtttcattgtttttgtactgtgagtcaagtgctaaag

SEQ ID NO: 113657 - DNA, 382 bp, Glycine max
tttaggaccctcgatcgggtcgtctttcctggccgacgccgaactgtcatttttttcgatcaatatcggtgaataatatttttttttccgaggtgggctaatgttttcctggccgaataaattggaacatgccagtttcggccgaaacgaaacatcggttgagctcgcacggaaaaacctaaccgacctacattgtaagttttttatgcaacatcgaaacaagaaaacttcccctgccgtaagaaaaaacattatcggccagcgagcgttttttttaaaaaaaaattgcgcaatgtcagctgataaatatcagtcggggccatttcacgaccgatgtcggctattgagttttctattcaatccctgaatgaaattcgcatga

SEQ ID NO: 113658 - DNA, 318 bp, Glycine max
cttggaatctcacacttagctttatctcaagaagagaggatgtgcttattttctccatgccaatccttttgtcgcatcttatcactgattacctaaatgtcaattcattatgcagggaatattgggcctacttgactgatttggtttaattaatttcaggagatagtagcatgggcataattcgtgtgggctggcttgacttgaagagcaacatttatttatcatatttattttccacattatgacatctaatttattatccaatcggtttatcttggcacaccattgatattactggggcttgacttaaaagattgt

SEQ ID NO: 113659 - DNA, 381 bp, Glycine max
agcttctatccaaatggacttaccttgaattaattcctttgatagcccttttgagccttgtttccctttccttgttttgaagctcactgcaagccttaagtgaaaaaccatgatattaccatatccttaaggaattttggagctttggaattgttttgggaataagtgtggggggtttttgtttcattggacaacttgttttgttggctatgcttcatgatgtattttgggccatacttgatgtacattgtatattggttaaatgttggacatgctgaatgaaatgttgtttctcaaaggctaaagagtaaaaaaaaaaaaaaaatcgaaaaaaaaaattcgaaaaaaaaagaaaaagaaaagcaataaagttgagtgaat

SEQ ID NO: 113660 - DNA, 381 bp, Glycine max
  unsure (1)..(381): unsure at all n locations
gtgccttcaaactcagctctcccgttntggctataataggggaagaagtgatagaataaaagggttcagccccttaggcacttatctctctttcgaatttgttgaggaaaattagttccgtgacgaaaatccaagccgaggcgcttccgtaacgtttccgtgagtgtttacgcgaagattctcgaccattcttcatagattcatcgattgttcttcgttttcttcaatcttcaacgggtaagtacctcaaaccaagcttttcaattcactctatgtacccgtggtggtccacattatgtttcatgtattcttattcttgcttatgccatttatttaattcatttctcgctttattctaaaattaaattgttgtttctgcgg

SEQ ID NO: 113661 - DNA, 383 bp, Glycine max
  unsure (1)..(383): unsure at all n locations
agctntaaagcctctgccaaacctcattgacatggctagttcgtcttattatttccagacaatgcaagccgaccgatttagcgtgagtccaaataccagaaacgggagaacacaaggagcgttgctcaccagaaacgggcaacagcaaaggagcctatcaattccacatggcactcatgcatctccatatcaccatcagtttccacaaccatcacctaaacccaatggcaaggcatagagttgatgatgatgatgatgagttttcattttctttgtcaccaccctttatttttcatcatttctcattccctaagtatagatgtcacttgtgcctagccatttgttcatggacaacttgagagcaaaagaagcatgcatgtatg

SEQ ID NO: 113662 - DNA, 366 bp, Glycine max
ctggatccatttgacctctatcatttgaagaatctagacttatcaaaaccttctcttccatccaagaagttggcaaactcaatattcactttcctccttacatccacatcaagaaagaacctcttgaaacagtttaatctttcacaagtgagttccatgtcttgatgtggaggaactccattagaatcttcacttaaccattcatgactattatatctacaattcaaaatcaatatttacatgattaaaatttatgtgattctcttgcaatgtgagttaccatggttctagcgattttcctaggattgtattaatgatctcatcaagtggagaagaatgttactctttgggtcacagttatttaat

SEQ ID NO: 113663 - DNA, 404 bp, Glycine max
agccatctgaggcatgcaagctcgtgattggagctgccccattatctgccctaactcttttatactggtgattcctaagctcttgaccttgacttgatagaacctctttttaagcgaaggcatttgacttgatcccatgttttactaaagtgaaacaaaatctagtgcgaatcaaaactctgacatctatcatgggtggaatggatgaatgcatgaagaaatgcatatgacatagatgcaatttatgaatacgggagcccgggaaattgtctccgtatttaagaaggtgtcgcggaccctccgttggtttgccaaagagaggggatcaaaatagaatccgtgcgtgatgcatatgcgaaaggcgcaacacgggaatgtacatagtatgacaatattcacaaaat

SEQ ID NO: 113664 - DNA, 343 bp, Glycine max
  unsure (1)..(343): unsure at all n locations
tctaagctctctcccatggagtncaattttatgtatctgtttaatagtctaaagtggttggggttaaactactttattaattccctgtcacaaaatatgattctaaaaatttattacaaattgggtaagggaacaatgtttgaactatataaagcatgatctactacctttgtactttgacatatatgaagtttctttctcattgtgttttgattgaacaaacttactgagtattatttaatgatgaccttcatcaatattatatggcatcctacaaactaaaaagcatgagctgggcactagctcttggtgccacatctttcttgcctaattaacttttttt

SEQ ID NO: 113665 - DNA, 383 bp, Glycine max
agcttcctccacgtgttttctccatacctagaacttcaaaccttcgattctcactcaattcttcaccaaatcacgtcccgtaaagcccaatcttcctctttttcactcctctttcacttccaccgatcaaaatccagaaaaacttcatcaaatggcagagccatcaaagaagagaaagggatcatcctccaccgctaccgctgctgcccatcgccgtcacggcccatccggagcacccacagcacctattcctccttctttgtcatctccaagatcatcaacattgttttcatccgatgatcaacgtctacggtacctttctcagttttcttctagaataatcttagaccctaagtatctagacgtagagttctttaatgatg

SEQ ID NO: 113666 - DNA, 381 bp, Glycine max
agcttgctacacaaataacctgtgattgtgtcaatctcctgtgattgtgtgtaggaactaggaagtaggaaccattagcctaggtgacatctggtaaataactagattgagatagtttggtgtggccatgactatagttctaatagcaaccatgatattaaaagtccctttttgtcaacctaaattcagtttagttaaaaaaaattcagttcccttctccctaatttttatctcatgtttcccacttttttctccaatctctcttcattatctgattttatttcaatgattcaactctctccataacctgtcctgacatgttggaattttctttaacctagttagattgaagacaaggaatatcaataatgaggcataata

SEQ ID NO: 113667 - DNA, 354 bp, Glycine max
agcttgcatcacggccttctcctgatcatgcaaagttcgcatgacgtggcccattacctaacagttatgaccatggatgacctcgttcaaaaggtggttcggccaatattcctaccttatattttacgatggggtgacgcctctgcaacccaagatcctcactccgtccaagacgatgacattctataggcctaaaaacctatttcgcccgatcctttcatacttgatgatccagtcatagcataggatgatgcttcatattataccccacaggtgactccgcaacatccaccatatcctaccacttcattgctggacttgtcatattctcatcttgatccatctgcaccaatg

SEQ ID NO: 113668 - DNA, 371 bp, Glycine max
tgcacatggctgtttgatagagaagaggatgattgttagccttgggacttcaatatcaaacgattcatcgtaaacaaggaatacccgcctgaggcctgtgacaatgacaatatgacattacgaaagttggcggccaggtatgtcctgagtggaaatgtcttgtacaagaggaactccgacatggtgctgcttccgtgtttggatgctagagaagccgaaccaatgctgatcgaggtgcttgaaggatcctttggctcgcatgccagtggacatgccatggtctgaaagattctaacagtggggtattactcactcattatgggaagccattgtgatttcatgtaatgaaatgccataagtgccgaaccttt

SEQ ID NO: 113669 - DNA, 377 bp, Glycine max
agcttttctttcacaatcaatctgtctactgactaacaattctaaatgcaagttcacattcttgttctttctttgtctaacatacacacttgatcaaactcatgaaaggagcacaaatctcatcttaatcatgcattcaatttaaaacaaggcataccaccattttcacaaaataaataaactacttcactgccataccatcaaaagttaagttaaactgttcacgatgcttcaagatgagcaactaaactactcatgcacaagactaacaaaaagtaactaatgtactaacatcaaagttatactaataattcaaaaacacaaaaagaagcataaaatcgccagaaatatccacattcttgtcaagatgggccaca

SEQ ID NO: 113670 - DNA, 384 bp, Glycine max
ctcagcctgactccatcattcataacctatgtcaaacatttaacataaatatggggaatggtatattgttatgaacattatttatcagttaataaattaaacacctactaaaccaaatttacttacatcatccaaaactatagaatggatatgttcaaacatttgtcacctaaaattatctcagttacatctgtgtgtgtgatgaaaatgtcatctttgacattaggtatcccaaatttcaccccatcccacgacaactaaattggcttttggtaaacatcaaacaatctcttaaccaattctcccaatggatcaactgcagccactgcattatccattttatcaaatgtaatcggtttgggctcacgcttttgtgaatcatgc

SEQ ID NO: 113671 - DNA, 292 bp, Glycine max
agcttgtggcgcatattgatgtcctttaatcattatatagacaatgaagaacgggagttaactgggtatgataaacgctacttatatactaccggtttcttttattgagagcatattaaagtttattttgctgagacttatcacaatgaatattattcttttcaggggcggatgaagaggctgacgtaagctagggattgtattaccaacgtggaatgtctggactctcgtcgaatgtcaaaactttcgagttcctactcatggttgactgatgactgattgagagcactac

SEQ ID NO: 113672 - DNA, 372 bp, Glycine max
agcttgcacaaattatttaatcctttcaaaaactaatttttggtgggttttagtccaaaaaacgtaataaaactaaggtcatgctatcacttaatgtccaaattagatggaaataactaaagcatatgaaaggaaaatggttcaaaaatgttgatcggttctcgaaaagtttaggaaccaaaaccataattgccgaaaaattcaaggatgaaaatcataatttacccctatattattactattaattaaattaaaatataaaatgttattattagttagaatatttaaattatgattaattactataattaaatatttcataattaattggtaaataaactaaagagtgattttttcacatacacatttttt

SEQ ID NO: 113673 - DNA, 368 bp, Glycine max
agcttcctcggggccatttcctgctaaggcaaacatttggaaagttagttttaccagtgggacactactcttaaaacaaaaatggcatacaacctcctcccataaatacaaacatcaatgtaaatttagagcaagctcatgcgcatatttcctcacgaatgttcacttgcacaagacattctattaactaagaaaaatgcacccatatacaatcaaggcagcttcgttacctagattatttacatgtacttccaaggtgtatttgttacttacatcacacacatctccttggctgaatttacatacatgcatactcaaagcattttggggtaccaaaaattgcacatgtgcacatcttggtatttcta

SEQ ID NO: 113674 - DNA, 373 bp, Glycine max
ttgatggtgtcgagaagaaatcacatgtttgtcatcttcaaaaagggagagaatgtgaatgtatgtatacatgattttgatgatgtcaaaagaagaatcaaacaaggctcattttgcttcaagattaatacaagattgtttcaacaaacaaagccttgattcaagatttcttcaagatcaagccttgcctcaaaatgaaaagatttcaagtcatccaaggcacatgtaatcgattaccaatacatgtaatcgattaccaagtcacatgaaagtgtgttatcgattacacttcatatgtaatcgattaccaaagactttgaacgttgggaattcaaattttaaatgaagagtcacaactgtcaaaaaaatattg

SEQ ID NO: 113675 - DNA, 391 bp, Glycine max
  unsure (1)..(391): unsure at all n locations
agctntcttgagaaaacttccttgagaagcttctttgagaaaacttccttgagaagctagagcttagctacacacacccctctcataactaagctcacctccttgagaagcttccttaagaagattcgtaaagaagctagagcttagctacacatacctctctaatagctaagctcacctccttgagatgagaagctagagcttagctacacaccccctataatagctaagctcacccccatgacaaaaaacatgaaaataaaaaaaaaagtccttattacaaagacaactcaaaatgccccgaaatacaaggctaaaaccctatactactagaatggccaaaatacaaggccttgacgaaggaaaaacctattctaatatttacaaagat

SEQ ID NO: 113676 - DNA, 352 bp, Glycine max
aaatttgtagaaagcagaaggtgtttacataaatcgaaatgctggaagtaacttgaccaggaaaggaaaattgctgaatttaaaggcttagcgagttcattcgatcgaatgaactattttaaagacccgaatttataaggtatagcgtttattgcattgtattctaaattgtaaggttacagaattttaaaaaggttcacaatcatacattttctcttgcgtactcggtttctctctgcgcctggcacctttgagtgttttaaggattttgtggtaaatgatttgcgaaccctgatatcctgacctaaaaaactgctttaatatggaacatttcgaaaattaacctgccctt

SEQ ID NO: 113677 - DNA, 211 bp, Glycine max
ggaatatcctcgcccaactacaatgcaagatctttgtgcatcctgcgcacaagaattgtttggctgtcgttagaagaatcattgtcgggcagcgatcgttttttattaaaaaaaattgcgcactgtcggctgataaatatcaatcggggccatcttacgaccgacgtcggctattgaattttctattcgatccctgaatgaaatttgcctg

SEQ ID NO: 113678 - DNA, 384 bp, Glycine max
agcttctttaagaaacttccttgagatgttagagcttagctacacacacccctctaataactaaactcacattcttgagaagtttccttgagaagcttccttgagatgcttcctttggaagattcctagagaagctggagcttagctacacacccctctaatagctaaggtcacctctttgagataaaaagctatagtttaactacacacaccccctataatagctaagctcacccccatgtcaaaatacatgaaaatacaaaaaagttcctactacaaagactactcaaaatgccttgaaatacaaggctaaaaccttatactactagaatggccaaaatacaatgcccaaaagaaggaaaaacctattcaaatatttacaaa

SEQ ID NO: 113679 - DNA, 141 bp, Glycine max
  unsure (1)..(141): unsure at all n locations
caatggacctaccttgaattaattcctgttatttcccttntgagcctcgtttccctttccttgttttgaagctcactacaacccttaacgaattttggaactttggaattgttttgtgaataagtgtggggcggtttcttt

SEQ ID NO: 113680 - DNA, 381 bp, Glycine max
  unsure (1)..(381): unsure at all n locations
agctntgagagtgaagttctgaacctgtgaactaaaaaaatttgtgatatatttttatggttgtcaacaatagatttttttatcaactgaatttgagatcccaaaatgcattaaccatgtattagcaaaaatcggataatataaatgggatagccagataaaaaattactattgattttgtaggcaaatactcatgagctttaatgtaaatagtatgtatatatatatatatatatatatatatatatatatatatatatagtaaaagaattttaatttgttaaaaataactatgaatatatttttagtttacttttaaaagtgtgtgtccaacgataatatatatgggtgggtttgtttaaatttagttcttgaaatgga

SEQ ID NO: 113681 - DNA, 388 bp, Glycine max
agcttatgtgaataattgaaggaatctctaaccatcatattgcaaatagagtcatacacattgcatccaattgattgaaaacatcacgggagaactagcaaaagtaggttaaaaaaaaataaaagaaatgcctaatagtgttgtaaacaaagtgaaacaattagtgctggaagagttaacaagaatgagctaacatgagcaaaaacagaacaatgattgcaggaaataaggtaagcctgaaatgcagaattgaaattgtggagaatagaaatcacacatttggcagtttcacattataggttcatgggcttgtcttaaattttatacattttttttttatttacatggtgattacaagggttactcgacccatattacaccatttaat

SEQ ID NO: 113682 - DNA, 381 bp, Glycine max
agcttgtaacgttaacttatctagtcaaaaactaaattcctaaaagatagtaattaaaaatggataacaaacaagataatattgggaaatttagtttattttacgtaaaaccaattcctaaaagcatattttatctttaaattttctgtctctgcctcacagtaattaaatttcgcacacttaattacgtagtacgacaataatctaggatatatactcaggcatattatcttaaagtaatttaggattaataatatgatcaatcaacccagcaattaattaatatctaattaaaggtgtatgtgtttggaaacatgttaaaactcagttgaactgaagttttccactatttccaaatatgcaaattgagagggggaatat

SEQ ID NO: 113683 - DNA, 377 bp, Glycine max
agcttggttacctaattctttactatatcaagattcacagggttgagtcttgtctgtggacgtcttactggtttagccccatactctaaatttattcgatgcatacatgtggatgggctaatactacgaatgtccgccagggtccaacctatagccttcttatgcttcttgagaactgataatatcctctcgtcttgctcgtcagcaagggaggcagatataattactggaaaacttttgctatcatccaagtaagcatatcttaaattcgatggtagaggcttcaattctagtgtggccggctagatagtggcagaaagagatggcttcttagcttgtacctcataaagaaagtaagaagtatgcgtacttcttga

SEQ ID NO: 113684 - DNA, 167 bp, Glycine max
gggaccacccaggggtgcattgaatatccttcttcccattagtgaacaccctatgaacctctaagacgtgtgctacacagatgacacgcaccctcttagaacaaaagtacactgtgaccatccaatcccttctattgtccggtagtacgtggtcatgcttatggatc

SEQ ID NO: 113685 - DNA, 376 bp, Glycine max
agcttagtcaactcatctaagattacgctatgcaaaagctgcaatgtgtctaatgtctatgctcgagccaaagcttcttattagaaacttttgtgaggtttatagatacaatacaatttacaaacgtttgtatagaataagttacttaaagtactgacacgtatcctaatgtgatatcaatactccaccaatatgaatatgagaagtatccaagcctttaaaaaaaatagaatccttgtgctccttagataagaggcaaagtgaacaggatgaagcatcttgtatagaacttttggagtgtgtttctaaatcaaagagacatttagatcgtgatcttgataatcctaaaccatgcaagtctagaaagtcaattagt

SEQ ID NO: 113686 - DNA, 371 bp, Glycine max
agctttagatgattctcatgaagcatggaacactgctgctgttgttaacgagctgtccaaggaaataacaaaaattttggtttctcatcctgtgaatgctaaacgtgctgcagaagggaagaacatagcaaatgtagtccttttaagaggctgtggcattcgaattgaggtctgttttttcagtttatttcttaattgatacatttatgtttcaagcagtgaagtgatgcttaaaggaaaaaccaaactttgatacttcttaacccatttatgtattctgctacttaaaaggaaaacacatcaaatatatagcaatcatttaagaatcattagaaataaaataatataaacttgtatcttttgcagttgag

SEQ ID NO: 113687 - DNA, 380 bp, Glycine max
agcttatgatatgtctctcaatgattttcctacagaaagaaggaaagcagaatggtgtgataaaaatattgagattatgttgaaagtgtgtatagaagaggtgaatgttggaaataaatctcaaaaccacttcaagtttttggtcttgcttctcagctttcaaacatagatagattgtgtggagattggagaaggggtttccaaagcagtgatattgtgctctttgaaattctgagaagttttggatatataagcatacttttatgtcgtagagaaatatcaaagagcttgaggagctgtatgaagaagtgtgcaaaaatgagagatgagcattccaagaaaagcaacatgatgttaattcttctctgaatgaaaacaaa

SEQ ID NO: 113688 - DNA, 372 bp, Glycine max
caagctcggcccatgtttgttacaacctagtattctttgttctatcaagacactgctggctctacacaaatggaaaaatttattgtttgtttgcacaatgactcactcttaatcatcttatagtcaaatatacaatctcaacacttagtcttttatctcaagttgttcaaagtgttgaggattttttcaaactatacaatcaattacaataaagctttttacggaaagaattttaatgaaagtgcatttgttcatttccattttttcaaaacttctggtttttataggcattcttctacaagtgggtgttgtctctaaatggataaattgcttcacttaactcctttctgagaatgtggttgttgtctcatt

SEQ ID NO: 113689 - DNA, 374 bp, Glycine max
  unsure (1)..(374): unsure at all n locations
agctttgaacgaatgcgtacaactgtcactttctgctgtgccgtccgagagagagaaggactgtcatgtcgcgctggtaatagatatttgcagatctcggcaaattaccacgcctttcanataatactcgcaagagatgcctctttactccaatcatctaaacgactcgttgacgaaggaacaacctcttatccacaacgacaacattgtcatggaacgaaaatgcactgactggatacaaaaagatccttccacctaaccatatgaacgctgaaactgttaccattgcttgaccaattggtgaatccaccgagggaaatgctttaattgattcgtgagccaagactcacttaatggcactctgcatgtgtaaa

SEQ ID NO: 113690 - DNA, 233 bp, Glycine max
ctcagcttagcattaatatagaggagatatatttgtcacattactcaatctaacaatctgggggtggacccaagtgctccgaatatgctattagctactaatgttttggtggcgcgcccacatgtgtgaatggacttaagaataccttcatatctaataatactgccaggcgaactgtgtgacactctatccaaataaatggatagctgaatagggctgtgccgaacatataa

SEQ ID NO: 113691 - DNA, 368 bp, Glycine max
agcttctataattgcccaaactccctctccatttctgatttcaggcttaaataggtggccttgtttgtgcttgtgcgcttattgcaactttggcttgcttagctcgcattagtgaatttcggcttagcgcgcgtcttctcactcagcggatggactcaagcggtgcgcttagtgggatgagccctcactcagcgaacatgcacagctcatccttcttccagattcttccttgcactcagccaaaggagtgttgcgctcagcagatggctcactaagccagcatattggcttagcgagcggatgaaaatcatcaattcacaaacttgcctaattaacctgaaattgagaggaaatgattattaaacata

SEQ ID NO: 113692 - DNA, 378 bp, Glycine max
  unsure (1)..(378): unsure at all n locations
ttctntgagaaaacttcgttgagaagctagagcctttctacacatacccctgtaataactaggctcacctccttgagaagcttccttgagaagattcctagagaagttagagcttagctacacacacctctctaatagctaagctcacctccttaagatgaaaagctagaacttagctacacaccccctataatagctaagctcaccccatgacaaaatacatgaaaatacaaaaaagttcctactacaaagactactcaaaatgccctgaaatacaaggctaaaaccttatactactagaatggccaaaatacaaggcccaaaagaaaaaaaaaacctatttttatttttacaaataagagtggatccaaccttggt

SEQ ID NO: 113693 - DNA, 402 bp, Glycine max
taagtcaccgcagctgcaactttaactgaattcgctacgttccaatagttgtttaaatggtgtaatcgattacaatatattggtgattgattaccagtgtatctgaacgtttaaattcaaattcaattgtgaagagtcacatcttttcataaaatgctttgtgtaatcgattacatggttatggttattgattaccagtggcaagtgttgaataaaaatcaagagatgtaactcttccaatggttttcttgaccagacatgaagagtctataaaagcaagaccttgacttgcattttaggaacttgatataactttttcataacttttgaacatctctttgaactatttcttcttcttcttcctttgccaaaatctttctgagtgttctgatttccaaacct

SEQ ID NO: 113694 - DNA, 386 bp, Glycine max
agcttatcaattaattaatgtgaaggtctatttatccattttttttatatagaaaatgcatttgaaatttatggtagttaatcttatcaaacgtttagataaagacaaaactgaaatgcaatttataaatcttatgttatcatctgctatattatctgtgcgatatgacatggttgaaaataactaaataagagagatcatgtatgatgttaaaaaaaaaaataagacgttaaaaaatataaaagaaagagcctgtgtaacaatcaaaattcctctgttttccaagcagtttttgcatgaacatggacatcaccaattatgtttttatatttttcaagtacacactatactagacatagctcactgtaaactaagtttcttgcagt

SEQ ID NO: 113695 - DNA, 387 bp, Glycine max
accgcagctgcagccaagacccagctatatccttcagtgccttacatgtgtaacaagtgcaccagtatcagttcctctcttatctttgcaatcatagaagggaggagcatggaagcacggctccatcgacatggcacgttgacaatgaggatcaggagctgttccattctcgggcttgtacagtatccacggtttcaaccctccaagcccctgatctacgtatccgaaagtagaccatgagctcgtgaccaacatgtcggtcaagctcaagatgtacatttcggcccaagctttttggttgtgcatcttcttctctgtttgttgatgcccttcatggcttggctggttaatgccaacaacttctcctgtcacagtatgatgttccaa

SEQ ID NO: 113696 - DNA, 382 bp, Glycine max
agcttggagaggatgcttcaatggaggaaaagaaagagagaagggggcaacacgaaattgaaggaataaaagagggagagaagtggaactttgaagtgtgtctcataagactttcattcatcaaagttacaacaagtgttacacatgcttttatttatagactatgtagcttccttgagaagctttgttgagaaaacttccttgagaagcttctttgagaaaacttccttgagaagctagagcctctacacacacccctctcataactaagctcacctccttgagaagcttccttaagaagattcctaaagaagctagagcttagctacacacacatctctaatagctaagctcacctccttgagatgagaagctagagctt

SEQ ID NO: 113697 - DNA, 263 bp, Glycine max
cccgtcgattatggggtacccatcacatgtggaactatgtttctgtcccggccaggaacaaaacaagtttttttatatacacaaatcgctcaccaacccactatatcatgtgtgtccacctgcaattgatctcacgtcttcgtcagtatatcatctattatactttttacaactgggtctattaaatctctccatgttctccaaacctttaataaacgttatcgctaaatctatcctattgtatacgggatgcgtataaactt

SEQ ID NO: 113698 - DNA, 383 bp, Glycine max
gtgctcctgccacaatattatatgaatagggggagtattgaagtgaaaaaggggtcagccccttatgcacttatatctctttcaaatgtgcttggaaaaattgtttccgggaaaaaaatccaatccgaggtgcttccgtttcgtttccgtgaggaatttctcgaatgtttcaaccgttcttcgacggtgttgattggttattgatcgttcttcgatcttcaactgtgctgtacgctaaaccaaacttttcgattcattctatgtacccgtggtggtccacattgtgtttcatgtattttttattctcgtgtcatttacttctcgtaccccattttgacgtgcctaaaccatcttattgatgtcatttctcgctgaacgaaaaa

SEQ ID NO: 113699 - DNA, 301 bp, Glycine max
aatctcagctctgcgcccgttcctacaacgtggtgttgctcatgacatttaaccgaaaaacatgcgcccatatacaatgaaagcatcttcgtttcctagatcatttacacctatcctccaaagtgtattggttacttacataacacacatcttcttggctaaactcacatacatgcatgtgcaagcattttggggcaccaattattgcacatgtgcacatcttggcttctgtaataactacaatacgcaaacttcttgatgaattccgactttctacacaataaggtgcttcaatgcatgc

SEQ ID NO: 113700 - DNA, 380 bp, Glycine max
agcttgttacataatgaaacaattttttgtagtaaatgtacaaatacaataatctcattttctttcgatcatcaataatattaattgtataaaataaaattaaataatgtttgtcaataacatagatatttgtagtaattataataacaatcatatcaaacaaaaaaacatgtccaacaattgttgcaaatcttttttatatatttattctcttatatatgagttaacttttgttacattaaatatatatatatatatatatatatatatatataaagttccaggatatggttgaaagtatataaaaaattatgaatgtctaacaaagatacaagggattatataagacaaaaaaaaaacatgtcaattgagaggaaaag

SEQ ID NO: 113701 - DNA, 335 bp, Glycine max
caacgggcatctggcggcatttttcactaaagacctccccgccccccactgatggtactcgtcaccaccaccacctgctccagccataattcaacaggaaaaaaaaatgtgcaataaaaattattaaggtttcatgacctcacaacactctactcacgtctcttagatggtagtacactcgtgtctaatgctctcaataagctgttgtgtaatgtattccctcttgccgtctaccactcgtgttttcttttaagttcctggatggaccaaattagacacacaatgtaatatttatttaaatgaaagacaacatattgttctccaatagatttttt

SEQ ID NO: 113702 - DNA, 324 bp, Glycine max
agcttggaccacttctgccttcccttcggacgtattgctatgcgagttgcactctatattgctcaactaggtatatcaaaccgccctacgcacatactatcaccatcctctgagtgaccacctctatactgaacgtcacgttacttccacttctccattatgcacaatatctctattaacctcttaccgagcaatcctcccattctttctcttcatccatccattacacctttctctcatctataccttcacatgccgtctccattttcttacgcaaaatactctggcttttaattaccgatgatcatggcaggctattcaatt

SEQ ID NO: 113703 - DNA, 379 bp, Glycine max
tgccgagtccaggaaggacggcctatctcccactcttgctatggcgcggcttgcaggggtggatgagtgtgtgtcctgacccaagatggccatcttgctgcccacaaccatccatgatatgactgctgcgttggcggaggagagacacttttctttctctgcatccaaggaggccatgttaatgacattgaggccgcgcctggaaaatgctgagggacaattggaggctctccagttcaatcgtatctcgtcggaaaaaatgactcctgatctagatgagctattctctatggcagatttcctctatctcataaaagagcttggtgcatcacttacccctgaaggcctcgctttccaacactagttgatgaactttggc

SEQ ID NO: 113704 - DNA, 367 bp, Glycine max
agcttgtcagcataatcattgccttctcggtagatatgtaaaattctaaaactaaactttttatttggatctatacaattcacctagcggttgtaaatagtccagggggctgaaaaaggattattatataatgcacaatattgagaatattgttgtatgattgtgcaaatcctaattgtattgagaatattgctacatgattgtgctgatcttaattgattctatttgtattaattctgattgtgtgtattaattcttattgtattttaattttattttgtatcttgatctcttgattattgggatcacttatttttaggatagatagctgtatcagatatgtcaagaaaagctataagagaaatct

SEQ ID NO: 113705 - DNA, 358 bp, Glycine max
gagtcatatgaatcgaaatctcatgcaagcactagcatccatctgtcacacacaggactttagaggggagaaggcacgggtactaatccccttttcttaaaatttctcatgtacattattaagtaaaatcaagttaaattaagtaaagttatttctcaccgatttctggatctattcgtcccacaacacgattgaaaggtattattacatagactattttgatttaagaaaaagaaaaaagttattacatagaggtgttttaacctagtttgatgacatcaacatcaaatcaataacatatgattctaagaattaactcgaactaattagtacaccaaaaattaaaaactggaactag

SEQ ID NO: 113706 - DNA, 373 bp, Glycine max
agcttataagcacagttcataaaccatatagaaattattttccatggaatttgaaataatttttttacacaagcacggttgaaggtcaaatcctcgatcaaaattgatgatattcaggatagtaacaacatgcaaaacaattttattataaatttgtgtagtaatacatgtaactaacatgatttataagccgaagcacgcttaattctaagctcactaatttcaatccccaagcatttttatctatcaatgttgccccgtaattccacaaatccgtagagcaacatttcaaaaacaaacgacacgatgctgaatacgtgaaatttcctctttcatttttctcttttttggagttggttcaagtcgtaaactc

SEQ ID NO: 113707 - DNA, 374 bp, Glycine max
  unsure (1)..(374): unsure at all n locations
ngtgtttgataaggtattctattttactctgttattctngttcagaaactcgtttgaaaattgaaatattggttttatggatagataaaacaagcattaggtggacgggttcgcctcctattatcaggagctgctcctttgcctaagcatgtggaggagtttatgagggtcacttttggagctactatgtcacaaggatacggtatggtatttgaatcttttgctaaaaagtgcaggtggattgttttatatcatttttatgacagctcttcaatagtaaattttaattctgttaatctgttgtagcatgattctggcattccttgatttgattttaaatttttggttcttatattcattctatagtagactta

SEQ ID NO: 113708 - DNA, 352 bp, Glycine max
agcttgagctcactactgctgccctgtatagcccgtctaatctttggtttggtcgtgttcctcctcatgcgcctgcttggtttgtcattcgaaggctcaatcgggggccatattgacatcccttacgtcatcatactctgttcaaaccttgacggctagggacttgaacttgtatccaactaccgacgctatttcaagctctggcttatgggcttgcacctcatcactttcttacgaagctatatcctgatcgtgtgtgacacgtctttagatttgggagccaatccgacccttgtgttccgactctcaggcacttatgacagccgccgatgatcccattactgctcaccct

SEQ ID NO: 113709 - DNA, 347 bp, Glycine max
tcaagcggaacaattgctataaatcgtttcacactatgacacacgtgtcttgcgaggtcggcaaagagatcataaaccgcacattttgagtgacacgtgctgatctctgatacgacgccatgtgtgcgaacatgttaacacacgcatctattttagcttcaaccttccatggcctccgtgatgaacataaattcgaacttcgtgctgcgctgatattatgactgctacattacttttagaacgaaatagtttggatatggatgcctactctaacataatgtatggctcataagggtcatgtctccatggcttaccaatggtatcattaccaaagataaatcctttta

SEQ ID NO: 113710 - DNA, 388 bp, Glycine max
agcttcatgatgatgaatcaagttgattcaagatgttttgatgataacaagagatgatgactaattgcccattagaatgatttcaagaatgagtcaacaattcaagaatcaagagaagttaatgatttcaagattgagtcaacaattcaagaattaagagaagtttgatttcaagattcaagaaaagatgagttcaagttccaagggaagaaatcaagaagacttcacaagggaagtattgaaaagatttttcaaaaaacaaacatagcacaattttgtttttcaaaagaagttttcacaaaattttctaagttaccagagttttttactctctggtaatcgattactagattcctgtaatcgattacccgtgacaaagtttgttttc

SEQ ID NO: 113711 - DNA, 357 bp, Glycine max
ggggtttcatttgaagtaacaaaaatggggaaacccttaataaaacaaaccactagggaaaggaaatgagaagaaaacaatatgccataagtatttgattatgcacatgaattatggaggagcaatcctggatcaacagttaatatcaacacaatgtcaagtccagatagtccaccacaatttcagaggctatatatttgtcttgctggctgtaaaaaggggtttgttgctggctgtaagaaagggtttgttgctggatgtaaaccattcataagtctagatggatgtttcctaaagagtgcatttggaggaaacttgctctctgctgttgggcttgatggcaataaccacatcttt

SEQ ID NO: 113712 - DNA, 408 bp, Glycine max
atcctcttagtcacctgctgcatgcaagcttgtgtctcaaaaaatgcaaacttatgacatgtcgataggtctactaacaagaattgcatggatatgcttcgcaagtgggtgttatgtatatgaatatttatattctaacattgcttataaaatttaaataaacaatattttatttgtctgcttcctgatctagttgcacaaaaataaaacataataaatcaccatattaaatagtactataactattaggaaaatgatacttattagttattcagcaaggtatttataaagagaaaaatacaaaaatgtgaccaacaatgcaatataaaaaattagagaaattaagaagggaacatgatgtgtttaaaccctagtctgaaaaaacagatgaaattatcaagcttcttt

SEQ ID NO: 113713 - DNA, 322 bp, Glycine max
ggaaggggggcatacgagcactcatcttcattgtgcatcttcccccctactgcgttgcttactgaactaaccgtgtctgttatatatcgagtggttgctctaccactcaccaacagaaattgcaactggtggtaggtacgacagcgccctgaacaatatgtacatgggaactgtaatgaatttttatgccttacaattcaaaaacgaaaaactcttaacatatagtttcctaaacccctttctctctccatttctcgctctcactttgattcgctgacgggatcaaagtttatactaaatccattaactgggtgacccccgt

SEQ ID NO: 113714 - DNA, 399 bp, Glycine max
  unsure (1)..(399): unsure at all n locations
tgaggcatgcgagctcgtacgatcatggggtacccatcacatgtgttactaggtggcggncgggcgatggtgcacaacatgttttccacatccacaatgcgcgcataaacccaccatcccctgttgcccacctccaactgagctcacgtactcccacgtagcccatatcctcgtttctctcaacaccgggtccccatcaatcctcccaagcttccacaacatccaagcaaaacaacattcaaacagcataagctatcacagccaagcaaaacagagcaaaggcagaaaactctgctcaacacatcaaccaaaatcacagcttttctcacttaaagaccacagtaacaattcctttgatccaattcgttaaccgttggatcgactccagaattgtactgg

SEQ ID NO: 113715 - DNA, 377 bp, Glycine max
agcttagatgttgttattgcaaactttatcacaaataataacaatttatgctttcgcgggagagagctctgcaaccaaatccattataaagaacatggaaaaacaatatgttataagtaaaggagaggcacttgtgaagggagttgggatagggatgtagcaaatagtgaatgtctgatcttgggatttcattgtgtaagttggagttgttgtggttaaagccggaagagtatccccatgagacataataactgcagcgatgattattctctttggtgccatgtaaggaagaaaccaccttcaggattgtttagaatggagaaaacggtttatagttaatgactaagtaacaaaactctccttgtgaatcgcaaatc

SEQ ID NO: 113716 - DNA, 379 bp, Glycine max
agcttatcaagcaacataatgctcttttcatttgtatcccagtcgaaacccagttgcagaaatctctgtaaaaggtcaacagaatgcttgatcaaaatcatggatatctagtcatttaaaggatacagcatagagtcatagacctcatgaaaaatgaagggcgaagaagcaaactaccttagattcattaattatgatctttaatgtttaatttgtaagtaaagctttagtttccaaactatgaatattaaaaattccctggccacttgctcctatagatcacaaaagcagtgctcccagtgattgtagtggcgctgtaaaatcacatgaaggaaaaaaaatacagatttggattaaaatatgtttctcacattactca

SEQ ID NO: 113717 - DNA, 374 bp, Glycine max
agctttcaccccaaaatcctctgttcaccatgaaagaatcccacatagtagagtcaagtaggtgtgccattagctttgtgttgcatctcttttttgttgttgttactattcttccatttaaccatttatggttcaattaatgtccaaaataaattcctccaaaattgtggttctaatgaagcatcaccattcaatggagtaaattggataggggatgttggatctaatttattgcctccagagtatgataggagttcatctacactcttggtctcaaacatacactatttatcaccaaaagtcccatacccaatagcaagctccattgacttactcataccgtttctcccctagcctgaaattcattcgtattt

SEQ ID NO: 113718 - DNA, 374 bp, Glycine max
caaaactgatcaagagttggtgatgtgtttatgaagctaagagctacgtggtataaaagaaaaataaagtgaatgaagcttaacagaaaagtaagggtgaaaaagttccgaatctagtggtactagtttaaaattaaccttattaagtgaaattttgcggatgctactctcgttgcaataaaactcaattagtttttagtatccctttttgcttatgtctgagtttctatatggatgtcattttacatccaattttaaatcgcgtttcatactcctcaccttaaaaaacaattggccgacttgtaaaaacataatgatgtatttagaaccattggttgacactaagttggtgagtctaactagaagattaaatt

SEQ ID NO: 113719 - DNA, 364 bp, Glycine max
agcttctacaataaattttcacatgcttatgcttttataagtaacatccaaaggtaaactataacatgttattatttatagattaattcaatgtccaacgcgttgttataaaacaagtgtctattttttttttgtgaaaaccaacacccatgtattgtatactcttacacttgcgtattgacataactaacttaacataaatgatttatattctgttagtgaacgtgcactcgattgacttgcacatgatatccatcttgaggttgactctctcgctagaacattctattatttgaatttttcctcttgatgtatggattgacttgcacatgataacctttggatgtaagttatgtgctcttac

SEQ ID NO: 113720 - DNA, 319 bp, Glycine max
taagctcgtggaactttggagcaaatcttatttagcgtgtttaattattctagcgctggcgcatgtttaagtgttgtcacaaatttggaaagcctttttactctacacttgatattgatatagaatttcatttttaataacactgctattctatcaccctagctaatttatttcttttgttactgagtgatttggctattcatttagcatgatacatctattcttttttgtgtcaaaattaaaaaatttgtcaaggctatctgtgtagatgctgcatacttcaattcaccacatcatggatttttttatgtgcatagga

SEQ ID NO: 113721 - DNA, 372 bp, Glycine max
agcttgccccactataagtaatcctgtaatcctcatttttatctgtctccagagttaaaacttcctatggtgctcctctaataaatcattttgatttttgaacttcgaaaaaagagtagtgtatgaaatacagattttatggtccaaaaagtgtagcatctctgtcaaaatggaactaaatatttctactgaaatgctactggcatgccatggcaagagctgcagcttcaagcagcctccgagcatcttcctgttcatgcaaatccgcaggggcctgccaaaaaaatattttagaaattaatgaagaatagaaatgggtaattcatatttatctgtttaagttgacaagacattttctacattcaataatta

SEQ ID NO: 113722 - DNA, 375 bp, Glycine max
  unsure (1)..(375): unsure at all n locations
tgtctctgacttgaacagtgcaacattggagcctgttgtnggtnagatatattcaattttcaatttgatgcgtttccggcagagttgtagtaaacaaagaaaaacctattttcttattttgaactcctaaatctgtaaataaaagaatatcagttactgagattgaaaatggctttttccctgtgctaatacattgggggttaacaaaatgttgatgaaatataaatatctattcccaaatattgtaatactttggaatgcttgccaacatatgggtgtaagtggaacctttccatcataatcaacatttagtatgtgatttatactagaaacatattcgtaataacctttgttttttgcgacgttattttgtct

SEQ ID NO: 113723 - DNA, 370 bp, Glycine max
agctttatgatagaaaacaaatatttttaataatgatcctcacaattcttataaatcttactagaatcatgttattttatgttttttatagattttcaaactacacatttatgataggaaacaaaaagaaattcaagtttttctactttttaaccataaaaatatttaggaattaactttctggtttcatccacagacctgtcttgctacttcaacttgtcttttatgtagttaatttggaatatgacaaagttatagttgttacaagtaacataaaagataaagttattcctattaatcccaatacatgaataagctttcctcataacttataatatagctaattctcgtcagctataaagcatataaa

SEQ ID NO: 113724 - DNA, 306 bp, Glycine max
tacctctgagtgtacgggaaaaataagttgcttaatttttaaaggattaagtaaaagagatgaagagtttgaaaagaaaaaatgcagaggaagaaaggaaaaaaagaaatgctgggaaaaaaaattcgatttaaaaacaaggaggaaacaagggttggggaaatttttttttttatttataagtatttgtatatagtgaaattttttgtacattggtgtggtaaataatatgtttttaagatggatagttattttattttttattagataaatattttttttaaaaatgtttttttattattttta

SEQ ID NO: 113725 - DNA, 386 bp, Glycine max
  unsure (1)..(386): unsure at all n locations
agctnttgaatcctatataaaccatgttttgttggctacccttcctcattacaagcctataaagtccttcggattcatgttgtgtgtttatttttgtatggtataaagatgaaatgcaaaggttaggacttgtgttagttgtttatgatggaatgagcctaaacacttgagcttgagtgaaatattgactgtaaggctttggtttatgatccttccttgatatctgtcattctcactagcttatttgagttgtgactctaatgcatacgttcctatctttgaaaagctgcatgtttgtgaaggacaattgattgaagcattccatgatattcatttcatatgattaaattttttctgtgaaacaaacaccactttgattaaccact

SEQ ID NO: 113726 - DNA, 383 bp, Glycine max
agcttagaacaataaacttggccttctcttaattgtctttgggcttggcgaccacgatcaacaaagtactttcggcacctactatatgttgacttgaccaacgctgttattggaatgctgcgacaatctttcaacaccttattcacacattctgataagttggttgtcatgtgaccatatcgtcgtccagatgtatcgtaagccatgctccatttttcctttgagattcgatcaatccatcttgctatggctggactcaattgacaaattttttttaagttttgatcaaacacatgcttgcaaggagtgtacgctgcatcaaatttgttatcatcaaaagttgtacgtagacatgaaactaaaattaaattaatgtataaaat

SEQ ID NO: 113727 - DNA, 384 bp, Glycine max
agcttatgctgcaaacatttataatatccccctcatcagcaaaaccaacaacagcaaaataattatgatctttcaagcaataaatacaatccaggtttaagaaatcatccaaaattgagatggacaagtcctccacaacaacaacagcttgtccctcctttctagaatgctgctggtccaagcaagccatatgttcctcctccaatacagcaacaacaacagtcacaactaagacaacaagcaacggaggctcctcctcaaccttccttagaagagttagtgaggcaaatgaccatccagaatatgcaattttagcaagagacaagagcctctattcagagtctgaataattagatggggcagatggctactcagttgaaccaa

SEQ ID NO: 113728 - DNA, 361 bp, Glycine max
acttccatctaagcttggagccccagtgccattcgcgttcgcgttttccagtcttcttctggcttcaattcatcagtgggctttccttctgtgtccagcatcttgggatgttcccagcctttgataacagctttccaggttctgctatccagcgatttgaggaatgccaccatccttgctttccagttttcataattggttccatccagaattggtggtctgttcactggtcctccttctttctccatgttcatcaaaatttatcttcctatatctcactcagtgacttcgagtgctcgcttttataccaattgaaattctgattctggggacagatgtcttgcatgatgtttatacatta

SEQ ID NO: 113729 - DNA, 381 bp, Glycine max
agctttgaatgtgcgtaacccaccatttccataatagaacactggtaacgtgtctactatcattgtgataatctctttctctgttattgggggcgctacttaagttgccaagtctctccatctttgggcgtatcctttgaaagatccgtgccccctttttgcacatgttctgtagttgcatcctatccgaagccattatactgacactgcctatcgatggcaaccactatgtccttccaagaatggactcgggaaggttccaagttagtgtaccaggttacagctaccccagtaagactttcttggaaggaatgtatcagcaattcctcatcttttgcgtatgcccccatcttccgataatacatatttagatggttcttg

SEQ ID NO: 113730 - DNA, 363 bp, Glycine max
tttaaactcagctctaaggagctctaaggaagtgtggtagaggaatctctctagtctataaatagaagcatgtgtgacacttgtggtaactctgatgaataagagtctcgtgagacacatctcgaagttcaacttctctcccctttttgctcctacaagtttgtgctcccccctctttctttctgtatctccattgaagaattctctccaagcttcttttccaaggcacattcttggtggcgaatcttcattcttcatgtgattttccctaatggatggcgcctcttcttcattgttatccattgcatcatcctggtggtaattcaccatgtattgacctcattgttgctcttaaattcatcc

SEQ ID NO: 113731 - DNA, 348 bp, Glycine max
  unsure (1)..(348): unsure at all n locations
ttccatgaaacnaccctaaaccaagaatggagggcagaggcagaaaactctgcccaaaacacattcacatatcacagctttccttaatcatatatcccagtaacattctctttgttccgattcattaaccattggatcgacttgaaaattttactggaggttcctagtacataaatctacattttgaccgttgggatctactagaaaatgtctagaacccaatatgtactacctttcccataaccagcaatgcacaagcatttttctgcacacatcaaaaatctgctgcacaattcaacaacatttttctgcataatagggcagatttcgaaatccatcttgcccaca

SEQ ID NO: 113732 - DNA, 377 bp, Glycine max
agcttgcacttattattgcacagctcctgatgcaatcctccctacgaagggaccaatcactataaccatgagcaagaggctccaagaagattgggctagagctgctgaaaaaggccctatggttctcatgaaccttatggtatatttctgagcccatgggccaaggttgggtccaattatctttgtacatattagactaggatgtcattatatttggtccttgtatatagggctccatattgtaggtagggcaccctagaaatataggatctttcatcccttgtattttttgggcacctagactagtttttgtattacgggtagttttgtaatttcacatgcactaagtggatatttgatgtgtgtggttggaaata

SEQ ID NO: 113733 - DNA, 198 bp, Glycine max
ccaacctcccatagggggctgaccatcttgagatgagaaactagatactataaaatatatatacgggtaatagctaaatcccacccccctgacaatgaacatgtaaaatcaaataaaagtctcgctacaaaaccactaaaattgcccctgaatataaggttaatacccttggctccttgatgggcccaaatacaaagg

SEQ ID NO: 113734 - DNA, 380 bp, Glycine max
agcttgaagctagaacaataataaatttccaattatttttaacaaaggtgttatcatagtgcacatgaacaccaaaactcacttaatcaaaatttacaaggatctcacttaattttaaaatgccaagactaaagcaaataaattacaagacaccaaaactcaacaactcgagcaatctagtattgaattggaataccattttctaattcaccatccactaaaacatggggtgcattattcctcaagccagacaaaaatgtggtaattaattaaaccttgggagttggaggaggaagtagccatttggagccttcaatcatcgcaagtgttatgtaaggtttgacctccgtttcacttagttgcttagttatagtagcacg

SEQ ID NO: 113735 - DNA, 343 bp, Glycine max
tcttgcgtagccgctctaggtgcgtcagaaaatttctaaaactaatccctcttattacgagctattttgaattctttagttcctgaatgtacaaccttaaaattgttgctcgttcccctctttcttttccgctaaaaagaaaatcaattttaaatataacatggatgaaattcttattaaatcaatttctaagaaaacatggatgaaatctcatttaaatagctcatcatcccattctgcatagtccttatgttcattatatttgcctccctattttgtcgagtttattattattttattttataataaactaacatggcgttagttttgtattttttattat

SEQ ID NO: 113736 - DNA, 375 bp, Glycine max
agcttctgccgtattgtgctatatatacgggaagaagcgaataagataagggatcagccccttatgcacttatctctctttcgaatttgttgaggaaaattacttccgtgacgaaaatccaagccgatgcgcttccgtaacgtttccgtgagtgtttacgcgaagattctcgaccattcttcatagattcatcgtttgttcttcgttttcttcaatcttcaacgggtaagtacctcaaaccaagcttttcaattcactctatgtacccgtggtggtccacattttgtttcatgtattgttattcttgcttatgccatttatttaattcatgtctcgcttaatctaaaaataaaataaatttccaccgatcgtttg

SEQ ID NO: 113737 - DNA, 372 bp, Glycine max
tctcgattcattctatgtacccaggggggtgcacattgagcatcgagcattaatattctcggtatgtttactttactataccccctgtggacgtgcttaagccattgtacttaattcatttctcgcttaacttaaaaataaaataaatttccaccgaacgtatgaatcgaattatccattaacttcggttaaaataaattccgaccgttcggtcgtgccgtaaccacgttggtaattaaaaaaaagtaaaataattattaaatcatcaaaatatcttgaaaaataataattaaataatcaataattctttgaattaaataatcaaacaatcaattggacgtttttctttggaagattccttgaatgaaatga

SEQ ID NO: 113738 - DNA, 372 bp, Glycine max
agcttgaaccttgaatcttgattcttgattcttgaaatcaaatttcctcttgaaccttgaagtgttcttgattcaatcttgagcatcttgaacttattctttgattcttgagatcatcatctttgttatcgtgaagtattcttgacctttgagctttttgtcatcacctttgttatcatcaaaacttctttgaatcaatcttgattcatcatgaggcttgcttctacatttatgaagaaactgaaatcatcatcttcttctatttcattaaagtcctctttgtcactttcttcttgaatagaagatgaagctttaagtgcaattcctttctttttcttgtcatttttagggatgtaaggactgatttcaatg

SEQ ID NO: 113739 - DNA, 198 bp, Glycine max
ctcagcttatacaaagttcctgacatggtcaaaaagaccttcagaatggctagatcattatgcaaccttggtttcaaacggttgccatcctcatactcgattttggcaaagttatgcgtcaacggatccatttatggtcttacaagagcctacttctgtattgatcatcacctttatattttgaacaaatatttgttg

SEQ ID NO: 113740 - DNA, 373 bp, Glycine max
agcttattagatgatgcagcatatttaacagttttcataggtgatataagagcatttcacaacgaacatcatcttttttctctagattctcaaactcataattctcattttgaaatttgttgagtgcttccagaacttcatccatagaaggacttaattcattgtctccttgcacacaccgaaaggccaaccctgctactgaagttagtatccttttaactacttggtctgactcaaacccaaaggatgggtctacaagctcactaagctttactttttgcacctttttcatggcaagatttgccaagttagcttcatctctttccttggatgcatcaactgctgccatggatgatgtcacatactttgtttg

SEQ ID NO: 113741 - DNA, 365 bp, Glycine max
  unsure (1)..(365): unsure at all n locations
agctgggttgctatgcgacagtttatacccttatnnccgnataaggcgtatgtgtgttccatacggggcactctttcttacattccctctacagaactagcccttctctcacagaaaatgaataaataaaaatgcggcaccgccagaatcgcgttcgatgtgactatgatcatttccggtgagtactgctttgatctaaaggctggttttctgtgatgattgaccagcctcagagtattgatgacaccaccggtcataacagatcggcatttctttgcataagttctggctcatatctcccacaaaacaacttttaatgcctttgcgaattcatccaaacgcatattgtctatcttttgccctac

SEQ ID NO: 113742 - DNA, 370 bp, Glycine max
agcttacttgcagagattccgttattgtaaagaccgataccagctgtgttgatctattgcgatagtaccgcggctattgcaaaaattgaaaaccgttattacaatggtaagaaacgactgatacgtcgtaagcatagcactgttagagaattactctcaacaggagttgttaaagtggatcacgtacgcactgatgataatttatcagatcctttgacgaaaggattagctagagagaaagtccataacacttctaaaagaatgggactattgcccttactgcgataatcattcatgatggtaacccaacctaaatgactggagatcccaagaactaggttcaatgggtaataacaagttatgaagtgat

SEQ ID NO: 113743 - DNA, 259 bp, Glycine max
tgagttgcatgtgtcgatgatgataagaggagtacatgcgtccacaaatgtgaaagtccactatagaaatacttgccccattatactctggtctatatggcaagacctgtcgttcactaaggatttttgcgggagcagcatatacggaaatgaacttccacacatcttatattaactgttgaaaacagctttgcgtcatctcccccagcagatggttgcttggctcttctgtatcggcgctgatgctaaattaacatct

SEQ ID NO: 113744 - DNA, 386 bp, Glycine max
agcttctcaaatgactggcataatcgtttacaaattgtctggtaatcgattaaaatagagagttcatgcactaaagaagtttctaactttagaaacaatcttcctatctctacatatgatgcatgatgtacatatggatagattaagactaggattcaataatcaatacaaataccactcaatgagttgggcatgtaaaaagacaaaacttttcaaacttcaaaacttagtcttcatgttgcacccttatctctaacaatctcccccttttggggtttgatgatgccaaacatgaattgccatttgagtgcatttggagaggcttaagagtaaagaattctcttgaaataaacctgaaaaatttgtacactattgccaaaagaagc

SEQ ID NO: 113745 - DNA, 386 bp, Glycine max
agcttatcatggatagttttcaaggacttccatcaaaatcatttaccatttctagatcattttctgttcacaaaacaaacaataaaggcttaaacagaacatccaacaaaaggtcattttgtaagaataataacaaattcatttctcactcaaattgaacatattttatatggatttatatgccccaaaagtctattttcataatataattttaattttatcaaaaaaagtctcagtaagtcccagcattcaattttgtgacacatgtcaccatagaaattttcacaaacacttcatatgcacaatttttaatactaaacaacataacaatcatatatatcaaactttaaattaaataaagaaacttaaaccttgttaggttcctg

SEQ ID NO: 113746 - DNA, 388 bp, Glycine max
caacctgctggattgcaacctggggaggatggatggggaccctttgttgatagaaacgaggatatgggctacgtgggatacgtgagctcaatgggggggcaacagggatggggggtatgccgcttttggagtggaaactgttgtgcaccatcgtccgaccgccacctattaccacatgtgatgggtaccccataatcctacaagcttgagatgaggaagtgttgaaaggtgaaacttcctgcttttattgttgatcacagagtggtacctggagatatgtcgcgggggtcaggagaccttggggacgtcaggtggagtgctattgcccaaaaccaagcttgaccaatcccgacccaacccgggcatagtcggtcagtgagaacctgtg

SEQ ID NO: 113747 - DNA, 371 bp, Glycine max
agcttccgttcccgagagcatttcttatttaagcacttcatcctttgctttcgtgtagcttaggaaaaacgtcatttgttcttctttctttcttccaaagccatttctgaagttccaagcactttctccatcacctaaaaccaccatttgccaccacaaaccatcattgttctccattgaaaacccacatcgagaggaacccttcaaccgaagtggaatcttccaacttggcttgcggtttcggtagagaacagaaactctaatctgaccttttgttttctttcgaggtaaccatggttctatgcttgtttcttgttagtttcatcttgtctttgcgtcttttcatgagaggaattatcccacccatgatc

SEQ ID NO: 113748 - DNA, 125 bp, Glycine max
gtttaaattttaaaccctttacttgtagtggatttgatataaatctcagtttaattacttctgcttatatttgagcctagcttattaatttccccgatttactgagtggatttgggttattcatt

SEQ ID NO: 113749 - DNA, 376 bp, Glycine max
agcttcttaagcaagcttccatcatgtggtaattagagcacaagagcttcaagtatgtgctccttaaacctccattgttgattcttcatttttctacatgtatttcctcacatgtcttgtgttgaatgttgttaacatgattctttagaatttccatcgattaaacttgctatagaagctagatttgatttcctatggttcaaatttcttgttcttgttcttgaaccatgaattgtgttgagtttaggttcctttgagttttgtcttgctattttttgtggttgaaacttaaaccgtaaaattcttacaaaaacattaaagtagaagaaaaccttaaaaatctagagtgacatgttcacctattatagttttgtca

SEQ ID NO: 113750 - DNA, 364 bp, Glycine max
agcttgcttgtggggcttctatggatgctggatctttgagcttcaatggggtcctttaatggtgattttccaccatggagatgcagcggaagacaaaggaaaagaggtgagaggaggcgccatccattaaggaataagccatggaagaaagagcttcaccaccaagatgagccttggataaaaagcttggagaggatgcttcaatggaggaaaagaatgagagagagaaagagagaggggggagcacaaaattgaaggaagaaaaaagagagagaagttgaactttgagttgtgtctcacaagactctcattcatcaaagttgcaacaagtgttacacatgcttctatttatagactaggtagc

SEQ ID NO: 113751 - DNA, 346 bp, Glycine max
  unsure (1)..(346): unsure at all n locations
agcttcaacctagaggttactgtcttttccaagngttggagaagatcaacgacaatgcctacaagattgacttgcctagtgagtattatgtaagtgccacttccaatgtgtctgatctatctctcttcgatgcagatggaagatccttggatttgatgacaaatccttttcaagaaagagggagtgatgatgacataaccaatgaccatgtatcacttgaagggcccatgaagagacgcatacttaattaatcccaactcgtcattgatacaaggcttgtcattttaatatctgccctagatgatgtttgtaggcccatgttcagtataagaattgcccataatct

SEQ ID NO: 113752 - DNA, 371 bp, Glycine max
agctttttctctagttgttttgcattgctagggtttccaagcgttagagagaaggagaatggattggagacttaatttcactatctctgtgcgaggggtatttctctctatatagacaatattttataaatcccgacggtgagaatgtgcaaaattgaggtgtccaaattttaagatgatccaatggttaagtaatccaagatcgtagttttacttaggacaaatttgggtgtatgtgaaaaaaagagttttgggagaagaagaagggaaaacaaatttgggaagaagaaagagtatagagacacatcataattgtaaaaacttatctaatatgtctttatttatagctagggtactctgaggctattatt

SEQ ID NO: 113753 - DNA, 260 bp, Glycine max
  unsure (1)..(260): unsure at all n locations
atctaagtttgggattgaatgtaaaagggcttgaatatttagaccatgttgagaggttttaattgaaattaaattgctgcctcatgaagaatacctttgccctangtagcatggaaatacctttcaatggtatgtatatatgtgaatatatggcataaatacaccttgcaaagtgtgaatgtatagcaaataatgtatttcaaaaatttgtatatgtaagataggtagcgtaaaaaatgcctttcaaaatatgtatattt

SEQ ID NO: 113754 - DNA, 367 bp, Glycine max
  unsure (1)..(367): unsure at all n locations
tctgctctctgtagatatgttcttcaatgctatnncttcccacacatgtnntactttcatattgtgtatcaagtttctttaaagttgatactgggcctaattaaaatcatgtaatcaactgcttagtcatgcgtgccatgtcttattttgagatgggaaatgacataattgttctgctcatttatacacaaagttagtttcacaagtttaatatgttattgctacctaaagttatgctgaatgttgatgaaatgnttgnttcttatttagaccgtacttatgtctgatgataactgttgtctggtttgccatttttaaattacaggtggcagcttatgacactaagttaaacaagatggcatttttc

SEQ ID NO: 113755 - DNA, 411 bp, Glycine max
  unsure (1)..(411): unsure at all n locations
aagtctacaagtgtaggtactttatctggtccaagtttgagtgaaccagtatgacgttgtttccttccttattgcttcttgtttaactatgttattgtatgcttaaaagttatttntgaaaagtataactctgatatttgatcaaaagattttaataaaacagttttattattcagaaacactaagcaagaaaagttaaaaccataattttttataaaacataatctgagattntgagagtaggttctgaatcagtaaaacgcaagaaattttactntaaaaatattaatttattcgagtacttgtgaggaaaagttttactcctataagtcttatgatttctaaacaagaagtttgagaagtaaaaatcaaaaacaaagtacgtatgtgcgaaaaaaataagctaattag

SEQ ID NO: 113756 - DNA, 342 bp, Glycine max
ccttaaatctaaactagatgtaatccttgggaaagacttgttatctcagttgttctctcattttcaagctaaaattctggtgttattctcccaatgattaatggggctgatagctagttgggcttatagattgtgcactaggttaccacattatggtgccaattttgtactctgccttaaatgttctcgaaaggagacattcctaaatgcaatcccatttgagaagtgacatctagagattgtgtgtacctgtcaatgagtgggttgccacttattgtaccatatgtttgtattagttaaggacattgaatccttggggaaataaaaagacaccactcgata

SEQ ID NO: 113757 - DNA, 242 bp, Glycine max
aaatccttcttttttcagtggactatccccctttacctctgtgccaacttaatagaaatttgtttatgccttgtggggagagacagagaaagaaagagactaattgatacagaaaaagatgaaaataaaaataaaagtaatttgtaaaatgtgtgaatggtaaatagaggaaatgaactggacatgaaatacaattgaatccttttatttacattaccttgttaatcaatctataaatggtg

SEQ ID NO: 113758 - DNA, 252 bp, Glycine max
aacctaagaagtgagtcaatgttgtctcttctttatttattgtgcatgtgcatatatatccatgcatgtatgtatgtttaattgttacttacttgcactggtgttagttcaatgaaaagttgcaatattgatgatgatgcttcacattgatattctactctaggatcatatatatatatatatcactttcatctaatggggtttgcttaatcctagtcttggccttttggggtttaatttgtctctgggtct

SEQ ID NO: 113759 - DNA, 294 bp, Glycine max
  unsure (1)..(294): unsure at all n locations
ggcccaatcttttctttttgtctacctctcanggagcaggaacagaagcatgtggcatgctcctgtgctgacaaacaatagcgcgcctctgctcttctcatagagaagctggctggcgcacatgctctcgctcgtactgacttttctaaaactttggacctacaatgcgatgcctccggagtgggaatagcagttgtttcgatacacagcgggcaccctaacgcttattttagtgacaatctccctggcgctgcccttatcctccctcacctatgataacagagctttttgcct

SEQ ID NO: 113760 - DNA, 374 bp, Glycine max
  unsure (1)..(374): unsure at all n locations
agaagggactgatcataatcnaatctcaaagactccaagtatagatccattgtcaagtgctggacattatgaaacattgcctatttgatgacccgaatgaagctacgcttggtccagaggcaactctcttaaaaatttcaatccaacgtttaatggaattgtaaaaaagcatattggaaagcagaatatatttcaagcctttgggaaatgattctctcactgtttatatccaaattaataaaaaaattattccatttcctatattcatttattagtttaaatgtatcgntaaatatatantaatattttcattcctctccaaacataggtatgccactcttacacaatactttcgtcaactgctttttctcttc

SEQ ID NO: 113761 - DNA, 230 bp, Glycine max
atactgtcttgtatctgtaaacttacaaatccacccatcctgtctcccaaaacccactcccacgcctatgccacgagatagaagtcctcccacacctgaagtttccaagtcgcactcgtagacactcacttgacgactcctaaaatgcccttctttcgcgattgggatcatgagtgggcgcccaacgctgaagctatgttcggagctcctatggagaatgagggagaaag

SEQ ID NO: 113762 - DNA, 256 bp, Glycine max
aaccccgctcaaacaccaaccaaaatcacagctttttgtcgcttaaagaccccataaacaagtacttggcctcaataaataagcgatcgaccgactacgaatgcgtaatggaagtctctagtacataagcctacattgtgaccgttgggatctactatcacacatccagaactcattctgcactagacttttcacacccaaccacacacaagcagtttactagacgtgtgctaaattctgctgcacaatctcacag

SEQ ID NO: 113763 - DNA, 341 bp, Glycine max
  unsure (1)..(341): unsure at all n locations
agcttgtggtgggacanacagctttgctttctcatccgacagacaccaccacacacggccgtcttctattgataaattgcgaatgcctctaacagcacttgggtcacagattttcttcatgcctcttacgagcacatgttcaaacctttgataccatattctgacttcctcttctttggaggatagacatgtagaagagtagctggcttcttgaagagtccataggtgacaattgtgctttaatctgctagacttcatagaacttactcttctatttgaaccaagcttctgatntggaatctacaagaatcttcataacagtgactgatgctaatcaattt

SEQ ID NO: 113764 - DNA, 441 bp, Glycine max
tggtgtcttaccttttctgctcctaccacttcctgtagttatgcgtttgtgaccaataatgtccatatgggagacatccatctgctgggagcaatccgacttgagcaaacctcaataacatctgtggtaggggaggttatggcatcttggataaatgtctggtgctaacttggtcttttaaagcacactatgtgggctaaagcatcagcttggtcgttttattccttatctacatggaccagttctttctttttgaaatgctccaagagtttgacctattggtagtacttctacatttgtgtctttctagcttggaagacactctttacctgctcaatgacaagcttatagttactcatgtacctcaaacttcttttgctgacccctatcgctagcttcaatcttgcgatgaatgcttaatacattgcttggttgtttgaa

SEQ ID NO: 113765 - DNA, 363 bp, Glycine max
cacgacgggtgttgctaggagctcccagcactggatgaagttcattttcttataggttttttataaaaactattgtgatgaattaatttaaaattaataatccaagcaaaaattgaacatgtgactttcacgttattaatgcaatactctaacttactaaactaacaagccatttatattatcaaataaataatgtcattatacatagcacttaaggtttcaatgtatatttaatgcgcatgtaaattcaaataatgaattctatgacaatcaaatttgatataaaccatacgaataatttaatccatcttttctcttacaattaaagatcttactataccaaatctgattctaacatttgat

SEQ ID NO: 113766 - DNA, 283 bp, Glycine max
cacttgcccttattggattggactttttttttattgtcgctccgcgttgctggaatgattatttttcaaaaggaaaatatctatgattgacgatctatattggggggaacaaatgacggttgaaatgtttgatatgcgaaatttattttgtgcccccatgtatactcctgttgatatttcttacatttggtgttggactttaaatagccattggtatgggtcaatgtaaaaaatttttcttcaccaataccacttttatctggatggttgctattatttattt

SEQ ID NO: 113767 - DNA, 310 bp, Glycine max
  unsure (1)..(310): unsure at all n locations
tatngaacttatgaactggtaacgggtggtaatgtgcttacttcttttcatgaaagactggattcttttgtaaagcgagtgctgatttattgtcaacacatatttccataggttcttcttgtggcatttataactctttaacaagttcttagccaattgatgacaacgctgatgggagagaatctgcgttaaagtgataggatatggtgttttgaatcaggaaacatttcataaaaaaaacagaggctttttatcagctcatcaatgttatatgcacatgttatgcaagagacatgagcaagtgtgactt

SEQ ID NO: 113768 - DNA, 264 bp, Glycine max
tcattactttaaatgctgtaagttcgtccacattttatacgaattaaatattctattgacacttatccatgatcaaatcatatgattaggttgctgcaattaatccatgggaattatttcggaaaatatctttcggcttaaactacaaagtgcccttatattacgaagatatgatgtattttgaaactctaatctttattatcaacaacctcaatttatatctcttttacacctataataataattcttgcccaagaaaaagcc

SEQ ID NO: 113769 - DNA, 312 bp, Glycine max
ttttctaacttgtacctttgtttagtaatctttcactgttctgttagccctctgatccacaagaattgtaatgaaactagtggtgtctgcttgctgttaattatgccacggaaacaatctgatcggctctcatattcccatactgtaatttttaaatttagtaaagctagaaatgggaaattctactactgatggagagggtagataactacaatgaaggataagcgtagaaattgttccagtattttgggtatcttaacgctttgtggtttaactgtccagcctgattctttttaaccagctgttatttta

SEQ ID NO: 113770 - DNA, 275 bp, Glycine max
  unsure (1)..(275): unsure at all n locations
actattggctggaattggacatacaaaaagtcatcttatatccctcttgctctgaaatgtccatcgctctcaacaataaatttgaccacaatgctatgttacctgctgtacaagaattctcccatctgaaagtgtttggagttgactatcacctgagaaaacctncaaatatcaaacaagtcagctggtacccggcctatcaatggttggataaaattgcaataccgatggcgcaacaaaatgaatgtcnagttttcgtagctgtggcacatttt

SEQ ID NO: 113771 - DNA, 435 bp, Glycine max
  unsure (1)..(435): unsure at all n locations
agcacctgggctgagcttgcaataacaagacctgtgtctattctcgatcattcnngaaaacatgaaaatactagatgatccagtgcgcttgtccgtaacatacgcgaccccacttctatatttcgataagaaaatganagaagaagtgaactgcgggtggcgcgaacaagtatgtttggcaccgttgctgaggaacttatttcattagaagagcttagttcagctttaaggcattgattcatttttttctttgattcttgtctgttaatagtagatactgtcgatttnttgttcttaggaattagataattcttgttccgcttggttcgtatgcaaacaagatcttctgcaagtgcgttgattcccatagattcggagattaacgctacttgcaggagaagaattgcagaaggacatagaatattcttgccgaca

SEQ ID NO: 113772 - DNA, 452 bp, Glycine max
  unsure (1)..(452): unsure at all n locations
cctgctgcttgccatgtggaacattgccttggatagcaaaagtggttagtagaggaaaacaatgtaagttaactgtgagtaacgtgatcttagtgcatatatgatttacctaagcagttcacaataacatgcatcatgaagttntgaaatgaactattactagcacatattaattcagactgataggtgtgactaacattgatgcattacttattgatgcctcttgaaattgttacagctcgaaaacgaacaatgactaatctaatggcttactccatctttgatgggtggtggtgatattcttgttgcataagaaggaaactgcgtaacccattgtgttttggtagggaggtctgtttaattgacggtcattgaagagaggctgtgcatcatcattacaactacacaaggcccaaacaagaatttaatatccgtactatattttccaaata

SEQ ID NO: 113773 - DNA, 420 bp, Glycine max
  unsure (1)..(420): unsure at all n locations
gttctcatagatagtgatggatgtatagtcnttgcgaacttatttaatgattcacaaagaaaaagatagaaagacctcgaatgtcggcatgttatggtcatatgaagaataaatcattcatagagagcaaacatatcttttggaaacaagagactgacgctaagagtttattgtccagaataactgagataagaatggatggattcattgaactgatgaaagaacataatgtggaaatattgggtctacttgtgtaaatcccaagcctcagtatcacaatgccataaactggatgcttgagtacccacctagttgtagccatgactaatgttgcactttgttccaaatcatcattgttacgcgtggctcatggtaataatatggaatttcaacccgagaccgacaccctggtacacgaat

SEQ ID NO: 113774 - DNA, 364 bp, Glycine max
  unsure (1)..(364): unsure at all n locations
catgcaagcntggaaacatagggagaggaacatcaaattgtatttgtcctctacaacactctaagagtccctcaaccccatgataaattgcatcaacttgcgtctcttggtgtttgctccacatgtgcaaatagcatcattgtaggatcctaactcatcccacaattttttaactttgtatagtatgtagcaactatcatttgatctctaataaggcaagcaatttctctctcaatctggaaaatgcgtggtgcgttgctttgaaaaaatgattttaagatctttccaactgttgagcagngtctaaaaaaaagactattgttattcagggtcatgattaaaatcctgacgaaccattcttgcc

SEQ ID NO: 113775 - DNA, 445 bp, Glycine max
taacaagtgtatgttcttatgcatgacgtcagtgatgcgtttgtgctcatggctagtaaggtccctgctgagttgcatgcactgctagagtttgggttcgagttgcaacttgacgagctcttcaatatgctttgggcctctatcagaggtgtcatcgtgcggatctacatcgaatttatcgtccaagcgtgcttggtgttagtcgttatttacgactaacttttgtattgaatagttacataaaattagcatctttcccccaatttatggctcattttgtaggaattgtatagaatttcatgtctagtttgattttatacaacagatactcccattttgtgaattaatattgaaatcacttcagtttcatgcttaaagaagataggttcaagcagctggtgtctcgctaagcgaggcatatgcgcttatcgagtgacatccgcta

SEQ ID NO: 113776 - DNA, 261 bp, Glycine max
  unsure (1)..(261): unsure at all n locations
gagctaaaagataaaaacatgacgcagggtagaagcgttagagagggaaacaaaaagggcccgaaaggaagaatggagcaagaaaaagatcgaggggggcgtggggcacantaaccaggcaagctaaaaggcgaagggacaacaggaggaagagggggagaaaaaaggggcgagccaaaagggcggagcaaaaaaaagaaggaacatgcaaaagaagagtgggagagaaaggaacaagaaaaaccgcagagacaaaagaaa

SEQ ID NO: 113777 - DNA, 270 bp, Glycine max
ctgcatcttcatgactatcatctattaattatctgttgaactgagaactcgcgaacgggttcctttatatgaactcggcccccatggttgccttcgggagaatgcaaccatggtgtagtgaacctccaattcatcgcatatgacaaaaatcaattataaggccttttaacaaactattttgtgaatatcgggcattttcatttgcatgcatgtcttctcaccctaattttgctttgtatagtgttggaaaaatcctactacaaagggaca

SEQ ID NO: 113778 - DNA, 240 bp, Glycine max
  unsure (1)..(240): unsure at all n locations
agcttnnggcanaaggaagaatttttattttttaatttttttcanaaaacaagcggcaaaaggcggtgggccaaagaaagaacagagagacgcacagcaaagcgaatcaaagcctngctgttattgactcttcatgtctggtcaagagaaccatttgaagatttataaccctggaaacactagaaaaccattggaaaagtatacctgggagatcttgagaccctggagaaaacatctcga

SEQ ID NO: 113779 - DNA, 391 bp, Glycine max
  unsure (1)..(391): unsure at all n locations
ctcagcttgtataactggtttgtagtgcctgaaacgatagttgttatatacttgttaattttagaagttagtgaaactcggtggtttgtcaagagttgaacgttgtctcagtagaagagatgaccaatataaaacttcatgcgtttgatctttctctctcctntgtgttaactggtctcaggtttgaaattgaatctgtcttggaaaacatattttgataaaatatgttgatcatcatatgatcatatttgtgtcattgataaatatattactcattctgtttaattatttcaaacaatagcttgctttattttcaaaaaaggtntataaaattttaatgttccacttatacccctccccctttttgtgataattgttttacagagctatt

SEQ ID NO: 113780 - DNA, 353 bp, Glycine max
tagctgtcatcgggagacatcatatgctatattctattatatatggtgaagagaaaatcaccaaattgatggagaatatatctaaatcatacatgctagtgaaataatgcatgctagcccccaacattatggcattgtgagtccatcattggacattcaaatagcgtgttatactacactgtgatactttactttgccttaaactaaatttcgaacttacaattcgatatatcattcttcatataggtgctccacatctctgaataaattggattggcatcacttatatacaaccaaagtaccctcggattcaacaatagaactgtaattgaatgctctatacgtgtgataaa

SEQ ID NO: 113781 - DNA, 319 bp, Glycine max
  unsure (1)..(319): unsure at all n locations
agcttgcacagacaacagacacttcctcttcctttttatccaaacaccccngaacctagatcatttgagcaaatggcgcaaactccggcgctaacgaaatctagcgaactatctgctccaaccatattccccaatagcacatcctacagaaagacaccctaaccaataggaccacacatcaatataccgagagcgtcaatattctgaaacataactcatgaccacagggatcactccccctcaccccataaccttatatgataaaactgagctgagcatagaaacggtctcgcaatacaaagcataattcgtacaatta

SEQ ID NO: 113782 - DNA, 261 bp, Glycine max
  unsure (1)..(261): unsure at all n locations
tttattggacagtgttctgtctttgaatatggagaaccaaacaaacacaataagtagatataccatatacgtacaccaatacatagagagcttatttgtttgaaaacgggtagaattgatttttataaaattaaataaaattgggatatttgtctaaattaatgagccatagatntacattgaaatgatnttattgaaaactaggagaaactagggtatatagtcaattttattggatttggttatttttgtgtaaagatg

SEQ ID NO: 113783 - DNA, 364 bp, Glycine max
attccatatatgtgtatcgatcacagtgcaactttaatcaaatttaatagctgttgtaaatcatctctggccactggttatcgattacatcctctggttatcgactaccatagagttaatctcttgaaatacacctctgaacttatattacttggtcaaaccctttgctacctcaggaacgaatacctttcctatttaatatacccttcctaagactctagtgactgtcgtgatcatccatcttgaatatctttaattacttggcctgaataaaccgtgatatcatgttggctttggctcatcttacattgccgtgtcccttgtttcaatttcctctgttgtgatacatcccttaatcaaacag

SEQ ID NO: 113784 - DNA, 152 bp, Glycine max
ctagaacacggagcgagcgttgagctcaatgggagcgcattcgaaaattgcactctctgtcggcatgcgaaaaaaagtatcgccgagcgatattggaaagagattccaatttcaatccggggcttctcgatgtattacgggactcaaccaga

SEQ ID NO: 113785 - DNA, 254 bp, Glycine max
tatctgtggcatgcacaacgtacattagttgggattcacttccaatatttgcgatacaagatatccgcctaaatgtgtttctgacagacgatcctccatcctaacctcctgctttatattgatgtttatagaaatttctattcacatatgaatgttaccacgtggtgttcccatactcgaaatcatgatggaaacctgatgctgaatgcgacattctggaaatttctacccggaattctcgtttacggagcatt

SEQ ID NO: 113786 - DNA, 408 bp, Glycine max
ggtcaccatttccagacactccacctgtgttcattgctatagctattttccacccatctctttttgccaataaactgaaccaatgtaatgaaaaacaattgatattgcatcatcgcatggaaataaactgatgaaaaatcaccataatcttggaccaatggacaaaatattagaataagttcaattaccagctctgagaataaggtgaagactttgtgccatttagagatagcctgttaaaatttgtctcacagcaacaacagtggattctggaagttgcaagggctatacatgaatgttcagagcttttataatctgtaattgataatctccatttcagaatcgtagatcccatttgacaagccatggactaagaaaatatagtgctctcatgctcctaatctgcac

SEQ ID NO: 113787 - DNA, 432 bp, Glycine max
  unsure (1)..(432): unsure at all n locations
atatagccaggaaatctttcttttttcaatggactatccccctttccctctttgccaacctaaattgaacatatgtnttatgccttgggtgggagagacaccatataagaaaggagactaatttgaaacacgattatggatgaacaataacaaattaatagtaattttgtaataggtgcgcaattggtgaatagaggaatatgaactggacatgaaatacaattgaatccttttatttacattaccttggtaatcaatatataaatggcggtggcggagttgcctactgccttcattttgttgtatatttcagatggatagatggcaatacactacactatctttgcatatctctggacattccattatcaactgcgatctttggttctgtttcaagttttaattatatcaattggacaattcctccttata

SEQ ID NO: 113788 - DNA, 376 bp, Glycine max
ttcgaccaaacctcaagaagtgagtcaatgtgttctcttctattttattgtgcatgtgcatatatatccatgcatgtatgtatgtttaattgttacttacttgcactgtgtgttgttcaatgaaaagttgcaatattgatgacgttgcttcacattgatcctctaatcctggattatatatatatatatatcacctttttctaatagggtttgcttaattgttgtcttggccttttggggtttaatttgtctctgggtctaattaccttaagtgaggtcaagttcttactagaagttggtctatgtttgtgtgaccaaatatccatggatggtgtatggttgatattctcaactgtgtttgatgactgttcaatga

SEQ ID NO: 113789 - DNA, 369 bp, Glycine max
  unsure (1)..(369): unsure at all n locations
catgttgcatgcaagcttatactcnctttcgggacacnnatcttcgatttcatcatttatnnagggctgaattgcaaatcaccaaaaactgatcttggttgatgggagcagtacccacaacttcatacataaacacttattccaccaattgggcctaccaacacaaaccacacctcctctcaacgtcatggtgggtaacgggcatcacctgattgtcccatgttgtcagccttgcgtcatattaggacttgctcatttgacactgcctgtctggtggcccatgattaggtcatggcaattcttgcgtctacgtatacactatcataatttccacgcggtttataaagatttgtcacttctctcacatca

SEQ ID NO: 113790 - DNA, 476 bp, Glycine max
  unsure (1)..(476): unsure at all n locations
atactcattcttatactcactgagaagtacataagaactattataatatgtcgaagagcataataaaatctatacatcaatgaagtcatcaccttcaattgtatactcagtctaactgtatgaacataatataatttatgaattggtgaacacatcaaattgtaagttcacatgattgaaatattataattcaagtgtaagaaataaagagtatcatctaacatattattaaattaaaaaaggcaaatcggttgaaaaacataagaaattaaatgttattcatgtcaccaagtataacaataagaagtgtgctgatcaaaccaaacgagaatccctcattgtacaaccttgatatgatgcattaaactatatgccaatcaatgaacgatccttgtgtccatttnctgatcattaatcantcaataaaacagtcaaatactttaggattttaatatacacttaatgcatgaacacaa

SEQ ID NO: 113791 - DNA, 369 bp, Glycine max
  unsure (1)..(369): unsure at all n locations
tgaccttgaaaaaaaatctgtacctatcgcaagggtttgtggtttgtgctcctctgctgaccaccatacaaacctttgcccttccatgcagcaacctggagcaattgagcagcctgaagcttatgctgcaaatatttacaatagacctcctcaacctcagcagcataatcaaccacagcagagcaattatgacctttccagcaacagatacaaccctggatggaggaatcaccctaccctcagatggtccagccctcagcaacaacaacagcagcctgctccttccttccaaaatgctgctggctcaagcagaccatacatttctncaccaatccaacaacagcaacaacctcagaaacagccaacagt

SEQ ID NO: 113792 - DNA, 276 bp, Glycine max
tgtattcttaggaatcacttggactagactcacccaccggctatcagaaatggggtagatgattccaacttgcaagagcttggtcacctcctttttcaccacatctagaatgatggggttaagtcgtcgttgtggctgcctcactggcttatctccatcctctaaaagtatcctatgcatgcaggtagatgggctaatactaggaatgtttgctaaagtccatccaataactttcttgtgcttctggagcactaacaacaacttcttctcttgctc

SEQ ID NO: 113793 - DNA, 382 bp, Glycine max
ccacagatgctgccttcttctattttcagattgggaatgcctctaacagcacctttgtcaatgataatgttcatgcctttcaaaagccatacccacgggattgacgagtttgcagccctagggtcatcctttttcgcattatttgattccgctttgcgcttttgttcatcaccaccaagtaagtgttccatccctaagctttctagctgttcattggtgtattttgatctccttctggcgctctaaattgtgggagtgtgctcaaatatatggggcaattttggtttgttctcttgcttgattaggctgaattacgggttggtatgggatggtcctaggcctataatgcattttgaacaatgggacatgcacatcgtcccgt

SEQ ID NO: 113794 - DNA, 441 bp, Glycine max
  unsure (1)..(441): unsure at all n locations
tatgcgcatatttccttacgaacgttcactngcacatgacatcctatcaactaagaaaaatgcacccatgtacaatcaatgtagcttcattacctagattatgaacttccaaagtgtatatgttatttacatcacacacaacctacttgctgaattcacatacatgcatactcaaagcattttggggtaccaaaaactgcacatgcgctcattctggtatttctaatacccatacatatacaaacgtcacgatgaatcttgactacctacacaataaggtgctacctttcatgtgtttgttcaagttcttcgctcctataaccacatgctaattcaagcatatgttccctttgttgactaatattgtattaatattacaacgaatatatatattttcataatatggactctctacataaaatgcaacatatttatattata

SEQ ID NO: 113795 - DNA, 448 bp, Glycine max
tcatgttgctcattgactccaaattgctgcatagaatgacaaatatatgtatggtgatcttcagaagaacatacaccatagactcttgcaataggtgtagatgtagatttttgattcatggcaagtgatgcaagctccattggagcttgtaggcctaagatcttcttcatcaatggattcctttgcttcttggaagatgaatggcagcggaatggaaaaaggaagagagagatgagacgccacttcaaggagaatatgagtctagaagaagctcaccaccatacgatgccatggataagaacttggaggaagaatgagatgaatgaatggagagggagagaagtcacaacatttatgctctatatgagctttgatatctgaagttaatatcaaatgatcaagttataaaaatgacacacatgcctctatttatagctaatgtcacaca

SEQ ID NO: 113796 - DNA, 371 bp, Glycine max
cctcgaatctctaatggagagggtaccactactgaaaaacccgaatgcaaatttttattgaggcaattgacttaaacatttgggaagtcatataaatatggccttatatacccaccacagtagaaaaaaccacaatagatggaagcacaatctgtggaagcacaacaatagaacaacctatagatagatgggctgaagaggattgaagacgagtacattataatgtaaaagcccaaaacattattacatctgccctgcgaatggatgaatatttcaaggtttcaaattggaagaatgctaaggaaatgtgagacaccttacaagtaacacatgaatgcacaacagattgttaaaaatctaagataaacaca

SEQ ID NO: 113797 - DNA, 447 bp, Glycine max
tgaagacatgtaactgttagtcggtaaaaatgactaactcttgtgtattaaacttgtgtatattgtatcaaactttcccaatttatggttgttttgtaatactataagtactttttgttaaatataggtaatagataatttatacttttgttttgtgcgtttaataatcaatttctctcaattttatgttaaataggcaactctggcaaaatgttgtttttcactctttcgctaagccaagctgctggcttatcgagtattcgctaagcgcaaccttcagtggctaagtgtgaggaagaatccagaagaagatgagttgtcaagttcgcttagcgcaccactccaagttatcaagcacaccgcttcatctatccgctatgcgaaaaagcacacttatccaatatccacttatgtgcgctaagcgatccatatctgtgctaatcgcac

SEQ ID NO: 113798 - DNA, 301 bp, Glycine max
ctgcagctccggaagagcaaacttttttttcctgcctgtgagaacaacggacctgcttaagaagcttccttgagaagctgcatagagaagctagagcttatctacacacatacccctctaatagctaagctcaccgccctgagatgagaagctagaacttaggtgcacacacccccgataatagctaagttcaccctcatgccaaaatacatgataatagcaaaagtccctactacaaagactactcaaaatgccctataatacaagggctaaaccctatattactagaatgaccataata

SEQ ID NO: 113799 - DNA, 344 bp, Glycine max
gtaattcaaaatctatgtatctaatacccctcaatttattggattttcacagtttgagaagtgaaaatgagaatggagtaaatttggagcaaactctcacctcacacaagtctataacattaatctaaacttgctcaaactggttttacgcctaaaatttcaccgtaacaatatttgactgctcaacacccaattttaccctataaatgactcttgttatcactctggtcactcatattcctcattagcacagtctaagctttctcttatagtcctaatgacagttcatgacaagaataactcaatttaccctcattaccactgtttcagattttcacttcaac

SEQ ID NO: 113800 - DNA, 339 bp, Glycine max
  unsure (1)..(339): unsure at all n locations
agcttcatagggagccatgccagtggtaattgataaactgnngnnngaagtgaactctatgaatggcaggaaactctcccaacttcccttttgctctaagacacacgccctcaaaagatcctccagggactgaatggtctgttcagtttggccattagtctgaggatggtaggctgaacttagtctaagcttggttccaactgctctgttcaggtgatcggagccgtacccgaatcaaataaacattaaaatgcagtatctttgaagtgatcctaagtcgtctcccagtgagtaatgatcaaacaaacgttcataacatataataataaaacaataacg

SEQ ID NO: 113801 - DNA, 355 bp, Glycine max
  unsure (1)..(355): unsure at all n locations
atatctagtcaaggtctgagagaccatacaagtttcctaacgatttctaattatgtgggccattaagtctatcatatgctggcaatagccgagaagcccatgaatctctttgggggcggagtaggtgtctgccatcgccttggccttggctaacaatcggngaagttcttgactcccgttcaaggtaagagcaaaccgatccatccacatggttgcctcttggtgtaaagagtcgatcacccttcctctagcctctttttccgcgtatacttgggcatactcatccgcgattctatgctcgtgggccgtggctagacctaactcttcttgggacttggcgatgatagctaacatg

SEQ ID NO: 113802 - DNA, 430 bp, Glycine max
gtgaattatgtcgcatcatccttaatcaagccaatgcctttgtgcactacgtccatgtggcaaaacacaccaaacgattatgatgacggatggctcacattctcacaaaggtgaaatcatcactttcaaatagagctctcataactatcatgacgtgtagagaagaatcaatgatttgaagtcacaacatgtcaagaacttatattgacaaaacaattactcatttcttgaacatatcctattattcaaagaataacatgcgatggcggcgtgcacacaatatcgacgcccaatatttaactgtgaatccgacgaatcttacaacatatacttatgtacacatctgacatatttcgctaccaactatctcgccataccaagaacacttccgcactcatactgaacaacacattgcctcaatgtgcacaat

SEQ ID NO: 113803 - DNA, 488 bp, Glycine max
  unsure (1)..(488): unsure at all n locations
gtcacctgcggcatgcagcttaagggtgtatataaactcactctttatattatttgtttgtagggaattgtaaaattggagtctgtatagtttcaaaatggttttctatttttggttntatttttcacaaataattgcataagtatcacatagtttccactttttttattaaaaaattgtaaagaaaacagtgaaagcaaggtagtatttttgtaataatttataaaaatagaaaataaaatagaaaatattttctgaaaccaaataggccttttatattttgaaggcatgccattcatcaaacagaagtgtgttcccgattctccatcttgaaattatagtatttaataaacgaattttaggcttaattgcacatttgttccttccacaatggttaatgtngcaatttggttctctaataattatttgtttggacttaattccccaattttttaattatttaatcaaacacttttgtaagtttccgt

SEQ ID NO: 113804 - DNA, 281 bp, Glycine max
cgcctgtccgatgcatcagtaatgatggcccgagttatgttggtgggcggttactaacccggaatgggtttatgcaaagacaactgcggcataactagcctgataaatgccaaaggaaatcgtgggaagtatgggttaggctataatcccactcatgcagatataaagaggagcgttgccggaaggaagaacggaagtcaaggcttgctgttgatacaagaaggttaatgatacccaccctgccacataagtaagagctttataagtgcgggtctggggga

SEQ ID NO: 113805 - DNA, 336 bp, Glycine max
tagccaccttatgagtggccccatacttcttcaatagagcttcatattatctttcaatgaaatgagaaccaccatcactaatcacagctcgtgggagggaacaacatgtcctccataagcggaaaagtggtaggatgcaagaatccgatggacttcttcaccaatgcacctcttataaattccatcacaatatctcttgtagaggtatggcttatcccaaacaaagtgtttcaagttagagaaaaaattcttcttattctggtaagaaaagtcagtagggagaactccacaggcaagattattaacaaagttagcataccatcatgggttctctat

SEQ ID NO: 113806 - DNA, 350 bp, Glycine max
tgcggactatagccttctaccaaacgctgccgcgtttctgtctcgtcccgtatttaaagcgggttgcagtaccagctccgcttacctaaccgtactggatgcggttgccgtggctttatcctatatggttttctggagttttaacatgacctccgatatggaatccatttgatctttcatggccgatatatcggccttcatttgttcctgcatgccctcttcattatccattttctggatcgagtgttataggggcgccctggtgttatcttagttatgaagaaatgcctaaagaaataaacgacggtgagtgtgccaccgaaacatgagtatgctaatggatgatcgga

SEQ ID NO: 113807 - DNA, 435 bp, Glycine max
  unsure (1)..(435): unsure at all n locations
tgcagcttaaaccccttgtcattactaaactatctgttttttatcataatcacaagcaaggtatgctaattacatgcaagagatgagaatgaaaaataggaaagggaaagataagctgggttgcctcctagtaagcgctcttttaacgtcactatcttgacgcatcgtcttgttatccaggatccaatagagttcctacttcaaggaccttcttctcaggtctcttttcctccatcacatgcactttaagatagatattttgactaggaggatctttgtcctcatggaacaaatcaaagctgatcttctgatcttctatgcccattngcagtatcttctttcctgtgtctaccatgcaacttgcagtagaaatgaatgggcagncaagaatgagaggaatttcagcatccccttctatatctatgacaacgaaat

SEQ ID NO: 113808 - DNA, 388 bp, Glycine max
  unsure (1)..(388): unsure at all n locations
catgcagcatatatatacaatagacctcctcaacctctgcagcataatctaccacagcagagcaattatgacctttccagcaacagatacaaccctggatggatgaatcaccctaacctgatatggtccagccctcagcaacaacaacagcagcctgctccttccttccaaaatgctgctggcccaagcaaaccattcattcctccaccaatccaacatcagcaacaaccccataaacatccaataattgatgcccctccacaaccttgcctcgaagaacttgagatgcaaatgactatgcagaacatgcagtctcaacaagataccatagcctncattcagagctcaacgaatcagatgggacaattggctgcccaattgaatcaac

SEQ ID NO: 113809 - DNA, 442 bp, Glycine max
acttaattaaacatccactaatcccactgtggtaaccgataacccaaccagccggtaaagggcggttcaatccatggtcattttcaaaatcccaacttacacctctataaatggctactcgtgcccctatccttttctcgcattcatctcaaaagtaaaagaaaacctctcgttttctttctctctctctaaaacacgatttccaattttctttctctagaaatgggaacagcaatccttcgttcccacgattgcctccaatgccggttcctccacaacgaatccttcgcgatcgccacgtcacgtgttgcatcgcgaagaaaccctaactctaacaacaataaccataatagcttcgcctccttcgcataccataattggcgccggaagcggagtccggtcaccgatcgagagcgccgtcgatcgccgccgaatctcgtca

SEQ ID NO: 113810 - DNA, 353 bp, Glycine max
taaggttgtcaatgaagctcggaagtcatataagctgtgcttttgtagattatgctacttagtatgaggcaaataaatgcccatgatgcacttgcaagcacccatctctaaaattagttaaattctaaaaaccaaaccacatttatggtttggttaggttttacagcttataccaaaccatgtccacccctaaatggtgtatcataaacatgagactaagattcagaaacataaaatttagccaatctcactatccactttgaaaggttattctctttaaaaggacacaatgaagaatgctacatagactgtataacaacctgccttaattagaaattaagaacaaaatacta

SEQ ID NO: 113811 - DNA, 363 bp, Glycine max
tctttgcacttatgtaataactttgtcttgcacaaatgtcacgtatcttccattgatgttgatcatggaatgatacatacacagtcaatccaaggatccactccaagcaagactgagattgagttctggtttagtatcactaatatatgcgaatggacatctgtttcttcaatcctatattagattttcatgactatgaatatgctgaggattgaatacgaattagtctagggattcctttgccaatttcaaatataatcacaacatttttggatgatattccaacctagattcttatctcaatgaatttaaggattaattcgactgaaacaactctaatgacattgaatgaacgctcacaac

SEQ ID NO: 113812 - DNA, 398 bp, Glycine max
ggaagaagtgttggctattacatgcccaactctgttatgtggcatttgtattgagtgatatcctggctggatattcttagtacatatgatattcgtattgcatcacgcatcatcatggtttgtgtgaagataagtctctaacttagagaaatttcgttatacgcataaacactatgttaatcgattacaaccttattgttatcaattaccacaagctgtctgaagcttataaaggtgagtctcgtatcaaattaatcgattacagctgtctgacaatagattacattattgttctagacaatgactgactcattcaagagtctctgctttaatcgattacttctttctacgttaagcggtgagaggtgaacaagcacactctgatgaatgatcatgtt

SEQ ID NO: 113813 - DNA, 429 bp, Glycine max
  unsure (1)..(429): unsure at all n locations
ggatcttaagcaccgcggctgcagcttatttgaaacggggtttaaaattatgttatagaagnnngangttatgcagaattttcattgtgctgcaagatgccgcaagtgcttttcttttgctgcaagaaagtcacgaaccactgtcttcaatggaatagaagctgatgaatcttctccatgccctaattctttctttccacctccactacccattcccttaagttgcactcttgcaaattaattagaaaagggtttctttctttttgtaatgatctcctattatcatccttcacctctctaatatatacacggatgtaaaaaaataatcggcaccgtttggcactaaatttcaaacttcccgccacaagaatacctagatataaccggtgtgtacaaaaagattgtgttgaacacgtattaagatgaatg

SEQ ID NO: 113814 - DNA, 360 bp, Glycine max
tatgtcactttgtaagccattgtgacaagtcttacatcatcttaagataaagtcaagttagagtatataagtgaggggtaacctttacctcttgagctagtttttgaggttgaattatgcctaaactcgcattctaaagatcctaagatggtgtcagagcatatccaatattaattcaaagggtcaccttgttgggcgtgagatggtgtattgaaaaaaacccaagtctcacatcggctaaagagttgcagtatataagtgagggattatcctcacccattgagttaacttttgaggttaagttaggcctgaattcacatcctaaagattctaagagtatgttttaaactttgagatgtt

SEQ ID NO: 113815 - DNA, 392 bp, Glycine max
  unsure (1)..(392): unsure at all n locations
agcttctagattagtgtaccntgtgactgttgccttatttagactttcctggaagaaatgcatcaacaacttttcatcttttgcgtatgcccccattttcctatagtacacctttatgtgattcttggggcaagttgtccccttgtatttatcgaagtctggtaccttgaacttcggaggaatgaccacgttgggtactaagcataaatcttccatgtcagcaaagacataatctctacctccttcaacgacccttatcctttcctctatctgatccaactttcccttttcagccatagcaggaggggctcttcccaccacaaaatacaagggttgtggttgtgggtgaaactgaggggtacaccaccagctgcttatccctcagtggcgta

SEQ ID NO: 113816 - DNA, 385 bp, Glycine max
  unsure (1)..(385): unsure at all n locations
ngagatgagaaagtgtagaagggtgaaacttcctgcttttattcgttgaccacagagtggtacctggagatatgtcgcgggggtcatgagaccttggggacgtcacgtggggtgctattgcccaaaaccaatcttgaccaatcccgacccaacccatgcatagtcagtcagtgagaacctgtgatgtacctaaacaggcgagctcctggaagtcaacagataaaaggaactaataccacaaagcaaggatgcttgtgtggtggctggccagctgtgaactttgtgtgatatatgggttattgcctctagtaatcgattaccaagggtgagtaatcgattacaaggcttaaaaatgaaggcatgatgctaaaatggtctctggtaa

SEQ ID NO: 113817 - DNA, 250 bp, Glycine max
  unsure (1)..(250): unsure at all n locations
tcgcttgagatgaggaagtgtngaaaggtgaaacttccttttttattgttaccacatagnggtacctgcgagatatttcgtgtgggtcacgagaccttgtggacgtcatgtggggtgtctttgcccataacaaattctaaccaatacctacccaacccggtcatatgatgaaagtgataacccgtgattttccttaacaagcgatgctctggctgtgcacatattaaattgatccatgaccactattcaa

SEQ ID NO: 113818 - DNA, 292 bp, Glycine max
  unsure (1)..(292): unsure at all n locations
tatatagaccaacttgcgccgacagatgatctcttcgtctactanacaactacaggtggcacctggtgtatcctgatacacgtgtgccatacgcttgcaaatgggagaggttcttatggactgatcacgtgcctacgttcacgatcttaaaattgnatgcctggcttgcatcattttaaattctccctcaggtccttgttctaagaaacactatttaggatatgtacactctgacttgaccctcgtcgatatgtcccgatatcatcgctcataacgcacagatgcaataagc

SEQ ID NO: 113819 - DNA, 398 bp, Glycine max
  unsure (1)..(398): unsure at all n locations
ttagattgagtggtatattgtgtggtgcatcttaatctctatcatttcatatgtgcatcatgcatcatcatgtataagtaagaagaaaagcttctaaagttagaanaattcttctaaagttaaaactctcttgtttaattgattacaggctgatcgtaatcgattacacaagtgtttgtaacttgcagagaaatctatcatatcagtttaattgattacaagcctttcgtaatcgattaaacagttctttntgaaacaatgattgatttttcaagagtctttgctttaatcggttaccggtagatattattgattacttctcttttaaaagtgtttcagaagtgatcaagaacactntaatcgattacattgagaatctaatcgattacattgttctt

SEQ ID NO: 113820 - DNA, 369 bp, Glycine max
agaaaattagagattatctcttttatcttagggagagtgattctcctaaattcttgagtgattcaagaacaccttggttgtatcaaaggactttcacaacctttgtgtgttgccctcgctggaaagagtgattctttccttcctttcatcatcacccttgttctttcaaaccacaattccagaaaatccacctctgcccaaaattatctcgtggccataactctccatttacgcactcaaattaagtgattcgtgagcctaaattgaatttcataacgagacctctcacctcgttttggaatcacctcatttggagccctgtagcttcagttattgacatttctatatttctgccagccaccacttaac

SEQ ID NO: 113821 - DNA, 409 bp, Glycine max
tagcggatatgaatggcgctaagctaaattaaatccaatttaaatcgcaagaatattcgcttagccagtagattacgcgcgcttatccccatggcccttaattctgatcgcaatgaatagcgcttggtgacatatggtcgcacttagccaagggaagccatccctgagcgatcaattcgtcacttagcggaattcagatcaaattggagttagcttagctcaaccttggccaacttagcgaaaataatcatcctcaggtgccatggtggtgtgctaagcgcttgatcacgcggcttatagcatgagtgattatgcgcttatcaagaagcagacgcttagcgaaaggactaattttcaaaaaagaattttctgagtgtcataccctaatttcgtctggggaccattgttt

SEQ ID NO: 113822 - DNA, 461 bp, Glycine max
  unsure (1)..(461): unsure at all n locations
cctgagctgcagcttacagtgcaataaccngagactactttggggttcttatccnanancacnacttccttcttttcctctgtgggctcttctttcctctcttcttccttgttctcctttaacagcaaagagaatattaatggaatatagcaaagatgtgactgataaatctccaccatgtgtagaactagagtatatatggcatgcattacttgataatgatgccaccaccatatatatcatagagcagacattatatacataagatcataagagttaaaaaaatgcatgatcctagtcctatagtgtaattagttttcaagggctaaagctgtcgaacaaatgaagagacagattgattaacaataaatagacaagatattctttgtgtaagagagaactcttacttcacccctgttctgtgataatgaaccaatggatctctgcttcaaaaaaatttt

SEQ ID NO: 113823 - DNA, 431 bp, Glycine max
taagctttgaccaatctcaatagcctgtctctgcggttctctgtgctctctctctcatctggcatgtggtgcaaaacaaaatggatgttcacaacttgtgcttcccctggatgaattacacagatttctatttcaacctcacttccacacattgcaacactgtggaactcaaatggcactccacaagatttggcataatctgagaggcgtttccctacaatgtgaagtcctccaccacctgcatgaaatgattgggaataatcaacaccgcgttctttaacgaaaggtggtccacctggacgagatgcaagagcctgaataagcaacaaccactgagtcccctgtgcaatttggaagtcaattatgcgaattcttgttcatttatcatcgctctccaatgacagaatttcatatgaggagcaactttcata

SEQ ID NO: 113824 - DNA, 144 bp, Glycine max
tacctactcactacctatctactatgaatattcccattccatataggcaaacccctctccatcgccactccatatatatgagactacctcaatctcattcttccacttcctcacgacatgaggacgcacgatttcaacaaaaca

SEQ ID NO: 113825 - DNA, 204 bp, Glycine max
gcatgttcttttgtccttgcaaactacaacacaacaactgaatcttattcgacagctcgctcacgaagatccacctaataaacataattaagaatataaagctttgcgctgttaatgacaccacatcttttattggtaaaatatgtgcaccactttccttataggtgaaaaatatcacagccatctggtatatttatacgatct

SEQ ID NO: 113826 - DNA, 203 bp, Glycine max
  unsure (1)..(203): unsure at all n locations
ggaaccacagcagccgagcagcagcangagagagngaatttcttttcctatccagcagcaggggagcgagatgcgaaagccaacactcaagggcaagcggaggaagactcgggaagataatgagaagacaaaaaaacaaagcgcaccacttaatacacccaagcgcagcgacacagaccaaccgcgaagcgaaaagggcacgc

SEQ ID NO: 113827 - DNA, 406 bp, Glycine max
atcctatctcatatgggataccactattctctttcctttactcacttattgtcttctacatcatacaatccctctcttccatccatattatcccctgaagtgtaaagcctctcatggccatgagatgctatacccctctgttggtatgctagcatccaacacccttgttatgtaactgctctcattatctatataatgcaatgtctatctttattgctccttgttcgctttacatctttatatgtatggtctaatcatacatgtgttagtttatgggttataacattcggaaatggacatgtctgatgaatcggcaaacgacatgtatacacttgattgactgggatatattgaataatatcgtctttgatacattccatgcttaatgcaatcaattttaattttc

SEQ ID NO: 113828 - DNA, 303 bp, Glycine max
  unsure (1)..(303): unsure at all n locations
gacctttctagcaatagatacaatccaggttggaggaatcatccaaatctgagatggacaagttgatgtgatcctgactaggagtggatcgcttgatacaggctacgaagattttggatgatgccacttccgatgaatgaagataagtcagggtaaacgccacaaggattaccttgataagtctgagattggttcaacaaggaacccagagagaagctctcaccacattttatgataaaatccaaaagttcttctctttttttcttattgaaaacaanaaccaatacttatagtgtatctgaa

SEQ ID NO: 113829 - DNA, 271 bp, Glycine max
ttatcatatgttacacgatttgaattttgtggtacagatgatgttatctctctgtttaattgctagaaacgatagctacattttatatatattcaacattatcaaagatggcacctagttattacgtaccgtggttttgttgaaaatgtttaaatgttgacagaaaggacaactgtgcatccatgctaaaaattaaaagactaaatgtaatgcttgaatgaaaggactaaattaaaaatgtaggctcttataattacttggagaaatagac

SEQ ID NO: 113830 - DNA, 458 bp, Glycine max
  unsure (1)..(458): unsure at all n locations
ggatccttaagcacctgcaggctgcaacttgcggcctcgcatttctgctttactcatttaagctcatacccattctttaacatgactcgggccaccatcaatgatgcaccaaataaacgtggttgcatcgaaggagcctccacataagcattgttcacaattcctagtactcgaaaagatgtttctaatgactcttccgcagcttccacatagggtgtagaggaaggacaactcactagtatatcttcttcacccgacactataactagctgcccttccaccacaaacttcaatntttggtgcaacattgatgggaccaccctaacagaatggatccaaggccgacctatcaagaaactgtaggcatggtttatgtccattacttggaaagttatctggcatgtgtgtggcccaatttgatatcggagatcaatttctactctcacgtcatgccggct

SEQ ID NO: 113831 - DNA, 442 bp, Glycine max
tataataacgaaattgcctcaatcatttccaaatatgcatgtgaattaggaagcatcaacaagaatcaagccattgctattgtgcaagcaatcaatggtgctaaacacaccaaatgattatgatgatggatggctcaaattctcacaaaggtaaactcatcactttcaaattgagctttcaaaactatcatgacatgtagaggagaatcaaggatttcaagtcacaaaatgtcaagaacttttattttcaaaacaattacccatttcttgaacatatgctataattcaaagaaaaacatgcaaagtcgtacatgcacacaaaattgacccataatattaaactataaatccgacgaaactaacaacattatcaaattatcacaactaacatattaacataaccatcaaatctagcaaaacctaataacactgctcccccccc

SEQ ID NO: 113832 - DNA, 359 bp, Glycine max
  unsure (1)..(359): unsure at all n locations
gcttgactgcaaaagggccgcccacaaaccgcnccatgctagaaacgaaatctctaaacttggtgctatcttgaaagagtgcaaatcaatttcgtccctttttccaaactttgttgttaagttcgcttgagaaaagctaacaagtttgctcatgcgttagctaaggcacccacatcgaatgcttctccatctttntatagctttataccttagtgtatttcttccttgattatgaatgaatcagtatgagtcttgaatgttaaaaaaaaatggaaacatttgtaattctattaacaactaaacattatttattaaggatatatggttaaaattatttttctcatattatattcatggac

SEQ ID NO: 113833 - DNA, 385 bp, Glycine max
  unsure (1)..(385): unsure at all n locations
taacaatgctcagtgtgtggggctggtggataaaatccttgatttgtttaagcattggagtgcccatacgcttagttactcatgccgtgttcagctgctgcgaatcatcattnttgcaactgcaaactactggatgcagtgtttaccgctccctaagggtgtgattcgtaaaatagaggctgcctgcatgtcttttctctggactggtaaaagctgtgttatgaagaaaagtcccgtggcgtggaataaagtatgtgctccaaaaactcaaggtggtttgaatgtgatataattgcaaagttggaacaaggcgtgcttaatcaaactactttggatctgtataagaaagaagatagcttgtggatcaatgggtcatacatactac

SEQ ID NO: 113834 - DNA, 193 bp, Glycine max
  unsure (1)..(193): unsure at all n locations
acccctctattaactatattaacttccttaanataattacggatgaatataacgcaacagataatcaaacatcaaacataattactaataatatatagatatatatatcagggtgttacattggtgagctgcccctcctccgcaccatacatagaagcggcagaagaatcattataaacggctctccaatcct

SEQ ID NO: 113835 - DNA, 446 bp, Glycine max
  unsure (1)..(446): unsure at all n locations
ctcttggcaatgtctttaaaactagtcacttattatgttatgactcttgaaagaatcttcagaaacaagtcacttgaagaattgtgacttttggaaatgtatttttcaaaatcagtcactggtaatcgattaccattaaggtgtaatcgattacacatcaacagatgtgacttcattttgaattttgaaaatcttaacattttaaaacactggtaatcgattacatgattatggtaactgattacagctttgtaaatcagtttgaaaaaaatgctggctactggtaatcgattactaccttctggtaatcgattaccagagagtaaaacactgtggtaaaaaatttggtgaanacttcatgtactactcaatgttgtgaaaaagtttctaatacttatctcgattgagtcttctcttgattcttgaatactgagtcttgaatcttg

SEQ ID NO: 113836 - DNA, 413 bp, Glycine max
  unsure (1)..(413): unsure at all n locations
gtcacctgaggctgcagcttancaatgttttctttgtatttcacacagcagaaacctagcatgactacccatcatatctcccaaaaccccatacccacgaaaatcaagagggaaagaagtccacccaaacctgaattgtcgaagtcccactcgtagccacgcacttcacgaccccgaaaatgccctcctttcgcaatttggggcagaaatgatggccaaaggttgaagctctgcttggagcttcaatggagaatgaagaagaagaaaatggcaacgtgagggagagagagagctgtctgaaaagtgtgggggctgagtgaagagaaaaaaagctttttgtattaaataaaaggggtctctccttttctattaatttatttaagcaatgccacatgtctcctgttgagtggagc

SEQ ID NO: 113837 - DNA, 445 bp, Glycine max
accttgaacaagcaatcaactcctctttcataaccatgctatgtgctcgcgactggtccctttcttcacttcgcaacttgagttcattattgctaccccatatagctccgcgaaatttgttccggccatactcttacttgcgagccctcttggtctcttgttcaagggctcttgcggttattgcattctcttcccgtaacccggcgcactccttccgaacgtgtgtagcatccaacttgaacttctccttggcgagttttgcctttcctaactcgctcttgagagcttggacttcttcgtcctcttccggtgcttcaaaatactcttcgctgacgacttttgactctgacttggtagaacctcttgtcagtttgaattgttcccatgcttactaaagtgagataaaagctggtgcaaatcaaaactccgatatctcatgggtgga

SEQ ID NO: 113838 - DNA, 491 bp, Glycine max
  unsure (1)..(491): unsure at all n locations
cttaagcactgcagctgcagctattgaatagctagaaaactgggttaatattcttttgcaacangnnnggataaaaaagtaacaacgataataaaattaattaaggcgtacccaacaagctttctcttgctttgaaaagtcattaatcgtaatgaaaaataacagttaaacaacaattaataaaagagaagtcaagcttattgaaaagctagtaaatactcggaaaatatccatttgcaacatgttggtataaaaaagtaacaacgataataaaattaattaaggcgtacccaacaagctttctcttgctttgaaaagtcattaatcgtaatgaaaaataacaattaaacaacagttaataaaagagaagtcgagcttatcgaaaagctagtaaatacttggaaaatatccatctgcaacatgttggtataaaaaagttacaacgataatataattaattaaggcgtacccaacaagctttctcttgcttg

SEQ ID NO: 113839 - DNA, 476 bp, Glycine max
cttcaatactaaccttgcgagacatggatattgataaggtctgatcccttcttcatttattcttgtagcctctaaatcaggattaaatgtcagcaacaaacatcttgaatagctgaaatctaacattccagaaggagatgcaattgattactctgatataagttatatctctggctggacaaacactgagtatttactatgctatgcttcattgtatattctcttatcgagagtgatttgattggtaatgattcaaatttggtgtttggaaagacactaagtgatcgagtgactacatgatacatgggtgttctttctcaaggagatattgaaagtatgccataatagacctagatgactttttagccagtcaagagtgatactgacgaaatatctggtgtgggaacactcggactaataaatccatcttggttgaagaatactgatgatgttctccaataatccatccggctcaa

SEQ ID NO: 113840 - DNA, 198 bp, Glycine max
  unsure (1)..(198): unsure at all n locations
ctagacgggggcangggccctagatatttatcatgtattgttcagtcgactaccgcaatattgcgcacaattaactttatatggtataaaactatggcgaccaagattagatagcgaatatttgagaaaaaacggccccgcctcgttattatgaccatgatcaaggaaatcactatttaaaattgctaacactaaatg

SEQ ID NO: 113841 - DNA, 245 bp, Glycine max
tataacaacatacagatactggtcatctaaagggcccaaaccagcgtcaattattccatcaggcacggtgtgcagcatataatagacgataatgggactcaggcatcttcactctgatgctccgccgtatttaatggcaggtgatgaagctgaacgcctccatctctacggagttcgtcgcgcccctcgaatgttgcgtcacaactgctgtactagatatgtggcatagagcgtgaaaagtcaaa

SEQ ID NO: 113842 - DNA, 397 bp, Glycine max
  unsure (1)..(397): unsure at all n locations
acctgcaggctgcagctngaactcctagcancaaaactttattattnnntttttttngccnngcgctaagcgcctcactttagctctaagcgttattcatcgcgcgcctgtataaggctaagcgagacttgctcgctaagcccaatagcgtctagtagtcgagtcgcgctaagcgagcacctctcgctaagcgcatgtttaaaactgttcttccctgagctaagagagtgcctatctcgctaagccaattatgcagaaaagattttctgtcataactcgctaagcctatgagttgattctcataaggcacgctaagcgagcatgatctcgttgagcgcacactgtgttcttcagttttttatgcatggcttcaatttagataaaagttagctaatat

SEQ ID NO: 113843 - DNA, 324 bp, Glycine max
ttatagacaccactctattaatggaagagatagaggaattgtcattgcctctttcatcaagtaagcattagattatgtttcacttcacggtgaccaactgcctaattgctatgtcccaactcataatgaaattatggacccaacattcaacctccttgatgattgatttgggccatgcataaacctgaaaagattactaaaccatgtgcgaaatcacttatttaatcaattgtgcttgacccatgatggagagaataaaatctttccaaaaataagcctatccttatatgatccacaatggccccagtgagagaacaaatttcc

SEQ ID NO: 113844 - DNA, 469 bp, Glycine max
  unsure (1)..(469): unsure at all n locations
taagcacctgaggctgcagcttganggacaccacattccactcacagtttctttctaacaatnctttattcctacacttgtacagaccactcctttcacacccaattaacacaaatgaacttcttcctctgctaccagtatctgtgtcaaacctcatacccactgcaacaaatccattttcatgggcaactgttcgagcccactacaaaacatcatctcgagtaccaaagacctacaacgcaactccgacatattaatttttatacgaaacatacgttcaaccaaatgactcatactaatgaacatgattacctgacaagtattgaaagcattcgaacaatcaaaatgtggttcattcacaccaaaatcttcttcattctcataatctatatgaacttcttgtgacatcgttgtagaagcaagcttcatgatgatgaatcaagttgattcaagtagttttgatgatgac

SEQ ID NO: 113845 - DNA, 414 bp, Glycine max
tatcattgataggatgtcttatgttatggctcgctaaacaccctagttggggatttctaatgaacaactgatgtatatacctaatatctaattgattctgttttttgtgttcaatggtggatgttcgtatgcttttggtctgatcacccatttgtgtgcacagctaggtgacattagcattgggaaatgtgctgttgccttagaacttaattgaagcgggatcgaaacttattcttacatatgggatctacgagttaagttttggttttaattatgctgatacaattattgctgttagtttaggcctattcttacatgatggatctactaacgaagctgatgctaaattaggctaaactttcgtaagctacttgagctgattctagtcttacacgatggatctgcggacataac

SEQ ID NO: 113846 - DNA, 300 bp, Glycine max
ttcaagaatcaaagttcaagtttcaagtttcaagaatcaagaataatcaagttgaagattcaagaatcaagataagtactaaaaagtttttcaaaacattgagtagcacatgaatttttcacaataccttttaccaaagagtttttactctgtggtaatcaattacccaggttactggaatatgatttctatgcggcaatgttttgttttccaaacaccatgcatgtgaatgtacaaccgttccatccgatttcagatatggtgtaggccattacaatatattggctatctactacccat

SEQ ID NO: 113847 - DNA, 437 bp, Glycine max
tccggtgtgacatcttgacttgctttccaatctgacattctcctctgattctgccttcttctattttcagattgggaatgcctctaacagcacctttgtcaatgattttcttcatgcctcttaagtgcagatgtccaaatctttgatgccatattctgacttcatcttctttggagaatagacatgtggaggagtaactggtttcttgaggtgtccataggtaacagttgtcctttgatctgctgcccttcattagaacttcactcttctcatttgtcaccaagcattctgactctgtgaagtttacattgaatccttcatcacacaactgactaatgctgatcaagttcgcagtcagtcccttcaccatcaggtactttgttcagactatgaagtccatcattgactatctttcccattccagtgatctttcttta

SEQ ID NO: 113848 - DNA, 449 bp, Glycine max
ggatccttaagcacctgcaggctgcagctgactgactactcgctctagtttgatggggaactaagcacaacgtcacaatttcagagcctatttaaagcttgttttgtgcagaattagggtacacttttgacaacagcttgacacagacttgtgcacactattctaaagtgcctatttcgggaaaaaagccctagaagcagcaagaggagcaacttgtgcattgaagcctaggttttgcaatttgagagagattagtgagttgaagagtgagtgtgagatgctgagaagaggaggaggaatcccccttcttgtgtaaggaactatcattctctacttttaatctcatttattgttagggtttctttgtaatggctggctaaacaccctagttggggatttctaatgaacaaccgatgtaaatatttaatatctaattgattgtggtttct

SEQ ID NO: 113849 - DNA, 358 bp, Glycine max
  unsure (1)..(358): unsure at all n locations
caataatgatggcccggtgtttgttgggaatggttactaacccggtataggtttatgcaaatacaacggcggcgtaacttgcctgattaatgccacaggaaatcgtgggaagtatggcttatgctatatgcccactcatgcatatgttaagagaatcatcgcgggaangaaaggcggtggtcgaagctcgcggttgagactactaagtgaatgatgcccgccctgccacataactagaagctttattagcgcgaggctgcgagacgaacgtcaagtgttcgcaatataccaagatgacgtcactatgtcatctgatttgggaccaccttgcactgctgatttcagctggagaattggc

SEQ ID NO: 113850 - DNA, 490 bp, Glycine max
  unsure (1)..(490): unsure at all n locations
gatccttaagcacctgcaggctgcagcttaagaatatggcctattttnactttttattttagaaggaaattcaatcaatagacctccaaatctttaatggagagaattaccactactggaaaacccgaatgcaaatttttattgaggcaatagacttaaatatttgggaagccatagaaataaggccttatatacccacgacagtagaaagaaccacaatagatggaagcacaacaagtggaagcacaacaatagaaaaacctagagaaagatggtctgaggaggatagaagacgagtacaatataaactaaaagccaaaaatataattacatctgccctgngaatggatgaatatttcagggtttcaaattgtaagagtgctaaggaaatgtgggacactntacaagtaacacatgaagggacaacagatgttaaaagatctaggataaacacattaactcatgagtatgaactatttangatgaatgc

SEQ ID NO: 113851 - DNA, 417 bp, Glycine max
tcctcctcatagttgttgcatgagaaaacatgctctactttcatcttccactccaagtatgcctccggatcattctttcctttaaagggaggaatgttgagtttaataccatcaattcggttttgtctatgaacaccatcattccctcttctcctcctttcttcttcattatgatctctattctccatttgatccaacctctcatggagtgcatcatctcgttgtttcattaacctctccatatgttgcatcaaagcttgcatttggaattgcgaaagcccccctccatcattatgatatgttactgccatctcaaataaacaaatcaaacgtaacaagacaattattgttgctgtttgaatacctcacccactcaagtgtatcacacaattatggcttttctctaatgaaacactc

SEQ ID NO: 113852 - DNA, 437 bp, Glycine max
  unsure (1)..(437): unsure at all n locations
ggatccttaagtcacctgcaggatgcagcttcttctatgaccctgtcatgttttttttttataccactngacgaaacttagcaagtacaggtgggtgtgactgtacatcaagaacacgagctgttgtcatccatatcacaggtgatcgcagctgaatatactctaaaccacgaatggtgtcgtgacgatccccttccgaagtggaaagaatctatgcctacatgccctgctcatcatgctcaagacaggtgaccaaataagattggggctctggacaattgctgataagctacttgggcatggacctctctacttatctaatagcgaacgatgaagagaccacagtgctatccatttcaaagaacactggaagagatgcagcaggtgaatgagactggggtgtttgggcaaaatggtgcaatagatggtggcacata

SEQ ID NO: 113853 - DNA, 439 bp, Glycine max
  unsure (1)..(439): unsure at all n locations
tctcatntaatctcatgaaactctcatcagaacatcttattgtttaaatgctgaataaagacctgaagcctaatgaactgagtcagcccattccgtgagttcttattcacgatggactacactcttccttgacaaggtacggaccagttgggagacaaatgatcattcaaattcattgtcaccgataatggcacaattatcaattctaaccattatatgctccctatgtcatattggcactgaattactgtatcacgtaatttgcacaatgcacgcttataatcatatgtccattgttcctcttttgggtcagcatatctccattgttcattcattcccgaagtcccaagcatcccgagcactaggataccgaaacactattgtcgcctctaaaattgccatttcgagagatatatcctccccaccataccaatattaa

SEQ ID NO: 113854 - DNA, 443 bp, Glycine max
  unsure (1)..(443): unsure at all n locations
gatccttaagcacctgcaggctgcagcttaagttccttgaccaggatgttttcttatacctaataaaagaggattganttttttttctttttttataattatttaatgtctaacttttaataaataattttaaaaaaacttattatttttacacaaaattaaaacaaaattttatattaaatgatgatgtatttgattgttattgtaataacaacaaacataccactaattttaacaattntatactaattatcactttaatcagtagaataaagcaataaacataattaattntacataattttgtattaattaatattaatcattattataataacaacatagaaattatttttatataaaaattttaagggaggatgaactcgaactcctatttacccnctatagatcagtcccngaattcttgacaccctctccaatgg

SEQ ID NO: 113855 - DNA, 435 bp, Glycine max
  unsure (1)..(435): unsure at all n locations
ngctgaagccgataatggcgaatgaagatcatggcgcgtcttttatcgttgaccgtaatcctatatgccatggacatcatgtgaacaaacccaatggtatcaatcactctgctgcattatctggtactatcttttctttttttttcagattctattaaggtctgcaacccggatttttattttgaaatgctttcattgctttttatttatttattacaccactattggtgttatgctcagaaatcaacaacagaatgttaaaataaacaatatatacagaagcacgcataagatcgatgaagtttaattactaaaatggtcttgttcaattaattgaataatgtatacgagttgctgtaaatttccttgttaccggagttcaattcctaccaataatattaaggattaacgatatttgacaatttgcttgtcatc

SEQ ID NO: 113856 - DNA, 309 bp, Glycine max
catcatgcaagagcattaagataggctctgacgttacaatatttcttagcgatcataactctatgttctaatcaattaccagcatattcataatcgattacatacctgtctgtaccttacaaagaagtctcttgtattaggtcaatcgattacgaaataatcttaatcgattacacattcacatgagacaatgattgggttctcaagagtctctgcttcatcaattccattgatcgcatgcattctttctcttaaagtgtcacaatgagcataattattaattgataataagatctatcgttacttgtc

SEQ ID NO: 113857 - DNA, 310 bp, Glycine max
gtcatacctcacaacggtaccatcctgctaacacctctgtgatcacaacaagcctggtggactgggccagatgctactttttgtattgcattcatcacactgcatcaaatgttgataaagacatgaataatatggacttaaaagaacaagacatcaatatgggtaagtttctaaccaccttatccatcaaataattcattcattatgtgtgcaacatatttattactcatcggtttgtctgtagccatcagatatgacatgaggaaaccatgactggaggcaatagttctcacgatgcgatcaaagtttc

SEQ ID NO: 113858 - DNA, 444 bp, Glycine max
cgcttgagcatattcaatagacataaactttttactccgatgtccgattgtgtgccgtagtatatcgagactctcctaatggaaaatagaagctcgtagcaaattcaaacgacaataactttttactcatatgtccgattatgtcccgtagtatatccatacactcgtaattgataacagaagctcgcagcaaattcaaacgacaacaacttttaactcagatgtgcgatagagtgctctaatatatcgagacgctcgaaattgaaaacagaagcgtctgagcatattctaaggacaataacttatatctcggatgtacgattatgtccgtatatatcggatgcgcgaattgaaaaggaagctgggaccaatactaacgaccatactttcactcggattccgattggaccgcatatattggacactcaaattgaaacatatctc

SEQ ID NO: 113859 - DNA, 379 bp, Glycine max
  unsure (1)..(379): unsure at all n locations
agcttanggcatctagtaaccaatagaattttgttttctngtctttgngagatcgncggcatggagccaaccaccagttgaagaaaaggaactgatgntattcaccataaaaaccaatagtgagctcagataaaagccgatgagtaagaccatatgtgatggcagtgaagatgtctgcaccctttaaggactgttgtaaanaactaatgacccacagtgtaacattcaacaccaaaattaaatgtgggtatcaaaatgttagtcgtgagtcaactgatcttttttttccangcactaatataaaatgataaaaacccacctttctgaagtaattcgactatgcggttttttcaaagacaaacttatgaaggaccacatg

SEQ ID NO: 113860 - DNA, 344 bp, Glycine max
tctcagcttggattcacttcagtatggaatctatccttcctaagatgtgttcttaaccctcattaagaacaagcgtgttccttcctttattgactctatttgaatacacccctgcttggttctctatatggatcttaaccctctcatgcaacttctttactaactctgacctacattccccctctttatgtttaaaagaagtgtccagtgggaggggaatgaagtcaaactgtgtcagggggattaacccatatacaacctcaaatggggactgcttggtggttctattaaccctcttgatgatggaaaattctacatgaagaagattctcattccaagactta

SEQ ID NO: 113861 - DNA, 291 bp, Glycine max
ctatacccagacggaggtcagtaatggcaaaccatcgaggcggttccggctattttgcagaagaccgcgaaagagcatcagaagcaggtaaaaaaggtggacagcacagcgggggtaatttcaagaatgacccgcagcgcgcatctgaagcaggtaaaaaaggtggtaagagcagtcacggcaaaagcgacaactagccgggctaatcaatgacgaatgcatttttgtctgtagctcgtcaaaaagccatcaccgccggttacccggtggttgatactgatgacaaatgta

SEQ ID NO: 113862 - DNA, 359 bp, Glycine max
  unsure (1)..(359): unsure at all n locations
tacatttgtcatcagtatcaaccaccgggttaccggctgtgattgtttnttgacgagctacagacaaaaatgcattcgtcattgattaacccggctagttgtcgcttttgccgtgactgctcttaccaccttttttacctgctgtagatgcgcgctgcgggtcattctcgaaattacccccgctgtgctgtccaacttttttacctgcttctgatgctctttcgcggtcttctgcaaaattgccggaaccgcctcgatggtttgccattactgacctccgtatgggtataaacatcatatggcatagaattaacgcggcgtttggcggctgccatattttcgctacgtgggactaagct

SEQ ID NO: 113863 - DNA, 430 bp, Glycine max
  unsure (1)..(430): unsure at all n locations
ttaagtcaccgcggctgcagcttactcttactgcgcaaggcggtttaaattttttctctggcgtgccgccaattaaagagctgctcaaacgcaccgataaacatattaaaggcatggtagtgcctggcacgttgtttgaagagctgggctttaactacatcggcccggtggacggtcacgatgtgctggggcttatcaccacgctaaagaacatgcgcgacctgaaaggcccgcagttcctgcatatcatgaccaaaaaaggtcgtggttatgaaccggcaganaaagacccgatcactttccacgccgtgcctaaatgtgatccctccagcggtttgttgccgaacagtagcggcggcttgccgagctatacaaaaatctctggcgactggctgtgcgatacggcagcgaaagacaacaagctgatggc

SEQ ID NO: 113864 - DNA, 355 bp, Glycine max
tcgtctagcgactaccgcgtaatgttgcctgcgttcttcagtatgataattagagaaaatatgattaaaaatttgccgcaaatagtgttgttgaatattgtcggcctcgcgctgtatctttcctggtatatccccggtaatcatggattctggttgccgattgatgcggatattttttatttctttaatcagaaactggtcgaaagtaaggcctctttgtggctggttgcattgaccaacaatcgcgccttcaacggctgttcactgctggcgatgggtatgttgatgctgagtttctggctgatagaaaacgcccctggcagacgacgtatcgtgattattggtctggtcatgc

SEQ ID NO: 113865 - DNA, 309 bp, Glycine max
agcttgatgtcattcaaaagacactatgtctacctatatgaagactaaacatgcaatggttatgtaattgtattcattatgagatataatttggtggaagccattactaaccaattaataataataaagacctcgttcggtaaaaaaaaaattagttggtcgacaaaatcattattctgtacatactcgtgcatatgacaccaagaatgctcgataagtgacccacctgagatgaaccatgagacaccacagccctgattttgaaagacacggaacgtaaaacaaatccttgtttccatgcaaatagac

SEQ ID NO: 113866 - DNA, 409 bp, Glycine max
tagcatcaatcacctcactgaccaaacaaacgaggaatttgtggcttcccataatggatacaaacacaagggatcacattcacaaacaccattcaaatatgaaaacatcactgtgttggttaatttgaaaatcgagataatactggataaatctgaagtcgtgtataacactttcagattgaatcaaatttcggggttcaaccaaaattgttcaatcggataaaatcagaagattataattcaagagttctgttctggtcttgtatgttttgtcacccgttatgctttctgaaccagaatgattatttatgatcaaagaacaaatggtttttggcggttgatggaagttatttctttttaaaacctgccgttgatggaagttttagtaactcccatgtaactttcaacc

SEQ ID NO: 113867 - DNA, 402 bp, Glycine max
  unsure (1)..(402): unsure at all n locations
gcttgctaacccatggaagctcctaatatctctcacactntttggggtgggccattcttggatggctntgattntctctgggtccacttggaccccatttctaccaactacaaaatctaagaaaactatattatctacacaaaaggtacacttctctatatttgcattgagggtgtttttcctaaggactgaaagaacttgcctgagatgtcctaagtgatcatctaggctcctactatacactaaaatatcatgaaaataaacaactacaaatctacctatgaaatcccttaagacatgatgcataagcctcataaagggtgctggtgcatttgtgagcccaaaaggcatcactaaccattcataccaaccaaacttggtcttgaaagccggtttcactca

SEQ ID NO: 113868 - DNA, 94 bp, Glycine max
agctttatcactattcattcttgagctgattaactatgttggcatgactgtgttgattggatgatcatcgtgtaagaatcgaatatgagaatgg

SEQ ID NO: 113869 - DNA, 298 bp, Glycine max
cgcttgagatatgagtcgcgccaactagcctgcgtggcgataggatagactgtatcagcctcctgggtgatgtcgatcaccaacactatgttcaatggacttaccatccggatagcatcaagatgtggccagaggagatctcagacagagcttgatgaatcatacatgagatgtcaaagaagatacatatctcgctcgagaagtgcatcacatgctgcatatacgatctagagcctctatagacgaacgatcacaatccttgcatatatactagttgtagggaggcacatttctttca

SEQ ID NO: 113870 - DNA, 408 bp, Glycine max
  unsure (1)..(408): unsure at all n locations
ngacaacgcgactgtactatgatctcgctgcagtgttaatatattctctaatggccacctcgtctgcaacttgcatactaagactctcgtgctctatcgagatgttactgtctaatagcacgcttctcggaatcgagacgaccaacaagaggctagcatccctcctatgcccgctctactgactcaggaagaccatgatgaaaattacctatgtgatccatcttttactgcccactgcacctggatctacaactatcttcaccagattctactgcgatatgactacgatcttgggtggacatatatgaaacctgttactaggccatacttgtacctggatgccgtgacgaatcgtcattacaatgaagtatgggtcacggaattgcgaataagagactcatgcgatct

SEQ ID NO: 113871 - DNA, 379 bp, Glycine max
  unsure (1)..(379): unsure at all n locations
ctataggacgaaacacaggtcattaacaaatgcagaaaacaaaaaatcaaaatataccttcaaccgttgtcatgaaagagttatcttgttttggttcttccaaactctcatcctctctttgtagatggtgtatcaaatccaaacacatgtactatatacagacattctactatcaagaatgtatttagtagtcattaccactaattaatagtcattaccactcattaatagtcattatcactcattagtaatcattcaatatttggctttccaactccaaaactgatgaagtaattgacatgatataacgtacaaacaaaaaaatattacattaatatatcattaatttatattattncttataaacatgttcctattt

SEQ ID NO: 113872 - DNA, 456 bp, Glycine max
ggttaaagaactaagataaaatcaagaacaagcttgttcacacatcgttcgcgtgtatgatatccactcgacaaggtgtgaagtatatgagaccttcaatcctataacgcaacgtggcagacaaaagtgggcagtcaacttgaatggccattattgccaatgcggatagtattttgcgcttcactatccatgttcacacattattgcaacttgtggttacatgagcatgaactaataccaatatatagatgttgtttacacaaatgagcacatcttaaaagcttactccgcacaatggtggcctcttgtgaatgaagcggcaattcctccttctgatgacgcatggacacttatccctaacccaactagaattcatgcgaaaggtcggccataatcaacaaggataaggaatgagatggattggctcacaccatctgatgcaccactataatgttg

SEQ ID NO: 113873 - DNA, 309 bp, Glycine max
  unsure (1)..(309): unsure at all n locations
agcacctgngctgcagcttcttctcctctcgatttgnttccttcctttacgcaacagcttcttcttcttncaaggcaagcgcgaagctcgtcttcttcttctccgcgaacgatgttagtgtccctaactcccctttgcttgtatgatacaacattgttgtagcagtggaaccttatgataataaccctatggtagaagacgagaggagaagatgttggaaaaaatggggaaaggactcacggcggaggcttccagaagacccgttaggggttcttccggaacttgcggaagaacctgttccggaaactt

SEQ ID NO: 113874 - DNA, 465 bp, Glycine max
  unsure (1)..(465): unsure at all n locations
agcttggcttaacgtgcgaagttttgtgtattttcaaggatngcgctcagcggataagcaatttgaaaatgtttctaagtcattttctgcttatctcttcacacataatataaaaaccctttttgcgcattactagacaagctgaaatcaatcacaatcacaagcaagatgtcctaactagatgcaagaaataaaaaatgaagattgagaagggaaagaaaagctgggttgcctcccagtaagcgcttatttaacatcattagcttgatgcatcatactattatctatgatccaataatgtccctacttcaaggactttgttctcaagtcttctttcctccatcacatgaactttaaaatagacattttggtcaggtggttttttatcttcatgaaatagatcaaagatgattttctgatcttctatgcccagttgcaacatcttctttcccatatctactacat

SEQ ID NO: 113875 - DNA, 387 bp, Glycine max
tacgtattgtcaaaggtaaagactcttcttgtggccttctaacattcagtttggccattcacgcccacaccattctactccttcttaagatataggcaatctctctgaatatgccccttttgtctaaagttgaaatacgtcgttcctttatcagcataatttaaggagatatgctctagcttaccacacttgtaacaagtgatctatgctgagaaagtagtgagtttactaccactaccaccatcaaaccccataacatcatgtcctctgattcttggggcaattaccatactgcttatgaggggtcgagtacggtcttccctgattttgatgtccattcattttgttattcattgggcccacatgttcaccataagtggaaattga

SEQ ID NO: 113876 - DNA, 380 bp, Glycine max
tgtgtcttatatggatgctagttcaaggtcaggaatcgctgggctgcgactaaaatccatatgaaagtttatttcgttattttttctgttttgtcctctgcctatataaagtaaggatgtcctgtttttttaggataagcttccacttgtatactgcatcagtaataaagaaaagctctatgttttccctctcgtggatgtatccttgatcaaaggtgaaccacgtaaatctgtgtgttctttctcatctctctccccctttcaatttgctgcagaatctgtgtgtatggcatttttgttctgatgcatctactgttgttgttacttattgatcttcatcacttccataccagaatgattttttacactcctgtcacatg

SEQ ID NO: 113877 - DNA, 446 bp, Glycine max
  unsure (1)..(446): unsure at all n locations
tgtgttctgctggatctgtatttngcgctattattatgttgctcgaatgcttaatataatactatgctgatgaagggtgaattctttaccacgtcaccaaccatactattcaagagtctgtacctacggcaatgccccaaaaaaaaaaactttggctaaattactcatttgagacttataatttcacgatttttatctttctagtccctatagtttgaaaatgatttttttagttcttataatatacattttaattattctttagttcttggaatgtgaaagcgattcttttagttcttataatgcatatatatatatatatatatatatatatatatatatttttatcttttttctttaatctctatcgctcgatagtgacatttttagatattatattgtaaatctcatctgagcctgtatatcaaaatatgattaatattatc

SEQ ID NO: 113878 - DNA, 389 bp, Glycine max
tctagtcaagggccgagagaccatacaaggttcctaacgatttctaattatgtgggccattaagtctatcatatgcttgacatagccgagaagcccatgaatctcttcgggggcggagtaagtgtctgccatcgccttggccttggctaacaagcggggaaggtctttactcccgctcaaggtaagaggaaaccgatccatccacatggttgcctcttggtgtaaagagtcgaacacccttccttttacctttttttccgcgtatacttgagcatactcgggcgtgattctatgctcgtgggccgtggctatacctcactcttctggtacttggcgatgatagctaccatgttggtctccgtctcgcataaacgctgagacaagcttct

SEQ ID NO: 113879 - DNA, 362 bp, Glycine max
tttatgtagaggagtgactcttacatttgaattgttgtcaacgtcaaagaaactggtaatcgattaccaatacattgtaatcgattacagctgtctgaaatcaattggaacattgtaaattcatttgaaaactttttcaaatccattgtgctactggtaatcgattacaacaatctggtaatcgatttccagagaataaaaactttttggtcaacatattttgagaaaaatacacgtgctactcagtttttcacaaaaccttttcatacttatcttgattaaaacttctcttgcatctagaatcttgagtcttgaatattgatcttgattcttgaagcttgatccttgaatactgattctcg

SEQ ID NO: 113880 - DNA, 382 bp, Glycine max
  unsure (1)..(382): unsure at all n locations
accctgcattaggtaccatgttcaattatttttaaagtgaaacgggtttatgatcccaacatggttggctcgtggtgcctaacacatganactaagaatgtagtgtgaagtttcacgcttcccccttttttgtttttgttttgtagaggaaaacgcaaggatgagcaaacatgaaaacaaatggtatgcaatcttgcagatcaaaaagcttgttgaacgcatatgcatgatgatgccatgactcatgcataatgtgaggctggaatatgattaccgacaaatgcaggatatgtgcattatgatgttatgaacagaagcttattncgtgcatgatatgaatgcattttcggacacgagagcccggaaaatattctttcttact

SEQ ID NO: 113881 - DNA, 351 bp, Glycine max
cacttgcctccccatgttgaatatgcgtacaaaagagctgtttttatcaccactaatcgtacaactcttgaagtggtttatggttttaacacactaactcctcttgatcgtttgcctacgccttaagtttgtgttgttaagcataaaaaaagtcaagcatacgcggactatgtgtaaaagcttcatgagagatcaaagaccaaattgagaggaaaaataaaagctgtgctatacaagccaacatagggagaaataaagtggtcttcaaaccccgagattgtgtttgggtggcacatgagaaaagaaacggtttcggaacaaaggaaatcatagcttcaaccaatgggagat

SEQ ID NO: 113882 - DNA, 169 bp, Glycine max
agcttgtatcgctatcggcagcagcgggactcatgctgtatcgccattggcatcagcgatacacttgtatcgccattggtagctgcggaacaaaagctgagtcactctgcgtgccgctattcaagctggcgatacatgctgactaagcatgtcgccattaggactggcg

SEQ ID NO: 113883 - DNA, 164 bp, Glycine max
  unsure (1)..(164): unsure at all n locations
gctatttatatttggatgtagnggctataggtttttttattgtggtttcaaatatatatttttctcaatttatgttgtggttgaattacttttttgtgtgttcatcaacggnttaaataacacacgtctcataatggtacaacaatgggctcttatttgattca

SEQ ID NO: 113884 - DNA, 327 bp, Glycine max
aatcccactggtgtttctctttactcttccagccggtatagggcggtgtagtccatggtcttttacataatcccaacttacacctttataaatggatactaatgcccctattcttttctcgcatgcatgtcaaatgtaaaagataacctctcgtttcgtgtctctcgctctaaacacgatttccaattttctttctctataaatgggaacaacatttctgttatccaacgattgcctccaaggccggttcctgctctacgtatcctgcgcaatctccacgctccgtgttgcgtctggaaaaaccttaatttaacaaattgccatata

SEQ ID NO: 113885 - DNA, 407 bp, Glycine max
agctttactatgcaaagaataaccaaggaaaattccttcatctgacttagcatcaaactttcctaagttttcttttccattgtttaatacaaaacacttaaccaaaaacatgaagatgtgagatgtttggttttctaccattgaacagttcatatggagttttctttgagatgggtcttattaaagccttattcatgatataacatgcagtattaacggcttcagcccaaaaatattttggaagaggagtatcatttaataaggttctagcaatttcttccaaagacctatttttcctttcaacaactccattttgttgaggggttataagtgcagaaaagttatgttcaatgccatgcttatcacaaaataaatcaaattctttattttcaaactcacccccatgg

SEQ ID NO: 113886 - DNA, 291 bp, Glycine max
tcaaactgatttttaatttttttcatggttaataactttagctatctcctaaattattattattaacctatgcgtatatgttatgtgcaaggatagtaatgttgatttgaatggttctccaaaaacacttgacaagcaccattatagacttactcctttatgttgaggtactgttttttgggaatttctttagtgtaaataaattcaggctaaggaagcttcaggcttcaaactgatttttattttttccatggttaataactttagctatcacctaaattattattatta

SEQ ID NO: 113887 - DNA, 397 bp, Glycine max
gtgcttcaatatcctgatgatgatgttccatatgttctcaagattggactaatacatttgttgcccacgtttcatgctcttgcaggtgaagatccttataagcatcttaaggagttccatattgtctgttccaccatgaaacccgctgatgtcctggaagatcatatctttctaaaagattttcctcattctcgggagggagttgcgaaagattggttgtactaccatgctcccaggtccatcaccagctaggatgaccataagagggtgttcttggagaaatacctcccagcatctaggaccactaccatcagaaaagacatttcaggcatcaggcaacttattggagagagcttgtatgagtactgggaaagattcaaaaaattgtgtgcaagct

SEQ ID NO: 113888 - DNA, 291 bp, Glycine max
tgcgtagataaagaatgctaatgcatgtctagcatccattgcctgaacataggaataaaaattggatatcatcatattgtacaattcggagaaatagaagactagatgaactgaattgttcaagtaatagactgacctggcacaaggtcaatgtcttggcaaaggtatccttgccagcttgaattttatgggtagataatgctgccattaactcatgggaactgcaacccattaccaaagcaacatttgttacagctgccagtagaaaagaacaaccatattcatgcttta

SEQ ID NO: 113889 - DNA, 406 bp, Glycine max
  unsure (1)..(406): unsure at all n locations
agcttatggatgagaagaggaagcattgagatgatgtagctgagcttattgaaaacccatcattcaacctcgaccttccatccccagtgtcgagacaacttaagtggaagatggcccacacaaagcgctttggccaaatgacctctgtagggcacaacatatttgagaaaaaattgtgagttcatgtggtgttcacttacagtgatggtcaaataattgtgtcataagaataaacttaatttttttcaaattcaaaaaatatgnttgcatgcacgattcattagaggaacacgcttcacaggggagttttgttccgcatggccatcaagacatactgaacatggctttaggtcgacatgagcatctatgccgtgttcgtgtcacagggacatgtgtcataatatgc

SEQ ID NO: 113890 - DNA, 286 bp, Glycine max
tcaggctgttcaattgctccatgttgctgcatggaagggcaaaggtctgtatggtggtcatcagaggagcacaaaccacaaacccttgcgacaggtacagatttctgattcaaggccagctgggttaccaagttgaccaacgcatccagtttgccttcaagcttcttagtttcagatgatgcagatgggtttgtagctacctcatgcactcctctaatgactatggcatcatttctggcactaaactgctgggagttggaggccatcttctcaattaaatttctgg

SEQ ID NO: 113891 - DNA, 286 bp, Glycine max
tgaagacaagactatacgaggtatcttccttgggtatagcaatatctctaaaggctaccgtgtctacaacttgcaaactgagaaactcgtcatcaattgagatgttgaaattgatgagtacgcttcttggaattgggatgaagaaaaagcggagaagaacattcttatacccgctcaactacctcaagaagaagctgaggaagaaaacccaggtgaaccacctttacctccaccacaacaacaagattaagatctatcatcaccagagtctactccaagacaagta

SEQ ID NO: 113892 - DNA, 384 bp, Glycine max
agcttgtgccacccaaatagcatatgtttttcatggttgatcaacctaggttgtggttacaaatttgagaatctctcccataaccaaatatgaaccaagtagtaaaagggtgaccaaagagttaccttttatcatcagccaaactaactattgttttcttcaacagacctaaatcatcttatatgttggcttaaaatattggtcgccaagctgattatctacatcaaggaaaacaaacttgctcaccaagccatcgggagagaaatcaatttctgccacccaagttgctaggatatgatctttgctaatttatatatcctattattcgacgaatacccacaattgcttagtgttaacactactcttttttatccttattatctc

SEQ ID NO: 113893 - DNA, 282 bp, Glycine max
tcattaagaggcttctagcacactccagacatcttctgaaagatcccaacggtcagatcatggaaaagtgttttgtgaagttgcagaccaaattttgagaagatccaacggttaatgaaggccgggcagcgtttttatcgaggcagcttcatgtagctttctctagaagcttcctcgtggcttctttgagaagctttctcaagaggcttttttgagaagctacatccttatctatccacccctctattaactaaattaacttccttaaaaataattacggat

SEQ ID NO: 113894 - DNA, 289 bp, Glycine max
tggaaggtgacaaacgactcgttgagcgagctcatgatgcattaagcgcgtgtctacgtgacagattcccttccagattcctcctatccactaaacgcattgatgcctcgcttagcggatgacactcgctaaacgcattgagctcgctttgcgagacatcaactttagcacttcttcaaaataactcattttttcttgaaattgaagagaaattgacattaattctatacacaaggcttctactgagcacagataaaagcaaagcaaaattatttacaatcctacaaaa

SEQ ID NO: 113895 - DNA, 394 bp, Glycine max
ctctcctatgtatttatgtataaaattcccagtactgttatatcatatagtgtaagatgttccgatttcaactcccttttgtaaacttagatctagttattttggtcactatattgtttctctgtttaatggcttcaataatgaatgtccagcagattgtaatcacccttgaaatatatggtgtaaaaaacatcgtggggattccttttggttatcggggattttctgacaaagaattgacagaagtgccggtaatctcatttttccctccttgctgattctggtgtaacagaagattcatctaaaggtacagtctgtagcacataagctcttcctaatgactcttaactatattgggctttcatttgcagttgtctagaaaagtactgcagaa

SEQ ID NO: 113896 - DNA, 288 bp, Glycine max
ttccttttgagttgctatccacattaaagatgcttcttcgcaatgaggattcgccgatgtccctaagtatcatagcttcaacgtcgtaagtcagtcgaaatggtgtctcctatgtggtgaattggcaggtgcaatggtatccccatagcatgcttgggagattgtctacccatagccccttggggactttagatagtcttttgtgcaactcggcaaggatgactttcatggcctatgtttgcccatttgtttggggatcttatactaagaatgtaagatgtctgatgt

SEQ ID NO: 113897 - DNA, 284 bp, Glycine max
ttaaaaaaaaaaaaggaaattaagttagtattatatacgacaagttagtattttatatatatatatatatatatatatgaccttaatagccaaaaaagaaaaagcaaattaaccacttattttttggagcaagtgtgctacaaatccaagccgaaattgcttgcatcaatgccaaattaaccacttattttttgtgttcttatcaagtagactttacatgctttattaggctggtaatagaatcacatatcccaacaattctacagttcaacacaaattcatcc

SEQ ID NO: 113898 - DNA, 372 bp, Glycine max
tgcagcttgccacccagctcgcctatgcgagctaggttgcttcctcctgaagcaacctccttctggaggaacatcctggaaggcccaaatgggcctggttactatttgcagccccgtttttactaaatacacccccttcccttttttggtgattctttttccataacgttacagaaacttacgaatttcgtaacaatactttttttctttccgtaatgttacggaaccttaccgattacgtaatcatcccttttttgcctaccagaatgttacgaaactttacagattacgcactatgctttcttttggctttcggcatgtctcggaacttcacgaattgcctaacgatgggtgccaagtacctcaaagtgg

SEQ ID NO: 113899 - DNA, 279 bp, Glycine max
taatcccttgaaaattgacggtatgagatttgccctggattcacctacggactactttccttggcacccttatgttcaatatgtttgataaataaacatagttttgtttgctatgtgcatgggagtttcaatgcttgttgtcacacaaatgtattatacaaaagtacctatcacataaagattggctatgcatggaaaaattactatgtacccatatctaatgggaatttgtattttcctgcttggcttttttgagggagatgtcaccacacattatgt

SEQ ID NO: 113900 - DNA, 294 bp, Glycine max
actcaagcttggagaggatgcttcaatggaggaaaagaaagagggagagaaagagagaggggggagcacgaaattgaaggaagaaaaagggagagaatttgaactttgagttgtgtctcacaagactctcattcatcaaagttacaacaagtgttacacatgtttctatttatagactaggtagcttccttgagaaaacttccttgagaagcttctttgagaaaacttccttgagaagctagagcttagctacacacacccctctaataactaagctcacctccttgagaagct

SEQ ID NO: 113901 - DNA, 278 bp, Glycine max
tgaatggccagcttataggagtcctcatggttcactagcttcacctggcaatcaagcatagtgacactcgctgccgaggtcagtcaggacttgtacttcaacatgtcatccctcacccacttataaccagcaacagtcgggatggacgataatgacccaacactcacgctaggtcatacacggggagacgacctcacatctccactgctgctacctctcctcacacccccataagcatttatcatttatcatattcatgcattgcatttacataagtc

SEQ ID NO: 113902 - DNA, 292 bp, Glycine max
tgtgctagccactaagtgagttgacgtgctgagcctgtcttatacgctaaacgagttgtcctaatcttcaactttttcttcaagttttttgcatcaatttttcctcccaagcacttgtaatttccttcttttgaatcctgctggtcaaaaattaaaatgatattaaaatcctcattattccatttaaaacaacagtaaagtagacaaattctaatcattcttagtcaaaattgaaaatcaattaaacccaaattttgcatttatcaaacgatgtattcgatatagatccgcc

SEQ ID NO: 113903 - DNA, 276 bp, Glycine max
tcattgaccatgacaaattcttatctggcttcgacaaattctatcattagagattatttggctaaagtccaatgcttcaagtgatggaatgggatctggctttctctttccacgaccactaacaactttcttttctgctctactttgctcttttttcttttcttgccccttgatttgctctgtcttgtttcctttgacttatctttcttctaacctattgtttacatccctcactctctttctcctttaacgctttcttattctctttcctatttc

SEQ ID NO: 113904 - DNA, 416 bp, Glycine max
tcaacttaaaatcagcagtttctcaacagctcaaacagtgatgataaattattgaattacgccttgttcgggtaaaaattctccaataacccacttccaaagaaaatatgaaggtgcaaataaattaaagcttctcctattaagtttaaaattagcttcttcagaaaagcgcaactaaagataagtttctatcgaattaactcacatgataaaaagtctaattcatttctaccgataagcaattatggataaagtttatccgaccttagaaaccacaagctgctaacaacaaatagggaaaaaagcaacttataacaaagtgtgaagggtaccttggtccgtccatagggagttatagcttgttacttgaaatcctcctcacacggtatttcttcaggttggccataaacggttgc

SEQ ID NO: 113905 - DNA, 285 bp, Glycine max
tttgtcgtccggattaagctatcatttcgtattgtggggctacaatgttattgaatcatatatcagcaataaatataattggcttgcgcttcaaacaggttgttgaggattagagtattactacttcaaatggtgttgcggtgtcatcattcaagaggcgtgtcctttatctctttcctatgacatttaagttcgcataatagttctgactacttagtttgtccatgtcatctatcatctatcatgatacaaacaaggccctgacaatgcctacgtggcattgtc

SEQ ID NO: 113906 - DNA, 405 bp, Glycine max
agcttccacaatatccaaacaatttaatttcatttgtcatgaaactacccttaaccaagaaaaacagagtataggtagaaaactctgcacaaaactcattcaaattccacaatttttcctactcacataccccaataacattctttttgttctgattcgttaaccattggatcaccttgaaaatttaaccgagggttcctaatacagaaatctaagttttgaccgttgggatctgctagaaaatatctaaaacccgagatgtacaacctgtcctgtgactaacactgcacaaccatttttctgcataattggcaaaatttgctgcacaatttgacagcttttgctgcataatttggcagatttcgaaatctagcttgcttgtattcaatttcatttaaattggat

SEQ ID NO: 113907 - DNA, 284 bp, Glycine max
taccataccttcttagcaactgtatcattgcctttgttccccttaaagattttatccatcaatttgtggagaaaatgtccaaagggtccagagtaggcgaaaccatagagctgcgaatcaaattgcttagtccttaaaaatttcacttcaaacttaaatttctgcttcatctttttgagaaaaggtgaaacagttagcacagtgtgttgatttattttcatatgatcattggttgagagttatgaaatggttaatggcaaagaccatactctagttatcttcat

SEQ ID NO: 113908 - DNA, 288 bp, Glycine max
tcaagcttatatgaagaaattaaccagttgttttacaacatacactttgagtatgaacctatgcgtaaacattcattttctttatgtaaaaaactctttataaatttctaaataactcctcaaaataacttgattatcttatgagaaataactaagggctaagattgtatattcgtttgtaagacaattaaaagagctagtcattatgcatacaaacaacaaatttgtttgatttatataagggctaataagattgtatatttttctgtaagacgattaaaagctagt

SEQ ID NO: 113909 - DNA, 339 bp, Glycine max
atcctttgctttttggaagatgaatgacaaccgaatggaaaatgaataaaaataagaaaccccccttccaagagaagattagtctaaaagaagctcaccatcatatgatgccatggataaaaacttggaggaagaaagaaatgaatgaatggagatggagagaataccacaaatatttgtgctcttaaaagagctttgaaatctaaagtctaattttcaaatgaacaaagttccaaaaaatgcccacacctgacctctatttattgcctaagtgtcccttaaaattgaaggggaaattaaatttttattcaaatttcactcgaattggaaattgaattt

SEQ ID NO: 113910 - DNA, 286 bp, Glycine max
ttgtcatcaacttggtttgttattgcctgaaacgatagtgagaaatacttgtaaattttagaagttagtgaaacttggtggtttgtcaagagttgaacgtagtctctgtagaagagatgaccaatataaaacttcatgcgtttgatctttctctctctttgagtttaactggtctcgggtttgaaattgaatttgttttggaaaacatatttttataaaatatgttgatcatcatatgatcatatttgtgtcattgaaaaatctattatacattctttcaaatctt

SEQ ID NO: 113911 - DNA, 282 bp, Glycine max
tgtacgctgttcatgctcattttcattcttcaccctatagaacaccatccaccccaccactgggatgagcacaccaccctttttctttatttcatttccctttatattctcaattttagttcccttgcataaagtatctaaagattatcatgttgattctccactttttaaaatttctccacaagtactttaggagaagaaaattagaagataaaaatgtaaaatgaattgaactcctttcaagataaaatcaacttatgcactttaatttttggagaagtt

SEQ ID NO: 113912 - DNA, 281 bp, Glycine max
ttataagtgcgggtctgggatacgaaggtcaagtgttcgcgatatgtgaagatgatgttccaaggacttcggatctggtccgaccatgccctcctgatttccagctgggaaattggcgagtggaggaacgccccggcatttacgcaacaagcataatgtaaacctttacggtttttaaagctctatagttgggcctaggctttagagttttcgttttgttaaggctttgtgtcttttgtttttgaatttataatacaaggatctttcttcatctgttcctg

SEQ ID NO: 113913 - DNA, 284 bp, Glycine max
tctgagggtgtcttattgtgcgctgcttttttttataggcaaattcccttagcaatcccccaaattaagaacttatcataacttgaaacccttatactctcttagaaccctaaaacaagatcaagggtatcaaaattaggctcaggggtttattcaaacaaatcattattacttttggctcaataggggtgcaagggataaattcatcacaggttggctttttggctgagtggctaaaataaaaagaaacatggccttgatcatatccaccttatgcaaataat

SEQ ID NO: 113914 - DNA, 280 bp, Glycine max
tgcgggagttggcaggatctttaaacctagacacctagagcggtgcatcctttgcatacacctctacatttgacacacccaaggagttgtggtcttaccgcctgaacttttctaaagccgttcttggcccttttttaccataacagaggacataactcctcaatcggctgaggggactcctaatccggagtcaaggaattcaaaatgacacaatgctaaggctctctatggcatgtccttggctttatactacaccggtctaaggcatgttccgcccgac

SEQ ID NO: 113915 - DNA, 394 bp, Glycine max
  unsure (1)..(394): unsure at all n locations
accggatgccttggttaaacttggtaacccagctgaccttgataaaaaatctgtacctatcgcaaggggttgtggtttgtgctcctctgctgaccaccatacagacctttgcccttccatgcagcaacctggagcaattgagcagcctgaagcttatgctgcaaatatttacaatagaccttctcaacctcagcagcaaaatcaaccacagcagagcaattatgacctttccagcaacagatacaaccctggatggaggaatcaccctaccctcagatggtccagccctcatcaacaacaacagcagcctgctccttccttccanaatgctgctggctcaagcagaacatacatttcttccccaattccacaacagcaacaaccccagatacag

SEQ ID NO: 113916 - DNA, 290 bp, Glycine max
ttgatagtatataatatatgttaaataaattaaaaaactaaggaacagacaaaggaaaaattcttcataatacatgaaaagctcatatttaactaaaaatgttaaaagaatagggtacactgcaaaacaaaatgtctaaaccataactctaacaattgcatttccttttattctatcaaagtactttcacaagtcataaacagtcctggttaataacaataaaatagaacagcaatatagtaaaaatgatttcaaggtgatacgaaacctatcatccagaggctatttat

SEQ ID NO: 113917 - DNA, 274 bp, Glycine max
aacttcttaagcatagcttcataacatgtggtcttgaaaacttgagcgtggttaatgttgtcaagaacattgtacctgccagtgtgtcatgaatgagcgtgtcggattgatgcggtaacatgtgtgagccaaatacctttttatcgtcgtgagtgaacatgaatggggttgctgaaacttgagaacgttcaatacatctctcggtgactgtgtaattcatactccttatatattcactatttactctgtgtaagaacctctaagcctaccaatt

SEQ ID NO: 113918 - DNA, 290 bp, Glycine max
tgtttgcctcggtgaaggagaattctagatgttatgattaacacttgcacaaggtggagagctctagtcctagaataagcccttgttagctcaacctaattttctgcatgggtattaattgctatatcccatgtatttaactacatggatattagtaaatgcgggtaggtggcagtggcggatccaagaccctaagtcagtgggtgtaaattataaaaaataaaattagtagattcaattatataaatatagatgaaataaaatataagattttatttacaaatttgatg

SEQ ID NO: 113919 - DNA, 371 bp, Glycine max
taaacatgcgtgccatggcttaaagaatccatgatgtatcctgtatgattgaatagggggtttcgtcactttcggcgacatttgtgggagtgcatttgccctaaccttctaagagctattgctacccactccctcttttaagagaagttgttatgatgagaactcgtgctactcgtatcttcagtctcttctccctttgccgaacaatgaccgactacccggctgcatgctgtggtgtgtctcttgtgccttacaaaagatacgaaggactaaccgcctgagaattattttgatttggcccttccccttatgcaaaggatttcaatggacacaccgcgcgaaatatgtttcgtgtccccttacaaagatgc

SEQ ID NO: 113920 - DNA, 284 bp, Glycine max
tctcggctcatgctgggaacgcctctagttcaacacccgtgcagcctaaggcacccacccagagggaagctccccaagttccaactccgaacgcgactcgaccggccggtaattccaacacgacaaggaacttccctccgaggccgttgccggaattcaccccgctcccaatgacgtacgaagatcttctaccatccctcatcgccaatcatttggccgtggtaactcccggaagggtcctcgaaccccctttcccgaagtggtatgaccctaatgcaacttgc

SEQ ID NO: 113921 - DNA, 385 bp, Glycine max
agcttacaccaaaagaggagggggaatgctaaccctatcccaaaggggagatatctctcttgttataattggctgccctgaacatatctccaccattttattttttaattattaaatcaaacagacgcgggtcattatttgcttttttcgaaacttgcgttgagtgcgaatggagtttcacttttccaccctaatcttcttctcaagtgtaataagcgaatacatcaaggtatctatgtaatctactctaaataattttcaaatagtttaataaatagtgcactctatttgagattaaaataattgtattttatggactctgagtcattaaatcacctaattatttgtttaccctgcaatactaataaatgagtgtgtggaaagt

SEQ ID NO: 113922 - DNA, 281 bp, Glycine max
ttattagcgcgggtctgggggactaaagtcaagtggtcgcgatatacaaagatgatgttccgagtacattggatttggtacaaccatgccctcctgatttccagctgggaaattggcgaatggaggaacgccccgacatttacgctacgagcataatgtaaacctttacgggtttaaaaactctatagtttggcctaggctttagagtttcttttgttaagggtttgtgtcttttgttttgaatttataatgcaaggatctttctgcatctgatcctatgt

SEQ ID NO: 113923 - DNA, 201 bp, Glycine max
ttttttgaaaaaagagttatgctggatcatgtttcatgatttgcccagtttgaaaaactgggaagttagcccaatgtgggtttaggtaacacccctttggtaggacttgggtcatatgacctgttcacgggtctccaattccaaatcttgacccttcggatttgttggatacggacactcccggtcacaacttctaggaaa

SEQ ID NO: 113924 - DNA, 282 bp, Glycine max
tatactcattgagaagtacataagaactataataatatgtcgaagagcataataaaatttatacatcaataaagtcatcaccttcaattctatactcagtctaactttatgaacataatataatttatgaattggtgaacacatcaaattgtaagttcacatgattgaaatattataattcaagtttaagaaataaagagtatcatttaacatattattaaattaaaaaaggcaaatcggttgaaaaacataaaaaattaaatgttattcatgtcaccaagt

SEQ ID NO: 113925 - DNA, 400 bp, Glycine max
  unsure (1)..(400): unsure at all n locations
cagcttgaaagttaaaatttatgcaattgattaattgggttgcgaagttggctttgttttgtataattagtttaattaggtagaataaatgctcttaatcaaggctcattccttccttttgagtagtcactctatgtattagtgaaatttttttagttatttagttacttcattttgttcaaaaatagatttagttgattgttgtgtaagctttaggatcgaacttttttatctctttttctgttattgagacttttggcaagcgtaccaattgtcattgtaggtttcacatttataaaagagttcgtctccgtagggacttgagtttacttaattcattcggataatggntatcagtttaatagttatgtacaaatttaacctaatgtcattggttttg

SEQ ID NO: 113926 - DNA, 286 bp, Glycine max
tgttgttttttagctagacaactttttattactattttttattttctatatttttcttccatcttattcttttcttgctcgctctctttttgctcctttttttccatgagatattttgctacctaaacatacgtatatttttgtgaggtattttgctatatacatgcgtgtccaaggtatcttgctacctaaacatacatatatatgttttgtgagatatttttgctatatacatgcatatccaaggtatcttgctacctaaacatacatatatatattttgtgaa

SEQ ID NO: 113927 - DNA, 282 bp, Glycine max
tgtgcaaaggataggaactatttacgccgagccggggagagttttatatacctgtgctcaccgccacattataggtaatacacattctcctgaaaatggtatataaatagttattgctgctatggtcttacaaactcttctgcgatcattacaatatccaaacttataggacgtttctccttgaatctcaggaaatcactctatctatttgtggtttaactgctgaagacaaaatggtcctgttccacataacctcttttatccaccaacgttcagcgacta

SEQ ID NO: 113928 - DNA, 404 bp, Glycine max
acctgcggcatgcaacttataggagcctgccatggttaagtgaaactgtgttgtaatgaactctatgaatggcaggaaactcttccaacttcccttttgctctaagacacacgccctcaaaagatcctccaaggactgaatggtctgttcagtttggccattaatctgaggatggtaggctgaacttattctaagcttggttccaactgctctgttcaggtgatcggaaccgcacccgaatcaaataaacattaaaatgcagtatctttgaagtgatcctaagtcgtctcccagtgagtaatgatcaaacaaacgttcataacatattataataaaacaataaccaaatggaagggttgttttgtcttgtaatttaaacaacaagcaaacttgaattataaaaa

SEQ ID NO: 113929 - DNA, 282 bp, Glycine max
tctgatgcaattcactgagtttgaaataacttaagttggaaaatgagaacagtttttatgtaattcagagccattgagatgaaataaccccataatttaacttcatatgtcatatcaagtccagccgagacataattcgtgtctcatcttaatatatccttttgaaggagtataagtaaacaattgtctacattctacaagttgaaactcaataaaaagggcttacttttaggcctgagatataaaaaggttttatgtggacagttttttaattatatttgg

SEQ ID NO: 113930 - DNA, 280 bp, Glycine max
tataatgaaatgataaacttcaactttatttctgtagaaaatccaaacatcaaaatgtttgtaaaccattagatatagaacataagcaagactgccactaaactaaggtactatcaggaattacacccatatgagtagtatgcttatgaaaaaaactttaagtgtcagacttttagtaagtggatcatctagcatagaatgagtccctatatgttctatacaaatttgtattttttgaattctttatttaacaactaaatactttatatcaagaaacttt

SEQ ID NO: 113931 - DNA, 341 bp, Glycine max
  unsure (1)..(341): unsure at all n locations
agcttatagaatagtgaaccaagtgactgnttgcccataagactttcctggaagaaacgcatcaacaacttttcatcttttgcgtatgcccccattttcctatagtacacctttaggtgattcttggggcaagttgtccccttgtatttatcgaagtctggtaccttgaacttcggaggaatgaccacgttgggtcctaggcataaatcttccattgcaatcaagacataacttctacctccttcaacgacccttagccttatctctattctgactcaacttttccttttcagccattgcacgttgcgctctccctatctcaatactcactggccgtgcct

SEQ ID NO: 113932 - DNA, 127 bp, Glycine max
cagctttgagcccaaattctgacttatcataaaccttgacccagggtgagaatgtcaatccttaccctcggaagcgaaaagaatagaagggaaatttccaatcaaagaaaaggatagaaggtagatt

SEQ ID NO: 113933 - DNA, 284 bp, Glycine max
tcaggcagctagtggaaatcgttttctacagcaccgttgctgatgaagacaaagagacttagcctctggcgaaaaaatgctaactatgaaattgttctccccccacactatgatgatgtaagatgtaaaacccatatcacatgtactaataggctacgaccaacacatatgccctacccaggagcagcgcttgatggggcctcagctacatgaagcttttacttgagctccaagctttaaccttttggctgtataccatatgaatgatgttgctccccctatcg

SEQ ID NO: 113934 - DNA, 175 bp, Glycine max
  unsure (1)..(175): unsure at all n locations
agctttgaaggtgcgtagcccaccattntccatagtagaatactggtaatgtgtctactatcattgtcatcgcttttttttttgccattgaggtgccaatttgagctgccaggctctccacctttgagcgtattctctgaaagatttgtgtccccttcttgcacatgttctggag

SEQ ID NO: 113935 - DNA, 159 bp, Glycine max
  unsure (1)..(159): unsure at all n locations
ctataaccactcaagctttctagagggcctaggggnctgtatttatgttcccaaaacgtgaccattttcgcccttattttcttttgaatacactccgcacatatttcctttccggaacgttcacataaacccctaccgtgattgctgccgacaaattta

SEQ ID NO: 113936 - DNA, 197 bp, Glycine max
tgagatgagaaagcgtttttttgtgaaactctctgctttgaatagttgaccacatagtggcacctggatgatatggtctcggaggcttaggaataaccttgtgggtacgcacagtgtggcggagactattgctacaaaaaccaaaccttgaccaaagtcttgaccccaactccagtgcatattactgattaggagag

SEQ ID NO: 113937 - DNA, 420 bp, Glycine max
cgggatccttaaattcactgcagcatgcaacctgttaataaaattctctgtctttttgtgagatatatgtattatacacaaagcatcttagctggctgttgaatgaattatactgccctggtctctttgagtgcatttttctgatttctgggtttagagaaactcttgtgccaacaattggtatctaaagttgatttgatcatgagggactgtgagagaaccttgagtgttgagagaaattggaaatcaaaaatagagtttgagagaacccaatccttttttagaatacccaactttttaaatggcttccaacaatgttccattactaacacctcctgtattcacaggaaagaacaacgaaatgtgggttgtgaagatgagaaggcagttgatagcttttgatctttggaaagtaatgga

SEQ ID NO: 113938 - DNA, 260 bp, Glycine max
ttgcctttagggcttgtacgttatcactttcttccgaagctttaacctcattgtctctcacagcctttagatttgggagccactccaatccttgcgttcggactctcagccacttatgatagccgccgctgaccccatacttgcttgccccaagctctctgccctgtcttgatgccgcatcccatgccttgcgcacttcttgccctcccctcgtattgtggccaccgcttctccctaccctccaaggcctgcgcttaatt

SEQ ID NO: 113939 - DNA, 81 bp, Glycine max
ttatgactcctgattctttgttacttgcttaactcttgattctttggcatcatcaaaataatcttgccagtcattgcttcc

SEQ ID NO: 113940 - DNA, 304 bp, Glycine max
  unsure (1)..(304): unsure at all n locations
ggatccttacagtcgaccgcagcagcagctttatatagctgaccattnatcaataagacaagcgagttattcataaaatagagttatctctttacttaggagaggatcttgaagctcttgagtatttaagaacaccctggctgtgtcaaagggactttcacaaacttttgtgtggtgcccttgccggaaagagtgacattttccttcctttcatcttcaacccttgtctttaaaaccacaattccagaaatccacttctgccagaattattttggtgaggacatgttcaagagcaagggcaagg

SEQ ID NO: 113941 - DNA, 229 bp, Glycine max
tgagaatatctatgcgtcattttcgttaaccaatcgcctttggttgaaaacggagtcgtatcaactcaaaatggagatgggagaagatcttcatgaccacttcaacaagttaaatcagctagtaagtcaattgttgaatgcagatgataaactctctgatgaggagcagacgctcttggtggtgggcctactacccagggcctttaaaggcttagttcaaacggtgcat

SEQ ID NO: 113942 - DNA, 276 bp, Glycine max
tatttcaaaaggaaatcatatctaggtaagggctgaagaccatacaaattcctaacgaattctaattatgtgggccattaagtctatcatatgctgaccatagcccaaaaacccgtgaatctcttcggggcggagtaagttctgccatcgctttggcttggtaacaattgggaagttttgactcccggtcaggtaagagcaaccgaccatcccatggttgcctctggtgtaaaagtcaacacccttcctctacctcttttccgcgtatcttggcat

SEQ ID NO: 113943 - DNA, 282 bp, Glycine max
tgtacatcaactaacttcattccctatgcatattactagctccatcatatcttcgacccgaaatagtttgaatgttgagattatgataagataatattgaacatatcatgtttttaagagtggttgatgtattatcttgcatgttggagtataagtataaggtgaagtcccacatcgggttaaaatggacaagttgagcaccatataagtgaggagaagacccataaaccagagccttaaggttttgggttaaagtgtggtgtcaagttcacttatgtggtt

SEQ ID NO: 113944 - DNA, 275 bp, Glycine max
tgaacattcaatttctagcgttccgatatattacgggactcaatcgaacatccgagtaaaaaacttattgtcgtttgaatttgctcagagcttccataatcaatttcgagtgtctcaatatattacgtgactcagtcagacaaccgagtaaatagttattttcatttgaatttgctcagagcttcggtattcaatttcgagcgtctggatttattacaggtctcaatcagacatccgagtaaaaagttattggtgtttgaagttgctcaaagctt

SEQ ID NO: 113945 - DNA, 401 bp, Glycine max
agcttaagctccttcaactgcacaaggctcttaatatttgaagagtatccttgtggaaccttcacccgacaaagacactgacaaaaacttatcttctactttttggacaaagtattgcaagctgggggcaagttaattttcttaccatcagaccttggatgcaactgtgatcgtatccccatatcagctagatcttgacgggtattcaacccatccttcgtcttgccttgaatgttaaggagcgtctcaatcacactgtcacaaacattgttctccacatgcgtaacatcaatacaatgtctaacgtctagatcacaccagtccggaagatcaaagaaaatggacctcttcttccatatgcaactcttacttttatcctgcttttgggtctttccaaatat

SEQ ID NO: 113946 - DNA, 219 bp, Glycine max
  unsure (1)..(219): unsure at all n locations
tgcttctacagctcaattcggatggcaagaatcaaaatgtttgcaaatgatcgtccctggacaaaattagggtatgacagttgccccttgttagacaactggcctcagatatcttaagaatggggggggggggggggnntttattttttaaacttttaatattttttattatgtggaattagttgatgtgacccacatagggtaccgccattatttaat

SEQ ID NO: 113947 - DNA, 250 bp, Glycine max
agcttcaacatgtaattttgagcgtctctatatattacgggcccccttcagacatcacacgaaaaaggtattggcgctcgaattggctcaaaactacaacaatcaatttcgaggatctcgatatgtcaccggactctatctcacatccgagtaaaaagttatcgtcgtctgaattaccgtaaaagtgcaacattctatttctagcgtcttgatatgttacgggactcattcatacatccgagaaaaaagt

SEQ ID NO: 113948 - DNA, 289 bp, Glycine max
ttaaccccccttttaaatgatatgcttagaagaagaagaagaagaagaagaagaagaaatcaatttaacaatattcttttaaatgcataagataaaattgattgcaataaaataaatgagataagggaagagagaaatgcaaactcaatttatactggttcggccacttcccgtgcctacatccagtcctcaagcaacccacttgagattttcattaacttgtaaaatctttttacaatgtctgaaccacacagggatgcccttcccttgtgttcaaaaatctttacaa

SEQ ID NO: 113949 - DNA, 96 bp, Glycine max
tgtggaacatagttgaagctcctgatggttctcctatggtaagagcaaaatgggtttttggaaataaattggatgagacatgagctacttattaga

SEQ ID NO: 113950 - DNA, 283 bp, Glycine max
tgagatgaggaagtgttgaatggtgaaacttcctgcttttattgttgaccacagagtggtacctggagatatgtcgtgggggtcaggaaaccttggggacgtcatgtggggtgctattgcccaaaaccaagcttgaccaatcccgacccaacccgggcatagtcggtcagtgagaacctgtgatgtacctaaacaggcgagctcctggcagtcaacagataaaaggaacaaagaccacaaagcaaggaggcttgtggtggctggccagctgtgaattttgtgt

SEQ ID NO: 113951 - DNA, 399 bp, Glycine max
  unsure (1)..(399): unsure at all n locations
gcttgcatatggaattgcgaaagcccccctccatcatttggatttngtcctgccatctcgaacaaacaaattaaacgttacaagaaaattatagttggtgtttgaatacctcacccactcaagtgtatcacacaagtatggcttttctttaatgaaacactcttttcttttaccactctaattccccttgagttcttaagcaattcaagagattatggccacaacaaagaacaattcaccaatatgtgtaaggtaaggctatagagacaaggaaaaggttaaccaagaaaaaggcttacaatgtttttaggcgcaaatgaaggaaataaaattcagaatttatgaattcaagtaacaatccttcatgcaaccaatatattaccttagagagatcttttt

SEQ ID NO: 113952 - DNA, 284 bp, Glycine max
tcatgatgatgaatcaagttgattcaagtagttttgatgatgacaaagatgatgacaaaaagcctaaagaatgatttcaaaattgagtcaacaagttcaagatcaaaattaatttcaagtttcatgagaagaaatcaagaagattcaagaatcaagagaagtttgatttcaagattcaagagaagatgaattcaagattcaagagaagaaatcaagaagacttcacaagggaagtattgaaaagatttttccaaaaacaaacattgcacagttttgtttttcaa

SEQ ID NO: 113953 - DNA, 265 bp, Glycine max
ctagacctttttaagatacctagttcattgctaatgaagaagaacctatctctagcaagaggtttagtaaagatgtcagctagttgatgctcactatcaataaactcaatgcaacaatcacgctttgatatatgatctctaagaaaatgatgttttatctttatatgtttggttctataatgcatgacatgatttttagatagattgatagcacttgtgttgtcacatttcaagggaatgtgatcaaggattactccaaattctt

SEQ ID NO: 113954 - DNA, 286 bp, Glycine max
ttgcttttttgggctggttgtggaactatttttagccaagtagagagtttacaataaaatacatattctactcaatcaactaagataaaacccttgacatgtattgtgaatttagatatactcattaaatgataaagcttatttatgaaacatagaaaagttgcaagaggtggaattaggtgatgtgaccaacaaagggtccggtcattatttaatagtcttaacaacaaggattaatattgtgaatgaaaacaaaattaaggaaccaataagttttaaaacaata

SEQ ID NO: 113955 - DNA, 343 bp, Glycine max
attccaaaattaaaagtcatctcttttattttagtgagagggattctccttaattcttgagtgattcaagaacaccttggttgtatcaaaagactttcacaacctttgtgtgttggcctcgcttgaaagagggattctttccttcctttcatatcagccttgttctttcaaaccacaatttcagaaaatccagctctgcccagaattatctcgtggccataaatgccattttacgcactctaattaagtgattcttgagcctaaattgaatttcaaaacgagacctttcaccgcgtgttggaatcacctcatttggagccctgtaacttcagatattgtcatt

SEQ ID NO: 113956 - DNA, 280 bp, Glycine max
ttgagccaattcaaacgacattaactttttactcggatatctgattgagtcccgtaaaataacgagacgctcgaaattgaatgtcgaaattccaagcgaattctaaccacgataactttttactccgatgtgtgattgagtcccgtaatatatcgagacgctcgatgttgaatgtatcagctttcagcttatgcaaccgacaataactttgtacttggatgtctgattgagtaccgtcatatctcgagacgctcgacattgactgctgaagctctgacct

SEQ ID NO: 113957 - DNA, 280 bp, Glycine max
tctatggagcctgggtcttttaacttcaatctggttcttaactggtgattttgcgccctggtgttgcctctaatgactaaggatcttaggtgaaataaggcgccctcttctagatgataaaccatggaaggagaagttctaccacctaaaaagcgccttggattataagcttacggatgaagctgcaatgacggaatataatgagagacatagactgatgcaatcctaccccctaagggccaacttgaactttctccttggcgagttttgccttttctaa

SEQ ID NO: 113958 - DNA, 365 bp, Glycine max
  unsure (1)..(365): unsure at all n locations
tggatatggggccccctgagagcgaggactctttgtcctttaaaggcgaggtcgtgtagccctctgaagttcatgacgggtctcctttttaatgcgagggaatgttgtcctattatggctaggaggagcaattctctaaatgtgagggcatgtctccctttgaaaatggggaacatgtagtcctctgatggcgagtacgtgtagtcctcnaaaggtgaggacttttagtcctctgaaggtgagggcgtgtagccctacaaaggtgaaggcacatgaccctttgacggcgaggacgtgtagtcctctaaaggtgaggacgtgtagtcctctgaaggtgagggcgtgtaaccctacaaaggtgaaat

SEQ ID NO: 113959 - DNA, 282 bp, Glycine max
ttgagccaaaatcctgactcaccataatccttaccctcggaagcaaaaaataatagaagggaaatttccaatctaagaaaaagagaaggaaaatttccaatgaaagcaaaaaaagaaaagaaggaaaattccccaatcaaagagtgggagaaagcaaaaagaaaagaaaggaaattcccaatcaaagaatgggagaaagtaaaaaaggaagaagaagaaggaaagaaagctcctgatcagggatcgaaggaaaaacagaacaaatgtgcagaaaggtctttg

SEQ ID NO: 113960 - DNA, 280 bp, Glycine max
tgcaaaccaaatgttcaccactattagaggagaaaccttcagggtgtttcatataaacctcctcgtctaaatcaccattaagaaaagttgttttcacatccatttgttgcaactcaaggtcaaaatgagcaactaatgccaagattatacgaagagaatctttcttagatgcgggaaaaaagtctctttgtaatctattccttccttttgagtaaatcccttagcaacaagtcttgccttgtatctctcaatgttgcctaatgaatcccttttggtctta

SEQ ID NO: 113961 - DNA, 281 bp, Glycine max
tagcggatatgaatggcgctaagctaaattaaatccaatttaaatcgcaagaatattcgcttagccagtagattacgcgcgcttagccccatggcccttaattctgatcgcaatgaatagcgcttggtgacatagggtcgcacttagccaagggaagccatccctgagcgatcaattcgtcacttagcggaattcagatcaaattggagttagcttagctcaaccttggccaacttagcgaaaataatcatcctcaggtgccagggtggtgtgctaagcgc

SEQ ID NO: 113962 - DNA, 274 bp, Glycine max
tctatggaggctagatctttgagcttcaatgaggtcctttaatggtgattttccaccatggagatgcagcggaagacaaaggagaagaggtgagaggaggcaccatccactagaaaataagctatggaagaaggagcttcaccaccaacgatgtgctttggataagaagcttgaagatgatgctttaatagagaaaaagaaagagagaagggggagcacgaaattcaaggaataaaagagggagagaagtggaactttgaagtgtgtctcataa

SEQ ID NO: 113963 - DNA, 365 bp, Glycine max
gcaagtgttacacccctccaattgctaagctcaccccatgggaacacacacccctccaatagctaagcttaccccccccccccccaaattcatgaaaaaacaaaaaaaattctttattacaaagactactcaaaatgccctgaaatacaagactaaaaccctatactactagggtaccattaaattgtaggggagggtgcccttaatttgtagggtaccttacaaacctaaaatgaccaaaatacaacgcccaaaagaaggaaaacctattctaatatttacaaagaaaagtgggctcatacttagcccatgtgcccaaaatctaccctaaggctcatgagaaccctaaggccttctcctacatc

SEQ ID NO: 113964 - DNA, 285 bp, Glycine max
tgagcctatctcataggggaaaccctgcttccctaacatacctcccttaatttcttttaatcatccaaccacttcttccatccacattatcccctgaagtgtaaagcctctcgtggttatgagaggctaaaccccctctgttgggagcctaacaaccaacatccttgtaatctaattgctcttattatacattaaatacaatttttttattgcctcttttctgatcttcatctttattatatgttctgataatccatgcattaattttaggggttatacattggg

SEQ ID NO: 113965 - DNA, 407 bp, Glycine max
  unsure (1)..(407): unsure at all n locations
agcttcaagaataatggcctcaacaaacttcttatttccagaaggaaattcaatcaatagacctccaaatctttaatggagagaattaccactactggaaaacccgaatgcaaatttttattgaggcaatagacttaaatatttgggaagccatagaaataaggccttatatacccacgacagtagaaagaaccacaatagatggaagcacaacaagtggaagcacaacaatagaaaaacctatagaaagatggtctgaggaggatagaagacgagtacaatataaactaaaagccaaaaatataattacatctgccctgngaatggatgaatatttcacggtttcaaattgtaagagtgctaaggaaatgtgggacactttacaagtaacacatgaagggacaaca

SEQ ID NO: 113966 - DNA, 288 bp, Glycine max
tcttccccctttccctaatgcttaacagtttcacatagtttatgtgcttatgaaaatataataatttcatcctttgatgataaacaggacagaagtatccttttacatttgacaaggtattaaatcatgaggcatctcagcaagatgtttcactgagatatcacaactggtacaaagtgcgcttgatgggtacaaggtgattattaatttgtgtcttctttgttcaagttaccttttgcaggtcaaaaatctcttgcattggatacaactattggtatgtgacaatta

SEQ ID NO: 113967 - DNA, 340 bp, Glycine max
aatggtactagaacatgatggccgattactacgtggtattacaaagcggattctaagataccgtgaggaatggaataagcttaatgaactaattatttactttttaaagtgcttaattgggctaaaatgcataatgtacattgcttcactatgttcaagagaaaaatgattccaaacgtttacctgatatttgataaaagaccattctactggaaaatcccttgacaaaattgtcttaacatatctttggaactcccatgcataatttacacagcttcactttatcttgctttgtcatatcagaaaaaaaaaatattttatacataatgctacccttgag

SEQ ID NO: 113968 - DNA, 281 bp, Glycine max
ttagcacttctgtagggtttcagggctttccatcagctcagataaatctgccatatactcagtcggtattaggcctcatgagctttctcatatttagcagcttactggatttagcttgggtggcttcccttttagatacttgggtgttccctttttatcatttagattaaatgtatgccactatgctccattgatttccaagattactggcctgattcagggatggagcaggaagtctttatcttatgcaagtaagctagagttgatcagagcagttattc

SEQ ID NO: 113969 - DNA, 441 bp, Glycine max
  unsure (1)..(441): unsure at all n locations
ctcgccccgggatccctatatctacctgctgcatgcaagcttaaaactccttgttcattacttaacaagctgaaatttatcataatcccaaacaatgtttgctaatttcattgcaatagatgagaattgaaaattggaaagggaaagaaaagctgggttgcctcctattaagcgctcttttaacgtcactattcttgacgcatcgtctggttattccaggatccaatatatgtcctactttaacgaccttcttctcaggtctcttttcctccatcacatgcactttaagatagatattttgactaggaggatctttgccctcatggaacaaatcanagctgatcttctgatctctatgcccatttgcactatcttctttcctgtgtctaccatgccacttgtcatcaaaatgaatggcagccaataatgaaggaatttcac

SEQ ID NO: 113970 - DNA, 282 bp, Glycine max
tataactcttccaatggttttcttgaccaaacatgaagagtctataaaagcaagaccttgacttgcattcaaacaatcttttgataacttttacaacttttagaatttcttgaaaaacttttgagaaatcttgaaacctttgcttctcatatttcttcttcttcctttgccaaaaagctttccaagttttctatttttcaaatcttgttcttttgcagaaaacaaaagtgtgctatatcttttcattctcttctccctttgccaaaaagaattcaacaagga

SEQ ID NO: 113971 - DNA, 399 bp, Glycine max
  unsure (1)..(399): unsure at all n locations
agcttatggtttagtaacttgttaatgtatgaaaaaaaaatatgtttttcaattctccttgcaaaggttctttctaaatagggaatgattgtgtatactactatgaaatgagcttaagatcaaaatgacaaaaatcatgtgtcctcatactactgtgaaaagtatgaataacactattaacggtttgacaagtgtaccaaatgtccaagtagtaaagtactcggaagtccaagtgtcaatttccacagggactttatnttgtacttatgttggataatcttcaatttataagagaaaaagataagatgaggcttaaaaaataaattttaaagaacatggtataaaataataactattaatagaaaacaacagaaatagtttggaattcaatggaaatgt

SEQ ID NO: 113972 - DNA, 279 bp, Glycine max
tctcaaggaagctacatgaagctttttcggtaaaaatgctgtccaacctttattaaccgttggatcttctcgaaatttggtctgcagcttcacaagacacttgtccataatttctagttttgtttgctttcatcttcatctcgttcactttcgattttcttttcttccattttaacgtgctttaactgtttatttaagtcgttatctcgcctaataaatgataaaatgaatttcaaccgatcatttgcgttgcaatctcgtttaatcactattaaagca

SEQ ID NO: 113973 - DNA, 286 bp, Glycine max
tttaaatggtcctgctataggttccacagacaacaaatctgccagtgggtatgcatccccagaattagatgcatttctcaattgtttagctgccagattaacaacaacactatatagttgattggcaacttgtgcagcagaagcaatatttacattattgatcaatgcaaaagttaacacagctagaatgtgcgtcaaaagttgactgggaatgaagtgacacaatcagataaatgaaaggccattttgatagaaagagaaagaaaaatatttcataactttacac

SEQ ID NO: 113974 - DNA, 285 bp, Glycine max
tcaccttttggtcctcctcatagttgttgcatgagaaaacatgctctattttcatcttccactccaagtaggcctccggatcattctttcctttaaagggaggaatgttgagtttaataccatcaattcggttttgtctaggaacaccatcattccctcttctcctcctttcttcttcattatgatctctattctccatttgatccaacctctcatggagtgcatcatctcgttgtttcattaacctctccatatgttgcatcaaagcttgcatttggaattgcg

SEQ ID NO: 113975 - DNA, 278 bp, Glycine max
tttaatttcattcattgatttttgctagcctcaaaatattttattaaagttttaactataccagagctaaacaaccttactctaccttgagtatccaatgaaggtctcttccctcgttaaccatttattatttgcccttatattaaattgtaaataaagtgtaaaacttacctacacttcttttcttaatgatataaaaaatgtacacgttattaatatattattacgtataatttgtttatgtaattatctatccacactgggttactattttcctc

SEQ ID NO: 113976 - DNA, 411 bp, Glycine max
  unsure (1)..(411): unsure at all n locations
cgccccgggatccttnatcacctgagctgcagcttgataaacaggtaagttatgagaataggctaggcttgtagccaaaagatactcacaattggaagacatagattatattgagacctttgctcccgttgctcgcttaaaggctgtacacatattacaatcctttgttgcccatcatggtatgatgttgtatcaaatggacataaaaagcatgttcctcaatggtattaccaaggaaaaagtctatgtagaactaccccttgggtttaagagttctatctatcctcatcatgttttcaaacattataaaactttgtatggtttaaaacaagctccttgagcttggtatgaanagttaagttcttttttaactgaatatggttttataaaaaggaaagtaaatactacttt

SEQ ID NO: 113977 - DNA, 304 bp, Glycine max
accttttggtgacacttcgaatactagctataaaacaaatgccttttcatttccaaatatgcatgtgaattatgatgcattaacaagaatcaagccaaggctattgtgcaagcaatcaatggggcataacacaccaaatgattataatgatggatggctcaaattctcacaaaggtaaaatcatcactttcaaattgagctttcaaaactatcatgacatgtagagaagaatcaaggatttcaagtcacaaaatgtcaagaacttttattttcaaaacatttacccatttcttgaacatatcct

SEQ ID NO: 113978 - DNA, 279 bp, Glycine max
taacgcacaggggcgcttatcctaagtctacaattttagaaataggagaggattggggcttactgcaacatactggtgttagctcaacctcaatagaaagacactgaggcttagtgcacaggcgcacttagccttattacaaaggtgaagaaacataacccaagtgacgcttagctcatcaagcatggcttagcgcctgaactactctaagtatctcaatatactattgacgcttagcgcacaggcgcgcttagcgtcagcatcgttttggttcaacag

SEQ ID NO: 113979 - DNA, 297 bp, Glycine max
acactacccaatactgaagcttttaggatttggtctttgtctatgaaaagatcaacgggggtccaaaaagaggtcaatctgatcatcctactaggacgactgataaactggggcaaagaagagggtgtaaataggaaaaacccctgctgtgaccgccattcctatacggccgagtttcccaccatcccaacattgtcattactcagccaattacaaacctcctccttacccaccacccagttatccacaatggccatcccgaaattaacctcaaagcctatttaccacataaccaat

SEQ ID NO: 113980 - DNA, 275 bp, Glycine max
tgctggggttgaccggcactccataaaattggcacaggcctatgatcaaagtatgaaaccccagggccttgttggacctctccgggtccactgggtgtctaggaggcgtgatccctgcaaactgatacatagcatctgagatcagctgggcaatatgtacactcacctgagtcaggatggcatacaccagctgacacttctggaaggggagatctgaattatggtcactggggagaatgttgctaagcagcaacgtcatccaaatcgatgtgagg

SEQ ID NO: 113981 - DNA, 286 bp, Glycine max
ttgagccaattcaaacgacaattactttttactccggatgtctgattgattcccgtaatatatcgagaccgtcgaaattgaatgttgaagctctaacccaattcaaacgacaataacgttttactcggatgtctgattgagtcccgtcatataccgagacgctcgaaattgaatgttgaatctccgagccaattcaaacaacaataactttttacttggatgtctgattgagtcccgtaatatatcgagaccctcgaaattgaatgttgaagctctgagccaattc

SEQ ID NO: 113982 - DNA, 288 bp, Glycine max
tgatcaaaacaaagtctatacattctagtccactcaattcatacaactctcattcgtttcaaacacaaccattcatttcaaacaaaacacaccactgaatatcaaattcaaccagttcactgttcccacaagctttttgtacaaacaatcaacactaaaataactgaaatttaaataactgaaacataaagcaaactaaataactaataactaaattgttcatgattttcagaaattaaaacaaatttcttttaacatcctgctcatcctgtggctgatcttcattta

SEQ ID NO: 113983 - DNA, 217 bp, Glycine max
tgtgtgttaaatgtctaaataaaagacaaattttgtgatcatgctcattcgaagaaaacttcttcaccgaaaataaaatcttttgaatatgaattctgtagtattcttttaatcagattagggcggcggtaacgatcttattatcgctgtcatattttgatgaacgtgtcaccttcattctaacaaaaatttgaccctcttttttcgagaaagtttt

SEQ ID NO: 113984 - DNA, 280 bp, Glycine max
tcgtttagcgactaccgcgttatgttgcctgcgtttttcagtatgataattatacaaaatatgattaaaaatttgccgcaaataatgttgttgaatatcgtcggcctcgcgctgtttctttcctggtatatccccgttaatcatggattctggttgtcgattgatgcggatattttttatttctttaatcagaaactggtcgaaagtaatgcctttttgcggctggttgcattgaccaacaatctcgcctttgacggttgttcactgctggcgatgggta

SEQ ID NO: 113985 - DNA, 398 bp, Glycine max
agctttgtccgcagatccctcttgtaagactagaattaaattaaacaacattatcatcacatcatattcagaaaaccaaaaccccacaattcatccctggtaatgtagttatttagtactgcttctatcaagttctaaggcaacaatacatttcccaatgctaaagtcacctaacagtacacacaaatgggtgatcagtccaagagcatgcaataattaagcattgaaagaagcattgatcacacaaagcacaattaattagatatcaaaagtaattacatcaactattcattagaaatccccaactatggtttttagccagccacacatagaaaccctaacacaaatgagatagagagtacagaataattgttgcttacacaagaagggggatccct

SEQ ID NO: 113986 - DNA, 369 bp, Glycine max
agcttatccaaacggatcctaattgtctcctaatcagcatacctttgaagttaaaatatattagcattctttgtaaaaaaaaaaaaaaactgacattataatgtaatatattttcttaccctatcatgttaaccatgaattattatatataataatattattgactttttaataatcattttaatatctatatatatatatatatatatataatgatttctaattaatgaataatataaaaaaaattatactgaaattatattacaattaaactctaaaaatatgcaagatggtacttgtgtcatattgaattccactacttattaattatagtcttatgtaattttgtaagatatgtatccacttaat

SEQ ID NO: 113987 - DNA, 393 bp, Glycine max
agctttagtcaaacagaataatccgaaaatgtcaaagaattgggtgttgaaaaagcataacaagactttctgtgattggtttaaagatacaatctttgcagatgagaatgcttcagaaacattaagaaagctagcagatgggcctaaaagaaatgttataacctggcaaggatacgacataaacatatattcattttacacaaaagcacaagatgacaaaagtacaatgcagaacagcagggtcaccctaagggctgaatctcaacactttgcaagtgtcaatgacgccaatccctgtgtagcttccatcccttactttgggttcattgatgaaatttgggagcttaattatgtgaaatttatagtatgtggtttcaaatgtaaatgagttga

SEQ ID NO: 113988 - DNA, 273 bp, Glycine max
tttaagggcagaggacctttaattatcttaaggtgtggatatggggccccctgagagcgaggacgcatagttctttaaaggcgagggcgtgtaaccctctgaagttcaggatgtgtcgccttttgaaggaaagggagtgtagtcctatgatggcaaggacgtgcaatcctctaaaggtgagggcgtgccgccctttcaaggcgaggatgttgttgtcctctggaggtgagggtgtgcattcctcttaaagtgaattgccatgaatctttgatg

SEQ ID NO: 113989 - DNA, 278 bp, Glycine max
tgtccttggttagacatgattggtacatgatttgagacttgtaggattcaatttgggcaaaattggatgagggaaagagtggttttcgaaatctgcactttatgcagaattttgctgttgaaatgtgcagcacaattttgtataagtgcagaaaaatgcttgtatatggctgattgtaaaaagggtagtacatatggggttccggacattttctagcagatcccaacggtcaaaatgtagacttatgtactagagacttccagtaaaattttcgagtc

SEQ ID NO: 113990 - DNA, 283 bp, Glycine max
atactcaagcttgaagatgtgtaacttactatttttccatagaaggggggtggttgggggcgaaattgaggcccctccaaagtgttttgcaggggtataccaccaactgcttgcccttcagtggcatatccaaggcaaggctcaaagtcggctagattatggtggggaatttcatgtgtctcccccatgggttgaaagacatgtgcatgatcagattgaggttgttggctctcattgggagtgtacgccacattgggtggtgtatagttgggagacaagcctt

SEQ ID NO: 113991 - DNA, 281 bp, Glycine max
tctgtccctgagaaactggttcccagaagacaacagggagtgaagattgctgaaaaccctagccttgcaaaaagtcctagggaagtagacacggagatggacaagaaaatccgcagtattgtgagtagcattttgaaagacgcctctgttcctgaagctgatgaagatgtcccaacatcttccaccccgaatgtttctgtgcctgatgttgagaaagatgttccaacatcctccactccaaatgctgaagtccttccttcacccagtgaagaggaatcaac

SEQ ID NO: 113992 - DNA, 274 bp, Glycine max
ttggaagcctttacaaggatccagcttgactaacacaaagaaatgtgaactgcttgatttgatgttatcaacggctcacaatgatttgttttggtaatctgtgtctttccaaaccagtcaataagatgtcattatatggtatccatttgttattcgatgtgcgttctttaaattctaaattggattgagatgtgaataacaacgataacaacaaaactagctcatttaatgcactctttttatttagagtaaattatattatactaccttcaag

SEQ ID NO: 113993 - DNA, 255 bp, Glycine max
agctctagtctcaatttgaacgtctcgatatattacccgattcaatcggacatccaagtaaaaagttatcggcgcttgaacttcctacgagccttcggttgcaactcggagcatcttcatattttacaggactgaacccggcctcccgggtaaaagtcattgtcatttaaatttcttagagcttttgatctaaatttcggccggtcgcattactaccgactcaatcagacatccgagtcaacagttcttttcgtt

SEQ ID NO: 113994 - DNA, 303 bp, Glycine max
acttccaatactcaagcttctatagacggttcgtccctaatttctctacaattgcatcacctctcaatgagctattgaagaagaatgtggcatttacctggggtgaaaaacaagagcaagcctttgctttgctcaaagaaaagcttactaaggcacctgttctagctcttcctgacttttctaaaacttttgagctagaatgtgatgcttctggagtgggagttggagctgttttgtttcaaggtgggcaccctattgcttattttagcgaaaaacttcatggtgcgacccttaactacccca

SEQ ID NO: 113995 - DNA, 286 bp, Glycine max
tatgagaacaaaattgtctcaatcatttccaaatatgcatgtgaattatgaagcatcaacaaggatcaagccaaggctattgtgcaagcaatcaatggggcaaaacacaccgaatgattatgatgatggatgactcaaattctcacaaaggtaaactcatcactttcaaattgagctttcaaaactatcatgacatgtagaggagaatcaaggatttcaagtcacaaaatgtcaagaacttttattttcaaaacaattacccatttcttgaacatatcctataatt

SEQ ID NO: 113996 - DNA, 90 bp, Glycine max
gcaatgggtgagtccgccaggagtcccgaagaaaaccggtctcaccgtgataaaaaatgtgaaggaggggttgttcctactccggtgcta

SEQ ID NO: 113997 - DNA, 223 bp, Glycine max
tatctataccctacattacaaatacgaaatgtcctaatttagctttggactattttacttactttgtataaataaatacaaaccaaatttctgttggatgtatttttaagtatctaataattaacggaggtaggctagaaaaaaaaattacagacattatagtatccgtggaggccctcatataactagctgtactattaggtccgacctacctttttctcta

SEQ ID NO: 113998 - DNA, 273 bp, Glycine max
tacgcgggaaaaatttacagtattgcttcttagcctcaacagcctagtcaacctcaggataacattcatgacctcttctgcaacataaacaaccctggatgaaagaatcaccttaacctaatacggaccaggcctcagcatcaacaaccacagcagtctgctacttccttccaaaatgctgctgggccaagcagaccatacatgtcctccaccaattcaacaacataaacatccccagaaatagccaacagtggaggcccctacacaaccttc

SEQ ID NO: 113999 - DNA, 272 bp, Glycine max
tgcaggagtcaaggtcctattatagcactcgtagatcgaggggatgtctgtggctccgtcccccatatttagtctagcgtctgaccactattggaaaacccggcgaccagtggttctagtggcgtttccctttattaagtggggaggccacatagacggggggctagatggccaccatggctaggagggacgacacgattgagttgcctacagaagagtggtgtgggggataaaggaacatagggccttgtagtttaaaagccataagcata

SEQ ID NO: 114000 - DNA, 306 bp, Glycine max
ctgcagcttaatggattagttttataggacctcgcggttctgcatgggatcactaaacaattggatagcaccggcacttttgaactcagctgcatgcctctgttgcagattttaaacggggaacatgctgcgaggcatgtcgtattaggactggagctaggcttgagactgaactaatctaagccggagtagaacaatgcttgtaccagcgagatcgagcggtgccttctaacattcataatggttctctagagatctgaaaacataatttggtaagctgtagttgaacagtgatgattaggatct

SEQ ID NO: 114001 - DNA, 281 bp, Glycine max
tccatcaagtggtaatcagagtacaagagcttcaagtaggggctgcttaaaccttcattagttttatgcaatgccgtttctcacacagtcaatggtactttacttctcctattgcattttttcatggttctacttcattttctctcaggttcccttcttactctctatgtcccctcttgtactttgtcatgtcctgtataggttaaaccgtgcgatctcttgccccattattgcccttatcctttatttttctaacttttaccctttttcttgcgcttttg

SEQ ID NO: 114002 - DNA, 179 bp, Glycine max
tttatcaagtcaaggtttaatttctagatgtcaccagcctcaaggaattgtgacgattgatgggacctccccaaaggcaagcctttcgcaaagtgtacgaaaagattctagatttgaccgcggcggaggtatttacggaagctgttatatctctttccctatactatgaccaatcgttt

SEQ ID NO: 114003 - DNA, 164 bp, Glycine max
gcttgtgagcatgtatcggatggtattgttcactcgagacaatgttgcacaagaattaatcattgctttagggttattcacagtttgaaattttttgtcaacaagacactgaattgcattaaataaatcaggcgaaaacgtacacatgcaatacattgcaagca

SEQ ID NO: 114004 - DNA, 273 bp, Glycine max
tgaataaaaagatggcctcagcatattccctattatcagaagggaattctatcaatagaccttccatctttaaaggagagggttaccactactggaaaaaccgaatgcaaatttatatacatgcaatacatctacatatctgggaagccatataaatagggccttatatacccaccacaggatagaagagattccaatagatgagtgatacttacttgacagcttaaccatagaaaaacctaaaaatagacggtctgaagaggatagaaaact

SEQ ID NO: 114005 - DNA, 276 bp, Glycine max
tcaaagagaccctactaaatattaaacaaagacggaggaaagttgttatcaaaacttaaatgaatgtgcatagaattgtaaaaataccgaaaaatacaaatgatttcctaatcattattaaaaattttagagagattaacctaccatttattttgatacttcatagaaatctccggtgatcagcgggatgaacaaggcaaatagagatgattgataatatctttcacctggactttgaatctataaatggtgtgagtatatttgactaatataaag

SEQ ID NO: 114006 - DNA, 186 bp, Glycine max
aacggctacaccgtcatatgtatccttcagagataatggactgctgattataatcgcgctcacggcgttgtatcaaacgccatgttacgcccgaaggtttctctcgaaaactatcagtcgcggttcgagcactgaggtgatattggtaggtcccggaaaacgtaataaccttctggaacaggggcc

SEQ ID NO: 114007 - DNA, 298 bp, Glycine max
tcatgatgaatcaacaatgtttttaggtgttttgatgataacaatgatgacaacaaaagatgatgacaaaggttatgaacaaaaatctcaaaagatcaaagaacaactcaagtgaatctagaacaagtcaagagtcaagaatcaagaagaattcaagactcaagaagaaagtctacaatcaagaatcaagattcaagattcaagatctcaaaaatcaagatcaagattcaagactcaagattcaagaatgaagaaaagactcaatcaagataagtattaaaaagttttgaaaactttg

SEQ ID NO: 114008 - DNA, 300 bp, Glycine max
ctcctaaacgcttctaaaccattttgtttctctccccctttggcaacatcaaaaagtcaaagtacgtggtaaacaacacaagagcattcatataatccaatataacaaaagttcatagaatcattcataagtcaaaacaaatataatccaatcataaaatactaagggccaaataccaaaagataatgaaagttcaaaaaatgataacttagaaaacatagccaaacacacgaattataaaaaacgataataataatctaaaactaagaaggtggtggaaggtcaaagcaccgacgaaga

SEQ ID NO: 114009 - DNA, 293 bp, Glycine max
taaaagggtaacccttaggatttttctttttgaaagccaaggaaataatccggaaaaaatccaccgaggccttccgaccgttccggagtatacccaagaatctcaccgtttcaaatcatcgtcgtcttcgtttctcagtctcacggtaatcctcaaccagcttttaatcatttattcccgtgtggccaatttgttatgatttatatgtttattactttatcccctttgctgctagccttattaacattttcgtaattaaaaaaataattccccgacgttgatgatatcgtatt

SEQ ID NO: 114010 - DNA, 295 bp, Glycine max
ttccctttttggaccaattctttttaacccaattaaaatccatctggggcctttttcccacaactctcataaatgggagagaaatgttcatctaaagcatacaagtccctaatattatcaaatcctaaaatttgagctcctagggagcaaaacaatgtgtgtctcctagagagggcatcagctaccacatttgtttttccctttttgtatttgataacatatggaaattgctctaggtactctacccattttgcatgcctcttgtttaacttgctttgccctctaatgtacttaa

SEQ ID NO: 114011 - DNA, 160 bp, Glycine max
  unsure (1)..(160): unsure at all n locations
ttgagtgctcanatggtcaatctatctctttcagagagattcttcttttcttctcttcattctgaaagggataagagacgatggctctgttgtgaaagatctaacacaaaggaaggtgccttgtggttaaacctgaaaagattacagatagggactctca

SEQ ID NO: 114012 - DNA, 295 bp, Glycine max
ctaccttcctgggaaggctcctttttaaagattcctaaagaagctagagcttagctacacatacatctctaatagctaagctcacctccttgagatgagaagctagagcttagctacacaccccctataatagctagctcacccccatgacaaaaaacatgaaaataataaaaaaaaaagtccttattacaaagacaactcaaaatgccccgaaatacaaggctaaaaccctatactactagaatggccaaaatacaaggcctagacgaaggaaaaacctattctaatatttaca

SEQ ID NO: 114013 - DNA, 448 bp, Glycine max
  unsure (1)..(448): unsure at all n locations
gcaagctgggtttgggcaatagcaccccaccttactttctcaaagtctnctaacccccgcgacatatcttcaggtaccacctctgggtcaaccaatataaatatgaaggctcaccctttcacactttctcactttaaacttgtaggattatgggggaccccgcacatgtggtactaggtggcgatcgggcgatggtacaagtcgactctccaccgtcacaaatcacacataaatccaccatccccagttgcccaccttcaactgagctcacgtacctccacatagcccttatcctcgttcctctcaacaccgggtccccatcaatccctccaagcgtccacaacatncaagcaattaaaaatccaaacatcatgaactatcaaaaccgagagaacagggcagaggcaaatactcttgccaaacacatacaatacccaactttcttact

SEQ ID NO: 114014 - DNA, 295 bp, Glycine max
tgtgtcttgttgctttgggtttttacctcagtttgcagatgtccaatatccattcactggcttgaggggaagcattgtagtagtcctactaattactttataattattgtaatttattagaaatggttactataagtttaattagccttttttaggaaagtatttaaattgtttagtctatataatgtatcgctctgtccaattttattatagataataatattcggaaattttccattcaagtctcttgctcattgttgtgtacagattgttctgttgtatgaaaatatgggtt

SEQ ID NO: 114015 - DNA, 334 bp, Glycine max
  unsure (1)..(334): unsure at all n locations
cccttaatccaccaggaaaaaaaaatgttccattaaaaataattaaggttcgaggaccttacacactctactcacgtctcttagatggaatacactcgtgttaatgctctncatangctnttgtgtaatgtatttccctctttgcctttaccactcgtgtttcctcttaagttcctggatggaccannatagacacacaaggtaatataaaataaaaggaaagacaatataatgatcacaaacagattttgattggataacaacttggactttgattngataataatatattagaatttggattggataacaggtgagctttaatttgggtaac

SEQ ID NO: 114016 - DNA, 297 bp, Glycine max
aagcttttctttctcaatcaactctgtttctgactaacaattttaatggctagctcacattcttgctctttctttgtctaacatacgcactagcctaaacttatgaaaaggaacacattcttcatcataaacatgcatcaatcaaaaagtagtctataacacccatttcacaaaaccataaacgtgtgtcactgcataatcatcatgtcaagtaaaacctgttttgtatgcttcaaaacatgcattctaacttttcacaaaaaaacacaaatgtgttgagacgtaaacctaaatcac

SEQ ID NO: 114017 - DNA, 306 bp, Glycine max
aatactcaagcttgtagggttaaagtctcactattgtcacgtattgatgcaacaattgttagttgtggctatatgagacatcttgccaaacaaagttaggttagccataactcgcttgtgctttttcttccatgccatatgtagcaagtcgttgatcctatgaagtttgatgagttggaaaatgaggccgcgattatactgtgccagttggagatgtattttccccctgctttctttgacatcatgattcacttgattgtgcatctggccagagaaatcaaatgttgtggtcctgtttatttgtgg

SEQ ID NO: 114018 - DNA, 248 bp, Glycine max
ttcacctctttttattcagatggcttaagacattgctacgcacactctggctagccgagaaaattcaagaagatagtgtcaggttcgctagcccaccctttatctttttaagcgcaccgcttcagttcatccgctaaacgagaacggtgcgctaagccaaaactcactaacgtacgcctaacgggccatacgtgcgctaagcgcacgaacatgaacaaggccacctatttaagcctgaaataagattt

SEQ ID NO: 114019 - DNA, 290 bp, Glycine max
tctttgacaaactttatttttgatgtagggattggaacctccgcatcaccgaaaataacttccaccacactcacgcgaacaacatcatcaacatagggcacgttgtggatggtgccaaaactgtcgcaccgtttgcccactgccactaatttgttggagttctcaacggttacatgcaggctgacattgtcaccattcaacaaagagggttttttagctaatgcatttgtctctgctgctgcacagcttcccttcgtgcttacccttgctgctaatacttgtatatcatt

SEQ ID NO: 114020 - DNA, 138 bp, Glycine max
  unsure (1)..(138): unsure at all n locations
tttgttggggtttcaatggagaatgagggacgagaaaatggcaacgtgagagagagagagagctgtctgaataagtgtgggggctgagtgacgagagagaatagcttnttggtattatataagaggctatcctctttt

SEQ ID NO: 114021 - DNA, 288 bp, Glycine max
tgcttgtggggcttctatgtattctggatctttgagcttgaatgaggtcctttaatggtgattgtccaccatggaaatgcagctgaagacacaggataataggcgataggaggcaccattcactacggaatagccatggaagaatgagcttcaccaccacgatgagccttgaataataagcttggaaggatgctacaatggaggaaacgaaagagggagagaaagagagaggggggagcactaaattgcatgaattaatgacggagagaagtggaactttgaaatatg

SEQ ID NO: 114022 - DNA, 141 bp, Glycine max
ttaccaacatctcatgactccatatggcttggatggacattgctactggaggtatcgtgtggcatatttcgctctcagtcgccgccatgaaagagcataaattgtattggctccactctttgaactttcctcagcacctcg

SEQ ID NO: 114023 - DNA, 288 bp, Glycine max
ttttcttctaagatttttttttaggaaggagaagtgaagttactgtactacaaaacagagaatcaaagtgttgacattctgaccaaggcacttccaaaagccaaatttgaatacttgagacaaaagcttgagtttgcagttccaaagtcaaggaggagtgttaagatttgactgttggaactgcctaacaaattatagtagataaaatttttatactattttttaggaaaaataaaagtcatgttgactgataggataaaacagttttgatcctattctctaggcatg

SEQ ID NO: 114024 - DNA, 400 bp, Glycine max
  unsure (1)..(400): unsure at all n locations
agcttaagtaccgtcaaagggattaattccttaaattntctgggaaccggacattattattccgtggatcaacttccaaatggagtacccttaattacctggagtttggtaggcttcctttcttccaggaatctgattaatcttcatcactaaaaacatggagtgatcgatggttgagttacaacacttccattcaattgtggaacccgatgctattgtaggcgacgaatatcccacttcttgcgagtctcacgctatatgcagatggcaaacttaaatcttattttctacggatattcatgtactagtcatgacaccacagtntaatttgccacctagtaatgagaactgaaccaactttttgatcactattaaaatttttgcacttcttaagtttgtg

SEQ ID NO: 114025 - DNA, 286 bp, Glycine max
tgttcttgatttttcctaatttctttaacaagcttagaacaatatacttggccttcttttaattgtctttgggcttggggaccacaatcaacaaagtactttcggcacctactatatgttgacttgacaatgctgttattggaatgttgcggcaatctttcaacaccttattcacacattctgatagggttgttgtcatgtgaccatatcttcatccagatgtatcgtaagccatgctccatttttcctttgaaatgcgatcaatccatgttgctatggctggact

SEQ ID NO: 114026 - DNA, 302 bp, Glycine max
  unsure (1)..(302): unsure at all n locations
taaagcttggtagtttccaagtgccttcttgttttcttcttnagnccaggctttttttggcttcaattcttcagcgggctttccttctgagtccagcatcttgggatgttcccagcctttgatgacagctttccaggttctgctatccagtgatttgaggaaggccaccattcttgctttccaatattcatagttgcttccatcgagaattggtggactgttcactggtccgccttctttctccatgttcatcagaatttatctccctagatctcactctgtgatttcgagtgttggctctg

SEQ ID NO: 114027 - DNA, 297 bp, Glycine max
  unsure (1)..(297): unsure at all n locations
tttgtatgttgtgagcaggctttctttatgcagncacatgcattggtaatttgcatgcaagcctgaccagcacatgacctcgagatgcaagaagggttagtccggttataaatgatttttaaattcaaaattattggaattgttcataaactataaatatgagattttaaaggtcaaaaacatagtttttttggatgtttgagtaataatttgaggtccttcttgatcaaattgtaacacaatattttttttggattctttgatgtgaaaactatgaaataaatttggcactaatat

SEQ ID NO: 114028 - DNA, 196 bp, Glycine max
  unsure (1)..(196): unsure at all n locations
aacaagttttcacattcacanatcgcacataaacccaccatcccctgttgcccacctccaactgagctcacgtactcccacgtagcccatatcctcgtttctctcaacaccaggtccncatcgatccttccacgctttcccaacatccaggtaattcaacatccaaatcatcacaagctaacaaaccaagcaaaac

SEQ ID NO: 114029 - DNA, 294 bp, Glycine max
ctggcctttggtccttaggctttttccgtttcacagaaaaaaaagaagatgggagaagaaagatgcaaagctgtcagaaaaaagtagacaaactccttaatgctaaattcattagagacatcagatattctacttggctcgccatcatcgtcatggtcaaaaaggtcaaaggcaaatggcgaatatgcaccgactacactgatctaaacagggcgtgccctaaagatgattaccctctgcacaacatcgaaaaactgtggaaggaatgccttccaagattattttgatgatgcc

SEQ ID NO: 114030 - DNA, 230 bp, Glycine max
tctatataagctggaaccattttgtatataaacacaagttgagttgtattcagaaaattagagtttatctcttttatcttagtgagagtgattctcctaaattcttgagtgattcaagaacaccctggctgtatccacgactctcacaacctttgagggttgcccttgctggaaagtgtggttgcttccggtctttcgttttcatagtcattcttcgtaatcttccacca

SEQ ID NO: 114031 - DNA, 296 bp, Glycine max
tgtacgattatgggatacctattatatgtggtactacgtggcggtcgggcgatggtgcacaacaagttatccacgtccacaaatcgcgcataaacccaccataccctgttgcccacctccaactgagctcacgtactcccacgaagctcatatcctagattctctcaacaccgggtccccatcaatcctcccaagctttcccaacatccaagtaactcaacattcatacagcaaaaattatcacagccaaacaaaacagggcaaaggcataaaactctgcccaaaacaccaaccaa

SEQ ID NO: 114032 - DNA, 303 bp, Glycine max
tctcaagctttataccaaggcaactttttttctatgtatctaaaacccctcgatttagtggattttcaaggtttgacgaagtgaaaatgagaatggggtaaatttagagcaaactctcacctcacacaagcctataaccttaattaaacttgctcaaactagttttacgcctaaaattccaccaaatcaaaatttgactcctcaacacccaattttaccctagaaatggctcttgccttcactttggtcttttgtttttctctcttccacagcccaagctttctcataagtcctaaatgacat

SEQ ID NO: 114033 - DNA, 228 bp, Glycine max
  unsure (1)..(228): unsure at all n locations
ctttattcgaaaaaaatccaacaccttttgagtattcaaagagtgagtctaagacttcaaagaaaaaagactgtgttatcaaagaatatgagtgaccatgcagagagtttgnaacagcaagttactgaattctgccattgaggcatactcatgattctctgcagccattacacccacaaaatgacatagttgaaggaaaacaggatttgcaaaagctgctgggcatgc

SEQ ID NO: 114034 - DNA, 293 bp, Glycine max
  unsure (1)..(293): unsure at all n locations
tgcttctacactctactcctatttaaaatgtgntacttgtattaggtttaaagcatagtctattaagtgttagttaattatgtgataaaggatataaagtatcttttgattctgaaaaatgtattatcaagcatgagcatgacaaggaaattgagcatataggtttcagagaaaataatgtttacatgattgatttgaaacaaaaatctgaaaatgataaatgctttctaagtaaagatagtgatccttggttatggcataagagaattgctcacatgaacatggatcatcta

SEQ ID NO: 114035 - DNA, 437 bp, Glycine max
  unsure (1)..(437): unsure at all n locations
agcttgttcttgattattcctcagttttttttctgctttgaacaatatacttgtccttcatttaactatccttgggcttggcagccacgctcaacaaagtactttcgacacctaatgtacgttgatttcaccaatgctgttatgggaatgttgcgacaatcctttaaaaccttattgatacattctgagaggttcgttgtcatgtggccatatcgacgtccttctctatcgtaagtcatcgtccatttttcctttgaaatgcgatcaatccatgttgctatggctggactcagttcacgaaatttttctaaattatgatcacaaatgtgtctgcaaggagtgtangctgcataaaattagttatgaataacattcttagtataaatgaaagtaaataaacgtgacatcaatatgaaatctacccaatttcttaacat

SEQ ID NO: 114036 - DNA, 290 bp, Glycine max
tctccgctggttcagtattttttttgaaatgtctaattgatagaccacaaccaggagaacccacaattcccaccaaccattcaaagattcaaacttttcattgatgttaaaaggaaagagcaaaacttggaaacctttgagttcttttcctattagcttccatgttgtaatttgaaacctaaatgaggtaacgaacatagtaggccatgatcatgacgttgcattagtgccccaatgggagctccgaccatgcgaatggagtagtgaatggcgatgatgaagcacttttt

SEQ ID NO: 114037 - DNA, 196 bp, Glycine max
actcgccagtttgactggcggttccaaagcgctaagcatgtcgccattccaagtggcgatttggtcactgcatgcatgtatcgccattgacgctggcgatttgctcaaggacaccaaactcgccactggttctggcggttagagtcctccatgcatgcgtttcacataaatgacttcccctttttgtaataattta

SEQ ID NO: 114038 - DNA, 288 bp, Glycine max
tccatcactttgaccgcttttatttctcgtaacattgtcagagaagaagaagctgacgacgttcatgctaatcgaaatgatcatgatgaaggagaattgattaacatcgtctaatgtaattttctgcagagacagaggtcaccaaagcaagtaagtgacaactacatttttctctgattgaggcatcggttttttgttttagatggtatccttaggacttcatacagatcatgtttgttgccagtttcatcatccaccaccctataatgggatggcttgtcacgtcta

SEQ ID NO: 114039 - DNA, 384 bp, Glycine max
  unsure (1)..(384): unsure at all n locations
agctttaacaggctgtggaatgcaatttattttattaaataattaatactttaaatgaattattcttctctttatgcatgctaatgctaaaactatggntgtttccttatgtatttccctcaacgttcttaaaaccatcctcaataatagaccaaaaagctaacacaactaagcacagattgcacgtgaaataagaaaaataaacaaantgtcaagcattgatttccaccacctaatatccacacttcctcgttacaattttgtgcaagttatcaatcatatcagagtagcatgtcaattccttccctatcaaacagcaaagtttaatgtctcacttaaaatttggcttgattcacanctctcataaaatacaagtgggattac

SEQ ID NO: 114040 - DNA, 294 bp, Glycine max
tcggaagaaagtgatgatgttctagccctaaaggcagagcttgaaagagcccgggtagtcgaagagaagttcaagtccatagccatcaaagtttgaaaagagtatgatgaactaagggacgtcaatatggccaccgctgaagccttggaatgagaaaccaagaaggcccgaaaggaagaacacgaccaaaacaagttttgaggggctttatagggcagcaatagtgagctcaaactctgaagaggtgaaaggaatcatcatgggtcaaaggcatgatctggaaggacgagctaa

SEQ ID NO: 114041 - DNA, 290 bp, Glycine max
ttggaaagtgttgttttttttcttctccctaagccaatatgctagcttagcgagcgtccgttaagcgcaacactcatgggctaagcgcgaggaagactctggaagaagatgagttgtacaggttcgctaacacaccgcttcatcttactaagcgcaccgcttcagttcatccgctaagcgagaaaggcacgcgctaagccaaaattcactaatatgcgctaagcggtccataagtgcgctaagcgcacaagcacgaacaaggccacctatttaagcctgaaatcaaattt

SEQ ID NO: 114042 - DNA, 65 bp, Glycine max
ggaaaccgtaccggaaccgttccggagccccttcgctttaaattttttcaccggaaccatttttt

SEQ ID NO: 114043 - DNA, 290 bp, Glycine max
tcaagcgaacctagggtcttttcaagaagtcctcacccgataggttgaaaacccaaaagggcggcctaggcaacaattaggataataataaaaaaataaaaagaagaaagaataaggagcgtgtttatcaaggttttgtcccaaaatccaaactgcaaaagtatctaatcaagatttgaaatgacacatggtcgtctttcaacatcccaaacactaacttatcctttgctaccccctccgagccaaagcatatttgttttctaaaaaaaatacaaaaaataacaaaaaca

SEQ ID NO: 114044 - DNA, 361 bp, Glycine max
  unsure (1)..(361): unsure at all n locations
tgaagagatgctaacatgaatttagatcttatcatgggnttgnngacgtgtagtagagtgttaacatggagctcaaagagaaactaagtgtaagttgctacatggctgtgttgacagagttggagtgctaattgaagtgtaatgtgagtttcaaattttaattgcttgagtttagttcttatattaactngacatccaacgtttagaaaacgttaataatagttgattcttagattgaactcattgccatgagtatctttcaaaaaaaaaaaaaacaactcggatccatgcgtataagcaataaaagtactatacaacctagtgcatatatgattattttacaactatttttgtatagttg

SEQ ID NO: 114045 - DNA, 298 bp, Glycine max
aacctttaattgtcatggccgagactttttttcgtcccacaaaggatgcttatttataaatagcaatgatagagggggtgaatattaaggacatgtttgagaggttgttattagaatttaaatttggctgccccatgaggaaaccttgcacctaggtagcatggaaaatacctttcaacggtatgtatatatgtgaatatatatagcatgaaaatgccttgcataatatgaatatatatagcatgaagtgccttacaaagtgttggatgggtagcgtaaaagttctttttcaaaaaat

SEQ ID NO: 114046 - DNA, 438 bp, Glycine max
  unsure (1)..(438): unsure at all n locations
cttgccctgatataaagaggacttttgtttctatgaatgacaaattccttgggattaaggtagtgttgccatgttttcaaagcccgcactaaggcatacaactccttatcataagttgaatagttaagggtaggaccacttaacttttcactataataagcaattggatggccctcttggatcaacacagccccaatcccaacatttgaagcatcacactcaatatcaaaaaatntttgaaagtttggcaacgcaagtatgggggcatcagttagcatttgcttaagaacattgacagcttcttcttgtctctctctccatttgaaaccaacattgttcttgagcacttcattgagaggtgctgccaatgtgctaacatccttcacaaatcgtctataaaaacttgctaagccaatgaaagctctcacctcgggcaca

SEQ ID NO: 114047 - DNA, 293 bp, Glycine max
ctgggttttctttttcctagggttttctatccttcctaagatggatccaaacccagtcaccgtcattaagaactagcttttttcttcctctattgcctttagttgaatacacctttgtttggttctctatttggttttaaccctctcatgcaaattctttacaacctatgacctagattgcccttctttatgtataaaagaagggtccagtgggaggggaatgaggtctaacggtgttaggggattgaacccatagacaacctcaaaaggggattgcttggtggttctatgaa

SEQ ID NO: 114048 - DNA, 374 bp, Glycine max
  unsure (1)..(374): unsure at all n locations
gcggctgcagctttttgatttctaacacgtgccgttctttttttgtacanatagatcattagagcaacccacatttcaaatgatcacaactatcatatcatgatggcccatttctttgttgcatcaattaatataatcagaacagacgttttactacagtttatttaatataaatggatttaaaagatggtgtttcaactgtgataatataaaatatattaaccaattttaataaatatcattgaaactatagtgatcacttatttcttactatttttaatactcttgataatatcaattttagcccacctttatgattcatttcatacttttgggcaatcttcattatgatgccacgctttatacatctaaca

SEQ ID NO: 114049 - DNA, 239 bp, Glycine max
atgaggtctgaactttgaaatgtaattcttatatgatcaaagttgaaaaaaagcacacacatgatctctatttatagcctaagtgtcacacaaaattggagagaaatttgaatctctattcacatttcactagactgtgaaaatgaatttgtgagccatatattcactaatgcatgtgaaattacgagactaccccagatacaataacctttctaggtgccctataatcaatggctgaa

SEQ ID NO: 114050 - DNA, 191 bp, Glycine max
gaaacatatgaaggctggccttctttatggtttaaatttctattatgcattagcaagttcatatagcgtttttaaactcgacacttgcatgaaaaaccaggataaattataaagcaagtggtagctatgattgtgcactgagtacaccaccattgcataaacacattttgcacaaactgcgtccgaaatat

SEQ ID NO: 114051 - DNA, 106 bp, Glycine max
  unsure (1)..(106): unsure at all n locations
tgtcagaagttcttanttgttgttgctggtcccgacacggggggggatgattacgaggcccacgtcgatgagcccccaatatcactgagtcgaaacatcccttggc

SEQ ID NO: 114052 - DNA, 377 bp, Glycine max
  unsure (1)..(377): unsure at all n locations
agcttganactcaaggaaaagcttgtatgtgtgttcgaagatgnnnnggcttntacatgcccaactcctttgagtgacgtttctattggttgtaaactggatattgcatcttaatacattggatatctattttgcattgcgcataatcatagtgtgtgtaaaagaaattttcaaggtgaaaaatctcttcgaggcaaaacattgtttaatcgacacatagttgttgtatttatacaactagttgctgaactgcagagtaagtctccattatataatcgatcactggttttgagacatgactattatatgatcttgcttaatccataccatgtttatcgatactgtctttgtatactgttaaacggaacaaatacttt

SEQ ID NO: 114053 - DNA, 221 bp, Glycine max
atggggaccccaattttttttatgcttccaaaactgggggatttttaattcccatgaacaattgtctcacatgaattcatactctgttctgcactcgatctcagactataacgtggtcaatgacgtaagcttttgggaagcgtgcaattaccgctggaattgcagctctcactcattaatggctctataattccccttatatctgaggggaggctgtgatt

SEQ ID NO: 114054 - DNA, 64 bp, Glycine max
ggtgtacaataattttttttttttgttagccagcccaaggggtgacataatgaaatggatcatt

SEQ ID NO: 114055 - DNA, 266 bp, Glycine max
tgccacaattctattggccttttcctcatgaatcgatttcaggaaacaaacaaatgcccggcaaaggtcagaccattctctcctggttttagaaccaaggaaggagacctagaggaggatagtcagcttttgacaggatgactactattgagtgccgggggttcatcatgatatgtgctcggaaattggcacgtaactggtttctggtgtctacatcattaacacagtgaacaatgctagaccactaatataaatatgcacgtaac

SEQ ID NO: 114056 - DNA, 289 bp, Glycine max
tacctattaatcctttttgtttctttgcaaagattcaatagattaaaaacatgaagctctaattcaagatgttttcttcgttgcatgggcataatgcaatcactctatgtctagcaatgattttattaaaatgtccctacctttgagttctactaaaaattatcctctctcgagcgactaatctctaaaactgatgcatataaaaccttcaatgtatttctactaaggattaccctctttcaagcgccaaacccctaaagatgatgcaaggatgaagcatataatacat

SEQ ID NO: 114057 - DNA, 231 bp, Glycine max
ttatataaaaagcattaaaaatggatgtattgccctctgctacttgtccaataagcctttctatttcctcttttgtcaatgaacgtgatatggctggaattgatcctttatcattaaaatactcggctaaccagcttggtttggggtagaccaaatatatgactttatactcatttgattgaagccattactttggaaatcttagtgcccatatcgggaaaacaccttcct

SEQ ID NO: 114058 - DNA, 293 bp, Glycine max
  unsure (1)..(293): unsure at all n locations
tctattttggctgacggttttantttctctgcgtnctaaggtgcttttatttgaaacctcgaacctttgacaattattttctcctttctccactatgtagaaggaatgaaggattaagccatttagaaattttttccataaaaaaatattctagtttaatactaagtatataagaatacaataaatacatatatatttaagaaccaaaacatgaaaataaattactattcataaaaccatatattaacatttgagaggaaaatcatatacctcatcatctcgtttaagaaagg

SEQ ID NO: 114059 - DNA, 446 bp, Glycine max
  unsure (1)..(446): unsure at all n locations
gctntgagaaaccatgtaacccttggcatcatctaaacattcagcttgatcctttgtctacaatctcccccttnttgatgatgacaatcctgaaatcaagacaagctatatacaagatggtagtacgttcacacaacccatactccccctatcttttggcatgtatgcctaaaattaatggatttaantgatctctaacccaaggtttgttctctccccctcttgcaacatanataagaactatacaagacaatcaatagcgaaaacaaaggccaacattaaaccaaaataaatccatacattggcatgatcaaccaaagcaaagtcgagaaatataataatagtgtaagaatattgatactagagcaacanaaagccaaatcatggcgataaaacaagtactatatactatatcctatatacgtagcctaatatacatatagcta

SEQ ID NO: 114060 - DNA, 309 bp, Glycine max
tgagactactgaagcttgcctcaaagaggtccaggtttgactttgcagcagaaggaactagttccgctccggagtatgacagtcaccgctttaggagcgctgtacaccagcagcgcttcgaggccatcaagggatggtcgtttctccgggacgacgcgtccagctcagggacgacgagtatactgatttccaggaggaaatagggcgccggcggtgggcatcactggttactcccatggccaagtttgatccagaaatagtccttgagttttatgccaatgcttggccaacagaggagggcgtgcgtga

SEQ ID NO: 114061 - DNA, 200 bp, Glycine max
  unsure (1)..(200): unsure at all n locations
acaagttctaatggggatttgttacgcagctattatgagctcacacttaaaaaggctgagagagacatatcaaggatggagagcatgatgttagaggataagttatgagttgtcagatgtgatcgacgccgtacccgaatcaataaacataaaatgcctaactatgaagtgatctangtcgtttccaacgagcaatgata

SEQ ID NO: 114062 - DNA, 293 bp, Glycine max
ttattagtgcgggtctgttatttttaaggtcaagtgtttgcgatatgtgaagatgatgttccaagtacttcggatttggtccgaccatgccctcctgatttccagctgggaaattggcgagtggaggaacgccccgcatttacgcaacaagcataatgtaaacctttacggttttaaaagctctatagttgggcctaggctttagagttttcattttgttaaggcttggtgtcttttgtttttgaatttataatacaaggatctttcttcatctgttcctggtctctacccat

SEQ ID NO: 114063 - DNA, 291 bp, Glycine max
tgttcgcacatcgcccgtgttttttatatccactcgacaaggtttgaagtagaggagaccttcaatcctataacgcaacgtggcggacaaaaatgggcagttaacttgaatggccattactgtcaatgcggaagtattctgcgcttcactatccatgttcacacattattgcagcttgtggttacgtgagcatgaactactaccaatatatagatgttttttacaccaatgagcacatcttaaaagcatactccgcacagtggtggcctcttgggaatgaagcggcaattc

SEQ ID NO: 114064 - DNA, 312 bp, Glycine max
  unsure (1)..(312): unsure at all n locations
atacctattcctggatcaaaaagtaaaatttataggtggttcttggaaccctagctcgggaaatcccagaattggaacatagcctcgtgcattgtacgctatatttctgtcacaaattcacaccaatgtaagatgccagagttattnttcagggaagggctcttagttgttttgctcgtttcttcatatactagtatttagaaagttatggaactcattcagtcaatctaattctttctgaaaataggcaacgctaatagtntcattactactacattgcgtggttgttaagctactaaagngattcctaat

SEQ ID NO: 114065 - DNA, 302 bp, Glycine max
gacacttaaatctaagcttatccacgaactttttcttaaggcatatcttttcagtggctcttcactcaattctctacatattatgcactggtgacgggtaatgtcataataagcatggatggcttccttctatgtcaacattatcagcttctgaacatccaggagccgatcaaggactcccgatttttttacagcctcagcaacaagagtaagcaagttctctgtacacagaccattatcagcttgaatgacagacttaagtgcattttcaaatgctttagcaataccaaagtttgtatctt

SEQ ID NO: 114066 - DNA, 288 bp, Glycine max
  unsure (1)..(288): unsure at all n locations
ttgagccaanncatttttcttaatctcacnactcggaggtcagattgaggcccgccatatatcgagaagctcgaaattgaatgttgaacctttgagcaaatgcaaacgacaataagcggttcactcggaagctgattgaggcccgaaatatatcgggacgctcaaaagcgaatggggaagctctgagccacttcaaacgacaataactttatactcggaactctgattgactctcgtcacatatcgagacgctcgaaattgaatgttgaatctctgagccaatccaaa

SEQ ID NO: 114067 - DNA, 379 bp, Glycine max
  unsure (1)..(379): unsure at all n locations
aaaaaagcgcaatctgatcatttgcttttgataaaggcaaaagaacaaagcctggggcaaataaagagggtgaggatgaaaggaaaaccccgtgctgtgactggcatttcttatacagccaagtttcccaccaacccaccaatgtctttactcagccaataaccaacctttccttacccaccacccagttatccacaaaggccatccctataacaaccacaaagtctgtcttccgcacttccaatgatgaacatcacctttagcacanaccaagagcaccaaccaagaaatgaatttgcagcgagaagcctatagaatcaccccaattcaatgcctatgtgacttgtccatattactgataatcatggagccataccca

SEQ ID NO: 114068 - DNA, 285 bp, Glycine max
  unsure (1)..(285): unsure at all n locations
tcgaagggccganattatacttttctagagtcaaaagcatgatattggaagatgagttgaaggcttgtcaatggtccaaaaggagtttgtctgagcatttgagcaagaccaacgaaaacatgtgggccatattgactaatacaaagagaagctaaagttagcttcaacccgtgaacaaaggctaaaggatgagtatgcaaaggtataagtcctacaagcaaaaagggaggctagggagagagtgatcgattcattgcacagagaagcaatgatgtggatggatag

SEQ ID NO: 114069 - DNA, 182 bp, Glycine max
  unsure (1)..(182): unsure at all n locations
tatttttaaaaaatggatacanattgatataaactagtattgttttaaaatatgaatatatattaattatgaataactagtatatacaactatataacagttgcattaaaccaattaatagtatgatgaatacaatagtttttgaatactatttataaatagtatagttatactatatattt

SEQ ID NO: 114070 - DNA, 307 bp, Glycine max
  unsure (1)..(307): unsure at all n locations
gacacaacccccctcaacctaattttttgggtaatgttttttgttccttatcgntcttctacattgatggtgctttctatcattcctttttttttgcttctacgtttcctgtgtattatatttggttggaccttttgtgtttcaaatgttaattgcaccttttgtatccattgttgttgggtagattgcttatttgtgttctacctcagccctaatatttgggtgttcctgatcgttctcctactttgttgagcatacaagcccgaagaaaactaaagctttgatttttttctcacagaacaaaagg

SEQ ID NO: 114071 - DNA, 249 bp, Glycine max
  unsure (1)..(249): unsure at all n locations
acctggattaaaaaatacacattacgaccactacactgactactggagtaagaccatactctaaaataatatccaatcccccccccccctcttaagttagctnttggaattaaagaatagggactccgactaagctacgacttacaaatgaactaaactnattttgctaagaacataatgaatggtgataactggctatggaatagggatcaacgactgtcatattcaaacatacaaacattttacact

SEQ ID NO: 114072 - DNA, 320 bp, Glycine max
atgttaccctttcagggtgttaaggttggaaggaaggcatgcggctggttcttacgaactcacattgggccgcactcaagatgacttgaagtaggtattatagaacttcttgaatttgcatcatatatactatatctgtcatgatgcctactctgcatatacctgacggcactgcaatgtaatggaaattcaaagccaacatccctaacaaaaatccgtgagctttgctatgttgagccgctacattatatttccatcgcctgttggttttgcaaggcttctcatagagcaccctacatgtggttattccacagatagct

SEQ ID NO: 114073 - DNA, 210 bp, Glycine max
  unsure (1)..(210): unsure at all n locations
gagcaaagccccactttttttgacaccccaagagatcgttaatggtccaatgccttaacgtttctctccttttcaaaaatcaaaataccggttaatggtccaacgccttanacgaattttgctcggttaaaatatatcttgcaaaanaagaataaaataacttaaccaacgtttagttttgaagaactacacaggtctgatttctcatcg

SEQ ID NO: 114074 - DNA, 293 bp, Glycine max
ctccaacttggcaccaaaggttttttccggtaaaaaaaatccgtcttcaaactcttagaggtgactttgagcgtttgcttatggaggagtccgagtcaatttctgattatttttctcgagtattggccgtagtcatcaacttaaaagaaatggtgaagatgttgatgaggtgaaggtcatggaaaaaatacttcgaactttaaatcgaagttttgacttcattgttatcaacattgaagaaaacgatttaaagaccatgactattgaacaactcatgggttccttacaagcat

SEQ ID NO: 114075 - DNA, 433 bp, Glycine max
  unsure (1)..(433): unsure at all n locations
cttatttgtaaagctattcttgtctaggaacaaataaaattcttgccatgcagtcatggatgaagtggggagttgctactttatggccttgggtttcactttcgtggtctttcagcggcgagtaaacttacacttattgtgctgccattcgcaaaaccattaaatttctactttcaacacttgaaaaagatggtagggtggggagaaagctatctttcatgcccaaaacagggttgtcattgaatggtcatggtaaacaggatactatatnggttattaaactgtattaaatatgcttgtatgtatgtctntaacctcatttagtttggatgaatagagcacatattctttatgtgggttcaggacatttcacttctctntcccttgngtntaaaatttaatctctattactaattcactggtttttcgtcac

SEQ ID NO: 114076 - DNA, 313 bp, Glycine max
acactatcccatactcaagcttgggaggattgatggggactttttgttgagagaaacgaggatatgggctacgtgggagtacgtgagctcagttggaggtgggcaacaggggatggtgggtttatgcgcgcattgtggatgtggaaaacttgttggcaccatcgcccgaccgccacctagtaccacatgtgatgggtaccccataatcctacaagcttgagatgaggaagtgttgaagggtgaaacttcctgcttttattgttgaccacagagtggtacctggagatatgtcgcgggggtcaggaaaccttgg

SEQ ID NO: 114077 - DNA, 378 bp, Glycine max
  unsure (1)..(378): unsure at all n locations
tcaaacttacagagggaaactcctagcttgtttataaaacatgtatttactacaattatcccaaatactgaatttgcccttataggtcccaccaatttagaaggaagaatganggagtttaggttcaagtttccaccgtcaagtgtgcaaaataaggttttgaaactacaagtgagaatagaacaagaagatgaagtgaaaatcaaccttagagttgaaaatggaggtcacttacctaagcttgatggaagaagggctcaagaatacttggtaaagctgggaagaagaagaaaaatatggtctcctctttcttcaaaatctttagcaaaatgggagaactagcctangctttggcttttaaaaaaacaatagttatat

SEQ ID NO: 114078 - DNA, 299 bp, Glycine max
tcaagctttgcggatttggtcttttttttcgaaaagatcaaagtgggcgtggaaagaggtaaatctgatcatcctgctttgatgaatgcgaaaactggggcaaatgaagagggtgagaatgaaggagaaacccatgttggactgccgttcctacatggaaaatcccccaccagctcaacaacatcatttctcagccaatatcagcccttctcattacccaccacccaataatccacaaagtccatccctaaatcaaccataattcctgtctaccgcatgcccaatgcccaaacaccacc

SEQ ID NO: 114079 - DNA, 188 bp, Glycine max
ttttttttctatatcctcttgggggggatgggggtcctctgccttttatgtgaaaatactagggtgatatctaccttgtcctattcaactctaacaacttattgcgagtatacagcaggggaacctttgaataatatcctttaggccttgcatctagtggtatattttatgaaatcgtgatatgattt

SEQ ID NO: 114080 - DNA, 301 bp, Glycine max
tactcaagctttttcttcccacattcgattttctctaagaagcagaacaaggaacattcagagaacctatagccgccatggatgccattactctgtgagtgagttgaaagaaacaaataagtgagtgtgtggttcagaattggttgtgactctctttaatatgcaaatggtgttagctactatgtgtatgtgccgtgtagtggagatattattacatatttgattgatgattttttaatttaaaaatatgacaaagaaatagagatgcaaatggaaggaacgaattataggggggcaagac

SEQ ID NO: 114081 - DNA, 437 bp, Glycine max
  unsure (1)..(437): unsure at all n locations
agcttttgctcggatgtctgantgattcttcttaatcaatgagacgctcgaaatttgaattctgaaccttcanagctaaatccaacgaaccataccttttactcggatggntgaatgagtgccggaatatatcgagaccatcgaaattgaattctgaagctctgagctaatcaaacgacaataacttttttactcagatgtctgattgagtcccgtatatatcgagatgaccgaaattaaattatgaagctctgagctaattcaaacgacaataactctttgctcggatgtctgattgagtcccgtaatctatcgagacgctcggaattgaattctgaacctcagagctaattcaaacgaaacataacttttactcggatgtctgattgagtccccgtatatatcgagacgatcgaaattgaattcttaagctctga

SEQ ID NO: 114082 - DNA, 287 bp, Glycine max
tcagaattcaatttcgcgctttctcaatagattacgggactcagtcatacatccaagcaaaacattattgtcgtttgaattagctcatagcttcagaattcaatttcgatggtctcgatatattacgggtctcatcagacatctgagtaaaaaagttattatcgtttgaatatgctgagagcttcaacattcaatttcgagcgtctcgatgtattacgggacttaatcagacatccgagtaaaaaggtatcgtcgtgtgaatttggtctgagcttcaacattcaatt

SEQ ID NO: 114083 - DNA, 292 bp, Glycine max
tctcggctcatgctgggttttcctctagctcaacacccgtgcagcctaaggcacccacccagagggaagctccccaagatccaactccgaacacggctcgaccggccggtaattccaacacgacaaggaacttccctccaaggccattgccggaattcaccccgctcccgatgacgtacgaagatcttctaccatccctcatcgccaatcatttggccgtggtaactcccggaagggtcctcgaaccccctttgccgaagtggtatgaccctaatgcaacttgcaagtaccc

SEQ ID NO: 114084 - DNA, 388 bp, Glycine max
agcttgtgttgcaatatatgctaaatctacaacatcttagcaatatatgataacttctcctattctattattcatactaacaaccaaacaaagtcattttcatgagtgatctctcaatatataaacaacattaagaatactaggtgaactatatatataattagacatgcatgataaagctaaagtacttttcaatagcaaaatccatgttgatttcaaaataaaaaggaaaactaagtttttaaaaagcacaaaatatcaaatgctaccattgatgatccttagaacgcctaatccattcaatttattctagcacttggtcttaatctattggagaactatgtggcacaactgcatatagaaaatgaaggaggcattgaatacattc

SEQ ID NO: 114085 - DNA, 302 bp, Glycine max
ctcaagcttctagcacactccagacaattgtctcaaagatcccaacggtcagatcatgaaaaagtgtcttttaaagttgcaaacaaaatttcgagatgatccaacggttaacgaaggctgggcatcatttttaccgaggcagcttcatgtagttttctctagaagcttcattaagaggcttcctccagaagctttattaagagacttctagcacactccagacatcttctcaaagatcccaacggttagatcatggaaaagtgtcttgtgaagtttaaggccaaattttcgagaagatccaa

SEQ ID NO: 114086 - DNA, 450 bp, Glycine max
  unsure (1)..(450): unsure at all n locations
agctnntgaccacattaagtncttcaccatggtgaagtaagagagcccattattaacaccaccgaataatggtatcctttaagttggggttatcaacaccgtccaatgcccttaaaccggaattgtaaaattattttgagtcccttaaatttcataaaaaaggggaaatgagtgttgcagggaaaaaccaaacgccaacttttagagttgaaccaacaaattaactatgttcttggttaattgaacattatctagctcaatcaactgcatatntaacgaattgaactaattaaaatatgacgcgaaagtttcattggttcaatctctatnttagtttttaaaatattagaaagttgcatacatgcatgtctattattnntacccttctcccttttagatatatgagcatnggctatccaagctagggttacgtatattctagatgaagtc

SEQ ID NO: 114087 - DNA, 290 bp, Glycine max
tctatcttcgagtattcaattcaagagaactgctacatagtattgaacagttttgaacgaattgcacgaaaacaggttgcggctgttttatagaataactcaatttcaagttggtgtttttacggaaaacatgttgtgccatttagaattttccttactttaatacagttacatattgatctgttgggtgtgcagttggcctggagccgtggatttagagtttcatgtgggatctgattctcaaatttcgattgacttgttaagcaaaggttatcccaaaacgcattctt

SEQ ID NO: 114088 - DNA, 379 bp, Glycine max
gtccccccccccacttcccacacttctttttgcttcccttcctcctccaaggtggcgggatttgaattttttaaataattccaaattatttaatttttaataaatggtataatttaattggtggatggtttttttttgccgggggtcatcttgtgtccaaatgcttgaagttaaattggctaataatttagtaatttttattaatatataacacattgttaattgtgtttaattttagaatataatctattaagatcataataatatactgtataatgttattatgctattcaaaagaacgctattatattatatataaaaatattttgcgtgtcttatatatttctgaatttggaaatgagacaaaatatttatttct

SEQ ID NO: 114089 - DNA, 300 bp, Glycine max
taaagctgggaggacaactgttttgtttttttctaagagacttaataaggttcgatgatttgtcctcattagtaacttagagtaaagagtaaagacaaaaaggctataatactctaagcttagcttctttaaggtacgcatattttatctctaactttttaacttttactcattctgacttgagtgttgcagcctatacactcccattgcgaagctagacaagttaccattgaaaaaccagcacatatttcgcaattttacaaaatacgagataaaaatgaaaaaaaaaatacattgctc

SEQ ID NO: 114090 - DNA, 128 bp, Glycine max
  unsure (1)..(128): unsure at all n locations
ttccttctatctctgggattctatcatntaatgctttcacctctccagcatgtctttcttcaatgactgaaatatctgtatttctattcaggagagtaggtgtcgtatttctcccgtggcacgtactc

SEQ ID NO: 114091 - DNA, 317 bp, Glycine max
cggggaaatatcacatacctaaggcttaccttaagtgtagcaacctttgcgtgtaatcagaacctctggctaaaaaactttgctggcctagacaacctctcctccaaagtataccatataccggctccagaaaaactactacaccagccacaatcgcagcaccgaaactgcagacatgccacttccatttgctgagggaaggacagaagcctgcttgaatgttatacgagcttatatggcatgtattaatggctgctgggaatatcaaaaatatttgcaactaagtttatgattaaccaaacacatgttgttattaa

SEQ ID NO: 114092 - DNA, 256 bp, Glycine max
  unsure (1)..(256): unsure at all n locations
aaatttcttcacggaaacaatttttcccagccaaatccaaagaaaaaagagtggctaaggggctggacccctttcttcttcatttccttccctatttatagcaaaataggggaggtggttgccgcccagctcgcccangcgagctcaactcgcccaggcgagcagggttgcttccttcataatcaaccgccttctggaggaatttcaagaggcccatgtggccttggtgcttttcatcccattttactgttaccgc

SEQ ID NO: 114093 - DNA, 294 bp, Glycine max
tttcaaaaatgcaagtgcactcttgactcacaaatccagtagccctaagtcaccattttcgccaaaaagaattcgccaaggactaaccacctgaattctttttgtgtctctcttctcccttttccaaaagaacaaagactaacggcctgaattcttttgtgtctcccttctcccttgtcaaagaattcaaaacgacacagtctgagaattcttttgattcttccctttcccaaatacaaaagtgttcaaaggactaaccgcttgagaattcttttgtatccccattcacaaagt

SEQ ID NO: 114094 - DNA, 304 bp, Glycine max
tactcaagctcgaaggagatcccatggattttttttccagaatcatggctggactgaaataggtttttggccaaacttgaaatcacacatttctaacacagatcaatcaaacttcacataacctaacatccacaccaagcaatccacaaagataattcacacaacactttaactaatccagattaatcaaataatcaaataatacaagaaatacatcaaacatctattttcagttatcaaaacttcagggcattacataggggatgttgtagagaatggaaatcacattccatataatggtgag

SEQ ID NO: 114095 - DNA, 380 bp, Glycine max
  unsure (1)..(380): unsure at all n locations
gttgattgtttaattatttctcctaaaatggttcttttgagaaggctgatccattcttatttattggcactcanatattagatcactaattcttcttctttatgtagatgatatactcctcacaggatccactaccactctagtttctaacttcattaaacttctacaatccgaattttccatgaaggacttaggccttctccatcacttccttggtgtcgcaacctacccttcggcgggagggcgacgcgagactcgcgggatgcgtgttccacgaaaggaatacgcgcggagtcgccaccaacgtttatttgaggaaaacatcggaanaaccggaaaagacgcgatctacgaacttttaagtgaaagggttcggagtt

SEQ ID NO: 114096 - DNA, 292 bp, Glycine max
tgaaggtaaagaatcctttagttaagggaactaggtgttcactaactattcttaacttaaaagaatcatgaggttgaatattcaatttggagaatgttagatcctaattctgttcgattcgaacctaaaaaaataataaaaaaatgaaaaaaaaataaaataaaaagagaagaaaagaaaacaaaaaaaataaagaaaagagaaccaaaaaaagtattaagaaaaataaagaaaaaaaacaaaaaggaacaataaaaaaaagaagcaaagagagagagagaaaagaaaaccg

SEQ ID NO: 114097 - DNA, 291 bp, Glycine max
tgtcacacagtctgattcttttttatatatagatgtacttttgaactggacatcaatacaatatgcaaatgcacgtatctttctatgcaagaatttgtttactaaagcaaaagttataattactgaacttttctaaattttgcgaagcgcattttaatatgtttttaatctaggctaggcttggttggacttaagtctggttccaatgggtatccatagccaaaacaaatttcaagattaccagttttacactaacatgaataattcattaaaattatttttatcgatttg

SEQ ID NO: 114098 - DNA, 340 bp, Glycine max
  unsure (1)..(340): unsure at all n locations
attcttcctctgagatattgggttaaatagccgctccctgacatgcatggatgatttttaatgtccctacaacttttcatgattttgntgaacatgaagtttttattaacactgtacccaacatttctttttccttacttgctccttgcatcaatcaaaatgttggtatgtgttaaaccactccttctccaaactcacataactntgacagtgcagaaggatgagttcttcatttactagtgtacaagctagctttcatgccactattgtgagttatgggtgtttatagcaatgcaaacctcttcaataggtccaagattgcttatcatccccttatttt

SEQ ID NO: 114099 - DNA, 293 bp, Glycine max
tagctcgagcacgtcatttttattgatctgggctagcaggcgttgacggtaatgcggccttggtccctctcgcgacagcttgggaaccctagaaggggagtgagagtgacactgacatgtagaatagaactggctggagaatagagcgagctaaatagtaaaaaaacagaaatatccaacaccgtgttgaagtgaacgccttctcagacagttaccataactccgactacgccgaaaaatgcctattgtacaaaatggccaccagcttgtatactaacacggctgctgatgaa

SEQ ID NO: 114100 - DNA, 263 bp, Glycine max
  unsure (1)..(263): unsure at all n locations
ggttaaaaccctttgttatggaattcaaaaaagaatctgttaatttttttcctgtgcttaatgattttatatttgggaggtaagggacttgtatatgtatgcctgtgtaactccgtttgctgctgaatcagtcttgagtataatgagacaataaagagtggagaagaatttaataagatgtgctgctgaatactggatatttctaatgtatttactttagtatatgatagtaaatcanatgtgctaacaggcatctatctgat

SEQ ID NO: 114101 - DNA, 290 bp, Glycine max
ttgtgtcattaaatctgttttgtgtaacttcttccacaactgaggttctagagttgtagactctatatgccttgatgttttagagtacctaagtaatgttccattatcacacttggagtcaaactttcccaattgtctttaatgttaagaataaaacattgacatccaaaaggatggaaatatgaaatgttgggctttcgtcctttccactgttcataagaagtcctttttagaatgagccttatttaaattctattatgtaaataataggcaatattcactacttcaac

SEQ ID NO: 114102 - DNA, 424 bp, Glycine max
  unsure (1)..(424): unsure at all n locations
agcttgaaagataaggagagaancgatgtatttgtcatatancagnacatgtacataaccaggtcgatatctacttgcaatttgattatttaactttgaacttgttaagtcggggttcccaacaccaagaaatgaatgttaagtaaatggtttattttctctccttgcgtgcgtatcttttgcaccttctggggttcacaccgaccggttagatgatctcaacttaagagtaaaaaagacttattagcaagttggtcctaaatatttaaaatgcatcattttggtcccaaatttagaacctccaataggtccttcattctagaaagatataagaacctaaacaaattactaattatcggtcataaactatttgaccttattattaatatttagaaaacatatatctacacagatagttgcttta

SEQ ID NO: 114103 - DNA, 277 bp, Glycine max
ttgaatgaagagctcattttttttttaatggaaaaagagaagtagataatgacagtcattaaggtcaagaaagagtgatgatgaactgaaagacatcaacatgaccacagctgaagcattatagtgggaaacagtatggcccgaagggcaaaatccagcaggaacgagttctgagggcctttgtggggcataagtaatgagctcaagcttagaagggccgggagggacaaattaaagatggaaagcaaggtgttagaggataaattgaagagtggct

SEQ ID NO: 114104 - DNA, 343 bp, Glycine max
  unsure (1)..(343): unsure at all n locations
agcttgtgaagcatggcgctcatcatggttctggcgatgtagacttatcgattgttgcggccatcaatggcctaaaacaacttttggcttatctaataaaaccttcctggttctgtataaaagtggaatttacctataatccattgccctcatccataccatgcatatgtctcaatggtgtcaaacctgaacacagtgtcatctattattacagttcgtgcaacctgttattgtgatgtggtncttggatcgtatgtgtgagttgttacaaatagaaactgtctagattgcatttgacaagagatatagcttcttggaacatatccattatcgtgtgccatgg

SEQ ID NO: 114105 - DNA, 290 bp, Glycine max
tgacatgccactatttattttttcgaaaaacggtcctctccaagctcatcaaccaacaataagccaatggcgaaagtatagtgaatcatggcataactagaaactgggcaaggaaccacatgtgagccaatcattagaccaccatacattgcggacaaccgaatcaatttcccttcatgggtctacaacatcctcaaccacaaccaattcatgggagcaagcgtcatggaccccacgcttatttccgagtagggatgactttataaaaatatcttatagatatttcataa

SEQ ID NO: 114106 - DNA, 196 bp, Glycine max
gtcaaaacacgtgaaccaaaaaacggcaaaagccattttaaaaatctgttcatagattaggaacaatcttgaaattatagatttgtagagacagagtcatggagagaatggtgaagaaggaatcttctactcaaggctaacctctacagataatgaaacggaagaattaaactcacaataatgatcaatttgggat

SEQ ID NO: 114107 - DNA, 263 bp, Glycine max
tcaatattatatatagttgcagctatttttgaagaataaataatatataggagaataatataaaagtttagtacaccgtattcaatcataaataattatttatgataatttattaatttttataataattaacttaaaaattatattaataataatttttttattgatgattatgtaaacttttgcgcaaataatacatgtatattaaactcattttgaaatcttaaggattaattaattgattctagtaatactatcacact

SEQ ID NO: 114108 - DNA, 368 bp, Glycine max
  unsure (1)..(368): unsure at all n locations
tggcagcctggttaagaacctgggaaaatcaaattgttgtatagaggtggttataccaaccagcccatttttaaagcctactccgcaccacgggggccctcttggaatgaaagcggtttttctggtctggagacccttgacacttattcctggaccaactacaattcggggcaaagggcngaccaaaatcaccaagataaaaaagagatgggatgggtcgaaccaattgagcaccgaacaaatgtagtagatgtggagccgaaggctttacaagcgtcgctgtccaatgcaatctgaacgtgagagtggtccaaccgctgattatgtatggtagcctagcgacttgatttgctacagactgtcaatga

SEQ ID NO: 114109 - DNA, 293 bp, Glycine max
tgtcaacttaagtctaacattgtgttatttggacaaagccttaaacctcaccttcatgtctttttaaacaccaaagtggagccctttcttctccatttgcatgagctgaaccaagggagagaggagtccatttcttcttcttccaaccttaatacaagtgctcttgaggttccttccatcaaagctttggtaaggggctcttaatcttctttctcttattgttttccttaccaaatttatacaagcttctcattcatggtcccaaatttcattttcattcttagaagtttgag

SEQ ID NO: 114110 - DNA, 294 bp, Glycine max
tgtcgtgcgaacagggaatttttttttggcgctaagagcgcattcctgtagggttgaaatcgcacttagcaaactcttcgcgctcagtgagatgtaaaacgtggctatggctcacgaaccggctgacaaaatgtcaagacctgcgttatcaacccaccttccaaatcttgaaatacgatccgaccaggggtgaatccgggatcatggttttaccggaacatgttcacgctaaactagaaatctcataatttcaacttaagttaataaaaggccacatagcttaacatccatatc

SEQ ID NO: 114111 - DNA, 372 bp, Glycine max
ttactcactatccaggacaatgtgtttctcctgtcaacccactatccatggtcctaacttcattttccaccctcttccccataaacgtcatgaagacctcgtacgaaactccgaatgcataggttgagaatcaattgatgggcctgctgaactagggaatctgccaaggcgcttacctttatcgcctttcgagtgacaaaaacaatgtctaactctgacagtagaacctaccaccgagcaatccatccgatgaaagagggcttttcaaaaatatacttgactgggtccatctaggatgccagccaaatggagtaccacaacatgtattcggctaagccgcgagctgcccataccaagggcaacatgtccttt

SEQ ID NO: 114112 - DNA, 293 bp, Glycine max
tggaacaaatattttgaattcttggtccctttagagattttgtaaagatgactgctagttgatcattagaactaataaattcaataataacttccttagaaaggactttctcctggacaaaatgaaaatcaatctcaatatgtttagttctctcatggaatactagattgaaagctatatgtagggctgcatgattatcacaacatagcttcatttgttgagtatttccaaacttcaattcttgaagaagttgtttaatccaaatgagctcacatgtggctacagtcatagct

SEQ ID NO: 114113 - DNA, 386 bp, Glycine max
  unsure (1)..(386): unsure at all n locations
ataatataatgtctaatattctcatgttattattagagaagaaaattatggttttgtcaacattcactttttggcccaaactagtgaaaaaatgtctaatattntcttcatagcatcaacctgcaccaagtttgcttctacaaaaagtagaagatcatctatcaaggcaaggtaagaaatttttggaccaccttcagataattgaatatgcttcccaattttctgctccactacatgattaggtaggtgaaataatttctcaatgtaaagaacaaatagatatggggagatatgatcttctgccggactccctcgaaaggaatgaatatttctagagcttctccattacactactcttggaaggaagggatgaaatgcacaatcta

SEQ ID NO: 114114 - DNA, 293 bp, Glycine max
tcaagaaaaatggcctcaactttcttcttatttccagaaggaaattcaatcaatagacctccaatctttaatggagagggttaccactactggaaaacctgaatgcaaatttttattgaggcaatagacttaaattttgggaagccatagaaatagggccttatatacccaccacagtagaatgaattacaatagatggaagcacatcaagtgaaagcataacaatagaaaaacctagagatagatggtctgaagaggatagaagacgagtacaatacaatttaaaagccaaa

SEQ ID NO: 114115 - DNA, 277 bp, Glycine max
  unsure (1)..(277): unsure at all n locations
ttggaactaccccctgttggtagacggcgatgtaatgtagaaacagaaatgtagagatatcgagcaaccttgtttgctgtccattttgtgccgggttcggatagcagcanggtataacaacgactcatcaatgattgtttactatatgataaaagtaaatgattaacatgaatcactcctaacgaaagtagaacgcccattgctaagtgctcctgaatntagttgagaagcctcgggaaacagatgtttttagttgctcccaacaatatattaactc

SEQ ID NO: 114116 - DNA, 289 bp, Glycine max
ttgccgtaactgtatattatcttgatgcacctacaggcagtggttggtggcattggactgttgttaatattccagcaacagtaacatatttgcccgttgatgcagggagacgtgatggaacaaaactgccgactggtgctgttcaaggccgaaatgattttggctatgctgggtttggtggcgcatgtcctcctaaaggagataaaccacatcattaccagtttaaagtatgggctctaaaaactgaaaagattcctgtagattctaactccagcggagcgttagttgg

SEQ ID NO: 114117 - DNA, 257 bp, Glycine max
  unsure (1)..(257): unsure at all n locations
tgagttttgttgcttcctcatgcactcctctaatgactatagcatcanttctggcttcagcaggagtcatgtctccaagggctccaccactggtagcatctatcatacttctttccatattattgagtccttcataaaaatattggagaagaagctgctccgaaatctgatggtgagggcaactggcacatagtntttaaaatctctcccagtattcgtataggctctctacactgagtggtctaatacctgagata

SEQ ID NO: 114118 - DNA, 292 bp, Glycine max
ttataagcgcgggttcggtgatattaaggtcaagcgttcgcgatatgcgaagatgatattccgagtactttggatttggtacgaccatgccctcctgatttccagctgggaaattggcgagtggaggaacgcccggcatttacgcaacaagcataatgtaaacctttacggttttaaaagctctatagttgggcctaggctttagagtttttccttttgttaaggctttgtgtcttttgtttttgaatttataatacaaggatctttcttcatctgttcctggtctctaccc

SEQ ID NO: 114119 - DNA, 297 bp, Glycine max
tgggtgctattcccaaaacaactgaccaatccacccacccggcatagtcggtcaatgagaacctgtgatgtacctaaacaggcgagctcctggcagtctacagataaaaggaacacagaccacaaagcaaggaggcttgtggtggctggccagctgtgaatcttgtgtgatatatgggttatggcctctggtaatcaattaccaacggtgggtaatcgattacaaggccttaataatgaagacagaaagctaagatggtctctgtaattctataccatatgtgtgttatctgcatac

SEQ ID NO: 114120 - DNA, 292 bp, Glycine max
tcgaagggaagagagagttcttatcacaagcacatagcatggtcttgaaagaggagttagctgcttgctcaaggtccaaaagaatcttgtctcagtgtttatgcgagacaaagaccaacatgctagccatcacaagaagaactaaatctagccacggcccatgggcataaagtggcagacgagtatgcccaagtgtacgcgaaaaaggaggctagaggaagggtgatcgacgcgttacatcaagaggcaacaatgtggatggaccgatttgctctcaccttgaacgggagtc

SEQ ID NO: 114121 - DNA, 409 bp, Glycine max
ttaatcaccgcggctgcagctttctcggaataagtgtccattatttccgtggattgccgtaaccttatattttggttagtccaattttcctagatagtgttgctaaaaaaaatccatttacctggttcgcacaaggagtcatgaatcctatttttattaaataaatcttaaatatatacaatttctgttagaaatttgaatctctaaaaatgtgatattttcttttctcttcaaggagaactacaatttaaaatgatgcagaaattcattaaaacctcaattacctaaatcttaaacatacgatgctcataaatgaagtaaacttcaagtttctgtatcaaatctggaatatacatgtgctaataaatatgttggcaagttgaatacttattaccctagtagtaatgaa

SEQ ID NO: 114122 - DNA, 292 bp, Glycine max
tgtgtaatttacatcgtttttttatgcattaaattctccctataatagatgattggtacaattcttttctgtacttcaagttggtaaaaaaaatttagttactccaatcatttagaatgaagttggtccaccccatttttactcgagcaagttagacaaattcgtatcataaatatactcacaaaactaatgtaaaatgtctattatgtaattatctgttgcatgttatatatcataagtttgttgagttcatctttagttttgttagctcacaccaatatttatgtcaatt

SEQ ID NO: 114123 - DNA, 259 bp, Glycine max
agcttagcacaactaacaattatcttgacttcttcctcccatagaggaatgataaccacaaaatagttttcatgcatctgaatcaatgtccaatgctatatttcttgctttagatccatcaccgcgtctagagatgtttaatcattcacaaacacatcttcactctattatctggcgcttagacttgagagatactatgatcaaacagtttctgatacactgctgatatacgcatgaactgactctctatatgcagcta

SEQ ID NO: 114124 - DNA, 185 bp, Glycine max
atccttaagtcgcctgagcatcaactggtaacaaggatttttttttatcaattaaggaggggctttcgtgaaagtcttagtcctatgtcatttgcacaattgtcaatatgtcagataaacattgctgtgacacgcaaaacatctgtaggggctttactatgctaaggtcgctcataagctcataa

SEQ ID NO: 114125 - DNA, 290 bp, Glycine max
tgggacagcgtcgtttttttttttctacctacgccaatatgctagcttagcgagcgtacgttcagcacaacactcatgggctaagcgcgaggaagactctggaagaagatgagtagtacaggttcgctagcacaccgctgcatcttactatagcgcaccgcttcagtccatccgataagcgagaaaggcacgcgctaagccaaaattcactaatatgcgctaagcggaccataagtgcgctaagcgctcaagcacgaacaaggccacctatttaagcctgaaatcaaatg

SEQ ID NO: 114126 - DNA, 366 bp, Glycine max
  unsure (1)..(366): unsure at all n locations
agcatgtaagcttaagatctttcttcattattggattccccngccnnctggaagatgaatggcagtgggatggagaatgaacacgaggatggaaaccccccttcaagagaagatgagtttataaaagctcaccccatagaaggcatggatagagctgtgagagaacgaattaatgaaggagaggagagaaaacacaaaatttgtgctctaaagagctatgaatctgagttaatatcaacgacaagtaaaaaatgcacaccagaccttatttacctaattcccaaatggaggaattgaattaattaattcactgattgaatgaatgtgaccaattcctatatatatgatttgtttgtcaccctatca

SEQ ID NO: 114127 - DNA, 238 bp, Glycine max
aaccccggcattaatcgtcattgaaaccttggatgtacctaacaggcgagcttctggcagtcaacagataaaggaaaacaagacccaaagcaggaggcttgtggggctggcactggaatttgtgtaatatgggatggggcctctgtaatcgataccaagggtggtaatcatacaggcttaaattgagacagagcttaatgtctctgcattattccaaaggtgaattatacatacttaa

SEQ ID NO: 114128 - DNA, 292 bp, Glycine max
tgaaccaaaaccggtgagagttttatcttacactgtgagtgaacgactagctgtgagtaataatctttgcatgaatctttgaattttagaatgaaatgtataaatcaggacatgatgaaggccatgattatgcaatacaagccttttgaccaaaaagcttaccttgaatgataaattgtatcctttgcaccctttatgagctgaatgatattgtcaaaaatttgaaccttgaacttaaatcattatctccagataccttgcttagattctaggagagcatatggttcaaggc

SEQ ID NO: 114129 - DNA, 258 bp, Glycine max
ggaagggcaagaacctcccggacggcaagaaaaaaggaaaagagaaggggggaaaaaaaagcgagagacaccgcgaaaaagaaaaaaaacagcccggagagcgaacggaggggaccaaaacgagaccggggggagccagaaccccgagaagaaaaaagcccaaaagaggacaagggggacggggagaccaaagagaggacaccagagggaaaggcaagcaagggcaggggagccgaagcgcagaaagagacgaagaaa

SEQ ID NO: 114130 - DNA, 302 bp, Glycine max
cctaagccttttcccaaccccaaccattttttattcttatatattactcgcagaataaaaaaagctctttgtaattggtgttttcaacatttattttttcgaaattaacttgataaagcgaataatccttacagtagaaaacacaacatttaacattaatttatattgaaatgataatcaatatattcctaacttttctcttcaactatgttcttaaagcgacagagttaactcttcactaattatattattcatacgatatgatatttcatgatatttttctgccagtgtgacaaaaaatc

SEQ ID NO: 114131 - DNA, 270 bp, Glycine max
caaaacagggaggcaagggttagaaacgaaccaacggaggggggagagaggaaaacccacagacgaacaagcctcgcccacaaaaagagagggctaggacgaagcataaaacgggcccccatcaggaaaccggcaggaaagcaacaagaggaggaactgcgctcgcaacaaacaaaaagggatccgctcaccagggaggaccgccaggccacgagaggccactcagacgccgcaagggaacggcaaccagccgagaacacagcagggggg

SEQ ID NO: 114132 - DNA, 387 bp, Glycine max
  unsure (1)..(387): unsure at all n locations
agcttgagatgcataagcatatgtgttattattcaaagatgggcctgcgcttacaatccattactangtggaattcaccttctccgaaagcctaaagtggccttgcataaagggtgcctttcgaatctttcattgatgacagagctatccagttgtctactagttagaggggagagagactaaaatgtggatcttcgcatctttctttcgatacagattgaaaatgatccctttaccacatcgatatgttttatgcaggtgggacactgatgttgtgctcgaattgggatgagacgattgttaaaccgttctttgtgtaaacaagttgatatatggaggatatacatggctttgtttggtgctctgagccccttagagacacttgag

SEQ ID NO: 114133 - DNA, 294 bp, Glycine max
tcttaggaggcaacgtttgtgcttgttataacaaggaaataatgttgaagctctatgccaacataccatatattgcagaaagctcttacaacactgtcagcgcagtatcttcatacaatggagcaatagggcaggcgtagaaacttctgcgtacggcctaagaagagactgcgaaccatggtaaccaccaatagatgaatacaacatatggctcattggaaaataactaaaaatcaacctatgtgaaacgaaacacgagcccttgaacaactgccatcataacattgcttggac

SEQ ID NO: 114134 - DNA, 249 bp, Glycine max
caaaaaattccttgtgcgtgggtgggctgcggaaagagtaattgcaaaatgagttcctcgatgtttgcttatagatccccacggtcacaaatgtaggcttatgcactatagacttccataaaattttgagtcgatccacggttaacaattggatcgacgaattgtactgtggtcttgagtgaaaagctgtattttgcgacgctcgacagagttttgccttgtctgtcgctggctggaagctgtctgttg

SEQ ID NO: 114135 - DNA, 284 bp, Glycine max
tcaagctgcatgtccatttcatttgatgaagctaatttgtggaaaggccgaagtggacttgagctaaaacaaaaaattcaacaacaattcagaaacatcaggtattacttcaaactagtggaagtggactggctctgtctagctaaatattatccattaataacttgtagggctttgttgtgccttagtctcttgtaagcatgcatcatactgccgacaaatgacaattgattaccaatgattcgtagtaatgctcacaaaaccatttttgtggaaggaatcat

SEQ ID NO: 114136 - DNA, 291 bp, Glycine max
tgccacccagctcgccttggtgatctcagctcgcccaggcgagcaatgttgcttcctccagaagcaacagccttctggaggaatcttttggagggcccaagtgggcctggttgctatttgcacccccattttactaaatacaccccccctgcattttttggtgattctttttttcgtaaagttacggaaacttacgaatttcgtaacgatacttgttttctttccgtaatgttacggaaccttgcggattacataatcatcccctttttgacttacagaatgttacggaac

SEQ ID NO: 114137 - DNA, 282 bp, Glycine max
cactattgtcagaacaagcattgagttgcagatgggatgtgcataacacctatatttgttaggtggtgagtaaagagatggacttctgcagctatggttggacacttgcgcatgctgataataataaaacatctttatgttgcaccgcccgacactgcaagactctggatcattatcctttcacaactaccagaagcattgaagactgcaccacaccacccaagtagctctaactcattgttgcaagactgcatgtgtgtgacatttgatgattatagccta

SEQ ID NO: 114138 - DNA, 344 bp, Glycine max
  unsure (1)..(344): unsure at all n locations
ggacccaacnccgagcagcaccaaaaagaaagagtgatttttcaacgggcagggcggcacaacagaaggaaaataaacgggatccacacggaaaccataaaactggggagagggagggggcacgaacaactggaagggacacgaaagcaaggccacaaaacagaaggtacaggaaggacaacggagcaaaaagcacgtcccaggtggagaaaaaagaagaaaaagaaggaacaaacgcaaagagcgtgcaccattacgacgaacagggaaaaagagaaaaaccaaaggcagaaagggactctctgtgacgggagaaaacatcgaaaacagggaggagaaaagga

SEQ ID NO: 114139 - DNA, 282 bp, Glycine max
acttggattttctttttctcggatgaaatgatgatcaatgtcaatgtgcttggatcgttcatgatgagtagggtttgaagcaagacatatagcagatttattatcacaaaatagcatcacagagggcacatcaacttcaaagtaaagaagtaactagcttaacctaacaatttcactagtaacagaagacaaggcatgatattaagcttcagtggatgattttgaaacagtgagttgtttcttagaacgccaagaaagaaggttgtttcccaaaaaaacaca

SEQ ID NO: 114140 - DNA, 289 bp, Glycine max
  unsure (1)..(289): unsure at all n locations
ttcttttcancctttttttttttttttcgaacagcacaggcgttcatatccaagttacacggggcaaacgctgaaaatcttgctcaacactctaaccataatcacagttattttgactcaaagaccccaatacaattccttcgattcaattcgttaaccgttggatcgacttcaaaattttactggaagtgtatagtacataagcctacattgtgaccgatgggatctatttttaaacattcagaactcattctgttctaccttttgcacagccttattaaactaaagc

SEQ ID NO: 114141 - DNA, 351 bp, Glycine max
  unsure (1)..(351): unsure at all n locations
gtcttatngacaatgtggaagtcgagcggcacatttcaatggcagatgctaaagcggtgcaagtcgagaccatctaatactcatgaaacaaattgcggggattataccaagcatgaaataattgtgactagcatccaaaagctgagagttaaagatgaaattaaaatatttaattgaggatatgagtgttggaaaataatttaaatctgtaatttcaaatctctaagatattgtttagatgtaaaaatgatattatcttatttctaggatgttgtctagaattaaagatattatatgtacaatcggatatgtattttctcttctaagattangatgctagattcatatata

SEQ ID NO: 114142 - DNA, 249 bp, Glycine max
  unsure (1)..(249): unsure at all n locations
agctttgccttttgggcttgnacctcatcactttcttccaaagctttaacctcattgtctctcatagtctttagatttgggagccaatccaatccttgtgtccggacactcagccacttatgatagccgtcgatgatcccattactgcttcccctaagctctgtgtcttttcttcacaccgcatcacatgccttgcgaactccttggagtacctttgcattggggtcactgaaaccccgtgtaatgaaa

SEQ ID NO: 114143 - DNA, 457 bp, Glycine max
  unsure (1)..(457): unsure at all n locations
attctaccgaaatcattgtgattgaaagggaaattattatataaagttaatatgatgctaggacaacaaatggttgtcattttgagatgattaatacactggcttagtacttcaatttattctttagaaccaataaggagactgagtattttaaagtaaaaatacagaggactactatattatggaaacatgaatgttgaaacaccgtggacatagcatggtcatgatgaatggcattgcatttgtaacatgttgaaattgtacgtactgtgtggaaaacttgaaagagacaatatactctattntaccaataggactctatataattgttatatcgcgataataaatcactaatgttattttccaatttgtactaatattctagatcaattagtagcgtgatactatgaattaatgcacactgaagtccaatatcactcctaacattacactacta

SEQ ID NO: 114144 - DNA, 248 bp, Glycine max
agcttgttttttttttatacatgattggtacatgatttgggacttgtaggatgaaatttatgcaaaattggatgagggaaaaagtggttttcgaaatctgcactttatgcagaattttgctgttgaaatgtgcagcagaattttgtacaagtgcagaaaaatgcttgtgtatggctggttgtgaaaagggtagtacatatggggttctggacattttctagaagatcccaacggtcaaaatgtagatt

SEQ ID NO: 114145 - DNA, 302 bp, Glycine max
atcttgcctatcttgaattatggccttggtttgtgtgtctaaattgacaccagactcctaaatacacaatatctttcattgcaagcttagcaactgttccaaaacctcagtttattctaaaccaagtgtcgtgattactatattaccaattttgctagatgttaatgttgaatcatagatatgctctctcatctgccctttgtcttatctctttaccttacaacttagtcaattctatcattaccctctttcaatatgcagaatctgcagcatgcaaacatatctaatccaacaaatgccac

SEQ ID NO: 114146 - DNA, 250 bp, Glycine max
agcttcaggattacatgctgcaggaccgacgcaagggaccacgctcgcttgcacaggccaacccccttctacacccttacaccaccaaccattcaaacaccaccagccattctaaccccagccaccaagccacacacatgtccacccctgtggctgtcacttcacccaaccctaaccacaaattacctatcaagcgcctctcccctgaagcattggttgtccgccaagaccggggtctttgttaccattg

SEQ ID NO: 114147 - DNA, 373 bp, Glycine max
  unsure (1)..(373): unsure at all n locations
acttgtgcgtcaacaaattttaccttatggaagaaacgtgtttcatttttctttcttatatagtgttactgtaagtgcctatggaaaaaattatgcaaacaggacctaattttgttatgcttatttactaatatataatattcttttatagttatccatgggagggtagtacaattatatttgtaggcttgcccttatgttgaaactggatgatatgaatgcaacagtgatggctgctgagttaatttgacacgctgtagtatgagacttgatgacttgtattgtggataatattgaatcccgagacgaaaatgcaacttatgtctattcatctcacatagantattttttgttatttaaattaaattttaca

SEQ ID NO: 114148 - DNA, 248 bp, Glycine max
agcttggtttttggcaatagcaccccacctgacgtgcccaaggtctcctaacccccgcgacatatctccaggtaccactctgtggtcaacgaataaaagtaggaagtctcacccttccacacttcctcacttcaagcttgtaggattatggggtacccgtcacatgtggtactaggtggcgatcgggcgatggtacaagtcgactctccacgttcacaaatcacacataaatccaccatccccagttg

SEQ ID NO: 114149 - DNA, 257 bp, Glycine max
acctcaattcgcagatgttcaatatccattcactggcttgacgggaagcattgtactactcctactaattactttataattattgtaatttattagaaatggttactataagattaattagcctcttctatgaaaggatttaaatagcttagtctatataatgtatcgctctgtccaattttattatagataataatattcggaaattatgcattcaagtctcttgctcattgatgtgtacacattgttctgttgta

SEQ ID NO: 114150 - DNA, 247 bp, Glycine max
  unsure (1)..(247): unsure at all n locations
agcttattttgtggcagntccggggaccattgacgaacgggcgatcaatacaaaaaaaatactcaatccatgggaaaggaatgaaaatcacacactttgcctcaactctgctaaagcaattggatgtacagtagtcaacattggcacccaggacttcattgaaggaagggtatgcttgtaggcattcaagtttccacccataaaagcagaattattgtgggcgtgtacactgcagaacaacaaaatt

SEQ ID NO: 114151 - DNA, 208 bp, Glycine max
acttaatggcctcttgcttaggtcattttttcttcctataccaatgcgtgttttagtttaaatcttatacccaagctctgaaaagcagtcacccaagccatataatcagctgttcctcctacttcctccaattcacaagaaaattgataatgtaacatgtttgatatataccatatactaaccgattccatagaaaatttacagtaca

SEQ ID NO: 114152 - DNA, 247 bp, Glycine max
agcttttgttgggtcctttccctatccctagtgcagatctttccatgatatgcatgtttcccatatgaacttaatctctagtaatcatatgccaataattaatgacaacttaatgtatcatgcttatgaacttttttctattaagtaaatcccaagtgaaaaaaaggttagggtagatattattaattaattacctataaacaaatacaaatataaaagcagaaaccctgaaatggaatataagcat

SEQ ID NO: 114153 - DNA, 421 bp, Glycine max
  unsure (1)..(421): unsure at all n locations
ctatagacattattgcaaatttacaatggggggtagaaaatattgcaacaaaaaaaaatgtttgtatacctattattaatcacctcattggaagaaccattaaaagtgtcattaataggtattgattcttgtaactgtgattctgaaaggccagtcgtttttattttattggtctaaaaagtagctgaggtgtttatatagcacccgctggtcactttgcatataatatacatatatggagagagttactcgttatcttgtgtgcggtggtgctacttttcgtcaattcaagttaattaataattatattcatgagagagatctttttgcttgaaatatttgctcatatatttatanatatgagttgtgaatgataaataatttgatagtttactctgttattgttttaattaaaaaaact

SEQ ID NO: 114154 - DNA, 248 bp, Glycine max
agcttgctcttcagtagtaatggcggattgcatgtaaataacagacccccaccggaatttgttttgaaacggaccctctttcgtaaattgtttttaaaaggaaccccatacagtaaatttgccaagaaattagtgttgtacccataaaataattttttaaaatgaataaaaatgttataagagataaaaaaaattgatattaattttatcattttattttttaattttatagtatcgacaatgaaaaa

SEQ ID NO: 114155 - DNA, 150 bp, Glycine max
  unsure (1)..(150): unsure at all n locations
cggagaggatgcttcaatggatgaaaagaaagagggagtgttatatagaggggggagcataaaattgaaggaggaaaataggagagaagcttaactctgagttgtgnctcacaagactctcattcatcatagttacaacaagtggttcac

SEQ ID NO: 114156 - DNA, 248 bp, Glycine max
agcttggcattttggcagctttctaatagctaagtgggcggcattgggatgagaagctagagcttagctacacactcgctataatagctgggggcacccttctgccaaagaacatgagtattcgaaaaaagagcctactacaaagactacttaaaatgccccggagtacaaggataaaaccctatctcctggagcggacgcaatacagggtgacatcataggaaaaaccggtggtaatgcttacaaag

SEQ ID NO: 114157 - DNA, 247 bp, Glycine max
agctttttttttggaaaaagagtcatcttacctttaacgtttgttgggagcccacgttatatgaatcaactttactttgatggtatggcaatatgcagtcatgttggctttccaaatctttttattactctaacctgttatccaaattggcttgaaattcgtagattactttcagctttgaatctcaaaccaacagacagaccagacattgtctcacgaattttcagattaaaatatgaacacatgc

SEQ ID NO: 114158 - DNA, 275 bp, Glycine max
  unsure (1)..(275): unsure at all n locations
taacggctgaaggaagcatggtcnttatcccatcttagtacaatacccagagtggtcaacatatgccacaacacatgtgatgtattcaattccaagatctggtagtgtgagtgcaagcctattttcaccatgcttaaataaaatatatgttacataatgaaaatcaatgctgcccgcaaggttaaactttctggtaaccctggaccatcttgtacagtttatttctaaatagcttagaaagagattcaattcgctaatcaatggactctccaatt

SEQ ID NO: 114159 - DNA, 261 bp, Glycine max
aagtcgacgtgcgcgcatgcaagctttttttcgtcaaaagggaggaatccccaaaattttctgggagcggaacataatgatacggggaatcaccttcaaaatgaagttcccttaataacctgtagttaggagggattatcttctaccaggaactgataattctttataacaaaaaacctgaatagatcgaatgtttgagtgcacaccacttcccataaaattgttggaaccagatgctataggtaggctacgaatgattcc

SEQ ID NO: 114160 - DNA, 300 bp, Glycine max
tagttcttaacacgcttataacaatatacttggcctttctttaattggctatgggcttggggaccacaatcaacaaagtactttctggacctactatatgttgacttgaccaatgctgatattggaatgttgcggctatctttcaacaccttattcacacattctgatagggttggtgtcatgtgaccatatcttcatccagatgtaatcgtagccatgctccaattatcctttgaaatgctgaccatacacgttgctatggctggactcattgacgaaattttcttagtttgatcaaca

SEQ ID NO: 114161 - DNA, 192 bp, Glycine max
ggtggtcatgattgtgcgatgcttccttcactacatgatttatccattctgcataatgcgtgagcgagagtcattgaaaagcagagttgctgcacttcggacatccctgtaagaggactgactttgcatcatggtcggtgaccattctatcgggtgcggtacacatattagttggagatcgcgaacatgagc

SEQ ID NO: 114162 - DNA, 282 bp, Glycine max
gggattccccaaagccgacctgcaggcgggcaagcttctttgattattctccctagagaagctggagcttaggtacacatacccctctcataactaagctcacctccttgagaagcttccataagaagattcctaaagaagctagagcttagctacacacacctctctaatagctaagttcacctccttgagaggagaagctagagcttagctacataccctctataatagctaaactcacccatatgccaaaaaacatgaaaatacaaaaaaaggccctac

SEQ ID NO: 114163 - DNA, 375 bp, Glycine max
caattatgacctctccagcaacagatacaaccctggatggaggaatcaccctaacctcagatggtccaacccatagcaacaacaacagcagcctgctcctttcttccaaaaagctgctggcccaagcagaccatacattcctccaccaatccaacaacaacaacaaccccataaacaaccaacagttgaggcccctccacaaccttccctcgaagaacttgtgaggcgaatgactatgcagaacatgaagtttcagcaagagaccagagccttcattcagagcttaacgaatcacatgggacaattggctacccaattgaatcacaacagttcctaattctgacagctgcttctcaactgccaaagtcccaaatg

SEQ ID NO: 114164 - DNA, 248 bp, Glycine max
agcttcttattttggctcatcttgggggtgaagctccttcttcgatggcttattccctagtggatggcgccgcctcttacctcttgtcctttgtcttccgttgcatctccatgggggaaaatcaccattaaaggacctcattgaagctcagagatccagcctccatagaagctccacaagcaagcttccatcaactagtaccctcgccattaacactagatgaatgatgactcatgttggttgctaag

SEQ ID NO: 114165 - DNA, 296 bp, Glycine max
tgtgcatgtgaattatgaagcatcaacaagaatcaagccaatgctattgtgcaagcaatcgatggggcaaaacacaccaaatgattatgatgatggatggctcaaattctcacaaacgttaaactatcactttcaaattgagctctgaaaactatcatgacatgtagaggagaatcagagatttcgggctacaaaatgtcaaaaaacttttattatcacaacgattgcccctttcttggacatatccctatgagtcacagaaaaacatgcagagtcgttcatgcgcacagaattga

SEQ ID NO: 114166 - DNA, 249 bp, Glycine max
agcttggacttgtttatcttaaccttaagtttgggtcaaattgctttccctcgcgcagcttgattcccaaaaacaaaattaattggattattattaaatccaaatcatggttaagttcgttcatgtgtatggtcaatctttagctccaagttgcagttataattgtttttgtacatatcgtgccttttaaaacataggaaaaatattgtgccttttaaagcatgggaaaaacagaattaactgagaatg

SEQ ID NO: 114167 - DNA, 275 bp, Glycine max
  unsure (1)..(275): unsure at all n locations
aagcttctagctggtctggtctacttgaagacactatatatgctttatcccangccacatattatattactaaagcaacatatttatgagaagttaacggaaaattttcaagatatcatatacactgggattaagaaatatgaggaagaactctggtaatgctgcgttccacctattgtatggaaaaaaagatgttggtggggaaatgtttttctagtctaaacattcacttttgtcttcagcacaagattcacaaactttccttgttctcgagt

SEQ ID NO: 114168 - DNA, 250 bp, Glycine max
agcttataatatcaaaattgcctaaatcatttccaaatatgcatgtgaattaggaagcatcaacaagaatcaagccaaggctattgtgcaagcaatcaatggggcaaaacacaccaaaagattatgatgatggatggctcaaattctcacaaaggtaaacttatcactttcaaattgagctttcaaaactatcatgacatgtagaggaaaaacaaggatttgaaatcataaaatgtcaagagacttttat

SEQ ID NO: 114169 - DNA, 410 bp, Glycine max
  unsure (1)..(410): unsure at all n locations
cgtgacacttcaatactaagcttcttccccatttgctatanataggggaagaagtgaagaatattagggttcatccccttaggcacttctctctctctcgaanattctgaggaaaattagttccgtgaagaaaatccaagccgaggcgcttccgtaacgtttccgtaacgtttccgtgagtaattacgcgaccgttcttcaagattcatcgttcattcttcgctttcttcagtcttcaatgggtaagtacctcaaaccaagcttgttaattcattctatgtacccgtggtggtccaaattatgtttcatgttttgttattcccgctttcatttactgtttatacccgcctttgacgtgcttaagccaattattttagtcatatctcgcttaatctataaataaaataaat

SEQ ID NO: 114170 - DNA, 247 bp, Glycine max
  unsure (1)..(247): unsure at all n locations
agcttctatttgtattnnctcaagaaagcttctcaaggaagctacctagtctataaatagaagcatgtgtaacacttgttgtaactttgatgaatgagagtcttgtgagacacaactcaaagttcaacttttctccctttttcttccttcaatttcgtgctcccccctctctctttctctccctctttcttttcctccattgaagcatcctctccaagcttcttatccaaagctcatcttggtggtg

SEQ ID NO: 114171 - DNA, 358 bp, Glycine max
actgtgcgggtatatatggtatggtggactatcttgtaatcactgcagtgctataatgatttgaatacaatgctgctgctctaaatgtggtcgcaattcttgttgctacattatcatcatcttttcttatgaattaaaacatgtattttgtgaggagaaacaaagttgaaaaaagggcttgccaagaatggtgtacaaagctttacattgttgatacttatttgaatgattgaatgatgatgaataatgggatacaagcctcaagagaaatattattatgggatcactacaataactatccgtctgtaagttttatattgtcataatcttacggcttcaaaatccgctataactaaca

SEQ ID NO: 114172 - DNA, 259 bp, Glycine max
ccaaaacaccccccagaaagggggagtcgttttgacaacaaaacaccagttgcctcagagggaaaaacaaaagagagtggggaaaaacaccatgacaaaataaaggattgaaacagcaggaggaaaaaattataaaaggaaacttttttcaaaagccaatcggcacccaagcaaaaaatgaagagcaccacaacccaatgaccaaacaaaaccactaagaacaccaatcaacacgaagaaaaagaccccactaaaaaaa

SEQ ID NO: 114173 - DNA, 241 bp, Glycine max
  unsure (1)..(241): unsure at all n locations
gggaccccccctagtccaccttgacgcatgcaancttttttttttagagcgaaattgaagttttacattcaagggcctgggcattttattcccccaaattggaaaagagtatagctttttgaaaaataatggaagcgttgaaaattcaaatggaaaacgttttcaagtatcatgtggcattggtaatccttttcacaatcttggtatgtatttccagagagtaataaccttttgggcaaat

SEQ ID NO: 114174 - DNA, 248 bp, Glycine max
agcttttatttgagctgaacctttttatcaataaacacaagttgagttttattcagaaaattagagtttatctcttttatcttagggagagtgattctcctaaattcttgagtgattcaagaacaccctggctgtatcaaaggactttcacaacctttgtgtgttgcccttgcaggaaagagtgattgtttccttcctttcatcttcacccttgttatttgaaaccacaattccagaaaatccacctt

SEQ ID NO: 114175 - DNA, 256 bp, Glycine max
tttggatctccagcaattctttccgctcgcacgtattcaacaatatctgtctttcctcctacccagctcaaaatacctttcatgaaaaggtttcggtctggcataagtttaatattttcgacaacatcaccgctcatcagcctgaaatcaccaacattctcttcaattttaggattgcttaatttattgtggagcttatagaaccactcagccgttattcgcttcaggcgtccatcagttgagcggtcagatcttt

SEQ ID NO: 114176 - DNA, 244 bp, Glycine max
  unsure (1)..(244): unsure at all n locations
caactttttttttaanaagcaacaaacaggggaagaagcgaagaagaaaaaggttgagcccctcaggcactcgacccactatagaaatgcgcagaagaaaaagaacaccgggaagaaaaactaaaacgaggcgcagccgaaaagtgcccgaaacggaacaccggagaaaaaacggcgaagaatctacaacgagctcaaaagaggcagcgcacgagcttcggtaactacagacgcaccgggaaaa

SEQ ID NO: 114177 - DNA, 187 bp, Glycine max
ttcatcaagaagtactgcgctcacaggcatgctcttggctatataccacaacaacattgggatggtccgaatcagtctatatacacaccatcacctcctgcttagtacaactctgctcattctctataaaggtgagtcttcgcttccacacaaaaatactatggtcatgaacgataagccatcatgc

SEQ ID NO: 114178 - DNA, 252 bp, Glycine max
caaacctttttttttttttttttccggatggagagctttcatatttttcaagtttttattttaattaatttttatttttttaaactgggtcatggggaatttacggtaatgttgcatcttttattttgtgggtctagctatgatttgtccatggtcacaattatctttttccttttagcttaggtactctgcattgtgcaagcacatgtcatcacaacttatacatatgatattcttttttctttaacgttt

SEQ ID NO: 114179 - DNA, 422 bp, Glycine max
  unsure (1)..(422): unsure at all n locations
cttagagttctcttacatggtggaggttgtgccatgttctcaaatgttaaaatcagaatgttcaaaactataatgctcaaaatcaccaataacagaatgctcacgatgctcaaaaggtactaaatgatgtctaactaatctatgaaatgtcctatctatctcacgatcaaagggtcgtatgtcagatggattgcctctagtcatacactatattcagcatgcacaactaagtgccttcttatgcaagtaatagtgcaattttgaactacagctaccattaaatgatatccaaatgaccttcaattgtgtgagcaaccttataaaatgatgagaagatagcacaaaatatgtcaaatgaaaaatcaaagtctaactatagaagctcaanatgataagttcagaaaaattagagaatgaaactt

SEQ ID NO: 114180 - DNA, 247 bp, Glycine max
agcttagcattttacacagcttgaagtagttgcgcccttgacttggcagcctgctcaacctttctcttgtacacatccaagcactcctgctctaattgaagaagcgtcttgtctcgttgctcgtcgctctcaccaacctcatcccatatttctgaagctttttaacaaggaaccacatgtgttttctccaagaagaggattctgagcttcgatcactaccaatgaagtcccaacgacacctagcctg

SEQ ID NO: 114181 - DNA, 465 bp, Glycine max
  unsure (1)..(465): unsure at all n locations
acccatcacatgtggtactaggtggctgtctggcgatggtgcacaacaagttttccacattcacaaagcgcgcataaacccaccatccccttgtgcccacctccaactgagctcacgtactcccacgtagcccatattctcgtttctctcaacaccgggtccccatcaatcctcccaagcttccccaacatcaaagtaatacaacattcaaacagcacaagctatcacagccaagcaaaatatggcaaaggcagaaaactctgcccaaaacaccaaccaaaatcacagcttttcacatacaaataccccagaaacatttccttcgttcccattcngtaaccgttggatcaactcgaaatntntactgggagtctctagtacatgagcctacattttgaccgttgggatctactatcanacatccagaactcattcttgactatctctttcacagncaatcacaca

SEQ ID NO: 114182 - DNA, 245 bp, Glycine max
agcttcatttctacttttaccgacaaatctaattgcgttaacggtacaacgctcgcttcccgatctggcattgccagcgcaaaattgccccccatgcagatcaatgctcgagcctgccccgtacatattgcttgcatgctggcaattgcagcatgtccaggtgcatgaagtggggtgaagccatatcgctcacccagacgagccagaaactttgcagacggtttctcggtgataccgacggttcg

SEQ ID NO: 114183 - DNA, 348 bp, Glycine max
tatcaatactaagctttcgacgaaagtggcgcacgccttgcaagctatagtgagtccattcttgttgaattatatacttcgggccgcactttcaatgaagctgccgttctttatcagctttgtgcccgtgaatacgggagcaataactttcccgactgctccaacatgtgccatgaaccgactagcgtggggttggcatccagtatctgggatcgtaaagggaccgtgtggctggaagactttgagaagtgccatttagtcatttgcattgggcataaacctggtacaaaccaccatagcatgctgacttcgttgcgcgctctagagaaacggggagcgaaaatgatc

SEQ ID NO: 114184 - DNA, 249 bp, Glycine max
agcttttcttttttgtacaaattaaaaagttcttcatatcagcaagggagaaattaatcaaagagattaaaattttaaatatgttaaagggtgataataaaatgtctggactaaaaaataacaatggtaaagatatagacttctaaaaataaaatatatgatctctcatttaaaaaataaaatactaccattataaatctgataaaattgaaggataaaaattatattttaattttatttaaaactttg

SEQ ID NO: 114185 - DNA, 167 bp, Glycine max
catgaactcagctaggtttgaacatactaaagactgatttattgttgacatcttagctatataacactcctatcttgaattaagggcaatatttgtaaatgagtttgataccgtaactctgctacgaagatgctattgtatcctgggaagttcgtgtgggacaacac

SEQ ID NO: 114186 - DNA, 244 bp, Glycine max
agcttggtattttctatagtgctaaagtttctggttttatttactccatattgaggacaattaacttggggtcctgtctttatgatatttaagtttaatgtgccaacctattccaagtttggtcttttgccaatgtgttaaaagattttgcatgtggattaatacgaacgatttaacatctataggatatgaatagacttttattttggtgtattgctaaaatagtgatttcttattcttatgc

SEQ ID NO: 114187 - DNA, 440 bp, Glycine max
  unsure (1)..(440): unsure at all n locations
tattctacttacaaaatcgagtgtcaattcttgaagaaagtattaagaccacctctctgatattaccaatttgataattgagaacaaaggctcaagattcttcaatgtactctaagattctttgcttagtaaacaaaaattagattaactacaaaagcttactagtaatctggtaaaaaaaaaaaacctcttctcaaccttgcattttgtaatggaagaaaacaaattaaaatatgctatgataaagaaaaagttgctgacaataatataaaagaagacaggagatcatcaatgtaattgggggtaagttctggtgtttctgcttttatntcttagcatacgaagcccatccattatattcaaaataaatttttaattgttattcaagaactttctatttatgaaaagtatgtatggaacatatttttgcacagaactac

SEQ ID NO: 114188 - DNA, 240 bp, Glycine max
agctttgttttgctatgaccaggctttgtgaacctgtgaggatcaccaagcgcaaagcttgggtttgacgagttttatgttcagcacatgtgttgtgctcttgcatacttggcacttttggataagtggcctcaataacttaagaggggggtgaattaagttctaaaaatttccaactaatagattttaatcccctctttaaatgaaatatggtagatttataatgcagaaaaaaaagca

SEQ ID NO: 114189 - DNA, 425 bp, Glycine max
  unsure (1)..(425): unsure at all n locations
ntgaggccagacttatgaaactgtctaatgcctacatattatatcccaacaaacaatctcaggtcataaaagattacacacacagacacctcaacatgcaagagtactaccaacccatgttaaaaacatgtcatgtgtcaaaaacatggcaaaatgcaacatttatacaaacaagctcaatttcataatgaaagatagacaaaaatgaacccattttaaattggatacaaaatcaaagggtggatgaaaaaagatgccaactttgggggactatttgcaaaatggtcaaagaaaaagagattattaaagcttaccgctaccaagacgaaaaagagagagctnttgataagggttgctagatgcgagggatggcaacatgaacgaagatgtgagggactaatngaagaaaacatttactgagtgag

SEQ ID NO: 114190 - DNA, 247 bp, Glycine max
agcttgttttttaggaagtgttgaagggtgaaacttcctgcttttattgttgaccacagagtggtacctggagatatgtcgcgggggtcaggagaccttggggacgtcaggcggggtgctattgcccaaaaccaagcttgaccaatcccgacccaacccgggcatagtcggtcagtgagaacctgtgatgtacctaagcaggcgagctcctggcagtcaacagataaaaggaacaaagaccacaaag

SEQ ID NO: 114191 - DNA, 242 bp, Glycine max
aggatggcgccttccttctcctcttctctttggcttccgctgcatctccatggtgaaaaatcaccattgaaggacctcattgtagcttaaagatccagccttcatagaagctccacaagcaagcttccattactccgtgacaaaattaaaccctccaacattcctatatcatcttaaacatagccagacctgcctgaaaaatacccgaattgagactcatagaagaacctgatgaacttgat

SEQ ID NO: 114192 - DNA, 242 bp, Glycine max
agcttttttttggagcttctatggaggctggatctttgagcttcaatgaggcccttcaatggtgattattcaccatgggcatgcagcggatggcataggagaagaggacaggggaggcaccattcactagggaataagccaaggaagaaggagcttcaccaccaagaattgccttggataacaagcttgaaaaggatgctttaatggaggaaaagaaagagagaaggggggagcacgaaatt

SEQ ID NO: 114193 - DNA, 268 bp, Glycine max
cgccttaaaatgatcaccttttaaggtagaaagaattacttgttaagaaagaactaccttcggctgacttccttatcgccattgggaaatacgtatgagcaaaggggaacacccttgtcgaccacaccaaatgaaatatctcaaaagggcattaaggatctaaaggcattaattagggaaccttaaatataaaggcgcgtgtgcacattctaataaaggcatgccgcccttgggacggacgtgtggggagctaataccttccccgtgc

SEQ ID NO: 114194 - DNA, 239 bp, Glycine max
agctttctttaaaattgcggagaacccccccctgcaaactgccgcccattccttggtcgctctggccgaccctttccaacaactattagccacggtttaacggtatggaatgtataccaaagatgtacactcctgcttgcattcagcaaaaggtgacagccccgacatctgtcttaacacccctagattttgtgagaactctccggagagtcttaccaagaaggccagtgggtctcatc

SEQ ID NO: 114195 - DNA, 250 bp, Glycine max
agcttgtactatccaattaatcactattattttgtacctcttacggataagatctcccatgttgcctcaatcatcttaacttgcttgcaaagatagaatctaaggagagagaaaaggggacataatattaagcaaaagagaaaatattaaagcaagattaggttaatagaagcgtctaacttgatgcaacattatatcatagtgatctatttggatacctattgttggtgtagtcctgggtatgtgtatt

SEQ ID NO: 114196 - DNA, 389 bp, Glycine max
  unsure (1)..(389): unsure at all n locations
acttcaagctaccaatcttcctcgggtttgtccttctcttgcagttgcagtcccaaaataatcactacgcagaacaaaaaaaccttttgcctcaacgtttgttcatccccaacatcacactcttttcttctgcggaatcgtgatgagatcaaatttcgttcgggatatttctcaaacactttatctgtaatgtggaaagaagcgtgcagctttagcctggcttttcacttggaatttgaaccttctagctgcacacaatatgattagtttcactctaggtatttcaatataatgtaaccatgcaaagaaaaaaaaggttagagacaaataatttaatntgactatataacatacttatatgtgccagcctntatgtgaatnttcaccca

SEQ ID NO: 114197 - DNA, 249 bp, Glycine max
agcttgatatttctcagagactaacgtcgtcttctgcgcccttcgtcaatcgcggccaacaagcccgttgacacgcggagatttacgtcatcttccgcgctcacaagatctgtcatactgacatttgagtcacgctgacgggcggaaatacccgagtggttatccgtataaacattcttttttgctgtctgtaagacgaaaagcctgatagcacgcagagactaacgtcgtcatctgcgccgttcgtca

SEQ ID NO: 114198 - DNA, 248 bp, Glycine max
agctttgattgttcttaagtggaaacaacattttttactttaaaagaactttttacttgtttacctttttggaaaacttcacaaagagaatcatcttgatatgacaggtttggaagtccacttatgaggctatacttttgaagctttgagattaacctcaatctagcatgaccaagtttcttatctcatacctagtgatgctctttagctgaaagtaagcatgacaccttttgagtggatacagacct

SEQ ID NO: 114199 - DNA, 318 bp, Glycine max
  unsure (1)..(318): unsure at all n locations
gaagtgaggaaatgtggaatggtgagactntctacttttattcttctaccacacagtggtacctggagatatgtcgcggtggtcaagagaccttggggacgtcaagaggggtgctattgcccgaaaccaagcttgaccaatcccgacccaacccgggcatagtcagtcagtgagaacctgtgatgtacctaaacaggcgagctcctggcggtctacagataaaagaacaaagaccacaaagcatcgaggcttgtgtggtggctggccagatgtgaactatgagtgttacatgggatattgcctctggtaatcgattac

SEQ ID NO: 114200 - DNA, 247 bp, Glycine max
agcttgccttttgaggtctaggaaagacaaggcggccgaaggatttagttccgctcctgagtatgacagtcaccgctttaggagcgctgtacaccagcagcgcttcgaggccatcaagggatggtcatttctccgggagcgacgcgtccagctcagggatgacgagtatactgatttccaggaggagataggtcgccggcggtgggcatcactggttacccccatggccaagttcgatccagaagta

SEQ ID NO: 114201 - DNA, 340 bp, Glycine max
  unsure (1)..(340): unsure at all n locations
tcttcggaagcctctaatgaagcttctcaaggaagctacatgtttctgtcttgngaagaacgctgtccaaccttcattcaccgttggatcttctcgaaatttagatttcagcttcacaagacaatattccatgatctgaccgttgggatctttgagaagatgtctggagtatgcgcgatgttttcgtttccgttagcgagagcattgctcatttgtgcgtcttgagccttgtagtccaaatagctttggaaaaacgccacttcttctcctttctttcttccaaaccatttccaacattgcaagctctttctccatcacccacagccaccattatgccaca

SEQ ID NO: 114202 - DNA, 250 bp, Glycine max
agcttctatttgctgaatcatttcatcaataaacacaagtggagttgtattcaaaaaattagaggttatctcttttatcttactgagagtgattctcctaaattcttgagtgattcaagaacaccctggctgtatcaaaggactttcacaacctttgtgtgttgcccttgctgaaaagagggattctttccttcctttcatcttcaccccttgttctttcaaaccacaattccagaaaatccaccccctc

SEQ ID NO: 114203 - DNA, 303 bp, Glycine max
  unsure (1)..(303): unsure at all n locations
ctatacatactcaagctntcgattattatgcccctgtatccgacttccggttgatattgttatactcattgaatttctcgagagctttggttggtcaatatccagtgtctccatatattatgcacctgaatcggattgtcgtgagacacgttatgatcatttgaatttctcgacagcttccgttgttcaatatccagcttctccatatattatgccgcctgaatctgacatcccgtgtgaaagttatgaccacttgaatatctcgagggcttctcatgatccatctctagcatctggaaatat

SEQ ID NO: 114204 - DNA, 248 bp, Glycine max
agctttttttcttgcgaaatggaatttgcaaaacaatggcagccatttcagggtttgaatgcaattctgtggatgacaaaggataggaatttgaattatcaaaatctgcattgcctgataaaagcttgtttttagaggacaaagtctcttcatctggcctgaaagtttctcccttcattcctccatgagaagcttttagagttttagaacaatgctgctcgctgtaacactttttttcaggagaaacg

SEQ ID NO: 114205 - DNA, 494 bp, Glycine max
  unsure (1)..(494): unsure at all n locations
ggagctctggtacatcaactgcgaaaccgtcccatttcttaagcagcaaaccaacattctgcaaggtttctgagttaataaagttatgcctttcaaccaacaaagaaaactagaaaaggtgaaaaagattcaaaacgcaaaccttgagattcatatgaccttctaacatatcatgacattgagcactacaagattccacttgacttaatagattctggagcacgtctatctccaggagttgaacttgaagatccacaaactattgaaaacatgaatntcatattataatctgcatgtacttcacaatgtgggtgttgtgtctgtgtatgatatatactactcacataaatgcaaaacacatganataatttaacaatcgtgaactagtccaaataattaaattataagtcacttcattatcacattattatatgaaacaaatgcangttaatatattaatttaatacataaataataacagttatattcctcta

SEQ ID NO: 114206 - DNA, 246 bp, Glycine max
agcttgtttttgtcattaaacacaattttctatgagttttatatctctaaaatttcccctcacaatatcaggataaataaatcatgagccaaagtaatactctctgaaaatatctttcttaatcttccaatgtaaataaaatttgatttaacttgaccatgggtggttagcatgagtagtattgagccttctgaaatcctatcattctttactagattatataaataaacaagggcaagcaaataa

SEQ ID NO: 114207 - DNA, 280 bp, Glycine max
ttacattcgcttacaaacaattaataacagatagcttaatgtgtaatattatcactagccatctgacttgatcaagaactaaaactattataaatagaatgtcaaacaattatgaaagaatgggatctaagtctcgaactattaaaaaaattgtctgtgggataatagcacaaagcgcatcaagaagaagaaacatccacatccctcgaaggataagctataatggcaaaatcaacctaaatagaaaaggcttatgaaatcgggcacaaaattaaaaatc

SEQ ID NO: 114208 - DNA, 247 bp, Glycine max
agcttatattttatgccaagcttttaaaaaaagggctttgacatgtaaataggtcaaatttgggtcatatacttttaactaaggttaggcttaggcctagcaaaacctagcatgacctagcctatttccacctctatcaattccatgttagcatacttatcagaccgtcatgtcatttaccatgtcacaatgtcaatatcacatcatcatatcatccatttctaccaaaaatttgacagttggctaa

SEQ ID NO: 114209 - DNA, 341 bp, Glycine max
tgtgcaaatcaaatcactcctacattgtatctctagcatgcattgtatgttggtctcgtcctttgtcacgggaagccggaaggtccatctcaccttcttaattgtacacatggggcactgcgcccccaaatgcgcaagtaagaagagataattttccgggctctcgtgtccgtaaaatgcattcatatcatgcatcgcataagcatctcttcataacatcataatggacatatcctgcatttgtccgttatcatattccagcctcacattttgcatggtcatggcatcatcatgcatatgcgttcaacaaacttattggtctgcaagaatgcataccattt

SEQ ID NO: 114210 - DNA, 246 bp, Glycine max
agcttcttttggaccttgaacaggcaactaactcctctttcaaaaccatgctatgtgctcgcgactggtccctttcttccctttgtagcttgagttcattgttgctacctcacagagctctgcgaaatttattccggccatactcttccttgcgagccctcttggtctcttgtttaagggctcttgcggtagttgcattctcttcccgtaatccggcacactccttcggaatgcgtgtagcggcca

SEQ ID NO: 114211 - DNA, 318 bp, Glycine max
cacgcagagactaacgtcgtcttctgcgcccttctgtaattgcggccgacaagcccgtttacacgcggtgatttacgtcatcttccgcgcttacaagatctgtcatactaacttgtgagtcacgctgacgggcagaaatacctgagtggttatccgtataaacatattgctgtctgtaagacgaaaaggctaatagcacgcatagactaacgtcgtcttctgtgcccttcgtcaatcgcggccgacaagcccgtttacacgcggtgatatacgttatcttccgcgctcacaagatctgtcatactgacttttgagtga

SEQ ID NO: 114212 - DNA, 297 bp, Glycine max
tgagatccttgtcattactctcacggaatgagaagccgtattctattggaggcactaacccaaatatgaggaatgataagatagcaaaaaaggcatgtagatagaaattcttccgctttcccaatagttcataatatttgtcctcttgtgcttgtgtttcactttcctgtcttggttgcgaagctttcaagtccctaagctgtgcgcatatagaggaaatagttttaatggggaaaaaaatagagaatattatgtgtacaggaaatatttttttctttttaatttcttaatcaaaat

SEQ ID NO: 114213 - DNA, 243 bp, Glycine max
agctttttttaaaagctctcaaacatctcttttcttcttatttctccatcattgttgtgcaaagctcttattttttggttccaaaatttcattttcattcttagaagtttgatgcatcaaggacctgagctatttgttcatgtgagttatttggtgtaacttcattccaggtaagggggggtttttccacttcttgaatcctaatcttgttgcctttggaagctaggcttcattgcatgttgt

SEQ ID NO: 114214 - DNA, 348 bp, Glycine max
actcagcttttatccaggctcatcttggtggtgaagctccttcttcctaggcttattccctagtggatggcgcctcctctctcttcttctcctttgtcttccgctgcatctccatggtggaaaatcaccactaaaggacctaattgaagctcaaatatccagccttcatagaagccccacaagcaagtttccatcaagtggtaatcagagcacaagagcttcaagtaggtgctccttaaacctccattaattttttgctttaccttctcttccattgttgtttcttcattttttctccatgtatctcctcacatgtcttgtgataaatggttttaacatgattcttta

SEQ ID NO: 114215 - DNA, 249 bp, Glycine max
agcttgtgttctcttcgtcctagtgtcttctcattaattcctcttgaaactcatcgaactctgtgtggtagattaccatatttcattatggtaacagcttcctgggtacaattatatcagtatacctctcccaagcttcttgagaggtgaacctagaccagtcatatctgacttgggaaggtgtagaaggagccttccttttcttagatgtcatctgcaaaataattagaacaaaacacaagattaaac

SEQ ID NO: 114216 - DNA, 249 bp, Glycine max
agcttgagttttttaaagagggttctttccaagaggtctaactaagccaggtgcaaggtggttccgaagtcccatgaaaaagtgcgtaaaagaattttgacctaagaattgtttcctagtgacgccttatttatctattccttttgtcttgctttagttgaaatgaattaataactttgctaaagcaacatcagtctaatatcatcaacatcgtcatccactggaacctgtaaacaagattggacggtt

SEQ ID NO: 114217 - DNA, 422 bp, Glycine max
  unsure (1)..(422): unsure at all n locations
taaaagaactatgactattgaagaatctattcatgtttccttngatgagtctaatgctatttctccaacaaaggatattttagatgatgttgcagaatctttagaacaaatgcatattcatggacaagattctaaaggaaaaaggaaaggaagcaatgaagattctccagaaaaagccaaatcaaatgatgaacttccaaaagaatggaaagcttcaaaagatcatccccttgacaacattattggtgatatctcaaaaggggtaacaactagacattctcttaaagatttatgcaataatatggcttttgtgtctatggttaaacctaaanatataaatgaagcaataatagatgatcattggatagtctctatgcaagaagaactaaatcagtttgaaagaaacaatgtgtgagaactag

SEQ ID NO: 114218 - DNA, 249 bp, Glycine max
agcttttatatattgtgaagtgctcaaccttatagactacaaacctcaagtgactataatcatcgtttagattttttcaaaactatatacttgattagtctttccttttgaaacaattagccttgcctttaactcaaaggtatgagatttaattagtcaatttcaccattaagattgctcatattggtcgagacccgattgtccatattggcatttgattgatcaatgagaacgacgatcatgcaaaat

SEQ ID NO: 114219 - DNA, 300 bp, Glycine max
aaaaaaacatattattagtcaatttattcataactgaatgtaataattcagcaaaaactagaagaaaattggaccaaagtagaaaatttgggtcaagaatggatagattggaggaaaatattgacaaggtttttttaagaaatgaggaaaactaaatgatgggtaagcatgcaaatggatctaattcttttttttttggccaaaaaaggaagaatatgaggtgagttgtaagaagacgtcccaactatgttggcaccccaacttctactcccctggagccacacccctcaagtattattg

SEQ ID NO: 114220 - DNA, 247 bp, Glycine max
agctttttgctttttgccaattgttttgatttacctgatttcattttcacactatggtaatgctttgattgctttccatgtattgtaggtagtttgtgtgtattttgtaaactgagcatatgatattcataattgataaatttcattttattgtggaatcattttaggccggaattctaggaaacatgcaaaatctttatgagactgtgaagaaggcacaaatggttgtccaagttgaagctgtgcg

SEQ ID NO: 114221 - DNA, 324 bp, Glycine max
attgatggtgacccggtgttgagaggaacgatgattatggctacgtgggagtacgtgatctcagttgaaggtgggcaactggggatggttgatttatgtgtgatttgtggatgtggagagtctacttgcaccatcgcccaattgccacctagtaccacaatatgacgggtaccccataatcctacaagcttgaagtgagaaagtgtggaagagtcagtcttcctacttttattcgttgaccacagagtggtacctggagatatgtcgcggtggtcaagagaccttggggacgtcaggtggggtgttattgtccaaaaccaagct

SEQ ID NO: 114222 - DNA, 248 bp, Glycine max
agcttcttggggttggctggctattatagaaaattcattgagggattttctaaattggcattgcccctaacaaagttgactcgtaagaatgagaagtttgtttggaatgagaaatgtgatcaaagtttccaagagttgaagaggcggttgacaacagctccagtgttaattttgcccgaccctaagagaccatttgaagtgtattgcgatgcaagcgggcaaggtttggggtgtgtgttgatgcaaga

SEQ ID NO: 114223 - DNA, 348 bp, Glycine max
  unsure (1)..(348): unsure at all n locations
atctccactaagttgcctgatgcctaaaatgactgttgtgatggctagtgtcctagatgcanggaagaatttctccatgaacaccctcttaaggtcgtcccagcttagaatagacctgagagcaacgaagtacaaccaaatttttgccactccctccagagaatgatgaaaagcctttataaagatattatcttcttgtacgtcaaggcgcttcatggtggaaccaccaatatcgggctccttataatgcttatgatgatcttcacctgcaagaccatgaaaattgtcctcaaatgattattccccattgacacatatgaacccctctcagatttgtatgtcaacttt

SEQ ID NO: 114224 - DNA, 250 bp, Glycine max
  unsure (1)..(250): unsure at all n locations
agcttgtgttctttttaaaagggngacttcccagagattccccttgaaactcatcagggcgtgctggcgaataaatccaactttcggttgaaaaaattcagacctaagcctacggttactagagtaacttcgaccagaattacgggaaggctagcttttcaatcccataatccacttccaaggggataaacgtacctgcctgaacttttccaattccaagccaacttattctgacatccacaccatgtgc

SEQ ID NO: 114225 - DNA, 247 bp, Glycine max
agcttattattgattaaaccgatacgagacacttctttgcaagcttaaaaccaacttgtgtaatcgattattgtaaggttgtattccattaaaacaaagagttttgactactgcaaaaaatttctaactttataaactttctccttactcctaaatgatgatgcatgatgcacgtatgaattgatagagactaagatacaacacaccatacaacaatcaatacaaatgccactcaagagagttgggc

SEQ ID NO: 114226 - DNA, 394 bp, Glycine max
catgctccaatctataggaggttcttaacaccctagctattggaaacctagatatatccttccccctccctctacaattatatattcttttaagaatataaatctaccttattgtcacattatattaatgaataagatgatattgtaaagtggtcaaatcttataggatgtctgtataaaatttctaaattaacagtgtatataaattgaactacgtctcttaattaatgaaacattcttacacttaattttataacaatctatacaaagtcattttgtgtatgatattaaaatgatggataaaaaaaatactataatacggcttggaaataaattacattaccacatggccagtgtggttactggtttgaacattaaacacacaacattttaa

SEQ ID NO: 114227 - DNA, 246 bp, Glycine max
agcttctttttctgaccacttccagggtgctggaactacttcacatggacttgatggggcctatgcaagttgaaagccttggaggaaaaaggtatgcctatgttgttgtggatgatttctccagatttacctgggtcaactttctcagagagaaatcagacacctttgaagtattcaaggagttgagtctaagacttcaaagagaaaaagactgtgtcatcaagagaatcaggagtgaccatggca

SEQ ID NO: 114228 - DNA, 453 bp, Glycine max
tgacacatattgataacataaatccggatgctccttcgttaatggactagtatgcaaaggtcaatgtattataaaattgttcagcatctacatattgggcaactcttccatataggttgactcagctcccacgttaattagcattaacatcaagtacttcgatgaatgacctaagacttattataacaaatacatgatgaattctaaattatcaacacataatgcagcatcctacattttatagatatgatcacacctattgattgtcgctctctggtaacaaataacacatcaattcacataagaactctcacaagatatctaaatcactttctcaaacctaatgtacaataaagagcacaatggaacgagagtatctatgatcaacacatcaaaagctaaaccatatgtgtattcacacaaccactgtccacaccaccaaatgtaaataca

SEQ ID NO: 114229 - DNA, 57 bp, Glycine max
tttttctccctcactttacgttaatgctctatttttaacaggaatcaattattttct

SEQ ID NO: 114230 - DNA, 250 bp, Glycine max
agcttttttttctgaaggcgagtgcccatatatctttaccaaaggtgtgactacgggtccattccctcgggtgcttagtatgaaaattaacaactaagtgctggaaattttactgtttaaagaaaccggcgacggaaatgctccgattgcacacggtacatggaatgctcggaatggtcattctccaccgaatggtgggggtgcgtactatgcctagctagtctatttccggttctatgatatgggagaa

SEQ ID NO: 114231 - DNA, 245 bp, Glycine max
agttttttttcatagaccgcctcagcttgaccttttctatgctcaaaaacagatgcattatgcattggcgaaagatcatgaggagttcaagggttaaatccatattcaacttaaaaaggagaacaattacaggtgctatgaacagctctgttggaagcaaattcaacatggggtaaaccagcttcccaagttttgtacgtccttcctcaaaactgtccttagcaaagcccccaaagagcgattac

SEQ ID NO: 114232 - DNA, 158 bp, Glycine max
gtactgtcttttgaatttgcaactaacatcaacattgcatttccagccagtcgatctaatactcgacccgacctgacattacaggcgagcgctattggcctctggattcgcggcgaccgccgacattcgatttcgagcgcgtcacctgttacacgact

SEQ ID NO: 114233 - DNA, 241 bp, Glycine max
agcttctatccaaatggacttaccttgaattaattcctttgatagcccttttgagccttgtttccctttccttgttttgaagctcactacaagccttaagtgaaaaaccatgatattaccatatccttaaggaattttggagctttggaattgttttgggaataagtgtggggggtttttgtttcattggacaacttgttttgttgactatgcttcatgatgtattttgggccatacttga

SEQ ID NO: 114234 - DNA, 435 bp, Glycine max
tgttccaagaagcaagttcatgcactgtctggatctacctaacgttgattttggaaatgaactgagttacatgttattcaaaaatgttattgaaccaaggctgaggtattgaatgttaaacaatggatcatatagacaagatggactacaacctttgtcatttagtccaattctcttatcttctcttctatattggtcatccaatcttctgtaatttggtggaacagccattcgtgtaaaaggaacgtccactctagtggtcattaacataggttgtgttgaaatgtaactatatctattgtactgttctcgctgacaataattgttgccgtatatatgacttgtatctcgttagagagctggacacttgaacccctattgtaatttgttttccattactaacaatttgacaagtttatctctttatatctagtt

SEQ ID NO: 114235 - DNA, 248 bp, Glycine max
agcttgatgttttgctctcaaagagtcgggatcttccttgttagcgcttagctctactgagctacaaacgattgactaagattgtgttaaaacataccctcttacacattgaacgaaagctggagttgctgcacatgatgaccaacgttatgtcaaggaatcatagcgggctgcacaatgcccaaggcaagataaaatgcctaatgaagaatcgaagctgcacgatccaccatgacagacacgatgtc

SEQ ID NO: 114236 - DNA, 246 bp, Glycine max
agcttgatttttttctggatgcattggttaacttggtaacccagctggccttgaatcagaaatctgtacctgtcgcaagggtttgtggtttgtgctcctctgctgaccaccatacagacctttgcccttccatgcagcaacctggagcaattgagcagcctgaagcttatgctgcaaatatttacaatagacctcctcaacctcagcagcaaaatcaaccacagtagaacaattatgacctctcca

SEQ ID NO: 114237 - DNA, 393 bp, Glycine max
  unsure (1)..(393): unsure at all n locations
cagagttaattaacattatgctattacagngaacaattgaattgaaaaaagaagcatttaatgacaacaaaatacctgttctgataaacgctttacgagatgtgtcgaccaagcaagaaaggtgttaagtgcatgtcccactaagttaaccttgtcagtgggtacaggaacgggagcatctgtatctataacctcctcagcaccgactttcacttgatcatgcaacaaatggatgttgtcagtggttgtggatccctcataaactcttcctaaggcaaccatgcagggaggattttcttcgatgtacaacccgtatttgtttgagtcacccgcgtctggatcgttcccttagggattaacataactttcctatgtgttgacacgaacagctgt

SEQ ID NO: 114238 - DNA, 245 bp, Glycine max
agcttctcttttaattttctataaaaagggggagaagtgaagtataaaagggtccatccccttaggcacttctctctctttcgaatctgcctaggaaaattgtttccgtgatgaaaaaccaagccgaggcgcttccgtaacatttccgtgagtgatttcgcaaagggtttcgtccgttcttcgacgttcttcattcgtcttcatcgttcttcagtcttcaacgggtaagtacctcaaaccaaaac

SEQ ID NO: 114239 - DNA, 472 bp, Glycine max
actaagctttcaatggatagagggctacattcactttcttctacatcatattcaaatatgtctaaataaataataaagtcatctcgactcaaagaaaatcatataagtctcatacaattaatatagaacctatatcctaatgtcacatcctatcagagcgtggtgttcccgtgtcctctagcatgaggttcttcatagtcatccacctattcatctgctcccccgaacacaagttcaagatcatcacaggatccaaacacaacaacacacagggagtgagttatcacattcctagctcatagagaaacaagacaatttaatatacatattatataaatgagataccacttgcttaaacatagctcacgtgacttcaccactttattattcaaaattcacttcttcattatcaatcacattcacaagaaattcacacttgatcaagatataatacacatcaattgcagccttt

SEQ ID NO: 114240 - DNA, 251 bp, Glycine max
agcttggtttttttttctgaccggtgtgaagatcggtttaacgatggattaccgtttggatgaacgtttaaaatcggatgatacctttgcgagattcctcacggaaaacctttcggaaacgtttcggaagcgcctccgcttaaattgttttcaccgaaacaatctttccaagctaattcctgagagatagaagtgccttatgggctggacccctttgttattcatttcctggcctattttgtagcacaata

SEQ ID NO: 114241 - DNA, 251 bp, Glycine max
agcttgtattttgcacaaaataaaggtttaacatatatacctaaaatttataatagagaaatacttggaaatatatgaattatattataattaaaattcataataggataaatatttttaacggaattttaatgaaaaaaacaacaagatcattattggggtattttaaataaatattcagtttattttttttgaatggtttagtgaattttgatatagaatctaaaagtcaattgctccaatgtatcata

SEQ ID NO: 114242 - DNA, 281 bp, Glycine max
gcagaatcatggttttactgaaatagggttttggtcaaacttgaaatcacacatttctaacacagatcaatcaaacttctcataacctaacatccacaccatgcgattcgcacaaagataattcacacaacacttcaactgatccaaattaatcaaatggtctaatgatacaagaaatacatcaaacatctattttcagttattaaaacttcatggcattacataggggatgttgtagagaatggaaatcacattccatataatggggaggtgaacaagat

SEQ ID NO: 114243 - DNA, 245 bp, Glycine max
agcttgtttttaactggatgatccactaatccaattgacagaaaattataaatggatcatttttttttcttttactggaggagcttcggaatagattgactctctctaggacccattttattgacgggatttatcactacgttagcggctcagccggttactcgagaatccaaattattctatttcctgatgttagcaatgtatagtggtcaaataggaacattttcttctcaagacattttact

SEQ ID NO: 114244 - DNA, 433 bp, Glycine max
cccaaatattctgtgtaacaagccatttctagctctaaacaaaacatcggatttgttgatgttgtggaagcaatgtcttccaagggttatttgatgatgccaaagaatcaagagttaagcaaagtttcaagcaaagattcaagaatcaagtttcaaggtttaagattcaagaatcaagattcaagaataatcaagatcaagattcaagactcaagattcaagaatcaagagaagactcaatcaagataagtactaataaaggttttcaaaacattgagtaacacaataagttttcacaaaatcattaccaaagagttttactctctggtaatcgattactagaaagtagtaatcgaataccagtggttttaaacgttaagatctaaatttcaagagtacaacttgtgtttaacattgtcaatcatttaaactt

SEQ ID NO: 114245 - DNA, 236 bp, Glycine max
  unsure (1)..(236): unsure at all n locations
agcttcttttctttgtacaagaatgaagctctgataccacttgttagacaagtggcctcagatatcttaagaaggggggggggggttgaaatcctatncttcttttcttattactcttttatctattacttttcgctttttcttaatctttcattcctcttttgttataattttaaaatataattttaatccgtttactttttatttcaatttattctcttgttgattttttctaa

SEQ ID NO: 114246 - DNA, 365 bp, Glycine max
atgtggcagggcgggcttacttaactttcttgtcttcaatgcgagctctgaccactgttcttccttcccgcgatgcttcttttcatgtccgcctgagtgggcttatagcctaaaccatacttcccacgatatccttgggtttttatcatgctagttatgccgccattgtctttgcctaaacccatcccgggttcataaccgttccccaacataactcgggccatcattaccgccgcatcggacagacaatgttgcccaaagagggagtccacggatgaaatgctgaccacctcaaaagactggaaagcggtttctaacgattcttctgctgcttccacataaggcatggaggatgggcagcttac

SEQ ID NO: 114247 - DNA, 265 bp, Glycine max
ctaaaatctaaagctacagttaaagtcttctaccctagagttaagacaataaaaagagaaaaatgatcaaggaacttacttggacggtgtatgaatgatgcttcaaagtaaaaaatgcgcaaagagagttcaaatgcataatgtacataatttttgagagagagaatgcacacgcaacgtttttgtaatctggcaaatgtgagtgtactgttgttcactcacttaactgtttcatactttctcttacggacgttgcgctagctaa

SEQ ID NO: 114248 - DNA, 245 bp, Glycine max
agcttgttattctttttcccaaaagcctagaggccaagtttaagttcctgttggtggctgctagtgcattcattgattaaccagtggcccttttgttatttgtcacgttatggggtactattgggtaaaaacctttgctaatggaatcaaaaaaagaatctgctaattttttttcctgttgctttaatgatatctatattttggaggtaaaggtgacttgtattatggaatgcctgtataacaac

SEQ ID NO: 114249 - DNA, 195 bp, Glycine max
gccttgatgttatagtacctaagttatgttccattatcacacttggagtaaaacctttccaagccgtctttaatggtcagaataaaacattgacatccaaaacgatggaaatatgaaatgttgggctttcgttctttccactgctcataagaagacctctttagaatgagccgtatttaaactctattatgtaaa

SEQ ID NO: 114250 - DNA, 240 bp, Glycine max
agcttttttttcaaggccacgcccccggcggagaccctccttcttacagggctcattccatagtagatgacggggcctgccaccttttgttctacacctcccgctgcctgttcatggtggaaaaacacccttgggggacctctttgaagcttaaatatccagccttcataaaagctccacaggcacgcttccattaggaggttatcacagcacaagaccttcaagaattgctccttagac

SEQ ID NO: 114251 - DNA, 247 bp, Glycine max
agcttgcagtctgcatccctgctaaggggcaagcaatcaaacccatgatatcaagccatggccagtgacatttgtgagctacccaattataatgtcttggctacagatgaagattcactcatgcaatctggaacttatgaaagctagccttagcagacatctcaaactgtttttatatgtgcacacacacatacttaaatagaaaggacaacatcttcatgtagggaatgaatctcctggcaccaat

SEQ ID NO: 114252 - DNA, 433 bp, Glycine max
  unsure (1)..(433): unsure at all n locations
tgtaatcctttaagagattctcttaactaataatggactattgtgaatcttttatcttgatcttgtagtaaactttgaatttcttcaatctctggcatcattaaaaccttcatacaacatatgccatcacaaaagtaaattggtgtgtaagaagcatgcacatgctactcacagttggtatattgtgaagcatgcttataggtacatgaaatgatgtatgagaccgtggaatattgcattcacagtcctaactcgtaaggtatctcatgaagcatgcttatgggtctcttcatgaaagatgttgatacctggaatctgccaaaaaaagtagtcataatactatgttgcagcatatgctctaatataattgatacagaccacatgcttaatttgntatagacttatcagtggcacatatatcagttacatataa

SEQ ID NO: 114253 - DNA, 247 bp, Glycine max
agcttcacttttgcaagagtagcaacactcgaatcaaaaggcaatttacaaaaaagggaaggctgaatatttcacacaatcaagaaatatgaacgaatgtgtcactcctgaatcaaataatataattatttttatttatttaataaagcccatgccttgaatcaaaccatcagactccttcaccttttccccttggagtgtaaagactctcccctagttatgtggccttggttgggttgtccctcac

SEQ ID NO: 114254 - DNA, 234 bp, Glycine max
gaagtgaactggtcgttgcttgtcattcattggaaccaagcaatggcccttccttccatgtagaaccccgcaatggtgagtctgtcgtggtcactggtgccatgatactcaaaaaattggttgatcttaaagatccaaccaagtggttcggtgccatcgaatcttggcacttctaatttcattttgtggttgggtgcatgtgcacggtgactgtgacggaatggtggtgggggt

SEQ ID NO: 114255 - DNA, 248 bp, Glycine max
agcttcacctttttatgtagtttatatgaaagagtcgatatccttagattgatggagttcgttaagtttagtatgatccttggatagtttcttaaattctttttgcaagtttttgtaagcttttgaaagaatgtatgattttgaaagtagttcatgataagtttgttttaatgattcagtgtcatcaagatctacctcatctagttttgattctaatgctttagaggctatatcaaccataagacata

SEQ ID NO: 114256 - DNA, 355 bp, Glycine max
taagcttctgtgggacatcatgacttgctgttccatctgacagataccacagattctgccttcttataatctcagaatggggatgcctctaacagcacctctgtcaatgattatcttcatgcctcttaagtgcagatgtccaaatcttagatgccatattctgacttcatcttctatggaggatagacatgtggaagagtagctggcttcttggggtgtccataagtaacaattgtcctttgatctgctgccctctattagaacttcactcttctcatttgtcaccaagcattctgactttgtgagagttacattgaatccttcatcacacaagtgactgatgctgatcaagttt

SEQ ID NO: 114257 - DNA, 278 bp, Glycine max
gcaaagcttgtttttttggtatagggtgcaagggtgataaattttctgcattttattgtgtgacccacagagtgatttccctggagaatttgtcttcggggggtaacgaaacccttggtggatcattttgcaggaagatgacactttttccattaatgaaagggggtggacaacttctttacctcaaccacggtgggatattttttgttcatttacccaaacaccccttttttaattcgcaacacaattttgccctcccccttttaaaaattaatttt

SEQ ID NO: 114258 - DNA, 246 bp, Glycine max
agcttttcttttcaaaagtgaggccttaatgacaactaacacttgctctgggctaacccatgcactgtcttaaatacgataaatgatgcctgcttctatcattggaagcatttcctttcgcatttcttccatcataacaggaaacactcttctttgcggctgacttacaagcttgtattccgctttcatattgatcttatgcatgcagtaagaagggttgtagaaacaagcttcatgatgatgaac

SEQ ID NO: 114259 - DNA, 247 bp, Glycine max
tcagcttgactatcttatacctcctagagttgctgcattttctcgacatttcttttttccattatattcactttcccatcacgatatgttactgaacatacaataacgtgctcatctcatattctcaaagtcactagtcactgtctcaaagatttagacggagctgtgcactgatacacaaataaacgtggtgtattatgtactttgagaaacactcatgatatactggcgttaatttgctgaaata

SEQ ID NO: 114260 - DNA, 243 bp, Glycine max
agcttcattgttggcaaatgttctgttgtgtacctgggaatggtttatgttcttgacatggtcaaaatattatcctaggtgattccctgtgggaaccgggctatctgttagacacaaggacattgggtgtagcacaccgacgaggcttatggttaattaggatgaaattttacaccataactaaagccttccacacgttttcatcctgtacttttgaataaaggaaaatcgatgtttggttct

SEQ ID NO: 114261 - DNA, 361 bp, Glycine max
acaacaaccatgaaatgaattttgcagcgaaaaaacctgtcgaattcaccccaacttcggtgtactatgctgacttgctaccatatctacttgatcatataatgcgtgccataaccccatccaaggttcatcaacctacatttctgccagaatacgacatatacgcaacgtgtgcttgtcatggagaaaccccggtgcgtttcattaagcattgaacggccctgaagcgtaacgtgcaacgactaattgatgtggctggctgaaatactacgagaatcgcgtgtgaatattcgcatagaccatacatgccacgtatggggaaatgttgacagcttgatgtagatgtctcttatgactcatc

SEQ ID NO: 114262 - DNA, 245 bp, Glycine max
agctttttttaaggttcgttcctaatttctctacaattgcatcacctctcaatgagctagtgaagaagaatgtggcatttacctggggtgaaaaacaagagcaagcctttgctttgctcaaagaaaagcttactaaggcacctgttctagctcttcctgacttttctagaacttttgagctagaatgtgatgcctctggagtgggagttggagctgttttgttgcaaggtgggcaccctattgct

SEQ ID NO: 114263 - DNA, 436 bp, Glycine max
ccttacgaacgtacacttgcacaagatattctattaactaacaaaaacgcacccatatacaatcaaggcagcttccttacctagattatttacatgtacttccaaggtgtatgttgtatttacatcacacacgtctccttggctaaatttacatacatgcatactcaaagcactttggggtaccaaaaattgcacatgtgcacatcttggtatttctaatacctatacatacacaaactttatgatgaatcttgactatctacacaataaggcgctacgtttcatgctcttttcaagttatttgctacctaaagacgtatgcaaattcacggatatttttcttttgctgactaaaatagtattcaaagggatatattctctttgtgaagtgatttctttacatcacatgccacatattatatatatatttttgtga

SEQ ID NO: 114264 - DNA, 246 bp, Glycine max
agcttttttcttcaaaatcttaacatgttgttcggcaatcttaatgctacttacgtatctttcgcattgtctagtctatttcaacacattccctcactagagatctcattctattattctgcaacaaccagatgaaatgatgagggaaagcaaaggcccgaatgggtcaaaatatagactaggatacctgtcttaagggtccacactagagacatctgatatgaatgtacctagggtctttgaaaa

SEQ ID NO: 114265 - DNA, 274 bp, Glycine max
ctgtcttcttatgaaccatctggactggactcacccactggctgtcaaaaaaggagtagatgattccagcttgttagagctcggtcacttcctctttcaccatatctataatgaccaagttgagttaccgctgtgggcacctcactggcttagctccatcctctaaaagttatctatgcatgcacgtagatgggctaataccatgaatgtctgcgtaagtccatccaatggccctcttgagcactatcaacaacttcttcttttgcttatcatc

SEQ ID NO: 114266 - DNA, 246 bp, Glycine max
agtttttttttctttatacaagaatgaagctctgataccacttgttagacaagtggcctcatatttcttaaaaagggggggttgaattaaaatattccaaactactttccccaattaaaaaatttatttcactttttattcaagttatgaattcccttaatgacaatcttcttaaatattgattcaaataaaaaaatttgaatatgaatataaagcaataataaataaaggagattaagggaagac

SEQ ID NO: 114267 - DNA, 201 bp, Glycine max
tttaactgagctgtgttggaaatagacaccactgtgtatcttggcccagcgacagagagagaggggctcttgctgtcatgttattaaattgttcagactctccacatgtacctattaatgccctctggagttggaaaaatcttcatggcgtggagatactatgtgcgggcactccgggactgcacctctttatgaactact

SEQ ID NO: 114268 - DNA, 242 bp, Glycine max
agcttgtgtttgctagaaaagttttcagccgcattagctaagactgacaaatcgaaagttggtaaatcaatctctctcattctctttacttttctgaaattctgcttgtaaaattttcttgcagcccctgatacgttggaaaataagactaaaaacattgacacataatatgcacattttttagtgcctaatttcttgtaatagatgctaaataatatgcatatacatacctggatttttaa

SEQ ID NO: 114269 - DNA, 339 bp, Glycine max
gagagaagatgaacattgaggtgtgtctcacaagactctcattcatcaaagttaccacaagtgttacacatgcttctatctatagactatggagctttcttgagaagctttcttgagaaaactttcttgagaagcttttttgagaaaaacttcttgagaagctagagcttagctacacacacccctgtcataactaagctcaccttcttgagaagctttcttaagaagattccttatgaagctagagcgtaactacacatacctctctaatagcttagctcaccttctttgaaagagaagctagagcttagctacacaccccctattatagcttagctc

SEQ ID NO: 114270 - DNA, 244 bp, Glycine max
agctttgattccaattgataagaaccttgtcacaaaagctagttgttgtagctggagagcccaaggctatataaaccccactttgaaatcccctactttcaatgtgagactatcccatacgcaattggaacctgacacagtgctttcctatgaagtttatttactctgtgacgaagagttggtaattcattttgtataaaaaatttgtgcttctctgtgtggtggactggtggtggcaaggcaa

SEQ ID NO: 114271 - DNA, 348 bp, Glycine max
  unsure (1)..(348): unsure at all n locations
acgagttaatctagtttaattagcatgaacaggttatgctttcgtggagaatccaaaactctcgagtttggccatttagtaaagtcctaaagttaatttttataatattaaggtgttgagaatgtgagaatctcgagaacattgggtgttctgggggctcaagaatgatgatggatntggtgacccactatatatgaaccatgaaaatctatgttagcttatatataaataaatagataataattataatataagataagttgatatcttttgtgctgtaaatgatgggtgatggcaaggggtgtatgcttttatattccataaaccactatgagctaacgatcacac

SEQ ID NO: 114272 - DNA, 249 bp, Glycine max
agcttagcgagttcatcaaattccagaaaaattcaactaacagcatagactcgctaagccttaaggcactggcttagcgagttcatccccaaaatgcagaaaacaaagatcaacttcatgaactcccttagcgcacaaggcgtgcttagcgtgttcatcccaaaacccaaaaattcaaagaaacgtatgaactcgcttagcagcacaggctcgcttagcgagttcatcgcaatcccaaaaatggaggct

SEQ ID NO: 114273 - DNA, 349 bp, Glycine max
acatggttcgctatcccgtatcacgaataacgtgttttatgtatttcctctgcgaaagagagacgctctatatctttctagtcatcacacacaatgtcaaaatgattcttaaaaggttcattcagctagcgtttccatgtgggtcatcccaatccactactcttcccttcaactcccttgtgttctccacttacgtgcaaaataattaatgcgtgcatgccccttaaccctgtgtcccctttctacaccatatgttatatcagatcatgactcctgtgccaccttatttttccacgttcaatgattccatcataattatatatattcttaaatataacttgcatgactt

SEQ ID NO: 114274 - DNA, 245 bp, Glycine max
agctttacttattttcttcaagtggtgcatgatatgcttccagaggaaaacacgaagccaaaaagttactatcaggcaaagaaaatattgtgtctgataggtatggagaaccagaagattcatgcatgccctaataattgcatactatatagaaatgagtttgaagaaatgcacaactgccctaggtgttgggtatcacagtacaaagtgaaggatgatgatgagtgtaatagtgatgaaagcac

SEQ ID NO: 114275 - DNA, 402 bp, Glycine max
tagataatgacatcttcaaaatgcactaagtaaatatatgactagctagcttggcatgaatttcaagaatgactgactcttgatgacttacagaattagccgactcatgagtatcatgaacggaagactcttaatgagatgtaggattagctagctcctttgaaagctactaaaatggctgaatctttgtgagttaccggaacaactcacccatctgagaactacaataatgcttaatccttcatgagttatacgaattaaccggctcacctttaggggttataagataacctttcaaatgaaaacacgtacatgaaacaccattgtgtgaagcttattaccattcttagtgcccatactatgtggttgtaaatatggtcgatgactacggcgaggagtaat

SEQ ID NO: 114276 - DNA, 264 bp, Glycine max
cctgcatgcatgcaagcttctcattgtgttttagctcacttattagaggggtgtttataactaatctctaacttctcaaggaagttttctcaggaaagcttctcaaggaagctacctattctataaatagaatcatgtgtaacacttgttgtaactttgatgaatgagagtcttatgacacaaacttcaaagttcaacttctcttcctcttttcttccttcaattccgtgctcccccctgtctctttctctctctctttctttc

SEQ ID NO: 114277 - DNA, 448 bp, Glycine max
  unsure (1)..(448): unsure at all n locations
ctcagcaaatccgtattttcaaaatggaattttattcatanaccgccaatctataatggagagggttaccactactggaaaaccctaatgcaaatttttattgatgcaatagatctaaatatctgggaagccatataaatagggccttatatacccaccacagtagaaagagttacaatagatggttgttcaacaagtgaaagcataactattgaaaaacctacagatagatggtctgaagaggatataanacgagttcgatacaacttaaaagcccaaaacataataacatctgctctaggaatggatgaatatttcatggtgtcacaatgtaagagtgctatggaaatgtgggacactcttctattaacacatgaaggaactacacatgttaaaagatctaggataaatgcactacctcatgagtatgaattatttatgatgaatg

SEQ ID NO: 114278 - DNA, 246 bp, Glycine max
agcttgtcattttatgacaaatagtattgggttcccattccaagaatgcaccagttacctcaccatgttggccatcgacatcgacattggggtcctcttcgaaatcttcaaatgcaagagttactataccatgtcaacatggagaaatgggtcactatattagatctttttgtacgatagttccctcactttattgaccaacacaactgggttccaaccctaaatctttgtcactatacgtatact

SEQ ID NO: 114279 - DNA, 467 bp, Glycine max
  unsure (1)..(467): unsure at all n locations
tggtgctcaagcctacgtctcttctttaagtgaatctattataatttaaaaaacatgaatgttagttacttagtttcaatttcagcttctaatgttncataatcaaattaaaaatgttcactttcatataatagttaatagattaagtgattaacttacatgctcaaaggtactccaattacgctcacattccgatgagctacaagtcaaacttagaactttaatggcaatggtttgcaagtgttgtgttatccctccatacaatttccaccactcaactgtaaaatgcgattcatatgccttagcatgtacacagattattaaataatcattataattataagtgacctttcccttctatgagatatttagtcttgctttattgtacagcataccgacctcttccaccctttatcacttacattgttgtgacctcaacacaaaatatatctcctaagcattataat

SEQ ID NO: 114280 - DNA, 242 bp, Glycine max
agctcttcttaatcttccactgacagaacagattggtttggggttatatgcaagtgtggatgactgattaacatccctaatcctttaggcatttttcaagctgcacacattctctaagtgacaaaaatagcaagtcgacgtccttgtttgtaaggcgtcttgtgtaacattcatgatttttgacttctcagtagctctcacaccatgacacttcacgcaaagacatttcatacaatatcctt

SEQ ID NO: 114281 - DNA, 253 bp, Glycine max
ggtagctggtctagattcaaagggagaggaaccaatcaatacattgggagagaattcctatgggtctaagggtaggaagaatcactagcgcgaagatatatacaccacagaagaagaagaaaggagaagtaacaagcaatcagcacttatccttgttgatgagagtgacttgtcagatgcttttgatcgagctgtgctgcttagtgtggaaaatgtttgtaatgaacactgtagtttgcagagtgaaacaatg

SEQ ID NO: 114282 - DNA, 200 bp, Glycine max
agcttgtttttggttaagacatgatcgttccttgattactgacttgcacgaattggacttgggcatgcacgaatgagggaagtgtgtattttccgaaattctgcccttcagcgcaatattgctgtcaaaaaaggtgcacccggattttggcttgcacaaaaaaatgcttgcgcgcggctggctgtgcaaagagtagtgca

SEQ ID NO: 114283 - DNA, 304 bp, Glycine max
acatcacgtcttgctctaaactagtggaagtggactgcgctctgtcttcataataaacccatgatcacttgccggcgttgattgccttacacattgaagcatcatcatactgccgcaaaagagattgataccaatgttacgatcatgcttacaaatcatgttgggaagcatcatgcattcaggtggatttagtaacaacactatgctatattagcctgcggtggtttcattcatgaggagttcccatactgaggcgctgaatggcggttatccgacttttgtcccttgtatgtacattgacact

SEQ ID NO: 114284 - DNA, 245 bp, Glycine max
agcttcctttatttaagactcaagattcaagaatcaagagaagaattaatcaagataagtatgaaaaagttttttcaaaaactgagtagcacatggatttttctcaaaacttgtttaccaaagagtttttactctctggtaatcgattaccagattgttgtaatcaattaccagtagcaaaatgtttttgaaaaagtttttaactgaatttacaacgttccaattgatttcaaaaagttgtaatc

SEQ ID NO: 114285 - DNA, 447 bp, Glycine max
tagcgctgaacaaaaattctcaagaccttaatgtgtgaacactagtcttgcttagcgcatagacacgcttagcgggctcatcacttacgttcatcagcaaggatgaatgcgcttagcgcgacatggtccacttagcgcgttcatctggatatccataattttaacaactgcaatgaacaggctaagcgcacaggcacgcttagcgcgttcatcgcgatttccagatagaaccacaggggtcttcacccctttcagccacaatgcccctaatgggcttctaagttacctaaaatcctacatagactaacccttaaactaataaccttaacctaacagcatacaactaagaaaacaaaaagtcatctatcctaatgttggaagaatgaaacataaacatggagatatgcttatgtacttcgaatgttctttgaatgagcaacgaagatg

SEQ ID NO: 114286 - DNA, 244 bp, Glycine max
agcttcttttagtggtaattagagcacaagagcttcaagtaggtgctccttaaacctccattaattttttgcttaaccttctcttccatcgttggctcttcatttttctccatgtatctcctcacatgtcttgtgctaaatgttgctaacatgattctttagagtccccaccgattaaagttgctatcgaagctaaattcgattctctatggttcaaattgtttgttcttgttcttgaaccatg

SEQ ID NO: 114287 - DNA, 411 bp, Glycine max
gtgactaaattgttctcctcacccctctatctcccatttatccaccctctctcgctgcaaggtaatcttatacacatatgttgcatcaagtcatcatatatgtcgaggtgaatgggcggaatattaattattcttttttttaaagaatggtttgccttactgagggtgttcatactctatggcaaaactaaatttggtttggttttcaaactcaatcctttgtgtgaaaatgacatcaaacatacgaaagtgttcgcttatatgtaatcctctaattccttatatgaactcattctaatcaatctccacttcaatgcacaaaaatcaaattacagacaagctgtcctttagataatactgtcttctagcaaatccacaccttatgagatctatcttaactctggctcgatc

SEQ ID NO: 114288 - DNA, 284 bp, Glycine max
aagcttaaggaagtgaacgaattatcatcggcagaaatgacttcgtttagtttggtaaaactgttcctcacattcctgaataatgcaaagatctatgtacattcaacataccttgtattatatggaatatgtagtttgacaatgccatgcttgatataagagcctctgttaatgttatgcctctgtcgatcttaatttctctatctctaggtcccttgcaatcaactgacgtgggaaatcatttagcttagtgtagtgttgactattctggtggtatcatagaa

SEQ ID NO: 114289 - DNA, 273 bp, Glycine max
cggacccgaaacaaaacgcagacggcgccccaaattttacataagggccccaaaccgcaaggcgtaacagggtcacaaacggacccagcgcgaaacaggagggcgaacaaaaggccacacaacgcccgagccaggagacgaaagggccaagacaggggtgccccatgagagagagaacacacacagaaaaacctgccccgcgggggccaccaaccataagggaaaacggcgcagccaacagcaagaaagaaacggaaaaacgcgaacccccag

SEQ ID NO: 114290 - DNA, 242 bp, Glycine max
agcttgttttattatggggtacccatcacatgtggtactaggtggcggtcgggcgatggtgcacaacaagttttccacatccacaatgcgcgcataaacccaccatcccctgttgcccacctccaactgagctcacgtactcccacgtagcccatatcctcgtttctctcaacaccgggtccccatcaatcctcccaagcttccacaacatccaagcaaaacaacattcacacagcacaagc

SEQ ID NO: 114291 - DNA, 325 bp, Glycine max
tattatgtgttgatgattataacacatatatatgtatattatattgttccaataaattaggaattaatagttcaaataattaaattaaattggaggaaattaatatattaagattcaacgattaatactttcaatgcatttttagattaattatttatcaactctttttaattgaaaataatataagtcaatttaatatatacatgttttgtggtatgtaaatattaatattgtgtgatgtttatataattcatgagttggataacatgttgcgttgggattataacattgtgattgagaatgggtgtgaattgagtatgtggtg

SEQ ID NO: 114292 - DNA, 243 bp, Glycine max
agcttttttttatattatgcgcccgaatcggacattcgtgtgaaaggttatggccatttgaatttctcgagaatttccaatgtttaatttcgagcgtttcgatatattataagcctgaatccgacatccatgtgaaaagttatgacaatttgaatttcacgagagcttccgttgttcaattttgagtgtcacttaatgtgatgcgcctaaattggacattccacttaaatgttatgaccattt

SEQ ID NO: 114293 - DNA, 309 bp, Glycine max
tgccaacatccaagcaaaacaaaattcaatctgcacaagctatcacagccaagttaaacagggcaaaggcagaaaactctgctcaacacaccaaccaaaatcacagcttttctcactcaaagaccccagtaacaattccttcgatccaatttgttaaccgttggatcgacttcaaaattttactggaagtctatagtacataagcctacattgtgaccggtgggatctattagtaaacattcagaactcattctgcactacccttttcacagccaattacacacaagcatttgtctgcaccaagctaaa

SEQ ID NO: 114294 - DNA, 171 bp, Glycine max
cgttgattgctcaagctcacattaattcagcgctcgtattgacggactatcaacatcagtaaaagttttgcgttgatggtcaagctaacatcattcagcgctgattatacggactatcgactcagtaaagtttgcgttgattgctaagctcacattattgacgtcgttttc

SEQ ID NO: 114295 - DNA, 391 bp, Glycine max
cacatactttatcgagttgatgggctgcattttatacctcaattgatgtgaactctagccatcaacacatacctttaccgtgttgatgagcccgcattatcagacgctcaattgatgtgagctctgaccaatcaacgacatacttttactcgatgttgatgagcctgacatatcgagacctcaaatgatgtgacctctggcaatctacacatacttttctggatggtgatggccttattatcaacctccaatgaagtgactctacaatcaacacatacttttctggtgttgatggctcgattataaacctcaatgatgtgacttgactataaacaatactttactgatgcgtgatccgcattcaacccaatgatgtacttagatcacacaa

SEQ ID NO: 114296 - DNA, 366 bp, Glycine max
tacaaattatgactaattatgtatgtataaataataaaaatattaaacgagatattttcttattaatttgagatatatatattatgctatagatgtaagaatcaacaaatcatatctaaatattatttagtgcatgatcaatcaaccatagataggagtgtatatattttggctataatctataattagtcttaaaaaatccttaagcagatttaaagggctacaaatgggttcatgactcaatatctttctatttattcacaattatttatgatatataataataattttatttttgttataaaatatttataattggatctaagaataaaaccttttatttaacttaacataaaatttctttta

SEQ ID NO: 114297 - DNA, 287 bp, Glycine max
  unsure (1)..(287): unsure at all n locations
cattttgatcatcatcntctatctctttcacacatctctcaacatttcatcatcttcaatcttctcagattttgatcatttctcatcttctaagatctgacacacttctctccagaaaggtcttggtcaaaactgtgtattcatctttcatctctttccttgccaaaacaaagctaccgctgatctttggttcttttcctcaaaatcaaggctaccgctataatttttgttctgctccctaacaaatattcaagactaccgctggatttttgttcctttcaagatca

SEQ ID NO: 114298 - DNA, 172 bp, Glycine max
gtgaatcaaaatggacaatatactttaaacgtgaacttgcaaatctacgaaacttcgaacttcgaccctagtaattcttcgaacaatttcacaattcaaaaaaatgctagggtggacctctctattctccatttacaaaaggagtgtgcgcactgccgcactactccagcac

SEQ ID NO: 114299 - DNA, 366 bp, Glycine max
taggtgtgatgaatactttctttcttttgtttgacggccctttctaatgtataaagaacctacgtattgcagaatatgtgccctaaacatgttaatataaatgtgtaaaaaaaaatggtaattacatgtttttattatgttgcatgaaattttatatttgaaattattgtaagatatatattgaagatagatttgatttatcagaatttatgtataatttatatgttcttaagttcattttgtctgttaaagctatattaacataaagtttatttattagttaaaaggttgtaatctatctagggattggaaatatacgcgtccttttttgtcaacgtcttgtgatagaataaaaattacttttta

SEQ ID NO: 114300 - DNA, 348 bp, Glycine max
  unsure (1)..(348): unsure at all n locations
tagctggagcgtgaacctctcctttcctttatttaacttggctgttgtacccccccacacctncaggaagcgcaaacttcttctttatccttttttttgaggatataactataaggaagtgatttttgctattagagaacgggagaaagactaagaagaaacctaggcatgtgtaacttattctatattaccctcttttactattagcttattattcatatcttatctccacattcaacttattattattaaaaaaatttttatcacctgtacataaatgatacacaatcgttacctcatacccaacttttttttattatttgcaccacattttatgctataccccca

SEQ ID NO: 114301 - DNA, 164 bp, Glycine max
aaatgcagacttatttaacataccttttgacttcttactcaaaaactcaagctctgcccaatgacaaattaacacattgcaactaccttcaatacaacccaactgcaacaaacctcccccccatctacaccatgctatgtccataaataaacatattcataatg

SEQ ID NO: 114302 - DNA, 392 bp, Glycine max
cactgttacttgataagaagtctgaagaccactctagtcaatttctccttttcttcttcatatcggctacaccttctcgtctctcctcttcttctctcattgagcatctctcaacttctattcacgctatcttgtgggaagctcttttcaagctattcctttggagggccgctttactctctcttcgcttcgtgctctcagggaaaacccataatgacctatgagctaataccaactcttaaactccagcacttcatccactgttggtgaggatgagccggaccctcttcatgctatataccaacctgtctgaccacttactctgacgacccatgcggtatatttcatactgggcaagacctgcatgtttcacagctataccaatcatctaa

SEQ ID NO: 114303 - DNA, 290 bp, Glycine max
cgttccgtgagtatacgcgacggtcttaagatcatcgtcatcttcgtttcttcagctcatgggtagtcctcaaccaactttcaatcattttgtcccgggtgtcaattgttatgattatatccgttgctgactcttatacccttttgcgtgcttagcatttattaatcattctcttattaaaaaaataattcccgacgtgaatgtaccgtaattgtaaagattcacgtcgctgctacattggataaagagttatatttatacaaaacccttttataacaagaaacgcttct

SEQ ID NO: 114304 - DNA, 253 bp, Glycine max
atttctttttactccctactaatctgcggaatcacctatggtggtctataaaactaatgtaactgagtaggacactacatgatagcctatattcatcaactgattctgatcttattataccatcttatgcacaatttactgtgatctatagacgtcttttgctaataaaccgggtctatgtgacacaatactgtcaaattgcgcatattattgagtctacaaagtactcacaaatgtatgtgactatggggat

SEQ ID NO: 114305 - DNA, 330 bp, Glycine max
tacaaacttgaatcatatacttttgatataatggacgtgtaattcaattgaaacttttcaagtcatgttgtattggaatcgatacaacaattggtatcgataccagagagtataaccttttgtaaaagatgtgtcaaaactatgtgcttccaaattgtgaaaacttttaaacttacctgatgagtctctctattcttgatctgagtctgattctgactgatcttgaaactgaacttgatcttgatttgttctaacttcttctcagcataattctcttattctatctgactctgaatgacttgatgacttgattactgagtatcttgatga

SEQ ID NO: 114306 - DNA, 82 bp, Glycine max
atcgctgtcatctgacaaaatttacttattcaactcccacaagatatgattgtatacacatgcgtaggatctgcactacgat

SEQ ID NO: 114307 - DNA, 358 bp, Glycine max
ctgacgcattatgctacgacattgttttcttctgatgcaccaaatgccatcgatatgtagctcccccataggtgtgcgaaagcactgcaggcaaagggggagctacctacaacaccaaacttcacgtttcggtacacgtcgccctgcataaggcactgggaatcccacactgcatgacttatacacaatgacgactgctttggtcattctggaggtccatcgacaaatgggtcgataattcttccaatggatgcgcgctatcaaatgtattttccttataactacggtctttatcacgtcttatatcctaacaagctctatgttaattttcttaagtttactttacattataattctt

SEQ ID NO: 114308 - DNA, 142 bp, Glycine max
tcatctagcttcacaatggcgccgctcaagcttggacccacagtgatctatctttgccgacttcatgactgcctcttatcactttgccgcgatcggagcatacttccactgtacacaggcctgaccacagctggttgctcag

SEQ ID NO: 114309 - DNA, 286 bp, Glycine max
cgtctaaactctctgcgctcacatagataagatggcgctaccaattttctgctgtcatgacaagcctcctacattaatttgttatgaaggacactccccgatgatccgacccccaacactttgggtaattcatttggagactgacaggtaggctttgctggagttatttcccactctgggggcgcatgccaacacatgatggtttgtgaacttatgtatttccagcttagcttctaaacgacatatatacactgcccattgcctcatgctgacggaagtttatctt

SEQ ID NO: 114310 - DNA, 271 bp, Glycine max
tctactaccaactgactggttattatctacctgagcaaaaacaagaattcattagaaaaaatgaaattcatcagagaacaataagaaaagaaattcatccagaaaaaagaagaatccatcagatgggaagcaagaagaagaatccattagatgggaagtaaaaaaagagagagaaagagagaactcttcagatcaaaaaagataattcgaagtttgacgcattttgcatcaatgcccatgacaaaaagaagaaccactgagtgcttcttat

SEQ ID NO: 114311 - DNA, 230 bp, Glycine max
ttactgtgaaaaattagaaaaaaggctattacaagaaattaacagaagtataacgcactgtccattattgacattatcatgtggagccggtggatttgagcccactgcgaaatttttttatttacaacaaaacattatggtcatcatccaagaattaccttaaaaacacctggggggtaaatgatacagagctgtgttatagaaatggtgattacgcacaaaactctttt

SEQ ID NO: 114312 - DNA, 411 bp, Glycine max
  unsure (1)..(411): unsure at all n locations
atctagctgggactcagctccatctctcgttgtcacttgcgtgcgtccaaatatactaccaaacananaaccttttgctcacgttgttcatctcacatcacactctttctttgcgaatcggatgagataaattcgtcggatatttaaccttattgtatgggaagaacggcgcttacctgctttactggattgaccttactgcccaatgtagtcacttagtttcattatgacctcaagaaaaagtaagcaatattattgctttactctattgccgctttgaattaccctgtgtgttgcttatgatatgcacgagaattatgccatgcacttatgcggcctgggccaaccaaaattatgcaataaaaatgttcagggcttccaaatatgtgcaaaattgaacatggcgtattt

SEQ ID NO: 114313 - DNA, 172 bp, Glycine max
tacttctcctttagggtctaactcgaccatcaacctgacggcttcacatacgaccccatggcatgtctgcttattgctttgccactctctggacttgaggctccgtgctatgaccataagacagccacttcttatggactatagaccatgctaaagacgatgacgtcacctg

SEQ ID NO: 114314 - DNA, 393 bp, Glycine max
agtccttcatctagctgacattattaatctcactgagggatgtaaatatatatgataagcgtatggaacagctggagtaaagctgtttgatgtgtgaagttatgtgattaatctatggttgcatgttagtgtaaggaactagttcttaacttatcaatgcaactatctctctcttcttctgtttatatataataacaagcagggctggaaaataaaataaaagatactacacttcttttgattggtactatattctaccatgcgcacttatctcacaactatatgattagacgaattataactatacatatgaagcttgtcctcatctgagaaatttaaactccatttattcaattccaattattcatttcgcgacttcaatctatctccatt

SEQ ID NO: 114315 - DNA, 249 bp, Glycine max
ggattctaactgagacagaccctgtgttaagattacacttggtgtgcccctaaaaggatttctcttatctactgtttcacccatcaaaatccccttgccaaatttggctacccattccctcataatattgccaatgattaacaacttactgttgaaactttgacctgactcgtttctttttttgcaccctacacgtacatctatctttgcaacacattctctttacattcattctagtacaacactaca

SEQ ID NO: 114316 - DNA, 268 bp, Glycine max
agtgcaatggcctatacactgacaactataagccttatgaaccaacaatttgcagcattacagtggcaataacaaaaccttaatgaaaaggggcataatctctcattggcataacactaaacttgcttctctgaactggctgataatgatgcagctgtgaagctctgcttctgttacctgctagctcagctcaggatctgctgttgactgcttatcagataacacagagtatggaatgatggacgacacagataggggattttctcga

SEQ ID NO: 114317 - DNA, 78 bp, Glycine max
tttcctccttctacatttttttcttgagagttaggtttgacctcgatcaacttgctctgtcgcctttctgggttatcc

SEQ ID NO: 114318 - DNA, 249 bp, Glycine max
catggtcttatgagatacaaaatggatattataaaaaaggaggttgaggtcaaagcaaagtatttaacaatacaagataaggtaacaacaagggggtttttaatgttcgacttttagtaatatatctgatacttccttctcctccaagacttggaaaggtcacccctccctcattcctaataaatactcattaagaaactatattgtggaacatgactttgatgcattccaacgcccaggcaatctctt

SEQ ID NO: 114319 - DNA, 191 bp, Glycine max
atatatacctcttcatatgatgctaagacagatgcttcttatgtagcgtcagccattagatagaggttgagctgctctctctcctctattatctcatcggatgatgtggcatctagttcttaccatgcgctcaacctcttccatgatggttcgtaaactgtcttagatacatgctctacattgcttttcac

SEQ ID NO: 114320 - DNA, 241 bp, Glycine max
aaggttatcttcaacctctatggtcaccctagattctaactaggagcactgctgttttctgagtatagagaaaatgtcactatcctctaaaccttggatcagccttaagagactactctacaatctctttgctcttgactatggttttccaacttaattctaaaaaagacgccttttcctcttgcactcctaagtacaccttgttcagccctgctttatttctctctataacatttatacc

SEQ ID NO: 114321 - DNA, 78 bp, Glycine max
ccaatggctaacaaatcctgtgccactcacgagtagactcagagcatatctgttttaaacggcatatctcagttccac

SEQ ID NO: 114322 - DNA, 148 bp, Glycine max
ctcactccccactatataagagcttatccttatatacccccaacttggacatatcttgtctcagaattgccttctatgacatgatacttagtcattaaggaagcagtaacaaagctgcaatgtaagactaacattcatttattatcaa

SEQ ID NO: 114323 - DNA, 95 bp, Glycine max
tacccttagtttggtctgcacagactaaactgggaagagagaatagtgtacaccttagaaaatggattgctaactcgtgctttatctcagtatgg

SEQ ID NO: 114324 - DNA, 232 bp, Glycine max
atgtgtgatctcatctcatcttgaaaccttctatacttctctcatgagcataattaaaatcatcttggagctatggctcatatagatgagctttataagaaatgtatatagagctggatcttatgacactttgaattgggtaacatttatacaactggatgtcatgaaaacatgtaccattccaaaccttgtatgataattatctacaagcctcttgaaataaacgtgtatc

SEQ ID NO: 114325 - DNA, 313 bp, Glycine max
ctataaaacaaatttaacttctaatttataaccattgctttattacgaaaaatagtttttcaaaaacgtagtatttaagttgatgtgatctaacatatttctggacgtttcatcaggcaagtaaacagtggtgcctgtattgtctgactttctacttgttagcagcctactattttctgggagatctatattatatatataattttgtactcctctttatataatcatatattttactgccccatttgtctgtttgatcacataaaatattgaaaaactggcttattcttacttcaatcagactattagtatg

SEQ ID NO: 114326 - DNA, 194 bp, Glycine max
  unsure (1)..(194): unsure at all n locations
ttatgtgagtatctatgactccggtgtaaatctctttggtgttattcccttcgttctcaacaatattanaatattatatctgcctcataatatttcatattatttggcactctaaactaaacatattttgtgatctcangttacttggactatatctatttcctataattacccatagttgctacaagaataat

SEQ ID NO: 114327 - DNA, 262 bp, Glycine max
  unsure (1)..(262): unsure at all n locations
tttgtgactcactagattcttcaggctgagatacttcctttctctacattatatcatggtgtcatcactgatgatgaataaatcactctgttagcttgcacatattcactntcttctaatctgcttttttctacattagtattgctacatttggatatgacagtaagataatacactcacatctcattcaaaataagttgtctttctatactaattatgcactttttgtcattttcagattaaagaatacatttaagctact

SEQ ID NO: 114328 - DNA, 369 bp, Glycine max
tagcttaccctctcagccttcttgtatctacaaccatctatgtgttacttggctactctgtcaaaactgacactttgtatcttggctaaaggatgaatcacagaagatggttcttcctctatggcacctaagatcctcaaacttttatggttgtgcaactgaagtcccatagtgaacatctgcgtatattggtgcggatgcatggttcacaacactttatattgcagatcagaattcctatgcatgtgaagctgcgcaacttgtcatcatgcctagttccagatgctactctaattgactgactataacattttaaggagcctgaccaccatgtgcaatgaatttgcacatctaaccctatctagaatt

SEQ ID NO: 114329 - DNA, 399 bp, Glycine max
cagagtttatatatcactattattacccccgacacagttaagacatacggatcctacacccaatcacaagaggagtatacattctagctatgagaacagacattaatatcatattttaatgaatcccttgctaacatagtacgtacttaccattctcatcaaattactttcaatataatccatacacaaaatcccacttgatcaaaatatacacatcattacagctatcatagtatctagactcatctattgcatgggtcctgtatgaaaacacctgggcgctagatctacagacacatcatgattgctgcctctcaataactaggaacgctgcacagttgagatgcacttaatcactgctaagcctaaccggcccaactactcaatcgtgcttcttat

SEQ ID NO: 114330 - DNA, 264 bp, Glycine max
  unsure (1)..(264): unsure at all n locations
tgttacaatattatatgattaagatatncgcatgatatatttttactgtataaagacactatctcggtggaaatagagtctctcaacacttgttggacccacttctggaactaaagaacgtgagatgacgaccttactttctatatcgtaaagtgctgttttccatatgcccactaaaacactcacatgcttaattgattcaataaatgttatgacgccccacaactacggcactcataaacaagtgaattagtattctatagt

SEQ ID NO: 114331 - DNA, 80 bp, Glycine max
gcctttgttttgcctttgggtcttgggaaaccttgtatgatcaaaaaaattgtaatttattctgggttaagattcatttt

SEQ ID NO: 114332 - DNA, 291 bp, Glycine max
  unsure (1)..(291): unsure at all n locations
cggtcataatctacacagtacttcttcacactgaagtgtagtatgttactcttatgcctgaagnccaagacctagtatgttcattatacacttggagcaaactatccacagttgtctcttatgtgtagaatataacatngacatctcaaaagatggaaatatgaatgttgggctttcgcctttccactgttctaagaagtccttttacaatgaccttattatattcattatgaatatatgcatattactactcacncatacatgttaggagtaagtatcattgacatgttc

SEQ ID NO: 114333 - DNA, 72 bp, Glycine max
aggcttaaccagctagtgctgccttatgcagatttttgctttaagcgccatcgggggctcaagtaatgacct

SEQ ID NO: 114334 - DNA, 300 bp, Glycine max
tgaacacaatcaaagcacaccatgaagctgtccaatccctatggcacaaccgaaaggaaagtgacagaagttcctcacatgctactcagaaagatggtggtactgtagaagaatactctcggaaaatgagattcttggggatagaaaatgatagattaagaaagaatgcttataccaccacagcatcctactttataaaaaatgcttgtttttacacaataatatcttgcatataatcttttataaattggtccagaaaagcctccctctattttagaggattctttctctgctacccaa

SEQ ID NO: 114335 - DNA, 287 bp, Glycine max
ctgaagtcattgggctgactcaagattgttttcctatgaatagagataaaacctataggtctgttcaccactaatcctgaagataccaacttgccagtaactacgtaggaagattggaataaaacttatctttaaccagtggaaggaattgctttcagtgcttagcgacagatggtactgttagaggtactagcggcactaattagaatacctctaatgagttctttcatctctccctagctgcacatattctttaagtagggctttacatttgcaataacatgtcc

SEQ ID NO: 114336 - DNA, 265 bp, Glycine max
  unsure (1)..(265): unsure at all n locations
gagtggtttcgaaatctgcactctatgcagaatnttgctgtggaaatgtgcagcagacatttgcatatgtgcagacaaatgcttgtgtatggttggctgtggaaagggtagtgcacatggggttctggacattntatagtagatcccacggtcaaatgtggctatgtctaaacttcataaattcagcatcacgtacactggacaaaaagtctggaattgatgtgaaactggatttggtgtgtttggcaaattttgctttgcttgt

SEQ ID NO: 114337 - DNA, 160 bp, Glycine max
  unsure (1)..(160): unsure at all n locations
atcctctatcctagctacttctgagaacttcttagagattctcngaactaagctcagtaccacccttctatgctaagctacacctgagagagagctgaggtagctccacccctatatactaactcacccttgagaaatgctggaatacagaaattcctat

SEQ ID NO: 114338 - DNA, 369 bp, Glycine max
  unsure (1)..(369): unsure at all n locations
agcactgagctgcagctgaaagcanccgtttttcttcttttactgtagaaacaactattgaataaaaaacttacgagagataataaagacatgaagttgactctattaatatgtgtgagggagagtatatttataaccagctggatttagtgctgtcactgttaggcatatcaatacagctcaaccattattataaatgctggtagtgagccaagggtttaactactgtttgcatcatatcaattctatggagacgcttatgcactaagtccattaaatgttttaccatcaggaaactaaaatattgagaatactatagtttgtgcctctcggatagcttggatgtggaaaatgtaactaacataaatg

SEQ ID NO: 114339 - DNA, 370 bp, Glycine max
acactgacatggttcctgagattcaccataactctgcttgatgatagattctactctggaaggaaaatgaattgttctggaattcagatgcatatgtgcacatataagatggtctacaaccacataagaattcactggatgaataactactcattgatggcccaatgaaagagagtcttggcttggttgagcatattatatataatacagatgggactgctagaattaacaactcaataccatacgacggagtaaactcaagtttttagcatagtagagcagacagatcataatcctcatagaagatgctgttaggaagtccaccattagtcgaaattggattacaattggacagtctgctcaaccaaat

SEQ ID NO: 114340 - DNA, 213 bp, Glycine max
ctaaacgtgatatattttgtatatccagcattgatattatatggaaattgcacgatcatctctgatcatcaaagaattggaaacttattaaattgcacttgaatatgatctcataatcttaacttacgtactcttgattatttgcgaaagtacctggattgtataactattactgacatgggcattgccatacttatggttgttgcacaataa

SEQ ID NO: 114341 - DNA, 143 bp, Glycine max
  unsure (1)..(143): unsure at all n locations
atacaaatgataatagtagtggttggtgtgctatcaaaatcatgagttgtattcttgcgttgagtttcagatgaacatcntataagatgattagcatagcctttaagtagtaaattaagatcttcattaatactctatgatgc

SEQ ID NO: 114342 - DNA, 274 bp, Glycine max
caaatttactacgtcactgttttttctagaaactattcttcttcttgtcaaacatttagtctaacactttcatttacacacttgcccaaatgcgtgttcgtgaacccttagagacctcacaacgatttcatgcttgatcgtgaaaaaactattacttatttcttaggactatcagtgtctgtatcactgttccattttgttgacactgagttacctcttaactaagctaactgaacgtttttaaacgtactgacaacgaccgccatggacgatt

SEQ ID NO: 114343 - DNA, 313 bp, Glycine max
gctgcactacattactcagcgtgattatacactatttctcagaaagatgcgtgattgtaactaactcatcagcgtgttatacgaccatcgctcgataacatatgttatggtaactctctcattgacgctgatgaggataatagctcggtaaagttgtcgtatggtgagcaactcatgcacgctgttgtcgctataactccataagttgcttgatctaactcacatattcacgtcattacgataccgctcggaaattgcgtgtggtaactactcatcacgtgattacgacctaactcgaaagttgctgatgtaa

SEQ ID NO: 114344 - DNA, 428 bp, Glycine max
ctcaagcttgacaatcaacacaaactttactagagttgatgatccgtatatatcaacctctacataatgtgaacttcacaattatctaacaactttactcgagtctgttgatcctcaatatatctgacgctccaatgatgttgaacttgaccattcaacacaatattttactgatgttgatgtaccgacatattagaactataatgattgtgactttagcatttaacatatacttttatcaatgctgttgtccccgatatattaaatccaaatgatgtgaactttgtctatttaccacatacatttttttgatttgatcgatccgaatatagaactcaatgatgtgagattatcaacatgaatactttaccgtgctctgatcctactaccacctaataaatttcctcataactacaataatttatgtg

SEQ ID NO: 114345 - DNA, 310 bp, Glycine max
aagtgttttttatatctccaacaaccagcctatctgatatctcgtaaaaaaaaaaccgatatcacaagtactctttctgtatacgcgcacttattctgtaactactgcaagatgttgacggccatattaagagataacggcacaagcgggtgttgattgattagcaactatacctgggggactctttcagcatgttgatcatttttgagactccttctgaaaatgtaatattgtgagaagatgtgtccgtacattcatggaagcaacgataacttgacattaaaaattatactactattatcactctgca

SEQ ID NO: 114346 - DNA, 233 bp, Glycine max
aatgatgtgaatccttccctcaccctcccctattatggaaatatggaggagtgcacacactccccgcgggtgatgctcacctaatctctatggccagggctgaaatgtcaaaatccatttgccttttttaactttgctattactctgaagacaaacctacaatgtcgaattactgtacagctattcgctgacaagtcaagttgcacgtcgcccgacaataggttgcatgcctc

SEQ ID NO: 114347 - DNA, 348 bp, Glycine max
accacttgtactcattaaattgagaccgatgcttgctttgttcttttctatagccaagactactttacctgagggcctctggctatcaaatggcagttatcatgccttatgcacgttccctaacacaccctggcttctctggcctcttatgctaaggtgactgtcgtagaagcccccctgaccatttggcctattgagcttcattctttaatttcttaaagctttctccctttcgatgatttctctaagactgattctttttttactttgtattaaattgcgaacttattcttttttcttcaaacccgcaggaaatgatcattacaaatgcataattctaattcagtt

SEQ ID NO: 114348 - DNA, 143 bp, Glycine max
acatgagctagaaagagcatgctacgtctctatggtctagtgatatgttcaccaagctacacctcctttgaatagccttgtatagcttcttattcaggacaaccagtatcattttttaacaccatatttcacgtgtctattta

SEQ ID NO: 114349 - DNA, 273 bp, Glycine max
agcaccgagctcagcttgtggaacttgctgctccattgcttacttattgccttaatttcaatggatgcttacacacttgcatgattttatgctctaaggcaagtcaatcttgatgcatatttgacttcatttcttcgaggattacatgtgaagagtactggttcttacgtgtcatagtaacagttgtccttgatctgctgcctcactagaactcactcttctattgtcaccaatcttctactctgtgaagttacattgatccttttacacaac

SEQ ID NO: 114350 - DNA, 379 bp, Glycine max
gcagcatgcaagctatgcacggaaaagtaataagaatttttagcccaaaaacactttctagtaaacagcataggcaccatgtcaatcatttgtgtgaaagaaagggtcaataacccaactggtgggcaatggtcacgaaatatgcacaaagaagcagggagaacttccgcctcccttcattttcgagttttagcttggagacgaaaatacaaggatcatgtatgagcaaacaaaaagtaagtcgaacgcatacgatgatgcaatgactcatgccaaatgggaacgtgataactgacaaatgcacgaacgatttgttcaatatgatgctgaacagatgttcatgcggcgcatgacatgaatgcattctacggacacaaga

SEQ ID NO: 114351 - DNA, 220 bp, Glycine max
  unsure (1)..(220): unsure at all n locations
ctgaattttttttacnggggaggggaaagggagaaagagaatgttgactttcaacgggtcccggttttctaaaccatcaaccgcaccttaccactcaaactgtcctcacaataccaataaagcaacggccaggtcgagatccacctccgtgattacaataaacaattttgagtccatgactcaatcaacaaatccatgtttttcatatgaggcggcctgc

SEQ ID NO: 114352 - DNA, 426 bp, Glycine max
  unsure (1)..(426): unsure at all n locations
agcttgaatcggacctcagtgtganaagttatgactcatttgaattcctgagagcttccgttgttgattntcaagcgtctctatatgtgatggcgcctgaatgggacatccgaagttaaaagttatgactatttaaatttctcaagagcatcccgtgttcaatatttgagccgcgcgatatgcgatgtgtctgaatttgaaaaaccgtgtgaaaagatatgaccatttgaattttcgagaacatccgttgttcatttcgaacgtgtcgacatatcatgcgcccgattcgacatccgtgtaaaatgtatgaccaatttaattntacgagagctcccgatgttaatttctaccgatcatatattgaagccttaatctacctcgggtgaaagttatgaccatttaatttccgagagctccgtgttcatt

SEQ ID NO: 114353 - DNA, 403 bp, Glycine max
ttacagcagattttagtaatgacccactaacctataattaatataacttaatgccattaacctatggaattaaaaaaaaacttaatggctgaatgtaactgaaattgtggcaaccaaaagtcacccccaacagccaacaagtcagccaccatttggtctcccaaaaggctgatgcctaagttgccaattgggcccttattaaaccttgaactaaacctaactaaagcccttttaattgattaacccaaaacatatttttggtcagccaactttacaaggattgggccattatttagacaaactaaacactctaaaaattgagaaaaagcggtgtcatttagtcctcctccatttgggccatgatacaattcacaaccttggacttttctccttgaaacttggg

SEQ ID NO: 114354 - DNA, 444 bp, Glycine max
  unsure (1)..(444): unsure at all n locations
agctngagactganaatgactggtccttcattattatgaccatttagtttctctcgaaccagatatgccgatatcaatttaaaattggccagtggaatcctagtaacacaggcagatgcctttaacccatgaggatgtataatgacacccatttgccatgtgagcatcattcttgcaaaagttttataaatgtatgtaaaaacctggcaatgcagcatttgatatcatcctttatctcattacaacactcatgtgtatatgcagactgatatatacttcttttaagacattcagcaaatgcttcctccggcaaagcggtgctcacaagtcccatcctctcttctagagctaaaagttcctgtcatcaatcagaaacttttggagctaagataacactagagaaagaaaacttataggattttaataccaagcatgctacatcat

SEQ ID NO: 114355 - DNA, 400 bp, Glycine max
  unsure (1)..(400): unsure at all n locations
tgtggaagataatgctagggtggatccctggcatgttagatgaatatcaagcgagcaggtctgtgtttctgtgtaggacattagtgatgcgcttgtgctcatggctggtgaggtccctactgagcagcatacactgcctgggtttgggctcgagctacaacttgatgagctcttcaataagctttgggcctctatcagaagtgtcgtcacacaaacctatattgaatttgtcatccaggcttatctggtaaatggtcagggctcgggtttgaggctctttgtccacacttatgacttgagtaccttcagccactgtggggtgaggataaggtgcaacctttaagctttctgcatagcactgtcatgcttgctaaatntgacttaacgattacaatctccc

SEQ ID NO: 114356 - DNA, 329 bp, Glycine max
cttaacaagagtatcacaaataactatcattttttcataaaactaacaatactgcccattatatctatctaaaccctataccccaccactaatcaaaggagaaagaagtccacccaatcctgaaatttcaagtcccactcgtagacacccactgcactactccagaaaagctctccttcacgatatggacataatggcaccaaagttgagctttgtgggcacaatgtgaggaaaaaaaataaaaagtgttgagagatacgacagctctgatttctgtttgtgatgagaagaaatactttcttggatttaataagcgctcatttctattg

SEQ ID NO: 114357 - DNA, 388 bp, Glycine max
tatgcgcaaattacaatgaccccctttttgttttcaaaatcaccacagggagacttttgacctttccaccaacagatacaaccctgtatggaggaatcaccctaacctgtgatggtatagccctcaacaacaacagcagcctgctcctttctctcaaaatgctgctggcccaagcagaccatacattcctccaccaatctaacaacagcaacaaccccagaaacagccaacagttgaggcccctccacaaccttccatcaaaaacttgtgaggcaaatgactatgcagaacatgcagttccagcaagagaccagagcctccattcagagcttaaccaatcatatgggacaattggctacccaattgaatcaccaataggcccataatt

SEQ ID NO: 114358 - DNA, 324 bp, Glycine max
  unsure (1)..(324): unsure at all n locations
tactattcaagggaaacttttcacaaaatagcgagggtcccacaccttcaccaaactactttagttcaaatattattttctcaattctcttccattccacacaaccagactcacccttaagggcaaaggtcagcaaaactgttttaaactagattctntaatttctctatcgtattctctatgttagagcaaagtaagcaagacctaccttaccctatcttttcccttggttgacttggttttgctggtgggcgttgaacacacatttgtaagagaaaagaanaagaaagtangatggaaagacatgggctganggaggtatgt

SEQ ID NO: 114359 - DNA, 403 bp, Glycine max
ttgaggatttggtctttgccagtgaaaggatctatgtgggtctgaaaagaggcaaatttagtcatcctgcttggacaaatgagaaaactagggcaaatgataagggtgaggatgcacgagaagcccgtgctgtgactgccattcctatacagccaagtttcccaccaacccaacaatgtcattactcagccaataacaaaccttctccttacccaccgcccagctatccacaaaggccatccctaaaacaaccacaaagtctgtctaccgcacttccaatgatgaacatcacctttagcacaatccaaaaacaccaaccaagaaatgaattttgcagcaagaaatcctgtagaattcaccccaattccagtgtcctatgctgacttgctcttatatctacttg

SEQ ID NO: 114360 - DNA, 324 bp, Glycine max
  unsure (1)..(324): unsure at all n locations
aggtatntaaatggggcctagnccaaaagaggatctgagacaaacttggttgatccgctgagagggacaagttaataattaagctacacctaaacatagagcttgattgatagagaaatattcttatatgcatcaacttgtttgttagaaagacccaacatttcgacctattgctgtcacttttatttactttgcattntatagctttcagcatanaagttagtttaacatttgtttgaaattatcaatcatacatgttctttcaacaatgcttcatttctgaacttaattcacgctaacattagttccctgtgttcgatactc

SEQ ID NO: 114361 - DNA, 408 bp, Glycine max
aagaaaccaagcttcgtatccatccatataggacttgaattatttatattaacattgctggcaacaacatcaacaacttttagcaccctggatacaaaggcttcttcgagtcattatccaatgtatcatacataggggcatgtgcttgttgaaaagactcttgcccaggaacccgaatcatatcctctaaggacctctaatttctacatcatcaaaagtttagattagaacccctctacgtagctgaaatttcatcaaatttaagaaaataaagttaacctttacgtatgaatccactataaataagtgattctttctaaaccattcaaacggacaatctaagattcaatacaacgattaatgcacactgtccacaagaatcattgtattcaatctcaaacgggaatc

SEQ ID NO: 114362 - DNA, 407 bp, Glycine max
actcgagctgggaccttcctcatcgtcaaacctttgcattttgctcacatgaataggagcatggtgttcaagtctaaagatccatactggggaaacaagcctatatgtgaattcacctctggctacctacaaccatcttcattaagcgcttagatgtactcgctttctttgatttcgaatgcaagcaaaaaaatatatctgtgtctttgataactgtcaaatatgagttatttcatagtaaaaatatatcgaaaatatctttgagaatatttattcaacagatatttgtgcgcttatatgataagaattgatacttttattatttatggctcgcagatataaaaagatcacatcacaatatctcatggatattgataaccgctaaatctgagctaatctgaaaatac

SEQ ID NO: 114363 - DNA, 456 bp, Glycine max
  unsure (1)..(456): unsure at all n locations
agcttcaacatccactagcatagcgcacttattgaacttgtcattgaacttctactgcatcccttttctcagctttgggtgcaaaatataaacttcaattcatgtaattaaacttcattacacagagggatattaagttggtcattgatctcattacaagattcaagttataagcttctctccatgcaggagatacatatagcagtctaaatcaataagtgttgggcttttgccatgaccgtggacaagccatcaacaatcaagaggagagacagttgaggtttgtgaggctttcaatatggacggnggcttgaagattcacaacaggcaacagctacaatactcattaaagggaccaccattgttgcctacttgctgaaatcaagttatccaatgcaatgcagacggaagatgacacagatcgtggagagagaaaagaagattntaaattaattt

SEQ ID NO: 114364 - DNA, 399 bp, Glycine max
tggatcattgttctgcattactaagtggaaaatttatcaccttaattttcattttcccccctttatttaatatttgacatgagtttgttgtttgtgtaggccaacaactactctagaaagggtaaatctatgtcttcatattggtcttatatttttccttcagttggcttcaagggatccaagatcagtaatcatcaatcagtttctgttagaagtaattgtgaaaattttgataaggatggtgatcgctcagataaatatgttgattctagtcccatgagtaatggcaaggatttattgaaaggtaaaagtaatgataaagatcaggccactagaaatagcagtaggagttctgaagtttttgaagaagtaaatgagcaacattctccaaatattccc

SEQ ID NO: 114365 - DNA, 403 bp, Glycine max
cttgctatgaaaaccttattatgtatgcattcttttatttgtcattatgatgctcagaaggttctgatgcaaatatcagcatctatgacgacaaataacataatgtaaaaaggatggaaaaatagatctaatgcatgaatttttatactgattcaccctaaccttgggctacatctagtcttcatccaaactaatgatatttccactaatacaaccaacaacatgctagatttttacaactgccaatcacttattggacttcacaacatctccctcaccacaacatcacacctgggcttggcttggagataacccatttcaaccacaacatcatacgagaggcaatccatgtattcttcacctcttcatgtgggcttaacccacacaatgattctgcttaccc

SEQ ID NO: 114366 - DNA, 366 bp, Glycine max
  unsure (1)..(366): unsure at all n locations
cacgctcaaacaaatattttcgacacctacctttacgtgatttgaccaacgctggtatgggaatgtgcgacatccttcaaaacttattgatacattctgagaggttggttgtcatgtggccataccgacgtccttctctatcataagccatcgtccatttttctttngaaatgcgatcaatccatgttgctatggctggactcagttcacgaaatttttctagattttgatcaaaaatgtgcttgcaaggagtataggctgcatcaaattagttatgaataagaattntaagtatatatcanagttaaataaacttgaccatgaaatatgaaatcttacccaatntctntaacatctctttttgtt

SEQ ID NO: 114367 - DNA, 394 bp, Glycine max
ttgcttctacatcctccaacctggattgtatctattgctcgaaaggtcataattattctactattattggtttttctgttgaggaggcctattataaatgtttgcagcataagcttcaggttgccctttgaatcacctttgattcaccatgaagctttgcttctacaatctccccctttttgatgatgacaacttctgaaatcaagaaacacacacacactttttcctagttgatcactcacataaattttccccctttgtttttgaatttgtgcttatcttaaaattaaattgattactcatgtgagttcttgatttaatcccatttctctccccctttggcatcaacaaaaagccaaagtgcgtatcataatttaagtatgcaaatataact

SEQ ID NO: 114368 - DNA, 395 bp, Glycine max
catgcaactttgctatacactatctttgttctcttatccgaaccatgatgaatcaaatccaaggacacaatcattgagaataatttttatttggctctaatctgtaaaaccctaaaaacccaacaccagggaattagaagctcatatctgtttagatcctccctaagagctctcttcccagcatgggcacagggagcataaacattcactatgaacatcctctggttgcttgtattccacctttcttcaaacataaagaaacatctactcttcacccgccttttcacctcataaccagaatattccataaacatatacccccccacagcctgtcagaaagtcatagtccaagatgatatgatcaccccaatgcctgcatattctttgtaaagcac

SEQ ID NO: 114369 - DNA, 396 bp, Glycine max
tggatgaagttgaataccttcacctctctctttctctctctctcaagcttgtgtctagctagaccacaatcacctccacctccaagggagagctacaaaaccttccttctttctagcgcttaatctctaggatggtatgatgaactaataagtggatagtggtatttataggctaactcaggagacaaggtgatgaataggacttatgatgaatgagaactcataattcctatggttagtaagcctttaatttcctattaatctatcctctccattatctaactcacctgagcctttaatttgattatccattattctatctatctcccctcatcattttcaaactatgtatgttattttattttattttaatgaatatattttttaattctaccc

SEQ ID NO: 114370 - DNA, 275 bp, Glycine max
  unsure (1)..(275): unsure at all n locations
accatgtgggatccgcaccgacttaaaggagcactcanaccgggtggatttactcccaatgcctggactctgaagagtccatcggggcctttttctcctgattcaggtccaacccagaaaacattntagcacacagactctatctatgaactgtacaaaacacatgactccttaattgttctcaaaatgatnttatcttgttgcgcttgtaattaaactcgtcaggtccccatagttggttctatcataatattcgtcgcccttaaagggtctta

SEQ ID NO: 114371 - DNA, 434 bp, Glycine max
  unsure (1)..(434): unsure at all n locations
agctattagctatggttagcgcattatatattttcatatcttatnntgacngcctccatatcactgtctatacttaccangaaaccttgaataacctattgaagaatgcccaatgctataccctatattgattagggtggatgcttctttcttcagagagttcggatattgaatatcacttgacacagagtggtattanaaaaccatgtgaggctgatcatttgagcaggaattgagggacactgttgacatccctacttattagagataactatccctgatgagcatctgatgcagtatcattcatcacatgtcacacctcggctagttgatattgagcatttcatagtagcaattgttgtcccacgcatcatctaggtcttaaaacttaaacctaatagtgacgccaatattatgtgcgggagatccttact

SEQ ID NO: 114372 - DNA, 171 bp, Glycine max
tactgactcacacctctccctagattaccacgaataagtcaccacaacctctcggttgttgacgcataccaaggaccaaataaaacaaaaccctatatagcacagcccaaccaaacattggtagcacaaatggtccctaataacttcaatagtggcaatatgtacactatt

SEQ ID NO: 114373 - DNA, 454 bp, Glycine max
  unsure (1)..(454): unsure at all n locations
gtcacctgccgcatgcaagcttgtcagcttcttctggcaatggttgtaccattngtcattgtgaaaagcctttnggtcgtgattcagattcttcaactgcattaactagatcactcaagcagtatctgacagaggatcaannatttcanggttttctaactaaaactgataatcttcaattcaactttaagattgtaaagtacattttataaaatgggaaatattatacaagatngaccactatcttgggaaagagcttgtggaaaatctttctgttctccgattctcaaatctcatctttgaaccattatggtcaaggcaatatataagaaatgtacagttgatattctcagaagaatttggcactgaaggggcgtgcggtaacctttatccttaacactttccacttttgtcttatatgggatcttatcatttcatattgaccatggaggac

SEQ ID NO: 114374 - DNA, 285 bp, Glycine max
  unsure (1)..(285): unsure at all n locations
tgtaaanaattgcggtccatgaagtgaactttatttgtcctatcttcgcgaccatggaggtgtaaagcataactatgacttaaatatcattttcttcatctgtgaatctctatactctctttccccttcactcatgggatggtagcttgctactcagagtgggctttgaatatccgaatctgtgcttctaacgtgaaaagggaattcatggattccgacatacttctattgttcttatatgctgtatatttccacaagtccagaaaattatactgcggattacta

SEQ ID NO: 114375 - DNA, 449 bp, Glycine max
  unsure (1)..(449): unsure at all n locations
agcttgcttgtgggcttctatggatgctgtatctttgtatctcaatgaggtcctttaatggtgattttccaccatggagatgcaacggaagacaaaggagaagaggtgagaggaggcgccatccactagggaataagccatggaagaaggagcttcaccaccaagatgagccttggataagaagcttgaagatggtgctntaatggacgaaaagacagagggagagaaagagagaggggggagcacaaaattgaaggaaaaaaagggagagaagttgaactntgagttatgtctcacaagactctcattcatcaaagttacaacaagtgttacacatgcttctattatagactacgtagcttccttgagaagcttcttgagaaacttctagaaaacttctttagaaaactccttgaaagctagacttagctaccacaccatcttaaact

SEQ ID NO: 114376 - DNA, 388 bp, Glycine max
gcatacccaagatgctctttgactgtgtgttttcatgacacttttgactagacagagggccaagtttaatcctatagacatttccttgtctcttagtagagaaggctgaagaattgtccttgttatggattatacacatgtccttgttaaaagtgacatcgtatccactgtcacataattgacttatgctcaatagattatgcttcaatcctttaacaagtaaaacatcatcaataggaggatagagaggaatacaaaccttacttacaccaattatcaaacctttctcattccctctgaaagtgaccatcccaccggacatagggctaagagattggaacatatacttttcacctgtcatgtgtcatgagtagccactgtctaagtg

SEQ ID NO: 114377 - DNA, 415 bp, Glycine max
  unsure (1)..(415): unsure at all n locations
acacatctcgtgatagctaagcttcacctccttgagatgagaagctagagcttagctacacactcccgtatatagctaagctcacccccatgacaaataaggatgataatccagaaaaatagtccttactacagagactactcaaaatgccccgaatacaaggctaaaaccctatactactagaatggcaaaatacaaggcccaaacgaagggaaaacctattctaatatttacaaagataagtgggctcatacttagcccatgggctcaaaatataccctaaggctcatgagaaccctagggccttcccttggatctctagcccaatctacttggagtcttctacccaatgcccttgcgggataggattgcatcannaagctctcaaggaagccacctagtctataaggagaag

SEQ ID NO: 114378 - DNA, 398 bp, Glycine max
  unsure (1)..(398): unsure at all n locations
tnnttttgacctatgacaatcttttagggcctttttgttttctngntccaaggcgtcgggggtggccatattgatgtcttttagttcatcatactcctttcagactttgatggccgttgacttgaacttctctttgactgctcgggcttgttcaagctctgcttttagggcttgtacctcttcactttcttcttgtgtccagactctcaaccacttatgatagccgccgatgatcccattactgctttccctaagctctttgtccttcctttgcgcagcatcccattccttgcggactccttgaagcaccctcgcgttggggtcgctgaaaccccgtgtgatgaaaggcgtgatggtgctcctctcatggggtanccaagttgtcttatggtgaggac

SEQ ID NO: 114379 - DNA, 434 bp, Glycine max
  unsure (1)..(434): unsure at all n locations
agcttatcaaaaccatggagcatcatattattcacacctcattcttcattgttgaagattcttttgctttagcccaaacactgcttatcaacaatatcaatgaagaatcaagttccttgcctttgctaagcttttgatcttctgacaagcaatatcaatagaaggagaattgaggatatcatcaaatttggcctgggcagcatctaatgtctctatattctctagagtattatcgtatgcactgacagctgacaagcatctactgcccagcctggaaatccctgttcatagaatacaccaatgccaatcataagaaaaatcctacatatacaggacaggatcaaaagtttttttnttttgttcggaaggcangatcaaaagtattaacttttttcagagtgcaaggggcgggttcactacgaaaaattttcatg

SEQ ID NO: 114380 - DNA, 401 bp, Glycine max
  unsure (1)..(401): unsure at all n locations
tgatgcaaaatacaatacaatgaagcaacatatttaacagctcctccagcgtaaagcaatgtttgcagtgcaaaacaaatcaaatggttaactaactcacactctcccttagatatactatatatagttcactacgacctttggttttttgatgcaaaacgaaggaccaagtaaaacaaaaccctatatagcacagcccaaccaaacattgtaagcacaattgtcctcttcttacgttcatcagtgtcaatatgtagactattcaagatatctaaaccggtaatccgtgcaccatcaagttacccaaacccaaaggtatcattggtctggtactggttcatcaatagcccctcataagggtacgtcatggtcgaaattntgttcatccaacgccaataatg

SEQ ID NO: 114381 - DNA, 454 bp, Glycine max
  unsure (1)..(454): unsure at all n locations
agctnttgtgtgagaggatgtgaatttgatttttttcattcaaaggcactggtaatcgattaccaagacattgtaatcgattatagctttatgaaaataatcggaacgttgtagaattcaattcgacaactttttcaagtccattatgctattggtaatcgatacaacaatctggtaatcgattaccagagagtaataactctttggtaaaaggttttgtcaaaaactcatgtgctattcaaagttttgaaaaactttttaatacttatcttgattgagtcttctcttcattcttgaatcttgagtctagaatcttgatcttgattcttgagatcttgaaccttgaatcttgattcttgtctctagactctcttcttacgtcatgaattcttcttgattcttatcttgaactcttgaattgttcttgattgatctttgatttacttgagttatt

SEQ ID NO: 114382 - DNA, 395 bp, Glycine max
caactaaatttacaacgttccaattgattttttttcttgtaatcgattataatgagtgggtaatcgattaccaatgtgtttgaacgttgaaattcaaattcaaatgtgaagagtcgcatcctttcacaaaaaaagctttgtgtaatcgattacactgatttggtaatcgattaccagtgatagtttctgaacaaaatcaaaagatgcaactcttccaatagttttcaagtttttctaaaagctgtaacttttccaaatagtttttaagtttttctaaaggttataacttttctaatggttctcttgaccagacatcaagagtctataaaagccaggctttgatttgcatttcaatgatctctttaattcattctttagacaacaaacttttgcca

SEQ ID NO: 114383 - DNA, 363 bp, Glycine max
agcttgatatatggctggaacaatttatttattactctcatgccagttctatataggctatttgcgtggcatgacgcgcgcctattcaactaggacgttctgttacgccctgttcacggtgatcgcgattttttcacttacggattttcaatcgaattgccaaaacaccttgtctgacataacgggagctgaattgctattcaactcactgtcgaggactgaatgcatacatctggaacatcacatacacgattatgtatatgcgaagtttaattttaatacacgttctaactactaccgttgctgttaccaccgacactaccctcacaactgtcattgccaccacactacccctaccatgat

SEQ ID NO: 114384 - DNA, 383 bp, Glycine max
attgtggtgccactttgggttgttcagccagccaaagctcgtggagatgaatacaaataaaataacgaagccaacaaagatcaattataaggtgtagacaaccaggatcataaataagtcatacccgaaatgtaagccaggcagtcataatttaacaccacatggaatctaaacataaaagactcaaggacggatactaaaagacaaatttagtgtagaaaatgatagctgagctaccatatccaaactacaaggcttagaagaaaatgagaagctaaactctaagaatgcggaggtggtggtggaaggtcgaagctctgacgaatataacccacatcggtatcaagctgcgcgagactgatatccatgccggcgaagtgagt

SEQ ID NO: 114385 - DNA, 285 bp, Glycine max
gggcaaacgaataccagcgagcccgaacaccgaaattcaaaatcaactgcgaagagacacatactttcacaaaaaagcttcgtgtaatccaataccaaatcataggaaccgaataccagtgattggtttcgaacaaacaacacaagatgcaattctgccaatggccgacaagcccatctaaaggttataacactcctaatggctttcttgaccagacatgaagagtctataaaagcaagtccttaactcgcatcgttaaggacaaacaataccaccctcaacaac

SEQ ID NO: 114386 - DNA, 420 bp, Glycine max
  unsure (1)..(420): unsure at all n locations
agcttgttattccttaacaacggtcaaaatatgacacaaactnctgtctgttccgagaatcttaaaagcgattgaaatatctatagaagataattaactctaatattatgaacagaacattaactaatatttatgtttattatttagtgtaaatttcgatagaaaattctactattatcgagactgtgttgcatgctgatagtgttagaatacatcgtataacagaacaaaccatcgataaaaaaaataaaggatttaattataaatagtctctaatgattataattagattcctgttaaaaaataaataagatattcataaaatgtatcatcaaatattagttaatctaaacataataataacaacaattaggcaacgaaatagcttacatacaaacaactacaaataagttcaatttt

SEQ ID NO: 114387 - DNA, 385 bp, Glycine max
tgttcatgattttttctcagatctttatcattctttgaacaatatacttgtgcttcatttaactgtctttgggcttggcggccacactcaacaaagtactttcgacacctactgtacgttgatttgaccaatgctgttatgggaatgttgccacaatccttcagaaccttattgatacattttgagaggttggttgtcatgtggccatatcgacgtccttctctatcataagccatcgtccatttttcctttgaaatgcgatcaatccatgttgctgaggctggacttagttgacgaaatttttctaaatattggtaaaaaaatgtgcttgcaaggagtgtaagctgcataaaatgagttatgaataacaattttaaggatatat

SEQ ID NO: 114388 - DNA, 189 bp, Glycine max
gtcagtatgaataatccgcttactgcttggaaacggatatccggatggcctcaccttacaaatgaatccgaggacttagaaggcgtgaagatgatactgccctctcgccacaaacgggaatatgaacgttcattgagggatgcttggacacctgtcttttaccgctagggctttctaacgttaccgagg

SEQ ID NO: 114389 - DNA, 389 bp, Glycine max
  unsure (1)..(389): unsure at all n locations
tatnnnaaaaacaacccccgcaaaggngnatgcgcaataataacaaggtatcttctgcatctctccccctcttccggagagaatgtctccgataaactggaagtacgaagctcactacggctggctaaaatcttaagaaggcaccctcaaggggccttagctatccttatacggaaaaagccaatatgaattaaaacccagcagctgcaaacaaaatcatgataccactcttatcctcctttttgcgagactgccgaaaacccgggattggaaagcccgcaaaggtgggccctcgatagaaggtattgaaaaaccatgaaagtccttctggccacgccggtgcctggaggaaaaaaagatctactaaaacccaaaacgaggtgtgggca

SEQ ID NO: 114390 - DNA, 462 bp, Glycine max
  unsure (1)..(462): unsure at all n locations
ttatagagacctgcccgatgcaagctttaattgaatatgcaatgtcccaattgtttttaaatggtgtaatcnattacaagcaggtgtatctgaacgtttaaattcaaaatcacatgcgaagagtcacatcctttcataaaatgctttgtgtaatcgattacatgtttttggtaatccattatcagtgacaagtttgtaaatataatcaagagatgtaactcttccaatggttttcaagttttactgaaggttataactcttctaatggtnttcttgaccagacatgaagagtctataaaagcaaggccttgacttgcatttaaagacctttaatataacttttacacacaccatttgacatcctaatgaacttcttcttattctttctgtgccaaaagccttctgggttccaaaccttgtctttccaaaaacataagtgtgtatatattcaatttcctcccc

SEQ ID NO: 114391 - DNA, 457 bp, Glycine max
  unsure (1)..(457): unsure at all n locations
agctngcaagcaagctntcttagcctttattataactattgccacgccaccaatcctgagtcaactcaaaccaagagtacccttactcttgtacctctcagtagctgacaaggttgtcagctcaaccctcgtgtaggaggatgagaaacaccaacttcccatctattttaccagtcatatccttcatgatgctgagaaatagtaccagatgatataaaaggtagcgctgacactcattacctaggctcaatgcctcaagccatactttcaaagtcaccaagtggtagtcaagatgaactaccctatcaacaggtgtagtgaaagcctgagctggtaggaaggatgacagcatggaccgtagaactattagaagttgatctccagtataaacctcatggccccatgtagacacaattcatggaaaacttccaaacagagtttgctggcacaaccaaac

SEQ ID NO: 114392 - DNA, 414 bp, Glycine max
ggacctatgaaactcagcttctatccaggctcatcttggtggtgaatctccttcttccatggcttattccctagtggatggcgcctcctttcacctcttctcctttgtcttccgctgcatctccatggtggaaaatcaccattaaaggacctcattgaagctcaaagatccagcctccatagaagccctacaagcaagcttccatcatgagtggattggaatgattagataattgttttgatcaagcttgtagccattagaagagaatgagcatgtggttggaagtatgactggaaatgttagtcagtttgtcagattgattgtgagggaatgcattaatcgtatccagtgagagtgtgatccttaaattttgagagaaacgactatcatttagtactgatttttgcgtgaatc

SEQ ID NO: 114393 - DNA, 165 bp, Glycine max
cacgaacacaagggccgaaagccgggcgaacaggaccaggggcaacccaaccacgacacccaccacggcatcgaggaaagacgacaacaggcaccgcacaaaaagaacccacaacagagtggggaacccaatgacacccacggccagaacaaacagggaacaaca

SEQ ID NO: 114394 - DNA, 326 bp, Glycine max
aaaccaccttgtgtagccacactaccttttttttttttgccaaagaagccggggtaactgataacctatctggcgcaaattaccttaccttaatctacttcacatctaatggaatgctaaggacgaaccgaaaccggcactcatgcggcctgtgagatataacccatgccatggggtaattcttaccctgggtgagcggtcgataatactttcaagtactctcctagacctgcccattcacgtccattcacataaaacaacacaatccgtatatctaacactccttttatagagcaccggaacatatgaccaatggaagcctttag

SEQ ID NO: 114395 - DNA, 447 bp, Glycine max
  unsure (1)..(447): unsure at all n locations
agctngngaaagatctaacagatttggcctttgttcatgagaatgactgctacaaacaatattaagacaaatctccctctgattgaaagtgctaaagagtttatggggttagtgggagagcgctctcaaacaactgacaagtctcttgctaggacattagtgagtacactgaccaccatgaagtttgatggttcacgcactacgtatgaacatgtcattgagatgacaaatattacagcaaaacttaagaccttgagaatgactgtgaataagaacttccttactcagtttagttatacctcattatcgtctaagtatggctcattccacatgagctataatactatgaaagataaatgaaatgtgcatgaattgcattgtaagttagttcaggaagacatgatgcttaagaatcaatgaagtcacttattccatcgtgtagccatc

SEQ ID NO: 114396 - DNA, 403 bp, Glycine max
taactaaagatcataattgtttgggattaacttttattaaagtagaaaatcttaaaaaaaagttacaacataatttcaatgatgaattgcaagtttattctaaaaaagtaacaactaatttacgcaatgactacacaaattcatcacgcataagagcaatgatctcatcagtcgttcttggctttcttgatttgtgcagcaaggcaagaatttcatctagagaatgccaattcaattgaacatttggtactaaattttgaatagatgaaaaatatttttctcacattaccgtcacatttgagctctatacaattgtattcaacacaaccatcacctttgtaaattggttgatgataaaaaggatcaattaaaaattctaaaatctccattggtgtacaaaatt

SEQ ID NO: 114397 - DNA, 397 bp, Glycine max
  unsure (1)..(397): unsure at all n locations
agcttaaaggtgagtttcatgaggatggtttgcacncatgctgtnttaatttggttntgaaggtgtgcattttgcattttgatggtggatgtgtgtttaacaacatgatcaacatgtatcttgtggtctcttctcgattgtacaagtgcagtatgagatctttatttgagattgtttagtatacaccttgtactttatttttacctcttaataaaaattttggcagttaaaaaaaatatctctcacattaaaaatactaaaagttaaagagntttttacgtgcagatntaaaagtgtgaaatggtcaaactagaaagtgggtatctattttttttatatagaaaacaagtttaaataagatatatatatatatatatagttaatggattgtcttacg

SEQ ID NO: 114398 - DNA, 398 bp, Glycine max
tgctaacccatggaagctcctaatatctccctttctttttggggtgggccattcttggatggccttgattttctcagggtccacttggaccccatttctaccaactacaaaacctaagaaaactatattatctacacaaaaggtacacttctctatatttgcatagagggtgtttttcctaaggactgaaagaacttgtctgagatgtcctaagtgatcatctaggctcctactatacactaaaatatcatcaaaataaacaactacaaatctacctatgaaatcccttaagacatgatgcataagcctcataaaggtgcttggtgcattagtgagcccaaaaggcatcactagccattcatacaaaccaaacttggtcttgaaagcagttttccact

SEQ ID NO: 114399 - DNA, 370 bp, Glycine max
  unsure (1)..(370): unsure at all n locations
ctgcagctagaaataagtgataaagtttaattctatgatcatcaattccaacaatagggggagtaaacgcaaattttatatatatacattgcttgctngaatcttgatttcaagacttatatagtcatcatcaaaaagggggagattgtacaatcaaatgactatgatgttccgatgatgatcatgatgatgtgatgcaaatgacgcaaatgcgcttatcaagattaatctcagacaatgattcaagaatacagacacaaacattaagatgatcactattacattatgaaggaaattcctaattgatataccataaggtttggccaatcaatgctagttataaagtgtttttcaagacatttttcctctg

SEQ ID NO: 114400 - DNA, 405 bp, Glycine max
  unsure (1)..(405): unsure at all n locations
acataaataccaagcctgcataacaaaactgatttgatccttatttttttcttatactaggataggtcatggaatcggatgacnccactttctgagatggaagataagtcacggatagacgctccaagggttcaaccttgataagtccacaaattggttcatacaagggaacttgaccagaaagctctcatgaaatacacaagtatttcctgaaaaatgccaaaagtgctttccttacaaagagttgaatacatatagtgtatcattaactaaaattggcgcaactgaaaaaggcattggattcagtcaccacatcatttaattacaattacaaaaattgaaaatattggatatgggccttgaaattagtatgggccttcaacaatcaagattcttgggagtgcc

SEQ ID NO: 114401 - DNA, 395 bp, Glycine max
ttgagccaattcaaacgacaataactttttactcggatgtctgattgagtcccgtaatatatcgagaccatcgaaattgaatgttgaagctctgagccaattcaaacgacaataacgttttacgcgaatgtctgattgagtcacgtcatataccgagacgctcgaaattgaatgttgaagctccgagccaattcaaacgacaataactttttacttggatgtctgattgagtcccacaatatatcgataccctcgaaattgaatgttgaagctctgagccaattcaaacgacaataactttttactcggatgtctgattgagtcccgtaatataacgagacgcttcaaattgaatgttgaacctctgagccaattcaaacgacaataactttttt

SEQ ID NO: 114402 - DNA, 385 bp, Glycine max
tgttcttgatgtcttctaagatctataatactctttgaacaatatacttgcccgtgagctaactgtctttgggcttggcggccacactcaccaaagtactttcgacacctactgtacgttgatttgacccatgctgttgtgggaatgttacaacaatccttcaaaaccttattgatacattttgagaggttggttgtcatgtggccatatcgacgtccttctctatcataagccatcgtccatttttcctttgaaacgcgatcaatccatgttgctgtggctggacttagatgacgaacatttcctaaaatttggcaaagaaacgtgcttgcaacgagtgcacgctgtattaaatgagacatgaataacaatgtttagcatatat

SEQ ID NO: 114403 - DNA, 355 bp, Glycine max
  unsure (1)..(355): unsure at all n locations
aaaaaaaaaactgttttgaacttgaaacgtcggtaaacgccgcgtatccgtaagtgagccttattggaaaaccaaacggtttttctggcttcgctaagcgcaagttttttgctaaacagaaagcgtctaagacttgcttaagtgagtgtaacggcaattacacttacaatttccagatttcacctaccccttctctgcactctctctttctccaaaaatttacacantttgcatctgtgctttctcttcgcattgtctactcccaatccttaagcattaacaatccaagtaagttccggaattcttttgccttttcttgctaactgtaggtagaagactcaactgagtttagatt

SEQ ID NO: 114404 - DNA, 399 bp, Glycine max
ggtgcccttaccactttgtaggaattcaatatcttttcattagctctttgggatgtgggaatggaaacaaccatgggagaagcagaaagaaataattaatttgaaaaattaatgttgaaaaacttgaggtacttactcttttaacccttgggagaaggggaaagaaatccccacatatgtgcatttattgacaaatgcctctttatgccctttaaatacaactactgatacttgatttacaagtctccaaacacaagttgtacaatcattatgggatacaagtcaaacaataataatgataagtatagtgaaaacactaattttccaaaagtaaaacgaaaagtaaaggaagaaaggccactgaagtatctagttactattttttcttcactcggaagt

SEQ ID NO: 114405 - DNA, 403 bp, Glycine max
  unsure (1)..(403): unsure at all n locations
ttgagtcacctgcggcatgcaagctttataagaactgagaatcagatccttcattcctaacagaattagttctcttacatcgaatatcctaacagcatctagaatattctacagatcctaacataattggttcaagctttatgcgccatgcatgactactatccatttcgtacgtagtcttccaagtaaatgggtatcttcttcctcctcttgggcctaacttcactctcctactgttgttcctttggtaattgcagacccctcgagtcattcgtaacatataatccatcatttatgtatgtattagatttatagctntatttatagaaaggctaaacccttcaaattcgtccgagggagggatcaggattgattctaaacattatagtccagaagacttttt

SEQ ID NO: 114406 - DNA, 373 bp, Glycine max
  unsure (1)..(373): unsure at all n locations
aactgcatagtgtcaaacacacaatattctattttatnacaacaagaggtggagcaggggagttaaaaaccatatcaagccgacgccattatacaaagactaaaggagtgaacgacactcaggacacaacatgtaggagacgacaaacatttagaaacagtatgtaacgtacaaaaatcatatatctgaatgactttcgttacagcaaaattaagacaaaatccatgtcacacaaacaagcatcatgcactagacgagcaagccatgcactattcttactctcgttactaaaaaaatgaatgcttaagtgtataaagcctaaagaagagacaggaatgcccctatcccatccaaccactgaacatatccatgc

SEQ ID NO: 114407 - DNA, 427 bp, Glycine max
  unsure (1)..(427): unsure at all n locations
ctgcaactttataactgatatttatcattttcacaagttgagtnttattcaaagagatagagttcatctcttttatcttagtgagagtgattctcctaaattcttgagtgattcaagaacaccctgtctgtatcagaggactttcacaacctttgtgtgttgccctcgctgataagagggattctttccttcctttcatcttcacccttgttctttcaaaccacaattccagataatccaccacctctgcccataattatctcgtggccataactcccattttacgcactcaaattaagtgattctcgagcctaaattgaatttcaaaacgagacctttcactctcgttttggaatcacctcatttggagccctgtagcttccgttattccatctctatatttctgtccagccaccacttaacctac

SEQ ID NO: 114408 - DNA, 139 bp, Glycine max
cgaggaggaccacaaatgcaggtcaagctgaaaactcgcaaaatggaatcaatccaacttagaaaatccaattggaccgaatcattaatctggattacaccaaaaaaccacaaacgtcgagagagattggagacaaata

SEQ ID NO: 114409 - DNA, 459 bp, Glycine max
agcttccttaagaagatccctaaggttgtcttagcttagctacacagacctctgtagatggctaagctcacctccttgagatgagaagctagaacttagctacacaccccctataataactaagctcacccccatgacaaaaaacatgataatacaaaaaaaaagtccttactacaaagactactcataatgccccgaaatacaaggctaaaaccctatactactagaatggccaaaatacaaggcccacacgaaggaaaaacctatgctaatatttacaaagataagcgggcttatacttagcccatgggctcgaaatctaccctaaggctcaagagaaccctagggccatacctgggatctctagcccaatctacttggagttcttctaccaatgcccttgcgagataggattgcatattgtgttagatgaacttcaaacagtctatcttttgttca

SEQ ID NO: 114410 - DNA, 390 bp, Glycine max
tgatcgctcactttgaaaactttttctttaacttcacttttaatctcgattgcggcatggggaaaaacattactagtaacaaaagggccatctcatctagatcgaagtttaccataaataagcttgaggcgagagttaaacaagaacactttttgatcaatatggaactccttcctatgaatcatagaattatgaaatctcttcactctctccttgtaaatcttggagttcccataggcttctaagcggatctccttaagttcttggaattgaattttcctttccatacctgcttcatcaaatgccatgttgcaacccttcactgtccaataagcacggtgctcaatctccaccagaaggtggcataccttaccaaaaaccaccctatac

SEQ ID NO: 114411 - DNA, 455 bp, Glycine max
  unsure (1)..(455): unsure at all n locations
agcttgttgtgaaggtctcttccataatattatgacacaaatttttctctcaaaactctcttcatgccttgtaaagtattaatcaaagggcttctcatcctctcaacaccactcttcacttggttccaccacactaaggcatatccctcaaactcaagggaggccaatntgatcttcttctcttcattgtagttatagcaagtaaagacttgctcaaccttcatcccctactcaagatacactnttggatcacaagtccctttaaaagtaaggatcttcaccttcactacctcaattccttcctctctntgcctacctctgtaccttctatggtttcttctctccctatacctctcatattctccatgagaagattagatgatctgtcctctcttcttcgctctatatngtcaatcctcacacttaaagctnntactactctttgtattcttccc

SEQ ID NO: 114412 - DNA, 397 bp, Glycine max
tgtaggattatggggtacccatcacatgtggtactatgtggcggtcgggcgatggtgcacaacaagttttccacatccacaaatcgcgcataaaccaatcatcccctgttgcccacctccaactgagctcacgtactcccacgtagcccatatcctcgtttctctcaacaccgggtccccatcaatcctcccaagcttccccaacatccaagtaattcaacattcaaacaacacaaactatcacagccaagaaaacagggcaaaggcagaaaactctgcccaaaacaccaaccaaaatcacagcttttctcacttaaagaccccagtaacatttccttcgttccaattcgttaaccgttggatcgactcgaaagtttactgaaagtctctagtacat

SEQ ID NO: 114413 - DNA, 313 bp, Glycine max
  unsure (1)..(313): unsure at all n locations
agctggactttgtgaggagattctttccttatctccacttacagnattcagccattcgatcaagaaagaaatatcccatatagaaacttccgatcgaatcttgttgctttaatttactagacgaagccgatcccaaatcaaattaacatgagaatgcagtaattggaagtgatcctaggttcgttcccaacgagcagtgacacacctaatgtcatattatacttgacacaacagtaacaattgggggggtttgattgttgtgaatctactatcacgacaattaatctggaaccttaactactaatttaaaaac

SEQ ID NO: 114414 - DNA, 405 bp, Glycine max
gacattaaaactcagcttattaaagctcctccaaactttttttaggcttctagtacactccggacatcttcttatagatcccaacggtcagatcatggcatggtgtcttgtgaaattgaagaccaaatttggagaacatccaccggctaatgaaggctgtggcagcttttttatcgaggaagctccatgtagctttctctagaagcttcattaataggctctcttcagaagcttcctcgtggcttctttgagaagctttctcaagaggattctttgagaagctagatccttatctatccacacccctctattaactaaattaacttcctttataataattacggatgaaaataacgcaacaaataattaaacatcgagcataattactaataatatatatatata

SEQ ID NO: 114415 - DNA, 179 bp, Glycine max
aggcatgcaagcttgaatcggacctgagagtgaaagttttgatcctttgtattcctagagagcctggcgaggttcaatttccgaagcatctccgacatatttatgtagtcccgaattctgtactctctgtgcgtagatagtactgacccacttggaatttcttcgagagcctcccgatg

SEQ ID NO: 114416 - DNA, 447 bp, Glycine max
  unsure (1)..(447): unsure at all n locations
ctgagaacctatataacagttctcttatggtttagttacggagtttttttcggttggagggagaattattttaggttttgcaattccagtttttacttgtcatgcgtaaaatttcacgtaacaataaaattcgttatctgcttcaatctgncaattcgtttatgcttcaatttgaaattttgttttctactgattaatggaaggctaagtctccagcgttgttttctcttgaggatcaatcacaactctctttgaggttttattattactgttgaattctgatcagttnttcctcttcaccaattactctgtatttgttgctattaatccatgcatgcttagtgcttgattaatngtctatgcgcttaacttacgttcatgcttaatgatcaatntcgttcatgattaattgggtatgtggtgctaactcacatactgacagcctta

SEQ ID NO: 114417 - DNA, 329 bp, Glycine max
  unsure (1)..(329): unsure at all n locations
atccttaagtcaccgcggctgcagctctacagaagttattcctaatgtttctacatcgnctcacctctcaatgagctggtgaagaagaatgcggctatcacttatggtgaaagacaagagcaagcctttgctttgctaaaagaaaagctcaccaaggcatcatgtctagcctcttctgacttttctaaaacttttgagctagaatgtgatgccttaagagtgggtgtgggacatgtattgttgcaaggtgagcaccctattgttatttgagtgaaaatattcatggtgccaccctcaactaccccacctatgataaagagctgtatgcc

SEQ ID NO: 114418 - DNA, 320 bp, Glycine max
ctatgaaactcaccctcaacactgtcggagactatctctgctactaattattgtttgaatcagggaggctcaatggtgttcccatatgatttaggagtgttagttggaaaactgggattcacaagagcttgtcgggcgcttcttacttatcaaccgatcgtaaaaagttatcgtcgcaatatgtattgcaccattaatttatcagtccaactttttacaccgactttgaggaattcttgtgtctactggaggccttgctaatactatgaataatatccaggcactctcaagcctatatataggtactagtgaaggaacag

SEQ ID NO: 114419 - DNA, 381 bp, Glycine max
  unsure (1)..(381): unsure at all n locations
atccttaagtcacctgcggcatgcaagcttgccacccagctcgcccaggcgagctttgttgcttcctccagaagcaacaaccttctagaggaatcttctggagggcccaagtgggcctggttgctatttgcacccctatttttactaaatacaccccctggccctttttggtgattcttttttcgtaaagttacggaaacttacgaatttcgtaacgatacttgttttctttccgtaatgttacggaaccttgcggattacataatcatccccttnttgacttacggaatgttacggaacctcactatttgtgcaacgatgcttccttttgattttcngtgtgtcacggaaccttacggattgtgcatcaatattttcttt

SEQ ID NO: 114420 - DNA, 396 bp, Glycine max
tactcaacctctcatttaggaatgcaatcctattcctatgatggtttttacaccaagtgagtgcaatccagcagctctgccatcgttgacccgtaaaaccatcacattggatagtaattagtgatttagtccttattattaattattccattgatcatatgtaatcaatactgatcctatttgctcattatcaataaaggcttaatgtggtcatctcttgacacacaacattacagtaaaacagtgatataaatgctaagcctattgacacacctatgagtcacaattcccaacttctaccaaattaagatgagccagttttagatccataatgatacaaacaattggctgggaagctgaattgtctcactgtcacccgaccaatgttgttaatgg

SEQ ID NO: 114421 - DNA, 420 bp, Glycine max
  unsure (1)..(420): unsure at all n locations
agcttgtaaccccttagaacacccctaggatgcttatttgtaggcaaaaggacaccttggtgtggttgcagctcgcctagccaagctgaaacttaatcctgaagcaatgagctcgcccagcgagctgttcccttatccttgaagttatttgggggccatgcgagccaaatgctggcctgngcgatctggggcctaggaaaaatagganaatacctttttgccctcctttcttagtatctnttgtcttcctgatcgaaacaccgaatggttccttgctttgcactgtaattgatgttcaacaccgtaagtcgactattaagggatcaaagatcaatgaatgatagtccccgaatgaaattagggtatgacagttgtccctctttacgtatcttttattgggaaataaagggaagtaaagat

SEQ ID NO: 114422 - DNA, 397 bp, Glycine max
tcgaagccaggtggctgagtcatgaagactttctctttatgaatgccattgaggaaggcattgctgacatcaagctgctggagtttccatttatgagtaatagcaagagtcagacgaattttgacagtaacaagtttgattacaggtgtgaaagtctcattgtaatcatacccaagtctttgatgaaagcctttggcaacaagcctggctttatatttgctaactgtaccatctgggttttttttaacccttaaaacccatttgcaaccaatgggagactcttgagagaggtaaatcaacaagtgtccaagtctgattgttaagaagagcatcatattctgctctcattgctgcatgccagatgggacatgcaaaagctgactttgttgatttggtc

SEQ ID NO: 114423 - DNA, 422 bp, Glycine max
  unsure (1)..(422): unsure at all n locations
agctttctattaattgattccttattcatctttacccttggntnggatgccaagagattactattcaagggaaacttttcacaaaatagcgaaggtcccacacctccaccaaactactttagtcaaaattattttctcaattctcttccattccacacaaccagactcacccttaagggcaaaggtcagcaaaactgttttaaactacattctttaatctctctatcgtattctctatgttagagcaaagtaagcaagacctaccttaccctatcttttcccttggttgacttggttttgctggtgggcgttgaacacacanttgtaagagataagataaacatagtacgatggaaagacatgggctgagggacgttatgtaggtcaatgagagcacgaataatgatgcagctaatggtaca

SEQ ID NO: 114424 - DNA, 397 bp, Glycine max
cttgagggattggtctttgccagtgaaaggatctatgtgggtctgaaaagaggcaaatttagtcatcctgcttggacaaatgagaaaactagggcaaatgaagagggtgaggatgcatgagaagcccgtgctgtgactgccattcctatacagccaagtttcccaccaacccaacaatgtcattactcagccaataacaaaccttctccttacccaccgcccagctatccacaaaggccatccctaaaacaaccacaaagtctgtctaccgcacttccaatgatgaacatcacctttagcacaatccaaaaacaccaaccaagaaatgaattttgcagcaagaaatcctgtagaattcaccccaattccagtgtcctatgctgacttgctcttatat

SEQ ID NO: 114425 - DNA, 451 bp, Glycine max
gatccttaagtcgaccgcggctgcagctgtaagacctctactttttttttattgtttggaaggaaaagagtagaaagaaataatgatatcttcaaaatgcattaagtaaatatatgattaactagcttggcatgaatttcaagaatgactgactctagatgagttatagaattagtcgacttatgagtttcacgaacggaagactcttaatgagttgtacgattagctagctcctttgaaagctactagaatgactgaatctttatgagtgaccagaacaactcacccatttgagaactacaataatgcttaatccttcatgagttataggatataattgggtcacctttaggggttataagataacctttcaaatggaacaattacatgaaataccatagtatgaagcttatgaccattctgtgtttatcattcttagtgcccatactat

SEQ ID NO: 114426 - DNA, 341 bp, Glycine max
tcttaattgtgaagcaatatctgactttttcataatgtattccctgacattatctttaccttgataattcatggaaatcaagctctgaaggagagtacttgtttttgcctcatcgctttctgcaaagcgcttttcaatttcacaaggaattctttggcactagttatataatctgaaacagtgcccctaaagacctcaggaatgtcatgcttaatgatcataagactcatgcaatttgagtgatctcacctctcatgaagtttcctctggtcagaggtactggaattcgtacgagaagggggttttttaatcctaatgcaacgtctaaatctctgcaccca

SEQ ID NO: 114427 - DNA, 376 bp, Glycine max
  unsure (1)..(376): unsure at all n locations
ccncgcttggaagctagctgaatgccttgaaacacctgtgtttcctaactggccatgaatcaaatatccctgcccgtcgtctgactctgcgggctatgctcctacgggcaccactacactgaccttttccgttgcgagcacccattctaagcaatatatcatccagaagctcacgctgcacagatttacaggccacctcctactcctccttgacaaccttagccggcccagagcaattatgacctttctcgctcccggtacaatcaccaatggaggcatgctcgaagccttatatggatgaatgctgtctgactgtcgtaactaataccacatccttattgtctcaatgctgctggtccaagcttaccattcattt

SEQ ID NO: 114428 - DNA, 372 bp, Glycine max
gaggatgctgtaacggatgaaaatattttttttagaacgagacatacgggagcgcagtattggaggattaaactcgtaaagaatatgatctatgagttgtgtctgacaagactctcattcatcagaggtacaacaagtgttacacatgcttctttttatagattaggtagcttccttgagaagcttttttaagaaaacttccttgagaatcttctttgaggaaacttccttgagaagctagagctttagctacacacacgcatctaaaaactaatctcacctccttgagaagctcgcttgagatgctcgagcttagctacacacacccatctataaactaagctcacctccttgacttaatacatgaaaatt

SEQ ID NO: 114429 - DNA, 440 bp, Glycine max
agcctttctttcacaatcaatctgtctatttactaacagtgctaaatgcaagttcacattcttgttctttctatgtctaacatacacacttgctcaacttcatgaaaggaaacaaaaatctcatcttaagcatgcattcaatttaaaacaatgtcatacacccattttcacaaaataaataaactacttcaatgccataccatcaagagttaatgtaaattgttcatgatgctttaagatgagcaactatactactcgtgcacaaaactaacaaaaagtaactaatgtactaacatcaaagttatactaatacttcaaaatcacacaaagaagcataaaatctctagaaatatctacgttcttgtcaaaatggaccacaactctctcactattccatccagttagaaaaatctgaaccattctctatgtagtaggctgtt

SEQ ID NO: 114430 - DNA, 400 bp, Glycine max
gaagaggatgcttcaatggagggaaagaatgatgtagagaaagagagagaggggagcgcaaaattgaaggaagaaaaacggagagaagatgaactttgagttgtgtcttacaagactctcattcatcaaagttacaacaagtgttacacatgcttctatttatagattaggtagcttccttgagaagctttcttaagaaaacttccttgagaatcttctttgaggaaacttccttgagaagctagagctttagctacacacacccatctaaaaactaagctcacctccttgagaagcttccttgagatgctagagcttagctacacacacccatctaaaaactaagctcacctccttgacaaaatacatgaaaatacaaaaaaaagtccctactacaaag

SEQ ID NO: 114431 - DNA, 415 bp, Glycine max
  unsure (1)..(415): unsure at all n locations
agcttctacttatgtggcagggcgggcttccttcaccttcttggctccaacgcgaactntgaccattattcttccttcaatccttcttttcatgtctgcctgaagtggcttataccctanaccatacttcccacgatttccttgagtatttatcaggctagttatgccgccgttgtttttcctaaacccatcccgggttcaaaaccgttccccaacataactcgggccatcattaccgctgcatcgaacagacaaggttgcccanagagggagtccacggaggaaatgctgaccacctcanaagactgtanagcagtttctacgaatcttctgcggcttcacataaggcatgaggatgggcagctacaagatatcttctcgctgacanatgaccagtgccctcactatgaattca

SEQ ID NO: 114432 - DNA, 306 bp, Glycine max
cttggttcgaggtacttacccgttgaagatcgattaacgatgaagaacgaatgaagaacgtcgaagaacggttgaaacctttgcgagattcctcacggaaaacgttacggaaacgtttcggaagcgcctcggcttagattttcttcacggaaacaatttttccaagcaaattccaaagagagagaagtgcctgaggggctgggatccatttcttcttgcattcctcccctatttatagcaaaataggggaggtggttgcccttcgctttctctttcgcttaactatccgatcccttgtatatgact

SEQ ID NO: 114433 - DNA, 282 bp, Glycine max
  unsure (1)..(282): unsure at all n locations
agcttgtagccgaatggacttacctatattttattccttngaaagcccttgtgagccttgatctactttccttgtatagaagctcactacaaactcttatgtgaaaaaccatgacaataccatatccttaatgactcttggagctttggaatcgtgttgggaataagtgtcgcgggttctggctgcattgtacaactgcgtatgatgactatgcttcatgatgtcttgtggaccatacttgatatacattgtatattggttaaatgttggacatgctgaatg

SEQ ID NO: 114434 - DNA, 303 bp, Glycine max
cttgcatttttgtttttacctagccatgattgtggaatgaacagagctacacgtacacctgacatgttctcgaaccaccgcttatgtattcagagtcaaccatcgcaatatatagactagatggcctcaccctttgcatttattccagcctcttatctcctctctatattgggcatccatcttctgtgcttcagtggaacggccttcaccgttaaaaggaactccccccctactgcgtttttaacatactgggaggcgaaacatgcatcataaccagccttttctcctctgcctcttcacccc

SEQ ID NO: 114435 - DNA, 313 bp, Glycine max
tgcatccagtttgccttcaagctttttagtttcagatgatgcagttgagtttgtagctacctcatgcactcctctaatgactatagcatcatttctggcgctaaactgctgggagttggaagccatcttctcaattaaatttctggcttcagcaggagtcatgtctccaagggctccaccactggcagcatctatcatacttctctccatattactgagtctttcataaaaatattggagaagaagctgctccgaaatctgatggtgagggcaacttgcacatagtattttaaatctcttccagtattcacac

SEQ ID NO: 114436 - DNA, 356 bp, Glycine max
atcttgagacttgaatctagatcgtgattcttgagatcttgaaccttgaatattgattcttgactctaaactttattcttgagtcttgaactcttcttgaatcttatcttgaactcttgaattgctcttgattcacttgagatagttctttgattgatctttgattcacttgagttgttctttgattgatctttgagctttttgtcatcacctttgtcatcatctcttgttatcatcattgttatcatcaaaacacctttgaatcacctttgattcatcatgaagctttgcttctacactagtctcagtattatttccaatcattgaataatcctctactaaaatttttataacta

SEQ ID NO: 114437 - DNA, 400 bp, Glycine max
  unsure (1)..(400): unsure at all n locations
tattaactaaaaaaaatgcacccatatacaatcaaggtagcttcattacctaaaatatttacatgtacttccaaaggtgtatttgttatttacatcacacaccccttctttgctgaatttacatacatgcatactcaaaacattttggggtaccaaaactgcacatgcgctcatcttggtatttccaatacccatacatatacaaacttcacgatgaatcttgactacctacacaataaggtgctacatttcatgcttttttttncaagttttgctacctanagccacatgcaaattcaagcatattntcctttgctgactataattgtattcaaattagaaggtatatanttttttgtaatatgttttcttcacataacatgcaacacatttatatata

SEQ ID NO: 114438 - DNA, 389 bp, Glycine max
cgcaaggttagcccttggagagcattttttttgctatgtatcatctctataggcacttaatgtatgcatgatttacccattgacaatattgtatattcctaattattatcggcgcagaaatacaagtctcaggaacatcaaaaacctaaagtccgcccttggtacaaaaagccaaggtctacctttgttattgaaacccaaggtccaaccttggtacaaaatcccaaggtccaccctgggtacggactcctacaaaacccatgggttccccttggttagctcacttcttaagaaccacgatgaccgcactcaaaggtccaagttccacatgatgaactggcactagactagtcgagcagacctttaatcaggtgggaagtcacattaac

SEQ ID NO: 114439 - DNA, 66 bp, Glycine max
gcagctgcacttcagatggaggagggacatatttatttactaaaataccgacaaagacttgacata

SEQ ID NO: 114440 - DNA, 246 bp, Glycine max
gtatctatgcaggtttttttattatctaacatgcgtggggtgaaatactttgacttgcagggcagcccaatttaatgggagggaaaatcactttgtagactaccctaccctcttttgaatgctggaaaatgcattgaatacagacattccattttggtcctcgttgcaagcgagtcctgtatgcgcatgaacactattgcgtatgtgtcactcatggagtgaacaggctctgtgacgcgatgcatg

SEQ ID NO: 114441 - DNA, 180 bp, Glycine max
aaaagggaatgaaatgaggggggggagggaatggagaagaaaaaatgaaataataaaggagagtggaaggggttggtgaaggatagatatgaggaatgaggaagggaagaatagggagaagagaggaaaaaggagtatgataagagaagaatagggagaatgaagaaagaagaaaagaag

SEQ ID NO: 114442 - DNA, 109 bp, Glycine max
agcttggagatgatgcttctatggaggatataattgatagaaggggggagcactaaattgaaggaataaaagagggagatccctccttcctctcaactctgtctcataa

SEQ ID NO: 114443 - DNA, 385 bp, Glycine max
  unsure (1)..(385): unsure at all n locations
ggaagttttcttaagaaagcttctcaaggtttctacctantttataaatagaggcgtgtgttacacttgttgtaactttgatgaatgaaagtcttatgagatacacttcaaagttccacttctctccctctattattcctttaatttcgtgctcccccccttctctctttcttttcctccattaaagcatcctcttcaagcttcttatccaaggcaattcttggtggtgaagctccttcttccatggcttattccctagtgaatggtgcctcccctctcctcttctcctttgccttccgctgcatctccatggtgtaaaatcaccattgaaggacctcattgaagctcaaagatccagcctccatagaagctccaccagcaagct

SEQ ID NO: 114444 - DNA, 332 bp, Glycine max
  unsure (1)..(332): unsure at all n locations
tgtgtaacancactagacctaaggatttaatcacaaaatcatattctatacctccacatttatcacatgctcataacaaaacatctaaagttcaacacaacatatctcacacacaatctattacccaccatctcaaatcaagtcacaatgattattacacagacgatctgcaacatatatactaagactcaatcctatattgaatgtggtatcttgtcactgaaaaaaaacactagggcaaatctctacaccaaaaggaggctttcttcacaacatctgaatttcccaatccccttcaatccacatactttgatttaaaaacattgcaccaa

SEQ ID NO: 114445 - DNA, 459 bp, Glycine max
  unsure (1)..(459): unsure at all n locations
agcttcatacaattaatatagaacctatattctaatgtcacatcctatcagagcgttgtgtncccgtgttctctagcatgaggttcttcatantcattcacctattcatctactcccccgaacacaagtttaagatcattacaggatccatacacaacaacacacagagagtgagttatcacattcctagctaatagagaaacaagacaattaaatatacatattatataaatgagataccacttgcttaaacatagctcacgtaacttcaccacttcgtcattcagaattcacttttcaattatcaatcacattacacaagaatcccacacttcgatcaagatataataacacatcaattagcaagcatatgcaatagttatgctaagactcaatcctatatgcaatgtggtaccatgtcagtgaaaaaccacccttgggcgcttangagtacataac

SEQ ID NO: 114446 - DNA, 395 bp, Glycine max
ctttagataataatttattattgatctaatttatatccgggcatgtagtactattatttttactgttaaaaaaagtacaactcatactcgtggtgtgaaaaaaagaggctcctcctccaaacactttgttagtggaccccactatctggaaacttaaagaaaggttgaagattgcacgacacttcacttttttataatctgttaaagttgtctgcttttccacatcatccacacacaacacaaccaacatcaacatgcttcagattttgaatttcaaatttgaatgtatagtgtaggcgcccacaaacaaacggccacatacataaaacaaagtaaaatataatatttctaatagtaatggtaatactaacaaggataaatcataataataattg

SEQ ID NO: 114447 - DNA, 448 bp, Glycine max
  unsure (1)..(448): unsure at all n locations
agcttctcaaggatgtgagcttagttattatatgggtgtgcctagctaagctctagcttcttaaggaagttttctcaaagaagcttctaaggaagttntctcaagaaagcttctcaaggaagctacctaatctataaatagaagcatgtgtaacacttgttgtaactttgatgaatgagagtcttgtgagacacacttcaaacttcaaattctcctcctcttttcttccttgaattacatgctcccccctctctctttctctctctctttcttttcctccattgaagcatcctctccaagcttcttatctaaggcacattcttggtggtgaagctccttcttccatggcttattccctagtggatggcgcctcctctcacctcttctccttagtcttccactgcatcttcatgggtgaaaatcaccattgaacgactcattgaagctc

SEQ ID NO: 114448 - DNA, 409 bp, Glycine max
ctataaaactcagcttgtaagcccccgagtctagacaagtgttttttgtgattcttctgtcaagttgtctgggtgaacatgcttttgattttgcaggtgaggtctgagttgtaaggtgagggaaatttctatttttgacaactctacccttttttgattgttggagagtgcattgaagacagacattacatttcgttcgttgttgcaggcgtgtacggtaggcgcgtagtactattgcgtatgtgtcactcatggagtgagcatgtactgggacgtgatgcatggctaagtggggctatgtcgtgttgcgaaaaattagggcactactttagctcttgctagttatcgaagagttcatctcctcagtaaatggtgtttttgtcttctttctcctgaatatctttgcttt

SEQ ID NO: 114449 - DNA, 325 bp, Glycine max
ttgagaggaagcttctgaggtgagaaactatttcttcaggtgacgtgatatagaaggaggatatatgtgccttgaggtcacccatgacctgagtcatgtacgcattatatcactcggagtcacactctgcgaagcagactctaatgttaatagccaaactatgcaccccgaaaagatggcaagataaactgtcgggcaaagcttccttgcaatgctagagctaagtccctctcacactgatccttactaaactctattatgtgagaaacttgcttgatacaatacttaaacccgctaatgcttacgtgcacacgcaccactgatc

SEQ ID NO: 114450 - DNA, 411 bp, Glycine max
  unsure (1)..(411): unsure at all n locations
catgcaagctttagtcgaatagaataataatatatattgtcttagaatngcgtgtcgaaaaagcataacaagactttctgtgattggtttaaagatacaatctttgtagatgagaatgcttcagaaacattaagaaagctagcatatgagcctaaaagaaatgttataacttggcaaggatactacataaacaagtattcattttacacaaaagcacatgatgacaaaagaacaatgcagaacagtggggtcacccttagggctgaatctcaacactttgcaagtgtgaatgacaccaatccctgtgtagcttccatcccttactttgtgttcatagatgaaatatgggagcttaactatgtgaaattctctgtatgcgtntacaatgctaatgggttgacagcaacaccg

SEQ ID NO: 114451 - DNA, 398 bp, Glycine max
  unsure (1)..(398): unsure at all n locations
ttaanaacataagttacaaacctacggggtttctttcaaattggttttgtaaaaagctctctttatattctttaaaagattgtaaagctctcaaaacacctagaacaccttgagagaaaaaaagattaagtggattatatatctatttgtaagacaattaagagttagttagtgagcaatcaaaccacaaatcttttgatttgtatagaaccagtggcttggtaggaaaaagaatattggtttattttaagcttggtgtagagcttgaaatgtaaagccagaagtgacagcgacataatacttataactttgaaaagttaatggaacttgatggtttaacaagaactggatgtagtcttggtggttgagaccaactaatataaactctttgtgtttgt

SEQ ID NO: 114452 - DNA, 380 bp, Glycine max
taaagatacgcttgcgcgcagatgtgaatgactatatgtcacttgtacgggcgccatagaaaagagggggggcgcatatgctgtccgtggctcgtactaaaggctgattagtgcgcccatgcggacatgtcactaccttcgggtgacacattctggatactgactgatatgctcttgcgcaaatgtcactcatcgtgggtgacatatactggagtcaaggcggggataccctacttgcgcgtatgacactcactgggggtggaatatgctagaggcatgatggtgatatactattgcacgtacgcaccatcctgcgcgtggccaacaatggaaacttatacaggggctcatgcacacgtgcctactgaggcaggtactgc

SEQ ID NO: 114453 - DNA, 377 bp, Glycine max
caccatttcctattaaccatgcttaggtccatgttaattattttgattttaagtgaaacggtttatatccaacagggtgctcgggtgctacacatgaactaaaatgtgtggaagttcacgctccccttctatgtttttgcttatggcttgtagaggaaaacgcaatgatgaacaaacatgaaaacaaatggtatgcaatttcgctgatcaaaaagtttgttgaacgcttatgcatgatgatgccatgactcatgcaaaatgtgaggctggaatatgataactgacaaatgcaggaacgatatgtacattatgatgttatgaagagatgcttatgcgacgcatgatatgaatgcatattaaggacacgagagcccgga

SEQ ID NO: 114454 - DNA, 326 bp, Glycine max
  unsure (1)..(326): unsure at all n locations
ttaagtcaccgccgctgcagctangaaggatacggtattnggttcttttaaactnccaagagaataggtagttatacacttagttatgagttcaggatgacttcagagagacactatattatgattgactgattttcagacagcactatatgtcccattggaagaattttacacaaccttttggcccgagataaataccctagctgtgaggtagaggcatcggtgaaattgatgaaacctttaatccttctgaacacccacgatgtgaagaggggaaattttcgctattcaggttgactctaagcctgactcagattgcgctagct

SEQ ID NO: 114455 - DNA, 285 bp, Glycine max
taagagtaggaagttctccccttcctcacttttctcacttcaagcatggaagaatatagggtacccttcacatgtggtactaggtggcggtccggagatggcgcaagtctactatcctcctacacatatcacacatagatgcaccatccccagctgcccaccttcaactgagctcacgtactcccatgtggcccatatcctcgtccctctcaacaccgggtccacatcaatccctccaagcttcaataacatccaagcaacttcatcatccgaacattgtgaact

SEQ ID NO: 114456 - DNA, 338 bp, Glycine max
gaaacattctatttttataggagaccaccaagtggtggctagagatatgtcgggggggccacgagaccctggggacggcaagaggggtgcgacagaccaacacccagcctggaccatcccgacccaacccgggcctagtcggacagtgagaacccgtgagaacgcgaccaggcgaacggctgcagaccacagagtaaaggaacaaagaccactaaccccggaggctagtggaggctggccagctgcgaactacgattgatatgcgggacatggcgcccgggaaccgagaaccaaggcggggcaatcggatacacggcatacaaaagaatacaggaggc

SEQ ID NO: 114457 - DNA, 257 bp, Glycine max
  unsure (1)..(257): unsure at all n locations
ttcaagaatcaagaggaggttccaggcatcacgaatccatgaatcatcacgatcaagattcaagactcatgattcaagactcatgagaaggctcaatcaagataagtacaaaaaaaaagtctttctaaacattgagtagcacatgaagttttcacaaaagctnttaccagagagtttttactctctggtaatcgattaccagtttactgtaatcgtataccagtggcaagttttggtttcaaaagctttcactgaat

SEQ ID NO: 114458 - DNA, 398 bp, Glycine max
  unsure (1)..(398): unsure at all n locations
ntaaagcacagcaacacagaatctaggtgtccatatcttctcaattcaatgggttttctaggtttgagaagtgaaattgagaatgaggtaaatttggagcaaactctcacctcacacaagtccataacatcaatttaaacttgttcaaactggacttacgcctaaaatttcaccgaatcaaaatttgactcctcaacacccaaatttaccctagaaatggctctttgttctctttggtcattggtttttctctctagcgcaggccaagctttctcataagtcctaaatgacatttcaagctaagattaactcactctaacctctaaatactaccaattccagatttggccttccagccctcaaaaaatcactctttttccactcctaacaccacattc

SEQ ID NO: 114459 - DNA, 422 bp, Glycine max
agcttacgcgatgacccagcgcccattattgtgcatttacacaatctatactgcgagaggaataatccgtgaacgtggcacatgaccatgcatgtgatcgtgccaacgagcaatggcttcgatgccgtacagctcatccgtttctgctaagatgtgcggctggtaaaccagtttcagttggttattgctaatcgcttctgtcagcgctgcgcctagaaccaaacgctctttaccatttcgttcatcgccgggctgaagaactgccatccgttaccgccattcttgcgaatataatccattgcatagtgagcagtggagagcaagtaatcgcggtttttacccgagtcgtaactgatgccaatactcaaggtaagcgggaaggggttatcgtcaatcattatcggcttgctgaccacattccg

SEQ ID NO: 114460 - DNA, 397 bp, Glycine max
tgtgaaaacgaaacgttacgtaccgcagaacgtattcgaattctggtggagaaaaccgcactgatagccgcaaacggcgaaaatattgccctctcactttccatcggcgccgccatggttaatggtcatcctgactatgaacgccttattcaaaaaaccgacgaagctctgtatatcgccaaaagacaaggtagaaaccgcgttgaactctggaaagccagtctttagatgcgccatgatgcagaggtgatcatgaagctaaccgacgcggataatgccggcgatggcatttttttccccgcccttgagcaaaatatgatgggtgcggcggtgattatcgaaaatgatgaagtgatgtttctcaaacccgccgcacagaagctctggggatacaaac

SEQ ID NO: 114461 - DNA, 407 bp, Glycine max
  unsure (1)..(407): unsure at all n locations
agctttaggaatattttattatttactttttggtctggagacaggaaaaattatgctgacattcattgagctccttattgnggttgtggttattgtgggtgtagctcgctacatcattaaagggtattccgccactggcgtgttatttgtcggtggcctgttattgctgattatcagtgccattatggggcacaaagtgttaccgtccagccaggcttcaacaggctacagcgccacggatatcgttgaatacgttaaaatattactaatgagccgcggcggcgacctcggcatgatgattatgatgctgtgtggatttgccgcttacatgacccatatccgtgcgaatgatatggtggtcaagctggcgtcaaaccattgcatatattaactcccctaactgctga

SEQ ID NO: 114462 - DNA, 401 bp, Glycine max
tgcgccgccagcaccacatcccctgaagtcggtgcgagaataatcgccgccggggaggcacaaatggcagcagctgcgccacgactgataccaacgtttaccatcaccggaaatagggttgccatcagcaaaacacccagaccggttgcggaagagacggccagagacatcagacaggcgacaaaataggcggcaatcatcagcaggtaaggggagttaatatactgcaatggttttgacgccagcttgaccaccatatcattcgcgccgatatgggtcatgtaagcggcaaatccacacagcatcataatcatcatgccgaggtcgccgccgcggctcattagtaatattttaacgtattcaacgatatccgtggcgctgtagcctgttgaagcctggct

SEQ ID NO: 114463 - DNA, 371 bp, Glycine max
  unsure (1)..(371): unsure at all n locations
agaaactcctttttttttcaagaacttccatagcgatatatacaccttccatgcttgncgcatttaaagggaatatgctaagatgcctttggcattattcttggaaatatgcccttttggattcacactgaaattgaaaatgaaattcacactttatttagtgacttaggctataaatagaaacatgtgtaacacttgtgaaaactttgatgaatgagaaacttgtgagacacacttcaaagatcaacttctctccctattatccttcaatttccatgccactctatctctctctctcattctctccctccatagaagcttcctctctaagcttcttatccaaagcactataacgcccttgttgaggatcc

SEQ ID NO: 114464 - DNA, 255 bp, Glycine max
ctattatggactggaatttccatatgccgttgagcaggcaaaatacatctgctagaggggctcgtctaatactcaagggtcctttcttaatggttcatcaatataactgatacttattgtgttaaggttacatccctggtgccaatcaatggtaaaaatcgagctactattattgggatctcatttctcaagcctgatgttcattccggcttgctgacaagcatcaattaagaaggacatataagcttgattttc

SEQ ID NO: 114465 - DNA, 395 bp, Glycine max
  unsure (1)..(395): unsure at all n locations
ttggaaagtgttgttnttcaccttctccctatgccaatatgctagcttagcgagcgtccgttaagcgcaacactcatgggctaagcgcgaggaagactctggaagaagatgagttgtacaggttcgctaagcacaccgcttcatcttactaagcgcaccgcttcagttcatccgctaagcgagaaaggcacgcgctaagccaaaattcactaatatgcgctaagcggtccataagtgcgctaagcgcacaagcacgaacaaggccacctatttaagcctgaaatcaaattttgtgaagggattttggactgagatttagagctttgcatgtctagggtttctagagagagaaaggtccaagttccaaagagttttgagagattttgctgtgtgaa

SEQ ID NO: 114466 - DNA, 448 bp, Glycine max
  unsure (1)..(448): unsure at all n locations
agcttctagattagtgtaccaaatgaccgttaccccggccaagctatcttgaaagaaatgcatcaataacttctcatccttggaatacgcacccatctcgcgacaatacattnttaggtgattcttaggacaagtcgtccctttgtacctatcgaagtcaggtactttgaacttcagagggatgatgacgtccggtaccaggcataggtcagccatgtctgcaaatgaataattgttgaacccttcaacatacctcaatctttcttcaatgagatcgagtatcccctttctttccactgcccggngtggccctcccgcggacagaaacattggctgcgttgggtggtttcgaggttctttcgtgatgttgggttgaggtagtgcgttgggtgccggtccctcngtgagaaacagggagtaggagtcgacgtctccctaagcattgctc

SEQ ID NO: 114467 - DNA, 389 bp, Glycine max
ttgatcttccccaccacctccaccttcttatatttagttataattttctttttggataagccatgtattttggctatgatatttaggttatcattttctgcactttatttatcttttggtatttggactttagtcttttatgattagattttatgtggttttgaattatgattgtttggattatattttggttatgacctctttatgatttgcttatgtttggttacaacttatgattgatctttttcctatattatctgatattgattcccatgaactttggctttttgatgttgccaaagggggagagaaatggggtggtagagaagcttataaaaagcttagaaatcaagtgatcatcaatttcaaaacatagggggagtgaacgc

SEQ ID NO: 114468 - DNA, 322 bp, Glycine max
  unsure (1)..(322): unsure at all n locations
caagctacccncatgacanaatacatgaatatacaatataaatccctactacanagactanctcaaatgccctgaaatacaaggctaaaatcctatactactagaatggccaaaatacaaggcccaaaaaaaaaaaaaaaaacctattctaatattataaagaagatggacccaaccttggcccatgggctcaaaatctcccttaggtcatgagaaccctaggcctttttatanctctacccaatcctcttgaatcttctatccatatccttgggggtagattgatcagcactgcacctgtcactcatgcaccacaatcgca

SEQ ID NO: 114469 - DNA, 394 bp, Glycine max
ttgaagggaagagagagaccaatcacgatcacttttctttgtcttaaaagaggatgtagctacttgctcataatcctaaagaaacttgtctcaccgtttatgtgacacagagaccaagcatgttatgccatgcatcaacaaggtacctaagaagaattaaatctagccatagcccacgagcataaagtggcggacgagtgtgaccaagtgtactcagaaaaagaggctatgggaagggtgatcaactctgtacatcaagaggcaaccatgtggatgcaccgatttgctcttaccttaaacgggagtcaagagcttccctcgatgctagccaatgccaaagcaatggtggacacctactccgccgtctgagagatccacagacttctcagctatt

SEQ ID NO: 114470 - DNA, 444 bp, Glycine max
  unsure (1)..(444): unsure at all n locations
agctctaaaattacattactagtcttattttgtatcttacaggttgaacttatggtaatcgattaaaaacantgtgtacacgattacagactttaaaaatcagattcaagaattataaaagggttccataaaccaatatgaccactggtaatcgattactagaagagaacaatatctatagtctttgaaatcttacaacggctttcgtaacacatccttgagtcaaaccttgagcagcatcattgaaggaattctctgtaagatcctatcaattaagtacatcgtgcttcttgcatttctgaattctcaactggaatcgcactcatcgttggcatcatcaaagcttcatatcatatatgcttctacatctcccgcctgttgatgaggaaatgatttgcaataagataacaatataaagtgataatgctgctcacagccttactc

SEQ ID NO: 114471 - DNA, 443 bp, Glycine max
  unsure (1)..(443): unsure at all n locations
agcttctntcaaatcttataaatctttcatcttgtatcataggnngagacatccactctgaacttgttttgaattcatgaaagcacttgtatcttctacttttgatatgtatcatgcaactgtggcttgataactttcctgcatatgatgttnttctttgagagagttctttgatatagatggaaaaccattgaatgtccttcttataggaatactttgataagatggcatgacaaacttgtattccaaacattatagtgtgagcttgttgtagcatgttgtgcttgctactactttnntatttcttaaccctttgaatggccaagctggctttcaatgtcttcatgaaagttgtagagaatctatccttncattcatgactagtttatgtcagttagaccctaaacataagcaatctctaagcattgcattgtttatattgt

SEQ ID NO: 114472 - DNA, 397 bp, Glycine max
ttgactaattcataatcgaatggtaataacatatacttgaatggtataagattggagttttctaatgctcggaagcattcaaaatcctcattcgagaagaactgcctatcaatgaattttgggtctattatgggatgacagaaaagaggttcggtaccgatacgctgttcctctgatgagaataatgatcccgagggaacggagggaggaattggggctctctgtgaccctgaatgccgctgactcccactcgaggatccattccgctttttcaatggttccaccatttgaggagcttttcccaaatttcaatcgggtcacgtgaaagagattgaacaaaatatgaacgttgggctttgctgggagtgatatggacaagaattgactgagatatgac

SEQ ID NO: 114473 - DNA, 248 bp, Glycine max
  unsure (1)..(248): unsure at all n locations
agctttataagtgcgggtctgggggacgacatgtttttggtctcnatataccaaaaagatggggcaattacattggattaggtccaaccatgccatcctgaggtccagctggaaaaacgactcagggaggaacgccctcaaaataacgcgacgagcattatgaataactttacgaactaaccaaaccctatactttggcctatgcctcagacactcttttgcgaaggcaaaaacgactaaggcgttga

SEQ ID NO: 114474 - DNA, 165 bp, Glycine max
actaagatactattaatatagccaccaggacataacccaatctaggcaattgggcatgtaaaagacaaaacatctcgcatgagtgtctcctagctccaagctacagtgtccatggtagacatgttgctccccctatctcctacacaaatgcatgacatttttccc

SEQ ID NO: 114475 - DNA, 460 bp, Glycine max
  unsure (1)..(460): unsure at all n locations
agcttgcctgcagcacattcgatgtctatataccacctttagcgcagaccaaaaggaattttgtaccaaaaagcttgtaggattcaccccagattcctgagtcatatgctaacttgctcccatatctacttaataaagcaatgggagccatggttcctcaacctctattttttcgaggatacgacttcaacgcaacatgtgcatatcatggaggagtttcnggacattccatngagtactgtataactctcaagcgtaaggtgaaaagtttaaatgatgcgggctggctgatatctgaggagaatcgcttatgaatcctaaacattgacaagcgactccacacatgggacaactttgaaagctggtgttagatgtctttaatgactcatcgagaatctcaagtctataccattatcgtataccacagtaacaatgctaattaagactgatatatttgaca

SEQ ID NO: 114476 - DNA, 378 bp, Glycine max
agctgctaatctggtttgggaaattttctctggttgttttggtgtgttctctacacaacctttttcatcagctatttggtattgtcagtttttccttttggtttaggagatttttatgtgttctcttctgttgtgaggataccttttgtcttttctgtgcttttatactttattgtcaatagtgttttatttctattttagaaaattgacctgatttgaaaatgttgactcccaaatatcctggtatttaacatggatttgagtctttgttgttacttgttgacactatgcattgctagcagaattataatcttatggaggtcattttaaggtaaaataggattaactatggttgcaccacgttagctctttggagtc

SEQ ID NO: 114477 - DNA, 397 bp, Glycine max
agcttgtgagagctatgtggcaattgacacttatcttataataccactattcccaaagcttataattcatatatgaacatacatgactagtcctacgtctataattctattcgacctttccatatgtcaaaaacacccatgcccaagttcacattaggtaatacctttcatattacaacaataacaactttctacgtaatttatttagaaaagtctatatcgactattgaaccaatacagatcttggtaatgtaaaaggtgaaattttttaacattgaacttttaactaatttagaaagccactttccacatatagaaagatatatcttactttattagttcaaactttaaccgcgtgaaaaatgactctctaaggtaatgtttgaatgaatgcaag

SEQ ID NO: 114478 - DNA, 366 bp, Glycine max
ctggtgagttgtgaaaacgcgaattttgttgggtacaaccacactccacaataaaggtcccttaaaggaagaagagccttcccattacaaaggcggggaccacagatggagagggtccctatctgtcacattaccaagagctttgttaacgtggggtggatgcatgataatcaggttgttgtgctagatgaagaaattaaccaagatcaaccaagttgggtgcagccatgctccccgggttttgagttgaagaattggcggatcatggagcgacctgagatttctgtgtcaaatccaatgtaatccaatacttagaaccctattgttacgcctatgctttaaggtctgcttcttttatcgggcata

SEQ ID NO: 114479 - DNA, 206 bp, Glycine max
accttttacaccgccacaccgttcgacaggcatcccacgtactcttgcttttagacaaaacacagaactttgaaaataactcgctttttgtaaaaggagcatgattattatacgtgatttttcacccttgaacttcaaaaccatgaaatttctgtaacccccagtaacataccttccgttgtcaaatacatgcccccatccatagc

SEQ ID NO: 114480 - DNA, 262 bp, Glycine max
agctttcaattttagtcttgacaaaataacatatcatgtggagcagaataaaactatacataaatcttactccattacattgttcatacacacacaagctccacatatcctcatcgagaactgcaaacggtagaagtgaagactcgaccaagaactgaaattctagagtgcgactcgtacacacacactgtacgactccacatatgcctttctttacccatgcgaaacagaaatgggcaccactggttgagacttagtaggg

SEQ ID NO: 114481 - DNA, 229 bp, Glycine max
agcttacatcctttaaaatcaaacgcatagatcaaaataaaattttaaaaacagactaaaccacgtacctgttggcaagaccattgacaactactttagggagttatcaacaattcccaagttttcttccctaatcctttttatttattttttgataaacaaatgaaaaaactataaaagaacacaaaatatggtttcagaacagaaatcgagagccgagaattgaaaa

SEQ ID NO: 114482 - DNA, 379 bp, Glycine max
acaatgtacatacatacttttttttttaaaaatataccaagactcgttctagcgaaattaatctagtacgcgaaatgttatactctttattaaaataagcaacactaaaacatcatcaatcatgctgccttttttataaagaaaaatgctttcgacaaaattacaccatggaatattttataagatatgtgtcagactgatctcctaaacaaacaatatgagttctttattatctttgactcaatagaatttttgaaaagatttgtgtgattttagaaaaagaaactttaaattccagtttgaaattatatcttttgagatatgcttagacaatctttcttatattataattttatccaatctaatatattattaaatc

SEQ ID NO: 114483 - DNA, 229 bp, Glycine max
ggcttccttttttagtgtcacgaggggtgtagtggtcatgttcattaagaaagagatcatctgccgatatggtttgccaaggaagattatgacggacaacggcaccaacctgaataacaagatgatgggggaaatgtgcgaggagtttaaaatccagcatcacaattccacaccctaccggccaaagatgaatggagccgtggaagcggccaataagaatatcaaaaag

SEQ ID NO: 114484 - DNA, 410 bp, Glycine max
  unsure (1)..(410): unsure at all n locations
accgacaaaaactaaccctcagaaaggaaaattcagaagtgtctttatcacctacttatntgaaagtggggatcatagagacattcatggtacacccacctactcctttattgcttcctaaagaatgctctcaaccaaccatcatttgatgggctattgagataccctgccataactaaagtcatgggaaatgcatacgcaattttgtaggattcccaatattggattgatgctgatagggttgtccctgagaggttcgagggtagttctatcgatttcaaagggaataactttaactatctcccttttgggggaggacgaataatatgcccaggcatgacattggggttagctagcattatgcttccactaactctactactgtatcacttcaactggggacctcccaa

SEQ ID NO: 114485 - DNA, 227 bp, Glycine max
agcttttttttattcaatatccctcctcaccaattgattggcaaggaagaaaggcatggagaatgtgataaatctttaagtgacattttctccttgatcaccaacacttcccttgcaatgatatggaaggaatttcagggatacatgattttcatggagtctctagctaagaagcgaaaatgcaaggaagatgtgttctatgtggccttcatgccaccttgaaaaca

SEQ ID NO: 114486 - DNA, 403 bp, Glycine max
  unsure (1)..(403): unsure at all n locations
ctgtaatngattaaaccaatatgagacacttctctgtaagcttcaaacactcgtgtgatcaattatgatcagcatgtaatcgattaaaatagagtgttaactatagaagaaattttctaactctagaaactttcttctaactcctacataatgatgcattatgcacatatgaaatgatagagactaagatgcaacacacaatacaacaatcaatacaaatgtcactcaagagatttaggcatgtaaaagacaaaacttcttcaagcttcaaggctaagttttcatgtagccccccccccccctatctctaacaggccatggttatggatatgggaatgtgctttaggggcgaatggaggtggaatttagaatggaggaggtcctgatttcattggtgtgaata

SEQ ID NO: 114487 - DNA, 189 bp, Glycine max
aaaaaacggggggaaacaaaaaaaaccccacacccacccaagggggccaacaaacgccccagacccacaaacacaaaaagggcagagaaaccgaaccaaacccaaaccccagaaagggcaaccaaaacccgaacggggcaaatccacaaaagcacaaacatccccaagccaaaccaaaaaagggaccaa

SEQ ID NO: 114488 - DNA, 104 bp, Glycine max
cacttaataggtaaaatttttttcgtcaaacgggggttttctaaactctgtaaaataaatctaagatctccacttatataatggtctgccattttttaatccat

SEQ ID NO: 114489 - DNA, 226 bp, Glycine max
agcttatatatttatttatctctatttataaataaactaaaatagtaattacattgtatttttagtttttactattttttaatacaagtaacaaaatattctacaaattaagagaaaactattaaaaaaattagctaaatttattaaagtaaaaaggaaaatatacatataatgcaatttctattatttataaatagatataaatagtttttgttatcttttattg

SEQ ID NO: 114490 - DNA, 393 bp, Glycine max
  unsure (1)..(393): unsure at all n locations
ctaacaccccaacacttaagctctgtcattttttatccaagcaaattgaaaggacgatgaatagatggggttagagagaagaaatganttttttttaaaaacaacacacaacaacacaacaccgggcacaaacaaaacaaagaaacacataggaacaagccttgtgccaaaggtgtaggcaggggcaattttgacattttaagagcctatttgattattagaatatagtagaaactaagagttcacatagataaaatctgcaattattaatactttattaatttttatattctaatccacatattcctgtttgccgaaacccatatgacaccactacaaagccctaccagaatttcacttgaagggggatatttgctttgaaatgtcagctta

SEQ ID NO: 114491 - DNA, 203 bp, Glycine max
cttgaaaaatattttatttattcttagcggtcctgaaattggattttttttaattttgattctataaattattttatttatttttaaatctatgcaagtttaccacttttttaatattagtccctttaaatttgcacatataggaactaaaattgataaaatacaaacttagaataaaattgaacaaaataacttataggaat

SEQ ID NO: 114492 - DNA, 331 bp, Glycine max
tcatcacaaaaaaaaccccaattctctataacatccagatccaccccacacaactggaaaaacaccccattcactggctcctgctgagaaccaatatttcatcgtccaaattccccaaattgggacccccgaacacgaagcaagccttctgatcctacccctgggagaatcctcaaaacttttaacctgaaccacattggcagaggcagagacacactctacctctgcctcttccatagaattccaaaagccctgctcaagaatacttggtggagaacacgaattagattcctgaattgtcttatcattggaactgaattccccaagaagc

SEQ ID NO: 114493 - DNA, 228 bp, Glycine max
agcttaattaataggcttcgtccaaaagcttcagtaataggctactagcacattccagacatcttctgaaagatcccagcggtcaggtcatggataattgtcttttgaaattgcagaccaaatttttaggaaatccaacggttaacaaaggctgggcaacatttttaccgaggtagcttcatgtagctatctctagaagcttaattaagaggcttcctccataagctt

SEQ ID NO: 114494 - DNA, 229 bp, Glycine max
agcttgattattattctttaatggaggaaaagaaagagagaagaggggagcactaaattgaaggaagaaaagagggagagaagttgaacatttaagtttgtctgacaagactttcattcatcaaagttacaacaagtgttacagatgcttctatttatagactaggtagcttccttgagaagccttcttgagaaaacttccttgtttgagaaaaattccttgagaagct

SEQ ID NO: 114495 - DNA, 226 bp, Glycine max
agcttgctcgtttttctgatatttatcatgcacacttttctgatgatgaccgaggaacaattagggatcaacttgaaacttatgtgctttaagtgagaagaaatgcttctttttccacttgtgaagatgttcaaagtttggctatgaagatggttcaaactgagaaacatttggtatttccattggtttataaacttattgagctagctttgatattgccggtgtc

SEQ ID NO: 114496 - DNA, 346 bp, Glycine max
  unsure (1)..(346): unsure at all n locations
gcactcatattttcgactaatgataatatttttttaaaggaatgctgtctcgaaccnagaaccagccataacgtaagagagcgctttactttcagcggaccgaaggcaatactggatcaactccgagaactaaacatccaaggaatacgtcagaagcacaaaacaaaaaatattggaaagctgtgagagatgacggatcacccaaaaaagaatagtaccaggaaaaggttcgatatagaaaggatcatctgacattatatcccaaataataaaataaaaataggaaatctgaggactaaaagcctagcagaaaaaagtaagaacccattaaacagagcattaaaaa

SEQ ID NO: 114497 - DNA, 227 bp, Glycine max
agcttgcatttggaattgtgaaagccccactccatcattaggattagtacctgacatctcaaacaaacaaatcaaacataacaagacaattatagttgctatttgaatacctcacccactcaagtgtatcacacaattatgacttttctctaatgaaaacactcttgccttttaccactctaattccccttgagttcttaggcaattcaagagattatggccacaat

SEQ ID NO: 114498 - DNA, 421 bp, Glycine max
  unsure (1)..(421): unsure at all n locations
acacacggacacataaaactcagctgctgagcgagatgngagagaagattttttttactatgaggtgtcaaagaacaaaaatattaagccctaaatctctagccttacattctcttattacgtgcgtgtgtacaatgcaaggccatcccaagcttggcttaccttatcctatcctaattcctaacactcgttttggttatctatctcttccaaatcgcaatctctattctctccccctcttaccgtttctctctgtgtccccccaattcacttgcttcttaattcctgaaccatctctctcttttctatacgattccctttcttttaccctccaaaaaagctcttagcttcaattccttcactttctcactatccaatctgtcttttatgtcccactaaaattctcccaaaaaataataat

SEQ ID NO: 114499 - DNA, 226 bp, Glycine max
agcttctattgttttgaaagaattcaaggtcctttctaagggttgaggttgatttttctccaccactcatggaaagtaattaactttatagtcagtcatttctttattcttctctgtgatattggtttaattagccgctccctgacatgcatggatgatttttaatgtccctacaacttttcatgatttgttgaacatgagtttttttatttaacactgtacccaa

SEQ ID NO: 114500 - DNA, 320 bp, Glycine max
gttacagatggtaaacccacctccacaaatgtacttcttgcataaagaaatgggggtgaacttaaggattaattgacacaaattgaaattgcgatcctctatgtgcacacacaaaaaaaaataaatttagtttaagaaattattagatcgaaattaaagctatagatgttaatttgtaaaagaataaagtttgagcatcttatttaacaagtacacttccgtatactgcttcttatacaaatcaatactttaggataataataaggattcattttcgaaaacctgtgagttttatggggttattatttcgggtaatgggg

SEQ ID NO: 114501 - DNA, 132 bp, Glycine max
agcttgtttttttcaaaggtggaagtcctcttgtggtgaaccagccagatgatgatagtgaagtagggagggcccttgccaacagctgcaggagtgtgtctggtgtccttgttgatgctcacattggtgaca

SEQ ID NO: 114502 - DNA, 132 bp, Glycine max
tgtcaccaatgtgagcatcaacaaggacaccatacacactcctgcagctgttggcaagggccctccctacttcactatcatcatctggctggttcaccacaagaggacttccacctttgaaaacctcaagct

SEQ ID NO: 114503 - DNA, 227 bp, Glycine max
agctttattatttgaattaaaacgttcagaaactgctggtaatcgattaccatatatgtgtaatcgattacacagtgcaaattttgaattcaaattttaatagctgttgtaaatcagttttggccactggtaatcgattacatcctctggtaatcgattaccagagagtaaatttgttgaaaaagactttttaacttaaatttcttggccaaaccttttgctacttc

SEQ ID NO: 114504 - DNA, 402 bp, Glycine max
cttgctactacaagtacaacatgaggaatctgttgattatgcatgatccgattggctaaacattcataaggaatcacggtttatcatctcttgagacaccatatgaacacatgagcattgttatatagaaaatatccatttagcatcatgcacctattaggaataccaacgcgttttctacttgattttacacatcatttctcttgcgtgattatcctttttgcattgatagtttacatacctattcatattcatgcttagattttcacaccagacacctattcactgaaatagcttaccaagtaacacaagttccccgagagttcgatactctattcttaccgttttatactacttgtgtgatccggtgcactttgccggaagcaaacagtgaccgccata

SEQ ID NO: 114505 - DNA, 223 bp, Glycine max
agcttttctatcttgtcgttcatacttcaattatagcttcaacgaaggaagattggtacctacatcatgtgctgttccctgacactgaccagatagtgagacatgacacagaacatacagccctgttcaacttacgacggcacatacggagaggggcctctctgtactaacacaggatagcaaaagcttgatgataacctacttcgctaaaatgaacaactaa

SEQ ID NO: 114506 - DNA, 330 bp, Glycine max
agatctacatccggtgtgcaacaccttggaaaacaggctcttttgaatagaagaccgcccattaagcacaaacccctgtcgaaactctgactaacacattgagatacaacaccggcgcgaggctgcgaacacaaaatcactcacgaatcacattcatatggtctcatgcatacttagacgcactcacactcacacatggctctctcgcccagacttagaacagtctcacagtagcataggactctacgaggcttaataaacacgcataccactatcacttacatcctgtgaacagactacgtgcacttgaatcaatgctctgcattatct

SEQ ID NO: 114507 - DNA, 228 bp, Glycine max
  unsure (1)..(228): unsure at all n locations
agcttatatagtattaaatgatggnatgatttttctacccaatcttattatgttgaaaagctatatattaaagaagtttaattattttgatgtgaaacatgtttctactccttatgactcatccatcaagttaaagaaaaatttgagtaaaggattttcttcacataaatattctcaaagtattggttctttattgcatttgacaaacttctctaggcttgtctgata

SEQ ID NO: 114508 - DNA, 324 bp, Glycine max
  unsure (1)..(324): unsure at all n locations
tttttttgtgtcttgngagcatgcgctatgcgaacacttatgggtagcttgagaaaaatcataagaagatgagtttcatgttccttagcacaccacttatctcactacgcatagcttcaattctccgttagcgaaaatgtgcgctagccaaaatcactaccggtgctaagcggccatagtgcgctaagcgcatgacacaaacaagcccctatttagcctgaaatcagatttagaagatatttggactggattagagctttcatgtttagggttctagagagagaaagtccaattccagagagtttggagatttgctttgaaaga

SEQ ID NO: 114509 - DNA, 227 bp, Glycine max
agcttgagtttttgaaatgtgtaagggtgaaacttcctgcttttattcgttgaccacagagtggtacctggagatatgccgcgggggtcaggagaccttggggacgtcaggtggggtgctattgcccacaaccaagctttaccaatcccgacccaacccgggcatagtcagtcagtgagaacctgtgatgtacctaagttggcgagctcctggcagtcaacagataa

SEQ ID NO: 114510 - DNA, 319 bp, Glycine max
gccgatgatcccattactggttaccctaaagctctgtggtctttccttacgcccgaatttatgccttgcgaactccgtggaatatccccgcgttgtggacactgaaaccccgtgtgatgaaaagcgtgatgctttcgcctaatggcactcctctcatggggtagccaagctgtcttatggcgaggacgggattataattaatacaaccccttgttccatcaagggaacatttggacatccttcgcatgaagatagaatcttgattcttccttccttctagcgagggaacgaattaacagatgcccctccatgctaacca

SEQ ID NO: 114511 - DNA, 228 bp, Glycine max
agcttctatctatttggacttaccttgaattaattcctttgatagcccttttgagccttgtttccctttccttgttttgaagctcactacaagccttaagtgaaaaaccatgatattaccatatccttaaggaattttggagctttggaattgttttgggaataagtgtggggggtttctgtttcattggacaacttgttttgttgactatgcttcatgatgtatttt

SEQ ID NO: 114512 - DNA, 400 bp, Glycine max
gtgggctataccttcgaccaaacactaccgtttttctgtttcggcccgcaattaaggcgggctgcatcactggctccgcttccctaactgtactggaggcggttgccgtggctttatcctctatatttttctggagttttaacatgacctccgagatggaagccatttgatcttttaaggccgatagatcggccttcatctgttcctgcatgccctcttcattatccatttttctggatcgagtgttataggggtgccttggtgttttcttagttatgatgaaattcctaaagaaataaacaacgatgagtatgccaccaaaacatgaatatgcaaatgaatgatcggagcactgggatccaccacaggggttttttagataacatgatgagttcagaac

SEQ ID NO: 114513 - DNA, 229 bp, Glycine max
agcttgtattattatggggttcccatcacatgtggtactaggtggcggtcgggcgatggtgcacaacaagtttttttccacatccacaatgcgcgcataaacccaccatcccctgttgcccacctccaactgagctcacgtactcccacgtagcccatatcctcgtttttctcaacaccgggtccccatcaatcctcccaagcttccacaacatccaagcaaaacaaca

SEQ ID NO: 114514 - DNA, 398 bp, Glycine max
  unsure (1)..(398): unsure at all n locations
tactacgcttctaacttgtttttctaaaagggaaattcttcataaaacaaatgcgtgctatcttttcttccttctctctcttgccaatagattcaaaggactaaccgcctgagaattctattgattcttcctttgcccttaaaactaaagatttcaaaggaccaaccgcttgagatatctcttgtttccccttacaaagatncaagggactaaccacctaagaattcttagacttaacacattggagggtacatcctttgtggtacaagtagagcgtacatctacttggggtgtaatactgagaacaagaaagggtacatctcttgtggatcagttcaagcggagtgtacttccacttggttgtccaaagagaacaatggaggggacattattccctt

SEQ ID NO: 114515 - DNA, 136 bp, Glycine max
  unsure (1)..(136): unsure at all n locations
ccggggaatccctacaagtccaccctggcaggccttgccaagcttttgttttttttttttnaaaatngagggtgcgtccacatttggcacaatgcttatattatttataacaaatcctttaaagttccaatgaatt

SEQ ID NO: 114516 - DNA, 414 bp, Glycine max
actcagccttattgagagagagagactaacaggactaccattcttgtcccattcgcattaatgcagagaaactggccatgtctccatccatctttggaattgccaaagaaggcatcaccagacttcgtgttgaatcgccctcaccattagccaccagtgtgaaaataaaaccaaccctgcataatcaatatccgcaattaccatacaattcactgataggattttgtctaatatactgtcaaagattattgtgcaatccatatatcatatacgatactgtactttcaaaatttatatcaactatatgattgcttaatcaacgagacacaattatcatccaatttcgaaatttggtatacaagatcaatgcagccattactaataactggatagatacacaaaccaaaatctatt

SEQ ID NO: 114517 - DNA, 227 bp, Glycine max
agcttttatataccaagcatttaaagcaaatagatattacaatcttcctttttttggtaaatagagataataccatcatcttatttgagcaacaaaatggagaaagcaaagaaataaagaattttacaataatgcaaaacaatggctattttaactgcttcaagacacaattaggaaacaagacattaccaacaaactttgcagaaggaatcaattaaggggtcgtc

SEQ ID NO: 114518 - DNA, 386 bp, Glycine max
taccttcgatgacaatggatgaagggtatttgatgcttggcttcaagacgaaggacgaatggagcagccttcgcatgagggagacatcgcggaaggcacccctcgcgagtgggtttaataaagtagtgccaattcattaagggcaataggataatttcaaacaaaattgaggggggggggggttcatcatacacttgttacaatgtatgattcaattcctcatcaatggactaaattcatatacctatctctctatgtatgctataaatattataagagaaatgctaccaacattctctttgacattgtctttctgatactttatttgttaaaattaattagaaatcaccaatcttggcgcttccactatcttaaactattttata

SEQ ID NO: 114519 - DNA, 227 bp, Glycine max
agctttgtttttttggtcttcgacgggtaaaggatcaaagcgggtttgaaaagaggaaaatttaatcatccttcttagacgaatgagaaaactagggcaaaggaagagggtgagaatgaaggagaaacccatgctacgactgtcgttcctaaatagaaatcccctaccagctcaacaaacataattacttagccaatattgaaccttctcattccccaccacccaat

SEQ ID NO: 114520 - DNA, 401 bp, Glycine max
  unsure (1)..(401): unsure at all n locations
gcctaattaacctgaaattgaatganattgtttttttaacacacaaaatgaaaatactaagtatttattacctatacttaacaaaaaatacttattacattacaaaataaccattaattgggagaagtttgatacaatttatacaaagtttatacacaaaagttagtcgtgttcaccgactaacaactccaccaaatttatagatttgcttgtcctcaagctaaagagaacaactcacttgtcctcaagtgaaaatgacatacagtgactatgtacaaaggtgtatgctacaaagtgactgattgcatgattagagaatggaagtaaatgccctcattacttgtctttcacaagatatgcagttattcaaagagaagaataaaatggtacctgaaaagata

SEQ ID NO: 114521 - DNA, 225 bp, Glycine max
agcttcttttctttaaggggaaagactcttcctgtggcctttggatgtccagtttgaccattcaggcctctaacattttgctcctttttgagttgtgaacaatctcttagagtgtgtcccttttgtccataattaaaacatgttacgcctatatcgggacaattcgaggagatgtgccctagcttaccacatctgtaacaaatgatataagtgggaaagtattgg

SEQ ID NO: 114522 - DNA, 395 bp, Glycine max
accagctaactggttagcctatctcctcattttattgccaactgaccgaccattcagtcattggagacctttcaagagcatatgtcttatagcaaaagggaagccgggagagcattctaccattgatagagctcacttatacaatagtcgtcagtctaccattggcatggctccctacgaaacctagtgaggtataaggtgtacaacacccctatgtaggatagagccaggagaaggcctaaccttatgaccagaagtggtacatcataccacaaaaaaggtcaagttaatccacgaaaggatgatgactgctcatagtaggcatacaggcataatgattagacgaagaaagacctacaatacaaggtggggaccatatactccttggagataat

SEQ ID NO: 114523 - DNA, 227 bp, Glycine max
agcttttttttcctcccaataggttcctgaaataggggcacggagcaaacacactacgtgctgtttccttgatattgccatgcatatctttatgatatcatgtgatgcaatcctaccccccaagggtattggatagaagactccaagaagtttgggccaaagatgcaagagaagaccctaaggttctcatgagccttaaggtagattttgagcccatgggcaaagta

SEQ ID NO: 114524 - DNA, 406 bp, Glycine max
taaagagatttaacaaaacatgggagaaacctttatgcaataattaaatgaaaatgctgaatccacaaacagaagaccaaaatgtgcctcttgctatatttcaacagttagaaaaatcaacataaaccatcatttctttagtatttttaggtctcaaccttacaaccactcaaactctttcaagcactatagtatacataagcatgataagaaaacaagtaacaatactgccatggccaagaaaacaacagagaaaaaaacaattagaatagtcacgttctgtacactaattggcttttgaagtaaaagtgaagtataagaactaatgtagtcaaattcaagattctatgtaaacttatgaatagtcgatagacaccactcagaaactcttaagcatatgtatgcc

SEQ ID NO: 114525 - DNA, 225 bp, Glycine max
agcttttttgatttacattctccccctttctcaagcaaattcttaattcttcttgacatcatcaaaatcttcatgatttacattctccccctttttgatgatgacaaccacctgtaggttaggagcaacaacaaagaaaaaatatctattcgcatatagtttactcccctttggttttgcaatgattgcttatatgagacagttgaagatttcatatttttcata

SEQ ID NO: 114526 - DNA, 389 bp, Glycine max
  unsure (1)..(389): unsure at all n locations
ctgtatccttgatttaccttggtcaagaaagcatctttcttaccctntttgttggttgtggttgtgtacaatggtaagaatcctctcccccttccatttgaagtattccttcgtagagcacctttggggggttcatgaaagtgctcatttttgggttttaatgttgtttttgtttgttgatgggttttgggtggtgatatgttgtgtggtgactgggtgatagtgggacagctcttatgttggacccaaagccctctccttttttcttcttcctctcaaagattgcttcttggtttatagaggtaatgggagcttacctttttcttattttggatgcttagtaatgtcatatattctttgttgaacataaatctgttgttggctatttt

SEQ ID NO: 114527 - DNA, 355 bp, Glycine max
gcaatagcctggaacgactcatgaacaaaagaaacgcacccaaagtaacatggtgcccgtaacaagaatcctaccaataaccactaaccagcatcccgatcaaaaaaaagaaaacgctctaccgagggataccgaacggaagacaaatctatccgtgaatgaaaagaaatgaattcaacttactagtatacaagacacggcaaagcaagaaaagaaaatactgcaaaaatcaagtgcaaataagatgggaaacattaagcataatagagaaagagaacgaaaaagacaaaacccaaatccaacatacgcaagccgagcaatgcaacagagatcagtacagcagcaacaaaacaag

SEQ ID NO: 114528 - DNA, 225 bp, Glycine max
agcttgggtctttaaaactatataacagcaccaatgttctagtttaggcccttctcttctctctctctcctatttttgtttttagttttaggcttctcttcttcttttagacattttttcattttgcaattccagttttgactttttgttttagcaataaaattttgttcttcaatctataatttcgttctctattgattaatggaaggctaagtcgttagcgtt

SEQ ID NO: 114529 - DNA, 401 bp, Glycine max
acgtcgcacatcattcgtgactatgatatctattctattatgcttgaagcacaggagaccttcaatcctataacgcaatgaggccgacaaaagtgggcagttaacttgaattggcattattgacaacgcagaaagtattttgtgcttcactatccattgtcacacattattgcagcttgtggttacgtgagcctgaactactactaatatatagatgttgtatacacaaatgagcacatcttaaaagcttactccgcaaaatggtggtctcttaagaatgaagcggcaattcctccttctgatgacgcatggacacttatccctgatccaactacaattcatgtgaaaagtcggcccaaatcaacaaggataatgaatgaaatggattggctcgaaccatc

SEQ ID NO: 114530 - DNA, 230 bp, Glycine max
agcttgctttttaacactgcccaaccaaccaaaataatggaaacgtaacatagtggaaagatgctaaatacatgacagtagttgtaaaaaaaatgctaaaggtttcatacaacaacgttcaaagaagcactgaccatttaaaaaatgaacctaacctttcaagttaaaaactaccatatactatggaacagtggaggcacaatcacaaatcagcaatcaatgataggcta

SEQ ID NO: 114531 - DNA, 202 bp, Glycine max
cttgcggcagtttccattttaccatatttgaaagaatagttttagctaatctatgctgagggttgcatatgtcacatggtctgagaaatcgtctactgtggcgaaacagcaccaacaattgttacactacctgtacgttcacggcctcctagacattttatcttgccagtacattcatagaaagatgctttacgtgcagcaa

SEQ ID NO: 114532 - DNA, 229 bp, Glycine max
agcttcactttttatgaggttaggtcttatgccaggggaccttagacttggcagagaaggacaaacgggaacttgggtttcttcttcctcatcgatccattgcgggtacaaggactcccatgtcacatttcttgcagcatactccagaggcagaacaacatgtgttgcctcaggaataagatgctcccattgtgttagttcagtcttgttgaaatttacaagcccaact

SEQ ID NO: 114533 - DNA, 428 bp, Glycine max
tcacggacctatgatactcagccctcgaagaaagtgatgaggtacaagccctaatagtttttcttgaaagagcccgggtagtcaaagagaagttcaagtccatagccatcaaagtctgaagaaagtatgatgaactaagggacgtctatatggccaccgatgaagccatggaatgagaaaccaagaaggcccgaaaggaagaacacgaccaaaacaagttttgaggggctttatagggcagcaatagtgagctcaaacttcgaagaggtgaaaggaatcatcatgggtcaaaggcatgatctggaaggacgagctaaaggcttgccttaggtcgagaagaaatttgtcccaacagttaaagtgagactgaaaggaatatgtgggccattatcgatgagtgcaaagagaagctaaatctagcagcgact

SEQ ID NO: 114534 - DNA, 229 bp, Glycine max
agctttattttgtttcatcaaatgattataaatatgtgaccatggcatgaatttcaataacgtttttttacataactttctgattcatttcacttcatctttctaaaattttttgttcaatactttctctttcaagaaaagttcattgacaaaaaacttgtgctactcttcttcttcattcacttctccctcttgccaaaagaatcgaaggactaaccgcctgagttct

SEQ ID NO: 114535 - DNA, 355 bp, Glycine max
ccctgtgatgtacctaaacaggcgaactcctggcagtcaaccgataaaagaacaaagaccaccaagcaaggaggcttgggtggtgactggccaactgtgaatcttgagtgatatatgggatgtggcctctggtaatcgattaccaagggtgggtaatcgatacaaggcttaaaagtgaagacaagaagctaagatggcctctggtaatcgattaccaggcttaaaaacgagatcaggaagttaagagggcttctggtaatcgattaccaaggggtgtaatcgattaccaggcttagaaatagagacagtatgttgtggaggcctctggtaatcgattaccagtactgtgtaatcg

SEQ ID NO: 114536 - DNA, 261 bp, Glycine max
cccgggatccttttaaatccacctggaggcttccaacttgcctttttttgcaacaataatgatggcccgagttatgttggggaacggttactaacccggaatgggtttaagcaaagacaacggcggcataactagcctgataaatgccaaaggaaatcgtgggaagtatggtttaggctataagcccactcaggcatatgtaaagagaagtatcgcgggaaggaggagctgtggtcaaagctcgcggttgagacaagaaag

SEQ ID NO: 114537 - DNA, 419 bp, Glycine max
ctataaatctcagcttaacactaggattttgataacagtcgtggtggatatcaccatgaccatagtgagcttgattaagaaaacaatctttaggcatctaattaaagtaattatctttaggaatctaatcaaaatatttatctataattcatgtaattaaagtaattaactttagagatcatattaaaatatctatccatagcgtgcctaattaaagtaattatctttagagaccatatcataatatctatctatagtgtgcctaattaaagtaattatctttaaaattctataaataagaagttggagtctgtaatttagattcattcaaaattcgttatttagtttacgtttttgagagctttgagagatttttgagcgtttctgaggtatggacaacattgtgtggacagattgtg

SEQ ID NO: 114538 - DNA, 226 bp, Glycine max
agcttattgttttctttctggcttagcgcattgaaaaaatcattattccagtcgtttaaccagacctgaattttaaccacgccaaggatcatggcgaggataataatgattaacaacactgaagttttattattcttacgcagccaaaagggcttcaacagacagagatactttgctatcaacatacgaagcgtaatgggaatggttatcattagcgaaaattgat

SEQ ID NO: 114539 - DNA, 395 bp, Glycine max
  unsure (1)..(395): unsure at all n locations
ntggtcagccgtttttgtggaatgggcatctatttgtattttccaggagtcctgcaaggataatctggttgttgaaagtaatggagacatttacgaatgcgaccattttgtctatccacagtacaaaattggaaacattaataaatctgaactcaaaacgatgaacagtgtacaactgacagcgcaaaaaaaacggattccagcgaaatgtcagcaatgtgcatataaacctatctgcaatggcggttgtcctaagcatcgtattactaaagtaaacaatgagactgtttcttatttttgcgaaggttataaaatccttttttcaaccatggtaccttatatgaacgccatggtagagttagctaagaacagagtaccgctttaccacattatgg

SEQ ID NO: 114540 - DNA, 227 bp, Glycine max
agcttctttgttgatgttgtaatcctgtgtgagaggatgtatgttatgatcatgagatcagattaatccaatgacagataaaagtgttccaccgaaaatcacttaataaaccgatccaccgtagacgtcgtccacaatacaattggacactatttgtttatttcaaatacaagtatggagtcaaaacattacttaatgcaattgctcaacgctgccaaaaccattga

SEQ ID NO: 114541 - DNA, 399 bp, Glycine max
ctttgacttgttgaaattagttccggccatgagttattctacttggttcttcttattcttgctttggagcttagactaattttatttcctttgaaacaggttaaaatattgggagaatttctataaattaactttctcataaactaattttaacttgtgaaaaaaactcatattttgtttgggtaagtttctctacaaatacttacaagagaaaaaaacaagaatgtaagatgaaataagcttctcttataagctaaaattaacttcatcatgagttaaaataagctttttggaaaagcttctctcatttaactttcccaaaaagctaattttagcttttacaagaaaaaattatttctttttttttgttttgttttcttcttctcctacaagtgtcta

SEQ ID NO: 114542 - DNA, 227 bp, Glycine max
agcttgttttttcctcaaagatgtaactttgtattctttttttgtttttgtttgtgctcttgttttttctgccttctaggttcaggggtacaatattctgaaaatttgatatattttatgcatatgtcatagtatgattaattttgaaaaaaagggtttttgtttttgctctcttctgagttcaggggtatagtattctggaaaattagaaaagggtaattaaagga

SEQ ID NO: 114543 - DNA, 384 bp, Glycine max
cgagacagagaccttctttttagctatcatcgccaagtacgaagaagagttaggtctagccacggcccacgaacataaaatcgcggatgagtatgctcaatgttagtgtttagctctactgaactttaaaagattggctaaaattttgttaaaacataagcacttagacaatgaaggaaagctggagttgctgcacatgatgtccaacgttatgtcaaaggaatgagatcgggctgcacaatgcacaaggcaagataaaatgtcaaatgaagaattgaagctgcaggatccacgatgtcggatacaatgtcctgacatcctgcccgagaatactggagttgctgtacaatgcaagataaaagtcaagtgcagaagtgaagttgc

SEQ ID NO: 114544 - DNA, 228 bp, Glycine max
agctttttttttctcccaataggttcctgaaataggggcacggagcaaacacactacgtgctgtttccttgatattgccatgcatatctttatgatatcatgtgatgcaatcctaccccccaagggtattggatagaagactccaagaagtttgggccagagatgcaagagaagaccctaaggttctcatgagccttaaggtagattttgagcccatgggcaaagtat

SEQ ID NO: 114545 - DNA, 408 bp, Glycine max
  unsure (1)..(408): unsure at all n locations
ctaagctaaagagattaacaaaacatgggagaatctattatacaataattaaattaaaatgctgaatccacaaacagaagaccaaaatgtacctcttgctatatttcaacagttagaaaaatcaacataaaccatcatttctttagtatttttaagtctcaaccttacaaccactcaaactctttcaagcactatagtatacataagcatgataagaaaacaagtaacaatactgccatggccaagaaaacaacagagaaaaaaacaattagaatagtcacgttctgtacactaattggctnttgaagtaaaagtgaagtataagaactaaggtagtcaaattcaagattctatgtaaacttatgaatagtcgatagacaccactcaaaaactcttaagcatatgtat

SEQ ID NO: 114546 - DNA, 226 bp, Glycine max
agcttttttttaaaatttttctacaaccttttctccccctttggcaacatcaaaaagccaaagaactcggaaatcaacacagttataacaatggagtagcaagatataagtatcagagtattaaatacaataagccaaactcataaacaagaaataatcaaatcagaatttaaataaaatgtcaacaaccacaaaacatccaagactgaaatttaaaaccacaaga

SEQ ID NO: 114547 - DNA, 397 bp, Glycine max
  unsure (1)..(397): unsure at all n locations
tgttggattatggagtgcctgtcatatatggtactaggtggcgatcgggcgatggcgcaaatcaactctcccactttcacaaatcaaacatgaacccaccatccccagttgcccaccttcaattgagctcacgtactcctacgtagcccttatcctcgttcctctcagcatcgggtccccatcaacccctctaagcttccacaatatccaagaaattaaatttccaaatatcatgaactaccctaaaccaagaaaacagggcagaggcagaaaactctgccaaaacacattccaataccacaactttccctactcaaataccccagtaacattctcttcgttctgattcgttaaccattggatcgactcgaaaattntactggaggttcctagtaca

SEQ ID NO: 114548 - DNA, 278 bp, Glycine max
  unsure (1)..(278): unsure at all n locations
ggaaaaaaaaccaagctccttataaagggagtttttattccgnacagaccgggctgtataaaagggccaccccccacacaggatcatcaaaataaagaaggggaaagggacataacagaagggaaacattaacaaggcgcattgataaagcacagtgtcccacataccaggctgaccactcaaattaactacttcctgtaaccgaaatatcaaaaacagaagaaacgattgctcaagaacctttaactaaccccacaagttgccatgagactatgcta

SEQ ID NO: 114549 - DNA, 176 bp, Glycine max
agcttacttttttagagaatgagaagctgactaatactaaggtaacacgatccaaatttattgaaagatgatggactgacggaagtctttttcctatgaagcaaagctaaccttgtataggccgttagaggtatcgaactatatgattgaaaacctaatgttaaggcactataata

SEQ ID NO: 114550 - DNA, 247 bp, Glycine max
  unsure (1)..(247): unsure at all n locations
gaccngcaggtttgcaagcnnacttcatcgnaaaanngcaaagnngacggcatttcaaacaacaaccctgaatcttttaatgtaaagattttaaagtttagaaataagacaattttgagtctgtgtgaggatataaggacatatataatgtgcaagatgacaagtgcaaaattgaaaagggctgcaaggttagtcccattagtacctatgcaacagtcaaggttggaaaaggagaaagttgaatcca

SEQ ID NO: 114551 - DNA, 333 bp, Glycine max
atttactacattaacatcaggttaatactggacataccgatgagacatggattaaacttctcccatcagttacatcaaaggggtttgagtacttcggtgcatttggaagggctgaaggaggctgtaaatgaaacaccatatcaattaatcaccaatccatatctaaaccaagaaaagagacaaagttagtaactatgaagcatagacacttctctttgaagtgtcaccgtgttggacacgttttcaacactggcacacttagacacttgttcgacacttcttattaggtgtatgattcaaaaattacttttttgtgacttgaacacttaaatc

SEQ ID NO: 114552 - DNA, 220 bp, Glycine max
agtcttgaattttcttttatacccacccgtcttttctcataattatgaaacacctcacttgcgctatggtgttctacctattcaatggggttatcattcttcccctctcccaatcaatggggaaaggtgcctacctttggggcttgctcataaattcgccctttcacccttctaaggccatttcctcccttttgaaaaagacctcaatgcctcacttttc

SEQ ID NO: 114553 - DNA, 212 bp, Glycine max
aaaagcattctggtatggaaagcataatcccctactggatcttccctgtaggaacctgatgtaaatatatctatacctattaaatgatgcttagtgtgatctctgagctatctacatatcataccagaatgccttaaccttgaacacatagaagcaagctctgtgagggtcaattcaataagtggaaaactggtctgactctaaagtcctcg

SEQ ID NO: 114554 - DNA, 232 bp, Glycine max
agcttgttttttataccccggacctctccagatgatgatgaagaacccattcactaacgtgtgcttctgcaaaggatttcttgctcaccatatgacgcacaccctacatatcgagagccggccctggagggcacaccgattagtctaaacacttaattatatcacatgaattgctattactaggattacatactttccgtgggtgggtcgctctaatccagactgataagtt

SEQ ID NO: 114555 - DNA, 225 bp, Glycine max
agcttgtttcccgagaaccgcaaaaagcggccttaacagtgccggcctgccgacgatggtcttacgacgagaggaagagaggggagaaaacccgccacggcctacccaaccaacacgatcatcgctgcgcccccatgacggagcgagaacagggcgcacaagcgcaggcacaggggaccaatgcgaaggagtcctacaccaaccgaacagcaccaaccaccgacc

SEQ ID NO: 114556 - DNA, 229 bp, Glycine max
agcttagatagtgaagttttaatggaggaaaagaaagagagagggagagagagagagagagagaaaggggggcatgaaattgaaggagaaaaaagagggagagaagtgtaacttttaagtgtgtctcacaaggccctcattcatcaaagttacaacaagtgttacacatgcttctatttatagcctaggtagcttccttgagaagcttccttgagaaacttctttgaga

SEQ ID NO: 114557 - DNA, 411 bp, Glycine max
aggaccttaatactcagctattggcaggaagacttgcacttctctatggttcagccggtgaggaaagaaagttgcaactgagtgagttagatgaaatccgcctagaagcctacgcgaatgccaagttctacaaagaaaagaccaagaagttccatgatagcatgatagttaagaaggacttcatggttgggcaaaaagtgttattgtataattctaggcttagactcatgagtggtaagttgaggtctaagtggattggtccttttgttgttactaatggttttccttatggtacagttgagatcaaaagcgactccacaaacaagagcttcaaggtcaacggacatcgacttaagccattcctcacgaacccttctttagtggacgtagtggtggaagagactttcttac

SEQ ID NO: 114558 - DNA, 225 bp, Glycine max
agcttgctttcccatggaagctcctaatatcttccacactttttggggtgagccattcttggatggccttgattttctcagggtccacttggaccccatttctaccaactacaaaacctaagaaaactatattatctacacaaaaggtacacttctctatatttgcatagagggtgtttttcctaaggactgaaagaacttgtctgagatgtcctaagtgatcat

SEQ ID NO: 114559 - DNA, 395 bp, Glycine max
  unsure (1)..(395): unsure at all n locations
cgaanggcaactggatgcattggttattctttttacccagctggccttgaataagaaatctgttcatgtcacaagggtttgtggtttgtgctccttagctgaccaccatacagacctttgcccttccatgcatcaacctggagcatttgagcagcctgaagcttatgctgcaaatatttacaatagacctcctcaacctcagtagcaaaatcaaccacagtagaacaattatgacctcttcatcaacagatacaaccctggatggaggaatcaccctaacctcagatggttcagccctcagcaacaacaacagcagtctgctccttccttccaaaatgctgctggcccaagcagaccatacattccttcaccaatcctatagcagctacaacccc

SEQ ID NO: 114560 - DNA, 261 bp, Glycine max
  unsure (1)..(261): unsure at all n locations
agctncctcaagnaaagaaaaaanngagggaggtaattaaagaacgcaacacaccgcaccgacagaattccattctacattcatttaacccttaacagaaaaccaccaacaatgtntttaagaatggagaactataaagggaaaaaagggaccaaagggttatctcagaaaagcaaatnncagccaaaatcaaatcacaaatggtctacccaaatatttttgctcgggtacacaaacctattttgaaaaccccccaagaaa

SEQ ID NO: 114561 - DNA, 403 bp, Glycine max
  unsure (1)..(403): unsure at all n locations
tcaagcttgagtgagccaccgtagaatgaaataanctaagtatagagtccctatgagacagaggatttatagactgggaagtctctatactcaagcttgaaagagcctctctgagagagaagataaatagcttgggaagtctctatcctcaagcatgagagagcctctctgagagagaagataaatagtttgggaagtctctatcctcaagcttgagtgagccaccatagagtgagtcaatttcgtaaacacattcttgtaaccctactatcactttgtatagtggaagaatctccatattggagaattataatcgtgtgctcccattactacctttaattactaagtgcctatcttaacttcacgaaacgggaaagtccgagttttcccaacaaagccatag

SEQ ID NO: 114562 - DNA, 229 bp, Glycine max
agctttgattgctctattcaatggagttgacaagaatatcttcagacttatcaacacatgcacagtggccaaggatgcatgggagatcctgaaaaccactcatgaaggaacctccaaagtgaagatgtccagattgcaactattggctacaaaattcgaaaatctgaagatgaaggaggaagaatgtattcatgacttccacatgaacattcttgaaattgccaatgct

SEQ ID NO: 114563 - DNA, 403 bp, Glycine max
tgttcgcacatcgttcgcgtgtatgacatccactctacataggttgaagttgaggagaccttcaatcctattacacaacgtggccgacaaaagtgggcatgtaacttgaatggtcattattgtcaatgcagaaggtattctgcgcttcactatccatgttcacatattatcgcagcttgtggttacgtgagcctgaactactaccaatatatagatgttgtttatacaaatgagcacatcgtaaaagcttactccgcacaatggtggcctcttgggaatgaagcgactattcctccttctaatgacgcatggacacttatccctgacccaacagcaattcgtgcgaaaggtctgcctatatcaacaaggataaggaatgagatggattgggtcgaaccctctg

SEQ ID NO: 114564 - DNA, 228 bp, Glycine max
agctttgaattttgttgtttttcaccttctcgctaagccaatctgttggcttagcgagcgtccgctaagcgcaacactcatgggctaagtgtggggaagacactggaagaagatgagctatacaggttcgctaagtgcactgcttcgtctcactaagcgcaccgcttcagtccatccgctaagtgagaaaggcacgtgctaagccaaaattcactaatgttcgttaag

SEQ ID NO: 114565 - DNA, 358 bp, Glycine max
tggccctagcatggttgcacactggcatggttgcgtgccaggccgcgtcatacttacatgcactaaccatcaagtcaaactaggtgtgattcaattagagggattacctcatgaaagttttcacatgttcttcctccaaatcctttcatgcatttcgcgacactctcttaacaccatccaacttgggagcttcaaccccctcaaaaccaaccttcgaagttcaccatcattctcttttactcatggatggagcctgtgcgtactgcaccttctctaaaccttgaaagtgggagatcgatggttttgctctattggatgatcaaatattaaacattgtttgtcaaaacttttttcattt

SEQ ID NO: 114566 - DNA, 228 bp, Glycine max
  unsure (1)..(228): unsure at all n locations
agctntgattaatttcaaacgacactaactggggacttggatgacgaatcgcgtcacgtactatgtccagacgctggcaatagaataccgaagctctgagcaaattcaatcgacaataaatttttactcggatgtcggattgagtcacgtaatatatcgagaagctcgaaattgaataccgaagctctgagcaaattcaaacgacaataactttttactcggatgagc

SEQ ID NO: 114567 - DNA, 231 bp, Glycine max
  unsure (1)..(231): unsure at all n locations
agcnaagnaatgatcattatcnagccaaagctgacccaaatttgaagtatggcgacaatgaagacttcccttattatgacctgactatggcattatatgactccggagatgagccggaatgtttttctccactactacaaaaattcaggaaaaccttgcccaagcatactccatgaaggatcctgctgccagctatgaggtcaaaagcaagatctttaacactgagggagc

SEQ ID NO: 114568 - DNA, 366 bp, Glycine max
aaaaactttttttttatagtgaaagcccagaagaaggaagtgattggataaccaccaaccgataaaaaggtacaatagaacatttgcttataaagccataacccttcatctgcaccaaaagggtaacaacaaagaggcacaaagaacctaatcaaaaggatctagttccaattttagaaggatttagtcacactaatttgttaagggggagggacctaaatatagagcaccaggaaagagagagagttgcaagtcctagttgaattgggcgctggctaggatgatgcaactgagagtagaggaatcattgagggaaagtgatttggttgcaatgaaagtggtttccgtggtggtggacaccgagtt

SEQ ID NO: 114569 - DNA, 228 bp, Glycine max
agcttggagtttatgctggaaacgccgaagagaaatatagaaggggggatcacaagcttgatgggacaacagagggagagtctaaagtatgctcttccctcctcctttttgataattgctaataattttaatgaaagtttggacagggtgaaatgttatattttctactaaaaagggtttcgtaacagctttataatcttggcattttaatgacagttgtcaattcaa

SEQ ID NO: 114570 - DNA, 375 bp, Glycine max
tcacaaagatgataattcaagacatcttctttttgattctgactcgcaggtcaatcccatcgtgtgtcccacttgcacttactgtgccgaatgagaaacttagcatacacaccttacacgaacacttgtgtacctgaaatatatcttcaatggagtgctacccccatacattctatctttggcggcttataagaccgctaatgccgctactaatgctaagcatgaccacgtggaccagctcctattttcagactttattccctagcggcgagtgccacatctatcctctatttctacgcctagcgcatcctcttcttggatgtgacaacacctgtcatgtgacactgctctaagcgtacatatccagcctactta

SEQ ID NO: 114571 - DNA, 79 bp, Glycine max
gggagaccctcagaggccccgcgggggcgcgcgcgctgttttttttagcagcacgaacaggggggggtcacaaatctgt

SEQ ID NO: 114572 - DNA, 407 bp, Glycine max
atacctaagcttaaaccttggaatgatgggagaataccactttctcttttgtgggggagctctctctatggagtttgcgttactactacactcagtttgcaccgagataccccacacctaaggcatttgggcatgtcttgaaactcatgtctgtacagttacgcaattcattaaggtaagcataaatcttctgatactccatacctattggacacaatatcttcttggcctgatagttactttttggtgacgtgatttcctctagaagcatatcatgcactacttgaagtagagaactaaagcttttgtcactccacccatatctggccttcacattaaccaagttgaacaccgctgacaacaaccttaaggaatgcttgcaccctggatacaaaagcttctttaaa

SEQ ID NO: 114573 - DNA, 227 bp, Glycine max
agcttgttttttttttgaaaagaaaactgaaagtaaacgaaatgaaagtgaaagtacacaaaacaagtagggaccactaagggtgcatagaatgaattgaaagattcgatttcaggaacttaccggttgaagaccgaagaacgactaagaacgaacgaagaacaatgaagaacaatgaagaatttccacagaatcgcttacggaaacgtctcaaaagcattacagaa

SEQ ID NO: 114574 - DNA, 401 bp, Glycine max
tgactatgcgagatgatgttagccttagtttttctttatttattaggcaatgcgattaagaatgagaaatcccaaagagaaaacgtccgattgatttttcgctctattttactaaaaggtatttttttgattattatattattattttacttcttttttgatgtccaacgtggttacggcacaaccgaacggtcggaattcattttaacagaaattaacggatgatacaattcaaatgatcggtggaaatttattttaattttagattaagcgagaaacgacttaaataaatgactgaagcatgtcaaaagggggtatagaaagcgaatgaaaacgagaataaaagtacatgaaacaaaatatggaccaccacgggtacatagaatgaattgaaacgctcg

SEQ ID NO: 114575 - DNA, 225 bp, Glycine max
agcttgtttttttttgaaaatcatcatagttcttttcccactttagttaattttttaaaaagaaattttaaaaaataaaatgactatttttctatttgtttctgataaatgatattatgtcttgggtaattggggttatttttatattgtgcatgcatatctgatcttgtcctccaccactactaaaaaaaaagcccttctacatcggttctgatggcctttcta

SEQ ID NO: 114576 - DNA, 395 bp, Glycine max
  unsure (1)..(395): unsure at all n locations
gcttgtgggctatgtggaaacttttttttntaagtctccttcacagtgcaacaactaatgttttcttgacagtataagtgttattaaagctggcccgccatgcccatccatccaaatttcctttgtttggttttttactctcaatatcctcccatagttgtctcactaattcatgctcccacaaaaatggattctcaaaatgaaaaaggaaggaaaatctattaaaacaaacttttacggcttgacaacaataattaagaatgtggtaccaaccattctgatttagcttgcagtggatcaagtggtagacgatgcccagccaaatttcgaactgtgaaagcctcaatggtactctgatcaaacaacctcatgcacttggaacatatatctctaac

SEQ ID NO: 114577 - DNA, 225 bp, Glycine max
agctttttttctctcattcaattcctccttggacagcactggaacctgctcttcctcctcctcctcttcctcttcctcatcatcttctctttcattctcaacaagagcataggtactactactactactacaacattgttttatgtagcaatcttttcctttttcagtttcttcttgagaccccccacttggccactttttctctaatttattgtcacttttcac

SEQ ID NO: 114578 - DNA, 391 bp, Glycine max
tcagttgtctattcttcatctcaatggtcttttcttcgtccaacacatgtttgatgtaagagtcagttatgaagcttctatagtgcttgtgaaaagtaagtttgtaataccttttttcatccgaagaagagttccaggaaaggactgtgttttaaaggtggttttgtatgaaccccaccacaccttcactccttggaactcttctatgatatcttcgttatcgtccatgctaagcatcaacggggtgcgtgtgtctttcaccttgatcgcttcagctttgagctttgatgccctttgggaagagtgttcactaaggtaagtttggatggcattgtaagcctcacttttcatgaagcgttcaccggtgaattcgtggaacctgattctgatg

SEQ ID NO: 114579 - DNA, 228 bp, Glycine max
agcttggattttatgcttcaatggaggaaaagaaagagggatagaaagagagaggggggagcactaaattgatggaagaaaaatggagagaagttgaactttgagttgtgtctcacaagactctcattcatcaaagttacaacaagtgttacacatgcttctatttatagactaggtagcttccttgagaagctttcttgaaaaaacttccttgagaagcttctttga

SEQ ID NO: 114580 - DNA, 389 bp, Glycine max
  unsure (1)..(389): unsure at all n locations
catgatacatgtcaagtcttttttggttcaaggataaaagggatgccccacattatttccatgacacaaatgcaaaaaatgatgatttggaaattttatgcaaaactggtcatgcatgcgcctatgcggacgctcaagtgtcaaatttttatggtcatgtgatgctagggctcaagattcatttgctctattttaaatcaacccaatatttccaaaatatgttcttttatcaatntgtgcattcctccaagtccatttcgggcgtccggggaaattttcacagcattcacccttcaggtgtagacacgtttttttcttcaaaaatcggttatgatcaatgaattttttttcaaagaaaagttggaaatcatctcttttcaaaagcacgt

SEQ ID NO: 114581 - DNA, 200 bp, Glycine max
caaaggtccttttacaactatacgagcatggagtctttcatcaagaacctggagatacaagtgggacaattagccaaacaaatggctgaaagacccactagcagctttagagccaacatagagaagaacacgaaggaggaatgcagggcagtgttgactagaagccagaggaaagcgcaaggagaagaaaagaaagatga

SEQ ID NO: 114582 - DNA, 312 bp, Glycine max
taaaattattccattcacatttataaataatactctttttgccttaatgaattcggggtgctaacaaaaaataatcatattctactagaatatttatttgattaaattaaattatctaatttaataatcaaacagattattttcttgtgcacagattagaacactcatttgtgagtgatctcgtaagttaaatactaaactggtagtaaattaatcctaatcaaggtaggcatttaacaacactccttaacgtccggatagcatgaaataacattttttaccttcaagaaccaacagaggaataatgtaata

SEQ ID NO: 114583 - DNA, 232 bp, Glycine max
aaaagggaaagaaagaagaaaaaaaaaaaaacaaaaaaaaaaaagagaaaaagggagaaaaaaggaaaaaggaaagaaaaaaagaaacaaaaaacgagaaagcaagcaaaaaaacgaacagggacaacacaagcaaacgaaaccgaaaaaacaaaaaaacgcacaaaaaaaagcaaaacgaaaaaaacacaaagcaaaacaagacgacccacaccggaaagaacaaaaaaaa

SEQ ID NO: 114584 - DNA, 227 bp, Glycine max
agcttactttgtgcatgattgatttatcccttgcacccattttgagctgaaagtatgattgtttgattgaaccgtgagcctgtacagtttatctccttctaccttgtcttaggttgtaggaaagcatcattcataaaaggaaattttggttcaaagcaaatttgcccaaatttgggggaattatggggtgatagcttgtaatggtaagaaaagagcaacacacacag

SEQ ID NO: 114585 - DNA, 227 bp, Glycine max
agcttcctttttgacccagcgcccaatattttcgatttcaccaatctcttctgcgagaggaataaaccgtgaagggggcacatgaccatgcaggggatcgtgccagcgagcaagggcttcgatgccgtacagttcacccgtttctgcgaagatttgcggctggtaaaccagtttcagttggttattgctaatcgcttctttcagcgctgcgcctaaaaccaaacgct

SEQ ID NO: 114586 - DNA, 403 bp, Glycine max
tctgaaaacgaaacgttacgtaccgcagaacttattcgcagtcgggtggagaaaaccaaactgaaagccgcaaacggcgaagatattgccctctcactttccatcggtgccgccatgtttaatggtcatcctgactatgagcgcctcattcaaatagccgatgaagctctgtatatcgccaaaagacgaggtagaaaccgtgttgaactctggaaagccagtctttagatgcgccaggatgcagaggtaatcatgaagctaaccgatgcggataatgccgccgatggcatttttttccccgcccttgagcaaaatatgatgggtgcggtgttaattaacgaaaatgatgaagtgatgtttttcaaccccgccgcagagaagctctggggatacaaacgtgaag

SEQ ID NO: 114587 - DNA, 225 bp, Glycine max
  unsure (1)..(225): unsure at all n locations
agctnctgttngtattttcgagcgtctcgatatattaatgggctccatcgggcatccaagttaaaagttattgtcgttagatttttctcagagcttccgttttcaattacgagtgtctcgctatcctacgggacacaatcggacatccgagtcaaaatttattgtcgtttgaatttgctcagagctttagttttaaattatgagcgtctcgatatattacgggac

SEQ ID NO: 114588 - DNA, 391 bp, Glycine max
  unsure (1)..(391): unsure at all n locations
aataaacgacaatantntatctctttgttcgacngaaacccggaatatatcgagaatctcctaattgaaaactgaagctctgagcaaatttaaagcacaataaattttcactcggatgtccgattgtgtcccgttagatatcgagacgctcgtaattgaaaacggaagctctaagaaaattcaaacgacaataacttttaactcggatgtccgattgtgccctgtaatatatcgagacgctcgaaattgtaaacggaagctctaagaaaagtcaaacgacaataacttttaactcggatgtgcgattgaatcccgtatgatatcgagacgctcgtaattgaaaactgaagctctgataaaattctaacgacaataacttttaactctgatg

SEQ ID NO: 114589 - DNA, 227 bp, Glycine max
agcttgcctctttgctcgcccaagcgagcaaggttgcttcctccaaaagcaacagccttctggaggaatcttctggagggcccaagtgggcctggttgctatttgcacccccatttttactaaatacaccccctgccttttttggtgattcttttttcgtaaagctacggaaacttacgaatttcgtaacgatacttgttttcttttcgtaatgttacggaaccttg

SEQ ID NO: 114590 - DNA, 404 bp, Glycine max
  unsure (1)..(404): unsure at all n locations
ntgcggatttggtcttcgccggagaaagggtcttattattatatgacaagaggcaaatttaatcatcttgcttggatgaatgagaaaaactggggcaaatgaagagggtgaggatgagcgagaaacccatgctatggctgccattcctatacggccaagtttcccaccaacccaacaatgtcattactcagccaataacaaaccttctccttacccaccacccagttatccacaaaggccatccctaaatcaaccacaaaacccaccttccacaccaccaatgctaaacaccacctttagcatgaaccaaaacaccaaccaaggaaggaattttgcagcaaaaagcctgtagaatcaccccaattctggtgtcctatgctaacttgcttcattatctacttgat

SEQ ID NO: 114591 - DNA, 225 bp, Glycine max
agcttgttttctttacctcgatcggtcatctttcctggccgacgccgactgtcatttttttcgatcaatatcggtgaataatatttttttgccgaggtgggctaatgttttcctggccgaataaatgggaacatgccagtttcggccgaaacgaaacatcggttgagctcgcacgaaaaaacctagccgacctacattgtaagttttttatgcaacaccgaaaaa

SEQ ID NO: 114592 - DNA, 345 bp, Glycine max
tggttcgaggtaattacccgttgaagttctttatctatgaagaacgaatgaagaacgttgataaacggctgaaacctttgcgagattcctcacggaaaacgttacggaaacgtttcggaagcgcctccgcttagatattcttcacggaaacaatttttccaagcaaattcgaaagagagagaagtgccttaggggctgaaccccttttttcttcactttctcccctatttatagcataataggggaggtggttgcctgccatcttgcccaggcgaaccatgttgcttcctccagaaacaacatccttctggaggaattttctggagggcccaaatgggcctgggt

SEQ ID NO: 114593 - DNA, 225 bp, Glycine max
agcttaattacttttatattaattgcgataaaagtcatactaataatatttttttatttaattgacagtataaaaaaatttatattaaccataaatcaaactcttttttatattcgcattaagtacaatgtatatatactatttgcgagaaaagcataacactgttaagagttaatttacttatgttactcagacataactcagataaacaaagtgggttaagat

SEQ ID NO: 114594 - DNA, 398 bp, Glycine max
tggttggagtcttaattgactgtttttttttccaagcttaaaccaacaagccgctctattgcaatatagaacagaatccgaagggtccagtctcaaaccattcccatatgccgaacaagcctcagtgtacctttcaaatttaaaaagatcatttccgcgcactcgagcccttgccaccatcctcacattgttgagcaaaacagcaacttcaacattccgggaatcaatctgacaggctttctcagcagctgtaactgcattctcaaacctgcaatacacccatcatccattttcactttccaacagaaacatcttaggatttcagatgaaggctaatagtgtctgaactcaccttcccaatgccatctcaatctgagctctgacaaaataggaataaa

SEQ ID NO: 114595 - DNA, 167 bp, Glycine max
agctactatcttttatggactatacctagaagcagtggccctttgaatagacccctcatgaagcctaatgtttcacctattgctttgcttgtgaaagctacatctacaaggcccttaagtgaaaaacaccatgaatcccacaccttaaaccttaagtgaatattcgg

SEQ ID NO: 114596 - DNA, 407 bp, Glycine max
aaactaacctataatatggtagggttcttctgaatggctgtctaacactctattggggagttctagtgaacaactgatgtaaacactaaatattctaattggatatgtctttcgggtccaatgcttccttcaatgcttaaagtttggatgcctttggtctgatcactccatttgcgtgccatagttaggctactttagcatctggaaatgtattgctgccttataacttgattgaagcatgattgaaacttagttttacaagaaggatctgcggattaagctccagtttaaattatgtggttacaataatgctgattagtctacgcctagtcttacaagagggatctgcggacgaagcttatgcttaattaagctaaaccttcataaggctgttagagctgagccta

SEQ ID NO: 114597 - DNA, 225 bp, Glycine max
agcttagtttttttaggccaaacacttgaggggatcattgagagtccaacaagaggcaaaattgaacaagctactcggacgacagacaaaactggggcgaatagacaggagagaacacaggaatacaccgacgttgagactgccattcctattcggacaaaaatatcaccaacccagaaaagattgtactcacccatttgcaaacctgattcttacccacagcac

SEQ ID NO: 114598 - DNA, 230 bp, Glycine max
agctttaatttttttttgataagtaaacaagaccaaaaattggggactaaaacattttaaatactctataaaaatacacaaaaattttgcttaaaaaaaaaacacacgcaacaatcactagtacgggtaaaataaaatatcattcttaataataaaaacatctcttactatattttcttttttcttaattaacatgcaatattattattattattattattattattatt

SEQ ID NO: 114599 - DNA, 399 bp, Glycine max
taaccagaggatgccactttttgctgaataatctctcctaatccggcacactaaccagggcagggttgagttaactagacttgtcgctgataaaagacctcaaagcctcaagatggaagggtgttctaaccttggaggttttggtctttgatcttcgagactttctaccctatgggtgtccgatctgtactctctatctaagatggtgattcacttttctatcttcttttaatcttgcgtgatgtgatcaatttcttaatttgatatatccctttgatcttactcagagtgaaatctagttactaacagatactctgaaatggtaggtcttcaattgccctcagatgagagagatttcattggagtttgctcaccgagaaagtgacagtactgatcttt

SEQ ID NO: 114600 - DNA, 223 bp, Glycine max
agcttgcttgcgctaagcgcttagacctctgactagttggctgaatagttcagctaagcgcacatcactacgctaagcccaacatctttactggaagtaaacttcaagcagtgggcttagtggagatgattgttagtcaatgaatacgactaacttttgtgtaagaaatctgtgaaaattgtatctaactcctcccatttatggttatttggtagtgttgtaa

SEQ ID NO: 114601 - DNA, 394 bp, Glycine max
tgccacccagctcgcccaggcgagcttgtttgtttcctccagaagcaacagccttctggaggaatcttctggagggcccaagtgggcctggttgctatttgcacccccatctttactaagtacaccccctgcctttttttggagattctattttccgaaagttacggaaacttacgaatttcgtaacgatacttggtttctttccgtaatgatacggaaccttgtggattacataatcttcccctttttgacttacggaatgttacggaacctcactaattgtgcaacgatgcttccatttaattttcggtgtgtcacggaaccttacggattgtgcatcaatattttattttggtttccggcacgtcccggaatttcacaaattgcctaatga

SEQ ID NO: 114602 - DNA, 226 bp, Glycine max
agcttaccttgtgcatgattgatttatcccttgcacccattttgagctgaaagtatgattgtttgattgaaccgtgagcctgtacagtttatctccttctaccttgtcttaggttgtaggaaagcatcattcataaaaggaaattttggttcaaagcaaatttgcccaaatttgggggaattatggggtgatagcttgtaatggtaagaaaagagcaacacacaca

SEQ ID NO: 114603 - DNA, 402 bp, Glycine max
tgtgacgattgtaaggtctaaggaaagggaatcatgaccaaccaaaggctttaagaaagttataatctggatttttgttgaaaaagacagtagtatagggaacattaaaatgcaaagaagcagtaggcaatctatttatcaagtatgctgctgtagtgaaggcaaaatccccaaacttgagaggcagtgaagcttgtttaagaagagcgagtcctaattccacaatatgtttgtgtttcctttccactacaccattttggtgatgagtgtgtggacagatcaatctaagagtgataccttggcttgctaaaaaattagtgagaggtctgaactctcctcctcaatctgtgtgaacactcttaattttggagtcaaactgaagttcattagcttgaactgttg

SEQ ID NO: 114604 - DNA, 211 bp, Glycine max
agcttgtttttttttggggaccccattacatgtggtactaggtggcggcatggcaatgttgcgcaacaagattttgcacattcacaaagaacgcataagcccaactttccctgggggccacatgcaactgagttcacgtactcccaccttagcccatagacatatctttctcaacaccgggtccccacttaatccttgcccagcttacaca

SEQ ID NO: 114605 - DNA, 195 bp, Glycine max
ggacccaagcacggggcagcaacatatatttgaaaagacagaagctgaagaggagccaaaccacaaaacgaagaagccacgaaacaaaacggatgagagacacaagatcaccacaagaacgggcaaaagaggcaaaccgacaaacaagcaccaccgagaaagagcaaagaagacagaatgaaagcataggaaaaa

SEQ ID NO: 114606 - DNA, 226 bp, Glycine max
agcttgttttttttttcatactaaagctaggatgataaaagaaaattaatgaccattctttgttaatcatctctagcttatgccatagaaattaattagtttcaccaaacgagtactaggagaggtggggggaaaataaaacaactctcttgcgttcctgacctacctttctttgtctctctctttctctctctctatgtgtttatatattcatgggtacaactgc

SEQ ID NO: 114607 - DNA, 243 bp, Glycine max
agcttttattattggttgtgcaaaaataccatgtaacattaccaacttgtggctctccttattaccttccattggattccttgtggctttctttgaaagttttgccttagattcataatgaataaaataaatacttacaaagaaaaaggaaatttgtaacttgcactaaaatttcatataaaacaatttatatttttgatttttgaaaatttaaacctttgacaatttgaaatttgaaaataa

SEQ ID NO: 114608 - DNA, 210 bp, Glycine max
caaaaccaccccaacagacacacaacgataaaggaaacacccaataccccacacaaaacaagagccgcacccaaacaaacaaccaaaaagagcctcagccgaaaggcaaaaacaactgacgaaaacccggaaaacacaaacgcacggccgatgcaataccacaatccctcaaaaaaaacaaaccgagagaagaaacataaaagcctaaaa

SEQ ID NO: 114609 - DNA, 319 bp, Glycine max
  unsure (1)..(319): unsure at all n locations
cacttaagggtgtcttataaattaacttattctgatggtcttctcaatcactatgttgaactcgtatggnggaaaaagcatatggaatctggactatcgtgtttaatcatttattaggaaatttgtgttataaaatcctaataatgtcaaatactctgcatttgtatttacaagatgcctgattgtagcacacgctatttgttcacaaggcattgatacacttttagcgactattcttccgcttgttggggtgctactaacataattgctatgctgttttctcgctattgtacatcacactaaattatattactattct

SEQ ID NO: 114610 - DNA, 258 bp, Glycine max
ggcaacacacaagatctatgccgtggtcaatctccaacgtaactatcactttatcgactataaacttctaccgtgaagaataggattaatctcaatgcctacttgttttaaacttaccactcttgactatctataatcaacataacatccaagcgtcggcgcctaaatgccaatccactggatcacacttcactacataccatacattcaactacgctctacgaaccccctctaacactgctagtccatatgtaacat

SEQ ID NO: 114611 - DNA, 135 bp, Glycine max
ctgcgttcaaaaatacatgcctgtcctccatgatggatacagatatcacatgtaactcatatatacaggactctgttgacgcggttggctgacaatcggcgttggcttgaaaagggttccctttgcgtcggaatt

SEQ ID NO: 114612 - DNA, 129 bp, Glycine max
cctgtgactaactgcttcttaaccgcactctcaacttgcgatttcaaactctacgacccatcacacctagattaccgaccaagccctgtgagataccaccatgccctaagaccaacttctcttcaatgc

SEQ ID NO: 114613 - DNA, 166 bp, Glycine max
tcactgactcactactccacgtaccctatctcgtttttaaactggtccataatctccagctccactaagatcaatcaacgcacttacacacaaaaggaagcaaaattgcaaaacacaatacagtttattagaccatacatctctccgtatacgtgacaccaattct

SEQ ID NO: 114614 - DNA, 216 bp, Glycine max
actacattatggtgctctactgcccttcagcggaactgttgcactgatatgatggcaccaacctgcgcgccgcgcacatctatgttgcagtatctgatttgcttatcgtatatactatttgcgacaccagcgttaaggcccatactgcttaaaaatacgcccgcctgccctatcgatactgtgtattataacatttgcgactgaaccatacaacgg

SEQ ID NO: 114615 - DNA, 255 bp, Glycine max
catgactacctgatattcttgtacccttgaccatgttctcttcttgttgagctcattcaaccttatgaatacatgattcacctaccctagaattttgacttggatgtttggataatgggatatgtggggggtttctttccttttatgtcgttcatctatctttatcttttattttatccttcttatatagtcattccgtttatgatcctattttctatatttgtttccttatctttgttctatcttatttattcg

SEQ ID NO: 114616 - DNA, 190 bp, Glycine max
gttgccaaggaaacaatattgtgtaatccagaattactatacttaactatctgtaaaacagttaatcaatgcaaacttatttaacattcctactgacattcttattaaaaaatcaattaccacaactacatctgctattacttttaccactactaactaacataaccctccccttctaacacacattcct

SEQ ID NO: 114617 - DNA, 232 bp, Glycine max
  unsure (1)..(232): unsure at all n locations
agttgacatgaatatcttcagactgatcaacacttgcacagtggccatagatgcatgggagatcctgataaccactcatgatagaacctgcanagtgaagatgtgcagattgcaaactattggccacaaattcgaatatctgaagatgaaggaagaagagtgtattcatgacttccacatgaacattcttgaaattccaatgcttgcactgcctttgagaataatgatgatg

SEQ ID NO: 114618 - DNA, 373 bp, Glycine max
  unsure (1)..(373): unsure at all n locations
gctcttagcacctgcgctgcactgagttaatattatgatagatgaaagtaaaaaatagtgtcgaagcaatacctgtgcgtctgcgtgggcaactcatctaatgttcaaatgttcctgtacagcagatttttgtttttgcacctggttgcaacatgnttttatattacacattgttcttttttaatgactttatgctctaatgtacgctgattaatgttacaaaagagcacaaagtgtgcgctaaatgttgcagctgcataaagataatgttgcactgcagaaaatttgcagcaagcttgtctcgagatatgattggcatatgtacattatagcaagatcgtattatagacactcaaaattatttatccgctaa

SEQ ID NO: 114619 - DNA, 219 bp, Glycine max
  unsure (1)..(219): unsure at all n locations
ctcattctntgattctcgagatcatcatctntgtatcatgaatgtcgtgacttgagcgtcttgcatcacctttgtcatcatcaaaacttctttgaatcatcatgaagcttgctgttacaccagtgactgatgtcgaaatataaatntccanaagtcacaattcttaaagtgacttggtgctgaagatatttcaaaagtcacaactttntaagtgactag

SEQ ID NO: 114620 - DNA, 147 bp, Glycine max
cttcacttttagaaatggatccaatacctcagtatcgttgtatactattttgcaatcctgttactgcatcacttttaaaaataatcggttttattctacctttgctgaccttaatatagtcatatataacatatctcactgttctac

SEQ ID NO: 114621 - DNA, 243 bp, Glycine max
atgagttgtttattttggttatcactcaatgtttaaaacacttcgtgctatgtcgctaattgtcttacaaaaaaagattgcatatcatggatataatggctgccaccaggggcctatgtcatcaccattatcttaataactacatgttggagacacaactaaaatacttgatggggtgcattgttgccacttttcttttcttactgatctcattacgtgcttctacccactcatataatggct

SEQ ID NO: 114622 - DNA, 391 bp, Glycine max
tataatgtgttctctggctgtgttcatattcataagatcttgaatcttattttcatctctttcacgtctctctcaacattataatcatcttcataggttctcatggatcattcgctctcttctagagtgttccagccttctcttcagaaagtattgtcgaaactctgcttctctttctcctctcttgcaaaacgagactccgcgatcttggtttgttcctcaaatgaggcacgcggatcttgtccttacaataagagacggggatctgctcttggggctcttggcagaagtcttctggtgtctaacaaagctttttgcacaggggccctgttaaaacagaacactggttgctagttcaggaaataaccgtgggtgtggcttgccctatttt

SEQ ID NO: 114623 - DNA, 189 bp, Glycine max
cttatactctttctattttctctagattgcgtaactagttatttctactaagactttaatgggtgcttctaggctccacaacttatttacctataggatcaggttttattttgtcacattaccataccatgataaaattttttttcttcttgttgtaaaaccactgtcacctatgtgcatttattacct

SEQ ID NO: 114624 - DNA, 216 bp, Glycine max
ggttagaacttataaaaaactatttcatcaagtgtagctcttcccctaattaatataatatttcataactgtatgatgccttcctttattcaaatcttcttctatattctatgcatcctattttgttcaatagtatacgcaatctgtgttacactaaacactaatgattactaatgtcccaagggtgtattggcgaataaactgtcagttacccgt

SEQ ID NO: 114625 - DNA, 132 bp, Glycine max
catctactcgtatttgcgattcgatgatgttctccgatactctactaaccaatacgactggtaaccagcgagttccttctaagcacatagccactcggcgcccactcaatgtttcccggcaaaccttccccg

SEQ ID NO: 114626 - DNA, 196 bp, Glycine max
  unsure (1)..(196): unsure at all n locations
tcaatagagtttaggaaaagaatgaagtgtttttagttgaataaataaaaagaaantagtttatttattaaaataatggattaagggaaataaaataaatatatgttcttaagaaataaaatggagatttatntattcattngatanggggtaaataaagtttcttttttataaaatatngaataaaataaaataa

SEQ ID NO: 114627 - DNA, 301 bp, Glycine max
agcactgagctcagctagttaatcacgctatttacggatattgctcagtaagttgcgggatataagttgttaatcacgctgattcagactatcgctcagtaagtatgcgtgattttaagctcgttaaatcagcgttgattatatacgtcaatggactcgagtaaagtattgcgttgacttttagagtaccgttcaattcagcgctcattatacgggctatcgacatcgagtaagtatgcgttgatttctagagctctttcatacagcgttgttctacggccaacgaatcagtaaagtatgc

SEQ ID NO: 114628 - DNA, 316 bp, Glycine max
atatcaaaaaatgttttcacttaacaacgccactataatgccacaagacgggcattatgatatgaatcacaataatttcatcagctgtctcaacctgctgcacatctgatggccctctttctgtcattcttttacatattttcaccttctgcatccttagcatacataacaagctcttctcatgttggcaacttatatgccaatcttatacacatagcacaaaatcttgtgaaacccagaccatataattccaatagtttaaccgcaccacttacgaatgactaacaacggcatcccgtttttgtacatctcaatt

SEQ ID NO: 114629 - DNA, 212 bp, Glycine max
ccccttatctactctctccaatataaatcaagttctaaatctcaagcttatcagactaacttctctaaatgccaatcaagccaaaaagaaacttttatatcaaaaaggacacctgccttgtaaatactagtataacccagctttaccttgcatctcgattttcaactgaagtgtacacacatctcggaatagccaacttaaactttctcttg

SEQ ID NO: 114630 - DNA, 346 bp, Glycine max
  unsure (1)..(346): unsure at all n locations
gctgattcttgttcctaactattgattatggctttatcttcgctaagagaagttatttgaatagcttggagtatcatgtaatggtcattgtaatccaacagnagagtatacntcaatgggaatgtcttgttcttaatcacccccttatcttaggaactgagccattgtgcacatctataatgatactgatttctctaaaacaaatgtgcactgacgttattttactgaaaccagcatcgatgctttatcttatttgaacttatttaatgaactattgtagacttactctgttacgcccccccatgtcagagatatcctatgacagctaaataacactagaccagtg

SEQ ID NO: 114631 - DNA, 415 bp, Glycine max
cgtgagtcctattgcataccctgatttcgtctgaggatcgtcattatctataatttcaaccttgtagccgaattcagtgcttgactacttgccatgaatacaataggatttaacgttatgaaagacatgaaatcccgaggggaggctaatggtatttaaacttttcaaccctgctcgcaactaccctgctcattggcatgaatacttctgtgaatatagccgctggcacatgtgttcagatagacactcctggcactgatgaccaatgctgtttgttatatcataaaggctaagagtcaagctcttgatataaaaagaagagaaaaatactatctgcatccacgacatccatgctcgctctatcttcgtggtgtgaggtacgaatgccaggcatatgttctctatcttacaatat

SEQ ID NO: 114632 - DNA, 435 bp, Glycine max
tactatgtcataatattaccaacattattttatggatactaccttcatatgactacaagatatataaaacagacctgtgccttcatttcattaaattgatgttacgatattgactgttcatttagtaaaataatgcaaatgcatctactctactctttctatctgaaattattggaaatggatatactaacggactgtaccggtaacttatattacttattagcaactactactgtgaaaatgatttgcggtcatttctatactactaaataaccgtaactcctctctcattcatcaactaacgaatgccaagagaatatatgccacatacgttctaattgatctacaatcaccacattattatgaactctgtctatacttgtctgcactattattttgctttgttgctaatctatccacagatcggctccaata

SEQ ID NO: 114633 - DNA, 66 bp, Glycine max
gacttatacctcgtgtttcgaccaatacacttgaaattgtactatcagagatactttgtatttctc

SEQ ID NO: 114634 - DNA, 349 bp, Glycine max
  unsure (1)..(349): unsure at all n locations
cgtctctcttcttccaatctcgatgctcgccaatcctctctcctcaacctcgttattcacaacgaaggtaccnctctctctccaagatgcatgcttttntgtgaattatgaaatgggtctgtgaatatggcttctgggtctaataagcagttgtatgactatngcagctcttnttatgtggtagtgcgcatatgcataggtgtgaataatcctcttttctatagaaagaatttctttgtcttgtaaatgacagaatggtgttggatggagcaactaataaatataccatggcatttcatttgatgtgtaaaaataactatgtgtgacagtggctcacataatgaacctg

SEQ ID NO: 114635 - DNA, 221 bp, Glycine max
tctaacttcctggttacaaaatgaaagcagcaaaatacctcgcagaacataacaacgtacaaggttgtttcaaaaaaaaaaattattttttcaattacacaaaaaaccctatatggacctctttaaaccaaccatctttctacttcgtccgccctccccaaacgtaggaaaaaaattattgatctaaaaaaaaatctggtggtgctcaggtaaccaggaat

SEQ ID NO: 114636 - DNA, 273 bp, Glycine max
  unsure (1)..(273): unsure at all n locations
ctagatgagatcaaatattaataatatctagataagataagataagaatagatctaantttgtagaataaaatagtctgccctcttcaagtccaagcccaattatggattcaacncaatgattcataattcctgaaattagataanaacatcannattgcttaatgggcccanataataaaactgcctaattaattngacaattaagactaatcagtacttataatggtgcannaaagggtatagaaataaagtgaaacaatgggacatcaat

SEQ ID NO: 114637 - DNA, 92 bp, Glycine max
tactacctctgaatagactgactactccacccttattctactaccctgcaaaactgaatcaaaaatctctcaaactctaaatcccgattcat

SEQ ID NO: 114638 - DNA, 62 bp, Glycine max
  unsure (1)..(62): unsure at all n locations
ctcttctnnttctttgcatacttttatgggtcaagaatcacaactaattattaatgacatga

SEQ ID NO: 114639 - DNA, 204 bp, Glycine max
tctagcttaagccactataaatgtaattccacctgctcgcactctcttgtctatgcatacaatggaagtcatgactacactgttgcaggtgccaagtctccttgccaatctagcatcatgacattggttcagtctactctgactcttgtcactgatcatgcctctatgaaacatttattaatcacttgtctgtatcctggttca

SEQ ID NO: 114640 - DNA, 106 bp, Glycine max
aacaccgatgcactatacacttaccattttaaaactttttccttttatttgtacctcctatggggacatcttcataccctaactcccctctgcccacatatctaat

SEQ ID NO: 114641 - DNA, 318 bp, Glycine max
  unsure (1)..(318): unsure at all n locations
ggatcttagcacgcgctgcactgcatagtaatatacaccattgtatgggggaaagacactcaattctaattgagtcttacaatanacgacntaaaaatagatgggtaatnattagatgtgagaatgaatagcannatatatacgtatattntcttccctgtaaaataatgtgcattagaatccacctctcgagcanttcttttggattatcaaacanaataccatgatcaaccatcagaccatccaccaaacgttaaaaatatgtctggtaggtggaantaaacataagtatcatgttnntaattaatatgtatcata

SEQ ID NO: 114642 - DNA, 281 bp, Glycine max
tggactacttactctcagattttctaacaactttcaagaagttctaaaagccctaggatgccctgcataactatctgtaacctgttgacttatgataaatctgtaaccacccaaatcacttcttccttcttctcaataagctcacctcttattttccttatttccattgactctctcactatctcaagcaatctgggaactcacttctgctatccattgatgactctaacttttctttctcgtgtttctgcgaaaccattagactcttactaaaccactct

SEQ ID NO: 114643 - DNA, 190 bp, Glycine max
aagcattcgttatggctaagtcacataatcacgctcttttcggatatctacatcagaaaattgcgtgatggcaggttcaatcatttacgtcgtttgcaaccatcactcctaaagttgcttgatggcaaggaactcatttacgtgtttgtcggcatcactcagaaatatgcgtgatgccaaataattatca

SEQ ID NO: 114644 - DNA, 182 bp, Glycine max
ctacactttattgtttcacgattcatttctttcacgaaaactgggtatctccgcctcttataatgggccagcttatgttaatgctctttgtgaaatttttcaacacatgactattttgtacttctaagctttgataaaataactgagtgacacttgacacttttgacccatctactttttac

SEQ ID NO: 114645 - DNA, 93 bp, Glycine max
actttctaccatgtcttatttcagtaaactgatttgggtctgcaaacactacatcacaccgcttatataacttatctaacagactctgttaca

SEQ ID NO: 114646 - DNA, 246 bp, Glycine max
  unsure (1)..(246): unsure at all n locations
cttagtcacctgngctgcagctggagtcacatatatatagaagagttcttatatgctttttgaacatgtcacctaccatgaatgactaattaaatgaactacagtaaatggatttgaaccaaggttgatgaatcatttacaaccaatatcaatgcaaccactgtaacttgcagtaagagcaaactatctatttgttccaaatgaagaactcataagaatanaacttcaatgagatgagcttacttc

SEQ ID NO: 114647 - DNA, 168 bp, Glycine max
gtctgttgaatgtttaaagaaaagaccctagaaactatctcctggctgaactggaaaatataaaagaaaactaattggctaacctaattattattaatacaatgaatgcccctcctttttagcaatgacacaatgaggaattgattcatcaattactgattgaatcat

SEQ ID NO: 114648 - DNA, 353 bp, Glycine max
  unsure (1)..(353): unsure at all n locations
gtcactgcgctcagctggtcagtcttccgtgaatcagatgcaaattttggacgcaaaacgtgaacttgcgaatctacgaaagtacgaacttcgagccctcgttaatttttacgaacattntcaacaattcaagaaaaatgccaaggctgaccttttttcttctccttttacaaaaggagggtgcgcactcgcagcactactgccagcagcagtgttctcaaacaccctttgagattttgaggtcaatgctgggctttccccatttctatacacccttgcttttgtgattttttagtcgactacatcgacatctgtttttgatgtcgactgcgtcatattcctttatcgtgtcg

SEQ ID NO: 114649 - DNA, 141 bp, Glycine max
gaatattattggaattttaaccattgttgccttttttttatgcaaaggatgcccctgttgtggcctatcccactttgttgcggaaaaattatttgtcgtccaaattgttaggaaacctcttttgctccgggaatctgattc

SEQ ID NO: 114650 - DNA, 317 bp, Glycine max
  unsure (1)..(317): unsure at all n locations
ctctaaagcanaaatggcatataacctnctnccatatatacaaacaccaatgtatatntagagcaagcttatgcgcatatntccttacatacgttctcttgcacaagacatntaaccnanagaagtgcacccatatacaatcaaggcagcttcgttacctatattatntacacgtactgccaaggtgtatntgttacttacatcacacacatctnctttggctgaatntacatacatgcatanctcaaagcatttggggaccaaaaaatgacatgtcacatcttggtattctaataccatatatacacnaacttatg

SEQ ID NO: 114651 - DNA, 269 bp, Glycine max
ctgcacttattctgtgagatatatctttattttttgtttgagaaagttatttgcagttaaatttttattattgggcccggaaactgctaggaggaacctcacgtgttgaatattgcaaaatacggaatgggattatggaaaaatctgcaaggtgagaatggaaaatgcttcaatattttgtggatatacaaatgcttcaaatttttggatgacgaaacctcaaatttttgggtgactagacttcaaatgccttaaatgacagtctccat

SEQ ID NO: 114652 - DNA, 206 bp, Glycine max
  unsure (1)..(206): unsure at all n locations
ctcacgaacaaaaaataagtctaattccatatgtntggtgcgagcatgaagtactgggttatntacaagagatacactacttngtgtgtcacaatgaatgacaggaagcttgtgtgggacaacaaggactangagagcttgtcttgacagtggaagaagagcttgacagcaaactgggaaaattgtacaggctatcagaacatatg

SEQ ID NO: 114653 - DNA, 94 bp, Glycine max
gttttctttctttctgctggagaagtgtgctctaatagaatcattttatagaactttgtcaatacaagttatctttcaataaggtgtaaatatt

SEQ ID NO: 114654 - DNA, 142 bp, Glycine max
ttggtggtatttgtgggaacctacgtaattttccaactttagtgaaaaactcataatctatgccgtcacttggtgttgtctgaatatgtcacctgaactgccaacattctagagtgcgattatttctgttcttgctactatt

SEQ ID NO: 114655 - DNA, 297 bp, Glycine max
  unsure (1)..(297): unsure at all n locations
tatttaatattactaaactntaacgtattattnntatctttggctatgggtttaatttataatagtatcttatttttgtttctgatataactttattgtatatttttgctgattgaaatctctatgatttaagatacagctatctacttttattttagatttctattatttatgcatgtgaaatttattaatattatatttctctttttatcaatagatatgtgcaatctcaaatgatatgatataactagtctcttcaatcatgggtgcactgatcctctaataaataaatcatta

SEQ ID NO: 114656 - DNA, 200 bp, Glycine max
tgggtccagaaaaaaacttttagtctttaaaccaaaatgattctggggtaaatgggtatgagaaaggcaattggctcatttttaagaatcactgtgttactacattccaaagtcacttttctattcaatagcttgaggatcaacctttactattgaaataaaagccaagatttttttaaacaatcttcagttttgaaaat

SEQ ID NO: 114657 - DNA, 110 bp, Glycine max
ttaccggatacattatttttctttctccaggagattggtcccctgaataccccctcataacgttaaggggctttttttccgcatattcaccggctgagctcccctcaaaa

SEQ ID NO: 114658 - DNA, 238 bp, Glycine max
  unsure (1)..(238): unsure at all n locations
caccttctcgctaagccaatctactggcttagcgagcatacgctaagccaatctgctggcttagcgagcatccgctaagcgcaacactcatgggctaagcgcgacgaagactctggtagaagatgatctgtacaggttcgctnagcgcaccacttcatctcactaagcgcaccgcttcagttcatccgctaaacgagaaaggcacgcgctcagccgaaattcactactctgcgctaag

SEQ ID NO: 114659 - DNA, 418 bp, Glycine max
  unsure (1)..(418): unsure at all n locations
caattactaacttatgctataagtagtaattcattaatccactatacattaagaaataactattttctaagtcgcttcatggacctgattcacgacaanagagttatggaaaagaactgaataattgaaggttcttgtatactatcattaattggcgaagagttaaattactttgagcataaaggtttctttttcttcttaaattgaccggngagaatactatttaagcttctcatgattgaaaaacatataaaatctaccgtgtggttggaaagtatcagtgaataattaattgtcttcatggctagtcctaaaatgaacatatcaaacacaaagacacgttcgaatcttcgagaatactttatccaatatattactatgagagcaactcagatgttatggagacgcgacactaaaa

SEQ ID NO: 114660 - DNA, 258 bp, Glycine max
tccttttcttgagcttttctatgaaactatgtatcaatacatttttagttattgtaatttgccagcttaatctatcacatgcttattataataacaaatgtgcctgtggagtgagtatttctgttattattatgaccataaatgtctgtttatatgacactatgtaatccctgtggtttatttattacttatttgcacacgttgtatgaagctaactcgggtttgtccattactgccacctcaaaaaggaggagttgg

SEQ ID NO: 114661 - DNA, 86 bp, Glycine max
atatatcgcaatcgcatcatcatgttgtccataaccatttagtgctacaatatatactagtatcttttatcttgaaatatacacat

SEQ ID NO: 114662 - DNA, 133 bp, Glycine max
ttactgcaatcagttactttttttgagaaagccagtcctttctctttgtccttatgtatttataaaaaagtgcaacttaattcttactagtgctattatgtgttgcgtacaccgtctctgcagattgcctagt

SEQ ID NO: 114663 - DNA, 68 bp, Glycine max
tcttcattataatagtgaagagaattagtggagaagatcacctgaatagagagtatgtgagaagagag

SEQ ID NO: 114664 - DNA, 434 bp, Glycine max
agcactgagctgcagctacactcatctttagacagccctattcatcttatctgtgttctaggctgccacttaattaaatcaaatctcaactgaatgattaactttagctaaaactatgattatgtattcatatattgccttcttaataagatatagtaatctagaaatttatgagacacctggactttctaaggaaaattaccaattcttgcagtacctagactacgaggctgatcacgttcttgaccacagtatttaccttgtggccttcactgagctgcagtgatctaattgtgacatattctcgctttgaagtaaaatagatctgagagttgcttaattcctggctgctataagcaactgtgatgtgtgtatgtttctcgtgccaatttatctttgcccatctactatgtattacagtttcttttaatcta

SEQ ID NO: 114665 - DNA, 295 bp, Glycine max
tatctactctgagagtttaaagcttggagcccagcataattagctggtaactgtgaattataataagctggaaacactaagtaactttcctttttattcgctcccttttttctttttctctgacacttcactttcagtattggggactcttctgtatcttgaggccttactttttgttctgattctggaaaacatagactatgactaaacactctaacccacactctacttcaagactccattcgaattataccgggttcgacggtctccactaactaggtactggtcagtatta

SEQ ID NO: 114666 - DNA, 297 bp, Glycine max
ggccttatctcctccctacattcgtgatagggacatctgatgatttgacctgaacacttaaactgttgtgatgtccgactctttaagcccatgtatgaacacgtttctacctcatgattctacaagctcttgagcctgcattaacccttttgctcatgaagtgaaatgacacaccctctccagtaccattatgtcttagaatggccatcgaggaacttgttcaagctccgtgaaatgcgcaaattatgtcactgtacacagatgatgcgaacaaactcgtggcgagttccttacccc

SEQ ID NO: 114667 - DNA, 117 bp, Glycine max
tctaagctaacatcattcgagtgtctcattatacggcctcatcgacatccagtataagttattgtgttgaataggctcaaagcttaaacattcaacttctagcgtctcgatatatta

SEQ ID NO: 114668 - DNA, 380 bp, Glycine max
  unsure (1)..(380): unsure at all n locations
atccctggatatagacaactatgctcgactnggtgtagctacatttggatggactcctctatatcggtacctaattatagntactcannatcaaacagattgaagttggagttgtgtgccagtgattgattctatcatgggaagtcgttgtggattctccctgcgggtactttntggtccagcttttcttcgacgaatatattcagggaatctatttgcgaaagccaccggatcgcagtttaaaagtaaacggtgaatcaagtttgacacaggaactatgttacctgagtaagtcagaatgaacactgtgagagacatgatgatgataattaaacacattaactaacttttgctaaacataaatgaagtagtaaaggtac

SEQ ID NO: 114669 - DNA, 264 bp, Glycine max
tggctgtatcataatcactatttggtaaaattggcaatgattactctccatttgtattttaggcgaatcttttgtaattagtatagactatactcatttggattatatcttccttcattcagtataacagttggaggctgtttactttctaccattgcgattaaagagttttgaattgactctaccttctgttgctgaatgatagatatggtactatttaatctagattctcgttgctaaaactgtcgtccacggacaaaaact

SEQ ID NO: 114670 - DNA, 355 bp, Glycine max
atgtgtgatctgtgatgtgagagtgactgcacatcgccgacgcactatacaatggaggtccgatatctacactgaatgagaatgtgaaatgtacacttctactttattcgttaccacagaggatcctgagaatgtccgcgtcagaacctgggagcaagtgggtcattgccaaccaactgccatccgccacctgcatgcataggaacctgattctaaagcactttgctcacgtaaaacaaaccaaccagagcttggggtgcactggattgggatagattgcttgatcatcccgtggatcttcagtaaacaacaaactgagtatgattctcaggcgttcttctctaaataacgtatg

SEQ ID NO: 114671 - DNA, 178 bp, Glycine max
  unsure (1)..(178): unsure at all n locations
ttatctagctaccacagatgggctctgtctacaaccctgcattgttaaatacaacnctgtctggtaatagttttaaaagaagccccctaggtaaattgccatgacttgcgtccagcgagtacatttaatgacttgcgtccagtgggttgtgctattgacttgggtctagtgacatgtg

SEQ ID NO: 114672 - DNA, 457 bp, Glycine max
  unsure (1)..(457): unsure at all n locations
cggcctgaccttatatatgcctgcgctacctgataccttntaaagcctcttctaataaatattaatantttatggagtaggaacataatacgaaagttaaagaaaaaggacagtcaatcaaaataatgaggaatataancaggaacatgactcacacctacattgtaataaacgtccttgatataggaatagaagttataggcagtaatgtgaatcaaagtctgatagttcaaacaaaataatcgtatcaacaataattaggtaatttattatatatggccggctatcacgttataacgctntttatancctaagcctgatctgtaatatatatgatttaaaaagctgagctactnttattaatagcatgcagcatcttatgtggcaatcgtagcctgtactgctgctatccccctacttatacattatgacttcgtgaacttatgagtgactcact

SEQ ID NO: 114673 - DNA, 221 bp, Glycine max
tctgtcttattattcccagttacctcatttctgagttcgggctgtaagtgatcacaaataaccgttaactcaatctccttgaatagccatatgttaaattatagctacctcatcatgctggttaatagtcttcattcatctatttgggctacctttactaattctccaaattttagttctttaagcataaaatgagtgggtgatggtaatatataaaaact

SEQ ID NO: 114674 - DNA, 212 bp, Glycine max
tcagatcagatcagttcagatcagttcagatcagacatatcagatcagaaatcatatcagatactttaaatggtttcaaactagtaccatgattttctaaacctttaccaagagttttctcttattatcatacagatatgtatcgatccaattcaatggttcaaatcttcactgattcacatccatgattcaatgtgtatcatcaagtttga

SEQ ID NO: 114675 - DNA, 213 bp, Glycine max
ctacggtttttatttgattttccacgaatggttgcagactggttgagaaattaagtatctatctgcttacctgaaatgttatactgattatcttcgctgttaaaatacttccaaacttttgggagtacaatttaaatataagtcgctaaatttatacgagaactgaatggctcgaaaccattttattccctaagaccaattcctatggtgttg

SEQ ID NO: 114676 - DNA, 223 bp, Glycine max
actaaatagctgttggaatttgtcaatttggtgccctgttatcttgctaagtactgaacccctgattggttttggaaataggagagtcacaagggaaattttctaatgaattatcgggatctttatcaggggagatatacttcattcttaaaagaggacaaaatgtgattttaggggtgagtgatacagtagctatattgattaccagcttggtactatttcc

SEQ ID NO: 114677 - DNA, 178 bp, Glycine max
gtgagcaacaaacatatagacaatgttatgaagcttatgaatgtgggttgaatcactgcatctaacaattacactttgactatgaggtcccaaatgaattcatttttacatgaacaaagatgtctatcatggagacctaatcttgattgatgacatttccgatgacgtgggatcaaat

SEQ ID NO: 114678 - DNA, 159 bp, Glycine max
  unsure (1)..(159): unsure at all n locations
gcataattggcacgcatgcttaaagcctttcttctctgcttacgttnatggatggggttggaattttttcacacctaccctccttacctgtctaaaagttcagagatccctaacccctcgtcctaacccaggattcaccgctggagatcttttcacaac

SEQ ID NO: 114679 - DNA, 161 bp, Glycine max
ccggtccagtcgatctccttattggcgatacaatcacggcgcgttacacgtgtactggaaacctgcgtcccactaatcgcttcaaaatcccttccccctgcgtatacaaaagccgaccatgccttccacattccacctaatggaatgccctatgcgatttc

SEQ ID NO: 114680 - DNA, 157 bp, Glycine max
  unsure (1)..(157): unsure at all n locations
ctcagatgaaaatagtagttgaatgctcaaaatcggaatattcacaatcaccagcaacaaaatactcagaatgctcacaatgctcacaatgctcanaatgcacagaatgatcagggtgcacactatgcctaactaatctatgaaaggttctatctat

SEQ ID NO: 114681 - DNA, 289 bp, Glycine max
  unsure (1)..(289): unsure at all n locations
actacttatgaatgctccaataattgatatatcccacattngaagggtaacccttggcattatcttgcctctgtttctttttgcatctaaatggatggaagtcattactgacatagctgtgattaccgagagatttgttcaaagtaatctgtccatgtaaaccagagttttgtttgcattttttccatcacataaacatatgttgtggctatttggcttgtgcactatagtgctgttgctgggatcaatctacttgttcacactatcgatcagtcttctatatattctc

SEQ ID NO: 114682 - DNA, 330 bp, Glycine max
  unsure (1)..(330): unsure at all n locations
tctattgaanataacaattagttcttgacatgcactatgaagaatntttcatcaagctaactatcaattcttcgaacgttttatgttctgcatgctcatgtttccacagtgaagttgaacatacattgggaatnttaattactaattctgtatctcatgcttntgatattgagcaggaagcgcactatactctttgattatgtagatcttgtgacaaatgctatactcatatgttgcctctttgttttcatttaaccctcctaccttacaccgcttctttattgcaactatagagttttgcgactatacactattgatattttaaaacta

SEQ ID NO: 114683 - DNA, 204 bp, Glycine max
tatttttgttaacagctccgcgggctctatttatggtatttcatggttgtaaccctggcagcttccacagtatggagaattgttttgttattgaataatttctgcgcacatcggttgtcatgaggaacaattcttagaattgactgagattgggtatcattttgtctcgcttaaatcataaataatctcagatttagtctatcc

SEQ ID NO: 114684 - DNA, 280 bp, Glycine max
  unsure (1)..(280): unsure at all n locations
ctcagctatgtacaagtcgtctatatctcctatcttagcantactatntctctggtgctcatatctttctctacccttatcattgactctcttgctaccagccagctatctatgataatgcagtgtngtgactttgactataaatgctcactactctaatattgcatagacatatacgtgggctatttatgaaacaacatgttatgagagtgacttaatgagtgatataaagtagtaaactcaacatgttactggaagtgaatggaatcagttgatacca

SEQ ID NO: 114685 - DNA, 249 bp, Glycine max
gtgtatgcgcctagcctagcttaagtttctcgaccctgctgaggatgctacagtatgtctgcttatgtgagcgaatggtgcgagaatccatgataccactcttctgcattgatacatgtgtgacccttctgcttgttcaggattattcttttatgctacctaaccatcaaaagcatttttactttcacaattaaactgttgttttttgtgacctgatttgaaacaccttggtatctcgaaaaacttcta

SEQ ID NO: 114686 - DNA, 301 bp, Glycine max
  unsure (1)..(301): unsure at all n locations
gcttagctacacacaccctctaatagctaagctcactcccataccaaaatacatgagaattcaaagtctctgcctcaaagactactcanaatgccctaanatacaagactaataccttatactactagaatggccaaaatacaaggcccaaaagaaggaaaacatattctaatagttacaaagaagagtggacccaaccttggcccatgtgctcagaaatctaccatgatggtcatgagaaaccccaggccttctttagccactctagcccaatcccctctgagtcttctattcaatatct

SEQ ID NO: 114687 - DNA, 425 bp, Glycine max
  unsure (1)..(425): unsure at all n locations
tgcagcttcaccgtcttcgacgtctattcgtcttatcgtcttgatcttaacgggttttcctcaaccaagctntcgatcattctatgacccgtagggccacattgtgttcgtgctttttatctcgtntgttacttttatacccctgtgacggcttagccatttactaagtatttctgcttacttaaaataaataaattccaccgacgttgaatgtataccataacttcgtaaacaatccgaccgtcgcgtccgaacccgtggaatcaaagagtaacaatattatatcaaagacttttaggaatagcgaaacaacgcgttctttggatttatctatcgatgtatactagaacaggtaacactgcttcactgcaaaatagttgagtgattctctatagaaggtcattagcacctaagaccttaaacaa

SEQ ID NO: 114688 - DNA, 369 bp, Glycine max
acttatctacttgttgcaatactcgggatctctttacctgttcttgaataatggtgacttgcgtaacctgaaaataaaacataaatgtatattctcttttaaacagtaagattttattatactattctttataagatgtgccaccatgatgtgtgtacgtcaattacaatgatacgtgtcatccagagatttttagattttatgttgaataaatttataaaatacttaaaaattattttgataaatatcaataataattttatagttaaattgattttactgtatcaagcaatattatatactctgcataccttatacaaatattaaaactgtaaaatatctgtataaattgtcttaaacaaatataat

SEQ ID NO: 114689 - DNA, 206 bp, Glycine max
  unsure (1)..(206): unsure at all n locations
tcttgtgttttgttgaatgaatggattgatcaatggcatgaattgagtgaattgttatgcgcagatcatatgccttgaattagtattcagtaattagaagagaaagaacatggattnggtcatggttgaaatgtatgttggtttgacattgaatgtgaagataatcactagccattacccgatgagtgtgtgatctttatattgtg

SEQ ID NO: 114690 - DNA, 381 bp, Glycine max
ggtcttatcactggctcactgcatagggacacgcgccttttcattatctccaactttctaactgttacacaagcccttctcaagcgtttgaattaaggttgattgttggttatcttgatattgcgttttatggaggtgcttctagtgtaatatcttttttttaaataatttctgtctggaatgacaatggggtgatggtcagcataatatcctgcattcattgatggtgaaatacttttgaattgctcacatatgaactgcggtctcttgaccatgtatataaatggattttctaacttgtgtttcttctgatgatcgaaaaaaaagtgggttaaggtgaaggtgtgaaaaaggagtttttagtttttttcgaaaaggttg

SEQ ID NO: 114691 - DNA, 268 bp, Glycine max
  unsure (1)..(268): unsure at all n locations
tcatcttcaatgtgctcatgtgctgtatttcacaagaaaatttataaagatcactataaaaagtaatatgacatgggagagtatataataactttttgatagacaaaagatngaagctaatatcacgaaccacaagaacattatggataataaaatctggagtgaatttatgttgcccanatgtgggcttggacagtggatccattgtgtgaatgaatcttactggtcaattgtaaacatgatataaacatctaaggacaagtatatg

SEQ ID NO: 114692 - DNA, 366 bp, Glycine max
tatacggctcactttggtaaattgtatatatggtatgtctctttagcattgaactatgcagatactccttccacttcaggaccaagggacttagttatttgtttactatgaaaatatgactccaacgggggggtgttttttttctccgtttgatcttgttcctcttttatttcctacgatgctattccctctacatccactctcatttgcttactccccctcttttttctttcactttctttctcattgtacttttttattcttgctctcacttttctcgttctttacccctttgcttatcgtctctattttatccttaaactctatgtttccgtctctctctattcttcgtacttactctttttt

SEQ ID NO: 114693 - DNA, 227 bp, Glycine max
  unsure (1)..(227): unsure at all n locations
tctaatgcacgttctattcttgttctttctttgtctacatacacacttgctgcaactcatgataagaaacacaaactncatcacaatcatgcgttcaattcaaaaataaagcatacacccatattcataagtcaataaaagtgcttcactggcatgtcatcaaaacaagttaaactgttcaaaatacttcttaataagcaaactaactacccattaagaaactagcg

SEQ ID NO: 114694 - DNA, 135 bp, Glycine max
  unsure (1)..(135): unsure at all n locations
caaacattgatgctggtctacaacacccaaaattattgcaagcatcttcaccattgtggttcanaatatcctaattaacacttgtataaaaattttggaaaacaaattgcgttgattcaaccttatattgtgagc

SEQ ID NO: 114695 - DNA, 250 bp, Glycine max
  unsure (1)..(250): unsure at all n locations
taacctaaaatcagttagctcttcaaagtgttaataaacctganattaaacccatcanggtcccggcttttgtcgctaccacaattccacacagcacaccttatctcctcttcattaagaggctcaaccatcatctccctctgagtaggagacagagtattaaaataaaccccatcccaagtaggtctattcagatgaagttcgttgaatctactctggaaatgctgaanaattctgccttaatcaagtc

SEQ ID NO: 114696 - DNA, 272 bp, Glycine max
  unsure (1)..(272): unsure at all n locations
gaactctgaagtctaatttctcatatgatcaaagttgcaaaatgcacacacaaggcctctatgtatagcctaagtatcacacaaaattagaggagaacgtgaatttctattcaaatttcacttgaatttgattntgaatatgaatgtgtggagccaaataggagccnacactgtactaattatgaatagtgaatgtcagctatgcttcagcccactaatccaagatcaaatacacgattatacactaagtgtgcttaggatcatgaacatgt

SEQ ID NO: 114697 - DNA, 132 bp, Glycine max
  unsure (1)..(132): unsure at all n locations
gacagcggcggcataactagcctgatnaatgccanagganatcgtgggaagtatgggttaggctataagcccactcatgcagatataaagagaagcatcgcgggaaggaagaacggtagtcaaagctcgcag

SEQ ID NO: 114698 - DNA, 200 bp, Glycine max
ttctcgcggttgatgacttgaacaaactgctaatgggagctggcaaatctctgtttggactcaggaagtagatctgtccacaccatgagaattctctactgtgtcaagaccagctgacaatcatatatatgctgcatgtccaacagctccaatatattcccaatcagaccaggatgataaatgtaaaaggaagattcttg

SEQ ID NO: 114699 - DNA, 252 bp, Glycine max
  unsure (1)..(252): unsure at all n locations
tgcagcaacctggagcaattgagcagcctgaagcttatgctgcaaatatttacaatagacctcctcaacctcagcagcaaaatcaacctcagcagaacaattatgacctctncagcaacacatacaaccctggatggaggaatcaccctaacctcagatgggccagccctcatcacaacaacagcagcctgctccttcctttcaaaatgctgctgggccaagcagaccatacattcctccaccaatccaaca

SEQ ID NO: 114700 - DNA, 200 bp, Glycine max
gtcactgagctgcactggagtatgggccttgtaaaacagattttcttttgaaccgactaatgagtgcataggatgtggtatcacatttggaggaaacttttgacatcccgaccccctatccctgtatggtccctatctcagctgaatacagttaaaggtgacctcgcttattatacacaaggtcctgaaatgtcgggcag

SEQ ID NO: 114701 - DNA, 265 bp, Glycine max
  unsure (1)..(265): unsure at all n locations
atgataantggtcatcaaggtaaatgacttggctgagaatataattgtgtgtcattccaatatgaacgaatatagcgtcacatgatctgaataccgcgatggcattgatggatcangcaccacaattaattagcatatggctcttttagtatttggtgtctgtaaaggagatatgaaatatttacgaagatttagtagtataatttatcacctcattattatttgtatcggtggtagaatatctaccgaacaaaatgtatgattg

SEQ ID NO: 114702 - DNA, 214 bp, Glycine max
  unsure (1)..(214): unsure at all n locations
aaaaatatgtgtggatctcatgtctctgtcatattattctaattcaaatatatntttcatcttattctatttcatctctttccattctaccaagccaatcctatatgtattntatataaatactactgaaaaaattgtgtctttatctttatttaacaagaaataacaagaaaaagtagttatagaactgataggaagttttggtagagtaatg

SEQ ID NO: 114703 - DNA, 65 bp, Glycine max
gatctctcgagaaactcaaatgggcataacttttcactcagatgtccgatgaaagcgcataatat

SEQ ID NO: 114704 - DNA, 92 bp, Glycine max
  unsure (1)..(92): unsure at all n locations
aaatcaattacgcgtacagcatacatcattgtcataattgacaacacataatgacatgcatgccgtgtacagttngagcgtacaacacattg

SEQ ID NO: 114705 - DNA, 93 bp, Glycine max
cttagtcactgcgctgcagctggtaataatatagtactacgtattttttttttatggtgcccgatggggtatttctccaaattccacctattt

SEQ ID NO: 114706 - DNA, 53 bp, Glycine max
tggacctcgagttgccttcattgatgcggcccacctcttttttgtgttttcat

SEQ ID NO: 114707 - DNA, 83 bp, Glycine max
  unsure (1)..(83): unsure at all n locations
aggcttgactcagctttaccccgtatcngtctagcctcctatgcatactactatggctatgctgggtgaccctttaataattt

SEQ ID NO: 114708 - DNA, 240 bp, Glycine max
  unsure (1)..(240): unsure at all n locations
tacacacactcatctataaactaagctcaccttcttgaaaagcttccttgagaagctagagcttagctacacacctctataatagctgagctcacncncgtgacagaataacatgagaatacaaataagatcctactacaaagactactcanaatgccctaanatacaatggctaaaccctatactactagaatggccaacatacaacgtccaacagaagataacaacctattctactat

SEQ ID NO: 114709 - DNA, 340 bp, Glycine max
  unsure (1)..(340): unsure at all n locations
ttgcgttgatctaacttgattctatcatctacgtgagcagacacnacatgtgggaagtgatgatacctgagaaatcctttgtgtcgtattgattggctataacattttagttgatgaaagttgaactgatgggcctatatctgaaatttcttgtcaactgcatctacctataataaccttatactctatcttctcatttttaattgatcatgcatacttagtggcactcacattgtataacttacctacttggtaacattcgcagattgtacataattctggctagatctatacttgagctgtttctattattctagctaatactgacccactgattgtc

SEQ ID NO: 114710 - DNA, 233 bp, Glycine max
  unsure (1)..(233): unsure at all n locations
tgcatgtatatagcananatacctcacanaatatatatatatgtgtatgtctaggtagcaagatacctgtgatatgcatctatatagcaaaaataccccacaaaaatatacatatgtttatgtagcagaatacctcatgacaaaaaaaacaganacaaaaaaataagttgtctactgaaaaaaaccaacatgctntgaaaagaggtacttcagctttctttgaaacactgatc

SEQ ID NO: 114711 - DNA, 186 bp, Glycine max
  unsure (1)..(186): unsure at all n locations
cacatccttgaatcaatctttcaacatctctcaatattntcttttatctctttcaacactttcanaagaactttctaattgatttctcttcatcattctaaaagtttgtggtcaacactttctcttccaagaaaagttctcttgataaaaactcgtgctattcatcttgttcattctcttctccct

SEQ ID NO: 114712 - DNA, 184 bp, Glycine max
  unsure (1)..(184): unsure at all n locations
agccgaaaacaagctgctcggtgtccgngatcacagatgaaaaataaaatacagtggctccgaaagagacgcgtttaaattttaactaaaggcaaatggcattcactaaatgtggggcccacaatattgtggggcacctacactcccgacttattgtggccccagatttttattaaaatatctg

SEQ ID NO: 114713 - DNA, 181 bp, Glycine max
ttttttgctatcatgaacctggagaaagatgcttgtgtgggaatctcaattactgggacttatcaaagaatagaacttgagatcaagatgagctagattaaaaagaagatggctcagaaatagatgactgcgaaattaaacacggtcatgatctgcattgaggacactatgatcttcgaca

SEQ ID NO: 114714 - DNA, 327 bp, Glycine max
ttcatctcgcttattaagcttctcaagctataagggctgccactcaacttttctgatccatgtaatatgacatgctttgagtgcaacaattcaaaatcacgtatgagtgacggtttacagactctgtcttttaaactttaagctctcaactctgtgttttgacttctaagcttttgacttaccttcttcccccccctttactaaaaacttctagaaaatacgtgaaatacccacaattatcaacctcaactaatctatatattgaatatttccggggtctcctcctcctaaccatttgaacaaaggtgctggctcaaaaaatacttg

SEQ ID NO: 114715 - DNA, 360 bp, Glycine max
  unsure (1)..(360): unsure at all n locations
ctctactctatgtaagaccatctgtcacagattcttcaatgtatgtcacaagcatatttgagacctgtctgcttggaaaacctctgatggctctacagatgaaatttaccatctttacanatgtgttatataccaatgggaaaggtttaagactgtatgtttcataaagtgacctcagaaaagggagcctttaagtgaaagtgctaaacagatgtgcattgaagtagaaaagagacagcgagtgtgtaacctaatctgtgattgctttaggctgctacactgactactgcacctgaagtacacacttgtactctcaacatactcatgcatgctgtgacactcccttggaataggttctgg

SEQ ID NO: 114716 - DNA, 322 bp, Glycine max
  unsure (1)..(322): unsure at all n locations
ttatttttgctcctttacaagttcttttctctgtgcttcacttctgtgtagcagtgctacaagctcatcttagtgttctttcaaatcctgaagttccatattctttttccacaatttgcacctggttaagatgatgcaagctaccattactttgaatattatgaaacaaatagcgtataagaaattgcaacataactggcatttaatatagccaagaacgacaaaaataacagaagataaaatagctaatgccctgttccgaaagtgaagcatctcanaataaaggagatcatcatatctagtatcaatagtctgacatact

SEQ ID NO: 114717 - DNA, 344 bp, Glycine max
tagcttgtgccataagctgctaaatactttgcctgagagctagtgatttacgatcctattgtggaattaactgaataaatctgatgcatagtcctctcaaatactttggagggattatgcgtgataaaacgctaaagaatcaagctttgaataagccattttacgttttaaaccctaaggcttcttaagtttcaacgctaaaattcatgttaattatttctcccttatgttatctaacttcttattcactccttggtctacacactcgcgtagaccattaatcactttgtgagtgttgttgttcccagcttggctttccatatgatataccctagggcctctct

SEQ ID NO: 114718 - DNA, 109 bp, Glycine max
tttaaaaacaatctatctatccactcttattactaatatccctaaaaataccgtgaaaaacgcgcaataatcaccggtggacataatttctactatatatagattatat

SEQ ID NO: 114719 - DNA, 383 bp, Glycine max
ctgcagctttgtttatacagcgctcaatatactggctatatacatcagtaaacactgcgccgatttttaactttgttcatacagcttcatgtctatgactaatcacatccagcaagtttgtcttgaaatctaactttgtttaatacggcgtgaatttaggatcaccgcaccggtaaatatgtcttgatttctacactctttaagcacgttgaattcgaccattgcatcggtaaatttgccgaattccaactctttccttggcgtcatttcggacatcactccgtaatatgctgattcaactcgttaatcacgtatatcagcctaactcataacttgctgttcaccttttaataacgcgattcgaaatgcacagaattggctat

SEQ ID NO: 114720 - DNA, 76 bp, Glycine max
taagctgataaacgacttggaaataacacataattaccgagtcatgacctgatttcaacctcaatgaacgacttaa

SEQ ID NO: 114721 - DNA, 420 bp, Glycine max
  unsure (1)..(420): unsure at all n locations
tcgacctttaactagctcgatanactgtgaanatgtcactaaagtgataggattaagtgatnacgaaaaacaaacggaaaatgagaatgaaaaaagaagatgacggctctagacatactgtaaaaaaggagggctttatgcatctctccaggcatggtagaaactcaataatggccaaatgcaaaagcctaggtctatacctaggaattcgccctggctatcacccctatttgaaataataagttatatattggctgtttagctctatgagaggacctaaaatagatttagcctgtntagcactaacaatttgattaggagttgtattacacctatgtattgtggtggtgaataataatgatgtgaccatcataattaagggaggactgtctcccctgaatattacaactgctgctctct

SEQ ID NO: 114722 - DNA, 133 bp, Glycine max
aagaggaggaccagcagcagccagccgcagatgtgccgccaccacttctactgcagccaccatctctagagtccatctttgctcacctgcgaaggatggagctctatatgcatgcatatatgtagcatgtgac

SEQ ID NO: 114723 - DNA, 325 bp, Glycine max
gtacgtccactggaaactacttcaatgtgctccagaatggccagactgctaagagtcgaagacaagggcgagacagtcgccggagacacagcacgttagacgtgcaccacccttaaccatagaggcgtttcgagcacgtcctaggcacagtctgttcgagaaagggcgcgggacatgtactctggcatgacaaaagctggttatcagtgcacagagcgctataactggaggaggatcgcatcccttacctctggatcagtgaaggcatctttgcaggacttcgccaaaccccatttttctccttttcttctaagttctattacac

SEQ ID NO: 114724 - DNA, 273 bp, Glycine max
gaaagttttgggccataaactgtaccgaacttaagctgagcgactgtgaactggtatactgccggcgacattgggttaccctaaactccacgaagccggtctgttatacaaagcggttaacgcgaaaaccaacttccccggctaattacctcacgtgtgcaaaacgggtgcacttaaaactgggacgtggcaacgaccagacacactgtgcaactcgcgagtgagtcgctgcagttacgaatcgatgtctactgaatgcacaaccggactgtg

SEQ ID NO: 114725 - DNA, 264 bp, Glycine max
  unsure (1)..(264): unsure at all n locations
ctagctgatgctctgatagaccggtctcgagctgtgttactgttctccacctttgtttttntattattatgaactctagttatattgtttgcanatcttatcctttatatatccttttgtgagggttttttaagaaggggagcacttgacactagatgtgagcttgagaagcttgtcttttacatgccaactccntgagtgacattgtctgattgatgatcttactctctatcttctcgtatgacatcatgcatcactcatgtg

SEQ ID NO: 114726 - DNA, 209 bp, Glycine max
  unsure (1)..(209): unsure at all n locations
gcacatatggntcaattctattgatgatgatcttctctctaagcttatgtattgcatcgactgacatgaataaatagggcaatataattcaaaatacatatcattctcacattgacaagtacagagaagagagagaatctttacagaggtctcatgatattcaatggcctattattataaatttacacacgttgagtaattaattgctc

SEQ ID NO: 114727 - DNA, 353 bp, Glycine max
  unsure (1)..(353): unsure at all n locations
gcttcgaactacacatgttaaatggaaaatgaataagcttaaatatatggggattaaagagaatgaatttggaagataatatacaattcactaaactctccaaagaattaaacagacttgtaaganaattacaaatttgaggtgggagacactgttgtctcataaaaatagcctcttaattttgacaatgattggctagaatctatttagaactaaatattggtatttctagaggccataagagagtaatggctattaaatactatgacaaggttaaaataaactgtgcctgatacagtacagcgacacaggtactgaacactgatatctactggagatagatcaggaaggtc

SEQ ID NO: 114728 - DNA, 205 bp, Glycine max
  unsure (1)..(205): unsure at all n locations
ttatttccatcctntccttaatcaatntccgcattntccatcanagtgtaatcttacacgatcctaagtcagcccttgtgccatgaagggtgcatatcattggtaatcagagctccggctctatgatcaacactctcttngctggagatattgngtaacatccttctttattctctctgccatctatattaccttcttattcata

SEQ ID NO: 114729 - DNA, 182 bp, Glycine max
  unsure (1)..(182): unsure at all n locations
tctctctcttccttctccattccgctgccatttatcttccaagaagcanatgaatgcattgatgaagaagatcctatgcctacaagctctaatggagcttgcatcaggtacttangaatggacgcatatggatgatanggtcacgaccgaccgatctgtcatccttcccgtgctggacaagc

SEQ ID NO: 114730 - DNA, 261 bp, Glycine max
acactgaaaatgcgcaataaagggaaaaggaaaccgcggatacttcttcgcaattccacacccacaagcttactagccatacaacctcttcttcccaccaccatataacaaggcattctaataacccaagctgctacccttcatacaaacactttccaacaaaaaacccacaaatgatttgacaaagctgaggtccccaatccgtgcatagccacctgaccattctactgatatcatggatcatacctaccacgtatcact

SEQ ID NO: 114731 - DNA, 117 bp, Glycine max
tttttctcaacgtcataaatttcgctccgtgggagggtggacacggtagcttaatcaaaaaaaaaaagcttgttgctgggttcagaaaataaccttgtgactcttttcttctgaagt

SEQ ID NO: 114732 - DNA, 233 bp, Glycine max
acacatgacgtatgactcaactgcatgtccttacactagctatgtctgctaaattcgactccatattccaacaaacatcatgctgaatacgcaactctgttattgaatgataatcatatgattattaataatctacacataatattgctctctttcttatcaatagttctacaactattacaaacgaatgaacacatatatttgaattaatatatcaatatgtactactatat

SEQ ID NO: 114733 - DNA, 374 bp, Glycine max
  unsure (1)..(374): unsure at all n locations
acaatagctcctcttgtaaagaacaacctgtatggatgctcgcaatatatnnttttgtcaaaatctctntagtgattccacacatggatctatttaacacatataggaaggaagaggaaaaagtattaacacctatacgaaggcaatgtaactttcctaacatcaaatagttgtatgaaccatagtataattacctgtgggtccttatatgaatgaccatctttgattaacatgacgttcttgcttatgtcaacaactgataatcacatatgttaaaaaagagataataatctagattgtcctccaancatacccatatttattctatatgataatatgcaatagaaatactactatacttatttttactcaag

SEQ ID NO: 114734 - DNA, 168 bp, Glycine max
  unsure (1)..(168): unsure at all n locations
ctatcaaagaggttcgatcactggntganggaagcatccaattgcaatatgctaagctttgggactattcacatgagttacaagaagcatgaagatcactgtgaaatgattacatcncatacctagacctctccatattccactgaattatatatggtagatcatgga

SEQ ID NO: 114735 - DNA, 94 bp, Glycine max
  unsure (1)..(94): unsure at all n locations
acatgaagatgtgagaaggtttggttcctaccatngaacagttcatatggaagtttctatataatgggtcctattaaagccatattcatgatat

SEQ ID NO: 114736 - DNA, 388 bp, Glycine max
  unsure (1)..(388): unsure at all n locations
tcttatacactcggagtgatcacctgcagtcctcttgaacccttaccacncactctgtcatcatgccgacactcangaagcccaacagctntagccttctctaagtattctgaacaaaaatcaatggcttcttctgcaatgtacctctcaacaatagatgcttccggatgatatagattcattgtatacnctcttaagatcttcatgtatcgctcaaccgggtacatccaccgtagaataacatgaccacagcatntgatntctctgaccagatgccacaataagtgaatcatgatgtcatagaaagcaggcggaaaatacatctccaactancagagtataatngacggcctcattntcaactcatcaaacattactggatcaatca

SEQ ID NO: 114737 - DNA, 392 bp, Glycine max
  unsure (1)..(392): unsure at all n locations
gcgccttgaactcagctctagaagttctanggagctctcaggaggangctgagtattagagtggttgttgtctcttatctctagcctctcaaggaagtattctcanagaagcttctcaaggaagntttctcacgaaaacttctcacggaagctatctagtctatacatagaagcatgtgtgacactatttgtaactctgatgaatgagagtcttgtgagacacaactcatagttcaacttctctcctcgttttctccttcaattcatgttcccctctctcttcttttctccattgagcatctttcaacttctatccaagacatctggtgcgaagctctcttcatgctattcctagggagggcctcctctctctctacttgctttgctgatct

SEQ ID NO: 114738 - DNA, 111 bp, Glycine max
tatctaaagatcttcgggacgggaacgccttatacatgctctttagaaccctacacagctgctgtcatcagtgcagaagacatatttgaaccctacaccatttcaccttga

SEQ ID NO: 114739 - DNA, 184 bp, Glycine max
ctttcttctctcttatttcggttagctagctctctttcttcctatatttcctcttacattcagtcaactttagttataataaatcattcctattgataggaagctagccgagcgtgtttcctgagatcaccagtctttgagtcatatacgaaatctgtagtttcttcctatacttgatttgctt

SEQ ID NO: 114740 - DNA, 290 bp, Glycine max
gcgcataaccaccatccctgatgccacctcactgagtacgactccacgtaccatatcttgtttgtaaaccggtaccataatcttcagctcaaacatcaagaaaacataacgcacttcagcaacaacgacaaggaaacttgtaacccaccaatcagttttactaagaacagacattcttatcatcgtaccgtgacacccatattctgagtttggctaccacttgacgtgactatacaaataaaactatttgctattttacagcaccaaaacacattttggccagctaatct

SEQ ID NO: 114741 - DNA, 134 bp, Glycine max
  unsure (1)..(134): unsure at all n locations
ctctctctcctctctctcttctanttttcgctttaagnttagcctctcttctctctctctcttatnttcnngttttacaantccagttcagactntttagttntatcaataaaattcattctctatttgataat

SEQ ID NO: 114742 - DNA, 180 bp, Glycine max
  unsure (1)..(180): unsure at all n locations
atgagagaganagattgtntaatcaacaacagacttgattacncaacccacctctagccgtctgagcagattggtttgatgagcgtntattctatcaatgagaaacgaattgtcaaagagtttataataacttatggacattcttaacaatntgagtagacgaccatgcgaatgtgtagt

SEQ ID NO: 114743 - DNA, 316 bp, Glycine max
  unsure (1)..(316): unsure at all n locations
ctcagctgaggaggatgtagcttgtcgtaatgcttgaccttcaccaccatctgcatatatttagaaatatattattatanntttaatttaagccttgtatntggctatgtnntatgacattcgaatacttagtatttcttttcatatntacttagtatgactgaacatgatgaaatatattactcgctntctggtgnttatggttatgtgtgttaaactctaattatctttatgatatatatgtctagtgatatgtacttacatctcggattggcgttgtatgtatgtcttataatcattcatgtatgtcttattt

SEQ ID NO: 114744 - DNA, 348 bp, Glycine max
  unsure (1)..(348): unsure at all n locations
tcaactagcgagacanaanagctggttaaagacttanacacaatagatgagtgtaanagttagtaggatacaagctatnnttatcatttataagaataattagtgccttatntattagtggaagttactaatagtgatctctctagtaatatcttcgcaatntatgatgataccttaacagactacactatanataatatatatcaactgtaggatcaggatcttgcctttatgatctcttatgttctgaaacaccacagttgagtactcaagctctaagagaacgatggatgtcttcggtattttcaccttatattntcctcttatacactgagtcactttgtagct

SEQ ID NO: 114745 - DNA, 298 bp, Glycine max
  unsure (1)..(298): unsure at all n locations
ctactgctgttactatttctagagactgagataatgcaatgtgggaagggattaaattgctttcgattggcaaaggctaaattggttgcaaaatgctggttgtggtgggagggatatatatggtctgactttgtgcaatccacggctaatgtgactatacctatggacttcataaatttcagtcatcacgtgacaatgaacaagaatgtctgggcttagtangaactggatctgttggtttggcaagtttgcttgcctgttcttgtggtagtatacatgatgaaaactgatatggact

SEQ ID NO: 114746 - DNA, 135 bp, Glycine max
  unsure (1)..(135): unsure at all n locations
ctgaggctaccatcatttcatacaaatctgcatgtgttatttattgcacgttnttgcatgagggcatgacagcagtctcacttgccttatagaaatctgccctcatgactttagcatacaactatcgagccatta

SEQ ID NO: 114747 - DNA, 204 bp, Glycine max
  unsure (1)..(204): unsure at all n locations
actatcaaaggagaagatggtgagaggactaccctctattaaccaccctaatanactantgtgaagggatgtntatcttggcaagcaattcacaacaaagttttcatagaaagtcaactcaagagataagaagccactcaagctaatacaagctgattgtctatgggccaatcaagccaagctcactatgtaaaaataacaata

SEQ ID NO: 114748 - DNA, 237 bp, Glycine max
  unsure (1)..(237): unsure at all n locations
tagtattacagtgggagatcagaacttgaggatcttaagaacaatgaatggtttgagtatttgcatttgatcttattactcttattttaatatatttatacgaccaatgatgtttaatgcaattgtataaattgtgtgtcttgttngagtgtaaccctataaatatgtttcttctaatagcatgaattgtgaaactaatgatagtctaaggcgttactattatctgcatatgagtta

SEQ ID NO: 114749 - DNA, 64 bp, Glycine max
taatcgcttcatttagctgctattgatttatgatcatcaatcttcaacaaaatgttgtacagat

SEQ ID NO: 114750 - DNA, 337 bp, Glycine max
tagctggatgcatggtggtattggtgacgaaccaaatggattttattgtaacgggaaccatcaaaaggatgcatgtgaggctcctgaaatacatggtgctcgtcactaagtagtggaactgtaccacttatcttatgcgctaagctcctgtacataacgctatgactaccatcacatattgtcttttgaactcctgctgtctgagatttgtgtattagacgtacaagctttattattttgccgctatattccaaactcagagctacctgtctgtgcacaagtgtttctcctagacgacagtcttcatttctttttggccttgccaagtcacacttat

SEQ ID NO: 114751 - DNA, 149 bp, Glycine max
taaaactctacattttagtggttaaaatctgtttaaatttaaaattaaatctttataaaaattgaaaatgaatttaataaaagattacatatctgaaaattaaggtggatatgtaatgcaattacagctgcaaaaggcatcaagtttat

SEQ ID NO: 114752 - DNA, 237 bp, Glycine max
  unsure (1)..(237): unsure at all n locations
tactatgaaaggagttttcananactgagtagcacatnggattttctcanaacatgtntactcnnaaagttntactctctggtaatcgactaccagattgttgtaatcgattaccagtagcanaattggtttgaaaaagttntcacattgaatntactatgttccaattaatttcaaaaagctgtaatcgattaccaatgtttggaatcgattaccagtgcctttgaaccgtgaaat

SEQ ID NO: 114753 - DNA, 231 bp, Glycine max
  unsure (1)..(231): unsure at all n locations
ctgacaaacttatttctctttttggacaagatgacaagctgtggcaagtaaaattatcttccatcagaccttggatgcaactgtgatcgtattctcatcttagctagatcttgatgggtacttaacccatccttcgtcttgcctctaatgataaagagcagtccaatcacattgtcacatacatntntctccacatgcataacatcaatacaatgtctaacgtctagatca

SEQ ID NO: 114754 - DNA, 181 bp, Glycine max
  unsure (1)..(181): unsure at all n locations
ctcaagaacaagaatctcaaatgaagatccatgcaacataagaagaagcttaagaagaatgactctaccatctctaatattacttattntgagcgtggcatatcgggccacatagaatatgaatgctccattattattataatgtcgattcacatattgagtcgatcttaagactgcattc

SEQ ID NO: 114755 - DNA, 270 bp, Glycine max
  unsure (1)..(270): unsure at all n locations
cacttcatgtctttcataggggaaactacagtttctcacgtttaaatacattaatgcngtatcaaactcaaatttatatccaaaatgtagcaatgcattcaactgaattaaactgcaccccactaatactgggcccacttaagtactggtcatcttaatttggggtctatgtaatcatcatangggtgaacattgaaaggattgacttagagatgttcttctacagttgcatgtgtggatgtcaaaatgaatgggggaaaagacttattc

SEQ ID NO: 114756 - DNA, 146 bp, Glycine max
  unsure (1)..(146): unsure at all n locations
caacagatgtgacatggaccatttgctactacgttagagatatactaatagttatgttatccttgccatgtatgtngatgacatgttgattgtaggatctagtatggcanaaattaatatggtgaagtaatgaaggatcttggtct

SEQ ID NO: 114757 - DNA, 109 bp, Glycine max
acaagctcatttagttgttctttcaaatcctgaagttccatattcttttcccacaatttgcacctggtaaagatgatgcaagctaccattactttgaatattatgaaac

SEQ ID NO: 114758 - DNA, 271 bp, Glycine max
ctgaagtatctttttgaaaatattatccaataatacattgcatcaatttgcaaaatataactcctaattatgtacgagcaagaggaattactcttactttacgtgtgtttggatttcaatatcatattatcgaactcacttattactcaatactgcgcgtacattacttgtcattttatacctggaacaagacaactcctccattaatagtgattataataaatttccgaacgtaccattaggacatacatgataatgatcattcctctcc

SEQ ID NO: 114759 - DNA, 405 bp, Glycine max
  unsure (1)..(405): unsure at all n locations
ctgcggcatgcaagcttgctgttcagttaggatagatgcaccttgtactatgaccgtatagcatncattaatatttntgaagttaactggcacacattgtttacactgtcaatcaacataaaacatcattgttatgattcaacgtagttattatacacttataagatcaacaaacttaacatacatggtggtttgtgattggatgagtgtaaaagacacttacacgtgtattattcgttcaaatatttttcaatgtttcatctcatataagaatcatattcagttccttgtattgtctgattcttatgtcaaaagttgtgtcctttacaaattgttccaaattctatgcatangatacttggcctgtgctcggtgttctgcaagtggagttgcttgaacattgat

SEQ ID NO: 114760 - DNA, 475 bp, Glycine max
  unsure (1)..(475): unsure at all n locations
ctaagctgcctgtgtactgactcttcatngcttgagtctcacaagctggctatttgtgtttatctcatctgaacgcacttggagtgttctctcattacctccacccaagtgcccatagaatatttttccaaaaattggtggaatggaaaattcatgacagagcatgaaggagatataatagtagattattacctgtctagtgacaatcccattcattttaaagctacatcagatgttaatggaatgtgaagagatgacaacacttggatggagtaactctttttgctagtttcttgtcttctcatgcaaggattgatctccnctgataatgagaaatagtgtctacttctctaaagctcgtttgtatggagagcgctgcatatcattctctcttgatgactgtagatactatcctcgtgagcagnggcatgactggggagaacaagacccttcttgagacatatggattgaccac

SEQ ID NO: 114761 - DNA, 310 bp, Glycine max
  unsure (1)..(310): unsure at all n locations
cttaaccaccgcggctgcaactcggagtgagtctcttattacatttccgaatgtatctaatatccngcttggcgcaaattttattcttttgggaatgtccatttttaaattagatatcctctttaatttctctctcgtgcaacaaatccgacaattatgcactttttactctgagaagttgcacggggattgatctaacctatttgaatatggctatcttttcccttcttttattcatgtggtgggaaaatttgttatggatttgcctccactcaaatggttgcttaattattaatctggataatcatta

SEQ ID NO: 114762 - DNA, 404 bp, Glycine max
  unsure (1)..(404): unsure at all n locations
gtcctctanagaagtttagcgattctggaggagaactgacagtggcaccaagaggctctactctatgtgttgtcctttgagacagatgttgtcaaatatatggctactactcccacacgtagagataggagcgccctaaagtagctaaagccatcatcacctttgctgaagttgtgaggtcgaaccacctactatctttcaagggtggcagtgtcttggccagttgctatcacaatgtggacagtgataacatccaccactgcaaggttgctgaagagaaacgactggctgcatgtgaatgcattgcataaatgacaacttgccagtggtgctgattaagcctatgaagatcgatccagctaagatccagttgcggggctagagagtagcacaggacttgcgag

SEQ ID NO: 114763 - DNA, 424 bp, Glycine max
ttgatccccgtatgcagccctttttatgctcttgcagaattttgttaaccgcgaaatgtgtttgtacccaccaatcgccagacccgcagctaaggtcaccgcgtgatgctttgtaattggcccgtcaaactaccgatccgggaatttacgttgaaaactcgaccatgccggaaccttcacgcatctcctgagtaatcgctctcagcttgttgtctttcgctgccgtttcgcacaaccagtctccaaagattatttaatagctcgtgcaaccgccgctacttttcggcaaacaaccggtggagggatcaatattacgcacggtgtgaaagagatcgggttttttttgcggtttaaaccacgacctttttggtatgatatgcggaactgaggccttttcgtcctcatgtttttagcgtgtgatatc

SEQ ID NO: 114764 - DNA, 366 bp, Glycine max
catattaaggcatggtagtgcctgacacagttgtttgaagagctgggcattaactacatcggcccggtggacagtcacgatgtgctggggcttatcaccacgctaaagaacatgcgcgacctgaaggcccgcatgtctgcatatcatgaccaaaaagcgtggtttgacccgcagaaaagacccatactttcacgccggcctaattaatccctccacgttgtttccgaaagtacggcggctgccgactattcaaaatcttgcgactggtgtgcatacggcacgaagacacaagctgaggcgatactccgcgatcgtgaagttcggatggcgatttccgtaattccggatcgtcttcacgtggcaatg

SEQ ID NO: 114765 - DNA, 334 bp, Glycine max
agcttgtagttgatcctatgatcgtagactttttcgatcacacggccgatattattgtttattacgttattcagcagagcagatggcagaatctttgtatgggctaaccatcgactacatgattgtacatttcctcacgacgattcgttaccacattttttgtcgggaaaataagaagttatacgttgaccaaaacctctataatatcactagatggtctgagataggagctgtcctgaagtagttagcccatctcagagagtcatatagtcatcgttatcaaccatctactcttggagagccgcattatgttgaagtgggcttcttgggcaat

SEQ ID NO: 114766 - DNA, 284 bp, Glycine max
taactctcagatgttcacgttgattacattcattacactctggaacagacgatgaatcttctctctatctttaattgagttattttctttgattgcttggtcatagaactattgatctgtcacaagagatggaccatcatctctttattcattcagccttttgcacttctcttgatagggatagtttaagtgaaaactcaattgctgcatctatcctgaggtttagctaaagtacattcatgtcctgagcgtcctaaagattgccgagacatgttacaagaact

SEQ ID NO: 114767 - DNA, 368 bp, Glycine max
actgcaagctttgttgtttcgctctttattgtctcattccaagccgcaaacttcgtgctaagcttaagaaactaatacctctttagtagtattatgctgtctacgaagaactgtatagatattaccttagatgctccgccgatgacttgtgtgagcttgtttaaaaaagagagatattcccatagagttcttccgttgctgtatagattctatagataaatcttgtgacgattatgaagttccactttacctgcctcaagtctcggaaatctatgatattatatatagacaactgcattaattctacttattttaattggaatctaatcaatattaagtttatacccatcttgatcttctctatccta

SEQ ID NO: 114768 - DNA, 316 bp, Glycine max
agctctttgccagttgacggtgaaatcaacatttcatcgcggtcagtcaaccacctgctgaatgcatatcatgcttatggcgctgaaaattggtaatggcgaagaagtgattacgccttccctgacctggtttaactctaatatgatatccttgctgggtgcaacgccagttatggtggatgtcgaccactatacgctgatggtacaccttgaactatcgagtcactattacaccactcactaaagccatcattccggtgcattatgccggtgcccacacaaatatagacgccattcgcgccattggctaacgtta

SEQ ID NO: 114769 - DNA, 420 bp, Glycine max
  unsure (1)..(420): unsure at all n locations
agcttcaatgaactccttcaatggtgatnttcaaccatggagatgtagcagaagataaaggacaagaggtgagaggaggagccatccattatggaataagccatggaaggaggagcttcaccaccaagagagtgccatggataagaagcttagaaaggaagcttcaatggaggaagagaatgaaatanagagagagagagaggaagggctcgatattgaaggagaaaaagagggagagaagttgaactttgaagagtgtctcacaagtnttacattcatcaaagntatgacaagtgttacacgagtttctatttatagcctaggtcattaactaaatgaaagcttccttgagaagcttccttgtgaaacttcctttagaaaattccttgagaagctagagcttaactacacacacccctc

SEQ ID NO: 114770 - DNA, 433 bp, Glycine max
  unsure (1)..(433): unsure at all n locations
ggatgctctattggangaatagatagagagaatgtgttagctccaaattgaaggaataatagagggagagaagtacaactctgaagtgtgtctcataagactatcattcatcaaagatacaacaagtgttacacatgcttctatttatagaataagtagcttcctcgagaagctgtcttgagaacacttccttgagaagcttctttgagagaacttccttgagaagctagagcttaactacacacacccctctaataactaagctcaccttcttgagaagcttctttgagaatacttcccttagaagcaagagcttagctacacacacccctctaataactaagctcaccttcttgagaagcttccttgagaagaatcctaaagaactacagcttagctacacctacccccctatatagctgtcatacactaa

SEQ ID NO: 114771 - DNA, 238 bp, Glycine max
  unsure (1)..(238): unsure at all n locations
tttttcacctggtgttcttgactcatctcatttgagcgcatgtncacttgnnantccaaagtttcaaacctttcaccaactaaagtttgaagacgatcgaacctatccaaaatcgtttgaagaagagaggaatcttctccaccatgttcttcttcatcaataggtcgagcaccctttttcacccaagagccatcatgctctttntgataatcaaaggatgcaatgacagccgcgccta

SEQ ID NO: 114772 - DNA, 480 bp, Glycine max
  unsure (1)..(480): unsure at all n locations
ttaagccacctgcggcatgcaagcttcttcaacttcatgagattgccaatgcttgatnggtattcacctgttacactantttctaatattactagtgatgggatgttcttgaggacaccaaaacttgaggggatgtctccaatgagacctcaagtgatctaaactccaatgattctaagttgcctgccagtttctgccagatttcagtggggatggtagctggaaacatgtcttgtgattgagagcaattgaagaaagatagagattttaggtgcttcacgtcaaataaatgtggtctaaattccaaatcttgagcacacgttagagaattgtcatggactggtccaatgttcaaggcagttacataccaaaatccatcatacagatcacaagagacccccttcagaagagaacaaacacttaaaacacaattaagcaaataattagtcaccatgttcttattaagttacaatttcatta

SEQ ID NO: 114773 - DNA, 414 bp, Glycine max
  unsure (1)..(414): unsure at all n locations
gtctgttacaatctaccactatatcatttctaatannatggcacccccacaaggagtttgcttccactatatggttgagacaggggatcccctagcctccttgctcttcaacatagtggctgaaggcttaactggaatgatgagggttgcaatagataataatctgtatacaaagtttcacgtagggaagcaaaatgagcacgttaatattctgcaatatgcagatgacataatatntgtggggcatgctcttgtgggataatgttattgctttgaaggctatgctgaggggttttgaattggcatctggattgaagataactntgcaaaagtcaagttggatctttggactgaggtcactgaattatgaggcacnaatttttaactgtnacatatgagattctttctatatct

SEQ ID NO: 114774 - DNA, 463 bp, Glycine max
  unsure (1)..(463): unsure at all n locations
gctngctcaatgtggatgaccactgctttgatgacttcatgtatgctgcaagtatctgatccatctgttcatgttggctaatttgaaaatcgagatgacactggataaatctgaagtcgtgtataacactttcagattgaatcaaatttcggggttcaaccaaaattgttcaatcggataaaatcagaagattataattcaagagttttattttggtcttgtatgtgttgtcaccctttatgctttttgaaccagaatgattatttatgatcaaagaacagatggtttctgaaccagatgaaaatattttctttntaaaaactgccgttgatggaagttttagtaacttccatgtaacttccaaaatatgcctaaatcgaacatctcgttattacattaaaacaagcgcgcactcttatttaacataataaagagatcaattacactataatgttcaacaaac

SEQ ID NO: 114775 - DNA, 504 bp, Glycine max
  unsure (1)..(504): unsure at all n locations
ctgtgcatatatgatatatcacatatgtgaaagaaaaacanaagcttgtgaaataaaagtgtctatatatgtgcatatatacagtgcggcgtcgaaaaatttagatagtaaaaaacaactcaatacgattgaaaggccatatatcaagtatgagaaaatcatcgccacacaattctcatgcattcactttataaagtgtaggaaatngagttatcacgacagtaaaatatatgtgatattanaatcaaaaggattcataaaggggggaaatacaaattctactcatgtttatgtaaagaagagaaactctttcactcccncttatcttggagaaagaaagcgtggagaatgacattattctgactccgactcacaattcaatggggcttcttctgacaactctatgttgcanagattccaatcatatataagaatgtganagaggttaggtttcggcttanggacaaaatgaaactattctttatggggtgatgactaaattat

SEQ ID NO: 114776 - DNA, 445 bp, Glycine max
  unsure (1)..(445): unsure at all n locations
agcttcaaccaaggggagatggaccatntaattgcttgaaagaatcaatgacaatgcttacaaagttgagctgcccggtgagtataatgttagttccaccttcaatgtctctgatttatctctttttgatgcagatggagaatccgatttgaggacaaatccttctcaagagggagagaatgatgaggacatgaccaatagcaagggcaaggatccacttgaaggacttggaggacctattgatgaggacatgaccaagagcaagggcaaggatccacttgaaggacttggaggacctatgacaagggctagagcaaggaaagccaaggaagctcttcaacaagtgctgtccatactatttgaatacaagcccaagtttcaaggagaaaagtccaaggttgtgagttgtatcatggcccaaatggaggactaaatgacaccactt

SEQ ID NO: 114777 - DNA, 384 bp, Glycine max
  unsure (1)..(384): unsure at all n locations
gtcccttagttcatcatactcttttcatactttgatggctatggacttgaacttctcttcgactacnccggctctttcaagctctgcctntanggcttgtacctcatcactttcttccgaagctataacctcatcgtctctcacagtctntagaattgggagccaatccaatccttgtgttcggactctcagccacttatgatagccgccgatgatcccattactgcttcccctaagctctcttgtccttcttcacgccgcatcccatgccttgcgaactccttggagtaccctcgcgtttgtggcactgaaaccccatgcgatgaaaggcatgatgctttcgtctgatggcacttctctcatggggtagccaagctgtcttat

SEQ ID NO: 114778 - DNA, 412 bp, Glycine max
  unsure (1)..(412): unsure at all n locations
agctagaaggatgattattcttgtgtgtatagagagttngcttcaaatatatcccactctcaatctcacttctcaaaccttgaaaatccatttaattgaggggttttggatacctagattttgcgttgttgtggtctgaaacttgtccttggtttatacatgattggtacatgatttgagacttgtacgattcaatctgggcaaaattggatgatggaaagagtggtttacgaaatctgcactctatgcagaattttgctgttgatatgtgcaccagaaatttgcttaagtgcagacaaatactatgtatttgcttggtgtggacagagtaatacagaatgattgcttgatgtttgctagtaaatctcaacggtcataatgagacttatgtcctgacactttcatttaattt

SEQ ID NO: 114779 - DNA, 394 bp, Glycine max
  unsure (1)..(394): unsure at all n locations
actaggacgactgagaatactgcggcgnatgaagagggtgagatagatggacatacccatgctgtgactaccatgcctatacgggcaagntttccaccaacacaacaatgtcattactgagtctataacaaaccatacttcttaccccaccacccattattaacgaaagccatctcttaatcaacctacaagtccgtctactcgacttccaatgacgaagaccacctttagcacanatccacaaataacaccaacaaacatgatatttgcaggctaaagcatgtaaggttaccccaaactccgatgcatatgctaacttgatccatattacttgatattcatggatcctaacctaccaggttataacctctttctcgaaatcactcaaccacgt

SEQ ID NO: 114780 - DNA, 411 bp, Glycine max
agcttgaggtaccattgttgttgttgaaacttcgaaactacgtggcacagggataccaatcttctattcgatcccacagaggtttatggttctgtttctcgaagcccattggatctccttgatgtccattttgggccatctgaggtatggtccgttttgttgctaaacttattcaagaagaataaataataataaaagaattatgttattccttaataactttttggagaaaaagaatagcacagttaaaatttttatatatgtaaacctttcattcgatcttacattttttgttttaaaatgagtccatgatattaattcttttttcatttgttttcagtaaatgccacttatatatatatatatatatatatatctatatatatatatatatatatatatatatatata

SEQ ID NO: 114781 - DNA, 471 bp, Glycine max
  unsure (1)..(471): unsure at all n locations
tgctcaaacatgctcaacgccttcaccaaacaatccctctctactcattaaaattgactgggtcttacttctttatcataaatatctgacaatgatacgaaccataattcaattgtatataagagaatagttgtgaacgtaagattgtgtaagtaattcaaatttattagttaaagtgttgctagcttgacatctgaaatggttggacattgggaccttgttataaaaccaacaaattccttaaattatgagtgcgctgggtaaattctataagtgtgtatatgataaactctttaatatcataacttctatcataagcatttaatccaataagtatatagaatagttgcatgtcattctcataaaatatcttcaatttttagtcgagatagttacattattagatgaatntacatgaatcgtataaactattatagaagcatcacttgcgtcggtggcattgtatttatt

SEQ ID NO: 114782 - DNA, 454 bp, Glycine max
agcttagacgcagaacatgacaggttagactgagataaagaaagtgcgggcaaaataggtcacgcctgatataatttaaaatgtaagtccaacatcgattttcaataaaaaaaaaaaaacctatgttaacaaaatgatgttaacgttaacatcggttttcttcaagaaaccgatgttaacttatcatacgttaacatcggttttcagaaaaccaatgttaacctcggttttcttcaaaaccgatgttaaagaacttacgttaacatctgttcttctaaaaccaatgttaactaattaatgttaacatcgattttccaagaaccgatgttaacgtcactttgttaacatcggattttcaaaaaatcgatgttgaaggatacacattatttacaattatgccaccgcatttatcatatcatcggttttatcaaaaaccgattgttatatgccgatg

SEQ ID NO: 114783 - DNA, 492 bp, Glycine max
  unsure (1)..(492): unsure at all n locations
gcttacagtcctgactgttccgagatagtctactaatggtccactgatctggcacctccactaatagtccatgactattagacgttcttgggcagcacctcaactctctagcacctcaataggtcctatacaacctggctctagataccaaattgtaggaagtaagataacaagctaaatattctactcttacacactcatattngaaggaagaaagagagctatagaattgtatttgattcaatngacacacacacaaagcagcgtacatgatctgcattttataggcaagttctcctaaataaactattacataaataaagaaaacccactagactaagtaaaccaaanagaggctccgactggaaanaagtgcattgttgatggtcaaaagttgcaacttactgcagctgataaaacaactatgcagtgttgtagagaaacttcattatatataagatataattattggcttcttgataaacattctat

SEQ ID NO: 114784 - DNA, 432 bp, Glycine max
  unsure (1)..(432): unsure at all n locations
agcttataanaaatagagtntaatataagtatacatattctaatntgtgtgaaagtaaaatntaatcctatatattatattttaaaatataatatataaaattataaaatataataaattaaaaaataataaaatttgaattttgaactattttcgcataaaacttatactaatagtgtattttgcaccaaatattctaaatgaacacttgggtatagtggtaaaagagtgtgcttcttacttcaaggagtacggattttgtcattccttaagcatnttttttatggtcagttagtcaacaattaaaatcaattatgcggactaagatattgcattttgttgaaatataggagaacttggtcaattagtcaattagtcaatntagtataatagacaaaataggaagacanatgggagtatnggttacaatga

SEQ ID NO: 114785 - DNA, 427 bp, Glycine max
  unsure (1)..(427): unsure at all n locations
tcagcatctttttatagaagaatgcgaactgtggccattgtgtggcagacatttcactgtggaagaacaagacaagatagtgggtcggataattggaacaacaggtgctgaagttctccaatcaatgttaccatgggtaacgtctgcacttactcacgatgaacagaacanaatgatggatatatggaagcaggcaactaagaacactatgttcaacgaatggcttattgaatgctggatagagagtcgagtgtctacagcacagacagaaacgtcagatcacagcacttctcggagaggtatgtaataagaatttagattctttcatcttctgtggaaattgcgagatcgaatatctaataatatagtgtgtgatcgtctttcctaggtgctgaatatcatgacagcttgaccacaatgatcagat

SEQ ID NO: 114786 - DNA, 442 bp, Glycine max
  unsure (1)..(442): unsure at all n locations
agcttcatacttggagaaagataaaataacttctttaatcatattagcacaaactcattatagcaatcaaacaagacaaacaaataagattgtgttagtcatcatataaacaagttaattgaaatgaaagtttcaaccaacttaatttaaaagaaaatggttatgatgttacctttttcatgatttaagtgcctagatcttcaaagatggaagtcagacttttgctttttgcttaatctttttgagagatgttctcatcactttcatagtccttggatagaaggttgatctccttctttgaaccatcggatgagtcattgtcatcccaagcaatatacaccttcttggatctttattctttatagctnttcttctcattcttctcgggccatgactcattngaggggcagtttgcctttatgtgactgggttgattacactt

SEQ ID NO: 114787 - DNA, 437 bp, Glycine max
  unsure (1)..(437): unsure at all n locations
atatggacattattgacatccttgtctctctcatcctctcacaatcacatcttggcttattcaacttccaccggaatgtgagtgtaagccataggtttgtttgcttaagcgacctgcgctcctgagtatgttttttttacttccaagatcgttcaaattagagatttctcgtcctacacgttggtgagggtgctgtatacaacgagtaaagcataatagttcanaaagaaaaagaaaaaagcatttgattgactgtgtcttcaagtaaaaatatagacattcgtatgacctcattttatcattcctgaaaagttngtctttgtgacagagaagttaattatcaagaatatcagtcatttgacttaatctatcaaactacgaaaatccttcaaatgtttctcgagaatcaactgcttctttcattcttccttgctaca

SEQ ID NO: 114788 - DNA, 438 bp, Glycine max
  unsure (1)..(438): unsure at all n locations
atcctgagagcgtcctgcngcatgcaagcttgttcagacacaattttccaaaaacatttaggctatgcggtctgataatgcttaagaattatctctgactaagtttttgcagaatgcaagagtagttcaccagttttcttgcccacacagaccccaacaaaattcgatagtagaaaggcgccatcagaacctattgaatgtagcacatgctttaatgtttcaagctcaattactaatttattttggggagagtgtgtatccatgaaagcttacatcatcaacaaaacaccaagctcaaatctgcagaaccaatcaccatatgagttgctatatgggtaagtaccaacctatgatttgatgaaagtgtctgtgtgcttgtgctatgcaaccactgtccctgctcaaagacatataattacttctctggccactaaatgt

SEQ ID NO: 114789 - DNA, 437 bp, Glycine max
  unsure (1)..(437): unsure at all n locations
gtaactctcggcgatgtatttaagaactaatcacttatttgttatgactttngaagaaatcttcagaaacaagtcacttgaagaattgtgacttttggaaatgtattatttgaaaatagtcagtggtaatcgaatacaattaaggtgcaatcaattacacatcagcagatgtgactcttcattttaaatcttgaaaatcttaacgttttaaaacaatggtaatcgattactacaatttggtaatcgattaccagagagtaaaactctttggtaatgattttgtgaaaacttcttgtgctactcaatgttttgaaaaactttttaatacttatcttgattgagtcttctcttgattcttgaatcttgagtcttgaatcttgattcttgattcttgaatcttgaatcttgaatctctgcttagaaacttgcttaactct

SEQ ID NO: 114790 - DNA, 451 bp, Glycine max
  unsure (1)..(451): unsure at all n locations
acattactcttttgttagaacaacctgtatggatgcctngcatatnnttttntgtccaaatctctttagtgtntccacacatggatcnatttaacacaaatgggaatgaagaggaaaaagtattaacacctataggaaggcaatgtaagttctctaaaatataattagtgtatgaaccatagtatattntacctcgtgggtccccttcatatgaatgagccatctttggattaaacatgacgttcattgctttatgtcaacaaactgatcaatcacatnctgcttaaaaaagaagataataaatctaatattgtcctcccaaagcatacaccatattttattctataatgattaatatgcaaattagagattacctacgtagtacattattgttacctcagagatctaaacaatataaganttcctctctttgagtggagtgtctcatctg

SEQ ID NO: 114791 - DNA, 240 bp, Glycine max
aacatacacatactttataaggttctgaatggctttaaaagccttttatatgtaactgacacacaactccgtagagttatataacaaaaaggcttatctcttaaaaagcaaaacgttcatccttataaaataccttggccaattactcgtgatcaatatggaacttttgagtgctcaatgggacatctatcacttcaaaaaaaattctcactttcttcactctcatctggaaagggataa

SEQ ID NO: 114792 - DNA, 415 bp, Glycine max
  unsure (1)..(415): unsure at all n locations
cacctgcngcatgcaagcctagtgctngatcactacgcgtggctccatatctcattgtggactatgcatgaacgacatcaatcatgggctccgaataaagtgagaatggggaatgcactaagcaatcactacgcgtggctccagactcattggtggaggttgcatgaacgaaaatcaattcatggggctccgaatacaaatggagaatggagaattgcactatgcaatcacttcgcgtggctcgagactcattggtggaggatgcatgaacgacaatcaattcatggtgctccgaataaaagtggagaatggagaattgcactaggcaatcactacgcgtggctccatactcattggtggaagatgcatacacgacaatcaattcatggggctcccgataaagtggagaatggag

SEQ ID NO: 114793 - DNA, 323 bp, Glycine max
  unsure (1)..(323): unsure at all n locations
tctgaaaaaagtgntggggctgagtgaagagagagaaaagctttttggttttaaaataaaggagtttctctcttctattattntattcaagctctgccatgtgtccctatttgagtggagcaaaagggcccactttccctttttactgtgacccacactcaaccacaaaagtgagaaaaatctgacctttgaaacgctaaaatcctacctcagtttgcgtgcccgttctctggttccaatttctcgcatttctttgcgttcgtcgggaccaattnttgaaagtaaccaatatatatattcaaacgctcagaataaaaccccga

SEQ ID NO: 114794 - DNA, 393 bp, Glycine max
  unsure (1)..(393): unsure at all n locations
gctatagtaaactcaacagacgttntcacttcttgtaagatattatgacgatttcatgacaatccatcaagtacatttagttgattttgtcctagaaaccacttcacctggtgatgtacatgacacctgtatttgtgacgacttcaacttctgtctgcacgaagaggagactaatgcttgcccagtattctttacgattgtgaacactttcaagagaaggttcggtgtgacaactctgatgttgcacattacctgcctcagggctcggaatctaatttatatatgtttatgctccctacagattgtgcccgcgctttctaagttgaaatctagtataatatgaagagtctattatccgtggtcggattgtacccactctaatatgagtttttt

SEQ ID NO: 114795 - DNA, 402 bp, Glycine max
  unsure (1)..(402): unsure at all n locations
taccattgaacagttcatatggagctttctttacaatgggtcttatttaagccatattcatgatatagcatgcattattaattgcttctagcccaactaatatttcggaagaggagtatcatttaatacagttctagcaatttcttgcaaagacctatgtttcctataacaactccattttgctgatgagttctacgtgtagaanacttatgttcaatgccatgcttatcacaaaatacatcaaattcttgattgtcacgctctccctcatgatcactcctgatagatataactacaatatcttgcttatattgaataactattgcaagatgtctcaatgctnganatgcatcattcttatgagtgataaatactgtcccngtatatctagaataatcatca

SEQ ID NO: 114796 - DNA, 432 bp, Glycine max
  unsure (1)..(432): unsure at all n locations
agcttatgctcgaggatatatttatacccttatatttgtcagacttgtanatttatagtgggtgtattaagggaaaacaaacaaacctaagaaatttaggccccgaaagagctaaggatgtcttanaaacaattcataccgatatttgtttgtgattccttttctatggattcatggaatggacacatgtaattcattattttcatagacgactactttttctttaatagataagaagtctcggtttctagatagtttcaagtttttcaaagttgaagttgaacttcaattacgagagaagattaagacactccaaatctcattgtgagggtgactactactattgatatgacaaatatggtgagcaacgactagaccctttcttatctnttcttcttcaataagtgtagaatcattctacaatatataatg

SEQ ID NO: 114797 - DNA, 333 bp, Glycine max
aatcttatacacttggagtgatcacctgctgtcctctagaactcttaccacacactctgtcatcatgccgacactcaagaagacccacagctctatccatcgctaaatagttctgaacaaaatacaatggcttcttctgcaatgtacctcccaacaatatatgcttcccgatgacatagattgcttagatacccctttaagatcttcatgtatcgctcaaccgggtacatccaccgtcgataaacacgaccaccgcatacgatttctctgccagatgcaccattcagtgaatcatgatgtctagaaagcatgggagaatacatctccactaca

SEQ ID NO: 114798 - DNA, 397 bp, Glycine max
  unsure (1)..(397): unsure at all n locations
agcttctcctctggttgttctgctanggtttctaagtgttatagagaaggagaagagattggagcctcttcactgtctccatgcgagggacatntttctcactantaacattatttctaaaatcccaacggtggggatgtgcgcaagtgagttccaaacttggtgttcaaatttgacgatgatccaacagttaacgagtctgggttcttattttactgtgacangtttggttgtatgtggaaaaaaaagagctctgtgcaaaggccatttctctcaccaaagacattattttgcaaatntcaacattcaatgtgtgagacaataagtttcaaatttaattatgatccaacgattaaagagttcgagatcgtacgtntactgggacctgtttgaatgt

SEQ ID NO: 114799 - DNA, 445 bp, Glycine max
  unsure (1)..(445): unsure at all n locations
ctcttcctactggtntgcttcttccncacctcaactngactgctgccgtcaagccaaccaagggacatcaacatcganattagaaatagcatcaaaatttgataaccaatgttcacttatcactaaaaattgaagtgttccagaaccagtatttgaaaaccaatgttcactatcactaaaaaattgaagttccagaaccacccttttgcttcagagtttgtggtgctcgcggaccagctcaagaaggagagcgagtgggagactgtcaaggcggccattaaagccaaactcgactttggatagagtgaagaacgagccgcaagagaccgattcgaaccagtgctcgagctcgaggctgggttgcatntcggatcccgcagttganaacaacaatcagaggatcgccaagagaaagcagcgagagaagaaggtaacggtaacgtac

SEQ ID NO: 114800 - DNA, 401 bp, Glycine max
  unsure (1)..(401): unsure at all n locations
agctgtagataatntacctaagaatttaggtttcaacttcattatattattaaagnttnggattttgaaagagatccattgtatgctaattgttaattggtgatgccaacccatataattgttacatgtatttgatttttcaggcaattaccaatcctgagagagctcgaccaaggataacagcaacaactaataatggtgccactgctaagacaagattttggcaaccctctttacaaagtatctcagaggctgccagctgatctttgttttcaacgtaccaacatgtggtgtgagagacagagaagcaactgatgaaaaaaaatatatacagcatataaagaagaaacaaaacactccatgattgcttggtcatgtggacattataatatagtacactg

SEQ ID NO: 114801 - DNA, 360 bp, Glycine max
  unsure (1)..(360): unsure at all n locations
gcaaccgcgtagttggtctcgcctcgccatccttgctgagatgcttcatctcagggttgtgccccgaactccatcgcgaagtacatgcgttccaacctctgcccctcccgcaagttgccgcccttgcaaagttgcacgagatataacttaatgaccatcgacgccattattggtcctctgtaagaccttcattattcactccggtcactaccaatgcttccctttcaactgcgagacctactgttaaacgcctctcggcggaagaattggcttctcgatgagacaagggactatgttaccatngtaatgagaaatggattctcggccacagatgtcgcccgcatcttcaccacttatcgc

SEQ ID NO: 114802 - DNA, 458 bp, Glycine max
  unsure (1)..(458): unsure at all n locations
agctgtgcttatcagctgtaaaggtctcaacttcaagccacaaaccttgtgccaagctaaagaaactaatttccttttagtagtatatgctgtctacgaagaactgaattgaaatcacctatgatgttccgccaaagacctgggtgagcttgttgaagagaagagagctatgcccatagagttcttccgttgctgcataaattctagagaaaaatcgttgtgacgattaggaagttccacattacctgcctcaagtctcggaatttaatttatatatatattgaacaacttcatttaataccaacttattttaaatggaaatctaatataatattagagtttataacccatcttgattctcatctattctaatatgaatatttttttagaaattttttttcattcaaantttctcaactcaatatcttagtatatgtttttatgtctaacgtataaag

SEQ ID NO: 114803 - DNA, 493 bp, Glycine max
  unsure (1)..(493): unsure at all n locations
taacctaagagatgtattcttttattctttcttgtnaaaacttttgtanattattgtgaaganaacaaaagttctcataacatcttgaataccttgagagaaacgactaatagtgttgagtgaaatattcatctataaggcaattattctttttagtcaatgcgtaatcttccaacaaatcttgttgatnttgttagagccaatagtggcttggtaagacacaaaatactaggttttagtcaagcttggggtagagcttgcaagtgttagagccaaaagtgacaaggaacaatacttgtaactntaataagttagtggaaccttggtggttgcaagaacttacgtagtttatgttgagacaatgaaataattcttgtgtgttcttctttacttaactacaaaaatggattattttagattatatctgttgtgtacaaaaatatttatcatcgtgatgacggtttagggctctatctttcataacataaataca

SEQ ID NO: 114804 - DNA, 442 bp, Glycine max
  unsure (1)..(442): unsure at all n locations
agcttgctccagacccatgatgtaatatgcgtcaagctaatgacgttaaacgagcgctaactaggaggcaacccggttctttntattttcattgatcattgcatatagttaagatcaacttgtttgtgaattgttgagtaagtcatcaacatgtnttgcatagaaatatgaggttgtcaaagcttctttgaagctgtggatgataaataacttagaaaatgtttcagttatccactcgctcagtgcgccttgtacgctaagcgaatcattatgcatgcgctgagcgagtcactgctcgcactaagcacatcaacccctacctattggctgatggggtctcgctatgcgagtcctgtgcgctaagcgcaaaaaagaanaacctctctggaattgcatttaatggaattaggctaagcgagtcatctcgctaaacacacaacat

SEQ ID NO: 114805 - DNA, 445 bp, Glycine max
  unsure (1)..(445): unsure at all n locations
gctattacantaaataatgtgccagtgtggtgatctcatcctcctgcctatatcctctagtgcacggtagagaaaagaaccaggtgcaatgctacgctcatactgacacttaaggcatgatccttcttcacagtagataaccttttccatacttgatggnggcagatacttttgtagatcttgaacaacaaaaatactgaatccatcatgtgacatatccataatgaagctgtgacagatgttcaccgcctctaaatgttccaaggaagtgagcacactcctcanagccttcatgctcactaccgtggaccgaatgctgaacaccttcaagttaggggtagattcaatcaaggcttctgcgtgcttttcttcaaattcgcaatgggaattgatcccactgacgctcttacagtattcgcgaattgcagganatatgtaatcaaca

SEQ ID NO: 114806 - DNA, 435 bp, Glycine max
  unsure (1)..(435): unsure at all n locations
agcttcggaagaaagtgatgaggtacaagctttttaggcagagctngaaagagcccgggtagtcgaagagaagttcaagtccatagccatcaaagtctgaaaagagtatgatgaactaagggacgtcaatatggccacagctgaagccttggaacgagaaaccaagaaggcccgaaaggaagaacacgaccaaagcaaagttttgaggggctttatagggcagcaatagtgagctcaagctccgaagaggtgaaaggaatcatcacgggtcaaaggcatgatcttgaaggacgagttaaaggcttgccttatgttgaaaagaaatttgtcccaatagctaagcgagactgaagggaatatgtgggccatcatcgatgagtgcaaagagaagctaaatctagcggcgactcacgagcaaaggctagaagatgagta

SEQ ID NO: 114807 - DNA, 510 bp, Glycine max
  unsure (1)..(510): unsure at all n locations
atcttgagcttcaatgaggtcctntaatggngaatttccaccatggagatgcagcggaagacaaatgagaagaggtaagatgtggcgccatccactatggaataagccatggaagaaggagcttcaccaccaagatgagccttggataagaagcttggagaggatgcttcaatggatgaaaagaaagatggagagaaagagagaggcgggagcacgaaaatgaacgaagacaaatggagagaagttgaactttgagttgtgtctcacaagactctcattcatcaatgttacaacaagtgttacacatgtntctatttatagactatgtagcttccttgagaagctttcttgagaaaacttccttgagaagcttcttttgagaaacttccttgagaagctagagcttagctacacacacccctctcatactaagctcacctcttggagacttcttataagattctaagaactagagctagctacacatactctctatagctagctcacctc

SEQ ID NO: 114808 - DNA, 435 bp, Glycine max
  unsure (1)..(435): unsure at all n locations
agccacctgcggcatgcaagcttcgcccgttccgaggaagatccaatgctctgtatcggtcacgttgacgactctcggggaaccgttctgaacgcccaccaatgaatatttcttgttattaatcaggccattattggaaatattgactgtgccattaccgaaatatccattatagagtctgcgtaccgtgatgacagagtcttgatcctgcacattcagggttccgattccgggggcattgccaccgataatcgtattttcagccgtaacccaccccccctcgcgaatagtcgcctccccagttccttgattaccaanttgaaattcaatggaggaatcatntatttttattagccacctcgcacccttttcaacgacaacctggccattactggccgcctgatagcctaaaatggcgacgatagaactcgtgac

SEQ ID NO: 114809 - DNA, 332 bp, Glycine max
gcgtaatgccatcttctccacagaatgcgcttaaacctgtatacgctgccctccttataacttgtcatgacccgataatgtacaaacgacttggtcgtgcgctgaagaaatgcgggattgataccgtgtacttgagcaaatgtgattctcaatatcatcttatcgtagcttgccgcggagttcaaaggaatatgagcaaatctcctgagctcggataccgcatattccgggcaagaaccctgattgatggccttgactggctctggcggattttatcatggaaaacgagaccctgttgtggactgaccccccaaccgaaactgacttataga

SEQ ID NO: 114810 - DNA, 387 bp, Glycine max
  unsure (1)..(387): unsure at all n locations
agcttcngaggaccaagctgagactatctgttatattctgagtttattttgtacaagctcgaaacaaagattcatgatataaaccagcatttatttctccatacaatttgggtggcagaggagacaattgagccagcggctgggcttcagtctcacagatgatcttgggaagtaccgctcggtatcctcaatccgcataacaaagtctctaccagcacgtttcagtgtattaattctaaagtggatcatacgctctctgcctagaaatctcgccaactttcctctgcggagagaatcactctagccaaatcgattatccaggccctgccaaattatgcaatgcaatctgttgtccttcctaaatcggtggcatagaaatggacaaaa

SEQ ID NO: 114811 - DNA, 419 bp, Glycine max
  unsure (1)..(419): unsure at all n locations
ctaagcttaaatttggtcctctanttaattcctgaggagtaggatactatttagtagaggaacatgtgtagggactcttttttttctgctgaacatgtttggtaaatggtagtctcttgtgcggtatcttagtgatttggacccatttcaaataactcatactttatttacaattctaaaatcctaaaaatagatgttttgtttttaaaatgggtagaacttataaacctgcatatgcgatatgattaatctatctgagaacagcttctgagatgaaccgttgaacagtattttgtatgacaaagccaaagatgattcagatgagcacagtcagatcaataattcagatcagaagatatcagatcagaaagaataaagcacagcagactccaggagattaaagatttaaaccaacacca

SEQ ID NO: 114812 - DNA, 423 bp, Glycine max
  unsure (1)..(423): unsure at all n locations
gctatcctttggctgcctccgactttattcccgtgccactcccgaagatttatgtccagcncctacttttgaggagcaactcccgccttatgacgactatcccgggcaagatgatgagaaaggagatacccatcttggccccctgctccacctaaaagatcctgcctcacatgaactaccccaaccgaacattagccgccatatcccggcctcacccacacccgtaaaagaatctgttcccttcgcggaagataatggaaagattgaggcgcttgaagaatggttaagagcagtcgagggccttggcaattacccattctcggattagcagattatgtctcggcccaaatttttattccttccagttaaagtaccgactttgttatacaagggacacatgtcaatggcaactttgatgtatgc

SEQ ID NO: 114813 - DNA, 238 bp, Glycine max
  unsure (1)..(238): unsure at all n locations
tcttagatgtggaaacttacccattgaagaacgaagaacggatgaagaacggacgataaacggtgaagaacggaggaaaaccttcacgaatntgcttacgaatacctctcggaagcgttacagaagcacctcgacttggactttcttcacggaaacaatttgtttcacccaaaacagctgaaatgcatagccaagggaatcaatgacccttagaacaaccccattnttgccttttata

SEQ ID NO: 114814 - DNA, 452 bp, Glycine max
  unsure (1)..(452): unsure at all n locations
agctntgcttctacatgctggtcatatggtttttgaagaataaatatatttagaccaacagaaaagcccaaagcagaattaaagacccttccagcgcatttaaagtacgtgttcttggagaataatgagactaaacctgttataattagcaactctttgaagaaggaagaagaggatcaactggtgcagattctaaaatgttgtaaagtggctattggttggaacatctctgatttaaaaggaatcagtccatcatattgtatgcacaaaatcaatttggaaaccaatttcaagcctatgagacaacctcagagaagattgaatcctataatgaaagaagaagtaagaaaagaagtgcttaagttactagaggcagggctcatctacccaatttcagatagctcatgggttagtccagttcaagttgttccaaaaaaaggagggatgaaagt

SEQ ID NO: 114815 - DNA, 90 bp, Glycine max
ctcttgaaaacttcttaaactgagttactcaccacccttatactaactcctctgaaacttctgaaaatctaagactaactactcccactt

SEQ ID NO: 114816 - DNA, 420 bp, Glycine max
tctcagcttaactgagtggcactgtccaattgctattaaatggtgtaatctattacaatatatcggtaatcgactaccagtgtatctgaacgttgaaatatcaaatcaattgtgaagagtccatcttttatacaacgctctgtgtaatcgattacatggttgtggtgatcgatttccagtgacaatgttctgatataaaatcaagagatgtaactcttccaatggctctctcaaattatctcaacgtataactcttgaatggttttcttgaccaccatgtgagtctataaagcataccttgacttgattttatgacttgattaacttttccacaacttttgaacatcttcttaacatcttcttttcttctttgccaaagcttctaagattctggtttccaacctagttcttcaagaaaca

SEQ ID NO: 114817 - DNA, 451 bp, Glycine max
  unsure (1)..(451): unsure at all n locations
agctagcttaagaccgtatattgatttcttttttntccacactatgtgttcctttctttcaactgagaaccccaatggttggtccatataaacattctcctctaattctccattatgaaaggcagtttccacattcatctaatgtagttccatgtcataatggcctactaatgccatgataatcccgaacaaatccttttgtgagaccgatggaaatgtctctttataatcaatgtcatcttcttgagtaaatcttcttagcaacaagtatagccttgtaatattcaaggttgccatgagagtcacgcttagtcttgaagacccacttacaaccaactctcttacaacactttgacaattctgcaaggacctaaacaccattatgttccatggaatatatctcttctttatggcatataccacatctcagaatatcacagcctacaacttg

SEQ ID NO: 114818 - DNA, 339 bp, Glycine max
  unsure (1)..(339): unsure at all n locations
ctaagctatgagccatactgtaacatattctattcttttagggatctaccatattcgaccgggagtaaatataatgccttggcctccacttctatgtccaatntcaataaatgtcgagaggtagctcttatagctcagaaagtgaatgaaccatgccctcattagaagtgcacttttagcgggatatgaaacggtggaggggggagtggacaataaatcctctatgttactacatctctgtattatctacaggtatctataggtttatgtaatcatcagatatttattcgcttgctttagaatatattttaacagacatggttagtagtcaaaattact

SEQ ID NO: 114819 - DNA, 431 bp, Glycine max
  unsure (1)..(431): unsure at all n locations
agcttgcttctacaatctctcccttnttgatgatgacaactctgaaatcaagaaacacatacacacacttttttctagtcgatcactcacttaattttccattctccccctttgtttttgaatttatgcttcacttgaaattaagttaattacttatgtgagttcttgatttaatttctatttctctccccctttggcatcaacaaaaagccaaagtgcgtaacaagtttaagacaatcatatactattaatccttcacaagacatacattgaagaatataaaccaatcatgaagcaagaaacatgaatagatcaaatatgtgaaacaaccacatagttatataacataattcattattgttcagtcatactattgcaaataaagaaatactanattggttcaatgtcataacaatatagatcatttagat

SEQ ID NO: 114820 - DNA, 423 bp, Glycine max
  unsure (1)..(423): unsure at all n locations
ctaagcttcacatgctgaagttanaaagtggatataagctatatattatattttagtaggngacaataactatgtgtaggcaaaatctgttataccaaactatctcatataacatattggacaggatcattaaattactctagttagtaatggaggggctaaactattgagtggataataatattatgttcctttctaactgttgactgctagtataatttgtgatcttaaacataaatgtacatattgcatccacaattaatcttcatggacaaattaaaatttagataccaataactatatctgactgattaataaatcaatgtgaatgcacttattatacgtatttcatactgaggcataaaattgtaggcttcttaatttataatataatcttccccttttatgtctctctacaatcat

SEQ ID NO: 114821 - DNA, 433 bp, Glycine max
agcttaagaaaagcctatctcttgtggttgttatggattcaaaattcttatcttgttgggttgagggtggagttattcaaatcaaagggcaaacgaagtctgtggtaatgcgagggaccaagcaaggaaatctgtacatccttcaagtgttcactatgctaagctttgtctcaattgttgacaagtcgggagccatgtgtccaatggctcgtccgatgataatttttttggcatttacgtataggccacataagtgaataaggtctataaattttaagcaagcaaggcttacttggaaatcttaaggtagaacttcttcaattttgtaagcattttgtctgtgggaaacaacatcagacaaaattccaaaatgctatgcacattacaaaggccagaatggtctgccttattttgactctatggccttcaaaag

SEQ ID NO: 114822 - DNA, 435 bp, Glycine max
  unsure (1)..(435): unsure at all n locations
atatgtactcctccaaaaaagtcttgattngagaacttcttgtaacttcacaccatgaacataaaatctcccatggacatttaatttgtttaaagcgtgctctatcttgaatggtgtcaatttttgaccatttgagatctctatcatgaaaaaaggcatactctcttacaacttcaataaaacagtctgatagtatcatacttcattccaacctcgcaatgcacttgtccaaaacaacttctaggattgcatggaggatacacgattatagaattggtgtcccattcatcatcactattaggaagagactcacattatttagagtggtaactatcattacttgtgtccgttgattatccatcatcttctcgagacacatatgcatatgtgtgggtcactttcagaatgattagaaaagtcagaatcctcatcatg

SEQ ID NO: 114823 - DNA, 431 bp, Glycine max
agcttatcacccttacctacaattgaaatttatttaatggaagtcaagagcatgataatgcatcaataccattaactggtcaacatgttcttgagcaggttgagggtatcaatactgtatttggaaagacccaaaagaaggaaaaaaagtaaaacttccatatgaaagaagaggttgatattgtttgatcttccatactggtcattgtattgatgttatgcatgttgagaaaaatgtctgtgatagtgtcatcatcacgcttcttaacactcaaggcatgacaaaggttggtttgaatactctccaagatctagttgagatgggtatacgagaccaattacatccaacgtctgatggttacaaaatatacttgccttcaacttgtcatatcttgtccaaaaagaaaagataagtttatgtcagtgtatgca

SEQ ID NO: 114824 - DNA, 286 bp, Glycine max
  unsure (1)..(286): unsure at all n locations
ctcattttaggaccaactgtgatgcataaaggttctggggatgtgtggtgaggcccaaagtncaaatcatgcattctaggatgaagatatgggtcctacccacatcaattattattagcacccactgattcgagacccagcccactagatctcaaatattggggccacatgggctgaataggcatgtaggctnattatggcctgattaggtgtatctatctacgttggatcatggcacatctgagccaagagatctttcagtggctcctcatctagatcaacaatc

SEQ ID NO: 114825 - DNA, 466 bp, Glycine max
  unsure (1)..(466): unsure at all n locations
cacctgcngcatgcaagcttgaaggcaaactggatgcatangttaactnggtaacctatctagccttgaaccaaaaatctgtacctgttgcaagggtctgtggtttgtgctcctctgctgaccaccatatagaccttttcccttccatgcagcaacctggagcaattgagcagcccgaagcttatgctgcaaatatttacaatagacctcctcaacctcagcagcaaaatcaaccacagcagaacaattatgacctctccagctatagatacaaccctggatggaggaatcaccctaatctccgatggtctagccctcagcaacaacaacagcagcctgctccttccttccaaaatgttgttgtcccaagcagaccatacattcctccaccaatccaacaacagcaacagccccagaaacaaccaacagttgaggctcctccacaaccttcccttgaagaacttgt

SEQ ID NO: 114826 - DNA, 526 bp, Glycine max
  unsure (1)..(526): unsure at all n locations
ctacctagtctataaatagaagcatgtgtaacacttgctgtaactntgatgaatgagagtctcgtgagacacaactcanacttcaacttctctccctntttcttccttcaatttcgtgctcccactccctctttctctccctctatcttttcctccattgaagcatcctcttcaagcttcttatccaaagctcatcttggtggtgaagctccttcttccatggcttatatcttaatggatggcgcgctctctcacctcctttactttgtcttccgctgcatctccatggtggaaaatcaccattaaaggaccncattgaagctcagagatccagcctccatagaagccccacaagcaagcttccatcaagatgacatgcctttccaaagacaacccgataaggagacattcctatgggtgctatgtaggcagtccgatgtgcccagagagcatcatcaagcctggtactacaatccttnctgctnggctgacaatcttctctagaattctcttgattgccctgtac

SEQ ID NO: 114827 - DNA, 419 bp, Glycine max
  unsure (1)..(419): unsure at all n locations
gtgcctgcacacgtaagtacagagcatatgatagtgttatgtgacaatgaaaaactgatggacgatctgtgggcaaatgtcacgccagctatctattacatgagtaaagaaaatactctacaacaggccgtggggttgcccgatcataatacgcttaatatcattatggggatataataaaaggtaattcatggatggttgaactatatccctgctcttcaaccatcctatanaacatgaattgctctctctgccctaagtggctgtgctattctataataacttaatcctgagtaatcaaaaaacataatcaataatatatatacgcaaaaacattgattagtaatatatatggaagaaaatatacctgagtaggtatggcaatcctacacttgaaaagttcattaatcttttgtata

SEQ ID NO: 114828 - DNA, 306 bp, Glycine max
  unsure (1)..(306): unsure at all n locations
agcttctcattgacggagagctagcacctatgtcggatcttacgagcatgcactgcacgcgaagatggtctctatctatcctatgaagcttggggtgactactgcggtatacaaacttcatcctaccatgcatcggctctgtcatgtctaggcatgcgtnttgangatcagtccacaggcggtactggtccgcgtcttatatctcgatacgacagggctctctttgcatatgtttacaacgacatacgtgaccgttacctaggcggcgtagctntgtctaatgcggtcctggatcattaacttcat

SEQ ID NO: 114829 - DNA, 223 bp, Glycine max
ccacacagatttgacacatccctcgaaccgcgggaatggtagggagaaccccgcttacgcaaacatagaaccttacggtttaaactcatgatgcctagcttaagtctactttgtaagctgtgctttgattaattatataaagacttctatcagccggcttacctactatcattgctgttactttttcgaacgcgatcataacaatccctaagtcaaaactgga

SEQ ID NO: 114830 - DNA, 454 bp, Glycine max
  unsure (1)..(454): unsure at all n locations
accaccgcggctgcagcttantaaagttatgtggctnngaacatgtcatcgaggcatttgtacaagaagtttaatgagtctatgagcaactcatgattcaacagatgtgacatggaccattgctgccacgttaagaaatatactaataggctatgttactcctttgtcgtgtatgttgatgacatgttgattacaggatcttatatggcagaaattaacaggttgaagcagctattggcagaaaactttgaaatgaaggatcatggtccatctaaacaaactctttggttgagaattcttagaaacacatcagaaggaattctgaagctgtctcaagaaaaatatatcacaagttgcttgacaggttttaccttgaagattctaagaccaggaacaaccttttgggatctcatttgaagctttcaagagaaatttttgctacaaatgagaaaat

SEQ ID NO: 114831 - DNA, 431 bp, Glycine max
  unsure (1)..(431): unsure at all n locations
cttcatctagctgcaaacccttatcctaccctgcctcagcagaataatgatacctngccctttgcctcaaacacaccatctaagcatctaggtgtgtcgctatgattggtctatcccattggattaagtcattatgtagtgcctaataaacttaagccctataaagtcatgtcctaatctaccttactactttactataatctactcaactagttttttataataactctttatataagtttgtatattacaaatgccatatgagttactttgtggctttctattctactaatgaggcttccttttcttctctcattttcctattcacttaatgttaatattcctacaagtatattacatcggcaatagaattcttaaatcataatgaatgtggatgtacaatctgtgtgaaaacactgtacctatttgtc

SEQ ID NO: 114832 - DNA, 199 bp, Glycine max
cctttcctgatgatgactacagtgggcttatttggtatagttaactagtgatacagggccaacaagctatacttctttagtatcctctattataggaggtatggtaggtactcactttgtaaaaagaatagcacttgcgagcaacgtccttattcttttttttaacagtgatattcttctcctttattctgtcgtcttt

SEQ ID NO: 114833 - DNA, 372 bp, Glycine max
gacctctaagacacctgcggcgtgaagcttctttgtttattacgagcgtcctttatctaatgcgcctgactctgacctccgcgtgataagatataaccatttgaatttctctagagctaccggtgctcaattcccagcgtcccgacctaatatgctcctgattctaaccgtcgtgcgaaaacttatgaccatatgaatttctcgagagtcttcgctggtcaatgtccagccgctccatatattatgcgcctgatcctgaccttcgtgtgacatgtgatgaccactttgatttctcgagagctttcgctgttcaatatcaagcgtcttgatatatcatgcgcctgaatctgacctccgtgtgatcacatctga

SEQ ID NO: 114834 - DNA, 211 bp, Glycine max
ctaagctttactcgatgccgattcagcgcatagttatcgatacgaccttatttgttcaccggcagctctcgagcaatacatatggtcgtcactgttcactccgaggcgcgaatcacgcgcctactgtatcgatacgttcatattagaacatcgggagctcccgagagattctaacggtcttatctcttcactctgctcgcctattcacgcg

SEQ ID NO: 114835 - DNA, 438 bp, Glycine max
  unsure (1)..(438): unsure at all n locations
catgtcagctttctggagaatactgtgttgagaagctatgtttgagaaacttccttgagaagctagagcttanctacacacacccctctcataactaagctcacctctttgagaagctctcttaagaagattctaaagaagctagagcttagctacacacacctttataatagctaagctcacctccttgagatgagaagctagagcttagctacacaccctctataatagctaagctcacccgcatgaaaaaatacatgaaaatacaaaataaaaatccctactacaaagactactcaaaatgcctcgaaatatatggctaacaccttattctactagaatgaccaaaatacaatgcccacacaaaggaaagaccttttcttaattttanaaagataagcgggctcatacttagcctatgggctcgaaatctaccct

SEQ ID NO: 114836 - DNA, 465 bp, Glycine max
catgcaagcttatcctatatgcaacaacaaaggaagcatacttgtgcagaatatacacatacatgcaccaaagataggcaggataaggaaagtaatgcagttctatcgtaaatacaatacaaagagtatacttttaacaatgtccataatccctgctgttaaagtgacaacatgatctgcccaaggcaaaaacatgtaaactagctgttttatgagttcattcttttttggtcatcaaaattgttattcaaaatttgaatgggtacttacaaaatcaaattcatccaactcatataagaaaacacctacaataaaccatatgagtaaggcaatcacaatctaacaccatatatatttctgtaaaaagagagcatcagctagaaagggaaaaataaaatgaagtacaattgagtaatatgttaaaacatttacctaaataggtcaagaatgaaccagtgatataaa

SEQ ID NO: 114837 - DNA, 552 bp, Glycine max
  unsure (1)..(552): unsure at all n locations
tctctagaaatgcatctgataagctcaacatacattttatctgngtcactaagtgatagaaatgaagtactagaaatcttaaccaccttaatatgcaacttttcccangttgctttaatcttgattcatgaaatgaaaaggaaattaatcagaataagcatgagaattgataaaaataaaataaaactacaangtagcccttcatttatgtatntaacttgtgttgctgtcaagttatctgggaattcacaggtggaaaaagcacgtggatgggaacaacttgtcaacatgttggtttccctattcagcttgctttttacttcatttcagcacccaagaatctcaccacanatagtancattcatccaaaccaaccattngcttcaatcatttatctatctcaattggcctactctgtggcattaaattgtatntatattcagntggtctatgctcctttctgtctctacctattcactcatttgctcatcacaagtggccttcaatgctttcttccctacttnctcaatcacactagttacaccttacata

SEQ ID NO: 114838 - DNA, 390 bp, Glycine max
  unsure (1)..(390): unsure at all n locations
tttgaggattccactccgattaagatgttcctcttggtgtgagggttcgacggcaagcaacaacggctcgcggtggccattggtggtcgtgggtcatggagaaggaggtgtttgggtttgggtggcgcttttggagaagaagagaatgaaaaatcctgttttttacgccgaggaacatatttataatctcanatctcgcttagcgagcttgtctcgctaagcaggagtccacttttctcgctcaatgccaactcctctgcactatggctcgcttagcaggcccattctcgctcaacgcaattccttctagggttggaatagtgcttagcacccttgctcgctcagtgcaattccttctcgggttggaattgcgcttaatgcgcccttgct

SEQ ID NO: 114839 - DNA, 451 bp, Glycine max
  unsure (1)..(451): unsure at all n locations
cttcatctcagctgcaggctgatctttcatcatgagcattgctactgatatcatggcgtcaanggaaacgcgaaccggattgagatccactctgtatcatctatagactaactttgtataaaactttacaaatgtatatatttcccaattatgttatttttgacgttctaagtaatttgcttgttctatctgtgctcataaacccttggtatgaataatgcaattctcttaattcaggaaaaggagtatttgaaaagtgctagttatgtctcctaacagctcatgcctagcagtgcttctctaccatcataatggcttacaataaagatctaagggatcatctcatgcccctcgccgtatcactccttacagtattgcacttcngctaccgattggcctacaaaatactactccctatggcaatgcctaaccgagtcagtcgtgaccttta

SEQ ID NO: 114840 - DNA, 427 bp, Glycine max
agtgcatgatgatgagagcatcttttgagggctgcaccacgatggattctttgctcctatatgatgtgaaagtgttggtcaaccatggatatgcgtaaataaaattgctagcaataggcaagcaccttttctaacaaaacgtacatgtgggatatgtagtcaagtgctttgccaatgtgcatatatgttgaatatggcatgaaaatgttcttaatatgggaacatatggcatgaaattgcttttcaaaaatcgaataaagtagtataaaaattgccttttcaatgaatatgtaacatggaattgcttttcaaataaatgcaaatgtgtgtgaatatgtagcttgaaattgactcttcagtgtgtttattatgtgaataaaatgtgaacatgtatcataatagaatgccaccccaaattgagtatata

SEQ ID NO: 114841 - DNA, 388 bp, Glycine max
  unsure (1)..(388): unsure at all n locations
actctgccataacaccaaccgatatcacagctnttctcacttaaagaccncagtaacaattccttctatccaattcgttaaccgctgggtagactccaaaattttactggaagtctctagtacataagcctacatctttgaccgtgggatctactaacaaacatccagaactcattctgctctgctcttccncaaccagacaatgcatagcatttttctgcactngtgcaaaantctgctgcacaatttcacagcaaaattctgcacagagtgcatatatcgaagaccacactttctctcatccaatctttgccatatcagatcctatatgtcccataccatgtatcaatcatgtctaaaccaaagtcgagcttcaaccacactacac

SEQ ID NO: 114842 - DNA, 449 bp, Glycine max
  unsure (1)..(449): unsure at all n locations
ggaccttaatcacctgggctgcagctgccatgtgtttgtgaaaaattagtgttncctggtattcatatcaacgatacatcaagacaggaatcccgcttatgcctctacaatgacaagaggatattaccggggttggcggtcagtttctatctgaatggggatgtcctatataaaagacagcatgatatggtattgctctggcgtgtgaatgtagatgaggcccancagatactaacagacgtgcatgaaggatcctttggcacccatgccaatgggcatgccatggctcgaatgattctacaagcctggtgttactgtatcaccatggagaattattgttgtgttcacgtcaagaattgccataagtgccaaacttctgcagatatatgtaattgcatcacctgtaccattgaatgtgtagccaatgccatggctgttcttgatgtaga

SEQ ID NO: 114843 - DNA, 350 bp, Glycine max
  unsure (1)..(350): unsure at all n locations
acttagatactaagcttctagcgcggtctggagacgaagtcaagggctctatatctattatgatgnnccgagtacattggaattggtacgaccatgccttcctgatttccaactgtgacattggcgagtggatgaacgcctcggcatttactcaacgagcataatgtaaacctctacggttctaaaagctctatagttaagcctaagctttacagttttccttttgtaaggctttgtgtctttgtttaattatatacaggatctgtattatctgttcctacgtctctacccattctgattcatttgcctgtttacttctttttctgaaatggcacatccgatgacgagtc

SEQ ID NO: 114844 - DNA, 441 bp, Glycine max
  unsure (1)..(441): unsure at all n locations
agcttatacgacctangatgtggttntgtgtctaatattcaattaaacacaagtcttgcacttgccacattggtacaactcccttcatcaatgatcaccatgcaaaatttgccattaatcaaacatctagtgtgaaaaatgttttctctttgactttccttcatagacttcaattgacggccaagtaaccgcctaatcatcaacaattctcccttcggtgttttctccatctctaagaatcatgtctatcttttttttttctttcaattatgtgcactctttccttttatcactctagaattctccttgagttctaaagcaattcaagagaaagtttacacaaggttcaaccactaatttgtgacaaaaaaaaggcttagggttatgctatacaaggcttataacaaggacaaaaattctagcaacttcaccatgggattt

SEQ ID NO: 114845 - DNA, 348 bp, Glycine max
  unsure (1)..(348): unsure at all n locations
acaatgaattgatcatanaaggataaattagaagagaacaataacaaattcctttataagttaacccccaaaatatactcataattaacagttatcaaccatgatctacaatttaagtcaaacaaatatttgaataatcattctgatataatagattctgagacataccatgatagagagaaaaaaaatgttggaccggtggcctcaataagttaggagggataagcttagtatgcacaataagcagcaatcaatataataatgttcttttaacatgccagacaatatngatggctataaaatatatgagataagagaagagagaatgcgaacataagtttatactgg

SEQ ID NO: 114846 - DNA, 233 bp, Glycine max
cccaagcaccgagctgcagcttcgccattttttattttcttagcttgcgcggactagcaaacgccttctttctttttttcaagcctttatgcaaacttctcatacccagccattccaccgaaccgtgtgtttgtgaactccacagaggaccgcatgagcgaatttcactgctgggtgggaggagaactatcgactcatttcttgagaacctggatcctgtctgtagtattgct

SEQ ID NO: 114847 - DNA, 438 bp, Glycine max
agcttcgtccctattttgttataatagggggtgaagtgaataagaaaagggttcagcctcttatgcactactctctctctctcatttgctgaggaaaattatttccgtgaagaaaatgcaagtcgaggcgcttccgtaacgttttcgtaacgtgtccgtgagtaattacgcgaagattatcgaccgttcttcaagattcatcgatcgttcttcgttttcttcagtcttcaatgggtaagtacctcacaccaagcttttcaattcattctatgtactcgtggtggtccacattttgttgcatgtgttttattcttgtttacgactactatcatacccccttttgacgtgctttagccatttatctaagtcatttttcgcttaatttaaaaatataataactttccacccgtcgtgtgaatagtatcatccgctaatttt

SEQ ID NO: 114848 - DNA, 442 bp, Glycine max
  unsure (1)..(442): unsure at all n locations
ctcagctagctcacagctgagcctagcctaagtctacaatgatgaataccatatatagttggagcttagtgcagcatggcgcgcttagctcggcctcatcagaatatcactcaggcttaacgcacaggcgcgtntatcctaactacaagaatttanaagacaatgagagagttgagcttaacgcatctgggcgcttagctcaacacacaacatgggattagcacacagatgcacttatccttattcaaaggaatacttacagaagcatagtggcgcttagcctaacatgtcaggcttagcgctgaacaaaaattctctaaatcttaatgtgtgaacactagaccttcttatcgcacatacacgctcagcgggctcatcactttacgtcatcagtatggatgaacgcacttagcgcgacatggtccgtttagcgcgttcatct

SEQ ID NO: 114849 - DNA, 465 bp, Glycine max
  unsure (1)..(465): unsure at all n locations
cctgcggcatgcaagcttgtgttgtaaactctcacctcanaacttttttgtccctgagtagatgatccaactgcatggaaatatgggacttccaagatttgagatcacttgcaccttttgtctgcaagggcaacaaatcatttgcaaaatgaattaaatgtagaataataatggttttcatataattaaatacaattaatgccaacaatatccaggatagatttcacatactatagcatcctgccggtcaacgagattcctaatgccatctttgatattctgtataagtatatcttttcctcccatgtctttgctgtactctttgaaaatattgacatatctagaatttaagtcctccatataccgctccaaagcaaacaaatttaagtctagagtgcgaactttctgcatcagaatcttgagaacagtatccccgggcatcctgccaacttgttgatgggtttc

SEQ ID NO: 114850 - DNA, 486 bp, Glycine max
  unsure (1)..(486): unsure at all n locations
tgttacagctttggagtggtgctgttatagatcatatgttngcagtcaagtgtttcctttgcaatggctagtgaagaagagacacttatatattgtgcgtatcgttgttatatccaaaggaaggtatcttagtttgtagaaaatgatgacgatgcaaagaaagacatatagagggtggaaaagcatgtgatggtagcaatttggtgcattcaagaggatccttctctgagacccttcatgaagaaagtacgcaaatgcttganggtgtgacaacagtttctttgccacctcgccctgccatattcagttcatcatcgtttgaaacatcatatactttgtaactgcttagtgnttctatgatcctttttataatgatatcgtagtatttatttgtgacggggaaattgttccatattttattttgatggataattatggaactctacaacaactattttatgtgaaagacattggactatgaagttt

SEQ ID NO: 114851 - DNA, 426 bp, Glycine max
agcttgtgccggtgcttgtgcattattctacgagagagggcgagccttggttgtaggggcatgtgaagacttctaaataattccctacttgaagatatagacgacagcttatagataatgttagagataaatattcgcttaaaaggaagaatgtaatcgtaccttgtacataatgtggcgctaaagataatttaatatctgtcagcacataaaatattcctatacattcgaatattacttcaatcagacataatctgtatgctggggagcccggctactaagggtcagtcgtccactttactattacagaactgacgtgcatgattgacacgtatctataagtgcccaatatgatgtcacactaatattgtggacgcctaacaatacacttattattatcactgctgattgcgatggaaacataat

SEQ ID NO: 114852 - DNA, 442 bp, Glycine max
agcttctggtgggacatcttgacttgctttctaatctgacattcaccacacattctgccttcttctattttcagattgggaatgcctctaacagcacctttgtcaatgattttcttcatgcctcttaagtgcagatgcccaaatctttgatgccatattctgacttcatcttctttggaggatagacatgtggaggagtaactggtttcttgaggtgtccataggtagcagttgtcctttgatctgctgcccttcattagaacttcactcttctcatttgtcaccaagcattctgactttgtgaagtttacattgaatccttcatcacacagctgactgatgctgatcaagtttgcagtcagtcccttcaccagcagaactttgtccagactaggaagtccatcatggactagctttcccattccagtgatctttcctttag

SEQ ID NO: 114853 - DNA, 530 bp, Glycine max
  unsure (1)..(530): unsure at all n locations
ctcatatgcaggattntcaattacagatgtgcaatctgctttatngagaaatagaacatgaatctgtggatttgccacacaatactgtatacgattagatctgataacatgttcaacctgttggcgccatagcatgaaggtctaataatcaagcttgtgatatatggattatgataaagagaagtaataaacgagtggttgtgagcagccattgntgatcttatcatgctctatataccattacagaactctaatagaagatactntgataacctaaagagaatagctatctgagaaagtgatagggagtctcattaatcacttgactcgagtatacatctttgtatttatagacagaactgatattagatcagctgtgtcaactaactaacagctgtcataactgaacagctgttaacctactaacaactactatcgtatttaaactactgagactgcgttaatactgcattctcttacaatacttatacatattgactatatggttggtgacaagtctctacatgata

SEQ ID NO: 114854 - DNA, 435 bp, Glycine max
  unsure (1)..(435): unsure at all n locations
gcttgttggttttaataaactgcnaaagcatgaaatgtagattaccacctattgtgtggaggtagtataaataatactaataattgtatagaaaatggataatcccgtgtgcagcgggtgagtttaatctaagagtgtgataaactttcacatgcactcccgcaatagtcgctgagggggaaaaacaactttttcgtgttgatagaacgttcaatgccatttaagatctttccccacgcactatgctatgccctccctgccctgctaaggcactgcgcgattctgcgtagcataacgtctgccaattgcccttggattggatattatgttctcttctgctttcctcgtggggtctctttctcatctaccttctggaacttgtttgcacgacaaaacaatcacacttgaacgtctcttaatgccatcactttttgg

SEQ ID NO: 114855 - DNA, 520 bp, Glycine max
  unsure (1)..(520): unsure at all n locations
tgtctattcaatacaggaccactntcatattcttgcgttgcgtggcataatgttcatatactgtcaaggctnntggagcatctataacttgttcaactatattntcagcgacatttctgttgatatgctgcaccaaatctctctgtttcctctgtattctttcagcacgaaagtattatttgggtttcaattgcttgncaactttagcttgtatctctcccttggtaatcttcttccgtatctcatcccagagaagccccccttctcaagctctgctaacaattcttttcttgcttcctcagattccatctaattcaattaagcagtgagtgccaaaaagtattgttagagaacatgaaatatatttttgacaatctacagtattaatatttaatactcaatagacaacagagacaacagacaggatgttataaagttacgaagttgtgtgctgagagtagtaagcttcccagctttccaccgataaagcttgatctgtacaagtatcatggatggcttg

SEQ ID NO: 114856 - DNA, 450 bp, Glycine max
catgcaagcttgtctccgcatttatgcgagacagagtatatcttgttagctttcatcagcaagtaccaagaagaattaaatctaactcacggctcacaagcacaaagtggcggacgagtatgcccgagtgtacgcggaaaaagaggctatatgaagggtgattgactcgttacatcaagaggcaacaatgtggatggactgatttgctcttactttgaacgggagtcaagaacttccccgattgctagcaaaagccaaagcaatggcggacacttactccgcccccgaggagatccacggacttctcagctattgtcagcatatgatagaattaatggcccatataattagaaaccgcttggaagtttgtattgtcactcaaatcttgactagttataactttctggataaaatgagtttatcccgcattttatctcttgcatgcattca

SEQ ID NO: 114857 - DNA, 316 bp, Glycine max
  unsure (1)..(316): unsure at all n locations
agagaagtggaactttgaagtatgtctctgtcataccctaatntcgtccggggattattacttgatgacatgtaactnttggttagccgctttgagatactaggcgttctttgttgcacaatatgtgaagtcccggactgtccgagaaacaaatgaagcatgtttgcgcgatccgtggaattccgtaatgtggcggatatcgaaaagacgtgtntttgcgcaatccgtgagtttccgtaacttcttctaaagctagaaaagagtatatatataatccgtaaagattcgtactttgcggaaggtaataagtatcgta

SEQ ID NO: 114858 - DNA, 426 bp, Glycine max
  unsure (1)..(426): unsure at all n locations
ccacctgcggcatgcaagctngaaggcaaactggatgcattggttaacttggtnacccatctggccttgaaccaaaaatctgtacctgtcgcaagggtctgtagtttgtgctcctctgctgaccaccatacagacctttgcccttccatgcaacaacctggacaatgagcacccgaactatgctgcaatattacaatagacctcctcaacctcagcagcaaaatcaaccacagcagaacaattatgacctctccagcaacagatacaaccctggatggaggaatcaccctaatctcagatggtctagccctcagcaacaacaatagcagcctgctcctttcttccaaaatgtggttggcccaagcagaccgtacattcctccaccaatccaacaacagcaacagccccagaaaacagccaacagtg

SEQ ID NO: 114859 - DNA, 438 bp, Glycine max
  unsure (1)..(438): unsure at all n locations
ttctaagagagcacanatccttgacttatcccaatggtcttgtattatactagtagctntctcactatcttttcctttcaaagtgcgtttgaacttaattgaactacacaatttattnctttctttcttctttttggtntaacataaaacttatttgttgtgtgtgctgatgcttaacccttttgctttcattggaattgacttccctcccccaanattagagtannattgccttgagccatatgctctcctagagtctaaacaaggtattaggagatatntatntaagtttaaggttcaattnntttttacaatatcattcagctcataaagggagcanaagatgcaattatcatntaatggtaagctcgttggtcaaaagagctcgtgtatgtataatcatggccttcatcatgtcctcttttatacatttcattc

SEQ ID NO: 114860 - DNA, 116 bp, Glycine max
ggataggaacgaacagatttttttatatagaatcgtgaccaaccaaaaggatgcactgatgaggtacccgtattaccggtgctcctcactgaagatctggaacttcatcccactaa

SEQ ID NO: 114861 - DNA, 398 bp, Glycine max
  unsure (1)..(398): unsure at all n locations
actaagcttataagcgcggtctggatacgaaggtcaagtggtcgctatatactatnatgatgttccgagtacattggatgtggtactaccatgcctttctgantccaactgggaaataggcgagtggaggaacgctcctggcattacgcatcgagcataatgtaaacctttactagtttaagagctctatagttaggcctacgctttagagttcttcctttagtaaggctttgcgtcttttgtgttaatatataatacagagatctttctttatctgtgcctacgtctctacccattatcattcatgtgcctgtttacttctttctttgaatatggcagattccatgacgagtcctcctatagtactattacctgtgacgcgcctatcaacttctagc

SEQ ID NO: 114862 - DNA, 411 bp, Glycine max
  unsure (1)..(411): unsure at all n locations
agcttaggtaaatgagctctattcttcatcttatacttgatttctcttcaatctcttgatctagcttctgtaataacttgaaactatcatttttgtttaatcatgaagggaaactttgaaaaaactaaatgtttttcattctccttcaagatttcatgagttcatcaaggggtagtgggggtctcttcaactcatgaaccatatgcttgttgttgaacttccttgaacatgtcgctttgacatctatcatgaatttgggctgagagttacagcactatatactatttttattaaagttttgacctcaaaaatgaattttctaggtttgaaaatgtgggtagcatataagatttgcgaaaatctgagttcctgagcactnaaaacaagttatgagcaatacttttgaaaact

SEQ ID NO: 114863 - DNA, 458 bp, Glycine max
  unsure (1)..(458): unsure at all n locations
caagaatcaagagaagacttaatcaagataactattgaaaggatgtttcataaactgagtagcacatggatttttctcaaaacatgtctactaaaaagttgttactctctggtaatcgattaccagaatgttgtaatcgattaccagtagccaaattggtttgaaaaagtcttcaaatgaatttactatgttccaattaatttcaaaaagcttgtaatcgataccaatgtttggtaatcgattaccagtgcctttgaacgttgaaattcanattcanatgtgaagagtcacatcctcttcacataatagcttcgtgtaattgattacacatatttggtaatcgattaccagtgatttgttcttgataaatcanaagatgntactcttcanatggtcttngactctttcaaattggttataagttnntctaannagtataactcttctaaatggtcctc

SEQ ID NO: 114864 - DNA, 125 bp, Glycine max
gagtcacctgcggcatgcagctgtgagcaattcatgtacatatctttttcttcgtgcctgattgagtcctgggtacatcgagacgcctcgaaacgggataccgaagctcagagcatgataaaacg

SEQ ID NO: 114865 - DNA, 342 bp, Glycine max
tatagtagtttgaatttgctcacggcttctgatatccatttctagcgtctccatatattactggactcaatctgacattccagtaataagttattgctgcttgaatatgctcagaacttcggcttttcatttcgagcatctcgatatattaccggactcaatcagacatccgagtataaagtaattgtagtcttgaattgctcacgagcttagaaatcccatttcgagcgtctcgattaattactggactcaatcagacatcccgagtaaaagttatctgtcgtgtgagtttgtcagagcatctacattcaattgcgagcgtttcgatatattactggactc

SEQ ID NO: 114866 - DNA, 424 bp, Glycine max
  unsure (1)..(424): unsure at all n locations
agcttctcccctatnttgctataaataggggtagaagtgaataagaaaagggttcagccccttaggcccttctctctctttcgaatttgctgaggaagattattttcgtgaagaaaatccaagcctaggcgcttctgtaacgttttcgtaacgtttccgtgagtaattacgcgaagattctcgaccgttcttcaaagattcatcgttcgttcttcgttttcttcagtcttcaacgggtaagtacctcaaaccaagcgtttcaattcactctatgtacccgtggtggtccacattatgtctcatgtatttttattctcgttttcatttactttttatactcccttttgacgtgctttagtcatttatataagtcatttctcgcttaatctaaaaataaaataaatttccaccgatcgtttgaatt

SEQ ID NO: 114867 - DNA, 460 bp, Glycine max
  unsure (1)..(460): unsure at all n locations
gcttagctccttcactgcacaaggctcttaatatatgaagagtatccttgtggaaccttcacctgacgaagacactgacaaaaacttattcttctccttttgtgacaagtatgacaagctggggcatgtaaattttctttccatcagaccttggatgcaactgtgatcgtatccccatcttaactagatcttgatgggtacttaacccatccttcgtcttgccttgaatgttaaggagccgtccaatcacattgtcacatacatttntctccacatgcataacatcaatacaatgtctaacgtctagatcagaccagtatgatgatgaaagaaaatggacctcttcttccatatgcaagtcttacttntatccttcttttgggtctgtccaaatacagtattcaggtgtngaacccactggtatacctgctcactagtcaatggtatcggtgcaatatca

SEQ ID NO: 114868 - DNA, 309 bp, Glycine max
  unsure (1)..(309): unsure at all n locations
ccttaagtcacctgcagctgcagctttttgtctgtgaatataagcattttggagccaaatgcacgcctgcagagaattgagcactgtgtgtacgtgaatgcgatgaatgggagacaacgttcaaatgaagttacatgcgctcaacctggtgctattgccttaatctctggcagtgtcgaatgactccctaatcgcatggacgttcttaacgagctcacattactattgagtaatgaagctcatgcacatagtgtgtctacatcctcttgcacacacttaattgtgacattctaaatactcatncgggct

SEQ ID NO: 114869 - DNA, 432 bp, Glycine max
  unsure (1)..(432): unsure at all n locations
agctntgagccaattcaaacgacaataactttttacatggatgtctgattgagtcctgtcatatatcgagacgctcganatngaatgttgaatctctgagccaatccaaacgacaataactttttactcggatgtctgattgagtcccgtaatataacgagactctcaaaattgaatgttgaagctctgagctaattcaaacgacaataactnttaactcggatgtctgattgagtcctgtcatacatcgagacgctcgaaattgaatggtgaagctctgagccaattcaaacgacaataactttttacttggatgtctgattgactctcgtcacatatcgagacgctcganattgaatgttgaagctctgagccaattcaaacgacaatatacttttactcggatgtctgattgagtcctgtcatatatca

SEQ ID NO: 114870 - DNA, 403 bp, Glycine max
  unsure (1)..(403): unsure at all n locations
gcgtctcgatatatgacaagactcaatcatacatccgaganaaagttaatgtcgtttgaatntgctcagaggttcaacattcaatttctagcgtctcgttatattacaggactcaatcagacatccgagtaagaagatattgtcacctgaattggctcaaagcttcaacattcaatttcgagcgtctcgatatatgacnggactcaatcagacatccgagtaaaaagttattgtcgtttggaattgctcagagcttcaacattcatatttgagcgtctcgatgtatgacgggactcaatcagacatccgagtaaaaagttattgtcgtttgaatttgctcagagcttcaacattcaatttcgagcgtctcgatatattacgagactctatcatacatctgagt

SEQ ID NO: 114871 - DNA, 440 bp, Glycine max
  unsure (1)..(440): unsure at all n locations
agcttgtgcaaatcanatcactcctacattttatctctagcatgcattgtatgttggtctcgtcctttgtcacgggaagccggaaggtccatatcaccttcttaattgtacacatggggcactgcgcccccaaatgcgcaagtaagaagagataattntccgggctctcgtgtccgtaaaatgcattcatatcatgcatcgcataagcatctcttcataacatcataatggacatatcctgcatttgtccgttatcatattccagcctcacattttgcatgagtcatggcatcatcatgcatatgcgttcaatttcataattacattttccgtgcataagcttaaagtatgcccgagtcattcatccctatgagaatgttgtgaagtattggcgatcaaaattgccattccttggatntatagggtgaaccaagctcatg

SEQ ID NO: 114872 - DNA, 494 bp, Glycine max
  unsure (1)..(494): unsure at all n locations
cctgaatngagaagaaatgattattaaacacacattatgaatatactaagtatttattacctatacttaacagnaaatacttataacattacanaataaccataaattgggagagtntgatacaatttatacaagttttatacacaaaagttagtcgttttcactgactaacaagcatcaattaaagaattctttataagatcctaggaactaagtacatcattcttcttgaatttctggattcttgacttgaatcgcactaatctttggcatcatcaaaacttcatatcatgtatacttctacatattcctttattacgtcatgcatctcttcatggcatcgtaatgggcatatcacccctgcatcatattcatgcactgcatntgcataaatcactgcattatcatacaccttcatttagcatgctnttgttttccaactgcatatattctacttncatcattcacatgtcatggtcattcatgcatgatct

SEQ ID NO: 114873 - DNA, 475 bp, Glycine max
  unsure (1)..(475): unsure at all n locations
acctgcggcatgcaagcttcagctctcaacccagactcccttcacttaatctgatttcaggcttaaataggtggccttgttcgtgctcgtgtgcttagcgcaattctgaaccgcttagcgcacattagtgaatttcggcttagcgcgttcttttctcgctcagtggatagactgaagcaatgcgcttagtgagatgaagtggtgtgcttagtgaacatgtacagctcatcttcttccagattcttcctcgcacttatccaatgagtgttgcgcttagcgaacactcgctaagccagcagattggcttagcgagaaggtgaaaaataacacttttcagagtcacctaattaacctgaaattgagagaaaatgattattaaagatgttctgtcttggattctagaggtgaccacgagcaagttnttactgctctcagtgcctaacttttcattcctcatagaactcaagtgtgaatt

SEQ ID NO: 114874 - DNA, 339 bp, Glycine max
  unsure (1)..(339): unsure at all n locations
gatatgtcacgggggtcaggagacctttgggacgtcatgtgtggtgctattgcccaataccaagcttgaccaatcccgacccaacccgggcatagacagtcagtgagaacctgtgatgtacctaagcatgcgagctcctggcagtcaacagataaaatgaacatagaccacaaagcatggaggctngtagtggctgtgcagctgtgaatcttgtgtgatatatgaggttttgcctctgtgaatcgattaccaagggtgggtaatcaattacaacgcttaataatgaagacaggatgctaagatggtctctcgtaatcgtataccaaacgggtgtaatct

SEQ ID NO: 114875 - DNA, 356 bp, Glycine max
  unsure (1)..(356): unsure at all n locations
ttaactcacctgcngcatcaagcctttaaagcccanacacgcatggagcatcaagctgataagatacaccgtgaagtcaattaccagccaggtgaatgggtgtatgtaaagcttccacctcgtcgtcaatgttcaactaaaggagttcatgtgatcaccgacaaattagctaagccatactatggcccatttccgtgttctagaacgcctttggccctgtggcctattaaatttcacttactagaggangcccggattcatccgatgtttcattgcttcgtattcaaaccatttcacggctcaccggaaacaacacctacggaggactggtaccatatcggcaaccactaccacct

SEQ ID NO: 114876 - DNA, 476 bp, Glycine max
  unsure (1)..(476): unsure at all n locations
atgcaatctaatcaattactaaatggtgtaatgattatctcgaaccacaaaaaacattttcttctaaagctggctttataatcgattactaaaagcctagtaatcgattaaaggaatcatacataaagcataaatcttataatccacataacanagaantatatagcaatcgccagntcattcaatcatcatatcaaaatcaatcatcatacaccatgatttaaccctgtggaggaaagttagtttatggaaaatgaatgagcatgggtaatggcttaccttnggaaaggctngcanagatcttaacctatctatgaagtcatncacccatctattctataggtcatnntcaccgtagtcaccaccgacaacctctaacactatgtcgagggctgtcttaacacccctaattatgtgctactctaacaacaaactcgaattctgaggttaagaacaaacctatgtcccccatctac

SEQ ID NO: 114877 - DNA, 460 bp, Glycine max
  unsure (1)..(460): unsure at all n locations
gcaagcttgtcctntgtgccaaaaaggagtggtctgattgcactgacaataatcatcagcccgtaacatattcacataaacgaggttattcttcacctattagaatcctatatagcttcgtcctttgagctataaaaggagtggctgagattgcggtaacaacaatcaacgacccataacgcattcacgtaaataaggttactattcactcatcagtaatcctacagacctttatcctctgtgcaaaaaaaagagtggccgagattgcaccaatgacaatcaatgacccataatgcattcacacaaacaaggttatctgttacccgtcaggaatcttgtagcgctctgtcctctgtgtcagaaaatgagtgaccaagatggtcccgacgataatcaacaacccataatgcattcacgtaaacaaggttactgttcacctgtcataaattctatcctttgt

SEQ ID NO: 114878 - DNA, 408 bp, Glycine max
  unsure (1)..(408): unsure at all n locations
tcaactgaaattaccatagttctcagatgtagggaactattcagatacaccacaaagggaaaaataaaattaatgtcaagacgcaatttctaaggcaaagattaagcactagcaatgtgtttgacaagaatcaaccattaaattattataagcaaaattgtcattacttacacacatatatcaacaaaaatctttctaaaactgatattatggagaaaaataaaaaaggagctgcatggaggaaccttaaaagctntcaatacattgtgcagtaaactcaaactaatctaagtcttacatacaatactatattgattaaatttggacattacatagcccatattatgagactacaagtgaattcaagagctgaaattagaagcacatcaaatacaaaacaaatgcatg

SEQ ID NO: 114879 - DNA, 443 bp, Glycine max
  unsure (1)..(443): unsure at all n locations
agctttatataagctgagttatttatcattgaacacaagttgagttntattcagaaaattagagtatatctcttttatcttagtgagagtgatactcctatattcttgagtgattcaagaacaccctggctgtatcaaaggactttacaacctttgtgtgttgccctcgctggaaagagtgattctttccttcctttcatcttcacccttgttcttttaaaccacaattccacaaaatccacctctgcccagaattatctcgtggccataactctcattttacgcactcaaattaagtgattcttgagcctaaattgaatttcaaaacgagacctttcacctcgttatggaatcacctcatttggagccctgtagcttcagttatttccatttctatatttctgtccagccaccacttaacctacgttntaccatcccattca

SEQ ID NO: 114880 - DNA, 342 bp, Glycine max
  unsure (1)..(342): unsure at all n locations
caatacacctacaatctctaatggagaaggttaccactactggaataccccaatgcaaatctttatccatgcaatagatcttaatatctgggaatccatagaaatatggccttatatacccaccacagtatagatgagtttcaatacatggtagttcatcaagtgagagcataaccatcgattaacctacatatagatggtctgaagacgatttaaaacgagttcaatacatcctaatagccaataacataattacatctgccctangaatggatgaatatttcacggtatcatattgtatagtgctaaggaaatgtgggacactcttcgactaacacatga

SEQ ID NO: 114881 - DNA, 459 bp, Glycine max
cctctaagtcacccgcggcatgcaagcttgaaatacatttttgtgcttaatttttatatacccaaaacgtattattaaatgaatagcattaatgtaagatattacatattgttagtatctgttaatatataacactacagtgaaaaataaaatcaaaagataagtttattttaagataaaataacagtctctctaaaaaaagataaaatacaagtttaatgtaaaatttaatttaacatgtaaattaacgtgtgttaggaatcactctcaacaaacatttaatcgtgtatactcagctattacttttttttaccaatcaaaaagtaaacttgattctctgaagcgcattatctaataattttagagaagttaaatccatttattatagttgaacttgaatttaataaaagaggttctccgaccttccgttaacattaataattacaatttgaaatcttt

SEQ ID NO: 114882 - DNA, 446 bp, Glycine max
  unsure (1)..(446): unsure at all n locations
gttgttcagtatgttatatggtgtctggtattgtctacataagctacagaatgattgtgatntgttgtctatgtgccagactgggcttgccgatccacataataaagtgcatgtatacttataaaatgttgatccaaagaggggtcatgttaatgaacttgggccaatgattgaagcacatgccatgcctataaattatattgcagacgatgttgctgaggctgttgttaaagagtgtactcataatggtatcgaagatatggatgttgatggcgttaaaagtggttcaaatgatgaaaatgaagtacgtgaaactggtgtactatatgcagaaactgaatttgttgacacaagagttgaattacacctcgaattgtngtagttgataatgatagtaacaatggtgcgtatgacgatgaagttaagaacatgatgggatgttgagt

SEQ ID NO: 114883 - DNA, 394 bp, Glycine max
  unsure (1)..(394): unsure at all n locations
agctngatcaaacaaaatctaaacattcctatccactcaattcatacaatttctcattcagatcaatcacaacacttcatttcatacanaatcaaaccactaaatttcatattcaatcagttcactgttcaatcatgcctttgtacanacaactgaaatttaagagactgaaatttaaataactgaaccataaagcataaactaattaaattgatcaaaataaactgttcaaaatgcaaaacaagagaataaaaatcctgtcaatcctctgcgggtgatcctctgcgggagatcctctgcatgctcattaaaatccaacaccggagaagctggtggatcttgaacaataggttactctggctcccacgctggtgcaaatggctgggaatcctca

SEQ ID NO: 114884 - DNA, 492 bp, Glycine max
  unsure (1)..(492): unsure at all n locations
taaaaatcaagaaaggattgtgaggatacgtgataaaaaatacatttatgagatggaaaattngatgagatatctaatatgtatccaataattacaaattatnttattgtatattcaataaaattaaatataggtactaaagaatntacaacaattaacaccccttattcaaacaattgggttagattcctaatgaatattacaactattagcatatttgttttttattctaaaccgctcanagccaatatttatatataattgtatttttatttatatcgagtcattgnttaagcacaagcgttaaattcttatttcacacaaaatgatattttaaacatgtgccactaaatccacatgtatcaaacatcactanatcgtagagtgtaaaaaaaatgctggaatagaaatcttcgttattcatcttgaattctcggtaggtcaaattacacctcgatttatcacactatgagaagtacacctattaataat

SEQ ID NO: 114885 - DNA, 427 bp, Glycine max
  unsure (1)..(427): unsure at all n locations
aagcttggcaatggaaatggaagctntttcataatcagggggagttgtgggtcagggtaatagagtcaaagtatggcaggtggaggaatttaaatgaagcaaggtcagccaataacgaatctacatggtggagggacctgaagattgtagctcagcatcctcaacaggatcaattgctgaatagttcgatagtgtggaaggttggacgtggggataaatttaaattttgggaggacacttggacaggggaagataacaaattactagagaaataccctaggctttacagtatatctgttcagcaaaattatttcattctgcaaatgagagacttcaaagattcagggtgggaatgggactntaaatggcggagaccgttgttcgacaatgagatagatatggcggtatcatttctacaagaacttga

SEQ ID NO: 114886 - DNA, 495 bp, Glycine max
  unsure (1)..(495): unsure at all n locations
aagccttgctactctgtgtgactaggctagcatgaatagctaatgtccgagatggtaatctgcacaaagtaatgtgatagtttcaagatattaatattctntaatatcagagaaagcccatataattgtatcccaccttanaaatttgagaataatgattttgtttgttaaacattgggagaaggaaacatattnttaaagaacctggatgtgtcctacatataaccaaggacatgcatcagacgcataagaaaactactaaaattctataccattgtctttgcaacggccttaaagactccagtctcatgcttctcattgactgggatcttcaaactaataatatgtcagtcaagctttntcaattcattattcagtgaanagaactntggcatctctatatatagngtgtatcgtagttgtcataactttgagacatcagaccaagcantcacaaggaacaaacaatagcatctaacacacatacctttatat

SEQ ID NO: 114887 - DNA, 435 bp, Glycine max
agcttaggtgaggacgtgaacataccgtcttttcgcatgcacactcacttgcagcacctcgaccgaggactatatccttacgctctggacacctcttaccatatgtctgcggcgagctttaagttctggattatcatcatgagcaccactactagtgttgtctcagggctttacacgacactggagtgactcctcactgactaggatagctcgcctcgacaataatgtaagatctcgtcgaccactcgcactatttcttcttgctctcacaacatatgtgttccgctgataagtataattaagcttccctgacatttcaccattccagcattcagtatgtgattggccaagactcttcttgtcactgtctagactgattagaaactactgcagacataatgattagacttctgatgagctgaatcgctgtttgat

SEQ ID NO: 114888 - DNA, 443 bp, Glycine max
  unsure (1)..(443): unsure at all n locations
agcttgtagagatcatccncatgacaacattattggtgatatctcanaagggctaacaactagacattctcttaaagatatatgtgataatatggcttttgtttcaatgattgaacctaaaaatttaaaagaatccataatagatgaacattggatagtagccatgcaagaagaattaaattagtttgaaagaaacaatgnttgggaactagttgaaaaaccagaaagagcacaagtgggacatgtcaatttattggatctactcttgtatcattgcatagtaagaaacaaaatagtgttgctttatctactgctgaagcggaatatatttctgttggcagtaattgttcccaaatttatggatgaagcaacaactatccgactatggaatccttcttgatcatatacccattaggtgtgataatacaagtgcaatcaatcta

SEQ ID NO: 114889 - DNA, 442 bp, Glycine max
  unsure (1)..(442): unsure at all n locations
ctctctcaagtgaagcctagcttctataactgatacgctctgttaaaaggctcatggctactatcttcagaatcctgatgaccttcatagnacctcatgtcaagaaacttctgatacccttgcatntactggtggtggtaacttctcgatgacatcaatttttgctttatccacctcaatgcctcgggctaaaattntgtggcccaacactatctcttcttgaaccatgaagtgacacttctcccaatttagcaccagattggtctcaacacatcttcgctgcactagctctagattcatcaagcaagaatcanaggaaggtttgaagactaagaaatcatccatgaagacttctatgcacttctataccatgtcagcanagatggctagcatgcacctctgganagtggctggtgcatttacatacccanatgacatcctt

SEQ ID NO: 114890 - DNA, 436 bp, Glycine max
  unsure (1)..(436): unsure at all n locations
agcttgtgcattcaatatcctgatgagggtgttccatatgttctcaagactggactaatacatttgttgcccaagtttcatggtcttgtaggtgaagatcctcataagcatcttaaggagttccatattgtttgttccaccatgaagccccctgatgtccaagaagatcatatctttctaaaggcttttcctcattctttggagggagtggcaaaagattggctatactaccttgctcccaggtctattttcagctgggatgaccttaagagggtgttcttggagaaattcttccctgcatctaggaccactgccatcagaaaagacatntcaggcatcaggcaacttagtggagaaagcttgtatgagtactgggaaagattcaagaaatngtgtgcaagctgccctcaccaccagatttctgagcaactccttc

SEQ ID NO: 114891 - DNA, 497 bp, Glycine max
  unsure (1)..(497): unsure at all n locations
cgcgtatcaggcactcattaatcgataagatgaactaggcagatggacaatattgtgcttctagttgtggcagcacttctgatatagaactctcatctactcaggccaatgctactagctctgtacccaccacaccaagccgtggtcgattgtggtgcattggtagaggcttgtaaaagagtatctcctcaattcctcacagtgactgagtagttggctnttgtaaatgataagtattggtagtattattaccatattagcagtatgaatagaagcaaactgacaagtttgccttatagattttgggtgctnttgttgcctaggaagtttgtgtcttgtgcacaactattccagtcgtagattctgatngtatatcctagtttcttaatggctaagctgacaatntgaatanttaaagaagaatagttgcacaccttttcatttctacacactanttgtgataaacttattagactaacaaaatatgtgggtctact

SEQ ID NO: 114892 - DNA, 439 bp, Glycine max
agcttctatagaaggttcgttccttaattttctacaattgcatcacctctcaatgagctagtgaagaagaatgtggcatttacctgtggtgaaaaacaagagcaagcctttgctttgctcaaagaaaagcttactaaggcacctgttctagctcttcctgacttttgtaaaacttttgagctagaatgtgatgcctctggagtgggagttagagctgtattgttacaaggtgggcaccctattgcttattttagtgaaaaacttcatagtgccaccctcaactaccaaacttgggaacattactttgtttccaaggaatttgtcattcatagtgattatcaatcacttaagtacattagagggcaaagcaagtttaaaaaaggcatgcaaaatgggtagagtacctagatcaatttccatatgttatcaaatacaaaaa

SEQ ID NO: 114893 - DNA, 350 bp, Glycine max
  unsure (1)..(350): unsure at all n locations
tacaatgatgactacanaagatgatgacaaaggtgatgaacaaaaagctcacaagatcaaagaacaacacaagtgaatcaaagaacatctcaagtgaatcaagaacaagtcaagagttcaagaatcaagaagaattcaagactcaagaagaaagcctacaaacaagaatcaagattcaagattcaagatctcaagaatcaagatcaagattcaagactcaagattcaagaattaagagaggactcaatcaagataagtattaaaaaggtttttaaaactttgaatagcacatgtagttttgacaaaacccttaccaaagagattttactctctggtaatcgattaccata

SEQ ID NO: 114894 - DNA, 367 bp, Glycine max
  unsure (1)..(367): unsure at all n locations
agtctaaaagagacaaatctgatcatcatactntgattaatgcccaacaaactatggcaagtgaagaggatgagaagaaaggagaaacatatgttgtgactgccattcttatacgaccaagtttcccaccaacccaacaatgtcattacttcgcccataacaaacctttttcttacccaccgccagttatccacaaaggtcattccttaaatcaaccacaaagcctacctaccgcacttncaatgacanacaccacatttagcgtataccataacaccaaccaagaaatgaagtttgcagcgagaaagccttataattcaccctgattccagtgtcctatgctgacttgctcccatatctacttgat

SEQ ID NO: 114895 - DNA, 373 bp, Glycine max
  unsure (1)..(373): unsure at all n locations
tatttatatatcctacgcagatgatgcactagtgtaatcttgtcttttgtaatatgtaattgacatgagacttctgacgctgtttcttgtcattccaactaagacgaagcttaatcatattatgacgagcaaataaaatgaagactctctaagaaccattattctgtaattagtcaagtgtttgcctcttttgaaccaaggatgacgtggtcctaaaaagagtacactcttcttgtgtcaatataagactacacaacactntaccagatacttccactatataagacttgcaggtttacttatctagaattttttaatgctatatgtaggtgatatcttccatgctgcacccaatgttgatcattctcacgac

SEQ ID NO: 114896 - DNA, 372 bp, Glycine max
  unsure (1)..(372): unsure at all n locations
tggatggagtcttcatgtatcaattgataagttcatagcatatagaatgtctagtcttgtgcacgtcaaatatcacaaactacacaccaaactcttgaaatttgtagcatccacctattttgcttcattaaactatgataactgcattatgcactccactgatgttccaagtggcttccagctatccatcttgaatttctcgagcatctcctttgcatagatttgttgcgaaatgaagattccatcttacttttactctaccttaatgccaagatagtgtggcgtgcctaaattaatgactgtgttaatagtaataatttacataacaaaaaccatgggtaatttgtttttcttctntttcttttacaattc

SEQ ID NO: 114897 - DNA, 289 bp, Glycine max
gagaacttatcagccctaaccccagtaaaagaattttcttgcactagcaggctgaacttctttggtttaccctacttcttctccttgcttcgcatagaattaacttaatgaatgaatgctgatttaatatatataatcccactgttcgcaaatatctctccactttgatgaccaatccaaaccgtcactatgtgctaagcttgctcgtgcactctgagcacacatgcaaagtgcaacaggcaatagtgattgctcactaagccatcatatgcgcactacaattgacctc

SEQ ID NO: 114898 - DNA, 327 bp, Glycine max
tactgataaaaaaaatatacatatatcttgatcatgaaacggtttataagagcctcttaaagagtaggttagaaatatctataagatatatataattattatttaaaactagcatagagtacgtctcctacacggaataataaattttaataacttctctatatattataactatataagttatctatccattaaactttaattaataaaaaaagaatatatatatatataatgatattaacatacaatagaatgtcatgaaaatcacatcaaacattctatatgatgtatactatgatctcatatgcatgcatcaagatcgtattg

SEQ ID NO: 114899 - DNA, 501 bp, Glycine max
  unsure (1)..(501): unsure at all n locations
agcgtgttagtgtgtgttaaatgtctaaaataaaagatattatgtaataattntatttgaagaaaattttatcagtgaaaataaaatattctgaatatgaattttgtagtatttttttaattaaattaagttggcggtaatgatttattagtgtggtaataattgatgaacggttcaactttcatttaaaaaaattcgtagatcatatttatttgaagaaagtattttgagtacgaaatttatcttaatatgaagtcgtagtattttttataattagattaggctcattcttctgtgtcgttaaaatngataagcgttcacgtcgaaagtgttatttgatgatgttttattggtgcttgtatcatatntaatctaatatatccgtagtacatttttaattacctatcttcatcttgaagttattattgttaagattaatttattttactactaacttcgttcatgaatgtatttactttgtggtatacatagtatcttgaa

SEQ ID NO: 114900 - DNA, 356 bp, Glycine max
  unsure (1)..(356): unsure at all n locations
taagctggagtccgggaatctgtgtttatggaaagctctggtgtagtaagcattttctatatccaaaagggatgccactaggatcttttatgggtttagatnttacctaagactatctatttcttggaacttacttgtccagtttttggtatacttttgaaggattcaagactcaagttaatttctttagcattgttgatccaaaaagaatctgtagctatatctctgaagtcattgatgctggatttcttggacctcttttcaaagtatcattcctaaccttgtttctgacttaggtttgaaaatgaaataatatcgactagttactgtttcttgattacactggaatccatgta

SEQ ID NO: 114901 - DNA, 146 bp, Glycine max
  unsure (1)..(146): unsure at all n locations
gacacctgctgcatgcaactantaaatatattgtaaaaatactttataactatttaggtagtcttcacaaattgtcaaaattataaaaaacttttaaaattaaaaaataagatacttcaggctaacaatttttcaaaatttcaaat

SEQ ID NO: 114902 - DNA, 453 bp, Glycine max
  unsure (1)..(453): unsure at all n locations
tagagtatctcgagtacaggtttcttatatgaatntcttaatctatgttttggttcccattacactttntgtgggccccatgtcatgtcatttttactccaaaaatcacaaggaactacaataatcataaaaaaattcacacataaattttttattataacttaattagtattgcaataaaataattaatttaattttttattttactctaatttggcatttttttgccactattttccaattnttttttttaattacttcactttactttttcagtctaacctttccccttccctatgttgcctttcaacacggggaaaggggacgcgttgatttcttaagttaaactagtcattaccctttaagtagccctttaagtaatacaaggcaagggaaattcgtgttaaactatccttgagatngaaattactttggtaactaaatatttaaaaa

SEQ ID NO: 114903 - DNA, 335 bp, Glycine max
  unsure (1)..(335): unsure at all n locations
tatagtcctcaaggtgagctaccagtgacatgactaatcatagagatgatccatgcgactaacatgtgccataaggtgatgctatacattctgctttaccattcatgtgcatgtaataattgcacctaatataataaaaaaataattagttgacagtgccctcataagacaaaacactnttaaatgtttgcttcctttatttaagagacttgagcaaatcataaaattgttatgcaacaaatacaacattttaataaatattgatctaggaagttttgtagtgcataatggtggtgtcatgtaatcaaaacatgtactcttggcatatgattcct

SEQ ID NO: 114904 - DNA, 492 bp, Glycine max
  unsure (1)..(492): unsure at all n locations
ctttctattgtatggccatgtctcaattctttgatctgttctttgcgatatcacatggagatttcgtatagttacctctaggaacattcttttggtggaagttgaatttgactccttactaagggtgaatctcattagcagtgggtgttactactagaaaataggctcttaatattggttttttctacttccaacatcaatttttgaccaacgttgaaaccactaacattaacgaactcaatgttaacgtcggttttcaaaaaaccgatgttaacatacactatgcaacatcgattgtttagaaaaaccgatgtcgtataataagcaataaaccaaacaacatataaaatatgcgagaaacaacatcggttnttctaanaaccaatgttgtgttgcacacgacaacatcgattnttagatatntcaatngcacaacgctcttaacatttgaagagtatccctgtggcactntgacatggcacagacattgac

SEQ ID NO: 114905 - DNA, 174 bp, Glycine max
agttttgaggggctttatagggcaacaatagtgagctcaaacttcgaagaggtgaaaggaatcatcacgggtcaaaggcatgatctggaaggacgagctaaaggcttgccttatgtcgaaaagaaatttgtcccaacagttaaagtgagactgaagggaatatgtgggccatca

SEQ ID NO: 114906 - DNA, 406 bp, Glycine max
  unsure (1)..(406): unsure at all n locations
cattgggatcgattacagctgtttgaaatcaattggaacattgtaaatntagttgaaaactctttcaaatcccatttgcttctgataatcgattacaataatctggtaatcgattaccagagagtaaaaactctttggtaaacatgttttgagaaaaattcatgtgttacttacatntggatttcatacttatctcgattaagtcttctcttgattcttgaatcttgagtcttgaatcttgatcttgattcttggaagcttgatccttgaaatcaactatcctcttgaatcttgaagtgttcttcaactttcctcttgaatcttgaactcacctttgccatcatctatgttatcatcaaaatatctctgaatcaatcttgattcatcatgaaactctgcttctaca

SEQ ID NO: 114907 - DNA, 407 bp, Glycine max
tgatgacgaaaatcccaaagaatgatttctagattgagtcaacaagttcaagatcaagtttaatttcaagtttcatgaaaagaaatcgagaagattcaagaatcaagagaagtttgatttcaagattcaagagaagatgaattcaagtttcaagagaagaaatcaagaagacttcacaagggaagtattgaaaagatctttcaaaaaacatagcacacatttgtttttcaaaagagttgttctcaaaattttctaagttaccagagtttgtactctctggtaatcgattaccaacttcctgtaatcgattaccagtggcaaagtttgatttcaaaagctttcaactgaattaccaacattccaattgatttcaaaatggtgtaatcgattactagtgtatctgaacg

SEQ ID NO: 114908 - DNA, 382 bp, Glycine max
  unsure (1)..(382): unsure at all n locations
gaaaactcttcccaaaacacattcacatattacagctttcctcactcaaataccccagttacattttctttcgtccgaatcgttaaccggtggatcgacttgaaaattntactggaggttcctagtacagaaatatacatttttacttgtgggatctgctaaaaaatgtccagaacccaatatgtactacctcttccataaccagcaatgcacaancattttctgcacatgttgnaaaattttgctgcacaattcaacaacaactttctgcataatatgacagatattgaaatccatcttgcccacatccaatnttgctcaaatnggatcctacaagtcctaaattatgaatanatcgtattttaaaccaaaacaagcttca

SEQ ID NO: 114909 - DNA, 472 bp, Glycine max
actaagcctcgcaatcatatatatataattgtctacttttgtcaacagtctacattatctaattcaagcacacattgtttcacaacttagtgagaagctagatgaatacaacgtgcaagcaaaaagtttcaggatggcataatgtcaggttgaaattgattgctaaccgtgaaaaagatggtcgtacatataatgtacctactgttccagaagttgcagcactaattgtaggcaattttgatgcaaattcaaagagatattattattgaaacccagcatggacaattacaaaggatccatgaattacattctagttatctagctctacaataccctctcctatttccttacagggaagatggatatagacctgatatcctacatagtagtacaccaggtagcaagagaaggaagagaaatcgtcttacaatgagggagtgatttgcttacaggctataatgcagatcaaatg

SEQ ID NO: 114910 - DNA, 373 bp, Glycine max
  unsure (1)..(373): unsure at all n locations
catgcaagcttggttntcttccctctgatgacaagatgtttcgatntgtcctcctccttcagcattcaatgccaacatccgtccttgcaggtatagcacacacatttatcttactcgttactggtagagacatttaaacattttctacgagttaaaagaacaaactctgttatactcacacttaactaacacaacataggttcttcttgggttgacaaagtgggtggaaaggtgggaaatagttgctgtttagtaatcttaagtttctctaaagggtttttctcatttgtaaacaagattgttgttatatactagtagttaacaaataacaaaaaatgttggactntgtatggacgaagaattttgtgttgat

SEQ ID NO: 114911 - DNA, 466 bp, Glycine max
  unsure (1)..(466): unsure at all n locations
gatgtctggatggggatcttcacaagctttattctatcctttctcaatccgctgctgatggtgncgctaaatccatgctggtgctaaaccttccggatttctggatctgtggagccttgtgtttcacgcacttattcagattgtggggctagctggagttagatttggaagcttaaactccctgtgaacaaaaatatcacctatcatatttacatttttttctctccttttcctaggtgttaaataacacttgaagtgtccaaatatatttatccgtacaaaaaacatctactgggagatcgcaacttagaaggaacattattattcaaaaggccttgatcatgatggacctcttgcttcttgcctnctaagaagtacgatgtgaatcaaatcaaatataaataaatagataggtgcactctngtctctaggatctcatggagaagactntactctttaatcattg

SEQ ID NO: 114912 - DNA, 429 bp, Glycine max
  unsure (1)..(429): unsure at all n locations
gcactgcggatcgattaccaaaacattgttatcgattacagctctctgaaatcaattggaacattgtaaatttaattgaaaactttatcaaatccatcttgcttctgataatcgatnacaataatctggtaatcgactaccacagaggaaaaactctctggtagacatgtcttgagaaaaattcatgtgttacttacgttttgatatcatacttatcttgattaagacttctctcgattctagaatcttgagtcttgaatcttgatcttgattcttggaagcttgatccttgaaatcaactttcctcttgaatcttgaagtgttcttcaactttcctcttgaatcttgaactcacctatgtcatcatcttctgtatcatcaaaatatctttgaatcaatcttgattcatcatgacactttgcttctaca

SEQ ID NO: 114913 - DNA, 365 bp, Glycine max
ttcaccttcacgctaagcgcaccacttatgggctgagcgcgaggaagactctagaataagatgagttgtacaagcacaccgcttcacttcatccgcttagcgagaaaggcatgcgctaagccaaaattcactaatgtgcgctaagcgcatgagcacgaacatggccaactatctaagcctgaaatcatatttaaaatagagagtttggactgcgattcagagctatgcatgtctacagtttctacagagagaaagctccaagttccacagagttttgagagattctgctgtgtgaagatctgcacagaccatatctcgaagcaagagcaagtttgagagttcgagatgagtttgtgagtgattgt

SEQ ID NO: 114914 - DNA, 395 bp, Glycine max
  unsure (1)..(395): unsure at all n locations
gctgactaccagatctgtggcacgatccgnaggggggattacacaccggatgattaaggatcaccgntgcgtccctgtaccttgacggcatcgcattgagctggtatcaatggatgttcagcaatggctntatcacgtcatggaacggtttcctccaagctttcgaatcatggtttgctctgacgttctacgacaatccaaaaggcgctctattcaagttgatgcaacgaggaatagtgaacgagtatctaacctaatttgaacggctagcaaaccgcgtggtaggccttccacctccatttctcttaagttgtttcatctctggattaaacccaaacattcgacgagaggtgcgtggcgcttagccaatctcactcttgcaagccaccgccttt

SEQ ID NO: 114915 - DNA, 441 bp, Glycine max
gattgattcaaagaaagtttgatgatatataaggtgatgactaaaagctcaaaagtcaagaacatttcatgataacaaagatgatgatctccagaatcaaagaatgagttccagattgaatcaagaacacttcaaggttcaattggaaatttgatttcaagaatcaagaatcaagtttcaagattcaagttcccagaatcaagatcaagattcaagaatcaagagaatacataatcaagatgagtattaaaatgttgtttcaaaaactaagtagcacatgaatttttctcaaaaccttttaccaaagagtttttactctctagtaatcaattaccacattattgtaatcgattaccaatagcaaaatgggttttcaaaagctttcaactgaatttacaacattccaattgatttcaaaatgtttgtaatcgatacaatgat

SEQ ID NO: 114916 - DNA, 417 bp, Glycine max
  unsure (1)..(417): unsure at all n locations
gttgctagtgtataattgcgttgtactggtgtcacataaattccaatctattcaatatatttagtagcactgctctaatacaaaagatagtatactaattagtctataatatgaggtaaagaaaaattctaatatatttagaaatatttatatgaagcttatagagttgtagaagtactatctatggtgtatataccacggtgcatgagtcggttgggagaatgtcaagcttaagttggtatttgantgcatntgtcgtcaagtatcaggttnttgatacagacctctaagaaaacttcgatggtggcactcgaccagcatagatcacattgcatctaagggattcaggtataacagaaatctcttaagagtgtagactatgtgtattatagccaggtattcgttccaatgaacagt

SEQ ID NO: 114917 - DNA, 75 bp, Glycine max
caaggctttttttcttgggactggctactgatcctgggaatgtatcgctcacaattcccaacatacaccgaactt

SEQ ID NO: 114918 - DNA, 296 bp, Glycine max
  unsure (1)..(296): unsure at all n locations
gtcacctgcggcatgcaagctttgngngtgcatttatttttactgtgttaaatgtaaataactgttggctattttgcattctttacactgcattctaagcacccacgggtttgagtaaaaaaaaaagggagccctatactcgagttcatgggaatntaaggagtggaggtgaatctatcatcatgctatgtctcccacttgcttgataataatgaaacctcgtctagaactttctctctttataatgtggtgtcgctggtattccataccgncacaatattattatcttgagtgat

SEQ ID NO: 114919 - DNA, 323 bp, Glycine max
  unsure (1)..(323): unsure at all n locations
tctaagctggactctgagtggtagttanggctaagtggattggttcttttgttatactaangnttntccttatgggacagctgagatcanaagccacttcacaaaccagaacttcaaggtcaatggacaccgacttaagccattcctcacaaactcttctttagtggatgaagtggtggaagagacttagggagttcttctttcctatctccttctttacttttattacatttgtccgattctatttgatgttttaattgcttttaatcttttaattgtgccacattgaggacaatgtattgcttaagtatggagggggagtg

SEQ ID NO: 114920 - DNA, 241 bp, Glycine max
  unsure (1)..(241): unsure at all n locations
agctnttcagtcagcacctgaatttgtcttgttgatttggctatttctgatgttccttccggggcggagttgnttgaaataacgggtgaggtatttccctgaattgtgacagacatnagattctccttttaaaaaagcactatcggcatgcacaaaaaaatctttaatcgtatntcttgtgtcatctaatggttgatgttcagattggtttcctcgcgggctggcgcgcctcagaaagtaa

SEQ ID NO: 114921 - DNA, 227 bp, Glycine max
cgcgccagcccgcgaggaattcaatctttacttcaacaattaatgacacaagaaatacgattaaagaattttttgtgcatgccgatagtgcttttttaaaaggagaaatctatgtctgtcacaattcagggaaatacctcaaccgttatttcaaacaactccgccccggaaggaacatcagaaatagccaaaatcacaagacaaattcaggtgctgactgaaaagct

SEQ ID NO: 114922 - DNA, 160 bp, Glycine max
  unsure (1)..(160): unsure at all n locations
agcttncttaagaagattcctaaagaagctatatcttatctacacatacctctctaatagctaagctcaccttcttaagatgagaagctagagcttagcttcacacccnctataataactaagctcaccccatggcaaaatacattaaaataccaaaaaa

SEQ ID NO: 114923 - DNA, 497 bp, Glycine max
  unsure (1)..(497): unsure at all n locations
ctcagctagatggtgatntatcttcagtgaagattgtgttgatgtgttgatgactcgantcttaccacataatcatttgcagtatgtgaaatatgctatatgtgcctcaactcgtcatttatgcatattctttgcgatcattctagttcgataattggctcttgcctgaagatccacttgtggaatgataaatgtcttaatgataaaatctctgctcgtttaaatttaccatcacaggtggattcttctttgttagctcaagtgtctaattctatcaccaagttggcatggaatttcccccaacaagttgtggactctatccctggcatagtgaatgatattttggccattcctatacttgtctagcctcaggaggatttttttatttggaaacatactgattctggtgagctttctttganagaatgctttattttcttatagtctccttcaaagcaattactctattttaagactatatctagtcgaattgtatc

SEQ ID NO: 114924 - DNA, 191 bp, Glycine max
ttattggcactacaggtacgatgcacttacgtgcattgatatcgagggaatcacgcgcccagactcttgctgtatggaaacactggatggtactatatgtgcttgcgcctgagaacaacctaatcaacactacgcttctggggtgctggaaatagacgagagagctttctgctctgtatgagactactcat

SEQ ID NO: 114925 - DNA, 456 bp, Glycine max
aagaacttagaaagatcagaacagcttgttacttatcattcgcgtgtatgacatccactccacaacgtgtgaagtagatgagaccttcaatcctattacgcaacgtggcggacaaaagtgggcagcttacttgaatggtcattattgtcaatgcggaaggtattcagcgtttcactatgcatgttcacatattattgcagcttatggttacgtgagcctgaactactaccaatatatatatgtttatacaaatgagcacatcttataagcttactccccacaatggtggcctcttgggaatgaagcggctattccttcttctaacgacgcatggacacttatccctgacccaactacaattcgtccaaaaggttggcgaaaatcaacaaggataaggaatgagatggattgggtcgaaccatctgagcaccgacaaaaatgcagtaaatgtggagt

SEQ ID NO: 114926 - DNA, 403 bp, Glycine max
  unsure (1)..(403): unsure at all n locations
cgcgacatatcttcaagtaccactctgtggtcaacgaataaaagcaggaagtttcacccttctatacttnctcatctcaagcttgtaggattatggggtacccatcacatgtggtactatgtggtggtccggcgatggtgcacaacaaggttttcacatccacaaatcgcacataaacccaccatcccctgttgcccaccttcaactgagctcacgtactcccatgtagcccatatccttcgttctctcaacacctggtccccaacaatccttccaagctttcccaacatccaagtaactcaacattcaaacaacacaaaccatcacagccaagaaaatagggcaaaggcagaaaactctgcccataacaccaaccataatcacagcttgtctcacttaatga

SEQ ID NO: 114927 - DNA, 493 bp, Glycine max
  unsure (1)..(493): unsure at all n locations
ctgcagcttgaactcttgcaattattaaaaacttacacttataagttatgactttgaaaaatcttcagaaacaagtcactctgaagaattgtgacttttggaaatgtatattttgaaaatatatcagtggtatatcgattacaaattagggtgcgaatcaattacaccatcagcacgatgtgactcttctattttaaattttgaaaaatcttaacgttntaaaacaaatggtaatccgatactacatttttgtaatcgattaccagagagtaaaactctttggtaatgattntgtgaaaacctcttgtgctactcaatgttttgaaaaactttttaatacttatcttgattgagtcttctcttgattcttgaatcttgagtcttgaaatcttgatcttgattcttgaaatctcgaatctgaatctttgcttgaactgtgcttactcttgattcttgcatcatcaaaaacctggaaacattgcttcataatttc

SEQ ID NO: 114928 - DNA, 464 bp, Glycine max
  unsure (1)..(464): unsure at all n locations
tatagtaagtcatatacatgttcangaatntcaagaagctcatanttttttacaatagctccttttgtaaagaacaacctgtatggatgcttgcaatatttttttttgtcaaaatctctttagtgtttccacacatggatcattttaacacaaatatgaaggaagaggaaaaagtattaacacctatatgaaggcaatgtaattttcctaaaataaattagttgtatgaaccatagtatatttacctgtgggtccttcatatgaatgaccatctttggattaacatgacgttcttgctttatgtcaacaaactgatcaatcacatttgcttaaaaaaagaagataataaatctaaaattgtcccccaaaagcatacaccatantttattctataatgattaatatgcaaattagaaattacctactaataccattattttacctcaaagttctaacaatataag

SEQ ID NO: 114929 - DNA, 478 bp, Glycine max
  unsure (1)..(478): unsure at all n locations
tatattaacattacatcacaacaataatttacaaaataaaaataaanaatttatctttatattttatatcacaagtcttcgatcctatttgtattcttttctttctttctattttggttttcccgaattagcatcattcaggttggcacatgcaacacaaccaccccagttgagttccattgacaatagtgacaccaattctcggctaagatcatgggaaacccatgtaacttcaataatttcaagctgaaacccagtgatctcttctcaaatgggtacccaaaaagatacgaaatttttagaaacccttggctcctcgacaattgtgaccaacgagggttttctaatccaaatgcagcaagactgctatttgagtgagggtaatcatttcccagttcacagaaaccattgggaagttatcaanaagcaatcatttaagagagcatgtcttagctcatagaaagagaagacccaaatt

SEQ ID NO: 114930 - DNA, 366 bp, Glycine max
ttcttatataactttagatcacaaaggtataataagatctaacccgttatgatccaaattcatatttctcatcgactaccttactaccatatacctctatcttatattgaaaaaaaattgatacgagtgtgcgcacatatatgtatatatgcacgtatgcctcatattaaaaaagtcaacttttgaatgtattatcatatcataattgaattcagaagtataatctaactcgtcatgtggacaaatcatctataataatgtgacactacatggtgttaacaaacgatgcacaatataacataagtatacatgcttgagaagcccttctatagagaattgcagaggttgatacttatacataaatca

SEQ ID NO: 114931 - DNA, 332 bp, Glycine max
aacatttgcaacccaaaacattaagatgttagaggtttggtttccaccactgaacagttcatatagaagttttcttcatatggggcttattaaaccatattcatgatatatcctgcattattaatggcttcagctccaaaatattgttgaagaggagtgtcctaaattaaattctgtcatattcttcatagacctatatttcctttcaacaactctctttctgttgaagagttctacgtgtataatacttttgttctatgccatgcttatcacagaatgaatcaaattctttattttcaagctctccctcatgatcactgcctatagatata

SEQ ID NO: 114932 - DNA, 422 bp, Glycine max
  unsure (1)..(422): unsure at all n locations
agctgaagggtaactagatgccttggtttatctggtaacccagctggccatgaataaaaaatctgcacctgtcgccagactctgtggtatatgctcctctgtcgaccaccacacaaacctttgcccttttgtgcaacaatctgaatcaattgaacaacctgaagcttatgctgcaaacatttacaacataccttcttaacctcaatagataaatcagccacaacataacactgatgacctctccagcaacatgtacaaccccgggtagaggaatcatcccatctctagatggttgagtcctccacaatatcaacaacaacgacagccttattagcataatgctgctggcccaagcagaccatacgtntcttcacctaatcaactacaacaatagcaacagactcatagacaacatacagttg

SEQ ID NO: 114933 - DNA, 487 bp, Glycine max
  unsure (1)..(487): unsure at all n locations
gatactaagctatggtaataaaagtgattcaaagtgtttgatgattttcttgatgatcacaaaagatgatgacaaaggtgatgacaaaaagctcaaagatcaatcaaagaacaactcaagtgaatcaaagatcaatcaaagaacaactcaagtgaatcaaagatcaatcaaagaacaactcaagttaatcaaagatcaatcgagaacaattcaagagttcaagataagaatcaagaagaattcaagactcaagaagaaagtctagagacaagaatcaagattcaaggatcaaagatctcaagaatcaagatcatgattcaagactcaagcttcaagaatgaagagaagactcaatcaagataagtattaaaaagtttttcaaactttgaatagcacatgagtntttgacaaacctttaccaaagagttttactctctggtatcgataccacatttctgtattcaataccagtcgcaaattgtgttga

SEQ ID NO: 114934 - DNA, 469 bp, Glycine max
  unsure (1)..(469): unsure at all n locations
catgcaagcttgtgtctccaatgcatgcttgaccattctatctgcaacttaattcgcttccctggaaaaaatgtgcctatgctttaagcattaggcttgattactattcttcaaaattgaaacaagttattctaaagcaatatgcaatttgtcagtgctttgttggttaatacaaaaaatagaaataagaaatgagtcatgttaagtgcctaggatgtgtggaccaatttaaaaactaataaagaactcattataaaaaaaatgggatacaacatcaattataatgacntttcacagaagggttttaatcgtctntataaactatgttgtaaaagatgaatactnttgacgacggtctctgactttcatatgagttataaattatgaatggttttgacgtacatcgtcttacgaaatacactacttgtatataagactggttaatagtaacaccatcttacaaatatta

SEQ ID NO: 114935 - DNA, 315 bp, Glycine max
  unsure (1)..(315): unsure at all n locations
aatggctatcataagcctatatatatgtgacttgagacacgcaattgccaatagtgatgagacacaaaaggtcttatcctcttgacaagcagaatttgtttatcctcttactaattccatggccagaacactcgtgattcattaatgaatgatgttaatgctcaaattgttcaatctatccctatcaacagagatttttcatnnntgcttattattcttgaaagggattaagagaacgaaggtctcttgttgtgaaaagattctgaacactaaggaatgattctccgtgtgtgttggaacttgtacaatgaatta

SEQ ID NO: 114936 - DNA, 418 bp, Glycine max
ctaagcttgagaaattgccacagcacatttttcttttgttttaatggccatccacacctataataagtgacttgggacgaatttcttctagttttcccattcgacaagcgtaatcctctaaacaaaaatcctaatcttaaaaattcctggccaaacacttgtgtattcaataagaattgaggcttcattgaacatctgtctctttaagagagacatagcttctcttctacttacttctaaaaaaggctacagactggagtctctgttgtaagcatctgacacaaagaaggtgtcctgtgtgttcataaggtaaagatttgtgagatagtggaactcccaatagttcttgggacggcgtggcacaacttgtcaccagataaaacggatgcttttttgctaactcttattttgtgctatg

SEQ ID NO: 114937 - DNA, 105 bp, Glycine max
  unsure (1)..(105): unsure at all n locations
cgcttgtggagcttctatggacgctgtgtcattcttcttgtatgtatgcctttcatagagaagctccaccgtggacatgcggncgatgacttatgtgtatatgtt

SEQ ID NO: 114938 - DNA, 440 bp, Glycine max
  unsure (1)..(440): unsure at all n locations
cttcacaaaaatgagaagaaatgccaagaaagaatacgttactttgatgtttccaaaattaaccttgttggcatgtgagacacaacacgagagagcaaagttcgattttcataagaccatattcgatttccaaaattaactcatttgatttggctctttgcattgtcatattcgattgcgcctacaccatattcgattatggaattatgcacattgcaagttattcgaatatgccgtatttttttcttcttcaaattcaaatatggtgtagtctcataataaaatcaaatattatntaagatattaaaatggtttaaaaaaaggaaaaataattattatatgagaaataatatggacaacattagaattataaaaaatcttaatttattcttaatatctactaaattattntaattcaaaattntcatttnttttcactc

SEQ ID NO: 114939 - DNA, 469 bp, Glycine max
  unsure (1)..(469): unsure at all n locations
gcttctcccncaattntctataaatatggggagaagtgaagtgatttagggtttagccccttatgcacttctctctctttcgaatttgcttggaaaaatctgttccgtgaagaaaatccaagccgaggcgctttcgaaacgtttccgtaacgtttccgtgaggaatttcgcgaaggtttcgaccgntcttcgacgttcttcattcgttcttcatcgttcttcgatcttcaacgggtacgtacctcgaaccaagcttttcgattcattctatgtacccgtggtggtccacattgtgtttcgtgtatttttattctcgtttcatttactttttataccccctttttgacgtgcttaagccattttatttaagtcatttctcgcttaacctaaaaataaaataaatttccaccgatcngttgaattgtatcatctgttaatttcgtattaaatgaattccgaccgttcgatc

SEQ ID NO: 114940 - DNA, 437 bp, Glycine max
  unsure (1)..(437): unsure at all n locations
gctctccagaaactcanatggtcttaaattgttactcgtaagtgcgattcaggcgcataatacatcgagacgctcgcaatcgaacaacgaatgctctcgagaaagtcagatgatcataacttttcatacggaagtctgatgcaggcgcctaatatatcgagacactctagatgaaacaacgaaagctctctataaactcaaatgctcattaattgtcacacggaagtcctattcacgcgcataatacatcgagacgctcgaaattgaacaacgaatgctcttgagaaattcaaatggtcataacttttcacacggaagtgcgagtgatgcgcatcatatatcaagaaaggtgaatattgaacacagatgctctcgagaaattcaaatggtcataaattgtctcacagaagtccgattcaggcgcataatacatccag

SEQ ID NO: 114941 - DNA, 301 bp, Glycine max
tattacctcttcactatcagagatgacaatgttatcaagctgatgatcctcatcatattaacatgccttcaagcgtggttcaactctatatgtggacacattatccatcatacacaagttggcttcttactcattgtcctcgtcgaacgatgatatcgtcaagttcttccaagtgctcatgagacttttctttttggactcgaacaaaaacattctttttattctatggtttttcaggtcatgacattctaacatgaagtgccctgacttatggcacttatagaaaatgattggacttttc

SEQ ID NO: 114942 - DNA, 95 bp, Glycine max
  unsure (1)..(95): unsure at all n locations
gcttgcttctatgtcctgttcattgctntaattgttgaataatccctcgaaattgtctctntaaaactgcattggtttagctatcatttcatttt

SEQ ID NO: 114943 - DNA, 458 bp, Glycine max
  unsure (1)..(458): unsure at all n locations
tgcagcttaatggagactacatcattgttcttgtgatgattaantntacctttatcagatgttcacacatgtgcgcacaaggaagctggttangaaccaaattggaattatatatgtgcagctgtggtgatgccaatattcaaatggacaggtctctaatatttgtgtgggcttggtgctgataaaaagtaaagttgaagggtgattatatgaatgctnggtggggaggtactacttactagtgcctcttaatatcttcataaggattaaggggttaggcgttnnttgtttatatcggcccataaaatatatgtattctttgtttacaattatgagtatgatggattaatttactttctaaagtgagttggtgatcacttatttagaggatcactctctattattagtcaagcaatgatctacatatataaaggtttttttgaagtaaatatataaaa

SEQ ID NO: 114944 - DNA, 463 bp, Glycine max
  unsure (1)..(463): unsure at all n locations
tctcacttaagaactcctgctataataaatctgtgttctctcgtgaaactctgatgaatgagaggcttgtgagacatactataaagttccacttctctccctcttttattgcttcagatttgcgctcccccctctttctttccctgcctctttcttttcctccattgaagcatctttccaagcttcttatccaaggctcatcttggtggtgaagctccttcctccatggcttattccataatggatggcgcctcctctcacctctattcctttgtcttccgctgcatctccatggtgaaagatcaccattaaaggaccccattgtagctcagagatccagcctccatagaagccccacaagcaagcttccatcaagatctctttgtttatataataaggtatgtntcacagaacataagagaaccgaaatctataggctctaattacattgaatcagccgtat

SEQ ID NO: 114945 - DNA, 507 bp, Glycine max
  unsure (1)..(507): unsure at all n locations
agcttttgagccaaatcctgactcaccatattccttacccttggtatcaaaaaaaggaaagaaggaaatgaaatttccaatcaaagagaaagcaaaaaatgaatgaaaggaaattcccaatcaaagagtgggagaaagagaaaaaaataaacgaaaggaaattcccaatcaatgagtgggagaaagaataaagaaaagacataaaattcccaaccaaagaatgggagatagtaaaaaagatggaaaccatgacctagaagtggtcttctccctttgattaccaaccaaaatcctgtgcgctagcgacttttcgccccgcactatacataaacagaagaggaaaagagccaaccaaatatcaaaagccaaaaacacacataagccaaaataaaatccatcagaagaacccattcgcaacggaaatcttattgatccatgatcacgcatgtaatnnttgattcgataggaaataattttgcaagtcaattcatgacatatctatggttc

SEQ ID NO: 114946 - DNA, 467 bp, Glycine max
tctttgagaaagacttcttgagaagctagagcttagctactctcactcctctcataactaagctcaccttcttgagaagcttccttaagaagattcctaaagaagctagagcttagctacacacatctctaatagctaagctcacctccttgagatgagaagctagagcttagctacacaccccgtataatagctaagctcacccccgtgacgtaaaaagatgagaatacaataaaagagtccttactacaaagactactcaaaatgccccgaaatacaaggctgaaaccctatactactagaatggcgaaaatacaaggcccaaacgaaggagaaacctattctaatatttacaaagataagcgggctcatacttagcccatgggctcaaaatataccctaaggctcatgagaaccctagggccgtccctgggatctctagcccaatctacttggagtcttctacc

SEQ ID NO: 114947 - DNA, 289 bp, Glycine max
atctttcccacactccttctggtaccctaattcatcctttatatggaaaatgcactctattactctctacacacctatctgtgccattattttatggaataaaatctattcacactcttctactcctgcgtttaaaggggtttagagggaaactgatttctttacgcccaccgcagagcgacctataaacattcttatatcttcatccctttggtcgttcttgtttatcacattattttttcttcatcatcatatcattatcttacaagctacaactataagatgataa

SEQ ID NO: 114948 - DNA, 363 bp, Glycine max
  unsure (1)..(363): unsure at all n locations
gctgatattggctaagtaatgacatatgtgggctgatgggaaatttgaccgtgtangaatggcagtcatagtccctcattctcatcctctntgtttgccccagttttcgcatttatctaatgtggatgatcagatttacctctttccagacccactttgatcttttcaccggcgaagatcaaatccgcaaagcttgaaggtgtgtaacccaccatatttccatacaagggttgtggttgggggcgaaattgatgcccctccacaatattttgcangggtatatcaccaactgcttgcccttcattggcatatccgaggcaaggcttcgaattggctagattgtggaggggaatttcatgtgtc

SEQ ID NO: 114949 - DNA, 485 bp, Glycine max
  unsure (1)..(485): unsure at all n locations
agctttaactgtaattgcaacgttccaatttgttttaaaatggtgtaatcgattacaatatattggtaatggattaccagtgtatttgaacattgaaattcaaattccattgtgaagagtcacatcctctcataaaatgctttgtgtaatcgattacatggttttggtaatcggttaccagtgacaagttttgaataaaaatcaagagatgtaactcttccaatggttttcagatttttctcaaggttataactcttccaatggttttcttgaccagacataaagagtctataanagcaagaccttgacttgtatntcagtaactcttacaacttctttaacaacctttgagaaatcttgaanaccttgcttctcatctttnttcttcttcctttgccaaaagctttcaaagttttctggtttccaaaccttgttctttcacagangaccaaaagtgtgtattcatctttatcattctcttctcc

SEQ ID NO: 114950 - DNA, 344 bp, Glycine max
  unsure (1)..(344): unsure at all n locations
taagctcaactatcatgatgcatcggggcttaatattttatgagacaccataggaacacatgaacattgttagatagagaatatctctttatcctcacagcacctattaagaaggccaacgtggnttctacacatcatttctctccgcgtgagtatactttttgcacagatagctcacacacttgttcatattcatgcttatctttacacaccaaacacctatttgcttgaatagcttaccaaaggtcacaagttactngagagttcgatactcggttcttaccagtttatactacatgtgcgatccggtgcacttgtaagaagccaacaataggccactcaag

SEQ ID NO: 114951 - DNA, 333 bp, Glycine max
  unsure (1)..(333): unsure at all n locations
ctaattttatctcttttaagttaagaaagtcacggttggaattataaagttcataggggactattcccagtaaatcttgtactgcaatgctattaatgattgtcagcaaagaggaaccacgaaatgagattttgcgattcataaatctctcgtctatttccatttgaatatcatcaacccctgctgatttagatattaattgggtgaactcttctgccataaattgntcataagtgctattgtcagtaattcgtggatgcctattactacaaattagagtattgcgaatcgtatgcaatggcatgcaaatgacggaacggctgatcacttgca

SEQ ID NO: 114952 - DNA, 478 bp, Glycine max
  unsure (1)..(478): unsure at all n locations
taagctaaacgtgccttgcaacgtaagtacagagcatatgattagtgttagtgacaatgagaaactgatggacgatctgtgggcaaatgtcacgccggctatctattacatgagtaacgaaaatacgctacaacacgccgtggggttgcccgatcagaaaacgcttaatatcattatggggaataaataaaaggtaattcatggatggttgaactatatccctgcttttcaaccatcctaaaaaagcatgaattgctcgctctgccctaagtggctgtgctattttagaaaaacttaatcctgagttaagcaaaaaaacataatcgataaaaatatatacgcaaaaaacattgattaagtgaatatatcatggaagagaaatataaccggagtagtgtatggccaatctctacgactcgaaaaagtgcgacttanatcttcttgcatatntgagtgtatctaccagcatttaagcatt

SEQ ID NO: 114953 - DNA, 371 bp, Glycine max
ttatgtgtctctctcagcagaacttaattatcattccccatgttcccttcctttcgatcatattctgctactacatcttgatacaccacagcggctactacactgtggttttagcccgaatagtcgacgatcaacgacaatcagtgctcacactgaagatgacttacatgttttctcgagctttagacaacagaacagaattgatgcagtgcaaaaatcatgcatctctatctatttaggaaaaccagccatagggatgggagcatagaaacaatgaatacacgtgaagacataccctcatgacattcgcgggaccatctgattgttgggatgcgaccctcgctagatcactgtgagatgcttgactctca

SEQ ID NO: 114954 - DNA, 468 bp, Glycine max
  unsure (1)..(468): unsure at all n locations
aagctgtatagatctggatgttaactcaaaacaaatcttatgcattgttaagtctggaagggccattgaccactatacgacccatcctgccttggattttgatgatgacaaacgtataatttactgatggactaatgaattattgtttagtgaacaacatacactatataaatgaactagagtgttattcaatcattctctatagctcaattaagattcatccacccataagtagaaaactgctttattatgatatattatagcgtcaatgcgttgtttaaatgattgtgtccacttaatggcaaaaccagtgattacacactgagttgtctntattcatgtccattggacttagatcacttatacacttcataatctaatccattacattgttcttgaaaagtttccagtgtttaagacgaacactctaatccgatgaaatataatataatagaatacttcctcaaa

SEQ ID NO: 114955 - DNA, 375 bp, Glycine max
  unsure (1)..(375): unsure at all n locations
actcttaaacttatagaagagaacttcccttttataatgntaatgtagttcatgtcatctctagacaattattatcctcagaatgtccttattcttgaacacttaaacttgttatttgtgtatatatctatcatacggaaaatgacgcatcacttgctattctacctgatttgtacatggagcttgatagtatatatgaggtatgccttactattactataatcctctgcatttaacatggtgggaggagtcaatattcgttccttttcgtgtagtacatgagatgctatatgctactaatacattattcccttttcaagtcatatatgtaaagncagtagaagtgacaatgttccggtgagtttnattttgatg

SEQ ID NO: 114956 - DNA, 446 bp, Glycine max
  unsure (1)..(446): unsure at all n locations
actcaagctcgtacctctagtactcagntaatataatatctcatttttctgtatcaaattaaaaatatatatatatattggttttctagntttttacatgtatataggttgaaatatgtaacaatatatgtaattntaatagtatttcgcatttttttagttattatctatatttcttattattatgttatttagaaatcttggtattaatatttttattaatttattatatcacatatcatgctctatttaatttattattatttagttgattatattatgcttcaagcttttttatatttttaaaaattatattattattatcattattattctgtagtccattatattatatattatactattacatntattattattattattattatttagttgtatgtgatgttttacataagaaaaagaaaggtattgggactcatttt

SEQ ID NO: 114957 - DNA, 351 bp, Glycine max
agctctcactagactagtgcacagctagcgtcaattatcctgtatatcttgcgagcggctatattgcatccaacacatgtatgtatacctctagtttactaaacgtatacaagatctctgtctctgcctcttccatatatttgttggatactgctctcggacggaatggaagacggggaatgtgctgcttctgcaaatcagaactacctgaggaagaaaattcacctgcacagaaatcgaaaagtagattattgcatcacctattcttacaacagatcgaagtaggcaggtccattcgcatatgacgaatgtgctacggtgtcaagtgcttgacactgctttactgatctg

SEQ ID NO: 114958 - DNA, 448 bp, Glycine max
  unsure (1)..(448): unsure at all n locations
agctatgcgcatacttctgtacgaacgttcacttgcacaagacattcttattacttataaaaatgcgcccatatacaatcaaggcaccttcgatacctagattatttacatgtacttccaaagagtatttgttacctacatcacacacnattcctttgctaaattcacatacatgcatactctaagcactttggctatcaaaaattgcatacctgcacatcttggatttttaatacctatacatacacaaacttcatgatgaatcttgactatctacacaataaagtgctacatttcattgctttttcaagtgtttttttttactacctaaagccgcatgcaaattcaagtatattttcttttgctcactaanattgcattcaaattaaaaagtanttttgtaatgtatattctctacataacatgcaacatatttatagatttttgt

SEQ ID NO: 114959 - DNA, 490 bp, Glycine max
  unsure (1)..(490): unsure at all n locations
cacctgcngctgcagcttggcatttagattaggtcatttatctggtaatcttcttaatgccttaaatcaacaattcccttttatatcaaaagattcttatgaaattgtgacatttgtcatttaactaaacaaaaacgattgccctattcttttaattcgagtagaagctctaaaatatttgagttgattcatatggatatttggggaccattttctaaatcataaatacatggacatatatatttcttaactatacttgatgattgtagtacatatacttgcgtgggtttattaaaatcataaagtgaagtgactacacatgttaaaaatcttattaatttgattgaagatcaatgtgaaacacaaattacatgcattcgatctgataatggtcctgaattttacttaaagaatttcttcttcaaattgccgaaatgttgtntccatgatccttcttccctttacacaaccaaaaccttctactgcgaag

SEQ ID NO: 114960 - DNA, 429 bp, Glycine max
  unsure (1)..(429): unsure at all n locations
cacttcgaaactcaagcttctaaactctgtacaagaatgaagctctgataccacttggtgtacaagtggtctcagatatctnaagaagggggggttgaattaatatatgccaaactgtgtcccctaataaaaaatctatttcactttatactcgcattatgaattcccgtagtgaaaatcttctctaatattaatccctatgaagcaactcggatgtgaatgtcaagcaccaatcagtaaaggagatttagggaagagaatatgcaaacgtgagtttatactggttcggccacacccttgtgcctacgtacagtccccaaacgacccgcttgagagtgccactatctctgtaattccttttacaagttctagacacacaatgacagtccttcctctgtgtttagagatcctttacaacaagagactcac

SEQ ID NO: 114961 - DNA, 484 bp, Glycine max
  unsure (1)..(484): unsure at all n locations
gtatttgagagtaaaagaatgaagagtattgtcaacttattcacaataaataatgtatacaattattccttttataatcatttaagagttgtattgactttttttttaatgttgatctttgtattgactttttatctcaactcttgggtggtttctatgtagttgttgatgcaatgtatataaaaattaaatctgaagaaaaatatttatatatggtaagatgacacactagaattncaatttctttcttatctatctatcttctatatatatactatatactatatgtaaaagaaactngaacttcaacaagctatcaaataaaatttttaatttgtaaagaaccattgacttaatatactatatgtaaagaaagtttgaagttntgacaatcgttggatccaaaatttatattttcaacaaccattgatttgatatcctatatatagacatatgtaaataattattatttatttctatacta

SEQ ID NO: 114962 - DNA, 512 bp, Glycine max
  unsure (1)..(512): unsure at all n locations
gtaccggatccttgagtcacctgaggctgcagcttaagaatatggcctcatcntactacttgtttctcgagggaaattctataaatagacctcccatctgtaatggagtgggttaccactattggaaaacccgcatgcaaatctttatagagggaatagatgtaaatatttgggaagccatagaacaaggaccttatgttccctctatagtggccggaagtgcaacaatagaaaaacctagagcagattggactgaggaagaaagaagattagttcaatataacttaaaggccaaaaatattattacatctgccctaggaatagatgaatactttagggtttcaaattgtaaaagtgctaaggatatgtgggataccctacaagtaacacatgaaggcacaacagatgttaaaagatctaggatcagcacattaactcgtgaatatgaactctctatgatgaatgtaaatgaaagtatacaagacatgcataagaggttcacacacattagt

SEQ ID NO: 114963 - DNA, 453 bp, Glycine max
atctgtatggggatctacagaagaacattgaccatatactcttgcaacaagtgcagatttctgaatcatggacaagctgaggtactacggtgaccaatgcattcaatgtttccttcatgaaattttatctctcagctacatgaaagatgaaatctgtggccaccctcatggactcctctaacgacaatagcatcatttcttgcactgaattgatggtagtttgaagccatcttctcaatcaaatacctatcctcatcatgggtcatatcaccaatggctccaccactggcagcatcaatcatactcctctccatgttactaagtccctcatagaaatattgaagaacgagttgctcagaaatctggtggtgagggcagctcgcacacaatatcttgaatcttcgcaatactcatacaagctttctcgattaacttgtctgatgcctgaaatgt

SEQ ID NO: 114964 - DNA, 374 bp, Glycine max
  unsure (1)..(374): unsure at all n locations
agctnggtataggtaagcagaactcaaccttatcttggtccccacggctttatgaagactctccccatatctagagggatatcttagatctctatcagagactatgctataaggaacaccgtgtaatctaactatctcactgacatacaagctagtcaacctctctaaggaatatctgatgttaattgggatgaagtgagcagatttggtcaaccttgtctacaataagccaaatggaatctaaacctttgggggtcctaggtaaccccaccacgaaatccatcgagatgctatcccacttccactcatgtatctctaaaggttacaacttccctgaaggcttctggtgttctatcttagctttctgacatact

SEQ ID NO: 114965 - DNA, 279 bp, Glycine max
  unsure (1)..(279): unsure at all n locations
agaagcctggcccatctacaacggccaagactccaaacggaaagggtccctatatgagaatcgacaaaagcttantgaggcatgatagatgtgcgagggtcaatctaggaggacatacacagaaaccacttatgactcgaccactctgggagcagtcatgatcctcggacttcgaacttgtggaattggcaaatagagagaacgactccagatttctctgacgaattctacagtatccagacttgcaaccatattgctgggcctaagctatatggtctg

SEQ ID NO: 114966 - DNA, 116 bp, Glycine max
catagcggctcatctaggatgtgggtctcgccccatcattgctattcgcgctgacattgatgcactacccatgcatgtgatagcttctcctccatgtgctccttcatgaacactat

SEQ ID NO: 114967 - DNA, 443 bp, Glycine max
  unsure (1)..(443): unsure at all n locations
acgataacactctcatgagaagactactaagagaagtctaactactaatatctttattgacgtaagaattatattatgacgcaaataaagctgatcactatctcatttacataatatatattatattatgaccagtatgtagtgtaggacactaatactctatattataagagcacatgctttcatgagtggaaactcctatgataactgaccacgagtcaagtgattcaaaggaataaccatttcgttattcattaaactaaatcatgatcagnaaatgtagcctattacggagatgttgaccagggatatgatttntatatcatgtattattagatcctctcactccatagatatcatatatgatataacttatcaataagttatagtccaaggaatattaaagctaactttttaaataaaagtttgaattcacatcttat

SEQ ID NO: 114968 - DNA, 211 bp, Glycine max
caatacaaaggaaaacatgtgcgtgaccctttagaaccacttgttgctcctagaccaattagattgaacatagacttgtgctaagaacttcttccttataaatgggcaaagtcaatgatctttgctaaggttgtcagaggaacttctacccagatctcgaaaactgaaaagctgagtgctcagcacttgataacaacttctctaaaattat

SEQ ID NO: 114969 - DNA, 342 bp, Glycine max
  unsure (1)..(342): unsure at all n locations
agcttgtgcttggtttagacatgattgatacttgatttgggacttgtangattcaatttgggcaaaattggatgagggaaagtgtgatttcgaaaatctgcactttatgcagaattatggtgtcaaataggtgcagcagaattntggctttgtgcaaaaagtgttgtgtatttgctggttgtggaaagagtagtacagatttggttctggacgttttctagcaaatcccaacggtcataatgtnagattatgtgctagagacttccagtaaaatatttcagtcgatcccacggtttacgaattggaacaaagaaatgtactgtggtattaagcgagaaagct

SEQ ID NO: 114970 - DNA, 485 bp, Glycine max
  unsure (1)..(485): unsure at all n locations
taagcttgagccataatcctgactcaccatatatcttgactctgtgtgagaatgtcgatccttaccctcggaagcgaaaaanaagagaaggaaaatttccaatctaaggaaaaaaggaaagaatgaagatttccatatcaagagaaaggaaataaaggaaagaatgaagatctccaatcatagagaaagcaaataaagaaaagaaggaaaattcccaatcaaagagtgggagaaagcaaaaagaatagaaagaaaattcccaatcaaagaatgggagaaagttaaacaggaagaagaagaaggaaagaaagctcctgatcatggatcgaatgaaacagaagatatgtcagaaaggtcttggaccggacatatctaacatacagaatgtcaccaatgacaaaaagatgaaggaaccacacctaaatggctttcctttataccaccaaatccgtgcctacaacttttcgcccactaacaaacaaaaa

SEQ ID NO: 114971 - DNA, 432 bp, Glycine max
cagaagacaacagggagtttatactgcttattaccctagccttgcaacaaggcctatggaagtagacacggagatggactagaaaatccgcagtattgtgagtagcattttgaaagacgcctctgtccctgaagctgatgaagatgtcccaacatcttccaccccgaatgtttctgtgcctgatgttgagaaagatgttgcaacatcttccgctccaaacgctgaagccctcccttcacccagtgaagaggaatcaacagaagaagaggatctagcctcagaggagacccctgcaccacgggcaccagaacctgctccaggtgatctcattgacttagaagaagtcgaatctgatgaggaacccattgccaacaggttggcacctggcattgcagaaaggttacaaagccgaaagggaaaacccccatcaag

SEQ ID NO: 114972 - DNA, 348 bp, Glycine max
  unsure (1)..(348): unsure at all n locations
aatctaaaacaaagtgtggggtttgatggcagcatgaattccaataacattcaacagagaagtatgagagggaacttaaaaatcaacgttcgttgagggttatagttggctatgccccggaacattttgtaatcaaaaagtatataatgttacttagttcagcgttatatttatgtgaacattntcactatcttcaccctcaacatcttatacttttaacacggtataccaaaacccactatcttctagaccaaaaactattcaccggctaacagaaatccaagttcaaccaatccaaaanagaaaacctgtactgtgatttgacagttggctttcagccgtccactg

SEQ ID NO: 114973 - DNA, 394 bp, Glycine max
  unsure (1)..(394): unsure at all n locations
atatgcatgtgaagtaggaagcatcaacaagaatcaagccaaggctattgtgcaagcaatcaatggggccaaacacaccaaaagattatgatgatggatggctcanattctcacaaaggtaaacttatcactttcaaattgagctttcaaaactatcatgacatgtagaggaaaaacaaagatttcaaatcacaaaatgtcaagagactnnttatttcagaacaattacccatttcttgaacatatcctacaattcaaagataaatatgcaaagttgtacatacaaacagaattgacctagaatattaaactatagacccaacataactaacaaatttaacacaaacaaatctaacatatctagctaaaccaaaaccatagaacactcctcccc

SEQ ID NO: 114974 - DNA, 173 bp, Glycine max
atcccgacccaacccgggcatagtctgtcagtgagaacctgtgatgtacctaaacaggcgagcctctggcagtctacagataaaaggaaaacaagaccacaaagcaaggaggcttgtggtggctggccaactgtgaattttgtgtaatatgtggattgtggcctctggtaatc

SEQ ID NO: 114975 - DNA, 472 bp, Glycine max
  unsure (1)..(472): unsure at all n locations
agcttncgatctcgagaacattatttatntaatcatttcagtctttgctttcgtgtagcttaggcaaaacgccatttcttctcctttntttcttccaaagccatttctaatggcccaataactttcttcatcacccacaggcaccattagccaccgcaaaccggttgttgttcttcgttgaaactccacaacgagaggaacccgtcgattggagcggaatcttccaacttggctcgcggttgtggtagtgaatgaaaccctaatctgacctttcattctctttcgagggaaccatggatatacgcttgtttcttgttagtttcatcttggtcttgcatcttttctgactatggaaccgccattgtatgtcttatgcttcctttgaaaaaccttagagaaagagaacttgtaaacgttatcctntcatgaaatgcatgttattntcataacctacactgaacctcggtcacat

SEQ ID NO: 114976 - DNA, 432 bp, Glycine max
  unsure (1)..(432): unsure at all n locations
gatcttcttcatcaatggattcctttacttcttgaagattaatgacgacaaaatggagaaagagaaagataattggagacaccactttaaggagaagataagtcaagaagaagctcaccaccatagaaagctatggataagagcttgaagggtggagaagaagaatggagggagaaggagagaagaagcacaaaattttatgcctcacaagagatctgaactctgaagtgtaattctcaaatgatcaaagttgaaaaaatgcatacacatgacctctatttatagcctaagtgtcacacaaanatggagggaagattgaatntctattcaaatntcacttgaacttgaaatttgaattgtgtagcccaaatttggagcataaaatntactaattatgattagtgaatttcacgtatgggtcaacccactaat

SEQ ID NO: 114977 - DNA, 358 bp, Glycine max
agcttctcctctatcttgctattgagtgggggagaagtgaagaagaaaggggtgtagccccttatgcacttctctcttctctcatttgctgtgaaaattttgccgtaagaaattcaactgaggcgcttccgttacgtttccgtaacgtgttcgttagtatatacgcgaagttatcgaccggtcttcaagattcatcgatcgttcttcgtgctcttcagtcgtcaatgggttagtacctcacaccaagcttatcaattcatgctatgtactcggggcgagccacattatgctgcatgtgtttgtactctagctttcgactacttattatacccactttcgacgtgctttagccatttat

SEQ ID NO: 114978 - DNA, 476 bp, Glycine max
  unsure (1)..(476): unsure at all n locations
gaaactaagcttagctcacagctgagcttatcctaagnggaccatgttgttttctattaaagatggagcttaatgcaacatggcgcgcttaactacgcctcatcagaataacactcaggcttgacgcacaagcgcgtttactctaactaccaaaatntaatagacaatgatagagcctgagcttagcgcatgtgggcgcttaactcaacacacagcacgggattagcacacagatgcacttagccttattcaaaggaaaacttacagaagcatagtggcgcttaccctatcatgttacgcttatcgctgagcagacattctcatcatcttaatgtctgaacactagtacttcttagcgcacatacacgcttagcaggcgtatcacttacggtcatcagtaaggatgagagcacttagcacgacatggtccgtttagcgcgttcatctggatatccagagattctacagttgctatg

SEQ ID NO: 114979 - DNA, 234 bp, Glycine max
aagctaaggttgaagtatccagctcgcctgggcgaagctaagtacttctagagaaagcaagcagctcgcttgtgtgagctactgtgcaacctccacccttcatttcctataaataggtgtgaaggggttgaggagacaggtccaacatctgaaattgacagtatttcactgaaatttgtgagaaaaaggagaaaaaacaaggtcgaagcacttccgtaacgtttctataaattt

SEQ ID NO: 114980 - DNA, 423 bp, Glycine max
gtggatttgccacataatactgaagacgatgagatttgataacagggtcaacctgttggcgccatagcatgaaagtctaataatcaagcttgtgagaaatggaattacgaaaaggagaagttataaacgagttgttttgagcagccattgttgatcttatcaagctctatataccataacagaactctaagagaagatactttgagaacctatagagaaaagcaatctgagaaagtgaaagggagtctcattaatcacttgacttgagtatacattcttgtatttatagacagaactgatattagatcagctgtttaactaactacagctgtataactgaacagctgttaacaactaacaactaactatcgtattaaaactaactgagactgcagtagaataactgcatatctctttacaata

SEQ ID NO: 114981 - DNA, 488 bp, Glycine max
  unsure (1)..(488): unsure at all n locations
cttgtgtgtataagttttgtctcatcaaccacagcaagtatttatcgatttatacttggatgatagacttcattcctttgattattaactgatagaagaaatgttaaagctatttgcaaagtacacctctattggtgtgctgaacacccttatacactgggtgggttttggtgtttgtatctatgtcgcgcatacaaaccaagctcttgcaaacattcgcaggtttcgttgtggctgtgagctttagcttcttcgcgaatgcaaaattcacattcaaggcatcgactacaacgatgcgctacatgctatatgttgggttcatggggacactgagtgctactgttggatgggctgctgatagatgcgcactntccccgatgataactctngtcaccttctccgccatcagcctggtgtgcggcttcgtctattcaaagtcattgtcttagggatcgaaatgaaatatctcttgtagtcctgtcttaatg

SEQ ID NO: 114982 - DNA, 411 bp, Glycine max
  unsure (1)..(411): unsure at all n locations
tagtccactcaattcatacatttgttcattcaagtcattcacaaacactcatttcatatcaaacaaaccactgaaacttgattcaatcatttcactggtcaaacaatctttntgtacaagcaatcaacactgtaaatactggaatttaaatgactgaaattttaataactgaaacatgaagcataaactaaattaactgatcaaaataaactgttcaaaatgcaagacaagaagataaagatcctgccaatcctcctgcgggtgatcctctgcatcctcattaagatccaacactggagcatctgatggatcctgaacaataggctggtctggctccgatgctggtgcanatggctatgaatcctcacgaatgggtgctggagagatatgaactggagaagtacgctcctg

SEQ ID NO: 114983 - DNA, 322 bp, Glycine max
attcaaactcttaagcaaaataacatgagtattcaagacttttattctgctatgtctaatttatgggagcaataggctattaatgaacctgcagatttgccagcgccttcactgtatactgagtttagagaacaaaaatgtttggtaaagtcttgatggccctacgggatgattttgacgggctacatggacaaatcttatattgctctcctattcccaatgtagatgttgtggttgttaatgagttgttggtagaagaaatacgacttaagtctaactttgggtctcgacaaaggaatatctgtacgcccgcatcagtgtt

SEQ ID NO: 114984 - DNA, 444 bp, Glycine max
  unsure (1)..(444): unsure at all n locations
ttagcatgactcgagccaccatctaagaggtatcagacatactcgattgtatcggaggagactccacataagcattgttcacaatttccaatgcctaaaatgacatttctagtgactcctccactacttcaacataaggagtataagacagatgactagctagtatgtcctcctcgcctgatactataacaagctaacccctcaccacaaatttcaatttttgatgcaaagactatgggaccaccccagtagaatggatccaggggtgacctaacaaacaattataagcaggagttatatctatgactnggaaggtgatttgaaacgtgcacgagccaatctgaatcaggagatcaatttcccctctcacatcacgccaactatcatcgaaggctctaaccaccatagagcttggcctcatgtatgatggcattaatgacaact

SEQ ID NO: 114985 - DNA, 315 bp, Glycine max
  unsure (1)..(315): unsure at all n locations
tgtttattgcgtttcgtagtatatcgagacgctcgtaattgaaatggaagctcgttgcaaattcaaacgacagnnaacnttcactacgatgtctgattgagtcttgtaatatatctagatgctcgcaattgaaaatgaaagctcgtgtcaaatgcaaaccgcagtaacttttaactcggatgtccgactgaatcccgtaatatattgagacgctggtcattgaacatggaagctctgtgcgaattcttacgacaataagttttactcggatggcgattaatcccgtacttattgagacgctcgattaaatggaac

SEQ ID NO: 114986 - DNA, 460 bp, Glycine max
  unsure (1)..(460): unsure at all n locations
taagctccttcaactgcacaaagctcataatatttgaagagtatcctttgttgaaccccacccgacgaagacactgacaaaaacttatcttctcctttatggacaaagtatgacaagctggggcaagtaaattntcttcccatcataccttggatgcaactgtgatcgtatccccatctcaactagatcttgatgggtacttaacccatccttcgtcttgccttgaatgttaaggagcgtcccaatcacatagtcacatacatctttctccacatgcataacatcaatacaatgtctaacgtctagatcagaccagcaagatgatgaaagaaattggacctcctcttccatatgcaagtcttacttttatccttcttttgggtctttccacatacagtattcaagtgttgaacccactggtatacctgctcactagttaatggtatccgcgcaatatcat

SEQ ID NO: 114987 - DNA, 379 bp, Glycine max
  unsure (1)..(379): unsure at all n locations
tctagtccaggtctgagagaacgttcacactttcctaacggattactaattatgtgggccattanaactatcatatgctgactatagccgcacaacccgcgcatctcttccggggtggaagacgagtctgccatcgccttggccttggctaacaatcagggaagttctcgactcccgttcaccgtatgagcataccgctccatccacatggatgcctctcgcagtatagagtcaatcacacttcctctagcctgtcgttccgcatatacttgagcatacgcatccgcgatgctatgctcgtggtgcgtggctacacctaactagtcttcgcactcggcgatgatagctaacatgttggtctctcgctctcatagatgct

SEQ ID NO: 114988 - DNA, 470 bp, Glycine max
  unsure (1)..(470): unsure at all n locations
cgggctacataaatatntgatgtcagtactcattacgctctttggataccaatttttaacaaatacatatagagttagttttttaaaagaaattaaaaaaaaaactctcaaagtttctcatctttgttctttcctgctttgctattcaatggaagtatatttttttatatattaaaaaaagaaaatttgtttgaagttgactgatgtntgccataccatgacacaatagtttatcatacttttgaaagacataaattcttccttcacatcgaatctgtgaaaagtctttggattcagcttggtaatggcctaactggtaatccattttaactgttgtagtgtagtgtacttgtcctctataaaaatgactntgacttgtacggctntctttctctgattctttggacgacttattatattatataccattctctatacttcccctctctcgtaagctntcttcttaaaat

SEQ ID NO: 114989 - DNA, 352 bp, Glycine max
cttccttatcatgaacacccacacgattcttatgatgaagaccatcatggttgccctggacatgctcaaatgcgtgtataggtttacactccatccctaaatcgcatatcattggctcatcatgaatgaccctggtgccatgtcaactatttgacgctgcggccgtgtgattggatctttggcccatgatgggctgcttgctcttacactcagtgcacgagtgcattttgacattcttcttgggtatctatgcggggcttgaacgctcgtcgcgcctatgcgggatattggcgtccatagtattgactgacctgttaaattgaatccatatatctttatcttatatatcctc

SEQ ID NO: 114990 - DNA, 392 bp, Glycine max
ttcttacatttgtaatctaattacaaaaatagcttcaataacagaaaactctttcgtgttcatgtcaaaaaaataaaaaaattcaatccattaactttataaaatgaagacagttaaagggtatagaaaatatgtattaaaggaacaaaactaagaaattgtgaatcaaaattattgaccacctccattgctacttcgttggcattgtataaatatgtatttaatgtattaaagtaaagcataactaaaattgatgttaagacaacttagtcacattctcaatgtgacaatgtgattgttccaatgtttattctccaagtcctgtatcattggccgtttatatatatatatatatataaatctgaaatacatgatttctctattaataggaa

SEQ ID NO: 114991 - DNA, 447 bp, Glycine max
  unsure (1)..(447): unsure at all n locations
ttcttgagaagctagagcttagctacacacacccctctcataactaagctcaccttcttgagaagcttccttaagaagaatcctaaagaagctagagcttagctacacgtacctctctaatagctaagctcacctccttgagatgagaagctagaacttagctacacaccccctataatagctaagctcacccccatgacaaaaaaacatgaaaatacaaaaaaaagtccttactacaaagactactcaaaatgccccgaaatacaaggctaaaaccctatactactagatggccaaaatacaaggcccaaacgaaggaaaaacctattctaatatttacaaagataagcgggcttatacttggcccatgggctcgaaatctaccctaaagctcatgagaaccctanaggcctttccttgatctctagcccaatctacttggagtct

SEQ ID NO: 114992 - DNA, 431 bp, Glycine max
  unsure (1)..(431): unsure at all n locations
actacaattaagtaatactaattttgcattgaatcatgttgcgattgagacacttcgtcttgcatttccattacctgtntacttaaaacaattaaaatttatattgacccacattgtttcctgtagttagactgtactaagacctttagcaaggcatcgctagttttcagctcaataatttcacatctgataattttatctaaatacttatagtggcttggttgtcgaaaaaataatcgccttaccatttgtgattcatgaataccataaggcggaatcccatgaggtgcaacttgcttgatcaaatcctttagttcatcgatggtacatccggaaggaatgtcaaacttttttggatttttcctgtgaacgagtaccgacaactcatgttgggtggatgttcacctccgttgaatattcatgacatatga

SEQ ID NO: 114993 - DNA, 392 bp, Glycine max
  unsure (1)..(392): unsure at all n locations
aactaagctcaagtctaagtgctaatggagggcctgtactcctcttttttacatgcngcatcgatcattcctcggaaaatgggtgtgaagaacctacacgggttatggctccattgcttatcaagatatctcgtcaagttacatatgacccggaatttatggtgaatacacatgctttaggtacaaagtcttttggtggtgtttggaccggatgtgcgggggacgctttgggatgattaggatggccttgggatgactggtggtggtatgagaaggctgaatagctgataatgacattgtggactgatggaaattgaccgttacgaaggcatatatcaggttctcctaattcttctttatttcccatttctattataagccgagacggatta

SEQ ID NO: 114994 - DNA, 372 bp, Glycine max
ttgattagaaagtagctcaatggtctatctatcttcgagaaggacgtgatgaaccttctattgaaacctacatgtccaagaaaacctctgataccctcggcatatactggtggaggagacatctcgatgacgacaataattgctttaatcacctgaatgcctgcggctatgattgttagtcctaactatctgtctcgaccatgagtgcactgacccacttttcaccttattgtgctcaacacatcttcgctgcactagctctatattcagtgatgcatgaatcagatgagggtttgatgactatgatatcatgcacgaagacttctatgcacttctataccatgtcagcaaagatggctagcatgcacctat

SEQ ID NO: 114995 - DNA, 245 bp, Glycine max
  unsure (1)..(245): unsure at all n locations
cgccaaggagcaacagaaaacggcggcgntaaaagcgagcaggaaacccagcgaacccactaaaccggtgcacaagccccaacccagtggcgaatagcgaaagccgcccgacgccgaccacagtgccacctgaaggcaacgggccgagcggacgacaccacgcacggcggagcacaccgaagggaccaagacaacggcctgagccgaagaagcagccgaaccgcacaccgtgaggaagaaagaaa

SEQ ID NO: 114996 - DNA, 466 bp, Glycine max
  unsure (1)..(466): unsure at all n locations
cgcttgtggagcctctatggaggctttatctttgagcttcatagttgtcctttaatggggatccttcaccatggatatgcagcgaaagacaaacgaaaggacgtgagaggacgcgccatccattaaagaataagccatggaagaaggagtntcaccaccacgatgagccttggataagaagcttggagaggatgcttcaatggacgaaaagaaagagggatagaaagagagaggggggagcacacaatcgaaggaataaaagagggagagaagtggaactttgaagtatgtctcataagactctcattcatcaaagttacaacaagtgttacacatgcttctatttatagactaggtagcttccttgagaagatatcttgagagaacttccttgagaagcttctttgagaatacttccttgagaagctagagcttagctacacacacccctctcataacttagctc

SEQ ID NO: 114997 - DNA, 315 bp, Glycine max
aactatgtggatatttcacttgtttgaaactattagatgagaatgaaagtgctgacgtctgatgaaagtacctccccctttcatactattaaaatttaataagggttagaagccactctgtgaacctgcgtttgtgtctatattaaaatcattacatagttatctatgatattctaatctttatattgaaatattttatttcaattggtatatgcgaatataataataaatacttaatctattattaaattctacaataattgatttgctaaattacaatctacataaagcaaaagacgtaacttcaaaaccttt

SEQ ID NO: 114998 - DNA, 144 bp, Glycine max
tttttggctcagttcgcaaagtcggcgacttaccgcggaactcttctgtatcacctataaacgacgcttgtgcgtctgatctttaaatccagcacctacccacagcgtgtaagtgccgtgctgactgaagcttccaaacaatgc

SEQ ID NO: 114999 - DNA, 288 bp, Glycine max
gtcttatcactcctacctctgctatgagacgctcaactgtgatcagccgcataccaagagaactcacaactgaatgtgtgacaatcttgaaagacatatcctctaaaattcttcttattacattgtcaagtgtacaactccaactatcatgctgaagtgattcccgtacttacattggcacacagtactttacttgcactatacttctactgctttttctacacactgatctactcttccgctaaaccacatcttctcacatactctcccttagaaagagtttatttc

SEQ ID NO: 115000 - DNA, 209 bp, Glycine max
cggcttaggctgcaatgagtatttttctagtcacgtgtgccacacgatacgagtgtgcgtctgttgaacctctcattatgtgttatcaactaactgcatttgaaacttgatgggctctcgcacatgtggcctacaatatgctagatgaaagcctgctatctatagccttctaattactcttatgacgttcacaaactctgcactttgtg

SEQ ID NO: 115001 - DNA, 257 bp, Glycine max
ctgacaaaaacatcagataccaattggtgcacggtcctggttgatgaattgaacatgctctgatttggcatcatgatagagtgactatgttcttcttagcgtttgtgctactttagtcgccttattcacttctaagtctctcctgtgtatttgttattctgataaatgccattcattctgacattcagccataattccttatacaggaaaagtggtccatagatggctagataatactagcagtatgcggaatgttc

SEQ ID NO: 115002 - DNA, 292 bp, Glycine max
tcctcggaaccatccattttggcgacttaatggctttccctctcaaaccctatgagcacgggagcccatgaactaatatgtaaagtaaacatcattattaacaactatcttgctgatgtatatagtcatgaattagaatgccttcgacctagccctgtaattgtacctacttttacttgaagctactaactcaagtcctttacttgcctgaatcagaattcagtaagtcaagcctaacctcttaatttctattttttgagtgacagattattctaataaaagattactttca

SEQ ID NO: 115003 - DNA, 124 bp, Glycine max
aatacagagatgggcttctaacaatattaaggaaggatggctgtgtttgtaaggaacactatgccgcatcaatatcatacatgcgatcacataggatgtaaacaacgcaatcttagtcttaatt

SEQ ID NO: 115004 - DNA, 72 bp, Glycine max
tcgtctaactacgagatgaactacggggacacatacctacgatcagaacgagaagatactctgctgcaatcc

SEQ ID NO: 115005 - DNA, 253 bp, Glycine max
tcctaactcattttaattacaatacgtatccaaaatgtaccatcggcacgacacttgggctcaccaggaacctatagtatcaattacgcctgtacactttactaaactccggcatttataaaccctctaaataaaccttatcctctaatctcggttcaatatcaaacacaaatgtcttgacaaaatacttccacttgtcactgagtagaactcagggtcaacataatccaaaaaaaactttattgatggctac

SEQ ID NO: 115006 - DNA, 251 bp, Glycine max
actcactaactttttcttaacattttcacctgatactttttacttccacattgtcactcacttcaactacaggtgtattcaactgattacactcacatctcatatttgacaatcaaaccttttcaaccccccaataaaaaatcacactatcagcatcgaccctacatcgatctcttatggcatagcagtactgtgctatgataaaaatgacagaaaacctaagggctaaaaaacttttgttaaagtttttt

SEQ ID NO: 115007 - DNA, 392 bp, Glycine max
gctgtcaatgtttacatgatttaagttcaccataactgcttagagtagattattttatgtcaattctgtcttgtctgaacatgattgtgtgagttacgtccttgagcttgctggtatttttgggtgaacctaactaaatctacaaatataagagagaaacctcaatctaaggactgtactatgtgtttgcaaaagtagcagttatctgaactgccatagatctatgtggccacttattctggtcttgtactattgcatgatgagaatcttaccatattatgagaacttctgtatgcctactgtctcaatctaaagcttatgacttttgattagtttatatggtatggatgatggagcttgtaagtatcataataccaactgacaccgcgtaa

SEQ ID NO: 115008 - DNA, 55 bp, Glycine max
cggcccgcgtgttagggccgaccgcggaacccgaggtgtcttttatgcgcgccac

SEQ ID NO: 115009 - DNA, 116 bp, Glycine max
actgacatcaccaccgctatcgcttaaaccttatgtctacagcactctgcagcaccataatgaacaacacatctgagctggtggtgcactggattggtaattgatgggctctggat

SEQ ID NO: 115010 - DNA, 282 bp, Glycine max
cttttccatgctatgaaccttgtgtctattgttaacctttcactttcacttactaatccttttttaaaatgttagaggaaagtacggttagagactacactaaggagtatgtttaccctggagaattctagaacttcaacttgtcttaaaactaagtgaaaacatccctgtgctcttggtacggtaaaaatatcttacctgttaatgtagatacttttccagccgaaaggtcatctgaattaatgacatcctgggtaatcctcactcccacaatacttgtta

SEQ ID NO: 115011 - DNA, 211 bp, Glycine max
  unsure (1)..(211): unsure at all n locations
ttaatgagattgcctacaactggtgaattaaacacnagattgactgtagaaatttccaatgtgcgttctgaattaacaatccctgattttagttaaacacttcacatgaaagtctgaagacttctacgtgatgtgtttgggcaacgctcctctggaggatgtctatccagctgaggaggttcattagctaatgtgtaagatctcgttacat

SEQ ID NO: 115012 - DNA, 223 bp, Glycine max
gaatcattgtacactttgctagatctaacttgtatgagaaggtgctatgatttagttaaatttatgtttatataagcagcttgtatatatatgtttcacgttctttacagaggcgatatattggtgaatgaaatggtgcttgagcattacaatattaattgaaatggcaactcacatctatcgcaattatatgtactttgcaacctggttgtatatgtgtgat

SEQ ID NO: 115013 - DNA, 290 bp, Glycine max
acactgttggacccacgcgccagtcacccgacttttttcattggcacaaacagagtacctacatctattaactgagaatggatctaattgactaggcgcgcagggcaacagttactccatgcctaacactcctggcactcttactagactccgacaatccttttaaacgtcctaactcactccactcacaacaatacagcacattcgacaacaggagcaaattgtaccacaccaatacagttttactatgaccagacattcttatcatcgtacgtgacactcaattatga

SEQ ID NO: 115014 - DNA, 296 bp, Glycine max
  unsure (1)..(296): unsure at all n locations
cttaacactttaactacagacattgtgtgtgatctacctcaggataccatatgtttttagacattgcttacattatcctgatctagatcaaatatgccacaaacattacattgtgaggaggtgaagcacgaaggtaccaaaaaagtacatgtttagccaagaggaataatcaattagatcagacatctctcacatttactaagatttaatctactgacatccatttttaattgtacaactgtctttttttttacagaacaaagtacttgatgtccctnaatatttttttatttata

SEQ ID NO: 115015 - DNA, 276 bp, Glycine max
ggggtctgagtctatacttacttatttttaacttccagagacactgatcctgtcattacaactcactgatatcccacatccactgtcgaacctctctttcattcaacttgagaaatttaatacttgttatgactacatatcatgttactgaatgatctttgggggtccaactcttgaaacaagagtctactacagttttacatgtgttacaaggttcttatgttgatctgaaccatgctagttctaaagacactctgccccgtaggcgtggcttgt

SEQ ID NO: 115016 - DNA, 148 bp, Glycine max
aagttgtgcattctgcaactactaaagatctctaactaatattgatgatgagtctaaggagaactctaattttttgtgaagaactccaattgaagtaatcatggatttctgagactgtgaaactgatatcttatgatgttgtggtact

SEQ ID NO: 115017 - DNA, 326 bp, Glycine max
actagctcggtatgatgcgaccctatactggttttttctgaagagtagactacagttgtcatgcttataataggagtcttaacgatagtgacttgcttgtcaaccttgtggttgccattcgggagctggtatagagctttgtacagtgggagaagcattgtggaactgtgcgtgattacttgaagactcaggttctatttcctatccctttattcacgaaagttcttttaatttctttgaacaaccactaggttacttctagtggtggatagctcagtcgtcaattcttgttagagtaagtagtgaatttccgtgaaactcatagt

SEQ ID NO: 115018 - DNA, 171 bp, Glycine max
tacactgctttgtctgccttgatctatgcttgtggtttcaaaagggtgggtggtagcttagagtaaaccaccattggtaggtgacttggaggtaaagcttgatctctgccgctatgtccataactgacggagtgctatgcaaagactcatggtctgttcatatctatagct

SEQ ID NO: 115019 - DNA, 402 bp, Glycine max
ctgaacatagtatacattatattataataagttcgtatactttaaacaaatagtacattttgatcaaactagcttacgaacaccctagtcgaaattggttatatagctaactttataaatattgtttttggaaattttaacatgtcataattttatttttaccgtgatacaatatggacatcacggaggagcatttcgacctttgttgagcaaaagtggatcctggacaatgttttagtggccacttgcttacaagtgcattgcggaggaccaatcggcctttgttgagcaaaggtcgatcctggacattgttgtattggccacgaaaataattcacaacatgaaatgtatgaggaggtggctctcgaaatagacattaacaaagaaaatgaccatgttgac

SEQ ID NO: 115020 - DNA, 492 bp, Glycine max
  unsure (1)..(492): unsure at all n locations
agtcacctgaggcatgccaagcttaagggctagcttgttgttccttgatgtaagcttatgctaaaaacaaggcatgactgcttaaggttgatgactagttgtttccaaccatgatattaccttcactatatgtagncctgcccaccaatgtccaattcgaacctattagccgataattaagaggggggagagaaaagtgaagcgtataattagtcatcacgagctagttggcaatcgaaaaggatggcgctttttatgctaaaacgagaatgagagattgttcacaacaagtgccttcctatttgatctctaacaaaccagtcctaagataaagggagtccagaanagatagtcgtgcctaaaggattataaaccaaattggatcggagacaatattatacttagtccggccgtcttcaagaatgttgagaagctggaaaatgcctctaaacagtgtggagagaagcaagggacctataacctaaacatggt

SEQ ID NO: 115021 - DNA, 263 bp, Glycine max
aatagattaatgaactgatacgaagagatataagcttataaatatatcaccccgattcttttattcctcgagtatgttgacagatatgctaaaagagtttcagcctggcctctccgattctcacactaagaggaaatattctctcattctccgaattaattctaaaattatgtaggctactttaccacaaattaacgcgtattattccttcgaaccaagtttaatcaccgccacttaatttttcatatttatcacataggtcc

SEQ ID NO: 115022 - DNA, 358 bp, Glycine max
  unsure (1)..(358): unsure at all n locations
attnaccttcacagtgtggattgcatcaatcaacccaggtaggtcccgtcttaatccattgatggcccatcatgaattacaatctctatggtgtatccgccattgttgacccaacagataatggtattttgcccacaccgcaacattgatgatacatcctgggcagtcaccttcataacattttaagagcgaaaagattaaaccaccataattcacttctagaatcgtatctgagcgaacactttgagaaaatctgcatatatatatatatatctatacatatacatatatatatctatatatatagatatcacaggtttgagggcatgctaggttaagtcttcactataaacaaacc

SEQ ID NO: 115023 - DNA, 434 bp, Glycine max
  unsure (1)..(434): unsure at all n locations
agcttatagaatatataatatattatctttgtacattgaagagtctatactgtctcctctgatgagtctaatgccattcttccaaggaaggatnttttagatgatatttcagattccttagaagatatacatattcatggaaatgactctaaagaaaaagatgaaggaagcaatgaagattctcaagataatggagttagagcaaataatgaacttccaagagaatggaaagcctcaagagatcatcccctcgacaacattattggtgatatatcaaaaggggtaacaactagacattctcttaaagaattatgcaataatatggcttttgtatctatgattgaacctaaaaatataaaagaagccatagtagatgataactggatcattgctgtcatactcctaattcgtccgggaacctttgctcgatgacg

SEQ ID NO: 115024 - DNA, 392 bp, Glycine max
agcttggttcgaggtacttactcgttgatagatcgaagaacgatgaagacgaatgaagaacgtcgaagaacggttgaaatctttgcgaaattcctcacggaaaacgttacggaaacgtttcggaagcgcctcggcttatatattcttcacggaaacaatttttcccagcaaattctaaagagaaaaaagtgcctcagggctgaaccccttccttctttccttcctcccctatttatagcaaaataagggaggtgggtgtcgcccagctcgcccaggcgagctcagttcgcccaggcgagcatggttgcttcctccaaaagctaccgccttatggaagaatatccggagggccaagtgggcctgggtgcattagcccccatttttctaattca

SEQ ID NO: 115025 - DNA, 483 bp, Glycine max
  unsure (1)..(483): unsure at all n locations
gctntgtgcaaggtcttcggngcagataattgatttatttacaaatatatattactgtgagataaacgtcttaaattaccaaagttgnttataatgtaacaataaacattgtacgttgcaaacaatttcgtcctgtattatctaaatctttgtaaatggcatggttttaactttgaaaacatatgttgcccatttcttgtgaagtgttgttatggccccgatgtctaacgttgttccatcataaaactactacaaaatttaaaatatacaaattagtcacgtacatgaaacaatgaattagaaattgataccaaactaacaattgaatcttgttatagtaaatataccctgcttcattcattcttcaaacccccgctgactatgttccacatgcaatgcatgacataatatccacactcatagcctctggtttgaacatggctctaaattcaatatgaaatatatttaacatgttctacttac

SEQ ID NO: 115026 - DNA, 458 bp, Glycine max
  unsure (1)..(458): unsure at all n locations
agcttaatgaaacaaacagaagcataagcccttatccttatctattcanaatttaatgcaagaaaaagacattaatgaagacttggtttacctatgacgcttacaaaggaagaagaagagatgacgaaggatgatcggaagagatgaccaacgatgattggaaaggatgactaaggtgatcgaaagcaccaaagagaaattcgcacaacacattgtgaggaacaagagagagaaatttttagggtttacaaaatgaggagggcatgctttgtcattctgaaatnttttgaggacataattgtccaagcattatttagggaacagattcccgataagaaaacttgagatgctggaaatctaagctctaaaacaagatttcctaggagcttttacttttgtaaagctaaaaaaattataacccacactcttataaataaaaagatctttttagtaataaa

SEQ ID NO: 115027 - DNA, 298 bp, Glycine max
  unsure (1)..(298): unsure at all n locations
tgcaagctntgttcgagggagcttacccgttaagtatctttaacgangaanaacggcgaagaacgtcaaagaacgggcgaaaccttcgcgaaataccttacggaaacgtttcggaagcgcctcggcttaaattttcttcacggaaacaatttttccaagcaaattcgaacaacagcgaagtgcctaaggggctgaacccttatccttctcacttcctcccctatttataacaaaataggggagatgcttgccggcagctcgcccagcgagcagggttgctcctccaaaacagcagcct

SEQ ID NO: 115028 - DNA, 385 bp, Glycine max
  unsure (1)..(385): unsure at all n locations
ggcatgcaagcttcccacaaagctacatgaagtttacttggtttaaacgcngnccagcctcgtgaacggttggctcttctcgaaatgtggtctacaacgacacaagacacttgtccatgatctgaccgtggggatctttgagaagatatccggagtgtgctcgaagcttccgtccccgaaagcatttcctatttaagcacttcagctcttgctttcgcgtagcttaggaaaaacggcatttcttcttctttctttcttccaaagccatttctaaagtttcaagcactttctacatcacccacagctaccattatccaccacaaaccatcgttgttctccattgaaacccgacactgagaggaacccttcaaccgaagcggaatct

SEQ ID NO: 115029 - DNA, 403 bp, Glycine max
  unsure (1)..(403): unsure at all n locations
gcatgcaagcttaaccgttttcgacgtcgttatttgttctcatcgnncntgctgcgacggcgagtacctcgaaccaagcttttcgattcattctatgtacccgtagtggtccacattgtgtttcgtgcatttatattctcgttttgtttactttttataccccctgctgacgtgcttaatccatcttacttaagaccgttctcgcttaacttaaaaataaaataaatttccaccgaacggttgaattgtatatccattacccctggtaaaaaaattctaccgtctgtcggccgtaccacgtggaaatcaaaagaggtaaaaaaatataatactaaagacatctttataaataaccgaaacatcggcgttctcttggatctctctatccattgtaatacaagga

SEQ ID NO: 115030 - DNA, 476 bp, Glycine max
agcttgcttgtggggcttctatggaagctgtttctttgaacttcaatgcgtcctttaatggttattctcccccatggagatgccgcggaagacataggaaaacaggtgagaggaggcgccatccactatggaataatccatggaagaaggagcttcaccaccaagatgagccttggataacaagcttggaacgatgcttcaatggaggaaaagatagagggagagaaagagagaggggggagcacgaaattgaaggaataaaagagggagagaagtggaactttgaagtgtgtctcacaagactctcattcatcaaagttacaataagtgttacatatgcttctatttatagactaggtagcttcctttataagctttcttgagcaaacttccttgagaagcttctttgagaatacttccttgagaagctagagcttacctacacatacccctctcttactaagcttcacctcttg

SEQ ID NO: 115031 - DNA, 367 bp, Glycine max
  unsure (1)..(367): unsure at all n locations
attagagtccacaccaaaatgtttgctctgaggaaactgaatcggctactattggggaataagaggtcagcaaaagaattacattcaacctacctatagtaaaaatgaccaaacatcttaagcctttgtatgtcaaagctcaaataaatggcaaaacattggctagaatttttgtggatgagggtgttattcttaacatcatgcctctaaccactttaaagaaacttggtaaaaggtagggagatcttattcccacaaatatgaagatggctaatttcactagaggagtcattatagcattaggagttntggtagctgaaatcacagttggaccanaaactatgtattcagtatttttcattatgga

SEQ ID NO: 115032 - DNA, 441 bp, Glycine max
ctgcagcttatagcgcggtcgggagacgaatgtatttttctcatatacatagaatgctccgagtacattggatttgggacgaccttgccctcctgaatactagctggggaattggcaagtggaagaaccccccgacatttacccagcgagcaatatgtaaacctttaccggcttaaaagctctatagcttggcccaagccttagaagtcttcctattggttaacgcttttgtgtaatttggttgtttaaatatataatacaaggatctttcttcatatgatcctacatctctacccatattaatccatttgcatgtctacttcttttctgaacgggagaccgatgacgagtccccgaggtactatacccggacccgctatcaactcagatgaactatcaacgatatgagggacgagatgggacttcccagatataaggagg

SEQ ID NO: 115033 - DNA, 277 bp, Glycine max
aaacaatataaaattgtttgcatctaatatttctctatctttcatgtcaccaaaccacaggagttgaaaaaactattgatatagtctgatcttcgctgtttacgaaaaccacattttttgattcaaagctatatcatacgaatgttttgtttcgaaaaacattagtaaatattaaatcacatgcctcccctcttgtgatattgcttacacaagctaatttatatgactaaacattgatcttggcaagcttcttaatatgacactatttaattgtttc

SEQ ID NO: 115034 - DNA, 342 bp, Glycine max
  unsure (1)..(342): unsure at all n locations
tactaaaagaggatcattttcaggtccaacgccttacaatgatcaccttttaaaataaaaaagaatcacttgataagaaagaactacgtaggtctgatttcctcatcacaaattgaggaatacgtaggagcaaagggaaacacccttgtcgaccacaaaaaaggaaanatataacaagggtataaaggatataatgacatataagggaacataaaaaccaaagtcacgtttgcacattcgattaaaggctgccgtcccttgggacggacgtatggcgtgctaataccttccccgtgcgtaaatacaactcccgaacctttcacttaaaaagtcgtagatcgc

SEQ ID NO: 115035 - DNA, 357 bp, Glycine max
gctgcagctgtaaattctctaccttcttaatgggagaataacttcaactctaacacttctgtaaataaacaatttaaatcatttcaacaataataacaaatagttatcaaaatattatttatttcaaaatataaataccttttcattccaaactgtcagtgccacttgataaatatagtccataaaaaatgatgtactatggggcccgcctggaaaaccctttgcatcaacaactaaatcatcaacacctaccttttcaggctgttcatagacctcatcagttgcatgatccacatgctcaacatcctcagcaataggtgcagcttcccgttgcctacatgcagatgttgtgggtct

SEQ ID NO: 115036 - DNA, 396 bp, Glycine max
gataatcgagcggcgaacatgtcattgcctgtgtgtacgctcttgagccttgtataagctttgcgtaaatgcagcagaacaccatactatttagtatgcttgacaccttcatatctgttacagatattataaaccccatggcaatggttgtccttgtcaaagactgttgtgtgcgagagatactaacataactaaagagtctgatggatactatacggcctgcgttgtaacagacaaggagtcatactctacatacatagcaaataatcacaccaatcccattaagatccttcgacacaatgccaaaataaaatgcataatatgtcctcgctccattatctcatacattgacctatgacgaaaaagaacctctctgtatcaacactctctttgaat

SEQ ID NO: 115037 - DNA, 450 bp, Glycine max
  unsure (1)..(450): unsure at all n locations
atccttaagtcacctgccgcatgcaagctttaacctcatcgtccctcacagtctatatatttgggagccaatccaaccttgtgttcggactctcagccacttatgatagccgccgatgatcccattactgcttcccctaagctctctgtcctttcttcacgccgcataccatgccttgcaaactccttggagtaccctcgcgttgaggtcactaaaaccctgtgcgatgaaaggcgtgatgcnttcgtctaatggcgctcctctcatggcgtagccaagctgtcttatggtgagaacgggattataattaatacaaccccttgttcccatcaagggaacatatggacatccttcgcatgaagatagaatcctgattcttccttccttctagcgagggaaccaattaacagatgctctcccatgctagccaagagtaggtcacaattcgcc

SEQ ID NO: 115038 - DNA, 170 bp, Glycine max
gccaatgttggacacctggaccccagatttataccggagctgtcttctgctgaaacacaggtattccctctgtgcgcctgtgtctcccttcggcaatgaccttccccctacactgcttgtgttgtattgcgcaaactgagtcttcaggcgggattctgccggcgcctctg

SEQ ID NO: 115039 - DNA, 266 bp, Glycine max
  unsure (1)..(266): unsure at all n locations
agctntaatgaaagttacatgtgttgattcttttctcaccgaggaccgctcaggcgcctgacagatctagatgtatgatactggacaacggacactttagagaaaaccgcatggccattactgtttgttcgcaaggccgatccacgcgcatgacatatcgtgatgctcgaaatctagcaactcaccctctgaatatctgcaacaggtcgtgagttttatctcggatgggcgatctctgctcgtcaaatctcgacactctcgctatt

SEQ ID NO: 115040 - DNA, 340 bp, Glycine max
  unsure (1)..(340): unsure at all n locations
catgcaagcttgagaagaggaagtgtagaaaggngaattctcttgcttttattgnngaccacagctggcacctggagatatgtcgcggcggtcaagagaccttggggacctcatgtggggtgctattgcccaaaccaagcttgaccaattcccacccaaccccggcatagtcggtcactgagaacctgtgatgtacctaagcaggcgagcttctgcttgtgcacagatatgatgaaaacactacctccacccaaggaggcttgtggtggctggccagctgtgaaatcttgataatatgaggattggggcctctcgtaatcgattactaatggtgggtaat

SEQ ID NO: 115041 - DNA, 446 bp, Glycine max
  unsure (1)..(446): unsure at all n locations
gtttgttttcttttatacaaaagaaggtaaaggttggattagattacctttataacatnttggtggtggaggcgcgataaaagcgagacttctctaatgaattgtttctctaatcgatccgccaacattccgttttcgtcatcatccggtaccgtgatatatttcacagcaacagcttcatccttatacatgccatggtaaagcctgctgtgagcaccatgggcaaacctaacaccaacaaagagcttggagaggtcaacattccattcctcagctgtttccacagcagtaacctttccccctccatggtcaaagtactttgtccatcccaaatccttgcggtgctgcttcgacttgtcacttaattacatcgaagcaaggtgcctaattggactgctgaaggagattagtagtaatgcactgctggattggattggattgacaca

SEQ ID NO: 115042 - DNA, 457 bp, Glycine max
  unsure (1)..(457): unsure at all n locations
ctgcagctttattcccttacaataaggganatatgnttttataactaattaataaatcaaaaaagaactataatgacagccataagtatgtacctttgattgtttcttcaaattataattatggcgaagtcaatccccctgcatatgagcgctgcaatagattcttcatttagtttagaacaatactcatcaattaccctacccttagcactaaatgtagactctgaaactactgttgatattggaatagctagtatgtcacccgccatctttgataaaaccttgtattttaggctattgttcctccaccactctaacacactaaaattagagttactagtgtcaggaatataaacattctccttaagataatcctctaattctgagttcactggaggggtggcttcatttgcacgcacaatgttcattatctgatcaaantcaatgaccatagaag

SEQ ID NO: 115043 - DNA, 364 bp, Glycine max
  unsure (1)..(364): unsure at all n locations
agcttggtattcttgatccgcagataacatatgtggttaagtttgngactggaacgatcaccaatggctctcctgatgaaagagaaataaaatgtcagatgaattttactgtgagatggaagatccaacttataagcaacaacaccaaccttgtttaacacctggaaaggaccataaaaccaaggggagagtttttcattaatccttttagccaacgatctttctctataagggtgcatcttcaagaacacccaatcaccgactgcatattctatgtctcggcggcatttgttggcatttgctcacatgatatcttgagacttcaacaaatnttctcttagagtagccaataattcattccaag

SEQ ID NO: 115044 - DNA, 425 bp, Glycine max
  unsure (1)..(425): unsure at all n locations
agcttgctgcaatggcttagctccatatgtttcagttgngtaagaatatggacgatgaaggtaacctcttaatggcacttcctttaagatgtagcaatttaagcttgctttgatgcccaaatgatgagggaagtgctttcacctttgtgcatcctaatctcagttctttcatattctttgatactactgagaatttcttaagattcttgcacaaatcaaggtcgagataactgaggctgcgtaaatgggaattgcttgttagtatgttaagggactcgcaatcagaaaggttcaatctttcaagcttgggcagggagaaaatagatggatgcacattagtcaacatagaacaaccccggagaagtattacttcaagatttgtggctgtngatatatctggtagttcctctaacttcttggagcac

SEQ ID NO: 115045 - DNA, 494 bp, Glycine max
  unsure (1)..(494): unsure at all n locations
accgcggcatgcaagcttgatgaaataaatcatcacaattaatttgtataaactattatcgatctcgaatatggaattaattgtgttaaaaaaaatatttattttatgtgtattcgagttttttgataaaaactgattgatattttgtattaatattatggtcagaaaaaatattaaatattttattttattatgataggaaataagaatgtttttttaccatagaagtattaatatgccttttcatttttgttttaccatattttttcattaattcattggtatatttcagttactattaattacagttccaaaaatttatgtaaaaagacagataaaataattaatgacaatcaatttgacaaacatgcatgagaaattgtgaatataaccatctttaatgacttatcataattctttattcgaatatatntttaatagttgttttacattaatcattattaaatatctaatttaatanagtatacaatgat

SEQ ID NO: 115046 - DNA, 433 bp, Glycine max
  unsure (1)..(433): unsure at all n locations
agcttgatacttcaagccttttttgtatacttgtactcantgngcncctgcttcttaattagaaatttttatcggcatcatttatctaacagcttgagtcaaaaaaggtaacatcctttggccataataggaagaaacatgagcgataaaaaaggaagcagcttcaaccatggcttgaacttgaacatacccncaccaagggttgcaaatagatacctgattaccaactcaataccaatagcgccaccaacatcgccaacagctcatgtgtgccagcaactagcctgatgaaacagcagagcacagcaacacaacactaccgcggtgcctcggaccctgaaacattccatggtgcagagggtgtctcctgcttagatatatggcatgaggtgaccaagtgcccaagcaaagcacacttgatcatttctaatac

SEQ ID NO: 115047 - DNA, 391 bp, Glycine max
ttaagcacctgcggcatgaagctatgacaattgaatttctcgaagctttcgtctttcaatttcgagcggctcgaatattatgcgcccgaatcggattaccttgtgaaaaggtatgaatatttaaatttctcgagagcttccggtgttcaattattggcggcttgatatattatgcgcctatatctgacatccgagttaaaagttatctccatttgaatttcccgagagcgttcgttgttcaatttcgagcgtctctatatattatgcgcctgaattagacatgcgagctaaaagttatgaccatttgaatttctcgagagcttccgttgttgaatatcgagcgtctctatatattatgcgcctaaatctgaactccgtgtgaaaacatatg

SEQ ID NO: 115048 - DNA, 409 bp, Glycine max
  unsure (1)..(409): unsure at all n locations
gcttttaagtttctgtttccaaccttgttttttcttnaaacanaagtgngcatatctgttcattctcttctctctttgccaaaaagaattcaacaaggactaatcgcctgaatntcttttgtgtctctcttctcccttttccaaaagaacaaaggactaaccgcctgaattcttttgtgtctcccttctccctttntaagagaattcaaaaggacacaatctgagaattcttttgattcttccctttcccttaaacaaaagatttcaaaggactaaccgcctgagatatcttctgtttccccttacaaagtttcaaaggactaaccgcctgagaaatctttgtcttaacacattggatggacatcctttgtggacaactagagggncatctacttgggttgttgaactg

SEQ ID NO: 115049 - DNA, 340 bp, Glycine max
  unsure (1)..(340): unsure at all n locations
tgacaactacaggccaaagaaatcatttaaacttgtggtagcaactccagtataagccccatgaaacataaaagtataaaactagaaaataggaaatatatattacaagaaaaatgacatatacctacggataaaaactgtcactantaaataaaaatccgtagataaatgtatgatagactttgtcttacgaatgtttcttctgtcaactttgaggggggtataatgacggttaattgtctgccactatanggtttacctactatgtatagtgtgtagggaaaagtcattaacttctacttatatttcctaactgtaggaaaaagtcttaatatgtatc

SEQ ID NO: 115050 - DNA, 358 bp, Glycine max
  unsure (1)..(358): unsure at all n locations
taagcaccgcggctgcagctttatgtgaaaggatggactcttccatttgttttgtaattaacgnnnaaggcactggaaatcgattaccacaacattgtaatcgatgacagcttttttgaaatcaattggaatgttgtacattcatttgaaaactttttcaaatccattttgctactggtaatcgattacaacaatcttgtaaccaattactagagagtaaaaactctntggttaacatgttttgagaaaaattcatgtgctactcagtttttgaaaaaaccttttcatacttaccttgattaagacttctcttgattcttgaaccntgagcctcgaactgtgatcttgattcttggaa

SEQ ID NO: 115051 - DNA, 425 bp, Glycine max
  unsure (1)..(425): unsure at all n locations
gcagctgcagcttattcaacagaataaccgttattttctataatgggtgttgaaaagcataacaagactttctgtgattggtttacagatacaatctttgcagatgagaatgcttcagcaacattaagaaagctagcagatgggcctaaaagaaatgttataacctggtaaggatacgacataaataggtattcattttacacaaaagcacaagatgacaaaagtacaatgcagaacagcggggtcaccctcagggctgaatctcaacactttgcaagtgtcaatgacgccaatccctgtgtagcttccatcccttactttgggttcattgatgaaatttgggagcttaattatgtgaaatttacagtatgtgtcttcaaatgtaaatgggttgacagcaacaccggngtgcgcactgatgatat

SEQ ID NO: 115052 - DNA, 407 bp, Glycine max
gcttgagccaaaatcctgactcattttattatttgacccacggggagaacgccatccttaccctcggaagcgataaaaatagaagggaaatttccaatcaaagaaaaggaaagaaggaagatctccaatcaaaaagaaagcaaaaaagaaaagaaggaaaattccccaatcaaagagtgggagaaagcataaagaacagatagaaaattcccaatcaaagaatgggagaaagtaaaaaatgaagaagaagaaggaaagaaagctcctgatcaaggatcgaatgaaaacagaagaaatgtgcataaaggtctttggaccggacaatatctgaacaatacagaattgtcaccaaatgaataaaaagaaggaaaggaaaccacgacctcaaatggtcttctcctttgata

SEQ ID NO: 115053 - DNA, 464 bp, Glycine max
  unsure (1)..(464): unsure at all n locations
agcatgcaagcnngagacatcgtatggaggtgctagagtttcttctatctctgccgaaacacacgtgagtccgcttataggtaagggatgagtatatcacaattggggttagaatgaacatgtatagggatccttacgggatcaaattgagatttaatttgggatgtttattgaattataaattatcctgtatgataataaatatgatattggtgtgtttgatggaccaattgatatcctgatacaaattgtgtgataaaattgaatgttcttggtgttctcatgtttttaacctaagattttgattcattgattatgatatgattgtgtgaaattgtttgatgggttttactcctcatattgtgagaaacatctatgtacaaactactttgtcctttggacaagatctggtagatcgcgatgataaattgttatattgagattatgaaattgcgattacaata

SEQ ID NO: 115054 - DNA, 342 bp, Glycine max
  unsure (1)..(342): unsure at all n locations
agcttgtgcttttacgaanagtgtttattgagtttagttgaagnanngaataaccatcttgcaaaaaattgtggcaaaacatggatcgtgttacatcgctgctccgtctactgccaaacacatttagggttgtcgatgtccctgttacttccagtttcaccttgatgaagatgtcatgcactatgctgaaaatctaaattgattcaaccccatatcctgtgtaaaaattcataatacttcaactgtgcatcattcgcatacatccatgcatttcattggtttcattgatcattgcattctttcctctanataataattataattataaaaagagaacttaat

SEQ ID NO: 115055 - DNA, 462 bp, Glycine max
  unsure (1)..(462): unsure at all n locations
acctgcggcatgcaagcttgctaacccatggaagctcctatatatcttccacactntntgggggggccattcttggatggccttgattntctcaaggtccacttggaccccatttctaccaactacaaaacctaagaaaactatattatctacacaaaaggtacacttctctatatttgcatagagggtgtttttcctaaagactgatagaacttgtctgagatgtcctaagtgatcatctaagctcctactatacactaaaatatcatcaaaataaacaactacaaatctacctatgaaatcccttaagacatgatgcataagcctcataaaggtgcttggtacattagtgagcccaanaggcatcactagccattcatacaaaccannagtggtcttgaaagcagttntccactcatcaccctntttcatcctgattnggtgaataaccactttaagatc

SEQ ID NO: 115056 - DNA, 400 bp, Glycine max
  unsure (1)..(400): unsure at all n locations
cttctatggaggctgtttctttgatcttcaatgaagtccttcatagtgaatttccaccatggaggtgcagcggaagacaaaggagaagatgtganaggaggcaccaaccactatggaataaaccttgggccatggctctggtaactggtcccttcctagggaggattgcatcaaaaggtaagaggttagtcgcaatgagccatggacgactatatcaaagccgagtaaagaacaattttgacaagaaggtgtgcccacgcaagttcagcgagggagattgttagtcgttatttacgactaacttttgtattgaatagttgcatgaaattagcatatttcctccaatttatggttctttntgtaggaaatgtacatatcttcatgttagtttgatntatac

SEQ ID NO: 115057 - DNA, 353 bp, Glycine max
  unsure (1)..(353): unsure at all n locations
ttctgaattgagcggagctctttctttcattatatctagncaaacgcaggctttcattattaaggcttccttaaaggggtcttcttgatgaggttcactacccaactgaatatgggccaataccatagtcaattgaaaggagtttccttattgcggatgcgggtgcaatggatcccatgtatgatagaactccttaccaaagacctgtgctttgctactctttcttcatctctataagataccttgattatgctctgtcttccttttgtccgggaagttcacaaaaacaccaatgcttgatgtcatctaacacaggattgtcatctctcttctgggattactccattatacaa

SEQ ID NO: 115058 - DNA, 344 bp, Glycine max
  unsure (1)..(344): unsure at all n locations
tggaaccaactcttaccttacccaaatctataacatcaatcttaacttgctcaaactggatttacacctaaaatctcaccgaatcaaaatttgactctcctacacccaaatntaccctagaaatggctctttgttcactttggtcatttgtttttctctctagctcagcctaacctttctcacatgttctaaatggcatttcaagctagggttaactcattttaacctccatttaccacagaattcaaatntaaccttccaactctcaaagcctcactctttttccactcatagtaccacattctcaccttctaaccctaggttaactctaccattcatctcta

SEQ ID NO: 115059 - DNA, 488 bp, Glycine max
  unsure (1)..(488): unsure at all n locations
ctgcagctatagaatatatataaaagaacaatgtctattgaagagtctatacatgtnntcttgatgagtctaatgtcattcttccaaggaagggatttttagatgacatttcagattccttagaagatacacatattcatggaaatgactctaaagaaaaagatgaaggaagcaatgaagattctcaagttaatggagatagagcaaataatgaactttctagagaatggaaagcctcaagagatcatccnctcgacaacattattggtgatatatcaaaaggggtaacaactagacattctcttaaagatttatgcaataatatggcttttgtatctatgaatgaacctaaaaatataanagaagccataatagatgataactggatcatcgccattgcagaagaactgaatcaatttgaaagaaataatgtgtggaaactagtagaaaaacctgaaattatcctgtcatangaacaaaatgggttt

SEQ ID NO: 115060 - DNA, 474 bp, Glycine max
agcttgttgaaatcgccatgtttggatgtgttaaacgtacccattctgttttagggttttgtgatgatgtttatatgctgaaattgcttatggaaaactgttagagatgaatggtagaattaacctacggttagaaagtgaaaatgtggtgttatgagtggaaaaagagtgaatttttgagggctggaaggccaaatctggatttggtagtatctagaggttagagcgagttaatcttatcttgaaatgccatttaagacttatgagaaaggctaggctgtgatagagggaaaaacaaatgaccaaagtgaacaaagagccatttctagggcaaatttgggtgttgaagagtcaaattttgattcggtgggaatttaggtgtaaatccagtctgagcaagtatagattgatgttatagactcgtgtgaggtgagaagttgctccacatttacctcattctataattcacttctc

SEQ ID NO: 115061 - DNA, 304 bp, Glycine max
gcgttatggtagaaagtatcgctatatgtgtcatcatcattggttagagcccgatcatcaatggagatacaataaaagagattttgatggaacccaggagtttatagctccacctaatctacctagtggagctttttctttgagacagatggaatatcatggagttggggattggttaccatggaaaaacagaagtattttgttcttattgccttattggcaacaatagatgctccgttataatcttgatgttatgcacatagaaaggaacatgtgtgataacattattgggatgttgttacaa

SEQ ID NO: 115062 - DNA, 327 bp, Glycine max
  unsure (1)..(327): unsure at all n locations
cccgcacgcatgcaagctttganccaaaatcctgactctttatatatccttgtcccancgtgagaactcaattcttaccctcggaagcataaaaaaatagggggagatggaaaacttccaatctacgatgaaacaaaaaatgagagaaggaacatttccactctcaagataagaagagaggacagggaattccccatcacaataggtggagagagccattcaaaaataactaaatttccctactccacaatgggagaaagaaacaccaaacgacgagaaggaatgaaagctcctgatcaatgatccacatataatcataaaaatgtg

SEQ ID NO: 115063 - DNA, 369 bp, Glycine max
agacacgcagagtcgattatcctgctttgatgaatagcgaagcctcccgcacatggacagaattataaagagaaaacaacccctgctgtgtctacgcattcctacatagggcaaatgtatccaccgtgctcgactaatattctatactcaatacaatatcagcccttctcattacctaccaccctattatgtataaacacccaatcatccacaaaggccacccctatatcattcacaaaacctgcctactgcatattctataccaaacaccacccttatcaccaaccaatacaccaaccacggaaggaatatttcagaaaagaagcctcgagaattcaccctatttctagtgtcgtgtgctacactact

SEQ ID NO: 115064 - DNA, 286 bp, Glycine max
ccctttccttgttttgaagctcactaccagccttaagagaaaaaccatgataacaccatatccctaaggaattttggagctctggaatagttctgggaataagagtggggggttttcgtacattggacaacacgatttgttggctatgcttcatgatgtattctgggccatacttgatggacactggatattggataaatgttggacatgctgaatgaaatgttgcttctcaaaggctatacggctctaaaaaaaaaatcgaaaaaaaaaattccaaaaaagaaaa

SEQ ID NO: 115065 - DNA, 469 bp, Glycine max
  unsure (1)..(469): unsure at all n locations
gcttgtgtggagctntgatgtcaccgaatttgtccatcattattaatctgagcttcctgagttctttaagtaaatctcccaattccttattatgttgttcaagtgaacaattttacgttccagttctctcaccaccatctctttctctcttattgangttctcatctgggctatttcttcatttctcagaattgtcaatagttgtatctttgacttctttcctactctactgagaactttaaaaagtggagtggttaaaaggttcaatgttttgtctatcttacaataacttcgtttacctttctgcagacagtaaagttgtttgcatataaataacctctacataagaacatgcacactcacaagcacaaaatgtcttgttgcacacctcaatgcacaaaatagagaagtaataacactgggtagatttatttttttttaaaaagtanggtatgttcagttgaactct

SEQ ID NO: 115066 - DNA, 203 bp, Glycine max
gagggttggatttctttgtttttatgtcaaatcatgatcggcataattttgcatactcgcttagtgagcaaatgcctttgatttataaaatttagaaattctataagactcgcttagtgagcatacctcactggaaaaaaagaagattggaactcactaagtgagacacacaagtttgtcttatctagaaatgctcgctgagc

SEQ ID NO: 115067 - DNA, 247 bp, Glycine max
gtaatgaagacggtgaataaatactatcaagccaaatccaaaacaaagtgcagaattttatataaagcttatcaaataatttaccatttcccattacattgaattttgccaacaaagggaatcagcaacctattaattgtaaaatacacgcaggtgacgctgaccaaagtcctgctaagcaaatagtgataaagcaaaaaaaaaagactgatcgatttatttacacatcattgataagagaagtaaa

SEQ ID NO: 115068 - DNA, 436 bp, Glycine max
  unsure (1)..(436): unsure at all n locations
ttaagtcacctgccgcatgcaagctcgaaggtaaactagatgccttggtaacctggttattaactggccgngaatnaaaatctgcacctgtcgctagactatgtggtttatgctcctctgccgaccaccacacagacctttgcccttctgtgcaataatttgaagcaaatgaacaacctgaagcttatgctgctaacatctacaacagaccttctcaacctcagcagcaaaatcagccacaacagaataattatgacctctccagcaacaggtacaatcccgggtggaggaatcatcccaaccttagatggtcgaatacttcacaacagcagcagcaacaacaacaacagccttatattaaaatgttgctggcccancagaccatacgttccttcatcaattcagcagcaacaacaactacaaccccagaaatagc

SEQ ID NO: 115069 - DNA, 457 bp, Glycine max
  unsure (1)..(457): unsure at all n locations
agctntaaagattgagagtcngagtgtcctaatcnnattgtgccagaatacacgaactgggctctttattattacaatcagaagtctaaatcatgtttatacaaggaggaacagcagcggctgaagacaaaacagctggggagagcttgatactgggaaatagatacaacccatcatgtccaacatcaccttgaaaaaggattacattggaaccctgacatttgacaaagcaaccattatcatgagactcagaaaacatgattatcatgagcaaatntgcttacactgatgagattcttagtgatgtgaaggaaaagaagcctgtgtttgatggaaagattatgattattgtgagaacgaaaattagagtgacccgaggcagaaatgttcataccttcgtcgtaccaataaagatatgatctggaccctctaaaggtgagttgtgctggatattctt

SEQ ID NO: 115070 - DNA, 58 bp, Glycine max
  unsure (1)..(58): unsure at all n locations
gaaacacgccgcgctaaaaacagtttttgggganaaagggggatctggtgtttgagac

SEQ ID NO: 115071 - DNA, 149 bp, Glycine max
gacgtcaggcggggtgctattgcccaaaaccaagcttgaccaaacccgacccaacccgggcatagacaggcagagaaacccggaagacccaaacaggcgagctcctggcagccaacagatgacaagaacaaacaccacaaagcaaggag

SEQ ID NO: 115072 - DNA, 427 bp, Glycine max
  unsure (1)..(427): unsure at all n locations
aaatgccttgacgccaaaaacgattatttttattctcttctgatagagccccatcgattgtgatcttagcgttgtgaaatggggtgaagcgattcatcattgtgctgaggtgtggttatctctgtgatgtcncggactcgcggtacatgacggtgaagttggactggctcgtacctgatcccgacctagttggggttggaggcatcgaagatgtaagtggtgtctccggactaagaagagaaagggaggaaggaatctaccaagtggtgttagggatgtggggcacttgtatccaaatcgattgtttcaacttcctcacggggtgagagatgggcgttggatccgtcaaaaacggaccaagcgggtaagacatttggttctacatttccataatggatctgcacctcccacattttgaaagagcaac

SEQ ID NO: 115073 - DNA, 425 bp, Glycine max
catcaaatgtgctaagttatcttttgcattattcaataccaaacatttacaaccaaagatatgaagatgtgagatgtttggttttctgccattgaacaattcatatggagttttctttaagatgggtcttattaaagccctatttaaaatgtagcatgcagtgttaacggcttcagcccaaaagtattttggaagaggagtatcatttaataaagttctagcaatctcttccaaagatctatgtttcctttcaacaacaccattttgttgagggggtcttggtgcacaaaagttatgctcaatcccatgcttatcacacaataattcacattgtttattttcaaattcacccgcatgatcactcctgatagatataatctttagattgttcttatattgaactgattttgcaagtcttctaaatg

SEQ ID NO: 115074 - DNA, 476 bp, Glycine max
  unsure (1)..(476): unsure at all n locations
gcaagcttacctatgcgtcattgacacgtggttatgttttgatgacccacattgtataagggggagcanggatggccccgtgtcttttggagacttcatggataaacgtacctggatgtgaagatgtgatttccatttcttgtttcctttntcagngttatgtttagtgttgatcgactcagagtctaagaagtttatcttcatagggttgtcatgtctatatgncttgtttgaggagatttgagtctctatcaacttgtataagttcatgttatgttagagtgtcatacggctcatggtatttttagttgtgtatatatatcacatgatgttntatcttgatatcttgcattctagctcttggtctctganatgtgaaaagtctacaggtattttcataattaaattacataaaggggtgttaaagaaaataaaataaagtcttccaattgagatagttcacaatttcatgtagt

SEQ ID NO: 115075 - DNA, 266 bp, Glycine max
aatcatcccaatctgagatgggccagtccttcacaacaacaacagcatgtccctcatttccaaaatgctgctggtccaacacagccttatgttcctcctccaatgtagcaacaacaacaaagacaacaagcagttgaggcccttcctcaaccttccttagaagagttagtgaggcaaatgaccatccagaatatgcaatttcagcaagagacaagagcctccattcagtgtctgacaaatcagatggggcagatggctactcaatt

SEQ ID NO: 115076 - DNA, 469 bp, Glycine max
  unsure (1)..(469): unsure at all n locations
agcttgtatagataaagagaagttgtgtcttgtgttctaanngaacnaccacatcacactatctaaatatgaagagatacaacagatgataaaaagcgttgggtgctttctactgaacaatatagatgtaaattaagcagtatttctctatttaaggatcgtttctgtgttctatgccgacaacgactactcaaaccaagaaccctcttgtgaatgagtctaattctatttaaacttcggtctagatacctcgtcgaacgtagcctaaacgagttgcattaagattacgcacatttatagcgtgccagagataaatacagatgaaagcaatgaacacaataaaacaactctaaatagatagcgaagagtttacatcaaagctcatcagacatcccaacaagagattgagccttccattgaagtagaaccttcagcccaaatgagttctgaggaaaattaaatacaagtg

SEQ ID NO: 115077 - DNA, 431 bp, Glycine max
  unsure (1)..(431): unsure at all n locations
accacccgccgcatcaagcttctnactatatacaagaatgatactctgatactcacttgtggacaatggcctcacatatcttataaagggggggggggggtcgaattaatatctcacaacctattatcccaattaaaatatctatttccctctctattccaaatattaaattcccttaataatgaattatctaattatcgattcaaatataacccattgtatattaatatcttacactcatcaataactgagtttatgacaataaaaaatgcaaactcatattattctgtttcgccacacccttggtctacgtccaccccaatcaaccgcttgaaacccactatcttgaacacccttacaaatctaataccaagacacccttctttatattcaacttctcccactaaacaccaagattctaattccttttt

SEQ ID NO: 115078 - DNA, 372 bp, Glycine max
  unsure (1)..(372): unsure at all n locations
atgattngaatgacacgatgatcttagcctttttgttaagaagatcaacaagattgtgagaatcagaggaggtgagaggagaccacacttctaacctaagagaaggacagaagattcatcctctactccaaaatgctttgaatgcaatcaacctagacatctgagggttgattgcctgatcttcaagaaaagaatggagaagtctgaactgaataatcttagtgaaaagaagatgaagaaggcctacatcacatgggatgacaatgatatggaatcatctgacgattcagaaaatgaagagataaacctgtgtctgatggctaaccattatgaaagcgatgaagaggtaacatcttcatataacaacttatc

SEQ ID NO: 115079 - DNA, 450 bp, Glycine max
  unsure (1)..(450): unsure at all n locations
acctgccgctgcagctggtcccaagcttatgattttctttcaatatctagagggaaattgggatctctatcagagactatgctagaaggaacaccgtgtagtctaactatctcactgacgtacaagctagtcaacctctctaaagaatatctgatgttaactggaatgaagtgagcagatttggtcaacctgtctacaataacccaaatggaatctaaacctttgggggtcctaggtaaccccactacgaaatccatggagatgttatcccacttccactcaggtatctctaaaggttgcaacttccctgaaggcttctagtgttctatcttagttntctgacacactangcatgcaaggacaaactcattaacttctttcttcagacccggccaccacaacatctgcctaaggtcctggtacatcttagtcgctcccgggtggatactc

SEQ ID NO: 115080 - DNA, 355 bp, Glycine max
cacaaccctcaaagacgaaaagagtatgatgaactaaagggcggttatatagccaccccataggccttggaacgagaaaccaagaaggcgcggaagggagaacacgaccaatgcatagctttgaggggctttatagggcagcaatagtgagctcatgcttcaaagaggtgaaaggaatcatcacagggcaaaggcatgatcttgaaggacgagctaaaggcttaccttaggtcgaaaagacattcgtcccaacagttaaacgagactgaagggaatatgtgcgccgccaccgatgactgcaaagagaaactaaatctagcggcgactcacgagcaaaggctagaggatgagtacg

SEQ ID NO: 115081 - DNA, 390 bp, Glycine max
  unsure (1)..(390): unsure at all n locations
caacactattggattgtcttgacgctttgtcatggcctcataaactcataaaagagcactcggccatttatttcgtagactgtgacatatccagcatagtgctgaaaatctacaggaggctggccaggttantttttcacaatatcaccattaccattattattattatcccagaagatttgcggatgaataggatcgagatgacattgtcatatgccgagttaagtacttatcagagttctgagtaagttctaaaaaggtgtactgaaaaaacatcatatataggatcccaganacagctttcaacaaaaccaagcactatagatagagacaantttaaatagcttataatcttccagcacttctgagagtcattatatacaataacca

SEQ ID NO: 115082 - DNA, 237 bp, Glycine max
  unsure (1)..(237): unsure at all n locations
catcaaccaacaaaagctcgcgccattttctacaatactactgggattcggaccaagatnttttgtcggaacctctccatgatcgatatctacaccatgaagtggggaacactcgctactaatcgtggagcgcacatatcacagcaactggagtggtatacagtaatgtgctgctacactctcacaaaccctccagaacctgacaacatctcattgctaaatgcccttgtcactcaa

SEQ ID NO: 115083 - DNA, 387 bp, Glycine max
  unsure (1)..(387): unsure at all n locations
agatgaatgggaagattctatagattgcgggctctcacacctcatcttgggttcttctggtatgttagatggcatctgtttcctttttggtcaatatcaaattcacattgctttagaagaatataataacgattactgatgccagttattggcttaactagtcacagctatttgcatgtagttagtgattgatgttgtgttttgtccaaacgtttgataaaaataatcttcttttctgataagaccaaagcttgaaaagaaagaaagcatttaaatagtcaattaccatttttctttggcgtgaactaatgtctagtgaattatanagcattaacancatcatggtgacgtattaatttatagtgatgaatagtagcaactatgtac

SEQ ID NO: 115084 - DNA, 476 bp, Glycine max
  unsure (1)..(476): unsure at all n locations
tnctccacgctntcctccatacctagaacttcanaccttcgattctcactcgattcttcaccaaatcacgtcccgtaaagcccaatcttcctctatttcactcctctttcacttccaccaatcaaaatccagaanaacttcatcaaatggcagagccatcaaagaagagaaagggatcatcttccaccgccaccgctgctgcccatcgccgtcacggcccatccggagcacccacagcacctattcctccttctttgtcatctccaagatcatcaacactgttttcatccgatgatcaacgtctacggtacctttctcagttttcttctagaataatcttagaccctaagtacctagacgtagagttctctaatgatgaaacgttngattgctatcaagtgtctcaaaattctggtcttggtgatatcatgtcatataaatggccatattatcctgaacttgtaagggcttctact

SEQ ID NO: 115085 - DNA, 65 bp, Glycine max
ttgcgtggttacatcccaccaaaaccttggtccatgtatagagtctgtggccattcattacgcaa

SEQ ID NO: 115086 - DNA, 142 bp, Glycine max
  unsure (1)..(142): unsure at all n locations
ctaagctangaacctacttggcccgacatgtgccgcgagaggttcctctctttcacggggaaatcttgatatggtatgatgaaccccactatgcttcgttgtcccaagataacaagaactacttcgctgagaagtctatatg

SEQ ID NO: 115087 - DNA, 406 bp, Glycine max
  unsure (1)..(406): unsure at all n locations
tgcaagcttaagggctagcttgttgttccttgatgtatcttatgcanaatatattgcaatgactgcttaagggtgatgactagttgtctccaccatgatattaccttcactatatgtagcgcctgcccaccaattgtcaattcgaacctattatccctataatttatacgggggagagaaaaagtgaagcgtaaaattagtcattacagagctaggtcggcaattcgaaaaggatggcgttttttatgctagaatgaaaatgagagattgttccacaccagtgccttcctatttgatctctaacaaaccagtcctaggataaaaggagtccacaacaaattatcgtgccttaaggattagacaccaaattggatcggagacaatattatacctattccggtcgtct

SEQ ID NO: 115088 - DNA, 449 bp, Glycine max
  unsure (1)..(449): unsure at all n locations
cactccagaacactcaagcctgttaaagcggaagaaaaagaaaccgaaagtaagcatacattttgtgattgtactcaaaacacgtagggacaaccaagggtgcatagaatgaattgaaagattcgatttctggaacttactggttgaagaatgaagaacgaacgaagaacgatgaagcatttccacagaatcgctcacgataaagttacgacagcacctgagcttggattntcttcacgaaacacatttttttcacccaaaacagccgaaatgcatagccaaggggttcagaatcttttgaaatagcctccctcccctatttatagggaaaaatggaggtgctngctgctcataggcttcttgaggaagatttctaagcgcatcccaattactaagttcaccccacttctcatactntatgtgaaagttactgaagccttacggaagtg

SEQ ID NO: 115089 - DNA, 369 bp, Glycine max
  unsure (1)..(369): unsure at all n locations
gacccggatccttanatcacctgcngcatgcaagcttccaaatatttgtccacactaccgcatctccggccaagctatcctgaaataagtgtattaatagcttttcatctttagaatgggcgcccatcttacggtagtacatcttgagatggttttgggacaaatcgttcctttatacttgtcaaagtccggcnctttgaaacttcgggggaataacaacatcatgaacctaacaagatccgtcatgtctgcgaacggatagttcccaatatctttcacggccctcaatctttcctaaagagatcgagcttcctcctttcttcattgctgggggcggcccttccattgacaaactattggtggtgctgc

SEQ ID NO: 115090 - DNA, 427 bp, Glycine max
  unsure (1)..(427): unsure at all n locations
aacttcctgcttttattcgttgaccacagagtggtacctggagatatgtcgcggaggtcaggagaccttgnggacgtcagggggggngctattgcctacttccaagcttgaccaatcccgacccaacccgggcatagatagtcagtgagaacctgtgatgtacctaaacaggcgaagctcctgcagtcaacagataaaaggaacaaagacgacaaagcaaggaggcttgtgtggtggctggccagctgtgaactttgattgatatatgggatatggcctctggtaatcgattaccaagggtgggtaatcgattacaaggcttaaaaatgaagataggaggctaagatggtctctgggaatcgattaccaaggggtgtaatcgattaccaggcttgaaaatgaggtcaggaagctaggggagcttctg

SEQ ID NO: 115091 - DNA, 401 bp, Glycine max
  unsure (1)..(401): unsure at all n locations
gattaagattagctccctctgactactttttgttaacaattggtgccacggaccacattacattggctatcttgtttgggaatctatgctgagaatagcaccaatcatgaggattgctcatctcactgaaatgaaatgataattagtaaaggctctcctcttttttgtttgctcaacaagaataggtaatatatatataaaatgagtaccaaaggtgctataaatacactctgagagtgtgtgcatagctgattacaagtttgactaggaaccaagctatccncaatacaaggattacaaatgtcctgcacctgctattaacagtcctgcacttgctattaaagtcctgcaccttctatactattctaataaacaaaccctttcttagatgggtgaccatt

SEQ ID NO: 115092 - DNA, 89 bp, Glycine max
tctatgaataccaccctcttcgcgtgccttgcggaagacgtgccttaccacacgatatatatcacggactcatggctgctatcaatgac

SEQ ID NO: 115093 - DNA, 416 bp, Glycine max
  unsure (1)..(416): unsure at all n locations
tctgctaagcgcaacactcatgggctaaacacgaagcaaactctgtgatatgatgagtntgtcaggttcgctaaacgcaccactacatctcactaagcgcaatgcattagtccctctgctaagccgcccataattgcgctatgcgcaagaacaccgaccaaagccacctattttaagcctgtaatcagatcttatagagcgagattggactacgaatcagagctctgcctgtctaaagattctatagagagaaaggtcctaattccaaagagtcttgagagatntagttgtgtgataatttgcacagactacggctcgaagtaagagtcggattgagaactcgagatcagtccgtgagtgattgcgagatcctacatgtgaacgagacattctcaccacttctacacgtaatggaa

SEQ ID NO: 115094 - DNA, 406 bp, Glycine max
  unsure (1)..(406): unsure at all n locations
agcttattcttccatcatacgagaaagaaatcaacgaaatttgggtataagaagagagactattgaagnttttgtcatgattgacaaaaggangaacccacagcccttgctattcaacacaaatctgggtaatcttctcgtcccaattccaataatccgataccgctacattgtcccactataacaaaaatcanacacaatggatacatngttgaagtacatgataaccaccaggacagtccagcataccacgaattatcatttcagtccaacgatataatcaatctcaacaaataatgcaaagaaaccctatcaacacatgttagccccttctgaattattgactgactacattacaacaaattttgttatatgcaagcaatggacatctcatcatctgtccaag

SEQ ID NO: 115095 - DNA, 444 bp, Glycine max
  unsure (1)..(444): unsure at all n locations
ctaataaatcaatctatggctngaagcaagccttctgccaatgtgtattgaagnttcatgatgtcgtcacttcatttggctctgaanagaacatcatggatcaatgtatataccattattgtctttgggagtaagattnttttcttgtgttatacgtggatgacattntgcttgcaactaatgataagggtttgctatatgaggtgaaataatctctctcaaagaactttgatatgaaggatatgggaaatgcattttatgtcattggcattaagatccatagggaaagatctcgagggaatttgggtttgtctcaagagacttatattaacaaatttttagagagatttaacatgaaagattgttcaccaagtgtagctcccattgtgaagggtgacaaactcactttgagtcatgcccgaaaatgatttgagcggaacacat

SEQ ID NO: 115096 - DNA, 452 bp, Glycine max
  unsure (1)..(452): unsure at all n locations
gcttgcctgtccgatgcagcagtaatgatggtccgagttatgttggggaacggttacgaacccggaatgggtttaggcaaagacaacggcggcataactagcctgataaatgccaaaggaaatcgtgggaagtatggtttaggctataagcccactcaggcagatgtaaagagaancatcgcgggaaggaagggcggtggttaaagctcgcggttgagacaagaaagtgaaggaagcccgacctaccacataagtagaagctttataagcgcgggtctgggagacgaaggtcaagtggtcgcaatatacgaagatgatgttccaagtacattggatttggtacgaccttgccctcctgatttccagctggggaattggcgagtggaggaacgccccgacatttacgcagcgagcataatgtaaacctttacagttttaaaagctctatagtt

SEQ ID NO: 115097 - DNA, 490 bp, Glycine max
  unsure (1)..(490): unsure at all n locations
ctaagcttgcagaagggaagtagttaaaactctcttctagtaaaaatgttgtttctacttcaaaaccccttgaactacttcacattgacttattgngtccctttagaactgagtntgggtagtgattactatggcttagttatagtagatggttgctcgtgtgtcggtaagtgtaccgatttgcacaagtagtatttaaaacgggtagaccgagtatcatatccacaaggaatttgtttcacctaaactatgtatattcagtatgtaaacattcttcaaagcttggaaataaggtaaagattaagtggtgaaataagttttctacaatattaactatttagacaaaagtaaaatatgcaaagttgtaaaatgtgacaaanatcaagataaaagcattggatagtttcctactgaaatttctcttgccatataaaagggtgttttctctatttaacattnttctctattcctcacatgaatgagcctaact

SEQ ID NO: 115098 - DNA, 475 bp, Glycine max
  unsure (1)..(475): unsure at all n locations
agctntcaatggtgttgaatgcttatcaaatcgtacaccttcgtatnggtatccgtgacacgtgtatacttatttccttttcaaatttaatttaaagtaactaactgtacggtcggggctgctatccccacagcacgtgatcgtgtttcggcccaacaatgccttggatgggcttcttttgtttttttatttaccttcgttggatttgtggttgccagctattattattattttttaaagagaaaaatgaacaagaattaatataataaagaaataaaaataaattataaaaacattataattttttatagtaaaaataataattaaatataaatttatttaagaatataattaaaatatattaacattataaatatttattacattatcatgcaactataacttatcatatatacaataagtctttttataataactaatttgaaagatgtaaaanaattatatggacagtata

SEQ ID NO: 115099 - DNA, 484 bp, Glycine max
  unsure (1)..(484): unsure at all n locations
tactaagcttataagcccaatcaanacccacgccgccacagacccacacattatcgtggtccacggttccacaacggcacagcccgatgtaatggcagcgaacccgccaagcaggccgttacacacgtcaatcacgttccagtggccagccaataaccgcttgctgaacaacgtcgtcagagccgcagtgctcccagccaatgtcgtcgtgacagctgtcctccctatagcgctccattgaccataataccctccactttcataccccttggctattgtcagaaacgaaccanggttgaagccgtaccagccgaaccataacaaaaacgtaccaagcacaactaaagacgcgctgtggccacgtaaagcaaccgaccggcccgaacggtcgaaccggccgattctcgggccttcaattaaagcccnccacaggcccgctatcccgccaaccatgtgaacaacgcctgagcccgcgaagtcgatg

SEQ ID NO: 115100 - DNA, 452 bp, Glycine max
  unsure (1)..(452): unsure at all n locations
tgcctattattattacaccctntctatatatttttctaaaatatagtgtgaaaccttcacagattactggggccactaaatctatgtgacgtcactatcgaaatttggtggttgatcaatcctgacataatgatagctttgtggatagaataacatctcagatttcgagttcacactgctactatgtcctaccacaaatgtttgtattctagtctgccggtagtacttccaactcccaaccccaaaaaaattactaattcctcaactttacaataattatcattttaagataatgtacaaaaattaaaaaggattaaacactttaattataaaaaatacgtngatcacattatattaccttgtcatttaataagaaactcttactatacttaattgcgggcatatcaaataaaaatgattattatatgtataatttgtaaaacgaaaaatga

SEQ ID NO: 115101 - DNA, 409 bp, Glycine max
  unsure (1)..(409): unsure at all n locations
nnttctcttgatatggactngcaggcatactgagaacgcagtgttttctcagtgcagagataagtcaccccgaattggcctctccccaattccttcccaagtgtgtagtgctgtctaacatcctcaaatggctttccagtgattgtgtcatgcttgtgaacatgttttgggcttggtggaggcctccaaggagcatgcttttcatgtaatgggtaacgttgatgaaaagggggttcatggctcttgtgattattgtacacaccagcacccccagcacccgcaacatgtctgtaaacaatgtgttcttctggctctgaccctcttttactcatacaacaacccatggttgtacacaaaaagggaagatttatgttcaagttttatcacgtaccaactntgaaagtgtgaa

SEQ ID NO: 115102 - DNA, 431 bp, Glycine max
  unsure (1)..(431): unsure at all n locations
agcttgtangattatggggtacccatcacatgtggtactangtggcggtcgggcgatggtacaaaacgattctccacatccacaaatcacgtataacccaccatcccctgttgcccaccttcaactgagctcacgtactcccacgtagcccttatcgtcgttcctctcaacgccgggtccccatcaatcctcccaagcttccaaaacatccaagtaattcaacattcaatcatcacaaactaacacagccaagaaaacagggcaaaggcagaaaactctacccaaaacacaaaccaatattacagctnttcacattcaattatccgagtaatattctctatgttccaattcgttaatcgttggatcgaactcgaaaatttactgggaagtctctagtacataagtctacattttgaccgtggggatctact

SEQ ID NO: 115103 - DNA, 459 bp, Glycine max
  unsure (1)..(459): unsure at all n locations
gcttctcaaggaagctaccttccttgcttcttttgaagcttcccatccgactttcatgtattttggcatacgggtgagcttatctattggaggtgtatgagtagccccccctctagcttctcaaggaagctttcttcctctggcttcccaaggaagctactttccttgcttctcaaggaagcatcccatgtgctatgctataaatagaaacatgtgtaccacttgtcantaacttgatgaatgagaaacttgtaagacacacttcaaagttcaacttatctctctattctccttcaatgtccatgccactatctctntctctcattcttttcctccattgaagcttcctctctaagcttcttatccaaggcactctcttggtgggaagcttctcctatcatggcttattctctaatggatggtgcctcctctcacctcttcttctttatcttccgctac

SEQ ID NO: 115104 - DNA, 434 bp, Glycine max
  unsure (1)..(434): unsure at all n locations
agcttgtccganatgttgagcatgactgatatgattatgtgggtcttcattgaccactacaaggaatatctaagcctattagcaactcatgagtgaaggctagatgacgagtacgctcatgtatcagtccttctagcggaaagggaggcattggaaaaagtgatcatttcattgcacagacatacaatgatgtggatggacatgttcttctttactttgaatgggagtcaagagcttccctaactgctatccaacgccaaagcaatggcggatgtgtactctgctcccgaggaggttcacgggctcctcaattattgccaacacatgattgatctgatggcccacatgatgagaagccgcttagggaatcgtattgtcgctctgattttgactagataaaccttttatgttctataatataatgacgctgattt

SEQ ID NO: 115105 - DNA, 471 bp, Glycine max
  unsure (1)..(471): unsure at all n locations
ntacgctctngtacatnggctntcctcatagacattgtcatctctttatgatactcattaatgctcttgataccttgtgtgaggctttgtatcttgtcataagcatatctctcataagatggtggtaagaatgtcttccatataaactcattcatttcttgccaagttgctatctcaggcttccttatctttcctcttgcaatcttctcaagctcctaccatacaattgctttatcatcaaactccaaggtagccaacctattcttctttccttcactatacttatgacatgcaaagatttgcccaactttcacctcccactcaagagatgccttctggtgacgtttcatttaaanataagggaatttaagtttctccctcttcatactatctactctagtattttctcctctctatctcctcttctatatctccctctaccatgtctcctaagccttcttctccttcata

SEQ ID NO: 115106 - DNA, 453 bp, Glycine max
  unsure (1)..(453): unsure at all n locations
agcttcttctactagttcatataaactcccaataactcacaaaaacttggtcattcttcctctctcttangagctggtcatgaggaaaggagacaccattttcattattattccaagctttcccaagtgttcttgagctcttcttctatcaaacttaggtaaatgacctccattttcaattctaaacttgattntcacttcattttcttgctttattcttacttgtagtttcaaaatcttatttttgcactcttgaaggttggaaactagaatctaaactccctcattcttccttctaaattttgtggagcatcatcaaggtaaggggggtctctccaatctttgaatccaagatgtgatgcatggaaacttagcttaaaaaatgtagttgtgtngttcttaaaatntngatgctngattccctttcttggagctatatgttnggttgttatc

SEQ ID NO: 115107 - DNA, 470 bp, Glycine max
  unsure (1)..(470): unsure at all n locations
aagcttanagggatgaaaaacanannattggaaccaagaatgagagttntgaaaganaatggtaaggaaacaagaagaaaatgaagattaagagcctgctaccatagcttggagagaagaagcctcaaggacacttgtatgaagattgaaagaagaacaaganaatggattcctctccctcccttgaagaactgattcaaaacaatggagaatgaagggtccaagtttggttttttttggagaagtgaagtgataagactttaaggcttggtccaaatgaaacttacttaggattaatgtttgtttataagatcaaattgaaaacatgaatgactatttgatagccatggtggacctaccaaattctatcatatatgggtattcttccttttgaattnttaaccagaaatgactaaagtagatttaagcaatatggtaaaactacttttgataaactgataatttatctc

SEQ ID NO: 115108 - DNA, 358 bp, Glycine max
  unsure (1)..(358): unsure at all n locations
gagctntgaaaagtgttgttgttcaccttctctttaagccaatctgttggcttagcgagcgtgcactaagcgcaacactcattggctaagcgcaagaaagaatctggaagaagatgagttgttccagttcgctaagcgcaccgcatcatctcactaagcacaccgcttcaatccatctgcttagcgagaaaggcacgtgctaagccaaaattcattaatgtgcgctaagcggttcaaagttgcgcaagcgcacgagcacgaacaaagtcacctatttaagcctgaaatcagatttagagaagggagtttgggctgcgattcagagctttgcatgtctagagattctagagagagaaag

SEQ ID NO: 115109 - DNA, 473 bp, Glycine max
  unsure (1)..(473): unsure at all n locations
ngagatgaggaagtgttgaagggtgatacttcctgcttntattgttgaccacagagtggtacctggagatatgtcgtcggggtcaggagaccttgnggacgtcaggtggggtgctattgcccaaaaccaagcttgaccaatcccgacccaacccgggcatagtcggtcagtgagaacctatgatgtacctaaacaggcgagctcctggcagtcacagataaaaggaacaaagaccacaaagcaaggaggcttgtggtagctggccagttgtgaaacttgactgatatgtgagatatggtctctggtaatcgattaccaagggtgggtaatcgattactacggcttaaaaaatgaaaacaggaggctaagatggtctctggtaatcgattaccaacgggtgtaatcgattaccangcttgaaaacgaagtcaggatacttanggagcctctggtaatcgattaccagcctgtgt

SEQ ID NO: 115110 - DNA, 454 bp, Glycine max
  unsure (1)..(454): unsure at all n locations
gagcttgttanattaattctgactcanaagatatgaatatgaatcacccaagtgttgtgttaaaagtgggaatgcacaccacgacatcnaggtgattcattctgttattcctttttcctccctgcatccgttcataatcatttgtatataggtctttggaatcacgaaatgtacctttaatggaagtgatctttgttgttgtattgttctacagggagggtnttcaattctgttggggtccatacaacggagtttatttagatgtcacatagatcaattccactaagaatagacgtgcgcttaaagcctctgaacgatttcttttattcttgtagcattcacgtttgataatctcttttaccattccaatattaacttgtatgtactctaaatgttcggaaaccctccaccttngcaatccctttatctgtccgagtaacttactgatcctttc

SEQ ID NO: 115111 - DNA, 459 bp, Glycine max
  unsure (1)..(459): unsure at all n locations
tccatcagatataanatagatgtgttaagttgttggttttttaatttaagtaattaactttcttaatcaagaataatttaacgaagaaattcattaatattacaaaaacatatataaatcaataaagttaatgtcccaaattttgctctctctttacttgctcaacgtcattgtatttaattattactatctataaatgtatatcaaataagtactaaatgcaatcttaatttttttcttctttaaaataaattcatttaatcttcaaaattataaaagtcaactagttaacttattgaacttataaaatattctttattttaattttaagataacaataaaaaaaatatatattatagaactagatgttaatgtaatgattctataaaatttaaaaattagaatgagtcagtgtgttctgattntatttttgatgaatactcatcttaatcgttcaac

SEQ ID NO: 115112 - DNA, 74 bp, Glycine max
agcttcttagaaataaagatatgacattatttttattttttataagattaagagatatatattattttaaatct

SEQ ID NO: 115113 - DNA, 416 bp, Glycine max
  unsure (1)..(416): unsure at all n locations
gcaatctattcccaagataataagtttccccatctgtcttctagttagtctacatacttcttgtcaactaaataagatactatagttctggaggacattgaagacaagctccactccttngtattcaagtgctttgcctttagtcctaacaatgtggacttcttcacataatggtgagggggtatgctggttatcttattttttggtcaacagccgattttctcgctaagctgatcaatgacatgtctgatgatgagatgccatcctctatcctcattaagcatagtcaaaagagaacaactacatctaatntagttatccaagaaagttttctcaaattttcctttgatttcaactntttatctcttatctntgctcacttttatcttatntctacatatctantttttggatct

SEQ ID NO: 115114 - DNA, 175 bp, Glycine max
agcatgcttgtgtggcgtttatagaggctgtttcttttatcttgcatgacgtcctataatggttattttcacccctggagatgcctgggaacacaaacgagaagaggtgaaaagaggccccatccactctggaataatccatggaagaacgaacttcaccacccagactagcctt

SEQ ID NO: 115115 - DNA, 230 bp, Glycine max
tcctgtggctatgatctctatcacaatgattgatggtgctggtgcctgtttctatacccatacttcatacgcgtttcgattgactctccccaactgcagcatctaaaacttatccatgatgtcacaagacatctatggatatattcacgcgaacccgtgggtaggagtcatctggatttgaccatcgaagcaagcaatatcttgtctcactgattcattggagaattgat

SEQ ID NO: 115116 - DNA, 91 bp, Glycine max
accggtttatgctcgtactttatggagaagctcgaaactgagcgaccggaagctctcgagagatccaactggtcataactttcactcggat

SEQ ID NO: 115117 - DNA, 151 bp, Glycine max
  unsure (1)..(151): unsure at all n locations
agagtttgggtcaacctacctaattcataataatacttttgatccgtacaaaaccacttgaatgaggcgtggtggacacctanatccagtgccgctgtgctgtaaagcttgcatttggggtatacatcactgatacatgatcggtgacttg

SEQ ID NO: 115118 - DNA, 485 bp, Glycine max
  unsure (1)..(485): unsure at all n locations
agtcacctgcggcatgcaagcttctaaggaagctacctagttataaatagaagcatgtgaacacttgttgnactttgatgaatgaaagtcttatgagacacactncaaatntacacttctctccctcttttattccttcaatttcgtgctcccccttcnttctttcttttcctccattaaagcatcctcttcaagcttcttatccaaggcacatttttggtggtgaagctccttcttccatggcttattccctagtggatggtgcctcccctctcctattctcctttgccgtctactgcatctccatggtggaaaatcaccattgaaggacctcattgatgctcaaagatccagcctccatagaagctccacaagatagcttccatcatacnagttttttaataccatatatacagagacattatgtgtatgtactgaaatagtgtgtgtatggtgtntactttgaccactntcattcttaccca

SEQ ID NO: 115119 - DNA, 439 bp, Glycine max
  unsure (1)..(439): unsure at all n locations
catcatatcttccgtaatacttatcacctctatcatatctaataattttcacatttatgtctaattgccattttacttcattgtagtaaatatttaaggcatccattgcctaagaaatctcgggcaataagtagacataaccataacgtgaataatcatcaataatggtgataaagtatctttcctttccgaaagaactaacatcaaaaggtccacaaatatcagtatgcacaatttcaagaagcagagtgcttcttgtagctcctttctttgtatgttttggttattttcccttaatacaacccacacaaatatttagatccgtanagtctagataaggaagaatttcattctntattaatctttccatcctttctctagaaatgtgacctaaacgtttatgccacaagagaacatatcgttcatccactacactatg

SEQ ID NO: 115120 - DNA, 483 bp, Glycine max
  unsure (1)..(483): unsure at all n locations
atcctctgagttacctgcagcatgcaagctnggttgaataatgatgatctgttgggtgcctaagtcaatgctattagtttaatccctagtgaattccgggctagctcanattataattagagtccagacgaagatgtttgctctgaagaaactgaatcggctactattggggataaagaggtcagcaaaagaattacattcaacctacctatagtagaaatgaccaaacatcttaagcctttgtatgtcatagctcaaataaatggcaaaacattggctagaatttttgtggatgagggtgttattcttaacatcatgcctctaaccactttaaagaaacttgtgtaaaggtagggagatcttattcccacaaatatgaagatggctaatntcactagaggagtcattatagcattaggagttttggtagctgaaatcacagttggaccaaaaactatgtattcagtatttgtcattatggat

SEQ ID NO: 115121 - DNA, 472 bp, Glycine max
  unsure (1)..(472): unsure at all n locations
tccttgagaagattcctanagaagctagagctgaactacacacacctctctaatagctaagctcacctccttgagatgagaagctagagcttagctacacaccccctataatagctaagctcacccccgttccaaaaaaatacatgaaaatacaaaaaaaagtctctactacaaaactactcaaaatgccctgaaatacaagggctaanaccctatactactagaatgaccaaaatacaaggcccaaaagaaggaagaacctattctaatatttacaaagaagagtggatccaaccttgatccatgagctcaaaaatctaccctaaggttcatgagaaccctagggccttctttagtagctctagcccaagcctcttggagtcttctatccaatacccttggggggtaggattgcatcatcccctccaccttggaaagggattgacctcaaatcccgaggttcttcatactc

SEQ ID NO: 115122 - DNA, 482 bp, Glycine max
  unsure (1)..(482): unsure at all n locations
catgcaagcttcaatgcttcattacttgctaaatntcatgctctggctaatggagaatgtttgtttaacttctattaaaaatgctacctcattttttgaccaacccacatagacaagaaaaataactacaaccagcttttgctcccgaatagcttcctttaaggttgtaagatatacatggttttaaaataatctgcttaagctccaccaataaaagcaagacactgatcatgaaacactttcctagttctttccagaacctagcataatctgcttaagcaaccaagtggactttccagacacaaaacaagaataacacagtaatataaatcacaaaacaagcatcatctcctgttcccactctcggggtacggatttgaatagaaatcagacacacatcttggtttgcagtgccatataatcagtagtccaattataataattcctaggagtccaatacctagaaatcaacaaagagtgat

SEQ ID NO: 115123 - DNA, 486 bp, Glycine max
  unsure (1)..(486): unsure at all n locations
ggctgccactggttctaannatgttgtgacatagaatatggtgcgtcaattcctatacaatcaggttcgtctattttgatcaagcggtgcctttgtctattatttctatcaaattntccaatcggtgctttcttgtgtcactttatcatccacttttgtgcttatttccttttggttgtgctctccttttagatgtcatgcggcgctttatgaacattgccaatttctgaattgagttttgtggttggtctcaatttcagtgtgctggttggctggatttcaagtgctctagtgctgcgtcaattttattgacccattcctattntgtgcgttccttttaattccaattgatgggtttgtttgtgtcaatttcctggcttgtttgtttagcatcaattatttctagaatntggccaacgataggtcaagttcatgctgacattttatttgaatttgggttgtccaacaatgattaattgtcctatg

SEQ ID NO: 115124 - DNA, 429 bp, Glycine max
  unsure (1)..(429): unsure at all n locations
gcttatagcttttttttaaagattctatactcggtgggttgcaaagaactgaacatatatagcctcagtggtagaaagaaaacaatataaaattgtctgcatcttatatatctctatctcttatgttaacaaaccaagggttatgaaaaatctattgatattgnttgatcttgtctgttcacgaaaaccacattatttgatttcaaagctatatcaaacgatagctttagtttacgaaaaagacttaaaaaatttttaaaatcacaatgcgtcccccttcttgtgatatttgcctttacacaagcatagtttataatgactcanacttgactcttggcaatgccttcgtaaatatgtccactattngatntgctatcatgcaacacttaagtgggtttacttagtgaagtggatcatttgctcattaaa

SEQ ID NO: 115125 - DNA, 472 bp, Glycine max
tgacgcggggctactagtagatagacgagtatattaacatcggctttgtgatatccgatgttaacatagacatcgcaacatagatattttgaagaactgatgttaacataatctgctttgatctcaaagcggataacaaatcatgtttttaaaaggatgggactacacatatattatacaatcaaagttgataaaaacatgtctatctctagtagttatcaccctatcacctggaaggagacaaatcactgggccttacaatataactaacataccattgttaacatgaagaaaagagtctgtgctaatgcatgttattaggcagaatgctattaatattaaattctctcttgcatccatttccttccttctatctagttttagccttctcttcacataacataagtttgctttcaaccttggtagctggtacttttgcttattattattgccttctagcactcaaaagttg

SEQ ID NO: 115126 - DNA, 350 bp, Glycine max
  unsure (1)..(350): unsure at all n locations
agcttatcgatatgttatgcgcgcaaatctgtcgtgcgantgattatttatcaccacttgaatatcttatgagcttccatagctcaatttcgagtgtctcgatctgataagcgcctcaatcggacatccaagatgaaagtctgaccattgcaatttctgcgagctcttcatgcataattctgaacgccttgatatattatatcccacaatcggacatccgtgtgaaaagttatgaccattgaaattatttgagagctattgtcgtgcacttttgagcgtgtcgatatgttatgcgtgtgaatcggacattcgagttaaaagttatgaccattataatctctatagagctt

SEQ ID NO: 115127 - DNA, 373 bp, Glycine max
actaagctatagcatatgcaaagtatgacaagaagagattttagtattatagaaccaagcttaacaagataactaatcctctcatatggatattgttcatcaagctcaagcccattacacgattaaacaaatattatgaatttttgtaaattcacactgaaagtgtgcgctatgcctgacagctaatgcttaccccaatatttcctctggttgaattgggctaaaccatatagctcatgctataccatacaactcacgctaatcccgacagcttgcactataccctagtgctaaactagacaactaatgcttactccaatttctcctcaagttggaattgggctaagccatacaactcgcgctaagcccaagc

SEQ ID NO: 115128 - DNA, 374 bp, Glycine max
agctattatccctatccagaatttcatatatattgtatgagtgttaggattttcttttggcaacacttaaattgtactacgccttctagtatttctttatcatcaataacatttgagtttcgaatttggaagcacataactaaaatcatgtcgccgactacaactgctcgtctcacaaattgacgacaaactagttgtcattttaaaagacacagacgtacaatcctaaagacttaaatatcttttcatttattataatccattgttcaattgcataagttatgctaataacctatgacctaatgtaatttaccatgagaaacctcatttttctcctaattaaaataaaaacttgctagataaaaattgacatg

SEQ ID NO: 115129 - DNA, 483 bp, Glycine max
  unsure (1)..(483): unsure at all n locations
ngaagttcanactcatgtntagtttcttctaaagcatatntcatacgcatagttgcatcaaaggcatcaaaatcttttaaagtaaagaaaattaatgactattatttgtacgcagaaagatgttgattgttctaaggtttcaaggtccctttctgtacccgggcgaaatgttgttattgtaagatctgtctctttttctacccgtagcgaacaggagcaacaagagtcaaatgatggtatgttatatcataaactagtattccagtttcatagtcctacttttcttttgtttttaagttcataagcttgaagaaaatctaatctttgttccaaggttgaaatttgttactagcccacctaggatggngtttctcctcatcaccatgtcagtntgtttcatggaattgaatntaaaagtctcttaagtagagtatttgatgtanagggtttcatattaattgattttatcatatacaaatcatc

SEQ ID NO: 115130 - DNA, 442 bp, Glycine max
  unsure (1)..(442): unsure at all n locations
agcttctcaacatggtgataaaatgganaattttgaaagctccaacccccagaagcctataagtcaataattaagtnttgagaagacaactcttgcaatatgaaatacacaaagtgctacctttgtctcttatacaaaaagcttttagttgtggatgatcagactctaagtgttaaaaagttgtcctctgcttagcaagattgttctttgattttgatctatattatttatcctctctgtgagagtagattctttgtaatctttgaaacttgttgttttggaaagctaagagtgacttagtgatcaaaaagttcttgggtattaattagcctcaagaagagatcaagtgtgtgacaaaagtagcctaaagaatacttcttgtaagcaaggagtggtaggaaagaaataatttttgaatatgttttgattagtggatccttct

SEQ ID NO: 115131 - DNA, 466 bp, Glycine max
  unsure (1)..(466): unsure at all n locations
cttgatgatgtcgaanagaaatcacatgtntgtcatcatcaataatgtggagaatgtgaatgtatgtatacatgattttgtagatgccaaagaagaatcaaacaaggttgcttcaaatgataagcatttgcttcaagaataattcaagattgcttcaacaaacaaagccttgtttcaagattcactaaagaccaagccttgccttaaaacaaagtgctttcaagacatgcaaggctctggtaatcgattaccaggaagtgtaatcgattaccagaagacagggttgagaaatagctgttgaaaaaggttttgaatttgaattttcaacatgtaatcgattaccatatgtctgtaatcgattaccagcaacaaaaccttggaaattcaaattcaaaagtcataacccttcanattataactgtgtaatagattacacaaacattgtaatcgattcccagtggaaagt

SEQ ID NO: 115132 - DNA, 424 bp, Glycine max
  unsure (1)..(424): unsure at all n locations
catgcaagcttgtaatattatctggaataacgctctttacgtctgagagtatatatattatgctgccgaatattaatgtcagagcttagctctttattttatttttatttatntctaaggtactgacaaagaatcacactctcatcccttggcaaaccaacctcttgcagattagtttttccatattcgaagctgcaggctatgaagcttatggtactgaaacttctagctttcgtgttcctttggttgtggtggagtacttgtattcatgttaaagcaaaaaatgatcgtttaaagcctggtgattcactgaatctttcacaatcactaatttctaaaagcggcgaatatcaacaataatgtttcgtattctcgatgaagatgaatatcacttacgaatacagtcaaaagataaaaaatttga

SEQ ID NO: 115133 - DNA, 462 bp, Glycine max
  unsure (1)..(462): unsure at all n locations
tcccagttatggaaagctaaatcctctgttggatcttcctttatgtacttgatgtaaatacttgtatatctatttaatgatgttttgtgtgttcactctgctatcagaacttcattctaccatgcctttaccttgatcacgtagatgcatgtgcttttagggtcattcaacagtggaaactggtctgattcttagaacttgatangataaggctagtttgtcgtactatcacgagggatcggngtatgataacctagttgttctatgtttgtcttaatgcggtcctggccaagtttagtccaacaagaggaatctacggactattaggaagaccaacgtgtcgtctatttgtctttacacatcattactcacgtgattttcctttntatagttaggttacatacctgttcatagtaaacatatctcttttcactctagacacctactcactgagatagctta

SEQ ID NO: 115134 - DNA, 269 bp, Glycine max
  unsure (1)..(269): unsure at all n locations
tagctttgaaaagtgctatttttcaccttctttctaacccaatctcctggcttagcgagcattcgctaagcgcaccacttatgggctaagcacgaggaagactctggaagaagatgagtngtacaggttcgctaaccgcaccgctcatctcactaagcgcacccgttcagttcatccgctaagcgagaaaggcacgcactaagccaaattcactaatgtgcgcctagcccaaattcactaatgtgcgctaagcggaacataattgcact

SEQ ID NO: 115135 - DNA, 468 bp, Glycine max
  unsure (1)..(468): unsure at all n locations
ggcagaggatgcttcaattgaggataagatagagggatggatagagggagggaaagagagacgggagagcatgatnatgaaggaagaaaaagggagagaagttgaactttgagttgtgtctcacaagactctcattcatcaaagttacaacaagtgttacacatgcttctatttatagactaggtagcttccttgaagagctntcttaagacaacttaattgagaagcttctttgagaaagcttccttgagaagctagagcttagctacacacacccatctaaaaacaaagctcacctccttgacaaaatacgtgaaaatacaaaaaaaaaaagtccctacaacaaagactactcanaaggccctgaaatacaaggctaaaaccctatactactagaatggtcaaaatacaagacccanaagaaggaagaacctattctaatatttacaaagaagagtggatccaatc

SEQ ID NO: 115136 - DNA, 414 bp, Glycine max
  unsure (1)..(414): unsure at all n locations
tagcttgtagaatggctagacatgatacatgttatggtttggtttggttcaaggattaaagggatgcctcacattatttccatgacacaaatgcaaaaatgatgaattggaaactctatgcaaaactggttatgcatgcacctatgtggacgctcaaatgtcaaatatttatggtcatgtgatgctaaggctcangattcatttcctctattataaatcaacccaacagttccaaaatatgttcttttatccatttgtgcattcatccgagtcacatttgggcgtccgggaaaattttacagcgttcacccttcaggtgtcacacattttttaagaactatcatgatcagtaattttaaagaaagttggagtatcttttcaaagcatgttgttttcactaaaactaattttctt

SEQ ID NO: 115137 - DNA, 478 bp, Glycine max
  unsure (1)..(478): unsure at all n locations
tcgtgttcggtaaatagcctctgtgcttatattacgttcgttcttaatgaacaaggggttaattggtgtatgtgttacttaatcacatattgataaaccctaaattgattctcgcttagtaaattaaatcagggttggattaagtggttaactgctaggggtgaaatcctcacaacctaggataagagaataacttatgaatcagaagaaacaacacgtttntaatactattaatntcgtattccaatctgcttgttcttaaattcacaaaataaccccccccccccaattgttactgttactgcaagtatattatgaacatttggtttatcattgctcgttgggaaacgacctaggaacacttcctagttactgcattntaatgtttatttgattcgagtacgacctcgatcaatgggttaaccaacgtatgtaatatatgtttctgaattttaagactttaactttaaataatttt

SEQ ID NO: 115138 - DNA, 380 bp, Glycine max
  unsure (1)..(380): unsure at all n locations
atgangaagtgttgaagggtgatacttcctgcttttattgttgaccacagagtggtacctggagatatgtcgcgggggtcaagagaccttggggacgtcaagtggggtgctattgcccaaaaccaatcttgaccaatcccgacccaacccgggcatagtcggtcagtgagaacctgtgatgtacctaagcaggcgagcctctggcagtcaacagatgaaatgaaaacaataccacaaagcaaggaggcttgtggtggctggccagctgtgaaatttgtataatatgtggattgtggcctctggtaatcgattactaagggtgggtaatcgattacaatgctctaaatngaagacaggaggctaagatggtctcttgtaat

SEQ ID NO: 115139 - DNA, 415 bp, Glycine max
  unsure (1)..(415): unsure at all n locations
tatctattctntgtccaagtgtggttcactatcagatnctcatagtattggagatgaggagcaatctgttatcttttgcacaagctatcctctntccatagcttctgacacctctaatatgtctaagagcagtatgaaacattcaaatgctaacaagttaggggagcatatttcttcaatagattatggatcttcttcaggtagaaacctctctgaatattttctatacatacgagtaattctattcatacaataattcataggtaatagtctacgggcacttctgaatagccaaggttcacagctttagattagttaattagcaaataattnttcccttnttgttcctttgatctccactatgaatgaaaattgtaaaataagtgattagacctgagaggctattaacttaatt

SEQ ID NO: 115140 - DNA, 462 bp, Glycine max
  unsure (1)..(462): unsure at all n locations
agctntgagccaattcaaacgacaataactntttactcggatgtctgattgagtcccgtcatatatcgagacgctcgaaattgaatgttgaagctctgaaccaattcaaacgacaataactttttactcggatgtctgattgaggcccgtaatatatcgagacgctcgaaattgaatgttgaagctctgagccaattcaaacgacaataactttttactcggatgtctgattgaggcccgtaatatatcgagacgctcgaaattgaatgtggaagctctgagccaattcaaacgacaataactttttactcggatgtctgattgaggcccgtcatatatcgacacgctcgaaattgaatgttgaagctctgagccaattcaaacgacaataactntntactcggatgtctgattgagtcccgtcatatatcgagacgctcgaaatngaatgttgaagctctg

SEQ ID NO: 115141 - DNA, 476 bp, Glycine max
tcggttcgtcgaactcaattatataccttatatgtttaagaaagtgatatcagcagagaaacactcacaggaatagagaacgcaacaaacatgaatacagaggtacacatagcaacatcaaaagaagaagacacaacaaacacaaatgcagaggtacaaatagtgaaagccaaaagaagaaccattagacccacgtacctaagggactatgtttgatgagcggaaacacgagtaagaggaggctgagctgacacgtgcagaatttgctaggtccaggtgtcccttgataggaagcatccagaatcatataccgttatgctaatattcctgaatgtgctaagattcctgaaaaaaagatatgatatagatatgatatggataatttcgttagcaaattgacattataaatacatgtaaataactagcaaatgaagaagacaattacactccttctcttatctgaagtctctcttctt

SEQ ID NO: 115142 - DNA, 387 bp, Glycine max
accaaatgtcaaaaacgggtatatatcacggaccacaattatatttcagcctttaatcaatgctctaattcgaatagagatattttgtaactttgtaattatgatatttaaatatatttcatatttaatttagggtcatgttcaaagcagaggctatgagtgtgactattatctcatgcattggatgtggaacatagtcatggggggtttgaagaatgaatggagcatcatatatctactttaataggcttcaattattagtttactaacatcttttaatcattttacatgtgcgtgattaatttgtatatttcatattttgcagtggtttagtgatggaacatctgtagacacagagactatataaataattcttgagaaatgaga

SEQ ID NO: 115143 - DNA, 482 bp, Glycine max
  unsure (1)..(482): unsure at all n locations
ggtcgtgccatcaccatttcggcctaaacccattccgggctcatactcatcccttaacataactcaggccaccattaaggaggcaccagataaacgtggttgcaccagaagagcctccatataagaatttttcacaatttctagtgcttgataagatngttccaatgactcttccgcagcttccacatatggtataaaagatggacatctcactagtatatcttcttcgctcaatacgataatcagctgaccctccaccacaaacttcaatttctggtgcaacattgatgggaccacaccaacagaatggatccaaggccgacctaacaagatactgtatgcggggtttatgtccatcacttggaaagttatttggcacatgtatggcccaatttgaatcgggagatcaatctctcctctcacgttacgccggctaccatcaaaagcccttccaccatggagctnggcctcatatgcgatgc

SEQ ID NO: 115144 - DNA, 434 bp, Glycine max
  unsure (1)..(434): unsure at all n locations
tcgaccgtgatctcttagtcacctgcggcatgcaagctnttcattcaccttcacaataagggaaaaatgttattagaactaattatataatacaaaaaagaactaaaatgacagccataagtatgtacctttgattttttcttcaaattataattatggcgaagtcaatccccctgcaaatgagcgcttcaatagattcttcatttagtttagaacaatactcatcaattaccctacccttagcactaaatgtagactctgaaactactgttgatattggaatagctagtatgtcacccgccatctttgataaaaccttgtattttaggctattgttcctccaccactctaacacactaaaataagagttactagtttcaggaatataaacattctccttaagataatcctctaattctgagttcactggaggg

SEQ ID NO: 115145 - DNA, 428 bp, Glycine max
  unsure (1)..(428): unsure at all n locations
ctcagcttganatcaagaggagaaaatggataacttctgtgtcatggactagagaatataatatgggtgatgtgctatggagttattattggaatntcaaggaataatgtttctatagtacaatttgaaggaaaaattcatcttaaaggttggccatagatatatctaaattattgtattattatggggttgggttcaaatgggtgtaagtagaaatacatgaagntttgtctccttntaaatgaatttagtaattaaaaaaaaaatctttaactttcgttcgaagaatatctcgatttaaaaaatgacatacattaagtgtgttggactatgttgtatacattaagtggatactataagaaatatagtaattntaaaaaattaaaattatgaacatattaatacaattagggctaacaaaatgagtt

SEQ ID NO: 115146 - DNA, 435 bp, Glycine max
  unsure (1)..(435): unsure at all n locations
agcttgttgacacgcggagattacgtcaacttttgtgctcacaagaattgtcatactgacatttgagtcacgttgacgggcggagataccctagtggttatccgtataaacattcttntttgctgtctgtaaaacgaaaagcctgatagcatgcagagactaacgtcgtcttctgcgcccttcgtcaatcgcggccgacaagcccgttgacacgcagagatttacgtcattttccgcgctcacaagatctgtcatactgacatttgagtcatgctgacggacggaaatacccaagtggatatccgtataaacattcttttttcctgtctgtaagacgaaatgcctgatagcacgcagagactaacatcgtcttctgggcccttcgtgaatcgtggccgacaagctcgttgacacgcagagaattacgtcatcttc

SEQ ID NO: 115147 - DNA, 358 bp, Glycine max
tgacgcgtataatatctccagagctatcgttgtacattttccagtgtctctatatgcgatgcgccttattctatcatctgtgtgaagagatctgaccatttgaatattaccaaagctatatgttgaacagctttgagcgtctcgatatgagattcgcctgaatcggatatccgtgtgaaaagttatgagcataagaatttgaccagagctatcattggagagtttccagcgtctagacatatgctgcgcccgaatcggacatccgagtgagaagttatgggcgatagaattgatcgagagctttccacgagaatttctagcgtctcaatatatcgtatcctgtaaggacctcctgtta

SEQ ID NO: 115148 - DNA, 469 bp, Glycine max
  unsure (1)..(469): unsure at all n locations
agcaagcttgctgcaatttgcttagcttcgaatgtatcaattgtgtaagaatattgaacgatgaaggattcctcttaagtggcactttcctttaagatgtagcgaattaagcttgctttgatgcccacaatgatgaaggcgaagtgtctttcaccgttagtgcatcctaatctcaattctttcatatgctatgatactactgagaatttcttaagattcttgcaaagatcaagggtcgagataactgaggctgcgtaaatgggaattgcttgttagtatgttaagggactcgcaatcagagaggttcaatctntcaagtttgggcagggagaaaatagatggatgcacattattcaacatagaagcacctcggagaagtatacttcaagatttgtggctttgatatatctggtagttcctttactgcttggagccctgagtcaagtctttcaaatcactagattctgga

SEQ ID NO: 115149 - DNA, 452 bp, Glycine max
gaaatcatatactgtgttgttaacttattcatagcacagaagaagaaccaataagtgggttggtggaataataattaacttaaatatatatgggtgtgagtgtagaagttttccatgtgaccgtgatcgtatggaaatattgctcaaaatggccaacacaacaacaaattaaatgaatatttccttcattaattaaacacaacattaaataaattaagtaaatcgcattaaactcggaacataaaccttttcttcatataaatcgcaacaatcaagcatactcctagagactatacagagcagagaggccccatatatttatcagttgtcaaaaccaactactaaaaattgaatggttaaacgtaattgtgggtttgatttgagagcttatgaaggaaaaatatattcaattatttggcataagaattaaaacaattatagcgtgcctgtga

SEQ ID NO: 115150 - DNA, 419 bp, Glycine max
  unsure (1)..(419): unsure at all n locations
agcttgcagaatatgtctatgntgagtgtatactanttttctttcatgtntcaatcgtacatagcttgtgtcttcttcataaataaggcatgcacgatggcccttaacactgtatccactcaaattcccgtatgttggaaagtcattaatggtacaaaatagcattgcatgcaacttgaatgtctcatttcgatacccatcaaagacagtaaccctctagtcccaaacctttgtcatgtctttaatcaagggatgagataaacagcgatgttatttcctagttttcttgggctcgatatcatcatagacaacatcatgtatttttacttcatgcacaaccaaagaggtaagttgtaacttactagcaaaacaagccacanactgtgctgagtgtgacaccctctagcccatacatatat

SEQ ID NO: 115151 - DNA, 484 bp, Glycine max
  unsure (1)..(484): unsure at all n locations
tctcaaggaagctacctagtctataaatagaagcatgtgtaatacttgttgtaactntgatgaatgagagtcttgtgagacatacttcaaagttccacttctctccctcttttattccttcaatttcgtgctcccccctctctctttctctccctctttcttttcctccattgaagcatccttccaagcttcttatccaagactcattttggtggtgaagctccttcttccatggcttattccctagtggatggcgcctcctctcacctcttctcctttgtcttctgctgcatctccatggtgaaaaatcaccattaaaggacctcattgaagctcanagatccagcctccatagaagccacacaagcaagtttctatcacaagtcatacagtcatattattccgaactntagtttacaaattcatgaactgacataactaactatatgttcaaaacctagcctatgccagtcaaattaacgtt

SEQ ID NO: 115152 - DNA, 436 bp, Glycine max
accgcgctgcatgctgagaattatataaaccaattttaatattatgatttgaatatggataattggttcaaaaatattattttatgtgtatttgagttctatgataaacaactcgatgtttttctgtattaataatatggtcagaaaaaaaataaaatattttattatattatgataggaaataggaatgttttcttccataaaagtattaatatgccttttcatatttgttctaccatattttttcattaattcattggtatattgcacgtactatttattacagtttccaaaatttatgtataaagactgatacaatagtttatgaccatcaatttgacaaacatgcatgaacaattgtgaatataacgcattttaatgacttatcataattctttatttgaattattttcaatagccttttacactaatcata

SEQ ID NO: 115153 - DNA, 395 bp, Glycine max
  unsure (1)..(395): unsure at all n locations
tctatacaaaagttagtcgtatgtagcgactaataagatgctagcattattctttctataagaagttggggttaccagcccactaacattnttcttttactggcaggcaagactatgacttatccgcgaggaataatgaataatttgctagctgaagttggaaaaatcagtttccaactgagtttgtgattctagatatggaagatgaagaaatcccaattattattggacaacccttcctctaccaggaagggttttgatcgatctctgacaaagaataatagttttgaggctaggtgttgagaagaagtgtctaaagtatttgatttacaaattaattctcttcctcccctacatgtagcaagcgtccaaaggcttcttctacaaaaaggagt

SEQ ID NO: 115154 - DNA, 391 bp, Glycine max
agcttgagttcattgttgctaccccatagagctccgcgaaatttgttacggccatactcttccttgcgagccttcttggtctcttgttcaagggctcttgcggtagtttcattctcttcccgtaatccggcacactccttctagatgtgtgtagcggccaacttgaacttctccttggcacagttcgcctttcctaactcgcttttgagagcttggacttcctcgtcctcttccggtgcttccaaactctctttgctgacgactcttaacttggcgagccaatccaaacctcgtatatgaactttcagccattcatggtaaccaccaatggcgccattatgaatgcccctaagttcttgatctttccttaacggggtttcccatgccttat

SEQ ID NO: 115155 - DNA, 449 bp, Glycine max
ggtatatgagggcaattatcccagcaacatggaccgtttcagtagctatgatgaaatagtagtgatttgttatggtgagctttaaggccaccaaagcaaaaacagcaaacaataccccacaaaaaatcttcactttcattggaaccttcctcaacctttcaatcaaaacattaaccggagaattgaagctcctctttgttcccatttgtgtattgcaaaaattcaccaaccaaaatatgggtatgctctctagtaattaaattgctttatggacacacaattggatcatagagggattaatagtctagatagagaattgaacagggagagagagtgaagatagatagagaggtttgaggagacaccaaaagagcatgcagtggatggtgtgctattatgtggcaatgaatttcttgattgaatcgggccatttggcactgggagtcagt

SEQ ID NO: 115156 - DNA, 444 bp, Glycine max
  unsure (1)..(444): unsure at all n locations
agcttcaaaccaaagcaactcanaatctatgtatctaanacccctcaatttagtggatgctcaaggtttgagaagtgaaaatgagaatggggtaattttggagaaaactctcatctcacacaagtctataacattaatctaaacttgctcaaactggttttacaactaaaactcccccgaatcaacatttgacccctcaacaccaaatttaccctagaaatggctcttgttttcactttggtcactcattttcctcatttgctcagccccagctttcccataactcctaaatgatattttaaattaggattaactcactttaacctccaattaccactaaatccagatttagcttttcaaaccctcagagcctcacattnttccactcatatcactacattctcactttntaaccctangttaactctacccttcatctctatc

SEQ ID NO: 115157 - DNA, 449 bp, Glycine max
  unsure (1)..(449): unsure at all n locations
ctgtgggagtggtgacttcccgttctcaagggcggcgcttacttgcctgccctacttttacatgtacaaatgattgtttgaggtattggatgtcattctacccttgnacccttttagtgtgctctactggagcactagaatgcggccccttcccagctcctcccaaatagttgggcgatggtaagggcgtttaaaattttgtgtcctttcttaacatcaggcctagtgtgtcaatcttattcttttttcaaatgaagtttcctggaaagactagatgagtctccttgaacagcatgtccaagaagctgtttgagtttgattcaaacatttttcgtcgttttaaggaccactttnttaaggtcctagctactgatttcatggctaatggcatgccactgatgcttaacagggatggggagccncacttcctgttctatttgcagttcgat

SEQ ID NO: 115158 - DNA, 306 bp, Glycine max
  unsure (1)..(306): unsure at all n locations
agctttctccactaagttgcctgatgcctgtaatgtcttttctgatggcagtggtcctagatgcaaggaagaatttctncaagaacacccttttaaggtcatccacttgaaaggacctgggagaaagtattataccaatctttgtcactcctcagaaatgagaaaacctttagaagatatatcttttgacaccangggatcatggtgaacaacatatggactcttaaatgctatgngatcttactgcagacctgaaactgacacaatgtttatctgtctgagactatggacacctatcagatttga

SEQ ID NO: 115159 - DNA, 471 bp, Glycine max
tctaccatggatggttaaacattagttagtaggttgcttctgccctttaagtggtcaagtgtgtttgcttttgttgagtggttaagccttgtgttatggcttctgcttaatggttaagcatattccaattgtctttgaatgttttcagtcattgtctatcttttgctgatgtatttccggcatgtttcattgtattgcgctttcattttgtacttgtattgttcatcccaggctggaagtgttgagtccaccttctagcttgtggaggggcttgtagagataagtcccagatgcattggttgtcctagtcattgactcagttgctgttcttggggttcgatctggtcaagaaccatcttttgggtcaagatattgtattgtaaatgctaaaagcttagtaagctttacggggagagtctgttggttgtttctcccaatcaaccactagtcacaagtggttgtcttccaatc

SEQ ID NO: 115160 - DNA, 398 bp, Glycine max
  unsure (1)..(398): unsure at all n locations
agcttattacacacctatatgttcaccttttgggagatgtgttaatagcatattatacacaagttatatttttaaaataaagggcatgcagaagcttattgcataacccaaatattntacacatggttatattgtaatagacacatngtaatatcangaagatagccattattngtaataaggaattgatctgtatttaagaatgacccccctcttactctaatatattactatatatagtactcttgtatagtacacatgtgcatacctctgagacgcacaacattaagttatagttcttcttatagaaacaataaagaaagcactaagcaaccagtnactgaaaatactagtcaacaagtaaaagtaacaaggaaagtacaagtggtagcattata

SEQ ID NO: 115161 - DNA, 481 bp, Glycine max
  unsure (1)..(481): unsure at all n locations
ntagacaccctaattcgaggaagaagaagcaagtgaagaagtataatattgactacttttctaaatttgcatcacagtccagtctatgtgtcacaatctgagacaatttatcacattgcatagtctatgtgacattaaattgtcaataatgcacctcactaatagcgttacttttaaatntaacaacaataattatcttgtaaaacatatgcaaaagtagaaactatttttacatttcaaaaagataaggactaatttacaaaaggaatcaaaagtcaaggaccaaaatgtctatttactccattaatctatccaaaagttgatttttaacttgtgtacaagttaattntaacaaaaggaaaaaaaanatctcatttntctgttctaatttcttctcctataagtacttcattactcatacttaatgttcaagcaggtcgatattgtatntctgcgccagttgactctatgcaccttatca

SEQ ID NO: 115162 - DNA, 471 bp, Glycine max
  unsure (1)..(471): unsure at all n locations
agcttgccagagcgccatcgtccattccattgctagcaacatgacaaaagttatacgagccagaataacaattttaatttgttaacatttaaatggcaattatttgaacgtgtacctatattgaaaggatgactaatacaatgtttaatgtaatgaaccttaatctaaacctgtctcttgcatcatctgctatttcagtgaaatcgtaatttcaaaaaattaatccatttccaagcatgtgctaataatttctcgttatttctttcctgtaaaccatatccagtttatgatgtggatatctttgtttntatcacaataaaattaccgatctctcagatgaatctaccaatgtttgaaatataataattgctttattcattcttctgagaatacacgactganagatgaaagtgatatattacaccaactcaatgtaaaccaagcaaccccctccccaaaataaataaattc

SEQ ID NO: 115163 - DNA, 401 bp, Glycine max
  unsure (1)..(401): unsure at all n locations
actggaaatgcataanaacctatgagtnagttctgaatcaagaagtcaagtgcttgaaaagttatcatttccctgatataactacttatttgctgtctgacaatatgtccagcctgattaagagaggaaggaaaatgggctttngatggaatgaacacatgctttgcttaattagattatttntttggaaaagggggaataccaaattctatcttcttgatcaattaagttcattatatttctcctggtgatgtaatattcataggtctaaacatgcctgccttaagttgattaacattggttcattaatttatggttacactataccttgtntcaatagtaattctaactgcgtaatatccatgcctcgttttattttctataagctttcatcttttttg

SEQ ID NO: 115164 - DNA, 486 bp, Glycine max
  unsure (1)..(486): unsure at all n locations
tcctcttagtcacctgcggcatgcaagctanagtatgcccgagtcatacatccctatgagatgtngttgaagtattggcaatcagaattgccattccttggataatggtgtagaaccacgctcatgctgntactataatgttcatcaagtcaagttgatatatggaagtaaccgtcttgcaaaattggggcaaaagatgaatcgagtcacatcaatgcttcgtctacttccaaacatatataagatnatcgatgtccttgttacttccagtttcaccttgacatagatgtcatggaccatgttgaaaatctaaattgattcaacctcatatcttgcgtaaaaatgcacaatacttcaactgtacatcattcgcatacatccatgcttttcattggttgcattgctcattgcattctttcctangaaaagaaaatataaattaatatataaataacatacaataaacatgatcttaatcattgttat

SEQ ID NO: 115165 - DNA, 476 bp, Glycine max
  unsure (1)..(476): unsure at all n locations
actaagcttgttacaacacactgattgccttctagagtaatatgagacaatgggatatgcatgagtagatagagtaagacatctattccatctactctaaatctcccaaggctacaatntttaaaagcttctaagaccaattttgagtcacactccaaccacaatttggaccacatagtgagcatgctcaatatctaggacaaatgataacaactccgcataaagggaaaantttacaccaagagacattgcaatacaacctctaaatgcaccaaacccatcgcaaaaatttgcaccataagcagcctgactaggggaacctctagaagcaccatctgtgttgattttatgtacccacacattgggagatgccaatctacctactttatctgaacactcttatgagcatgagcatcaacaagaaaatttatggtgaaacaactaccacaaaatgaagctatttgaagaacgaatat

SEQ ID NO: 115166 - DNA, 451 bp, Glycine max
  unsure (1)..(451): unsure at all n locations
atgcaagctntgatcttgccattgtgccatattatttgcacaagtgttatctacttatcattgatgacattggttgaatattaactatctatcaagattatatgatttgtaaacctaaatttacattgtctgtaacccaaaccgattagcctgaaaaaanaaatgatggttgattgtggttactatccaaattaagttgacctaagcccaaaagtgaattttcggtgacttgattgaatttatcttatttaataatgataaaaaagttacgcactaacataaaaaaatcatttagttacaatttatcataagataaatctaattaattgtttaaagattatcttaaaataatttatgattagatattaatataaaattaataataaacatttaactctttaattttaaagggtactgggttatgttgaataactatgaaaatgattgtcta

SEQ ID NO: 115167 - DNA, 469 bp, Glycine max
  unsure (1)..(469): unsure at all n locations
gatcaaaatcagattaaatctaatttgattctccctatgttattttgtaatcaaggtggtcagggatctctcctagctaactctgcctacataactcttaacgtaattctaatcaatatttattntgtaatcagggtgcttgtggagggaatcaaaccaaacctttctagtgaagtgcttcaatccatacaacccatgttggtagttcattctacaagctgcactttgcacccgtgtctttgattgtatagttccatccgagaagaaaggtagaagtggaagtcattaaaatatctatttctttcagagtgcttaactggcatcataatttgttaattatgttatgctctggccaatgtgaatgnttgtaaagaagagtggtaaacattttacttctttggtgtatatgaccatgccaacgaagaactgagatgtccttgctaagtcctgcttttatcttattaaacac

SEQ ID NO: 115168 - DNA, 476 bp, Glycine max
  unsure (1)..(476): unsure at all n locations
catgcaagcattggtttggggctatcactatttgttttgcaaaggataaattccattctctggagatctctctctaatatagccaacagtgcaaagtgtatcaattttcaaatatttttctgtttcttgtagctagctgctactattggtaattaataaatgaaaatgaaaacgacagtgattacaccacgatttgggtgataatggtgccaaccgtcgcgatcctaatcaattttctcgtttgccattactggtcttattatatatttgattggatatccttcttttctttatttcttgatcattnataatccagctttgtggagtgtatgctactctgtttggcataacatgggctcgatcagtttgtaatcatagtcatgttatttaaggttttgaataatncatacattattcatgccactatattattacagttgtactattaataaatacaaactacctactttgaatac

SEQ ID NO: 115169 - DNA, 476 bp, Glycine max
  unsure (1)..(476): unsure at all n locations
agtccacggagganatgcttaccacctcatatgactgganagcggtttctaatgactcctctgcggcttccacataaggcatagaggatgggcagctcaccaagatgtcttcctcgcctgatacgatgaccagatgcccttccactacgaatttcaacttttggtggagtgttgagggaacaactcctactgagtggatccacaggcgccccaacagacagctgtagggggggttaatatccattatttggaaagtaacttgacaggtgtgagggcctatcggtactgggagatcgatctctcccctaacctctcggcgggtgccatcgaaggcatgaaccaccattgaactcggctttaagtgggaggcattgaatggtaatttctccaaagtgctcttangcatcancgttaaactggaaccattatcgatgagccacttggctatgatatggtccatacactngactgatacg

SEQ ID NO: 115170 - DNA, 434 bp, Glycine max
  unsure (1)..(434): unsure at all n locations
atggtgtcgagaagaaatcacatgcttgtcatcatcaaatatgggtgtaatgtgaatgtatgtatacatgatnttgatgatgtcaaagaagaatctaacatggctgcttcaaatgataagcatttgcttcaagaataattcaagattgcttcaacaaacaaagccttgtttcaagattcactaaagaccaagccttgccttataacaaagtgctttcaagacatgcaaggctctggtaatcgattaccaggaagtgtaatcgattactagaagacagggttgagaaatagctgttgaaaaatgttttgaatactgaatttcaacatgtaatcgactaccatatgtctgtaatcgattaccagcaacggaactctggaaatacaaattcaagtcataacccttcaaattataactgtgtaatcgattacacaaac

SEQ ID NO: 115171 - DNA, 475 bp, Glycine max
  unsure (1)..(475): unsure at all n locations
tgaagagtatgtgaatgtaaggtccacttcatctgctgtatcattttgtcaatnggttccnctaattgaacaagatntcaatttagaggaaatacaagggctggataacatggatctagttgttgtaagttaattgttttgttaattattttatatcttgtgtttgttaatcacctaatatcttgtgctcattaaattaattctcttgtataataatgccatatgaatatattagttatgtgggtgaaaatgttaatgtaaatggtaggagtgagttggatctttattaggctaagacaccccttgagccacagttttntccaaagttggatgtcttgagctattgaaaggaccactaacaatattatccaaatctttgtcggttgacatgtgatgtgtcaagaatctcaataacaactattgcttattgatctgcatttaacattcgttggtcgtgtgcttgacaagtatctat

SEQ ID NO: 115172 - DNA, 466 bp, Glycine max
  unsure (1)..(466): unsure at all n locations
ggatccttaagtcacctgcggcatgcaagctnggttcgatgtacttacccgntgaatatctaataacgatgaacaacgaatgaagaacgtacactccaaacaggctctattggttaaacatcacatggctctattgccggcactccaaaatggtcaagtgacttaatcaaaatgaacatacactctgagggagttcccggagagaatctcaaaaagataggatgaggttgcatgaattatcacctctttcaaaaggacagtcaatctgtgtttnccacaaaattatatcaaaatcataatcacaaaataaggaaagaatgtcatgaacgttgtacaactttccatctacattgcgttgtttcatatgaagtctgcatttaccgcattataagacaaagatgcatgcatctgcatctctaaaatcatgtaactgcataatttcctacatcaatgtcaaatctgtgga

SEQ ID NO: 115173 - DNA, 464 bp, Glycine max
  unsure (1)..(464): unsure at all n locations
tcagctggtaacctatgctgtgtgttgcgtcgcttttccttctnttagcagnggttctcgcttagtagtttttttattgtctttntttaaataaaaaaagaaacaaatatgatttggctcggaagggatagcaagggataaattagtgtttgggatgaagaaacacgaccatgtgtcatttaaatcttgactagagacttttacaatttggattttggacaaaacctttgataacacgcccctaattgtttttcctttnttatttccctaacttttgcctaggccacccttttgggttttcaacctatcgggtgaggacttcttatctgcccctaggttcactcgaagctcatgcatggtgtgctacagacgtctctgacctcatgtaccaccaacccggntgaatcagtccgttctagtaacagtactcacagcaaaaactgtagcagtgttattcttcttta

SEQ ID NO: 115174 - DNA, 74 bp, Glycine max
agcttagggtttattagcaggagaaaatccttagttatgtgaaattctattggaagacaggccaatcggaagac

SEQ ID NO: 115175 - DNA, 450 bp, Glycine max
agcctactaatcattggttatcatatgtttcagcaggcactaacgaggaaaagttactatctgaattgatcagtcgctatgctcatgggggaaccattgatcctaagtatgatgtaaaggatggattaatatttaaaaaacggaaattgatgattcctgaagatgcatctgtgtaaaactagattgtacaagaagttcatgacattaaaattgtgggccatgctggaaggactaagaccattgctagaatttgtagtcaattctattggcctacaatgcaagatgatattaagtcctatatcacatgttgcagtatctgtcaactagataaggcggatcaagcattacctatatgattgctacactcatgacccattccacaacatatctgggaggacattgctatggacttcatcactaatctaccatcatctcatggctattctacta

SEQ ID NO: 115176 - DNA, 389 bp, Glycine max
ttacccacgcccctactctggaggggcaactcccaccttatgataactttcccgggcaagacaatgaggaatgatatacccatcttggccccctgcaccacctcacacatgcgttcctcctcgaactacccctacgcaacatagttcgccataatctggctgcacccacacctataaaagaatctgttcccttctcggaagataaaggtaatatggacgcgcctgaatagaggttaatagcattcgagggccttggctatacccattcttggatatggtaattatgtctcgtgcccacatcgtcaccatcccagttcaagtccagacttataactcataggacacctggcaaatggcatctctgatgtattgccagagatggggctttt

SEQ ID NO: 115177 - DNA, 281 bp, Glycine max
cttgatgtagattgctcccaagcaagctgaaatccaagtgcgctagaccattcatcatcaaagaaattatgccatatggagcagggatattggatgactccaccaccaacaggacatggaccgagaatggtacaagaatcatacactacctacgtggagatttcgagaggattatcactgtggtccacatgcaacacgcttgaaccataacaaagacgtccaattataaagacagtaatgaagtgctcttgggaggaaccaactgcattttaactatggct

SEQ ID NO: 115178 - DNA, 281 bp, Glycine max
  unsure (1)..(281): unsure at all n locations
cgcgcgcactgaaaaaaagaaagggatcccgcctatcgtgaccacgagggacctggaatataaaatagggtcangagaccctggggacgtcaggtggggtgctaatgcccaaaaccaagctagaccaatctcgacccaaccccggcatagtcagtcagggagaacctgtgatgaacctaaacaggcgagctcctagcagtcaacagataataggaacaaagaccacaaagcaaggaggcttgtgtggtggctggccagctgagaatcttgtgttatatatg

SEQ ID NO: 115179 - DNA, 405 bp, Glycine max
  unsure (1)..(405): unsure at all n locations
caagggtagcatttcttggtaaaactaactttccaaatgtgtgccttcgcaggaaatggccccgaggaagcttgcctcanagaggtccaggatagacaaggcggccgaaggaactagttccgctcctgagtatgacaatcaccgctttatgagcgttgacaacagcaatgcttctaggccatcaagggatggtcgtttctccgggagcgacgcgtccagctcatggacgacgagtatactgatttccaggaggaaataaggcgccggcggtggacatcactggttactcccatggccaagttcgatccataaatagtcctttgagtttatgccaatgcctggccaacagaggatggtgtgcgtgacatgagatcctgcgtaatgggtcagtggatcccgtttgat

SEQ ID NO: 115180 - DNA, 246 bp, Glycine max
  unsure (1)..(246): unsure at all n locations
agtcgcaatgagccatggacgactatatcaaagccgagtaaagaacaattttgacaagaaggtgtgcccacgcaagttcagcgagggagattgttagtcgttatttacgactaactttttgtattgaatagtgcatganattagcatatttcctccaatntatggttctttttgtaggaaatgtacatattttcatgttagtttgattntatacagtagatacttccaatttgtgaattaatgttg

SEQ ID NO: 115181 - DNA, 458 bp, Glycine max
  unsure (1)..(458): unsure at all n locations
atgagttagacatacccattctgttntanggtttttgtgatgatgtttgtgatgtttatatgctgaaatttcttatggaaaactgttagaggtgaagggtagagttaacctanggttagaaagtaagaatgtgatgttatgagtggaaaaagagtgaagctttgagggttggaaggtttagtctgaattttgtgtaaatggaggttaaagtgagttaatactatctngaaatgtcatttangacttgngagaaagcttggactgtgctagagagaaaaacaaatgatcaaagtgaataaagagccatttctatggcaaaattgagtgttgaggagtcaaatnttgattcggtggagttttaggtgtaaatccagtttgagcaagtttatattgatgttatggactggtgtgaggtgagagtttgcttcanattttacctattctcaatntcacttttc

SEQ ID NO: 115182 - DNA, 485 bp, Glycine max
  unsure (1)..(485): unsure at all n locations
tcacctgcggcatgcaagcttgnngaagtgatagaggataaagctatgtggtcaaggtatttcatgctcatcgntaagagtataaacctttntgacttgtatgtataatctaaatttttcattatgtatgctgtagtttttatcttgctgcagagtgtcatctaaaaaagtcatgaccttcaaattaatttcttttcgtgctccatgatctttaataattgattgctgaaagtgttaaaacttattttagtcttccttcaagcctgaaaatgaaaaatgttaggcatgttgggaagaaaagaaatgatacgagggatattgtcagttaatttggtggttgacatgacaatggtatatgttcaatgtattgtggtggcacctgagtagttcatgtctctttntatgcatatgaattctgaagtgtcttgtattttatatcttatatgctgtaacaagtttaatctgtcttgatactggttgttgat

SEQ ID NO: 115183 - DNA, 482 bp, Glycine max
  unsure (1)..(482): unsure at all n locations
tcgcttagtgagacaccagctgctagccttcacaagtttcatctnnttttacctaanattgaagttgaaacacattaaattcacaatgttgggcatttctactgaacaaaattaaactaaacctatgtacaaacctacaaaaagaaccataaattggggaaaagacaaacattttataaaacttttctataaaaaagttagttgtaaatgacgactaacattggttccgccctgcctgccgaggattatgatgagaggagaccgcatgcatgctgatggacctctaacaaggcactgcctgtttccacatatcgcaagtgtctagacagactaacccttgatgtggtgtgccgaattctgtatggtgaccaccattcatttagagaatntgaggtcatctcattatttttcgggcatctcaaatatggccccttgattgtcattcaccgaccggagagaggtgtacgacagttnggatacat

SEQ ID NO: 115184 - DNA, 463 bp, Glycine max
  unsure (1)..(463): unsure at all n locations
nntctactcgccaatcatctcccgagtttcaatagtgaaaaatgatacccctaatagcaactcatctaaacacagaacaacaaacaaaatcaccccagaagattgttgtcaccaaacttgttcatctgtcaaaaagaactgtntgtgcatatcacctttagtatccattgaagggttctctccagcatcatcaatgagtgaaagccatagtttccatgatgacaanggaatcatgtgctcaaatccttgtagtgaggtaaagggaacgcattctgtttcatttgatgcttcaagaaatataaagccttctggcctccgaatgccatcacccaagattggatatattgatgtaggaagaaggtaatccctctcattgatcatttgttttgttcagagtctctatgtcattcccaaaagaaaatgtaaaaacgcccttctgactctttttagaccactcttatat

SEQ ID NO: 115185 - DNA, 468 bp, Glycine max
  unsure (1)..(468): unsure at all n locations
gcaagcttataagtgcgggtctgggagacgattgtcaagtgttcgcgatatgtgaagatgatgttccaagtccctcggatttggttcgaccatgccctcctgatttccatctgggaaattggcgagtggaggaacgccccggcatttacgcaacaagcataatgtaaacctttacggttttaaaagctctatagttgggcctaggctntagagttttcattttgttaaggctttgtgtcttttgtttttgaatttataacacaaggatctttcttcatctgttcctggtctctacccattctcattcatttgcatgtntacttctttttctaaaacggcagattcgatgacgagtcccccgaaggtactaatacctgggacccgtctatcaacttcgagcaagaaatgaatcanatggaagatgaaggagatgaggatgtgggacttccttcggaactagaaagaatg

SEQ ID NO: 115186 - DNA, 465 bp, Glycine max
  unsure (1)..(465): unsure at all n locations
acctctgatactcagctatagaatatatataaaagaacaatgacaatggaagagtctatacatgtttcctatgatgagtctaatgccattcttccaaggaaggattttttagatgatatttcagattccttagaagatacacatattcatggaaatgactctaaagaaaaagatgaaggaagcaatgaagattctcaagataatgaagttagagcatataatgaactttccagagaatggaaagcctcaagagatcatcccctcgacaacattattggtgatatatcaaaaggggtaacaactagacattctcttaaagatttatgcaatatatggctttggtatctatgattgaacctacaaatataaaagaagccatagtagatgataactggatcattgccatgcaagaagaactgaatcaatntgaaagaaacaatgtgtggaaattggtagaaaaacctg

SEQ ID NO: 115187 - DNA, 458 bp, Glycine max
  unsure (1)..(458): unsure at all n locations
atgtttggatgtgttaaacgtacccattctgttgtanggttnttgtgatgatgtttatatgctgaaattgcttatggaaaactgttagagatgaatggtagaattaacctacggttagaaagtgaaaatgtggtgttatgagtggaaaaagagtgaatttttgagggctggaaggccaaatctggatttggtagtatttagaggttagagcgagttaatcttagcttgaaatgccatttacgacttatgagaaaggttaggctgtgatagagggaaaaacaaatgaccaaagtgaacaaagagccatttctagggcaatattgggtgttgaagagtcaaattctgattcggtggagatttaggtgtaaatccagtttgagcaagtttagattgatgttatagacttgtgtgaagtgagaggttgctccacatttacctcattctnaaattcacttctc

SEQ ID NO: 115188 - DNA, 473 bp, Glycine max
  unsure (1)..(473): unsure at all n locations
ggtgagaattgatcacaggttctacttgctgcttccaatacagataattggaatcatcaagcttctcactgatcgaattcagaaatgaagacaaagaagaattcgccattgaagaagaggaagaaagcctcgtttgagacgaagagaggatttagggttacaagaaaaaaaaatcagagaaaaacctctgaatcgatggcttctggataccatttagatcaaatgaatggaaagaaaagtgaggggattgaaaacagaattcattaacccactaacacactattacaagttctctttatatatagaagagatacagctgtcaagtacagctgtcataactaactctctaatgtgatgactcacattngcaaatacacccttattacatatctaatatacattatcaattaacgttattacttgacaatagggactaanagtggtaatgtataaaaaagttcaaggactttgac

SEQ ID NO: 115189 - DNA, 456 bp, Glycine max
  unsure (1)..(456): unsure at all n locations
gagcttgagctggctgctaagcggtgagacactctgcacctgtcttgagcgctaagctagttggtccactcttcaactttatcttcaagttgttgagtcaatttttcctccaaagcacttgtaacttccttcctttgaatcccaatggtgaaaaatttaaatgatattgaaatcctcattattacatttaaaacaatagtcaagtgaaggacatttaatcattcttaatcagaattaactatcaattaaacccaattttcgcaattatcagcacccgatgaggtgtttcactaacatggtaccacattgcatatatgattgagtcttagtgtatctgntgcataacacatgtgtaatgaccattgagacttgctacgtgatggggaatatgaattgtgtgagtgagacaagtagtgttgtacttaagatgtgtncgtttgaacacatgattcatat

SEQ ID NO: 115190 - DNA, 487 bp, Glycine max
cagcttactatgactaatgttgtgaccacaatcttgctatctctgcttgcaactatgaactgaaggaggcctgctagtgtcagaaagctaccactctgattctgcagtgcaacaaaaataatcactgtgaaggtaaaaccagctatatcaacaaacattgctgctgacatggttaaacgtcctatatcagtgttaaggaaattgacatgtttcaagagcattgctatgctaataaatacaattaaggcttgtgagagagccataaagggcagtgcctgtgcaaggctcctgtccatcgtagcatatttcctcaacagaatggctagtccagtatggattaccaatgtaagagcgaacacagaaatagcaacagtgatggccagcttctcaatcttcatcaatgtggaaatattcattttaacacaacatatgaagaggaagaacataatgcctaacgatgcaatcttgtcaccactacaacaccctt

SEQ ID NO: 115191 - DNA, 463 bp, Glycine max
  unsure (1)..(463): unsure at all n locations
agcttatganagtccttctgattctgtttatgtcattttgactttatggcttgagatgaagttcaaagattggaccttttgctagttgttattgatgaatagcttaaacacttgtgcttgagtgaaacagtggccgtgagactatggnttaagctactttccttgatanttgtcttatgcctaacttcatctaattgtataggttacattatattcttctttttgaataactgcatgctttgtgaanaacaagtgatgggagcatnttgcttcattcttttatcattcgatcagtaacttttgttgcatacacctttgtacatagtcactacatgttattgtcacatggggaccagtgagttgttctttatttgcttgaggggacagcaaaattgtanatctgggggagtttgtagtcgatgaataccactacacttttgtgtataaacatgtgtaaattgta

SEQ ID NO: 115192 - DNA, 478 bp, Glycine max
  unsure (1)..(478): unsure at all n locations
ctcagcttcttagaaggttcgttcctaatttctctacaattgcatcacctctcaatgagctggtgaagaagaatgtggcatttacctgnggtgaaaaacaagagcaagcctttgctttgctcanagaaaagcttactaaggcacctgttctagctcttcctgacttttctaaaacttttgagctagaatgtgatgcctctggagtgggagttggagctgtattgttacaaggtgggcaccctattgcttattttagtgaaaaacttcatagtgccaccctcaactaccccacctatgataaagagctntatgccttaataagagccctccanacttgggaacattaccttgtttccaaggaatgtgtcattcatagtgatcatcaatcacttaagtacattagagggcaaagcaagttaaacaagaggcatgcaaaatgggtagagtacctagagcaatttccatattgtatcaaata

SEQ ID NO: 115193 - DNA, 391 bp, Glycine max
  unsure (1)..(391): unsure at all n locations
agctntgagccattatcctgactcaccatataccttgacccagggtgagaatgtcaattcttaccctcggaagcccccaacagaatgtatatatggaaaatttccaatcaaagaggaagcaaaaaaggagagaatgaaaacttccaatcaaaggataagaagagaggaaagggaattcccaatcaaagagtgggagaaagcaaaaagaaaagaacgaaaattcccaatcaaagaatgggagaacaaaaaaagagaaggaggagaaggaaagaaagctcctgatcaatgatcgaaagaaaacagaagatatgtgcagagaggtctctggaccagacaatatctgaacaaatacagaattgtcaccaaatgaacaatagaaagaaaaggaaac

SEQ ID NO: 115194 - DNA, 445 bp, Glycine max
  unsure (1)..(445): unsure at all n locations
tcaccttctcactaagccatattgctggcttaacgagcgtccgctaagcgcaacactcatgggctaagcacgaggaagactctggaagaagatgagctgtacaggttagctaagcgcaccgcttcatctcactgagcgcaccacttcagtccatccgctaagcgagaaaggcacgcgctaagccaaaattcattgatgtgcgctaagcggtccataattgccctaagcgcacgagcatgaacaaggccaccaatttaagcctgaaatcagattttatagagggagtttgggctgggattcagagctttgcatgtctagagattctagagagagaaaggtccaagttccaaagagttntgagagatcttgctgtataaagatctgcagagactagagcttgaagcaggagctggtttgagagctcgagatgagtntaagagtgatt

SEQ ID NO: 115195 - DNA, 423 bp, Glycine max
  unsure (1)..(423): unsure at all n locations
gacacaagttgttctattntgttcttagaaatgtgacctaagcgcttgtgccataatgctcctgagtttgtattatcaattctacgcttagtaccacgcaattctgtattaaaggattcaccataagaagctacagtatcaagtaaatatagatgatcattaaccaagagtgaactcagtccaacaatatctgaattaaaatacaacctgaacacattgtttccaaatgaacataaataacccaatttgtccaaataagaaactgagatcaaatgccatctagatgacggtacaacataagtgtctttcatatccaaataaaaactagtacataataataatctacagtgacctatagcttccacttgcatcgatntaccatctccaacatagatccatctttcagaatcaactggcttctgg

SEQ ID NO: 115196 - DNA, 337 bp, Glycine max
  unsure (1)..(337): unsure at all n locations
agcttgtgtaaaatctgattgctactcattattgcttaactggatggatactttntgggtaaagaagtgaagcatgcaatgtgtgtattcaataatgatgctaatgatggatggcggtacatggcaataagtataaaattcgccataaaaatatggcggatgacgtatcgaaaaatggtggatgtcatggcgaacaaatatatatatataaccaagtacccacaccacctaacccattttaattgaataaaaacaatggattgcattcatataaattatataagtaaaaagtgtatgagtcatacaattacgtgatgtcttctgaaacaataaaaat

SEQ ID NO: 115197 - DNA, 342 bp, Glycine max
cttctatggaggcaggatcattgttcttctatgtggtcttataatggagagtcttcaccatggagatgcatcggaagacattaaaaatgatgtgagatgaggcgccatccatttatgaataatccatggaggaaggagcgtccccaccaagatgagccttgtataataagcttggataggatgctttcctggtggaatagaataagggagagaaagagagaggggggagcacgatattgaaggaagataattggagagacagtgaactctgagttgtgtgtcacaagactctcattcatcaaagttgccacacatgttacacatgcttctatttatagacta

SEQ ID NO: 115198 - DNA, 321 bp, Glycine max
  unsure (1)..(321): unsure at all n locations
tttcttgaaaccattggagcctggtccttcctgatgaactactcgcctaatgaaacatgattacctatcttaagattttgagctttggaatggttgggaatagtgtgggggaatctgtccattgagacaactngttatgttggctatgctacatgatgtattctgggccatacttgaagtacattgtatattggataaattgaggacatgctgaatgacatgttgtttctcatacgctatatggtctaaaaaaaaatgaaaaaaaatttcgaaactgaaaagaaagcataagttggggaataaatcttaatggccaaaatg

SEQ ID NO: 115199 - DNA, 416 bp, Glycine max
  unsure (1)..(416): unsure at all n locations
ccatcttccaacagaacgtggagtgtacatgatatgttcaccnccctatactatatgcactcctgtatattacacaccccattntgctaaatacactcccgtttttgtgtttttttacctgtttctttccaaagcgttacgaaactttacaaattatgttacggcacccattttctttccggaatgttgtgtaaactttacagattacgcaacacgtgctcttcttgacttccgaaatgttgcaaaactttatggattgcgcaacaatgcttctttttgactttcagaatgtcgtggaactttgtgaactatctaacgatggatgttatgtacctctaggcgtgcaagcgaatgttgcatgccatcaaacaatggtccccacacgaacatcatgtatgacactaactacaacacaa

SEQ ID NO: 115200 - DNA, 382 bp, Glycine max
  unsure (1)..(382): unsure at all n locations
tagcttatgcttgtgattaattcgagactntgttntctcanattagaccagagcaacactaaagggtatagcaagacattattccatagcaatcgngatcggaaggtgcagagacaaggttacatttcttcaaagaaaaataactacaacaagcgacatggaaagtgataaatgattctctattcttcttctcttgagagaattatttggagttccttctaattcttctttcacgtatataaccttgtaaatttgcagaacttggcatggacatcactggtccaacataaagtccaaaatcaagtgagagagagtttctgaaactaatcagtgcgttgaagaatctaatctttgtttcttctggtttgccatttgtgcttct

SEQ ID NO: 115201 - DNA, 457 bp, Glycine max
tctcgaggaagcctcttaatgaagcttctcatggaagctacatgaagctactctcggtaaaatgctgccgagccttctttaaccattggatcatctctcaatttggtcttccgcttcacacaatatttttccatgacctgaccgttgggatcttggagaagatgcgtacagtgtgcgagaagtttccgtctccgagagcattgctcacttgcgcgtttgagccttgtagtccaagtagctttggaaaaatgtcatttcttctcctttctttcttcccaaaccgttttcaacgttccaagctatttctccatcacccacagtcaccattagccaccacaaacctccgttgttctccgttgaaaccccacaccgacaggaacccttcaattaaagcggaatcttccaacttgtctcgtggtttcagtagagaatgaaaccctaatcttatcttttcatt

SEQ ID NO: 115202 - DNA, 446 bp, Glycine max
  unsure (1)..(446): unsure at all n locations
agctttggcaaaggaagaagaagaaagatattttacgttatcaaaaagttgtgtgaaaatgttgtcaaagttattgaaatgcaagtcaaggtcttgcttttatagactcttcatgtatggtccagaaaccattaaagagtttactttaaaaaacctaaaaccattggagagtatatctttgattttattcaaaacttgtcactggtaatcgattaccaaaatcatgttatcgattacacaaagctttttatgaaaggatatgactcttcacaattgattttgaatntcaacatttagatacactggtaatcgattacaccatttttgaaatcaatggaacgttgcacattcagttgaaagctttttgaaatcaaactttgacactggtaatcaattacaggaaactggtaatcgattaccagagagtaaaaactctgcgtacttgg

SEQ ID NO: 115203 - DNA, 437 bp, Glycine max
  unsure (1)..(437): unsure at all n locations
tactcagctatgagaatccaagcttataagccagagtaaaanttatcatgactanagttgtcaaaagaaatntcagcttggtcaacaggtattgttatttaattatagattaagattgtttccaggtaatctgaaatccaagtggttcggaccattcatcatcaaagaagttatgccacatggagcagtgatattggaggacccaactaccaanaggacatggaccgtgaatggcaacataattaaacactagttagatggatatttcaagaggctaacctctattgtccaactgcaagaggcttgaaccacaacaaggacgtccaactataaagacattaaagaagtgcttctaggaggcaaccttgtatttctgaactctacttttaaatntcttttcttctgaaattcataatagtgttgttaaataatttgtt

SEQ ID NO: 115204 - DNA, 463 bp, Glycine max
  unsure (1)..(463): unsure at all n locations
ngcttgaatgaatagttctcttttttcatcgaatgaactccatatacacacagaaatattaggcgacgcctaacgcaattgtcaataggctgtgcctaatgcagtaagggtagggattgcctaatgtaatgcgcataagagaatattaagcaatgcttaatggtaaagacttatgccgagcgatagagcatgccattaacaaaaaaatcgcatcgggatccgtcatatcaaaggcggaggtcgcacgccactttaaagtccaaccaccatcaatgtatgactggattaagaaaggctctataagtaaagataaacttccagaattatggcgtttcttttctgatgttgttggtccagagcattgtgggcttaacgaataccccataccaacccccaccaattcagatacaaaaagtgaacttttagatataaacaacctttatcaagcagcctctgatgaaat

SEQ ID NO: 115205 - DNA, 448 bp, Glycine max
  unsure (1)..(448): unsure at all n locations
agcttcttatccaaagctcatctnggtggtgaagctccttcttccatggcttattcccttgtggatggcgcctcttctcacctcttcttctttgtcttccgttgcatatccatggtggaaaatcaccattaaaggacctcattgaagctctaagatccagcctccatagaagccccacaagcaaacttccatcaccaagttaaccaaggcgtctagtttaccttcaagcttcttagtttcagatgatgcagctgagtttgtggctacctcatgcactcctctaatgactatagcatggcgctaaactgttgggagatggaagccatcttctcaattaaattcatggcttcagcaggggtcatgtctccaagggctccaccactggcagcatctatcatacttctctccatgttactgagtccttcataaanatattggaaaagaaact

SEQ ID NO: 115206 - DNA, 365 bp, Glycine max
attgcatagtgaagagaaataccactgcattgaatagactactatatctaaactgaacattcggcaacgaaagtcctagactgaacacttccataaataaaactacgactgaattagcttctaaaagtaaactatgaatgcgaacactctttctaagatttactcgtacaatcacgagataccggcaaagcttatctttctctctcttagtaaatttatggccatttagaacgagtgatatgcaattcgcgcataaatcttacctggtgatacactagggagagaaataacaacaacgccctttgtctcaatgcttctagtaggggttataagaagcaccaaagtttatcctgattccagtcata

SEQ ID NO: 115207 - DNA, 309 bp, Glycine max
accactggctttagtcatacaacgtgaggagattgtttcttactcacactaagacattactttacttcaatgtagatagacacaaactgatgttggtttgtttcactatatgcgtacaacaattacacttccattaggatttctgtgttacttgtcacaaatctgatcacctaccttggattggtgcctcgtgtgctgcgttgttgtccttattccagttttaaagatccatttataaccttattgttcacttaatgctcctattgtgcctgccagatctctatgaatcagttattatgctcactgatg

SEQ ID NO: 115208 - DNA, 370 bp, Glycine max
taaattctgcacctgtcgctagactatagtggttatgctcctctgcctattatatacacaaactctttggcattgtgcgcaataataagaagccattgaacaacctgaagcttatggtgttgacatctacaacagaccttctcaacctcagcagcaaaatcagccacaacagagataatatgacctctccagcaacatgtacagtgccgggtggaggaatcatcccaaccttagatggtcgaattcttcacaacagcagcagcaacaacaacaacagccttattttcaaaatgttgctggcccgagcagaccatacgtgtctccatcaatccagatgcatcaacaactacaaccccacaaataacaaaca

SEQ ID NO: 115209 - DNA, 457 bp, Glycine max
  unsure (1)..(457): unsure at all n locations
agccttagtttcactctggttattattctattcattcaaggaaacttccaaagaaaaacgttcgattgatttttntgattatcttatttaaagatattttgattattttattattattttgccttttttggtttaaccgaggttacagcttgaacgatcagttagattttgctttaacaatgattaaacgaagatacaactcatatgaccggttgaaattcatgttatcatttattaggtgagcaaatggcttaaacgatcagntaaagctcgtttataacggaagataagaaaccgaaattgaacgacatttagatgaaagccataaaacacgaaatgaattaaaagtctcggatttggaaacttacccgttgaagaacgaagaacggatgaagaacggtgaagaaacgacgaaaaccttcatggatntgctcatgaaaatgtctcggaagcgtta

SEQ ID NO: 115210 - DNA, 417 bp, Glycine max
  unsure (1)..(417): unsure at all n locations
tagcttattacactccatatgttgttcaccttgttgggagagtgtgtntaatatcatattatacacacagctatatgttttaaaataaagggcatgcaaaagcttattgcataacccaaatatttacacatggttataattggaatacacacatgttnatatcaggaacatagccattattgtaattagggatctgatttggatttaagaatgaccccctctttactctaatatattactatatatagtactcttgtatagtacacatgtgcatacctctgagacgcacaacattaagttatagttcttctctatagaaacataaagaagcactaaagcaaccagtaactgaatatactagtcaacaattaaaagtaacaaggaaagtacaagtggtagcattattccagatcattg

SEQ ID NO: 115211 - DNA, 463 bp, Glycine max
  unsure (1)..(463): unsure at all n locations
tcgatattcggcttctggagacaattgagcaacagatgactgtttctntcatcaccaaaaaataagattaggaccaaagaagatacatcctcctgatatcgaacttctgtcaaccgtatccattccctaatcagcatcacagaaagcttctgaagtatagggttctccctgaagagcagattttaaagactacccatagtctataatacccctttagataccttataatacactagaatgccttccaatgttcctacatacgttctgacataaactgacagaccttgttgacactgtagctcagttctggcctaattacagtaatgtactgaagtgccccaaccaccgaccgatagagagtatcatcagcaacaggtactgaaacaagcttaatagtaccatgtttagtcaactctatatcacagggcatangagtgagtatggcatctaccatcttaacctt

SEQ ID NO: 115212 - DNA, 241 bp, Glycine max
  unsure (1)..(241): unsure at all n locations
agctntactntctgaggcgcgccagcccgcgaggaaaacaatctgaacatcaaacaattaatgacacaagaaatacgattaaagaaatttttgtgcatgccgatagtgcttttttaaaaggagaaatctatgtctgtcacaattcagggaaatacctcaaccgttatttcaaacaactccgccccggaaggaacatcagagatagctcaaatcacaagacaaattcaggtgctgactgaaa

SEQ ID NO: 115213 - DNA, 241 bp, Glycine max
  unsure (1)..(241): unsure at all n locations
nttcagtcagcacctggaattgtcttgtgagtttggctatttctgatgttccttccggggcggagttgtttgaaataacggttgaggtatttccctgaattgtgacagacatagatttctccttttaaaaaagcactatcggcatgcacaaaaaaatctttaatcgtatttcttgtgtcattaattgtttgatgttcagattgttttcctcgcgggctggcgcgcctcagaaagtaaagct

SEQ ID NO: 115214 - DNA, 364 bp, Glycine max
  unsure (1)..(364): unsure at all n locations
agctngtagaatggctagacatgatacatgtcatggcttggtttggttcaaggataaaagggatgccccacattatttccatgacacatattcaaaaaatgatgatttggaaactatatgccaaactggtcatgcatgcacctatgcggacgctcaagtgtcaaatatttatggtcatgtgatgctaaggctcaggaatcatttcctttatttaaatcaacccaatgtttccaaaatgtgttcttttatcaatttgtgcattcctccaagtccacttcgggcgtccgatgaaattttcacagcattcacccttcaggtgtagacacgttggttttttcttcaaaaatcggttatgatcaatgaa

SEQ ID NO: 115215 - DNA, 476 bp, Glycine max
  unsure (1)..(476): unsure at all n locations
tccatcaagtggtaatcagagcacaagagcttcaagtangtgctccttanaccttcattaatatttttgctgtaccttctcctccattgttgtttcttcattttttctccatgtatctactcacatgtcttgtgataaatgttnttaacatgattctctagagtttccaccgattaaacttgctatagaagctagatttgattttctatgggtcaaatttctagttcttgttcttgaaccatgaattgtgttgagtctaggttccttcgacgtttgtcttgttattttttgtggctgaaacctaaaccataaaattcttacaaaaatattaaagtagaagaaaacctctaaaatctagagtgacttgttcacctattgtagttttgtcatataagtcatgtctagtcatgaaacttgtcacataagatttcttatgttgtgctgaaattatatttctcgtttctttcgctaactca

SEQ ID NO: 115216 - DNA, 334 bp, Glycine max
  unsure (1)..(334): unsure at all n locations
gagcttcanaaccataaactaaccagtngattattgacgaatgactaanaacgaacgaagaacggctaagaacgactaagaacgttagctgaattgatcacggaaacgtcacggaagcgttacagaagcgtctcggcttggattatttttcttctttcttcttctcctcaactaatttaagtgaatcttgagtgccaaagttgttgaacccttttttctcaaccccccacgccattttacataaaaaatgggggaggtggttgccgcccagctcgcctaggcgagctggtagcttccacctgaagcaacatgctcgcccaggcgagttgttgct

SEQ ID NO: 115217 - DNA, 456 bp, Glycine max
tccttgagaagctggagggagctactcatacccctccaatatctaagctcaccccattccaaaatacatgaatatacaatgggaagcttccttgagaagcaaggaaggtagcttccttggtaagcaaggaagatagcttccttgataagcatgaggggggtgtcataccctaatttcgtcctgggactattgcttgatggcatgctacctttgattgacctcttcgaggtacttggcaccctctgttgcacaatatgtgaagtcccgagacgtgcccaaaatcataacgaagcgctgttacgcaatccgtgaaattttgtaacgtgccggatatcacaaggaagtattgttacacaatccgcgagtttccgtaactcttcgatagctatataaggagtaattatatgatctgtaacgttccgtaaccttacgaaaagaaaacaagtaccattcgta

SEQ ID NO: 115218 - DNA, 446 bp, Glycine max
  unsure (1)..(446): unsure at all n locations
agcttaagggtggattattgttgtgtttctattgagtnagaatagcgtggataaccattaatggtgtcaaaagcttcaattnttggaaaattttcatgcagaatantttatttatccctttatgctttattgagacattcttagtcaattccaagtgtgtacataatagtttgtgaattataaagaagaagtgaagttgatttttataatgagataatgaaattcactttcatataagattctggtgtggtgaaagtaagaattcaaggtgttgaaatatcttactatgctatttgaactatagttgggtccataagtgtaatgaacatatacatggtgaatctatgatatggtatcctctctctggtgttgaatgggtgaatatgattatgatggttgtatgtgatcgttgaatgaactaccatatcatgcatatatggataaat

SEQ ID NO: 115219 - DNA, 442 bp, Glycine max
  unsure (1)..(442): unsure at all n locations
gcttgcgtagctgctctgggtgctcagaatatcccataaacaaatccctcttatcactagctatgttgaattctttagttcctgaatgtacaaccttcaaattgttgctcgttcccctctttcttttctgcaaaaaagaagatcaaatgctgtcaaaacatggatgaagtcctaagaaaatcaatatcaaagaaaacatggatgagatcacaattaaaaagcacaactacctatctttcagagtcctttggctaatatgtcttgtctccttatgtggtggggttctgtttaataatcttatacttttgccttccaacaaaaaacttatcactaatcctcttttcattaatccaatcttttatgttattggataaaagatcatgggttctgcacctgcctccactactcctcctcctcctgctgctnctacttaggacgcatc

SEQ ID NO: 115220 - DNA, 456 bp, Glycine max
agcttgtatatacgttgaactcatttatcaatatacacaagttgagttttattcagagaattagagtttatctcttttatctgagtgagagtgaatctcctaaattcttgagtgattcaagaataccctggctgtatcaaaggactttcacaacctttgtgtgttgccctcactggaaagagtgattatttccttcctttcatcttcacccttgttctttcataccacaattccagaaaatccacctcttcccagaattatatcgtgtccataactcccattttacgcactcaaattaagtgattcttgagcctaaattgaatttcagaacgagaacctttcacctcgtttggaatcacctcatttggagccctgtagcttcacttattgtcatttctatatttatgtccagccaccacttaacctatgttttaccatccccattcatccatttat

SEQ ID NO: 115221 - DNA, 378 bp, Glycine max
  unsure (1)..(378): unsure at all n locations
gagcaacagatgcgctcgagagatgccaatgctcataacntttcacatggatatccgattcggagacataatatatcaagacactgaatattgaacaacggaacctctcgagaaattcacatggtcataaccttttacactgatgtccgattcgggcgcataatatatcgtgatgctcgaaattgaacaacgaatgctctcgagaaattccaatggtcataagtattcacatggacgtacggttaaggtgcataatatatcgagacactgataattgaacaacacaacctctcgagacattcaaatggtcataagcttttacacggatgtccgagtcgggtacataatatatcgagaccgttaaaactgaacaacgga

SEQ ID NO: 115222 - DNA, 357 bp, Glycine max
  unsure (1)..(357): unsure at all n locations
gctttgagattggtcttaccaacgaattgatcatagngggtctaaaaagaggcaaatatgatcatcatgctttgataaatgtcaaaaaaaaaactatggcaaatgaagagggtgagaatgagggagaagcccatgctgtgactgccattcctatatgaccaagatttccacccacccaacaattgtattactcatccaataacaacccatcttcttacccaccacccaattattcacaaaggccatccctaaatcaaaccacaatacccacctaccacacaaccaatgctaaaccccacttttagcacgaaccgaagcaccaaccaaagggaatttgcagcaaaagcttatgattca

SEQ ID NO: 115223 - DNA, 388 bp, Glycine max
  unsure (1)..(388): unsure at all n locations
tagaattatgattaacgaatgaggaacgtcgatgaacggttgaaatctttgcgagattcctcaccgaaaacgttacggaaacgtttctgaagcgccttggcttataatttcttcacggaaacaatcttttcaagctaattctanagagagagaagtgcctaatgggctgaacatcttganacagctcccgctcccctatatatagaataaaaggaggtgcttgccgcccacagacttaatgaagaagatttctaagcgcacccgaattactaagttcaccccccttttcgtattctacagaaaagttacggaagccttacggaacgtgtttcgacattgattntcatctattttctctttcctttcaccaatgataagtggaatatgc

SEQ ID NO: 115224 - DNA, 213 bp, Glycine max
  unsure (1)..(213): unsure at all n locations
agctngaaatgccatgacgcacgatnttgatcgagccacgagcacctctgattagtgattaccatcgattgtgattttagcgttgtgaaatggggtgaagcgatttcatcgttgtgtgacgtgtgagtttctctgtgatgtctctgactcnccgtacattatggtgaaggtggactggctcgtacctgatcccgaccttgttggcgatggtgg

SEQ ID NO: 115225 - DNA, 356 bp, Glycine max
gcgacctataaatactcagctttatagatagccgctcctaatatctctacaattgcatgaactatcaatgagctcttgaatacaaatgtggcatttacctgcggtgaaaaacaagaacaagcctttgctctgctcatagaaaagcttactaatgcacatgtactagctcttcctgacttttctaatacttttgagctacaatgagatgcctcttgattgggagtaggacctgacctgttgcaatgcgggcacccaattgcttattttagtgaaaaacttcatggagccacccttacctacgccacctatgataaagagctttacgccttaacaagagcactccgaacttgggaaca

SEQ ID NO: 115226 - DNA, 475 bp, Glycine max
  unsure (1)..(475): unsure at all n locations
agcttccgcttattagtgcacagctccttcaaaattggcatatctcggaatttgctttattgcatccaacagaggtatgtttacctctnactttctaaacgtttccaagatctctntctctgcctcttccattttttttgttggaaactgctctcggagggaatggaagagggggaatgtgctgcttctgcaaatcaaaattacctgtggaagaagattcacctgcacagaaattgttaggtaaatttttgtcatcacctttttctggagtagagtgaagtttggcaggttcatttgcagatgaggaaggtgctaccggttgaggtccttgacactgctttcccgaccctcatgaaatgacactgacatttttgggattttgacagcttgaaaggcagcttgtcgaattctgggactgttgttgattcaattgggtagccacttgtcccatctgattgtgttatctatgaatgga

SEQ ID NO: 115227 - DNA, 432 bp, Glycine max
  unsure (1)..(432): unsure at all n locations
acatgtgcatatatatctngaatattgaactngaaaagaaaaaaaccttgattnttaattataaaatttaaaatatcattgaaattaaattctaactcatttatgatatgtgattttaatatgcaaataacttatttttactagttcaagataaaaagtttaaaaagtatgggtacctttctaaaattcaaggtaccgaagcaatcagaaatatcactagtccaaagaaataattatttactatacataataatctataaattattgcgtaattctgttntacttaaattgaataattaatttctagaaaagtaacgtgactctgtgagaacattgtntagtgttgcaagaagtgaagggtgaatcacanagtggccgcgaatgttatggacgagattatggcggtggcgcgtgagttcatgacacagcaca

SEQ ID NO: 115228 - DNA, 446 bp, Glycine max
  unsure (1)..(446): unsure at all n locations
agcctacctatgcgtcattgtacacgtggttcatgtatgtgatgatcccacatttgatatttgtggggagcagggatggccccgtgtcttntggagacttcatggataagcgtacctggatgtgaagatgtgatttccatttcttgtttcctttttcagtgttatgtttagtgttgatcgactcagagtctaataagtttatcttcatagggtcgtcatgtctatatgcttgttgtgaggagatctgagtctctatcaacttgtataagttcatgttatgttagagtgtcatagggctcatggtattcttagttgtgtatatatatcacatgatgttttatcttgatatcttgcatgttagcttttggtctctgaaatgagaaaagcttacaggtatcttcataattatattaattaaagggttttaaagagattaaataaagtct

SEQ ID NO: 115229 - DNA, 503 bp, Glycine max
  unsure (1)..(503): unsure at all n locations
catctcgaccgtgtctcatgtcaccgcggctgcagctatgctcanacaataaatagaccctctcagcagcgaaaccaacttcagttgaataattatgatctttcaagaaacaaatacaatccaggttggaggaatcatccaaatctgagatgggcaagtcctccacaacaacaacagcatgtccctcatttccaaaatgctgctggtccaaccaagccttatgttcctcctccaatgtagcaacaacaacaaagacaacaagcagttgaggcccttcctcaaccttccttagaagagttagtgaggcaaatgaccatccagaatatgcaatttcagcaagagacaagagcctccattcagtgtctgacacatcacatggggcatatggctactcaattgaaccaagcggaaaaagagatcttggagaccttcacgacacgagaggtgaacatacctctgctagatgccatccagcagataccaagatatgccaagttcctaaa

SEQ ID NO: 115230 - DNA, 413 bp, Glycine max
  unsure (1)..(413): unsure at all n locations
ctcagcttgtagaacggctggacatgatatctgccaaggtttggccagctgttctgtgtataaggggatgtcccacattatttccatgatacacatgcaacactgatgattaggaaattttatgcaaaactggtcatgcatgcacccatgtggacactcaagaatcaagtctttatggtcatgttcttgtaaggctcatgattcattcctctatttanatcaacacaatggttccaaaatatggtctcttatcaaattgtgcattcattcgaaactatcttaagtgttcgggaatattttcacagcattcaccctccaagtgggtacacactttttgtttcaaaaactggttatgatcatggaattcttttagaacagtcggaagtatctattttcaaagcatattgattttt

SEQ ID NO: 115231 - DNA, 421 bp, Glycine max
  unsure (1)..(421): unsure at all n locations
tgctatgtaacttctccatttcacacattgaaattcatgctacctaggtttgaatggttaaacaagcataccatattcatcatattgtcatgtttggagatctngtcattaacatcacgtgatagtttttgagttagttaagtttataatttttttctaaacttgtttagattccaaattttggtccctcaatttttttgacaacttttagtgcacattaagtngtggtcagcgtttttagtctctctaaaaaactttgcccatttttaaacccttgtttataatacaagaagtgggttgaatcacgttatttaatcaatttgttttcttttaaaaanatttaaattctaaagatatgtccgagtgagactgttcacatgaaaatcctttggttcaaaaggacattatagtttctgaaaca

SEQ ID NO: 115232 - DNA, 442 bp, Glycine max
cttgggttcgatagccccaaccacgtctatgccccacattaagaacggtcatagtgctgataacacattcaacagtatgaggggaccattaacattatccgcacagatttggcacttgtggcatttcctcaggtgagcacaacaatcattctccatggtgatccagtaatacctagccctcaaaatctttcgggccatgtcatattcattggcatgggtgcttaaggacccttcatgcaccttcgttagtatctacccggcctcatttgcattcacacaccgaagcaataccatatcatggtttcttttatataggacatccccactcaggatgaaactggctggcaacctccgtaatgtcctctagtcattgtcagaggcctcaagcaggtattccttgtacttgatgtatccgttgatatcaaaataccaatgcttaaca

SEQ ID NO: 115233 - DNA, 403 bp, Glycine max
  unsure (1)..(403): unsure at all n locations
gagcttgaggaaattcatacgacaataaatttttactcggatgtctgattgagttccgtaatatatcgagacgctcggaattgaatgttgaacgtctgagcaaattcaacaacaataacttttactcggatgtctaatttagtcgtataatataacgagacgctcgaatttgaatggtgaagctctgagccacatcaaacgacgataacatcttactcggatgtctgattgagtcccgtaatatatcgagacgctcgaaattgaatattgaagctctgagccaattcaaacgacaatanactcttactcggatgtctgatatagtcccgtaatataccgagacactcgtaattgaatgttgaagctctgagccaattcanacgacaataactttttactcgga

SEQ ID NO: 115234 - DNA, 422 bp, Glycine max
gcttcacattcaacttcgagcgtctcgttatattatactactcaattagacatccgagtaaaaagttatcgtcgtttgaattttctctgagcttcaacattcaatatcgagcgtctcgttatatgacgggactcaatcagacatctgagtgaaaagatattgtcgtcttaattggctgagagcttctacattccatttcgagcgtctcgatatatgacgggactcaatcaagcatccgagtaaaaagttatagtcgtttgaattggctgagagcttcaacattcaatttcgagcgtctccatatgttgcgggactcaatcagacatccgagtaaatagttattggtcgttgagttggctcaaagcatcaacattcaatttcgagcgtctatatatgtgacgtgactgaatcagacatccgag

SEQ ID NO: 115235 - DNA, 436 bp, Glycine max
agcttggatattctacctaacgagggatctatggttctcttatttaggctacagcacggaacacactagcgcgagtgatgggagaaattaatatatttctatgcatcaacttgtttgttagaaagacccaacatatctacctattgttgtcattttatctaccttgcattttatggtttttagcatgcaagtttagtttaaatattgtttgaaattatcacttatacatgttctctcaacaatgcttcgattctgaacttaattcaggctaacattagctccctgtgttcgatactcggattcatccttttcaatttcatatacttgatgaacctgtacgctttccggtgaaaactccccattgaaatttccttgagacatatatgcacaaaaagtaattgtaatggggggagacacacaccttcagaatcaccac

SEQ ID NO: 115236 - DNA, 309 bp, Glycine max
  unsure (1)..(309): unsure at all n locations
taatttttctttatggtaggctggtgcttggaggacaataatatcaacgtaagactccactaactgtgtgctggtaaggatcgttantactcatcttattatctagagaactgattacgatctagtatattaatcacttcaaaaagacgcagggttcatcatattctatatattgctcaaatcagataacttaccgtgtacacttgaggagtgccctctatccatctaatatgatccttttcttctgcatagtgcttactcttagattgtatactcataactgttgatgtatctacccagaaacccttt

SEQ ID NO: 115237 - DNA, 338 bp, Glycine max
  unsure (1)..(338): unsure at all n locations
agcgtncataatacttacgtaaagatcctattaccctagataaacatatgtcacttcatgtgggtgagaccgaccagattagacagaaaattcacgtcctatatgcttctggtaagcttccataacttttatgtaaaattataatagaaaggtgggtgctgacagcagttttcaaattttcgaatttgggcccttccagaatatttacaagcacggttgcttttggacgaaccaacccttctctcctgagtgagctgggcggcaaccttctcccactttgtccctttatataggcagaaatgggcttgttcaaagatccctcatccacttggctatgc

SEQ ID NO: 115238 - DNA, 419 bp, Glycine max
  unsure (1)..(419): unsure at all n locations
tatantngtagggtttcttctgtaatggctggctgaacacctctatttgggatttcatatgagcagctgatgtaaatacctaatatctaattgattgtgttttntgtgttcaatgcttccttcaatgcttgatgtttgtatgctnttggtctgatcatccatttgtgttcacagttaggtgactttagcattgggaaatgtactatggacttaaaacttgattgaagcacgatcaaaacttantcttacatgagggatctgcgggttaagttttgggtttaattatgtcgttaccataatgctgtttagtttaagcctagtcttacatgagggatctgcggacgaagcttaggctaaattaagctaaactatcataagcttcttgagctgagtctaatcttacatgatggatctactga

SEQ ID NO: 115239 - DNA, 352 bp, Glycine max
  unsure (1)..(352): unsure at all n locations
agcttggagttggttcacgttggcgtcgtacttctgctcangatatttatnttccattcttagtggcttctacacatgaggtatgactcagctgcatgtacttacagtcttacactaactatgtctgctaaattcggctccaaactccaacaaactccatgcagaataagcagctcttttatcgaatgatgatataaggatgattaataatttaaacataatgtcgctctcttttctatcaatagttttaaaactattataaatgaatgaacaaaaatattcaaattaataaataaatatttactactatatgttaaattaatgtatttggcaatgatattacaatgatgtt

SEQ ID NO: 115240 - DNA, 462 bp, Glycine max
  unsure (1)..(462): unsure at all n locations
cgactaggcgagtcgattntagccttagtttcacattagttatttattcaattcaattaagaatgagaaatcccaaagagaaaacgtccgattgatttttcgctttattttactaaaaggtatntcttttattatattattatttacctctttttttgatttccaacgtggttgcggcacgaccgatcggtcggaattcatttcaaccaaaattaacggatgacaattcaaaagatcggtggaaatntattttatttttagattaagcgagaaaatgacttaaataaatggcttatgcacgtcaaaagggggtataaaaagctaatgaatacgagaataaaactacatgaaaccaaatatggaccaccacgggtacatagaatgaattatatagcttggtttgaggtacttacccgttgaagactgaagaacgatgaataacgaatgaagaacgtctaagaa

SEQ ID NO: 115241 - DNA, 452 bp, Glycine max
  unsure (1)..(452): unsure at all n locations
agcttggttcgaggtacttacccgttgaagttctaagaacgatgaagaacgaatgaagaacgtcgaagaacgggtgaaacctttgcgagattcctcacggaaaacgttacggaaacgtttcggaagcgcctcggcttanattttcttcacgggaacaattttcccaagcaaattcgaaagagagagaagtgcctaaggggctgaaccctttccttcttcacttcctcccctatttatagcaaaataggggaggtggttgccgcccagctcgcccaggcgagcagggttgcttcctccagaagcaaccgccttctggaggaatattccggagggcccaagtgggcctgggtgctatttgcacccccatttttactaagtacacccccctctgctggtttttggtgattcttttttcgtaaagctacgganacttacgaatttcgtaacgatcc

SEQ ID NO: 115242 - DNA, 436 bp, Glycine max
  unsure (1)..(436): unsure at all n locations
ngagatgaggaagtgtagaaaggtgaaacttcctgctcttattcgttgaccacagagtggtacctggagatatgtcgcgggggtcacgagaccttgnggacgtcacgtgcggtgctattgcccaaaaccaagcttgaccaatcccgacccaacccgggcatagtcagtcagtgagaacctgtgatgtacctaaacaggcgagctcctagcagtcaacagataaaatgaacaaagaccacaaagcaaggaggcttgtgtggtggctggccagctatgaattttgattgatatatgggatatggcctctggtaatcgattaccaagggtgggtgatcgataacaaggcttaaaaatgaagataggaggctaagatggtctctggtaatcgattaccaaggggtgtaatcgattaccaggcttagaaagggaactggaa

SEQ ID NO: 115243 - DNA, 279 bp, Glycine max
  unsure (1)..(279): unsure at all n locations
ccgggtagtcgaagagaagttcaagtccatagccatcaaagtctgaaaagagtatgatgaactaaggggcgtcaatatggccaccgcagaggccttggaacgagaaaccaaaaaggcccgaaaggaagaacacgaccaaagcaaagttttgaggggctttatagggcagcaatagtgagctcaagctccgaaaggtgaaaggaatcatcacgggtcanaggcatgatcttgaaggacgagctanatgcttaccttaggtcgaaaagaaatcgtcccaca

SEQ ID NO: 115244 - DNA, 437 bp, Glycine max
  unsure (1)..(437): unsure at all n locations
tgctttaatgcgtcacgtctcaagccanattcgatggtagtatgagcctttgacggtaatcggcaggaggtgatgggggaaatcgacatccccattcagataggcccccacacttgcaatgtggtttttcaagtgatggacataaatcccgcctacaactgccttttgaggagaccctggattcacgcgctaggagtggtcccttcgacgcttcaccagaaattgaaattcgcggttggtgggctcttggtgatagtgtcaggcgaagaagatatgttggtgagctgcccctcctccgtactatatgtagaagcaacggaagaatcattggaaacagctttccaatccttcgaggtggtgagttgtgcctctgtggaaacaagtacgtcgctaccttgtctctctaatgcagccctaatggtggcatgggtaatgct

SEQ ID NO: 115245 - DNA, 357 bp, Glycine max
  unsure (1)..(357): unsure at all n locations
agcttgtctcagtcgtctgtaaggatgatttggtgttataaagcggcgatgcctactgtagactggtcttctcccatgttttagttgtgtgtaacttgtattttcttcacagatggggcatgcatgatgacccttaacactgtaaccgctgagattcccatatcgttggaagtcattaatggtactaaaaagcattgcacgcatttcaaatgtcttcttgcanaacgcatcaaacactacaaccccctcgtcccataactttctcagatcttcaaccaatggacttagataaacatcaatgtcatttcctggctgtttgggcccgatatcatcatagacaacatcatgtattttcgc

SEQ ID NO: 115246 - DNA, 371 bp, Glycine max
  unsure (1)..(371): unsure at all n locations
atatcataagagaacaatgactattgaatantctattcctgtnnccccngacgagtccaatactatttctccaagacaggatgtcttcgatggtattgccgaatctctataacaaatgcttattcatggactagattctaaatgaaaaggagaaggaatcaatgaacatcctctagttaaagtcatagctaatactgatcttccaagagagtggaacgcttcaagagatcatccccttgacaacattattggtgatatctcagaaggcgtaacaactagacattctgttcaagatgtatgcaataatatggctttcgtgtctatgattgaacctcanaatctcaatgatgaatactacatgatcattggat

SEQ ID NO: 115247 - DNA, 226 bp, Glycine max
  unsure (1)..(226): unsure at all n locations
tatattatattctttcaccctaaacaccacccgaagagataaatttttaaaaaaactctgattgaaaagcatagatgatttatttaaagccgaacacacaactcctgtcttaatactacactcttttgacgtggtgatatataagngactattatgtctgaaaaatagtaattagtataattgtatttgtctattataattttaatcgacacatttatgaaccttt

SEQ ID NO: 115248 - DNA, 456 bp, Glycine max
  unsure (1)..(456): unsure at all n locations
tggaagcctgaccctatttctttctctgtgttggggaagatgtttggggaggctggtgactatgatggcattaagtacgtgtttcaagagatggagtctgttggggtgcaccctattttggttgtgtacaatacctcgttnatgcaatgggataggctgggaagccggagtatgcgacgggtctgtttgaggaaatgatcgagtcagggattgtgccgaatgagaagactctgactgcgggtattaatatatactgcaaggccatgtggtcgctagatgcgtttgagctgtggcagcggatgaacgaaaatggctggcctattgattttatcttgataatactttgttgaatatgtgtgctgatgttggactggtggaggaagcctaaacttttgtcatggacatgaagcagtctgtgcattgctagccggacagttggagttacacggtagatgc

SEQ ID NO: 115249 - DNA, 480 bp, Glycine max
  unsure (1)..(480): unsure at all n locations
actagcccagtnagccgttcttgaatatgtccatagtctatttacgttggcataagaatatcccactaggattccttgctacttgtacaccaagacaatacttcagggtccacaaatctattatgtgaaagcacttgctgagatatactctaaatatttggattgtagtggagtcattcccacacacgatcaaatcatccacatacaccaaaactaccagttgcactccatgattaagaagagtaaagagcgagtggtcagaggatgattgttgaaacccaaaattcgtgaaggcaaatgatagtttggcaaaccaacatcaaggggcttgctataagccatacaatgatttgcgcaacttgcaaactaatcctgggtgagatgtgcgaaagccttggggcaactctatgtaaacatcttcatgaagatcaccatggaggaaagcattatggacgttcatttgatgaatttcccacttct

SEQ ID NO: 115250 - DNA, 261 bp, Glycine max
  unsure (1)..(261): unsure at all n locations
tgcatcctgcanaatcagaatctannaacctgttaagtttaagggatgtacctttggataccacaaacctacattggttgtgccctcaagatactcaatgatccttttaacagtagttaagtgagattccttangattggatnggtatcttgcaagtaagaaaatacttagcatgatatctggtctacttgcaattaggtagagcagtgattcaatcatacctctgtatcttgattcatccattgatntacctttctcatc

SEQ ID NO: 115251 - DNA, 469 bp, Glycine max
  unsure (1)..(469): unsure at all n locations
ccttaatctagcttacctagtgtacctgtgctatgtgctcttcttctctacataaaattgtcactaagtacttgtagttttcatgaagaaaatactgtacttggggcatgtcactttggtttgaaacctttcttgagacttagggtgatcaccatggttaggaagttgcttgtgcacgacagggtgacctcgacacttgttgcctagttttcctaagtgaaagtgtcgtgtggacacacttangctatttcttgacaaatgataccgcattgcatttgagatttgaggccaggtgcatgcatcatactgagcatgattaattggaatgttggaaaagttgatgaatagttattaagtgtatgttgtattgatcgataattatgtatgagcatgatacttgttatggcttctctttctaattattggtatttgataatcgttggtttcttttgtaataaaatcacccttg

SEQ ID NO: 115252 - DNA, 161 bp, Glycine max
ctctgatttactggagatgcagtgagtgcatacctattcgccgggacctgctgatacatgcacttcttgtcctgtaggtgttgcccatcatagcattggaaatcacactgccaaaaccaatatatgatccaatcgaatttctgcacccgaatcaatggaca

SEQ ID NO: 115253 - DNA, 485 bp, Glycine max
ccttgatactcagctttgaatcaacttgccatggtatcgatactagagagtatacactctggctacgtggacaatcttgagaagaattattatgaaaaccaaactgtgctatgttcgttctttgaagaatctattcaatacttcccttgagaagtcttcttgaattcttctcttgaagtctgaaatcaaacttctcttgattcttgaatcttcttgatttcttctcatgaaacttgaaattaatcttgatcttgaactcgttgactcaatcttgaaatcattctttgggctttttgtcatcatcaaaactacttgaatcaacttgactcatcatcatgaagcttgtttctacatctttatggattattattaacatgatgatcagttcagtacattgcgtcagttattttggctaatgtttatatacactactattgtgtttgtgggtcgctagaatgcctcattttgaagcatatgaaacaggt

SEQ ID NO: 115254 - DNA, 238 bp, Glycine max
  unsure (1)..(238): unsure at all n locations
gtcaaatcaccaataacagagtgcacaaattcaccagttatggaatgctcagaatgatcaaaaggtataaaatgatgcctaactaatctatganatgtcctatctatctcangatcaaagggttgtaagtcagatggattgcctctagtcatacactacattcagcatgcacacaactagttgccttgtcatgtaaataaaggtgtaggtttgaactacagctaccctcacatgatat

SEQ ID NO: 115255 - DNA, 404 bp, Glycine max
  unsure (1)..(404): unsure at all n locations
atctaccagcgtaaatcctatatcatcggtgtgcacaccggtgtngctgtcaacccatttacatttgaaaacacatactgtaaatntcacataattaagctcccgaatttcatcaatgaacccaaagtaatggatggaagctacatagggattggcatcattgacacttgcaaagtgttgagattcagcccttaaggtgaccccgctgttctgcattgtactttngtcatcttgtgcttttgtgtaaaatgaatacctgtttatgtcgtatccttgccagattataacatttcttttaggcccatctgctagctttcttaatctttttgaagcattctcatctgcaaagattgtatctttaaaccaatcacagaaagtgttgttatgctttttcaacacccaat

SEQ ID NO: 115256 - DNA, 239 bp, Glycine max
ctccaccctattcacaccgccctatcatctcatctacctcattccacactaaacaaaagactttttttcatgctgggacacctttactatttttcgttcttctctctctggcttgttgatttctcgagttcttgatttgtcttcgggttataggatcacaaaatgctctttgtgttctaggtgtcatttttaggtctgcttaacacttaatgaataatattttaaaataaaaaataccg

SEQ ID NO: 115257 - DNA, 341 bp, Glycine max
cttaagtcactaggcaagagaattatgaccctcgcatgaaaggaaaatgagtgttaagcctttgaattctatgaaatgaagctcgcctctaattgatctcttattggtaggtagatagcttcattataagctcaaggccatagtctgataactctcagtcttaaaaattcatactttcttcaggtgcctccaagatgatctcctctatctcaaaagtctctccagacttggtggatcccaagggagaacaacattgaaggcacatatgagacccatcaactggtgaagatccaagggagtagagaacaaaattttagcagactcaacctctctatatttct

SEQ ID NO: 115258 - DNA, 294 bp, Glycine max
  unsure (1)..(294): unsure at all n locations
ctcatggactcctctaagaacaatagcatcatttcttgcactgaattgttgggagtcggaagccatcttctcaatcaaattcctagcatcagcaggggtcatatcaccaagagctccaccactggcagcatcaatcatactcctctccatgttgctaagtccctcatataaatattgaagaanaagttgctcagaaatctggtggtgagggcagcttgcacacaatttcttgaatctttcccggtactcatacaagctttctccaccaagtttcctgatgcctgaaatgtcttt

SEQ ID NO: 115259 - DNA, 459 bp, Glycine max
  unsure (1)..(459): unsure at all n locations
tcagctggtcgaggactacccgtgagatcgagacgattttatcgatgaagatgtcaagacggtcaacctttgcagatcctcacgannaacgctactgaaacgtttcggaagcgcctcggcttagattntcttcacggaaacgaattttccaagcaaattcgaaggagagagaagtgcctaaggggctgggatcccttccttcttcatttcctcccctatntatagcanaataggggaggtggttgccgcccagctcgcccaggcgagctcagctcgcccaggcgagcagggttgcttcctccagaagcaaccgccttctggaggaatcttctggagggcccaaatgggcctgggtgctatntgcacccccanttttaccaagttcacccnctctgctgttnttttggtgattcctttttccgaaagttacggagacttacgaatttcgtaacgatactt

SEQ ID NO: 115260 - DNA, 55 bp, Glycine max
actcttacacgagcatatcttaattagtaatacgaattgcctctctctctctctc

SEQ ID NO: 115261 - DNA, 472 bp, Glycine max
gctgtacacatcgttccgtgatgatatcactcttcttgtttgaagtaaaagagaccttcaatcctatcacgcaacgaggcagacagtagtgggcagtaaactcgaatgaccattattgtcaatgcggaaagtattttgcacttcactatccatgttcacacattattagcagcttgggttacgtaagcatgaactactaccaatatatagatgttgtttacacgactgagcacatcttaaaagcttactctgcacaatggtggcctctcacgaatgaagcggcgattcctccttctaatgacgcatggacacttattcctgacccaactacaatatcgtgcgaaatgtcagccaaaatcaacacggataaggaatgagatggattggctcgaacagtctgagcaccggcaaatatgtattatatatggagcataagggcacaatatgcgactatgtccaatgcaatctgacc

SEQ ID NO: 115262 - DNA, 301 bp, Glycine max
  unsure (1)..(301): unsure at all n locations
atgttatatatctaacaatagttatctattaatatagtttacaggttcattatgcatacaattttaggtccaagtgatcggatatattttcatgaaggaaatcaggacctgcatattcattattagattcatatataaatntttgtccgtacttccatagtgtccattgacacattttcagcatatgattctcttttctatctctttctccacaacaatgagcccaaggagcagagtnttcttatgagcatcaatcaagaacgtaccattatttatattagatgacatccaagtccacaca

SEQ ID NO: 115263 - DNA, 461 bp, Glycine max
  unsure (1)..(461): unsure at all n locations
tatgaggagaagcataaaataagcaagagatcattgttcttctcttcaagatgcaactaaaggagaaggaataagtcaaggaaatgaaagaagtcaatgaggccgacgtagaggtcgaggtcattgctgaggacaggttggacgtggcaacagtggacgagattcaaatttcatcaacaacaattacgagaaaggaaaaagctcaacaagagaacatggaagaggctatacaagcacaaggtatgataaatctcaaatccgatgctataactatcaaaagattggccaccatgcttcagaatgtagatttgccaagaataaagttgatgagcagactaactatgtgtggcaaaaagacgagaagtttgaaacgttgctcttagcacatggaggtaataaaggtagccaagaaaacacatgggtccttgatactattgcaagcaaccatacatnttgaaaaa

SEQ ID NO: 115264 - DNA, 279 bp, Glycine max
agctcggaggcatgttcactcccaagttttttactccggcattgtacgcacactctggcttaccagaaacttttagatatgagtggccaggtcgctaagcgcaccacttcatcttactaagcgcattgtctatccatctgctaagccgccataattgcgctgagcgcatgagcacgaacaaggctccctatttaagcctgatatcagatattagagagcgagtttggactacgattcacagctttgcatgtctaaagattctacagagagaaaggtcct

SEQ ID NO: 115265 - DNA, 411 bp, Glycine max
  unsure (1)..(411): unsure at all n locations
tcgattaccatatatgtgtaatcgattacacagggcaaatnttgaattcaaattttaatagctgttgtaaatcagttctggccactggtaatcgattacatcctctggtaatcaattaccagagagtaaatttcttctaaaagactntttaacttaattntcttggccaaacctttagctacttcaattggaattcccttgctatgtaatataccatttctaagactctatagactggctngatcatctatcttgaatatctataattgctttggcttgaataaagctttgagacgcatgtngatctttggcatcatcaaaagatcggctngatcctctgttacataatggattttgaaaatnttatgaatgaacttaagcaagtaattacatgtcatatttaaaattatg

SEQ ID NO: 115266 - DNA, 263 bp, Glycine max
  unsure (1)..(263): unsure at all n locations
catttgatagaattncacattgtctgctccaccatgaaacccccagatgtccaagaggatcacatatttctgaagggctttcctcattcattagagggagatgtccaaggtccatcacgagctgggatgaccttaagagagtatttattagaaaaattntccctgcttccaggaccacagccatcaggaaggatatctcaggtattagacaactcagtggagagagcctgtatgagtactgggagagaattaagaaactatgt

SEQ ID NO: 115267 - DNA, 478 bp, Glycine max
  unsure (1)..(478): unsure at all n locations
ctcagcttgtaacaaaagggacgaaccctaggatcaatatttcagttgctngattaaatgttaaatggctccactatcgtcatccacaattatcaagtgattaagtcaaacaaaatatatactttgagggagtctccgaagggatctgtgaaagataggatgagattgcatgaattatcatgtccttcagaaagaggcggtcaatgttcatagaactcaatgtccttaaaaaaaatcacaaaatagggaaagaatgtcatgagcattgcacaattttcatgattcanaaccttntgcattgctagatacaaagcctacatttactacatcttaggatgaaaattgcatgcctttgcattccataactcatgctccatatcangctataagtgcatagatttctcttcgtatgtcaatttccaaaatccaatgtcctatcttttgagtttgggatgagggaccctcttaaagagtcaac

SEQ ID NO: 115268 - DNA, 253 bp, Glycine max
  unsure (1)..(253): unsure at all n locations
caaggacggtgtggacgacactatctgtgaaaaatacgacattagcaaggagaaatgggcccagttttgtcagacccgcacagacccctcatgggaggtatgtagttngtcattttagttgttttccacacaaaanatcacttcttataattcattgtagtaatcattttcattaatgttcgatctttgcgggatgtgcggaaaaagacacatgccatccagaagcaaaacactacccctcacatgttgtctc

SEQ ID NO: 115269 - DNA, 378 bp, Glycine max
tttattctttaattcccgctcccccctctcttttctggccctctttctttttcctacattgaaaccatccttccaagcttcttatccaaagctcatcttgggtggtgaaagctccttcttccatggggctatccctagtggatgacgcctcctctcacctcttctccttggtcttccactgcatctccatggtggaaaatcaccattagaggacctcattgaagctcatagatccagcctccatagaagccccacaagcaagctttcatcaagtggtaatcagagcacaagagctttaagtatgtgctccttacacctccattaattttctttctttaccttcactccattgagcgtgcttcatttttctccatggtc

SEQ ID NO: 115270 - DNA, 99 bp, Glycine max
caattcaccccctgacttactttacaataatcctactataggtgctagggcttccttactaatcggattactagttataaggttctaatacgcctatca

SEQ ID NO: 115271 - DNA, 249 bp, Glycine max
  unsure (1)..(249): unsure at all n locations
gaaaaaaccatggaagaaggagcttcaccaccaagatgagcctcggataagaagcttggagaggatgcctcaatggaggaaaagaaagatggagagaatgagagatgggggagcatcgaaatgaaggaagacaaatggagagaatttgtgctntgagttgtgcctcacaagactctcattcatcaaaagtacaacaagtgtgacacatgtttctatttatagactagcgtagcttcttgagaagctttc

SEQ ID NO: 115272 - DNA, 339 bp, Glycine max
  unsure (1)..(339): unsure at all n locations
tgaactaagcttgaagcgcgtattaccgtcttgcaagccaatctgttgcttagcgagccttcgctnagcgcgacactcatgggtctatcgcacgaatactctcgtagaacatgtaccgtacaggctcactatgtgcacgacctcgtctcactaagcacacacgctgacattctacgtcttgctagaaatgcacgcgctaagcctaaatacctacagagtgctaagcggcccatatgtgcactaagctgcacagcatgatcattgccacctctcttagcttgcaaacaaagtctacatggagagactgcactgggacacacatctangcatgtctacggt

SEQ ID NO: 115273 - DNA, 214 bp, Glycine max
  unsure (1)..(214): unsure at all n locations
aacaatttaagtgcccaacttgctccacaaagtcctccaaaaatggcttatgaacttagagtccctatcactaacaatgctccttggcaaaccatggagtctcacaatctccttgaagaacaaatcagccacatgggaagcatcatcaactnttttacatggaataaaatgagccattntagaaaacctatcaacaaccacaaaaatggaatct

SEQ ID NO: 115274 - DNA, 371 bp, Glycine max
  unsure (1)..(371): unsure at all n locations
attgcaagtaaaaggaactcccttatgtcacatcaacaagagttttgtcagcgcaggctggatgtgtgaggggtgggttgccatgatccatgatgaagtccctcaagagcaatcaaactgggtgcggccatgccctcctatgttcgagttgggaaattggcaaattatcaaacaacccanaatttttgtggcaaacataatgtaatttgttaatccaaaccctatagctgagcctcggcttgtcttttgctattagatatatataaaatataatctgtcttcattttttcttgcactttcatccctatttgggcttgtcttttgctattagatatatataaaatataatctttcttcatttttttcttggc

SEQ ID NO: 115275 - DNA, 394 bp, Glycine max
  unsure (1)..(394): unsure at all n locations
atgacactgattttttcttatcaagaaattatatctntattctaaaataattatcttcttgagttattttatatgaattacaaaatattgaagatagcatcaatatcatagagtaatcttatattatattattaatccgcttctatctttttattatttatatcattgatcttacaagagatataagtaaaaaattaattaaaatcacgttaaaaacttataataataaatattttagtcaaaaaattagtagataattattatgggaagaggaagttgacgttaatgaacttattctgcgttaanatggagtgtttcgtggttggagatcaatggcttgattaacaccccacgtgcgactgtagtgattactcatatatatatgaatcatttc

SEQ ID NO: 115276 - DNA, 305 bp, Glycine max
taacctctgtaagacagaagaactagaatgaaacacgcgcttatctagcacggtcgcgctaagcacgctcatcaacttcagcgaacgcgcttagcgcgtgcctccttcatcatacaagcgcgccaagcgccaggctgggcctcatggcccatcaacctcgctccttgcttcgtgcaccccccttctactcttctcaccccgctactgttaaggttaataacgccacttccttctactttctcacgccctacttattacgttaatcaatgcttctggagtgctacatccccatatgtacagaagca

SEQ ID NO: 115277 - DNA, 401 bp, Glycine max
  unsure (1)..(401): unsure at all n locations
aatgctcttgtgtcatggctggaatataacctttgagaaagaaatatgtctgagcctagtcctaacaaattagagtcttaattgtagttattattcaattgataccattgttaggaacaacatagtgttaggaacaacatagtgttaggatgcacagatggcaatgctggtggttggctctaactaggtccacttggaagcttatgaacagcatagtgttctctaatgcaacctttaatgctaacaaacagtttgaagatgcaatattcactctatggacgtggctcaggcactttgagaaagattntactatccattttaatcaatggtcaagtagcattagacacggcttttgcatcagtagaggatagattcttttgactaatagatgtatactttac

SEQ ID NO: 115278 - DNA, 490 bp, Glycine max
  unsure (1)..(490): unsure at all n locations
actaagcttagacaaaanttgaagacgatccaacggttaacaaatcctttatcatgaccttactgaactaggtttaggcaaaaatctagaatctcataatttcaagtttgctcaacaaaactccacataactcaacatccacatcaagaaattcacacatgactaattcaagtcatatttcaaatcattcaagtgaaacatatattcaaacaacaagctaaacacaatcaaacatcgatttataattaataacatttcagggtgttacatcaggcaggcccttcaaacattcattacatggccaacaaatcttgtgaaaattgtgtcacaaaaggtaaattttattttttaatatttgttggatgatttgcgtacatcgatatatcttagttactgacattattgtaattcttgttttcattaaccatatagtagtcttatattactccaaagaaactacctgaaccagttcaaagggcaaataaatgtt

SEQ ID NO: 115279 - DNA, 351 bp, Glycine max
  unsure (1)..(351): unsure at all n locations
cattttattcttatattagagttttttcattagtgaacaattatctttttcttttatctttacgccttataaattatgtttattttgtttctaatccttacaataacgttctgaatagtgaacaaaatgttatccaaaatatctaaagaacttaaaacaaaataaacataatttgcaagagataaaaatttacaaggaaaaaaatanaaatcacactaaattataagaactaaaaattgtatttaaggcatatatgaatgatctaggactttgaggaaagaaaccccncaagtctcagtttaaaacacacaaatntgaacattgtcttagtcactttcaatccatttatta

SEQ ID NO: 115280 - DNA, 470 bp, Glycine max
gttgactaactcagaatagacaggtgattgcatagacatgtatggaatacgatcggagttttcatatgctaggaagcattcaaaattatcatttgagaagaactccatatctatgaagtttgtgtctacaatggaacgagaggaaaagaagtgtgtgtaccgtatacgctgttcctctgatgagaataatgatccagagggaatggagggaggaattgtggctttctgtgaccctgaatgccgctgactccgactcgaggttcctttacgctttttcgatggttcctccatttgaggagtttttttgggatttcaatctgttcacatgatagagattgataaaagatgaactttgggctctgcggggagtgatttggacaagaattgagtgagatatggctggtagaaaaattgggggcgagggttttcgagagagaaaaacgttgcacgtttcataatttgaaatttga

SEQ ID NO: 115281 - DNA, 320 bp, Glycine max
  unsure (1)..(320): unsure at all n locations
aagtacccttttgccctcttttgatattnntgacatttccttctgaaatgtacaaaacccttcggattgtgtggcaattagtggtaagtagcttaattcggaaagcaagaatccaannatgtggcaacaatcatccncggtcgaaattagggtatgacagcgaccaaaatgaagtgatgtacattcgaagctttgggctcaagagctccaatcacgtttataccccacatagagaatagccaaggcactgctaagactntcanaggtatgggcggagcataacattatcgcanaggcctgcacttgtggcacttctacat

SEQ ID NO: 115282 - DNA, 448 bp, Glycine max
  unsure (1)..(448): unsure at all n locations
tgtgtgggttccactccagaatccanatccaaaagcatatatagtcattccttgatccatatgggctntattgngcttgtaacatggtcagggggtaagaaggctatgaaagaaaagatcaaagaggctcanagagtgtttaagggttatattgagtaagaaccttgagatccttgtttgtacttctatttatttcaatgttttgagctaggctctactccatttgtcttaaacattaatccttattgcactttggtgccttacttgtaaaatttgaaggagttttgtctttttttgcttcacttgccttttggcgaattttctttttgctttcttattctttngnntgtttttttcattattgcccaacctagacctttgaggttctcaattgacagattangccaaatgaccctggctcttcacaatattttttatgaaatacaac

SEQ ID NO: 115283 - DNA, 273 bp, Glycine max
  unsure (1)..(273): unsure at all n locations
tttgaagaaattagatntaataacattattaatatgtgtaatttttattacatatntttgaaattgtggataatntatntattacaaattatntatagtgtaagtaaaagattaaattatctaggtacaataattgaatttattttaactagtaaaatgttaaattagntgttagttatagttttctattattttttttgttaattagggtgcacaaattttatatattttgaagtatttttatgttaaatgagatagttcctaaaaaattta

SEQ ID NO: 115284 - DNA, 453 bp, Glycine max
  unsure (1)..(453): unsure at all n locations
atgagtgtagatcagttcattgacaatgtggcctggcctggagcctgaccttctattgtgggagataatgaaagtgtacagcccagtcacctcaacaacatgagccagaaccagaaacgatcactcatttgaagccaccatccctcgagctgttgatttcgcaaaaagaagattagagacgagatctaatgaggctgctcatcctaaaccagtgccagcatcagctgaggcaccatttccaggagtggatccatcttcaccttagcatgcatcagactcttccactcctatcttagagatacatgaaggccatngtttaatagcatgcaaccttttcttgaccacttctaggaacttgacacccatcngtaagcaatccgtgaagttctgcgacatgtcgggagtcgaaaggaaacatttattgcgcaatccataaagtttcgtaacatttcc

SEQ ID NO: 115285 - DNA, 264 bp, Glycine max
  unsure (1)..(264): unsure at all n locations
tgaggggtgcgggcttatctctatggttctggagtttaacatgacctccgagatggaagccatntgatcttttaaggccgatagatcggccttcatctgttcctgcacgccctcttcattatccattnttctggatcgagtgttataggggtgccttggtgttntcttagttatgatgaaattcctaaagaaataaacaacggtgagtatgccaccaaaacatgagtatgcaaatggatgatcggagcactcggatccacccca

SEQ ID NO: 115286 - DNA, 480 bp, Glycine max
  unsure (1)..(480): unsure at all n locations
tgatgctagctcctacnggtccggatgtgtgtgatagatcttctatttagtggagtatcgctcccatggctcctaaaccacggtggtctccagaaactcgttaagagttgcagcatcaaacttaatcaacttgccctgtaccctgacctatcttggagatttatcttctgaatcaaacaggttagcatagaattccttgaccaaggccacatcaatgtgattatctggctgcctggtcaaagctctgctccatcgatgcctctcatgctcctgacaagactcatcatactatgtaatctgtagcttaacattcctctctgtgaggatgnttctggcatgcatgttctgctcgtacctctcccacgcgacctcagacacaaacgtggatgtgtcataaggcttctgaggtcgggagtggacactcttctcttccaggaggtcatctacaccaaaacaagcaaaggaattgatgttaagaca

SEQ ID NO: 115287 - DNA, 303 bp, Glycine max
  unsure (1)..(303): unsure at all n locations
cataaacctttcacaggcaagtcaaattcaggcgcataatatatcgagacgctaaaaattgaacaacgaaatctctcaaaaaaatcaaatggtgataactcttcacacgtaggtccgattcaggcttataatatatcgagacgctcgaaattaatcttcggaagctctcgagaatttcaaattgtcataagctttcacacgaatgtccgattcgggcgcataacaaattgaacaacgaaggctctggagaaatnccatggtctaactctaacatagaatctgatttggcgcatacatatagag

SEQ ID NO: 115288 - DNA, 422 bp, Glycine max
  unsure (1)..(422): unsure at all n locations
gatacattattggactcgattataatatatctgaacattttaatcagattcattgtgaacatcacatatttcataaaatcgcttgtgtgatctattacatgattatggtaatcgataaccaatgacaagttttgcatgataagccaagagatgtaactcattcaatggttctcacgatnttcttaaggttataactctttcatggttgaaggattttctcaaggttatatctcttacaatcggtttcttgaccaaacatgattagtctatagaagcaagaccattacttgcatcttaagataacttctttacacaactttttagaataacttttgagatagaaaatttcgctacatagatctcttctttatccttttacaacagcttgcttagatttctgggtatcaaaccttgttcttcta

SEQ ID NO: 115289 - DNA, 393 bp, Glycine max
tcgaccacaacacacgggcaagcgagtaccacagtatctgaacatatacactcaaattcaactgtgaagagccacactttctcataaacatcttcgtgtaatcgaccacatgattatggcaatcgatcaccaacgaccacgtttgaataaatagtccagagatgtaactctctccatggtcttcaggctttctcaaggatataactcttccaacgggttttaaggttctctcaaagatataactcttccaatgagtcttttgaccacacatgaagagtctataaaagcaagaccctgactcgcattctaagatcacttcatacacaaccttttagaataactttcgagaatgaaaactgtgctacatatctatcttcttttccttttccaaag

SEQ ID NO: 115290 - DNA, 345 bp, Glycine max
  unsure (1)..(345): unsure at all n locations
tctcctgggctagcgagcatgcgctaagcgcaccacttatgggctaagcacgaggaagactctggaagaagatgagttgtacaggttcgctaagcgcaccgcttcatctcactaagcgcaccgcttcagttcatccgctaagcgagaaaggcacgcactaagccaaaattcactaatgtgcgctaagccaaaattcactaatgtgcgctaagcggaacataattgcactaagcgcacgagcatgaacaagggccacctattaagcctaanatcagaatttagagagagagtttggactgngattcacagctctggatgtctagagtttctagagagagaaagtcc

SEQ ID NO: 115291 - DNA, 483 bp, Glycine max
  unsure (1)..(483): unsure at all n locations
tcgtgttcggtaaatngcctctgtgcttaaattacgttcgttcttaatgaacaaggggttaattggtgtatgtgttacttaatcacatattgataaaccctaaattgattctcgcttagtaaattaaatcanggttggattaagtggttaactgctaggggtgaaatcctcacaacctaggataagagaataacttatgaatcagaggaaacaacacgtttttaatactattaatttcgtattccaatctgcttgttcttaaattcacaaaataaccccccccccccaattgttactgttactgcaagtatattatgaacatttggtttatcattgctcgttgggaaacgacctaggaacacttcctagttactgcattttaatgtttatttgattcgagtacgacctcgatcaatgggttaaccaaggtatgtaatttatgtttttgatttttaagacttaactntaaaaattaatttttga

SEQ ID NO: 115292 - DNA, 332 bp, Glycine max
  unsure (1)..(332): unsure at all n locations
acaaatcacgtataaacccaccatcctctgttgtccacctccaactgagctcacgtactcccacgtagcccatatcctcgtttctctcaacaacgggtgcccatcaatcctcccaagctttcccacatccaggtaattcaacatccaaatcatcacaaactaacaaaccaagcacaaccgggcacaggcagaaaactctagccagaatccaaaccaaaatcacagctttttctcacttatagaccccagtaacatattcttcgttccaatcccgtaaaccgtggatcgactcgaannatttactggaagtctctagtacatanagtatacat

SEQ ID NO: 115293 - DNA, 377 bp, Glycine max
tttgaatatgtatgagtcgaccaattagtagaatgaaacggactttcgagagatagggaacgactcatgcttctaccatcgagaacttcatccgacataaatacaccttaaaaattattacaacgcaccaatatgacttatgcgttaatgtgactgaccataactaatctctagatagttactcgtcctcacaccataaccgtctattataatattccacaatacgacacatgagtcaaagagaatgtcctgaaatataaatcaagattcatacaattatagtaacagactttatagtaacaatgctcccatcttttggagttcaagtgacaatataaataccagcttgagaaggttgcactcccttagcgcttgtt

SEQ ID NO: 115294 - DNA, 381 bp, Glycine max
  unsure (1)..(381): unsure at all n locations
gctcataagcagaacaccaatagaaagccacataaaaccatatatcactttccactccaaccaaatacacccgagaactgaaaatctgcgcagcatcagaaaatattgccctcctaacctccccaaaacttataaatcaaccaataaaaactgctccaaattcaatggaaaaactgcattcaaaaacaaaaaaaattaatccaaacaaaagtgtctgcactatgatgcaaagacaaatgtgaaaatnggcaaataagaaggcgacatttcctacatggaatctgatcacatacaacaatcttcaatgaaattccttttcctctctgctaccctntattattagagggagcatagaagaaccaagatcaaacaatctatcta

SEQ ID NO: 115295 - DNA, 394 bp, Glycine max
gttcaaccattttctgctttaacttcagaggatcatcatagatgatagccagctgcttctgcaatgctgattctatgatttcagtaagttttttaaactaaaatttagtaccacttggtctattatggtctttcaagtgatatcttgtgctcacacttttcatgaatgctattagtgaatggactctctcaatgttgttcttgtgcttggatggtgtcatgggaaatttcgagaatatgtgttcagaatagatgttgtctcaactttataatcctcatccttgcacttcaattcctagagaattatgatcagaatcgctcttattctaagtacatactgttataaatgagtaggtgggctaattactttattcatgattatgcaaaacccaagc

SEQ ID NO: 115296 - DNA, 298 bp, Glycine max
  unsure (1)..(298): unsure at all n locations
taccctaacctcagatggtccagccctcagcaacaacaacaacagcagcctgctccttccttccaaaatgctgctggcccaagcagaccatacatgcctccaccaatccaacaacagcaacaaccncagaaatagccaacagttgaggcccctccacaaccttccctcgaagaacttgtgaggcaaatgactatgcagaacatgcagtttcagcaagagaccagagcctccattcagagcttaaccaatcagatgggacaatnggctacccaattgaatcaacaacagtcccagaatt

SEQ ID NO: 115297 - DNA, 483 bp, Glycine max
  unsure (1)..(483): unsure at all n locations
gctcagatcttgactagntataaatcctctatataaattgattttatcncatattagtactccgaagtcagtgcgaatcatatcactcccacattttatctctagtatgcattcattatattacctactcctcacgttatgtttntggaggaataacaccataactaaacgttccccaaggcatccctatcgcactagatccaaatctagaacgatgggtgatcaaaaggagacacaggaacagatgatagccgacatgtcggctatgaaagaataaatggcttccatgatgaatgccatgttatgaatgagacaactcatggagaaaaacgtggccaccgctgccgctgttagttcggttgccgaagcaaacccaactctcctagctaccgcgcaccatcctcccccaaacgcggtaggacgagaaaggaacacattgtggcacaacagcaacccccatttgtgatactaaccgggtggcca

SEQ ID NO: 115298 - DNA, 221 bp, Glycine max
tgatatatactgatgacctgattaactctaatacatactgcagagacttaagctgatcttgctgatacaataataaattaagtggttttgactatttattatgtggtgacatacgcacccatgatttgtgtcacaataatgacaagatataatcatgttatcttgttaatcttatatgagcagaggtaatagtttataatatgcaaacttttaatgtgatt

SEQ ID NO: 115299 - DNA, 408 bp, Glycine max
aagacggagagaagtgtgacattgaagtatgtctaacaagactctcattcatcacaggtcaacaagtgttacacatgcttgtattcatagacaaagtagcttccttgaaaacttcttgaaaaacttcttgagaagctagagcttatctatacacacccctctcataactaatctcaccttcttgagaagcttccttaagaagtatcctaacaaagctagagcttagctacacatacctctctaatagctaagctcacctcctttagatgagaagctagagcttagctacacaccctctataatagctaagctcacccccgtgacataaaacatgaaaataagataaaagtccttattacaaagacaacttatattgccccgaaaacaaggctaataccctatactact

SEQ ID NO: 115300 - DNA, 340 bp, Glycine max
  unsure (1)..(340): unsure at all n locations
acatcctttatcattatttttaccataaaatagatgaattattaaaaaattatctatcatctatagttaaaatatgttattatatatgtatatatatgaaatgagtggtcatgaacattnaatcanatatacatagtgaattcactcattataacaagctaccttntactaacatanaatatatttgatccttaatataactcatataattagactcaaaataattatacatggaccctcaatcagagaatattgaagtcttgttactcataattttatagatgtacacagagatgtcatcatacantcattcatcatcggtgctaataaaaaatataca

SEQ ID NO: 115301 - DNA, 464 bp, Glycine max
  unsure (1)..(464): unsure at all n locations
tcgttaagccgctatctcgcataatattttatataatgaatttcaaccgatcatttgtgttgtaatctcgtntaataactggtaaaataaaactaaactgatcattcacactgtaacctctgttaataagaaaaagggtaaataagctccagtcagacatnttactttaaaagttcttataaatgagttgataaataaccaagtgaatctagggctaatatcaactcacaaaccaagcttgtcccgcaaaaaggtcatttgaaaccgttttactatccaatgtcttaaatggtcctctttgcttttatcggttaaaatggaccgttgaaaagtataaaatcaacacactgcataaactntatcacattttaaagaactatgttggtctgatttcctcaccgcaattgagaatacgtaggagcaaaaactccgcttttgtcgaccctaaaaagggagagattgtt

SEQ ID NO: 115302 - DNA, 426 bp, Glycine max
  unsure (1)..(426): unsure at all n locations
atctctaagcaccgcggctgcagctgcaaaatgtcatgttagtgtttctttttcttcatgtttaattgacatagcttgtgtcttcttcatagataaggcatgcacgatggcccttaacactgtatccactcaaattcccgtatgttggaaagtcattaatggtacaaaatagcattgcatgcaacttgaatgtctcatttcgatacccatcaaagacagtaaccctctagtcccaaacctctgtcaagtctttaatcaagggatgagataaacagcgatgttatttcctagttctcttgggctcgatatcatcatagacaacatcatgtattnttacttcatgcacaaccaaagaggtaagttgtaacttactagcacaacaggccacaaactgtgctgagtgtgacactctctagcccatacata

SEQ ID NO: 115303 - DNA, 480 bp, Glycine max
ctcagcttctaaggaagctacctagtctatatatagaagcatgtgtttcatcttgttgtaactatgatgaatgagagtcttgtgagacatacttcaaagttccacttctctccctcttttattccttcaatatcgtgctcccacctctctctttctctccctctttcttttcctccattgaagcatccttccaagcttcttatccaagactcatcgtggtggtgaagctccttcttccatggcttattccctagtggatggcgcctcctctcacctcttctccttagtcttctgctgcatctccatggtgaaaaatcaccattaaaggacctcattgaagctcatagatccatcctccatagaagccacacaagcaaggttctatcacaagtcatacagtcatattattccgaactttagtttacaaattcatgaactgacataactaactataggttcaaaacctagcctatggcagca

SEQ ID NO: 115304 - DNA, 219 bp, Glycine max
atcatctacgtcctaccctatcactattgcggattagataaattcatacgcggatcatgcaaatgcctaagcactacacagcaccaccaacaatggaaacgcgaacgacggcgagggagaagaggcttacctcgacaatgtcgacgagctgaagaagaagacaccacgggactgtccgcgcatcactaacagagctgcaatgctactaaagaacaacgt

SEQ ID NO: 115305 - DNA, 403 bp, Glycine max
  unsure (1)..(403): unsure at all n locations
agtcaacaagttcaagatcaagattgatgtcaagtttcatgagaagaaatcaagaagattcaaggatcaggagaatttcaagtttcatgagaaaaaatcaagaagattcaagtatcaagagaagtctgatttcaagaatcaagagaagatgaattcaagattcaagagaagaaatcaagaagacttcacaagggaagtattgaaaagatttttcaaaaaacaaacatagcacagttgtgtttttcaaaagagtgtttctcaaaattttctaagctaccagagtttttactctctagtaatcgattaccagtttcctgtaatcgattaccaatggcaaagnttgatttcaaaagctcttaactaaattagcaacgttccaattggtttctaaatgggtgtaaat

SEQ ID NO: 115306 - DNA, 344 bp, Glycine max
  unsure (1)..(344): unsure at all n locations
actcttcttgcagccttcttggctcttgtcaagggctcttgcggtagtttcattctcttcccgtaatccggcacactccttctagatgtgtgtagcggccaacttgaacttctccnttggcaagtttccctttcctaactcgcttttgagagcttggacttcctcgtcctcttccggtgcttccaaactctctgtgctgacgactnttaacttggcgagccaatccaaacctcgtatatgaactntcagccattcatggtaaccaccaatggcgccattatgaatgcccctaagttcttgatctttccttaacgggggttcccatgccttatggattctttgat

SEQ ID NO: 115307 - DNA, 484 bp, Glycine max
  unsure (1)..(484): unsure at all n locations
actcagctngttatgatggcaatatcccagcacatggaccgtntcttatgctatgaagaaatagtagtgatntgttatggtgagctntaaggccaccanagcaaaaacagcatacaataccccacacaaaatcttcactttcattggaaccttcctcaacctttcaatcaaaacattaaccggagaattgaagctcctctttgttcccatttgtgtattgcaaaaattcaccaaccaaaatatgggtatgctctctagtaattaatttgctttatggacacacaattggatcatagagggattaatagtagagatagagaattgaacagggagagagagtgaagatagatagagaggtttgaggagacaccaaaagagcatgcagtggatggtgtgctattatgtggcaatgaaattcttgtattgaatcgggaccatttggcactgcggagtcagttaaggaaaggtccaaaaggtcaaatgg

SEQ ID NO: 115308 - DNA, 401 bp, Glycine max
  unsure (1)..(401): unsure at all n locations
aagcactcaaatctttgtttataccctcattatggatttcaagttgagaaggaaatgaaatgggtattttgagaaacttcatctacacaagctatacataatctaaacttgctcaactgggtntacaactaaaaactcctccgaatcaacatttgacccctcaacaccanattaccctagaaatggctcttggtttcactctgggcactcattattctcatttgctcagccccagctttcccataactcctaaatgatattntaaattaggattaactcactttaacctgcaattaccactaaatccagaattagcttttcaaaccctcaaagcctcacatatttccactcatatcactacattctcacttgttaaccctaggttaactctacccttcatc

SEQ ID NO: 115309 - DNA, 472 bp, Glycine max
  unsure (1)..(472): unsure at all n locations
tgtgggagtggtgacttcccgttctcaagggcggcgcttatcttgcctgccctactttacatgtacaaatgattgtttgaggtattggatgtcattctacccttgaccctttttagtgtgctctactggagcactagaatgcggccccttcccagctcctcccaaatagttgggcgatggtaagggcgtttaaaattntgtgtcctttcttcaacatcangcctagtgtgtcaatcttattcttttttcaaatgaagtttcctggaaagactagatgagtctccttgaacagcatgtccaagaagctgtttgagtttgattcaaacatttntcgtcgttttaaggaccacttttttaaggtcctagctactgatttcatggctaatggcatgccactgatgcttaacagggatggggagccccacttcctgttctattggcaggtctatcgcacgaagttcaagtcatatga

SEQ ID NO: 115310 - DNA, 391 bp, Glycine max
  unsure (1)..(391): unsure at all n locations
cagtctatgtgtcaaaatctgagacaatttatcacattgcataggctatgtgacattaaatagccaataatgcacctcactaatagcgttacgtttaaaattaacaacaataattattttgtacaacatatgctaaagtagagactattttttacatttcatagcgataaggactaatttacattaggaatcaaaagtcaaggaccaaaatgtctatttactccattaattcatccaagagtagatttttaacttgagtacaagttaattttaacataaggaaaaatataagctcattattctttctaattntcttgtcctataacgacttcattactcatacttaatggtcaaacaagtcgatattgtatttttgcgccaggtgactcta

SEQ ID NO: 115311 - DNA, 310 bp, Glycine max
  unsure (1)..(310): unsure at all n locations
atttgtaaccttcaccttttccaaatcaagaaatttatcccttgagggttaataagtgtgacaacatataaaggaggacacttaaaaaaggagctcatttaaggttcaagcaaagatgcggccagttcattcagacatttaaataaaaacaaggtgtcctatgataagggtgacaaatgattggatggaaagcactntagttgaaagctacgaaagcatgaaggggttgtcattatataatgatggccaccaccacccttattgaaacaaaaggaagagtttcttcttccactagagaatntttcaatgc

SEQ ID NO: 115312 - DNA, 456 bp, Glycine max
  unsure (1)..(456): unsure at all n locations
tattccctcttcctattgacactatcaaatgggatgaaatgtctctttngccccaaagtaaagtccaaatccctacaccgcttgacccctcccctttccttgtgatttcccacattttaatataatctccaaaagcaatagaccatctatcctttctcttttcaaggctaacgaatntgtttttatctctaggaatatgcctggagcaaccactgtccaagaagcacaactctntcttcttgttgtggagcaaacattcctgcaccagaaagtaataagatcttaggtatccatagtttcttggatcattggttgttaattaccttcctaaaaggaatgtttctctttntgtaacattctgaggtatggtgtccccatttgttatagttggagcatttaattttggccttcttattttggcctacattatggagccctaaatacaaggggcccaaa

SEQ ID NO: 115313 - DNA, 262 bp, Glycine max
  unsure (1)..(262): unsure at all n locations
actcaccacctgaattctatggtgccacccctcctccttatcaagagaatgcaaaaggacacaatctgagagattctcttgattcttgcctttccctatagcataagattccaaaggactaaccgcctgagatatcttctgttgtcccttacagagcttcacaggactaaccgcctgatanagtcttgtcttacacactggagggtcatgctttgtggacaactagagggtcatctactctgagtgatgaactgagaacgag

SEQ ID NO: 115314 - DNA, 284 bp, Glycine max
atatagatatggacatctatatctatattcatattacactggagcaggagtgtaagtgtgcctaagagctcacctgtactagttgtgctctaatatccgaattaattgagaatgtcagcaatcaccatgtgctacgcactgacatatatactgagacactgaaagactgttgaacacgcgataagtgataagaacattattataaaaggaacacactcaatattgtctcgatcatacaaagagtatgagagatcctatcgttctaatatgggggaataaattat

SEQ ID NO: 115315 - DNA, 383 bp, Glycine max
  unsure (1)..(383): unsure at all n locations
aatggaacacccaatataaagtacctgctccagagaggagacaaactcctgtccgtatagagtctttccctgtacaatctttggagtgattatgctagcaacaagtctctttcaattgctcccttctcttgacatataattgatcaagctccacatccttcatatcacagagctttgtccgctggatatgtggctgttaaggtcatatntcaacaatcagttatatcaactaatgcaatggttttaacaaaagttgaaaactacatttaatattgcataactntccattatgaaatatgaatacatacatggcagctactatgctatgcaggtggattaaagatgcgaaaaacacaattgaaattattaatttaaataacaat

SEQ ID NO: 115316 - DNA, 306 bp, Glycine max
  unsure (1)..(306): unsure at all n locations
tgggtgaaccaccagtttgtccaattcanaagccaatttgtagtgagatgaatattgaataattttggattggatgataggatggttcacaaactaattaactgattgaatcagctggttcagtttgattttaataacgatggtcataatcataatgaatactaattgttacaccctctaccccatacatatatgtgctaataataaaaggaaaagaaatcataattaattaanagttcttaaaacacatttaaataanatcctctcaacaaggtaaaagccctcattcacttttttgcatcatat

SEQ ID NO: 115317 - DNA, 481 bp, Glycine max
  unsure (1)..(481): unsure at all n locations
tactaagcttatgtatagttctatttaaatggaatggttatcttcatggtctttgtgtgtctattccatgtgtcaaacaaaatcggttatctggtggtttttttatgttattgggctgttntgctatttntgtgtttcttttgtcttcatggttcctctattcagtagcttgtttgatttctattntgtcaatgacaatgaaatgaagccatgcatggctaaagttgttgagtagaaaagtaaagttgttgagttttacttaatgttatgcatgtctaatgtcttgtgggacaactagtatgtcgaggagttcttctcgatcaacatttttttaacaataatatgtagtctttccttttgttcaacttggtttgttatgtcaagggtaaaanaaatacgtagttatgtaacaaatcatgcaaatatacttggacagaatctctaataaatgaatacaaaaatcaactgcattttgaatttg

SEQ ID NO: 115318 - DNA, 257 bp, Glycine max
  unsure (1)..(257): unsure at all n locations
ccccatgacaaaaacatgaaaatacaaaaaaagaagtccttactacanagactactcaaaatgccccgaaatacaaggcttaaaccctatactactagaatggccaaaatacaaggcccaaacgaaaaagacaacctattctaatatntacaaagataagcacgctcatgcttagcccatgggctcanaatctaccctaaggctcatgagaaccctanggccgttccttggatctctagcccaatctacttggagtc

SEQ ID NO: 115319 - DNA, 464 bp, Glycine max
gctcctaatatctcctacactctctgttgtttgccattcttggatggccttgattatctcaatgtccactttgacccatttctaccaactacaaatcctaagaaaactatattatctacacaaaaggtatatttccttatattggtatagagagtgtttttccttataactgaaacaactttccttagatgtcctaagtgatcatctaggctcctactctacactaaaataccatcaaaataaacaactaccaatctacctatgaaatcccttaatacatgatgcataggccttataaaggtgcttagtgcattagtgagcccaaaaggcatcagtatccattcatacaaaccagacttggtcttgatagcggttttccactcatcaccctctttcatcctgatttggcgatgaccacttttaagatcaatttttgaaaagatattggcgccatgcaactcatc

SEQ ID NO: 115320 - DNA, 426 bp, Glycine max
gaccacacagtggtacctggagatatgtcgtcggggtcaagagaccttggcgacgtcaggtggggtgctattgcccaaaaccaagcttgaccaatcccgacccaacccgggcatagtctgtcagtgagaacctgtgatgtacctaaacaggcgagctcctggctgtctacagataaaaggaaaacaagaccacaaagcaaggaggcttgtggtggctggccagctgtgaattttgtgtaatatgtggattgtggcctctggtaatcgattaccaagggtgggtaatcgattacaaggcttataattgaagacaggaggctaagatggtctctggtaatcgattaccaaggggtgtaatcgattaccaggcttgaaaacgaggtcaggaagctagggaagcctctggtaatcgattaccagcctgtg

SEQ ID NO: 115321 - DNA, 401 bp, Glycine max
  unsure (1)..(401): unsure at all n locations
ctttagagacacttataaacacattacaatataccaataagtacatcatacgagctcggagaccaatatgtctttagagacatctataaacatattacaatataatgaattaatgattgtctgttcgtccctgataaaatcgagtggagcttgaagaccaataaatatatcatacgaaattagttaaaagaatctctcaacgaataatcatagtgaaaattcgatcnttatctgagtctaatagtaatataatgcaaatattgcaatgttattgtatataataatgattatatataatataactagacaatgatagtcttatatattcatattgatgatgagatgaatattgatatttgatcgtatataagatatatttaataatacgatcactatatttt

SEQ ID NO: 115322 - DNA, 487 bp, Glycine max
  unsure (1)..(487): unsure at all n locations
tgatctaagctcgctgggccacacttagcgtgaaaatagtangttatatatctcatacatattttggagaagatgctataattggagattgagtgtgctgatactcaatctcagagcctaatatgtatgtggcgtttcaataccagcatggagtgaaagaaaagacatgatcttgcgacgaatgctttcctcagacctaaacttatgcctactacaatgaccagaactcgtttgtagtgcatcctcgtcacgaccccacatagtctgaccgatgcgattggtgtgtaagcgattgtgtgacgtgagatgaaacgcagtactagctactgatgtaggtggttgattggacaaatcgccttatacacttgtgcttacgagagagacagtgacgcatgaggattgggctagatgaaccctacttgctacagggcttgctggccagctcacttcatatgttctacttgataatcatgatcgtaatttgaaa

SEQ ID NO: 115323 - DNA, 336 bp, Glycine max
  unsure (1)..(336): unsure at all n locations
acgtctagaaactcatccgaagctgttgactctgatacatcttatgatgatgaacgctcanatgaagatgatcacatagctttcatctcacagaagttaaggaacatgtggaacaacacgaatggatcagactggaaaggatccaagatagcatatagagaaggagaggacaaggatagaagtttcatcatatgctatgagtgtaagaaaccaagacacttcaagttagaatgcccagaccttgatgagtccgatcacaagataaggtacttcataccaaaggactagatagtgctagtgagcacataggacgagcaggactacacattgtccatt

SEQ ID NO: 115324 - DNA, 371 bp, Glycine max
  unsure (1)..(371): unsure at all n locations
aactctcanctcacacaaggctatatcatcaatctaaacttgctcatactggttgtacgacaaaaattctaccgaatcaaaatntgactcctcaacacccaatcttaccctggaaatggctctcgccttcactgtggtcatgtttttttctctcttgcacaacccaagctctctcataagtcctaaatgacatttcaaactatgattaactccctgtaacctccaaataccactaaatccagatttggccttccaactctcagagcctcactctttttccactcataacactacattctcactttctaaccctatgttaactctacgctttatccctaacagattttcatcaacaatgttcggcacataaa

SEQ ID NO: 115325 - DNA, 451 bp, Glycine max
cttgctctttcttcctttttctgacctctctaaagcactcgggttctccatcatctgttaggatcacatactcaataagagaatacctcttataaagttgtctttccctattagacctcctgataattggtaaatatgagctcattttgataataaaagtatattgaaaatatctttaaaaatatctatttaccagttatttttggcttatatgttaggaattgatatttttcttatttacggcttgcagatatgaaaaggagggattaaaagcaaaaaagatccagataatataaaaaatataaataatgaagatttttgacatcaggcccaagtccactccaacaactataaaaagggagtcaagcctaagtccactccagcagctataaaagtccactccaacagctataaaaatggagtcaagcccaaagagaatagacacaccgtg

SEQ ID NO: 115326 - DNA, 393 bp, Glycine max
  unsure (1)..(393): unsure at all n locations
cactgagagtgagaacgcgtaaccctctaatggtgagggcgtgcagccctttgaatgcgatggcgtgtatcccactgaatgtaaagacatgtagtcctctaaaggcaaggacgtgtaatcctctaaaggtgaggacatatattcctcggaaggtgagggcgaggacatgttgtcctctgaaggtgagggcgtgtagccctatgaaggcgagggtgtgtagccctatgaaagcgagggcgcgtatccctctgaagataangacgtatagtcctcggaaccgagggcgtgtagccctctaaaggtgaggacatgtcatcctntgaagatgaagacatgtaatcctcggaaggtgagggcgtgtagccctctgatggcgaagacatgtagtcctct

SEQ ID NO: 115327 - DNA, 287 bp, Glycine max
tttgtgtttgaataaattagtatttaatacacccttcactctgtcttgggtataattatatgatttagttattgtttatgaatgttatatatcgttcctgcacaaatatgtcattctggctagagccctacacagccgacgcaacacagtgctctacaatgagatattgaaacactgatgcataaaatctttgaagatccatagtatgacatgtttctaggataaatcatcggaaaatgatatgattacttgaattatctacagatactttctgctgtgttgatata

SEQ ID NO: 115328 - DNA, 384 bp, Glycine max
  unsure (1)..(384): unsure at all n locations
ttttctgtcttgcatanatntctcccttaccatcggtttcttatctagccaaaaccgagcattaataatgcctccaccaactccaaacaccaatgtccatgattttattgttgaataaaaaataataaaatggaaagacactcaacactatcggacaattcttcattgttaacatgcaagaaactactcaacttctactcataacaaaataccattaaagctttaaaaaaaaactactgtataaaataataacctctaattttcatttgatttataattggtagataccagtccatctatataatcctagaagatgtaattaatgagtataattatcaatgtaacattctagattttttagagacatacacgtatgtatttaac

SEQ ID NO: 115329 - DNA, 437 bp, Glycine max
  unsure (1)..(437): unsure at all n locations
gaagtgttccattactagtaagtatttgattgctcctanggccctcgacaatggtcccaatatgttcattccccatatggcgaaggactaagaggagcttaagctatggagattgtcaagaggggtgtgtggaatgtcctacaaactcttggcatcatctgtacctcttgagtaagtgtaaggagtctgttctaagtgtcgtccaatagtagttggcacataccatnttagtggcaagggatcatccttcagtgtgaaggctacagatcccttcatgaagttctcacatgacataattttcctattggctattcaggcacttgagcaagggtgttgtcgaccctcttttgaatagctcgccatcaaggatgatgtcgtagctagccttctattttaggcatcgagctacattcttgtctgatggtaaccacttcccc

SEQ ID NO: 115330 - DNA, 248 bp, Glycine max
  unsure (1)..(248): unsure at all n locations
cccatgttgtggctgccattcctacatggccaaacttcccaccagcccaacaatgtcattgctcagccaatatcggcccttctcattacccaccacccagccatccacaaaggctatccccaaatcatccacaaagtttggtggccgcatgttcgcttccggcaagtgcaccggattgcacaagtagtataaaacgataagaaccaagtatcgaactctcanggaacttgtgtacttggaagctattc

SEQ ID NO: 115331 - DNA, 466 bp, Glycine max
  unsure (1)..(466): unsure at all n locations
tactagctcctgaagctgagctagctatcacaccctctatactttttacctcctgagaagctcctgagaactttcttgagaagatccctagagaagatagagcttggctacacacaccccctctaatagcttaattcaacttcttgagatgagaagctagaggctagttacacatacctnctataatagctaatctctcccatgccanaataaatgaaaatacaaaaaagtccctactacaaagactactcaaaatgccttgaaatacaaggctaaaaccctatcctactagaatggccaaaatacaaggcctaaaagaaggaaaaacctattctaatatttataaagaagagtggacccaaccttggcccatgggctcagaaatctaccctgaggttcatgagaaccctagggccttctttagcagctctagcccaatcctcttggaatcctctatccaataccc

SEQ ID NO: 115332 - DNA, 399 bp, Glycine max
  unsure (1)..(399): unsure at all n locations
tccttcaaatcgattcagttttattggacttgnntggctgcgccttacgcaacttaaccgctaacgcgcatagtgatttcgcttacgcgtgcttctcgctcacgatggactgatgggcgcttacggatgaaccttcctcagcgaactgcatactcatcttcttcagattcttcctcggcttaccgagaatgtgcgccagcgatggttgcttgccatagatggcttagcagcgtggaaaatacacttcacaactctctaataacctaaaattgaagaaaatgatattaaacaacaaaatggagtactaagcattattacctatctttacaaaagtattacacactacagattaccttaattggagagttggaacaattataacagctgcggcgctcaact

SEQ ID NO: 115333 - DNA, 267 bp, Glycine max
  unsure (1)..(267): unsure at all n locations
ggcgagtggaggaacgccccggcatttacgcaacaagcataatgtaaacctttacggtttaaaagctctatagttgggcctaggctttagagttntcattntgttaaggctctgtgtcttttgtttttgaatntataacacaaggatctttcttcatctgttcctggtctctacccattctcattcatttgcatgtgtacttctttttctaaaacggcagattcgatgacgagtccnccgaaggtactaatacctgngacccgtcta

SEQ ID NO: 115334 - DNA, 358 bp, Glycine max
  unsure (1)..(358): unsure at all n locations
tttagatgatatttcanaatcccttagaagatacgcatatctatgggaatgactctaatgaaaagatgaaggaagcaatgaaaactcttaagatnatgaacttagagcaaataatgaacttccagagaacggaaagcctcatgagatcatcccctcgacaacattattggtgatatatcataaagggtcacaactagacattctcttagagatttatgcaatatatggcttctgtatctgtgaatggacctaacatataaaaggaaccatgatagatgataactggatcattgccatgcaagaagaactgaatcaatttgaaagaaacaatgtgtggagaatggtagaaaaacctgaa

SEQ ID NO: 115335 - DNA, 325 bp, Glycine max
  unsure (1)..(325): unsure at all n locations
cattctggtttaggggttttgtgatgatgcttatatgctgaaattgcttatggaaaactgttagagatgaatggtagaattaacctatggttagaaagtgaaaatgtggtgttatgagtggaaaaagagtgaattnttgagggctggaaggccaaatctggatttggtagtatttagaggttagagcgagttaatcttagctcgaaatgccatttangacttatgagaaaggttaggctgtgatagagggaaaaacaaatgaccatagtgaacaaagagccatttctagggcaaanttgggtgttgaagagtcaaattctgattc

SEQ ID NO: 115336 - DNA, 389 bp, Glycine max
  unsure (1)..(389): unsure at all n locations
atggatattctcatttgttgatgaaacccatgatcatgctatccttaaggtcatggagtaaatatgtntcttgtttatatgtagatgatattttacttgcagccaatgatcgaggtttgctacatgaggtgaaacaatttctctctaagaattttgatatgaaggatatgggtgatgcatcttatgtcatcggcattaagattcatagagatagacctcggngtattttaggtttatcataggacacctatattaacaaaattttagagagatttcanatgaaagatngttcactaagtgtcgctccccttgtgaagggtgataggtttaatttgaaacaatgcccacagaatgactatgagagggaaaaaatgannaacattccttat

SEQ ID NO: 115337 - DNA, 485 bp, Glycine max
  unsure (1)..(485): unsure at all n locations
tcttgcgtacncgctatgggtgctcagaaaatcccatattcttatccctcttattactagctattgtgaattctttagttcctgaatgtacaaccttcaaattgttgctcgttcccctatttgttttctgcaaaaaagaaaataaatctgaaacaattcagactgaattgttatcgttattattactcgaaccataaggaataacagctaaacaagtaatttaaaatgtaaccttttaaatttgtggtatttttttaattacaattttacttcaatatctaattttgttaatctacttaggtcatttttttaatataaatatgaatttaaacgtgatctactgataatataaagtacttgctaatcacaaattatgatacctatcattntaaattttaacttaattttataaatattaataaatttataataagacaatattttaacatgtgttgtagtgattcctttgacttcacttataaatc

SEQ ID NO: 115338 - DNA, 429 bp, Glycine max
  unsure (1)..(429): unsure at all n locations
aatgagctggagaacaagaatgtggcatttacctggggtgaaacacaagagcaagcctttgctttgctcaaagaanagcttactaaggcacctgttctagctcttcctgacttttctaaaactattgagctagaatgagatgcctctggagtgggagttggagctgtattgttacaaagtgggcaccctattgctcatcttagcgaataacttcatagtgccaccctcaactaccccacctatgataaagagctttatgccttaataagagccctccaaacttgggaacattaccttgtgtccaatgaattggtcattcatagtgatcatctatcacttaagtacattagatggcaaatccatgttaacaagaggcttgcacaatgggtagagcacctatagcatatttcatatgttatcaaatacaaa

SEQ ID NO: 115339 - DNA, 423 bp, Glycine max
  unsure (1)..(423): unsure at all n locations
ctaacgagcgtacggtaagcgcaacactcatgggctaagcacgacgacgactctggaagaagatgagctgcacatgttagctaagcgcaccgcttcatctcactgagcgcaccacttgagtccatccgctaagcgagaaaggcacgcgctaagcctaaattcattgatgtgcgctaagcggtccataattgccctaagcgcacgagcatgaacaatgccaccaatttaagcctgaaatcagattntagagagggagtttgggctgggattcatagctctgcgtgtctagagattctagagagagagaggtccaagctccaaagagttttgagagactctgctgtataaagatctgcagagactagagcttgaagcaggagctgtgttgagagcttgagatgagtttaagagtgattgtgagat

SEQ ID NO: 115340 - DNA, 244 bp, Glycine max
  unsure (1)..(244): unsure at all n locations
tagatgtcttctaatatttgcttactatgactacattattatgaaaatatgtatatgactatgtggtcttatatatttatctatcatgttctgcttcatgttggttagatactcaatgaatgacttgtgaatgattagtagtgtatgcatgttctatatttgttacgcacttcgactntttgttgatgcaaagggggagagaaatacggattaaatcaagaactcacataagtaattaacttaa

SEQ ID NO: 115341 - DNA, 455 bp, Glycine max
  unsure (1)..(455): unsure at all n locations
cttcgccacaaaagatggaaactggtctaaaatatgcaaatttgatcatgctgcttngatgaatgagaanactagggcaaatgacaaggatgagaatgaggaacgaacccgtgttgtggctgtcattcctacatggccaaacttcccaccagcccaacaatgtcatcgctcagccaatatcggcccttcttcttacccaccacccaatcatccataaaggctatccctaaatcatccacaaagtttgctagccgcacatccaatgtaaagggcaaaccgaaacaccaaccaagaaatgaattttgcagcgaaaaagcctgtagaattcaccccaattccatcgcctatgctgatttgctcccatatctacttgataatgcaatggtagccataacccctgccaagttcctcaaccttcatttttctgaggatacgactcgaatgcaacatgtgca

SEQ ID NO: 115342 - DNA, 257 bp, Glycine max
  unsure (1)..(257): unsure at all n locations
tagagaagtatttacactagcagcgcgcataaggtaaactgtacaaaagataaaagagaacttcatatgcatcactcanacatcaagtaaaaaaaaaacttaacatctctaatatcttatatcaagagattataaatattcaaatattaagacagaggtcaatatacctaacactctnattggacctctagtacccctgggactttcatttatatatatatatatagagggatatatatatatatatatatactata

SEQ ID NO: 115343 - DNA, 249 bp, Glycine max
tttcgcctaacctgtttagaaagcccatgtctatttttatctttctgttcacatacactataagtattggtttttgttgtgaataaaaaaacttttggcatttgataaatattggtgagagtttctctctgggttccttgttgaaccaattatcagacttatcaaggtaatccttgtggcgtctacccacacttatcttactttatcggaagtggcgtctaccctgacttatctttcttcaccggaagt

SEQ ID NO: 115344 - DNA, 268 bp, Glycine max
  unsure (1)..(268): unsure at all n locations
ttaactctccttatttgagagcttccattgataatcttgctgctactcgtttgccaattnggattacagaactagatgttgcaagccagcctaagcaggtaaagttcaacaacaccaaattcatgttattttgttctccagtttcttatttctcgataaactattagatagtcttgaattagaattaccagcatctatagtctcaactaatccttagatgataagtaatctgaattttacatgtatggaaaaagtaataaaactcaac

SEQ ID NO: 115345 - DNA, 197 bp, Glycine max
  unsure (1)..(197): unsure at all n locations
ataaatgaatctttattcttcttctcttgagagaattatttggagttctttctaattnttttttcggtatataactnntgtaaaatggcagaacttggcatggacatcactggtccaacaaaaagtccaaaatcaagtgagagagagtttctgaaactaatcagtgtgttgaagattctatcttttgtttctttctg

SEQ ID NO: 115346 - DNA, 447 bp, Glycine max
atactcagcttctcaggaagcctcttatgaagcttctcaaggaagctactatgaagctacctcggtaaaatgctgccgagccttctttaaccattggatcatctctaaatttggtcttccgcttcacacaatatttttccatgacctgaccgttgggatcttggagaagatgcgtagagtgtgcgagaagtttccgtttccgagagcattgctcacttgcgcgttttgagccttgtagtccaagtagctttggaaaaatgtcatttcttctcctttctttcttcccaaaccgttgtcaacgttccaagctatttctccatcacccacagtcaccattagccaccacaaacctccgttgttctccgttgaaaccccacaccgacaggaacccttcaattaaagcggaatcttccaacttgtctcgtggtttcagtagagaatgaaacc

SEQ ID NO: 115347 - DNA, 291 bp, Glycine max
  unsure (1)..(291): unsure at all n locations
aagagttataacttttagaaaaacctacaaaccattggaagagttatatcttttgatttttattcaaaacttgtcactggtaatcgattaccaaaatcatgtaatcgattacacaaagctntttatgagaggatatgactcttcacaattgattntgaatttcaacatttagatacactggtaatcgattacanccatttgaaatcaattggaacgttgcaaattcagttgagagctgtntgaaatcaaactttgacactggtaatcaattacaggaaactggtaatcgat

SEQ ID NO: 115348 - DNA, 401 bp, Glycine max
  unsure (1)..(401): unsure at all n locations
gaatttcactgtcacagattgtattaatatagataagattgtttcanggtatctgaaatccaagtgggtcggaccattcatcatncaaagaagtnatgccacatggagcagtgatattggatgacccaactaccanaatgacatggaccgtgaatggcaacataattaaacactagttagatggatatttcaagaggctaacctctattgtccaactgcaagaggcttgaaccacaacaaggacgtccaactataaagacattaaagaagtgcttctaggaggcaaccttgtatttctgaactctacttntaaatttcntttcttctgatttcataattgtggttgttaaatatttgtttgttcgaacctattttaaatattttaggattgtcatttttta

SEQ ID NO: 115349 - DNA, 352 bp, Glycine max
  unsure (1)..(352): unsure at all n locations
ctacaaaaaataaataaattggaataatcttaatcacattgacacttnttgaggtctttttcctaaaacgacaaagaagaattgatcaccttgtatactggtgcanaaaccacctttctcaaatcttnngtgttattgagaagttatcagtggcaatgactattgttgaaaggtcaagtaaggggagatcgantatttcttcacttcctcnccctatttgatcacgtacaatatctgaatactctgataaaatggaacaatggcttcaatttagttaaaggcacaatgtatatgatagtttagtcaagtcaataactttgcgcattacatctttgcatttttatcaagatgt

SEQ ID NO: 115350 - DNA, 183 bp, Glycine max
  unsure (1)..(183): unsure at all n locations
attcctcgagaagcttcctcgtggcttctttgagaagctctctcaagaggattctntgagaagctagatccttatctatccacacccctctattaactaaattaacttccttaanaataattacggatganaataacgcaacaaataatcaaacatcaaacataattactaataatatataga

SEQ ID NO: 115351 - DNA, 483 bp, Glycine max
  unsure (1)..(483): unsure at all n locations
agcttagaagcattcaataacttaatatgaagtttattgtgtantggtggattaaggattctaagatggaagttcgggttaaactgagttggcaaaagttaccaacgtttgtttttacataattgagttgttagaatgtgcaaacatattgcttttacggaactgagttattatgcaaaattccagtgtgcaaatgtatttttgggagtaaccaaacatgtcaaaactgaatttactctgcaaaagtacattcaacacttaaaaatactttttgaacgtttaaccatttggtattccattttcatgttatcgcgtcagttcccttcatctaagtaatagatactcactgatcaaaaaaggaaaagctacctataatttctcatattcacttaaaggtttaaatgcagaatcaaatataggcgtaatgattgacttctaaataatactaactcaaatgtgcaaagtattgatgtcatcttttgt

SEQ ID NO: 115352 - DNA, 293 bp, Glycine max
  unsure (1)..(293): unsure at all n locations
ctgttaatgtcgtgactagaagttttntggtgtgaccacatcgatctttacctcagctccatgttcttctttgagaattctattntgaaacaacaacgacatgntctgtaataacttatagtataataacttcaacatgatacaaacacaatttcaaggtaaagcttgactanaaaagatagtgcagtgactacctatattgtgtgaaantgactatatagtagatcaaatctcacttacaatacctanacaattctgtggngacncaaaatcatatattcatcaataccatg

SEQ ID NO: 115353 - DNA, 364 bp, Glycine max
  unsure (1)..(364): unsure at all n locations
tctgaagttgagagctctggcttattttttgctaagctggaatggcgctgaagtataagatgcanggatgccatctattggtgcataggaagaaggaacatcagctgctttgagctttgtcttccttgtctctggaaaaataattggttgatcatttcgcattcaacagctccttatgatataagctaagtaatgatcgggctttaggtttcatatgagggtagggcatcagatcccactcccctcgatctacacaaggctgtgattaaagttggaagcctagcgagaagagtagactgtgctataggtcattttgtcagagataaaccgccaatgttatgttcttcttgtgactaaccataac

SEQ ID NO: 115354 - DNA, 410 bp, Glycine max
gctacaagctcaaaggtgatcctaatatttccatgtataaaataaagggaagggtattcgacccgtgctcctcttcgcgcatgcttacttctatgctgaatcaaatgaagtctgatgttgaaagcatgtataaaatatgatactttcggagaaatatttacaaattgtgaataatattgcagaaataggttcctttagacatgaaagctttctttataaagaaaaaaacattgtgtgttgcctaaatgttactactaaacatttgcttgtctgcgaagcacatgatagaagttactggggcattaggtgtccataaactctataacctttcagaactttatattgtcctctatgaaaaagatgtgcagaaatttgtgaacattgcttgtatgtataaagcatattctaag

SEQ ID NO: 115355 - DNA, 310 bp, Glycine max
  unsure (1)..(310): unsure at all n locations
tagcgtggataaccattaatggtgtcaaaagctttcaattttggaacaatttcatgcagaatattttatttatccctttatgctttatngagacattcttagtcaattccaagtgtgtacataatagtttgtgaattataaagaagaagtgaagttgatttttataatgagataatgaaattcactttcatataagaatttggtgtggtgaaagtaagaattcaaggtgttgaaatatcttactatgctatttgaactatagttgggtccataagtgtaatgaacatataaatggtgaatttatgatatg

SEQ ID NO: 115356 - DNA, 340 bp, Glycine max
  unsure (1)..(340): unsure at all n locations
aagaatataaatgctgtcaaaacatggatgatgtcctaaaaacatcaatatccaagaaaaccatggatgagatcacaattaaaaagcacaactacctatctttcagagtcctcttggcaaatttggctggtctccttatgtggaggggtgttggttaataatcttatacttttgccctccaacanacaacatatcactaatcctcttttcattaatccacatttttatggtattggataaaagatcatgggttgctcacctgcctacactactccttctactcctgcttctnctacttacgacgcatcggcttcgacgtttgccctggaagcgacactct

SEQ ID NO: 115357 - DNA, 218 bp, Glycine max
  unsure (1)..(218): unsure at all n locations
ttctcttccttctttatttccttcaatttcgtgctcccccctctctctttctcttcctctttcttttcctccattgaaccatccttccangcttcttatccaaggctcatcttggtggtgaagctcctttcttcatggcttattcncctagtggatggcgcctctctcacctcttcttcttttgtcttcgctgcatctcatggtggaaatcaccatta

SEQ ID NO: 115358 - DNA, 428 bp, Glycine max
  unsure (1)..(428): unsure at all n locations
tctcatagtataacactcattggtaatgtgtctactatcatggttatcatctccctctccatcatgggaggtgctacttgggctgccaaatcccttcacctctatgcattctccttgaaagactcatgctccttcttgcacatnggttgcaattgtgttctatcgggagccatgccaaagttgtattgatactgcctgatgaaagcagccattaagtccttccaagaacggatctgggaagcttccaggttattatagcaagtgattacaaccctagccaaactctcttgaaaaaagtgcatcaagggtttctcatcttttgagtatgnccccatcttctgacaatacatcttcaagtggttcttgtgacaagtggtccctttgtacttgtcatatctagcaccttgaattgtgagggatgacgatgt

SEQ ID NO: 115359 - DNA, 366 bp, Glycine max
  unsure (1)..(366): unsure at all n locations
aatttgatcattctacttttgatagtgagaaagctgggcaaatgaagaggatgagaatganggagaaacctatgctgcgactgtcatttctacatggccaaacttcccaccagcccaacaatatcattactcaaccaatatcagctcttctcattacccaccacccagtcatccacaaaggccatccctaaatcaatcacanagtctgtctactgcacttccaatgacgaacaccacctttagcacaaatcagaacaacaaccaanaaggaatnttgcagcaaaaagcctgtangaatcaccccanattccagtgtcatatgctaactngctcccatatctactcgataattcaatggtngctata

SEQ ID NO: 115360 - DNA, 497 bp, Glycine max
  unsure (1)..(497): unsure at all n locations
ctaagcttagactaaagcaacacagaatctaggtatccaaaacccctcatttatatggatttcaaggttngagaagtgaaattgagaatggngtaaatntggagcaaactctcacctcacacaagtctataacatcaatttaaacttgttcaaactggatttacacctaaaattccaccgaaccaaaatttgactcctcaacacccaattttaccctagaaatggctctttgttcactttggtcatttgtttttctctctagcacagcccaaactttatcataagtcctaaatgacatttcaagctaggattaactcactttaacctccaaataccactaaatccagattttggccttccaactctcaaaacctcactctttgtccactcataacaccatattctcactttctaaccctaggttaactctacccttcatctctaacagtgttccataagcaatttcagcacataaacatcacagagcattcatccat

SEQ ID NO: 115361 - DNA, 400 bp, Glycine max
gactgaaaaaaaaacctgttctatataaactaaaatcttgaataaattcaactcatatgacatggatctatagcggatattattcttactagctcaagagtaaaagtctaataagcctgggtaccttcctaaaattcactgtaccgaagcattcagatatatcactagtcccaaaaaataattatttactatacataataatctataaatgattgcgtaatcttgttgtacttaaactgtaataattaatttctagagaagtaggcgactctgtgagaacattgtttaatgtccaagaggtgaagggtgaatcacagagtggccgccaaagttatggaggagattatggcggtggcgcgtgaatttcatgacacagcacaagatgtgaaaggtgagttct

SEQ ID NO: 115362 - DNA, 262 bp, Glycine max
  unsure (1)..(262): unsure at all n locations
tcgatttccagtagcaaaaatgtttttcanaaagctttctatgaatntacaacgttccaattgatttcaaaaagctttaatcgattacaatgttttggtaatcgattacctgtgtctttgaacgttgaaattcanattcaaatgtgaagagtcacatcctttcacataaaagctttgtgtaatcgattacactcgattggtaatcgattaagagtgattgtttttgaataaatcaaaagatgtaactcttcaaatggttttt

SEQ ID NO: 115363 - DNA, 314 bp, Glycine max
  unsure (1)..(314): unsure at all n locations
taattcagtgacaaaatctccctccagtgatatagttggaaatctgtggctaaatacatgagggtttcccacttatcacctngatgacaaggtgagtcttttattgcggggtattgattagcataagccacacatcaccaaggtgtacacncgcaaacaacgaacaagagaagcaataaccatggaccaccaccagcaacagggcgcacaacacccaatgtgtgcataccatccaacagttactactcacncaaaggatgcaaggtcagaagatgtgaatcaaggggacatgatccttgngaacagttacaacc

SEQ ID NO: 115364 - DNA, 465 bp, Glycine max
tactcagcttaatataaggttgggactaagggattatgtttattattatggagccccttggaactctgatgaaactatatgagtcttggtgtttatagtggaatagataaagatattgcttcctcgcaagatgatatttgttatatatgtcctgaagatcaatactgagtctaagagaatgaaagatagacctttaatgttggaaccttctggttgctaatacacaatgtgtgactacgttatacacataataaatgtctggcaataattatactaatactttaacatagtctaactacataatacaacaattctatggatattgaggaaatatgtgagcttatcttgatttgtaaccaagagattctatttatgattaagtatacataataaattaaatactattgaaggttagtaatgattctatcattataatcagccttggctgagtgctcatttctattt

SEQ ID NO: 115365 - DNA, 317 bp, Glycine max
  unsure (1)..(317): unsure at all n locations
cacaccccctataataacttaactcacccccatgacaaaaatatgaaattccaaaaaaaacgtcctactacaagactactcaatatgcccaaatacacgctaaaccctatctactagaatgaccanatacagggccagacaaggaanacctatttaatattacaaagatagcggctcatacttatccatggctcgaaattaccctaagctatgaaaccctaggcttccttggatttacccaattactgagctttaccatgccttacgatagatgatacctgcttgagaaacgtctgtagttgactacatatgatctc

SEQ ID NO: 115366 - DNA, 483 bp, Glycine max
  unsure (1)..(483): unsure at all n locations
aaatactcagctgggaataataatcagcgtgagagtacattacttatatatgtccacttgcatggacctaacacangagagtgcgcattatatgtaaaattcacttaaaaaatagctcaaaaataatttgacaaagtcatctatatatgtacatgtgtgattgacgacatagtaacttatttgggttacagttgagtaccattattgaaggatacaaaactcttgtggcttcaaacaaatcgaagagattagctcaagagttaggtgtatagcgactatgactattgtcttataaactaatactcaatttaaactaataatttctacagatatacaaagtggtttgaaagcatgatttgtgacttacagaaagttatgaagcgtttgaatgcttgattgcgcatgaattctctaaagatatacacacttaaagaatttgtttctcaagatggacgttttccttttgtttgtcggtgagataca

SEQ ID NO: 115367 - DNA, 222 bp, Glycine max
  unsure (1)..(222): unsure at all n locations
tgattggtttcggaacatgcatatttatactgaaacagaaacaaatttcttgtgattcagcatccaatccattctcttcttttctgcgagttggaaatgcagtcacacatgccgganatggaatactatcactattcttaaaccagtagtgtaccatntcattacaatntctggcatctatatacacacgcctaacccacctttgcccatacccttttcatg

SEQ ID NO: 115368 - DNA, 476 bp, Glycine max
tactcagctatcgtatcttcagattatatatgagatcaatatatgttttctaacaattagtgcgtgttggaatgacccacaaattagttgttggtatcaactgcattagagtcaccgaacaccttaattggattgaacaaataataaaataatacttataataaaaaaaaacatgtatttattagaacaaagaaagggtatcttttcgtgaagtaaaaggttcacgttcagctttctatataagggaccaaaaaactctacgaattacaaccacgataagccttgtgttgtgtgtgtgcttgcttgtgtccattttggtggctgaagagagaaaagaaaggcaaagatgggtatgcgagtggtggtgatcacaagaagggatgtaatcaacgacaattatttgtccaacaagaacatcgctggccgtttgattcccaagaggggccaagtgaagttgggaattgtggtgggcttgt

SEQ ID NO: 115369 - DNA, 143 bp, Glycine max
tacagaaatttaagctttgaccgtggggatctgtgaacaatattagaacccgagagtgcaacccttgctgtgactaacacttgcacaccatgtttctacataactggcaaaattaggtgcacaattagacagcggatgctgcg

SEQ ID NO: 115370 - DNA, 434 bp, Glycine max
  unsure (1)..(434): unsure at all n locations
tctacctaagagttctttcacgaggtgganggtgagccatgttctcagtatgaaaattagtagttgaatgctcaaaatcagaatattcagaatcaccaacaacagaatactcagaatgctcacaatgcacgaaatgcacagaatgatcaggatgcacactatgcctaanctaattatgaaaggttntatctatttcaggatcaaaggtttgaaaatcacctggattggccctagtcatgcactatatgcagcaaataatgtgttctcaaacaagcaccagggcaaggttaaaactacaactatagtcaaatgatatccaaatgagctgaaattttgtgagcaacaccctaaaatcatgaaaagatagcacaaaaaaattcaaacaaaaattcaatgtctaactatggaaactacnnttagcaaagttagaaaaa

SEQ ID NO: 115371 - DNA, 330 bp, Glycine max
tcaaactctgaagagagtatgatgaactaacggacgttaatatggccaccgattaaaccttggaatgagataccaagaaggcccgttaggaagaacacttccaaaacaatgtttgaggggctttatatggcaccaatagtgagctcaaactatgaagaggtgaaaggaatcatcatgggtctaaagcatgatcttgaaggactatctatatgcttgactatacgagaaaagaaatttgttctatcatcttaagtgagactaaatggaatatgtggttcttcatcgatgaatgcatagataaacttaatctaggtgggaactcacgaacaa

SEQ ID NO: 115372 - DNA, 347 bp, Glycine max
  unsure (1)..(347): unsure at all n locations
ctgcagctttctagtcgtctgtaggatgatttgtgtaaaaagcgcgatgctactgagactgttntctccatgtttagttgtgtgaacttgtattntcttcacagatggggcatgcatgatgacccttaacacttgtaaccgctgagattcccatatgtggggaagtcattaatggtacaaaanagcattgcacgcatttcaaatgtctccttgcaaaacgcatcanacactacaaccccctcgtcccataactttctcagatcttcaaccaatggacttagataaacatcaatgtcatttcctggctgtcttgngcccgatatcatcatagacaacatcatgtattt

SEQ ID NO: 115373 - DNA, 474 bp, Glycine max
tatagaatatataataagagaacaatgactattgatgtatctattcatgtttcctttgatgagtctaatactatctctccaagaaaggatgttctagatggtattgcagaatctttagaacaaatgcatattcatggacaagattctaaaggaaaaggagaaggaagcaatgaagatcctctagtaaaagtcagagcaaataatgatcttccaagagagtggaaggcttcaagagatcatccccttgacaacattattggtgatatctcagaagggttaacaactagacattctgttcaagatatatgcaataatatggctttcgtgtctatgattgaacctaaaaatttaaatgaagacataatagatgatcattggatagttgctatgcatgaagaactaaatcagttggagagaaacatgtgtgggaactgtaaacaaacctgaaaactgccctatcataagaacaaaatg

SEQ ID NO: 115374 - DNA, 181 bp, Glycine max
aacggctgagggatttccctgaattgtgacaacataaattttctctcttaaaaagcactattcggatgcacacaaaaatcctttatcggatattctgtggcaataataggttgaaggacagatggtgtttctcgcgggctggggcgcctcagaaagaaaagcctgaggatttcatgagggg

SEQ ID NO: 115375 - DNA, 154 bp, Glycine max
  unsure (1)..(154): unsure at all n locations
ttgtgcatgccgatagtgcttttttaaaagagaaatctatgtctgtcacaattcatggaggaacctcaaccggtatttaaacaactgcgccccggcaggaacataataaatagcctaaatcacaagacaaattcatgtgctgactgaanagctn

SEQ ID NO: 115376 - DNA, 438 bp, Glycine max
agcttgcttcttgcaattcaagacactaattttctttcttataagtggcatgcaccaacctatacatttttgctttctatatatgcatcgctgcaacaatcagatatctataaaacctgttaaagtttaaggatggtacctttgggataccacatacctacattggttgtgccctcaagatactcaatgatcctctttacactagttaagtgagattccttacgattggattggtatcttgcaagtaagaaaatacttagcatgatatctggtctacttgcaattaggtaaagcagcgattcaatcatacctctgtatcttgattcatccattgagttacctttattatataagtaaaggtaggttgaaggtaccataggagtggatgcttctttgcactcttccataccaaatttcttttctagatttatgcaataa

SEQ ID NO: 115377 - DNA, 448 bp, Glycine max
gcttagccttaggtgttaccatgttgctatgcgctccttcttttctagcataaaatttgccataagaacctggaggttttcatgaagaaaaatacttggacctgggggccaggcacttgggttggaaccttcctgaaacctaaggtgaataccctgggttagaaattgtctgggcacgacagggtgacctcgacacttggtggcctagttttcctaagtgaaagtgtcgtgtggacacactaaagctatttcttgacaaatgataccgcaatgcatttgagatttgaagccaagtgcatgcatcatactgagcatgattaattggaatgttggaaaaggtgatgaatagctattaaatgtatgtcgtattgatcgataattatgtatgagcatgatactcgctatgggttctctctctaatcattggtatctgaaaatcggtggttct

SEQ ID NO: 115378 - DNA, 359 bp, Glycine max
  unsure (1)..(359): unsure at all n locations
ctcaatgaacttcaggataacctcactggagaaatttatgatctttggaaagagtgtacacatgctcacaaagattatgagggacttgaaaagtgtaaacatgatctttggatagaatgtgaaaatcacatgaattttgtggaattcttacatgataagcttntaaagaatgaaatcttatagggtcaacctcaagatattgtaaaatgcaatgaagagaatggtactttaaagacaaccttagccaagtttgtnggaggaattgaanatctcgacacaatgtaagatatggtagatgttcgacaaacaaatctagccatgggtatgagagagaaatatatgtctatgatgagcatacc

SEQ ID NO: 115379 - DNA, 346 bp, Glycine max
gacacatgaaactaagctgagatcttttgatattcgacagagcattgttatgtttgtttaatgactgcgagaagaaaacctgcgataagatgataattaactacgccagcgaacccaagtatcttcatgatctgacaccttgcggtcagcctacttcatgaaacgcaaaattcatgaccactcatcgtaaggtgacgatagagctgatgactatcttaaatgcttaagtttagcgtggtacccagcatgacatcttgtgcttccttgtaaggctttgttcgctctcatatatattactctagaaacaagcgtgttaatcaacgtgacagctcatgttatagccatg

SEQ ID NO: 115380 - DNA, 370 bp, Glycine max
  unsure (1)..(370): unsure at all n locations
ggagcttcaatgtataatgattgataaagaaaagcaacgngagggagagggagagagagcttctgaaaatgtggggctgagtgaggaaagagagagttgctttttggttttaaaaaaagtcttctcgttttctattaatttatttaagctatgccacatgtctccatttgagtggagcaaaaaggcccactttctcttttgattgtgactcatactcacccacaaaaagtgagaaaaatctgacctttgaaatgctaaaatcctgccttggtttgcgtgccgtttctctgattccaattccttccgtttctctgcgtccgtcggggccagttttcaaagtaatcaatatatatatcanaattctcagaat

SEQ ID NO: 115381 - DNA, 104 bp, Glycine max
  unsure (1)..(104): unsure at all n locations
ntgaaagtgctattgtttaccttctcgctgagttctattatctatgctagcgagcatctgctgagcgcaacactcatgggcttatcacgatgaagactcttaaa

SEQ ID NO: 115382 - DNA, 312 bp, Glycine max
  unsure (1)..(312): unsure at all n locations
atggactcctctaagaacaataacatcatttcttgcctgaatngtgggagttggaagccatcttctcaatcaaattcctagcatcagcaggggtcatatcaccaagagctccaccactggcagcatcaatcatactcctctccatgttgctaagtccctcatataaatattgaagaaaaagttgctcataaatctggtggtgagggcagctcgcacacaatttcttgaatctttcccggtactcatacaagctttctccaccaagantcctgatgcctgaaatgtctcttctaatggcagcggtcctatatg

SEQ ID NO: 115383 - DNA, 335 bp, Glycine max
  unsure (1)..(335): unsure at all n locations
ctcagctggttcgggcactacccgtgaagatcgaatcgatgttatctgatgaagatgtcgaaaacgggtcaacctttgcgagattctcacgacaacgttcgganacgtttggaagcgcctcggcttaaatttctcacggaacgatnttcaagcaattccaagagagagagtgcctaaggggctgggatccttcttcttcattccttccctattatagcaantaggggaggtggttgccgccagctcgcccaggcgagctcagctcgcccaggcgagcagggttgcttcctccagaagcaaccgccttctggaggaatcttctggagggcccaaat

SEQ ID NO: 115384 - DNA, 232 bp, Glycine max
tatactggcgcttttaaactcttactggaaaaccctggttcccaacttattgcttgcgctcatgccccttcaccactgggtatttctaagagccctaccgatcaccctcccaaatttgcaccacctaatggtaatggagccgatgcggatttcttctacgctctggcggttattccaccatatggtgcatctcaaccatcttctctgtcccgaaattaaccagccctaaccc

SEQ ID NO: 115385 - DNA, 347 bp, Glycine max
gcattctactcctacactatatctaagaagcatatactatggcttctatacaatgtggtatgtattggcgttaccctccaagaattccagaatgaaggtatggattaaatgtctctttatacacacctcataaaattgaatcatgtggaatacatgaaatgaattgagtttggctttattgttagtgctgttactagaatcactttgattcctttttgaaacccagtcaatgtgagatggatctatggattttacaatgtatagaatttgtcaatcaaatgcctgataacacttttacttaatactcctctaattgatctatactgacatattatagggatttactg

SEQ ID NO: 115386 - DNA, 227 bp, Glycine max
  unsure (1)..(227): unsure at all n locations
tatcttaagaaggggggttgaattaaaatattccaaacttgtttccctaattataaaatctatttcactttttactcaagntatgaattcccctaatgacaatcttcttaaatattaattcaaatgagcaacttgaatatgaatattaagccattataaataaaggagattaagggaagagaaaatgcacactcatttttatactggttcgggcacacccttgtgcc

SEQ ID NO: 115387 - DNA, 139 bp, Glycine max
  unsure (1)..(139): unsure at all n locations
taatagctggcgancaaggtgaggttttttttttcccggacggacaagtagatagcaccgccgcgaaaataactcagggtcacggtgtgctatacaaggttgaaacactatgcaggctacagctccataaacagaataa

SEQ ID NO: 115388 - DNA, 440 bp, Glycine max
  unsure (1)..(440): unsure at all n locations
agctntcatatcatttagatgatttattgctttatataagtcaaacaaggctttctgatcctccatgctcaattctagattgcctttccccatatctactatgcaantggtcatggacagaaaagggcggcccaatattatggggatgtcaagatctttctttatatccataaccacaaaatctgtatgaaaaacaagttgcttgacctgaaaaacacatcctaatcactccatatagccttgtatggagcggtctgctaactggagggtcatgcgtgtatgcattatctctatctctccaagttgccngcacatggaaagaggcattaaattgatactagctcccaagtctatgagagctttgcctacaacaacctcaccaatagaacacgatatcttgacaacttccagggtcttgtgcttgattgaagaatgcgtta

SEQ ID NO: 115389 - DNA, 401 bp, Glycine max
actaagcttctaaggaagctacctagtctatcaatagaagcatgtggatctcttgttgttactgagaagaatgagaatctcgtgagacacactacgaagatccacttctctaccattttgataccttaattaaacgcgtcccgctctctctttctgtgcctctatctttccttcattgaagcatccttacgagctgtttatccaaagctcatcttggtggtgaagctccttcttccatggcttattccctagtggatgacgcctcctctcacctattctactttgtctttcactgcatcttcatgcgggataatcaccattagaggacctcattgaagctcatagatacagcctccatagaagccacacaagcaagcttacatcaagtggtaatcatatct

SEQ ID NO: 115390 - DNA, 209 bp, Glycine max
gactccccccaatacctggaaaaactggaaggccctcttgcgaaaaaaaggaagatgtagatgggactgattaagaaaaatggaaattacttggtggctcaaacttctttcaagtcacaggtgccagttttttaactgacttctgaacctttaaaactcttaaactttaaaactctaaaccactttccccccttaaatactactctaaa

SEQ ID NO: 115391 - DNA, 214 bp, Glycine max
actttctaccattgttttacagctcctaccgcatctgttttccacgaacttgaacaatacgccgtcttggccatctcacacccccttatctccttcagaaagcccaacctatccatgtgctacgctttgatacccacttctgccttcactgaacagcaaggggtcctgatacacttctttcgtttaaaaagcattcagattaaattgtttattt

SEQ ID NO: 115392 - DNA, 320 bp, Glycine max
  unsure (1)..(320): unsure at all n locations
tctagttagactactaaatgagcttcttccagatcgctctgtacagtaactcactcaagtgcctacgaaagttagcctaatttagctaaacttcatttgcagatccctcatgtaggactaggcctaaactaaacagcataattaagaccaaaacttaacgcgcagatccctcatgtaagaataagtttcaatccttcttcaatncaagtctaaggcaacaatacatttcccaatgctaaagtcacctaactatgcatgcaaatgggtgacagaccaaaagcatacaaacatcaagcattgaatgatgcattgaacacaga

SEQ ID NO: 115393 - DNA, 429 bp, Glycine max
  unsure (1)..(429): unsure at all n locations
agctntaaataagtgacaaaataatgagtgcttataataatgacactganntttttttatcaagaatttatatctntattctaaaataattatcttcttgagttattttatatgaattaaaaaatattaaagatagtattaatattataaatcaatcttatattatattattaatttgcttttattnttttattatttatatcatcgatattacaagagatataagtaaaaaattaattaaaatcacgttaaaaacttaaaataataaatattttagtaaaaaaattagtagataattattatgggaagagggaagtgacgttaatgaacttattttggtttaaaatggagtggttcgtgggtggagatncaatggctggataacaccccacgtgcgatgtagttgattactcatatatatatgattca

SEQ ID NO: 115394 - DNA, 335 bp, Glycine max
  unsure (1)..(335): unsure at all n locations
ctctcaggcacctgaggcatgcaagctttgagcaaatncaagcaatattcacttttttactcggatggcagantgaggcccgtgatatatcgagacgctcgaaatggaacaccgaatctcttgacaaattcaaacgacaataactttttactcggatgtcagattgagtccagaaatatgtcgagatgcttgaaattgaagaccaaagctctgagcgaattcaacgacaataactttttactcggatgtgtgactgagtcccggaatatatcgagaccgctcggaattgagtatcgaagctctgagcgaattctaacgacaataacgttttactc

SEQ ID NO: 115395 - DNA, 451 bp, Glycine max
  unsure (1)..(451): unsure at all n locations
tgtagaatggctagacatgatacatgtcanggcttggtttggttcaatgataaaatggatgccccacattatttccatgacacaaatgcaaaaaatgatgatttggaaattttatgcaaaactggtcatgcatgcgcctatgcggacgctcaagtgtcaaaattttatggtcatgtgatgctagggctcaggattcatttcctctattttagtcaacccaatatttccaaaatatgttcttttatcaatttgtgcattcctccaagtccatttcgggcgtccggggaaattttcacagcattcacccttcaggtgtagacacgttttttcttcaaaaatcggttatgatcaatgaattttttttcaaagaaaagttggaaatcatctcttttcaaaagcatgtcgatttttagctagacaacttattntctcttttcccactttttcttac

SEQ ID NO: 115396 - DNA, 418 bp, Glycine max
  unsure (1)..(418): unsure at all n locations
catgcaagcttgacctntaagagtgagatcataactttgtattctctacaacatcaacaccgaagagtccagtattggcctcaaaaacggtattcttctgctacccacttgatttgtttttttcaaagaatttcccttaatcctctctgggtttcgtacattttcaccttaattcggatcctttggtttcagatccctgaattcgctgacaaatatgatctttgtaattgatgttgttatttctattatataattctcaacagtgggtttgtcacacggatgtgaattcctgtcttatggaaagaattttgttaatttttgcggccttattgttttttttctctccctgcagcatctggggtacatgttttgctgatatctcctaaacttgtcatgtggattcaatctatctccggtg

SEQ ID NO: 115397 - DNA, 391 bp, Glycine max
  unsure (1)..(391): unsure at all n locations
ctaagcttcattatctcatatgagtacttggtcttaatcttattaaangaatcattaagtgggatggattggtatcatacaaagtgttgaccaaatgccttcaatttttaagaaggggggttaattagatattacaaactattcccaataaaatctactttgattcataccagtcaagttcccttaagataatttctaaatatgatcacattaacaatctaaatataaatgtaaagcaataataataaagagtttaggaaagaaaagtgcaactaaattatactggtcggcccaccctttgcctcgtcatccccaacaccccttgaaagttatatctgtaaatccttacagtctgaccaccaagacacccatcttggttatatttttacac

SEQ ID NO: 115398 - DNA, 389 bp, Glycine max
  unsure (1)..(389): unsure at all n locations
agcgttgatcctttgagcctactatgagacttattctnggtccgtgaactaagcatatataaagctcattataccctttcccacatgatgtagtattaccgaggaatagaacttcngtccctctctgacaaactcaatgcgttgtggcaacccaaatacacttattgggtaacttgacattttcaaaagtctaataatttaacagaaaaatataggtaaaaccctactttctaataaggctcgatgaataagattntaatcatacttctaagtaagataatgagtcanatccaaatntatagacttaatgttacttttagtccattatcgtttaatgtttnntatgtcggacattaaggttaagaatttcattttggtccttatgtttc

SEQ ID NO: 115399 - DNA, 247 bp, Glycine max
  unsure (1)..(247): unsure at all n locations
tatgctacaaacatctacaacagacctcctcaacctcagcagtaaaatcaaccacaacagaacaattatgacctctcaagcaacacgtacaatcccgggtggaggaatcatcccaaccttatatggtcaaattcttcacaacagcagcaacaccaaccttattttaaaatgctactggcccaagcagaccatacgttcctncaccaatccagcagcaacaacaacaacagccccagaaacaacaaac

SEQ ID NO: 115400 - DNA, 440 bp, Glycine max
  unsure (1)..(440): unsure at all n locations
agcttcctagtgggcccagtcgctgaanaatgtcccacaagtgacccttttgccctccttttgaatatttngcacatttccttctgaaatgtcacaaaacccttcggattgtgtggcaattagtgttaagtagcttaattcggaaagcaagaatccaaatgttggcaaacaatcatccccggtcgaaattagggtatgacagcgaccaaaatgaagtgatgtacattcgaagctttgggctcaagagctccaatcacgtttataccccacatagagaatagccaaggcactgctaagactttcaaaggtatgggcggagcattaacattatcggcaaaggcctggcacttgtggcacttcctcacatggatgcaacaatcgttnttcatggtgagccagtaataccctgctctcagaatcttccgggccatggcatgtcc

SEQ ID NO: 115401 - DNA, 445 bp, Glycine max
  unsure (1)..(445): unsure at all n locations
tgtgtgggttccactccagaatccaaatctctaaagcaaaatagtcattccttgatccatatgggctttattgggcttggtacattgtcagggggtaagaaggctatgaaagaaaagatcaagaggctcaaagagtgttaagggtattttgagtaagaccctgagatccnntgttgacctctattttattcaatgttttgagctaggctctactccatttgtcttaaacattaatccttattgcactttggtgccttacttgtaaaatttgaaggaagtttgtctttttttgcttcacttgccttttggcgaattttctttttgctttcttattcttttgntgtttttttttcattattgcccaacctagacctttgtaggttctcaattgacagattangccaaatgaccctggctctntcacaatatttttatgaaatacaac

SEQ ID NO: 115402 - DNA, 332 bp, Glycine max
  unsure (1)..(332): unsure at all n locations
atcccagagacaccgcggctgcactgactataatggtagtcgggtcttatggattgtgtctttcgtggtactaaagtttntccttatagtacagttgagatcataagcgactccacaaacaagagcttctaggtcaatggacaccgacttaagccattcctcacaaaccttactttattggacgtagtggtggaagatactttcttactccacccctactttgctccaccatgacttagggagtttgtttttcctatctccttctatactcttattacatgtggtacgatccatttgatggttaagagcctttaatctataattgtgctaca

SEQ ID NO: 115403 - DNA, 408 bp, Glycine max
actaagctgggttcgaggtacttacccgttgaagatcgaagaacgatgtataacgtatgatgaacgtcgaagaacgggtgaaacctctgcgagattcctcactgaaaacgttacgaaaacgtttcggaagcgcctcggcttatatattcttcacggaaacatattttccaagcaaattcgaaagagagagaagtgcctaacgggctggaccccttccttcttcatttcctcccctatttatatcacaatatgggaggtggttgccgcccagctcgtccatgcgagcatggttgcttcctccagaggcaaccgccttctgaggaattctctgagggcccaaaaggccttggtgctatttgcactccactttttctaagtacacccctctctgctttttggtgattcttt

SEQ ID NO: 115404 - DNA, 262 bp, Glycine max
  unsure (1)..(262): unsure at all n locations
agacgctaaaaattgaacaacgaaatctctcaaaaaattcaaatggtgataacttttcacacgtaggtccgattcaggcttataatatatcgagacgctcgaaattaatcttcggaagctctcgagaatttcaaattgtcataagctttcacaccaatgtccgattcgggcgcataacantatgaacaacgaaagctctggagatattcaaatggtcataacttttaacatagaagtctgattctggctcatcacatataga

SEQ ID NO: 115405 - DNA, 299 bp, Glycine max
catatctatttctggagagttccggtgtcaattttgagcgggtccatatattgtaaacctgaatcagacctccgaggggaaagatatgaccatttgtatttgtggagaacttccggtgttcaattatgagagtctctatatattatgctcccggataggacatccgagcgaaaagatatgaccatatcgatgtctggagagcttccgatgtttaattatgagcggctcgatatattatacgcccgaataggacatccgagtgaaaagatatggccatatgaatttatcgagagcttccg

SEQ ID NO: 115406 - DNA, 120 bp, Glycine max
  unsure (1)..(120): unsure at all n locations
agctcgctngnggagantctatggacgatatatctatttacttcaatagaggccctcaatggtgatttgtcaccattgagatgcatccgaacgctaatgtcaatacgataggggaggcac

SEQ ID NO: 115407 - DNA, 487 bp, Glycine max
  unsure (1)..(487): unsure at all n locations
gatctccgagtcacctgcggcatgcaagcttcaagcttaagtcttcacatgttgctcctcctatctctaanaatatggtgatcatcctaaaagtccataggtctaaagcccaataagggttgtataaatagaagtgaaattcttttcctaactctcctcttgtatcccttaattcattcctattatttgtaaattgacactataatactctatacaactatctttgtgcattattattatgggatagaatccatttacaccattcgactccagcgtctttaaagggttttgagggaaactgatttctttatgcccaccgcanagtgaccattaaacattctcantatcttcatacctcttgtcgccttttttttcacattattttttcttcatcatcatatcattatcttacaagttacaactataagatgataaggaatnttataggttgttacaaaaacaatttatgagaaagatcccaataaat

SEQ ID NO: 115408 - DNA, 364 bp, Glycine max
  unsure (1)..(364): unsure at all n locations
tactaagccttgagcacacatcctgactcaccataaaccttgacccagtgtgataatgtcaattctcaccctccgaagcaancaaaaatgggatgaggaagaatttccatcatagatgaagccataaatgagagaacgaaaattttccatctaacgaaataaagagaggaaagggaattcccaatctaagagtgggagaaagcaataagaaaagaaagaaaattccccatcaaagaatgggagaaagaaaaaagagaagaagaaagggaagaaagttcccgatcaaaaaaaaataatatgcagaaaggtctttggaccggacaatatctgaacaatacagaattgtcaccaaatgatataaaaa

SEQ ID NO: 115409 - DNA, 197 bp, Glycine max
  unsure (1)..(197): unsure at all n locations
agctatataagcgcgggtttggtatactaaggtctngnggncncnatatacgaagatgatgttccgaggcattggatttggtacgaccatccctcctgattcctctggaaatggcagagaggaacccccggcagttacgcaacgagcataatgtaaaccttgacggatgtaaaagctttatagttgggcctaggctt

SEQ ID NO: 115410 - DNA, 310 bp, Glycine max
  unsure (1)..(310): unsure at all n locations
agctngcatagtngngcactcttctctactttggagaataaactcgactctcaacacgggcgcaactcgacagtctgcatcacttgaacattgataacccaaacgtctctctcactcacttatcgcactgactcaataactctgtattccaaacagtgggtgccgcttagtgaacataggtcacactaactgttgtcctatggggcccgactggttaacgctacgtctctaccgcgaaaaaaaatacaacttcccattgcggctggagctagaatctagcattctgctgacacatatcgtgacatctcag

SEQ ID NO: 115411 - DNA, 434 bp, Glycine max
  unsure (1)..(434): unsure at all n locations
agctnttatccctatccagaactatatatatattatataacgtttacgagaatctttcgtcaacacttagagtggattacgcattttaccatttctttatcataaataaaattcgagtttcgaatttggaagcacataactaatatcatgtcgccgactacaactgctcgggtcacaagtggacgaacaactacttgtcagtttaaaagacacagacgtgccatcctagagacctaaagatcttttcatttattataatccattgctcaattgcgtatgttatgctaataacctatgagctaatgtaatttaccatgagagacctcatgtttctcctaattaaaataataacttgttagataaaaattgacatgcatattgggaaaaacgaagaaagagaaccttttgtttgaatctattctcaattcggatct

SEQ ID NO: 115412 - DNA, 79 bp, Glycine max
tcagtccctggctacaaccctgacgcaaatatggatgttgtaatgattatgcgtattcttcgtgtgtatctaatctgtc

SEQ ID NO: 115413 - DNA, 268 bp, Glycine max
tcacaagactctcatacatcaggagtacaacaagtgttacacatgcttctatttatagactacgtagctctcttgaaaaggtgcttaagaaaacttaattgagaagcttctttgagaaagcctcctttagaagctagagcttagctacacacacccatctataaacaagcttacctcttgacaacatcgtgaaatacaaaaaaaaaggccctctacaatactactcaaggcctgatatcaagctaaaccttactcttaatggcaaatc

SEQ ID NO: 115414 - DNA, 437 bp, Glycine max
  unsure (1)..(437): unsure at all n locations
agcttcaagattaagatggcctcagcaaatttcttatttccagaagggaattctatcaatagacctccaatctttaatggagagggttaccactactggaaaacccgaatgcaaatttttatcgaggcaatagatctaaatatctgggaagccattgaaatagggccttatatacccaccacagtagaaagagtntcaatagatgggtgttcatcaagtgagagcataaccataaaaaaacctatagatagatggtctgaagaggatagaatacgagtacaatacaacctacaagccaaaaacataataacatctgccctangaatggatgaatatttcagagtttcatattgcagaatgctaaggaaatgtgngacactcttccattaacacatgaaggaactatagatgttaaagaactatgataatgcactact

SEQ ID NO: 115415 - DNA, 407 bp, Glycine max
ctgtaggatcatggggtacccatcacatgtggtactatgtggtctgtcggcgatggtgcaaaacgattcttcacatccacaaatcacgtatgacccaccatcccctgttgcccacctccaactgagctcatgtactcccacgtagcccttatcctcgttcctcttaacgtcgggtccccatcaatcctcccaagcttccacaacatccatgtaattccacatccaatcatcatggactaacaaaaccaagcaaaacatggcaaaggctgaaaacttctgcccaaacacaactcaaaatcatagcttctcacatacaaatacaccagtaacatttccttcggtccaattcgtttaccgtctgatccactacaatcatttactggaagtctctagtacataagtataca

SEQ ID NO: 115416 - DNA, 219 bp, Glycine max
cctggatgatggaatcaccctaacctcagatggtccaaccctcagcaacaacaacaacagcagcctgctgcttccttccagaatgctgcttgcccaagccgaccatacatgccttcaccaatccaacaacaacaacaaccccaaaaataactcacagttgaggcccctccacaacctttccttgaagaacttgtgaagcatatgactatgcagaacatg

SEQ ID NO: 115417 - DNA, 438 bp, Glycine max
  unsure (1)..(438): unsure at all n locations
agcttgttagcagctcgatttatttcattatctcgagtcgttttaacattataattgtgttacatacttttattcatttattttttacaataaaaataagatgaaattaattaaaaaaattaatcatatcaatttaatagtttaaaaatatgttatttaatatatgttatatatatgtaaatgagttggttcatgaactattcgaatcaaattatacatagttgagaatcaactcatttataaacaagctcaccttttaactcaacataaaaatatgattttgatcctctaaatattaactcatattaatttagtactccaaaaataatttcattacattggatccctcacattcagaagatatatttataagtcctttgttaactccattaatntctattaaatgtcacaacaggagatgtccaatcattaacattt

SEQ ID NO: 115418 - DNA, 370 bp, Glycine max
  unsure (1)..(370): unsure at all n locations
atcgntaagccgtatctcgctaatttatttttttgtaattcacccgccctggcggtgtatctctctaataaccggcaagaaaaattaaactgagcattctcactgtaacctccgtgttatgaaacaggtacaaagctccctcatacattttacttttaagttcctataatgagtgataatatacccatgaatttgggcttaatcaacttcaaaccaacttttccgccaaaggcatatgaaccctttctatccatgcttaaaggcctctttctttatcggttaatggccgcgaaagttaaaacacacctgtttactttatactttaaaaacatttggctattcctccccactgaatactagagaaactcct

SEQ ID NO: 115419 - DNA, 416 bp, Glycine max
  unsure (1)..(416): unsure at all n locations
agcttataatatatcgaggcgctcaaaattgatcaacgaaagctcttgagaaattcaaatggtcataactntttacactgaggtccgattcacgcttataatatattaaggcgctcgaaattaaacatcggaagctctcgagaaatacaaatggtcataacttttcacacggatgtccgattcagcgcatattatttctagaggcttcgaactggacaaccgaagccatccagaaaatcaaatgggcattacctttcacactgagcttcgaatttagcttactatatattgagacgcctcaaattaaacatctgaagctcttcgagaaataagaagggcattatttttactcggatgtcaattcagcgccttaatatcagaccctcaaattaacacggagctcccataaattaaat

SEQ ID NO: 115420 - DNA, 186 bp, Glycine max
tagggatggaacacttacttgttggtgatgaacaaaagcgcttaacggaatcaaaaatgcgaaaaaggatggccctatggctgcaaactcgtcaatcccgtgggtatggcttttgaaaggggggaaaagaagattttgaatgttaaaacgccccccctttcgtcattcttataatttggtgcaggg

SEQ ID NO: 115421 - DNA, 401 bp, Glycine max
agcttgagttcattgttgctacctcataaagctccgcaacatggtgacggccatactctttcttgcgagcctttttggcatttgtgcagggctcttgcggtagttacattctcttgccgtaatccggcacactccttctagatgtgtgtaggcgggcaaacttgaacttctccttagcgagtttcagctttcctaactcacttatgagagcttggacttactcgtactcttccggagcgtccaaactctctgtgctgacgacttttaacttggcgagccgatcccaacctcgtatatgaactttgagccattcatggtaaccaccaatggcgccattatgaatgcccctaagttcttgatctgtccttaacgggcgttcccatgcgctatggattctttgt

SEQ ID NO: 115422 - DNA, 401 bp, Glycine max
cctataaaactaagcttgatatgagggctattataccagcaacacggaccgtttcttattctatgaagaaataaccgcgatttgttatggtgagctttaaggccaccaaagctaaaactgtatacaataccccacaaaaaatcttcacttacattggaaccttactcaacctttcaatcaaaacattaaccggagaattgaagctcctctttgttcccattcgtgtattgcaaaaatacaccaaccacaatatgggtatgctctctagtaactaacatgctttatggacacaccattggatcatagagggattaatagtcgagatagagaattgaacagggagagagagtgaagatatatacagaaggttgatgagacaccataagagcatgcagcggatg

SEQ ID NO: 115423 - DNA, 312 bp, Glycine max
  unsure (1)..(312): unsure at all n locations
agcttataataccaaatatacgataatgaaaccgggccaaaggcaagcggtccagtcttgcgccaatttgatcatattgttccattaggtgcctcggatttgctaaaaaggtagcaattgcggcaaattcacttgccgcatctttatcatcattttatttcaaggcgcaggaacaaataatattgacaacgtgtgcttaaattaccacaccagctggatattattgtctttgcaaaatgctatccactctgcacccggtgatttatcagttattatgtaattaatatgactaanatcagctaactggacaaa

SEQ ID NO: 115424 - DNA, 445 bp, Glycine max
  unsure (1)..(445): unsure at all n locations
agcntttatatctgtcatcaactacagcactattagacattcatctttaacatcgggcnattataatgaaagaagaggaaagaaagtctgtgcatagaaaatacatgaaaagaaaaaaaatgaaagagagtgaaaaatacgattgtgtcgtggagatatataaaatgaaatagtaagaacaaaagtgatatggtagataataaanaatataaataaagtctttgtgaaatttcaattatactccatggttcttctgctctaatatttttctcttaaaccgatttgtttttttaaaacaaattgtatccttctttatcacgttttatatatgtgtgtgcaatggattttactgccatcaaattccatgctctacggaaatttcattttactaggcatatgcatattctaaaatattctagtcatatgtcaatctctcacccatatt

SEQ ID NO: 115425 - DNA, 361 bp, Glycine max
  unsure (1)..(361): unsure at all n locations
ntctcataagtcctanatgacatttcaagctaggattaacttactttattctccatttaccacagaattcagacttagcctttcaactctcaacgcctcactctttttccactcataacaccacattctcactttccaaccctaggttaactctacatttcatctctaacagttttccatgggcaatttcagcttataaacatcacacacatcatcacataaaccctaaaacagaatgggtatgtctaactcatccaaacatggcaatttcaacaaagcttcaacaaatgtcttcacatataatcatcacacagcagaaacctaacaagactacccatcatatctctccaaaccccatacc

SEQ ID NO: 115426 - DNA, 348 bp, Glycine max
  unsure (1)..(348): unsure at all n locations
gaactagcttactggtttggataagcctccgtctttaatgtcttttttctgccttcatctggtcatgcactccctcttcggtatccatcttacttctggatcgggtgttatanggagtgccctttgcgcctttttagttatggtgaggtccctaaagaaaacaaatagagtgagtatgccaccaaaacatgaatatgctaagaatgatcgagcactggatcacctcaaggccttttagacaacgtgatgagtttcaaaacttctttttttataaaaaggaacaaaagcttctattttagccagatcatacaaaagtggtacaacaaaacctaacggtttctattatgt

SEQ ID NO: 115427 - DNA, 157 bp, Glycine max
tggggaactttctatatagcccaagcgggcttgtttttatttgcaccccctggttactaaatacaccccctgcccccctttattttgctgaattcttttccgtagcgttatggaactttacgaatttcgcaattgtcgcaacgtgccctttgcgggc

SEQ ID NO: 115428 - DNA, 449 bp, Glycine max
  unsure (1)..(449): unsure at all n locations
ctaagctntaagctntagttntcatgttggtcatgtngctcttcctatctctaactttatataanaataatattcagattttagagtttatctaaagcttaagtttatggaatgtaacatgaacaatcaaaacctattactccgttccaaaactataaatgctttacaaattcaacactaaaatcataatcctttctctattatacccttgtttacagttatcagtgcattgaatattttttgtcaccaatagctaaccatttatcaatgagaatattcacttaatattgtctctagactctacggtatctaaatatttgtggttaatggtgattccaacaacatgattaaatacgaatattttagtctaaagttttatcaattaatatttagtaatgggtgtgcactaaccttaacatatataatttttgaacaaagggactacttta

SEQ ID NO: 115429 - DNA, 387 bp, Glycine max
gcttgcttctacacggggattatatgtttattaaatcttatcgaaccccacgtttttcaaaaccattatattatataaaattatttttgatatattaaaactttctatgttcatctgggtaagagtggattttttggtggtttaaaagagtccggtaatccaataccttctcatgtaatccatttcatgccgttaggcgttaggtgaaatcgattacaacattcctgttatctattacagagcatctatttctataaattgaaatttagaaactggagaactttttctgctcactcgccccaaatcctaaactcaaaactcgttctcctaattctcacccatatttcccagcccaaatcatcatttctttcttctctccccataaac

SEQ ID NO: 115430 - DNA, 387 bp, Glycine max
  unsure (1)..(387): unsure at all n locations
cttatcatttttctgagtccctcatgacaacccatattntacttctattggtgttctntacagaactcgtcttttctgaatacacttaagaaaactcatcagtaggcataaattcaaaaggcttatgatttgtgttaagaaggtttgtcataattaaaacaacaagggttttggactgaacaaattgctcataaaataagatgtgaaaaacaattatcaaagagacattagagaacattcactagacagtaatagagagcacatatgaactaatcaaactaaatggtacaaatattgaaataataagggactaaacaataaatattcatacttcatctaaccagttaaaaatacctcctacaaaaaaatcaattttggtgtttcatc

SEQ ID NO: 115431 - DNA, 361 bp, Glycine max
  unsure (1)..(361): unsure at all n locations
agctntcctgctcgttataaacttgtaataactcatccgagactttcttaacaggggtggatttcanacatgggcttattgtccttgcgagntngctgaanaggcttgtgatgacnatggtccgcatcgggcggtagtcatattcctggaacagcgggcaagaacaaatgcgttcgctattccattcggtattcggtaacgacagcgtgggaaaacgctcgcgataatanttttgtgtgtgagcggcgcggaaatgtaaccccggaccaatgcctctttcttttaacgctttcatcaacgcatcgcgactgataccacaacgttggtcatcgacacgaataataaacagatgccaggcgtg

SEQ ID NO: 115432 - DNA, 476 bp, Glycine max
  unsure (1)..(476): unsure at all n locations
agcttttgccagtgacgggaaatagcatgccattgtttgtattttatccaccgttggaatgcatatcacgctaatggcgttgaaaattggcaagggcgatgaagtgattacgccttccctgacctgtgtgtcaaccctcaatatgatttccttgttgggtgcaacgccggtcatggtggatgtcgaccgcgatacgctgatggtcacgcctgaagctatcgagtcagccattacgccacgcactaaagccatcattccggtgcattatgccggtgcgccagcagatattgacgccattcgcgccattggcgaacgttacggcatcgcagttatcgaagatgctgcccatgccgtccgtacgtattacaaatggcgacatattggcgcagaacgtaccgctatttttcatttcatgccatctaanatattacctgtgctgaaggtggcctgactgttactgatattgaaaccttgcc

SEQ ID NO: 115433 - DNA, 452 bp, Glycine max
  unsure (1)..(452): unsure at all n locations
agcttgtaatccttaacaagaattctnttggtttatactttcctatctaaccttcattcgccaatgtgtgtgtctattacttctatatatattacatgtgggaggcaaagcaacgttgctactcaataaaaaataaaaaaataaaagcctgaaattattattataatgtgtagatgtgttaaaaacattctattgagatccattggaagcaacaaacaagagttgctccatgcaaagatttattgcgtagagttgtttgtattgagaaaaataaaaataaataatgtgtatatatgggtcctattgaaagcaactattgtgagtttgctaaaatggtgtggtttccacattatcctagatgagcatgaaattagtatagccttcatggattttaaactcttatattggacctaaccacatgtgtactgtaaaacatgacaaacttattagtt

SEQ ID NO: 115434 - DNA, 485 bp, Glycine max
  unsure (1)..(485): unsure at all n locations
gacactatgatactaagctnttggagaannaaatacaactttagaagaaactatgaatatgctgtgaanaaacaaaaaatcgaaataaaaaaatgcataccaatgccaaaagaggtataaagaaaacgcagatctgaacccaaaatgcaagaaaaccaagagaaagcaatgacagaaaagactcatgaacacaaaaanaattaaactttgacagagaaagcaacaaaatgaaactatgttcatttgtggtcttgatgttttccataacaatcatggtaaaaatcgaagcacataaaanatggcggatacacctatcttgagacaaaaatcgaagctttttgagaaatcgaaacacatcaaaaccacatcaacatggatagacgcaaaaatcaaagcttntttagataaaaaagcgaaaatggtggtggaaccacaacagagaatgctcaggaacacaaaaaatttaagctttgatagagaaagca

SEQ ID NO: 115435 - DNA, 273 bp, Glycine max
aagcttctattgtgcctagccttcaaggatgattacttcttccttcatggaatgcatccctcttgaccgtgattcaaggctgtgaaatttttccataatgcatcacaaatcttctgtatacctttgtaaccccaaaaacatcttaatcctttaggatacttaggtctaggccactcagccattgctggcaatttactaaggtcagctttctcacctcttcctgaaatgatatgcccaaatattccaaagaaatctgccacaaatgcatttttc

SEQ ID NO: 115436 - DNA, 458 bp, Glycine max
ggagaggatgcttcaatggaggaaaagaaggagtgttatatttatagaacggtgagcacgacatcgacggaccaaatatggattgtctccgaacccctagttgagtatcaccagagtctccgtcatcacagttacaacaagtgtcacacacgcttctattaatagactatgtagcttccttgagaacatatcgtgagaaaacctccctgagaagcctcctcgagataacttccttgcgaagctaaaccttagcgcacacacccctctcataactatactcacctccttgagaagctgtcttgagaatattcctataaaagctagagcgtatctacgcacacctctctcgtctctagatcacctccttgagatgagaagcatgagcgtagcctcccacaccctataataacttagcttcacccctcgcacaatgcatgaagatacaaaaaagctcttct

SEQ ID NO: 115437 - DNA, 327 bp, Glycine max
ttgtctggcggacaggctaggagctactcttgttgttcataagaagattgatgtctaggcctgacatggtccataggcattcccatatgggagactatagagcttatctatggagattgtcaagaggggtgtgtggaatgcctacaaacacttggcatcatctgtaccatcttggtaagtgtatggagtctgttctaagtgtcgtacgattattgttggcacataccattttagtggcaacggatcatacttcagtgtgaaggctacagatccccttatgaagttctcacatgacataaatttcctatttgctattcacgcacttga

SEQ ID NO: 115438 - DNA, 408 bp, Glycine max
tcagagacaccgaggctgcagctgttgaactaagtggaaaggattttctatttagtcacttacgagagattgaagaggttcaacatggatcaatgtgatcatgtctatatatctgtggaaggaaatatgatactggatacaggcgatcatgaagcttcgatgacgccacattgatcaagaagctaacgggatgctctgtattcgtctaccaataatgaccacaaatctcatatggatttggccttgtctgcgcatgcatgagtaattcataacagtcttcttttggtctctcagaaagaatgttgagaattctaaaaggaacacttaattatggcatattgttccctcatcacaaagaaaatgtgagctatacctcgtatcttattctgactcatgacagggagggga

SEQ ID NO: 115439 - DNA, 466 bp, Glycine max
  unsure (1)..(466): unsure at all n locations
atcctcttagtcacctgcggcatgcaagcttgttgaaactaaggatggaatagngatgttccagatgatgtacatntaagaagtattgaagaggttcaacatggatcaatgtaataatgtagatatttcggtggaaagaaatatgaaactggatacangcgatcatgaagcttcagtaaatgccacattgntcaagaagctagtgggatgcttgagattcgtctaccatagtagaccagaaatctcatatggatttggtcttgtcagcagattcatgagtaatccaaaacagtctcatttggcagcagcaaaaagaatcttgagatatctaanaggaacacttaattatggcatattgtctcctcatcagaaagagnaatgtgagctatacctcgtagcttattctgactcagactggtgaggggataaagtggagagagatctacttctggtatgtgttctactt

SEQ ID NO: 115440 - DNA, 346 bp, Glycine max
  unsure (1)..(346): unsure at all n locations
agctgctacttatgtggcaaggcangcatccttcactatcttgtctacaacgcgagctcagaccaatgttcttccttcccgcgatgctatttttcatgtccgcctgagtgggcttatagcctaaaccatacttcccacgaatgtcgtgggtatctatcaagctagttagcagccgttgtttttgtctaaacccatcccgtattcataaccgttccccaacataactcgggccatcattaccgcttcatatgacatacaaggctgctcaaagaaggagttcacagaggatatgctgaccacctcaaaagactgaaagcaggttctaacgattcttttgcggcgtcca

SEQ ID NO: 115441 - DNA, 236 bp, Glycine max
ctaagcttgaacgaatataagagacatcttcttcgaccctggtgattcttgactccatcttattgaagcgcatgtccacttgttactcttaaggatcaaacccttcaccaaccaaggtttgaagaacatcgaacctgtccaagatccttggaagaagagatgaatcttctgcatcatggccttcttcaccaacatgttgagcaccctttttcacccaagagccatcatgctctttt

SEQ ID NO: 115442 - DNA, 472 bp, Glycine max
  unsure (1)..(472): unsure at all n locations
agctatcatccaattgatgaaactacacattatattaatggtttaaatacattnctattcttataatntagagattttgtcattagtgaaaaattattttttttttttattgctaggccttataaattatgtttattttggttttaatccttaaaaaaaggttttgaatagtgaaaaaaatgttatccaaaatatcttaagaactttaaacaaaatataacataatttgccagaaataaaaatttacaaggaaaaaaataaaaatcacactgaattataagaactaaaaattgtattaaggcatatatgaatgatctaggactttgaggaaagaaaccccccaagtctcagtttaaaacacacaaatttgaacattgtcttagtcactttcaatccatttattatgacaatgcatcttcactacagccctcgctcatataagttccaaccaattatgttcatcaattctttg

SEQ ID NO: 115443 - DNA, 173 bp, Glycine max
gacaggttatttcagagacatgaatgtgttattattggagttttcaaatgcttggaagcattcataattatcatttgagaagaacttcatatctatgaaatttggggcctccaaggtaccaaaggaaaagaagtttgggtaccgtatacgctgtctctctgatgagaattatg

SEQ ID NO: 115444 - DNA, 459 bp, Glycine max
  unsure (1)..(459): unsure at all n locations
agcttgtagtcaacgtaggttctgantttgatccttcccagagcggcaagaagatgagcagtgaaactatggcgagtgtcctcgcctctaaagcttatgaacacgtcgtcggtttcttgaggaatgaatganaaagatgatgatgacgccatccggattttggaggctagctagctagctttcttgttaggagaagaatgagaagatttatagaaggggcaaactcttgatgtgggcttgcaaatatatatatgatctttttttctctatataatagggaggagtgtaagttattcaatttgagttgagtttggttgaatccatgatccaatcaaattaaatttgaacggttgatttggatagatnttctaanaaaaaatgaaatccaatttaaatcatttaattttgtctatttttttaaacacaatattttttattaaataaactagattaaactat

SEQ ID NO: 115445 - DNA, 401 bp, Glycine max
  unsure (1)..(401): unsure at all n locations
ctaagcttgaagactcaccagggcggaccttgngttntgagagcctttggagnttgcagactcaccatggatggaccttatgtttgacgagccaatgagactcaccaaggatcgaccttgggtttaatgagcctttggagacgcaagactcaccaagggtgaaccttaggtttgatgagcctttggagctacgaccagggacacacttgtcctgggttttgtcaagacttaccaagggtggaccttgggtttaacaatcctttgtagagttgacataaggaaattataaaagtaaagggatgtagaattttattcaatgtagttaattgagtacaaatttcgttcgttaccccggatatgcctcgttaaaacctctcaagccaaaccttgatttttttcaa

SEQ ID NO: 115446 - DNA, 365 bp, Glycine max
agcttatgcatactaaaccccatctatatacctcttgattgaacgagcacaacataaatctttttcaacattatacaagagataacacgcctctcctagtgtggattctagctagggactctggctacagggatgatatgttttactcagagactacgaaaagagttttctcccactctctctccatctcctaatacatgcactattattcacctattcagatcgcctgtgggacgcttgaatgcttatactgacgcttgattcatctcgcgcaaagaggagaatgctctgaagagagactagttgcatagagccgcatcttaccacctcctgaggcggagctatggtcgttctctcgcattcaa

SEQ ID NO: 115447 - DNA, 448 bp, Glycine max
  unsure (1)..(448): unsure at all n locations
agcttgatctaccaccattgccgccaccatcatcttagtttttctattatttttaatattactagtacttcgttttctagccgtgtatttggctatattatgacatttgaacaatntagtatgtcttctaataattgcttagtatgactaaattattatgaattatgttatatgactatgtggcttttatatatttgatctattcatgtttcttgcttcatgtttggtttaaatttttcaatgaatgacttgtgaatgattagtagtgtatgcatggtttatatttgttacgcacttcgactctttgttgatgcaaagggggagagaaatacggattaaatcaagaactcacataagtaattaacttaatttcaagagaagcataaactcaaaaaaaaaaagggagaatatggaatattatgtgagagatcgactatgaaaaagtgtg

SEQ ID NO: 115448 - DNA, 231 bp, Glycine max
  unsure (1)..(231): unsure at all n locations
ntgcggatntggtcttcgccgacaaaaggatggatacnggtcttaaaataggcaaatttgatcatcctgctgtgatgaatgagaaaactatgtgcaatgaaaaggatgagaatgatgaaggaacccgtgttgtggctggcattcctacatggccaaacttcccaccagcccaacaatgtcatcgctcagccaatatcggcccttctccttacccaccacccaatcattcat

SEQ ID NO: 115449 - DNA, 122 bp, Glycine max
  unsure (1)..(122): unsure at all n locations
agctncttatttatttatatatatatatatatatatatatatatatatatatattcccgtggcggagcaaaataagtataaaatattttgagccttgtggacgagattctatgaggtaattt

SEQ ID NO: 115450 - DNA, 309 bp, Glycine max
  unsure (1)..(309): unsure at all n locations
ctaacttaacataattcacatcattntaccaatcattgtgtaacatcacttgtcctaaggatggtatcacaaaatcatattctataccttcacattaatcacatgttcatnaacaaacatctcaagtacaacacaacatctctcacacacaattcattacccacaatcacgtagcacgtcacaatgatcattacacagacgttatgcaacatatatactaagactcaatcctatattgaatgtggtatcttgtcagtgaaaaataacactatggcacctatgagtacataataaaatacaccacacaat

SEQ ID NO: 115451 - DNA, 347 bp, Glycine max
gttagattaaaaataactcactatattaatagagtgaagaatcgaggcgtgcttgacaagagttgaaagaaaataatgtgccagtaaaatgtagggttagagagaataataaaacaattaggtagaaaggcaatatagcgtttatactatatactatttagaaatggttaggttagcactagatataaaataggtggagtcatcatagagagaatataatatctactcttactagcactattatagctagaataatatatgagttcttagcctaatactaacgctaaagttagagaacctatataagacataatatattcagtctgaaataagagtatactttgata

SEQ ID NO: 115452 - DNA, 461 bp, Glycine max
  unsure (1)..(461): unsure at all n locations
agctnntatgaagtttctggttntctaaaccttgataacttgtgctattcatcttttcattctcttctccattttccaaaaagaattcgccaaggactaaccgcctgaattctttttgtgtctctcttctcccttttccaaaagaacaaaggactaaccgcctgaattcttttgtgtctcccttctcccttgtcaaagaattcaaaatgacacagtctgagaattcatttgattcttccctttccctaatacaaaagtgttcaaaggactaaccgcctgagaattcttttgtatccccattcacaaagtatcaaaggtttaacagcctgagatctttgtctcaacacattggagggtacatcctttgtggtacaagtagagggtacatctacttgggttcgactgagaacaagagagggtacatctcttgtggatcaattctagtggagggtacatccact

SEQ ID NO: 115453 - DNA, 467 bp, Glycine max
  unsure (1)..(467): unsure at all n locations
gtaacctcatcgtctctcacagtctatagaattgggagccaatccaatccttgtgtccggactctcagccacttatgatagccgccgatgatcccattactgcttcccctaagctctctgtgctttcttcacgccgcatgccatgccttgcgaactccttggagtaccctcgcgttgtggtcactgaaaccccgtgcgatgaaaggcgtgacgctttcctctgatggcactcctctcatggggtagccaagctgtcttatggcgaggacgggattataattaatacaaccccttgttccatcaagggaacatgtggacatccttcgtatgaagatagaatcctgattcttccttccttcttggagaanaaggtgtgagtaccaccacacatagagagccagtgcacaacatacaattcttgcaccactctttcacctccccggtcgaacgtgtatacatggtcaaat

SEQ ID NO: 115454 - DNA, 311 bp, Glycine max
  unsure (1)..(311): unsure at all n locations
ccggagngtcttcttaacaggatgtttttatgaaaatttgctaaggtgtttattacaacgactaagccctatttagtttaaatgtaatggtcttaaggcagaatattattttgaaaccataattgtgttcttaagactggcctttaaatagggttgtaccctatagcttacctagacatgaaattgttagaaattgttaggaagaatatacttacctttattcataatttctttattacttaggtgtattccctatcatccacatacacattaatttgagcctctttaacccacaacttaatttccagaat

SEQ ID NO: 115455 - DNA, 380 bp, Glycine max
  unsure (1)..(380): unsure at all n locations
cgtgtccactatcattgtgttcatctncttctccgtcattgggggtgctacttgaactaccaaaatcctccacttttgggcatattctttgaacaactcatgctcttttttacacatgttctgtagatgcatcctatccggagccatatcaaaaatgtattgatactgcctaatgaaagtgaccattatgtccttccaagaatggactcgagaaggttccagattattgtaccaagtgacagatgccccactaagactttcctagaagaaatgcaatcataattttcatctttcgcatatgcccccatcttctgatagtacatctttaggtggttcttagggcaagtatccctcttgtacttattgaaatccggcatctt

SEQ ID NO: 115456 - DNA, 477 bp, Glycine max
  unsure (1)..(477): unsure at all n locations
ctaagcttcacacagttatttttctcaaacttgagttgtggaagaccttattactatgttctttcctaactagatgatttaaatgatgcctattaatgtgtgcaggcctgcaatggcacaaccatgaatcatctattttactcaccaagcaacttagcttatgaaaagatggatgctcaacattcagcatatagattttacatattctcttaccaatatggacaactttaccggatatggcttcacttataagacaacaattnttgttgaattcaatcttgaaacctttatcacacagttgaagaatgcttagaagattatgatttattccatccacatataacacattatttatgtgaagtttgtgtgattccctatatttcttctcccatatcttcctttatattgctccaacgtgatgattcccatcctttgcacgaagcagagatttgaacttgccctatcatgtcctagaca

SEQ ID NO: 115457 - DNA, 218 bp, Glycine max
attacacttgcttgacaatattatatttggtgaccagaacctgatgcatgtacacatatccatgttggtcctaatgaatgtcaacgaatatttcgttatcttagatagaatatgtaagtgttttttcttaaaaccacaagcgatatgtgcttacctattataatgaatttaggatcattataacattcatacaatacccatcagaaagtgacttcatg

SEQ ID NO: 115458 - DNA, 441 bp, Glycine max
  unsure (1)..(441): unsure at all n locations
gatccttaagcaccgcggctgcaactttaagaagagagcttttttatttgggtgtgngtagctaagctctaccttctcaaggaagttttctcaaagaagcttctcaaggaagttttctcaataaagcttctcaaggaagctacctagtctataaataaaagcatgtgtaacacttgttgtaatcttgatgaatgagagtcttatgagacacaactcatagcccaactgctctccctttttcttccttcaatttcgtgctcccccctctctctatgtctccctctttctgttactccattgaagcatcctctccaagcttcttatccaatgcctatcttggtggtgaagctccttcttccatggcgtattcctattggatggcccctcctgtcacctcttctcgtttgtgtttcgttcatctccatgatagataataccatt

SEQ ID NO: 115459 - DNA, 429 bp, Glycine max
  unsure (1)..(429): unsure at all n locations
tatgtgaagtgaccagatggaagaatgaaatatgagtctttggtgtggggttntgtgctgcctattggtgcaagaatcgtggttaactgagttntattaagctactgaagtgaactgagtggatatggcttctatgtgcatcaaaaatagccaagtaaaattctgaagaactacttactaccttggtattcaggggttgttcccagcttcttccttctgttatcaattattttactatagtacagagtaacttctttttatgatgcaggctaagaattntctaccatgtaggagggaattcgaaccatgttactcaatntaattgacaaaactctagctaccacacgagtaatgtnntttagtggacttagatatctcataattgaaaatgacctgctggtacataattcataatggtctaaccaaaaa

SEQ ID NO: 115460 - DNA, 356 bp, Glycine max
  unsure (1)..(356): unsure at all n locations
tccatcaagtaagctngcttgtgaggcttctattttgcatgatctttgagcttcaatgacggcctttaatggtgattttccaccatgaagatgtatcagaagacaaaggagaagaggtgagaggaggcgtcatccactanggaataagccatggaagaaggagcttcaccaccaagatgagccttggataataagctcggaaggatgcttcaatggaggaaaagaatgagggagagaaagagagaggggggagcacgaaattgtatgaataaaagagggagagaagtggaactttgaagtatgtctcacaagactctcatacatcaaagttacaacaagtgttacacatgcttcta

SEQ ID NO: 115461 - DNA, 462 bp, Glycine max
  unsure (1)..(462): unsure at all n locations
ncaagctaaaggtggattatagatgtgttnctattgagtcngaatagcgnggataaccattaatggtgtcaaaagctacaatgtttgcgaaaattctcatgcagaatattttatntatccctctatgctttattgagacattcttactcaattccaagtgtgtacataatagtttgtgaattataaagaagaagtgacgttgatttttataatgagataatgaaattcactttcatataagattttggtgtggtgaaagtaagaattcaaggtgttgaaatatcttactatgctatttgaactataattgggtccataagtgtactgaacatatanatggtgaatctatgatatggtactctctctttggagttgaatgggtgatactgatatgatggtgtatgttgattggtgaatgaactancatatcatgcatatatggataaatgacattgcatgtga

SEQ ID NO: 115462 - DNA, 403 bp, Glycine max
  unsure (1)..(403): unsure at all n locations
agcttctatatattttgaaccatcnnatcattatacacatagggagnggtattcagaaaaggagagtttatctcttttatcttactgagagtgactcttctaaattcttgaatgattcaagaataccctcgctggatcaaaagactttcaccacactttgtgtgtggccctcactgganagagagatgatttccttcctttcaactgcacccttgttctttcagaccacagtacctgaaaatccacctctatccacaattatatcgtggacataactgccatgttacgcactcaaattaagtgattcttgagcctaaatgaatatcaaaacaagacctttccctccgtgtggagtaactcatttggacccctgagccttcactattgcacttctatatttatg

SEQ ID NO: 115463 - DNA, 355 bp, Glycine max
  unsure (1)..(355): unsure at all n locations
tganattgaacaacggatgcgcttcagaaattccaatgctcataacttttcacatggatatacgattcggagacataatatatcaagacactgaatattgagcaaccgaacctctcgagacattcaaatggtctaaccttttacacggatggtcgattcgggcgcataatatattcgtgacgctctgaaattgaacaacgaatgctctccagaaattccaatggtcataagttttcacatggacgtccgggtaatgtgcataatttatcgagacacttgaaattgaacaacaaaacctctcgagaaattcaaatggtcataactttttacacggatgtccgattcgggcacataa

SEQ ID NO: 115464 - DNA, 332 bp, Glycine max
gacactataaatctcagcttactctctgcaggatctgattatagtgtaccttactacttgatttatgtgttccaattgacccgcatgcgaatgtgaatatgggatgcttcgagctgactttttgccactgagcttaatatgcgttcatgcttcatgaacaaggtggatatacgcgtatgagttcgccgaacccatattggcctccttaacatgaaattctctcatagaaatggatatggtgtgcattaagtggttagactgtatggtcgaacacttcatactctatgacaagagcttggctactttatcagctgagacaacccttctttact

SEQ ID NO: 115465 - DNA, 427 bp, Glycine max
agcttcagtggctaagcgcgaggaagaatccttaagatgatgtgctgtcaagtttgctaagcgcaccgcttcaggacatcaagtgcacgacttcagctcatccgctaagcgaaacaagcgcgctaagccaaaatccacttatgcgcgctaagcgatccagatctgcgctaagcacaaaagcacgaacaaggccacgtatttaagcctgaaatcacatatgcaaagggagtttggcacttttcttgagaagctctgcatgcacgaaggttctaaagagagaaaggtccaagttctagagagttctgagagattgtgctgtgtgaagatctatagagatgcgagttcgaagcggaagccgttctgagagctcgagatgagtttgtgagtgattgtcagatcctataggcaaaggagacatcctcaccac

SEQ ID NO: 115466 - DNA, 449 bp, Glycine max
  unsure (1)..(449): unsure at all n locations
tctagccaaatggacttaccttgaattaattccttggatagtccttttgagccctggttccctttcctttgtttgaagctcactaccagccttaaatgaaaaaccatgatatcaccatatccttaaggaaatttggagccttggaatttgtttgggaataagtgtggggggtttttgttcattggataacatgttttgttggctatgcttcatgatgtattttgggccatacttgatgtacattgtatattggttaaatgttggacatgctgaatgagatgttgtttctcaaaggctacgtacgtaaaaaaaaaatcgaaaaagaaaaagaaaagcaataaagttgagtgaatatgatcttaaatgacaaaagtatgatgagaactcttggtctanctctntatgttaaaanttatctttaccttcttttattttcttaatttttctta

SEQ ID NO: 115467 - DNA, 165 bp, Glycine max
tattttcaatgcaattctctttgcgctatcattaataggatagacttttacgaaagttgcgccaacctttttctatttttaccattcccatgaacgaagcttcattaataacacagaaagtccttttgtttatccagaagaactctgtctatgtttgtttcccag

SEQ ID NO: 115468 - DNA, 342 bp, Glycine max
agaattaagatcaagattcaagactcaaaattcaagaatctataaatgacttaatctttatttgttgaaaaaggtttttcaaaaccgaatatcacatggaattttctcaaaaccatgttaccaaaaaagttttactctctgggtatcaattaccagattatttgaaatcgatttccagtagcaaaaatgtttttcaaaaaactttccaatgaaattacaacgtttccattgatttcacaaagctttaatcgattacaatgttttggtaatcgattacctgtgtccttgaacgcttgaattcaaattccaatgtgaagagtcacattctttcacataaaaacc

SEQ ID NO: 115469 - DNA, 52 bp, Glycine max
agcggtgtagcagatgttaaaggaatcctacttgctactacaactatcttac

SEQ ID NO: 115470 - DNA, 235 bp, Glycine max
  unsure (1)..(235): unsure at all n locations
atgtgtatcttttgatagattntataattataaacgacactattatagagagggttggagtagcgcctattgtatataagatggtggaaaatatacttacgtggtttgggcatgtatagagaagaccggtagactctgttgtgaggagagtagaccccatggagagaagacaaacaattcgaggcagaggaagacccaaaaagactataagagagggtattaaaaaggatctcga

SEQ ID NO: 115471 - DNA, 430 bp, Glycine max
  unsure (1)..(430): unsure at all n locations
agcttgggctcttgcctcactctttcttctttttggtttcattncnagcnatctgatacttatgccaagtgtcagaagatatacacctagaccactccttgaaacactccttttgtactctaactttgctctgagcattgtcattccagcaccacgattcattacccctaggtccaaaaactctagattcagccaacgtctctttagccactttaataatctcttgggacatcttgttccacatatcatttgcactgtcttgtgattgtgcacaccaaccctaccatatcttttgttggaagattgcttgtttctcacccttcaagagccaccataagatccatggcgctaccataggacttctactctatgccctatctgtaatgtttacatccataaccaaaactctatgttgggtaccgagctctct

SEQ ID NO: 115472 - DNA, 424 bp, Glycine max
  unsure (1)..(424): unsure at all n locations
tcttgacgctgttgacgaagcgcgcgaccagacttctgctcttgttcaccaccacgcgccgggcgcagcacagtcgntgactcaccgagatcccgcttccgcctccctccatatcttaacgaggcgaggagacctccgccgccggtgctgtacgcacgaccgagcgcgtgataagccttaaatcccgcgagaattttaccgcgaaaacggtgatttagggttcggacagcgctggtcgcaaagtgcttactctgactctcttagttcaagtactcgagctgggtttaaattcttggaagggagcgggagattctataagatacgagagatgagaaatatgactatgtttacgcgagaacaacgcgtgggagtgccatgattgaaaaagtgtgtgtcggaagcgtatataggacctggtcgactg

SEQ ID NO: 115473 - DNA, 371 bp, Glycine max
  unsure (1)..(371): unsure at all n locations
agctttacaaatcggggngaaatctcagtccattaataaaataacatctagataagattagagttgataagatctagatgaaataatatctagatgagatcaaatcttaatgatatcaagataagataaaatttgggagaatgaaataatgtgctctcttcaaggccaagcccaattctagattcaagccgcagcccaattctggattcaagcccgattgcttataattctcctgaattaatataaaaacaaaattaatccagtacgctccaatgataaaactgcataattaattgacaatgacgctaatcagaattaaatgatgacacatcaaatccctccacttacctttgcactctggcaaaaaaaaa

SEQ ID NO: 115474 - DNA, 452 bp, Glycine max
  unsure (1)..(452): unsure at all n locations
tccacaatatccaaacaattcaattncatttgtctgatactaccctaaaccgagaataacagaggagaggttgaaaactccgcacaaaactcattcaaattccacaatgtttcctactcacatacccgaataacattctgtttgttctgattcggtaaccattggatcaccttgaaaatttaaccgagggttcctaatacagaaatctaagttttgaccgttgggatctgctagacaatatctagaacccgagatgtacaacctttgctgtgactaacactgcacaaccatttttctgcataagtggcaaaattagctgcacaatttgacagcttatgctgcataatttggcagatttcgaattctagcttgcttgtatccaatttcattcaaattggatcctacatatcctaaaccatgtataaatcatgttcaaaccaataacaaacttc

SEQ ID NO: 115475 - DNA, 448 bp, Glycine max
  unsure (1)..(448): unsure at all n locations
agcttgtagaactccccagatgctaatctgttgttgcatacaaaaggngttggatcgagttgcctcacaataattaaaaagggggggttgaatttatcattcctaaaaccttaccaactaaaaattactttnttaaggcttttacttttgttgttaagagaatatggagtagaagagaaacataccacatagtaaaagcaaaaattaaatgcacagcggaaagtaaaagagttgggaagaaagaaacaaacacacaaaagtttttatactggttcggcaacaacccgtgcctacctccagtccccaagcgacctgcggtccttgagatttctttcaaccttgtaaaaaaacattttacaagcaaagatccacaagggatgtacccttccttgttctcattcaaacccaagtagatgtaccctctacttgtgccacaaaggatgtaccc

SEQ ID NO: 115476 - DNA, 335 bp, Glycine max
tcattcacaagattctttgcatcttcggaagcctacaaatgaatataaactctccacagtggaagagaaaagttctttgatcactcttccatttcttcctaacgaatgaatagaatgatacatactgctgataaaatggtggatagaaatagactttgagaggtttcattctccagacaacattgatagacactagacagatagacagacaatgtggctgcacacaattttttgttcatattgcctatacattgttatacctatatgtgataactacaaatccgctggggtgaaattgaatcacaaattctctcagatcattgtgcgaaaatcta

SEQ ID NO: 115477 - DNA, 325 bp, Glycine max
ctacgctctctgcgctcactatgctaatatggcactaccaatgtctctccctgatcatgacaatgccttcacttgaattaactttgggatgtaaggacactccataatggatccgtgcccacagcactgtagggggtatatcatattggaagaactgacagggaggctattgtcgggagcatcttccctacttcgtgtgcgtaagccaacacatgaactgttagggaactgaaggattctcatggcttggctacttaactgacattcatacactgctcatgggctcctatgtctgcacttattccttctcgagatttctcgaaca

SEQ ID NO: 115478 - DNA, 229 bp, Glycine max
  unsure (1)..(229): unsure at all n locations
tgatgattgatatgccagtctgcttatctcnattcgtcgtcaaaaaaatcatgctgaattgattgtaanaaagaaataagagaagatgagtgataagattctgtataaaccattggacctgtgattgtgatttaagatggttacatggctattcatatacatgtcttatctggatactctatcatattttctactgtctgccatacactaaacttgtctattcttgtga

SEQ ID NO: 115479 - DNA, 402 bp, Glycine max
  unsure (1)..(402): unsure at all n locations
tctgacattcaccacagattctgccttcttctattttcagattgtgaatgcctctaacagcacctttgtcaatgattttcttcatgcctcttatatgcatatgcccaaatctttgatgccatattctgacttcatcttctttggagaatagacatgtggaggagtaactggtttcttgaggtgtccatangtaacagttgtcctttgatctgctgcccttcattagaacttcactcttctcattngtcaccaagcattctgaatgtgtgaagtttacattgaatccttcatcacacagctgactgatgctgatcaagttngcagtcagtcccttcaccagcagtactttgtccagactanggtagtcatcatggactatctgtcccattccagtgatctttt

SEQ ID NO: 115480 - DNA, 295 bp, Glycine max
  unsure (1)..(295): unsure at all n locations
ccttgtattgttcttgattcaatcttgaacatcttgaactcatccttngattcttgagatcatcatctttgttatcatgaagtgttcttgacctttgagctttttgtcatcacctttgttatcatcaaaacttctttgaatcaatcttgattcatgatgaagctngcttctacaatttctagctaagaattttgacaagaaggatatgagtgatgcatcttatgacattggcatgtagattcatagagatagacctcgaggtatgttaggtctatcacaggaaacctatattaat

SEQ ID NO: 115481 - DNA, 53 bp, Glycine max
tgactccacggacaatactcatatctcttctcttcgcatacatgttccatcta

SEQ ID NO: 115482 - DNA, 320 bp, Glycine max
  unsure (1)..(320): unsure at all n locations
tgaatgctgatggaaactgtagaataaggtagagtacctanggtgaaagtgaaatgtgtgtttgatggaaaaatgagcttgaagttgaggctaatctgatcatggtaatggggttaagtagtaatctatttgaatgcttagactaagaaaactttgctgtcaatgtgaattgagtaccaaagtgaaacaagccattctaggtaaatggtgtgagatcaattgatcgtggatttagcataaccagttgccaatttgataatgtataactgtgtgaggaagttgctcaattacccattctatttcactctcaaccatgaaat

SEQ ID NO: 115483 - DNA, 341 bp, Glycine max
  unsure (1)..(341): unsure at all n locations
cttggtctctgagatcttacacaacataatctctcatatacttctatatctgggaccnttctctctctagatactctagacatgcaatgctctgaatcccagtccaaactcttcctctaaaatctaatttcaaggctaaatagatggccttgttcgtgctcatgcgcttatcgcaattatggaccgcttagcgcacattattgaattgtggcttatcaagtgcctttctcacttatcggatgaactgaagcggtgcgcttagtgagatgaagtggtgcgcttatcgaacctgtacaactcatcttcttacagagtcttcctcgcgtttagcccatgaatgt

SEQ ID NO: 115484 - DNA, 294 bp, Glycine max
cacgatttcttgtctcttatataaagacataagagtgttacgattctcctaacatatcggtcgtgtaaatgatgcattacataagatgtttaatccatattgacgacatcgtacctctgacatatttctgtaaccctttctcattagcaataatacatccactttcttctccaacttaatgacatgctcatcagtatcgtccacctatttagaactaaatacttattaatgatatctaaagaaagcacatgacacattacctatataccttctcaccgtcgccgatgttggttg

SEQ ID NO: 115485 - DNA, 196 bp, Glycine max
  unsure (1)..(196): unsure at all n locations
gtgtgtgttcgatagctgcccaatgcgccgagatatatagggtntgcttctcgcgcgggctgctacactggcatctccctgttgatatcatggcacatcatattgaccgtcgtatctgtatctatctgagcgctggctgatgccggaaaaagatcgaagatatggctgtcatatcctgtggctgctgcaatactcg

SEQ ID NO: 115486 - DNA, 339 bp, Glycine max
  unsure (1)..(339): unsure at all n locations
aaatctatttgcatatagtttactcccactttggttttgcaatgttgcttatatgagacaattgaagattcatatttttcatgtataanaagttgtctcataaagaatagataaatgttacttactattntatctgttatctttctctccaactgtgtcaacatcaaanacaaatcatgaatagagaggagaaaaatgtaccactgtgtgaatgtataaaatcaatgataccaatgcataaaacaactatttgcctccaaacacatcatcaaccacatcatacataacaaactatcaaacatataagcatcactacttcatatatatatgcattaaata

SEQ ID NO: 115487 - DNA, 217 bp, Glycine max
aaatgctcttatatcatgtatcttctaagaacctcttacacaagctacctgtacgtcgaagtgctgaagtacattatctgagaccactacaacacttctacaaccttacaatcttatgtccaacaccatatgtcatggattattttccttatggataacagtctaaatatacaactacagtggaaacaactgacatatatatgctagtatttgttat

SEQ ID NO: 115488 - DNA, 322 bp, Glycine max
gcccttatctgctatgacgttatactcatgcttcaaattcttaaatgaatgagttgatctcatcaaatagactgtacttttcaatatgaccctactctctcttatcataacaatctttctttatttaacaggaattaaatgcatcgactgatgactatgtctaaatattcacaatgagttattgcaagatctctcaactagaaagcgagatttactttattgataccgcctctttacctacatccactattatagtatttatttactattataagcgaatttactttttattgataatttaaattatgggtttttatattat

SEQ ID NO: 115489 - DNA, 232 bp, Glycine max
gcatatgtatctctcatctatcgatacttatcaatatactatccgtatgcctttttgccttaccaaagagaaggcctatgctgctttcaaacagtactattactctctacagtatgccctaactgcacgatgtacagtacatcgtagatgtaggatgaatgatacatacatgttggtcgattccacattggtacataacgttcgtgatacagtcgagatacgtctaatcaat

SEQ ID NO: 115490 - DNA, 90 bp, Glycine max
acttaagttcactccgtttaacttaagttgacaacttttccccttcatacctaatatcagatcccattcctcctatcttttattttggcc

SEQ ID NO: 115491 - DNA, 400 bp, Glycine max
  unsure (1)..(400): unsure at all n locations
tttctgcgtagccgctcttggtgctcataatatcccatatacagatccctgctattactagctattgtgaattctgtaggtcctgaatgtacaaccttcantatgtngctcgttcccctctttcttttctgcnaaaaagaatatcaatatcatagaatacatggatgaaatcctaagaaaatcaatatcaaagataacatggatgaaatcacaattgataaccacaacctaccaatcttcagagtccttggttaatttgtcttgtctcttattgtggtggagtttgttaataatattatactgttgcactccataanataactatgactgatcactctttcattaatcctatgttgtatggtatggtataaaagatcatgggttctcacctgcctcacta

SEQ ID NO: 115492 - DNA, 340 bp, Glycine max
  unsure (1)..(340): unsure at all n locations
gagtggtacctagagatatgtcgcggtggtcatgagaccttgtggacatcatgtggngtgctattgcccaaaaccaatcttgaccaatcccgacccaacccgggcatagtcagtcagtgagaacctatgatgtacctaatcatgcgagctcctggcattcaacatataataggaacttagaccacatatcattgatgcttgtgtggtggctggccagctgtgaaccttgatngatatatgggatatggcctctggtaatcgattaccaagggtgggtaatcgattacaatgcttaanaatgaagacaagatgctaagatggtctctggtaatcgattacc

SEQ ID NO: 115493 - DNA, 170 bp, Glycine max
  unsure (1)..(170): unsure at all n locations
taagctcttgacttattttgtgtgtgtaccatgcttcatgttccataaaagaagaanatcatgcgagananatgatgttgtataaaagtagagaacacgttggtcttcctaatatggtgcctgatgctaaaaagatattctctatctaacaatgctcatgtgttcttatg

SEQ ID NO: 115494 - DNA, 311 bp, Glycine max
attatggtggagatgacactacgtatcaccaacttaagtgtttaaccctacaaaccatacctttccaattaatattatgggcatttttttgtattaaattccgaaaatgacaagataaggcccacatgtgataaatataatgtataatatgtataaaaagttataaaaatgaagaagaaataagcttttttacattctaataaacaagaatgctgacacatacgtataaatatagtgacaattaaactttattctaaatgcaataaagttttattcacttaattatatagcttatgtattttctgatatta

SEQ ID NO: 115495 - DNA, 341 bp, Glycine max
  unsure (1)..(341): unsure at all n locations
cttgtgggtngatgggttctgtcgccagaatgacatgatcactgtctgacatattctcaattagctcatttgcttctntcngngtcatcaactntattttttcccctgtataagcatatagcagttgcttggtttgtgtgtccaacccatctattaacatattcaatngaattggctcataaaacccatgggtgggagttcttctcaatatacctctgaaccttccaatgcatcactcagagattcatcagggaactgatgaaatgaagagactacaactatcctntccacagtcttggactctgggaagtatttcttataaacntgtcaacaacttcttc

SEQ ID NO: 115496 - DNA, 445 bp, Glycine max
  unsure (1)..(445): unsure at all n locations
tctattattttattattattagtacttngatgtccagcagtgtatntggctatattattatgatatntgaacaatntactatttctttatttgcatggtatgtntgaacaaatattaattatgttatntgacaatgtggtttntatatatttgatctagttatggttcttgcttcatgaattggtttatatttttccatgaatgttgtatggatgcttanttgtatttgtatgcttcaaacttgttacgcattttggcattntgttgatgccaaagggggagagaaatatggattaaatcaagaactcacatgagtaatcaacttaattgtaagagaagcatatatgcaaaaacaaatggggagaatggaaattatatgagtatcgactagaaaaatggtgtgtgtggtgtggtgttctgattcaaaattgcatatcaaaagggg

SEQ ID NO: 115497 - DNA, 327 bp, Glycine max
  unsure (1)..(327): unsure at all n locations
actttactcggatggtctatngatgttccgtaatatattcttgacgctcaatattgaatgttgaagctctaaccaattcaacgacattacttgttactggatgtctgatgagtccgtatatttctagacgctcgaattgaatgttaagctcagagcaattatacgaaaataacttttactcgatgcctgatagagccctgaatataacgagacactcaaattatatgtgaaccttgagccaattaaacaaaatatactttactcgatgtcgatcagtgcgtttattcggacctctaatgatgtgaacttgacaatcaacacatactt

SEQ ID NO: 115498 - DNA, 385 bp, Glycine max
  unsure (1)..(385): unsure at all n locations
tgttcttcatatctagagttttacctctacatgaactgtgacagtnnngtttctttcgataatgttcattcatttatagagatgtctaccatcttcaatgtgctccacacaaaaaattatatatacctaagcttatgaccttctattggtgtcatgaaccatttgttgtttatatgaatgatgagtttgttttttggtacaatcaatcaccatcttgataatgtctgctacaaacaatcaaacatgcgcagcttctctaaagtctcttctaatatattgctgcctgttaataaatagtacttatgacacaagaaaacaacataatattgcatttcatacctgcactatcttaaagcaaacactttatcttcagtatgtcaatatc

SEQ ID NO: 115499 - DNA, 322 bp, Glycine max
  unsure (1)..(322): unsure at all n locations
tggatcgtgttcatcattgcttcgtctactgccaaacacgtntaggattgtngatatccatgtnacttccagcttcaccttgacaaagatgtcatggaccatgttgaaatattaaattgattcaaccacatgtgctgcgtaaaaattcgcaatacttcaactatgcatcattcgcatacatgcatacgtttcattggttgcattgctcattacattctgtccttgaaataataaagagaacttaatcattgttataaataagatataacaacacattgcttacngtgccctcaccgaacttgtgctagagctagggtaatgg

SEQ ID NO: 115500 - DNA, 397 bp, Glycine max
  unsure (1)..(397): unsure at all n locations
atactcactcatattatttatatctatacatttgcacctaanaatttcttaatcgtgttcattttaattatgttaaactgtgttggttcctctaggtttcgaataccataatacttcactaatttttaaagtaaacagagaattatatgggcttaacaatcaccaagataatggtttgacatacttataaccattcctttgcatcttggcttctttgcatgcaaatgtgatccatctctctttatcacctaatgggatctgagagtatgggagctatgatagttattgtagaaactagtagtagtagtagtatatataaaaanatgtataatactatacgctgtatgttattaaatcagatatgtgatctgatatactgctgtgacatttgaccaat

SEQ ID NO: 115501 - DNA, 344 bp, Glycine max
  unsure (1)..(344): unsure at all n locations
ctacgtctagaagtggaacatatgatgtatacaaatcatatagaaggcctgtcacagatgatgagactaatatgatcgagtcattggccaatgcagcatgcaccgtatacagtatatacgtattcatgataccctcgcatgtttacaagagattcttcgtggtangcaatggtctctcaatcttcacttttgaaactctgaanatgtcattgtgaaatttcaaaacttggtggtttggccctggttggataaagttctacatcagcatgtacagaagggaataagaaggtaaatgttntgaatctcttgaaatcaacttaaagtatgtctgtatgtgcattaca

SEQ ID NO: 115502 - DNA, 287 bp, Glycine max
gaaaacaccataactatacgcgccggtatggatccctatcgcaccatatccaaatgtataacgatgggtgatcaataggatacgcatgaacatatgaaagccgacatgtctgctctgaaagaacaaatggtctccatgatggacgccatgttatgtatgatacagctcatggataataacgctgacactgccgtcgctgtcagttctgctgccgaagcataccctactctcttggcaactacgcaccatcctccctcaaacatagttggacgaggataggacacgct

SEQ ID NO: 115503 - DNA, 157 bp, Glycine max
gggaagagaaggaaaaggaaaaaaagaaggaaggaagaagaagagaagagggaggagaaagagagagaaaaaaaaggaggaggagagaaaaggaagaagaagaaggagaagaaagaggaaagaaaaagaaagagaggagaagaaggaagaagaagag

SEQ ID NO: 115504 - DNA, 357 bp, Glycine max
cttctactttattcgtttccacagagtggtacctggagatatgtcgcggtggtcaggagacctttgtgacgtcatgtggtgtgctattgcccataaccaatcttgaccaatcccgacccaacccgggcatagtcagtcagtgagaacctgtgatgtacctaaacaggcgagctcctgccagtctaccgataaaagaacaaagaccacatatcatggatgcttgcgtggtggctggccagctgtgaatattgagtgatatatgggatatggcttctggtaatcgaataccaagggtgggtaatcgattacaaggcttaaaaacgagatcatgaagctaagaaggcttctggtaatcga

SEQ ID NO: 115505 - DNA, 77 bp, Glycine max
actatagataacacatattctcgttcattgatggatatcacctaatgacaaacttaaatgatgcaactatccgttcg

SEQ ID NO: 115506 - DNA, 287 bp, Glycine max
ctcctactttaccttatcgatcttcaatattcattttgaacgaaaagttttcgacacgaatgtaggacttattggaactaactgaagatcgatcgtttatgagactaaacactgaattgctgtacttattcatgaattcacccctgaacagctgcaaatagatgatctttagctttactctatcaatattatgcatatttcatactgatacctttttgtgtgtttgttaacattacacatgtttgtacgacatgtgccgctatacaaaaaccgttagcattgacttc

SEQ ID NO: 115507 - DNA, 224 bp, Glycine max
  unsure (1)..(224): unsure at all n locations
agagagattggggagcacaatattgaagaagataaaggacagagaangtgaactttgagttgtgtctcacanaactctcattcatcaaagttacaacatgtgttacacatgcttctatttatagactaggtagcttccttgagaagccttcttgagaaaacttccttgagaagcttctttgagaaaactttcttgagaagctagagcttatctacacacacccc

SEQ ID NO: 115508 - DNA, 266 bp, Glycine max
attattattgtatgtgatcgaataatatattaattataattggtggttaggtttaaataaaggttaattcttctacctatttaatgtaaatagttacttgtattagtttgacggaattatttagtttgttaatatatagtaattgaatgaataattagtttattaatgaatacttgactagtaatttgtaaatttaattcatggagtattagacatgatattgttaatgtaatttgcaaaaaatatagtttttaaatcgtagtaag

SEQ ID NO: 115509 - DNA, 394 bp, Glycine max
  unsure (1)..(394): unsure at all n locations
atatgtaagaatcaaggtccaattgtgttgtccactgttaaagcataatacatatcaatggcaagtttttgtgcttaactcctttggataatgaactaactngaagactacaacatctatgagagtaaaattcctatcttctatgataataaagttgttttcggtctttcagaanaacctacattgcattcaagggataacatatagaatataagcatcactttataagagaccatgttcagaaagggatagttggatgtatagttatacccactgatgattagcttctaacatattcactanaccgtttactgaagaaagggtganntctataagaagtcaacttggaatggactnntataanggatatagtaatatctatatgtcatccact

SEQ ID NO: 115510 - DNA, 293 bp, Glycine max
  unsure (1)..(293): unsure at all n locations
tagtgcttgatttcaccctctcactaagccaacactcctctgctgagcgcgatgaataatttggaataatcatgatctgtgcatgtgtgctgagcgaatggccatcccgctaatcgcaccgctttagtccattcactgagcgagaaaagcctgcgctaagccaaatatcactaattcgcgctaagcagttcagaattgcgcttatcgcacgatcatgaacaatgccacctattgaagcctgaaatcagaatttggaagggagtttgggccttntcttgaacntctacatatct

SEQ ID NO: 115511 - DNA, 247 bp, Glycine max
  unsure (1)..(247): unsure at all n locations
tatgctatatttgggaanagaaaagaaagcatgcagtttatttttttgtattcagtaaaaaatattatgtataataaaaaatattaattnttataaaattatcttaaaagtaatattggcaataatttgaaaattagaagaaagtttattcacttgagtacatctgccgtaaattcttgactagtgctttcttaggtttcttggttgggtttanggtcagatgatggtggaggtagatcttttcttt

SEQ ID NO: 115512 - DNA, 327 bp, Glycine max
tgattgttaactatgatctattggactgagattgttggcaatggagaagaatggattcaaacgcctatgcaatttgtggaatggcacaaatttgacatgcaaaaagctggtgggtggtgggaagctagcaaagatctggagttgtataatccacgcataatgagctatgacaaactcataaattgatcatcacgttacatgacaagatgtctgggcttatgaaaacggattgtgaggtacaattttgctgttgttgtgctgaactggcgtgatgtgttgtgatcgaactggagtgtgaccggtaaaacagttgctctgatctactat

SEQ ID NO: 115513 - DNA, 254 bp, Glycine max
tatgtgaccatggcatgaattgtaaaagaagagatcaatcatctatatgtcaatcttctctcaacatcattcaatatctgtcaactctgtctattagaatttctgattcttttactcttcatctgtctaaaagtgtttgttcaaaactttctcttcctagataactcctttgttcaattacttgtgctattcatctttttcattctcttctccctttgccaaaagaatgaatgactaaccgcctgagatatctt

SEQ ID NO: 115514 - DNA, 220 bp, Glycine max
  unsure (1)..(220): unsure at all n locations
tgctggtcttatagaagaacatgctctctgaacaaaactctttgccgaatattcactacgaggccaaaaagatttgtgtcagtgggaatggagtacaagaagatccatgcatgcnctaatgatngcatattgtatagaaatgagtatgctgaactacggcaatgccccacgtgtggtgtatcacgatacatagtgcaacacgatgaattaactgatgatg

SEQ ID NO: 115515 - DNA, 177 bp, Glycine max
gttcttcagagtcaatagttaacaataattaaaatcttaaaagaagatttgaacacaagataaattagcaaaaaatggaatggagtgtacctctgtctcccaagtctcactcatgctcctctatcatcaatgaacattagcttttgcaatggtgtacttgaacaatagtgatggctc

SEQ ID NO: 115516 - DNA, 358 bp, Glycine max
  unsure (1)..(358): unsure at all n locations
tctggtttaaaccctattaatgatntaagttgagaataaatgagatgggtaattggacaactctactacaacttatacatcattaactgtcaacgattcactaattcacgaccatatgactctacaccaattacctaaatggttttgtcacttgtcattgttttctcttacacatccaacttctgtagtctaatgacttaactagatactacttacctcaatccataatcaattggctcacttatactacttttcatataacatattatttaactagtaatcacctatttacattcatcaattagctaactaagctattaaactaatgaggactatatcactgagtactgttaaaatt

SEQ ID NO: 115517 - DNA, 457 bp, Glycine max
  unsure (1)..(457): unsure at all n locations
tttccttgacanactcacctgacaccgacaattcttctcatggnggcaataattttggtcaattacaatgggaatttgaacattaaccatggtagcatggtggaaaaggatgttccttgcatatccattgctatgtcttccacaagacttaattcgtacaccattttcagttccagtaaatgtcattggtttaactgtcacattttgcacaccatgctcttgaaaatccttgcctanacttccaacactgcatgcacatgcatgttaaaccaatgttcaacatataataataataatatactctctaacacnattataacagatngatatttattgacgtaaataaatgtcggagtcactacagaaaaaatgagaatctcattggtatgtctcacataaatgtcacttaataatgtgtatgaaattgagttaagtgtgatatatgtagcaataaata

SEQ ID NO: 115518 - DNA, 363 bp, Glycine max
  unsure (1)..(363): unsure at all n locations
aacaatatggtgggtatatcactgtcaatgaaactcaatgaagaagcactgtctatttggtttttgaggccactcacaaactataacattaacctgttctcttatggctcaatgggggtactntnnttttttttactaacccagctcttcatgtatatatgtatattgcaatcgtttgtatttagtggtcactctcatgactaatacatgataacntaatgaaaggtaaggtaatntctagtgaattaatctttaatcttataggctgtttaatcttatctttgatttaacatgtataaaaggaatgagaanatgaattcatgatatttatggaaatgaatggaagatatagtatttaacact

SEQ ID NO: 115519 - DNA, 365 bp, Glycine max
  unsure (1)..(365): unsure at all n locations
ctatagagatcatnngaaatatgacctctaatgctaatgaatntcanaatgatagaatcatggttccatcaataagactattgaaagtcaatactcaagatggtctcttagcccaataaaagtttgtcactatgcaaattgaagagcttacaccaataaatactgaggaagtttagtatatgatcgaataatcaaaggctagagaactacaaccaccagggatatagatctcttcctatgataagacaaggtgaagatcaanggtggtagtccaataccatgcctatgaataacctatatgagaagacaagcaagctagatgatatactcacacaattcatatccaagaatctctagtatatcat

SEQ ID NO: 115520 - DNA, 303 bp, Glycine max
  unsure (1)..(303): unsure at all n locations
ctcatctatcatctacacctatgatcatgcctatgatgtgctatctanaattttcacatagtgattccccctcttacacaataacangggtcttcaatatgtgtaagagtgtcctatcaaacttataaatgactctacctgcctgctangtgttttgactcaggtcatagatgttggcgtaaaactcttcacatggcacatcatgctccatcttgatatcntcaattcctcatccagtggtgtctcgctatctcatctaagaattcatcaaactctatggtatatacaaccatgttcctctca

SEQ ID NO: 115521 - DNA, 211 bp, Glycine max
  unsure (1)..(211): unsure at all n locations
gctgcgctttctacatatatgacatgcatgatgcctntcacactgttccacttaaatttccatatgctggaaaatcattaatagtacaaaacaccattgcgtgtaacatgaacggttgctgcacatttgcattccacacatctatcccttcttcccacaattttttcaagtcttcgatcaacggcgtaaaatacatatcaatatcattccc

SEQ ID NO: 115522 - DNA, 391 bp, Glycine max
  unsure (1)..(391): unsure at all n locations
gatcctggtaaactcttgcatcagnttacttcgtcttctttctcactcatttcttgatccgagttctttgagagtctcttcacagcaatttctatcccactatcttattttccctacataatcacatgtatgagtagattctctgtatactataattatatagaatatttactcgtggagtatttgagtattattattaaaatccaattattggaatagccaatatacagatccaaagccaccttctccaatcttgtttcccttngagaaattgtttgtggccgcaatgattattgacaaatcatgcaatggcagatccagatcattcacataactttcattgttatattcgggccattgattctctggataaagaaaacaagtattatgt

SEQ ID NO: 115523 - DNA, 463 bp, Glycine max
  unsure (1)..(463): unsure at all n locations
tgtgggtgcatattctatacaacaacctctctggtcctattccttccacaaaaaatttctctaagtatggctgtaagcagctntattggtggtaacaatggcctctgtggtgcacctctcggtgactgcagtgatccagcttctcgctctgatactcgtgggaaaagttttgattctcctcatgctaaagtagtcatgatcattgcagcttctgttggaggtgtttcactcattttcattgtagttattttacantttatgagacgtcctcnggagtcaatngattcctttgaaggcactgatgcctcctcccatattcagatatctanttccctccaaaggattgtttcgctntcatgatctagttgaaccacaaaggattcatganactatgtatnggtagggacatgtgaactgttataatgcatgataaatctggtagacattgagtaaaagtacatct

SEQ ID NO: 115524 - DNA, 274 bp, Glycine max
  unsure (1)..(274): unsure at all n locations
tactaagctatatccttctgatactatgaagcctgtaattactcatttttgttnttttacanacctngtcttttctgaatacacttaagaaaactcattagcagacataaacctagaaggctgtgaattttgttagaatggttatcataattaaaacaccaagggttttggacttaacatgaccactccttttatttttactttcattccattctctttacttatttactcacctttatagtgtaaattcaatcaaaccccaatccatctacaa

SEQ ID NO: 115525 - DNA, 341 bp, Glycine max
  unsure (1)..(341): unsure at all n locations
tcgtctaaacttggagtgatacaatgcaatcctctatattcctnntcttacaccttttcgtcatgccgacactcgagaagcccaatatgtttttccttttcaatatactatgaacaaaattcaataacttcttctgctatgtacctttcaacaataggtgcttcaagacattgtagattctttgtatacccttttaagatcttcatgtattgctcaaccgggtacatccaccgcatataaatgggaccacaacattngatttcccttactagatgaataatgaagtgaaccatgatgtcgaaacgcgaatgatgaatatacatctncaactgacacaatat

SEQ ID NO: 115526 - DNA, 425 bp, Glycine max
tatcaggtcatctatatttctaatataaaaaatgttctgtgtatacatttcattgttatagttaatattcatctgtgtttaatccaccttgattgttcttacatatgatatatcttgtctgtgctttgtttctatctatatgagaatgacatgtttctttacatttgtcatttgaaattccttatagatgtgtgatagtcaaatctctaaaaatatcaatatgttgatatatatgatatatatatgtcacatgtgttaatgttgagtgtattaaagttcgctatgtaagtaatcttcttcatgatgtatgtatacgtacagccttctggcctctcacttattatattaaattttaactcgggcatgcatgcttgtttcataaggatgatatatttaatgcataatacaatgtggtctaatatatt

SEQ ID NO: 115527 - DNA, 269 bp, Glycine max
  unsure (1)..(269): unsure at all n locations
gaaaccatgtggatctctataacttgaacttcatgctactcaaatcataggacgtgatgaaatgccttcctcgagctgattggagtttttaaactttacactcttcaatttcaactgtaccttaatantgatccnactcatgcctctcttgcaatgatatgagatagctgagctatactctctaccctgcatctacatgtgctattatgatggtcaatggctaggcttatagtatctgaataatctactaatgataaagcgtgtatgtg

SEQ ID NO: 115528 - DNA, 327 bp, Glycine max
aattcgtattatttgcttgcttccattagttacattgctaccctttgtatagaagttttctctgattctaacaatcctaatggtgcttttggcaatttgccttggatgataaagacaaacaatatgaattatgcattttaactgatacgtgccacctcatcggacaaacagaatctgaggatttatgatcatgctgcgtgtcactgcaatgcacactgcctcactcacttttcactaatccttatgtcggatgctaacagtgccctcttggcctatttattcctgaatgttctaatgggtctgcattgccttggtctctgtgtgctc

SEQ ID NO: 115529 - DNA, 397 bp, Glycine max
  unsure (1)..(397): unsure at all n locations
tcatctctaaatgtctcttatntaagcaataattatcatagatgtccatgatggacagaagttgtaccttgtagtgaagtgcctcaaaacctttgagtaaaaattcctaactacgtaaataagtaaatatccatgaaactaaatganaatttacatcataatagattattagttaagtaagggcagatggttagtctacataatgacaagcatgcgtacacacaacagtagttttcattatgtcattatttcctctattctttcttatgttgtagttgaatggngtggagagaatctctaaatgctacagtagtgattaagcaagatacataactttcttattcctttaccaccaccacccgaatatgcacttgtgctacttaatcaatcaatgatg

SEQ ID NO: 115530 - DNA, 295 bp, Glycine max
  unsure (1)..(295): unsure at all n locations
atataaaatgatggttatatgggtaatatggtttgttaacaatttaagatagtataagatttttttaagtttaaggaatgcattattggataaaaacatgttgagttttaaagttgactatgttgaagtataaagatgcatccctatgcctatgctaatttttaatgtatgtggattagctaccganatgagtaacaatttattatggctttggtggagaatcttagacttaattttatttcattctaaaaaataagaatatattttatcctatatattgaactgtagtactatg

SEQ ID NO: 115531 - DNA, 367 bp, Glycine max
  unsure (1)..(367): unsure at all n locations
tactaagctcatggagttctaatatctggtctgttcttgatacggaacctgctctccttcctgcaactcgtgcaatgtangaactcatacctgtgaaagtttcgtttcctcattgcagagtctttccagttagccacatttgcctggtgtgtgtaatatttcgtcagaagtgtcttccagagtggaactctatcttcatcttcacaatgaacccagatgttgctcttccaccttccattcccttctttcatagcatgcttctcatacgcttctggagtcacattcactgatccaaataataatngtaaaactaaattagtgtaataagaatatctattatctatantttacgtgtggttcttatgtt

SEQ ID NO: 115532 - DNA, 333 bp, Glycine max
  unsure (1)..(333): unsure at all n locations
cctcttcacgtctggaatatgaatgtagcatatagatccaaactctcttangtgacttgctgatggcttcttcccattccaagcttcaatnggagtcttgtcttttacagacttagttggacatctgttgagtatgtaaacagcagtgtagactacttcatcccataatatgttatgtagtcccttctccttaagcatcgatctatccatctccataactgtgcgattctttctctcggacactccatgnttgtgaggagaatatgcgactgtatgtngtcgctcaatgccttcatcctcacaaaatctttcatactcgcgagaggtgtactc

SEQ ID NO: 115533 - DNA, 314 bp, Glycine max
taaatacaaaatatcttagcatgcctataatgtatgttctatcaaagaaaattgtctctttagataaatataattcataattctttgctctgtagaccataaatttattattcaaggtatacaatataaaatatattcctgatattaatgtatgatttaggaatatctttccggagtagttaatatcctgctgctaataaatgtcttcatagttgataaaaatatttcttagtaaaaacaaattatggatagattaaactctatcgagtgagaatggaatattattttatttattttatttaaaagataatatt

SEQ ID NO: 115534 - DNA, 395 bp, Glycine max
  unsure (1)..(395): unsure at all n locations
aaaaataacatagagttgcatttttggtcatactgganttgtttaactgtccttcacttaaattggtctatgattaatttcttgaataacagccctcctcttcctactatcaaataatattatatccaactatagtagatgaaggtcgttagttgaatttagcaagtgcttaattttgaccaaaagtgtctaatacatagtcaagaccaaaatataacagaaatatcagaaggcagagattcaatattatcaccatgagtatataagatagcatntcatattatgacaaatatactataaatatcacataaaatcattaatatatgcacattgcacaattataaatatccacatgcagttcagagcatgcagaaccacattggcagcatgtaaag

SEQ ID NO: 115535 - DNA, 468 bp, Glycine max
  unsure (1)..(468): unsure at all n locations
agctnntgcaaattanaatttgccggtgaaaggatcaaaatgggtctgaaaagaggcaaatttgatcatcctgctttgacaaatagaaagcccggtgcaaatagagaggatgagaaggaggaaggaacccatgttgtgattatcgttcctacatggccaaattcaccagccaataatccaaaaacagcccttctcattacccaccacccaatcatccaaaaaggccattcctaaatcaaccacaaagcctgcctgacgcacatccaatgccaaacaccacccttgacacaaaccaaaacaccaaccagggaaggaattttccagcaaaaaagcctgtagaattcagcccaattccggtatcctatgctaacttgcttccatatctactcaataattcaatggtagccataaccctagccaaggttcctcgacctccattttttcgaggatatgactcgaatgcaacat

SEQ ID NO: 115536 - DNA, 280 bp, Glycine max
  unsure (1)..(280): unsure at all n locations
gatctgctgcccttcattagaacttcactcttctcatttgtcaccaagcattctgaatntgtgaagtttacattgaatccttcatcacacaggctgactgatgctgatcaagttgcagtcagtcccttcaccagcagtactttgtccagactanggagtccatcatggnactagctntccattccagtgatctttctttatagccatctccaaatgtcacatagctagaggagcaaggtcaatgtcaccangaattcgnntactctgtcatgtgtctgga

SEQ ID NO: 115537 - DNA, 492 bp, Glycine max
  unsure (1)..(492): unsure at all n locations
cttagagtcacctgcngcatgcaagcttaaagatcaaacttctactagctntgggtctgaggtaagaaacaatttatttcgaatattccattcaaaagacatgctccaggggaaaaaggacatcaagatttgtaatgatgatcatttttcaattcaagagcttgagacttcaaagttagctctagaagttcgaatcacagatttgaataaggaactgactaataaaacatctgtgataggaaatcttgaggctaatntatcangtaaagaaaaggagattggggttctgcagaagctgctgagtgagttggaagccaatgtttatcatcttgaacaggaaaaaagtcaactagagaaacacatggaggccttgataaaagaaaataagcatgaactggagcttcacatattagacatagaacaggaaaaacaacaattgtcaattcgtgtttctgttntagaagctcagttcagaagaattgacaaatgaac

SEQ ID NO: 115538 - DNA, 426 bp, Glycine max
  unsure (1)..(426): unsure at all n locations
taatagattaattttactacttacttaaacattcatattttntaacttaattattaaaagaaacatcaattnttaatattgttataagtaataatttagaaattaaattaacaatcttattgaatgataattaagtggaaaataaggacnaatataaagtgtgaattggtanagttcttatcattacacanaattatatgagtatcttaggaatcacaagagacccaaacanaaaggttatatgcttntaagaaaatacacatgagtggcttaaacatctctcatggatatggctctattttcttttttaaaatatgtataacaagatatctcgcatgtccttactttnccttttctttataatgaaaaaatttgatttatcctattaaaaatagtaatttataaatcggcgtttcaataaaagat

SEQ ID NO: 115539 - DNA, 197 bp, Glycine max
atgatggatagagtggctctcgaaatctgcactatatgcagaagtttgctggtgaaatgtgcagcaacatttgcatatgcgcacaagaatgctcgtgtatggctggatggaatagggcatacatatggcgtctggcattgcttcatagccactgaaaagtgaactatgtgctaagacttcactaacttttcagctat

SEQ ID NO: 115540 - DNA, 397 bp, Glycine max
tataatttaaaaaatccaatcagaatttatttatgtgctacaatttcatgtctcataagaaaatataaatttcataggtatatttcctttgtgtctaaaaaatctctgatcaggatcgtggtcccattctctaatattgtaaatattatatatagaaataataaatttaggagggttttttaattagaactaaatttacactcattaatttctgtagttaattaggactaaaattatactcattagttttcataattaatgttacttaatcacaatttacaaagcattcaattatgacacaaaccaaagaaactattcacaaattttattataaatgattcaagcattaaaaggaggataaaattcaattttcaccgaaagattaacttctattaca

SEQ ID NO: 115541 - DNA, 439 bp, Glycine max
  unsure (1)..(439): unsure at all n locations
ggatccttnagtcacctgcnggctgcagcttagtggatatggggcactcgcgctatgtggtactaggtggcgatcgggcgatggcgcaagataactctcccactttcacaaatcaaacattaacgtaccatccccagttgccgcaccttgaaatgagcttacacactcccacgtagctccttatgctcgttcctttcaacaccgggtccccatcaacccctcgaagcttgcacaatatccaagagattcaatgtccaaatattatgaactaccctaaatcaagagaacagagtagaggcagaaaactctgcccaaaacacattcaaatatcacaactntccatactcaaataccccagaaacagtctctctgttctgattcgttagccgttggatcgactcgaaaatcttactggagggtccgagtgcatatatctaca

SEQ ID NO: 115542 - DNA, 461 bp, Glycine max
  unsure (1)..(461): unsure at all n locations
agctttgagccanaatcctgactcaccatatttcttgacccagtgtgagaatgccaatccttaccctcggaagcaaaataagaagagaaggataatttccaatcaaaggataggaaattcccaatcaaagagtgggagaaagcataaagaaaagaaagaaaattcccaatcaaagaatgggagaaagaaaaaaagagaagtnaaaaagaagaaagctcctggtcaaagaaaccagaagaaatgtgccgagaggtccttggaccagacgatatctgaacaatacagaattgtcaccaaatgaacaaaagaaagaaaaggaaaccacgacctanaatggtcttccccctttaattgccaaccaaaaacttgtgcgctagcgactttttcgccccgcactaaacaaaaacagaataggaataagccaacataaaaatcaaaagctcaaaacacacaatagccga

SEQ ID NO: 115543 - DNA, 277 bp, Glycine max
  unsure (1)..(277): unsure at all n locations
tattaatttacctcatttttgatttcaacatggntacngcacgaccgaacggttggaattcattttaactgatnataacgggatataaaaatcaaatgatcggtggaaaatttattnntattttgattangcgataaatgactgaagcatgtcanaaggangtacggaaagtatatgannacgagaantaaaatacatganacanaatgtggaccaccacgggtacatagaatgaattgaaggctcgattgaggtactaccagttgagactgaataa

SEQ ID NO: 115544 - DNA, 322 bp, Glycine max
agcttcgcgaaatgattgcctcggcagtcgggtttgatcctgagcagtcgcagtttgccgacggcaagattaccaacggtacccgaagcgccacgctacatgaagccaccgcaggcggcagactgacagcggaagagagcattgaattcggaacactgagcaaagagtaccagcagtcgacctttggccgggcatttgtggaggtcggcgtgcatagcgcgacgggagaagttcgggtccggcgtatgctcgctgtgtgtgctgcaggacgcatcctgaatccgaaaactgcgcgcagccaggtcattggcgcaatgactat

SEQ ID NO: 115545 - DNA, 287 bp, Glycine max
  unsure (1)..(287): unsure at all n locations
tactcagctttgcgacgtacgtgtggttcgaagctgccatgcgccgagataaaaggtttgcttctcgcgcggcctgcaacactggcagctcccgggtgagatcatggcacagcanaatgaccgccgtatccgtatcgatctgagcgctggctgaggccggaacaagatcgaagatatggctgtcataacctgtggctgctgcaagactcgcggttgcctgcgcctcaagagaacgtncgtaaatcatcagcctgacgcatggcctgaaccccacctcaaagccattg

SEQ ID NO: 115546 - DNA, 452 bp, Glycine max
agcttttcgtttggcataactatatcaaccaaatctatttcaggtgtattggttggagcacagaagttatattaaacatttgtgtacaaaagctgacaagcaagatgtcacagtagttatatgtccactttgtgccaaaggaattcgcctagttcctgatcaagatccaaacataacttgggagaatcatgtcaacaccgagtgcgacccatcgaattacgagaaagtcacaaagaagaaaaaatgccctgtccctggatgcagagagatattagtattctcaaacacaattaagtgcagggactgcacagtagagcattgtttaaagcatcggtttggacctgatcataaatgtcctggtcccaaaaatgtggaatcaagtttttcattcatgaatcttttgaatgggagtaaaaagcaggagtccaaacccaagtcaagcgcaaccacat

SEQ ID NO: 115547 - DNA, 419 bp, Glycine max
  unsure (1)..(419): unsure at all n locations
agcttatagcatagccgctcttggtgctcattttatcccaanaacaaatccctcttattactagctattttgaattctttagttcttgaatgtacaaccttcaaatagttgctcggttccctctttcttttctgcaaaaaagaaaatcaaatgctatgaaaacatggatgaagtcctaagaaaatcaatatcaaagaaaacatggatgagatgacaattaaaaagcacaactacctatctttcagagtcctttggttaatntgtcttgtctctttatgtggtggggttttgtttaataatgttatacttttgccttccaaaaaacacttatcactaatcctcttttcattaatccaattttgtatgttattgtataaaagatcatgggttctacacctgcctccactactcctcctcct

SEQ ID NO: 115548 - DNA, 358 bp, Glycine max
  unsure (1)..(358): unsure at all n locations
aatggttgcttactggtttagccccatcttctanattattcatgctacagtgatggctatacaaaatgtcgcaggtccagctataccttctatgcttctgagatagataacacttcttctcttgtcttcacagggagactatataatactgganactttgctatctccagtaacatatttaaattgatggcaagctcaatctgtgtggcggctgatgtggagaaaagatggttctcacctgtcctataaaaaagcaaagatgtgacttctaaactggtagtctatctgactttaaacaactcagagtaacatacagactgatcattcaatcaatcctctcatatnatcaactatatca

SEQ ID NO: 115549 - DNA, 416 bp, Glycine max
  unsure (1)..(416): unsure at all n locations
cttctctttcaaaccatgctatgtgctcgcgactggtccctttctttctttcgcaacttgagttcactattgctaccccatagaactctgcgaaattatgtccggccatactctttcctgcgagccctcttggtctcttgttcgaaggctcttgcggtaatcgcattctctttccgtaacccggcacacttccttcgaacgtgtgtagcggccaacttgaacttctccttggcatgttttgcctttcctaactcgcttttgagagcttggacttcttcgtcctctatcggtgcttcaaaactctcttcgctgacgacttttaacttggcgagccaatctanacctcgtatatgaaactgtcaccattcgtggtacccaccaatgatgccgatacgaatgcctctgagctcttgatc

SEQ ID NO: 115550 - DNA, 189 bp, Glycine max
tcttagcactgagctgcacttagccatggactacctgattaattccttgatagcccctttgagcctaatttcccctttctttgtgttgaagctcattacaagccttaagtgaaaaaccatgatatcaccttacccttaaggaaatttggagctttggaatttgtttgggaataagtatggggggggggg

SEQ ID NO: 115551 - DNA, 457 bp, Glycine max
  unsure (1)..(457): unsure at all n locations
gcttcaacttacagtgagtgattcaggcttatcactattgatgcaatcctaccccccaagggtattggataaaagactccaagaggcttgggctagagctactaaagaaggccctagggttctcatgaaccttanggtagatttttgagcctatgggtcaagggtggatccattcttcttttgtaatgttagaattggtttttccttcttttgggccttgtattntggccattctagtaatatagggttttagccttgtattttagggcattttgagtagtctttgtactagggactttgttttttatattttcatgtattttggcatgggggtgagcttagctattatagggggtgtgtgtagctaaactctagcttctttangaatcttctcaaggaagcttctcaaggaggtgagcttatttattagaggggtgtgtgtagctaaactctatct

SEQ ID NO: 115552 - DNA, 485 bp, Glycine max
  unsure (1)..(485): unsure at all n locations
tactcagctttccatactggatgcttattgcctctagagatcganggcacattttggtcttncacacctatcctaagaataccattccccatgtcaacaacacatctagcagtgagcataaatggttgtcccaagatcaaaggtacgttcgaatcttcttctacatctatgacgacanaaatccaccggaatgtgaaatgccacactnttacaagaacaacttcaacaacaccatatggtcttgtgatagagcaatccataagttgaagagtcattcgggttggcacgatttctaagtttccaattctctagcacatcgnaagaggcatcaaatngatactagcccctaaatcattaagagccttccctacagataccgccctaattgaataaagaatggtcacgcttccagggtcttttaattttggaggcaagattcnttgaatcacaacacttacaattgccttttccaccactatactctc

SEQ ID NO: 115553 - DNA, 458 bp, Glycine max
agctggctatgcgttattctcgaagaagaaacactcctattacactggtataataagttaatatgcatgtgatcctctttcaaaatatatgacaactcgttaaaccaatcgaatacagtaaaataattttgaaccaaggaacatcatattctaaaatatatagttatagtaatataatataattgtataaaaaaaagaaataggcaaatgatattttggtggaggtgcatgcctcttcgttttttctttatttttccctaagaggaaactatataagcaaacaaaataaccatcaaatgtgcagtctaggtataactatcaaactagtaacgacatgacagtaaatcataaaaaaactaaaaacttaatcaaatataatttctaaaaagttagaataaatagataggaaatattttgttatctttagaagaaactgaatgaaaaaaatatatattcac

SEQ ID NO: 115554 - DNA, 266 bp, Glycine max
  unsure (1)..(266): unsure at all n locations
cagagcacaatagcgtcaacttggtgctctntaaacctgcagtaattgtcatctntaccttctcctacattgttgattcttcatttgtcaccatgtatctcctcaaatgtcgtgcgctaaatgttagtaacatgattctttagaatgtccaccgactaatctcgctgtagaagctatatctgactttctatggctcaaatatcttggtcatgttctcgaaccatgagttgtgtggagtttatggacctctgagatttgtcttgcta

SEQ ID NO: 115555 - DNA, 399 bp, Glycine max
  unsure (1)..(399): unsure at all n locations
ctgcagctggattcctttgtccacaaacctcttctttctcatgtgaacccaaactcaatctctgggttggaaaattacctttttgcgccccttgaatgcttgactagcatagctctcattcctattttcaatttgggtcttgactctttcatggagctttgtcacataggccggtttggcttgtccttctttatgcttaaaaattgaaatattaggcattgacaacaaatcaagaggagttagtggattgaaaccataaacaacctcaaaaggataacaactagtagtgctatgcacaaccctattataaagcaaatcaatgtgaggtaagcaaacttcccaatttttaagattcttttncaaaacagcccttaacaaggtacctaaagtcctattcac

SEQ ID NO: 115556 - DNA, 363 bp, Glycine max
  unsure (1)..(363): unsure at all n locations
agctgtgagccaaaatcctgactcacaataaaccttgacccactgtgagaatgtcaatccttaccctcggaagcaaaanaagaatagaacgaaaatttccaatcttcgatgatgctacccaggagagatcgaaaatttccaatccaaggatacatgatacgagaggacactcccaatctattagtgggagactgctgcaagaatagaatgataattccctatcccagaatgggagattgaaaacaagagaaggagacgactgaaacatagctcctgatcaaggatcgaaagactaccgaagaaatgtgcacagaggtctttggaccacacaatatctgatcaatactgaattgtcaccacatg

SEQ ID NO: 115557 - DNA, 415 bp, Glycine max
  unsure (1)..(415): unsure at all n locations
agcttctcaaggaagctatctagtctataaatagaagcatgtgtaacacttgttggaactttgatgaatgaaagtctcatgagacacacttcanagttccacttctctccctcttttattccttcaatttcatgctctccccttactctctttcttttcctccattaaagcatcctctntaagcttcttatccaaggcacattcttgggggtgaagctccttcttccatggcttattccctagtggatggtgtctcccctctcctcttctcctttgccttctgctacatcttcatggtggaaaatcaccattgaaggaccttattgaagctcanagatccagcctccaaagaagctccagatgcaagcttccatcacatgggctcaaaaatctaccctgaggttcataagaacct

SEQ ID NO: 115558 - DNA, 411 bp, Glycine max
  unsure (1)..(411): unsure at all n locations
gtcatgctcatgcgcttagcgcaaattctaaccgcttatcacacattagtgaatttcggctttgcgccggcttttctcgctcagcanatggactgaagcggtgtacttagcaagatgctcctttgctcagcaacatgcacagctcatncttcttccagattctttctcgcgttcagccgaggagtgttgcactcagcggatggctcgctaagccgacaggttggcgagagggtgaanatcagcactacacanactcaccctaataacctaaaattgagagaaagatgatattaacacacaacatggaagtcctatgtatttattacctatctttacccanaagtaataccacattacaaataaccataatagaggagttgatcaattacacaagtttatacacaaagtagt

SEQ ID NO: 115559 - DNA, 405 bp, Glycine max
  unsure (1)..(405): unsure at all n locations
agctngtagaattatgtctcatattggattaaccaattatagtcttaacataatcgatcacacaatagtgattgacataatgactgatttattcaagagtctctactttaatcgactaccatgttatataaccgatcacttccctttctataagtggtacagaagtgaacaagaacactttaatcgattacttggagtatctaactgantacataggccttatgatctttccaatttgtgagaagaacaatttaatggacgaagatgatgatctaatcgattacgtcattgatatggatgataccttgtagattaattgattacaccagttatagttgttgctctattataaccaacttggctatctctacaacacacattttgatcttatgaagagctggatca

SEQ ID NO: 115560 - DNA, 454 bp, Glycine max
  unsure (1)..(454): unsure at all n locations
agctgggagaggatgcttcaatggagganaagtatgagagagagaaagagagaggggggagcacgaaattgaaggaagaaaaagggagagaagttgaactttgagttgtgtcttacaagactctcattcatcaaagttacaacaagtgttacacatgcttctatttatagactaggtagcttccttgagaagctttcttaagaaaacttccttgagaagcttctttgagaaaacttccttgagaagctagagcttagctacacacacccatctaaaaactaagctcacctccttgacaaaatacatgaaaatacaaaaaaaaaaattccctactacaaagactactcaaaatgccctgaaatacaaggctaaaaccctatactactaaaatggccaaaatacaaggcccaaaagaaggaaaatcctattctaatatttacaaaaaagagtggat

SEQ ID NO: 115561 - DNA, 496 bp, Glycine max
  unsure (1)..(496): unsure at all n locations
cgcttctatagttatcactccaagtctagaagatttgtaacaagnttcatttgtatatagtaaataacattaatgaagttntgtcatacacagtatgccacacagggttagtgaagaaaagtaatccanatatgtccaagaacaaggtgttgaaagagcataaagggactttcctaagttggtttatagaaacaatctntgcttatgataatgcttctgaaacattaagaaagttagcagatgggccgaaaagaaatgttataacttgtcaaggatacgatataaacaagtattcattccacacgataacacaagatgacangagtaccaatgcaaacagtatgggtagtctaagggttgaatcttaacactntgaaagtgtacatgatgaaaatctttgtctagctntcatcccttatttagagtcaatgaagaaatctgggagctaantatgtcanatcattgctgtgttttaagtgctatggttacataatat

SEQ ID NO: 115562 - DNA, 455 bp, Glycine max
  unsure (1)..(455): unsure at all n locations
nnntgcagcttctttggaccttgaacaagcaatcaactcctctttcagaaccatgctatgtgctcgcgactggtccctttcttcccttcgcaacttgagttcattattgctaccccatagagctccgcgaaatttgttccggccatactcttccttgcgagccctcttggtctcttgttcaagggctcttgcggtaattgcattctcttcccgtaacccggcgcactccttccgaacgtgtgtagcagccaacttgaacttctccttggcgagtgttgcctttcctaactcgcttttgagagctaggacttcttcgtcctcttccggtgcttcaaaattctcttcgctgacgacttttgactttgacttggtagaacctcttgtcggtttgatttgttcccatgcttactaaagtgagataaaagctggtgcanatcacaactccgatatctcat

SEQ ID NO: 115563 - DNA, 308 bp, Glycine max
  unsure (1)..(308): unsure at all n locations
tcatatctatcactcatcataggctgccaatattgtgatcacacngggaaatctacacactttctctgacaacactctntgataatcatcacccctttctgttgatatgtcagagggaatgttgacaatgaatttcctgactangccttcataacagtctcccaacttggtgactgtcttcagtagtccagcagccttgatgaggtccatggtctccttgcaatccaaggcatctcttnccagttctctttcaaccgcaagtctgcgttgatacacatatntccacttttcaacattgccaatggagt

SEQ ID NO: 115564 - DNA, 453 bp, Glycine max
  unsure (1)..(453): unsure at all n locations
gtgcaagctttctttctcaatcaatctgtctactgtctaacatttctaaatgcaagctcacattcttgttctttctttgtctagcatacacacttgctcaatactcatgataaaacacaagcttcatttcaatcatacattcattccataatcaattcacaacaccaatttcacaaaaagattaagtgtttgcattgcatactcaaagaatcaagttaagctattcagtatgcttcaaaacatgcacactaattatccataaaaaaaacacaagtatataattataattataaaccaaaatcacaaaaaaaaacactgtactaaaacaaaatagttataatcatttcaaaaaaggcaagatcaggaatntagaattcccatgactggtcttggctatcctcctcatctgtcagatggaaaacagaggtagcagaaggagtagcagcttatcca

SEQ ID NO: 115565 - DNA, 376 bp, Glycine max
  unsure (1)..(376): unsure at all n locations
cataatgaagataaatattaaaaaaataaactattgagaatcacgcttcctagattgtntataaagaagaggctttgttaagactattctacgctgtgtttagtagtttatggtatacatgtttgtcacaatgcttatatgtcacccctcattgcacgatgagatttcaggcccgattagtgctcgaatgttcgaactttgcgaccatcatttttcccacacacactgcaaaattctgatgttcactccagctctaattgttgccatgaagagaagtgctcatatggccacaacatatcttcacctttggatgtagagacaacaataagttcaatatctatatgcatagcatcaacatagtcaccactaccttatc

SEQ ID NO: 115566 - DNA, 466 bp, Glycine max
  unsure (1)..(466): unsure at all n locations
agcttaactgaacaagaacacactnttcttaaggcaatgcatgcaactattcatatttctaacgaacatatcaatgaaacataaataacaacaatgaaaggctccaaatgataaaagccccaaattttccctaatttgtaaccctaaaaacctatctaaaacataaataaaatcaaaccaactaataaagttccaatatcaatgcaatacgaaactaacaatattgaagtgctaaaagattaacttgcatctatatttgaaatgggtatttctgtaaaccctagaactatgaaactgtagaagaaaaatcagaatggaagataaaacaatcaacaatgaagctcaacgatgaaaatggagaagaaaaaacgatgaagattatggaaattttcagaaacaaagaaggcgcaacataccttanacctcgttttcgaacgatcaacgatggaagccgaggacgaacgat

SEQ ID NO: 115567 - DNA, 169 bp, Glycine max
ccataaaaatcttcatttcatgcctcataacatacaataacataataagtactattcaaaaggtagagtttacaaatacaagtaaatgggaagggggatgtttgtcttttactggggttggaggtggttggactaaaaatgtgatgatgaactggtcgtgacactataa

SEQ ID NO: 115568 - DNA, 461 bp, Glycine max
  unsure (1)..(461): unsure at all n locations
agcttgcacgatcanactagcgacatgaatcttctatttacaaactatctttgtaatttatccttaaacttaaatcaaatctcaaattactaatgcatgattgatttangggaagaaatatttttaaaccttaaccatgtgttgataccctaaatacgaggtattaggaaattaattgataaattaaaatatgaattatgaaaaatatggacgtgtaaaattataatctaaggcacttttattcatacatatctttactttgaaacgattgtttgtctttaattttattgtctagatgcaaatacaaacaatctctaacttaaaattatgtaatttatgcgatttagattatttgagaacacaattgatctctataacatgatatccatacatatgttatgcatcaccaactattgtttttagccaactatttataagtgactcaacaaaagaattagcat

SEQ ID NO: 115569 - DNA, 272 bp, Glycine max
agattttttcacaatcacttattgtgtgtaatgcttagtgttaaaaaatataccaatgtggactctcttacgaagaatataaaagatgaactccaacatgataactttgtcttttatactaatacatctaatttcagaataattatattttagatcctatttattcatcatcacaatattactcacattttctagtgatttactttccatattaaaaacatatgccactttcgcccttatctaatgattataataatgcgtccgattatgat

SEQ ID NO: 115570 - DNA, 390 bp, Glycine max
  unsure (1)..(390): unsure at all n locations
tttttcctagtcgatcactctcatagaattccattctcccccttttgttttgaaataatgcttctcttaaaattaatttgattactcatgtgagttcttgatctaatctctatttctctctccttttggcatcaacaaaaagccaaagtgcataacaaatntgaagcatgtaaatacagctaagcatccacacaacattcatgaaaaatataaaccanatcatgaagcaagaaccatgaggcaagaaccatgaatagattaaatataaaatccacatagtcaaataacataattaatatttgttcaaacataccatgccacataaagaaatagtaaatggtcaaatatcatcataatatagattatttggataagtcactcacatctatt

SEQ ID NO: 115571 - DNA, 341 bp, Glycine max
  unsure (1)..(341): unsure at all n locations
taaagagggagagaagtgtnnacttgagtgtatcacataagactttcattcatcanagttacaacaagtggtacacatgcttctatttatagactangtagattccttgagaagctttcttaagaaaacttccttgagaagcttctatgagaaaacttccttgagaagctagagcttagctacacacacccatctaaaaactaagctcacctncttgaaaagcttccttgagaagctagagcttagctacacacatccctctaataactaagttcacctccttaagaagagaagctagagcttagctacacacctctattatagctacgctcacccctatg

SEQ ID NO: 115572 - DNA, 474 bp, Glycine max
  unsure (1)..(474): unsure at all n locations
agcttctcacttgataatggagaacacatgatctgcgctaggcaatgacattcatggtgctccaaacaaaggtggagtatggaggattgccttgagggtccgcacttaggcaatcatgaaactcagctccaaactcgaaagtggaggacacatgaacagccctaagcaagaacattcatgtggctccagaataggatgagaatggaggattgccttgagggtcctctcttaggcaatcatgaaacacagctccaaactcaaaagtggaggacacatgaacagccctaagcaataacattcatgtggctccggaaaaggatgagaatggaggattgccttgagggtcctctcttatgcaatcatggaacacagctccaaactcgaaaatggaggacacatgaatgacaacgcaattcattcatgtggctccggaanaggatgagaatggaggattgccttgagggtcctctctta

SEQ ID NO: 115573 - DNA, 407 bp, Glycine max
  unsure (1)..(407): unsure at all n locations
tgtacaatcatggccttcatcatgttctcanttttacatttcattctanaatntagagatttatgcanagattatcactcacagctagtncgttgctcatagtttaaggtcacactctcaccgattntggttcaagcttttctttcgcaatcaatctgtctactgactaacacttctaattgcaagttctcattctctttctttctttgtctaacatacacacttgcttaaactcatgataagaagcataaactccatcataatcatgcactcaattcaaaatgaaagacatacacccattttcataagtcaataaaagtgttgcactgcaatatcattaaaaaccaagttaaactgttcaaaatgcttcagaataagcaaaccaatgattcatannataaattaac

SEQ ID NO: 115574 - DNA, 231 bp, Glycine max
acgccatgaagaagaacacgaactccggggaggttcggaggagaatcatgatgacgtctcccttctggatgcccagcttcgacatgccggcggccacccttcgcgatgtcacgtgagtttcgccgtaggtgtattttctgctgccggcgatgaagcatggccggtcggcgatttctgggagtttaaggaagcattatttgtggagggggagggttgtggggacgggtattc

SEQ ID NO: 115575 - DNA, 462 bp, Glycine max
  unsure (1)..(462): unsure at all n locations
gatccttaagtcacctgcagctgcagcttgctctcttactctatgttatgtgtttgnggaaattttcaagatgaaataagaaaacaatacttgcttaacagagaacaaaagcatgtattgaaggagaagacaaataaatttatcttttaaaatagaaacagttcaatttattgagcttgaagaataactacccactaacagcatgttcctaaaaataagccatgaacgctaatagagataacaaagaacctaaaacttcctaactgacaccttaagactatgaaaacaataacaaataaaaataacataatcagaatgtggacatgtgtcagtcctaatgcatgttcttaacactcctccttgcaactccaatttttcccttgaaactcaaacctactgactgggagggcttgtaagcaatctgcagctgatttcaacttgaataaccaagtacaagtctct

SEQ ID NO: 115576 - DNA, 457 bp, Glycine max
  unsure (1)..(457): unsure at all n locations
agcttttcacatgttattggaagtgacgatgattatgaaaattatattgggagtaaggacatttctagcttttctgtttaaaccatttgtaatttctctctttgctgctgataaaaataattctctctttgcttgtgtttcaatagactgtgatgctagtttttctttcagacagcaacggtgctagttccttatcagtgcaaaacaaagatatttgtgcagaacttttgaagaaagcaaaaaagttgaacaaactgaaagaaaaggtggttttcttgtgtcttatggtttaatggtggttttctctatttaaattttattctgttaaatggagagagggttattgttccacaaattcatatggatggatacctttttatttgattaatacttctttngaacaattatgccatgctagtgtccttttttttcctttnntatagtaaaaatttaattg

SEQ ID NO: 115577 - DNA, 477 bp, Glycine max
  unsure (1)..(477): unsure at all n locations
acggaccttaagtcacgcggctgcagcttagtttatcattttaattaaatcttatagcataaactaactaattatatttagtaaaatagttaaattaaaattgttaaaattcagattattatacaaaataaatatttactaaaataaatatattattatacaaaattcatattntaaaacatatattcacccaaagaaatatcttaaataatttaaataatataacaganatacttaaatttaataatatcattttttaataacaaaattaaattataaaataatattacataaattaatttaataaataaataattttcaaattaattaaaaataattttatgtagtataatatttaattgtaataatatataaatttttttataaaaaaaaaggaagaagggaagtcggggtgtcagaacccgactttcgtgaacctagtaaaactggtgcatatggggaataaaatctcaaata

SEQ ID NO: 115578 - DNA, 390 bp, Glycine max
cgaccttagatactaagctttgtgacctatgccgtactcgactatatcacatctcttaagcaatcatctactaagagataatattaaatgacatttctcacactaacaatattgaacttgagatatggctaaataaaaatgaaccagagtgaggcagaagaaaatcacacttgaatgattatagttattgcaatataacataagtacaaaggttataactaaacaatcatgaaacacaagggtgtccatctattatactgttgacatggagtttacttaaaaaatctgcattttatgaagtgcatattcggcatggggtgcatacaaccatccttggcaagaacattatattcattaagaataattgacttgcgcatgttggaagcatta

SEQ ID NO: 115579 - DNA, 481 bp, Glycine max
  unsure (1)..(481): unsure at all n locations
tgtgagtcgcctgcggcatgcaagcttccttaagaaaactttcttgagaggcttgagcttagctaaacacacccatctaagaactaagctcacctccttgagaagcttccttgagaagctagagcttagctacacacacccctctaataactaagctcacctccttgagaagagaagctagagcttagctacacacccctataatagctaagcgcacccccatgacaaaatacatgaaaatacaaaaaaaaaagtccctactacaaagactactcaaaatgccctgaaatacaaggctaaaaccctatactactagaatggccaaaatacaaggcccaaaagaaggaaaaaacctattctaatatttacaaagaagagtggatccaaccttgacctatgggctcaaaaatctatcttaaggttcatganaaccctagggccttctttagtagctctagcctaagcctcttggagtcttcta

SEQ ID NO: 115580 - DNA, 419 bp, Glycine max
  unsure (1)..(419): unsure at all n locations
cgaccttagatactaagctcttaagccatctactatctntntagattaccaaacactttatgnatagtgtgccttcttcccagcttaccatcattccgaataatatagcttggaccttctncaactcatcacaangtgtgttatgaatagtgatagattgcatagtttatgcatgaatgactcgaataactgattgagcaagtggtatcctncttacanaagcttagtatttagccttccatgacgccaatcttttggttgcttctgcagatatgatggtattgctcattttctccttctatggagcaaagaaagcccagtattgcctaatcatggacttaagaatcanaggtctatcatactaccctagtcccgtgcatagagaatcctccaacatcttgatgactcattgtgaaaaa

SEQ ID NO: 115581 - DNA, 446 bp, Glycine max
  unsure (1)..(446): unsure at all n locations
agctntgaattcattctatgcatcngtaggggtccattcttgcattgtatggtttcatcttcatctcgtccattttcagtagtctttttcttcggtttaagcgagtttcaaccgattgtttaagccgtaatctcacttaatcaatgttaaagtgaattttgaccgatcgtttacgttgtaatctcatttaattgcctttaaaataaaattcaaccgattatttgtgctgtaaccttggttagtcatcaaaaaggcaagtttcaattggacatttactntgaaagttctcttttaatgagttgagaaataactaagtgaaactaaggctaaaatcaactcacaaatcaggctttgcgcgcaaaanagtcatttgaaaccatttcaaggtccaacgccttaaatggtccttttacttttatcggttaaaatgaaccatttaaaagtct

SEQ ID NO: 115582 - DNA, 392 bp, Glycine max
agcttatatatctaatgctctctaccttttgttccaagatcttggtggaactcttcaaaagcttcacattgtactccactcacaatttatcttgtctcatctttagcatactgatactggaaaacaaccaagtacttaggcaaccatccatagaagcactctagtacttgggtgattattaatcggtattagagctggtagtggatggcttgaaaaagctacctacaaagggattgatcaaaaaggtagagtgaaatgctatagagtgaaactgcctggatgtttgttctcaggggtggtgccatgatatggacttggtttatagagcgcctaaatccacatcaggtagttcagaatgctgcggtgagtgattaagtgcttggtttcccctt

SEQ ID NO: 115583 - DNA, 363 bp, Glycine max
atgtctcttcaaggactggaatattttatgtgagaaggccctggttttaaccattttgacctttttgaccgatagacaacacattcgggatacatgtttcattttactccaagtgagcatatgttatacacgtgtgtcatttgtttacacatgttgcttcacgaaaggacatgtcttaaagacatgttacatggtttgtgggaattacatcatggcacgggttttcagagtgtcatttcagctcccgccagttcctaaaaggttgtggccttctctcctcatttaaaaggactgcatattaggttttctttgtcttcaatcttgaatatttcccttttataatttctcttgactcactacttt

SEQ ID NO: 115584 - DNA, 474 bp, Glycine max
  unsure (1)..(474): unsure at all n locations
agcttatcatgtctatggtagaagttacaatgtcatatttttgcgactatgtgcaatatatgctatttgttgatgcatttagttggggtcattgtagtcaaaatcaagattctacttaggatcaaaaggttagggaactataaattgtgtacttaataacactatcagtcaatcgcgagatcctacnttaaaatataaaatgtgtntaaagatatacatatgcatagtaaaaagcattaatcttgcaaattatcttataataactaccagcatttgaataaactcatgtcaaatatgcacaagtcacaaactcacaacttaaacagttaaaccaaagttacaagttaacaaattccaaatatagaagacatacgttatttgataacatataaaattcaatatgttggaagacattctgaacaaagagagcagcataacaacaaagcaatcaaaacagggtgcagcagagaaaca

SEQ ID NO: 115585 - DNA, 260 bp, Glycine max
agttattgacaccatttatactctatgcgaataacgcactattgaagatcatgactattcacttccatattgacatggaagggatcaatgtctggtcagcataagcttcactgctttcagtgacagaaagtcctccgatttatctggggagacttgataacctgattcttattgagttcgaaattatgctctgtacctttaaatgagaagtctaaattaaatgcaataatttttttgagcccagatgctccacttctatt

SEQ ID NO: 115586 - DNA, 423 bp, Glycine max
  unsure (1)..(423): unsure at all n locations
ctgaataaacaagctcagcaattaatgcatactttgctcgattcgatgagcataatattcaacgctgaatgaatcgaagcttagcaattcaaagacataacttttgactcaaatattcgaatgagtcatttttataattgaggacgctcaaaattgaatgcaagagctctcaccannatcanatgacaataactntntactcagatgtccgattgagtcccgtaatatatcttgacactcaaaatggaaaacagaagctctgagcaaattcaagcgaaagtaacttttgactcanatgtccgatggagtcatntaataattaaagacgctcggaattgaatatagaagctctcacaaaattcaaatgacaataactttatactcggatgtctaattgagtccggtnatatatcgagacgctca

SEQ ID NO: 115587 - DNA, 324 bp, Glycine max
  unsure (1)..(324): unsure at all n locations
gagagcctctggattcaattncgagcgtcaagaaatattatatgactcaatcggacatccgagttaaaagttatggtcgnttgaatntgcttagagttactattctcaatntcgtgcgtctcgatatactacaggactcaatcggactttccagtaaaaagttattgtcatttgaatntgttgagagcttctatattcaatttcgagcgtcttgaattattatgggagtataatcgacatccgacgtcaaaattattattgtttcaatttgctgagagctggtgtattcaatttcgagcgtctcgaattataaatggttcaatc

SEQ ID NO: 115588 - DNA, 453 bp, Glycine max
  unsure (1)..(453): unsure at all n locations
gcttgcattcttcaggttccacgtgtaagattcttcttcctcgtttagacanactcgtgatagtaaattgaattgttaagttctggactgccattaccgaaactcaaaccattccatggtccgactctgtagtactttttggttcccttcatcaaatagaattcaagataagggtgcagaacaataccccaagtgaagtctcccggggttggatcatcatcactcttccaagctgtaaggtgaatactgagatttcttttgaggtaccatccaatcttcattcctgataaccctgtattagaaggataatcaaaactttgccacagatatgcctcttgaatcacttcattttcatcccttatcacaagattcccagaatccaagagctttgccactggattctgtgtttctcttatagaacttgtggaccacacaacagtgttgttgtgtgta

SEQ ID NO: 115589 - DNA, 478 bp, Glycine max
  unsure (1)..(478): unsure at all n locations
atccttaagtcacctgaggcatgcaagcttgtagaaaccataattaanaaaacacaatcttagaagaagaattacaattaataaagcacaaacttataagactaaaaataaataaaaaaagcttacaggaataaaaatttaaaaaagctaaaaatgaataaaaactcacaaagattaaaattaaaaaaatacgaacttataataaaaaaacatattgaaaattttaaaaaaattgtattaaaaattatcagtgaatgaaaaaaaaaccattaataatattcttcctattacaattaaaactgaaacaattcaaactatttcataagttaatttcccaatcacttgttttagaattctttctctttggtcaggaaatatatagacaactattaattnttctgtttagtaaaaataaaaatgtatgtgattacctgagcattgatttctgtggtagtgctcatgcttgagtgatcaaaac

SEQ ID NO: 115590 - DNA, 493 bp, Glycine max
  unsure (1)..(493): unsure at all n locations
tttagtgacctatgatactcagctatccttatngtgtaggtgtggttcatgtctngtgtaatagacaaataattcatttctagaatagttcatttttctttanaacgtggtttataaagatcaaaacattttcaaatcttgggtttggttcaaaacagaaatttttttccctttcatttgttcaccaaaaaatgcacaccgttttaacttcatttaattattattgattaaaacattntcatgttttgatttgattcaacacacgtttgattttatttcttctttcatttactcaccaaaatntggaacatatataatcgtattatataagaagggaaacacattntaaattttgccattaattttataaaatattttttattagaaatcanataagagtataaattaatatganatattgtacattttattaagaaatttgggttttaatntccatcaagattctaanatatgcttttatataccagaattc

SEQ ID NO: 115591 - DNA, 374 bp, Glycine max
agtcaattgtcagatggattgtgaaggaatgcattaaccgtatcctggtgagagtgtgatccttaaattttgagagaaacgactatcatttagtactgatttttgtgtgaatctctaaagtgtggactgaatgcatgaaattgaggatgatgaagaccatgtttgattgtgatagccacttagccaaaaagctgaccacgtgcttgaatgatttatcccttgcacccagtttgagctgaatgaattattgattgattgaacactgagcccatacagtgttatctcttgctaccttgtcttaagttgtaggagagcatcatccacataagcttggttcaaagcaaatttgtccaaaatttgggggaagtaatttc

SEQ ID NO: 115592 - DNA, 463 bp, Glycine max
  unsure (1)..(463): unsure at all n locations
agcttatcatgtctatggtagaagttacaagtgtctatttntgcgacaatgtgcaatatatgctatttgttgatgcatttagttggggtcattgtagtcaaaatcaagattctacttatgatcaaaaggttagggaactataaattgtgtacttaataacactatcagtcaatcgcgagatcctacttaaaatataaaattgtgtttaaagatatacatatgcatagtaaaaagcattaatcttgcaaattatcttataataactaccagcatttgaataaactcatgtcaaatatgcacaagtcacaaactcacaacttaaacagttaaaccaaagttacaagttaacaaattccaaatatagaagacatacgttatttgataacatataaaattcaatatgttggaagacattctgaacaaagagagcagcataacaaccaagcaatcaaaacagggtgca

SEQ ID NO: 115593 - DNA, 457 bp, Glycine max
  unsure (1)..(457): unsure at all n locations
agcattaaaggtagtcactatagtggagcccttacaactgacatacttctagaagaagaagaaaaaagtgacagctatcaagtcatgacaactagaagagttattctaaggttcccatttcgaggaacctttctgatgaacattctgaagacacatcagaatgttgactctcatgttagctgagaaatgatccattctaaagtagatcattttgatgaagtagaaaatatatggctttccgagggatcacaacatcatattaacacatcttcacaacataaagcattctaatgtaaactgcttcatttagtaagatgaaggaataattgttggtgtgttagtgtattatccaaggttagactgcataatggatttagtctttcattaggatgttgcacattaattcttctcatgggtagtgtnttagctctcaacatggtcgaatttggaaatgctt

SEQ ID NO: 115594 - DNA, 455 bp, Glycine max
  unsure (1)..(455): unsure at all n locations
agcttccatcaagtggtatcagagcacaagatcttcaagtaggtgctccttanaccttcattaattntcagctntaccttctcctccattgttgtttcttcatttttctccatgtatctcctcacacgtcctttgttaaatgttgttaacatgattctttagaatttccaccgattaaacttgatatagaagttagatttgattttctatggttcanatttcttgttcttgttcttgaaccatgaattgtgttgagttaaggttcctttgagttttgtcttgctattntttgtggctgaaacctaaaccataaaattcttacaaaaacattaaagtagaagaaaacctcanaaatctagactgacttgttcacttattgtagttttgtcatagaagtcatgtctagtcataaaacttgtcacataagattccttatgttgtgctgaaatttattt

SEQ ID NO: 115595 - DNA, 454 bp, Glycine max
agcttgacaaacctacaactctcgcacctatcgtggttgtctccctgttacactaccgtaataactcctacaaacaaggaactgaagctcccatccaactctataaatactaggttctatttcacctttttcaatctcattcacaactcattcacatatttacttgagtgtcggagacttttgttttgtaggtccctcctattgttctcctaacagaggatacctacagtcagacatgtgaaatcgtggagttcatccaggctacttctatcctgacgttagtcagttgcagattttggtaaatacaccatgtttcttcaatacaccctgaatcacatttctattcatagctagggaacaagttaataatccatgtcaccactatgaacttgtattaatcgcaaaagactcccataaagcgagacttcacatgagaggaagtaattattaaaca

SEQ ID NO: 115596 - DNA, 310 bp, Glycine max
tactcagctcgggatttgtgaaggatttgccgattgtgagataattaactccgattgattttatgtgatggtttactgagtctaaagcaagctggacctttactggagccattgactgacttgcctgatcattgtagaatgtgagactagtgtgcaagaaaccaaactattgataactgcagactgccaatcggtcatgacagacttaatcagatattattaaggctacaagagaatgcttgtaactaacagtgcgtttacagcttaattaatttaatgacaactggcaaattcatagaagtattataaa

SEQ ID NO: 115597 - DNA, 417 bp, Glycine max
  unsure (1)..(417): unsure at all n locations
caagcttatgggggttnctgaatcgggttatcttaaactcaggtggtatttgagcaatcttgcaaaattttatggttttcctcttcccatttcatgtgttggaataaactatactacagggtttctctgggttttgatcttttcttcttcttttggcaattctcttgctttgttgcagcatgagttctggtcttgcgtataaattcttttttgctgctttttttgtaggcttgtttacttatggatgcctgacttgggttgtgtgaagagatgaactttattttatgctgtcttgttttcaattgttactcaagatgtgttattgggacggttgtagtgctatggagtttatatgtggtgctgtgactaggattgagtagcaatttggcttgtagtggttgttttggagtgaagtat

SEQ ID NO: 115598 - DNA, 445 bp, Glycine max
  unsure (1)..(445): unsure at all n locations
agcttgaccaatcccgacccaacccgggcatagtcggtcagtgagaacctgtgatgtacctaaacaggcgagctcctggcagtcaacagataaaaggaacaaagaccacaaagcaaggaggcttgtggtggctggccagctgtgaattntgtgtgatatgtggattatggcctctggtaatcgattaccaagggtgggtaatcgattacaaggcttanaagtgaagacaggaggctaagatggtctctggtaatcgattaccacggggtgtaatcgattaccaggcttgaaaacgaggtcaggaagccatgagggcttctggtaatcgattaccaagggggtgtaatcgattaccangcttagaaagggggctggaacattgtggaggcctctggtaatcgattaccaggctgtgtaatcgattacacagaaggatgggtcactg

SEQ ID NO: 115599 - DNA, 332 bp, Glycine max
atacctaatccataaccttaggattaaagacctaaggctgatgtactgaattgtgcaccaaagtaccccacagcatcatcatcccattggtctccaaaggtgatcctagttgccattggccttatacaactgactaacccactaaaccctttattataacccaaaatattttggtcaccacttacaagatgggccttatttaacaactaacactctaattgaacaaaggggccattatctcctcattggccataacaactacaactggacttttcttaaactggctgtttcaaaatggcaacactgtgaaacttcttggttcttgttaccct

SEQ ID NO: 115600 - DNA, 328 bp, Glycine max
  unsure (1)..(328): unsure at all n locations
ctgagctcacgtactctcacgtagtccatatcctcgtttctctcaacaccgggttcgcatcaattcttccaagctttcccaacatcaaaggaatacaacattcagatagcacaaactatcacagccaagaaaacagagcanaggcagaaaactctgccaaaacaccaaccaaaatcacaagctttctcacttaaagaccgcagtacaattccttcgtccaattcgtaaccggtggatcgactcaattntactggaagttctagacataacctacatttgacgttggatctactagcaacatccagaactattctgcactgtcttccac

SEQ ID NO: 115601 - DNA, 449 bp, Glycine max
  unsure (1)..(449): unsure at all n locations
agctntannaattgaattataaacgttcagaaactgctggtaatcgattaccatatatgtgtaatcgattacacagttcannatttgaattcaaatttaatagcttgtgtaaatcgtttttggccactggtaatcgattacatcctctagtaatcgattaccagagagtaaatctattgaaaaaacctttttaacttagatttcttggccaaaccttttgcgacttcaattggaattcccttcctatttaatatacccttcctaagactctagagactgtcttgatcattcatcttgaatatctttgtcttgaataaatctttgagaagcatgtgattcatgtaatcctttggcatcatcaaaacattcagcttgatcctttgtctacagtcaccgggtttgagtgctcctttaagcctatgctgatcccatatagttggagcattctc

SEQ ID NO: 115602 - DNA, 384 bp, Glycine max
  unsure (1)..(384): unsure at all n locations
taattagacaaccctcgtanggttagactaacttanactaatcttcatccgtagatccctcatttaagactaggctcagcctanacagcttatgagaagttagactaatttaacctaagcttcatctgcagatccctcatttaagactaggcttagatcaaacaacattattgtaacaacatattngaaaccaaaacttaatccgcagattcctcatttaagactaagtttcaatcctggcttcaatcaagtctaaggcaacagtacaatttccaatgctaaagtcacctaactatgcacacaactgggtgatccgaccaagagcatacataaattaagcactgaaagaagcattgaacacaataaacacaactatgtagatat

SEQ ID NO: 115603 - DNA, 458 bp, Glycine max
gcttcaagagtatacggcctcatcaaactacttgttccccgaaagttattcaattaataggcctcccatctctaatggagtgggttaccactattggaaaacccgcatgcaaatcttcgtagaggctatagatttaaacatttgggaagccatataaataaggccttatattcccaccatggttgctggaaatacaacaatagaaaagcctatggaagattggagtgaggaaaaaagaagactagtacaatataacttaaaagccaaaaacataattacatctgccctaggaatggatgaatactttatggtatcaaactgtataagtgcaaaggatatgtgggataccctacaattaacacatgaaggcacaacagatgttaaaagatctaggataaacacattaactcatgaatatgaactatttttgatgaatgcctatgaaagtatacaagaca

SEQ ID NO: 115604 - DNA, 317 bp, Glycine max
  unsure (1)..(317): unsure at all n locations
ttattactagctattaagaagtgcttagtttctgaatgtacaaccttcanatcgtagctcgctccnctctatgntatctgtaataaacataataacataaacagttcctcagctcaagatagtctatattataattaagggtcagtactatatgtactgaactgtacaacatatagcataggcagtgagaaacactgtccaaataatacttaatacaatgacaggatatgtcatcctcccctaggacaattctacctcatattatacaaccagtgattaaaatgggtattaaaatccttctctatacaccttagcca

SEQ ID NO: 115605 - DNA, 460 bp, Glycine max
  unsure (1)..(460): unsure at all n locations
agctagacctatngtcgttatgcgcaatnctctactgccataattgagggccatgaagctaagtgccagtcatggcagctaaacaagattcattgcagcaatatgagcgctaagcgagtccctcttagctaaacacatgctcctctgtacttaagatgcatcagtttagctaagctggccagagcttggcttatcgagagttgcagctnttctaatctgtagacctcgctaagcgggcttatcctcacgctaagccaagtctttattcaaaaaaaaaaaactaattttgaatttgaaatgtcgactaagcgcacgggtccgctaagcgaaagtatcgaaaaactgcttaagtgagtgtaacaacagttacactcacatttactagattccaaagaggtcatctctacattctctctcttcaaaaatatgcacatttagcatctgtgctgtctttgtgcat

SEQ ID NO: 115606 - DNA, 454 bp, Glycine max
  unsure (1)..(454): unsure at all n locations
agcttaggctaaattatgctaaactttcataagctacttgagctgagtctagtcttacatgagggatttgcgaacgaaactcagtttaagttagtctaaacctaagagggttgtctaaatcgggtgtagtcttatatgagggatctgtggatgaagcttggatatgcagcctgacgagggatcgaaggtttagtagtttaggctacagcatagaacacaagagcatgattgattagagaaatatatttctatgcatcaacttgtttgttagaaagacccaacatatctacctactgctgtcattttatttaccttgcattttatnagttttagcataatagtttagtttaaattctgtttgaaatattcactcatacatgttctttcaacaatgcttcgattctaaacttaattcaggctaacattagtttcttgtgttcgatactcggattca

SEQ ID NO: 115607 - DNA, 471 bp, Glycine max
  unsure (1)..(471): unsure at all n locations
ggaccttaagcactgagctgcagcttttagaaatggtcgtaatcccttttaatctgatttcaagattaaataggtggttttgtttgtgctcgtatgcttagtgcaactctgatccgcttagcgcacattagtgaatatcggcttagcgcatgcttttctcgctcagtggatggactgaagcggtgcgcttaccgggatgaccctttgctcagcaaacatgcatagctcatccttcttccagattcatcctcacgcttaaccgatgaatgttgcgctcaacagatggctcggtaagccagcagattggcttagcgagtgtgtgaaaatcagcacttcacaaacttgcctagttaacctgaaattgagagaaaatgattattaaacacacaanatagaattactaagtatntattacctatctttaactaagagaacttataacactacaaaataaccatatattggaggagt

SEQ ID NO: 115608 - DNA, 376 bp, Glycine max
agctttaacagatatttctttatgagaaatctatcctgtgtgttacacatagtcaacaaacattgaccacggattatcactccataagttttataaggattataaatccgtacaaaactagatcaatgttacagaataaaatcaacaaacctttgctgttaacagccacaacaaccaccacttgccaacgagctaacgtaaccaatgcgccttgacctaaatggacacaacgatgaacaatcacctctcatgagaatggatgcaaagaacaatacaatacagtgaatggtgcgtgaataagaaaaacgaagaagttaacaggggatatttttataattctgaaaaatagcaggatgcaaaagacaaataatgggtg

SEQ ID NO: 115609 - DNA, 174 bp, Glycine max
  unsure (1)..(174): unsure at all n locations
acattcataatatgatcactatcttctctcagatgtgtanacaacccatggacaaatgttgctaataagaaactanataacatgccttctgcanactaccaaccattgtgcacttattatctgcttgaagctataacctttataacaagtgacaacatgctctttcttcacaaa

SEQ ID NO: 115610 - DNA, 458 bp, Glycine max
  unsure (1)..(458): unsure at all n locations
agcttttaacatctctagaaactgccatctttagcacatattatagagcccatatttntgctccaataaccccaccacatgatgaaatagacacaatcctaacgatcgcaccatatatggtgttcaattgcagttgcggtcacaattgcggcgagttcagaaaacttttacattgcacgaaattatgaataataatatggntgatgcaaccgtaattacagtagaattttctaagagtaaaaccaaaatgaaataggactataatcatatttaacttttttttaaaaaaaatctgttgggtaatcttttcatctaacaataaatcacagaggtttgggcttaagcttgtagctataggtggttttttgttgttgcaaatgattactctaatttaatctaaaacacaaactttaaacttaacgataatgtatattgtttggtattatattatgcaaaat

SEQ ID NO: 115611 - DNA, 409 bp, Glycine max
  unsure (1)..(409): unsure at all n locations
tcacgtgaatgctggtcttattgaagaacatgcttgctgaacaatattctttgccgaanaatcactactaggccaaacagagtttgtgttcagtgggaatggagtacaagaagatccatgcatgccctaatgattgcatattgtatagaaatgagtatgctgaactacggcattgccncacgtgtggtgtatcacgatacaaagtgcaacaccatgaattaactgatgatgcatgaaccaaaaattggtcgcctgccatggtgtgctggtatcttccaatagtaccaaaggttaaagcgattggttgctaatgcacatgatgcaaataacctctcatggcattcggattaccganatctgatggattactgcgacttctgccgattcccacagtggaagacattgatcg

SEQ ID NO: 115612 - DNA, 407 bp, Glycine max
  unsure (1)..(407): unsure at all n locations
atattaccagttcaatgatacttgccatctaaaccagaaaaaaaaaggcattcattctcgggtcacgttatatcattgtaacttgataacaatcagaacctgtatatattatccctggcaaccacatatacaacaaaagtttaaaaataggtgtgaacccaggagggttgcatcacaaaatttgcatacctttcatgatctccagtatcctaggaatgcactataaggtaagagcaaccagagcacctgactcaagaattatggatatgccagccatgttattcaaataatttataataaaggagaanaattcaaggaaaatatagttcatggtttgcaacatctcactctntgggtaacaatgtattaattataactgataaaatacttactatgaaagagagaat

SEQ ID NO: 115613 - DNA, 366 bp, Glycine max
  unsure (1)..(366): unsure at all n locations
aataaagatgagaatactctgtgtgacatatctatatccttttcatcatcacaaaaattcttgtgatcatctttcaagcgctcaatggtattcattcttctcctatgtgatgtttttttatgaaaaaacttgtgccagagtcgccatgtngtactctcaagtggtngtcccaaaagatttcttcttgccaaanggaatcatctaattccctctcacctagaatggtggcatagaccacatcatcatnttgtgaaatttcaaactccacatctcttntaccctctttactttctgttaagagaaccaaatgttgactttcccatccatcagattgaactagtctgacacattgatngaatatacgtc

SEQ ID NO: 115614 - DNA, 439 bp, Glycine max
ggatccttaagcaccgcagctgcagcttgcaagcatattttaggctttgcttagttggaggctggacacggtctttggtttctccccctgaaggagacgctggacccacaccttcggagaaaaatctctctattagagaccatttaatataaagagagggataagaatatcattttctataaaacctaactggagttcttctttataattagcctcatatcatgagcacctccttttcgtccagaactaactgaggtgggacaatgaaacaaatctcttatctcagagggagttggttagattagactaccacacaacctttacgttattgtaaggttcttatatctagcccgcatttacagtgtctcttacgaaataaataagctggggacaacatatccttagctattggatcttaagtatggaatctctcttctat

SEQ ID NO: 115615 - DNA, 410 bp, Glycine max
  unsure (1)..(410): unsure at all n locations
aatgctactcttaaaaccaaaatggcataccacataccaaccatcatggtaaattaaaagaaacctatgcccatacttttttaacaacgttcacttgccagacattttatactaaacaaatgcacccatgtacaatcaagacacatccattacctagattatntatatgtacttccaaggtgtatttgctacctacatcacatgcacttccttggctaaatttacatacatgcatactcaaagcatttggggtaccaaaaattgcacatgtgcatattccggtatttctaatatttatgcatatacaaactttgtgatgaatcttggctatctacacaataaggtgatacatttcatgctttattcaagtgtntntgctacataaagccgcatgcgaattcaagtatatt

SEQ ID NO: 115616 - DNA, 470 bp, Glycine max
  unsure (1)..(470): unsure at all n locations
agctnttgagtgaaacaatgtgactcttcacttttaaatttgaatttcaacgttcaaggacactggtaatcgattaccaaaacattgtaatcgattacaaccttttgaaaatatttggaacgttgtaaattcagtttgaaaactttntcaaactcattttgctactggtaatcgattacaacaatatagtaatcgattaccagagagtaaaaactctttggtaaaggttttgtcaaaaactcatgtgctattcaaagttttgaaaaaaaaaaattaatacttatcttgattgagtcttttcttcattcttgaatcttgagtcttgaatcttgatcttgattcttgagatcttgaatcctgaatcttgattattgattgtagactntcttcttgagtcttgaatcttgaattcttcttgattcttgaactctcgacttgttcttgattcacttgagatgttctttgatctt

SEQ ID NO: 115617 - DNA, 148 bp, Glycine max
tttggacgtcaccgatggtgcaacggcgtacttctgatcagaatcgagatgtagttaccctcgcattaaacatcgagaaaggtcactcgtgacaaggagaccgctgcctataattaccggcggcactaatttttgtagctgatgttta

SEQ ID NO: 115618 - DNA, 469 bp, Glycine max
  unsure (1)..(469): unsure at all n locations
agctngaatacttaatgctattatacaaactacatatagttgggaaagttcagtataaatatttatcttcttaaatatcacattaggtggccaacctcaatctgacaattggaaataccactattagttaggctgcaaagatggatcacagctaacaaaattaaaatcttaccaagatgaaaaaaaatatgactcttgttgatcttattcatgttatttattattgacaataaaagcatgcatggacaaaaaatagatgacacataatttttaagcttcaaaacttaatcttattatacaaactacatggttggaaaaatacggtattaatattgatcttcttaaatttcacattatgttgccaagctcaatctgacaatcccaaatatcactattagttagattgcaaacatgaatcacagctaacaaaattaaaatcttaccaagacaaaacanatatgactctcat

SEQ ID NO: 115619 - DNA, 418 bp, Glycine max
  unsure (1)..(418): unsure at all n locations
agagctgatgttgacatcactagggtagtggggaatgccctgatatcagtgtatgctaaattgatgtgtttttgtaacaacccccctcatcgatacgatatcactaactctaaaatgtgacatnntcaatttaagtganagctccattaatttgattatgaaaatgagtggtaaatttgtgatatacattcatcanacaacacacaaacacgtgaataaatacacactcacgcgcgtgcacgcacacacacacacacacatatcanaccactatacatcattcatatgtgagaacataattcagttttacatatatctaaacctgagatntacatgcnnncatcaaaagagtcanggaatcaattaaggaagagttgatacanaacgaactctctccaaataaatacaacgtatcacg

SEQ ID NO: 115620 - DNA, 486 bp, Glycine max
  unsure (1)..(486): unsure at all n locations
agccacctgcggcatgcaagctntctccatgtcaactttaatgttgaggatctcggtttanctttacactcacatatatagtgaatgacctctttgttggatcaggcgggaatctagaaagggggcttgaatagaatttttcaaaatctttcccaaatcattcttaatacagattaaaacatcccctttcaatccattaaagtttcttcaaaggatcattataaaccagaaacttcaattattataaaatgtgtaaaatagaatcttgtatgatggcccttgagatcaattccaatgccaaaattaattcaagacttagagttaagagaaaaaagaatcatacaagagtttatacttgctcagttcaatcaggacctacatccagttgttctaagtcctcttagaacttcctctatatagagaaaacaagtacaaatactatgcacacacaattctctaatagaactctaatctttctcatgaacc

SEQ ID NO: 115621 - DNA, 245 bp, Glycine max
  unsure (1)..(245): unsure at all n locations
gagtggtacctgtagatatgtcgcgtgggtcaggagaccttgnngacgtcangtggngtgctattgcccataaccaagcttgaccaatctcgacccaacccgggcatagtcagtcagtgagaacctgtgacgtacctaaacaggcgagctcttgacagtcaaccgataaaagaacaaagaccacaaagcaaggatgcttgtgtggtggctggccagctatggatcttgagtaatatttggagtat

SEQ ID NO: 115622 - DNA, 417 bp, Glycine max
acatgaggtctcacatgatgaaccttcctatctcaaagcccgaagaattagcctcatcgcgaacgatccaactcagcttcgaagctgagtcagcttcatcatcgtcatcgtcttcttcagacgaagaggatgaggatgatgaaaagactctatgttatgatctcagagagaatcccaagcgaagcattcgcctcgtggatcctgaattttcgttcgcaacagcagcagacactggctccgtgatcctccacgacagagagagcgagtccgagtcatcataaaacaacccaactcgtagaatatccaaaaggccttggaataataatgacaattattataataatgataccaccaacagcagcgtaagaaagaaaggtctcggattcgaacatgaatccacacagaagtgcaagacag

SEQ ID NO: 115623 - DNA, 481 bp, Glycine max
  unsure (1)..(481): unsure at all n locations
ttaagtcacctgcggcatgcaagcttgcacacaagattctgctttcctggcactttcaaaaccttctggttgggtcatatagatgtctttctctaaatcctcatgcaagaatgcangtttaacatctaactgctctaagtgaagattctttacagctacaatactcagaataactctgatggtagtcatctttacaactggagagaatatctttgtgaaatcaattcctttgttctattgaaacctttcaccataagtctcaccttgtatcttcttctaccgtcagattcttcctttagtctatagacccacttattctgtaacactttctttccttttggtaatttaattaaagaccacgtcttattcttctgaagggatgtcatctcatctttcattactagctaccacttaatagaatcattcccctgcgtagcctcactaaaacattctagctcaccagcattagttaacaacaaat

SEQ ID NO: 115624 - DNA, 323 bp, Glycine max
  unsure (1)..(323): unsure at all n locations
gagatcattgaaaatatgacctctaatgctaatgaatntcanaatgatagaatcatgggtccatcaaaaagactatnganagtcaatactcaagatggtctctagcccaattaagttttcactcggcaattgagagctacacaataaatactgaggaagtttagtatatgatcgaataatcaaaggctagagaactacaaccaccagggatatagatctcttcctagtataagacaaggtgaagatcaaggtggtagttcaataccatgcctangaaaacctatatgagaagacaagcagcttaggaaaactccacattcata

SEQ ID NO: 115625 - DNA, 432 bp, Glycine max
  unsure (1)..(432): unsure at all n locations
agctntacagcagaatttagtaatggcccactaacctanaattaaaataacttaatgccattaacctagggaattaaaaaaaacttaatggctgagtgtaactgaaattgtggcaaccaaatgtcacccccaacagcccacaagtcagccaccatttggtctcccaaaaggctgatgcctaggttgccaattgggcccttattacaacttgaactaaacctaactaaagtccttttagttgattaacccaaaacatatttttggtcagccaactttacaaggattgggccattatttagacaaactaaacactctaaaattgaaacaaggtggtgtcatttagtcctcctccatttgggccatgatacaactcacaaccttggacttttctccttgaaacttgggcttgtattcaaatagtatggacagcac

SEQ ID NO: 115626 - DNA, 404 bp, Glycine max
agcttgagagagcccgagtagtcgaagagatgttcaagtccatatccatcaaagtctgaagagagtatgatgaactaagggacgtcaatatggccaccgatgaagccttggaatgagataccaacatggcccgataggaagaacacgaccaaaacaagttttgaggggctttatagggcagcaatagtgagctcaaactccgaagaggtgaaaggaatcatcacgggtcaaaggcatgatctggaaggacgagctaaaggcttgccttatgtcgaaaagaaatttgttccaacagttaaagtgagactgaaaggaatatgtgggccatcatcgatgagtgcaaagagaatctaaatctaacggcgactcacgagctaaggctataggatgagtacgccaatata

SEQ ID NO: 115627 - DNA, 91 bp, Glycine max
agggcgactcttaatgacttatgggccttgcagttaaaccttgagaagagatccttgtgtgtgatattctcaattaccggcacttatcgaa

SEQ ID NO: 115628 - DNA, 456 bp, Glycine max
  unsure (1)..(456): unsure at all n locations
agcttcagaccaaagcaatatataatctaggtatccaaaacccctcaattaatggattatcaaggtttgagaagtgataatgagaatgagggtaatctgggccaaactctcacctcacacaagtctataacatcaatctaaacttgctcaaactggatttgcacctaaaattccaccgaatcannaattgactcctcaacacccaaatttaccctagaaatggctctttgttcactttggtcatttgtttttctgtcttgcacaacccaagcttcctcataagtcctaaatgacatttcaaactaggattaactcactttaacctccaaataccactaaatccagatttggccttctgactctcaaaaactcactctntttccactcataacaccatattctcactttctaaccctaggttaactctacccttcatccctagcagttntccataag

SEQ ID NO: 115629 - DNA, 486 bp, Glycine max
  unsure (1)..(486): unsure at all n locations
tcagccctaagtaagctactcgcctggcaagctgataccttcaccctaacaaaaactgctggcgactgcctgaacaatgatnttctataatagccatgcagggaagaagtcangggtggagaactgaacaaggataggaagaaatgtngaaagagaaagagaagacgaataaannagcaagtcgaggcgtcgtcgaatcgcaaccgtggatcattccccacatcatttctctcgctagccttgtaccccgtgcaccagtcnggtagttnttcttaagagttgaatgtaatctatgtacctatatgggtcctctgtgatattatgtgtgtatttatcttcaccctttttatcgtggtaattttgtcttattcgtaaggcttaattctagtcgatcactagtgtcatngaaatggttttttagtgagattgaaggcaataaacaaactaaatgaanaatacttataaccaactctttcataaatatac

SEQ ID NO: 115630 - DNA, 437 bp, Glycine max
  unsure (1)..(437): unsure at all n locations
agctngcaaagccatagattgtaactgcttgtatagtgattaacagccttcatatcaagggtgatgtatgtaaaacaatggcctttgcatatttgcttctctaatgtaaacaaaagctatgcaaagtaaagtaaaggacatatacacaatttgatttgatgctttaagcatgtaattaacacttgttgctgtgagaattatcaaccttgattactagcttattgcaactttttattttgaagcttccatttgactctttcatctttaattcatgggctnggccactgattttcctgcattactaagaaactaggttaatcccttttctttctattaatctaatcatcattcatattcgttntgcagcttcttgcctcaccaattctagatggaaaagcacttctgtattctttcgtatcaactcctgaagtgagaat

SEQ ID NO: 115631 - DNA, 433 bp, Glycine max
  unsure (1)..(433): unsure at all n locations
agcttctcaaggaagctacctattctataattgaagcatgtgtacacttggtgaactttgatgaatgagagtcttgtgagacacaactcaaagntcaacctctctcctttgtcttcttcaatttcgtgatccccactctcttttctctcctcttctttcctcattgaagcatctctccaagcttcttatccaaggctcatcttggtggtgaagctccttcttccatggcttattccctagtggatggcgcctcctctcacctattctcctttgtcttctgctgcatctccatggtggaaaatcaccattgaaggacctcattgaagctcanagatccagcctccatagaagccccacaagcaagcttccatcaagtggtaatcagagcacaagagcttcaactaggtgctccttaaacctccattatattttt

SEQ ID NO: 115632 - DNA, 343 bp, Glycine max
  unsure (1)..(343): unsure at all n locations
tcagcttggtatcatacacattgatatcatacagtgatgttctaagaaccaaaatgactctcaatggtttgactttcaattgtttaatttttttaaagtatactctctaatggtgcttgccaactgaaagttataaagcagtttgtttcatttctatagtaattcatctttatcttctacctattatacatcttcagcctgaatttttaactctttcttgccaaacttctagttttgttttaactgaactnggcatattttcttcttctcttgccaaaatcgcagcaacgctaatcttggctttttctttcaaaacaagaaacgctaatttggctctctctgc

SEQ ID NO: 115633 - DNA, 433 bp, Glycine max
  unsure (1)..(433): unsure at all n locations
acaccatggagaaattcactaaccagatcgaattggtgagacatggaattaccaaaattgctaccaccttcttaattttgcaaaaaatgtataagccaaagggnccatctaaaaaaggatgtttactttcaaccattggatgagttcaaaaaaactaaagaacttaatggaaagaaagcaatanatgttgttctcattccatcattttggaatgatgttgtgtacactttcaagggtatggaacctattgtangtgtgttgagattggtggataacgaannaaattataatgggtttatttatgaagcaatgaatanggctaaggagacaattttagagctttcaatgacaataaagataagtataaagatatctttgtcatcattgataaaaaagatgagaatgtcaacttgaccaccatctgtatgcaacg

SEQ ID NO: 115634 - DNA, 356 bp, Glycine max
  unsure (1)..(356): unsure at all n locations
actcactcattcctagatccgagttctttgagagtctcttcacagcaatttctagcccactagctaattntccctacataatcacatttatgagtagattctctttatactataattatatagatattctactcgtggagtatntgagtattattattaagatccaattattgaattatccaatatacagatccaaagccaccttctgcaatcttgtttccctttgagaatttgtttgtggccgcaatgattattgacaaatcaagcaatggcagatccagatcattcacataactttcattggtatattcggccattgatttctctggaaaaagaaaacaagtattatgtgaata

SEQ ID NO: 115635 - DNA, 309 bp, Glycine max
catgctagcctgccttcttgccccatagtctgcatgctgtctcgtcaaagcacgcacctaaagccaagtcgtcagtgagagtggcgagaactggccacaccaaactcaccagctccactagcggtatctacactgataatcgcaactcactggcggtatcaatccatgtgcaacagcttgcgtatttcgacattcatgttgtcgatacacttgcatggctacgtaaaaaacaaacccagcttggaaatattttaagaagagacctatattgggaataagtttgtaaagtaacccagttatgtcaaaatg

SEQ ID NO: 115636 - DNA, 465 bp, Glycine max
  unsure (1)..(465): unsure at all n locations
agcttgaagccacagaattccatatggttaagaatatganagtcttgtttgtggtaataatcatgaaaggagttttttaacacaagcaatttgtatcacaatatatgtagctacttcccttgagaaaaaaattatggaaaatttaatttgaatttatatttacttcaatttttttggcaatggccggattgaaaaatatttaattgaataaggttgttatattgttgaatttgtcaataatacatgtgttgaatttattttgttttttttttacttgattacttagtacccttctctatattaacgtttattataaataagttgttttataactatgactaattgttcatattaaaatggttaaccacattttttagagagttaatttaatgttgttaaaatctaagtcatcaaaatttatttttctataagtaaatgaggaatttatatataatggaaacacat

SEQ ID NO: 115637 - DNA, 471 bp, Glycine max
  unsure (1)..(471): unsure at all n locations
atcacatgtggtactacgtggcggtcgggcgatggtgcacaacaagctntccacatccacaatgcgcgcataaacccaccatccnctgttgcccacctccaactgagctcacgtactcccacgtagcccatatcctcgattctctcaataccgggtccgcatcaatcctcccaagcttccacaacatccaagcagaacaacagttaaacagcacaagctatcacagccaagcaaaacagggcataggcagattaactctgctcaacacactaaccaaaatcacagcttgtctcacttaaagaccccagtaacaattccttcgatccaattcgttaaccgttagatcgactccaaaaatntactgggaagtctatagtgcataagcctacatttttgaccgtgggatctactagaaaacatccagaactcattctgcactactcttntcacagccaatcacacacaagcatt

SEQ ID NO: 115638 - DNA, 470 bp, Glycine max
  unsure (1)..(470): unsure at all n locations
agcttcccattcatcanagcaggataatcaaatttccctcttctcatacccacttcaatccttntaccagcgaacactaaatcgacaaagcttgaaggcatgtaacccgccatcttcttgtagtagaacaccggcaacgtgtctactatcattgttatcatcttcctctccatcattgggggcactacttgagctgccagatccctccacctttgggcatattctttgaaagattcatgctccctcttacacttgttctatagctgcattctatttggagccatatcagaattgtactgatactgcctaatgaaggcaaccattangtctttccaagaatggactcgggaagactccagattggtgtaccaagtgacgactgccttagtaagactttcctggaacaaatgcatcnaataattttcatcttttgtgtattcccccattttcctacagtacatcttcaagtg

SEQ ID NO: 115639 - DNA, 291 bp, Glycine max
  unsure (1)..(291): unsure at all n locations
ctcatacacaacctctctggtcctattccttccacaannaatntccgaagtatggctgtaagcagctntattggtggtaacaatggcctctgtggtgcacctctcggtgactgcagtgatccagcttctcgctctgatactcgtgggaaaangtttgattctcctcatgctanagtagtcatgatcattgcagcttctgttggaggtgtntcactcatcttcattttagttatattacattttatgagacgtcctcgggagtcaattgattcctttgaaagcactgagcct

SEQ ID NO: 115640 - DNA, 464 bp, Glycine max
  unsure (1)..(464): unsure at all n locations
gatccttaagtcacctgcggcatgcagctttatgccatcttattcttgcgttctatcttcgtcaccattaatgattcttcgctccaagatcgaagctctaataccaattgatagaactggaccagaacatggtaaaaaacctcttgttcgaattaaaatgctacaatacaagagttacacactccgatgaatttgaggtctcatcaccctcctacaatctccaattttctgtctacccttttactaacccctcccaatgctatttatagcctcttaactaactaacaagtttttttcagcaaaaatgatgactatatttatngagtaccagaggtactatgaaatacaatatatagcttagaaatggtcctagacaatgtatttttcggcagcgtcccgaacaagtacatgattactgacccatagctgctaaaattaggatactcttattttactatatgctt

SEQ ID NO: 115641 - DNA, 455 bp, Glycine max
  unsure (1)..(455): unsure at all n locations
agcttatcgatcttgtgtataagaggatgattcttatgggctattttacagatcacagacattcgagttgacctatgtggtgatnttcttaaatggccaaaataaagagctgggttagtctggtgaagaggctctttatattggacacacattccacacaagataaggtggtgagtcctaaactcttaagcctataactaggattctgctgctcatgagacaaagaaaaacttttttattcataaggagaagagaaggaaatggatatttggaatgctaaagagctagagaataccttcaattaaagctccactaccatcaaaagaaacaatactaagtgatgcagaggaagaacagagctagcatgctttaacagtggccactgcctcatcagctgctgctgaagctgctgtactggtgctcatgctgctgcggaggctgttaccctcactggg

SEQ ID NO: 115642 - DNA, 465 bp, Glycine max
ctcgacccggatccttaagcacctgggctgcagcttggagcaactttcaacatatatcaggccgatttatttagtcacattttatgcaatgttgactacaacgcgtatataacaaatgcatatctaagtcacaccatatatgatccgattgattagtttaactcagatactgtcattgagatcctcttcagacacaagtctagatattaaaccacaaggattatttgtctttcctttatacattgctattacaatcaattactgtggtataaaatcctatactccatgtctacgttcaggttaagtaaacgaacttatctgaactggctcacttaacgtgcacaatgagacacatgtgaatgatgtcatgtgatgtgatgtgatcaaacgaatatgaatggagaacggttgatgccaaagcttaatatgatcacacgaacttcattaactctgcaatttctcaca

SEQ ID NO: 115643 - DNA, 453 bp, Glycine max
  unsure (1)..(453): unsure at all n locations
agcttgcattaattccaatcttattcctcactgaatgtagaatgaatcactaaatgagggtggaatgctttntgtggacaagcaccctaaccttagggtccgtgttgttcatgggaacatgtttactgttgctgtcatactcaatgagatccctcaaggtgtgaaagaggcgttcctaaaaggagcgacatccaagcttggaagagcaattgctctctacctttgccaaaagaaagtcaaagttctggtaaaatttctcacattccctattttttttaccatttttcttgcattatacttttgctttcgtttcctatatttcctcctcactaggtactcgttcttttaattttaaatataaggatgggacaagatgaaatgaaattgtagtgctatgaaatggacacatttcaacgcttgatgcagaatggngtagcangggtcccttttaat

SEQ ID NO: 115644 - DNA, 400 bp, Glycine max
  unsure (1)..(400): unsure at all n locations
cgttcagtaactgctggtaatcgattaccatatatgtgtaatcgaatacacagtgcaaatnttgaattcaatacctagatcaaagtaaagcataaattaaaagtgcacaacggataaatatagatggtttggaagaagaaagcatacacaagaattatactagttcgggcacaacccgtgcctacgtccagtacccaaagcaaccaccggttcttgagaatttccaataaccttgtaaatcctttacaagcaaagatccacaagggatgtaccctcccttgctctcttntaacaaccaagtggatgtacgcttcacttgaactgatccacaagagatgtatcctctctttgtcttagtattacaacccaagtagatgtccgctctactttgtccacaaat

SEQ ID NO: 115645 - DNA, 437 bp, Glycine max
  unsure (1)..(437): unsure at all n locations
agctngacatgttacactntacatctagaggacgcatcatccaataaccatacacatatatatgcatgactggacaactatgagtggatgaggggtattttgtaaactctacatcttgtcaaaacattgtgttttgactgttgagccatccttgagtaataggcccattaattaccttttaatagccaagagaactcactaacattccttatataaactcctaaatatcaggacaacagtctatctttactatctttgcaagaacttttgatatttctctcaagaaaacctcatagaaaccctaatctctttctctactcaccatgacaaactccagcgaanacactgctcctgacacgaccatcataaccacagatgccactaccatccaaactaatgaaaagcccactatgcacattgaacatntatttttgata

SEQ ID NO: 115646 - DNA, 324 bp, Glycine max
  unsure (1)..(324): unsure at all n locations
tctcncacttcaagtttcggtcatttgtaacagcatcaactcctttcttcanatggtcatgatgtccttggccaaggaaccaaagctccacagaggcaaaccaagatagaannattttccagttcaattttgtagttgttattgttggggttccagaanaggaaaaaactggtccagaagaggccatttctgatcaacaatggaaacncaaaggaacaaaggatagaagaaggcacgtgcaggcataaaggcttgccataatcaataaacaacacctgaaacaggctcagagaagaatgacgaagctgccgaaacaagctgggc

SEQ ID NO: 115647 - DNA, 448 bp, Glycine max
  unsure (1)..(448): unsure at all n locations
agctttgagctaattcaaacgacaataacgttttgctcggatgtatgattgagtcccgtaatctattgagacgcttgaaattgaattctgaagctgagagctaattgaaacgacaataactttttactcggatgtctgattgagtcccgtaatacatcgagacgctcgaaatngaatgttgaagctctcagcaaattcaaacgacaataacttttntcctcagatgtctgattgagacccgtaatatatcgagacgatcgaaattgaattctgaagctctgagctaattcaaacgacaataatgatttgctcggatgtctgattgagtcccgtaatacatcgagacgctcgaaattgaatgttgaagctgagagctaattcaaacgacaataactttntactcggatgtctgattgagtcccgtaatacatcgagacgctcgaaattg

SEQ ID NO: 115648 - DNA, 303 bp, Glycine max
  unsure (1)..(303): unsure at all n locations
cgatcgtcccggtatattacgggtctcaatcagatatccgagttaaaagtatttgtcgttgaattagctctgaagttcaaaattcaatcttgagcgtctcaatagattactggacgcantcatacatccgagcanaatgttattggtcgttgaattagctcagagcttcaaaattcactttcgatcgtttcgatatattacgggactcaatcagacatctgagtaaaaaagttatcgtcgtttgaatttgctgagagcttcaacattcaatttcgagcgtctcgatgtattacgggactcaat

SEQ ID NO: 115649 - DNA, 448 bp, Glycine max
  unsure (1)..(448): unsure at all n locations
agcttagggggcttatatactgtctagggtccacaaataacatggtgagtgatgtggcattaaaatacaaactntagccctagtactatagcattgaaactactcactcagcagccgggtggttgggccgataagctattgatatatttgaatcttaaaaataatgttatcatcctcttatcaagttgctacaagttatcaatatagttgttacactgttttaacaacctcaacaatcaaggaccccaaggctcgcgtccaatgttataaataatcaggttctacccaactttttcattcattctcagctcactcacatacttacttgggcgttggagttccttntacgtgtatcgctctcttcattcatccggtggatgatagctgcaagtccaacgtatgagatcgtggagcccatctcgacaatggtccaccctgatgtcattcc

SEQ ID NO: 115650 - DNA, 290 bp, Glycine max
  unsure (1)..(290): unsure at all n locations
taaatctataaagtagctaaaatatcacagactcaactgaaccaatacanaattaagagttagctgcataaagaacataatanatgcacctttactctccatcagtttttctttgaatgagtgtaaaccaactggacacataagtatgtaacaggttagccaagtttatggttatgtcattaactcgtngctaaagctaaagtgatcatggtggaaaagtatcgaagctttgaagtactaacattatagaacagcaatntttgttggtgtctcacatgtattccattcct

SEQ ID NO: 115651 - DNA, 395 bp, Glycine max
  unsure (1)..(395): unsure at all n locations
catgctgatagttatgagtattgtctctaaactgaaagccgctgccaagcacagaaagacagtagataaaactcgatgaaatcattaaatttgaggagttccataacatgtcttatgaatggttatatcaaacaaccacatggaactgtattagcaatgtccaacattcatganaattaataaccaaattacctttcatcttccaatgatgggttcgagattatgtcagaaagatgaatacgatcagtgtacactgatctaatcccattggtagatattggacttgaaccagagcctacagagtccattgcagcattcttgccttcaaatcatacctggtgacccagacagcatatatatatacgcatannaataaaatatcataacaaggagac

SEQ ID NO: 115652 - DNA, 455 bp, Glycine max
gatatggagagctagatcctctgtaggttcttccttgtatgtacttgatgtaaatacttgtatatctatttaatgatgtcttaggtgtgctctgtgtcatcagtatgtcatttcagtgtgcttttgccgtgatcacgtagatgcatgctttgttaggatcattctgcgaggggaactggtctgattcttagaactagatatggcaaggctagttcatcatattatcacgagggatcagggtacgataaccttattgtttgtatgttagtcttaatactgttctggtcaagtttagttcaacaagaagtatctgaggactatgcctggggtgtagcattttacgatacaccatagaacacatgagcattgttaagtaagaatattcttatgacaccaggcacctactctgaagaccaacatgtagactatgtggctgtacacatcaatactcacgt

SEQ ID NO: 115653 - DNA, 474 bp, Glycine max
  unsure (1)..(474): unsure at all n locations
agctcgccaaagatcagtgatacgcacagctattttccatgttccttttctggtgtgtaactcagatatcatatnttctttgcgagacatcactacaacacagataataaagaccattgcgaaacacaaaaagagagactaatacaaagaaaataggaatcacattcaacaggaacaaatagttgggacaataccaacattaaaaacctttctgtcattgcaaaaaaccccgccaaacagaaatgcataacccaaaacgtggtaagaacaaaacaatagcagacattagcaaacctttttgggtttgcaaacagtggcaaacaggagcaatccggcaaaaaaagttggacgaaaatagaaacctgcatataagagaagaaaatagcaacacacgtcagtaaagcccaacaaaaaggtaaagggtaacaaganaaaaaaatggacaaaaacagaggaaataaaataaaaatcaaa

SEQ ID NO: 115654 - DNA, 368 bp, Glycine max
  unsure (1)..(368): unsure at all n locations
cctctgcacgtctggtatatgactgtaacatatagatccaaacattcttaggtgctntgctgatggcttcttcccattccaagcatcaattggagtcttgtctgttacagacttagttggacatctgttgagtatgtaaacagcagtgtagactacttcagcccataatatgttatgtagtcccgtgctcttaatcatcgatctagccatctccataactgtgcgattctgtcaatcggacactccatcttgctgatgagaatatgcgactgtgagttgtcgcacaatgcctcattctcactaaatcttcaaactcgtaaaggagtactcattgctgtagaacttgttacccttatatacggaatcac

SEQ ID NO: 115655 - DNA, 456 bp, Glycine max
agctctgatgatatggtcttcaccgaagaaaggatcaaagtgggtctaaaaagagcaaatctgatcatcatgctttgataaatgcaaaaaaaaaaaaaaaactagggcaaatgaagagggtgagaatgagggagaagcccatgctgtgactgccattcctatacagccaagtttcccaccaacccaacaatgtcattactcagccaataaccaaccttctccttacccaccgcccagttatccacaaaggccatccctaaaacaaccacaaagtctgtttaccgcacttccaatgacgaacatcacctttagcacaatccaaaaacaccaaccaagaaatgaattttgcagcgagaaagcctgtagaattcaccccaattccagtgtcctatgctgacttgctcccatatctacttgataattcaatggtagccataaccccaaccaaggttcatc

SEQ ID NO: 115656 - DNA, 339 bp, Glycine max
  unsure (1)..(339): unsure at all n locations
ctctacagtctntagaattgcgagccaatccaatccttgtgtccggactctcagccacttatgatagtcaccgatgatcccattactgcttcccctaagctctctgtcctttcttcatgccgcatcccatgccttgcaaactccttggagtaccctcgaattgtggtcactgaaaccccgtgcgatgaaaggcgtgatgctttcgtctgatggaactcctctcatggngtagccaagctgtcttatggcgaggacggggattatattaatacaaccccttgttccatcgaaggaacatttggacatccttcgcatgaagatagaatcctgattcttcct

SEQ ID NO: 115657 - DNA, 441 bp, Glycine max
  unsure (1)..(441): unsure at all n locations
agcttgtaatctattacacacatactgtcatctattaccagaggagtntntcagagaacattctcaacagtcacatctttatatctgattcttaagcggccatcaaaggcttatatatatgtgactagagacacgaattgaacaagagttttgaagaacaaaaaggtcttatactcttaacaagcaaatatgtgttatcctcttacaaattccttggccgaaacactcgtgattcaataaggaattatttgagtgctcaaatagttcaatctatctctttctagagagatttcttcttctcttcttctttattctgaaaagggattaagagaccgagggtctcttgttgtgaaaggattctaaacacaaatgaaggattgtccttgtgtgtttagaacttgtaaaaggaatntacaagatagtggaactctcaagcgggtt

SEQ ID NO: 115658 - DNA, 451 bp, Glycine max
  unsure (1)..(451): unsure at all n locations
catgcaagcttatccacatagtcacttgtcttatatcttttggtgatgacatggagagcactcacacactanagatgaatttctggcatggacaatgctatattaatagaatataatagtatttttgtctgtaaacatatctataaatacggaaggctcatgacacatggcagttatacactattctctggatcttggatgtgtttggtataggtcttttagaatcacggagtcagagagaaaattaaagaactgnaagtttgtattattgctatcatgattcctgattcatgcttggtgttccctccctggatatattcagaattggatactgtgattcaaacccctgtggttgagacatgtaagctntattgctattcatcattcatgcatgatgccccctccctgcatanaatttgattcattcttcttcatgcttgcaaatctatag

SEQ ID NO: 115659 - DNA, 313 bp, Glycine max
  unsure (1)..(313): unsure at all n locations
cgccttgatctcgcttctcattntgttgccagtgccatagctaggcctgttgctgtgcaaattctctcttgacagattgcttggtgagatggctgcccaaaactcaggttgctgcacccaggtcttgtactaattataccttgctgaagaacaggaattagctgtgagaagtgagacacattcatgaaataaatgctgaacaactcttgcaccttttataaaaaatctgaactacttgctctcctccccataagctgaattgctgacacactgggaaaggttttttcaaacacagtctcactattgatcaatt

SEQ ID NO: 115660 - DNA, 460 bp, Glycine max
  unsure (1)..(460): unsure at all n locations
agctngtaggctntccgtgggaaatgatagtgagactcaacttggataccaaccttgtgctataaaaattgcagcaagacccactatccacaatgagagaacaatttttgtttaaaaccttacatcttgtatgaaagatgttctctctttgggtttggattagtgtcacaacctacccttcggcgggagggcgaanaggtcaaaataggtgggccaaggagtttgtctcaagggagaaaacaaatggagtcgccaccaatgtttattcgaggaaaattttagaaaaaccaaaaagacaaaggtatgagtattttgaaaatgagggttcaggagttatttacacacggngaaggtattagcaccccacgcgtccgccacaaggaacgacagcctttaatcaaatgtgaaaaatcatgacttcacatttattntattttccccttcttatgtttgttatctt

SEQ ID NO: 115661 - DNA, 446 bp, Glycine max
agcttgagatgaggaagtgttgaagggtgaatcttcttgcttttattgttgaccacagagtggtacctggagatatgtcgcgggggtcaagagaccttggggacgtcaggtggggtgctattgcccaaaaccaagcttgaccaatcccgacccaacccgggcatagtcggtcagtgagaacctgtgatgtacctaaacaggcgagctcctggcagtcaacagataaaaggaacaaagaccacaaagcaaggaggcttgtggtggctggccagctgtgaaacttgattgatatgtgagatatggtctctggtaatcgattaccaagggtgggtaatcgattacaaggcttaaaaatgaagacaggaggctaagatggtctctggtaatcgattaccaagggggtgtaatcgattaccaggcttagaaagggggctggaacattgtgg

SEQ ID NO: 115662 - DNA, 364 bp, Glycine max
agcttgttagcatgctctgtaatcgataccttctccttcattttatgcatctcagattgtctaaccacatatagggcgtgcagtcctttcctccatccatctgcttcgcattcattctggacgaaactccatattttatatgtatattaagggggcatgattctagagaaaacttcttttgagacaacagccaacaaactagatctgtgccgatcacttacatgctatcctttctctgtgactatttatcagaaccattgttggattaaatggtatgggaaaaacttctcacatcttccttaacatctttccacagatcatttcctgcatatgtgcctgccttctaacgtcccatatatgatga

SEQ ID NO: 115663 - DNA, 392 bp, Glycine max
  unsure (1)..(392): unsure at all n locations
agctngtatcgaacataaagcatataactcacatgccgtttgtgccatccgtcagatctggaaaaaggggcttgcggaaccttcagagaatttgagtttactgtgccacacaaggctccttttgataattcacccttcgaccgtgtcaggcaatgtcataagggacaaattattgtccaacggaatggccccaattttttatatacatatatcatatatgggcccaattaatctctgcataagatttattatcttgtaaattaaagatcttaactgtatatcatgtagagcttattattattattaatattattactattattatgactattattatttgaagtgtattacaaatatggatatgtaataaaatttcccatcatagggaaacc

SEQ ID NO: 115664 - DNA, 222 bp, Glycine max
  unsure (1)..(222): unsure at all n locations
gctatgctatgagntattgcaagtctgtctgagatatatcttatgtgaagattatataatatttaccattggtcatagcggagagtgcgcctggtgactaagtagaccattgtataatatctgacatgtggntaacattacaagcctatacactctgatggaagcttattgatagatacttgctgaggatatcaatgctaattttacgtggccatccttatc

SEQ ID NO: 115665 - DNA, 448 bp, Glycine max
  unsure (1)..(448): unsure at all n locations
agctngatcaaaacaattatctaatcattccattccactcaaatcatacaactactcattcaaatcattctcaaacactcatgtcatacaaaacaatccactgcatatcattttcaaccaattcattgttgaaacacactttttgtacaagcaaacaactcaaagtgctgaaatttaaataactaaaatttaaagaactgaaacataaaaactgaaattaaaatggctgaacataaatcataaaataattgaaaataaactaaaatgttcaaaatgcacaaatttaaatgtcctgctcctgtggttgctcctgtgcatgctcattaagaaccaacacctgagcagctggtgaatcctgagagatatgctgctctaactcagatgctggtgcagatggtatggcatcattaggtatgggtgttagggatgactctgggatatggtctgt

SEQ ID NO: 115666 - DNA, 209 bp, Glycine max
ttgacttagccgatcacccgtggaacatcaattgaaggcaggctccacacacagctgtcctactttcaaatgttgttgtcaagcagccatatgtcctcttcaatcacagcagtccaacatagacaaagcactgagctctctcacttcttaagataggcggaatgacctcgaaatgcattacagaacaaagctcattaagtcgcaacaat

SEQ ID NO: 115667 - DNA, 445 bp, Glycine max
  unsure (1)..(445): unsure at all n locations
agcttcaacgactntaacacgtacctgctatctgtatttgcttgtagtgtttgaatacaggttttaatacatggtttatacatatacatgtatatataaaaagtagtaacaatgtgctttacctgtacttgatataatgaaacagcttccacaagaacaccaatggacaaaccaacttcaactacaacaaagtaattcaccttcacctggagttcatataatgagtaatggcattagaagaagtcaaagccaaaccaacttcaagtacaacaaactaattcagctttttctcaaccaaactatgtcaaactacttgttggctattaaaagtgttagttattcatgtgacgggcatactattctagtttctattcatcattaagattcacaaagcacatatagtgttctcctaacaataccacacacagacaggggtgcagatagc

SEQ ID NO: 115668 - DNA, 102 bp, Glycine max
tgcattgagtctagacttggtaatggctgtaactgaatggctagtaaatccgatgccttgtcaagagagacatactgtctactgcttcttgcttgaaatatg

SEQ ID NO: 115669 - DNA, 490 bp, Glycine max
  unsure (1)..(490): unsure at all n locations
ctcagctaagaacttcctctcattcactcactcactcactctncctcgtcgncgctcactcactctccctcgctcgccgctcactcactctccctcgctcgctccaggtactataatgcctctntctcttccttccatcacatacttccagcaaattaactcttctccatgggctagggtttagtttcattttgttattgtaaactnttaggttaataactctatttgcatcgagaagttctctgattttccacaactngngaggttcactcttcgcactgagggtaagagttagaacatatttcgtgtgaatgtgtctccaatattaatatatgtttcagcggtattaattattctatcttgcacganaaactgttgccatgggaaaagtcactggcctgtgaatttgaacaactttacattgaggaaagaaatattgcttccatggcaaccttgaatactgtaaaacttcatattgctcatatatact

SEQ ID NO: 115670 - DNA, 325 bp, Glycine max
aaaagagaaggaaaaatttcaatcaacgagaaaagcaaaaaggagagaaggataatctccaatcaaaggaaaaaagagatgaaaggaaattcccaatcaaagagtgtgagaaagcagatagaacagaaagataattcccaatcacagaatgggagacagaaaaaaagagaagaataagaaggaaagatagctcctgatcaatgatcgaaagacaacagaagacatatgcaaagaggtctttggaccagacaatatctgaacaatactgaattgtcaccaaatgaacaaaaagaaggaatggagaccacgaacctaaatggtcttc

SEQ ID NO: 115671 - DNA, 450 bp, Glycine max
  unsure (1)..(450): unsure at all n locations
atcttattttatggttaatgctgtctctagaacatttccattggatttaatgatgaaatctgtgcattttcaggtgaaaaagaggatgagttttgaattgcaaaaagttgcagttgggctaaacgcttattcaccgctaagcacagcttcagtgcgcttagcgcanaggagaatctggcagagcatcagcatcaaagccgcaccctaagcgcgagatcaatgcgctaagcgcaacaggtgcctttagccaggctcaacgcaagactggcgctaagcccaattccacttactcgagctaagcgcgagggtggcactaagcgcaaggttgcgtattctgagcctatntaaagcctgttttgtgcagaattaggggacacancctttgagacttggcacagaattntcagaggcactagtgcacagcattccacagtgcctattttgggaaaa

SEQ ID NO: 115672 - DNA, 441 bp, Glycine max
  unsure (1)..(441): unsure at all n locations
ctgcagcttgcaagaaagcgaacctggaattnttgtgggttatagctcttcttcaaaggtctacagaatctacctaccacagagcaacaaagtaatcgtcagcagggatgtcaaatctctggagtcagatagttgggactggaaaaatgataagaggtctgagtttcacgaggagaatgaagatggtgatgaagaacccatcagaggaaccagatcactttccgacatctaccaaatgtgtaatgatgctgtaatggagcctgacggatatgaagaagctacagctgatcagacatggagaaatgcaatgaaagaggagcttataatgattgaaaaaaataaaacatgggagctggtggacagacctaaccacacgatagcgattggtgtcaagtgggtttatagaactaagctcaactcacatggttctgtatacaaata

SEQ ID NO: 115673 - DNA, 438 bp, Glycine max
cttcctgctttattcgttgaccacagtttgttacctggagatatgtcgcgcgggccacgagaccttgaggatgtcaggtggggtgctattgcccaaaaccaagcttgaccaatcccgacccaacccgggcatagtcagtcagtgagaacctgtgatgtacctaaacatgcgagctcctggcagtcaacagataataggaacaaagactacagagcaaggaggcttgtgtggtggctggccaactgtgaatcttgtgtgatatatgggttatggcctctggtaatcgattaccaagggtgggtaatcgattacgaggcttaaaaatgaagataggaggctcagatggtctctggtaatcgattacttaatgggagtaatcgatgaccaggcatgaaaatgatgtcaggaagctaggagagcttctggtaatctattacc

SEQ ID NO: 115674 - DNA, 323 bp, Glycine max
gtgaagatcatgcgcaccagcatgaccaccctcacgtagaattggatgaacgtgctgcttaacaacattctcgctaacgaccataactcagaccttccccggccgaagtgtcagctggtctacgccatcctgactcaggtgagtgtacatattgcccagctaatatcatatgttgtgtataaatatgcagggatcatgcctccttgacacccagtggacccaaagaagtccaacagggccctgggttttcctgctttgttacaggcctgtgcaatttatggaggttggcaacctgcaagctatcggctccatacagagcttat

SEQ ID NO: 115675 - DNA, 401 bp, Glycine max
  unsure (1)..(401): unsure at all n locations
aagagagccctttcttgacatatatgtcctacattcaatgaaagcctgacaattttgttgactctcaancaangaaattggcgttatacctatgaaatttgagtgaatgaaatcagcgattgagtttgtggtactcatttgcagatcatggttatgaccagaggattatgtcgtgccttatgtcacgttactggtaaaggagtgggctcaggagatcgtgatgattctgatgatgcttcgcagtgtcgacggcctaccgcatccgcacggaggctgcgaatcattgtgactgcagcgcacgatgagctagtggtccctgcgccagatgttgaggctgatgtatttccggatgacccgatggaaccagctgatgtcgatgacattgtggcagacattcctgc

SEQ ID NO: 115676 - DNA, 528 bp, Glycine max
  unsure (1)..(528): unsure at all n locations
gtcacctgcggcatgcaagcttgctaacccatggaagctcctaatatctcccacactnntgtgggtgggccattcttggatggccttgattntctcaaggtccacttggaccccatttctaccaactacaaaacctaagaaaactatattatctacacaaaaggtacacttctctatttttgcatagagggtgtttttcctaaggactgaaagaacttgtctgagatgtcctaagtgatcatctaggctcctactatacactaaaatatcatcaaaataaacaactacaaatctacctatgaaatcccttaagacatgatgcataagcctcataaaggtgcttggtgcattagtgagcccaaaaggcatcactagccattcatacaaaccaaacttggtcttgaaagcagttttccactcatcacnnccttttcatcctgattggtgataaccacttttaagaatcaatttngaaaagatattggcaccatgcaactcatcaagcagatcatcaagtctatgaatggg

SEQ ID NO: 115677 - DNA, 494 bp, Glycine max
  unsure (1)..(494): unsure at all n locations
gtatcctctctatgagnagcttgaatattgtattctattcanactattgtttanaaagctaggaatggctnttgtgataaaaatacttgngttntgtttaatctcaggggagattaaggatgtgttangagtggcctanaaaatactgtgtatccagaagtgaaagagtaaaatactngtttgtaatacattttttttattagtggaacccttcaaggttttgaaggagaactggttgtagctcatgagtttaagtgaaccagtataaagtctgtgtttttattctagcttcaactatgacttgtttttctcttaagttgcctctttgacaccttgtagctcatatgttttgtgaaaattatttgctagttgttggacactatttgttaagcttggttttgttcaactattgtttagtgtgttggacactctttcaagagttttttttttatatcccttgtgataaaaatctctgtgaaaacattcatcttgtg

SEQ ID NO: 115678 - DNA, 446 bp, Glycine max
  unsure (1)..(446): unsure at all n locations
agctatgacaatcttccatatgttatcatatctacggtagtataatgaaacctctgcaagaccggtatagcaagtccatggaatataagatatgtatatctatttttttaggattaaacaaaaggatttgcaataaaagtgctaatactacaaccaatccataaattgttaaggcttccataaaagccaaactaagcaatanagtacctcgtatttttccctctgcctccggttgtcgtgcaatcccttctacagcttgccctacagtagtgccttgaccaaccctatgtccaatagaagcaggccctatagccaacccagcangaataaaaggatattggtccaatgttaacaatgtatttgcaccaatgtagtgtaaagactatgcattccatgcaaagaaagtcaatctcttaaatcgcatatgtaaccacggcataacatgt

SEQ ID NO: 115679 - DNA, 476 bp, Glycine max
  unsure (1)..(476): unsure at all n locations
tgccttcacaaataatcatcacacagcaganatctaccaaaaccacccatcatatctcccaaaaccccatacccacgaaatttaagagagaaagaagtccacccaaacctgaaatttcgaagtcccactcgtagccacgcacttcacgactccaaaaatgctctcctttcacgatttgnggcagaaatgagcaccaaaggttgaagctntgtgtggagcttcaatggagaatgagggagaagaaaggcaacgtgagggagagagaaagctgtctgaaaaaaaaagtgtgggggctgagtgaggagagagaaaagctcttggtcttaaataaaaagggttttcccttttcccttantttattcaagctctgccacatgtccctatttngatggagcanaagggcccactttctcttttgactgtgacccatactcagtcacaaaagtgagaanaatctgacctttgaaacgcttaaa

SEQ ID NO: 115680 - DNA, 483 bp, Glycine max
  unsure (1)..(483): unsure at all n locations
atgcaagcttaagctccttatcttgacaagactctttatatttgaagtttattcttgnggaaccttcacccgacgaagacactgacaaaaacttatcttctccttcttggacaaagtatggcagcctgggggcaagtaaattttcttccatcagaccttggatgcaactgtgatcttatacccatatcagctagatcttgacgggtattcaagccatcctttgtcttgccttgaatgtcaaggagcgtcccaatcacactgtcacaaacatttttctccacatgcataacatcaatacaatgtctaacgtcaagatcacaccagtacggaagatcaaagaaaatggacctcttcttccttatgcaactctgacttntatccttcttttgggtcttcccaaatacagtgttcaggtgttgaacccgctgatatacctactcactagtgaacggtatcggngcaatatcatgctcttgacttcca

SEQ ID NO: 115681 - DNA, 405 bp, Glycine max
  unsure (1)..(405): unsure at all n locations
actcagctttcattatttatgtacccgagtggtcccattggtttcggcattttattctcgtttgattactttttataccccctcttgacgtgcttaagccattttacttaagtcattcctcgcttaacttaaaaataaaataaatttccaccgaaagtttgaattgtattatcccgtaacttcggttaaaatgaattccgaccgttcgtcgtgccgtaaccacgttggaaatcacaacagaggtaaaaaataatataataatcaaaaaacatcttttagtaaaataaagcggaaaatcaatcggacgttttctctttgggatttctcattcttaatcgaattgattaataactaaagtgaaactaaggctaanatcaactcgcctagtcaagctcgtccataaaa

SEQ ID NO: 115682 - DNA, 382 bp, Glycine max
  unsure (1)..(382): unsure at all n locations
tgtttattattataattaaattctataatnngcntatatatatatatatatatatatatatatatatatatatatatatattatcattcaccctttaaaaatccagggtattatttntaaaaagtcaccatctttactatattggctctgatatctgatattaaatgaaaaaaatatgatatgcaccacagttntacactcttcacttatattactgtgaagatgataaatttgttgataaaattctttacagtcatattgaatattatttttaattgggtttacacttacnagatgtactcactaatattattaaaatatgaataatctacttatttatttttaatttaattgaaatgaagtatgttggcatatataataa

SEQ ID NO: 115683 - DNA, 431 bp, Glycine max
  unsure (1)..(431): unsure at all n locations
ctcagctttaaaaagggtttgaatnntgaatttgaacctgtaatctttttccatatgtttgtaatcgattaccagcaacggaactcttgaaattcaaattcaaaagtcatgacccttcaaaatataattgtgtaattgattaccagaaacttgtaatcgattaccagtgaaaaaattcagaaaaagctttttgaaaagacaccatctcttcaaatcatttgaaatgtcacgaagggcctatatatgtgtgtgtctgatttcaaaaagaaagagagagatattccaatagaacttcattgtcaaatgctctctcaacaactcttgggcaaacacttgcaaatctatggagagttcatccagaaacttcanatatattatccattctaaaggagaagaaatcttttgttcttttcagaaagtcaattgtaatc

SEQ ID NO: 115684 - DNA, 312 bp, Glycine max
  unsure (1)..(312): unsure at all n locations
agtcttatataccaaatatacgataatgaaacttggccaaaggcaagcgcgccagtctggcgccaattagatcatatcgttccattacgagcctcggatttgctaaaaaggtaacaattgcggcaaattcacttgccgcatctttatcatcattttatttcaaggcgcaggaacaaataatattgacaacgtgtgctcaaattaccacaccagctggatattattgtctntgcaaaatgctatccactctgcacccggtgatatatcacgtatcatgtaattaatatgactaanatcagctaactggacaaa

SEQ ID NO: 115685 - DNA, 312 bp, Glycine max
  unsure (1)..(312): unsure at all n locations
tttgtccagttagctgattntagtcatattaattacataattactgatatatcaccgggtgcagagtnggatagcatttgcanagacaataatatccagctggtgtggtaatttaagcacacgttgtcaatattatttgttcctgcgccttgaaataaaatgatgataaagatgcggcaaagtgaattgccgcaattgctacctttntagcanatccgaggcacctaatggaacaatatgatcaaattggcgcaagactggaccgcttgcctttggcccggtttcattatcgtatatttggtattataagct

SEQ ID NO: 115686 - DNA, 469 bp, Glycine max
  unsure (1)..(469): unsure at all n locations
tcatggcgtggggattcgtgagtcacctagacgagtgtgtgatctctgtttgttcagcaatgaagtcgacatcctcactatccgctggaaagaaatgcagccttacgtgacgcagtatgtactccttgaatcaaactcaacatttaccggatttgtcaaaccattgctattttcgggcaatagggacaagttcaagtttcttgagtcgcgcctaacatacggtgtgattggagggagattcaagataaaagataatccttctattgaggaggcttatcaaagagttgccctggatcagcttctgaggatagcacgcatagaagacgacgatctcttgataatgtccgatgttgatgagattccaagcgcgcacacaattaacctcttgaggtggtgtgatgggatccatccagttcttcatcttcaactaaagaactatntatactctttcgagttcttattggacaac

SEQ ID NO: 115687 - DNA, 376 bp, Glycine max
ctcagctacctatacacgacaactatcttgccggcgattattgtccttatgagaaatgtacctcaaatgaccacatagaccacgtactactactcaaatgcacctcatgtgaccaccacttcgccaatccttgcaccagaaaccaaacaaggtccatatcttaaccacgagttccagaaacatacctatcacggtcacgggcttcagttcaatagaacaacacacgtagacgaaacgtacctagcacggtcttcagtgcaatggagaacaacgacctttgatgttaacagtgcaatggacaagagagcgcgatatggtacatagagacaaagatagcgcgagatggtaaacggtgaagaacggagcgcgagccaaa

SEQ ID NO: 115688 - DNA, 338 bp, Glycine max
  unsure (1)..(338): unsure at all n locations
agcttggaagattccgctccgattgaagggctcctcttagtgtggggtttcaacggagaacaatggcggtccgtggcggctactggtggttatgggtggtgaagaagaagcttgggacattggggaagggttntggaagaaagaaggagaaagaaatggctgttntccaaggctacacgaanaaataaggcttgcaacacttcaagtgttctgctcttcggaaaagaagcatttctcacacaccagaagacatatcgcagatcgaacggtcagatcatggacattngtcctatgaacgtccagatcatatttcgagaagatccaatggtaaatgaatg

SEQ ID NO: 115689 - DNA, 475 bp, Glycine max
  unsure (1)..(475): unsure at all n locations
gcttaacatcagaccacttccatggtgctggaacttcttacatggacttgatggngcctgtgcaagctgaaagccttggaggaaagaggtatgcctatgttgttgtggatgatttctccagatttacctgngtcaactttatcagagagaaatcagacacctttgaagtattcaaagagttgagtctaagactgcaaagagaaaaagactgtgtcatcaagagaattaggagtgaccatggcagagagnttgaaaacaacaagtttactgaattctgcacatctgaaggcatcactcatgagttctctgcagccatcacaccacaacaaaatggcatagttgaaaggaaaaacaggactttgcaagaagctgctagggtcatgcttcatgccaaagaacttccctataatctctgggctgaagccatgaacacagcatgctatatccacaacagagtcacactcagaagagggac

SEQ ID NO: 115690 - DNA, 387 bp, Glycine max
atatagtccaagttgattgatcaatttactttaacacacacacacacccttctctttgcgaccaatatttcgttctttcttgacttaagggaaaggttatacttatacctataatacaataaacaatgacagcatgattcctaattcattaatcagtctatggaacaactgtgtacgtggaccatagcgagcctccctcacaaattgcctacggcaactagcaaaaaaaccgccacatcattccgccatggcggccataacgctgtcatttaatgacactgacgttgacacagagttagcaatgccatgcaaaacctgatttataatattaaacctaaccagtaatggaagcatacctgattcatgtttgacattgcccaatacaga

SEQ ID NO: 115691 - DNA, 297 bp, Glycine max
  unsure (1)..(297): unsure at all n locations
agccgaggcgctttcgtaacgttttcatgagtaattacgtgaagattctcgaccgttcttcaagattcatcgttcgttcttcgttntcttcagtcttcaacgggttagtacctcannaccaaacttttcaattattctatgtacccgtggtggtccacattgtggttcgtgtatttttattcttggtttcatntgctttttatacacccttttgacgtgcttaagccatttatttaattcatttctcgcttaatctaaaaataaaataaattcccaccgatcatttaaattgtatca

SEQ ID NO: 115692 - DNA, 463 bp, Glycine max
  unsure (1)..(463): unsure at all n locations
ngccgcccagctcgcccacgcgagcaagggtgcttcctccagtatcaacagccttctggaggaatcttctggagggcccaagtgggcctggttgctatntgcacccttttttttactgaatgcacccccatctatttttttggtaattctttttccgtaacattacgaaactttgcgaatttcataacgatacttattttccttccgcaagggtatgaatccttacggatcatgtatttactntcttttagctntcgaagaagttatagaaactcacggattgcgcanaaacacctcttttcgattttcgccacattacttcctttngatttctgagacgtctcgggacttcatttattgcatatcatcaagtaataatcctcggacgaaatagggtatgaacagtgcccctctntacttacctctcatcggagaataaaggaaagcaaacataggacactga

SEQ ID NO: 115693 - DNA, 198 bp, Glycine max
  unsure (1)..(198): unsure at all n locations
actctcagccacttatgatagccgccgatgatcccattactggttnccctaagctctctgtcctttcttcacgccgcattccatgcctggcgaacttcttggagtacccttgcggtgtggtcactaaaaccccgtgcgaagaaaggcgtgatgcattcctctaatggcgcttctctcatggggtagccaactggctta

SEQ ID NO: 115694 - DNA, 383 bp, Glycine max
ctgcgattgcatcatcatgcttaaggaaactataaacctttctggcgtatatgcagggagttaattggtcattttatcacaccggctggtctattgttatgcaaggattgtaattgctgatatgaatgcgtctaaattgcttatatgactcatttgacatttgggtggtatatatgtatacactaatttatggtaaaagacactgtccactatattgaatcatgctacttatacctactaactgatctgataaacttcattgttatattttgaatacaaatcttaattttctaccaataagttgccatctactactatgatattcattgtcttctcagcactataacattgatcctgaaaaaaaggactttgcctggattctc

SEQ ID NO: 115695 - DNA, 338 bp, Glycine max
  unsure (1)..(338): unsure at all n locations
agcttaactcatccaacatggcaagttcaatatgctntcaacacatttcttcacatataactatcatgaagcagatacctagcagaactacctatcatatcttccaaaacccaatacccacgaaaatcaagtgagagagaagtctacccaaacctgaaatttcgaggtcccacacatagagatgcgcttcacgactccgaaaatgcttttctttcgcgattcggagcagaaatggctaccaaaggttggagctttgttggagcttcaatggtggatgaagaataatagaatggcaacgtgagagagagaggaaaaggcttctgaaatctttggggctg

SEQ ID NO: 115696 - DNA, 386 bp, Glycine max
  unsure (1)..(386): unsure at all n locations
ctctaccacttgctatccacaatctgatgggcaaacagaggtagtgaataggtctttatccacccttttaagggctcttctgaaaggcaaccataagtcgtgngatgagtatcttcctcatgtagaatctgcctacaacagggggggttcattgaaccaccaagcagtccccttttgaggttgtctatgggttcaatcccctaacatcgttagacctcattcccctcccactggacatcttttttatacataaagaaggggaatcttggtgagagtttgtacagaagtcgcatgagagggttaagaaccacatagagaaccaatctatcgtgtattcaactataggcaacataggacgaaataactagttcttaatgatggtgact

SEQ ID NO: 115697 - DNA, 288 bp, Glycine max
  unsure (1)..(288): unsure at all n locations
gtgtgaatgcctctaaactatgcanacttagggctgttttgtcccagacgaagttgataaactatcccatgccattgcttatgcttcacgcactntagatgcaaccagagttaactacacccctactgagatggaacttttagctatagtgtttgctttagataaattattaagatcttagtcgctttgctcctatatcactatcattactgaccatgcaactttgaggtacttngtgaagaagcctgatgctaaacctggactntagatatnccaataaaaaaaatc

SEQ ID NO: 115698 - DNA, 325 bp, Glycine max
  unsure (1)..(325): unsure at all n locations
gtcgatctagtcaaaggcttagagaccatacaagtttcctaacgatttccaattatgtgggccattaagtctatcatatgctgacaataaccgataagcccatgaatctctctccgggccgaataagtgtctgccatcgccttggcctttgctaacaatcggggaaattcttgacttccgttaagggtagagcaaaccgatccatccacatggttgcctcttggtgtaaagagtcgatcaccccttctctaacctctntttccgcgtattcttgggcatattcgtccgcaatcctatgctcgtgggccgccgctagacctaactc

SEQ ID NO: 115699 - DNA, 384 bp, Glycine max
  unsure (1)..(384): unsure at all n locations
ctcaaatcatgcnagttctcattcaaatcattcgtagacacttatttcataccaaacaatccactgcatatcatattccaccagctcactattaaaactagctgtccgtacaaacaatcaactcatagtactgaaatttaaagaactgaaacataaacactgatatttaaatgactaagattagatcataaaataactaatataaactaatatgtacaaatgcacaaatatacatgttctgctcctgtggctgctcttgtgcatgctcattgagatccaacacctgactagttggtgaattctgagagataagctgctctaactctgatagtgatgaagatggtatggcatcatcangtatgggtgctggagatggctctggaa

SEQ ID NO: 115700 - DNA, 441 bp, Glycine max
tctaagcttggcattcatatcctgatgacggtgttccatatgttctctagactgttctaatacattagctgcccaagtttcatggtctcgtatgtgaagatcctcataagcatgttaatgagttccatattgtttgctccaccatgaatccccctgatgtccaagaagatcatatctttctgaaggcgtctcctcaatctctggagggagtggcaaaagattggctatactacctcgctcccaggtccattttcagcagggatgaccttaaaaaggagtactcggagaaatacttccttgcatcttcgaccgacgccatcagagaatatattgccggcttcaagcaacttagatgaaatagctttgatgagtactgagaaagatcaagattttgtgtgcagctgacctaccacctatttctgagcacttcctcatatttta

SEQ ID NO: 115701 - DNA, 442 bp, Glycine max
  unsure (1)..(442): unsure at all n locations
acaccatatttcttgacccgggatgtaatttccatcctcgcccttggaagagacatgaaaagaaaaagaaagttcctgatcaaagatcggaagagaacaaataagataaaagttcccgatcaaagatcggaagataacaaaagataaaaaagttcccggtcaaagttcagaagataacaaagtgaaaaagaaaatccctgatcaaagatcggaagacaatgaaagaattatgtagaatggtcttcggaccagacaaatattcaaacaatacaaaatagccataaccaaataaggaaataaaggacaccacgacttgaagtagtcctctccctttggttaccaaccaatatcctatgcgctaatgactntcttgccccgcactaaacataaacagataatggaaaggccaaaacacttagagccaatttctcaccaaaacact

SEQ ID NO: 115702 - DNA, 374 bp, Glycine max
  unsure (1)..(374): unsure at all n locations
agcttctagccagggccagattctggtgcatgcttanggttcttcaagaaaaactccaaactctctntttcaatctgaattcaggcttaaataagtggccttgttcgtgctcgtgcgcttaacgcatgtatggaccgcttagcgcatgttagtgaagtttggctcagcgtgcttctcttgcttagcggatgagctgatacaacatacataggttttatacacaaaagttagtcatattcatcgactaacaactcccccaaatttacagttttgcttgtccttaagcaaaagagaacaactcacttgtcttcaagtggtaaaacatgcagtgtttatgtataacggtgtatgcatcaaatttatggctgcatgat

SEQ ID NO: 115703 - DNA, 453 bp, Glycine max
  unsure (1)..(453): unsure at all n locations
tgcttgtggggcttctatggatgctggatctnttagcttcaatgaaggcctttaatggtgattttccaccatggagatgcagcggaagacaaaggagaagaggtgagaggaggcgccatccactatggaacaagccatggaagaaggagcttcaccaccaagatgagccttggataagaagcttgaagaggatgcttcaatggaggaaaagatagagggagagaaagagagagaggggagcacaaaattgaaggaagataaagggagagaagaatgaacttgagttgtgtctcacaagactctcattcatcanagttacaacaagtgttacacatgcttctatttatagaataggtagcttccttgagaagctntcttaagaaaacttccttgagaatcttctttganggaaactccttgagaagctagagctttagctacacacacccatct

SEQ ID NO: 115704 - DNA, 450 bp, Glycine max
  unsure (1)..(450): unsure at all n locations
agctntgatgggtgtgagaagatatcacatgtttgtcatcatcaaaaagggggagaatgtgaatgtatgtatacatgantntgatgatgtcaaaagaagaatcaaacaaggctcattttgcttcaagccttgcctcacaatgaaaggtttcaagtcattcaaggcacatgtaatcgattaccaatacatgtaatcgattaccaatggtttgaaagtgtgtaaccgattacacatcatatgtaatggattaccagagactctgaacgttgggaattcaatatttaaatgaagggtcacaactgttcaagaaaaacaactgtgtaatcgattactagaaaggatttcaaggaatatcgcaacagtcacatctttcatagatttgtgataccatcaatgctataatagtgactgggcacaatttatgcgagagtttgctgacaaatgtctatc

SEQ ID NO: 115705 - DNA, 433 bp, Glycine max
  unsure (1)..(433): unsure at all n locations
tagccctagaggggatggaccttnntcaggtttggagaggatcaataacaatgcctataggttggacctcccagaagagtatggagtcagcaccacttttaacatttctgatttaactccttttgcaggtggagctgatattaaggaggaggaactaacagaattgaggtcaaatcctcttcaaggggaaggggatgatgcaatcctccctaggaagggaccaatcactagaaccatgagcaagaggctccaagaagattgngctagagctgctgaagaaggccctanggttctcatgaaccttanggtagatttctgagcccatgggccaaggttgggtccaattatctttgtacatattagactangatgtcattatattnggtccttgtatatagggctccatattgtaggtaggataccctagaaatat

SEQ ID NO: 115706 - DNA, 318 bp, Glycine max
  unsure (1)..(318): unsure at all n locations
gcttatctccaatanacttcaatctagatggtgatggtcctttttgttattacntaatgttttccccacggtgcaattgagataaaaagggaattactagcaaagtcttcaaagagaatggtcaccaactcaagctttggtcttgccaagtagaggaacttgtggcaaacctctctttggtcttgccaattttatgtgatgatgtgccttgaatggaacttgaggagtttccttcccttttcttttatatgtagtctctttgtttgcatttcattacatgatcacattgaggatcatatgcatatcaagtgtgggggg

SEQ ID NO: 115707 - DNA, 497 bp, Glycine max
  unsure (1)..(497): unsure at all n locations
cgcttgtggggcttctatggaggatggatctntgagcttcaatgatgtcctttaatggtgattttcaaccatggagatgcagcagaagacaaaggagaagaggtgagaggaggcgccatccactagggaataagccatggaagaaggagcttcaccaccaagatgagccttggataagaagcttggaaggatgcttcaatgaaggaaaagaaagagggagagaaagagagaggggggagcacgantatgaaggaataaaagagggagagaagtggaactttgaagtatgtctcacaagactctcattcatcaaagttacaacaagtgttacacatgcttctatttatagactangtagcttccttgagaacctttcttgagaaaacttccttgagaagcttctctgagaaaacttccttgagaagctagagcttagctacacacacccctctcataactaagctcacctccttgagaagcttcttaagaagattcta

SEQ ID NO: 115708 - DNA, 459 bp, Glycine max
  unsure (1)..(459): unsure at all n locations
ctgacacaaatncgaatgaagatctagtgcggctatatgatactcgggattgtatattctacggatagagcacatggtgaactattcctatcccacagcacttacctccaaaaagtggtggagaggtctatgacgcatctaagcaaacctgttagcacaccactacggccattatacaaagctatctgtcactcaagcaccagaaatagctgaagaaaggtctaaaatggatcaaacactctatgccagtggcgttggaagcataatgtatcgaatggcttgtaacacacctgacttgactcatgctgcaagcattatgagcagatccatgagagatcctatctatgcacactgcgaagctgtgaagcgcacacttaagtatctaaatggatctttgaaagctggatgaaagcacaacaggacgaacacatgacgcagcaatcacaggctatgtagatg

SEQ ID NO: 115709 - DNA, 363 bp, Glycine max
gcttttggttaaataaaaggcttctcttttctatatttattaagcttgcccatgtctcgttgagggacaaaagggcccacttcctttactgtgaccatactcaccacaaagtgggaaaatcgaccttgaacgctaaacctgctcggttgcggcattctctgtcccatcctccgttcttgcgacgcgggccagtttgaagcagcatttattcaaacgctaaataaacccgacgggtcaaggtggtcgtaatttagccaccaaacagatttaactatactaaaataccctactcagtatgatttttctataccaaccgcgttgcccctctcatttacagaactttttgcttcctgatactatttt

SEQ ID NO: 115710 - DNA, 414 bp, Glycine max
  unsure (1)..(414): unsure at all n locations
cctcatcgcctctcacagtctntagattngngagccaatccaatccttggttctgtctctcagccacttatgatagccggcgatgatcccattactgcttcccctaagctctctgtcctttcttcacgccgcatcccatgccttgcgaactccttggagtaccctcacgttgtggtcactaaaaccccgtgcgatgaaaggcgtgatgcattccgctaatggcgctcctctcatggggtagccaagctgtcttatggtgagaacgggattataattaatacaaccccttgatcccatcaagggaacatttggacatccttcgcatgaagatagaatcctgattctgtcttcttcagcgagggaccatatacagacccccccatgctgccagagttggccaattcgctttctttt

SEQ ID NO: 115711 - DNA, 389 bp, Glycine max
caatcgaaccgatagttgccatcattataatgataaaatattaaggcgaagtgcggaggtcaatctgaagaacatggcatagtaggctgtggcataggactccataccaatgacaacaggcggtattattatgattccaacaccaaagcctattggaaggatctatgagactattcttaaacctcataagggactcacgctcacttgggatgcacacactctctctgcatggtaagctgaacgagtgtctatatttagagctgagaacagagtagatgctgctctgcatataaatcataaactgctttattatactggtgcccgccagattacatatcacttcactatttgtacctattaagtatcgagacaaactaataattctcttt

SEQ ID NO: 115712 - DNA, 484 bp, Glycine max
  unsure (1)..(484): unsure at all n locations
ggcgcatcaaggaacaatttcactttagaagtgggtcccaatagtcttcctaatattcggctctcctatgtggatgtgacatcatggcagataactcccaactttccatcgtggattcagacacaatacaaacttgaatatgttggactatctaacacggngaatttcgattctattcccacacagatgtgggaaacacgtcctcagggtttgtatataaacctctctcataatcacatccatggtgagagggcgactacattaaagaatcccatatctatccccgttattgatctaagctcatatcacttgtgtgcgcaaataccctatctttcagtgatgtgtctcagttagatctttcaagcaattcaatctctgaatccatgaatgactntntatgcaatgatcaggacgaagccatgcaattacaatttctgaatcttgcatcaaataattcgtcatgagagatacctgactgctggat

SEQ ID NO: 115713 - DNA, 420 bp, Glycine max
  unsure (1)..(420): unsure at all n locations
agcacaatgcacaatgtacatggcatattggatacatcgtacgtgaaagtattgacgataaagaccaaaagcgactatattgcagtagagcaagactgttaagtatctgtaatcgttactatctaaagatgttggtaataagcaagtatcacattggatgatccaaatgaatatgttaacaggagatgaggaatagttcaaagagaatgttaattatttaaattatatagagagagagagtcgtggaagaatcgtattctattattatctaaattattttaaaaaattcatcagaaaatttctggtaggttttagacactatgaaacgaactgccaganaattcactatatataatgtcacatcattcgttaatcataaatagatgttgagacttataccttaacgaanaaatgtttaag

SEQ ID NO: 115714 - DNA, 145 bp, Glycine max
gttttgatgagtatgtgaaagtaattcccactacatcgggtgcatcaacaagttcttagcttggtccttcagttgaacaagatttcaatttagaggataatggaaggatggaagaattggatccatgtgtcgtaagttaattgat

SEQ ID NO: 115715 - DNA, 470 bp, Glycine max
  unsure (1)..(470): unsure at all n locations
tcaggtngctcattgattccagattgcagcatagaaggacatagatctgtatggtgatctgcagaagaacatagaccaaaaactcttgcaacaagtgtagatttctgattcatggcaagctgagttactaggttgaccaaggcatcaagttttccctcaagctttatattttctgtagatgaagatgaatctgtggccacctcatggactcctctaagaacaatagcatcatttcttgcactgaattgttgggagttggaagccatcttctcaatcaaattcctagcctcagcatgagtcatatcaacaagggctccaccattggcagcatcaatcatacctcctctccatttgctaagtccctcatagaaatattgaagaaggagttgctcagaaatctagtggtgagggaagcttgcacacaatttcttgaatctttcccaatactcatacaagctctctccactcag

SEQ ID NO: 115716 - DNA, 439 bp, Glycine max
  unsure (1)..(439): unsure at all n locations
cgccgccagcactatatcccctgatttttgcgcgagatttaccaccgacggagaggcacatatggcagcagctgcgccactactgataccaacgttcaccatcaccggatatatggttgccatcagcaaaacacccataccggttgcggaagagacggtcatagacattagacaggcgacattatatgcggtaatcatcagctggtaaggtgagttaatatactgctactggtttgacgccagctagaccaccatatcattcgcgccgatatgggtcatgttagcggccaatccacacagcatcataatcatcatgccgaggtcgccgccgctgctcattattaatactttaacgtattctaccatatccgtggcgctgatacctgtngaagcctggctggacggtaacactattgtgcccataatggcatctgatatc

SEQ ID NO: 115717 - DNA, 441 bp, Glycine max
  unsure (1)..(441): unsure at all n locations
ctntaggaatttntattatttactttggagcctggagacaggataaattatgctgacattcattgagctccttattgnggttgtggttattgtgggtgtagctcgctacatcattaaagggtattccgccactggtgtgttatttgtcggtggcctgttattgctgattatcagtgccattatggggcacaaagtgttaccgtccagccaggcttcaacaggctacagcgccacggatatcgntgaatacgttaaaatattactaatgagccgcggcggcgacctcggcatgatgattatgatgctgtgtggaattgccgcttacatgacccatatcggcgcgaatgatatggtggtcaagctggcgtcaaaaccattggcagtatataactccccttacctgctgatgaattgccgctattttgtcgcctgtctgatgtc

SEQ ID NO: 115718 - DNA, 204 bp, Glycine max
  unsure (1)..(204): unsure at all n locations
atccttcagtcacctgcggcatgcagcttctagccaagggttgtcctcgaattttatcttngatatcccttatgagcactgttcccttttcttgttatgaagctcactacaagccttaagtgaaaaaccatgatattaccatatccttaaggaatattggagctctggaattgatttgggaattagtgtgtgggggtcttttgt

SEQ ID NO: 115719 - DNA, 469 bp, Glycine max
ctttcgattcattctatgtacccgtggtggtccacattgtgtttctgcgtattttattctcgtttcatttactttttatacccccttttgacgtgcttaagccatcttatttaagtcatttctcgcttaaactaaaaataaaataaatttccaccgatcgtttgaattgtattatccgttaacttcggttaaaatgaattccgaccgttcggttgtgccgtaaccacgttggaaattaaaaaaaaaaaagaggtgaaaaataatataataataaaaaaacatctttttagtaaaataaagcggaaaatcaatcggacgttttctctatgggatttctcattcttaaccgaattgactaataactaaagtgaaactaaggctaaaatcaactctcctagtcaagctcgtccataaaaatagggttttgaagtttgtcattttcaattcttactaagtaaaatggatcatt

SEQ ID NO: 115720 - DNA, 422 bp, Glycine max
  unsure (1)..(422): unsure at all n locations
agctagatcacttgataatgtaaggtaagagatttgtcctggattcagctaaggactactttccttagcacccttatgttcaatatgctggatttgccctgaattttctcctatgaaaactatnttatctggaaatccttcccaagacaccattgaaccactgatggaggctctggacgaagattataacaatggaaataagataaatgaatcatggttgtttattgaaggagtattggatcttgaaaagagaatcaatagactagatacatcgacttagaaattaaatataacaaatcttgtcattgttgaacatattattagcttataaaccacatctttaccatctgttaatatggtntccttatttctgatacgagcataataaaatgacatgattgtccaaaaataaactacacatg

SEQ ID NO: 115721 - DNA, 432 bp, Glycine max
  unsure (1)..(432): unsure at all n locations
tcattattgtctaactcttatttgtgaaangctgtcaaaagggtaaacaactaagaagcagattaaagttagactcagacctcaaagttgcaaaagaaagattcgaaagaattgaaagttttgaagaggcaatatgcggcactaccagaacaagaaaaatgtagcatttaccagcagtaattgttattagctgttgtttatttgatgtgggtaatatagatagctaccaggataagcaggatnttattacaaaagatctatctattgaaggtgtatctatgtttcattaaataattgaatttatataaaataattacgcatgatctttcttgttttcgtactttagaattcataccgtatagcagtattgttatgagaaaacatattaacatctgaattgtaaacattaaaaacatgtacacatgtatgaac

SEQ ID NO: 115722 - DNA, 352 bp, Glycine max
  unsure (1)..(352): unsure at all n locations
actgggctggaccttttatgtattagcanaatctcagaaatgatgcatataagttagaagagttntctggcaagatgatacaatgcatctagaactctacctaccttaagttttattatagctaatgtattcttggacatacttcttttccttactcgacttctttctctataagaatgtgaaagggtttatgcaaagaagggtttagcatggcccctttatcctatacatgaatacaaaatntctagtcatatcttgctttattattcagccctaaagaatattactttaaacaaacctactccaacatcaaactcgctcataagggtccccccccttctagtacacccac

SEQ ID NO: 115723 - DNA, 134 bp, Glycine max
  unsure (1)..(134): unsure at all n locations
tgaaggtgtgtaacccaccattntccatagtagaataccgattatgtgtctaccatcacgattatcgtctccctttttgcacatgttctgtagttgcatcctatccggaaccatatcagaatagtactgatact

SEQ ID NO: 115724 - DNA, 143 bp, Glycine max
tatagtggccccgctaatatggatagatattcccaataactatgatattatattatattattagctatatgatattattatattgtattatatcatatgatgacactattattatgatattattagtatattatatcattgtt

SEQ ID NO: 115725 - DNA, 489 bp, Glycine max
  unsure (1)..(489): unsure at all n locations
ctgcagctatatttttatatttgtctcatttattataatgaatgtagcgaattttattatacaaatgtgtcaaaaggacatattaggatatattttctattatcattataagtttcaactttatgttataattattatatattttaatgctaatttaataatttgtaccaataaaattaaaaaacaattctatctaactttttttagaataacttaaattgaattaaatgcttanatttatttaaacttataatgtaatctaaatttaagactttataaaaaaatactcatactattcaacactaattgtgtttggataacaattcaacactcaaatctaatgtgtttagattatagccgagaaggtgaagtgtagttgaactcaactttgtaaatctcatttaaaagtatgtggtgaattcgagtataagatttgcttaatggtgaaggagaaagacagaaatgatatggaccaaattattcatgata

SEQ ID NO: 115726 - DNA, 507 bp, Glycine max
  unsure (1)..(507): unsure at all n locations
ctaagcttattaagtagctcaatacttgtcagcacccgattttatacatactgcaatatatatctaaatcctcgatgattggaaaaaagaataccccaacccttgaggttgaaattctccaataaagatgtagttagctacaagaaacactaaattgtcctttcatgagtaaattttgaattttgttgaagatgcaggataggcaaagcagatcatgctatgaatagaccttgatctataactgagtaatcagctgaatcatataagtgtgttggagcttctgaaataagtcctggatcataatattcagacattcctatattctgcagactgaagttcatattattatagcattcaccttgtagccaatagaaatgcaagttctcatccaatgatggtgcagaagctacctcacctcccanaagaaggttgctctggtaaatatccagatcagaaatgctactgagattattatatccctgtgntttcaatccagaatttgtggtg

SEQ ID NO: 115727 - DNA, 395 bp, Glycine max
  unsure (1)..(395): unsure at all n locations
gatatgttctatagttgattntgaatgaatttctaatgatcataacatatgattcatggatatgatttaggcattctttctttcttgcatttaaaccaccgaccaaaaagctatcttattgggatattatttatcnattgcaagccctttgagccaaacacttcatantttgttggaacactaacctangataaaagtttcctaccttacctttggttaggagagcaaagggtatttgttggaaatttctattcattggtggctaatgtgatgtaaatactttgtttttaaatgagggtattgatgcaatcctacccccaagggtattggatagaagactccaagaagaatgggtcanagatgcaagagaagatcctgngattctcatgagtctt

SEQ ID NO: 115728 - DNA, 465 bp, Glycine max
  unsure (1)..(465): unsure at all n locations
cgacagaagcaatgaacacataaaacacacttaattagatatgaaaaaggttntacatcaactgttcaatagaaatccccaactgagggttttagccttccatggcaaggaagcgccttttacaataaagaaagggaatcaagagaanatgcttgcttacacaggaggtgggatgtctcctccacctcttggcacctcacaatcactcaaaagctccctaatctctataaaagttgagaacttggctccttgctctgcttctttgttctctgcagtccacccttcaggctctctgtgtctctccgaaaagctcttcccaattctgtgcaaatcanggttaaaaaagactcanaaacctagacgtcgcgctcagtgcgagtaagtgaaatttagcttagcgccaatctcgcgctgagcctggaaagcgacagacgactcacttagcgagctgatatcgcactaagt

SEQ ID NO: 115729 - DNA, 496 bp, Glycine max
  unsure (1)..(496): unsure at all n locations
gtctcacgaattgtcactgtgtctcatgcaacatatttgttagtcgtgtgcttatacgagaacatcttcgccacaacaatagtcagtgttagacgataactttcgccgtgtgctttntctttccatgnctatatgtagcataagttcattgatnccagtaattgtttgatgaagttggaaatatgagggccgcatattatacttggtgccaattggagattgtatatttccccctgctttctttgacatcatgattcacttgattgtgcatctggtcagagaaatcaaatgttgtggtcctgtttatctacggtggatgtacccggttgagcgatacatgaagatcttanaagggtatacaaagaatctatatcatccagaagcatctatttgtgagaggtacattgcagaagaagccattgattttttgttcagaatacttagagaaggctaaacctgtcgggcttcctgagtctcggcatgatgacagtgtggg

SEQ ID NO: 115730 - DNA, 484 bp, Glycine max
  unsure (1)..(484): unsure at all n locations
gctctaacgccggtataaggacttctacatagttataatctaagttaaactttgtacgttaaagacatcggttccataaaacaacatcgaattttataacaatcgatgtttttttctcgcgagcatcggttnttagaaaagtcaatgttatttttgcacaacaatgttttttggatttttttttagtatcctatctctttttttaattacctactgtaattatacataacacaacttatcattcaaagttgtaaaaactctaaaaataaacaaaatttataaacaatatatatcacaaagtcgtaaacaagaatttacacaaaatatattaccaatatacaagagtgataaataaaaatttcccacaaatgttttcaggatgttntaagcatcatttcccacaaaatataccaccaagagttataaacaaaaatttacagatattagtataatataatgtacttaaattacaaacaaatctaat

SEQ ID NO: 115731 - DNA, 346 bp, Glycine max
  unsure (1)..(346): unsure at all n locations
tgcaatttattttcatcttcctttctgctgtcaccatttaacttcatattgcattngcagaaaatgcataagtagatattaaaaatacttggatcaattctttacataacctaatgaactggaataagggtgattaatgttctcgaaattggactgtgaactactgaagattggtgtttatccctcttttccttctaatattaagccacatcttcatcttcactgcatcctgtgatggttctccaaattgaaactcgtttactaatctcacggttgttgaaatgaccatacatgcttgtggacatgttgcttggagtgcacgcactgaatgcttacgctgcattgt

SEQ ID NO: 115732 - DNA, 465 bp, Glycine max
gcttaacaaaaagggaggattatgtgaactcactgtgaatggatcactgtcaccattatgatttcttgctttaactgatacatttgactccccagcaatacttagaccccttcttgcactttgtattggaccatgattcggagttgaccagtccaatcccatttgatgaagtttgagagtagcatcaaagaggtaatggtaacacttagaccggaaggaaaaaacataaatttaccaaaggagtgttatactttatggaaactccaagtatgagcatgacaactgtaaataacaccctccccagtgtccccacccaataaaaactggttattagaggagtattgtatcttttggaaactccaagcagaattctaatgaataaacatatatgatattgatggcaggtttcctgggaaatgtagataataacctgagttttaagactaatccatgagtatcaccaga

SEQ ID NO: 115733 - DNA, 413 bp, Glycine max
  unsure (1)..(413): unsure at all n locations
ctctgagtcacctgcggcatgcaagcttgtatngannttaaacatgaatgtaaatcttgtattcaagcaaagcaacctattaagggttttactacatgtattgaaagagaaactaacttacttgaattagttcatagtgatgtatgtgataataatgatgtgttaacacgtggtagtaagagatactttattactttcattgatgatttctccaaatattgctatgtgtatatagttaatcacaaaagtgagttgtttaataagttcaaagtatataaaatagaagttgacaattaattagaaagaacaattaaattctctgtttggtgagggggaaatacatatttttaatatgaataattttttgaaatgcattgatattatgaagtgcatcttcgatgctcttatctaat

SEQ ID NO: 115734 - DNA, 481 bp, Glycine max
  unsure (1)..(481): unsure at all n locations
tgcaaagctgttattgatgatgtgaggaatgaagtgtgggacattgtctaaggtgtgaaagcaaaactgaacaaaagatcaacttcaatataacaggaatcttgaaattagtgaaaaaagaaaaaagagccataaagtggttgatgttgagaagtctggaaatatttttagaaaaaagggtatgagcacccaagccacaatcaatttcttgtataagaggaatgaaagagaggaaacttgtttagcaattgtgagatttttctacaatgatgccataccattcaatgtgtggcaagaggtgaagaattccatattatgtgtgaattaattcctaaacatggccaaggatttattccagcatcctatcacaagattagagtgaagtatttgaagatagaattaaggttgactatgatagatnagtgggtgcaccataatgactaatgagtgcattgacaggaagactatattgaacctcttg

SEQ ID NO: 115735 - DNA, 410 bp, Glycine max
  unsure (1)..(410): unsure at all n locations
agggatttggaagtttatcatttcagtatcttaccaaggaaaaaggatcatatttacagtccaacgccttaaaatgatcacctctcaagtacaacgaatcacttgattcacgcatagaaagaactacgtacgtctgatttcctctttgatagagggtacgtaggagcaagagcccctcttttgtcgacctcactaaataaaaagagataaaagttaagataatcacacatttccacaagttctaacaaaatagtgtggttgtcctttaagacaaacgtgagaggtgttaataccttcctcaagcgtaaatacaactcccgaacttagaactttcatgttgaccggtntccttcggttgtccgacgttaccacaaataacgttggttgtactccgcgcatctttcctcttt

SEQ ID NO: 115736 - DNA, 445 bp, Glycine max
  unsure (1)..(445): unsure at all n locations
ggttcttganttttcctaagttctgtatcatgcttagaacatataaattggccttctcttaattgtctntgggcttggcgaccacgatcaacaaagtactttcggcacctactatatgttgacttcaccaacgctgttattggaatgctgcgacaatctttcaacaccttattcacacattctgataggttggttgtcatgtgaccatatcgtcgtccagatgtatcgtaagccatgctaccattttcctttgaaatgcgatcaatccatcttgctatggctggactcagttgacgaaattnttctaagttttgatcaaacacatgcttgcaaggagtgtacgctgcatcaaatttttatcatcaaaagttgtacgtagacatcanactcaaattaaattaatgtataaaataaaccttaccaaatctcttgaacatctcttttt

SEQ ID NO: 115737 - DNA, 456 bp, Glycine max
  unsure (1)..(456): unsure at all n locations
tagcaccactatcgcgcttagcgcgagtaaatggatntggacttggcgccaatgttgcactgagcctagcaagagatggacgactcgcttagcgagctgatctcgcgcttagggcgctgcttcgattcaagtgctcttccagattcctttttcacgctaagtgcactgaagccgtgcttagtgacggatacgcactaagcccactgagttcgcttagtgcgacaaccactntggcacttcaagaaattagnctccttttacctgaaattgtacagattttaacattaattccaataaaagagaccccaatgacagagatcaaaacacatcaaagtttatttacaattcctacaaaagaactataaatngnngaaaattatacatatttngcaaaagttttctatacaaaagttagtcgtataagacgactaanaactccnccaaatttacagtttt

SEQ ID NO: 115738 - DNA, 395 bp, Glycine max
  unsure (1)..(395): unsure at all n locations
cttacaagccagcttccatcatctaatattttaaagaaagttatntctaatgaatggatcttaaacaagttatctaaggagcttataaggggaaaaaaactgcanaggtagtgctcatgccttccttttggaatagtgtggtttacactcttaaagtcatggcttcacttgtcatagtgattcgtcttgtggatggtgaaaggaaaccagccatggggtatatttatgaagcaatggacaatgcaaaagaaacaattatcaagtctttcaacaacaatgaaagcaagtacaaagatgtgtntgcaatcattgataaaagatggaattgtcagcttcatatgccattgcatgcagcttcctacttcttaaatccagagttcttttatgacaacact

SEQ ID NO: 115739 - DNA, 451 bp, Glycine max
  unsure (1)..(451): unsure at all n locations
tgagttatacatacccattttgttttatggtttttgtgatgatgtctgtgatgtttatatgctgaaattgctaatggaaatctgttagagacgaacggtagaactaacccaaggttagaaagtgagaatgtgatgttatgagtggaaaaagagtgagactttgagagttggaaggctaagtcggaattctgtggtaaatggaggttagagtgagtcaatactagcttgaaatgtcatttagaacatgtgaganaggttaggctgagctagagagaaaaataaatgaccaaagtgaaccaagagccatttctagggcanaattgngtgttgaagagtcaaattttgatttggtggaatttaggtgtaatccagttgtgcaagttagattgcgttatnactgggtgatggagagtttgctcaattcacctattctaaatttaccttccaccta

SEQ ID NO: 115740 - DNA, 289 bp, Glycine max
  unsure (1)..(289): unsure at all n locations
gcatggatatgtgctatgactggtgttgcacgatttcaaattgacataacatatgattcatggaagcgatatgggtgttctttctttccaagccattggctcaacagccgtcccaatatatattatttattccattcgcgagccctttgagctagacacttagactgtngtatcataatcctaacctacgatgaacgtttcctaccttaccctaagataggagagtacaggtgctttcacgagagatatgtatcactatctcagctagtcgtggatatttgaaggaatg

SEQ ID NO: 115741 - DNA, 495 bp, Glycine max
  unsure (1)..(495): unsure at all n locations
actaagctaacttcaagcctcnacaatcaagttgagtacgaggcacttatagtatgcctaaagctagcaaaagaagttggagccaagaagctaagatgctacattgactcgcagcttatccaagggcaagttgccaacaaatatgaaactaaggagatagtactgctcaggtactaccatattgcaaaaacactcattgacgactntgattgctttgggatgtatcacattccaagagaaagaaacaccagagcagacttactttccaaactggccagctccaaaaagactgggcatatcaaaaccatcatccaggagacactccaggttctaaccatagaccccaaagaggtcatggcaggagagaaagaggaaccagactagatgatcctctacaagaatttcttaattcgggggtgttgccaccaaatgagaatgaagcccaacgctttgaaaggaaggtcaactactatgtcatccttgatgtcgatctat

SEQ ID NO: 115742 - DNA, 447 bp, Glycine max
  unsure (1)..(447): unsure at all n locations
agaagcttctatgaaggcnnggatcnttgagtnttattgagggccttcaatggtgattctcaatcatggagatgcagcggaagataaaggagaagatgtgagaggaggtgtgtcatccactatggaataagccatggaaagaggagcttcaccaccaagagtgccttggataagaagcttagagagggagcttcaatagaggaaaggaatgagagaaaaagatggagagaagttgaactttgaagtgtgtgactcacaagactctcattcatcaaagttatgacaagtgttacacatgtttctatttatagcctaagtcacaaactaaatgaaagcttccttgagaagcttccatgagatagtagagcttagctacacacaccctctctaatagctaaggctcacctcttgggaaagctccttgagaagctagagcttaactacaca

SEQ ID NO: 115743 - DNA, 476 bp, Glycine max
  unsure (1)..(476): unsure at all n locations
ntnggtcaaatggcttgtatatacaacaatggccttcatcatttccagttcatacatttcattctaaatttcaaagattgatgcaaaaattattactctatgctagtcgttctctcaacaattaagttcacactctcaccggtttatgatcaagcttttctttcacaatcaacctgtctactgacttacanttctaactatgagcctactttcttgttctttctcatctaacatacacacttgctcaactcatgataaaacacactcttcatttcaatcatgcatccattccataatcaattcacaacaccaattccacaaaaagatcaagtgtttgcactacattctcagagaatcaagttaagctgttcagtatgccttaaaacatgcatactatttatccatagaaagacaaatatataaatataaatataaaccaaaatctccanaacaatgtactaaaactataataatta

SEQ ID NO: 115744 - DNA, 256 bp, Glycine max
tggctcgtacctattggtgatcaatctgtcctacctgagagctaataacaaacaccaggaaaacttcatggttcaaacagatcacacatttatccatggtagcatacaagctctcacgcctaacggcctctataaatctcttccaatgcacaagacgttcatcatggcatttgctatagctcgcgatatcggatatacgccaacagatttcccttgactatcccttaacacatggtgcatcaatctgatggaagtg

SEQ ID NO: 115745 - DNA, 352 bp, Glycine max
  unsure (1)..(352): unsure at all n locations
gctacctagtctataaatagaagaatgtgtaagacttgtataactttgatgaatgagagtcttgtgagacacaactcatagttcaacttctctcccttttttcttccttcaatatcgtgctcccccctctctctttctcttcctctatcttttcctccatagaagcatcctttcaagcttcttatccaaggctcttcttggtggtgaagctccttcttccatggcttattccctagtggaaggcacctctctcacctcttctcctttgtcttccgctgcatctccatggtggaaaatcaccattaaagaacctcattgaagctcanagatccagccttcatagaagccctac

SEQ ID NO: 115746 - DNA, 362 bp, Glycine max
  unsure (1)..(362): unsure at all n locations
ngttgtgcaccatcgcccgaccgccacctagtaccacatgttatgggtaccccataatcctacaagcttgagatgaggaagtgttgaagggtgaaacttcctgcttttatntgtgaccacagagtggtacctggagatatgtcgcangggtcaggagaccttggggacgtcaggtggggtgctattgcccaaaaccaagcttgaccaatcccgacccaacccgggcatagtcggtcagtgagaacctgtgatgtacctaagcaggcgagctcctggcagtcaacagataaaaggaaaacaagaccacaaagcaaggaggcttgtggtggctggccagcttgtgaatttgtgtaatatgtgga

SEQ ID NO: 115747 - DNA, 336 bp, Glycine max
gattcaagactcttgattcatgagtgatgagaagttttgtatctgataagtctgataaatgtctgtcaacagatcgagtgcacatatatttctctgaaaacccttctaccaaagagtttttactctctggtaatcgaactccagattattgtcatcgattccaaattattgataaatataccatgagcgaaacggattgcaaaaagctttctactgaatttagcacgctctcattgatcttaaatgttgtaatctatacaatgttctggtatcgataccagtgcgcttgaacgtgaattcaattcatagtgaacagcccatctttccaaaaagctt

SEQ ID NO: 115748 - DNA, 446 bp, Glycine max
  unsure (1)..(446): unsure at all n locations
cgcnaaagaatcctcagtctcaatggtcaaggtgttcatcatgtatgctttgggttgagatgctcttatcagaataganaatagagttggatacagcactggctttaccttccaaagctttatttgcagtagttaactgaagaaaacaatacaattcttgaagctagctttaaagcaaataatagcccaaagagcataaccctataccgtgacagaattgaacattcaacacatgaagtttcatgaaatatgcacgaactatatataaatatacctctnactaggaaaaagaaaggttgtcaattctaaactctactcaaacaagagagcaagagatataaaggacatactttcaaacaagaaaacttattatcaccaaagggaaagaatcaacagtgatcacctagtgacttcatcacataacaacagaatgcttcaaagtcaga

SEQ ID NO: 115749 - DNA, 458 bp, Glycine max
  unsure (1)..(458): unsure at all n locations
agctncatcagagacaccaaagattgtcattaactataaattgcacaagcaagaacctcgtgtatgatctcttgataaacaatggtttgtcaacttgacctcttacaaaagactgtccaattaagaaaatgctttatctatcataccaaaatctaggtgcttcttttaaaccacacagtgtctntttcaacttgtaaacatgattaggatgttcaaagtctacaaaactnggaggctggtctatatatatctcttcttcaatgtatccattgagaaaagcacttttcacatccatttgatataacctgaaattcataatacaaccaatagcaagcaatagcctaatagcttccaaccttgcaccaaaggcataggtctcatcatagtcaatgccttcctcttggttgatcctttncaatcaatctagccttgttctaactacgatacatgattcatca

SEQ ID NO: 115750 - DNA, 501 bp, Glycine max
  unsure (1)..(501): unsure at all n locations
gctaatcattttgccttagaaaaaatgagttaaggtgaganaatgagggtcaaagagatgtcaattgagctaagaagaatagaanaatattaaactacatatgcttaatcgatgatttaacactttgaagaggaaaaaccattaaaagttccagaaaaagggtaccacaagtatcagaatcctccatggatgaataggaatatgtcgaanacccaatggagaagacatcaaagaatgaanaaagatgcaatattggagatgcaacanaagaatggtgtttgaccttcattntttaatcaaataaccgaaggtccacccctaggatttgaaaagaataaatcaagcaaggaggaagaagatcangagataatattgactgctntgagtgagggtttgaggttccttanaagccatnntgtggagtaatttgatattacccgtagtgtcacaccctgaaattttgctaactgtanatcaatggttagtggatttcctatgtta

SEQ ID NO: 115751 - DNA, 418 bp, Glycine max
  unsure (1)..(418): unsure at all n locations
tcaatccagaccatgaaatgcagatgttagtccattgtattaactacttaaacgagaccaaactaaaactaacactaaaacttatgatgtgaataagtgaccaatattccatttcagtcaagttgatgttggctcccaaagttttggttgaagctgcaccactacgaatcggattgtagacttacactaggcaaaattcaatccaatccaaactaaatagattaaaattgatcagatgggatcataaaatgccacagatccaatccaatccaatctgacatggggtcaccccctattctctacataaaacacggagaataagagattatataatagtagtagtactgaaagcaacctcacaattntaactcaacattacataaatgctatggtgccttgcatttgtcatacactcaaa

SEQ ID NO: 115752 - DNA, 463 bp, Glycine max
  unsure (1)..(463): unsure at all n locations
gcttaattgaatanatgtttgacttaatggtgaatccaattctttttctatcttagatcataaatctgattccctgtaaccaaccaattgagccttccattctattcaatctcgatgtttagtttttaattccgaaatcggacagtttaattatgttgatcgttaagtgttacattcttattgaacattgactattatgtgttgcactcttattggactataattgcatgtatctaattaacattcaatagaaaaatagaaaatgtgacacgtgacaattaacatatgttattaataatcaacaactcatttcaggataaatgatactataaggagactataattgttaaataagataaataataagactaaatttacaattaaaccaaaagatttatcgagtcaaactgaatcgacgggctcagtttacatcctctctatattcataatatataataagatg

SEQ ID NO: 115753 - DNA, 486 bp, Glycine max
  unsure (1)..(486): unsure at all n locations
agaagatgttgtacgaaggagtagttgtcaacatctntggtaaagcagacatatgttccatcaaagtgatacttcctaataggacgtaacaccttaataacgtcacagtgcacaacattgtcgcttccatcatagccagaagtggatgctttttgagagtccatccacatgatctggctctagaaggtcctagcgtcatgagtgtccaaaatgtgtattagatgcttttcattaaacaaagaactccagttgcaattgaagttcatgatctccaccttcattttccttttaggcatctcttttttgtaatataactaaaatcccatttttcttgatagaattccacacttgtagatgcagacaaaatctattaacaaccatcttaatatcagttgcctttgagatgtgtagaccaggagggtacattgtggcttgatcttgcaagtacattcgttcatgtaacttgcccaaggatgaatgatctta

SEQ ID NO: 115754 - DNA, 419 bp, Glycine max
  unsure (1)..(419): unsure at all n locations
gctcgacaactccaagaccctgttggacttctttgttccactgattgntatgcatgcgcgatccctacaaacaatagatgaaatcagaaatgatttgagcgaggcgcatacttacctatgatgatgtgatcttgccggggggaacgggcacctttgatgactacagaggcccgttaccagagctagaaactcctaggccctgttggactattcctggtccactgggtgtcttgtgggcgcgatccctgcataaaatatatgacgtcataaatcacttgaaccatgtgcatacttacctatgtcatgactgcacagaccaaccgatacatctgcanggggagattggcattgtggtcgctgggcagaatgttcttaatatctacgcatacatattatgtagagttgcatgttggtctcac

SEQ ID NO: 115755 - DNA, 492 bp, Glycine max
  unsure (1)..(492): unsure at all n locations
ctatcgagacaagacattgtagaatgtgtgtaacaacattgttaagttcaactaatactccttgtagagcattattcccaagtgctgtaagaccaactgtaaaagaaaaaaaattaaacacttgacaatggatgcatgcactactatcactataccagctagcttcattcgtctctttcaagcatctatagcaattctttgcaataaaatcttgaaactaacacttggacagctagatctaaccgttgttgtcggagtgtgaccacactaatggttatatgtattatgaataattgaatattaaaatactcttggcagngcatacctactaagctcacttgtggacataaacattacggttcttaatggaaagataagaattaaaatcaatcaaagttaagatcagggaggatcatcatcaatttcagcactctcggtgagggtatcnattactagaattaaatggtttgaagatatagtgcactatttatt

SEQ ID NO: 115756 - DNA, 473 bp, Glycine max
  unsure (1)..(473): unsure at all n locations
ctcgaccggatccttaagcacctgcngctgcagctagcacgctttcatttaanatcattcttcatttacgctagaaacatcatacattaagggactgcactatctaattcctatcagataaggatacatcaaatcactaaagatatcactgactagttcaaagcacaactcatgcaaatcatttacaagtctgtatctctgacaacttcgcagaacctaaaacaaccctactcaatagacatcacattctggttttgtgctacacacaacatattatctaatacaataaatatgatcaatggcacctctagtcactaataacacgtacgaaagaatgcctctaccagagtctaaaattgccaaataataggtcattatttcacgcactaacagaatcgtggttatttcttattanattacttacaagtcatgacgtatactatttagggaacgaccaatcaatataactacta

SEQ ID NO: 115757 - DNA, 432 bp, Glycine max
attaataataatctagatgcgaattgtcttacacgcgtattagtttatgtatcaaagataaaatatcactagattgataacattaattcaagaaaattaatagtgatgaacagaactcacaagagtcattaatatacaatagtaatggacagtaattgatgcctttgcaactttcagctgttgaataagagagtacatatataaccctttgtcctgagctggaaaattgtccagaagtatatgattctaacgataaaagatattggaaattgatttccagcagaacatatatatcctatattgattctgaattctctaatacgaatgccagttagtaaatttaaaatatcactagctcgatgacattaattaacaatgtaatagctatgggaaaacatcataagaattattatatatcatagtaatggacac

SEQ ID NO: 115758 - DNA, 427 bp, Glycine max
catgcacatgatgactgacgaacgctctgttgcacaagacattctgattactaatatggatgcacccagtatacaatcaaagcagctacggacctacattatatacatgtacttccaaggtgaatatgtaactgacatgacacacatgatcttggctagacatacgtacatgcatactctaagcatcttgctgtaccaataattgcacatgagcacatctcggtgtatctaacacctatacatacacaagctgcatgatgaatattgactatctacactatagagtgctacagtttaagctcttctcgagtaataggtacctatagccggatgcaaactcaagtgtagttccactatgctgacaaagattggatgacaaggagtatagtctatttgcaatgtatgttctttacataacatgcgacat

SEQ ID NO: 115759 - DNA, 427 bp, Glycine max
  unsure (1)..(427): unsure at all n locations
agcttccaatctacaccaccatcgcacgagtctttatctatagatgattctgaacgatgctcanaaaggcatgcagtccatggttcttccatccagagaaatttgatgtcatcttgtcgcaacctacccttcggcgggagggcaacgcgtgactcgcgggatgcgtgttccacgaaaggaatacgcgcggagtcggcaccaactgttatttgaggaaaacgtcggaaaaaccggaaaagacgcgatctacgaaccttttagtgaaaggttcgggagttgtatttacgcacggngaaggtattatcaccccacacgtccgtcccaagggacggcagcctttaatcgaatgtgcaaacatgactntgattnttatggtcccttttatgttcttatatcctttataccgcctttatatctttttcttttt

SEQ ID NO: 115760 - DNA, 482 bp, Glycine max
  unsure (1)..(482): unsure at all n locations
aactaagctgggttgggtactacccgttgaagaccgaananacaattactaacgatgaatcttgaagaacggtcgagaatcttcgcgtaattactcacggaaacgttacggaagtgcctcggcttggattttcttcacggaactaattttcctcagctatttcgagagagagagagaagtgtccttttcttcttcacttctcccnctacttatagcaaaataggggagaagcttgccgcccagctcgcccaggcgagcaaggttgcttcctccaganacaacagccttctggaggatcttctggagggcccaagtgggcctggttgctatttgcacccacatttttactaaatacacccctttctatttttttggtgattctctttccgtaatggtacgaaactttacgaatctcgtaatgatacttantttttcttccgcaaggttacgaaccctttacgaattatgtattacgtcttttt

SEQ ID NO: 115761 - DNA, 424 bp, Glycine max
  unsure (1)..(424): unsure at all n locations
agcttataagaacaaaatngcctcaatcatatctaaatatgcatttgaattangacgcatcaaaaagaatcaagccaatgctattgtgcatgcaatcaatggcgcaaaacacaccatattattatgatgatggatggctcaaattctcacaaagggtaactcatcactttcaaattgagctctcaaaactatcatgacatgtagagaagaatcaaggatttctactgcggcatttaattttggcgtctatggtggtgtagtgaagtgagtcataccatgatggttcaaatacattctttacttaatagattcaccttcattattagagtaaaatgagacaggtgaggtattgaaatatccttcatgcaagactttaaatgttggaaaaatagatgagacatctaatctatgctttaatggatac

SEQ ID NO: 115762 - DNA, 485 bp, Glycine max
  unsure (1)..(485): unsure at all n locations
tctggtattataggctntcatctccatgtgctcattgtctctcaacatatgaatttcttcactaaagcttgtgtctgatgcttatagttgttggagcacttattgcatgtcgttcttcatgcagcaaaaccactctgtttggcttttgtgtagaataatttagcaaaaagccacttcctttaagttagagcaagtttgtcactagtaatgtgtgtcttttgatggtgtttggaaacttctagaacttaggcttcatttattcttcataggattcgatagatcctaggagaatacctntgcaaaatgatctcagacacaaagaaataaatgaagtttcacatgccattctttaatgttgaattaggttatgacttngatccttttttgtctgaatatttagacgcaagatgtatgtagcacagtttagtattgcataagatgcanaatttaacttttgtatntatntgcatatgatcaanataagt

SEQ ID NO: 115763 - DNA, 460 bp, Glycine max
  unsure (1)..(460): unsure at all n locations
cgctngtccttgcatcactcttaataaccaatttatatatttattgtgtagcacaacacaagaatgctaaaatccatacccaaatcctaatggttttaacttcggtttgaaagtagataacgcggaaatatgcctataacatataggaaatgttagtaacaggtgatgaganaagggttgcgctcacatccttgttatagtgtgggcaagtgcatttgagaatataaatatagcaaagtggctaaagtgtgtatgttgagtcataagatgaatcaagaccctcaatactaagtttcagaagttgcatctaatatactaacaaatggaaatattgtatgtgtntgatggatcaaacgatagcagacatacactagttctatgaagcattaaagaattgagtaatgttataatntcttgatccttttgtgtagagaatgcttaaacatcatacctaagatct

SEQ ID NO: 115764 - DNA, 423 bp, Glycine max
  unsure (1)..(423): unsure at all n locations
aattctttgtcctcttagagatttgtaaagatgtctgctagttgatcattagaactaacgaattcagtaataacttccttagaaaggactntctctcggacaaaatgacaatcaatttcaatatgtttagttctctcatggaatattggattagaagctatatataggactgtctgattatcacaacatagtttcatttgttgagtatttccaaacttcaactcttgaagttgtttaatccaaatgagatcacatgtgactacaaccataactctatattcagcctctgcactagaccttgcaacaacattgtgcttcttactcttccatgagacaagatttcctccaatagacacacaatatcctgaagtggaacgcctatcaatgggtgatcctgcccaatctgcatcgcanaatccaact

SEQ ID NO: 115765 - DNA, 404 bp, Glycine max
  unsure (1)..(404): unsure at all n locations
agcttgattgttggtgctgggtcgattctgttctttggttgctagtgctgggtcgatttccggctttgaagatggaatggtgatgttagaccacttggccattgaaactaaaatgatcgtaagttgtgctatgcagtattgggcttcaagaaaaacactgtaacttgtgccaggtaagtactaggcttaaaaggtgctaagttagtattggcttgaagagaaaggggcaggggctaggtaactctataactaaaggaacctgtgctacacccttgaaggtctaagaaaatattanaggcttcacggactaagaagttcatattggaatgaagcacatgaaatgcaatgcaatgcaaatgagatatgatgcatagatatcatgagacaccaactattggattaca

SEQ ID NO: 115766 - DNA, 429 bp, Glycine max
  unsure (1)..(429): unsure at all n locations
nttacaacagaagttagtcatgacccactaacctataattaatataatttaaggccattaacctatggaattaaaataacttaatggctgagtgtaactgaaattgtggcaaccaaaagtcacccccaatagccatcaatcagccaccatttggtctcccaaaaggctgatgcctatgttgccaattgggcccttagtacaacttgaactaaacctaactaaagcccttntagttgattaacccataacatatttttggtcaaccaactttacaaggttgggccattatttagacaaactaaacactctataattgagacaaagtggtgtcatttagttctcctccatttgngccatgatacaactcacaaccttggactattctcttgaaacttgggcttgtattcaatagtatggacaacacttggt

SEQ ID NO: 115767 - DNA, 355 bp, Glycine max
  unsure (1)..(355): unsure at all n locations
catgcaagcttctacttatgtggcagggcgggcttccttcaccttcttgtctccaacagcgaacttgaccattgttcttccttcccgcgatgcttcttttcatgtccgcctgagtgggcttatagcctaaaccatacttcccacgatttccttgggtatttatcaagctagttatgccgccgttgttttttcctaaacccatcccgtgttcataaccgttccccaacantaactcggccatcattaccgctgcatcggacagacaaggctgcccaaagagggagtccacggaggaaatgctgaccacctcaaaagactggaaagcagttctaacgattcttctgcggcttccaca

SEQ ID NO: 115768 - DNA, 419 bp, Glycine max
ggctgcaccattggacagatttacttaaaaagaagcattcatgtggacaccagaggcagagacaacatttggttcaatgcagaaagtcatgacttcagctccagtgttagctcttcctaatttccagctgcccttcattctggaaactaatgcttccgacactggtattggagcagtattacatcagaatggccatccaatagcatttttttccaagaaacttgcacctagagtgcaaaagaaatctgactaatttagagagatgttagcaattgttgaagctatagctaagttcagacactacttgctgggacacaaatttattatcaaaactgatcaaaaaagcttgagatcattgatggaacaacccctacagacacctgaacaacagcagtggttacacaggtttttgggatatg

SEQ ID NO: 115769 - DNA, 465 bp, Glycine max
  unsure (1)..(465): unsure at all n locations
agtctcacgaatgtcacgtgttgatcaacaattgttagtcnggggcatacaagacattatgcctaacaaagtcagggtaaccataactcgcctgtgctnttttcttcaaagccatatgtagcaaagtccttgatcctgtcaagtttgatgaccttgaaaatgaggctgcaattatatcgtgctagttggagattgtcataccctaatttcatccggggaccatntgtttgtgggcatgcaaccttcgcttgaccgcttcaaggtacttaacacccatcgttagggcatccgtgaagtttcacgacatgtcggaagtcaaaaggaagcattgttaggcaatccgtgaagttccgcgacatgccggaagttgaaaggaagcatttgtgcataatctgtaaaagttcgcgacattaccgaaagataacaagtgtcgntacgtaatccgtacagntccgtaacattacg

SEQ ID NO: 115770 - DNA, 469 bp, Glycine max
  unsure (1)..(469): unsure at all n locations
tcagcttgatcgctaagcgatagcttatttgtggctaagcgtgacctattgtcaccaagcgcaattccttacggccataattgaggtccatgacgctaagcgccagtcatggcagctaagtgatattcattgcggcaatatgagcgctaagcgagtccctcttagcgctcataatagtccttttgctaagcgcatctctgttcatgcgctaagccgcgagtctctagcgcttagcacccaacccttgcatctgaggctgatttggtccgctaagctggccaaggttgagctaagctaacttcaattcgatttgaattcagctaagcttcagcttgatcgctaagcgatagcttaattgtggctaagcgtgacctattgtcaccaagcgcaattccttacggccataatngaggtccatgacgctaagcgccagtcatggcagctaagtgatattcattgcggcaatatg

SEQ ID NO: 115771 - DNA, 447 bp, Glycine max
  unsure (1)..(447): unsure at all n locations
agtttcaatttagagtctccattatgaggaattggtctttagttcttcttaagtacttaagtatggtcttaacaactgtccaatgnntcctcaccagggttgcttgatatcaactagttacacctagtggataagcgacatcaggacgtgtacaagtcatggtgtacaatgatagcactgcactagcatatggtactctactcatgagttctctttcttcaagaagttttggacaattcttcttactaagtgtaattccaacacctacaggcaaatagcctcgtttggaattatccatgttatatctctttaagatagtatcaatgtacacagattgggaaagttcaagcaaccttttagatctatctctatanaattttatacctagaatatagactgcttctcncaaatccttcatggagaaatgttctgatagccaaatctttg

SEQ ID NO: 115772 - DNA, 270 bp, Glycine max
  unsure (1)..(270): unsure at all n locations
taactganacagagaacaacacttttcttaaggcaatgcatgcaactattcatatttctaatgaacatatcaagtgatctcagcctcacaagtacaacccccatgctctntttccttgattntttgttacatgcccaatcctaacaatctcaaagttatctacaaatcccccaggtcatgattgttttgcaagaaatgaatctgctagattcttgaataatatttacaatggaccaatacatagaaaatttgcacaaaactacttagcag

SEQ ID NO: 115773 - DNA, 463 bp, Glycine max
  unsure (1)..(463): unsure at all n locations
tcaatggagtcatttgcttcttgaagaccatttgttcggaatagagaaggaagaaagatgattggagaccccacttcaaggagatgatgagtcaagaagaagctcaccaccacaggaagccatggataagagcttgaaagaaggcgaatatgagtggatggagagggagagacagggcactaaattttatgccccaaatgaggtctgaactttgaagtgtaattctcacatgatcanagttcaacaaatgcacacacatggcctctnattatagcctaagtgtcacacaaaattggagagaaatttgacattctattcaaatttcacttgaatttgatattgaattcgtggagccaaaatttcaataattatgattaatgaaatttagatatggttcagcccactaatccaagatcaagtccaagaatcttcactaagtgtgcttaggtgtcatgagacatgt

SEQ ID NO: 115774 - DNA, 443 bp, Glycine max
  unsure (1)..(443): unsure at all n locations
acaaggcagccgaaggaactagttccgctccatagtatgacagtcaccgctttaggagcgctgtacaccagcaacgcttcgaggccatcaagggatggtcgtttctccgggagtgacgcgtccagctcanggacgacgaatatactgatttccaggaggaaatagggcgccggcgatgggcatcactggttactcccatggccaagtttgatccagaaatagtccttgagttntatgccaatgcttggccaacagaggagggtgtgcgtgacatgagatcctgtgtaaggggtcagtggatcctggttgatgccgacgctatcggccaactcctangatatccgttggtgttggaagagggccaggaatgtgagtatggccagaggaggaaccggtctgatgggttcgatgaggaggccatcgcccagctgctatgtataccg

SEQ ID NO: 115775 - DNA, 469 bp, Glycine max
  unsure (1)..(469): unsure at all n locations
taaatttgaatataacgttcaacatctgctggtaatcgattaccatatatgtgtaatcgattacacagttgcaaatttgaattcaaattctaatagttgttgtaaatcatttctggccactggtaatcgattacatcctctggtaatcgattatcagagagtaaatctcttgaaaaagactttttaacttaaatntcttggccaaaccttttgctacttcaattaggaattcccttcctatttaatatacccttcctaagactctagagactgtcttgatcatccatcttgaatatctttaatttctctgtcttgaataaagctttgagaagtatgtgatcctttggatcatcaaaacattcagcttgatcctttgtctacagggtgagcctcacagcaacgacgacaacctaatggtggctatgcgagactcatcatcgagggtcaaggacaatgacagtgatgacta

SEQ ID NO: 115776 - DNA, 472 bp, Glycine max
  unsure (1)..(472): unsure at all n locations
gggaccaactcattgtatttcagatagtcgtatctagtcaagatctgagagaccatacaagtttcctagcggtttctaattatatgggccattaagtctatcatatgctgacaatagccgagaagcccatgaatttcttcgggggcggagtaggtgtccaccattgccttggccttggctaacaatcggggaagttcttgactcccgttcaaggtaagagcaaaccggtccatccacatggttgcctcttggtgtaaagagtcgatcacccttcctctagcctctntttccgcgtatacttgggcatactcgtccgcgaccctatgctcgtgggccgtggctagacttaactcttcttggtacttggcgatgatagctagcatgttggtctccgtctcgcataaacgctgagaacaagctcctttggacctcgaataggcaactaactcctctttcaagaccatgctatgtg

SEQ ID NO: 115777 - DNA, 487 bp, Glycine max
  unsure (1)..(487): unsure at all n locations
tctatataagctgaaccatgttatcaataaacacaagttgagttttattcagaaaattagagtttatctcttttatcttagtgagagtgattctcctaaattcttgagtgattcaagaacaccttggctgtatcaaaggactttcacaacctttgtgtgttgccctcgctggaaagagtgattctttccttcctttcatcatcacccttgttctttcaaaccacaattccagaanatccacctctgcccagaattatctcgtggccataactcccattntacgcactcaaattaagtgattcttgagcctaaattgaatttcaaaacgagacctttcacctcgttttggaatcacctcatttggagccctgtagcttcagttattgccatttctatatttctgtccagccaccacttaacactacgtttaccatcccattcatnncatttatgccaagaaccaccttattaagacccacgaaattac

SEQ ID NO: 115778 - DNA, 387 bp, Glycine max
aatagatgagagatttcacaaaacatacatatcacatactttgtatttcaaaggagcatttctcaaaagtgtctaagtcacctgagttcctactctgtggtaatccatcatcagatacctgtgctcgattaccacaagcaaacgtcgatgtcaagagcttctaactgaatctgcagcgggctaattgatcattaagaggggtcagcgaccacaagatattggctagcgatgaccactgtatctgaacatgtaaatgcagatacagttgtgaagagccacatcagattcataagatgctttgtgcaatcgagtacatgtgtttggccatcgatcaccatcgacaagttctgaatagagagacaagagatgtgactcttccaatggtct

SEQ ID NO: 115779 - DNA, 356 bp, Glycine max
aagcttacattgcatattataaccaccgtttaaccggcggtgtatggcttttgacgagctacagacaaaaatgcattcgtcattgattagcccggctagttgtcgcttttgccgtgactgctcttacacacctttttacctgcttcagatgcgcgctgcgggtcattcttgaaattacccccgctgtgcttgtccacctttttacctgcttctgatgctctttcgcgggcttctgcaaaattgccggaaccgcctcgatggtttgccattactgacctccgtctgggtatagacatcatattgcatagaattaacgcggcgtatggcgagctgccatatttcgctacgtgggacta

SEQ ID NO: 115780 - DNA, 359 bp, Glycine max
  unsure (1)..(359): unsure at all n locations
tagtcccacgtagcgaanatatggcagccgccatacgccgtgttaattctatgcaatatgatgtctatacccagacggaggtcagtaatggcaaaccatcgaggcggttccggcaattttgcagaagaccgcgaaagagcatcagaagcaggtaaaaaaggtggacagcacagcgggggtaatttcaagaatgacccgcagcgcgcatctgaagcaggtaaaaaaggtggtaagagcagtcacggcaaaagcgacaactagccgggctaatcaatgacgaatgcatttttgtctgtagctcgtcaaaaagccatcaccgccggttacccggtggttgatactgatgacaaatgtaagct

SEQ ID NO: 115781 - DNA, 297 bp, Glycine max
tatcgacacgctcgaaattgaatgttgaagctctaagcctattcaaacaacaataacgttttactcggatgtccgattcagtgacgtaatatatcgagacgctcgaaattgaatgttgaacctctgagccaactcaaacgacaataactccttactcggatgtctgatcgagtcccgtattatatcgagacggtcatagttgaatgtttatgctctaagccaattcatacgacaataactttttactcggatgtctgattgagtctcgtaatatatcgacacgctcgaaattgaatg

SEQ ID NO: 115782 - DNA, 439 bp, Glycine max
  unsure (1)..(439): unsure at all n locations
taaacattcaatntcgagcgtctcgttatattacgggactctatcagacatccgagtaaaaagttattgtcgtatgaattggcttatagcttaaacattcaactctgagcgtctcgatatattacgggactcaatcagacatccgagtcaaaagttattgccgtttgaattggctcagaggttcaaaatacattttcgagccgatttgattcgggactcactcacacatccgagcgaacagttattgtctgttgagttggctcagaggtacaacattcaatttcgagcgtgccgatatatcacttcatagactctgacatccgagtgaaaagttattgtcgaatgaatgcgctcagagcttcagcaatcaatatagagcgtctcgatatattacggcactgaatcagacatacctacaaaatagtattgtcgctcgatt

SEQ ID NO: 115783 - DNA, 261 bp, Glycine max
  unsure (1)..(261): unsure at all n locations
aagatatgcgaacacggaagcataaatatatcatcaggaaaatatcatattggaaggaanatgcagtgctgtgacccaaaagatccttccacctaagcataaaaccctgggagtgtaactattccttgttcaattagagatgtcaatgtgggaaaagctcttattgacttgngagccaatatcaatttgatgccactctccatgtgcagaagattgggagagttggaaatattgccacccgaatgacttacaattagttga

SEQ ID NO: 115784 - DNA, 476 bp, Glycine max
  unsure (1)..(476): unsure at all n locations
gtgattgttatctcaacaaatacaacgagttttatcacaacatgtgtgttttctctgtagctctttcaaagcttaatgtttttggttaattgtttgggtgttcatgatccttctcctactttgtttcgcatagaagcccgaacaacactaaagctntgattcttatctcaagaaaagcagcgagttttatcacaacatgtgtgttgtctttgtagttctttcaaagcttaattattttggctaattgcttgggtgttcctgatccttctcctactttgtttcacatacaagcccgaagaacactaaangctttgattttatctcaagaaacacaatgatntttatcacaacaggtgcgttttcttttgtagtctttcagagcttaattcttttggttaattgtttgggtgtccctgatccttctcctactttgtttcgaatagaagctcgaagaacactaaagctttgattttatc

SEQ ID NO: 115785 - DNA, 480 bp, Glycine max
  unsure (1)..(480): unsure at all n locations
ntgcataccccaaggatccattanganattacttgtgaaagatagccatgagggtgggctcatgggccactntgggatagacaagacccttgtcttactcaaagaatagttntattggccccatatgaagaaagatgtccataagcattacactaggtgtgtggcttgtttacaagccaagtctangatgatgcctcatggactatacacacccttacccatcccgtctgcaccttgngtagacattagtatggactntctccttgggcttcctagaacccaaagaggtgtagactctatctttgtggtggtggataggtttagcaagatggaacactttatanccatgccacaggtggatgatgcttcccacatctcanaactctttttcanggaagctgtgagactccatggtttgcctangaccatcgtgtcagatagagatgctaagttccttaaccacttctggaaaaccttatg

SEQ ID NO: 115786 - DNA, 471 bp, Glycine max
  unsure (1)..(471): unsure at all n locations
gcttagcatagaactccaggactatctctgggtcaaacttagccatgggagtcattctcgacgtccaatgtctgcgagctatctccttcttgaaagtcgtatactcatccctcctgagctggacgcgcctccctctgtggaacgaccatcctttgatggcctctaagcgctgctggtgctccgcgctccggaaactatgattatcaaactcaggggtggcactggacccttccactgcgacgtctcttctatacctcttcgaggaaagctcttntggagtcatntcctgcgaagacaaacgtttggaaagtctatttacaagaaagtgtcattataaggctgaccaattaaaatggtctcaactgcttcaacctaacataatttaattagggcaactccatgcatccttatgatcatacatgcccaagatgctcggcctaagacatccatgctattatacattgtactaac

SEQ ID NO: 115787 - DNA, 449 bp, Glycine max
  unsure (1)..(449): unsure at all n locations
tcagctacaggaagtgaacgaattagcatgggcagaaatgtctccgtattgattggtaaatctgttcctcanattcctgnaaaatgcaaagatccaggtacattcagcataccttgtattatagggaataataagtttgacaatgccatgctagatttaggagcttctgttagtgttatgcctctgtctanttttaattctttatctctaggtcccttgcagtcaactgatgtggtaattcatttagctaatagaagtgttgcctatcctgttggtttcatagaagatgtcttagttagagttggtgaactggatttccctggtgatttttatatttgaatatggaggatggattttctcaaggatcnagtcccatcattctacgcagaccctttatganaactgctagaactaagatagatgtttatgaggcacactatccatggagt

SEQ ID NO: 115788 - DNA, 485 bp, Glycine max
  unsure (1)..(485): unsure at all n locations
ctgtcctcagatccttcgtgacggactcgacttagaccaaacaacattatntgtacaacatatgtaaaactaaaacttaatccgcacatccctcatctaagactaagtgccaatcctgcttcattcaagtgctaaggcaacaatacatttcccaatgctaaattctcctaaccatgcacacaaatggtcgatcaaaccacgagcatacagaatttaagcactgatagaagcattgaacacaagaaacacaattaatcagatattaaagtaattacatcagttgttctttacaaatcctcaacaagggtgtttagccagccattacacataaaccctaacaataatgagactaagagtcgagaataatcgctccttacacaagaacgtggatccctactgctcttatcagcattgcacaatcactctacaactcactaatctttctctaatacaaaacttaagtctccctgcaaaagcttctactc

SEQ ID NO: 115789 - DNA, 441 bp, Glycine max
  unsure (1)..(441): unsure at all n locations
ttagaaatngaagctaattcaagtttctcaagaagtaatattccaagattacaaatatcattcacaacatactaagaattaacataatatagaaaanttcatgctctcaaacatggtccctcaagtagtaaaactgtaagtagaaaacatagactgggtgttgcagcaattatctgaaatagaatgcaaaaggaaaagtttgagatgagaaacaaataatggcatacaagacaattgaagggttggggggaactctatttctcatagtggaatttaaaataaaaggatcaatctttagccattaaaatggtagtgtgaaattaaaagaagcaattgcgtgccatgacaaccaataccccacttctccaaatgaagaacacggtgagatgacagannaagtagttccttaacatggtcttgggaaacaaacacccatcaacg

SEQ ID NO: 115790 - DNA, 497 bp, Glycine max
  unsure (1)..(497): unsure at all n locations
tacataggagctacatcatgtggtatcanaagcatcttcatctatggtgatgttctttgcttcctctatcttnnttgttggtcaattcactttaattccttattcttcatcttattctccatgtatatactccattgacttgtggtttggtgctgtttagagtagattcaaaaaaataaatcaattaaatcttagatctacacttgttcttgcatttctatggttcaaattttatagatctactcttgaatcatgtttttgtgttgaatttacgttctatcatttnttagtcattatcttcttgtgctgaacctttagatatataatttcttccaaaatattgattagaaaaaaaacaaaaatctaagtgtaaatcacttaatccatgtntagtcataataattgtcacattatgttctaagtttgtgttgaaattttaatttgttgattgaattctagatacatttgttcatgtattcttgtcattcttagcctat

SEQ ID NO: 115791 - DNA, 489 bp, Glycine max
  unsure (1)..(489): unsure at all n locations
gcaagctcgtaggattatggggtacccatcacatgttgtacntaggggtgtcgggcgatggtgcacaataatgtttccacatncacaatgcacgcataaacccaccatcctctgttgcccacctacaactgagctcacgtactcccacgtagctcatatcctcgtttctctcaacaccaggtgcacatcaatcctcgcaagcttcctcaacatctaagtaatacaacattcacacagcacaagctatcacagttaagcaaaacatggcaaaggcagataactctgctcaaaacaccaaccaaaatcacaggttttcacatacaaataccccagaaacatttccttcgttccaatctcgtaaaccgatggatcgactcgaatattttactggaagtctctagtactcaagcctaaattgtgaccagtgggatctactagcagacatccagaactcatctgcactacaatattcacagccaatcacacaca

SEQ ID NO: 115792 - DNA, 474 bp, Glycine max
  unsure (1)..(474): unsure at all n locations
tactcagcttctatataagctgaaccatttatcaataaacacaagttgagttttattcagantattagagtttatctcttttatcttagtgagagtgattctcctaaattcttgagtgattcaagaacaccctggctgtatcaaaggactttcacaacctttgtgtgttgccctcgctggaaagagtgattctttccttcctatcatctccacccttgttctttcaaaccacaattccagaanatccacctctgtccaaaattatctcgtgaccataactcccatttacacactcaaattaagtgattcttgagcctaaattgaatttcaaaacgagacctttcacctcgttttggaatcacctcatttggagccctgtagcttccgttattgccatttctatatttctgtccagccaccacttaacctacgttntaccatcccattcatccattttatgccagaaaccacctt

SEQ ID NO: 115793 - DNA, 52 bp, Glycine max
gggaaagtatcgtccattccacaatacaccggagctaaggttacctgggtgc

SEQ ID NO: 115794 - DNA, 348 bp, Glycine max
agcttgagagagaagctgtatatctgaagactctcgctcaacgtggcatactcgctcagcatggcacaaactctcagtgggcaacactcgcttctggtaaagaagacactgtggaagcttgatacgttaaagctcgtctagtgcgagtagggcgcttatcgcttgaccaccttctctctcgctttatggggtggtcacgcttagcgcgagtgtgcgtaaatagtacgcatactatgccttttacaatgaggaggaagggatggaataactcttacataatatgctcgaaattatagcttcctctatagagcacatgctatgattcatgctggaatacgggaaatcaac

SEQ ID NO: 115795 - DNA, 467 bp, Glycine max
tcatgatgatgatgatatcaagatgattctagttgctttgatgataacacagatgatgaccaacagcccaagaaaatgatttcaagattgagtcacgaacaattcacgaatcaagagagatttgacttcaagaatcaagaatcaagaattatcaagatcaagattcacgaatcaagagaagactcaatcaagatgagtactataaaggttttcacaacaatgagtagcacatgaagttttcacataatcttataccagagagtttgtactctctggtaacgattaccagtctcctgtgatcgataccatggtgcaagtggttttcaaagctatccactgatttacaacgttccatttatttcaaatggcgaatcgattcaagatttggaatcgataccggtgcgtctaacgttgaaattagttctgatgagagagcacatccctgcctcaatgcttgtgaatcgtta

SEQ ID NO: 115796 - DNA, 421 bp, Glycine max
gatccttaagcaccgcggctgcagctgttgactagagtacgctccatgttgacaaagtggtgcgtctgctactggacgcaacgaggtctctacatcctaaaagcgctccatgacagacacataccgagctgcccaccttcatcttagctcacgtactaccacggacccatatcctccgttttataaccacgtgtccccatgaatccttccgagctttcacagcatgctataataaccacatacaaacagcacatgctttcacacacaatctatagcgggcagaggctgaatgctctgaccaaaacaccaaccaaatcacagcttctttactctagaaccgctcaacaacttcttctatccaataggttgaccgttggatcgactctcaaaatctacgtggagtctatagtatcgaagccta

SEQ ID NO: 115797 - DNA, 321 bp, Glycine max
cttgtctgatatgtattatattcggacccttctattcatatgatccttcgctcattcagaggagacactattctgatcaattgcattgcaatacacctgattctatgtgttatggccatatagttcatacactctttagagacaatcaaacgactctgcatgcgatttacaaggttgtacaaatttattaagattgagtcacatttgctgacatattattgtatgtcggataacagttctacgtatctggtgatggcatatggtacgtaggcccatatcataaagatctgcatctgtggttgctcatatgaatgcacaata

SEQ ID NO: 115798 - DNA, 283 bp, Glycine max
aaattcgcagtattgtgagtagcattttgaaagacgcttctgtgcctgatgctgagaaagatgttccaacatctttcaccccagatgtttctgtgccgtgatgtcaataaagatgttccaacatcttccggcccaaatgctgaagtactctcttcccacagcaaggagagatcaacagaggaagatgatcaagccgaagagaagactcctacaccacgggcaccagaacctgctccaggtgacctcattgacctggaagaagtagaatctgatgaggaaccca

SEQ ID NO: 115799 - DNA, 474 bp, Glycine max
  unsure (1)..(474): unsure at all n locations
nggaaggtagtcatacctcacanaatatatgtatgtgtgtttatgtagtaaaaataccttggatatgcatgtatgtaatttaagtagcaaaaaaatacctcacaaaatatacatatgtatgtttaggtagcaagataccttggatatgcatgtatatagcaacaatatatatgtgtatgtttaggtagcaagataccttggatatgcatgtatatagcaaaaatagctcacaaaaatatacacatgtntaggtagcanaatacctcatgaaaaanaaaaacaaaaaacaacaaanaaattaaaataaaaataaatttggttagctaaaaagccaacatgcttttgaaaggaaatgaacttgccattcagaacacaaggtttttgaaataaatatgtatatacctgaagggtgaatgctatgaaaatnttcccaaacgcctagaatggacttggatggatgcatgagttgataaa

SEQ ID NO: 115800 - DNA, 342 bp, Glycine max
ctacgggctatcaggccttttgtcttacagacagcaaacaagaatgtttatacggataaccactcgggtatctccgtccgtcagcgtgtctcaaatgtcagcatgacagatcttgagagcgcgaaagatgacgtaaatctccgcgtgtcaacgggctttgcggccgcgattgacgaaaggcgcagaagacgatgtcagtcttcgcatgctatcatgcatttcgtcttacagacagcataaaagattgtttatacggataaccactcgggtatttccgcgcgtcagcgtgtctcatatggtagtatgacagatcttgtgagcgcggaagaagacagtaatctc

SEQ ID NO: 115801 - DNA, 453 bp, Glycine max
  unsure (1)..(453): unsure at all n locations
tagtctgccagacctaaggaaataaggctttcctaggataaatcctttcaattatccctatagctactatagggaagtacatcttgattaagaagtcgatgctctaagatgttatggggaaaatgaaccattntttcaagagctccccatcaaaaaatttgtgctaccaatttgaacgatcatatatttgagcataggccaatagcaggaaaggtatatcctcctagcgctactgtctacaaatgtaggaagcttaaccctttgagttgcccttctatacttccttggatcttcaagaattcatgggtcttatttgtgccctcaatgttgttcttccttgggatcacactacgtctgtagagaccttttagattgatgacattgattnggaggcacttgagtacaatctaaccttntaagaatgggagcaattagactagtcataagctcata

SEQ ID NO: 115802 - DNA, 412 bp, Glycine max
  unsure (1)..(412): unsure at all n locations
tatcaaatcaaagcaagttctatgtagaacaacttgaagatctgtaatacaagaaatttcaattgttgaaatgtatagtaagtgcggcatgtagtgacagcataacaaagtcacaaatactattactaagtgggagaacatccagccttccatatctagcctaatttggcagcgaggtgctccttagaaataggagtacctgtaaccactaagtagttacctctcaatagcagcttatgttcctaacattctgcattgctggcctccaccatatcagttaaagttcccacccaccaagcttagtgagattgaagtcagctgatgacataatatatagganacattagttcaacctcatagctgttgatgtgcagcactccacataatctagcagctataatgtcactataca

SEQ ID NO: 115803 - DNA, 451 bp, Glycine max
  unsure (1)..(451): unsure at all n locations
ctcattgactctatattgctacaaagaaggacatagatctgtatggtgatctgcagaagaagaccacagactctngcaacaggtgtagatgcaaatttctaattcatgacangctgaattactaggttgaccaaggcatcaagttttccctcaagctttttatttttagcagatgaagatgaattcgtggccacctcatggactcctctaaggacaatagcatcatttcttgaactgaattgttgggagttggaagccatcttctcaatcaaattcctagcctcaacaagagtcatatcaccaagagctccaccactggcagcatcaatcatactcttctncatgttgctaagtccctcatagaaatattgcagaaggagttgctcagaaatctggtggtgaggacagctngcttgatgccacgaatgtctttnttgatggcagtggtcct

SEQ ID NO: 115804 - DNA, 307 bp, Glycine max
  unsure (1)..(307): unsure at all n locations
aaacccctcaatctaatggatcttccagggtngagaagtgaatatgagaatggggtaattctggagcaaactctcatctcanacaaaactatgacataatctaactcgctcaactggtttacgacgaaaactctaccgaatcaaaattngactcctcaacacccaatttaccctagagatggctcttgccttcactttggtcactcattttcctcctttgcacagcccaagctttcccacaatcctaaatgacatttcaaactaggattaactcactttaacctcctgtcgcaacgtgcccttcgcg

SEQ ID NO: 115805 - DNA, 414 bp, Glycine max
  unsure (1)..(414): unsure at all n locations
ctcagcttctccgcaatttctatatatatgggagaagtgaagtgaataatggttcagccccttatgcacttctctctctttcgaatntgcttggaaaaattgtttccgtgaagaanatccaagccgaggcgcttccgaaacgtttccgtaacgtttctgtgaggaatttcgcgaaggtttcgaccgttcttcgacgttcttcattcgttcttcatcgttcttcgatcttcaacgggtaagtacctcgaaccaagcttttcgattcattctatgtacccgtggtggtccacattgtgtttcgtgtatttttattctcgtttcatttactttntattacccccttggacgtgcttaagccattttatttaagtcatttctcgtttaacctataaataaaataaatttccaccgatc

SEQ ID NO: 115806 - DNA, 431 bp, Glycine max
  unsure (1)..(431): unsure at all n locations
agctngtntgcacatcgttcgcgtgtatgatatctcattccacaaggttngaagtagatgagaccttcaatcctattacgcaacgtggcagacaaaagtgggcagttaacttgaatggtcattattgtcaatgtggaaggtattccacgcttcactatccatgttcacacattattgcagcttgtggttacatgagcatgaactactaccaatatatagatgttgttacacaaatgaacacatcttaaaagcttactccgcacaatggtggcctcttgggaatgaagcggctattcctncttctaatgatgcatgaacacttatccctgacccaactacaattcatgcaaaaggtcggccaaaatcaacaaggataaggaatgagatggatngagtcgaaccatctgagcaccngacaaaatgtaatagat

SEQ ID NO: 115807 - DNA, 446 bp, Glycine max
  unsure (1)..(446): unsure at all n locations
agacttgtttattcgtttagtgttgatttatctatcttcacagtttagtcaatttaagatctcttactgcggtcagaaggataaatggtctcttaatgagctcatttcatactgtgtgcaagaagaggaaaggttgaagcaaaaaagggactgaaagtgctcatgttgtgagtacctctaaagacaagggcaaaaagtaaaaggactgacgagcccaagaatgaagctgctaagggtccaggacaaaagaaacaaaatcagggtgacaactatntcttttgcagtaagcctggacatgtaaagaggaaatgtaccanacatcatgcttggcgtgcanagaagggtatgtttcttactttggtatgntttgagggtcaattagcttcagtacctagaaacacttggtggttagattctggtgccactactaatatcagtgtttcaag

SEQ ID NO: 115808 - DNA, 264 bp, Glycine max
ctatctgctctcaggtgacatgcctccgtaaatgcaatcccacccaccacacagtactactagagaatagagaagagatacttattatattgtcgtattcttatacagacgaagccgctacatctgaatcacctctagattggttatgcttaaatcgccgggaatgtcactcgctcaagtttctactgcatattctttataccaagtgatctcgcttccttcttatataatatatattctcaactgctcattctcttcttgatc

SEQ ID NO: 115809 - DNA, 417 bp, Glycine max
ctcactgtcgcaagggcacgcgattctggatattgatattcatgagactgagctagagccaattgatctgaactatacacactgcattctcatggttgcgcattgctgaatgctacacgctatgcagaacttctttgctgctctagactattctgcagatactacttttgattctgtggtggagtcactactaaccatgtctaagccttctccacagtctgcaggcgttgctaaacaagctttgcattgcacatcacagtgtgttgctggtctatgccttgctcatggtgatcagaaatgctcatctactgtgataatgcttactgacattctcaaagatgacagcagttctaactcagaaggtctttttctgcacttcttctgccgagtagtgaatataatagacaatccatctgt

SEQ ID NO: 115810 - DNA, 397 bp, Glycine max
  unsure (1)..(397): unsure at all n locations
tcggatgtctgtgtgagtcccgtattatatcgagacgctcggaattgaatgttgaaactttgagcaaatttataccgacaataccttttactccgatggcttgatgagtccccgaatatatcgagacgctcgaaattgaatggtgaacctttgaaccaattcaaacgacaataactgtatactccgatgtctgattgagtctcggaatatatcgagacgctcgaaatggaatgttcaacctatgagccaattcaaacgacaataacgtgttactcagatgtctgattgagttccgtcatatatcgagacgctcgaacttgaatgttgaagctctgagccaattcatacgaccataactntntactcggatgtctgattgagtcctgtaatatatcga

SEQ ID NO: 115811 - DNA, 371 bp, Glycine max
  unsure (1)..(371): unsure at all n locations
cactctggctacttagataattctgagataaaactcttttgacaaacactattgagctatgttgtgttttgaacaatgttttctatacttgaccttgtgaagtcttatcgatttcttctcttgaatcttgaattcatcttctcttgaatcttgagatcaaactactcttgactcttgaatactcgcgatntcttctcatgagactcgaatttaaacttgatcttgaacttgtttactgaatcttgaaatcatgctttcagctttatgtcatcatctttgtcatcatcaacactacttgaatcaatcttgattcatcatcatgaagctcgcttctacacaaaatggctatggtgagcccagagaaggtctat

SEQ ID NO: 115812 - DNA, 184 bp, Glycine max
tgaatctgatgtcctggatcgtgattgtgagccgtttaccgtgatgatgagattccataccctcgtgagtctaaaactattaaatgggtatgatctcttcttctattattagtacgtatattgtctggggcaagcaggtgtcacacttatagctagttcccctatcatatattcggtctattct

SEQ ID NO: 115813 - DNA, 481 bp, Glycine max
  unsure (1)..(481): unsure at all n locations
tactcagcttgctgaattacattctcccctntctcaagcaaattcttaattcttcttgacatcatcaaaatcttcatgatttacattctccccctttttgatgatgacaaccacctgtaggttaggagcaacaacaaagaaaaaatatctatttgcatatagtttactcccccttggttttgcaatgattgcttatatgaaacagttgaagatttcatatttttcatatataaacctattgtctcataaaaaatagataatttntcttactattttatctnttatctntctctcccnctttgtcaacatcaaaaacaaatcatgaatagagaggagaaagatgttaccacttgttgcaatgtatgagaatcaagtgataccaaaaggcattaaaacaatcattcaatattaatcaagcaaaaacaagtacaataacacatcaatcaaacacaatctaacacaataaatcatcanatatttc

SEQ ID NO: 115814 - DNA, 485 bp, Glycine max
  unsure (1)..(485): unsure at all n locations
caagcttgaggattatggtgtacccatcacatgtggtactaggtggcggtcgggcgatggtgcacaacatgttttccacatccacaaatcacgcataaagccaccatcccctgttgcccacctncaactgagctcacgtactcccacgtagccaatatcctcgtttctctcaacaccgggtccccatcaatcctcccaagcttcctaacatcaaagtaattcaacattcaaacaacacatactatcacagcaaataaaacagggcaaaggcagaaaactctgcccaaaacaccaaccaaaatcacagcttttctcacttaaagaccccagtaacaattccttccttccaatttgtaaccgttggatcgactcgaaaatttactagaagtctctagtacttaagcctacattgtgaccgttgggatctactagcaaacgtncagaactcattctgtactactctttccacagcccatcacacacaa

SEQ ID NO: 115815 - DNA, 418 bp, Glycine max
  unsure (1)..(418): unsure at all n locations
ntaacctcatcgtctctcatagtctttatatttgagagccaatgatcccattactgcttcccctaagctctctgtcctttcttcatgccgcatcccatgccttgcgaactccttggagtaccctcgcgttgtggtcattgaaaccccgtgcggtgaaaggcgtgatgctttcgtctgatggcactcctctcatggngtagccaagctgtcttatggcgaggacgggattataattaatacaaccccttgttccatcaagggaacatttggacatccttcgcatgaagatagaatcctgattcttccttccttctagcgagggaaccaattaacagacgcccctccatgttagccaagagttggtcccaattcgcctttcctttttcgacgcacgagcggtgaccttgtagcggataga

SEQ ID NO: 115816 - DNA, 407 bp, Glycine max
  unsure (1)..(407): unsure at all n locations
acctgaggcatgcaagcttctnttggaccttgaacaagcaataaatttctctntcatttctctgctacgtgctcgcgactggtctctttcttccctccgcaacttgagttcactattgctaccccatagagctccgcgaaatttgttccggccatactcttccttgcgagccctcttggtctcttgttcaagggctcttgcggtaattgcattctcttcccgtaacccggcacactcctttcgaacgtgtgtagcggccaacttgatcttctacttggcaagtnttgcctttcctaactcgcttttgagagcttggacttcttcgtcctcttccggtgcttcaaaactctcttcgctgacgactnttaacttggcgagccaatctaaacctctgatatgaactttca

SEQ ID NO: 115817 - DNA, 465 bp, Glycine max
  unsure (1)..(465): unsure at all n locations
nganggaacataatcgagaatcaattgaagcaaacaataatgtcgtagaaaatagaagacaccatntgaaaagaatattgaattcaaacaaagccataccatttatcacaaggcttacaccagaaaggaacacacaaaactaataaacaaacaagaacgccataagcctcatataaccttcactntacaaatacatacaatgaatcaatcaatcatcaacatataaccacgaacaacaaaatcaaaccctcttttctaaatngcattggtgaaaatgaaacaaatcagtgagagtgagcgagagagaggcacctcgagtttagcagatttcataacgatggggatgtatatgagaacgatgcagaccgtggcaatggaggtgtngtgcttccagtgcttgngacgacaataanggccatcgctcatacgccagaaccttgtcctgaaaatgttggtccatgtcat

SEQ ID NO: 115818 - DNA, 426 bp, Glycine max
  unsure (1)..(426): unsure at all n locations
agcttttatgtgaaaggatgttactcttcatattttaatctgaatttcaacattcaaaggcactggtaatctattaccaaaacattgtaatcgattacagctntntgaaataaattggaacgttgtaaattcagtntgaaaactttttcaaatccatcttgctactggtaatcgattacaataatctggtaatcgattaccagagagtaaaaactctctggtaaacatgttttgagaaaaatccatgtgctacttagttattgaaaaacccttttcatacttatcttgattaagctntttcttgattcttgaatagcctnttcttgattcttgaatcttgagtctngaaccttgatctcttgaatcttgattcttgaattcaactntcctcttgaatcttgaagtgtctttattctatcttgaaca

SEQ ID NO: 115819 - DNA, 436 bp, Glycine max
  unsure (1)..(436): unsure at all n locations
taaggctaagtcttcatgttgttccccgtatctctaacatatattatgcacttattatatgattccttccttttcccatgttgttaattacttcctggtttcaaagatacacctcttggaacaataactatgtntaatactctatgcaggttgttcgccttcctacacagttcctttttcttaaatttacaaacacttatatcaaaggggaagtgatatactggcaagtgcaccgagtcgccaagtatttaaaattaaaacggaatgattcgagtatcgaacacaaggaacttgtttatttggcaaagctttgttcaataattaggcattttgttgacagaaaatcataattgtgaattgaagtaaagtatgatatatcctaattagaaaaacagtaaacacaagcaattaaaagtgacaacggtgggttaaaagc

SEQ ID NO: 115820 - DNA, 69 bp, Glycine max
cttatatggggtcctttgtatgcatggtggcaactcttcctgagcttcagctgagagtgaaaagtaact

SEQ ID NO: 115821 - DNA, 480 bp, Glycine max
  unsure (1)..(480): unsure at all n locations
ngtatgcatattntctttntggcatttttcttcccacagattntcagggattgatccttctgttntgtgccatttcctcttttaatacactnttcatttattgaaaatatattcaactggaaaaaataaataaaatctagaaacttgttgtgatgggaaatttcaacactttcgatttccttctttgatctcattcgggttggttttcttcttcatcctttntacatagtcaattaatattaagcgttgatgtttgtgtcttagtgagtttgttgaatgaatattttagttntatatgcacagttggtgtactgggtattgtgttggggcttgaaaaaagttctatggcattatcttgtgttaaanaagattcaagcaatntttggaggtcacatccaattttccattctccaattaataaactctatgtacgggattagtntagctntcatatatagtataaaagaaatttccattctg

SEQ ID NO: 115822 - DNA, 97 bp, Glycine max
tctcagctctatcaggctatttgtgggagctctttttatgctatacttaaggagacgcctcttatctatttcctgcattcgtgcaatcatcgtggaa

SEQ ID NO: 115823 - DNA, 433 bp, Glycine max
  unsure (1)..(433): unsure at all n locations
ncagctatccaaactggtgtgtggttgattgttataactgatactcgatacttganaatcagcttcataaaatttgctgtcagtttttgtgcacttctggacccaattctctacttgtaatatctatattatataagcatcataacttcttcttttaaggctcggatgaaggctgcttcgctgatatgtatcagcggaacatccaacaccatgagtactgggatctgatacatatcaactactgatccttgaagcaaactaaagcacatgtgctctatagagcaccaccgaacaagccactaaaatatgaagaatcactaagacaaagcactctcattaaagagggttgagacttgagggagagatgcatatgatcagtcacacgcacaagcactgaaacacagccgcgatctcaatttagaaatataaactg

SEQ ID NO: 115824 - DNA, 420 bp, Glycine max
  unsure (1)..(420): unsure at all n locations
gatccagctgtatgcagtgagtggtatttgctagtcacatgtatcttatntcttagccgggagggctgtcgacgagcatgcttgcggatggacctgaaatggtgatcccttatgcttttctaattctattatgtacattgaaaactgactgaataagaacagctgtttgtcttgtagtccattacactagcttattagttagaagagaatggttacataaataggcgaaataagattgtgtagagggcattcggtgtatttgacaaggttgtgagtgaatggagagatcctttgtgaaggggaaacctttggggagacttctactctccattatctgttctggtttgcaatgatacgggtttactcttttgattctttctatctaggttccatttttctgacttcctatgatcctatcat

SEQ ID NO: 115825 - DNA, 425 bp, Glycine max
agtcagaatctctagcccagacgataccccaaaggaccccgtgatgtacatgccacctgacccacaggcccgacagtggaccttgcatgaaaatggagataaccaactcgcggggatgtgcacccctgtcgggaggcatagccccttgctagaaagagggaagtgttgtgtgcatgagaccgttgtctcaaggggaaggagatccttattttaaatagcccacgtgaccagcaaaggagtgataaggttaggccattttttgctatttacacccccaccacactaccaacccaacattccgaaaccttaatgaagggaattactgacccaaatgtttccagcacgcatcgtacaccaaaatagtggtgcaataataaccaagcccaatcatgtgcagtcaaacctaatgccttgaccacaaaaac

SEQ ID NO: 115826 - DNA, 245 bp, Glycine max
  unsure (1)..(245): unsure at all n locations
tcaagcaagctttcatcaagtggtattagagcacaagagcttcaagtaggtgctccttaaacctncattaattgtcagctctaccttctcctccattattgtttcttcattattttctccatcgttaccctcgcattgctatgagtagcatgtaggctacatgacaccttacaatttccaccaattaaatttgctatagaatatagatttgagtctctatggatgaaatttcttgtattcggtct

SEQ ID NO: 115827 - DNA, 442 bp, Glycine max
  unsure (1)..(442): unsure at all n locations
tagtctataaatagaagcatgtgtacactcgttgaactttgatgaatgagagtcttgtgagacatacttcaaagttccacttctctccctcttttattccttcaatatcgtgctgccccctctctctttctctccctctttcttttcctccattgaagcatccttccaagcttcttatccaaggctcatcttggtggtgaagctctttttttcatggcttattccttaatggatggcgcctcctctcacctcttctcctttgtcttccgctgcatttccatggtggaaaatcaccattaaaggacctcattgaagctcaaagatccagcctccatagaagccccacaagcaagcttccatcaagtggtaatcagagcacaagagcttcangtaggtgctccttaaacctccattaattttttatctttaccttctcttccat

SEQ ID NO: 115828 - DNA, 486 bp, Glycine max
gaagtgccttatgaatcctcccgtgcttatgccaccagtacctggaaggcctctcatgttgtacatgacaatcttggacgagtcaatggggtgtatgctgggtcaacacgacgaatccggaaagaaagagcgcgctgtttactacctaagtaagaagttcacgacctgtgaaatgaactactccttgctcgaaagaacgtgttgtgctttagtatgggtacatgctgagccatactacctggttgatatccaagatggacccggttaagtacatctttgaaaagccagctctcacgggacgaatcacccggtggcaagtcctgctatccgagtttgatatagtctacgtcacccaaaaggcgataaaaggaagcgccttagcagattatttggctcaacagcctcttaacgactatcagcccatgcattcctgaattccggatgaggacatcatgcccttgttgaggaaaattggcgaagatcggg

SEQ ID NO: 115829 - DNA, 448 bp, Glycine max
  unsure (1)..(448): unsure at all n locations
agcttgctgncaaagagcttactanttgggtatgtttcgtttaactgacaaaagtcacatattctgtatacttgaagttntttttaataaaattgcatattcggaaaaaaattattcattctcattccttaaatttgatggtttaagtgtatcttctgtttacagataaataacaaaatatttcaagatgaagaaacagtaatgattggtactctttcctttggttttttatacaagaaacaaaaaactaattcatcaaaaccaatgaaagtagttaataaattttaattaataatgtcaattttaatctttattcacaatatagccatagaattaattgttttagtagtgattatggttaatgacactacacataatcaagagatatatttttctaccaatgaatggcttgtattgttaataggcctatgaatgcatccacttgtat

SEQ ID NO: 115830 - DNA, 433 bp, Glycine max
  unsure (1)..(433): unsure at all n locations
gcattcctcatcttgtatacatagtcatccaaagcattcattgtattagccttcttcatgaacttcctatcatcaactngataattctcagcttcatgaattattcttataatctcctcagctganagcttnttttggtcattggttatgggaatctcattcctataaccagtggttgtttctttcacagaaacagatagaaggccgtttacatctatagtaaagcatacgtcctagactgcagaaatactataaattccatgaggctggngcagggggcctagattaatgaatgaagtttatcaataaaaaacctgaagaaattgtcctaatatgcatgaacaaataggagaagttgagcaagctatgtaacatgcaaagtcaaaaataatgcttacaatctcctnctaaactgtaccacgagatatgtcac

SEQ ID NO: 115831 - DNA, 462 bp, Glycine max
  unsure (1)..(462): unsure at all n locations
agctngatcgaccacgactgattccaacatcattgattctatataacgtggcgaaccccagcttacattcgacgttctggagcattgcacaactacacgcttgacacagtgcttgtacagagctcatcttcacccgcagcacaaaagaaattatttggataaatgaagataagctgtgtttagctagacctgaaaacgcacaagaagatactgtcagtttgattcactaacttaatcatataacatgttgtttgagcttatatatatcattcagaaaccactacgacagtccctgaaggaagtgaattgtctcttaatcgagtcagagacgcgtatatatcatttaagagatgtaagtgagtgttgtcttttccgaccaatgaatcgttagcgaagcacagacacatcatcttgttgtgcatgtggaggtggcgggagctgaactgcgtattctattatatg

SEQ ID NO: 115832 - DNA, 501 bp, Glycine max
tgattcttgacatcaactatcctcttgaatcttgacgtgtggttctagagtctatcttgaacatcttgaactcattctttgagtgaccttagagctcatgtgagatcacctgatgtcatcatgagtgctatcatcaaaacatctttgaatcaatcttgatacatcatgaagctttgcgtctacagctggatcaacacaattctcatgctagaagttatagaatggccagtgatacattggcagatgatcaagccgataatatcaaattgcaactgatagctgctcggcgaagagatggccatgcatataatatgcctaatgtccccgatattgctgcactaattgttggcgatattcatccaggctcaaacagagatattattgctgaaactcagaatggagaagtacagagaatccatgaactgcaccataactatctaccactacagcaccttctactctaatcttatggagaagatggatatagagctgacatacttc

SEQ ID NO: 115833 - DNA, 454 bp, Glycine max
agcttgtagaatggctagacatgatacatgtcagggcttggtttggttcaaggataaaagggatgccccacattatttccatgacacaaatgcaaaaatgatgatttggaaattttatgcaaaactggtcatgcatgcgcctatgtggacgctcaagtgtcaaatttttatggtcatgtgatgctagggctcaggattcatttcctctattttaaatcaacccaatgtttccaaaatatgttcttttatcaatttgtgcattcatccgagtccattttgggcgtctgggaaaatcttcacagcattcacccttcaggtgtatacacatttttttcaaaaactagttatgatcagtgaatttttccaaagaaaagttggaagtcatctcttttcaaaagcatgttggtttttcagcttgacaacttaatttcttttttctactttttttttttca

SEQ ID NO: 115834 - DNA, 467 bp, Glycine max
  unsure (1)..(467): unsure at all n locations
atccgatcatggaaggactgggcaactgccttcattatgcagtaccagtataatacggacatggctcccgatcggaaccagcttcagggtatgactaaacgagagcatgagtccattaaagaatatgcccagagatggagagatctcgcagcccaagtcataccgcccatgacggagagggagatgatcacaattatggtagatacgttacccacgttctactatgaaaagctgataggctacatgccagctaactntgcggatctcgtcttcgccggagaaaggattgaatccgggctacgaanaggcaagttcgagtatgctgccaatatggcccccaagaacaacagaagagccccagtagtgggcgtgaggaanaaggaaggagacgcccacgcggtcaccaccgccccaacatggatganagcaccccanaatatccaaagctcataccagcccaatccccc

SEQ ID NO: 115835 - DNA, 469 bp, Glycine max
ggatccttaagtcacctgcggcatgcaagcttaagctccttcatctgcacaagactcttaatatttgaagagtatccttgtggaaccttcacccgacgaagacactgacaaaaacttatcttctccttcttggacaaagtatggcagcctgggggcaagtaaattttctttccatcagaccttggatgcaactgtgatcttatactcatatcagctagatcttgacgggtattcaagccatcctttgtcttgccttgaatgtcaaggagcgtcccaatcacactgtcacaaacatttttctccacatgcataacatcaatacaatgtctaacgtcaagatcacaccagtacggtcgatcaaagaaaatggacactctcttccttatgcaactctgactattatacttcttttgggtcttcccaaatacagtgttcaagtgttgaacccgctgatatacctactcactag

SEQ ID NO: 115836 - DNA, 448 bp, Glycine max
  unsure (1)..(448): unsure at all n locations
tctatgtacccgtagtggtccacattgtgtttcttgccattttattctcgtttagttcactttttataccccctcttgacgtgcttaagccattntacttaagtcattcctcgcttaacttaaaaataaaataaatttccaccgaaagtttgaattgtattatccgttaacttcggttaaaatgaattccgaccgttcgtcgtgccgtaaccacgttggaaatcaaaaaagaggtaaaaaataatataataatcaaaaaacatcttttagtaaaataaagcggagaatcaatcggacgttttctctttgggatttctcattcttaatcgaattgattaataactaaagtgaaactaaggctaaaatcaactcgcctagtcaagctcgttcataaaaataggcttttgaagtttgcatttcatttctactaataaaatggatcatttta

SEQ ID NO: 115837 - DNA, 463 bp, Glycine max
agcttgtttatattattaataatataatttctataaattgtcattatatatatatatatatatatatatatatatatatatatatatatattataattcacactttaaaaatcaaggtaattattagtaaaagcccaccattttactatatttggctctgatatctgatattaattgaaaaaaataggatatgcaccaagattttacactcttcacttatattactgtgaaaatgataaatctgttgataaatttctttaaagtcatatagaatattatttttaattggttttacactcacagtatgtactctctaatattattaaaatatgaataatctaattattattttttaatttaatcgaaatgaataatgtcgacatatataataaatttctcgattctctaataattatgttacaagtcactataattgaaaaaataagtgtaagattttctacac

SEQ ID NO: 115838 - DNA, 437 bp, Glycine max
  unsure (1)..(437): unsure at all n locations
tgaacctgtaatctataaccatatgtttgtaatcgattaccagcaacggaactcttgaaattcatattcaaaagtcatgacccttcaaaatataattgtgtaattgattaccagaaacttgtaatcgattaccagtgaaaaaattcagaagaagctgtttgaaaagacacatctcttcaaatcattttgaaatgtcacgaagggcctatatatgtgtgtgtctgatttcaaaaagaaagagagagatattccaatagaacttcattgtcaaatgctctctcaacaactcttgggcaaacacttgcaaatctattgagagttcatccagaaacttcaaattatattatccattctaaaggagagaaatctttntgttcttttcagacagtcaattgtaatcaagagattggttgctcttgaatgtgaatttctgacac

SEQ ID NO: 115839 - DNA, 345 bp, Glycine max
agcttgtaatgacgaatatgtcgaagtttatcctggccgcatgcaagcggtccactcatgcagctatttgaacatattgttccatgagtgagcgctagatttgcgacaaaggtatcagtgcgctgtaaataaaactcggcgtatctttatcatcactctatttgagcgtgcacgaactgatataacttgcgacgtgtgcttcaatgaccacaccagctggatattatttgatttcaaaatgctatccactctggaccggtgatgatcagtggtatcttataatatgacaatatcagctactggacaagacttgatatttatgggggacctaaatacttgggtaaa

SEQ ID NO: 115840 - DNA, 313 bp, Glycine max
cttgctcagttagctgatcatagctctatatattacatgagtattgatgaagcaccgggtgccgagtggagcgctgtctgcaacgacacttctatccatctggcgtggtaatgcaagctcacggcgactatattatctgtccctgcgccttgagatacaatgatgatcaagatgccgtatgtgaattatgccgactggcatcctttccatccaatccgaggcaccgaatggaacagtgcgatcaaatcgccgcgagactggaccgcttgtcctcggcacagcatcattatcgtatcttagcgtttataagctc

SEQ ID NO: 115841 - DNA, 385 bp, Glycine max
agcctgaggtgcgctaatgagttatctgtttctgattagtagggctgcggtcagtgtggcgtttacaaacggaacacacgtcgagccaactgctttaatgagatcagcaacgcgaacccggtgcggtgggttactacagttaccaatgcatacagtttgccttctagcatctaatttttacatgatacacattggctttgacttaccccaggctctcctctaatgactatgggatcatttttggcgcttaactggtgggagctggaagccatctcctcaactaaatatctgggtatcgcatgagctatgtgtccaaaggctccaccatctggcaacatctatcatacctttactcatatagttgagcccttcatagaaatattgg

SEQ ID NO: 115842 - DNA, 477 bp, Glycine max
  unsure (1)..(477): unsure at all n locations
tcgaacacaacagcgacaatgacggcgagattgtttttttgtgaaatgcacctcagctgaccacagagaccacgtactactagtcaaatgtacctcatgtgaccaccacttctccaatccttgcaccagaaaccaaaatatgtccttagcttaaccacgagtttcagaaacagacctatcacggatcacggtcttcactgtcattataacaacacacgttgacaaaacgtacctgtcacggccttcagtgcaatggagaacaacaaccttagatgttaacagtgcaatggataatagagcgcgatagggtacatagagaacacaatagcgcgagatggtcatctgataaaatggagcccgagctataangtatcgtcaaattaatcttaaatgtaagttaacatcatattcataaaacaccgatgttaacaatttatgtcacgttaacctcagttattccaaaccgatgttaaatac

SEQ ID NO: 115843 - DNA, 482 bp, Glycine max
  unsure (1)..(482): unsure at all n locations
ctcgacccggatccttaagtcacctgcggcatgcaagctnggaagattgcgctccgattgattggctcctcttagtgtggggtttcaacggagaacaatggcggtccgtggcggctactggtggttatgggtggtgaacaagaagcttgtgacattggggaagggttttggaagaaagaaggagaaagaaatggctgtttttcaaggctacaccataaaataaggcttgcaacactcaagtggttctgctctcgggaaaagaagcatttctcacacaccataagacatatcgcagatcgaacggtcagatcatggacatttgtcctatgaacgtccagatcaaatttcgagaatatccaatggttaatgaatgtatgagggcgcttttaccgagacagctcagacaacttccttgagaagctttctcgtgaggctttcttgagaagcttctttgagaggcttctttgagatgctagagtttt

SEQ ID NO: 115844 - DNA, 498 bp, Glycine max
  unsure (1)..(498): unsure at all n locations
cctataaatctcagcttcacatagacccttgcaggtgctggaacttcttacatggacttgatggggcctgtgcaagctgaaagccttggaggaaagaggtatgcctatgttgttgtggatgatttctccagatttacctgtgtcaactctatcagagagaaatcagacacctttgaagtattcaaagagttgagtctaagactgcaaagagaanaagactgtgtcatcaagagaattaggagtgaccatggcagagagtttgaaaacaacaagtttactgaattctgcacatctgaaggcatcactcatgagttctctgcagccatcacaccacaacacaatggcatagttgaaaggaaaaacacgactttgcaagaagctgctanggtcatgcttcattgccaagaactttccctatatctctgggctgaagccatgaacacagcatgctatatccacaacagagtcacactcagaagagggacttcaaccacactg

SEQ ID NO: 115845 - DNA, 372 bp, Glycine max
  unsure (1)..(372): unsure at all n locations
tctcatggtatcctaggatgccctccttatctctctcctttgctcctctgcatctcatggggaaaatcaccttaaagactctttgagctcaaagatcaaccctcataaaagccccacaagcaagcttccattatgcatgacaagcacacgtngtgttcgagttgtatcctcggaaaaatggaggttgaggaaccttggttggggttatggcaaccattgaattgtcgagtagatatgggagcaagttagcatacgagatcagaatttggggtgaatcctacaggctttttgctacaaaattccttttttggttggtgttttggtttgngctananggtggtgtcgtcattggaattgtggtagacaggcttt

SEQ ID NO: 115846 - DNA, 478 bp, Glycine max
  unsure (1)..(478): unsure at all n locations
gatggcctcagcaaattccttatttccagaaggtatttctatcaatagacctccaatctttaatggagagggttaccactactggaaaacccgaatgccaaattttatcgaggcaatagatctaaatatctgggaagccattgaaatagggccttatatacccaccacagtagaaagagtttcaatagatggtagttcatcaagtgaaagcataaccatagaanaacctanagatagatggtctgaagaggataganaacgagtacaatacaacctanaagccaaaaacataataacatctgccctaggaatggatgaatatttcagaatttcanattgcaagagtgctaaggaaatgtgggacactcttcgattaacacatgaaggaactacagatgttnaaagatctanggataatgcactaactcatgagtatgaattatttagaatgaatacaaatgaanatattcagagtatg

SEQ ID NO: 115847 - DNA, 392 bp, Glycine max
cgcaaattaactcccccacttacacaagtcaggtacaagcataccatccccagatgcccacctttaactcgagctcacgcactcctacgtagcccttatcctcgttcctctcagcaccggctccccatctacccctccaagctttcacaatttccaaacaattcagtctcattgatcatgaaactatcctaaaccaagaaaaaagagttgaggcagaaaactctatccaaaactcagttcaataccacaactgtgcttactcatataccccagtgacattctcttcgttccgattcgttaccattggatcgactatgaaatttactggagggtctatacataatctacattttgaccgtggatctgctaaaaaagctggaacccaatgtcta

SEQ ID NO: 115848 - DNA, 473 bp, Glycine max
  unsure (1)..(473): unsure at all n locations
agcttctccttcttgatgaatgagagataatatgcagagatgagattgctaatacgggtgaganaaataatatgcatgtttttctttattacatatgcatttgtttgtgccgtgttatattaagattgggccagacaattaccttggtggcatcaatgataaattgtacagttagttgggtagggtagaataattaaagagtggggatgggaaaccactttaccactcattgtacaatcttagattatagttgggagaacgtaaaatattattattttctttcttttattcataagttcaagaatctagttggtgatcattccgaccagttaaaatattgagttaccatacgttaatgatcaaactagtagggtattaatgaaccacatggtctgatctttcatttaaatctttntatacactatcttagnaaaatccaaanaatcagttaatatattcccacaagctcactc

SEQ ID NO: 115849 - DNA, 443 bp, Glycine max
gcttcctgaagagcgacggtgggtcttatcttttggcatggccatcttaagaagataatcagcactgatatcactacatcacagctgaagtccaagccaggctataggtttgaagtaaatcaaatgagactcatcaatgtgaaaaatctgaaagcccttatgctgatgctggtgatgactatccttatatttagaaagctcattggccatgtccagggaaagcacctcagaaggagacaactattcccttacctctatggtttcactatcaaccatggatagttccttatcaatagaagaatctgttcgtcattgggatcttacaaagaattcagcagcgattattggactgaaccattcctcacagaagatacgtttactaatgagatatgtagtggtgaaggcataacattactaattctcaattgtgatggtgcctatct

SEQ ID NO: 115850 - DNA, 380 bp, Glycine max
  unsure (1)..(380): unsure at all n locations
gaatctatctgcgacgggctttgntatgacgagtccgatgattacaacgaccatcctattntggtaaaacaaaattacagtaaaanttacatattaacgagccaagataaaaaaattgaacatcaaacctgcatattatntactaacaagataatacaaggagaagttgaaaagggacaattttaccctcaactagaaatctatatggctgtaatcacttctataaaataatttgttagttattacggaaaattacattttctttgaatttacgtcgaattgttctattcttctccttcttttatattctactggattcagctctattttcaaaaatttatataagaacgtaacattacgtattctattttgccacacag

SEQ ID NO: 115851 - DNA, 460 bp, Glycine max
  unsure (1)..(460): unsure at all n locations
agcttaaataccattttagccattccaatttagtgtttnttttttttcattttttcattttttttgtttttgtctttataaaaatatgttttttttttcatcaaaaatctatttttcactgttcaaattatttttttattgttcaaaatattatctaaaacactttaagaaaaaaaatacattttacaatgattaaaacaaaacaaaaaattacatagacaaaattaaaaaaattactaaattacacgaaaaaaaaaatatttaagtctattattgaagaggatttaatatattttaagttcttagattttatataatataaaaatgaatcttccatgcaactaattaaattcaaatgactaaataatataaaacataaaaattttatatcttatatttgaaaaaacttaaaccttaacataacaaaaaaaatgaagctagttatacaatcatgtcatta

SEQ ID NO: 115852 - DNA, 402 bp, Glycine max
  unsure (1)..(402): unsure at all n locations
tccttaccctcggaagcaaaaaagaatagaggggaaatttccaatcacagaacaagagaaggaaaatttccaatgaaagcaaaatagaaatgaaggaaaattccccaatcatagagtgggagaaagctaanagaaaagaaaggacaattcccaatcaaagaatgggagaaagtaaaaaaggaagaagaagaaggaaagaaagctcctgatcaaggatcgaaagaaaccagaagaaatgtgcagagaggtctttggaccagacaatatctgaacagtacagaattgtcaccaaatgaacaaaaaggaaggaaaggaaaccacgacctanaatggtcttctccctttaattaccaaccaaaatcccgtgcgcttagcgacctttttcctcgccccgcactatac

SEQ ID NO: 115853 - DNA, 460 bp, Glycine max
  unsure (1)..(460): unsure at all n locations
agctntaaccgatcgagtaagccgttatctcacctaataaatgataaaatgaatgtcaaccaatcattcgcattgtaatctcatttaatcactgttaaagcaaaatctaatcaattgttcacactacaaccacggttaaaccaaaaaaagtcaaaataataataaaataatcaaaatatctgtgaataaaataatcaaaaaaatcaatcggacgtttttctttggaagtttccttgaatgaattgactaataaccaatgtgaaactaaggctaaaatcaactcacaaatcaagctttgtccgcaaaaatcactaaagatcgttttaaggtccaacgccttaaacggtcctctttgctatatcggttaacatggaccgttcaaaagcataaaatcaacatgtaactttgccgcttttgcaagaactacgtatgtctgatttcctcatcgcaattgatgata

SEQ ID NO: 115854 - DNA, 457 bp, Glycine max
  unsure (1)..(457): unsure at all n locations
tccatcaactacaccgtagggtcttgtaattgaatgatcatttatctacaacatcattctagtcggtgcaatctccaagttccctatccttctgcacatagataagggcatcagattaatgctagcccctaaatcaataagtgtttttccaaccgacacaacacctattaagcatgggatagttacactccttggatctttgtattttggtggaaggatccttngaataactgcgctacaattgtcttccactataatgttttcattgtgtatgtattttttctctctcccatctgttctccctctttttctttntctgttntagctcctaattctccttcattgctcctactctcatgctccacagacactttccttttgcttctagtgacaacagctttgcactcttcttttggattcttttcagtatgtgctctgaaaccccctgaagaattct

SEQ ID NO: 115855 - DNA, 370 bp, Glycine max
  unsure (1)..(370): unsure at all n locations
ctgcagcttgccaacaactgatgcaatcctactctccaanggtattggatagaagactccaagaggcttgggctatagctactaaagaaggccctagggttctaatgaacttagggtagattttttagcccatgggtcaaggttggatccactcttctttgtaaatattagaatagttttttccttcttttgggccttgtattttggccattctagtagtatagggttttaagctttgtatttcagggcattttgagtagtctntgtagtaaggacttttctttgtattttcatgtattttgtcaatgaggtgagcttactttttagatgggtgtgtgtaactaagctctagcttctcaaggaagttttc

SEQ ID NO: 115856 - DNA, 477 bp, Glycine max
  unsure (1)..(477): unsure at all n locations
aagtntactgcataactgtcggaacaatgatgtcgtatggaaccaagtgttgggcagcaaaaatccaagaaaataaactatatgtagcaaagataagaatggtgtgtcggatgcgttaacataatagacaaaaatatagaattaggaataaatacattagatagaaagtcaagatagaacctatagtagaaaagaaggtagaatcttgccagtattatgaaaaggaagcttgatgcaataatggtagtagatttacttagaaatgtaaaataactgactgctaccttgaagcaatatcaagtaaacttctcatagttgatccagaatcagatccccatgcaagaatttcttgtcttcccccagatataaaagcagataaacattctgtagcattctgctcatgtcacatcaatgcatatatntaattctataatcagaaatagtttaaaatacaaataatgaaataggattgtgtta

SEQ ID NO: 115857 - DNA, 457 bp, Glycine max
  unsure (1)..(457): unsure at all n locations
agctttgatggtgtcgagaagaaatcacatgnttgtcatcatcaaaaagggggagaatgtgaatgtatgtatacatgattttgatgatgtcaaagaagaatcaaacaaggcagcttctaatgataagcatttgcttcaagaataattcaagattgcttcaacaagcaaagccttgtttcaagattcactaaagaccaagccttgccttaaaacaaagtgctttcaagacatgcaaggctctagtaatcgattaccaggaagtgtaatcgattaccgaaagacagggttgagaaatagctgttgaaaaatgttttgaatctgaattttcaacatgtaatcgattaccatatgtctataatcgattaccagcaacggaactttggaaattcaaattcaaaagtcataacccttcaaattataactgtgtaatctgatacacaaacattgtaatcgatta

SEQ ID NO: 115858 - DNA, 384 bp, Glycine max
  unsure (1)..(384): unsure at all n locations
agaggtatcttcaatggaggaaaagaatgagagagaggtggggcgcgggatcacncattgagcggcggaaaatagggagagaacttgaattctaaatcgtgtctcacaagactctcattcatcaaagttacaacaagtgttacacatgtttctatttatagcctaggtagcttccttgagaaacttccttgagaagcttctttgaacagctttcttgagaagctatagcttacctacacacacccctctaataactaagctcacctccttgagaagctcccttgagaagattttagagaagctagagcttagctacacacacgcctctaatagctaagctcacctcctggacatgagaagctaaagcttaactacacacacacc

SEQ ID NO: 115859 - DNA, 387 bp, Glycine max
agcttccaacttctggcgtatattgtcgtattgataagtgtggtctatattcggatcttaatgcttacttgacctatcttctagtgtaaggcctgtaggacactacgaaactccgcacggagcgcgtgaatattccctgtaacgataagaaaaagagcttcagttatgtaacaaataatcgttgtgccagattatatcatttcgacggtcatatggtgattgcaagttagaacctctgcacttgaatcattggactgcgaatatgggctttgcttcgtgtacttagtctaattaagtacattagatgagcctaatcgaggctcacacgttccttctaagtattaactgtgtttctattaatggtattgattgcgtgaggaacactat

SEQ ID NO: 115860 - DNA, 311 bp, Glycine max
ggcagcacgagcttgtatgcatggaagaatatttatctattttgatctctcaaaggatgagaatccgctatatgtactctggtcatgtactgtgaggacgatatatgtcaatggctttatattagggaagatcttatgatatatggatcgttaagttctagatgcacccagttaactatgacattctaatatgccaagtggtcagaattatatatgctagcaaagatacatgcctcacggtgttacaatgtgacaccggctttaaatagctatagaacagatgtgggaatctagtcagaaatatcgataag

SEQ ID NO: 115861 - DNA, 434 bp, Glycine max
  unsure (1)..(434): unsure at all n locations
ctctatctctnaatgatactcctntctctctccttttntttgcttaaaaaccttcttgagtttgaaatctcgcgactatgggctgagcgcgtaggcgcattgaacgcgagtaagtggttgggcgctaagcaaatcatgtgcgctaagcgccctttcgcccgattgcaggttctttaagttacttctttgcatgcggacattctcctgctaagcaacacagcttgctaagtgagctntgcgcgctaagcgtgaaccatctggcttcaacttctctctctatcccttgccagtatatatctgcaaaataaaaccatcaaaacagtatgaattagcagtttaaggcacctattgcatagaaactcagaggatgctaaaattctaatggttcacacaaaacgaagcantaaaaataggaagatattgcaattttacat

SEQ ID NO: 115862 - DNA, 401 bp, Glycine max
  unsure (1)..(401): unsure at all n locations
tgctatatcgacattattgctaacaaagatgtctnttagaaattgaggaaaaacccanaagtcaactatgatgggcaacaattatcttacaaggttactnnttattcatatgcatatatctgaacantttactcagatgttcccttacaaaataacttattcttattcnatttttgtttgcttttggtctatagtcaaagtatggtattgaggacaaaacagagcttcttcaactggtatgaaagtatcccgagggccttgttgttattgacctcaaggatgcttaccccactgtgatggaagattgcaggtagatgcctaatattctttgcacactntttttgntaaatgtngcatttgaatttatgacactgtgatgtncaattgggagttattaacct

SEQ ID NO: 115863 - DNA, 448 bp, Glycine max
  unsure (1)..(448): unsure at all n locations
agctngtcctgggtttagacatgattggtgcatgatttgngacttgtaggattcaatttgggcaaaattggatgagggaaagagtggttttcgaaatctgcactttatgcagaattttgttgttgaaatgtgcagcaaaattttgtataagtgcagaaaaatgcttatgtatggctggttgtgaaaagggtagtacatatggggttctggacattttctagcagatcccaacggtcaaaatgtatacttatgtactagagacttccagtaaaatatttgagtcgatccaacggttaacgaattggaacgaaggatatgttactggggtatttgtatgtgaaaagctatgattntgagttgtgttttgggcaaagttatctgcctttgccctgttttgcttggtttngttagtccatgatgattggatgtggaattacctgtatgttgt

SEQ ID NO: 115864 - DNA, 454 bp, Glycine max
  unsure (1)..(454): unsure at all n locations
tttcctgaanatatcttataatcttgctagatgatgatctttntgtagaagcaaagcttcatggtgaatcanaggtgattcaaaggtgttttgatgataacaatgatgataacaaaagatgatgacaaaggtgatgacaaaaggctcaaagatcaatcaaagaacaacttaagtgaatcaagaacaattcaagagttcaagataagaatcaagaagaattcaagactcaagaagaaagtttagagtcaagaatcaagattcaaggttcaagatctcaagaatcaagattcaaggttcaagatctcaagaatcaagatcaagattcaagactcaagattcaagaatcaagagaaggcttaatcaagataagtatgaaaagttnttctcanaaattgagtagcacatgattnttctcanaacatgtntaccaaagaagttttactctctggtaatc

SEQ ID NO: 115865 - DNA, 463 bp, Glycine max
  unsure (1)..(463): unsure at all n locations
agctngacaacatgtccggtaatattgttgcanactacacctttccattggcaacaatcacctccttcccaagaggaaagcctagatgatggatctttgaagcttcctttgatccttagaagagcttgcctctgttcttcattgcagccaagtgatgaatggccacatgaagataacactgaaaatgcagtcaaaaggaaataaacagcaaaagccaagctaagcatgtctgcagaactgtatcagaatataaagatgatagttgataaggggagcaatgaagtatgcatgcaatatataggctttactaggaagtgaccattaccacaggatatntattgaaagtagtagaggtctgatcaaatntgttnttatggtagtgaccattatcacaatacattatntctctttctcctacattcttaaataatttgaaagtaataaactattctctgatgattat

SEQ ID NO: 115866 - DNA, 424 bp, Glycine max
  unsure (1)..(424): unsure at all n locations
agcttgcatntggaattgcgaaagccccactctatcattaggattagtacctgacatctcagacaaacaaatcaaacgtaacaagacaattatagttgctgtttgaatacctcacccactcaagtgtatcacacaattatggcttttctctaatgaaacactcttgccttttaccactctaattccccttgagttcttaggccattcaagagattatggccacaacaaagaacaattcaccaatatgtgtaaggtaaggctagacaaggaaaaggttaaccaagataaaggctaacaatgtttttaggcacaaatgaaggaaacaaaattcataatttatgaattcaagtaacaatccttcatgcaaccaatatattaccttaaagagtnttttnttttaagttctttaagcatgaaccattca

SEQ ID NO: 115867 - DNA, 422 bp, Glycine max
  unsure (1)..(422): unsure at all n locations
gagaggatcaataacaatgcctataggttggacctcccggaagagtatggagtcaacaccacttttaacatttatgatttaattccttttacaggtggagttgatattgaggaggaggaactaacagatttgaggtcaaatccttttcaaggggaaggggatgatgcaatcctccctaggaagggaccagtcactagagccatgagcaagaggctccaagaggattgggctagagctactgaagaaggccctanggttctcatgaacctcanggtagatttttgagcccatgggcgaagtttgggtccaattctctttgtacatattagactaggatgtcattatatttgatccttgtatttanggctccatattgtangtangctaccctagaaatatnatgattttcagcccttgtattt

SEQ ID NO: 115868 - DNA, 461 bp, Glycine max
ctgcagctaccactagctaccaaagtgatatttatcataaacattcaacactaacaattaacagcttgtgagagttaaaatcacagtaaatacttcaaagatatcagtccaatgaaagaaaggtcatgtagagaggcatatcataagttacaaatataccagtaatgcatacaacaacaatgtgaaattagttttcgaatcaaagatataaatacctaagttcgaggcttcagcacaattgactttccaccaatgaccgcatgaccactttgaattttgaaacaacaatgaccacaggatcaacaatggctaaaatcgctcctaatgggatctgaaaatagtatggcagcatactttagtgtttagcaaaataaataaaagaaggcttaatgacattataaataatatatttgattccaccaacataactcttaatgcacttaatcttttgaatctgtttt

SEQ ID NO: 115869 - DNA, 364 bp, Glycine max
  unsure (1)..(364): unsure at all n locations
atctttagtagcatgaagtttctcagtttccattactgaattaataatctgcatcacttaacaagggtcatcaagatctggcatcctgcgagaggccactgctagtttgaccagctatatgagctctggtgctgatcttccactatcaatcccactgaataagtgcaaccatgggacagttttgcatgtaagtcatataactgacctcctatataacttgtgactgactggctttataaagtgagaagggattgctattttgctntcatagctggtcgtgtgacatcttggattacattcaaagatgatctttctcanatacatggaaaatatcgcactggatatatgatatatcctgctgact

SEQ ID NO: 115870 - DNA, 313 bp, Glycine max
  unsure (1)..(313): unsure at all n locations
ctctcattcacngaggggagagcggtaccaaaatatatttcgctgggagtattacacatcttagaattcacgaggagtagctagtgaaccatactgagcctaatcaatgaccttactaacaatgattgttttgtcattgctaacctgttatgtatcaagaaacgcgagctgccaactgccttctgataacggcacacgcaacaccatcctggtggctgtgtggtggctagctactataaacttaagtgttacatgggatatggcattggtataaataccaaggtgaaggacaatacaagcttaaagtgtacat

SEQ ID NO: 115871 - DNA, 371 bp, Glycine max
caatggtctggccggtgaataacctcataagcacttgaaagactccgtattgcccgactcaccatgactcgcacctgatgtccatgatgacatctgtcgttaagcgctgatgctcgttctctgcagggattgccgaaagatcgctagctcgatgttgattggagactgatgcgcgactggaatgtcccgcatatgggctgcatggagaaccgcatatgtggctctatgaccactaccagctgagatgacgtatagtgcatcacgccactacacgcacagacctcctctgactccagcgaaatatttaagaaattgagtgcacgctgtcctcaccaccagatctctgagcaactcttctgcatatttctatg

SEQ ID NO: 115872 - DNA, 450 bp, Glycine max
  unsure (1)..(450): unsure at all n locations
agctttcttaaattctgtgtaaagttcataagctctcaaaacatcttatacatcttgagagaaaagactaagtgcttagattgtatattcatctgttagacaattaagaactagtcagtgagccaaccaaacaacaaatcttcttatttgttttagagccaacagtggcgtgataggacaaagaatattgagttgtccaaacttgatgataagcttggtttgtaagagccaaanatgacggtgaaaaatacttgtaactttgaaaagttagtgaaacttggttgtttgtcgagaaccggacgcagtctcattgaaagagacaaactagtataaaacttcatgtatctaatatttatctttctttgtgtttaactaatcaagagtttgaatataattttattttgaagaacacattntataagaagtgttgatcatcatctgatcatattt

SEQ ID NO: 115873 - DNA, 466 bp, Glycine max
  unsure (1)..(466): unsure at all n locations
ctagaagatctatatatggactaaagagagcatcccaccaatggtatatacagtttcataatatggtctccaaatacgaatttgtggaaattgttgtagaccaatgcatataccttaaagtcagtgggagtaagttttttttccttagttctatatgtagatgacattttacttgcaagcagtgacttatgtcttttgcacgacactaaatttttcctctcacaaaactntgatatgcaggatatgagtgaagttcctatgtcattggcatagaaattcatagagatagatctctaaggacattaggattatctcaaaaggcctacatagaattttttttgaaaagatntaatatgcagaattgttcatcaattaccgcacctatagttaaagaggaaaaanttagtctcaatcaatgtcaccaaacaacattggaacaagaagagatgaaaataattccttatgc

SEQ ID NO: 115874 - DNA, 460 bp, Glycine max
  unsure (1)..(460): unsure at all n locations
agcttgcacattgctgcttcatagattatgagcaagatggtaaaccttggtacttcgatatcaagtgatacatcaaagacaaggaatacccatgggaggcctctgacaacaataagagaatgttgcggaggttggcagtccactttntcctaaatggaaatatcttgtacaagaggaaccatgatgttgttttgctactaatagtggatgccacggaggctgtctagatgctaatggaagtgcatgatggatcctttgggacacatgccaatggacatgccatggcccgaaagattctgagggcagggtattactagctcactatggaaaatgattgttgcatccatgttaggaattgccacaagtgctaagccttctccaattatgtcaatgctccacccgtacctttgaatgtgttggcagcaccttggccattctctacgtgggtatatacatgatt

SEQ ID NO: 115875 - DNA, 450 bp, Glycine max
  unsure (1)..(450): unsure at all n locations
gtggctccatctaaccctaanatagaaacacggggtgagtcttcttgcttcataagccaaaacatagaaaggcctaaacacaagtcaaaacacataagactaacaaccaccgtgttatggtcatctatcggatctcacacgcatcctaaggtgtcatttttcactatctcaacatacatattgtggtcaactaccactagaactctcaaaactcagtggtcttccaacattttagtctggatgaatgctaggagtacaccttcatgacaatataatggcagggtcttacctattggctatgcctcacacttgtcgagatctccaagttgacactatggaaactcgaccacaaacttggtgccatatccccatgaaacaagtcaatgagcataccctaggtaccaatctataaggtcatcccaaactctgaggattgactcctcaacacca

SEQ ID NO: 115876 - DNA, 393 bp, Glycine max
agcttctatctcagcaggaggcatattagtctcaaccatcctagcctataactctgcttgcctattagtcgcatataaaaacatatgtttagctccctgctctattgcagattgaaccccttcaaagtctacgaaagttagatcacttctactcatattcagactatgcctaggcagattctaaaatgatagcttcatgcactggctcaccatacatatccattatcgtagcttctttagcaacttttctcatcaccttcttagttcagaaagtattcaaagattccaaaacaacatcatttgtatgttctttagaatacttgctagcaaagccaaattgccttgcatcctcaacaaccttcttcctatgttctgcactagacagagcttcca

SEQ ID NO: 115877 - DNA, 460 bp, Glycine max
  unsure (1)..(460): unsure at all n locations
tagtntaagttagtctanacctagaagggctgtctaaatntatcctagtccaacaagagggatcagaggatgaagcttggattgattcaatctaactagggaccgagatttagtaatttatgtcacaacatagaacacaaaagcatgatcgattagagaaacgtccttatatgcatcaactggtctgttagaaagacccagcacttctacctactgttgtcaattttacttacttgcatttntactgtttttatcctaaacctagtntaattctattttaaaccatcaattatcaatgtttctttcaacaatgccttatttctgaatttaacccaatcttagactagtttccatgagttcgatactcagaatcatccgttttaattattaaatacttgacgttctggtgcgtttttcgagagaccggatttcccttgaatatatttgctcgaagaaaaag

SEQ ID NO: 115878 - DNA, 480 bp, Glycine max
atccttaagtcacctgcggcatgcaagcttgtagaatggctagacatgatatatgtctggtttggtttggctcaaggataaaagggatgccccacattatttccatgacacaaatgcaaaaatgatgatttgtgaaatttatgcaaaactggtcatgcatgcacctatgtggacactcaagtgtcaaatttttatggtcatgtgatgctagggctcaagattcatttcctctattttagtcaacccaacgtttccaaaatatgttctttaatcaatttgtgcattcatccgagtccatttcgggcgtccggggaaaacttcacagcattcacccttcaggtgtatacacatttttttcaaaaactagttatgatcaatgaatgtttttcaaagaaaagttggaaatcatcttctttcaaaagcatgtcggtttttagctagacaacttatttttcttttttctccttctttatttttatc

SEQ ID NO: 115879 - DNA, 495 bp, Glycine max
  unsure (1)..(495): unsure at all n locations
gggagaggatgcttaatggaggataagatagaggaatagatatagaaaggggggagcacganattgaaggaagaaaaagggagagaagttgaactttgagttgtgtctcacaagactctcattcatcaaagttacaacaagtgttacacatgcttctatttatagactaggtagctntcttaagaaaacttccttgagaagctcctttgaganaacttccttgagaagctagagcttagctacacacacccatctagaaactaagctcacctccttgagaagcttccttgggaagctacgcttagctacacacacccatctaaaaactaagctcacctccttgacaaaatacatganaatacaaaaaanaagtccctactacaaagactactcanaatgccctgaaatacaaggctaanaccctatactaattgaatggccaaaatacaaggcccanaagaanggaaaatctattctaatatntacaaagaagag

SEQ ID NO: 115880 - DNA, 457 bp, Glycine max
  unsure (1)..(457): unsure at all n locations
anngctttaaaatcaaaattcctattctactttttccccctttgtcattatcaaaagatgcgggtccaaaaagataaaggaaatgatttggccatcactgtcaaccttcagtggatggaggttgagtgataagaggtggtgactttggtggcgaaggcagaggcacaagcacatgatcaataggtatagcaacctctgatgcaggaatcatttgtgcaagaacctcaggatgaggttgcacaacagtggtcggtgttggtggaggtggttgaggtatgggtgtagactggtgttggacaaatggaggcaacctttgttgcattagcagattcatgttatagggaacaaaatcgttgaaggatttgagcgaagactccagagtgttctcgattagcatgttggtctcaatgcgttcaacaatgaatcttctttacatagtctctttcaagttggccta

SEQ ID NO: 115881 - DNA, 416 bp, Glycine max
  unsure (1)..(416): unsure at all n locations
tccttgaganactagagcttaactgcacacaccctctaatatctaagctcacctccttgagaagcttccttganaaacttccttgagaagattcctagagaagctagagcttagctacacacacctctctaatagctaagatcacctccttgagatgagaagctagagcttatctacacaccccctataatagccaagttcacccccatgccaaaatacatganaatataaaaaaagtctgtactacaaagactactaaatgccttgagatacaagactaaaatcctatactactagaattgccaaaatacaaatcccaaaagaaggaaaaacctattctaatatttacaaagaagagtggacccaaccttggcccatgggtttagaaatctaccctgaggttcatgagaatccca

SEQ ID NO: 115882 - DNA, 399 bp, Glycine max
agcttcctagcctgtcataggtgtattttgatctccttttggtgctctaaattgtgggaatgtgctcaaatatgtggggcaattttggtttgttctcttgcttgattgggatgaattgggggttcgtatgagatggccctatgcctatatatgcattttgaagcaatgggacatgcctcattgtccgcgttcttttgctattgatgctctaacacgcgccctccaagtgttcggtgaaatgcctcattggcattagctcgtgattttcgtagggaaacaacccatggggcaatttggtttgacatattctctatttatagggacatgcatttagtttcgaaagggctagagtaattgccccacatctatcttatgcctatgtaacaaaattcttatgct

SEQ ID NO: 115883 - DNA, 509 bp, Glycine max
  unsure (1)..(509): unsure at all n locations
tattagcgacctataaatctcagcttaaaattgaataaaacgttcaataactgctggtaatcgattaccatatatgtgtaatcgattacacagtgcaaattntgaattcaaattctagtagctgttgtaaatcagttttggccactggtaattgattaccagagagtaaatctcttgaaaaagactttctaacttaaatttcttggccaaaacttttgctacttcaataggaattcccttcctattttaatatactctttctaagactctagaaactgtcttgatcatccatcttgaatatctttgtcttgaataaagctttgagaaacatgtaaccctttggcaagctttccctttggcatcatcaaaacattcagcttgatcctttgtctacatgaagttgttcaacatcttntttagatggatacataaattgtgaccgttatatttcaatgatatcaatcttccaatgcagtgcatttaacgcattaaagacgactgatgacaac

SEQ ID NO: 115884 - DNA, 370 bp, Glycine max
agagtggtacctggagatatgtcgtgggggccaagagaccttggggatgccaagtggggtgctattgcccaaaaccaagcttgaccaatcccgacccaacctgggcatattcattcagtgagaacctatgacgtacctaaacaggagagctcctggcagcaaccgataaaagaacaaagaccacaaagcaaggaggcttgtgtggtggctggccagctatggatcttgagtgatatttggaatatggcctctggtaatcgattaccaagggtgtgtaatcgattacaaggcttaaaaatgaagacaggaagttaaggtggtctctggtaatccgataccaagggtgtgaattcattaccagcctaaaaat

SEQ ID NO: 115885 - DNA, 503 bp, Glycine max
  unsure (1)..(503): unsure at all n locations
taaaaattatacattctctcacatggtccaaacgttttgactcattagctaaaataagtcagtgctcaatttccttaagaaatgaacatgtgaatcatagcgattgttcctcttataatgagtaatatcatccatgtattacaacatgtatactcaatgtggtaataaaacttattgaataaactcaatgtttatttttggtccaaaacataaatnttctcanataaatcaatgtgcacctgaatatgagaaaatatcacaatataaaagtttcaactctaacctgtatgtatacaatcataaagtagtactaagtctcattctctctacatgatccttgaacttaaacagtggcatgcccttagtcaaaggattagcgatcatcaactcaatgcttataagctcaatgacgcactntcttgtcttttactctntctctaatggctaagtacttaatgtcgatgcgcttcaacttccactnttaagtcatacaccatgtgatg

SEQ ID NO: 115886 - DNA, 470 bp, Glycine max
  unsure (1)..(470): unsure at all n locations
ggcagcaagcttaaaccactcattcttcaccgatttcttgcaccaactaaggtatggaggagttaatccatactctagttattcttgtttggttatggggtaaccttcattagaagtgttgtaggagcataggaagttagctctccataaatcaacacttagggtccttttctcggtagatttcgtgtcaaggattntagaacttgtaaactgtagttgttttgggtatttcatgaaaatctctttatttgaagctttgtgaggtcatggcgcttaagcaaagagtttctcacacttaagcaagaggacttgcaagggaaaatgggctacttattttcaagcttaagcgtgtttggaaccaagattaagcgtgaccaagcttaattgtagcatgagctatgcttaagagtgactaagattaagcgtaggctggactatgcttaagcaagatgacctacaangggaaatga

SEQ ID NO: 115887 - DNA, 470 bp, Glycine max
  unsure (1)..(470): unsure at all n locations
tttgccagctgcatcaaaatgggaaacaacttgtatgttttgagtctntgcctctnggcattgattgcatcaactcatgctcaacttcagcttggttnttatgctaataattgcccaaaagcagagcanattgttntgaaatttgttcatgaccatatccataatgcttcatcactaccaactgcattaataagaatgcactttcatgactggtttgtaagggtacgtgcttcaatctttaagcttctgtcatttttacttaacaaatacaatgttattgttagattaaggttaaggagctaactaagatgaagcatttcanggatgagatgcatcagtccttctgaacttaacaaccaatcaggctgagaagaatgctcctccaaatctcatagtaagaggctttgacttcattgacagaataaagagcctagttgaagctgaatgccctggcgtgggcctttgtgctg

SEQ ID NO: 115888 - DNA, 455 bp, Glycine max
  unsure (1)..(455): unsure at all n locations
agcttgngaatgaagtctctgttctacattgtctttattttagttttcttgttaactcatatatcatatnttggatgtttacttttttctccatacctttgtaacatgtgttggcactaccattgatacatagaccacttttcccaggccagtctttgttaaggtatggttaagttgtaggataaatgagttaaatatccttctttgctcattacatgcttttggcttaaacttatgcaaattgtaatctatgatcaatgcatgtatgtgacaaggaccagggaatgtaacttgaaactcgaaagtatgatattgaattttgtatgagtatttttctatgcatctaggatcccanattattaacaactttacaacaaagtcgagaacgaaaagccccatatgttgatcctaatgtagtatctagctntgacacaaataaaaatgtatatgaatta

SEQ ID NO: 115889 - DNA, 366 bp, Glycine max
  unsure (1)..(366): unsure at all n locations
ctgatcatctttgatacgagaatgggataggatcataggacatgttatctganattggctaaaagggtgagctgatggacagtttcctttttcccaaggctatgagatantttatgtagtcctgccccaccagttggttgatgtaattgggaagcatatacgtctggctaggatcttttgattttcagcttgcctatggctgtgccattanttttatgcattctactttttggtgttccaagcttgtactcttgaagaaggtcctgactcccaccagtacatgtggcgaagcactggacagtgttgacataataagtggcgcattacccctaatatttttgttttggaataatttatatggttttg

SEQ ID NO: 115890 - DNA, 463 bp, Glycine max
agcttgagggcaactggatgcgttggtcaacttggtaacccagctggccttgaattagaaatctgtacctgtcgcaagggtttgtggtttgtgctcctctgctgaccaccatacagacctttgcccttccatgcagcaacctggagcaattgagcagcctgaagcttatgctgcaaatatttacaacagacctcctcaacctcagcagcaaaatcaaccacagcagaacaattatgacctttccagcaacagatacaaccctggatggaggaatcaccctaacctcagatggtccagccctcagcaacaacagcagcctgctccttccttacaaaatgctgctggcccaagcagaccatacattcctccaccaatccaacaacaacaacaaccccagaaacagccaacagttgaggcccctccacaaccttccctcgaagaacttgtgaggcaaatgactatg

SEQ ID NO: 115891 - DNA, 406 bp, Glycine max
  unsure (1)..(406): unsure at all n locations
ggcctcatcaaactacttgtttcccaagggatattctataaatagacctcccatctntaatggagtgagttaccactactggaaaacccgcatgcaaatctttatagatgatgaggacatgaccaagagcaagggcaaggatccacttgaaggacttggagggcctatgacaagggctagagcaaggaaagccaaggaagctcttcaacaagtgctgtccatactatttgaatacaagcccaagtttcaaggagaaaagtccaaggttgtgagttgtatcatggcccaaatggaggaggactaaatggcaccactttgtctcaattntagagtgtttagtttgtctaaataatggaccaatccttgtaaagttggctgaccaaaaatatgttttgggttaatcaac

SEQ ID NO: 115892 - DNA, 440 bp, Glycine max
ctcgtgaccctcttacttgtcaaggctactgcccttgacaccagacaatctccctcgacgccagacaatctctttcactcacaagctggctcaaagcttggggggcttatgtactgtccaggatccacaaaatggatgtggcaactaacatagcactccaacacacacgttatccctggcacaggagctcggacgcatcacccttagcagtcgagctgttgggccaacatgttatctctaatacctcattatttgaatattaatgataatgttacaacttcctcatcaagtgacagatacttaattatctataagctacacattatctataagccatgacttatctattagctattatctacaagctagcaattatctgcaagggttgttacaccagcgtaacaacccctacaaacaaggacccgaagctcctactccac

SEQ ID NO: 115893 - DNA, 322 bp, Glycine max
  unsure (1)..(322): unsure at all n locations
gagaagtggaactttgacgtgcgtctcataagactntcattcataaatgttacaacaagtgttacacatgcttctatttatagactaggtagcttatttgagaagctttcttgagaaaacttccttgagaagcttctttgagaaaacttccttgagaagctagagcttagctacacacacccctctaataactaagctcacctaccttgagaagcttccttgagaagattcctatagaagctagagcttaggtacacacacctctctaatagctcagctcaccttcttgagatgagaaactatagcttaactccacaccccc

SEQ ID NO: 115894 - DNA, 460 bp, Glycine max
  unsure (1)..(460): unsure at all n locations
agcttgaggattatggggtatccatcatatgtggtactaggtggcggtcgggcgatggtgcacaacaagttntccacatccacaatgcgcgcataaacccaccatcccctgttgcccacctccaactgagctcacgtactcccacgtagcccatatcctcatttctctcaataccgggtccccatcaatcctcccaagcttccacaacatccaagcagaacaacattcaaacagcacaagctatcacagccaagcaaaacagagcaaaggcagaaaactctgctcaacacatcaaccaaaatcacagcttttctcacttaaagaccacagtaacaattccttcgatccaattcgttaaccgttggatcgacttcaaaattgtactggaagtctctagtgcataagcctacattntgaccgttgggatctactggcatacatccagaactcattctgcact

SEQ ID NO: 115895 - DNA, 451 bp, Glycine max
  unsure (1)..(451): unsure at all n locations
tggacttaccttgaattaattcctttgttatctcctttgaggcttgtttccctttccttgttttgaagctcactacaaaccttaagtgaaaaaccatgatatcaccatatccttaaggaattttggagctttggaattgttttgggaataagtgtaaggggtttttgtttcattggataacatgttttgttggctatgcttcatgatgtantttgggccatacttggtgtacattgtatattggttaaatgttgaacatgctaaatgagatgttatttctcaaatgctacggagcaaaaaaaaaaaatcaaaaaaaaaagaaaagcaataaagttgagtgaataagatcttaaatggaaaaagaatgatgagactcttggttctactctttatgcttaaatnntatctttagttcttcttaatttntttcttaatatgcacttattcccca

SEQ ID NO: 115896 - DNA, 452 bp, Glycine max
  unsure (1)..(452): unsure at all n locations
ttaagtgacgctgctgcagctaaggtactagtttgacgctatcttgttctntgcaccgatattcgcgctaagcgcaacctaaaggttttgtatcaatcttcctccgaaacacttgaaatcttcttttggttaacttatgctaattaaaaactacaaaaatattaatttctttattatttcattaaaaacaaagggtaagtcaagaaactacaataattcttagtaaaattgactatcaaattaactcaaatttcacacgtattatatgatgttggtggaaataaatcttggaatgatcgaagaaaattagataaattaatggaaagtaatgtataatagtcaggtttagataaaaaattttatacacactcaaacaaattaaattaaatagactttgttcataagtaaaccccaactgatataccttatttttacaacagctatcttattta

SEQ ID NO: 115897 - DNA, 474 bp, Glycine max
  unsure (1)..(474): unsure at all n locations
tatcctaacgtggaatacaccaccgtcgatgaatatttgaatcatgttgtctgattnttgagtaattgatgcaatttttgttgctctgcaaagtgctcaataaaacctatgccttttcttttttgcgaaattggttgcttttgtcctatgtttcggaaaccatccacattaatgtaatcttttttttttttaccttaataatactctaatctgcggtcggaagcactgtttaaattcttttacatcattcatgaatacgtgtcactgctccattatctggcgaggggttcacactggactcacacgtgggtgtgaaagagtgatagcactccacaattatactctacatattgttgcataaataaaattagaaaatatatatgacttaacggaacaaaaaaataaatgctacattattttaagtattcttagacttatatttccaattaaaattatattgttatgttgataatc

SEQ ID NO: 115898 - DNA, 439 bp, Glycine max
agcttgaccctcaaaccatgtgtgactgtatttctggtcctgtcaatggggctccgctctttgtatgattctgacaaactacgattggctatggtggattggtcaagaacctcaagcattgccttgatggtccgtgccttgcgaagcacggcaaccatgtcggactccatccggtcccttaggccacggagaactttggcaccgtgggtgcactttgcctcttcatttagttgctgaagatcaaataagagataggagatctcttccatttcaaacttgattgcttcaacttctaggaagaactgagagaggttgcggtcttccgtggggttgagtttcctgctccaaggacaagatcgtcgtcttcaaggtccctgcgagccatgttctttagctccacataacttatgaacgactttgcatcaaagtatcatctttg

SEQ ID NO: 115899 - DNA, 428 bp, Glycine max
  unsure (1)..(428): unsure at all n locations
tggtctggaatgtgtggttgggatcatgaatgttgntatttgagccactaatactcgcaccaagagagtcccttctgcccaaaggtactccccagcttggtccccccgtctgcagagattataaataaggcttgataataaagttttgatagtcaaatatcaagataagggtattagagtgcaaaaaaaaaaaatagatacttacaagaacagttgaatctctagcagctagagccaaaatgtcagcacatgacactgtatgtgggcattccttctctagtgcagatttaatttcatcaatgacttcaaatcctcgggctgaatcacggttgggatctgacctcttctcactgataatagttccactgctatctagcagcaccgatgcatcacagccctganacattgaaactttagtcatgcatttg

SEQ ID NO: 115900 - DNA, 444 bp, Glycine max
  unsure (1)..(444): unsure at all n locations
agcttgtcacccagcctcgccaggcgagcatggttgcttcctccagaagcaacaccttctggaggaaacctttggagggcccaagtgggcctggttgatatttgcacccctatttttactaagtacaccccttgccttttttttggtgattcntttctttggtaaattacggaaacttacgaatttcgtaacgatacttgttttctttccggaatgttacggaaccttgcggattacataatcatccccttnttgacttacggaatgttacggaaccttactaattgtgcaacgatgcttacatttgattttccgtgtgtcacggaacattacggattgtgcaataatattttcttttgtttccggcgtgtccgaaatttacaaattgcctatgatggggccaagcacctcaaaagaccaacaaaagttcatgttataagcaaa

SEQ ID NO: 115901 - DNA, 480 bp, Glycine max
  unsure (1)..(480): unsure at all n locations
tcactcctacattgtatctctagcatgcattgtatgttggtctcgtcctttgtcacgggaagccggaaggtccatatcaccttcttaattgtacacatggngcactgcgccccccaaatgcgcaagtaagaagagataattttccgggctctcgtgtccgtaaaatgcattcataagcatctcttcataacatcataatgggcatatcctgcatttgtccgttatcatattccagcctcacattntgcatgagtcatggcatcatcatgcatatgcgttcaacaaactttttggtctgcaaaattgcataccatttgttttcatgtttgctcatccttgcgttttcctctacaaaacataaacaaanaaagggggaagcgtgaaacttcacactacattcttagtttcatgtgttaggcaccatgagccaaccatgttgggatcataaacccatgtcttaaaaaaaaaacacacaacaac

SEQ ID NO: 115902 - DNA, 414 bp, Glycine max
  unsure (1)..(414): unsure at all n locations
agctngctngagaagcttctatgaaggctttatctttgagtttcaatgaggtccttctatggtgattttcaatcatggagatgcaccggaagattaaggagaagatgtgagaggaggtgtgtcatccactagggaataagccatggtaggaggagctacaccaccaagagtgccttggataagaagcttagagagggagcttctatagatgaaaggaatgagagaataagagggagagaagttgaactttgaagtgtgtgactcacaggactctcattcatcaaagatatgacaagtgttacacatgtttctatttattgcctaagtcaccaactaaatgaaagcttccttgagaagcttccatgagaagtatagcttacctcacacactctttctaattgctaagctcacctc

SEQ ID NO: 115903 - DNA, 466 bp, Glycine max
  unsure (1)..(466): unsure at all n locations
ntnggtcaaatggctnggatatacaacaatggccttcatcatttccagttcatacatttcattctaaatctcagagattgatgcaaaaattattactctatgctagtcgttctctcaacaattaagttcacactctcaccggtttatgatcaagcttttctttcacaatcaacctgtctactgacttacatttctaactatgagcctactctcttgttctttctcatctaacatacacacttgctcaactcatgataaaacacactcttcatttcaatcatgcatccattccataatcaattcacaacaccaattccacaaaaagatcaagtgtttgcactacattctcagagaatcaagttaagctgttcagtatgcttcaaaacatgcatactatntatccatagaaagacagatatataaatataaatataaaccaaaatctccaaaacaatgtctaaaacta

SEQ ID NO: 115904 - DNA, 399 bp, Glycine max
  unsure (1)..(399): unsure at all n locations
caagcttgaagagagttgtgtctttacatgtcttactcagagagtggcatatgtacttatcggcgctgttttcatcttcacctctttatgtgtacatcatacatcatcatgtgaacatcagactattctatatgactactgtgcgatacttcttctgtgcctctactctctgttgtagtcaatcaccgactgtcagtaatcgcttacacacttctttctagaaacttgcatacaacggattacaacagttctaatccctacgactacccctctggtcgtatagaccatcacagtttgtattcactcttccgatatagacctttccatatgcatggttnaggaatcaattccttgtagcatgctgaccgatccattcctctaccaactatgttggaccat

SEQ ID NO: 115905 - DNA, 369 bp, Glycine max
  unsure (1)..(369): unsure at all n locations
ctatgaaactcagcttgcggcggaaagaactgtatatcagcacccaagtcttatttcatgcccaactctcctctctctcatgcagaagactatgacagtctcctcactcgctactattngtccatctataagtgagccctgaatcataaatctcgtttatgatgcganagttntacaggaaacagtacagacacgataccagatcactataacaccatgtctacctatacataggcactgctaaatgcacatcgtggtcatccttgatgatcgcgcacagctctcactgacggactatgagtacgcggagcaatgtgtccgatgctccatataactaagtaatgctagctgtgaagatnttaatgcatg

SEQ ID NO: 115906 - DNA, 366 bp, Glycine max
  unsure (1)..(366): unsure at all n locations
tgtctnggnagtctcgtaccagaaccaccaattcatctcggataggtgtgggcatgctcatgctaacctctacctccttcttttcctcactaatgcccatgtttacgatttctgtctcctcttggtgaggcttcatttctcggtcctcctattcaaccattctttggagttctgggggaagcccccaatcctcatcttcttcatcctcaacgtttttcactagcctctcaaaatcgacgtctgggtcctcaatattagtaccttcacaggactccttttcagatctgtaccatntatatgcaacaacaataaacatgtatatgaatgagaatgggtgagagtgcataacaaatgaagaaagctgtt

SEQ ID NO: 115907 - DNA, 500 bp, Glycine max
  unsure (1)..(500): unsure at all n locations
tctntgagaaaacttccatgagaagcgtagagttatctacacacacccatctaanaactaagctcacctccttgagaagcttcctttgagaagctagagcttagctacacacacccatctaaaaactaagctcacccttcttgacaaaatacatgaaaatacaaaaaaaagtccctactacaaagactactcaaaatgccctgaaatacaaggctaaaaccctatactactacaatggccaaaataaaaggcccaaaagaaggaaaaacctattctaatatttacaaagaagagtggatccaaccttgacccatgggctcaaaaatctaccctaaggttcatgagaaccctagggccttctttagtatctctagcccaagcctcttggagtcttctatccaatacccttggggggtaggattgcataatcccttccaccttggaaagggattgacctaaaattctgaggttcttcatactctgggcnntcccccttgaca

SEQ ID NO: 115908 - DNA, 466 bp, Glycine max
  unsure (1)..(466): unsure at all n locations
agcnttgatgcgtctattttataagtcagcgtggttaaattgtggctattaanataaagggaaagtatagcggcaattggatatatgatataccaaaatgtcataccctccaatcattttattttgtcaacggctggcctaattccatttcacaatcgattatctgcaagaaatatgggttatcgcatgacttcatgagtctcatgctngatgcctgttaaatcattcttctttttactttnttgggaataaaactatctatcttctggagggaataagttaaaggtacaaattacaaattattatagaggtgattataaaaatgcaaacaacattacaacaaatcaagaattaatcatgcattaggattgaagttacagatacaaaattcacaatttataattgagttagagtaattccatgagcaacaataatattatttggactaatagaaaataacacttga

SEQ ID NO: 115909 - DNA, 366 bp, Glycine max
  unsure (1)..(366): unsure at all n locations
taaaatatggtggtaaaggctgacacagttttcggtttgtgtttntaacttttatttatttatttataatcgatattggcttaggcgttgcatctgcaaatcacaacccanaaatttctccctctntcggtccctgtctctntcttataccaattntcgttttaatttccttctgagtcgcatcgctctcggatcacttctggtttttcagcggggacttgcgtcgcactcgcaggcaacaatttactgcgaggtacggaatccgtgaattttccggcgaggtaagaattccgttgaaatttgctttggtccgagggggagggtggaactntgtggaattaggaatcgattggctccagatctggg

SEQ ID NO: 115910 - DNA, 461 bp, Glycine max
  unsure (1)..(461): unsure at all n locations
agcttatcataataacatagaatttaaacattatcaagcaaagtaacatacttaacacaaacaatcaatcataaaaataaattaatcaatcaatccttatttatctaaatcactaatatctaagaggcctaattcccttctaatagagaagaatgtttctttggggagaggttntgtgaagatatcagcaagttgattctttgtatcatcaaactctaatacacaatctccctttagaaaatggtgcctaatttctatatgtntagtcctaaagtgttaaactggatttttggaaagattaattgcacttgtattatcacatctaataggtgtatggtcaagaaggattccatagtcagaaagttgttgtttcatccacaagatttgtgcacaacaactggcggcagaaatatattccgcttctgcagtggataaagcaacactattttgtttcttactat

SEQ ID NO: 115911 - DNA, 360 bp, Glycine max
  unsure (1)..(360): unsure at all n locations
ctgcctgatgtggagtggaaccattttaatcaattctagcctacatgagtatattcaaactcccctgctgcataatatactccttcatgttgtaagtccctcatagaaatattgcagaacgagttgctcanaaatctggtggtgaggacagctngcacgcaatttcttgaatctttcctagtactcacacaagctctctccactaagttgcctgatgcctgaaatgtcttttctgatggcagtggtcctaaatgcagggaagaatntctccaagaacaccctcttaaggtcatcccagttggtaatggacctgngagcaaggtagtacagccaatctttcgccactccctccagagaatg

SEQ ID NO: 115912 - DNA, 463 bp, Glycine max
  unsure (1)..(463): unsure at all n locations
agcttgtactcagatccctcttgttggactatacttagaccaaacagcattattgtaacatcatatttaaaaccaaaacttaatccgcagatccctcttgtaagactaagtttcaattttgcttcactcaagttctatgcaacaatacatttcccaatgctaaagtaacctaactatgcacacaaatgggtgatcagaccaagagcatgcggaatttaagcactgaaagaagcattgaacacaagaaacacaatcaattagatattaaaataattacatcagttgttctttagaaatccctaacaagggtgtttagccagccattacagaaaaacccctaataataataatgagattacaaaacctaggtatctttgcaaaagctgcttctcttgctgcctccagagctcttttcctgaaataggcactatnggtgtgctctggaattggcaaatcatccacc

SEQ ID NO: 115913 - DNA, 458 bp, Glycine max
  unsure (1)..(458): unsure at all n locations
tgccagtctccgatcagaagtgagccggtttatgagtgagtatgagcagctacgttctgagaatgctgccctcaaggtgattntgaaatgttgatatgtnttgatttttgtcttttttgctaattggcaagcactgttgcccataccaagttatacctactatcaataacactcatatttgaaccctggtntggagagaaggaaaaggcctaaatggactaatatgaccattctagttttcaaattccgctcctactaccataaaaggttcattcaaagactgagccagctatctgattacaggatagacttggggagatacctggtgtcacgacacctgngaaggaggatcttangtctggccagaatgatcagcatgtgagtaatgacactcaacanagtggtcagacagatgttgtgcatggtggtcattaggatcttagcttctgctgcatgtt

SEQ ID NO: 115914 - DNA, 464 bp, Glycine max
  unsure (1)..(464): unsure at all n locations
agctncggaggaagatgaagaagtccaagtcttattttagagctagggaaagcaagacttgccaaggagatattcatatcagtctcttcacacatccggatagtagtgcaccgagttacaagaggaaaatgcattcactgctagagcccttgaacaagaaaccatatgggcccacaatgttgaacatggccgatagaaattcccaggagcatggtgcggtagctacaatgagctcaagcgaaaactttttgggatcatttgtatactaatctgtatacatctttgcatacaattaatagtgatatgtgtatataaagaaaatagtgaattgtgtatataaagatcctataaaatgaatatgagatctcaccggatagtcgccattgttcacatactaaacatctattccaataagagaaaatgataaaaggcttctgaagtttacattagccttccatactctc

SEQ ID NO: 115915 - DNA, 471 bp, Glycine max
  unsure (1)..(471): unsure at all n locations
tatctaatcattccaatccactcaaatcatactattgttcattcaaatcattctcaaacactcatttcatacaaaacaatccattgcatatcattttcaatcatttcattgttcaaacaagctntntggtacaagcaaacaactcanagtgttgaaatttaaataactggaatttaaagaattgaaatgtaaaaactgaaattaaaatgactgaacataaatcataaaataattgaaaataaaataaactaaaaatgttcaagatgcactaatttatatgtcctgctcttgtggttgttcttgtgcatgctcattaaggtccaacacctgagcaattggtgaatcctgagagataggctgtcctaacttagatgctggtgcagatggtatggcatcatcaggtatgggtgctgggatggctntgggatctggtctgtagaagtctnctccttctgagccatgtgtacacct

SEQ ID NO: 115916 - DNA, 452 bp, Glycine max
  unsure (1)..(452): unsure at all n locations
agcttcgtttttatctccaaactccatgaatatagattcatattcttgctttatcccaaaaagctttgatttttgcctccctgttttcttctacgttttctttttacctgtatttgcatttgtatgcgttttttcggattttttttcactgcatgtagtttaaatgttctaaagcttagaactttggttntttttgctttcgtttcagatttgtgtcaatgtaacaatttttggtttttttcgaaagcaacattaactatgtccttatatattccttggaatagttagtcacgcacgggggagtagccacaatgtcatcaggatgatattatcggtttgcaattttccaatgcattctattttttattttgtggtttggttaggggttattttgaaccaatgtgcttaactttaatcctctttttgtgtgacatcagtgagattgacttcta

SEQ ID NO: 115917 - DNA, 476 bp, Glycine max
  unsure (1)..(476): unsure at all n locations
ngtgtgaagagnatagacagaaaagactcagaatttttttgcaattgtctattcgctaagcgcagaccttgtgctaagcgcttcttcttcacgcgctaagttgagcttgctcacgctaagcgcagagacccctgattggtaggctgaatagttcagctaaccacacatcattgcgctaagcgccacatctttgtggtaattgaactttaaccagtgggcttagtgtggatgatgcgctaagcgccacttcttctctggaaaaattttattgtatcaacgctaagcgcgctatccagtgctaagccccagatccattctgtaacttgagttttaagctgagcttaaggggccaagaggcgctaagcgccaatctcttacgggttttgaattcttggaagtgcgcttagcgagcctattgcgctaagcctaaactactctctgtaagtcgaagcttgatgttacgctaagcctcacat

SEQ ID NO: 115918 - DNA, 424 bp, Glycine max
  unsure (1)..(424): unsure at all n locations
agcttctntgagagaactggcttgagaagctagagcttagctacacacacccctctcatgactaagctcacctcatgataagcttccttaagaagattcctaaagaagctagggcttagctacacatacctctctaatagctaagctcacctccttgagatgagaaactagagcttagcttcaccccccctataatagctaagctcacccccatgacaaataacatgaaaatacaaaaaaaaaagtccttattacaaagactactcaaaatgccccgaaatacaaggctaaaaccctatactactagaatggccaaaatacaaggccttaacaaaggaaaaacctattctaatatttacaaagataagtgggctcatacttagcccatgggctcgaaatctaccctaaggctcatgagaaccct

SEQ ID NO: 115919 - DNA, 472 bp, Glycine max
  unsure (1)..(472): unsure at all n locations
atgatatntgttaatgttttcttactgattgtggttattgtattnttgtattaatttcttttataataaactcacccctcacaatttttgtatcgtgtggttggtacctatgatgatcgcgaacctttgttcatgggagtagaatgacagcaatagagtacgagaagtgagattcttttatggagccgccaagccgacatgatgacgttgggattatttcgggagagagttgtgttttgttaatcaactcctccatagctggttccataattctttttgtttaattgaggatgtaaatcacaaatttaattatatgtatgaacaaatttagttttcattatgtgaatgatgtgtactaagttactatacctacatatatatgtattcacttaagtaattatgcgttgtttggtgagtgcatatcgagaaaanattactntcatttttcataagcaattaacggagtntcatt

SEQ ID NO: 115920 - DNA, 452 bp, Glycine max
  unsure (1)..(452): unsure at all n locations
agctttataagctgtatttaagccatatctagtcaatgtgggattaaacatcacccttgaggattcaattaaggcagcccccaaagaggctgcaagtgaggcgggttatgggtgatcgcaattaaggcagctttcagacattggtaaatttatgcgccatgcatatntttctgtactcaaaatatcttcttaattcttaacagtcctctgtcatagacctattcctgtgatcaatgatcgttggagcttttcttntattaccagtgtttaattacggaacaaccaactgtttattggatcccagatgcattcattgcattggtcttatcataacatttctgtatttaacgtatacatactgaagcttttaatgtgtatttatcgccactgcaatatagcgtgtaaataatattcctgatcattttctagtcttcttatggttcctttatcat

SEQ ID NO: 115921 - DNA, 403 bp, Glycine max
  unsure (1)..(403): unsure at all n locations
acanatgaagggtccaagaacaaaagtaggaattatagtctcaacatccaacccatgctgttctccaaattcaagaactgccttctctgccaatgtcttanaaattgaatacgaccaagcaaatggtttcaaatctctaagaagattttcgtcactccaataactctcatccatcacttcctcttctttgccctgccaataaacagcagaagcactagaagtgtaaacaaccctcttcactgtctttgaattgaggcatgcttttagaatgcctaatgctccatcaatggttcttttggtcactatttcctccggctcgttcacttctaaatcaattggagtagctgtgtggagcacgccaatgcacccttcaattgcttcactgaaactctctgggttgctg

SEQ ID NO: 115922 - DNA, 190 bp, Glycine max
cccggatccttaagtcacctgcagctcagctttaagcgaggcgcgattttttgggtgctgcaatctgaccgtcaaagaattatccaagatttttcagcgagcatgtgcaaaaccacccaggaatctaccagtgttgccaaaatccacgtagactcgcgcactttcatgaggacagattgctatactgact

SEQ ID NO: 115923 - DNA, 312 bp, Glycine max
ggatactctagcgctcagcgtcttcatgaactgcaatggtgatctacagccagtgactgacgcatgtagatgaaggagcacttgttacatgacgcgcgatacactacagaatcactcttgttgggtgatgtgtcaactccttcagcgtgcctccgattacattcttttagagcaagattctctctaggaatagtgtgctatagatagcgatatagacacttatagaactagagctatgttggttcttcataagagacggagaagacgaagagaattcatctgctaatgatcttcaccactttcacattcatc

SEQ ID NO: 115924 - DNA, 474 bp, Glycine max
ctcgacccggatccttaagtcacctgcggcatcaagcttgaatggttgattgtgtcttctctaagctacttgtctcctttgtgcatggctcaactatcaagtacgtagtccttcaagcgcaagggggtattactttgccttttgggctttgctatttgtgactcctttctactaggtgtatcattcctgtcgccttctaataacaccttgtccttaaggtgatgaagggatttaagggttgaccattcttcccacgatgcttcatcaggatgcagacccttccattgaactaacactagttgctttgggcttgtgtctgacggaatggtcttgtgagccaagatggctaaaggaactacaactggttggttgtccacaggcaagggaggaaggtgcgtggcctattcccatgtcggagatccgatgaagggcttcaagatagaacaatgaaagacgggatggatgcgagaatgc

SEQ ID NO: 115925 - DNA, 514 bp, Glycine max
  unsure (1)..(514): unsure at all n locations
aaaagatggcctcagcaaattccttatttccagattgtaattctatcaatagacctccaatctttaatggagagggttaccactactggaaaacccgaatgcaaatttttatcgaggcaatagatctaaatatctgggaagccatagaaatagggccttatatacccaccacagtagaaagagtttcaatagatggtagttcatcaagtgaaagcataaccatagaaaaacctagagatagatggtctgaagaggatagaaaacgagtacaatacaacctaaaagccaaaaacataataacatctgccctaggaatggatgaatatttcagggtttcaaattgtaagagtgctaaggaaatgtgggacactcttcgattaacacatgaaggaactacatatgttaaaagatctaggataaatgcactaactcatgagtatgaattatntagaatgaatgcaaatgaaaatattcagagtatgcanaagagattacacatatagtaaatcatcta

SEQ ID NO: 115926 - DNA, 467 bp, Glycine max
  unsure (1)..(467): unsure at all n locations
actcagcttctaaggaagtntctcaaggaagctacctaggctattaatataagtatgtgtaacacttatggtaactntgatcattcgagaattatacttcanagttcaaacctcatttgaggcacaaaattttgtgttccttctctccctgtccctccattaatcttcttctaccttcaagctcttatccatggcttcctatggtggtgagcttcttcttgactcatcttctccttgaagtggcatctccaataatctttctttcttctctattccactgccatgatcttcaagaagcaaaggaatccattggtgaagaagatccaaggcctacaagctccaatggagctacatcatgtggtatcaagagcatctttgtctaggtgatgttcttttgcttcctctatctntttgttcagtcaactcactttaattccttggtcttcatcttattctccatgtatatc

SEQ ID NO: 115927 - DNA, 460 bp, Glycine max
agcttgtaggattatggggtacccatcacatgtggtactaggtggcggtcgggcaatggtgcacaacaagttttccacatccacaaatcgcgcataaacccaccatcccctgttgcccacctccaactgagctcacgtactcccacgtagcccatatcctcgtttctctcaacaccgggtccccatcaatcctcccaatctttccccaacatccaagtaactcaacattcaaacaacacaaaccatcacagccaagataacagggcaaaggcagaaaattctgcccaaaacaccaaccaaaatcacagctgttctcacttaaaggccccagtaacaattccttcgttccaattctttaaccgttggatcgactccaaacttttactggaagtctctagtacataagcctacattttgaccgttgggatctactagcaaacatgcagaactcattctacat

SEQ ID NO: 115928 - DNA, 483 bp, Glycine max
  unsure (1)..(483): unsure at all n locations
actccgcttcccatttcatagccttagctgagactatctgctcatgattggntattntctttcggaggttgaagatgaatcctaacctttcgtccaccaaggctttcttctccttaagggaaaatatcagctttgccctctcttccatacttatcttaattntttccttcattgcactaaacttgtttttccaacaacaaatagaagaaggatatcgaatgagaaacacctatgtggcatccatggttataagaaaaaatgtttaggacttaaataatagaaaagttaccttgattntgatcacaaggcgaaggaggaggattggtaattggagcatcaacctcaggagttggagtggtttcattntcaatcgcaacactagccttaacagtttgcagttcggaagacttccctttctcaagagatttctccttctctgcanacctcttcacctcagactccagaacgaccacatatataacc

SEQ ID NO: 115929 - DNA, 414 bp, Glycine max
  unsure (1)..(414): unsure at all n locations
tagttaagtttctaagagagtacanaattatttattcaagagttgaaaataactttcttgtgttgccaagagcttttccaggcacctcaaatatttatatcgaaatgtaaagtcactttgactctatntttaatgaattatctggaaatgtgcatcccgaagagagattcaaggatatgaattgggaaatgaaggaagaaaattaacggagtgtttcaatttcaaccgtgtcctttgacttttcaattcgtatttaatcttgaaaatctcgtgccatttaagtcacttgtacaatgaaacgatttgattaggaatgtgcattgatagtcgtttccaagaaagggaactggaaagggttgatccttatttaaaatactctgcccattggtgggtagatataataacattactcct

SEQ ID NO: 115930 - DNA, 488 bp, Glycine max
  unsure (1)..(488): unsure at all n locations
gttgctgggttgcaaacattgtcttatggaagatgaaacacaatgctaccatagcactacgaaagcgaaataacataagcanaagggacaactgagagtctgagaccaaccttcttganaatccagttgtgtggctgtgacctatcagtgttctttctctaatttatcacttgagtaaaaatcttttacaatnttaattacctacactgcccatagaacctagtatgcgtggataagaacaaacaaaaattaaagcaaagaaggggcttcattctccaatatttttaattaagatacgttgcaccaaaagacaaagaaattaagagagggagatcatgtatgtatggaattgagttntttaactatacttgttggtacattggtaatntcaagttacaatcgaatgaatcgattctatcatagttaatcaaaaacgattgtactagtaaattaataagaagtttgctggctagtgtcttatataatgc

SEQ ID NO: 115931 - DNA, 462 bp, Glycine max
  unsure (1)..(462): unsure at all n locations
agctnggagggattgatggtgacccggtgctgatatgaacgacgataagggctacgtgggggtacgtgagctcagttgaaggtgggcaactggggatggtgggttcatgtttaatttgtggatgtgggagagttgatttgcaccatcgcccgatcgccacctagtaccacatatgacgggtaccccataatcctacaagcttgaagtgagaaagtgtggaagagtcagtcttcctacctttatttgttgactacagagtggcacctggagatatgtcgcgggggtcatgagaccttggggacgtcatgtggggtgctatttcccaaaaccaagcttgaccaatcccgacccaacccatgcataatcagtcagtgagaacctgtgacatacctaaacaggcgagctccttgcagtcagccaataaaagaacatagaccacatagctaggatgcttgtgtggtg

SEQ ID NO: 115932 - DNA, 462 bp, Glycine max
  unsure (1)..(462): unsure at all n locations
ttccttaaataagagtgacacccataagaatttgaataatactttctcttaagttgatgctccactcttatacaaagttggactagctcatctangtccatatatggagggagttcaaccttatccctcacttccatattaagcccactaaggaacctagctatgcttgttctttcctcctccctaagtccagctcttaaaaggagtagttccatttgttgtctatattcttctacactcatactcccttatctaagcctctagagcttgtccataagctccctttcatattacgagggaatgtgccttttcctaagggcattcttaatatcattccaaaactctactggatgatccctatgaatccttcattctctaacaagggaagtccgccaatagaaggcataccctngaaagctaanggtagccaatggaactcttctctcttcactaatatgatgg

SEQ ID NO: 115933 - DNA, 462 bp, Glycine max
  unsure (1)..(462): unsure at all n locations
agctgcttcacaatctcccgctttntgatgatgacaaccctgaaatcaagaaacacatacacattctttntcctagtcgatcacttacttaattctacatattctccccctttgtttttgagtttaagctttacttgaaattaagttatttagttatgtgagttcttgatttaatccctattttctctccccctttggcatcaacaaaaagccaaagtgcgtaacaaatataaaacatacataaatgattaatcatacataagacattcattgaaaaatctaaatcaatcatgaagcaaaaacatgaataacccaaattcaaatataaaccacatagtcttataacataaatcatagatgttcagtcatactaagcaaatagtaaaagaaatactanatgttcaaatgtcataataatatagccaaatacacggctagaaatcaaagtactaataataatag

SEQ ID NO: 115934 - DNA, 487 bp, Glycine max
  unsure (1)..(487): unsure at all n locations
ctattagttntcaccgacgaaaggatcaaagtgggtctgataagaggcaaatntgatcatcttgctgtgatgaatgagaaaactggggcaaataaagaggatgagaaggagggagaaacccatgctgcgactgccgttcctacatggccaagtttcccaccaacccaacaatgtcattactcagccaataacaacccttcgccttacccaccacccaactatccacaaaggccatccctaaatcaactacaaaatccaccttccacacaaccaatgctaaacgccacctctagcacaaacccaaagcaccaaccaagaaatgaattttgcagcgaaaagacctgtagaattcaccccaattacggtgtcctatgctaacttgctcccatatctactcaataattcaatggtagccatcaccccaaccaaggttcctcaacctccatttctccgaggatacgactcgaacgcaacgtgtgcttatcat

SEQ ID NO: 115935 - DNA, 414 bp, Glycine max
  unsure (1)..(414): unsure at all n locations
gtaccggatccttaagtcacctgcggcatgcaagcttgcctcanagatatccaggaaggattaatctgctgaaggaaccagttccgctcccgaatatgatagtcatcgttttaggagcgctgagcaccagcagtgcttcgaggccatcaagggatggtcatttctccgggagcgacgcgtctagctcagggacgatgagtataccgacttctatgaggagatagtttgcatgcggtgggcatcgctggttacccccatggccaagttcgacccagacatagtcctcgagttttatgccaatgcttggccaacagaggagggtgtgcgagatatgcgatcctgggtgaggggtcagtggatcccatttgatgcggatgccctcagccagttcctgggatatcctttantgctgga

SEQ ID NO: 115936 - DNA, 389 bp, Glycine max
  unsure (1)..(389): unsure at all n locations
ccttctggaggaatcttctggagggcccaagtgggccttgttgctatatgcacccncatttttactaagtacacccnctgcctttattttggtgataatttattcgtataggtactgatacttacgaatttcgtaacgatacttgttttctttccgtaatgttacggaaccttgcggattacataatcatacacttttatgacttacggaaagttacggaacctcactaattgtgcaacgatgcttccatttgatttccggtgtgtcacggaaccttacagattgtgcatcaatattgtcttatgtgttccggcatgtcccagaatctacaaattgcctaatgatgggtgccaaggacctcacaaggaccaaacaagagtttcatgtca

SEQ ID NO: 115937 - DNA, 463 bp, Glycine max
agcttctggtgggacatcttgacttgctttccaatctgacattcaccacagattctgccttcttctattttcagattgggaatgcctctaacagcacctttgtcaatgattttcttcatgcctcttaagtgcagatgtccaaatctttgatgccatattctgacttcatcttctttggagaataaacatgtggaggagtaaccggtttcttgaggtgtccataggtaacagttgtcctttgatctgctgcccttcattagaacttcactcttctcatttgtcaccaagcattctgactttgtgaagtttacattgaatccttcatcacacaactgactgatgctgatcaagtttgcagtcagtcccttcaccagcagtactttgtccagactatgaagtccatcatgggctagctttcccattccagtgatcttttctttagaaccatctacaaatgtcacat

SEQ ID NO: 115938 - DNA, 485 bp, Glycine max
  unsure (1)..(485): unsure at all n locations
ctcagcttcttataagctgaaccattttatcaataaacacaagttgagttntattcagaanattagagtttatctcttttatcttagtgagagtgattctcctaaattcttgagtgattcaagaacaccttggctgtatcaaaggactttcacaacctttgtgtgttgccctcgctggaaagagtgattctttccttcctttcatcatcacccttgttctttcaaaccacaattccagaaaatccacctctgcccagaattatctcgtggccataactcccattttacgcactcaaattaagtgattcttgagcctaaattgaatttcaaaacgagacctttcacctcgttttggaatcacctcatttggagccctgtagcttcagttattgccatttctatatttctgtccagccaccacttaacctacgttttaccatcccattcatccattntatgccaagaaccaccttattaagacccac

SEQ ID NO: 115939 - DNA, 449 bp, Glycine max
  unsure (1)..(449): unsure at all n locations
agcttgatcaaaacaatgatctaatcattcatatccactcaaatcatacaattgctcattcaaatcattctcaaacactcatttcatgaaaaacaatccactgcatatcattttcaatcaattcactgttcaaacacgcttttggtacaagcaaacaactcaaagtgctgaaatttaaataactaaaanttaaaataattgaaatataaaaactgaaattaaaatgactgaacataaatcataaaataactgaaaataaactaaaatgttcaagatgcacaaatttaaatgtcctactactgtggttgctcctgtgcatgctcattaaggtccaacacctgagcaactagtgaatcctgagagataggttgctctaactcagatgctggtatagatggctgggtctcctcaggaataggtgcaggagatggctcatgtatctgatctat

SEQ ID NO: 115940 - DNA, 410 bp, Glycine max
  unsure (1)..(410): unsure at all n locations
ngagttgaggaagtgtagaagggtgaaacttcctgcntttattcgttgaccacagagtggtaccaagagatatgtcacggcggtcaggagaccttgnggacgtcaggtggggtgccattgcccaaaaccaagcttgaccaatcccgacccaacccgggcatagtcagtcagtgagaacctgtgatgtacctaaacaggcgagctcctggcagtcaacagataaaaggaacaaagaccacaaagcaaggaggcttgtggtggctggccagctgtgaactctgattgatatgtgggttatggcctctggtaatcgattaccaagggtgggtaatcgattacaaggcttaaaaatgaagacaggaggctaagatggtctctggtaatcgattaccacagggtgtaatcgatta

SEQ ID NO: 115941 - DNA, 453 bp, Glycine max
agcttgagtggaggttacttcagtggaatgttgaactcgttgctgagttctacgtgctagccagtggtaagacatcttaataacatttgcctgcactaaacgagtccattatggagacaaaatatgaactatggcatcttatgaaaaagccttaaatgcctcagagggagtgtgcacatagtcatattgcatctagatggttgcttagacaaatactgtttccctaaccacaggttcagagaataacacttccaaaaaaaaaggtcacatgtgtaggattaccattaatgaaggccagaggaaacctctgagcatcagttaatggttcccttagagcaatccttctgaatctatccaaatgcagaggagatgaaggtggacacaattgagtggatggtgtatgctcgcggaagggcgagagaggagtgtcattggtggacctcactattaatg

SEQ ID NO: 115942 - DNA, 478 bp, Glycine max
  unsure (1)..(478): unsure at all n locations
ctatgcgcatacttcttcacgaacgttcacttacacaatacattcttataactaagaaaaatgcacccatatacaatcaaggcaccttcgttacctagattatttacatgtacttccaaggagtatttgttacctacatcacacacatttcctttgctaaattcacatacatgcatactctaagcactttggctatcaaaaattcacatacatgcatactctaaagccgcatgcaaattcaagtatattttcttttgctcactaaaattgtattcaaattaaaaggtatttttgtaatgcattttctttacataacatgcaacatatttatagatttttgtgagacattntgattaccaaaaattatatgtacatacatccaagtattttactaccatacccaaagtgtaaattgccgaaggtatnntgctacctattctaaacctacatntatgatgagcaaaattcctaaccatct

SEQ ID NO: 115943 - DNA, 443 bp, Glycine max
  unsure (1)..(443): unsure at all n locations
tgcaagcttagacctatgaagacttcatgacaatgtcttgcgttaancacctggtcacctttgttgtgcatcttgaaaccaacaactaggtagaggcatccaatagagtcatcctcagagtcctgcgcacaagactcgacaagtctaagagcctatggaaagaggaactccccagtatactctgggcctaccattgttcaccctatataatgaccaatgaaatttgttaccgactcaaatatggcacaaacgtcatgattcccattgaagtcagggaaccattgaaaaggagattattattccagcaacaacaaaatgaggaaaatatgagggtggagctcgagacaacagacaaagtccaagaaatggcctggatcaaggaagaagctaccaagcttcgagcaacaaggagatactatacaaaggttctaccatgacccttt

SEQ ID NO: 115944 - DNA, 470 bp, Glycine max
  unsure (1)..(470): unsure at all n locations
tgatagtgagactcatcttgtatatcaaccttgtgctacaacaattgcagcaaggcccactatccacaatgagagaaacaattttgtttaaaaccttgcatcttgtatgaaagatgttctctctttgggtttgggttaggtcacaagattgactcctaaggagccttctcactattagaagatcaccttcttcataggggtaaacctcttcaatatgctcatcacccttggcttcgccctcacttccagttgaggaaggagaagaagtagcctcctcttggctaccatagatgccttaacccctcatgatcatggttttctttgtggggcattgagaagaaatgtggcctttcccaatacatttgaagcacttgatgttactagttttatcttgtgaactagcctntggagtgatttcctctgtgttttacccttagcatctagcgtagaagtggtactctaacacactt

SEQ ID NO: 115945 - DNA, 461 bp, Glycine max
  unsure (1)..(461): unsure at all n locations
gtcacctgccgcatgcaagctngnngctggttatttaaatttctatgatcatgatcaactaggcgtgtcctgcgttgacttgataaacaaatgtgatccgataacaagcagagatttaaaaggttctacgttgactcctagtaccgcttctttaacgtcttgagctggacgcctgatggcttgtcggtcacggacctagaactttgcttaccgttggctgtcgacctcgacgcctattgggcggccatgggtcgtaagcaacactctagaccttttgtggatgagctgacgtgaactctacaagtgatggcggtgcgtctattgcccgctgccggacatacctaggcttgttgggtgtttcgccctgcgcctggctggggacgcagtacttcttgatgaaagctctattagtggggggcctgatgcccttgctggatgtgaatgcacttcgtataactgac

SEQ ID NO: 115946 - DNA, 339 bp, Glycine max
gaagctgtgagtgcccttgtttactagtggcctcagatatcttaagaaggcggggggtgaattaagatattccaaactatttcccctaataaaaaatctatcttactgtttacttacggtatgaattcccttaatgacaatccttcttaaatattaagtcacatgaagcaacttgaatatgaatatgaagcagtagtgcgtaaaagacgatcagggaagagaaaatgcaaactcagttctatactggttcggccacacccttgtgcctacgtccagtccccaagcaacccgctcgagagttccactaacatgggaattccttttacaagttctaaacac

SEQ ID NO: 115947 - DNA, 434 bp, Glycine max
  unsure (1)..(434): unsure at all n locations
agctntgcagcagaggccactctactatttatttcgcaagagagggtaactgcgaagcataatttgttcattacgatcatcacatagtggaatgaaaatgcaatgctgaaatccagaagattcttccaccttagcatataaccctgtgagtgctactatatcttgttcaattaaagaagtcaatgaggtaatagctgtcatatgctctggagcccatatcattgtgatgccgctcttcatgtgcagaagattgggagattatgatattttgccgacccgaatgactttacaattaggtgaccgctccattgtctggccatatggagttaatcaaatatgtgctggtgatacataaacattttagtttcccggcaaactaagtcggagtgtatatctctgaacatactaacatacttgtacgatatggaacgcta

SEQ ID NO: 115948 - DNA, 351 bp, Glycine max
ttcatgatccttctcctactttgtttcgcatataagcccgaacaacactagagctttgatcattatctcaagaggagcaacgatttttatcacagcatgtgtgagctcttagtagactgcaaagcttaatcttattggttaattgcttgggctgacctgatgcttctcctactgtgtttcacatacgagcccgaataacgctagatctttgatgtggatctcaagaaataccatgatgtttatcacaacacgtgcggttttcttgtagtggtatcaagcttaacccttttggataattgattgggtgatcctaaacttctcctaatatgttcgatctaaatctgataacac

SEQ ID NO: 115949 - DNA, 390 bp, Glycine max
tcatgggccactttgggatatacaagacccttgtcttactcatagatatagtttattggccccatatgaagaaagatgtccataagcattacactaggtgtgtggcttgtttacaagccaagtctatgatgatgcctcatggactatacacacccttacccatcccgtttgcactttgggtagacattagtatggactttcttcttgggctatctagaacccaaagaggtgtagactctatctttgtggtggtggatacgtttaacaagatggaacactttatacgatgccacaaagcggatgatgcttgcacatttcaaactctttctatgaacctgtgagactcctggtttgctcagacattgtgtctatgagatgcagttcttacca

SEQ ID NO: 115950 - DNA, 432 bp, Glycine max
tcgtccgcgatccttaatcactgggctgcagcttataggcggtctggagacaatgtcaatgttccgaatgtaagatgagtccaagtcttcgatttggccgaccatgccctcctgatttccaactgggaaattggcgagtggaggaaccccccggcatttacgcaacaagcataatgtaaacctttaccgggtttaaaagctctatagtagggcctaagctttaaagttttcgttttggtaagggcttcgtgtcttttgttttgaatttataatacaaggatctttcttcatctgtgcctggtctctacccattctcattcatttgcatgtttacttctttatctgaaacggcagattcgatgacgagtcccccgaaggtactaatacctgtgacccgtctatcaacttcgagcaagagatgaaccaaacgga

SEQ ID NO: 115951 - DNA, 300 bp, Glycine max
  unsure (1)..(300): unsure at all n locations
tcccacccaaccaggcatagtcagccagtgagatcttatgacgtaccttangaggcgagctcttggcagtcaaccaataaaggaacaaaagtccacaaagcatggaggcttgtgtggcggctggccaactatctatcttgagttttatctgaaaaattccctctggtaatcgattacaagacattgtgtaatcgattacagggtttaaaaattgaaacagaacgttcagtagctgctggtaatcgattaccatctgtgtgtaatcgattacacagtgctatatgttgctggtaatctatc

SEQ ID NO: 115952 - DNA, 456 bp, Glycine max
  unsure (1)..(456): unsure at all n locations
agctntgataagttagttaccatntggaagctttggaccaaccgaacaatatgtcaaacatatcaataacttgatggcactttttgaattaattcattggaggtaaagatataaactttagattagacgcattataaacgaaaaacaaagaaggaaagggttcaagttattaataaacctgaggaaaaagcacctggttagtacggataaaaagagtagttgtagaaatgagaaaaaaaaagtgagggaagatcatggtagagtaattaactaaaccggccatcacaaatttagatgagagtggtttgaaaaatgcagactgtaacaaattagtgggacttaatttgaaagaaggaagaaggagacaattgtcgtctctttgtccactactccacctcagttntttggacatgtctantttgaaactacttagtaacattccctgcggaaaaagct

SEQ ID NO: 115953 - DNA, 502 bp, Glycine max
  unsure (1)..(502): unsure at all n locations
tctattaagaagctgatactctattctgatatcccaactaatagttcggttgtacttgatagtatagttattaaatcaccttagataggatcatcttatcaccactaatctatatattttaaaaatatgttgattctaggagttagctntccacagctatcaccacttgtttatgtatacatganaacattcaagagataatcacactcagattattcccctaaatttctttctttaacattgccaagaaggctgtcaggcagtcaaaaagtgttggaataagtggtcattggtttcaaagcccaaaaagatgtagtatgtgttacatgggaatgggcatagtaaccaatttgattaagaccttctcgtctgatcttcagttttattaagtgaacaacttggtgggtatttggtgaaatatgggtagatntaagtgttgtattctagtactgagtcagaaacacttgactggttaagactgagagcttacaataaaatgata

SEQ ID NO: 115954 - DNA, 443 bp, Glycine max
  unsure (1)..(443): unsure at all n locations
agcttgtaagactacggtgaacccatcacatgtggtactacgtggctggcgggcgacggagcgcattacgtattccacatccactatgcacgcgtaaacccacgattctctgtggcccacctactactgagctcacggtctcccgcgtagctcatatcctcgtttctctcaacaccacgtacccatgaatcctccctagcttgcacaacatcagagtaatactacattcacacatgcacaagctatcacagctgaacaaaacgagggctaacgcagaatactctgtccaaaacaccaaccaaaatgacaggttttcacatacacatgccccagaaacatttccttctttccaatccgttcaccgttggatcgactcgaatatgttactggaagcgtnttgacttaagcctaaattgagaccggagggatctactagcgtacat

SEQ ID NO: 115955 - DNA, 241 bp, Glycine max
tatctcgtgagcataactgccattttacacactcaacataagtgattcttgagcctaaatggaatttcataacgagacctttcacctcgtttaggaatcacctcatttggagccctgcagcttccgatattgccatttctatatttctgtgcagccaccacttaacctacgttgtaccatgccattcatgcattctatgccagaaaccaccttattaagacccacgatattaaccacctta

SEQ ID NO: 115956 - DNA, 472 bp, Glycine max
atccttaagtcacctgccgcatgcaagcttctcaggaggtgagcctagttatgataggggtgtgtgtagctaagctctagcttctcaaggaagttttctcaaagaagcttctcaaggaagttttctcaagaaagcttctcaaggaagctacctagtctataaatagaagcatgtgtaacacttgttgtaactttgatgaatgagagtcttgtgagacacaactcaaagttcaacttctctccctttttcttccttcaatttcgtgctcccccctacctctttctctccctctttcttttcctccattgaagcatcctctccaagcttcttatccaaggctcatcttggtggtgaagctccttcttccatggcttattccttaatggatggcgcctcctctcacctcctttcctttgtcttccgctgcatctccatggtggaaaatcaccattaaaggaccccattgaagctc

SEQ ID NO: 115957 - DNA, 467 bp, Glycine max
  unsure (1)..(467): unsure at all n locations
gctcttgtgtggtggaacatgctacaaaaggagagagcaagaaatgaagagccaatggttgatacatggacggagatgaaaaagatcatgangaagcggtatgtgccggctagttacttcagggacttgaaatttcagctccaaanactaacccaaggcaacaagggggttgaggagtatttcaaggaaatggatgtgctcatgattcaagcaaatattgaagaagatgaggaggtaactatggctcgatttcttaatggtttgactaatgatatccgtgatattgttgagctgcaggagtttgttgaaatggatgatttgcttcacaaagcaatccaagtggagcaacaattaataaggaagggagtggccaagaggagttttaccaactgtggttcttctatttggaaagacaaacgtaagacagatggcgctgctacttctagtatgttcacacctatcccatc

SEQ ID NO: 115958 - DNA, 458 bp, Glycine max
  unsure (1)..(458): unsure at all n locations
agcgtttggtacagagaagaagaattctttagatcaaggctagtaaaggatggtgtgaataactgctcaacatgattgacatgaaaaacanatccttgttcttatacactctttatgtctggtcaagaagaccatttataagatttatacacttttagacaaacttataaccaatttgaaaaaatcaaaacctctttgaagagttacatcttatgatttattagaaacagtctctggtaatcgattaccaaattagtgtaatcgattacacaaggcttttaagtgaaaggatacgactcttcacacttaaatttgaatgtcaacgttcaagggcactggtaatcgattaccaaatcattgtaatcgattacagccttatgaaaatcaatggaacgttgtaaatcactttgaaaactttttcacactcttttgctactggcaatcgactacactcatat

SEQ ID NO: 115959 - DNA, 467 bp, Glycine max
  unsure (1)..(467): unsure at all n locations
acacatnaaactcagcttaacctagaggagacgggccattccgagtgtgggagtatttctacgacaatgcctacaagattgacttgcctagtgagtataatgtaagtgccactttcaatgtgtctgatctatctctttctgatgcagatggcggagccttggatttgaggacaaatccttttcaagaaggagggagtgatgaggacataaccaaggaccatgaagcacttgaaggtcccatgaccagaggcagacttaaacaagcccaacacgtcatagagacaaggctggtcatttgtatagctgccattgatgatgattgaaagcccatgtggagaaagatgtatgcccatatgctgagacactaccaagacttcttattgttgctgaacgcccaaacttacttgaatgcgcaagctatataacttttaagtaataatttcttattgtatcttggcccaactgtt

SEQ ID NO: 115960 - DNA, 435 bp, Glycine max
agcttgtatgattatgagggacgcatcatatgtggtactaagtggcggtctggcgatggagcacaacgaagtttctacatccacaaagcgcgcataaacccaccatgccctgttgcccacctccatctgagctcacgtactcacacggggcccatatcctcgtttctctcaacaccgggtccccatgcatccttccgagctttcacagcatgcaagaataacaacattcaaacagcacaagctatcacagccaagcaaaacagggcagaggcagaaaactctgaccaaaacaccaaccaaatcacagctcttctcacttagagaccccaacaacaattccttcgatccaatacgttgaccgttggatcgactccaaaatattactggaagtctatagtacgtaagcctacattgtgaccattgggatctattaac

SEQ ID NO: 115961 - DNA, 336 bp, Glycine max
ctggtctgatatgtattatattcggatccttcattcatatgatccttagctcattctggggagaaactattctgatcaattgcattgtaatacccctgaatctatgtgttatggccataaagttcttctactctttagaatcaataaaacgcctctgcatgcgattaacaaggttgtacaatttttttttgttggtgtcgcatatgctgacatattattctatgtcggataaacgttctacgtatctggtgttggcatatagtacgtagcccaatatcataaagatctgtatctgtggttgctcatatgaatgcataataagggccatcttatatg

SEQ ID NO: 115962 - DNA, 422 bp, Glycine max
agcttcctatggtggaaggcgtgggaccttcttatgtcgggtagagcccagagatgacctcaccttacgacctgcaagggctcagcaaaccacctgagagctggacttgatcctccacaggatgatgactacccttattaagaacactaattatcctgatgctaagagagaagactcggcatcttccgttggagatcatgttttctctgaagtcactccatagactgcggcttgtcgagcattgaaagcctgagtactctctcctcgctgtatcgatcttgctccaattgttgatggactcggccttgagagatgccatactgcactagcactgtcacttgctaatcttgaccatgtcgatcatgtgtatcaactatctgaggatgtacatgttgcctcccaggtgatccattgggatgacg

SEQ ID NO: 115963 - DNA, 296 bp, Glycine max
  unsure (1)..(296): unsure at all n locations
acaggtgactgagatagacgagaatgttctataggagtgaaccaagatcgttccaggatatccaatagctatgcgtcgagctaatgacgctaaatgttccctgactgtgacgcaacccatacgttgttgtttatgtagtcttgcatctctagatcagcatgattgcttgagatcgtgctgacacagctatgcacagtgttgaagaacgggggttcatatgttttgtgaagacatggaccaacaaataacttagaatattntatgtggtgcatgtgctaagcgcaaccctcgcacta

SEQ ID NO: 115964 - DNA, 458 bp, Glycine max
  unsure (1)..(458): unsure at all n locations
agcttgaaggaggaagagagcatagtgtttctctcacgctgaatcgatgtgaacgtcgccatttctgagtgaaacagtggcagaaacaactatggtctagggagggaggacgcttctgtatttttattcgaagggggacgatttgattgggttcctcattntgtttttgggccatgggttctctatttgggtcaacatcatggatcatgcatgttttatntaataaatttaatgctcttatttatttgctttcttttaggaatttttttatccatataaattaaagagatatcaggatttacaagaactcaggtacattgctcaacttggatcccttgatttcttttaggataagaagaagagaggaaaaatgttttttcttttaaaaacaaattatggtatgtccaaccttaagtaaatgactaatttctcaagactagaatatatttaaagaattg

SEQ ID NO: 115965 - DNA, 460 bp, Glycine max
tgtgtcagaatatcttgctcaagctaagcaggttgataatcaatcgagttttctccccacaaatgttcaaactgatatcgatcaggcagaaacagatatcgataactctactagcacaattgttgataagacaaaggagaactcagccaacatacatgatctcttagattctgcgaggctggcccttatcataatagttgctgttatgctagtcttgacacttcttggttttttattctcaatttttggcatccagctccttgtgtatatcttggtaatagcaggatgggttcttgtcactggcacccttatattatgtggcttgttccttgttctccattatgtgacagcagacagttgtgtagctgtgaatgaatggatccagcatccgattgcacatacagctatggatgctattctgccttgtgtggacaattccactgcacaagaaacattgtca

SEQ ID NO: 115966 - DNA, 453 bp, Glycine max
  unsure (1)..(453): unsure at all n locations
agcttctttgggaccttgaacaagctattaactcctctntcagaaccatgctatgtgctcgcgactagtctctttcttcccttcgcaacttgagttcactattgctaccccatagagctccgcgaaatttgttccggccatactcttccttgcgagccctcttggtctcttgttcaagggctcttgcggtaattgcattctcttcccggaacccggcacactccttccgaacgtgtgtagcggccaacttgaacttctccttggcaagttttgcttttcctaactcgcttttgagagcttggacttcttcgtcctcttccggtgcttcanaactctcttcgctgacgacttttaacttggcgagccaatctatacctcgtatatgagctttcagccattcgtggcacccaccaatgatgccattacgaatacctctaagctcttgatctttcc

SEQ ID NO: 115967 - DNA, 482 bp, Glycine max
  unsure (1)..(482): unsure at all n locations
gcttgagattggtcttgccgtgaaagatcatgtgggttcaaaagaggaaaagtgatcatcctactngacgactgagaaaactgcggcaaatgaagagggtgagaaagaaggagaaacccatgctgtgactgccattcctatacggccaagtttcccaccaacccaacaatgtcattactcagccaataacaaacctcctccttacccaccaaccagttatccataaaggccatccctaaatcaaccacaaagtctgtctaccgcacttccaatgacgaacaccacctttagcaaaaccaaaaacaccaaccaaaaatgcattttgcggcgagaaagcctgtagaattcaccccaattccagtgtcctatgctgacttgctcccatatctacttgataattcaatggtagccataaccctagccaaggttcatcaacctccatttctccgagaatacgactcgaacgcaacgtgtgcttgtca

SEQ ID NO: 115968 - DNA, 461 bp, Glycine max
  unsure (1)..(461): unsure at all n locations
agctngtcgaaattgttcaaatcccttcatgtagaaaggctcacaatttagacatatctttaataaatagaaacaattgaacactaatgaagcaacttcatcatatatttgttagatacataacactttcatatttttcaagtatggatttagagacaataatttatatcgtcttatgcacttcctaggtgctctaatctgataaaactacgaaagaaataaacataattccttccattaaccagtagaaaacacttcctatagtgaggctataagactatactaaattgaaatttcaaagacccatataatgctaactaaagccccacaatccatccattagtttgtattgacagataaaattgtacaattgaagaacttctgcttagaatacctatatatacggcagaagctcaaccaagtgagaagtcagttataactgtctgacaatgatagttata

SEQ ID NO: 115969 - DNA, 431 bp, Glycine max
ggaacagaaccgaattaagacagacatgcaaacgactttgttatcgtaccctgatccctcgtgataatacgatatactagccatgtcctatcacgttctaagaatcagactagttcccactgttgaatgatcctaacaaagcatgcatctatgtgatcaaagcaaaagcatactaaaatgacgtactaatagcacaaagaacacacaaaacatcattaaatagataaaatggtatttacatcaagtacctacaaggaagaaccaacagaggatttagctctccatatctaggaagctttctttataacaaaaagaagagaaaaatgaaggattgaagacatacatgtagtgtggatgtcttctccacctctagaacctcacagtcactcacaaactcatcccaagctatcacgatgacttcctcttcaaac

SEQ ID NO: 115970 - DNA, 427 bp, Glycine max
agctcgctatgaagaatgacctcttcttatgccttacaaactacaatggtggagtgagaatgtagagctaattgtacatacgccagtttcgatatgcttctccattggaaaatatgttgatgagatactatttgaacgtgaccctacggaggctagccttctcttactcaacaggccttgttagtatgatacggatgttgtccataatggtgtccaaacaaaatttcatttgtacataaagagaaaatatgtttccctcacacctttgtctccaagtgaggtgtgtgaggatttaataacaatgagagtgataaaacaacatgagagaacataatagaatgaccgactgctctaacgagagagacacatgttccgatataagagaaagaaataagcgacgataaaacagtgaaattgtctaaaagat

SEQ ID NO: 115971 - DNA, 455 bp, Glycine max
  unsure (1)..(455): unsure at all n locations
agcttgttngacatcgttcgcgtgtatgatatccattccacaaggttngaagtagaggagaccttcaatcctattacgcaacgtggcagacaaaagtgggcagttaacttgaatggtcattattgtcaatgtggaaggtattccacccttcactatccatgttcacacattattgcagcttgtggttacatgagcatgaactactaccaatatatagatgttgtttacacaaatgaacacatcttaaaagcttactccgcacaatggtggcctcttgggaatgaagcggctattcctccttctaatgatgcatgaacacttatccctgacccaactacaattcatgcaaaaggtcggccaaaatcaacaaggataaggaatgagatggattgagtcgaaccatctgagcaccgacaaaaatgtaatagatgtggagccgaaaggcataacaggcg

SEQ ID NO: 115972 - DNA, 340 bp, Glycine max
  unsure (1)..(340): unsure at all n locations
agactngtntattcgtttagtgttgatttatctatcttcacagtttagtcaatttaagatctcttactgcggtcagaaggataaatggtctcttaatgagctcatntcatactgtgtgcaagaagaggaaaggttgaagcaaaaaatggactgaaagtgctcatgttgtgagtacctctaaagacaatggctaaaagtaaaatgactgacnatcccaagaatgaagctgctaatggtccaatacattaaatactaaatcacggtgacaactatatttgtagcagtaagcctggacatggtaagatgatatgtaccaacatcttcttggcgtcctaaaatg

SEQ ID NO: 115973 - DNA, 396 bp, Glycine max
  unsure (1)..(396): unsure at all n locations
agtnctggagaaaacgtgacagtccattttattctatggncaagtaacattagataggggtttctgtatcatcgaaggatataacaaatagaatcgtcgcagatgttgatatacagtgtagccatagtcttgattctattcagactttgttttgtctgattcgaggaaccatctgtatggtccgtccaaactatgtaatttttatacctctggtgctccaattatatatatatatatatatatgtatatgtatatattttgcgcagctaaaatattatattacaatataatatatctccagaggttgctgcacacacagaaatacatagacctgtgaagtaccttgatatccaaataatatttagtgcttatcgcttaaaaacatttcttggatac

SEQ ID NO: 115974 - DNA, 381 bp, Glycine max
  unsure (1)..(381): unsure at all n locations
tcctcgggccatntcctgcgaacgcaaacatgtggaaagttagttttactagtgggatactattcttaagacagaaatgacatacaacctcctcccataaatacaaacatcaatgtcaatttagaggaagcttatgcgcatatnttcttacaaacgttctcttgcacaagacattctattaaccaaaaaaatgcactcatatacaatcaaggcagcttcgttacctagattatttacacatacttccaaggtgtatttgttacttacatcacacaccttcttggctaaatcacatacatgcatactcaaaacatattgtggaccaaaaattgcacatgtgcacatcatggttattctaatacctattcatacacaaacttc

SEQ ID NO: 115975 - DNA, 415 bp, Glycine max
ctaggcttggacagtaacgacagaacttgaatcgaacatcttactctaaattgacagagattgggaaaaatgataaatggaccttaatcttcatattatgttataaatggacgatggtatcgacaaaaatatatagacaattgaacctgatttgaataatatggcaaaattgatagtgcatatttgggaaaaacctttccattaataagtacttgccaattaatattgtctaataaaaaataataaactctctaatctattttcacttcaatccacgtgtaatattatatgttatttgataattttgctcagtgcttacacactcctcacatgctgatgtctctttctagtaccatcaagccacacgtatcgctttctaattgtcagatataaacatagagtgatgatgacccca

SEQ ID NO: 115976 - DNA, 442 bp, Glycine max
  unsure (1)..(442): unsure at all n locations
agctnntctagctttcattggtgtagtttgatctccttttggngctctaaattgtgggaatgtgctcaaatatatggggcaattttggtttgttttcttgcttgattaggttgaattaggggtttgtatgggatggccctatgcttataatgcattttggaacaatgggacatgccacattgtccccgttctcttgctattgacgcctaaacgcgcgcccaccaagtgttcggtgaaatgcctcaatggcattagcgcgtgacttttgtaggaaacaacccatggggcattttggtttgtacatattttctatntntggaatatgtattcattcccaaaaaaggctagagtaattgccccacatatatcctaggcctaggaactaaaattttatgcaaaaagaacacaagtggaggtgcatattgngtaaagttaccctttt

SEQ ID NO: 115977 - DNA, 481 bp, Glycine max
  unsure (1)..(481): unsure at all n locations
gctaggctanatagtctaaactntcgtaagctatataagctaagtctatgtccaacaagagtgatctgaggatgaagcttagtttaagttagtctaaacatatgagggctgtctaaattaagccaagtccaacaaaagggatctgaggataaagcttggattgattcagtctaactagggattgaggtttagtaatctaggctacatcatagaacgcaaaagcatgattaattagagaaacatctttatatacatcagctggtttgttagaaagacccaacatctttacctactgttgccaatcttacttacttgcatttttactattgttagcctagacttagtttaattatgttctaaatcatcaattatcaatggttctttcaacaatgccttatttctgaatttaacttttctaagactagttccctaagttcgataatcacattcatctatgttatatttaaatacttgacgatcc

SEQ ID NO: 115978 - DNA, 468 bp, Glycine max
atccttaagtcacctgcggcatgcagcttacgtacacccaatctccaatcttataaatgacatgtcagcgacgggcgttagcatacttcttcattgtttgttgggctctactcaaatggaacttgagttgacgaagagcctcatcccaatcaatgagtatcgtagccaaaaaatccaccaagggttccccattcaaataatgaagcacagatggaggggattggccaaacacaacctcaaatggtgattttcctgttgcaaaatgtgaaaaggtgttataccaaaactcggcctacgacaactacaaataccatatggaaggttgctctgaagcaaaacaatgaatgaaggtctccaaacaccgattgaccacctccatttggccattggtcagggggtggtataagttgtactcattctcaacacagtgccctagagatgaaacaattcagtccagaaattggtgag

SEQ ID NO: 115979 - DNA, 367 bp, Glycine max
  unsure (1)..(367): unsure at all n locations
actatgaatctcaagcttctaagtgagatcaggtgcaacgatctcgctgagatttctctcacgaggtggaggttgagcgatgttctcagtatataaattagttgtgaaatgttaaaaattagaatattcagaatcaccctcaacagaatgctcagaatgctcacaatgcacaaaatgaccaggatgcacactatgcctaactaatagatgattaagattaagataaaatatagtggaagagaagatcggaatagaaaaatcacacataaagaaagatcgtgaatntcacacaacagatgatcatggacaagagattatgaatctaaaacaacagatcgctgccaacccaatttacttgccagagata

SEQ ID NO: 115980 - DNA, 447 bp, Glycine max
agcttgcatgtagaagagatgaaattttatatgctaatcttcaaaatcagctgcaggatatgagcactgaagacaatctgtttaatgcacacctagatatgcatgatgaaaatggatccatgaagcatgatcctgatataactactgagtcaatacgcgcattcgatgggaaccaatttctactgagtgataaatcataaagtccattggttccacataaccggaagattctcattgatttcttgcatgaaattgcggaatatcatgaaacaacttataatcatgatgtcttggatctatataatagaaatcgttttttactttcagccaggaaaaatgctttatgttcagctaatcactttatatggtatggagtatttctagtgcattccttggaaatatggcatcctaaagctatatgactatctgaagacagaactatggaaa

SEQ ID NO: 115981 - DNA, 366 bp, Glycine max
taccaaaacaggctctgaggttattgtgatcctaccttgtttctctctgtagttggtgctctacagcatgctactatcacacatccagtaattagtttctctatcaacaaagtttgtcaattgatatgtcagaacaacattgggttgctgtcaaaagaatcctcaagcatctaaatggcacacttcattttgggctggaactggaacccattgtttctaccaagcactactctgttcatgcctcttgtgatgctgactgtgcttcagatcctgatgatcgaaggtctacctcaggtgctgctgcgttcttaagcgcaaatctcgtctctagaggtccaaaatcaatctattgtggtatgtacattc

SEQ ID NO: 115982 - DNA, 138 bp, Glycine max
  unsure (1)..(138): unsure at all n locations
agcttgagatgaggaagagttgaagggtttatttttctgctnnacattttagaccgcagaggggcgatttgtgatatatgtcccacggggtaacgagacctccactacccaatgaggattgctattgcccaaaatcat

SEQ ID NO: 115983 - DNA, 303 bp, Glycine max
  unsure (1)..(303): unsure at all n locations
atctatgtgtgcgaaacctctctatattcaatggctnttctagggttgaaaggtgaaatttagaatgaggtaaatttgaagcaaactctcacctcacaccagtccataacatctatttagacttgttcaagctggatttacacctaaaatctcaccgaatcaaaatatgactcttcaacacccgaattttgccctagaaatagcttctggttcactgaggtcatgtgttttctatctagctcagcctaacctggtttacatgtgctaaatgacatttcaagcgtaatttaactcactttaacc

SEQ ID NO: 115984 - DNA, 455 bp, Glycine max
agcttgtaggattatggggtacccatcttatgtggtactaggtggcggtcgggcgagggtgcacaacaagtattccacatccacaaatcacgcataaagccaccatacactgttgcccacctccaactgagctcacgtactcccacgtagccaatatccctgtatgtctcaacaccgggtcctcatcaatactcccaagctttctaacatcatagttactcaacattcaaacaacacaaactatcacagcaaataaaacagggcaaaggcagaatactctgcccaaaacaccaaccaaaatcacagcttttctcacttaaagaccccagtaacaattccttccttctcatttgtggaccgttggatcgactctaatattttactataagtctctagttcttaagcctacattgtgaccagagggatctactatcaaacgtccagaactgattctg

SEQ ID NO: 115985 - DNA, 365 bp, Glycine max
ctcagcttaacctcatcgtctctcatagtctgtagagttgagatgcttatgatcccattactgcttccactaagctctctgtcctttcttcatgccgcatcccatgccttgcgaactccttggagtaccctcgcgttgtggtcattgaaaccccgtgcggtgaaaggcgtgatgctttcatctgatggcactcctctcatggggtagccaagctgtcttatggcgaggacgggattataattaatacaaccccttgttccataatggaacatttggacatccttcgcatgaacatagaattctgatacttccttccttttagcgagggaaccaattaacagacgcctctccatgtttgccaagag

SEQ ID NO: 115986 - DNA, 286 bp, Glycine max
  unsure (1)..(286): unsure at all n locations
agcttcttttggacatggagggagctattatctctcttttcannaacctgctacggggtggggatctggagtattcactccctccgcatacttgagatcactattgcttccctatatagagtctctaagattgttcctgccattcattttcttgcagagcgctctttggtgccttgttcaagggcctcctgctgcaatatcattctccatctcgtaatctgccacactaattttcgatcgtatgtgacattcgtacttgatcttcggcatgggatgatttgcctat

SEQ ID NO: 115987 - DNA, 429 bp, Glycine max
  unsure (1)..(429): unsure at all n locations
ngagggaacataatcgagaatcaattgaagcanacaataatgtcgtagaaaatagaagacaccatttgaaaagaatattgaattcaaacaaagccataccatttatcacaaggcttacaccagaaaggaacacacaaaactaataaacaaacaagaacgccataagcctcatataaccttcactttacaaatacatacaatgaatcaatcaatcatcaacatataaccacgaacaacaaaatcaaaccctctnttctaaattgcattggtgaaaatgaaacaaatcagtgagagtgagcgagagagaggcacctcgagtttagcagatttcataacgatggggatgtatatgagaacgatgcacaccgtggcaatggaggtgttgttgcttcactgcttgtgacgacaataanggccatctctcatact

SEQ ID NO: 115988 - DNA, 188 bp, Glycine max
  unsure (1)..(188): unsure at all n locations
agctnaattaagagaagctacgttaattatgtggttcctaccaacaagttggtcggcctataaatttacttctacctcacaacaattgccaatcctcaatctgaattgaatttatcatacatatggaaaaacttctatttgtaactaaaaaggaattcattgtctgaaatccagtatcacaatggaat

SEQ ID NO: 115989 - DNA, 419 bp, Glycine max
gcacatcgttcgcgtgtatgatatccactccacaaggtttgaagtagaggagagcttcaaccctataacgcaacgtggcggacaaaagtgggcagtaaacttgaatgatcgtcattgtcaatgcggaaggtattctgcgcttcactatccatgttcacatattattgcagcttgtggttacgtgagcatgaactactaccaatatatagatgtttgttatacaaacgagcacatcttaaaagcttactccgcacaatggtggcctcttgggaatgaagcggctattcctccttctgatgacgcatggacacttatccctgacccaaccacaattcgtgcgaaaggtcggccaaaatcaacaaggataagaaatgagatggattgggtcgaaccatctgagcaccgaacaaaatgcagta

SEQ ID NO: 115990 - DNA, 468 bp, Glycine max
cacccgtcatatgtggtactaggtggcgattgggcgatggcgcaaattaactcccccacttccacaagtcaggtacaagcataccatccccagttgcccacctttaactcgagctcacgcactcctacgtagcccttatcctcgttcctctcagcaccggctccccatcaacccctccaagctttcacaatatccaaacaattcaatctcatttatcatgaaactatcctaaaccaagaaaaaagagtagaggcagaaaactctatccaaaactcattcaaataccacaactttccttactcatataccccagtaacattctcttcgttccgattcgttaaccattggatcgacttgaaaattttactggaggttcctagtacataaatctacattttgaccggtgggatctgctagaaaatgcctggaacccgagatgtactactcttcccatgactaacaatgcac

SEQ ID NO: 115991 - DNA, 477 bp, Glycine max
  unsure (1)..(477): unsure at all n locations
agatgagatagcaaaagactggtgagaaaaataatatgcatttttttctttattacatatgcatttggttgtgcgtgtttatattaagaatgggccacgacattaccttggtggcattcaatgataatngtacagntagttgggtagggtagaataantaaagagtggggatggganaccacttaaccactcatttgtacaatttagattatagtggggagaagttaaaaatattattattttctttcttttattcatagnttcaaaaatctaattggtgatcattcccgaccagtaaaatattgagttaccataggttaatgatcaaactagtanggtattaatgaaccacatggtctgatctttatttnntaattttttatacactatcttaaaaaaatccaaaaaatcagttaatatattttccacagctcactcttcaagtcaaaggaagatatgaaaagataatagagtaac

SEQ ID NO: 115992 - DNA, 445 bp, Glycine max
  unsure (1)..(445): unsure at all n locations
gcaagcttctcnncccaatttctatagataggggtgagatgtgaagtttaaatgggttcagcccctttggcacttctctctctttcgaatttgcttaagaaaattgtttccgtgaagaaaatccaagccgaggtgcttccgtaacccttccgagatgtttccgtaagcaaatgcgtgaaggtttgcgttcgttctttaccggtcttcatccgctcttcgttcttcaacggggaagttttcgaatccgagactttcaatttatttcttgtttttttaagctttcatctttatttcgatcattttttatttctnttcttacgtctttaacgcgcttttaccgtttatttaagccgtgttctcacctaataaatgataaaatgagattcaaccgatcatttgtgttgaaatctcattctatcacttttaaaacgaaatctattcgatc

SEQ ID NO: 115993 - DNA, 431 bp, Glycine max
gcttcagatccgatctggaggacttggaactgccttcattatgcagtaccagtacaatacggacatggctcctgattggaaccagcttcagggtatgactaaacgagagcatgagtccattaaggaatatgcccagagatggagagatctcgcagcccaagtcgtaccgcccatgacggagagggagatgatcacaattatggtagatacgttacccacgttctactatgaacagctgataggctacatgccagctaactttgcggatctcgtcttcgtcggagaaaggattgaatccggactactaaaaggcaagttcgaatatgctgccaatatggcccccaacaacaacagaagagccccagtagtgggcgcaaggaataaggaaggggacgcccacgcggtcaccactcgcccaacatggatgaaag

SEQ ID NO: 115994 - DNA, 456 bp, Glycine max
  unsure (1)..(456): unsure at all n locations
agtctcacgattgttacgtgttcatgcatcaattgntagccgnggctatatgagacatcttgccaaacaaagtcatgttaacgataactcgcctatgctttttcttccattctatatgtaacaaagtcattgatccagtcatgtttaatgagttggaaaatgaggccgcaattatactgtgccagttggagatgtattttccccctgctttctttgacatcatgattcacttgattgtgcatctggtcagagaaatcaaatgttgtggtcctgtttatctacggtggatgtacccggtngagcaatacatgaagatcttaaaagggtatacaaagaatctatatcgtccataagcatctattgttgagaggtacattgcagaagaagccatttgattttgttcataatacttatagaaggctaaagctgttgtgctttctgagtcttgcatgatga

SEQ ID NO: 115995 - DNA, 410 bp, Glycine max
ctcagcttacatatcaatgctgacgtagttatgaaggtgacatatacttcatttacaaatatccgatcaatggatcttcttggaattagtgcgtatacaggtatgctggatgcctatactttataatattatggctataatatactttataatattatggccataaaccaatacatagtaattattataggagatccatataattaattgagtagatatagagtataaatgtcctcaggtgtaaattcccaatgcacaatatatctgaagaaagttctagcagtctaatcataattgggaagtgagaaaggtaattatgattattaaaatgcactataattaataaacaattgattacggggaagtgtaaaagcctccaactaatacacaacaacaatatttaaatattt

SEQ ID NO: 115996 - DNA, 496 bp, Glycine max
  unsure (1)..(496): unsure at all n locations
tcagagtcacctgcggcatgcaagccttgaattcattctatgcacccttaggtgtccatgcttgctttgtatgttntcattttcattcttctactttcgatattctttttcttcattttaagcgagtttcgactgatcgtttatgccgtaacctcacttaatgaatgtataaataaatttcaactgatcatttgtgttgtaatctcggttattagcctttaatataaaattcagccgatcgttcatgccgtaacctcggttaaataaaaaataataaaataagaaaataagtgtcaaccggacattttactttgaaagttctccttaaatgagtggagaaataaccaagtaaaactaaggctaaaatcagctcacaaatcaagcatttgccagcagaatggtcatttgaaaccatttcaaggtccaacgccttaacggtcccttttactttatcagtgaaactaaccgtttaaagctaaaataacacctctatact

SEQ ID NO: 115997 - DNA, 528 bp, Glycine max
  unsure (1)..(528): unsure at all n locations
tcagcttacgactcattcccgtgcatgcttttgttgtcatatatgaaatgatccaaattcaaaaggaaaggaaagtggatcaaagagaaagaaccctactaatattacatggtagttccaaagaaccaaatctggtgaatatatatttcaccaaaaaaaaataccttctagagaatgagaatagaatgataagacatcatgataaacatgaaaaacagacttttagntattcactgggcttacattgcttcatggntgcatgggagcctcatccagtggcaagaanaanagggtgataatataanagaaacaacaacatttcgttatcatcatgctaattagcagaanggttaatatctttaagaagtccccactattgctgcatgctcggtcgcttggaaggaaggcagcagtgcaaagataccaattttaagggcctnctncatctgcacttcttgctcagtatcgcgaatttttggatcgatagcccttgaaagctttgtctttctcactagtcctctgacccac

SEQ ID NO: 115998 - DNA, 380 bp, Glycine max
tacatatgcatttgtttgtgcgcgtttatattaagaatgggccagacaattaccttggtggcatcaatgataaattgacagatagggggttggttaatataaagagtgggatgggaaacccttaaccctcattgtcaatttatattatagtgggagaagttaaaaaatataatttctttctttattctaggtcataatcttattgctgatcattcgaccggctcaatttgagatccattgttatgtcaactattagtttaataacacatggctgactttttttaaattttataccatcctaaaaatccaaaacagttatttttcccaactcctcttcgttacagaaattttaaaaataattgtactacgtttgagatcat

SEQ ID NO: 115999 - DNA, 449 bp, Glycine max
  unsure (1)..(449): unsure at all n locations
aagcttaagaataatggcctcattatactatttgtttcccgaaagcaattcaattaataggcctcccatttttaatggagtgggttaccactattagaaaacccgcatgcaaatcttcatagaggctgtagatttaaacatttgggaagccatagaaatagggccttatattcccaccatggttgctggaaatacaacaatagaaaagcctatggaagattggagtgaggaagaaagaagactagtacaatataacttaaaagccaaaaacataattacatctgccctaggaatggatgaatactntagggtatcaaactgtaaaagtgcaaaggatatgtgggatacactacaagttacacatgaaggcacaacaaatgttaaaagatctaggataaacacattaactcatgaatatgaactatttaggatgaatgcaaatgaaagta

SEQ ID NO: 116000 - DNA, 433 bp, Glycine max
  unsure (1)..(433): unsure at all n locations
ataaactcacttttccatccttccaaatcttctaatatagaagagaagcccaaattgagtaagcagagatnttgctttntctattttcctctcctcttaaaaaatgaacttgttaacaaaaaaaatattaaatcactcatccccttttcttctcaggggatgccaagctttagtgaaactatataaaaaaataaattaaactcacttttccacccttccaaatcttctaatatagaagagaagcccaaattgagtaagcagagatnttgctttttctattntcctctcctcttaaaaattgaacttgttaacaaaaaaaatatttaatcactcatccncttttcttctcttccttccatttttctcanaccaaacactctaaattaaagtagtagaagagcatggtagtcgaagatgggaagagaaaaaaaaa

SEQ ID NO: 116001 - DNA, 389 bp, Glycine max
  unsure (1)..(389): unsure at all n locations
agctngtgcttttatgaaacggtttatcttgtctagttgaagtatggaagtaaccatctcgctaagaattggggctaaagatggatcgtgtgacatctctccttcgtctacggccaaacacatttatgggtgttgattccctgttacttccacgtttaccttggcggagatgtcatggaccatgttgaaaatctgaatagattcaaccccatatactgtgtaaaaagtcacaatacctctatcgtgcatctttctcatacatccatgttgatcattggttgcattgctcattgcattctttccttgaaaagaaaaagagaacctattcattgttataaaaaagaaaatagaaggcgtgctntactgtgccctcaccgaacctttgctag

SEQ ID NO: 116002 - DNA, 441 bp, Glycine max
  unsure (1)..(441): unsure at all n locations
nggagaggatgctncaatggaggaacagaaatanggagagttatatggatgtnggagcacgaaattgatggaagaataacggagagaacttgaactctgagttgtgtctcacaagactctcattcatcaaagttacaacgagtgttacacatgcttctatttatagactangtagtttccttgagaagctctctttacaaaacttgcttgagaagctagagcttagctacacacacccctctcataactaagctcacctccttgagaagcttcctttagaagattcctaaagaagctagagcttagctacacacacctctctaatagctaagctcacccccatgacaaaaagaaacatgaaaatacatagaagaagtccttactacagagactactcaaaatgccccgaaatacaaggctgataccatatactactagaat

SEQ ID NO: 116003 - DNA, 378 bp, Glycine max
  unsure (1)..(378): unsure at all n locations
atcctctgagtcacctgctgcatgcaagcttatgggaagattatgtgatccttaagtttggattgcgaagatgtcgagatacaacccaaagaatgatctcaagactcaatcttgatcaaattcaacaatcngagaagtggatttcagattaagacagatgattccgttcctgaaaaaatcagaagacttacaatgggaagtattgaaaagactttttacgaaacaaacatagcacaattttgtttttcaaaagagttttcacataattttctatgttaccagagttcttactctctagtgatcgattaccagtttcctgtaatcgattacttgtggcaaacgttgatttcaaagcttttaactgaatttacaacggtt

SEQ ID NO: 116004 - DNA, 263 bp, Glycine max
aggggtagagaggagccggtttttctttaccagccgggggagaagtcctttccaggagcgaggagccccccccaaaacaaacaagaggatcctggatgggtaccttttgaacaccaggcttgtaatcctttaaagtagaaagccgaaaaggactaaacagggagacctatggaccaacatgaaaaactccactggaaactgggaaaggactgccccttccattatccaaacgatgggagaatgtaaagagtgggaacgcacaa

SEQ ID NO: 116005 - DNA, 302 bp, Glycine max
  unsure (1)..(302): unsure at all n locations
agcttgngcgattccagtctctttgaaggttgcctcttactgtggcgcttctgccgagatcattggtgcgctggtggggctactgccggttctggctggtgcatgaaacactggtgacatggtggaagggccctctcagaaagaacgatagagagctggctggattctcctgctacaccttaaaatgacgctggcggcacgccagtgtttctgctctcaggaaaaaaagcgtctctcacgctccacaagacacatatctttatcgaacggcctgatcatagacagttgttctatgggcgttc

SEQ ID NO: 116006 - DNA, 491 bp, Glycine max
  unsure (1)..(491): unsure at all n locations
tgcggcatgcaagcttgacagtctcanatggtatacatgattcttttttcctgttgggaaaaactaaaaagaatatcctaggntattgtatttcattataaattataaacaaaagttcagccagaagacaagagttacatgtgataagataaatagtcttctaaaatagtgtgtttggaattgcatcaccaatccatgatttcgtgccaaataatgtaaaatgtgcagaagcaactttgttgcttcagagttgatgcacacacatgctggtgtgaagcatgcatcgaaataccctaagggccaaaagctgaatgtcaaagagaaatcaattctgaattctaacataagggcacttgggcccagagaagtttgcttaatttcaagagtagatcatttctcattaactaattttcatcttattctgatgtgctcaatagaacatatcactgcgctcaacanaatcanaactgacagattatacannatgatta

SEQ ID NO: 116007 - DNA, 213 bp, Glycine max
  unsure (1)..(213): unsure at all n locations
tataaacctttcaactgaaaatccganaaaggacaaaacacagagatcgatgtacaacaggtgataatttactggaactgggagagggctaacatatcacatttttcccctgaagcgagaaagtaatcagtgtaacacggacaatacctcccaaaaatatctactatataatgctgtattattctgactatggttattattaactttgactaa

SEQ ID NO: 116008 - DNA, 230 bp, Glycine max
gtatgcacacacaataagctcagagggcgtgaggccattcaatacctacaagagtgagtggaagccagagactctatccgggagtgattctagatccacacccttcgttgatcatagcgcgatcgacattctctacgagcgagttcttagcattggatcggctgaaattttactggagttcctagacataaatcacatttgaccgtgggatctgtagaaatgccggaccg

SEQ ID NO: 116009 - DNA, 338 bp, Glycine max
agaggttacttcctcgttgacatctattgtctagaatggaattgccatgacacagttattggtactgtctttgatattcggtagctgatattgtgttgcgggaggtaatttccattggattaacctcccatcctttacgggacaataatttatgacatttgttgttggatcacctatgatgtcttgtttcccagggtaatctatatcctttcttatggtattagcctggaaccaatcaaagagaaggacattaattttgactctttctaccaattcgtagaacttgtcttggattcgttttctgcctgtacccttgccatagttggaaaaccatctcc

SEQ ID NO: 116010 - DNA, 453 bp, Glycine max
  unsure (1)..(453): unsure at all n locations
cttaactcagctaactttatcatgtacggtgatactgtttgtcctaatggttattgagtcagttggaacaaagaataagtgaaatcatttggatctttacacaaaattggcaccaaccagccaaattggcttccttgtacgcctaaaaacacttagggtacggcctaagtgtgacaagggagcaggctattggaagttggtgcttaagcgtcccctgggtgcactttaacacgagctaataggaagggaaagaggatcacacttaagcagaggataagtcgtgcttaggcgtgactacctgtcaagttntcttttgtgcatttcatttgaatatcaatcttaaatgcttcttgacatgggtgtaaaccttaaatganatagaatgagttgatttcttgggtattcttatgtagtcacattcatatgttaagatttgtgtttgatgatggaaac

SEQ ID NO: 116011 - DNA, 220 bp, Glycine max
  unsure (1)..(220): unsure at all n locations
ttaagcacctgcagctgcagcttaaaggaaacttcaataaaacgattaatatttgatataggattggaaaagatacatttgatttgatttgatcaaggacccttttacatctgactttcctctatttataatgataatagcaagcatntgtgacttctatttaagggtgaatgcacatgttaggatgaagggggcattncccaactttccattaaaataa

SEQ ID NO: 116012 - DNA, 451 bp, Glycine max
  unsure (1)..(451): unsure at all n locations
ctgcagcttatgcgcatacttcttacaaacgtttattttacaagactattttataactaagaaaaaatgcacccatatacaatcaaggcaccttcgttacctagattatttacatgtagttccaaagggtatttgttacctacatcacacacatttcctttgctaaattcacatacatgcatactctaagcactttggctatcaaaaattgcattcgtgcacatcttggtatttctaatacctatacatacacaaacttcatgacgaatcttgactatctacacaataaggtgctacatntcatgccctctttttttcaagtgttttttnttttttactaccttaagccgcatgcaaattcaagtatattttcttttgctcactataaatgtattcacattaaaaggtatttttgtatggtatttctttacataatatgcaacatatttat

SEQ ID NO: 116013 - DNA, 253 bp, Glycine max
  unsure (1)..(253): unsure at all n locations
ttccgctcctgagtatgacagtcaccgctttaagagcgctgtacaccagcagcgcttcgaggccatcaagggatggtcgtttctccgggagcgacgcgtccagctcanggacgacgagtatactgatttccatgaaganatanggcgtcgacggtggacatcactggntactcccatggccaagttcgatccaaaaatagtccttgagntttatgccaatgcttggccaacagaggaaggcgtgcgtgacatg

SEQ ID NO: 116014 - DNA, 445 bp, Glycine max
  unsure (1)..(445): unsure at all n locations
gagtcctctcacgaggtggaggttgagccatgttctcagtatgaaaattagtagtggaatgctcaaaattagaatatttagaatcaccctcaacagaatgctcagaatgctcaaaatgcacagaatgaccaggatgcacactatgcctaactaatctatgaaaggttatatctatttcaggatcaaagggttgtaaatcacctggattgcccctagtcatgcactatatgcagcaaataatgtggttctcaacagcacctaacaagggggtaaaactacaactatagtcaaacgatatcaaaatgagctgaaattttgtgaggaacaccctaaaatcatgaaacgataacacaaaaattntcaaacaaaaattcaaagtctaactatgaaaaatacctaagcanagtttagaaaaataaggcaatagtacttataanaaacttag

SEQ ID NO: 116015 - DNA, 303 bp, Glycine max
  unsure (1)..(303): unsure at all n locations
tcaagnatgcttggtagacatgcaatgagaacattacatttttttttattaaccttgcaagttttagagccaatagtggattttggagaaccagtggaaggctcaccanacaatgggttagttggatgatatgtaacactcttgttggctatgatagcttcgaagacatgctttatgtcattggtggtcatgacaacttgtcgaagtgcctcacaatcaacatgggcatatgcctattcgatggaagggaaatgttgcatttggagcacataactgcagatgttgtcagacgatcatcaagtc

SEQ ID NO: 116016 - DNA, 459 bp, Glycine max
  unsure (1)..(459): unsure at all n locations
agaccacctgaggctgcagctgcaagtgctnactctatcttgtttcactgagttcaggagcaccattgctatcangattcatcatgtagaaagcttcagagactctggacccaacaattctctcaaactttgccctcatgtacatgatttcaccctctgaccctactgcttcagctccactattattattattattactattatttcctggcaaaacaccagcacccattgaaattggttcaactgctttgagaacatcccaatcctttggtccacactctcttctggtggcaaagccacacttcttgccattgcagtaagtcctccacagaggctcttcaagcagcctcacatggttcttctctggttctttctccttggcacattcaagggcaattctgaccaacccggacgccatctcgcgaacaagaacacttattggcgtagccagctctatga

SEQ ID NO: 116017 - DNA, 312 bp, Glycine max
taagcttatgcttagatcttaccgaatactataatttgtttgattggaaaatcttatgaagaagtggaattgcactgttttaacagggaaaaacaacagttcagtagtgattgaaactagattcaccataaattctctttcatgttaagcacaggagaaaattttaaccagaaaggcatgggttcctaacatgacttagatcaactgggcatacacatattaaacctgcaaaagcgatacatagcccttcacgttttttaagttagatgaccccaaaaaaatctaaactgtctagaaaacatgtacattcat

SEQ ID NO: 116018 - DNA, 62 bp, Glycine max
tcttgtgtctactaggcactaattcaaatgttctgttcctgtggctgctctgtacatgctca

SEQ ID NO: 116019 - DNA, 465 bp, Glycine max
agctttgagccaaaatcctgactcattcatattccttgatcccaggtgagaatgtcaatccttaccctctgaagcaaaaaatagaatagaatggaaatttcctatcaaagataaagagaaggaaatattccaatgaaagcaaaaaaaagataagaaggaaaattcctcaatccaagagtgggagaaagcaaaaagaaaagaaaggaaattcccaatcaaagaatgggagaaagtcaaaaaggaagaagaagaaggaaagaaagctcctgatcagggatcgaaggaaaaacataacaaatgtgcagagaggtctttggaccggacaatatcttaacaatacataattgtcaccgaatgaacaaaaaagatagaaaggaaaccacgacctaaaatggtcttctccctttaataccaacacaaatccctgcgctatcgacttttctccccgactaactaaaacataaa

SEQ ID NO: 116020 - DNA, 396 bp, Glycine max
  unsure (1)..(396): unsure at all n locations
actcagcttaagaattanatgtcataactttatttctaagtcctattatgcgcataatatatcgagacgctagacattgaacaatgaaagcgcttgaaccatccaaatagtcataactgttcactcggagggtcgactaacgcgcataatatatagagacgctcggaattgaacaacggatactctcgagaaattcaaatggtcataacttctaactcggaggtccgattcatgtgcataatatatcgacactctcgaaattgaacaacggaagctctcgagaagatcncatggtcataacctttaactcggatgtccgagtcaggcgcataatatatcgagacgctcgatattgaacaatgaaagctctcgagcaatacagatagtcataacttt

SEQ ID NO: 116021 - DNA, 468 bp, Glycine max
  unsure (1)..(468): unsure at all n locations
agcttcatgatgatgatgaatcattattgtttcaagttgttntgatgataacaaagatgatgactaatagcccaagagaatgatttcaagattgagtcaagaacaattcccaagatagtgatttcaagattgagtcaagaacaattctagaatcaagagaaatttgatttcaagattcaagaatcaagtttcaagattcaagactcaagattcaagaatcaagagaagactcaatcaagataagtactaaaagtttttcaaaacattgagtatgacatgaagttttcacataagcttttaccaaagagtttttactctctggtaatcgattaccagtttattgtaattgattaccagtagcagagtttgtttcaaaagctttcanactgaatttacacgttccaataatttcaaaatggtgtaattgatacaagatttggtaataattgccaggtgttgatgtgaaat

SEQ ID NO: 116022 - DNA, 344 bp, Glycine max
  unsure (1)..(344): unsure at all n locations
actcagcttncataacatgtgtccanacgaaccctcatggacttcctctatcatgtggnttgcctctctggcatctacgcatcacatgagggtcatgtcatggtttcatttgcacacggcggtaccactcacaaagaaaccagtagccaatctccttaacattctcttgtcattgtcggaaatccctggtggatattctttgttctcgacatactgttngatgtcaaaataccacagtttcccatcttgctcttcctctatcgcacaacaatgtgccggcttgccccgagatctgaattcaatttacggcagatccccatgtgggggcaagtgaaacatggatg

SEQ ID NO: 116023 - DNA, 491 bp, Glycine max
cctctcagtcacctgcggcatgcaagcttgtctcacagagattctttattgatttagcggctgaaggaaccagttcctctcccgaatatgacagccaccgttttaggagcgctgagcaccagcagcgcttaaaggccatcatgggatggtcatttctccgggagcgacgcgtctagcttagggacgacgagtataccaacttccatgaggagatagttcgtcggcggcgggcatcactggttacccccatggccaagttcgacccagacatagtcctcgaattttatgccaatgcttggcctacataggagggcgtgcgagatatgtgatcctgggtgaagggtcagtggatcccgttcgatgcggatgctctcagccagttcctgagataccctttagagctggaggagggccacgaatgctagtatggccagatgaggaaccggtccgacgggtttgatgaggaggccatcacctagttgctatgtata

SEQ ID NO: 116024 - DNA, 312 bp, Glycine max
gtgccatttcggaagaattaagccaagcccctactgtcgaggggcaactcccaccttatgaagactatcccgggcaagacgatggggaaggagatacccatcttggccccctactccacctcaaagatccgtccccgcatgaactaccccaaccgaacatagtccgtcataccccggcctcacccacacccgtaaaagaatttgttccctttgcggaagataagggaaagattgacgcgcttgtagataggttgagagcagtcgagggcctcggcaattacccattctcggatttagcggatttatgtctcg

SEQ ID NO: 116025 - DNA, 54 bp, Glycine max
atccgtttcatacctcctttctatggatctaatgtaatttatttaaacttttca

SEQ ID NO: 116026 - DNA, 482 bp, Glycine max
  unsure (1)..(482): unsure at all n locations
acctgggccaactcatattgagggctctcttcttaccttggtctctnggntcagcagactcaacctctctctttgttcttctgacaaatcctccaaagctgtgttcacaacctgaaaagacactcctggcttgaaccccccaacccaaagaaaggttctttccaatgaactgaaccatggtggtgagaaaacaagaagaacattttggtgggcaatctttgatttctcttcaaagtattgtccatagtggcagattaccctgttgattaattgcctcacatcatcatcatcctgcatctcctgatagtgttgctgagctgagagaagctcgtcaaggtaacctctttggcgcaccatccacccttggagaaatgcctcanatgaagcagcatttgcatcagtcatctatgtattcangagagagagagggggatagaggaaggaaaatggagaatatggtcggagggtggtgcttagaacat

SEQ ID NO: 116027 - DNA, 203 bp, Glycine max
  unsure (1)..(203): unsure at all n locations
tacttctgtgatacgacttccctgctagtcaacatgtcatcaatggccgctacatcagatgttctcacaatatattgaggaatatngaanggctttctaccaaaggtaatttcataagatgacataccagagcttgaatggcatgacgtattgtatgaccattctacacagctcanaaatnttccccatgtggatggattctt

SEQ ID NO: 116028 - DNA, 395 bp, Glycine max
tcggacatccgtgtgagaagtttgactagttgttattcacgagagctcgcggtgggtaattttgagtgttacttatctcgcgatgccgccagaatgggacattctgagttaaaagtaatgaccatgtgaatttctcaagacttccgtggccattgtgagcgtgcgtttgtggttttctgaattgacattcggtgaaagttataccatttgatttataagacttgcgtgggcatgttacctatcactatttggcccaatctaccttgtggaacgtatgaccatttgatgttcagagctccatgctatgttaagtcctatagtgttccctaatggcctcggttattgcatgacattgattctcaaagctttgtgtcattttacgttacattgtttcc

SEQ ID NO: 116029 - DNA, 474 bp, Glycine max
  unsure (1)..(474): unsure at all n locations
ttaagtcaccgcggctgcagcttactcttaaataactntntcttgttctttcagatatgattcctcaaaaacattctctcataatgttgaattgacagatccaattatttctcgttttgacatcctctgtgtagtgaaggttatatttaaattcattgcttctttgtttacctcttcaattgaatatntattgagggagttctttattttacaggatgttgttgatccggtcactgatgaaatgcttgcaacgtttgtcgttgacagtcacttcaagtcacaacccaagggtgctaatcaagatgataagtcctttagtgagtcccaagatgtccatgcatctgccatgccagctgatccagaggtccttgctaagatcctgctgttagtgacctttacggaaacttaggttgtctcctgtgtctcaccctagagagaatttggtttntttgcgatacttcctaacagctactg

SEQ ID NO: 116030 - DNA, 220 bp, Glycine max
  unsure (1)..(220): unsure at all n locations
ggtatggtccatgnnttttgaaccggtccctgaatgtcactgcttggttcctattaaaagatcccagaanagtattccttcacttgagcaaatccactgtgagacattaaaaaaaaagttgcgttatttatacaacaatctatataantaatatttattntgtatctatcccgttctaacacattatntattacatttcatatctntgtcatttagactc

SEQ ID NO: 116031 - DNA, 475 bp, Glycine max
  unsure (1)..(475): unsure at all n locations
tcagagtcacctgcggcatgcaagcttgtgcctcttcacgtgtggaatatgtttgtattatatanatccaaagacccttaggtgctntgctgatggcttctttccgttccaagcttcaattggagtcttgtcttttacagacttaaatggacatctgttgagtatgtaaacagcagtgtaaactgcttcagcctacaatggggtaggtagtctcttttccttgagcatcgatctagccatctccataactatgcgaatctttctctcggacacttcattttgttgaggagaatatgcgactgtaaagtggcgctcaatgcctctatcctcacaaaatctttcaaactcgcgagaggtgttctctttgcgcaatcacttcttattacttttattcatattccacgttgagtttcagcaagggccttgaactttttgaatactccaaagactcctgatatctcttttacaaaatata

SEQ ID NO: 116032 - DNA, 454 bp, Glycine max
  unsure (1)..(454): unsure at all n locations
ctcagctgatggagctgtgctagttctacctantccgtatgtgttttgtcattgatccnaaatgacttctgctggacctgcattctctttttccggaactccgactatcacgactgtgaaacttaactggaagaactatttgtnctggtctgcttcggttgagctgtggtttcttggccaaagacaccatgatcacttggaataaggtattgatactgttccaagtgacagaaaatctgagtgagagaagctggattatcagctatgtgctgtcttgtggcaatcggtcgagacacatgttttggagatccttatatcattcaaaacatgttctttttggaagaacgcccgagacatctttgccaatgatattcagagtttgtctgatgctactatgaaggtcacagccctcaaacaaaccagtcacgacatgattgacacatatgtaaagctc

SEQ ID NO: 116033 - DNA, 483 bp, Glycine max
gcactgcagctgcagctattatagtttgtttaaacccaatattggtatgcttgataaatcttaaagctaagaaaaaaataatctttaaataaaaatttaaaagatagtactaaactaaatttattgaattggaagtgcttcataaaaattagttattgaatcaattagttttttttttggtgtacattaaattaattagttaataataaaatgacgtagaaaaaaatgtttatatgatttttatacattttttaatttctagaaaaaatacttttaattaataataattaaaactcttgtagttagttttaaattgatataatttttaaaagataaatttttttattaaaaattaaaaattaataatataatattaaaagaggaattttattgaaacaaagtgcttcagcttagaattaagacaactttattatgttgtaacagacaacaatttctttgtaattattcgtttcaaatttaata

SEQ ID NO: 116034 - DNA, 352 bp, Glycine max
  unsure (1)..(352): unsure at all n locations
tgtctntcttttttaatggatttatgtgttgagttggtgcttgaatgaatcanatattaaattggcactttttgctgatggctcactgatagtgccgtgttgcaggaagtcagcccgttgcttactgggcttaattgtggaaaagcacttgaagcagtttctctcccagaatctgcaacttccctctctgcggaacatggttttgacatccaggtatgattcaatccactctttactatatggggttttcttgtgttggtgtgaactttntttntaatgtacttggcttatgtagtacttgtgttgtgcttaactctnttttaatgtacttggcttaanatgtatttgagct

SEQ ID NO: 116035 - DNA, 494 bp, Glycine max
  unsure (1)..(494): unsure at all n locations
gacccttaacccacctgaggcctgcaagctnttatatagagttgagatttattattnttgtgccacaaaggattntcactgtagcanaattaaaattatacactatatactttcgcactggattttcatgcttctgagccttgtttgttggggcaaatggatcactcgctgatacgaatcaacttatggtcgtcttgaagtcaagaaaacaaaacaaaaaggaacttgaccctaaccgcaacttgcccatagaaccaaagttatcaaagaagcgtgtctctaatcacgacctgccgatagaacaaacactataaaattcttaaccaaagaacaaaagggagctctctctgtggagaaaacactcaaattcttattattcaatctattcttggtggttccattacatgggttcctatttatagggaagtagaataacaagtaacataaataaatcctatgtttatctaacctaaagataaaaaatattctaataa

SEQ ID NO: 116036 - DNA, 250 bp, Glycine max
  unsure (1)..(250): unsure at all n locations
ttcttaagccttagatgatctttggatagatntttaaatctctacatangattctataagcttttgaaagaatagatgagtttgatcaaagttcatgatacgctttcctaagagactcaaggtcatcaagatttaccttactatcctggtctgattcagatcttttagaggttttgtcttccatcangcatatgtttgcttctttatcatcttcattagacaaggtgtcgtccacgtccccacgtgcaca

SEQ ID NO: 116037 - DNA, 385 bp, Glycine max
atcctcagagccacctgaggcatgcaagcttattcatgagagaggcaaccattatatgtgagtatgtagtgacgaggcaatgtcactacttttatttgaaaatgcacaacgtgtaaacgggatggggaaaggttgctcgaataaaggggtgggcctttctatccaaagcccaataaagcaaatggaaaacatgggccaagagagggtagtatgtagtgacgaggcaatgtcactactttacttgagaatgcagaatgtgtcaacgggatgggggaaggatgtttgaataaaggggtgggccttgcctttctatccacagctcagtaaagcaaatggatcacatgggccacagtcctaaacatataagtggctctaatactcaatg

SEQ ID NO: 116038 - DNA, 399 bp, Glycine max
  unsure (1)..(399): unsure at all n locations
ttattcctttcttagaatgaatctgngacacatattaggtttataaattatgagcaaataagaatagagaatattaactaataactattaatataattacttgttcaaagatactccaattgcgttcacatcctgacgcactacatgtcaaactcaaaatctttatttccaactgttgcaaatttggagttggcaatccacatgatngccaccatggtgctacaaaagtcgaatccaaagaaatgttatgctacgataatgaatgtaacactctaaacttctaaagaatttaagaaaactatttttcacctggtgagacaatgctcctttgttgaattgcaattttgcccacatactccacccatttataatgggagctctgaagaatttctgttactg

SEQ ID NO: 116039 - DNA, 289 bp, Glycine max
  unsure (1)..(289): unsure at all n locations
tttcactatctcaacatacatattgtggtcaactaccactagaactctcaaaactcagtggtcttccaacatgttaatcttgatgaatgctatgagtacaccttcatgacaatataatggcanggtcttacctattggctatgcctcacacttgtcgagatttccaagttgacactatggaaactctaccacaaacttggtgccatattcacatgaaacaagtcaatgagcataccctacgtaccaatctataaggtcatcccaaactctgaggattgacttctcaaca

SEQ ID NO: 116040 - DNA, 347 bp, Glycine max
agcaccgcgctcagcttataactgacagattatttctctacctccttacttctgctcggaatcttgtatgatcaaagctctcaaactcttgattcctttgagaaaagactaaagtcgtcgtgatatattcttttgttaacgatcctagattaagccagggggctgtcttacaaacaatcttgtgatttgttaaacctactactgtttgatgaacaaagaatatcggtttacgccgggggaagggccaacttgtaagccgaagggctagacaattttctacttagatattaacgaacttggggtgtcagacaaacctttctggttgaacaatacataaatctttgggg

SEQ ID NO: 116041 - DNA, 480 bp, Glycine max
  unsure (1)..(480): unsure at all n locations
tctntgaganaaacttgctgagaagctagagcttagctacacacactcctctcataactaagctcaccttcttgagaaactttcttaagaagattcctaaagaagctagagcttagctacacatacctttctaatagctaagctcacctgcttgagatgagaagcaagagcttagctatagacaccctataatagctaagctcacccccatggaaaaaacatgaaaatgcaaaanaaaagtccttactacaaagactactcaaaatgccccgaaatacaaggctaaaaccctatactactagaatggccaaaatacaaggcccaaacgaatgagaaacctattctaatatttacaaagataagcgggctcatacttagcccatggactcgaaatctaccctaaggctcatgagaaccctannggccttccttggatctctagcccaatctacttggagtcttctacccaatgcccttacg

SEQ ID NO: 116042 - DNA, 402 bp, Glycine max
aagcttacactcgatatttattatcacatatcagcgctaggcaatgacattcatggtgctccgaacaaaggtggagtatggaggattgtcttgaagggtcgcacttatgcaatcatgaaactgagctcccaactcgaaagtggaggacacatgaacatccctaaacaagaacattcatgtggctctggaaaaggactagaatggatgattgccttgaggttcctctcttaggcaatcatggaatacagctccaatactctaaaatggggaacacatgaacagcccttagcaataacattcatgtggctccggaaaaggacgagaatggatgattgccttgtggttcctctcttaggcaatcatggaatacagctccagattcgaatatggacgacacatgaa

SEQ ID NO: 116043 - DNA, 400 bp, Glycine max
  unsure (1)..(400): unsure at all n locations
atcctctgagtcacctgcggctgcaagctgactacggatacaatggcaattctanatatacggtgaggttgatgatgaaaggaataacaagtatctgaaagtagaaagcttctccggagataatggacacgaattagaatgagaatggtttcataagcaaggaaggaaaagggtttcatatgcatggaagaagaaaggttgttggaagcaaagaagctgaaggggtttctctggggtcttttggcgctatttatggagtttcatttttaaaaggggaaaaaacaatataataatcaagggtcagaaatcaatcacatcagatttcccttttaactccccagcgtgacacgtgttccactctgtctagaaaggtggaattaattgatgggtagtgggagat

SEQ ID NO: 116044 - DNA, 214 bp, Glycine max
cttgatgtttcttccatgctcattgcttcgcaagcttttgctattaacttttacaatggtttcctctccttaatctattgaagcatcacagattcacagctgcgttcttttctaatatgtaggaagtatgaggaagttaatccacccggtggtgacaaattctatagcctcactaataacacttatgaaaaggcagaggtaagtaaatatgttg

SEQ ID NO: 116045 - DNA, 389 bp, Glycine max
actaagataattctagagatgtgtaatcaatcttcatttagcatcgtgaggtgttacatggagtataaactctaatgtgtggatgtaaagttccatgtctcttcccaaggttaggagggtctgatgattgacaacctatattaaggatgactacatatccatggtaacttcagggtaaaatcaaacgataacaggatgtcaatatgctatctgttagcttctacttgtgtccaaccaatccaattctgttctctaatgttgcattgattacttttagaatagttttgtctttggtctcagtatccactctaaaaagcactcgggatgtcatcttttcgctgttatacagcttgcgatacttaatagacggcccataagcgggatctatt

SEQ ID NO: 116046 - DNA, 260 bp, Glycine max
tatgcggaaacaatacgacacagccaaaaggagtcaccagaccaacttataataaatctcaagaattacagtggtttaccaacctgcaagaaccctgccaggatacctacaagtatacttgataacacgatgatcttcttgccatggcctatctcgtcaaataataccctcccatgattacagaattgggaattcccgaccttggatggttctataaatacctaagttataaatgtgcaacagctacctatatattttgc

SEQ ID NO: 116047 - DNA, 451 bp, Glycine max
agcttgggcatcattttcttatttcttaattacctcaaccccctacgtcctagttcctccatcattacctatttcaataataccttcatcaactatataatccattcatcgggtctcatagtcgatgaattcaacaattctaaaattatatagaatttattaataaagaaaaacttataatattctcaagccgtacctatacatgcatgcacctatatcttgaatgatttatagttattaatgaaaaacgaagctattgaatacgtagtatttcaaattaaggtactggaaatgaataattgaatagtagtagtgcatggataaatatcatttaattcatcgttttaaatattttttattacttacaaagtttattattaaatactttttatatttttatataaactcgataaaataaatatataaaagggaaatatttctttaacatata

SEQ ID NO: 116048 - DNA, 350 bp, Glycine max
  unsure (1)..(350): unsure at all n locations
agtatttctctttggccaagacaccagctgggattttggtcttttcatctaaacattggtagcaaatttccccacccctctttttctttctttcaggaaaaaaaatgatcaaattttntgtactaagaaaaatgtgcaaatcattaatgagtttcatgttgctaggtttcttttgtgaatatttataggagggattggctccttaaaagtgcagagtgtaattgaagatgctntcgaaattgtgataaaacagatgcacatgtaaaataaattataaaattattaataattntaactntcgattntccaaatcattggatactantttacacaatcttntaatagagaag

SEQ ID NO: 116049 - DNA, 393 bp, Glycine max
gcagcttgtaagcattgatttgatactgttttttttatcatgggctcatgaagtgtacaatttaatgatcgctttgctacacctgtcaatgaggacacaacagtagaatagcacgaatacacactacacgatagatgactaatcacactcttgactctattactgacacacacacactcactcagatttacgcgcacatatagacacggacgaagacacttacacactgagctccagactcacacagagacccactcacaaaggcgcacacactgagtcataaacacacacatacgcaaacacaaacgctttcaacatggtgttgtgtaaattacagtgtagttttcataagcaaaggtgaaacgaaagatattgagctggtagaggaggaat

SEQ ID NO: 116050 - DNA, 402 bp, Glycine max
  unsure (1)..(402): unsure at all n locations
aatgttattgctccttccttctggatggttgcttcctcttaaatggtggtccaccctggtagcctggtgaatgaaaacctccaaaagggatttgggggctatggaatttttccttcatccttatcaaagctacaaaatatatttccgcacctcccacatatacttcttttggatatctaaggatattgataaagataaagtatttcatattacattttcatactgaaactatanatntatagggataaagaaatgtggtcttattaaataccaatttctattttagttctatttaattttgcgcattcaactnttccttttaagtacaaaaaccctcatgcagtgttggtcaatcacatgacccctncataatttatnttgtaatcaatcaacgtgcgtata

SEQ ID NO: 116051 - DNA, 346 bp, Glycine max
gcaagcctgtaagatatgcaagagcatcttcgtttacttctttctgaaaattattgccgtcgataagaagaatgacatttatgatccaaacttgaaatggattccactgaatttgttagtggacacatcaagatatcttaatgatgaaagtcttcccaatgatctatgaagagcaccaccaattgagttgtcgtaataatgtaccatgtcaatatttttaaatgccccaatatgatctgacagattgcctgaaaggcatgaactctcaactgcaagatttgcgagccatgggaaatacaaggagctagaatttctaaagttcattacctgtggctaagttgagaat

SEQ ID NO: 116052 - DNA, 472 bp, Glycine max
gcttcaactgatagagggttatcttatgtgtattatgacctaaaaatacttcatgagttgaaggtgtcaatgacaaggtctcgatggaagcttctacaataagagataacctataggatgaaagatggaatactcatcaacggcaaggaaagggaaaatcatgaggagccgaattggagcacgttgaagattattgaactgctcgcttatcagcaattaggcttatagcgagtgtctagcttaacacctgtgcttagcgcgagctatctagcttagcccaattccaacccaaggaaaaactggacttagcgcatgatgtctggcttagcgcaaaccttcagcgagaatttacgataattcttagttcttgtctatttgtgtaatgggctcgagcttgatgcaaataggccttattataggcttgagtatctttttaagcctacttcttaaattcttatagacttataatatt

SEQ ID NO: 116053 - DNA, 297 bp, Glycine max
  unsure (1)..(297): unsure at all n locations
tcagcttggaaagagtgtttatctcccgctgtctcatcttttggttagcgagcctccgctaacacagcactcttgggctaagcgcgagcaagactctggaagaacatgagctgtacaggttcgctaagcgcaccgcttcatctcactaagcgcacctcttcagttcatccattaagcgagaaaggcgcgctacgccaaanatcactaatgtgcgctaagcggtccatacatgcgctaagcgcacgagcacganaaaggccacctatttaagcctgaaatcataatttgtgaggggat

SEQ ID NO: 116054 - DNA, 444 bp, Glycine max
  unsure (1)..(444): unsure at all n locations
ttaagtcaccgcgcgccgcaagctgaccgaaataaagatattattttatctccatcgngcgagaaccgtactatgtatctagtcacagagtaccttgcccctgtgtgaatggacttcgtgcagtgttcactctgagtactcctattccaagagagggttacacactactttagaaagttaacactaatctatatcatcaggatgagacttactatgcttgcacaaaagccttgtacgatttatggcacaactgattttatgctctaatggatacgtatcattaagagcaagaggacctatagtcaattatactcacttgtagatgcatgaccatattttgcactcttgatggttggaaatctgaatcataactcaattagttcttctatatttagctgaacctacaagaggtaatcggggtctctccaactcttgaatcgtatg

SEQ ID NO: 116055 - DNA, 257 bp, Glycine max
  unsure (1)..(257): unsure at all n locations
gatcgacggtaaaaagcacaggtaagttgaaaccgaataatatgataaagaaatactataatttactatcatgttggatgtaatataatatatatttttcccaagataaaatactataatactataatttgctcactggacgattagatacaacttatttagtggatttgtagtcaatttatttagtggtcttctaaccacaacgcccttctgtgtttnttattatttgaatcttgatttacacgtcgtcataactc

SEQ ID NO: 116056 - DNA, 59 bp, Glycine max
gaaaccatggtcacatgcgtggtcctgtgtgaaaatggactccccctacaatgtccccc

SEQ ID NO: 116057 - DNA, 436 bp, Glycine max
  unsure (1)..(436): unsure at all n locations
agctngaagaggatgacgcttcagtggagtatattaaacagagaaggggggagcacgaaattgatggaataaaagagggagagaagtggaacttggaagcgtgtcttataagactttcattcattaaagttacaacaagtgcgacacatgcttctatttatagactaagtagcttccttgagaagctttcttgagaaaacttccttgagaagcttctttgagaaaacttccttgataagctagagcttaactacatacacccctctaatagctaagctcacctccttgagaagctttcttgagaagatttctaaaaaagctagagcttatctacactcacttttctaatagctaagctcacctccttgagatgagaaacttgagcttagctcacaccccctttaatgctaagctacactattacataagtacatga

SEQ ID NO: 116058 - DNA, 182 bp, Glycine max
accctcaacttggaccattttcctttggcaaaaaatcttcaagactaacacctgaaccgtttgagctcccttctccgtgccagatattcaaacgacacaacctggaatcatgtgagattccaacaccttatcaaaaggttcaaggacaaccgctaaaatattatgcttccttccaacttcaa

SEQ ID NO: 116059 - DNA, 450 bp, Glycine max
  unsure (1)..(450): unsure at all n locations
gcttcataccaataatataaaacttatatcttaatgttttatnctatcagagngggctgctcccgtatcctctagcatgaagttcttcatagtcatctacctattcatctactcccccgaacacatagttcaagatcatcacaggattcaaacacagacaacacgcagggaatgagttatcgcattcctaactattggagagaaacaagaaacatgttgatataaatatcatataaacaaaatacaacttacttaagcatcactcacgttatttcaccttgtcgcataacattacctcgcagcaccacacattatatttattttcacaacattcacgtactcaaggatcaaaacacaatatcatcaagtcaatcaatatcgatcaatacacaagcggtatgcaatatatacactaagactcaatcctatatgcgatgtggtaccttatta

SEQ ID NO: 116060 - DNA, 386 bp, Glycine max
caaatagtcataacttttcactccgatgtccgaatctacgtgaatagtatatctggactctcgaatgcgaacaacttacgctctcgagagattgaaatggtcataactcttcaatcaatgatccgattcaggcgcataatatatcaagacactcgaatttgaacaacagaagctctaaattgaacaacggaagcattattatacagaagctctagagaaactcatcaggtcataactcttaccactagacgaccgtaacctcgtaagtatgatgtctagatgcttgacataataatcggaagctgtcctgatattaaaatggtgatagcttctcactcacacgtaagattcatgcgcattatggattcacatgcgttaatttcatt

SEQ ID NO: 116061 - DNA, 480 bp, Glycine max
  unsure (1)..(480): unsure at all n locations
agcttccactccagttcccattcaagtacctatctgttgtgattntcaaacgttaaaaaccagaatacacaatacccttaagctaaccgataagcaatttttggatgaaatttactaccggcagcctttcacatatgcaggcaatcaatttcgatttcaatgtatgcaactgaaaaatgatgctgatgttaatacaatggtaatgtgtaatcatcaatttttgtttgttggtccaattgagttattatgtagcattcctagaacaccatatgatattttaaacttacttcaagccactatgacccctactcatgatgccttgctatattacaataagaggtggaacatgtcacgccaaaatgagtttgttggttactcgttcacaggaaaaaatcctaannaatttgacattccttccggatgtaccatggatgaactgaagaatttgatcaaagcaagtgcgcctgttgggatcccctt

SEQ ID NO: 116062 - DNA, 361 bp, Glycine max
  unsure (1)..(361): unsure at all n locations
gacacgtcaaacaatgggtatttgcagtcactctcattaagtgaaatcatcatgtgaccagtcacggtcactctgtattgtgagaatgctccaactatatgggatcaacatatgcttaaagaaacacccatactgagtgtatctactctcatgacctagacgccaaagaatctattaggacctcaccttcctgattcaggtcaactcctaaaacaactattgcatgcagacactgctcatgaattatacaatatccatgaccatacacttgttntcaaacacantttacacattgcgctacaatgtaacaccataggttcctaacttggaatcctacactttccttttaacatatcgcaca

SEQ ID NO: 116063 - DNA, 295 bp, Glycine max
tactttgggcgtgtattatagagcaacaaggtaactggatggattgctagccatcgattgagtttacttacaacaatagctaccaagccagtattggtatggctccttttgaagctctatatggacgaaagtgcaaaactcctatttgctggtatgatgatggagaagcaatacttcttggacctgtaatgcttcaacagattaacgaacacgtgtatttgattcgagagaagataaaagcatctcatgataggcagaagagctattatgatagaaggaggaagccactatattt

SEQ ID NO: 116064 - DNA, 365 bp, Glycine max
  unsure (1)..(365): unsure at all n locations
gtttcttggcgaataatggaacatcccgtttcggcgaatgaacatcgttgagctccatgaaaaactaccgactacttgtaagttttcatgcactccgaacaagaaaacttctcctgccgtaagaaaatcattatgggccagcgagccgttttttaaaaataaacaatgcggaatgtcggcttgaaaatagttgtcggggccattcacgaccgatgtcggctattgagttttctatttcatcccagaatgaaatttgcatgatgtcgatccggaaatgtttgatcggcggcatccaatgatgcttctttttagacctcgatcgtcatctttcatgccgacgtcngtatcattttttcgatcaattc

SEQ ID NO: 116065 - DNA, 83 bp, Glycine max
gttaccggaaacttacggattgcgcaaaaacacctctttttgactctcgccacattacggaatttcacggatcgcgcaagcct

SEQ ID NO: 116066 - DNA, 411 bp, Glycine max
  unsure (1)..(411): unsure at all n locations
atttgccttcttctatttcagaaagggaatgcctctaacagcacctttggccatgattttcttcatgcctcttaagtgcagaagtccaaatctttgatgccatattttgacttcatcttctttggaggatagacatgtggaggagtaactgggttcttgaagtgccataagtaacaaggtgccttcgatctgctgccttcattagaacttcagtcttctcatttgtcaccaggcattctgactntgtgaagttacattgaatccttcatcacacaactgactgatgctgatcaagtttgcagtcagtcccttcaccagcagtactttgttcagactaggaagtccatcatggactagccttcccattccagtgatctnttctttagagccatctccaaatgtacatagcta

SEQ ID NO: 116067 - DNA, 486 bp, Glycine max
  unsure (1)..(486): unsure at all n locations
ttaagcaccgcggctgcagcttgcatggngacattgatatatgtttatatatttccattcactaacacaaatttgtttaatttggacgctcaaatctattagctcatgagttcaatttgaaatatgaaatttctattgtacatcttttatttggcattatgtaaccttgtccagcacatcacaattgtttctttgatttctcttcgccatagattagacctgttttatatagttctactttgctgtagttaaaatcaagattaaagttgcgtaagccatcaatgaagttaaaaattgcaactgaaatatcgaacacatgattttagcaaagcagtgatagctacaaaaatggagtgataacattaatggaaaacacattccaaataaggaaatacgatgtcaggatagaaactttgattaatttaaagagcaccttgattgagaaggaaaactgaaactaaaaattaacacaatcctctgatgtgg

SEQ ID NO: 116068 - DNA, 391 bp, Glycine max
  unsure (1)..(391): unsure at all n locations
cgagatgaggaagtgttgaagggtgaaacttnnctgctttatttgtgaccacagagtggtacctggagatatgtcgcggnggtcatgagaccttggngacgtcaggtggggtgctatttgccaaaaccaagcttgaccaatcccgacccaacccgggcatagtcggtcagtgagaacatgtgacgtacctaagcaggcgagctcctggcagtcaacagataaaaggaaaacaagaccacagagcaaggaggcttgtggtggctggccagctgtgaattntgtgtaatatgtggattgtggcctctggtaatcgattaccaagggtgggtaatcgattacaaggcttaaaattgaagacagggggctaagatggtctctggtnatcgattac

SEQ ID NO: 116069 - DNA, 485 bp, Glycine max
  unsure (1)..(485): unsure at all n locations
ttaagtcacctgaggcatgcaagctntcaactatgtatagcattagtaatacttnttcatgctattgggctagcaaatattacctaacccccaataatttactttttaatgaacaaacatacttttgatcaaaaccttattccatttggaaggtgatagttaatgtacaaacatacttttgattaaaacctttgcccattttggttttctaatgatctangtagtcgagtgtcttcgtgtggttgaagtgaaatggagcaggtgaaacacaagttagccatgataaatgtgattntctctaaaaagtaattaacacttaccctaatttaggaagaggctaggacaaactaactgtaaaatcgaaggcatggaaaacaaaagggatcttaattaaaaaaacctatctatgtataaaggagttcattgaactatcaaacgaacaagtgggaccaaaagaaagaaaaatanaagaagaaaaccctaat

SEQ ID NO: 116070 - DNA, 438 bp, Glycine max
  unsure (1)..(438): unsure at all n locations
ataaaacccaatggtcagaagatgcaaacctttatttntacaatattcctctcaatgactggattagcctgcaatcaaaatggtcgttagatagaaataaaaattttttttaagggaatcttaagataaagcatttgctcaggtagcatggatagagataaagatatataccttcccgaatctcttgatttttccacctcaggtgtcaatcacttcctgctatagatagaattatatatggaaagggaagctaaagtctaactactgaaaatgctaaagacttttgaactttcnattaaatccttaagcagaaatgtcttcactatanaggataatgatcctcatcacattgctaactcctatatttagaagttgagatgagactgcttgctacttatctacattcaacctaacaacgtcaacactcggggtttatct

SEQ ID NO: 116071 - DNA, 465 bp, Glycine max
  unsure (1)..(465): unsure at all n locations
agcttctccnnctatttgctatatatatgtggagaagngaagaagaaaagggttcaaccccttaggcacttctctctctttcgaatttgctgaggaaaattatttccgtgaagaaaatccaagccgaggcgcttccgtaacgtttccgtgagtaattatgcgaagattctcgaccgttcttcaaagattcatcgntcgttcttcgttttcttcagtcttcaacgggtaagtacctcaaaccaagcttttcaattcactctatctacccgtggtggtccacattttgtttcatgtattattattctcgttttcatttactttntatacccccttttgacgtgcttaagccgcttatttaagtcatgtctcgcttaagtctaaaaataagataaatttccaccgatcggttgaatcgcatcatccgttaattatggttaaaatgaattctgaccggttggtcatgcc

SEQ ID NO: 116072 - DNA, 437 bp, Glycine max
  unsure (1)..(437): unsure at all n locations
agcttaccaactgaatgatgacatgctgttttntattactaagatatatataatgtgatatggtgagaatttaatttggtgttttggtccttcgaaaaaaatagtttttccacacatttataatgacatttcaaaacgataaattatcgccactaacattattattatcatattaagaataattatntttgaatgatatttacatgttaaaatactattctcttctctcaatgatggcttatgcttattcttttggtgcggaatgtagtcctaagctgcttatatgtaggttaataacaagaaaatggaactaaaattaacacgttgtacggaaaaacatctgccttaccgttgagacccgattggattgactaatcttgttgaaaagccgaaaaaaaagatagttcacctacagttcattttctctctaaactgca

SEQ ID NO: 116073 - DNA, 284 bp, Glycine max
  unsure (1)..(284): unsure at all n locations
atacttgagggttgtcgcattttgatttcatttagtttcgttgtatttggttgtatattgctgtggactgaaaacaaatgttgnctcattatgaattttgttttggactaaaaacaaatgagaccttagtctcattgtcactctgcatttctttagtactgggtaacttcttctatatacagccgtgaaactgtcatttgattcttctttttccaggtttggctatggtttatgtgtttctggccgttctcatttatgtgtcaaaatctattattactttcgta

SEQ ID NO: 116074 - DNA, 55 bp, Glycine max
agcttagttcagcttatcatcctcttacatatggtcagactgaatgaaccattca

SEQ ID NO: 116075 - DNA, 349 bp, Glycine max
  unsure (1)..(349): unsure at all n locations
ctaagcttttttcctggtgtcgcatctgaacttcttgttttgtggatgtgaaatctaactggcgagtgcactgggtcgtcaagtaaataattaaaacagtgtgaatcgagtatcgaactcacggaacttggtntacatggaaaagcatcattcagtaaatatgaatatacgtaaagaattgattatcatgaagtaaaaatagaagtaattctattctaagtagaagcagtaattgtgagcaagtgagtgtgagaacagatatgtaaaagcattgggtcattctactgagatacatgatgcaattagggtttttctctacttgaaattatatttgtgttctatgatgaag

SEQ ID NO: 116076 - DNA, 430 bp, Glycine max
agcttactaaggtttgaaaaattgtatatttgaactatatatccctaggatcttaagatctatttcaaatcagattaatcttctacatcgtgtatgaaaacttttaaaaaaccatggaaatgatctatgcatgaaaatttcaatccggattctaaacaatatctttctaaatatagcagtcaacataataaccttttaagtgtagaatcatcattacataatatgagtgttcacaacaacaaaaaaaaacatttatttaagtaatgatcatctgaacatgtttaaatctggattgacattatatttttataatcatatcaaaatatttaataataaatggcgtgactaaccacttagaaagcttaacagctgcttgagtgcttgaacttttgtataaagagtttctgaacaccaacataatcttgagtaa

SEQ ID NO: 116077 - DNA, 310 bp, Glycine max
  unsure (1)..(310): unsure at all n locations
tcctattcacaacaactactatgttcatatggtaatgtatattaagcattagttgtctaaagattgacatgtgaaaatggctcacacttttcatggaaagattactttctagttctaactgttagtctcttattaataataataataaaaataactttgcgaatcacctgcaacatatggaacgttataagaaaaagggatcataggcccaccaaatacgtgttgcatggcagcaatctcttgcaagtctccagagaaaagctcgccctctctgagttccatcccatttccacacccancttgaatatat

SEQ ID NO: 116078 - DNA, 440 bp, Glycine max
  unsure (1)..(440): unsure at all n locations
catggtattttctcanaacatgtttaccaaagagttattactctctggtaatcgatcaccagattattgtaatcgattaccagtagcaaaatgaatttgaaaaaagttttcatatgaatttacaatgttccaattgattacaaaaagttgtaatcgattacaatgttttggtaatcgattaccagtgcctttgaatgttgaaattcaaattcaaatgtgaagagtcacatcctttcacataaaagctttgtgtaatcgattacactgatttggtaatcgattaccagtgattgtttctgaataaaacacaagatgtaactcttcaaatggttttttactttttcaaattagttctaagttgttctaaaagtcataactcttctaaatggttctcttgaccaaacatgaagagtctatataagcaaagctttgtttttcat

SEQ ID NO: 116079 - DNA, 235 bp, Glycine max
  unsure (1)..(235): unsure at all n locations
ctcagctcggtacctcttcttactacataagaataccgggttattcttctcggggctgcctactagtttagccccatctntcaaattattcgatgcatacatgtggatgggctaataccaggaatgtccgccagggtccagcctatagccttcttatgcttcttgagaactgataacagcttctcctcttgctcatcaacaagggaggcagatataatggctggaaaacttttgc

SEQ ID NO: 116080 - DNA, 454 bp, Glycine max
  unsure (1)..(454): unsure at all n locations
gacccggacctctaagcacctgggctgcaagcttgccttggtttacattatngatatatgatttgngactcgtaggattcaattngggcaaaattggatgaggggaaagtgtgatttcgaaaatctgcacttatgcagaattttgctgtcaaataggtgcaccacaattttggctttgtgcagaaaatgttatgtatttgttggttgtggaaagagtagtacagattcggctctggacgttttctagcagatcccaacggtcataatgtagacttatgtactagagactctcagtaaaantttcgagtcgatccaacggttaacgaattggaacgaaggaaatgttactggggtatatgtatgtgaaaagctgtgattttgagttgtgttttgggcagagttttctgacttgccctgtttgcttggtcttggtagccatgatgattggaggtgg

SEQ ID NO: 116081 - DNA, 249 bp, Glycine max
atgatttcttcagatttacctgggtcaactttatcagagagaaatcagacacctttgaagtattcaaggagttgagtctaagacttcaaagagaaaaagactgtgtcatcaagagaatcaggagtgaccatggcagagagtttgaaaacagcaagtttactgaattctgcacatctgaaggcatcactcatgagttctctgcagccattacaccacaacaaaatggcatagttgaaaggaaaaacagga

SEQ ID NO: 116082 - DNA, 455 bp, Glycine max
  unsure (1)..(455): unsure at all n locations
tgaggcatgcaagcttaagaataatggcctcagcaaactttttattccacaaggatactctataaataggcctcctatataatggagagggttaccactattggaaaacccgaatgcaaattttcattgaggcaatagacttaacatttgggaagccatagaagttggaccttatgtacccaccatggtggctggtaatacaacaatagagaaacctatagaagagtgatctgaagaagaaagaatattagtgcagtacaatttagaggctaaaaacatcattatttctgccctaggaatggatgaatattntagggtgtcaaattgtaagagtgctaaggatatgtgggacactctacatgttacacatgagggaacaactgatgtcaaaagatctaggaataatactctaactcatgaagtatgaatatttaggatgaagacaaatgagagta

SEQ ID NO: 116083 - DNA, 125 bp, Glycine max
  unsure (1)..(125): unsure at all n locations
agtctctgtgtgctatcaggctttacgtcttactgacaccaaanaagaatgttatacggaaaccactcgggtatttcgccgtcgcgtgactanatgtcgtatgacgatcttggagccggaaatga

SEQ ID NO: 116084 - DNA, 413 bp, Glycine max
  unsure (1)..(413): unsure at all n locations
cttaagcaccgcagctgcagcttccnacactagtagtcgcaaatatttgtcacttttgaaaaagcttgtaatcgcattgttggtcttaccccaaatattatcttaaattggttcctttntggcctcaaccaagatatcgatagggatattacggtcctcaaaccacaaaatatctcttaggccataggcatgaccaagcttttagagaccaagtttcgggacaccaaaaggcacatttgttgccttagccatccacacattcgttccaaaggcaccacctttagcgcttacagacaaccctaacccactccaaacttttcccattaaacaccttagtccccaacaatatcaagaacgacgtgcaactagtttatgctattactgtgaggaacggtatcataccggtcacaaat

SEQ ID NO: 116085 - DNA, 508 bp, Glycine max
  unsure (1)..(508): unsure at all n locations
ggtagaatggctagacatgatacatgtcagggtttggtttggttcaaggataaaaaggatgccccacattatttccatgacacanaaatgcaaaaatgatgaattggaaactttatgcaaaactggtcatgcatgcacctatgcggacactcaagtgtcaaaattttatggtcatgtgatgctagggctcaggattcatttcctctantttaatcaacccaatgtttccaaaatatgttcttttatcaatntgtgcattcatccgagtccatttcgggcgtccgggaaaatcttcacagcattcacccttcaggtgtatacacantttttcaaaagctagttacgatcagtgaatntttccaaagaaaagttggaaatcgtctcttttcaaaagcatgttggtctttcaacttgacaacttatnttttcctttttctaccttnntccttacttacccctttntttctcttattggctctctntntctttcactnntcttttctttcta

SEQ ID NO: 116086 - DNA, 462 bp, Glycine max
  unsure (1)..(462): unsure at all n locations
ctgcagctatgctgctatattacaatagacctttctcttcctcattcagccaaatcaaagcaccagcaggaacaaattatgaccctctccagcaaccagatacaaccctggatggaggatcacccctaatctagaaggtctatgccttaacaacaacaacaacaacctgctccctccttacaaaatgctgctggcctaaacagaccatgcattcctncaccaatccaacaacagcaacaaccctaagaacaaccaacagttgaggctcctccacaaccttccctcgaagaactngtgaggcagatgactatgcagaacatgcagtttcaacaagagaccagagcctgcattcagagcttaaccaatcagatgggacagttggctacacaattgaatcaacaacagtcccagaattctgacaagctgcctttccaagctatccaaaatccccaaaatgtcagt

SEQ ID NO: 116087 - DNA, 256 bp, Glycine max
  unsure (1)..(256): unsure at all n locations
aatgactatgcattattctgcgctaactgctggagttgaggccatcttctcaaattaaatttctggcttcagtatgagtcatgtctccaatggcttcaccactggcagcatctatcatacttctctgcatattactgagtccttcataanaatattggagaagaagctgctctgaaatctgatggtggnggccaactgcacatatgttcttaaatctctccagcactcatacagctctctcactgagctgctaata

SEQ ID NO: 116088 - DNA, 462 bp, Glycine max
  unsure (1)..(462): unsure at all n locations
ttaagcacctgcggctgcagcttacaggtgtctctatatataacacttatgagacacnaagttttacaaaccaagcgatgtgggactaagactacaaaactctaacaatccaagcgatgtgggactaagaccagaatactctaacaagtgaatggttgagtaattggttcgagacctttgcaccatggcagtcccacttgatacatggtaacaatataatttgggtccatctagtgggggtgcccctaaatatgtggaatgaagatgctttcacaaagttcatagccacggtgggaagtatgaaggagatgcatataatctgtactccncaaccacaagaacaacaaaaaggaagaagatgaactgtttcaacatacgcaaaaatgaaatttacaaaaaaaattgctcagataaagagtaccaatagtgaccgtgaatggagtatgaatagtgaatgtgact

SEQ ID NO: 116089 - DNA, 382 bp, Glycine max
  unsure (1)..(382): unsure at all n locations
aataatttatgctacatcatanaactacaaagtatgaatgattagagaaacatctttatgtacatcatctggtgtcgcaacctacccttcgacgggagggcgacgcggggctcacgggtgcgtcttccaagaaaggaaaatgcgcagagtcgccaccaacgtttatttgaggaaaacgtcagaataaccggaaaggtgtggtctacgaactttaattgtgaaagggtcgggagttgttttacgcacggggaagatattagcaccccacgcgttcatcccanaggacggcagcctttaatcaagtgtgcanatatgacttcaaaatgttgtattttcccttttttatgtctttntggtnnttttttatcaaaagataaaaaca

SEQ ID NO: 116090 - DNA, 331 bp, Glycine max
accgaacgtagcttatattgagtgaacacatatcaactaagcggtggtactactctcttaaagctgatttgagtatactataatgcttaacattgacacgactatcacacaagttttatatattaaattgctttcaaatcactgttttataattactagatgacaactctcggtctatataatcagactaaaacttactttattatataattactgcatctccagaagactataatgcgtatatatgaatactttcaactcattcttcttttaaaattataaatactgttcaagatataagagctggaaagctctgagctaagtgatagtc

SEQ ID NO: 116091 - DNA, 370 bp, Glycine max
aaaaaaataacttagcgccgttagcctaaggaactagaaataacttaaaggctgagcgttactgacattgcggcaaccaaaagtcaccctcaacaggcaacaagtcagccaccatttggtctccccataggctgaagcctacgttgacaatagagcccttattacaactagaactacactctagctaaagcccttttacttgattaaccaaaaacagtatttatggttcagccatcattacaaggactgggccattatatagacaaactaaacactctataattgagacaaagtggagtcactaacgtctcctccattagggccatgatacaacgcacaaccttggactggtctcctataaacttgggcg

SEQ ID NO: 116092 - DNA, 443 bp, Glycine max
agcttgaatgaatgttgtaattattatgtttgatctgtgatgcttctccaattcaataatgaaattgttacacaatattattgttcatttaataaataagaattattccttttacattaaatacattttatagctcataatcaaaccatagctatatgttagtctttaattggcttgatttagatataagatgattcttcttaatttagatatacaaaaattattggactaaaaataaaaaatttctaaaataggagtccaaaatttcaggaaaaaaggaactaaaattgtgaataaaaaatcttaggagatttaaaattgtaatttaaccaaattaaaatgggctctctggtatattgtcgctatgggactttcctacgttgacgttagctttgatcttcacacaaaaacaaatataaaaacgctgggggtgggaaaatcct

SEQ ID NO: 116093 - DNA, 343 bp, Glycine max
  unsure (1)..(343): unsure at all n locations
ttcatagataaatcatgctttctagattagagatattactacgacatacatattttgttaaagctgtccatcatctttaaattttatgaatcacatctgtgtggtgtatgtttcttgacatctaaaagttataacaggtacagcgagaacttcactagtaatcactattgggccatctccacggcatacgggagagactgccagtactataatgtttggacagagggtaggttccgaattcagtagtattntcttggttctcccccctactntaagattattgtagctgctgaaatgccctatcttccttttgttggttggcttgatctcctgttctgcaatt

SEQ ID NO: 116094 - DNA, 465 bp, Glycine max
  unsure (1)..(465): unsure at all n locations
agcttgtgtagcactttctactactgaagttgaatatatagctacaggaaggtgttgtgctcaaagtctctggatgaagcaacaacttaatggctttggagtaaaccttgatcatattcctctaaaatgtgacaacataagtgcgatcaatctaacaaaaaattatgtcatgcattctaggactaaacacatagaaataaggcatcattttcttagagatcatgtgttaaaaggcgactgtcgcattgagttcatcgatagtgagcatcaattagtagacattttctctaaatcacttgctagagataggttctttttcattagaaatgaactatgcatattagatgcatctagcatagaatgacattttgtttgcatagtgtgtgatgcacattgctactcatatcattggtttttggttagtttggatcttagnttattgaatcatatgcttactcattagtt

SEQ ID NO: 116095 - DNA, 403 bp, Glycine max
  unsure (1)..(403): unsure at all n locations
tctatttacacccttatctttataagttcaccccaccttctttcataatttacggaaaagttacggaagccttacgaaagcatatatgacttaactttcatcttttttctcttccctttcaccaatgttaagtggaatatgcttacccaaggtttttcggaaattttacggaagtattacggaagccgcggaagccccgaaaaccatttttcaaaaacgtggaggagcttgccacccagttgcttcctccttaagcaacccaacttccaaaatgttccggaagggcctagatttgaatngctatntacacccctatcttgataagttcaacccccctttaccttttntggtgattctttttccgtaacgttacgaaactttacgaaattcgtaacgatactta

SEQ ID NO: 116096 - DNA, 408 bp, Glycine max
  unsure (1)..(408): unsure at all n locations
agcttttaatctcaatacaacgaatcatgatttacacctatgaatctaattntcgggtgtaaatgtaacaaggcatgaatattaggacatgtttgaaaggttctttatcatgatttatatttggctgcctcatgaggaataccttgcacctacgtagcatggaaaatacctttccatggtctgtttatatgtgaatgtttatagcgtggaaaagtcgtgcgaattgtgtgaatatatggcattaaaaataccttgcaaagtgtgaatgtgtaacaaataaatgcacttcacaaaaatgtgtatttgtgagtaggtagccaaataagcctttcaaaaaatgtgttatttactatgcttcatgaaaaggtttgtcaaaaaatatgtacatggatatgtgccttaaaatgc

SEQ ID NO: 116097 - DNA, 494 bp, Glycine max
  unsure (1)..(494): unsure at all n locations
acttatgaatattgtcgacaaatacaaccttttgtttaaaanctcganggaactcgngaactcttacgagtttacgagtgcactcgctctttcgcgagctcaaacttgagtaaactctttntttagtagactctgggcaaactctataaattctaagtaaactcggtagaatctcgagtttaccaccgaatcaacaagttagcaagttaaaaaaattataccaaaatttaagttattttttattggtttttgtctgtgtaacattcaacataccttcatttagtgtgttattctaaaatacaaaattctcacctttaataatatcaaacccttgttgtctaataacatcaaaccctcgatgagaatgatctaccactacgataacgtctgcaagttatcagtgatgcattattactagacttgattatntaaatattctggactctatgatttattggtttgcttattatattgctgaaatgtctaattagtat

SEQ ID NO: 116098 - DNA, 408 bp, Glycine max
  unsure (1)..(408): unsure at all n locations
ctcagcttctagagcttattgaataaactaaaaagaacttataagagtcataagctatntccataaactcanactccctacaagctcttncaaatgcctcctaagttgaattaaaaattctcttcaatttcttcatttattatgggcttggagaatataaatctttttaaggacagataaaagcacaactcaaataggtataaatcaaattatctttagacctgcatcccttcagcaccactaatgccaactccaatatcagcctcctaaagcatgccaacatcatttgccccatctccgatagataaatgtgtcttccctgttcccaatttcaccaattntgtaaccaacatattttttttggctgatgtngataaaatgtttcacacccaaagcaatgatggtata

SEQ ID NO: 116099 - DNA, 298 bp, Glycine max
gcttataatcagagaactattattttcccatggcactcaccttactgtttctgttgtagaatccaccaacggatatggactttcacttaactctctggtcaatgagtctacaaatattaaagggtggtttttataagaatctgcataaaactagaagaataactgctcacttcttattaccacatatgtatgcgagtggctatcgattattggatcaggtagtagatcatatatcagtcaaaaccatggatgtaatgaagataaacaattacttcggagtcaacgctacacttcgatt

SEQ ID NO: 116100 - DNA, 463 bp, Glycine max
  unsure (1)..(463): unsure at all n locations
ctatcatcacatgatgctttattggcacagaataagtggttgnctaagcaacttgagagttcaacataagcacttggtaagttaccaactaaatagtacattggtcaacctacacatccttttgttttgcaggtgacaggttgtaccatctgcggtgaggcttatgaaacaggccactgtaatcccattgaagaaaacactcaagaaattcattatatgggaaatcaacagcggcgagggtatactccaggaggattttcaggcttctagcagggtccttatagtcaacaaggacagtggaggtcactgttagtcgatgaatatgactaacttttgtgtatataacctgcgtaaaatgtatcaaacttccccagtttatgggtactttatagtggtataagtacttactattaagtatagggtatatatacttactacttccatattgtgcgttaataatcat

SEQ ID NO: 116101 - DNA, 443 bp, Glycine max
  unsure (1)..(443): unsure at all n locations
agctngtganatgtctctcaatcaagttcttatgattagaaagaaagcagaatggtgtaataaaaatactgaggttatgttgaaagtgtgcatagaatacgtgaatgttgggcaaatattgcagaaaagttcaataaggcaacaaatntgaaatatgaatataaacaattcagaaataggtgggattctttgaaaaaggaatgacaattatgggttaagcttatggggaaggacacaggtcttgactgggatggggagaagaaaaccattgcagctagtgatgaatggtgggaagccaaaattcaggtatgtattattcaacgaaaatagagtttttgtgtacgccactcttttgttttttatgtgtgattcttgactttgcggcaaaaattgaagttgcagactggtttttagaaactcgtgtctaagattttagttgataa

SEQ ID NO: 116102 - DNA, 368 bp, Glycine max
taaccttgtacattcaatgctatgaggcaagagtgatcccggtgtaaagaaaaggacacaaatagaacgactttggtagactccaggagaggatactgatgaatgaatctcacccaagagagaattccagatgtgctggatggactgtcaattgaaatgattcaacaatattggacacctatatcaacatgaacatatacttttagtattatccttaaaactacagtaacattttggctaagcatatgaatgggactttggaattgtagaagtggaggggacaaacagcgaaaattgtttattgggaacacatgattgaacactgggtataatggataagagctttccactgatgatgagaaaccatg

SEQ ID NO: 116103 - DNA, 466 bp, Glycine max
  unsure (1)..(466): unsure at all n locations
agcttatcagttgttggatgaaatgatntcttagtattaaaaccagacactnggagttataatgcaatacaagcttaccattgtgatcattgtgaggtcaataaagccctgaggttaatgtttagaatggaaaaagatatctgtcttcctgatcgccatacatataacatggtgctcaaattgctgattaggataagaaggtttgataaggtaactgaagtttgggagaacatggtggacaaaaagttttatccttctgtctcaacatattctgtcatgatcccatggttttgtaagaagaacggaaagctagaggaggcatgtaagtattttgaaatgatgattgatgaaggaataccaccatatgttactactgttgagatgctgaggaatcgngctttgggtttagggtttatagatcacattgaaatactggctgctaagatgaggcaaagcactttctatg

SEQ ID NO: 116104 - DNA, 271 bp, Glycine max
  unsure (1)..(271): unsure at all n locations
acactatcatactaagctaagatagttgtagataacgcatataatgtttgtattntatttcaaccaggtgtgtagcaaattgaattctagcaactaccaagcaaactataatgcaacccccaatatatatatatatatatgggatttgctaacttacacccactcgttttttagaaggagtaggttagcaaattataactataaatntcctttaaatacacccaggtataacttgtaacttactacttctaaaaagtaagtgagtgtatgt

SEQ ID NO: 116105 - DNA, 79 bp, Glycine max
gctcctaattatgataaagctgtgtacactgtggactagatgacgaagactggagacgctctaaagatacttctctact

SEQ ID NO: 116106 - DNA, 414 bp, Glycine max
acgaccgtggccgcagcatgtaacttgaacaattttttttttattctgcacgaggagaattgtgcagaatactaaagtgatctatcttgtcttccttctacctcttgccgaaagattcaaaggactaatcgcctgagatatcttttgtttccccttacaaagatattagggacttaccgccttagaattctttgtcataacacattacagggtacattccttgttgtgcaagtagacggcacatctcttgtggatcagttcaagtggagggtacatccacttggttgttcaaagagaacaagagaaggtacatcccttatggatctttgcttgtaaaggattttacaacgttattgtaaatctcaagaaccagtggttgcttatggactggatgtaagcacgagttattgtcta

SEQ ID NO: 116107 - DNA, 461 bp, Glycine max
  unsure (1)..(461): unsure at all n locations
agcttctaatntcatccagttaagtttgttgctttatatgangagcagcattcataagtaatgagctcactccttatgatctttatgaaatcttgtacttataatcatccatctccgaaagaatcatataatatcattcattcacaacactttaaaatatcataggattctgaacctatcacttcatcttgagtgtattgttaagcctaacgaggacataaagacataactccagttatgttgaattgtagacataaccattccatttcattccttatgtgcaccttctttggtcaaccttcttcatacactttactatataacttagatgtaattctccgaaacattcataattttagtgtaacattttctcagattctattagatgcaaagatcttcattcgtacaaattacagaactaggttattcatcaaatagccggtctatttattatgtttcaa

SEQ ID NO: 116108 - DNA, 414 bp, Glycine max
  unsure (1)..(414): unsure at all n locations
atactaagctctccatacatcatcatggccctggatacgatttggagacattattctctatgaacaagaagtcagttaacatacagagtgtagtgtttaacacagtattacccttgaacagtaagaacagttgcccaaggcatgatgaatgcccacacaactcgagatccatactggaagcctgatacgcagagaagcaaaattgtcattcctactggccattatctagaatgaatatatatttttcgttgagtagaacatcatgacacagaaatcacattgccaataactttcacctttctatggttttgctgtcagtgagtgctccatgttcaacaacctcaccggtgatctcatgcnccacaacacaaggactggaaaacggaatttcacctttcataacatgtagatcag

SEQ ID NO: 116109 - DNA, 300 bp, Glycine max
atgttgggtagagcccggtgaagacctcaccttatgacctgaagtggtacaacatacctctgagaagctacagttgatcctagataggatgaggactacccataggacgaagaaatgtgatcacgattagaggagaatatacttggaattcaagggtggtgatcatgtattcttgaaagtgactccacggactggggttgtccatcattgaatacccgaaaactaacacctcgctatatcagatctgtcctaattctcaaaaaaaggcaggcttgtggcatgcccaaatgcattaccctt

SEQ ID NO: 116110 - DNA, 408 bp, Glycine max
  unsure (1)..(408): unsure at all n locations
taagcttgattatctatgaaaaagaaaatgttggccacattgttgtttttgtgaaagaggtgatgagaggttctaaagagtgaaccantatgattcangatacaaagaacttccgtaagctatgatgttaatgtgccttactggaggcaaccatccccntataatttggtttcttgcattctattcacaagattgttgtgatcgggtgtttcagctgttagtttgaaaaagggggtcatagttttggaaagatgacaaaaaatacttaaaatttattggccatggctagccacccttcctaacccattcctcaccctatcattgtgtccgctaccctgacctgactgctgatgtccctagcaggctacctaccaaaactttgattaattttcatggctaccaacctgt

SEQ ID NO: 116111 - DNA, 470 bp, Glycine max
  unsure (1)..(470): unsure at all n locations
acctgcagctgcaactgaagagaaagagctatttgttgctcacgctgaatcgangagaacgtcgccatttctgagtgaaacagtggcagaaacaactagggtctagggagggaggacgcttctgtatttttattcgaagggggacattttgattgggttcctcattttgtttttgggccatgggttcttatnttgggtcaacatcatggatcatgcatgttctatttaataaatttaatgctcttatttatttgctttcttttaggattttttttatccatataaattaaagagatatcatgatttacaagaactcaggtacattgctcaacttggatcccttgatttctttangataagaagaagagaggaataatgtttttctttttaataacaaattatggtttgtccaaccttaagtaaatgacttatttctctagactagaatatattcaaagatatgtctttta

SEQ ID NO: 116112 - DNA, 406 bp, Glycine max
  unsure (1)..(406): unsure at all n locations
nggaaatgtgtcngactatcttgctcaagcttatccgntgtaatctatcgagntcttctccccacaaatgttcaaactgatatcgatcangcagaaacagatatcgattactctactatcacaattgttgataaaacaaaggagaactcagcccacatacatgatcttttatattctgcgaggctggcccttatcataataactgctgttatgctagtcttgacacttcttggttttttattctcacattttggcatccaactccttgtgtatatcttggtaatagcacgatgggttcttgtcactggcacccttatattatgtggcttgttccttgttctccattatgtgacagcagacagttgtgtagctgtgaatgaatggatccagcatccgactgcacata

SEQ ID NO: 116113 - DNA, 443 bp, Glycine max
agcttacctcccctggtataccaagactgctatcactttcagcaccaaatgcaaggacaacctgctcgagttcatcaagttattatgtaaaagatggtacagttgacaaatatctacattaacatgttagtatattacgattaacaaaaaaaaatccagaaccagagtgcctcagcacgggatacagctcgtgtaattcaaagagagaaatgtaggatgcaagggtcacattgggtcatgtcataccctaatttcgtccggggactggtgcttgatggcatgcaacctttgattgaccgcttcgaaatacttagcaccctttgttgcacaatatgtgaagtcccgagatgcgccagaaatcaaaagaaagcatggttacgcgatccgtgaaattccgtaatgtggcggaaaccaaaaggaagtattgttacgcaatccgtgag

SEQ ID NO: 116114 - DNA, 333 bp, Glycine max
  unsure (1)..(333): unsure at all n locations
ttatccatggcttcctatggtgttgagcttcttgtatatccatcttctactcgatgtgaagtctccattcatctttctccttctatattctatcgcaatcaaacctcaagaacaaaggaatccattgatgaagaagatctcaggcctacaagctccacatggagctacatcaaaaagagggagagaagttgaaacttgaagtgtgtctcacaagactctcattcatcaaagttacaacaagtgttacacatgcttgtattatagcctaggtagcttccttgagaaacttccttgagaagcttncttgagacactttcttgagaagcttctttg

SEQ ID NO: 116115 - DNA, 410 bp, Glycine max
  unsure (1)..(410): unsure at all n locations
atgaggcacaaacacaactactggccatagtctgagaacttctactctaagaacgttggacttagcttacgatcttcaagttatacgcttagatcgagaaattgttgtaagtctacaggagtggagaaaggcatttcatcataggcaacctcccttcttctgcagactatagcacttgtagggtagaccttcctctcanatggtgtgggttctaatatgatgttgttgatgaggtttggaggagaggaatatccccttatatgacttgctctttccatgttattggatagagcatggaccttctcttctgtatgggtctcaatagatgaataagagaaatgatcaatcccttgcacacctctgcataagttaactagatttaactattgaagctcaatcttctgcatctc

SEQ ID NO: 116116 - DNA, 420 bp, Glycine max
  unsure (1)..(420): unsure at all n locations
gctggggacgtnnttgggtgaaatatatgcaccaatgaagctttacccctgccttcctttttatgttttcatgtacagggtgctcacccaagcgagctaactctacatnttttttgcaagaattctttgcaaaattttgactatcctctgggtttgcgcttattntattttaattcataggattatgaacaaactangcatattcaactatgacttaagaaacataggtgaataaataacaagcagaaatttaaaaggtactaggttgcctcctagtagcgtctcgttaacgtcttgagcttgatgcgggatgatgatatgtngatcacatgcctaacacctgctctacctgcccctagtcaggacatgacatacgcagcaaataggactacactaccactacctttgttaccttgcttt

SEQ ID NO: 116117 - DNA, 236 bp, Glycine max
  unsure (1)..(236): unsure at all n locations
attgtgttcaatactnagaagcatgattgtgtcgtgtctctgtggggcgttgaagcaaagaacataaaactctgttgtatcaaatgataacgaagcaagtcacgcctatcccaatatggttgtccatcattattcccaccagacttttgacgcccccatcacaccaccactatatgcgtgccataaatactaaggacaatctctgggttccaccactagaaagcagcatctcatga

SEQ ID NO: 116118 - DNA, 280 bp, Glycine max
  unsure (1)..(280): unsure at all n locations
gcactgcagctcagcttgaccctaccagccttccattgctttcgctcttaaccaatcgattntaagagtntctggaatgttgtccanatcaaggttttcggcgatgttgacaggatgcggcgtaaaaaaaaaggcaagttagctcgcctgggcgagcaacccctggcctaaatataaaaaaaacgaggaggggacattcttgactcttttttccttcccccgcaatatttatagaatatcctattaagggacaccaaagcagccccttcaacttcattgt

SEQ ID NO: 116119 - DNA, 469 bp, Glycine max
  unsure (1)..(469): unsure at all n locations
ctcagctatgacctatgtaaatagaagcttttgaacacgtattnatatatttttgattacaatntatgtatattccatctctttgtaatttctgtggttttatcttccttggattgttggaagttctacgtgctgttaaactggaagcatagaatctaacatgctgacgtactttgaaaaacaatagatttagntaaaaaatacatattcgtttgtagttaaaattaatttttatgtatgcgttgaaatgacttgttatactcatntttgttttaaaaaatatttattttaacaaaataactaanaatatttaatataaattaaagtttaaataatttttgtcacatgaaaagagatgttttgataaattatttatgccattaatattttagaatatataaatattataattntatatgaaaataatacatgaatatttaccgaaaatatctatgtagactacaaaaat

SEQ ID NO: 116120 - DNA, 228 bp, Glycine max
  unsure (1)..(228): unsure at all n locations
ttcttcacgaaaacacattttttcacccaaaacaaccgaaatgcatagccaaggggtccgaaatgttttgaaacagcccccccccccctcccctatttatagggaaaagggaggtgcttgacgcccagaggcttcttgaggaagatttctaagcgcaccccaattactaagttcaccctccttttcgtacttnaatggaaaagtacggaagccttacggaagtgtttc

SEQ ID NO: 116121 - DNA, 468 bp, Glycine max
  unsure (1)..(468): unsure at all n locations
acactttaaactaagctgatgtattcaaaacacttgtgactaagaaactaactgctngttattgtaatgagtcttatgcgaataattgtgaacccatactaaccattatattattagtacttcgttgggtaacaaaaaaatgtggtccaccaaaatcatttatgcatgtagcatacatcattgtcataattgacaacacataatgacatgcatgctattaaagtttgagcgcgacaacacattgactgacttgactacacattctataggaaacataaacaccaaccatgttcacgcgtgtctatttttttgtaaacaaagtgaagcaatcgcttggtcacaaccatctatatatatagcagacacggctaataaatcacatattatcttgctntcacatagtctcccaattcatacacaaagtatggcattgttatgagaaactagcagtcagacgattgtcaactc

SEQ ID NO: 116122 - DNA, 313 bp, Glycine max
  unsure (1)..(313): unsure at all n locations
agcttattaccacttgacactctggagtatatctatgtgtcatagaanatgaatggagggacagggagagaagcgtgcacacagaatattcctgaaacgaggtgagacctctatgaactgtgtatccgatgaccaatttgcacagaatgcactcacgaggcgttcatgtatcacctaggttgggctcttaattgcgaggacacattgtttcctcttcacatctcacttgcatagacaagggttcgaggagccatgtatggcactcccccttctcccctatgattagggaattggaggtgtgggacaccccaat

SEQ ID NO: 116123 - DNA, 271 bp, Glycine max
tatttatctcgtggataataaacaaacacgtgtctatcaacttttacataatatttaaatcaacatttgaaattcatcacaaggatgcaaattacgaatttttaataatgaaaaatcaaataatctcaattagaaataaaagaactaacaacacatgagaaaagaaacaaagattgcattgtaacctatctgatttttggatccttacattctttatatttattatttctcacactgtattgttgtattaacataacaaaacatgataata

SEQ ID NO: 116124 - DNA, 509 bp, Glycine max
ttagactgacgtggcgcgtgcagctcgctgtagaaaagatgaaattatttatgtctacttctcaaccaaccgattcataatatggagctctgaagcaagatcgcagtagatgcacgccatacatgtgcactgaggagtagtggatccagagaagtcgagatcagtgcatatatctacgtgagacccctcccgcccacttatgatgggaaaccaattatctacgtgagtgaaaatatctaaagagtccatttggtgccagcaatcaccgtgaagtatacaatgcgattctcttgcatgaagatcgcggagttagaaggaaacaactaataataatgatgtattggatgtttgaagccgaaagcatctaaacttcccggcgcgacaaatgcttcagtgttagctatacatttcatagggaatggagtatatcacgtgcagtccgctcggatatatcgcagttataatctaatgaactattttgagatagaacatggagagctgtgtctact

SEQ ID NO: 116125 - DNA, 422 bp, Glycine max
  unsure (1)..(422): unsure at all n locations
agcttgagatgaggaagcgctgaagggtgttactttctgctnttattgncgaccacagagtggtacctgtagatatgtctcgggggtcacgagaccttggggacgtcaggtggggtgctattgcccaaaaccaagcttgaccaatcccgacccaacccgggcatagtcggtcattgagaacctgtgatgtacctaagcatgcgagctcctggctgtcaacagataaaaggaaaacattaccacaaagcatggaggcttgtggtggctggccatctgtgaattttgcgtaatatgtggatggtggcctctggtaatcgatcacgaggcttaaaaatgaggacaggaggctaatacggtctctggtaatcgattaccactgggtgtaatcgattaccatgcttgataacgaagtcatgaaactt

SEQ ID NO: 116126 - DNA, 410 bp, Glycine max
  unsure (1)..(410): unsure at all n locations
atgaggtaaatttgaagcaaactctcacctcacaccagtccataacatctatatagacttgttcaagctggatttacacctaanatctcaccgaatcaaaatttgactcttcaacacccagattttgccctagaaatagctcttggttcactatggtcattagtttttctctctagctcagcctaacctttctcacatgtcctaaatgacatttcaagctaatattaactcactttaacctccatttaccacagaattcagacttagccttccaactctcgaagtctcgctctttttgcactcataacatcacattctcactttctaaccctanggtagttctacccttcatctctaacagttttccatcagcaatntcagcatataaacatcacacacatcatctcaca

SEQ ID NO: 116127 - DNA, 427 bp, Glycine max
  unsure (1)..(427): unsure at all n locations
ctgcaagctngtagttatgcagacacgtttttttatggtgcgggggtggattcactgcaacaccgtttgtgttctgagcccgaggttcacgggcccaaggttgcgtttctcttcattgcacggaacaggctccctttggaaatggattgggatgctttctttatggtactttcttttctcttttagttgctattgatctctatatctttgggattagtagtgtatgcaaatgacaatataaagagtttttactgtgatatccaatcataatccatatgataagtttgttgacttttacaatggctagcttaccaacaatggttactaattgattgatattcgaaatattttctacacttatagtgcgtaaaattaaactcaaatatgcttgcttgcgtgtgtgtgtgtgtggagcttgtaattaata

SEQ ID NO: 116128 - DNA, 292 bp, Glycine max
gcgtgaaggggttgtcccctgcgtgcaagtagacgacagcgtcgaatgatgaggctgttacgtggctggagccgctctccacacacaccagaacgttgtcttctgagtgaggctgcatcgaggcgcgaaatgggggttggaggatgggtaggaagagaacataacggtgggattggagcatgacgaatagggtatcggtttcacgtcgcggccgttggagccggtccaaagagtggtccaccaaaccttgaaccggaagatggaagtgaagcttatgtgtttaagctgtcct

SEQ ID NO: 116129 - DNA, 435 bp, Glycine max
  unsure (1)..(435): unsure at all n locations
agcttctgganaagctcatatatgttcttanctttntgccaaagggatcatctctagcaatgatattcgacctatgaccagctttaacctgtttctttgtcttttctatgaatcctatattgttaatgaaaataataattaacctaatgtttgagttggagttnttaacactataacattgtattaataatgttaaagaaaaataagtacttcatgggatacaagtttcacaagatgtgtcgaccatgcaatgaatgtgtcaagggcttgcctgacatactaaatctttgacgtcaaaaaagggacttaagtgtcaccattgtaaacntttgcaatactcaccttcaccacatcatcaccataaggcacgttgtgtatggtggataccccatcatatatttnttccaatgcaaccaggtgtgtacaatgatcacc

SEQ ID NO: 116130 - DNA, 387 bp, Glycine max
  unsure (1)..(387): unsure at all n locations
tactaagctgtctagatagatatatcaataagtactatatatattttgatggaaagccccacattccccgttcaatttaaaatgagacanactgtctcacacaatgttctaaaataatctggagagaaaacacatggaagcaagttcgtatgcatcacttgtatggagtattatgtatgctcagatctatactcgaccaaacataaactttgcagctggaatgttacgaagatatctaagtaacctgcgaatggaacattggaaagctgcaaagaaggttctgagacacttacagggaacaaaagatcacatactaacatataggaggtccaatcaccttgaggttattgggtaatcagactcaaactctgttggatgtgtggatac

SEQ ID NO: 116131 - DNA, 490 bp, Glycine max
  unsure (1)..(490): unsure at all n locations
acccggatccttaagcaccgcggctgcagcttgataagaaatactatctttgattatatggttctttccaacaaggtggtcgacctaataatttatttctaggtaacaaaattagcaaagcctaaatataaattgaatttaatcagaaatatggaaaaagtttctatttgtaataaaaaaggaagtaattgtagaatttcattagaaaatggaattatgaattctaattgggtaaggatagagatcaacaagtttctgaaaaaagcttttcaacaaaaaacagatacattatgggggcagagagaaagaattgataacaatcatttaccaagaaaatgcatggagcaagagaatggaaaggggttaagtaaacaattaactcaatattgaggatactacagagcaagttgactgaatggagaaacagaantccttttatgctgttccctacgtaatcattcacactggtttttacttcacaggaaacaca

SEQ ID NO: 116132 - DNA, 234 bp, Glycine max
tgagcatattgggataaagataaattgtaatttcatgctgatataatgcgagttgcgaatgcatcaaaactggggagccttggcattacaaagagagccgatgcttctacatactggacggagggacgtccctgacataattgctccatgaaaaaattatataatgggggacttctgacaccttggaagagaagagggataaaagatcggtatgcttcttatgacttggaacat

SEQ ID NO: 116133 - DNA, 414 bp, Glycine max
  unsure (1)..(414): unsure at all n locations
tatatcgagacgctcggaatngaacaacggaagctctcgagaaaatcaaatgatcataacttttctcacacacgtccgaattaggcgcataatatatcgagacgctccaaattgaacaacggaagctctcgaaaaattcaaatggtcatttcttttcactcggaggtccgattcacgcgcataatatatcgagacgatcgatattgaacattcgaagctcttgagcaattcaaatggtcataacttttcactcggaggtccgattcaggcgcataatatatcgagacgcttgaaattaacaacggaactctcgaaaatcaaatggcataactttcactcgaggtccatcacgccatatatatcagacgctgaaatgacacggagctcngagaatcaatggtataacttactcga

SEQ ID NO: 116134 - DNA, 435 bp, Glycine max
  unsure (1)..(435): unsure at all n locations
cttctgaaatcaagaaacacacacacacactttntcctagtcaatcactcacataaatttcaattcttcccctttggtttttaatttatgcctctcttaaaattaagttgattactcatgtgagttcttgatttaatccctatttcttgtcccctttggcatcaacaaaaagccaaagtgcataacaagtttgaatcatacaaatacaccatggaaaaatataagccaaatcatgaagcaagaaccatgaagcaagaacaatgaatagatcanatataaaatccacatagtcaaataacataactaatatttgttcaaacataccgtgcaaataaagaaatagtaaattgttcanatatcataataatatagccaaatacaagggtgaaaatcanagtactaataatattaanataatagaaatctaagatgatg

SEQ ID NO: 116135 - DNA, 336 bp, Glycine max
actcttgcttcataaatgcgtcgccattgtccagctctagatgatacatatgaacacttgctaaagattatttgaataagattggcatgaacatatttaaatatgtgccacaattggaagaatacgcattattactccattggtttgactctccttaactaagttacttaccccaattgaatgcatctcttcttgagctattcttctgtacggaaattataatttagacaaatatatcttcattgttaaactgaaattgagaagactgttttatttatctatattttccaaagattggaagattgactattcagaattaatatatcttttcaatat

SEQ ID NO: 116136 - DNA, 382 bp, Glycine max
  unsure (1)..(382): unsure at all n locations
catttacttgaatgaacctttgaatacctttaaagttcaccttctnctttgaatgaacatccagattaatctagcattcccaaagagagtaggttccttttaagctcaggaacatgcctcacatcagggagcagctntacagatccatcttgtatcttcaatntaatagttccaatgccaatgacattacatgccatattgtttcccatgagaacattccctccatctatctccttataagagctgaaccattccatattgggtgtcatatggaatgagcaacccgagtctagaatccattcctcattgtgctnttcagttgagatggagagcacttaatcactttcatatncatcagccaccactgctatatcagaatcat

SEQ ID NO: 116137 - DNA, 440 bp, Glycine max
  unsure (1)..(440): unsure at all n locations
cactactctgactttttctcatggagctctctccaaaaacacagtgtcgtcagcatattgaagaacgttcacaggaactttgttcttccccaccaaaaagcttctgaatttatttttgagaaatgcttctctcatcagtcctgtcaatccctcagccactagatcaaagaggaaaggtgccaaggggtcaccttgtctcagccctctttgaaatgcatatcagtgttatcaattgcagatggcggaaatggcggaaagccaataattttttctatatgatatagtggatatcgtcgctaacatatagcgaaagttacataacagttgaaatataagatatatatcaaccatatatgcatacnnacaacatgttgtatgtaaataatattaaaatacatganaaatgacataatggtaactcacaagtttcagtacctgaa

SEQ ID NO: 116138 - DNA, 302 bp, Glycine max
  unsure (1)..(302): unsure at all n locations
cgcgagctctgaccactgttctttcttcccgcgatgcttcttttcatgtccgcctgagtgggcttatagcctaaaccatacttcccacgatttccttgggtttttatcaggctagttatgccgccattgtctttgcctaaacccatcccgggttcataaccgttccccaacataactcgggccatcattaccgccgcatcggacagacaaggttgcccaaagagggagtccacggaggaaatgctgaccacctcanaagactggaaagcnggttctaatgattcttctgcggcttccacata

SEQ ID NO: 116139 - DNA, 210 bp, Glycine max
cgtagaggatggacaactcactagtatatcttcttcccatgacattataaccagctatccttccaccacaaacatcaatttctggtgcaacattgacgggaccaccccaacacaatggatccaaggctaacctagcaggcaacttgatgtgccattattatcacctatttcttaacccttattgccccatttaagtactgataatcttaa

SEQ ID NO: 116140 - DNA, 354 bp, Glycine max
  unsure (1)..(354): unsure at all n locations
attctctagaatgctccacacattctaggagtctctacactcttttatttcctttcatactcttccataagggtccagcccacacatctccagaatattccagaggtttccacatccttccataagcttctagagagttctacactactctagagttctccaggatgttctagaaaattctacacttttctagaaagctctagaattntctagaacctctccaatntgttanttaatttgatatttatttatttattngagaatgttcttgctatcttaagtattgttttcaattgaactatctacanatacataatttaattcattacgtcatatgatacttttatatttatt

SEQ ID NO: 116141 - DNA, 386 bp, Glycine max
acacacgccgacgcgaacactaactctaatacacgcgctcttacactcagacacacacacacacagaggttccgcacaccataaagacactgacatagacgcaaacacactgagccacagacacacacagagacccacgcacaaagacacatacactgagtcacaaacacacacatacacaaacacactcacacacatggacagacacacacacgcatacataaagagaaaacacacagcacacactgataagagcaaaccaaacaccacgccacaccagagtgcacaccatatgagaagagaataccaacacactggcccagaacacccacaagaccacacctatgacagaccactctaccaacaccttaccacgtgacgaccac

SEQ ID NO: 116142 - DNA, 380 bp, Glycine max
  unsure (1)..(380): unsure at all n locations
atataataataataactttattttatcaaatcttatcttatcaagattntattccatctagaatntattttatccaaaatntattccatcttaatgtatttcgtccagatttatttcatccaatcttatcttgtccagaatttattttatttccgttatgggttttgacttaaaatagaattgtgagccttgggactgangacctatataacaacaccaaggttttagtttaaggaagttttttcggagaggaagaataatctangaatttagaatttcagtttttattatcgttcatgcacattcgttatgtagaataaaaatcgttttctgcaatntcatttcggcttcaatctacagtttcgtttctactgattaat

SEQ ID NO: 116143 - DNA, 405 bp, Glycine max
  unsure (1)..(405): unsure at all n locations
ttttttgggacctgtagttatttctttnttaatttaagtatttcttaatgatgagaatgcttttcttaattaataaattatggagaatgatgtttcgtgatattcaatcaagttacatacttatctttatctttattgaatcatttgctatattttttaatactttacattgatgttgtttaattatttatgataattgaattatttattaatataaaatttaaaaattgaataagttattaataaagaaattaatgattataatcgattagaatgataatttatgatggactnttgtattaaaaaaagattaaacaattatggactaaaaagaatatacaatgaattattgtgcaaaatatttatacatgacatatgtaagaaattatttatggaacatatgta

SEQ ID NO: 116144 - DNA, 356 bp, Glycine max
  unsure (1)..(356): unsure at all n locations
atctggacttgatcttggattaatgggctgaaccataactaaaattcacttatcataattagtgaaattttggcttcaaaatttggatccacaaattccatttcaaatccaagtgaaatttgaatagaaattcaaatttccctccaattttgtgtgacacttaggctataaatagaggtcatgtgtgtgcattnttttggaactttgatcatttgaaaattaaacttcagatttcagagctcttttagagcacaaaatntcgggctcttctcttcctctcccttcattcatctccttcttcctccaagctcttatccatggcctcctaaagtggtgagcttcttctagactcatct

SEQ ID NO: 116145 - DNA, 367 bp, Glycine max
acaacgattttttttatattgaaacatcatacattcgaagcagatcctgaacctcttctatattgtcttgcactttcgaacagtctcaatagcatcaacgattactaaaatttgcgatatggacacatacagggatttcatctaaaatatacatccacttaaatggagaacagaattgtaaagaaaaatagcaatggtcaaatagccttactttgtaatagttccatcaacgtctgaaattacagatcttgcattccacttccataaataaatatgaccatcaacctgttatgtaatcaaaatttatctcttaaacaaaagtccaccactggtgaacttaatacacgaacttagaacatcaataaat

SEQ ID NO: 116146 - DNA, 365 bp, Glycine max
  unsure (1)..(365): unsure at all n locations
gatatatcaaataaagtcaagtctattttatcacagacttcgaccattgaatatgtntattttcacagatgaataattacattgagtgattaacaaagctaaataaacatattaattttgttaagtatatagttaacacaagttaaatactatattttattgtgagttttatatatcaaatgctttcttactaaatattatttaattgttcaactattaaataaaaataaatacatttaagatacaattgtgacactaattaaaaaaaaataagagttgtatattctttcgcagactttatgctcatattcaattgaataaaaataaaattagtaggaaccatcaacctctagtacctgtcaaaa

SEQ ID NO: 116147 - DNA, 404 bp, Glycine max
  unsure (1)..(404): unsure at all n locations
ttctggtatctgagattcacttaaaattagtgagaaaattggttctcgtgaagaaaattcatgccgaggcgcttncgtacccttccgtgacgtttccgtgagtgatttcgcgaagattttcaattgttctttcatcgtcttcggttggtcttcggcggtcttcggtattcaacccggtagttcctgaaatcaaacttttcaattcattctatgtacccttagtggtcctcattnttttcgcgtgcttttattntcatttcatttactttccgtacccccttttgatgcgctntagtaatttatttaagtcattttctcgcctaatcaaaaataaaataaatttccaccgatcatttgaattgaacatcctttaatttctgtnaaatgaattccgaccgtcatca

SEQ ID NO: 116148 - DNA, 317 bp, Glycine max
  unsure (1)..(317): unsure at all n locations
agacagtggcctcagatatcttaagaagggggggttgaattaagatattcccaacttttcttctaattaaaaatctatcttactttttacttaagttatgaattcccttaatgacaatcttcttaaatattaattcaaatgaagcaacttgaattatgaatataaagcaataataaataaaggagattaagggaagagaaaatgcaaactcagttntatactggttcggccacacccttgtgcctacgtccagtccccaagcaacccgcttgagagttccactaacttgtaaattccttttacaagttctaaacaca

SEQ ID NO: 116149 - DNA, 433 bp, Glycine max
  unsure (1)..(433): unsure at all n locations
ctttgcagaccatcattcgaggtctcttctttaactatctgaatccaactttgtccgaaaagaagattcttcgtgatttgagcatctttgaacccatgccagcacaagataagtattaaaagtactaagttggatttggagtaataaacctctgattattttattttatcttttgttgatgatgttaaatacaatacaaaattgggtaccttggacgattggtcgtctctggaattctttggaaacaaggcccttcatcatacccttcacaaactatttctccaaactcatctgggtagcagattatgccctgggagtgatcttcataaacctgtntaattagagaccaagtggacattaattaacacaacttaccaaaaagatctctctcacaatcaaagataatattaaatgacagacaaagatgaagata

SEQ ID NO: 116150 - DNA, 378 bp, Glycine max
  unsure (1)..(378): unsure at all n locations
actgataacgtatgctaccaataattatatatatgcgtgctatatgcacctcaattgactagtgacctacttatgattgagctttccgtttgcaggacggganaattaattaccatgagttttgggctatgatgagaaaggggatcctggatattgatgagacagagaaaccactataattgtgtgatgtgacatgacgacaaaagcggttcctggatctctcttgctgatctctgctggggatgaattatcactcttgaacttgcaacttgcatgtgtgtgcttaattcatggtaaagtttatggcatccaaaatgcctaactntgtatagctggttaaataaactgcgatatgtaacaataaataaactatatcat

SEQ ID NO: 116151 - DNA, 252 bp, Glycine max
  unsure (1)..(252): unsure at all n locations
gaaatgttgatgtgaacaaattgacactatggaaggcaaatggaggctatctatatccctctatagggtttgacatctcataggcttacctaacattttcttagttttagtatttgacatctcataggcttacctaacattttcttagttntagtaatatgacaacgcttatcactttcaatgaaanaagtaattattaattgaacatctaaataaagtcattgagattttaatctcttcatctaaatccct

SEQ ID NO: 116152 - DNA, 445 bp, Glycine max
  unsure (1)..(445): unsure at all n locations
ctactatcattggtatcatttctttctccggcattgaggtgccacttgagcctgcangtctctccacctttgggtgtattctttgaaagattcatgcccctttttgcacatgttctgtagttgcatcctatccagagtcatatcagaattgtactgatactgcctaactaaggcaaccattaggtccttccaagaatggactcgggaaggttcaagattagtgtaccatgtggcggctaccctagtaaggctctcatgaaagaaatgcatcnaacaattttcatctttcacgtacgcccncattntccgatagtacagtttcaggtgattctgggggcaagtggtctccttgtatttatcgaaatctgacaccttgaacttcggagggatgacgacgtcaggcactaggtacaactctgccatgttagcanaagcatgatctcca

SEQ ID NO: 116153 - DNA, 434 bp, Glycine max
  unsure (1)..(434): unsure at all n locations
catgatgcaatttcttattggaaccttcgtgatcttnctattgaaggttccaattaatacacttgggctcataggaagggcaaacccgatagcatcgaagaacaacatgatagagttctagccacacatgaatggattgatcttttcccttattttaatcttgtaaatgttgtttcttccaagtctgatcacttgacaatcttgttgtgcctccaggatgatgttgcaaggagatttgaaaaacaatttaaatttgaaaactcttggctactagaacctaattntaatgagattgtggaaaacaactggactaattcctcctttgatggtttccgcactaagatcaaatatgtntatganaatatgaataattgcgtcaaacaaccaagaatgannatttggatcacattgattgtgcaacacaatatggagat

SEQ ID NO: 116154 - DNA, 320 bp, Glycine max
acgaaaagtgttatagtgactaagagacttacatgaataggtgtagcaacagatccaacctttaatcttttatggcttcagctaggagtggtagcctatttttacaaagaattctgaattagaattaaaaattggtgataaagaagcaagacaataaaagaagcagatattggtacctgagtcgaaggaggatcaaaaggagaggatttcttagaagtagtagatctggcagttctcttgaaagtcataggagctgactctagagaagtgtcctcttttatgttttccaaatcaatcgtctcaatttgaagtttcactat

SEQ ID NO: 116155 - DNA, 436 bp, Glycine max
gaaactaaataggtgccataagtgcagttagaacaataaattgaggctgaaaaaaaataagcctagacagaataagtggaagcttttctaggataaatgctctcttataaccctaattgttgaaataccattaaaaccataatttctttaattagccaagccaaattacaggccaataaaattccttagtgatccaccaaatgtaagcatgataactttaactgagatgaggtgcaaaattgggaacattaattgtaggttgtagaaactttcaacactcatccaagacacttgtgcacagagagaaacactaaagccttgtgagggaaaagtgaggcaagccgacctgattgatttctgctactgaccaattctatctcaatgtttgtttatgcttccattgcaagatcatggcaaatacaagaagctctagctg

SEQ ID NO: 116156 - DNA, 199 bp, Glycine max
ctctcctttgcacaagaatcccaagactaccgctgaatcttttgtgtcttctctcctttccaaagaacaaagcaacccttgatctttgttctccttccctgtcaagatcaaatgaacagctgaaatctttattctccctctatatcaaaaatttaatgctacccctgaaattttgttccatcacaagttaaggttaccc

SEQ ID NO: 116157 - DNA, 472 bp, Glycine max
  unsure (1)..(472): unsure at all n locations
tatattatttaaattttgtggtaattgcaaaaaagccaggaagtgacaaggaatcttttatctntttttcatatgaacaaaaatccccataaatagagagggaccagaatactatgcatttaaatagttgaattagagatgtatagaatattgataccttgtgtccatgtccgttatgttacaagaaaatgctacccagaatancctaattggtaattggtatggttgtgggatctataaaataagtctctcttggactaaaaaaanaaacaacaatagcagaatccttgtgttgacaagcctgcacaaactggacggttgctttatcgtctgaattacaagaaaataattcaggtctggtgactntgattctgatggagtcacctcgtacagttctgcttgattgtgaatgcagaattgtcaaaagtcaatnngctcatgngtgttatcattatcaatcttgtgatctatt

SEQ ID NO: 116158 - DNA, 352 bp, Glycine max
  unsure (1)..(352): unsure at all n locations
atattcgacaactatgtaaatattgcatcaaagtccattatacgtgtcacaatctaagacaatctgccatgttggataatctgtgtgacactaaaatngtcaacaatgcacctcactaacggtgttacttttaaatttaacagcaaggattattttgcaaaacttatgcaaagataggaactatnttttacatttcaaaaagatagggactaatttgcaaaaggcgtcaaaagtcacggaccaaaagataaggactactttatagagtaaatactctcattctgtgaattaatgtcgaatccaactcagtttcaagccaaagaagagaatgttcaagtagctgatgactcac

SEQ ID NO: 116159 - DNA, 363 bp, Glycine max
  unsure (1)..(363): unsure at all n locations
ggaagtgcggtagacacgctttgtggttgatttanggatggcctttgtggataattgggtggtggggtaaggaggacgtttgttattggctgagtaatgacatctgtgggttggtgggaaacttggccgtataggaatgatagtcacagcatgggtttctccctctttctcaccctcttcatttgcctcagttatctcagtcgtcctagtaggatgatcaaatcttcctcttttcngatccacttcgatctcttttctggcgaagaccacatcttgtaaacttgaatgtgttgaacccaccatctttttcatactataacaccggtcacgtgtctactatcattgtgatatcattttctctgt

SEQ ID NO: 116160 - DNA, 518 bp, Glycine max
  unsure (1)..(518): unsure at all n locations
agctngttcacatattagtattatgaaacattaatttgatnatgacaattaattagtcttatgaaatattaattcttgtcataggataatgacaatgtngtattcaaaataaaatagtagttgtgcatggtaatattgaaattggataatggtaatatgaagcaatggtcaattaaagcacgttgaattntaatagctatttttatttcttaattagtattcttagaatttgtctttcgattntggtgtttaaagtgagcgatctaatagtcaaacatttgactgcagaatgagatgcaaaccttcacaactttgatagtggacaagatgaggcatgagaatctttntgcatcacaaggaggacccattattcttgctcaggtttcattntaaattgtagtcccaatattnttttttcttaattttatccttgcattgatgatgctaaatattctaatatctgcatactttgattgggcgtactaatatagatggaaaatgagtatggaaacattatg

SEQ ID NO: 116161 - DNA, 442 bp, Glycine max
  unsure (1)..(442): unsure at all n locations
ttgatgagtcccgnatatatcgagacgctcgaaatggaataccgaagccctgaacaaattcaaaagacaataaattttaactcggatgtctgattgagttctgtaatatatcgagacactctaaatggattactgaagctctgagcaaattccaacgacaataactttttactcggatgtctgattgagtcccgtaatatatcggaaagctcgaaattgaatgttgaagctctgagcaaattcaaacgacaaataacttttactcggatgtgtgattgagtcccgaatatatcagaacgctcgaaatggaatgctgtagctctgagcatattcacacgacaataacattttactcggatgtctgattgagtcctcgtatatatcgagacgctcgaaatggattactgaagctctgagcacatcaaacgacataaactttact

SEQ ID NO: 116162 - DNA, 402 bp, Glycine max
  unsure (1)..(402): unsure at all n locations
cccaagtgggcaccttcaactgagctcacgtacttccacgtagctcttaatctcggttcttctaacaccgggtccccatcaattccttcaagcttccacaacatccaagcaatttcacatcccaacatcatgaactatcaaaaaccaagaaaacagggcagatgcataaaactctccccaaaacacaaaccaataccacagctttccttactcaaataccccagtaacattcttttcgttccaattcgttcaccggtggatccactcgaaaattttactggaggtccctagtacataagtctacattttaaccgttgggatctgcaaaaaacgtcagaaccaatatgtacaccctntcacaaccaccatactagcatttctgacaacacaaatctgtgacat

SEQ ID NO: 116163 - DNA, 359 bp, Glycine max
  unsure (1)..(359): unsure at all n locations
gttctgaaaggcttgaatgcaatcaaaggtttcagcagaaaagaattccatatcaataaacttagggtcgataatggaacgagatgagaaaagattggagtaccgtttctgctgttcgtcggaagaaaatactggggaagaggacanatgagggtggaatggtgctgtggatgcgttagtggctctagaatgatgagctcttgaagccaaagcggaggcggaagaaccctttcatttctttgacgattctgccatttgaggggaattttgcagaatttaatcggtgaaatcaaaagaaaaatgaanaagaagaagatcgcaatttacgggagtcgatttgatgaagaaatgagtgagat

SEQ ID NO: 116164 - DNA, 513 bp, Glycine max
  unsure (1)..(513): unsure at all n locations
tggtaccatattcttatacctttaactccggctggattaacatttcacaacagcataaatgaattggtttggtgatatagtcattcaccaaagtaacctttgtaactttaaaatattatggccaacatgacccttatggagaccagtcttcttacattgcatatatagagacanaagatatggatacgaagctctggtgcttagctgccanatccaaaacagcgtcactttnttaacataagctggacacaaccttcgttatttgcatccatgcagacagagacttcatccaaattattaaaccaaaaaatggtaaaataccacaatgacanacacctgtacaacagggatactnttatatttatattaatcatattaccctccgggattacncttaattagttggcctanattaaaaccaagccacttcggcttanangggtctcgtgattctgagactgtatacctactaagaatatcttagttgggccaggtatcatacgtaccccacaa

SEQ ID NO: 116165 - DNA, 487 bp, Glycine max
  unsure (1)..(487): unsure at all n locations
taacttaatgccattaacctaggaaattaaaaaaaacttaatggctgagtgtaactgaaattgtggcaaccaaaagtcacccccaacagccaacaagtcagccaccatttggtctcccaaaaggctgatgcctangttgccaattgggcccttattacaacttgaactaaacctactanaaccctnttagttgattaacccaaaacatatttttggtcagccaactttacaaggatngngccattatttagacaaactaaacactctaaaattgagacaaagtggtgccatttagtcctcctccatttgggccatgatacaactcacaaccttggacttttcgccttgaaacttgngcttgtattcaaatagtattgacaacacttgttgaagagcttccttggcttttcttgctctagcctttgtcatangccctccaagtccttcaagtggatccntgcccttgctcttgggtcatgtctcatca

SEQ ID NO: 116166 - DNA, 472 bp, Glycine max
  unsure (1)..(472): unsure at all n locations
taccatgcatgcatctattaatgtctntttggttattntaatcattgcttcctttcgggtgctgatgtcattgatgcaagtgtttgaaggagctaaccactatgaaatntgattctttgggatccagtgatgttgatgctttgacatttacttcactatatctccagataatagagcttcttgtagatgtatgggacgactngttgcctgcaaaaaggttgtatgctcagggaatggngaaaatggaattcaaactgcgaaagcttgataggagggttaaagaattgataagtaggtttataggttactctgtagaggaattgaatgtcttagagctaatgttattgacttatacccttaggatatgtaaataagaaatcagatgtatttattaatcatacattcaagaggtngagtactctatatctacgtgtngaatctatgttttaagaaagtcagctttgcatccaat

SEQ ID NO: 116167 - DNA, 249 bp, Glycine max
  unsure (1)..(249): unsure at all n locations
tttccaccaacccaacaatgtcattactcagccaataacaanaccttcttcttacccaccgnccagttatccacaaaggccatccctaaaatcaaccacaaagcctacctaccgcacttccaatgacaaacaccacctttagtgtaaaccaaaacaccaaccaagaaatgaatnntgcagcgagaaagccttagaattcaccccaattccactgtcctatgctgacttngctccatgtctacttgataa

SEQ ID NO: 116168 - DNA, 397 bp, Glycine max
  unsure (1)..(397): unsure at all n locations
acatgactcaatcgggcatccgagtaaaaagtaattgtcgttagaatttgctcacaaccttctgtatctctaaatttcgagccggcttagaatatacttacggcgaactcgactcggacatcccgaagtagaaagttattgtcgctagaattttctcagaggttctgtattccatttcgagcgtcttgatatataacgggactcaatcggacatccgagtataaagttattcccattagaatttgcacaacttctgtatttcattctgagtgtctcaatatatgacgggactcaatcggacattccagttaatacttattgtcgttagaattcgctcacagcttctgtattctanttcnagcgtctcaatttatcacgggactctatcagacatctg

SEQ ID NO: 116169 - DNA, 496 bp, Glycine max
  unsure (1)..(496): unsure at all n locations
ggatcttaagtcaccgcggctgcagctatataatcatagaacatctttttgttgcaggacataaagaagtggaacctnctcggttaataattgttctaaagctgtagatcaaacatagtggtacaacttaagaaatcaggagtgagacatgtcacatggttattattaaccacacttaacaaggggtcatggaagacctcaacgatgctcgaatacccaaacccatccttcatgggctggtcttgtgcctaggccagaagggcaacgtcctanggtccaaaactagatggtgcacanaatataaaaataaacatatatatagttatgtgattaaganaattatattatcatgtgattatgaaatacattttcttggtgcatttttctctgccttaagtagattcataattgtgtaaanagactactctcaaagatgaatataagtagaatgaatacaagaataaaacatcactaaaaattaatgtattattataat

SEQ ID NO: 116170 - DNA, 370 bp, Glycine max
gtcaccgcggctgcagctgccctgcgcagtgcctcgaccaaccttatgtccaatagaagcaagccctacggccaacccaaaagcgcgcagcagaaataattggattcatgataatctcctagtaacctaaatgtcacataaagaaatagttaatgatatattcaaccaataaattatgacttaagtttctaattatcaagatttattcggcttaaagtaattaataagaattcgaacaaatgcaataggaattatatttatttgtaagcaggaaaggcatatatactggaggtatatgtgtgagccttagcttaagcaataataccatggagcttgtacatgatgcatgtatattctccatgccgcacgt

SEQ ID NO: 116171 - DNA, 334 bp, Glycine max
  unsure (1)..(334): unsure at all n locations
acctggggaagaatggtttcacaaatctttcccagtttttatgtttatcaagtacacatattgataggctcatgaaggccatgacaganaaataaaggaaaataagccaaagtagttagagtagatatagaagtagttaggtttggtttaatattagttagttactgaattagtttggtggctagcttaaatagcagaagggaagtataagatcactcattctgcattgttacttagtgtacttaccanaatccagagccaggacatgtcaaggtagatgtggccaaagtgggctcctgngcttcacacgtcaactntgagagtgacctttgtc

SEQ ID NO: 116172 - DNA, 409 bp, Glycine max
  unsure (1)..(409): unsure at all n locations
gcactaccccatagtataccatgtccatgtggatcacagtaactatggcatggtacgtaataataggcatgataagcttcttgacacacaaggcaccacataggacgtaacatggaagccagcgttaagaccatntggcaaagaaggcctactataaggagaattaatttcagcggtttcctctgcatgaatttgacatgcagggcctctacaactacttagatgagatgagggctaggattnttggctgtcttgatcagatggaagatgacttccaatcttgcctatcgatctggctactcaactcgatgggatgtaggaccacatagacactcaccaggaaatggttagacttgtctggatgcttatatgccaaaatggatgaattctttcagcaccaatatcatgg

SEQ ID NO: 116173 - DNA, 314 bp, Glycine max
  unsure (1)..(314): unsure at all n locations
agttgttaaggatagataattctgattgtgttgcatgtctgataaaggcttattagaggcctaaaataagaagttgaaagacttcctcgcctgcnngttttctggaaaatgcgacgaactcgctaagcacggctgatgcgctaagcgagttcatcaattaagtcttgaacatatacatttccagatgaactcgcttagccagcatgcatgcgctaagcgagttcaatcaggttgttgaatgttcatcttcattatgaacatcacggctaagcggcatctaggtgtgctaagccattgtacacatcattaatgac

SEQ ID NO: 116174 - DNA, 156 bp, Glycine max
  unsure (1)..(156): unsure at all n locations
ctagtgatttataatttagaaaattcatatataggaatttgaaccctncagagggagagaggaaatagataactcagccctctgcctncatttntctggaaaattatatgagctttgattcctagttcctacttttaatacatagggatttacaca

SEQ ID NO: 116175 - DNA, 339 bp, Glycine max
  unsure (1)..(339): unsure at all n locations
acatacgttaaccaaaaaaaaaattcctatataatacctaaataaacatanttatcaaataagtttaatttttttactattttataagtataaagcattcagtgactgagaagtaatcttctcttaaaacttgttggtcacctttacattgtcgttattttgactgaaaacttgtcgattattcgataataaattttataaataatttagcagtttagtaattttgaattatttatagagcatnttaaaacgctgttctagcttattttntatatntattctttttatcaaaaaatcattcatttttatatattttaaatgcattatattcaataatat

SEQ ID NO: 116176 - DNA, 365 bp, Glycine max
  unsure (1)..(365): unsure at all n locations
ggagtaccgataatgtgtctaccatcacgattatcgtctccctttccattattgggggtaccacctggaccgccagatccctccaccttttgggcgtgttctttgaaagatccgtccccctttttgcacatgttctgtagttgcatcctattcagaaccatatcaaaattgtactgatactgcctaacacaggcaaccattaggtccttccaagaatggactcgggaagggtccaagttagtgtaccangtaacagctaccccagtaagactttcttggaaggaatgtatcagcaattccccatcttttgcgtattcccccatcttctngacatacatctttagatggttctttgagacagtagt

SEQ ID NO: 116177 - DNA, 425 bp, Glycine max
  unsure (1)..(425): unsure at all n locations
atgccattgtagaaaaattaggaaataaccttctatagaagcttgcttacccattgaagcttctaatatcctccacattttttggggtgggccattcttggatgcccttgattttctaagggtccactangaccccatttctaccaactacaaaccctaagaaaactatattatctacacaaaaggtacacttctctatatttgcatagagggtgtttttcctaaggactgaaagaacttgcctgagatgtcctaagtgatcatctangctcctactgtacactanaatatcatcaaaataaacaactacaaatctacctatganatcccttaagacatgatgcataagtctcataaaggtgctnggtgcattagtgagcccgaaaggcatcactagccattcatacanaccaaacttggtcttc

SEQ ID NO: 116178 - DNA, 429 bp, Glycine max
  unsure (1)..(429): unsure at all n locations
atgtgtctactatcattggtatcatttctttctctatcattgacggaaccacttgagctgccaggtctttccacctttgggcgtattctttgaaagattcatgcccatttttgcacatgttctgtagttgcatcctatccggagccatatcagaattgtaccgatactgcctaacgaaagcaaccattaggtccttccaagaatggactcgggaaggttccaagttagtataccaggtgacagctaccccaataagactttcttggaagaaatgtatcaatagttccttatcttttgtgtatgccccccatcttccaacaatacatctttagatggttcttggggcaagtagtccccttgtccttgtcaaagtccaacaccttgaacttgggaggggtgatgatatngngtactangaacaactcttct

SEQ ID NO: 116179 - DNA, 431 bp, Glycine max
  unsure (1)..(431): unsure at all n locations
agtcttattcagaagattagagtttatctcttttatcttagtgagagtgattctcctaaattcttgagtgattcaagaacaccctggctgtatcaaaggactttcacaacctttgtgtgttgccctcgctggaaagagtgattctttccttcctttcatcttcacccttgttctttcaaaccacaattccagaanatccacctctgcccagaattatctcgtggccataactcccattctacgcactcaaattaagtgattcttgagcctaaattgactttcaaaacgagacctttcacctcgttttggaatcacctcatttggagccctgtagcttcagttattgccatttctatatttctgtccagccaccacttaacctacantttaccatcccattcattccatttatgccaagaaccaccttatta

SEQ ID NO: 116180 - DNA, 228 bp, Glycine max
  unsure (1)..(228): unsure at all n locations
aactagttccgccccggagtacgacagtcaccgctttaggagcgttgtacaccagcagcgcttcgaagccatcaagggatggtcgtttctccgggagcgacgcgtccagctcagggacgacgagtatactgattntcaggaggaaatagggcgccggcggtgggcaccactggttactcctatggccaagtttgatccagaaatagtccttgaattttatgccaatgc

SEQ ID NO: 116181 - DNA, 398 bp, Glycine max
  unsure (1)..(398): unsure at all n locations
ccattcttctatttgttntcactctcattttccctcatgaacacccttcaaaactctatgaaagtgtttatttgcatgaatataatgtgtttctattggttatgggtttggaatggtatggatgatatataactatattngaagtgaaggaaagctttcattttagacacaaagtgtctccctttattcctcttcttcatcctaaagctaactcattgagttaatacgtaagacaagcttacctctttcttattttgaaatgttagacaatggttggctgaagcttaaatccacttgtgaatatttaggattgcaaggaatatttctttgatganatgagctctagacgttatttgggatctacgcagatttaattgatacataagctcgtatatatt

SEQ ID NO: 116182 - DNA, 522 bp, Glycine max
  unsure (1)..(522): unsure at all n locations
tgcagctaagctataaataagggtatagtttattggttgtaattatgataccttntaaaaatttaaggggtttaattgatgctgaaccaacagttgaatgattgagtatatatactaagaaagagaagagggagagagactctcaataacaataccaaattaaacttttaaatntctgaaagtgacatnagaattttaatatttattctttatttaatttaatgtacgttgagattattactcacgaatcactaaatttaaaaatgaataccttctcagttacaaactaactaattntataaaaaaaatnggctaattttatttggatattcataggacggattaaaaatgatcgagtntatcttggcttgatntaacctggtaatttaatgaactcatttattcggattcaaatctgatctgaacaaaatctggtaatatgggacaggggattgagccaattttgggcacaatatatttaatataacatanagtacaactcgctagatataaaaataataa

SEQ ID NO: 116183 - DNA, 420 bp, Glycine max
  unsure (1)..(420): unsure at all n locations
tgtcgagggtgctgacctcgacaaatgtgagaagttgcttttgtaagttgtcgagggaggacatgttttttggtttgttggtggaatcactcgtctcaggtgagtagaattcttgtacttgacaattatgtctttntctgatagttggagaatgcattaaagacaagcactttgtttgtctatcactgcgggcggtgcaacgcacgtatgttactctngcatacgtgtcactcgaggagtgggcatgtactggagacacggtgtgtggattagtgggactgcatcgtggtgcacatctttagggcatcattacagctcttatcagttaccgaagagacgcgcctccacttaaatgaagtgtatgtctgagtttagatcaccacaacgtttgaattnttgcttcctcttttgaaatctcct

SEQ ID NO: 116184 - DNA, 395 bp, Glycine max
  unsure (1)..(395): unsure at all n locations
gttttacaaaattgtgaaacacgacttcaatttctgttaaaagatgttaacatttactactgattatatatcaaaatgataattcactagaaacccaaagaaacctaatcgctttaattttatttcatacaatgacccgggccaagctcctttcactttctccatgtttggtcttctaagcaacatattaacagttatgttaatactcctactccactgtacttaaatactaaaatgatcgaagtatttgatggttgggacatgacaattaagaattcaccggccaatagattcttcttccaaacaagtttgaacatttagcggtgttcgacagatgagatctncatangtctacgtgtatttatggtgtgtgtgctctcgttcacactataaat

SEQ ID NO: 116185 - DNA, 329 bp, Glycine max
  unsure (1)..(329): unsure at all n locations
tgctgtcaagcacttttttttccaatattgggacgtacaaccgatgggttagcaaacaccgcggctaactagcctgataatgccaaaggaaatcgtgggaagtatgggttaggctataagcccactcaggcagatgtaaagagaagcatcgcgggaaggaagagtggggtaaagctcgctgttgagacaagatagtgaaggaagcccgccctgccacataagtagaagctttataagcgcggctctgggagacgaaggtcaagtggtcgcgatatacgaggatgatgttccgagtacattnggattggtacgaccatgccctcctgatt

SEQ ID NO: 116186 - DNA, 354 bp, Glycine max
  unsure (1)..(354): unsure at all n locations
acctaaaatcctattaacaggtaatttttttggaataaaataattctatttaattcattatcatattaggacaatataaattattaattatttcttaaacctagaagaaattaatttttctcttatattttggatctatataagtaatttagtaatataaatcatgcatatatatcatgtataaaatcaaactctgggtatgaatattntcattaaattaagaatgcaaaattatacttaactcatgggaaggaacaatttacctataattggcattaaaattaaattattagagttaattaatggtattnttatttatttattggtatatactttaatataaaaataaatatc

SEQ ID NO: 116187 - DNA, 363 bp, Glycine max
  unsure (1)..(363): unsure at all n locations
cttacacccccgaccatagtgtcaaggaattcttgcaccccggatacaaaggcttctttgaattaatttgcaatgtatcatacataagggcatgtgcttggtgaaaagactcttggtcaaggtcacaaatcatattctctaagtgatcttccatttctacatcaaatagttcagattgagacccattntgcatatnctgtcaatcaccatgccatatccacgttgatgcaatcctaccccccaagggtattggatagaagactccaagaggattggcctagagtcgctaaagaaggccctaaggttctcatgaacctganggtaaatntataagcccatgggccaagggtgggtccactcttc

SEQ ID NO: 116188 - DNA, 428 bp, Glycine max
  unsure (1)..(428): unsure at all n locations
atggaaaaatatgagtcccaaagtaccaaaatccctgcngatatatgaagcctcatgtggaattagtggttctgagccaaaaatatcctcattcaatgatttcacagacaaggtttcccccctcatttctttgggttggaatttgtaactaatcaattatacatatcttccatgtctatatatngtaatgggctccattgaatttttacttttattatatgcacaatgcangtgcttccttacattaaggaagctggatacaatgccatccagttgattggaattgttgaacacaaggattattnntactgttggtacagagtaagttaaatggtgtaattcttaactaattttctcactgtaattatattgtgattgagatctttagaagttcttcaagtactaacatgatgctcactggaatgcat

SEQ ID NO: 116189 - DNA, 311 bp, Glycine max
  unsure (1)..(311): unsure at all n locations
attgaattatcaagtacatatgggagccagtcagcatacgacacccgaattggagtgaaatccacacgctctttcgctgcaaaatcatttcttggttggtgttctggtttgcgcttgacattggatgtgcggcccacaaactttgtggatgactgggtggtgggaatgagaaagtcgatattggctgagcgatgacattgtgggctgggngaagatcggcatgtcgaatggcaacataaatgggttctttctattctcatactcttcattgcccagtttctattataaagcaaatgatcaattgtctcttc

SEQ ID NO: 116190 - DNA, 462 bp, Glycine max
  unsure (1)..(462): unsure at all n locations
taccaagaaatgctacccttaaaacaaaaatggcatacaaccccctccaagaaatacaaacatcaatgtanatttagagcaaagctatgcgcatacttcttcacaaacgttcacttgcacaagacattcttataactaagaaaaaatgcacccatatacaatcaaggcaccttcgttacctagaatatttacatgtagttccaaggtgtatntgttacctacatcacacacatttnctgtgctaaattcacatacatgcatactctaagcactntggctatcaaaaattgcattcgtgcacatcttggtatttctaatacctatacatacacaaacttcatgacgaatcttgactatctacacaataaggtgctacatttcatgcncttttcttttcaagtgtnntgtttntttactacctaaagccgcatgcaaattcaagtatattttcttttgctcact

SEQ ID NO: 116191 - DNA, 353 bp, Glycine max
  unsure (1)..(353): unsure at all n locations
tttattcgttgaccacagagtggtacctggagatatgtcgcgggggtcaggagaccttggggacgtcaggtggggggctattgcccaaaaccaagcttgaccaatcccgacccaacccgggcatagtcggtcagtgagaacctgtgatgtacctaaacaggcgagctcctggcagtcaacagataaaaggaacaaagaccacaaagcaaggaggcttgtggtggctggccagctatgaacttngttgatgtgtgagatatggcctctggtaatcgattaccaagggtgggtaatcgactacaaggcttanaaatgaagacaggaggctaagatggtctctggtaatcgattac

SEQ ID NO: 116192 - DNA, 81 bp, Glycine max
tttggagctcttctaagagaagaggtttacgtcaggcaatcggaacagaagttaaaaatctgtaacaactaaaaattagta

SEQ ID NO: 116193 - DNA, 165 bp, Glycine max
  unsure (1)..(165): unsure at all n locations
attatccgaacacgactattatcaataaaagttaaatttcaacatctctgtagtttgtcatacttgtttcgactctagtgcatcgggttcgccatacaanaaaaacgagaaacaatgaacgtgggaagcgattacttgttgaataattcgaaacatatcgtggac

SEQ ID NO: 116194 - DNA, 218 bp, Glycine max
  unsure (1)..(218): unsure at all n locations
tcacttgaaatctgtgggcgttgggttcttgggagctataatgggtagttctactaggttattgctttanggtagttgtttagtgaaatttgagttaaattgagctgattctagtttagaatgtcaattangacttgtaggaaagcttggtcagacaaatgangaaaattagtggcaaatgtgaaagaaaagaccatttatagtgtaaattgagttct

SEQ ID NO: 116195 - DNA, 253 bp, Glycine max
ctattccttgttcaattggagaagtcaatgtgggaaaagctcttattgacatgggagccagtatcaatttgatgccactctccatgtgcagaagattgggagagttggaaataatgcccactcgaatgaacttacaattagctgaccgctccattaccaggccatatggagtaattgaagatgtgttggtcagagtgaaacattttatcttcccgacaaacttgtggtaatggatatctctaaacatactaac

SEQ ID NO: 116196 - DNA, 394 bp, Glycine max
  unsure (1)..(394): unsure at all n locations
cacatatttcacatttcttatttttttttatcattcatattaattaaacctagttggtgcaaattcataacatacgttggattaacatgtcctaatctagcatgccatatatcataagaatcaatcaagtaagcaaaagaagatgcattctcattaatcactttagaaacatatagtacaaagagaccccgatcacaataacccatccccataaatacattattcttggccataattatcttattagactcaaacctttcgcaacaatgttatagaaacaaggtcaactctcatagagggaacctgtagcacattattcanagctagtattttcccaaatatgagtttgagaagaaatttcccctttccttgaaccagagtagttctcgaatca

SEQ ID NO: 116197 - DNA, 277 bp, Glycine max
ttaaggtcttccaaagtctccctatgtttcaattcaagtgtgtcaacttcatcaaaatctcatcaacatcatcttgttcgcgtattgactcttatgatgtcttttatgacaatcccattgttatgtttcttaaatatgtacatattgctatccctttaaacaccgatatttaaagagatattatgtaggaacgtattgtgtatcaaggtttgatcttagcatggccctgaaagacattgactctttaaacatcgcataaagaaacatcggaacatct

SEQ ID NO: 116198 - DNA, 262 bp, Glycine max
tgagatgaggaagtgtacgaaggtgaaacttcctgcttttattgttgaccacacagtggtacctggagatatgtcgcgggggtcaggagaccttggggacatcacgtggggtgctattgcccaaaaccaagcttgaccaatcccgacccaaccccggcatagtcggtccctgagaacctgtgatgtacctaagcatgcgacctcctggcaatgaacagattaaaggaaaacaagaccacaaagcacggaggcttgtggtggc

SEQ ID NO: 116199 - DNA, 498 bp, Glycine max
  unsure (1)..(498): unsure at all n locations
atcctctcagtcacctgacgcatgcaagctntgactngagtcatcaagagattataaatatgttaccatggcatatgtttcanaanaagatcaatcatcaatcatctttgaatcatctatctttcaatctttntcaacatcatctctcaaacatctttcaatcaatctttcaatatctttctacangaatttctgattcatttctcttcatctttctaagaagtttttgatcaacactttctcttccaagaaaagttctttgttcaaaaacttgtgctattcatctttttcattctcttctcctttttccaaaagaacaaaggactaaccgcctaaattcttttgtgtctctcttctcccttngccaaaagaacgaaggactaaccacctgaattctttggctctcttctccttacaaagattcaagggactacccctgagaatcttttgttcttcctttccctaagtaaagatcaaagactaccgctgaatattttg

SEQ ID NO: 116200 - DNA, 263 bp, Glycine max
tttaactgaatttgcaacgttccaattattttttaaatggtgtaatcgattacaatatattggtaatcgattaccagtgtatctgaacgttgaaattcaaattcaattgtgaagagtcacatcttttcataaaatgctttgtgtaatcaattaaatggttttggtaatcgattaccagtgacaagttttgaataaaaatcaagagatgtaactcttccaatggttttccggtttttctcaaggttataactcttccaatggtt

SEQ ID NO: 116201 - DNA, 268 bp, Glycine max
tatgctgcaaacatttataatggtacctacttagcggcaaaaccaactgccgtcgaattattatcacctaacaagcaatagatacaatccagattggaggaatcatccaaatcttgatatggacacgttctccacaacaaccacacctgtccctacttttcataatgttgttggcccaaacaagccttatgtttctgctgccatacaacagcagtcacaccaaagacaagaagcaactgaggctcctcctgaagcttgcttattagag

SEQ ID NO: 116202 - DNA, 477 bp, Glycine max
  unsure (1)..(477): unsure at all n locations
ctgcagcttagatagcttcttgattcgatacgacaactctgtaatngattaatacaaataatgttttcctttgaagtaacatttctaacttagaaacttttcttctcactaaccatgatgatgcatgatgcaatatagatatcaaatgtactaatatgcaacaaccaagataacaaccaatacaaatgtcactcaagggagtcgggcatgtaaaagccaaaaattcttcaagcttttccttgagcttcaagctatagcccttaggttgctcaccatgtngatcatgttgcttcccctatctctaacaatgttaagcaacatcgtagttcaagggtaagcttcctatccncttttttcctcataacctaaatacacaaatattttaaattctagaaaacaaaatttcaatgtcagaaacaataactaaggacanaactcataatgatttaaagagcccattcttgaatgcatgctttt

SEQ ID NO: 116203 - DNA, 270 bp, Glycine max
ctttagaaatatatagaaaaccttattatatccactattagaatgcaaaaccttgctaactagctcctcctaacaatgtttttcttttaatatatggttttggattgatgtataaacttaatttggattaatttgtttttggtgcaggtaatgaggtttgtgagaagctggctgtggtaggtttcaacacaaacatgattagctacttgacaacacagcttcacatgccattgaccaaagcagctaacaccctcactaactttggtggaa

SEQ ID NO: 116204 - DNA, 263 bp, Glycine max
ttgaatgctctattcaatggagttgacaagaatatcttcagactaatcaacacttgcacagtggccaaagatgcatgggagatcctgaaaaccactcatgaaggaacctccaaagttaagatgtccagattgcaactcttggctacaaaattcgaaaatctgaagatgaaggaggaagagtgtattcatgacttccacatgaacattcttgaaattgccaatgcttgcactgccttgggagagaggataacagatgaaaagct

SEQ ID NO: 116205 - DNA, 262 bp, Glycine max
tggttcgaggcacttacccgttgaagatcgaagaacgatgaagatcgaatgaagaatgtcgaagaacggttcaaacctttgcgagattcctcacgaaaaacgttacggaaacgtttcggaagcgcctcggcttagattttcttcacggaaacgatttttccaagcaaattcgaaagagagagaagtgcctaaggggctgggatcccttccttcttcatttcctcccctatttatagcaaaataggggaggtggttgccgccc

SEQ ID NO: 116206 - DNA, 252 bp, Glycine max
tctctacgtatttctattatgtttatttacagctatgccacactgtctccatcttgagtggagcaataacggcgccactttctcttttgattgtgactcatactcagccacaacaagtgagaaaaatcttgcctttgagatgctaaaatcctgccttggtttgcgtgccgttactctgattccaattcctcgacgtactctgcgtccgtcggagcaagctttctaagagaatcggtatatatatcaaaattc

SEQ ID NO: 116207 - DNA, 61 bp, Glycine max
ctaatcccagcgttggaaaagcaacgttatcaccctcacgcgaaggcttttattttagctc

SEQ ID NO: 116208 - DNA, 127 bp, Glycine max
ctacttcgaatggaattcccttcctatttaatataccatttctaagactctatagactggctcgagcatctatcttgaatatctgtaattgctttgtctagaataaagctctgagacgcatgtgatc

SEQ ID NO: 116209 - DNA, 257 bp, Glycine max
tgtgcatccaataccctgatgaggatgtcccatatgttcttaaaactggactgattcatttgcttccaaagtttcatggcctcgcaagtgaagacccgcacaaacatttgaaagaatttcacattgtctgctccaccatgaaacccccagatgtccaaaaagatcacatatttctgaaagcttttcctcattcattagaaggagatgtccaaagtccatcacgagctgggatgaccttaagagagtattattagaaa

SEQ ID NO: 116210 - DNA, 266 bp, Glycine max
tgtagcaaatgcaaacggcaataacattttactcgaatgttctatttagtcacgtaatgcatcaaaatgctcgaaattgaaaacagaagctcggtgcaaattcaaacgacaattagtttttacttggatgtccgattgagtcccgtaatatatcgagacgctcgaaattgaaaacggaagcttgttctaaattcaaacgacaatcattttttactcggatgtccgatggagtcccgtaatatatcgagacgctcgaaattgaaaac

SEQ ID NO: 116211 - DNA, 528 bp, Glycine max
  unsure (1)..(528): unsure at all n locations
acctgaggcatgcaagctnggcagaaaaaattgataaactgttctgggctaattttattntgtatgtcactgnggcaggcatctccaagcttaactgcanttgctgcaggacaagccgctgcctttaaaacgtttgaaacaataaagagacgaccagatattgatgcttatgagccttatggtcaacagccatatgatattcccggcgatatagaacttagagaggtttgctttagttatccttcaagacctgatgaactgatattcaatggatnttcaatttcgataccaagtggcactacagcagctttggtagggcaaagtgggagtgggaaatcaacagttattagtgttattgagagatnttatgatcaacaagctggtgaagtctcattgacggaatcaatctcagagaaattcaattgaaatggatcagacataaaatcagccttgtcagccaggaacccagtctctttgcttatagcattaaagagaatatagcctatggtaaggatggtcaacacatga

SEQ ID NO: 116212 - DNA, 264 bp, Glycine max
tgcaaacttgcaacaatgcagtgagagagaaataaaccaaaaaagtaaaataaaagaaagaattggtccaggtttctcttattatatttctctcactttttccttgcattgctgcagtaactattgaaaaattgcaactcctcaaatacgactttcgcagaacattgcatactatagcagtcgagaagaacaactaacaataatgcctgtaaacagtggtcgaacgcaatccgatggtgtccttatttaacaacgaaagtctac

SEQ ID NO: 116213 - DNA, 419 bp, Glycine max
  unsure (1)..(419): unsure at all n locations
cacctgaggcatgcaagctntcctacaagtcctaaatgacattctaaactagaatcaactcattttaaactcaaatntccactaacaccaaattgggctttctaaacttcanaatctcacacttttccacctacaacactaccattgtcacatttaactctaagctaactcttcccatcctctctaccagttctctatctacattgtaagcacacatatatatcaaaacatcattattgaaccctaaatcaacatgggtagttntgcttacattaaacatgtcaagtttagcatagttacaacaatttccttcataaacaactaccctatagcattaacctagtagaactacccattatagctcccaagaacccaacccccacggatttcaagtgacgagaagtccacccttacctaaa

SEQ ID NO: 116214 - DNA, 274 bp, Glycine max
tcaagacttgcattgtgttggagtgtacatccaccttttaaatatttgacgaagagacatattttcaaatagaaacaaacttatacaaataatcgattcccagatttctaaagatgtagaaaaaagtattaaaaaaaaacaaaaaacattgtttagattttttaacctgtacattattttatatatcatttgtttaaaaaaatgtatatttgtattatttgggtgatttttttgtattaaataggtaaaaaattctactcatgtaaaacacaaa

SEQ ID NO: 116215 - DNA, 279 bp, Glycine max
  unsure (1)..(279): unsure at all n locations
atagtgtaancgaggacaagcaggtatatctggcgaagtctctctctagtattccacaccatatatgtgtaatcgattacaacgcgtccctgcacctatatattcaaatgtcaaagtctgaaacctgcaacctgtctctctctcaaaaacactcgcccccaatttttcttacagccatatctcactcaattcttggccagatcacttcccacaatgcccaaacttcatatgtnttcaatctcttcaatttgaaccgattgaaatcccgaaaaactcctc

SEQ ID NO: 116216 - DNA, 284 bp, Glycine max
caccataaaaactcaagctttgggtgtgtattttttcaactttgaacatttgagaaagtacacttcattgttcaaacctcatttgaggcataaatttcatgccccttctccctctgtgcctacactaatcttctcctaccttcaaactgttatccatggcttcatatggtggggagctcgtacttgactcattttctccgagaagaggcgtctacaatcacctttacctactgctgcattccgatggcattgatcttcaagacgcacaagtctctattgatgaa

SEQ ID NO: 116217 - DNA, 343 bp, Glycine max
  unsure (1)..(343): unsure at all n locations
tattaacaacttccgtttgcccatcggtttgagggtgacaagtggttgaaaataacaatttagtgcccaacttgctccacaaagtccttcaaaaatggcttangaacttagagtccctatcactaacaatgctccttggcaaccatggagtctcacaatcttcctgaaaaacaaatcaggcacatgggaggcatcatcaacttttttacatggagtaaaatgagccattttagataacctatcaacaaccacaaaaatggaatctctaccattgcttgtttntggcagccccaaaacaaaatccatggataaatcaatcccatgatactccggaattgcaatg

SEQ ID NO: 116218 - DNA, 264 bp, Glycine max
tggtggagttcaaagagaatcgtagaagggtcgggctatgatattagcctacacgcaccgacatgaagagaaacaccctataaaggagaggcataagtgtgggccagcctcaaggattgcaagtaaaaggaactcccttatgtcacatcaacaagatttttgtcaacgcatgctggatgtgtgaggggtgggttgccatgatccatgatgaaatccctcaagagcaatcaaactgtgtgcggacatgccctcctatgttcgagt

SEQ ID NO: 116219 - DNA, 262 bp, Glycine max
tctcaaggaggtgagcttagttatgagaggggtgtgtgtagctaaactctagcttctcaaggaagttttctcaaagaagcttctcaaggaagttttctcaagaaagcttctcaaggaagctacctaatctataaatagaaacatgtgtaacacttgttgtaactttgatgaatgagagttttgtgagacacaactcaaagttcaacttctctccctttttcttccttcaatttcgtgctcccctatctctctttctctccct

SEQ ID NO: 116220 - DNA, 363 bp, Glycine max
  unsure (1)..(363): unsure at all n locations
aattattagatctaaaagaaatgaatgatacaaaaggtactgctgaaataagtgaatgttttcttacgtaatatatgtgtgcaaaaattttgtgggtacattnatgaattacatatagaaataattcctgactagttacatccttatgatgtctatattatcgataataaaggtcgaagaatggttcctcttgctaaataaagaataagtcttgccgtttcgaggctgcacatagcacatttctcttacacttttataagtgagtgatagtaaaggctagaaaattgaaagtgtcatagtattggatcattttgtttctcagtcaacatcaattagtgacttaaatgatttcagatttgaact

SEQ ID NO: 116221 - DNA, 259 bp, Glycine max
tggaacagcacaacacagacaaaataaactaccttgcattataatctaaatgttgcgtgcaattgttctttatatgtaatcagaggcttaaagcttgaggctgtggtctctttagatcttctagctgatgtcatggggaaggtatacattgataaaaatgtcattacaacaattatttatataacacgcatttgtgtatcctacatagtatgcataactttaaaatgtaaccactgtgtcagcctttaacttacggttc

SEQ ID NO: 116222 - DNA, 524 bp, Glycine max
  unsure (1)..(524): unsure at all n locations
atccttgagtcacctgccgcatgcaagctngacctctaagagtgagatcagatactaatgtattctctacaacatcaacaccgaagagtccagtattggcctcagaaacggtattcttctgctacccactctgttttttttnttccaatgaatttcccttaatcctttctgggttttgttcattttcagtttaatttggttcctttggtttcagatccctgaattcgctgacaaatttgatctttgcaattgatgttgtatttttattatataattctgaagagtgggtttgtcacagggatgtgaattcctgtcttatggaaggaatcttgttaggttttggggccttaatgttttttatctctacctgcagcatctgggttacatgtgttgctgatatctcttaagtttgtcatgtggttataatctatctctgtnggtatctgaaattttgcacctttcaattttagcatgtgattcacacttggacaatgacnntacgttgatcttatataatttgtatt

SEQ ID NO: 116223 - DNA, 264 bp, Glycine max
tcttcccattaatctccatcatgagtaactttggtcttcaatctcactaaaagtgaatcattaagtgtgattgagattggtagtcatacaaaagtgttggacaaatggcctcaaatatcttaagaagggggggttcaattaagatattacaaactatttccccaattaaaattctactttgatttcaatacaagttccaagttcccttaaagatgaatttctaaataatgattcacattaaacaatctaaatataaatgtaaag

SEQ ID NO: 116224 - DNA, 260 bp, Glycine max
  unsure (1)..(260): unsure at all n locations
cctaccatactgcagtggaatcataaaaccttatgttatagcacaacaaagcacttcaagtacacatgacatacatggcacacatcgtcataaagtatgcttaataaaaaagaacacaccttggatatctacataggaaatatattaatctctgctcacagtatttacatcattttaagctntttgttgttgtaagcaccagcagactngaagtggcatcatcttaaactgtggcaatgacaaatctgataaaaattcct

SEQ ID NO: 116225 - DNA, 262 bp, Glycine max
tcacaaacatattcttctctatataataacacccatcattcttttttttcaatcccctttgtctccttccaatattttaaaaacacaaattgcataaacaaatgattttagagctaatcaaaatttcctgttttatattttcataatgttttttatattttattgttgggtttacatgggagaatcttcaagtccaagttgagtgaagtgagggctttgaagggcgtctttgagtagctcatgatcatcccacgaatctcga

SEQ ID NO: 116226 - DNA, 471 bp, Glycine max
  unsure (1)..(471): unsure at all n locations
gacctagcacgcgctcagctgcatcgttcttttgtatcaccatttctctctatcatgaaggaggcgatgagtattggcatactttgcatgtgatctggctctgntagatganactcaactgaataagtgcttcatttctttccataagatcccaagccactggctcaactaggacttcccctgggaatgaaccttgccaaagatgggagtgctcaaccataaactatttcagatggggtacaccttgcagctccctgataacatgtattataccagtattatgtccatgggataaactcaacccaagaattggttgctctgctagaagcatctcaaatatgtctccattggttctgttagtacctcagtttggccatctaactgagagtgataagtagtactcatttntcaaatattccttggtttgaataactctgccaaaatactcaaaacatgcatcctgcattacta

SEQ ID NO: 116227 - DNA, 280 bp, Glycine max
cgacagtatttaatactcaagcttttcgattcattctatgtgcccggagtgggccacattgtgtttcgtgcatttttattctcgctttgtttaccttttataccccctcttgacgtgcttaagccattttacttaaggtcatttctcgcttaacttaaaaataaaataaaatttccaccaaacgtttgaattgggttattcgtcaacttcggttaaaataaattccgaccgttcggtcgtgccgtaaccacgttggaaataaaaacaaatgaggtaaaaa

SEQ ID NO: 116228 - DNA, 333 bp, Glycine max
  unsure (1)..(333): unsure at all n locations
agctngaagcaagagtctggttgagagcttgagatgagttngtgagtgatngngagatcctagaggtgaaggagacatgctcaccacttngtattttgcaatctttcatcttggtcttctctttgtagaaaaaaggcttcctgtatggaaagctaaatcctttgtggatcttctctgtaggtacctgatgtaaatatattnttatctatnntaataatttntgtgtgttctctgtgctatctgctnttcactccagtatgcctttaccttgatcacgtagatgcatgctttgttagggtcattcaacagtggaaactggtctaactctaaagt

SEQ ID NO: 116229 - DNA, 258 bp, Glycine max
tgtcaaaaacaaacatactaaaaggataaaacttaacaattaaagcatgatccattatcatcacatatatgagataccatgtaaaaatcatagataaagcaagtcctagaattctcataatagaacagctaataataataatcaattcattaaccatttcataaaagctcaatcatcacacactatcatcttcatcagtccatcaatcatcaaataacacaatatttctatgactcaacaagtaacatatcattttca

SEQ ID NO: 116230 - DNA, 492 bp, Glycine max
  unsure (1)..(492): unsure at all n locations
ctgcagctctatcaagcatttgggggaactcttttctggctatcctagggagggcctcctctccttttcttgcttcgtgcattcatggtgtaaaataccattgaagggacctcatgaagctcanagatccagcctccatagaagccccacaagcaagcttccatcacagtaagactaaaataattaatagaggaagaatatacgaccaaaaatggtaaaatttcctttgaaactaaaagttaaattcaattaaaaaagtataaaaaccaaaaacataattagtcctatagattattatctattattaaattattatattaaatactaaattaatannagtaacaaccgcttaaggaaaatttcacaaaacanacaacaataggttacaaataagttaaacaagataaactcaagctttaatttatttttaatcaaataaggacanaacanacaacaataggttacaacaaggtctatatcacctagtcactc

SEQ ID NO: 116231 - DNA, 266 bp, Glycine max
ttcttgagaaaacttccttgagaagcttctttgagaaaacctccttgagaagctagagcttagctacacacacccctctcataactaagctcacctccttgagaaacttccttaagaagattcctaaagaagctagagcttagctacacatacctctctaatagctaagctcaccttcttgagatgagaagctagagcttagcttagctatacacaccctataatagctaagctcacccccgtgacaaaaaacatgaaaatacaaa

SEQ ID NO: 116232 - DNA, 365 bp, Glycine max
  unsure (1)..(365): unsure at all n locations
caacggacaccgacttaagccgttcctcacaaaccttactctagcggacgtagtggtggaagatactttcttactccaccctactcttcctacaccatgacttaaggagtctattatgctatctacttctgtactatattacagaggactgactccgattgatggttaaattgctattaatcttttaattgactacgttgacgacaatgtgatgtctaagtatggcaggtgggagatatcctttacccatacctcanacacaattgttgtataaatatggagagaatggaccatttcttaaaactaaattatccttacaatatcatttctaataaacaaatattatattattattatatatcaca

SEQ ID NO: 116233 - DNA, 262 bp, Glycine max
tggttcgaggtgcttacccgttgaagatcgaagaacgagaatatcgaatgaagaacgtttaaaaacggtagaaacctttgcgagattcctcacggaaaacgtttcgaaaacgtttgcggaagcgccttggcttatattttcttcacggagacagttttttcatgcaaattcgaaagagagagaagtgcctaaagggctggaccccttccttattcatttcctcccctatttatagcacaataggggaggcggttgccgccca

SEQ ID NO: 116234 - DNA, 414 bp, Glycine max
  unsure (1)..(414): unsure at all n locations
tgatgatctgttgtgtgccaaagttaatgctatttgcttaatccttatttgaatccgggctagctcagattagagatagagtccagacgaagatgtttgctctgaggaaactgaatcggctactattgtggataaagaggtcagcacaagaattacattcaacctacctatagtagaaatgaccaaacatcttaagcctttgtatgtcaaagctcaaataaatggcataacatnggctagacattttgtggatgagggtgttattcttaacatcatgcctctaaccactttaaagaaactntggtaaaggtanggagatcttattccacaaatataagatggctattcactagagagtattattcattagagtttggagctgaatcacattggccagaacttgtntcatatttt

SEQ ID NO: 116235 - DNA, 267 bp, Glycine max
tccttgagaagattcctaaagaagctagagcttaactacacacacctctctaatagctaagctcacctccttgagatgagaagctagagcttagctacacaccccctataatagctaagctcacccccgttccaaaaaaatacatgaaaatacaaaaaaaagtctctactacaaaactactcaaaatgccctgaaatacaaggctaaaaccctatactactagaatgaccaaaatacaaggcccaaaagaaggaaaaacctattcta

SEQ ID NO: 116236 - DNA, 331 bp, Glycine max
  unsure (1)..(331): unsure at all n locations
cacctgacgcatgcaagctatagccttngcatgagggggatgatggaaattaccttaattgtatcactctntanccagaaagggctacctacggaggggttgaccaaaatggctattttaagtgtccgagagtgcactacaaccactggaatgcagctcttatgcgattgagatctcacattcactagaagtatgacttaagctgtgtttataaggattgggttggtctcatactacaagttgattntgtgggttgagttacaccataaacccaaattgaatacatgaggaggacaattggataccgtanggttatactnattacaacata

SEQ ID NO: 116237 - DNA, 268 bp, Glycine max
ccttgtctttttcagggtatacgaaagaaggcccaggaaattcaaaaatttaatgactgccctcacgtactgtctcgtggggggtatgaactgcttgacaagaaacttatggaggagaagagcaagcgtggacatgaggaacattcgtgtactgaaagcccaacactcaacgtcgacccaccatccctagttgcaagacacttgaagtggaagatcgcccgcactaagcggcatggccaaatgacgtctgaagtggcacaagaaattg

SEQ ID NO: 116238 - DNA, 228 bp, Glycine max
  unsure (1)..(228): unsure at all n locations
ttaatttatattagtcgattntagaatattatgtcgatgatattaaatgaatcaattttactcatgttagacatttgataatatggttttaattatatcggacatctggatgaatcatgatatacaattatagttcttagataataaaaagatcaaattttaatgggtacccgttgtccaaaccaaaccgtaccggtcatgaatgaattgaggtgagtttcgttaaaa

SEQ ID NO: 116239 - DNA, 286 bp, Glycine max
cactctagaacactcaaacttcttaacattgatgactcagacctcccatcctttgttcgcctaactaattactcatcctccaatccaacaggactaattcctactccggctggggccatacaagcggccatgatgaatcgacaatagggagccattcccaactcaagaattcataatgtgtgcccaccaagtaacacaatgtgaatttaacacaaatctatggttatatgctttatatttcatttgatcacaaggtcaactaccataaaacatttattgtatttga

SEQ ID NO: 116240 - DNA, 458 bp, Glycine max
  unsure (1)..(458): unsure at all n locations
agctngcatgggtgtgcactaagcccagtctaaaaatattaactngaatttcaaattgggcccaacgcgacggccagctaagcaagaattttgagaaaccaaacgtctntctcactcacttagcgcactgactcgctaatcgagtttgtcgagaatggcataagttaagtgtaacaaaagttacacttacacttagccaaagttacgaagcaaattcctgcaacctctctccccgtgaaaaaaataaaatntcacattgcatcttgaagcttcatcttgcttccttctgcaaacatctggtgaacatcttcgattcaactaagttcctgacttgacttatgcntctntcttctattgttgatactttaggatagaaaaccttagggttaagacaattaatattaggtgtatattgtaagtagaatagataaaaattacggactttgtaggagttcaat

SEQ ID NO: 116241 - DNA, 254 bp, Glycine max
tctaaactttctacaagaatgaagctttgataccacttgttatacaagttgcctcagatatcttaagaaaggggggggggggttgaagatgtacccctctcctaaactttaccgagggaagtgggcctctaactatttaagggctttagttgtttaaaagactttttcctgagaaacctttggccaaacccacatagattgagaagacttttctttacctgttatctcttatgttttgagacgatgcttttctt

SEQ ID NO: 116242 - DNA, 530 bp, Glycine max
  unsure (1)..(530): unsure at all n locations
atcctntgagtcacctgacgcatgcaagctngtttaatgcatataaacacattctataccattatcataacacaaaccanacccaacaattacagctgcaagagaaaacaaaactccgattcaatngtaagtaaggtaatatttctacaaacctttgtgtaccatcgttacgctgcacaaacagtcccatcaatggtatggcattagcatcatgttcttgtgaagcctgcgcattggtaacaacattacttccctgtgtgctgacacgcgcacctagttgttgtatgtccggctgaatntggagtgcctcttgggatcctttaattgaacaactcttttaatagcctctttcaatgcattggtcattatntccaagctccttctaatttcctcttctagctgagtcctcaattcttccttaatttgagtcctcaattcttccctaatctggccagtcatgtcttccctaagccttgcaacaacttcatctaattgttgttggctgatggacgtggatgagctgctgcatg

SEQ ID NO: 116243 - DNA, 245 bp, Glycine max
ctatagaaactcaagcctccttgagacaggcctacagacctggcgcggaggcattttttttttaaagcctgcaacctgggggggaggaatcgaaatctagccccccccccctctaagagataacaaccaccgctccagaaaatcctgaactacaaaaaagactcactacaacccactaaaaagcctgaaacacaaggctagaacataactactttaagaccaagatacaatgccctaagaaggac

SEQ ID NO: 116244 - DNA, 445 bp, Glycine max
  unsure (1)..(445): unsure at all n locations
atcctctgagtcacctgccgcatgcaagcttctcaacatggtgataacatggataattctgatttctccaaccgccataagcctataagtcaataattaagttttgagaagacaactctcgcaatatgaaatacacaaagcgctacctgtgtctcttatacaaaatgcttatagatgtggatgatcagactctaagtgttaacaaggtgccctctgcttagcaagaatcgtccttgattttgatctatattatttatcctctctgagagagtagattctttgtaatctttgaaacttgttggtttggaaagctaagagtgacttantgatncaaaagttcttgggtattaattagcctcaagaagagatcaagtgtgtgacaaaagtagcctagagaatacttcttgtaagcaaggagtggtaggaaagaaataatttttgaata

SEQ ID NO: 116245 - DNA, 262 bp, Glycine max
ttgatgatgtcgaaaagaaatcacatgtttgtcatcatcaaaaaggggagaatgtgaatgtatgtatacatgattttgtagatgccaaagaagaatcaaacaaggttgcttcaaatgataagcatttgcttcaagaataattcaagattgcttcaacaaacaaagccttgtttcaagattcactaaagaccaagccttgccttaaaacaaagtgctttcaagacatgcaaggctctggtaatcgattaccaggaagtgtaat

SEQ ID NO: 116246 - DNA, 412 bp, Glycine max
  unsure (1)..(412): unsure at all n locations
cacaacaagtnttccacatccacaatgcgtgcataaatccaccatccnctgtggcccacctccaactgagctcacgtactctcacgtagcccatattctcgtttttcttaacaccgagtgcccatcatatcctccaagcttccacaacatccaagcaataccacattcaaacagcacagctatcacagtcaatgcaaacagagctaaggcataaaactctgcctaaacaccaaccatatcacagcttttcttactgtaagaccacagtaacaattccttcgatccaattctgtaaccgttggatcgactccaaaatntactggatgctatagtacatagctacatctgaccgtgggatcttaacaacattagaatattttgatactcttccaagctacacacaaagcttttt

SEQ ID NO: 116247 - DNA, 263 bp, Glycine max
tttaactgaatttgcaacgttccaatagatttttaaatggtgtaatcgattacaattcattggtaatcgattaccagagtatctgaacatataaattcaaattcaattgtgaagagtcacatcttttcataaaattctttgtgtaatcgattacatgattatggtaatcgattaccaatgacaagttttgaataaaaagtcaagagatgtaactcttccaatggttttcaggtttttctcaaggttataactcttccaatggg

SEQ ID NO: 116248 - DNA, 389 bp, Glycine max
  unsure (1)..(389): unsure at all n locations
gtcacctgccgcatgccaagcttganaagtgtctatttttcactcttctcgctaactttatctcctggcttagcgagcattcgctaagcgcaccacttatgggctaagcacgaggaagactctggaagaagaatgagttgtcaggttcgctaagcgcaccgcttcatctcactaagcgcaccgctttagttcattcgcctagcgagaaaggcacgcactatagccaaattactaatgtgcgcttagccaaaaatcactaatgtgcgcctagcggaacataattgcactaagcgcacgagcatgaacaatgccacctatttaagcctaaaatcataatttagagagagagnttggactgggattcagnagcttggatgtctataagttct

SEQ ID NO: 116249 - DNA, 278 bp, Glycine max
acactctgttaatactcaatcttgccgaggatgcttcaatcgtagaaaacatataggcgggaaagagcgccggcaccagagaggggagagcgtccaattgacagaacaaaaatggcgagaagttgaactctaatttgtgtctcacaacactctcattcatcagagcttcaacaagtgatacacattcttctatatatagactaggtcccttccacgaaaagctttcttaacaaaacttaattgagaagcttctttgaaaaagcttactttacaatcta

SEQ ID NO: 116250 - DNA, 205 bp, Glycine max
  unsure (1)..(205): unsure at all n locations
agncttaagaaaaagatggcctcattcttatccttatttccagaagggaattctatcaatagacctccaatctttaatggagagggttaccactactggaaaacccgaatgcanatttttatcgaggcaatagatctaaatatctgggaagccattgaaatagggccttatatacccaccacagtagaaagagtttcaatagatg

SEQ ID NO: 116251 - DNA, 255 bp, Glycine max
tgtaggatcatggggtacccatcacatgtggtactaggtggcggtcgggcgatggtgcaaaacgattctccacatccacaaatcacgtataacccaccatcccctgttgcccacctccaactgagctcatgtactcccacgtagcccttatcctcgttcctctcaacgtcgggtccccatcaatcctcccaagcttccacaacatccaggtaattccacatccaatcatcatggactaacaaaaccaagcaaaac

SEQ ID NO: 116252 - DNA, 167 bp, Glycine max
gacttattggcaaatatcagacgtctacccagattaaatgactggcttccacataacccctttcgccatttggcgcactagctacgatgcccttgaccagactccctgtaccaacatttgctcatggctgaatggaaaatggcgccagaaacggcattatgctctta

SEQ ID NO: 116253 - DNA, 400 bp, Glycine max
  unsure (1)..(400): unsure at all n locations
cactctcttggtggngaagcttcttcttccatgacttattctctaggggatggtgccttctctcacctcttctcctttatcttccactacaactccatggctgaaaatcaccattgaaggaccttattgaagctcaaagatccagcctccatagaagcttctaaagcaagcttccatccagtggtatcagagcacaagagcttcaagaggtgctccttanacctccattaattntccgctttactttctcttccattgttgtttcttcattnttctacatgtatgtcctcacacatctcttgcctcctatagtagtcatgactcctacaagagtctaagtgaagaacttagtgactattatggaggaaggcataggtcacatcctatacctcactcccat

SEQ ID NO: 116254 - DNA, 265 bp, Glycine max
ttctagggcatgttgggttctatcggcgatatatcagagatttctcaacgatcgttaaaccactcaataatttgcttaacaaggatgttgtgtttatatttgatgaagaatgcttgaaagcatttagcattctcaagaccagactagtattcgctcctgtgattacaacattagactagggtcaagaatttgagctaatgtgtgatgcaagtaactatgcaattggtgctaagttgggtcaaagaaaaggcagagttttccatgc

SEQ ID NO: 116255 - DNA, 498 bp, Glycine max
  unsure (1)..(498): unsure at all n locations
gctacataagctagaagctaatccaagttggacaatatttattacttatatggaatccatttaagtgcttgacatcctgattcaattctcatggaaatctatttttttgattcagtaagaagtagttctaggccagctgatgctgcaattgctagacttattcaaggaacaaaggtgcttacatcangagggaccgataagctatttcaacaaacattngggggtgttccaggagagaagctcttatagccatgtgcttgctacatatcaacaaactctggacctctaattggaacactctatatatccaccanaagattagcattttgcagtgactctctattgtgccatcatccattctccctacagcagcatgaatgcgttattataaggtacctttcacctcattgctagttatattttatgcagttacataaatagtttanggtgatatcacacactatcatcaagctcatgctggtattttatagtataaat

SEQ ID NO: 116256 - DNA, 265 bp, Glycine max
ttgatggtgtcgagaagaaatcacatgtttgtcatcatcaaaaaggggagaatgtgaatgtatgtatacatgattttgatgatgtcaaagaagaatctaacaaggctgcttcaaatgataagcatttgcttcaagaataattcaagattgtttcaacaaacaaagccttgttttaagattcactaaagaccaagccttgccttaaaacaaagtactttcaagacatgcaaggctctggtaatcgattaccaggaagtgtaatcga

SEQ ID NO: 116257 - DNA, 405 bp, Glycine max
  unsure (1)..(405): unsure at all n locations
gacgcatcaacaagaatcaagccaaggctattgtgcaagcaatcaatggggcaaaacacaccaaatgattataatgatggatggctcaaattctcacaaagggtaaatcatcactttcaaaactatcatgacatgtagagaagaatcaaggatttcaagtcacanaatgtcaagaacttttattttcaaaacaattacccatttcttgaacatatcctataattcaaggaaaaacatgcaaagtcgtacgtgcacacgaaaatgacccanaatattaaactgaaaatccgacgaaactaacaacattaacaaattaacacaanctacaaattaacaaaaccaacataactagcanaaccaaagaacacttcccccccccncccacccatacttaaacaacacatt

SEQ ID NO: 116258 - DNA, 264 bp, Glycine max
tgcacaacaagtaactaaatctattttttacaaaataaaataactaactaacttccactattatatagagtgattactcataaggaaggtatgggccttgattaggctcatctaatctacctaattaaactaattacaaaaaacccaaactcgtagcctaattattcaagggcagagattctgacttccaagccaaattagaccttcgaaatgacaaaaatggcctaagcttatttttgacaaaattaaggataattttcttag

SEQ ID NO: 116259 - DNA, 378 bp, Glycine max
  unsure (1)..(378): unsure at all n locations
tgcaagcttgacatgacttcatttatgattctcggcagtgtgtaatgttngacatggtatcttcaaaagaggctacttaattggctaaaattaaagctttgtatgcttcaatagcttgcacccgtgaagcttgcacatgcatgaatagtataaaagcaaagttttgtgtaagaaggatgcacanatgctagtcacacttcatatctcgtgaagcatgcttatagggtctcttacatgaaatgatgtatcatacccatgaaatgttgccagaaataaagctagtcaataataacttatcttgccagaaatagagctagtcaataataacttgtatcacggaccactaaaacaattataagttgtgtatatttggactca

SEQ ID NO: 116260 - DNA, 266 bp, Glycine max
tagcaacagtcccaaaacccaatttttcccgaaaccaagtgtcatgatttctatattaccaattttactagctgttaatgttgcatcatagttttgctatgtcatctacctttggtctcatctctttaccttacaatttagtcaattctatcattaccctttttcaatatacagaattagcaacatgcaaacatatctaatccaggaaattccaccactaatagtcagcctataatccataaccaatgaaatgcctcatatccgat

SEQ ID NO: 116261 - DNA, 404 bp, Glycine max
  unsure (1)..(404): unsure at all n locations
gatcttaagcaccgccgctgcagcttatgctctcttggcaacaatttgcccttttattatgccttttcttttcttatctttatgtgacgaatattcaattgatatctgcggctcggcagtattcgtataaataattgaaattctggttgtacatttcagtatatagtgtccaacattgatgtaactacacaatgactagggggattctggtttatagtggccaaatcgtaaatgatgaagccccatataaagataatatagttaatttgttcctttttaaatcgtggctttgataagggacgtagtacatcattgtgaattcgtgctaggtattgaataacttgatctttngttaattaatagtattctattaacctttntggcatcttcttgatcctttctac

SEQ ID NO: 116262 - DNA, 260 bp, Glycine max
ttgcaactggaacgttgggaagatatcaaagtaatccaggaatggaacattggaaagctgcaaagaaagttctgagatacttacagggaacaaaagaccacatgcttacatataagaggtctgatcacctagaggtgattggatattcagactcagactttgctggatgtgtggatacaagaaaatccactcttggctttgtatttctcttagccggaggagcaatatcgtggaagagtgcaaaacaatccgttgttgct

SEQ ID NO: 116263 - DNA, 457 bp, Glycine max
  unsure (1)..(457): unsure at all n locations
agcttagctagatagatngtccaagatggaagatactttattactagttatgcangtatccatctcaaaccaaaagaacattgatgcttctattaaaaatctagaggtttaggtgggacaattggcaaaacaaatgtctgagcatgaaagtggatccttctcagcaaccacaaaagtcaacccaagagaacaatgtaaggcagctacaactaggaggggggcagtagttggtttgaagaacgaaagttattttagtgagaaaaagacaaatgaagagttgtaaaaatgagtgatgaaaaagaagtagtcgaaagagagaaaaaaaatgaagtattanctaaagagatggagaaggaaatgagtgaagtggaggagcagaaattgaagaaaacaacatctaacaaaggcaaagtngtactagatcatccaccaattcaacatcttccttatccacatg

SEQ ID NO: 116264 - DNA, 261 bp, Glycine max
tgtctaaataacctgaaattgaaagaaaatgattattaaacacacaaaatggaagtactaactgatgtaagctccattggagcttgtaagcctacgatcttctccatcaatggattcctttgcttcttggaaaaataatggcaacggaatggaaaaagaagagagggaagagatgccacttcaaagagaagatgagtctagaagaagctcaccaccataagaggccatggataagagcttggaggaagaagggaatgaatg

SEQ ID NO: 116265 - DNA, 422 bp, Glycine max
  unsure (1)..(422): unsure at all n locations
agcttatatatatcgaggcgctcaaatatttaacaactttagctcttgagaaattcaaatggtcataactntttacactgaggtccgattcaggcttataatatatcaagtcgctcgaaattaaacatcggaagctctcgagaaattcaaatggtcataacttttcacacggatgtccgattcagcgcatattatgtcgagaggccttaaactgaacaaccgaagctatcgagaaattcaaatggtcataacttttcacactgaacttcgattctagcttacaatatattgagacgctcgaaataaacatcgaaagctctcgagaaataaaatggcataacttttactcggatgccaattcagcgcatacatttcagacgctcaaaataacaaggaagctccggaaattcaatggcataact

SEQ ID NO: 116266 - DNA, 195 bp, Glycine max
tagggatggaacacttacttgttggtgatgaacaaaagctctaaacggaatcaaaaatgcgaaaaaggatggccctagggctgcaaactcgtcaatcccgtgggtatggcttttgaaaggggggaaaagaagtttttgaatgttaaaacgccccccctttcgtcattcttataatttggtgcaggggtggctcgc

SEQ ID NO: 116267 - DNA, 466 bp, Glycine max
  unsure (1)..(466): unsure at all n locations
agctngcanatacctgatctaaaaacaatatctacatattattgcaaganacattcaaatagaaattcgcatcagaaaaaaggttgaaatntaaataacacttcactgcattggttcatgaaactctataacaaaatgttgctctatatattccatatgctgttcttttaactttaagtaacccttgtcaaaacctggtgaaaataaaatgtgcaacagtacctgtagctgcaacatatcactgccaacagacagaagggatgtctcannaatggaagcatgtaaactaaaagcaacccccaacttcttagcagtcggatcttcatggttgtcagcttctgaaaaacatcattcatctctcctaaagtaacccaacaccaaaccaaactgtaaagttacatttttntactccccaaatcaagggtatttaaaattctagctangagacaagaccatcgatctgaag

SEQ ID NO: 116268 - DNA, 331 bp, Glycine max
  unsure (1)..(331): unsure at all n locations
agctngaagcaggagccagtntgagagcttgagatgagtttgtgagtgattgtgagatcctagaggtgaaggagacatcctcaccacttgntattttgcaatctttcatcttgttcttctcttntgtggaaagaaggcttcctggtatataaagctaaatcctttgttgaatcttccttgtaggtacctgatgtaaatatatttctatctattaaatgatggtttgtgtgttctctgtgctatatgcttttcactccagtatgcctttaccttgatcacgtaaatgaatgctttgttagggtcattcaacagtggaaactggtctgactct

SEQ ID NO: 116269 - DNA, 263 bp, Glycine max
tctgagttttgatagcaataatacaatcattatgcatatgcctataaagggtacagtgataacaaggttgcaataactatttcttagatttcagttcaacatgattggaccaatcgacaaagcatgtagaaattgacagaaaattactatatatctattattttatctactttctatttatctacttttctactttctatatatccactttctatatataaattctatagatggttgaaattacatttaaaaccatttttcag

SEQ ID NO: 116270 - DNA, 192 bp, Glycine max
tatcatgtttgggatcgtatgatggggttaccacttatactcttgccgataagcgtgcgatttacgacttgaacaatgctccatttataccttatctactacggacttttaattaagaaccgggggacctaacatccttaaaccaacctgatcactgctggcttacttgtgaactagaccgatatcttgcct

SEQ ID NO: 116271 - DNA, 444 bp, Glycine max
  unsure (1)..(444): unsure at all n locations
gctatgtgctcgcgactgtcccttttcttccttcgcaacttgagttcattatcgctaccccatagagctccgcaaatttgttccgaccatactcttncttgcgaagccctctggtctctcgttcaagggctcttgcggtaattgcattctcttcccgtaacccggcacactccttccgaacgtgtgtagcagccaacttgaacttctccttgggcgagtttgcctttcctaactcgcttttgagagcttggacttcctcgtcctcttccggtgcttcaaaattctctttgctgacgactnntaactnggcgagccaatctaaacctcgtatgcgaactttcagccattcgtggtacccaccaatgatgccattacgaatgcctctaagctcttgatctttccttaacggngtttcccatgccttatggattctttgtatagtct

SEQ ID NO: 116272 - DNA, 286 bp, Glycine max
ttagtcacactattgaaactaacttaacatagacacttcagggtactggaactacttcacatggtacttgatggggcctatgcaagttgaaagccttggaggaaagaggtatgcctatgttgttgtggatgatttctccagatttacctgggtcaactttatcagagagaaatcagacacctttggagtattcaaagagttgagtctaagacttcaaagagaaaaagactgtgtcatcaagagaattaggagtgatcatggcagagagtttgaaaacagcaagttt

SEQ ID NO: 116273 - DNA, 468 bp, Glycine max
  unsure (1)..(468): unsure at all n locations
acctgaggcatgcaagcttcacgatatataatgctctcgaatcggacatccgtgtataacgttatgaccattngaatatctcgagagcctttgttgttcaatttcgagcgtctcgatatattatgcgcctgaatcggacatccgtgtgaaaagttatgaccatttgaatttctcgagaggttccgttgttcaatttcgagagtctcgatatattatggttacaaatcaaactatctgttgagaagatatgaccactttgaatctctcgaccgctttcgttgcttaatttcagcgtcacgatatttatggcccccaatcggcattcgtgtgaaatgtatgacccttaaaattctcagggtgtccgtttcaatttgacatctgtataaaagacctgaacggacatcggtgaaagtataccatttattcttcatggtccgtgttcattccacgcttgatatatatttcaat

SEQ ID NO: 116274 - DNA, 283 bp, Glycine max
taccccacaccaattaatactcgtgctatttattatgcgccctatccgacatcctttaaaaaagatgactcattcaattaccgacatctttaatggatagtttccacctactggaatatcatgcgccataatctaacgttgctgtgaacagatatgaccgtgaaaacatctcaatagggtcctatgttcactccacagcgtaacgatttactatggacgggagcctaacatgcgaatgaataacaatgaacatacctaaatatacatggtctgacagagataa

SEQ ID NO: 116275 - DNA, 247 bp, Glycine max
tgctgaaaggatctaggagattgtctcatactttctcgtgagcgtaaattaaaggtgggcaactgtggatggtgtgcttatgcctggtttgtggaaatgggatagctgatttgtgccatcgctcgatcgccacctattgccacatatgaagggtgccccataatccaataagcttggtgtgagatagcatggaagagtcagtctttctactttatttgttgaccacagagttgtacctagagatatg

SEQ ID NO: 116276 - DNA, 264 bp, Glycine max
ccgacatgagaatgttgaaggtgaaacttcctgcttttattgttgaccacagagtggtacctgaagatatgtctcgggggtcaagaaaccttggggacgtcaggtggggtgctattgcccaaaaccaagcttgaccaatcccgacccaacccgggcatattctgtcagtgagaacctgtgatgtacctaaacaggcgagctcctggcagtctacagataaaaggaaaacaagaccacaaagcaaggaggcttgtggtggctggc

SEQ ID NO: 116277 - DNA, 179 bp, Glycine max
  unsure (1)..(179): unsure at all n locations
gcgagctcagctcgctcaagctagcttaggttgcttnctncagaaacgcacctcttctggnggaactttctagagggccaagtgggcttgggttctatttgcacccccttgttactaaatacaccccctgcccccctnttttttgctgattctttttcccgaacggtatggaactttac

SEQ ID NO: 116278 - DNA, 266 bp, Glycine max
ttaagctttagttttcatgttgttcatgttgctcttcttatctctaacaaaatataaaaataatattcagattttagagtttatctaaagcttaagtttatggaatgtaacatgaacaatcaaaacctattactccgttccaaaactataaatgctttacaaattcaacactaaattcataatcctttctctattatacccttgtttacagttatcagtgcattgaatattttttgtcaccaatagctaaccatttatcaatgaga

SEQ ID NO: 116279 - DNA, 267 bp, Glycine max
  unsure (1)..(267): unsure at all n locations
gaattggaatatattcaacgtcccagnaccttgacttgctcttgacgggttctggattcaagaaaccttcccttttcgcgtctactcatccttctggttacacaaaccagcattccctgtttgacccaaggacactatcgggttcaacttatgaatttttaacctttcaacaacttcgaggttgacagtgtcttctcgattaaattaccattagggacccttatatttatctttgtcattattacggacaaagtacatggccgtgat

SEQ ID NO: 116280 - DNA, 268 bp, Glycine max
ttgcggatttggccttcgccggcagaaggatcaaagtgaggatggaattatgaaaatttaatcatcctacttgggcgaatgagtaaaaactggggcaaatgaagagggtgagaatgagggagaaactcatgctgtgactgccattcctatacggacaagcgtaccaccaacccaacaatgtctttactcactcaataacaacccttctccttacccaccacccaattatccacaaagaccattcctaaatcaaaccacaaagcctgtc

SEQ ID NO: 116281 - DNA, 435 bp, Glycine max
  unsure (1)..(435): unsure at all n locations
gtcacctgcggcatgcaagcttgcatgtctagagattctagagatatanagacttaagntccagacgtcgaagggttcagcgattatcctttcgcggatacgactgacctatgcctggtgccggacgtcgtcattccttccaaagtcaaagtacccgacttcgataggtacaaggggatgacgtgtcctaaaaatcacttataaatgtattgtcgaaagatgggtgcatanttcacggatgagaagttattaatgcacttctttcaagatagtttggctggggcagcagtcatttggtacactaacctagaagcttcccgcatccgcacttggaaggatcttatntctgccttccttaggcagtatcagtacaacactgacatggctcccgaccaaaccagctggataacatgagcaagcangaacatgagtctt

SEQ ID NO: 116282 - DNA, 270 bp, Glycine max
tatgaatctcaacttggatgagaatgtacaggatgaaacttgctgcttttattttttgaccacagatggtacctggagatatgtcgcgggggtcaagagaccttggggacgtcatgtggggtgctattgcccaaaaccaagcttgaccaatcccgacccaacccgggcatattcagtcagtgagaacctatgatgtacctaagcaggcgagctcctgtcagtcaacagataaaagaaacaaaaccacaaagcaaggaggcttgtgtggtg

SEQ ID NO: 116283 - DNA, 391 bp, Glycine max
  unsure (1)..(391): unsure at all n locations
ctatattgctcggtgggcacaaaagaatactattgaaataaaaatatgcatatgattgcctgttatttttacccttaatgattaatatcactacctaaataacattcaaataaatcatataaagtaggcaaatatatatgaaaaaagaagagatattaccaaaaagataccggaatagaagaagatgataataaacggtggtcatatataattacttaaacttattagaaaaaactgatcgangtcggtagcggtaattatatctatttatctaatatatcaatattaatttagactgggtagctcgaatctctaanggttntggaatctgtatgtttgattagttatcggggggatcgaatttgaattagtttggtgtgctgttataaag

SEQ ID NO: 116284 - DNA, 266 bp, Glycine max
taagcttctaaccgcaatccaaacagccactgatgggaaactaacttccatcctacttatgcaggtcaaattgcccatttaaacctacatgatgagttacttccccacaaaaatgttattgcaaaggttatttatgatgtatgtatgactacatcgaggtttaaattttattttcaatcttttttcttaaaaaaagaagctttctttgtctatttattgctgctatgaaatgcactaatcttgtttacttgtcagatacagaagat

SEQ ID NO: 116285 - DNA, 485 bp, Glycine max
  unsure (1)..(485): unsure at all n locations
agctngtaatccttaacaagaattctgttggttaatctttctctattaaccttcattcgccaacgtttggttctattacttctatatatattacatgtgggaggcanagcaacgttgctactcaatataaaataaaaaaataaaagtctgaaattattattataatgtgtagatgtgttaaaaacaatttagtgagatccattggaagcaacaaacaagagttgctccatgcaaagatgtattgcgtagagttgtttgtattgagaaaaataaaaataaataatgtgtatatatgggtcctattgaaagcaactattgcgaagttgctaaaatggtgaggttccacattancctagatgagcatgaaattagtatagccttcatggatattaaactcttatattgaacctaaccaaatgtgtactgtacaacatgacaaagcttataagtatagcctcttctggttctttatactttcatcagct

SEQ ID NO: 116286 - DNA, 265 bp, Glycine max
ccacgctttagttttcatgttggacatgttgctcttcttatttttaacgcaatataaaaataatattcagattttagagtttatctaaagcttaagtttatggaatgtaacatgaacaatcaaaacctattactccgttccaaaactataaatgctttacaaattcaacactaaattcataatcctttctctattatacccttgtttacagttatcactgcattgaatattttttgtcaccaatagctaaccatttatcaatgag

SEQ ID NO: 116287 - DNA, 473 bp, Glycine max
  unsure (1)..(473): unsure at all n locations
agctngcatgaattacattctccccctttctcaagcttattcttaattcttcttgacatcatcaaaatcttcatgatntacattctcccccctttgtgatgatgacaaccacctgtaggttaggagcaacaacaaataaaanatatctatttgcatatagtttactccccctttggtttgcaatgattgcttatatgagacagttgaagattntcatattttcatatgtaaacaaatggtctcataaacaatagataattcttcttactatnttatcctttatctttctctccccctttgcaacatcaaaaacaaatcatgaatatagaggagaaagatgtaccacttgttcaatgatgagaataaggatacaaaaggattaaacaatatttatataataagcaaaacagtcaataccataataaaccatcaatcatcatctcaaattcaacaataataatatatcactactt

SEQ ID NO: 116288 - DNA, 152 bp, Glycine max
cctcatggactcctttaaggacaatagcatcatctcttgcactgcattgttgggagttggaagccattttctcaatcaaaatcctagcctcaacaggagtcatatcaccaagagctccaccactgggggcatcaatcatactcatctgcatg

SEQ ID NO: 116289 - DNA, 264 bp, Glycine max
tggagaggatgcttcaatggaggaaaagaaagaggtagagattgagagaagggggagcacgaaattgaaggaagaaaaagggagagtagttgaactttgagttgtgtctcacaagagtctcgttcatcaaagttacaacaagtgttacacatgcttctatttatagactaggtagcttccttgagaagatttcttgagaaaacttccttgagaagcttctttgagaaaacttccttgagaagctagagcttatctacacacacc

SEQ ID NO: 116290 - DNA, 502 bp, Glycine max
  unsure (1)..(502): unsure at all n locations
agcttganatgttatgaccatntgtatttctcgagggttttcgatgtttaattncgagcgtatgaatatattataagcctgaatcggacctcagtgtgaaaagttatgaccatttgaatgtctcgagagccttccgttgttcaatttcgagcgtctctgtatgggatgctcccgaatcggacatccgagtgaagaagtttgaccatttgaatttctcgagagctttcgttgcntcatttcgagcgcctctatatgtgatgcgcctgaatcggacctcagtgtgaaaagttattactagtatgaatttctcgagggctttcgatgtttaatctcgagcgtatcaatatattataagcctgaatcggaccccaacgggtaaggttatgaccatttgaatntctcaagagcttccgttgttcaatttaagcgtctcgacatattatgcgctcgaatcggacatccgtgtgananattatgaccaattgaatctctcgagagcttc

SEQ ID NO: 116291 - DNA, 262 bp, Glycine max
tttcgagtgcctcctattgatgcgcctgaatcggacattcgagtgaaaagttatgaccatttgaatttctcgagagcttcctatggttaattttgagcgtcttgatatattatacgcctgaatcgaacctcagtggaaaaaattatgaccatttgaatttctttaaacatccgttgttcatttttgaacggctctatatgtgatgaaccttaatcgggactccgtgtgaaaagtgatgaccatttgaatttctcgagagctt

SEQ ID NO: 116292 - DNA, 381 bp, Glycine max
  unsure (1)..(381): unsure at all n locations
tcttaagcacctgggctgcagcttgcacttcctaaatgctggatgcttccctanagttgtttcctccatctgaccttgtaaccttgtcaagtttccaatggatgaagggattaccccagaanagttgttgccattcaaatccaaaccatttaatagtcgaagcatacctattgtatgaggaacaaaaccacttaggttgttctcttctaatccaagaaaaagtaagttaacaaaggttctgatcccaattgggacactttcatgtattccattgccacctanagtaagtgaagttaattgagttgaaagattagcaattgtactangcagttctcctccaaaactattatcagaaaggcctanaactttaagagcagtaca

SEQ ID NO: 116293 - DNA, 265 bp, Glycine max
tgaacgaccaacttgcaggagttctcaaggctcgccaatttcacctggcgctgaagagcaatgacactcatcacctaggttagagaggacttgtatttcaaaatgtcatctgtcgcaacctacccttcggtgggaaggcgacgcgagggctcacgggtgcatcttccaagggaggaaggcgcgtggagtcgtcaccaacgtttatttgaggaaaacatcagaaaaaccgaaaaaggtgtggtctacgaactttaagtgtgaaagg

SEQ ID NO: 116294 - DNA, 279 bp, Glycine max
  unsure (1)..(279): unsure at all n locations
cttgatgatgtcgagaagaaatcacatgtntgtcatcatcanagttggggataatgtgaatgtatgtatacatgaattagatgatgtcaaagaagaatcacacaaggctgcttcaaatgataagcatttgcatcaagaataattcaagattgtttcacaaacaaagccttgtttcaagattcactaaagaccaagccttgccttagaacagagtgctttcaagacacctatttataggcctgtgatggccatacacaaatccattgaaaagatgtgact

SEQ ID NO: 116295 - DNA, 267 bp, Glycine max
tagagaggaagcttcaatggaggaagagaatgagagagaggggggcacgaaattgaaggacaaaaagagggagagaagttgaactttgaagtgtgtctcacaagttgcatattcatcaaagttgagataagtgttacacatgtttctatttatagtttaggtcacaaactaaatgaaattcactgtgaatttcattttcatctcatgtgaatctaagaggaatattccaaggatatgccatgtgcatcatagcatattccaagaata

SEQ ID NO: 116296 - DNA, 404 bp, Glycine max
  unsure (1)..(404): unsure at all n locations
tgttgatcttcttctcctacttgacctgtggagggtggatttccatanatggatccattntgcttcagtcaaaagttgagagtgggatatggtcctgagntctcttcttccttcctttcttctttagnttttctcttggtgggtttgcacctttgtctgaggctggacacatacattgctatgttccaaggatcaatcaatgagatngcatcctgactangttngtatgtgttggccgcgtccacacaagagtgtccaaagccatatagcgtcaaagaaagacctngtagcttgagaagaatgtgtcatatcatacctcatcattctgtgtagaccagtgttgacttcatgtggtgaatggaccatgaaatgtctctacactggaatatctatgacattctgct

SEQ ID NO: 116297 - DNA, 273 bp, Glycine max
aagcttgtctcgctaagtgggagtccactttttgtggctgacatgacaatttgtttcttaacacaactccctcagcactaagtctcgctcagtgcaactccctcagcactaagtctcgctcagtgcaactccctctttggttggaattgcgcttagcgcacccttcgctcttatcaagacatcaaaagttgttatttgcaaaatcccaacggtcagactatggcggattgtcttaggaaccttgactaaagcttttaagacaatccaacggtt

SEQ ID NO: 116298 - DNA, 266 bp, Glycine max
tcttgcagcgttacgaatataatgttagcttatgaggacagtgaactcatacgatatatattactactcgccatgatctacggcatctgtgagttaaggaacctctttgtggtgaaaagaccaactacattacattagcccatactacatacgtgggtggcgaaccagttgatgggctgagaaacctatctgatgattaagtcgacttcactatcagctagatggatgtcattgacatcttcatgcatgtgacatggaccattgtt

SEQ ID NO: 116299 - DNA, 439 bp, Glycine max
  unsure (1)..(439): unsure at all n locations
agctntgagcagattcanacaacaataactttttactctgatgtctgattgagtcccgtaacatatcgagacgctcgaaatggaataccgaagctctgaacaaattcaaacgacaataactttttactcggttgtctgactgagtcgcgtaatatattgagacactcgaatatgattatcgaagctctgagcaaattcaaatgacaataactctttactctgatgtctgactgagtaccgtaatatattgagacgctcgacattgattaccgaagctctgagataattcacacgacaataacttgttactctgatgtctgattcagtcccgtaatatatcgaaacgctcgatattgaatgttgaagctctgagcaacttcaaactacaaganactttttactcggatgtctgagtcagtcctcgaatatatcgaaacgc

SEQ ID NO: 116300 - DNA, 262 bp, Glycine max
tgtagaatggctagacatgatacatgtcagggcttggtttggttcaaggataaaatggatgccccacattatttccatgacacaaatgcaaaaaatgatgatttggaaattttatgcaaaactggtcatgcatgcgcctatgcggacgctcaagtgtcaaatttttatggtcatgtgatgctagggctcaggattcatttcctctattttagtcaacccaatatttccaaaatatgttcttttatcaatttgtgcattcctc

SEQ ID NO: 116301 - DNA, 409 bp, Glycine max
atccttaagcaccgcagctgcagctataagaaggatcaaccttgcttttcatgcaattatatatgacctacttatatataatgattcaactaccattcaatgtgaatgaaattaattaaaacacatctctcaataaatcgtggaaatccttacattaattggtacttttgtcttccactcaataatataataacgaaggatagatccctccagaaagacatcatttatagaaatgaaccactcctctcacattaaagttctgccaacacatgtatggagcgcgtacatatatccgtattatcacgcgcatgagaatggtgctataatacccttttcagatcctatacattgatatccatattgatatccattctcgtgttcagtcaactcatatgtttatactggtata

SEQ ID NO: 116302 - DNA, 268 bp, Glycine max
tgtaacagcggctactaaccgatgttgaaagtaccaacgttgtttaggattatcggatgacatcggttatctcagcgtgagtgcacattttaacaatggattttatgaaaaacgatgttcgttgtatgttaacaatgggctctgttttaagagaaaaacccatgtctgtatttacggaatgttttttaatttgctgtgcgattttttcatggagcccaataattagcctgcaaattttaaaggggtccccccaacatgacagatgttt

SEQ ID NO: 116303 - DNA, 369 bp, Glycine max
  unsure (1)..(369): unsure at all n locations
agctnngcaaatggaagcanagaagtctatctatnaggtgcagaatcactctcattaattcagttntatcagctgtaccttattttntactatctnnttttaagatccctannanagtggtgcanaagattgtatccattcagagaaatttcctttagggaggtcatcatgaggccgacatgattccttgggtgaagtgggacacagtttgccttccttaaaataaagggggcctanggattaaagatttgtctaaatttaatgaggctctacttaaccaaatggggtggagtggctaataatcagaaccaactttgggcaagaatcttaatctccaaatatggtggctagaaagagttgatctctggt

SEQ ID NO: 116304 - DNA, 260 bp, Glycine max
tttatagaaggttcattcctaatttctctacaattgcatcacttctcaatgagttggtgaagaagaatgtggcatttacctggggtgaaaaacaagagcaagcctttgctttgctcagagaaaagcttactaaggcacctgttctagctcttcctgacttttctaaaacttttgagctagaatgtgatgcctctggagtgggagttggagttctattgttacaaggtgggcaccctattgcttattttagtgaaaaactt

SEQ ID NO: 116305 - DNA, 410 bp, Glycine max
atccttaagcaccgctgctgcagcttacagaggaagaaatagagcggtctgttggatctgcggaagtgaaaaaagcccgagaccggatggtctaaatttcaaatttattaaacagtcttgggagtcgttaaagcccgaattcagccggttcattgctgaatttcatgccaatggggtatttccgaggggcaccaatgcatctttcattgctttgatcccaaaggtgaaggatacacttcatcttaatgaatacagacctatctcattaataggctgtatctacaagattgtggctaaacttttagcacatagattgaagaaggtgttgccaaacataattgatgagagtgcattagctcttatcattggaagacagctgctgcacagctgtctgattgccaacgaggcgg

SEQ ID NO: 116306 - DNA, 262 bp, Glycine max
tgtgaaatcaatggaatccaagattccgtttgacacaagttgttttattttgttcttagaaatgtgacctaagcgcttgtgccataatgctcctgagtttgtattatcaattctacgcttagtaccacgcaattctgtattaaaggattcaccataagaagctacagtatcaagtaaatatagattatcattaaccaagagtgaaccagttccaacaatatctgaattaaaatacaacctgaacacattgtttccaaatgaa

SEQ ID NO: 116307 - DNA, 189 bp, Glycine max
  unsure (1)..(189): unsure at all n locations
aatagatgtattgactggagtgaagtgagagtttgcttcaaatctacctcattctatatttcacttttcaaacctagaaaacccattgaattgaggggtgttggacacctagattctgtgctgctgtgctgtanagcttgtatttgggtatacatggttgatacatgatttgcgacttgtatgaattga

SEQ ID NO: 116308 - DNA, 276 bp, Glycine max
ctatatagaactacagcttcgttgagattatcaccctcaaacagcaggggaaactgagagaacaattctgcctttataagaacaaatgagagcgcgtgtgataggagaaaaggggagtagggaggagtatttacctctagtggaggagacacacaacaatacttgttatgctagtatacatatggtggcatctgtagaatcatatgggaggaagagtggaacaccaatatgtaggtaggagaatggtgaggcgattttgatagagatgaggatgga

SEQ ID NO: 116309 - DNA, 371 bp, Glycine max
  unsure (1)..(371): unsure at all n locations
caagcttgnaggggatcttgaaaaacaagagtggtctatgaaaagctaaagatgatagtcactanggtcaggaaagagtgtgatatgctgagagatgtcaacatgactacggtagaagaattagagcgggaaacanatatggcccgaaaggaagaatggagcatgaacaagttccgaggggatctatgggacaacggcaacgggcttaagcttataaaggccaagagggacgagtcaaggatggaaagcatggtgttagaggataagttaaaggcttgtcaaaggtcgaagagaagtntgacagaacaactgagcagaatggaagagaatatgtngacaattattgatncatataaggagaagatgaacct

SEQ ID NO: 116310 - DNA, 257 bp, Glycine max
ttgagccaaaatcctgactcaccataaaccttgacccaggtgagaatgtcaattcttacccttcgaagcaaaaaaaggggagagggaaaatttccaatcaaagaggaagcaaaaaaggggagaaagaaaattttcaatcaaaggaaaaaaagaaaagaaagggaattgtcaatcaaagatgggagaaagccaaagaaaagaaagaaaatttccaatcaaagaatgggagaaagaaaaagagaagaagaaagggaaaa

SEQ ID NO: 116311 - DNA, 318 bp, Glycine max
  unsure (1)..(318): unsure at all n locations
agcttctacttatgtggcagggcgggcttccctcactttcttgtctccaacgcgagctttgaccactgctcttccttcccgcgatgcttcttttcatatccgcctgagtgggcttatagcctaaaccatacttcccacgatttcctttggcatttatcaggctagttatgccgcccgtgtctttgcctaaacccattccgggttcgtaaccgttccccaacataactcgggccatcattactgctgcatcngacaggcaaggctgcccagagaaggagtccacagaggaaatgcttaccacctcaaaagactggaaag

SEQ ID NO: 116312 - DNA, 256 bp, Glycine max
tcttatccaaggctcatcttggtggtgaagctccttcttccatggcttattccctagtggatggcgcctcctctcacctcttctcctttgtcttccgctgcatctccatggtggaaaatcaccattaaaggacctcattgaagctcaaagatccagcccccatagaagccccacaagcaagctttcatcaactgggctgtaaagacctacaacttctttattgatcaggctagagaggaaaggaagttgcaactaa

SEQ ID NO: 116313 - DNA, 376 bp, Glycine max
  unsure (1)..(376): unsure at all n locations
tcttaagcacgcggctgcaagcttgccttaggctgacctatacttctttctaacttaacctatcgtcctacagtcttagattgggagccatccaatccttgtgttcggactctcagccacttatgatagccgccgatgatcccattactgcttccnctaagctctctgtcctttcttcacgccgcatcacatgccttgcgaactccttggagtaccctcgcgttgtggtcactaaaaccccgtgcgatgaaaggcgtngatgcttcgtctaatggcgctcctctcatggggtagccaagctgtcttatggcgagaacgggattatattaatacaaccccttgttccatcaaaggacatntggacattcttcgcatg

SEQ ID NO: 116314 - DNA, 260 bp, Glycine max
ccccaattttctataaatagggggagaagtgaagtatattaggttcagccccttaagcacttctctctctttccaatttgcttaagaaaattgtttccctgaaaaaaattccagcccgagcgctttcctaacggtttcgtgaatgatttccccaaagttttcgaccgttcttcgacgttcttcattcattcttcatccgttcttcgttcttcaacgggtaagttttcgaatccgagactttcaattcatttcttgttttt

SEQ ID NO: 116315 - DNA, 323 bp, Glycine max
gcatgcaagctgtaaggaagtttactcaagagagcttcgcaaggtagctaccttgtctataaatagaagcatgtgtaacacttgttgcaactctgatgaatgagagtcttgtgagacacaactcatagttcaacttctctcccttctttctttcttcaattatcggctccttcctccctcttattcttcctctttctattactgcatagaagcatccttctcaagtcttttatacaatgctcatattggtggggaaactccttcttccatggcttattgcctagtggatggcgccatctctcaccttatcttctttgacatcc

SEQ ID NO: 116316 - DNA, 262 bp, Glycine max
tccttacttcagaatgtctctgcaattgctactcactttttaccatatattgatctcaagtctacttcttaaatgtatgttcctatgaaaatttgctaacgtgttaattacaaggattaatccatatatagatcaagtgtatggccctaaggccatagtattattcggaaacaataaacgttctctcacgactgccttttaaatcgtatactaccctatacctagcctacacatgaaattgttacaaattgtaagaagaata

SEQ ID NO: 116317 - DNA, 511 bp, Glycine max
  unsure (1)..(511): unsure at all n locations
agcttanagggaagagaaagaccaatcacgagcacatatcatggtcttgaaagaggagttagctgcttgctcaaggtccaaaagaaacttgtctcagcgtntacgcgagacagagaccaacatgttagccatcatcaacaagtaccaagaagaactaaatctagccacggcccacgagcataaggtggcagacgagtatgcccaagtgtacgcgaaaaaggatgctagaggaagggtgatcaactcgttacatcaagaggcaacaatgcagatgaaccgatttgctcttaccttanacgggagtcaagaacttcctcgattactagccatggccaaagcaatggcagacacctactccgcccccgaagagatccacggacttctcagctattgtcagcatatgataggcttaatggcccatantaataganaccgctangaagtntgattggcgctcagatcttgactagtataactttctgaatannaatgagttatcccactgttttac

SEQ ID NO: 116318 - DNA, 265 bp, Glycine max
ttacatgcctcatgacacctaagtacacttagtggagaatcttggacttgatcttggattagtgggctgaaccatagctaaaattcactaatcataattagtgaaattttggccccaaaatttggctccacaaattcaatttcaaactcaagtgaaatttgaatagaaattcaaatttccctccaatttttgtgtgacacgtaggctataaatagagtccatgtgtgtgcattttttggaactttgatcatttgagaattacact

SEQ ID NO: 116319 - DNA, 305 bp, Glycine max
  unsure (1)..(305): unsure at all n locations
atccgcaagaagcttacagatcaacctattctccttgcggatcaactngatctgtaagttcaacacctactgtggatcatctattcctatngcagatcaaggtgatccgcaagttcaacacctactacggatcatctattcctatggcggatcaactacgtctctactgcggatgacctaaatccttaagcggatcaactacatacctacaaactgcactacacaaatataaatggaagcagaatgacacaagaaaagggacattaggcttacctcgatgaagaacataatggaagctcgcggaa

SEQ ID NO: 116320 - DNA, 258 bp, Glycine max
gacggcgtggaagcaccatatcctgtggtaccttacaagaaggacaaggactgccatttggcgagattcttagatattttcaggaaactagaaataaccatgcctttcggagaagctttacagctaatgcaactctactccaagtttttaaaggatatgttaacaaggagacacaagtatattcatcaagaaaacatttttgtggaaggaaattgtagtgctgtgattcaaaagatccttccacccaagcataaagac

SEQ ID NO: 116321 - DNA, 456 bp, Glycine max
  unsure (1)..(456): unsure at all n locations
agcttctcaagaaagtgagcttagttattataggggtgtgtgtagctaagctctagcttctcaaggaagttttctcanagaagcttctcaaggaagttntctcaagaaagcttctcaaggaagctacctagtctataaatagaagcatgtgtaacacttgttgtaactttgatgaaggagagtcttatgagacacaactcanagttcaacttctctccctttttcttccttcaatatcgtgctcccccctctctctttctctccctctatcttttcctccattgaagcatcctctccaagcttcttatccaaggctcatcttggtggtgaagctccttcttccatggcttattccctagtggatnggcgcctctctcacctcttctcctttgtcttccgctgcatctncatgatgganaataccattaaggacctcattaagctcaagatctacct

SEQ ID NO: 116322 - DNA, 259 bp, Glycine max
tatgtgaagtgaccagatggaagaatgaaaatgaggagttctatggtgtggggttttgtgctgcctattggtgcaagaatcgtggttaactgagttttattaagctactgaagtgaactgagtggatatggcttctatgtgcatcagaaatagccaagtaaaattctgaagaactacttactaccttggtattcaggggttgttcccagcttcttccttctgttatcaattattttactatagtacagagtaacttctt

SEQ ID NO: 116323 - DNA, 394 bp, Glycine max
  unsure (1)..(394): unsure at all n locations
atctctgagtcacctgcggcatgcagcttcttactntgtacaagaatgaagctctgataccacttgttagacaagtggcctcagatatcttaagaagggggggggttgaattagatattcccactctttcnctaaataaaaatctatcttactttttacttaagttatgaaatcccttaatgacaatcttcttaaatattaattcacactgaaccactttgatatgaatataaagaaataataaatacatgagattatgggaagagaatatgcanacttcattttatactggttcgccacacccttgtgctacgtccatccccaagcaatccgcttggaggtccactacttgaaatttcattacaagttctaacacacaagacaaccttccttg

SEQ ID NO: 116324 - DNA, 262 bp, Glycine max
tcctcggggccattcctgcgaaggcaaacatttggaaagttaattttaccagtgggacactactctttaaagcaaaaatggcatataacctcctcccataaatacaaacatcaatgtaaatttagagcaagcttatgcgcatatttccttacgaacgttctcttgcacaagacattctattaactaagaaaaatgcacccatatacaatcaaggcagcttcgttacctagattatttacacgtacttccaaggtgtatttgt

SEQ ID NO: 116325 - DNA, 493 bp, Glycine max
  unsure (1)..(493): unsure at all n locations
agctngcttctacaataagctaaaagaatgtaattttattacanaatgannatttcttaatataaggagtgtntattanggtgaaaataggccacgcagacaattangtggcttatagcctatctgggcctgacctttttaatagggctcttgctaaatacatcttcttctttgctatctttaaccccatttttgtcattaaattngttattaccannttatatcctttcaccttggttctacacccncaatagaagcatggttctctacctcgaaaactgattggggaggagaaaatttgcccatttgcacctttttggttgtgttccccttacttagcccttacaatactcataaatnggattccangtctcatgaaatgcctttattgngttattctacttcttataacggctacaagtgtatctcccttattggaaggatgtctgtctcaaaggatgtctaattaatgagtttaaatacncctatttag

SEQ ID NO: 116326 - DNA, 260 bp, Glycine max
ttgagggtgcgcagcccaccatcttttcatagtagagtaccgataatgtgtctaccatcacgattatcgtctccctttccattattgggggtaccacctgggccgccagatccctccaccttttgggcgtgttctttgaatgattcgtccccctttttgcacatgctctgtagttgcatcctatctagaaccatatcaaaattgtactgatactgcctaacaaaggcaaccattaagtccttccaagaatggactcggga

SEQ ID NO: 116327 - DNA, 420 bp, Glycine max
  unsure (1)..(420): unsure at all n locations
agcttangagagaatagagccaactntgaacaactatttctggtcctcaagatggatggcagaaaggtggatataaagggagaacccgaacttttaaagaaagacgcctcacttaaatatatgttgaaagctttgcatcanggagaagggttccttatcgactatcaccacattcaaacagagatagaatggaaggatacaattctgccagaaaataaaatgtgctacatgattcccctccattnntgaacctccaaaggacttctccgcaatggcttcagaccatgccatcacctcanagaggagcccaataccaatatcagaccatcaggtatcctactatcganacagaaatgaaaaatggtgctgaatgtagaacangatcattcatcgtcacgagtcctattcagtctgtctact

SEQ ID NO: 116328 - DNA, 262 bp, Glycine max
tccatcaagtaagcttgcttgtgaggcttctatggaggctggatctttgagcttcaatgaggtcctttaatggtgattttccaccatgaagatgtagcagaagacaaaggagaagaggtgagaggaggcgtcatccactagggaataagccatggaagaaggagcttcaccaccaagatgagccttggataagaagcttggaaggatgcttcaatggaggaaaagaaagagggagagaaagagagaggggggagcacgaaat

SEQ ID NO: 116329 - DNA, 364 bp, Glycine max
  unsure (1)..(364): unsure at all n locations
agcttcaagaattatggcctcatcattctacttgttttccgaaggaaattctataaatagacctcccatctttaatggagtgggttaccactactggaanacccgcatgcaaatctttatagaggcaatagatttaaatatttgggaagccatagaacaaggaccttatgttccctctataatagccagaagtgcaacaatataaaaacctatagtagaatggactgaggaagaaagaagattntacaatataatttaaaggcccaaaatattattacatctgccttangaatagatgaaaactttanggtntgaaattgtanaagtgctaaggatatgtgggatactctacaagtaacacatg

SEQ ID NO: 116330 - DNA, 258 bp, Glycine max
tatttgggtgtattacttagctttttgaattaatacttaattaagcccatttacttattttcatgttattttcgttcttaattttgggggcataagatcatgtcttttttcttagaagtggatggtccaatatgatatatttggacaatcgaaaatacccattgtttttatgataaaaaagatataaattattgatgaactaatggtttaccttaagtgaaacaatggtataagcacctatggtaacatatatatact

SEQ ID NO: 116331 - DNA, 401 bp, Glycine max
  unsure (1)..(401): unsure at all n locations
gtcacctgcggcatgcaagcttcttatccaatgctcatcttagtggtgaagctccttcttccatggcttattccctagtggatggcgccgcctcttacctcttctcttttgtcttccgctgcatctcgagggtggaaaatcaccattaaaggacctcattgaagctcatagatccagccttcatagaagccncacaagcaagcttccatcaagggtatcagacacagaacttaagangtgctcttaaacctcattaattttttgcttaccttctcttccattggtgggtcttcatntttctccatgtatctcctcacatgtcttggtctaaatgttgtaacatgattctttagagttccaccgattaaacttgctatagaagctagattttgattttctat

SEQ ID NO: 116332 - DNA, 255 bp, Glycine max
taacccaattattctttcaaaaagtctctccaatcttcatgcccttaatagcatttgctagtagactcacacaatacctattgtgttcactatgaactttagaagcactaatctcttgattactcttctaacctttttcctctaacctaagagaatgtgcactacaccttttgggataacttctactgaggctcatcgtatcaaggtgtttacaaaatctcctatgaatttggctccatctagagtttttttgct

SEQ ID NO: 116333 - DNA, 447 bp, Glycine max
  unsure (1)..(447): unsure at all n locations
agcttctatntgataagcaaagaaaacacatgcaatcatttgtatcanacaaaaactattattcccatacanaaaaaaatatataacaaaagatggcagacaaaaagccattgtaaggatttctttaaataaaaaacattgacaaaatataatagtccaatgatctggctattattttgttttaaaaagttttcattttaaaataaatctgctactntattattaaaaaaacacactaacataaagcttgattcaaaagatttgccaaaccttatttctataaattcacatcttttttctaatgagaagcctactttttcggcaaaaagaaanaacatggatcacccacatttacatctcataaggaagaagtgaanaanaaatattcttgaaaggataaaatgatgtcatttntaaaaactcccanaatagttcatacttgacata

SEQ ID NO: 116334 - DNA, 255 bp, Glycine max
ttattgtgccctctcccctcggcggggatttcttcttctgcgaaggcgagataattgttggcagtgatattattgaccagccctccgaaaccttctaccgagatgtcttgggccacatgggcctcgttcagaagttttattagcagagcccgatgaggctcggagctcatgagtaactccaacagcgagaccctggccggagttttgttgagctgtttgataaccttgaattcgctctgctgaattatacggagg

SEQ ID NO: 116335 - DNA, 231 bp, Glycine max
  unsure (1)..(231): unsure at all n locations
agcttatggaagatctgngacctagccatggcagatgtctncacatatgccattgactccctcacccaatattatgaccagccgaggaggtgcttcaccttggtggacgtccaattatcacccacagtggaagagttagaagaaatcctgcgatgccctatgggaggaaggaaaccatacctcttctcgggactctatccctctttagctagaatcccaagatagtccaaa

SEQ ID NO: 116336 - DNA, 265 bp, Glycine max
ttggggtctgagaaatatataacagcaccaaggctctagcttaggccctctgtattctctctgtcctatatgcgatatgagtaatagacttttcttctttcagacattattttcgctctgcaatatcagcttttacttttcggttcagcaggaaaattccattctctattgactaatgcaaggctagactccccaagaccgaattttaccctagaaatggctctttgttcactttggacatttgattgtctctctagcacagccc

SEQ ID NO: 116337 - DNA, 426 bp, Glycine max
  unsure (1)..(426): unsure at all n locations
agtcacctgcngcatgcaagcttgaacgtatgtaagacacatcttcttcaaccttggtgattcttgactccatttcattaaagcacatatccatttgtagttccaaagtgtcaaacctttcaccaacaaaggtttgaagaccatcaaacctgtccaaaatctttgaaagaagagatgaatcttctccatcatgtccttcttcaccaacatgtcgagcacccttcttcacccaagatccatcatgctctntntgataaccaaaggatgctatgactgaagcgcctataaggaaagatctcttgattggaagatagggttcanaatcaagagggatgttaaagtgttgaaggaaaagggtaacaagatganggataggcaatggagcattcaatcgcaatgccttatgcatgcgatatctaacaagat

SEQ ID NO: 116338 - DNA, 265 bp, Glycine max
ttagcttctctaggaatcttctcaagaaagcttctcaaggaggtgagcttagttattagaggggtgtgtgtagttaagtctaacttctcaaggaagcttctcaaagaagcttctcaaggaagtttcttaaagaagcttctcaagaaattttctcaaggaagctacctaggctataaatagaagcatgtgtaacacttgttgcaactttgatgaatgagaatcttgtgagacacacttcaaagttcaacttctctccctcttttcc

SEQ ID NO: 116339 - DNA, 515 bp, Glycine max
  unsure (1)..(515): unsure at all n locations
cacctgcggcatgcagcttcattaactggtcatacatatgcaccaatgcgacagctccctatgcatagctcccactctcacccaggtctcanaaagcctattaatgcactacattaacatgtgttgcactcttgatagcaaaaagactgcaaccaaccaagtggaggagataagcacgagctgctacaatccaccgtccggcctcgcatctcctcaaatagatatcccctagccacgacaggcgtacatatgccccatgcactcgtgcagtctcagctttatgcctctcacccaagacctcaagcaacttcaccaacaagacgaccgcctcgtccataagtagaggctcgaagctctggaaggcgcctgtgatcggcagatggaggagtgacaccacatcatccagtgtgattgtaacctcttctaacggaagatcgaaggtgctagtctncctatgctacctctccacgaaagcggatataactccaggatcgccggtgactactgaacacccg

SEQ ID NO: 116340 - DNA, 263 bp, Glycine max
ttggagttatcatcacaagatgctttgttggcacaaaatatgtttttttctaagcaacttgagatcttaatagaaacacttattaagttgccaactaaactgtctaccggtcaacctccacattcttctattttgcaggttataggttacagattgtaccatttgtggtgaggctcatgaatcacgtcattgcattcccattgaagagcacactcaggaatttcattacatgggaaatcaacaaaggcaaggatacaaccaag

SEQ ID NO: 116341 - DNA, 493 bp, Glycine max
  unsure (1)..(493): unsure at all n locations
agcttgccacccagctcgcccaggcgagctaggttgcttcctccagaatcatccgcctcctggaggagaattntctagaggcccaagtgggcctggttgctatttgcacccncatttttactaaatacaccccattgctctttgttggtatttttttccgtaacgttacgaaactttacgacattcgtaacgatgcttgttttcttccgtaatgttacaaaaccttacggattacgtaaccatccattctttgccttccagaatggtacggaactttgcggattggcactaacacttccttttaattttcaacatgtcgcgaaactccacggattgtgctacaatttgtgtttgctttatgctcaatatctcgaataacacaattcaagagagcttaagaagtatttgattcacaaatccagccacaactctgcaccacaactcaacttcatcataggcatcatgtaggaaactntgaaaaaaaaaaaaagtc

SEQ ID NO: 116342 - DNA, 277 bp, Glycine max
  unsure (1)..(277): unsure at all n locations
gacactatnataatactcaatctcgtatttaaaaagttttaaaaatacttagaattgatatttgaatttttattcctttattaatatatatgtgaggggtagagggtgtcacaacatacatgttactttcatgcctaatgttcacactccccaggtcttcaaccaacaaaagtcaaataaatacaacaatttcattcatcacaataaatacatataacgcatcccattctccaaaaacatagattttcctgaaaatcgggatgcatatcaaggacag

SEQ ID NO: 116343 - DNA, 476 bp, Glycine max
  unsure (1)..(476): unsure at all n locations
gatcctcatagtcacctgaggctgcagctgggcctagctactcaccgtctttttggtttatttctagctatcttatactgatgccatgnttcagatattctacacctataccactccttgaaacactcttattactttacttgctctgacattntcatccaccaccacgatcttacccctatgtccacaaactttagattcacccaacgtctctttagccactttaataatctcttgggacatcttggtccacatatcattggcactttcttgtgattgtccacaccaaccctaccatatcttatgttggaagaatacgttgttctcacccttcaagtgccaccatttgatccttggtgctaccataggacttcttctctttgcctatctctattctacatccataccaaactctatgtgggtagcaagctctctcccggatactttcagttcagcaaaccttctatcgacttctg

SEQ ID NO: 116344 - DNA, 258 bp, Glycine max
tcttgacgctgttgaccaagccgtcgaccagacgctgtttctttttcgccaccacgcgccggtcgcaacacggccgcggactcaccgagatccgcctcccgccttcttccatatctcagcgagcgaaggagacctccgccgccggcactctacgccgcaccgagcgcgggaaaagcctaaatccggcgagaattttaccgcgaaaaacggggaatttagggttcggacagcgctggtcgcaaagtgcttactctgact

SEQ ID NO: 116345 - DNA, 452 bp, Glycine max
  unsure (1)..(452): unsure at all n locations
agcttgccaactgtgcagaagagagcatgcattctcatatagtnaatctctagaggggcggaagggttcattgacaaagcttctagaataattcagtcactatatttcagctgtgaagatgcaagtacgagccaagaaggctctcgtcgatagcctagccacatatgcttcgtcgacagctccgatcggatagagcaaatgtaatcacaataatattgcggacttcactactatatatggtcatatctatctcaactgaactttaatgtctttctatactatacacattggttatgttctatcataattgacattatgccttcttcacattcaccataatagatgcattaaactggagtgatatttgatgatataaantccttgacctatgattaacgaaccgtgtacttgtgatgccaagtagagaacactattatttttatattatgtcc

SEQ ID NO: 116346 - DNA, 259 bp, Glycine max
tgtgcatccaataccctgatgaggatgtcccctatgttcttaaaactggactgactcatttgcttccaaaggttcatggccttgcaggtgaagacccgcacaaacatttgaaaaaatttcacattgtctgctccaccatgaaacccccagatgttcaagaagatcacatatttctgaaggcttttactcattcattaaagggagtggcaaaagactggctgtattaccttgctccaaggtgcatcacaagctgggatga

SEQ ID NO: 116347 - DNA, 420 bp, Glycine max
  unsure (1)..(420): unsure at all n locations
agctntacanatctgttntaaatccaagtccataaatattatanaatctagataagataagataagatangatctagatgaaataatatctagatgagatcaaatctaaataatatcaagataagataaaatttggtagaataaaatagtctgctctcttcaagtccaagcccaattctagattcaagcccaagcccaattctgggatcaagcccaattgcttataattctcctgaaataaattaaaaacaaaattaatccagtatgctcaaatgataaaactggcataattaattgacaattaaggctaatcagtaattaaaatgatgacacatcanatcccctcacacttagccttttgcactcctgggcanaaaaaaaaaaacaaagcaggggacanattcagagacattaaagaga

SEQ ID NO: 116348 - DNA, 262 bp, Glycine max
ccacaatatccaaacaattcaatttcatttgtcatgaaactaccctaaaccaagaaaaacagagtagaggtagaaaactctgcacaaaactcattcaaattccacaatttttcctactcacataccccaataacattctttttgttctgattcgttaaccattggatcaccttgaaaatttaaccgagggttcctaatacagaaatctaagttttgaccgttgggatctgctagaaaatatctagaacccgagatgtacaac

SEQ ID NO: 116349 - DNA, 410 bp, Glycine max
  unsure (1)..(410): unsure at all n locations
agtcacctgccgcatgcaagctnttccattcctaaatntaatcttggtagtngtcataccctagtttcctccggngatgatcatttgctaaagttntgattcttgccagccaaattgagctgcttaacaacagttgtcacacaatccgtaaggtttttcgatgctttggaagagaatgcagaanatacccaaaagggaaggcaaaatggtcatttggtgactttnttaggcccctggctcgcccgggctagcctttggctcgcatgggccaccagaaagcttanggatgaagtaactagctcgcttgggcgagctgctgtgcaacctccagccctcatttcctataaatangcgtgagggggtagaggtaaggggttcaacatcctatattgagaaggatttagtgaaat

SEQ ID NO: 116350 - DNA, 277 bp, Glycine max
tataaaaaacacccttcctcgggccattcctgcgaagcaaacatttggaaagttatttttagtgggacattactcttaaagcaaaaatggcatataacctcctcccataaatacaaacatcaatgtaaatttagagcaagcttatgcgcctatttccttacaaacgttctcttgcacaagacatttaaccgaaaaaatgcacccatatacaatcaaggcagcttcgttacctagattatttacacgtacctccaaggcgtatttgttacttacatca

SEQ ID NO: 116351 - DNA, 423 bp, Glycine max
  unsure (1)..(423): unsure at all n locations
atcctctaagtcacctgaggctgcagcttatgatgtgaatcaagtgtttctgtngtttgatgatgacaaagatgatgacacanagcccaaagaatgatttcaagaattgagtcaacacgttcaagatcaagattaatttcaagtttcaagagaagaaatcaagaagacttcacacgggaagcattgaaaagatttttcacaaaacaaacatagcacaatttttntgttcagaagagtttttctcacaatttctcaagtaccagagttttactctctggtatcattaccaatttcttgtatcgataccagtacacagtttattcaaaactcttactaatttgcncgttccattgttttaatgtgtatcaatacatttttgggttgctccaagtttgacgtgaattaactcttgggaagctcctt

SEQ ID NO: 116352 - DNA, 257 bp, Glycine max
ttaacttaatatataggtgccctatatataaaaatataataatcacgtacagttagccttctacgtcgttgtccaatcttaaaatcatttcaaaaccagaccttcgaagtctaaactcgcatgttaccgtagtttacgtgagttgcaatcagaaaggaaaatggtgaatattatactccaaaacactattattttatggtcactttttaggtatacaaaaattatgtttaaaatgcatgttataatacaaatggagg

SEQ ID NO: 116353 - DNA, 242 bp, Glycine max
tgaactagaccgatccacttgccagcataggagccggttttaatactgattattcacgagtaacactttgactcgaagcttgaccatgtttgtgaatagcttgattacagcgatgataatctattgagaacctgtgcaaaaaattgaggatgttgtcaccctataaaatgtgggagagggcgttaaaattcctaggacatgacataagagatggacaagttagattgctccaacgaactaat

SEQ ID NO: 116354 - DNA, 307 bp, Glycine max
  unsure (1)..(307): unsure at all n locations
agcctgagatgaggaagtgtagaatggtgaaacttcctgtctttactcgttgaccacagagtggtacctggagatatgtcgcgggggtcatgagaaccttgggacgtcangtggngtgctattgtccaaaaccaagcttgaccaatcccgacccaacccgggcatagtcagtcagtgagaacctgtgatgtacctaaacaggcgagctcctggcagtcaacagataaaaggaacaaagaccacannagcaggaggcttgtggtggctggcaactgtgaactttgattgatatgtgggttatggcctc

SEQ ID NO: 116355 - DNA, 262 bp, Glycine max
aaactcaaatttgtggcacttttccgcagtcaagggatttttttgatgccccccaagaaagttggagcatatggataatataaccattatgaacaaaaatggacgaaaagaaggaatgaaggtggttcttgacccaaccgacttgatggtcttaaactccccatttcttctttgtcaggaaaaaacgaacttgcagcctacggggggtgggatacgatgcatatagtacgctttgttatgcagcatcttttaggaggaccaa

SEQ ID NO: 116356 - DNA, 409 bp, Glycine max
  unsure (1)..(409): unsure at all n locations
agctntgctgatttagttntcaccgactaaaggatcaaagtaggtatgaaaagaggcaaatttaatcatcttgcttggacgaatgagaaaactggggaaatgaagagggtgagaatgagggagaaacccatgctgtgaatgccattcctatacagccaagtttcccaccaacccaacaatttcattactcagccaataacaaaccttctccttacccaccacccagttatccacaaaggccatccctaaatcaaccacaaagcctgtctaccgcacttccaatgacgaacaccacctttagcacaaaccaaaacaccaaccaagaaatgaattttgcagcgaaaaagcctgtagaattcaccccaattccggtgtcctgtgctgacttgctcccatatctacttgataa

SEQ ID NO: 116357 - DNA, 407 bp, Glycine max
  unsure (1)..(407): unsure at all n locations
tactcacgcttgtccacaaaaataggtttttgaagtttgtcatttcaatttctcactatgtaaaatggatcattttcaaggtccaacgccttaaaatgatcacttcttaagtaaaaaagaatcacttgataagaaagaactacgtaggtctgattttctcatcccaattgaggaatacgtaggagcaaagggaaacacccttgtcgaccacaaaaagagaaaaaatataaaaagggtataaaggatataaagacataaaaagggaacataaaaaatcaaagtcacgtttgcacattcgattaaaggttgccgtcccttgggacggacgtgtggggtgctaatatccttcccgtgcgtaaatacaactnccgaacctttcacttaaaagtcgtagatcgcgtcttttc

SEQ ID NO: 116358 - DNA, 295 bp, Glycine max
  unsure (1)..(295): unsure at all n locations
agctttgagctcaagtaccaactcaccatattctttttcttcaaaggaacaccagggaattggttaaagatgtaaggcgacaaggacaaatattcctatcgaagagtgggagaaagcganaaaaacgaaaagaacgaaagttccccatcctggagtgggatatcgcaaagctgataagacggacaattcccatatcaaagagtccgaagaagaaacgaaaggaaagaaaattcccgctcaatgatcgagagaatacagaagaaatatgcctcttggtcttttaaacgctaccaca

SEQ ID NO: 116359 - DNA, 316 bp, Glycine max
  unsure (1)..(316): unsure at all n locations
tatgctgcanacatgtataatggacctacttagcagttttatttacttctgtcgaataattatcacctatcaagcaatagatacaatccangctggaggaatcatccgaatctgagatggacaagtnctccacaacaacaacacctgtccctactttgtcgaatgttgttggcccaaaccagccttatgtttctgcttgcatacaacaggcgtcacaacaaaaacaagaagcaactgaggcttcttctgaagcttgcttattagagttagcgatgcaaatgaccatccataatatgcaatttcagcaagagacaag

SEQ ID NO: 116360 - DNA, 399 bp, Glycine max
  unsure (1)..(399): unsure at all n locations
gtttaaagttttgattcgttactacttctctgtattgantaaaacagagaatggtttgctttgaagtaacttttctaacttagaaacttttcttctcactaaccatgatgatgcatgatgcaatatagatatcaaatgtactaatatgccacaaccaagataacaaccaatacaaatgtcactcaagggagtcgggcatgtaaaagccaaaaattcttcaagcttttccttgagcttcaagctatagcctttaggttgttcaccatgttgatcatgttgcttcccctatctctaacaatgttaagcaacatcgtagtttaaggttaaacttcctatccccttttttctccataacctaattacacaaatattttaaattctagaaaacaaaatttcaat

SEQ ID NO: 116361 - DNA, 440 bp, Glycine max
  unsure (1)..(440): unsure at all n locations
gacactctcaatactcacgctntagaatatatagaaaccttattatatccactattagtatgcaaaaccttgctaactagctcctcctaacaatgtttttcttttaatatatggntttggattgatgtataaacttaatttggattaatttgtttttggtgcaggtaatgaggtttgtgagaagctggctgtggtaggtttcaacacaaacatgattagctacttgacaacacagcttcacatgccattgaccaaagcagctaacaccctcactaactntggtggaactgcaagcttgacaccattgcttggtgctttcattgctgattcttatgccggaaagttctggactgtcacccttgctttcattatataccagatagtaaagaccctcccctaactctttcttgtgttgaagtgaattgagaaagtattataca

SEQ ID NO: 116362 - DNA, 397 bp, Glycine max
  unsure (1)..(397): unsure at all n locations
cctcacagaggtgcaggaaggacaatgcggccgatttaactagttccgccccggagtacgacggtgaccgctttatgagcgttgtacaccancagcgcttcgaagccatcaagggatggtcgtttctccgggagcgacgcgtccagctcatggacgacgagtatactgatttccacgaggaaatanggcgccggcggtgggcaccactggttactcccatggccaagtttgatccaaaaatagtccttgagttttataccaatgcttggccaacagaagagggcgtgcgtgacatgagatcctgggttaggggtcagtggatcccgttcgatgccgacgctatcagccagctcctgggatatccgatggtattggaagagggccaagaatgcgagta

SEQ ID NO: 116363 - DNA, 293 bp, Glycine max
acgcaccccacaacataggaaagggggggggggaaagacaacgctgggcgaaaagaggggctgaaactacatggaggcaagaaggaaccgcgcacgaaagagcctgggggaaaaccaccacgcggaaaaacacgcgcgaccagaaaggcccgcaacttctggaaaggaagaccaaaaaagggcgaggcgaaaaaccggcagaaaaagacccacgacggtgcacgccgagcaaaaaagagaacccccacacggggaaagagaaaaggacggcgggcggccaaccaggaaaagaa

SEQ ID NO: 116364 - DNA, 315 bp, Glycine max
gacatgtacgagatttgcaacaggaaggcaatatagttgaaaaaacacggcataaacaacgacaactgagacttatttgagtccacaactgagtaatatgcatcaaactacgcgattaaatatattcggctgcaccggttatatgcaggtaaatgactaaattatttaatagtgaacaaaaacatacttattgaactatcaatttcgccatttacagggcaattggggttatgttcaaatataatagtgcgggtaatagaaaaattatgcacaaccctggctggatatagaccattcatgtcactttattacttt

SEQ ID NO: 116365 - DNA, 404 bp, Glycine max
tggtcatcattatggcctgacgttaagaatctagaatttggttcctttagaatctgctcagcaacctcttctgatgattcccattcctctttataaccattgctcttttgcattgaattatgatgtgaaccaccatctgtttcacttttagtgctcaaagacccttgacctagagaagttgacttgttaaagtcaggaggttttgatggctcgagtcctaataatccaccattagtccagaacctaactgaatgatcagccaaagactctctatgagtctcttcagatttgcagatattgttgttgatcttacctgcttcctcatctggtaaattagagtttttggaaccagaaaatgatatatcagtctcaattggtgctgacactgtatcattaacagtaga

SEQ ID NO: 116366 - DNA, 402 bp, Glycine max
agcttttagcttgcaagtccaattgatttgttttcgaccaatgcctagagtttatttaaaaaatgtttttggatgtaacacctataaaagaacattttcgaaaaaaaaatttatgatgagaagaagttcgtattgaagttgggattagaggctaagaggattgattgttgggtggatggttgcatgttgtaatgatggagcgctaactaaatgcaagtttcgtaacaagcccaagtatcgtgcgaagactattggaacaatcattaaaaaaccagttccagtaaaggcaatgttctattttcttgtaataccaaggttgcagaaaatatttgcattgatgcaaattgcaagccaaaagacatgacactatgagaatagaagatattctgccatgttacgtta

SEQ ID NO: 116367 - DNA, 408 bp, Glycine max
  unsure (1)..(408): unsure at all n locations
ntactatacactcacacacaacacagaattctatgatttaaaacatataactactaaacttaaatttatacatgcacaaatgacacaacacggaatttcctctatcagtatgagttgtaatttttcagagtgttacaactccaacttattttaattattctagatcatataattagacactttaattagtcaccaactagttaaactaaaattctatttttaaactagttatatagtcatttacgaaaatgtcctccacttgaaactcttatgacttaattaccccttttctagttctatggaatctaaatcaccattaataaaccttaattatccctacttaatttctaacttacattaattactaattttctttcaagtttctaatttctatttctagaccaaaat

SEQ ID NO: 116368 - DNA, 305 bp, Glycine max
gttggagcttaattgaaatttgtgtaaaaaaaagcaacgggagggggagggatataaagcttcttcaaatatgggggtgagggaaggaagaaaaacttttttttggtgttaaaaaaaaatttttcgaattttattattttatttaaagctatgccacaatgtttgcatttgagtggagcaaaaggggccactttctcttttgattgggactcatactcaaccacaaaaagtgagaaaaaactgacctttgagatgctaaaatcctgccttggtttgcgtgccgtttctctgattccaattcctcg

SEQ ID NO: 116369 - DNA, 417 bp, Glycine max
  unsure (1)..(417): unsure at all n locations
cagcttgaaaagtgctattattacaccttctctcttagccatttatctagcttagcgagcgtctgctgagcgcaacactcatgggctaagcacgatgaagactctgagagaagatgagttgtacacgttcgctgagcgcaccacttcatctcactaagcgcattgctttagtccatctgctaagccgtgcataattgcgctaagcgcaagagcacaaacaacgccacctatttaagcctgaaatcagattttagagagcgagtgtggactatgattcagagctatgcatgtctaaagatgctagagagagaaaggtccaagttccaaagagttgtgagagattttgttgtgagaagatttgcagagactanggcttgaagtnagagtcggttcgagaacatgagatgagtttgtgag

SEQ ID NO: 116370 - DNA, 397 bp, Glycine max
  unsure (1)..(397): unsure at all n locations
agcttatagtatttataggccttcttcttctttaagngnctgttggctaaacgagtagaaatattcacctgagctcacatttgaagattgtggttgttggagaatttaatgcttgcattaagtgcacgtccttcttcatgtaagaaaactactctctttagcttccttgaagaacacttcaacaggaaaccacttatttttcatcaaagcatgtttgtcatagtaaggggtgtcttttgatgcttatttgaaactccaaagtgttgagattcatttattcttcatgggattcaaaaaatcctaggagaatatcttgtaatatggttcttgcaaaacaaatcttaacagagtattaaatgaagtcttaaatgttggatcagatcatggaatatatctg

SEQ ID NO: 116371 - DNA, 405 bp, Glycine max
  unsure (1)..(405): unsure at all n locations
tcttttttggaaaantccttcccgggtttgtgntttggttcgnattaaaggtggtgtttggcctcggatgtgcaaaaggcangttttatggctgattaaggggcggcctttatggatgattgggtgttcttggctggcagggtggtgggtaatgagaaggactaatattggttgagtattgatattgttgagctagtaggaaatttggccatgtagggatgatagtcacaacatgggtttctccctctttcttattctctctattttccccaagcttcctattcaccaaaacaacattatcaaatttgcctcttcttagacccacttcggtactctcgcctgcaaacactaaatctgcaaagcttgaaggcaggtaacccaccatcttcttatagtagaacactg

SEQ ID NO: 116372 - DNA, 66 bp, Glycine max
  unsure (1)..(66): unsure at all n locations
agcttgagtatgatataangtttctctttataacttgtgccgtaacatgtgacatagggtgcttct

SEQ ID NO: 116373 - DNA, 252 bp, Glycine max
ttcctacgacagattattgttcctcggatgtccgaatgaagtccgtaatatatcgagacgctcgaaattgaaaacggaagctcgctctagagtatacaactatcatttttactcggatgttcgatggagttccgtatatatcgagacgcgtgaaatcgtaacagaagctctgagcaaatgtcaacgacaataactcttttttcgaaagtccgatggagtcccgtaatatatcgagactcttctaatggataa

SEQ ID NO: 116374 - DNA, 410 bp, Glycine max
  unsure (1)..(410): unsure at all n locations
cctgaggcatgcaagctnnattgggcatcgacaagactggtctagtcttttgttctgtcacggcaagactttcaggtatgtgttgtctattatgataacgacgtatcatacatgcgtagattattttatatgcgcaaacaagtttagtccatatcgcaacaattaattaatggttaacgattcattaatgtgcaacaaaatacatttgacaatgaagcagccataatactgaatggtcggtcttcttttaggtccacatattctcttttaattggcattaggctcatgtatttccgtatcctaccacattatgcagtttggccattgctttccttgaggaagattaatgttttgccacacacaatgctacgagtgggtaaggacaatggttttttaaaataaactttttt

SEQ ID NO: 116375 - DNA, 437 bp, Glycine max
  unsure (1)..(437): unsure at all n locations
gacactacactaatactcacgcttcagaccaaagcaacataaaatctaggtatccaaaactcctcaatttattggatnttcaaggcttgagaagtgaaattgagaatgatggtaatttggaacaaactctcacctcacacaaatttataacatcaatctaaactttgctcaactggaattacacctaaaattccaccgaatcaaaaattgactcctcaacacccaattttaccctatagatggctcttggttcactttggtcatttgtttttctctcttgcacagcccaagcttcctcataagtcctaaatgacatttcaaactatgattaactcactttaacctccaaataccactaaatccagaattggcctttcaactctcaaaaactcactctntttccactcataacaccataattctactttctaacccta

SEQ ID NO: 116376 - DNA, 406 bp, Glycine max
  unsure (1)..(406): unsure at all n locations
agcttncatcactctctctcttccttcttctttcctttgccatttatctntgaagaagcaaaggaatccattgatgaagaagatcctaggcctacaagctccaatggagcttgcatcactcgccatgacgatagagtgggcggtaagggttcaaaaggattgcatgttatcactccaagtctaaaagatttgttacaagctcacttgtatgtgttgaacaacagtaatgaagctttgccatacatacttcagcatgaaggtttagtcaaacaaagtcaaccaaaaatgtcaaagaactgggtcttgaaaatgcataacaagactttctctgattggtttaaagatacaatcattggtgatgaaaatgcttctgaaacattaagaaagcaagctgatgggcctaaaa

SEQ ID NO: 116377 - DNA, 420 bp, Glycine max
actcaagctagcttctacatcaaatactaccttaagtccttgatgtgtgtcgatttgttgttagacttaatgaccatgtcatctatgtaaacctctagatttcaactcagttgtgctctgaatatcttatccatcaactgttgataggtagctctggctttttttagtttgaatggcataactttgtaacaatagtttgccgatttgattatgaaaattgttttgacttcatttgtcgggctcatcaagaaaacttgacatcttatgtcctgtcgccccatctatgagttggtcgatgttggggagggggtatgcatcttttgggtaggcacgattcaagtcggtataatttacgcacatcctccacttaccatttgatttctttaccatgactacatttgataaccacgtggaatagtc

SEQ ID NO: 116378 - DNA, 413 bp, Glycine max
  unsure (1)..(413): unsure at all n locations
agccccgcggctgaactttgcgagcgcttttttttttatttcncacaacaaagccgccgtatgtctatctattatgaatcctttaatccctgaaggtacaaccttctaatttggtgcatctggtccccttctttgtttttctgcggagaaagaataatctactatccaaactcatttcaggctgaaattgctatcgttattattactcgaaccataacgaattacaactaaacaagtctctcttattcaaatggaaatggttgttgttccaccaacatcatcagctttggaacaggattttggtctcctaatacacaagttggaggggattatatcaagggcctaaaaagcactatttttctacgtggtgggatgacctaagagccctcattcaccaccagagtatgaatcct

SEQ ID NO: 116379 - DNA, 409 bp, Glycine max
  unsure (1)..(409): unsure at all n locations
tggtttgaggtactgtacccgncgaagatctattaactatgaagaacgaangaagagcggcgaagaacggttgaaacctttgcgaaattcttcacggaaaacgttacggaaacgtttcggaagcgcctcggcttaaattatcttcacggaaacaatttttccaagcaaattctaaagagagagaagtgcctaaggggctgaacccttttcttcttcacttcctcccctatttatagcaaaataggggaggtggttgccgaccagctcgcccaggcgagccaggttgcttcctccagaagcaacagccttctggaggaatattctggagggcccaagtgggcctgagtgctatttgcacccccatttttactaagtacacccccctcttgcttttttggggaatcttttt

SEQ ID NO: 116380 - DNA, 365 bp, Glycine max
  unsure (1)..(365): unsure at all n locations
tatcgtcattgaggacacaatcagtggttgagacaatgttctgttttcttcaacagacggntctgtgatttgattatccatatcgcatatcactctcattaactttctctcttgaaatacaattttccacaggtgaaaaagaaaactttaatcgattactttgaggatctaatcgattacattcgctttcgagcagttttcactttctgggaataacacattaatcaattaaagataatctaatcgattacttcattgaattaattgattaaattgtagacttaatcgattacatgcgcgtataattgttttctatataaatagccaccttgggttctcatttctatgaacaagaacaacttctg

SEQ ID NO: 116381 - DNA, 373 bp, Glycine max
  unsure (1)..(373): unsure at all n locations
gcaggctgcagcttgatacctaatgaaattatttcttttatgacncccgcgctgagaacctcaatgttattgacattccaaacttctctgttgatggtgtgttgtctgacttccccctaacaccatctgaggctatagggaagcagtctttctcctttatggtagaatggccttccacaaatatgatgcatttgaactgatcaaatcttgtttactattatcatttttgcttctaccgagagattgtatttgttcatttaatgaagttcatgaagctatacatcctgcttactgctggccttgtttattttgagtacaaaccattcatcgctatccttggtaaggaagtaacaaatattgtataatgctccaa

SEQ ID NO: 116382 - DNA, 404 bp, Glycine max
  unsure (1)..(404): unsure at all n locations
tatatttatttatcatgtctttctaaattcgtataattttttagacaataatnaaatataaatatcatacatgcatggatatatacgaattgttacaacttaatcaataattttaagcatggatatatacgaattgttacaacttaatcaataattttaaatttgagtcttgaatatgtaactttgaaatatttagagaaatttttttatcattaataataattttatatgacttgattaacattgtatcccataaaaataactgtaatttataaaaaaaattataccaaataaactattttatctttaaaaaaatacaaaacacttatcatattggtgatgtgcatgaaacttctaaccgntaataaagaattgcatcaataaattaatatttgcaagttaaa

SEQ ID NO: 116383 - DNA, 309 bp, Glycine max
  unsure (1)..(309): unsure at all n locations
acaacaaaacattaaaataaatggaacccaaacacgaaaaacaatgaacggaggaaagaccgcaccgacccanaaaaagatgggaaaagacgaaaacaccacccctaagacaaatataaaaatatgtactgggcaagaaaaaatggcgaaaaataaatcgaaacacaaaaacagaaaaaaggtatgaatcatatacacaccaaaggggcaacaatgcatgcgacgaaaaaaagccccacaacaaaacctcaaaaccaggaaccgatgcacaaagaaaacacgaaacaacgccaataactcaagaaaaaa

SEQ ID NO: 116384 - DNA, 367 bp, Glycine max
atgcgcccaacagaatttgataagttcttaaactcatcacgcgagcgccaaaacgccctgatgtggatccaagcgctctgatcattcatttacctatcacatgtcttgtggcatactcaccactgtttgtttctttatggaactcaccataactaaaaaagcgcaaaggctcccctataacactcgatccacaaagatggataactaatatggagtgccagaatagatgaaggccgacctatctgccttaaaacatcaaatgctttctatcacgaaggccatgctaaagcttcaaaaaactatagaagataatgctacggcgaccgctttcaatacatctagggaagcggaaccggtgctacaccct

SEQ ID NO: 116385 - DNA, 376 bp, Glycine max
agctttgactcgagtcatcaagatattattaatatgcgcccatggcatgagtttcataaatcatccttcaacatctttatcactatcaatcatctttgaatcatctatctttcaatcttgtgtaacatcatctctcaaacatctttcaatgaatctttcaatattcttctatagaatttttggattcatttctcttcatctttctaaaagttttttatcaacactttctcttccaagaaaagttctttgttaaaaaacttgcgtgattcatctttttcattctcttctccctttgccaaaagaacgaaagactaaccgcctgaattctttgggactctcttctcccttacaaagattccacggctaccgcctgaaa

SEQ ID NO: 116386 - DNA, 395 bp, Glycine max
  unsure (1)..(395): unsure at all n locations
tcttgcatagccgctcttggtgctcagattatcccaataacaaatccctcttattactagctattttgaattctttagttcctgaatgtacaaccttcaaattggtgcttgttcccctctttcttttctgcaaaaaagaaaatcaaattntgtgaaaacatggatgaagtcctaagaaaatcaatatcaaagaaaacatggatgaaatcacaattaaaaagcataactacctatctttcagagtcctttggttaatttgtcttgtctccttatgtggtggggttntgtttaataatgttatacttttgccttccaaaanaaacttatcactaatcctctnttcattaatccaattttgtatgttattgtataaaagatcatgggttctccacctg

SEQ ID NO: 116387 - DNA, 348 bp, Glycine max
ttttaatattttttattgggaaatgcgccatgcggttggtatttttggaaaccggttttagattacagttatgataataattggaaacttatcatctatctcacttccatcatattgtcttctttatataaattaacacgtccttctccggtgacctcagatactactattgatgatttgtttcctcttcgaccctatttccgattctttctttcttatcacaccatttttttgtacttctcaatcgcagaagaatataatttctcctaataatcttattgcaacctttgacttgatgaaaaagttgcatgcaaactaatacaacccccgatactatggtgcgaatct

SEQ ID NO: 116388 - DNA, 330 bp, Glycine max
agttaggcctttcaccacaaagtaagatccacccggtattccatgtttctttactcaagaaggctctctccccttcagcgaatcctcaacctttaccacctatgttatcacatgagtcggagctgcaggtaacaccgactgctgtaaaagttatgcgtaacactgctgcatggattgtccaggttcttattcaatggactgacctcctagactttgaagccacttgggaaccagtagacaccatcatgcaccaatttccttcttttcaccctgaggacaaagtgactctttttttggtgggggggggggggcgcctcccacctctcactc

SEQ ID NO: 116389 - DNA, 391 bp, Glycine max
cggcatgcaagctatgaaaagtgtgtattttttatcttcttttctaacccaatctacgggcgtagcgagcatccgctaagctcaccacctattggccaaacacaaggaagaactctggaagaagatgaatagtacaggttgcctaaacgcaccgcgttcatctatataagcgcaccgcttcaagtcatccctgttagcgagaaaggcgcgccctcatccaaaattcatctatgtgcgctaagccaaaaatcactaatgtgcgccaagcggaacataaatgtcctaagcactccatcattaaaagggcacctttttatacctaaaatcaaatttttaaagaagagattggactgggattaaaactattggatgtcataggttatagagaaaa

SEQ ID NO: 116390 - DNA, 401 bp, Glycine max
gctcgagaggatgctcaattgatgatatgaaagagggatggaaagagggagggtttgagagatgggagagcatgatattgatggaagaaaaacggagagaagctgaactttgagttgtgtctcacaagactctcattcctcaaagttacaacaagtggtacacatgcttctatttatagactaggtagcttccttgaaaagctttcttacgaaaacttaattgagaagcttctttgagaaagcttccttgagaagctagagcttagctacacacacccatctaaaaacaaagctcacctccttgacaaaatacgtgaaaatacaaaaaaaaaaagtgcctacaacaaagactatctcaaaggccctgaaatacaaggcttataccctatactactacaatg

SEQ ID NO: 116391 - DNA, 395 bp, Glycine max
agcttaggaggattgatggggactcttttttataggaacgaggataatggctacgtgggagtacatgagctcagttggaggtgggcaacaggggatggtgggttatacgtgatttgtggatgtggagaatcgttttgcaccatcgcccgaccgccacctagtaccaaggggtgtaatcgattaccacgcttgaaaacgaggtcaggaagctaggaaggcttctggtaatcgattaccaagggagtgtaatcgattaccaagcttataaatgggactggaaaattgtggaggccttctgttatcgatttccactctgtgttattcgatacacagaggaatgtggtcactggtatccattatctaggttttgtaatctatacccaatgccttttttt

SEQ ID NO: 116392 - DNA, 404 bp, Glycine max
tctttaagaagattcctaaagaagctagagcttagctacacatacctctctaatagctaagctcacctccttgagatgagaagctagagcttagctacacaccccctataataactaagctcacccccatgacaaaaaaaacatgaaaatacaaaaaaaaaagtccttactacaaagactactcaaaatgccccgaaatacaaggctaaaaccctatactattagaatggccaaaatacaaggcccaaacgaagaaaaaacctattctaatatttacaaagataagcgggtcatgcttagcccatgggctcgaaatctaccctaaggctcatgagaaccttagggccttcccttggatctctagcccaatctacttggagtcttctacccaatgcccttgcggg

SEQ ID NO: 116393 - DNA, 324 bp, Glycine max
ggggctccaaccgactttaaatttgccttccttaacccttccactgactttatttattttaaaaaaacctaatgtgatttcacgaccatgccttcaacgtaggtgatgcaatcctaccccccaactccccaagggtattatatagaagactcccagaagtttgggctataaatgcaggagaaggccctatggttcttatgagccttatggtagattttgggcccatgggctaagtatgagcccacttatctttgtacatattagattaggatttcattatttttgggtcttggatttacggctccatagtgtagggagggtact

SEQ ID NO: 116394 - DNA, 418 bp, Glycine max
tgtagcagggttattattatggttaatggttggactatattgtgatatacactgcaagttgtctataacaatagtttttgtaagtataatataatattaatgtgatgatatgaagaataataataatctataaatgaattacaaattacaaattacaaatctgtattaagtattaccagtagtagctaaacgttgtctttttcgttcttgtaaaatagttttcctacgcttccttcgttcaacatatatgtccatgagtagttgatttctgcaacaactggcttataattgccaaacaacaggaaaataaaatgttgaaactgagttaaataagttgttgtagtaggcagactttaaaatgataccaacattatagttatttgcatttgcttcaccgagtaaagggatatgtatttgc

SEQ ID NO: 116395 - DNA, 416 bp, Glycine max
  unsure (1)..(416): unsure at all n locations
gacctgaggcatgccagctngctcttctgtaattgaatcttgtattatcttttgctcatgaactaactaagaactctggagctcgtcaagggagaatgtatcaacatttttggattcttcaatggaacacacaacatagttgtactttggtgccatgaaatgcaagatcttcttgactataacaacatcttccatcttttcaccatggaatcacattttatttgcaattgtcatggttcttgcaaaatagttggttaccgattcatcattcttcatgcgtaacatttcaaattcctttctcaaggcttgaagatgtgcatgctttgttctattaaagccttgatattttttcttcattgaatcccaactatctttggaagtttctttgtgaagaattggtttcaagatagaacgat

SEQ ID NO: 116396 - DNA, 416 bp, Glycine max
tattaaccacttcaataactttcttgaggagataatatttctcaagaagtaatataagtattagaaattaaagctaattccggtttcattaacagaacactatatggatcgatgtttccctgctccacagttgcaactctgagagcctgccaacattgcactgctggatgcagagaagaaccaaaattgcaggcaattcttagcatcctatacgtgaaatttgaaaccaaaccatgggtccaccaatattcaaatgtgccaatataatcatgataatcatcagtaacaacattaccaacctgatatcaatcagagaaaaatcaaatccattatagatatatcatagctaacaaaaaaactaggatgcaaaaattataaatatatcgtgcttattttcttggagatatacatatatg

SEQ ID NO: 116397 - DNA, 398 bp, Glycine max
  unsure (1)..(398): unsure at all n locations
tgcaagcttgagtntcctatgagttgcatttttatattcacctttctttccataatcgggaagaataacattaaagtcacaaagaatgacccaaggacgccattattataactatatatcttcataaagtcttaacccatatgtctaagacctggaatttggggtaatttactaatgtttttgaaaggaaatagtaatatattatttgacacacatttttcagcacacatttattattattattattattattattattattattattattattattattattattattattattattattattattatcacataatttaaaacaaattatactagcaacatggttttatttaaattatgctactagcatctcatgtatcacataagaacattgaata

SEQ ID NO: 116398 - DNA, 416 bp, Glycine max
tgcctaattaacctgaaatggagaggaaatgattatttaacacatattatggaagtactaagtatttattacctatctttaacaaaaattaattacaatactacaaaataaccataaattggaggagttttgatacaatttacataagttttatacacaaaagttagttgtattcatcgactaacactcgtccccttaagcgggagtccacttttggcgctaagcgcgacaattcgcgctcaacgcaattccctctcgggttggaattacgcttagtgggcttcatgaactacgcgagaggtcaaaagttgttattttgaaaatctcaacagtcaaaacgtggggcatgtgttaggaacctatagtccaaatttggagacgatccaacgattaacaaatcacggatcgcggtatta

SEQ ID NO: 116399 - DNA, 407 bp, Glycine max
  unsure (1)..(407): unsure at all n locations
agcttaggctaaattagtctaaaatttcttatgctatttaagctaagtctagtccaacaagagggatctgaggatgaagcttattttaagttagcctaaacctaggagggctatctaaattaagcctagtccaacaagagggatctgaggaaaaagcttggattgattcantctaactagggattgaggtttagtaatttaggctacaacatagaacacaaaagcatgattaattagagaaacatctttatatacatcagctggtttgttagaaagacccaacatctttacctactactgccaatcttacttacttgcacttttactatttttagcctaaacttaatttaattctattctaaatcatcaaaatatcaatgattctttcaacaatgccttatttatga

SEQ ID NO: 116400 - DNA, 422 bp, Glycine max
  unsure (1)..(422): unsure at all n locations
ctccgcttatagaaaaaattgctcatcatttcaatatgctgtgaattangatgcattaacaagaatcaagccaaggctattgtgcaagccatcaatggggcaaaacacgccaaatgattatgatgatggatggctcaaattctcacaaaaggtaactcatcactttcaaattgagctttcaaaactatcatgacatgtagaagagaatcaaggatttcaagtcacaaaatgtcaaaaacttttattttcaaaacaattacccatttcttgaacatatcctataattcaaagaaaaacatgcaaagtcgtacatgcacacaaaattgacccaaaatattaaactaacaatccgacgaaactaacaacattaacaaattaacaaaaccaacaaaactagcaaaaccaaagaacactcctccccc

SEQ ID NO: 116401 - DNA, 405 bp, Glycine max
  unsure (1)..(405): unsure at all n locations
catgcaagcttgactaggcgagttgattntagttttattttcactttagttatttagccgaggcaattaagaatgagaaatcccaaagagaaaacgtccgattgatttttcaatttattttactaaaagggattttttgattattatattattattttacctcttttttgatttccaacgtggttacggcacgaccgaacggtcggaattaattttaaccgaaattaacgaatactacaattcaaatgatcggtggaaatttattttatttttagattaggcgcgaaattacttaaataaatgacttaagcacgtcaaaagggggtataaaaagcgaatgaaaacgagaataaaaatacatgatacaaaatgtggaccaccacgggtacatagaatgaattgaaa

SEQ ID NO: 116402 - DNA, 405 bp, Glycine max
agctttgagccaaaatcctgtctcactattactttaccctcggaagcaaaaaaaggaaagaaggaaaggaaatttccaatcaaagagaaagcacaaaaggaaggaaaggaaattcccaatcaaagagtgggagaaagagaaaaaaagaaacgaaaggaaattcccaatcaaagagtgggagaaagaaataagaaaagaaagaaaattcccaaccaaagaatgggagaaagtaaaaaagaaggaaaccatgacctaaaagtggtcttctccctttgattaccaaccaaaatcctgtgcgctagcgacttttcgtcccgcactaaacaaaaacagaaaaggaaaaaagccaaccaaaaatcaaaagccaaaaacacacaaaagccaaataaaacccatcaaagaacc

SEQ ID NO: 116403 - DNA, 380 bp, Glycine max
  unsure (1)..(380): unsure at all n locations
ntggctgcgcacgagctccgatttcgtgagtatttattgaagatgacgcattgtaatcgattacaggtattggtaatcgattacaggcccaataagccttctggtaatcgattacaggatgttgtaatcgattacaagctgcctgttcatgtgtaatcgattacactgattggtaatcgattaccaaagcctatcctaggctagtttctaagagaatatctatatttatgctcaaatacatcctatatgtctaattttcactactaatacactaaattcaatcattcaattactatatacacaagaaattataaattctatcataaaaacaagaattcaaacaagatcaaccaaaataatctacaatcaaaaaggaaaaa

SEQ ID NO: 116404 - DNA, 405 bp, Glycine max
ctgcagcatgaagcttataaggaagctcttttttttttattaacatgtgaacgggtgggtaactcttatgaatgaaagtcctgcgagacacacttcaaagttcaaattctttccctatctttccttcattcccatgacacttttatttgtactctcgctgtctctctctcattattttcctccgtagaagcttcctttttaagcttcttatccaaggcactctcttggtggtgaagcttctccttcaatggtttattccctagtggatgacgcctcctctcacttctactactatatcttctgctgcatctccacggccgaaaatcaccattgaaggacctcattgaagatcaaatatccagccttcatagaagcttctcaatcaacattccatacgaaattaaa

SEQ ID NO: 116405 - DNA, 364 bp, Glycine max
  unsure (1)..(364): unsure at all n locations
gacctataaaactcagctgcaaaatttatttgtactacatgtccaaattattgnttcaaatggttaagtgtctctttgggtactctaagatatctggagcctaatataaatggagntcctttagacaaactcctttacattgtattgttttgcattatgtgatatatgtgctttgtcatcaatataggctttctaattatgcagcatcaacttgttatcacaatcttaatgttttttttttttttgaaaaaagctaaaatttatatctaatataaacatggaagatcttggagtcagtatggcctatcctaattaagggacaagagtatatcctatattggtatgtaaggtattatattatatc

SEQ ID NO: 116406 - DNA, 404 bp, Glycine max
  unsure (1)..(404): unsure at all n locations
agctngcaaatacctgatctattttctttatcttcatagcatagcaagagacattcaaatagaaattctcatcaaacaaaaggtcgaaatttaaataacacttcactgcatttgttcatgaaactctataacaaaatgatgctctatatatgccatatgctgctcttttaactttaagtaacccttgtcaaaacctggtgaaaataaaatgtgcaacagtacctgtagctgcaacatatcactgccaacagacagaagggatgtctcaaaattggaagcatgtatactaaaagcaacccccaacttcttagcagtcggatcttcatggttgtcagcttctgaaaaacatcattcatctctcctaaattaacccaacaccaaaccaaactttaaagttacatttt

SEQ ID NO: 116407 - DNA, 390 bp, Glycine max
cagctactatcaattcagcgagacaaacatatttgcacatctttatttcataacggaatctgcaaaactctgtattgtgtatattggaaagcactttctattatataagatatctaaaataattttggaaactactttccaaaatatatttgttgtattctggaattactatctagaataattctagagaatgtatttattttattgtgggaaatgctttccggaatacatcgagcttgatcgttctataataaaaaaattgaaaagaaagaaacacaattccgcgcatgtctctgatttctcacagcttcaatcatcatgtatttttttgatgatcaaagcatcaatataatggaatgatgtttaagataaattataatgccttgatca

SEQ ID NO: 116408 - DNA, 414 bp, Glycine max
  unsure (1)..(414): unsure at all n locations
tatgctgctaatatttacaatagacctcctcaaccttagcagcgaattttaccacagcagaacaattatgacctctccagcaacagatacaaccctggatggaggaatcaccctaatctcagatggtctagccctcagcaacaacaacagcagcctgctccttccttccaaaatgttgctggcccaagcagaccatacattcctccactaatccaacaacagcaacagccccagaaacagccaacagttgaggctcctccacaaccttccctcgaagaacttgtgaggcaaatgactatgcagaacatgtagtttcaacaagagaccagagcctccattcagagcttaaccaatcagatgggacaatnggctacacaatttgatcaacaacagccccagaattctgacaagctg

SEQ ID NO: 116409 - DNA, 381 bp, Glycine max
agcttggaagctttgcttccattatttttattttcgtagtggtctgcacaaggaagataggtaaagtaagtacaatgtccgaaaataagcaacaattatcaattaagcccaattatttgcctaagaccaaaattgaattagggtgagaaaataaaattcaaagaaaggtcaaataagctaagaagaataggaaaataataagctaaaaatgctttatcacccaccttacgcgattccaacaaatatgcatattagtaagaatatccgaaatcaaaaacaatcacatgaagatgctactttttccctttccattagggggaagtgcacttgaatggctcaattctaaccacaccatagtctaacctcatgggaagcaaataa

SEQ ID NO: 116410 - DNA, 404 bp, Glycine max
  unsure (1)..(404): unsure at all n locations
nttctttctcaatcaatctgtctactgactaacaattctaattgcaagttctcattcttgttctttctttgtctaacatacacacttgctgaaactcatgaaaagaaacataaacttcatcacaatcatgcattcaattcaaaaccaaatgatacaccaattttcacaaaaagataaaagtgttttactgccatatcatcaaaatcaagtcaaactgttccatatgcttctaaatgagcaaaccaattatcgataaataaaactagcagtgtataaaaacataaaagaaatactatactaaaaccataatcataataataataaaccanaaagcaaaaacatcattaggaatttagaattcctgtgactggtcctgggtgtcctgtgtctgaacatcctcctca

SEQ ID NO: 116411 - DNA, 403 bp, Glycine max
  unsure (1)..(403): unsure at all n locations
cgcttagttactgagttagctgtcaatgtgttatttgctttcataggaancgaagatggtttgtagacaagcattccacaatcttctaggatagatattgtgtaatgtcgttgacacatgaaaatgccttctttttatctaaatagctccaggcctatgaaaaattttagatctcccaggtctttcagtttgaagtgctctttcagaattgtcttatctctagagatgatttcttgacttgggttagctaggataatgtcatcaacataaactaaaattgctatgaaattatctccttctcctttagtaaacaatgagtaatcatacttagattgtttgaatccatatatagatctatccagcttgcacaccgatggttcattgtgtcccttggtgatactgt

SEQ ID NO: 116412 - DNA, 419 bp, Glycine max
  unsure (1)..(419): unsure at all n locations
tttgttccgagctcagaataattcttcattttgaacctatactttctaaaccaacttcagaacaatcaaattttacaaaaagaaattgaagtttgtgaaaacacaattcaacccccttcttatatttttttgtccatacatgatatacagatagtgaagttattcaaaagcactacaagaaacattttgcagaggaataatcttttgaagcaacattcctaatagattttaaaatttgccgaagaatatactcctagaaatctagcccataacaattgtcaaaatgttaattcaaaagacaacatagtattttgagaataaaaggaaaattctcattgaataaagattccaaaagcacaaagaagacaaaataaccaataaaatgacaacaatatgaaaatgantattcatatagttct

SEQ ID NO: 116413 - DNA, 284 bp, Glycine max
atgagctggtgaacatgattatagaggttcttactgaattgatgactccgtctgggtttgggaccaacctagatctaaaagagctcttcattgggctttaggcctctatccaaatgatataatacggatctgtactgaatatcatgaactgacttgcttggataaagatcaaggcttgtcatggaggcctttcttccacgcccaagacttgagtgccatcattcacagagggattagagatggctggctccctggtgggaaaacatgggggctacttttaggct

SEQ ID NO: 116414 - DNA, 342 bp, Glycine max
ggctattgggcacgcaatccatggggcaaaacacaccaaatgattatgatgatggatggggccaattctcacaaagggtaacccttcactttcaaaatgagctttccaaactatcatgacatgtagaggagaatcaagaatttcaagtcacaaaacgtcgaaaaattttattctcaaaaaaattacccatttcttgaacatatcctatgattcaagaaaaacatgcaaagtcgtacatgcacacagaattgacccacaatatttaactataaatcccacgaaactaatcaacattaacaaattaacacaacttacaaattaaccaaacccacaaaactaaca

SEQ ID NO: 116415 - DNA, 324 bp, Glycine max
  unsure (1)..(324): unsure at all n locations
agctnggaggggttgatggggacccatttctgaattgaactaggagaaggctacatacgtgcacgtgagctaaatntaaaggtgggcaactggggatggtgtgcttatgcccggtttgtggaaaagggatagctgatttgggccatcgttcgatcgccacctagtgccacatatgaagggtgccccataatccaatatgcttggtgtgagaaagcatggaagagccagtcttcctactttatttgttgaccacagagtggtacctatagatttgtcgcgggggttaagagaccttggggactccaagtggggcacatttatcca

SEQ ID NO: 116416 - DNA, 417 bp, Glycine max
actcaagcttgacatcaagaagggttgaatggtgaaactctctgcttttattgttgaccacagagtggtacctggagatatgtcacgggggtaagagacctttggacgtcaggtggggtgctattgcccaaaaccaatcttgaccaatctctacccaaccccggcatattccgtcagggagaacctgtgatgtacctaaacacgcgagctccttgcagtcaacagataagaggacaacaagaccacaaagcaaggaggcttgtggtggctggccacctgtgaattctgtgtaatatgtggattgtggcctctggtaatcgattactaccggtgggtaatcgattacgaggcttaatattgaagacaggaggcttacatggactctggtaatcgattaccaccgtgtgtgatcgatta

SEQ ID NO: 116417 - DNA, 352 bp, Glycine max
gcatcaacaagatataagccaaggctattgtgcaagcaatcaatgaggcaaaacacaccaaaagattatgatgatggatggctcgaattcccacaaaggtaaaactatcactttcaaattgagctttcaaaactatcatgacatgtaaaggaaaaacaaggatttcaagtcacaaaatgtcaagagaattttattttcagaacaattacccattacttgaacatatcctataattcaaaaacaaacatgcaaatttaacacaacaaaactaacaaaattaaactagaaacctaacaaaactaacaaagctaaataaattaacacaactaacaaaacccaaaccaaagaacac

SEQ ID NO: 116418 - DNA, 416 bp, Glycine max
  unsure (1)..(416): unsure at all n locations
tactaagcttcttctctgttttttatacgctctttgaccacaggcccatggttttcatcctctattaccttccctttgggtggcctttgcaatgcatttcgcccttttgtattcctttatcctctccctattcttcttataaggcttactataaatctctcatcatttaaaagaaaaggtccacgattaaagttaaaaacatttgacaaatatttattaatatttctattaaaaaaagtaaatataattacaaatatgaaaaaaaataccacatcaatatcacgtcataaaaaatataaagtcaacaataatgtcacatccataatgacaagttatcatgatgtcaaaaagattaatagccaaaaanaaaaatacaaagacaaaaaaaacttatggagattaaaaaaatgaactta

SEQ ID NO: 116419 - DNA, 274 bp, Glycine max
tcacattatattctttcttggggcagaaaaacctgagtttgaaataccgataactggttaagaagcttaaagacaatatatttgagctagaagcagaatatggtcattccaactaaatggaatagatggcgtgaaaccaagtggtggttttggtatgaaagatgaaaccaaaaaaagttttatcagaccaaaaggccccttgttatatgcgatccttgatttttaggaccaacagcagttattttatatattgcaaaaacacccacatatagtc

SEQ ID NO: 116420 - DNA, 368 bp, Glycine max
tttttttgttttttccattgtcccgggacactgtgttgtgcggctccttgtgccacattggacaacactgatgtggctgtggattattgaattccctgctcaagaatttgcttcagcctctggtcaaacacatgcctcaaactggggctctatatgatgctcttcttccaaagaacctgtccggtatggatgtttcagtagtaccgctcagaagcagaaggctctggaacaaaagcgccaactttagttacttttagatcccaccaagaaccatgtccattccccatgtgaggagggtggcttttgtctaccaaaacttgggcaactggtcttcccactacttcaatttgccaaggtactcactcatt

SEQ ID NO: 116421 - DNA, 408 bp, Glycine max
gcccgcatgcaagcttaagagtctgccaccgttgaactttttctctcttgaaaggcttgaatattggggttggtacaatctcaagagccttcctgaaatatcacgaaagatggaaaatatgacacaactttcctggactggctgtgccataacaaaactcccaccttcatttcaaaatcttactcggcttcaattgttaagtctgacaacttttataaaatatgactttgatgctgccaccctcatttcgaacatctgcatgatgccagaactaaatcaaattgatgctgccggtttgcaatggaggctattgccttgacgatgttttgaaattgacctcagtcgggtgttcaagcgttcaatctcttactttggaactgtcacatgaacgtcttccgctatttctct

SEQ ID NO: 116422 - DNA, 405 bp, Glycine max
  unsure (1)..(405): unsure at all n locations
tgngcttaacgtagaatttccaatgatattgtataattataattgcaactccaataaaaaaaatttaattatatattattattaacgtaatttctatttctactactcttaaaaacaatttaactatatattgttataaatcatgtggatacattttgtcacaatctaaacacgtcagtggcatcaatttttccttttcccatataatcccagaatttcaacaattagtcaacttgaatctcctattatagaggcattttcattcacacaccccaaattgttggaaaaataaaataaacaataagcaagaataacacacacgtgcttttctcctaataatcacctcaagcgcaaccagtgaggggatattctcaaaatgcttcacaattaagaaaacatgtgaca

SEQ ID NO: 116423 - DNA, 367 bp, Glycine max
  unsure (1)..(367): unsure at all n locations
agctagaccactttgtggtgttaaccttttgtacactnggtggactcaatttagttctctataatgatacagggtgagagtctcagtctcttgggaatgagtgcctccagaagattgattgatgcatctgaagcctttactggatatttcactccttatcaatccaggcgaagcacaaggtacttaaaagtgagaacagcctaaaagtcaatgtagagggatggtttttttaagttaaatgttgtcctcttttcaacatttctgcagttactgtgtggatagttccctggataagaccaaggccaaaggaaaggttcttgtgtgtcgacatacatagtattcaggggagtcaaagttggaaaagagt

SEQ ID NO: 116424 - DNA, 410 bp, Glycine max
  unsure (1)..(410): unsure at all n locations
tgtggtactgtcacttctccacactccttacttttctattgactcatgatttacgttaaagagtatagaccttatttgggattgcctaattgcttctattgtaaactcttcttgcttatcctaattctttctatgattaaggggcctatgaaagtaaggtcccctaatatttttggtcaagaatttgcacaatgatgaataacatatcccccccccncccccccacacacacaccctaaaaaaaaaaaaaagagaaaaagaaacgaaaacaccctcatgcaagcaaacataccagataggatgacttctccatgctttttcatgtttgttatcacagtaaatgactttgtaacaagtattacttttcttaacatcagactattactatttccaaattctttattaatcgg

SEQ ID NO: 116425 - DNA, 370 bp, Glycine max
agcttgagattgaacaacggtatctcttttttaaacaaatggtctaactttgccgcggatggtcgattctggcccatcacatattaagacacctcaaaattgaacaatggaagcctttgagaatatcaaatgggcgtaacttttctcaccgactttataaaaaccgcgcatcacatatactaactcttaaaaatgaacatcggactctctggggaaattaaaacgggcctaaccttttccactgaggtcctattctggcttataaaatattgatccgccctcaattaaaaatcagaagctttcgagaaatttgatggtcataactttcccacggtagcccgatccggcgcctatatgtcgaagggccgaa

SEQ ID NO: 116426 - DNA, 408 bp, Glycine max
  unsure (1)..(408): unsure at all n locations
actccgcttatatatatcgaggcgctcgaaattgaacaacggattgtcttgatatattcatatggtcatagcggttaactcggatgtccaattcatgcgcattacatatagagacgcttaaaaatgaacaacggaagctctccacaagttaaaatggtcataagttttcacagagatgttcgattcaggcttgtattatatcgagacgctcaaaacttaacatcgaaagctctcgagaaattcaaatggtcataacttttcactcggatgtccgattcaggcgcatacatattcagacgctcgagactgaacattggaagctcttgagaaattcaaatggtcataacttntcacactgatgtccgatccacgcttataatatatcagagcgctctaaaattaacatcg

SEQ ID NO: 116427 - DNA, 254 bp, Glycine max
cttttttttttggggcccatgtaatgggagcgttaaatatatacccgacccgcctatgtgaaaggtataccttgaattttctgaagattcgggtcaagttctatgtatctgaagggatgtcccgatttgcatccggcgataagttcgaccattcgaatttcagagctttcgcgttatttcaagcgctttattgtaaagtcctgaattgcctactgtgaaaagtattactgatgaattctgaaggctttgtgata

SEQ ID NO: 116428 - DNA, 411 bp, Glycine max
tttcgagtgcctgtatattgatgcgcctgaatcagacatccgagtgaaaagttatgaccatttgaatttctcgagagcctcctatgtttaattttgagcgtcttgatatattatacgcctgaatcgaacctcagtggtaaaagttatgaccatttgaatttctttagagcatgccgtgttcattgtcgagcgtctctatatgtgatgcaccttaatcggacctccgtgtgaaaagttatgaccatttgaatttctcgagagcttccgttgttcaatttcgagcgtctcgacatattatgcgcccgaatcggacatccgtgggaaaagctatgactatttgaatttctcgagagcttccgttgttcaatttcgagcgtctggacatattatgcgcccgaatcgacatccatg

SEQ ID NO: 116429 - DNA, 245 bp, Glycine max
aaaaggggggggaattaatgttggcctcctccatgaagtcatggaacacaaagtagccggggtacctcactttttatttatccgattaagtaaactacggactctaataataagtccagttcatgcaaataattatcccctttggaaagatgataccaataacctgaagcatgggttagcttgcttttaactataggacagctctaaccaagatggatttattaagaaagaaccctgcttttttt

SEQ ID NO: 116430 - DNA, 244 bp, Glycine max
aaatcgcttaggaaaggtccaattttcattttgacgagcggtggggcatgatcgggactgccatcactggctacgtattttttttaaaacaatattgatgggatcactaagtgttgtactatatgaatgcctaaaaaaatttaaagctataacctattaaaagtaagctttttggatctgcgtgatgtttttgttgtgatcgtgttctttaaactttggttgatctgtcgtagtgtgatgctat

SEQ ID NO: 116431 - DNA, 394 bp, Glycine max
cagcacgcatgcacgcttgcttataaagagaccgaaacaatctctatttgccttcctcgactaccaacaaatacatctaaacaaattacttcttctaaaccaaatgtctttcaacaaaagtctgaaacaactatattatgaggaataacatcatcaacagtcttaccaaacctcctcagcatagattttggtggaatatttatagctgctccttcatatgctacaattttgttaatattttaaaatgttagatttcaaatttcaagagtcacaatttgcgataaaacattttcaaatcatttcaaacttgtgtaatcgattacacaatacttggaatcgattactagtgattctaaacgcttcgatgtcaaaattaaacatgaagagccaaatc

SEQ ID NO: 116432 - DNA, 411 bp, Glycine max
  unsure (1)..(411): unsure at all n locations
actcacgcttgccattcttgtagttttaattnttttttattaggctatggttgaaattaggtcagagcggctcaacccaacccacaagtcagcaaaaaggttggaaaaccataggtgcaacagcaacaccttgacgacacaacgtgtggcaccaccatggagggtggtacaggccctaacgccactgggtgcagggcttggcagcgggagactgccgtggtgagggctagcctggcgatgacagttgtgggaaggtgcggtggagcgccatgggttgcaaaactaacaaaaaacaatagtacaagcacaaccagaatgagggagatgatgatgatgatggaaaataacaacaaaataatgagcataaagaaaacaacaacaaatcacaaaaaggaaanaagaaaaaaaaaa

SEQ ID NO: 116433 - DNA, 394 bp, Glycine max
agcttaagcttgagagcctgaagaggtttgatctatatattatgcatagaactctgcatggcatcattcacatgattccaattagttatctttttctccataaattgctttcagtttcatcttaaattttggaatgacattttttcacgatatattcaagtgtttctgtttcattatgtgccaccccatttgattaaaattccaaattgtccatgtttcatagttggaggaaatcaatgtagccctacaaccaacatgggaagctagggagcaaaatgctccctacaattgccaccctccccaaacagagggatattatgagacagcaacagcacattgcagcagtacattgagaattgggtaatgttcatctccctcaatgcgtagaatgtgt

SEQ ID NO: 116434 - DNA, 389 bp, Glycine max
  unsure (1)..(389): unsure at all n locations
ntctttattattntgttgaattaatatatttcaatttaatttatattttttttttggtttgttgcgtcaagtaaatgttactattgaatgatatgtgtaggatgcatgggatgcgataaattattatattataaattgtgaattacatgattgttgagatgttgtatgtattgagttgtgagctatgaattatgtaatcacacaactgtaagaccctttaagggcgacgagttaatacgcgatgagttgtgatgggatccactgtgggaacctgacgatgagttaatacgcgatgaggtgcgatgagttaaaataatttaaaaaacaataattgggattttgaaaacaattgagtagttgtgtgcattgcataatccatagggtttttt

SEQ ID NO: 116435 - DNA, 353 bp, Glycine max
cagctggattaatataagccacgtttgtttgttgatgggaatatggaatcttcccaaacaaaatcatgattatttctggcaatctatcaaaattatgtgtagtataaactctcaaatttgataatatatgattggtttattacgggaaaaaagatgctggatcgaataccttttgtttttggagaaaattccaatacctttgtgattgacactaaatattgatttgttgttttaattgtacgcattggtccgtttaacgtctaaatctatttcggctgatatatcgagggtgtgattggttggacattatctcgggaccccaatttgattaaagttgacactgagtgaaaatc

SEQ ID NO: 116436 - DNA, 412 bp, Glycine max
  unsure (1)..(412): unsure at all n locations
cgacgacgaaggcagcagtggagccggtgcccantccgaggattatgccgcttttgacggacgtcaccgccttgttggcggcgaatctcttgagggcctcctgggtgaaggtgatggccccgatggccgggaaggaatggggtggaatgcgcaattaaagggattatgggtgcgtaaataacgcgcgtggaggcgtttgggtgtgcggaagagagagatgggggagaggagaaggataacgaanccattgatgattatggtaagagaaaacagtagagccacaccccacccacggtttgatgctttatgtttggcccttctttattactttatctctttgctttcaacacaaaggtgggtggataattccttttcatcctcctcattcattcacctacttatttttcttttt

SEQ ID NO: 116437 - DNA, 400 bp, Glycine max
cttaagggacaacaccctatgatcttcttcttattgacacctctgattccttctctggcttgttgtgggtcataatacgattccttctcttgatgggtgcttttgttaacgacatatactttcagagtttctttgccttaagatgtgtgatgctttacatgtccattgcagtgtggagatttttctttgagaggaagcttggggatcttgcacatgaatggcctacgcatgttgttggggacataacattggcaatttcatgggtcttttttcttgtgttcacatggagagagaaatatgattaagtaatttattttataattttgtaagttctttgtgcttgtggttgtagaaactacatggcccacattggccttgggaatgctcagattattgacat

SEQ ID NO: 116438 - DNA, 403 bp, Glycine max
  unsure (1)..(403): unsure at all n locations
actcagcagatactcagtcttttgggagggagggacaatttattttttctcactgggaatgagggcatgggatttcatccaaatttgcctacaatggaccactctttgcttctttacatgtgattaatccaagtgggctggatggactggaagatgtcatgtaatttatatgttaactgtgatccatcaaaggtaagtactgatcatggcggccaaccatgccaatatcaaactgttatagcagaatattctgctaatagctctggatcccagccttcctcggtacacacctcttcacatgtaaaaaagtagtttgacttgtntgcataatgcgtttagtcaatgaatatacactaagtcatatatttttgcacgcggaaagtgctaaaccaactgaagtgag

SEQ ID NO: 116439 - DNA, 404 bp, Glycine max
ccggattcttaagacacctgcggcatgcaagcttagaagagcggagctgggatactattgtcaagcggttgctatatgggaagatgatgttccaagaacttcggatttgtgcccaccatgcccttcagatttccacctgggaaattggcgggtggaggaacgtctcggtattttctcaacaaacttaatgtaaacctttacggtgttaaaagctctatagttgggcctaggctttatagttcttattctgataaagctttgtgtctcttgtctttgaatctataatacatagaactttcttaatttggtcctggtctctacccatcctcattcatttgcatgtttacttttttttctagaacggcagatccgatgacgagatccccgagggtactattactctg

SEQ ID NO: 116440 - DNA, 412 bp, Glycine max
ttgagccagaatcctgactcaccatgtttcttgtctctcttgtgagaaagccaatccgtaccctcggaagcattaacaaggagaagagacggaaaattttcaatcaaagaggaagcataaaaaggagagaaggataatttccactcgacgataaagagaagaagatgaaaggaaattcccaatcaaagagtgggagaaagaaaaaagataagaaaagaaagaaaactcccaatcaaagaatgtgagaaggaaaaaaacaattctaaaagaagatagctcctgttcaaagaaactataacaaatgtgcacaaaggtcttttgaccggacgatatctgaacaatacagaattgtcaccatatgatctatataagaacgaaaggagaccacgaccttaaatggtcttctcccttt

SEQ ID NO: 116441 - DNA, 396 bp, Glycine max
  unsure (1)..(396): unsure at all n locations
agcttgtgagcctaagaacttcttcatctatggattcatcngtttcttggaagatgaatgacacctgaatggataatgaatagatagaggagaccctccttcgtggataagatgaatctaaacgaatctctccaccattcgaggccatggatacaagcttggtggaagagggtgatgaatgaagggagaggaatgaagagcacgaacttttgtgctctaatagagctttgaaatctgaactctacttttcaaatgatctaatttgaaaacattgcacgcgcatggcttttatttatagccttcgggccacacaaaattggagggaaattcgcatttctattcctatttcacttgaatctgaggagccatactttggagccttctagagcaacatca

SEQ ID NO: 116442 - DNA, 408 bp, Glycine max
tgtgcgaagagataaacagacgaggactcagatccttttttgcaattgtctatgcactaagcgctcagttatcacacgctaagcacagatacacctgattggttggctgaatagttcagctaagcgcacatcactacgctaagcccatcatcttcagtgtgattgaaccttaatcagtgggcttagcgtggatgatgtgctacccgccactccacctttggaaaaatttaattgtagcggcgctaagcgcgatgtcctgagctaagccccagatacattccggaatttaagctttcacgctgggcttatcggggcacgaagcgctaagcgccaatctcttactgatgttgaatgcttggacttaacgcgcctatagcgctaagcctgaactactctctataagcttga

SEQ ID NO: 116443 - DNA, 395 bp, Glycine max
tgagatgaggaaatgtagaaaggtgaaacttcctgcttttattcgttgaccacagagtggtacctggagatatgtcgcgggggtcaagagaccttggggacgtcacgtggggtgctattgcccacaaccaagcttcaccaatcccgacccaacccgggcatagtcagtcagtgagaacctgtgatgtacctaaattggcgagctcctggcagtcaacagataaaagaaacaaagaccacaaagcaaggaggcttgtgtggtggctggccagctgtgaactttgattgatatatgggatatggcctctggtaatcgattaccaacggtgggtaatcgattacaaggcttaaaaatgaagacaggagactaagatggtctcttgtaatcgattacca

SEQ ID NO: 116444 - DNA, 406 bp, Glycine max
agctctgatccaaaatgctgactcaacatatattttgtcccacggtgataatgtcaatccttaccctctgaagcaataaaaatataaaagggagaaggaaaatttccaatcaaagaggaagcatataaatgaatagaaggaaaattttctttccatgagaaagaaataagaggaatggaaattcccactcaaagagtgggagaaagaaaaaagaaaagaaataaaattccctacccaagaatggaagaaagtaaaaaataaaaaagctcctggtcaaagaaaccataagaaatgtgcagagaggtctttggaccacacaatatctgaacaatacagaattgtcaccaaatgaacaataagaaggaaaggaaaccacgacctaaaatggtcttccccctttaaattg

SEQ ID NO: 116445 - DNA, 390 bp, Glycine max
gaagtgagaaagtgtggaagagtcagtcttcctacttttattctttgaccacagagtggtacgtgaagatatgtcgcgggggtcaagagacctttgggacgtcaggtggggtgctatttcccaaacccagctttaccaatcccgacccaacccgggcatagttagtcagtgagaacctgtgatgtacctaaacaggcgagctcctcgcagtcaaccgataaaagaataaagtccacgaagcaaggaggcttgtgtggcggctggccagctatgaatctttagtgatatttggaatatggcctctggtaatcgattacaaagggtgtgtaatcgattacaaggcttaaaaatggggtcacgaagatgagatggcctctggtaatcgattac

SEQ ID NO: 116446 - DNA, 375 bp, Glycine max
agccccgccgctgctgctggactgtgctggatataaaactttttttcttcgcgaacccagagccatttctagggcaataatgcgtgttcactacccacatttcgattctgtagagatttttcgtgtctatccagtatgatcaagtttcaatccacgctatgcgctgtagtgaggggacagtatgcttcacaattacccacttctaacttcacttttcaaacctataaaacccattgaattgacgggtgatggacacctagattctgcgatgctgggctgccaagctcgatttttggttatacatggctgatacatgaattgggacttgtaggaaattattccggcaatactgtattacatgaattgtgactttct

SEQ ID NO: 116447 - DNA, 263 bp, Glycine max
aaaacggtatttgggatgagtatttacctctagtggagtttacccacaacaatacgtttcatgctagtatacatatgggtccatttgaagccttatatgggaggaagggtagaacaccattatcgtggtatgagactggtgagtctcttttgatagtgttgagtttggttgcatccaagtcacattggactgtaccaaacaagttaaattcctgaggttttgatgttaacaaagtataaattttaagtactaacccttcatgc

SEQ ID NO: 116448 - DNA, 385 bp, Glycine max
agctttgaaaggggagcttgaataaacttgagtggtcacggagaagctatagatgatagtcactacggtcaggaaagagtgtgatatgctgagaaatgtcaacatgactactgtagaagaattacaacgggaaacaaatatggcccgcaaggaagaatggagcaagaacaagatccgaggggatctatgggacaactgcaactggcttaatcttagaaaggccaagatggacgaatcaaggatggaaagcatggtgttaaaggataaattaaaggcttgtcaaaggtcgaatagaagtttgacagaacacctgagccgaatggaagagaatattgttacaattattgatcaatattaggagaagatgaacctagctgctagtcat

SEQ ID NO: 116449 - DNA, 404 bp, Glycine max
  unsure (1)..(404): unsure at all n locations
gagccaaaatcctgactcaccatataccttgactctggttgagaatgncaattcttaccctcggaagccaaaaaaggggagagggaaaatttccattaaagaggaagccaaataagagagaacgaaaatttccaatctaagggaaaaaagagaggaaagggaattgtcaatcaaagagtgggagatagcataaagaaaagaaagaaaattcccaatcaaagaatgggagatagataaagagaagaagatagggaagaaagttcccgatcaaaaaaataatatgcagaaaggtctttggaccggacaatatctgaacaatacagaattgtcaccaaatgaataaaaagaacgaaagggaaccctgacctanaatggtcttccccctttagttgccaggcaaaatc

SEQ ID NO: 116450 - DNA, 389 bp, Glycine max
gatctctaatcacctgcggctgcagctttaccacactgtgcgactattgttactcacattctggcaccaggacgagatttgaccagtgtcttgttgcacattgcaggttgattctccgtacgggtttagtcagactactcccgcgttttttgtgctttgaattatcagtaatgccccacaagagattcgtcaagatccattttagaggaatatccgatccccaaggacaatgcctcgatgctccatggaagttctgcactagcgagcatccccgaggatgaaatgacatgaccaacgcctcaccgattaatatgactggcatacggtccttattcaatatattacacggtactattaagggtttcaagatgaccatcttattcacatga

SEQ ID NO: 116451 - DNA, 348 bp, Glycine max
tatcacaccaggctcagctaagcagtgtttggtctatatccaagcgcaacggcctaatggaaggccatctctgagttcaccacaatcccagatatacgaaacatcttatatgtggagtattaaagtttaatgctctcaatgcacctgatttattcaaaccacatcatgacatcttcaaagcggctattgttcacatgacagtaaatacctgatcattcatgtttgatcagagcttccaggaataagattctcaccctcatataacatacaatactcatatatctatctatatatggggaatgttcacctagacccacatcaaaattagacaggccatcttagcatcta

SEQ ID NO: 116452 - DNA, 392 bp, Glycine max
agcttgtgaaagtccttctgattctatttatgcttttctgactttatggcatgagatgaagtgtaaagactggacctcttgctagttgttattgatgaaaagcttaaacacttgtgcttgagtgaaacagttaccgtgagactgtgggttaagctactttccttgatatatgtcttatgcctaactccaattaattgtacaggatacattatattcttttctttgaataattgcatgctttgtgaaagacaagtgatgagggcattttacttcattctattatcatgcaatcaatagtttttgtggcatacacccttggtcataaacacttgatattcttgtcacttggggaccaatgagttgttctttatttggttgaggactagcataac

SEQ ID NO: 116453 - DNA, 425 bp, Glycine max
gacactacagaaactaagctttcatagtgaaatcaggtgcagccatctccctaagagtcctctcatgaggtggaggttgagccatgttctcagtatgaaaattagtagttgaatgctcaaaatcagaatattcaaaatcaccagtaacaggatactcaaaatgctcaaaatgctcgaaatgcacagaatgatcaggatgcacactatgcctaactaatctatgaaaagttctatctatttcaagatcaaagggctgtaaatcacctggattgtccctagtcatgtactatatgcatcaaatagtgtgttctcaaacaagcaccaggggagggttaaaactactatagtcaaacgatatccaaatgagctgaaattttatgagcaacaccctataatcatgaaaagatagcgcaaaaattttcaaa

SEQ ID NO: 116454 - DNA, 288 bp, Glycine max
cggatctttaagtcacctgcaggctgcagctgaccatcccgacccacccgttttattcagtcattgagaacctgtgatgtacctaaacaggcgagctcctggccgtcaatagataaaagaataaagaccacaaatcaaggaggcttgtgtggtggctggccacctgtgaactttgagtgttatatgggatatggcctctggtaatcgattaccaaggatgggtaatcgattacaaggcttaaaagtgaagacaggaagctaagatggcctctggtaattgaataacaa

SEQ ID NO: 116455 - DNA, 423 bp, Glycine max
  unsure (1)..(423): unsure at all n locations
gaactcttaaactcacgctgcttgtggngcttctatggaggctggatctttgagcttcaatgaggtcctttaatggtgattttacaccatggagatgcagtggaagaccaaagaaaagacctgagaagaggcgccattcactattgaataagcccttgaagaaggaactttcccacccagatgaaccttggaataaaaacttggaaaaggatcttccatggaggaaaaaaaagagggagagaaagaaagaagggggagcacgacatggaagaagaaaaagggagagaaagttaactttgagttgtgtctcacaacgtgacatcctggaaatttctacccagaatttttggaaacaatgntatttgaatgattatatatatatatataagtattattcagtgtatatgcatatatgttcttgat

SEQ ID NO: 116456 - DNA, 347 bp, Glycine max
tatctattatagactaatattatcataactctggatttatgtacttttttaacaagtattaagctatgtttggcccaaccttttttcaccttataaggtttttctttttttgagcagagctaaaaaggtaatttaaaggtaaattattaaataagaactttaaatataaaatatgaagttgtttgggaactatagcttaaaatctacccactttcttttaaaaaaaattaagggtcctaagagattttctccaaatgtgggtgggctaacttctccctttaagaagaaggaagcagaaaaaaaaaaaaactgggccaatcactaccttaattagcgtattattaagc

SEQ ID NO: 116457 - DNA, 355 bp, Glycine max
  unsure (1)..(355): unsure at all n locations
ctaaagaaaacncccagaggggaggaccttttaagtttggttttttaatttcttccccaagcgggactccgaaaatatgattacacccctttaaatttttatttaatcctttgcaggggagctatattgagaaggagacctaccaatttaggtcaatcccttcaagggaggggatgatgcaatcttcctagaagggacaattattaaaccctgacaaaagctccaaaagaatggctagactgctaagaagcctaggttctataacttaaataatttttaaccatggccaagtgggtccaatatttgtcatattaactagatgcatttatttggcctgtattaggctcatattgac

SEQ ID NO: 116458 - DNA, 391 bp, Glycine max
cagcttttgagcaattcaaatggtcatttcttttcactcggaggtctgagtcaggcgcataatatatccagacgctcgatattgaataacaaaagctctcgagaaattcaaatggtcataacctttcactcggaggtgcgatttaagcgcataatatatccagacgcttttaattgaacaatggaagctcttgagcaattcaaatggttatcacttttctatcggaggtccgattcaggcgcataatatatcgagacgctcaaaattgaacaatggaagctttagagcaattcagatggtcttaacttttaactcaaaggactgagtcatgcgcataatatattaagatgctcaaattgaacatggaaactttgaacaattcaaatgggat

SEQ ID NO: 116459 - DNA, 406 bp, Glycine max
  unsure (1)..(406): unsure at all n locations
aaactcagcttgacctttgaatgctcacaagcttctcttgtccatttntgaacgtctcgatgtgtatgcgcctgaatcggactatccagagaaaagctatgaccaattgaacttctcgactgcttccgttgatagatttcgagcgtctcgatatattatgcgcctgaatcggacattctagtgaaaagttatgaacatttgaattgctcaagagcttccattgatgaatttcgatcgtctcgatatattatgcgcctgaatcggacatccgagtgaaaagtgatgatcattggaattgcttcagaccttccattgatcaattacgaacgtctcgatatattatgcgcctgaatcggacatcctagagaatagttatgatcattggaattgctcaagagcttccatt

SEQ ID NO: 116460 - DNA, 395 bp, Glycine max
agctacaacatcagaccacttccagggttctgtttctacttcacatggatttgatggggcctatgcaagttgaaagccttggaggaaagaggtatgcctatgttgttgtggatgatttctccatatttacctgggtcaactttatctgagagaaatcagaaaccttttatgtattcaaagagttgagtctacgacttcaaagagaaaaggactgtgtgatcaaaagaatcatgagcgatcatggcagagaatttgaaaacagcgggttctctgaattctgcacatctgaaggcctcactcatgagttctctgctgcccttactccacaacagattggcttagctgacaggaaaaactagaccttgcaagaggctgctcgggtcatgcttcatgcc

SEQ ID NO: 116461 - DNA, 413 bp, Glycine max
acactacacacaactcaagcttagctacaaccccttataatagctaagttcacccccattccaaaaatacatgaaaataaaaaaaaagtccctactacaaacactactcaaaatgccctgaaataaaaggctaaaaccctatactactagaatggccaaaatacaaggcccaaaagaaaaaaaaacctattctgatatttataaagaagagtggatccaaccttgacccatgggctcaaaaatctaccctaaggttcacgagaaccctaaggccttctttagtagctctagcccaatcctcttggagtcttctatccaatacccttgggggtaggattgcatcatttcatgtaaaggctttttccatgaatggtcttccatgtgtagtatcattttcattgtggtacaacaag

SEQ ID NO: 116462 - DNA, 408 bp, Glycine max
  unsure (1)..(408): unsure at all n locations
ctgcggcntgcaagcttgcttctacagaactttttatattttatgcncggacaaaatgagactttgttaatataagagcgtttattacggtgaaaatatgccacgcagacaattaggtggtttatatcctatctgggcctgacctttttaatagggctcttgcttaatacatattcttctttgctatcttaaccccattcttttgtccttcaatctggtattaccatttatatccttttcaccttgtttctacacccccaataaaagcatggctctctaccttcaatactgattggggaggagaattttgcccatttgcaccttttttggttgggtccccttacttaacccttacaatacttataaattggattccagggttcatgaatgccttttattgggttattt

SEQ ID NO: 116463 - DNA, 375 bp, Glycine max
  unsure (1)..(375): unsure at all n locations
gacctaagatactcagcttgaggggcgcacccaccatcttttatattttattccgaaanngggctacctcacgatatcgtctcctttccatattgggggtaccacctgggccgccagaaccctccaccttttgggcgtgttctttgaatgattcgtccccctttttgcacatgctcttgagttggcatctatctagaaccatatcaaaattgtactgatactgcctaacaaaggcaaccattatgtccttccaagaatggactcgggaaggttccaagttagtgtaccaggtaacagctaccncagtaagactttcttggaaggaatgtatcagcaattcctcatctttgcgtattcccccatctctgacataca

SEQ ID NO: 116464 - DNA, 398 bp, Glycine max
gctgcagctgaaaggagcttttgtatatattttcagagaacaggggagcacgggagtgtaggaataaaatatggatacaagtcgaaccttgaagggtatctcatactactttcattcatcaaagttacaacaagtgttacacatgcttctatttatagactaagtagctatccttgagaagctttcttgagaaaactttcttgagaagcttctttgagaaaacttccttgagaagctaaagcttagctgcacacacccctctaataactaagctcacctccttgagaagctttcttgagaagattcctaaaaaagctagagcatatctttccacaccccctataatagctaagcttacccccatgccaaactacatgataatatataaaaagtcccta

SEQ ID NO: 116465 - DNA, 409 bp, Glycine max
  unsure (1)..(409): unsure at all n locations
tcaagaataatggcctcagtaaacttcttattcttcttatgaaactctataaataggcctcctatgtttaatggagagggttatcactactggaaaatccgaatgcaagatttcattgaggcaatagacttaaacatttgggaattcatagaagttggaccttatgtacccaccatggtggctggaaatacaacaatagagaaaccttcagaagagtggtctgaagatgaaagaagattagtgcactacaatttaaaggctaaaaatgtcattacttctgccctangaatggatgaatattttatggtttcaaattggtacagtgttaatgatatgtgggacactctacaaagtacacatgagggaacaactgatgtcaaatgatctacgatatatacattaactcatg

SEQ ID NO: 116466 - DNA, 376 bp, Glycine max
agcataaagaagcaatgatggaaccactatataagtcaatggctttcataaacaacatacattcacaacttagagagctcactaaggcaaccttgcctgcacctaatgatgaaccagctgcagctaccacttcttctactagtaggagactgcaaaatagataacttacataccaataattacttcagtaacttatacacaaacgtgaggagaaagtggggccccttagtcataacctttggaaaagaggatcatttgttgagatggtgcacaaggtaatgaatagaccatacctaaaaaaatgaattcacccctaaaatacacactaagactttgctacccactttattaatgaaatttgctaatagcaaactat

SEQ ID NO: 116467 - DNA, 393 bp, Glycine max
  unsure (1)..(393): unsure at all n locations
agcttagccaaccaacattgntgatcttgttaagctactctttgttgcaggaaatgtttcaagctcttatgatctgtataaaccatgaaaggtttgcccaaaagatattgcctccaatgttggattgcaagcaccaaggccataagcttcttttcatacacagactttgtcaaattcccatcagataaagctttgctgaagaaagctattggttgtctcttttgcatcagaactgcaccaatgccccttcctgcagcatcacactccacttctaacggcacagaaaaatctggcaatcccagcactggagggtgtagcataatctgtttaaataacttgaaagcaacttaagcttctttttcccacacaaaattgttctctttagttaattca

SEQ ID NO: 116468 - DNA, 395 bp, Glycine max
tgagatgaggaagtgtttattggtgaaacttcctgcttttattcgttgaccacagagtggtacctggagatatgtcgcggggtcaggagaccttggggacgtcaggtggggtgctattgcccaaaaccaagcttgaccaatcccgacccaacctatgcatagtcagtcagtgagaacctgtgatgtacctaaacaggcaagctcctggcagtcaacagataaaaggaacaaagaccacaaagcaaggaggcttgtgtggtggttggccagctgtgaatcttgtgtgatatatgggttatggcctctggtaatcgattaccaagggtgggtaatcgattacaaggcttaaaaatgaagacaggaggctaagatggtctctggtaatcgattaccac

SEQ ID NO: 116469 - DNA, 339 bp, Glycine max
  unsure (1)..(339): unsure at all n locations
agcctatagtaagagaaggaacgacattctatagatatgactccaacaacgccactgtcaccctagcacaatattatgancagcgcgtagaagtgcgaaacctctggggacctccaataatcacccacggtggatcagtctagaaaaaacccgtgatgaccctcgggaagaaagacaccatacctcctcatgggatgctatccctgctttgcgagaacgtgataaatatgccaaacctatacgcaagcattaaacaccagaccggcagtccaaaatgggggggggggcataccccagaaatgttgagaagaagaaccataacaatggcgagcaaatgat

SEQ ID NO: 116470 - DNA, 315 bp, Glycine max
gagaagatgtaacaggaccaaggtactgcttttgatttatctgctctttctctccggcattcgtgctgagcgtgagacggttattcttttacacagtatgttcgatgagcattgcagttttactttcgtgaaacacaaaaagctcattctctattgagtaatgaacgctgcaggcccggtgtgtggtgaaattggtataacatggcttcagtggggatcagacggataatagcgcgagaaagcaaaacaatgggctcgatgctttgcaaaagacttttgcgtcaaaagaaattttttaacgggattaccaacatg

SEQ ID NO: 116471 - DNA, 395 bp, Glycine max
  unsure (1)..(395): unsure at all n locations
agcttncacaacatgcaagcaaaacagcttncatttttcacaagctatcacagccaagcaaaacagagcaaaggcagaaaactctgccaaaacaccaaccaaatcacagcttttctcactgaaagaccccaataacaattccttcgatccaattcgatataccgttggatcgactccaaaattttactggaagtctatagtacataagcctacattgtgaccgttgggatctactaccaaacatccagaactcattctgcactactctttccacagccaatcacacacaagcatttttctgcactcatgcaaaattctgctgcacaatttcacagcaaaaatctgcacaaagtgcagatttcgaaaatcacacttcccctcatccaatcttgccc

SEQ ID NO: 116472 - DNA, 417 bp, Glycine max
tgcttgtggagcttctatggaggctggatctttgagcttcaatgatgtccttcaatggtgatttttcaccatggagatgcagcggaaggcaaacgagaaaaggagaatggaggcgccatccactaaggaataagccatggaagaaggagcttcaccaccaagatgagccttggataaaaagcttggaaggatgcttcaatggaggaaaagaaagagggagagaaagagagaggggggagcacgaaattgaaggaataaaagagggggagaagtagaactttgaagtgtgtctcataagactttcattcatcaaagttacaacaagtgttacacatgcttctatttatagactacgtagcttccttgagaagctttcttgagaaaactttcttgagaagcttctttgagaaaacttcc

SEQ ID NO: 116473 - DNA, 408 bp, Glycine max
ctctcagtcacctgcggcatgcacgctagtgggataaggaaaatggcagttgttgggtatatttatgaaattgaagctattgggaaaagaacaactctccatatgttctgcaagactctcacaactcaaacaatagcgctcatggtggattctgggtgccctattgagtagctgaatatttctttcctcccctagtatgaattatgatgcattgatttctcatcataagaatagtgccctaatgttctgtcgtctgttctgatttgctttaccctaatttaatactcaaaatacaagcctgatcttgtaagtgcttccaaatgtgcctgtccatgatatcaagctcttggaaatatactgttgataattttgttgcacaatttaaaattattatctatctgtactttt

SEQ ID NO: 116474 - DNA, 401 bp, Glycine max
  unsure (1)..(401): unsure at all n locations
tagatctccggcaatccatttaaaatagtggcgtattttggtatgttcgagcatggtaggcgagaacatgaaccaggggatccaattggtgaatgaaataacaaacatctcttagtaccagcctttgatgaaaaagccatactacatcttggagtaaaagctggaacttttaatccttatgtttgaggaaattaaggacatgagtaaagatggttttccgaggacactttcaatgtcattctcgtcttcaaagaagctctccaatctactagggaactcctcatattcgaaagctttactctggttgctnttcttactctctattattattattattgntgggtgtggtgttttctgctttctattaaactcactaacaaaagtatgtttagcagtaatga

SEQ ID NO: 116475 - DNA, 354 bp, Glycine max
  unsure (1)..(354): unsure at all n locations
agcgttgaaaaattttatgtaatatccttgtaaaacaaccnccccacgaaaacccttaaaatggacttaaccctgtgtgctttccctaaaaaggcccccacaacagcatcatactcaaactatatatgcatgattatctatatcttaatatgcacaaacgcactaatgtatcataaccccaaaagcttcacgactgaaaatgatgagaaatacattaccttaagcatgttgctcagaaaattaaagcaatagacccggcacatacaatataaaaatatataccttaactttgagtaactcgcagcaagtccatttgtgtaccatgaagaatacctacttacccatgaaatattt

SEQ ID NO: 116476 - DNA, 333 bp, Glycine max
tatatcgtttaatcaactattgggtagctgaagctgatgggatttttggtttatttttagagtaacaatgaaccttatatcccgttcatattctgaattagtttgttagacttatatcacattatggcggttcaacttaagtttaaacaacaaaaccaattcataattaaaagaccgaaatttattgattcagttataaattaatatgaatttttgaaacaatcattgtaagcattgaggataaaactctgtttacatagtccaatcacaatagtcgttgtaaagtactaatattatatttaatacctatacatcctttaatttcttcaaaca

SEQ ID NO: 116477 - DNA, 392 bp, Glycine max
  unsure (1)..(392): unsure at all n locations
agctngatgattgagtccagaatgacttatgtatctannatgatncctgatgatgaatcgagattgattcatggtgttttgatgataataaacatgatgacaataagcccctgagaatgactttcacattccgtcaagaacttccagattgagtctggaacaattcttgaatcgagtttcctatttctagaatccagaatcaagaataatcaaaatcatgattctggaatcatgaaaagactcaatcaagataagtactaaaaagtttttcataacattgagtagcccatgaagtgttcacaatatcttcttaccaaagagtttactctctggtaatcgattaccataatgccagaatgattacccatgttttcaaaatgttagaatttcaa

SEQ ID NO: 116478 - DNA, 327 bp, Glycine max
actaagctgggctgattttcctagtcgtggcaagcttatactttaattttggccgccctaatggcatgggcttgcgaccacgatcaataagactttccgccctactatatgttgattaccaacctgtattgaatgctgcgacaatcttcacaccttattacacatttgataagtggttgtatgtgccatatcgctccaatgtatcgagccatgctccattttcttgaattcatcatccatttgcttactggactcattgacaatttctaagttgatcaaccatgctgcagaggacctgataaattgtatcatcacgtgacgaacata

SEQ ID NO: 116479 - DNA, 398 bp, Glycine max
agcttctgtgaagggcatggttatttttattttcctaaaaatatctaaaaatctcgctagatgatgatctttttctttcttggaaggtaccacaggatatggtacttccacaccttcatccataactttttcactcctactcttctttgcattcttattattattttcatctttttcatttttttcattttctatttctttttctacttctttttctttttcttgggccttcaattctttattcttgaccattatttgttcctctttttcttgattactttcacctctcacctcattttcttgccatcagtaattgttttgtcagcaattttcttcttatgcacaacactatcctcatcctcaacctgcacaaaccttttactccttgtcatcacaaa

SEQ ID NO: 116480 - DNA, 403 bp, Glycine max
  unsure (1)..(403): unsure at all n locations
tcttatgtcatacccaatgatgctcttttgctgagatttttcatgccaccttttgactagacagatcaccaagtttaatcttatacaaatttcattgtctcttagtagagtccttgttctggatgatacacatatcctagttaaaagtgacattgtatccattgtcacataattgacttatgctcagcagattatgcttcaatcctttaacaagtaaaacattatctataggagggtatggaggaatgcatgctttacctactctaattattagacctttatgattccctccgaaagtgatcaccccgggcttaggaattggaacatagactnttcatctatcatgtgttgtgagtagccattggccaggtaccatgattggtgtttctttcctactatcaaa

SEQ ID NO: 116481 - DNA, 408 bp, Glycine max
tttgcaagttggaatcatttatcctatctccgacagttcttgggtgagtcccgtggaggtagtctcgaagataaccggtctcaccgtgttaaaaaatgagaaggatgagctgattcctactcgagtgcaaaacagttggagagtatgcatcgactataggaggctgaaccaggttaccaaaatgaaccattttccactgccattcattgaccagatgcttgaacggttggcaggtaaatctcactactgtttacttgatggtttttctggttatatgcaaatcactattgctcttgaggatcaggaaaaaaccacatgcacctgccccttcggcacttttgcctataggaggatgcctttcgtcctgtgcaatgcccctggtaccttccggcggtgcatgattagtat

SEQ ID NO: 116482 - DNA, 229 bp, Glycine max
acagcagaggacgataatgggaaactccaccatggacatgccaccgaagaagaggagaataagtgaaagaggccgcctccactagggaaaatgccataggaaaaagagcttccccaccaagaataaccttggataaaaagacttggaaaagatgcttccatggacgaaaaaaaatagggagagaaaaataaaggggggagcatagaaattgaagaacaaaaatgggaga

SEQ ID NO: 116483 - DNA, 373 bp, Glycine max
  unsure (1)..(373): unsure at all n locations
aaactccagctgtacatatgtcctaactcagtagtatgatactagaagttttatagcaagcacgtcntctatgtgcgaatgtatttattagaaagtttatatgactagaaacatgattcttgaggtagcctttatcaaggagtaggtatcagaagcctataatatcatagaatagaaaactaaaaatagagtaggctacactattcagaagcactcaccaaaagcaacaaaagaagatattatgcaatagtgtattaaggcattgcatctgaagcaacaagctctttagaagacacaagtgaagttggagaagaaagcttgttatcatctacaagtctaatccactcaggaaaccaaagagagaggatttttt

SEQ ID NO: 116484 - DNA, 268 bp, Glycine max
aactttctgcttttatctgtgaccacagagtggtacctggagatatgtcgcgggggtcaggagaccttggggacgtcacgtggggtgctattgcccaaaaccaagcttgaccaatcccgacccaacccgggcatagtcggtcagtgagaacctgtgatgtacctaagcaggcgagctcctggcagtcaacagattaaaggaaaacaagaccacaaagcaaggaggcttgtggtggctgaccagctgtgaattttgtgtaatatgtgga

SEQ ID NO: 116485 - DNA, 296 bp, Glycine max
tcaacttgtccacaaaaataggtttttgaagtttgtcatttcaatttctcactaagtaaaatggatcattttcaaggtccaacgccttaaaatgatcacttcttaagtaaaaaagaatcacttgataagaaagaactacctaggtctgattttctcatcccaattgaggaatacgtaggagcaaagggaaacacccttgtcgaccacaaaaagagaaaaaatataaaaagggtataaaggatataaagacataaaaagggaacataaaaaatcaaagtcacgtttgcacattcgat

SEQ ID NO: 116486 - DNA, 326 bp, Glycine max
gtgtcacccacccgaccggggactcttaagctaagcgatgcgcgcaagctacgattctgactttcaagctccgatgatatgctaggggaccactatctatcatccgcagctcgaagttctgatcggatgcttttgctcacagcttttgtcctgaacttcatgcttcgcggtatgctaggggacacaatcggaccaccaaggtagaagttcttgggaatagattttagtaaaagcttccgatctgaacttcgagcgtcgctgtctaataggggacgctatcggacatacaagctagaagatcttatcggttgctttggctgaaagct

SEQ ID NO: 116487 - DNA, 289 bp, Glycine max
ttgagcaaaatcaaacgataataactttttactcggatgtccgattgtgtcccgtagtatatcgagacgctcgaaattcagaacagaagctcttagaaaaatcaatcgacaataactttttactcggttgtccgattgtgtcccgtagtatatcgagatgcttgaaattcagaatagaagctctgagcaaaatcaaacgataataactttttgctcggatgtccgattgtgtcccgtagtatatcaagatgcttgaaattcagaatagaagctttgaacaaaatcaaac

SEQ ID NO: 116488 - DNA, 289 bp, Glycine max
caagctcatcatgagggagaagctacggtgacaacgctctagccccttgtggaacgccacagctctcacctcttatactttgtctggcgcgtacgtcaccttggggacaaatcgccgtgtgctgacctccttgaccctcagagatcccctccccttagaagctacgccaacgcgctactatcaggaggccaaggctcccaatgggaacacgaactcaaacgacacccgccctgcctcatcgataagagctttataaccgcgggtgacggacactacggccattttgttg

SEQ ID NO: 116489 - DNA, 294 bp, Glycine max
tcttatccaaggctcatcttggtggtgaagctccttttccatggcttattcccttgtggatggcgtctcctctcacctcttctcctttgtcttccgctgcatctccatggtggaaaatcaccattaaaggacctcattgaagctcaaagatccagcccccatagaagctccacaagcaagcttccatcagggggtcaaggctcgcgattgggacaagaagtcgaaggagacccgccctgccacatcagtaggagctttataagcgcgggtgtaggacacgaaggccaagttgtt

SEQ ID NO: 116490 - DNA, 269 bp, Glycine max
ctttactcttcaccggccataggcgcgagcaggatatctgacttgctcgcgacaatggatctgttcccacccatcgccaaacctattacaagcgtgaccgcgcgtggctcggcgattgccaagctggactttcgatacgtgaatccacgtgacagctccaacatgctggagccttctcccatcctcggaaacatccccatacctcttgggcccttcgctgccgatatcacgaccaaacgggacagagttttgatccctcggaaaaccac

SEQ ID NO: 116491 - DNA, 323 bp, Glycine max
tcgacacactagtgacacttaaatctcagctttgaatcggcacgtcatgctttacctgatcataggcgcgttggaggaaagtggagtaaatcgcgacaatgggtttgtacccaccaatcgccagacccgcaacaaaggtcaccgcgtgttgctcggcaattgccacgtcgaagtagcgatccgggaatttacgtgaaaactcgaccatgccggaaccttcacgcatcgccggagtaatcgccatcagcttgttgtctttcgctgccgtttcgcacaaccagtcgccaaagatttttgaatagctcggcaaaccgccgctactt

SEQ ID NO: 116492 - DNA, 288 bp, Glycine max
tgtctcagcggttatgtgataccgagaccaacatgttagccatcatcagcaaataccaagaagaattaaatatagccacggcccacgagcacaaagtggcggacgaatatgctcgagtgtacgtggaaaaggaggctagaggaagggtgattgactcgttacatcaagaggcaacgatgtggatggaccaatttgctcttactttgaacgggagtcaagaacttccccgattactggccaagtccaaagcaatggcggacgcctactccgcccccgaggagatccacg

SEQ ID NO: 116493 - DNA, 274 bp, Glycine max
tagagcacttcataccttttgatctcagttgacctcaatagtgtgaacctgagagatatgtactgggggtcacgaaaccttttggacgtaaggaggcgtgctactgcgcgcttaccagacataatcctctcaaccccacttgttctttggaaaactttattatcctgtgacttacctcatcgggctaacctctaccccacatccgttctggaatcgaacaccactactcggggatgcttgggcaggatccgctcagctccagatcttgattgat

SEQ ID NO: 116494 - DNA, 284 bp, Glycine max
tgaagtgaggaagtgtggatagtgagtcttcctacttttattcgttgaccacagagtggtacctggagatatgtcgcgggggtcaggagaccttggggacgtcaggtggggtgctattgcccaaaaccaagtttgaccaatcccgacccaacccgggcatagtcagtcagtgagaacctgtgatgtacctaaacaggcgagctcctagcagtcaaccgataaaagaacaaagaccacaaagcaaggaggcttgtgtggtggctggccagctatggatcttgagt

SEQ ID NO: 116495 - DNA, 328 bp, Glycine max
gccaacctatttccgggagactctataaagctcacccgccagcatgcaatctcaaaccctattcaatctaccatagcttcttactccgatgcgagatagaagtccctgcctatatgaagacgctcgaagttcaacgttgaatctctagcgcaatgcaatctaccatgactcattactacattgtatgatagagtcctggtctatatgcgtggcgctcgagcttgaacgttgaacctctaacgcatttctatctaccatgactctttactacgttggatgattgagtcctggcatatatcgagaccctcgaaattgaatgttgaatctc

SEQ ID NO: 116496 - DNA, 291 bp, Glycine max
tcaacattcaatttcgagcgtctcgatatattacgagtctcaatcaaacatccgagaaaaaagttattgtcgtttgaatttgctcagaggttcaacattcaatttcgagcgtctcgttatattacaggactcaatcagacatccgagtaaaaagttattgtcgtttgaattggctcaaagcttaaacattcaacttcgagcgtctcgatatattacgagactcaatcagacatccgagtaaaaagttattgtcgtgagaatgctctcagcatcttcacattattttgagcg

SEQ ID NO: 116497 - DNA, 321 bp, Glycine max
acccacctttacgggaactcttaagccacccgtggcaggctatcctttgtatcatccaaaaacaaatatttatggccttgatccttatcctggaaagcagcatatactcattagaataagaaggcgggagggcatttacttgcctttactaatacttctgctgcatgacgacggggatgacagttgtatgaacacgttaatataaaaaaatcacaatattatgtcataatactaatattgttgtgtgcatcttgccacacacctttattagggacatttcacctttcataccttttaatagcacacgctttcttttaccat

SEQ ID NO: 116498 - DNA, 292 bp, Glycine max
tgcagtggctttgctttggaaaagcaaaaaaaaaaaaaaaatgtacttcaatttctgttctgttaggcaaaaaattcacatttttattttttgtcgggagggaattttcttgcctttatattttctctgcttcatgttgttggggatgtctgtgagatgaacatgtaaagttgagattttttcaattatcttcaatttagcaagtttaattttgtgccctcaaaattccccttatcttccagttttcgatctctccaaccctttccgaaagatgcttccttttttactggtt

SEQ ID NO: 116499 - DNA, 329 bp, Glycine max
ccaacctatttacgggagattctataaaactcacccgtagcgcgtgcagagctttaatagatgctccaactatcttgttcggtggagaccattaatgaagactcaccacattggggatgctacagataatacgagagatgacaagcaattaggaggaataacttaactaaatctattgggcagaacgaaaattctcctctatacaaccctgttgatggatacttttccttataagaacgagacacctactcacaagggggaatagaatatagaaaagttaccttcctcgactaatgcacaagatatggaaccccctatccaatctatgt

SEQ ID NO: 116500 - DNA, 286 bp, Glycine max
tgcttgtgtggcttctatggtggctggatctttgagcttcaatgaggtcctttaatggtgattttccaccatggagatgcagcggaagacaaaggagaagagaagagaggaggcgccatccactagggaataagccatggaagaaggagcttcaccaccaagatgagccttggataagaagcttggagaggatgcttcaatggaggaaaagaaagagggagagaaagagagaggggggagcacgaaattgaaggaagaaaaagggagagaagttgaactttgagtt

SEQ ID NO: 116501 - DNA, 265 bp, Glycine max
cttttttcccttccgggcctgccatcactccgaaaatcttctcaatttcccttaatccagttctgagcaccatcagggttgtatcccccattgaatgaaagatggttgtttctttggaagcggtccaacccctagtactcaacagctccaccagcttctcccctatttggattccctatagcctgagctaaggcttgaagggcatcagctatcgcacagtcatttcgtccagccatcactccctatacacactagggagttagac

SEQ ID NO: 116502 - DNA, 331 bp, Glycine max
gtgcaccaccagtcaggagatattaatctacccgctgcatgcatgctatgcgccactctatgacaccacattgggtaatcgagcatccagtagactgcttctgaataacttatatacaccctgtgaccagctggagccgacttacttaaatcggttctcacttaacttaaaagtaatatctattttcaccggacgtttggaccgtactatacatagtcttcagatcaaaactatgccgaccgttcggactcgccctttccacctatgcaatcaatctgaggcaatcctttactatccttgtctctctataaccttcttgtgatattatgcg

SEQ ID NO: 116503 - DNA, 301 bp, Glycine max
cagcctttcgaatcaattcttttgccccgtagtggtccacattgtgtttcgggcatttttattctcggtttgtttactttttataccccctgttgacgtgcttaagccattttacttaagtcgtttctcgcttaacttaaaaataaaataaatttccaccgaacgtttgaattgtattatccattaacttcggttaaaatcaattccgaccgttcggtcgtgccgtaaccacgtcggaaatcaaaaagaggtaaaaaaataatataataatcaaaaaatatctttttagtgaaataaagcg

SEQ ID NO: 116504 - DNA, 286 bp, Glycine max
gtgcaagcttacacaacaatgctcagagatcactggggcgtataagagtgcactaggtgggcgcatgattgggcttgaatagcaaaagagagccgaccttgtgtcgagcctcaatgcttggcaatgacccctatgcctaaggcctttcactactaccactacttacaaaccattcgaacatgacacaaaccctatgaagagccacatatttggacatattcatacacagtaaatcccaatcagaagaccaatatgcatcattgaatacccagagcgctcatgaaag

SEQ ID NO: 116505 - DNA, 290 bp, Glycine max
ctttgggtccaagaaaaacaagttgttcaaagagaatcaggcttgtaaaggattggatgaataaatgttaaaatgtgtattgaaaagcaaatcaaagccttacttttatagactcttcatgtctggccaagacaaccatttagaagagttataacttttagaaaaacttaaaaccaatttgaaaaagtcaaaaaccttttgaagagttacatattttgatttattcagaaacagtcactagtaatcgattaccaaatcagtataattgattacacaaagcttttatgtga

SEQ ID NO: 116506 - DNA, 304 bp, Glycine max
agattctctaagctgacccgctggatgcaagctacattattggttcaagctctctataaaacattgtttctcgcgaaagactgacgctatgattgcgcataggccctaaatgcctgaatttgccccaaatagcacttagatgaggtttggataacagctcattatatgactcaaccaaagggcagtagacggtgcgtcttataaagatgcccctaagtttatataacttgcactgctaattcttgttatacactcttacacgaacttttcctaagaacttagcgatgactgcatgggtagtttc

SEQ ID NO: 116507 - DNA, 290 bp, Glycine max
ttatgtgttaactaacattattttttcgtgcagcctataagacattgtttctcatgagagactaacattattatttctaattgaacaaaaataactgaatttgtccaaattagaaataaaatttggtttgataaacaactcaatatatgtctcaaccaaattcaaatgaaattgagtcttttaaagcaacacaaaagtttctatagcttcaactgcaactttatgtcatacccacatagatgaatctttcattatcacttacagatgactccataggtagtatcgtatag

SEQ ID NO: 116508 - DNA, 383 bp, Glycine max
agactctatagaactcacccgccagcatgcatgcacatagtatccagaacatccatagctatctttgcctggcaagcactcacgccaatagctaaatcatgtgagtcttgtacaagtaaacataggtatcagtcttttgctaatgtaacatagcataatcatacctgcttacatgactgcttaatgcgatgctgataactcagctatggcatgtccattactgctataaagactaatagagctacatggactaacaaactagaaatgaattgttgacacatataaatgacatgtgcctgagagcacagatgccgcaagtcttagaactgtggttgtacatggcctctatgataatgcaccttagtgctgcttacatactgggt

SEQ ID NO: 116509 - DNA, 311 bp, Glycine max
cacctgcaggcaagccaatgtggtccacaaatgcacgaggatttgctatcgagtgccatccactgcttcatcagtgcgtgcttattaccgcactacgaataccgtcgtgcaccctcatatataggtgaagagagggatatggatatactctacacacctttcctctatgaaagggacctctcgactctctatatctcaaaagtgctgacaaaccctcagcgcactgactaaagacgaaaggcgacagggggaaacccaaccttagccctttccctgatcaaataaaaccgacaaactcccaatggaacata

SEQ ID NO: 116510 - DNA, 290 bp, Glycine max
ttgccaatacctgtggttttattccatgccaattgggaatgtctcccctctagtaatgtagctggtggccttttatgcatttggaataatgaatcctatgtgatggatagaagggttgtgggaaatggttttattttgctggaaggtaagtgggtaaaggaaaataaggttataatcaccaatgtctatgccccctgtgatttacaaaggaagagaaatcaatgggaagaacttctgcagttgaaatcctcttatcatgatgaattgtggtgcatcttaggtgacttcaa

SEQ ID NO: 116511 - DNA, 248 bp, Glycine max
cgatggcatgtaacatggagagctttaatcttgatgcacatcctatatgtgatatacccatgcctctgtatgaccattgcatcactggcatcagactactgaagtgataccaccgactgataacttttacttgctcctttgacccttgacctacagaagatacttaggcataatcaagacgattataatgttaacccccgaatatgacaccaataggccacatcctagactaatgataagccaaagac

SEQ ID NO: 116512 - DNA, 287 bp, Glycine max
tgggtgaaatcaatatttgttttatgatataccttgatggcgtggtatcatgtaaagttgtaactcttgatgtaaattttataggtcatataactttgtacatgtatgtatattatatcacggtttcaactacagaatttttatttgtgactataaatcttcacttttccttttaaaattagtagactgtaaagacttatgcatgatataatccattattattttaacccatgaatatgactttgaagggctacatttgtgacttttgagaagtaaagttatttgat

SEQ ID NO: 116513 - DNA, 333 bp, Glycine max
cgccaacctagttacgtgagactctataaagctcacccgcgagcagtgcatacgggtgcatgggagaccaagataccataatcatctaaagcatcctaggtggacgcaagagctggagacaatgcggggcatggccttcaatacgtgatgagctagacaaagcatgctccatgacatacatttatgcctagcatcattactaatctttaggagcccactaacagatcactggggacacactcacccacccaggctaagacttttcacccacaatctggctatctagggacaacccgaggaattataaaaacgcactgaagaacaagctttgtt

SEQ ID NO: 116514 - DNA, 292 bp, Glycine max
tgagtgtccatatgggtgcatgcatgatcagttttgcataagtttctaaatcatcgttgttataggcgtgtcatggaaataatgtggggcattcccttttatccctgaaccgctggccaaagcaagtaccctgacatacgtcatgtcctgccttctataaagcctctttgagccaaaacctcaatccttcggccctaagtctccacccaggctaggaatttttacccttatcctcgaaaaaaaagaagaacaagaggatctaaaaaaatgaaaggaagaaaaagcttcattt

SEQ ID NO: 116515 - DNA, 214 bp, Glycine max
ctgaccgacaaaactgctactaacaagtgtatgtcatgatactctttttggtccttcttgcatcctgtgtcacacgttcttgtattgatagacatatgatgctctcttgacaatcttacttgataaaactttcatgagaagctactttaacaaatctttcactgcaagctctagctcaagctctcacacccactgctataacttacttcatctc

SEQ ID NO: 116516 - DNA, 289 bp, Glycine max
tttaactcatatttcaagatcatgccttcaacttgcgactgatccctttcatctctttggagcttaagctcattgttgctgccccacaaagctcctcggaacttgttttggtcgtgttcttctttttgggccttcttggtttctcgttccaaggcttcggcggtggcgatattgatgtcctttagttcatcgtactcctttcagactttgatggcgttgacttgaacttctatttgactgctcgggcttgttcaagctttgcttttaaggcttgtacctcctcactttc

SEQ ID NO: 116517 - DNA, 306 bp, Glycine max
attctatagaactcacccgttagcatgcaatctttaatcgtgaaagctatgagcgaactcgctattacacacaagattgacgctgcagactgggtattcacctatcatacttaccctgttgccacaaggttggctaaatatctctatgctgatgcaaccaaatccaaatataattttggaaactatatctttgatcaaactgctacacattcataatcttttgctatcaaattacccatcgccttccctactgcattatgtgggattatgttgagtcaacatcccaatatgttaaactacactgac

SEQ ID NO: 116518 - DNA, 285 bp, Glycine max
tcaacattcaatttcgagtgtctcgatatatgacgggactcaatcagacatccgagtaaaacgttattgtcgtttgaattggctcagagcttcaacattcaatttcgagggtctcgatatattgcgggactcaatcagacatccgagtaaaaagttattgtcgtttgaattggctcagagcttcaacattcaatttcgagagtctcgatatatgacgggactcaatcagacatccgagtaaaatgttattgtcgtttgaattggctcagagcttcaacattcaat

SEQ ID NO: 116519 - DNA, 237 bp, Glycine max
cgaggcgtgcgagcttgagtatcttatagattccccgttaccgcgctgcaattccatggatcatgctgcgtactacgagaaactggtcttcgctttacaattccccagactgtgcaaaccctgaccttacccagcttaatctgctgtgcctaaatactgatttcactaactttcgttatatcgaacatgctgccacctatcgagcttgcaaacctgtgctcccccttaattgaaaaa

SEQ ID NO: 116520 - DNA, 318 bp, Glycine max
agattatataatgctgacccgcgagcatacgagctgcccaggctatacctttccgctaaagattgcggataccacatagggcaacctggctatatgcctcctggggcaagctacctccgggacatcccgtggggtgccattgcccaccatctacttgggcctattattaccggacttgatcataaattggcacgatcaatctgccttgcacctaaaccggcgagctactgtcaaaccattcatcagaggaacttagaccacaacgctgggaagctggaggaggcttgacaactatctatctctattgaaaatatggat

SEQ ID NO: 116521 - DNA, 259 bp, Glycine max
ttttattcggttgaccacagaatgggacctggaaaattttcgcggggggtaggaaaaccttgggacgtcaagtggggtgccattgcccaaaaccaagcttgaccaattccaacccaactcgggcatagtcggtcagtgagaacctgtgatgtacctaaacaggcgagctcctggcagtcaacagataaaaggaacaaagaccacaaagcaaggaggcttgtggtggctggccagctatgaacttgattgatatgtggga

SEQ ID NO: 116522 - DNA, 308 bp, Glycine max
agactatataccccccaagcttagcagccgggctcaggtatactaatgtcaactggtcacgaaatgcaaatatgatcttccgaatacatcgtagaccgcacgaccatgccctcctgaataactgctgccaaatgcaccagcggaggagcgcctcagactcaacgcttttagcctattgctatccactacggctttctaacctctattgttggtcctatgcaataaagttatttctgttgttaacgctcagcgatcattgtttgtgaaaacatagccctacgatcgattataatctggtccaacgtccc

SEQ ID NO: 116523 - DNA, 278 bp, Glycine max
ggtctgggattttttatgtcaagtggtcgcgaaatgcgaagaagatgttcccagtaccttggatttgggacgaccctgccctcctgatttccagctgggaaattggcgagtggaggaacgcctcggcatttacgcaacgagcataatgtaaacctttacggatttaaaagctctataattgggcctaggctttagagtttttccttttgttaaggctttgtgtcttttgtttttgaatttataatacaaggatctttcttcatctgttcctacgtctc

SEQ ID NO: 116524 - DNA, 317 bp, Glycine max
agtatctacaactgacgcgctggcatgcttgctacttgagatttctagctaggatcaattctattcaaacctcgttgtactcatatgatcgcacacccaaacggtcgaaacgtctaccagccgaagacttttcccgctggtaacctcgcattggcacaatctcaccggtaggctaaacgtttcgcgggggtacctacggctttccataaaccattgtgtcgcattcacacttcaagcctcatctctgaaccgccagggctgaccgggtttgcatgactactgcacacatgtcaataccaaccagcttgccactaatg

SEQ ID NO: 116525 - DNA, 289 bp, Glycine max
ttcttattaggtcctaatgacattttaagcttgggttaactcactttaacctccatttaccacagaattcagacttaaccttccaactctcaaagcctcattctttttccactcataacatcacattctcactttctaaccctaggttaaactctaccattcatctctaacagttttccataagcaatttcaacatataaacatcacaaacatcatcacaaaaaccctaaaacagagtgggtatgtctaactcatccaaacatggcaatttcaacaagctttcaacaaa

SEQ ID NO: 116526 - DNA, 319 bp, Glycine max
cgtgagattctctactgctcaaccgcatgcatgcatgctgaatgattataatgaagttgtgccataccttgtacgtcgtatagatatctataaaggatgtgatccatttatgaccattagcatggcggtgtgggatccttacaggactttgctatgattggctataaagatacaatcttcgctgagcacactgcttatactaggttaatagcttacccttattgctctatacacatgtcttaacttgggaaagatccaatgtactcaattcttctttcttcactaatacactgaaccactaaagtgcaatgcgtactag

SEQ ID NO: 116527 - DNA, 295 bp, Glycine max
tatttatttatactgaatgactattatgaagttttgccatgcatagtacgtcataaagatttagtgaaggaaagtgatccaaaaatgtccaagaatagggtgttgaaagaacataacaagacttttctaaattggtttaaagatacaatctttgctgacgataatgcttctaaaacgttaataaagttagcagatgggtcgaaaaaaatgttataacttgggaaggatacgatataaacaagtattcattctacatgaaaacacaagacgacgagagtacaatgcataatagtgg

SEQ ID NO: 116528 - DNA, 288 bp, Glycine max
gccaactagtattttctataagacccgacttatgcgctctactaaccaaaatgaacccttccccaaaaagctctatgaactccatccttcttacccaatatgcagagtgattatcctgctttataagtggccgacttatgctcatatatacatagtcctaacacctatcccattatatcaataacggactttggaccatatgaatgtgccacatccctgcctttccaacaaacctatcattcctggccaagatcttctacctatacgactatccttcacatcacttat

SEQ ID NO: 116529 - DNA, 293 bp, Glycine max
tttaccacccaagtattattttctattaagccacttctggctctaaaacaaatcaaccttttcaaaaagttgttgatctctatccttcttacccaatttccagattgattatcattttttttaatttcccaacttagtatcagatataaatattcctaatacctatcgaatcatagtaataaaggacattgaaagaaatgaagttgtaacatcccttcctttccaacaaaccaatcattcctgtaaaagattttctctttatttgactttctttcacatcacttattattttc

SEQ ID NO: 116530 - DNA, 311 bp, Glycine max
agattctctagaactacccgatgcatgcgagcttatggtcctcttcgggacctcaactcggtggctaatctaccgtaaccaattgcctccctcatccagctattctgctcagcacaatctgggctaaaattatggggactgtcaactatcacccctcgtggaagaattccaataaatcctaagagctcccctctggcgaaagaaaccatacctgctctcagggatttatacctgctctactcgcacttctatgatcttccccaccttttcgaacgaattataccacctaaagcaactcacaaacggggttg

SEQ ID NO: 116531 - DNA, 292 bp, Glycine max
ttgaaaagagttgttttttttcttctcgctaagccaatccgctggcttaacgagcctccgctaagcgcaacactcattggctaagcgcaaggaagaatctggaagaagatgagttgtacaggttcactaagcacaccgcttcagtccatccgctaagcgagaaaggcacgcactaagccgaaattcattaatgtgcgctaagcgattcaaagttgcgctaagcgcacaagcatgaacaaagccacctatttaagcctgaaatcggatttagagaagcgcacaagcatgtcta

SEQ ID NO: 116532 - DNA, 271 bp, Glycine max
ttttttaattctcatagtgcgggatcaacgttggttcaccatcccgtctttgaattgcagacgatgagttttcaacaaggacgtacttgcatgcattccaatttgtgacccaccatcctccctggttggggttgccttcgtaatacatctccggagtatgcattccatacactattgaactctaaatcctatacttattgggaagaattcctactattataaatacgttgtggcagacctatccccaacaacctttttcctgtgctagaac

SEQ ID NO: 116533 - DNA, 285 bp, Glycine max
tattccaccaaacctgacttttattagtactcgtgttgctggaacagcgtaagttcaccatttgtcttcaattgcaaaggagagttttcaattagttcatattgggaatttttccgttttgttcctaccatcctccttgtttggttttgcagtggttatctagcacctgaatatgcaatccgaaatcaagtgactacaaaatcggatgtatatagttttggagttctactattagaaattgttagtgggagacctaacacaaacagacgtttacctgttgaagaa

SEQ ID NO: 116534 - DNA, 281 bp, Glycine max
acatctcgtggatccaatcttcgcgcacatttctatccccgcacctgcccgtatgactgtatcctccatgcacagagcccacatattacaacactctttggccatggcattcaagcattttaccactcactagggcgcccctcgtagacgcgctaataacgacgatcgggggcactgcgctatgctcccatgcctactcgacacgccttatgcctccagccatcgcctaccatcccgcctctacatccttaccaacgtggaaccaacccaacactgcctta

SEQ ID NO: 116535 - DNA, 286 bp, Glycine max
ttgcttctacatctctggcctaatcttcttggagtcttctatccaatgcccttgcggggtaggactgtatcatcaatgtttggtttacatagtcaacaatcattggccatggtaagcaagcaatttcaaacttcttaaggcactcatcaaagtcttgctcagaaggacaatccaccaaactcccctaggcttccatgcataatcccatgcattttttttaccaaccagggttttacattttgccttgacattcttatcaatgtgaaaccaacacaacaaattggta

SEQ ID NO: 116536 - DNA, 315 bp, Glycine max
agattctctaaagcccacccgtctgctttgctgtctaaggatctccatggacagtggctttattctcgcgtaggtgcatgcaacacgaactgtcatccaacgtccgctttgactaatacgcgggtagagatacaagaatacctgtgccgatcaagccaaactgtggaatatactgcttgcctgttatcttatatccgtggaaatttgatccctttaacgcgggaatcacagtcccttgttttgacgctgggtgatttaccttatacaccgttccgtgactctacttaatttttactaacaacttaccggaggaag

SEQ ID NO: 116537 - DNA, 294 bp, Glycine max
ttcctttcttgtaaaagatttaaaagttcacttatataattctttcattcatgcttgaaacaagtaaaataatccaactaagcataaactaatacaagtagaaggataagaaaaaccagtaaatgatcaaaccaaactgtattttattcatattccatgtagtcttagatacatggaaatttgatcacatgaaccccattattctagtccctttttttgacacaagtaaattaacaagaaacaacattgagtgacactacttaattataacaaacaaattaacggaataagtga

SEQ ID NO: 116538 - DNA, 343 bp, Glycine max
cccgttacgtgagattctctagagctcaaccgtatgcatgcagagctggtctatctccttgtcaaagaaagtaataatctctttaaaacttggggagaaagacctaccaaactacatacttcatagagagaaacatcactatacaactatggacctctaaactataacataggggctttatgaaaagagatcatgatgattctccaatatttaatgtgaatgagcgaactttggatacttcacgctctcacatgatcttcaacgttataacctgcactaatcgaagaatagaatgtcacaatgagcgttgatgggctaaggtgattccactttatcacgactg

SEQ ID NO: 116539 - DNA, 289 bp, Glycine max
tatagttgagttaggtctcactcttctcaaacaaacttctcttcctttaaaattttgggattttgccttccaaactacagtttatttgataaacagactttccactatctctcttaagtttcaacttggttatatttgttttattcaaaaagtcacctaattataattttttggggaactttggatcttcttgctatcctttttcttagaccttataacaagcacaagcttgatttcaagtcacatgagtgtttatttcttggttattccacttctcacaaaggttaca

SEQ ID NO: 116540 - DNA, 329 bp, Glycine max
gccaacctcttacgggagactctataaaactcacccgccagcatgcaaccttgaaagcgccactctgcaagactatctaaacctggatactcacaatatatattataggcgaccgcgtatacttactacccaacccaaaaacttgccttcacactagaggattaaaatggtggatatgcgctatctatttgtgaccattaaaacttgcaaacgaacaaccttatacccactctcctacctgctgaaacttacgaagattacaacgcagatgaacatcattcgccatcatcgcgactacaagatcgccacctcccgtagactcagacatc

SEQ ID NO: 116541 - DNA, 286 bp, Glycine max
tcacaatcagaccttaaaacggccaagctgaagactaagaaaactgaaaccacagtatatatatagaggagtaacaaaatttactaagcaaaccaaagtattgcataagcagtaatggagtcaaattggggttatttgctaactctttataaccattaagacttacaaacgcataaccaataaaatagcatcatcagtgctgagacttgcagaattttcattgtagatgatgattatgtgtgataattgcgattacaagaagccaacaccaggagactcagacatt

SEQ ID NO: 116542 - DNA, 280 bp, Glycine max
tgcaagcttgtgccctactttccacaagaaaacggtaacacgtgatgtctgtggtactggcatacgtatttgtcacatacatgtacaaccttttaaggggaaagtggagacaatgacctctccgctccgtgctagaattagaccatgtttggactagtaaggtcataataactaataatacccccaaatatggaccttttaagacgagtctaaacatcccgtgagatgcatagctagaagaacgcgctcgaaaattatgacgtcacctatctatctcaca

SEQ ID NO: 116543 - DNA, 292 bp, Glycine max
ttaatataatttttgttcaatactttagacttaaaataattcttaagcatgtcttgatcgtgtggaactgggaaaggaagttgtaattaacatgtataacctctaaaggggaaagttgtgaagatgacatttatgttcagtgatagaaaatgaagttgtatggttttgtaaggtcattttatcttatgatacccccaattataaacaatttaggacgaatcaattgaacccgttagctgcagattaaaagtttctgcttgataaaaatgatgtcactaataattttcaaatt

SEQ ID NO: 116544 - DNA, 256 bp, Glycine max
acatggagtctcacattaacacttttctaccgatccacacttgcactgtggccctagatgcacgggagaccctgataccctctcgtgaaggaacctccaagaggaagaggatcaaagtgcttacgtggactgcgtatgactgatgcttgaaaatcaaggagggcgcatgtatagttcacttgcacatggtccttcttgatttggacaaagatagcgctgccgcgagggaaatgatctctgacgaatttcagtgtga

SEQ ID NO: 116545 - DNA, 292 bp, Glycine max
ttggatggtttattcaaaggtttttacaagaacattttcagactggtcaacacttgcccaatgggccaagaagcctgggaaaacctgaaaaccacttatgaaggaacctccaaagtgaagatgtccagattgcagctgttggctacaaaattcgaaaatctgaagatgaaggaggaagaatgtattcatgacttccacatgaacattcttgaaattgccaatgcttgcactgccttgggagaaagaataactgatgaaaagctggtgagaaagatcctcagatccttgccta

SEQ ID NO: 116546 - DNA, 351 bp, Glycine max
taatactcacccgcaggcatgcaatgcttgcccatattctcagaagctgacgtggcgaaaagctcacttgcgcggctctggactgtacctcctagaccgcacgggaccatggcatgatgaatcgttacttattgttcgagctactgatatagaaactcctgctcgagtctccactaatctctcagagcattacactctagtgtgctataacgaataagtatataattaattcttgatgcgacatgactctttagcttaagtgtagcatagcgttgctcacttgcttgtacaatccatttttcctttctcttggatcacataagtaattagcactaattctgctattcttgt

SEQ ID NO: 116547 - DNA, 290 bp, Glycine max
ctcagctgggaaaataaaaaaatttctagaagcagaatgctagaaataccttggcagctctggttgtagctctagacccacgggaaatggcagtttcatgtttctcaatgttgaaaaaagatatagagctgtgcttgagttcagcaaaatctaagagcttccacctatgtattaaaacaaaaagataaaattaaaactcatggagagtttagtaaagaaggacagaggttctcattgcagtaaataaagtaccagctttgttcaataagaattgcacaatctgctagctt

SEQ ID NO: 116548 - DNA, 289 bp, Glycine max
taagctaaacgtgcctgcaaacgtaagtacagagcaaatgaaagtgttaagtgacaatgaaaaactgatggacgatctgggggcaaatgtcacgccggctatctattacatgagtaaggaaaatacgctacaacaggccgtggggttgcccgatcagaaaacgcttaatatcattatggggaataaataaaaggtaattcatggatggttgaactatatccctgcttttcaaccatcctaaaaaagcatgaattgctcgctctgccctaagtggctgtgctattttaga

SEQ ID NO: 116549 - DNA, 323 bp, Glycine max
tacgtgacactattaaattctacagcttggctttttggcaaaaccctttttaaaaaaaaggggtacctggtaccatgaggttccacccccttgtctaacatgtgggaaaagagcatctgagtcttttcagcttgtcccacttcagaaaatttttgtataagaatgttatatgttttcaaattcccgcaacagccacttgaaaacatcccatcccaaagcttccttgcaggacgcagtagatcctccttaaaacacgcttccattatgtaattataagacgagacgttggggcagaaccctttcttcttcatctcctgcagaac

SEQ ID NO: 116550 - DNA, 242 bp, Glycine max
gtaaaggtgagcactgatacatggaggtttgaacctgcataatggaccaccacattactttttaataaacgggcatatatcgcacataatgagcaaacttatacccttgctggactctgatagacctggtctaataagaacgtgttcatttaactcatcgcaactccactttcaaagtctcaatggctatgcaaaactagtcctttgtttgtatcctcgtacatcaaaatgcactattttca

SEQ ID NO: 116551 - DNA, 290 bp, Glycine max
tccatgcaatacactttttttttgagatattagtaaatgtttgagttggacgggaggtataagccatcatagtagacccacagaagaattttttctagaggtatatatatggcatcgtgtatgaatcttatatacatcatggactatgtcattcttgctctcattggaacctgttgatttaactaaacagaagttgactttgaaggtttagacggcttctagaatctagttaatcatcacaaccgtgtttcttacaagtcaataattttacacatgccattgttgacttg

SEQ ID NO: 116552 - DNA, 281 bp, Glycine max
agcttgcatgatttacattctccccctttatcaagaaaatacttacttcttcttgacatcatcaagaacttcatgatttacattctccccctttctcaagaaaattcttaattttgcttgacatcatcaaaatcttcatgatttacattctccccctttttgatgatgacaaccacctgtaggttaggagcaacaacaaagaaaaaatatctatttgcatatagtttactcccccttggttttgcaatgattgcttatatgagacagttgaacatttcata

SEQ ID NO: 116553 - DNA, 290 bp, Glycine max
tgggggaccaattgctttcattttgtttatgcttatctatttctgtcttacttccttatctgtttgttgaaaatgaagtgactgcattgctgagaaatttgagttacacaatacaatagagaagtgctgagctatctttttattttttttatttctcagccactgcttgtatatttatatataaaacagaaagagagagaggagataagctgcctttggataaggattagatactcagcttccctcacactcaacatgacaacacataaaacttaatacacactcaacct

SEQ ID NO: 116554 - DNA, 250 bp, Glycine max
agatgtgctacttatctatcgacaccctaccaatcctgcgtacaaagaggcgcctcgtgtgctaactattacctccaccatggggcttccactctgaagctatacatgcccacttctcacccagagtctgcttatgaaaccgatcctaccaccctttctaaacaccgtctcgcaaaggcggactctacgtcctttctgcaatggaataaaaagggttacctaaagtattaccaaattgcacctgccacaa

SEQ ID NO: 116555 - DNA, 285 bp, Glycine max
tgaaggtgtgtagcccattttcttttcatagtagaatactggtaatgtgtctactatcattgtcatcatttttttctctgtcattgaggtgccacttgagctgccaggtctctccacctttgggcgtattcttttgaaagatttgtgccccctttttgcacatgttctgtagttgcatcctatccgaagacattattctgacactgcctaacgaaggcaaccactaggtccttccaagaatggactcgggaaggttccaagttagtgtaccaggtaacagctacc

SEQ ID NO: 116556 - DNA, 337 bp, Glycine max
acgccaacccatttacgagagattatataatactcacccgcttgcatgctggaatgatttatactatatacaatgagcctgtggatgaaaccctgacagataatgccgaacaatactggccactcattgataaggaatgccttagccgagccgattcctacatcgggagacctatacagttgggagagtactccattgtctattcagaagccggaaccttccgtgccatctatgaccatggacctgctggcttcaatgaccagatgcttgaagtcctgtcaggttgataccactactgattccttgatggtgaccatgggcttgagcgaattactat

SEQ ID NO: 116557 - DNA, 287 bp, Glycine max
tttgcaagctggaatcatttattctatctccgatagccaatgggtgagtcccgtccaggtagtcccgaagaagactggcctcacaatgatcagaaatgagaaggaggagctgattcctactcgggtgcagaacagttggagagtctgcattgactataggaggctgaaccaggttaccaaaaaggaccattttcccctgccattcaatgaccagatgcttgaacgcctggcaggtaaatcccactactgtttccttgatggtttttctggttatatgcaaattacta

SEQ ID NO: 116558 - DNA, 288 bp, Glycine max
cataccttctgaaagtgaagaccatgagaattttcctatggtaaaataccaccatctcaataaaggggacaccattatgcttgtactgacacacacatatcatatgatatcacacatcttatcttccaagctcatctgtgtgcatagacaatacctatgaggatttgtaatgactacaagtgaatagtattgaaacactttactctcacgctgtgacctatagagtctcaatatttcctacggattgaggacattatcatcatcctgtttttattaaattgataacag

SEQ ID NO: 116559 - DNA, 291 bp, Glycine max
tctaatggatacttcttgcaggtgagcctctgcgtttttacctattctaatattctttcaacaaaaaaatggagacattaaaatacttctactgccacacacgtttttatctattttaatatatattttaggcttatctgtgtacagagacaataacaaagttaatttgaattaagtagttgggaaaactattcaaatcctctactattaggctgaaccttagtgagtttagatatttaataaggtttgatgacattatcataatcttgaaaaaattaaatagataaaagc

SEQ ID NO: 116560 - DNA, 286 bp, Glycine max
tttctttctcaatcaatctgtctactgactaacaattctaattgcaagttctcattcttgttctttctttgtctaacatacacacttgctgaaactcatgaaaagaaacataaacttcatcacaatcatgcattcaattcaaaaccaaatgatacaccaattttcacaaaaagataaaagtgttttactgccatatcatcaaaatcaagtcaaactgttccatatgcttctaaatgagcaaaccaattatcgataaataaaactagcagtgtataaaaacataaaa

SEQ ID NO: 116561 - DNA, 302 bp, Glycine max
actctataaagctcacccgtcggcaagcactcgtgaaaattataatctcagtgcttgctgccccctcctccatatttgagaacaacaccatcgacactttgactcaaacggaacaatctcgcgattgattcttatcgatactctcttgagaggatctcttgctgatatgacccctgctgaagctttgaatatgaatgacacgatgggtttcttctccctactgaccattgcaacaaatgaagctaatgatcttacaggagtccctgttgaggctacaaattccatcttgtctagcgtaaata

SEQ ID NO: 116562 - DNA, 286 bp, Glycine max
tgtacgagtactgggaaagattcaagaaattgtgtgcaagctgtccccaccaccagatttctgagcaactccttcttcaatatttctatgagggacttagcaacatgataggagtatcattgattttgccagtggtggagctcttggtgatatgacccctgctgaagctaggaatttgattgagaagatggcttccaactcccaacaattcagtgcaagaaatgatgctattgttcttagaggagtccatgaggtggctacagattcatccttatctattgaaaat

SEQ ID NO: 116563 - DNA, 245 bp, Glycine max
cccattcaagccattctgatgctccttctaagactactgaaacacttgttgcatgcgaaacagtccactgcacagtgataatcacctcgctgcagagtgtcaaatcctattctgggaacaagccaacaactccaagagctgaatttctcattacttaactttcctgatctgtacttaacacgactgtacacccatcggccattccctaatcatccactaagccggtctacatgccctactttgaa

SEQ ID NO: 116564 - DNA, 292 bp, Glycine max
ctttgcggatttggtcttcgcctttttaggatcgatgtgggtccgaaaagaagccaatttgatcatcctactaagacgactgagaaaactggggcaaatgaagagggtgagaaagagggagaaacccatgctgtgactgccattcctatacggccaagtttcccaccaaacccaacaatgtcattactcagtcaataacaaacctcctccttacccaccacccagttatccacaaaggccatccctaaatcaaccataaagcctgtctaccgcacttccaatgacgaagacc

SEQ ID NO: 116565 - DNA, 307 bp, Glycine max
ttcttaagctacccgtagcttgcaagcgactggcgcttgcgaggctattttcaagttgttgcgatgataatcatgccgttcactgggactaggatcgtcgggtggcactctaaacgattaaaccgtgcctcaagcatcctactttgctcgtgcctccgtcgcccggcagaccccttatcctatacatgaatgtgtaacatgactcaatggagtgtgttctgggacaacacttcaagactgaagaagaggatctgactgcctgtttcttgatccagaggtccacggtctgcgagatgaacatcttatt

SEQ ID NO: 116566 - DNA, 217 bp, Glycine max
tgattggtcaaagtgggcgttcttaaggattaaacggtgcctcatgaatcctcctttgctcgtgccaccggtgcccggaagaccccttatcctatacatgattgtgttagatgagtcgatggagtgtgtgctgggacagcacgacgagtctgaaaaaagggaacagactgtctattacttgagcaagaagttcacggcatgcgagatgaactacttt

SEQ ID NO: 116567 - DNA, 273 bp, Glycine max
cctttaaaatctaacctcggttgctgcttctgttatgatcaacctgatgatgctaatcataataccacctttttgtagctaacctcaagtctaatgcgtaacctgtctaagagtggttctcaatttcaagatgggttaaccctttgccaatagccaaaccctttctattaggcggtgtcaaccgaacctgtacagtgaataaaaacacagctaacctttgctatttatactatataattctgacatattaattcaagacctttcaagccatta

SEQ ID NO: 116568 - DNA, 290 bp, Glycine max
tctatgacctgcttgcatggttttgatcaacttgttgatgctatcataatcagcccttttaagtagtcccatgtctaatgcctaatctggatatgaatggtactgaatttcaagattggttaacccattgccaatagcaaaaccctttttattatacggggtcaaaggaatcaatacaatgaagaaaaaaacaattaacctttcatagttatactataaattatgagatattaattaaagacctttagatttatatatatatatatatatatgaattccttcttttgctt

SEQ ID NO: 116569 - DNA, 131 bp, Glycine max
tcactccaacaacatatgtgaatcctagatctccacattattttttgatatatacaaatatgcgtatactgtatagtaataattctccatattagaaacatacgtattctatgcagaattacactatatgt

SEQ ID NO: 116570 - DNA, 295 bp, Glycine max
aagcttaagcttggtagccaagggctcttgaatggttatatatctagcacaagaattgagccacattttaattgattgtttctatatattcatcacaacaatagaacctgactcaaatatttttttaacaaatcttcttaatatatctctagaagctagagcagtgataataagggagatgcatcaatacatgacatcaagatagatagcaaccgtgatgttgtaataattctacaaagttcactaatgtgataggactttgattgtgatccctactaaaaaccaagcttaacaa

SEQ ID NO: 116571 - DNA, 293 bp, Glycine max
tcatccgcagatccctcatgtatgattaagtttcgatcttgcttcaatcaagttctaaggcaacattacattttcgaatgctaaaatcacccaattgtgcatacaaatgggtgatcagaccaaaagcatacaaacatcaagcattgaatgaagcattgaacacagaaaacacaatcaattagatattatgtatttacatcagctattcattagaaatcccaactagggtgtttagccagccattacaaagaaaccctaaccataaatgagcttacaaaacctacgtatctctg

SEQ ID NO: 116572 - DNA, 314 bp, Glycine max
atcctatacagcccacccgcaagcatgccagctagcttgctttcataaatctcccactttgaggggaagaccacacatgcccacattcatatatataacaccgctcagcccgcttgcttgaatcctgaatggaagtattatatcgccaccctcagggagggggacattgatcatgcagctgactcccaaagtttgatcatgaacatcatcattgttattaacttgacgcgaaccccctgatttaacttaaaactggaacctgactttaaaagtacctaattggggcttacaacgagcactttaatttcttgcct

SEQ ID NO: 116573 - DNA, 290 bp, Glycine max
taacaaacttagaaatttttttatcatgaattccaaaatatagggggagtaaacgcatgcacattttatctatatacaattgtttgttgcttgcttgaatcttgatttcaggtattgtattgtcatcatcaaaaagggggagattgtagatgcaattggctttgatgttttgatgatgatcatgatgatgtgttgcaattgatgcaaatgggcttttcaagattaaattcaagacaatacttcaagattacaagtcacaacatcaagatgatcactagaatattaggaag

SEQ ID NO: 116574 - DNA, 292 bp, Glycine max
gtatgcgaactcatgggctaaacatatccctaagagtcctataacgatgttgtatgagacctctggtctgagaaagaaaatagtggctgaatgctcaaaaacagtaatattcttaatcaccaggcggagataaagcgtcagaatgctgaaaaggctcacaaagcacacaatgatcacgatgctcgctttgcctatacttgtatgatatgaactatttgtttactgatcccatggttgtaaataacgtgaattgaccgtagccctgcactatgtgcaaaccataatgagttct

SEQ ID NO: 116575 - DNA, 290 bp, Glycine max
ttcataagtgaaatcaggtgtcttccatctccctaagagtcctctcacgaggtggaggttgagccatgttctcagtatgaaaattagtagttgaatgctcaaaatcagaatatttagaatcaccaacaacagaatgctcagaatgctcaaaatgctcacaatgcacagaatgatcaggatgcacactatgcctagcaatctatgataggttctatctatttcaggatcaaagggttgtaaatcacctggattgcccctagtcatgcactatatgcagcaaataatgggtt

SEQ ID NO: 116576 - DNA, 312 bp, Glycine max
accgggagattctataaagctcacccgttcgcatgccaacttgaaatcgatccatcatgctgagctttgaatgagactttcaaagatagagaggtgaccataggaggaggacacatccccactacttggatttcttatatcttccatatactctgctcattgatggaacggaagcttccctactatggacagctaaatcctcatatgggccttcctatggggtacttgatctaaatactatcatatgcacctaatgatgacatatgagttcactatgctaacagtacttaattctagagcgccttcgccttg

SEQ ID NO: 116577 - DNA, 288 bp, Glycine max
tccgttgttcaattttgagtcttctcgatatattatgcgcctgaatctgactttcgagttaaaagttatgaccatttgaatttctcgagagcttccgttgttgaatttggagcgtctcgatatattatgtgcctgaatcggacatccgagttaaaagttatgaccgtttgaatttcttataagcttccgttgttcaatttcgagcatctcgatatattatgcgcctgaatctgacatccgagttaaaagttatgaccatttcaatttcacgagcgcttccattgttca

SEQ ID NO: 116578 - DNA, 294 bp, Glycine max
actcaagcaggaaggagccgagaagctttttttcattactccctctcacacttcacactggcttgtttcaaacatggaatctatttttacctaaaaaagtcattggctcacatagatgctccttttctctgctcgcttaagattctgggcgttctatacatccggttggatatattccacatctgtcaaacaacaaaaacccttttcctgtccaagcctttcttttctttcttttgcatgatgaaatgcactaacttgacgatttgttgtgtttcaatttttcgtgtctttttc

SEQ ID NO: 116579 - DNA, 331 bp, Glycine max
gccaacctagttacgtgagattctataaagctcacccgcatgccttgcctgcaacctgactttatggtgcgcctaaacaagttatgttctataacctatgacaatccctgcccttacctacgcatataatagacgaacttcttaatcgagttactatcccactactggtttcatatactacaacatctccaacatctcattcggttcctgcaaacaattaccgattgatattaaacgatccccggtttgatggcaccgatcttctatgtaggatattcatattcatccattacctcgaatgccacggctcacctataaatgaaggactaac

SEQ ID NO: 116580 - DNA, 294 bp, Glycine max
tttccttcacttcaacctgttctttaggggtgctcaaaaaagttagttttctaaaaaataactataacttacaataactaggtatataatatacagttatataaaagtagttataaaaccataactagttttataaaaatagttatttcaaataacttattttttttttaaaaaaaaatagttatagttataaaactataaccagttttatagaatagttatttcaaataacttatttttattcatccataaccagttatgtaactagttttatatataacttgttatattcat

SEQ ID NO: 116581 - DNA, 277 bp, Glycine max
tagaactcacccgttagcatgcatgcccgtcatgtaactacttaggaagccgagggatatactataccaagacctcccatctcttacgtagtgggataccactgctgaaaaactctcatgctactatttatatatgctatatatacatatctttgtgaagccatatatcaatgaccttatgttctctatataatacccccacatgctattataatgtaacataaagcgaattggactgctgatgaaggaaaatgaatacagtataattgaaaggccc

SEQ ID NO: 116582 - DNA, 284 bp, Glycine max
tcaagaattatggcctcatcaaactacttgtttcccgaaggaaattctataaatagacctcccatctttaatggagtgggttaccactactggaaaacccgcatgcaaatctttatagaggcaattgatttaaatatttgggaagccatataacaaggaccttatgttccctctataatagccagaagtgcaacaatagaaaaacctagagtagattggactgaggaagaaagaagattagtacaatataatttaaaggccaaaaatattattacatctgcctt

SEQ ID NO: 116583 - DNA, 232 bp, Glycine max
gctttctcatgtgtgaacggctccactcttgcttatggacataattatggtgtatctccttaaaacgatgtctacagatgattgaactgcaatcactacagaagctatattctctgacagagtgtactaactaatacttactgagacttaatgctaaaaatgatccttgtgagatttggatccagacttctggctggaaagctggggctactttatctcctgggcagcaagg

SEQ ID NO: 116584 - DNA, 275 bp, Glycine max
tacattatgtcttttaatttaatgtcggtctttctcatatatatcatggctccgctcttggttatggacttaattatggtatatctctataagactataactacaataagtagaattgcaataactacagaagttatatttttttaaagaatatattaactattattttttaataaatatttagaaatttgataaatattagcttttgataaatacttttttttaaaaaaaaaaatctacaagtatcctgtgcaagaggtcattttgtttgtgtg

SEQ ID NO: 116585 - DNA, 55 bp, Glycine max
atgcccacgcgtatactagactctggcaatatctcacctatcatagagtgtttat

SEQ ID NO: 116586 - DNA, 369 bp, Glycine max
  unsure (1)..(369): unsure at all n locations
ccccccccccccttcccggaaacgtaggatggatagagagtacatcaaaacgcccnnttgtgctctctacgcccggaacgttaactaaccgagctggcgcttcaccctgttaatatcgctgccaacaccagaaacttcactgctgccaccagctcgatctgcatcaagaacttaattcttcacatcagacccaccactgtcattatgatgatgacctcgttagcacagagaaaatcgccccaggtaaagaacaggggatgaagaccttggtagcgctcatgcctgcaaaccacagaaaatgtgacagatatggagacacttgcgccctaatacaatgcacacccaactccgccctctcgaccggcctta

SEQ ID NO: 116587 - DNA, 287 bp, Glycine max
tctgcttgtcgtcttcgcccttgttttaacgctgccaacatcagattcttcactgctgccaccatctctatctggaacaggaactccatcctccaactcagccccaccacggtcattattattattacctcttttgttcatgtccaatctcttcttcaaaggaacatgggatgaatacctctgtggtttcttgcctgcaccctcatcagagttttcatctctggagtcacttccaccatcagagaatgctgcaccagcaccaccctcacgtttggcctttgagttct

SEQ ID NO: 116588 - DNA, 262 bp, Glycine max
cttaacactttcctaccgatccatacttgccctgtggtcctagatgcacgggagagcctgataccctctcgtgaaggaacctacaagaggaagaggatcaaagagcttacgtggactgcgtatgactgatgcttgaaaatgaaggagggcgcatgtattgttcacttgcacatggaccttcttgttttggacagagctagcgctgccgcgagggaactgttctctgacgaatttcagtggacatggagtcccctatccttgc

SEQ ID NO: 116589 - DNA, 290 bp, Glycine max
ttgaatgctctattcaatggagtttacaagaacatcttcagactgatcaacacttgcacagtggccaaagatgcatgggagaccctgaaaaccactcatgaaggaacctccaaagtgaagatgtccagattgcagctgttggctacaaaattcgaaaatctgaagatgaaggaggaagaatgtattcatgacttccacatgaacattcttgaaattgccaatgcttgcactgccttgggagaaagaataactgatgaaaagctggtgagaaagatcctcagatccttgcc

SEQ ID NO: 116590 - DNA, 312 bp, Glycine max
actatctaaaactgacccgccagcatgcttgcatcctaactttttttgtggccaacttatcgaccagggatcaaagctacaggagccctttttacggctaagacgcgtgcaatatcccacctcaccgattggacactaactaccgtattctcaatccaccccatggcttcctccatcgtacataattacatttattcccctacagaatcaatttataccggcgtggattatggcccatgcccctgaatgaaaagttctggactggtgaagaaaccccatgcttacgcgactttcttaatcgcccacgaatgc

SEQ ID NO: 116591 - DNA, 296 bp, Glycine max
gcttcaagttgcttggatagcaacttgttttgggccaacaaagcgtcctgtgatgaaagctccagcaggcttcttttggttaggatgtgtgctctatcacgcaagattgcatggtcactagcagccatattctcaatcaattccatggcttcttcaggggtcttcaattttatttttccccctacagaagcatctaaaagctgcttggattatggccttaacccgtcaatgaaaatagctggattggttctgaaaatccatgagtaggcgtctttcttagtaacccacgaaagctt

SEQ ID NO: 116592 - DNA, 255 bp, Glycine max
aaacatgaggtgcctgggacggccaccctaacgtattggtgcaaccttcggcttcatgactcaccctaaactaccatgccatgaagatcctacctcaaccgaatctacgagcatgaacgcttccctgtatccaggtactcttgacacctatttcctatctcttcacacatgcaaaaacaacatccacttgcttccccctacaatgatcccaaactagcctactacatgccaatatgcatgagggataaaactgag

SEQ ID NO: 116593 - DNA, 296 bp, Glycine max
tcaagcttaaacaagaatggccaatcttatggcatctcaagatcattgatttgcctaaggacttctaccattacatattggtgcaactttgggcataatgactaacccaaaaataagatgtgaatgaaatctagcacaaccaaatttttgagcatgattgctttattgaaatcaagtactcttgaaacttctttcctagttctttacacatttaaaatagtagcaatcttgcttcccacgatagtgtttccaaagttggctactacatgccgctatccatgattgataattgggag

SEQ ID NO: 116594 - DNA, 172 bp, Glycine max
atgaggaatcattcgaaccttacatggtccaatccttcacctaataccccacgtcatcggcaccctattattctaaatcctagtgaccaagacatgccatacgttgatactccattctattattgacgaccacaacatgcctactaacaacatacagttgaggcttctacac

SEQ ID NO: 116595 - DNA, 287 bp, Glycine max
tgggaggattgatggggacccggtgttgagagaaacgaagatatgggctacgtgggagtacgtgagctcagttggaggtgggcaataggggatggtgggtttatgcgcgcattgtggatgtggaaaacttgttgtgcaccatcgcccgaccgccacctagtaccacatgtgatgggtaccccataatcctacaagcttgagatgaggaagtgttgaagggtgaaacttcctgcttttattgttgaccacagagtggtacctggagatatgtcgcgggggtcaggaga

SEQ ID NO: 116596 - DNA, 310 bp, Glycine max
agattctatagagctcacccgtaagggagcaagctcactgttattcctaaaaaattacgggactatcggatgaaagcatgaagaactcggttagaccacctcctagagactatctccctgggcagcggaaaacaatatgtttagaaactatatgggggaaacttgaacggtaacgataaatctgtagtgtattgcacatgatgctgtgtgcgtggaaaaagcgatagtgtataatgtcattcgaggaccattgttgatcgcttcagaaggcttaacactcatcgcgatagaatccgtaaagtttcgtgag

SEQ ID NO: 116597 - DNA, 273 bp, Glycine max
taatggagtaggagcactatttttttaaaaaaaattaagtcaaacacgtgatcaaatcagaatcactcgtttaatcaaacaactgaaaactttttaactggacaacagaaaagaatatgtttaagagctatatggtggaaactttcaaggtagagattaatctcttgtagtttgcaaatgatactcttttcatgggaaatgctagtgtgtagaatgtgattgtgttgaaagggatgctttgattttgagcttgtgtaaggttaatagtgaatt

SEQ ID NO: 116598 - DNA, 287 bp, Glycine max
tgaagtgagaaagtgtgggatattcagtcttcctacttttattcgttgaccacagagtggtacctgaagatatgtctcgggggtcacgataccttggggacgtcaggtggggtgctatttcccaaaaccaagctttaccaatcccgacccaacccgggcatagttagtcagtgagaacctgtgatgtacctaaacatgcgagctcctcccagtcaaccgattaaagactaaagtccacgaagcaaggaggcttgtgtggcggatggccagctatgaatctttagtga

SEQ ID NO: 116599 - DNA, 273 bp, Glycine max
tatcccactactaattggtctctaaaccgttgagtagcctgtgaagagcacctctatcaattaccactcataaacatctacccattgaaatggatacatgcaaactctaattgatataacgattttaattaatattaaaggtttgcacgaatcattaagactttagtaatctatatcgctcttgataatatacattattactattgatcaacttttttagattgattctattaagctataggctctatggatggttgagacacaagtattcta

SEQ ID NO: 116600 - DNA, 294 bp, Glycine max
tttcctctcctataagaattgttaaagacgactaattagttataaccaaaaagtaataaataaaaagcacaactattattttttctcaaaaatattaattaattaagatgaaaacaattaaatacaaagtgatataacgaatctaattaatattaaaggtttagaagaataataaaaactattatcatttaaattgctctaaaaaatatttatcatttaaattaatcaactttcttagttttcttaaattagttaaaaggttttatggaaagttttgacacaagtattaagaaa

SEQ ID NO: 116601 - DNA, 287 bp, Glycine max
tccacttattagtgcacaactccttcaagaatttagcatatcttggaatttgctttattgcatccaacagaggtatgtttattttccaattctagattcaagcccaatgcttcattaattcctgaaattagattaaaaacatcaaattagctaaatgggcccaaataataaaactgtctaattaattttacaattaagactaatcagtacttaaaatggtgcaaaaagggttaagaaataggagaaaataatggcacatcagcgactcccacacattttctttttta

SEQ ID NO: 116602 - DNA, 262 bp, Glycine max
ctttgccaataaccacctgggcctttcatacccaacttcggcatgggatataaatgttcatataaggcacacaagtccctcatattaccagatgctacaatcagagctcttatggaactctaccatgggtgtcgcctaaacatggcattaactaccacattggccactgacttaacgtattgatagacaacctacattactgtatgttctctacccaatacgcgcgccttcagaacaacatgactttgacctatgctgtact

SEQ ID NO: 116603 - DNA, 293 bp, Glycine max
ctttccctttttgaacaaatacctctcagccaaatagaatccatcttgggcctttttcccacaactcttggaaatgggaagataatgttcatctaaagcatacaagtccctaatattatcaaatcctaaaatttgagctcttagggagcaaaacaatgtgtgtctcctagagagggcatcaactaccacatttgttttttcctttttgtatttgataacatatggaaattactctaggtactctacccattttgcatgccttttgtttaactttctttgccctctaatgtact

SEQ ID NO: 116604 - DNA, 216 bp, Glycine max
gactggtcctcttgctatgctctatagatgaatatcttaaacactcgtgctcgagatactcaaaatgctcaaaacgctcgatatgcccactttgatcgagatgcgcactatgcctaactactctatgaagagctctatccattatatgactcctgtggcagtaattgacctctattggacctacacatgtactatggccttcaactacattgtatt

SEQ ID NO: 116605 - DNA, 292 bp, Glycine max
ttcataaatgaaaatcggtgctttcatctccctaagagtcctctcaagaagtggaagttgaaccatgttctcagtatgaaaattagtagttgaatgctcaaaatcagaatattcaaaatcaccagtaacaggatactcaaaatgctcaaaatgctcgaaatgcacagaatgatcaggatgcacactatgcctaactaatctatgaaaagttctatctatttcaagatcaaagggctgtaaatcacctggattgtccctagtcatgtactatatgcatcaaatagtgtgttct

SEQ ID NO: 116606 - DNA, 250 bp, Glycine max
taagctaggcctgctatcttaagtttgatggatctgtaatatgctgacgggtatacgtttagcacaaggtgtggatactgatcgtaacggggctattattagccaacttgagcttatagcagcaaacatagatctgcatggtttcaactatccagctgctcctagaagtgggggacctatgagtcgcatctattgagatcctaagagggattggcctgacaattgcatataaaatcgccagcaaacaatg

SEQ ID NO: 116607 - DNA, 289 bp, Glycine max
tgccacaactatgtgaagtttgtttcaatatgttatttggtgactggtattggtttacaaaggttggagaatgatcgtgatgtgttgtctatgagccaaattgagcttattgatccagaaaaagaagtgcatgtatacttagaaaatgttgatctagagggggggtcctattaatgaaattgggccagtgattgaagtgcatgcaatgcctataaattgcagtgcagaaaatgtggctgaggctgttgctgaagagtgtactcagaacggtattgaagatatggatgtt

SEQ ID NO: 116608 - DNA, 316 bp, Glycine max
agattatctacaactgacccgaggccagcaagcttacatgcatgctaatgatactgtgagcaatcccctattttacgtggggttgctcccaaagggaggcgcacctactctcacctctataccgttcgactgaactagactcccatggtgaaagctcatcttctaaagaccacattggaaacttagcagatccatgaccacatgttactgccctacaaacatgacatccttagattacgatcaggagctgtgagtctctaacgaaaccaatgggctgctaccactgcctacagcaactaacctaaatggtggttca

SEQ ID NO: 116609 - DNA, 288 bp, Glycine max
tggccaattaagcgtacattgcatccaaatgagactttagcaatacagattccatgtgggtgctcagaaagtgagtctcaagtagttgtcacctatacggtccaactgaacgatacaccaatgatgattgctaatctcctaaattctacattgctgacatgcagaacatgaacaaggttctggctccaaacatgaaattcatagattttgattaggtgctatttgttcctaaggaatccaatgggctactactactacctagtgctactaacaaagaaggtggtttct

SEQ ID NO: 116610 - DNA, 303 bp, Glycine max
tactcaagcttcaagaattagccgtatgattttctcctgaaaaatatcttattttcaaccaaaaaaaaatccttaataagaatggtcaaccggctgagtcggtcaggttagaaccagaagtccaaattgacctaacccgcaggttgactcttggagacctaaacccgtccaaatggactttcaattcaagttaagtgagtttcaagttagaagggtacaggttaaccagtacaattataggtcttgaaaatcattgttacccccaacttgcaaataacctcaaatacaaagcagaattgcgaa

SEQ ID NO: 116611 - DNA, 260 bp, Glycine max
gattctttgacacccgataaatttgatgagtgccctgtaccacttaaacgtcacacgcctggcacactagactaggcataacggataaagcttacaatcgagagactaagttttcataccatcaaaccctgggtgcaggagtgaatacatgcccatgccaacattatctcgatggggtttaagaccaactataagcatgacctgattgttacagagtgatccaacgacaccgactcagaccctcaatttaaaattcataa

SEQ ID NO: 116612 - DNA, 288 bp, Glycine max
tatcatcttttctgagtgttatgatagccttgagtttatttgacttgttgttctttaccaaaaaaaattatgaatacacttaagcaacctcatccataggcataaacttagaaggcttatcatttgtgttcataaggtttttcaaaattaaaatacacagggttttggacttaatagataccaaaccagacattataaccattgtgtttagggtttataagaggtagaatcccatcaccacacccatattttccacgaaccacttggacccacaatttagaattctca

SEQ ID NO: 116613 - DNA, 315 bp, Glycine max
agattatatagagctgacccgtagctatgcaacccttattcttcttaccactcaccacggattcctggaaatacttgagatggatacgatggggcctatgacagtcgctagccttggtggacagaggtatgccgctgatgccgtggactacttgaatggacaaactccggggccctttagaagaaagaacctatactgatttgatgtataacaggggttgcatctttgactcatgagctaaaaggactgccctatggttaaaaacaacactaaggccggcttaaaattctataacccaatgctctctgagttttg

SEQ ID NO: 116614 - DNA, 291 bp, Glycine max
tagctacaaccccttatttttttctaagttcacccccattccaaaaatacatgaaaataaaaaaaaagtccctactacaaacactactcaaaatgccctgaaataaaaggctaaaaccctatactactagaatggccaaaatacaaggcccaaaagaagaaaaaacctattctgatatttataaagaagagtggatccaaccttgacccatgggctcaaaaatctaccctaaggttcacgagaaccctagggccttctttagtagctctagcccaatcctcttggagtctt

SEQ ID NO: 116615 - DNA, 291 bp, Glycine max
tacccgccgcagcatgccctttatttcgctttattggccgaaagaaactatatatgaggggccccctattattgaaggaaagggatatggatacaaggagaattctaatgcgtatcttactcgaggctctttacttaaacattcgacaatccatacacatgcgaccatatgtaccctccgtagcggccgtaaatacctcttttgagaaacctatctaaaaaagctcttatgataaaacatgattgagacactacaacttaaaggctcacaccgctattacttctgccctca

SEQ ID NO: 116616 - DNA, 284 bp, Glycine max
tcaagaataatggcctcatttatcttcgtattcccaaaaggaaactctataaataggcctcctatttttaatggagagggctatcactactggaaaatccgaatgcaaattttcattgaggcaatagacttaaacatttgggaatccatagaagttggaccttatgtacccaccatggtggctggaaatacaacaatagagaaacctatagaagagtggtctgaagatgaaagaagattagtgcactacaatttaaaggctaaaaatgtcattacttctgccct

SEQ ID NO: 116617 - DNA, 307 bp, Glycine max
ctctctaaagctcaaccttggatgtgcaaccttgggttgtgcttgtgcgagaactaatccctgattgttttactgcctatgggattcccatgcagaggacagctttgcctcggacgactagcttaaaaaatctgcttactattcccaactatgtgcatagaatgacgctaaaggaagggtgatctattcttttcaccaataggcactcatgttattggaccggtatgttatctccttgtactgaaggcaatatcttccatgtgaattaaccaaggccaccgctatggcaaacacctactacgacctg

SEQ ID NO: 116618 - DNA, 289 bp, Glycine max
tggatggataacccatggatgtgcttggaagagaactatcgttgatcaatttactgcccatgggtttctaatgcaggggacaactatgtttaggaggaatggctcgaagaatatgcatactactacgagcagtggtaattgtatggccataatgttggaattttctattccaataattaatgtgggctaatattataagacaattatattagctatttatcattagtgggttttattttatgtgatcaaattaagtgagcccattagacaactaaatcagatgatatga

SEQ ID NO: 116619 - DNA, 286 bp, Glycine max
taacccaattattctttcataaagtctctccaatcttcatgcccttaatagcatttgctagtagactcacacaatacctattgtgttcactatgaactttagaagcactaatctcttgattactcttctaacctttttcctctaacctaagagaatgtgcactacaccttttgggataacttctactgaggctcatcgtatcaaggtgtttacaaaatctcctatgaatttggctccatctagagtttttttgctaaggaaatttcttcctattagggtattctgg

SEQ ID NO: 116620 - DNA, 299 bp, Glycine max
ttaagctacccgcagcgtgccaccttcccttgcggggatttcatcctcgggcaatgctatatatcagacggcaacgataataccgcccacccctccaaaaccttctaccagaatatcgcggaccacatggcctcgcaaggataacttttaataacagaccccgacgaggcttagaactcctgagatacggctacaactagaccctgaccggagttcatttgaaacagattgcatgaccttgattacgatcagctcacacttacggaagaactgactggataatactagccacacccttt

SEQ ID NO: 116621 - DNA, 283 bp, Glycine max
ttattgtgccctctcccctttgcggggatttcttcttcggcgaaagcgagataattgttggcagtgatattattgaccagccctccgaaaccttctaccgagatgtcttgggccacatgggcctcgttcagaagttttattagcagagcccgatgaggctcggagctcatgagtaactccaacagcgagaccctggccggagttttgttgagctgtttgataaccttgaattcgctctgctgaattatacggaggaactcactggcttcttctagcggcacct

SEQ ID NO: 116622 - DNA, 338 bp, Glycine max
tgtgctcccaccattccgtgagattcttaatctacccgcagcatgctagcttgactaagacattgccacaatgctctctttgacccaccacatgcacggtatgcccgcacttctatgtgactgagcaggctaacatggctaagtacggcctgcaaggtggaccacctttgagccagatttgaccattgcttacgacccttttttctagatgataaagctgaacctacgtctaaactaaccacgttagctactatgactccccgggtcatctgtgtacgctcacccactatgaaaataactctatacaatccacacaacgctatctcagccataatggg

SEQ ID NO: 116623 - DNA, 291 bp, Glycine max
tgaaaggtataactggaacatgattaagctaacggctattcatgatgcagccaaaatgtaacgcgagactttgtattttgctttttaagataccaggtggacctacggccccagagcggaccaccagttgaatgattgggcccttgcttaagtcactatctctagctgcaaaaggtgatcctgatatgaacctgatctttctagctaatgcataacccaaggtcacctggttggctcacccataatgaaagaagatctatttattgcacaatacgcaatttaagcctcaaa

SEQ ID NO: 116624 - DNA, 268 bp, Glycine max
atagcccattccaaggtgaacacttaaccaaaggcacccttgcttaatgaggcgtcctatgaaaatgtatcgcgaaattgaccattagtggcatcaaaatgattatccaaagttccatattgatcactatctctatatatctaatgcctaatatatatatgctagcctcgtgaatgtagagtaagatatacacagatactacatacaactttgatatcaccccgaatacggacgggtatcatcatatatagcatagacttctactagg

SEQ ID NO: 116625 - DNA, 289 bp, Glycine max
ttaaaacttaaatcatcccttactaagcccattccaagttgatctcttaacaaaatgaacctttccttaattaagggttttctgaaaatgttaacaaggtgaccattagtgggtacaaattgtagttccaatgttcccttctgaacacgatctcttaaaaacttatgcctaatttctatatgcttgcctcgtgaatgtagagtaggatttttagagatacttaatacaactttgttatcacagtggatagggatgttttcttcatatatatcatagtcttctagttggc

SEQ ID NO: 116626 - DNA, 216 bp, Glycine max
ctttagcatgaacgaagagatccttaggtagaatgagacacccatacaatttgaaggctctcggttgtggaagaaactcttttccttattgacttgatggctatgcctggccacctgtaggatgggtgataattccttgatgatacatgattgggaatcacatgctcacgttcagtgacgtgacctgatttcaagcaacgctccatcctactaaga

SEQ ID NO: 116627 - DNA, 255 bp, Glycine max
aactatccactactcaagcttgtatctggtgcaaatctgatttattcttgacgtatgacttgatggacccacttggggcgctataacatgagcgcagggatccatttggagaatggcacttctatcctcaatgttgacgatccagtgatcaacagactattctgcatgttcgaaaaaaggctatacctggctggccgagtgaaggaggagacttgtggcgtgacttaacgatgggctatcccaacgccactgcca

SEQ ID NO: 116628 - DNA, 297 bp, Glycine max
ctgacccgcggcatgcaatcttctccccgatcttctatgattacggggaaaagcgaatctggaaaaggttcatgcaatgacgcactgggtctttgtttctaattgggccccgaagattacttacttcaccaaaagccaagcctacgcactctcttaacgtaaccgtaccgatctcgacaaagatttcgccaaggcttgcgaccgttcttcaacgtccttaattcgttcttcagagtacttcaggcttcaatgggtaacttcctgaaaccaacctaatcgatccattcgatgaacccg

SEQ ID NO: 116629 - DNA, 313 bp, Glycine max
tgacgctattaaatacttcagcttgccacccagctcgtccaagctagctaagttgcttcctccaaaaggcggttctggtggaacttcttggaaggcccaagtgggcctggttgctatttgcacccccatgtttactaaatacaccccctgccttttttgctgattctttttccgtaacgttacggatctttacgaatcacgtaacgatacttgtttcctttccgtaatgtcacgaaacctttttacggattacgtaatcatcccttttttggctttcggaatgttacagaacatcacggattgtgcaacaatg

SEQ ID NO: 116630 - DNA, 318 bp, Glycine max
  unsure (1)..(318): unsure at all n locations
agactctctagaactcacccgtctgcatgcaagctttgtttaaacaaaagtattgagccttgtgatgacgccccccaatgaatatcctcttanaaagaccattgaccctgcgggctctgcctggaatggccccctattcttcatcttactcggaccctttattcccgatcatctatataataatatgcacaaacgcattatcgcattatgcgcgccccaactcttcgtgactgcacatgatccgatttatatttccttgaccgtgttgcttcgattcatttatcaattaatcctgacttttcaatcaatcattgtatg

SEQ ID NO: 116631 - DNA, 291 bp, Glycine max
ttaataaatttctatttaatagataagattatgatcatctaatgatgtggtagtttttatatcttttaataaactattgtttagctgaagctgatgggatttttgttttatttttagagttacaaggaaccttatatcccgttcatattttgaattagtttgttagacttatatcacattaggcggtttcaacttaagtttaaacaacaaaaccaattcataattaaaagaccgaaatttattgattcagttataaattaatatgaatttttgaaacaatcattgtaagca

SEQ ID NO: 116632 - DNA, 287 bp, Glycine max
tgtcactatttccctttcttttctgctatagaattgcaataaaataaaaagtcttttgtgtttcaaataatttaatgtagattaaattaaagtttgaaactctgtagtataccttattcatcaatggttaataagatttgaatgagaatcattaattcaaacctaatagtaccttagtcctttttttgcagccagctaggagaaaaaaaataagtgtattctatatgcatttactatcactatatatagatgctgcttcctaactgtgtagatacttaaatgttatg

SEQ ID NO: 116633 - DNA, 296 bp, Glycine max
cttaagctacccgggctgctgcttctgattgtgtcacgagcgattcatcgataacatggccttctgttgattgactctgagctgggcgacgagtatcgatgatgttcttgatgatcccactatgtgcagactactgcctcgctgattctggcatgatcttacagattgtgtccacctcattcccacattctgatttcatggttgacgtgtgaccatttcggactcctcatgtttcgtattccatactccatatttgactcgatattataacttctcatcttgctttcactgcactg

SEQ ID NO: 116634 - DNA, 286 bp, Glycine max
tgttcttgatttttcctaagttctgtaacaagcttagaacaataaacttggccttctcttaattgtctttgggcttggcgaccacgatcaataaagtactttcggcacctactatatgttgacttcaccaacgctgttattggaatgctgcgacaatctttcaacaccttattcacacattctgataagttggttgtcatgtgaccatatcgtcgtccagatgtatcgtaagccatgctccatttttcctttgagattcgatcaatccatcttgctatagctggac

SEQ ID NO: 116635 - DNA, 294 bp, Glycine max
agactctataaactcacccgccgcttgcataccccaggtgggctggctgatacaagcacgccacctattgactaaactgaccaccaaatgaactcttatactaatggcatggactcctagaataggccctgtcccggatgaatcacatactctatctctaagagacattgttgccatcgtaacataattgacatatgctcaacagattatacttcaaatctttatcactacaaacttttttttttggagggcctggaagaatgcatgcttgaccaaccctagttcttaaacctt

SEQ ID NO: 116636 - DNA, 289 bp, Glycine max
tcttatgtcatacccaatgatgctctttgactgagagtaagcatgccaccttttgactagacagatcaccaagtttaatcttatacaaatttcattgtctcttagtagagtccttgttctggatgatacacatatcctagttaaaagtgacattgtatccattgtcacataattgacttatgctcagcagattatgcttcaatcctttaacaagtaaaacattatctataggagggtatggaggaatgcatgctttacctactctaattattagacctttatgattccc

SEQ ID NO: 116637 - DNA, 274 bp, Glycine max
tgcagatcccgcatggcttttcgtacccatcctcacaatgattgtaaaagggaccatcgatcccctggtaagcttggatagacctagagaacactccgaggtgtgttgatacgcgttaaacatgggcataagacgatcgttgactcggaacggacgattcttggcatatgcttccacacaactcttgatgcaagccatgacttattcaaccctttatctaaagctggctgacgtggccttcctccttactaagcgactgcttcactgtgcgcca

SEQ ID NO: 116638 - DNA, 289 bp, Glycine max
tttgtgtgcgatacccagtgtgagcatagtttccagacacttaaggagaaattgacaaccgctccagtgctagttttgcctaattcgagagaaccctttgaggtgtattgtgatgcatcaaagatgggtttaggaggagtgttgatgcaaaatggccaagtagtggcctatgcttctagacaactcaagacccatgagaggaattatcccacccatgatctagagctggctgttgtggtttttgcccttaagatgtggaggcattacttgtttggctccaagtttaagg

SEQ ID NO: 116639 - DNA, 305 bp, Glycine max
agactctctagagctcacccttatgcctcctagcctgtttgctgggctggtatgaacgttgtgtcttgctattgaatgatgccccttgagtggtgagttattcaccttgagattgccaccgaagacttatgagagaacgggagtggactcaccctttattatgaaatctctcatgtgaaagagaactttgcggccaacatgaaccttggataacatatttgatgaggatacttgcctggaggaacacttggagggccatatccattattgtgtgtgctcgatattggttggcaattaatggagtg

SEQ ID NO: 116640 - DNA, 290 bp, Glycine max
tattaccagtaaacgtctatctagatgggatgaaccttttgttattactaatgtttttccccacggtgtagttgagattaaaaatgaaattaccagcaaagtcttcaaagtgaacggtcatcaactcaagctttttcatgagagctctcatgtgaaggaggagtttgtggcaaacctctctttggtctcgcctattttatgtgatgatgtgccttgaataacacttgaggagccttttcccttcttttatatgttgtctctttgtttgcatttcattgcatgctcacatt

SEQ ID NO: 116641 - DNA, 275 bp, Glycine max
gcaagcatgtctgctccacaatgccatacggagacccacagtgctctctatcgggctcagctctcccattactccttttctagcctcggtctcgctaacgtatagatccttgtgactttgcccaattttctgctgaaagataggcttgctgaatggtgatttaatctacactgcggtaggcaaccctgcggttggatcgtatcgcgcttaccttgaccgggaagctagatctactccaattgctatggtttgccattgcttcggtagacacctac

SEQ ID NO: 116642 - DNA, 285 bp, Glycine max
ttatattgttgaaaggttagcttcacattgtcattttgtgtttcttgtttcctttcttgggctaagctatccccttcctccttttctgcactgatattgttaatgtttgaaccttgagacttgtaaaaattttctgcaagaggatagccatgctttttgtagcattcatctacagtgtggtcagtaaaaccacaatatgtacatagcttgcttcttcttcctcttgagtttcctctactaaagtcactttggtttcctcttccttctctagaagcataattttga

SEQ ID NO: 116643 - DNA, 310 bp, Glycine max
cccgtccgggagattcttaagctacccgaggcatgcaagctggcttttttatgacagcgccggatgtacatttgactctagcaaaactgcttgatgcactgggctccctactgttcacagtaacgcttgccccctacggattaccgacgatgctgggggagctttagccctcgctccttctgatggtcacatatgggatcaaatgttttgagtggactccgttcatctacgctaaaagtactttacggcctgaaaggattattaatacacccggaatggatacatcaagcttactcccattggacgatat

SEQ ID NO: 116644 - DNA, 232 bp, Glycine max
  unsure (1)..(232): unsure at all n locations
tggtcttcttcttttggtatgtattgtcgctccacctctaactgtcatcttctatccatttttggttatatttgcagaaaacttattttttggtcccttattgtctgagcccatcaaaattaattttantgttctgctctacaacttgatgatcgagagcgaaagcctaatgggttattcaaagcttgtttattcacagtattcttatttacatttgtgtcttgtttcaaca

SEQ ID NO: 116645 - DNA, 391 bp, Glycine max
  unsure (1)..(391): unsure at all n locations
ccatatttcttacaacgtctttggcaaacatttttaccgaaaaatcccctatcatcaggcactcttactaaatattaccctacttccaagtggatttgtaacttacatcacacacatctccttggcttaattcacatacatgcatactcaaagcattttcgggtaccatanattgcacatgtgcacatcttggtattttaatacctatacatacaccaacttcatgatgaatcttgactatctacacaataaggtgctacatttcatgctgctttcaagtatttgctacctaaagccgcatgcanattcaagatattttctttgctactanattgattcaattaaaggttacattttcggtacgtatctcttacatacatgaacatattat

SEQ ID NO: 116646 - DNA, 289 bp, Glycine max
ctcgtaaacgagtcacgttgaccgtgatctccaaattgttgcactcacaacctttcattttgacgtggacttgaaaatgctggagtggcttagatctaaaactcggagaaccttatgaactttaaaaactctgactgctcgtgaacctcccgctcgtacgagcttgtaattggtgactccagacttactgattaccgtggactgaaaattgagggtaaactcgtccaagctttattacatcccttgtttgagtagaaagtttctctttttctcatattaagtcagcttt

SEQ ID NO: 116647 - DNA, 255 bp, Glycine max
cttgatgcttactctagcaattcaacgacataactttgctcgctatcgattgagctgtaaatatcgaacgctcaaatgaatgtgagctctggcaatcaacgacaaaacgtttactcggtgctgaggagcctgaatatatcaacgctgaattaatccgagctctgcattatcaacaacatacttttatcggagttgatgagccgtaaattcagacctcaattgatccaactctgacaatcaacacatacttttctc

SEQ ID NO: 116648 - DNA, 298 bp, Glycine max
  unsure (1)..(298): unsure at all n locations
ggcattcttcttctttgccctgtgcccgattctttgcattacgttgtggagaacgaatcaaacttcctcttttcatccaacctcgattctttccccggcaaacaccagatccgcaaagctggacggcatgtaacccactagcttctcatagtagaacactggcagagtgtctaccatcatggtgatcatctctctctcaaccatgggaggagctacttgtgccgccagatccctccatcgctgcgcatattctntanagggttcaccctctttcttgaacatattctgcagttgagta

SEQ ID NO: 116649 - DNA, 384 bp, Glycine max
  unsure (1)..(384): unsure at all n locations
tctcccgctttntgatgatgatagctnctgaaatcaatatacacacacacactntttcctagtcgatcactcacataaattctccccctttgggtttgaatntatgcttcacttganattaagttatttaattatgtgagttcttgattaatccctatttctctccccctttggcatcaacaaaaagccaaagtgcgtaacaaatataaaacatacataaatgactaatcatacaagagaatagagaacaattaaacaagataattcatcaaacttagaaaggtagaaatatagaacnctacataaatgtatacaaataatagaaacaatcaacaagataactaaccattcataatcttaaaagatatacttatagaatgcata

SEQ ID NO: 116650 - DNA, 386 bp, Glycine max
  unsure (1)..(386): unsure at all n locations
tcgtctcgatctatgatgggactcaatcggacatcctagttaanagttattgcgggttgcattngctacgagcttccgctttcaactacgagcgtcttgatatattactggactaatcgacatcaaataaaaagtattggtgtatgaattttttcagagcctctgttttccattaggagcgtctcgatatattacgggactccatcggacattcgaaaaanaagttattgtcgtttgaatttgctcagagctctctgtttcaatttcgagcgtctcgatatattacgggactccatcggacatccgagtaaaaaatgattgtcgtnttgaattagaacaagcttccgtttcaatttcgagcgtctcgatatattaccggactcaat

SEQ ID NO: 116651 - DNA, 465 bp, Glycine max
  unsure (1)..(465): unsure at all n locations
atgtgagaccgagaccacatgttagccatcatcattctataccaagaagaattaaatatagccacggcccacgagcacaaagtggcggacgaatatgctcgagtgtccgtggaaaaggaggctagaggaagggtgattgactcgttacatcaagaggcaacgatgtggatggaccaatttgctcttactttgaacgggagtcaagaacttccccgattactggccaagtccaaagcaatggcggacgcctactccgcccncgaggagatccacggactcctcagctattgtcagcatatgatagacttaatggcccatataattaggaaccactangaagttngtattgtcactcagatcttgactagttataactntctgaataaaatgagtntattcccgcatcttactcccaaatcagtgcgagtcanatcactcccacattttatctctagcatacattca

SEQ ID NO: 116652 - DNA, 429 bp, Glycine max
  unsure (1)..(429): unsure at all n locations
cctcgtgaccaatctatggtctaagtgnttttcttcttttggcagaggaagaaggatcgtggatctcgtgggttagtgtggcaaacggtggcggctggctttgggtggtgctggaaatggtgaatcttgatagttcaacaatgaggggaaggagaatggtgagaacaatttggtgagggggcaaaagagaaattatgtatgagctggtagtgccaatatcaatccccttctaggtagaatgatnaattgtgccacactagaaggaatagttagtatttgcattttttagaacagctgcaaattcatgaatgaaatatattttcatgagacttagagtgtaaacacgagctcacaaacaagagtganacattatggagatagagagcttgacanttcctactttgacactctaatttatttgctcctata

SEQ ID NO: 116653 - DNA, 103 bp, Glycine max
tactagctattgtgaattctttagttcctgagtacaaccttcaaatgtatgctcgttcccctctttgagaatgaggaggatcttcataagacttcatccagct

SEQ ID NO: 116654 - DNA, 275 bp, Glycine max
ggaagggagaaagagaagaaagaaaaaaggaaaaaaaaaggaagggaaagaaggaagaggaagggaaaaagaggagaaaaggagaggggaaagaggagagagaaggggaggagaagaaggaaaaaggggaagggggaggggaggaggaggaaggaaaaagagagaggagaggagaggaaagagagaaggaggaagaaggggagagaggaaaggaaggaggaggaaaggagagggaaagaagagaggagagggggaggaaaggaggagggagagaa

SEQ ID NO: 116655 - DNA, 310 bp, Glycine max
accatggagatgcgtgggcggacatatgagaagagatgacaggaggcgccatccactatggaataagccatggaagaaggagcttcaccaccaagatgagccttggataagaagcttggagaggatgcttcaatggatgaaaagaaagagggagagaaagagagaggtgggagcacgacattgaatgaagacatagggagagaagttgaactttgagttgtgtctcacaagactctcattcatcatagttacaacaagtgttacacatgcttctatctatagactacgtagcttgcttgagaagcttctt

SEQ ID NO: 116656 - DNA, 249 bp, Glycine max
  unsure (1)..(249): unsure at all n locations
tttttcctacgtacgaacttacgaattcgtaccatactattttctttccgcagggtaccgaatcttaccgattatgtatntactcttttctagctttcgaagaaagtaccgaaactcacagattgcgcaaaaacactttcttttgacttccgccacattacngaatttcacggatcgcacaagcctgcttccttttatttctgagacgtctaagacttcatttattgtcaacaaaggacgccagtatct

SEQ ID NO: 116657 - DNA, 314 bp, Glycine max
  unsure (1)..(314): unsure at all n locations
tttttcaacgaactaatccaggagagatctttgacttaactactttacaacaccaccatccaagcccattattcgcagctaattcacaaacatcacaatgccatgggatttcaccaacacttgggggcgcattgttaagcatgaaaatcaacggaatggtgcaatgtggccagccccattatctcaaaatgcaccctaggcctaatgtcatactcctacaaccccacaatcaacaaaaacaagcaacaattcaaggataaatccctcactttntgagcaaatacatgcaacttagagcaccanaatatatcaat

SEQ ID NO: 116658 - DNA, 154 bp, Glycine max
ttaaattgtgggagactggaaccactgacaactgtgaagctgagatatatgatgaatcaaggagagctctccctgattgcacttattgttttttttgaaagtctaatgagcatctttgactcctgagccgggaattcatattatggttgggctg

SEQ ID NO: 116659 - DNA, 491 bp, Glycine max
  unsure (1)..(491): unsure at all n locations
ttattcctcttgtgatgcaccttntgatctctatttatatanatncagcatccttngaatctcatcctctataagtggtggaagcaagtggatactcatgcaatatgaagggattgcctaagagcacgatttaattagaacttcctttctagctttggaaagatactttcttgaccagtgattgatgcatttcacaattcgatcctttagacagcctgaaattactntatntcatttgcctatgatagaagggaggcctaatattttgctgaccctatgattatagaggcacctanaacaagcatgattgttgcatanagattgtgagtgttgggctgaaaaaattatacttgtgaaataatcatctggcaaagcccttcatggatcaagattgagaagtgagtgctattctctatgcctcaaatagaaatatntccacaatattgtggagagaacggccttgcacctctactgatattcttcctactttt

SEQ ID NO: 116660 - DNA, 386 bp, Glycine max
  unsure (1)..(386): unsure at all n locations
agaatcaagaaaatgatntcaagagtgagtcaacaagattcaaagaatatatgaattcaagtttcaagagaagaaatcaagaagacttcacaagggaagtattgaaaagattcttcataaaacaaacatagcacnaatttgtttntcaaaagagttttcttcacaatttctaagttactagagtttttactctctggtaatcgattaccagtttcctgtaatcgattactagtggcanagtttgatttcanaagctttttaactgaattgcaacgttccaatggatttcaaaatggtgtaatcgattacaagatattggtaatcgattaccagtgtgtctgaatgttgaaattcaaaatcaattgtgaagagtcatatcttttcat

SEQ ID NO: 116661 - DNA, 319 bp, Glycine max
ttcaccttgatttaccggacctttgttttctgttagtatgcatcaatactaggcttcgactaattgagcgctattatacagatattaactcgataaagtattgcgtgattgatcacttcgttcattggacttatcataatataccttgcggctcgataaaagatgcgttgatttcaagttccgttaattgacgttgctttacgatgaacaactcggataagtatgcttcattgtaacttatctatttacgctatttactgtctcgactcataaagatgctgattctcactcgtcatggacgtatatacgatacgctctg

SEQ ID NO: 116662 - DNA, 509 bp, Glycine max
  unsure (1)..(509): unsure at all n locations
tggttcgaggtacttacccgtngaagatcgaagaacgatgactatcttatgataaacgtcgaagaacggtcgaannaccttccgaaattcctcacagaanacgttacggaaacatttcggaagtgcctcggcttagattttcttcacggaaacaatttttcaagcaaattcgaaagagagagaagtgcctaaggggctgaacccttttcttcttcacttcctcccctatatatagcaaaataggggagatggttgccgcccagctcgcccaggcgagccangttgcttcctccagaagcaacagccttctggaggaatcttctggagggcccaagtgggcctgggtgctatntgcacccncatttttactaagtacacccnctctgctntnnttttggtgattctttttcgtanagttacggatacttacgaatntcgtaacgatactttgtttcttttccgaatggtacggaacctttgggatttacatantcatccttttttactta

SEQ ID NO: 116663 - DNA, 438 bp, Glycine max
  unsure (1)..(438): unsure at all n locations
tcgctggtaaaagcgtgccacagcaaatgcaagatcttccactggtctgtgaggcacagcatcaccaaatgcaagaaacctacagttttaaagaattcaaaaggttacaagaaaaatagaaagtagagttgaatgagaaaggagatgctattaatcatatcatattntgagtatgacattcaaataactaatganttatacagaanaggacactaaccatccggtattacccctcagtccatatttntggttntgtgttaaaagttggtttgaattgatcgcagtanaatccattgcacgcgttaatctgagagtagttaacataacanattatgaaattaacaatgaagtaggatagttgtagacagcagtatagtaagatggctatattcaggaatcaagaagacagacacattgtaaacataactacatacactt

SEQ ID NO: 116664 - DNA, 306 bp, Glycine max
ctttgcacccaactacgacagcccaaataataattttttctttttttatacaagaaattaacattttccaatctcactatgccattttgatatactaaaactaaaaattactcacttataactaatgacaatattatttgaccacaaaaatgaccaaaattactgcgtcagtgaaaacaattgcggaaaccccctaagctttgtccaccaagcgacgacacccaccaattaatatcactgtttttatacagaaattacacatttccataatcactactcctttttatatttaatctaaaaatacac

SEQ ID NO: 116665 - DNA, 344 bp, Glycine max
  unsure (1)..(344): unsure at all n locations
aataatactaaacattattttagacaaacgtgcaccaacgtgtaaggcatgataatactagggtgaaacaaaataaagctgattattattattttaccanaatcttctncaccaaataatttaanaaagcaaatgaatcatttntccaccatgattctatctattttaatataattgaccattgtatgttttacgaagtatataattagaaaaaataattgaaaaatcaaggtctgaattgtgtttntttttttttaaaattattatatgaaatttcacatgataaatattttaaccaagtatacattcaatatattaataatttttttacttcactggtcatc

SEQ ID NO: 116666 - DNA, 365 bp, Glycine max
atgattatgaatgttggagcacttaatgcttgcattacatgcatggactttcctcatatagaaagactactctgagttgactctcatgaggatactctagacaaaagtcacttcctattgatcagagtatgttcgcatagtagaatgcgcctttcaatggattgacaacttttagatcttgtgattcattcattcttcataagattcgaccaatcctacggaaatgtttatgcacaatgaatctcagacatacagtattaaatgaagacttcaatgtatattgttaaatgttgtatcacatcataatattaacttgctatcgcttgatgccttagatgcacactcatgaacgatgttctaatgat

SEQ ID NO: 116667 - DNA, 451 bp, Glycine max
  unsure (1)..(451): unsure at all n locations
gcttctaatgtctctccaccaatgagaataggcccttctgtctctattatattgaatttctgaccagccaccatatttagaggttaagactctaacccatagctgatgctgatcagatgcaaaagcccataaccatctacccaacanagcttaggtgaatttggagatatcctttatccncagtcccccatcagacttaggcaaacaaatatcatcccatttcacccaaagggattttttatgatcaatggtctcaccccacagaanattcctttgaagggatatcagctttttgacaaaccttttgaggtatttaaagaaagaaaggagataattgggagggcattgaggacagaatntatcagagtaatcttccncgccatggatatanttttctgagcccatttggctaatctggatttgaattagtgacataggatcccacccagct

SEQ ID NO: 116668 - DNA, 357 bp, Glycine max
ctactatatgccgcaagtatacaccattggtactactcacactctcaccaagaccccattcatcacaaacaatagttcattatcccttcatttgagaaaagaagacataagttgcataactcggcttgaccaacataaggcaccgtcacgtttatatgttcagtttggcacctttgcaaaggtgtcacatgagcaactagtacagatttgcatggcttgctgggtagtttgaagcctatcttgtgggttattagacaatggcgtatcattggagaaggtgagttgggacataatgtgcctatggagcttgaattgaacaccatataacgagggctcatggtgaattgggcccctcaa

SEQ ID NO: 116669 - DNA, 547 bp, Glycine max
  unsure (1)..(547): unsure at all n locations
actagcttaaccgtattaagcgttctacctaaatgataaatgtatttcaccgatcatttgtgttgtaatctcgtttaatcactggtaaagcaaaatctaaccgatcattcacattgtaacctcngctaaaccaaaaaagccaaataataataaaataatcaaaatatcttaaaaaataataataatatagtcaaaatatcgtgaaaaanataatactaaagtaatcaaaanaatcaatcggaccgttttctttgaaagtttccttgantgaanntgactatattcaaagtgaaactaaggctaaaatcaactcacaaaccaagcattgtccgcanaagtcactcaaaactgtnttaagggccaacgccttggtggatcaagtggcctcagaataattaagaanggggggggtgannataatattaatgtgccttgctannataaaaatatccttcttaacgtactagatcaataggctttactactaagtaagaaagtaagacanaatagaacttaccaaagtanagtgatataagtgacaacgaat

SEQ ID NO: 116670 - DNA, 406 bp, Glycine max
  unsure (1)..(406): unsure at all n locations
gaagctagagcttagctacacatactctctctaatagctaagctcacctccttgagatgagaagctagagcttagctacacacccnctataatagctaagctcacccccatgacaaaanaaacatgattatacaaaataaaaagtccttactacaaagactactcanaatgccccgaaatacaaggctaaaaccctatactattagaatggccaaaatacaaggcccaaacgaagaagaaacctattctaatagttacaaagataagctggtcatgcttagcccatgggctcgaaatctaccctaaggctcatgagaaccttanggccttccctgggatctctagcccaatctacttggagtcttctacccaatgcccttgcgggataggaatgcatcactcatgg

SEQ ID NO: 116671 - DNA, 259 bp, Glycine max
  unsure (1)..(259): unsure at all n locations
tttttagttcttatagaatagctgggcattaaattcaaaaaaaataatctgaacatctgtcaggtggtgtgacacttagtggatannaaaaaaagaataataattattgatgatataaagtgattgaaaaaagaaaaaaattaaagatgttgaattattacccttggaagcctattgacaatcggcctactcacgaaagattatccctattctaaaagtgattattttattatttctataatttattggagattttata

SEQ ID NO: 116672 - DNA, 149 bp, Glycine max
tcacgagctgggatgaccttaagagagtattcttaaaaaattttttccttgcttccaggaccacagccatcaggaaggatatctcaggtattagacaactcagtggagagagcctgtatgagtactgggagaagattaagaaactatgt

SEQ ID NO: 116673 - DNA, 110 bp, Glycine max
ttaaagtaaaaatttgtgacatagctgatgtagagtacaaggcttaaaagtatctgcagatcattcacagatgttccaatctgaacaactccggatacagataaagttgc

SEQ ID NO: 116674 - DNA, 355 bp, Glycine max
  unsure (1)..(355): unsure at all n locations
cattattctagtacacacatgcaacaccaaggcttgagtcataatttaggacaaccttaagatctttggatgtagcctataacaggaaacacatcctangttcagagcccaatatctagtttgatcaaagtgtcttacaaggattcaatagctacttcattcacaccatttgtgcaatcaccatcactcatgcatataacatcatatccttctagcttccattcaatcacttaatactcaaataanatcctttaaatcatgcattcgagtcaagaacanattcagtatatcacttacaggcactatacataacaactatctctggggagtacaatctttacattgttgaattata

SEQ ID NO: 116675 - DNA, 346 bp, Glycine max
  unsure (1)..(346): unsure at all n locations
tatatcgagatgctcgaaattgagaacggaagctcgtagcanatgcaaaccacaagaacttctaactcggatgtccgattatgtcccgtaatatatcgacacgcttgatattgaaaacagaagctctgagcaaattctaacgacgaaaactntntactcggatgtctgattgagtcctgtaatagatcaagacactcttaattgaatacggaagctctaggaaaatacaatgacaatatcttttactctgatgtctgattgtgtcccgtagtgtatcgtgaaactcgacattgaanacagaagctctgagcaaatgtcaacgacaataactttttactacgatgtc

SEQ ID NO: 116676 - DNA, 347 bp, Glycine max
  unsure (1)..(347): unsure at all n locations
agccaatttggacttcctgatattggcgcaaaaatttacatcacacatgtagatctagcggaaataatatcaggtgacatgtgtttaaacatagcgatactatagttgtggaccatgtaagtcattatcctgcaacctttatgtgtgattacctaataaccattattcttaaatggtagaacgattaaataatcatgacttgtccttcaaatagattatgaatgagtgcggtagaagcaaagctaatcagtcactgtatggttntctggagcctcaatctatgcaaaatgctaaggaaagacgtcaacaatgccaacaatacattgaaacatggttcaaggaatcac

SEQ ID NO: 116677 - DNA, 362 bp, Glycine max
  unsure (1)..(362): unsure at all n locations
tctgagactataattggaagcaaccagattatataaataagaaaaatatggccaacagatcacagaataagaataaacaggaagcacattcantttgaacccctaacaaacttaaggtaccaacacttatccaaccactggaaattngcactaaacatgatataaaaacacattaataagctaatcagcatataattatggagaanattcattttttacttggtatggcaccttgtcgggaaatatgtaaaaaacaggttacttctattctcagatngaaataaanatatgtaaaatacattaatatgtctaatcaggcctggacatgataattaatggcatcatgtccncattctaagaag

SEQ ID NO: 116678 - DNA, 334 bp, Glycine max
ccatgtcaaccctctaacatggcaactaaaacatatgagttacgtaaggataggtcattcaagtcttttttctaattgaatccagctagtatcactttcgtacagtatccttcttatcacggtaatgcgaagtgatgaataaattaagagggttttgttctcttacaagggtgattataatgaataagtctataatacaacaaactataatgactttaattttgttttgtgagttgtacttcatatatgcaacttaactcttaatcataaaaatagagaaattgtcagtattaaatacacgttaatcgttttctaaataataatacggctaaat

SEQ ID NO: 116679 - DNA, 469 bp, Glycine max
  unsure (1)..(469): unsure at all n locations
attctcaacagtcacatctttttgtgtggttctcgaatcgctatcaaaggcctatatatatgtgacttgagacacgaatttgctaagagtatttcagaacaaaaaggtcttatcctcttaaaaagcaaaatcgttttatcctcttacaaattccttggccaaaacacttgtgattcaataaggatattattgagtgctcaaattgttcaatctatctctttcaagagagaattcttcttctcttcttcttcattctgaanagggattaagagaccgagggtctcttgttgaaaagaattcgaacataaggaagattgtcttgtgtgttaaactgtaaaggaattacagatatggactctaagcggttgttgtgactgactangccanggtgtggcgaccatataatctagttgacttctctccttaactcttattatatgttatttctatcaatgttattgatacatta

SEQ ID NO: 116680 - DNA, 397 bp, Glycine max
  unsure (1)..(397): unsure at all n locations
tatatatatatatatattgataaagaatggatataatttttttcaacgtgcagcgagggaacccttcaatacgcacctctctaccaagtctaacttatagacacagaattatcaaacacccaatttatgtgttagaatgtcctgcttttcgctactactantagctggtgggcatgatgaatttctcacaaaataagtggaatattccacttatctctggctgatcttttttcttacatntaagacaatagagagtattaaaattgctcataatcgtaatatctatatattaaatagtatttatggtatatctaaatatatatatatatagaatatntatttatatatgcatattatagctattgttaattcagcatgtgttctggcttctgaaata

SEQ ID NO: 116681 - DNA, 252 bp, Glycine max
gttgactttaaaaactaaatctttgaaagcaaactttgagagacttttgattattcaaacatcctgtatcataccatcaggtacgatccaacttatggaagatggacttacttgattgattcacgtcaaggcctggatgatccacatgatcaatctttgaatatggcggaatcttgaacttcaacattgtctgacatcccattgatatcaaagaactttgactgtgaaaatgcttatttgaactttctactg

SEQ ID NO: 116682 - DNA, 242 bp, Glycine max
  unsure (1)..(242): unsure at all n locations
ctcttaaacttaaaaccaagttgaggtttatctactttgaatctgtgtcacaccttgtgagataaccaattctctctcctgatgtattcaatgcactttttttcaagaccactcctcacaatatcacatgatgaatggcttcctcatcttcaanaggattccaacaaaggtgctttatttttacattttgacaacacaaaatcacttcctctatctgaggctctgtaatatgccctgattta

SEQ ID NO: 116683 - DNA, 284 bp, Glycine max
tgactaagcagaaagatactattgagcatatcctgactgtgatttcaaagaaataagacagactttgagcactatctgacacgccgattacgagaccatccagatggtcctctacctacagcacaactttcctctactaagatccgaggcaacatagagcctgcttggcctctctcactctcatatgctctgcgatagagagtcaaccagaatcagacatctagatttgtctgagacctttgtttggttaatattaatatggtaataacttctttatgtatatc

SEQ ID NO: 116684 - DNA, 514 bp, Glycine max
  unsure (1)..(514): unsure at all n locations
ctaagctacgcgcatatttcttacaacgtctctagccaagacattcttttttctgttatcnaaaaatgcacccatatacaatcaaggcatctttcttacctataatatttacacgtacttccaaggtgtatatgttacttacatcacacacctccttggctgaatcacatacatgcatactcaaagtcatttgtggtaccacacattgcacatgtgcacatcttggtatttctatatacctatacatacacaaacttcatgatgaatcttgactatctacacaataaggtgttacatgttatgctcttttcaagtttttgctacctatagccgcatgcacattcaagtatattttcctttgctgactantattgtatccaaattaaaaggtatacatcttctggtaatgtatcttctgtacataacatgcaacatatgtatgtatattcttttgtagacattttgactaccaanattatatgtacatacatccaagtatcttgctatcataccc

SEQ ID NO: 116685 - DNA, 447 bp, Glycine max
  unsure (1)..(447): unsure at all n locations
gctgctacccatgttgaattgctacaatagagctgtcatagctcctctaattgttctccttnngaagnntgatatgggtntaacccactaactcctcttgatcttttgcctatgcctaatgtttctgtttctaagcataaagaatgtcaagcacaggcggactatgtgaagaagcttcatgagagagtcaaagatcaaattgagaggaaaaataaaagctatgctaaacaagccaacaaagggagaaagaaggctgtcttcgaacccggagaatgtgtttgggtgcacctgagataagaaaggtttccggaacataggatatcaaagcttcaaccaaggggagatggaccatntcaagtgcttganagatcaatgacaatgctttacaaagtgagctgcccggtgagtataatgnntagttcaccttcaatgtctctgatttatctc

SEQ ID NO: 116686 - DNA, 454 bp, Glycine max
  unsure (1)..(454): unsure at all n locations
gaggggggtgctttgaccgtctacctntatgatgttntttctattatcactattattaaacggggataaataataaaataaaccttttttataaagaaaagaagaaaattctgtcttgtattcatctcataatctatgtataatcatctatgcaccacaagctattgttttactnatttgaccccaaataatgacagaattntaagatngaggatgacatataaattgacaactagttctgtcttttataccagaagtaaattagtatatattttttttaacaaggaaactccaagtatgcatctaaaaaccacanaananaacatggttgaggaaacatttgtcaaaatgacattatacaaaaaagaatgaatanactcananatcttaatgctctcatatttctagagaatggtcnaacttagcagctcatcactacttgttaagtatatgt

SEQ ID NO: 116687 - DNA, 416 bp, Glycine max
  unsure (1)..(416): unsure at all n locations
catggaatatatgttacctatataagtcattggttcacatagatgctccttttctttgcttgcttatgatnttgggtggttatacatccggttgggtatatatttttttatgttaacaacaaaaaccctcttcctgtcaaagttattcttttttttcttttgtatgatgaaatgcactagcttcgtgattcgttgggttcattttttaagtctctttctgttctattttacgtgatgttcatgaaacatttaaatatttcttttttaatgttaacanaatgtatatggtatataatgttcagttagtgcataacaaatgtacatgatatacaatgctagttagtgcatatgaatacttaatctaagtttgaccttgctctattcatccttcattatatcttattcttttattgtta

SEQ ID NO: 116688 - DNA, 425 bp, Glycine max
  unsure (1)..(425): unsure at all n locations
tagaacactagtaatatgtctactatcattggtattatntctntcttcattatagaggaaaacacttgagctgctggatccctccacctttaagcgtattctttgaaagatttgtgcccacctttttgcgcatgttctatagtngcatcatatccgaagccattatactgacactgcctaacataggaaaccattaggtcccttccaagaaatggactcggtgaagggttccaagttagtataccaagtaacagctacccaataagactttcttggaaggaatgtatcagcaattcctcatcttttgcgtatgcccccatcttccgacaatacatctntagatggtcttggggcaagtaaacccttgtctntgcaaagtccagcaccttgaacgtgggagggataatgatattggtacttggaac

SEQ ID NO: 116689 - DNA, 439 bp, Glycine max
  unsure (1)..(439): unsure at all n locations
ctctcacagtctntagatntgggagccaatccaattcttgtgtccggactctcagccacttatgatagccgccgatgatcccattactgcttccnctaagctctctgtcctttcttcacgccgcatcccatgccttgcgaactccttggagtaccctagcattgtggtcactgaaacctcgtgcgatgaaaggcgtgatgctntcgtctgatggtactcctctcatgggacatccttcgcatgaagatagaatcctgattcttcctttcttctagcgagggaaccatttaacagacgcccctccatgctagccaagagttggtcccaattcgtctttcttttttcgacgcacgagcggtgaccttgtagcggatagacgggcctaccttcttggnaanaaggtgtgaaactaaccacacatagagagctggagtacagc

SEQ ID NO: 116690 - DNA, 313 bp, Glycine max
  unsure (1)..(313): unsure at all n locations
ggtctaatcgactacatcatattggttatcgattaccagngtgtttgaacggtcgaaatcaaaattctaatgtgaagagtcacattcctttctacataatgctttgtgtaatcgattacaacgatctggtgatctattaccactgatatgttttgaataaaaatcaacagatgttactcttccacatgttttcaagcttttctaaggttataactcttctaatggttntcttggccagatatgacgagtctataatagcaagacctcaacttgcattttacaagacactgantacattaattacaatctctta

SEQ ID NO: 116691 - DNA, 322 bp, Glycine max
  unsure (1)..(322): unsure at all n locations
cgttccggagtgtttcgcgacattttgagcgtcttcgcggtcttaatcgtcttagtcagtctcatcggtctcagtcttcacgggtaagacctcaaccaagcttntcattcatctatgacccgtgtggccacatttgtttcatgatgttatctcgttcatcacttttatacccctttgacgtgctaagcctttattaagcattctcgttacctaaataaataatttcacgatcgttgattgatatccgtacttgttgaataattcgacgacggcggcgaccacttgaaccaaaagagaatatattatataaaataaaatccct

SEQ ID NO: 116692 - DNA, 270 bp, Glycine max
  unsure (1)..(270): unsure at all n locations
tattatgtggtcggtgcaatagaagaatcttaggactttgcagaaatgaaattggatgggcttcaatgctctcttgaagcatacgagcaaagaatcaaagagagggaaacagataggtcatctgaataggctttacttgctcanagtgcanaacgattcanaaatggcctangcaatagtaaagggaatgtaaaccganaaccatanatcgaaggaacaagagatgacggactaatgattcangtgctgtgaatcaatcatgatgatagt

SEQ ID NO: 116693 - DNA, 489 bp, Glycine max
  unsure (1)..(489): unsure at all n locations
gcttctaaggaagctacctattctattatagaagcatgtgtaacactnggtggaactttgatgaatgagagtcttgtgagacacaactcanagttcaacttctcttcctttttcttccttcaatttcgtgctcccccctctctctntctctccctctttctttacctccattaaagcatcctctccaagcttcttatccaaggctcaccttggtggtgaagctccttcttccatggcttattccttaatggatgggcgcctctctcacctcttttcctttgtntccgctgatctccatggtggaaancaccataaaggaccccattgagctanagatcagcctcataaagccnacaagcaacttcattaggaccttctcatttctttaggacatntagacctagtcctaacataattctcatgagaacattgatgtatcaaggtcaaatctgctgtcattcagcttaaatgctatacctagactatcat

SEQ ID NO: 116694 - DNA, 303 bp, Glycine max
  unsure (1)..(303): unsure at all n locations
tatgaaatcacaattaanaacaattgattaaacttgaccattttgaaaggttgatccgaactatcaagagagaggaatgtgcatggaaatcgatcttcgtcggttggtatgtaaacggtatggcgtgattgcatcggattgaagaggacaatacacagaatgtttcgtggacaaattgaaaggacatagtgaaatgacttaaatccaagttgaactctcgagntaggaaagaacctattatgtccaactangatgccacttatgtccatcanactactntacattaataactcactctcacta

SEQ ID NO: 116695 - DNA, 360 bp, Glycine max
  unsure (1)..(360): unsure at all n locations
acaccctctgactcatccaagaacataatatttgtcanatgctcagataatctggtgaagggaagctttgaaatactntaacaaggagacggagaacctagacagaaagaacaaggatcaatgtcaaccttctatcagaaacactatggttaagaagtatttntcacattttgtaagttgcaagtcacaccacaggtcaccaagttgtcaaagaaaantatttatccattcctcctgctgttatanttcagtccatttcagattgtgttcatcagatcttccacttcctcaaccatataaacccgtccaacagccaaatatccatctcaatggagtacacaatagataaagatgcaacat

SEQ ID NO: 116696 - DNA, 244 bp, Glycine max
  unsure (1)..(244): unsure at all n locations
agcttcccagtcagcacctgaattgtcttgtgaatntggctatntctgatgttccttcctgngcggagtntgttgaaataacggttgaggtatttccctgaattgtgacagacatagatntctccttttaaaaaagcactatcggcatgcacaaaanaatcttntaatcgatttcttgtgtcattaatagttngatgttcagattgttttcctcgcgggctggcgcgcctcagaaagtaaagct

SEQ ID NO: 116697 - DNA, 258 bp, Glycine max
  unsure (1)..(258): unsure at all n locations
agcccaagagaatgatttcaagattaagtcatgaacaattcaagaatcaagagaaatttgnatttcagattcaagaatcaagaatcaagaataatcaagatccagattcaagaatcaagaanagactcaatcaagataagtacttaggagttttttaaaacattgagtagcacatgaagttttcacaanatcttttaccanagagtggttactctctggtaatcgattaccaatttactgtaatcgattaccagtagc

SEQ ID NO: 116698 - DNA, 532 bp, Glycine max
  unsure (1)..(532): unsure at all n locations
tactaagctntagctcgccttaagatctgccttgaccctgatatccttctcnctttcgagatgagctactatgctgcctataagcccctcaaactttgcttggtccgtgtctttctttncggccttcttgngttctcgcttcaaggcttcagcggtggccatattgacgtctcttagttcatcatactctnttcagactntgatggttatggacttgaacttctcttcgactacccgggctctntcaagctctgcctttanggcttgtacctcatcactttcttccgaaagcttaacctcatcgtctctcacagtctttagatttgggagccaatccaatccttgtgtccggactctcagccacttatgatagccgncgatgctcccattactgcttcccctaagctctctatnctttcttcacaccgcatcacatgccttgtgaactccttagagtacnctcgcattnngggtcactgaaaccccgtgcgatgaaaggcgtgatgctttcgtctgatgggcactctctcat

SEQ ID NO: 116699 - DNA, 329 bp, Glycine max
  unsure (1)..(329): unsure at all n locations
gaggacgctcatatccgagacctcctcttgtcaatatcctttctctcatcaatagccctccttggcctgtctagcatcttcaactgtatcttatatttatcctgcatgcttcgctgtcaatagagacatcactggcnactaacaaattggtgcacattgatgtagatggaaactcagccttgggtcctattggcccaaaattggtttagattacttggaggagattgtcatgttagaaaattcttgctgcacatatattaataacacaatgatttgctgtatatcatatgtaggattaatcatcatatgcatgaccttaggtatatata

SEQ ID NO: 116700 - DNA, 232 bp, Glycine max
  unsure (1)..(232): unsure at all n locations
gagaagttaactttagttgtgcctacaacgtgacatcctggaaatttctacccacaaattttggagacaatgattttgaatgattatatatatatatataacgattattcagtgtatatgcctatatgttctcgatagaagtangaatagtcggggcaagatatgctgttaggctaataatgaagaaaatcatactggccgtatgggtaatcttaattataattaaaatatc

SEQ ID NO: 116701 - DNA, 318 bp, Glycine max
  unsure (1)..(318): unsure at all n locations
tacacctacatatatatatatagcactccattagaccataattatcttgatatgtaactgctgtgacattcatttcaaattcaaatggaccatatttttattgtgtttactacattgaatcatctaagtgtggttcccttctttctctntcccgtatggactaatgtagaaagatcctgcatgctttttctttctttctttttctgcgctttccttgagtgtttctatattatggatgtttgagtaatttgaatgggggtaatggagtagtaatgaatactgatcgagttgtnntggaatattattcgagaggtatac

SEQ ID NO: 116702 - DNA, 245 bp, Glycine max
  unsure (1)..(245): unsure at all n locations
ataatgggtcaggaaaagaaaaatggactagtgtagtaatggctgtgtatttttatatacttacacttnggcaattaatattttgattgcaatntttcttattttatgccaatattaaacagaaaaaaaccacatgtcagtatcatattttagaaaggcacaattagatganattatatatctattgntgtttgtataaaaatgactttatctganattacttgcattctttgtgatatatactg

SEQ ID NO: 116703 - DNA, 432 bp, Glycine max
  unsure (1)..(432): unsure at all n locations
gtttctggttntctaaaccttgaaaacttgtgctattcatctttttcattctctctccctccgccananagaattcgccaaggactaaccgcctgaattctttttgggttctcttctccctttccaaaagaacaattgactaaccggctgaaattctttgtgtctcccttctcccttggcaaagaattcaaaatgacactgtctgagaattctttggattcttccctttccctaatacaaaagtgttcaaaggactaaccgcctgagaattcttttgtatccccatacacanagtatcaaagttttaacaacctgagatctttgtcttgacacattggagggtaccatccttgtggtacaagtagatggtacatctacttggnngttgactgagaacagagagggtacatctcttgtggatgagttctagtg

SEQ ID NO: 116704 - DNA, 178 bp, Glycine max
tggctactttacacgatgtcgtctggactacacattagacgctgaatgacacaaacttaaaaatcaatggcataactatacaccatatccgattggaaatatattcgagatgctaaaattacaacggaagctctacagaaattcgaatgtgcataaactttcacacagatgtccgatt

SEQ ID NO: 116705 - DNA, 268 bp, Glycine max
agcttggattcaacacaaactttaccgtgctttgtttttataacgaaccttagtgatgtgactttcaatcaacacatactttactgagttgtgagccgaataacaacgccaaatgatgtgagcttacaatcaacacatactttactcgagcgatgacccaattacaacacgaatgagcgattttacatcaaccaatactttctgatgctgtgagcccataacaacctctaatgatggacttacaatcacacaactttctgagctatgg

SEQ ID NO: 116706 - DNA, 414 bp, Glycine max
  unsure (1)..(414): unsure at all n locations
gctgtcattattcttaacanatagtattaatcctactatctttctgtttatatgtaaaagntgaacaaatgctatattgttagataacaattcttgtgagatgaatcactatttggttggtgttgcttggccaacgctttaaattccgtgctgaagttgaagaaatataactgtaactatatataaactcactcacaatatatgctttggtttattcagatggagaagagggcatctcaacttttcccttgangggagggtcaacttgcactatagaattatttggatanggacatttncacttttaaaaaaatattgatcctgttggaggtttgtatttaaatagacaaatattttctttttacgaaatgactgaatggttattttcttttggttacatattcaaaatattgc

SEQ ID NO: 116707 - DNA, 459 bp, Glycine max
  unsure (1)..(459): unsure at all n locations
aagtctctccaatcttcatgcccttaatatgcattgctagnagactcacacaatacctattgtgttcactatgnaacttagaagcactaatctcttgattactcttctaacctttttcctctaacctaagagaatgtgcactacaccttgtgggataacttctactgaggctcatcgtatcaagggtgttacaaaatctcctatgaatntggctccatctagagtttttttgctaaggaaatntcttcctattagggtattctggatagactctntnnttaccttaccctctctatntggcacaccttcttgtangtttctcctttgaattntcatccatatatagagctccagcagctagtttttatggtcgatggaggtagaatatggacttcacatngctgcatgagttcgccattatcatatagctagctactttgcacaaatactctctctatg

SEQ ID NO: 116708 - DNA, 277 bp, Glycine max
ataagggcctgaatatacgggtagaacttggacaggtggcgatgcctgacaactgcttccacccatagctgactagagtaccgaatgaatctggcagtcgtagcgcgatacgacaccctgtcatacgagactagtgtctctacaccgttaacagtatcccgaacatccggagctattgtccgtgtagaatgactaatttcgtcttactccgtgactgtagcgagcacccacgtcgtaacataccgaatgtctacaacacgactggttttcttctgag

SEQ ID NO: 116709 - DNA, 138 bp, Glycine max
  unsure (1)..(138): unsure at all n locations
agagaacccagtttacaagaagcattgatgcaatacatctcccanaatgatcagtgcatgaagctcatggagtcccagctcacttctatacattctctcttgcacanagaagctctgcacactttctctcaactaaac

SEQ ID NO: 116710 - DNA, 285 bp, Glycine max
gtcgacttacaaactgtctgactccgggacttggaaatgttgagggtgaactcgttgacttttctaagctctgaactctcggtaaagtgccagctatcacgtgattttcactgtgctgccttcaaaaattcagactgcggggacttcgagaactggagtctgacccttatgagcttgagagcttatgagcttaaaacactgactgccgtaacgctcccctttacgggacttaattgttactccaaccttcgatgactgtttgaaattgggtgttactctccaact

SEQ ID NO: 116711 - DNA, 419 bp, Glycine max
  unsure (1)..(419): unsure at all n locations
tcacataatttaatgtagattaaattaaagtttgaaactctgtagtataccttattcatcaatggttaataagatttgaatgagaatcattaattcanacctaatagtaccttagtcccttttttgcagccagctaggagaaaaaaaataagtgtattctatatgcatttactatcactatatatagatgctgcttcctaactgtgtagatacttanatgttnatgaagtagtaaaaatgaaaatcaattcaccataatggtaaactgattgtgaggaagtagcatatgttggattaaaattcactgaggaagctggaatgtgagtatggtaaaagaagttntatatannagtattgatatacatacacttaatgtcgtatacttcatacctggttgcttggaattaagggggtataag

SEQ ID NO: 116712 - DNA, 411 bp, Glycine max
  unsure (1)..(411): unsure at all n locations
tagttaagtaaatttntataaaccttatatctaactgnaatggctctctaaagagcataactgcttactcatactcanttgaatatttcgccgcaatgatgaagttttgtattgcagtggggtattagggataacatggagtaaaccgtgctacccgttgagcttaatggaagaaatgcttatcatagtggtggggataatagagtagtacttcccaatatctgtctggatggatgtctgcaacgcctggagcgtactgaataatatcctttatcactggattcatacacactaacctttgttcagattaaatggtgagctaactggactcatggattcattgtatggaattctaactgtatctgattgctatttttatggaaactctatgcaattaccataagtctattt

SEQ ID NO: 116713 - DNA, 304 bp, Glycine max
  unsure (1)..(304): unsure at all n locations
gctccagcgctagttgtgcctaattcgagagaaccctttgaggtgtattgtgatgcatcaaagatgggtttatgacgagtgttgatgcaaaatggtcaagtagtggcctatgcttctagacaactctagacccatgagaggagatatnccacccatgatctagagctggctgttgtggtttttgcccttaagatgtggaagcattacttgttcggctccaagttaaggtgttagtgacataatagtcggaagagctgacatgcatcaaggagatggtagagttcttaagattatgatttgaact

SEQ ID NO: 116714 - DNA, 180 bp, Glycine max
tgttcttttgagctacatccttctctttttgactgtatgcaaagttgacctgacactgaaagattgtgtagagatagcatgcttttgatcatcatctacagtgggcagtaaaccacatagacatagctgctctcttcttagagttctctataagcacttggttctcttcttcttaaacat

SEQ ID NO: 116715 - DNA, 353 bp, Glycine max
  unsure (1)..(353): unsure at all n locations
tatgtatattnntaanggggattgaccaattatgaatgttcaaagaaatgaaagaagaaaattggcttaagaatgataaatattgcattttagaatagataaattaattcagtgaaagtgaccaacccataatcgaatatataatcattttctaaatatttaatccttattctttttattggatccttattctttattcaattgttgtttgactttaaaattaaccaattaagcatcaatcaacttcaagaaaatatgttagtaatcagggggtgcaaacatatgctagcaaacaggggtacaagttgtaaggaagaggcccaagagaaatatttccacaccaacgtacttga

SEQ ID NO: 116716 - DNA, 389 bp, Glycine max
  unsure (1)..(389): unsure at all n locations
agctttntattaatgaagatatcgaagagtttaatgatttctggaaaaggtatttcttattttgatagttgaatgatattttaagatttactaatgctattaacactgtgtgtatttatttaatgtagtttggaaccaagggataactatgatgtttgctgaagtcaaaggattgtctacatatcttaaattagttataaggataagttctgttagatttggccttaatatttggtctgttggaactatattgacaaatttttcttggttcatacagcaatgtaaatntgtcactctcgaaactattgaaaaggaatctaaaaataatttaccataaaggtagaggaaattatgtgatgagaaaatacggaatctaaagaggagagagt

SEQ ID NO: 116717 - DNA, 358 bp, Glycine max
agcttgatgtacacatcagagcttctgtctgatgacagattcttactctgcatgaactaatactcttgaccctgggcacgaggctgctaccatgtttaaagagatatgaacgaccactggtaatgtctgcgcaaattgttcgtataaaactccaatctgcaagacccgactagagattagatctaacttccaacgcccgaactgactgaaacattcgctccataatgaaaacctcttaatcgcttaaattacagctggtgcaagtttgggagcaagctgcctcttacttccattgtgccgcataacatggaatataaggtgtaaacagtagtcaaagatatatactcgataccattta

SEQ ID NO: 116718 - DNA, 394 bp, Glycine max
  unsure (1)..(394): unsure at all n locations
agctttgcttccacaattggtgtaggatgtcgcttcnacccatttggtgaaataatctatcgccacgaggatgaaatgatgaccgttccaagccttgggtttgatggcccctatgacatctataccccatatggaaaaaggccaaggagcggacatgacgtttagaggatgtggcggaacattgacattttccgcaaacacttgacatttatggcattttcttacatgggtgcagcaatcgctttccatggtgagccagtaataacctgctctaaggattttcctggccatagcatgcccattggcgtgcgttccaaatgaaccctcatggacttcctcggtcatgtggtttgcctctttgacatccacgcatcgtaggagggtcatgccatgg

SEQ ID NO: 116719 - DNA, 448 bp, Glycine max
  unsure (1)..(448): unsure at all n locations
tggatgttaaaagtgctnttctaactggcttaattcaagaaaaagtatatgttgaacaacctccaggttttgaaatatcaaattagcccaatcatgtttatagaattgaaaaggctttatattgttgaaacaagccctaggcatggataacgttaagcaatttctttagaaaagattttctagaggaaaagtggataccacactattcataaagaanaagtatgatgatattctattggttcaaatatatgttgatgatataatctttggatccactaatgattcattgtgcaaggagttttctcttgatatgcaaagcaaatttgagatgtcaatgatgggagaactaaattacttcctgaggttacaaatcaagcaaactaaagaaggtatatttgtcaaccaagcaaaatactgcanagaattgatcaaaagaattgatatggaa

SEQ ID NO: 116720 - DNA, 342 bp, Glycine max
gttttaaatgggggaatccaatacaatatattggtaatcaattactaagtgatctgaacgttgaaattcaaattccattgtgaaaaaatacatcttttataaaaggccttgtgttatccattacctggtttggaatcgataccagtgacaagttttgaataaaaaggcaagagatgtaactcttccaatagttttcagattttttctcaaggatataactcttccaatggttttcttgaccagaaatgaagagtctataaaagcaagaccttaacttgaattttaaaataacttttgaacatatctttgaactttttcttttcttcttcctttgccaaagct

SEQ ID NO: 116721 - DNA, 442 bp, Glycine max
  unsure (1)..(442): unsure at all n locations
tctcagcttctatggggctggatctttgagcatcaatgatgtccttcaatggtgattntccgccatggagatgcagcataaaataaaggagaagaggtgaaagaaggcgccacccactatggaataagccatggaagaaggagcttcaccgctgagagagtgcctnggatgagaagcttanagaggaagcttcaatggaggaaaagaaagagagagagaaatagagagggggagcacaaaattgaaggaggaaaagagggagagaaattgaactntgaagtatgtcttacaagattctcactcatcaaaattacaacaagtgttacacttgcttctatttatagcctaggtagcttccttgagaaacttccttgagaagtntccttgagaaactaccttgagaagcttctttgagaagataaagcttagctacacacactcc

SEQ ID NO: 116722 - DNA, 385 bp, Glycine max
gcttcctcggggccattcctgcgaaggttaacatttggaaagttagttttaccaaaaaatgctacccttaaaacaaaaatggcatacaaacccctccaataaatacaaacatcaatgtaaatttagagcaagcttatgcgcatacttctttacgaacgttcacttgcacaagacattctattaactaagaaaaatgcacccatatacaatcaaggcaccttcgttacctagattatttacatgtacttccaaagtgtatttgttacctacatcacacgcatttcctttgctaaatttacatacatgcatactcaaagcactttggctatcaaaaattgcatacgtgcacattctggtatttccaatacctatacatacacaaact

SEQ ID NO: 116723 - DNA, 455 bp, Glycine max
  unsure (1)..(455): unsure at all n locations
ngcagccattagaagagaaagaacatatgattagtagtatgactgaaaatgttagtcagtttgtcagattgattgtgaagaaatgcattaactgtatcccggtgagagtgtgatccttaaattttgagtgaaacgactatcatttagtactgatttttgcatgaatctctgaagtatggactgaatgcatgaaattgaggatgatgaaggccatgtntgattgtgatagccatttagccaaaaagctgaccacgtgcttgaatgatttatcccttgcacccagttttaagctaaatgaatgtttgattgatggaaccttgagcctatacagtgatgcaatcctccctaggaagggaccaatcactagaaccatgagcaagaggctccagaagataggctagagctgctgagaaggccctaggtctcatgaaccttaggagattctgagccatggg

SEQ ID NO: 116724 - DNA, 374 bp, Glycine max
  unsure (1)..(374): unsure at all n locations
agcttgacttagaggtattnaanaatgtttcttctgtcctgctattccggatatcaatctttgttccagaaagacttatctgttatgtctttcccctcgagcggtctgccgacgcatacgattacctcttagaccgccatttaagactccacgaacgatatgcacatagtataacccatatgctgctaactgtcctatacattaacccatgaaggcccccgggaatcgtattacataccaattgagacgatctgtgattcaatgtatcggttacatcttgagacctccttttatacactacgatcacgaggccttggcccctgttaccaactgtggacctacgccaccatagcttttagaatgccactttatgc

SEQ ID NO: 116725 - DNA, 397 bp, Glycine max
ggatccttaagtcacctgcggcatgcaagcttttatataagctgaaccattttattaataaacacaagttgagtgttattcagaaaattagagtttatctcttttatcttagtgagagtgattctcctaaattcttgagtgattaagaacaccctggactgtatcaaaggacattacaacctttgggtgttgccctcgctggaaagagtgattctttccttcctttcatcttcacccttgttctttcaaaccacaattccagataattcacctctgcccaaaattatctcggggccataactcccattttacgcactcaaattaagtgattcttgagcctaaattgaatttcataacgagacctttcacctcgttttggaatcaccttatttggagc

SEQ ID NO: 116726 - DNA, 375 bp, Glycine max
ggatcaatattcttactatagtttgggctaagtataaaatttcaagttccgttaactttgcttaacttttattgttttacgcttattaactaaaattttagctatatgtatagtatttctaacttgaaccttaactttttaagagttcagtgacaccaaggaaaaatgtttataagaattaattgaaaaaaaagtttatatcacaaaaaatagagcatcattgaacatgaatctcagtccaggttttggattcttttctactttacttaataaccacagcttaagagaagaggttctctaaccttggtctcaaatttgtgcctaaatgaatatgaacaagaaatagccgcagggacattctcaaaactatattac

SEQ ID NO: 116727 - DNA, 128 bp, Glycine max
aggagatctgcgaacaacgaatagctaagagccctcataagatagcacggaaagacttacacaaatggcctgataaactggaatatctcttgagaaaaaaaagaggggacacaattagataaaaggta

SEQ ID NO: 116728 - DNA, 394 bp, Glycine max
agctttataaatacctagttgtttcctctttctactcctttcaatgtcttactctagttctaatgggggagtctctggttgtccaccaaaaatccatgttagagaggaaggttctgggaatagggaaagatgagacaaatttatcattcggctcttctatttcacaccctctttttgaagatgatactttcgaaaatttgatgaagggagcatagataacctctagtgttaaggttgttgctggagaaaccgccgatgatgacattaacatcattcctgttgagtttgatgaggaagaaactgaggaggatgtttatgagtcatttaggagtgaaacatatttaagagatggtggtgatctggttgttgttggtggtgtattagagaacattgt

SEQ ID NO: 116729 - DNA, 392 bp, Glycine max
  unsure (1)..(392): unsure at all n locations
agctngagggagggtgttgagattataactagttagttgtagtcttgtttagtagtagcttgtatctgagaatataaatactttgtaacacacactttacaaatcaatcataatatttttttcttctttcatcttcattctctatttttctctcctctgtaactgaatcctaaccaactcaacaccattctttctcaaaatcgttattgcatcctttagggtcctttgataaatgtgtttggatctatgttctttggtaggtcccattctttgcattgaaaggtgtcctattgaccttaatggggggtctctagtgacttatatggtttatatgatcattcttttactattagttgatctcaactaggcttctttttatcgattgactagcg

SEQ ID NO: 116730 - DNA, 475 bp, Glycine max
  unsure (1)..(475): unsure at all n locations
ctaagcttcccaacatccaagcaaaacaacattcacacagcacaagctatcacagccaagcaaaacagagcaaaggcagaaaactctgccaaaacaccaaccaaaaatcacagcttttcccactcaaagaccccagtaacaatttccttcgatccaattcgttaaccgttggatcgactccaaaattntactggaagtctatagtgcataagcctacattntgaccgttgggatctactagcaaacatccagaactcattctacattactctttccacaactagcaaatacatggatttttctgcacttgtgcagaattctgctgcacaattttacagcaaaatctgcacaaagagcatatttcgaaaaccacacttcccctcatccaatcttgcccaaatcaattcctacaagtcccaattcatgtatcaatcatgtctaacccanaatcaagcttcanaacacagcaacacag

SEQ ID NO: 116731 - DNA, 397 bp, Glycine max
agctttgagccaaaatcctgactcaccataaaccttgacctcaggtgagaatgccaatccttaccctcggaagcaaaaaaaaggagagagagagagagagaagagaaggaaaatttccgatcaaaggaaaaaggagaaggaaaatttccaatcaaaggaaaaaggaaaggaaattcccaatcaaagagtgggggaaagcaaaaagaaaagaaagaaaattcccaatcaaagaatgggagaaagaaaaaaagagagaagttaaaaagaagaaatctcctggtcagagaaaccagaagaaatgtgccgagaggtccttggaccagacaatatctgaacaatacagaattgtcaccaaatgaataaaaaagaaggaaaggaaaccacgacctaaaatggt

SEQ ID NO: 116732 - DNA, 450 bp, Glycine max
  unsure (1)..(450): unsure at all n locations
caagtaaaaagttcttttaaagccaaaaatgttgtttccacttctaggccctgagagcttctacaccttgacttgtttggaccaaccagaactgcatctctttctggacacaaatattgtctggtcatagtggacgattacaccagatggacatgggtcaattntctaacctagaaggatgagtattttgataccttttataaattacgtaaaaatattgaaaatgaaaaaataatttgtatcttttcaatcagaagtgatcacgagggagagtttgaaaatgatttttttgaaaaattccgtgaagagaattgtattcaccataattntacacttgaagaacatcataatagaatgatgttgttaagaggaaaaatagatctcttcaagaaatcgctaggaccatgcttaatgatcacttaactcccaaacactttgggctgaaatagt

SEQ ID NO: 116733 - DNA, 319 bp, Glycine max
  unsure (1)..(319): unsure at all n locations
tggagaggatgcttcaatggaggaaaagaaagagggagagaattanggangggggagcacgaaattgaaggaagaaaaagggagagaagttgaactctgagttgtgtctcacaagactctcattcatcaaagttacaacaagtgttacacgtgcttctatttatagactaggtagcttccttgagaagctttctttacaaaactctcttgagaagctttctttagaaaacttccttgagaagcttctttgagaaaacttccttgagaagctagagcttagctacacacacccctctcataactaagctcacctccttga

SEQ ID NO: 116734 - DNA, 338 bp, Glycine max
agcttgtaagaatattggtgccccttaatgtggtactaaggggcgatctggcgaaggtgcaagttgactctccacatccacaaatcacacctaaatccaccatccccagttgcccaccttcaactgagctcacgtactcccacgttgcccttaacctcattcctctcagcaccgggtccccatcaacccctccaagctttctcaatatccaagcaattcaatagccaaacatcatgaactaccctaaaccaacaaaacagggtagaggcagaaaactctgcccaaaaacacattgcaataccacagctttccttactcaaataccccagtaacattct

SEQ ID NO: 116735 - DNA, 458 bp, Glycine max
  unsure (1)..(458): unsure at all n locations
tcttatctaaggcacattcttggtggcgaagctccttcttctatggcttattccctagtggatggtgcctcccctctccttttctccttctccattatgctaccattcatcttccaagaagcaaaggaatccattgatgaagaagattataagcctacaagctccaatggagcttacatcaccttatttatttaattataaaaacttctaccattttctaaaactttatttttaacaaaaaacttttttaatttattttacgaaaaatggggtgttacacacataacaatcaaaacctcggttttattgtcattagttcattctttcagtccaagatttacaattaanattaagaaaatgaatttagtcttggtgatcaaactaagtgttactcatattacaaaacttgaataaaatgtntaaattacttttatatgatatgtgtgtgcacgtgtgtg

SEQ ID NO: 116736 - DNA, 227 bp, Glycine max
cttaagtgatcaggcatacctaaacgtgagggcactcaactattgcgcattctacccatattcagaaggccgttgctcgctataatctgaattgcccgggttcgaatgagatcctctacgaccgggataatgtgtctgactctggctcggaggtcttgactataagcatcatgacgtattgcggatggtgcttatggcctcttaaagatctaaattctagacgatac

SEQ ID NO: 116737 - DNA, 275 bp, Glycine max
  unsure (1)..(275): unsure at all n locations
agcttgcatttgaggaggannnnnnattttttatnataataccagcgattctcacaatgtaaacccgtataactgtgtgctcggcgttacatcatatactagaaattatcataaaacattgatatattgcttgggatggacccttatgctcaagtaacaggatgggtataatacaaactaatggtcgttgaggaattataattattcaaaccaggcaatctgggtaaagtcctcatgtgtatatattctattacgatcactcttattaatacata

SEQ ID NO: 116738 - DNA, 231 bp, Glycine max
actcaagctcgcggactatacctacgaccaaacacagacgtgtttctgtcttgatcggatgtaaagcgggttgcccagcagtactattcctaaccgtactggagctgtgccacggctgtggcctctatagatatctagagtcttaacatgacctactgagactggagccatttgatcatctaaggcccgaagatcagtgatcatctgtacctgcaaagccactctcattat

SEQ ID NO: 116739 - DNA, 379 bp, Glycine max
  unsure (1)..(379): unsure at all n locations
tatccttatggcctgcctccggacttcaccctccgtgccattccggaagatntaagccaagcccctactttcgaggggcaactcccaccttatgaagactatcccgggcaagacgatggggaaggagatacccatcttggccccctactccacctcaaagatccgtccccgcatgaactaccccaaccgaacatagtccgtcataccccggcctcacccacacccgtaaaagaatntgttccctttgcggaagataagggaaagattgaggcgcttgaagataggttgagagcagtcganggcctcggcaattacccattctcggatttagcggatttatgtctcgtgcccaacattgtcatccctcccaagttcaaag

SEQ ID NO: 116740 - DNA, 317 bp, Glycine max
gcttgcatccattagaagagaaagaacttgtgactagaattatgaatcaaaatgctcgacagattgtcagattgatcgtgaacgaatgcattaactgtatcttggtgagagtgtgatcctaaaatttggagagaaacgactatgatttagtactgatttttgcatgaatctctgaagtatggattgaatgcctgaaattgatgatgatgaatgccatgttcgagtgcgatagccacttcacccaaaagcttactacgtgcttgaatgagatatcccttgcacccagttttgagctggatgactgaacctttaaccta

SEQ ID NO: 116741 - DNA, 194 bp, Glycine max
  unsure (1)..(194): unsure at all n locations
ctagtctataaatagaagcatgtgtgactttnnnnggcactnngaagaattggagtcgggcgagacacaactctaaggtcaacttctatccctttatcttccttcaattcttgctcccccctgtctatttctctccctctatctgttcctccattgaagcattctctcctaagctcttatccaacgctcatctt

SEQ ID NO: 116742 - DNA, 392 bp, Glycine max
agcttgcataagtggacaagttgaaagttttaaaaatctatattttcaataaaaaaaagtgaatgtggcgactttgaattgggtcgagtcatccattttgctcaaaaaggtgagccaaacaagtttatacaagtcagaagcatgcatccaacttgaataacaaataagactaataaaaaatttggtttgttattaaattaattgatctggatgatttaggtatgtgctttattacacttgctaattgaacattcaagtaatactttttcacaacaacagtgacaacaaagactaatgtgacatatgacatgacaatctaaacacatacacatataagctattgtaatgtgaaaattagagaagaaattgacaaaagtgttgggttgaaagtt

SEQ ID NO: 116743 - DNA, 393 bp, Glycine max
cgcacgcatgcaagccctagcctgaacggtaagcgacaactttttcggggttagcgtgacctattggcggcaagtgaaaggccttacgaacattattgaggtcaattaaactaagcgacagctattgcagctaagcgccaggcatgacaactgagcgagtcccgatgagccaaacacgagcgccctctgggcctaagatgcatcaatttaggctaagctggccagagcctggcttagcgagagtggcggatttctaatatgcaaacctcgccacgtgggcttaccctcgcgctaagccaagtctctgtcaaaaaaaaaaaacagattttgaattgggaacatcggctaagtgcacaggttcccttagcgagcgccgatgagaatacaacgtct

SEQ ID NO: 116744 - DNA, 324 bp, Glycine max
  unsure (1)..(324): unsure at all n locations
ttgggatgtcttcttcaaccttaaggaccttaaaaatacttttaaacctattattcttttggaagcctaaaattttgggggtcccttggccttcttgggtttttacatatatctccatccttccaaaagctaaaaaactcctttttttgccccactttagctnttaaggctttctgtctggaggcttgctagcgcattttcacgctagtgcgattagtgattttggctgaggagtcaacgcgctggtgccgaagaacaatgacttctggcagctgatgccgctgaccatgctactggtgatntctccaatctctactcctaaca

SEQ ID NO: 116745 - DNA, 139 bp, Glycine max
agctgatctggcctccgattaacaggacttttatagaaaatttctgcgcgtcgagacaagcgtcgcagcaggggcaggaccaacaacaagataaatattcatatgcaccacacgcacctccgaagtaggcggcattcct

SEQ ID NO: 116746 - DNA, 363 bp, Glycine max
  unsure (1)..(363): unsure at all n locations
gctttcttcatgcttattcctacgaatgaccctctctacctctctttttgcctgcgtgcatcttcatgtggaaattatattgaaagacttctttgagctaaaaatcaccctcataaaaccccacaaacaacttcatcataatggtgaaaggtcagatagatgacctattgaaccgagagttgataataaagcagattgcgaaatcatgcgacaaagaaagttaaggagtagtatacggtaggaaaaatgcataactaaggattcacatgtaacattgatcatggacagaatgaaaggctcanggaagaacaataataagtaccagagctcttagacatatatgaactcactaaagacaagaaa

SEQ ID NO: 116747 - DNA, 298 bp, Glycine max
agcctttgaaatgactgagtctggactcttgacttattttcttggaattgaaatcaaaaagtcagaacatagtgttaatctgtcaaaagaaacacgcaaaagaaattttgataagagttcaaatggaggaatgccaatctgttagcacaccaatgaatcaaaaggagaagtccagcaaggaagatggtgctcctgacattgatgaagagatttatgggaccttgatcggatgtctgatgtatcttactgcgacgaggacggacatcctatatgctgtgcgacaaaatgatagttttat

SEQ ID NO: 116748 - DNA, 456 bp, Glycine max
  unsure (1)..(456): unsure at all n locations
ctctagcttcttctggaccttgaacaagcaatcaactcctctntcagaaccatgctatgtgctcgcgactggtccctntcttcccttcgcaacttgagttcactattgctatcccatagagctccgcgacaaattgtccggccatactcttccttgcgagccctcttggtctctagttcaagggctcttgcggtaattgcattctcttcccgtaacccggcacactccttccgaacgtgtgtagcggccaacttgaacttctccttggcaagttttgcctttcctaactcgctnttgagagcttggacttcttcgtcctcttccagtgcttcaaagctctctttgctgacgacttttaacttggcgagccaatctaaacctcgtacatgaactttcagccattcgtggtacccaccaatgatgccattacgaatgcctctaagctcttgatctttc

SEQ ID NO: 116749 - DNA, 317 bp, Glycine max
  unsure (1)..(317): unsure at all n locations
cagcttcttccctatttttctattaatatgtggagaggtgaanggaaaaatgttcaggcctcctggtgattcgagatcacttgaaattagtgaaaaaaatcggttccgtgaagaaattcccagccggggcgctttcgttacgtttctgtgggtgatttcgtgaaaattatcgatcggtcttcgaacgtatacgttcgttcttcatcggtcttcagtcttcaaccgattagtgtccgaaatcgaactatttaattcattctatgtacccttagtggtcctcatatggtgcgccgtactgtattgttcatttcatttac

SEQ ID NO: 116750 - DNA, 356 bp, Glycine max
  unsure (1)..(356): unsure at all n locations
ctttgaatggtgtnncatgcataagaatcaacattttcattcttgaaccctcatctttaaatgtgatctactagtgcgttaagcgacaattgaagacttgtattaaacaactaaaatagataagctttcattggacaattgattggctgatgacatttgataaagaaacacttgttagttaaagttggtttataaataaataaataacatcattttaatgcgtctctgcaaattttgaaattgactgaaagaaattaatataggtctgcatatatacttcaaaaacttatggcagtctcttccagttacaagcatataacataaggaagggagaagcttgtgcgtacctatatttc

SEQ ID NO: 116751 - DNA, 189 bp, Glycine max
gaccttaagtcaccgcggctgcagctaacaactttaatcagtgttcttgaattccaaatatattaatgatcatgaattcccgaatatagggggagttaaccaatgcccaatttatctatatacaattggttggtgcgctgcctgaatcttgatttcacgggattggtttggtcatcctcaaaaaggggg

SEQ ID NO: 116752 - DNA, 411 bp, Glycine max
tgaccattgcatgcatctctatagttgaaatcttttttaatgtccaaatctttggcattcttcacatctgttagcttaatgataacaatcagctgttaacattgggcaatattatccatgcctaattattaaccacttcatcctgggtctaaacctgtgagcaccacacaatccttcatgtatttctcccatgaaccgcattgattcaacttggtttacacatttcaacaaaaccccctattaaagttccttctatacaacttgtctcctgtcatggtatacttcaaagctttctattttgtcttgaattcaactttgctggatgggcttcataaataatccattatttattactacaatgggtctgttgatctgatctccatcatgcaatactcctctatagatgattca

SEQ ID NO: 116753 - DNA, 246 bp, Glycine max
  unsure (1)..(246): unsure at all n locations
agcttgttgtgggacatttngacatacttttctatctgacatacaccacaaattctggcgtactttattttcaaattggggatgccattaaccgcccctatgtcaatgattttggtcatgccttttaaatgcagaattgtcaatatcttatgccgtattatgacttcactcttctatggatgataaacattgagaggagtgcctggttacatggggtgaccatgcgaaacaatcgaactttgatct

SEQ ID NO: 116754 - DNA, 286 bp, Glycine max
  unsure (1)..(286): unsure at all n locations
ttatataanaacgaaaatggcacgaagcttggacaaaataacagttatgaaaggggacttacattcaaaaacatatgagagttctttatagtcatggccaccactccgaattctcatatgaataccaagcttctatgagcaagtcactgccacttggacatgggaataagtcaagggtgtgaatataagcttaggttttggcgctgaaggcaccaaataccttaggttctgtgcagaggattcaaagatcttgttgaatgatgcattttgtggaatggaaaatgat

SEQ ID NO: 116755 - DNA, 420 bp, Glycine max
  unsure (1)..(420): unsure at all n locations
gctttacagctatatgaaagaaattctacagattagcttatgcattatcttaatttagcctatagagaagcttaattcaattttttttctcttggattagcttatggagaagttattcaacaaccctattacattttctgcattatataaggatatctatctaatgccgtgaccactaagttttncaccacatgcctaaatcaaggaagagcttttgaaacaaacttgtgcatgctttgtatcattctgtaaaacaatctggatttgaatcatgtgactagcatacaactcaattgattctctagcactggtcttcggtctttccagttttggccaggctggaaaaatgatcaaacagcaataaaaatggataactcttcatataagctgcctttctgntaaatttcctctttctgtata

SEQ ID NO: 116756 - DNA, 346 bp, Glycine max
cttattccctagtggatggcgccgactcttacctcttctcctttgtcttccgctgcatctccatggtggaaaatcaccattaaaggacctcattgaagctcaaagatccaacctccataaaatctccacaagcaagcttccatcaagtggtaatcagagcacaaaagcttcaagtaggtgctccttaaacctccattaactttttgctttaccttctcttccattgttgtttcttcatttttctccatgtatctcctcacatgtcttgtgctaaatgttgttaacatgattctttagagtttccaccgattaaacttgctatagaagctagatttgattttctatg

SEQ ID NO: 116757 - DNA, 438 bp, Glycine max
  unsure (1)..(438): unsure at all n locations
ctcagctgtgcatctgttcatggagaatcacaatctctactgccttacttgatataggttgaaattggataattctttgggtattctaattgaatggattgatccgtagtgttgatcatgatttgtgaggaatagtcngtgccaatggtcatgtggggttggtttgtgtggtgatgcaacatgagatgagctaaaccaggttggaagttattaaagttaatcaagtggtctcaacaactcaagaggggatagatngagttcttttaagatggtttcgcaccgaacctctaatcctaaaggaactagttaccttcaaatatatntaataatatntgatttagtgagaatgacacctattattatcccaaaccctaacctcaaatatattgcatataaaataatgaagcaatttatcaaagcaataaagacaatataaaa

SEQ ID NO: 116758 - DNA, 371 bp, Glycine max
tagggtgatatcatggtttttcacttaaggcttgtgatgagcttcaaaacaaagaaagaggaacataggctcataatgggctatgaaaggaattaattcaaggtaggctcatttggctagaagcttataaaaaaaaaatgcctaaatcatctcccaacatgcatgtgaagcaagaagtatcaacaagagtaaagccaaggctattgtgcaagcaatcaatggggcaaaacacaccaaataaaatagatgatgatagctcaaattctcaccaagggtaaatctatcactttcaaaactaacttgacatgtagagaaaaacaaagattcaattcacaaaatgccaagaaactcctatttcaaaaacaattacc

SEQ ID NO: 116759 - DNA, 405 bp, Glycine max
  unsure (1)..(405): unsure at all n locations
ctacttataatgttagatatatgatgtttatatatatgatggtataattttgcatgatctggccaagaaaatatgaaggttctacctgccttattgtgtataatatatgatggttatatatatttcgaattttggtggtaattaaactggttaattagaaaccggattaatttttttgttaattaaacctgttaattttgcatgatcttgttaataaactggttatataaactgttatatatatatatgatgttacattnttaaactgttataaacagttattaaaaaaatgttaaactagaaaaaaaatgttataaactgtattttaaactgttaatagagtaacatttttctttgtttattcaaatttaataaatgtatataaatgattatgtgatgatatgt

SEQ ID NO: 116760 - DNA, 378 bp, Glycine max
  unsure (1)..(378): unsure at all n locations
agctnggaacataatcgtaggagtacgattcataatattttcctcgaaacccccaatatcgaccattcggtcatctctcttattaaccagaacatattccttacgtccatagctcgccagcaacatgacatcttcatcttcagacatgcacaacggtatcattgaaatagatggaaatggaaattgatcaagttgaagatgctcataacttacgttcaacaattgagtccaagatttttcacctccaaattccctcattagccaaacaacaaaatgggttctcccatgatcacaagaaagacagaggtaacccttcaaaaccccaagacgaggctcaggaaaagagacttcagacagaccatcaggcttcaacaatat

SEQ ID NO: 116761 - DNA, 476 bp, Glycine max
  unsure (1)..(476): unsure at all n locations
tagacactcaagcttccncgactactagctaaggccaaagtgatggtggacacctactccgcccncattgagatccacaggcttctcagctattgtcagcatatgatagacttaatggcccatataattagaaaccgctaggaaagtttgtattgtcacttagatcttaactagttataaactttctgaataaaatgagtntatcccgcgtttttactccaaagatcagtgcgaatcaaatcactcccgcattntatctctagtatgcattcatatcatgcactgcataagcatctcttcacgacatcataatgaacatatcgttcctgcatttgtccgttgtcatattccaacagcgaactttgcatgagtcattgcatcatcatgcatatgcgttcaacatactttttattctacaaactggcatacctttgtnttcatgtttgctcatgcgtgatccnttgcatttcctcaac

SEQ ID NO: 116762 - DNA, 384 bp, Glycine max
  unsure (1)..(384): unsure at all n locations
agcttgagggaaaacttgatgccttggtcaacctantaactcagcttgccatgaatcaaagtctgcatctgcacttgttgcaagagtctgtggtctatgttcttctgcagatcaccatacagatctttgtccgtctttgcagcaatctaaagtcaatgagcaacctgaagcttatgttgcaaatatctataatagacctcctcaacagaaaaaccaacaacagtagaataattatgatctttcaagcaacagatacaatccaggttggagaaatcatccaaatttgagatgggcaagtcctccacaacaacaacagcctgtccctcctttccagaatgatgctggtccaagcaagccatatgttcctccttcactacagcagca

SEQ ID NO: 116763 - DNA, 456 bp, Glycine max
  unsure (1)..(456): unsure at all n locations
tcccgacccaacccgggcatagtcagtcagtgagaacctgtgatgtacctaaacaggctatctcctggcagtcaacagataaaaggaacaaaacccacaagcaaggatgcttgtgtggtggctgaccaactgtgaatcttgtgtgatatatgagttatggtctctggtaatcgattaccaanggtgggtaatcgattacaaggcttaaaaatgaagacaggaggctaagatagtctctggtaatcgattaccaaggggtgtaatcggttaccaggcttgaaaacgaggtcaggaagctaggagagcttctggtaatcgattaccaaggggtgtaatcgattatcangcttaaaaagggaactgggagatggtggaggcctctggtaatcgattaccagcctgtgtaatcgattacacaaaggaatgggtcactggtaatcgattaccaggtatgtg

SEQ ID NO: 116764 - DNA, 223 bp, Glycine max
gaaattcaaacgactataacttttttactcagatctctgattgaggcccatattatattgagacgattaaaattgaattctgaagctgtgagctaattcaaacgacaataactttttactcggatgtttaattgagtcccgtaatatatcgagacgttcgaatttgaattgtgaagctctcagcatattcaaacgacaatgactattttctcggatgtttgaa

SEQ ID NO: 116765 - DNA, 410 bp, Glycine max
  unsure (1)..(410): unsure at all n locations
ntcctctaccgtaaaaaacattgtcggccagctgcttgtaattaattgcgcaatgtcggctganaaatatcagttggggctatntaactaccgatgctggctactgttctttctattccacccctgaataatacttggacgatgtcgatttggaaatgtccgatcggagtcatccggtcatgcttctttttgagacctcgatctgtcatcttttcctggccgacgtcggctggcatttttttcgatcaatatcggtgaatcatgctttttgccaaggtgggctaacgtcttcgtggctgatgaaatgagagcatgccagtgtcggccgaaacacaatctcgcacgaaaaaccctagccgacctacanttgtaaatttgtaggcaataccgaacaacaaagaaatattatc

SEQ ID NO: 116766 - DNA, 376 bp, Glycine max
agcctggattttacagggtatggcatatttctcatttcgtttgaacacttgcatggactaaaaattgaggttgatcagtagtgctatacaataccatatcagttgcttctggatcatttgtcaaacaccattacgtaacctagtactctgcttaattaaaaaaaaaaaattgaggtcaggttatttaagtttatttaaaaaaaaataggtttttcttatataaaataagtaatttttataatattttgatatgtttgttttaaattgctatacttaaaataaatgtgttttttgttttttgttaaaacaaatactatctacttcttataaaagagaggcttttataaaaagcacttttttaatttttttttttttt

SEQ ID NO: 116767 - DNA, 416 bp, Glycine max
  unsure (1)..(416): unsure at all n locations
ntgagggattgcgtatcctgatcaaaattcgatgtgtcctcttcagcaaaggtaacacaaaaagggtgcaccgaagaaatcgatgaaaagaaacccaggtcaacaaagcgtgatccatcttacttggagtatgtagatgctttgcattctcagcaaaatagcaattcgtcagtgaggcgtagttcatcatcttctgaccaacccaatccaagaaggatgatgcctgtgttggatncaatttagccatttatccacgacctcattgataatattgttgatgtcgaagctgatggaaattgtggatatcaagcggttgccggtttattaggtatgggtgaagactctnnggtcgtggtccacacccatctgcttatagaacttgccaaattcgcagaagactatatcaagatctttgg

SEQ ID NO: 116768 - DNA, 372 bp, Glycine max
  unsure (1)..(372): unsure at all n locations
agctttggncccctctctctatccatttctgtgtacagtctccttttaaatcaatcgacctttttttaaaaaaaaaaaagtttatgttagctcgcctgggcgaacaaccccgtgccctaaatttaaaaaatgaaaaagggggacgtttttgccttcaaaaacttcttttcccccccccccccattcaaaagcactacccccggaatttacgaatttgccgccctaaggacactatttttcccatctttcgaatccgatttgcgcttttattcatcaccaacaagtaagatttccatcccttaactttctagcttttcattggagtattttttatctccttttggcgctctaaatgggggaatgtgctcaaat

SEQ ID NO: 116769 - DNA, 397 bp, Glycine max
  unsure (1)..(397): unsure at all n locations
tgtatgcgcgaaagagagagggggcacaagcttgttgccatgtgctgagtgtgtgaacaagtcgtgtagaggggttcgatggaacctgtatntatattagttgagtgtggttgttggtccttatttgtagggctattgtaacttgtagataatcccaactngtagataataccggaattatactgaattgtagttgatttgatgaatattgtagttgctacataatcantaatggaattaaatgttgtataccttgttaaaatactacatttatagacaatnggtttaaaaattactgacttgtagtttttttttataataaatgacaaaaattgtccnatattgataaagtaactttattgaacagacttaatgtattactgttaattgtaatata

SEQ ID NO: 116770 - DNA, 380 bp, Glycine max
  unsure (1)..(380): unsure at all n locations
agctngatttgtgagttgattttagccttagtttcactttggttattagtcaattgatccacggaaacttccaaagaaaaactttcgattgatttttttgattatttttttcaaagatattttgattattttattattatttttcaagatattttggttatattattattattttacttttttggtttaaccgtgattacagcgtgaatgatcggttagattttgttttaataaagattaaacaagattacaatgcaaatgatcggntgaaattcattttatcatttattaggtgagaaaacggcttaaataaacggctaatgcacgttaaaaatggaagaaaagaaaactgaaagtaagcgaaattaaagtgaaagtac

SEQ ID NO: 116771 - DNA, 447 bp, Glycine max
  unsure (1)..(447): unsure at all n locations
tgtgcattcaatatcctaatgaaggtgttccatatgttctcattactggactaatacatntgtagcccaagtttcatggtcttgcaggtgaagatcctcataagcatcttaaggagttccatattgtctgttcctccatgnaaaccctctgatgtccaggaagatcatatctntctaaaggcttttcctcattctctgtagggagtggcaaaaagattggttgtactaccttgctcccaggtcaattaccagctgggataaccttaagagggtgttctttggagaaattcttttgcatctaggaccactgccattagaaaagacatttaaggcattaggcaacttagtggagagagcttgtatgagtactgggaaagatngaagaaattgtgtgcaagctgtcctcaccaccagatttctgagccaactcctctgcaatatttctat

SEQ ID NO: 116772 - DNA, 258 bp, Glycine max
tttttttcgaagaattaatcatgacctcatcttatggagaagtaccctatggaacccgcagcaattttatgagcataacttaaatttgggaacctataataggctttgtcccccatgtaaaagaacacattgatggagcacacaagggtttgagcggattttgataaagttaaaacttcaaataataggctattatttatgctcatgggaggtatattttggaacccaatgcgatttttaaaccctaattaaaattgg

SEQ ID NO: 116773 - DNA, 418 bp, Glycine max
  unsure (1)..(418): unsure at all n locations
ctttacttatgtntctatcaaactccctgtatacacacctgtgtggtcaagatctttgttgaaaactattttatgtgttggatgatatatatacatcttgttccaaaaccatttgtgcaaaatatgtagaaaagcaaccatctatacaaaaagggtttaaggcttacatatacacattattgaatccctcttctagtgtgttgcggatactttacgtacctgttggacacctgtatacctatacccagatntgctacccccactatacttatttttttcttttgatgtagatgtcttaattatgtataaagtcaataaatcaataaacaaattcagttaacagactaatgccaatagattaatattcactaaatcactcaaacatcacatntgaaacaataaaacatggatctggcta

SEQ ID NO: 116774 - DNA, 253 bp, Glycine max
  unsure (1)..(253): unsure at all n locations
agcttgtctgctaaattatgtccnctttatgaggagcttactggaaataactcaatctgacggacgaatgatttagctggcccaattgggtcatgtagttataagcgccaatcatgtatctatattactacgactgcactaaattttggagaaaaaaaaataatttagtttcttgtctttctcaacaagagaacgagtcacagatgaaaactatatgtaatatctccctaacataaaccaatggacctgctta

SEQ ID NO: 116775 - DNA, 278 bp, Glycine max
  unsure (1)..(278): unsure at all n locations
tgatagaatcctgcgtgacccatgttgtgaatgtgtaattgtatgtaatgagacgatgtgcaaagtcgggagttgtgataccaatcnggtttgaatgaaagacacataactgaaatacttgtatactcaagagaaacattggccttgagaggagagaagcatggtttgcgtcttccttgattattgcatgatttctaacctgtctaaactctgagtacattctntgtatgatgtcatcatgtaaaccataacaagtgtgatcttgagggttgggaatt

SEQ ID NO: 116776 - DNA, 396 bp, Glycine max
gcaagcttagatcttcgctgcggcagcaatgtgtgtaaaaattgtattcgcaactttaaaaaactagagagagatgatctcctatatctatctaaaattaaggggaagatcacacttttgatgaaccactaagagtactttatgtctgtcatatatagatcatcgagacatatcattccatcaaagccctatggcctcctcttcaccaaaactatcaaattattgagaaaccagattgcatgtttttggttctaacacttactagactatggaacacgtgataatactatatacacaaactaatttaactataattcgggagggattcttttaactccaactacatctaataactttattatctttctaaggatttttaaagagtgtttgtcctat

SEQ ID NO: 116777 - DNA, 372 bp, Glycine max
agcttcatgatgatgaatcaagttgattcatgacattttgataatgacaaagatgttggccaaaagcccaaagaatgatttcaagattaaatcaagaacaaattcaagaatcaagagaagtttgatttcaagattcaagaaaagatgaattcaagttccaagagaagaaatcaagaagacttcacaagggaagtattgaaaagatttttcaaaaaacaaacatagcaccatttttttttcaaaagaattttcacaaaattttctaagttaccaaagtttttactctctggtaatcgattaccagcggcaaagtttggatttcaaagcttttaattgaatgtgcaacgttccaattggatttcaaatggtgta

SEQ ID NO: 116778 - DNA, 402 bp, Glycine max
  unsure (1)..(402): unsure at all n locations
tactgtggtgataaccaaaacgcctaaccggatcctataatgccgaaaatgattaaccttaggcctgcaacctccttaattcccgtggtattggtttttgaaaggggggaaaaaagtttttgattccaaaatgtcccccctttccgtattcctatattttggtgccagggtggctcgcccagcgagctcagctcccccagcgagctaccctgcttttttttttgagagggacattaaccatgtcccctcctccttatggttagcgtcttgcttaacttgacttacttaagtagagtaggcattgatacttattttaaaaaaacaaaagtaaagaaactgcgatacaaggatacgngctgcctgcacacgtttcgctgttacatgaaaagggcacatcatcgt

SEQ ID NO: 116779 - DNA, 266 bp, Glycine max
tccaacggagcccacgtactcccacgtagcccttatcctcgttcctctcaaagacgggtccccatcaatcctcccaagcttccacaacatccaagggattcaacatccaatcctcacaaactaacacagccaagaaaacagggcaaaggcagaaaactctgcccaaagcacaaaccaatatcacagctttttacattcaaataccccagtaacattctcttcgttccaatccgtaaccgctggatcgactacaaaattttactgga

SEQ ID NO: 116780 - DNA, 199 bp, Glycine max
  unsure (1)..(199): unsure at all n locations
gcttctgacgtttcggacgtttcgggagtatacccaagactctcgatcggtcttcaaattcatccgtccgtccttggtttctttagtcttcaactggtagtaccctaaaccaagctttcaattcattctatggtcccgtgggcgtccacatcttgtttcatgtatcnttattctcgtttcatttgcttgtattacccct

SEQ ID NO: 116781 - DNA, 390 bp, Glycine max
agcttattaatagaatttccctcaagaattggaaagttatattaggccataattattcttgaagtttttaaactttagacaagaatcctactctgataccacttgttagacaagtggcctcaataacttaagaggggggggggtgaattaagttttcaaaattttcccactaacaaacttttaaccccctttaaatggtaggctcagaatgcaaaaaaagaagtaccaatcaatctaaacgatgttctttaaacgtgtaagaaaaattgattgcaataaaataaatgagataagggaagagagaaacgcaaactcaatttatactggtgcgaccacttctcgtgcctacgtccagtcttcaagcaacccacttgagaatttccactatct

SEQ ID NO: 116782 - DNA, 452 bp, Glycine max
  unsure (1)..(452): unsure at all n locations
actcagcttctctatactgcacagctccttcagaattagcatatcttggaatttgtttaatggcatccagcagaggttattacctctactttctaatgtttcagatcttttctctgctctccatnttttgttggaaactgctctggagggaatggaagaaggggaatgtgctgcttctgcaaattagaattacctgtggaagaagattcacctgcacagaaattgttaggtaaatttttgtcatcacctttttctggagtagagtgaagtttggcaggttcatttgcagatgaggaaggtgctacgggttgaggtccttgacactgctttcccgacctcaatgaaatggcactgacatttttgggattttggatagcttgagaaggtagcttgtcagaattctgggactgttgttgattccattgtgtggctaattgtcccatctgattagt

SEQ ID NO: 116783 - DNA, 383 bp, Glycine max
agcttgtgcaagtctaatacgaagtccttggaccctattatatgtagaatgctcttgttgtaaacattttgccaaatctttgcttggtcacacgacagattgtacatcactttctttttatccttttccttggagaagttttctctgtataaggcccttggaacatgacctttatatgtcttctcccagctactgtttcttggcaagattcgatatattctatttagatagggaagaacggatgaaagaaagagaagagagatttcacacaaaattgttaggtttattgcgaataacataatttatgatgaaagggttcaaagtactctcaagctctctaaatgcataatacaaagctccttataaaggagacaacaactaac

SEQ ID NO: 116784 - DNA, 460 bp, Glycine max
  unsure (1)..(460): unsure at all n locations
tcctgatgggcctagatgggcccagtgctgaaggacactccctctaaatggatattttcacccncattttgagttttttgctcatttccttccgaaacgtcacanaatcttacggatcacctgacaattggctttaagcagctcaacatgaccagcaagaatctgcatgtcgacaaacaattgtccctagatgaaattagggtatgacagttgcccctctntacttatcttttattggatataaatgggaagtaaagacaagatactaatttcatttgagccaaatttccacccgaccgaccattagctcaatcagcgaaacctttcaaaagaaagaacatataagacattaggcgcatcagcaagagccttggttccttaaaatcgataaaaaaaatggataatcatgacggtctccgcatgctatcaaactcgctcatctcgggatagcaggggagac

SEQ ID NO: 116785 - DNA, 387 bp, Glycine max
  unsure (1)..(387): unsure at all n locations
tagctagtgagcccctatcttctagctcatttctgngnacagaacgcctgcttaaatacaatcgacctctttttataaaaaaaaagaaatagtatatgttagctcgcctgggcagagccaacctcctgcaccgaaaatataaaaatatgaaagaatgggggatcgttctttgcaattcacaaatactttcatttctccctccaccccctccctattacaaatagcaaataacccatcggaagtattatcgaaatttggcaacctctaggtaacacttattttttcgcatttattacaattccgtttttgcgcttttattacctcaccaacaagtgagaattccatccttaagctctctaacttttcattggagcatcttttatcccc

SEQ ID NO: 116786 - DNA, 429 bp, Glycine max
  unsure (1)..(429): unsure at all n locations
acacttaaatactaactgatgccaaaagagggcacagctgtgcatttctgatggtaacaatcgtgtgagggtcgatgaaccgattatatagtgatgtggggtgtcctattggagggctaatggtacctggagatatttcccaactgtagataatacccgggaatattacttgaatttgtagttggattttgatgaatatattgtagtttgctacattattcaattaatggtaatctaaatgttgttatacctttgttaaaatatactacattntatagtacaatagggttttaaaatatttactgaactctgttagtttttctttttattaatagaatgacaaaaaaatttgtaccaaatatatgatgaaagtaaactatntattgaacaatgacnataattgttattactgtttaaatttgagaatat

SEQ ID NO: 116787 - DNA, 290 bp, Glycine max
tctgtccaattgggcaaaagctgacaaaagaagtacaaattatttggacattttagagcaaatgcactctttattatataaggaaaggagtgcacgctgactttaaagaaataacgaaatgcacagtttaagaacaatttggaagttacatggaagttactaaaactaacatctaccggtggaagttacatggaagtcactacaacttaaatcaacgacagtttttaaaaaaaaataacttgcataaatcgccaaaaaccatctattcttcgaacataaataattattct

SEQ ID NO: 116788 - DNA, 306 bp, Glycine max
agtggtgctaaaccaaatgtgagccatgtttaatcttttgttcctctgtcttaggcatatcccagagcaatttagaaggaagctagatgactaaggtgaacaaatgatcttactcagatatcactcaactggaggctataagttgcttgattccaagagttagccgatataatactagggatgtggtatttgatgaatcttaaagctggaactgggagcacaatactgaaatgaacggaccttcaataatgataacgtttaaagaggaagacacaagtgaagggaatggttataccactcaaagag

SEQ ID NO: 116789 - DNA, 378 bp, Glycine max
agcttgacaccacattggtttagtttgttagacaaacacaaagcatttgcacgcgtctctattctttaaaaaaaagtgaagcaatgttactgaaaaccatctatatatatgagacacgccaacactctaaaaaatcacacattctctcccaacccaatttttaaaacaaagtagggtatttttgggagaaactagcagtcagaagattgtgaactcgacattgggttttattttttcaaatggatcgattattcacaatgatagtggtgtttactttcaaacttccactccaatacccatttgagtacctaacgcttgtgattttgcaacgctaaaaactagaatacacaatacccttcagctaaccgacaaacaata

SEQ ID NO: 116790 - DNA, 454 bp, Glycine max
tcttagtttcagatgatgcagatgggtttgtagctacctcatgcactcctctaatgactatggcatcatttctggcactaaactgctgggagttggaggccatcttctcaattaaatttctggcttcagtaggagtcatgtctccaagggctccaccactggcagcatctatcatacttctctccatattactgagtccttcataaaagtattggagaagaagttgttctgaaatctgatggtgggggcaactagcacatagtttcttaaatctctcccagtactcatacaggctctctccactgagttgtctaatacctgagatatccttcctgatggttgtggtcctggaagcagggaaaattttttctaagaatactctcttaaggtcatcccagctcgtgatggaccttggagcaaggtaatacagccagtcctttgccacttcctctaa

SEQ ID NO: 116791 - DNA, 438 bp, Glycine max
  unsure (1)..(438): unsure at all n locations
tccacttacagtgagtagttcaggcttaacgcaatcaagcgtctagcatacctctactaaatcaaaagtcggaaggatatgccgcttagcgcatcctgtcgctaagcccaaccatgtagttgaaatcctgaataagtctggggcttagcttcngatggtgcgcttagcacttctataaacaaaatgttccaaaggaggagtggtgcttagtgcatcacctgccactaagcccaagtgatagagttcaattgccgtaagggtgttgggctttgcaaagtgatctacgctaagctaaactattcagccaattggtcatggtcttaagcgcttattgttcgacaggcggcaagtgcaccagatcacgtaagtagtataaaatgggtagaaccgagtatcgaactctcngggaacttgtgttagttgtaaagtatattcagt

SEQ ID NO: 116792 - DNA, 348 bp, Glycine max
  unsure (1)..(348): unsure at all n locations
agcttctggtgggacatcttgacttgctttccaatctgacattcaccacagattctgccttcttctattttcagattgggaatgcctctaacagcacctttgtcaatgattntcttcatgcctcttaagtgcagatgtccaaatctttgatgccatattctgacttcatcttctttggaggatagacatgtggaggagtaactggtttcttgaggtgtccataagtaacagttgtcctttgatctgctgcccttcattagaacttcactcttctcatttgtcaccaagcattctgactttgtgaagtttacattgaatccttcatcacacaactgactgatgctgatc

SEQ ID NO: 116793 - DNA, 440 bp, Glycine max
  unsure (1)..(440): unsure at all n locations
tataaatactaagctttatcctgagaactggtcccaaagacacaggggtgaagatgctgaaaccctagccttcaacaggttctanggaagtagacacggagatggacaagaaaatncgcagtattgtgagtagcatttttgaaagaagcctctgtgcctgaagctaatggagatgttccaacatcttccaccccgaatgtttctgtgcctgatgttgagaaagatgttccaacatcttccgttccaaatgctgaagccgtcccttcacccagtgaagatgaatcaactggagaagatgatcaagccgcagaggagacccctgcaccaatggcaccagaacctgctccaggtgacctcattgacctggaagaagtcgaatctgatgaagaacccattgccaacaggttggcacctggcattgcagaaagacttcaatacag

SEQ ID NO: 116794 - DNA, 388 bp, Glycine max
agcttggacctatgaagacttcctaacgaatctaggcattaagcacctctgtcgaacattcttagaccaacaacaaagcagaggcaggcaataaagtcatccccaaaactcaagacatacaattccctagtcaattctccaaacgcactatgtctctagtacgtgccactccatgaatgatagttatgcaagagcatgacacgcgcgctatgcttgtcaaacccaaggtttgcccttggtgagtctctccaaaacccagaacggacaattccctagtcaattctccaaatgcaccatgtctctagaacatgccattccacgagtgataaatatgcaagaacgcgccaccatgtcttcagcacgtgctaccctacgagtgacacgtatg

SEQ ID NO: 116795 - DNA, 393 bp, Glycine max
  unsure (1)..(393): unsure at all n locations
agcttgaaaggaaacaccactatcgttgtgaacaatggatccatttggaaaaataaaacctaatgtggagttcacaactgtctgactgcttgtctctcccaagaatgccatagttttttgtaagagttaggttgagattgaaacatgtgctttcttacaatgttaggctgtgtcatatatatatatgagttttaatatcagcgctgcattttttaaagattaacaatacgcatgcacatgctttctgtatgtgttgtcaactacaccaatgtcgtgacatgctttagcttgcatcatatctgcatgtgtagtcatgttgtgcaaggtcctttcacgcgctttatgttaatacagacaacaatttatcatacacatntttccataatgtgttgt

SEQ ID NO: 116796 - DNA, 168 bp, Glycine max
  unsure (1)..(168): unsure at all n locations
gaaaaatgataggtctgcagctgtgcatctcagaccacanagggataggcacttgcctttgaagtttaaagactatcatgtggagttgtctaacattcttggccaagcagcagtaactaaagataaagaanaagtagaagcanagaggaatgcaagtgagtttgtaca

SEQ ID NO: 116797 - DNA, 395 bp, Glycine max
  unsure (1)..(395): unsure at all n locations
agcttttctgaacttgaacgctatntggtcttataataagaaagtggcaaccaattctatgaaagcttgcaaagagataaggaaaaaattatatgtaaataaccaatataagtaatatatgctacaaagtgtttagcaaacaccacaaaccttagcaattctcttatctcttcataatcagggtggacatattgtaaagtcataatctagaaaaaacaagggaaaaaatttcaaccctgagcccacaaaaacaaagagttttgtcagaagttaaattcaaagacaataaattactctcataggtggacacttgaaaaatggggcttaccatatgcaggttcaaatgtccaaatgaccatatattaactctttttattgagaaaattaaaatataa

SEQ ID NO: 116798 - DNA, 393 bp, Glycine max
  unsure (1)..(393): unsure at all n locations
ctctgctctgagtttatcttgagagagaatgcactcccgagccctgtatgacgtttctgatgactagcactttgaagcgtactctcttcatctctactgtatcaaggagatgtggcattgtggacctgtattaatactcgccttatcgaatttgtctagcacgggacaaataggggctgatccattatgtgnactgtcactctgataattgtgtgagtcaatgcaagtgaccatcacactattatatttatatggcgcagaatgtctctttttcttcatcctaggacattccaccttcatgtatgtcagctttctacactgaaaccagatgatctcattgcttcccttcttgtatgactttcagaatatggtatctatgtgtgtagaggaatg

SEQ ID NO: 116799 - DNA, 377 bp, Glycine max
tagctctcatattattatttaatgtaagctatgtctcatgtctccatttgagaggaacaaaaagggcccactttctcttgtgattgtgacccatactcagtcacaaaaagtgagaaaaatatgacctttgaaacgctaaaattctgcctcgatttgcgcgccgaatctctgtttccagatcctcacgtttctctgcgtccgtccgggccagctttcgaaagctaccaatatttatatcaaaacgctcagaataaaaccccgaacgtggttcacaggttggttccattaaattttaagtcgcacgctaaacgatgatttctagactaattaattaagaattaacccataacctcccagttatggacttatccttctta

SEQ ID NO: 116800 - DNA, 436 bp, Glycine max
  unsure (1)..(436): unsure at all n locations
ctaagattgctgcacataagggcaaaggtctgtgtggtggtctgcagaagagcatacaccacagagtctggcgacaggtgcagatcttntattcatggccagttgggttaccaggttaaccaaggcatctagtttaccttcgagcttcttagtctcagctgatgaagatgaattcgtggctacttcatgcattcctctaatgacaatagcatcatttctggcactaaattactgggagtttgaagccatcttctcagattaaattttggcttcagcaggggtcatgtctccaagggcttcaccactggcagcatctatcatacttctctctatgttactgagtccttcataaaaatattggagaagaagctgctcacaaatctggtggtgagggcaactggcacatagttatctaaatctctcccaatattcatat

SEQ ID NO: 116801 - DNA, 334 bp, Glycine max
ccaattagtgtaccacactactgttcttcggccaggctatcctgaaagaagtgtatcaacagcttttcatctttagaatgggcgcccatcttacggcagtacattttgaggtggtttttgggacaagtcgtccctttatacttgtcgaagtccggcactttgaacttcgggggaataacaacatcgggtactaagcaaagatccgtcatgtctgcaaacggatagtccccaaatccttccacagccctcaatctttcctcaaggagatcgagcttcctcctttcttcagttgccgggggcggcctttccatatacaaaactattggcgatgctg

SEQ ID NO: 116802 - DNA, 452 bp, Glycine max
tctatataagctgaaccatcttatcaataaacacaagttgagtattattcagaaaattagagtgtatctctgttatcttattgagagtgattctcctaaattctcgagtgattcaagaacaccctggctgtatcaaaggactttcacaacctttgtgtgtcgccctcgctggaaagagtgattctttccttcctatcatctccacccttgttctttcaaaccacaattccagaaaatccacctctgcccaaaattatctcgggaccataactcccatttcacacactcaaattaagtgattcttgagcctaaattgaatttcaaaacgagacctttcacctcgttttggaatcacctcatttggagccctgtagcttccgccattgccatttctatatttctgtccagccaccacttaacctacgttttaccatcccattcatccattttat

SEQ ID NO: 116803 - DNA, 370 bp, Glycine max
agcttagctggaacatggacgctagtgttgcaagggcatcgaccatctgattttcctctctatgaatgtgatgaaaagatatgtcatcaaaaaattctatcaacttcctaatgtaagtctagtaaagcaccaatttatggtctctggtttcccattcacccttcagctggtgaattaccaaggccgagtccccgtataccttgagcaatttgaccttgaaattgattgccgcttggatcccaagggcacacgcctcatactcagctatgttgtttgtgcagtcaaaacctaacctagccgtgaaagatatatattgtttgtttggggaaaccaatactgccccaactccatggcctagtgcattatacgc

SEQ ID NO: 116804 - DNA, 396 bp, Glycine max
  unsure (1)..(396): unsure at all n locations
tgacgaggcgcgagattcttctctgctgggcggngacgatcgagtgcaatggcgtatggaagtgtcgtggttgtccaactttgtcactttcaagacactgaagtttgttgacgcttctgatgcattttcttttatttctgaatgacaggttccgttggtggggaaattagtgtcttatctttacttcgcttttatttccaataaaagataagcaaagaggggcaactgtcataccctaatttcgtccggggaccattgtttggtggcatgcaaccttcgcttgaccgctttgaggtacttaacacccatcgttaggcaatctgtaaagttccgcgacatgccgaaagtcgaaaggaagcattgttgcgcaatccgtanagttccacaacattcctg

SEQ ID NO: 116805 - DNA, 337 bp, Glycine max
cagcctagtgcttgatttattgtctctgctcctaaactaccttctgcctaatgatcatttatgactaattggtggttgtgtatcttaatcccataacgaatgtcttatgttaacattctcttaattatttacatcaaggttggattaaagggttaaacctgataaaggataattctcccaacctaagataagagacttgcttgtgaatcaaggggaagcactgcattttaattctaatatcttctagttcaattttactcggtgggtaagttacaaaagcacacaccccccccccccaatttgtgccatttcctaccatctgttatgaacatttgat

SEQ ID NO: 116806 - DNA, 454 bp, Glycine max
  unsure (1)..(454): unsure at all n locations
tgagaccaaagcaattcagaatctaggtatctaaaacccctcaatttagtggattttcaaggtttgagaagtgaaaatgagaatggngtaattttggagcaaactctcatctcaaacaagtctataacattaatctaaacttgctcaaactgtttgtacaacgaanactccaccgaatcaaaatttgacccctcaacacccaatttaccctagaaatggcccttactttcactctggtcactcattntcctcatttgcttagcccagctctcccacaagtcttaaatgacattttaaactaggattaactcactttagcctccaattaccactaaatccagatntagctnttcagaccctcaaagcctcacactgttccactcatatcactaccattctcactatntaaccctaggttagctctacccttcatctctatcacgtgtctatcagc

SEQ ID NO: 116807 - DNA, 350 bp, Glycine max
agcttcggaagaaagtgatgaggtacaatccctaaatgtttagcttgaaagaacccgggtagtcaaagagaagttcaagtccatagccatcacagtctgaagagagtatgatgaactaagggacgtcaatatggccaccgttgaagccttggaacgagaaaccaagatggcccgaaaggaagaacacgaccaaaacaagttttgaggggctttgtaaggcagcaatagtgagctcaagctccgaagaggtgaaaggaatcatcacgggtcaaaggcatgatcttgaaagacgagctcaaggcttgccttatgtcggaaaaaaatttgtcccaacagttaaaccaaactga

SEQ ID NO: 116808 - DNA, 456 bp, Glycine max
  unsure (1)..(456): unsure at all n locations
tattaggacctataaatactcaagctgtgggttaaagtctcacgattgtcacgagacatcttgcctaacaaagtcaggttagccataactcggctgtgctttttcttccatgctatatgtagcaaagtcattgatcctgtcaagtntgatgagttggaaaatgaggccgcaattatactgtgtcagttggagatgtantttccccctgctttctttgacatcatgattcacttgattgtgcatctagtcagagaaatcaaatgttgtggtcctgtttatctatggtggatgtacccggttgagcgatacatgatgatcttgaaagggtatacaaagaatctttatcatccagaagcatctattgttgagaggtacattgctgaagaagccatttgaatttgttcagaataaattgagaaggctaaacctgttggccttcctaagtctcggcatgat

SEQ ID NO: 116809 - DNA, 334 bp, Glycine max
  unsure (1)..(334): unsure at all n locations
agcttccagtcatatctttatgataaaatatactatagtatttaactcctataaatatatggagtcattttcttatattaaatattaacaaaaacaaataatccattcattcgaaaagcttttcccatatcaagcactaatctctttttaacgtacaactagatgggagtaatcatttaaataaaagacaaatgaaagctcattgctttttttttcctattataattggagccaccaagctccatcccttttttaataaaacccaactgaattttnttaataaattaacataaaattataggatacattttattcgttaaaattatgactttca

SEQ ID NO: 116810 - DNA, 443 bp, Glycine max
  unsure (1)..(443): unsure at all n locations
cgcattgttntctctttctgtatttctaggaagtgtcttattatgtgtcaatctatgtgagtgcgtagcataacgactaagcggatatctcacgttttttttggaagtatcagcttcaaagattcacacccttttaattggtggagtaacaagtcaataattttgttagtcaaccagcttggtttttttattccttttactttcacatccggacaaacagtagcttatcacttccaaaagattaattagtgacagatgcagaaatttttcagtggaaacaaaaaataatctaatattcttttcaaacaaaaaattatgagttttattaaatgcgtaaaattagtatcaatctattatcttttatcttttataattatttacattcatcttattaaaaaaattattttgtgagaagtagatctaacttcttatgagaggacaaa

SEQ ID NO: 116811 - DNA, 331 bp, Glycine max
  unsure (1)..(331): unsure at all n locations
ctttcattgggatattatgatctccctttggcgccctaaaatgtgggagtgggctcaaatatatggggcaatattgaattggtttccttcctgaatacgttgaattaagggttggtatgaaatggccctangcctataatgcattttgaaacaataagacatgccacattgtccccgctctcttgctattgatgcctaaacgcgcgcccaccaagtgttcggggaaatgcctcaatggcattagcgtgtgacttttgtaaggagacaacccatggggtattttgggttgtgcatattttcttttttttggaatatgtattcttccccaaaa

SEQ ID NO: 116812 - DNA, 448 bp, Glycine max
  unsure (1)..(448): unsure at all n locations
tgacacaacttatagactntcaactntgcttttagctacaatttttntgtcaaccaactggggtatatgttcagttggatagaattctgatacgtttaatatcaatggtgcttgcagaaaagggaaagaacaaaagaagttaagaaaggaaatgagatatatgagagaaaatctcccctaagtgtgagaaagtctctactctcccaattctattactaatccttagatgatcccccaagttcctaacaatacaacctcccttcttataacagagaggacacacccactaccaataataactaacaataatagatttagcaattcccttactacccttaaaccctctagaacaaccatacttattagttntgggcctacgatcataaaccttgaagggcttatcccatttagaggaacgattcctagcaatatcaccctctataacaaa

SEQ ID NO: 116813 - DNA, 339 bp, Glycine max
agcttgtagtgaggtttggctacaaatattcattggtttttctaggattcaaaggattagattctaagaaagcacaactcctaaacttatccaagtggtcattttaatacaattagcttgctcactagcttttcacttccatttgcttttgaccttattacatcagcacacattttctttgattgtttttttaacacaatttatttatcgtgtgtgtgcttatgcttttacctctttctttacatcccaattaactccactcccccaaatttggggtaaatttgccttgaaccatatgctctcctaaattctaaacaaggtatctggagataatcattt

SEQ ID NO: 116814 - DNA, 407 bp, Glycine max
  unsure (1)..(407): unsure at all n locations
taagtcttcacatgttgctccccctatctctaanaatatggtgatcatcctaaaagtccataggtctaaagcccaataagggttgtataaatagaagtgaaattcttttcctaactctcctcttgtatcccttaattcattcctattatttgtaaatngacactataatactctatacaactatctntgtgcattattattatgggatagaatccatttacaccattcgactccagcgtctttaaagggttttgagggaaactgatttctttaggcccaccgcaaagtgaccattaaacattctcatatcttcataccttttgtcgtccttttttttcacattatnntttcttcatcatcatatcattatcttacaagttacaactattagatgataagggaattta

SEQ ID NO: 116815 - DNA, 378 bp, Glycine max
gcagcttgagaatggctagacatgatacatgtcagggtttggtttggttcaatgataaaaaggatgtcccacattatttccatgacacaaatgcaaaaatgatgatttggaaactttatgcaaaactggtcatgcatgcacctatgtggacactcaagtgtcaaatttttatggacatgtgatgctaaggctcatgattcatttcctctattttaaatcaacccaatgtttccaaaatatgttcttttatccatttgagcattcatccgagtccatttctggcgtccgggacaattgtcacagcgtacacccttcaggtgtatacacatttttcttgaacaattggttatgatcaatgaattctttaaaagaaaaatt

SEQ ID NO: 116816 - DNA, 388 bp, Glycine max
ctgcacgcatgcaagcttaggctaaacttttctaaactctcgtgagctatggaatctaaccattattcaacatgagggatctaaggatgaagcttggattgattcagtctaactacggatcaaggtttactgatttatgctacaacttacaacacaaatgcctgattgattagagaaacatctttatatatatcaactggtttgttataatgacccaacatctttacctactgctatcaatcttacttacttgcattctttactatttttagcttacacttaatttaattatgttctaaatcatcaatcatcaatgtgtctttcaataatgccttatttatgaatctaaccctgtcttagactattaccctgagtgcgatagtcagat

SEQ ID NO: 116817 - DNA, 456 bp, Glycine max
  unsure (1)..(456): unsure at all n locations
tgaggaatcttagganactgctagagacaccatgatcgctgccatactacacacgtgagcccgcttagaggtaagggatgagttattcacagttgggggagtagccgagaaccatgtgtnagggaatccttaagaggaaccaattgagatgggtttcgaggtatttctgccattttgattctattattacatctatatttttaattatatatttttacgagccaattgatgtcttaatgcanaattgctataaaattgatgtgttcttgtgttgagtgtgaaccctagaaattaggtttttttctaattagcatgaattgatgaaactaaatgattagtctaatgtctttactagttaatctgcattatgagtttatatttgaatttagcatactttgataaagaataaatggtcaaaagaaaaaaatccctctttgttttgcatattgtggtaga

SEQ ID NO: 116818 - DNA, 303 bp, Glycine max
gcatgaattccaatatcccacacttagcagaagggtcgaatttggaaagttggatatagacaattcaattcttgattccaaagttaaacgtattttaatatatatttcctagtgtccccaagaaatataggtgtttaaatataatctctatattttctcgaaacagtatgtgaatctaacaaagtaaaaactgtgtgaagtatggcaaagccgaaatttctcaaacaacttgtgtgcccaaactttcacatccaataattaaaaatgactttttgacccttactctggaggatacctcctcac

SEQ ID NO: 116819 - DNA, 468 bp, Glycine max
  unsure (1)..(468): unsure at all n locations
ctatagaccactcaagcttctagccaaatggacttaccttgaattaattcctttgatagctcttttgagccttgtttccctttccttgttttgaagctcactacaagccttaagtganaaaccatgatattaccatatccttaaggaattttggagctttggaattgttttgggaataagtgtggggggtttttgtttcattggacaacttgttttgttggctatgcttcatgatgtattttgggccatacttgatgtacattgtatattggttaaatgttggacatgctgaatgaaatgttgtttctcaaaggctaaaaaaaaaaataaaaaaatcgaaaaataaaaaattcgaaaaaaacaagaaagatcaagaaaagcaataaagttgagtgaataacatcttaaatggcacaagaatgatgaaactcttggttctactcttcatgtttaattnctatctttact

SEQ ID NO: 116820 - DNA, 359 bp, Glycine max
  unsure (1)..(359): unsure at all n locations
agcttgtgaccattagaagagaatgatcatgtgaatagaagtatgactgaanatgttagtcagttgttagattgattatgaaggaatgcattgaccgtatcccggtgagagtgtgatcttttaatcttgagagaaacgattatcattttctactaattttcgcatgaatctctgaaggatggactgaatgcatgaaattgaagacgatgaaagccatgtttgattgggatatccacttatccaaaaagctgaccacctgcttgaatgaattatcccttgccctttattttgaactgaatgaaatattgattgattgaacccctagcctatatagtgttatcttcaactacccttgactt

SEQ ID NO: 116821 - DNA, 446 bp, Glycine max
  unsure (1)..(446): unsure at all n locations
ggtgagttagatatacccattctgntttagggtttttgtgatgatgtttgtgatgtttatatgctgaaattgctgatggaaatctgttaaagacgaagggtagaactaacccaaggttagaaagtgagaatgtgatgttatgagtgaaaaaaacagagtgagactttgagagttggaaggctaagtctgaattctgtggtaaatggaggttagagtgagttaatactagctcgaaatgtcatttacaacatgtgagacaggttaggctgagctagagagaaaaacaaatgaccaaagtgaacaaagagccattgctagggcaaatttgggtgttgaagagtncaaatttgatttggtggaattttaggtgtaaatacagtttgggcaagtctagattgatgttatggacttgtgtgaggtgagaatttgcttcaaacttacctcat

SEQ ID NO: 116822 - DNA, 369 bp, Glycine max
cgagcttgcttctacactctccaagaagaattttattgttgtgattctaggcatcaacaacaaaaaaaatgctacatgagtgtttctaaaagattccttcatccctggatgatgtgttatcttcaacactatgcacccagaaacctctttgatctaatggattggacctatcttccttgaaaagtttagtgcttgacactatggtctgatgtaactctatgtggagcctgtaggccttggatctttttcatcaatgaagtcctttacttcttaaattttaatggtagtgaaatgaagaagaagaagaataagaagatgagttgagaggaaaccccacttcatggagaagattgagtcataagaagctca

SEQ ID NO: 116823 - DNA, 72 bp, Glycine max
atgctcataatccagtaccactctcgcaatttaataactgatgcttgttaaattttcaaatggttataagca

SEQ ID NO: 116824 - DNA, 453 bp, Glycine max
  unsure (1)..(453): unsure at all n locations
catagtctgcctttgcttgaccttctttatgcttatatacataaacattatgcatangccaaaagatcaagatgtagtagtgggttaaaaccataaacaacttcaaaaggagaacaattagtggtgctatgaacagctctattgtaagcaaattcaacatggggtaaacaagcttcccaagtttntaagttcttcctcaaaactgtcctaagcaaagttcccaaagtcctattaacaacttccgtttgcccatcggttcgtgggtgacaagtggttgaaaataacaatttagtgcccaacttgctccacaaagtcctccaaaaatggcttangaacttagagtccctatcactaacaatgctccttggcaaaccatggagtctcacaatctcctcgaaaaacaaatcagccacatgggaagcatcatcaacttttntacatggaataaaatga

SEQ ID NO: 116825 - DNA, 279 bp, Glycine max
agcttgcttacccattgaagctccttatatcttccacactttttggggtatgccatgtcttgattgcccttaatttctcaggatccactttgaccccataggtaccaactacaaaccctataaaaactatatcattctcacaaaaagtgcacgtctcttttttttcatcaaatgcgcgtttaccatagacttgaaaaacttgcctgataatgtctaagagattatgtatgcttctactgtacactttgagttcattaaaataaaactctacaaacctac

SEQ ID NO: 116826 - DNA, 449 bp, Glycine max
  unsure (1)..(449): unsure at all n locations
nggatagtgtgctngtatcatgaggagtcttatatatntagcaagagagggaggaaacaaaagttgatgctctagatgaatcaataggttgaaatatataggtatttgaggtaaatttgtgtatttgtagagtatcactattaagttttagctagccaacataataacttcctcagctcaagcaagatttgtctctaataaaatatagctgtagtctttaccataaacaagagtaacactgttaactattaagtcttcattagttggggatcaaaattattaatattttttaataagcatgacttgttatattaaaatttacgatttcctatcatgtgagttattntctttaagaaacataaacgttctgaacgtgaccatatatatgctccaaatntctgatcntgttgttttgtaatctgcatgatcgacanaatgcaatggtctta

SEQ ID NO: 116827 - DNA, 305 bp, Glycine max
tcacccgcatgcatgcaagcttgtaactgaatttcattttaatattaacccctttttcaactaaaaaccagcgcacatgaagtgtgaacactgttcttcattactccatcagagtgggagtgagaatctttcctgtttaaacaaatacgatatgaatttgatccccaagatgccatctttaaccttaataatctaatatccactatttgaatagtgctttcttacctgatagacttgagaatcctataattgcctatcattgtgactttgtcattatttaagattaaagaagattctgatcacac

SEQ ID NO: 116828 - DNA, 421 bp, Glycine max
  unsure (1)..(421): unsure at all n locations
tatcataaatcanaatgattaatgatgccatgatctatatctttcaattggggtatgattacttgtgtgatatgtttagaagtatttgattgattactcatgtttctcaaaaccattatatgatataaaattatttttatatattaacaatttctatgtctatcttggtaagtgttgatgtcttcattgtatctttagaagaagtgtctggtaatcaattaccttctatgtaatcgattacaagcagttagactaagtgtaatcgattacaacattcctgtaatcgattacagagcgtctatgtctataaattcgaaatatcagaaaccgcgagaatgcgatttctgcagaactcgaacccaaaatcctctaaatcttcaaaacttcatgtgtccctcaattccaaccaaatcatgtccca

SEQ ID NO: 116829 - DNA, 425 bp, Glycine max
  unsure (1)..(425): unsure at all n locations
ngctcaagaggaaacaagcantttagtagttgttgagaattctttctntttgtaaagttgagtgttattaattcaatattttactgccatcatttgtaatttcctggctttcttgttgtctgagggtaacttcccattcacgagatatgttgcaattggattcatccaactctattgacttgacaccgccaagacgtgatttagctcacgaagggtttgctgtattaccattttgttgttccctganatttgcgtactttccaactaagatagtatatcgactcttatgttctctcctcagagtatatccatgaactcagctgactcaaatttagattccaattccttggattttgctagatattcntgtangagatcatcctctggttggcattctccattgattgaagttgctattaccttta

SEQ ID NO: 116830 - DNA, 313 bp, Glycine max
  unsure (1)..(313): unsure at all n locations
tatnataccaaatgtactatcatgaaacctggcctcaagcgttctgtccagtcttgcgccaatatgatcatattgtaccattaggtgcctcggatctgctcaaaaggtagcaattgcggccaattcacttgccgcatctttatcatcattgtatttcaccgcgcangaacaaataatattgacaacgtgtgcttaaattaccacaccagctggatattattgtctatgcaaaatgctatccactctgcacccggtgatttatcagttattatgtaattaatatgactaaaatcagctaactggacaaaagctc

SEQ ID NO: 116831 - DNA, 353 bp, Glycine max
tgctttataccaaagcttctcaaaatcttgtttctaaaacccctcaatttagtggattttcaggtttgagaagtgacaatgacaatggggtaaatttggagcaaacttttccctcacacaagtctattaccttgatctaaacttgctcaaactggtgttacgtttaaaattccaccaaatcaaaatttgaatcctttacacccaatattaccctagaaatggctcttgccttcacttaggtcttttgttttatttcttgcacacccaaactttctataagttctaaatgacctttcaacctacccttactactttaacctccaatttcactggatcccaatatacccttcaac

SEQ ID NO: 116832 - DNA, 432 bp, Glycine max
  unsure (1)..(432): unsure at all n locations
tcccgtatccgtacttggaaggatctgattactgccttcctaatgcagtatcagtacaattctgatatggctcccgaccgcactcaactgcagaatatgttcaagaaagagggtgaaacctttaaagaatatgcgcagtggtcgatgggatttggcggcacaagtagctcctcccatgtgtgagagagagatgatcaccattgatggtagacactctgccagtgttctactatgagaagttagtaggttacatgccgtccnctttgcggatctggtatttgccggggaaagaatcgaggtaggattgaaaagatgaatagttgattacgtctcctccacacatgtgaatgcgcaaagaatctgggcaacaggtgcaaaaaggaaggaaggagatgcccatgccgtctcttcaacacccgtgtgggtcaaccc

SEQ ID NO: 116833 - DNA, 406 bp, Glycine max
  unsure (1)..(406): unsure at all n locations
cctgcacgcatgcaagctttataccacacctgatggagtctatcatggatcaattactatcagaatgcaaatnttctttaaaaaaagcattttgttgttcatgtctaacgaacaataacaacaatagtgatgttagctacatggatcacatgatgccactgggttcagttaaaaaccaaattctcagggtattcatgtctaaagcacattcaacataattttacattggctatcaactgccctaaactacccacctcttttatcctagcctgagacaatataaaatttgactgaaaagtacaatattggaaaagtgccaagaagattattcaaacaaatattttgcatgttaaaagctcatttagttttgtctaaagttttcccagttcaatcatcattaaacttg

SEQ ID NO: 116834 - DNA, 323 bp, Glycine max
  unsure (1)..(323): unsure at all n locations
tgtccatcaaagccaaataaaaagtatttgcattgagtatcgactgttgtcgcaacgtgcccttcgcgggcgagcgaaggcgatgctcactggtgcgcttcccaaaggaggaaagatgcgcggagtctccaccaacgtntatttgtggaaaatgtcagaaaaaccgaatgaaaccggtcaaaataaaaattctaagttctggagtcgtatttacgctcgaggaaggtattagcacctctcacgtttgtctcataggacaacaacctattctttagcaatgtggaaaatgtgttaccttaactcttatttctttnntatttttg

SEQ ID NO: 116835 - DNA, 306 bp, Glycine max
agcttgctctatatttagatggacgtttgtatttatgggatgaggttgtatgccatttgtgctttaagagtagtgtcccactggtaaaactaactattcaaattattgcctatcgacgaaatggccccgaggaagcttgcctcaaagaggtccatgaatgacaatgcatccaaaggaactagtttcgctcctgagtatgacagtcaccgttttaggagcgccgtacacgagcagcgcttccaggccatcacaggatggtcgtttctacgggagcgactcgtgcagcttacggacgacgaattactg

SEQ ID NO: 116836 - DNA, 403 bp, Glycine max
ccactgcgctgcaacttatcagagcaaaatcatgatcttccatacagtctctataatcttagaaagggtattttaaatatgaagggaattccaattgaagtatccaaacgtttggccaacaattttaagctaaaaagtcttttccacaacaatacctctttgtgatatcgattaccagaggatgtaatcaattaccagtggcccaaactgatttaacaacagcttttaaaatttgaattcaaaatttgcactgtgtaatcaattacacatatatgggaatcgattaccaacactttctgaatgttttaatttcaaatcttaaagcttgtaatcgattacacatatactgttattcattaccacagcagattttcaaaaaattttctttaccatcacatctttt

SEQ ID NO: 116837 - DNA, 439 bp, Glycine max
  unsure (1)..(439): unsure at all n locations
ctcatagtaggatactggtaacatatcttctatcattggtatcaactctntctccaggattgggggtgccacttgagcttgcatatccctccagctttggggccgtaccctctgaaagaatcgtgctctcctttgcacatgctccacagctgcgtcctatccaactagggatccaccatattgggtgaaaggacaatcgttgaatcctttgatggctctcatcctctntntgatgagatcgagtntttcccttccttccatcgcaagtgatggttctcccgcggagaaaagtaatggccagaatgtgcggngttgagagagtcccgcgatgttgggcttaggcagtgcatcatgcgccggtcccttggtggtgaaataggggcaattgtcaatgtctcagtgggcgcgctcttgaggacccttgtgggcacaccgaggg

SEQ ID NO: 116838 - DNA, 331 bp, Glycine max
  unsure (1)..(331): unsure at all n locations
tgcatgcatgccagcttctagagaaagctacatgaagcttcctcggcaaaaatgctgtccagccttcgttaaccgttggatctactacaatattggtctgctcttttcaaagacaatnatccttgacctgaccgctgggatctttgacaagatgcatggaatgtgctaaaatcctctttatgaagcttttggactaagcctcttaatgaagcttctatagaaatctacctgaagctgcctcggtaaaaacgctgcccagccctcgttaaaccgtcggatcttctccaaatatggtttggcacttcccgagacacttgtccatgatctgacc

SEQ ID NO: 116839 - DNA, 428 bp, Glycine max
  unsure (1)..(428): unsure at all n locations
agtagtcngtttaagcgactaacaaatcttttatacttcgctcacccnccattgcagggaccttttgtgcattaatgtctcaacgaaatttcaatgggggtttactggaaagtgcactagatcgtcaagtatttaaaattaaaacggatgaatccgagtatcaaacatagggaactaatgttagcctaaattaagttcaaaattgaagcattttttagagaacatgtataagtgataatttcaaaaataatttaaactaaacttgtttgataaaaactataaaatgcaaggtaaataaaatgacagcagtaggtagatatgttgggtctttctaacaaacaagctgatgcatagaaatatgtttctctaatcaatcatgctcctgtgttctatgttgtagcccaaattactaaaccctcgatccctca

SEQ ID NO: 116840 - DNA, 355 bp, Glycine max
agcttatgtacttgtctctatattcaggtgaagagaaaattgttaatcctcttggaccagtccatgcgagcccgggtatgtcattgctaatcatcacctttataacaaaaaaagtagtttgtaaaagagaaaaggaagcttacgttaaatgtgtttttactccctataaatataaaaattttggttttatcctttaattttctttttggtttgttttgatcttcataaattttttaacagtcccaattactatttttttggtaattatgacatgcatttaaaaatgtcacattagtgactattctagcatgtcatgtggcgtgacttgtaatggttgggggtttagtattatagt

SEQ ID NO: 116841 - DNA, 368 bp, Glycine max
  unsure (1)..(368): unsure at all n locations
tcaagaccatttgagagcacttgaattctcctaaacatgtcatccatatattctccttctttcatggagaaactntcataatgttgtgtcagagtggcaacctttcttagttgaacatcttatgttccttcatagttgatgcttaatgagtctcaaatctctctggttgtctttagtctgcatatcttgttgtactcattcttggatagagagcatgtcaaagtataacgattttttgtgtntagctccattattgcaaggtctgcatttatccattctgtttcaggtttgggaatgggtatctctctatttgtgatgatcaaccaaagtctctagtggttggacttgatgtacatcttcattttgtc

SEQ ID NO: 116842 - DNA, 383 bp, Glycine max
  unsure (1)..(383): unsure at all n locations
agctntattcactntgcacactaaagtattggactgttgaaatccaggaggttgtgactcgtaaacagtctcattacgtaagtcattcagaaaagcattatttacatctaattgaccaagatcccactgatttgtaatggctaaagtaaaaacaaagtctaatagtaatcggttttactactagagaaaaaggtttcagaaatcaaacccttgcacttggttaactccattggcaacgagctgagtttaatacttatttattgaaccatatgcattttcattcaccctaaatacccacttatagctaatagcctgcttgttagatggaagaggtattaaatcctaagtattattcttcatcaatgcttcatattctagttata

SEQ ID NO: 116843 - DNA, 442 bp, Glycine max
  unsure (1)..(442): unsure at all n locations
tgccacccagctcgcccaggcgaacagggttgcttcctccataagcaacagccttctggaggaatcttctggagggcccaagtgggcttggttgctatttgcacccncatttttactaagtacacccnctgcctttttttggtgattcttttttcgtaaagttatggaaacttacgaaatttgtaacgatacttgttttctttccgtaatgttacggaaccttgcggattacataatcatcccctttttgacttacggaatgttacggaacctcactaattgtgcaacgatgcttccatttgatttccggtgtgtcacggaaccttacggattgtgcatcaatattttcttttgttttccggcatgtcctagaatttcacaaattgcctaatgatgggtgccaagcacctcacaaggaccaaacaaaagttgcatgtcatca

SEQ ID NO: 116844 - DNA, 362 bp, Glycine max
  unsure (1)..(362): unsure at all n locations
gcctcagcaatctccttatttccagaagggaattctatcaatagacctccaatctttaatggaaagggttaccactactggaaaacccgaatgcaaatttttatagaagcaatacacctaaatatttgggaagccatagaaatagggccttatatacccaccacagtagaaaaagttacaatagatggtagttcatcaagttaaagcattacaatagaaaaacctacagatagatggtctgaagaggatagaaaacgagtacaatacaatttaaaagccaaaaacataataacatctgccctangaatggatgaatatttcagggtttcaaattgtaagagtgctaacgaaatgtgggacac

SEQ ID NO: 116845 - DNA, 342 bp, Glycine max
  unsure (1)..(342): unsure at all n locations
agcttgaagtcttaccgaaaccttatatctattttctcaatctaaccctaactcatcacacaacatcatattctactttggttttcctcccaagaacttcaatttttacaccctccaattcaccttccatgcgaatttcaatctcatatcttctcttccttcctttcatcactaactgttagtactctgcttgcaaagtctcactgtagctccaattacacatatatagtgtctcatctattggaattccgcaattgaatatatataattcactttgtctaacttgtgtatatngcaaagggaagagagagcgaatcaggttgagatattcatagatagaaa

SEQ ID NO: 116846 - DNA, 381 bp, Glycine max
agcttggattggatctgtctgacgaaggatcgatgattattaatttatgctacatacatagaacacaagagcatgattgatgagagaaatatatttatatgcattagcttgtctgttagaaaaacccaacatttctacctgcttgtgtcacttttacgtaccttgcatcttataatttttagcataaaggtttagtttaaattctatttgaaattagcaatcatacatgttcgctcaacaatacttgatttctgaacttaactcaggctaacattatgtggctgtgctcgatactcagactcatccactttaatttttaaatacttgacgatgcgatgcactttcagtaaaaccccattgaaattctcttgaaacagtatt

SEQ ID NO: 116847 - DNA, 371 bp, Glycine max
  unsure (1)..(371): unsure at all n locations
agcttggagcgctattctcagactcaacataagtcaggtggggaagaaatcataccatgtgcatgaatcttacacccagtgggttattgataggaccaagagctntggcctaccctaccacttacctagatacctatcgtccaccatcccaccatcatccttgcctatcccctttgacactaaggaagagtttcatgaacaattaaccaaagaaaggcaagaaaaagaaacttggaagaggagatgccaggagctcgagcgagagaatgagactttgaaggggaagatagcccaacagagccgtgagctttttatccanaaccaaagggtgattgagaaggacgactttgcttcccggaaagacgctttgc

SEQ ID NO: 116848 - DNA, 300 bp, Glycine max
tgtggagcttttatggaggcttgatctttgaacttcaatgaagtcctttcatggtgattttccaccataaagaagcagcagaaggcaaatgaaaagatgagaaaggaggcaccatccactagggaataagccatggaagaaggagcttcaccactaagaatgtgccttggataagaagcttgaagaggatactttaataggggaaaagaaagagagaaggggggagcacgaaactgaaggaataaaagcaggagaaaagtggaactttgaagtgtgtctcataagactttctttcatcaa

SEQ ID NO: 116849 - DNA, 338 bp, Glycine max
  unsure (1)..(338): unsure at all n locations
agcttctcccctattttgctataaatatggggagaagtgaagaagaaaagggttaagccccttatgcacttctctctttctcaaaataattgaggaaaattaattccgtgaagaaaatccaagccgaggcgcttccgtaacgttttcgtgagtaattacgcgaagattctcgaccgttcttcaagattcatcattcattcttcgttttcttcagtcttcaacgggtaagtacctcanaccgagcttttcaattcattctatgtacccgtggtggtccacattttggttcatgtatttttattctggtttcatttactttttatacccccttttgacgt

SEQ ID NO: 116850 - DNA, 454 bp, Glycine max
  unsure (1)..(454): unsure at all n locations
tactcaagctntgcagtagatgccactctactcntaaatttntaaagatatgttaacaaggaagcatggatatattcatcaggaaaacatcatagtggaaggaaactgcagtgttgtaatctagaagatccttccactcaagcataaagatcctgngagtgtaactattccttgttcaattggagaagttaatgtgggaaaatctcttattgacctcggagccagtatcaatttgatgccactctccatgtgcagaagattgggagagttggaaataatgcccactcgaatgactntacaattagctgaccgctccattaccaggccatatggagtaattgaagatgntttggtcagagtaaaacattttatcttcccggtagactntatggtaatggatatctctaaagatactgacatccctgtaatattgggaaggccattcatgttgacc

SEQ ID NO: 116851 - DNA, 339 bp, Glycine max
  unsure (1)..(339): unsure at all n locations
acagagaccaacaaggttctgttttttttgaaccagaagaggaggtctagccaggaccacgagcaaaaaccgcggatgagtatgcccaatttacgcggaaaaagaagctaaaggaaaggggatccacactttacaccaagaggcaaccatgtggatggaaccggntgctcttaccctgaacgggagtcaagaacttccccgattgatagccaaggccaaagcgatggcagacacctactccgcccccgaaaagaatcatgggcatctcggctgttgtcagcgaatgagagactaaatgtgccacattatgagaaattgtgaggaaacttggatgggctc

SEQ ID NO: 116852 - DNA, 205 bp, Glycine max
tatattttattttttttttaattttttttatttttttgagtctttttttttataataaatttaatttttatttatttaatattttttttacattttctttttatataaaaattgattagttttattttattttataatttcatttttatttttttatgtattttttttataatttttttttttattatcatttatttatttattt

SEQ ID NO: 116853 - DNA, 334 bp, Glycine max
  unsure (1)..(334): unsure at all n locations
gcaacgggcaaataatcactacccaacacttaagcatcaaattttaaataagctttgttttttgcattctctattttgattttgggaaagggtataaactcccacccaaaaaatatctacacaatagtgactctaaatctggaaggaacaaggaaaggcctatgcaacaaatcaatacatacagatnnnncgctgcaaactcaaaatcactggcaagaggcagcttggttgagctctcatatgggatttggatcctccgaaatgaggcattcactatataggtcaggattaaggaatataatttgctgatgaaaagggggacagaaagagcgag

SEQ ID NO: 116854 - DNA, 323 bp, Glycine max
  unsure (1)..(323): unsure at all n locations
ttttttttttcccaccccggggggcatttatgttaacttcccccccccttatattttttgagnnnnncttcctcctcgtctctcgtatttattatttttttatacatttttttttatattttgttttttgtattatattattttttattcatttctttttaatttatgttttactttttatttttgtcttcttaatttgctattttttttttctattctttttttatgttatttatagttttcttaattttctttgcttatttttttattttttttttttctttttatatttttttatttctttttcttttattatttttgtt

SEQ ID NO: 116855 - DNA, 307 bp, Glycine max
aggaggacgatacccagagggagggtatcaatggcaaaccatcgaggcggattcggtaattttgcagaagaccgccaaagagcatcacaagcaggtaaaaaaggtggacagcacagcgggggtaatttcaagaatgacccgcagcgcgcatgtgaagcacgtcaaaaaggtgggaagagcattcacggcaaaagcgacaactagccgggctaatcaatgacgaatgcatttctgtgtgtagctcgtcaaaatgccatcaccgccgtgtgcccgatgggggatacagatgaccaaatggaagctatcc

SEQ ID NO: 116856 - DNA, 233 bp, Glycine max
agaaaaagagggaaaagagggagaaagagagaaaagaaggggggggaggaaagggagagggacaaaaggggaaagaggggggagcaggagagggaaaaaaaggaggagaagaagaggagaaagggcgaagaagaggggaagaaagggaaaggaaagggaggaagagagcaagagaaagggaaaacaaagaggaagaagagggaagaaaagggaggaagaagaaaaggaaaaaa

SEQ ID NO: 116857 - DNA, 299 bp, Glycine max
agaattcagtttggctctcgtcttgggggaaagactgctccctgaattctccatgattgatgtcatcatctgcaagttctgcttaatgaaatgaacggaaggaggtgtctcaccatgcattgtcatcaacccacttggtaggataggagtgacaccgggcacggccttcgacccagttggctgctgggttggtgtcacaccacgcgttgctatagacccagctggttgggtaggggtaacaccgggcatttccataaacatgggtggtcgagtaagggtcattacaccaggtattgtca

SEQ ID NO: 116858 - DNA, 297 bp, Glycine max
  unsure (1)..(297): unsure at all n locations
ttcccacaacgaacaagngggacaatgataaacatcatggcccgaacggtgtccatagttccttaagaatccattagaagtgaaaacaaaaatatatccaaacaaagagcgtgggtggggcgctttatatggaagaggccaaggttgtcttgttaacaagcgggtggtcatagaaatgcgtcacgtgcttgaaaagaaggcaagtgtggatcttacgcgcccaaaatgtgtattgtggaaacatttttaagaagggagggagaaatcaatttaccattgtggaatatttttaatggg

SEQ ID NO: 116859 - DNA, 174 bp, Glycine max
gtttagttagtttatgcttttttattttttttttttgtttaacttttaatgaattaattttttttttatttttttgatttttaattatttttttgttgttttttgtttatttttttttttgtttttcttttaatttttttattttttttattttttttttttttttttttttat

SEQ ID NO: 116860 - DNA, 296 bp, Glycine max
ttcaacggaccctgagagctgctggaacagagccaactcaccacccatctaaaactagccacctctgacaaatcagaaaatacaaaaaaagcctactacaaagactacccaaaagccctcaatcaaggctaaaccctatactacaggaaggccaaatacaggcccaaagaaggaaaacctatcaaatattacattgataccgggtcatacttagcccagggctcgaatctaccctaggccatgaaacccaggggctccctggattctggcctattactgggtctcatccaagccta

SEQ ID NO: 116861 - DNA, 387 bp, Glycine max
  unsure (1)..(387): unsure at all n locations
accttgaacaagcaatcaactcctctttcataaccatgctatttgttctcgactggnccctttcttcccttcgcaacttgagttcactattgctaccccatagagctccgcgaaatttgttccggccatactcttccttgcgagccctcttggtctcttgttcaagggctcttgcggtaattgcattctctttccgtaacccggcacactccttccgaacgtgtgtagcggccaacttgaacttctccttggcaagttttgcctttcctaactcgcttttgagagcttggacttcttcgtcctcttccagtgcttcaaagctctctttgctgacgacttttaacttggcgagccaatctaaacctcgtacatgaactttcagccatt

SEQ ID NO: 116862 - DNA, 219 bp, Glycine max
aagggaggaaagaagggaaaaagagggaaaagggggaagacgcgaggaagaagggagacggggagaagagagaggagaagcggaaaggggaaaaacagaagaaaaggaggaagggagagaaaaagagaaaggggaagaaaaggaaagagaaagaaagggaaaagaggaaaaagaaaagaggggaaaaagggaaagagggagagagggaaaagagaaaga

SEQ ID NO: 116863 - DNA, 291 bp, Glycine max
tcgtggagatcagtctggcaagctgttgagaatcattgcatggttcttgcatcttgcctacaacttggtgtctgtgtgttcaacgcctcaggttctgctgaatgcaaatgcccgtttgaggtaactgggggtaacgaatgtttggttccatatgatgaggagtgtgaatctggctccaatatgattgcatattagaacacatatctatatgcattctacccttctgataattcttttatcacaagtagtttgcaactattgtgaacagttgtgcctgaatgaccctcaatg

SEQ ID NO: 116864 - DNA, 248 bp, Glycine max
  unsure (1)..(248): unsure at all n locations
ttttttttccaaaacggaggagagagagaaaaaacccccccccccccaaatatattagtganntccacacccacacgatatcaatatatattatattttataaaattattcaaatattctcatttaataaaatatacacttatttgactcattgatacgattataattatatgtttctgtaaattctttagaataaatataagtcttctgataaatgttaattatttaatatatcgactgttaataaa

SEQ ID NO: 116865 - DNA, 300 bp, Glycine max
aaaaaaagggggaagggggaaaaaaaaaaccgcccaccaaaggaaaaaaagggaaaaagaagggagagaaggggagaagaagagaagaaagaggggaaagggagggaaggaggggaaagaggggaggaaagggggagaaaaggagggagaaaggggaaagaaaggggaaaagaggagggaagggagagaaaaaggagggggaaaggaaggagaaagaggagggagaaagaaaaaaaggggagaagaggagaaaaagagagagaagggaaaagaaagaggggaaaaaggagagggaaaaaa

SEQ ID NO: 116866 - DNA, 261 bp, Glycine max
  unsure (1)..(261): unsure at all n locations
ttccagaaatggntcgacgaaaaagcaaatcaatctcattagtatgttatgaatctaatatgggtagtgttaatattaacacctggcggattgattctggatctactattcatattgcacatactttacanggtatggaaaacctaatgaaaccagtgggaagtgaccaagcttttatatgcgatagctagctcaatgttgagcattgtacctgccttttatttattaatggctattgtacaatataaaggacttgtattt

SEQ ID NO: 116867 - DNA, 196 bp, Glycine max
gggggggggagaagagggaaagagaaagggagcaaagagaaaggggaggagaaaaggaaaaagagggggaggaagcaggggagaagaggagaaaggagggggaaagggagaaaggcgaggaaaaaggagggggaagggggggaaagggggggaaagggaggcaaacgggagggaaagagggagaaggggggaaaaa

SEQ ID NO: 116868 - DNA, 70 bp, Glycine max
  unsure (1)..(70): unsure at all n locations
tttttttcacacangcgggggggaaacgaggccccccccccccccaaaaaagaggnnccccccccccccc

SEQ ID NO: 116869 - DNA, 228 bp, Glycine max
gagaagggaaggggagaaaaggggaagagagggggaaaaagaaaaaaggaaaaaaagggggaagagagggagaaacaaggggaaaagaggaaaagaggagaagaggggaaagaaaggagaaaaagggacgagaaaggagagagaggaaagaagaacggagaaagggggaaagagaaaagaacggggagagacgaaaaagggggaaagaggggaagaggggaaaagagg

SEQ ID NO: 116870 - DNA, 262 bp, Glycine max
gggaaaaggggggaagaagaaggaaaccccccaaaaaaaggagggggagggagagaaaggagagaaaaaaggagaaaagagagaagaaagagagaaaaagaggggaaagaggaagaaaaagggagaaaaaggggaaagaggagaaagaggggaaaaaagggggaaaagggagaagaagagaggaagagaaaaaagaggggaggggaagaaaaagagagaacggagaagagggaaggaaaaagagagagggaaggagggaaaa

SEQ ID NO: 116871 - DNA, 58 bp, Glycine max
gggagagagaaaaagaggaagggggaagaaaagaaaggggaaaaaggaaaagaaaaag

SEQ ID NO: 116872 - DNA, 142 bp, Glycine max
tttttttttttattttttttttttttttttttttttttttttttttatttttttttttttttttttttttttttttttttttttttttgttttttttttgttttttttttttttttttttttttttttgtttttattttttt

SEQ ID NO: 116873 - DNA, 290 bp, Glycine max
  unsure (1)..(290): unsure at all n locations
gaaaaaaggttgcnaacattgtctagcagcgggcaggcaagcggggaacagacaaaaccccccccacaaaaggaagggcaggcgaccagaagaaacgggcggggggaggaagacgcgcgggaaggaacaaaaagaacacacgcggggcgcagaaggaaacacaaaggagaacagaggaaaggaaggggggaaaggcagcgacggcagaggacgggcgagacgggggccgaaagcggagagccacggggcaaaggggaaaaacggagaacaaggcagaaacggggggaggg

SEQ ID NO: 116874 - DNA, 272 bp, Glycine max
  unsure (1)..(272): unsure at all n locations
tttttttttttaaaccaggggatttttatattttctcccctccctttttatttttatntttggtggtggttttgtgtttttttttatttttgtttaattgtttttttttttttttttttttttgatattgtttttttttattgttatttttttttttttattttttttattatattgttttttttttgatttttttttattgatttgatttatttgtgtgatttttatatttttatatttatattttttttttttttattttattttttatt

SEQ ID NO: 116875 - DNA, 71 bp, Glycine max
cttgaaggaacccattggtgagaaagtttgtaagggctttttttaggcggcaaggaagcctttttggcttc

SEQ ID NO: 116876 - DNA, 465 bp, Glycine max
  unsure (1)..(465): unsure at all n locations
atcttgatntannatgtcatgtgccatgatacacacaatntcatntagttgaatgtgtatatatgaatatgtatcattgaagagaagaaacgagaaanaccaagaccttcctactcaaacaagaagtcctataagttacaactcttctcttatatagaaagtngtgtgtntagctcttatgtttgaanaagttcacaagtatttgtatgaataattgaactaagacgtganataaagtaaatataatcttcatcttgttgattaggtttcatgtggaacaagggcgtacataatacactaataaaatattttaatatttctattcaatatggaaggtaaactattaaattatatatcaattcaatataaatcaagttattaaaagtataaacgannaatgctgtactttacgaaggcatttatcgagattgtttagattatctcatttaatgcatcgttcatata

SEQ ID NO: 116877 - DNA, 251 bp, Glycine max
tactgatgacataaagtgactctgcatattatatagacaatgattacatgattccaccaacatacctagttctgtatatataatagctagcttaacttctatgtacaatatctatgtagaatacagtattccttctcttctctcatttggatataaaattaactataagaaatattctcctggattagtgggtagcttagcttcactttgtaaccttcatctagttagtaatggaatcaattatctctttt

SEQ ID NO: 116878 - DNA, 203 bp, Glycine max
caaagaaaagaatcataaagactaaagaaaagaatccatcaaatggagaacaaatgaagaaaaatccatcaagatgggaagaaaaaaaaaatgaagaactctgcatgatcaaaaacaaaaatatgcaaagcttgacgacatttgcatcaaatgtccaatgacaaaaatgaagaacacactaatgcttctcttatacaacaaat

SEQ ID NO: 116879 - DNA, 310 bp, Glycine max
tgtgctgcactggaactgatgattgtaatatgctctgtatcattacatgtggtatcattcaagctaaataaacagaacttgatgcttggtatcatacaaggtgtttcataccagctgaaacagtctatactatatgctcttgttattaccaggtgtattatccaccttaaagtctgaactttgtgccctttatttatcaactttgtattgcctatgttacacatttttttctacattttttactgaagctttactttttcttctagacatctaccttttaggaatttatcccttcaatactttttaatat

SEQ ID NO: 116880 - DNA, 217 bp, Glycine max
taccttctagtgaagctgatggtttttctaccacctgttgataagatctcagttgagtaaacatgctactcattactattcaaacttaatatgaaaacgtgggacatgattgattttgacactggtcttaaacctggtataccacttttaaactaactcttagtaagttgttcattgacactaatgatgtgaagctattatgggcttcatgtgtact

SEQ ID NO: 116881 - DNA, 231 bp, Glycine max
  unsure (1)..(231): unsure at all n locations
aaaacaaaactgtgctatgtgtgttgtttgataaatcttttcaatacatcccttgtgaagtcttcttgatttcttctctngaatcttgaattcatcttctcttgaatcttgtaatcaaacttctctcgattcttgaaactcgatgactcaatcttgatatcgttctcttgggctgtgtgtcatcatcttntgtatcatcaatactacttgaatcaacttgactcatcatca

SEQ ID NO: 116882 - DNA, 182 bp, Glycine max
atgtgatatatcgttacttctcttctatagtgttcagagtaacagaacacttatcgatacttgattctatcatttttgtctgactgtttgttctggaacacttatcgataaagatattatcattactgtgattatcatacagcgtataatgttctttaataccactctgtctcttatacaca

SEQ ID NO: 116883 - DNA, 80 bp, Glycine max
tctagcttgagcctcatctctctcttcactcgctatgcgacctctcttttactgttgtctctccctgcatctcatccatc

SEQ ID NO: 116884 - DNA, 173 bp, Glycine max
  unsure (1)..(173): unsure at all n locations
tgtcatgccaatccctctgatttataccatactcatatgatccattcatgcacacgcgcatgtgtacaaaatattctattactcatgtcaacatacaagaacatccaacatattctaatngccatacgcctatatacattctgaatagaaaaacacactgtcatgctcaaagt

SEQ ID NO: 116885 - DNA, 77 bp, Glycine max
gctaacgtactcaatcttaacgcgactcgagctgttatatcgacttcacataaaaaaagcaggctccttttgctctc

SEQ ID NO: 116886 - DNA, 151 bp, Glycine max
ttatgtggattctgatttgaattgatttattgtatctgattgatttatggatcacaaaccttgaccttgtttgcagatactgagttaacaacccgctatatttttgatttgtaataactctatatgagatatgctattactatgtgactac

SEQ ID NO: 116887 - DNA, 158 bp, Glycine max
cattatactgtactctttcccttcccagctgtttgcattttattgtgaccgccttctaaacccctatgcatcaattagtctctctcccgggttgtggccaagtccacttgcctcttttaaaatttaaggaaagttgaaaacattttattttttcagaa

SEQ ID NO: 116888 - DNA, 151 bp, Glycine max
tgcatgtctatgatgcgctgctgtattgagaaatgctgaatctgactgacaaatccccatggcattgaacgtgtaggcctagatataggttcagtatcatatgaacccactcatgtaatgaatgataagtattcttgccctatctctaaac

SEQ ID NO: 116889 - DNA, 67 bp, Glycine max
aaccttgtcaaatcatcgacataacctgtactcggtgccgatgctccatgaattgaacgtcgtatca

SEQ ID NO: 116890 - DNA, 220 bp, Glycine max
ctattaactcttcaggttgtctctcaacttctgtaataatctcatctcacttggccaaatgcatggctgtgttttatcatctccaacttgtattgctttcacaaggccttatccttttagttgctcaacatgatactttctggaaatgtaaattattgaattttactaaatttttttttaacatgtcaattttctctcagtttttctccaagaatcagtt

SEQ ID NO: 116891 - DNA, 204 bp, Glycine max
acttatctgctgctcattcgtagggtctttctaacgacttcttgtgccaattaagctgaggaaacttactctatgatcttgtgtcactaccctggcaaaacatttttaagcttctatcttgagggacaaaatggtcactcctgctccagtcttttactggatgactaagaggtgtcttggaaaatcttcctgatcttgacactg

SEQ ID NO: 116892 - DNA, 230 bp, Glycine max
  unsure (1)..(230): unsure at all n locations
tgtatgtaacaatggctagcattctgttcattttacattgctagaaatatgatgaaatattgtgtttagtattttgaatatngagtaatttaaagatattgcggccacgattgcaaacacatgatatgtgtgtgtttgcaacttttgtcaatgataaagatattgtgtatgttgcaatccgatgccaaatgatntatgacanatgtaattctctataagatcaagactct

SEQ ID NO: 116893 - DNA, 159 bp, Glycine max
ttttcgcatcatcgaaatccctttagcatgtcgtccttagtactatcaagtcgatctttgacttggatgatgacatttgggtattgcgagcctctatgcttaacctctttataccctaatctttccttcttcacagaggacagatctttcagggtggtg

SEQ ID NO: 116894 - DNA, 136 bp, Glycine max
gctacgtcgcatgttgaaaagtttcacttcgcgaataccccttttcgattcatcaatccttcgctgttccttgactataatcatcttgactggagatacatttggatgcagcctacgttaacttttacgctatttc

SEQ ID NO: 116895 - DNA, 63 bp, Glycine max
ctaacactcagactccatttaaaaatatagatatcagaaactacttcctacacactacctggt

SEQ ID NO: 116896 - DNA, 194 bp, Glycine max
  unsure (1)..(194): unsure at all n locations
tatatcttgtagattataatttaagattaaataaattcaacacgtgtgagtgttatttataaatatctatagaaagatattacttatattatcattggcccatcattatataaaaagtaaaagagnaccctttatatgtaaaaagtaaaaaatacatttacttattagaaaagtaaacatgaatattataatgt

SEQ ID NO: 116897 - DNA, 407 bp, Glycine max
  unsure (1)..(407): unsure at all n locations
atctgtgaattcggatctgcaatgatcgttctatattgtcanatcttgtgactgttcaggaaatcttagatggccaatattccacttgataaccaatggaaatgaatgatggctgaaaatacctaagctgaacggttttggtccaaacactatcataatcacgtatccaattgtatacctacggatcaatggactgaaatttttcttgtcagtcgacaaatgctggtgagacttattctgatgtcatggtgttatgtggctttggactgaagttgtaaacgattgatcacaataatcgaaagtctgctcagatgtggtggtgatgaatctgtggaagactgcgtgctgatgatttgtcatattagtcattgcaaattacatattttaaatatgtatcttgtggtggt

SEQ ID NO: 116898 - DNA, 72 bp, Glycine max
tttctcatttttcactagccttacttgtgctaaatgcgacttgagccgtcaccccaaaggtgtaaagatggc

SEQ ID NO: 116899 - DNA, 108 bp, Glycine max
tttgcttattatatgtgtggcatattctatgaagtttacaagtgactattctgatggttaatacttagtgcttattctagatagcatccatgattactagagcagtct

SEQ ID NO: 116900 - DNA, 73 bp, Glycine max
tgctcacggtggatcatactctctgcacaatctgttaataggacaatgcatcactgattaacttactcacttg

SEQ ID NO: 116901 - DNA, 164 bp, Glycine max
  unsure (1)..(164): unsure at all n locations
tttacatcacacatgcctncttggctaatatgacatacatgcatactcaaagcatntctgtgtaccaaatattgcacatgcgctcatcttggtatttctaatacctatacatatacaaacttcatgatgaatcttgactaccttcgcaataatgtgctacattt

SEQ ID NO: 116902 - DNA, 96 bp, Glycine max
gcacttttttagtaaaccacggagctttcatgtcccaatatctccaatcattcgaggctaccgttaacttcccgtaacattctaactcgcgtttac

SEQ ID NO: 116903 - DNA, 224 bp, Glycine max
atctagcttttctgatgtgaatttacgaaccttttagctatatgttagctttgagaaccaccatgtgttaaatgactgtcttttcttgtttcttaagttgaatcatcaaatagtgtgtctcgctgtattttttgttatcctgcaagtctgaattattccgacaacactgtatgaatcattaatagattgaaatatgatatattactatttgaccctattaatag

SEQ ID NO: 116904 - DNA, 228 bp, Glycine max
tatactagcttaaactcatggctacttacacgagccattaaggctgttttttacatcaatgacacgagcgctggaattaatggcatagttaaccaatgtcatcagcaatatttcaacctgaatgacaaggagcctcaaatcaaggataattcactggtgccatcagcgctactatcggatgctgatatgacaacgaaacatgataaatcaatggcctgactttcactc

SEQ ID NO: 116905 - DNA, 101 bp, Glycine max
cagccacaaagctacgcagcgagcaagactgccattacaatatgactggttgcaatgctctgcaactgttgtaacaaactctgtgatcactcaacctggct

SEQ ID NO: 116906 - DNA, 282 bp, Glycine max
catatcacaccatcacaacactctttatggactgatctacataaattcacatctatgataagcggaatacatctttcttgtcatctgacctttcctaatatactctgaattgatgcaccatagtctctcactgtgctgcatactctgcattactgcttattcctcattcactggtaatcactctactgtactctctgtatacaatgacttgtcaacttacctacctatctatttttttaccaatcccagcgtatggtgtgcacattgacattctatatattg

SEQ ID NO: 116907 - DNA, 270 bp, Glycine max
tctctatatatcttctgactctgcttttgaactgctcttccttagcgctttatactatgacttttctctctgtccaaaatgagctatgcattcttgctattcatgaatactcttcaacacctagaactcttggctgagatctttccaaactattctgaccatttcgtgtgcactttaatcttgaccgtaattgcgcatgttggggtaggtccggcccctcttacagtctgtgtgcatgtctgatacattgcttacgacatacgaaccaca

SEQ ID NO: 116908 - DNA, 358 bp, Glycine max
actgaatttgccacgctctgagacacgatttctctattcatgttctgtgccggtgatatgatatagtcatcagtaatgatttggtattttataccaaaaggtttagaaatgatgaactgtctgttgctctaatcataattaaaagtgttagtgttctaattgaatcagcctgacgctgataaatgtacttgcactattattctttcatttttgttcttggagtaagaacaacaccatatctctttaaccgcatctccattatatgttaaggttccatacgaaaaggacaatttctagaatgactctctaaataattacgcgtaataagttttgattatccataaacacctgtataaat

SEQ ID NO: 116909 - DNA, 157 bp, Glycine max
  unsure (1)..(157): unsure at all n locations
gtacacctatatggtcacacaatataaataataagtgtatgtgcataagagtacaaaataaatgtgtctaatgatatatggagaacatatatagtcccaactaangtaaagagtaatgactaattaagtacaaaaggtctgagcctaagtctaccca

SEQ ID NO: 116910 - DNA, 407 bp, Glycine max
gctactgactcacctctctcaattcactatgatatggtgcatgtctctctttggttcaactgtcctctgcattctaaatcattgctcaacctgacaatctttcattctgacataagcggtgctatgtgtgaatgaacaacatctgttgcttcccgagcagtcatttatcacccattcatgcctataatgttctcattttcaccaagctctgattgcatattgatgtcatgagatgggtttacattccgtctttgactcagactatcagttcattgatctcatgctactgcatccatttccttataatgggtatagtcacactaggttattcattcttcattttaacacttttgggtctctgttcacatcacatgctttataactttaaatttagcagcttttgtttt

SEQ ID NO: 116911 - DNA, 202 bp, Glycine max
  unsure (1)..(202): unsure at all n locations
ctcactagtagctgagtaataatcactctctataaggatatcatctcatttatttatttgtccaatagcttatgatatggagactatccattccatgaacaccttgtgtgcatccgtacatgttcacatagttatccatactatcctcaattcatcaacacactgtgaatacacatcatataacatgtngaacataacacat

SEQ ID NO: 116912 - DNA, 112 bp, Glycine max
  unsure (1)..(112): unsure at all n locations
tctcatttaatcactgttaanatgaaatctaaccgatcgttcacgctataacctcgggttaaccaatataaaagtaaataatcaaaatatcgtggaaaattaatataaaata

SEQ ID NO: 116913 - DNA, 134 bp, Glycine max
  unsure (1)..(134): unsure at all n locations
ctcgctgtgctttcttcatgcatatgtagctagtcattgtcctgcaagtttgatgagtggaaatgaggccgcattatactgtgtcagttggagatgtattntacccccctgctctctttgacatcatgattcac

SEQ ID NO: 116914 - DNA, 171 bp, Glycine max
cctatcctggtcagatcaaaatgccacaacatacctttgaggtgcaaaacagaagtaccaaaagccattttagccataagaaaaatcataagatagacatctctcacacttactaaagttttttatttacaacctcaccattttttattgttcgaacgtgttttttttcac

SEQ ID NO: 116915 - DNA, 226 bp, Glycine max
  unsure (1)..(226): unsure at all n locations
tcagctttgtccggtaatagtagtaggangtagattagtataacactctaatatttgtgttgtgggtagtagtgacaaacctcattnggtgagagacctcacttaacttcatgtngtacataacacatatactgtgtgcaattacttctttctttnntattctctcaactggtcctcattattgcttatacttacttctgttcaccattgtcttataaaaaaattg

SEQ ID NO: 116916 - DNA, 271 bp, Glycine max
gcgggtctgatgactataagaacgttattttgatcatatcacttcatgtaaaagacactgttttatagcctacccgtcacatggtatcataatcacatacatggttctaatcgtaccatgttatatgttttttcagctgtaccgcgtattttccgagttggcgtcaaatcctgtactcctaacaagaaaagtaaaattgttacttcgggcataccttccagagtcaaaatagggataatctaaaaagctggttatttttcccccaaaaatt

SEQ ID NO: 116917 - DNA, 84 bp, Glycine max
tctatcccctattttgtattttctagacacttcattgtacatctgttcttcgtagttctaacctcggctgtatactcttttact

SEQ ID NO: 116918 - DNA, 354 bp, Glycine max
tcactctccacttttaggctagaaggcaatgtctagctatctcaaacatttaaataaaataaaagcgatgaactgaaaaagaaacacactataagtacatgtgcgcttatgagaaatctacaatcaatagtattaccctgaatcactattccacttttacacctggaaactgttgcagagtgatcctgcacacaataactgcatcctttatacctgcgctatacactctcttgaagaattgcttgatgctacactgtcaattacacttttaagactgttactactgtctttgtataatatactacacgtccagccatcactcaaaattcatgctgcaggcaataatatgaagta

SEQ ID NO: 116919 - DNA, 195 bp, Glycine max
agacatatctacttgcgatgtaatgtgaaagcagtggggttttactaccactgacgcattttttacatggacgtactgtttgcccttcttttttacgtttaagcgcaataggagtctaatctcctttaataaaacgaatatcacttctattttgaccagtgacattttctaatcctatacgagcaacaatattct

SEQ ID NO: 116920 - DNA, 451 bp, Glycine max
  unsure (1)..(451): unsure at all n locations
gtgtctatacaacctttatcttcttctatgtcattcttcgaatgattgacatgtcttctctaatacattaacactgaacactaagcaaatatagtcgcacttaaatcatcatcttcaattgaatactaatgattgcatgataaatcaaaatatgatntacaaggttgtctagccatgatctgccataagagattaacatggttgctatccatgacatgcataatagatgtatccttacaatgatcatggtgtatctatccgctaatttatcttgacaccgacaattgatactctcatcaatacaaattcattgacctcatttaaataatggcaattacactctaaaaacaacatttataaactaattgaggaactattaaatatataaatgtactaatattgcaaaataagccaatcaccttatataagatgattatgaacaattatggaa

SEQ ID NO: 116921 - DNA, 75 bp, Glycine max
ccgccgctggtaaggcaagtcgaagaccgagtgctttatggggggggcgcatcctattcgataagtcctcaccgt

SEQ ID NO: 116922 - DNA, 227 bp, Glycine max
  unsure (1)..(227): unsure at all n locations
tagatgacactactgtgggtgacaaccaacgatcaaatcataagtacctaggtgaacttcatcctggatgtttgaaggggaaagagttttaatganaacgccactttcgcttctatattggtgagggtggtcgccaacagctactgcttttttttttttgagggaacatactgtcctcctctatgattactctgctactgaatatagtaatagcgtgatctatctac

SEQ ID NO: 116923 - DNA, 51 bp, Glycine max
ctcgctaacggtccggtagtatttggaaacttgggatacttttcccaggtt

SEQ ID NO: 116924 - DNA, 390 bp, Glycine max
agacttatctgctctgcattatcttcaatatgcctcacgcagattctctgaactgttggcgcatcggactctgccttataacacagtgtcaagctcgcaaaatattcttcattctataaggagatactctgatcttacttctcattgatatgatcctgctgtagatacttgtacatgactatctgacattttttcagtctggtatttcacttccattggcaagaaccagagagtcctgtagtctgatgtgccatctattttaccccctaaacatggctgatgttcttcaactgtaagaataggagagtattctttttgtctattatttttataaagaaacaattgtaaaaattaacaatagtgtactgttattttttttcccttcatcaa

SEQ ID NO: 116925 - DNA, 418 bp, Glycine max
  unsure (1)..(418): unsure at all n locations
tgtgcattggctctagttattaacccgtctctcatgtaagttaaagtaattataactgtcttaactgtcagttagttataaattaactattgtatataatntgtattcatgaatgaattaagtaataagaaacatttcttttgtcttcttcttcgaacttcttttctctctttcttagaatatgctgtgccatgagttttacatggtattagagcatatccaatatcattcaaaaagggtcacctatcattggtattcatgcaccaagtctaataaatgctggacgtgagggggtgtattaaaaaaaattcaagttctacatccgctgaagataaagtcatatataaatatattagtgagggacaatcctcaccccttgagtcaactcttggggttgggtatataagttgaaatcttc

SEQ ID NO: 116926 - DNA, 314 bp, Glycine max
  unsure (1)..(314): unsure at all n locations
ngcttctgccaatgactgtgtcacaccattctaagttgatctatcatgatgacttgccagggaaatgtggaggttattatggccatggttccccctgtgattgtgtgtccttatgatatcccagcctataagcattataaagacgagttctttatagtatcatctacctacaatttccttgtgggcaatgttgacaagtgtgatccactactcttcaagggaatctataaatggcgtggacacgagagaatatggtgccatgcgtggaaggtagctgtaattgggttgcttactagctaatgaattgcattttc

SEQ ID NO: 116927 - DNA, 431 bp, Glycine max
  unsure (1)..(431): unsure at all n locations
acttgtgtaatcgattacactgtattggtaatcgattatccagtgttgtttctgaaanatctaaagatgtaactcttcaaaaagggtttgactctttcaaatgggttgtaagattttctaaaagttataactcttctgaatggccttcttgaccagacatgaagagtctataaaagcaaggctgtgttttgcatttttaatcaatctttctaacaacaatactgaatatttttgctgttccaatcaatcctttacaagcctcgaaatctctgtgaagttcttcttcttcttcttttgtaccanaagctttctgaagtnttctgggtttctatacactgaaaactagtgttattcatcttttcatcctcttctccttttgcaatagaattcgccatgactacccgcgaattcttttggtgctctctctctct

SEQ ID NO: 116928 - DNA, 410 bp, Glycine max
  unsure (1)..(410): unsure at all n locations
tacgtgacacttaaatactaagcttttatccatgcaccttcttggtggcaaatctccttcttccatggcttattccttagtcatatgccatgacaataaacatatctcatggccagtcactagaatgtgtcggattttacttgccctagtaatgtaggattnttcagccctcgtattttatggcacctacactagttttgtattaagggtaggtttgtaatttcacatgcattaagagcactatttgatgtgtgtgtgtgtcgggagataaatttaattgaattgggagaagcctaatccaatttaattttggaccatcttaatgtggaggtgagtatttgcgttgctcacccacatatcacattatatagtcacactttgtgcatgtgcttcatgccttacatgcctca

SEQ ID NO: 116929 - DNA, 333 bp, Glycine max
  unsure (1)..(333): unsure at all n locations
cttggttgctagaaatagtgtgaatgttatggatatggagacttctntgtggcaccgaatgcttattcatatcagtgagaatgggttgaattgtttactccacaatgatatgcttccatgattgaagaattctgatttagagaaatgttctcattgcatggttggtaagcaaaccagagtatccttcatgaagcatcctccctccaaaaaatccgagttacttgaattggtacatttagatgtttgtggccctttgaaagtgaaatcctttagtggttcactttattttgttaccttcattaatgactgttctatgaaattctgggtctatgc

SEQ ID NO: 116930 - DNA, 331 bp, Glycine max
  unsure (1)..(331): unsure at all n locations
ggaaatatcaccccacctgacgttctctatgtcttctgacccccgctacatatcttcatgttccactctgtgatcaacaaacaatagtatgaagactgactctttcacgctttcttacatcaagcttgttggaatatggtgcacccgtcatatgtggtgctaggtggcgatcgggagatggagcatatcaactctcccacttccaacaataaacattttgacccattcccatgtggccacctttcaacttatctcacgcactcctacgtatcccatatgctcgttcctctcatcatcgggtccacatcaacacctcctngcttccacaata

SEQ ID NO: 116931 - DNA, 322 bp, Glycine max
gtcttcttggatgctgacttgtgtgaagaagccattaattatgagatggattctctacaatctaataagacctggcatgtaatagacttgcctcctggctgcatacctattagatatgaaatcattgttgtgtgacaactttgatatgaaagacctcggagaagcaagtgtaatccttggtattaagattactatgtcaaaagagggaatgtctctggatcaatctcactacattgagaagatcttaaagaaatatggctactttgattggtaacctgctagtacaccatatgatccaagatgtaaactgtttaagaacact

SEQ ID NO: 116932 - DNA, 381 bp, Glycine max
  unsure (1)..(381): unsure at all n locations
agcttctntgagcaaacttgcttgagaagctagagcttagctactctcacccctctaataactaagctcacctccttgagaagattcctaaagaagctagagcttatctactcacacctctctaatagctaagctcacctccttgagatgagaagctagagcttagctatacaccctctattatagcttagctcacccccattcaaaaaacagatgataatacaaaatatgtccctactacaaagactactcaaaatatcctgaaatacaaggctaaaaccctatgctactagaatggccagaatacaaggcccaaaagaaggaataacctattctaatatttacaaagattagcatgctcatacttaacccatatgcccg

SEQ ID NO: 116933 - DNA, 374 bp, Glycine max
tttgaaacttcttattatgcatatgatatcatcatttgatgctaaaacgttcaatgcaatgcaatatattgacacaaataagtaatgtaaaatgaagggaaaagggattaacacatggattttatactagttaccccaaccttgactacgttattcctcaccaaactaatgagatttcattaacacaatcaaccacttgttggataatttgtgttttgataacaactaagacatacatttatctatgtaatgatcttctgaacatgagaaaatgcacattgacattagtttctcataatcttatcaaacattcaataatgagtgttatgattaaccacttagaaagttgaactctctatgtgctatatgacaac

SEQ ID NO: 116934 - DNA, 250 bp, Glycine max
cttgttgtggctggccacctgtgaaaacttgatgatatgtgagatatggtctctggtaatcgattaccaaggtgggtaatcgattacaaggcttaaaaatgaagacaggagactatgatggtctctggtaatcgattaccaatgggtgttatcgattaccaggctttgaaacgatgtcagatagcttatatagcctctggtaatcgattaccaatgggtgttatcgattaccacgcttataaaagggact

SEQ ID NO: 116935 - DNA, 376 bp, Glycine max
  unsure (1)..(376): unsure at all n locations
caactcgannatgacgtatatccccttgttgttgtttgatttccacgccacaccacttggtagcaatactgtagaaacttataccttgcgaatgctcaatgaaaccttcttctatgacactatgcgccgctatgatcgtcgcatgtattctgaatcgcctcatctgtcaactcacgaagcaccagagcaatatatttgtgcggcctgctccaaccgcctacaattactgaatattgtgggatgatcttactctcaacttcatcactggactggcgccatcccatgggtgcatgaccatcttgatggttgttgactgcttctctaaagggaccatacttgggcactgcatgcaaatactccgacacaaggttccacc

SEQ ID NO: 116936 - DNA, 359 bp, Glycine max
actgcttgtgtggcttctatggaggctggatctttgatcttctatggtgtatttccaccatggagatcaacggaagacaaagagaagatgtggatgaggcgtatccactatggaataagccatggatgatgagcttaccacctgatgagcctggataataagcttggaaggatgcttcatggagaaaagaaagaggagaaaagagagagggggagccgatatgaagaagaaaaggagagaagtgacttgagttggtctcacagactctatcataaagtacacagtgttcacatctctattattacttgaacgtcctaaaaacttcctgaaaacttcttaaaacttcttgtaaaacttct

SEQ ID NO: 116937 - DNA, 351 bp, Glycine max
gaatgctctattcaatggagttgacaagaatatcttcatactgatcaacacatgcacagtggccattgatgcatgggatatcctgtataccactcatgattgaacctccaaagtgaagatgtgcagattgcaactattggcttcaaaattcgaaaatctgaatatgaaggaggaagagtgtgttcatgacttccacatgaacattcttgatattgccaatgcttgcactgccttgtgagaaaggatgactgacgaatatctggtgagaaagatcctcatatctttgcctaagagatttgacatgaaagtcactgcaatagaagatgcccattacatttgcaacatgagaat

SEQ ID NO: 116938 - DNA, 384 bp, Glycine max
  unsure (1)..(384): unsure at all n locations
ngatgctctataccaacgtcagaaaatggtgagttaaagatctaaagttagatgggaaatngccgtgtgatngctatggaatgagaatgaagtgaataggtggttaactattatttgcaggttcttcaaaggaagacagatgaagcaacaatggctacgataaggctaaaagaattgttggatgcccgcatatcttctccccgtgataactctggtagaactagacttggaattactttctttatagtatataatctagtttgctaactattttgctgtctctctcagtttattcaaatggacatctacagcctgtgctggttatacttattcttagcttatatatacaatatgcattttgcagcttagaatcaacaaaaatgt

SEQ ID NO: 116939 - DNA, 298 bp, Glycine max
  unsure (1)..(298): unsure at all n locations
ggtgtttcgtatcaacaggtgtaaaagatggcttacaagatgacataccagctcgatcaataatctcggcagcatatntcttttgtgataaaaataaaccacctacatgacgagtcactgctatgccctgaaaatagctcaactgtcccaagtccttcatagcaaattcggagctaagaaaggatatgatagatctccggagctcatccgatgaagcaatcaaaatgatatcatccacatacaataataggtaagccatagagataccttgatgataaatgaatagagaatgatccga

SEQ ID NO: 116940 - DNA, 435 bp, Glycine max
cttcaattcgtagctgtcatcagcagtagagtgtgatcttgttggtgatccatatgtgttgtctgatgactgatgctggtcagaatggtatgaatgagaagcttgtggagaaaaaggactcctattatatgacacactatcatatgaaggagaatcacaacctatgagatcattgattactggggatgattcaagggtaaagtattgatccttgctggtttcaaaagaaatagtggttccctggctgctgctattatcatggatttcatggcatgaattgctttgtagtatttggtaatgagtgtatggatcaatatcttgtgcacgctggtggtatatatggataccaactgaagttgggtgcttctgaaaatttgcatctaaaagaaattattacttagtggagaaaattatcagaacaatgagtggtcaaac

SEQ ID NO: 116941 - DNA, 434 bp, Glycine max
  unsure (1)..(434): unsure at all n locations
actcgtggcttctttgagaaactntctcaagaagcttctttgtataactatatccttatctatccacacccctctgttaacttaattaacctcactaaagataattacggatgaaaataacgtaacaaataatcaaacatcatacataattactaataatatatagatatatatatcanggtgttacaactctctcacccatttataatatttgtcctcgaaattaccttactcaaacaaagaaaggtgagcttctctcatctaactttcttattcccacgtggcatcttcttctgattcaccttcacaaatcacactgaacaacggaatctctttccatcttatgtgttttgttcgcctatcctcgatcctcaaaagcaatgttgcatatgtcaaattactcttgacttgtacattcatcaattcaatcacat

SEQ ID NO: 116942 - DNA, 290 bp, Glycine max
tcatcatgggcaaaacacacagatagaggatgcgggtgatcaacaaagtaactgatacttaattatcctcaaacttatgacatgagagaaacaagattcaatcaaaatttaaaaactttatttagaacattccattactgacattcttatggatgaaaactggaattacacactactacttattaactgacccacaactacaaattactttttccacgtgaaacaaacctgaccacccccctcttaaaaacttgctatgggcattaaatttagctttacctcattatgga

SEQ ID NO: 116943 - DNA, 432 bp, Glycine max
gcttatgatgaatcaacaatgattcaaagggtgtgttgatgatgacaatgatgacaactaaagatgatgacaaaagtgatgaacaaaaagctcaagtgaatcaaagaacatccatctcaagagaatcaagaacaagtcaagagttcaagaatcaagaagaattcaagactcaagaagaaagcctacaatcaagaatcaagattcaagatctcaagaatcaagatcaagattcaagaatgaagaaaagactcactcaagataagtatgtaaaaggtgtttcaaaactttgaatagcacatgagtgtgtgacaaacctttaccaaaaggtgtactctctggtatcgattccatttgttggatcgataccagtggaaaaaaagttgaaatttttcaaccggattgcaatgttccaatatggtcaaatgctggatc

SEQ ID NO: 116944 - DNA, 245 bp, Glycine max
  unsure (1)..(245): unsure at all n locations
gacctcatattaacagagccttcattgttatgtattcatgctcatgcangtgtatggtcatgtgtctgttcatccatatgaggaccagcatcatccatctgctgatgcaccgtctctacccctatatgagacaccatccctggtgtctatttctttccactcgcgaatgatagaactccagatgcacacatacatgcagcatgtgactagccagtatgtggcttgtcacatgtgccaggtgcaac

SEQ ID NO: 116945 - DNA, 247 bp, Glycine max
tgtgccacttatcgcgtcgaataaatatctgtatattcttcttcactgagtgctcgcctagcgagtcaccctcgcttagcgatgcaatccatatctgcacaatatgagacataattgccttatgtattgacctctgtgcacaccataacagtccttctgcataattgacactcaccgtgcacttgcactattattaccttgctctatacgttgatgttctctcatgtgactgaccatcactctgaat

SEQ ID NO: 116946 - DNA, 292 bp, Glycine max
cttgttagcctaaccctaagacctttccttgtcacaaattggtggttgatacttgtgtaaactttatcttgaatggctttagaactcaaggagaattatagagtggaaaaaggcaagagtgtacattttgtttaaaaaatagccatatgtgagagatacacttgagtctggtgaggttctattttctttataactatgattattgttattttgaatatgccacgtagtggtgaacatgaattggatggggcacatagattcttgtggatgctctcaatgctcaaatgcaaag

SEQ ID NO: 116947 - DNA, 324 bp, Glycine max
actttttcttaactaactctacatattaaatatcattaaatggacccatacagtcatatgttaagatagatggggatttaattattactgtcaatatgagaatgtgattgttcaataatctataaatacatcttgatatacaaaataaacatttcttaagtttgatgtcctaatcagaaaattcgataagatcaattcatcctaatcttttaaaatatgaaatctctacatataaaattgtcctagaatcatattaaattatgatcaacattatgaatttttatatggtattggcttacacattatttttaaatatatcttatt

SEQ ID NO: 116948 - DNA, 341 bp, Glycine max
  unsure (1)..(341): unsure at all n locations
ttcgaattgacaaactctactaatctcnttggtcatcttcttctctctcacaaaatgacagtcaatctcagtatgtttagttctctcatgaaactctggatttgaggcaatatggagagctgcctgattatcacaatacaacttcattggctgaacttcacagaactttagctcttgaataagttgtttgatcaattgatcctcactaattcgcatgtgaccgtaaccatatccctatattccgcttctgcactagatctaacaacattattctacttcttgctcttgcaagagataacatttcctccaatcagtgttgtcaaatagcacatatcgtgcta

SEQ ID NO: 116949 - DNA, 387 bp, Glycine max
  unsure (1)..(387): unsure at all n locations
gacacttcaaactaagctgtatgcactagatctgacagtataactactgattaaatgatgtatcccagtttttactccaaaatcagtgcaataaatcactcccgctttatctctacatacatcatacataacatctcttatggcatataatgaacatatcgtctgcttnttcgtttcatattcaacatcacattttgctgagcattacatcgtcatgcatatgcgtcaacatacttttgtttaccaactgcatacctttgttttatgttcgctatgcgtgaccttgcatttctttacaaacaaaacaaaagggaagctgaaatcgtgaacatctggtgatatatcggtccatgaccacctgtgggatataaccgttcactaaacaaa

SEQ ID NO: 116950 - DNA, 299 bp, Glycine max
gatctggtgtgagtaaccaacgcctgtattcctgtctacagttccagaacgtacataagattgtggttccatgtatgaaaagataaagaatctcatgtaggtgattggcacattatgcaatgttatatttccctgatgcatataatatgctgactaaacatatacaatttatattaccatctaatattcataaccaatgaaagctatgttccgaactcctaattttgtagcataggttgatatctgatacctgaagttagttatgacatgcaaatccatattatatacagcacctaatt

SEQ ID NO: 116951 - DNA, 488 bp, Glycine max
aagagtagtgcgaaaactgatttaatgcttcagaatgtatagaggagtgattgagaatcgcttgcctaattatgtctgataggtggaaacattaaaaataggtgtccgatttgtaaatttttggtaaacagtccaaaagggaccttagtaaaaaattatatttcaagataattatcatagaagttaacaaacttatcatatatgatgtgttatgattaaataatggtatgaaattatgttatactcttaatcaatgtataatctattttttcatccttaaaagataaagaaataagtgaaataaataatattatattctcctactaattcaagtaattatatcttgtaattccctctatttcctatgatgaaagcatttaataaattagtaaatatatttccttcattgatgatattaaatacattgtatataatatgttagatattggttaacaaaattacccttattacatcatcgagaaatatta

SEQ ID NO: 116952 - DNA, 221 bp, Glycine max
tcacatgtggttctacgtggctatcgggcgatagtgcaagtcgactctccacatacacaaatcacacataaattcaccatgcgcacttgcccaccttcaactgatctcacgtactctcacgtaacccttatactcagttctctcatcacacggtccacatcaacccctccaagcttcctcaatatccaatcaattcaatatccaaacatcatgaactaccc

SEQ ID NO: 116953 - DNA, 406 bp, Glycine max
acttctcctctggactcaccttgccatgatatatttcattaattttaatgtggaacatccaacacgttatgttactgctgttttttacactcgatctggattggtttctctgttttctattttactttttcttttttgcctactttcggcatgtcaattgtccataagcatgtatactaatctaaaagctcatgatggaaagctacgtaaatatgattataatagtgtaactgaataaatgagtttatatatcaaatccgtttagtgagtgaaatgttattgtttatgtattaactctcatgttcatcatgccaaaatgattatgatgaatgttgagtttgacctaaaataaataaaatcttttagaattattttatcaaacattaattcaaataatatcacgaaa

SEQ ID NO: 116954 - DNA, 377 bp, Glycine max
  unsure (1)..(377): unsure at all n locations
ctgacgtctatgcactgaanaacataatgagaggtactcttatatgactgccaaacatgataacataattacaagctccaatactaaaatcttgtagtgcctaacataatgcaatatacaggttaaaaatcaattacaggcactaaagatagaagaaagttaaatcggtgaatgcctcagtaacttcagtaaagtagataaccaaacgagaatgctgagaaaagtttattcttcatcatattatataaatgtatattatatcttaacacacacatgatacattgcacgacaaacaagttcaataataaaccatgattgttagtgagggaaggtgtcctgacctgaataaagtgaaccagctgcacttcaaaatgaac

SEQ ID NO: 116955 - DNA, 339 bp, Glycine max
tctcttggaccttatgcaaacctccaactcatccttcaagatcaaactgtctactcgtgattggtccctctcctctctccggagtttaagctcgctgttgctaccccacagagcccctcgaaatttgttccggccgtgttcttccctacaagccctcttggtttctcgttccaaagctttggtggtagccacatttacatctctctgttcggtattctcctttcggatgtttcagagccgctgatttgaacctttctttaactgtttgggctggctcaagttccgccctaatggcctgcacctctttgtcttcctccagtgcctcaacttactctcttt

SEQ ID NO: 116956 - DNA, 343 bp, Glycine max
ctcagcttctaagaagtgatgatgacaacccctaatgcagatcttgacatatcccgagtcgtacaagataagttcaaatacatagccatcatagtctgaatagagtatgatgaactaaaggacgtcaatatggccaccgctgaatccttgtaacgagaaaccaacaatgcccgaattgaagaacacgtgccagcataagtttcgaatggctgtatatggcagcaatagtaagctcatgctccgaagaggtgaaaggaatcatcatgggtcaaaggcatgatcttgattgacgagctatatgcttaccttatgtcgaaaagaaatttgtcccaacagttaaacg

SEQ ID NO: 116957 - DNA, 346 bp, Glycine max
  unsure (1)..(346): unsure at all n locations
ggcccaacgttcccggatgtctctaataacaatcaacgttgtccttgctattttgtgcagataaaaaggtcttggtatgtatgtgttcgagttttagacttggtgcgtgataatgcaatacagtcaaacaaatagaaataaagattttctcaccattttaaagccaatagatagattcaacaagatcagtgtaataaatatatcccgataacatctgacgttctgaagcttatgaggcaatntcaacattttaatatgcaagaagtaatatgtgcatttattatataacttgcataactctagagtctatacaatcagacacgtttaatgtcagatggacaattaa

SEQ ID NO: 116958 - DNA, 335 bp, Glycine max
  unsure (1)..(335): unsure at all n locations
tacgacacttatatactaagctatgttgatccatatggttgaagcattctcgcaaaatagagtgatcctgactggtcaccttatggtgttacttattgagagtgacctaacatantccattgttggtgtgtcttgttatgtactcctaaacgcctcaatgtggtttttcactaatatggtaccacattgcatacaagcatgaatcttagtataattgttgcataacgcctatgaattgcttattatgaaatttgtgagtgttgttaggtcttgactcgagtgtgtgactcgcgtataatgtgattgatgatttctataatgaattttaaatgata

SEQ ID NO: 116959 - DNA, 393 bp, Glycine max
gagaacaatgacaaatgaagaattgtttcatgtttcctttcatgagtctaatgctatttctccaagaaatgatattttagatgatattgtagaatctttagacaaatgcacattcatggacaagattctaaaggaaaaggataatgaagcaatgaatatcctccgtaaagtacaagcaatatgatcttcaagagagtggaaagcttcaagagatcatccttctgacaacattattggtgatatctcaaaaggggtaacaactagacactctctcaaatatttatgcaataacatggctattgtatctatgattgaacctaaaaattaaatgaaccataatagatgaaaattgaatatagctatgccgaatgtataccctaatttcgtcgggga

SEQ ID NO: 116960 - DNA, 347 bp, Glycine max
  unsure (1)..(347): unsure at all n locations
gatgttntatcagtacaaaactacatgttgttaaatgctcgatgactggacgtagacacgggaagtggctgaaccaagataataacaagttgcatttctctcttttctatcttggttattttatctctcataatttcatcttgcatacttgaagaatattgttgaaataatttgcatcttcgtctttatcttcaatattttgaacatatagatttaaaattggaattaaaacttgattaatcgggagaatgtttagaacttaattcacccccctcttaattattgatgccacttgtccaacaattcatggaaacatctgaagctaatcaacatgtaattcanaatct

SEQ ID NO: 116961 - DNA, 291 bp, Glycine max
  unsure (1)..(291): unsure at all n locations
aaacaaaaaattcaacaacaattcaaaaacatcaagtattacttcaaactaatggaagtggactgcgctcttgctaactaaatattatccattaataacctgtanggctttgttgtgccttaatctctttgtatcatgcatcatactgccgacatatgacaattgattaccaatgattcgtagtaatgctcacaaaaccatttttgtggaaggaatcatancatatataggttggattttatctaaaatcccatcattgatatttttaatcctgtagtatgggttttcttt

SEQ ID NO: 116962 - DNA, 398 bp, Glycine max
cctgacatctcaaacaaacaaatcatacgtaataagacaattatagttgttgtttgaatacctcacccactcaagtgtatcacacaattatggcttttctctaatgaaacactcttgccttttaccactctaattccccttgagttcttatgcaattcaagagattatggccacaacaaagaacaattcaccaatatgtgtaatggtaaggctagagagacaaggaaaaggttaaccaagaaataggctaacaattgttttatgcacaaatgaatgaaataatattcagaattaggaattcatgtacaatccttatgcaccaatatattacctaagagatttttttaagttcttaagcatgaacattcacccaatttgttgtttttatttttgatata

SEQ ID NO: 116963 - DNA, 321 bp, Glycine max
  unsure (1)..(321): unsure at all n locations
ttgtacaagtccagtttcatcattctgcttctttgttcatggtaggttcacctaacattatatgttgtataacaatgtcacaattgaataacacgagagactaactctatcatttctaattgaataagaataactaaatctgtccaaattagaaataaaatttgttttaatacatagctcaatatatgtctgaaccnaattcaatgatattagtcttttaagcaacataaaagtctcattcttcaactgcaacttttgtatcgtcacataaaaattttcttatactggggatgactctagtagcatcttaacatgcttttg

SEQ ID NO: 116964 - DNA, 427 bp, Glycine max
cttggcctgtagtacctggaaatcagatagtgataacaatactgtgtaaccgtaagtggcgtgggtatcaaataaaatagaaggggtaagtgaaaatggaattttcaattgaatgatgtggtggggtcctattgaacatgggcgtggaaaattcaagggtggacttagtgtgagaatttgcttgaaaaacttttttttcttataaagaaaatgatttaccctaattttaaaggggtgatgaactgattctttacagtgaaaatgagttacacttgttttaaagatgatgtttattgctttgttcgttccaaattttccacctactgaattgaccacgtgtgcttggatggatgttggcaaaatttgatttggttagaattgattttgaagtgatgtggtttatttctgggatgtttattatagaatc

SEQ ID NO: 116965 - DNA, 262 bp, Glycine max
  unsure (1)..(262): unsure at all n locations
ngaaggcatactggatgcattggttaactaggtaacccatctggccttgagtcataaatctgtacctgttgcaagggtttgtggtttgtgctcctctgctgaccaccatacatacctttgcccttccatgcagcaaccttgagcaattgagcagcctgaagcttatgctgcaaatatttacaataaacctcctcaacctcagcagcgaaatcaaccacagcagaacaattatgacctctccactacagatacaaccctggat

SEQ ID NO: 116966 - DNA, 288 bp, Glycine max
tgtcctcatatccctcttgttggactagacttagaccattcatcattattgtaacaacatacttaataccaatacttaatctgctgatccctcttgttagactaagtttcaattctgcttcattcaagttctaaggaaacaatacatttcccaatgtttaaatcacctatctaggcacacaaatggttgatcatgaccaatagcatacaaaatttatgcactggtataagcatggaacacaaaaaacaaaatcaattagatatgataataattacatcgactgttcat

SEQ ID NO: 116967 - DNA, 385 bp, Glycine max
  unsure (1)..(385): unsure at all n locations
ntntgactcctgattcnttggaacttgcttaactcttgattctntgacatcatcaaaataatcttagaagtcattgcttccacaatcatgtgtctcttcatagcattgcgatatatcatttctgcattcatcatttatcatattcatgcaatgcattcacataagtcattgaatgttcatacatatccatttagcatgtttttcaaacaatcatcatacattgtatagtcatcattcgcatgtcatgttcacttatgcatgatcttaacatatatttgcttatgccttgcattctcctttgtatctccaaagccataatgaagcacgataactcacatttgcattcttgttacgtgcattgggtactatggtgataaactataac

SEQ ID NO: 116968 - DNA, 374 bp, Glycine max
tctagagataactacatgcagctgcctcgtgtaattcgctttccatccttcgtaaactgttggatcttctcgaaatttggtttgcaacttcaaaagacaactttccatgatctgaccgttgggatctgtgagaagatgtctggcatgtgctagaagcttccgttcccgatagcatttcttatttaagcacttcatccttttctttcgtgtagcttaaggaaaacgtcatttcttcttctttctttcttccaaagccatttattaagttccatgcactttgtccatcacccacagtcaccattagccatctcaaaccatcattggtctccattgaatacccatactgagatgaacccttctaccgaagcggaatc

SEQ ID NO: 116969 - DNA, 436 bp, Glycine max
  unsure (1)..(436): unsure at all n locations
ctcagcttaacattcaatgttgagcgtctcgatatattacgggactcaatcagacatcagagaaaaaagttatggtcgtttgaatnggctcatagcttcaacattcaatttcgagcgtctcgatatgttacgggactcaatcagacatccgagataaaagttattgtcgtttgaattagctcagaagttcaacattcaatttcgagcgtctcgatatgttacgggactcaatcatacatccgagtaaaaagttattgtcgtttgaatttgctaagaggttcaacattcaatttcgagcgtctcgatatgttacggggctcaatcagacatccgagtaaaaagttattgtcgtttgatttgctaaagattcaacttcaattcgagcgttcgattgttcgggactcatcagacatcgagtaaacttattgcgttgatt

SEQ ID NO: 116970 - DNA, 312 bp, Glycine max
ttgatgcaacatttggagaggttaatgaaacaacaagatgatgcactccatgatatggtggatcaaatggagaacagagatcataatgaagaataaagaaggagaagaaggaatgatggtgttcctagacaaaactgaattgatggtattaaactcaacattcctccctttaaaggaaagaatgatccacatgcctacttggagtgggagatgaaaatagagcatgttttctcatgcaacaactatgatgatgaccataatgtgaatcttgccgccacacagttttctgactatgctcatgtgtggtggaac

SEQ ID NO: 116971 - DNA, 105 bp, Glycine max
acttttcactcggaaagacgattcatgcgcatcacatatagagacgctcgaaattgtacaacggaagctctcgagaaattcaaatggtcataacttgtcactccg

SEQ ID NO: 116972 - DNA, 422 bp, Glycine max
  unsure (1)..(422): unsure at all n locations
gcacacgttctctatnttcatgtactttgactttcgaatatatatcatctgtccaatcagtagaatcttgcgtgacttgtaaatcttgtgaactctcttgcttaaccattgtctttgttatttcatcctacatatatacaccttataaatacaccttatgaatgatgatcatacatcaatatcctgaatacttcaatatcactaaacaaaactcatctccacattagttactccccctcaccccataaccttctattagaaaattgagcaaaacaaagaaaaagtattgaaataaaaattaaaattcttacaattacaatagcagccctttcagtaacaatgcttccatcttttcgagttcgagtgtcaatatanatntctggcctataagggtgcactcccttagcccttgtagtctaaca

SEQ ID NO: 116973 - DNA, 406 bp, Glycine max
  unsure (1)..(406): unsure at all n locations
acgtgacactatgatactaagctttatctgtatgtcgtgcatnttagatatcttctcttctgtctctaacgcgctgttaccatatatttaagccgcttgctcacctaatacatgataaaatgaatttcaaccgatcattcgtgttgtaatcatcattaatcactggtgtaatgagatctaaccgatcgtggacgctataacatgtgtgaaaccagaaataaagaatataatcaatatatctggcacaataatcatgtatatatcaaaatatgtttgaacaactatacaaactaaaaaatcaatcggacgtttttctttgaaaagtttcttgaatgaattgattaataaccaaagtgaaacttagacttatatagactcacaaatcaaggtttgtccgaaaaatcac

SEQ ID NO: 116974 - DNA, 424 bp, Glycine max
ctatatcagaatcctccagcagaggcatgaatgttggtaccatgccatatcctctaatattactcccagaagatgatgttgacactacatgcagcatatagaattgaataagtgcctcaccaaaagcaaaggaagttggatcattagaactcttcaatgacaaaatatccgtctgaagtacattcagtagaatcatgcggttccctccagtgaatttcatactatatccactcagtatccgtgcccgttcatgatatgatgtgtatgctgctaactgggctcctaatgcaagcattacaagtgttctgatagatccagatattgtttcttcagatcgcaccactctaatcaattacgttgtgtactctggttcgttggcataatatgacacaagctcgtcatgagcatcactggatttgaccaa

SEQ ID NO: 116975 - DNA, 327 bp, Glycine max
ccaaacattccctaatcatttaagttaaaagaatttatgtggtacttaacttattaaaccatgcatgccgacaagttaaaatatgattcaatattccaacctgatctacttggttttcgatttgaccattcatccaacttaattttgacctttgggcatttggtttggccaatctatcattcttgcttgatttaacaaaaaattgagtatggcatgtactcaacaactaacactcggctcaatgaacccaaggtaaggtacttctatttgtattaattctctcaacttaaagacttgggggggtatgtgtactactcaatctggaca

SEQ ID NO: 116976 - DNA, 128 bp, Glycine max
aggccgaatttcgggagaaccggctagtgggtttgcaacactgctcgacaccgcttcattgaactgatcctttgcacctctcacataaaatatccaacagagcgggactgcacttatggttttaaacc

SEQ ID NO: 116977 - DNA, 379 bp, Glycine max
  unsure (1)..(379): unsure at all n locations
cctttaatactctagcttcaagatcaaatatattcacgccaaatagccatgcacacttatcaccatcaaagttggatgatatgataggatgtgaaaaattcaagaagttgacgtatttggtntcagggcagcaactgttctcacaccatgacttgatcactgaaccactgactgtgccattnagatccagttcccatatagaagatatgtcatgttgtactacaacatcatcatccaactatactaccttgtttagatctggaaacagctgtgatggtccacaaaaaatcagattatgaaacaatcatcaatcatcacttagcattcgtcttggtgttactaaaatcttactcgagggtttaaattacagcactatagt

SEQ ID NO: 116978 - DNA, 327 bp, Glycine max
  unsure (1)..(327): unsure at all n locations
ntatatgcactttgttngcatcattcccatatctaataagatcatccccataaccagcatcatctatggcctcaattatcttgtcaacattggtgaggttgggatcaaaatgcactttttcctactccaaatcaagaccaacaattgcctttttcaccccttcaacaatttgaatggcattctcaacaaattcggagcagcttgtgcatgccattccttttatactcactcggcacactgctatgtcctgctcatgaatctcatttactcgaaacccactctcctctatgctgtcttttatttgtttcacctacaaaaaaaatatca

SEQ ID NO: 116979 - DNA, 340 bp, Glycine max
gcttcatggtgaatgtgattcataggtggtttgatgataacaatgatgacaataaaagatgatgacaaaggtgatgaacaaaatgctcatagatcaaagaacaactcatgtgaatcatgaacaagtcaagagttcaagaatcaagaagaattcaagatctcaagactcaagattcaagaatgaagaaaagactcaatcaagataagtattaaaaagttatttcaaaactttgaatagcacatgagtttttgacaaaatctttaccaaagagcttttactctctggtaatcgattaccataatggtgttatcgattaccagtgacaaaatgagtttgaaaa

SEQ ID NO: 116980 - DNA, 324 bp, Glycine max
  unsure (1)..(324): unsure at all n locations
gtcttcgccagcaaagagatcgaagtggatccgaanagaggcatatntgatcgtcctactatgacgactgagaaaactggggcaaataaagagggtgagaaagaaggagaaacccatgctgtgactgccattcctgtacggccaagtttcccaccaacccaacaatatctttactcagccaataacaaatctcctccttacccatcacccatttatccacaaaggccatccctaaatcaaccacaaagtctgtctaccgcactttcaatgactaacaccacctttatcacataccataaaaacacaccatccagaaatgaattt

SEQ ID NO: 116981 - DNA, 422 bp, Glycine max
  unsure (1)..(422): unsure at all n locations
acaagcgtgttattgagagatttgagaatgaagctgctgagatgaacaagaagtctttcaagtatgcctgtgtgcttgataagcttaatgctgagcgtgatagaagaatcacaattgatattgccttgtggaagtttgaaaccaccaagttctattgcacagtcattgatgcccctggacacatggatttcatcaataacatgatcactgtgacatcccaagctgactgtgctgttcttatcattgattccactactggtggttttgaagctggaatttcaaaggatggacagactcgtgaacatgctctgctttcattcacccttggtgtgatacagatgatttgttgctgtaacaaggtaaattatgtgttgaattttaaggcccntatgtctccttacatcacacaatatcttcattcc

SEQ ID NO: 116982 - DNA, 101 bp, Glycine max
ttatctcctgttctgtcaaaagggtcccctccttcttctaactaatcttgagaaagccccaaatacccttcttttagtaccttgtcaaacctgctgttata

SEQ ID NO: 116983 - DNA, 348 bp, Glycine max
  unsure (1)..(348): unsure at all n locations
tccatgcttattgtttggccgagtagtctactcgaattatggagaatatggcggatctaattaaggtaagaaggaaaactntatcttctactataaagatagagatatttccaaatatcgaaagttattgaatagcagatgaaagacaagataaaatcatatctttccttatttatattatcttacaagggagattaagatcttataatccaatttcacctccataaaaagggtcatcaaggttccggtaagccaacttttgatccatcctatattatgataaatgttataactccacaccgctaacttaagcattggagtgtcttcacaggtatgtcaacttttaat

SEQ ID NO: 116984 - DNA, 410 bp, Glycine max
  unsure (1)..(410): unsure at all n locations
tcttagtttcatatgatgcagatgggtttgtagctacctcatgcactcctctaatgactatggcatcatttctggcgctaaactgctgggagatggacgccatcntctcaattaaaattttggcttcagcaggggtcatatcttcacaggctccaccactggcagcatctatcatacttatctccatattactgagtccttcataaaaatattggagaagaagctgttctgaaatctgatggcggnggcaactggcacatatgttattaaatctcttccagtactcatacatgctatctacactgagttgtctaatacctgagatatccttactgatggctgtggtccatgaagcacggaaattcttttctaaaaatactctcttaatggcattccaactcgtgatggac

SEQ ID NO: 116985 - DNA, 358 bp, Glycine max
tcatgcagcgataattaaggtctatgtagtatcatgaaaatatgatgaagcacatgatcatgtgattgggtctgctaataagctaaactattcacacaatgcaaactacggcttgcttgctaccctcattgaagaatggaatgtgctgcttgcctgtaaggtctttctgaatgatggacaatgtctgaaacctatttttcattgtacaaatatgatacgacaatctggagaaaaggatgaatagatatgctctggattattaaaaaatactcgactctgttgaaaataaaaaagtgccaattttggcaaaagccggatgttttagtgttgctaatacctcgctctacgatcagtcaca

SEQ ID NO: 116986 - DNA, 388 bp, Glycine max
tctgccttcgatcgtctttccctgccaaagcaactattattatatataataaacttctcaactaagaaaataaaaattgctgctatattttataacagaaaaagctattattgatgaatattgtatattgtataaaaattaatggatgtattcatgttatttttatctatatttaaatcatatgtatttgttattttaaattaaatttagtcatttgcaagatcattgatgaataggatgacttttaaaaccatacaattcaatttcatgaattcaggtaattagatcttcgtggactatatgcttcagcgatttgaatgttataaaaatagatgaaagtttgaaaaaatattctataatacattttattatggaactaatactaatt

SEQ ID NO: 116987 - DNA, 133 bp, Glycine max
  unsure (1)..(133): unsure at all n locations
tcaactgtccttcttcatcctcaagacttgcttttaaaccgcgctatggcgtttgataaattatgatactgcctagaaggtntattcatcctctgcgtgactacgcattaccgttacctttcctatgactatt

SEQ ID NO: 116988 - DNA, 268 bp, Glycine max
tgattcgtgcgtttgacatcatactattcacgtattcattcatacacatgtccccttttgatgatgactacatgtactccttctgacatatcaaacttgatgatttacatctcccgctttctcaagcaaattctttttgacgtcttcaaaatacttatgatgtacatattcccacctgttgatgatgacaactacctgttggttaggagcaactacaacaacaaagaaatctatgtgcatatagtataattgcccctggttttgcaat

SEQ ID NO: 116989 - DNA, 308 bp, Glycine max
  unsure (1)..(308): unsure at all n locations
gcttgataaattggacctgacnggatgtctttccctcttcatattttcaagatgaagaggacatttaagctccctacttgttctcatcctcagtgactgttagaactatgtgattctcaatgacagcctataatgaggttgaacaaaattatcccgcattatcattaagtcattggcctcgacactttgaaatctcaatagttatgaatgcatcattgatacatttttgacttgatagcttgccatcatgcatgaataattctacacgactgcgatatctagactttgaatgttaaagtattatttga

SEQ ID NO: 116990 - DNA, 348 bp, Glycine max
cgtagaatggctagacatgatacacgtgagggtctggtttgtttaaggataaaagggatgacccacattatttccatgacacaaatgcataaatgatgatttggaaactgtatgcaaaactggtcatgcatgcacctatgtggacactcaagtgtcaaatctctatggtcatgtgatgctatggctcaagattcatttcctctattttaaatcaacccaatgtttccaaaatatgttcttttatcaatttgtgcattcatccgagtccatttctggcgtccggtgaaatatcacagcattcacccttatgtgtaaacacattgtacaaaaattggctatgatcaatga

SEQ ID NO: 116991 - DNA, 384 bp, Glycine max
tgaatgtgcgtaccccaccatctgttcatattataatactggtaatgtgtctaccatcacgattatcatctgttcttctgcgtcattgatgtgccacttgagctgccaggtctctgcaactgtgggcgtattctttgaaagatccgtgcccctctttgcacatgttctgtatttgcatgctatccagaagcatatcaaaaatgtactgatactgcctaacgaatgcatccattgggtccttccaagaatggactcgggaatgttccaagttagtgtaccaggtaacagctaccccagtaaaactttcttggaagaaatgtatcagcagttcctcatctgttgcgtatgcccgcatcttacgacaatacatctttagatgggtct

SEQ ID NO: 116992 - DNA, 265 bp, Glycine max
ctactgtccctgtttttgctctcatgcgtttcaaagattgggacttcattagaacctttgcgcttacgaattctagctagagacgatgaaattactgttaatgctcagtttgtggtatgatagaattggttaatagaacaggataagcctctcagaagtataaatcgtcatttattttccttgtggttttaatctggacacaacttatgatttggtgatactgttctctggataaaacatgacatacgagttatctttcatgggt

SEQ ID NO: 116993 - DNA, 338 bp, Glycine max
tgtctcagtgtttatgcgagacagagaccaacatgttagccatcgtcagcaagtaccaagaagaattaaatctagccactgcccacatatacaaagtggtgaacgaatatgcccgagtgtatgcggaaaaagatgctagatgaatggtgatcgactcgttacatcaagatgaaacaatgtggatggaccgatttgctcttactttgaacgggagtaaagaactttcccaattgctatccacggctaaagcaatggcggacacctactccgcccccaagcttctcagctcgtgctatggactcttccaattcagcacttgtacaacctagatcgcccgc

SEQ ID NO: 116994 - DNA, 329 bp, Glycine max
tgatggcgcactaagcctcacatcacaagactaatcgcatattccatataattatgtgctgcaataaatgctatgcgcatactgctgtgctaatccccatatgctcactgtactttacaacatataagattggcttatcgtgatgctcgcctaaacacttgtgtttctaaactcatacatcatgtgggtacgcttatctgaaatgtgcgctaagcgtgccatacaaatttgatgtttttaaaaaaccaaatgctgatgcactcggttgtaccccaaatacacttagctttgcctttggtactttgaacaatgtggtattttattacatg

SEQ ID NO: 116995 - DNA, 303 bp, Glycine max
  unsure (1)..(303): unsure at all n locations
ctgaccatgatcgcaggacaataactgtttactcatatgtacgaatgaatcccgtaatatattgtgacactcgttattgagaaccgatgctcgtatcanattcaaacgacaataactcttaactcggatgttcgattgaggcttgttatatatcgatacgcttgaaattgataacggaagctctgagcaaattctaacgagaataacttttactcggatgttcgttgtatcccgtgatatatttagaggctggtcattgtaaaccgaacctctgttcaattgtaaagacattacttttacttg

SEQ ID NO: 116996 - DNA, 461 bp, Glycine max
  unsure (1)..(461): unsure at all n locations
agctntgagccaaaatcctgactcaccatataccttgacccagggtgagaatgccaatccttaccctcggaagcaaaaaaaaaggagaagagaaggaaaatttccaatcaaagaggaagcataaaaaggaaagaaaggaaattcccaatcaaagagtgggagaaagcaaaaaggaaagaaagaaaattcccaatcaaagaatgggagaaagaaaaaaagagaaaagaaggaaagaaagctcctggtcaaggatcgaaagaaaacagaagaaatatgcagagaggtctttggaccggacaatatctgaacaatacagaattgtcaccaaatgaacaaaaaagaaggaaaggaaaccacgacctaaaatggtcttctccctttaattaccaaccaaaatcccgtgcgctagcgacccttttttctcgccccngcactaaacaaaaaaacagaaaaagaaaaag

SEQ ID NO: 116997 - DNA, 383 bp, Glycine max
atgtgccatggctctagttattagcccttctctcatttagttagagtaattataactgtcttaactgtcagttagttataaattaactattgtatataatttgtattcatgattgaattaagtaataagaaacatttcttttgtcttcttcttcgaacttcttttctctctttcttagaatatgctgtgccatgagttttacatggtattagagcatatccaatatcattcaaaaagggtcacctatcattgttattcatgcaccaagtctaagaagtgctggacgtgagggggtgtattaaaaaaaattcaagttctacatcggctaaagataaagtcatataagattatataagtgagggacaatcctcaccccttgagtc

SEQ ID NO: 116998 - DNA, 292 bp, Glycine max
gcctcacaccgaaactctcgaaattgaatgctcaatcgctgaacataggcggacaacaagcactctatagtctgatgtctgatagaaccttcatatgtgtcgcatcgcattggattaatggtttgagttatgagcccattgcaccgacagaagctatttactctgatgtctgtgtgagtccggtactataccaggacgctcgccaacgatagccgaacctttgtgcctccttcaacgacgatacctttctacttaagatgtttgattcgtctccgaactctatcgcgacgct

SEQ ID NO: 116999 - DNA, 423 bp, Glycine max
  unsure (1)..(423): unsure at all n locations
atccattgttcctttggataagaaaaatattgtgatcgatgttatatctgaaggtcaggggaattaggctattttctatcccggattgtgatgatataatgctngcaactaatgatcttggtcttcttcatgagactaagaagtttatttctagtaacttgaaatgaaggatatgggtgaggcaagctatgtgatagggataaaaagatttgaaatagatcacaaggattgttaggcttgtctcagaatgcatatatcaattaagtactagagagatttangatgataaagtgctcaacatcacctgttctaattcacaaatgaaacaaattttgtctcgcacattgtcctacanatgatcttgaatgaaaacaaatggaagcaatttcgtttgcatcatttgttgggagtattatgtatgct

SEQ ID NO: 117000 - DNA, 399 bp, Glycine max
  unsure (1)..(399): unsure at all n locations
tcttgcgtagccgctcttggtgctcagaaaatcccaattacatatccctcttattactagctatntngaattctttagttcctgaatatacaaccttcaaatagttgctcgttcccctctttcttttctgcaaaaaggaaaatcaaatgctgtcaaaacatggatgaagtcctaagaaaatcaatatcaaagaaaacatggatgaaatcacaattaaaaagcacaactacctatctttcagagtcctttggtttatttgtcttgtctccttatgtggtggggttttgtttaataatcttatactttcgccttccaaaaaaaacttatcactaatcctcttgttcataatccaatgtaattgtataaaagatcatgggttcttcacctggctacactact

SEQ ID NO: 117001 - DNA, 426 bp, Glycine max
  unsure (1)..(426): unsure at all n locations
aattcggaaagatagtttacaagaaaacgtttattttaaagcaaaaacggcatgttaatctttccgatttagaacagacttgtgcacacatttncttaatgtaaaacatttatgaacgtgcatacgcgtaaaatgtcctactatttatatcaacatacaaggatgttcaaaacattctagttaccacacatatatatttttgaaaagaatacacatacgcatgctcaaagtattgtgtcaaaagtacacatgttcatatcctaagggttttgctaccactaactacctacgcacatttggagtgtttgattaacatatacattgttgctggttcatatttgattatatatgcacattggagagccagactcatgttattcccacacttgcctttatttgagaacgaactttcatgtcctctatcta

SEQ ID NO: 117002 - DNA, 424 bp, Glycine max
  unsure (1)..(424): unsure at all n locations
tttggaggatcaagaagtgccttatgaatccttccgtgcttatgccaccagtacctggaaggcctctcattntgtacatggggtgtatgctggggcaacatgatgaatccggaaagaaagagcgcgctatttactacctaagtaagaagttcacgacctgtgaaatgaattactccttgctcaaaagaatgtgttgtgctttagtatgggcatcccatcgcctaagacagtacatgctgagccatactacctggttgatatccaagatggacccggttaagtacatctttgaaaagccagctctcacgggacgaatcgcccggtggcatgtcctgctatccgagtttgatatagtctacgtcacccaaaaggcgataaaaggaagcgccttagcagattatttggctcaacagcctcttaacga

SEQ ID NO: 117003 - DNA, 424 bp, Glycine max
  unsure (1)..(424): unsure at all n locations
agcttctgatttcaattacgagcgtctcttatattacgagactatatcggacatccgagtcaaaagttaatgtcgtttgacttttcttagagcttccgttttcaatntcgagcgtctcgatatcctacgggacacaatcgaacatccgactcaaaagttattgtcgtttcaatttgctcaaagcttccgttttcaatttcgagcgtctcgatatattacagggctcaatcggacatccgagttaaaaggtattgtcgtttgatttttctcagagctctccgtttcagatacgagcgtctcgatatcccacgggacacaatcggacatccgactcaaaagttattgtcgtttcaagttgctcacagcttccgtttcaattaccagcgtctcatttattaccagacccaatccgacatccgaattg

SEQ ID NO: 117004 - DNA, 417 bp, Glycine max
  unsure (1)..(417): unsure at all n locations
tctggtgggacatctngactggctttccaatctgacattcaccacagattctgccttcttctattttcagattgggaatgcctctaacagcacctttgtcaatgattttctttatgcctcttaagcgcagatgtccaaatctttgatcccatattctgacttcatcttctttggaggatagacatgtggaggagtagctggtttcttggggtgtccataggtaacaattgtcctttgacctgctgcccttcattagaacttcactcttctcatttgtcaccaagcattctgactttgtgaagtttacattgaatccttcatcacacagctgactgatgctgatcaagtttgcagtcagtcccttcaccagcagtactttgttcagactangaagtccatcatgaactagctttccca

SEQ ID NO: 117005 - DNA, 440 bp, Glycine max
  unsure (1)..(440): unsure at all n locations
tttctctcaactattcttcattcttcttcccttcttcactactgttcttcctttctcttgcacaaatttcacggcttgtccattggtgatgatcatggaaggcttaacacttaattaatccaaggatccactataagtaaggctgaatttgagttctgggttagtatttataatctttgtgaatgttcatcttttcttcaatcctatttcttattttcatgaatatgattatgattacgattgaaaatggattagggtatggattcatttcctaatatcaaaatttaatcacagaattgttggatgattttccaacttaatttgcgatctcaaaccaattagggattgatntgattgaactatctctaatgcatttgactgaactttcacactctgagcatcatccataggaaccgtgattattcgattcgcatttgttc

SEQ ID NO: 117006 - DNA, 432 bp, Glycine max
tccttaagaagattcctaaagaagctagagcttatctacacacacctctctaatagctaacctcacctccttgagatgagaagctagagcttagctacacaccctctataatagctaagctcacccccatgaaaaaaatacatgaaaatacaaaaaattccctaatacaaagactactcaaaatgccttgaaatacaaggctaaaaccctatactactagaatggccaaaaatacaaggcccaaacgaaggaaaaacctattctaatatttacaaagataagcgggctcatacttagcccatgggctcaaaatctatcctaaggctcatgagaacccttgggccttcccttggatctctgacccaatctactttacatggagtcttctatccaatgcccttgcagggtaggattgcatcactcttggtgcct

SEQ ID NO: 117007 - DNA, 420 bp, Glycine max
cttggctagtaactgacatgggcaagcacttcctatctcttcatgtcttgaccaagttatcattgtttctctttctttcactcttgacaacaacccaacacattgtttatatgtttgtttattccaaagaaattgcttttccttttccttcaaaaccgacaactagccagcaaaatgatagaagattcccatgaaaacactcttgctctccttgctctcctatccttaggtaaggtaggaagtattcatcctatgtttagtgttccgacaaaaaatcaagtgtctggctcaaagggcgttcaaaatggcaaaaataaagtgcgctgggacagttgtttggacaatggcttgaaatgcaaagttaaaagaatgctcatatcacgtccatgaatcatatgttatgacaattagaaaatcttg

SEQ ID NO: 117008 - DNA, 432 bp, Glycine max
  unsure (1)..(432): unsure at all n locations
nggttgtgggatatagcaccgcacctgacgttcccattgtctgctgacccccgcgagatatcttcaggtgccactctgtgatctacagacaaaagtaggaagactgactcttccacgctttcttacatcaagcttgctggagtatggggcacccgtcatatgtggtactatgtggggatcaggagatggagcgaatcaactctcccacttacgcaaatcaaacatgtagacaccatccccagttgcccacctgtcaactgagctcacgcactcctacgtagcccttatcctcgttcctctcagcatcgggtccccatcaacccctccaagcttccacaatatccaatcagttgaattccaaatgtcatgaactaaccctaaccaagagaacaggagtgaggcaggaaactctgtccgaaacccactctaata

SEQ ID NO: 117009 - DNA, 414 bp, Glycine max
ggacctataaaactcagcttcggaatagcgtgatgtcgagttcttatcgcagatcttgaacgagcccgtgtcgtccaagagaaggttatatacatagccatcgtagtctgaaaagagtgtgatgaactaacggacgtctatatggccaccgctgaagcctttgtacgagaaccaggatcccgtctgaagaacactgccatcgaagttttgaagggctttatatggcagcaatagtaagctcaacctccttagaggtgaaatgaatcatcactgggtcaaacgcatgatcttgaaagaccagctaaaggcttaccttacgtcgaaaagaaatgtcgtccagcagttaagcgagactgactggaatatgtgggccgtgatcaatgagtgcatacagaagcttaatctagcggcgac

SEQ ID NO: 117010 - DNA, 159 bp, Glycine max
tgccccccggaaaaatgtagcctagcccctactttggaggggctactcccaccttatgacgactatcccgggcaagacgaggaggtaagagacacccatcttggccccctgctccaccttaaagacccggtcccccatgaactccccaaccgagcatag

SEQ ID NO: 117011 - DNA, 427 bp, Glycine max
  unsure (1)..(427): unsure at all n locations
cggtttagagcaatagcaccccacctgacgtccncaatgtctcctgaccccagcgacatatctccaggtaccactctgtggtcaacaaataaaagtatgaagactgactctntcacgctttctcacctcaagcttattggattatggggcacccgtcatatgtggtactaggtggtgatcgggcgatggcacaaatcaattctcccatttccacaagtcaggcataaacacaccatccccagttgcccacctttacattgagctcacgcactcctacgtattccttatcctcgttcctctcagcaccgggtccccatcaacccctccaagctttcacaatatccaaacaattcaatttcatttgtcatgaaactaccctaaaccaagaaaacagattggaggcagaaaactctgcacaaaactcatt

SEQ ID NO: 117012 - DNA, 336 bp, Glycine max
gcttccggcttggaagcttttacatatgaaaaccgtggtggggtaccactttgatattgaaaaaccttcgataatcaagtgtaatccttggtttaacattactatggtcaaagagggaatttttctggatcaatctcactaccttgataagatgttgacgaactatgggtactttgactgcttacctgctagtacaccatatgatccaagtgtacaactgtttaaaaacactggtgaaggcttacgacatattgagtacgcaagtatcattggtagccttaggtatgccactgagtgtactagacccgacatagcttatgttgagggattattatg

SEQ ID NO: 117013 - DNA, 367 bp, Glycine max
  unsure (1)..(367): unsure at all n locations
agagtttatctctnttatcttagtgagagtgattctcctaaattcttgagtgattcaagaacaccctggctgtatcaaaggactttcacaacctttgtgtgttgccctcgctggaaagagagaatcttttcatcctttcatcttcacccttgttctttcaaaccacaattccagaaaatccacctctgcccagaattatctcgtggccataactcccattttacgcactcaaattaagtgattcttgagcctaaattgactttcaaaacgagacctttcacctcgttttggaatcacctcatttggagccctgtagcttcagttattgccatttctatatttctgtccagccaccacttaacctaca

SEQ ID NO: 117014 - DNA, 350 bp, Glycine max
ttttcttagagcttccgttttcaatttcgagcgtctcgatatattacaggtctcaataggacatccgagttaaaacctatggtcatttgatttttctctgagcttccgttttcaattacgagcgtctcgatatcttacgggacacaatcggacatctgagtcaaaagttattgtcgtttgaatttgctaagagcttcagttttcaattacgagcgtctccatatattacgggattcaatcggacatccgagtcaaaagttattgtcgtttgactttacttagagcttccgttttcaacttcgagcgtctcgatatattacagggcacaataggacatccgagttaaaact

SEQ ID NO: 117015 - DNA, 244 bp, Glycine max
  unsure (1)..(244): unsure at all n locations
ctgcagctatctatgttgcctcgacttaccctccgtgccaccccggaagagtaagcccaacccctactttcgaggggcaactcccaccttatgacactatcccggccagacatgaagaagagatcccatttggcccctgtccactcaagatccgcccnccatgaactaccccaaccgagcatagtccgccatatcccggctttacccacacccggaaaagaatctgtttccttcgtggaaaata

SEQ ID NO: 117016 - DNA, 452 bp, Glycine max
  unsure (1)..(452): unsure at all n locations
cggaccttaaatactcagctttatgnagggattgactcttcacaataggatttaaatttcaacgtttatatacactggtaatggattgccaatatcttgtaatcaattacactattttgaaatcaattgaaacgttgcaaattcnagtgaaagcttttgaaatgaaactttgccactgataatcaattacaggaaactggtaatcgattaccagagagtaaaaactctggtaactcagaaaattttgagaaaaactcttttgaaaaacaaaactgtgctatgtttgttttttgaaaaatcttttcaatacttcccttgtgaagtcttcttgatttcttctcttgaatcttgaattcatcttctcttgaatcttgaaatcaaacttctcttgattcttgaatcttcttgatttcttttcatgaaacttgaaattaatcttgaacttgttgact

SEQ ID NO: 117017 - DNA, 364 bp, Glycine max
  unsure (1)..(364): unsure at all n locations
tgatcagactcagataaccttagaatcatccagatcagatcagagagaatcagagcacaggcagacttctatggataggataaaagactttttcaaaaccanatagcacagttttgtttacaaaagatttttctcatattttttaagttaccagagtgattactctctggtaatcgattacctgttgtcagtaatcaattacaagtgatcagtttggttttcaaaatattttcaaatggtttgcaacgttccaaaatgattttcaaatagtggaatcaattatactatattagtaatcgattacaagtgaatttgaacgtcggaattcaaatccaattgtgaagagtcacaacttttcataaaa

SEQ ID NO: 117018 - DNA, 420 bp, Glycine max
agtggttgctggtgaaaggatcgaaatgtgtattataaaaggcatatttgattatgctgcttcgataagtagaaagcctaagacaaatggagagaataaaaatgagggaggaacccatgttgtgacttccattcctacatggccaaatttcccactagctcaccaatatcattactcagccaatatcagtccttctcattacccaccaccctaccagccaagaacacccaatcatccacaaaggccacccctaaatcagccataaaacccgcctgttgcatatctgaggccaaacaccacccttaatacgaaccaaaacaccaaccaaagaaggaatttttcagaaaagaagcctatagaattcaccccaattccggtgtcgtatgctaacttactcccatatctactcaataattcaat

SEQ ID NO: 117019 - DNA, 453 bp, Glycine max
ggacctataaatctaagcttatgacatgccggaaattaaaaggaagtgtcagtgtgcaattcataaagttctgtaatgttccggaaggcaaaaaagagatgattacttaatccgtaagggtctgcaacattactgaaagaaaacaaatatcattacgaaattcgtaagttttcgtaactttacggaaaaagaatcaccaaaaaagggcaggggtgtatttagtaaaaatgggggttcaaatagcaaccaggcccacatgggccttccaggatgttcctctagaaggcggttgcttctagaggaagcaacctagctcgcctaggcgagctgggcggcaagcatctccttccttttcctacaaataggggaaggagggaagaacaaaaatgttcaaccctccaggtatctgagattcacttaaaattagtgagaaaatttgtttccgtgaagaaa

SEQ ID NO: 117020 - DNA, 398 bp, Glycine max
caacatcaatcatcagggtgagaagcacatgcatatggcttgcatcatgatgaacaactttatgctccacagacttatgttccgtatccttcccccaccacgtatccattcttggatttcactcctctgtcgtatgatcctaactcaataactcctaatgcccttccacccttccatgcaaactcggacccatcacctaacgtgttttccccattgcccatctttccgattggatgtccttcccaaatatatcaggaaagggcatgagatctggctgtagactagaaccgtctgtatcctgatgaggatgatttttgtcgatattatcgtagtatatttatttgcatttgtatacacttgtatttatctgccacttgctaaacatataatatcatgag

SEQ ID NO: 117021 - DNA, 419 bp, Glycine max
  unsure (1)..(419): unsure at all n locations
cttggaaatgatttctatacaaagattagttgtataattcgactaacagncgacaagggtgttgccctcgctcctacgtatcctcgggtgcgatgaggaaatcagacctacgtagttctttaagtttgaaattttgttggttaaattgtttttatcttttttgaaagattgattttaaccgagcaaaagtcgtttaaggtgttggacctcaaaatgatcttttgatttttgaaaagaggagagagtcgttaaggcattggaccttgaaatgacatcttggtttttgaaaggagagaattgttaaggcattggaccttgaaacgacctcttgatttttcttgatgaaatgaagaagtttatgagttggttttatttggtttttttttgcttattaaccttcaatccttttttaagataac

SEQ ID NO: 117022 - DNA, 451 bp, Glycine max
  unsure (1)..(451): unsure at all n locations
actaatagagaataaattaaaatattaaaggaactaaaattgaaaaactgcaagtttacaatgactaanaatgaaaaaaaaaacttatagaacaaaaaaaacacaaacttaagtgaactaaaattgaacaaaaagttttcaaaaatcaaaattaaaaaagatgcaaacttacatacgaaaaaaataattaagccattttttaatatgctgtttttcatatcttttttatattttcttatgaaaaagtttaggcaatttggttaatatcttctatctccaactttttttttctctctttgaggaaaaaaatctctttttttaattggtaatattttaaataagagagatctttttttgattcaagaacatttgttttggaaataattatatttttcattttaggaaaaatacttaagtataaattatttctcttttataatatggtattaag

SEQ ID NO: 117023 - DNA, 430 bp, Glycine max
  unsure (1)..(430): unsure at all n locations
tncttgagaagctagagcttagctacacacacccatcttaaaactaagctcacctctttgacaaaatacatgaaaatacaaaaaaaagtccctactacaaagactactcaaaatgcccttaaatacaaggctaaaaccctatactacttgaatggccaaaatacaaggcccgaaagaaggaaaaacctattctaatattttcaaagaagagtggatccaaccttgacccatgggttcaaaaatctaccctaaggttcatgagaaccctagggccttctttagaagctctagcccaagcctcttggagtcttctatccaatacgcttggggggtaggattgcatcacccaagaacaagccttctgaataggcgagcttataggactaatcctcaagagatcaaggagattgaatcccaagttaaggaattg

SEQ ID NO: 117024 - DNA, 428 bp, Glycine max
  unsure (1)..(428): unsure at all n locations
tattataataatactntatatataatgatgcatttttatttaactatcgaaaaatatatagattcaaactgagttaatgctatntaacacttaccaagatttttcaaagagattcttatttgttntttgttttgaaaatgttgatgtttttgaagtcacataattcatctcatttaattttttctttacttcattaaataataaatgctatgtatatacacgtcataatgcaatagctatagatatgaagattagtaatgcatttagactcgctagctacacttgtggattgttgtaaactatttaactgttttagatgaaccaaaatcagggacgaatctagagatgtgtagggggtgattttttttccctttataattatttaaatatacaaattttaataaataacaactttcagaaaaatattt

SEQ ID NO: 117025 - DNA, 309 bp, Glycine max
  unsure (1)..(309): unsure at all n locations
agcttncttgagaagctagagcttagctattcacacccatctaanaactaagctcacctccttgagaagctttcttgagaagctagagcttanctacacacacccatctaaaaactaagctcacctccttgacaaaatacaaaaaaaaagtccctactacaaagactactcaaaagggccctgaaatacaaggctaaatacctatactaccagaatggccaaaatacaacgcccaaaagaagggaaaaactattctaatatttacaaagaagagtggatccaaccttgacccatgggctcaaaaattac

SEQ ID NO: 117026 - DNA, 429 bp, Glycine max
tgaagagcttcttgagtcttattctgttaggatgaatatgactgaagctatagaaatgtcaaagaactgtatacaggtgttggagctttgtgtcaagtgtaacagtcacatttctgaaggtcagttttattctgcattgaaaactttggatttagttgagaaaagttgcacgcagaatattcctgcaaaggctatcaaaatgctcatagagagtagaattcctgttataaaattgcacattgagaagaaagtatgcagtgaagttaatgaatggatggtcgagataaggagttctgctaaaaatattggggaaacagcaattggtcatgctgtgacagttcgtcaaagggacaaggaaatgctataacagcagaggaaggctgaggagcaaagtatttcaagactatgggatctagcttatactttgga

SEQ ID NO: 117027 - DNA, 382 bp, Glycine max
  unsure (1)..(382): unsure at all n locations
gcttgttgagtgttntcccaccaatcaatacaaagtaagagatatttgcattgacgattaaatacccaattgtaaagatcttggagagttggccttgaccaaaagtggtcattaggtcaacatagcctctagtctctactcgctcccctactaagccgaggagttgatcagcgtgagattggatggtgttaggcaaaactttaatttagatggtcattaggtcaacatagcctataggtacccagcttgtatgagctcttctattttcaccttaaaggcccaacaatctttggtgttgtgaccgatactgcaatggtatctgtagtatttggttgcatctaaccttggcctgggaggacacgatggaggtagctngatgggt

SEQ ID NO: 117028 - DNA, 431 bp, Glycine max
  unsure (1)..(431): unsure at all n locations
tatcataatcgattacatagttatttntgagacaatgtctgatttattcaggagtctctgccttaatcaattaccatgtgatataatcgattacttctctttctataagtgtttcagaagtaaacaagaacactttaatcgattactttgagtatctaatcaattatattgttcttgagctgtttctagtttcttggaagaacactttaatcgattaaaaagataatctaatcgattaccttgtagatttaatcgattacaagcggttataaatgttttctctataaataaccacctcgtgttctctctaataacaccacattttgagcttctgaatgagctaggatcacgtgctgttattagttcaagaaagaagagaagaaaagtgcttagaaactgtgactcacaacttctatgctttgattatgaag

SEQ ID NO: 117029 - DNA, 386 bp, Glycine max
tgcagcttaagagagcttttttgtgattataaaaggagcaaagagaagggtggcctatttgaggagaacaaggcggaggtcgactttggttggtctcacagactctccttatcaaagtactacagtgtacacatgcttctattttagacacggtgcttcttgagaagctctctagaaaacttccttgacaagctccttgaaaaacttcttgtgggctcgagctacctccatccccactcgtgatgactgaccttcttgaaattcccttaacaaaactaagatgctggcttactaccagaccctcaatgcttactccctctagaatggaactagagctatctcctccccctaaaatctagcttacccttgacaaaactcgaatacaa

SEQ ID NO: 117030 - DNA, 425 bp, Glycine max
tgaaagagcctgggtagtcaaagagaagttcaagtccataaccatcaaagtctgaagagagtatgatgaactaagggacgtcaatatggccaccgctgaagccttggaacgagaaaccaagaaggcccgaaaggaagaacacaaccaaaacaagttttgaggggctttatagggaagcaatagtgagctcaagctccaaagagatgaaaggaatcatcacgggtcaaaggcatgatcttgaaggacgagctaaaggcttgccttaggtcgaaaagaaatttgtcccaacagttaagcgagaatgaagggaatatgtgggccatcattgatgagtacaaagagaagctaaatctagcggcgactcacgagcaaaggctagaggatgagtatgccaagatatcagcagaaagggaagcaagggaaag

SEQ ID NO: 117031 - DNA, 463 bp, Glycine max
  unsure (1)..(463): unsure at all n locations
agcttatgctgcanacatctacaatagaccttctcaacctcagtagcaaaatcagccacaacagaacaattatgacctctccagcaataggtacaatcccgggtggaggaatcatcccaaccttagatgggtgaatccttcacaatagcagcaacaattttagaatgttgctggcctaaacagaccatacgttcctccaccaatccagcaacaacaacaacaacaacaactaccccagaaacaacaaacaattgaggcccctccgcaaccttcccttgaagaacttgtgaggcaaatgactatgcaaaacatgcagtttcaacaagagacgaaagaaaagaatccagtnattgtttgaagcaaacattctttcattttcttttctgattaagtgacattatatgacttttcgtcataataactaanatttcttgtattaaactttataaaataagtacttcat

SEQ ID NO: 117032 - DNA, 304 bp, Glycine max
aagatagtattattaccccttcacaatgatattgaaccgtctttgatttcgtcgacgtgggaggtgtgcactttccacaacagcttttaatcggcttagaatagtgagtcttttaccatcccattggttgtttaaaccgtctttagaatgtatcttttttctacaaatgtttatgtaaatatggatattcaaaaaccattcttgaaagtacacaattttaaatggcttttctaaaaaccatctttgaatgtctactttctaagaccgtttttcacaaaaccttcttagaatgtgttatctgttg

SEQ ID NO: 117033 - DNA, 285 bp, Glycine max
tgtttaacctttgaatggttgttgaagcacctcgtataaatcttactttgcatcatcaaaacctatattcatacccctcataatcaataccttcaacctcaaagcaacaatcttcttagcctaagtacatacaagcaaaaaacctatctatgcgtgaaaacccttcccatctaacagtgtcacaaacccaaaccttccaatgttaaacccaaacaatagggtgaagaacaaagaagaagagaggcatttaacctgtttttttaacacacaacgagaccaaacatg

SEQ ID NO: 117034 - DNA, 403 bp, Glycine max
  unsure (1)..(403): unsure at all n locations
ttgatctaagctatgaaagtctatgattgtcataatgccatattcttattatagaannatcattcatggtgctcacttattgttggaacttttatgtaatcaaatgttgacaagaaggagggttaattactgattggtgatccttggaatntgtatatagcatgctcaaactctaagtctaattattaaaataggtgattaaaaagtaatgggggataagaaactatgttcttctattgacattggataggcatgcctattgctatgtagtaattcccaagcagaagtgcaaaatttacctagttttcttagtttgatatggatcatgaatttgttatgcaaatctttaagcatctctgctattcaaacaaaaaaaaaagagatgaaagtcatgaaaccatac

SEQ ID NO: 117035 - DNA, 246 bp, Glycine max
cctgcttccatgccatcataaataataaagattataaaattcattcttaaattttatgatttgctatttaaatcattaataagactaatatattcattctttctatactctccaaaagattatacatcccatttgaagataattccccacttcactctttttttgttacactttcccttcaatttcttatattaagggaaaagggggggggggggaatattttcaccggaggaaaaaaatcccata

SEQ ID NO: 117036 - DNA, 431 bp, Glycine max
  unsure (1)..(431): unsure at all n locations
actcaagcttaataggtccctatatggcctgaaatagtccnctgagctttggtacatgatatttgatgaatcgatcgctcaaatncaatttaaaaggagtcagtatgtgatgagccattattatctcctattcataacccttttgcaccattttaattactgattagtcttaattgtcaaattaattaggcagttttattatttgggttcattcagctaatttgatgtttttaatctatttcaggaataaatgaagcattgggctcgaatccaaaattgggcttggacttgaagagggaagactattttcttctaccaaattttatcttatctagactttatcttatctagatattatttagatttgatttcatctacaaattatttcatctagatcttatctagaatttattttatttatgagcttggat

SEQ ID NO: 117037 - DNA, 360 bp, Glycine max
atggttcaccgccgtgatatatataattagacatctctcccactgaaaattttatgctatttgatccattctaaagcacagacggaaattcctaactgcatcctctattcaagaagagaagagttggctattcaaataatagggttaaaacgagtttacacctggcatctattcacaaatctatcaagggtggataagctgtgttagcctgctacaatagattaccttaagaggcatatttacaatgaatttgatgattaagtcgatagttgtgaagctcttaatttatatgccattcaactggattaaaatatccatgggttaataaagtgcctatagtttagggaaaaaaaatacatg

SEQ ID NO: 117038 - DNA, 409 bp, Glycine max
cttcagtctcgtgatgaaatgaatcgagctcttcagtcctcctctaagacaaagcatcacttatggcactaaatagccgggagttggaagccatctacttaatataatttctggcttcagcaggggtcatgtctccaagggctccacccctggcagcatctatcatacttctctccatgttgctggatccttcataaaaatattggaggagaagctgctctgaaatctggtggtgagggcaactcggcacataatcttttaaatctctcccagttttcatataggctctctccactgagttgtctaatacctaaaatatctattctgatggccgcggtcctggaagcatggaaatattttttctaacaatactctcttgatgtcattccagcccgagatggaccttgga

SEQ ID NO: 117039 - DNA, 279 bp, Glycine max
acaagacaacttgcatgtagtacattcactccaagaagctcaacttgttaaagacttcccaactctcatcctctgacataaccatcatttttgactgcaaaagtttattttttgccgtcacattctcatcaatgtgaaaccaacacaataagttgattacttttcggaacacagttatcactgcatttactaatgcttgatctctatcggtatcaataacttgaaggattgtatcacattttagaacaatacctcatatacgtttcagagccttaacaa

SEQ ID NO: 117040 - DNA, 419 bp, Glycine max
  unsure (1)..(419): unsure at all n locations
tttagacccaggaatagcaagtgagatgaatatctattttgggcttcttctcaatgatgcgtagtggagaaatggaggtgagggtgtgaattccttaaatttcatgagatcggntcatgtgggcaacacttcagcacgaaatataaaagagatttcggaaccattatcaaatgatgaagaggtggtgaatgataattgtcataatatacaaaccatggtagtggatgaagctacatcactatgcttggggtcttaaaaccctaccaacccttacatgtgtttttgaatttcctcatttcggattatatgggaacatcaaccaacagttctcccactatgattaaagaagtgttagtattaataagttggtttgttggtgttagtataaactcaacgtaatgggctgagggcagaggaca

SEQ ID NO: 117041 - DNA, 405 bp, Glycine max
  unsure (1)..(405): unsure at all n locations
aaaatgcctaactccctctgcagatctgaattcaagcttatattagtggccttgtttgtgctcatgcgcttancgcaaatctagatcgcttagcgcgcataagtggattttggcttaacgcgcttgtttcgctcatcggatgatctaatacggtgcgcttgaagacttggagcggggcgcttagcaaacttgacagctcatattgatttggattcttcctcctacttagccacttaaggatgtgcttagcgaattctcgctaatccagcaccttggctatcataatgatgaaaaacagcactttgcccatgttgtctatttaaccctgaattgtgagaaattgtttatcatacacacaatacaaaagttaaatttctctatcctttatttaacatagagacttat

SEQ ID NO: 117042 - DNA, 397 bp, Glycine max
  unsure (1)..(397): unsure at all n locations
gtggaaaagaaatgttgtatttttaatgggggaagtgaatgttgtgtacatgattttgatgatgtccaatgacgaatcaaacaatgctcattntgcttcaagattaatacaagattgtttctacaaacataaccttgtatcaagatttcttcaagatcaagcattggctcacaatgaaaggtttcaagtcattcaaggcacatgtaatcgattaccaatacatgtaatcgattaccaatggtttgaaagtgtgtaatcgattacacatcatatgtaatcgattaccagagactctgaacgttgggaatccaaattttaaatgaatggtcacaactgttaaagaaaaacaactgtgtcatcgattccctaattctgtaatcgataccacagaggattt

SEQ ID NO: 117043 - DNA, 425 bp, Glycine max
ctgtagggtaaagtctcacgagtgtcacgtgcttatgtctcaattgttagccctggctatacgagacatcttaccaaacaaagtcatgttagccataactcgtctgtgctttttcttccatgccatatgtagcaaagtcgttgatcctgtcaagtttgatgagctggaaaatgaagtcgcaattatattgtgcagttggagatgtattatccccctgcttcctgtgatatcatgattcacttaattgtgcatctggtcagagaaatcaaatgttgtggtcctatttatttgcagtggatgtacctggttgagcgatacatgaagatcttaaaagagtatacaaagaatctatttcatctacaaacatttattgttgataggtacattgtagaagaagtcatttgaattttgtcaaaatacattga

SEQ ID NO: 117044 - DNA, 412 bp, Glycine max
  unsure (1)..(412): unsure at all n locations
cttgagaagctgctttgagatatactcctngagaagctagagcttagctgcacacacccctctaataactaagctcacctccttgataagatttctaaagaagctagagcttagctacacacaccccctataatagctaagctcacccccatgccaaaatacatgaaaatattaaaaaaaaaggtcctattacaaagactactcaaaatgccttgaaatacaaggctaaaaccctatgctactagaatgggccaaaatcaatgcccgaaagaaggaaaaaccaattctaacatttacaaagaagagtgaatccaaccttgactcatgggctcaaaaatctaccctaacgttcatgagacccttaggccttctttagtagctctaggccaatcctcttggagtcttctatcca

SEQ ID NO: 117045 - DNA, 373 bp, Glycine max
acacgtttattttttcaatcacaagcgatcaaacgtagcgagatgctagagaagaacgaattaataccggctgagttgtattatgttagcgctcgcccaacactattagcttgacacatagttctttcatgggtcctactaattgataaaggtgtttagcctatcaatgcttccactcaagtacgacgttagcctctgaccatcaactacccatgatctgcctacagatgatgaatgatgatcaaacaattccactacgccatatggtctgacctctaagatagtaaatagtcctgaccacttagattagagcgtcgcctaaaataagttcagtacggagttaaacaacaatacctgttggtctcggctgaat

SEQ ID NO: 117046 - DNA, 262 bp, Glycine max
aagatgttttgcgttttacatgcctcactcccactatcagatatatactctcatcccagaataaatggcaggaatctacactagctcatgattgtactctggtgtgtaactaggacgttattcatttatcgattgtcttatggacggtggagatatatcagcacaagcgaggctgcggacataaagagattaaattctatccgctgaaaaacatgcttttatcttcatctgtgaagacataccctttgtgaaagggaatcta

SEQ ID NO: 117047 - DNA, 423 bp, Glycine max
  unsure (1)..(423): unsure at all n locations
cttagccttgtccccaaggcttcatgtagactngtccaatatcgcgaagtgaacctcggatccctgtcagatacaatactagaaggaattccatgcaaccttactactttcttgatgtacaactccactagcttctccattctatacttcatattcaccggaataaaatgagcagatttggtgagtcgatctactatgacccacacagcatcatgtccacgactagtcttaggtaaactagatacaaaatccatagatatgctctcccatttccattccgggatttccaatggcttcaattctcccgatggtcgctggtgctcaaccttagctctttgacatgtcaaacatcttgctacatattcagctacatctttcttcatgccatgccaccaaaaacttctcttcaaaatctggtacatc

SEQ ID NO: 117048 - DNA, 424 bp, Glycine max
  unsure (1)..(424): unsure at all n locations
agcttggacatttccactctcatttagcggtcaaaaatccacctggtggatgcataattatttccaaggcttccttcaagagaattaattaacaatgtcagatcgtactgcttaaagaaattataaacaaggggaaattatcatatcattgacaaactaataaaaaaaaggagctcgcataaagnataatcttgaataggggtcattgttaagtgaatataaggttgggtgacagtaaaaggagaaagggaattccttatgtcctttttataagaaacaaagtttattatatattgcagtaaaatttgctttctatatatatttaaaaataagaatgagggtagtgatgcttaaaccaccaacaggtttagatcattcaatcaatcatatagttaaaactatcaattccaaatcaaaatccgat

SEQ ID NO: 117049 - DNA, 419 bp, Glycine max
  unsure (1)..(419): unsure at all n locations
tataccatcctaacnnctttctttctttcctttttgcttcacacattntccaagggaatacttcagcatggacacaaaaaagggcgtataaagatgctaacaaactttccacatacaatttattgatatgagttgcgtataatatttaagtggattaaaatttctattcttatntctaacacatttgcaatttcaacagtgattgttggagagattgccaatnttgcagcttatgcatttgccccagctatattggtcacccctcttggtgctcttagcattattatcaggcatgataaaaaaatttagctttaaattgatgcttgactcttggtaaattttgatttttgacgtttgcttgcagtgctgctcttgctcatattantttacgggagaggctacatatctttggaattctc

SEQ ID NO: 117050 - DNA, 415 bp, Glycine max
  unsure (1)..(415): unsure at all n locations
ttggtggaattattaataattgcacttcattataaagagnttctatctgtaatttaagtaacacgtttaatcataaagtaaatagtatttactccaaaaaatggtggaaacaaaactaactatgattgacatggtaattactggacttatagatatataacagcataatgacaaaagggataacacaacaattgattcgggggaaaataaagagataaaattaacttgcgtgaaagacatggatntatctttatcttgaaagacatacactttgataaagggaatctaaattgttntacaaaagatcaggaatccatattcgtctttgttggagttatgggtagagtaacatgcaattaactcttactttgaatttgatttccttcacacaagaaanatgctactaacatataaa

SEQ ID NO: 117051 - DNA, 432 bp, Glycine max
  unsure (1)..(432): unsure at all n locations
tgtgatgatgcttgcagcatatgccttgaagaattttgcaaaagtgatcctgccattgtaatatgcagctntttcgctttcctctttccttttgacatagaattataggcagggatggcttcatttgaaaaacatttgtttactccttttccttgtatttgttttcaggtcactaattgcaagcatgagttccacctgtagtgcattcttgaatggtacgttttaatattttttcatgtgtgtctttcacaaaacaaatatatttagtgttatttttacctctatgttgtcatagggtaatatatttttggttcaattggttcctgtgtattaaaatggcttctagctttcggcattctcatgaaaagttaaaatttgaagtctaataaatgcattgttttggacaaggtgctatactaaccacctacaaaa

SEQ ID NO: 117052 - DNA, 417 bp, Glycine max
ccgactatgctcatgtggggttgaacaagctatctaaagagagagcacggaatgaatagccaatggttgatacatggacggagatgaaaaatattatgatgaagcggtatgtgccggctaattactcaagggacttgaaatttaagctccaaaaactaacccaaggcaacaagggggttgaggagtatttcaaggaaatggatgtgctcatgattcaagcaaatattgaagaagatgatgaggtaactatggctcgatttcttaatggtttgactaatgatatccatgatattgatgagctgcaagagttcgttgaaatggatgatttgctttacaagatgtccgattcagtagcataatataacgagacactcgaatatgaacaacggaaactctcgaaaattcatatggacataa

SEQ ID NO: 117053 - DNA, 427 bp, Glycine max
ctgtcagagtttgatctccaatacgaaccttgtggccccatgaaggcacaattcatggcagactttctggcagaatttgttggaaattaccaaaccaccacaaactagtggaacctcatgtagacagtgcctccaacatgaaaggaagcaaggctggtattatccttgaaggccttagcaacatcactctagagcaagcccttaagctcaacttcaaagcctcaaacaatcagagtgagtacaagacacttatagtaggcctaaaactagcaaaagaagttgtagtcaagaagctaaggtgctacactgactcacagcttgtctaggggcaagttgccaacaaatatcagaccaaagaaatagtgttgctcaagtactaccacactgccaaaactctcattgacaaattcaaatgctttgagatgta

SEQ ID NO: 117054 - DNA, 424 bp, Glycine max
  unsure (1)..(424): unsure at all n locations
actagtctaaacttatgagggatcgaggtttattactttaggcttcagaatagaacacaagaacatgattaattagagaaatatcttcatatgcatcaactcgtttcttagaaagacccaaagctttttacctattgctgtcaactttttaattacttgcatttactgctctttaacatagcatctagtttacttttgtttatattctcaattatcaatgtttgttcacacaatgctctatttctgaataaaactttgtctaataaacaagttccctaagttcgatactcggattactccgttttaattttaaatgcttgacgactcggtgcactntccgatatttcatttcccgtgaatatactacttgtaaatttgagatagaggaattgtgttgaaggggtaacaaaaataagacacaaag

SEQ ID NO: 117055 - DNA, 219 bp, Glycine max
aacacagccactcctttacccgtttttttttggatactgatttcccgccacctgtgtgattttcttatttttcctttatccaaacacttgtttttttttatactttttccgatgtctaaaaatcagtaaaattcatctaaattcgagaaccattcaagaattttaccgttgatgccaactgcagcaccacgatgtttttaactggatatgatgcctggc

SEQ ID NO: 117056 - DNA, 417 bp, Glycine max
acccatcgttgagaggaacgaggataagggctacgtgggagtacgtgagctcagttggaggtgggcaacaggggatggtgggttatacgtgatttatggatgtggagaattgtcttgcgccatcgcccgaccgccacctagtaccacatgtgatgggtaccccataatcctacaagcttgaaatgaggaagtgtagaagggtgagacttcctgcttttattcgttgaccacatagtggtacctggagatatgttgcgggggtcaggagaccttggggacgtcacgtggggtgctatttcccacaaccaagcttgaccaatcccgacccaactcgggcatagtcagtcagtgagaacctgtgatgtacctaaacaggcaagctcctggcagtcaacagataaaaggaacaaagaccac

SEQ ID NO: 117057 - DNA, 391 bp, Glycine max
  unsure (1)..(391): unsure at all n locations
agcttataaagtattcaaatgagcttatatgttcctcaaaagcctttgatgtaattggtgcctcgtacaccaaagataattgggtcaactgggatcgcatntgggcactcttgaacatatatacatgtcaagttcttgattcaatttgtttagaattaacatccacgttcttccttcattcaatttattacaacacgtcgaagatttgagttagccaaatcagatcttcaagaattattaaggaataaagagataaattaaaatggtaaagaattggtggatttactcatattggttaaactcattttttgacatttaaatactttattaataatatcattttaagatacaaataaaacgtgtttttttctttataattctcttaaacatt

SEQ ID NO: 117058 - DNA, 430 bp, Glycine max
  unsure (1)..(430): unsure at all n locations
ntaataannatttggaagcaaattattagtgtatgaatttatcgaataatatataacctttatatgttgggggttaaaagatgtttcagattccatgctatcttcttttcagttgcagctntatgccaaatcaagtcactacttgaataaaaccaatgggatgctgagcttcactagcgaattgataggttaagaatatagaatgtgatactaagtaaaaggtattcaaacaaaaggataaagaggaacggcacatagtgggcattttcctaaataaagtataaaagcatatgttctgaatgttttccctcataaaatattattgaccattgcatttcacaatttgttaatacctctgcttcctctccattttctgatcacttttctacaaaggggtcatttgtggcataactgtaagtaattcaaatcg

SEQ ID NO: 117059 - DNA, 386 bp, Glycine max
gatgccctcaagcgcgagctttctctttgcatgcaactcctcacccacggtacaagtttcaatcaatcatcatcatgggttcaccaaagaaacatatcatacgtagttgatgatattccaaattccaatgaaccaatcaaaacatggaatgtcctacaccctaaaggtttatcaattccccatgatgaaaatattatatatacttttataaaaaaaactcagcatatccatctgtttcttcttctgttcttccacataatataaatggctatggtataaagggtcttttatttaacctcttgctctctttctagtagtctacatctttcgctcttccttctcatataaaagtgagagaattacattttctttattgtattagagag

SEQ ID NO: 117060 - DNA, 428 bp, Glycine max
tctcctctggactcaccttgccatgatatcaaacatatatattaatgtggaacatccaacatgttatgttactctttttttttacacttgttctggtttggtttttctgttttcttttttcctttttcttttttgcttcctttcggcatgtcaattgtccataagcatgtatactagtctaaaagctcatgatggaaagctacgtaaatatgattataatagtgtaactgaataaatgagtttatatatcaaatccgtttagtgggtgaaatgttattttttatgtattaactctcatgttcatcaggccaaaatgattatgatgaattttgagtttgacctaaaaataaataaaatcttataagaattatttttatcacagattaaattccaataataataaatgaaatttatactatctttttatt

SEQ ID NO: 117061 - DNA, 342 bp, Glycine max
  unsure (1)..(342): unsure at all n locations
aaagctggctacctgcctattccacccttactttatggctttagaatgggtttaagttattgggcttctatttgctgctatgtcatgattgaatttctangagtactctataaaaccttaagagcctctttgactctggtacttttaattaatctccccccaaaaatctctattctctaaaccaaaaaaatgagaaggaaaaacacttattttgtgctaattcttttatttgaacttcaccagttagggttatatgtgcaaatataaaagcctttttacgcactgttcaaacctttttttctttattcttacttctagaatggaatagaagcaattagtttt

SEQ ID NO: 117062 - DNA, 353 bp, Glycine max
tgaagtataacttctcaatggttcttttgaataattgcatttgcaggtgcaagaaagaaaaggactacctatataagcatgaagtttagccgcttcaagaagctatgacttggctttgatttgcttatgaaggatatggacacatgctagtaaactaatttcgagcaagagtaatgttataaactattgtgtagactatcttcatgtattcattatgaatagaaagggttcaatccttagtaacaccctgatattcgaatattttaaacgtgtaatttgctaagatgaaattcaatcgtcacgatatttcatctatgcaatagtttgttgatgttatgacttggtgatttgat

SEQ ID NO: 117063 - DNA, 286 bp, Glycine max
  unsure (1)..(286): unsure at all n locations
tgtcagtcgaagtttttctttcacgggcgtgaaccccgagtggcttgttagacagtcaaggtccaacccgaaggagaatctgtagatgttgccataagataatctctgaaacacgtcntgcaggttcaacatgacgccgagggcgtctgttttctgtagaagcgtggtgagcatagtgcgtcgagtatacctgttgatgatcttgacggcgagggaggttaccaacgagtggttgttgaggtgcacgctcgccatcttcttctggaatcgcctgtgtcgacatgga

SEQ ID NO: 117064 - DNA, 418 bp, Glycine max
cactgcatatgaatggatgtgtgtataaacttgtcccatacaaaccttaactatgagtgaagaaactacagcacgaaacaaatatgaaatttatattttagaaaaacaatattattagaaaaatccaccagtaatctaacatttcattgctattgccttaactttaagcatattgcaaccatgtccttcgacttttccaagaattttgggtactttttctttggaacaaaaagaaaagggtttcatttctaactttctaatggatgcaacacatcttatattatatgatttgaactattcgcacaattcagctacaccaggtactgaataacacggattcaatgattggtgagtaatacacattaacgtactcttcaattactatgataaaaaataatggcctacctaaacaaaatag

SEQ ID NO: 117065 - DNA, 437 bp, Glycine max
  unsure (1)..(437): unsure at all n locations
tactacgcttcacatcagaccacttccaggtgctggagctactttcatggacttgatggggcctatgcaagttgaaagccttggaggaaagaggtatgcctatgttgttgtgtatgatttctccagatttacctgcgtcaactttatcagagagaaatcagacacctttgaagtattcaaagagttgagtctaagacttcanagagaaaaagactgtgtcatcaagagaattatgagtgaccatggcagagagtttgaaaacagcaagtttactgaattctgcacatctgaaggcatcactcatgagttctctgcagccatcacaccacaacaaaatggcatagttgaaaggaaaaacaggactttgcaagaagctgctatggtcatgcttcatgccaaagaacttccctataatttctgggctgaagccatgaaca

SEQ ID NO: 117066 - DNA, 434 bp, Glycine max
  unsure (1)..(434): unsure at all n locations
agcttngcatgtattgtgattctagagagttaaaggtccaagttccagagagtcttgagagattttgttgtgtgaagatctgcagagaccagagcttgaagcaaaagtcgttctgagagcttgagatgagtttgtgagtggttatgagatcctagaggtgaatgagacatcctcaccacttgtatgtttgcaatctttcatctttgtcttctctttgttgtaaaggaggcttcctggttatggaaagctaaaatcctttgttggatcttccttgtaggtacttgatgtaaatatctttctatctggttaatgatgtttaggatgttctctgctatcagctgttcattctagtatgcctttaccttgatcacatagatgcatgctttgatagggtcattcaatagtggaaactggtctgattctgatgattgtga

SEQ ID NO: 117067 - DNA, 419 bp, Glycine max
tggtggatgagttgatgatgacttgtgccctctggctcaactctaaggaccaaaaagctttgtgtagcttctgatgctatccggaatcgatcctacaataaaaattacattacaattagtaactatttttttagtgacaatgcaaaaaaaataaatcaacaaaatccaatttgcaatacctgtcaagagtagtcttcacctagtacatagtctgttagtggttgcccaggctatggttgtactttgacaggtggtaaacatacaggaccatgtgttacttgttgtaacaatagtttatggcaaaccgaaaaaattactgactgagtcacggacaatgtcactttctttaagacgtttcgtggcactgcaaaaaattgtgcaagcagactatcaaccacgaagtcctcatgataaaacag

SEQ ID NO: 117068 - DNA, 329 bp, Glycine max
  unsure (1)..(329): unsure at all n locations
agctntaactgaatatgcaacgttccaaatgaattttaaatggtgtaatcgattacaatatattggtaatcgattaccagtgtatctgaatgttgaaattcaaattcaattgagaaaagtcacatcttttcataaaaagcattgtgtaatcgattaccaatgacaagttttgaacaaaaggtcaagagatgtaactcttgacatgattttctcaaggttataactctttcaatggttttcttgaccaacacgaagagtctatcaaagcaagaccttgacttgcattcaatttnttttttgaacaacttcttgaacaacttttgagaaac

SEQ ID NO: 117069 - DNA, 425 bp, Glycine max
ggcccaacgttcccggatgtctctaagaacaatcaacgttgaccttgctattttgtgcagataaaaaggtcttggtatgtatgtgttcgagttttagctttggtgcgtgataaggcaatacagtcaaacaaatagaaataaagattttctcaccattttaaagccaaaagaaagattcaacaagatcagtataaaaaataaatcccgataacatctgacgttctgaagcttatgaggcaatttcaacattttaatatgcaagaagttaatatgtgcatttattatataacttgcataactctagagtctaaacaatcagacacgtttaatgtcagatggacaattaataagaatttctatggtcgtttttcctcgcatatagaaacagatagaaattcaaatgatacagctaaagtttttaatta

SEQ ID NO: 117070 - DNA, 425 bp, Glycine max
acgataagctcatgataagtatctaaacaaaatgaggaatgaagtgcacctacggtgagtcatcacatgagagcaaatccaaatgggagaaaaattcaaagccacaatcgaaaagtcacaatggaaaatggaaagcgtgaaacaatggaaaccgtggagagcaaatccaaaggggagagaaatcaaaagccacaatggaaaatggaaaaatgcaaagcgtgaaacaatggagaccgtggagacccaattggaagtcgaaaaacacaaacagtaagttcagccttgttggaaaggtaaaaatgcattggtaagttaaccggccacgcacaaaacgacaaaaataataaatgcatagtgaaaagacgtttttgggtgggaataaggaatgttggcattgcgacacgtatgccctgacaatgccatgt

SEQ ID NO: 117071 - DNA, 436 bp, Glycine max
aagctgggcattcataccctgatgaggatgtcccatatgtttcttattctggactgattcatttgcttccaaagtttcatggccttgcatgtgaagacccgcacaaacatttgaaagaatttcacattgtctgctccaccatgaaacccccagatgtccaaaaggatcacatatttctgaaggcttttcctcactcattagagggagtggcaaaggactggctgtattaccttgctccaaggtccatcacgagctgggatgaccttaagagagtattcttagaaaaaattttccctgcttccaggaccacaaccatcaggaaggatatctcaggtattagacaactcagtggagagagcctgtatgagtactgggagagatttaagaaactatgtgctagttgcccccaccatcagatttcagaacaacttcttct

SEQ ID NO: 117072 - DNA, 190 bp, Glycine max
ctgatcgcatggtccttggacactagtgatcggagacttatatctacttttgcggagaggtaacataaggaaactaatagtttccatcttccaataggagaagtgaccatcaccctggatgatgtggcatcgttgctacattcgcacattataggcgcattccatagctttgaggaattttttgtggatg

SEQ ID NO: 117073 - DNA, 426 bp, Glycine max
  unsure (1)..(426): unsure at all n locations
agatgctntatcagtacaaaactacatgttntttaatgcttgaggactggacgtanacacgggaagtggctgaaccaagataaaacaagtttgcatttctctcttttctatcttgtttattntatctctcataatttcatcttgcatacttgaagaatattgttgaaatagtttgcatcttcgtctttatcttcaatattttgaacatatagatttaaaattggaattagaacttgattaatcgggagaatttttagaacttaattcacccccctcttaagttattgaggccacttgtccaacaattcatggaaacatctgaagctaatcaacatgtaattcaaaatctggaaatttatgttggtaagctagcaaaaaaagtggctaaattaccctttttggtcacaagggaagagaactttgtag

SEQ ID NO: 117074 - DNA, 253 bp, Glycine max
gtttccacattcacaaaacgcgcataagcccaccattccctggtggccacccttcactgagctcacgtactcccacgtagcccatattcttttttctctcaacaacgggttcccatataatctctcaagctttcacaacattcaagcaaaacaacattcaaacagcacaagctatcacagccaagcaaaacagagtaaaggcagaaaactctgctcaaacaccaaccaaaatcacagcttttcttacttaaag

SEQ ID NO: 117075 - DNA, 344 bp, Glycine max
  unsure (1)..(344): unsure at all n locations
agcagaatgtactattttcgctccggagtatgatagtcaccgctttatgagcgcggtacaccagcagcgcttcgaagccgtcaaggggtggtcgtttctccgggagcgacgcgtccagctcagggacgacgagtatactgatttccaagaggaaatanggcgccggcggtgggcaccactggttactcccatggccaagtttgatccagaaatagtccttgagttttatgccaatgcttggccaacagaggagggcgtgcgtgacatgagatcctgggttatgggtcagtggatcccgttcgatgccgacgctatcggccaactcctgngatatccgttggtgt

SEQ ID NO: 117076 - DNA, 248 bp, Glycine max
  unsure (1)..(248): unsure at all n locations
ttatttagatgatgccctatacttttgtcaagaatnaagagtccaacaagtgtgcagaatcaaagagtcattcaatcaagaatcaagattaaagtgaagattcacgagaagacttctgatatgccagaactttcagaaaagcatcccgataagtatcaaaagatttttttcaaagaaaagattgaacaacacaatttgttccaaagaatttttttatgaaaaatcttttaccacagtttttatctttg

SEQ ID NO: 117077 - DNA, 435 bp, Glycine max
  unsure (1)..(435): unsure at all n locations
tcagcttaagctgatgtccattcatttgtgaagctaatttgtgtattgccgaagtggacttgagctaaaacaaaaaattcaacaacaattcacaaacatcaggtattactttatactagtggaagtggactgcgctctgtctagctaaatattatccattaataacttgtagggctttgttgtgccttagtctcttgtaagcatgcatcatactgccgacaaatgacaattgattaccaatgattcgtagtaatgctcacaaaaccatttttgtggaaggaatcatagcatatataggttggattttatctaaaatcccatcattgatatttttagtcctgtagtatggtttttcttttcattttgagttttccacatactgatggatgctagattggtttggtttatctggactctntgatttcttatctaatc

SEQ ID NO: 117078 - DNA, 415 bp, Glycine max
  unsure (1)..(415): unsure at all n locations
tcaaaaggaagctcgagaagcttttgtcataatcagaggagagagggatggactcgtcaccgacgaaggcttcgacgagatgctccgtcgtgtccggctgtgacaacgccgaacccattgacttgttctgattgaagaaaaaaatgtgtttttttttgggggcgttcaagaaaacggcattgcgcggaatcactgtgagaagcgaaaagggtttgaggtgggttttgataatgaggagagttggtgcatcccagacacttgaagaggaggaagaagccagaaatggcttcaaaaccaaggcttttgtttccttaccaaacaaactacttgtttgttcaatgactctttagttttggataccatgcagtcattatttattatgtctagcagaactgtcaacnttctatatatatat

SEQ ID NO: 117079 - DNA, 429 bp, Glycine max
tggaaggatgcttcaatggaggagaagaaagattggatattttagagaggggggagcacacaattgaagaaataaaagagggagagaagtggaactttgaagtatgtctcacaagactcttatcatcaaagttacaacaagtgttacacatgcttctatttatagactaggtagcttccttgagaagctttcttgagaaaacttccttgagaagattctttgagaaaacttccttgagaagctagagcttagccacacacactcctctcataactaagctcacctccttgagaagcttccttaagaagattcctaaagaagctagaacttagctacacatacctctctaatagctaagcttacctccttgagatgagaagctagagcttagctacacaccccttataatagctaagctcaccccatgac

SEQ ID NO: 117080 - DNA, 449 bp, Glycine max
  unsure (1)..(449): unsure at all n locations
gattacacaagtcttgttatcaattaccagaggagaatttcaaaaaataattttcaagagtcacatctattcaaatggtttatgaatggccatcaagggtctatttatatgtgactcggaaactcgaatttaaagagagtttttattgcccanaaagttttatcctctccaaagattaagagnttttctgaactaaaatgtcttatcctctcaaaaagattccttggtcaaccacttgcatattcaataagggaattttgattgatcttcattgtacaatctatctcttttaagagagatttcttcttctcttcttcttatttncgaaaagggattaagagaccatgggtctcttgttgtagaggattcctgaacacaagggaagggttgtccctgtgtggttcacactttgtaaaaggagtnttacaaagagagtggaaaatctccag

SEQ ID NO: 117081 - DNA, 426 bp, Glycine max
  unsure (1)..(426): unsure at all n locations
ngagcgatgaggaagaanaggaanagggttntggtaactgatctcgtggggggaaaantggatttggggtcttaagttatgaataagacaacatcggtttcttaaacaaaaccgatgttaactntacaatgttaacatcggttttttcaaaaaccgatgttaactttctacagttaacatcggttnttcaataaccgatgttaagatattaatgttaacatcgagttttggaaaaatcgatgttaacatcaacttgttaacattggttttttcaaaaccgatgttaattaagtcaacttatttaccaaaatgccaccgtgcttttatttacatcgcttttgcgaaaaactgatgttaagcttgcgatgttaaatcaataatttgtagtagtgatttaccaaagtatttgtaagcttttcgcatctc

SEQ ID NO: 117082 - DNA, 368 bp, Glycine max
gctggaactatatatggttggtaacattattagctggtaaagactcaaaattggttcatatgctggaagagaaaatcccctaatgagctaaaagtccactaaaacggacagctaccccgggacaaactgtcttggaagatatcaaacccacatttgtaagcgaataaacaaagaaaacccagatgattgattaacagctcctcccatcaacacacaccccattggtagttgtacttgtatatacaccatttaaggaactattggaagatttgaacccattatttccattatgtgctgctgctgctttcaacattggtgggtgtatcccatttggtaacttgccataacctttgcttgcaggcacaact

SEQ ID NO: 117083 - DNA, 430 bp, Glycine max
  unsure (1)..(430): unsure at all n locations
tgcttctacattgccaccaccagcgtcaccactgatgtggatccgacgcacccatccgccataaaccctgcctacagctgcttgttaggccggcctttgattcattcagtgggggtggtcccttcaacactacaccaaaagttgaaatttgtggtggaggggcaattaattatagtctcacgagaagaagacgttcttgtgagttgtccttcttctacaccttatgtggaggccgcaaaggagtctttggatacatcctttcangcattggaagtggtgagcaatgcttatatagaatctcccccagtacaaccacgctcatctggggccgcattgatgggatacggatacgaacccaagatgggtttgggccaaaacgataatggcgtggcgagtttggtagagtttgaaattctgatactggggacag

SEQ ID NO: 117084 - DNA, 362 bp, Glycine max
aatctgtacctgttgcaagggtttgtgagttgtgctcctctgctgatattatacaacctttgccttcatgcagaacctgaacaatgagcacctgaactatgctgaaatttacaatagaccctctcaacctcagcagcaaaatcaaccacagcagaacaattatgacctctccagcaacagatacaaccctggatggaggaatcaccctaacctcagatggtccagccctcagcaacaacaacaacagcctgctccttccttccaaaatgctgctggcccaagcagaccatacatttctccaccaatccaacaacagcaacaacctccgagacaaccaacagttgaggcccctccacaacctt

SEQ ID NO: 117085 - DNA, 375 bp, Glycine max
  unsure (1)..(375): unsure at all n locations
agcttgccgcccagctcgcccatgcgagcattgttgcttcctccagaagcaacagccttctggaggaatcttctggagggcccaagtgggcctggttgctatatgcaccccctttttactaaatgcacccccttctatttttttgaattctttttccgtaacgctacgaaactttgcgaatttcgtaacgatacttattttccttccgcaaggttacgaatccttacgaattatgtatttactctnttttagctttcgaagaagttacggaaacttacggattgcgcaaaaacacctcttttcgatttccgccacattacggaatttcacggatcgcgcaagcctgcttccttttgatttctgagacgtctcgag

SEQ ID NO: 117086 - DNA, 433 bp, Glycine max
  unsure (1)..(433): unsure at all n locations
gtcctcagatccctcttgttggactagacttagactctacaacattattgtaacaacatacttaaaaccaaaacttaatctgcagatccctcttgtaagactaattttcaattctgcttcattcaagttctaaggaaacaatacatttcccaatgttaaaatcacctaactaggcacacanatggttgatcagaccaagagcatacaaaatttaagcactggaagaagcattgaacacaagaaacaaaatcaattagatatgaaaataattacatcgactgttcattagaaatccccaacaagggtatttagccaaccattacagacgaaaccctaacaataataagcttacaatacctaggaattttattgatatgatttttaaagtaaatacaagaattaagaaacttacctaagaattagccaattaaaa

SEQ ID NO: 117087 - DNA, 387 bp, Glycine max
  unsure (1)..(387): unsure at all n locations
agctntgatgcaacatttggagaggttaatgaaacaacaagatgatgcgctccatgagaggttgggtcaaatggagaatagagatcataatgaagaagaaaggaggagaaaagggaatgatggcgttcctagacaaaaccgaattgatggtattaaactcaacattcctccatttaaaggaaagaatgatccggaggcctacttggagtgggagatgaaaatagagcatgttntctcatgcaacaactatgaggaggaccagaaggtgaagcttgccgccacggagttttccgactatgctcttgtgtggtggaacaagctacaaaaggagagagcaagaaatgaagagccaatggttgatacatggacggagatgaaaaagatcat

SEQ ID NO: 117088 - DNA, 426 bp, Glycine max
tcattctacacctgaaaaagaagatgagatagttgctcttaagagaaagcttcctaacaaaaattttcatgcaggtggaccttcttctagtaattctgacttaccgcagcctcctatccctcttccattcccacctagagcaattccaaacaaaaaaaatggaagaagcagaaaaggagatcttggagaccttcaggaaagtagaggtgaacatacctctgctagatgccatcaagcagattccaagatatgccaagtttctaaaggagctatgcacccacaaaaggaagctcaaaggcaatgaaaggattagcatgggcagaaatgtgtcaacattgataggtaaatatgttcctcacattcctgagaaatgtaaggacccaggtactttctgtataccttgcattattgggaacagtaaatttg

SEQ ID NO: 117089 - DNA, 404 bp, Glycine max
  unsure (1)..(404): unsure at all n locations
agctttcttaagaagatttctaaagaagcttgagcttagctacacaaacctctctaatagctaagttcacctcattgagatgagaagctagagcttagctacataccccctataatagctaaactcacccctatgccaaaaaacatgaaaatacaaaaaaagtccctactacaaagactactcanaatgccccgaaatacaagactaaaaccctatactactagaatggccaaaatacaaggcccaaacgaaggaaaaacctattctaatatttacaaaaataagcgggctcatacttagcccatgggcttgaaatctaccctaaggctcatgagaaccctagggccttcccttggatctctagcccaatctacttggagtcttctatccaatgcccttgtggg

SEQ ID NO: 117090 - DNA, 418 bp, Glycine max
tagctgaattcagatcaaatggaagttagctttgctcaaccttggccagcttagtgaccaaatcagcctcagatgcaagagttgggcgctaagcactcaagactcgtggcttagcgcatgaatagagatgcgcttagcgcgaggcttgcgcttagcgaaaggactgtttttcaaaaatattttctaagttatctttcagtcctttttccatgaaattgaaacccttatgttaagcattcaaagattggctgatatactcctatgtacagattacataacaagttccaaatgatttaaatgcatataaaacaaacacaacaaagattaaatctaggttgcctcccaggaagcgctttttttaatgtcattagcttgatgattttacctctctaggcaatctcatgttttggttctcagc

SEQ ID NO: 117091 - DNA, 397 bp, Glycine max
caataactttttactcggatatctgaatgaatcccgtaacataactagacgctcgaaattgaatgttgaaccctagagccaatgtcaaccaccataaccttttactcggatgtgtgatcgagtcccgtcctatatcgagacgctcgaaatagaatggttaatcttttagccaatataaccgacaataacttttttctcggatgtttgattgagtcccgtattttaccagacgctctaaattgaatgtggaaactttgaactaactaaacgacaataacttttactcggatgtgtgagtgactccgtaccatatcgaaacgctccaaattgaatgcgaagctctgagccaatcaaacgacaatacattttactcagatgtctggtcgagtcccgtact

SEQ ID NO: 117092 - DNA, 402 bp, Glycine max
  unsure (1)..(402): unsure at all n locations
tcgatatattacgggatctttttctaccttcgagaaaaaagntattggcggttgaaatggctcagaacttccacattcaatttcgagcatctcgatatggtacgggactcaatcagacattcgagaaaaaagttattgtcgtttggattagctcagaagttcaacattcaattttcagcgtctcgatatgttacgggactcaatcatacatccgagtaaaaaattattgtcggttgaatttgctcagaagttcaacattcaatttcgagcgtctcgatatgttacggggcttaatcagacatccgagtaaaaagttattgtcgtttgaatttgctcagagattcaacattcaatttcgagcgtctcgatttgttacgggactcaatcagacatcccagtaaa

SEQ ID NO: 117093 - DNA, 424 bp, Glycine max
  unsure (1)..(424): unsure at all n locations
tatagaacatatatcctaatgtcacattctatcagagcngtgtgttcccgtgtcctctagcatgaggttcttcatagtcatccacctattcatctgctccctcgaacactagttcaagatcatcacaggatccaaacacaacaacaacagggagtgagttatcacattcctagctaatagagaaacaagacaattaaatatacatattatataaatgagataccacttgcttaaacataactcacgtaacttcaccacttcgtcattcaaaattcatttttcaattatcaatcacattacacaagaatctcacacttcgatcaagatataataacacatcaattagcaagcatatgcaatagttatgttaagactcaatcctatatgcaatgtggtaccatgtcagtgaaaaacaaccctgggg

SEQ ID NO: 117094 - DNA, 435 bp, Glycine max
tctcaaggacgtgagcttagttttagatgggtgtgtgtagctaagctctagcttctcaaggaagtgttctcaaggaaattttcttaagaaagcttctcaaggaagctacctagtctataaatagaagcatgtgtaacacttgttgtaactctgatgaatgagagtcttgtgagacacaactcaaagtttaacttctctccctttttcttccttccatttcgtgctccccgctctctctttctctccctctttcttttcctccattgaagcatcctctccaagcttcttatccaaggctcatcttggtgatgaagctccttcttccatggcttattccctagtggatggcgccgcctcttacctcttctcctttgtcttctgctgcatctccatggtggaaaatcaccattaaaagacctaattgaagctcaaaga

SEQ ID NO: 117095 - DNA, 213 bp, Glycine max
gcgccacccgcgagaataacatctgactcaaacattaatgacccagaaatccattaagattttttgtgctgccgataggcttttttaaaggaaaaatctatgtctgtcacaattcaaggaaattccctcaccgttatttaaacaactccccccggaagaacatctaaatagccaaatcacagacaattcagtgctgactgaaagctgagtttc

SEQ ID NO: 117096 - DNA, 231 bp, Glycine max
cacctggaattgtcttgtgattatggctatttctgatgttccttccggggcggagttgtttgaaataacggttgaggtatttccctgaattgtgacagacatagatttctccttttaaaaaagcactatcggcatgcacaaaaaaatctttaatcgtatttcttgtgtcattaattgtttgatgttcagattgttttcctcgcgggctggcgcgcctcagaaagtaaagct

SEQ ID NO: 117097 - DNA, 410 bp, Glycine max
agcaacgggaagctacgagagatataaattgtcattacttttcactcggaagtccgattcaggcgcatcacatatagagacgctcgaaactgaacaacagaattattctataaattcaaacggtcataacttgtcactcggaggggcgactcatgtgcataatatatcaagacgcctcgtattgagcaacagacgctctcgagacatacaaatggacatgagcttttactctgacagccgatccagcgcatcacatatagagacactcgaaattgaacagcggaaagctcaccaaaaattcaaaggtcataacttttaactcggaggtccgattctggcccacaatatattgtgactccccaaaatgaactaccgaagctcttcgaaaattcaaatggtcataacttttc

SEQ ID NO: 117098 - DNA, 249 bp, Glycine max
  unsure (1)..(249): unsure at all n locations
tgcagcttgagccaaattctgacttaccataaacccttgacccaggtgagaatgtcaatccttaccctcngaagcaaaaaaaagaatagaagggaaatttccaatcaaagaanaagagaaggaanattttcaatgaaagcaaaaaaaagaaaagaaggaaaattccccaatcaaagagtgggagaaagcaaaaagaanagaaaggaaattcccaatcaaagaatgggagaaaagtaaaaaggaagaaga

SEQ ID NO: 117099 - DNA, 428 bp, Glycine max
  unsure (1)..(428): unsure at all n locations
nntgatgcaacattggagaggttaatgaaacatcgttatgatgcgctccatgagaggttggatcaaatggagaatagagatcataatgaagaagaaaggaggagaagagggaatgatggtgttcctagacaaaaccgaattgatggtattaaactcaacattcctccatttaaaggaaagaatgatccagaggcctacttggagtgggagatgaaaatagagcatgttttctcatgcaacaactatgaggaggaccagaaggtgaagcttgccgccacggagttttccgactatgctcttgtgtggtggaacaagctacaaaaggagagagcaagaaatgaagagccaatggttgatacatggacggagatgaaaaagatcatgaggaagcggtatgtgccggctagttactcaagggacttgaaatt

SEQ ID NO: 117100 - DNA, 271 bp, Glycine max
  unsure (1)..(271): unsure at all n locations
gcttcttttggactatgaacaagccatcaactcctctttcagaaccatgctatgtgctcgcgactggtccctttcttcccttcgcaacttgagttcactattgctaccccatagagctccgcgaaatttgttccggccatactcttccttgcgagccctcttggtctctcgttcaagggctcttgcggtaattgcattctcttcccgtaacccggcacactccttccgaacgtgtgtagctgccaacctgaactntntttggcgagttttg

SEQ ID NO: 117101 - DNA, 426 bp, Glycine max
tctcttccctctcgagttcttcttctctaagctttctctctcggagctcgcgtcttcttccctgcgagtcccttaagcttttcgcaggcttctcgcttcgtggaggttccctagccctcgaaagctaggtatcatagccactttatttatttggatcacacaagagttaattctcaaagcaaacaatatgctgataatatcaagtactattaggcatacttactatgtgccaacaactattttggtattaacttcatcctcgcctttatatattctagccaaaccaaagtctaatatttttgaattcatctttgcatctaggaagacattgcttgccctcaaatctctatgtataatttttaatctagaatgatatgctagcttacaggaactgaataaatagggtttagtttagttcttgatgag

SEQ ID NO: 117102 - DNA, 148 bp, Glycine max
aaaaagttggggttttatttaagttaacacataacattggttttttaaaaaaccgacgttaacaagagctcattaacatcgattttcttaaaacctgatgtcaaccaccctctttctaccttcgtattttttaaaaatggtgttactg

SEQ ID NO: 117103 - DNA, 431 bp, Glycine max
  unsure (1)..(431): unsure at all n locations
tattaagccatntagtgttgcatagcttaaactcaattgttttatcaacaattacaataactcttgtagtgatcaacacacacaaaaagcttaagccatttagtgttgcatagcttaaaccaagtgttttatcaacaattacaataactcttgtagtgatcaatgatccagaccccttgacatgcttcttctattggagaaattatcaatggtaaaagagacttgccatgcatatatatatatatatatatatatatatatatatacacacagggttataatgttatgttaaattgaattaaataatccaaggccttctccatagaagaaaaaataaataaaaaggtaaaatgaattaattcaaattttctataagttaaaatcaatntatgcatatctcaagttttagagaagttagatgaacgaatttt

SEQ ID NO: 117104 - DNA, 379 bp, Glycine max
ctaggggagttgagagcagcgaacttcttttccttcttgctactgagggctggtctataaaccttgaagcccataagtgatggtaaacaagttcacccttcactctagccttgctcattcttcttcatctctcgaatttatctctcatgttcttgagttttgtagaagcttgattttgactcaagagaactccatctttggttgtgcccttctcttttacgcggagactacactaggttagggggtctctctccaatctttgaatcctaaccatgtcatgcatggaaactgagcttcaaaaatgtagttggggtgttcttgaaattttcgtgcttgctgccctatcttggaactatatgctaagctatttttttgaaat

SEQ ID NO: 117105 - DNA, 214 bp, Glycine max
attcaattaatttagaggcggaggaaacctgtgtaaggaaagctgcggtcacccacctttcatttgacaagggacttaccaaaaacaggtccttcgcgatcatctaaggggtatgcctaagatgtgtgaaaaaaaaacatccctcagcctttcgctaagattgagcgcgacttgggggttaaataaaaaaatacaaccggtataaaaatggcta

SEQ ID NO: 117106 - DNA, 412 bp, Glycine max
tgaagatcgaatgtgttcacacgaaagagccatgcactctaatcaccatcaaagttggatgatgtgacgggatgagaaaaaccaagaagttgacgacatatgaatccagagctgcatcatgttctcacaccatgacttgaacactgatacactgacttagccactaatatgcattgcccagaaagaagatatgccctgtggggatacaacatcatcatccttgaatagtaccttgtttagatatggaaacagccgagagggtccacaaaaaatcagatgatgagacaatcatcaatcatcacttagcattcgtctagttattactaaaatcatactcgaggttttaaattacagccctgtagaaatgtcgaattgcttgatcttacaccataaagtgtgataattatcaatt

SEQ ID NO: 117107 - DNA, 347 bp, Glycine max
tttttagatgatgttacagaatctttataacaaatgcacattcatggacaagaatctaaaggaagaaagtcaatcaaatgatgaactttccacaagaatggaaagcttcaaaagatcatccccttgacaacattattggtgatatctcaaaaggggtaacaactagacattctcttaaatatttatgcaataatatggcttttgtgtctatgattgaacctaaaaatataaatgaagccataatagatgatcattggatagtagctatgcaagaagaactaaatcactttgaaagaaacatgtgtgggattagtaaagaaactgaaactacctatctagaacaaata

SEQ ID NO: 117108 - DNA, 401 bp, Glycine max
tatcatttccatttctcattaagtaaaatggatcattttcaagggccaacgccttaaaatgaacaccttttaaataaaaaagaatcacttgataaaaagaactacgtaaggttgatttcctcatcgccaattgaggaatacgtaggagcaaagggaaacacccttgtcgaccacaaaaagaaaaaaatattaaaagggtataaaggatataaggacataaaaagggaacataaaaaaatcaaagtcatgtttgcacattcgattaaaggctgtcgttccttgggacggacgtgtggggtgctaatactttccccgtgcttaaatacaactcccgaacctttcacttaaagttcgtagaccgcgtcttttccggtttttccgacgttttcctcaaataaacg

SEQ ID NO: 117109 - DNA, 314 bp, Glycine max
tcatgactaaaacccttatgctcctttaaacccttaaacaaggtaggatataattaaagttggccttagggttttacaaaaaacatgattatcatttttgctcaaataatgtgcataggataaaattttatacaaagttggctttgtggcttagtggctgaaaataaaaataaatcgaaatatggcgttgatcacttctcactcatgtaatttatgtaatcgtcctcatatgatgcaaaatcaaaaatataaaacagactttcctcacatgtagtttacacaactatcaaaacaaacaaatgttgcttacgtat

SEQ ID NO: 117110 - DNA, 431 bp, Glycine max
  unsure (1)..(431): unsure at all n locations
agatgcactntngttgcatcattcccagagcttattatatctatccccaaaccagcatcatctatggcctcaattatctngtcaacattggtgagggtgggatcaaagtgcacttttgcctcctccaaagcaagaacaacaattggctttttcaccccttaacaatttgaaggcattctaacagattcggagcagcttgtgcatgccattcctttaatcctcacttcgcacactgctatgtcctgctcatgaagctcatttactcgaaacccactctcctctatgctttcttttatttgtttcacctacaaaaaaaatatcaccagacttttggtcagtgtaaatattgaagtacaccaaagacttatatttaatagttaatatacaaaattgtccttgaaaacgggtacttgtattgatttagtccccgg

SEQ ID NO: 117111 - DNA, 438 bp, Glycine max
  unsure (1)..(438): unsure at all n locations
tcaagcanagcttcatggtgaatgtgattcanaggtgtttcgatgataacaatgatgacaataaaagatgatgacaaaggtgatgaacacaatgctcacagatcaaagaacaactcaagtgaatcaagaacaagtcaagagttcaagaatcaagaagaattcaagatctcaagactcaagattcaagaatgaagaanagactcaatcaagataagtattaaaaagttatttcaaaactttgaatagcacatgagtttttgacaaaatctttaccaaagagcttttactctctggtaatcgattaccataatggtgtaatcgattaccagtaacaaaatgagtttgaaaaagttttcaaactgaatttacaacgttccaattattttcaaaaggctgtaatcgattacaatgtnttggtaatcgattaccagtgtcctt

SEQ ID NO: 117112 - DNA, 281 bp, Glycine max
agaacaaatcccagacttatcccaatggtcgttttaatacacttaacatgctcactagcttttatacttcatctgcatttgaccatgttacatccatacacgctatttcctcccttttctttatctttttcttgacatacaacttattttgtcgagtgtatggaagctttctctctttttttgcgtcccaattaagatccactcaccccaatatggggtaaatatgcctttaactatatgctttcctaaaatctagccaggtatttgaaattactttttaa

SEQ ID NO: 117113 - DNA, 440 bp, Glycine max
  unsure (1)..(440): unsure at all n locations
taagcttgctgcaccagatttgctgaaacaaatgaacaaaatatgattcattaatattataaacatgacagaacaaataaatatgaaaaaatttaaacaaataagaatgtgcctgatagtaataccttaagaaattccaacactattagtcccaacacttgaagttccaatatcaacagtacttaaagtcaaaccaaacaactntaaaaaattgatcgattcagtttggttttgaccgagtttataaatctaaacccatgactcaacctgtacatgaacagttttgatcggttcggttcggttttgacccaaatacataaataactcaacctaaactgttcggattggttttggtcaattcgggtttgtggtgacttgtaccctgaacacccttaaggaaagagaagaaaagacacgagatgttcaatgttgtttgattt

SEQ ID NO: 117114 - DNA, 323 bp, Glycine max
cttgtgcaagggcatgatgtatttaataatatcgaaaaagtgggtgatgaagaacgactttcaagtgtaactggtaaaataactaattgcggtgaacataatgagggtgagaattcctcagccctttatggagaatactaagttctacccttaatatgaaatatgattatatgaataattaggagtgtaagcaggtgcgggtcacctgcgaacctgaattgatccaaaccaacccaaatagtttgggttgggtaatttttttgtttgggtcaaacccaaactggaccaatcaaacctgttgagttttgggttgggctcacggt

SEQ ID NO: 117115 - DNA, 429 bp, Glycine max
tctcagctttcgtttaagagagcgaaagttatactttattttatcgggtattccgcagtcagcgtgactataagtcaatatgacagatcttgtgagcacggaagatgacgtaaatctccgcatgtcaacgggcttgtcagccgcgattgacgaatggcgcagaaaacgacgttagtctctgcgtgttatcacgctgttcgtcttacagacagcaaaaattttatacggataaccactcgggtatttccgcccgtcagcgtgactcaaaagtcagtatgacagatcttgtgagcgcggaagatgacgtaaatcaccgcgtgtcaacaagctggtcggccacgattgacgaagggcacagaggacgacgtaagtctctgcgtgctatcaagcttttcgtcttacagatagcaaaaagtttatacggataac

SEQ ID NO: 117116 - DNA, 296 bp, Glycine max
ctgcaagctgattagtatggggcctgatgcccttgctggaagtgacaggcactccgtagaactgacagagacccatagttagagcttgacaactccaagaccctgttggacttcttcaggtccactgggtgtcttgcaagcgcgatccctgctaacaatagatgaaatcataaatcagttgagcgatgtgcatacttacctatttatgatgacgtgaccttgccggggggaacgggcaccctgtatgactacagaggcccgtaaccagagctggaaaccccagggccctgttagac

SEQ ID NO: 117117 - DNA, 430 bp, Glycine max
  unsure (1)..(430): unsure at all n locations
tgtgaaganatatgcacacgctgtgcaatgcttaatcttatgttgcgaaagtcgtacacccgtgtaacaaaagcacacccatgtgcgaggacttgtgagaattaatagttgtgaaattgaatcctgtagaatgatgattgaccaaacaattgaattatggaattattccctatgcgcttatgcttcctcataatttatttcttaactgaccaaattagaactaaattaagagaaagattgttggaagtgtctagccaaaaccttttaacaaccttaagagaagtcggtaattgataaacattgagagttcaattaacatagaattgagggaattcaattacaagattttatcataaccataggccttctttatctgataaattcattgcattgtctttatttactctatagactattgttttttgacaac

SEQ ID NO: 117118 - DNA, 211 bp, Glycine max
  unsure (1)..(211): unsure at all n locations
gccgtccggcgaatgtgcacaacaagtttttccacatccacaatgcgcgcataaacccaccatccctgtggccccacttccactgagctcacgtacttccacgtagcccatattctctgttctctcaacaccaggttcccattcatactcccaagcttncacaatatccaagccaaactacattcacacagcacaagctattcacgccaag

SEQ ID NO: 117119 - DNA, 428 bp, Glycine max
  unsure (1)..(428): unsure at all n locations
tgctctaaatntacatngatgatagatntatgggatgtaggttatatgccatnnntgctntaagagtaacgtcccactggtaaaactaactttccaaatgtttgtcttctcaagaatggccccgaggaagcttgcctcaaagaggtccaagaatgacaaggcagccgaaggaactagttccgccccggagtacgacagtcaccgctttaggagcgttgtacaccaacagcgcttcgaagccatcaagggatggtcgtttctccgggagcgacgcgtccagctcagggacgacgagtatactgatttccaggaggaaatagggcgccggcggtgggcaccactggttactctccatggccaagttgatccagaaatagtccttgagttttatgccaatgcttggccaacagaagagggcgtgcgtgaca

SEQ ID NO: 117120 - DNA, 430 bp, Glycine max
  unsure (1)..(430): unsure at all n locations
tgagatgaggaagtgttgaagggtgaaactctctgcttttattgttgaccacanagtggtacctggagatatgtcacgggggtcaggataccttgtggacgttatgtgtggtgctattgcccaaaaccaagcttgaccaatcccgacccaacccgggcatattctgtcagtgagaacctgtgatgtacctaagcaagcgagctcctggcagtcaacagataaaaggaaaacaataccacatagcaaggaggcttgtggtggctggccagctgtgaattctgtgtaatatgtgagatatggcctctggtaatcgattaccaagggtgggtaatcgattacaaggcttaaaaatgaagacaggaggctaagatggtctctggtaatcgattaccacggggtgtaatcgattaccatgcttgaaaacgacgtc

SEQ ID NO: 117121 - DNA, 193 bp, Glycine max
gctttctaataggtgggatgttccatatttactttacttgactaaattgcatactgaaaaaacaaaatctaaaaagcctgttaagtttaaggatgtacctttgggataccataaacctacattggtggtgcctctgagatacttaatgctcctcttaattgcagttaattatattccttagcgttgaactagt

SEQ ID NO: 117122 - DNA, 430 bp, Glycine max
  unsure (1)..(430): unsure at all n locations
tgatgattcaacttttctcctgtggcgacaacaagtctaaccagttatcaagtcccattgacttcagcaattcgtcacaaatccacagattccgctctgatttctctctaaagatgattgtgagctggcattgagaatccagcttatgaaagttggagcaacaggatctagtgctcctcacatcgcttcaatcgactctctctacgtcgattttatcgcaagttctatgatgcacccactcctatgaggtttggaacgcattcacgattatttccacaagcaaacaatagccacagcttgtcaacttcgcactcagcttcgtgctacgacacttgcaggcaaatcaatacatgaatntgtcatagattcaagcaatttctgattttcttgcttccattggaagctcaattatgcttcaagagcatattga

SEQ ID NO: 117123 - DNA, 407 bp, Glycine max
  unsure (1)..(407): unsure at all n locations
caagagaccgcaccctatcctttagatttcaacaaggacatgtnnngaacaagatgactgatgtacttatagttgtataaatatcccatcattacattgtctgtgttacttctggacaactattaggatgtccatcgccattttcgtgtgggtctacttcgaccactttcttaattaaccgtgcttttgatgaaaagtaattggagttgtagtgatcataaccattgctttaagcgcaaacaaggtatgcccaaagcatgtctctaccaaaatgcaaaacataaattgaaatatgaaaccaaatatttattatgcattaactccctaaattcttattccctcattaaacctatttcctttttcttgtaaaagtcatttaatcacgtgtgtacttacaacgcaatttt

SEQ ID NO: 117124 - DNA, 351 bp, Glycine max
  unsure (1)..(351): unsure at all n locations
ctggatgcattggttaacttggtaacctanctgaccttgaaccagaaatctgtacctgttgcaagggtctgtagtttgtgctcctctgctgaccaccatacagacctttgcccttccatgcagcaactnggagaaattgagaagccccaagcttatgctgcanattattacaatagacctcctcaacctcagtagcaaaatcaaccacagtagaacaattatgacctctctagaaacagatacaaccctggatggaggaatcaccctaatctcagatggtctagccctcagcaacaacaacagcagcctgctccctccttccaaaatgttgctggcccaagcagaccatac

SEQ ID NO: 117125 - DNA, 436 bp, Glycine max
  unsure (1)..(436): unsure at all n locations
tcaccatcaagaaagtgtcttggataagaagcttanagaggaatcttcaatggaggaagagaatgagagagagaaaaaaaaagtggggtgggaataaaggaaagatagggagagaagttgaactttgaagtgagtctcgcaagactctcattcatcaaaggtataacaagtgttacacatgtttctatttatagcctaacacacgggaaacttccttgagaagcagggaaggtagcttacttgggaagctagaggaagaaagcttccttgagaagctagaggggtggctactcacactcctctaatagctaagctcacccctatgccaaaaatacaatgaaggaaggtagcttccttgggaagcaaggaagaaagcttccttgagaagctagaggggggctactcacacccctccaatagctaagctcacccccat

SEQ ID NO: 117126 - DNA, 84 bp, Glycine max
aacccaaccacgcgcttatttcatatgataaaaaccgggaacgcctccacttatttccccgcatggtcaaggaacatgacaagc

SEQ ID NO: 117127 - DNA, 165 bp, Glycine max
catcatttgtcttgactatgcatgtgtctctattgaacgagacactataatctatcccaatattgatttatgggtcacaacataattatatgtgagttcttcaagacataagacattatctattgttggtagaaaggggttaccaattttacatatgttgataat

SEQ ID NO: 117128 - DNA, 433 bp, Glycine max
  unsure (1)..(433): unsure at all n locations
tgtactcatgtgcttcattaataacacaagtgttctggtggtcacatatatgagcctcatgtttttaaacttcttcaacatgtatgctctgatatttgcacatgcatgctctgattgacacatattctctaatacatgcacaaggtaatgaactcactaatagtgtcatatatctcaacataatctgcgtatacatatngataacatatatgctctgattatgtctgtgaaagcatatatcttaacaagtttgttagatatcaaagttacattcttccgatacacaaaccaagagtaagtggtgtgcaacaatacactctaaacacttatggtaccttgatctttatctattcatcttaacttttttggtataaaaaattatattggttgtcatcatcaaaaaaagggagatttgtaagtctggttgcattca

SEQ ID NO: 117129 - DNA, 406 bp, Glycine max
  unsure (1)..(406): unsure at all n locations
ttaagcaccgcggctgcagctgacaactcttatgagacatcctattaggggctatggatataggtccaacaccacgtaccaagtctatggaaaactctatctctctctctcgggtggtagaccgaatatatcctcatggaacacttcaagaaactccctaacaatagggaggtcacacatggaaacctctgtctttatttctaggttagacaagatcatgtacacttgagcatctcctttcaaagatgttacaacttggttggcagagataaacatcatattcttactcactccaggaccatcaaacaccacagttntatcanaacacgttaacaagacatggtttgaagataaccactccataccaagaataacatcaatctggctcanaggccaacaaatcata

SEQ ID NO: 117130 - DNA, 327 bp, Glycine max
  unsure (1)..(327): unsure at all n locations
cgcctttaatggaagtcaagagcatgatattgcgccgataccgttgnatggggagcgggttcaacacctgaatactgtatttgggaagaccccaagaaggattatagttagagttgcatatggaagaagaggtccattttctttgatcttccgtattggtctgatcttgaagttagacattgtatngatgttatgcacgtggagaaaaacgtttgtgacaatgtgattgggacgctccttaacattcaaggcaagacgaaggatggcttgaatacctgtcaagatctacctgatatgggcatacgatcacagttgcatccaaggtct

SEQ ID NO: 117131 - DNA, 387 bp, Glycine max
  unsure (1)..(387): unsure at all n locations
ctcgtacccngatccttaagtcaccgcggctgcagcttggattgtgggactgttttatatatatagggacaacatgacngatntaaaatgagtacccgaatgcaattctatgcctatgaacccaagcttttaatttcaatgcaaagaagcatgacttatgcgtaggaatctaaattttggtttttgaatgtaaaaaggcatgaatattatgacatgtttgagaggtttttattagaatttaaatttggctgccccatgaggaataacttacacctagatagcatggaaaatacctttcaacggtatgtatagatgtgaatataggtagcgcggaaatgccttacaaagtgtgtgaatatatggcataaaaataccttgcaaagtgtg

SEQ ID NO: 117132 - DNA, 430 bp, Glycine max
cttgaaggtgcgcagcccaccatttctttcatagtagaacaccggtcatgtgtctactatcattgtgataatctctttctctgttttgggggtgctacttgagttgccaagtctctccaccttttgggccgtgtttttgaatgatccgtccccctttttgcacatgttctgtagttgcatcctatccggaaccatatcaaaattgtagtgatactgcctaacaaaggcaaccattaggtccttccaagaatggactcgggaaggttccaagttagtgtaccaggtaacagctaccccagtaagactttcttggaaggaatgtatcagcaattcctcatcttttgcgtattcccccatcttctgacaatacatctttagatggttcttgagacaagtagtccccttgtacttgtcaaagtccagcactttg

SEQ ID NO: 117133 - DNA, 309 bp, Glycine max
  unsure (1)..(309): unsure at all n locations
agctnntcatagttaatttctagcgtctttatatattatgcgcctgaatcggaccttcgagttaaaagttatgaccatttgaatttctcgagagcttccgttgttcaatcttgagggtctcgatatatgatgcgcctgaatcggacctgcgagtaaaaagttatgaccatttgatattcctaagagctttctgagtttaattttgagtgtctcgatatattatgcgcctgaatccgacctccgagttaaaaggtatgaccatttgaattcctgagagcttccgttgttcatttcgagcggtttatatgt

SEQ ID NO: 117134 - DNA, 432 bp, Glycine max
tatgcgcatatttccttacgaacgttcacttgcacaagacattctttttaactaagaaaaatgcacccatatacaatcaaggcagcttcgtcacctagattatatacctgtacttccaaggggtatttgttacttacatcacacacatctccttggctaaatttacatacatgcatactcaaagcattttggggtaccaaaaattgcacatgtgcacatcttggtatttctaatacctatacatacacaaacttcatgatgaatcttgactatctacacaataaggtgctacatttcatgcccttttcatgtttttgctacctaaagccgcatgcaaattcaagtatattttcctttgctgactaaaattgtattcaaattaaaaggtatatatatattttttttgtaatgtattttctttacataacatgc

SEQ ID NO: 117135 - DNA, 196 bp, Glycine max
acttaagcacgcgctgcactaactaacggctgctacttttacagacaatgaaggttaggacatgaaaacgaggccattgggggcaatgtccgccgctattattaatggtaagaaaaacctccacaggcgggggtgccgatcaaaacccttatatatttgggaaaaataacagtattcatggatggttgaactatat

SEQ ID NO: 117136 - DNA, 431 bp, Glycine max
  unsure (1)..(431): unsure at all n locations
ngctaacccatggaagctcctaatatctgccacactctttgtggtgggccattcctggatggccttgattttcttagggtccacttggaccccatttctaccaactactaaccctaagaaaactatattatctacacaaaaggtacacttctctatatttgcatagagggtgtttttcctaaggactgaaagaactagcctgagatgtcctaagtgatcatctaagctccaactgtacactaaaatatcatcaaaataaaaaactacaaatctacctattaaataccttaagacattatccataagcctcataaaggtgcttggtgcattagtgagcccaaaaagcatcactagccattcatacaaaccaaacttggtcttgaaagcgaatttccactcatcaccctttttcatcctgatttggtgataac

SEQ ID NO: 117137 - DNA, 427 bp, Glycine max
  unsure (1)..(427): unsure at all n locations
ngatggtacactaagcctcacatcacatgctaagcgcatattccagaannatttgtcttgcaaaaagtgctatgcgcagcctgctgtgctaagccccagatgctcactggactttacaacttcaagttgggcttaacgtgaggctagcctaagcgcttgggtttctaaactcaaacgtcatgtgggtacgctaatcgcaactgtgcgctaagcgtgccatacaaatttcagtttttaaaaaaaccaaaggctgaggcacttggttgttaccccaaatacctttagcttctgcctttgttaactttgagcaagtgtgtatttctattgcatgtgtgtcctgctgcgtgtctacatcttctttgcttcatttcaatcacaatccaagtaagtgggtacatttccatttttatttttcatccttcaaacc

SEQ ID NO: 117138 - DNA, 389 bp, Glycine max
  unsure (1)..(389): unsure at all n locations
agcttgtggaggagcatattattaaggatccccttataggtgagctacccctagttctagatccagaggcagatgtattgaggatccccttatagttgatccttatagttgagctacccctagttctagatccagaggcagatgtattgaggatccccttatagttgagctacccctatttagaatctntaatgacatgtcttgtaatattgtccgttgtttgaaggggattttttttttttaatcaatgtacgcactttctctcatgaaaattcccaatttacaacagtttgtggtatatcccaaagtgcaccacttatatgcttcattgaaaagtcaggatttgtcaacctgacttctaaatggtggtnntttttattatttaaaat

SEQ ID NO: 117139 - DNA, 426 bp, Glycine max
  unsure (1)..(426): unsure at all n locations
ntagtagacactgattgatcctttacttccatatgcataagtgttgtacctcaacataattgctttagaagtaatataataaccaagactagaactatgtaatgagacataataaccaatgatacaaaaatcagaaatttcactatacaattatctacaaattgtgacatttttggcaaaaaagatttttataaataagacaaacataatagattcgcaacttgctaaataacaaatgatcctaggacttgattttatcacacatgataatagatcaattactattgcaaaagataatttattaatctctacaaactcacaaatatcaccaataataaatgaactcacattagagttatgaacaaagcgcggtgatacccctaccaaccctacacctacccttcaattccaatgtccttgtgacat

SEQ ID NO: 117140 - DNA, 381 bp, Glycine max
atatttttattattgagaggaggcacagctacttactagttgacttaacatatacggggattcacggtgaatatctgacgaccttcctcaccttgcacaaataatgtttaaggctccggctggaataaataagcttacgcttgctgaccatgtctagtttcgtcatcttatggtcagttcaattcggtaaagatgcttgtatattcaagggtgtctcttccaacttaatactcgctttggaataagagcatgctcggaactattgtttaagataatgctcggtctactaaatctctctttcaaagctggaaaaaataagcaagtattgttacaaactctcaaaatcgggttcttacgacaggaacatatgacacttatgct

SEQ ID NO: 117141 - DNA, 377 bp, Glycine max
gacagcagcgagacatggtgcccataccgccattcgtactggcgggacatgctgactatgagagatgagcatctcgccagtccttcctgcgagacaccaacccatgccgccattggtactggcggaacatgccaacgtggacagtcccgccattggctcctgcggaacacgttgaagcatgtgaacgttaggcttgcagtgatatgaagatggcagtctgaagatgggtaagcttgcagtgtttagggtttgcagttctgaaaaggctagtattgcatgtgaacgttaaataattgaacgttggggttaagtttcagcttaaaaaaatgcttgaccttgatgctacactacatttctcttatgagtctcttctgctc

SEQ ID NO: 117142 - DNA, 92 bp, Glycine max
agcttgagcatattatatagagaccccaaattttcgcgtttttatcacaattgacgtaacataccggctgctggcgctttacgaccattaat

SEQ ID NO: 117143 - DNA, 188 bp, Glycine max
gatcgatgaatatatctgaacgtcactgggagccacggtaatttttctcattcctgtatggtcgacgacttaaatgcctagccactagacgaacttggtctttcttcatgagacataagaagcttattgtcttgtaacctttaaatgacagatattggtgaagcaagctatgtgataaggatataaaa

SEQ ID NO: 117144 - DNA, 347 bp, Glycine max
tcttgcgtagccgctcttggtgctcataaaatcccaaaaacaaatccctcttattactagctcattagaaatctttagttcctgaatatacaaccttcaaattgttgctcgttcccctctttcttttttgcaaaaaggaaaatcaaatgctgtcaaaacatggatgaagtcctaagaaaatcaatatcaaagaaaacatggatgaaatcacaattaaaaagcacaactacctatctttcagagtcctttggttaatttgtcttgtctccttatgtggaggggttttgtttaataatcttatacttttgccttccaaaaaaaacttatcactaatcctcttttcatta

SEQ ID NO: 117145 - DNA, 308 bp, Glycine max
ttaactcctagaaaccctgaagatcgaaagactgagtaataagagatattccttatgaagatgatcttatattctcattgtgcaacttccaacaatcttgtgatttgttaaagccacaatggcttggaggaaaaaaatttaagtttattcagttcgggtaagtagagccaaaaggcattgaagaaactttgaactttgataaattaggaaatgatgtagttcatgtggacttgtggccttggatttttcacaagaagtctttgctttcaagtcatgggcggatggaaagaaaaaatattgagacccct

SEQ ID NO: 117146 - DNA, 341 bp, Glycine max
ttgcagatttggtcttcgccagtgaaaggatcaatgtgggtccttttttagcaaatttgatcatcctactaggacgactgagaaaactggggcaaatgaaaagggtgacgatgaaggagaaacccatgctgtgactgccattcctgtacggccaagtttcccaccaacccaacaatgtcattactcaacccttctccttacctaccgcccatttatccacaaaggccatccctaaatcaaccacaaagtctgtctaccgcacttccaatgacgaacaccacctttagcacaaaccaaaaacaccaaccaagaaatgaattttgcagcgagaaagtctgtag

SEQ ID NO: 117147 - DNA, 347 bp, Glycine max
aactcaagcttgcatcactaccggaggaaccccacgaaaccaacaattcttaatattgttagtccccaccagaaagcatagccgcggaagacaagcacccaaccgaaaggaacatcctatccaccctgtatgaaggcaagcaaagagttgctcaaccttcaattactactctaaataaggcctctacattggccttcccatggaaatatgggagggtaacgttaacccatggaggccttctttccctttctctcccatgggaatgaggcttacgaagcgacctatgtcttcctctataataagcactaaaaaccttcacttaggcccttgcaaaagtcatgactact

SEQ ID NO: 117148 - DNA, 343 bp, Glycine max
tccctaaggacgaagaaatgttgctactacgcaaggtgttggacatgtttttcacaacaaagcatgttaagtgttacataggtaaaattagggccacagaaattaacctaaactatagtaaaaagggaaataaaatcataaaataaagaaatatttttcattcattcattgattttcctaaaagaagaatacatttatatagacctaattgatgctaatcaatgaatattgtctatccatatgtcaacatctcattatttaaaataaaataatgtcacaaatatcaattttactgcatatattttgagaaatcactttttaggattgatatatgttattctcc

SEQ ID NO: 117149 - DNA, 436 bp, Glycine max
gagacacctgaggcatgcgacgctgccgctggattgacgtgaatatcgagttctccttgtcatatgaaagacaaattccttgggataaaagtaatgttgccgtgattgtaaaaccccgactaaggcatacaactccttatcataagttgaatagttaagggtaagaccacttaacttttcactaatataaacaattggatggccttcttacatcaacacagccccaatcccaacatttgaagcatcacactcgatttcaaaagatttttgaaagttgcaacgcaagtatgggggcattagttagcttttgcttaagaacattgaaagcttcttcttgtttctcttcccatttgaaaccaacatttttcttgagcacttcattgagaggtgctaccaatggtgctaaaaacttcacaaatcgtctataaaaacttgc

SEQ ID NO: 117150 - DNA, 355 bp, Glycine max
  unsure (1)..(355): unsure at all n locations
ataatactcaagcttcgcctatctgggctaagctcatttcgttcgggcagtcattgcgctaatcgagcctagcttgctaagccacgtacttagtgaaattttctaaaattcatggtgccgctaagcacaaccctgctgagcttaatgcacatctattgcagcaatcattaggcttagcgggcagacgctcactaagccgattatgcaaaagcagaattttctgcaatatctgctaagcagccccccatgtcgtcaagcagtagtgtttattttgtgaaggcgagctaagcggaccatgtctcgctaagccgctagtgttnttctcagtcttatttttctgtttttcgatttgaat

SEQ ID NO: 117151 - DNA, 337 bp, Glycine max
tccaaagatgtgaccgatgtgggtcacactgcacaatccgatgatattgcttacttttgcccaaaagagagtcaatacctggcgggatcatactttctctcacttggccttggaggagcatacctccgtgggactgccttgcttgtcttatagaggaaggggacaggtttactacctgacaacatcatacggccctagtgtctttcgggaacagcacccctggtgaaatgtatcaccaaatgcttacgcttcttgtgactcttcttgttctgtgactgcatgcagacatgtcactcatactcgctctcagtgctgacctcgagctggcccatgatca

SEQ ID NO: 117152 - DNA, 353 bp, Glycine max
ctatgaaactcagcttcacaatctgagcctaactcccacaattcaagcaattagtcccatttatcacataagcacattatcacatcactaacatatccagctttaatctaatcacttagaacttaattgaaagcatgcaaatcatagataatcaatagggagagattcagccagaggcaattggaatcaataacaatgatttatgccatagaattctaaaccctcgattggtgcagattgcgttaccaaaatcaaaaatgaaagtcagaaactggaaggggttttgcactcgagattgtggaggtgaggtcgttgctattctctacatacaagaacaaaatttgttgatttga

SEQ ID NO: 117153 - DNA, 455 bp, Glycine max
  unsure (1)..(455): unsure at all n locations
gacctgcggcatgcaagcttcctcactttgtgctgctgactctcactttttatnttcgctntcgcacacgtggcactaaaactccctcaccactggcactacaacgtttcctagtgcctctaccgtctcatgtcgtcattggctctcgcacctccattctctttctcttcacctatcttccacataacactccagcattcgtcactcgtgatgcaacgccaaacttcctcactgttgtcgcactgttgtgtcgccgctagacctcgtgattcctcactcaacctcatattctcagcacctcaccaacgtcgttagagataatccttgttggacctcagggtttattttctagttatgttatgctttaatgactacaaatactaacaatttgaaactntgaatatactatttcatatggaatgtgtgccaataagagaaatctatgttttgtttat

SEQ ID NO: 117154 - DNA, 338 bp, Glycine max
tgcccagagaaggagtccacggaggaaatgcttaccacctcaaaagactggaaagcagtttctaatgactcctttgcggcctccacataaagcataaaagatgggcagctcaccaagatgtcttcctcacctgacacgatgaccaaatgcccctccactacgaatttcaacttttggtggagtgtaaaaggcacaactcccactgagtggatccacgggcgccccaacagacagctgtagggggggttaatatccattatttggaaggtgacttgataggcgtgagggccaatttgtactgggagatcgatctctcccctaacctctcggcgagtgcc

SEQ ID NO: 117155 - DNA, 445 bp, Glycine max
agcttaaggagacactaaatcaattcatgcatttatccatgtctaactataggagcacaaagtcatccatcaagaacctggagatacaagtgggacaattatccaaacaaatggcagaaagacccattagcagctttggagccaacactgagataaatcccaaagaggagtgcaagggtaatttcactatgacggaaaatactgagaagaaaaagaaaatcgaggaggatgtgcgtgatgaggaaggagaaaagaaagaagagggagaaaaagataagagtaaggagaatggtgatgaggtctcaaccactaagaccaagacccaaagccagttagcttgggaggccagaagagagataccagcaacctcattaaaggatgcaccataccctctagtgccatcaaagaaggacacgaaatgctacttcaagctgttccttgacat

SEQ ID NO: 117156 - DNA, 317 bp, Glycine max
tactgaacaatactgtgtaactgcgactaactttctgtttaacttggtggccgccaacaaccgtgcacacacttgcggttaagacaaaccaccttcaactctttgtttgctttcttgttggtcaactgataacggatatttaattcaatcttcgatctcatacccaccttaggtgtttcaaggagaaacgcctcctcattggttggtccattttatcaaagccttagtaagtatcgcaggctctattcataatctttagggtttggaaaatttaaatttctaacgactagaatcaacccccctctttttgtgtaata

SEQ ID NO: 117157 - DNA, 400 bp, Glycine max
  unsure (1)..(400): unsure at all n locations
actcttagcaaccaatgagatttggcaagtcctcatcatgttgattatgccaccactttcaacaactccatccgtcccaacaaacaccatgtcaacctcatccatggtatacgccaccgcagagtctataacaagcttcaccggaacatcaagcttggccagctcatttgacaacctcaaacccgttcgatccggtctcccctctacaaattaagaccaaaccatcaatttcatccttaaaaggattcctctctttcctaaatagtgccaagaaaaacaagttaagtaattctagaaagattagaaatcacactaagcacgcattcaaatataaaaatatccttcanactcgtctctcaacttgattgaagcacatcaattaagggactgaagtaatgaa

SEQ ID NO: 117158 - DNA, 348 bp, Glycine max
tattggagatgtaacatcaatgtacatttctcatgaaaatatgggtgactctatatccatctttttggctgttttcggtagaaactagaaaatctttcatacccattaaacgtgaagttcattttcaatggtggggaaatgaacacataatggctgtgctgcctgtgcattaaatttgaaaataaccattatatcccccaaggcagaattcacaccataaaaataccctcgaagtgcatcaaatcatattcaaaatagaggaatgaaatggtgtaacaaaccatagtggcttcctgggtactattccatctttcaaatgtccacagaaacccaactcaagcaagcttc

SEQ ID NO: 117159 - DNA, 358 bp, Glycine max
gatgataacaatgatgacaacaaaagatgatgacataggtgatgaacccaaagctctaaagatcaaagaacaactcaagtgaatccaagaacatctccagtgaatcaagaacaagtcaagagttccagactcaagaagaaagcctacaaacaagaatcaagactcaagatctcaagaatcaagatcaagattcaagacttcagattcaagaataaagaaaggactcaatccagataagtattaaaaacgttttcaaaactttgaatagcacatgagtttttgacaaaatctttacaaaagagtttttactctctggtgatcgaatgagtttgaaaaagtatttcaacttgaattacca

SEQ ID NO: 117160 - DNA, 345 bp, Glycine max
tttatgaaaggatatgactcttcacaattgattgtaaatatcaacgtttagatacactggtaatggattgccaatatcttgtaatcaattacactattttgaaatcaattgaaacgttgcaaattcaattgaaagcttttgaaatgaaactttgccactgataatcaattacaggaaactggtaatcgattaccagagagtaaaaactctggtaactcagaaaattttgagaaaaactcttttgaaaaacaaaactgtgctatgtttgttttttgaaaaatcttttcaatacttcccttgggaagtcttcttgatttcttcttttgaatcttgaattcatcttct

SEQ ID NO: 117161 - DNA, 358 bp, Glycine max
tatccacaactcaagctttgtgtcttttgttcttgaatttataatacaaggatcctccttcatctgttttttcgtctctacccattctcattcctttgcatggttacttctttatgtttaaagcggcagatctgatgacctgtcccttgaagggactaatacctgggacccacctatcaacatcgaacctggaaccaatccaactgaagaagaagagaacgaagatgtgggacttcccccggagttaaaaaggatagtcgcccctgaaggccaataaatggggccctattaggaagaaacagagctagtaacttgggaactggcagtggaaaaagggaagtaaagattggcaccggta

SEQ ID NO: 117162 - DNA, 221 bp, Glycine max
aactcaactccacatgaccggcaagatactctgctcaacacattgtattatgtacaaaccctaaccaacattacggctcgtcatatttagctcccaaccccctttttgaacttgtacgcttattgatgctaatcgcgataactggacgtaaattcaaagatctttaagacgctgcagtaagacaaatgctttattttacatactaagccttgacaagcatt

SEQ ID NO: 117163 - DNA, 445 bp, Glycine max
  unsure (1)..(445): unsure at all n locations
gctttcaacaatttactcaattcatgtatatctcccaacatcaatcatcagggttagaagcacatgcatatggtttgcatcatgatgaacaattntatgttccacagtcttatgttccgtagccttcccccaccacgtatccattcttggatttcactcctctgtcgtatgatcctaactcaataactcctaatgcccttccacccttccatgcaaactcggacccatcacctaacgtgttttccccattgcccatctttccgattggatgtccttcccaaatatatcaggaaagggcatgagatttggctgtagacttgaaccgtctgtatcctgatgaggatgattnttgtcgtaattatcgtagtatatttatntgcatttgtatacacttgtttttatcgcccacttgcaaaacatataatatcatgagcttcttcttttg

SEQ ID NO: 117164 - DNA, 341 bp, Glycine max
ttggaaaatgatttctatacaaaaattagttgtataaagcgactaacagtcgacaagggtgttgccctcgctcctacgtatcctcgggtgcgatgaggaaatcagacctacgtagttctttaagtttgaaattttgttggttaaattgtttttatcttttttgaaagattgattttaaccgagcaaaagtcgtttaaggtgttggacctcaaaatgatcttttgatttttgaaaagaggagagagtcgttaaggcattggaccttgaaatgacatcttggtttttgaaaggagagaattgttaaggcattggaccttgaaacgacctcttgatttttcttg

SEQ ID NO: 117165 - DNA, 448 bp, Glycine max
  unsure (1)..(448): unsure at all n locations
agcttaacacctagaacccagtttctccatctttctatcctgtcaatgctgggcaaagggcattnggggcacgccctgttcaaatcataatagttggtgcacattcaccatttgccgttggccttttttactgtgatgatgctggcaagccacgtggagtatctgacttctctgatgatgttggcatggaaaagtatgtccactccttctttgacaactttgtgtcgatcttctcccatcttccttttctgttggatattgatttagcctgtggacaaatggccagcttgtggcatataatgtcggggtggattcccgacatgtccgctggttgaggagtaaattggtatgtgctcatggttggtgaagtccttgctaagacgtatgcactgctccagtctggatttgtgttgaaacttgacgagctctctaattggcgttggccttt

SEQ ID NO: 117166 - DNA, 328 bp, Glycine max
tagcacctgaaacctggacggtccattggactaatcggtcattgcttgttcttttagcttgcctctttgggacacgcctcgttcatattaattgtacacagtgcacattcaccatttttcgttggcctttattaacataaccatgttggtgaaccacgtggaatatcttacttctctaataaaagtaacattgaagagtttgtccacttcatttttgacaggtttgcatcgttattcatccatctttcttttttactgtgatattggtttggcctggggaccgatggcaaagtagtggaacattatgctgggatggattcctggcatg

SEQ ID NO: 117167 - DNA, 399 bp, Glycine max
tgcagcattagcacaactctgacctgggtcccgatcgaactcacctgcaaaacatgaataaacgggaaagcgagtcctataaagaatatgctcagcgctggagggacctggcatctaaagtagcccctcccatggtcgatagggaaatggttactatgatggtggataccttgcctgtattttactatgagaaattagtgggctacatgccttccagcttcgtggacttggtcttctccggagaaaggatcgatgtgggtttgaagacgggaaagtttgattgcgtctcccccatatgtgctagcagtacgaggactgaaatagctgggtgtcgcaacctacccttcggcgggagggcgacacgagactcgcgggatgcgttgtccacgaaaagaatac

SEQ ID NO: 117168 - DNA, 342 bp, Glycine max
tttacatgcatgttcacaccatatttactatacttcgatcaactgattctatctatttgattgaaaagataatttatattactcttctaatgtagtcgaccacaaaaaaaaaatataacggaaagtaatgcttaggccaatctaatcaagtcattttgaatctcggcattactatcatgcatctcaaagagaaggagaatcaagcatcgtaatgcatagcacaacaaaacattaaaagaaaacatgccttccaaagccaaccaaggttaaaatgtattcatatttggtgaactttttcaaaataataacacatatatataaacatggtggaacaatctgacc

SEQ ID NO: 117169 - DNA, 361 bp, Glycine max
gatgatggcgtagagctcataagtcaagatcacttcctgattaccaacatgatgaccttccagaatgatttcaagattgagtcaagaacacttcaaggatcaaaaggaaatgtgatttctagaatcaagaatcaagttttcagaatcaagaataatccaggtgaagattcacgaatcaagaaaagactcaatcaagataagtactaaaaagtttttcaaaatattgagtagcacatgaatttttcacaaaacctattaccaaagagtttttactctctggtaatcgaataccaggttattgtaatcgattaccagtagcagaatgggtttcaaaaagctctcaactgaatatacaacgttc

SEQ ID NO: 117170 - DNA, 339 bp, Glycine max
ttggatgtggtgcttgctgccatcacctttgctttctttttctttggacaacaaggaacaagactaagtatgacagctcccagattaatttccggtctgtcacctctgctatttttgctagaggtcatctttctggtcacttgtcttctgatactatgacaaactcactgtcagattttggtatcatttatagctttggtatcagttcgcaccctagaaaaaagagagtccattatacagggtttgtggaaacaaccgactgctctttgtattaagtgtaaaacagacggcgcaacaagacgattcccaggtatggctgccagcagcggtatttatata

SEQ ID NO: 117171 - DNA, 355 bp, Glycine max
  unsure (1)..(355): unsure at all n locations
agcttgccataggtttaaantattctctgtcctactagtncgaacaagagccgaaggaaatatgtgggccatcactcgatgagtacaacagaaaagctagacctagtagcaactcatgagcaaaagctagaggacgagtacaccaaggtcttagtcttgcaagcataataggaagcaagggaaagggtgatcgattcattgtccagagaatcaatgatgtggatggacagattcgcatttactatgaatgggagtcaagatcttccctgactgctagccaaagccaaggcattggtagatgtgtactcggcccccgaggaaatccacgggctcctcaattattgcgaacacatga

SEQ ID NO: 117172 - DNA, 330 bp, Glycine max
tatttgaatctagtaacattaagaaggataaatttttaattatgtctttacacgttcataattaattcaacccccctttttaattattccgagaccacttgatccaacaccaaagatatttcctaacatacccctttcctcatctatcaggcattgtttcatttatggttggttcaaagttaaccagcaaaacatttttggttgactcttaagctgacaaattgcataatatataggccaagtataggttattaccagcgcgggctgtagatgcccatttgaataaactgaaagacacagcaaattagttagcaaactagaatatataga

SEQ ID NO: 117173 - DNA, 275 bp, Glycine max
ctcgtgcaaagttgtttcaagattggtctttggccagtgcgtacaaaagatattcatgacccggctgattaatatgagagacttcacacctatatgatatgaagagacttttggcgtactggctaattgctgatctcttaaatgaggcacgctaccccatgatgtcactccaatatcaatgatatatagcctggaaattgtgggtttctgcttaaaacaatacaatattgaaagtttatttcttcttatctcgggtctattaagatcccataaac

SEQ ID NO: 117174 - DNA, 337 bp, Glycine max
tgttgaaatcgccatgtttggatgtgttaaacgtacccattctgttttaaggtttttgggatgaagtttatatgctgaaattgcttatggaaaactgttatagatgaatggtagaattaacctaaggttagaaagtgaaaatgtggtgttatgagtggaaaaagaatgaatttttgagggctggaaagccaaatctggatttggtagtatttagaggttagagcgagttaatcttagcttgaaatgccatttaggacttatgagaaaggttaggctgtgatagagggaaaaacaaatgaccaaagtgaacaaagagccatttctagggcaaatttgg

SEQ ID NO: 117175 - DNA, 353 bp, Glycine max
acaacaacaactccatcttccaaatacagcccaagcacgaattgcgcgaatcttcttcacttgacctgttctcggagaacaacaaccaacaactaaagacggtaattgaggaggaaaaagaagacccttggagcaagacctttccttaactatgctacaccaagttggaattggaaactatttgatgcaatcaagcactacttcggggacaatttcggcgagccaccacgctcaaattgcggcgaatatatggatgctagcgaatacaatatccccacaaccaacgtggtggtgtgagtgagagtggtggtgaatctcctcctttggggacacttcctggtggtgtgaggtac

SEQ ID NO: 117176 - DNA, 449 bp, Glycine max
  unsure (1)..(449): unsure at all n locations
tgaggcatgcaagcgttgtgtaatcgattacacataggaggtattcgattattcttgntcgcnnccgaaaaatctaaagatgtaactctccaaaaaggactagactctttcaaaagggttttaagttttcctaaaagttattactcttctgaatggctttcttgaccagacatgtaaagtctatataaacaacgctctgttttgcattttaaatcaattattccaatctgaacacttttccaattcattcatacattcctttacaagccttgaatctctttgaacttcttcttcttctttgtaccacaagctttctgaagttttttggttttccaaaccttgaaaacttgtgctattcttccttttcattctcttctcgctgtgccgaaaagaattcgccaaggactaaccgcctgaatgacttttgtgctcttttctccttttccaaa

SEQ ID NO: 117177 - DNA, 329 bp, Glycine max
  unsure (1)..(329): unsure at all n locations
tcaagcttgagatgacgccgcgtagaagggtgaaacttgctgctctcattcgttgactcttttattggnacctggagatatgtcgcgggggttaagagaccttggggacgtcaggtggggtgctattgcccacaaccaagcttgaccaattccgaaccaacccggtcgtattcagtcagtgagaacctgtggagtacctaaataggcgagcttcttgcagtctacagattaatggaacaaagaccacaaagcaaggaggcttgtgtggtggctaaccagctgtgaactttgattgatatatgggatatgggctctggtaaacgattacc

SEQ ID NO: 117178 - DNA, 385 bp, Glycine max
actcaaccatttgaagttgaatgtgatgctagtggagttggcattggggctgttttgatacaaaacaaaaggcctatagcttatttctcggagaaattgggaggagccagattgaactattgcacctatgacaaagagttctatgccattgtgagagctcttgatcattggaatcattatttgcgttctaatcactttatattgcattcagatcatgagtcattgaagtatatcaatgggcagcagaagttgagtccaggcatgctaaatgggttgaatttcttcaatcttttaatttctctttcaaatacaaagatggtaagagtaatgtggtggctgatgcacttcaaggggtatgctttaattcaattcttgaactcgttac

SEQ ID NO: 117179 - DNA, 347 bp, Glycine max
  unsure (1)..(347): unsure at all n locations
tgcctaattaacctgaaattgagagaaaatgattattaaacacactttatgaaaatactaagtatttattacctatacttaatagaaaatacttataacactacaaaatatccataaattaggagagtttgatacaatttatacaagttttatacacaaaagttagtcgttttcactgactaacaacttacccattcaggtaggctccaaggtagacatcgcgttttgaactctgcatccaactctttatgtaagtntcagcctcaaacttcgattgcctagacctctgaatggattgaggctcgaggaatccatgtagaatcaaataccccggtcgcatacttgtt

SEQ ID NO: 117180 - DNA, 436 bp, Glycine max
ttagaggcgagctgacgcgtggcaagcttggataagatataacttatatatgttttacttatgcactcactcagcgcgccctatgcagctagcgtatcattgtgcacgtgctgagcgagttattactcgcgctaagcgcaccaacccctacttattggttgatgaagcatcgctaagcgagccatgtgcgctaagcccataaacctcactggaaatttatcttttggaattgggctaagcgagtcattttgctaagtgccccaatgcgctaagcgcaattccctctctggttgaaccttcatgtgaattgggcccaataggtcaacctgctaagcccaaatcccttatcggtttggaattgtgcttagcgagcccatctctctaagcgcgccccactactacatcaagaagcattttattcgctaagctggcccat

SEQ ID NO: 117181 - DNA, 329 bp, Glycine max
acttctctccctattttctatatatagggggagaagtgaagcgcaatatgtttttatctccttgcgcacatctctctgtttcgaatttgcttaggaaaattgtgtcgtgaagaaaattcaagctgaggcgcttacgtaacatttccgtaagtgatttcgctgaggttttcgaccgctcttcgacattacttattcattcttgatcgatctttagtctacaacgggttagttcctcaggccaagctcgtgaattcattctatgtaccagtggtggtccacatttggaatcatgtctttgtattctcgattcaatgacttgatataccccc

SEQ ID NO: 117182 - DNA, 354 bp, Glycine max
  unsure (1)..(354): unsure at all n locations
agctagccgccgagcttgctcatgcgagctatgttgctacctccagatttctcctgctataggcggaaaagncaggaggggcctagtgggcctgattgctgtctgtacccccctatttactaaaaacatggccttgacttatttggctgactcttgttgcatgacgcaccagagaagatataattacgtatggacgctctgtttctctcctctatggaccaaacctgacagaataatttatcgtcccttctatggctgttcggatgttaccgaactccacggggtgtgcaaaaagttttctttttactgtccgcatgtgcagaaatttcggtttgcgcacaatgctgcaattgg

SEQ ID NO: 117183 - DNA, 343 bp, Glycine max
tatgcgcatatttcctcacgaacgttcacttgcacaagacatcctatcaactaataaaaatgcacccatatacaatcaaggtagcttcattacctagattatgtacttccaaggtgtatttgttatttacatcacacacgcctccttggctgaatttacatacatgcatactcaaagcattttggggtaccaaaaactgcacatgcgctcatcttggtatttctaatacccatacatatacaaacttcacgatgaatcttgactacctacacaataaggtgctacctttcatgcttttcttcaagtttttgctacctaaagccacatgcaaattcaagcatat

SEQ ID NO: 117184 - DNA, 429 bp, Glycine max
agtcacctgaggcatgcaagctttagccaatggacgtatttttatttatttcttgatagcccctttgagcctatgttcccctttctttctttagaagctcattacaagccttaagtgaaaaaccatgatatcaccttacccttaaggaattttggagctttggaattgttttggaaataagctacgaataagtgtggggggggggggggtttttcattctactatacatatatacacttcctcctaattttactttaatttcactcattattattctatcttttctttgccctcttacactctaactctaccgttttttctttacgatatgtaatttcacatctttgcgtactccatatcctatctatctatatttcgttccacattcttttttgttaaccttttctatttttataaatctactatatt

SEQ ID NO: 117185 - DNA, 340 bp, Glycine max
tgtaataatcttacatagaagtgtgagattaagctcctaagtgcttatttctcttgcgaggagaaaatttgtaatctatgcagtcaatcacagactcattttttctataaagtccaatcgtggttggcaaaggaagaaatccagtggtgtaactggtctaacaaaggttagggttgaagtcaagtggagaattggtagttcattgaaagccagtggtttgctggtctagttatgaattggttgtgttagtgaaatctagtatttaagggtaaggattaaacttagcacaagattgaggtgaaccaatataaaatgaaatgactgtgacaacaatggaagt

SEQ ID NO: 117186 - DNA, 431 bp, Glycine max
  unsure (1)..(431): unsure at all n locations
agcttagcatgaaatgctatttgttcctactctcattaaacaggagaaagaaatatcgttcccgtgttcatactaaacgtagtgcttatcccagtaaatctttagtcaaaacgattttttntatagagaaatgttagggacattttctctcaaaagactttcttatgattgattaaaatttattaaaatgtattaattttttataggttttatttttcatttaataattttattttctgatttatattaaatgagaagtaaaattaactaaaattgattatttccaatcaattttaatcaatcatggagagtttttaagaaaaaatatagagtatccctaacattctttnttatatgcatgactattactctgctaatatgttagtaaattagtatgactcgctttttgaataacttgacttattttatta

SEQ ID NO: 117187 - DNA, 342 bp, Glycine max
atactaactatctacatgggaaatgaaggttgagcaactctttgcttgccattatacaagtgaggaaaggaaggttcctttaactacccatagcttccaagggtattcactctattggtggacttcccttggtagggaaaaaaagattcatggggatcctccagtagtgtattggaatgacttgaaaagtgcccttaggaaaaggcacatcccctcctactatgaaatgaagcttatggacaagctccaaaggcttagacaaaggagtatgattgttgaagagtataggcaacaaatggaactactccttttgaaagctaggcttagggaggaggaaagaac

SEQ ID NO: 117188 - DNA, 441 bp, Glycine max
  unsure (1)..(441): unsure at all n locations
gcttctgcngtattgcgctatagagaggggtttatgtgaagaagaatagggttcagccacttagacacttctctgtctttcgaatgtgctgaggaaaattatttccgtgaagaaaatccaagccgaggcgcttccgtaacgtttccgtgagtaattacgcgaagattctcgaccgttcttcaaagattcatagttcgttcttcggtgtcttcagtcttcaatgggtaagtacctcaaaccaagcttttcaattcattatatgtacccgtggtggtccacattttgtttcatgcatttttattctcgttttcatatactttttatacccgcttttgacgtgcttaagccatttatttaagtcatttctcgcctaatctaaaaataaaataaatttccaccgatcgtttgaattgtatcatccgttactttcgtttgaaatga

SEQ ID NO: 117189 - DNA, 109 bp, Glycine max
attttacccccgctttctgggagatcaagaatcactatatagggcatctggtcagagaaataaaaagttggggtcctatttatttgcaagggatgtacctggttgagcg

SEQ ID NO: 117190 - DNA, 336 bp, Glycine max
taaccaaacaggtcattatcctatataaactctcgcacctttctcttacaatgataagaagatattattcagttttttttctttctcttgcaaatacaatacctttattttattgaacacataagcaggtaccggagacactatcagccgaggaacttgctaagctgggtgaaccaaccaaggctaagagtgatgtaccaatcattaccccaaatgagctctctaaggctgatggttttttctttggtttcccaataatatttggaaagatggcttctcagtttaaggcttttatagatgagaccggagatctatggaaagcagaacaacttgcag

SEQ ID NO: 117191 - DNA, 412 bp, Glycine max
  unsure (1)..(412): unsure at all n locations
gcttactaactgctaacctcttaagctggttattgttgccagnaaaatagaagttggggtggaggaccgtagcaaacgctcaaatctcaacatatcatcattctcaactaggagatntagcttatctgacaatgccacaattcctattcctaggactggatgcatccggagtctgcagcagtaatacatatgtggttataatgcgagttgagagtcacttggtccttcagggagcataccacacaatataagcgtgacagaatgtgccattgtcgcagctaaaatctacaaactgccaggaatgaaagataacggagcatcatatccaaagaacactgcttgtagctgaggcactgtggcaatgatgatggccaatacaaacgcgattggttggggatgaagtatgtgctga

SEQ ID NO: 117192 - DNA, 337 bp, Glycine max
tattaacccctttttcaatacttaacatggtgaattctttttttacttgcaatcaaacttatctaaatgccagaaaagaaggaatcaaaaagggctgacttgcctcccagtatgcgctcgtttaacattattatcttgacacatagatctttcatgggtcctataagttgagaatggtgtatagcctatcaatgctttcaccttggtacgagtttagtttttgaccattaactacccatgatctgtctagagttgatgaatgaggatcaaacaattccacagccccatatggcctgacctctatgatagtaaataggcctgaccatttagattcgag

SEQ ID NO: 117193 - DNA, 430 bp, Glycine max
  unsure (1)..(430): unsure at all n locations
agctagcttctacattattatatatgattattaagtnattatctatatttttaattatatatgaaatactttaaatattattaatattaataattaaatattagtaataatggactgtttatatcaaaatggcgaatgaattaattttggtcactaaaattgtacgttctgaaagccttcttgagatggaaatctatttcggtggctactttgaaatttattttgggtaaaatagcaactaaaattgatttgatcgctaagaaaaagaattgtgttgttaactagtgagcgagacaaaattagtgttatttctgacatcattgacactattatggactataatgcagtcgatcactgagttattgataattatggctcaaaatcaatcggtagaatttccataaaacaaatttaaatatttaaatctgta

SEQ ID NO: 117194 - DNA, 331 bp, Glycine max
taagcagatagaacttgcagattgcgaaaaatatgcttcttgtgagccttgtcccatgtgctttggtgcaatccacctttctcgaattaaggttagaatggcttgctactcctatgcgtctcttttataccatgtttatcctgttttgagctaaattattgcaatattcttttctaacagacggctgaagcaacaattgctattggggtttgatgatttcattgcagatgccttgcaaggtactggattctatcagaaagtaacatgggaaattaagagagctgatggtatatcattgctgaagaggtttttgagaaaacaaaggaaaaat

SEQ ID NO: 117195 - DNA, 402 bp, Glycine max
  unsure (1)..(402): unsure at all n locations
agcttcagtctagctgcagcntgcaagcttccagacttttggaccttctcttctgagactgcttatctcgggaaagctatccctcttcccaagccagattactagaagatagaacttcattttgtgtgattaaaaaaataccatgtgcgtaccactgtttctggccagctaacttaaattaaatgtgcaagataactatttatctttaaatggtcatcgcagatattactaatttgccttcttggctcaacaagataataccttctgcaggtattcagttgaagacaagtaaaaaacaaattacgggatacaagtctggggaaacaagtctgatattcttctgacatattaatcaacctactagcatatgtgcgccatgctcgtcaaactgaacatcagcct

SEQ ID NO: 117196 - DNA, 335 bp, Glycine max
ttgaggaggctaaaatcaaggagggatccgggaatgtgaaatcttcttataatttgaggtccgatggatttaatttgaaattcatcaaagcctcttggagcttactgaaagaagatgtcaaaagaattcttaagaaggttcatgttaatggggggttccctaaaagtcgcaatgcatcattcatcaccttgatacctaagattgaggatccacaaaatctgggggattttaggtccatttcactggtaggatgtatgtataagatccttgctaaaatccttgcatgaagactaaaaggtgctttggtagtgtgattgacaaaaggcaaatcgcct

SEQ ID NO: 117197 - DNA, 433 bp, Glycine max
gctgcgctcgaagagaaagacagtcgaggtgaattatatttagagacaagttgaggcttgcaaaggtcgaagaggagcttgaccgaacagttgagtaggatggaagagaacatgtgggcaatcattgaccaatataaagagaagctaaatctagctgcccaccatgatcaaagactagagggcgagcatgcaaaagtatcggctctacaagcgaaaagggaagcaagagagagagtgataaattcattacatggagaagttatgacgtggatggataggttcgctttcactttgaatggaagtcaagagcttccaagactgttagccaaagccaaggcaatggcggacgtgtactcagctccagaggaagttcatgggcttttcgattattgtcagcatatgatctagttgatgtctcacataattaggaact

SEQ ID NO: 117198 - DNA, 340 bp, Glycine max
  unsure (1)..(340): unsure at all n locations
ntagcatggcctctgtgatagaagccatttgatcttttaaggccgataggtccgccttcatttgntcttgcactccctcttcattgtccatctttctggatcgagtgttataggggtgcctttgcgcttttttagttatggtgagttccctaaagaaacaaacaatggggagtatgccaccaaaacatgaatatgctaatgaatgatcagaacacttggatccacctcaaagcctttttagataacgtgatgagtttcagaacttctctttttatataaaaggaacaaagcttttatctagctaagatcatacaaaagtgttacaacagaacctaacggt

SEQ ID NO: 117199 - DNA, 445 bp, Glycine max
  unsure (1)..(445): unsure at all n locations
caagcttgaagtgctaccccaccattttcatattaaactctggtaatgngnctactattatggtgatcatctctttctccgtcattggaggtgccacttgagctgctaggtctctccacctttgggcgtattctttgaaagattcatgcccctttttgcacatgttctgtagttgcatcctatctggagccatatcagaattgtactaatactgcccaacgaaggcaaccattaggtctttccaagaatggactcgggaaggttccaagttagtgtaccaggtaacagctaccccagtaagactttcttggaagaaatgtatcagtagtttctcatcttttgcatatgcccccatcttctgacaatacatctttagatggttcttgggacaagtattccccttgtacttgtcaaagtccgacaccttgaacttgggaatgaccat

SEQ ID NO: 117200 - DNA, 342 bp, Glycine max
  unsure (1)..(342): unsure at all n locations
nttcgattcattctatgtacccgtagtggtccacattgggtgtcgtgcattttgattctcgttttgtttactttttataccccctgttgacgtgcttaagccattttacttaagtcatttctcgcttaacttaaaaataaaataaatttccaccgaacatttgaattgcattatccgttaacttcggttaaaatcaattccgaccgttcggtcgtgccgtaaccaccttggaaatcaaaaaagaggttaaaaaataatataataatcaaaaagacatcttttagtaaaataaagcggaacatcaatcggacgttttctctttgggatttctcattcttaatc

SEQ ID NO: 117201 - DNA, 432 bp, Glycine max
cttcagctagccgtagcttgcatgctataaacatagttggatctgtctcatctgaatcctatgtatctttggccgagagtcccaaattaaaaccccctccttcataatggcaaatatttggtagacaactataaacttccccggccacccaaattgacgcaagttttgtccatcaattttatgtacaccatcaaaactagactttaaagacagtggtagatatcaaaacatatgagttaaatatgattaacaaacctaccgattatagtttttgtttggcggctgaggaacaacgtcagaaagtgaaataccccacttgttggcttctgccttgaaccatgatatctcattctccaaagaagccacgccccccaatatgacttccatgtcaccacggcaatctgattccttccaagcttttatcagcacact

SEQ ID NO: 117202 - DNA, 347 bp, Glycine max
tctcaatgcacaacacaaaaagagggaaacattggatctccttgtctcagacctctctcatctgcaaaggggtccagtacttcgttgctccacttcaaagacatggatgtggatgtatagtacaattcatgataagtttcacaattgattcagggaagccaaactcatgcaaggttagctgcagaaacttccagtcaacacaatgataagctttttcaaaatcaattcttcaacatcatgataccagattttccttgctttttatgcatatgacgcaccactttctgagcaatgaaagcattgtgccctgttcccctccccggaataaagctgctttgacagggtcc

SEQ ID NO: 117203 - DNA, 480 bp, Glycine max
  unsure (1)..(480): unsure at all n locations
atcctcttagtcacccgcggcatgcaagcttgcatgtgaagctnttatggaggttggtatcttgagctccaatgttgttctttaatggtgatttctcaccatggagatgcagcggaagacaaaggagaagaggtaagaggcggcgccatccactatgggataagccatggaagaagaagcttcaccaccaagatgagccttggataagaagcttggagaggatgctctcatggaggaaaagaaagagggagagaaagagagaggggggagcacgaaattgaaggaagaaaaagggagagaagttgaactttgagttgtgtctcacaagactctcattcatcaaagttacaacaagtgttacacatgcttctattatagactaggtagcttccttgagaagctttcttaagagaacttccttgagaagcttctttgagaaaactttcttgagaagctagagcttagctacacacacccatc

SEQ ID NO: 117204 - DNA, 351 bp, Glycine max
tccattgttgaaaggtacattgctgaagaatgtattgagttttacaatcattacattgaaacagttaaattttttggggtttttgaaactcgtcatgattggacacgagaagataaggatacacgaggatacaatgttgtcacaatgactcaataggaggccttacaagcgcatctatatgtactaaacaacataatagaggtgtttttgtacatagagactcacaaataaaaaattgtcagtgttaatcacccaaaaatgaacatgatgagggtgttgcaagaacacaataaaaatttcatcaattggtttagagaaataatattcgttgatgacagtgcttcgaaagca

SEQ ID NO: 117205 - DNA, 430 bp, Glycine max
  unsure (1)..(430): unsure at all n locations
gagaaaaatattttcggatcttatgagtcataancaaaagagaggtgcataagaataaattaattatcacttcactttatctaaatttaaaacggaaaaggttaaagagaaagaaatatattttgtatagttgaaaagaaaggaaatatttttgtaagattatatcgtaacctagttttggtatttttattatttttttggtcggcagtaagtttagtgaaaaaagcagaagcaaatttcacaaaaaaaaaagaacgaaaaaaaaaaacagaagcaaaattggttaaaaagcttaccttgataagggtatagatggtaattcccttaaaattaaagaacaaaatatacgtaagacaaaactgaggaagtngatcatggtatattttattagtaatgaaatcatgtaactcttcttttttcttttcataaa

SEQ ID NO: 117206 - DNA, 338 bp, Glycine max
ttttgagcatctcatcatttgcaagatcaggtgaggcaagagtcctattcagcctctccctatactgcacaatctttcttttcttctccatctttgcatctcttgagaacgttgaacaagccttctctcagaaagtcaattcatgaacataggcatcaactacttgaaggatttctattcttttgctatatctaccacaacagattaaacaagattagccaatcatgtttgctaataattctcatcatgcaagattaacaaaaacacaacatagtgcatgtgtttaataggccagaacccacaaaaggtttctctctattagccaaagcaacaaaatt

SEQ ID NO: 117207 - DNA, 447 bp, Glycine max
  unsure (1)..(447): unsure at all n locations
agctttattctattatcatgtatttttgattttcatatgtaatcaaacnnagggagcttatttacgtacttaagaagaataaaatgtcaggtagtctgagattttgagtcctatcaacattatatgatagaaactccctgaatatttacttgtgactaaagttcagttatgcctgaaaaatggcatcttatatgtaaaacaatatacaacaaaatttttttcttgacatatgtcacttcaatgtctttctaagtttccttaagtttaaatgatttataaaaagacatgttttacaataacattacgatgtcattgattcatatactcatatggacagagggagtgaaacacataaaatgcgagatcataatgcatattgttagatcttctaataaattaaattcatatgcatattacaataccttataattaccacttacatttgat

SEQ ID NO: 117208 - DNA, 326 bp, Glycine max
ccacatatataccaagtcttagactacctaccaacaacatatattaaaccctaagccccacaccaaaccctaatgccacccctaagccctaaactaaaccctaacaaccaaccttaactaataccctcataaatattgaaccatagcatctaaactaaaccctacgctcaaccctaatccctaacataaaactaacctctaccccctaaaccctaaccacatacagtcagtcctaggcccttaactaaaccctagccataaaccctaatatctattttgatgcaaatatattaaacatcaaaaacaaaaatgttacctaatatata

SEQ ID NO: 117209 - DNA, 427 bp, Glycine max
  unsure (1)..(427): unsure at all n locations
agcntgtgctggaatcatgtcttatattctaatgaacattaatacagaagaaaattatggtgttgtcaacattcactttttggcccaaactagagcaaaaaaatgtctaatattttctttatagcatcaacctgcaccaagcttgcttctacaaaaagtagaaaatcatttaccaaggcaaggtgagaaattttggaccaccttcagattattgaataagcttccaaatattctgctccactacatgattagttaggtgaaataatttctcaatgtaaagaacaaatagatatggggagataagatcttctgccggactccttcgagaggaatgaatttttctaaagcttcttcattacactactctttgaaggaagggatgaaatgcacaatctaatcaaatttgaaaaacttttcagaaatccaa

SEQ ID NO: 117210 - DNA, 339 bp, Glycine max
tcttcttttggaccttgaacaagccatcaacgcctctttgataaccatgctatgtgctcgcgactggtccctttcttcccttcgcaacttgagttcattattgctaccccatagagctccgcgaaatttgttccggccatactctttcttgcgagccctcttggtctcttgttcaagggcttttgcgggaattgtattctcttcccgtaacccggcgcactccttccgaacgtgtgtagcagccaacttgaacttctccttggcgagttttgcctttcctaactcgcttttgagagcttggacttcttcgtcctcttccggagcttcaaaattctcttc

SEQ ID NO: 117211 - DNA, 274 bp, Glycine max
  unsure (1)..(274): unsure at all n locations
gcagctacaccgcactcgaatatgatgcttctgagacttcctcttattctggaattcgaagagaagtatgagaatacaaacccctcatcatctactagtgagtcaaaaagctaaccgtgtgtttatatgcagcatttctacgaagttcaaataccaaatgtttcgatgggcgtgatttgaaatcctttcattttgtaatattctgtctgaatgagacaattcactctcatgtcgtttaattctcttatttggatcaagnaattcaatttcaatg

SEQ ID NO: 117212 - DNA, 338 bp, Glycine max
tgtgcacattggacttgtcaaataacagattttatggggatattgtgtttaattttcctgccatttgtgccaatttagtcattgcgaatgtcttaggtaataaattgactggtaggattgaaagctgctttgatcaatgtgtaaagttgcagtacttggatttgagcaccaacaatctgagtggaagcatatggatgaagtttgcgaggctcaatgagttttatgttgccgagaaccatctaaatgggactattcctttggaagcttttcctttgaattgtagccttcaagaactagacctttcacaaaatggatttgttggtgaggcacctaagggg

SEQ ID NO: 117213 - DNA, 343 bp, Glycine max
tcagcttctgtgtcctatgaccataaccgctatcactcatttattggtacattagaatgatacttctttctggctccattcactaccccacaagcacccctgatgtatttcactcaaatgtatttcaggattctttccactttggcctttttttatcaaatgggcaccttaaagtttcattgttagcaacattttggccttaaagtttcattgatgatgactattcccactcctaagagcattttgaatgagattcaaaaaattcaatggagggttcacgatgttgcctaaagttcttgagaacatttggctggaattagagatgcacgaggtctggtctatg

SEQ ID NO: 117214 - DNA, 434 bp, Glycine max
  unsure (1)..(434): unsure at all n locations
agctatgcatgtatattgattctatanagatataggtccaagctccacagagttatgagagattttgttgtgtgaagatctgcagagaccacagcttgaagcaaaagtcgttctgagagcttgagatgagtttgtgagtggttatgagatcctagaggtgaaggagacatcctcaccacttgtatgtttgcaatctttcatcttgctcttctctttgttgcaaaggaggcttcctggtcatggaaagctaaaatcctttgttggatcttccttgtaggcacttgatgtaaatatctttctatctgtctaatgatgtcctggatgttctctgctatcagcttttcattctagtatgcctttaccttgatcacatagatgcctgctctgttaaggtcattcaatagtggaaactggtctgattctgatgatcgtga

SEQ ID NO: 117215 - DNA, 334 bp, Glycine max
tgccgctgagttgatgatgacttgtgccctctggcacaactctttagttcaaaaagctttgtgtagcttctgatgctattctgaatcgatcctacaataaaaattacattacaattagtaactatttttttagtgacaatgcaaaaaaaataaatcaacaaaatccaatttgcaatacctgtcaagagtagtcttcacctagtacatagtctgttagtggttgcccaagctatggttgtactttgacaggtggtaaacatacaggaccatgtgttacttgttgtaacaatagtttatggcaaaccgaaaaaattactgactgagtcacggacaa

SEQ ID NO: 117216 - DNA, 383 bp, Glycine max
  unsure (1)..(383): unsure at all n locations
agctttgagaantattaaacgacattaagttttaactcggatgtcctattaagccctgtgatatatcgagacgctcgaagttgaaaacggaagctctaagaaaagtccaaccacaataacttttaactcgaatgtccgattgagtcccggaatatatcgaaacgctcgtaatttaaaacagaagctttgagcaaattcaaacgacaaaaacttttaactcggatgtgcgattgagccctattatatattgagacgctcgaaattgaaaacggaagctctaaaaaagtcaaacgacaattaactttgactcggatgtccgattgtgtcccgtaggatattaagacgcttaacataagctctgaggtaattgaacgacaataact

SEQ ID NO: 117217 - DNA, 336 bp, Glycine max
tctgttttcaatttcgagcgtctcgatatattaaagggctccatctggcatccaagttaaaagttattgtcgttagatttttctcagagcttccgttttcaattacgagtgtctcgctatcctacgggacacaatcggacatccgagtcaaaatttattgtcgtttgaatttgctcaaagctttagttttaaattatgagcgtctcgatatattacgggactcaatcggacatccgagttaaaagttattgtcatttgacttttcatagagcttccgttttcaatttcgagcgtctcgatatcctccgggacacaatcggacatccgagtcaaatg

SEQ ID NO: 117218 - DNA, 342 bp, Glycine max
tgaaagtattcttaattcatgaaaacatattaggttcatcacaatttaatgtttattcacactaagagtgcgtttgaatagagaattttaaccgaggaaagtaatttatcagagaatttaaatttctttaatctaaaattcattgtttgaatgttttttttatgaagaatttaaatttttggaattttaaaatacaattttaaacaactaaaaatgtgaaattttaatttacttctaaaatgtgagaaattgaaattctcttcttgatagaagaacctttcaaaatgtttgtgtattttctttataaccttcatcctctcttccacctcaaagttctctaaa

SEQ ID NO: 117219 - DNA, 423 bp, Glycine max
  unsure (1)..(423): unsure at all n locations
agcttaaagtatgcccgagtcattcatccctattagatgttgtcgaattatnggcgaacagaattgccattccttggattatagggttgaaccaagctcatgcttttacaaaaaggttcatcaagtcaagttgaaatatggaagtaaccgtcttgccaaattggggcaaaagatgaatcgagtcacatcactgcttcgtctactgccaaacatatttaggattattgatgtccttgttacttccagtttcaccttgacaaagatgtcatggaccatgttgaaaatctaaattgattcaaccctatatcttgcgtaaaaattcgcaatacttcgactgtacatcattcgcatgcatgcatgcttttcattggttgcattgctcattgcatttctttctctgaaaaaaaataaaataaaatgaac

SEQ ID NO: 117220 - DNA, 348 bp, Glycine max
ttgcggatttgatcttcgccagtgaaaggatcgatgtgggtccgttttagagcaaatttgatcatcctactaagatgactgaaaaaaatggggcaaatgaagagggtgagaaagaaggaaaaacccatgctgtgactgtcattcctatacggccaagtttcccaccagcccaacaatgtcattactcagccaataacaaacctccttacccaccacccaattatccacaaaggccatccctaaatcaaccacaaagcttgtctaccgcacttccaatgacgaagaccacctttagcacaaaagaaaaagggcatttgattgactgtgttttcaagtaaaaatatagac

SEQ ID NO: 117221 - DNA, 273 bp, Glycine max
  unsure (1)..(273): unsure at all n locations
aatctaatgacaataactattatctcgaattttttattcgagccctgaanatatcaagacgcctggaaatttgaaatggaagctctaaaaaacgtccaacgaaaataacaatttgctcggatgtcttattgacccctgtcaataaatcgcgacccttaaagattgaaaacgaaagctctaagaaaagtccacgacgtttactttttacttggatgtccaatagagcctcctaatatatggagactctctttattgaagacctgggcactgtta

SEQ ID NO: 117222 - DNA, 345 bp, Glycine max
tatgcgcatatttccctacgaacgttcacttgcacaagacatcctattaacttataaaaatgcacccatatacaatcaaggtagcttcattacctaaattatttacatgtactttcaaagtgtatttgttatttacatcatacaccccatcttgtcaaaatttacacacatgcatacccaaagcatttcggggtaccaaaaattgcacatgcgctcatcttggtatttctaatatctatacatatacaaacttcatgatgaatcttgactacctacgcaataaggggctacatttcatgccctctcttttttttattttattttttcaagtttttgctacctaaa

SEQ ID NO: 117223 - DNA, 347 bp, Glycine max
tcatgatgttcaaaagagactatgtcgacataaatgaagactgaacatgcatggttgttatggactttgacatgtgtttatctaattttattaattatgtgataaaatttgttgtggagggcctaatattgtacaattgattgacattgaaaatcatttttgtgatttgttaataaaatagttcatggttcgtatgataacaaagaaatggcttcatccactcaggctcagcgaacaacaccaacctctgcctctgcctctatattgatgtcttgtttgattcgttgaagttattgattgctatttagttaaatatgactttcgatcacgtatgtatgatacatcgt

SEQ ID NO: 117224 - DNA, 444 bp, Glycine max
gacctctgaggcatcgacgctgcagcttacgatggagagggtatctcattttactcaagctcaagtccccattactacacatacattcctagacctgagatagatgggggatagagcatgggctgggagaatgcactgttaatgatgagatacctaccgccctgattgatattatctttgattggcgaaacagctatccttatcatctgtacccccataatattaatcaacgatagggctacaagaagaatcacagaatgtttaggtcgtaacctatgctcaaggagaggcctgcaaatgaggagacaacccactcttcgagaaatcatgcttcaatatatgacccataatgatcaaagaatgaagtacgttgagtcctaattgaccaacataatatctctcttgtacaaagacaactaagagaccttccttaaaagactgaac

SEQ ID NO: 117225 - DNA, 381 bp, Glycine max
gtccaacacgcgcggaaactccgatgaatgagagtcttatgacacacactcccaaaatccgacctttctcctctattatgtcttaaattgagagctcgcccctatactatttatttttctccataagaatatccgctcccagctgcttatcataacgaacactcttggcggggaacccccttctttcatggcttattccctaccggatggtgtctcccatatcatgttattctctgccttccgctgccactacatgggggaggaaaaccattgaaggacctggttgactatcaaagattagggctcaatagaagctccacaagcaagcttccataaagaataacatgaacgttagaatgccaccgatgatcttgctctaaa

SEQ ID NO: 117226 - DNA, 305 bp, Glycine max
ttggcacttatcattaaggagctagccggcatatatacttaaatatgctcattctaaatattaaagcaaaaacaactttatcggttcggaggataagagagtgatttgtaaaatgataatacaaaataaacgacaatagctatgtgaataactaaatcaactatttagattagaagacattcatcagctgaaatgaacttataattaaggattgaagtaagtctaatatgacaaactaagcatatctatgttggtcataataataagaaacatggactttacatgtgttacttgctaaataaata

SEQ ID NO: 117227 - DNA, 309 bp, Glycine max
aactccgctgaaggaactacagcctggataccggaacctttttttcttataaaaacgcacctgtgccagactcaggtttatgctcctttgcgaccccacacagactttgccttttatgcgacaatctgaacaattgaacaacctgaactttgctgcaaacatctacacagaccttctcaaccttacagcaaaatcagcacaacagaatattatgaccattccatcaaaggtacaattccggtggaggaatcattccaaccttataggtcgaatcttcacacagtgcaccaacaccttatttcaaaagct

SEQ ID NO: 117228 - DNA, 268 bp, Glycine max
  unsure (1)..(268): unsure at all n locations
gtgtgtatatatgtgaaatcgaaaagctctgcaaacgcttagagcatctgacgagaatagactaagagtttagagatcatatccctttatcagacgattgagattcagtccactagcaaacaaacttcaagtctttttatttgtntagagccaatagtgacatagcgggacaaagaatattgggttgtttcaagctcggtgtaaagcgtgggttgtgaaccaaaagtgaaataatgaatactcgaaccctgtgaacatagtccaacct

SEQ ID NO: 117229 - DNA, 343 bp, Glycine max
tgaggcttgccatgtaacattctttggctagcctttggtcgacatgtttttattatgaaggctttggtgtctgaagggaacttcatggtcaagtgaggggcggaaacaattgcccccaaaacgctcaacgaaggggcgactggagtaaagatgttatatgaggtatgggtgtgtattataagaaaacgtatctttaagtctttttataatgaaccttgatggtcaaacttggtatacaaccaaatacttcctttcgtcccaaccctttctccgacacagccaaataggggtcatcgcgtgggaggaacttgaactcagtaatccccatccttttgaaggtatt

SEQ ID NO: 117230 - DNA, 389 bp, Glycine max
agcttgccgaccagctcgaccatgctagctttggtgctttcttcacaagcaacagtcttatggaggaatcttctggagggcccaagggggcctggttgctatttgcaccccctttttactaaatgcacccccttctattttgttgtaattctttctcccgaacgtgacaaaacttagcgaatttcgtaacaatacttattttccttccggaaggttacgaatccttacgaattatgtatttactcttttttagctttcgaagaagttacagaaactcactgattgcgcaaaaacacctactttcgatttccgccacattactgaatttcacggatcgcgcaagcctgctttcttttgatttctgagacgtctcgagacttcatttactg

SEQ ID NO: 117231 - DNA, 349 bp, Glycine max
ttgtcctcagatccctcttgttcggactaggactgaggatctttcaacattattggaacaacatacttaaaaccaaaacttaatctgcagatccctcttgtaagactaagtttcaattctgattcattcaagatctaacgaaacaatacatttcccaatgtttaaatcacctaactaggcacacaaatggttgatcagaccaagagcatacataatttaagcactggaggaagcattgaacacaagatacaaaatcaattacatatgaaaataattacatcgactgttcattataaatacccaacaagggtatttagccaaccattacagacgaaaccctaacaataat

SEQ ID NO: 117232 - DNA, 420 bp, Glycine max
  unsure (1)..(420): unsure at all n locations
agcttcatcttcactattggccaatgttgctgtatagctgnccctaaactagcaggtctcgtcaatttaatccttaatttctacccattcaaatcatttatgaataatgaaatgccacaattttttatgcttcatctgctatttggttatatcaatatcattaaaatggttcaacaatattctgcattatggtcaattggttttctcatcagaaacaattacttcactaaaattaaatttaacaattggagtgtcacttcatgcaaggcttntaaggtgtgcgaagacttgcatgctcagttggacaaattaattgaggtcagacttaaagactggtcttttatcagaatacgaaaaaaaaaaggtcattgatcttcatgctcaacttgcaatatgttatttcctaaccactactttccc

SEQ ID NO: 117233 - DNA, 332 bp, Glycine max
ttagttggattagtgttttagttgcctgatcatgatggacttctatggttttgtaactagtggtaggtgatcatttaatttgtaaatattttatgcttaagtaagatataagtaaatttacactggtgtatgtggttcaattagtaaaattatgctttctagcgtgtgtgagtgcatcatatcccgcaccatgggtaaggaattttttcaccatgaacggttgatttgatgcaatcaacgttatgttagcacaccagattataggaccgcaactccttgggtcgtgtaatcctttgaggccgcgaagccaagcgcatgtaacatactctcaa

SEQ ID NO: 117234 - DNA, 333 bp, Glycine max
tgttgaatagttcttctagcttataaactccatttttgaggttttatcatattcagaaaggtcggtccaattagttgggaatttggcttccttggactctttccttgcaccacttttcactcttcacactaggtcattttttgaaaactctcttggttccaactttgaattaaaccttttttccatcctttgtttgcatgcctacattgtgatcttttcctgatctcatagctcgtcgatgaggtcaagttcatctttcaaagcttccacatttcctgtgttgtcataatgcatttgttggaacaagggttctccaattcctactagaatcaa

SEQ ID NO: 117235 - DNA, 452 bp, Glycine max
  unsure (1)..(452): unsure at all n locations
agctagaaggtgtgtaacccaccattntcatattagaatactggtaatgtgtctaccatcacgattaccatctccctttccatcattgggggtgccacttgggctgccaaatccctccacctttgggtgtattctttgaaggattcatgctcctttttgcacatgttctatagttgcatcctatctagagccatatcaaaattgtgctgacactgcctaacgaaggcaaccattatgtccttccatgagtggactcgagaaggttccaagttagtgtaccaggtaacagctaccccagtaagactttcttggaaggaatgtatcagcaattcctcatcttttgcgtatggccctaccttctggcaatacatctttagatggttcttgggggcaagtagtccccttgtacttgtcaaagtccagtaccttgaacttaggaggggtgatgatat

SEQ ID NO: 117236 - DNA, 219 bp, Glycine max
ttagacttatcgaccctatagacattatatctggagccgattatattttgtgtttggactccctgccactcatgattgatgtctatgctcccattactgattccactaagctactaagtccattcttcacgccaaattctatgccttgggcactgattcgaaatccgttgcggtgttgggactacaaacctgtgcgatgcatagcctgaagctttaagc

SEQ ID NO: 117237 - DNA, 266 bp, Glycine max
aaaaaaactttctcaatgctaaaactccccccctttcgtcattcttatatcacgccgcacgtggggctcacaccatcgagctaacctgcacttatcttcctttttgaaaggataactaaccctgccctcgacctacttagggttgagcgtgccgcccaacttgaacttacttaagtgagagctaggcattgattacttatttttaaaacaaacaaaatgtaaaataaaactgcgaatacacaggataccgggctgtctcacaatga

SEQ ID NO: 117238 - DNA, 324 bp, Glycine max
tcttcacgaggtgagcttacttctgatatgggtgtgcggctcttatctttaccttctccttgaaatttatacagcgaaactttctcacaaaatcttctctaggaagctacctattctatataaccaagcatgtgtgacacttggaattactttgatgaagagactctctagaaacaccacttataaacttacttagctccctttttcttgcatgcatatccggctgcccactctgtctttacttcctatttctgttcctccattgaaacatactattcatcttcttatacgagatgatctaggtgatgaagctccttcaacgtg

SEQ ID NO: 117239 - DNA, 404 bp, Glycine max
  unsure (1)..(404): unsure at all n locations
agctggtcgacttcttctttgacagcgntacgtcgctcttcttctatcttcatatccttctgagacatacgttcggcctgcgggaagatgcatatcttgcctagaatgatccccggcatgtcagatggctgccaagcgaataaatatgtggttctgcggagcacggaggcgatgcaccgatgctcatgactaagaaagtgcctactataccgcatgcgctgccccgatttaagtatgagttgcatctatacaagctcgtcgataggttctgagcctctttcataggtatcgtcttgcgaaactatgtcaaattctctacccatgttggattcatagatggtcacggtttggatttgagacccttcgtcctctgtcatgacttgagtgccttcaactgttggggg

SEQ ID NO: 117240 - DNA, 321 bp, Glycine max
taaggagacattgaatcaattcatgcagatattcatgtccaactattggagcacagagtcatccatcaagaacctggagatacaagtgggataattagccaaacaaatggctgaaagacccactagcacctttggggccaatactgagatgaatctcaaagaggagtgcaaggtaattttcactaagaaggaaagtgctgaaaaagaaaaaaaaattgataacgatgtgcgtgaagaagaacgagaaaagaaagaagaggaccaaaaggatagaagtatgagagtggtgatgaagtctaacttattaagaccaagacccaa

SEQ ID NO: 117241 - DNA, 422 bp, Glycine max
  unsure (1)..(422): unsure at all n locations
agcacctgagctgcagctaactatccaacatacaagngagtatgctttctttttatctcttcacaaataactatcacaaagcattaaccaagcaaaactgcccatcatatctcccaaagccccatacccacgaaaatcaagtgagaaagaagtctacccaaacctgaaatttcgaggtcccacacgtagagatgcgcttcacgaactccgaaaagccttcctttcgcgatttggagcagaaatggctaccaaagggtggagccttgttggagcttcaatggtggaggaagaagaagagaatggcaacgtgagagagagagggaaaggcttatgaaattttggggctgagtgaggagagagaatacagctttctattttaaaagagaggctgtttctcttttcttattatattattttaagcc

SEQ ID NO: 117242 - DNA, 350 bp, Glycine max
tataagaacaaaattgccttaatcatttccaaatatgcatgtgaattatgacgcatcaacaagaatcaagccaaggctattgtgcaagcaatcaatggggcaaaacacaccaaatgattataatgatggatggctcaaattctcacaaaggtaaaaccatcactttcaaattgagctttcaaaactatcatgacatgtagagaagaatcaaggatttcaagtcacaaaatgtcaagaacttttattttcaaaacaattacccatttcttgaacctatcctataattcaaagaaaaacatgcaaagtcgtacgtgcacacgaaattgacccaaaatattaaactgaaaatc

SEQ ID NO: 117243 - DNA, 437 bp, Glycine max
  unsure (1)..(437): unsure at all n locations
agctntcaactaacttataagctagttntatttaacataacctatattagcaagttgccagagtgttattntggagtcggtctccttaagtaaagtctcgagtttccttagtaaaaagtaagatcttgagttcccttaaaaaagaacataaggtctcaagttcgaacctagtgaatgggaaaaggcgtagttgttggaaagagagaattccaccaaaagtgatcaaccaagttttctgaagaaaattagttattggcaaagtcaatggatattccataccaataatgtaaccaaaaaattattatactatattatattttaacccatatgatcattgacacattgctctaagaatttgttgtgtgcacatatggagaaacgatctatttagtgggagaactcatgttggattcattttggatgccaaatttcattgg

SEQ ID NO: 117244 - DNA, 350 bp, Glycine max
tactcaagcttcatcgccctgaggatgcttttatcaaaacaaatgaatgttatgttttggtggaattcttccacattattggggattcagaggtgaatcactaggaacaccgtcaaacattcttgatccttttgctatagaacaaggtgatccggcaaaaattaaaaagggatatgaagagaaatggatgttcaacatcatggtcattgatacacgtggtgcacactataagaaatgttgcattgaatgtagatgcgaccatatgaatctcccaaaggacttttataatgtcacaagggatatacataaccagccattgactacaaattacaaaggagggctctttttgt

SEQ ID NO: 117245 - DNA, 399 bp, Glycine max
  unsure (1)..(399): unsure at all n locations
agcttgatcaaaacanaatctatcattccaattcactcaattcatacgatntctcattcatttcaaacacaaacattcattccatacaaaacaaaccattgaatatcatattcaatcaattcactgttcaatcatgcttttgtacaagctactactacaaacaaaataattgaaatttaaagactgaaatttaaataactgaaacataaagcataaactaaataaattgataaaaataaacttttcaaaatgcaaaaagataaagatcctgtcaatcctcctattggtgatcctctgcatgctcattaagatccaacactggagcagctggtggatcctgaacaataggctactcttgctccaatgcttgtgtggatggcaaggaatcatcaataactg

SEQ ID NO: 117246 - DNA, 330 bp, Glycine max
cctaacttacgttgtgaaaccctcgatccacctgttttcttgatgaagacggacccacaatgagaatccaccttgtgaggcgtgggaagttcaagatcagatgctacttacctggcttcaattgacacttttgaaggccactttatctagtgcccttggatcgatccactcgcatcacgtgtgggataagagtcacaaacatttctttactgcaacaaaagctcgtgctcgtcaactttgaacggacttgcacaccacttctctggaaggctaaaccctatgcgagatcttgggtcagatcaagaacatcgctgatgagctcgccaacat

SEQ ID NO: 117247 - DNA, 276 bp, Glycine max
  unsure (1)..(276): unsure at all n locations
agcttgccacccagctcgcccattcgagcaattgttgctttctccanaagcaacagccttctggaggaatcttctatagggcgcaaagtgggcctgggtgctatttgcacccctatttttactaaatacaccccctaccctttttttttgtgagtctttttntcggaaagttacggaaacctacgaatttcgtaaccaaacttggtttctttccgtaatgttacggaacccttgcgattacttaatcatccccttttttgacttacggaatgttac

SEQ ID NO: 117248 - DNA, 341 bp, Glycine max
ttgttctttttataaaatgaggagttatgaactcatcatgttatctaaaaaaccttggggtggatccaagtgctccgatcatccatttgcatactcatgttttggtggcatactcaccgttgtttatttctttaagaatttcatcataactaaaaaaacaccaaggcacccctataacactcgatccagaaaaatcgataatgaagaaggcgtgcaggaacagatgaaggccgatctatcggccttaaaagatcaaatggcttccatctcggaggtcatgttaaaactccagaaaaccatagaggataaagccactgcaaccgcctccagtacagttaggg

SEQ ID NO: 117249 - DNA, 392 bp, Glycine max
  unsure (1)..(392): unsure at all n locations
cagctgnctggacaggggtgcgtctcgcaaattaaactttctgagctcgatggatacattcgtactcacaacaaggttcatttacccttcatcttgctatgtaaacagattggagtgttcaagcaattgtcaactggatgttgtcacaatgtttacggagacaaaatgtctcaattgtagcagaagaagatgttcaaactctttccaggctaatgcatcctaactgttagaagctgaggttgaaactgtgaatcaatgtctacccgaagctcctctatttggagttcggagccaaaacaactctcaaaacttcataagttcttgaaatcattaatcgctgtaactcaactgggggtcccaccggaagattttgggtgctggaacctgttgat

SEQ ID NO: 117250 - DNA, 339 bp, Glycine max
ttaactgggaatttgtatttaactcactttgctatctatgggtaggggtgagcatgattcatcccaagtccacaattatttgttcaccccaagatattcatatatgagtggttaaaattgagtcaaaatacttataatttgaattataactattcacatattacttgaaaaaattaattatgttattcatgcaacatatttgtataatgaagaattacgtttttatcatatgaaaactatatcacattttgttgccttatttttaatttctctcctaattaatgataagagtatgaataacaatagaatttcttaaataatgtatgcctattaatttgt

SEQ ID NO: 117251 - DNA, 343 bp, Glycine max
  unsure (1)..(343): unsure at all n locations
tgcaatggaagacattgtatatatattgatgaattttgtattcactaacacaaattagnttaatatgtatgctcaaatctattaactcatgtgttcaacttgaaatatgaaatttctattttacatcttttatttggcattatgtaaccttgtctggcacatcacaaatttttctttgatttctcttggccatagattagacctgttttatatagttctactttgctgtagttaaaatccagattatagttgcgtaagccatcaatgaactgaaaaattgcaattgaaatattgaacacatgattttagcaaagcagtgatagctaaaaaaatggagtgataa

SEQ ID NO: 117252 - DNA, 369 bp, Glycine max
gggatccttaagtcacctgcagctgcaactatccctcccccccccctccctttttttctttattttcaagacggtaatctactccatttttcagttatgctaatcacctccatatcagctcgccatgcgttacaaaaccaaaaaacataatacatgttgttgtccacacccataccaagttacacactaatagtaaacaaattctttgcttaaaagtaatcatgacatgaaattgaacgtattctttctaaacttgtcacttctagtaagtagcaactagtaggacagaatcctcataaactggtgacgacaaagcgtgcctcttgccactgatgacagagcattgtgccttgctattatacactaaac

SEQ ID NO: 117253 - DNA, 326 bp, Glycine max
tgcttctacagaaagaagatccaagaaggcatatattgcttgggatgacaatgactcatccgatggatcagagaaggagatcagccttttatccaaggactacgagagcgatgagaacatctctcaagaagattaagcgaaaagcaaaaatcagacttccatctttgaagatctaagcacttaaatcatgaaaaaggtaacatcaaaaccattctcttttaaattaagtgggttgaaaattgtcttctaaattaacttgatatatgatgactaaaaattttttatttgtttggcttgattgcccgctattgtgaatattagcttat

SEQ ID NO: 117254 - DNA, 433 bp, Glycine max
  unsure (1)..(433): unsure at all n locations
agcttgtangattatggggtacccatcacatttggtactatgtggcggtcgggcgatggtgcacaacaagttntccacatccacaatgcgcgcataaacccaccatcccctgttgcccacctccaactgagctcacgtactcccacgtagcccatatcctcgtttctctcaacaccgggtccccatcaatcctcccaagctttcacaacatccaagaaaaacaacattcaaacagcacaagctatcacagccaagcaaaacagagcaaaggcagaaaactatgcttaacacatcaaccaaaatcacagcttttcttacttaaagaccacagtaacaattccttcgatccaattcgttaaccgttggatcgactccaaaattgtactggaagtctatagtgcataagcctacattgtgaccggtgggatctact

SEQ ID NO: 117255 - DNA, 434 bp, Glycine max
agctgccatttactattacgagcgtctcgatatttactgttctcttctttcattcgagaaaaaagatattattgttagaatttgctcacagcttttgtattcaattttgagtgtctcaatatgttacgggacttaatcggacatcggagttaaaagctattgtcgttagcatttgctacgagcttccgttttcaattacgagcgtcgtaatatattacgggactaaattcacccttcgagttaaaagttattgaccgttgcattttctacgagcttccgttttcaattacgagcgtctcgatatattacgggactcaatccatcctctgagttaaaagttattgtcatttgaatttgctatgagcctccattatcaatttctagcgtcttgatttattacgggacttaatcgaacattaagttaaaagtattgt

SEQ ID NO: 117256 - DNA, 351 bp, Glycine max
tttcagtcacactaacaactcaacttaaaaaatctacgacaatatctttacactcggaggccgattgtttttttatatatcgagacgctcgaaatttaaaatcgaagaacggaactaattccaacgacattaacttttcactcggaagttcaaatgagtcccgtaatatatcgagacgctcgaaatttaaaactgaagctcgtagcaaattctaacgacaataacttttgactacgaaagtccaatgaatcctgtaatatatcgagacactcgaaattaaaaccgaagctcgtagcatattctaacgacaataacttttcactcggaagtccgattgaagtctgtaatata

SEQ ID NO: 117257 - DNA, 445 bp, Glycine max
agcttctcaatcataagtataaattgctaaggtcttttagtgactctccttgtccccataggggtcacagctgtcaatgctgcactataatgacgctatagtggcatggcagcctctggccgctagatgcattgccagagcattgcacttcactgtagcgaccatagtgactgcaataacatccaaaatagtggcattttatggtgctaaaacaccgctatgttgatggttcccaaaatcctagaatgccttccaatattaatgttagaagcgcttttgtttggagtatatttgggtaaaaaagggtttaaggttgtaactattgtgcttcacttcaatatagagggtcacaaggattgagctcctgaccccttcctaatatagaggttctgatgcaatttcaagaatcaaatactctaagctcacgctatgacgtccgcttata

SEQ ID NO: 117258 - DNA, 344 bp, Glycine max
ttaacattaattaaaagctcactgttgcaggggcaaacacttatggttatttttatgcatgtgactgaacttgagccaatttatatgaaataaaataaatgcattctcagggtttcgatttgctgaatgctacaggctttgcaaaacttttttgctgctttaatctattctgcaaatactagttttgattctctgctggagtcactactagcctgtgctaagccttctccacagtctggtggcattgctaaacaagctttgcattcaatagctcagcgtgttgctgttctatgccttgctgctggtgatcagaagtgttcatctactgtgaagatgcttactga

SEQ ID NO: 117259 - DNA, 222 bp, Glycine max
tggaaagaagtgctattcttgcaatgcttcttctacaatcgctaacgacatcatgtcaaaagtttgcgacctgcattcaatcccctgaatttgatacagcaatgtcatacgcctcagcagcttcttcttgggtgcctaattttttaaacaacaataaaaaaaaatgcccgagttaattgtattattactaaaatatgccattggactagagataaaggattt

SEQ ID NO: 117260 - DNA, 298 bp, Glycine max
tgtgggtgtacaacggtggcaaagctaaggaaaatgatacattttcgtttttaaaaatcaagaaagaattgcatgtcgggaactataaacgactttctgaagaagacattactttgtgtcaaaattaaatgcacatacaacttttaaggaacttatttaatgcacataggaaactttaatttctcaccaacaataccatgtgaaatattttcagaaactgtatacagactgcatgtaaggttgtgctaaatgacactagcagcataaaatcacaaagaaaccgaggctatctatatat

SEQ ID NO: 117261 - DNA, 360 bp, Glycine max
tctcaagcttttaagaatgcaaaatatttcaaagtattttttatataatatttatttatatttttgtttcttaatttttattttgggttaatttagtctttcaagttttctagggttaattaagtgatatcaatatctcgttagttcaaatggaattaaacataattttcttaacacagaatattgaattagagaattgtcgggaaaaaaatatgattgaaaatgagaaaacatttcaaatttgttgatgaagattaataatcattacttccttcctatgtcttttaatgttttagctttctatttttttctcaaaacatttgatattttttaattttacagtttaactaatgtattttt

SEQ ID NO: 117262 - DNA, 464 bp, Glycine max
  unsure (1)..(464): unsure at all n locations
atcctctcagtcacctgcggcatgcaagcttgtgcaagggcatgatgtattgaagaattttgaagaagngggtgatgaagaaggacttccaagtgtaactgttaaaataattaattgtggggaacataatgagggtgagaattcctcagccctttatggagaatactaagttctacccttaatatgaaatatgattatatgaataattaggagtgtaagcaggtgcgggtcacctgcgaacctgaattgatccaaaccaacccaaatagtttgggttgggtaatttttttgtttgggtcaaacccaaactggaccaatcaaacctgttgagttttgggttgggtcacgggttttaatacttgaaaatgctgactcgctgacttggcccattgacccattaatttgtattaaaatattattattattattaatatatggaatatataatatatatttttaaattt

SEQ ID NO: 117263 - DNA, 341 bp, Glycine max
tttcggcttacagagagcaaaaagcttatacggataacttattcgtttttttcgccagtcagcgtgactcaaaagtcaatatgacagatcttgtgagcacggaagatgacataaatctccgcatgtcaacgggcttgtcagccgcgattgacgaagggcgcagaagacgacgttagtctctgcgtgttatcaggcttttcgtcttacagacagcaaaaattttatacggataaccactcgggtatttccgcccgtcagcgtgactcaaaagtcagtatgacagatcttgtgagcgcggaagatgacgtaaatcaccgcgtgtcaacaagctggtcggccac

SEQ ID NO: 117264 - DNA, 440 bp, Glycine max
  unsure (1)..(440): unsure at all n locations
agctagtgtatgaaaggagccttattcgatatttggcatcactggnagaggatgtccaaggtcctactccttgcattacatttatctatctacaaaagattctgtaatagtaaagaccctgttcggataaaaaggtccaatgagatgaacttctttatgttaaaatcaacttatgcacctctgcttttggagaaattagatgagagagcttctaaataaattgatcttaacttgtgggagaaactcaatgtattttaccttcttattttcttctcccggagaagtttatccgaacaggagtgtttccagtaaaattactcgttacgacaggtttaagtggctttgactacatgaaagggtacagatgacaattattttctgtctaaagaagtgcatgcatgtatcatccccatatntactgaattgacatggaattcata

SEQ ID NO: 117265 - DNA, 334 bp, Glycine max
ctgcggagtttggccatggcggcctccaggctattcattcttgttgttacaaggttccgcatcggcatccgccattgaatagcactaaaaagggcatgtcggaccaaaatgttatgaatgcaactctactgctatactactgctaacaaactaaggaaaactaattgagataattgttctgatatatcccattaattccacttctttacatatttataatactttccttctaacataatataattcgttataacagaatttggtaacatcctactcaactaatttgtggaattgacataactgcctaaggtactggtattaggactgctgtgct

SEQ ID NO: 117266 - DNA, 112 bp, Glycine max
  unsure (1)..(112): unsure at all n locations
agcttgagtgatatatggggacacctcacatgttgggctangtgacggtcagagcatggtgctgaacgaaattgttctacccctccaagcgcgcacaaaataacaatccgat

SEQ ID NO: 117267 - DNA, 91 bp, Glycine max
tgcttgcctgctagattgctgtatgagatcagcggaggacgatctatgacatccccgatagagaagcgtcgtaccactggctggcacgaac

SEQ ID NO: 117268 - DNA, 390 bp, Glycine max
  unsure (1)..(390): unsure at all n locations
agcttacgagacanacaaatgttttcatatgttgaagtaaatgngacgaaggaagaagaagaagaatgactaagaataaaacctgtgatgcttactaaggaagaagataatatgacgaacgatgatctgcagagatgacccacgattatctgaatagatgacgaaggagatcttgaacttgggagaacaatttccaggaaagcacagctcggccgttcctcatgaactagagaaaatttatggttcataaaaataagagggttcgcttgtcctctttaaatttccttggagacattattgtccaacccttatcttgtgatcagcttccgaaaaggagatttgaaagctggagatctggcttaataaaagatctactggagctttgctttg

SEQ ID NO: 117269 - DNA, 345 bp, Glycine max
  unsure (1)..(345): unsure at all n locations
tgcttgtggggcttctatggaggctggatctttgagctttaatgaggtccttntaaggtgaatttccaccatggagatgcagtggaagacaaaagaaaagaggtgagaggaggcaccatccactaaggaataagccatggaagaaggagcttcaccaccaagatgagccttggataagaagcttagagaggatgcttcaatggaggaaaagaaagagggagagaaagagagaggagggagcacgaaattgaaggaataaaaagggagagaagttgaactttgagttgtgtctcacaagactctcattcatcaaagttacaacaagtgttacacatgcttctattt

SEQ ID NO: 117270 - DNA, 387 bp, Glycine max
atcttgaaaaatcaaaatctaaaaagcctgttaagtttaaagatgtacctttgggataccataaacctacattggttgtgccttgaagatacttaatgctccttttaatagcagttaattatattccttaacgttgaactagtatcttgcacataagcaaacacttagcatgatacctggtatacttgcagttaggtagagaagtgattcaattatacctgtatatcttgattcatccacttatttaccattcgcatctaagtcaaggtaggctgaagcgagcccattgacacgtagagactaacgtcgtcatctgcacctttgtcattgttggatcaagtggcctcgaaaaattaataaggggcgattgaattaattattaatgaa

SEQ ID NO: 117271 - DNA, 339 bp, Glycine max
tgatgattcaacttttctcctgtggcgacaacttttcaaaccagttatcaagtcccattgacttcagcaattcgtcacaaatccacagattccgctctgcttcctctctaaagatgattgtgagctggcattgagaatccagcttatgaaagttggagcaacaggatctagtgctcctcacatcgcttcaatcgactctctctacgtcgatattatcgcaagttctaggatgcacccactcctatgaggtttggaacgcattcacgattatttccacaagcaaacaatagccacagcttgtcaacttcgcactcagcttcgtgctacgacacttgcagg

SEQ ID NO: 117272 - DNA, 332 bp, Glycine max
ttggggctgaaaaactatataacagcaccagggtctagtttagctctctctctctcctctctctcttctctttctcttttattttcgttttctacaattccagttcagacttttagttttgaaattctgataccaatgacagatgtcgtaccggatgtcacgacatcacgcttcagaacatgcagattatatttgacagtatgaacagaatcagcaagtaaataactcaagagaattgttaacccagttcggtgcaacgtcacctacatctgggggctaccaagccagggaggaaatccactaaaatagtgttagttcgaagatctaacagc

SEQ ID NO: 117273 - DNA, 291 bp, Glycine max
agctatgcgaatatggttgtctctagcgaattgatccacgtaggaccataacgaggcgatacacgtcgtcaagcttcgctatatgtctcacctggggccaatgcccacggtgatgatgtgggaaagaactctactcagacctgtatttctgtacaaccacacgttccacgcgcgccttcacgagtattaatatggctatctctagccatctggatccacaccagcgtgctatggttggagcgttgatgtagcttcactggtggacgcacataccacactagcaatgctaga

SEQ ID NO: 117274 - DNA, 140 bp, Glycine max
  unsure (1)..(140): unsure at all n locations
tgtaggtcttgattaacacaataagcgcgcagttttttttactgntcttaaggagcaacccactgagtcctcgcacaccaatcccaaggatactactctcaccaactatatagtactagagttggcattcaaagacctcc

SEQ ID NO: 117275 - DNA, 466 bp, Glycine max
  unsure (1)..(466): unsure at all n locations
accttaagtcacctgcggcatgcaagcttcttggcaatcctcattccagcgatcatttnggttnttgcgtaagagtttgaacaacggctcacaaatggcggtgagctgcgatatgaatctggcaatataattcaagcgtcccaggaagccccggacttgcctctcagtacggggttccggcatctcaaggatagccttcaccttttcggggtctacctctatccctttctggcttacaatgaaaccaagcaatttccctgatttgaccccaaaggtacacttggcggggttcaaccttaattgatatttcttaagcctttcgaacaacttccgcaggttgacaaggtgttcttcctcggatttagatttagcaattatgtcgtccacgtagacctcgatctcttgatgcatcatatcatggaacaaagctaccatggcccgttgataagttgccccggcattcttg

SEQ ID NO: 117276 - DNA, 345 bp, Glycine max
tgacacgtcgcctcattcctctatgtgagagaacagctctttcaagataatgtcgcatatcccataacaggttcttcactaaagtctataaaaggatgtctcccttaatgaagcaactaacaaaaaatgagaaaactggacgtagctcagattgagcgacccagtataaaccaagtgtttctacttctcttctcataaatttttattgagtattcttattatattttctaacatcactttacaccaagtgtttatttgaaaaactattttaagaacctttaatttgtcaatagacaaccattttgttcttcactatatacttttttatcctcattggatgactag

SEQ ID NO: 117277 - DNA, 388 bp, Glycine max
  unsure (1)..(388): unsure at all n locations
agcttgaaggcaaactggatgcattggntatcttggtaacctagctgaccctgaaccaaaaatcttgtccctgtggaagggtctggaatttgggcgtctctgcttaacaccattacaaactttgccctttcatgcacaacttggaaaaaatggagaaccccgaacttatgctgcannatattacaatagaccttctcacctcagtagcaaatcaccacagtagaaaattatgacctctctaaaacagatcaaccctgatggagaataccctaattagatggttagcctcacaacacaacagagctgctcctcttacaaatgtgctggccaagcaacatacattctcacaatcacaacaacacagcccaaaacaaccacagtgagctct

SEQ ID NO: 117278 - DNA, 340 bp, Glycine max
tcaccatcaagaaagtgtcttggataagaagcttagagaggaaacttcttggaggaagagaatgagcagagagaaaaaaaaagtggggtgggaataaaggaaagatagggagagaagttgaactttgaagtgagtctcgcaagactctcattcatcaaagttataacaagtgttacacatgtttctatttatagcctaacacacgggaaacttccttgagaagcagggaaggtagcttacttgggaagctagaggaagaaagcttccttgagaagctagaggggtggctactcacactcctctaatagctaagctcacccctatgccaaaaatacaatga

SEQ ID NO: 117279 - DNA, 413 bp, Glycine max
  unsure (1)..(413): unsure at all n locations
cgaggcatgcaagcttgactcacaccaaacatgacaagggtattatgttttcatcaaatttcttcacaaataaccatcacaaagcataaacctaggtaaactacccatcatatctcccaaaacccaatacccacgaaaatcatgtgagaaagaagtctacccaaacctgaaattttgaagtcccacacgtagaggtgcgcttcacgacttcgaaaatggcttcctttcgcgagttggagcaaaaaagggtgtgcaaggttggagctttgatgaagcttcaatggtggaggaagaanagagaatagccacgagagagagagggagaaaagcttctgaatttttgagtgaggagagagaacatgctttttaaagaanaatgctttctttcctattatttatttttttaaaagcac

SEQ ID NO: 117280 - DNA, 348 bp, Glycine max
tgaagagttcacaccaaaatttgctaacaaagataaggtcgcggttatagaccaggctacagggtaacctatggtgtttgtagaccaatgcaaggaataactgagcaaccttgaaagtcgtgaggtggctcgaaagaccgccaaaatgagttgccttagaaaaatggtcaacaacaacaagaataactgaatttccattggatgaaggaagatctgtgatgaagtcgagggaaaggtcttcccaaatagtagtgggaactggtgatggttggagcagactagtttgtcgtttggtttcatactttgtagattggaaattgatgcattgggctataaagtttttgacat

SEQ ID NO: 117281 - DNA, 81 bp, Glycine max
cctgctatcgtaagttcagatcaaatgacagagttccgtgacaatgagaaactgatggacgatctgggggcatatgtcccc

SEQ ID NO: 117282 - DNA, 328 bp, Glycine max
cccactcagaagcgcgagtgactagaaaaattacgggagcgaatatgtacatcttattacatgttattgacacaagaataacatgagagctatgatatttaaacacgagtgcatcgatatatacagggtttcattgagacgcacgaggaaatggacatacttataggatcaaagtcagaaacacagaccgaaaatacagagtgaaaacatacttggggacactatggctccgacggactgaacgataaggacattggagaatgtaaagaaactatgctattaactgaaaaaccaaggagatatggtgggcaaaaatggagataaacac

SEQ ID NO: 117283 - DNA, 347 bp, Glycine max
  unsure (1)..(347): unsure at all n locations
accttcttttctttccatcgatctctccctttcttatacatttgatttaccatgcgaatttccctttcttgtggtcatagatgttagatcgattcgattttagggctcataactaatttacaccattttctattntatttccgttgcgggttaaattataagttggtttcaatgcaataagctaatctaaacctgcacttagtgtccctatattggttgtgctgcttctttctgaaatccctcattcaaacatattctaagaatgtattggtaaatggttgtgtgtgtttcacatctaactgagtgcgttatattttagaattttggtggctagggatttacatggg

SEQ ID NO: 117284 - DNA, 342 bp, Glycine max
tgcaccctcaagctgtgacttcaaggctttccaaattcgaacatttgtggtaaggttcaaaagatggaaggcataaagctttggtgcatcactcttgctcctcaaggcaaactgaatgtccatgtcaaagcttttggatgataatattgagatcttgtcaatactttcttttattccatgaacataaccgatatggtagtttcttttaggcctgttgattaagtcatctacggttttcggtttaatatcagtgaaggcaatgaggtctccaacctcaggctcatattttccattcacatcattgctgcttctgttcacagatatttggtagaacaagctctt

SEQ ID NO: 117285 - DNA, 392 bp, Glycine max
  unsure (1)..(392): unsure at all n locations
gagctngtcactagcggaatgcgtgatggatactaacatgncagctatcatcggcaagtaccaagaagagtgaggtctaaccacggcccaccagcatataatcgccgatgagtatgctcaagtatatgccgaaaaagacgctagaggaagggtgaacgactctttacaccaatatgcaaccatatggatgagaccggtttgctcttaccttgaacgggagtcaagaacttgcccgctctgttagccaaggccaaggcgatggtagacacctactccatcctcgaatagatttatgggcttctcggctattgtcaacatatgatatacttaatggcccacataattacaaattggtccgaaactagtatggtctctcagaccttgacaggata

SEQ ID NO: 117286 - DNA, 350 bp, Glycine max
ttgtgaggcgttccgccctatgagtcctcactcgaactttttatttatgtcttaaaataagtgagtttcctaacatatgtctagaatacaatggtggcctttgcatagatacctcatactattaaatgagcaatttcacattaactattcatttatcaaaccatttaataaagcgattaacatgaattttggtttactcttaccctaaaaattgcttatgcgagaatggtagggggcataccagaaatgctgatagatgagcttcaccctgagacaatatatgggttaagccaaattcttcgctaatggctagaacaagacctctgacggattctcaatgaatgaccgtc

SEQ ID NO: 117287 - DNA, 454 bp, Glycine max
  unsure (1)..(454): unsure at all n locations
agcttgactcacaccaaacatgacaagtttaatatgttttcatcaaatttcttcacaaataaccatcacaaagcataaacctagtaaaactacccatcatatctcccaaaacccaatacccacgaaaatcatgtgagaaagaagtctacccaaacctgaaattttgaagtcccacacgtagaggtgcgcttcacgactccgaaaatggcttcctttcgcgatttggaacaaaaaaggtgtgcaaaggttggagctttgatgaagcttcaatggtggaggaagaagagagaatagctacgagagagagagggagaaaagcttctgaattttcggagtgaggagagagaacatagctttttatgagaaaatgctttccttttcctanttatttatttttttcaaaagcacttgccacttgtcccattntgagtggaacaaaagggcccaccttttt

SEQ ID NO: 117288 - DNA, 341 bp, Glycine max
ttattgaaggtaacggatgttctagttttatctcttttaagttaataaagtcacgggaggaattataaagttcataggggactattcccagtaaatctgtaactgcaatgctattaatgattgtcagcaaagaggaaccacgaaatgagattttgcgattcataaatctctcgtctatttccatttgaatatcatcaacccctgctgatttagatattaattgggtgaactcttctgccataatttgttcataagtgctattgtcagtaattcgtggatgcctattactacaaattagagtattgcgaatcgtatgcaatggcatgcaaatgacggaacgg

SEQ ID NO: 117289 - DNA, 354 bp, Glycine max
  unsure (1)..(354): unsure at all n locations
tgataacgggtggtctctttattgatactaccctcaatatggggtgggctacttcntcttacggacactagcatgtattataggagctccacatcagccgcacgcngataattgccactctgactcatctcctaattatgaagcaatataaatcctcacttcaaaatgggcaccttatgatatatatgcaatatagggagattattcatcatggactgcataatcaagtccgcaaaggtgttatgaaacatataagctatgtctgacatgtgactcattctcataacggacaacgtctattgtagcttttctttgggtgatgacccaacccataaccttcataaatgaggatgc

SEQ ID NO: 117290 - DNA, 244 bp, Glycine max
cgccgaaaggacccccagtaaaagtatgacccctggaattcccaagacgtccgccgtcaaaaagaacggcccgaatgtaatgagcctggaacagacctcccacctaaaaggtatgaccattagaatttctacagagcatcccgtcgccgatacaaaggaggctcaaaatataacgcacgtgaatcggacctccacgcaaaaagataagcaaagaagaaaacctccgagacactacgaggaagaa

SEQ ID NO: 117291 - DNA, 337 bp, Glycine max
tttttgtgaaagaatgtgactcttcacatttgaatttgaatttcaacgttcaaacacactggtaatcgattacaacattttgaaatcaattggaacattgtaaattcagttgaaagctttttgaaaaccattttgcaactggtaatcgattacaataatcttgtaatcgattaccagagactaaaaagtcttggtaaaaggttttgagaaaaattcatgtgctactcagtttttgaaaaaactttttaatacttatcttgattaagtcttctcttgattcttgaatcttgatattgattcttggaacttgaatcttgaaacttaattcttgattctt

SEQ ID NO: 117292 - DNA, 365 bp, Glycine max
agcttgtggaggagcagattattaatgatcttcttatagttgagctacccctagttctagatccagaggcagatgtattgaggatccccttatagttgatccttatagttgagctacccctagttctatatccagaggcagatgtattgaggatccccttatagttgagctacccctatttagaatctttaatgacatgtcttgtaatattgtccgttgtttgaaggggattttttttttttaatcaatgtacgcactttctctcatgaaaattcccaatttacaacagtttgtggtatatcccaaagtgcaccacttatatgcttcattgaaaagtcaggatttgtcaacctgacttctaaatg

SEQ ID NO: 117293 - DNA, 340 bp, Glycine max
  unsure (1)..(340): unsure at all n locations
ttagtagacactgattgttcctttacttccatatgcaaaagtgttgtacctcaacataattgctttagaagtaatataataaccaagactagaactatgtaaggagacataataaccaatgatacaaaaatcagaaatttcactatacaattatctacaaattgtgacatttttggcaaaaagatttttataaataagacaaacataatagattcgcaacttgctaaataacaaatgatcctaggacttgattntatcacacatgataatagatcaattactattgcaaaagataatttattaatctctacaaactcacaaatatcaccaataataaatg

SEQ ID NO: 117294 - DNA, 442 bp, Glycine max
tccttgagtcactgcagcatgcagctttcattttgccaatgcgcattcctcattctccaaggttgcgatgctgtaattcagctatcaatattacttcatttttgaattcctccacaccttgaacagaagtttttgaaagccttttaacagcaatttgccttccatctggtaaaactccctaaaacatttttcaagtctctaagtccgaatgtatgcaatgggagaaatcaaaccaataaatatcatgtcctatatcctaattttataccttatagacagggccatatccacctttccctagtttatgctcatcagaaaaattatttgtactttttagaatagtacctcacaggcatcatacgaaggtcatcattcatactctcctccttgtccgtgtgatctatgaaaaacattgaataaagtccttcctctagaatagctt

SEQ ID NO: 117295 - DNA, 334 bp, Glycine max
agctcctatgtatccatggtacgttcttatatgttattattgaacatctctgctacacaactcatcatctacttcttgtttagattgttctctttatcaacatcgagtagcaatcaatcacaacaagatcaatccttaaatatacacaagcccttctattatcatccaaaagaaaaacttgtgatcacattggtctctctggtgcttgattcatcaaactacaactcataaaatagtacaatgatcactgcattgagtacaaataacaaagttgacttcgttgatagcccgattaagatatataaaacaaatcctgcactttagcaacatcgaa

SEQ ID NO: 117296 - DNA, 369 bp, Glycine max
agcttgaggactataccttcgaccatacactttcgtgtttctgtctaagcccagatttaaggtgggctgcagcactggctccgcttccctaactgtactggaggcggttgacatggctttatcctctatggttctctggagttttaacatgacctccgagatggaagccatttgatcttttaaggccaatagaccgaccttcatctgttcctgcacgcccttttcattattcattattatggatcgagagatataagggtgccttggtgttctcttacttatgatgaacatcctatagaacaacacgaccgtgagtatgcctccaaaaacatgagtattcaaatgggtgaacggagcacttgatacacc

SEQ ID NO: 117297 - DNA, 420 bp, Glycine max
  unsure (1)..(420): unsure at all n locations
tagctctgttcccactcttacaccaattgtttttctgtttgtgactaagaacnaggcgtcttagtctataaagatgcttcttggtagtccgtggagatgcaccccttccttgaataataaatcagcgacgggttacacatcgtcattattcttacatggcatgaaatgttccatttttgagaaccttgtcatcacaacataaagtgagtccttatcattccttgttccgaggtaagcctaaatctaaatccatagataattcagtccaatgctatttatgaacatcgtacagagagttatagaccatgaggcttgaccgtatattcttagtgttactcatattgcgccggtgcataactgttcactgtatgttacaatgcggacttattaatgctcctgtttatggttaaattgttcacc

SEQ ID NO: 117298 - DNA, 392 bp, Glycine max
atcttcaacatcagaccacttccatgtgctggaactacttcacatggatttgatggggcctatgcaagttgaaagccttggaggaaagaggtatgcctatgttgtcgtggatgatttctccaaatttacctgggtcaactttatcagagagaaatcagaaacctttgaagtattcaaggagttgagtctaagacttcaaagagaaaaagactgtgttatcaagagaatcaggagtgaccatggcagagaatttgaaaacagcaggttcactgaattctgcacatctgaaggcatcactcatgagttctctgcagccattacaccacaacagattggcatatttgagaggataaacaggaccttgcaagaagctgctatggtcatgctccatg

SEQ ID NO: 117299 - DNA, 417 bp, Glycine max
tagctttataccactcgctgttttcttttactacatctctgcaatcaatcaaaatagagagtctttgctcccgaacaaactttttctaacttaaaagatttcttctcactaaccatgaggatgaataatactatgatgcagcacacaagataacaaccaatacaaatgccactcaagggagttacgcatgtaaaagttaaaacatcttcaataacttcttcaagctttccttgagagattgtcacaatgctgctcatgtcatgttgctccccctatctctaataactagtgctccccattaagacacattgggtctcacaaacggcttatccaaaaattcttctaaccattctttaagctcggctaactctataagagacattctataaggggctatgattatgggtccagcattgg

SEQ ID NO: 117300 - DNA, 370 bp, Glycine max
agcatacatcattctcctctgtgtgtttgacatactccactggaaagaacatcaacacacctttgctatgacttagacggttgaggggcgcgccaacaagtcatgcgccgcaaacatgtgaccgatgtagggtcacactgcacacgccgatgatattgcttacttatgccaaaagaagagacaataactggcggaaccactcatcctcccactgggccttggaggagacacccttcatgggaccgccttgctagtcatattgaagaaggggactagatatctacctgacaacatcataggggcctaacgtcaatcggaacaacaccaccgggaaacgctaaaaaaaccaagcttaaaggacgcaatgaaa

SEQ ID NO: 117301 - DNA, 392 bp, Glycine max
ctctaaacacacgctgctgcaactcagagctgtggattatgtttgcttgagtcgccctacgcattgcaacaccctccaaggagtgaggttcacaaacctgcaacaaggatcaccgaaggttttgatgtcaattggaaaactatgaaagacaaatggatgcttcaggcctcatacaccaacaatatttgctagacggaattacatgtgtgtccaaatgaaataagtcaagtgagttatcctctcacaaaaaggagcaatattcttatttgctgattcaaaatagcttctcaccacaagtctaataatctatgccaatataggtcattattatcagattgtacattcccctcttctaaatttcttttcattcccgttattcacttttatttata

SEQ ID NO: 117302 - DNA, 117 bp, Glycine max
aggggcaaccccaccacacgacggaaacccaggcaagacgatgaggaaggacacacacaacagggcccccggctacaccgcgaagagcacgcccccacgaaggaaccgaaccgagca

SEQ ID NO: 117303 - DNA, 393 bp, Glycine max
agacttaagccaattcatacgacaatatacttttttctcggatgtctgatcgagccccgtaatataacgaaacgctccaaattgaatgtttaacctttgagcctattctaacgacaataactttttactccgatgtccgatcgagtctagttatatatctacacgctctaaattgaatgttgaatctctaagcctattcaaacaacaataactttttactcggatgtccgattcatcgacctaatatatctggacgctctacattgaatgttgatcctctgagccaattctaactacaataaatttttatacggatgtctgattgaactccgtcatatatctggaccctctaaattgaatttcgacccttgaaccaattaaaccaaataactt

SEQ ID NO: 117304 - DNA, 410 bp, Glycine max
  unsure (1)..(410): unsure at all n locations
agcttcaacattcaattgtgagcgtctctatatatgacgagactcaatcagacatccgagtaaaaagttattgtcgttttaattggctcacaggttcaacattcaatttcgagcgtctcgctatattacgggactcaatcagacatccgagtaaaaagttattgtcgtttgaattggctcagaggttcaacattcaatttcgagcgtctcgctatattacgggactcaatcaaacatccgagtaaaaagttattgtcgtttgaattggctcanggcttcaacattcaattttgagcgtttcgatatattacgagactcaatcaaacatccgagtaaatagttattgtcgtctgcatttgctcacaggtgtaacatttaatttccagcgtcttgattatttccggactcaa

SEQ ID NO: 117305 - DNA, 432 bp, Glycine max
  unsure (1)..(432): unsure at all n locations
atcttaagtcacctgcagcatgcaacttgtggagaccgtacatatattttgttttggctgctaaactgcattctgctgatgaatttgcagtaaaaacaaacatcactncattgtgcattaagttttactttgaactttccttcttgacctattatgtgtgcaactatatataatgattcatgatttgtaatatttaggttgatttggagcataatcaatatcgcactttccaaggcttgacttgcctgatgcaaatctcaacaaggactgaagattttattgttgacactttgaaacttcacagttctattgggccctatttgagggaagtcttcaaggacccttccaagagaaaagttagtggcacatgattgattcttctttcaattcatcatatttgttacattctgctgaccctatctatggttaatt

SEQ ID NO: 117306 - DNA, 277 bp, Glycine max
caccgagcagcaactatataaaaccatatacggttctctttttgactatcaaactcacccattatgttctatttaaacattgactccactttataaaatagactggatacggaaccctattctatatctctatcacgtgaccgcgtcatgaaggacatgcgtttacaacacatgactaatttccgtatactcatttgaatattcgcatgacaaattcatggcaccaaatctttctttttggacattacgctctagcacaattatccttttagttctt

SEQ ID NO: 117307 - DNA, 377 bp, Glycine max
agcatgataggttgtattgtcagttactatacgcaaaggctggagggtgaaggatccattccatcataaatgggtgccactgccaccatatgttctgtattgcaatactcagttgtactatacttttcaatattatattactatagattctattgtaaatatcgacaattaatatctcatgtataggcatatagcttatcagtttgggtccatctgtggactttataaatactatatttcctgttgaaggtaagagagcttcgaccctattacctgcatcgctgtgttaaacactgctctatattgttgttaatatatatcacgagctcctaagtgaaactgatgagagatgcagcattttaatttaccagcgagag

SEQ ID NO: 117308 - DNA, 391 bp, Glycine max
agcttttttcggtctgatgttgcctataaaatttacaatgcagttcggctatgtttcttcgcgcgaactgaaccgatgttgtgtctcggccgactggcatgatctcattttgtcggccaggaaaacattagcccacctcggcataaaaaacatgattcaccgatattgacaggaaaagaaaaatgctatccgacgtcggccaggaaagatgaccgaccgaggtctgaaaaagaaacatgaccggatgactccggtcgaacatttcctaacagatatcatcccagtattattcacggattgaatagaaaaaacaatagccgacctcgcgagttaaatagccgtgagtgatattcttttgccgacatcgcgcaatttcttatacaaacgctgg

SEQ ID NO: 117309 - DNA, 423 bp, Glycine max
agcttgcttggtggttttgtaagtatgtatttgtagaagtaatgcagaagatgtaaattggtttgatgcttttcctctaagtcctctctaacttgctggatggttgtaatacgggattctattttgttatttaatttaacttgcattcttttgtattatatttatatcatcaatgtctgatcaatggcatgagctgagcatcattcaggatcttactgaccgtatatcactctttgttttttaggtcttggggactggggagacagaggataactgaagcagcacttgatttttgtcactcttttttatattatggttagtcatatcgacagtctggagagtgaagtaaagataatagcaagttagtcatatgttacaggatggctttctttatgaacttttcaaatgatacagtctcacatg

SEQ ID NO: 117310 - DNA, 256 bp, Glycine max
agctctcttgtggggtcttatgataatatactatacaaagctttaaattctaaaatgaatcaaatcattattgtcctaactatcattagtgaaatgtcgtccaaatgttcaacaactaagaagcaacattaaagtagactcaaacctcaaattggcaaaagaaagatttgaaagaatgaaagtttgaagagccatatgctgccctaccatcccatgaaaaaattaacatttaccaccacgcatcagtgatcaacct

SEQ ID NO: 117311 - DNA, 411 bp, Glycine max
agcctgttcttgattatttactaagttctttatcattcttagaacaatagacttgtccttcatttaactgtctttgggctcggcggccacaatcaacaaactactttcgacacctactatatgatgatttaaccaacgctgttatcggtatgttgcaacaatccttcaaaaccttatctatacattctgagaggctggttgtcatgtggccatatcaacgtccttctctatcataacccatcatccatttttcctttgaaatgcgatcaatttatgttgctatggctggactcagttgaccaaatttttctaaactttgataaaaaaaatgtgcttgcaaggagtgcaacctgcataaaatcagctagccaccacaattctaagtatttatgacacttcaattaacatgac

SEQ ID NO: 117312 - DNA, 382 bp, Glycine max
agcttcttattttcagctgatgaagatgaattcatggctacttcatgcactcctctaatgacaatagcatcatttctggcactaaattgctgggagttggaagccatcttcttaattaaattcctggcttccgcaggggtcatgtctccaagggctccacccctggcagcatcaatcatacttttctccatgttactgagtccttcataaaaatattggagaagaagctgttcacaaatctgctcctggacatctggtggtttcatggtggagcatacaatatggagtgttgtcatatgtttgtgcgggtcttcacctgcgaggccattatactttggaagcaaatggatcattccagttttaagaacatatgggacatcct

SEQ ID NO: 117313 - DNA, 416 bp, Glycine max
agcttgttcttctccattgttatgtttcatccaactcactcttttgcctttctaaaccttttttcgtgctcaaacagctcatcaccatccagccgggtgcgcaacaacatgttaagaacactaccaacctacgaaggtagtcgatggtgtgacctcacgacctctacaaaggcgattatggtgttgccgccttatgacacttcattctctaaacactttaagcagtgaccctgcacttgtcaatcttcacctttatagacgccaccttgctctgaacctctatgggtcattgtttattttcctgcataatctccgaacatctctgcttggagacccttgcattattatcctcattctgatccccaactggtcgcatgatatttatgtttatagaagacaccaagctatatggggcc

SEQ ID NO: 117314 - DNA, 266 bp, Glycine max
ctctagatcgacctcgccgcatgcaagcatgcatgtatattgggttcccatctccagcaggacaacgacgggagctgtgcgacgatgctgcaacacgctatcaactatctctcatatcaatcatcaacccgctcttatctggggcctgaccatcaactgacggcgagtgctcccacgtggccccactacatatgtaccttctcaaaggcttctcgtcaaggcaatctatctcgcgggctactctcgaacttattctgtggaacaga

SEQ ID NO: 117315 - DNA, 366 bp, Glycine max
ttccagccttttgatccttattctgtgggagactgcttaatccgtttaatcctatccctctcccccagccagatgacaagaggatatagctccactttgtgtgattaaaaaaaaaccatatggtaaccactgtttctggcatgcttagtaaaataaaatgtgaaagaaaactatctattcttacatggtgatcacagtaattactaattagcatccttggctcaacagataatacagtctgtggttttcactttagactagtataaactatttccggatacatgtgtggaaacaaactgattccttctaaaataatatacccctgctttgtgcccaactctccaactgaatatactccctgttttt

SEQ ID NO: 117316 - DNA, 438 bp, Glycine max
  unsure (1)..(438): unsure at all n locations
ggcatcctcagagtcacctgccgcatgcaagcttttagtaaanagataaataatttattttatatatagcaaataataggctgagtaccctatgtataaatagttatattaagtcagctgcctccttttggcctcatatacgttgttccccttctcctctcaaaaccctttctttttcccgcagcccaccaaaccagtcttagaaaaatgacgatcttgaacccgctcaccgttggatcgtcgcgaaatttgagtatcatgttcgcaacagaattccgagcattctcaccggtgggaatttcgatatcatgtctgaactgagagaaacacccttcgcattgtagcctttatctttcccgcagaaacccagagctgtcttggataaactatgatcccggtttcgctaaccgtcggattatcgtgaaatttggatatgtt

SEQ ID NO: 117317 - DNA, 332 bp, Glycine max
  unsure (1)..(332): unsure at all n locations
agcnngagactatacatcaaaaatatgagcctaattttactcgaaccaacgtaaagggggccgaactacaggaatatattacacgcaacataggcaataagcgcaacatacacacaacagtcaacaaacaaggtatcaagcacataaacaaaacataaactacaacagggggacaaaaacaacataataagtactaccacacaaaaaaaaagagcccctgagaaaagagaaatataataaaaccaatcggatccgccaaaagacggaaggacggggaaaaaacaaagaacaacaacaagcgggacacacaggcaaccaaaaaacctatataa

SEQ ID NO: 117318 - DNA, 428 bp, Glycine max
  unsure (1)..(428): unsure at all n locations
tcgatctgcagcacgcaagctttgcatgtattttgttttcttttgagaganaggcccaagctccagagagttttgagagattttgttgtgtgaagatctgcagagaccagagcttgaagctaaagtcgttctgagagcttgagatgagtttgtgagtggttatgagatcctagaggtgaaggagacatcctcaccacttgtatgtttgcaatctttcatcttgctcttctctttgatgtaaaggaggcttcctggttatggaaagctaaaatcctttgttggatcttccttgtaggtacttgatgtaaatatcttcctatctgtctaatgatgttttgtatgttctctgctatcagcttttcattctagtatgcctttaccttgatcacatacatgcatgctttgttagggtcattcaatcgttgaaa

SEQ ID NO: 117319 - DNA, 358 bp, Glycine max
agcaccgagaaaaatcaaacgacatttagttttaactcggatgtcctattaagccctgtaatatatcgagacgctcgaagttgaaaacggaagctctaagaaaagtccaacaacaataacttttaactcgaatgtccgattgagtcccgtaatatatcgaaacgctcgtaatttaaaacagaagctctgagcaaattcaaacgacaaaaacttttaactcggatgtccgattgagccctataatatattgagacgctcgaaattgaaaacggaaggctctaaaaaagtcaaacacaataacttttgactcggatggccgattgtgtcccgtaagatattgagacggctaacattagca

SEQ ID NO: 117320 - DNA, 420 bp, Glycine max
agcttctaaactttatacaagaataatatcttctataccactctgtaaacaagtggcctcaaatatcttaagaaggggggggggttgaattaagatattataaacaatttccccaattaaaaattatattttgattttaatgcaagttccaagttcccttataaatgaatttctaaatgatgattcaaattaaacaatctgaatgtaaatgttaagcaacaattaataaaagagtttaaggaaagagaaagtgcaaacacaatttttatactatttcaacaaagtccgttgcctacgtccaatccccaagaaaccctcttgggaagttcattatctcccaaatcctttacactttctaaaaaacacaaggaccaccattcctttgtgttcagattctttacaacacaagattctctgtct

SEQ ID NO: 117321 - DNA, 362 bp, Glycine max
tgcaagctatatataaataccaacggacgttatgtttcactttgtgggcccacccaagcccctcacataacgcgacgcgcgaaaatgaacaacggaagcaacctagaaaacacaatggtcatatgttatgacaacgctgcccagtatcgggacatcccttattgagacgcccgatacggagaaaccgacgcctccgagaaagtgacattgtcataacctttccctcgaatgtcccattccagtagagctcatcacgtaacgcgcaatatcaataaacgatagctcgccacaaaccaaatggtcacaactcaatcacaggcgaccgataccagccctctaacttggcgaccccccggcttgca

SEQ ID NO: 117322 - DNA, 402 bp, Glycine max
agcttctagccaaatggacttaccttgtttttattcctttgatagcccttttgagccttgtttccctttccttgttttgaagctcactacaagccttaagtgaaaaaccatgatattaccatatccttaaggaattttggagctttggaattgttttgggaataagtgtggggggtttttgtttcattggataacttgttttgttgactatgcttcatgatgtattttgggccatacttgatgtacattgtatattggttaaatgttggacatgctgaatgaaatgttgcttctcataggcaaaaaaaaaaaaaaaaattctaaaaaaaaaaccaattgaaaaaaaagaaaagcgctcaagttgagtgaataagatctttaatggcacaagaatgatgaaac

SEQ ID NO: 117323 - DNA, 395 bp, Glycine max
  unsure (1)..(395): unsure at all n locations
agcttagtggttcaattataacaattttactttcttatataaatacaccacatacaatgtatggatattagcgtcctgttaccactgttatgtttagttcttggtaaaaattttccttgcgatatgagttttcgttttaatcttgtggctttagcatcaaatattatgttacaaattttttcttccatgtgtcattacctgccaaataaaagctggattaataataattataacatagttaaagcattattgctgaagattcatcgttgttgttctaacaatctggaacaaatatatcttactacaaatatatcngagttcaagaattattggagaacacctgatccactttttaaattgaaatattgctatttggacgttatatcactgcaaca

SEQ ID NO: 117324 - DNA, 410 bp, Glycine max
agcttcctactacttctttgtttcttgttttggggttgagtgtcgcctttcctttttttttacctttctatggtggcttttatgcagtgaaatttgtttctatttttggatctgcttaagcctgttttttggggtcgcttttctaagattgtgttttgttgagctaggatctggattactgaattttgtgttcttcaactagtactaggttgttcagttgataattagtatttgatgtggcagatgtctcttgctttgggatttaacttctaagaataatttctgtcttgtgtcttagttttctaacacatagagcgaatcgactttcttgtagctctttgtggtttgctcatttgccagatactgttgatattatgatggatatcccacaatctgttgtgtcaccttca

SEQ ID NO: 117325 - DNA, 371 bp, Glycine max
  unsure (1)..(371): unsure at all n locations
gaaacaagtcttaaactatttgcgtcataggccttcaacggacgacttaacttacatccatccctatcgataatggtcttgagtagggtttatctagtgaatgatatttgtgatttttagcataaccaaaactattttaatctatgaaattattgagtctttgatatgcacttctatgaaatacttgaagaaaaaaattgatgcactccagtataatattgggggttgggttcgttgtatttattaatacactaatcaaaccaacttgttcatataccagattaagtactcgcatcaaggcgagtaaacacttaacgcctccaaactgagtaccctctcagtcacgtactcacatatntcgcatgacacga

SEQ ID NO: 117326 - DNA, 395 bp, Glycine max
  unsure (1)..(395): unsure at all n locations
gatccctgagtcacctgatgctgcaagcttgatnggtagaacccaccaatantatattataatactggnaaagagcctacacatcacgattaccatctccctttccatcatagggggtgccacttgggctgccagatccctccacctttgggtgtattctctgaaagactcatgctcctttttgcacatgttctatagttgcatcctatctaaagccatatcacaattgtgctgacactgcctaacgaacgccaccattatgtccttccctgactggactcgataaagatgcaagttagtgtaccatgtaacacctaccccattaagactttcttggaaagaatgtatcaccaattcctcatctgctgcatatgggccttccctctggcatacat

SEQ ID NO: 117327 - DNA, 398 bp, Glycine max
  unsure (1)..(398): unsure at all n locations
agctntacaacaattcatgatgttgtaaagttggctaaggcgatggattggttaagacactgccatgaataccgttatagtaagacttagttagccactttcttctaatttcagccatattcatcatctttaattaattgctttgggaactcgatcatttgctgaaaagctttactaatgtgtaatgccacttgagagccctatgccgacacaggaatttattgttacagcacaactgtatatgaaattttttctgcgaattcccgagtctgccatggtgattcaagtcaacgaagttaaacttttgttaatatttaccaaatgaagggaaaacaccgaataaagtcctcatgcaattaatgtaatggacttgggagtttggtcacaaaaacaaataa

SEQ ID NO: 117328 - DNA, 405 bp, Glycine max
gatccttaaagtcacctgccgctgctactgggaggagctttttgtgtgttaataaagagggagagatagagagaggggggagaactaaatcgaaggaataaaaagggagagaagttgaactttgagttgtgtctcacaagactctcattcatcaaaggtacaacaagtgttacacatgcttctatatatagactaggtagcttccttgagaagctttcttaagaaaacttccttgagaagcttctttgagaaaacttccttgagaagctagagcttagctgcacacacccatctaaaaactaagctcaccttcttgacaaaatacatgaaaatacaacaaaaaaaaaagtccctactacaaaggctacttaaaatgccctgaaatcaaggctaaaaccctatact

SEQ ID NO: 117329 - DNA, 412 bp, Glycine max
agcttattacgtgtggaggattataatacacacacacacacacacatatatatatatatatatgtgtgtgtatgtatatgacttgctaaaataaattacgaatcaatatttcaaataataaaattaaattgaaggaaattaatatatctaagattcaacaataaatactttcaatgaatttttagattaattatttatgaactctttttaatcgaaaataatatagttcgatttaatatatacatgttttgtgccatgtaaacattaataatgtgtgatgtttatatgattgatgaggtgtgatcacatgttgtgttgggattataacattgtaattgagattgagtgtttgcgataaatagaatatgtgttgaatagtaagatacatgtgtattgagaattttcacacatt

SEQ ID NO: 117330 - DNA, 410 bp, Glycine max
agcttgcatttggaattgctataatctttactccatcattaggattagtacctgacatctcaaacaaacaaatcaaacgtaacaagacaattatagttgttgtttgaatacctcacccactcaagtgtatcacacaattatggcttttctctaatgaaaacactcttgccttttaccactctaattccccttgagttcttatgcaattcaagagattatggccacagcaaagaacaattcaccaatatgtgtaaggtaaggctagagagacaatgaaaaggttaaccaaaaaaaaggctaactatgtttttatgcacaattgaaggaaataaacattagaaattacgaattcaaagtacaatccttcatacaaccaatatattaccttatagagaattttcttataaaaa

SEQ ID NO: 117331 - DNA, 405 bp, Glycine max
agctatgaatgctctattcaatggagttgacaagaatatcttcagactgatcaacacatgcacagtggccaaagatgcatgggagatcctgaaaaccactcatgaaggaacctccaaagtgaagatgtccagattgcaactattggctacaaaattcgaaaatctgaagatgaaggaggaagagtgtattcatgacttccacatgaacattcttgaaattgccaatgcctgcactgccttgggagagaggataacaaatgaaaagctggtgagaaagatcctcatatccttgtctaagagattagacatgaaagtcactgcaatagaggaggcccaagacatttgctacatgagagtggatgaactcattggttccttcaaacctttgagcttcgactctcggat

SEQ ID NO: 117332 - DNA, 404 bp, Glycine max
  unsure (1)..(404): unsure at all n locations
agctgtggaggcattacctctatggatctaaactcgaggtgcttagtgaccataagagccttatatatttgtntgatcaaaaaaaacataacatgaggcaaaggagatggttaaagttccttaacgattacaattttgagcttatctttcacccacgtaaagcaaaagtagtatcggatgccttaagtaggaaatcccttcaaatgtctgctttgatggttagagagttggacctcttaaagcactttaaaaacatgagtttggcatgtgagatcacctctagtaacattaagttgggtatgttgagagtcaccatttaactcttgagcgagatccgtgggggtcagaaaaatgacccattcttgcaacccagtaaagttcatagtaccaagagagaaatatat

SEQ ID NO: 117333 - DNA, 406 bp, Glycine max
agcttccatttacaattacgagcgattatatatattacgggactcaatcgggcattcaagtaaaaagttattatcgttagaatatgctcacagctcttgtattcaatcttgagcgactcaatatgcgacgggactcaatcggacatcggagccaaaagtaatcggcgactgcattggctacaagcttccgttttcaaccacgagcgtctcaatatattacgggactcaataccaccctccgagataaaagatatcgccgcgggcaatttctacgagcttgcgatttcaaacaccagcgtctcgatatattacgggacacactccaacctctgaaataaaagataaagatagatgacagagctatgaactcccatttcaatagcagtgtcttgtatatacgggacct

SEQ ID NO: 117334 - DNA, 374 bp, Glycine max
agcttctcaatcataagaataaagtctgtttatgtcttttattgactctccttggccccatacgggcgacatttggatatgctgcacctttatgacgctatattggcatggcaacctctggccgctatatgcattgcccgagcattgcacttaactgtaccgaccataatgactgctataacatccaaaactatggcattttttggtgctaaataaccgctatgttgatgcgtcccaatatcctaaaatgcctaccaatattgaggctagaagcgcttttctttggaataatttttggtaaaaaagggtctaaagtatgaactcttgggctttacctccatttaaagttcacaaagattggacccctacccctt

SEQ ID NO: 117335 - DNA, 369 bp, Glycine max
  unsure (1)..(369): unsure at all n locations
agcttgagatgaggaagcgttgaatggtgttttttcctgctnttattgttgaccacagagtggtacctgtagatatgtcgcgggggtcaagagaccttgtggacgtcaggtggggtgctattgcccaaaaccaagcttgaccaatcccgacccaacccgggcatagtctgtcagagagaacctgtgatgtacctaagcaggcgagctcctgtctgtctacagattaattgatcaaagacccctaatcaatgaggcttgttgtggctggcccccctgtgaaatatgtgggatatgctgattatggcctctggtaatcaatacccaagggtgggttatcgattaccatgcttaaataatgaaattcgacgc

SEQ ID NO: 117336 - DNA, 328 bp, Glycine max
  unsure (1)..(328): unsure at all n locations
ttatttaatataacagaacaaatgggcgaggaagaaggacttccaagcgtaacagcnaaaataacacacagcggcgaacataatgagggtgagaatcccccaacccattatggagaaaactaagctctaccctcaatatgaaacacgacgatatgaaccaataccacccgaagcaggtgcgcggtcacctgcgaacctgaaatgagccaaaccaacccaaaaaaggggggagggggaatagacactgtatgggaacaacccacactggaccaaacaaaccagttgagacatgaggtgggtcacgggacttaaaactagaaaacgccga

SEQ ID NO: 117337 - DNA, 334 bp, Glycine max
agcctgcaccaacatcacatttcatgcaaaacatacaagggcatatatgaaggtaatgatgagcaacaagactaagcttcgtaagaagaaaaaagataaatttttattaaatactcagtaatgaatattgaaaacaaaactgttgaaattgataattgattatctgtgcaacatataagaaagacattatgtgtgggtatttcaaggagacggcatgatgagttgcaatagacaaataagtggatgtaacatatcgaaacatcaacatgagaatcgcctcgctgaaaattaatgttatattgttgggagacgtattcactcagcaaacaaaaaa

SEQ ID NO: 117338 - DNA, 252 bp, Glycine max
ttcatagtggtttatacgaacataatttttgattttgagaaaacagaatatccttctttatgtattggtcaatctaaataacctatattaacacgcatccaccatgtattatgacatgacttcatgttttatgacatggatatccagttcattacctgatcccgattttctgtcataattttcctcaaaggatgctacaacaatcttattttgtttaaatcattcccgatttgttgacccacattcatttta

SEQ ID NO: 117339 - DNA, 405 bp, Glycine max
agcttcttggcaatcctcattccagcgatcattttggtttttgcgtaagagtttgaacaacggctcacaaatggcggtgagctgcgatatgaatctggcaatataattcaagcgtcccaggaagccccggacttgcctctcagtacggggttccggcatctcaaggatagccttcacctttttggggtctacctctatccctttctggcttacaatgaaaccaagcaatttccctgatttgaccccaaaggtacacttggcggggttcaaccttaattgatatttcttaagcctttcgaacaacttccgcaggttgacaaggtgttcttcctcggatatagatttagcaattatgtcgtccacgtagacctcgatctcttgatgcatcatatcatggaacaaagc

SEQ ID NO: 117340 - DNA, 415 bp, Glycine max
agcttgaaacccttagttttagtttttgtttgattattttgtaatgccaaacatgttttatagatatgacaattgtattgaatgtttttcgattaggcatgagtgtgatatagtctaagtctttttcatgcttagtgttgatcaaatatgaagtaaatgaagtattctaattctctaagtttcccaagttaaagcaattggacttacttctacttgaaatttggctagaagcatcgaattaaccgatttccttacttggtaattgagtgcccaagccagcttcaaaagaaggaaggatttgtagcttacgataatccattgactcatttgataatcgattgcccaactcctagaaacaaagaaaagctttgtgtgattctataatcgattaccatatgtggcaatcgatttccga

SEQ ID NO: 117341 - DNA, 346 bp, Glycine max
cctgagctgcaagcacggctcttatagctttttgagacccaaccccatccctccgatgagtgattccaactccaaccaagaatagcctgacctttttccttccatggtgtgctcttgattacatttgataacatgcaaaatccttttgctgcaatagaagtagatcgttcgattttcggctatactaaatacaccgtttctatttattccggcgggtagattatagtaggttaatgccgtaactatctaacctgcctatgccctaattgtcgtgcgttcttctaatccctcttgaacatatcaaaatgctcggaagggtggtgtgttccattacaggtgcgctttt

SEQ ID NO: 117342 - DNA, 290 bp, Glycine max
agctttgttgggcaacaatgttttattataaacaaagaaagcctcgtgagaccaggagagaacacgcttctgaattttcttttcttttggctgaccgacgagagagaaccgctcttggttatttttctaccaaaaggggacctcctcttctctatcatcctattataaactatgccacatgtctatatttgagtggagcaaaaacggcccactctcccttttgactgagacccctactctccccccacaaggagaaaaatctgccctttgacccgctaaaatcctgcatc

SEQ ID NO: 117343 - DNA, 313 bp, Glycine max
ccggacttaaccacgcgctcaacttaaacacatatttttttctggccaacctcatacatggatttagttgaaaaaaattacactgacgcaattgagcaaatttactacacacccatattcattcaatttaaaacggatacactaaattcccaacaaatcattttcaacccaaatgcctacagacttttgtacttgcgcttgatattcttactcactaccttttacattctaagacactccgctagattattcctctacctctttaccacaattcaactgccatcaatgtaaatctacttttactacctaccta

SEQ ID NO: 117344 - DNA, 401 bp, Glycine max
agcttgatgtcgtacaaaatagactatgttgacttaaatgatgatcgaacatgtacctttgtttatttgttatgttaacataaaaatttgttgcttattcgaaaaaaaaatcattgctccaactaaaataaagtatgtaatgtgccattattttctcctatttcttaaacctttttgcaccattttaattattgattagtcttaattgtcaaattaattagacagttttattatttgggctcattcaactaatttgatgtttttaatctaatttcaagaattaaggaaacattgggcatgaatccaaaattgggcatggacttgaagaggacagactattttattctaccaaattttatcttatctagatattatttagatttgatctcatctagatatta

SEQ ID NO: 117345 - DNA, 138 bp, Glycine max
ttttttttggtaaaatcaaactacgtttttatttgaaggaacacccgaataaaaatgtgcaggtagctggccaagaacggaacaagaaatggcaccagaaagagaatcgctttatttaccaaagagcataataggcaa

SEQ ID NO: 117346 - DNA, 279 bp, Glycine max
aatttacattgtaatctttaagaaggcgtctactgtgcacatattaaaactaaactatatatatttccaatcctaccataaattgtgagatttatatacattttggaaaacttttctatacaaaaggtagtccgtaaaatacgacttacaagtaacaataataaaagtatggctggtttattctcgaagatatcactattattggacatgcatcagtagctattcatacattaattgacaaaactaagctttgcatttgacatttgtgctgtaagtgaa

SEQ ID NO: 117347 - DNA, 430 bp, Glycine max
gccgctgcagctgcctctgccccggctcacctgtttttatatattaggaagacgggagaagaacgactctaagctttccgagtagaagtaagaaaactccttaatgcttactacctcagaacacccctatcctccacctggctcgccaatgacaaatggcgggtggcacaaaccctcttatctgaatgggctggcgccaaagatgctatcctctgcccaacattgacatgctatccgatggagcgtctgggctctaggtgctgagcattcttatacacttgttctggatacaacttgattagaatgcacgcttgagacgaggagaaaatgagattcatctctgaagaagccaacctctgctacacggtcatgctctcttgcctaaaaaatgcagactctacattccagatattgatggaccgagtcttca

SEQ ID NO: 117348 - DNA, 278 bp, Glycine max
ttgcatctctcttagatcattcaaattagcatggggtgattgaccttcaaaatcaatactagtaaaaaagtggagtaagcaatgaacaaattccaggtctctactgctaaaagtgcaccatgattacggcaagagctaaatgttccaaatggaacattcaatcgttattgggcatcatatttgatgtctgcctttgagggtgaaaggataatttatgcctgctattctgtacaactaatcacaggatgaacagaatttttgggttgactctacaatca

SEQ ID NO: 117349 - DNA, 427 bp, Glycine max
  unsure (1)..(427): unsure at all n locations
gaccctaagcaccgcggctgcagcttagcctcaaaaaatatatttttttttatntctnataaagcaaaaagatcacatttatttaagaaatgtcacatgtattgacaaaaggtttaatatataatttttttatataaaataaaatatttctcttaaaatttattttacaactcacttatagttggatcgatcttgatagaaaaaatcaaatttataatctttttctttttcttagtcattcaacaaatgttatatctccgtaaatttgagcattttgcacaaaattttaagttcaaatttttttacattagtatatgccaaagttaataaaattctgatattcatatttatatatgttcacatttagaaagttctgctcaccttaatataagctgctgatacttaacattatgctgtagatgaataa

SEQ ID NO: 117350 - DNA, 286 bp, Glycine max
ttttatttagactagataactatcaattccctgggaacttgaaccagataagtaactaaaacccagattccgttcttttttcccttaaattgttatcatcattcttaccattcgccagcaacattcagaaccaattttgaaagcattatgatgaaaatattaacctccatgaacgtatgtcaaaactaccatatcctaacccatcagaattgcttataacagttacaaaacctcatgaggacgagcaaccattcattgggacagcgggggagttatccgaacaatg

SEQ ID NO: 117351 - DNA, 458 bp, Glycine max
  unsure (1)..(458): unsure at all n locations
gatccttgagtcacctgcggcatgcaagcttagccgaattcagatcgaattgaagttggtttatctcatccttggccaacttagtgggctaaatcagcctcagatgcaagggttgggcgctaagtgcttgagactcgcggcttagcgcatgaacaaatatgagcttagcgcgaggcttgcgcttagcaaaggactgattttttagaaaatattttctgagttatttttttttcagtcccttcctcaacaacttgaaatccttatatctaacattcagagataggctgatatattcctatgtacatattatgtagcaagttcccaatgatctaatgcatgaaaacaaaaattacagaaattaaaactgggttgcctcccaggaagcgcttctttaatgtcattagcttgacgcttttacctcactgggcgatcttatgntttggttcttactttcgaaa

SEQ ID NO: 117352 - DNA, 453 bp, Glycine max
  unsure (1)..(453): unsure at all n locations
actcaagcctccatcaagtggtnatcagagcacaagagcttcaagttgtcatatagggtattggaaggaggattggtgccatccctcgaagaatttgagtcaagatacaaagggccaaccaccttatgagctattggactaagaagcactccaaattgggtgaatcaccaaagagagaaaaaccaccaaaattgaggaccgttttgcaattttgttattgacaatttactttactttcattgctttcaaattttgttacaaaaaggcctttcattggaagttagtttggagcctccaatatggcaccctactttcctttgtgtgttattatattaagcaattttcccttaagattgtgagtgctttgttgggaaccttaaaagttgtcattcaaacactcaatagaatccgctagcttacatttcttgcttactctcataagcttatttcttt

SEQ ID NO: 117353 - DNA, 400 bp, Glycine max
tttagcttcgcagatttattattaaaacatgcaagttcaaagagaattggaattcatttttttttacctcgttccccacctagcatgcagctctaaaattatgctttcttcttgtggtggtgattgacccttctcgaggtctggcctcaggtaattcacccatctcaatctgcagctctttccatttctttttagtcctgttaagagaataataaatgatcaatcatttggacaaaaaaaaagatgattaaaacaattatgaagaatgatactcaagagtcaagagttaagaataataaataacatgatcccaaaaggccaaaagaaaaacttatggtaaagggtagtcaatttactgagtcgaagttggaagcaatttaattgctgtgtcacttgtatt

SEQ ID NO: 117354 - DNA, 413 bp, Glycine max
  unsure (1)..(413): unsure at all n locations
ctgtgcccttaccactgtatagtaatttattaccccaatttataacttttgttgatgtgggatacgaaacaaccattggagaagggaaaataaataattaatgtgaaaaattagtttcaaaagacttgagatactttactcttttaacccttggaagaaagggaaataaatccccacatatgcacatctattctcttttatgctgctttaatacaactactgattctagatctataattaagtctccaaagacaagttgtacgattctgatgggatacaagttaaacataattataatgattagtcttgtgaaagcactgattttccaaatattaaacgaaaagntaatgaatgaacgcttatgaagtatctagtgacttttctttcttcactaggaattcgagttataagaa

SEQ ID NO: 117355 - DNA, 446 bp, Glycine max
agcttattacgtgttgatgattataacactcacacacacacacacatatatatatatatatatgtgtgtgtatgtatatgacttgttaaaataaattaggaattaatagttcaaataataaaattaaattgaaggaaattaatatattaagattcaacaataaatactttcaatgaatttttagattaattatttatgaactctctttaattgaaaataatatagttcgatttaatatatacatgttttgtgccatgtaaacattaataatgtgtgatgtttatatgattgatgaggtgtgatcacatgttgtgttgggattataacattgtaattgagattgagtgtttgtgataaattgagtatgtgttgaatcgtaagatacatgtgtattgagatcttttacacattgagttgtgagctatgaactggtcaatcacacaact

SEQ ID NO: 117356 - DNA, 417 bp, Glycine max
  unsure (1)..(417): unsure at all n locations
tctgacagaaagacaaagaaganaattcttcagactgtctgcgagcgctggaggcagtttaaatctgacttgactaggaaatgggcacttgcagccgacaaggacggtgtggacgacattgtctgtgaaaaatacgacattagcaaggagaaatgggcctagttttgtcagacctgcaaagacccctcgtgggaggtatgtactttgtcattctagttgttttccacaacaaaatcacttcttataattcattgtagtaatcattntcattaatgttcaacttttgcaagatgtgcggaaaaaggcacatgccatccaaaagcaaaacactgcctcccacgtgttgtctcgtgtgggttatgaatatttataacaacaactcatggctgataagacaagaaaagtctggaagaagct

SEQ ID NO: 117357 - DNA, 324 bp, Glycine max
catgcagctatataaagtagaacgaagtattttattcccaacgaggaaacaaagggggctaactaagtatcaaaagcacacggctaggcgcccaaagcatgagaattgcggaatagacgcacgaccacatacgagacttacatcgcggatagtacatatacatggaccgatattgtatgataaatcgccagaatgaatatttttaagggcatatcataacgcacgtgaattatttataacttaacaccaaagaaaggcggatatatctttaagtccataggagtgaaagaggtggctagtacttactcgctgaaaacaccatag

SEQ ID NO: 117358 - DNA, 422 bp, Glycine max
  unsure (1)..(422): unsure at all n locations
tgaagaggttggcctccttggagggtctagaagcgctctattctgctgtgatgtgagtgttgcacagagattctattggacgagaatgaaatgaatattaatgatttgggcacgagatagacaaagagaaaagcctggtggcgttttgtgagctgcaaagcaaagcgaggcaaccctacaacgaaagtgtgcgcttatgtactgtgtctaaccatcaaattaccatttactaccacacaagacccaaaatctaatgtggtcaaatatttatatttattcgacaacactttttatgtcattttcaaagaactattgcatgaggagganatttatcataactacttacttataatttaaatcttaaaataagtgtagacatttgccttatttgtcttctaactaatatttaatttcaatcttac

SEQ ID NO: 117359 - DNA, 414 bp, Glycine max
agcaccgcagctgcagctctacataaactataattgttttttttctttccagacgggggagtggtgcttgagcctgccatcacatgaactctctcatggtggctgccagatgcttcttatttcatgtaccattctaatgtttgacccacggtcgatgttacctgaggactgcaagcttcgagaagatctcctccaacccctgaaaaaacaatgcttcaattaaatgaaggcccccatttgtaaccccttccaagaaaagaaatatttacctcttgttggtcagaaatgaaagcccaaaatctgttcctgaataccatctaagtcagctctcaagagatcaactgacgcactctcaagagaaataattcttaaatgccactatatcgtaagcaagaggaaacatgggaatgttat

SEQ ID NO: 117360 - DNA, 357 bp, Glycine max
  unsure (1)..(357): unsure at all n locations
ngaactacccgagcactcgtgcattcatccaatgtttcattgttcccttctaaagccctttattggaccactagacacggtgcagattgagaaactgccaccaagggcggttgataatcagccagttcccatacccttggctattctgggccacaagactcttccgactaaccacgggccaaagcagctggtcttagtgcagtggcatggacttcaccctgacgaaacatcgtgggaagactggtcacgctttatgagctttatcaccttgaggacaaggtgttgtttgaagcacgccggaatgttacaagtagcagctatgaaccgcaagcgaccaagcctcacagtgataacatc

SEQ ID NO: 117361 - DNA, 436 bp, Glycine max
catgcaagctttattctacacctgaaaaagatgattattattttgcacaaaagagaaagcttgcgtgcaaaaaatttcatgtaggtggaccttcttctagtaattctgacatacaacagcctcttatccctcttccattcccacctagagcaattccaaacaaaaatatggaagaagcggaaaaggagatcttggagaccttcagaaaagtagaggtgaacatacctctgctagatgccatcaagcagattccaagatatgccaagtttctaaaggagttgtgcacccacaaaaggaagttcaagggcaatgaaaggattagcataggcagaaacgtgtcagcattgataggtaaatactgtcctcacattcctgtgaaatgttaggacccaggtactttctgtataccttgcattattgggaacaataaatttga

SEQ ID NO: 117362 - DNA, 416 bp, Glycine max
  unsure (1)..(416): unsure at all n locations
tctaagcttgagcagagtaatgagaaaatgagtgtctaatgtgaatgtaaagagccatttatagggtgaattgagtgttgagaggtcaaattttgaatcggtggagttttcaccttaaaaccagtttggacaagtcttaatcaatgttatatacttgattgagatgagagtttaccccaaacttacccaatattcatttttacctttcataccttgagaattcactaaattggtggtgttcggatacctataatatgatttgtcttggtctgaagtttgctattggtttaaatatgatgtatacatgatttatgactagtangatccaatttgatcacattggttgtgggcaagttggatatcgaaatttgctattttatgcagaatatagctcgtataattgttgcggtattttt

SEQ ID NO: 117363 - DNA, 402 bp, Glycine max
  unsure (1)..(402): unsure at all n locations
tatcatctaagagcatgttttctggtttgatgtcacaatgaataatgtttgagtcacaatcctcatgtagataagccagtccttttttgttcccagtgctatgttataccttgtatcccaatccaacacaaattcctctttggtcttgttgaatatccatttatccaatgaaccattagccatgtactcataaacaagaagtctatgtatcgtagaagtttgtcttcaggatgcaagtttgccattacatggactgatccactttgtatactagcttcctcattcaagattataacttttcttccttcatgcacaatagcctgttctagtcctagtccagaagctatgtgtttcactcccatgatgtcatccttcgggaccagtntcatctgtatatttgca

SEQ ID NO: 117364 - DNA, 381 bp, Glycine max
  unsure (1)..(381): unsure at all n locations
tatcagtacaattccgatgtggcttccgatcgcactcagctgcagaatatgttccagaaagaaggcgaaacctttaaagaatatgcacagtggtggagagacctggcggcacaagtagctcctcccatggttgagagagagatgatcaccatgatagtagacactctgccagtgttctactattgagaagctagtanggtacatgccgtccagcttcgcggacctagtattcgccggggaaagaatcgaggtaggattgaaaagaggaaaagttgattacgtttcctccacgagtgcgaatgccaaagaatcgaggcacaggngcaaaaaggaaggaaggagatgcccatgccgtctcttcaacgcccgcgtgggtcaaac

SEQ ID NO: 117365 - DNA, 441 bp, Glycine max
gatccttagagcaccgcggctgcagctgaagttaataattttttttttattgcagaaaagactcctctctcatataattatttgaacttaattactataaaaagtgaaattagttccagaacaatctatatgtaaatattaaaaatttcatcatcaaaatttagtgaacccagaagtagtgaaggaaaaaacaattttctataatcataatttagtcactaattcatccaattttaggtgcttatccttttccacaagctttttgaaaaaccaaaaggcacattcaaaacatccaaccaatatcaaacttttacaccaccaagctatcagcaaatatagcacctaataattagaacttgatgaaaaataaataagaattctgcacaaaggggtatcctaagcccaactacatcaagatatgttcatcaaagtgaagaggac

SEQ ID NO: 117366 - DNA, 429 bp, Glycine max
ctgcttatagccacttgtacttctgctctcaaagattccctttttcctgagaaaatcgacctccctcaagagggaagtgactctcaaagagtgtcagctgtgaaggcttgtccatattcttactgctcactttacggtcaacgccacaccaatctgcctccactgaagcgacttgtgtcaatgaggaggcgcacgttgaacagccaaaagccaacaaaaatggattgtcaacctgacactagatcaaagcagattggttatgcaaagaaagccgctcagaaaactcaaactgtccacaaagaagatggaagatctcattttcagaacaagagatagctggctaggggcttatggattatgcctcatggcactccagcatccacagtttctgaaggtgtggaatcaacatcaacagatagagtcgagttt

SEQ ID NO: 117367 - DNA, 202 bp, Glycine max
  unsure (1)..(202): unsure at all n locations
tctaaaagatcatgtgtctaagggtgactttgagttgagttcattgatagtgaacatcaattaccagacactttcactaaacctattgctagagatagattcttttatattagaaatgaactaggcatattggatacatctagcatagaatgacatcttatttgcataagggtgagtttcatnttgtcattcatagcatata

SEQ ID NO: 117368 - DNA, 361 bp, Glycine max
  unsure (1)..(361): unsure at all n locations
attttttttaaataaataattctaggtatattgttctctttataaaaaaaatatttttttaatggttttataaatagaatagatataatcataatgtatgagtttaataaagtaagtattttttcaaagcagtaaaataagtattataataataaacactaatccctaattttgagaatggttaggaaaaaaaattattcattacaagaaaatataaaatgatgatttaatatttatttgttgaatggtgaanaatatctcataaaatatacttattaaatatttattagacattnttataataaataatatatacattttctgaataaatgtttttgcatgtaaatattttatttttata

SEQ ID NO: 117369 - DNA, 85 bp, Glycine max
tctgtttttagagttggaacacagattccaatggtctatttggataagtggactcatgattctcatctggtgcagtcacaagcat

SEQ ID NO: 117370 - DNA, 358 bp, Glycine max
atgacaaccctggaaaataaaactgacctgttgaatggacatgtgcatagatatctaccgatcaactcaacagttgctttgcactatgcaaaactgctaaaccaagtgcaattcgccggaatagaccttgagatcccggtattacttttggaagttattgtttgaagccccaacaccttgaggacaaggtgtttttgatggggcaaggaatgttaggatgtgataaggaaccaaaggcagcagcagagaacatattcacgaagccagaaacaagggtgtaagcagaggtgtaagaagtaaacaaaagctcaaaagaagaattacgaaacctttgtaccttaaggatttcgtatgagca

SEQ ID NO: 117371 - DNA, 362 bp, Glycine max
  unsure (1)..(362): unsure at all n locations
ctgagagaagaatttcttttgggatctctatggtgctctgactccaagagcccctcaccatgagcatatcaccctgcatagctntcttctcaagctcttcttccaccttttcttctcactgatttcagattcaccggtgatttctccatctgccttcatgatcatggtcctcctggttggacagttagaagcaatatgtcctctgtcgttgttggataatgaggcaaaattatgcttggttccagtgctgggcgctgctgactttccatgtggagactgtgttgataggctggataagttgcctccctccttcttggatctattggtccagttctggttgaaggttgtggatgagttccttc

SEQ ID NO: 117372 - DNA, 411 bp, Glycine max
agctttcatgctcagggatcttttctggcttcttctctgacttgccacatgaggtcgccgggttgaaaggctcgtggctgaacctttgtattgtatctcctggatggtttcaagttccaccctcatattttcttcattttgttgttactggaatagtagtctccttgtcgatggttcctcgacttcaacgaagatcatggcatttgtgccatatgtgagtcagtaaggattttcgttggttgctgtttggggtgaacaatgatacgcccaaagtatgttgtagagttcttctttccatagaccctaagacatatcgaatctagtgtgcagggccctgaggatgactctgttagctacctctgtctatccgttagtataaggatgttagatagaggtgactaggtgcttgat

SEQ ID NO: 117373 - DNA, 432 bp, Glycine max
  unsure (1)..(432): unsure at all n locations
tcctgagtgcgcctcgtgtttttggatgttntgattgcgctgcagcaagattcggangttatcttcgaagaatgtgtctccgaattgatatcaattttcgaatgtatatttatcaattaaattatttaatgctccttngttgctgcatttttttgtttatttaattaattatttagataagatcttatcgttattattcgcaggagagtaaaactattgctctcaatgataagaacgatgatgtttatgaggcgattcaattcgaaacaccagagcttgacgcgttcttggtgagattcttctttctaattttgtagttatataatataaccttctgtgttttaagaaaattcattcaatcgaatcaatctttaccttcngttnttttatattttatttctctgaatttaaaggaaaatgtttatgtcactg

SEQ ID NO: 117374 - DNA, 251 bp, Glycine max
  unsure (1)..(251): unsure at all n locations
agctnnatcttttttttgtatctctatatctttttattcaatgnctaccactgggctataagaatctgaatatattgcttggcaaatttttagcataaaaagtcctggaaaatggcattaaataatttaaaaagcattaatggaatcagatttgagacacatgaagtgcttatcctgcttcattatttggccatacatgggtataaagtggttaaaacaactatcaactcgaaatcaaatccaggaaattc

SEQ ID NO: 117375 - DNA, 424 bp, Glycine max
acattaatactgtgagctttttattccttttaataactgccgggtatgtttaaagatgaatcatcactgtcaatttggaaaaatttaagttgaggacaatatatttcttctggaagctcatcaatgataacactgttgcatataaaaatagaagtcacctctcgagttcaggccaatcatcaagttttccatttctcaaagtaaatgcattgtgctccttctgtgctatagataaagctgcatctcgaaccagatcatgcatattgaaatgaatactagaactttcatccaacactatacctgagtttttcaacctttggattgatgtagatactttgcctcgagctctcccaagtgagtagacccctttaaggtttcccaaccaaagcatacttcacaagtcataataggggtgataaccatt

SEQ ID NO: 117376 - DNA, 464 bp, Glycine max
  unsure (1)..(464): unsure at all n locations
aagtcacctgcggctgcagcttgcattggaatgcgaaagcctcttccatcattaggattagtacctgacatctcanacaaacaaatcaaacgtaacaagacaattatagttgctgttngaatacctcacccactcaagtgtatcacacaattatggcttttctctaatgaaacactcttgccttttaccactctaattccccttgagttcttaggcaattcaagagattatggccacaacaaagaacaattcaccaatatgtgtaaggtaaggctagagagacaaggaaaaggttaaccaagaaaaaggctaacaatgtttttaggcacaaatgaaggaaataaaattcagaatttaggaattcaagtaacaatccttcatgcaaccaatatattaccttaaagagatttntttttttaaaagttcttcaagcatgaaccattcagcccaattttttttttttt

SEQ ID NO: 117377 - DNA, 338 bp, Glycine max
  unsure (1)..(338): unsure at all n locations
tataataaatcgacgcgctcgaaaatgtacatcggaagctctcgagaaatttaaatggtcataacatttaaaacggatgtctgattaaagtgcatcacatacagagacgctcganaatgaacatcggaagctctcgagaaatacagatggtcataaactttcacaccgatgttcgattcgggcgcataatatgtcgagatgctcgacattgaacaatagaagctctcgagaaattcaaatggtcataactntccacacggaggtcagattcgggcacataatcaattcagatgctcggaattgaaccacggaagctcttgagaaattcaaatggtcat

SEQ ID NO: 117378 - DNA, 390 bp, Glycine max
gctgcagcttgacctaaaccctacgcttatttttttctgtaatgctgggcaagggcatttggggcacgccctgttcaaatcagtatagttggtgcacattcacatttgtcggtggccttttttactgggatgatgctggccagccacgtggagtatctgacttctctgatgatgttggcatggagaaaattgtccacttcttctttgacaactttgagtcgttcttctcccatcttccttttcttttgtgatattgatttagcctggggacaaatggcacgcttgaggcatataatgttggggtggattcccgacatgtcagctaggtgtggcagataatgcgtatgtgctcatggttggtgaggtccttgctaagttgtatgcactgct

SEQ ID NO: 117379 - DNA, 201 bp, Glycine max
  unsure (1)..(201): unsure at all n locations
agtgcacaattcaccatttnttgttggcgcttttttaacataacgatgttggagagccaggtggaatatctgacttttctaataaagttagcattgaggaaatttgtccactatttatctgacaggttcgcatcgatcttatcccatcattgtttttactgtgatatggtatggcctgcggacatatggtaagtttgcggt

SEQ ID NO: 117380 - DNA, 416 bp, Glycine max
gcttaactgatttgacatttttttttttttaacagggaatcaatacgatatattggtaatcgattactactgtatttgaatgttgaaattcaaattcaattatgaagagtcacatcttaccagtgacaagatttgaataaaaatcaccagatgtcaagaagagagagaggagacgccacttcaaggagaagatgagtctagaaaaagctcaccgccataggaggccatggataagagcttggacgaagagggagacgaatgaagggagaggaagagaagagcacgaaatcttgtgctctaaatgagctttgaaatctgaagcttaatattcaaatgaataaagtctgaaaaaacgcacacaccaggcctctattttaaccctagtgtcacaccaaattggagggaaatttgaattt

SEQ ID NO: 117381 - DNA, 382 bp, Glycine max
cttgaaactacgctttgctcaccttttctccccttggcacataattttcatagaatcggaataacacagtatacaatggagagcagatatagtatagagtattaatcaataagccaactcataacaaaaataatcaaccagaattcaataacaaaaatgtcacaaccaaaaatatcaagactgaattaaaaaccaagataataagcaagtacttagcataataatgtaattctaagaaactaaagccaaaacacggttataaagataatattcagaattaaaatctaagaagaggagaggtggggagatcgaacttgacaatgtatcgaatctctcagctggtagacaatgtcatccggcaagggaattacgagcaagggca

SEQ ID NO: 117382 - DNA, 99 bp, Glycine max
tgtctggggtgaacaatgatacgcacaaagattgaggtgagaacttacttcataaactctaagacatatccaatctaagcacaagtccctgaggataac

SEQ ID NO: 117383 - DNA, 271 bp, Glycine max
  unsure (1)..(271): unsure at all n locations
agctttatgcatggcccnctattgtggttttcttcttctagactcatcttctccgtgaaagggcgagtcctctctctcttgctttctccattccgttgccattcatcttgcaagaagccaaggaatccattgatgaataagatcctaggcctacaagctccaatggagcttgcatcacattattacccaagcattaggaaggcatcaatgtcagattttgcttggcaagctgggcattcttaaccctaatgccccaccttggggggggggg

SEQ ID NO: 117384 - DNA, 392 bp, Glycine max
  unsure (1)..(392): unsure at all n locations
cgcctatataananaatgtgagatagtttgtatttttagatatttatatacaacagatgtgaaattatgtttaataaaatatcttcttttaaaagaagcttaaatccatatctttttaacattatgaatagaagtatgtgtgagagcaaagtgtgccattaacaaactaaaaaggttgaagcctaattgtagactgaagaacaaacagagagtttgttctttagagtttcactaatcaaaatattggtctcgatgaagaatcatcttcacaccattgaagaaaaattntggtgctataagagctgatcaacatgcacaaagtttcttattcaatataaattaaatgccaagtagattcttatgggctggtgcgtgtatgtttcacccttttt

SEQ ID NO: 117385 - DNA, 290 bp, Glycine max
ggtaaaaagaagagactcaggttgtaaaaaacgctgccaaaaaaaaaaatgcttaaaccaatttggtagaagaacccaaaaggggggaaggcgaccaaaaataaaatcccaaagggggaacaagaaacaataccaatcttgatagaaaaaaagtagctttggcattggtacctgtcgcggaggatcaatagcagggtctaaactttgcctcaacccacaagttcacagctttgaaaacgaaacataatataaaattgacaaggtcccgaacacagaaagcaacgaagctt

SEQ ID NO: 117386 - DNA, 335 bp, Glycine max
  unsure (1)..(335): unsure at all n locations
caggacatggaatgaaaattactcatgtttaaatgccgttactagttccctttttagaaaagcataagataacatctatatagtcaattgttaaaagctcatcanaccaatatcccctcagcattgactgagaatttcaatgtaaactaagttcaagttattttgcatcatgatttcagccacaaattatatcaataataatcaaatataagcatacaaaaaaaaaaacaaagtcttattccactagatgatatcggctacatgaatcacacgatgtcatttggcacgggtaaaaccaaagttccaaaaatattgagcatataacaatacaaaat

SEQ ID NO: 117387 - DNA, 409 bp, Glycine max
  unsure (1)..(409): unsure at all n locations
ttaagtcactgcggcatcagcttacagaaaacaagattgtttcntctttatatgagggctctatataattttttgttaaagggcaaaatggtccattcataaaaattgctgggtgcaccataantattgctcgtagcacctttaatatcacttttgagacaactctgacctcacacatatattaaccgacatcttctacctccccttataaatatagctgcaccccttaaaagaacccttcccataatagaaattctgtacttttattcaaagaactccacactccattaactttccacgttaatcctctatacccaatgactatttatctataaccttatacatatttccccctcaaactctctccccaagacagaactcatacacctatatattttctatatttctt

SEQ ID NO: 117388 - DNA, 436 bp, Glycine max
tagctacacatacctctctaatagctaagctcacctccttgagatgagaagctagagcttatctacacaccccctataatagctaagctcacccccatgactaaaaacatgaaaataacaaaaaaaagtccttattacaaagacaactcaaaatgccccgaaatacaaggctaaaaccctatactactagaatggccaaaatacaaggcctatacgaaggaataacctattctaatatttacaaagataagcgggctcatacttagcccatgggctcaaaatctaccctaaggctcatgagaaccctagggcctttccttggatctctaacccaatctacttggagtcttctagccaatgccctttggggataagattgcatcattcccttcaccttggaaaggaattgacctcaaatcccgagttcatcatactc

SEQ ID NO: 117389 - DNA, 237 bp, Glycine max
  unsure (1)..(237): unsure at all n locations
tgcaacctgcgggtatcatggnggtaccccggggcattcaatctaacagtgtgtggccctcaagcataaagtccaaagcttgatcgacacagggtggctaacattccaagaagacgggcctgaatgtaaagacaaatctgcttgccaatcatggaggatcggcagtaaacacaatagaggaatacggactttagaggccaaagcaaattgaagaagtggtaacctctaggaggttta

SEQ ID NO: 117390 - DNA, 392 bp, Glycine max
  unsure (1)..(392): unsure at all n locations
ctatagaactcttgagctcgtgtatagttgcattctactaatatatggaattgtcctctantttgcctgagaataacaattgcttgtccacaacaacgctggagacggcaagggacaatggtctttcaaataaacctgttttacatgaacaaacattatatcatgcgatgaccgtgtcaaacgaaccagccaagtcattgcataattgttatactaactatattcaatgtacctgaacaaaatgatttccaaacacgtgaccgacacatatcatgtggtggccagaagaatcaggtggtagttgacttctaagagggaaaaatgtcatgctttgttgtctggacaacgattcaatgattacgttataccgngaagccatcacatatcccatg

SEQ ID NO: 117391 - DNA, 305 bp, Glycine max
  unsure (1)..(305): unsure at all n locations
agaaacttcctgagaagcgcattgagaagtctgncttgagaatctagagcgtaactgcacacgcctctggaagaactaatctcgcgctctcgagaggcgatcttaataagatccgtgaagaagctggatgcttagctcacatacccttctaatagcgtagctcacctccttgagaagagaagcttgagcttaactacacaccccctcggatagcttatctcacccccatgacaaaatacatgagaatatagaatagtcctttttactaagacaacttcaaatgccccgatatacaaggctaaaac

SEQ ID NO: 117392 - DNA, 356 bp, Glycine max
tagaacacaaaagcgttattgtttataaaagcttctttatatacatcagcttgtttgttagtcagactcatcacttttacctactggttgtctgtcttacttgccttttcactatattcagcctaaacttaggtgaggtgtggtctaaaccatatatgatcagagtgtcgttcaactgtgcctaatgtctgaatgtgacttctgtgttatattagtgccctgacggggatactcggatttatgcgagttaaatctaaaatcttgatgatatggtgcgctttcctgcgaaccgtatttcccttgacaaatttgtgtatataaaaagcgggctgaaggaatctcaggggaacccacca

SEQ ID NO: 117393 - DNA, 432 bp, Glycine max
  unsure (1)..(432): unsure at all n locations
tgcaagcttcattccttttcactcatatgtccttgtctntgatgccacatggttgaattattgatagcctcagtaactgctaccatatcctcatctgcaatcatgtaaagagatcctcgcttctttccacgagccacaatgagattgccttttgttaccttccaagctccatctccaaaagtggtgtgatgtccctcatcatccaactgccctatagatattaaatttctctttaaggcaagaatatgtctgacattgggcaatgtccatagggatccactggaagtctcgatgttgatatcacctcttccgacaatgtcaagagattttccatctgcaaggtaaacttttcccaatcttccagaaacatagtttgacaataaattttttgagggagtagtgtggaaccacgcacctgattccatgaaccat

SEQ ID NO: 117394 - DNA, 403 bp, Glycine max
atgatctattggcttatgagttggtccatcctctctaagtacaatcttatcatgagtcatcacatatataactctagcttcacacggtgcagaaatccttatggcagctctcatgttgtcagtgaagacatagggcatttagattttgctgaaatatatttcttgtagcatctgtagggctttctgaagtgtatgtctgaaagttgaaatttaattagaagggtagtcaattatccataaacaaatgatggaagtcaagttttatttatcttaaaagtttgaaggctatacatgcatgaagcaaaaagatggatgatgagtgaagatgcaatgtacttaatacgaatgttaactgtgattaggaaagttaatgattataacataccttggaaacaatcaccac

SEQ ID NO: 117395 - DNA, 334 bp, Glycine max
agcttagatagaaacattgaacacatgattataatctcaaatagataataaaaatatttacatcaagtactcaatagaaattcccaacaaaggaatttagccctccattataagggagcagctttcacaaataggagaagggttttagaaaaaataccaaattacaaagtagtcgggttgtctcctccacctctagaacctataaaatactctaaaccttaattacctaaagtaggcctttgttcttgctacctttcttatttttgccacaattgagcaattagacctttttgtatacgctttttttttggcaatagctaaaaggttttacttg

SEQ ID NO: 117396 - DNA, 349 bp, Glycine max
  unsure (1)..(349): unsure at all n locations
acactcatatntcctagtcccaatgtctcttctgataaattctttttttctacacctatactcttcagtcttttcacagccaattaacacaaacatagtccttcctctactacctgtgtttgtatccgaccttaaaatcaccgtcacaaatctaagggtgggtacacgggcccaagtccatgggctggcccacggggcccgccgttcgcacgggttacgaaccaatttttttaaacggtccatggttatgtcacatttttgggcccgccccgcttaacccgcggactatgcgggtttggcccacagggtctgctcgttccattattattaatctcctctctccatttta

SEQ ID NO: 117397 - DNA, 345 bp, Glycine max
acactaaaaactaagcttttcggaacgtgacattgacactatacacaatgtttcgtctccacaacaagatggtgtattagaaaggtgcaatataactttaatgaatatgatcaggagtatgttaatcaatttgactttacccgtatctttgtggatgtactccttgaaaactgctatgtatctggtgaataagggttctagttaacgcagctccaagtacacctttgtactgcggacaaatacgacaccttgtttaaggcacctgcttgtttggtgttgtcagacagaaataacgatttattctctcacataaacataattggatgctagaacaatcaggggata

SEQ ID NO: 117398 - DNA, 301 bp, Glycine max
tctattaaagtagatgcaccttctaacagtgctatctgtcctgaaggcaatgagaaactgaagttaaagacacttttccctgtgcagtgtactgacgatactactgatcagaaaaaattcatagctcttgacaagacctcatttgccctaactgcaaagttactctcaccaacacaatgtcgcttgtggcccctaatacatgtgggcatgtattttgcaagaaatgtgcttacagatttaatgctgttgataaagatgtcttgattgcaacaaggcgtgttaagagagaaattggtgaatt

SEQ ID NO: 117399 - DNA, 455 bp, Glycine max
cgcttgatggtgtcgagaagaaatcacatgtttgtcatcattttaaaagaggagaatgtgaatgcatgtgtacatgattttgatgatgtcaaaataagaatcaaacaatgctcatttgcttcaagattaatacaagattgttttaacaaacaaagccttgattcaagatttcttcaaaatcaagccttgcctcaaaatgaaaggtttcaagtcattcaaggcacatgttatcgattaccaatacgtgtaatctattaccaatggtttgaaagtgtgtaatcgattacacatcatatataatcgattaccatagactctgaacattgcgaattcataatttaaatgaagggtcacaattgttcaagaaacacaactgtgtgatcgattacactaattctgtaatcgattaccagagaggattttcaatgaatttcatcaacatgcacatcttatca

SEQ ID NO: 117400 - DNA, 434 bp, Glycine max
ttaagcaccgcggctgcagctaaaggagcctcaaccggtgtactacccccaagcctacactccgaatagtccgtcgggcctctccctcctaattcaggtctaacccacaaaacattttaacacacagactctatctatgaattgtacaaagcacacgacttctcaattggtctcaaaataattttatctcatcacgcttgtgattaaactcgtcgagtccccacagtggttcccatcataatactcctcgcacattaactcgttgcttttaaagggtcttaacattaactcatcacccttaaagggtcttatagacgcgtgattgtataattcatagctcacaacatctcaatgcacatatgtattacgagtcaatacatattcaacttatcacatatattcggtcttcatcacaatggtataatcccaagtag

SEQ ID NO: 117401 - DNA, 427 bp, Glycine max
  unsure (1)..(427): unsure at all n locations
cgctgtgcaaatcatatcactcctacatttcatctctagcatgcattttctttctttctttacccactcctcacgtctgggttttttagggaaaaacaccataactaaacccgccacaaggcattcctatctgcaccagatccaaatctagaacgatgggtgatcaagaggagacacaagaaaaaatgaaagccgacatgtcggctctgaaagaacaaatggccttcatgatggaggccatgttaagtatgaggcagctcatggagaataacgcagccaccgctgccgctgtcagttcggctgccgaagcagacccaactctctaggcaactgcgcaccatcctccctcaaacgtagtatgacngggaagggacgcaactgggcacgatggcagtcctcacctgtgatacacaccagcggcttaccc

SEQ ID NO: 117402 - DNA, 366 bp, Glycine max
  unsure (1)..(366): unsure at all n locations
agcttntatataagctgaaccattttatattttagacagttgagttttattcagaaaattagagtttatttcttttatcttagtgagagtgattctcctaaattcttgagtgattcaagaacaccctggctgtatcaaaggactttcacaacctttgtgtgttggcctttgctggaagaatggattttttctttcctttatcttcacccttggtctttcaaaccacaatttccaaaaaatcccctctggccaaaattatctcgggggcataacttccattttacgcactcaaattaagtgatttttgagcctaaattgactttcaaaacgagaccttcacctcgtttggaaatcacttatttggag

SEQ ID NO: 117403 - DNA, 330 bp, Glycine max
tcggagagaggaaatagaccagtcactagtacatggcattgtcttaaaggaggagttatctgcctgctcaagatccaagaggagtttggcccaacacttagaagccatggagcaaagcatgctagctataatagggcagtacaaaaaagagttaaaccagtctttgacccatgaacaaaagctagtagaggacttcacacaagtatacgccgagaaaggatcaagaaggagggtgattgatgcattacatcaagaagcgaccatgtggatggataggttcgcctttaccttgaatggaagtcaagacctcccgcgactactagccaaagc

SEQ ID NO: 117404 - DNA, 383 bp, Glycine max
tcgataagatcgtgatgaaattagatctagatgagatcaaggccatgtcatgtctaaataagagcagaccagataagagtctatgttgttgaataacatagtgagtcctcttcagtggcgagcccatttctggagtcaagccccgtgcttcattaattcctgcaattagagaaaaaacatcaaatcttatgaatgggccgcaaatataaaacggcctaattaatgtgacaatgaagacgaatcaagtatttaaatggcgcgcatatggttcatagatagggagactaatatggcacagtcaggatatctagacatgctcctaagcaccggatgaccataaagaccatttgagggatgtgttgcgtatagtaagggatgaaccc

SEQ ID NO: 117405 - DNA, 353 bp, Glycine max
atgattggttccacttctaaccaaacccaattttattccaaaatgccagaaaatggggggatgggataaaaataatattcccttgtttagatattgtgggaaaaatggaaagtaatgagcaaaccaaaagcagaaaaaacttcccatctcatactccaaattggagaaagagaaaacggcgttttggatgaaatggaatagaaagcattctatgatggaacttagtaatattccattccattcatttctatcactcccaacataacataatatatttctgtaatatcagacttataatgcatgcgatagaattggaacagaaaatacagagttcagaaatgtcaagtcgtata

SEQ ID NO: 117406 - DNA, 392 bp, Glycine max
  unsure (1)..(392): unsure at all n locations
cgctctanantacatngatgttngtatntattggaggatgttgtatgacanttttgttttaagagtagcattccttggtaaaactaactttccaaatgtttgccttcgcaggaaatggcctcgaggaagcttgcctcaaagaggtccaagaaagataaggcggtcgaagggactagttctgctcctgagtatgacagtcaccgctttatgagcgctgtacaccagcagcgcttcgaggccatcaagggatggtcgtttctccgggaacgacgtgtccagctcagagacgatgagtatactgatttccaagaggagatagggcgccggcggtggacatcactggttactcccatggccaagttccatccagaaatagtccttgagttttatgc

SEQ ID NO: 117407 - DNA, 206 bp, Glycine max
aaccaactcttaaaagacacaacaaccggggctacccttgccggcacaagaaagggaacaacacttggctcaacggacgaactaaccagacaattacacccataatgccaatgacaacgagagaaggaagaaaaataaagaaaaagaaagaaaacagacaaaaaatgactgatagggtaaataatagcaaaaaaaaaaagacacaa

SEQ ID NO: 117408 - DNA, 140 bp, Glycine max
tgattcagttcacattttgagacccaacaaatcaatatcaatttccatttggattgctgagaattgaatttaagcttccttactttgagccaaaaaggagaatggttggcacatgcaagtttgtttttcttgagcatgca

SEQ ID NO: 117409 - DNA, 386 bp, Glycine max
  unsure (1)..(386): unsure at all n locations
gcaagcttngtgtgcaccatcgcccgaccgtcttctattctacatgtgatgggtaccccataatcctacaagcttgaaatgaggaagtgttgaaaggtgaaacttcctgcttttattggtgaccacagagtggtacctggaaatatgtcgcgggggtcaggaaacctttgggacgtcaggtggggtgctattgcccaaaaccaagcttgaccaatcccgacccaacccgggcatagtctgtcagtgagaacatgtgacgtacctaatcaggcgagctcctggctgtcaacagataaaaggaaaacaagaccacagagcaaggaggctngtggtggctggccagctgtgaattttgtgtaatatgtggattgtggcctctggtaatc

SEQ ID NO: 117410 - DNA, 427 bp, Glycine max
  unsure (1)..(427): unsure at all n locations
gaacctgatgatacacttncaacttatatttcttcttgccatctcaaggcacatggcatcaaagacgttactcgtgtagaggtctatcactgaccagacagtccttattttggtggacagaagtatgactcataactttatccaataacgcttggtcaccatgctagggccatatgctcagtctactccaccattacacattatgattggtaatggtatcgagattgaatgtctaccaatttgaaagcacgtttcgcttaagctctacggacatggattcactataaatcttcatgtgctacccttatgtggagatgatctagtgctgggtgtgtaatggctcaagtcactggggtccaatcttgacggattacacagacttgactatgaatattaagcaccacaacaagatcatcgaacttcacag

SEQ ID NO: 117411 - DNA, 436 bp, Glycine max
gatccttaagtcacctgcggcatgcaagcttgttggagtatggggcacccgtcatatgtggtactaggtggcgatcgggagatggagcaaatcaactctcccacttccacaaatcaaacataaagacaccatccccagttgcccacctttcaactgagctcacgcactcctacgtagcccttatcctcgttcctctcagcatcgggtccccatcaacccctccaagcttccacaatatccaatcagttcaattccaaatatcatgaactaccctaaaccaagaaaacagagtagaggcaggaaactctgtccaaaacccactcaaataccacagctttccttactcatataccccagtaacattctctttcgttcgattcgttaaccgttggatcgccttggaaaatttactggaggttactagtatataaatata

SEQ ID NO: 117412 - DNA, 434 bp, Glycine max
  unsure (1)..(434): unsure at all n locations
tgtagaatggctagacatgatacatgtcanggcttggtttggttcaaggattatagggatgccccacattatttccatgacacaaatgcaaaaaatgatgaattggaaattttatgcaaaaatggtcatgcatgcgcctatgtggacgctcaagtgtcaaaattttatggtcatgtgatgctagggctcaggattcatttcctctattttagtcaacccaatatttccaaaatatgttcttttatcaatttgtgcattcctccaagtccatttcgggcgtccggngaaattttcacagcattcacccttcaggtgtagacacgttttttcttcaaaaatcggttgatcaatgaattttttttcaaagaaaagttggaaatcatctcttttcaaaagcatgtcggtttttagctagacaactttatttctctttt

SEQ ID NO: 117413 - DNA, 408 bp, Glycine max
ttgggtcattcattactagttatccataatcaattacacagttccggtgaaatcatatatggttttcatgaatctctactttaatcaattatcagggtatcataatcgattacatccgtcttgaaaatgttcccaaggttgatcaagaacactttaataaactaaatcatgaatctaatttattacattgttcttgaaaactttccaagttttgggaagaacactttaatcgattaaaatgggaatctaatcaagtacgtctttggatcatattgatctaatggttgaaagtcataatccatcatagatcacttattaaggtggtccacctaagccttttccatattattaacggtataactagaaaatataattaatattatcttgaaaaatgaaaatgacacttat

SEQ ID NO: 117414 - DNA, 327 bp, Glycine max
  unsure (1)..(327): unsure at all n locations
catcacaccacttccagggtgctggaactacttcacatggatttgatggggcctatgcaggttgaaagccttggaggaaagaggtatgcctatgttgttgtggatgatntctccagatttacctgggtcaactttatcagagagaaatcagaaacctttgaagtattcaaagagttgagtctaagacttcaaagagaaaaggactgtgtcatcaagagaatcatgagtgaccatggcagagagtttgaaaacagcaggttcactgaattctgcacatctgaaggcatcactcatgagttctctgcagccattacaccacaacagaat

SEQ ID NO: 117415 - DNA, 381 bp, Glycine max
  unsure (1)..(381): unsure at all n locations
agctntgtcctcagatcatacaacaattgttcactcataatgaatctgaaggactttctaggcttgtaatgggggtaggcctccaacaaatcgggacttttctatgattcaaaagcttaagttctaggaaagcattcatccatagataaacctttactttttcattcattcacatcccatacttgcatatcctgttcctgaggctgatcttcattaagatccaatgctggaactactgatgaatactgcataggttgttctggcatcgagactggtgtaaatggctgggtctcttcaagaacaggtgcacgaaatggcttatgtatccgatatgtggaagtcccctccccctgagccatgggtgcatctacattcaaataa

SEQ ID NO: 117416 - DNA, 288 bp, Glycine max
ggcttgtggagcttctatggaggctgtatcttgagattcaatgaggtcctttaatggtgattttccaccatggagatgcagcggaagacaaatgagaagaggtgagaggaggcgccatccactacggaataagccatggaagaaagagcttcaccaccaagatgaaccttggataagaagcttggagaggatgcttcaatggaggaaaagaaagagggagagaaagagagaggggggagcacgaaattgaaggaagaaaaagggagagaagttgaactttgagttgtg

SEQ ID NO: 117417 - DNA, 402 bp, Glycine max
tatagtgaatgtaaaagctcatttgtttatgtatgttgctccaaatattttccagctgagaaaatatagcataccttgaaaagtcgaaggtacctgggattgggagatgttagactggcatctgtagtcagttgctagtttgactcggatcccttcaaaaataaatttcaccatgccattccttttagagaacataacttctatttgtctcattttcatttataggtcttgacacttcaattcaatgtatagtgcttgaattatatatagagtgagcttaaagcaaacaatctatctacatatggaccttataaagatggcattcaaaagcataacataagatatcattaaagtaaccattttacaattccatggtgtgttacccacatggatagatgcatc

SEQ ID NO: 117418 - DNA, 427 bp, Glycine max
  unsure (1)..(427): unsure at all n locations
agcttctccctcctttcttggtttctcattttcttcttctctacccaagcttctatcccccactgtagctaaaagaaaagaattctacacaggtagaggtctttctttttgtctaaagcttccttgggtgcttgctattgtattggtaaacctttattttcccttattttgacctctttgttcatttttccaatcccaccaagaagctagtgaatgggtttatctaaaattttattcacgaatcaaaatttgattggagcttgcttttgtgttgattaggtcatcctccatcagcaccaacaaccatagttagtaaacgaaatctcttggatcaccatgttgcttcctttagattctttctcaagaaagttgcaaaattttagggtaacatgtgaaattngaattttgtttagcttggaagccatga

SEQ ID NO: 117419 - DNA, 109 bp, Glycine max
ttagcgaggtgagcaaatggcatggggctagctttaacactagactatgaagaatatcaccatactaagtggtgtgagtttgcctaaattggaactattgttggttaat

SEQ ID NO: 117420 - DNA, 424 bp, Glycine max
  unsure (1)..(424): unsure at all n locations
ctgtagaatgtggtccaccatcggccggttatgagcgttgaagaatttagtcaataggtggcctggccaggagtccagccttctcctttgggagggggtgaggcctatgcagcccangagcctcaacaggaccaggagaacgacattccagagaccgcagagcctacacctcctaaggcattcactntagagtctgatccagttgttgtataggttcaggaggatgttacagcattagagccctctccagtagagccctctccatcagagccctttatttttgaggctgatccagctatatctccttagcctgagccatctgcaccagtgccgaacctgcctctttcacaggatccatcatctgcacctgcactggacctgaatgagcatgcacaggatcattgataggatcaggatttttatt

SEQ ID NO: 117421 - DNA, 267 bp, Glycine max
tctggagtcaatgaacaacgtcaagcttatgcctgcaaccattataatagacctccttagcagcaaaaccaactacagaagaataattatgacctttcaagcaatagctacaatccatgttggaggaatcatccaaatctgagatggacaagtcctccacaacaacaacagtctgtccctcattttcagaatgatgctgatccaagcaagccatatgtttctcttccaatacaacaacctcagtcacaacaaagacaacaagcaact

SEQ ID NO: 117422 - DNA, 463 bp, Glycine max
  unsure (1)..(463): unsure at all n locations
tgcatgatttacattctcgccctttctcaagcaaattcttaattcttcttgacatcatcaaaatcttcatgatttacattctccccctttatgatgatgacaaccacctgtacgttaggagcaacaacaaagaaaaaatatctatntgcatatagtttactcccccttggctttgcaatgattgcttatatgagacagctgaagatttcatatttttcatatgtaaacaaattgtctcataaagaatagataatttttcttactattttatcttttacactttctctcccccttgatcttgaagaaatcttgaatcaaggctttgtttgttgaaataatcttgtatcaatcttgaagcaaaatgagccttgtgtgattcttcttttgacatcatcaaaatcatgtgtacatacattcacaataattactaattgaaatgaaattatgggtcacacaaatcgat

SEQ ID NO: 117423 - DNA, 429 bp, Glycine max
tcttaatcacctgcgctgcagcttgttgagctaatggagatgaggtttataaatgccacgtgagggaaagaaagagctatctgaaaaagtgtgggggctgaatgaaaagagagaacaacttttttggtttaaataaaagggtttctcttttctattattttatttaagcaatgccacatgtctccatttgagtggagcaaaaagggcccactttccctttttgactgtgacccatactcagccacaaaagtgagaaaatctgaccctcaaaacgctaaaatcctgcctcggtttgcgtgtcgtttctctggttccagttcctcgcatttctctgcgtccgtcagggccagttttcgaaagtacgcattatatatatcaaaatgctcagaataaaaccccgagcgtggtttagaggttggtttcgttaaa

SEQ ID NO: 117424 - DNA, 210 bp, Glycine max
  unsure (1)..(210): unsure at all n locations
tctagcacactccaganatcttcttaaatatcccaacggtcagatcatggacaagtgtcttgtgaagttgcagaccaaatttcgagaagatccaacggttaacgaatgctgggcagcgtttttaccgaggtagcttcatgtagctttctctagaagcttcattaggaggcttcctccataagcttcattaagaagcttctagcacactcc

SEQ ID NO: 117425 - DNA, 202 bp, Glycine max
  unsure (1)..(202): unsure at all n locations
gatttgaacctttctctagcctttgctatgcttttcataacttcacaacactgacattgcccatattggtgtagggtccctttgacacctttctaattggggggcgacacagnccgaaagtttgtgatatcaaaattcaataatgaacggcaaatcaatgctttctgactactactaataacaatatttatgtttcttgaag

SEQ ID NO: 117426 - DNA, 429 bp, Glycine max
tactcagctttgcaagctggaatcatttatcctatctccgacagccaatgggtgagtcccgtccaggtactcctgaagaagactggcctcacagttgataaaaatgagaaggaggagctgattcctactcgggtgcaaaacagttggagagtctgcattgactataggaggctgaaccaagttaccaaaaaagaccattttcccctgccattcattgaccagatgcttgaacgcctggcaggtaaatctcactactgtttccttgaaggtttttctggttatatgcaaattactattgctcctaaggatcaggaaaagaccacattcacttgccccttcggcacttttgcctataggaggatgcctttcggcctgtgcaatgcccctggtaccttccagcggtgcatgattagcattttcaatgatttc

SEQ ID NO: 117427 - DNA, 396 bp, Glycine max
  unsure (1)..(396): unsure at all n locations
agcttgggatatttttactatatatgngttgtgtcttcgtttatctctacctgggtaaaaatgtgataattcactcatcatgtgttggttatgtttggatcatgtgatgatcttaaaccttgtgtttgtgagagcaaatgactaggtgaattactttaagaaaccttgtgatggaggactctgagacacaatattttgataggatgtaacattggaacaagagtttttattttaattgcatgacgtatcaaacatgtcattttactttatttgataaacttgaacaagtctgttttaagtcataaatatttctaagaaattttatttggtaacaagtgaagcgaatgtgaacatcacccacgtggactgatttacgattttattgaataaaattga

SEQ ID NO: 117428 - DNA, 438 bp, Glycine max
  unsure (1)..(438): unsure at all n locations
taatcccttgannaatgagggtaggagaattgccctggattcagctaaggactactttccttagcacacttatgttcaatatgttggatttgccctggagatttgccctgaattttctcctttgaaaactattntatttggaaatccttcccaagacaccattgaaccactgatggaggctntggaggaagattataaagatggaaataagataaacgaatcaaggcagtttattgaaggagtattggatcttgaanagagaatcaatagactagatacattgacttagaaattaaatataacannatttgtcattgttgaacaaattattagcttataaaccanatctttaccattggttaatatgttttacttatttctgatacgagcataataaaatgacatgaatgttcaaaaaatcaaactacaacatgatct

SEQ ID NO: 117429 - DNA, 282 bp, Glycine max
gagtaatgatattttttttccatgcgggacagggttcacggtcacaccgaactgatttggaagacccaaagaaggataaaagtctgagttgcatatggaaaaaaaggtccattttctttgatcttccgtactggggtgatcttgacgttagacattgttttgatgttatgcatgtggagaaaaatgtttgtgacagtgtgattgggacgcttcttaacattcaaggcaagacgaaggatggcttgaatacctgtcaagatctagctgatatgggtataccat

SEQ ID NO: 117430 - DNA, 412 bp, Glycine max
  unsure (1)..(412): unsure at all n locations
agctagaggggggcttctcatacccctcctatatctaagctcaccccatgccaaaatacatgaaaatacaatgggaagcttccttgagaagcaaggaaggtagcatccttgggaagcaaggaagaaagcttcattgagaagctagagaggggctactcacacccctccaaaagctaagctcaccccatgccaaaatatatgaaaatacaaaaaggtccctactacaaagactactcaaaatgccctgaaatacaacgctaaaaccttatactaatagggtacccttaacttgtacccttaatttgtagggtaccctacaaacctaanatgaccaaaatacaaggcccaaaagatggaaaacttattctaatatttacacagagaagntgacccaaccttggcccatgggctc

SEQ ID NO: 117431 - DNA, 466 bp, Glycine max
  unsure (1)..(466): unsure at all n locations
ggatccttaagtcacctgcggcatgcaagctttctcttaagtcctaaatgacattttatactangattaactcactttaacccccaattaccactgaatccagatttagccttccaactctcaaagcctcactctttttccactcataacaccacattctcactttctaaccctaggttaactctacccttcatctctagcagttttccataagcaatttcagcacacaaacatcacaagcatcatcataaaaaccctaaaacagaatgggtaagcttgactcacaccaaacatgacaagtttaacatgctttcatcaaatctcttcacaaataactatcataaagcataaacctagtaaaactacccatcatatctcccagccccatacccacgaaaatcatgtgagaaagaagtctacccaacctgaaatttcgaagtcccacacgtagagatgcgcttcacga

SEQ ID NO: 117432 - DNA, 51 bp, Glycine max
ggatcttagtcacctgcggctgaagccggggcctatgaggacttttcatct

SEQ ID NO: 117433 - DNA, 375 bp, Glycine max
tcagatctttacaatggatgaggaggcgttctttgaatcagccagtgatcacaaagttgcaacctcgtcttcaccaaaaaaatcaaaggatggggatgcattgactacccagactatgtaagccaaatcctatgatggagcgctctgtccctccattatcaacgagagatgtactaaggtagacaggacaatcaaactggatgcggccttgcttcccgcattcaaaagacgtgaaggggttgacattgacattgcacctgttaagacattataaaggatattatagtctatgaaccttctgagagattcgcaaaactacttcaccaacaagcacaagattgctatatcttgatcatcactagagctgtctttatg

SEQ ID NO: 117434 - DNA, 378 bp, Glycine max
  unsure (1)..(378): unsure at all n locations
cttcgactgatcacacatgcacagtggccaaggatgcatgggagatcctganaaccactcatgaaggaacctccaaagtgaagatgttcagattgcaactattggctacaaaattcgaaaatctgaagatgaaggaggaagagtgtattcatgacttccacatgaacattcttgaaattgccaaagaatgactgatgaaaagctggtgagaaagatcctcagatccttgcctaagagatttgacatgaaagtcactgcaatagaggaggcccaagacatttgcaacatgagagtagatgaactcattggttcccttcaaacctttgagctaggactctcggataggacctgaaagagagcaagaccctggcgttcgtg

SEQ ID NO: 117435 - DNA, 371 bp, Glycine max
  unsure (1)..(371): unsure at all n locations
ttcaggttatgcttaactctttatatgatgggcaattgaatgacaaagttatagattttggtgctgtgttgctccaactccttctaagtttctcagctgcgatatgacctactagaatagacattcctccaaacagcacagtgataacctatgagatttaatgtttcaataaaaacacaagtcaatattaaaggtttaattaaacttcaaaaaatttatcgattacaaatcctagcatactttcttccaagagtaaaattataggcttaaaggagaaaaaaatggaaataaataaagtaataaaaactgataaatacgtgagttaagaaacccttagctaacctgagttgaatgatanagaatggtaaagc

SEQ ID NO: 117436 - DNA, 360 bp, Glycine max
agcttggagaaaaataaaagagaatccgtataagcggaatgctaaaaataccttggcagctctggttgtagctctagaccaactggaaatgaccgtttcatggttctcaatggtgaaaaaagatattgagttgtgcttgagtttggcaaaatgtaaaagctttacatatgtattaaaccaaagataaattaaactatggaagttataaagaggacaaggtctattacataataagaccacttgtcataaaatgataattgtacttgtttgacaagcttgatcttatgagtaatgcgcgaattgggtattgatccacatgtttgtaatatcatacttgtctttgtatcttaaagatgtttt

SEQ ID NO: 117437 - DNA, 224 bp, Glycine max
ctgaatgttcatcattgcaacatacgttcactggttcttaatttgtagaaagcacaattgtttaacagaaatcgaaatgcttgaagtaactcgacgaggaaaggaaaattgccgaatttaaacgctcagcgagctcattcgatcgaatgaactatttaaaagacaggaattataaagtcaagcgtaaattgcattgcattcgaaatgtaaagtttacagaattt

SEQ ID NO: 117438 - DNA, 397 bp, Glycine max
ggaaagaaatcagactatgtgcacgaatcttatacccaggggttattgatggaccaaaacttttgcctaccctaccgcttacctagatacctatcgtccaccatcccaccatcatccttgcctatccccttcgacaccaaggaagagtttcatgaacaattaaccaaagaaaggcaagaaaaagaaacttggaagaggagatgccaggaactcgagcaagagaatgagactttgaaagggaagatagcccaacagagccgtgagctttttatccagaaccagaggatgattgagaaggacgacttgcttcgtcggaaagacgctttgctccaccaagatgctagaaggaagaggaggtttatggacttgttctcccgtgcacattcagattccgagg

SEQ ID NO: 117439 - DNA, 214 bp, Glycine max
cccataacccgccttttatatcttgggtggcaccactaacaagacttcgccctactatatttgcttgccacctgtttggaagtgcacatcttcacactattaacttctatagtggtgcatggacattcgcgccaatgatcgagcagctcattttcttgaatgcacaacctctgctatgcggactatgacaaattttaatttgatcaaactgctg

SEQ ID NO: 117440 - DNA, 419 bp, Glycine max
  unsure (1)..(419): unsure at all n locations
agctntcgtaggtgaaatcaagtgcagccatttcccttatagtcctctcacggggtggaggttgtgccatgttcttanaatgtgcaaaatcagaatgctcagaatcagaatgctcaaaactacaatgctcaagatcaggatgttcaaaatcaccaataacagaatgcacagattcaccagtaatggaatgctcaaaatgatcaaaaggtataaaatgatgcctaactaatctatgaaatgtcctatctatctcaggatcaaagggttgtaagtcagatggattacctctagtcatacactacattcagcatgcacacaactagttgccttatcatgttaataaaggtgtaggtttgaactataactaccctcaaatgatatccanatgacttgagattttgtgagccaccttataaaat

SEQ ID NO: 117441 - DNA, 441 bp, Glycine max
cgatagtttacttatagtcatcctcgatactccccaaccttctgaaggaacatcgagaatggtgacaagaagtacctccaaattaattaatggtattaatgaaaatagtgaccaaaactcaaaaaacgctgtagaagcaaagcttcatgatgaatcaagaatgattcaaagatgtcttgatgataacaaaggtgatgacaaaaagctcaaaggtcaatcaaagaatgagttcaagaaagatagaatcaagaaagaatgagttcaagatgttcaagatagaatcaagaacacttcaagattcaaggatcaagcatccaagaatcaagatcaagattcaagactcaagattcaagattcaagaatcaagagaagacttaatcaagataagtatgaaaagggtttttcaaaaactgagtagcacatggatttttctttaaacat

SEQ ID NO: 117442 - DNA, 426 bp, Glycine max
agcttctacttgtagacatagacttgcttttttcaagctacacttctccttaagaaaccttccaaaggcaaaagctgctctcacagctgcaagaacagctgcaaatgctatttatgttcctccagctcaacaaggtgccatagatctacagagtgggattcttcacgcagaggagaaagattacaaaactgcatatagttatttctttgaagcttttgagtctttcaatgctcttgatgaccccaaggctgtatttagcctgaaatacatgttgttatgcaagattatggtgagtcaagctgatgatgtggctggaatcatatcttctaaagctggcgtgcaatatcttgggcctgatttggatgctatgaaagccattgcagatgctcattctaagcgatctttgaagttattcgaaattgcttt

SEQ ID NO: 117443 - DNA, 424 bp, Glycine max
  unsure (1)..(424): unsure at all n locations
tgcctcanagaggtccaggaaggacaaggcagccgaaggatctagttccgctccggagtatgacagtcaccgctttaggagcgctgtacaccagcagcgcttcgaggccatcaagggatggtcgtttctccgggagcgacgcgtccagctcagggacgacgagtatactgatttccaggagaaaatagggcgccggcggtgggcatcactggttactcccatggccaagtttgatccagaaatagtccttgagttttatgccaatgcttggccaacagaggagggcgtgcgtgacatgagatcctgtgtaaggggtcagtggatcccgtttgatgccgacgctatcggccaactcctaggatatccgttggtgttggaagagggccaggaatgtgagtatggccagaggaggaaccggtctgac

SEQ ID NO: 117444 - DNA, 81 bp, Glycine max
cactgcgctcactgaatagaggtgagtgatctctgtttatgtgaccgagggcctgaaatgccgggcagaacttgggactag

SEQ ID NO: 117445 - DNA, 454 bp, Glycine max
gcttgtcgctggagctgacccatcaactgccctaactctttcagactggtgattcctagtctcttgaccttgacttgatagaacctctttttaagcgaaggcgcctgactcgatcccatgttttacaaagtgaaacaaaacccaatgtgaatcaaaactccgacatctatcatgggtggaatggatgaatgcttgaagaaatgcatatgacacagatacattttatgaatacgggagcccgggaaattgtccccttcttagatacaacattttgggcagcatggcgcctgacgtatgtatttaagaaggcgaaatggaccctccgtcggtttgacaaagtgaggggaccaagacacaatccgtgcatgatgcatatgcggaaggcacaaaacggggatgtacatagtacgacaatatccacaaacaaatataagccaaggcatacatgacattt

SEQ ID NO: 117446 - DNA, 432 bp, Glycine max
agcttccaagtggaccaagttagagtttatcttcagcattgccatctctgcattctaacactatgttgttcctaacactatgttgtttcctacaaagggtatcaattgaataataactacgattaatgactctaatttgctaggactaagctcaaacatatttctttctcaaagttctattccaaccatgacccaaaagcatttcttttaaacttttccaaaacctaatgccaaataattatccaactcgaatagcagttgttggactctaagtttcagttcaagcttaacaatcagtgtcatactattcatcaaaacaaaaaactacacaacgcaaataaaaaatacattattcatagtggggcaagacgaaaattgtatcccaccacttgtgcatttttataattataataataaccctaatcagtgtga

SEQ ID NO: 117447 - DNA, 431 bp, Glycine max
agcttgcacttcaggacgtgcaatgcttgttattaattgcggcactgaactgcttgaatagtccttaagggtaactctttgttggtgttcatccgccatcgaaaccgcttttggtaaataggtcgcggattcccttgatgatggtgagtctgatgatgtagaatcagaaaaatgagtttcttccttcagaatggacgctactatcctgtcttgcaggaattttcttctcatatatgctgtattccttcttaacgtagcttcaatctctaagtccagaggaactaaattgactgtgggagatctatgcatatacaacactaacagaaatagcggttatccagttcaagaggaaaacaaatatgaatcgaaagtaaatatttacagtttagcaaagaataaggatttacacctagaactaaactacttttcca

SEQ ID NO: 117448 - DNA, 413 bp, Glycine max
  unsure (1)..(413): unsure at all n locations
gatgcagatgggtttgtagctaccttatgcactcctctaatgactatggcatcattgttggcgctaaactgctgggaattggaagccatcttctcaattaaatttctggcttcagcaagagtcatgtctncaagggctccaccactggcagcatctatcatacttctctncatattactgagtccttcataaaaatattggagaataagctgttctgaaatctgatggtgggggcaactggcacatagtttcttaaatctctcccagtactcattcaggctctctccactgagttgtctaatacctgagatatccttcctgatggntgtggtcctggaagcacggaacaaaatttctaagaatactctcttaaggtcatcccagctcgtgatggaccttggagcagggaatac

SEQ ID NO: 117449 - DNA, 409 bp, Glycine max
  unsure (1)..(409): unsure at all n locations
agctcgcattnggaattgcgaaagctttattctatcattaggattagtacctgacatctcaaacgaacaaatcaaacgtaacaagacaattatagttgttgtttgaatacctcacccactcaagtgtatcacacaattatggcttttctctaatgaaaacactcttgccttttaccactctaattccccttgagttcttatgcaattcaagagattatggccacagcaaataacaattcaccaatatgtgtaaggtaaggctatacagacaatgaaaaggtttaccatgaaaaaggctaacaatgtttttatgcacaattgaaggaaataaaatttagaatttacgaattccagtaacaatccttcatacaaccaatatattacgcttaaagagattttgttttttaaa

SEQ ID NO: 117450 - DNA, 350 bp, Glycine max
  unsure (1)..(350): unsure at all n locations
ntccattcaactcatcaccagcttcctattttgtntcctattccagtgattctaattctgtttttcctaattgtacaacatctgttgcttctgtggagaccaagtcaagcaacctatggcatgctagacttggtcatccaaatttccatgtaatgaaacttatactacagcaatgtaatatacaactatccaatataaatgctgttgattattgtgcatcctgctgtgtangaaagtctgacagacttccttcttctctgtctaataatgtttgctctgctcctttagaatttatttacagggatctttgggacccttttcctgtacttccaccaatggcttttatatta

SEQ ID NO: 117451 - DNA, 300 bp, Glycine max
agctcggcttcacacttacttataatatgtttgtcaacactccagctcttagaagacacccctaccttgcacgtattttgttaaataatgagattgaagtaaattttttattagatctaattaaataaaaggtgactattatgttcttatctattaatctggcgatagctagctagaataaaagaaaagctaaggtcggaccagttgatatctaactggaataaaagaaaagctaaattgcaagggataattctcatatcattttatttcatcattaccccttgttatagccatttcata

SEQ ID NO: 117452 - DNA, 424 bp, Glycine max
  unsure (1)..(424): unsure at all n locations
ngtgcaaatcanatcactcctacatctcatctctagcatgcatattctttctttacccactcctcacgtttggtgttttttagggaaaaacaccataactaaacgcgccgcaagggatccctatcgcaccagatccaaatctagaacgatgggtgatcaagaggagacacaggaacagatgagagccgacatgtcgactctgaaagaacaaatggcctccatgatggaggccatgttaggtatgaagcagatcatggagaagaacgcggccaccgccgccgctgtcagttcggctgccgaagcagacccgactctcttggcaactacacaccagcctccctcaaacatagtaggacggggaagggacacactggggcacgatggcagtcctcacctgtgatacaaccgagcggcttacccttat

SEQ ID NO: 117453 - DNA, 414 bp, Glycine max
  unsure (1)..(414): unsure at all n locations
agcttctcccccaattntctataaatatggggagaagtgaagtagaaaagggttcagcctcttaggcacttctctctctctcgaaatagctaaggaaaattagttccgtgaagaaaatccaagccgaggcgcttccgtaatgtttccataacgtttccgtgagtaattacgcgaagattctcgacccgtcttcaagattcatcaatcgntcttcgttttcttcagtctttaactggtaagtacctcaaaccaagcttttcaattcattctatgtacccgtggtggtcccgcatttggttcatgtatttttattctcgttttcatttactttttatacccccttttgacgtgcttaagccatttatttaagtcatttctcgcttaatctaaaaataaaataaatttccaccgatc

SEQ ID NO: 117454 - DNA, 363 bp, Glycine max
tcggtagttcaatttcgagcatctcgatgtattatgcgcctgtatctgacatccgtgtaaaaagttatgaccattttagtttatcgggagcttccgtttttcaattttgagcgtctctatatgtgatgcgcctgaatcggacatccgagttaaatgttattacaatttgaatttctcgagtgcttccgttgttcaatttcgagcgtcgcaatatattatgcgcctgaatctgacctccgcgggaaaagttatgaccatttgaatttgtcgagagcttccgttgttcaatttattatgcatccgaatcggacatccatgtgaaaaggtatgaccatttgaatttttcgagagctttcgacggtt

SEQ ID NO: 117455 - DNA, 419 bp, Glycine max
  unsure (1)..(419): unsure at all n locations
agcttggttntgggcaatagcaccccacttgacgtccncaaggtctcctgacccccgcgacatatctccaggtaccactctggggtcaacaataaaagcaagaaggtccacccttcaacacttccttatttcaagcttgtaggattatggggtacccatcacatgtggtactaagtgtcggtcgggcgatggttcacaacaagtttttccacatccacaatgcgcgcataaacccaccatcccctggtgcccacctccaactgagctcacgtacctccacgtagcccatatcctcgtttctctcaacaccgggtcccatcaatccttccaagctttcacaacattcaagcaaaacaacattcaaacagcacaagctatcacagccaagcaaattaagccaaggctgaaaactttgctca

SEQ ID NO: 117456 - DNA, 443 bp, Glycine max
  unsure (1)..(443): unsure at all n locations
cgcttacccatcaatcgtgatagtcattgatagcctgtaatggtgcacttgttgtatcaagctttagcatagtatccaatggagtaagagctagcttaaagtgtgtcatctcaacattttcaagtaagtcaagaatctaatttcgtctattaagaaagagacctttattagaaactgccatttcaattcccataaagtagtttaagtggccaaggtccttgataggaaaacagatagcaaagcgtgtttgagttgagaaataacatgattactatttccaacaataataaggtcatcatcgtaaacaagaactaccacttgtttcatttaagacataacaaacaaataaagaaaaatctgcattacttcttaagaaatcacctcttgaagaataatacttaatttcacatgccaagcacattaagattgtttcanaccataaa

SEQ ID NO: 117457 - DNA, 249 bp, Glycine max
acaagggctaacaaccagtttaattgaacagttagactaagtaagcaataacagccaaaaatgaggtgacccaggttttttttttcttcgagcattgtggcgatttataagagggaatgctcaaatattaggccttgtttattctcttgatgtactttgaatctagtttgcttccaatggatatggactgtgtcctgaatcattgggaccattttttatgataagtttaaatatggtcttgatagaatt

SEQ ID NO: 117458 - DNA, 268 bp, Glycine max
  unsure (1)..(268): unsure at all n locations
ttaatactcagctagcctaccttcgaaacgctgttgtacaggtacttctttaccttatagggtacttcgattactattaattccactcttgaaaataaaacagcaaagatattccctagttaccgattacataattaagagcagacagttacgtctagttacataatgcagctttataaatagtaaaagtaaacaagcactgacaaaaaaaaaatacaacaattcctcctttttattgagaacttnacaaatttttacattgaaatgg

SEQ ID NO: 117459 - DNA, 359 bp, Glycine max
  unsure (1)..(359): unsure at all n locations
atagaacctcagctntaaagagacagtgccnctttgtcctttataattattttacttattttcttctcttaactcaaacgtttccctctcttgtctccctcaatctcatttagtttgtgttccattctcgccatctgttttatatcagccgaatatggaaacacatgacaatagggtctccataaatggaatgattgatggagagaataagaaataaaatgaaatgactcattgctatgactttgaaaacaagcatcattacatcatagtggagggacgaaaagatagcttattataacttgttctactgtggtcataatatcaatgccagatcaggtcttaatttaacttctgttatg

SEQ ID NO: 117460 - DNA, 373 bp, Glycine max
  unsure (1)..(373): unsure at all n locations
gttcttcgtcatctntatttgtaggaagttttcactcattgtcctctccatttgtctctcaaatataactagagggtaccattaatttagtccctaaaggattactctctccctctaagtgttaaagtgaggaaaaatatataattagtactggaaatcatgcttacatagttttcctagtattgaatcgctagtaacgtggcagcataatttatttttatataaaaagagggtgatatgtattttttcaaaatatcaaatgggggatagattttgaaaaaacatctatttaagaattaattggtaatggaatcacgactttgaacacaggtacaacttttatggagaagattaatatacgactttgaacaca

SEQ ID NO: 117461 - DNA, 429 bp, Glycine max
ctaacctcatcgtctctcacagtctttagacttgggagccaatccagtccttgtgttcggactctcagtcacttatgatagccgccgatgatcccattactgcttcccctaagctctctgtcctttcttcacgccgcatcccatgccttgcgaactccttggagtaccctcgcgttgtggtcactgaaacctcgtgtaatgaaaggcgtgatgctttcatctaatggcgctcctctcatggggtagccaagctgtcttatggcgaggacaggattataatttatacaaccccttgttccgattaagggaacatttggaaatccttcgcatgaagatagaatcctgattcttccttccttctagcaagggaaccaattaacagacgcccctccatgctagccaagagttggtcccaattcccctttcctt

SEQ ID NO: 117462 - DNA, 219 bp, Glycine max
gctgcacttattaagcgacatttatctatttcatcagttgagctatattcagaaggagagagtgtatctcttttatcttagcgagagtgattctcctaaatccttgagtgattcaagaacaccctcggctgatcaaaagactttcacaacgctatgtgtgttgccccttgctggacaaagtgagtactttcctgccattcatcttcacccttgttcttt

SEQ ID NO: 117463 - DNA, 423 bp, Glycine max
  unsure (1)..(423): unsure at all n locations
gcttctacttatgtggcagggcgggcttccttcactttcttgtctcaaccgcgtgctttgaccaccgctcttccttcccgcgatgcttctcttcatatctgcctgagtgggcttatagcctaaaccatacttcccacaattntccttggcatttatcaggctagttatgccgccgttgtctttgcctaaacccattccgggttcgtaaccgttccccaacataactcgggccatcattactgctgcatcggacaggcaaggctgcccagagaaggagtccacggaggaaatgcttaccacctcaaaagactggaaagcggtttctaatgactcctctgcggcttccacataaggcatagaggatgggcagcttaccaagatgtctttcttgcctgatacgatgaccagatgcccctccactac

SEQ ID NO: 117464 - DNA, 332 bp, Glycine max
gctgaatcggacagccggtgagaagaatgtaccttcttgtttttaagatctttcgtagtacaatagcgagcttctcgacatattatgcgctcgaatcggacatccgtgtgaaaagctatgaccatttgaatatctcgaggtgctccgagggttaactctgagtgtatcgattcattataaacctgaaacggacctcagtgtgaaaagttatgaccatctgaatttcaccgagagcttccggtgatcaatttcgaatgtcactatttgtgatgcggcctaatcggaccttcgaggtaaaggtaggaccattggatttctcaagaacttccgtt

SEQ ID NO: 117465 - DNA, 426 bp, Glycine max
ccccggatcttaagcaccgcggctgcagctataagtaggagtaaaaagttgataattataataattaggaagagaaaaaaattaaaagttactagactaatttatttaacccacttgaagtagtcaaatctcacatccagaataccagaatttgatggcccaacatctatttataaggaggtctaatgtctatggtatttgacaatggtaaataattttacactctcatccaatcaccaatttatcgtttgaattactttaagataattattttaaaagtcaataaatttactataggattgtgattgaatgactatataaaactactaaaataaaaggtttcaacgacagtggatctatgacaattatataaaaaccatcttaaaaaaagggcgggtgacattttgtaaataagtgtaacttttc

SEQ ID NO: 117466 - DNA, 263 bp, Glycine max
tggaaaacttgcagagaaagcaaaagataaaagaagaatatgcttgacctattattgaagtgtaaaactaattagttagttacatgctgttatggcatctatatatacacaagttagttggaataactaacttttaactaactaactaggttctaaccattaaccatgatcaagctaaactaagcatctaactgtgctaagagaacgctccaaagattttgtgaccaaattcctgccattcaagactaattatatgatatctt

SEQ ID NO: 117467 - DNA, 177 bp, Glycine max
  unsure (1)..(177): unsure at all n locations
tcggcattccatggcgagcgactagatatnatacnggactctctcagacatccgcgtaaaacgtgataggcgtatgaattctctcacaccttacatatgcaattcctaacgtcctctagtttttacaggactcaatcaggctaccgagtgaaaagtggttatcgcttgaatttgcac

SEQ ID NO: 117468 - DNA, 408 bp, Glycine max
ctgcaagcttatgcttaactatgtatggcttattttcattactggtgttcaagacatacaagggagcttgtacaaatattctaacttggagtgatcacatgcagtcctgtggaacccataacacccactctggtatcatgctgaatactaaaggaagcccaacatggttagctatctataattaaactgaacaaaattcaatggctacttctacaatgaacctttcaacaatatgatgcatttggatgatatagattatttgtatacccttttaaaagcttcatgtatcgcttaaccgggtacattcacctgatatatacatgaactgtaacatttgaatcctcttgaccaggatgcacaattccgttaatatatgatgtcaaataaagtaggggtaaaatacatttt

SEQ ID NO: 117469 - DNA, 442 bp, Glycine max
tctcaagaagagatggccaaaaggatcattgatggacttctcatctaaagaaaagaagaaaaaatagaatgagctgaattggagcacgttgaagattgttgaacaacatgcctgtgcttagcgcatgctgtcaggcctaatgcgagtggtctagcttagcactcaccttcagcatgaatttacgagagctagatgtaaataggccttattagaagcttagttatcctcttaagcctagttctataaatactcagaaactcttaattgtagaaacctttgacataattgaaattaagcttgtgcttagagaaagcttagcctcttctatgtgttttgactgaataacaaattgattcttattaaggaagctattcctttgtggcaatcccttttcagctataattctccgggggcgggtgcggtctattaactttttcatttt

SEQ ID NO: 117470 - DNA, 407 bp, Glycine max
tagataggttatgtgcgtgtttttgcaataccgacagatgaatctgagcatgcctctgtgactgcaagagctatttgcatagcagggaacttttggcaaagggcgtgccttctcaaagaggtgttgatttgcaagccaagcttgccaagctttggcatcctttgggacgctggcatatgatcccaattggaaaaggctatttcaattcttctttctccgtagttcacgatctacctaaggtattggtggtagggatttggaacctaaaccctagcactctgaggcttttaactgaaccccaaactttaaccctaatttggtgaaacagaccaaaacccaaaggtcgattcgaattctagggttaacacaaaagtatggagacaagccattctattcatcatcgcaat

SEQ ID NO: 117471 - DNA, 434 bp, Glycine max
tcgaccggatcttagcgaccgcggctgcaagctgggaatctatggatcctctatttatgccactatcgctactggactacacatgtgagccctgttataggtgagagatgactttatcgcactttggattaaaatgaacatgtgtagggattcttagaaaatcaaattgggatgcttactgtattgatattctgcctttacgagtataataatgatattattatgtctgatgggtcacttgatgctctgatgcgaattgggtgataaaatccagtgctattgatgttttcatgtttttgacctatgattttgattcttttgattttgatatgattatttgtaaatgtttcaggggtttaatcatttgaacataacatattaatattattactatgtgacatgcatatgatgcatgatgcgtgattaatgtgtgc

SEQ ID NO: 117472 - DNA, 415 bp, Glycine max
  unsure (1)..(415): unsure at all n locations
nggtggttatngatgggaacccggtgttgagagaaacgtagataatggcttcgtgggagtacttgagcttagttgaaggtgggcaactggagatgatggacttatgtgtgatttgtggatgtggagagtcgacttgcaccatcgcccgattgtcacctagtaccacatatgactggtgccccataattctacaatcttgaattgagaaagtgtggaagagtcagtcttcctacttttattcgttgaccacagagtggtacctggagatatgtttcgggggtcaggaaaccttgtggacgtcaagtggtgtgctttttcccaagactaatcttgtcatttctcaccctacctcggcttattcagttagagagaacctttgatgtacctatatcggcgagctcttggctggcttcca

SEQ ID NO: 117473 - DNA, 216 bp, Glycine max
ttctacggaacgttcaaagcgcctcgttaaatttctcacggaacaattttccagcaattcaaagagaagagggccaaggggctgaacccttttcttcttcacttcctcccgtatttatagcaaaataggggaggtggttgccgcccaactcgaccagacgagccaggttgctttctccagaagcaacagccttttggaggacaattctggagggcc

SEQ ID NO: 117474 - DNA, 437 bp, Glycine max
  unsure (1)..(437): unsure at all n locations
accttaaaactcagctntataggtgaaatcaggtgcagccatttcccttagagttctctcacgaggtggaggttgtgccatgttctcagaatgtgcaaaatcagaatgctcagaatcagaatgctcaaaattataatgctcaagattaggatgttcaaaatcaccaataacagaatgcacagattcaccagttatggaatgctcagaatgatcaaaaggtataaaatgatgcctaactaatctatgaaatgtcctatctatctcaggatcaaagggttgtaagtcagatggattgcctctagtcatacactacattcagcatgcacacaacaagttgccttgtcatgtaaataaaggtgtaggtttgaactacagctaccctcatatgatatccaaatgacctgaaatnttgtgagcaacctcataaatgatgagaa

SEQ ID NO: 117475 - DNA, 328 bp, Glycine max
  unsure (1)..(328): unsure at all n locations
caatattatgtgtgggacatagccacactgggaggagtatgattgatgctgccggtgggggagcccttggagacatgacccctgctgaagccagagatttaattgagaagatggcttccgactcctagcaattgagtggccgaagcgatgctatggacgttagaggagtgcatgaagtagccacaaattcatcctcatcgggcgaaactaagaagctctgaggtaaactaaatgccttgggtaacctggtaacccaactgaccatgaataaaanatctgcacctgccaccagactctgtgggttatgctcctctgccgaccaccacac

SEQ ID NO: 117476 - DNA, 412 bp, Glycine max
  unsure (1)..(412): unsure at all n locations
atatggacgaaagagcanaactcctacttggtggtacgatgatggagatagcactacttcttggacctgacatgctacaacagattaacgaacaagtgaagttgattcgagagaagataaaagcatctcaggataggcagaagagctattatgataaaaggaggaagccactagattttcatgaaggagaacatgtgtttttgaaggtttctcccgtcaccggggtcggaagagctctcaaatctatgaagttgacgcccaagtatctaggtccatatcaaattttgaagaaagttgggcctgtagcttatcatatcgccttacctccgagtttatcaaatttgcatcatgtgtttcatgtctctcaactgagacggtacaacccatatacatcacatatacttgcagtgga

SEQ ID NO: 117477 - DNA, 55 bp, Glycine max
tagtcccttaatttattccaatgcttggccaacagaagaaggcctgcctgacatg

SEQ ID NO: 117478 - DNA, 264 bp, Glycine max
  unsure (1)..(264): unsure at all n locations
tactaagctcatggatggaatacttacttgtaggtgatgaacaaaatctgctaaacggatccaaaaatgcgaaaaaggatgaccctacggctggcaattcgtcaattccgtgggtattgcttttgaaggggggaaaaagaagttttgaatggtaaaacgccccccctttcgtcatttatataatttggtgcangggtggcttcgccaggcgaactaacctgcacctnaattcttactgtttttggattttgaggggaacattta

SEQ ID NO: 117479 - DNA, 389 bp, Glycine max
  unsure (1)..(389): unsure at all n locations
agctntgcttctctattattctttctcatcaaataaccaaaaaattggtatcaagagtctcttcttaaggagcctgtgtgttttgatttgtgatggtttctaaaacaagtttttcccaagccattcttccggtctttactggggaaaattatgatctctangcagtcaaaatggagacttacgtggaggcattatatctttgggaagctattgaagaggattatgacgtactttcgctgacagataatcctactatgaaccagattagaattcacaaggagaaaaaaacaaaaaaggcaaaggcaaagtcgtgtctatttgtcagtgtctctcaaaccatcttcacaagaatcatggctcttcaatcagcaaaagcaatttgggattac

SEQ ID NO: 117480 - DNA, 446 bp, Glycine max
  unsure (1)..(446): unsure at all n locations
ggcttgtgaaacttctatggagactggatctttgagcttcaatgaggtcctttaatggtgattttccaccatggagatgcagcggaagacaaaggagaagaggtgagaggagactccatccactanggaataagccatggaagaaggagcttcaccaccaagatgagccttggataaaaagcttggagaggatgcttcaatggaggaaaagaaagagggagagaaagagagaggggggagcacgaaattgaaggaagaaaaagggagagaagttgaactttgagttgtgtctcacaagactctcattcatcaaagttacaacaagtgttacacatgcttctatttatagactaggtaccttccttgaaaagctttcttgagaaaacttccttgagaagcttctttgagaaaacttncttgagaagctagagcttagctacacacac

SEQ ID NO: 117481 - DNA, 349 bp, Glycine max
tctcacgacgtgaaggttgagccatgttctcagtatgaaaattagtattctaatgctcaaaatcataatattcacattcaccagcaccagaatgctcaaaatgcttaagatgaacaaaatgaccatgatgcacactatgcctaactaatctatgaaaggttctatctatttcaggagcttgggatagcccaactatttgccacagtattagaattcttttctaccccaaatgcatacataataatagtcattctaatacccagagcaaaagttatggtcgtcttaagtttcgctaaaaacaagttcccaaaatttttttctctctcaaattcaaccacaccaagtgctc

SEQ ID NO: 117482 - DNA, 101 bp, Glycine max
  unsure (1)..(101): unsure at all n locations
tccttgagaagctagagcttaactacacacacccctcttataactaagctcacctncttgagaagagaagctagagcttagctacacacccctataatagc

SEQ ID NO: 117483 - DNA, 319 bp, Glycine max
  unsure (1)..(319): unsure at all n locations
agcttgatctaccaccaccgccgtttcttttatcttagntttctattattattagtactttgatttctagctgtgtatttggctatattattatgaaatttgaacaatttagtatttcttttatttgcatggtgtgattgaaaaattatgaattatgtcatatgactatgtggcttttaaatatttggaccatttctggtttctggcttcatgatgggttatactctttaatgaatgtcctgtgtattaataagaagggtaagtttgtgtttttcttgtgcgcacttttgatctttgttgaaacctacagggggggggg

SEQ ID NO: 117484 - DNA, 445 bp, Glycine max
  unsure (1)..(445): unsure at all n locations
tctggagggcccanatgggcctgggtgctatttgcacccccatttttactaagtacacccccctctgctnttttttggtgagttctttttcgtaaagttacggaaacttacgaatttcgtaacgatacttgttttctttccgtaatgttacggaaccttgcggattacataatcatcccctctttgacttacggaatgttacggaacctcacttaattatgcaacgatgcttccatttgatttccggtgtgtcacggaaacttacggattgtgcatcaatacttttttttggtttttcggcatgtcctgaaatttcacaaatcgcctaatgatgggtgccaagcacctcacgaggaccaaagaatggtcgcacgtcatcgagcaaaggtccccggacgaaattagtgtatgacactgtgtgatagccttcctctctggttgtgct

SEQ ID NO: 117485 - DNA, 401 bp, Glycine max
  unsure (1)..(401): unsure at all n locations
agcttgttgnattgtggtgcacccggcatatattcncctacgtggataaccgacaacggagcggaacaagtataccatttccgcgagtcaggcgtcttcacgacatccccaggtgcccacctttgaattgagcttacgcactcctacgtaacccttatcctcgttcctttcagtaccggaaccccatcaacccctccaagatttcacaatttgcaaacaattcaattacgtttgtgatgaaactaccctagaccaataagaatatagtggacgcataaaactctgcacaagactcattcaaatgccacatgttttcctactcacatacctcagtaacattctctgcgttccgattcgtcaccattggatcgcttgaaattttaactgatggttcctaatac

SEQ ID NO: 117486 - DNA, 449 bp, Glycine max
  unsure (1)..(449): unsure at all n locations
tggngctcagatccctcttgttggactagacttagaccatacaacattattgaaccagcatatttaaaaccaatacttgatccgcagatccctcttgtatgactaagattcaattctgcttgattcaagtactaaggcaacaacacatttcccaatgctgaagtcacctaaccaggcacacaaatggatgatcagaccaccagcatacacaatttaagcatngaaagaagcattgaacacaagacacacactcaattacatattaaaataattacatcagttgttcattagaaatccccaacaagagtatttagccaaccattacaaaacaaaccctaacaataatgagattaaaaaacctaagaatctctgcaaaagctgctcctctagctgcttacagagctctgtttccgtaataagcaatgtggcgcgctctataatgttataaa

SEQ ID NO: 117487 - DNA, 309 bp, Glycine max
agcttgaaatgaggaagtgtagaatggtgagacttcctgcttttattcgttgaccacagagtggtacctggagatatgtcgcgggggtcaggggccttggggacgtcatgtggggtgctatttgcccaaaccaagcttgaccaatcccgacccaacccgagcatagtcagtcagtgagaacctgtgatgtacctaagcaggcgagctccgggcagtcaacagataaaaggaacaaagaccacaaagcaaggaagcttgtgtggtggctggccagctgtgaatcttatgtgatatgcgttaatggctctg

SEQ ID NO: 117488 - DNA, 357 bp, Glycine max
  unsure (1)..(357): unsure at all n locations
tgaggttattactcaagtaaagaagttgttggatgagggtttggtttgaaagagcttaaatccttgtgttttgttggtgcctaaaataggtattactaggcaccaaatccctatgataggtggtatgatgaatgtgttgagtggtgcaacattcttttgtaaaatcactcatgcacctaaattcttcatgatttgtgtacatagggactcattangtaggtttgttcttattntttgtttcaatgcaaacctaggtgctcatgtgggacaccttaggtttgtcgtaattctttgttaaaatattcaccatgaaatataaaaaaaaaggtgtgttatattccatcacttcccctagct

SEQ ID NO: 117489 - DNA, 275 bp, Glycine max
tgcacatgaaggacctaatcttgtgcgtgacaaaatgtattacctcacctgctcagatactctaatggacaaagcgactattccaaaggaattaatgtggcgcgattatgcccgagtaactcaccgtattaaacctactattctagacaaatctcaaactctctgcctatttattcaaagtgtgaagtcatgtcgttcaaatcttagagaggacatcaatagggcagaattagccttaacttaattgtaacgaacatgaccatcaactcagtagc

SEQ ID NO: 117490 - DNA, 454 bp, Glycine max
tagctatcttatcgtagcactgtgtccgcttagcggttgtttgttaaccatgctaagcttacgagacacaactttagaccttcaaattgtctcttttacctgacatgaaggaaattacattatattcataatgaaggcttctactgagcacatatgaaaactcaactagagatatttccaatcctaccataaatcgggagatttatatacattttggaaaacttttctatacaaaagttagtcgtaaaagacgactaacaggtaacaagaataaaagtaatggcttgtttattcttgaagattccactattattggacatgcatcagtagctattaatacattaatcgacaaaactaagctttggcatctgagaattggtcatgttagtgaaacgtgattacatgaacttgagatacaaatctgttacgtgtgataaactagattaacttgaat

SEQ ID NO: 117491 - DNA, 206 bp, Glycine max
  unsure (1)..(206): unsure at all n locations
ctgcagctgccatctgccgagtcaaacaggtatacattattatggaagcagggataacaacgacgcgtagctgtcagagaacaagtacaaaaactccttaatgctaacttcatcaggnagggtagatgctccacatggctcgacaatgagtaatggcgaatgtgcacgaactatactgatctgaatacggagcgccccaaatatgc

SEQ ID NO: 117492 - DNA, 424 bp, Glycine max
gcatctctctaaaatcatacagaatgagcattgtgttaatttaccttcaagaatcaatactagtaagacaagtggagtatgcaatgaacaaattcccaggtatatactgctaagaagttgcaccatgaagaaccgcgctaatgctaagataatggctaaatggtaacattcgattctaattgggagtcatattggatgactgcctttgaaggtgaaaggataattgaggcctgctgttctgtaccactaatcacagtatgaacagaatttttgggttgactctacaatcaatatacccaggcttaaagtgaaaataaatttatgtagttactcccagatcttgaatcctattctcattacgtttacacaattgtttctttcatgtggcagtaagtcttgatcattatcatggggtgtacaagca

SEQ ID NO: 117493 - DNA, 308 bp, Glycine max
  unsure (1)..(308): unsure at all n locations
agcttagccgaattcagatcgaattgaagttgtcttttctcatccttggcccacttagtgggctaaatcagcctcagatgcaanggttgggcgctaagtgcttgagactcgcggcttatcgcctgaacaaatatgagcttatcgcgaggcttgcgcttatcanaagactgattttntaaaaaatattttctgagttattttttttcacacccttcctcaacaacttgaaatccttatatctaacattcagagataggctgatatatttctatgtacatattatgtaacaaagtccccatgatctaatg

SEQ ID NO: 117494 - DNA, 447 bp, Glycine max
tactaagcttcatcagtggtatcagagcacaagagcttcaagttgctttatttggtatcgtgaagaggactggtgccatcccttgaagaatttgagtcaagaagcaatgggccaaccaccttatgagctattggactaacaagcactccaaattgggtgaatcaccaaagagagaaaaaccaccaaaattgaagacctttttgcaattttgaattgacaatttactttactttcattgctttcaaaatttgtaacaaaaatgcctttcattggaaagtaagttgggaccctccaatagggcaccctacttccctttgtgtgtaataatttaggcaactttcccttatgaatgtaagtgtttgttgggaaccttaaagtggtcatccaaacactcataggattcacctagtttacatttcttgcttacctttatagcttatattcttt

SEQ ID NO: 117495 - DNA, 359 bp, Glycine max
agcttattcaattatcaataaaaatcctatattaaaacttggataatcgcccacaacgacaatgtgataagcaattatcactcaactaatcactaatcatgcaatttaattaaaacacattctcttatttaaataaataactccaaattatatcacaaaatcatataatctttgagttgcaatttttggggtgttacgacctaggtctctagattcttgatggtcatacccgagtaggtattcgatcaacatacatacatgtacctaagtcctaataagagatttaatagggtaatgtagattcccctaagatgtgaaaaagatgatggcactcataaacaaagagggagggggggggg

SEQ ID NO: 117496 - DNA, 481 bp, Glycine max
  unsure (1)..(481): unsure at all n locations
tctagaaactcaagcttcgactctcttctattttgataatcgtagacctaggctatgctcagcttgctgcgctaagcttaatctgcagaanaatattttctatatctgcacgctaagcctaagtctgctgcacttagctcctgagtaaaaatatataatgtgcactaaacgcccagtcaaaatttactgttattttttctgcttttgttgaaaataacctatgctaatctcttgcgttttatcttatattttgcaaatggcctctaataaaaggaaagctccttctacacctttccaagacatatatgatcggtctcggttcacatctcaagaagcttaagagaggtgcaccgatattgtggtgcctaggaaactactaccacagaggaatgtggtgagttattatactgaattcgatgagtttcaagaggaacttcagagaagacactgggatgaggagttgacttattttactgatggc

SEQ ID NO: 117497 - DNA, 361 bp, Glycine max
  unsure (1)..(361): unsure at all n locations
agcttntaagatatgaagcatgattntgaagcactcattggttcattcttttcttataaagctctttgtttaaattcttgtaaagtttagaaaatctctcaaaacactttgttcatgttgagaggaatgactaagtgctaaattttttatctgtttataaggcaatagaggtcattgtacaatcaaaccaaaaaaatttcatatttgtgttaagaccaacagtggctttgtaggacaaagaatactgattgtaacaagctnggtgtatagcttgagttaaggaaccaaaattgatagtgataaatatttgtaacttgttgaagccaatagaacttggtgggtaagaacaactaatataaat

SEQ ID NO: 117498 - DNA, 474 bp, Glycine max
  unsure (1)..(474): unsure at all n locations
ctcagcttcacatcagaccacttncagagtgctggaactacttcacatgganttgatggggcctatgcaaggtgaaagccttggcggaaagaggtatgcctatgttgttgtggatgatttcttcagatttacctgcgttaaatttatcagagagaaatcagaaacctttgaagtattcaaagagttgagtctaagacttcaaagagagaaagactgtgtcatcaagagaatcaggagtgaccatggcagagaatttgaaaacagcagattcactgaattctgcacatctgaaggcatcactcatgagttctctgcagccattacaccacaacagaatgggatagttgagaggaaaaacaggaccttgcaagaggctgctcgggtcatgcttcatgccaaagaacttccctataatctctgggctgaagccatgaacacagcatgctacatccacaacagagtcacactgagaag

SEQ ID NO: 117499 - DNA, 400 bp, Glycine max
  unsure (1)..(400): unsure at all n locations
agcttcactgtcatcaagcgagtctgagacctctcatgaccacaaattctccttcactccttatggctcatatagacccagacatagggcctaatatctcaatgtgtgtgtgaggtgtangtgtcatgtgtgtgtagaaaaagggtatttctaactgtgaatgtaattgatagacgaacacaccaaacacaacaacatagcaaaggttatgtacaaatatggacaaaaaaccaaagataaaaggaaagggagaacataaataaagaagaagtcatgatgagatgttgcacactgattgattggcctaactctctaaaaatagtccccagtggagtcgccaactatcgcaacctacccttcagcgggagggcgacacggngctcacgcatgcgtctttcaa

SEQ ID NO: 117500 - DNA, 472 bp, Glycine max
  unsure (1)..(472): unsure at all n locations
ggactcacaccaaacatgacaaggttaacatgctntcatcttattccttcacaaataactaccacaaagcatgaacctagtaaaactacccatcatatctcccaaaacccaatacccacgaaaatttatgtgagaagaagtctacccaaacctgaaatttcgaagtcccacacgtagagatgcgcttcacgactccgaaaatggcttcctttcgcgatttggagcagaaatggtgaccaaaggatggagctttgttggagcttcaatggtggaggaagaagaagggatggcaacgtgagaaagagagagaaaggagctttctgaaattttgggctgagtgaggagagagaatgtggctntttggtttaaaaaggcttttctcttttcctattattntatttttcaaaagcacttgccacttggtcccatttgagtggaacaaaaagggcccacctttttctcttgatgtgac

SEQ ID NO: 117501 - DNA, 447 bp, Glycine max
agcatttgccaaaactgtggacaactacatttttcatgaggttactattgacctcactaacatgggtgttattgacaaaaccctagaggtgtccaaagaagcttcaactaatgaggttgtaccctagaggtgtccaagcactctgcaacctcaaatgaagctacatcaacggagaaggatgcacctgatgctatcattgtctactttaccagtttaggtcctactccactcaattatgctcctccaactgttgtgactagagatcaagtttaggagatgatatgtcaggcaatagacacattcactaaatgtctgacatacgagaatgagcaattaaggctatctatgcaaaatgtcaatgcaacgcagctctccaaccttggtgttggttactccaaacttgaacaagcccaaatgctatgttgggtgttgatctacccaatagct

SEQ ID NO: 117502 - DNA, 303 bp, Glycine max
  unsure (1)..(303): unsure at all n locations
tgtaagcataaattagaaataggtcactctcactatgagggttcaagcttaaacatagatctttcactcatagatcttgcactcagtgttgcagttttggaatgcttcaacttgttcttcatgattcacgaaaaatgcttcaaatagctcccaagaagaccgttgtagtaggctccacacaaatgacaagcttctagaacaagtatgtgcactttacagttgttntgaagtgacagctgacataaccattctgaggaacctttgtgatagcatactataaattcatcaaaatagtcattttga

SEQ ID NO: 117503 - DNA, 155 bp, Glycine max
agcttgtacatcatgacttatgatttgcgcctttgtcttgttgcaatcagaggatatagatgcttgatctgctatccacattaagtttttaatgcgcgcaccagcatacttctgtctttccaatacaatacaattgtctgacacacagtcgatgt

SEQ ID NO: 117504 - DNA, 382 bp, Glycine max
  unsure (1)..(382): unsure at all n locations
agctntatcttctaccagtgcatgttactgttattatttgacgagagancatgcggaacctctaaccgactaagacacgtgcacaaacttatctttattcttctcggacaacagatggtatgccgggggcatgtacacctatttcccatcacaccttggatgcagctgagaccgcaaccgatatcatgtagaccttgacaggaattcaagccatacatcatctggtcatgcatgctaacgaacgtcccaatctcactggcacatacatgattctgccatgcataaagtaatcaagggctaacgcagaatcacaccagacagacgagcaagaagagggctatctgtccaacaacctgactatgtctgacctgggcttccgata

SEQ ID NO: 117505 - DNA, 96 bp, Glycine max
ctttttttgtccctaccgggaactgtcgagataggtccaatgaatttggatattatcttaaaattttggacaattattattatatggcctttactg

SEQ ID NO: 117506 - DNA, 213 bp, Glycine max
atcatctacgagcatgatggctggtatgatgccacacttaataatgtatgagtcacaatcctgatgatgataagcgagtcctttttttgtccaagtgcgttgttataccttgtatcgcaatccaacacatattcctctttggtcttgttgaatatccattgttccaacgaaccattagccatgtacctcatatcaagagaacggtgatcgtaa

SEQ ID NO: 117507 - DNA, 181 bp, Glycine max
atatcacgtcgatgccgatatgggttccgatctcactctcctgcagaatatgctcaagatagacggcgaaacctttaaagaatatgcacctgggcggagagacctggcggcacaagtagctcctcccatgggtgagagagagatgatcaccatgatagtagacactctgccagtgttctac

SEQ ID NO: 117508 - DNA, 467 bp, Glycine max
  unsure (1)..(467): unsure at all n locations
agcttggaaggatgcttcaatggaggaaaagttagatgtagatattgagagaggggggagcacgaaattgaaggaataaaagagggagagaagtacaactntgaagtatgtctcacaagaatctcattcatcaaagttacaacaagtgttacacatgcttctatttatagactaggtagcttccttgagaagctttcttgagaaaacttccttgagaagcttctttgagaaaacttccttgaaaagctagagcttagctacacacacccatctaaaaactaagctcacctccttgagaagcttccttgagaagctagagcttagctacacacacccatctaaaaactaagctcaccctccttgaaaaaatacatgataatacaaaaaagagntcctactacaaagactactcanaatgccctgaaatacaaggctaataccttatactactagaatggcaatataca

SEQ ID NO: 117509 - DNA, 468 bp, Glycine max
  unsure (1)..(468): unsure at all n locations
tcccgagagcatctctatntaagcatttcagcctttgctttcttgtatcttaagaaaaatgccatttcttcttctttctttcttccaaatccatttctaaagttccaagtactttctccatcacccacatccaccattagccaccacaaaccatcattgttctccgttgaaaacccacaccgagaggaacccttcaaccgaagtagaatttccaacttggcttgcggtttcggtagagaacgaaaaccctaatctgatctttcattttctttcgaggtaaccatgggtctatgcttgtttcttgttagtttcatcttgtctttgcatcttttctgactttggaaccgccattgcatgtcttatgcttcctttgaaaaaccttagagaaagagactttgtaaacgttatcctttcatgaaatgcatgttattttcgtaacctacactgaaccccggtcacattggcgtg

SEQ ID NO: 117510 - DNA, 430 bp, Glycine max
agcttgtgactaagaatcaaaggagggaatgtttgaattgtttatgttgcgactaaaaatcaaagaaggaaagggtttacatggtgactatagaatgatcctgaatactgaaaagttgcatgaagtataagtggaaatgccaacaggttctataatgatctggaaaactgaaaagttgcatgaagtacaagtcaaaatgctactgttgggcctattagaagaaaacccacgtccataagttaaaagtaaaatgaatagagtaaaaacaacaaatctgactctgatgttttaaaaaccaatagagtaaaattttaataacccacgtgactgctgcacgtgagttttaacatagccataaaccttgtgccacagcctcatacaactctgaattgccgtgcagacacgacctcaatatgcagtctgcacctga

SEQ ID NO: 117511 - DNA, 420 bp, Glycine max
tgtcgcggacattccctctatggcagtaagtaccaataacctaattctaaatcttttgttaagctgcctctgggcattgtgcgttttgttttgctatgttcctcacttaaaatcaaaatctattttaagctacctctaggcctcgtcgacggtgtccctgacatctttgatgccgctagtgatggcagacaaggagacgaagcagtaagagttaatagaaggcgtggagttgacgatggctctggcgatagtggtcttgtcagtgtctggtgggccccacggttgtgttggattgcggagcgaagaaaggagttgggggcaaggagatgctcttgacctacgatgtcgtcaagggttctgggatgcaaacgctcgtacaaaggttcgtgaatgtgggtgtcggggtgttccttgtctgcg

SEQ ID NO: 117512 - DNA, 312 bp, Glycine max
ctttgctctatgcaaaactggtaaaccaactgcaatgtccctgaatagaccttgagatcccggtttacatttcgaagatattgtacgaagccccaacaccttgaggacaacgtgtttctgatggggcaaggaatgttccgatgagatatggaaccaaatgcagcacctgagaacatattcactaagccagaaacacgggtgtcagcagaggtgtaagaagcattccctagctcatataaagaataacgaatcctttgtaccttaaggatttcgcatgagcagggtggccatccgggtagtgaaacttgctag

SEQ ID NO: 117513 - DNA, 390 bp, Glycine max
actattggttgcatcagacatgccgaagacctcctcaccatgatcatatgagcctgcgtagcttcctcctcaagctcgtgctccactgggtattatacactgatgtcatactcaccggtgatttctccatctgccttcatgatcatggtcctccaggttggacagattgaagcaatatgtcctctgtcgttgatggataatgaggcaaaagtatgcttggttccagtgctgggcgctgctgactttcaatgaggagactgtgctgatacgctggataaattgccttccgtcttcttggatctattgaaccacgttctgttgaacgtgttggatgagatttttcttgccgcgcttctcctcatgacttgttgtcaggccagattgacttat

SEQ ID NO: 117514 - DNA, 415 bp, Glycine max
  unsure (1)..(415): unsure at all n locations
ttttcaaaaaacattctcaacagtcacatctttttgtgtgggtcttgaaagggctattcataagccctatttatatgtgaccttgagaccatgatttcataagaagttttcacaacaaaaaagtcttatcctcttataaagccaaatcgttttatcctcttacaaattccttggcgccaatacttgtgattcaataaggaattatttgagtgctcaaatngttcaatctatctctttcaagagagatttcttctttcttcttcttcattctngaaaaggtattaagagaccgagggtctctttgtgtgaaagaattctaaacacanaggaagggttgtccttgtgtgtctagaacttgtaaaacgaatttacangatagtggaactctcaagcgggttgcttggggactggacgt

SEQ ID NO: 117515 - DNA, 397 bp, Glycine max
gatattaaattattattcactgataatttagtatttagtcatagccttgtgacttgaaacttatggggaagtattcaacatgtattttgcgtttgcaggatgagttccatatccatttcattggggagcacctacatttgatgcaagtgaaacctttgccatgatgatggcatcctttgttgctcttgtagaagcaatttctttctttagaccttttctatctatatttaatttggaacaagagttctttttatttaaaaattaattggtatcgttcttcctatgttatacatatttatacatttatatttattctattagcttgtatattcataatatcctatctcttctgtgtatttataagagcttcgtagctagacatgcagtatatcatatc

SEQ ID NO: 117516 - DNA, 416 bp, Glycine max
cctgacatctcaaacaaacaaatcaaacgtaacaagacaattatagttgctgtttgaatacctcacccactcaagtgtatcacacaattatggcttttctctaatgaaacactcttgccttttaccactctaattccccttgagttcttaggcaattcaagagattatggccacaacaaagaacaattcaccaatatgtgtaaggtaaggctagagagacaaggaaaaggttaaccaagaaaaaggctaacaatgtttttaggcacaaatgaaggaaataaaattcagaatttaggaattcaagtaacaatccttcatgcaaccaatatattaccttaaagagattttttttttaatagttcttcagcatgaaccattcagcccaattttttttttttttaatattgttatacgaa

SEQ ID NO: 117517 - DNA, 446 bp, Glycine max
  unsure (1)..(446): unsure at all n locations
tatatagatcgacgcgctcanactggacacgttgctctctagtaaattaaatgggcataacattcaaaaccgatgtctgattcggtgcatacatacagagacctcaaaatgactccgaactctccaaaaacacatgccaactttccacgatgaccactcggcgcataaatgttcagatgctcgacattgacaatcgaagctgtcgagaaattcagatgggcataaccttccacacggaggtcagattctggcacataatcaatcgagatgctcggaattgaaccacggaagctctcgagaaattcaaatggtcataactcttcactcggaggtcagattctggcacataatatgtccagatgctcggaaatgaaccacggaagctctctaaaaatcaaatggtcataacttttacacggatagtcgactcaagcgtcatacatata

SEQ ID NO: 117518 - DNA, 470 bp, Glycine max
cttgcttttatctgtgctcaatagaagcctggggtatggaatatatgtctatttctcttaacattcacgcaacaatgagtgattgtgagatctgtgtatagaaaacttttacaaaatgtatatattttccccaagttttgatcttttacgaagatttgtgagattttgagtgattgtgagattcctagacgtggaggagacatcctcactttgtaagcaagcaattgctcttaatttctcttcttcattgtaaaaggagcttccttgctatggaaggctaaatcctcagttggggattcttgctgagtaattgatgtaaactctttccctatccaattaaggttgttttatgtgttcattgtttctatcagcactttattattgcatgcttgtggcttgataagccatatgtgtgtactattaggggctttagcattgaaagatatattgtctccttagaacttgataga

SEQ ID NO: 117519 - DNA, 466 bp, Glycine max
  unsure (1)..(466): unsure at all n locations
ntagcctaatcgctaagcaacaacatatcagcggctaagctttatctattgtcgccaagcgcaattccttacggccataactgaggtcgataaagctaagcgccagtcatggcagctaagcaagaatcattgcgacaatatgagcgctaagcgagaacctctcaactaagcgcatgctcctctgtacttaagatgcatcattttagctaaactggccagagcaaggcttagcaagagttgcagattttctaatctgcaaacctcgctaagcggacttactcgcacgctaagccgagtttctgtgcaaaaaataaatcgaatttaaaacgtcggctaagcgcacgtttgctaagcgagcctggtttagaaaccaaatgtctctcttgctcgcttagtgcaacggtccgctaagcgaaagtatctaaattgcttaagtgagtggaacaacagttacacccacattttc

SEQ ID NO: 117520 - DNA, 422 bp, Glycine max
  unsure (1)..(422): unsure at all n locations
agcttctcngctcctgccaggaactttctttattcttatcacccgtgcagcctaaagcacccacccagagggaagctccccaagttccaactccgaacgcgactcgaccggccggtaattccaacacgacaaggaactttcctcagagaccgttgccggaattcaccccgctcccaatgacgtacgaagatcttctaccatccctcatcggcaatcatttggccgtggtgactctcggaagggtcttccaaccccctctcccgaagtggtatgaccctaatgcaacttgcaaataccatgggggtgccccggggcatctcatcgaaaaatgcttggcccttatatacaaggtccaacatctaatggatgccggatggctgaccttccaagaggatcggccccatgtgaggaccaatccgctc

SEQ ID NO: 117521 - DNA, 336 bp, Glycine max
gaccttaagcgacgcggctgcagcttcccacatcagtactaacatttacttattatttacgccaacaaaaggcaagctaaacttgccaacaccccaaatacagctttctattaaagacccagtatattcctcgtccacttcgtaaccgttggatccacttgaaaagttacctgaaggctctagtacttaagcctacattgtgaccggtgggatctacttaaaaacatccagaactcattctgtgctactctttccacagcccaccacacacaagcattttgctgctcaaatgcaaaattctgctgcacctatttgacagcatatatctgcataagt

SEQ ID NO: 117522 - DNA, 433 bp, Glycine max
agcttatcaatgtaaaggcgaagggagctcctcttgtttatatcaaccaaacttctgtttagaatagatccattgtgcaaccaaaatgtttcagctgagtggagaaattgtcgaaaaaaatgttagcacataattcctcaacactcttcacacaatcttcactatcagtatcatcgttggccaaatcatcctcacattgtcccaacacatagagactggtagctcctagtgtagaacatatctttcgaccacttttcacatcattttccaccatgcaaaacagagtcccttctcacactaacccatgatcatcactctcttatactgtgacagctctaaataaattaacaagagaagatggtgctctgtatcccttctcacactaacccatgatcatcactctcttaaactgtaacagctttaataaataaca

SEQ ID NO: 117523 - DNA, 257 bp, Glycine max
  unsure (1)..(257): unsure at all n locations
agctnataagaacaaacatgactcaatcatcttctaatatgcatgtgaattangacgcatcaacnagaatcaagcaacgctattgcacaagcaatcaatggggccaaacacaccaaatgattatgatgaaggaaggctcaaacttccacaaaagaatactcatcacattccaagtgggctgtcaaaactatcatgacatgtacaaaagaatcaaggcactcaaatgtcacaaatcgcacaaaccattaatttataaa

SEQ ID NO: 117524 - DNA, 388 bp, Glycine max
tgcagctttgagggtgccctattatgtgccttttttatatattcgaaaattccctagccacccccaataaagacttatataacttgaacccttagctctttaaaatcctaaacatgtcaaggatataaaataagcttagggttattaaacaaatcatattcctttgctcaacagggtgtagggaaaattcatcacagtggctttttgctgagggctaaaaaaaaagaacatgacattgatctatcaccttatgcaatatctaacatctaagaatgagcaaatttgaattacaattacatcttcatataagtcaccagctactggcaaataaatatcgctatgaccatacttttcacaactaccttctctcttttattattccactgta

SEQ ID NO: 117525 - DNA, 381 bp, Glycine max
tgtattgcgagaaatacagaaacaaacaaaatgtatccagagaatcaaagaaaaccaacatgtctgagataaaaatcgaagcttttcgtagaataatgtcttgatccaccctctctgcatacaatagcaaaggattgcgagaagcacaaaataaaaaaaaacataaaccttttgagtgcgagaacttagaaaacaaaataaaggaagaacacctaaaaaattaaagctctcgtcttgtgaaaaatcataaaaccccaaaaaaatggggatagaaagaatgaacacatgtgagaaagctgacgaaaacgaaaaaatctaaccactaaccaaaaaaacaaagaaaatgaacccatactcgtggagttttcaaataaaaactgc

SEQ ID NO: 117526 - DNA, 268 bp, Glycine max
acacatcgaaactaagctcttaaagtgatgcacctttacagactattgctttatgtatgaaactgagtaagacactttcctggcagtgctgagatctactagccaaataatcagctttgaataccacattgcctactgaaagctactctaccacacatgtccatgtgccctagaccattgcatgatttgcagaaatgtactgcaaattatggctgtgataagcctgcttgttgcacaggtccgcaacagaaaattcttgatttttaaa

SEQ ID NO: 117527 - DNA, 367 bp, Glycine max
taagaacgagaatggaaatgtataattcgctatgggcaccaatgttctttgatctttataaccccgatcgggtcatgtatttgaggtgattttcttaattaaatcaaagcacgccgcgtaaatctaatgctaattcttgttccttgccaagacatatgtatacctcctttcatatgacgtacccaccccttgtcgttaatggtaacactactatatatttttaattgtaataaaatagttaatactttaacaatagatcatgtcaagatttcgaaattagctcaaataaaaatctaacactgcaatttcttaaaaatatatttgtttattaaaaataacacaaattacaagtgcattattattgtat

SEQ ID NO: 117528 - DNA, 456 bp, Glycine max
  unsure (1)..(456): unsure at all n locations
agcttgttaaagaacttagaanaaattaagattattcttgttcgcacatcgctcgtgtgtatgatatccacttcacaaggtttgaagtaaaggagaccttcaaccctataacgcaacgtggtggacaaaagtgggcagtttacttgaatggtcatcattgtcaatgcggaaggtattatgcgcttcactatccatgttcacacattattgcagcttgtggttacgtgagcatgaactactaccaatatatatatgctgtttacacaaatgagcacatcttaaaagcttactactcacaatggtggcctcttgggaatgaaaccgctattcctccttctgatgacacatggacacttatccctaacccaactacaattcgagtgaaaggtctgtcaaaatctacaggataaggaatgagatggattggctcgaaccatctgagcaccgacataaatg

SEQ ID NO: 117529 - DNA, 284 bp, Glycine max
tatgtaaattacacttctgcgtccatagaccttattaaacactcatagtgtcttataatggctgtcatggcatctttatgaatgaaatgctatgatattctaccttttaacatcatatgcttgtctatttacattataaggcgatgtgacatttaggccttattattgccaaaatggggagaaacattgcattagcatcgcattaggaatgattagggcattgcaaacatacattcatatacaactatacccaatgatgatcataatatgatctgacacttctc

SEQ ID NO: 117530 - DNA, 209 bp, Glycine max
ttctcaatagtcacatctttttatgtggttcttgaatggctatcacaggcctctatatatgtgacttgagacacgaatttgcttagagtttttcataacaaaaaggtcttatcctcttataaagcacaatcgcgttatcctcttacaaattccttggccaaattacttgtgattcaataatgaattatttgagtgctccaattgttcaa

SEQ ID NO: 117531 - DNA, 351 bp, Glycine max
cattttcgccgcaatgttcctcttcgacgcgaacactaacacgcatgctgcgagcatgcgcgcttacaccgccactgggctgccatctcgctggtgtgaccctttgatcagaagtgtctctctccaacaaacccaacgccaccgcatgtgccaccacgctccccagactccgacatgtcaccctcacgcacgatcccctttctggcacatgacgttttcacacaacccacttgtcagcgacctcttggtttggctggttgttggctcctgttgtggtttgttggctgacccacagtctagcggcccaacatcgtgctttgtcacttttcagcgaccttattaagctttttc

SEQ ID NO: 117532 - DNA, 361 bp, Glycine max
  unsure (1)..(361): unsure at all n locations
agnctgctcctggacatactatatggttctttctatgtgaattgtcttcccatccaaggtggctctatcatctgcaagacatcaatccatacattgaaatccttaatgtcatttatccctgagcccctttggcataatccaaacctctcattaatgtccctaatgctattaaaatcaccaaagatgcaccaaaggtcctctatgaaagactgtttgagctgtataatttggtcccacaacagacctcttgctttgaatttcgcaaggtgagtttataaataggacactgatttgttgagtctcctttacccattcacctttctaaaaaataaaaccactttcgacaacttttgtctgtaat

SEQ ID NO: 117533 - DNA, 170 bp, Glycine max
ataaccaccatccgtgccactcaatgactactgctccacgtagccatatgctggtctaacacggcccaaaatctcccagttcccacatcaaagtagcaaatcaaacgatagacttacaggcagaaaagagcaagcaaaaacttgcaacccaacaaatacagcttttcact

SEQ ID NO: 117534 - DNA, 467 bp, Glycine max
  unsure (1)..(467): unsure at all n locations
agctngaacatacgaacttgtataaattactgggagttgttcactacgntttttgagctggaaagtttactgaattttctaaacatctagaaaaaaattataaaaaaagaacccagcgatttggattaaaggaaaaaataagaaaaatcgcacaaggttgcaaaaaaatcagtgtccaggaaaaaaaatagtgaaaggaaagtgtgcttgttgctttggctcaaaatttgttctataattggtgcctatttgataccaatcctagttatgaaatttaaattgaaaattattgtgaaaacaagtgtcaaaactagaggtttcttgagtctnttttttttagagtttntctactctactctagagccattctaggtttctctttgagtcctagctcgctctttgggtttttcattgctttaattgtgaataatccctggaaattttcggggtaaacttattggttaact

SEQ ID NO: 117535 - DNA, 469 bp, Glycine max
  unsure (1)..(469): unsure at all n locations
cctttgggtgttcaccatgttgctcccnctatctcttacaattaccatttattcacaatttgatgatggtacatatgaagaattgggtgtagttcaattgtcttcttcaaagttaagaaaacacatcaaaattgagtgactatccttcttggatgttttttgtaagatgttgaataaatataatggataaggtggattatgttagggaaatggatgntttttgcggtctaaaaccaattatgaattatgcaacaaagtgtgttcttttgaaagacatttatgaactcattttgttntgctggctagttttgtgttgtatttattggatgttttcacatacatctaatgtattagactatgtgataattataccatcaattttccaacaatttgttgtcgatggttacaccatgatggactctaaaagattgtcttatatcaaaatccaccagaagcaattacaagtaga

SEQ ID NO: 117536 - DNA, 319 bp, Glycine max
  unsure (1)..(319): unsure at all n locations
tatgattagttgctttatgttgaccattgcgcatagagtatacgtggggaaaagaggaacgtagacatattggagtacttatttatttattttgggcttaaataactttagggctgccatatataactgatttatgatggagcccttgataatattttttattgccttgggttcttaatatataaagacgtttgattaagtctctactggcagacaaatgatgacattatttncacagttgatatatattgaaagaataattgaaatgatgctatgtcttatttaacttacgattaagaactaatcaaaacttttaata

SEQ ID NO: 117537 - DNA, 431 bp, Glycine max
  unsure (1)..(431): unsure at all n locations
anctattctcacagaatactgtgtaaagtatttttgataccatgccaaagttgcttctttgtataaggtaattttaaaaacatgtacaagcacatgtggacttgtctcaaaagatgccttaattttagtgtgttccaacatgatactgttggtcatggtttctcaaacattacataggtctccaacgatatttctgagtagtctctttaaaacacaatgagcagattcaaccctgcatgtgaatatcacacaaaataataaacaaatataagtatttttatccatctaagtccataaatcgtaattaaagaatgacaattttcatgcttagttgtagtatgtttcctatgtgcataatcttattcgtccagactttaacgaattttcctttatgggtattattcatgtttggttgacatagncaaccaaca

SEQ ID NO: 117538 - DNA, 444 bp, Glycine max
  unsure (1)..(444): unsure at all n locations
gatgttataaaggctatgcacctacctctggaagtttttgtgtcatanattatcataagtacgtttacaacttgacatcaacatttacttgagattctatagcttctgatacttggtttacctggacataacaatggggagcaattgatggaaaatgaatcttaaattgctctaacgagaaggaataaacttgttcttgatggtgatttggaaagacaaatcaaagatctccatgaaaagtatgtctgaccagatcaaacttttgtctgaacttggagcatgatttaaattacagccttgtcaaaaagaaattcactcttttttattttattttatttacatcactggtacaaacattcttaaaaggagtgagcaagatagatcaattcatagcttttcaatttttgttgaaattcatcattgtactgtatttcaattcatagc

SEQ ID NO: 117539 - DNA, 425 bp, Glycine max
  unsure (1)..(425): unsure at all n locations
gcttttttgaaacaagatggatggatattatatattattatacacgnagacagaataaagataaatagtacctatgacaagtatacaatagataaaaaataatgagttcaagtatttgatatatcaaggttttcttttcaaagaaactgacattaatcaattcaaaagtgagatgntgaaaacaaatgaataaagtgaaattatgttcttcctcaaagtatcattcacagaatttttgtagttatagatttgatgtaacacttcaccaaaatatcattatactctccgagaattgcttccctccttgcaatggatgatacttatatatttcggtgaccacgtccatgagaataataacacgaatggattcaaagcagttttaataacgtacgtgcagccgtcaagcttttttatgacttatgagt

SEQ ID NO: 117540 - DNA, 463 bp, Glycine max
  unsure (1)..(463): unsure at all n locations
agcttcacgcagaacacataatggtaacaatanagcgacatataaatantttgcttgaataccaccggagaaatgttctagcagccaacgggcagcttttgcaaacgcaatctttaacaaagggcggttccatgtaaatcagagatatcacaaaatctatatatactactaggacatatatactattatctatgacggtacagtatctattttaaatattgaaacagtaagaaaatgaataagcaattgcacgaagaattaaaaagagtgaaattgagcatgctaacacttgtcaacaagcatggtgggaaatcaaagacacatacccttacatcaaccatagaaattcgagtgcgctcgtttggaacaacatttttggtacgttcttcagacttttggtgctcaagctcaaaaccacctgtgacaagatgaccttgtaactcaacctacctatgcctgcccc

SEQ ID NO: 117541 - DNA, 421 bp, Glycine max
  unsure (1)..(421): unsure at all n locations
ctcctcatttntatattattattttcactatattgagagagagtaaagttgggaaaaaaaggaactaggtaacctttaaaagcttctcttgttcaattgctgcttctctagcactccaggcagaccaataagaagcaattaaaatggtaccaacagccataagccacagaaacacttccgcaacatcaaccaatggacgcaatggagagtataactggatggacactaaagagcaggaattgtacatgcaaaagtgcaaccaatatcaagtaagacacatgtccacatcaggtataaaatataagcctttattttaaaaattaaactgtcctgtgccanaagaaaagccgtaactaattacataacaagagacaactnncgagaaagtcatcatacccattggagtattttttatatgcct

SEQ ID NO: 117542 - DNA, 463 bp, Glycine max
  unsure (1)..(463): unsure at all n locations
tgttgacactaatatctcggatgatcagtatggtgttgttaatcagagatgttgatatcgtattactggtggagtaaggaagcacgacctatcaattgttccttttacacctaaagcaaaccaagttggaatttgggaaatgccttagtactccagctaggatgttggtgaagaattggtcaagagaccaggttgttaattaagggatattatntatgttttctgtttaagagcactaantttacgagttttggttttattttctgttttgtgtcagatctacaaagaacaataatctaatgaaattggcaagttaatcggtaaaacattgtccatctatttgttgcctttcaatatattgttntcatattatttttctgcttattctttccttgttacaattatcacgtattcttggaattattagttcttattgctattgttcccactcaatttacttctg

SEQ ID NO: 117543 - DNA, 333 bp, Glycine max
  unsure (1)..(333): unsure at all n locations
cctgcggcatgcaagcttatccattacatttagattatttttattttttatagtncatactcgcctgctcaatgagatatttctgacacaagattagcaagctggaagatattgcatagatgtttgcaaatcttatactcaaatactcagaanatcgttatttatttaaacaatttggaaagctactctggtaattgtgcaggtgttgtatttataaagctgttacagaacctataccaacaatgtcaactgaaagaccaaggcaaggccaaagtctacgcaacctaatagaaggtacctcaatacatatgtgccaaatggtcccagttttgt

SEQ ID NO: 117544 - DNA, 458 bp, Glycine max
  unsure (1)..(458): unsure at all n locations
nttgtcactctacccatatctggccttgacattaactagtcttaacaccatcgacaacagcgccaaggaattcttacaccccgtatacaaaggcttctttgaatgattttgcaatccttcatacatacgggcatgtgcttgctgaaaagactcttgtccaaggtcatgaatcatatcctccaagtgatctcccatttctacatcaagcggntcaaattgggacccactctgcatgtttgtcaattcaccatgtcatatccatgtcgtgtaattcttcttaatcccgtcacacaatagatgctcccgtatgtcgtccagtatttgtcatcttccattcaaacaattaatgcaaggacaataatattntccatcttcatccggtcaacttctttctgaagcaaattacaaaaactgctcgatgccttcctcatattctgggctaatgcgactttcattca

SEQ ID NO: 117545 - DNA, 360 bp, Glycine max
  unsure (1)..(360): unsure at all n locations
agcttatgcgcatagtgccttacaattctttttcttgcacaagacattctaataaccgaaaaagaatgcacccatatacaatcaaggcagcttcggtacctagagtatttacacgtacttgcaacgtgtatgtgttacttacatcacacacatctncttgggtgaattcacatacatgcatactcaaagcattttggggtaccaaaaatggcacatgcgcatatcttggtatttctaatacctatacatacacaaacttcatgatgaatcttgactatctacacaataaggtgctacatttcatgctcttttcaagattttgctacctaaaggccgatgcgaatttcagtatattttcct

SEQ ID NO: 117546 - DNA, 399 bp, Glycine max
gagagaagctgaacatttaagtttgtctgacaagactttcattcatcaaagatacaacaagtgttacagatgcttctatttatagactacgtagcttccttgataagccttcttgagaaaactttcttgtttgagaaaaattccttgagaagctagagcttagctgcacacacccctctaataactaagatcacctccttgagaagctttcttgagaagattcctaaataagctagagcttagctacacacccctcatataactaagctcacctccttgagaagcttccttgagaagatatctaaagaagctagagcttatctacacacacctctctaataactaagctcagctctttaagagggaagctagagcttaacttcacatgccctataatag

SEQ ID NO: 117547 - DNA, 459 bp, Glycine max
agcttcttttggaccttgaacaggctactatctcctctttcaaaaccatgctatgtgctcgcgactggtccctttcttcctttcgcaacttgagttcactattgctatcccatagagctccgcgaaatttgttccggccatactcttccttgcgagccctcttggtctcttgttcaagggctcttgcggtaattgcattctcttcccgtaacccggcacactccttccgaacgtgtgtagcggccaacttgaacttctccttggcaagttttgcctttcctaattcgctcttgagagcttggacttcttcgtcctcctccggtgcttcaaaactctcttcgctgacgacttttaacttggcgagccaatctaaacctcgtatatgaactatcagccatgcatgggtaccaccaatgatgccattacgaatgcctcttagctcttgatctttccttaacg

SEQ ID NO: 117548 - DNA, 435 bp, Glycine max
  unsure (1)..(435): unsure at all n locations
tcaccggatgattccgatcgaacatttcctactctttatttccaattgttattcanggattgaatagaataaacaatggccggtgtcagtcgttatatggccccgactgatatctttcagccgacattgcgcaatttcctttacaaacgctggccgataatgtttttttatttacggtagtggaagttttttgttttggtgttgcctaaaaaatttaccacgtaggacggctaggtatttccgtgcgagctcaaccgagggttcgttccgaccgacactggcatgttgttcttcttatttaagaggataagaaaacgttcgcccaccctggcaaaaacaaaaaaaaaaaacattattcaccgaaattgatccaaaaaaatgatagcggaccgtctcatggagagattaccgatcgaggtctaaaaaagaagcatt

SEQ ID NO: 117549 - DNA, 456 bp, Glycine max
  unsure (1)..(456): unsure at all n locations
agcttctccctcctttcttgatttattattttcttcttctctacccaagcttctatcccgcactgttgctaagagaaaagaattctacacagttagaggtctttctttntgtctaaaacttccttgggtgcttgctatttgattgcgaaacctttatttcccgctattttgacctcttttgtcatttttccaatcccacccagaagctagtgaatgggtttatctaatatcttattcacgaaacaaaatttgattggagcttgcttatgtgttgattaagtcattctccatcagcaccaacaaccatagttagtaaacgaaatctctcggatcaccatgttgcttcctttacattctctctcaagaacagtgccaaaatttacgggaacatgtgaaacttaattttgtttacctggaaccctgagaggcaattatcattcaaattctcactattct

SEQ ID NO: 117550 - DNA, 353 bp, Glycine max
gacaccactcacgctattttgctaacccgagaaaccctttgggtgtttgtgaggcctaaagaatggtttatgccgagcgttgatgcacaatggccaagcggtgggctatgcttctagagaacctaagactcatgagaggaatattccccccatgatctagagatggctgctgcagtttttgcccttaagatttggagacattatctggttggctctaagttcgaggtgtgtagtgatcataagaaccttaattcttgcttatcagaaagagctgaacatgagacaaaagagatgtgtagagtttcttaaggatgactattttgagcttatctaccatcccgtgaaagccaatg

SEQ ID NO: 117551 - DNA, 463 bp, Glycine max
  unsure (1)..(463): unsure at all n locations
atcctctgagtcacctgctgcatgcaagcttaagcgcatatttccttacatactttctcttgcacaagacatttaaccgaaaaagtgcacccatatacaatcaaggcagcttcattacctagattatttacacgtcctgccaaggggtatttgttacttacatcacacgcatctccttgagtgaattngcatacatgcatactcaaagcattttggggtaccaaacattgcacatgtgcacatcttggtatttctaatacctatatatacacaaacttcatgatgaatcttgactatcttcacgaaaaggtgctacacttcattcctttngttcaagttttgctacctaaagccgcatgcaattcaagcatattttctctgcggactaaaattgtattacaattaaaagtatatattntgaaatatgtttcttctgcaacatatttatatatatatatttttt

SEQ ID NO: 117552 - DNA, 390 bp, Glycine max
ggagtccaaccttctcctttgggagggggtgaggcctatgccttccacgagcctcaacaggaccaggagaacgacatttcagagaccgcagagcctacaactcctaaggcattcactttagagtctgatccacgtgttgtatatgttcacgaggatgttacagcattagagccctctccagtatagccctctccatcagagccctttatttttgaggctgatccagctatatctccttagcctgagccatctgcaccagtgccgaacctgcctgtttcacaagatccatcatctgcacctgcactggacctgaatgagcatgcacacgatcattgataggatcaggatttttatttccttgcatttgaatagttattattattaatatgt

SEQ ID NO: 117553 - DNA, 479 bp, Glycine max
  unsure (1)..(479): unsure at all n locations
cgaccggatccttaagtcaccgcggctgcagctgtgcaacaaggctctccgcatcttatctctagcangcattgtatgttggtctcgtcctttgccacgggaagccggaaggtccatatcaccttcttaattgtacacatggggcactgcgcccccaaatgcgcaagtaagaagagataattttccgggctctcgtgtccgttaaatgcattcatatcataagcatctcttcataacatcataatggacatatcctgcatttgtccgatatcatattccagcctcacattttgcatgagtcatggcatcatcatgcatatgcgttcaacaaactttctggtctgcaaaattgcataccatttgttatcatgttagctcatccttgcggtttcctctacaaaacaaatacaaaagagggggaagcgtgaaacttcacactacattcttagtgtcatgtggtaggcaacacaagtcaacca

SEQ ID NO: 117554 - DNA, 355 bp, Glycine max
gaagatttttactaagagtctaataaagatgaactcaccttcatctcatgaaagattctcacgaagtggaagaataacaggcgattcaaatagaagaacttctcacaaatgttgctcaaggagaagaaagacaaacaccaaagctccataatatggtgtgaatgcacgaaacctagagacttctaatctaaatgcccaaactagagaagtctccggataagaagaaataccaccagtccaaggaaaagaaaggtctctttatcaacctaagaggatctggacgacacattgtctaatgaagatggagagaaagccaacctatgttcaaagggagacatagtctttgaagaataag

SEQ ID NO: 117555 - DNA, 463 bp, Glycine max
  unsure (1)..(463): unsure at all n locations
atcctctaagncacctgcngcatgcaagctngcatcacatcaatcatcgcttgtcgctattcttgatgtgaaagtgcttcctggacaactttatgtatagaaacagaggaaagggcagacacaaaggcatagtatgaaggtgaaagacgatgataacttgagaaattataaatgggatggggattgcgagtagtacagtaacctttgtggatggcaatgggtaaatcaaagtcaaccgcaacaggatgaatgattggaacaagagatgatgcaccgctttcttcaataagggatgcggggtcgagggtgactgtgataaacaagaaagggaggtgttgagggaggggaaaaaactgtttggtgaggcatgacagaatgaatangtaatacctaagagacagacttcaaggagatgggtgagttgaaaaggtctatcctcgaagaaggtgacatcatctaacat

SEQ ID NO: 117556 - DNA, 287 bp, Glycine max
  unsure (1)..(287): unsure at all n locations
agctttgcttggagcttcaatggagaatgggtatatttnatggcaacgcgagggagagagagagctatctgacaaagtgtgggggctgagtgaagagagagaacagctttttggttttaaataaaaggggcttctctttctctattattntatttaagcaatgccacatgtctccatttgagtggagcaaaaagggcccactttcccttnttgactgtgacccatactcagccacaaaagtgagaaaatctgaccctcaaaacgctaaaatactgcctcggtttgcg

SEQ ID NO: 117557 - DNA, 480 bp, Glycine max
  unsure (1)..(480): unsure at all n locations
ctaagcttctgcacactccagaaatcttcttcatatccaacggttatatttggacaagtgtcttgtgaagttgcagaccacatntcgagaagatccaacggttaacgaaggctgggcagcgttcttaccgaggtagcttcatgtagctttctctagaagcttcattaagaggcttcctccataagcttcattaagaggcttctagcacactccagacatcttctcatagatcccaacggtcagatcatggacaagtgtcttgtgaagttgcagaccaatttcgagaagatccaacggttaacgaaagctgggcagcgtttttaccgaggcagcttcatgtagctttctctagaagcttcattaagaggcttcctccagaagcttcctcgtggcttctttgagaagctttctcaagacgcttctttgagaagctagatccttatttatccacatccctcttttaactaaattaacctcctt

SEQ ID NO: 117558 - DNA, 365 bp, Glycine max
  unsure (1)..(365): unsure at all n locations
atgaggtcctttaatggcgaatttccacaatggagatgcagtggaagacaaaggaaaagaggtgagaggaggcaccatccactagggaataagccatggaaaaaggagcttcaccaccaagataagccttggataagaagcttggagaggatgcttcaatggaggaaaagaaagagggagagaaagagagaggggggagcacgaaattgaaggaagaaaaagggagaagaagtgaactttgagttgtgtctcacaagactctcattcatcaaagttacaacaagtgttacacatgcttctatntataaactaggtagcttccttgagaagctntcttgagataacttccttgagatgcttctttg

SEQ ID NO: 117559 - DNA, 427 bp, Glycine max
  unsure (1)..(427): unsure at all n locations
tagcanagtaacacaatgctattaggtgtatttgtcataatcccacaaatgggttgaattatcagagagatatacaagaacaaggaatgaaaaggaacaaatatgctttggtagtattttttgaatttcaaataaacaagtagagattcaccttcaaagggtttcccattcacaaaggatttgccctttctgcagtagagctaaggttcaatttcctaaatgataacagaacaaattccccattcttctatcctcttccctcctttaagctaatttcttgtctcttcaacttttaaccagcccactatcctaactaactattctctttttgataagaatcttaaaacttttatgatttccactgtacacattgtgtatgtagtttatatatacatcatacacaccaaaatattctaggcatacactt

SEQ ID NO: 117560 - DNA, 411 bp, Glycine max
  unsure (1)..(411): unsure at all n locations
atactaagcttggacacgattgcagcgacccgagtgacacctaactgcgaggtttgttctgcatggcatcgtaacttgaaatgaatattattacaacaatttcattattttcacacatgacattcacaaagatactgatcttatatagtaaattcaatgttactgatcctttcttggattgctctatgtcttatagacgatactggctcgattaatacgtcctgtatgatatgatctgataatcagagtgatcaataaataaaaatatcacataagtgtttataacatagtatttctatataattgctttatattctttgagaaattgattttaaactctatatttaataatncacttctgccccctaaacttaagtctctaaattaatttgttgacatgcataatgtgag

SEQ ID NO: 117561 - DNA, 420 bp, Glycine max
agcttcatgatgaatcaagaatgattcaagttgttttatgataacaaaagtgatgaccgaaagctcaaaggtcaatcaaagaatgagttccagatgttcaagatagaatctagaaagaatgagttccagatgttcaagatagaatcaaaaacacttcaagattcaacgatcaagcttccaagaatcaagatccagattcagaatcaagagaagacttaatccagattctagattccagaatcaagagaagactttatccagattagtatgaaaagggtttttcaaaaactgagtagcacatggatttttctcaaaacatgttctaccaaagagtctttactctctggtaatcgattaccagatcgctgtaatcgattacctgtagcaaaatgaatctgaaaaagttttcaaatgaattta

SEQ ID NO: 117562 - DNA, 266 bp, Glycine max
gacttaccttgaattaattcctttgatagtccttttgagccttgtttccctttccttggtttgaagctcactacaagccttaagtgaacaaccatgatattaccatatccttaaggaattttggagctttggaattggtttgggaataactgtggggggtttctgtttcattggacaacatggttttgtgactatgcttcaagatggattttgcgccctacttgatgtacattgtataatggtttaatgtgggacattgctaatga

SEQ ID NO: 117563 - DNA, 387 bp, Glycine max
  unsure (1)..(387): unsure at all n locations
aaccntagagtcacctgcagctgcaactttanaaaaagaagagatttggtttttgttctcacatcatgggcggagggaggaggataatacacgaataaggtgggttacggctaccccacacaataataaaaaaatacaataatgtacccatattttatttgatgagattgtccatctttaaacaaaaaaatatatacttggtatgaaaaaataacggactatatgctttctataaagatgtcagcatattactgttttatgacttattcttacattccacttataataaaacataaacaatcctaactcttatttcgatattatagtaatcatgtggttagctccaccctgcttaacacgacgatggaacaaattcattatttttat

SEQ ID NO: 117564 - DNA, 455 bp, Glycine max
  unsure (1)..(455): unsure at all n locations
agaatanatggtgcaccgntgttcactgtatcttantttcttagnncctcagagcaagtgagtaatgatgtgtcaggtgacaacactgtattccaagacgatgatttccctggcatggactgcggcaatgatacattcaccaatgaggatgattggcgactcttataaatgtgattgccggactatgacatggattcaaagtacaggtcaaatatatgttgcttgattctcatgggcctaattgccactgcaagtttggttgatccctggcatggggattccactcttcaaacattgtttaatagtcttatagaaagtaatttaaattcattatgattctttggcttaaaatcatttgctcatttgtcgtatagctaaccaggtatttgttgtacattacaacggctagttagatcatatgtgttgcctgtaccctcttatttgctacacaaatg

SEQ ID NO: 117565 - DNA, 75 bp, Glycine max
cgtatatgacccatatctgcttaaaaaatacccccacctgcctcatacatactgtgtatcaataatattttccac

SEQ ID NO: 117566 - DNA, 423 bp, Glycine max
  unsure (1)..(423): unsure at all n locations
agctntacatcaaatgccactctaccccaagttttattaggatatgttaacaaggaaacacaagtatattcaccacgataacatttttgtggaaggaaattgtagtgctgggattcaaaagatccttccacccaagcataaagacccagtgagtgtaaccattccttgttcaattggagaagtcactgtgggaaaggctcttattgatttgggagccaatataacctaatgcaactctccatgtgcagaaggttcggagagttggagatcatgcccactaggatgactttacaacttgctaactgctctattaccagaccatatggagtaattgaagatgtgttggtcagagtaatacattttatcttcccgacagactttgtagtgatgaatatctgtgaagataatgacattcctgtaata

SEQ ID NO: 117567 - DNA, 415 bp, Glycine max
tcctgctcaagctgtccaaaatgccacaaatgtcagtgccatttcattgaggtcgggaaagcagtgtcaaggacctcaacccgtagcaccttcctcatctgcaaatgaacctgcccaacttgtctctaacccagaaaaaggtaatgacaaaaatttacctaacaatttctatgccgatgaatcttccactggcaattctgatttgcagaagcagcacatcccttctcttccattccctccaagagcggcttccaacaaaaaaatggaagatgcagagaaagagatcttggaaacatttagaaaagtagaggtaaacatacctctgctggatgcaataaagcaaattccaagatatggtaaattcttgaaggagctgtgccctaataaacggaagcttaaaggaagtgaacaaatt

SEQ ID NO: 117568 - DNA, 356 bp, Glycine max
  unsure (1)..(356): unsure at all n locations
agcttacaagcaagcttncatcatatgatgacaaagcatttcatcccaatttgatatgaaccttcattgcacaagggctgacctaagatcgtctatgattaaacgttgatggaaaattcacaaattgagtaagataaggatgggaaattggccagattgaagggttgggcagtggctaatattttgggtcttattaaggtggatcttggtataaaatggatgaatcggatggtaaaaacatatgttaagtggtggttgaacagaaagaaatggttataacttacgctacagggctccaaatgaaatgattccaaaatgaggtgaaagatctcgctttgaatttcaatttaagctca

SEQ ID NO: 117569 - DNA, 409 bp, Glycine max
  unsure (1)..(409): unsure at all n locations
tgaaccaaaaccggtgagagagtgaccttactctgttagtgttcgactaactatgagtaatgaactttgcctaaatctctgaatctagaatgattngataactcagaacatgatgaacgccatgaattgtatagacacaagctcttttgaccacttagcttaccttgaatgatacttggatcttttgctcccttgataaagcttactgattcgccatttattgaaccctgaactttaaatgattatctcctaataccttggttagattctacgagagcatatggtccacgaaaatttactctaaatttgggggacgaaagtcacataagatgaaaagaacaaggttaagcatatcagcccacacaacaaataagttatatgttaaaaaaaataatagtgtgccatttca

SEQ ID NO: 117570 - DNA, 431 bp, Glycine max
  unsure (1)..(431): unsure at all n locations
ncaagcttactatataaggacatatgttatagccttgtgttgatagnctagcttctaaccgattccataagcgtgcggtttcttctttcgacaacaccgttttgttgtggtgtacccaccatagtatattgggaaacaataccctcctcttgaagaaactttgcaaatggatcggcttgttgccccttttttgtgtacctaccataatatttcccacctttatcagatcttatgatctttattttcttttccttttgtttctctacttcagctttgaaaactttaaaagcatcaagtgcttcaatatttttgtatagaagataaagatacatggtcttgttagtatgctttccctttatgcattctatacaagtattaacatcaacaaagacgatattcctaagaatgtcttcctctactaatctcttaat

SEQ ID NO: 117571 - DNA, 294 bp, Glycine max
  unsure (1)..(294): unsure at all n locations
agctttcttgagggaaagctaagatggcatgtgtatatttaattgtccaacctacncttcggcgggagggcgacgcgtgactcgcgggatgcgtgttccacgaaaggaatacacgcggagtcgccaccaacgtttatttgaggaaagcgtcggataaaccggaaaagacgagatctaccaactttttagtgaaaggttccggagttgtatttacgcacggggaaggtattagcaccccacacgcccgtcccaagggacggcagcctttaatcgaatgtgcaaacatgactttga

SEQ ID NO: 117572 - DNA, 470 bp, Glycine max
tcatgatgatgaatcaagttgattcaagtagttgtcatgatgaccatgatgatgacacaaagcctaaagaatgatttcaagattgagtcaacaagttcaagatcaagattaatttcaagtttcatgagaagaaatcatgaagattcacgaatcaagagaagtttgatctcaagattcaagagaagatgaattctagattcaagagaagaaatcaagaagacttcacacgggaagtattgacaagatttttcaaaaaacaaacatagcacacttttgtttttcaaaaaagctgttctcaaaattttctaagttaccaaagtttgtactctctggtaatcgattaccaatttcctgcaatcgattaacagtggcgaagtttgatttcaaaagcttttaactgtatctgcaatggtccaatttttttttaaatggtgtaattgattacaatttattggtaatcgattaccagt

SEQ ID NO: 117573 - DNA, 456 bp, Glycine max
  unsure (1)..(456): unsure at all n locations
gatccttagagncacctgcggctgcaagcttctaacttatacaagaatgaactctgttctacttgttagacaagtggcctcagatatcttaagaagggggggggggtgaattaatatattccanactacttccccaattaaaaatctatctcactttctattcaagttataaaattcccttaacaatgaacttcttaaatattaattcagataagaacaattagaatatgaatataaagcaataataaacaaaggagtttaagggaagacatagtgcaaactcagagttatactggttcggccacacccttgtgcctacgttcagtccccaagcaacttgcttgagagttccactatcttgtgaattccttgtacaagttctaaacacacgaagacaatccttcctttgtgactagaaatttttaacaacagagaccctccgtctccttatccctt

SEQ ID NO: 117574 - DNA, 299 bp, Glycine max
  unsure (1)..(299): unsure at all n locations
tctcccnncaatttctatanatagggggagaagtgaagcattttatgtttcancctcttaggcacttctctttctttcgaatttgcttaagaaaattgtttccgtgaagaaaatccaagccgaggcgctttcgtaacatttccgtaacgtatccgagagtgatttcgcgaagggtttcgaccgttcttccacgttcttcattcgntcttcatcgttcttcagtcttcaacgggtaagtacctcaaaccaagcttttcaattcattctatgtaccccgggtggttcacatttggtttcat

SEQ ID NO: 117575 - DNA, 493 bp, Glycine max
  unsure (1)..(493): unsure at all n locations
ggatctctcagtcacctgagctgcagctgatcaaacaattatctaatcattctattcctctcttatcatacaattgctcattcaaaacattctcaaacactcatttcatgcaaaacaatccactgcatatcattntccatcaattcactattcaaacaagcttttgggacaagcaaaccactcaaagtgctaaaatttataacaactgaaataataaaaatgtaattaaaatgactgaacatatatcataaaataactgaaaatatacttaaatgttcaagatgcataaatntaaatggcctgctcctataggtgctcctgtgcatgctcattaacgcccaacacctgagcaactggtgaatcctgagagataagttgttctaactcacatgctagcgcagatggtatggcatcattatgtatgggtgttggggatggctctcggatctgatttgtagaagtcttcttctcctgagccatatgcataactaca

SEQ ID NO: 117576 - DNA, 315 bp, Glycine max
  unsure (1)..(315): unsure at all n locations
ctcaagctntgaggatatgggcttcaccgacgaaaggatcaaaaagggtctaatattatgcttatccgaccatcacgctgtgataaatgcaaaaaacaaaaaaaaactagggccaatgaacaggggagaatgaggaaacccctgtgtactgcatcctatacgccaatgcccacctcccaacaatgtcatactcagccgataaacaaaccttctcgttacccaccacccaattatcgacaaaggccatccctaaatcaaccacaaaggatgctaccccactcccaaagacgaacattatctttagcacaatcaaaa

SEQ ID NO: 117577 - DNA, 249 bp, Glycine max
atgaatactaatacctggatagtacgctccttcactcttctggcaaaacatacaagctccctataagaagctcataatcccaagtacacgtcataggttatagggcggattaatatattctagagcatgtgaagcacgccattacacacatgtctctttcgttgcgctactttctaaaaggaggacatatattctcatattctcatggcatccttcatgaaaaccttcatcatataccacgcatcttta

SEQ ID NO: 117578 - DNA, 472 bp, Glycine max
  unsure (1)..(472): unsure at all n locations
actcagctgccaattgnatcatttctgcatagaccgttgctttagatntttgcagcatgttgtcctttgagcatatttcttattaaaacatctttacaatatcccacgtccttgtgctctctgctaaagaagtttttcttcttaatttacgtattctttttacatattgactcaatcaactttcatgacaacactctggatgctcaagagcgcactttctgtctctcggaataactttttgactcaatgagtcttttgtgcatgactaccatcaagcatgagagtaacaaatgaactttatagatattcaatctctcattctgctcatggaccatttcagcttcttgtaagtgcgtgtatgcttgtgagtcaagcattttctcatatacatattgttgaaattctattaaacctaacattctaacagaatgaaaattcattaatgttaactagtcaatgtatttaatatttt

SEQ ID NO: 117579 - DNA, 454 bp, Glycine max
tgtgcattcaatatcctgatgatggtggtccatatgttctcttactgtactaacacatttgctgcccaagtttcatggtcttgcaagtgaagatcctcataagcatcttaaggagtttcataatgtttggtccacaatgaagccccctgatgatcacgaagatcactatctttctaaagggttttcctcattctctggagggactggcaaaatattgggtgtactaccttgctcccagatccattttcagctgggatgaccttaagagggtgttcttggagaaattcttccctgaatctaggaccactgccatcagaaaagacattttaagcattacgcaacttagtggagagagcttgtatgagtactgggaaagattcaagaaattatgtgcaagctacgctcaccaccagatttctgagcaactccttcttcaataatctctatgagggac

SEQ ID NO: 117580 - DNA, 443 bp, Glycine max
  unsure (1)..(443): unsure at all n locations
agctnggcttcaaacttacttaaataagctttctatctctccagctcttagaagacacccctaccttgcatgtattttgttaaataatgtgattgaagctaatcctttattagattcaattaaataaatgctcactattttgttctttcctattagtctgttgatagctaactagaataaaagaatagttaaggtcggaccagctgatagctaactggaataaaagaaaagctaaattgcagggaataattctcatattcatttatatcatcattactccgttttatagccatttcatacaagatattttgctaatgtgttatcacagaattttgaattcgcataaccacccaggtctctagtaacacgtggaaaaagcttgagcgcgatgtaaagaattcttaatctgcatcggcttgcactccctgtcctatacaagtact

SEQ ID NO: 117581 - DNA, 366 bp, Glycine max
  unsure (1)..(366): unsure at all n locations
tcactcctacatctcatctctagcatgcttttttctntctttacccactcctcacgtttggttttctttatggaaaaacaccataactaaacgcgccgcaagggatccctatcgtaccagatccaaatctagaacgatgggtgatcaagaggagacacatgaacagatgagagccgacatgtcgactctgaaagaacatatggcctccatgatggacgccatgttangtatgaagcacatcatggagaagaacgcggtcaccgncgtcgttgtcagttcggctgccgaagcatacccgactctcttggcaactacacaccagcctccctcaaacatagtatgacggggaatggacacactggggca

SEQ ID NO: 117582 - DNA, 326 bp, Glycine max
  unsure (1)..(326): unsure at all n locations
agctgtaatcgantacacatatactgtaatttattaccaaagcagatnttcagaaaatattctcaatagtcacatctttttatgtggttcttgaatggctatcacaggcctatatatatgtgacttgagacacgaatttgctaagagtttttcagaacaaaaaggtcttatcctcttataaagcaaaatcgttttatcctcttacaaattacctggccaaattacttgtgattcaataaggaattatttgagtgctcaaattgttcaatctatctctctcaagagagatttcttcttttcttcttcttcattctgaaaagggatta

SEQ ID NO: 117583 - DNA, 385 bp, Glycine max
  unsure (1)..(385): unsure at all n locations
ngcttattagatagctatgattagatatgatttcttgaactaacataataagaggaaggtgagttttagatgtgtgtttcacaaattagaccaaaccaacttgtcatattaaaaaactagtgaaccagataggtgattgattcaattaaacttgaagatgatggcgtattccatttgacgaagatgtgctctctttaaaaatatctcaacgcttatttgatagttatgattagatacgataacatgaactaacataataagaggaaggctagtcttatatgtgtgtttcaaaaattagaccaaaccaacttgtcatattagagaactggtgaaccagatatgcgattgattcaatttaacttgaaaaacaattctgtaaagaata

SEQ ID NO: 117584 - DNA, 376 bp, Glycine max
aatatactagtaacattggcgctcttgaagattgaacacagttgacgattattccactaagtgtccgatcatcatcattagcagctgacagtgacgtctaatgacatatggcatcgttatggtagtcatagtacacaaggtactgacgaaaaaaaaaatactgcaagttctcttccttcttacttgagaactttacaaaattttctacacttgtacttgggcaccattgattaactaggaaacgaatataactacaatccaacaatcacattgctttgacgcaacctacatacttatgcgtatcaaaactctcgcggtagaggtcctccctataagaatgacttgaacagctcaagtgaactctcttgctgtgaga

SEQ ID NO: 117585 - DNA, 73 bp, Glycine max
agcttcatgccacacttggcataggcatgttatctactatcatgtaggcatggcaccggcgcggggcggtgtt

SEQ ID NO: 117586 - DNA, 288 bp, Glycine max
acacacacgtatgcctctcttgtctgcctcaatcgctcatagcctgcgctccattgcgccactagacaacaccagcagaagacggaaacaaacgagaagaggggctacataaatggaatgagtgagggagagaagaggaaagaaaacgaaatgactcagagcattgactctgaaaacaatcatcataacatcatagcggagggacgaaaagatagctcaataagaactcgcactacgcgtgggcatcatatccaaaagccagaaacaggttctcaaccaccaaccctt

SEQ ID NO: 117587 - DNA, 164 bp, Glycine max
cagcataatttatctttatatacaaagagggtgagatgattcttttcaaaattatcaggtgcgggattgatcttgaacaaacatctatttaagaataacatgacatggaatcacaatttgacacagcacacctctatgaaaaatacaatacgacttgacacaca

SEQ ID NO: 117588 - DNA, 415 bp, Glycine max
agcttctatccatatactctcttggcggtatttttttccttccatggcatattccatacaaaatggtgccttctctcacctcttctccttatctattattgtatctctatgttggaacatcatcattgaaggacctcattgaagctcacagatccaacctctaaagaagcttctcaagcaagcttcatcacttttcctctttatctttggggcatctttgcgtttgaagcattctttagcatgactcgcaacttgagatagagattttgatggaacaaatctcttttaaatatatttccatcctttctcttcatctttctcaagcccaacgagaaacaaaatgtgttcttcttctttcactgtatgtatttcttgcgaggaaccgatcgggatgagccaccagctaacatgatga

SEQ ID NO: 117589 - DNA, 320 bp, Glycine max
agcttatgttgaacaacagagagtgaagagtgagccttctttcctccccttcaattactattgctactcaattcaccagcctatcaaaaatgcgactacataacctgaaaccaggccgaaccaatcatgttgggggtttgcagccaaccacctcccatccgctaataaacaaccaacttcaatatacatgctggcccctttgaatcaacaccatcatcaccaacatcaacaccaccaccgtccaatcaagagtggcaataattttcaatcatcatttctatcttgaaccctatggctctctggtaattccataaggaatt

SEQ ID NO: 117590 - DNA, 314 bp, Glycine max
  unsure (1)..(314): unsure at all n locations
aacattactgaagcgcctcaggcaagatacatatacatttcccttcttcccactaatttcactcgaaatttgaggatgttaagagctggacccttgctttagcccaccctcacgcctatttataggaaatgacgggtggacgttgctcancatcttaaccaagcgagctgcttgcttcgtcccgaatctacttactagtccacctgaacagacagcttgatacctatactgtaaataggtcccaaaggctggaaaatgttcccacaagggccattttactcctcttttgaacatttctgacattaccttgcaat

SEQ ID NO: 117591 - DNA, 445 bp, Glycine max
  unsure (1)..(445): unsure at all n locations
tgctagctttgccgtaactgtatatgatccatatgttcctattgcagnggntggaggcattggactgttgttaatattccagcaacagtaacatatttgcccgttgatgcacggagacgtgatggaacaaaactgccgactggtgctgttcaaagccgaaatgattttggctatgctgggtttggtggcgcatgtcctcctaaaggagataaaccacatcattaccagtttaaagtatgggctctaaaaactgataaaattcctgtagattctaactccagcggagcgttagttggttatatgcttaatgctaataaaatcgcaaccgctgagataacaccattttatgagataaagtacggtgagagtatgctggcaagaggttagactaacttaaagatcgaagaaataacgatgcatcaacatcatgagattcataggttaa

SEQ ID NO: 117592 - DNA, 451 bp, Glycine max
  unsure (1)..(451): unsure at all n locations
ctttcttatctctctgggtgttatattaagacgagtatgaaatcttttcagtaaacgagaaggacacttataaccattntctctggcaatctcgcttataggtttaccgtcggttgatagcagacaacgcattatttaacctcacatcgtccagtatactttggaaacttacccnctcgcttgctagacggcgatgtaatgtaaaaacagaaatgtagagatatcgagcaaccttgtttgcttgccattttgtgccgggttcggatagcagcaggttataacaacgacttatcaatgattgtttactatatgataaaagtaaatgattaacatgattcactcctaacgaaagtagaacgcccattgctaagtgctcctgaattttagttgagaagcctcgggaaacagatngttttagttgctcccaacaatatattaactcacgattctg

SEQ ID NO: 117593 - DNA, 397 bp, Glycine max
  unsure (1)..(397): unsure at all n locations
agctntgtgtgtataagttntgtcttatacattcacatcaagtatcgatcgattaagacttggatgatagacttcattcctttgattattagctgatagaagaaatgttaaagctattngcaaagtacacctctattggtgtgctgaacacccttatacactgggtggtttttggtgtttgtatctatgtcgcgcatacaaaccaagctcttgcaaacttcgcaagtttcgttgtggctgtgagctttagcttcttcgcgaatgcaaaattcacattcaaggcatcgactacaacgatgcgctacatgctatatgttgggttcatggggacactgagtgctactgttggatgggctgctgatagatgcgcactcctcccgatgataactcttgtcac

SEQ ID NO: 117594 - DNA, 411 bp, Glycine max
  unsure (1)..(411): unsure at all n locations
tctccagcaattctttccgctcgcacgtattcaacaatatctgtctttcctcctacccagctcagaatacctttcatgagaaggtttcgttctggcataagtttaatattttcgacaacatcacggctcatcagcctgaaatcaccaacattctcttcaattttaggattgcttattttattgtggagcttatagaaccactcagccgtttttcgcttcaggcgtccatcaattgagcggtcagatcttttagcaagaaccatatcagcacctgcttgccatttttcaataagatgaggaataacctcaatccggtcttgcaggtcaacatcaattgggattatcgcatccccngttgcatggtctaaccctgcaaacatgctggntctttacaaagttgcgtgtaaatga

SEQ ID NO: 117595 - DNA, 357 bp, Glycine max
  unsure (1)..(357): unsure at all n locations
agcttaccttgtgaatgaatgacatatcttttgcatccatggntgagctaaaaatctgattgtntgattgaaccttgaacttatggattacatctccatctaccttgtcttaggttgtaggagagcattatggttcaaagaaaatttgtcccacatatgggggagtttattgggtgatagctttcaatggtaagaaaatatcagcacacatagtaagttaataagcaacaagtaaagagcagttggtcaaaaaaagactataagtattcaaaataaaagtgtgatgtaagctccattagagcttgtagcataggatcttcttcataatggattcctttgttcttggaagataatggc

SEQ ID NO: 117596 - DNA, 295 bp, Glycine max
agcttcatgatgaatcaagaccgatccaaagattcttgttgataacaaagatgatgacaaaaagcaaagctcaatagtcaagaacacttcctgatgacagcgatgatgatcttcatgaatcaaagaatgagttcaagattgaatcaagaacactctcaggttcaagaggaaatttgatttcgagaatcaagaatcaagtttaaagattcaagttccatgaatcaagatcaagcattcacgattaaagtttcatgaatcaagagaagactccatcacgatatgctttaaaaagttt

SEQ ID NO: 117597 - DNA, 479 bp, Glycine max
tccacacatgcaagcaaaacaacattcaaatagcacaagctatcatattcaagcaaaacagggcaaaggcagaaaactctgcccaacacaccgaccaaaatcacagcttttctcacttaaagaccccagtaacaattccttcgatccaattcgttaaccgttggatcgactccaaaattttactggaagtctatagtacataagcctacattgtgaccgttgggatctactagtaaacatccagaactcattctgcactagactttccacagccaaccacacacaagcatttttttctgcacaaagccaaaatcctgctgcacctattttgacagcaaaattctgcataagtgcagatttcgaaaatcacacttcctctcatccaatcttgcccaaatcaattcctacaagtcccaaatcatgtatcaaccatgtctaacccaaaatcaagctttacagcacagcaacacagaatctag

SEQ ID NO: 117598 - DNA, 228 bp, Glycine max
  unsure (1)..(228): unsure at all n locations
cacctgangcatgcagctttgacacaacattggagaggttaatgtatctactatctcttttgtaaaattgagatcataatgaagaagaaatgaggagaatatggaacgacggtgtttctatactaaaccgaattgatggtattaatctctcatatctccctctaatagaaagactgactcctacgcctactaaagactggctggtggaacaacaacctcgttttatct

SEQ ID NO: 117599 - DNA, 346 bp, Glycine max
  unsure (1)..(346): unsure at all n locations
gcctataggttggaccttccaaaagagtatggagtcagcaccacttttatcanttttgatttaattccttttgcaggtggagctgatattgagaacgaggaactaacagatttaaagtcaaattctcttcaaggggaaggggatgatgcaatcctccttatgaacggaccagtcactacagccatgagcaagaggctccaagaggattggactagagctgctgaagaaagccctagggttctcatgaacctcanggtatatttctgagcccataagccaaggttgggtccaattatctttgtcatattaaattagattgcattatatttggccttggatttaaggc

SEQ ID NO: 117600 - DNA, 317 bp, Glycine max
agcttaggttctctatattccttctcatctttcacctaaaattggaatcaagactctcttcataaggagccagtgtgttttgatttgagacggcttctaatacaagattatcccaagacattcatccggccattactggggaaaattatgatctctaggcagtcccaatggagacttacctggcggcattagatctttgggacgctactgaagaggattatgacgtactctcgctgacagataatcctactatgaaccagactacaattcacaaggagaataaaacagaaaggccaatgcagagtcgcgtctatttg

SEQ ID NO: 117601 - DNA, 384 bp, Glycine max
cgcttgtgaaacttatatggagactggatctttgagctgctatgattgttctataatggagaatttacaccatggagatgcatcggaagacaaaggagaataggtgagaggagactccattcactagggaataagccatggaagaatgagcttcaccaccaagatgagccttggataaaaagcttggagaggatgcttcaatggatgaaaagaaatagggagagaaagagagaggggggagcactaaattgatagaataagaacggaaagaagttgaactttgagttgtgtctcacaagactctcattcatcaaagatacaacaagtgttacacatgcttctatttatagactaggtaccttccttgaaaagctttcttgagaa

SEQ ID NO: 117602 - DNA, 154 bp, Glycine max
gcaccgcggctgcacttataaagtcattctattctttcatgcacactctaatgagtgggaaaaaatggcttcctggggaaaaaagagcagcctttctttgctagaaaaaacttactaaggccctgtctaactcttctgactttcttaaaccttt

SEQ ID NO: 117603 - DNA, 320 bp, Glycine max
  unsure (1)..(320): unsure at all n locations
agctntgatctaccaccaccgccgccaccatcttcttagttttctattattattagtactttgatttctagctgtgtatttggctatattattatgaaatctgaacaatttagtatttcttttattngcatggtgtgattgaaaaattatgaattatgtcatatgactatgtggtttttatatatttgatctattcatgtttcttgcttcatgattggattatactctttaatgaatgtcttgtgtatgattagtagtgtatgtatgtttttttcttgttacgcactttggctttttgttgatgccaaaggggggggggg

SEQ ID NO: 117604 - DNA, 469 bp, Glycine max
  unsure (1)..(469): unsure at all n locations
tctggagggcgcanangggcctgggagctatntgcactcttatttttactaagcacacccccctctgcttatttttggtgatacttctttcgtaaagtcaccgaaacttacgaatttcgtaacgatacttgttttctttccgtaatgttacagaaccttgcggattacataatcatcccctttttgacttacagaatggtacggaacctcacttaattatgcaacgatgcttccatttgatttccggtgtgtcacggaaacttacggatggtgcatcaatacttttttttggtttttcggcatgtcctgtaatttcacaaatcgcctaatgatgggtgccaagcacctcacgaggaccaaagaatggtcccacgtcatcgagcaaaggtccccggacgaaattatggtatgacactgtgtgatagactccctctttggttgtgctcacacagttggcccttcttcaata

SEQ ID NO: 117605 - DNA, 474 bp, Glycine max
  unsure (1)..(474): unsure at all n locations
taagcttgtnctcccatncctcttgttggacgagagcttgatcctttacattattgtagcagcatatgtacaaccaacacgtaatcctgagatccctcttgtacgactaagtctcaattctgcttcattcaagttctaaggcaacaacacatttcccagtgctaaagtcacctaaccaggcacacaaatggatgatcaaaccaagagcatacagaacttaagcattgaaagaagcattgaacacaagacacacaatcaattagatattaaaataattacatcatttgttcattataaatccccaacaagagtatgtagccaaccattacaaaacaaaccctaacaattatgagattaaaaaacctaggtatctctgcgaaagctgctcctcttgctgcttccagagctcttttcccagtatatgcaatgcggtgtgctctacaatgttataaaaatctgttgtaaaagttcttt

SEQ ID NO: 117606 - DNA, 380 bp, Glycine max
  unsure (1)..(380): unsure at all n locations
gatccttaagtcacctgcggcatgcagcttgaatgaggaagtgtagaatggtgagacttcctgcttntattcgangaccacagagtggtacctggagatatgtctcggcggtcaggggccttggggacgtcaggtggggtgctattgcccaaaaccaagcttgaccaatcccgacccaacccgagcatagtcagtcagtgagaacctgtgatgtacctaagcaggcgagctccgggcagtcaacatataaaaggaacaaagaccacaaagcaaggaagctcgtgtggtggctggccagctgtgaatcttatgtgatatgggttatggcctctggtaatctaataccaagggtgggtaatcaattacaacgcttaaaaatg

SEQ ID NO: 117607 - DNA, 428 bp, Glycine max
  unsure (1)..(428): unsure at all n locations
ngaggttattactcaagtaaagaagttgttggattatgtgttggtttgaaagagcttaaatccttgtgttttgttggtgcctaaaataagtattactaggcaccaaatccctatgataggtggtatgatgaatgtgttgagtggtgcaacattcttttgtaaaatcactcatgcacctaaattcttcatgaattgtgtacatagggactcattangtaggtttgttcttattttttgtttcaatgcaaacctatgtgctcatgtgggacaccttangtttgtcgtaattttttgtagaaataatcaacatgaaaataaagaacaaggtatgttttattccattactttccctanctttttaaatagtgatcaagggcttcccatggaccctaagagaataaaggtcattcctgaatggcttactccac

SEQ ID NO: 117608 - DNA, 458 bp, Glycine max
ttctccgcccggatctaagcacctcagctcaactttattcactataatttatttttgtcttcatgcactcttaagacaaagcatcattctggcactaaatcgtcgggagtcggaggtcatctcttcaattaaattcctggcttcaccaggggtcatgtttacaagggctccaccactggcagcatcaatcatacatttctccatgttactacgtccttcataaaaacattggagaagaagctgctaacatatctggtggcgagggcaactggcgcataattctcgaatttttcccacaattcatatacgctttctccactgagatgtctgacgcctgaaatatccttactgatggcagacgcccttaagcaaggaataattctctaaaacactcttttaggtcatcctctcttaatcaactctgacctagtaaatagccatcttttcacctccctcaa

SEQ ID NO: 117609 - DNA, 360 bp, Glycine max
  unsure (1)..(360): unsure at all n locations
gataagattggatgaaataaaatctggacgaaataaaatctaaatgaaataaaatatggataagataagatttgataaaataaaattgtctgctctcttcaagtccaagcccgattccatattcaagcccaattgctaataattctgctgaaattaaattataaacacaaaattagtcaagtaggcccaaatgataaaactgcataattaatttgacaactaaggctaatcagtaattaaaatggtaacaaanagggttaagaaataggagaaaattatgacacatcaaatccccccacacttagccttttgcactccggggccaaatcaaaaagcanagcaaggaacaaattctgagac

SEQ ID NO: 117610 - DNA, 349 bp, Glycine max
  unsure (1)..(349): unsure at all n locations
agcttanaaagataatcctgcgtcttgttcatgttcactgagnataggaaaaggctcgtatgctattattcaacagccgagccgcttacatggctcacgagagagagaaatttttcacatgactgttgatgtgtcttacccgagggaaataatgcatatatgacactgagcgctctgtatatgaggatatagaataagatgacggttctcatcttaccacaatgagagtgaatggggcctaaagcagaacacactttataatattagttcaacaacttgttttgtcgaattgtagcccaagttttgctaactcggactcggtcagactgagtcatctacccttatacaa

SEQ ID NO: 117611 - DNA, 354 bp, Glycine max
agcttgataggttcaggtgcatgtgctgctactggtggacgcccttcaatttgcttgctagacctcaaggtgatggcactcacactttttggattctgcacagtttgtgaacgcaatttgtcataattttgggactgagcttggctcaactgagtagccatcagccccatctgatttgttagactctgattggaggcttttgtctcttgctaaaattgcatattctggatggtcatttgcctcactaactcttctaaggaaggttgaggaggggcctcagttgcttgttgtctcttgtgtagacgatgttgctgcattggatgaggaacatatggcttgcttggaccaacaaca

SEQ ID NO: 117612 - DNA, 290 bp, Glycine max
gcaactacacattgatgctgttatgtcacaatcacacacttaatcactaatactaatcctgtaattcacgtgctcacttaaattgtggtgaatattttatatggaaatctaattaaaaacgtttagatacaattttttatttaacacactttatttacataagaataaaatttattacacattattaaacccttatgatttatttaataacgtataagagccattcaatttggatatttcctatatgtaccttcacaaggggtctacgataattatttgctttctgatgc

SEQ ID NO: 117613 - DNA, 447 bp, Glycine max
  unsure (1)..(447): unsure at all n locations
agcttctgtgttctgacattgccaaattgttgctattctgtatccagccttctttcagtcatagcttcgggccgcgataagactcactgatctgaccctgattcctcttgcagactttatagaccaattaaaatgcagtttctgcaggtcaacgtctgaccatcattgtcatcactctggccattagagtaaccttctgcattcatccttttgtaaaaagtttatattagtatcagcaattaaccggacctgatactgatatgagtcttaccgcatatacggtcaatttcagcaattaattacattatccacgccaaagtatttgtcatcacaatgatggtaccttctttcagacaccatnttttcaactccgttttccacggaccgcactcttatgtcaagagtgctggtcgtggtatctaccatagaccgactgtgactagtcat

SEQ ID NO: 117614 - DNA, 322 bp, Glycine max
agcttggcctatttaatttatataggcttttaaaaaagcctgagcctagccttttaattaaataggtcaggccaggccagactttatgtaggccaggtcgtaggcccctgtaggccggcctagcctattcccacccctatggctgaaccatccgccatgacatccgccattttccgctacgccatccgccatatttttatggcggatttttggctttccgccatgaaccgccatcctccattaacaacattcgtagtgattagataattaatacatgtgcaacaaaccatatgacttgtgatagaaatatgtttacacagtt

SEQ ID NO: 117615 - DNA, 436 bp, Glycine max
  unsure (1)..(436): unsure at all n locations
tctccaatctcgctctcaacaattgcaaaagcatgtggttaattgttcttactaccatcttgttcgatggcagtcaacaaaataccatgatattttccagttaaaaatgtttcatctacttgcacaagtggcttgcaatattggaagccttcaatgcatgggttaaatgcccaaaatactcgattaagaatcaccctatgagggccatcgtcaccttccttcattaagatgaagatttgtattttattatggtaccatggtacaaaatgtttatcagctgtcaaccatacaggcaggtaactatatgattgttcccaacttccaaatgtcatttcaagggctttttgtttagttgtccatgcttttttgtatgaaatagtgtaaccaaaccgttgatgcatgtctacaatcaaggttntgattttgataccacgat

SEQ ID NO: 117616 - DNA, 318 bp, Glycine max
agcttgagttgattgcttttattgatggaacggcgagctatgtggcgctcgaaaggaaggctgaattgtatgataagttggtgaagggagatttgtctgatgaggaggatcaagagaagtattgggtggactttttccgtaagggaattgagcacgatgagttgccaccgctcctgcagccactgagccataatgtgttggtggaaaatgaagatggtgctgttaatgatgatgattctttgatgtttaaattgaagactattgggcctgggcgaaaggctggagctgttgacaatgctgattataagcgcaatatta

SEQ ID NO: 117617 - DNA, 433 bp, Glycine max
tgctatgaccctgaccagttgggtccaagcttttctgctcggggatctttccttactcacttcggactcaccacactatgtcgtcaggttgaatggttcgaggttgaacctttgtattatatcttctttatgctcggagtttggtggcatcttctttgattctgtccatctcttggagtttgtccattgtctctagttccacccacatgttctctttgatttgttgttcctggaaaaacaacctctttgttgatggttcctcaacttcgacggggattatggtgtttgtgtcgtatgtaagtcgaaaatgagtttcattggttgttgactggggtgaacagtgttatgctcaaagtatgctatgaagtttttcttttcacaaacccttggacttgttaagccttgtgcacaaagctttatagatgactctgtt

SEQ ID NO: 117618 - DNA, 314 bp, Glycine max
agcttgcatgacttacattctccccttttttgatgatgacaaccacctgtaggttaggagcaacaagaataacaacaacaaaaaagaatatccatttatatatagttttactccccctttgtattgcaatgattgcttatatgagatatgaagatttcatagatttcatatataaaaagctgtctcataaagatttcatatatcttttatctatctctccccctttgtcaacatcaaaaacaaatcatgaatagaaaggagaaagatgttactgttggatcgagtggcctcagaataattaagaagagggggtt

SEQ ID NO: 117619 - DNA, 396 bp, Glycine max
tgttacctccatacttgaccttgacttgatgaataccttttcttaaaagcatgtgcttggttcgaccccataatccaaggaatagaaattttgattgtcaatacttcgacaacatatcatacagatgaatgactaaggcatacttatgctatgcatgacaaatgtaattatgagattgacatgagatgcccgaagaaccattatttcctagctaacaattcattaggtaccatgttcacatgcttttcaatcattttttaagagaaatgagtgtataatcccaacatgtttgtttatagttatcatcatggtacccaacacatgtaactaagaatgtggtgtaaacttcattcttcattgtgacttctttttggtcttttttttgcttttttgctt

SEQ ID NO: 117620 - DNA, 313 bp, Glycine max
agcttggtagagttattgagaaccacgaaaggttcgggctaggatataagcctacacgtgccaatgtgaggagaagtgccttagaaagaaggggtaaaagcatgggccagtagcaaggacaacaagtgaaagggattcccttatgtcacatcagcggaagctttgttagcgcagcctagatatgtgaagggtgggtcaccatgatccatgatgaagtccctcaagagcaatcaaactgggtgcggtcgtgccctcctgagtttgagttgggaaactagcgaattgtcgaacaacccagaatttctgtggcgaa

SEQ ID NO: 117621 - DNA, 440 bp, Glycine max
  unsure (1)..(440): unsure at all n locations
tggagataatgcttcaatggaggaaaagaaagatggatagaaagagagaggggggagcacgaaattgaaggaagaaaaagggagagaagttgaactttgagttgtgtctcacaagtctcattcatcaaagttacaacaagtgttacatatgcttctatttatagactaggtagcttccttgagaagctttcttgagaaaacttccttgagaagcttctttgagaaaaattccttgagaagctagagcttagctacacacacccctctcataactaagctcacctccttgagaagcttccttaagaagattcataaagaagctagagcttagatacacacacctctctagtagctaagctcacctccttgagatgagaagctagagcttagctacacacccnctataatagctaagctcactcccatgacaaaatacatga

SEQ ID NO: 117622 - DNA, 315 bp, Glycine max
agcttattcaattattaatttaaatcctgtaaaaaaacttggataattgcccacaaagacaatgtgataagcaattatcactcaactaatcactaatcatgcaattgaattaaaacacattctcttatttaaataaataactccaaattatatcacaaaatcatatcatctttgacttgcaatttttggggtgacacaacctaggtctctagattcttgatggccatacccgagtaggtattcgatcaacatacatacatgtgcctaagtcctaataagagatttaataaggtaatgcagattcctctaagatga

SEQ ID NO: 117623 - DNA, 400 bp, Glycine max
tcgactgtcttctattttgaagatggtagacctatgctatgctcagatcgctgcgctaagcataatctgcataaaaatattatctatttatgcaggctaaacctaaatatgctgcacttacctcctgagtaaaattctataaggtgcactaaacgcccagtcaaaatttagagtgattacttctgtctttgctgaaaataacctatgctaatctcttgtgttgtatcttatataatgcaaatggcatctaagaaaaggaaggctccttctacacctttccaagtcagatatgatcggtctcggctcacatctcaagaagcttaagagaggtacaccgatattgtggagcctatgagactactaccagagaggaatgcggtagtttatatcactgaggtcg

SEQ ID NO: 117624 - DNA, 319 bp, Glycine max
agcttctcccccttttttctataaatagggggaggagtgaagtgaaaaagggttcagccccttaggcacttctctctctttcgaatttgcttggaaaaattgtttccgtgaagaaaatccaagccgaggcgcttccgaaacgtttccgtaacgtttccgtgaggaatttcgcgaaggtttcgaccatttttcgacgttcttcattcattcttcatcgttcttcgatcttcaatgggtaagtacctcgaaccaagcttttcgattcattctatgtacccgtggtggtccacattgtgtttcgtgtatttttttctcgttt

SEQ ID NO: 117625 - DNA, 341 bp, Glycine max
tgccgccattgctttggccttggctagcaatcagggaagttcttgactcccgttcaaggtaagagcaaattggtccatccacatggttgcctcttggtgtaacgagttgatcacccttcctctagcctcctttttcgcgtacacttgggcatactcgtccgccaccctatgctcgtgggtcgtggctagacttaaatcctcttggtacttgctgatgatggctaacatgttggtctctgtctcgcataaacgctgagacaaacttctcttggaccttgagcaagccttcaactcatcccttaagatcaaattgtctacccacgattggtggctttcctccc

SEQ ID NO: 117626 - DNA, 320 bp, Glycine max
agcttagcctatctgggctaagctcatttcgttcgggcagccattgcgctaagcgagcctagcttgctaagccacgtacttagtgaaattttctaaaattcatggtgccgctaagcacaaccctgctgagcttagtgcacatctattgcagcaatcattaggcttagcgggcagtcgctcactaagccgattatgcaaaagcagaattttctgcaatatctgctaagcagccccccatgtcgtcaagcagtagtgtttattttgtgaaggcgagctaagcggaccatgtctcgctaagccgctagtgtttttctcagtct

SEQ ID NO: 117627 - DNA, 434 bp, Glycine max
tcaccttttggtcctcctcatagttgttgcatgataaaacattctctattttcatctcccactccaagtaggcctccggatcattctttcctttaaagggaggaatgttgagtttaataccatcaatttggttttgtctaggacaccatcattccctcctctcctcctttcttcttcattatgatctctattctccatttgatccaacctctcatggagtgcatcatctcgtttttcattaacctctccaaatgttgcatcaaagcttgcatttggaattgcgaaagccccactccatcattaggattagtacctgacatctcaaacaaacaaatcaaacgtaacaagacaattatagttgttgtttgaatatctcacccactcaagtgtatcacacaattatggcttttctctaatgaaaacaatcttgcctt

SEQ ID NO: 117628 - DNA, 313 bp, Glycine max
agcttttgccttttttgtggacaacaacattgttcatgaggttactattgacctcactaacattggtgttattgacaaaaccctagaggtgtccaaagaagcttcaactaatgaggttgtaccctagaggtgtccaagcactctgcaacctcaaatgaagctacatcaacggagaaggatgcacctgatgctatcattgtctactttaccagtttaggtcctactccactcaattatgctcctccaactgttgtgactagagatcaagtttaggagatgatatgtcaggcaatagacacattcactaaatgtc

SEQ ID NO: 117629 - DNA, 431 bp, Glycine max
  unsure (1)..(431): unsure at all n locations
ntgtaagcataaattagaaataggtcactctcactatgatggttcaagctgaaacataaatttttcactcataaatcttgcactcagtgttgcagtnttggaatgcttcaacttgttcttcatgattcacgaaaaatgcttcaaatagctcccaagaagaccgttgtagtatgctccacacaaatgacaagcttctagaacaagtaagtgcactttacagttgttttgaagtgacagctgacataaccattctgatgaacctttgtgattagcatactatacaatcatcaaaatagtcattttgatgtttattgagaatatccatacttgatgatttcctttgatgaaatttatattgatcttttattctgaagtagcatagcttcatcactcttaacacttcttcacaacttcaagcattctgaagttga

SEQ ID NO: 117630 - DNA, 313 bp, Glycine max
agcttgtccatcttcaaaagcaaaaaaccaaaagcagtaggacattagaagctacacatgacttaaaagcatgatctagaggtagcattagtcaaggggtagacattagaagctacacatgacttaaaattcatcagaagatgcaatgtaaaaacaacaatgaagacatttgtgtctacatagtcaagaagcacacaccagaagttgtgaggaacaaagtcatgcactagtgtactaatgcaatatcatgacaaactcctctaaaatcaatgatcaaatatgaagaaaagagctagtcacgtactactattcc

SEQ ID NO: 117631 - DNA, 408 bp, Glycine max
tactcaagttaagttgcactatcactctatttattattattattattattattattattattattattattgctgcgacatttgattaattggtagtgatgatttggattgatgtggtaatgtttatggacaagaggatattgaattactttatcaattgcctattacaagagaggatgctaaaaagtattataaactggattagagttccatattagattagaaataaaaccaataaactacttcatgcccaataaatattgtatgtgaagaaaatcatattcactttaatcactagatccatgtttacttgtttttttcctcccgtttcaacaacaaagtttaatacaatgatcttggcttaaattaacacaatgttgatattacatatgtgttcttttatatgag

SEQ ID NO: 117632 - DNA, 312 bp, Glycine max
agcttaagctctttctactgcacaagacttttaatatttgaagagtatccttgtggaaccttcacccgacaaagacactgacaaaaacttatcttctccttcttggacaaagtatggcaggctgggggcaagtaaattttcttcccatcagaccttggatgcaactgtgatcgtatacccatatcagctagatcttgacgggtattcaagccatccttcatcttgccttgaatgttaaggagcgtcccaatcacactgtcacaaacatttttctccacatgcataacatcaatacaatgtctaacgtcaaga

SEQ ID NO: 117633 - DNA, 417 bp, Glycine max
tgatttgtaagttgatttaagccttagtttcactttggttattagtcaattgatccaaggaaacttccaaagaaaaatgtccgattgatttttttgattattttattcaaagatattttgattattttattattattttgccttttttggtttaatcgagattacagtgtgaatgatcggctagagtttgttttaacagtgattaaacaagattacatcacaaatgatcggttgaaattcattttatcatttattaggtgagaaaacaacttaaataaacggtttaagcacattaaaaacggaagataagaaagctgaaagttagcgaaattaaagtgaaagtacgcaaaacaagtatggaccactaagggtgcatagaatgaattgaaagattcgatttcgggaacttaccggttg

SEQ ID NO: 117634 - DNA, 290 bp, Glycine max
agcttttattttcttctcgagaacagctgcgatctttatcttcaacaggagccgttattttgataccattgccaaacttaattgctttggttaatacgcatgggtggtcctgcccgctcagctactactttgagcaagcaaccttccataacactaacgctttgaattattgcgtacgtgacaaggggatcaatgtttatgaccacacgggcaaactgttcggtgttcttgatttctgttctacccttaaggactgctttatcattaccttgtcccattggaccggaggt

SEQ ID NO: 117635 - DNA, 242 bp, Glycine max
ctcgttgctgatgtgaacaagtgttatgtagctgtattctgcgcacgcgagagatcaaaaaccgcgctggcttctaccaccacggcgagatatttcactgtagacttctgctcggtctgttgactatgtacatgttgaaaatgcgccccctgcatgaggatcatctatccatcctggaagaaggaatttcgcattcgacgggctagtttactatactacctgcgagcgtgatccacataatt

SEQ ID NO: 117636 - DNA, 322 bp, Glycine max
agcttccaagaatttttatctggttcaagactcaagattcaagaatcaagagaagacttgatcaagataagtatgaaaaggttttttcaaaaactgagtagcacatggatttttctcaaaacatgtttaccaaagagtttttactctctagtaatcgattactagtagcaaaatggttttcaaaaaatccttcaactaaatttacaacgttctaattgatttcaaaatgttgtaatcgattacaatgatttggtaatcgattaccagtgcctttgaacgttgaaattcaaattcaaatttgaagagtcacatcctttcacat

SEQ ID NO: 117637 - DNA, 436 bp, Glycine max
tgcacttcttcgctattcttagggacttcagcttctttcccacttgggcctgttagctttgggagccaagttatcccttgcgtcctagacttcaaccacttgtggtagccacatacgacaccattgctacttcccgtaagctcctcatatttcctttccactgtattccattctttacggattctctaaagtatccttgcattggcttcattgaaacctcgcgagacaaaaggcgagatgatctcctccgacggtgcacctctcataaggaagcctaatattcttatggctagcatgggattataattaatacaacccctcgtttccatcaaggggaggtttgggaatccttctcacgagcacaacacccctgcccctccttctttccatctggggaaccagctaatggacgctcctgccatacctaccaaaagtt

SEQ ID NO: 117638 - DNA, 312 bp, Glycine max
agctttgcctttagttttgtacctcatcactttctttcgaagctttaacctcattgtctctcacagtctttaaatttgggagccaatccaatccttgtgtccggactctcagccacttatgatagccgccgatgatcccattactgcttcccctaagctctctgtcctttcttcacgccgcatcccatgccttgcgaactccttggagtacctttgcattggggtcactgaaaccccgtgtaatgaaaggcgtgatgcttttgtctaatggcgctcctctcatggggtagccaagctgtcttatggcgagga

SEQ ID NO: 117639 - DNA, 430 bp, Glycine max
gcttcaatggaggaaaagaaagagggattttaagagagagggggagcacgaaattgaaggaataaaagaggggagaagaggaactttgaagtatgtcttacaagactctcattcatcaaagttacaacaagtgttacacatgcttctatttatagactatgtagcttccttgagaagctttcttgagaaaacttccttgagaagcttctttgagaaaacttccttgagaagctagagcttaactacacacacccctctcataactaagctcacctccttgagaagcttccttaagaagattcctaaagaagctagagcttatctacacatacctctctaatagctaagctcacctccttgagatgagaagctagaacttatctacacacccctaataatagctaagctcacccccatgacaaaaaacatg

SEQ ID NO: 117640 - DNA, 312 bp, Glycine max
agctttgttgcatatattttgtttgacgttttactgtttgagaaaatcgaagttctgtttgattttaatcttgattttcattttcaacctatacttgcaaatggtgttaataattttgaagcagagaggtgatatctaggggctagcacgacggctcgaaggggtgcaattggctgtttaagaggccaaaagaattacaaaatggggagtgcaaaatcaccccattcaaaaggccaaagaattagaaaaagggagtgtaaaatcaacatgtcattgaagattaatttcaagggtatttaagaaaaaaaaatt

SEQ ID NO: 117641 - DNA, 379 bp, Glycine max
tggtgagtttggtgatggtggtgggtattgtgcttactatgttggggttgttggtgatgtaaagaaatttgatgcagggaaggttacctactgaggggggaataaggtagggtttgcggaggttaagttcggagaggtctaggttgtcgacacggtatgttggggtgaccgtcatccattaaaatattaccaacatttgttgtacactttttcatttatactctttttaattcttttttcctttaaattcattttcttttctctctcgactttcatataacttcaattttttctatttctttcagttcaatttttatctctctatttattttcttcttccaactatttattctttttttataattactatatctattct

SEQ ID NO: 117642 - DNA, 314 bp, Glycine max
agcaagcttgtgtgtttttttatggaggctggatctttgagcttcaaagaggaccttcaatggtgatttttcaccatggaaatgcaacggaaggcaaaggagaacaggagaagggaggcgccatccactagggaataagccatggaagaaagagcttcaccaccaagatgagccttggataagaagctcggaaggatgcttcaatggatgaaaagaaagagggatagaaagagagaggggggagcacaaaattgaaagaataaaagagggggagaagtagaactttaaagtgtgtcacataagactttcattca

SEQ ID NO: 117643 - DNA, 433 bp, Glycine max
tgtccttgtcgacacaaacgccgacaagttctgctatgagatgctcgacctccaacacgtcgccgcctttctcccccgcactaagatcaacgcctctgctgattcctttgtcactgttggcacccgccagatcgctggagagtcacgcctcaacctcctccaaaggaacctctcgctcttcggcgccatcattccgcctctcatccagtactcccccaacaccattctcctcatcattttcaaccccattgacattctcacctacgcgcatgcaagaaatggaggaaaaagaactcaagtatgcaaatttggagaaaaggtcaatgaaagagagggcttgtgaggagtggccatgggaggcgatgcggcgcttgattgattccactatcgccgtggtggtggcgttaggggtgacaaatggggtgaaaccgat

SEQ ID NO: 117644 - DNA, 247 bp, Glycine max
agcttctagccattttgtcttaccttgaattaattcctttgatagcccttttgagccttgtttccctttccttgttttgaatctcactacaagccttaagtgaaaaaccatgatatcaccatatccttaaggaattttggagctttggaattgttttgggaataagtgtggggggggttttttaccgctactattttaaaaattcctttcttggattgcgtatgcttaaagattaatggagggctgc

SEQ ID NO: 117645 - DNA, 436 bp, Glycine max
tgaaggtgtgtagtccaccatcttttcatagtataatactggtaatgtgtctgctattattgtcatcatttttttctccgtcattgaggtgccacttgagctgccaggtctctccacctttgggcgtattcttttgaaggattcgtgccccctttttgcacatgttttgtagttgcatcctatccgaagccattatactgacactgcctgacgaaggcaaccactaagtccttccaagaatgggctcgggaaggttccaagttagtgtaccacgtaacagctaccccagtaagactttcttggaaggaatgtatcagcaattcctcatcttttgcgtatgcccccatcttccgataatacatctttagatggttcttggggcaagtagtccccttgtacttgttaaagtccagcaccttgaacttgggaggggtga

SEQ ID NO: 117646 - DNA, 317 bp, Glycine max
agcttccactgcttttttttctgccttttaagagttgagactctgcatcctcactaggaatcctgaaaacaccaatatgaaaaatatattactgtataatttcataaaatcaacgaaagattagataaaaataggagaagcttgtataatttcataaaatcccaagagtaattactgtaatttactctatactaatataatatgagggaaagagtaatgaggtacctacctgcaagataaaccacaaggaccatgcagtgttagctgagagcatcaaaagagagcctctaatagtatcacctttggagtgcacaatt

SEQ ID NO: 117647 - DNA, 438 bp, Glycine max
ggaaggcgtgtaacccaccatcttctcatagtttaacaccgataacatgtctactatcattgttatcatctccctctccatcattgggggcgttacttgagctgccagatgccttcacctttgggcatattctttgaaagattcatgctcctttttacacatgttctgtagctgcattctatcaggaaccatattagaattgtactgatactacctaatgaaggaaaccattaggtccttccaagaatggactcgggaaggttccagattactatactaggtgacagctgccccagtaagactttcctagtgtcataccctaatttcgtctggggatgatcgtttgccaacatttggatccttgccaaccgaattgagctgcttaacactaattgttgcgcaatccgtaaggttttgtaatgtttcggaataaaatgt

SEQ ID NO: 117648 - DNA, 311 bp, Glycine max
agcttgacttttttagtttattttagccttagtttcactttagttattagtcaattcaatcaagaaagagaaattccaaagagaaacgtccaattgctttttttggtttattttactaaaagatatttttttattattatattattattttacctctttttggtttccaccgtggttacgacatgaccgaacggtcgaatttcattttaacagaaattaacggatattacaaatcaaatgatcggtggaaatttattttattttttgattaggcgagaaaatgactaaagtaaatgactgaagcacgtcaa

SEQ ID NO: 117649 - DNA, 437 bp, Glycine max
tctagtaaacatcaaacaagttcttaatcaattctcccaatggatcaactctagtaactatattggacctttcaaaagctccaatcggttttggcacacgattatgtgaatcctatatggttaatgaaaataacaattaggctaattttatgaaacaatttttaacaatgttacattcactcaatacatacagagggaaaaaatacctcatcagatacaggttttactagatgtatcactcatccaatgaatgtgtgaagggccttcctgacatactaaatctctgatgtcggaaaagggacccgagcatcaccatcgtaaactgttgtaacactcaccctaagcacattatttgaataagggacattgtgtatggtggtcacactatcatacacttttcccaatgccactaggtgtgtacattgatcacctactat

SEQ ID NO: 117650 - DNA, 312 bp, Glycine max
agctttttggagtttaaacatgggaccaactcattttatttcaaaaagaaagtcgtatctagtcaaggtctgagagaccatacaagtttcctaacgatttctaattatgtgggccattaagtctatcatatgctgacaatagacgagaagcccatgaatctcttcgggggcggagtaggtgtctgccatcgccttggccttggctaacaagcggggaagttcttgattcccgttcaaggtaagagcaaaccgatccatccacatggttgcctcttggtgtaaagagtcgatcacccttcctctagcctcttt

SEQ ID NO: 117651 - DNA, 395 bp, Glycine max
taagtgaagtgaagaataaaagggtggtgctattaatcaaagcaacctagaaacttctttaagttagaagcacctaatagatcaaaggagagactagaagtgatatatcctgatgtgtgtgggccatttgaggtaaaatccttaggaggaaatagttattgtgtttcctttattgatgagtttactagaaagacttggatttaccttatcaaacagaaaagtaaagtgttcttcaggtttaagaaattcaaactgctatgtgaaaagcaaagtggtagatgatcaaggttctgtgaatcgatggaggtggagagtataattccaatgagtttcaagtaatatgtgacaaagaagtaataatgcatgtgactattgcaccatacgcaccataacac

SEQ ID NO: 117652 - DNA, 308 bp, Glycine max
agctacttgttgtttcatatttggcaaagttgggcgttaattttgggagctactaggtgctagaaacaataaggagcaccatctgcctaagtatgtttttaaccagatgcaaggcttttttatttataactagtgattacttgtgtttaaaattctgcaataagaaattagttcatggggtaagttatataatgagctaattgattatgttctaaattttgaatctagacaaataggataaaaaaaattgatgagttgattatctctaactgatttcaagtacgtacaagcaattattatcaatgata

SEQ ID NO: 117653 - DNA, 372 bp, Glycine max
tgtccattacttgcgcgtttaccaccgtctgtgtctcaatgttgaaatcttggcacaccggacaaacaagctgcaccttatcccttcctctttctatgattcactcacgtttcattgattcaacctttcttcggttcctccagcgctggcaaggtcggatctcagtccaacgagctcgtttgacccccgccacaaaatgcataaatggttggtgttagggagtgcttggtttggtttggttagttagagggaaagggaaaaggttagagacaaagactaaagggtgcttgtctgagtttaagaaagaggtttagaaacaaaaatcataggattttgaagaaaagcgaggttgaagaaagaaagacgtgagtg

SEQ ID NO: 117654 - DNA, 316 bp, Glycine max
agcttcttatccttgcaattcttggtggggaagctccttcttccttggcttattccctagtggatggtgcctcccctatcctcttctcctttgccttccgctgcatctccatggtgaaaaatcaccattgaaggacctcattgaagctcaaagatccagcctccatagaagctccacaagcaagcttccatcaagtggcattagagcacaagagcttcaagtaggtgctccttaaacctccattaattttttttctttaccttctcttccattgttgtttcttcatttttctccatgtatctcctcacatgtcttg

SEQ ID NO: 117655 - DNA, 89 bp, Glycine max
acctctaaaagaaattgactaccacaataagcttaagatatataagacctgttaacacacgtgaacactagtgagagtaatgatctggg

SEQ ID NO: 117656 - DNA, 310 bp, Glycine max
agcctaagttgagttctgcttaccacccacagactgacggtcaaaccgagcgcaccatccaatccttagaggacctcttgagagcctgtgtgttagagtagaggggtagttgggatagtttcttacccttgatacgagtttacatacaacaatagttttcactctagtataggtatggcgccttacgaggcattgtatgatagaagatgtaggacacctttatgttgggtagattccagtgaaagcattgccttaagacctgaggtagttcatcagaccacagaaaaggtcaagttgatccaagaaagga

SEQ ID NO: 117657 - DNA, 383 bp, Glycine max
tgtatgaagccaaatgtagatatatataaattcttttgtcactacgaaggagttgttgaggagaatcattacaatgagctagtttgtgagtatgactctccttattagctagtaaaggtgagatatgacatgtctccaatattgaaacaaatggggaaagtttacacacacacactatgtttgatttattccaacaagagtttgcattattcttatcctctcgcatttcacaaaggaatgaatcactccctttgtttgaatatgtcatcacaaggatcaaccatgaaatgtcctataaagttttatttgatcgtgcttcaatctctatatcttgaatttgtaaaaaattgatacaattggcatactttgttctcatgcattga

SEQ ID NO: 117658 - DNA, 321 bp, Glycine max
agcttggactgtgctttttataaaaacaaatgaccaaagtgaacaaagagccatttctagggcaaatttgggtgttgaagagtcaaattttgattcagtgagattttaggtgtaaatccagtttgaacaagtctaaatagatgttatggactggtgtgaggtgagagtttgcttcaaatttacctcattctaaatttcacttttcaaacttagaaaacccattgaattgaggggtgttggacacctagattctgtgttgctgtgctttaaagcttgactttggtttagacatgattgatacatgatttgggacttgtagga

SEQ ID NO: 117659 - DNA, 442 bp, Glycine max
  unsure (1)..(442): unsure at all n locations
tgccgctggagctgacccatcaactgccctagctcttttatgctgatgattcctaggctcttgaccttgacttgatagaacctctttttaagtgaaggcttttgacttgaccccatgttttactaaagtgaaacaaaacccaacgcgaatcaaaactccgacatctatcatgagtggaatggatgaatgcatgaagaaatgcatatgatacagatgcaatttatgaacacgggagcccgggaaattgtctccttcttagatacaacgtcttggggtaacacagtgcccaacgtatgtatttaagaaggtgacacggaccttccattggttngccaaagagaggggattaagacgggacccacgcatgatgcatatgcaaaaggtacaacacggggatgtacatagtacgacaatattcacaaacaaatataagcaaaagggt

SEQ ID NO: 117660 - DNA, 320 bp, Glycine max
agcttgttcttgattttttcaaagttctttaacaagctttgaacaatatacttgtccttcatttaactgtctttgggcttggcggccacgctcaacaaagtactttcgacacctactgtacgttgatttgaccaatgctgttatgggaatgttgcgacaatcctttaaaaccctattgatacattctgagaggttggttgtcatgtggccatatcgacgtccttctcaatcataagccatcgtccatttttcttttgaaatgcaatcaatccatgttgctatggctggactcagttgacgaaatttttctaaattttgat

SEQ ID NO: 117661 - DNA, 440 bp, Glycine max
tttctttcttcatgtttctcagtgttatcgcttttaattctataagtaagagttaggatactttacttttaaaagtacagagatagtttctgcactattattatgatcttggattattaagaaccaaggtttacataagaaggctttagtattgggttcatcaggaagttgatgcaattgatgtatggatgggcactcctaagggctatatagtgataagaaccaatcattcagacaaagcacatgtttggtttaaattaagtttaagagagtttatatccaaatgttctctatgcagtattttaattataagcttttttttatcacaaaataagctattccaaacatgtactaaaatgtttatcacaaaattaactcttctggtaatttcaaatggtgatattgatgtagatgcatgacttattttggaacttggaagc

SEQ ID NO: 117662 - DNA, 312 bp, Glycine max
agcatgcccccaatttatttgtttcttcatcgcactcagtgcgcccagctcgctaagccaaatttcactaactcgcgcttagcgggccagtctcgctaagcgagccttaaaaatctaaaacgtcaaggaacccttaaaaccctgaaggtggcaaaaaaactatgagaggagtcgaaaaacaggagcccaaaaagaagctatagcgacaaaaacaagcctctaaaagaggttagattagaggagtgagattaaggttctagaggttgaaggagacatcctcaaccattcgtagctatttactcccctcaaaat

SEQ ID NO: 117663 - DNA, 426 bp, Glycine max
tgcctaattaacttgaaattgagagaaaatgattatttaacacacaaaatggaagtactaagtatttgttatctatatttaaccgaaaatacttataacactacaaaataaccataaattggaagagtttgatacaatttacataagttttatacacaaaagttagtcatattcatcgactaacaactcccccaaatttatagttttgcttgtcctcaagcaaaaagagaacagttgacttgtcctcaagtgacaataacatgcagtgactatgtacaaaggtgtatgcaacaaaagttactgattgcatgataagagaatggagtaaaatgccctcatcacttgtctttcacaaagtatgcagctatccaaagagaagaataaaatgtaacctgaacaattagatggagttaggcataagacata

SEQ ID NO: 117664 - DNA, 315 bp, Glycine max
agcttgcacaaagtttctttttcggaatgtctttgattgacatcaagacaccttcgtgcacatccttaaggatgtcgaactcagtaatatctagaatctcaaatgcatgtcatacttgccaaatagccttgtcaaacctggccttttgctttttaaacaccttttcatgagcacctcgcgccagaatttggtattcattccttcctttctctatctcctcctcggccctagacattggctctttcagcttgtccaccttagccttctatcagaccctaatctcattaggggaatatcgttcgatatgatattttg

SEQ ID NO: 117665 - DNA, 431 bp, Glycine max
tcactaaaggtagtattgatgtagctatcgtctttgttttctatgtaaacctttatgacccaaaagacaagtcacctaagtaggtgagggttagaggtcatctgatcaaatttgataaagatactttgaacacttttttgaagaccccagtgattctagaagagggggaaaatctttgtgcttattctagattttcactcttgaggcttgatccttaagagttagttcctaagctctgcatcccagggaggggatttgagcttaatgcagatgacctccctttgaagatattaaggaagaacatgacctctttagttcagacatggagcgttctatccttctttaacttgattcctacctcccatacatctgatgtcacattatatagggccacgttgatctatggaattatttgaagatggacatgaatg

SEQ ID NO: 117666 - DNA, 318 bp, Glycine max
agcttgtaagccttttatcttcttcatcaatggagtcctttgcttctttaacatcaacggacccggaatttagatggaaaaaaaatgattggaaactccacttcactgagaatatgagtcccgaggaagctctcccccataggaagccatggataaaagtttgaaggtcgaagaagattacaggtgggagagggagaaaaggaccacgaaattttgtgccttaaaagaggcctggactttgaagcttaattctaaaatgatctaagttgaaaaaatgcacacacatggtctctatttactacctaagtgtcacaaaaa

SEQ ID NO: 117667 - DNA, 433 bp, Glycine max
tgcatcaagtggtaatcagagcacaagagcttcttgttggtgctccttaaacctccattatttgttatctttaccttctcttccattgttggttcttcatttttctccatgtgtctcctcacatgtctggttctaaatgttgataacatgattctttagagattccaccgattaaacttgctatagaagggagatttgattttctatgggtcaaaattcttgttcttgttcttgaaccatgaattgggttgagtttacgatcctttgagtattgtcttgatattttttgaggctgaatcctaaaccataaaattcttacaaaaatattaaagtagaagaaaacctcaaaaatctatagtgacttgttcacctattgtagtattgtcatagaagtcatgtctagtcatgaaacttgtcacataagaattcttat

SEQ ID NO: 117668 - DNA, 315 bp, Glycine max
agcttgctctatattttcattgatgtttgtatttattggaggggggttgtatgccatttttgttttaagggtagcatttcttggtaaaaaccaactttccaaatgtttgccttcgcaggaatggccccgaggaagcttgcctcaaagaggtccaggaaggacaaggcggccgaaggaactagttccgctctggagtacgacagtcaccgctttaggagcgctgtacaccagcagcgcttcgaggccatcaagggatggtcgtttctccgggagcgacgcgtccagctcagggacgacgagtatactgatttccag

SEQ ID NO: 117669 - DNA, 395 bp, Glycine max
tccatcactgctccaatctatcatggctttgcttatctgcactggtggacatgctggccagtggctctggttgtggcaatggctgagggaagtagataaaatttgaattcaaatttgttcgcattttcccccaaatttcggagatcgcaaattgtcctcgccgttgcagagcatggaaagccctcacttatcgaaatccctcatttcgtgaccttcctcctttgccatcgtgagctagctctaggcttccctccacaaaagtgttgttctttacgtgatgttgcatcaagtgatgataattactgctctcctttcaatttctattgtatgattatgggtctttgggtttatgtgtaaggctttaattggagactgttttggcttttacttggaag

SEQ ID NO: 117670 - DNA, 310 bp, Glycine max
agctttgcacttatcagtcaagtgtatggatcatatcgtagccaaagtgctcatcgataatggttccagtttaaacgtgatgcctaagagcactttggagaaactaccattcaatgcttcccacttaaagccgagttcaatggtggttcgtgccttcgacggcacccgccaagaggttaggggagagatcgatctcccagtacagataggccctcacacctgtcaagtcactttccaaataatggatattaaccccccctacaactgtctgttgggacgtccgtggatccactcagtgggagttgttccc

SEQ ID NO: 117671 - DNA, 433 bp, Glycine max
tccttaagaagattcctaaagaagctagatcttatctacacatacctctctaatagctaagctcacctccttgagatgagaagctagagcttagctacacaccccctataataactaagctcacccccatgatgaaaaacatgaaaataacaaaaaaagtccttattacaaagaaaactcaaaatgccccgaaatacaaggctaaaaccctatactactagaatcaccaaaatacaaggcctagacgaaggaaaaacctattataatatttacaaagataagcgggctcatacttagcccatgggctcgaaatctaccctaaggctcatgagaaccctagggcctttccttggatctctagcccaatctacttggagtcttctagccaatgcccttgcggggtaggattgcatcagggtccattttctcactt

SEQ ID NO: 117672 - DNA, 311 bp, Glycine max
agcttgatatttttacttataaaaaatgaagaacaagcctgttcgcacattgtccgggcgtatgatatccacttcacatggcttgaagtagaggagaccttctaccctataacgcaacgaggcggacaaaagtgggcagttaactagaatggacatcattgttaatgcggaaggtgttatgcgctctactatccatgttcacacattattgcagcttggggatacgtgagcatgaactactaccaataaatagatgctgtttacacaagtgagcacatcttaaaagcttactacgcacaatggagacctat

SEQ ID NO: 117673 - DNA, 427 bp, Glycine max
tgcttctacactgatgaggatgaagcttatattgtgtttaactgcacgcttttgctgttcgatcgcccttatctgatatgtctaattatgcttctgtgtctttgtttcttattaagcacttatggtttcttataatggttgtaatgtttcttttatgaatgacatgctatgatattttcccttttcacatcatatgcttgtctatttactctataagtatctgtgacattttggccttgctatgccaaaagggggagaaacattgcattaacatcgcattacgaaagattagcgcattgcatacatacattcatatactactatactcaatgatgatgacgatatgatttgacacttctcttagtgttcacaacatttctttgggtttttaagagaagtctctactctcaagactctccatatgcac

SEQ ID NO: 117674 - DNA, 316 bp, Glycine max
agcttgttaatataatgaaagaaacgaaaccgaaattgaacgaaataaagatgaaagccaaaaaaacaagaaatgaattaaaagtctcggatttggaaacttacctgctgaagaacgaagaacggatgaagaacagtgaagaacggaagaaaaccttcacggatttgcttacgaaaacatctcggaagcgttacggaagcacctcggcttggattttcttcacggaaacaatttttttcacccaaaacagttgaaatgcatagccagggggatcatggacccttagaacaggccccttttttcctttttatagaga

SEQ ID NO: 117675 - DNA, 392 bp, Glycine max
cggttagacttaacaaaatgaggctcatatagtatatggttgacccgatggaccaagttgggctgacctatccatttttttgcccctaataaattgcaatacatatttttagacataaaaaaggtccttactaattattccgtgtaaggtcaataaaatgtcacgactgaccctgggttttggttcgctattggataatgagaacaaaagcaatacttcatagacatcaaataggagagaattaaagacaattccgagagaacgtaataaacaagatcatggttctttgtgagtggacgatgcgattaagagtaatgttacaatagggtagtcacatttttgcaacacccaagaaacatgcctcatacataaagaagccacttctaggagta

SEQ ID NO: 117676 - DNA, 311 bp, Glycine max
agcttgttatcgtttccacaaaaaccgctgtagacgtccgccacacactagtacacataagggactatagccacatggcatatccaccgttgatggaccgcttatcaaggcctatcaccctctgactcgcaacacgaatccgctcaaaacgcaccctaacacaaaaggaatcttctgtactcgagccgtgaagatgcatcctgtggcggagatcatagcgaagtatctggacacacaacggggaatactgtgactgctgaaaaagctcagtatatctctttccataaagagtgcggctcccaatactcttg

SEQ ID NO: 117677 - DNA, 295 bp, Glycine max
tgcgctataaaagtcccaggaggatctagtattgtgatgcactgttgccaatggagagctttgctacccactcctctctaacgacatagatcaccttctcgacaaggtgttttgggaagggacagcttctctacacgcacctgtgtacatgcgcgcttacaccgtcgctgtgctgcattaagagacgtgtgaccctctgtacacatacgtctctaaccaccctaccatacgcggccgaaagcgtctactagctgaatggactaaagcctgggccccatacgagggataacctatc

SEQ ID NO: 117678 - DNA, 292 bp, Glycine max
agctaactttataattgtccatacaactatctgcgatacagctagtgttattaaagctcagcactccatatatgatggagggatgataactatgaccatatggcctttactgggaatttgatagtctaatctatttatcaaaaaaattccttatactcaaaaatagaatctacaacacccatcttattaatcttctttgagggatgtcgaacagtaatttaggaaataagcaaaagcaccgacctcaatattatatcagatcaataaaagaatattgcttattcgaacctag

SEQ ID NO: 117679 - DNA, 354 bp, Glycine max
  unsure (1)..(354): unsure at all n locations
tattctgtggctggactgtgatcgtgttttattatattaanatttttagcgtatgaatgcatcgaccacatactatctacgcaggtcctttatacatggacctttacttcgaaacaatggggagacgcacaccgatttattcagaagccctctcatagcacaaagattcctgggccgaagccgccccaagaggctagcattacaaagatacttgtatgaatggtcatcgcgagaacttaacaacaaaacgagatatttgatctgtatagatagcgactctttactgaacatgctcactttatgtcattgacaaataattgacaacgaagcggagatgattatctaacaccgtac

SEQ ID NO: 117680 - DNA, 319 bp, Glycine max
agcttatagagaattatttgatgacattgcaggcctttaataacaatgggttgtaggcagacatttcacactttgctagaataagtgatcctaaagaagggacaaataagagcaatcacaccttccactctaaagtctagtaatagtttcatgccaatagaaaaccaaaaagttttttcaagcattgtgttgttacaaattacaaataaagtattagggatgagaggggtattctataatacctataaccacttaattttagacactagaagaaaaagatatcacaatcttttccaatgaaagaaaatcattcaattaa

SEQ ID NO: 117681 - DNA, 444 bp, Glycine max
  unsure (1)..(444): unsure at all n locations
ataatactcaagccttgatgttgttagttgtcatttcagagtccatattgttttcttgttggattttgagaagaagatcaataaaatcttggtcctctacttcggctccatcttcttttgcaaatatcttcttttcttgatgctctgttatgatgttttctaagaccttgttcacctgcttgtgtaacttcttcaatttggccatctttccagttatgaaatataaaaatggaattgatggaaacactttaacaaggtcaaatcctcccccggattctacgatttttcggatcaaagacacaacaaactcatcttgcttcttgtatatgccaccaaatgctaccctgtaaantgaggcacatatcaatgataaaatttgactggtgagattgattgggaacctgctgcttccgaatggagttgaaaactttgctgctcggttct

SEQ ID NO: 117682 - DNA, 269 bp, Glycine max
  unsure (1)..(269): unsure at all n locations
gccccgggaccncagagcgaccgcagcaagcagcaaccacnacctttaaaaaaacaccagccgccaggggaggtaaaaagaaagcgcaaaggccgcagaaaaacaccagcgggggcgaggaaacgaccgacggcaggcatacgcgacgcaagccaagccccgaaagaaaggaggatacgggccaacaggaaagggcccaagcggcggcagcaggcgaagcaggcctggaaaggaaagaccggcaggagcgggcatccgtcccgaccgac

SEQ ID NO: 117683 - DNA, 376 bp, Glycine max
  unsure (1)..(376): unsure at all n locations
ctgngcatacaatatcctgatgagggtgctccatatgttctcattactacactaatacattcgctgcccaagtttcatggtcttgcaggtgaagatccttatatacatcttaaggagttccataatatatggttcaccatgaaaccccctgatgaccaagaagatcatatttttctaaaggcttttcctccttctctggagggagtggaaaaagattggcttttctaccttgctctcaaggctattttcagctgggatgaccttaagagggtgttcttggagaaattctaccctgcatccaggaccactgccattagaaaagacattacaagcatcatgaaacttggtggaatcagcttgtttgattactaataaa

SEQ ID NO: 117684 - DNA, 310 bp, Glycine max
  unsure (1)..(310): unsure at all n locations
agctttanagactttttcttagcagaaagaacttgattttaccctttaattaaatcttctctagatttgaatattacctcgtcaccattagaattgacagtgtcattaggctaaggatcctcatcatctaaacttgcatctagagctggttttgctttactggtggacgcattagtcatcagacacaggttggcttcttcctcattgtcctcattagacaatgaatcatctaagtcctcccaagtgctcatgaggctcttcttttttgacttgaagaatttcttctccttatcctttgacttttcaaggt

SEQ ID NO: 117685 - DNA, 443 bp, Glycine max
aaaactcagctttgctcaccttttctcccctttggaacttctttagccaaagaacccggaaatcaacacagttataacaatggagtagcaagatataagcatcagagtattaaatacaataagccaaactcacaaacaagaaataatcaaaccagaatccaaataactgaaaatgtcaacaaccacaaaacatccaagactgaaatttaaaatccacaagataaataagcaaagtacttagcataataatgtaaattctaagaaactaaaagccaaaatacacggtttataaaagataaataatcagaatctaaaagctaagaagacggaggaggtggtggaagatcgaaactctgacgaatgtatccgacatcctcttcaagctgtgtaagacgaatgtccataccagcaaagcgtgaatctaacgagtcaaagcggtcacc

SEQ ID NO: 117686 - DNA, 314 bp, Glycine max
  unsure (1)..(314): unsure at all n locations
agcttcataaatttttatgtatcagangggcttgtaactacctcatgcactcctctaatgactatggcatcatttttggcactaaactgctgggagttggaggccatcttctcaattaaatttctggcttcagcaggagtcatgtctccaagggctccaccactggcagcatctatcatacttctctccatattactgagtccttcataaaaatattggagaagaagctgttctgaaatctgatggtgggggcaactggcacatagtttcttaaatctctcccagtactcatacaggctctctccactgagttg

SEQ ID NO: 117687 - DNA, 431 bp, Glycine max
tcctctctaagccttttatccaaggcattctcttggtggtgaagcttatccttccatgggttattccctagtgcatggtgcctcctctaacctcttatcctttatcttccgctgcatctccatgatggaaaatcaccattgcaggacctaattgaagctcaaagattcagcctccatagaagcttcttaagcaagcttccatcaagtggtatcagagcacaagagcttcaagtaggtgctccttaattttcagttttaccttctcctccattgttgtttttttcctccatgcatcttctcacatgtcttgttctaaatgttattaagatgattatttagaatttccaccgaataaacttgctatagaagctagatttgattttctaatagtcaaatttcttggtcttcttcttgaaccatgaattatgttg

SEQ ID NO: 117688 - DNA, 292 bp, Glycine max
actaacgccacaggaagattaaatatgaaggctgtctaaaaacaataataccccgacaaaaattaccgaggggcctaagggaaaaagacttcaattaaaatctcgccatagaaagaccaaaaaggggggggggcacaactacaaacaaaacaggattacgcaacttcgagggtaaacggcaaaccaatggcgtaaacacattcgggagcaagaacctaataacaaaaaagagcggtggagtttcaaaacaaaaaaaacactgtatctatggggacggcagaaaaagaaaaaa

SEQ ID NO: 117689 - DNA, 454 bp, Glycine max
actatataatacccaagctttgtcatgggtgacacatagagtccgcttagctttgccttgattgctacgcactcataagtgaacccatccgcagcaatatatggatcatccatgatttcctgcagtactcacaaatcaaccaagaatgaacaaatagctgaaaatgatatgcatcacaaagatatcaaaacacaataaccaaatgttcatcagataagtgcaggtttattatacctgaaggattggacaataatactggcttggcgcacttacactatttcttcccatccttgcactagcatttgccgcatcagaaaatctttggagcattggaagaacttcagtatcaatctctggtctatctctgcatctgaatgcagtgcatttaagggctacttgagccaattccactgtctcatccagtggccaatctacagctgatggatctaaaata

SEQ ID NO: 117690 - DNA, 311 bp, Glycine max
  unsure (1)..(311): unsure at all n locations
agcttncaatttttttttgtattccaatatcaataatcattttgagagtttagtagttgtttcacccaatagataataaagattgataattagccatcttgacatgtgatcaggtgtctgagaggataacttattgtggccatgagctaaatgaaaatggtgttatcagacagtgcacgtaaccgctaatgataagtccttcgaatcattggcgccgctaacgaaaccgacgagttatcatcagcgacgagtgtgacaaaagtcgatacctccagcatctgttgcggtaactccgcaaccatactccaatt

SEQ ID NO: 117691 - DNA, 374 bp, Glycine max
tatcgggttttctaattttcgaattgggctaatttagcctgtcccgctaagcgaatgaatcaaaattctgaataatttaaacatcactgagtgctagctaagcaagtcactcacgctaagcgaggcatccgaaactgcctaaaataaaacataactgcctctggtagttacttttgcacaatgatgaaacctccgttccttcacttattgcaatcattggcaatttctgcgctggactgatactacctttctgcatctagccctcattttccgtactaatctctgcaatccaagtaagtacttcagttccttgtcattaatgaataaaagtatgaaccctatggtataaaacattttaagatctcatgtgcgat

SEQ ID NO: 117692 - DNA, 312 bp, Glycine max
agcttctttttattttctaatacaagaagaaaatgggacacaataataaattaagattcttcaataaactaaaattaccttttcggataagctaaaaattatttagcttctccaaaatgcaaatgttaatttgcgtataacctaattttagcttatgggggaagctcatcttatttgcctttcttatcttatattactctactaatacatataaaaaagtttatccaaatagggcttggatcaagttataataaaatcaagggtggctacagtacaatgataaaaatacctggatgatgaatacgaaaaggc

SEQ ID NO: 117693 - DNA, 372 bp, Glycine max
cttggttgtacatagagttgaatgacattatgttattcatatggtcatcctatcttgtgggataaaggctttcttgtcattgtaaacttttgattgttatacgtcaaactcctttccaacctggtctgtgcatcattcaaactggttcttagatgtgaaatgatgctaaattcagcattattatacgtagggaccaatatttataacgtctaaggatcaaaatcctgctctgtacgggctacatataaaacagttatatttataagggctggtttgaaaacttctattgggaatcactgaaaataagtcttgtatatatagggattgataattgaataaacatgtatgattaaaccagttaatatcatattc

SEQ ID NO: 117694 - DNA, 309 bp, Glycine max
agctgtactgttttttggtattccaaaattaatttgactaatcaagattcgagagtaaactcagctaatagtggcaatcaaatagttctcatacaatgcatgtaacatattcatataatagctgcagttttatcacactattgattttagctgcctcaaaatagctcttcttttttggtgtcacgtattagattgctcttttaagcttgggttgttctagcagggtactcatgagccccacaatttaactaaaaagacacctcctgcaaaatccaagggaagaaagcacacaaatgccgtcatcaagtc

SEQ ID NO: 117695 - DNA, 413 bp, Glycine max
tatcttctctggccttgtgtttcttgggaagttggcggaactcattacttaaacgcagacactcatgaatattttctgggaacgtaaagtctaaagcaacttttgtgcatgactgcaaggtttgacatatggtgattaaagcaacagaagcaattaaacgatttgagaaaattaatcgtatgtgttagttttatgttgagattcctgacgatgtgggcaaccaggaataaatacattacatgtttctacacctaaaagtcaagattcgcataaataactaattacaggcgccgagcaagctattgtatgcaatttctatgtactaactactaatcaaactaatgtcgaagaatgtgcttacctgaaaggccccttaatcgatatatatttttattgaaaaaatttaagtgatt

SEQ ID NO: 117696 - DNA, 313 bp, Glycine max
agctttggcccttttttttgcctggctgaaggagcttggtcttcatggagtgcaaatcagtgttaaaggtccttattctgtccagtctcaccctgccacaatcttataacttgcgaatgcaggattaatttttacccaaactttcacttaattttttttttctagggaagactatggttgacagccataaattaaaaaaaatcccaggccatcgtacagaaacgtgtgacacacagtacgtacaaacaaaaccctttctatggaaaatatcccaaaagctacccctcaaaagaatagccactcaatcattcat

SEQ ID NO: 117697 - DNA, 430 bp, Glycine max
ctccagaccatgagcccctttcagagaggtctttattccggacgagcatttagagagtcccatcttttttagatttgatggcaaacctccttcatggaacgactcaactcttggacaatcatatattcctagctccttcagagatggaagcagtccaagggaaggcaaacgttgacaagattgacagttgtccaactctaaggacaccacatttgataaagaattattggataaccaattagggaattgtctaccaccatagttgctcattgacaacttctccaagtgttaggaaggttgtaaatcctcaattacaattacatccctttctttggcagaatcatcagtgttccggtgtgaatctcatacaaagtctagtttcacaacgagtgttctatttttccaatctgcagcttatgcatctgacgga

SEQ ID NO: 117698 - DNA, 314 bp, Glycine max
gagctcgtttttttttttgcgatctcctggggctggccttgaccccaaatctttagaacttcgaccctttaataactactatgtgctacccgaattgtgaggcacaatccaaaggctaaagctgctgaataccccaccactatatcgacctattctttcaatataggaaaaatggcacccaagcaagaaatgaactgaagattccaattcggggcttctgaatggacaccacaactcgccttcatgatggataatatctcttatgataaatgatcccttgcctaaatgctatcaaagaacacctgccaagacaa

SEQ ID NO: 117699 - DNA, 430 bp, Glycine max
  unsure (1)..(430): unsure at all n locations
ctctatcatcattaaaattntgatgtgttttaattacatgagcaccagggagagcaccccttgttgttctataagggactcaaatgccattcatacccctggttcaaccacaacgccaatgactctccaaataatccatgagcacattctaagaaacatttcaacggcttatgagatggaggagttctttgcttatgccgagaagcagcaacaaacaatatatatggacaagtgtgtatactcttatattccacaagtcctcttttttgtttctaacatatgggtatttgtatctagatttcttcctcattcattaatgtcattatgtaacgtgcttatgtctaaactgtctgtatcatgcaggtacaatttcgacattgtcaatgaagtacctctgcctggactgcaccagtgggtcccagtacttcac

SEQ ID NO: 117700 - DNA, 312 bp, Glycine max
gcaagcttcagttttttgttggaaccaattacgataactctgtaatcgattaaaataaagaatccccgcttctgaagaattttttctaacttcaaaacttttcttcacactaaccatgatgatgcatgatgcaatacagacatcaaatgttctaagatgcaacaaccaagattacaaccaatacaaatgcctctcaagggagttaggcataaaagccaaaacttcaaaaattcttcaagctttattagcctttaggttgttcaccatgttgctccccctatttacaacaacgagaagccttaaatacttaaa

SEQ ID NO: 117701 - DNA, 441 bp, Glycine max
cacaggaacttgaatactcagctgccgttagtttaccatttattgttttatgggtctgagaaaacgcaaaatttgattatcctgctttgatgaataggaagcctgtggcaaatggagaaataagaaggagggaagaacccatgtggtaactaccgttcctacatggccaaatttcccaccagctcaacaatatcaatactcatccaatatcagcccttctcattacccaccaccctatcattcaagaacacccaatcatctacaaaggccacccctaaattggccacgaaacccgcctgctgcacatccgataccaaataccacccttaacactaaccaaaacaccaaccattgaaggaattttccataaaaaagcctgtagaattcaccccaatttctgtgtcggatgctaacttactcctatatctactcaataatgca

SEQ ID NO: 117702 - DNA, 316 bp, Glycine max
agcttgtatccattttaagagaatgagcatttgattgaaattatgactgaaaatgttagtcagtttgtcagattgattatgaaggaatgcattgaccatatcccgatgagagtgtgatccttaaattttgagagaaactaccataatttagtactaatttttgcgtgaatctttgaagtatggactgaatgcatgaaattgaggatgatgaaggccatgtttgattgtgatagccacttagccaaaaagctgaccacatgcttgaatgatttatcctttgcacccagtttgagctgaatgaattattgattgattg

SEQ ID NO: 117703 - DNA, 440 bp, Glycine max
tgaagctgaacttagtaagtattagcctgtgaatgtaggtgaagtttttaatgagaaggcgagtgggaagaaaggcttttgccaggttaagttttttgacccttttgctgcaatgcttgcaaggaagggatgaatggacattttttttattttaatttaatttttcatttaaatttaaatttaattaaattaaaatatgatgtcatgtctgatgacacgtggtcaatttacatgtcacacttaatccgacatggcattacatgtagcttgtcgacgtgtcaagttaacggtcacatcaactgttaatagaccccttctaacgacagggatctcaaacaaagagttttaaattttagaaatctatctcaataaaaaatttatgaggaatcaaatacaaagttcgagtatatataaggaattaaaaatatatttaagtttat

SEQ ID NO: 117704 - DNA, 310 bp, Glycine max
tagcttgtgccaatttttttatgtatcccacctttccacaacattgccacctacctaccatttcctgcaatttttttcaaatcttggggtggttgaaatttttaaacttttcttgatttgattgctagtttggtcttgaatgaatacttctaacaaaagggtacctttcaactttttgaacgctccttcttattcttctactccttcgccatgtatgtaatgtatctctgccctttatcaacaggtactgcctcgtgccattggatgtgtgaatttttgaactcatttcacagaggtcatgcattattct

SEQ ID NO: 117705 - DNA, 383 bp, Glycine max
tgaggtctttcaaacaaatttctcttcttttcattacctatcattagaacacggacatcaaccatttctctcggtttccacgaggacattcttaacgatgtcgaaacttaccatacactctcagtgaaattaatttacctatcatatgaacgcaactcctacgttcatgtatatacgaaagcttcggtatctgtgatgtgctacgaccaaagccaaaacatacttaacctcgagaccgtgcttattggaaaaatagtgacgattcatacccttggaccatataaatttgagggaaaaacatgacatgttcgtcgaatcctatgattctgaagaaaggcatctactaactctctatttgtcgatgtgcacatggagacaggatc

SEQ ID NO: 117706 - DNA, 310 bp, Glycine max
  unsure (1)..(310): unsure at all n locations
agcttgnctgagttgtttttattgacgctggatctttgagcttcaatgaggaccttttatggcgattttccacaatggagatgcagtggaatacaaagggaatgaggtgagaggaggctccatccactatggaataacccatggaaaatggagcttcacccccctgataagccttggataaaaagcttggaaaggatgcttcagtgggggaaatgaacgagggagataaagacagaggggggagccctaaattgatggaagaatacgggagagaaattgaactattggttgtgtctcacaagactgtcat

SEQ ID NO: 117707 - DNA, 435 bp, Glycine max
  unsure (1)..(435): unsure at all n locations
tgacatgangttaaagttagtggcgaaactactcttttctattatggacttcggcaaaatcccacaaatgggttgaattatcgtatagatatccaagatccaggaattggagggatcatatctgctttggaactattttttgaacttccaatcctccacttgagattctccttcaaacggtttaccattctcacaagagttactctttctgcattagagctaatgttcactttcctaaatgataaccgaacaaattccgccagtcttctatcctctggcctcctttaagctgatttcttggctctttagctattaaccacgccgacgatgctaactaactactatgtttttgaaaaaatcttgacacttctatgatttccacgtgtcacattgcgtgtgtaggatatatatacctcatacacaccaaaatattct

SEQ ID NO: 117708 - DNA, 303 bp, Glycine max
  unsure (1)..(303): unsure at all n locations
agcatctcccctatttttttatagataggggaaagaggaaagaggaaaggggttcanccttcttggcacttcttattctcttaaaattgccgacgaaaattgtttacgtgaagaaaatccaaaccgaggcgcttccgtaacgtctccgggagtaattacacgaagatttgcaaccgttcttcgacattcatcgttcggtcttcattttcttcagtcttcaactggtaagtacctcaaaccgagctttgcaattcattctatgtacccggggtggtccacatttcgtcccatgtattttgattc

SEQ ID NO: 117709 - DNA, 430 bp, Glycine max
tatagtcattacttgttgagaaccataagccatattttaatgttcctttgatatagtaaataatttgttttgtggccttgagatgagtagtggttggagtctccatgtattgactgatgagtcgagtaccatatataatgtctggtcttgtggacgtcaaatatcacaaactacccaccaaactcttgaaatttgtagcacccatcttttttgcttcgtcaaactttgataacttcattttgcactccaccggtattccaattggcttgcatagttttgctatgaaatgaagattcaatcttccttttgctttacctcaataccaagatagtatgacattagtccaatatcggtcatcttgaactccttgaccattgctttcttgaacttttcaaacatacttggattacttcccatgaagatcaagtta

SEQ ID NO: 117710 - DNA, 316 bp, Glycine max
agctttcataagttattatcaggtgcacccatttcccttagagtcctctcacgggatggaggttgttccatgttctcaaaatgttcaaaatcagaatgttcaaaactataatggtcaaaatcaggatgttctaaattaccaaccatagaatgctcaaactcaccaataacataatgctcacgatgctgaaaaggcacaaaatgatgcctaactaatctatgaaatgtcctatctatctcagaatcaaaggattgtaagtcggatggattgcctctagtcatacactacattcagcatgcacaactagttgccttct

SEQ ID NO: 117711 - DNA, 427 bp, Glycine max
tcctttacaataaagagaagagaaaaatgaaggattgaataaatacaagtagtagggatgtctccttcacctctagaacctcacaatcactcacagactcatctcatgctctcaggatggcttcctcttcacgctccattctctgccagtcttcttacaacaaaagctctcaaaactctctagaacttggatctttctttctctagaaatctctaaacatgcaaaagcttcgagaattgtccaaactccctctccatttttgatttcaggcttaaataggtggccttgttggtgcatgcgtgcgtagcgcaactctggctcgtttagcgtgcattagtgaatttcggcttagcgcgtgtcttctcgctcagcggatggactcaaatggtgcacttagtatgatgacacctcgctcagcgaacatgca

SEQ ID NO: 117712 - DNA, 312 bp, Glycine max
agcttgtaattttatggggcacccatcacatgtggtactatgtggaggtcgggcgatggtgcacaacaagttttccacatccacagattggacataaacccaccatcccctgtggcccacctccaactgaactcacgtactcccacgtagcccatatcctcgtttctctcaacaccaggtccccatcgatccttccacgcttgcccaacatcgaggtaattcaacatccaaatcattacaagctaacaaaccacgcataacagggcaaaggctgaaaactctgcccaaaactcaaaccaaaatcacagcttt

SEQ ID NO: 117713 - DNA, 377 bp, Glycine max
tcatgcactcctctaatgacaatagcattattgttggcactaaattgcttagaataggaagccatcttctcaattaaaatcctaggcttctacaagggtcatgttttcaagggcttcaccactagcaacatctatcatgcttctctccatgttactgaatccttcataaaaataatggaaaagaaactgctccaaaatctggtggtgagggcaactggcccataatcttttaaatctctcccaatattcatataagctcttctccactgagtttcctaatgcttgaaatatcctttttgatgagccggggcctggaagcatggaaaacaatttctaagaatactctcttgaggtcatccaatctcgtgatggatcat

SEQ ID NO: 117714 - DNA, 312 bp, Glycine max
agcttggaattttttcactgacaacattctcggtcggaatatccttccagagagaaatgtgaagctttatcatattgagtttgatgagttcaaggtggagttggagaggcgtaatctacacaaatgcctccccaacctccaagatggaagcatagatgtagctgtggtgaatgagttttatgctaatctatatagcccagaggaccaagctcctaaacaagctagagtaaaaggacatctgattaagatcgattcagacaggctgaatgaatttcttcaaactccagtggtgttagaggagggggaatcttt

SEQ ID NO: 117715 - DNA, 414 bp, Glycine max
tgttaaaagtggaagaaaagaatactgatagtatacgagatgaagaatgaaagcaaacaaagcaagaatgaattgaaagcctcagattcaaaaacttaccggttgaagaccaaagaacgagcgaagaacgaatgaagaacggcgaagaacctccacggaatcgcttatggaaacgtctcgaaagcgttacggaagcacctcggcttggattttgttccttttttcacttcttttcactaaaaacacctaaaatacacagcatgaaggtcaggggtccttgaaactcagtcttctccccctttttatagccaaaatggggaggatgttgccgcccagctcgcccaggagagctcagctcgccccgacgagttggtggcttcctcaggaagcttcctattgtacaccttaatttga

SEQ ID NO: 117716 - DNA, 308 bp, Glycine max
agcttgaattagttttttgtgaatttcttgatgtggatgttgagttaggtggagttttgttgagctaagttgaaattgtgagatttcaaatttttgccaaaacctattttagtaaaatcaccatcccataatcgttaactcttggatcgtcttcacgttgtgtctggggaatttctaagacaattatacacattctgaccgttgggatttgtagtataacatcttgagtatgatatttttttttttactgaagcagaaaatttgagctgtggatcagttcgccacagcgagctgtggatctgttcctt

SEQ ID NO: 117717 - DNA, 336 bp, Glycine max
  unsure (1)..(336): unsure at all n locations
tgtggtactgagaagggtgaaaggcgccgccattggcgacctttacgaattgcatgagcgtgtccaacacgagttccttgagcgtctcatctccctgcggcgaagcgaggacgttgaagagggacttgaggaactcatagaacttggaacggagccatgagaggtagatgaactcggattggtcgccgacgacggagagagcggtggtggcggcggcggatgcggatttnttttttgttcttcaccgtgatttcaactggttggcatatcttcgctatagaaatgaagattcgttctctcttgtgcttttactcaactaccatgatattgcgactt

SEQ ID NO: 117718 - DNA, 316 bp, Glycine max
agctttacattttatgccactctaccccaagttttaaaaggatatgttaacaaggaaacacaagtttattcaccaggaaaacatttttgtggaaggaaattgtagtgctgggattcaaaagatccttccacccaagcataaagacccagtgagtgtaaccattccttgttcaattggagaagtcactgtgggaaaggctcttattgatttgggagccaatattaacttaatgcaactctccatgtgcagaaggttcggagagttggagatcatgcccactatgatgactttacaacttgctaactgctctattacc

SEQ ID NO: 117719 - DNA, 408 bp, Glycine max
tcctcctcaagctgtccaaaatcccaaaaatgttagtgccatttcattgaggtcgggaaagcagtgtcaaggacctcaacccgtagcaccttcctcatctgcaaatgaacctgcccaacttgtctctaacccagaaaaaggtaatgacaaaaatttacctaacaatttctatgcagatgaatcttccactggcaattctgatttgcagaagcagcacatccctcctcttccattccctccaagagcggtttccaacaaaaaaatggaagatgcatagaaagagatcttggaaacatttagaaaagtagaggtaaacatacctctgctggatgcaataaagcaaatcccaagatatggtaaattcttgaaggagctgtgcactaataaacggaagcttaaaggaagtga

SEQ ID NO: 117720 - DNA, 311 bp, Glycine max
agctcacatatattttaaaaatactagttttagttgtatttccattataatcataatttgtatttgtatgccttttcttggttaaaaataaatattttaagtatattttatcaaagatccattatagcttgatataccacagataattaaaaattcatttaaaatgatacataaaactgactaaaaaatgatatttttaattacatatcacattttaatataaataaaaaatactgcatataataaaaggataagttcaattatttataaaaacaatatgaaatattacaaaattagaaaatgaacccctt

SEQ ID NO: 117721 - DNA, 317 bp, Glycine max
cgggcgatggagcagaacaattacctcacatgcacacatcacggacaaacacacccatcccctgttgtccacatcaaagtgaactcatgtactgccaccaaaacaatatctacgatcctctcatcgccgagtacacatcaaggctaccaagctccccaaacagcaaggaattcaaccaccaatcataacggactagcgtaatcaagctaaacaaggcacaggctgagaactctgaccataacacaacgacaaaacacgattgttcacaatacatataccccgacgacatgcgctccgttccaattcgtcaccgcggg

SEQ ID NO: 117722 - DNA, 309 bp, Glycine max
agcttcactatattatgacataggtaatagccttgtgttgttagtcttgcttctaaccgtttccataagcgtgcggtttcttctttcgacaacaccgttttgttgtggtgtacccaccatagtatattgggaaacaataccctcctcttgaagaaactttgcaaatggatcggcttgttgccccttttttgtgtacctaccataatatttcccacctttatcagatcttatgatctttattttcttttccttttgtttctctacttcagctttgaaaactttaaaagcatcaagtgcttcaaatttttt

SEQ ID NO: 117723 - DNA, 435 bp, Glycine max
tgacactataaaactcagctttgcaagctggaatcatttatcctatctccgacaaccaatgggtgagtcctgtccaggtagtcccgaagaaaaccggcctcaccgtgataaaaaatgagaaggaggagttgattcctactcgggtgcagaacagttggagagtctgaatcgactataggaggctgaaccaggttaccaaaaaggaccattttccactgccattcattgaccagatgcttgaacgccttgcaggtaaatctcactactatttccttgatggtttttctggttatatgcaaatcattattgctcctgaggatcaggaaaagaccacattcacctgccccttcggcacttttgcctataggaggatgcatttcggcctgtgcaatgcccctggtaccttccaacggtgcatgattagtatctttagtg

SEQ ID NO: 117724 - DNA, 316 bp, Glycine max
agctttaggatcattcttttttctctctttttctctcaattgtcctttgttcttcttcctcttttcacttctattgttccattttcttgcacaaaattccatggcttttccattggtgatgatcatggaaggctaaacacttaatcaatccaaggatccacttcaagcaagattgaatttgagttttggtttagtatttctaatctttgtgaatgttcatctttttcttcaatcctatttttgattttcatgattatgattatacttaagattgaaaacggattacgttatggattgattctattaaacatgattt

SEQ ID NO: 117725 - DNA, 434 bp, Glycine max
tctacccaaatggacttaccttgaattaattcctttgatagcccttttgagccttgtttccctttccttgttttgaagctcactacaagccttaagtgataaaccatgatattaccatatccttaaggaattttggagctttggaattgttttgggaataaatgtgaggggtttttgtttcattggacaacttgttttgttgactatgcttcatgatgtattttgggccatacttgatgtacattgtatattggttaaatgttggacatgctgaatgaaatgttgtttctcaaaggcgcaaattctacttataatggtcaacatatttcccaaaaaaaaaaaaagcgtgaaagtttagtgaataaaaacttaaatggcccaaaaatgataaaactcttggccgagctcttcatggtaaatctaatctttactcc

SEQ ID NO: 117726 - DNA, 316 bp, Glycine max
agcttttaactcttttttatttcaattagttaggggatctcaatatgtagtagacctttctaaggattgaaatatgtagtattaatatatagtagacctttcttaaaatatgtagtagacattttgttcatggcaaatgttgaatgtgtattccattatttttatagatgtgaacctcaatagttgacatttctatgaaattgtatgcaatacatgtcatttctatagactttttaaaattctggaaaaaacaatgtacaacataatcacactttcatttagtatttttttggagaaaaaaatgtacaatggaagt

SEQ ID NO: 117727 - DNA, 447 bp, Glycine max
  unsure (1)..(447): unsure at all n locations
actaagctctnggagaataggttgaggagtgccttatctattatatttgatgaaacgcagccagctctcatataagacagacatatccttcatggaattctgatccttaatgaggtggttgacgaagcttttaagagaaagaagccagttatggttttcaaagtggatcttgaaaaggcctatgattctgtatcttggtcttttttggattacatgttgataaggttaggcttctgtcttaaatggagaaaatggattactgcctgccttcaattagccaccattttaatcctagttaatggaagccctacacaggaatctgccctcactataggtttgaggctaggggaccctctatcccctttgcttcttaatatattgggtgaaggcgtcttctgtatgatgagagaggcccttctaaaactacccctatataagctctctagt

SEQ ID NO: 117728 - DNA, 254 bp, Glycine max
  unsure (1)..(254): unsure at all n locations
agctttancagacttgactttctgagacgggtaataacaaagtgtcgtctttgaaagctttggcagacatcacatttaaagacggttaatagcaaataatcggctttgctggggtgtccacaccgtcgcgcattgggaaacgatgccctcctcttgaacaacctttggccttggatcggcttgtggcccctttgatgtggacccaccgtgactttcagcacctttttgagatctcatgaggtctgtgcccttct

SEQ ID NO: 117729 - DNA, 371 bp, Glycine max
acccttcccgagagcatagctcatttgagcgtttcaatcttcgcttccaaggagctaaagaaaaatgccatttcttctacatttcttgctctcaaaaccatatataacggaccgatgactttattcataacccagagccaccattagccaccacaaatattctctgttctccgttgaaaccccacaccaaaaggaacccttcaaccgaagcggaatcttccaacttgccttgtggtttccgtggagaacgaaaccctaatctaacctttgattttccttcgaggtaaccatggttctacactcggttgatgataaatacatcatgtctttgcatcttttctgactctgggaaccaccgttgcatgttttac

SEQ ID NO: 117730 - DNA, 315 bp, Glycine max
agcttctctttacttattacacaacatcaaggattgaagagcaatgacaaacacgtacagaaaaacaagagtcatgactcaagaaacaagaaaagcatttgttaagaaatacactaaacaaaagagagtccatcctttgtgatatacaaagtacttgtaagagattagaacttcattgtaaactcactctttgagtgtaggaaaaaatctatgattctacatcaaacttttgtttgtgaaagctaggagtggcttagtgacaaaataatacttgagtgttcttagattcagggggagtctaacgattgtgacagt

SEQ ID NO: 117731 - DNA, 430 bp, Glycine max
tgtgcattcaatatcctgatgagggtgttccatatgttttcaagactggactaatacatttgctgcccaagtttcatggtcttgcaagtgaagatcctcataagcatcttaaggagttccatattgtatgctccacaatgaagccccctgatgtccaggaagatcatatctttctaaaggtttttcctcattctctggagggactggcaaaatattggttgtactaccttgctcccagatccattttcagctgggatgaccttaacagggtgttcttggagaaattcttccctgaatctaggaccactgccatcacaaaagacatttcaagcattatgcaacttagtgtggagagcttgtatgagttctgggaaagattccagagattatgtgcaagctatcctcaccaccatattttttagcaactcca

SEQ ID NO: 117732 - DNA, 318 bp, Glycine max
agcttgcatttggttttgcgaaagccccactccatcattaggattagtacctgacatctcaaacaaacaaatcaaacgtaacaagacaattatagttgttgtttgaatacctcacccactcaagtgtatcacacaattatggcttttctctaatgaaaacactcttgccttttaccactctaattccccttgagttcttaggcaattcaagagattatggccacagcaaagaacaattcaccaatatgtgtaaggtaaggctagagagacaaggaaaaggttaaccaagaaaaaggctaacaatgtttttaggcacaa

SEQ ID NO: 117733 - DNA, 437 bp, Glycine max
  unsure (1)..(437): unsure at all n locations
ttccattcaactcatcaccagcttcctattttgtttccatattccagtgattctaattctgtttttcctaattgtacaaattctgttgcttctgtggagaccaagtcaagcaacctatggcatgctagacttggtcatccaaatttccatgtaatgaaacttatactacagcaatgtaatatacaactatccaataaaaatgctgttgatttttgtgcatcttgctgtgtaggaaagtctgacagacttccttcttctctgtctaatattgtttgctctgctcctttagagttaatttacagtgatctttggggaccttctcctgttacttccaccaatggctttttatattacataacctttgtcgatgccttttcaaagtatacttggatttatctcttanagaataaatctgaaactttcagtatttttcaaca

SEQ ID NO: 117734 - DNA, 313 bp, Glycine max
agcttgccgttgttttctaccccattaactgtcctagctcttttagactggtgatccctaggctcttgaccttgacttgatagaacctctttttaagcgaaggcgtttgacttgatcccatgttttacggttgaaacaaaatctagcgcgaatcaaaactctgacatctatcatgagtggaatggatgaatgcatgaagaaatgcatatgacacagatgcaatctatgaatacaggagcccgggaaattgtctccttcttagatacaaggtcttggggtagtacagtgctcgacgtatgtatttaagaaggtg

SEQ ID NO: 117735 - DNA, 438 bp, Glycine max
ctgatttgctaacaccctaccatgccttttggccatcattttccccacctgtttcttgtaccaggtaaatttcaaacctgtagcttccatatccaagagataacacttatccgtcatatccaacataaggtcggctcttgatgctatgaatttcaccctagaactttagatggcttcactatcttgttatagtccccaataagcatcatgggtcagagatactagaattaatggacataagatgataccaaagatagtatcgttgtgtaaactggggattagaatatacatcgatgcaacaccacctctaagcgtctctcgtaatgccaaaagtgatagcttggggaaagctatacatgtcaaaagtattcaaaccgctctgattgtctactaaaatccagatgcccctggaatgactcgaggcttccaccaagtggg

SEQ ID NO: 117736 - DNA, 299 bp, Glycine max
  unsure (1)..(299): unsure at all n locations
acagcaagcaggcaagcagcaaacccatatcaatttcagcaagccgggggagcacaanacggaagcgaccctcagaaagagggacaaaaacacaagcaaaaaaaagacagacaccccccaagacacgaagcaaacacccaggcaacggcaaaagacagacgcgcgacccaaaaacccacgagacgagaacacacacgaggggggaacacgaccaaaacgggagcaacaacacgaagagaaaaaaacgcgcaaaaaagcgggcaaaagcaaggcccaaaggagccacacagaacaagaga

SEQ ID NO: 117737 - DNA, 313 bp, Glycine max
agcttagcgtgtttaaggcccatgaagaagctcaaaggcgcgtgatcgctgccatactcgctaagcctaaatgtcgctgcactcagcgcatgatcatcgtcatacccgctaatcctagaagggcgcgcttagtgttaggtcgcatgaattttaagctaccttagacctataaaaagagtaggaagcaaaggagaaggacacattgagacttagagctctctattgaatacacataaagtctgagcatctctaatagaggaaaccctctttctttaaccattctcccatcctccattatccatccctcttcttc

SEQ ID NO: 117738 - DNA, 411 bp, Glycine max
tgcttctacaatctacccctttttgatgatgacttccctgaaatcaagaaacacatacacattctttttcctagtcgatcactcacttaattctccatattctccccctttgtttttgagtttaagcttcacttgaaattaagttatttaattatgtgagttcttgatttaatccctattttttatccccctttggcatcaacaaaaagccaaagtgcgtaagacataagaaaaacatacacaaggtattcaatgaaaaatctaaaccaatcatgaagcaaaaacatgaataacccaaattaaaatataaaccacatagtcatataacataattcataaatgttcaggcatactaagcaaatattaaaagaaatactaaatgttcaaatgtcataataatatagcccaata

SEQ ID NO: 117739 - DNA, 312 bp, Glycine max
agcttgacataccttgtttgagatcagatcaatggtggagatcggtctggagaacactttagaatctggtatcaagacatgataagtttaaataatgataataacattttaattgattgaaaaaggttgaaataaaaatgttaatagtgtaagtgacaaaatagctcaaactgttgtggctccaccccagggacgaatttaagggggcaggcatccacccttcttcttttaagcttttttttataatgcactgctagttattagtgattcaaaacttcagacatttgaaaagggtacactatattattatca

SEQ ID NO: 117740 - DNA, 421 bp, Glycine max
ctgaagagttgaagacacaaaccaacatgtctttatttaaaatttgttgttccttcttctctaagctctttctttgtaaattcgtaagttgtaaagatcttgaaacaccttgtaaatcctgagagaaaaagattgagtgatgaacttgtatatccgcctctaagatgattaagctagtctatgtgcaaacaaacctcaacaaatgtgctggtatattaagagttgaaagtggcttgttgaagaaagaatacttatgttgtaaagctttggtataagttgtgttgtaagaataagaagtggcaagaaaaaatacttgtaatttttgtgaaagttagttaaacttgatgggtttgttagaattggacataatctcagtggtaaaatgaaccatataaaactcttttgtcttatatccttatcg

SEQ ID NO: 117741 - DNA, 317 bp, Glycine max
  unsure (1)..(317): unsure at all n locations
agcttatntcaaactgtatatattcaaccttgtgtgggccatatggtatgaatggatatttaaagaacgtaaggcaggctaaaccatagagaaatggtagcaaattaagattgtgtttggttaaaaaaaagttactaaagatggaaatggaatgactacatttggtttgtgcgattttggagacagtaaagttacaaatttctctcttcccaattatagtaaaatcgattttttagccaaaagaatcaatatttaggtataaaaacgattttctacacacaaaaatcgatttttttacacaaaaaatattatttatc

SEQ ID NO: 117742 - DNA, 430 bp, Glycine max
  unsure (1)..(430): unsure at all n locations
tncacaacatccaagtgattcaacatccactcatttcatactaacaaaaccaagcaaaacagggcaaaggcagaaaactctgcccaaaactcaaaccaaaaatcacagctttttctcacttaaagacaccagtaacatttccttcgttccaattcgttcactgttggatcgactggaaaattttactggaagtccctagtacataagtctacattntgaccgttgggatctgctagcaaatattcagaaccccatatgtactacccttttcacaatcagccaaacacaagcattattctgcacttatacaaaattctgctgcacatttcaacaacaaattctgcataaagggcaaatttcgaaaaccactcttgccttcatccaattttgcccaaatcgaattctacaagtcccaaatcatgtatcaatc

SEQ ID NO: 117743 - DNA, 311 bp, Glycine max
agcttttcttttttagcaatctgtaagggacataaacatgaagcatgccagagtaagttttccaagaactcatgcattcaataaactgaaacccaagttgtcactatgctacatttcaatcatcatagaaaaacagactactgtttttaacaatccacggttcataacaaatcctatgttggaatatgccccacactgatctttttacaccatttgaagaaattttttatctttgtgttctcttgcaatgccaagtggtgccagagagtaaatgttatccatatctttctaaatttttatttatcggaatt

SEQ ID NO: 117744 - DNA, 453 bp, Glycine max
  unsure (1)..(453): unsure at all n locations
cttcacaccaggaacttaaaactcaagcttactgtactttntccgggtattgttacatttcaacctggaaaaacataagaatggataaaaggagtaagtgtttcacaggttgtatagaaaaacaaaacacaaaaaacattacttgtacaatcatgcagtacctgtgccagatcccccttgtagttaccaccttttattcgagcccacatgccctcagaaatttcaggggttctacttctaacagagaacagattataaacctcactatttggtacaggtgccactcgagtaacatatattccgggaatcccttggcatgcctgaaaccatgcattagtaacaaatgtaaatagatttggctagtggtagaaaattttcactggaaaatgctatcaagccagtgttagaaaatgggtgtggaccacaatttcaaccgcagcaattcaaaatctg

SEQ ID NO: 117745 - DNA, 307 bp, Glycine max
agcttttgctctattattcattcttcatctgggccttttgagtatgtgcattatgattcatggggaccatctaaagtgaaaactcatggtggaagctcatactttctcaccatcatagatgatttctcaagaagagtatggttgtatgttttgaaaaataagtcagaatcttttcaaaaattcagagaatgacatactcttatgggaaatcaacttggtacaaaattaaaagttttaaggactgacaatggcctggagtttgtttcaaagcatttcaatgagttttgcaggaaaataggcatgaaaa

SEQ ID NO: 117746 - DNA, 420 bp, Glycine max
tctcaaggaagctacatgaatctgtctctgttattacgctgcccatcctttggtaaccattggatcttctcgaaatgtggtctggcgcttcacagaacactcgtccatgatctgaccattgggatctttgagcagacatctggagtgtgcgcaacgtttccgtttccgagagcattagtcatttgtgcattttgagccttgtagtccaagtagctttggaaaaacaccatttcctcttcttctttcttccaaaaccattttcaatgtgccaagcttactctccatcacccatagccaccattagccaccacaaactgctgttgttctctgttgaaaccccacaccgagaggaatccttcaactgtatcggaatcttcgaacttgcctcgtgggttcggtagagaacgaagccctaatctg

SEQ ID NO: 117747 - DNA, 304 bp, Glycine max
agcttccgttttttattttttagcgtctcgatatatgatgtgcctgaatcggacctccgtgtgaaaagttatgaccatttaaatttctcgagagcatccgcccttcaattaccagtgtctcgatatattatgcacctgaaccagaaatccaagtgaaaagttatgaccaatttaatttctcgagagcttacgttgtgcaatttcgagcgtctccatatatgatgtgcctgaatcggaccttcgagtgaaaagttatgactatgtaaatttctcgagagcgtccgttcttcgattacaaatgtct

SEQ ID NO: 117748 - DNA, 437 bp, Glycine max
  unsure (1)..(437): unsure at all n locations
tcaaaccacagcaacacaaaatctaggtgtccataacccctcaattcaatggcttttctaggtttgaaaggtggaatttagaatgaggtaaatttggagcaaattctcacctcacacaagtctataacatcaatctaaacttgctcaaactggatttacacctaaatttccaccgaatcaaaatttgactcctcaacacccaattntgccctagaaatggctcttggttcactttggtcatttgtttttctctctagctcagcctaacctttctcacatgttctaaatgacatttcaagctagtattaactcactttaacctccatttaccacagaattcagacttagtcttccaactctcaaggtctcactctttttccactcataacatcacattctcactttctaaccctatgttagttctacccttcatctct

SEQ ID NO: 117749 - DNA, 311 bp, Glycine max
tagcttaatgagggcttctattttgtcttttaaggcattgcattcctttgtcgagtgaccgcgattgtggtgttaccgacaatgttttgagtaggcaacctttggtggggtgttagcccttatcagaatggtcaaaatgtctacagtcaaggcttgatctatgatatgagatctattggcggtaaggggggtgtagtgggtgtaatgcggttctcggggaggtctgtccctccttccatcgtattgagctttgttggagttggatttttcattatcttgcttggccaatacggaatccattcgtacttggt

SEQ ID NO: 117750 - DNA, 430 bp, Glycine max
  unsure (1)..(430): unsure at all n locations
atacacaagctcgaccaagagagagacaaacaatggagatggtggttatatctctgtcatggnggacgcatttttgtaagcactaccatgacaatggcatatctgccacattgttttgttttgtttatggagagacaatataaaacgaaggagatggcgttagaacttacactgggttaggcgggggttgttgtctatggcaacggttacacaagacctttaccacactgatccaaacccgtccaaaccaaaagtgtactttgtgcgggattggtccatgaatatcaacctttagggttgtgttggatgaggttttttggcctatatttgatcgaccggacccgctgtacaaccttaatccaaactacctatagtttttcttcaatgctatcaagcgacatgatcacttacaaaatcaatctaagctttg

SEQ ID NO: 117751 - DNA, 316 bp, Glycine max
tagcttgcatctcttctctctcctcaggcacttctgcctcttccccattcagacactttagcttttggagccaagttatcccttgcgttctagatttcaaccatttgtgatagtcgcctatgacaccattgctacttcccctaagttctttatcttttcttcccactttattccatgccttacagatcctctgaagtatcttcgcattagcttcatcgaaacctcgcattatgaaaggcgatggtctcctctgatggcgcacctctcatagggtatcctaactgccttacagcctacatgagattataattaatac

SEQ ID NO: 117752 - DNA, 397 bp, Glycine max
aacttgatgccttggtcaacctagtttcttatcttgccatgaatcacaaattcgcacctgttacacgagtctgcggtatatgctcttctgcagatcaccacacagatctttgtacttctttgcagaatcgggagtcaatgaacaacctgaagcttatgctgcaaacattcataatataccccctcaacagccaaaccaacattagcaaaatagttatgatcttccaagcaacagatactatacacgctggagaaatcatccatatatgagatgggcaagtcctctacaacaacaacagtctgtacctcctttccagaatgtcgctggtccaagcataccatataggcctcctccaatacagctgctgcaactacaacagtcacaggattgacaacaa

SEQ ID NO: 117753 - DNA, 317 bp, Glycine max
agcttgtatagttcctctttttatgcttattttggagtaattttgtaaataaatcttgttttattattaaagttgtctctagaatatttccattggatttaatgatgaaatatgtgcaatttcaagtgaaaaaaggctaagtcatgaagtgctaaaagtgacagttgagcttacctcatcagttgggctaagcgcgcatccaccgctaagcgcaacatcagcgcgatagaagaatctagcagagcatcaatatcaaggccgcccactaagcgcgtgatcagtgtgctaagcgcaacaactatctttagccaagctca

SEQ ID NO: 117754 - DNA, 428 bp, Glycine max
tcttagtttcagatgatgcagatgggtgtgtatctacctcatgcactcctctaatgactatggcatcatttctggcgctaaactgctgggagttggaggccatcttctcaattaaatctctggcttcaacacgagtcatgtctccaagggctccaccactggcagcatctatcatacttctctccatattactgagtccttcataaaaatattggagaataagctgttctgaaatctgatggtgggggcaactggcacatatattcttaaatctctcccagtactcattcaggctctctccactgagttgtctaatacctgagatatccttcctgatggttgtggtcctggaagcatggaaaaaaatctctaagaatactctcttaatgtcatcccagctcgtgatggaccttggagcaaggtaatac

SEQ ID NO: 117755 - DNA, 241 bp, Glycine max
agcttttcagtcttttcctgaatttgtcttgtgattttggctatttctgatgttccttccggggcggagttgtttgaaataacggttgaggtatttccctgaattgtgacagacatagatttctccttttaaaaaagcactatcggcatgcacaaaaaaatctttaatcgtatttcttgtgtcattaattgtttgatgttcagattgttttcctcgcgggctggcgcgcctcagaaagtaa

SEQ ID NO: 117756 - DNA, 241 bp, Glycine max
  unsure (1)..(241): unsure at all n locations
ntactttctgaggcgcgccagcccgcgaggaatacaatctgaacatcaaacaattaatgacacaagaaatacgattaaagatttttttgtgcatgccgatagtgcttttttaaaaggagaaatctatgtctgtcacaattcagggaaatacctcaaccgttatttcaaacaactccgccccggaaggaacatcagaaatagccaaaatcacaagacaaattcaggtgctgactgaaaagct

SEQ ID NO: 117757 - DNA, 312 bp, Glycine max
agcttttgatctttttttatggtcataacttttaactcggaggtccgattgaggcgcataatatatcgagacgctcgaaattgaacaatggaagatcttgagcaattcaaatggtcataacttttcactcggatttccgattcaggcacataatatattgagacgctcgaaattgaacaacgaaagctcttgacaaattcaaatggtcataacttttaactcggaggtccgattaaggcgcataatatatcgagacgctcgaaattgaacaaccgaagctctccagaaattcaaatggtcataacttttaac

SEQ ID NO: 117758 - DNA, 414 bp, Glycine max
  unsure (1)..(414): unsure at all n locations
nttcgattcgttctatgtacccgtagtggtccattttgtgtttcgtgcattattattctcggattgtttactttttataccccctgttgacgtgcttaagccattttacttaagtcatttctcgctgaacttagaaataaaataaatttccaccgaacgtttgaattgcattatccattaactttggttaaaagcaattccgaccgatcggtcgtgccgtaaccacgttggaaatcaaaaagaggttaaaaagtaatataagattgaaaaaatatctttttagtaaaataaagcggaaaatcaagtggacattttctctttgggatgtctcattcttaatctaattgatgaataactaaagtgaatctaaaggctcgaatcaattctactaggtcagctcgtccattacaaata

SEQ ID NO: 117759 - DNA, 312 bp, Glycine max
agctttgtgtgttttttttttgtctcatcaaccacagcaagtatcgatcgattaagacttggatgatagacttcattcctttgattattagctgatagaagaaatgttaaagctatttgcaaagtacacctctattggtgtgctgaacacccttatacactgggtggtttttggtgtttgtatctatgtcgcgcatacaaaccaagctcttgcaaacttcgcaggtttcgttgtggctgtgagctttagcttcttcgcgaatgcaaaattcacattcaaggcatcgactacaacgatgcgctacatgctata

SEQ ID NO: 117760 - DNA, 402 bp, Glycine max
ggtaataccctcaagtgctaaattccattgtgttcatccattaaattttgtatctccagcaattctttccgctcgcacgtattcaacaatatctgtctttcctcctacccagctcagaatacctttcatgaaaaggtttcgttctggcataagtttaatattttcgacaacatcacggctcatcagcctgaaatcaccaacattctcttcaattttaggattgcttattttattgtggagcttatagaaccactcagccgtttttcgcttcatgcgtccatcagttgagcggtcagatcttttagcaagaaccatatcagcacctgcttgccatttttcaataagatgaggaataacctcaatcgggtcttgcaggtcaacatcaattgggattatcgcatc

SEQ ID NO: 117761 - DNA, 311 bp, Glycine max
agctttgtgtgttttttttttgtctcatcaaccacagcaagtatcgatcgattaagacttggatgatagacttcattcctttgattattagctgatagaagaaatgttaaagctatttgcaaagtacacctctattggtgtgctgaacacccttatacactgggtggtttttggtgtttgtatctatgtcgcgcatacaaaccaagctcttgcaaacttcgcaggtttcgttgtggctgtgagctttagcttcttcgcgaatgcaaaattcacattcaaggcatcgactacaacgatgcgctacatgctat

SEQ ID NO: 117762 - DNA, 419 bp, Glycine max
actatgatactcagcttgaataccctcaagtgctaaattccaatgttttcatccattaaattttgtatctccagcaattctttccgctcgcacgtattcaacaatatctgtctttcctcctacccagctcagaatacctttcatgaaaaggtttcgttctggcataagtttaatattttcgacaacatcacggctcatcagcctgaaatcaccaacattctcttcaattttaggattgcttattttattgtggagcttatagaaccactcagccgtttttcgcttcaggcgtccatcagttgagcggtcagatcttttagcaagaaccatatcagcacctgcttgccatttttcaataagatgaggaataacctcaatcgggtcttgcaggtcaacatcaattgggattatcgcatccc

SEQ ID NO: 117763 - DNA, 302 bp, Glycine max
agcttaccttgtttatgaatgacatatcctttgcatccatggctgagctaaaaatctgattgtttgattgaaccttgaacttatggattacatctccatctaccttgtcttaagttgtaggagagcattatggttcaaagaaaatttgtcccaaatatgggggagtttattgggtgatagctttcaatggtaagaaaatatcaccacacatagtaagttaataagcaacaagttaagagcagttgttcaaaaaaagactataagtattcaaaataaaagtgtgatgtaagctccattagagc

SEQ ID NO: 117764 - DNA, 135 bp, Glycine max
tatgcacgcgactatgcaatgatgttaattgagatgtctcgacgcaaacacacatatggctgtttatactcatgcaatcacgtgtcgcatgcgccaatctatagatgtctattaacgtgataaccgggttatata

SEQ ID NO: 117765 - DNA, 300 bp, Glycine max
  unsure (1)..(300): unsure at all n locations
tgcaagcttattctttttttccaacatgaacacgtctgggatcctgtcatatagggtaactactttcattcacatgtctgagtgagaatatactttggtgaataggcgctttgatttgtacacactaggaaattaatgagatttcttactaagaaatacgccgaagatgattttcttataattaaataacgtagattcatagatgaagttcatagctcacacctttatatattcaacgttccccgacactttaatatatatactattaactttatgttaagtgtggatntggaggaaacg

SEQ ID NO: 117766 - DNA, 423 bp, Glycine max
  unsure (1)..(423): unsure at all n locations
tggcgaagatgatgaatcactattgatttctgtttgaaagatgatctcaacgaggatgacttccaggccgagagaacgatctcagatcgagtcataacgatcccctataattgatttcaatatagaggcaccatcctttcacgaatccccagaaatctgatnttaacactcatcgattgagctgtgaggagcccagactccatagcctggaggcatgctttagacactaggagtttttccacacattgaggagcacatggaggtttcacgaccgatgttaccagacgagctgggcgtctctgcgcatacgcatacgagcatccatgcgtcgagttccaccttgacactgtagactccaaggctactctacggggttcactgctaatggatatagactcacacgtgggggacgtgtgctaaccg

SEQ ID NO: 117767 - DNA, 315 bp, Glycine max
agcttgataagctttttttttgttttatgcaataacaagatatgctaggtgtgactagtaaagaaaacaagctatgaaaggcagcctgacattcaagtctaagaaatgtcaactatacgaatcctaacgagatgtttagatcaccacatttaaggatcctagctacacactcactatactaagggaataattgcctagaattattacacacacatggaagggtggccacctattgggcgctactaacacacatccaatgaaaggcgctattgttacaaaatacgaaagtgataaaggctggtaaatagactattg

SEQ ID NO: 117768 - DNA, 395 bp, Glycine max
cgaccagagaatctcagcttttcactcatactatgtacccgaagtggtccatcttgttaaattagcgtctatattctcgaatgtgtaacttttatgcccctggtgtcaagactataccattttacttaagtcattgcttgcttatcttaaaactaaactaaattttctccgaacctgcgaatagcattatgcgctaacttctgactaaataaatttcaaccggtttgtcaagccgaaaccacctacgaagtctacacagatgtctaaaatgctgttataatctagaacacctcctttaggtaaatatatcggaaaataaatcggacatcagcacgctgggattgctcattcttaatccgaatgcgcttaagaactagactgaaacttattgctaa

SEQ ID NO: 117769 - DNA, 282 bp, Glycine max
agcttgcttgagtttgtgttcgattccggaagtcgtgtggatgccgaccacggctgcacatagcgcagctacctcgtccttaatgcgcgccgatggcactgatgatcatcgagaggaattctgaaggcgctgccaatcttggtcccaccgctcgcaggacccgcgcgtgaccccctgatgagattgacaaaacgggtttcaagcaggcacgttccgactgtcccgatctatagcctagagtatgcggatgagggctcaatagagcactcgattcatacctgt

SEQ ID NO: 117770 - DNA, 424 bp, Glycine max
tcctctggacgaaagcgcaacaacacccatagttggcttgatgttgcggccagccaacctctgggacctgagatgactctgcccatcaacacccccgtgatgtcggctcttgtgactataagagccccttaacgattgctgactagctattctgatacagggagagtgcctctgaaattctacgggtggtaacttgtgcttttgactgcttcttccccgaccggagtcggtagagctcttacatatctgaagctgaaccccacttttctaagcccatctcacacattggtgtttgtttggcctgtagcatattacagctgcacctattttgacgtgataattctgcatcatggcctatatgtaaaataacagttacgtgtctactcttatgcctaacatattttctccaaggccaagtctgtgt

SEQ ID NO: 117771 - DNA, 312 bp, Glycine max
agcttataatttttttataacacaacaaaaacttgtttgggttatgtatctgagggtcacacaataaaaccatatacagaatgaaaacttatctttgttatgtatgcgcgttgtttttttacactattgttaaattagaaacatatcattcttgaaataatttttaagattattttataaaaattaatacacttatttttcttgataatttttaattagataacaatataaaaatatttacattcttagtttattttaatttttttacttttaatttgttgtagtctcttgttttagatttttggaaggata

SEQ ID NO: 117772 - DNA, 431 bp, Glycine max
taatcacatattggccaacacaaaagcttctctgttgaagttaaagaaactccacctcattttgattttatacattgtgggaaaaacacatatctctacgaacaatcttgaaattatcataagtgatgaaagtctaagttcaccattttctcacttattccccttcaccaatttttagcctcatccttgagcaaggagtgtcctttattccatggcatcattctttctttaccaaaaaagaattttaccactttataaggaaaaatgggatgaaaaaatcctatgtcaaatgatgttctaggggtctcgcacttagtataggtacaatcatacttaatgttggaccttggcacttaacacgtaaggatgacacttagcgcaactatgcaaagggttatagactttctctttagaagacttgtgcttagcgc

SEQ ID NO: 117773 - DNA, 299 bp, Glycine max
agcttgagaaccttttgtttccaataagacctctcaaccgcagcacaaaatcgcccccaacactcactttgaccatttgggcaaccaatacacccctggagagacgaatcacgctaatctcaaatggtgcatccctctgctacaacaaccactgtgtgctactaactttcataatgctgctggcgcaatcagaccgaacattcctgcaccgtggaacttcagattgtgccccagaaacagccaacacttgagggccctccacaagctttcctggcataaattgtgaagcaaatgacgat

SEQ ID NO: 117774 - DNA, 314 bp, Glycine max
  unsure (1)..(314): unsure at all n locations
agcttataatttatatattggngcataccaaaatattctatccttatatgtagcagaatatgcaattcatagacttgtccatcgatcctgaaaaaaagaaagattaaattagtccctaaatttatatgtcaatgttattttagtcctgtaaaactaaaagatttcaaataagtctgaaatttttaatgttttatttaacatcatgagaaaaaaaaattctcattctgattcctaaacttatattattattatccaagttctcgtattaaaaaccaaaataagaaataattatttttagggatttaaatgagatt

SEQ ID NO: 117775 - DNA, 313 bp, Glycine max
agctttaaatttgttttgaattcgcgacgttgcactggatgaacacacctgctgcgcttagtgcattgatctcgtgcttagtgtgcgcccttgatgttgatgccctaccagattcttctgtcgcgctaagcgtaacttcagcgcgcttagcgatggatgcgcgcttagcccactgatgagctaagcttaatctgtcacttttgggacttcatgacttagcctctttttcacctaaaattgcagatatttcatcattaaatccaatggatatattctagagacaactttatccataaaagataatttatttaca

SEQ ID NO: 117776 - DNA, 429 bp, Glycine max
  unsure (1)..(429): unsure at all n locations
tgtagaatggctagacatgatacatgttatggtttggtttggttcaacgataaaaaggatgccccacattatttccatgacacaaatgcaaaaatgatgatttggaaattttatgcaaaactggtcatgcatgcacctatgtggacgctcaagtgtcaaatttttatggtcatgtgatgctaaggctcaggattcatttcctctattttaaatcaacccaatgtttccaaaatatgttcttttatcaatttgtgcattcatcctagtccatttcgggcgtccggggaaatttcacagcattcacccttcaggtgtagacacatttttcaaaaattggttatgatcaatgaattttttttcaaagaaaagttggaaatcatctcttttcanaagcatgtcgggttttagctagacaacttattttctctt

SEQ ID NO: 117777 - DNA, 305 bp, Glycine max
agcttgaaatgttttttgtacaagggtgagacttcctgcttttattccttgaccacagagtggtacctggagatatgtcgcgggggtcaggggccttggggacctctggtggggtgctattgcccaaaaccaagcttgactaatcccgacccaacccgagcatagtcattcattgagaacctgtgatgtacctaaacaagcgagctccgggcagtcaacagattttaggaacagagaccactaagcatggacccttgtgtggtggctggccacctttgaatctttatgtgatatgggttatggcc

SEQ ID NO: 117778 - DNA, 357 bp, Glycine max
tgaggctattactcaagtaaagaagctgttgtatgacggtttggcttgaaagagcataaatacttgcgttctgttggtgcctaaaatatgtattactatgcaccaaattcctatgataggtggtatgatgaatgtggcgagaggtgcatcatctctgtgtaagatcgctcatgcacctcaaatctttatgatttgagtacatagggacttattttgtcggatgtgtcatatactttagcacaaatgcacacattcttgcatatgtgtgacaccgcatgtgagcccgatttaacagctatatcactgtattcatgacaaacaggaccggtgtgaatcttcactctcaggttcaaactc

SEQ ID NO: 117779 - DNA, 312 bp, Glycine max
agcttctaattttgattcaagaatgaagctctgataccacttgatagacaagtggcctcagatatcttaagaaggggggttgaattaagatattccaaactatttcccctaattaaaaatctatttcactttttactcaagttatgaattcccttaatgacaatcttcttaaatatcaattcaaatgaaacaattagaatatgaatataaagcaataataaataaaggagattaagggaagagaaaatgcaaactcagttttatactggttcggccacactcttgtgcctacgtccagtccccaagcaaccc

SEQ ID NO: 117780 - DNA, 394 bp, Glycine max
agagagacaacaatggtggcgaagttttgtattttaaacgcggcggacgaatgagagagttgtgctggaaggttctggacaaagagagaaacaactttgctttaaaaatggtttatgaggactgttctcattttcttattaaaagcacttccacatgtcttcttataattggcgcaaaaatggccctcgattgcctttgacttgacgagcatactctgtcctttaacaagaaaaaaaactggacctttttggatgctgaaatgctgacaagagttgcatgccgaatatactgttccagttcttcgcgtatcttatgcacccgtcggggcccgtgttcgaaggtgggccttatatctatcgtatcactcagattgagatttcgagcgtggttcta

SEQ ID NO: 117781 - DNA, 314 bp, Glycine max
agcttagacatttttttcttataggctgcaggagctagatggtaaaacaattccaagaacatggaatgctaccctatataaagttctattttagttgaattgcaacaagaccaagtgttgtactcttttcctactcaagtcttttgtcccaaaatagaaaataagatttttttggcttgagaggttttaacgagacacacttggggaatgaagagaatttgtactcaaatgatcaaattgaatagaattctttcgccctttagttttttataattcttcttgtgtatgcattgaccttgaaaaggctcttcaaa

SEQ ID NO: 117782 - DNA, 429 bp, Glycine max
tcttagtttcagatgatgcagatgggtttgtatctacctcatgcactcctctaatgactatggcatcatttctggcactaaactgctgggagttggaggccatcttctcaattaaatttctggcttcagcaggagtcatgtctccaagggctccaccactggcagcatctatcatacttctctccatattactgagtccttcataaaaatattggagaagaagctgttctgaaatctgatggtgagggcaactggcacatagtttcttaaatctctcccagtactcatacaggctctctccactgagttgtctaatacctgagatatccttcctgatggctgtggtcctggaagcaaggaaaattttttctaagaatactctcttaaggtcatcccagctcgtgatggaccttggagcaaggtaataca

SEQ ID NO: 117783 - DNA, 312 bp, Glycine max
agcttttaatttttttgctgcatctgggatataagtcattttggatatgacaaagcgctcataacaatttcaaattgcaatatgatctacatgcatgacttgatgtatcaaatacgccaagaaattgcctgtgaaaagacccgggcgaattacgtataaaatataatcgtgttactctatatagtcttgcacaatagatcttaaaagggcatatctccttgtgaaagagatggaaacccttaatgttaattgcgaatttttcgatttactgtaccttaagggtggttcatttctcaagcaattgccactgac

SEQ ID NO: 117784 - DNA, 321 bp, Glycine max
tgccagcatgcaagctagatatgtttatgtgcaagtgctgctactggtggaggcccttcaatttgcttgctagaacctcaagtgatggcactcacattttttggattctgcacaagttagtgaaagcaatttggcaaaaatttgggactgaacttggttcaactgagtaaccatcagccccatctgatttgctaaactctgaatggaggcttttgtctcttgcctaaaaatgcatattctggaaagggaatttgcctaactaactcttttaaggaaggtggagaaggggccaaaagcgcttgaggcctttaaagaatcccc

SEQ ID NO: 117785 - DNA, 310 bp, Glycine max
agcttctgtgttttgacattgccaaattgttgcaattctgtatccagccttctttcagtcatagcttcgggccgcgataagactcactgatctgaccctgattcctcttgcagactttatagaccaattaaaatgcagtttctgcaggtcaacgtctgaccatcattgtcatcactctggccattagagtaaccttctgcattcatccttttgtaaaaagtttatattagtatcagcaattaaccggacctgatactgatatgagtcttaccgcatatacggtcaatttcagcaattaattacattatcc

SEQ ID NO: 117786 - DNA, 344 bp, Glycine max
  unsure (1)..(344): unsure at all n locations
tttctaaaatagtttataagaaaaaagtttggttcattttaaatcccttttttttataaaaataaaaaatttctcttatctgaacagagctttgtatctagtggtcgaaacaaatcttgcgaaattttaacacgaaacattctgttaactttattatctagaagtaaaaggtaaaaaaaaacagttttattatatgtgtgatgtgaatattnttttatgaaataattcttaatgaattaatgaaggaaaaataagaaaatgtttttattaatttaaaatataaattatttcaataactttttaataattatttcttacttcttacttcactattaaatgttagt

SEQ ID NO: 117787 - DNA, 355 bp, Glycine max
  unsure (1)..(355): unsure at all n locations
ngaagcttcagcattcctgctatggataaactttgcctatttatgttttgttattggtttntacttcttatgtatccctcggtaccttggaatcttgtctcctttctctatttgggtctgtactctgtatggccttgatcccatatatggtttagaccacaatatgtttggtggtgcaggtctgttgagtcaataaaagttggttcagccactgtcattgatcagatttatgttctagtttctgaacacaactggaacgttaatattctntaatgtagtcaccatggtgtgtatctatatcacttgtctcttactactgggtgaaatnntgcaggaacattctatatgcttctgc

SEQ ID NO: 117788 - DNA, 396 bp, Glycine max
tccacccaaacgcacccttcttcagacattcggtcataggacttgctatagtgctaaaattctggataaagcgtcgataaaatgatgcaagaccaaggaaagatctcacctccgaaactgttgtagggctcggccaagtcttgatagcatccacttttgtttgaacaacggatactccatctttagacaccacatatccaagaaacaccacactttcaaccaagaaatcacacttttcccttcttcccatagagttttgtgctcttagggtctcaaatatttgtttcaaatgagtgaaatgcttctctatagatttgctatacaccaatatgtcatcaagataaacaacaacaaacttacccaaaagaagcttgagtacttcgttcatgagcctca

SEQ ID NO: 117789 - DNA, 467 bp, Glycine max
ggcgtctcggatacaacgggagacaatctgtcattcgagtaaaaagttattgtcgttagctatagcttagtgcttctattcttaatatcgaacgtctcgatatacaacgggagacaatcggacagccgagtaagaagttcctgtcgattgattttgctcagagctttcattttgaatttcgagcgtctcgatatactaccggacacaatcggacatccgagtaaaaagttattgtcgcttgatgttgctcagagcttctgttctgaatttctagcgtctagatatactacgggacacaatcgaacatccgagttaaaatatatcggcgcctgattttgctcagagcttctgttctgaatttcgagagtctcgatttactattggacacaatcgaccatcaagtaaaagttattggcgttgatatgctcgaacttccgtttcaaatccaccggctcctatttaccgga

SEQ ID NO: 117790 - DNA, 418 bp, Glycine max
  unsure (1)..(418): unsure at all n locations
acactatgatactaagctaaagatccagcctccatagtaagcccacaagcaagcctccatcataaatggatcaccaaaggcttaggcttactcgggtntctgtcactccactgcatgcatacctccccttcctccttctttgcattgtagatttcaatttgccccttgtttatcattccctgcagtagctcctcagctattgngcatgtttccacatcgtgcaacgcccctggatgcattaagcacggatctcctttgtcatcattnttagtcgatgaatacgactaactttngtgtataaaacctatgtaaattgtatcaaacttcctccaattaatggttatcntgtagtaattgaattactttttggtaaagataggttatacatacctagtattcgcatcttgtgtgtttaata

SEQ ID NO: 117791 - DNA, 318 bp, Glycine max
aaccggatttacaccttaaaatccaccgaaatcaaaattgactccccaacacccaattttgccctagaaatggctcttggttcactttggtcatttgtttttctctctagcacaagccaagctttctcataagtcctaaatgacatttcaagctaagattaactcactttaacctccatttaccacagaatccaaaattaaccttccaactctcaaagcctcactctttttccactcattacaccacattctcactttctaaccctaagttaactctacccttcatctctaacagtttccgtaagcaatttcagcata

SEQ ID NO: 117792 - DNA, 374 bp, Glycine max
  unsure (1)..(374): unsure at all n locations
cacttgaaactaagctggatgattcgtctgacagggatcgagggttagtaatttatgctacaacatanaacacaagagcatgattgattagagaaatatatntatatgcatcagctngtttgtgagtaagacccaacatttctacctattgctgtcacttttacttancttgtattttacagatttagcataaaagtctagtttgaattctgtttgaaattatgaatcatacatgttctctcaacaatgcttcatttctaaacttaatttaggctaacgttagttccttgtgttcgatactcggattcatccgttttaatttttaaatactngacgatccggtgcgctttccggaaaactggattctccttgaa

SEQ ID NO: 117793 - DNA, 429 bp, Glycine max
  unsure (1)..(429): unsure at all n locations
gaacagtatacaaacattcgggctcatgtgttacttatggatcctattccacccatatcaaagatcttctcatacgtggcgcaacaagaacggcaactgttaggtaactgctttcttatctcattttgaatctaaggaaatctccattaatgctgcnanggtccgtttgtgagtattatggacgaatcggtcacacaaaatatgtgtgttacaagaagcatggtatgccttctaatcatgaaacaagaaacagaagcaatgggggaagaaagacttgtacccactgtggaaagataggccacacgatcgacgtatgttaccggaaacacggatacccgccgggatataagccctacagtggaagaaccacagccaacaacgtggtaacgatgaatgacaagtctatggaagatcaaacccagcattatg

SEQ ID NO: 117794 - DNA, 416 bp, Glycine max
  unsure (1)..(416): unsure at all n locations
tgaacaatattacctctaanaagaggtatatgtgatgtgagagatataaacatactcatactccgattattaacagatgctttctggtgttgcatacgagttgcggcaggatgagccaagctntcaatggacccaatcaaaataagaacattgaagcttctaaagagtgacacgtagattatacaaatataatagttagaaatagatagtatcatattatagctgatatatatcagatgactaacataagatgatcactgctagctggacggcagcgtaaaattcatgcaggtaaatgaattaaatttgacttcattaattcttttaacacctttntagtggaaaaaaggagttgaatagatattgatgccttaaagaattatatattanaaacaaaacagagttctcccaccatc

SEQ ID NO: 117795 - DNA, 361 bp, Glycine max
  unsure (1)..(361): unsure at all n locations
ttacaagataatgcttaggttaacgcacacaatgtcatgctaatccctacggtttagaacgaactcatgcgcacgtttaaagtaacacatttatgcacatgcgtatgtgtagaatatcttactattgatatcaacgttgaaggtcatccaacacattctaaacgtcatacatatatatgcatttgaaaagaacacacattctcacgctcaaggcattgcgtcaaaatgtacacttaactatgtgctaaacatttgctatcacaaactacctacacacactcgatatatatataccatacaaactttcattgtntcactcacacttatgcatatcgggcagctatntacattatgcacatac

SEQ ID NO: 117796 - DNA, 351 bp, Glycine max
  unsure (1)..(351): unsure at all n locations
tactcagcttcttgttagacctcgatcggtcatctttccaggccgaggtcgaccgtcanttttttcgatccatttcggtgaataatatttttttgccgagatgggctaatgttttcctggccgaataaatgggaaaatgccagtttcggccgaaacgaaaagtcggttgagctcgcacaaaaaaacctagccgacctacattntaaattttttatgcaacaccaaaacaagaaaacttcctgtgccgtaaaaaaaaaaaaaaacattacatgacagcgagcgttttgaaaaacaaaattgcgcaacgtcggctgaaaaatatcagtcggggctttttcacgaccgatgtcg

SEQ ID NO: 117797 - DNA, 207 bp, Glycine max
aagtgggtgctttgcccaaaccatctgaccaatctgcccaccggcatatcggtcaggaaacctggatgtccaaacatgcactccgcagtaacagataaaggaacaaacccaaacaggagctgggggctgcctcttgaatttgtgtgataaagggtgggcctttgaatcataccaagggggtatcattcaagctaaatgaaacggagc

SEQ ID NO: 117798 - DNA, 476 bp, Glycine max
  unsure (1)..(476): unsure at all n locations
ntgataccanatgatgtgaacctgactaggagctgatcgcttgatacaggctntagagttttggatgacgccacttccggtgaaggaagataagtcanggtagacatcacttccggtgaaggaagataagtccgggtagacgtcacttacagtgaaggaagataagtcaggatagacgccacttccggtgaaggaagataagtctgggtagacgccacttccagtgaaggaagataagtctgggtagacgccacttctaatgaaggaagataagtcaaggtagatgccacaaggattaccttgataagtctgataattggttcaacaaggaacccggagagaaactctcanccaaatttatcaaaatgccaaaagtttttcttattcaaacaaaaccatacttatatgtactaaacaaaagaataaatnacatggccttctaacanngtggcgaaatacatatatanaatatacta

SEQ ID NO: 117799 - DNA, 276 bp, Glycine max
  unsure (1)..(276): unsure at all n locations
aagaatcattatctttaaatgctttactctattgagtggcatctgtatnagttgttatattgaatattgcatcttaatccatatcatatcttgtgtgcatcatgcatcatcatgagtgagtgagaagaaaatttcttccaaaggcaaaactctctattttaatcgattacaaccttatctgaatctattacataagtcgtcttaagcttgcacagctatgtcttgtataggtataatcacatacagccttattgcgatccgatacataattgtttt

SEQ ID NO: 117800 - DNA, 444 bp, Glycine max
  unsure (1)..(444): unsure at all n locations
agcntgtaggattatggggtatccatcacatgtggtactangnggcggtcgggcgatggtgcaaaacaattctccacatccacaaatcacgtataacccaccatcccatgttgcccacctcaactgagctcacatactcccacgtagcccttatcctcgttcctctcaacgccgggtccccatcaatcctcccaagcttccacaacatccaagtaattcaacatccaagcatcatgaactaacacatccaagaaaacagggcagaggcagaaaactctgcccaaaacacaaaccaacatcacaactnttcacactcaattaccccagtaatattctcttcgttccaattcgttaaccgttggatcgactcataaaatttactggaagtctctagcacataaatctacattatgaccattgggatctgctagaaaacgtccagaa

SEQ ID NO: 117801 - DNA, 413 bp, Glycine max
atatattagagggtctcatggtcactatgaatgacaaactcacttgggatagaggtagagttgccatgtattaaaagcccgtactcaggcatacacactccttatcataagttgaataaataacggtaggaccacttaacttttcactacaataagcaattgagatggtcttcttgcatcaacacagccccaattacaacatttgaagcatcacacttaatgtcaaaagaattttgaaagtttggcaacgcaagtatggtggcattagctagcttttgcttaagaacattgaaagcttcttcttgtttctctccccatttgaaaccaacatattttctcgatcacttcattgataggagctgccaatgtgctaagatctttcacaaatcgtctattaaaacatgctgagccat

SEQ ID NO: 117802 - DNA, 346 bp, Glycine max
tacggacacttgaatactcagcttgttgcttctatataatcgagaatcatctatggatattgagagcctcgctgcacttagagcgtcggagcctacagacacaatggagattgctacagtgagtggctactaatgatcacaagcaccatcgacctttatgtgtttaaactggctatggtagactgtgtttgaacctatcttgacagcatctccagagaagcatgatatgttgcttgttctaaaacttcgtaattgattacataagctaagtagtgtattccacattgtttgaactgcttcttaagaactgagacatcaatccacataccgtttgaatcttgataac

SEQ ID NO: 117803 - DNA, 248 bp, Glycine max
tattctcggtttggttaccttttattccccctggtgacctgcctaagccattttacttaaatcatttctcgcttaacctaaaaattaaaataatttccaccgaaccgttgaatttgtttatccattaaacttcggttaaattaaattccgaccgttcggtcgtgtcgtaaccacgttggaaatcaaaaagaggtaaaaaaataatataataatcaaaaagacatcttttataaaataaagtggaaaat

SEQ ID NO: 117804 - DNA, 371 bp, Glycine max
  unsure (1)..(371): unsure at all n locations
gaagtgtattaatagcttctcatccttagagtgggcgcccatcttacggtagtacatcttgagatggttttgggacaagtcgtccctttatacttgtcgaagtccggcactttgaacttncggggaataacaacatcgggtactaagcaaagatccgtcatttctgcgaacggatagtccccaaatccttccacggccctcaatctttcctcaaggagatcgagcttcctcctttcttcagttgccggggatggtccttccgtggacaagactattggttgtgttgcgatgttgggctgaggcaacgtgtttggtgccggcccttcngngatcngnggatagaactcgacatcccttcgagcatagtcttg

SEQ ID NO: 117805 - DNA, 279 bp, Glycine max
gcccaaaaatgacactagacttctgctcataacaaaattaaaccgcttattgcactatatcccaaccacaaataacttcagacaacttttacttgcagggaacactatttgcccacaccaggataaatccatcgagaagcaaaataaaacctgaccaattaagttagatgataaccaataccaatgtaatctccacccatttcttctaaagagagctacttgtgcaaagcagaatggccaaaatttttgtaacttttccagaatggaaagacttaaaaa

SEQ ID NO: 117806 - DNA, 395 bp, Glycine max
gtgtacccactcattaatacagctagcttattgctagcaaaatcgagtcatattcatagttctgatgctttcaatgataatttcgttcttgtggtaatgcttcttttgatgatgaaacggcttctgatctgaagaagaatcttttccaccctcaaaaggatcctgttgtgcaagattgaccccagttgaccaacaaaagtcatccgtgtccattttttttacaaaggagtacactccttcgaatggaaacgaccttctaacgagactgcgttcgctactagcaatgtgttgattgatattttagccaaattctattgttaaagggcgacacttgcattatattcttattgtgtttgagtcaagtctatcgtttatagaccatgaaatacccttgc

SEQ ID NO: 117807 - DNA, 213 bp, Glycine max
tcatttacaaaacctttatacctgagggaattttcttctctcagtatgttttatttatatttgccatttttgttatttttccttgagatgctttctcatgcccatgcccatgctctataaaactttccagaggatatataatgattttctcagcagcagcatttccaagatgtgagatatccatttttataaggagaaaaaaaaatgacatgt

SEQ ID NO: 117808 - DNA, 459 bp, Glycine max
  unsure (1)..(459): unsure at all n locations
ctattcttctggccttaacattattttctcgtggtcctcattgttcttataagaactagttatttatttgaacataacatagtcggtctctttttaccccacaattaagaactttcttgtgtttacttcacataactttctatgatcaaatgaatattgcttcataattgtgctaactatgttttttcacagtggctcaacggtccaaaacaggcagatgtgtaacatcatctgtgagctctccgaaactgttgctagaacactagttccactgatgcgggttgttaagggaacaggcaaagctatcaattacttgacccctcccagaatcttacttgctntgatcacttgcttggtacggcaaggtcctggtttgatgatatgcgaccatcgtttgatgatgaaatccaatatattatgtatgataatataaccttcactacatggttacttcataaa

SEQ ID NO: 117809 - DNA, 444 bp, Glycine max
  unsure (1)..(444): unsure at all n locations
tgcctgtccgatgcagcagtaatgatggcccgagttatgtttgggaacggttacgaacccggacatgggttaggcaaagacaacgacggcataactagcctgataaatgccaaaggaaatcgtgggaagtatgggttaggctataagcccacttaggcagatataaagagaagcatcacgggaaggaagagcggtagtcaaagctcgcggttgagacaagaaggtgaaggaagcccaccctgccacataagtaggagctttataagcgcgggtctgggggacgaaggtcaagtggtcgcgatatacgaagatgatgttccgagtacattggatntggtacgaccatgccctcctgatttccagctgggaaatnggagagtggaagaacgcccctgcatttacgcgacgagcataatgtanacctttatgggtttaaaagctcta

SEQ ID NO: 117810 - DNA, 469 bp, Glycine max
  unsure (1)..(469): unsure at all n locations
taaaactcaagcttgaatcaaacctatcactggtaatcgattacaggatattggttattgattaccagagagtaaatactctggtgacttagaaacatttgagaaaactcttttgtaaacaaaaatgtgctatgtttggttcttgaaaaatccttttcaatacttcccttgtgaagacttcttgatttcttctcttgaatcttgaattcaccttctcttgaatcttgaaatcaacttctcttgaatcttgaatcttcttgatcttgaacttgttgactcaatcttgaaatcattcttctgggctgtttatcatcatcaaaactacttgattcatacttgaatcatcatcatgaagcttgcttctaccaagtgattaagaagcatcaccattttcttgcanacccaccataaataaaacaaatgttgtgcttaaatattctttggtggttaactcaatgctacagtgaaa

SEQ ID NO: 117811 - DNA, 384 bp, Glycine max
  unsure (1)..(384): unsure at all n locations
gcaagcttaagaattatggcctgatctttctttttgtttccgagggaaattctatgagtggacctcccatctataatggagggtggtaccactaccggaacacccgcatgcanatctttatagaggcaatagatttatatatttgggaagccataaaacacagaccttatgttccctctattatagtccggaagtgcaacatatataaaaacctacagcagattggactgatgaagatagaaaattagtacaatataatttaaaggccaaaatattattccacctgccttatgaatagatgaatactttagggtttgaaattgtaaaagtgctaaagatatgtggtgatacataacagttaacacatgaatgccgcacagatgt

SEQ ID NO: 117812 - DNA, 263 bp, Glycine max
gtaacataaatatgtacacatatgaataaatatacaagaaatgtattcgcacaatacaaaggagaaacttatgagaaatcgagcgtcgatattaattatccacggatcatactaaaagcatatgtatcaaataagtcataaaacagatcatttgtctaagtcactaacatcttgaattctaatggtgtatcaagaaacttcgagtagtggttttgtgaagatggttgcgagttgctctctggtatctacaaattctataacac

SEQ ID NO: 117813 - DNA, 424 bp, Glycine max
ttgaggggcagcctccaagactccattataatttcttgggtgaggtgggacatattctgcctacctaagagtaaaggtgggttagggatcaaagatttgattaaattcaacgatgctttgcttgctaaatgagggtgggagtcggcaaatactcaaaatcagttgtgggccccaattctattgtgtacaaatggtggttggagggatctgatttctcataggaactgcagtttaaactctccttggtggaaagacctcaaggttatcttcatgcagcatccaagcaacacaatttgtaaaaatagctttattttggccataggtaatgacggtccatggaatacaaaccaagtacttattggcttgacacaaataaaacactcattggaaatatatatgtctagcaattaccatagactcgctg

SEQ ID NO: 117814 - DNA, 431 bp, Glycine max
tataatagaagaaacatactgtcatgttgggcttagctcttcttatataaacattgaaaactaatggtactaggatgtgttgtttcggtgtaagtctaaactttgaagtgcttctatatttttgcattaatatatcaattaaattagtcttatttcttttcaattggaactaatatagagatatttaaagtatctattttgcattattaatgtatagatatttgcattataaaaaaataatttgttgtgtaatggtgaatttgttaatgtgaaatgtttcttttatatttggaatcttatagttcaagaaggcttacaatggtggaagatgttctacaaaagattagagacaacattatacacgtgaccaacattaaaggctagaaaatagcatttacataatgtgtggctcaagtgagaagtattgatac

SEQ ID NO: 117815 - DNA, 389 bp, Glycine max
ttgccctggattcagctaaggactacgttccttagcacacttatgttcaatatgtcggatctgccctggagatttgccctgtaatttctcctttgaaaactattttatttggaaatccttcccaagacaccattgaaccactgatggaggctttggaggaagattataaagatggaaataagataaacgaatcaaggcagtttattgaaggagtattggatcttgaaaagagaatcaatagactagatacattgacttagaaattaaatataacaaatcttgtcattgttgaacaaattattagcttataaacccaatctttacccattgtaaatatgttttacttatttctgatacgagcctattataatgacttgatgttcataaat

SEQ ID NO: 117816 - DNA, 417 bp, Glycine max
  unsure (1)..(417): unsure at all n locations
ntaggagaaaccattaanactaaggtagttcctatacaaatatcaatngaggaagcttcgccgagtgtgcccattgaanaacctttattcaaacctttcaaagttagtgataaggctaaacgaaaaattatggaacttagaaaaactaaatccttaattgaaggcgtaggtgacaatcatagcgaattactaaacaagattagtagtttgcttaaggtcattccagatactccccaagcttcggaaaatacttccaaaatggtaacaagaagtacctccaaattaattaatgttattaatgaagatagtgaccaaaacttagataacacaactgagataggatcagtgtcagaaaagaatataaatccattaaactccaaacactggagaaccccctccaaattatattatcaacgt

SEQ ID NO: 117817 - DNA, 451 bp, Glycine max
  unsure (1)..(451): unsure at all n locations
atcatattgtataaaaatgtttctaaatctttggcatgctaaatgatggattgcatgtangtatatgagctcctagaatcangaaaaacaatgttgaaggagctaaccaatgcatttgaagggaaactgattatgtgagctgtgaagttgtcactaaacatcttttacttttaatagtgttggctttctgtggtctgatccttttaactntacaatactcaggattcacaaggagcaagtggaaaaatggcaagaagaaatcagagaattgtgtgcactcgatgcctcaaatgaagaagccaatgctcttctgcttaatgctcgatatcttcttcagcccacttgtgatcattagtgagggtagttgtaattctctgatgtctattgtacaatcgttagcataatctctcccccgatcccccacgcattagtttggaaatatgtatacctt

SEQ ID NO: 117818 - DNA, 335 bp, Glycine max
  unsure (1)..(335): unsure at all n locations
tgtaagaatgcaaggcacctgctgcagtcatggtaacttcatacggcttgactggctcanagtcaatgatcatactaccagtgacacgatggataatcgcataaaagggcttcccagaggtcttgcaatggataaggacagggttaagaagcaaaacctctgcaaatcctagagccttctgcaatgcagaagcacttggtgcagtgaatagagtttttatgtcagtgccaataccaagggcagggtggtcaccaacactggggacagcatggctcaccatggtcagcatttcgggtgcgttctcactgtatgcaatgaccttgcatgttttctca

SEQ ID NO: 117819 - DNA, 453 bp, Glycine max
  unsure (1)..(453): unsure at all n locations
agcttgcttacacacgaatctctctatcttctcagaanangnnncacgtattgatggtcgtaagcataatttattaagtatttatcaatcatgaaaaatgccttttggtatcatttgattctcatatattccaacaagtggtgtatcatnttcttttgggctaagaaatgataccttgaacgggttgacatgctctnactctttaattcattataaatttctgaatgctcttattctctctgctcctgatttgtttttaatgttgataaagggggagagatagatcaaagataagattgtcaggggattatttattttttatgagacaactttgtatatatatgaaaatgtatgaaatcttcaactgtttcatataagcaatcattgcaaaatcaagggggagtaaacgacccaaatattctttttactcctaacctacaggtggtngtcatc

SEQ ID NO: 117820 - DNA, 455 bp, Glycine max
tcatcaaaattcccttcaatcatgttatgcaccatattcttcacatgcagaggatgtggctggtcacaagcctgaaaccagccatacattcttatttttttttaaaagacaatggtaaatgttggaccttgtggcctcgataatcttaagagggataagcttagagtgcagaagaagaagcagcaatcaatttaataatgttctttaaacatgcaatgcaaaattgattgcaataacataaatgagataagggaagagagaatgcaaacacagttttatactggttcggcaaatattgtgcctacgtccaatactcaagcaacccacttgagatttccactatctttgtaaaatcctttacaacttctgaaccacacagggacaacccatcccttgtgttcaggaatacttataactcaagagaccctcaatcgcttaatcaatcttactgaatg

SEQ ID NO: 117821 - DNA, 401 bp, Glycine max
  unsure (1)..(401): unsure at all n locations
tattggaaatntctgaggttctaaacttttaatataataacttcatgctttcttttctcattctttcacttgcaataacccgccatattcttcccccaaagctccctttaaaccctccttgaatcggtgattatgcttccttttctcacttgtacatttctatctatcttccagctgcaagaaatgtcttgagggcagtttatgaaacccaaaaagggccattcagccctgctaatcgtttctactttctttcctggttagtataatattctgaagagaatttctttgtacacctagtggttttcttgtacatccaatactttntggttngttcaaaattatctctgctaataaacaaattcataatccgtaagagtaaagcttatggattccgtaatctg

SEQ ID NO: 117822 - DNA, 466 bp, Glycine max
  unsure (1)..(466): unsure at all n locations
ggctatttattcaattgaaacacanatacatctaanaaaactattcatttttttgtcttaataaacacttgctagttcttnttatatatatatataaaagttagagtttattcaattaaaaatatcttcttcaccattctcaactaaccactccattcaaaatcatttcatgtttatatgaaaataacaactttggttgtttacattcctggtttacttaattcttttactttgatcattaattatgtgtctaacaattacatgaatcttgtgttattccttacttatacattcctcatcctaaagaattttcacccactacattccaaatctcattctcttacttctaacactctcatttctctctcttgtgtgatactaaagatttttaactcgcgttgtccatgataatttaacattattttgcttaaaaaaaatataatacttatataaattatcatattat

SEQ ID NO: 117823 - DNA, 370 bp, Glycine max
  unsure (1)..(370): unsure at all n locations
gatgccgggtgacctgataactgtaccaactacatttatatgaatttctccgnaggaggaaatgacaactccaacactgaccagcaacatgttgaagaacatatcacaccttgctttgtcggtgccacacataacagccatgaggaatgttggcacaggcactgaaacaatcaagtttagaattaagaaagtatcattcagacagtaagcaagcaagtgaagaccgcttaatacgtactcagagctntgagcatctggataaaagccacagaaatatgcataatagctgtgttaccaaacctgttaaaaccaaaaacataagtattttttcataagtactgacattacatgaggtgtcaacatgttaata

SEQ ID NO: 117824 - DNA, 400 bp, Glycine max
tccttcagaagattcctaaagaagctagagctgagctacacatacctctctaattgctaagctcacctacttgagatgaagagctagatcttatctacacaccccctataatagctgagctcaccctcatgacaaaaaaacatgaaaatacaaataaatagtccttactacaaagactactcaaaatgccccgaaatacaaggctaaaaccctatactactagaatggtcaaaatacaatgcccaaacgaaggaaaaacctattctaatatttacaaagatatgtgggcccatacttagcccatgggctcaaaatataccctaatgctcatgagaacccatgggccttcccttagatctctagcccaatctacttggagtcttctacccaatgcccttgc

SEQ ID NO: 117825 - DNA, 122 bp, Glycine max
  unsure (1)..(122): unsure at all n locations
acacataaaactaagcgnggccnacncagagactaaggcgaggggttccttttcttttacatggagaccacaagaggtgggcgggtctctccaattctctgaatcctaaccacgtgaagcat

SEQ ID NO: 117826 - DNA, 255 bp, Glycine max
atagctcatcttaccttctccccattcatataaaacttgaacatatgcaccctacgtgtgtgcatacaagccaagatatcaaatataactaggacatcaaagacacaatggcaagcttggggtgtgccatgtctgacttaacgatactcttctacatctttgggggctgaatgtcttcctcatctgaagctaccataaagagataccagtatgacgtgagctaaaagagttatattgatatcataatcaacatgc

SEQ ID NO: 117827 - DNA, 415 bp, Glycine max
  unsure (1)..(415): unsure at all n locations
tgngatctctagtttcccattcccctctcagctgatggattaccaacgctgagncgccgnacaccttgagtatgttgacattggagtcaatcgctgcctggacggctagggcacatgcttcatattcngccatgttgttggtgcaatcgaatcctaacctggctgtgaaaggtacacattgattgtctggagagaccaacactgccccaacgccatgacttagaatgtttgacgctccgtcaaaccatacagtccatttgtcccgatcttcgtccaacttttcctcgaacaagaccatgatgtcctcatacgggaattccggatgcatgggctggtagtcgttaataggctgttgagccaaataatctgccaaagcgctttcttctatcgcctcttgggtgacgtagactatatc

SEQ ID NO: 117828 - DNA, 394 bp, Glycine max
gcccaaattcctttgatctctaagtacatcagccaatacacgttccattttcaaaattccatgtaaataacttcttgtttcctcattattttttcctaaaacttttcttttgtccgtcattttttcattagatgactccattgaagttaatgtcacttattcaacctgcacataacaaatagtagatatgacctactttattcatttgactagtccactgcacaatcatagaaaatatctcaagcaaatgttttatgcaatagcaaagtacataaaagtctatcttcaataaaaaagtacaatagtaacaaagcacacaaagtttgtcaccaatagcaaattacatttaaaaaagaactatccctaagcaaagtttctcctaacttgatagtta

SEQ ID NO: 117829 - DNA, 442 bp, Glycine max
  unsure (1)..(442): unsure at all n locations
nttccaggagcaccaatttcccattcaaccggtccatactcgttctcaatctgtcaaattcagttgaaaaaaacaaaccaaattaagcatcatcgttattcaaattggctcaacaaacttttttgtaaaatcaattatacaaacatattatatagtcttgtatttacctgtgacataattattggaccaccctgngattgaaacaacctattttctttcatcaagctaacaatctttgcagtgaatttttgcattgccgcctacacacatcgtgatttaaaaattgaagtgttggttatatgattcaataattcattaaactattttcaatcaaccaataataataagcaaattattataattataatattgaggttcgaaaatggtaaactccaaccttgaacggctcattgtcggttctgaaagcaatgcctggaacata

SEQ ID NO: 117830 - DNA, 384 bp, Glycine max
  unsure (1)..(384): unsure at all n locations
ctcagcttaaccgtgttaaccgtgctgcttaaattatggacgtcccggccttggggaatgcgatcatccgggcatagcaacacttccggtctacacttaggcctcggctacccagaagccgcatttagtaagtaatggctcaaagactcgtatgatgtggtatggatattttcggaatatcgtgaaagcactccttcttaggtattcatgcatatcaatcggacgcttttccttgaatgtttgcttgatgagaattgacgtggtacctctaggtgaaactaatgctaaaatcaactcacatacctggcattgtccgcaaaagtcactcagaactggcntatcgtccaacgccttgttggatcgaaaggcctgataataatctat

SEQ ID NO: 117831 - DNA, 424 bp, Glycine max
  unsure (1)..(424): unsure at all n locations
agaatggaatttcatattgtagttttacttgtcactaaatataaattttaaaaaattgataggaaatattctaattgagtttgtagactcgagtagtgatggatgcagaataaataagtgtccattgttgtgatgcaaaataaaaaggtatccatcgagaaggagagaaagatactgataagaaaagttaggaatttgagagatgacggatgaggagagagaagagaaaacgtgtggaagatgagagaaaaaaaatgaatctttatttgtatctttaaaattaaatgataaagtataatagtattcttaaattaacttttgagacaacaaaagaattagatngaattttttccaaaatttgtgatgttgattattaatatattcatactacaaaaatagcgtgtgtgtatataaacaataaact

SEQ ID NO: 117832 - DNA, 427 bp, Glycine max
tcatgaagaacaagagggcaagggaactgcttcatatgtgtttgtttgtttctttcttcctagttatgtcatatgtgcatgtgttcataagtcttattctgttcatttgtgtaagaggggaagttgctctggtaacaatttggttcatggtttttatctagattctagcctattccgtttgcgtgagcatgacttgttgcatactttagcctttttttgttttattgaaagctgtttcatcaacatcctctgcatgcgactgtgatttgtcacagtaattaaggttatagtgggtactaggcctagcatctcgcattttcatgaggaaaagtttgtgattgttcatccatgaagtggttttaaagatgcaagtgaacgtttgtagagagtaaaatcaatgaactactactctcttctcttgtattct

SEQ ID NO: 117833 - DNA, 403 bp, Glycine max
  unsure (1)..(403): unsure at all n locations
atgggtaatgttgtctctagaacatttccattggatttaatgangaaanctgcgcnttttcaggatgaaaagacgctatgttttgaattgcaaaaagtatcagtggggctaagctcatcagttgggctaatcgcatatacaccactaagagcagctttagcgcgcttagcgcacaggagaatctggcagagcatcagcatcaaagacgtgcactaagtgcgagatcaatgcgctaagcgtagcaagtgccttcagctaggctaagcttgagactggtgctaagcacaatttcacttactcgcgctaagcgcgagggtggcactaagctcagcgtcacgatnttatagcgcagtttaagcctgtgcagaacttaaggtataactatctaccgattttacacacc

SEQ ID NO: 117834 - DNA, 70 bp, Glycine max
cttttcctctttaattttgtgctccccccgcccccctctctttatccctctctctctttcttttcctcca

SEQ ID NO: 117835 - DNA, 377 bp, Glycine max
  unsure (1)..(377): unsure at all n locations
tggaccttgaacaggcaactaactcctctgtaaatccattttattctcctcccggngaacatgatggaaggagatttcatcaaaggaaatagccaactccttgatataggctttgtagggtatcagcttggggtctctagtttcccattcccctctcagctcatggattaccaacgctgagtccccatacaccttgagcagcttgacattggagtcaatcgctgcctggattaccagggcacatgcttcatattcagccatattgttagtgcagtcaaaccccagcctggctgtgaaaggtatacattgattgtccggagagaccaatactactttaatgccatggcctagaacatttgacgctccatcaaaccaca

SEQ ID NO: 117836 - DNA, 397 bp, Glycine max
  unsure (1)..(397): unsure at all n locations
tttttgtttagaccngacatctcaaacaacagattaacgtacaagacaattatagttgttgttgtatacctcacccactccagtgtatcacacaattattgcttttctctaatgaaacactcttgcctttaccactctaaatcccctgagttctaagcaattcaagagaatatggccacaacaaagaacaattaccaatattgtgtaatgtaaggctacagagacaaggaaaaggttaccaaaaaaaagctaacaatgtcttatgcacaatgaaggaataaaattagaattaggaattaagtacattcttatgcaacaatatattccttaaaagatttttttaagttttcagctgaaccatcacccattttttttttttttaatttgaaataaaaat

SEQ ID NO: 117837 - DNA, 382 bp, Glycine max
agaagattcctagagaagctttgctttttacattcacctctctaatagctaagttcacctccttgagacgagaaactagagcttacctacacatcccctataatagctaagctcaccccatgccaaaatacatgaagatatataataaaaggctttactacaaagactactgaaaatgccttgagatacaatgctaaaaccctatactactataacgaccaaaatacaaggcccaaaagaaggagaaacctattctaatatttacagagaagagaggacctcaccttggtccatggactcagaaatctaccttggggtttatgagaaccccaagaccttctttatcaactctatcccaatgctcttggagtcttctatctaa

SEQ ID NO: 117838 - DNA, 312 bp, Glycine max
tcatttgcctcaacttttaattcaagatgcaaaggtttgaacaccttaagcacttctttaatgactatggcatcatttcttgcactaaactgctgggagttggaggccatcttctcaattaaatttctggcttcagcaagagtcatgtctacaagggcttcaccactggcagcaattatcatacttctctccatattactgagtccttcataaaaatattggagaagaaattgttctgaaatctgatggtggaggcaacttgcacatagtttcttaaatctctcccagtactcataaaggcttctctcactg

SEQ ID NO: 117839 - DNA, 343 bp, Glycine max
  unsure (1)..(343): unsure at all n locations
actcaagcttctaacaagggagaagttcaatcagctgaaacgcaattcatgagctttatattataaaaggaaaggagtggtacacagggggttgctctaatgaattgctattttcaagaggaagttaagcacataatgctaatattagcatggcagatntacaagtaattggagaggttgggttggagatatagctttactacagtaaatagactctcttcatctaatgaagttgaaatttttgacaggttgngttggagatatanaattacaantaattggagaggctgggttggagatatagatttacaagtggatctggttactagacgcagataaatgc

SEQ ID NO: 117840 - DNA, 409 bp, Glycine max
  unsure (1)..(409): unsure at all n locations
agctttcttgagaaaacttccttgagaagcttctttaagaaaacttccttgagaagctagagcttagctacacacacccctctaataactaagctcacctccttgagaagcttccttgagaagattcctaaataatctagaccttagctacacacaccccctataatagctaagctcacccccatgccaaaatacatgaaaatataaaaaaagtccctattacaaagactactctaaatgccctgaaatacaaggctaanaccctatactactagaatggccaaaatacaaggcccgaaagaaggaaaaaccaattctaacatttacaaagaagaatggatccaaccttgacccatgggctcaaaaatctaccctaaggttcatgagaaccctagggccttctttagta

SEQ ID NO: 117841 - DNA, 375 bp, Glycine max
  unsure (1)..(375): unsure at all n locations
ngagatgaggaagtgtagaaggggaacttcctgcntttattcgttgaccacagagtggtacctggagatatgtcgcgggggtcaggagaccttgtggacgtcaggtggggtgctattgcccaaaaccaagcttgaccaatcccgacccaacccgggcatagtcggtcagtgagaacctgtgatgtacctaaacaggcgagctcttggcagtcaacagataaaaggaacaaagaccccaaagcaaggaggcttgtggtggctggccagctatgaacttgattgatgtgtgagatatggcctctggtaatcgattaacaagggtgggtaatcgattacaaggcttataaatgaagacaggagactaagatggtctct

SEQ ID NO: 117842 - DNA, 260 bp, Glycine max
ctgcagctttatttcatagagattattttcctttgcccctcatggactcctctaagaacaatagcatcatttcttgcactgaattattgggagtcggaagccatctttttagtcaaatttcctacctccagtagggtcatatcaccaagaactccaccactggcagcatcaatcatactcctctccatggtgctaagtccctcatagaaatattgaagaaggagttgctcagaaatctggcggtgaggacagcttgcaca

SEQ ID NO: 117843 - DNA, 422 bp, Glycine max
  unsure (1)..(422): unsure at all n locations
ttttggagtananacatgggaccaactcagtttttttcatatttaggttgcatctagtcaagggctgagagaccatacaagtttcctagcgatatctaattatgtgggccattaagtctatcatatgtagacaatagccgaaaagcccatgaatctcttctggggcggagtaggtgtccgccatcgccttggccttggctaacaagcggggaagttcttgacttccgttcaaggtaagagcaaaccgatccatccacatggntgcctcttggtgtaaagagtcgatcacccttcctctagcctctttttccgcgtatacttgagcatactcgtccgcgatcctatgctcgtgagctctggctagacctaactcttcttggtacttggcgatgaaaactacatgatggtctcctctcgcttaa

SEQ ID NO: 117844 - DNA, 484 bp, Glycine max
  unsure (1)..(484): unsure at all n locations
ttaagtcacctgcggcatgcaagctntactcttcactgcgcgaatgttgtatttttagtttctctggcgtgccgccaatgaaagagctgctcaaacgcaccgaagaacatattaaaggcatggtattgcctggcacgttgtttgaagagctgggctttaactacatcggcccggcggacggtcacgatgtgctggggcttatcaccacgctaaagaacatgcgcgacctgaaaggcccgcagttcctgcatatcatgaccaataaaggtcgtggttatgaaccggcagataaagacccgatcactttccacgccgtgcctaaatttgatccctccagcggttgttagccgaatagtagcggcgggttgccgagctattcaaaaatctttggcgactggttgtgcgaaacggcagcgaaagacaacaagctgatggcgattactctcgcgatgcgttgaagttccggcatggtctagttttcacg

SEQ ID NO: 117845 - DNA, 337 bp, Glycine max
  unsure (1)..(337): unsure at all n locations
accttgaaactaagcttgaatcgccgtatgcgacctgatcatatgcctttgctganagggagaaatcgcgacaatgggttgtacccaccaatcccagacccgcacaaaggcaccgcgtttgctcggaattgcacgtcgaatagcgatccggaattacgtaaaactcgaccatgccggaccttccgcatcgcggataatcgcatcagcttgtgtctttgctgcgttcgcacaaccagcgccaagatttgaatagctcgaaccgcgtctttttgaaacaaccgtggagggacaattagccggcggaaaggatgggctttttgcggtcataccacacttt

SEQ ID NO: 117846 - DNA, 313 bp, Glycine max
  unsure (1)..(313): unsure at all n locations
tcactccagtgttcttcttctcagggactgaccacattaccacacttattattttgctcagaaattctcttgtttttttacattcttaaaacgaacatattttggctttatatataccctcaagttttgaatccttgagagaaccccactagttgttatctaataactttggcgcttgacatgagggtgctactgtgcaaagagagagtggggaccaccaacccttttttgcagatggtttcagagaaaaacagtttgccgatgtcacctgatgcttanagttgactttcaacgtacatattgaaagaaaaat

SEQ ID NO: 117847 - DNA, 398 bp, Glycine max
  unsure (1)..(398): unsure at all n locations
gacctatgaaactcagctaagcttattgtttaccgttggctggttttcattgtatgtaattgagttgaatgtgtaaagacatctatgacattntctcttgtctttagtgtgtttagaactgtgatttcagtcgctaataataaaattcagtcgctattatctgcagcgactgaataaatctgtcccaaataaccaagctgtttagtcagtcgcttaaagaaatgtttgtcgctgacgtgttggtccctctcttccatggaacaaattcagcaattgaaacgtttggtcttattaaaataatccaatgtcgttcctaggcattntcatttccatgtcgttcttgngtgttgctataactcgctctcaagaagagcatcaatatacttggtctttatgga

SEQ ID NO: 117848 - DNA, 456 bp, Glycine max
  unsure (1)..(456): unsure at all n locations
agcttntatataagctgaactattttatctttatctcaagtnngagtttattcagaaaattagagtttatctcttttatcttagggagagtgactctcctaaattctcgagtgattcaagaacaccttggttgtatcaaaggactttcacaacctttgtgtgttgccctcgctggaaagagtgattctttccttcctttcatcatcacccttgttctttcaaaccacaattccagaaaatccacctctgcccagaattatctcgtggccataactcccattttacgcactcaaattaagtgattcttgagcctaaattgaatttcaaaacgagacctttcacctcgttttggaatcacctcatttggagccctgtagcttcagttattgtcatttctatatttctgtccagccaccacttaacctacgttttaccattccattcatccattttatg

SEQ ID NO: 117849 - DNA, 337 bp, Glycine max
ataacctcatcctctctcacagactttagatgtgggagccaatccaatccttacagccacttatgatagccgccgatgatcccattactgcttcccctaagctctctgtcctttcttcacgccgcatcccatgccttgcgaactccttggagtaccctcgcgttgtggtcaccgaaaccccgtgcgatgaaaggcgcgatgctttcgtctgatggcactcctctcatggcgtagccaatctgtcttatggcgaggacgggattataattaatacaaccccttgttccatcaagggaacatttggacatccttcgcatgaagatagaagactgattct

SEQ ID NO: 117850 - DNA, 463 bp, Glycine max
  unsure (1)..(463): unsure at all n locations
gcatgcaagctngatatacaaaattcataacatganaattataatgtcaaatttagttaaatgaatggttgtggtttgtgagagttatangtgttaatttaacttaaacttaaactatgttataaatcataaatttacaattattctatatgtgtgaacacaatcaaatatttaattatgcttatgtgaacttttagattatttttttatcacagttgatttaaaatagagaaatttataatgacaccacttgaatttcactcctttttaataacctacaaaaaaaaacccatactttttctttgccattacaatgacaccccttgttcttctaatagcgttaactttgttaagctttgaagtcacgttattgacacatgctttctaaagtatatttccaatccaaaatgcctttatattctcttttgttaagttgactatgacacaacattgttcaaccttt

SEQ ID NO: 117851 - DNA, 372 bp, Glycine max
  unsure (1)..(372): unsure at all n locations
ngcatgccaggcttattgatgttttgcttagtttattggtatattgttgngtcttttgacctatgtcattntcttctccggccacaggtatgccaggaatgactgcttatgctggtttctttgaggtaggttctcccaaaaaaggagacactgttttcgtttcagctgcctctggtgctgttggtcaacttgttggcccaattgctaagttgactggttgttatgttgttggaagtgctggaagtaaagagaaggtatttgtttaattattgttgttatatgtccctggataaacgattaatcagcttaaatgttggatatttattctactgtttaaaatactattatttngaattaacctaattacaataa

SEQ ID NO: 117852 - DNA, 366 bp, Glycine max
  unsure (1)..(366): unsure at all n locations
tttacccggggtgaaaaaccacaaccagcctttcttttgttaagaaaagctactaggccctgtctatctcttctgactttctaaacttttagctaaagggatgccttgagtggagtggagccgattgttacaggtgggcaccctattgctattttagtgaaaaacttcatagtgttaccctcaactaccccatctatgataaagagctntatgccttaataagagccctccaacttgggaacattacccttgttccaagggaattgtcattcatagtgatcatcaatcacttaagtacattagagggcaaatcaagttaaacaaaagacatgcaaaatgggtagagtacctaaaacaatttccata

SEQ ID NO: 117853 - DNA, 377 bp, Glycine max
  unsure (1)..(377): unsure at all n locations
gtatctatatacannaatcggagctctnctntgatgtttccgcctttccttttgatcttctggactaatgtcattttgtatgtattctaagattgacgtcatctagttttcttgcctttctatcatcatgaagaatcttggggtatgtatcatttgacatataacactttttatttctttgtgctcttcaatattagatacctttgacaaaagtcatctcttgcattntcttctcttggaatgtaggtgaactccatattttttaaatttttctctgattaccccaattttttgatgtatntttgcaagattgggtctttgacttggtattctccatttcaatggttgagcaacaagttaaggtcgttggacacttt

SEQ ID NO: 117854 - DNA, 350 bp, Glycine max
gaatgaatgggtacaaaagcggtattgttttttggaatgagacaatcccacgagttgaaagaggctaagagcctctatagtgatgggaactgcccctgctacatggggaagtacttcccaatgaagatggttcctcatacattagcatacgaagttaattttacgtgtcttaataaagcttaacgtatatttcagtgatgtagtaacgttgatgtgatgaggttaagaaaataacctttaaaatagatagttagtctagagtccttataacactcatgaagacattatgggatcgatcacaaaattaattattttgttccattattgtggacgacacaaactccattctt

SEQ ID NO: 117855 - DNA, 220 bp, Glycine max
gcaaacaatccctacatatcatcttccatcaattcattgttcaaacacgcttttggtacaaacaaacaactctaagggctgaaatttatattattgaactttaaaaaatcgaaatataaaattctaaattaaaatgactgaacataaatcataaattatcgaaaataaactacaatgttttgaatgcccaaatttaaatgtccctgctcctgtggttgct

SEQ ID NO: 117856 - DNA, 426 bp, Glycine max
atgcttcaatggagggaaagatagagggagagatttatagtggtggtagcacgacattgaagaaataacagtagggagaagaagtggaagttttgaagtatgtctcacaagactctcatttatcaaagttacaacaagtgttacacatgcttctatttatagactaggtagcttccttgagaagctttcttgagaaaaagtccttgagaaacttctttgagaagacttccttgagaagctagagcttagctacacacccctctcataactaagctcacctccttgagaaacttccttaagaagattcctaaagaagctagagcttagctacacacacctctctaatagcgtaactccacctcttgagatgagaagctagagcttatctacacaccctctataatagctaagctcactccatgacaa

SEQ ID NO: 117857 - DNA, 460 bp, Glycine max
  unsure (1)..(460): unsure at all n locations
catcacagtaatacaacattcacacagcacaggctatccttttaagcanaacagggcaaaggcagaaaactctgcccaaaacaccaaccaagatcacagcttttcacatacaaataccccagaaacatgtccttcgttccaattcgttaaccgctggatcgactcgaaaattttactggaagtctctagtacttaagcctacattgtgaccgttgggatctactatcaaacatccagaactcattctgcactacaatttccacagccaatcacacacaagcatttttctgcacttgtgcaaaattctgctgcacaatttcacagcaaaaatctgcacaaagtgcagatttcgaagaccacacttctccccatccaatcgtgcncaaaataaatgctacaaagtccaaatcatgtatcaatcatgtctaaaccaaagcccagcttccaaccacaacaacac

SEQ ID NO: 117858 - DNA, 221 bp, Glycine max
aatcggacgtccggttatatttattgtcgtttgaaattgctaaaagcctccgtcctgaatttagagcgtctcgatatacttcaggactcaatcggacatcggagtaaaaagttataatggtctgaattcacaatgagcttttctttacaatgacgagcgcctcgatatattatgggactcaaacggacatcctaataaaaatttattgccttttgaatttg

SEQ ID NO: 117859 - DNA, 370 bp, Glycine max
ctttactcggaatgtccgatgagtcccgtatattatttgttgctccaaatcgaaaatagtagctcctagcaaattcaaaccataataactctttactcggatgtccgattgtgtcccgaagtatatcgcgatgctcgacattgataacatatggtctgagcaaattcaaacgacaataactttttactcagatgtccgattgagtcccgtatatatcgagatgctccacatggaaattattaggtccttgtcaatacaaaccataataactgtttactcggatgtccgattgagtcccgtaacatatcgagacccttcaaattaaaaccgaactctggacaaattaaacgactatactattttccggagt

SEQ ID NO: 117860 - DNA, 270 bp, Glycine max
actgagaatcactttgtaatgccatttggagtattggcaatcataggattggtgcctttctgccgctgcttacttaaatagtgccctgcttcatttccctttctgttacctacggctaccaattggaattaatctgagaagaatggtggtgtgggaacctattttcagagaatttgaggttatgctgaataaatggaaccagagaagcattttaatggctggcacgattaccctaatcaatgctgttctaacagcattgccagtgttgta

SEQ ID NO: 117861 - DNA, 370 bp, Glycine max
  unsure (1)..(370): unsure at all n locations
cgctgcaagctgctgaatacatctggctctttcttaatcttattctncnngatatcatcaaaagcgtcatgatttacattcttcccctttttgatgatgacaaccacctgttggttaggagcaacaacaaatgaaaaatctatttgcatatagtttactcccccttgtgtttacaatgattgcttatatgaaacaatttgagaattcatatttttcatatataaaaagttgtctcataaaacaatagataagttttcttactattttatcttttatctttctctccccctttgtcaacatctaaaacacatcttgaatagagaggagaaagatgtttccactcgttgaaatgtatgagaatcaagtgata

SEQ ID NO: 117862 - DNA, 430 bp, Glycine max
  unsure (1)..(430): unsure at all n locations
ngaaggacccgagaagtttttcacaatagtttctttcatacttacactggtttgntcaaacatggaatttatnntttacctaanaagtcattggttcacataaatgttccttttctttgcttgcttatgattttgggtgtttatacatcggcttggttatattttttttttgtttaacaacaaaaaccctttcctgcaaagntttctttttttcttttgtatgatgaaatgcactagcttgttgatttgttgtgtttcatttttttgtgtctttttctgctcttattttagttgatgtttcatgaaacatttaaatatttcttcttttaagggttaacaaaatgtcatatggtattataatgttcagtttagtggcataacacaatgttacatgatattacaatgctcaagttagtggcctatgatatac

SEQ ID NO: 117863 - DNA, 477 bp, Glycine max
  unsure (1)..(477): unsure at all n locations
actataaaactaagctaacagttnntttttttccttagtgcagactctccagaattagtatcaaaataatcttcaaatgattcatattttagtgtattttaaatttttttgaatttttatctacatatgaattagttatcaaataattttttattaatgcaaaatttgataaatatgatatgcatganaggaactttcaatctaatatgaatnttaaaataaaattattcaattaaaagttattaaaaggtattaaatgatgtaatatttaatgcattacattcatgtcatttgatctctcctatatatttattaatttntatatattaataagattttaatttctatgtattaatgtacaaatatntatactaccnatcaattanaaaatatgggtattatgacttttaagtgaatattacagccttaaaatcatagtattattttgatgccaaaaagtgaaaaagaatacatgta

SEQ ID NO: 117864 - DNA, 314 bp, Glycine max
gcatgcttattcctatggttgtttataaagaacataatattataattatattatggcgaatattttaataatatgataattcttgatctcttcaacttttccgatatatagttgatacttagttgacatgcttattgctatcatcataattattttgttactgtagaagcataatttttatcaatattaaataataatttctgattcaagtcatcaaattgatttctccattatctaaagaaaaattgtctcaagagggttaattaaaagacccttagtcttaaaaggggggaaccccctactctcctatatca

SEQ ID NO: 117865 - DNA, 487 bp, Glycine max
  unsure (1)..(487): unsure at all n locations
accataaactcgctcttcaacactttgcccaacttcgaattaactattgctctgncgcggcgaagactctgttgtaccaaatagaatgaagtatcatgtggaatatatcatacttgacagggctcttgttgtgccaaaggaaatgctgctgcacctttctcaccatcatctgcatttgaagatacctctctcgagggatggataagagtatattcttcagattaggaatatccttctccaagacaaaaacagcataggattcccaattcaacatctcaaaaaatggaggcacaaagttatccgataaaataactgggacacattcatataagatggcctccacaactcttggactattgacttcatagccctctgcgcatatacaggacttgctgctcttcatgtactggatgtagtttctggtgcccctagaactttgcagtctcccatagatttcatgtcatggtcttattctcccaggctgcac

SEQ ID NO: 117866 - DNA, 338 bp, Glycine max
  unsure (1)..(338): unsure at all n locations
ngatagcatgtagagactaacgtcgtcttctgcaccctttgtcaatcgcggccaacaaacccattgacacgcggagatntacgtcatcttctgcgcagacaatttctgtcatactggcactggagtcacatgacatgcggagatacccaagtggttatccgcacttttaaaaaattcttttgctatctataagactcaaagcatgataacatgcagagactaacgtcgtcttctgcgccttttgtcatccaaaggcggcgggcccgatgacatgcggttatccgcacgctcgatgatngataaatgcgcagagaaaaattctgcgccccttatcattc

SEQ ID NO: 117867 - DNA, 400 bp, Glycine max
cagtcttctaatgtgctctctgtatgtggggcatcatatggaagacatgatgttgtctttgagatgcattttgaaccattctaaacttcattctggaagttgatgcttcataactagaatcttaatcattctgatggtaatctttgtacaacttcattctgattcttgatcctcttgatgtggcctctaataagtcttttatgtaaggccttattgttcagtactttgacaagtgaaacaagtactaagagggaagcattcttcattatgtagatgggcttcaagaaatcttttgagttctcaactttttagaagtttctcttagacaacctttctgagcatcattctgagcacttcaaataaatgagaattatatttcttgaaacatttaacactgaaa

SEQ ID NO: 117868 - DNA, 399 bp, Glycine max
  unsure (1)..(399): unsure at all n locations
catgatacatgtcagggtttggtttggttcaatgataaaatggatgccccacattatttccatgacacaaatgcaaaaatgattatttggaaactntatgcaaaactggtcatgcatgcacctatgtggacactcgagtgtcaaatttttatggtcatgtgatgctagggctcaggattcantttctctattttagtcaacccaacgtttccaaaatatgttcttttatcaatttgtgcattcatccgagtccattttgggcgtctgggaaaatcttcacagcattcacccttcaggtgtatacacattntntcaaaaactagttatgatcagtgaatttttttcaaagaaaagtnggaagtcatctcttttcaaaagcatgttgggttttcagcttga

SEQ ID NO: 117869 - DNA, 342 bp, Glycine max
gccactccggaagatttaagacacgccctacttttgatgggcaactcccgccctatgacgactatcccgggccagacgatgaggaaggagatacccatctcggccccctgctccacctcaaagatccgttcccacatgaactacccaccgaacataatcgcctatcccggctcaccacactgtaaagatctgttccttctggaagataggaagatgagcgctgaaagagtgaagcatcaggcccgcatacctttcgattacaattatgttggcccaatctcgcctcccattcaaataccggcttgaaatacaaggacactgtccaagggctttcgattttgc

SEQ ID NO: 117870 - DNA, 340 bp, Glycine max
  unsure (1)..(340): unsure at all n locations
agtatcaagagaatataaatatgtggccatgacatgaatttcaagaatcaataatctgtctttcaatcttttctcatcatcattcaatatctttcaactctttctacacaattntctgattcatttctcttcatctttctaaaagtttttgttcaacactttctcttccgagaaaagttctttgttcanaaacatgtgctattcatctttttcattctcttcttcctttgccaaaagaacgaaggactaactgcctgaattcttttgtgtctctcttctcccttacaaaagattcanaggactaacagcctgagaattcttttgattattcccttcccct

SEQ ID NO: 117871 - DNA, 332 bp, Glycine max
tcttctagtcatccctctcaatgaagcgaaaaagagtatatcacttatgacattgttgagaccctcttatccactcttgacttgactgccatcatcacaatctgccatacaaacgacctcccttcttttgtaactatgagcttgttcttgatcacataaatacatatcacaattcccagaggctattgataattatgcttgccatagttctgaccataaactcttctggtgagagtaacctatatccaaaagagtaccactttttttggcaactctaataccaggttcaaataaggctttcatcccaattcaagaaaactttaatattcaat

SEQ ID NO: 117872 - DNA, 354 bp, Glycine max
  unsure (1)..(354): unsure at all n locations
tgaggggagaagttgaaccaagctagaagaannaccacagctaattatacaatttgtctcaacaggagatgatgatcaagaagcagtttcaggaggaattatgggtggcggctcaatcccacgagtcgctactaagacagaaggcaagatccacttggataaaagaaggagactgcaactcaagatatctccatttgatgataaatgctcgtagaagatataatttcttgaaagggctgatgattgatggatcttgggtagatgagccgacaatagtcaaagagacagtcaatgggttttttgcgcaacgttntcaagagactgagttccatagacctacactggatgggatac

SEQ ID NO: 117873 - DNA, 113 bp, Glycine max
aatatcaagagaatgggggccatatggcatgccgcattgctttaagatgcaccctaaggcttagggcattccctacaaccccttaattctaaccaatccagccttaaaaccaa

SEQ ID NO: 117874 - DNA, 342 bp, Glycine max
  unsure (1)..(342): unsure at all n locations
agcatctcgattgttacgggactcaatatatcatccgcgaataaagttattgatagtttgaattgctcagaacttgtgttcttcaattttgagcatctcgatatatgacccgtctctatcagacatccgactaaaaagatattgccgtttgaatatgctaccaggttctcgtatcaatttggagcgacgcgatatattacgggacttaatctgacatccatgtagaaagttattgtcatttgaatgtgttacgagcaatcattttcaatgtggagcatctctatatattaccggactcaatangaaatacgagcataaagttattgtggttagaaatagaac

SEQ ID NO: 117875 - DNA, 409 bp, Glycine max
acctgcggcatgcaagctttgtacaatatagatggccttcatttatctgtctctgggcctggcggccacgctcaacaaagtactttcgacacctactgtacgttgattccaccaatgctgttatgggaatgttgcgacaatcctttataaccttattgatacattctgagaggttcgttgtcatgtggccatatcgacgtccttccctatcgtaagccatcgtccatttttcctttgagatgcgatctatccatgttgctatggctggactcagttcacgaaatttttctaaattttgatccaaaaatgtgcttgcatggagtgtacgctgcataaaattattatgaataacattttaagttaaatgaaagtaaaataaacgtgaccatcaatatgaaattctacccat

SEQ ID NO: 117876 - DNA, 371 bp, Glycine max
  unsure (1)..(371): unsure at all n locations
tctgacctttgaaacaagcatggaatgaatgatcttctcatctgatngacaatattttccctcataagcaaggacaattctaagtaattttaattaacaaggaataaataaatcaaatatagtactacaactcgcagtatcagtattagttttcttcattgtataagaaaggagggagaaaatgagaggtataagtttctcttataatgcttgacctgaactgcaagtattacaccgtttcctaagatgcatcaacaacgggctcacggaaacaattacttgctcaccgtatgggataaattacagtgcttccacatataaaatgcatcaacaagttgtggatgccttgctaaattagttaaaagaagatt

SEQ ID NO: 117877 - DNA, 328 bp, Glycine max
ctgggccaagcctatccttttttatgcgaaagccataaacctctggccatttttgatattgacctccatattcgttgctagcgtgagtcgatttgactaacttaccccttctcaatgaagcccttcatgttgccgactctcttcatttctgtgggccttgatgatctttgtcacttataaatcatgttatcacgctcagtcaaccaatcattttctgctgtcacattggagtcgccggccacgtattgtggaagaatatggggcttcttgccaaagttatttcatacgtgattttccggtaacggagtgtatggatgtgtagtatgac

SEQ ID NO: 117878 - DNA, 336 bp, Glycine max
tattatcatgtatattagcatggtgtgatcttatttatttgaagggtgtgagtagccctccctctagcttctcagggaagctttcttcctctagcttcccaaggaagctaccttacttgcttctcaaggaagcttcctatgtgttaggctataaatataaacatgtgtaacacttgtcataactttgatgaatgagaaacttgtgagacacacttcaaaattcaactgttctccctaatctacttcaatttccatgcctctctctctctcgttctcttcctacattgaagcttcctctctaagtttctattcaatgcactctcttggtggtgaagc

SEQ ID NO: 117879 - DNA, 195 bp, Glycine max
  unsure (1)..(195): unsure at all n locations
ttggttttnatataattaaaataaaggtgtcgtcgctcacccgacttatcacgcgcacacaggaacagacctttttttatacacgtctccgaaatctaaatactctcaaagttcacttttcacgggataatcttctaaataaactttcgaaggctcttccaactaaagcttaaccccgcttgttcattcaacact

SEQ ID NO: 117880 - DNA, 416 bp, Glycine max
  unsure (1)..(416): unsure at all n locations
taaaactcagcttctctatgtgcactatctatcctcgttttttatatattgatctncctgcacatcagggggcttcatggtggaacanacaatatggaactccttaagatgctcatgatgatcttcacctgcaagaccatgaaacttgggcagcatatgtattagtccagtcttgagaacatatggaacaccctcatcaggatattgaatgcacaagccttcataagttgaaataggtgcagccatcatcctaagagccctctcacgaggtggaagttgagccatgttctcagtacaataactattagtcgaatgctcaagattagaatattcagaatcactcgccatagaatactcagaatgtctcaatgctcacatgctcaaatgccagatgacatgataccctatcctactat

SEQ ID NO: 117881 - DNA, 383 bp, Glycine max
tcgcatgctttgttgataaagagagagagtgggccttctttattggcagtagtagcatttacaaatacattttatggaatatggactctttgctcctcactctctctcatctatagacatagaaatcaggaaaatcacagagaagtgcctatagagttgcattttctaccacctcgcaaagataacaaaagttctactggtctgagaatttacgaaagagaatataataatgtagcatgcgcgtttgatctgagatggaagtgacaatgttttgttaacaataggagtgtcaccgttactcttacccaccccacacacaaatgggtgaatcaccatggtccactgatatcatgacgttcattaaattttagattctaccattg

SEQ ID NO: 117882 - DNA, 352 bp, Glycine max
gagaaacacaaccatgagggtgggctcatgggccaccttgggatagacaagacccttgtcttactcaagaagagcttattggccccatatgaagaaagatgttcataagcattgcactatatgtgtggcttgtttaccagccatgtttatggtgatgcctcatgggctatacacatcgcttaccactcccatctgcaccttgggtagacattagtatggactttgtcctttggcttcctagaacccagagaggtgtgcactctatctttgtggtggcggatacgtatagccagatggcacactatataccctgccacacagtggatgatgctctccatatctgacaactctt

SEQ ID NO: 117883 - DNA, 473 bp, Glycine max
tcatgcttaactatgtatggcagaactttattactgttgtttaggacatacaagtgagcttgtaacagatcttctagacttggagtgatcacatgtagtcctctagaacccttaccacccactctgtcatcatgccgagactcaagaaggccaacacgtatacccttctcaatgtattctgaacaaaattcaatggcttcttctgcaatgtacctctcaacaatagatgcttcaggacgatatacatactatgtatacccttataagagcttcatgtatcgctcaaccgggtacatccaccgcaaataaataggaccacagcatttgatttctctaaccagatgcacaatccagtgaatcatgatcgtcaacaaagcaagggcaagatacatctccgactaccacaatatattagccgcctcatttgcatctcattagacttgttaagatcaacgactctgctacatatggca

SEQ ID NO: 117884 - DNA, 468 bp, Glycine max
  unsure (1)..(468): unsure at all n locations
ctgcagcttcttgaagctagagctagctgcttcactcttctaatagctaagctcacctgcctgagaagcttccttgagaaacttccttgagaagctaaagcttagcaacacacacccctctaatagccaagctcacctccctgagaatctttctggagaaacttccttgagaaactaaagcttagcaacacacccctttaatagctaagcttacctccttgagataagaagctagagcttagctacacacaccccactaatagttaagctcacctccatgccaaaatacatgaaaatacaaaaaagtctctactagaaagactactcaaaatgcccttaaatacaaggctaaaaccctatactactanaatggccaaaatacaaggcgcaaaagaaggaaaacctattctaatatttacaaagacagtggacccaaccttgacccatgggctcaaaaatctaccctgg

SEQ ID NO: 117885 - DNA, 400 bp, Glycine max
  unsure (1)..(400): unsure at all n locations
ntgtcctcagatccctcttgttggactagacttagaccatacaacattattgtaacaacatacttaaaaccaaaacttaatctgcagatccctcttgtaagactaagtttcaattctgcttcattcaagttctaaggaaacaatacatttcccaatgttaaaatcacctaactaggcacacaaatggttgatcagaccaagagcatacaaaatttaagcactggaagaagcattgaacacaagaaacaaaatcaattagatatgaaaataattacatcgactgttcattagaaatccncaacaagggtatttagccaaccattacagacgaaaccctaacaataataagcttacaatacctaggaaatttattgatatgattttataagtaatacaagaa

SEQ ID NO: 117886 - DNA, 123 bp, Glycine max
  unsure (1)..(123): unsure at all n locations
atattgggtggtggggtaaggaaggaggtttgtattggctgagtaatgacatttgtgcgttgggggaaacttggccgtataagaatgatagtcacagcatggggnttcttcctctttctcacc

SEQ ID NO: 117887 - DNA, 264 bp, Glycine max
ctaagttgaccaagggcatcaagtttccttcaagcttttattttcagtagatgaagatgaattcgtggccacctcatggactccttctagaacaatagccttatttcttgcactgaattattgggagttggaagccatcttctcagtcaaattcctagcctcagtaggggtcatatcaccaagaactccaccactggcagcatcaatcatactcctctccatgttgctaagtccctcatagaaatattgaagaaagagttgctc

SEQ ID NO: 117888 - DNA, 115 bp, Glycine max
cccaccaaatacgagcagcaactataccggtccgaacatttcttattccaaacaaatgagtccgagtcattaatggacacatccccccttttcaccggaatttcatgaagaccct

SEQ ID NO: 117889 - DNA, 341 bp, Glycine max
  unsure (1)..(341): unsure at all n locations
ggtgatgttgcgcgtactgatgggtaccatgagaggtctgtggtgtcttgacccatgcangtgctgaagtgatggcatgggtatctacttccttcctttatgccccagttgctgcgatcctgctagcataggtacttgtggaggagacgtaatcgaacttccctctcttcaaacctacttcgattctctccccggaaaataccatgtccgcgaagccggagggcatatagcctactaagttctcatagtataacaccggtgacgtgtctaccatcatggtaatcatctccctctcgaccatgggaggggccacttgtgctgccgagtccctacatcgctgg

SEQ ID NO: 117890 - DNA, 93 bp, Glycine max
ttggtgagcccttactgtctctaacatcgatgttccaatgatctccacgatcacatatgcttgtacgtgatgatcttctttattcctagatga

SEQ ID NO: 117891 - DNA, 326 bp, Glycine max
ttcacccttggtgagccctttctgtttctggagttcatcttcaaacgaactggacgtacacaaggcctgtccttgacgaacctctttattcctaatctgatctgtctaagaatacgaatgtgtataaaccccagtctgcccttggtcagaacctccaaacccagagtccacccttggtacgtactgctgtaaaacccaatgcatgcgctaagtccactcactctcagtagccatgacgaccacaatcaatagtctaacttcaacaacacaaactaccaccacactcattgagtaggccttgcatcaggtggagtcatacttgctct

SEQ ID NO: 117892 - DNA, 69 bp, Glycine max
tgcgtgaatcgatcgaatgcttgccggcttttgtgctcttcctgaaccgcggccactgatgctgcccgt

SEQ ID NO: 117893 - DNA, 332 bp, Glycine max
  unsure (1)..(332): unsure at all n locations
acttgatactagcctgggggaggntagcggatggactagtactgtgatggcatagtttgatccccgtgttggaagacgtaggaggccatggatggccatatgactagaattgctaaggttcgcgattctacattatcgttgttgcatttaagagccagactattcatgcttaagcaagattctttagggtgcagttaggtcctccatcacttaaggaggagagtcatcatgcctaaacacgaggccacactctagccaggttcatgtcacactcaattgaaacactcatacagctcaagagggagtatggcgcatcaagcttagccatgaag

SEQ ID NO: 117894 - DNA, 382 bp, Glycine max
gaatctatctatcgatgttactcggtgaatggacttcatcatacagcgaaatagtgtctctgtcacgaccttctaacagtctcgcataccaaagattccacataatgatcgggaccacccttctcaactctaatgatatcgcgaagccattgtgaaaattctaaatctggtgtatgaacttgaggaacaccttattaatgaagtgtccttaaattaccaccagtaaattgtacgcataaatagactgtgacatattgtcttagatgcagccaggcataatgccacataacaaacaaacagatgcagcatgccataaagggtatgtcgcggaatgcacaataacctatcccaccataatagcacaaagtagtttagcatgatg

SEQ ID NO: 117895 - DNA, 421 bp, Glycine max
ctttgataacaaactttgccactggttatctgattcattattctggtgatcgattaccagagagtaagaactctggtatcttagaacattatgtgaaaactcttttgataaacaaaattgtgctatgtttgtgttttgaaaaatcttctcaatatttaccttgtgaagtctcctggatctcttcttttgaaacctgaactcatcttttcttgatttttaaatcaacttctctcgttctagaatgtcttgattaatttgaaatcattcttgggctttttgcatattttcgtcttataaacttttaaatcactgatcatgatgtgagttgctttaaatctcccttttgatatacaatctacataataacaatcacatctgttttagcgatcctccttatttcatatctccctttagtttggtt

SEQ ID NO: 117896 - DNA, 118 bp, Glycine max
  unsure (1)..(118): unsure at all n locations
agcttgagatgaggaagtattgaatggtgattcttcctgcctnnattggtgaccacagagtggtacctggagatatgtcgcgggggtcaagataccttgggacttcaagtgggtgcta

SEQ ID NO: 117897 - DNA, 204 bp, Glycine max
  unsure (1)..(204): unsure at all n locations
cgaggaggaatcttggtgttgtcttgcactanaataatgttctgaataacattgctattaattactaggtcgcgtacatagacttgtcgtctattaataacaagttcttcatcagagacaacacaccctatgtttcattctcctccatactcaacttcctcaatgaatcttgcattcttgtcttatagaaagactttataatga

SEQ ID NO: 117898 - DNA, 314 bp, Glycine max
catatcaattaatgcctctttccatgtgccagtgacttagagagatataaaataagcccacatgcatgaacctccaattagcatggcggtttataacatggccacatggagtcattgatgatgctttggtaaatgttaatcaccttatatcttcagatgatttcgctgtcttagattaataagaggatggtgacatatctcttattcttggccgaccataaatgtcatttgcaagctgggtggtaacatgggaaagaagatgttccgatcggcatataagattacaatatcatctttgtattgtttcctgggga

SEQ ID NO: 117899 - DNA, 327 bp, Glycine max
cttctaaactatatacaagaatgaagctctgataccacttgtttgacaagtggcctcagatatcttaagaaggtgaggtggaattaagatattccaaactatttccgcaattaaaaaagtatttcactttcttgtcaagttatagagtctcttaacaatgaacttcttaaatattaattcaaataaaacaatttgaatatgaatgttaagcgatgataaacagaggagatttagggaagagaatatgcatactcagatttatactggttcggccacacccttgtgcctacgttcagttcccaagcaacccgcttgagagttccacta

SEQ ID NO: 117900 - DNA, 319 bp, Glycine max
  unsure (1)..(319): unsure at all n locations
ctccggatcttaagtcactgagctgcactttctgactaactcgagaacattcggtcctcacaactgctgaaccaaaaaacatttgtgtctgctatttcttatccacaaataagctacttatcagcccagcccccaaattgaaaggaccaaagataactttttttcaaagaaccattctgcaggatgtctgaaattttgaaccatttcaatcaatagagcacaatgcctaccgccagaacccaaatccacgaaaccatgtgctgggtaagacataatnctacccatacgagactgcatgatgctcacattattacagctt

SEQ ID NO: 117901 - DNA, 358 bp, Glycine max
gggaattcatgcctcctatggaatttgtatagcgagaagatagtaatgatctgacctgactagtaaactttgtagattctcccttgaccttgcttcctaaggattctgtgttgattgcatccaacaaatcttctgcgtcatagacaacatctttcaattcatcaacccatgctttcacagttatatgcttctcctcagcatcattgagtacaacattaagtgctaacagctttatctttacctcattcaactcagaaacattcagctctgtgatgaagaagaaatctcgaaattctgttgaagctatcctgtttaataagatctccacagaagcagagataagtgcctctcccaccat

SEQ ID NO: 117902 - DNA, 238 bp, Glycine max
  unsure (1)..(238): unsure at all n locations
caattagttcacattttttttaatgagataccacttgcttaaacatagctcacgtaactncaccactttgtcattcaaaattcacttttcaatcattcaatccattacacaagaatcccacacttcggtcaagatataataacacatcaattagcaagcatatgcaacagttatgctaagactcataccttaatgcatgtggttcctgtcatgaaaaaccccctgggcgctaggagtc

SEQ ID NO: 117903 - DNA, 417 bp, Glycine max
cttcttcatcatgcacatagcactacatccactattttttttatgataaaacataaaactattgtattgaaatatattgttctatattggatgtccattttatgttcatttccatattgttaaagaaatattttaatcgttctataaaaataataaaattaattcgttactattaaaatctgtatttataacatcttaaacttgaataaaatagcacaaaaagtaacctccatgagttatttatctaaactttctttatgtttttttcgtcttcttcaatctagataaatatggttccacctttttcttttcttgtttttaactatgtggagttcaaagtatgtccttattctaatatttcattaaagataattctttttttaacacaactatttgataaatggattgcagtgtttt

SEQ ID NO: 117904 - DNA, 304 bp, Glycine max
  unsure (1)..(304): unsure at all n locations
gatgaaccaccgatcaagcccaccgaatacattctcttgggactcgaacacctacaaagcaatccacataacttaagtgttctaccagtattcattttattaaatctgtgacaaacattaacattataacctgagaagtatagaacgcatcggaacaatcaacatgtggttcatttgcaccacatgcttcttcattntcataatccatatccgcttgttcagacattatttcatgcattcacttcatcttcgtccatctaaccaacttcaattaataattgttacaaaaatattaatataatta

SEQ ID NO: 117905 - DNA, 319 bp, Glycine max
agctttctttacaacagtgttattattgatgatagatagaagatattcacggagtggggatgtctcctccacctctagatacctcacaatctctcaaaatctcatccaaagcttcgcaagatggcttcctcttcaagctcagctctctctcagtctctccacaggcaaagactctcaaaaaaactccactccttcagaaatcgtgattttagcttaaataggcaatcctgtcggtggacgcacgcttagcggaagatgagctcgcttagcgcacgtaagtgacttttggcttagcgccagtcattctccccttaacctg

SEQ ID NO: 117906 - DNA, 352 bp, Glycine max
  unsure (1)..(352): unsure at all n locations
tgggctgtgcaaaggagggaaatgagtgacccanagtgaatgcaagagccatttctagggtagattgggtgttgaggagtcaaattttgattcggtagagttttcgtcgtataaccagtttgagcgagtttagattaatgttatagacttgtttgagatgaaagtttgctccaaagtttccccattctcattttcacttctcanaccttcaaaatccactaaattgaggggttttagatacctagattttgagttgctttggtctgaagcttgtctttggtttagatatgatttatacttgatttaggacttgtaggatccaatttgggcaattntggatgagggcaagagt

SEQ ID NO: 117907 - DNA, 248 bp, Glycine max
  unsure (1)..(248): unsure at all n locations
ttaagtcacctgtgctgcagctcggcttgacgggcgtctgttttangtgaaccgacgtatgccaggaattctacagcgacagtgtttagcgtacatgcccagtatagtgacgttatactgcacgctttccgttaggcgtaaagaaacgagagcgatgccgccggttttccttcacggtacgcaattcggcgatgcatcgctcgttaagaaccgtaccgccgagttactgaacgtcaaagtgacacata

SEQ ID NO: 117908 - DNA, 451 bp, Glycine max
  unsure (1)..(451): unsure at all n locations
agcttgaaagcttagagacaatgatcttttcaatgaagacttaatctcataatagatactttcactgaagtctataaaaggagtctcaaggctcagtaaaacacacgtcacaacactcaattttttgaagtgttgaaactttgtcaaaatgtgaacgatcctatcttgacctagagagtttattctttgcatcgaaaagctanttgtttgtatttggcctacattgtatatactttctttaaaaggtttgaatcttatacttatttcaaatcgttgtttggaaatctaggagtgacttagtgttaaaaaacttggttgtttcttaatctcagtgggagattaagggtatgccaagagtggtcaagtgaactgatgcaagctccattggagcttgtaggcctaggatcttcttcatcaatggattncctttgcttcttgggaagataaatgg

SEQ ID NO: 117909 - DNA, 394 bp, Glycine max
  unsure (1)..(394): unsure at all n locations
ctaaggtactagaatgggcatagataaacccaactagattaattgcccttctaattgtcttcctaatcaagggaagcttcccaatatcttcaagcatcaaatcaatacaatgagctgcacaaggagtccaataaatatgtttccttttgtcctctaacaacttaccccctaaaacataattgctcccattatcagttacaacttgaacaatgttctcttcttcaacttcctccacaatagcatcaagcaactcanaaagcttttcacctgtctttacaaaatcagagccatcaacagatttcaaaaacattgtaccaacttgaaagttaattaaaaaattaatgatgcatctttgtttccgatcagttcatgcatcagacataatagtacaaca

SEQ ID NO: 117910 - DNA, 453 bp, Glycine max
  unsure (1)..(453): unsure at all n locations
agcttntatgagaggtgtggcggtttctcttattacacaagtggatttntattccgacaagtggaggttatttgttttatcgtagagaaactcatgctccttgatattcgagtgattcaagaacaccctggctgtatcaaaggacttcgcatccttcggtgtgccctcactggaaagagtgattctttccttcctttcatctcaccctttgcctttcaaacggcaatcccataagatcctccgttgcccacaagtatctcttggccatagcttccatatgacgcacacaaattatgtgagacatgagcctacattgactttgagaacgatacctcttacctctgttggactcacctcatttcgagccgtgtagcttcacttattgccattactaaattgctgtccagccggcacttatcctacgtattagcatcccatacgtccatattatgt

SEQ ID NO: 117911 - DNA, 286 bp, Glycine max
  unsure (1)..(286): unsure at all n locations
tgtgatggaaccaccaatgctgtcgagagagtgatatgtgtctcacttgncacacggaagacgagatcagggcgttaactatctctagacgctcgatgtcggataacgaagagccctggtgaaattcaaacggacatatcatttcaaactgaccgtgtgatccattgcataatatatgaagacgctcgacagtatactgctaaagctatctagacattcaaatggtcataactctagaaacagatgtacagtatgggcgcactacatatctagacgctctaacttg

SEQ ID NO: 117912 - DNA, 409 bp, Glycine max
  unsure (1)..(409): unsure at all n locations
gctttccattcctaaattgaatcttggttgttgtcataccctagtttcctccggggatgatcatttgctaaagttttgattctagccaaccanattgagctgcttaacaacaagtgtcacacaattcgtaaggtttttcgatgctttggaagagaatgcagaaaatacccaaaagggaaggcaaantggtgcattggtgactttnttaggcccctggctcgcccgggctagcctttggctcgcatgggccaccagaaagcttatggatgaagtaactagctcgcttgggcgagctgctgtgcaacctccaaccctcatttcctataaataggcgtgagggggtaaaggtaaagggttcaacatcctatattgagaggaatttagtgaaaattgtgagaggaccgagaaa

SEQ ID NO: 117913 - DNA, 437 bp, Glycine max
  unsure (1)..(437): unsure at all n locations
tcctcgggccattcctgcgaaggcagacatttggaaagttagtttagtgggacattactcttaaagcaaagatggcatataacctcctcccataaatacaaacatcaatgtaaatgtagagcaagcttatgcgcctatttccttacgaacgttctcttgcacaagacatttaaccggaaaaatgcacccatatacaatcaaggcagcttcgttacctagattatatacacgtacctccaaggcgtatttgttacttacatcacacacatctccttggctaaactcacatacatgcatactcaagcattttgggcaccaaaaattgcacatgtgcacatcttggcatttctaatacctacatacgcaaacttcatgatgaatcttgactatctacacaataaggtgctacatntcatgctcttnntttttcaagtttt

SEQ ID NO: 117914 - DNA, 259 bp, Glycine max
ccacaaccaagcttgaccaatcccgacccaacccaggcatagtcagtcagtgagaacctgtgatgtacctaaacatgcgagctcctggcagtcaacagataaaaggaacaaagaccacaaagcaaggaggcttgtgtggtggctggccagctgtgaaacttgattgatatatgggatatggcctctggtaatcgattaccaagggtgggtaatcgattacaaggcttaaaaataaagataggaggctaagatggtctct

SEQ ID NO: 117915 - DNA, 360 bp, Glycine max
  unsure (1)..(360): unsure at all n locations
tgattcgtgagttgattntagccttagtttcactttggttattagtcaatccattcaaggaaacttccaaagaanaacatccaattggattttttaaattattttatttgaagatatttcaattattttattattattttaccctttttgtgttaaacgtggttacagcgtgaatgatcggttggattttattttaacaatgattaaacgatattacaactcaaatgatcggtggaaattcattttgttatttattagatgagaaaatggcttaaataaatggttaaagcacgtcaaaaaaagggtacagaaaacaaaccatatgaaaatcatagcacgtgatacaagtanggaccactg

SEQ ID NO: 117916 - DNA, 461 bp, Glycine max
  unsure (1)..(461): unsure at all n locations
agctggtaatagaaattatagcaattgaatattttctattntaaaaaatagaaaagaaacatttctctcacatctcttaagtagcattcaagatttctatcacctctcatgtttgtatgagaatgctatgcaagggattcttctttgctattttgtctganacacaaaggaaagagaaaatataaaactgcccatacaaacttagaagaatgaaggagcaaacatagaagtacgaataagaacatagaanaagaaacaagaattggctttgacaatactacgtaagagtaattagaaaatagggcaccacctgaacatgctagattggagaacacaacaaaacaacaaaatggtcacttatgaagaanatctgcttataacttttttggtcaatgggagcattatcaccatatgtagcaactcatgttaagtgagtgagttctataacatatatacgtaag

SEQ ID NO: 117917 - DNA, 475 bp, Glycine max
  unsure (1)..(475): unsure at all n locations
tcagccatatagacagatntctacagcagcaagaagctctcataaacttgctcccaggtactatgggccctataggattctggaaaaggtaggaccagttgcctacaagttacagcttccagaaaactctcaatccactcaacattcatgtctctttactcaagttattcctggacctctctgttaagcagaggcatcctcccattgattggctagccatccctagttctgtgtttcttgaaaagattctcaacaaacgtatgggaaggaagaagagtcgtattatcactagaagtttggtgcagtggcgaggtttacctaatgaggaggctacatggattccttaattcaagtcttaacagcaattccctatgttngaaatgcaaaactccttgagggcaagggtcttcctttggtggaggggtattgatatgtatatataaaaagacacgatgtcagtagctagtttagtcac

SEQ ID NO: 117918 - DNA, 387 bp, Glycine max
  unsure (1)..(387): unsure at all n locations
gcatgcaagcttcagtcggacattcgatgtatttgctatcatcatacgaatttgcgtgggcattagagtttaactatcgagcgccatgatatgttatgggtctcaatcngacatccgagtcataacttatgccggttagaattttctcgagtctaccttgataaattcccagtgtctcaataggtttccggccttatgctgagattcataggaaaggttatggtcggttgtgtttgcgatgggcttcatttttcaacaactattcgtttcaatatatcatacaaacctatataaaatgggagtctgaagttatggccttcctaatttgccttggcattccatttctactttcaagcgccatgataatcatgggcctcgatcgggaat

SEQ ID NO: 117919 - DNA, 442 bp, Glycine max
tcggtattctatttcgagcgtctcgacatattacatgactcaatccgacatccgagtaaacagttattgtcttttgaattttcgcagagcttcggtattcaatttcgagcgtctcgatatattacgggactcaatcaaacatccgagtaaaaagttattgtcgtttgaatttgctcagaggttcggtattcaatcttgagcgtctccatatattacatgacaaaatccgacatccgagtaaaaatttattgtcttttgaatttgctaagaacttcggtattcaattccgagtgtctccacatattacgggactcaatcgcacatccgacgtaaaagttattgtcgtctgaatctgctcagagctcggtattcaatttcgagcttctagatatattacgtgactcaatccgacatccgagtaaaaagtattgtcatttgaatt

SEQ ID NO: 117920 - DNA, 379 bp, Glycine max
  unsure (1)..(379): unsure at all n locations
taatcgaanttgttttggctaatgtttatttgtttgctccaacatgattccaaaatttgaatccctcatcaaaatttggaaaaagtatgagactaaaagggaaattaaattgaaaataaaaaaacaaaaaactaataaactgaaataaaaatatctaaaaaagataactatattgattgattagtttgaatgttctttctaacttttttcaaacacctatttatacaaaaaagatcataaataactaatgtcgtgcttgtccatgttatgccactaactatctagctaccatgatatcaatttcagctagtttacaaaagcgttggctaatctcatcttgatcctcttactcttgaatccgattgttattcttatcttt

SEQ ID NO: 117921 - DNA, 336 bp, Glycine max
gccccgccgaccctatacgcataaataacatccacctgacggagctcacgagaccgtgcgcatgtgtgtgcgaagcattgcaccactgcactaggagggcgcttgctcatgcacgcagttcaggataatggggacaatgaggctcgcgccggtacttcagatacgccataggacactgacttccgttaccgccatccctactctgaaacatcggcatcctgaggctaaatgccttacgtggagcaacttacacatgcatgttatgagaactaagctcatatggggatagcccgataggccaagaatgacgcacctacttgccggagacgaaccatt

SEQ ID NO: 117922 - DNA, 390 bp, Glycine max
taaagatccagcctgcatagaagccccacaatcttgtttccatcataaatggatcaccacaagcttaagcttactagggtttctgtcactccactggatgcataccttcccttccatcttctttgcattgaaaatgtcaatttgccccttggttatgattccctgcagtagctactcaactatggggcatgtttccacatcgtgcatcgcccctggatgcattaagcacggatctcctttgtcatcatttttagtcgatgaatacgactaactcttgtgtataaaacctatgtaaattgtatcaaacttcctccaattaatggttattttgtagtattgtaattactttgtgttaaagataggtaataaatacttagtatgtccattttg

SEQ ID NO: 117923 - DNA, 394 bp, Glycine max
  unsure (1)..(394): unsure at all n locations
ntatccttaggttgttcactatgttgctcatgtttctccccctatctctaacaatatgccttattgtggtggaaccaagtgaggagtgatgttaagaggatgagaaggcctttgattcatactangcaagacatgaagagagttttgagagaaagatttgtgtcgtcctattataagagagaccttcacaacaagctccaaagactaattcaaggaaataggagtgtggatgagtatttcaaagaaatggagatttccttgattaggactcaaattaaggagtctcaagagaccaccatggcaaggtttttgcatggtctaaatatggagatccaaaacattgtagagttacacctctatgcctatttggaggatatcattattcaagctataa

SEQ ID NO: 117924 - DNA, 396 bp, Glycine max
  unsure (1)..(396): unsure at all n locations
ntgatgatatggtcttcaccgacgaaaggatcttagtgagtctaaaaagaggcaaatctgatcatcatactttgataaatgctaaaaaactagggtaaatgaaaaaggggagaatgagggacaagcccatgctgtgaatgccattcctatacagccaagtttcccaccaacccaacaatgtcattactcatccaataacaaaccttctccttacccaccgcccagttatccacaaaggcaatccctaaatcaaccacaaagtctgtctaccgcacttccaatgacgaacaccacctttagcacaaaccaaaaacaccaaccaagaaatgcatttttcagcgagaaagcctgtagaattcaccccaaattccagtgtcctatgctgacttgctccca

SEQ ID NO: 117925 - DNA, 391 bp, Glycine max
tctacttatgttcgtgagctacatgcaatcacatttgcaattcgcaaatggcgcccctaccttttatgccattctttcatcattctgactgaccactggagtttgaaggacttaatgtcccaagtcatccaaacttcgaaacaacaagtatacctctccaggctgctcgggtataattatactattcaatataaatcgggttcttccaatacggtcgcagacactttatccaggataccgaagacaccaactctgtaactattgttatccattcccagtttcctttttatggagcaactccgacaagcatgtcaagcgaactccgcttatagggaactcccccactatgtttagttgcaccccgaagctcacccgagtttcaccattaacc

SEQ ID NO: 117926 - DNA, 393 bp, Glycine max
taaagttcattatggatgcatatgctatttacattctaatggcttctaatctagcaaccgatgcatatgtttcttcataatctatcccttcttcttgattatacccttttgctactaatctagccttatttctaacaattatgccattttcatctaacttatttctaaatacccattttgtcccaatgatgggatagttttcaggtttttcaactagttcctaaacattatttcttttaaattgatttaattcttcctgcatggctattatccaatgttcatatattatggcttctttcaaatttttaggttcaatcatagaaacaaaagccatattattgcatatatctttgagagaatgtctagttgttaccccttttgagatatcaccat

SEQ ID NO: 117927 - DNA, 368 bp, Glycine max
ttgataccagatgatgtgaacctgactatgatcttatcgcttgatacaagctttagaattttggatgacgccacttccggtgaaggaagataagtcagggtagacatcacttccggtgaatgaagataattcccggtagacgtcacttacagtgaaggaagataattcacgatagacgccacttccggcgaaggaaaataagtctgggtagacgccacttccagtgaaggaagataagtctgggtagacgccacttctaatgaaggaagataagtcaaggtagatgccacaaggattaccttgataagtctgataattggttcaacaaggaacccggagagaaactctcaccaaattttatcaaaatg

SEQ ID NO: 117928 - DNA, 399 bp, Glycine max
taagcgtgcataagaataaatacattaaatgttcgatatgttcaagatataaactatgtaagtgggtcacaactaatgcgataaagcgaaaagccaagagtcaagtcttgaccctaagcccaacaaggatcctaacaatgaatcacaactcctatagaaagtcccacattatccaagagaatcatgctcctctaaagcattttctcatttgctcccatgtgaaacaatacaatcatcgcaacgaaacaaatatgcaagggtcaagacatgtatataaaacttaatatgtcatcacaagatatcgcatgaaagcttgacaagctataataatccgcgaatcatagaagatggaagtgatttcatacaatcatatttaaacgtaacgacaatgctagctag

SEQ ID NO: 117929 - DNA, 393 bp, Glycine max
taacaaaaggcatgcgaagtgggtggaattcctagagcatttcccttatgttatcaaacataaaaagggaaaaggtaatattgtagccgatgctctttctcggcgtcatgcattactttcagaaaatggtttctttagacatgaaggctttcttttcaaagaaaacaaattgtgtgtgcctaaatgttctactagaaatttgcttgtttgtgaagcacatgaaggaggtttaatggggcattttggggtccaaaagactctagatacattacaagaacatttttattggcctcatatgaaaaaggatgtgcagaaattctgtgaacattgcattgtatgtaaaaaggcaaagtctaaggtaaagcctcatggattgtatactccgttgccaat

SEQ ID NO: 117930 - DNA, 398 bp, Glycine max
tgcctcgccccttgatatatttgacggactcatgtgtactatgaatgacaaattccttgggataaaggtagtgttgccatgctttcaaagcccgtactaatgcatacaactccttatcataagttgaatagttaagggtaggaccacttaacttttcactaaaataagcaattggatggccttcttgcatcaacacagaccctatcccaacatttgaagcatcacactcaatttcaaaagatttttgaaagtttggcaacgcaagtatgggggcattaattagcttttgcttaagaacattgaaagcttcttcttgtttatctccccatttgaaaccaacatttttcttgagcacttcattgagaggtgctgccaatgtgctaaaatccttcacaaat

SEQ ID NO: 117931 - DNA, 401 bp, Glycine max
cttgatggtgtcgagaagaaatcacatgtttgtcttcatctaatagggggagaatgtgaatgtatgtatacatgattttgatgatgtcaaaagaagaatcaaacaaggctcattttgcttcaagattaatacaagattgtttcaacaaacaaagccttaattcaagatttcttcaagatcaagccttacctcaaaatgtagagatttcaagtcatccaaggcacatgtaattgattaccaatacatgtaatcgattaccaaggcacatgaaagtgtgtaatcgattacacatcatatgtaatcgattaccagagactctgaacgttgggaattcaaattttaaatgaagagtcacaactgttcaagaaaaacaactgtgtaatcgattacactaattctgt

SEQ ID NO: 117932 - DNA, 291 bp, Glycine max
gggaacaaaaacaacggaaaacacaccgagccccaagaaagaagaaaacgtagaagacagacggcgcgacagtgttcgggccgaacacagaacgatttgggcgaaggggacccatccccggaaaaatcaagaaactgaagcgctcggcaaatcactccgggtgcggaaggcgacaatgacgaacaatatatgcagacaacagataagcaccaagaatatcgaactcaggggggggaacaaaacgcgaagatgatagaaggcgacaccagcactgaaagaacgggcaaagga

SEQ ID NO: 117933 - DNA, 390 bp, Glycine max
  unsure (1)..(390): unsure at all n locations
caagcttaatcctcacggccactattgctctcatattctcaggngnaacaaggaatgcttcatatataaaactaacacaatttccaactttttcatttcatctcattccatacagtcataaacacacaaaatgaatatgaaggactttctttggctcgtaatgaagctgggctaagaacaattcatagattttctaggatgcaaaacttatgttttatgagagcattcatccatagatcacccttttctttaactttctagcttttattgacatgccacaattagcattgcaattaacaacacacagagcttcctttatttttgatgttctttttctctctctttttttatttattttagcagtttataattactgctaatggttgtgat

SEQ ID NO: 117934 - DNA, 361 bp, Glycine max
gtggcctgattaacctgaaattgagagatttgtttcttttacacacaaaatggaagtactaagtgtttattacctatacttaacagaaaatatttataacactacaaaataaccattaattggaggagggtgatacaatttacacatgttttatacaaaaagttagtcgtattgatcgactaacaacatctgcaaatttacagttttgcttgtcctctagcatataaagaacaactcacttgtcctcaagtgacaataacatgtggtgatcttgtacaaagttgtatgctaaaaaaattactgattgcatgataagaaatatgaagcattatgtactcatcacttgtatttcccaaaatat

SEQ ID NO: 117935 - DNA, 336 bp, Glycine max
  unsure (1)..(336): unsure at all n locations
ttttttaattttctcagcaaactncatatatcctgatggaaattcaatcaatagacctccatatactttatggacagggttaccaccacgcgggaacccgaatgcgaattcttatagatgcaatacacatgcatattcgggaagccacataaatatggccttatattccctccacagtagaaagaatttcattgtatggaatcgcatctattgaaagcataacactataaaaacctagagataaatggtcttaagaagatagaatacgagctcaatacaatttataagcctataacataatatcatctaccctgggaatggatcaatattacagcg

SEQ ID NO: 117936 - DNA, 406 bp, Glycine max
gaattaaaactaagctattttctttatatatgataaagttttctttttatatggccataaaataaatttcaatactctcaattcagctaattaagaaaacataaatagactacttaaccacatgttgcaccattttccaaagatatatatatttgaaaacaaagaataacaccaacccatgtttgagatggaataaagaaaacacaagtgcaagtgtaagcctggaatgcagggacacaaagctatattctaaacaaatcacataattattaaaaagctatatcaacatgacccaggaaaaaaaatgtgaccctagaaccataaagaaaaagtggcaggatatatgtagttaatctctttcaatataccagaattgtcatgataaaagtgtgtaattatattccaa

SEQ ID NO: 117937 - DNA, 338 bp, Glycine max
ctcacttcctaatttaaaattgacaaaacttgatcaacccctttgtggaaatattctactttatacacgatatatgtaaaaagaacagtagatagcatttgatattaattgcttggataaataaaaacatttaaaataaacacatccttaatgtctcttaatgtactacataggacaaaaaaccaaataaatattaccagtagtattgaataacttttattaagaataataagttgcacgaaaatatttacacattatgttaataaaaacaatacgagtgaactatgataaaagtgatgtgactttgagatctcctaattaatttaatttgctgccga

SEQ ID NO: 117938 - DNA, 392 bp, Glycine max
  unsure (1)..(392): unsure at all n locations
taatggtggctggggattgagatggaatacatcttgntgtgccaatgcatggntttaaattaatcagtgttagttttaacaaagtcatagaaataacaatgagagctgacatattacccgagtggaactctactctgcagccaaagatgtgtacaacttatgccagaactagaaatgacatcatcattcactgaaactgactgaagtcggacatcatcattttgtttctcattgtcttttataagagaagtaaagctccccccctgggtggcaccaacatgtctttcaacacttatccttcctaaaaactctttgaaaccaataaaaggactcattggactaatgggtgaactcagagagaccactgaagggggtgaagtaaatgaagctgg

SEQ ID NO: 117939 - DNA, 397 bp, Glycine max
tgtaagattgcaaggcacctgctgcagacatggtaacttcattctgcttgactggctcaaagtcaatgatcatactaccagtgacacgatggataatcgcataaaagggcttcccataggtcttgcaatggataaggacagggttaagaatcaaaacctctgcaaatcctatagccttctgcaatgcagaagcacttggtgcagtgaatagagtttttatgtcagtgccaataccaatggcatggtggtcaccaacactggggacagcatggctcaccatggtcagcatttcgggtgcgttctcactgtatgcaatgaccttgcatgttttctcatctaaggccaacaagcacccaaaaggctgaatcatcttgcctttctgcatgtggtggaggta

SEQ ID NO: 117940 - DNA, 389 bp, Glycine max
ttacaccttatacaaactgggagtgggtttttgctttggtgaaccccatgcagcattttccttcttcttcttcttttttctttttctaatcttgcttttcatgtaaagctacggaattcaaattgaatatggtgatttctcttcaccaacccccgtcaagcataaattaaaattccacaaataacaaaaaataaaataaaagggtgaagtgtaattaattggtagagatacaaggggttgggagcagatgagtccatgtcaaaagggtgaagatccttaaggacccatcgaggatctcctttatccggttacgctttgtgtttctgtctacctttttctcatgccaatagtaataataattcataaatgttttccttttttgttttttc

SEQ ID NO: 117941 - DNA, 375 bp, Glycine max
  unsure (1)..(375): unsure at all n locations
ttatatgttaggctatacccgatgtatatgttctgcttctttcnggngccaaccagtctcgcttaacctgtggtacattagttaaacactaacaaccaaaaactttcagattttttaattgtgggaggtcttgatagagggttatctaaaaagcacaatgacctagaaacacttcatgagttgaaggggccaatgacaaagtctagaatcaagcttctacaataagagatgcccatgatgatcaaggatggactactcatcaaagaaatggaaggagaaaatcacaaggagttgaattggagcacgttgaaaattgctgaacaacacgcttgggcctatggtgcgttgtctagcttatcgcgagctgtctggtgg

SEQ ID NO: 117942 - DNA, 388 bp, Glycine max
ttaattaaatttaaaggtactaggttatttataattaatttaattatgggtactacactactagaaattatacatttaacatcgctagattagcatcggttttggacaaaactgatgttaacacaaatgcggtgacatacttgtaaataagacgagtttattaacatcagttttgtcaaaaccgatgttaacatagcctcgttaacatcaattttttgaaaaaatgatgttaacatatcttgtttgcatcggttttgacaaaatcgattttacctaggtcatgttaacatcggtttttacaaaaaaaccgatgttaactaggataagttaacatcggtttttttagaaaatcgacgttgtgtttgtattaaaattaaactagaatctc

SEQ ID NO: 117943 - DNA, 396 bp, Glycine max
gtgtttaatctcaccttggaacaattcatgcttattacgtttattttcttcttctatggacaccaaacatgtattctttgtccattgatattctgaactttgaaaacttgactttgggttatggcttatctctgaaagtggatttcatatgttggaatcaaaaaaggctaaagttttatttgtttgtttttatcacctaacagagattgtatatatatatatggtgacgcccctatgtgcgaatgaatacatgtctttatattgactcgccatctgcatggatacaagctaaaattttatttgcattggacgcctagaaatgtattgtattattttggtagcagtctttcagcagagtctattcgagctttcttattttgagaaattttgaacttc

SEQ ID NO: 117944 - DNA, 411 bp, Glycine max
actctatataatactcaacgctataaaatttagcattggtcatcaggtgtagtttcgttgtcattacatcacatggacataggagctttgttattgtcaaacttagtgcaatgaagaaaatatccactactttgcaaggcaaggagaatgaacccccacctcaatggattgaaccaaaggtatgtcgtaatccctgtatttatggaaatttgaaatcagtatcatgtgtaacaaaaaatgaccaagcttaattgggtattttcatattgcatataaagtcatgtacaagccggagccgatgagtgtgaatattatgtgatgcattggatgtggtgacgggttgaagaatgaatggatcaaggtgtgcatatgttcgaactcaaggacagtcccgaactttatcggaaagtg

SEQ ID NO: 117945 - DNA, 248 bp, Glycine max
tgttcctcctgacacgatgagatggtgtctgttcctctcgctcatgacgaaccagcagctcaagaacctatttctctaggtcctatctctacagcaaccattactaatgattaccagccatctgcaccagcatcggaaccagatcaaccggttgttcgaaaccccgcaactgcacatggggggggccgacacgaccatgcagaggatgattgacaagatctttatattcttacattatgaatagggat

SEQ ID NO: 117946 - DNA, 373 bp, Glycine max
tgagacagggctcaaaaaggacgaaccttcaattattctaaagctaatccattggccaacgtgctttgttatgaaccgacgacgacgctatagacgatgcgggagatgacggagaagcaaacaaaacatctgcggattctttcctgacaatgactcgcgtacaccagcatacaagggaacattccagaacccgaacggatgcagtataagaagggtatcacactgtcagtgtgacactttttaaacacgacgagatgtccgtatacagataaaccgcacaaacactctgtttatgtggacaaaaactcccgagagatcaagataacatcatccatcggtatgattggaacatatactcagcggacacagggaa

SEQ ID NO: 117947 - DNA, 267 bp, Glycine max
ataaaactcagcttggccaagagcaccaataacccagcaagcggttcatactcgttctcaatcagaggaactcaatggtataatgcaaaccaccagaagcatcatggctattcaaacggggtcaagaaacagcagggcaaaatcaattatacaaacacattagatagccctggatggacctgcgacaaagatagtggaccaccctgggattgaaacaacctagtggcttgcatcaagcgcacaagctctgcagagaaatgatgcatg

SEQ ID NO: 117948 - DNA, 333 bp, Glycine max
taaaacgaatgcgtagaatgggatgtatataagaaaatatggacccctctatcttaaaaatgtttaattaaatatgcactaaatggaatgaataaaatatatccttaccattatttgaacaactttgacataacttcgaaaacttaactgcatgtataccttgatcaacaacttgctggtccgatatgttcatcaacattttcatgcgtcatatacaaatttaatcactttaacacatataagggtaagcttcctttactcaatgatgtctctcaagctagatgattaaaaatgaatgcgatgggaatgagctccaagtactacacgaatttt

SEQ ID NO: 117949 - DNA, 402 bp, Glycine max
cttgcggatttggtcttcgccggtgaaaggatcttattttgtctgaaaagaggcaaatctgatcatcctgctttgataaatgcaaaaactggggcaaataaagaggatgagaaggagggagaaacccatgttgtgactgccattcctatacggccaaacttcccaccagcccaacaatgtcattactcatccaataacaacccttctccttacctaccacctagttatccacaaaggccatcccttaatcaaccacaaaacccacctaccacaccaccaatgcttaacaccacctttagcatgaagcataacaccaaccaaggaaggaattttgcagcaaaaaacttgtagaattcaccctaattctggtgtcctatgctaacttgctcccttatctacttg

SEQ ID NO: 117950 - DNA, 400 bp, Glycine max
tcagaattcaattgtgagcgtctcaatagatttcgtgatctcttcagacatccgagcaaatcattattgtcgtatgaattagctcagagcttcagaattcaatttcgatcatcttgatatattacgggtctcaatcagacatccgagtaaaaagttattgtcgtttgaattagctctgaggtttagaattcactttcgagcgtctcaatagattacgggactcaatcagacatccgagcaaaaagttattgtcgtttgaattagctcagagcttcaaaattcaatttcgagcgtctcgatgtattacgggactcaatcagacatccgagtaaaacgttattggcgtttgaatttgctgagagcttcaacattcaatttcgagcgtctcgatgtattaccg

SEQ ID NO: 117951 - DNA, 388 bp, Glycine max
cttttgttgtttctattttttacatggcactgtgttttttttattcctcccttaccttgcaaatgcagcatattttaattgagggatgtacttacttttccatttttttcccccttaaaaattgtaggtggtttatggcatataccaactgcgatgcatgtggaagattgtttacgaaagggaactactgtcctgtttgtttgaaggttagcatctcttcctaatcttccattcttgaatagtttccaaaatacaatacaaccctaccatcgttgatgcatgtacctagaacaatcttaaagggaatttctttctttctttgtgtgtgtatattaattttacaaggaacttatcttcagcattcttatttcatttatgatcttttgaa

SEQ ID NO: 117952 - DNA, 386 bp, Glycine max
tatacaaatatgattttccctatgtttgtttttcattttagaagtctaaaataaagttgactttttgtctagatctactataacttgtggtttttatcaagattatgaccaacctatttttaactcatccgatgaaatgtaggacttgacatttaaattttgagcacatattaaatttgagcctcaattttatagtagtatatattaaatttgatcacttcaactattccattaaatcatgcaatattgttctaataaccatatatcaaatttaacattatttaaacaataatatatatatatatatatatataaaataaattacttatattttatataacattaaatattaaaataaataatgtaatgatgatatattaattaat

SEQ ID NO: 117953 - DNA, 387 bp, Glycine max
tccatcaagtggtaatctgagcacaagatcttctttttgtgctccttaaacctccattaattttttgctttaccttctcttccattgttgtttcttcatttttctccatgtatctcctcacatgtcttgtgataaatgtttttaacatgattctttagagtttccaccgattaaacttgctatagaagctagatttgattttctatggttcaaatttcttgttcttgttcttgaaccatgaattgtgttgagtttaggttcctttgagttttgtcttgttattttttgtggctgaaacctaaaccataaaattcttacaaaaatattaaagtagaagaaaacctcaaaaatctatagtgacttgttcacctattgtagttttgtcat

SEQ ID NO: 117954 - DNA, 375 bp, Glycine max
cattccaaatacgttccttttttttatatctaataactaataatctgatcatatactacaacgtccctagcttaatttgaaaatagcgttacatatatatggcatcctcaaaccacatatggcatatactatttattttcatcttttacatgaagtatatctggaccgaaagatacacgggtgacgggtccaccccatcatgaaccatttattttttataatgttgaaagaattggcatatatagcagattaattttaattggtttgaccatgatcaaggtatctgaattttttgtacagaaggaatattttagtactgtcattgtcaagagattatttccgtaatgagaacttattccataaaacatccaatca

SEQ ID NO: 117955 - DNA, 382 bp, Glycine max
actcaagctgagagaggaaggtccacggtgatcttcctgctttctggcgttgaccacactatggtaccaggagatatgtcgcggggggcaggagaacttgaggaacgaaggtgtggtgctatgggcgcataccaagcttgaccaatgccgaccctacccgggcataatgggtctacgagaacctgggatgcacctaaaaaggcgaccgattgggactctacatagcaaaggatcagtgaccccaaaaaaaggaggcgtgtggtggctagccagctatgaacttgatagatgcgcgagatatagcctctggtaatgaatgaacaagggagggcaaacaattacgcggcgccacaatgaagacacgagactaatatggactgtg

SEQ ID NO: 117956 - DNA, 388 bp, Glycine max
gtcatgcatcacctgatcatttgctctttgcttgaaagcgagaatatatcctgttttttggtttgtaccctctctatcgccttacccgcttcaaacgtcaccgactgttgatcgggaattgtcacggcgaaccagcgatccttgaatttacgtgaaaactctaccatgccggaagcttgacgcatcgccggagtaatctacatcatcttgctgtgtttgactgccggttcgcacaaccaattcaccaaatatttttgaataggtcgtgaaaccggcgttacttttcagcatgcaaccgctggatggatcaaatttatgcacggtgtgggaagcgatatggtctttttatggcggttcattaccactaactatttcggtcatgatatgc

SEQ ID NO: 117957 - DNA, 394 bp, Glycine max
tacatttgccaaggaattttattaacagctaatttccatttccatggatgtatgctatatctaaaaaatatgaaattctgttggataacttcggatacttaaaaatgaaactaataattataagatacatgcctgcatggttaaaattttgggttacaagtgaaatacaaaatgattcctacatatatattattggatacccaaacaaattattcctatatattagggaagataaccactgtgaggaaacaaaactgttgtgttagcatgttaaattggaatttttattttgtctgtaaagaaatatatgtattaaaattaaaggacaaaacataaagatatttccatttattaacaagtgaaagagattgtgaatccttaatcacggattgga

SEQ ID NO: 117958 - DNA, 396 bp, Glycine max
tggttcgaggtacttacccgttgaagatcgaatttcgatgattaacgaatgaagaacgtcgaagaacggttgaaacctttgtgagattcctcacggaaaacgttactgaaacgtttcggaagcgcctcggctcagattttcttcacggaaacaatttttccaagcaaattcgaaagagagagaagtgccaaaggggctgcacccttttcttcttcacttcctcccctatttatagcaaaataggggaggtggttgccgcccagctcgcccaggcgagctcatctctcccatgcgagccaggttgcttcctacagaagcaaccgccttctggaggaatattctggagggcccaagtgggcctgggtgctatttgcacccccatttttactaagtaca

SEQ ID NO: 117959 - DNA, 420 bp, Glycine max
cttcagtaccttaaatctaagcttaaggcctctgcagcagcctcttcctcttcatcatctatgacaaaataaggattgtgagcctcacgcttgaacttgtatccagttaagacatataaagcaagtgtggccaactcatcatcaacaacactggtccaagaatagcgataggaggtaatagtctccaaggcataaacgacaaccctggtgaagtaaatgtaacagataacgacgacatagtagtgccggaagagagtaagcttcatcaaattaacagcagccttgccgtcggtcctagcggcctcactgaggttcttgatggaccatacaatggggaagagcacagcgcatcaacagacgacatcaacaaggaggaagatctgcttccaggtaacccagtcatggccaaatggcccactc

SEQ ID NO: 117960 - DNA, 389 bp, Glycine max
tttataacattgtagatggaccgctgcccatgttcatgtctctgttgaaagaatacatgtgaagggaaggttcgagaaatatctcgaattatatccaattcagaggcagatgtctcatatatgactagttgctgcaataggtataatgtctagtcaatgcaaactccaaaacatggaacagtagggtagtgaacctcaagataatttcaaaaagtaaaggaggaaacctcattatgaaaactggttaattcaaactatcaattctacatagattcttttaggaagacaactcctaactaggagaatttcattggagcagtcaaataaaatttgatcaaataatgtacacatccatattcaagatagtctttaagctatgtaataccatg

SEQ ID NO: 117961 - DNA, 392 bp, Glycine max
taacaaccctagaaatcaagtgatctttaattctcttatatatggggaagtaacgcacattttatctatatacaattgtttgttgcctgcctgaatcttgatttcaagtattgtattgtcatcatcaaaaaaggggagattgtatatgcaattgcttttgatgttttgatgatgatcatgatgatatgatgcaattaatgtaaatgggcttttcaagattaaattcaagacaatacttcaagattacaagtcacagcatcaagatgatcactagtatattaggaagggaattcctaattgaattatcaaaaggtttggccaagtaatttaaattaaaaagtgttttacaaaggttttactctctggtaatcgattaccaaaggatgtaatcg

SEQ ID NO: 117962 - DNA, 390 bp, Glycine max
gctggaaggatgcttcaatggaggaaaagtttgatggtgagaaagagagaggggggagcacgttattgaagaaataaaagagggagagaagtggaattttgaagtatgtctcacaagactctcatttatcaaagttacaacaagtgttacacatgcttctatttatagactaggtagcttccttgagaagctttcttgagaaaaattccttgagaaacttctttgagaaaacttccttgagaagctagagcttatctacacacccctctcataactaagctcacctccttgagaaacttccttaagaagattcctaaagaagctagagcttagcttcacacacctctctaatagctaagctcacctccttgagatgagaagctagagctt

SEQ ID NO: 117963 - DNA, 387 bp, Glycine max
ttggagtttccaagtgccaattcgtcctcttcttttgtccagtcttcttctggcttcaattcatcaatgggctttccttctgtgtccaacatcttgggatgttcccagcctttgatgacaactttccaaggtctgctatccaacgatttggagaaggccaccatccttgctttccagtattcatagttggttccatccagaattggtggtctgttcactggtcctccttctttctccatgttcatcagaatttatctccctagatctcactcaatgatttcgagtgcctgctctgataccaattgaaattctgataccaatgccagatgtcgtacaggatgtcacgacatcacgcttcagaacatgcagattatctctgagtgtatg

SEQ ID NO: 117964 - DNA, 392 bp, Glycine max
ttagtaagtgtagtttttcaccttctcgtcttttctatctgctggcttagcgagcgtctgctaagtgcaacactcctgggctaagcgtgaggaagactctggaagaagatgagttgtacaggtttgctaagcgcatcacttcatctcactaagcgcaccgcttcagttcatccgctaagcgagaaaggcgcgctaagacaaaaatcactaacatgcgctaagcggtccataagtgcactaagcgcacgagcacgaacaaggtcacctatttaagcctaaaatcagattttagaaagagattttgaactgggattcagagctttgcatgtataaggtttctagagagacaaaggtccaagttctagagagttttgagagattttgttgtgtga

SEQ ID NO: 117965 - DNA, 393 bp, Glycine max
tgagcttatctacacacacctctctaatatcttttctctcccccatgccaaaaatacatgaaattacaaaaaagtccctactacaaagactacccaaaatgccctgaaatacaatgctaaaaccctatgctacaagaatggccaaaatacaaggcccaaaagaaggaaaaacctattctaatatttacaaagataagcgggctcatacttagcccatgggcccaaaatctatcctaaggctcatgagaatcctagggccttcccttggatatctggcccaatttaattggagtcttctatccaatgcccttacgaggtaggattgcatcattccctccaccttggaaaggatttgacctcatatcccgaggttcttcatactctgggctcctt

SEQ ID NO: 117966 - DNA, 413 bp, Glycine max
tcagtgaacttaaatactcagcttctcaggaagttgtcttaagaaagcttttcattgtagctacctactctataaatagaagcatgtgtaacacttgttgtaactctgatgaatgaaagtcttatgagacacacttcaaagttccacttctctccctcttttattccttcaatttcgtgctcctcccttctctctttcttttcctccattgaagcatcatctctaagcttcttatgaaaggctcatcttggtggtgaagctccttcttccatggcttattccttaatggatggcgcctcctctcacctcttttcctttgtcttccgttgcatctccatggtggaaaatcaccattaaaagaccccattgaagctcatagatccagcctccatagaagccccacaagcaagctt

SEQ ID NO: 117967 - DNA, 394 bp, Glycine max
  unsure (1)..(394): unsure at all n locations
tgtacagcgctaggcaatcaattcatgagactccttataatttttanggggaggatagacaaacagtgcttgtcaatcaactcgcggggctacagattaaattttagggtggaggaatcacgaatagcgctatgtgtcataccctaatttcctcccgggacctttgcttgatgacatgctaacttcgcttggtccctgtgaagagcttggcacccatcattacgcaatttgtgaaattacaggacatgccgaaaaacaaaagaaaatattgatgcacaatccgtgtggttccgtgacacaccgaatatcaaatggaagcatcgttgcataattagtgacgttccgtaacattccgtcagtcaaaaaggggatgattatgtaatccgcatggttc

SEQ ID NO: 117968 - DNA, 394 bp, Glycine max
tctcgaaggacccgagaagttttttcacaatagtttctttcttacttcacactggtttgtttcaaacatggaatttatttttacctaaaaaagtcattggttcacatatatgttccttttctttgcttgcttatgattttgggtgtttatacatcggtttggttatattttttttttgtttaacaacaaaaacccttttcctgtcaaagtttttcttttttttcttttgtatgatgaaatgcactaccttgttgatttgttgtgtttcatttttttgtgtctttttctgttcttattttaattgatgtttcatgaaacatttaaatatttctttttttaaggtttaacaaaatgtcatatggtattataatgttcagtttagtggcataacaaa

SEQ ID NO: 117969 - DNA, 382 bp, Glycine max
  unsure (1)..(382): unsure at all n locations
cccaccattttgcacaatagttctcttgttatatgnctactatcatagatgttatttatttcttcattattgaggaaaacacttgggctgatggatccctacacctttaagcgtattctttgaaagatatgcgcccccctttttgcgcatgttgtataattgcatcatatccgaagccattatactgacactgcctaacaaaggaaaccattatgtccttccaagaatggactcgggaaggttccaagttagtataccaagttacagctaccccagtaagactttcttggaaggaatgtatcaacaattcctcatcttttgcgtatgcccccatctttcgacaatacatctttatatggatcttggggcaatgtaacccctt

SEQ ID NO: 117970 - DNA, 400 bp, Glycine max
  unsure (1)..(400): unsure at all n locations
tctttcaatctacttttgnacatctccaaattttctatgcagctgntgctgngaagactctgttgtaccaaataaaatgaagtatcatgtggaatatatcatacttgacagggctcttgttgtgccaaaagaaatgctgctgcacctttctcaccatcatctgcatttgaagatacctctttcgagggatggaaaggagtatattcttcagatttggaatatccttctccaagacaaaaacagcatatgattcccaattcaacatctcaaaaaatggaggcacaaagttatccgataaaataactgggacacattcatataagatggcctccacaactcttggactattgacttcatagccctttgcgcaaatacagtacttgctgctcttcatgtactg

SEQ ID NO: 117971 - DNA, 402 bp, Glycine max
tctcagctggattcctttagtagggaatctatccttcctatatggtgtccaacccagtcaccctcattaagaactagctcttttcttcctctattgcctttaattgaatacacctttgtttggttctctatttggttcttaaccctctcatgcatcttctttacaaattctgacctagattccctttctttatgtataaaaagaatgtccagtgggaggggaatgaggtctaacggtgttaggggattgaacccatagacaacctcaaaaggggactgcttggtggttctatgaacccccctgttgtatgaaaattctacatgaagaagatactcatcccaagacttatggttgcctttcagaagagcccttcaaagggtggataaaaacctattcactacc

SEQ ID NO: 117972 - DNA, 381 bp, Glycine max
tataacaataaacttggccttctttaattttttttggcttggcgaccacgatcaacatagtactttcggcacctactatatgttgacttgaccaacgctgttattggaatgctgcgacaatctttcaacaccttattcacacattctgatagggtggttgtcatgtgaccatatcgtcgtgcagatgtatcgtatgccatgctccatttttcctttgaaatgcgatcaatccatcttgctatggctggactcagttgacgaaatctttctaagttttgatcaaacacatgcttgcaaggagtgtacactgcatcaaatttgttatcatgaaaagttatacgtagacatcaaagtcaaattaaattaatggataaaataaac

SEQ ID NO: 117973 - DNA, 392 bp, Glycine max
tgtatgattatggggtacccatcacatgtggttctatgtggcggtcgggcgatggtgcacaacaagttttacacatccacaatgcgcgcattaacccaccatcccctgttgcccacctccaactgagctcgcatactcccacatagcccatatcctcgtttatctcaacaccgggtccccatcaatcctcccaagcttgcacaacatgcaagctaaacaacattcaaacagctcaagctatcacagcctagcaaaaatagagcaaaggcagaaaactctgctcaaacaccaaccaaaatcacagcttttctcacttaaagacccagtaacaattccttcgatccaattcgttaaccgttggatcgactccaaaattttactggaagtctata

SEQ ID NO: 117974 - DNA, 407 bp, Glycine max
gactcttataatactcaagcttatgagccatgtttctgcgctcatagtgtgatcttcgttcaagtgaagaagcagaatatctattggagcttgcttccgaaattcgcccacccccacttttatgggcatctatattggaccgaccttctgaagcatatatctctgacttataagtgttataatttatgtcaccaaagtcttctttgtagtctctgctatttctttgtctatgttggtgatcgggtgatctttacctgcattttctgtgctcaccattgccttctttgtaatctctgccatctctttgtctctgtaggcgattgggtgatctttccctgtgtatgctgtactcaccagtgtcttctttgtaacctctgacatttctctgtctctactagtgattgggt

SEQ ID NO: 117975 - DNA, 391 bp, Glycine max
tgtcccgcaagcctctccaacatctggtccatgttatgcaaaagaaaatgatctttccttgtggcttcattgagcttgcggtaattgacgcatattctccaaccaatgatagtcttcgttgggattaagtcattcttgtcattccgaatgattgccataccccctttatttggtaccacctggactatgcttacctaagcactgttggaaatggggtagataagcccaacctctataagcttgagcacctctttcctcacctcttccttcattgatgggttaagccttctctggggctgcctgactggtctatagtcttcttccatcattatcttgtgtatacagtaggcagggttgattcctttaagatctgatatgtgccatccaattg

SEQ ID NO: 117976 - DNA, 351 bp, Glycine max
tggggatcatccaatggctgcatctgacttcccaagagtcttctcaccatccgctatcatgttgcatagcttgctcctcgagctcttattccacctcttctccttcactgatttcatattcactggtgatttctccatctaccttcatgatcatagtcctcctagctggacagctaaaagcaatatgtcctctgcctaagcaattgaagcatctatgtttttggtattgatgttggatgatgaggcaaaattatgcttggttccatcactgaacactgctgactttccatgtggattggacgagatgtctccctccttcttggatcatgtggtccagttctaattgaaatt

SEQ ID NO: 117977 - DNA, 380 bp, Glycine max
gcttccattgtttccatgttatagctttttgtgtcttaatattagaagggtgagtgccccaccttatcttctatggaagatttcttctcaacttccaaggaagctaccttacttgcttctcaaggaagcttcctatgtgctaagctataaatagaaacatgtgtaacacttgtcataactttgatgaatgagaaacttgtgagaaacacttcaaaattcaacttttctccctaatctccttcaattcccatgcctatctctctctcgttctattcctccattgaaactgcctctctaagaatcttatccaaggcactctatcggtggtgaagcttatcctttcatggcatattctctagtggatgacgccacctctcacc

SEQ ID NO: 117978 - DNA, 398 bp, Glycine max
tctctacacctcatttttctccccctttggcatcatcataattccttagtacgtgggaatcaaaacagatataattatgaagtggacaaagatcaattataaactataagtcataaccaaccaaaatcattaataatacatatccaaaagtgaatccaatcagttcaaaattgaaaaacacatagaatcaaagcataaaagtctaaaatccaaatactgaaagataaataaagtactgaaaacaataatctaaatatcatagccaaaatacacggcttataagaaacaaggaattataaactaaattctaagaagaatgaggcggtggtggaagatcgaaactctgacgaatgtaacccacatcttcttcaagctgtgtgagacggatatccattccg

SEQ ID NO: 117979 - DNA, 407 bp, Glycine max
ggaccctaaaactcagctttatagtgcgggtctgggagacgaaggtcaagtggtcgctttatgtaaagatgatgttccaagaactctggatttggtccgaccatgccctcctgatttccagctgggaaattggcgagtggaggaacgccccggcatttacgcaacgagcataatgtaaacctttacggttttaaaagctctatagttgggcctaggctttaaagttttcattttgttaaggctttgtgtcttttgtctttgaatttataatacaaggatctttcttcatctgttcctggtctctacccattctcattcatttgcatgtttacttctttttctaaaacggcagattcgatgacgagtcccccgaaggtactaatacctgggacccgtctatcaacttc

SEQ ID NO: 117980 - DNA, 400 bp, Glycine max
cgtagagttatgtctcgtattggtttaatcgattattttcttatcgtaatcaattacacagttgtttttaagataatgattgatttatttaggagtctctactttaattgattaccatgtgttataatcgattacttctctttctataagtgtttcaaaagtgaacaagaatactttaatcgattacattgttcttgagctgtttctaggttttgggaagaacactttagtcgattaaaaagataatctaatcgattacttcattgaattaatcaattaccttgtaaatttaatcaattataggcggttataactattttctctataaataaccaacttgtgttctcttcatagtacaacgaaataagcttctgaatgagctaagatcatgtgttgttat

SEQ ID NO: 117981 - DNA, 400 bp, Glycine max
tcctcagatccctcttgttggactagactttttacctttctacattattggaacaacatacttaaaaccaaaactttatctgcagatccctcttgtaagactaagtttcaattctgcttcattcaagttctaaggaaacaatacatttcccaatgttaaaatcacctaactaggcacacaaatggttgatcagaccaagagcatacaaaacttaagcactggaagaagcattgaacacaagaaacaaaatcaattagatatgaaaataattacatcgactgctcattagaaatccccaacaagggtatttatccaaccattacagacgaaaccctaacaataataagcttacaatacctatgaattttattgatatgatggtcaaagtaaatacaagaat

SEQ ID NO: 117982 - DNA, 387 bp, Glycine max
tgcccagagaaggagtccacagaggaaattctttctccctcaaaagactggaaagcggtttctaatgactcctctacggcttccacataatgcgtagaggatgggcagctcaccaagatgtcttcctcgcctgatacgatgaccagatgcccttccactacgaatttcaacttttggtggagtgttgagggaacaactcctactgagtggatccacgggcgccccaacagacagctgtagggagggttaatatccattatttggaaagtaactagacaggtgtgagggcctatctgtactgggagatcgatctctcccctaacctctcggcgggtaccgtctaatgcacgaaccaccattgaactcggctttaagtgggaggcattg

SEQ ID NO: 117983 - DNA, 393 bp, Glycine max
tgccgtacagctcgcccaggcgagctaggtttcttcctccagaagcaacaaccttctggaggaatcttctggaaggcccaagtgtgcctggttgctattttcaccccccttattactaaatgcacccccttctatttcttggtaattctttttacataacgttacgaaacttcacgaatttagtaatgatgctcatttttcttccgcaatgttacgaatccttacggattatgtatttactctttgttagctttcgaagaagttacgaaaacttacggattgcgcaaaaacacctcttttctacttccgccacattactgaatttcacggatcgcgcatgcctgcttacttttgatttgtgagacgtctcaggacttcatttattgtgcaaca

SEQ ID NO: 117984 - DNA, 390 bp, Glycine max
  unsure (1)..(390): unsure at all n locations
taatgcaggttagtttcgaagaatntgtcttgtttgtcttgnattatatatgcctaagatcaaagagtttgacaatgttgtattacatatgtgcaaaaggtaaagcataacattaacagaaacagttacacacactatactgaatagtccaacacaccttaatttggacttgtggcctatatgtcaataaggttggtgcgtgaagcttataacatgcttaagtttcgaagaatctgacaagggtgtcttttgttatatatatctgttgttattgttgtgaggagacaatgcttatgacttaaatacgctgagttgaccttgagagttaaatgaaattgaagaaatcatataggttattttaattacgtctaataaatattcagtcttttg

SEQ ID NO: 117985 - DNA, 388 bp, Glycine max
  unsure (1)..(388): unsure at all n locations
ctgagaggggggagaanncttgcataccttttatttattaaaaaganagcggcggcttttatccaccactatattaaatcaattattccaaaattgtaatgataatagaatgttaatgtctatgatgaaaatcaaaaaaaagaaaaaatgaagcattttataaactcaatggaccagagtaaaagtcttaaaccctaatgtacctgagtgaaacacctacgagcatgatatgctaaaagtaatcttaaacctaaaatatataattattcttacgaagcttatattattgactaactaattactcgctttgctgtttttttccgaaatattattaataaatatgagacccgaaagcgatccaatattatcgtcctggtgacaaaaaatc

SEQ ID NO: 117986 - DNA, 384 bp, Glycine max
  unsure (1)..(384): unsure at all n locations
ntacatgtctagggtttctagagagagtattttgttctgttgcagagagttttgagagatttggttgtgtgaagatctgcagcgaccagagcttgttgcacgagccggtttgaaagattgagatgagtttgtgagtgattgtgagatcctacaggtaaaggagacatccttgtcacttgtacttttgcaatctttcatcttgttcttctctttgttgtaaagaaagcttcctggtatggaaagctaaatcctctgttggatcttccctgtaggtacccgatgtaaatatatttctatctatttaatgatgttttggtgttctctgtgctatctgtttttcactccagtatgcctctaccttgatcacatatatgcatgctttct

SEQ ID NO: 117987 - DNA, 231 bp, Glycine max
ccatggatggccattcgaatacaattgccaaagctcgcccttctacataatcgtaggtgccttttttagcaagattattcatgcttaagcaagacattttagggtgagtttaagtcctccatcactctaattggagatttatcatgctttatcacgatgccacacttctgcgaagttaagggcgcacccatctgataaatccacacatctcatgagggaatttggggcttc

SEQ ID NO: 117988 - DNA, 410 bp, Glycine max
attaatgctcaagctttaaaaatatataatcatacggcgtgcatttctctttgttcactaattcaaacattacataaactgcaacatagtggaaagaaattaaatttgcatgaaaaactacaatttagtaatactaattattcattgaaacatagtgcgaccgagacacatcatcttccatttccattacctatttactaaaaatagcttaaatgtcgatcggcccaaatagttgtcagtagctatactatactaataccatttacacatcatcgctagtttttagctcaataaattgaaatttgataactttatctaaatactcatagcgggttgggagacgaaaaaacaaatgcactattgtcatgattcatgaatacgataagggggaatcccatgatgtgccacct

SEQ ID NO: 117989 - DNA, 336 bp, Glycine max; identical to SEQ ID NO: 117935
  unsure (1)..(336): unsure at all n locations

SEQ ID NO: 117990 - DNA, 397 bp, Glycine max
tattcaaatattccgattaagcatatgtatagtttgtttttttttaaataataatgagttgattagaattgtatcaaaaaaggaaaacatgtaatttctattttaaaaatgttaaagttaatatacactaaattgaatgaaaaaaatatattcttaccattatttaaacaactttcacataacttcaaaaacttaactgctagaataccttgatcaacaactagcttgcccgatatgttcaacaacattatcatacgtcattaacaaattaaatcactagaacacatataagggtaagctccctttactcaatgatgtctctcaagctagatgattaaaaatgaaggtgatgggaatgagctccaagttctacacgaattttgcagcatcaactctg

SEQ ID NO: 117991 - DNA, 392 bp, Glycine max
tcatcagatgttgcatttcggaatcagcaaaccttttgatgtttgatatgcacaccttgcattgaaaagttgctttatcgaggtgcaactgaaggcattgtgttccttcaacgttagcaaggtgttttttggattcaccatcgactttgccatatcaataataatgttcttttcatccttagtcaatcgcccagcgtatgaatgtccaactaaagactgggccaattcatgatggtgaatcccacatataaacttcaccatacaaccttcccctccatgcactggttttccattaagcctgaatggacaaccacatttcttactcccaatgtcttttcttacgaattctttattcctacacttgtacgtaccaatcctttcactcccaatta

SEQ ID NO: 117992 - DNA, 332 bp, Glycine max
  unsure (1)..(332): unsure at all n locations
ttangaattttttattatttactttggggcctggagactttaaaaattatgctgacattcattgagctccttattggggttgtggatattgtgggtgtagctcgctacatcattaaagggtattccgccactggtgtgttatttgtccgcggcctgttattgctgattatcaatgccattatggggcacaaattgttaccgtccatccaggcttcaacatgctacagcgccacagatatcgttgaatacgttaaaatattactaatgagccgcggcggcgacctcggcatgatgataatgatgctgtgtggatttgccgcttacatgaccca

SEQ ID NO: 117993 - DNA, 389 bp, Glycine max
ataataagaaatgaagtcgaaaaccttgagtcggatttttctcaggaagcatccagcccatggatagttaagaacgagctgtgggcaaatggtccccaaaatgggaaggaccgctaaaataactcagatctattcgactggtgcttatgaattataggaatgaacccctcagaaacgcactttgagtataaatggtaaatatttgaaaaaatataaaccaacattgctggaagttaatatatgcatagaacagacagaaataatggaaacataaaaatggcgatgacagtaaaagtgccacaaaagggcatgtgtcaatatctacatcaaaagtagaatcgtaatacacaattcggaataaagaaattatcaattctactaatgcagga

SEQ ID NO: 117994 - DNA, 393 bp, Glycine max
tcagagtttcttccttaaaggttagtttcgacttttaattttaaagatgaaaaatactagcgacacattctattcttaacacactctagttagctaaaatctattataaatcactaattttgggggatcgaatttaccaaaataaataatttttaatacattttaatcaattacaaagaaaattataagatctatttttctcttctttttcttttactatggtgtttggtaattttgtaaattatgatgttttgttttgtaaggatggagaagagtgaagaagaacctttgagacctacttcgccttggatgccattcccaactctgatttctgcgctttccaatgttttgcctccatgtgatattgccctcatctacaagttctacaaagat

SEQ ID NO: 117995 - DNA, 384 bp, Glycine max
ttgcatcagacaaagatgatggcatatccatttttggatatgttttcactttaaatggtggtgcagtaagttggaaaagttccaagcaagctacggtagcagattcaactactgaagcagaatatatagcggcaagtgaagccgctaaagaagttgtttggattaaaaagttcatatttgaacttggtgtggttccttcaatagaagagtcggtcccattattgtgcgacaataatggggctattgctcaagcaaaggaaccaagatcacaccagaagtccaaacatattttgcgaaggtatcacttgattagagataatagaacgtggtgatgttaagattgaaaaggtagatggaaagaagaatgtagcagatcccttcacc

SEQ ID NO: 117996 - DNA, 393 bp, Glycine max
tccactgcttgctttgccttgatcacagtgtcttttccatctcctggcacggaaatattatactcggcatccttctctgtgtccccatttggcgaagagatgaatacggatgcattacaatggcttcaccatcaaaactattttttcgctaatatattatctgagtaagaaaaagaaaattattaaataaaagtgaaaccctaattaagttagagcatctccaatggaaggtgctttcataattttcttaagctaaaaaacgacttcttgtgagttcttctgcattggagtataatgatgtgacaaaataggttcctttattactaaaaatagcttcttatataaaaaactctaatgtttgaattgtttacggctttttatgattctttgcat

SEQ ID NO: 117997 - DNA, 394 bp, Glycine max
tgtaggattatggggtacccatcacatgtggtactttgtggtggtcgggcgatggtgcaaaacaagatctccacatccacaaatcacgtacaaacccaccatcccctgttgcccacctccaactgaactcacgtactcccacgtagcccttatactcgttcctctcaacgccgagtccccatcactcctcccaagcttgcacaacatccaagtaattcaacatccactcatcacaaactaacaaaaccaagcaaaacagggcaaaggcagaaaactctgcctaaaactcaaaccaaacatcacagctttttctcacttaaagaccccagtaacatttccttcgttccaatttgttcaccgttggatcgacttgaaaattttactggaagtccct

SEQ ID NO: 117998 - DNA, 384 bp, Glycine max
tcaaactttaccactggtaatctatttcttgtaattggtaatcgattaccagagagtaaatactctagtgacttaaaaaaatttgggaaaacttttcttgtaaaacaaaattgtgctatgtttggtttttgaaaaatatttttcaatacttcccatgtgaagtcttgacttgttgctttttggtttcttctattgaatcttgaattcatcttctcttgaatcttgattcttcttgatgtcttttctttaatcttgatcttgaacttgttgactcaatcttgaaatcattcttttgggctttttgtcatcatcaaaactacttgaatcatacttgattcatcaacatgaagcttgattctacaatctctccctttatgatgatga

SEQ ID NO: 117999 - DNA, 394 bp, Glycine max
tatgctgcatatatttacaatagacctcctcattctcttcagcaaaatcaaccgcagcagaacaattatgacctctcctgcaacagatacaaccctggatggaggaatcaccttaatctcagatggtctagccctcagcaacaacaacagcagcctgctccttccttccaaaatgttgctggcccaagcagaccatacattcctccaccaatccaacaacagcaacagccccagaaacagccaacagttgaggctcctccacaaccttccctcgaagaacttgtgaagtaaatgactatgcagaacatgcagtttcaacaagagaccagagcctccattcatagcttaaccaatcagatgggacaattggctacacaattgaatcaacaacagt

SEQ ID NO: 118000 - DNA, 395 bp, Glycine max
taaggtactagaatgggcatagataaacccaactttattaattgcccttctaattgtcttcctaatcaagggaagcttcccaatatcttcaagcatcaaatcaatacaatgagctgcacaaggagtccaataaatatgtttccttttgtcctctaacaacttaccccctaaaacataattgctcccattatcagttacaacttgaacaatgttctcttcttcaacttcctccacaatagcatcaagcaactcataaagcttttcacctgtctttacaaaatcagagccatcaacagatttcaaaaacattgtaccaacttgaaagttaattaaaaaattaatgatgcatctttgtttccgatcagttcatgcatcagacataatagtacaacatt

SEQ ID NO: 118001 - DNA, 398 bp, Glycine max
tgtatagtttgcattgccatctataacttgcttttctcataacaaatttctcccctttaccaagaaacaatattaattgtttttttacttcttgggaagatcagttggctaataagctaagattgccgtcgtggcaggtgtttctgtggtttcagaacctcatggctcgagaagaaccaggtgtgcctgatatttattttatgtcatgatttatgaaatctatatccttccactatctcatgaggtgttttagtttagccttatttaaattggaacattcagctgataactgatgactaatggtgatgaccttatggcacttgttggctgcgccattaataaaaaagtttacaaggggccagtaaaataatagtgaagaaatagaaataaaaataaaa

SEQ ID NO: 118002 - DNA, 386 bp, Glycine max
gatactaagccccatcgtgcgggtctgggagacgaacgtcaagtgtttgttttgtgtgaagaagacgatccaaggacttcggatttggtccgaccatgccctcctgatttccagctgggaaattggcgagtggaggaacgccccggcatttacgcaacaagcataatgtaaacctttacggttttaaaagctctatagttgggcctacgctttagagatctcattttgttaaggctttgtgtcttttgttattgaatttataatacaaggatctttcttcatctgttcctggactctacccatactcattcatttgcatgtttactgccttttctgaaacggcagatccgatgacgagtcccccgaaggtactaatacctgagacc

SEQ ID NO: 118003 - DNA, 396 bp, Glycine max
ctgagacgcatttgatcttttggcatcatcaaatcatcttcttgatcctttgtctacatgcattgcattgttgcatacaaagcctgcatttattgcatttcaagataaaggttgcatgcatctgcatcccaaaaatcatggtcatattaagtgcatagatttctctttgtatgccaatttcccaaaactaatatcctaatcttagagtttaggataagagaccctctcaaagagtcaacctcttgctttctcacaaggttaagcccttcggtactagtacctattggcttatttcataggacttaaagccctcgcaattatcttatcaaagactatcacagtcttctttgcctcgagactatcaagtccgttggtgtgtagagacaatcaaggtca

SEQ ID NO: 118004 - DNA, 387 bp, Glycine max
attatttactctggggcctgtttacttttaaaattatgccgacattcattgagctccttattggggttgtgggtattgtgggtgtagctcgctacatcattaaaaggtgttcccccaccggtgtgttatttgtcggtggcccgtcattgctgattatcactgccactattgggcgcaaaatgtttccgtccaaccaagctttgtcaagcttcaaacccaccgatatctttgaataccttaaaatattacttatgaaccccggcggcgaacctcggatgatgaaaatgatgctgagtggatttgccgctttcatgacccatatcggcgcgaatgatttggtggtcaaaccggcgacaaaaccattccaatatattaacccccctaccc

SEQ ID NO: 118005 - DNA, 81 bp, Glycine max
ttttttttttttccccccaccccgacgacacctgacatacaccctccttgggcgagggggagtgtgacggcccatattctt

SEQ ID NO: 118006 - DNA, 402 bp, Glycine max
taagcacctgcggcatgcaagcttatgcctgttttatcataattctgttttttaacatcctatcaaaacccaattattaaacttgaaagaaatatatatatttgtcgaggggcagtgtgatggcccatattcttttgtattacctttctttaattttgtatttgtctttcactttcatattttttagtatgacgataactacaaggttttgattcttttgaatttataacttcacaacctatccaagttcctcacgaaaaacgaagtttgctccacacaaaattttcctttggaaaaacggaagttgtatcgtggtttttttttttttttaaaaaaaaaaagtgttaaatgcctttttaaatataaaacaaacaagctattagtattcgctacaaatcaata

SEQ ID NO: 118007 - DNA, 380 bp, Glycine max
  unsure (1)..(380): unsure at all n locations
agcttatttctttccttgataaagatttnatgnctcttgtcagcattcataggctcgnaacctagaccaaacctcccatggttttcagcaaactttaccaagcctatcgtgccatcactgttcgggcacaaacctatttcgagctcataaccatctcttaacataactcgggccaccatgaaagaagcacctgataaacatggttgtaccggaggagactccatgtaagcactgctcataatttctagtgcttgaaaagatgttttcaatgactcttccacagcttccacataaggtgtagaagacggacaactcactagtatgtcctcctcccctgacactataaccagctgaccttccactacaaactttaatttctg

SEQ ID NO: 118008 - DNA, 328 bp, Glycine max
aatcaggaagcatcaacaagaatcaagccaaggcttttgtgcaagcaatcaatggggcaaaacacattatgatgatggatggctcaaattctcacaaaggtaaactcatcactttcaaattgagctttcaaaactatcatgacatgtagaggagaatcaaggatttcaagtcacaaaatgttaagaacttttatttttaaaacaattacccatttcttgaacatatcctataattcaaagaaaaacatgcgaaagtcgtcatgcacacaaaattgacccaaaatattaaactaaaaattcgacgaaactaacaacattaacaaattac

SEQ ID NO: 118009 - DNA, 361 bp, Glycine max
  unsure (1)..(361): unsure at all n locations
ctgcagctcccatttctgtgggctttattatttttggaacaaggncgccaattctactataatcatgcttttccccataagtagccgaaatggtatttcgttggttgtggactatggcatacatagagtccccccatataacttttggtaactcctcgacccatttttccttggttaataaaggttctttctcaatttaactaaaatgactttgttgtttgctttgacttgtcaatagggttgggggtgtcctactgatgtgaatcacttgatcaatccccacaccttttataaaaaatttcaaactttctatctaatgaaaagaaggttggcctccagctatacctgtgtgagggatgtt

SEQ ID NO: 118010 - DNA, 383 bp, Glycine max
  unsure (1)..(383): unsure at all n locations
cgcagctgcagctggtttgggcaaattcttanttttgtccccaagggcgccggaccctcgcgacatatcttaaagtactcactctggggtcaacaaataaaagtaggaagactgactcttccacgctttcttacaccaagcttattggattatggggcacccctcacatgtggtactaagtggcgatcgagtgatggcgcaaaacaaatattctcctttcacatgcccaggcattagcataccatcccccgttgcccacctttaaatttagctcacgtacacacacgcagccctctcctcgtttctcttatcaccgggaccccataaacctctccaagcttttacaatatccaaaccattcaattccatttttcatgaaacta

SEQ ID NO: 118011 - DNA, 341 bp, Glycine max
tgcctaccggaagagcgagtgaaatatattacatgtgcatcaagggtttctatgcttagcctataaataagaatctcttgtaagcttccaaggcagaatatttagatcaatcaaattaagtgtttctttattgtgagaacttctcctttgtttttgggtttaataagtcacggtagggtcacacttcttttgataactttggttctaccggcagatcgcagttagggtaaagttcctctcactatccttcacctgtttttaagacgaccggtaagtaaattcatatcactcatacttttgcaaggtcatgtcggaccaccctgactactacaatgtctcct

SEQ ID NO: 118012 - DNA, 262 bp, Glycine max
taactttttgttaggattgcggtttacttgatttatctattcttttgaaagaaaaaaattatttttttaattgaataatatgtttaaaaaacttataataattatttatgcccccaccctccaaaaggaaataccttaatagatgttccaatgcttatcttataagctaaaaaaataacagcttgtgaaaaaaaacacctactataaattacatttttaatcacttaaatggacctttatagtcttgtccatatcatatttt

SEQ ID NO: 118013 - DNA, 366 bp, Glycine max
agcttcaaccaaggggagattgactatttttttgctagaaagaatcaatgacaatgcttacaaagttgagctgcccggtgagtataatgttagttccaccttcaatgtctctgatttatctctttttgatgcagaaggagaatccgatttgaggacaaatccttctcaagagggagagaatgatgaggacatgaccaagagcaagggcaaggatccacttgaaggacttggaggacctatgacaagggctagagcaaggaaatccaaggaagctcttcaacaagtgctgtccatactgtttgaatacaagcccaagtttcaaggagaaaagtccaaggttgtgagttgtatcatggcccaaatgga

SEQ ID NO: 118014 - DNA, 288 bp, Glycine max
  unsure (1)..(288): unsure at all n locations
atctctaagccactgccgcatcaactctaactttgtaaaaaaataactcttatacacttgttgaacaagtggcctcatatatcttaaaaaaggggggggggttgcatncananatcacaatcttctttgcacaacctctgataccacttcctgaacaaactccttataccacttccttaaccaaatgccctcatatatcttcgataaacttctaacacagttttaataccccattctacaaacttccttcccctaccttcatttccccaacaaactctttttctccac

SEQ ID NO: 118015 - DNA, 367 bp, Glycine max
  unsure (1)..(367): unsure at all n locations
agcttaattntattttacaatcaatttatggcatgcagactgcaggaattctggtctctatcaacagtatgtgggcaaaggtcaagtccaagtatttaaggtacgcatatagatattcactaaggagatattattcctttattaatgcttatttttctggtaaatttattaaccgctgttttattctgccaatttaattattggatgtctccaaacggtagcagtgaatgtgaaaaaaaactgaaaattaaactgcgtgcaaaaaaaaataaaaataaaagagaatgctaatcaagacagtgattaagatataaatacagaaaaaatagtagcatttaaccaatttaatatatttttattaataatt

SEQ ID NO: 118016 - DNA, 384 bp, Glycine max
agcttcttatccaaagctcatcttggtggttaagctcattcttccatggcttattccttagtggatggcgcctcctctcacctcttctcctttgtcttccgctgcatctccatggtggaaaatcaccattaaaggacctcatttgaagctcaaagatccagcctccatagaagccccacaagcaaggttccatcagcaggtactactatctgaattcgatatcgtgtacgtcacccaaaaggcggtaaagggaagcgccttggtagattatttggcccagcaacccctccaggattatcggccgatgcaccctgagttcccagatgaagatatcatggccctgttcgaagagaagcggacgcacgaggacataaacaaatggat

SEQ ID NO: 118017 - DNA, 384 bp, Glycine max
  unsure (1)..(384): unsure at all n locations
agcttgtcatcactgatgattgaatattttatngaattatggtaccattatatcgtattctgatattttctgttacattcatagcctgaacatattgaccaccgttatacataaagggaataccaagttttggtgtacacatgttatcccattttacccttataactacctttataaaatatctttttaacccctgcaactgcactcttcaaacaacccatagcaaccgttacatctcgcaaaccgcccattattatttaacttctattatccttttcttttaaattttttaaagattacacaggcatggagtgcctgttttgtcccagtcttaataaaatagattcatataacagtctatggatgtcttaaaattcaccatga

SEQ ID NO: 118018 - DNA, 335 bp, Glycine max
gcagctaataataatcatgacttttttttcttttctcatggcactgaagaatcatgatgtcatcactccatttggctgcgaagagaacatcctggatcaatggatataccaaaagatcagtgggagtaagatttgctttcttgtgttatatgtggatgacatttagcttgcaaccaacgataaaggtttgctatatgaggagaaacaatttctcttgaagaactttgatatgaaggatatgggtgaggcatcttatgtcgttggcattaatatccataaggaaagatctccccgcattctgggtttgtctcaaaagacttataataacaaagttt

SEQ ID NO: 118019 - DNA, 245 bp, Glycine max
cttttacagacttagttggacatctgttgactatgtaaacagcagtgtagactgcttcaacccaaaatgtgttaggtagtcccttctccttgagcatcgatcttgccatctccataactatgcgattctttctttcggacactccattttgttgaggagaatatgcgactgtgagttgtctccgacactccatttttgtgaagacagtccaccctttgccgcgaacaacttttagggcttggatc

SEQ ID NO: 118020 - DNA, 362 bp, Glycine max
  unsure (1)..(362): unsure at all n locations
gcttcaagctgacagagagtagagttgtttttattatctcacttgaagctgggagttttcattgataattntttcattcgttcaagcttccttactcgagaatgtctctgaaattactggtttttttaccatatactcgatctgaaatttctgcttaaatgtatgtttttatgaaaatttgttaaggtgctaattacaaggattaagcaatatatagtttaagtgcaaggttctaaggccagagtattattttgaaacaataactgttttctcaggactgccttttaaatagtgtagtaccttatacctatgtgagttttcattgataattttttcattcgttcaagcttccctactcgaaa

SEQ ID NO: 118021 - DNA, 401 bp, Glycine max
gcgatcctaagcgaccgcggctgcagcttaacctcatcggcttttcatactttatatttgggagccaatccaatccttgtgttcggactctcacccacttacgatagccgctgatgatcccattactgcttcccctaagctctctgtcctttgttcacgccgcatcccatgccttgcgaactccttggagtaccctcgcgttgtggtcactgaaagctcgtgcgatgaaaggcgtgatgctttcgtctgatggcactcctctcgtgggacatccttcgcatgaagatagaatcctgattcttccttccttctagcgagggaaccatttaacagacgcccctccatgctagccaagagttggtgcacaacaaacaattcttgcgccgctcttttcacatccc

SEQ ID NO: 118022 - DNA, 376 bp, Glycine max
agcttagtaatctttagcttgtggttattttttttaatatattaagatataatatcctaaattattctttaggattagttttcctatgtcccattatctcttaggattggtgaccatatttctttatctcatgatttgtttccctaattgattaggaaaatgattagtataaataagttttatatacacatgaatacaaatacattctacaacatctgattacaaagcatttgcagcctaatgattgctctagctcttcaaataaataatcaacagtgagcaaagagaaataaaagagtgagaataagatgaatgactaatggggaatgttgaggggaacataaaaataagatgaagagagtgaaaggaacctgat

SEQ ID NO: 118023 - DNA, 249 bp, Glycine max
  unsure (1)..(249): unsure at all n locations
gtcccancatctctaaggattggtgaccanaacactttatctcaagactcgcttccctaattgattaggaaaatgattcgtataaataaagtcttatatgcacatgagtacaaacacattctacaacatctgattacaaagcatttgcagcccaatgattgctctagctcttcaaataaataatcaacagtgagcaaagagaaatcaccgagtgagaataacatgaatgaccaatggggaatgttgagg

SEQ ID NO: 118024 - DNA, 383 bp, Glycine max
  unsure (1)..(383): unsure at all n locations
aagcccctgcggcatgcaagctagancanaatactgttataatagtttgtgacanngagaggtgtgaacatgacttgtataactctttctttcacgaacaaatgttggccattgcacaaataaccatctattgttttttttttttttgcattccttaaccttccaactcactttatatgtcggccttgaacaattaaatgaaaaccaaaaaatctttcgaattttgattttttttttgtttcttaaccatccaactcactttatatatgtcccacttgaataactaaaaaaaaactaaaaacatcctttgaattttgattnttgtcggcggaaccaattgagaaaaaagaaaccatctgagtaagattcactaacacgctttt

SEQ ID NO: 118025 - DNA, 390 bp, Glycine max
  unsure (1)..(390): unsure at all n locations
catgcaagcttagctggcctcgctctcacctttctatttcctttctgatagaaactgntngatcctcaagattccaacacttcttcctgatgtaggccaagttaatcaccgagctcaagcgctcaaaagtaaggctgtcagaaacaacctctttaactctacatagggtggtgatcacagcacgaaaaccaattctacaagtgttagattgggctatagaagatatctagccagaaataagacctcctatgttcatgtccatgcgagaaactacaccaaagattagcccatctctatccactatcatattacaaggttgtgatgtcggggccactttgcactaccctagaacactcctcccctatgctcaacccttccacttcttccccc

SEQ ID NO: 118026 - DNA, 343 bp, Glycine max
ccgttagaggtacctaaagtttcatgtgataatttcttcatttggttttgatgaaaaccccatggatcaatgcatataccacaaggtcattgggagtaaaatatgttttcttgttttatatgtagatgatattttacttccagccaatgatctgagtttgctaaatgagatgaaacaatttttctctaagaattttgacatgaaggatataggtgatgcatcttatgtcattgacattaagattcatagagatagacctcgaggtattttaagtctatcataagaaatatatattaacaaaatcttagagagattctttatgaaagactgttcaccaagtgtt

SEQ ID NO: 118027 - DNA, 193 bp, Glycine max
  unsure (1)..(193): unsure at all n locations
ctgcagctacaaggaagaaggngattttttgatttgatattangggagctggattggatgtataatgtatctcactacaaccaggccaaacattctattttntgaaaagaacaaaactggaatttttgttgactatcaagcagccatcgctcctgcaaaccaatccgcgcgtcctgggaagactcatcatttc

SEQ ID NO: 118028 - DNA, 111 bp, Glycine max
  unsure (1)..(111): unsure at all n locations
agcttgaagctcaaggaaatgttttaatatatttttgggcnnnacacgcccaactcccttgagtggaatttatatccgccattacatcggacgctgcagattaactgcatt

SEQ ID NO: 118029 - DNA, 256 bp, Glycine max
  unsure (1)..(256): unsure at all n locations
tcttaagccctgcagctgcagcttaacttaatcctattgttttattatgacgggacncaancanaccatccgagaaaaaggtattgtccctccgacccccctcaccgcttttacattcaatttngagggtttcgatatattgcgggactttatcacacatccgagtaaaaagttattgccccttgaattggttcacagcttcaacatttaatttcgagagtcttcatatatgacgggacttaatctaaccttcgac

SEQ ID NO: 118030 - DNA, 353 bp, Glycine max
agcttcatagatgcttacaatttaatagtaaaaaaattaaaatttccaaactagttgggagggaagaatttgtattttagtcgcagagttgcatagattttgtatctagatctaactgaagatctaagtctcctctagatcagggcagcagcaaagtctacagtatatttgactttagctcccaatatagccatttaaactaagttatcaatctaatgtcataagaaaatgttttagtagggcatggttagatctgcaaagatacaagggggtaatttgattttgcagcatcatcttaataccacaactgtttttattgctggaagataaatcattagcgcaacaaaaaaaaa

SEQ ID NO: 118031 - DNA, 399 bp, Glycine max
ctcacccaagcaccgcggctgcagctgaacaatgtaaaccattttcttattcttttgattctcgactccatttcattgaagcgcatatccacttgctaatccaaagtgtcaaacctctcaccaacaaaggtttgaagaccatcaaacctgtccataatcttcgaaagaagagatgaatcttctccctcgtgtccttcttcaccaacatttctagcacccttcttcacctaagagccatcatgctcctttatatacccaaaggatgctatgactgaagcgcctataaagaatgatctcttgattggaacatatggttcacaatcaagagggatgttgtattgttgaagaaaaagggtcacaagatgaggataattgcatacgggattctatcgcaatgcc

SEQ ID NO: 118032 - DNA, 325 bp, Glycine max
ttatgggtatgttgcagtgattgtgtgaatcaacctcgttttatcgttataaatgtctctagaatactcctattggatttaatgatgaaatatgtgccctttcaggtgaaaaagcggcttaggcgtgaagtgccagaagtgacaattgagcttatctcatcacagggctaagcgcgcatccacctctaagcgcgacttaagcgcgcttagcacgaccgaagaattgtgcagagcatcaatatcaaggttccgcgctcaacgcaatatttgctcttagcctggctcaacgcacgactggcgcttatcttaaatccacttactcaca

SEQ ID NO: 118033 - DNA, 384 bp, Glycine max
ccaagcaccgcagctgcaactgttgtgctaccccacaaagtcttttttttttgtttcggccccatacttcctttcgagccctctttgtttcctgctctaaagctttagcacaggtcgcattgacatctcttaggttatagcattctttccggaccttgatggccgtcgtcttgaatttttccttgaccgcttgtgctctttcaagttcttcctttaagacttgcacctcctcactctcctcggggggttcaccccctgcctcgcttgaaaccttttgctttgggagccaatctaactcttggatccgagccttcagccacttattataaccattaatgatcccattgctgcttcctctaacctcttgattttttttgcaccccc

SEQ ID NO: 118034 - DNA, 325 bp, Glycine max
caagcaccgccgctgcagctcgtgtgaaggctcaaatttattatgtttatccacctaagccctcaaggtgcctcaaaatgttgatgaatgggagggggggaaggtcaaacacgaggctccccgtcaagtgaaatcgcataaacttgtggaggtcaatcgctttgggaccagctttgtgaatcacactattgttcacaatgttgtcgcatattttttccttcccacacattaagttatagacaatggtctttttatcactagccttgtctgcattgtaccgataaagagctctggtgatgtgggaggtatagttcctttcccatcc

SEQ ID NO: 118035 - DNA, 397 bp, Glycine max
  unsure (1)..(397): unsure at all n locations
atctctaagtcacctgcggctgcagcttgtgtacttgctgctttaatatttgcatcattcttagagtgttgntctcctctctcactcgttttaactcagctttaatagtttccacctaatcatcaaatcaagagtgttgtaaaatgttcacaagaggagattcatgttcaatatatgtttctgaaaggttttgtttatccataggaatcaaaagcaggtatcaaaagatttacaacaacttatactatattcaatcaactgaactaaacctctctttaatatgtttctgaaaggttaagggcacccaaaaagcaaactataagaacccaaaaataaactaaacagtgaaaaaaaaaatcttttttgctgagaatacaacacacacaccgaaagaaaa

SEQ ID NO: 118036 - DNA, 241 bp, Glycine max
  unsure (1)..(241): unsure at all n locations
cctctaagncacctgcggcatgcaagcttgtggcacccacgccattaaaattttatttcattccgaaaggcccaacaaaaccaatctgggcaaactctatactctctctcctctgtctttcgtccgattcttctgcgaaggctctccctttgagacgttctatcttgagatcacttatgctacaatttagtgtgtgccgatgtgatgagaagccacaacttcaagccctgtatactatgtt

SEQ ID NO: 118037 - DNA, 369 bp, Glycine max
ggatcctctgagtcacctgcggcagcaagcttggacagcatgttgttatttattttgatgaagctgcgagccactgaagcagaatacttttactcgtgaagaaacttttctaacttacaaacttttctttcctctaaccatgaggaagcttgatacaatacacatctcttgtgtgctaagatgcagtcgccatgatgacagaccgtacaagatgtacgtgcaggagttaggtatgtaaaatacaaaacttcttcgcgctcttacttgagctataaactttatcctataggtgagaggaccatgatggctcattgctctccccctatctctaacagctgggggagagactggcctcttaacaaactgggc

SEQ ID NO: 118038 - DNA, 241 bp, Glycine max
  unsure (1)..(241): unsure at all n locations
agctntactttctgaagcgcgccttttctttatgaaaacaatctgaacatcaaacaattaatgacacaagaaatacgattaaagatttttttgtgcatgccgatagtgcttttttaaaaggagaaatctatgtctgtcacaattcagggaaatacctcaaccgttatttcaaacaactccgccccggaaggaacatcagaaatagccaaaatcacaagacaaattcaggtgctgactgaaa

SEQ ID NO: 118039 - DNA, 396 bp, Glycine max
tcttaagtcacctgaggctgcagcttccataagctttaatcactttttgtatccacggaagggcccattgttactgcccctgagttctttatcctttttttgcaccacctcccacgccttgcggaccttctgaagtgtctccccgttggtcttattgaaacctcgtgaaatgacaggcgcgagctcttcctctagcggtgcccctctcatagggtagccaagttgccttatagaaagaacaggattgtaactgatgcaaccccttgtccccatcaagggaaaatttggaaatcctctgcacgaaataagaaccccgattcttccttcttttcatcgagggaaccagttgacaaatgctccttctttttttgctaagagttggtcccaatttgcccc

SEQ ID NO: 118040 - DNA, 371 bp, Glycine max
agcttgtacagaacttatgaaaattttttaacaagcttgttcgcacatcgttcgcgtgtatgatatccactcgacaaggtttgaagtagaggagaccttcaatcctataacgcaacgtggcggacaaaaatgggtagttaacttgaatgaccattattgtcaatgcggaaggtattctgcgcttcactatccatgttcacacattattgcagcttgtggttacgtgatcatgaactactaccaatatatagatattgtttacaccaatgaacacatcttaaaagcatactccgcacagtggtggcctcttgggaatgaagcggcaattcctccttctgatgtggcatggacactaatccctgacccaacta

SEQ ID NO: 118041 - DNA, 357 bp, Glycine max
gatctctaagcacctgcggcatgcaagcttgcaaaccaaatgctcaccattgctagaggagaagccttcaggttgtttcatataaacctcttcctctaaatcaccattaagaaaggttgttttcacatccatttgttgaaactcaaggtaaaaataaataattaataacaagataatacgaagagaatctttcttatatacaggagaaaaagtctctgtgtattcaattccttctttttgagtaaatcccttatcaacgagtcttgccttttatctctcaatgtttcctaatgaatctcttttggtcttaaaaacccatttacagccaatggcctttgcccaattaggcaactctac

SEQ ID NO: 118042 - DNA, 401 bp, Glycine max
  unsure (1)..(401): unsure at all n locations
tctaagcacctgcggcatgcaagctntatacacgggaggaaaagatacttgtatcattcaaggtaagctatttggttagtgagcttgtgtatgtacaatcatggccttcatcatgtcctcatttatacatttcattctaaaattcagagattcatgcaaagattattactcaaagccagttgttcactcacagtttaaggtcacactctcaccggtttttggttcaagcttttctttcacaatcaatctgtctactgactaacaattctaaatgcaagttcacattcttgttctttctttgttcagcatgcacatttgctaaaattcatgaaaggaaacacaaattccatcaaatcatgcattcagttcaaaatgaaagcagacaaccattttcacaaaaa

SEQ ID NO: 118043 - DNA, 387 bp, Glycine max
aagccccgccgctgcagcttgggctgaaactatatattcttcttgttctagttttacgctctctctcctttttcgttattagatataggcttctcttcttcttttagacaatttttcgttttggagagaaagaataaatttaggttttgcgagtccagtttttactattcacatagcaataaaatttcgtttgctacttcaatctgcaattttgttctctactgattaatggaagactaagtctcccgcattgttttctcttgaggatcaagcacaactttctttgaggttctattttactattaaattctgatcacgttttccacttcaccaattactctgtatttgttgctattaatccatgcatgcctactgcttgattgattg

SEQ ID NO: 118044 - DNA, 389 bp, Glycine max
  unsure (1)..(389): unsure at all n locations
agagncacctgcagcagcagctgcggcaagcttgaaaccattgtttctatttctagaagagaagccttcaggttgctacatataaacctcttcctctacatgaccattaaaaaaggttgatctcacatccatttgccgaaactcaaggtaacaaagaaataatcaacaacaagataatacgaagagaatctttcttatatacaagaaaaaaaggacttgcgtattcaattccttctttttgacctaatcccttagcaacgagtcttgccttacatctctcaatgattcctaatgaatctcttttggtcttaaacacccaattacagacgacggcctttgcccaaataggcaactctacaaagttccaaactttgaatgtctgcacggaa

SEQ ID NO: 118045 - DNA, 356 bp, Glycine max
agcttgagatgaagaagtgttgaatgttgtttcttcttgcttttattggcgaccacggagtggtacctggagatatgtcgcgggggtcacgagaccttggggacgtcaagtggggtgctattgcccaaaaccaagcttgaccaatcccgacccaacccgggcatagtcggtcagtgagaacctgtgatgtacctaagcaagcgagctcctggcagtcaacagataaaaggaacaaagaccccacatcaaggaggcttgtggtggctggccacctgtgaaacttgattgatatgtgagatatggtctctggtgatcgattaccaaaggtgggtgatcgattacaaagcttaaaagcg

SEQ ID NO: 118046 - DNA, 190 bp, Glycine max
agcttcctcgggccaggcatgaagatgattaacggcccgcgaaagggcacctcgaaagagccaagcatgatgactcgcaggctgaggactcgaaaaggcagcgcgcatggctatcgaaagggggaaaacaagcgaggaatagcccacagctccccatggaaccttaattaggcgccaggggcgcaccagc

SEQ ID NO: 118047 - DNA, 396 bp, Glycine max
atcttaagtcacctgcggctgcagcttttagtatagatgatttattggtttggtagctacctcatgcactcctctaatgactatggcatcatttctggtgctaaactgctaggagttagagaccatcttctcaattaaatatctggctctcagcatgagtcatgtcatccaaggctccaccactggcagcatctatcatacttctctccatattactgagtccttcataaaaatattggaaaaaaacctgttctgaaatctgatggtgggggcaactggcacatagttccttaaatctctcccagtactcatacaagctctctccactgagttgtctaatacctgagaaatccttcctgatggttgtggacctagaagcacggaaaaatttttcta

SEQ ID NO: 118048 - DNA, 370 bp, Glycine max
agcttgttggtgaacgaatattatatttgtgtgtgtcgcattctctggaagtggtattgcaattgatggatatgcggtcataaacatgtttctctgtaagtggtattacagttgatggatttgcggtcatcatcactaatgatctacaagtcatcaaagagggttgtgccaaatcctttgctccctttccaacaggtataccaccattctttttggacttgctaagatgttaatcaagtcaggggaacttaacaccatgtcagttttgattgggtcatttggctatattgctgcagctgaagttttttcctaaatttatttgcttttggtttatatttttgtttcctaactaacgaatatattgcttttg

SEQ ID NO: 118049 - DNA, 370 bp, Glycine max
agctttcaaaattttctaactaagtttatctgaacataaaaactgtactaaaacataaactaaaaataaaatgtatctaaagcagaaaaataaataaaattcctgtcaacaatcatcctgaactagtgtgggctcgtcctgagctgatgcaggctcatcatgaggtgaagatggagtatcctaagctggctgaggtgtctcttgtgttgttgtaggccagggatcccaagtactctgcaccgcctatagatctgctgcatagttggtgtcttcaacgccttcttcaccctcaaagacctccacgaaaggtgaagtagcatgtgaaacctgtggagtcgcctctggagtggcctcatgagcaacctcaagc

SEQ ID NO: 118050 - DNA, 340 bp, Glycine max
actccgccaagaatcaagattctagctagtttcaagaatcaaagggtcattccatcaagaatcaagattcaagtgaagattcaagagaagactcaagatatgcaagaacttcaagaaaagcatcaagataagtataaaaagattatttcaaagaaaagattgaatagcacaatttgttcaaaagaatttttcaaagaaaaatcttttaccagagtttttactctttggtaatcgattaccagaagatagtaattgattaccagaagcccaaaatagttctataactgttttacaaagtagtaatcgattaccatgggcatgtaatcgattaccaatgttt

SEQ ID NO: 118051 - DNA, 350 bp, Glycine max
  unsure (1)..(350): unsure at all n locations
gaccttaagcaccgcagctgcagctgcgacgacgtatttttaatgttattgtnccacgcacaaacgccgaccccagacaggatcctggagatctgtcgcggggagagtgagaccttcgtcacgatctgtgggatagagttgctctacatgcgaacgatacccatcccttaccaaccagggcaggaataaccatttagaagctgacaattacgcctacaagctatctcctgtctggcagcttatataatggactgttatcataagccacctatgtacgtgttgagtttccagctgttggagggtgaacatttatgacatattgtgtctggtcaacgattatgcagggtgga

SEQ ID NO: 118052 - DNA, 367 bp, Glycine max
agcttagcgctgaacaaaaattcttataaaccttaaaggctgaacactagttccgcttagcgcacaaacacacttagcgggctcatcacttacattcatcagcagggatgaacgcgcttagcgcgacatggtccgcttagtgtgttcattcggaaattcaaaagtttaacagttgcgatgaacaggctaagcacacaagcgcgcttagtgcgttcatcgcgatttctagatagaaccacaggggtcttcacctcttttagccacatagcccctaatgggcttctaagttaccaaaaatcctacattgactaaccctaaaactaataactttaacctaacaacatacaactaagaaaacaaaaagtct

SEQ ID NO: 118053 - DNA, 320 bp, Glycine max
tgggatctctaagtcacctgcagctgcagctgatgtataagaccttgtgttttggtttcaccagaattggagttgaggcgtaatgatattaaagctaggtgtagttaggatcattttgctagtgattgacacaacgattggagttgaggcatgatggtttcttgataaaccatgtaatttctctggttttcaagcacttgatagaaattgaggaccggcgaacaaaatgacggcctaccttttaatcacattggcatgcccttttttgttgcacttcacattgatgactagttgacgaactccacaatatttgtaacggt

SEQ ID NO: 118054 - DNA, 307 bp, Glycine max
ctctgagtcacctgcaggctgcagcttgatgtattaaaacatactttgttatttaaatgaagactaaacatgcattgtttatgtaattgtattcattatgcgatataatttgttgtaacccgttactaaccaattaatattattaagtactcgtttggttaagcaaggaaattgttggtcaaacaaaaatcatttacgcgtgcagcatacatcattatcataattcacaacacataatgacatgcatgcgtattacagtctgagcgcgacaactacattggctgacttgactactcattttgaacct

SEQ ID NO: 118055 - DNA, 345 bp, Glycine max
agctttatattttcagcagatgaagattattctgtttccacctcatggactcctctaaagacaatagcatcatttcttgcactgaattgttgggagttggaagccatcttctcaatcaaattcctagcctcatcaggggtcatatcatcaagagctccaccactggcagcatcaatcatactcctttccatgttgctaagtccctcatagaaatattgaagaaagagtcgctcaaaaatctggcggtgaggacaactagcacaccaattcttgaattttttccagtactcatacaacttctctccactcacttgtctgctgcccgaaatgtttttttctatggca

SEQ ID NO: 118056 - DNA, 344 bp, Glycine max
  unsure (1)..(344): unsure at all n locations
agcttgcttagcccatctataaacatacataaaaaaattntaagttaaaacaaagaagataaatattcatataaaagatgaactcgctaagcgcagcgtgggtggcttatccagttcatatacaaatctagaaattcaaccaaaattgatgagctcgcttagtgcatcacgtgcgcttagcgagtntattgagatttccagaaacacagatgaggctttttcaccctcttcaagtaggcctgtattaggcccttcacactttaccaatttacatgtctcatgattctactttatctatagaacaaaacccctcacacagccctaatttttaactaatttaacaa

SEQ ID NO: 118057 - DNA, 313 bp, Glycine max
taacttgggttccacccttcatgatttttaagtttaatgtgctaagttgtttcaattttcaaagactattttttagcctacacgccttaaatgtgcaatccaagccacacaaaagttaaatgcttgttttattctttcaaatagaaaattccatataaaatttatgcctgaatctatatggagattgtgtttaactatttttttatttttcaaaatctttcatgccttaataatactgagagaatcgctcaagctctatgagttattggaaaaaagccaatatactttgatttaaatcctaagggtataaaca

SEQ ID NO: 118058 - DNA, 315 bp, Glycine max
tttgtttttgctatgtaaacacaacttagatcaactacaaaggctaactagttatgtgctaaaaaaacaaactcttctcaaccttgccttttgtaatggaataaaacaaattaaaatctgcaatggtaaagaaaaagttaccttcaatactataatagaagaaaggaggtcatcatggtaattgtggtaaagtagtggtgtttctactcttatttcttagcataggaagccattccattcatgagaccatttgtgtatttcgagtaatattttcaaattcagaaaaaaaattaactaaacattctcaagacttac

SEQ ID NO: 118059 - DNA, 373 bp, Glycine max
agcttattagagtttaacacactctctttgtgggtcctcaatttattgagaattataaaattagaattatgactcatcatatgagtagcgggacatattaaatttgggaatcttaagaaatttgagccaacaaaaaagagtgtgttcaagagaatgtgttagagacagtgttgctaccatttctctgtttaagaatggtgtttgtagttattagtgaaaatagaaatagaaaatattttccttatgtcaaacaggcttctgcattactatttttagtttttacaacattctgatagatcattatataatttttctttctctaaaacaaatgaattctttattggcttggggtggtgtatataaaaactgatca

SEQ ID NO: 118060 - DNA, 317 bp, Glycine max
  unsure (1)..(317): unsure at all n locations
tcaccatggttcgttgttcacatanataggttcatttgttttagtagagtaactagtttttacttaatttgacttttgtcatgtgctgaattttcattaaatgaagttaatggatttcaaattatttgtatgttaggtatgaagttgacaacagatgcatttctttctgttttagcccttcaaccaattccaaacattgattttgtccccaccattattgaggtttgttacttgtgacttatgagcatctttgtttaaactaaaaattaaataaaaagaagagagtanaccttatatgaaattttattaattaatga

SEQ ID NO: 118061 - DNA, 314 bp, Glycine max
tcttttggaccttgaacaagcaatcaactcctctttcaaaaccatgctatgtgctcgcgactggtccctttcttcccttcgcaacttgaagttcactattgctaccccatagagctccgcgaaatttgttccggccatactctttcttgcgagccctcttggtctctcgttcaagggctcttgcggtaattgcattctcttcccgaaacccggcgcactccttacgaacgtgtgtagcagccaacttgaacttctccttggcgagttttgcctatcctaactcgcttttgagagcttggacttcttatccgctt

SEQ ID NO: 118062 - DNA, 376 bp, Glycine max
agcttcttatccaagacactctcttggttgtgaaacttctccttccatgacttattctctagtagataacacatactctcacctcttattctttatctttcactgcaattccatggctgaaaatcaccattgaaggacctgattgaagctcaaagaaccaacctccatagaagcttctcaagcaagcttacatcactatggttttaactaacactactaaaaatagtgtattccacgacgcgcatttaaagtcgatcgtcacaaaaccgtctttgtttgggggcggtgacatttttgtaatactggcacattttaaagacgactttttgaaaccatctttaaatagataaaacaaaaacggtttttgcaaactgcc

SEQ ID NO: 118063 - DNA, 316 bp, Glycine max
ttgatgatatggtcttcaccgacgaaaggatcaaagtgagtctaaaaatagcaaatctgatcatcatactttgataaatgctaaaaaactagggtaaatgaagagggggagaatgagggacaagcccatgctgtgaatgccattcctatacagccaagtttcccaccaacccaacaatgtcattactcagccaataacaaaccttctccttacccaccggccagttatccacaaaggcaatccctaaatcaaccacaaagtctgtctaccgcacttccaatgacgaacaccacctttagcacaaaccaaaaacacc

SEQ ID NO: 118064 - DNA, 117 bp, Glycine max
  unsure (1)..(117): unsure at all n locations
ttcttctccaccccttactcgctagctgtttanttgancgatatgtcaccagactctcactggggtgcnctgtctcctgtagccgctcttaccctcaacccctaccatcctcttcta

SEQ ID NO: 118065 - DNA, 367 bp, Glycine max
  unsure (1)..(367): unsure at all n locations
agctntacatattctggccctcaaatctaaggatttgtttcatacacggaacaaatgatgtcactggccacaacttacctcaaaatggcatgactatagacttcaaaatcacaccatcaagcacatccaaaagatgattcaataataaacaaacaaaccctgtaaagggatttacagttttacacagcttcccaatttaaaagcaaacacagattaatttccagcagaaatcaaacaaacaagttgaacagctcttttattactactttccaagaattatcactttcaaatttaattcatacttcataggtccacaacccaaaaaaaaaaaacaattttttcattccaaaaaaacatattttgatat

SEQ ID NO: 118066 - DNA, 243 bp, Glycine max
ccacagctcatatgaagtactgtaatctctcccgcaaacataaacttgccccggcctattttagacttttaaactgaaattactcggtggacataaaacttacatatggtgggcaaatatgagcacccttgactgtgacatgctgatggtattttgaatgacttctagaagtgtacgatagtgccatggactacgacacaatactccatataaccattgtgttaatttcatacaataaaatga

SEQ ID NO: 118067 - DNA, 297 bp, Glycine max
ttataatgagctttctcttcattgttactagcatcagtaatagtaacaaacttctcttccaatatagcaagatcaagatccaaaacaccgaaatgaaattggacttgctcattccagttagagaagttaagcccattaaaaattgacacaaatgatacatgaaagttcaatgaatcgagaacatgtgctgtaaactataattcacatatgtgttttgagacaaaaacacatgtcacacatataatttattcatataactatcaatgtatattgatgttctcctttgggcgatacacc

SEQ ID NO: 118068 - DNA, 295 bp, Glycine max
tccataataaggctttttcttaaactatagagtatcatgattagttaaaaccaatcttgagtcaaggaaaatgccaccatataataaaaagttaccaatataattcaacatataactaccttgttcatgagcataccatttttaaagggattctcttgagtgaagcaccaatggtttataatctaatatgcgacaaatctcatgatgctctctatttgttgggggcttcttatcatatgctaaataaaatagtgagcctttattttgtaaaacctctcaaagcttaccaatttaa

SEQ ID NO: 118069 - DNA, 378 bp, Glycine max
  unsure (1)..(378): unsure at all n locations
agctntatgatgatgaaccaagctattttgatgatgccaaaagcccaagtgattgattcaagacttcaagatcaagcatcaagaatccaatccaagatttaagattcaagagaagaaatcaagaagcaagcaacaagtcaagacttcatataggataagtattaaaagaatgtttcaaaaaccaaatagcacagttttgttttacaaaataattttctcaaattttctaaattaccagagtgattactatctagtaattgattaccagttatcaataatcgattaccagtgaccagtttgattttcaaaatgttttcaaattttttataacgttccaaaatgattttctaatagtgtaatcgattatactatattagt

SEQ ID NO: 118070 - DNA, 310 bp, Glycine max
tcaccacagaaatgcgatgaagctggtgaaggcttgttcatcattaaaacaaaagctaaggctgaaaaaatgcaagaaccacataagagtgcggattctattataaagaaattatgggttaagattttaggaattggtctagcattcagaactataatgtcaatgagcaggtttaaaaattcactacctctagttttagtgtgctatataaatgttagtgtgaaagatggctgatttttcattcactagggatgacatggcaaagaaatcttgtgcattggtgggatgtaagtaaatataccctgcaaca

SEQ ID NO: 118071 - DNA, 304 bp, Glycine max
tcctttgtgcacttttggtttcatttttttgcattcctttcatctcacacaagtaagtaccatctccattcaattttaccttttccttggggtatctggatgctttatttgttatgatctttgcaatgtttgtgagataaattatttgtgaatctatgacttgaatgctagattaggggctgcaatggatggccctaggtctatccttgatcctattggaaattggcatgtcatattgcgctccattcctcatttttacatgcttagacatgcgcccaccaatcgttcaataaaatgccttaat

SEQ ID NO: 118072 - DNA, 319 bp, Glycine max
tataagaacaaaattgccgcaatcatttccaaatatgcatgtgtaattaacgaagcatcaataaggaatcaaatccaggttttttgtgtcaagcaatcaatgggtgaaaaacacaccaaatgaatatgaatgatggatggctccaaattcacacaaaggtaatactcatcactttcaaattgagccttgaaaaactatcatgacatttttaggagaatcaaagatttcaagttacaaaatgtcaaaaacttttatttcaaaaacattacccattttctgaaactatcccattattcaaaaaaaacatgcaaagttccta

SEQ ID NO: 118073 - DNA, 272 bp, Glycine max
tgcatgaatacaggctgagacaacatgggctctaacagatcttggttacttggcaaaatatgttttgggaattttaaggtaagctataatgtatgatgcataatgaataatgatgctttgaactgttgcacatagttttacaaagattgcttactttaacaggtgttatgtttcttatctaacctaacatttgaaaattgtaacaggttgattgtttcaatggcctgggtcactcatataattatctacctattaattgatcctccactttc

SEQ ID NO: 118074 - DNA, 386 bp, Glycine max
agcttcttatccaaagctcattcttggttgtgttatttcttcttccaaagcttattgccttatggatggggccttcctatcctcctcttctgctatagtattatcactgcataaaacatggtggaaaaacacccatcacaggaacctcatttgaagctcaaaagaccaaccctccataaaaagccccacaagcaagcttccatcataactatttaagctaaaaatgataagttaagaaaaataagagaataattcttgaggaataaaaaacttttgacagaatcactttttttggacgatggagacctcagccggcctttgccacggcataagaaattttttttttaccccacatacatatataataatttgcgattctgataacc

SEQ ID NO: 118075 - DNA, 316 bp, Glycine max
ttgatttgtatctccaaactccatgaatgtgcttcggtttccctctccatgtgctttttttttatttttttcactacatgttcgttgtttcttctaaaactaccatttttatctcaaaaaacttcgacttttatctccaaactccatgaatgtgcttcgttttccctctccatgtgcttttttttatttttttcactgcatgtttattgtttcttctaaagctatcatttttatctccaaaagcttcaatttttatctccaaactccatgaatacagattcattttcttgctttatcccaaaaagctttgattttt

SEQ ID NO: 118076 - DNA, 306 bp, Glycine max
tgtgaagtgtaatattcattagatagaaattatattacacattcttgagtgaatcccttttgaggtgaagatctacaatctgtgttgtaaaaaacatagataccttttaccgttgtaagtccaacagtggttgccaaagctgaaatccaatgttataactggtctagttctggttaggttggaagtccaatgttataactggtctagttctggacgtagcccaaggttggggtaaaccactccatactttgattttgaatagatctatcaaatgcttgcttaaacactacatgtcataccctaatt

SEQ ID NO: 118077 - DNA, 86 bp, Glycine max
cgcctttgacttctccctctcaccttggctctgtataaatctctcacatgctctgcatatgcagcctcttttattcttatttgttg

SEQ ID NO: 118078 - DNA, 309 bp, Glycine max
tcttttagcgacctatgaaactcagctttaaatctaaaaggcgagaaattcttcccaattttgttgttttccttctccaggcatctttcttatcttcagtcatatttcttttctctggcatccttttatttcttttcttcaccattcaagtacgttgttgccaaccctcttcctttttcatgtctttttctaaggatgaatatgcatgttccaatgatggcacgatgttgtcgttggaggtttgcctaatatgggaaagttcaaatgatgacccttctcatctccacaacaactttaacgctgctagtg

SEQ ID NO: 118079 - DNA, 362 bp, Glycine max
agcttgtgactcttgagaaattttttttaactagtcacttaaaaagttgtgacttgtgaaaaaatcttcataaacaagtcacttgaagaattattacttttggaaatttatttttcgaagtcagtcactggtaatcaattaccattaaggtataatcgattacacatcaacagatgggactcttcattttaaattttgaaaattaaaacatttagaagcactggtaatcgattacaagtattgtgtaatcgattacacaagtttaaaatgatttgaaaatgtttaaacaccaattgtaactcttgaaatgtgaaatcttatatgtttaaaacactggtaatcgattactaccttctggtaat

SEQ ID NO: 118080 - DNA, 256 bp, Glycine max
tttaaaaataaataaaggattgggaggattggtgtaaaaaaaaaatttatgatatggaaaatttgttgaggaaattggtatgtatataataatgacaatttatttttgagagtgtgaataaaaatgggttttggtgctaaaaaatttagaaagtttaacactttttattaaaaaaattgggttagatccctagtgatttttacaactataagcatgtgggtttttaaattaaaaacgggtaaaacaaatttttttt

SEQ ID NO: 118081 - DNA, 99 bp, Glycine max
tttcctttattcttctttttccgtccctagctcgtaatccctcttcctggttcttcctgctacgtgacttccgtccgctgtttctggcggatcttgcta

SEQ ID NO: 118082 - DNA, 305 bp, Glycine max
tcttgcttgggaagttagaaagacttgcaagagtaaatctttttttttcaagcacatgcataaaatgatattttagaatgaaaacttccaagaaatattgtgttccaatgcttcagatcctactaacaaaatcataaggtttgttattcaacaaattttgggtttttcttttcttttcttgcttggagtaggtgttgcttctaaataagaaaacatttttatgaagaccttttgatcaaataacaaagttaatctttttcaaaataaggtttataaaaataattaagcacacaacaatagaaata

SEQ ID NO: 118083 - DNA, 316 bp, Glycine max
tcttgtataaggaataacaacataaatacaaggtcgtgcaccaacattgtaataatggactcacacggttactgtgtatctataccagcagcacaaatacagtttaaccatgaaacccaaccatcatctgctgttgacccttcgtgcgcatatttctaagtgtaaagcaaataaacaagctatacaaaaaggccaacccttaccaactccttcaacattcacgtaagtcctgtatcatcatatcaattgatctcctttccttcacaaagagatcgaaacaatcataacgttaaacaattcaaacaagccctgggat

SEQ ID NO: 118084 - DNA, 365 bp, Glycine max
aatacttcagcttggacttgctctccaacgtggccaaggccattggggagatgcccattgaggggtataaggtgaccggacatgaaggaactggaaaagcttcttttctttttattcataatttcaaccattattggtttggttaaaccttgatcaacaaatttggttggtaaactttgaccgtatgctctatacggcactttgaaaaggttgggaattggattcattaaattattggtgcccatgggtactttgcactttggccgaatctcttattcccatgccaccatagtttcatgtccccatatgaggagatttttcaacaaatttatgaacaaggttatgcatatgtggctttcatgaaa

SEQ ID NO: 118085 - DNA, 317 bp, Glycine max
tagttacctataatactcaactacttgctggtgcagattgtggctgatggcaatagctttcgagttgattcatggagtgggactccgaggcaaaattggtcatgggatcaaaaagagttgtgccacaaaagttgccatcaaggcatcttggtgttgaaaaaacgggaacggggaattatgagattgctaatttaatctggtggaggaaaacttttggaaatggtatgcttatcatgtattgcaatgggccggtggaaccaactgcccttgaatggaggttgctctatgggaggatattcacatctgttgttattttg

SEQ ID NO: 118086 - DNA, 326 bp, Glycine max
tcacattaggtatacatcctgccaaaaaaacagacgtgctgtttgtactggctactcacgggaatgcaaaggcgaataaaacacactccacagtaccatgtaacatatatcagccgtcttaaaacattcccttcctctcggggaacttgtcttgttacgtaaaaggcttaaggggttgtattacttctttatgcacaatgacaatggtgcagcccagggactaagaactttaacacaaccttccccttcaaaattatatccaaaatcattggtgataggcttctatgattgtgccctgcctcatctcctttgagcaacgaggattt

SEQ ID NO: 118087 - DNA, 85 bp, Glycine max
  unsure (1)..(85): unsure at all n locations
tgcaagctnnnggaggagaaacaggtacttctcattttatttacaaaggaagccctatctattcaaggtctgagacaccatacaa

SEQ ID NO: 118088 - DNA, 310 bp, Glycine max
gactttagaagcctattttttcttgaagagatatgcgtagtaccctgtaacataaatccaacccatcgcactgatttccatgaaagcttggttccactctgcttgtttttcaacatctccttcaccactattttgctgcccataaatcaaatgaaggaagcatatttaaacttttctaaattcagggacatatccatggagcaagcatcttgctaattatcctttttctattgcctatatcatacatcaatgacagttttattcatctcgaggcacacttccaaacatgcttttgaattaattcaacatg

SEQ ID NO: 118089 - DNA, 291 bp, Glycine max
tttcatgccgttatgagcgccgaatcgacttcgatgaaaggtatgaccatttgaatttctcgagagctttctatgtttaattttgagcgcgctcgatatattatacgcctgaatcgaacctcagtgtgaaacgttatgaccatttgaatttctttagagcattcgttgttcattttcgagcgtctctatatgtgatgacccttaatcggacctccgtgtgaaaagttatgaccatttgaatttctcgagagcttccgttgttcaatttgcagcgtctctgcatataatgcg

SEQ ID NO: 118090 - DNA, 307 bp, Glycine max
ctatcatttgtgcaactatctcatcctatttttcaggtgtataatttatcttgacaggttcaagtgcaagtgctgctactaatggaggcccttgaattttgttacctgaccttaaagtgatggcactcacgtttttcggattctgcacaatttgttaaggcaatttgttagaattttgggactgagcttggttcaattgagtagccatctggcccatctgatttgtcaaactctgaatggaggctcttgtctcttgctgaaattgcatattctagatggtcatttgcctcactaactcttctaagaa

SEQ ID NO: 118091 - DNA, 345 bp, Glycine max
agcttgattttatttttcccatttatggattaatgtgggtcctaatagaggcaaaattgatccttctactatgacaatttttaaaactggggcaaataaatagggtgaggatgaaagagaaacccatgctgttattgccattcctgttctgccaaattttccaccaaacccaacaatgttatttctttgacaataacaaaccttcttcttacccaccacccagttatccaccaaggccatccctaaatcaaccaacaagcctgtctattgcactttcaatgacgaacacctccctttagcccaaaccaaaaacacctacccagaaatgaattttttcagcgagaa

SEQ ID NO: 118092 - DNA, 177 bp, Glycine max
ttccccgaaaatataacacaaaatcttttcacacggtaataatctccttacaacactggaaacccctttttccacaacaaacccatctaaaatcttgggggggcttttgttgttgatacaatttttctccccaggtgtttttttaataaaatattttaataattttgccccaaaaac

SEQ ID NO: 118093 - DNA, 307 bp, Glycine max
tgcgaaaatccaagcctgatgtaatctggccattgcatgacattcattgataccacgcgagcgcaagttcgtccatgtaaaacaaggcaattgttaatcgcttatgggccggggttgcatgatatttaaagaactgattgattttgaatagccaacccatcgggtcagacccatcaaaacatggaacttcgagtttcatgcaatatggttgcatggacagagatacggaagaaacgggggagtgtgtggaagacgaaacccgaaaatggtgaatggactccataaccgctagtttctgatgaaggtc

SEQ ID NO: 118094 - DNA, 112 bp, Glycine max
tgtcctgctggttttcatgttctcctgctatgtttctggactagcaaaatagcaccttcttctaggtctgggccttgggcttcatattttgatgttctggcgaatatactgt

SEQ ID NO: 118095 - DNA, 320 bp, Glycine max
gcttaatggaaacatgggcataaagaccaaaaacaatgtagggtttattattttcttccttggatgaattctacttcacaaaaaataactggataaaagaaacaaaaattaaaaaccacagatggtaaatgcctttaaaaaatttcatgagtattaccatttgttgtataacttgtaaccgctaatgagtaatgacttatttctagccaagaacatatttacccttactcccaaagtcacacatacacaaagaaaatgcattcacatattttcaagcccccgtcatagattaaaaggtacaataattcaccctttcaaat

SEQ ID NO: 118096 - DNA, 116 bp, Glycine max
cgcacccccccttcccctttcatactccggctctataatctgctttaatctttaacttgctctgttctctcgtgcgggccttctccctctgttggattactttagatcttcctttc

SEQ ID NO: 118097 - DNA, 318 bp, Glycine max
tgtctcttgtgatgtgaagacacattggaagtccattgggtatttgttaacattccagcataatccattgactctagatcactttcagaatagtctacttgtattgcatttaaatggtttgcagcctccaagctccctgcactagcagagcttctcaattgagagggtgcatcagaagatgtgcatgttagcattgcatgccacctgctcgcaagggaaacaatgttttgagctctatgagaaattcttgtcgcagcatgcagacaaataatgatgcccaccacctgaactagtgtggatacctgaaagaaacaacag

SEQ ID NO: 118098 - DNA, 295 bp, Glycine max
tgcctcaaaaaggtccagaaggataaaacggccgtaagaacctgttccgctcccgatatgacagccaccgctttaagaatgctgaacaccaacaacgcttcgaagccatcaagggttggtcatttcttcgggagccacgccttcagctcaaggaccaagagtatgccgattttcaaggggaagataattcgcacggccggtggggcaataactggtttaccccccatggccaaaattcgacccagacatagtcctcgaattttatgctaatgcttggcctacggaggaaggcgtg

SEQ ID NO: 118099 - DNA, 293 bp, Glycine max
tgagtcaaactgaagcatcttttcctatataaacagttcaggggattttgtaaacaaaaattttgtgatgatgtgatggtcacttgatgtaagagaggaaaccccttagtacttttgaattaaaaagcaacaaggcacatatttccagatagttgaaaaaggtaagtggtaaaacacactccttaatgacttacaaatgtaaaacgcgaagaaattggttataaattttgggagcaccggaaaaataacgtggctatgttccccacggttcgatatcattaactggcaaaaaa

SEQ ID NO: 118100 - DNA, 304 bp, Glycine max
tgaatccacttacccgcgctaagcgcagggtggcgctaagcgcaacgtcgcgaattcagagcctacttaaagcctgtcttgtgcaaaattagggtacactttgacacacacttttacagacttttagacaaattgtaagcagaagaaagggcatagattctagagcacaccacaatgcctattaagggaaaaaagccctagaagcatcaagaggagcaacttgtgcattgaaacctaggttttgtaagattattattgtttgggtttctttgtaatggctagctaagcaccctatttggggatt

SEQ ID NO: 118101 - DNA, 127 bp, Glycine max
  unsure (1)..(127): unsure at all n locations
tattctatttcctttttngtgtagaactgtcttatggcactttgctgtgttcctctctaactcgtcccctttgcgttacattgcttcaatcagtcctctgtcccctgggacaacctagaatccaaaa

SEQ ID NO: 118102 - DNA, 303 bp, Glycine max
ccttgttgcaaccatattctttgtcctaccaagccactattggcctatcacaaatcaaaagacttgttggtttgattggccatattggactaacactcttcagatgaacaagtgtttgagaacttttttaaaccttaccagaatttatagaggtttttacctagagaatttgaataatgagtgcttcagttcatacttcatgtcttcaaagcttctagtatttataggtctctttcaatcaaatatttattgtctctaaacagacatattttcttccataagcttttgtgtctgaaaaatatg

SEQ ID NO: 118103 - DNA, 313 bp, Glycine max
  unsure (1)..(313): unsure at all n locations
tggcagcntgggggaaatgagccgctccaaattattgcaagtgacacgtgctgtaaagaaagaagtgaaagggagaaaatgggtcgggtttcaatcggagctccagattcggaaatgggtcacaacgacccgggtcgtttagtgggggacggggcagtaatgattgggtgttggtaaaaggaaaggaagttggagggtccaaagggccatctattgggcctaagagagatgggtcaacccatggagacaaaaaaaaacatgggcctcgtgataggggctttacccacttatcctatcaagagttaatggaaag

SEQ ID NO: 118104 - DNA, 223 bp, Glycine max
gggaaaaggaagaagaagggggggggggggtttttttaatgagaggaaaagggagaagaggggggtattgataagagaatagatagtggagaaccatgaaaagaaaataggaagatagagcggagagggaagaggaaaagcgtggataatgagaggaaaaaaggaaggagaaggggaagaagaagggaaaaaggtgggaaggaggaaaagaaagggggaaagg

SEQ ID NO: 118105 - DNA, 223 bp, Glycine max
tggttcgaggtacttacccgttgaagaacgaaaacgatgaataacgtatgtttaacgttcaaaaacgggtgaaacctttgcgagattcctcaccgaaaacgtttccgaaacgtttcggaagcaccctcgcttaaattttcttcacgggaacaatttttccaagcaaattcgaaagaaaaaaaagtgcctaaagggctgaacccctttcttttgcctttcttcc

SEQ ID NO: 118106 - DNA, 302 bp, Glycine max
ttttccgcgaaaggccctacaatttcccgggacccaatttcccaaaggaacccacggtttggactccaatgggcctcacaatttattattaaaccaaaattaggttttttccaaaaaggaaaaccggaattaattaattccctggtggacaaaacagaacattcggccggtaggattttcaagtccataacactcagaatcagctaaagccattttcacagcatttctaccagcaaaaaaaaaaaaaaaaaatgtaacacgtttgactcagactcaaaccaaatgcaggtgctaggtttttc

SEQ ID NO: 118107 - DNA, 313 bp, Glycine max
ctatctattcattttaaatcaactattgtacacaagggaattacatgataaaatgctgagagagtagcataaaatggagccaccttgcttactcatgagacatcccatttgtttgtctcttgaccaaaacctattccaaaggttgaaaattgtgccaaaacctgttagacaaatgaccttagataacttaagaaggggggttgaattaagatattgcaaactatttccccaattaaaattctattttaatttcaatgcaagttacaagttcccttagaaatgaactcttaattaatgattcaaataaaacaat

SEQ ID NO: 118108 - DNA, 301 bp, Glycine max
tgatcattggggcatttaatgttcgtacttcttcatgctcaaaaatcactttttgtcactggtgtgttgaacattatagcaagaaacttccttttgtatcaaggcatgtctatgtagcaaaacactcattttgatggcaactgaggaatttcaaagcttgactttagttattcttcataggtttcagcacatgctaggagaatatctttacaaaacagatctcaaacacatagtattaaaggtcaattttaatatcatatcaaatcatgattctttcgtgttgttgtctgaaatatcaaac

SEQ ID NO: 118109 - DNA, 91 bp, Glycine max
tcacaggacatatcagcaatgacccactgcgcgcgacataaatttactcacggaccattatccttggggtagacagacatactaaaatggc

SEQ ID NO: 118110 - DNA, 380 bp, Glycine max
agcttgtaggattatggggtactcttcttatgtggtactaaggggcggtcgggcgatggtgcacaacaagtgttccacattcacaaagcgcgcataaacccaccatcccctgttgcccacctccaactgagctcacgtactcccacgtagcccataatccttgtttctttcaacaccgggtccccattaatccctccaagctttcccaacatccaagtaatacaacattcatacagcacaaattatcacagtcaatcaaaataaggcaaaggcagataaactctgccccaaacaccaaccaaaatcacagcttttctcacttaaagacccccagtacacattcttctgtccaattcgtttaccagtggatcgactcgaaa

SEQ ID NO: 118111 - DNA, 313 bp, Glycine max
tgttaatggaaatagaagagaatttcaaatctcaaaccactatattgcgaaaacacaacttatattcttaaccgaagcaatcgatcaaataaatcttgttaatggaaataaaagagaatttcaaaaacttacctagcaacatggaacatgacgagttttccctctaatgtaaggcacataagaacacaatatggtgagcgttctgtcctttcctccacaccaagttgaaccccaactttttgatagattgaaacattatctatgcatagccctaagagcaaattatcatcaccatttttgggaaaaagtgaat

SEQ ID NO: 118112 - DNA, 381 bp, Glycine max
agcttgttattaggactttttctctttcaaaggataaaatctcaagcagaacaaatatttttcttagaacaaattatcaactagaacttcatatgtgaatgatgccaatccaataggaaacaaattatcaaacaataactctcttggccaggaaacaacttgaagagtttaatccatgtcaatcatattagatgcaaattataatgtaaattgttcaatgaaagtatatatataactgctttttgtattggtatatcaaaagttctattctctcacaaatatcaaaaggaattgcaattttttatatataaactttggagaatttgttgacatttatacacacccttgtcttgattaaaattggagcaaagttgatctgtt

SEQ ID NO: 118113 - DNA, 311 bp, Glycine max
tgatcctctagtcaagtattagacgttgactattaaaaaaaatgtttactatcacgtgtcacgttcttattagatgataactgtcacatgttctaattggtcaatgacaacaacaacgtattttatcttccatggagttaacattcaataacatgacacgcgacaattattatccaataagaacgtgacacgtgaggggtgagggtcaacgttcaattttgtattaagaggtcaagattacgtgatggggtaaaattgaaattaaatacaatcagggacacaaaaatacaattttggccgttaaaaaacaa

SEQ ID NO: 118114 - DNA, 310 bp, Glycine max
tggtatcaaaattaatgcttatcatctatatgtgatttcataaaatttaagttaacgctttgtgccttttggggcttcttcgggggcttacagttcattcccaaacacttaatgtgtaaaaaaaatctacaattgatttctagtatgttcttagtcttttcaaagtaacaaacacaactccaacaacaagaaaccagtcaaacaattatcctttaatccctaattcttcaataaagaaaaaaagggggaacacatacaatcaatcaaacattcaagatacatcaaacaattaataaatttgagatttgga

SEQ ID NO: 118115 - DNA, 308 bp, Glycine max
agatactcagcttggattccttttatagggaatctatccttcctaagatggtatccaaacccagtcaccctcattaagaactagctcttttcttcctctattggctttaattgaaaacacctttgtttgggtctctatttgggtcttaaccctctcatgcatcttctttaccaattctgacctagattccccttctttatgtataaaaaaaatgtccaatgggaggggaatgaagtctaacggtgtaggggattaaacccatagacaacctcaaaaggggactgcttggtggttctatgaacccccct

SEQ ID NO: 118116 - DNA, 311 bp, Glycine max
tggaggggttgatggggacccggtgctgagaggaatgaggataatagctacgtatgaatgcgtgagctcaatttaaaggggggcaactggggaatgtgtgcttatgcctgacttgtggaaaagggaaaattgaattgcgatcgcccgatcgccacctagtaccacatatgaacggtgcccataatccaataagctgatgtgagaaaacgtggaagagtcagtcttcctgcttttatttgttgaccaccgagtggtaccctgaaatatgtcgcgggggtcaggagaccttggggacgtcaggtggggtgcta

SEQ ID NO: 118117 - DNA, 211 bp, Glycine max
tgcttttgtgaaagaggaagcaccaatataaatgtgtggcagcctagtattgatatataggagggagcatacatgaaactagctagagagaatagaaagtgttgataataggacactccatagctagtaaaccgcagaaaaatttaatggcttgcataacttaagttaagattaatggcttttaatgtttatcctatatatattataatga

SEQ ID NO: 118118 - DNA, 293 bp, Glycine max
tactatcacgtcaacttgcaagttgcaatgttatgaatttaaccatagttcctacaaattacaagaaagaaaaaaagaagtttatttttcggaggaagtagaattttaaattaaattacattaacagtaaagttgcataatcctttttctgacaataattaggaatattgtggaagtttaaaagatccaggtctttaagttaagatatgactaaaaaagtccaatttgaatatagccacaacaaaaaaataccacggtaatattgatatacatttgtaaaaaaaaaaaaaatg

SEQ ID NO: 118119 - DNA, 373 bp, Glycine max
gcttcttatccaggcactctcttggtggtgaagcttctccttccatggcttattttctaatggatggcgccctcattcaccacatctacattattttacaatgcactccatgggttaaaaacaccattgaaagaaccccttgaaactcacaaatcctatccttaaagaaacttttacccccattcttaataaacggggcaatttgagaaccaattcttaaataggttctccttaaacccccatttattttcaactttaccttctcttccattgcaaaaacttcatttttcttccttgtatctcaccacatgtcttgaccttaatgttgttaacatcaatttttaaaaattccaccaatcaaacttgctattaa

SEQ ID NO: 118120 - DNA, 236 bp, Glycine max
actatgatactcgtacccaccaaaacatatatatgtatgtacatgtacaaaagacaccttggatatgcatgtatgtactcagaaataaatccacaaaacatatatatgtatggataagaccaaagatgccttggatatgcatgtatgaagcaaaaatacttcacaaagcatatatatagatatatacatgtatctatatatgtgtatacatatatatatatatgcctgtatacgac

SEQ ID NO: 118121 - DNA, 386 bp, Glycine max
  unsure (1)..(386): unsure at all n locations
agcttntatttcatagagcaagtaagaatacattatcattagctcctatttgataagcaaagaaaacacatgccatcatttgtataaacaaaactatttttcccaacgaaaaaaaaatatatttaccaaagatggcagacaaaaagccctttgaaaagattttttttcaatgaatcacccttgacaaaatataatagtccaatgatctggctattattgtgttttaaaaagttttcattttaaaaaaattctgttactctattattaaaaaaacacactaacataaagcttgatttcaagaatttgccaaaaccttattttctataaattgcacatcttttttctacataaaaaacctacttataggcaaacaagaaaaaacatgg

SEQ ID NO: 118122 - DNA, 329 bp, Glycine max
gtcacactatagcttgctcgccttggttcttcttaacagatgaagtcctttgcttcttgaagatattggcaaccgaatctagaaggatgaaacgtgattgtatacaccacttcaaggagaacattagatccttaacaagctcgccaccatacgaagccatggataacaacttgaacgtttgagaatatgattgtccggagatggacagaaaggggcatgaaatatatgcctcaacataagtttgaatgtagaattctaatgtctcatatgatcaaagttgaaaaaatgcacacacaaggcctttatttatagcctaagtatcacacaaa

SEQ ID NO: 118123 - DNA, 255 bp, Glycine max
atagggcagagaggttttaacatttcgaagtgttgtcttacaagttttctcatttcatcaatgtttatgacaagtgttacccatgtttctatttatagcctatccaatgggaagcttccttgagaagcaaagaaggtagcttccttatgaagctatacgaaaaaagcttccctggaaagctagaggggggcttattcactccccctgcaataactaaagctcactccatgtaaaaatacctgaaaaatcaatggg

SEQ ID NO: 118124 - DNA, 304 bp, Glycine max
  unsure (1)..(304): unsure at all n locations
ntaggtaattaattaggtgtatcaggtatggtttaatgtatgtatggacgagtcaaaaaagtgcacaacacagcctttatccaaactcacttttgatactggactaaagacaattccgtaattcttttctacagtacgttactgttttctcttgcagaacattgcagttaacttttgggaacactttgatgtgtagcctgcgaaatgattcttcgactactaaacatcgttgttaagtatcatcttttcctttcttttgttatcaatacaggttattaaagcgattccctttgaatccttaact

SEQ ID NO: 118125 - DNA, 365 bp, Glycine max
agcttctacatgggtggaaaactagtatctacgacgggcccaacaccatctttgttccaagtgtcgttgtatatcgacaacaacgacatcggtcaactaacacccgtctttgtaatgcaacaatacaacgtcagtggctacaaaagaacagacgttataaataaggattcaacgacgcacattatgaagaacccggcgttgttgggatccatttcaatgacgggtagcccaaaacacgtcggtggtttgtcccatttcaatggcgggtagcccaaaacacgtcgttgtatgcttccatttcaacgtcgggttagaaaagcccgaacttgtttggcagtatgtcaacgtcggtgtccctaacacct

SEQ ID NO: 118126 - DNA, 312 bp, Glycine max
tactaatcccaggttttcgtaaaaacaagcagaatgagagaaaaaaaacattgtttacaaccactgggttcaaaatcatattcgcattttccaaatagagataactaaggccccttgaaggtgccttcaaaaggattatccagacataatgagattcatacttacagtttttcagaagaaaatttggggaaaaaaaggggaaagatccagaaaagaacttggtattattgcatagacaactattacaagcttttcttcctttagtttctctctcactattgggtctgatgttgttcagcatgtgtgttcaac

SEQ ID NO: 118127 - DNA, 241 bp, Glycine max
  unsure (1)..(241): unsure at all n locations
agctttactttctgaggcgcgccatcccgcgaggaaaacaatctgaacatcaaacaattaatgacacaagatatacgattaaagatttttttgtgcatgccgatagtgcttttttaaaaagaaaaatctatgtctgtcacaattcagggaaatacctcaaccgttatttcaaacaactccgccccggaaggaacatcanaaatagccaaaatcacaagacaaattcaggtgctgactgaaa

SEQ ID NO: 118128 - DNA, 241 bp, Glycine max
tttcagtcagcacctgaatttgtcttgtgattttggctatttctgatgttccttccggggcggagttgtttgaaataacggttgaagtatttccctgaattgtgacagacatagatttctccttttaaaaaagcactatcggcatgcacaaaaaaatctttaatcgtatttcttgtgtcattaattgtttgatgttcagattgttttcctcgcgggctggcgcgcctcaaaaagtaaagct

SEQ ID NO: 118129 - DNA, 372 bp, Glycine max
agcttccatcaggctttcaaccaccttcggtagccacggaagggcccattgttactgcccctgagttctttatcctttttttgcaccacctcccacgccttgcggaccttctgaaatgtctccccgctggtcttattgaaacctcgtgaaatgacaggcgcgagctctttctctagcggtgcccctctcatagggtagcccagttgccttatagaaagaacaggattgtaactgatgcaaccccttgtccccattaagggaaaatttggaaatcctctgcacgaaataagaaccccgattcttccttctttccatcgaaggaaccagttgacaaatgctccttcttttttgctaaagttggcccaatttgcc

SEQ ID NO: 118130 - DNA, 311 bp, Glycine max
ttataagtgcgggtctgggagacgaaggtcaagtggtcgcgatatgtaaagatgatgttccaagaactctggatttggtccgaccatgccctcctgatttccagctgggaaattggcgagtggaggaacgccccggcatttacgcaacgagcataatgtaaacctttacggttttaaaagctctatagttgggcctaggctttagagttttcattttgttaaggctttgtgtcttttgtctttgaatttataatacaaggatctttcttcatctgttcctggtctctacccattctcattcatttgcatgt

SEQ ID NO: 118131 - DNA, 306 bp, Glycine max
tttcctcattctctggagggagtggcaaaagattggctatactaccttgctcccatgtccattttcagttgggatgaccttaagaggtgttcttggagaaattattccctgcatctaagaccactgccatcagaaaagacatttcaagcatcaagcaacttagtggagaaagcttgtatgagtactgggaaagattcaagaaattgtgtgcaagctgtcctcaccaccagatttctgagcaactcattcttcaatatttctatgagggacttaacaacatggagaggagtatgattgatgctgcta

SEQ ID NO: 118132 - DNA, 313 bp, Glycine max
tttgtgccaaatagctgattttaaccatattaattacataatatctgataaatgaccgggatgcagcagtgtgatagacattttcgcaaagcacaataatatccagctggtgcggtaatttaagcacaccttgtcaatattatttgttcctgcgccttgaaatagaatgatgataaagatgcggcacgtgaatttgccgcaattgctacctttttaccaaatccgaggcacctaatggaacaatatgatcaaattggcgcaagactggaccgcttgcctttggcccggtttcattatcgcatatttggtatta

SEQ ID NO: 118133 - DNA, 359 bp, Glycine max
tgcagcatgcaagctttggtcaactaaagagtgatgtcttcttgctgcaaatatatgtgttctgagtggaaaatcctactttggtctaaccctgaattctgcatcattttcaaagcagattcacattaattgaagttttgtacgaacactggatcttttacaaaaataaacactgcagcttatctaaggcacaaattctgcaacttctgcagtatggggtggaaaaagggtgggaagggaaattaaatggacaacacacttgtttgacacacagcttgatatggcagattgtttccgtaatgatgtagctggcagctgtattcatattcacctaaaagatgactggaactggaaaaata

SEQ ID NO: 118134 - DNA, 314 bp, Glycine max
tgtataacggctggacatgatatatgtcaggagtgttggattggccaacgatcaagataaagggatattccacattatttccatgacacacatgcaaccatgaagattaggaaattttattcaaaactggtcatgcatgcacccatgtggacacttcaaccatcagtttttatggtcatgtgacactaaggcttacgattcatttttcctattaaagtcaacccaatgtttccaaaacatgttcttttatcaattcatgcattcatccagtccattttgggcattttttttggaaaattttcacaccattcacc

SEQ ID NO: 118135 - DNA, 321 bp, Glycine max
tcttatccaccgctcatgttggtggtgaagctccttcttccatggcttattccctatgggaggcgcctcctcttcacctatttttcctttgtctttccactgccatcttccatggtgggaaaatcacccattaaagggaccctctttgaaagctcaaaaaatccaacctccttagaagccccacaagcaagcttccatcatcaggttttgatgaaaaggccataggccacctactgtgttccttcgaacaggattttgcaccgaaggttatccaaaagcgggtgtagaacatgcgcactaacctgaccactttgaaccaaa

SEQ ID NO: 118136 - DNA, 317 bp, Glycine max
tttagtgacctatgatactagctgcccccactcgcccagtgagcaggttgcttcctccagaagcaacagccttctggaggagggcccaagtgggcctggttgctatttgcacccccatttttactaaatagaccccccttgccctttttttggagattcttttttcgtaaagttacggaaacttacggatttcgcaacgatacttgttttctttccgtaatgttacggaaccttgcggattacataatcatcccctttttttactttacggaatgttacggaaccttactaattgtgcaacgatgcttccttttgat

SEQ ID NO: 118137 - DNA, 318 bp, Glycine max
  unsure (1)..(318): unsure at all n locations
tcttcagctcttgtgacaacantttaaatccctctcaacttgttccactcacctcacacaatggtaaagcaaaatggttaagaagccttgttcacatatcaagactgttggtatttgcaactttttgtatgactatcaaatcctctagaaatcatatcaactagattttgacccacatggtgtacggattaagaaatttatgtcatattttgaaaagattagaattgcataaagtttaataggcatgcattgatagtataaaaatcaaaacatcttgatataattaatgacttttaaatagttattaataaagttgat

SEQ ID NO: 118138 - DNA, 294 bp, Glycine max
ggctgggatactctgtcccattgagaccctttttctttgggagccaagttatcccttgcgttctaaacttcaaccattggtgatagccgcctatgacaccattgctacttccccctagctctttatcttttatttccactttattccacgctttatggatcctctaaagtatcttcgcattagcttcatcgaaacctcgcgcgatgaaaggcgcgatagtttcctccgatggcacacccctcatagggtcacctaactgtcttatggacaacacgagattacaattaatacaac

SEQ ID NO: 118139 - DNA, 318 bp, Glycine max
gtaatcgattacacacatattgtaaatgagtaccacgagagttttttcagaaaacatttctccaacaggcacaatctttgttggtggtgggttcttggaattggctaatcataaggcctatatatatgtgacttgagacaccaattgataagaatttttccgaacaaaaaaaaaagtcttatcctcttataaagcaaaattgttttattctcttacaaattccttggcccaaatacttgtgattcaataaggaatttttgaatgctcaaaattgttcattctatctctttcaagaaagattccttctttacttcttct

SEQ ID NO: 118140 - DNA, 298 bp, Glycine max
cctttgactgatatttttcagccaaaatgcggaattcttttacaaacgctggccgataatatttatttatgctaagccgaatttttttgtttcgcattgcctaaaaaatttgcgatgtgggtccgctaaggtttctcgtgcgagattgtgtttcggctgacaccggcatgttctcattttttcggccacgaaaacgctatcccaccctggcaaaaaacatgattcaccgatattgatcgaaaaaatgctagccgacgtcggccaggagagatgacagatcgagtcttaaaaggaagca

SEQ ID NO: 118141 - DNA, 283 bp, Glycine max
tgaaagatatatcctaagaaccaccctccttgtagaaatttatggtctcccgaattcacaagacatgatgaggtgaaactcaaagaaaatcagttgtctgtagcaaattgactcacactaaacaagttttttcgagattgaccgaacatgtaacaatttattacactgaaaggttatggcagtatcattacgataaacaaaactatggagccagtaacatgaaaattggctccaaaatctggtatccatgtggaacccgatgcaccattaccatgaaaggagg

SEQ ID NO: 118142 - DNA, 311 bp, Glycine max
aggacctatagatactcaacttgaaatgagaatgtataaggtgagactttctgcttttattctttgaccacaaagtggtacctgcagaaatgtcttgggggtcacgaaaccttggggacgtaaagtggggtgctattgcccaaaaccaagcttgaccaatcccgacccaacccgggcatagtcagtcagtgagaacctgggatgtacctaaacaagcgagcttctggcaatcaacaaattaaaaggacaaagacccccaagcaggaggcttgtgtgggggtggcccactgttaactttgaatgaaaagggg

SEQ ID NO: 118143 - DNA, 275 bp, Glycine max
tgatgacgcggcattccatctgtcatgtcatgactataataaatttataataaccacagatactacatttgagacatataaaaaatttacgtatgtacatgaccaaaagtgaatcaaaggtagtaaattacacaaggtctatttttcacgtatgaaaaacatatttaagggctatttaatacgcgaggataaaactgtatacaataattctgtcataacttcacgcctatttaatatgcaaggataaaattgtataccaatagtcctctcatacc

SEQ ID NO: 118144 - DNA, 380 bp, Glycine max
  unsure (1)..(380): unsure at all n locations
agcttctcccctattntgctataaatagggggagaagtgaagataaaaagggttcagccccttaggcacatttttctctctcgaaattgctgaggaaaattatttccgggaagaaaatttaagccgaggcgcttccgtaacgttttcgtaacgtttctgtgagtaattacgcgaagattctcgaccgttcttcaagattcatcgttcggtcttcgttttcttcagtcttcaacgggtaagtacctcaaaccgagcttttcaattcattctatgtacccgtggtggtccacattttgtttcatgtatttttattctcggatacatttgcgttttatacccccttttgacgtgcctttaccatttatttaagtattttctcg

SEQ ID NO: 118145 - DNA, 319 bp, Glycine max
tgcttgttgagcttctatggaggctggatctttgaacttcaatgaggtcctttaatggtgattttccaccatggagatacagcgaaagacaaaggagaaaaagtaagaggcggcgccatccactaaggaataagccatggaagaaagagcttcaccaccaagatgagccttggataagaagcttggagaggattcttcaatggaagaaaagaaagatggagagaaagagagaggggggagcacgaaattgaaggaagaaaaagagagagaagttgaactttgagttgtgtctcacaagactctcattcatcaaagttac

SEQ ID NO: 118146 - DNA, 378 bp, Glycine max
  unsure (1)..(378): unsure at all n locations
agcttgatgtcattcaaaacatactntgtagacttaaatgaagactaaacatgcntgtggttatgtaattgtattcattatgcgatataatttggtgtaattcgttactaaccaattaatattattaagtactcgtttggttaagcaaggaaattgttggtcaaacaaaaatcatttacgcgtgcagcatacatcattatcataattcacaacacataatgacatgcatgcgtattacagtttgagcgcgacaacacattggctgacttgactacacattctgaacctagcagtcgctcgacaacacattggctgacttgactacacattcgcgacaacacattggctgacttgactacacattcacgcgtgtctatt

SEQ ID NO: 118147 - DNA, 314 bp, Glycine max
gccttatagtttaaatcaaaagaaacctttttataatgttgacatttcgtctaaagatctaagttcttctttctcacctttccttgcgctcttcttctgaatcatcaaaagttgtggttaaagatttcaccttttcttccaagtcttaaaaatccttaagaagaatcttttttccattggataccttttcgtccagtaatgccttgacatcctcacaaacaaaggtgtcttgtacatcaccaggagaagtggtttttaggacaaaatcaactaaatgagcttgataaggtttcttaagatcctcatgctctctt

SEQ ID NO: 118148 - DNA, 303 bp, Glycine max
taattgtctttgggcttgtgtgaccactatcaataaagtactttcgcgcaccttaactatatgtgtggactttcaacccacggctgtttattgggaaaggctggccacaatctttcaacaccttattcacaccattctgataagttgggtgtcatgtgaccatatcgtcctccagatgtatctgaagccatgctccatttttcctttgagattccatcaatccatcttgctatagctggactcaattgacgaaatttttctaagttttgatcaaacacatgcttgcaaggagtgtacgctgca

SEQ ID NO: 118149 - DNA, 307 bp, Glycine max
ttgagaaaattcaaatgacaataactttttactcagatgtctgattgagtacagtaatatgtcgagacgctcgaaattgaataccgaagctctgagcaaattcaaacgacaataacttttcactcggttgtctgacagagtcccgtaatatatcgagacgctcgaaattgattatcgaagctctgagcaaattcaaaccacaataactttttactacgctgtatgatagaatccagtaatatatcggagaggctctgaattgaatggccgagctctgagcaatttcaaacgacaataactttttact

SEQ ID NO: 118150 - DNA, 333 bp, Glycine max
gaatactcaaacttggtggagactaatggcatgcactataagtggtatgtttgttgtgcatatattatttctacatgccattgcactagcaaggggttaagacaatctatactccatgtatgaaatggataggggatactaagaatactacactagtagcacgacccaaaataaaaggtccgctttatcatatgacataacaacatgtgctctggatacagggtaaaaaatgaaacaacgccatggttaccagtatgacttattgctgtctttgaaaaaaatgtaggccatttacttccagatgtggtgatgatacctgagtcaaacagcgtg

SEQ ID NO: 118151 - DNA, 285 bp, Glycine max
tccacaatgttgacaaaccttgttggaatttacacaccacgatagaaccttattttgctacggttcagggaaccccctgagcacaagttaacgattaaaacatatcatgcaattgaacataccccttatgaataatcttttttcacttgcataccataaagtacgacaatccctaggcgtcccataagaccgccgagacttgtatgtcaactgaagatggagaaatccgactaatgatctctatgaactcaaatcgtatcatgttaggcgcacgcactattttac

SEQ ID NO: 118152 - DNA, 164 bp, Glycine max
tgttttgcgagatgattgtaggcctagattgattcatggtgtgattcagccaatcaggggactttaagcaaaaacaaccagttgattctttaataattgactatataaaaaacaaaacacttagactatggcattattactttattccgaaatatttattcttt

SEQ ID NO: 118153 - DNA, 310 bp, Glycine max
tccttttagtgcgtcacgtttaaaaccaagctcgatggtggtgctagcctttgatggtactcggcgggaagtgatgggggaaatcgacattcccattcagataggcccccacacttgcaacgtggtgtttcaagtaatggatataaatcccgcctatagctgcctcttgggaagaccgtggattcatgccctgggagtggtcccttcaacgcttcaccagaaattgaagttcgctgtgggtggacttttagtgatagtgtcgggtgaagaggacatgttagtgagttgcccctcctccgcaccatacgta

SEQ ID NO: 118154 - DNA, 151 bp, Glycine max
agcttgacaaggaggaaaattatgcggctttatagcatctccctataagcgtccgcgtattattacctgcataatgggtgaatcccgccaaccctaatgtcttgtggatcaacggggggtacctgccccctcacgattgtcttggcattcg

SEQ ID NO: 118155 - DNA, 295 bp, Glycine max
tcatgtgggcccgctctggcagaagaaagccaaggggatggaaattctaaagagaccattccacggactaccagggggtcctgacctgcaccgcttaatacgagctgccatgatatggaagggcaggaacacgcccgtattcactcaacaaccatcaagtgcacattaacctgtatgggagaaaatgcaccaggcccaggacttgcaagttgcacccccataatgctaagacgtgcctggagcgcggattaggcactaacgatccggccatctgagcgactgaactaaaatacat

SEQ ID NO: 118156 - DNA, 308 bp, Glycine max
tctcaaggaagctacctagtctataaataaaagcatgtgtaacacttgttgtaactttgatgaatgaaagtcttatgagacacacttcaaagttccacttctctccctcttttattccttcaatttcgtgttgcccccttctctctttcttttcctccattgaagcatcctctccaagcttcttatccaaggctcatcttggtggtgaagctccttcttccatggcttattccctagtggatggcgcctcctctcacttcttctcctttgtcttccgctgcatctccatggtggaaaatcaccattaa

SEQ ID NO: 118157 - DNA, 431 bp, Glycine max
  unsure (1)..(431): unsure at all n locations
agctttgatatcttttaaaactctattcactatattatnnnctntggttaatcttctaagagattttatgtttgttntgtatctttatcattattattattattattattattattattattattattatttcatgatataagaatntcctatcaagtaataatggcgaatagttactagaaagagttaactatggatttagtccttgaacttttttgagttttcacttttaatttttgaataaaaaattaatccgtcttaatcattaatcttttattccgtcaacattttttgtacttatcgtcaattcttacaaaatttgtttccccataaattgagttgcccgaaatataattaaataataataaaactagccttactttacgacgagaattgatgacaaaaactattaatattgacacataaaaaat

SEQ ID NO: 118158 - DNA, 387 bp, Glycine max
acttgcttcttgctattcaaacatacataagagcttttattatatggcatgtcctacttgagctattcctatctagtttgcaccttgcaaaatcataatctaaaaagccaattagatttaaggaggcacctttgggataccgcaaaccaacattggttgttcccttaaggtacttaatgatccttataacagttgttaagtgagattccttaagattagcctgataccttatacacaagcaaacactaagcataatatcaggttgactcgcagataactaaagaagtgaaccaatcattacctctataccttgactcataaagtgatttgccttcctcatacaattcaagataggctgatgtgcccttgaagctatgcttctttgct

SEQ ID NO: 118159 - DNA, 315 bp, Glycine max
aagtcacctgcacgctgcagcttgattggaatatgacaattttctttttttaagtgagcatagaagggaaccaaaataattcacatctgaaaaatgtcgaatatcacttaagcatacacactaagacaacgcatgagactaattaaagggttgatttgtactatttgcaaaatttcattaaaacacttggtaattaaatatgataagaatcacacgctccaggggaaaaagaaaggtcccctaaggttggttacgttggatggtggtgtgatcataatcaataatcccaagttaataatagaatgagaatggata

SEQ ID NO: 118160 - DNA, 414 bp, Glycine max
gaaaggatgctataatggaggaaaagaaagatggttttgtatagagagggggggagcacgaaattgaacgatgaaaaagggagagaagttgaactttgagttgtgtctcacaagactctcattcatcaaagttacaacaagtgttacacatgcttctatttatagactaggtagcttccttgagaagctttcttgagaaaacttccttgagaagcttctttgagaaaactttcttgagaagctagagcttagctacacacacccctctcataactaagctcacctccttgagaagcttcctcaagaagattcctaaagaagctagagcttagctacacatacctctataatagctaagctcacctccttgagatgagaagctagaacttagctacacacccgctataatagcta

SEQ ID NO: 118161 - DNA, 417 bp, Glycine max
  unsure (1)..(417): unsure at all n locations
agcttatcaaataacactaaataattttcatcatttagttatattgcatacataattcatataaaacctaagaaatcctaacaatcttcatgcgtctggcataagtgacaccctctaccccacacatatatgtactaataataaaaggaatatgaatgcacaattaattaaaagtttttaaacaaatttaaataaaaacatttcataaagataaaagggtcacattctcttagtgaaatcataatagaacttgtcctgataaatgataaaatcatctcaactcaacacaaggccgctcattctgaatgagaagaagtcaaactaaaagcgaagaacataaaacaactatattattcatggaatataacatatgaaatanaaccccatgctccaatgtcacgtttattagaacatttt

SEQ ID NO: 118162 - DNA, 373 bp, Glycine max
  unsure (1)..(373): unsure at all n locations
tgcttctacaggttgtagttgttgcactagttactattgctcctatcacagncaaatctgcattatttttattgttgttattcgttggttgagtaataagtgatatattagaattatgactttgactggttgttagagatctaacactcctcagactcataaaattttcttcctttaaactagattattttgtgaaaaatagcaacattgtcccactgggcatgccaatttgtttatggcggaaatttgttaagtaatcgaaatttttcattattttcacacttgttttgtatcaatcgcaaacaacttattttatttagtatgatagaattgcaatttctttttattcaaactagcagttggtataactttc

SEQ ID NO: 118163 - DNA, 396 bp, Glycine max
aagcttatgtgcttatttcccatattttcatctctagcacgatcatacctgccgttgcaagatacacatgatgaataaattaatggataatgtacattactcgaaacagaacatgttaacaagcatacacaatattcccaaattattatcttgcctgtatgaaatcctcatcctgacttgtcactggacgtggttaatgaaagaaaaatgtacaatacttcaaacatattaacaggcatacacgcaatattcacacattatcttggcgatttgaaatcctcattcaagtttgtcattggacaaacactagggatatagccactgatatacgaaatcatattcaatgcgcttgaaacatctggttgtgaaactttaacaggggttgatataacgctg

SEQ ID NO: 118164 - DNA, 399 bp, Glycine max
tgacttgggtctcattctagaagctggaatcaaatgtgtgatttttagtttgactcactataacttccaagtacacaagttgaacttccccgatgaattatttgccttaaattctaaattttgatcacaaattaaattttattttttctcatgtttaatcatgatccaatatgagtttaactcacaaaagccactaaaatattttatattctattttattatactcttgctctggatccttttatcacaacttcatgtaaagagccctacatgttttttttttatcttttttaagaaaattgtaagattgacattaaacttttaaaaccagaaataaaaaatcctcatattagaaactagaaactagttttatttataaaataaataaaactaataatc

SEQ ID NO: 118165 - DNA, 427 bp, Glycine max
  unsure (1)..(427): unsure at all n locations
agctntgcactactacaaaaaaacttcttttctctacgcacctttaacgacgattctcaaaaattgtcttagaaagtcaagcaatggcaattttgtaaatatgaaatttttaaatgaagacggttttgtgaaaattgtcttaaaaggttgtcattctaagatggtttttacaaaaccgtcttagaaatgagtgcgtttttaatgactattttctcactttccccctcactctccgactcctctttttctttgattttgtcacatttaaaaatttttagggtttccagcaatgaaaggaagaagagnttgcatgggcaacgaccacaacatggctgataggatatgtgccttctgcctccaagacaaactcaacaagcacatgagtccctatggattctcccacccccgacgtgtcttcccccatggc

SEQ ID NO: 118166 - DNA, 373 bp, Glycine max
tactccaggaatgcatccacagttagcagccatatatggatatcccccagctaatttcatgaggacaaagatgccaacctcttgtggggttggggaatgaaaattttataattcaatatttcaatcaatgtacagtaaccaatctacagatagattatgacttttcacattagcataatagcataccttagggccttgagcaacaagaagagttgcacgatcagaagtcaactcaactgctcaaagccagcagaatagctgctcttccaaagtctgagctatcataccgctaatgcctacaataaatggcactagttaccaataattcagttgaactaagtacgaaaaaacttggtcccatcaatattaaaac

SEQ ID NO: 118167 - DNA, 374 bp, Glycine max
catgcaagcatgacctaagaccattatttttacaaacaatgccatgctcacagaaattataaacatcatgcgtcagtgaggccaaaagaaatgctcatgcaacaagtcaaaagtactttgaacatcataatgccctattaatccccatctcatgtgcctctttcacaagcaattttctcaaaaaacccttacgcacacataatcttgtctgatcgaacaagagatcatcgtgccaaaaagaacacataagagcagtccgtgcacaccattaaaatatttataagccaaatgaggagcatgttcatacaattccttaatgagctccaacccaagaatttagtcctacgagaaagaacaaaacctacctccacgaa

SEQ ID NO: 118168 - DNA, 387 bp, Glycine max
tcaagaatcaagtgtcaggagacaagattcaatattcttcaagttgcaagaatcaagattcaggaacaatcaacatcaagactcaggatacaagattcaagaatcaagagaagactcaatcaagataagtactaaaaaaggctctcaaaatatcgagtagcacacaaagttttcataaaaactgttaccacagaggattactctctggtgatcgattaccagaaggtggtaatcaattatcagtagccaacattgttgtcaaaactgatgtacaaagatggaatccgtgaccacgagcatgtgaatcattaccaatgggtaagaatggtagatatcaaattccatgaggtacaactggtgataaaacagatgcaaaacagttgaaac

SEQ ID NO: 118169 - DNA, 410 bp, Glycine max
agctggttggattatggagtacccttcatatgtggtactaggtggctatcgggcgatggctcaaatcaaatctcccacttccacaaatcaaacatgaacccaccatccccaggtgcccaccttcaactgagctcacgtactcctatgcagcccttatcctcgttcctctcagcaccgggtccccattaacccctccaagcttccataatatcccagcaattcaattccaactatcatgaactaccctaaaccaagaaaacaaggcagaggcagaaaactctgcccaaaacacattcacatattacatctttccttactcaaatacccacagaacattctcttcgttccgattcggtaaccattggaacaacttgaaaaatttactggaggttgctagtacataaatctac

SEQ ID NO: 118170 - DNA, 395 bp, Glycine max
  unsure (1)..(395): unsure at all n locations
tctgtaactnttccataaattacggaaatggttgtgaacttagtaaaagggggtgcctcacgaagcttcttgagaaagccacttgctcgtcgtggcgagcagacctcgcctgggcgagctgggcggtaagaacctccctttttttcatataaataggggagggggctgagtaaaaaggatcctcaacctctatgttgtgtatttcaggtgtttcaagtgaaaaaaaattgtttccatcaaaaaattgtttctaagctgaggtactttcataacgcttccgagacgtttccgtgagcaaatccgtgaaggttttctgtcgttcttcgcccgttcttcatgcgttcttcggtcttcaaccggtaagtgttcgaatccaagactttcaattcatttct

SEQ ID NO: 118171 - DNA, 335 bp, Glycine max
agcttgtttaataattcactattattgtcacctactccttctgtgagggatttattctttctgagttcccttattcttgtttggctttggcactaattttgaatggcttgaataaaggtttttctgttgggatatttgactgacgttctccacaagattttgtttagggagtatcttgggtctgatagactcttctaaaacttgtaaacatttgctgctgtaatttgcctatatccattaggcttttgatgtcatttgaggatatttctttgttgatgatctttgctctaaaaagattggtcatgacagatttattattatcctctctgaccttc

SEQ ID NO: 118172 - DNA, 398 bp, Glycine max
  unsure (1)..(398): unsure at all n locations
ntataatgagctttctcttcattggtactagcatcagtaatagtaacaaacttctcttccaatatagcaagatcaagatccaaaacaccgaaatgaaattggacttgctcattccagttagagaagttaagcccattaaaaattgacacaaatgatacatgagagttcaatgaatcgagaacatgtgctgtaaactataattcacatatgtgttttgagacaaaaacacatgtcacacatataatttattcatataactatcaatgtatattgatgttctcctttgggcgatacaccaacacataacatacaaacatgaggatattaataaaactcttaacataaattgacactaaatatgtaccaattagtattacctattntcttttgggtatata

SEQ ID NO: 118173 - DNA, 380 bp, Glycine max
ttatttgtaggaccttaagagattgattgcgtttattgtgtatcaaatttttaaatttttcattctaagacggttctctaaaaaatcgtcttataatgtttacattttaagatgattttttgcgaaaatcatcttagaatcctcaaaatattttactttttaaaaaaaaaatacattcttagacagttctctaaaaaaccgtcttagaatgtcaaaaaaatgtcttagaatccacaatatattttatatatatatatttttaaaaaaatacattctaaaacggatatctgaaaaaccatcttagatagtcttcccttctaagacagtctgtgactaagaaccgtcttataaagatatcattctaagatggttttgagcta

SEQ ID NO: 118174 - DNA, 387 bp, Glycine max
agcttcatgatgatgaacctttcttttttgatgatgccaaaagcccaagtgattgattcaagacttcaagatcaagcatcaagaatccaatccaagatttaagattcaagagaagaaatcaagaagcaagcaactagtcaagacttcatataggataagtattaaaagaatttttcaaaaaccaaatagcacagttttgttttacaaaataattttctcaaatcttctaaattaccagagtgattactatctagtaattgattaccagttatcaataatcgattaccagtgaccagtgtgattgtcaaaatgttttcaaattttttataacgttccaaaatgatgttctaatagtgtgatcgattatactatattagtaatcgatta

SEQ ID NO: 118175 - DNA, 276 bp, Glycine max
caggaccataaactcagctacacaaatgcagaagcgtttgttttcagctaaacaaactaagctaaaaaatgcagaccacaaaaggcgatcttttaagaaatatggttagatttagaatggctatcttcgaattatgtcatgacagttaaaattctcctctgttttggtgcttataatgtggtgaagtgctgttttatacttggagacaggcaaaagtctcttgggggatgattaattcccgcacacttttttggcaaatcttggtaattggatact

SEQ ID NO: 118176 - DNA, 282 bp, Glycine max
aggacacataaaactcagcttggctgccagggataagtgattccgttttttacgcgaggcctgaaaaagaattggagagtatatggaacgtgtcctatgacgaaaagaatgaagggccatacgttgccactattgacttgagagagatagattcttatgacaaggttgtccgaggcaagtgtctccatatgctgaataaagcggatgaagaatggggtgtgattaactaggttaaccattggattctcattgagctgttatatcgaatgtaaaaagctcggg

SEQ ID NO: 118177 - DNA, 290 bp, Glycine max
agctaggaagaaaaaaatctggtatcttaccattcttggtaagtgttggagtgaaagatagaaaaggtggtccacaacgtgctcacttactctctttatgacatttccaaatgcaaagtgggtttcatctctgacattccatttccaatcgagcttaacaacaatctagctcaagttggtgcctattttgtttgttccaaacaaacaactgggttgagaatatttgctaatttcgtttatggaaaaatcatcatcatcactcttaagagtttacttattgtttatcctag

SEQ ID NO: 118178 - DNA, 373 bp, Glycine max
tggaaagcaacacagcttcacaagagccatccttgtcttcgttcttaatgacttctacaagagtgatgaagtgtctattgcatggaaacatatatgatttgccaccatgtttatagaggtgcttaattatcacgggggagaaagggttatttgtgaaagttgaaaagtgtacttgtatagtatatatggtaccgaatttgcctaattagcctaactaggggacaatctgattcattctgtgaacaaaaagttaatatataaggccatgatgaatcacacactcacaattaataattgtcttcattcattcatctatttttagaatctatgtctttctgggcaaatttagaagcctcacttgaatggtcctata

SEQ ID NO: 118179 - DNA, 389 bp, Glycine max
  unsure (1)..(389): unsure at all n locations
agcttaacgagtttatgaatgacctttcatcaaacatatggngatattcatagaacaccctcagaanaatgagcaagctgaagcaaccaataaagtaatcctatgagaattgaaaaatggttggttagggcaaaaggaagatgggtcgaggagttcattgtggtcctatgggcatatttttgcaccctttagtccaccacccaagaaacgccttttcggctaacttatgggacaaatgctatggtcccaatggagttaggggaaatctcactccgaaggcataattttatagaagctgaaaataatgaagctttgtaggtaaacttggacctcatcgaacaagtgcgggaggacacaatcatcatgatcgaatcttgtaaacaacatat

SEQ ID NO: 118180 - DNA, 410 bp, Glycine max
  unsure (1)..(410): unsure at all n locations
tgtctcagcgtctatgcgagacagagaccaacatgtttgctatcatcgccaagtaccaagaagagctgggtctagccacggcccacgagcatagaatcgcggatgagtatgcccaagtatatgcggaaaaagaggctagaggaagggtgatcgactctttacaccaagaggcaaccatgtggatggatcggtttgctcttaccttgaacgggagtcaagaacttccccgattgttagccaaggccaaggcgatggcagacacctactccgcccccgaagagattcatgggcttctcggctattgtcagcatatgatagacttaatggcccacataattagaaatcgttaggaaacttgtatggtctctcagaccttgactagatatgacttccttnttgaaataaaatga

SEQ ID NO: 118181 - DNA, 368 bp, Glycine max
  unsure (1)..(368): unsure at all n locations
agctccacgatgaagaaccaagcaacagggaagaggttatatgtctcacngacnagagcgagaccgatttgaggagcgaaaacatcgacctggagagtccaatccaagattcacgattgaagagaagaaatcaagaagcaacaagtcagcgactacatataggataagcatgaaaagaatttttcaaattttctcaaacattctaagccaccacagtgattactctgtggtaatcgattaacagttggcagtaatcgattactagtgaccagattggtgttcaaaatattttcacaaggcttgcacagtccaaaatgatttgcaagataatgtaatcgatgacactatattaggaatcgaccaccaca

SEQ ID NO: 118182 - DNA, 411 bp, Glycine max
agctttgaatgctctattcaaaggatttgtttataatatcttcagactgatcaacacatgcacagtggccaaagatgcatgggagatcctgaaaaccactcatgaaggaacctccaaagtgaagatgtccagattgcaactattggccacaaaattcgaaaatctgaagatgaaggaggaagagtgtattcatgacttccacatgaacattcttgaaattgccaatgcttgcactgccttgggagagaggatgacagatgaaaagctggtgagaaagatcctcagatccttgcctaagaaatttgacatgaaagtcactgcaatagaggaggcccaagacatttgcaacatgagagtagatgaactcattggttctcttctaacctttgagctacgactctccgatagggc

SEQ ID NO: 118183 - DNA, 400 bp, Glycine max
tttcaattcattctatgtacccgtggtggtccacattttgtttcatgtattttttctctcgttttcatttactttctatacccccttttgacgtgcttaagccatttatttaagtcatttctcgcttaatctaaaaataaaataaatttccaccgatcctttgaattgtatcatccgttaatgttggttaaaatgaattccaaccgttcggtcgtgccgtaaccatgttggaaatcaaaaaagaggtaaaataataatataataatcaaaaaataccttttagtaaaataaaagcgaaaaatcaatcggacgtttgctctttgggatttctcattcttaattgaattgactaataactaaagggaaactatgctaaatcaactcgcctagtcagctcgtc

SEQ ID NO: 118184 - DNA, 425 bp, Glycine max
  unsure (1)..(425): unsure at all n locations
agcttgcacgattaaattagcaaatttgttttcttaaagnttagaagaattagtactgataaaaagaaaagtagaattgccaaaaaaataattttatttttacccatctttataaaaattaaaattgttaagggaagttatatttatttttaaaaattctaactttattattttcaaaaacagttttctgtttttaagaatttgtttgttccttcaacatatttgaaagtgttccgagaacatatttatgttttttaaaagtctctctgcaaagcccttgtacagttgtacataatacttgaaaaaaaaatgaaaaaagaggatgggacttgagagtgctttcaagtattagtaaaaaaaaattcattgtaaaataaaaatatacgctatttcatgtttgttttgaaaaataattactaaaacat

SEQ ID NO: 118185 - DNA, 393 bp, Glycine max
ttgaaaactgttcctagcctttctctacaagatatttcttttaacctattcgagttcccactgagggtatcactacttcccctcgaatgaggaaaacctcgttgtcttatgatctgtagaaattcacaacgatttacttgctaaatgtaggttggggatatcaatggagtaaaagttttgcagcatgatctcttcaccaatgatgtcctttacactgaaatagtattcaacatgaaatcattgaagcaagagcttcttccattggtgccactgttttggtaactatacagcttctggaagatggtttacactatgtttccattcatctctagttcctaatatttacttgcgaaagtaatgtatttcttggaaaccagattcaattagtagact

SEQ ID NO: 118186 - DNA, 294 bp, Glycine max
cgaccttaagcaccgcggctgcagctctgtccacaaaaatacttctttctttcaagccaacccttaacgtccttttacttttatcgggtaaaaatgaaaccgtcttagaaggtataaaatccaataactccggcattaccttttttggttttcaaaaaactaccgtaggtttgagtcccccatcgcaattgtgggtaccgtaggagtaaaaccccgcctttggtcaccccccaaaagcttaaaaaccttaaaggggaaattaaattaatttggaggtcccattttgcccctttg

SEQ ID NO: 118187 - DNA, 392 bp, Glycine max
tgccacccagctcgcccaggcgagctcagctcgtccatgctagcagggttgcttcctccagaagcaacagccttctggaggaatcttctggagggcccaagtgggtctggttgctatttgcacccccatttttactaaacacaccccctgccttttttttttacggaaacttacgaatttcgtaacgatacttgttttctttccgtaatgttacagaaccttgcggattacataatcatccccattttgacttacggaatgttacggaacctcactaattgtgcaacgatgcttccttttgatttccggtgtgtcacggaaccttacggattgtgcatcaatactttcttttgatttccggcatatcccggaacttcacaaattgcctaatg

SEQ ID NO: 118188 - DNA, 384 bp, Glycine max
  unsure (1)..(384): unsure at all n locations
agctnttcttcatggggtgatgggttctgtcttgtagaatggcatgatcactagctgacatgttctcaattagctcagatgcttcttccggggtcttcagttttatctttccccctgcagaagcatctaataattgcatggtttgtggtctcagcccatctataaacatattcaattgggttggcacggaaaacccatgagtgggagttcttctcaacaagcctctgaacctctccaatgcttcactcagagattcattaggaaactgatgaaatgaagagattgtagctttcccttccgcagtcctggactctgggaagtatttctctagaaacttttcaataacttcctcccacgttttagactgttacccatgaatgagtg

SEQ ID NO: 118189 - DNA, 411 bp, Glycine max
  unsure (1)..(411): unsure at all n locations
tgtaaatggtaatattcattagatagattttatattacacattcatgagtgaatcccttttgaggtgaagatctacaatctgtgttgtaaaaaacatagataccttttaccgttgtaagtccaacagtggttgccaaagctgaaatccaatgttataactggtctagttctggttaggttggaagtccaatgttataactggtctagttctggacgtagcccaaggttggggtaaaccactccatactttgattttgaatagatctatcaaatgcttgcttaaacactacatgtcataccctaatttcgtccggggattattatttgttgatatacaacctttgattggccgcttcgagacacttggcgtnctttgttgcacaatgaatgaagttccgagacgtgtcagaa

SEQ ID NO: 118190 - DNA, 322 bp, Glycine max
agcttttactaacttgaacattaatgtatatgcacgtgccaccatctcaattgctagatcctttatagcaatcaaccaactattccttcccacaacccctcgatggtgtacctgccatgtcatagcaactaatgataaatccctcacattggacaaactgaaatgtaccctccccttgacccaagattaaatagggagcacggttacaacatcacttctacattttttaatcctgatcctttctacgttagatgttggcatcttatgtaccaatgaaaggggaaggagtgtgagaagatctgtgctatcacaacattaaatc

SEQ ID NO: 118191 - DNA, 410 bp, Glycine max
tctagaatactatgaaaggcgagaaatttcttttcttattgttgaattccttctccagacatctttcttatcttcagtcatatttatttgctctggcatccttttatttcttttcttcaccatacaagtacgttgttgccaaccctcttcctttgtcatgtctttatctagggatgattatgcatgttccaatgatggcaggatgttgccgctggaggtttgcctaataagggaaagttcaaatgatgacccttctcatctgcacaacaactttaacgctgctagtgaccaagattccaacattcatgttggtgatcctaccactagtggctcaccctgacaccggtggagtcgctgccatggaaaggttatgcctttactctgacatgcatgttactcatgtggagaaa

SEQ ID NO: 118192 - DNA, 405 bp, Glycine max
  unsure (1)..(405): unsure at all n locations
agcttactttcccgagagcttcttttatttaagcatttcagcctttgctttcttgtagcttaagaaaaaagtcattccttctactttctttcttccaaatccatttctaaagttccaagtactttctgcatcacccacatccaccattagccaccacaaaccatcattgttctccattgaaaacccacaccgagaggaacccttcaaccaaagcagaatttccaacttggcttgcggtttcggtagagaacgaaaatcctaatctgatctttcgttttctttcgaggtaaccatggttctatgcttggttcttgttagttccatcttggtcttgcattttntcttactttgcaaccgccattgcatgtcttatgcttccttcgaaaaaccttagagaaagagact

SEQ ID NO: 118193 - DNA, 395 bp, Glycine max
ttagaaacacaagcagaggcagatagaagttgtttgtatcctttaattaattattctctagatttgaatatcaccttttcaccatcagagttgacagtgtcattgttcgacggttggcaagtgcaccggatctcgcaagtagtataaaacggtaagaactgagtatcgaactctcggggaacttgttttacttggtaaagatgtggttcagtaagtaagcgtcttgttataaaaagtttatgtgtagtatggacacatgtgtaaactaacttaacaaaggtaaataaaaggtgagcagtggtgggtgcgaaagtgatggtcaacatgttggtcttcctactaggcgactgatgctactaaagatgttctctacctaacaatgttcttgtgttcta

SEQ ID NO: 118194 - DNA, 179 bp, Glycine max
  unsure (1)..(179): unsure at all n locations
agctgcattaatgaatctgctctctctaacccgtngcggacgtacgggccgagtatctatttatgatgatacacacgcctcccctaccctctctgcctttctgcggagcattgtcactcattataggtaatcgaccaatcgtgagaaggcaccaattgctgtgctcccttaagttcgcc

SEQ ID NO: 118195 - DNA, 155 bp, Glycine max
tactgttcttctgataagtcatactaatgactaccaagctacaaagttgttcgttctagactgccttatttctttattaaaggaccttctgcaataatttgaataatctggtgtaacaataccttggctcttaattgatatttcctattatggga

SEQ ID NO: 118196 - DNA, 177 bp, Glycine max
gaagagaggattcttatgtacaaactaaaagacccctggcggactctctttatataaaagtgtgacaagcgcaacagagtactgatggtgaaatccttgacacaaaccagcttgaagcggttgcggaacatacgccttccctgagaactcttaagaccctagatgccctctatgatc

SEQ ID NO: 118197 - DNA, 432 bp, Glycine max
agtgacctgccgcatgcaagcttaatgacttcaaaatacattatttttcttttgctgcagcggagattcttcaaaatctttccaactgttatccaaacattagattcctagaaaaaaattaacgaagatcaatatgggataagcatgaaattaaaatttcataaggaaggaatttacacaaacatgaaccacattatgcactgacaatttcaatattgaccataacaaaatggcaataattgctccacaaatactgcagaatgcaagtttatgtaaagattattaatatacaattcttcgatcttgttgcaattacatattcacgatatgtatttgattcagattacatagccagcattaataacaatccaatctcctgttggtgcttgttcactttcttttcttacgaacactctattcgtttttattcac

SEQ ID NO: 118198 - DNA, 418 bp, Glycine max
tgtgacccctgattaggggtgggtaagcggactctacccgtttcgcgtaaggcccgcccgcataaacccacattggcagcggatcgggttagtccgctccgtttcttacacggaccaaataaattggttcaccctcgcccctgccccacggaccccgcgggtcaaacgggcctgtccacagacctaattgtaaaagaatttcaattttaataaaaatacaatacaatgaaattaagttcgatacaaatgtaaataaaatctcaataactcgtcaattatatcaataaaataaataatgtcttaacaaaagaaaattcaagcaataaatctaaagtatgaaatttaaacatctccatctctgatgtgagctattttttataataaaaatatattgaaatatctttaaaagtatctattt

SEQ ID NO: 118199 - DNA, 124 bp, Glycine max
tgggttagcaaatctagaacggctaccggtctacaactcgcaactaataggatcgtcacagtagaaatgttgaagataatgatatatgctgcatcggattgggatgaagaaacggtggagaata

SEQ ID NO: 118200 - DNA, 412 bp, Glycine max
cgaagaggatgctttaatggaggaaaagaaagtgagaatgggggagcacgaaattgaaggaataaaagagggagagaagtggaactttgaagtgtatctcataagactttcattcatcaaagttacaacaagtgttacacatgcttctatttatagactaagtagcttccttgagaagctttcttaagaaaacttccttgagaagcttctttgagaaaacttccttgagaagctagagcttatctacacacacccatctaaaaactaagctcacctccttgagaaaatacatgaaaatacaaaaaaaaagtccctactacaaagactacccaaaatgccctcaaatacaaggcttaaaccctatactactagaatggccaaaatacaaagcccaaaagaaggaaaaacctat

SEQ ID NO: 118201 - DNA, 421 bp, Glycine max
  unsure (1)..(421): unsure at all n locations
agctatacttgtgatgacaagtttttctcttttccatcgangncctaataagcaacattttgttctacagtgggaagaagaggatgatcctgcatttcaaccagatctcactgacgaggttgagacagttggtgacccctatttgcaaaatcatcatttggcttataatgctttaaaaggctcttcatgtcttggaataatgaattttcaaggatcaataaatggattgggagtgcacattcttatatatagtgggagttctgattacttcctccagccttagactagctcaatgcctgaagttacctgtagaaccaattccttattttcaggttttgttggaaaaggaaatgccttgtctgctgaaggatttattcacgacttgtatgtggaaattcctggtcattcactgaaacatcca

SEQ ID NO: 118202 - DNA, 400 bp, Glycine max
  unsure (1)..(400): unsure at all n locations
taatccgatgcacctgactcctctcaagaggtttctgtatgttgtttccaaacacttcctggaattcttctagtataggttttaagcctttgggaaccactgacttggttgcttccattgactgtagatgaacccaccaccagcccaactcagttctgctatgagtatcctcaagataggagttcaaataacattgtctgaccaccttactgccttgaccttgcaatttcaccaactcattttcataagaaaatngcatagtcatggccttccaatccataatcacattcccaagagtgcttaaccaggcaactcctaacaccatatccattccccctagctccaacaccaacgcatccacaatgacttcaatcccccccccatcttcatattgacccct

SEQ ID NO: 118203 - DNA, 375 bp, Glycine max
agcttgttaaagaactgaggaaaaatcattaacatgcttgtacgcacatcgttcgcgtgtatgatatccactccacacggtttgaagtacaggagagcttctaccctataacgcaacgtggcggacaaaagtgggcaataaacttgaatgatcctcattgtcaatgcggaaggtattctgcgcttcactatccatgttcacataatattgcagcttgtggttacgtgagcatgaactactaccaatatatacatgttgtttatacaaacgagcacatcttaaaagcttactccgcacaatggtggcctcttgagaatgaagcggctattcctccttctgatgacgcatggacacttatccctgacccaaccacaa

SEQ ID NO: 118204 - DNA, 341 bp, Glycine max
tgcacacattttacattatatgtaaatcctgctgattcacgtacgtgctggcatgtactggctattcatggaatctatgttgaataaaaaaaacatgtctttatttgtgaatatatatcagccatctaattaatttcatccttcgggaatttcttgttgctaaagtttaaggttttatacttttatgagatgaaatgtatagccaggactagacttaacaaacttccacttcaaaattatatccaagatcattggtgataggcttcctatgattgtgccctgcctcatcttctttgagcaacctggatgtgtaaaagatggaaatatattgagatattcac

SEQ ID NO: 118205 - DNA, 393 bp, Glycine max
aacccaagcaagaaggggaccacgcatacgacagaatttcattaatcatgaaggagtcaatggctctagttatatttttgctatcaagcagatatagcttataatttagactagtctgctcatgcattggctaaatagcaatcaagcgcacccacattctagtattccaagaaccacttcctagatcataagatcatcgccggtctcaactgattatatctaaaatcccatgatattagctacgattcaaactttgacacgcttatcttctgaacttcatctaaattttataaaattggccaaactatcttttgtaacggccacatctcctcactttattggaagtcacaacatacctcttcgataagatcccatcccaatttattcgactaa

SEQ ID NO: 118206 - DNA, 304 bp, Glycine max
agcttcaagaataatggccttagcttatctatttatttccagaaggaaattcaatcaataaacctctaatctttaatggagagggttaccactactggaaaacccgaatgcaaatttttattgaggcaatagacttacatttgggaaggcatagaaatagggccttatatacccaccacagtagaaagaaccacaatatatggaagcacaacaagtggaagcaccacaatagaaaaacctatagatagatggtctgaagatgatagaagatgagttctatatatatttaaagccaaatacataa

SEQ ID NO: 118207 - DNA, 308 bp, Glycine max
ttgagccaaaatcctgactcaccataatctctttactctgggtgagaatgtcaatccttaccctcggaagcaaaaaaagaagagaaggaaaatttccaatcaaaggaaaaaggagaaggaaaatttccaatcaaagaggaagcaaataaggagagaaggaaaatttcctatcaaaggaaaaaagagaggaaaggaaattccctatctaatagtgggagaaagctaaaagaaaagaaagaaaattccttatcaaacaatgggagaaataaaaaaatagaatgagaataacgaaagaaagctcctgatca

SEQ ID NO: 118208 - DNA, 394 bp, Glycine max
agcttgtagaatggctagactatatacatgtcagggtttggcttggtccaaggataaaagggattccccacattatttccatgacacatatgcaaaaatgatgatttggaatatttatgcaaaactgggcatgcatgcacactacatgtcgttcaagtgtcaaatttttatggacatgtgatgctatggctcaggaatcatttcctctattttaaatcaacccaaggtttccaaaatatgttcttttatcaatgggtgcattcattctactccatttctggcgtcggggaaatttacagcattcacccttatgtgtgacccattttcaaaaaggatgtgacaagagattttttcgaagaaagatggatacattcttttgaagctgtggttttgt

SEQ ID NO: 118209 - DNA, 364 bp, Glycine max
  unsure (1)..(364): unsure at all n locations
tntacaaaagtggatcactctaaaaatttatgtttgtagcaccaatgacagatttctcacacaaagattttggctgaagtttctctcactctaagggcttcaacttcaattcatgatgctcttgaataacctcttaaagctccaaagaagatcgttaaagtggagcccactcaactaacaagattctggaagaactagacaaacatgacaattgtcatgaaatgactacaagcaaagtcattttgaggaatcttttcttatgaacattttgaattacaccagaatggtgattctaatgttagtttgaaaaagatcacaactttaaatagatccctgtgatgaagttcactattatgtctctttt

SEQ ID NO: 118210 - DNA, 252 bp, Glycine max
atactgacgctatatcgatgcaccggaatcagacatcgtatttttagtttttaccctgacgatttctctagagcgtcctatgtctaaattcttgcgggtgtagaaacaataagcccttgtgctacattcgtgttgaatgttcatagcatgtcaatgcctatagggcatgcgttgtaaatcttggagcgaatatataggtgctgatccttacatcagaccgttctgcgaaacaatgtgcaccctttgaatatc

SEQ ID NO: 118211 - DNA, 428 bp, Glycine max
  unsure (1)..(428): unsure at all n locations
agcttatgcgcctgtttccttacatacgttctcttgcacaagacatttaaccgaaaaacatgcgcccatttacaatcaaagcagcttcgttacctagattatttacacgtacctccaaggtgtatttgttacttacatcacacacatcttcttggctaaactcacatacatgcattctcaagcatnttggggcaccaaaaattgcacatgtgcacatcttggcatttctaatacctacatacgcaaacttcatgatgaatcttgactatctacacaataaggtgctacatttcatgctctgtgttttaagtttttgctacctaaagccgcatgcaaattcaagcatatttttctttactgactaaaatcgcattcaaatataaaaggtatatttgtgtgcaatatgttctcttcatgcaacatattta

SEQ ID NO: 118212 - DNA, 383 bp, Glycine max
  unsure (1)..(383): unsure at all n locations
tgtagaatggctagacatgatacatgttttggtttggtttggttcaaggataaaagggatgccccacattatttccataacacaaatgcaaaaatgatgatttggaaattttatgcaaaactggtcatgcatgcacctatgtggacgctcaagtgtcaaattttcatggtcatgtgatgctagggctcaggattcatttcctctattttaaatcaacccaatgtttccaaaatatgttcttttatcaatttgtgcattcatccaagtccatttcgggcgtccggggaaattttcacagcattcacccttcaagtgtagacacgtnttttttttcaaaatcgggtatgatcaatgatttttttttaaagaaaagatggaaatca

SEQ ID NO: 118213 - DNA, 324 bp, Glycine max
agcttagagatctggtcttcgtctttgacaggatgcatgtgggtacgaacagatggacttttgatcactctgctgagacgactgatctatctgtgagcgatattgagggtgtggattaatgacatacacctactgagagtgttgtttccgtacaggcattttttttcccgccccactctatgtcatgacgcatattataacacacattccttggtacgctccaccctgttatttccttaggtctttcgtataggcccgctaagcctgtgtttgtctttttaagacgaaaacccctttacacagtcccttcaccgaccaaattta

SEQ ID NO: 118214 - DNA, 367 bp, Glycine max
  unsure (1)..(367): unsure at all n locations
ggacataccgacaactctcatgcctatcattgttgccactatcgacaccaaagaacacttgtccatgctatagggctcaacagactcgtcaccctgctacttgttaagcttgctacccgagacataacacaaaatctctcgacacgggataatctcctcttacactggataacctatttcgccaacaagccagctcagagctcggggggcttatgttctgatgcaagcctatccaccaatggccttagatgcaagacgctgataatattgtgccagatatgcaggagaaggacatanggttctcatgagccttaaggtagattgtggacccatggactaagtatgaacccgtatatctgaggcatat

SEQ ID NO: 118215 - DNA, 116 bp, Glycine max
aaaagaaaaaagaagagggatataaccacaaagacaaagaggagagagagataaaagcgaagacagatagcagccaaaagaaacaatagaaagtagagctagcaaaaagaagagaa

SEQ ID NO: 118216 - DNA, 380 bp, Glycine max
tgcaagaatccaagccatgatgtaatctggcctttgcatgacatccattgataccacgcgagcgcaggttcgtccatgtagaacaaggcaattgttaatcgcttatggtccggtgttgcatgatatttaaagaactgattgattttgaatagccaacccatcgggtcagacccatcaaaacatggaacttcgagtttcatgcaatatggttgcatggacagagatactgaagaagcgggggagtgtgtggaaaacgagacctaagaatggtgaatggactccataacccgtttgtttctgatgaaagttcgtgagcttggttgacattgatgcttgagttacagcgagcttggctatcgcattctccaaacaatcgatgt

SEQ ID NO: 118217 - DNA, 278 bp, Glycine max
actacccatatacggcgagacttaatgcaattcatttaagctgagtatgctgagggatcaaggatgaggtttaaagaaagctaggcccaaacactagagggagctaggtttggggaatacacttaccataagaaggccagggcgacattcaatagagaacaacacataaccgcatcaaggaaaattcagtacaaagacccgacacgttgaaggcgactatcattacttctcaagcctcggacatttatgctgtatctaactagatgttgaaaacaaaa

SEQ ID NO: 118218 - DNA, 400 bp, Glycine max
tagttctctaagtgctcgaacctctatgtcatttctttcttattaccaagataatatcgagtgaaagttgaaaaaggtcaaagttttaaaaaaaagttgacaaaatcacaattcaatcccccttcttaagacattcttatcacttcatttactatatgggctctcctcataattagaattcattccatgtacatacaccatcttatctttcctagtatctatattttagaacttcaaccttatttgaacccaaaaattggatcacatatttcccttgattttagtagcctttaaaatggcaccttccatatttttagattttggtttcctattttttgaaactactctatccagactcctacatctcatcatttgccttgattttcggtcccctcgtatt

SEQ ID NO: 118219 - DNA, 426 bp, Glycine max
  unsure (1)..(426): unsure at all n locations
agctttcctggagaaaaggaaggagattgcttataatttttaactatccacggtcagtgcattgatggtgctcatgtttcatactncataattgcatgaaaatagtataaactttgtcagtaagtacctgtagtttttcgtgaggaaaaaatacttgtacttagggggcatgtcacttggtttgaaacttccttgagactcgggctgattaccatggggggaagttgtctatgcacgatagggtaacctcaacacttgctgcctagttttcctaagggagggtgtgatgtggagacacttatgctatttcctgacgaatggtaccacattgcatttgagagttgagtcaggtacatgcatcattcaaagcttaattgatttgaattatggaacagttgatgactagcttattaagtgtatgttgaa

SEQ ID NO: 118220 - DNA, 389 bp, Glycine max
  unsure (1)..(389): unsure at all n locations
tgngaggattgatggagacccggcgttgagaggtactatgataagggctacgtgggagtacgtgagctcagttgaggtgggcaacaggggatggtgggttatacgtgatctgtggatgtggagaattgttttgcaccatcgcccgaccgccacctagtaccacatgtgatgggtaccccataatcctacaagcttgaaatgaggaagtttggaaaggtgagacttcctacttttaatcgttgaccacagagtgatacctggagatatgtcgcgggggccaagaaaccttggggacgtcaggtggggtgctattgcccaaaaccaagcttgaccaatcccgacccaacccgggcatagtcagtcagtgaaaacctgtgatgtaccttaac

SEQ ID NO: 118221 - DNA, 426 bp, Glycine max
  unsure (1)..(426): unsure at all n locations
agctngcatttggatggctaataattctccttgtggatttccttcacttcctgccatgttagtaagaaaaatgataaaatttggtcctcgcaatacactcgtgtttatcactcaatttggcttttactcgatgatgatcttatcgctcttgtcttttaccactctactttctcttgtaagttcttaagagaaaaccttatcaatgattctttttcaagacaacaagggaacaatcaagcaacttagaatttagagaattacaaagggttaacaaggaatattataagaataacatgaatgataaacacacccaagataagaacaaatacatgattatggacaaagacacatgataagattntcacagagagagtgtagagtccttcccattcataaaactcttttatgtcctttgtctctctttct

SEQ ID NO: 118222 - DNA, 349 bp, Glycine max
  unsure (1)..(349): unsure at all n locations
ntaacaaggctagtcacctatatgttntttatacttgtaagtaatatgacatagttaatgaagatctcggatagcaatattttgggcagtatacatcttaagtcaacccccaggttttgtataaacctgaaaacttaatgccgaagaatgtacgaggggtagtagggtttattctgcaaaaagagtttacctggcatctgaataaaaaattatgttgattgggcagtatgctggattnnatgtcatttctttcgggttttttaattaaaatggtcactagtctcatttattttntgcttgcttatagaaatgagctctaattgattaatntcttagtttaagacattct

SEQ ID NO: 118223 - DNA, 286 bp, Glycine max
  unsure (1)..(286): unsure at all n locations
gagctntatgtccatcaacaaaaagtatttttctttatttttttattgattagaagaaaatatctcctttgttgacaaatagatcccgcatatagttttctcatttaaaacaaaacatttttcttaaaaattgccttacgtctcacttgtgggtggaatgaccccctaagaaagaatattgtttttgaatagctaaaattacattgctcactaacttttttatcggattctataactctcacaataactatcttcttcttttaaattttgcaccgatgtcctatat

SEQ ID NO: 118224 - DNA, 289 bp, Glycine max
  unsure (1)..(289): unsure at all n locations
aacttagaaactaagctttgaataaactctacactggttatcagcttgccgccacaagcaaaaacgagncctctggatattgtcactcaaaaatagatgccatgattgaaccttgaacctttgaacaaacccaattcaactgatttatttaacacgccagttagacccttctgctccctaaaaaaataaaagggagccaatattatttaaataaaaattaatgatggactggggagaaagaacgatttcaatttatatcatgaaaatcttccttgagtcttggtggatt

SEQ ID NO: 118225 - DNA, 390 bp, Glycine max
  unsure (1)..(390): unsure at all n locations
agcttgaaggcaaactggattcttttgtcaactcggtaacccaactggccttgaatcataaatctgtacctgtcgcaagggtttgtggtttgtgctcctctgctgaccaccatacatacctttgcccttccatgcatcaacctgtagcaatagagcaacctgaaacttatgctgcaaatatttacaatagacctcctcaacctcagcagcaaaatcaaccacaggagagcaattatgacctttccagcaacagatacaaccctggatggaggaatcaccctatccttagatggtccagccctcatcaacaacaacagcagcctgctccttccttacaaaatgctgctggcccangcagaccatacattccttcaccaatcctacaacagc

SEQ ID NO: 118226 - DNA, 409 bp, Glycine max
tgtggactataccttcgaccaaacacatctgtgtttctgtctcggcccggatttaaagcgggttgcagcaccggctctgcttccctaaccgtactggaggcggttgccgcggctttatcctctatgggtttctagagttttaacatgacctccgagatggaagccatttgatcttttaaagccgatagatcggccttcatctgttcctgcacgccctcttcattatccatttttctggatcgagtgttataggggtgccttgatgttttcttagttatgatgaaattcctaaagaaataagcaacggtgagtatgccaccaaaacatgagtatgcaaatggatgatcggaacacttggatccaccccaagggttttagataacatgatgagttcagaacttctcatttt

SEQ ID NO: 118227 - DNA, 240 bp, Glycine max
agctagcactaagatttctgattctggttcttaatgtatcgagacattggttattgaacaatggaaactcccgagaaattaaaatcgtcattacttttcactcggatgtccgattcacgcacttcagatatcgagacgctctaaattgaacaacggaggctcttgagaaatttaaatgggctttactttacacacggaggtccgattcatgaacatcacatgttgagacgctctaaattg

SEQ ID NO: 118228 - DNA, 332 bp, Glycine max
agatattgaacgacggaagctctcgagtaattttatggtcagaacatttcactcggatgagcgcttcaggtgtataatatatcgcgacgctcgatattgaagaccggaagacccctcccaaatgaaatggtcataacttttcacatggatgagagattccgggacataatatatcgcgaggcttgatattgaacaccggatgccctcgagagattcaaatggtcatacattatcacacggaagaccagcttcgggacacaatatatcgagacgttcaatattgtgcaccggaaactctcgagattgtgaaaggtcataacctttaaatggat

SEQ ID NO: 118229 - DNA, 403 bp, Glycine max
agcttatgcgcatacttatttatgattcgttcacttgcacaagacattcgtataactaagagaaatgcacccatatacatatcaggcaccttcattacctagattatttatatgtacttccaaggtgtatttgatacctacatcacacgcatttcctttgctaaatttacatacatgcttactcaaagcactttggctatcaaaattgcatacgtgcacattctggaatttctaatacctgtacatacacaaacttcatgatgaatcttgactatctacacaataagatgctacattttatgcttttttcttcaagtgctttcactacctaaagccgcatgcaaattcaagtatattttcttttgccgattaaaatagtattcaaattaaaagggacttttgt

SEQ ID NO: 118230 - DNA, 408 bp, Glycine max
  unsure (1)..(408): unsure at all n locations
agctntagataatttacctaagattttttgttccaacttcatcatattattaaagttttggaatttgaaagagatccattgtctgctaattgttaattggtgatgccaacccatataattgttacatgtatttgatttttcaagcaattaccaatcctgaaagagctcgaccaaggataacagcaacaactaataatggtgccactgctaagacaagattttggcaaccctctttacaaagtatctcagaggctgccagctgatctttgttntcaacgtaccaacatgtggtgtgagagacagagaagcaactgaggaaaaataatataacagctaaaaaagaagaaaagcaaaactccatgattgcttggcatgtggaaattaaatatagtcactgatggtcaggga

SEQ ID NO: 118231 - DNA, 394 bp, Glycine max
  unsure (1)..(394): unsure at all n locations
tgttgcaaccagtattctttgtcctacctagctcctattggcctaacacaaatcaaaagacttgttggtttgattgcacatattgactaacactctcaagatgaacaaagtgttttgagatcttttctaaaccttaccagaatttatagaggtttttacatagagaatttgaataatgagtgcttcagttcatacttcatgtcttcaaagcttctagtatttataggtctctttcaatcaaatatttattgtctctaaacagacatattttcttccataagcttttgtgtctgaagaatatggtcattggggcattaaatgcatgtatntcttgatgctagaaaaccactcttcaccgttggcgtgttgaacactatagtaggaaaccacttcc

SEQ ID NO: 118232 - DNA, 369 bp, Glycine max
  unsure (1)..(369): unsure at all n locations
agcttngtcacatactatgtatggttgaacttcattaatgttattcaatatatacaaatgagattgtcgatattcttctagacttgaagtgataacatgcagtactcttgaacccatacctcccacttttttgtcatgtcgagactggggaaccccaacaagatttgccttcttaatgtactctaaacaaaactcaatagtttcttctgcaatgtacctttcaataatagatgttttaggacggagtagattctttgtataccctattgagatcttcatgtgttgctcaaccgagttcatccactgcaaataagtgggaccacaacaattaatttccctcaccaaatgaagaattatgtgaaccatgat

SEQ ID NO: 118233 - DNA, 264 bp, Glycine max
tgtccctcttttccctataaataggggtgtatgattgttgaacatgactgttgcaccctactggtatctgagaggccctattagagagaaaaattgtttccgcgacgaaaatccaagccgaggcgctctcgcaacgcgtccgagacgtggacgtgggtgatttcacgaagatgttgcattgtgcttcgacgttcttcggtcgcactgtgcatctcttgggccttacaacagagaggtcccccattcgaacatttcaatacattc

SEQ ID NO: 118234 - DNA, 312 bp, Glycine max
agcttaatatggcattttttgtcttcattcttgaactagcacgaggctctgcctgctacatcactcttctggggggtccacaaactgtcttgcaacaatcactccccaccctgccgaccatatccatagcgttaatgctcataaacccctgtgccgacatagactcagtcagaagctgaaacacaaacctcaatagatagcgtgattaacacctcggcgacgagcgtaacttgttggcccatgggcacatgcggaacaaagaagctagtcgtattggacattttttaatcgacactgcgtggacatccccag

SEQ ID NO: 118235 - DNA, 421 bp, Glycine max
aggacctataaaactcaagcttgaatggaccgttattcgaaatgaatttttttgttcacgacattatgacttatgatttaaagactacacaattgccatcccaaagtgattttaggaaacttaaccaagaacatgttcaactcaatgttgaattcatagacataagtcccatacatcttgcatatgtaatatgactaagatttaagtgactcactttactatattaagattcaactggtcttattaattgcaaaatcctttaatatatatagtgttcaatactatattgatgatattgtggagcgaatcactctcactatattggccaacattatttacaattatttcgtccttcattattgtgaagagacttgaacaccacttttattctgtattgtggtacaaagcagctggctcattc

SEQ ID NO: 118236 - DNA, 420 bp, Glycine max
agctatgaaaatggaacttatggcttttcatcttaaatagttgcaggtactcttccttctttagatacagttccttcttcctagcagctagtgcctcaatcatcttcttgttagctctagacattgaccttgttgtccatactgcttttgcaatcaggttactcaacacaaatcttactcaacataaatgtttcctcacaatgctagatgtggaagtgtcaaatggcatctattctatgaaagacttggcactctagaatagattccatttctattaagagtcctagtgtctaattcttgacgcattttgtatggtgtactatatgatgatgtaaatgggataatggtttctgaatttggcagcttttactatctgttaagaggcctagtgtctaatttcatacttatcattcatcttat

SEQ ID NO: 118237 - DNA, 394 bp, Glycine max
taagaggtatggcggtgctaagggatgtttcccttgataggagaaggtagaaagattgtttaataaggagtactattttgatatcacattttgttgcaaaatgattttccttcttaacaatcttcttggaggaatccttttcctctttttccttccccttggcctttgaagacgaggccttactatccttctttttcttttggttttctagtttttcttcctcttatctttcaaagttaagttatccttggccacctgcaaaagtgtttgaggatgcaacacaaatttagtgccaagatgggtgagggtaatctcattagttacgccattgtaaatgatctttctatcaaattgccatggccttactaaactaatatgccctgtctccatggga

SEQ ID NO: 118238 - DNA, 411 bp, Glycine max
taggtaaactaacaagtgtggaaaatgtgatattatctatcgctaagaaaagcacgcgtcataaaagctctgatacaacacatgtacacaatgcaaaaaatggaacaaaaaccccctaacataaagcaagcaattggtcaagagaatatttaccaaacacgactaagcacccagttaggattagcagtaataagagattagcagaagttgacaaaggaagaagcagaataataaaagagaagaagagaaaggtttgaagtgtgaacaaaaacattaaaaagcaggcaacacaaggaatgaacatgaacattaaaaagtagcatacaagacccacgggaacctagcttatgctcaaatgaatcaatgaatgaatacaaacattacaaatgaacatgaacatgaaccaaatgc

SEQ ID NO: 118239 - DNA, 386 bp, Glycine max
  unsure (1)..(386): unsure at all n locations
agcttcacttgaaattaagttatttatttatgtgagtncttgatataatcctctattttctctcctattttctctctccctttggcatcaacaaaaagccaaagtgcgtgacaaatataaaacatacataaatgactaatcatacacaagacattcattgaaaaatctaaaccaatcatgaagcaaaaaacatgagaaacccaaattaatatataaaccacgtaggcatataacataattcatagaaattcagccctactaagcaaatattaaaagaaatactaaatgttcaagggtcataataatatagatcatttggataaggcactagcatctatccagcctaaatctctttcaatgttggagaaagaatctttatatattga

SEQ ID NO: 118240 - DNA, 413 bp, Glycine max
tcctccacgttttcctccatacctagaacttttttcctttattctcactcaattcttcaccaaatcacgtcccgtaaagcccaatcttcctctttttcactcctctttcacttcaaccgatcaaaatccagaaaaacttcatcaaatggcagagccatcaaagaagagaaagggatcatcctccaccgctaccgctgctgcccatcgccgtcacggtccatccggagcactcacagcacctattcctccttctttgtcatctccaagatcatcaacactgttttcatccgatgatcaacgtctacggtacctttctcagttttcttctagaataatcttagaccctaagtacctagacgtagagttctttaatgatgaaacatttgattgctatcaagtgtttcaaattctgg

SEQ ID NO: 118241 - DNA, 389 bp, Glycine max
tgcttctacaggttgtagttgttgcactagtttttattgcccctatcacagtcaaatctgcattatttttattgttgttattcgttggttgagtaataagtgatatattagaattatgactttgactggttgttagagttctaacactcctcagtctcataaaattgtcttcctttaaactagtttattttgtgaaaaatagcaacattgtcccactgggcatgccaatttgtttatggtggaaatttgttaagtaatcgaaatttttcattattttcacacttgttttttatcaatccgcaacaacttatggtatttagtatgatagaaatgcaatttctttttattcaaactagcagttgggtttaactttcaataaaggaattatg

SEQ ID NO: 118242 - DNA, 391 bp, Glycine max
ggctgctgatactaggtgtgaagatgactcatttccaaatataagttgggttcttgatcttgcaaaagctgctgtattaacgcatggggtgcgtggacttgtaattgatccttacaatgagcttgatcatcaacggcctcctaaccagtaattctctcaagagcttattctaaacttggattttgatttgcttttgtttaagttgtacttgaactctctagaatactgggaactgcctagagaattcctttcatcccctatgaatttatattagtgaattactcttgaaattatagaacaagacatatatctgaatgttgtgtgattggaatctgacgcttccatctcgtcatatattatctatgattctatgataacatacatttatttt

SEQ ID NO: 118243 - DNA, 343 bp, Glycine max
taacaacgaataggattacaaaaatgtagttctttatatatttttgtcattgttttcaaatcaaaattaaagttttaattttgataatccacataagaaaggtttgcagcattaaatgtcattgttttcaaatcaaaattgaagttttaattttgataatccacataagaaaggtttgcagcattaaatgttattatcactgtaaaactccaattttggtcagagaactacaccaaaaacatctaagaaattagttggcacctccaatgcaagaacctcaatggttgcagttgatccagcccttgaaatgagttctgaaacagcaccatcttgggaagagaac

SEQ ID NO: 118244 - DNA, 339 bp, Glycine max
gagctcagctgcacgtatataagattattttattagggttcccacaagattccattcatacatcctcttataaggaccgggtgtgattaacttatttttacgtataaaaatctacttattaaaatgatagagtctttaatcaattaagaggggagttttgtaacaaaataagtttggcaaaaagccggtttattaaagtataaggatatgatgctatcctacctgtttgactagggatgtgattatgatttaatattaatttcaatctaataaaaaattaaactggggacttgggtagatttacattaattatgaaatcccaactaaatcaaacttaat

SEQ ID NO: 118245 - DNA, 395 bp, Glycine max
  unsure (1)..(395): unsure at all n locations
tgcatatgaagaatgtgatcattgaggcatttattgttcgtacttcttcatgctcaaaaatcactttttgtcactggtgtgtggaacattataacaagaaacttccttttgtatcaaagcatgtctatgtagcaaaacactcattttgatggcaactgaggaattncaaagcttgactctagttattcttcataggtttcagcacatgctaagagaatatctttacaaaacagatctcaaacacatagtattaaaggtcaatgttaatatcatatcaaatcatgagtctttcgtgttgttgtctgaaatatcaaacacaaacttcacgaaacatattccaatagtgcataagatataacttttaacaatggtatttctttacatctaatcaaaat

SEQ ID NO: 118246 - DNA, 426 bp, Glycine max
acacggaactataaaactcagcttctatataagctgaaccattttatcaatttatttttgttgagttttattcagaaaattagagtttatctcttttatcttagtgagagtgattctcctaaattcttgagtgattcaagaacacccaggctgtatcaaaggactttcacaacctttgtgtgttgccctcaccggaaacagtgattctttccttcctttcatcttcaaccttgttctttcaaaccacaattccagaaaatccacttctacccagaattatctcgtggccataactcccgttttaagcactcaaattaagtgattcttgagcctaaattgaatttcaagatgagacctttcacctcgttttggaatcacctcatttggagccctgtagcttgagtttttgccatttctatatttctg

SEQ ID NO: 118247 - DNA, 355 bp, Glycine max
agcttaaatcacatacaatcttctttatattatcttaactacatgcaaaagataagaatgcaaaagagaaatgggaaagaaaagctaagttgcctcccaataagcactctttaaacgtcattatcttgacgcatcattatgttatcctgggtccaacaagagttcaacttccaaaaccttcttctctagaatattttcctccatcacattcaccttcaaacaaacattttggtcaggcaaaattttctcttcatgaaacatataaaaaccgatttgctagtcttgtataaccattcgtagtttcttctctcccatgtttaccacatagcttgcggaggacataaaacgtgatgag

SEQ ID NO: 118248 - DNA, 307 bp, Glycine max
tctgccgccgggatctaagcacgagctgcactgagacaaggtactatactggttgggggggcagcaagaggcagaggtcacatgcccacgccaaaccacgcccagtgccccataaagacaacgaccccggaaccgaaatctattcaactcaggtcctaaaatgtccggcataccacacaaataaacccatgaggaacaaaagactggcgcccaataggacagagaaaacattccatcccaccgaaaacactatgcgtgaagacgcaaggcacctcaaattgcacagagataatcgaaggacgaggaa

SEQ ID NO: 118249 - DNA, 309 bp, Glycine max
tgccaccggacttagacaagagagccatgtcttttactactaaatcgcgaaaacacagcatgtattctttagcggggccatcgagccaatgaatcttgttgctggcaatctattagaatttcgcacactcacctatctacatggagcatgactagtttcccctcttatgtaaggctcacaagaacacgatctggggagcgtgtttgttctttcctgcccacaaatgctgaccgccactttttgatacattgaatcattatctatgcatagacctaagagcacagtatgatcaccatctcttggaaaaag

SEQ ID NO: 118250 - DNA, 321 bp, Glycine max
agctagaaagcaggagtgattctgtcccaaagggggcagaagcaacacaaaacgagcgttaatgcccggcaggagacacacacataatcaccagcccacgcacctaaagacagacacacgccaacccaaacacagacgcacgcacatacacgcacacacacacagaggcacgcgcacctaaagacatggacaaagacacgaacacacggggacacagacacacacagaggcccacacaccaagacacacacactgagtaacaaacacacacatacgcaaacacactcacacacatggacagacacacgcacacacacccac

SEQ ID NO: 118251 - DNA, 390 bp, Glycine max
tccaacctttcttatgtagcatggctgttttattactatagagatgacacaaaatcattaaaacattatcaagtagacttaaaatctcaaatctattgctgatttctttgaactgtaacatgatcttaattatatgacacaaattgattgtccccatagtagtaatcaacattaaatttagttttaaaaaaaataagtaagataaatgttaacaacacactttctagcacacttttttaatcacactctatgttattggttgaaatttattaaaaatgacaaaatttggagtatcccacatcatatttaaacgaattttaaaaggcactcaagagatttaaaggtatatcttacatttgaggctcattaattttggagtctccaaaacaa

SEQ ID NO: 118252 - DNA, 476 bp, Glycine max
  unsure (1)..(476): unsure at all n locations
cgatcttctctctgctgttgctgctntgagttccatgatgtggatgtagatgatagcaaaagggctttatgtgaccatacttgccacagtagtgacacctccacttctttcttttgctctttttctgctgcattccatgatgtcgagaccgatgttgtgacatcgtggctccagtcctgtttttggcaggaacaaattctgtcatggttgttctgccagcagacttaggattaaatccaagtcctctctggtttccagcattctttccaagcagcagcacctcatcaagtgtatctgagcctttgttcagcatctttattgattttgtcatgttntccagcttagagttcagaaaaccgacttcacctttaagctcagagatctcctctttatgtgcctccttctcagcttccagatctgcaatgaccttcttcagttgtgcttcttgctgaaagatcttcttacttttgatgcat

SEQ ID NO: 118253 - DNA, 361 bp, Glycine max
  unsure (1)..(361): unsure at all n locations
tgattntgggcaatagcaccccacctgtcgttctcaaggtctcctgacccccgcaacatatctctaggtaccactctgtggtcaacaaataaaagtaggaagactgactcttccacgctttctcacatcaagcttattggattatggggaacccttcataggtggtactaggtggcgatcgggcgatggcacaaatcaactatcccatttacacaagccaggcataagcacaccattcctagttgcccacctttaaatttagctcacgtgcacgtacgtagccttctcctcatttctcccaacaccggttccccattaacccctccaagctttcacaatatccaaacaattcaatcccatt

SEQ ID NO: 118254 - DNA, 308 bp, Glycine max
agctttattcaagactaagcaattttatataatcaagacggacgagccaagatagtctatagagacctagaaaggatatattaaataggcaaggaatacccattgaagcaacaaaaggatcggccaacataattaagttaaaaaggcttttacaagaaatttactctctggtaatcgattaccagaggatgttgtcgagtaccagtggccaaaactgattcacaacagccatgcaaaattgaattcaaaattcgcctcgagtaatcgattacacatatatggaaatccatgaccagcagtttctgaac

SEQ ID NO: 118255 - DNA, 402 bp, Glycine max
gtgactagttcagaataaacaggttatctcttttacatgaatggaataagattggagttttcaaatgcttgaaggtattcaaaactctcatttcagaggaatgccatatctatgaattttgggtctataatggaacgagaggaaaagaggtttgtgtaccgcatacgtcgatcctctgatgagaacaatgatccagagggaatggaggaacgcattgccgtttctatgccctgcaatgccgttgactccgactccaagtgcctttccgctttttagttggtttcgccatttgaggagttttttcgggatttcaactcgttcaaatgagagagattgaaaaatgaagacgtctgtgctttgtagggagtcatttggactataattgagtgagatatggctgga

SEQ ID NO: 118256 - DNA, 377 bp, Glycine max
agctttacaaaaatgttattaattatccagctctgccagcctctaaatgggcttgggagggtgatgacagtgatgatgaacaaaggagaagtggaaaaaatatcggctcaagctactcatcttctggtagtgagaacgtgggtgatggtcttgttaaagctgatgaatcagagtctgcagctgatacacgtttttcagctcatgctgacagtggaatgaatgaagagcacaggttgtattatattttgccttaaattgctgcctcttaccaacctttagttgtagatattattgtctatcgtgcatgtttatggctcccactgtgtctcttaaattctgactgcatttactgacttttgattgtctgtgttgattct

SEQ ID NO: 118257 - DNA, 391 bp, Glycine max
  unsure (1)..(391): unsure at all n locations
tgatgttgatgatgcaaggaccttatggaactataccatgtggnacgacaccaaaggtgcaagtccctccaattctacacatgttcctacttcacaacaaatggatttcatttaagtattacgtccaaacaaagtataccactttgatgatgcaaatgcatactttgtgaagaaccttgatgatgacttcatggagtgtttgatgaagctaaccattttcttctaccatcgcgtcttcgacattatgaagaagactatggaaaaactagaagccctcatccaacaccttcattgattgcaacatgctaatagggcccaatatgaagcaccttggaagatcaggcctgaaaaaaagccaagcaaaatggtgattcaaaactaaatcacaact

SEQ ID NO: 118258 - DNA, 405 bp, Glycine max
  unsure (1)..(405): unsure at all n locations
gggaccctaagcaccgcggctgcagcttcattgggtcttgaatctttgctgattaatgacatctattaatcaaatatgctgttgtgtttgcagcttctccccacaaagtctttggcaggcctgcacttagaagcatgcacctcactctttccaaaaaggacctattcattctttctgccaaaccattctgctgtggagtgtgagggactgttttgtgccttttgatgcctattttcctgccnaactcattgaactgctctgaaacaaactctaggccatcgtctggtcttaaaacttgaaattctgataccaatgacagatgtcttaccggatgtcacgacatcacgcttcacaacatgcagatgatgtttgacagtttgaacagattacacaagtcaattacac

SEQ ID NO: 118259 - DNA, 386 bp, Glycine max
tggaggggttgatggggacccggcgctgagattatttatgataaaggctacgtacgagtgcgtgagctcaatttaaaggtgggcatctggggatggtgtgcttatgcctgacttgtggaaatgggagagttgatttgcgatcgcccgatcgccacctattaccacatatgacgggtgcccataatccaataagcttgatgtgagaaagcgtggaagagtcagtcttcctgcttttatttgttgaccacatagtggtacctgtagatatgtcgcgggggtcaggagaccttggggacgttaggtggggtgctattgcccataaccaagcttggtcaatgccgacccaacccgggcataatcagtcagtgagaacctgttgatgacct

SEQ ID NO: 118260 - DNA, 407 bp, Glycine max
tcaagctactttttagctctaagcttgtagcttataagcttatcaactagtttttaccaaacattgcctacaagctaaaaaattagatggtagttgagagttgaaagttatcgagctagcttattgaactataagtttttgataaaattatatattatagtagcaaataaatataaaataataaaaatgaacatgttataagatatttttgtataaattttaattttattttatgcatggttaaatataaattttgacgtataatttttttttggttcatggagggtctaaaaggccaaactaattaatggcctctaaaaaatgaaacatgagcaacatctgcaagaagaggaatttgattccaagcatgccaggagtaaaaaatttgaactccttcaaacacctcg

SEQ ID NO: 118261 - DNA, 412 bp, Glycine max
agcttgggtgagtttaaagttatattgttactgtgccagcacaaaatgaaactaagataattggattgataaaaaaaacaacaaacaattagaaaagtggagcaataacaaagtttaagtgtgactccatctaaatcatgtgatgaattggagaaagaaaagggcgacgctacattagagagtcactttgtgggttatgaagaagtataaaaagcaaaatatgagacaaagattcactaaagtccccctgatagtgtataaaaaaacactgagtccaaccagtgattcaattgtgggtacaaggtcaccttgcaagtttgaaaatatctcattgagtaacattgtatcatatgtaaatatttggaactactacgaaatatttttgttaaagagtgatccaattgaagcacaa

SEQ ID NO: 118262 - DNA, 370 bp, Glycine max
ttgcctcaggtcctgttgctttacatttttttatgttcgcaagtcaataaaacttgaaatggctcatgtgtgtccatgaaatgacataattgggcaaaactatgggcatattttcacattttgttttgctcgcgggtttatatgtatcacgtgatcattcccaataaatgctagttcattaacgttgacaagccatcgcaacttgagagtgagttaaacaacatccttcttggcaacttgaagattcatgcgaacttgtcaagacaatgtagaagaatacttgggatacaaatgcatataccatgaaaagaagggacaccaaatcaactatggagaacggagttggaaccaaaaagggacacaacttatg

SEQ ID NO: 118263 - DNA, 386 bp, Glycine max
tagaagatagacatacccaacaagaaatatatatgtatgtttcatgaaaaagacaccctggatatgcatgtatgtagcaaaaaaaaacgcacaaaacatacatatgcatgttgaagacgaaagataccttggatatgcatggaagtagcaaaaacacttcacaaaatatatatatagatatatactatataaacctatatatatatacaaatacatacatgtgtatagtaacgaagccagacagcttggacaccccacgatatcgcataagctccccacaaaaatactcaggttacgcagccaagacccacggtaaactaccccgaaagagaatcaacgcacaaactaataaaaaagaaacctaagctgggtagcaaaaaaccaca

SEQ ID NO: 118264 - DNA, 359 bp, Glycine max
ccgactataccttcaaccatacttggtcgtgtttatgactcggcccggatttaatgcgggttgaagcaccggctccttttacgtacctatactggaggccggtgccctgactttatcccgcatatttttctggagttgtaacacgacccacaagactgaagccttttgatcttttaaggccgactaatcgacgctcatcttgtcctgcacgcccttttcattatccatttttttggatcgagtgttctaggggtgccttggcgttcttatagatatgatgaaattcctcaagaaataaaccaaggtgagtttgctcccaaaacatgaatatgcatatgaatgatcggagcacttggatc

SEQ ID NO: 118265 - DNA, 399 bp, Glycine max
  unsure (1)..(399): unsure at all n locations
tctttgaganaacttccttgagaagctagagcttattttctcacacccctctcataactaagctcacctccttgagaagcttgcttaagaagattcctaaagaagctagagcttagctacacatacctctctaatagctaagctcacctgcctgagatgaaaagctagagcttagctacacaccccctataatagctaagctcacccccatgacaaaaaacatgaggataaaaaaaaagttcttattacaaagacaactcaaaatgccccgaaatacaaggctaaaaccctatactactagaatgggccaaatacaaggcctagacgaaggaaaaacctattctaatatttaccaagattagcgggctcatacttagcccatgggctcaaaatctaccc

SEQ ID NO: 118266 - DNA, 406 bp, Glycine max
  unsure (1)..(406): unsure at all n locations
agcttgcttaatatacatgctatttattatctcctctgcttagagtctaatatcaaactgacacagatcccacaacagaatgcacatagagtgattacacaataacatagcggtagtcacagatttgacatatcatcagaactgaggatgaacattagaatacaaggcacataaaataattacaagtcgagagccatacaacaaaaacagtcagaagagagatgatagtgacaaacctcataacgtgccaaatgtagtccagacttcaactgacttgtcagctcatcaaaaattgatagtgtttcattgatggaaaaattcaaagtaaagctgaataacgctngcaccgtttgcagagggaacacactctggtgagggatgatagtgaaccctccctttaaattca

SEQ ID NO: 118267 - DNA, 335 bp, Glycine max
tgagatgaggaagtgttgaagggtgattcttctttcttttattgttgaccacagagtggtacctggagatatgtcgcgggggtcaggagaccttggggacgtcaggtggggtgctattgcccaaaaccaagcttgaccaatcccgacccaacccgggcatagtcggtcagtgagaacctgtgatgtacctaagcaggcgagctcctggcagtcaacagataaaaggaacaaagaccacaaagcaaggaggcttgtggtggctggccagctgtgaaacttgattgatatgtgagatatggtctctggtaatcgattaccaagggtgggtaatcgat

SEQ ID NO: 118268 - DNA, 394 bp, Glycine max
tgaatttgggtactagaggttcacaaatgaattattttaatgtcaattatgtgtacaaattattactgtttaagtcattttatactgtgcacaaccactttttgaccgttcagatttttttttccgatcgttgtactgtgtaaaatggttttttccgattgttacacaatacaaaacgcttatctttcgcgctttcttctgccaaattttcaaaggttaatgtgtatacagtcaccattttcactcccccactcaacgtttcccaacggccactctcctttcttcttctttttttcctcactgtttcctcctgcctttttatttctcacggtccactatttcctttcccactcaaattttttttctcactttttcctcctctttcctctattct

SEQ ID NO: 118269 - DNA, 432 bp, Glycine max
agcttgcatcatgctttcaaccaccttctgttgccacggaagggcccattggtactgcccctgagatctctatcctttttttgcaccacctcccacgccttgcggaccttctgaagagtctccccgccggtcttattgaaacctcgtgaaatgacaggcgcgagctcttcctctaacggtgcccctctcataaggtagcccaggtgccttatagaaagaacaggattgttactgatgcaaccccttgtccccatcaagggaatatttggaaatcctctgcacgaaataagaaccccgattcttccttctttccatcgagggaaccagttgacaaatgctccttctttttttgctaagagttggtgccaatttgccccttctttctctgtgactaacagtggctttctagtgggcagcatgtctatcttttgg

SEQ ID NO: 118270 - DNA, 373 bp, Glycine max
ttataagtgcgggtctgggagacgaaggtcaagtggtcgcgatatgtaaagatgatgttccaagaactctggatttggtccgaccatgccctcctgatttccagctgggaaattggcgagtggaggaacgccccggcatttacgcaacgagcataatgtaaacctttacagttttaaaagctctatatttgggcctaggctttagagttttcattttgttaacgctgtgtgtcttttgtctttgaatatataatacaaggatctttcttcatctgttcctggtctctacccattctcattcatttgcatgtttacttctttttctatacggcggattcgatgacgagttccccgaatgtactaatacctggga

SEQ ID NO: 118271 - DNA, 307 bp, Glycine max
agcttacaaagatattgttaatctatgcctctcaataaaataaaataaaatctagattacgataagataagatctagatgaaataatatctagatgagatcaaatcttagtaatatctagataagataagatctatttttgttgaataaaatagtttgccctcttcatgtcctatcctaattctggattcgagcccaatgctttcattatttttgaaattagattaaaagcatcaaattatctgaattggcccacataataaaactggctaattaatttgacaataagactaatcagtaattaaatg

SEQ ID NO: 118272 - DNA, 401 bp, Glycine max
gttcctcattctctggagggagtggttaaagattggctatactaccttgctcccatgtccattttcagttgggatgaccttaagagggtgttcttggagaaattattccctgcatctaggaccactgccatcagaaaagacatttcacgcatcaggcaacttactggagaaagcttgtatgagtactgggaaagattcaagaaattgtgtgcaagctgtcctcaccaccagatttctgagcaactcattcttcaatatttctatgagggacttaacaacatggagaggagtatgattgatgctgctagtggtggagctcttggtgatatgacccctgctgaagctaggaatttgattgagaagatggcttccaactcccaacaattcagtgcaagaaatga

SEQ ID NO: 118273 - DNA, 410 bp, Glycine max
agcttattggcgaatatatttgtccttgcaccaatgcttaaatgtgccgcttcctatacattgattggcacccttgatcatgcaggtaatcttcatagatgttatgatagagaatttctttagtggttctagattattgtggcttatattaattcttacgatacataaataaattattaatttttttaaaattataaaatgcaaatgagaatttttagcatagacctatttatcttttagttaaaatatgttaagaacgtataaataaatcggcctaatatatatatatatattaatctattaatatactactgccactacaaaataagtgagcacatattaataaatgtctataagaaatgctaattatactctctatgttttaataaaataaatcattaattataact

SEQ ID NO: 118274 - DNA, 383 bp, Glycine max
  unsure (1)..(383): unsure at all n locations
ntgtgaagctcctgttttagctttacccgattttactcaaccatttgaagttgaatgtgatgctagtggagttggcattggggctgttttgatacaaaacaaaaggcctatagcttatttctcggagaaattgggaagagccagattgaactattgcacctatgacaaagagttctatgccattgtgagagctcttgatcattggaatcattatttgcgttctaatcactttatattgcattcagatcatgagtcattgaagtatatcaatgggcagcagaagttgagtccaagggatgctaaatgggttgaatttcttcaatcttttaatttctcttcaaaatacaaggatggtaagaagaatgtggtggctgatgcacttt

SEQ ID NO: 118275 - DNA, 422 bp, Glycine max
agtctttggtcaatctaaagagtggtgtcttattctgcaaattgatggtttctgagtggaaaatcctaacttggttaagcctgaaattctgcagcatttgcgaagcagattcaaattaattgaagttatgtacgagcactgttgcttttacaaaaataagcactgcagcttatttaaggcacaaattctgcaacatctgcagtatgtgggtggaaaaaaggtgggagtggaaatttaaatggagaatacacttgtttgacagagagcttgagatggcagattgtttccgtaatgaagttgctggcagcctgattcagattcacaaaacagatgactggatctggaaaatagaccctactggacatatttcgtattttgacatgtgatgaatacttccatttgatgggaatctatgacatggt

SEQ ID NO: 118276 - DNA, 409 bp, Glycine max
tgtagaacggctggacatgatatatgtcagagtgttggtttggccaacggttcaaggataaaggggatattccacattatttccatgacacacatgcaacaatgatgattaggaaattttatacaaaactggtcatgcatgcacccatgtggacactcaagcatcaagtttttatggtcatgtgacactagggcttaagattcatttttcctattaaagtcaacccaatgtttccaaaacatgttcttttatcaattcatgcattcatccagtccattttgggcattttttttggaaaattttcacaccattcacccttcaggtgcatacacattttttcaacaaaaccctttgttttgatcagtgaatccttttcaaagaaaaagttggaagttatttctttttgaca

SEQ ID NO: 118277 - DNA, 396 bp, Glycine max
  unsure (1)..(396): unsure at all n locations
agctntatctcatagtaaattaagtataatttatttatgcataattccattgaagtgctggtagctaagatggaaaacatggcagtccccaaaaagattctaaagattcaaattgctcaatgtagttcctctttgagggaccatgaggtgaacataaagaagcttgacacaactcttaaaggaagtgtccaaatttgtaccgcacagtcctttttatctatgtaaattggaaaagataaagaccttgattaaaggtgaacatcaaaagaaaaggttaaatccaccagttaaacttaaaccacctttctcactgctcatgtttgactttcttggacatgactatattgttgataccattttggactaaaactaacactaagagaatacattgagaat

SEQ ID NO: 118278 - DNA, 402 bp, Glycine max
  unsure (1)..(402): unsure at all n locations
tcttatccaaggctcatgttggtggagaagcttcttcttccatggcttattccctacaggatggagcctcctctcacctcttctcctttgacttccactgcatctccatggtggaaaatcaccattaaaggacctcattgaagcttaaagatccagcctccatagaagccccacaagcaagcttccatcatcatgttttgatgaagaggccatatgccagctactgtgttcctcgagacaggattttgcacggcaggttatcgagaagcgggtgtatatcatgcgcactagcatgaccactttgaaccaaatttgaatgacgcttctgctcagcaacatccttcccagcgaccataattntgatctcctgctgcctaaatgccagttggtctatgctatcct

SEQ ID NO: 118279 - DNA, 267 bp, Glycine max
tgccacccaactcgcccaagtgagcaaggatattttcttctcatatgcaacacccttctggaggaaggcccaagagggcctgattgctatttgcgcccccatttttactaaatagaccccccatgcccttttattggagattcttttttcgtaaagttacggaacactactgatttcgcaaacatacttgatgccttacgaacggtcagaaccttgcggattacataaacatacctcttttactttacgagatgatacagaccttac

SEQ ID NO: 118280 - DNA, 364 bp, Glycine max
agcttcatgatgatgaatcacgtattaattttttgttttgaggatgacaaaactcccataagaatgatttcaagattaagtcaacacgttctagatcaagattaatttcaagattcattcgaggaaatcatgagtaatctcgattcatgagaagatgaattttcgattcaagagaagaaatcctgaagccgctggtcaagacttcacaagggaagtattgaaaagaattttttactaaccaaacatagcacagttgtgttttacaaaagagttctctcaaagttttctaagttaccagaagatctactctctggtaatcgattaccaggggttaaaattgatttcaaaaagcttttactgaact

SEQ ID NO: 118281 - DNA, 367 bp, Glycine max
tctccagctcttgtcacaacatagagatccctctcatcttgttccacccaccacacacaatggaaagcaaaatggttagaagcattgtcacatatcaagactgttggtatttgcaactttttgtatgactatcaaatcctctaaaaatcatatcaactagattttgacccacatggtgtacggattaagaaatttatgtcatattttgaaaaagatagaattgcataaagtttaatacgcatgcattgatagtataaaaatcaacatcatcttgatataattaatgacttttaaatagttattataaaagttgataaacttaccatatttgacggtttggaatcaaatgataatgtacaaaagtttt

SEQ ID NO: 118282 - DNA, 407 bp, Glycine max
agtcaactgacgcgtgcgactcggggatagatcggctacaataactccctatggaatgggaccgtggtggccccacccgatgctcctctcatggattatggcaagcattatcgcgatattgttatggagctcaacaaagctcttgcacttgattcaagggtcgagatttgccagcttcccgttggtgatgggattaccctgggccgccgcataatctgatcattctgctccttccctcccctttacctacttcactaccacaatggaaaaacacaaccttctatattttacctaatctaaataaacataagggtgtctgcttggaagaacctctgtgtgaggtttgcttctacccattatatcataagttctctccttaaacaacacaggtttgatcaaatcgataa

SEQ ID NO: 118283 - DNA, 347 bp, Glycine max
  unsure (1)..(347): unsure at all n locations
ctagctttggggagatgttgagggctctctctttacatcccccttctagaaaaaacatttttctttattttcttttttctaaataggtgggcaaatgccaaactcttattgttaaattcatagttaaataacgagaattttatgaagcctgtgcagaaggaatccccttcattatttgcaatgggggtattaacgatctgtcttttccattgtattttttttttcttcattataatcatgtgattctcatgaacttaatttttttttatatagatttgcccatataatactattacctncttgaggttttcttggtanttgtgtgacgagttcatttggaatgtctg

SEQ ID NO: 118284 - DNA, 365 bp, Glycine max
agcttgttcatgtcctcatgggctttatgcacaagacttctcaactaattgaactataaaaaaatcatatcttcggcacttgggtataggccttacttgggagcagccacatttttgtttaaaaaatgtttttctattgtgaagccgtataatagcatgaaattgtcagaaaatgacaatttatggtggctctaaaaatcttaagagatcaattacgaatattttacaagatcaacgacacaattactatttttttatgttagagacctaaataaaaactcctaaatagttgagggaattaattaaccttgaatgaacagaaacaaaacaattttcacatggatatgtaaaataaaacaccaaaa

SEQ ID NO: 118285 - DNA, 404 bp, Glycine max
tagaggcactccaagtctctagattattgtattgtttagtgccaagggtgccagataaatactattatcgggtacctgcatgtatcatgcattaatcacaagataattactgattgaatgtatgatcatgcatggcattcatacttggtgactaacccctattggatgattggatacgcttatgtgcaatggatgtattatgtaattggattctattattcaattttgttggtaaatgtgatgacaatgcttgtagaatgacattggtgcttaacgtgttatgcttggtaggaattaattgtgcttatagaattgtgatcgtgaatggtaatattgacccataactagatatcgtgttgtagcataacctcttactgctatgataatctttgtgtgttaccatg

SEQ ID NO: 118286 - DNA, 382 bp, Glycine max
tagcttcatgatgaatcaagattgatttttgagtttcgatgataacaaagatgatgacaaagagctcaaaagtcaagatcacttaatgattacaaagatgatgacattcaagatttagttcaagattgagtcaagaacactttaaggatcaagaggaaatttgatttcaagaatcaaaaatcaagattcaagattcaaagatttaagaataatcatgatcaagattcaagactcaaagattcatgaatcaagagaagacttaatcaagagaagtgttaaaagttcttttatgcattgagtagcacaagaagttctcacaaaattattaccaacgagttatactactcgtgtattaatgaccgcttgtagaaactattaccac

SEQ ID NO: 118287 - DNA, 339 bp, Glycine max
  unsure (1)..(339): unsure at all n locations
nttcaagagacctactcttggtgactgttttttatataangtcttcttggttgaacactgaacacaagggaccaacattccttgggttcattgcaagaagcacgatttgcgtcttggttgatcattggaatcaaaagactaaccgcttttgggttcattgcaagaagtgggtacaacttcttggttattattactggacacaagggaccaacgttccttggggttcattgcaagaagtgggaataacttcttggttgtaatcactgagcacaaaggaggggattcctttgtggttcattgctttgaaaggattttacaaggattgtggaaatctcaagc

SEQ ID NO: 118288 - DNA, 270 bp, Glycine max
tctacttatgtggcagggcgggcttctttcactttcttgtctccaacgcgagctttgaccaccgctcttccttcccgcgatgcttctcttcatatccgcctgagtgggcttgtagcctaaaccatacttcccacgatttcctttggcatttatcaggctagttatgccgctgttgtctttgcctaaacccattccgggttcgtaaccgttccccaacataactcgggccatcattactgctgcatcggacagggaagctttcccagagaa

SEQ ID NO: 118289 - DNA, 401 bp, Glycine max
  unsure (1)..(401): unsure at all n locations
ggatccttaagtcacctgcggcatgcaagcnttaaaattttctactaagtatttgaacataaaaactgtactaaaacataaactaaaaataaaatgtatctaaagcagaaaaataaataaaattcctgtcaacaatcatcctgaactagtgtgggctcgtcctgagctgatgcaggctcatcatgaggtgaagatggagtatcctaggctggctgaggtgtctcttgtgttgttgtaggccagggatcccaggtactctgcaccgcctatagatctgctgcataaatggtgtcttcaacgccttcttcaccctcaaagacctccacgaaaggtgaagtagcatgtgaaacctgtggagtcgcctctggagtggcctcatgagcaacctcangctctgattg

SEQ ID NO: 118290 - DNA, 358 bp, Glycine max
cgaggttgtgaaaagaatagagtccattatatccatccactccttgtaagagaattttattggtctcctgagatttcacaagacataaatgagggtgaaactcaaagaaaatagagttgtctttagcaaattgactcacacttaacaggtttttcgagattgaaggaacatgtaacaatttatttagctgaaaggttatggcagtatcattacgagaaacaaaaactaaggagccaggcacatgaaaattggctcccaaatctgggtttcaagtggagccagatgccccattaccattaaaagaagaatttgggagtttggcatttggttggctgggaccaagaacagtggacttaac

SEQ ID NO: 118291 - DNA, 404 bp, Glycine max
agcttatgagaacaatattgcttctttcatttccaaatatgcatgtgaattatgaagcatcaacaataatcaagccaaggctattgtgcatgcaatcaatggggcaaaacacaccatatgattatgatgatggatgactcaaatacttacaaatgtaaacttatcactttcaaatggagctttcacaactattatgacatgtataggagaatcaatgatttctagtcacaaaatgtcaagaacttttattttaaaaaaataacccatttcttgtacatatcctataatccaaagaaaaacatgcaaagtcgtgcacgcactcaaaaattgccctctatattaaacgataattcttcgaaactacttcattactatttagctaaaccacaaatcttcgaattcta

SEQ ID NO: 118292 - DNA, 398 bp, Glycine max
  unsure (1)..(398): unsure at all n locations
tgccgctggagttgacccatcaactgccctatctctnttagactggtgatccctaggctcttgaccttcacttgatagaacctctttttaagcgaaggcatttgacttgatcccatgttttactaaagtgaacaaaaatcggtgcgaatcaaaactccgacatctatcatgggtggaatggatgaatgcatgaagaaatgcatatgacttaaatgcaatttatgaatacgggagcccgggaaattgttcccatcttagatacaacgtcttggggtagcaaagtgcccaacgtatgtatttaagaaggtgacacggaccctccgttggtttgttaaagagaggggatcaagacagaacccgtgcgtgatgcatatgcgaaaagcgcaacacgggaatgt

SEQ ID NO: 118293 - DNA, 309 bp, Glycine max
tgaatccgacatccgtgtgaagagttgtgtttatttgaatatctgaagagacccccgaggtcaatttcgagcctttcaacatattatgcgctcgaatcggacatccgtgtgtgaaggttgaccatttgaataggtcgagtgctttcgatggttaacatccagtgggtccatatattttgcacgttaatcgggcctccgtgtgacaagttatgacttttagcctttttcgagagcatcgaatgtattgtttccagcgtttctatctatcattcacctgaattggacctccgtgagaaaagttatgaccat

SEQ ID NO: 118294 - DNA, 236 bp, Glycine max
tctctcacgaagctcgcgttatctgccccgcgagcccctaaagacttaaacaggctgccagcttcggggaggatccctagccctcgaaagctaagcagcagctactccatcaagaggggaaacaggacaagcgtaagaaagacaaaaggggatacgagttgctgtaggcactagacgcccaaatcattcctccttcaccagctgaaatgctttagacgaatctcagacgcctaatt

SEQ ID NO: 118295 - DNA, 398 bp, Glycine max
tatgcacggaaaatgtaattatgatattgtgattcccgaagaaacaccatttcctagttaaccatgcgttaagtacaattattttttaaagtgaaacgggtttatgatcccaacatggttggctcgtggtgcctaacacatgaaactaagaatgtagtgggaagtttcacgcttcccccttttttgtttttgttttgtagaggaaaacgcatggatgagcaaacatgaaaacaaatggtatgcaattttgcagatcaaaaagtttgttgaacgcatatgcatgatgatgccatgactcatgcaaaatgtgaagctgggatatgataacggacaaatgccggatatgttcattatgatgttatgaaaaaatgcttatgcgatgcatgatattaatgcct

SEQ ID NO: 118296 - DNA, 324 bp, Glycine max
agcttcaacattcaatttcgagggtctctgtatatattacgggactcaatcggacatccgagaaaaaagttattgtcatttgtatttgctcagagcatcaacattcaatttcgagcgtgtcgatatattacgggactcaatcagacatccgagtaaaaagttattgtcgtttgaatttgctcagagcttccgtattcaatttcgagcgtctcgaaatattacatgactcaatcagacatccgagtaaaaaggtattgtcgtttgaattatctcaaagcttcaacattcaattacgagggtctcgatatattacgggactcaatc

SEQ ID NO: 118297 - DNA, 405 bp, Glycine max
  unsure (1)..(405): unsure at all n locations
tatgcgcctatttccttacaaacgttctcttgcacaatacaatttaaccgaaaaaatacacccatatacaatcaaggcagcttcgttacctacattatttacacgtacctccaaggtgtatttgttacttacatcacacacatctccttggctaaattcacatacatgcatactcaaagcattttggggcaccaaaaattgcacatgtgcacatcttggcatttctaatacctatacatacgcaaacttcatgatgaatcttgactatctacacaataaggtgctacatttcatgctcttttttcaagtttttgctacctaaagccgcatgcaaattcaagcatattttcctttgctgactaaaattgtattcaaattaaaaggtatatnttttgtaaaatgttt

SEQ ID NO: 118298 - DNA, 401 bp, Glycine max
agcttataataagaaagtaaagtcttaaacttttaatattggagatttagtttggaaggttatcctgcccatagatagtaaggatcgagtcttgggcaaatggtccccaaattgggaaggaccgtttaaaataattcagatctattcgaatggtgcttatgagttagaggagctaacccctcagaaacgtactttgagcataaatggtaagtatttgaaaaaatataaaccaacactgctcgaagttaaaataagcatagaataagagaaatacgggaaacataaaaatggcgataacagttaattgccacgaaagggcatgtgtcaatattacatcgaaaagtagaatcgaaatacagaatttcgaaataaagaaattataagttctactaatgcatgac

SEQ ID NO: 118299 - DNA, 373 bp, Glycine max
  unsure (1)..(373): unsure at all n locations
tgtaaaaattaaatcctttctttgtaataatattggctccaccaaaaaagtcttctaagggagctttgagctgcggaagactttaaagagattatggtcaaactgtgattggtaaaaaagctgggccaaaccacaccttggcctaaaagccaggattagattgcctaggaccaaagactggccaggccaaagagattctttgggactagcaggctgaatctccaggattaccaaggagccaatgatgattaatgggattgccacagggcaaaacacatctaacatagactactangactagtctcctttcttgcttctcttcttcaaattaacatcaatgtcattaaaaaaaattgatacccaagggaacccc

SEQ ID NO: 118300 - DNA, 391 bp, Glycine max
  unsure (1)..(391): unsure at all n locations
agctcttccctcactctcacgttgttatttctttcttcttcctcaccattgaagcctccatcaaagctccaaactttgctcaccatttctactccaaatcgcaaaaggaagccattttatgagtcgtgaagcgcacctctacgttgtgggacttcaaatttcaggtttgggtaaacttctcctcacatgattnttcggggtattgggtttctgggagatatgatgggtatttctactaagtttgtgccttatggtagttatttgtgaaggaatttgttgaaagcatgctaaactngtcatgtttgatgtgagtcaagcttacccattctactctacggctctatgatgatgctttgtgatgtctgtgtgctgaaatttctgatataaaact

SEQ ID NO: 118301 - DNA, 396 bp, Glycine max
cggcttagtgcatgaagagatggcgcttagcgttatgtttgtgcttagcggataatcaatctgaaaaattttctaaggtattttctgcttatctcttcacacataatttaaaaaccctttttgttcattactaaataagctgaaataaatcacaatcacaagcaagatgttctaactacatgcaagaaataaaagtgaagatagagaatggaaagaaaagctgggttgcctcccagtaagcacttctatagcgtcactaacttgacgcatcatcctgttatccaagatccaagcataaaatagtgttcaatctttctattgctccaccatgatattgctttaacctctgtccgttcactacccacatcctattaaggtctttagattgagaatcac

SEQ ID NO: 118302 - DNA, 428 bp, Glycine max
  unsure (1)..(428): unsure at all n locations
agcttatacaattagtttttccgaatgtttaattaaaggttganaattttttatttaaacatatgcaaattccaaaggtcgtgggaaacgttggttggcgcctagagttttcgataatcgatacccttcttttcttgttgagtgtggaaagtatcaaagtgaaacgaatagtatattataaagctaataaagttatatgaacagagtagtttgccggtcaatatcaccctcaattaatacatgcatggccaatatgataatgcaaagagatcctttaagagaaaacaactttaaaaatatatatcggaaagagaatagttttccagataggtaatttgattcttcaaaaggatatatgtggatactattgctgtaaattgaagacaagtcatgcatgcaattgaaatacaaggaagttgtcttttttg

SEQ ID NO: 118303 - DNA, 294 bp, Glycine max
tttgaaatcaaactttaccactggtaatcgatttcaggtaattgggaatcgattaccagagagtaaatactctaataacttagaaaaatttgggaaaacttttcttgtaaaacaaagttgtgctatgtttggtttttgaaaaatctttttcaatacttcccatgtgaagtcttgacttgttgctttttggtttcttctattgaatcttgaattcatcttctcttgaatcctgaatcttcttgatgtcttttctttaatcttgaacttgaacttgttgactcaatcttgaaatca

SEQ ID NO: 118304 - DNA, 360 bp, Glycine max
  unsure (1)..(360): unsure at all n locations
agctttaacctcatcatctctcatattttttagatntgggagccaatccaatccttgtgtccggactctcagccacttatgatagtcgtcgatgctcccattactgcttcccctaagctctcggtcctttcttcacactgcatcacatgccttgtgaactccttagagtaccctcgcattggggtcactgaaaccccgtgcgatgaaaggcgtgatgctttcgtctgatggcactcctctcatggggtagccaagctgtcttatggcgaggacgagattataattaatacaaccccttgttccatcaagggaacatttggacatccttcgcatgaagatagaatcctgattcttccttcc

SEQ ID NO: 118305 - DNA, 399 bp, Glycine max
cggttcgaggtacttacccgttgaagttctatttacgatgaagaacgaatgatgaacgtcgaagaacggtcgaaaccttcacgaaattcctcacgaaaacgttacggaaccgttttggaagcgccccagcttggattttcttcacggaaacaatttttccaagcaaattcgaaagatagagaagtgcctaaagggctgaaccctttttcacttctccccctatttatagaaaattgggggagaagcttgccacccagctcgcccatgcgagcagggttgcttcctccagaagcaacagccttctggaggaatcttctggagggcccaagtgggcctggttgctatttgcactcacatttttacttaggacacccccctgccttttttttggtgattctt

SEQ ID NO: 118306 - DNA, 380 bp, Glycine max
agcttacaaatatgagttgtgtccttgcccataaataaaataaaatctagataagataagataagacaaaatctcgatgaaataatatctagaagaaataagatctagatgagataaggaaagatctagatgaaataatatctagatgaaataagatctagatgagataaaatctagatatgataagataaaatctagatgagataaaatctagataagatttggtagaataaaattgtgtgctctctgtaagtccaagcccaattccggattcaagcccaattgcttataatgatcctgaaattaaatgaaaaacacaaaaattaatccagtatgaccaaatgataaaactgcataattaattcgacaattaaggttat

SEQ ID NO: 118307 - DNA, 400 bp, Glycine max
  unsure (1)..(400): unsure at all n locations
ttagatgtggttctagcaaccataacttttgccttcttcaatattnggggtgtagactcaaagctcgcttcgagaatcttcagaccaagttcgattcgattatctttgagatttctactagtgttcatttagctggttccatctcttcaagtatcatgtcaaactttgtttctgattttgggatccttgagcgtttctttatttcttctcatccgcaacagcaccagcccatcaagcaagtcatttggaggccgccgagagccaactagatttagtacaacacgaatggggcagtgcatggctgccccggtatggctggtagcggtaggatttttataaatagagggaacttctgttcaagggagctntttcctgcaatgttggtatcagttaaacaatt

SEQ ID NO: 118308 - DNA, 388 bp, Glycine max
atcctcagagtccaccgcggcatgcaagcttgtctcagcatctatgctatatataaaccaacatgttagctatcatcgccaactaccaagaagagttgggtctagccacggtccacgagcatagaatcgcggatgagtatgcccaagtatatgcggaaaaaaaggctacaggaagggtgatctactctttacaccaagaggcaaccatgtggatggatcggtttgctcttaccttgaacgggagtcaagaacttccccgattgttagccaacgtcgaggcgatggcagacacctactccgcccccgaagagattcatgggcttctcggctattggcagcatatgattgacttaatggcccacataattagaaatccgtaggaaacttg

SEQ ID NO: 118309 - DNA, 341 bp, Glycine max
tccttttagtgcgtcacgtttaaaacctatctctatggtggtgcgagcctttgatggtactcggcgggaagtgatgggggaaatcgacattcccattcagataggcccccacacttgcaacgtggtgtttcaagtaatggatataaatcccgcctatagctgcctcttgggaagaccgtggattcatgccctgggagtggtcccttcaacgcttcaccagaaattgaagttcgctgtgggtggacttttaatgatagtgtcgggtgaaaaagacatgttaatgagttggcccttcttcgcaccataacctaaaacggcggaagaatcattggaaacgggtt

SEQ ID NO: 118310 - DNA, 376 bp, Glycine max
  unsure (1)..(376): unsure at all n locations
agcttgcttgatcggatagattgatatgcttttnactaacgattccaagttcaatttcatctcatcggcgcttgattctttgatccagaacaagatgattccgacatcttcccactggggctgcgagctcacagaaattggcatttctggtacgcaatatctaactgggttttcccagatttgatggtaataacgtcctctagtggattttatgtgctgagcaatttcttgattattatgggactgttgatagcgagagattgaccattacctcagttcatttggatcaagatgtagtacctttggttcaaatgatgttagaaacaaacctctttacttnctgttaagacttttccagagcccttcggcacgaata

SEQ ID NO: 118311 - DNA, 300 bp, Glycine max
tcaagagatcatcgcctcgacaacattattggttatatctcaaaaggggtaacaactagacactctcttaaagaattatgcaataatatggcttttgtatccatgattgaacctaaaaatataaaagaagccatagtagatgataactggatcattgccatgcaagaataattaaaccaatttgaaagaaataatgtgtggaaattagtagaaaaacctgaaaattattctatcatacgaacaaaatggggttttagaaaataattaaaagaacatgggatattattaaaaattaaagca

SEQ ID NO: 118312 - DNA, 340 bp, Glycine max
agcttgagatgaggaattgtttattgttgaaacttcctgcttttattgtcgaccacagagtggtacctggagatatgtcgcgggggtcatgagaccttgaggacgtcaggtggggtgctattgcccaaaaccaagctcgaccaatcccgacccaaccctggcatagtcggtcagtgagaacatgtgacgtacctaagcaggcgagctcctggctgtcaacagataaaaggaaaacaagaccacagagcaaggaggctcgtggtggctggccagctgtgaattttgtgtaatatgtggattgtggcctctggtaatcgattaccaagggtgggtaatccat

SEQ ID NO: 118313 - DNA, 318 bp, Glycine max
tctcaaggaagctacctagtctatttatttaatcatgtgtaacacttgttgtaactttgatgaatgaaagtcttatgagacacacttcaaagttccacttctctccctcttttattccttcaatttcgtgttgcccccttctctctttcttttcctccattgaagcatcctctccaagcttcttatccaaggctcatcttggtggtgaagctccttcttccatggcttattccctagtggatggcgcctcctctcacttcttctcctttgtcttccgctgcatctccatggtggaaaatcaccattaaaggacctcat

SEQ ID NO: 118314 - DNA, 334 bp, Glycine max
tactgtgtaaacactcttcgagtgattagaattcttattctatcaaacatctattttttgtgaaagccaagagtggcttcatgacaaaaaatacattggtcttagtctcatggggagattaatgatagtgccagaagtgacataaacagcacttgttgtaatcagaagtgacatagataatactcattcgtaataaaagttgtgattagtgaaatccttcaagttttgaaggagaattggacgtattccaagaattggggtgaaccaatataaacctttgtgtttttttactactcttatatgactaactcccttctagactttacttttatgc

SEQ ID NO: 118315 - DNA, 358 bp, Glycine max
tgccagcttatatagaaggttcgttcctaatttctctactattgcatcacctctcaatgagctggtgaagaagaatgtggcatttacctggggtgaaaaacaagagccagcctttgctttgctcaaagaaaagcttactcaagcacttgttctagctcttcctgacttttctaaaacttttgagctagaatgtgatgcctctggagagggagttggagctgtatcgttacaagtgggcaccctattgcttattttagtgaaaaacttcatagtgccaccctcaactaccccacctatgataaagagctcttatgcctaataagagccctccaaattgggaacttacctgtttacaaga

SEQ ID NO: 118316 - DNA, 319 bp, Glycine max
ttattcccttttataaaaagagaagttctgaaactcatcacattgtctaaaataggccttgaggtggatccaagtgctctgatcattcattagcatattcatgttttggtggcatactcaccactgtttgtttctttagggaactcaccataactaaaaaagcgcaaaggcacccctataacactcgatccagaagtaggatggataacgaagagggagtgcaagaacagatgaaggccgacctatcagccttaaaagatcaaatggcttctatcaaggaggccatgctaaagctttaaaaaactatagaagataatgc

SEQ ID NO: 118317 - DNA, 320 bp, Glycine max
ataatatagctttgtgtgaatgttgatgtgtggaactgaaatattattttattaaagcagaccactctctatcttattctgtactatatatatgtataaacaatgattgaaaaaaaaacttatacttctggtatgtgtttgtttatctcaaatttttaaacaatgtatttatatatttttaagatcataaaaaagggagtatctgctattgatttataggtaagattaaaagatacttttcaaaggtaaattaagatttattaatagaagactgtggaatatggtggaagaaaaatatttccccatctaaacatcttatt

SEQ ID NO: 118318 - DNA, 339 bp, Glycine max
atagcaccttatatactcaagcttctgtaacttttccataaattacggaaatggggggtgaacttatttaaatggggtgcctcacgaaacttcttgaaaaagccacttgctcaacgtggcgaacagacctctcctgtgcgagctgggccgtaataacctacctttttttcatataaataggggagggggctgattaaaaatgatcctcaacctctatgttgcgtatttcatgtgtttcaagtgacaaaaaatggttccatcacataactgtttctaagctgaggtacttccataacgcttccgaaacgttttcactgaacaaatctcgtaaagttttct

SEQ ID NO: 118319 - DNA, 316 bp, Glycine max
tcttctccctctctgcgaactgcttcttctcccttctacgttaactgcttcttcttctccgcaaggcaagcgcgaacctcgacttcttcttcttcgcgaacgaggttagtctccctaactcccctttgcttgtatgatacaacattgttgtaacagtggaaccttaggatagtaaccttatggtagaagacgagaggagaggacgcctgaaaaaatggggaaaggaagctcacggcggagccttccggaagacccgttatgggttcttccggaatttcaggaagaacattttccggaaagtttccggaagaagtgt

SEQ ID NO: 118320 - DNA, 257 bp, Glycine max
gatcatggcaagcatagtattcttcaccatcaaacgttgatcagatggattaaaaagcttctacatagcttgctaattaatgggacccttttgagtaccttatgattcaaaagatggatgttttccttcatctctatcaagaacattattctaaagttcatatcttcttattgaacattataactaggcttgagaactatataaactatggtataccttagtaaccttcttaacttgaataatgacgaagactattt

SEQ ID NO: 118321 - DNA, 225 bp, Glycine max
tctggacaatagttaaaaccctctataccgataattaatccccttctgtattacacaacatttatggactagtgattctctatgcaataaaaatttattgaaaactgcatgtcgacaaccaaattatcttggggatggaagttacaaattcctaacaaatcactcccataggtataccgacggcccactaaaaggaatattatagtagaaaaaaactaatctagt

SEQ ID NO: 118322 - DNA, 307 bp, Glycine max
tctactgcatcttttttaaggaaatattatactgcgtctttttaatttactttgaaaatgccttggggggatacataggaactaaaaaagtgccactgggtgatgccataaataaacttttttctttttctactttattaaagaacgtatctcaaaagcctcctatatctagtcgatatcaaaggcaatcctatttatcacaatttgtttttcaaaacattgagtaaaataactaatgcggatacttttaataaagacccttgactttaaatgtcccctaatacattaatttatgatcattataagc

SEQ ID NO: 118323 - DNA, 307 bp, Glycine max
tctcttggaccttgagcaagcagctaactcctcttttaagaccatgctttgtgctcgtgattggtctctctcttcccttcgaagcttgagctcactattgctaccccacaaagctccacggaatttgtctcggccatgctcttccttgcgagccctcttggattcttattcaagggctcttgcggtagccgcattttcttctcgtaactcggtacactctttctggatgtctgtaacgactaacttgaatttttctttggcaagtcttgcttttcctagttcggtttttagagctcgaacttcttca

SEQ ID NO: 118324 - DNA, 384 bp, Glycine max
  unsure (1)..(384): unsure at all n locations
acccaagcgaccgcagcatgcaacctctaaagacgttccgacctaacgctcttctatcgctcnaccctcaaagagctggcgaagaagaatgtgccatttacctcgggtgaacaacaaaagcaagactgtgctntgctcaaagaaaagcctactaacgcgccgcgttcgagccctacctgactgttcgaaaacctttgagctagaagggacgcctctgagaggagtaggactggatagctcaagggcgccccccaaactattcagcgaaaacttcataggccccctaacacccacctagacaagagcttatcccaataaacccttcaacttggaacacaccttctccaggaatcggcatctgggaccgcaccactaagtcataca

SEQ ID NO: 118325 - DNA, 323 bp, Glycine max
ttaccacgtattcttgaacccttcttccatcaagcttaggtaagtgacctccattttcaactctaaggttgattttcacttcatcttcttatactattctcacttgtagtttcaaaaccttattttgcacacttgacggatggaaacttgaacctaaactccctcattcttccttctaaatttggcggaacctataagcgccaaattttagttatttttgggattaaattgttagcaattatctttcaattgtaataggtttcttataaactacttatatatatatatatatatatatatatatatatatatctatatatata

SEQ ID NO: 118326 - DNA, 339 bp, Glycine max
acaccataaaatactcaagctaaacggcaggagaatacgttcggtagaatgtggtagagaatggaaaaaatattttatgtattatacgactaatactatttattactttgggggtgtcttcaaaagacaactatggacattctccaataatactaacacatgctacatatgtaaagcccactaccaaggcccaattttcaaatattccctataccatgtcaagcacataggcctattccattctattacttacgtactaaaaaacataaatttagactttatgtctattgtactgttaactaaaacactttctcatcttgttaataaacatagagtaca

SEQ ID NO: 118327 - DNA, 342 bp, Glycine max
tgttaaagaactgtgggaaaaatcaagcaacatagtcttgttacagcaccatactgttcgtctttgtattgataataccacatccacaaggtgtctgaagtatgagtgatagtcttcaacacctataacctcatcgtggcggacaaaagtgggcagtaaacttgaatgatcgtcattgtccatgccgaaggtattctgcgcttcactatccatgttcacatattattgcagcttgtggttacctgagcatgaactactaccaatatatatatgttgtttatacaaacgagcacatcttaaaagcttactccgcacaatggtggcctcttgggaatgaaacgg

SEQ ID NO: 118328 - DNA, 316 bp, Glycine max
ttgaacaaacgaaatggcatcatgcggcaaatgtgaaaaacacccttattacccatattaccttacacttacccttgtctcaattttggtgtgatgttgatcatcactcaaagtgactctttatttatcctttgattcgcaggatgacaatatgcaaatgcatgcatgcttatggtttggatgtttaagtgcaacaattaaataggtgttattgtgttcgattttacttacgcttacggcaccccatgatttgagccaaaaggcttcttattcaagatcgagagtgtgtataaatgaaagtcacaacacagaaatt

SEQ ID NO: 118329 - DNA, 327 bp, Glycine max
tagcttctcaagctcaaccccattagttctcttttttaaatcaacactcctttgctcctcttgaatggaagcaaccctcaaaggggcactcactctaaacccccaaatcctctccctgaagttgcacctcaaaggttgaaacttaggacctgccactaccttgtttgcgaccaaacattcaacccttgaagtgctggacaatacacccccacatttaagtctatgaattactggagcaagaggcttcaagccacattcagataatatccaagctgccattggacttaaaaatgaaacttcagaaaattcacaaaaaaataagtttat

SEQ ID NO: 118330 - DNA, 311 bp, Glycine max
tagtgagcttgtaaacccatcctttgaatttgagtcagacctacctttatcatccagcaaagtgcattcaccctaagcagttgcacacgactcagggaacttggaatttgaatgaataataagctacgaacttcactaaattccttgactgagtaactgaaaagggaatctaacacgcccaatgcccccaaagatgaaaccaaacatactactacttgtctaaatgtcacacactgaaattaatggcagcaaacatttccaccaaacaaaactttgtacaaagtcatgtgtagctaagctatacgtaccag

SEQ ID NO: 118331 - DNA, 280 bp, Glycine max
catgcaagcttaatgaccctcagtctctcaatgattatttacccatctcccttatacggtgtgtctattaaaatgtggctaatagtttggccaaaggttagcccttgtgttacctcatcttatagatgaaaggcagacggcttttattatagggaagcacattcttcatggtggtttgattgccaatgacgctctagctgaagccaatgctataaataaaccttgcatgggtcttcaagcggattttgaaaaagcatatgaatcccgttcttggggtttt

SEQ ID NO: 118332 - DNA, 316 bp, Glycine max
ataaaagggatgccccacactatttccatgacacatatgcaaaaatgatgatttggaaactcttatgcaaaactggtcatgcatgcacctatgtggacactcaagtgtcaaacttttatggtcatgtgatgctagggctcaggattaatttcctccattttaaatcaacccaatgtttccaaaatatgttcttttatcaatttgtgcattcctccaagtccatttcgggcatccggagaaaattcacagcattcacccttcaggtgtaaacaccttttttttcaaaaactagctatgatcagcgatattttctttt

SEQ ID NO: 118333 - DNA, 318 bp, Glycine max
tgatatgaggaagtgttgaagggtgaaacttcctgcttttattgttgaccacagagtggtacctggagatatgtcgcgggggtcaggagaccttggggacgtcaggtggggtgctattgcccaaaaccaagcttgaccaatcccgacccaccccgggcatagtcggtcagtgagaacctgtgatgtacctaaacaggcgagctcctggcagtcaacagataaaaggaacaaagaccacaaagcaagggggcttgtggtggctggccagctgtgaattttgtgtgatatgtggattatggcctctggtaatcgattacc

SEQ ID NO: 118334 - DNA, 309 bp, Glycine max
tctcttggaccttgagcaagcagctaactcctcttttaagaacatgctatgtgctcgagaatgggctctctcttcccttcgaagcttgagctcactattgctaccccacaaagctccacggaatttgtctcggacatgctcttccttgcgagcccttttggtttcttattcaagggctcttgcggtaaccgcattttcttctcgtaactcggcacactttttttggatgtctgtaacgactaacttgaatttttctttggcaagtcttgcttttcctagttcggtttttagagctcgaactttttcata

SEQ ID NO: 118335 - DNA, 398 bp, Glycine max
agcttagtggctacgtgtaccgccaaatctatttgctttaacggtacagcgctcgcttaccgatctggcattgccagcgcaaaattgccccccatgcagatcaatgctcgagcctgccccgtacatattgcttgcatgctggcaattgcagcatgtccaggtgcatgaggtggggtgaatccataacgctcacccaaacgagccataaactctgcagacggtttctcggtgataccgacagttccgtcgccctgtacattagagtgtccacgtagtgggcagatacccgcaccaggcttgccaatgttacctttcatcaacagcagattgaccagttgctgtacgttctgggtaccatgttcgtgctgagtgattctcattacgtaacagaaatggtg

SEQ ID NO: 118336 - DNA, 320 bp, Glycine max
ttcgacgaaattggcgcacgccttcaaagctatagtgatcccaatcatgttgaattctatacttcgggccgcacttccaatgaagctgcctttctttatcagctttttgcccgtgaatacgggagcaataactttcccgactgctccaacatgtgccatgaaccgacaagcgtgggtttggcagcgagtatcggtgtaggtaaagggaccgtgttgctggaagactttgagaagtgcgatttagtcatttgcattgggcataaccctggtacaaaccaccctcgcatgctgacttcgttgcgcgctttagtgaaacgggg

SEQ ID NO: 118337 - DNA, 254 bp, Glycine max
gaaaatccagctttttatgcactgaaaacaaagtagataaaaacaggcttgggtgaaaccgacgcagaggaacaagctgaaacccacacggagaggtacagagggcacatgcacgtgggggctctacagggagcgagcattcaggtaaaaactcccctatgacctcccggggacctcactaactggcgggcacacacacgtattgacggcagacatcgagtgaaatggcccccatagcaagcacaaccaagcaa

SEQ ID NO: 118338 - DNA, 325 bp, Glycine max
tgtgcgacaaccccagagaagattgaatcctataatgaaggaggatgtatgaaaagaagtgctcaagttattagaggcaggccttatctatccaatttcagacagctcatgggttagtcctgttcaagttgttccaaaaaaaggagggatgacagtaataagaaattattgaaatgaactaattcctaccagaacagtcataggatggagaatgtgcattgattatagaaagcttaatgaagccacaagaaaagatcactacccacttcccttaatggatcaaatgcttgagagacttgcagggcaatctttttactgttttttg

SEQ ID NO: 118339 - DNA, 322 bp, Glycine max
tgtgggaccttaacaggaacacccgttgaaattcggaaagtcttcttataaattgaaagcatcacccgctcctgataaagattcagaacattcaagatttcattgttggcttcctaacacgtctgtggagaaactgcagctggatgtacaaccatttgaaccaccaactcccattaatgtttgccaaaaattgggaaataatatggattcatttgagcccacgccaatcacgtttttcatgacttggatttttttttttctggttaatgttcatattgaatgataatgaatttaaacaagtgattttttaggcaatttgcat

SEQ ID NO: 118340 - DNA, 325 bp, Glycine max
atataatacttagcttgaaagaagtctaaacagccttcaagacggccaaatttattttgctgcaatgatcaaaggacagatatattaaaaatttacaaaagaaagcttggagggcctttaacttttaacttactaacctgaccattttaacattcagcgtataaatggataatgctaaacagtaaactcagcatagcgcctcatgacatatagagggggaacaagacgttccataaaggttacatatcatacccaagccgctgaggggcatgtcaaaatcacaatgtaaatcgggcctcaaagagatattgaccaggcccaaaaa

SEQ ID NO: 118341 - DNA, 145 bp, Glycine max
acttagcttacttaatcttgagaggtgcactgtgatatggcgaaaacaacatgcttttttttgttttttccctaacggtgccctgagaagcgtctcgggggtaatgataccatggggccgtctagcggggtactcttatccaaat

SEQ ID NO: 118342 - DNA, 320 bp, Glycine max
ttcaagccatagtccaatggcccacgccattatcacccaaagaactcagatcctttctgggccttactgggttttacagaaaattcatccagaattacgccaagctcgcggccccccttacgtcactcttggccaaggatgcattcgaatggtctttgaatgcgcaatctgcatttgaaacattaaaaaaagctatgactaatgctcccgtgcttgcattacccgatttcgatgagccatttgcgctaaaaaccgatgcttccggcaccggcatgggcgccgtcctgatgcagaaggccataccactgcattttttatca

SEQ ID NO: 118343 - DNA, 309 bp, Glycine max
  unsure (1)..(309): unsure at all n locations
agcttcagctntactagttgtctaggagttttctttatgtggaatatatataccgggtagaaattccactataaagaatcaggcgagcacgagcagtatccgcttccaccgcgcaaacctccaatccatttatcaaagctgtggcaacaataaaaggtgagacttttcagaatttagaaaacaagtttcctgaataaaagatatttacaattataaaagacatgctagtgatgatatagcacatcaagtcatcaagtatgcaaaagattttcagcatccagatagcaaaaaacttatattagataaatc

SEQ ID NO: 118344 - DNA, 321 bp, Glycine max
  unsure (1)..(321): unsure at all n locations
tgttcctactgtccttgagtctttgactcatcaagcttaggtaaatgagtttcatcattcatcctagaccttattcttcttcattctcttgttctagcttctctaataacttgaaactgtcattttgttttattcatgaaaggaaactttgaaaactgaacattcttcattctccttcaagattttgtgaattcatcaagaggtaaagggggtctctccatctcttgaaccatatgcttgttgaacttccttgaacatgttattntgaaattttcaagcttgctgccatgtcttgaatcggtgtgttgagcctctttgctt

SEQ ID NO: 118345 - DNA, 460 bp, Glycine max
  unsure (1)..(460): unsure at all n locations
catgcaagcttgcatatagttattaagaggagaggatgttttctcatntcattccatgcatacaatgcaggttcatcaacgccctgctccccaatatcatccttcacattagtatctaaacctatattcagatatagcaatcagaaaaatgcatctttctcatcttcaatattaacaatacaacagcaacaatcctactatgtgaggttggctacatggatcacacggcagcattcggcatggttaaaaaccaaaagttgggaaatattattaagcctgagatctcccaatcttcaattattaagattgcacaaacaattcccatttcaggaacctacacacacacaccagcatacaaacacatacaaatgtacatataattagaaagtaattaattaattaaattaaaattaaaaaaccaattaccagcatctgaccgctcaactgtctgatcttctct

SEQ ID NO: 118346 - DNA, 319 bp, Glycine max
taaatttggtctagtatagtttgtttaacgaccttactgggttagtatcttctataagtttgggtcaatcaaaggaagataagactttgctaattaacatatccaggttagggtcactcaaaggaagaatagttaaatatttgataccaaagatcaagttagcagaacacaaacaatggccttcaatatatacttttgtgtttgtttttaccaattcacataaaccagtttaattaaaatgacaaaaaatagataaagtatagaaagattttacgtactgcatcctatttatcaatttagtttggtttcttaaaataca

SEQ ID NO: 118347 - DNA, 329 bp, Glycine max
actcaagcttctagttcccacatcttcctgttaaactgaatcattggatatgtttttttattgccacgccactagctgtagattctgagagggagaagaggtcaaaaggtaacttcctaagtaatcaaacttcacatttgtcgagacacataaaaattcataaatgacaatatcacgttatgaatgataatgatgcacgaaattaaaggactttttttttggtgatgagaataaagaaacacctttttcagcgttaactgtgaaatattataataaaaagaaaattgccttacatagttgggtgaatacatataatgaaatcttggaag

SEQ ID NO: 118348 - DNA, 222 bp, Glycine max
aaactcaagctccccggagatgccgatcgagcatttcccaatcgacaagatccaattgtggttaaatggattgaatgcacaaaacgatggccggagggggtctctaaatggggccgactggatatacttttccgacaatgcacaatttacttttacaaacgctgggcgagagatatttatgggggtgggaggaggtcgcatgattttgagtcgcctaaaaaa

SEQ ID NO: 118349 - DNA, 318 bp, Glycine max
cggcatgatctactgatattttcttttcaaccatcaattagaaatatctgttgactccaaaattcccatggcatatcttccactggttcttccagtgtcaagtgtatcttgaaatgccttcacccactgttgatatagctgaacataagaatttatctcttcatcagattttttaagactgtcctacaatagttttatctttcgttgcattagttcattatattttcgaaatttatcagatgatagcttatagatattagcttcttcaggagatgctttcaatttatcaaccttttttcaaataaaagcttaaagata

SEQ ID NO: 118350 - DNA, 316 bp, Glycine max
taagaaaaagcttaacaaacttagaaatcaagtgatcatgtattccgaaatatagggggagaaaacggatgcacattttatctatatacaattgtttgttgcttgcttgaatcttgatttcacggattgtattgtcatcatcaaaaagggggagattgtagaagcaattggctttgatgttatgatgatgatcatgatgatgtgttgcaattgatgcaaatgggcttttcaagattaaaattcatgacaatactttcagattacaagtcacaacatcaggagatcacttgaatattagggagggaattcctaattg

SEQ ID NO: 118351 - DNA, 333 bp, Glycine max
acctatacaaacttaaacttgtctggtgtttggttacaccaacattttatgtggaataaatttcttacttgctaaacaacatattcagcaagggatcatattaaatcattctcatgctcccattgccgataaaaatcgtgccaagctagaaactttcttggaaattgtgacatcaatcaaggatatttccagaggctacgcaaactactgagaggtccataaattccactagtgaactaaacttttaaacttgtataagttcatttcatataaaaataataactaaatatttatgaataacatactaattaataaatttgcgccatataataa

SEQ ID NO: 118352 - DNA, 318 bp, Glycine max
aagaccgggggagaagaaggaaaaaggttattaaaaagggagggagaggggaggagaaagggaaaagaaaaaaaagaggaaaaaaagaagggaggtgaaaaagagaagtggagaaaatgaatgagaagagagaagaaagaaaaagaagtgagggagagatggaaagaaagagagaggggaagaggaaaggggggtaggaaagaaagagggggggggagaagagaaaaaaggggaaaagagaagaagggaaaaagggaggagaaggaaagggataaagagagaaggaaagggaaaggggatggagaaggagaggtaaaa

SEQ ID NO: 118353 - DNA, 247 bp, Glycine max
  unsure (1)..(247): unsure at all n locations
ttctaaatntacatgtgatatgtgaagaataaaaatacatttgactcagtctatagttagagattgactttcaagatgaattccacaacttaagtaattaaggaatctaataacaactaattaattatggtcctataataaaatacaaaataagtgaatcacgtttgattattttgctttgctagtatttatttttaagagcattttgctttgctagtatgacattttaagataatgtttaatgtta

SEQ ID NO: 118354 - DNA, 305 bp, Glycine max
ttagtgacacttgaatgctaacttataaaaaatatggtgaaacttattaaaggtttctatgattttgacaatgttgaggacatgataaatgccaatttggaatttaaaacatggttggaaactcttattttctaagaattgataatgctgtgagatggatgaatgatgtttctttaattacaaatgattatgttgaaaggaatttatatgtacaagaggatgtataattgttattgaaaaaaagttggtgcttttaaatcttgttgatatgttgatgatgatgcatattttatattagaaccaac

SEQ ID NO: 118355 - DNA, 306 bp, Glycine max
  unsure (1)..(306): unsure at all n locations
tcgncagttggcggtgcttagggatgtttccctttattttttaagtacaaagattgtttaataaggagtactattttgatatcacattttgttgcaaaatgattttcctttttaacaatctttttggaggaatccttttcctctttttccttccccttggcctttgaagacgaggccttactatccttctttttcttttggttttctagtttttcttcctcttatctttcaaagataggttatccttggccacctgcaaaggtgtttgaggatgcaacacaaatttagtgccaagatgggtgaggg

SEQ ID NO: 118356 - DNA, 327 bp, Glycine max
  unsure (1)..(327): unsure at all n locations
accctctccgcccacgtncattatcttgatcaacaacaagggttgaaggcggacaccgtggacgagccggcggcggatgagaactgcatgagtttccgggaacgcgaagagagcgaggtggcggaagtggagatatcggcggaggacgcggtggcgctgccgttctcgtcggggactacagggctggcgaaagtggtggttctgacgcacaagaacctggtgacgggcgtggcgcagaacatggagggagagaaccccaacgtgtacctgaaggaagaggacggtgcgctgtgcgtgcttcccttgtatacatattcgtcatgcaca

SEQ ID NO: 118357 - DNA, 271 bp, Glycine max
tgcgtaatctttgtccttaaagtttgtccttacgtgagaaaaagaatttctgatatcatatactcgtatattgacttaattaagaagttatatttatttcagatttctttgaagtgggagtcatgctcacagacagtgcatatattgaccaaacaaaattcagtattagttaaaattctgtgtgctgaaatgatacgtatgaattttaaattattgtaggatttaacttttataattccaaagtcgggttatcttaatttgggactgattt

SEQ ID NO: 118358 - DNA, 332 bp, Glycine max
agcctttacttatgtggcagggcgggcttcctttatctttctgcctcaaccgcgagctctgaccaccgctctttctttccgtgacgcttctctttatatctgcctgagtgggtttatagcctaaaccatactttccacgatttcctttggcatttatcaaactaattatgccgccgttgtctttgcctaaacccattccgggttcgtaaccatttcccaacataactcgggccatcattactgctgcatcggataggcaagcttgcccagagaaggagtccatggaggagatgctgaccacctctaaagactggaaagcggttctaacgatc

SEQ ID NO: 118359 - DNA, 322 bp, Glycine max
tcaatgccgtctcaactcactacaatcttctaaccttgatccctcatgtgattaaagctaaatcacttaaccccactcctaatcccttagcaagtgcagttagatgatttgatatgagcaagaatcatttagagactaatgaacaccactctatccctagaagagaaacccattagttaccattctcaaaactcaattttcaaagcatttcctaatgacaaagaaaacaacaagacaaacacatggttgatcaatccacaaactaacattaaaaactcataaatgaaaataaaattgaatattcattaaataaatagtgaag

SEQ ID NO: 118360 - DNA, 365 bp, Glycine max
taagcactgagctgcaactataaactcttaaaagtgaatttttatttgctgctctccaaaacacaaacatctaaatttaaccataggaaatttgtaacacaacataggcatgtgctaagggtatataaagaaatttgcatggaaccaaaactagcttgattaattaatagggataaaaaagtcattacccttgggtgtattcaacatgtatggaatgttaaggacattaactgcatccacatgccctttcttcaactctttcactgtcctaccaaaatatctacatttacaagaaaagaagaaaaactaataaagattgaagagtacgtcacaaacgaattaacaatatccctggtgaatgcata

SEQ ID NO: 118361 - DNA, 312 bp, Glycine max
tcctttcaatgcgtcacaccttgagcccaacctcatagtggtgcatgctttttaccgcagtcgctgggacataaagggggagattgatctcctaattcaaaatggaccccatgtctgccagatcacttttcaagtgatggatattaacccggcctatagttgccttttaagctggccttggattcacttaatcggggtattcccttcaacacttcaccaaaggttaaaatttttggtggaagggctgctaatcatagtcttaagggaagaagacattctggtaagttgtccttcttctacaccatatgtgtg

SEQ ID NO: 118362 - DNA, 176 bp, Glycine max
aatatctcccatgcttgtcatataggacgtttcacacacctttgggtgttgccccttactggaatcagtgattcttatcttcctttcatctgtcaccttgttctttcaaatcacaatttcagaaatttcctttttacccgattatctcgtggccataactacccggttagcactct

SEQ ID NO: 118363 - DNA, 464 bp, Glycine max
cttctaactccaatgcataattaagattttctatttgagcttattttaactcactagaatggttgtagtgagctatcttgttcttaactcatcagaacacttgcattaatatgttctttatatatattttatcgaaacacttggcagatatgttagtcatcataacattctccatcatccttatattttgtattgctaataatttggcataattaaaaccctaagaagtagactcaacagaaaggagttgcaacacatagtaaccaggagacattagatttttctttcaattttctgacataatcatgagtgtcgtgtacgtatgccaatgtgccacgttaaaaagtttctcgtcacactatgatttaacagttggttcatttctgcatttttattcttttattacctacctaactactttattaacacatttcaattctgttcaactctcttctataccaaac

SEQ ID NO: 118364 - DNA, 329 bp, Glycine max
ctatataatactcacccttgccacccagctcgcccaggcgagcaagggtgcttcctccttttttttagccttctggaggaatcttctggagggcccaaatgggcatggttgctatttgcaccccccctttttactaaatgcaccccccattctatattttttgtaattctttttccgtaacgttacgaaactttacgaatttcgtaacgatacttattttccttccgcaaggttacgaatccttaccgattatgtatttactcttttttagctttcgaagaagttacggaaactcacggattgcgcaaaaacacctcttttcgatttcc

SEQ ID NO: 118365 - DNA, 314 bp, Glycine max
tgtataatggttggacaagatacatgtcacggaatttggtcagtgtgttcttgataaacggatgtcccacattattgccatgaaacaaatgcaacaatgatgatttggaaattttatgcaaaactattcatgcatgcatttatctggacactcatgtgtccaaattttttttggtcatgagatgctaaggctcaggattcatttttttctattttagtcagcccaatgctttcaaaacatgttcttttatcaaattatgcattcatgcgaaaccattttgggtgttcgagaaaacttttcatggctttcatcct

SEQ ID NO: 118366 - DNA, 260 bp, Glycine max
  unsure (1)..(260): unsure at all n locations
tagaggtcaccagtttgcgagaattggggcagctgatgggtcagtcntcaacgtcaagccttctgcaagacctatgggaagatttgggacctatctatggtagaagtctccgcgttagaaattcatcccttactcatttttatgatcagtccctaaggtgcttcaagtttgggggcttctacctagtactgactgtggaagaacttgaagaaatcctacgatgttcattgggaggaagaaagacatatctctttttgggg

SEQ ID NO: 118367 - DNA, 176 bp, Glycine max
ttgaggagggaaagaaggattttttttgtaagtatacacgaggagaattaaaggtgtttggaaaaattgctgattagaccatggatcgaaagacataaagcaaaggtaaagggagaaagatgtataatctgaaaaaataaaaatgttgaaagtgaataacaaaaatatgagactaa

SEQ ID NO: 118368 - DNA, 329 bp, Glycine max
  unsure (1)..(329): unsure at all n locations
actatnataatactcaagcttgcatgggaagcttttcaacatgtagcatcctatgacataatcattatctgagaggttgtggaaacagagtgtgggaggtacttatgtttctagtttgtgaggattattaatttacactccttgtgagatggaaatgtcaattacctggaaaatgccaataatttataaatataatccttgaatggttaagctcaatctacagccagcagattaattggtgtactaattttcatatattttctagatttgaagtttttgaaatcagtgaacaaaattgaaattatatatttaattctaaaagaactggc

SEQ ID NO: 118369 - DNA, 137 bp, Glycine max
agcccggcaagcacccaccaccccaaagccagaaccccaagagcccaaacgcaccccaaagcagcacaaaaccgccggctgacaaccaagaccacacaccacccttaacacgaaccaaaacaccaacgaggggaaga

SEQ ID NO: 118370 - DNA, 320 bp, Glycine max
ttttggagtataaacatgggaccaactcattttatttcaaaaaggaattcatatctagtcaaggtctgacagaccatacaagtttcctaacgatttctaattatgtgggccattaagtctatcatatgctgacaatagccgagaagcccatgaatctcttcgggggcggagtaggtgtctgccatcgccttggccttggctaacaatcggggaagctcttgactcccgttcaaggtaagagcaaaccgatccatccacatggttgcctcttggtgtaaagagtcgatcacctttactctagcctctttttccgcgtatac

SEQ ID NO: 118371 - DNA, 268 bp, Glycine max
tctaagctgagtgagaaagcgtaaatcgtcttctactttgtagttgtatccaaatggtacctgtaattttcacgggggtcagataattgggacatacgtgggtgttattgcccaaaaccaatcttgactatcccgacccaaccgggcatatcagtcctgagaacctcacgtcctagcggcagttcctggcatcaccataaaatcaagccacaacaggagctgtgggcggctggcacttgatctgggggattgaaataccttggtatca

SEQ ID NO: 118372 - DNA, 195 bp, Glycine max
atgacctcctataacccatatactacagtatgtccatggctgatataaatcaatgtacgaaacccatgtgacgaaatgaaccaacctaaatataatttttactaccaagcatgccttagccttttaaaacactctaggaactgcaagatcgtcgcttaaaacgtaaaatttgtggaaatttaccttggccctcta

SEQ ID NO: 118373 - DNA, 378 bp, Glycine max
actcaccatatatcttgttctcaggtgagaatgtcaatccttaccctcggaagcgaacagaatagaagggaaatttccaatctaagaaaagaatagaaggaacattccccaatcctagagtgtgagaaagcaaaaagaaaagaaagaatattctccatcaaagaatgggagaaagttaaaatgaagaataagaatgaaagaaagcttctgatcagggatcgaaggaaaacagaagaaatgtgctgaaaggtctttggaccggacaatatctgaacaatacagaattggcacccaatgaacaaaaagaaggaaagggaaccacgacctaaaatggtctttcccttttgttaccaaccaaaatccctgcgctagcgactt

SEQ ID NO: 118374 - DNA, 279 bp, Glycine max
tccgttctcgagagcatttctaatttaagcatttcagcctttgctttcgtgtagcttacgaaaaacgtcatttcttctcctttctttcttccaaaggcatttctaacgttccaaacactttcttcatcacccacagccaccattagccaccacaaaccgccgttgttctccgttgcaaccccatactgagaagaacccttcgaccgaagcggaatcttccaacttgactcccaatttcgggagaaaacaaaaccctaatctgacctttcatttcctttg

SEQ ID NO: 118375 - DNA, 303 bp, Glycine max
ttaagcttgttttaggctcttggaaaagagttttcaaacctcttaatggaggtagacttattcttcaatcttttaaagcacttaataaagtttccatcttgtctcttggaaatttgcattttcgtcaaatcattgggttgggatgctttcagctatagtttttaaatatggagtgcattttccaaaattcataaagtcatcttttgtggtcaagtattaaacacttatggggcattgtgaattctaacattgtgtgggtgattggaaaagggcaaaaatttatttttggtcccatcagagggc

SEQ ID NO: 118376 - DNA, 383 bp, Glycine max
accaaatccttgagatggattctgagaattttgcttcaatcaaaacgttctgctcagtgtggtggagcatgaatttctacgtgttttggactgggtttttagagggagaggtgtaaaatcctatttctcacattgaaaaacatatttattatctatagatcttgcttagtgagctcgtcttgctaagtgcgagtccacttttgctgctaagtgtaattcctcttgcgctaagcgtgatagtctcgctcaactcaattacttctctgttggaaatgccttacggcttctctgctatcgagagtctaaatttttatttcactattctaatggcatccatgggactgtttatgacctatgtcaatttaaacatccactttactatc

SEQ ID NO: 118377 - DNA, 315 bp, Glycine max
tattagtgggaaaaataattcaccccttcttaagttattgaggtctctggtccaacatttgcaatatctaattctacttttaagttaagtaaaatgtagttttcaatacgtgagattatttgttttgtttgatgcaggctgatgataatggagatggaaagttgacactccaagagatgcttgatcatgagtttactttctacaacacagttcatgcagatggtcaccaagaaagtgatgatgatcatgatgagctttgatgtatgaacctagttaccagaaaagtctaacgttaacatataaatgaagtagtga

SEQ ID NO: 118378 - DNA, 313 bp, Glycine max
tggtatcaaaattaatgcttatcatctatatgtgatttcatagaattttgttaacgctttgtgccttttggggcttcttgggggcttacagttcattcccaaacactcaatgtgtaaaaagaatctacaattgatttctagtatgttcttagtcttttcaaagtaacaaacacaactccaacaacaagaaaccagtcaaacaattatcctttaatccctaattcttcaataaagaaaaaaagggggaacacatacaatcaatcaaacattcaagatacatcaaacaattaataaatttgagatttggagtatt

SEQ ID NO: 118379 - DNA, 320 bp, Glycine max
  unsure (1)..(320): unsure at all n locations
tacccctttaatataatgcgtttgctgatcaaaaaaaaccgctccgctctattntcaaatgatggagcgaaatattcgtttcattattctatgtttataccattctaaatacctactttctcaaacaatggaatggccttggtattttaatcatgtcattccaatctattccgctttattatattctcatacttttgtgtccattctctaccacatcaattcaaacattacctataagtagtggattatccggtggagtcctcgttgaagccaacaacttctctgggctagtcatattttataggcgaagtaatatttta

SEQ ID NO: 118380 - DNA, 325 bp, Glycine max
actatatgaatactaaagcttcattattttatttcaaatatgccaaaaccatcattatatttttttgatatagaatattcaaagcttgagtgttgaagtgaccaaatttttaatgccataaccatgaattattaattgtaactcttatggcaatgccagtattagtagtatacttaaagcttattggaaaaaacttatatttcctttctccattttaactatggcaatctcttgccttttgttatttttatcatagataatgcacgtatcttcttcaaggtgaagataatagccttttttcatcatatagccaatgctcaagaga

SEQ ID NO: 118381 - DNA, 238 bp, Glycine max
  unsure (1)..(238): unsure at all n locations
cccggggcgaaaaacaagagcaagactttgctttgctcaaagaaaagcttactaaggcacccggtctagctcttcctgacntatctaaaacttttgaaccagaatgggacgcctctagagagcgagtcggagccgtattggtaccaggcgggcaccctatagcttatcttaaggaaaaacttcatagggccaccctcaactaccacacctatgatagagagccttcatgcctaataag

SEQ ID NO: 118382 - DNA, 340 bp, Glycine max
ccacactatagaccactcagctttaccaagtattcttgaacccttcttccatcaagcttaggtaagtgaccttcattttcaactctaaagttgattttcacttcatcttcttattctattctcacttgtagtttcaaaaccttattttgcacacttgacggttggaaacttgaacctaaactccctcattcttccttctaaatttggtggaacctataagtgccaaattttagttatttttgggattaaattgttagcaattatctttcaattgtaatagttttcttataaactacttatatatatatatatatatatatatatatatatatatatatat

SEQ ID NO: 118383 - DNA, 217 bp, Glycine max
tttcttaacccataggaggccggagcgcaaacagaaaacacggcacgccccaaaaagactcttaagacgcaaaccgcacacggcagctccacctcgacggaccaagacgggaacatagagaagccacgcacaaccccaacaggaagaggccaaagtaggaccgccagtccctctcatctacggaaacggaaaagataacgaccacgagcaaggcgaa

SEQ ID NO: 118384 - DNA, 316 bp, Glycine max
tcttatccaaggctcatgttggtggtgaagctccttcttccatggcttattccctaatggaaggcgccttctcttacctctttttctttgtcttccactgcatctccatggtggaaaatcaccattaaaagacctcattgaagctcaaaaatccagcctccatagaagccccacaagcaagcttccatcatcaggttttgatgaaaaagccataagccagctactgtgttcctctaaacaagattttgcacggaaggttatcgaaaggcgggtgtagaatatgcgcactatcatgaccactttgaaccaaatttga

SEQ ID NO: 118385 - DNA, 314 bp, Glycine max
ttctttcaatgcgtcacacctgaggcccagctccatcctggagcaggtttttgacggcagacgctgggacaaaagggggagattgatctcctaattcacattggaccccatgtctgccatatcactttccatgtgatggatattaacccggcctatagttgccttttatgctggccttggattcactcaatcggtgtattcccttcaacactccaccaatagttaaaatttttggtggaagggctgttaatcatagtctcaggggaggaagacattctggtaagttgagcttcttttacaccatatgtgtgaag

SEQ ID NO: 118386 - DNA, 405 bp, Glycine max
atacctacttgttggttattattaccctagggctgcaaactcgtaaatcccgggggtattgcttatgaagggggggaaaagaagtttctgaatgccaaaacgtccccccttccgtcactattattttttggtgcaagggttgctcacccaggccaactaacctcgcactttttttttttgagaggaacattaaccatggcccctccttccttatgggttagcgttttgcccaacttgaacttacttaacgtagaattaggcgttgatatcttatttttaaaacacacaaatagttaaagaaaactacgaataccaaggatacggggctgccttgcagcgacgatcagtctctcgtgaccccatcaccagttgctccgttcctaatacccgcaagtaataaacaac

SEQ ID NO: 118387 - DNA, 321 bp, Glycine max
cttctttatcctacagcaaatgaaaagtggatttaaaggatatttgtatacatattcattcccttaaagtaccacaaattaactactacctgtaggtcttaaatggggcacaaaacactcctaatatttgcctattatgtatctgcacataagccataaattaaatactcaatattctacattctaaatccaatcttaatctctcattcacttggtacagattctgttattcaatcataggaagaacacactcaaacgataaagattggatacaaaattaccaatgatttcttcttaaaagacaactttaatagtggaaat

SEQ ID NO: 118388 - DNA, 342 bp, Glycine max
tatgtgaaaggatgcgactcttcacatttgaaatagaatttcaatgttttttatacacatggtaaaccgataaccaagaacattgtaattcgatacagatatttgaaaatcaacaggcaacattgtaaatatcatttaaaagcttttttgaaaaaacatttttgctatatgtgtaaaacgaattaccaataatcctgcgtgatccatataccaaagagtcaaaaactctttggtaaaacatgtattgaaaaaaaaacatgggctactcaatttttgaaaagacttttcatacttatttttgattaaacctttttcttgaattcttgaaacttgaacttgaat

SEQ ID NO: 118389 - DNA, 316 bp, Glycine max
tccttcacgttttcctccatacctagaacatgaaacctgcgattcttactcaattcttcaccaaatcacgtcccgtagaagcccaaactttcttttttagactcctctttcacttccaccgatcaaaatccagaaaaacttcatcaaatggcagagccatcaaagaagaaaaagggatcatcctccaccgctaccgctgctgcccatcgccgacacggcccatccggagcacccacagaacctattcctccttctttgtcatctccaagatcatcaacattgttttcatccgatgattaacgactacggtatcttt

SEQ ID NO: 118390 - DNA, 387 bp, Glycine max
  unsure (1)..(387): unsure at all n locations
agcttgcttctacatgctaggcccatattattataaggtgtatgcatataggatgaggtttaactactagtatttatatntattttagactagacaaaaacgtgctatgcccaaaataaaaaggggtgtatgcatatacgagggggtgtgactactagtccctttcttttcaaacatgcctttgccgtcctccataaaaaacacanactccttccttgccaatttttattgctcctctcttgcctatttacccaacgccaccttaaaaaacccattaggcctttgggccctttttttaactatattcaccctcatacattatttattttttaaaaaaactccctaaaaaatttggcctggaccgccttatttctttctttactaaaa

SEQ ID NO: 118391 - DNA, 316 bp, Glycine max
ctttcttgctttcattgttgcccatttacacttgaattgtctgttcttcattctgacaatcgatttgtctaagcttgagcatcgctttcgtcgcacttcaacatcgtgacaactctgtggtacttctccttcaccaccatacctaagtatgtttcgtctccttcatattgtcttctccttctcgctgtcttcttctccaatctaaactttcttgctctctttgttggccatttaccttgaatctgtctattcttcatctgaaaaacgttttgtctaagctcgaacatcttgttcttcgcacttaaacatcgtgaca

SEQ ID NO: 118392 - DNA, 322 bp, Glycine max
tatataataatcaaaattacctctttattgatgtgtgaataggagtagagaaagttttttgtattgtatatatgaattggatgaatgggatttattttgatgtgaaaatgcatgaatatttaattaaattttttgagtgtaaaacatgaatgtggatgatgaagattgggatatattaatagagaattaatggatggatgattattatatattgaatgtaagttataagatggaggtatgaaaatataagattatgtaagaatgatatatgggtgaatgaaaatacttgtatgtaatgatgataattgattatagtttgatg

SEQ ID NO: 118393 - DNA, 307 bp, Glycine max
tcttatgcacggtaaaatgtaattatgaaaatgagatgctcgtagtaatactttttcctagttaaccatgcattaggtacaattattttttaaagtgaaacgggtttatgaacccaacatggatggctcgtggtgcctaacacatgaaactaaaaatgtaatgtgaagtttcacgctacccccttttttgtttttgttttgtagaggaaaacgcaaggatgagcaaacatgaaaacaaatggtatgcaattttgcaaatcaaaaagtttgttgaacgcatatgcatgatgatgccatgactcatgca

SEQ ID NO: 118394 - DNA, 304 bp, Glycine max
ccttctttggggtcaacaggttgaacttgttctcataggacattgcctttttcatattctcattaaactgtatattctgccttgatatctcatcattgtcgatcgtgatgctggtgttactttgccctctgttcttgctttagagcaacaggatcagctccttctatcgtggcttcaatctactatttccggcaaggtgcttctgcggcttgttggttgctaaactacgtggcatctttgggacaagctccacatgcacttttactccattgttcgtgcgaaaaagcaacaactccgcaatgat

SEQ ID NO: 118395 - DNA, 319 bp, Glycine max
gagcagcagcagagcctgagacaatagaagaaattttttgcctgccccttgcttagcaggcggtccctcatctatctgctatatctggtctgcatcatcataacaagatagctttggctttagccaaagctagagctggtgaaagatcaatacagaatgatcatatggggacaaaaaccctggccaatatagttaaattcgcaccatcaatcattcaaaagacatgagttttcctccaatgaacatatattattacgggacgaaacaccgtcgaatattgtccaattcgcccttaaaaatagtgcatctctcataaaag

SEQ ID NO: 118396 - DNA, 240 bp, Glycine max
gcttatttgcacaccaaacactattgaaaatgtgatagatgtttcttaccaagttatttgttttgctgaacaaatggacggtaatttctatcttaatttgatatctttttaatgttttaattctctttcctttattcttttcagtattttgacattactgttcattctctaaaattgggatgaaagaaattggtgaaatcaatgacaattgtaaaattgtctgtcaaatgggaaaagttg

SEQ ID NO: 118397 - DNA, 239 bp, Glycine max
agggggggaagaggaaagaaaagaaaaaagcggaggtgagaaaaaaggagaaaaaaggagaggaggggggggggaaagagaaaaaagaaggcagagaagaggagaaaagggggagaaaaagaaaaggggaagtgaggagtgggaaaaacaagaaaatgagaggagagatgtggggacgggaaaggacagagaatgggttgaggaaagagagaaacaggcgaggggagaagatgggagag

SEQ ID NO: 118398 - DNA, 268 bp, Glycine max
cccaccatgagggtcgtcctatctcaaattagattttttctcaatttaacacatgccaaagggatgctgattatttaaattacaacccctaatctcgcgctagtattgaataatatcaccacaaggatttatatcctcacccgaaacacatcgattgggttgaatgcttccttaaatcagatatgcgaagcagttaccaagcctcgactacttaaaatggttgctgctcgctgacatgaggatagagggcatatgttgagggaataag

SEQ ID NO: 118399 - DNA, 406 bp, Glycine max
  unsure (1)..(406): unsure at all n locations
agcttgccgtcagttagcagaatggcgtanccttaatattcatatcccggcgttatccgtgaacttgtcggcgctgcactctcgcagtaatcaactgcctaatcaagtgtctgatgcaatgcacgcctgtggtattgacggccaccagctgacggtataaatcacggaaagcatgatgatggaacacgataccgatatctttaagcgcattcagatcctgcgtgatatgggcgtgggcttatcggtagatgatattggtacgggcttttccggattatcccgcttagtcagtcttccggtaacggaaatcaaaattgacaaaagttttgtcgatcgttgtctgaccgaaaaacgcatcctttgcttacttgaaccattaccagcattgggcaaagcctcaattaac

SEQ ID NO: 118400 - DNA, 315 bp, Glycine max
tggttcgaggtacttacccgttggagttcgaagaacgatgtattaatttatgaagaacgtttaagaacggtcgaaacctttacgaaattcctcacgaaaacgttacgtgaaccgtttctgaagcgccccagcttggattttcttcacggaaacaatttttccgagcatattgccaaagatagagaagtgcctaaggggctgaaccctttttcacttctccccctatttatagaaaattgggggagaagcttgccacccatctcgcccaggcgagcaaggttgcttcctccataagcacagccttctggaggaatc

SEQ ID NO: 118401 - DNA, 348 bp, Glycine max
agcttgtctcagcatctatgcgagacattatttttcatgttagctatcatcgacaagtacgcagaagagttgggtctagccactgcccacgagcatagaatcgcggatgagtatgcccaagtatatgcggaaaaagaggctaaaggaagggtgatccactctttacaccaaaaagcaaccatgtggatggatcggatagtcttaccttgaacgggaaacaagaacttccccgattgttagccaaggccaaggcgatggcagacacctacttcgcccccgaagagattcatgggcttttccgctattggcagcatatgatagacttaatggcccacataatcagaaatc

SEQ ID NO: 118402 - DNA, 295 bp, Glycine max
ccccctttagtgcgtcgcctctaaaacccagcccgatggcggtgctatcctttgatgggactcagctggaagagatgggggaaatccaccttcccattcatataggcccccacactttcaacgaggggtttcaagttatggatttaaatcccccctatagactgactcttgtgaagaccgaggattcatgccctgggagtgggcccttaatcgcttcaccagaaattgaattacgctgtgggtggactattattgaatgagtcgggtgaataagacatgttacagagttgcccct

SEQ ID NO: 118403 - DNA, 315 bp, Glycine max
tcttggaaggatctagaaagttaaaccctactgcttggacaatatatgcttttaacgtaaacacaaaatgtgatttgcaagtcaaaaacatgtgtgaggcattcaacaatgtaataatggagtacagagacaagccaattattactctgctatagggaatacgattttacataagttccaaaaatgtaaaattgaggactatccttgtgaggtatgagggttccatctgtcccaaagttcagtagatcattgaaaaaaattaaaaaaagcatgtgaagcatggcgatcacattggcctagtgatgttgatttgac

SEQ ID NO: 118404 - DNA, 349 bp, Glycine max
  unsure (1)..(349): unsure at all n locations
gggggaaagagagaagaaggaagaaatttttagaaggaaagaggaaagggggggagaaggaaagaaaggagaggaagaaaaagaagggagagaaaaagaggggaagagaaggggggaaagaggaggagaaggaggaaggagaaagagaggagggaaaggagagagaggaaaaaggaagggaagaaagaaagaggagaaaaggagaaagaggaaggaagaggaaggagaaagaagaagaaaaagagaaaaggaggggtggaagagaagaggagagagagangaaggaaaagaagaaaagaaaaaagagaggagaagagaaagaagggggagagaggaagagggagagggg

SEQ ID NO: 118405 - DNA, 309 bp, Glycine max
agcttgccataatgtgttttaggaaggacaaggcagccgaaggaactagatccgctccggagtatgacattcaccgctataagagcgctgtacaccaacagcgcttctaggcctttaagggaaggtcgcttctccgggagcgacgcgtccagctcagggaccacgagtatactgatttccaggaggaaatatggcgccggcggtgggcatcactggttactcccatggacaagcttgatccagaaatagtccttgagtcttatgccaatgcttggccaacagaggagggcgtgcgtgacatgagatcct

SEQ ID NO: 118406 - DNA, 99 bp, Glycine max
ctaacagaagatcaagtccatagccatcaaagtctgaaaagagtatgatgaactaagggacgtcaatatggacaccgctgatgccttggaacgagaaac

SEQ ID NO: 118407 - DNA, 315 bp, Glycine max
agcaattcgaatcttttcattttcccacggggggccacattatggtttgggtattattattcccgtttcagtttacttatttataccccctcttgacgtgcttaagccattttacttaaaacatttctcgcttgacttaaaaataaaatcaatttccaccgaacgtttgaattgtattgtccgttaacttcggataaaatgaattccgaccgttcggtcgtgccataaccacgttggaaataaaaaaaaatgttagacaaatggcctcaaatattttaaaaagggggggttgaattaaaatattgcaagctgtct

SEQ ID NO: 118408 - DNA, 239 bp, Glycine max
ctctgtacccacaatgggtcgccaacattgtactcagtcctaagaaggatgggaaggcgcgaatgtgcatatattatctggacctgaatacaactagtcccaaggacaattctcctttgccacccatcgatatcctcacggataagactgccgcattcgctctggatccttcatggatgcggtctccggtacaatcagatataatggtgcccacgatattggaagactacctcttcacc

SEQ ID NO: 118409 - DNA, 292 bp, Glycine max
agctagagcccggtttttttctccaaaccaaggaatggaaattttgatcgccaattcttcagcaacatctcataaggatgaatgactccggcatactttaaacttatgcacggaaaaggtaattatgaaaatgagatgcccaaaaaaacaccctggcctagttaaccatgcattatgtaccatgttcaattattttgtacttaagggaaacgggtttatgatcccaacatggtcggctcctaacacatgaaactaagaatgtaatgtgaagtttcacgctccccccttcttt

SEQ ID NO: 118410 - DNA, 158 bp, Glycine max
tctgcacttatgcataattatgctgtcaaatatgtgcagcagaattatgtgcttttgcacaataatgctctgtctctgctgagtggggaaagagtagcgctcaccgagttctggatgtatgctattacatcccaactgtcacatgtagatttatgtct

SEQ ID NO: 118411 - DNA, 311 bp, Glycine max
  unsure (1)..(311): unsure at all n locations
agcttctttttttttacaacagnggtcagcctctcgaaatcaccacctaagtagtgttcgattctactaccattcacggtccatgtccttttggtggctggaacctccaatatcaccgctctatgtggcataacttctttgatgatgaatggtccagaccacttggacttgagcttacctggaaacaatcttaatctagaattaaataaaaaaaaaacttgttgaacaagctgtgtcgcaacctacccttcgacgggaggaagaatgcatgggagtcgccaccaacgtttattcaaggaaaatgttagaaa

SEQ ID NO: 118412 - DNA, 305 bp, Glycine max
agcttgccttattatttgtgcaggaaagaccttgcaacgcggggaacttattccgctccggaatactacccatcccgctttaggagcgctcctcacccacatggcttccaagccgtcaagggacggttaatattattggaaccactcgtactgctgctggtcaactagaatactgatcccctcgaagacatactgcgcctacagtgggcatatctgggtactcccatggcccagctttgtccaaaaataatccttgcgttttatgccaatgcttggccgacacatgagggcgggcgtgacattaa

SEQ ID NO: 118413 - DNA, 306 bp, Glycine max
agcttcaacttatttttttgattcaggcttagcgccactacatgtgctaagcgcacttccaatgacttcaaaatagaatgatgttggcgcttagcgcatcctttcccgctaaacccagcttgatagctcatcttatataatgaatctggggcttagcgcagctataataaattttcacagagaggaagtggcgtttagcgcatcatccacgctaagcccactgcttaaggtgcaacttacagtgaagatgttgggcttagcgcagcgatgtgtgctaagctgaaccattcagccaatcaatcaggg

SEQ ID NO: 118414 - DNA, 380 bp, Glycine max
  unsure (1)..(380): unsure at all n locations
agctgatacatgcactgctagtacaagcaaggtattttttgtctattcttcgccaataaactgacagcattacatatactttgtcattctaacttagatgaatcttgtcgcaacctactctatgacaggacgacgaacgcataattgaanagccaaagcgtccatctcctatggagaaaacgaacggagtcgccaccaacgttattcgatgaaaacattacataaaccaaacatgaggtctaccaattttgaaaattagggttcacgagttgttatgcattgcgaaagtattatcataccacgctcccgttacaatggacgtttgcctataatctagtgtgcataatgtgacttcatattattaatttcccttttaatga

SEQ ID NO: 118415 - DNA, 310 bp, Glycine max
agcttattgtttttctttaattgaaccctgaactttaaatgattatctcctaataccttacttagattctaggagagcatatggttcaagacaaatttactctaaatttgggggagaaaagtcgaaaagaatgaaaagaaaaaggttaagcattaacacacgcaacaaataagttgtatgttaaaaaaaaagaaaaaaaagttgtgctgttacaataaggtcaaaagcaaattaagaaaagggaatagtgagaatgctattttttacaaaacaagaaaagatcattgggattagtctaggacttgtgctc

SEQ ID NO: 118416 - DNA, 322 bp, Glycine max
cttatattgaagactttacgataatgcttttatacccaattttgaaattggaaaaccatattcttgattactagcacattcagccataaagtcttatcatcaccagtgtatccaattctttactggataaggcaaattggacataatgccgtgttaatttaatctatcagacctggtgaagagaacctaacctttagaaagggtagtgatgatgttctttcaccaattttatgttgttgcttctgcgactggatcaaaggcctaggattaaatgcctttaatgcggcttggctctctttttttctcgcaccatttttggttt

SEQ ID NO: 118417 - DNA, 311 bp, Glycine max
agcttgggatttttttgatgaggtacaagccctaaaggcagagcttgaaagagcccgagttgtctaagagaagatcaagtccatagccatctaagtctgaaaagagtatgaagaaccttggggcgtccatgtggccaccgctgatgccttggaacgagaaaccaagaaggcctgaaaggaagaacacgtgccagcaaagttttgaggggctttatagggcagcaatattaagctcaagctccgaagaggtgaaaggaatcatcacgggtcaaaggcatgatcttgaaggacgagctaaaggcttaccttag

SEQ ID NO: 118418 - DNA, 424 bp, Glycine max
  unsure (1)..(424): unsure at all n locations
acaagatctgcacatccacaaaatcacgtacaaacccaccatccnctgttgtccacctacaactgagctcacgtactcacacgtaacccttattctcgttcctctcaatgccgagttcacatgaatccacccaagcttgcacaacatccaagtagtttcacatccaatcatcatggactaacaaaatcaagcgaaacacggcgcatgcggagaactcttgccacacacaactcaaatgacagctattgaatacaagtacccagtacattacttcgtacaatgcgaaccgtggacgactgaaatttactgaagcttagtcatgagcacatttgaccgtggaatgctataatgtcagaaccctatgcctacctttacaacagcatccagcatgtctgactatacaatctgtgccttcacagcaatc

SEQ ID NO: 118419 - DNA, 298 bp, Glycine max
agcttctttatttttttccttgctaaactctctacaattgcgataccttgccatgatctagtgaataataaaggggccttttcccgcggtgaaaaacaaaatcatgcctttgctttggtcgaagaaatgcataccttggcccctgttatagctctgtctgtcttttctgaaacttttgagctaaaatgtgatgcctttggattgggaattggaactattttgttgcatagagggcaccctattgctgattttatcgaaactgctccaggagtcacccttatctacttcacctattatt

SEQ ID NO: 118420 - DNA, 313 bp, Glycine max
agctttattattggactttactcgtattctcccgcctattcttccagttaatacctagtatcacacggctcatgttcacacatgcactagctagtattaaccagaacccgcatgaatcatgctagctaatataatacatgaaatcagagaatttcttggaatttatgtttcgacttaatcccaaataattcagagaataagaattatctttcacttattatgtacactattatgatcacggatcaatatggaatctccaacagaattcgctaagacaaactttttaatcaaaagctaaaatactatgtagcta

SEQ ID NO: 118421 - DNA, 303 bp, Glycine max
  unsure (1)..(303): unsure at all n locations
ggtccacatgaagtggatcagagtagacatggacgagacagtaggcacatgctcacatggtctcgcacatgaagagctctctatcccacatggtcacgacaagagatcactacaacgtatatggcgcgcgcttactatatgggtcgttggttccaatatgagattcacgtttataatagaaacatatcaatagtgatgcggaactaactagtaatagcgatggaaatcatgatcactatttctacacgntatgcatcactattcaaagcagccagtttccatctatcttcattactatctaat

SEQ ID NO: 118422 - DNA, 311 bp, Glycine max
  unsure (1)..(311): unsure at all n locations
agcctggcttanctcatgaagagatggcgcttagcgcaaggtttgcgctttgcggataagcaatttgaaaattttctaagtcattttctacttatctcttcacacataattttaacaaccctttttgttcattactaaacaagctgaaatcaatcacaatcacaagcaagatgacctaactacatgcaagaaataaaaatgaagatagagaagggaaagaaaagctgggttgcctcccagtaagcgcttctttaacgtcattagcttgatgcatcatcctattatctaggatccaataatgttcccacttc

SEQ ID NO: 118423 - DNA, 452 bp, Glycine max
  unsure (1)..(452): unsure at all n locations
agctgagctagctcacatacctctctaatagttaagctcacctnnctgagatgagaagctagagcttagctacacacccnctataatagcgaagctcaccctcatgacaaaaaacatgaaaataataaaaaaagtccgtattacaaagacaactcataatgccccgaaatacaaggctaaaaccctatactactagaatggccaaaatacaaggactagacgaagganaaacctattctaatatttacaaagataagcgggctcatacgtagcccatgggctcgaaatctaccctaaggctcatgagaaccctaggacctttccttggatctctagcccaatctacttggagtcttctagccaatgcccttgcgnggaggattgatcacacttacacaatcataagatagctcaactcgaagggggaccataacagcctaggcatacattat

SEQ ID NO: 118424 - DNA, 306 bp, Glycine max
agcttgaaactttttttttcctcagtgatggcgccattatatcatatgtaacagctggccatggagaaacaatataatgtttaaatgattccatgggtcttcttaacccatcatttgtcttcatatatttattacctgttttgcctccaccaatcttatgaggaacttggtcatggtagttaaactgcctctgacggaaacctctaaacgatctagcattccagtcatttctattttgaaacctcctaatctgtgaataaccatttgaacatgaagcagttcataaattgatatggctacagcatt

SEQ ID NO: 118425 - DNA, 188 bp, Glycine max
cctcacaccaatgaatgtccaccgatcgtatgaattgtatcatccgctcatttcgtgtataatgaatgtcaatcgttcggtcgtgccgtcaccacgttggagatcgataaagaggtacaataataatataataatccaacaaatgtctcttagtaaaataaaagcgaaaatcaatcggacggtttctc

SEQ ID NO: 118426 - DNA, 314 bp, Glycine max
agctttcaaaccatatttattgaactaagatctttaggtagaacttttgataactatgaccatattgacaacattttgagaagtttgtctagaaaatggagaccacaagttacagctttgagagccttgaagaaccttgacactatgtctcttgaagaacttgttggaaccataaaagttcatgaacaagagctttaacaagacaaaggagtcaaaagagaaaaatctttagctcttaatgcctaaaaatcaaaatggttccatcatccaaagtgtcatcatccaaatcatcatccaaagccacgccgggagca

SEQ ID NO: 118427 - DNA, 301 bp, Glycine max
  unsure (1)..(301): unsure at all n locations
ctcagcnncatcatatgacactacatcagttattcggtctgtgtcacaaatgctattgatattacaatcgtaaactnctaactcggccaactaatatatgacaacatttcggcgtgcaaagcttaacgtgaagtaattgtaaatgagacggtcatatatatgtaccaatttcacataataacgattaactaagagatagtgtagctcacttggttgaatgtgtgcgtgaatcgatgtacaccactaagtatgaacaggaatatgtggatcggcttatgcatcagcgccgaatgctttcttg

SEQ ID NO: 118428 - DNA, 313 bp, Glycine max
agcttcaaaaatctatttaagataatgctatggtggccgcttccaatacagctagggaagcaaaaccggtgctatagcccgcaataaacttaggtcgagatagaaacacgacgggttttaatcggaggtatagtcctcaagcctacccttatggtttgcctccagacttcactccccgtaccgctccagacgatttgagccaagcccctaccttcgaggggcagctccctcctcatgccgactatcctctgcaagaagatgatgaaggagatgcccatctaggccctctacttcccctcaaggatccagcccc

SEQ ID NO: 118429 - DNA, 391 bp, Glycine max
caaaaattgtagacttacgctaagtgcagctgtgtgttaagcctattctgcagataacaaaatatattttgtcttcgagctaagtgccagcttgccgtgcttagcgcttgagttaatatcataaagcgcgctaagctcagcatgctgcgctaagcgctcagctctatatgtagtttaaattgttctattgtcttgagaataagcctgtactaatctattgtgtgttgtcttatattttgcagatggcttctatgaaaagaaaggcaccctcacacctacccaagccagaattgatagatccagattcactttccaagaagcttgtgagagatacactgaccttgtggtgcctcataagcttttaccacaaagaaatgtggtagtctactat

SEQ ID NO: 118430 - DNA, 311 bp, Glycine max
agctttgaaaatttttgtttttcaccttctcgctaagtcaatccgttggcttagcgagcgtccgctaaacgcaacactcattggctaagcgcaaggaaaaatctggaagaagatgagttgtacagtttcgctaagcgcaccgcttcagtccatctgctaagcgagaaagacacgcgctaagccaaaattcattaatatgcgctcagcggttcaaagttgcgcaagcacacgagcacgaacaaagccacctatttaagcctgaaatcagatttacagaagggagtttgggctgggatacaaagctttgcata

SEQ ID NO: 118431 - DNA, 300 bp, Glycine max
agcttgacatttttacccatcccattcttatgtgcaaaaagaaattctgtcggggaagctccaatggttgaaggtgagggaccactgtaatggaaatctaccatgcccagatatattgttgccataaacttaactctttgaccggctgttgaaaaaagggcctgtgacctcactccggcgaaaaaatttgcggtattctttagcacgtaaagggagttcatatcctgcaatggatcttacgccagattgtcctccaaagatttcacaccgatatgggtcatgttagcggccaaaaccctc

SEQ ID NO: 118432 - DNA, 306 bp, Glycine max
agcttctcaggatttatttgaaaacctggttcgtaatgtcgacgtaaaatcgcgaattatggatcagtatgctgactggaaaggcgtacgttatcgtctgggcggcagcactaaaaaaggtatcgattgttctggtttcgtacagcgtacattccgtgagcaatttggcttagaacttccgcgttcgacttacgaacagcaggaaatgggtaaatctgtttcccgcagtaatttgcgtacgggtgatttagttctgttccgtgccggttcaacgggacgccatgtcggtatttatatcggcaacaa

SEQ ID NO: 118433 - DNA, 200 bp, Glycine max
gatttctctgccagggcgcatacgtacgctcatcaggaatatcatagcaggccaactacagttgcactcatgctctccaataaaaatgcgtaccacacatcgttccatgtccagtcatctgcataaagccgaaccgtcataagatagcccgctcatttagtttcacggactggcatgtcagatgattcgtaacgttcatc

SEQ ID NO: 118434 - DNA, 311 bp, Glycine max
agctttaaccattttttacttttactaaagattactttggtgttcagaaagtcttgacataaaggttgaagcacttatagattttgactttctaagtggttagtcataacacttattattaaatgtttgatatgattatgagaacctaatatcaatgtgcatttgctcatgttcagaagatcattacatagataatgtatctcttacttgttatgagaaaacacattatgtaatgatgattcatcactcagaaagttgttgggttgactacagtgctcataatgctatactcaaaaagaaattttgacgct

SEQ ID NO: 118435 - DNA, 308 bp, Glycine max
agcttctatataagctgaacctttttatcaataaacacaagttgagttttatttagaaaattagagtttatctcttttatcttagtaagagtgattctcctaaattcttgagtgattcaagaacaccctagctgtatcaaaggactttcacaacctttgtgtgttaccctcgctggaaagagtgattctttccttcctttcatcttcacccttgttctttcaaaccacaattccagaaaatccacctctgcccagaattatctcgtggccataactcccattttacgcactcaaattaagtgattctt

SEQ ID NO: 118436 - DNA, 356 bp, Glycine max
  unsure (1)..(356): unsure at all n locations
tactcagcttctgagagagctcatgaagcttcctcacanatatgctgtctcgtcttcgntaactgatggatcttctcgaaatttggtcttcaacttcacaagacacttgtccatgatctgacggatctttgagaagatgtctggagtgtgctagaagcttccgttttcgagagcatctcttatttaagcatttcagcctttgctttcgtgtagcttatgaagaacgtcatttcttcttctttctttcttncaaagccatttctaaagttccaagaactttctccatcacccacagccatcattagccaccacacatcatcattgttctccattggaaacccacaccgaaaggaact

SEQ ID NO: 118437 - DNA, 303 bp, Glycine max
agcttcttcttgtttctctccccatttgaaaccaacatttttcttgagcacttcattgagaggtgctaccaatgtgctaaaatccttcacaaatcgtctataaaaacttgctaaaccatgaaaactccttacctcggtcacggacttaggtgtaggccattcatgaatagccctaaccttctcctcatcaacttgcactccttttgaactcacaacaaaaccaagaaacacaaaatggttagtacaaaagatgcatttttcaagattggcatacaattgttcttctctaagcacagtcaagac

SEQ ID NO: 118438 - DNA, 307 bp, Glycine max
  unsure (1)..(307): unsure at all n locations
cttctcaaggaagatgtctcanagaagcttctcaaggaagttttctcaagaaagcttctcaaggaagctgcctagtctataaatagaagcatgtgtaacacttgttgtaacttggatgaatgagagtcttgtgagacatacttcaaagatccacttctctccctcttttattccttcaatttcgtgctcccccatctctctttctttccctctgtattttcctccattgaagcatccttccaagcttcttatccaaggctcatcttggtggtgaagctccttcttccatggcttattcctagtggat

SEQ ID NO: 118439 - DNA, 312 bp, Glycine max
agcttctaaccaaatgggcttaccttgacttaattcctttgatagcccttttgagccttgtttccctttccttgttttgaagctcactacaagccttaagtgaaaaaccatgatattaccatatccttaaggaattttggagctttggaagtgttttgggaataagtgtgggggtttttgtttcattggataacatgttttgttggccatgcttcatgatatattttgggccatacttgatgtacattgcatattggttaaatgttggacatgctgaatgagatgctgtttctcaaaggctacagagtaaaa

SEQ ID NO: 118440 - DNA, 314 bp, Glycine max
agctttgcagcaaactccactctactctaaaattttgaaagatatgttaacaaggaagcataaatatattcatcaggaaaacatcatagtggaaagaaattgcagtgctgtgatccacaagatccttccacccaaagcataaagatcctgggagtgtaactattccttgttcaattagagaagtcaatgtgggaaaagctcttattgacctaggagccagtatcaatttgatgccactctccatgtgcagaaaattgggagagttggaaataatgcccactcgaatgactttacaattagctgatcgctctatt

SEQ ID NO: 118441 - DNA, 361 bp, Glycine max
  unsure (1)..(361): unsure at all n locations
atctgatcatcatgcccttgataatgccannaaaactatggcaaatgaagagggtgagaatgatggagaagcccatgctgtgactgccattcctatacagccaagtttcccaccaacccaacaatgtcattactcagccaataaccaaccttctccttacccaccgcccagttatccacaaaggccatccctaatacaaccacaaagtctgtctaccgcacttccaatgacgaacatcacctctagcacaatccananacaccaaccaagagataaatnntgcagcgagaaagcctgtagaattcaccccaatttcngtgtcctatgatgaacttgctccatatctactngataattcaat

SEQ ID NO: 118442 - DNA, 311 bp, Glycine max
agcttgatttgctataggattccttcatgatggcagagaatatattaaggcaattaaggaggccaacaattggggatcaagtcattacctcagaaagttatttgtaacaatgttgatttctaaccgtatcaatagacctaaccatgtttggcagcatacatgagtattcttagtgggtggcattttacatgagcaaaggagattatcaaacaatcaaggtacaaatctaaatttatctctaatctttcaactgactttatttttatagatgtttctcaaatcaattactacataatatttttcttgaatat

SEQ ID NO: 118443 - DNA, 305 bp, Glycine max
agcttgcttgtgaagcttcattggagggtggattttcaatgagggcccttaatggcggtttttcaccatggagattcatttgatgacaaaagagaatatgttagaggctgcctcccttcctatggaataaaccgtggaaaaaggatcctcaccacctagatcagccttggatcacaatcttggataggatgctccaatggaggaaaagaacgagggatatatagacagaggggggagcacgaaatttacggatgaaaaagggagagaaaatgaacttttagttatgtctcacaacactcttattc

SEQ ID NO: 118444 - DNA, 353 bp, Glycine max
ggcttctatggaagctggatcgcgaccttcatggttttctttatggtgatttacaccatggagatgcatctgaatgtaaaagacaagatgacacaggaggcaccatccactacggaataagccaaggaagaaggagcttcaccacccaaaattgccatggataagaagcttgcacaggatgctcttatggatgaacagaacagagaagggaggagcatgcaattgaatgaataaactaaggagagaactggaactttgaaatgtatgtataagactctcattcatcagagttacaacaagtgttatacatgcgtctatatatagactagatagcttgcatgacaagctgacat

SEQ ID NO: 118445 - DNA, 313 bp, Glycine max
agctttgcatgtctatgtgtttctagagagagaaaggtccaagttccatacagtttttgagagagttcgctgggtgaagatctgccacaccgaagcttgaagcctgagcccgttttagagcttgagatgagtttgtgagtgattgtgagatcctagaggtgaaggagacatcctcaccacttgtatttttgcaatctttcatcttgatcttctctttgctggaaagaaagcttcctggtttggaaagctaaatcctttgttggatcttccctgtaggtacctgatgcaaaaatatttctatttatttaatgat

SEQ ID NO: 118446 - DNA, 275 bp, Glycine max
  unsure (1)..(275): unsure at all n locations
tgtcttcacacataatcatcacacagcagagaactaacttatctcncatcatatcttccanaaccccatacccacganaatcaaaggagaaagaagtccacccaaacctgacaattcgaagtcccactcgtagccacgcacttcacgactccaaaaatgccctnctttcgcgatttggagcagaaatgagcaccacacgttggagctttgttgtggtttcaatggagaatggacgagaatgacaaagcaacgtctggaagagggagagctgtctg

SEQ ID NO: 118447 - DNA, 308 bp, Glycine max
  unsure (1)..(308): unsure at all n locations
agcttantggttacttgtaccgccaaaactaattgcgttaacggcacatcgctcgcttcccaaactggcattgccagcccaaaattgccccccatgcctatcaaagctcgaacctgccccgaacataaagcttgcatgctggctatcgcagcatgtccatgcgcatgaagaggggtgaagccatagcgctcaccctgacgagccacaaactctgccgactgtttatcggtgataccgacggttcagtcgccctgtgcatcaaagtgaccacgtaatgggcacataccctcaccagacttgccaatggt

SEQ ID NO: 118448 - DNA, 275 bp, Glycine max
atgagtgctatttttgctttgtcggaatacgacattatttcctatgctcaatgtgctgaacccagcttggttggactagattgtgtgtaaggacctgtctgaagactgaaatgcgattttatatcttgtgtacctggtaagaccctttgtgcttatggccttatgaacggacgtatgacgctatcttatgacgagctgtgcattacgcccgcacccttgatgtgcaattgaaatatggcggctcttactcctctgtagaatggttcaaggaatgc

SEQ ID NO: 118449 - DNA, 323 bp, Glycine max
agctttgaaaacatttttctgaaactagtaaatggggcagaattagacaatacacagactaaaaaatacaatatatcaatggcaacgtctaaagaagttgttggttacttttttcggggaaagggtgaaggaaatatgatcttgaaataaaaataggtactgttggaagtgcaaatattcaagatatatgatgaatagaagtccttaacacaaaacatcctaaaacgatattttagacatgataggatttcatgaccccaccaaaaaaaaaatacacaacagaatttgatctaagctactgagatttatttgtaaaattatct

SEQ ID NO: 118450 - DNA, 310 bp, Glycine max
agcttgtatgattatggggtacccatcacatgtggtactaggtggcggtcgggcgatggtgcacaacaagtttttcacgttcacaatgcgcgcataaacccaccatcctcttgtgcccacctccaactgagctcacgtactcccacgtagcccatatcctcgtttctctcaacaccgggtccccatcaatcctcccaagcttccacaacatccaagaaaaacaacattcaaacagcacaagctatcacagccaagcaaaacagagcaaaagctgaaaactctgccaaaacaccaaccaaatcacagcttt

SEQ ID NO: 118451 - DNA, 360 bp, Glycine max
  unsure (1)..(360): unsure at all n locations
accgtggttccacttagccatgataaattcataggcacgctagtgcatctgtcgcgctagccncagtctattctagtttatttctgtttcttttgaaaaatctgtgtacttgcttatctctattgttacgatggttatgaaaagagagcacacttcatcccagccgattacaattaattactctaaagctggacgtaccaatatgtctcgtgagatcttcgaagaattaagtgtgactgattataattaaaggatgtaggaaatgctagactacaactccttgactaattgagagaagattatcattttactcaacattgcacagaagtagggttaaattagtacctaacttctcccggt

SEQ ID NO: 118452 - DNA, 309 bp, Glycine max
agcttgaacgaatgtaagacacatcttcttcaacctttgtgattcttgactccatttcattgaagcgcatatccacttgcaattccaaagtgtcaaacctctcaccaacaaagggttgaagaccatcaaacctgtccttcttcaccaacatttctagcacccttcttcacccatgagccatcatgctcctttatataaccaaaggatgctatgactgaagcgcctataaggaatgatctcttgattggaacataaggttcagaatcaagagggatgttgaagtgttgaaggaaaagggtaacaagatga

SEQ ID NO: 118453 - DNA, 374 bp, Glycine max
  unsure (1)..(374): unsure at all n locations
gctggctagcgttatgcagacggagaccacatgctagcttcatctttcagtccaagaagagttaggtctagccgcggcccacgagcatatgattgcggacgaatatgcccaagtatacgcggaanaagatgctagaggaagggtgatcgactctntacaccaagaggcaaccatgtggatggatcnggttgctcttaccttgaacgggagtcaagaacttccncgattgttagccaaggccaaggcgatggcagacacctactccgcccncgaagagattcatgggcttctcggctattgcagcatatgatagacttaatggcccacataattagaaatcgttaggaaacttgtattggctctaagaccttgac

SEQ ID NO: 118454 - DNA, 312 bp, Glycine max
agcttgaagcaacttgctcacccaggcgagctgttgcttcctccagaagattcctgatgggcccaaggctaaatagcaccccccctaaattgatcagctcaccccctccattttgagtttttggctcgtttcctttcgaaacatcacgaaacattacggatcgcacgacaattggctttaagcagctcaacgtgaccagcaaatatctgcgtgtaacgccatgaaattagggtatgacaaagagtgacataaagcttcaaaagccaacagatgttgtaacgccatgaaatttcgataactgaaaagatgttt

SEQ ID NO: 118455 - DNA, 484 bp, Glycine max
  unsure (1)..(484): unsure at all n locations
tagctgcgacttaaaaaatgactggatggagttgtctgatatgttagtcagttgcagattgattgtgaaggaatgcatcgactgtatcccactgagagtgtgatcctcaaattntgagagaaatgactatcatttagtactgattcttgcatgaatatctgaagtatggattgaatgcatganaatgaggatgatgaaagccatcgttgattatgataaccacttagccaanaagctgaccctgtgctcgaataatatacctagcacccagattgagttgaatgaattattgatngattgaaccttgagcctatacaatggtgatttctactacctcgtgctaagttgtacgagagcatcatccacaagaagcttggtcacagcaaattgtccaaatctggggagatattggtatagataaatggtaaatagacacacatctatctgtttgttttatgtaaaaaaacggacttgacatctacag

SEQ ID NO: 118456 - DNA, 302 bp, Glycine max
agcttttttctcttggcacatttcctggttttatggtctttttgcccttccattataaaccttgtttgcttctattggccaatgccacgtgtctcctattagtcatcatttacgactaacttttatattgaatagttctatgaaattaacatcttttccttaatttatggctctttttgtaggatttgtacatattttcatgtttagtttaattttgctcagtggatactcccatttttgtgaattaacgtgaatcaacttcaatttcaggctaagagaagaagaaggtcaagcaggtggtg

SEQ ID NO: 118457 - DNA, 80 bp, Glycine max
tgaaggatccatgcccctgattactcatgttctggaggtgcatcctatcctgagccatatgatagttgtgtggatactac

SEQ ID NO: 118458 - DNA, 307 bp, Glycine max
agcttctcactaactgtattggtagataacttcgacaattcaagatatacaatagtcatcaggttctacaatctatctcaacaataatcaagcaagttgtcctacagttccaaaataaataatcactgtgaataccaaattttatcctggtagatactataacacctcaattttttaactaaaaatattgctttaaaatgttttaatttaatttattttagaaatacgtgtcactattttttaccactacttataaataataaaaacatcttccttcctatactatttttttaaaacaaaatgtgat

SEQ ID NO: 118459 - DNA, 312 bp, Glycine max
agctttaccattgtttttatttttgcgggatggctccaaatatgaaattggagctcaagtccaaaacttgaagagaagaaaaacggtgaatcttatcaggaagtggcccccaaatccccaaggacaccaagctaagaacccttaagctggtcaaccttgtcagagtggtgaaaaaggaatcaatggaaaaattcatggatagtgtctgattaggatctgcaaatccattgaacattggcggcttctcagacttttctcccataattttaagctcagttacctcatcatcctcacatttaatgctcagatttg

SEQ ID NO: 118460 - DNA, 262 bp, Glycine max
  unsure (1)..(262): unsure at all n locations
tatgaacttcctgtagaatccagtgagtcctaagaaggcacgtaactccctgactgtcctcggagttggccattgcaccataacttggatactcaagggttccnggttgactctcttactcgaaacgacatgcccgaggtattctatagtctcttgcgcaaatagacatttggattatttgaggtaaaactcaccattnttgcggcatgtctaagatagcctctagatgttgaatatgggatgacagggagctgctatatac

SEQ ID NO: 118461 - DNA, 310 bp, Glycine max
agcttgcactcttttttcttctcttctccaaattcgtttgaactaaacctaaggtaagggggtgttctttgtgatgaactcagcccatggttttctttggggggaggcaaccatggtgtagtgaacctccattgcactacatgttggaaaaatgggatttttttaaaggtttttatcaatttgtttttgtaaagttgtgatgttttgcattgcatgcatgtcttattatctttttttttctttgtttgggccttagaaaagctccaaatacatagtttactctatcaaatttttcttaagatttctaaac

SEQ ID NO: 118462 - DNA, 357 bp, Glycine max
  unsure (1)..(357): unsure at all n locations
atgtgcaagcaatcaatggngcataacacaccaaatgattatgatgatggatggctcaaattctcacacaggtaaactcatcactttcaaaactatcatgacatgtagagaagaatcaacgatttcaagtcaccaaatgtcaagaacttttattgtcaaaacaattacccatttcttgaacatatcctataattcaaagaaaaacatgcacagtcgtacatgcacacaaaattaacccacaatattaaactaacaattcaacgaaactaacaacattaacagattaataaaaccaacagatctagcataaccaaagaaccactcccctcatacttaaacaacacattgtcctcaatg

SEQ ID NO: 118463 - DNA, 290 bp, Glycine max
agcttaaaaccgatctttctctacgtagaaaaagatctgagttagtcatcaaccttgaaccattctaaaattccaatttgtctatactataaattcgataaatagtgaagaggctacgtaaaaatatgcacactatataaaacgctattatatgaactactccgaatttatgcatgtcattttttaataaatgaaacacgtacgcacgctattatatgagttacttgaaaagggcgctgaagggtttgttgcaaggtgccttaatattatataaactctttattactcct

SEQ ID NO: 118464 - DNA, 307 bp, Glycine max
agctagcacgaattattttttcctctaactcaagcaaatttcttcttgataaccatcaaaaatcttcatgatattacacgtgttaggatatcagagaaggtctctcttgctttatgtacaaccgggatgactggatttaaagacctccgaacatggtggtatcccatggtaacctggtacaggcctcataaaaagcttttgggatgggcaatgtcctcttataaacctaatcttctacctccggatcgggattttgaggtgggtttgcctgagacataactgtcttgtcatgaaacacaattaaatg

SEQ ID NO: 118465 - DNA, 270 bp, Glycine max
tacagcagaaccaatcaacagaaacttctaaggctgtcccaaggaagtttgactgtggaggtgtactacatagagatggagatggcactagtgatggctagcattgaacaagacactgaggacacaatgtctcattttccgaatggtctaaatcctgacattatagacgtctgtgaattacaagagtatgtggagttggatgactggttgcataaggcattacgggttgaacaatatctcatgaggataagtgtatctagaaagaactca

SEQ ID NO: 118466 - DNA, 302 bp, Glycine max
agcttgtccacaatttagtctctataaagggatttgaaaagttattatttcagttttccttaccaagtaaatggatcatttttaaaggttcaacgccttaaaatgatcacctttcaagtaaaaagaatcgcttgattcactcttaaggaagaactacgtaggtctgattttctcttccatggagggttcctaggagcaagagccccgcttttgtcgacctcaaaaattaaaaagaaataaaaggttaaataacacaattttccaattctaaaaataggctgttgtcctttgagacaaacgtg

SEQ ID NO: 118467 - DNA, 323 bp, Glycine max
  unsure (1)..(323): unsure at all n locations
accccatttctatcaactacaaaccctaagaaaactatattatctacacaaaaggtacacttctctatatntgcatagagggtgtttttcctaaggattgaaagaacttgcctaagatatcctaagtgatcatctaggcttctactgtataactacaaatctacctatgatatcccttaagacatgatgcataagcctcataaaggtgtttggtgcattagtgagcccaaaaggcattactagccattcatacaaaccaaactnggtctngaaaagtagtttccactcatcacactntntcatnctgatgtggtgataactac

SEQ ID NO: 118468 - DNA, 307 bp, Glycine max
  unsure (1)..(307): unsure at all n locations
agctttgaacnattttatacgacaataactttttactcggatgtctgattgagtcccgtaatatatggatacgctcgaaattgaatgttgaatctcaaagccaattcaaacgacaataactttttactcggatgtctgattgagtcccgtaatataacgagacgctcgaaattgattgttgaagctctgagccatttcaaacgacaataactatttactcggatgtctgattgagtcccgtaatatatcaagaggctcgaaattgaatgttgaacctctgagcatattcaaacgacaataacttttt

SEQ ID NO: 118469 - DNA, 298 bp, Glycine max
  unsure (1)..(298): unsure at all n locations
agcttgaccttattttttgctagcgggaaggcgacgcgaaacantatgggagaataggacccgatgtgcttccatacgtatctgccgatatcgtcatttgcaagaagctcaaattgagggctccatacatccactttaaactgaaaagattgtgaaaagtatttacacacagagaaggcctttaaaggcaaaacgtctcggacaagggatgaccaataatgctgatttggtccacacggatgagctccaacaccgagagcactcctagcaccctgtaatgcagattgctaaacccatt

SEQ ID NO: 118470 - DNA, 307 bp, Glycine max
agcttgtgcctctttacgtccggaatatgaatgtagcatatagatccaaagacccttaggtgctttgctgatggcttcttcccgttccaagcttcaattggagtcatgtcttttacagacttagttggacatctgttgagtatgtaaacaacattgtagattgcttcagcccagaatgtgttaggtagtcccttctccttgagcatcgatctagccatttccataactgtgcaattctttctctcggacactccattttgttaaggagaatatgcgactgtaagttgtcgctcaatgccttcatcct

SEQ ID NO: 118471 - DNA, 306 bp, Glycine max
agctttataagtgttttttcgggagacaaaggtcaagcgttcgcgatatgcgaagaagatattccgagtactttggatgtggtacgaccatgcttctctgatttccagctgggaaattggcgagtggaggaacgccccggcatttacgcaacaagcataatgtatacctttacgggtttaaaagctctatagttgggcctaggctttagagttttcattttgttaaggctttgtgtcttttgtttttgaatttataatacaaggatcttttttcatctgttcctggtctctacccattctcattca

SEQ ID NO: 118472 - DNA, 157 bp, Glycine max
ctccgacattgggggtgctacttgaactgctatattccttcacctctgggcgcgatctgttcaagatacatgctacttggtgcacatgttctgtatatgcattctattttgagccatatcagaattgtactaataccgggctacaaaagcattcatt

SEQ ID NO: 118473 - DNA, 310 bp, Glycine max
agcttgatcatgactaaaggcttttgcttcttctacgtgaagcgttatgggaaaataggagcaaatgtgcttgcatatgtatctgaaaatataaccattaacaaattgctcaaatagtgggcttcaaacatccaagtaaaactaaaaagattttaaaaaataagtagaaataaaaaaagcatagaaaggtaaagttacttggacaatttatgaccaaaaatgctgttctcgtccacagggatgagcacgaacaccaagagcaaaccgaacaccctgaaatgcaaattgcaaaacccatttaacatcatga

SEQ ID NO: 118474 - DNA, 410 bp, Glycine max
  unsure (1)..(410): unsure at all n locations
tgcttacanaagttaagtatnctanatatccttaaatattgaatgtcctatntntaagnntctaaaaaatatcttgcccactctctgcgaattgtttcaattgtctcaaattccaatggcgttcgatccttataaacctgcaacataattataattaagttaatcacattaaataattgcaagtctaataaattaatgaaatttgttcaattaaaaaagtatattaccttcatccaatcattcttggtagcccctgagactatagtcttcatccaatacatgattcaatgcctccactttgagaatgactcataattcaatacgaaatntaattatatctcattaatacacactattcaataaaatgtcattaattagattctagtaatgggtaagatacgtacttttac

SEQ ID NO: 118475 - DNA, 306 bp, Glycine max
agcttcctctttgttcattcctgcgaaagcaaacatttggaaagttagtttacaagaaatataacaatcattacaaacaagggccaaacaacacttctcatggcacgagtgtcaacatgcactttataaaataatcatattggggtcgtgctatttatgacacatacgtatttgcacacataaaaattttgtatgaagcattttacgacacctatccatgtacatatttttttgacaaaccttttcatgctacatcctatatatatacacacacatttttttggaaggcttcttttgttacctact

SEQ ID NO: 118476 - DNA, 366 bp, Glycine max
  unsure (1)..(366): unsure at all n locations
ctctcaccagctattgagagtgaggcaattgtagatatatacgaacgaaccttctatagaagctcgttaacccatggaagctcctaatatctcctacactatttggggtgggccattcttggatggcgttgattntctcatggtccacttggaccccatttctactaactacatactctaagaaaactatattatctacacaaagggtacaattctctatattttcatatatggtggttttcttaggactgaaagaacttgcctgagatgtcctaagtgatcatctatgctcctacttgtcactaanatattcatcaaataaacaactactaatatacttatgagattccttaagacatgatgcat

SEQ ID NO: 118477 - DNA, 306 bp, Glycine max
agcttcttgatatgcctttcgattatctcgttagaagctttggtaaagcctatgatctcattagaaacatcgatattgaaatgatcaatgaatcttaaggtcaagactacatatggaaatttataatccaccactcgacaacttttccacatgatatcttcaatcaacagtacccaattcatttgaataccttatttcaacccatatataatctgcaagtcatcatcggtgacttgagcatgattgctagatcttggtgccagaatatatgtaacaatgtatattaacattttgtctttccgttat

SEQ ID NO: 118478 - DNA, 312 bp, Glycine max
agcttttccaaattttattaaatttatctcctaacactcatatcaaatagtgcacttaatgcatgtgaaattaaaaaaatactcctaatacaaaaactagtctaggtgccctaaaataaaagggttgaaaaatcatacattactaaggtacccttcctacactatggagccctaaatacaaggcccaaaaataatgaaaccttaatgtaatatgctaaaagattagttggctcatacttagcctatgggcccaaaatctaccctaagactcatgggaaccctagggtcttctcttgcatctctggcccgatc

SEQ ID NO: 118479 - DNA, 468 bp, Glycine max
  unsure (1)..(468): unsure at all n locations
aagaaaagtagcgtttaacttttgcttnttaataaatattttaatntaatcaaaatntaaaatacacagtgacaaattatcataaatntaatcttgcaatattctatgtgtctctaataaatgttcttatatataattctgttcatataaaaataaagaaatcgttctctaatttattcattccatctcaaaattatactctcaatcaaacatttggagaaataatattaatattttatttttaatatattttcttgaaagatctcaattactaattaaagttatcaaaattcatataattatatataccaattatataaataaaaaatatgttaggaagtccacatcatatgcctcagctcttgngggtacagttatatatctattagataacttcacttagtgtcaattagtttcaagctaaaatctaacatgatattagagcctatagtccatcttaattcttgc

SEQ ID NO: 118480 - DNA, 316 bp, Glycine max
ccccggaccttccaccaccgcagcagcagctgtacaatttttttttttgggacaaccccgtttgcatggactaacccataagatggtgcattcatctcccatgacaatggctaacaccgtatcgacatggaggaaaagcaactttgagggaccttttgaggcttaaaaatccaaccaccttaagagcgcccccagcaatcttcttgcataaacgtcactggaaaatggcttgaaaaaaggaaaaaatgcccgagtctagggagagttcctcactctgcgtaagaaccgggggttgtaaagtatgtcaaccctccta

SEQ ID NO: 118481 - DNA, 311 bp, Glycine max
agcttggtgaagtttgttttaaatcgaggaaagttcggtctgggttacgagcctacacatgccaacaagagaagggtcgccttataaaggaaagaaagaagcctatcccatttacaagggcggggaccacagatggagagggtccctatctgtcacattagcaagagctttgttagcgtggggtggatgcatgataatcaggttgttgtgctagatgaagaaattaaccaagatcaaccaagttgggtgcagccatgctccccgggttttgagttgaagaattggcggatcatggagcgacctgagatttc

SEQ ID NO: 118482 - DNA, 308 bp, Glycine max
agctttaacgttcattttcgagcgtctcgataagttacgggactcaatcagacatccgagaaaaaagttattggcgtttgaattagctcaaaagttcaacattcaatttcgagcgtcttgatatgttacgggactcaatcagacatccgagtaaaaagtcattgtcgtttgtattggctcaaagcttcaacattcaatttcgagcgtttcgatatattacgagcctcaatcaaacatccgagtaaaaaattatgggcgtttgtattggctccgagcttcaacgttcaatttcgagcgtctcgataagt

SEQ ID NO: 118483 - DNA, 310 bp, Glycine max
  unsure (1)..(310): unsure at all n locations
cttttactcggatgtctgattgagttccgttattaacgagacgctcgacattgaatggtgaagctctgaactagttcaaacgacaataacattttactccgatgtctgattgagtccccgcatatatggatacgctcgaaattgaatgttgaatctcaaagccaattcaaacgacaataactntntactctgatgtctgattgagtcccgtcatataacgagacgctcgaaattgattgttgaagctctgagccatttcaaacgacataactttatactcggatgtctgattgagtcccgtaatatatca

SEQ ID NO: 118484 - DNA, 311 bp, Glycine max
agctttatacgatctttttatttctataacggaggaagtaatgctttaataaaatgtataatcaatcaccaatctttacactatctagactcattcaacatttacaaaatgcctgaataaataaaatttccaaaatcatacatgaattaagtatgggtggctcaattgtagggattcaattattcaacctaatttgattctaatcatcaatcctaaccacatgctttctatttatgtataaagaaattactgcataaagatgaatagttctcatactcaaaatcctgatgaaaactaaatacgaaagctta

SEQ ID NO: 118485 - DNA, 293 bp, Glycine max
gcaagcttcaatgtttttaataatgagaaaggggtagtggggccccaatggaaaggaaaaaaaaagggaaaaaaagtttaaccttttgaccgttggttttaaaggtttcacattctttaaaattccaccaagggttacacatgtttttatttttgcccaatggtcttcccttattttctcccgggaccctttcttcaataacctgcaaccatttttggtccctctgaggggcttggcaccccccattatggccttttggaaaatcccaggaattcccaaaaaacccaaaaata

SEQ ID NO: 118486 - DNA, 287 bp, Glycine max
acacacaccacagacacttgctctagggtgatactgatccggcagctgattctacgtgaccaagataagtttcttcaactttcatttcaaaatgaaacaattgggcactttgatccttaaacatactattatgctgatgtcgggtgaacctctctcacaatccacctactggtatttccaactcccatgctcatcacatccctcctgtttagcctcttaaattaatgatgccaaattgtgggacagtgcccatatgaacatttatctctcagatctcccatgccaag

SEQ ID NO: 118487 - DNA, 289 bp, Glycine max
  unsure (1)..(289): unsure at all n locations
agcatggacaaatttctttctacataatnaaaataacataaaattagaggcaaaccataaccatcattattattaccaccattattattattattaccaaatactccaaaatttctatgaaaaaagcaaatgcactttgacaataaaaaagttacctttcttataaaaaatgagttttctatgagtctagcatattctgactaacatataggaaaaaataaaaaaatattaggcaattcaatggaaaactgatgaaaaccataattttattttttggaaaacacatgaa

SEQ ID NO: 118488 - DNA, 179 bp, Glycine max
  unsure (1)..(179): unsure at all n locations
tcatgcgtgaacctttatattgtattctttggttggcaacttcttctctaatcctcgtcatttcttggactatatcaatgagtgcaagttccaccctcatatatacttcatcttattggtgctgatataatagactctctgtcgatgattccccaccttctatggngatcatggagtct

SEQ ID NO: 118489 - DNA, 306 bp, Glycine max
  unsure (1)..(306): unsure at all n locations
agcttaggctaaatttttctaaactttcgtaagctatttaagctgagtctagtccaacaagaaggatctgaggacgaagcttantttaagttagtctaaacttaggagggttgtctaaattgagcctagtccaacaagagggatctgaggatgaaacttagattgattcagcctaattagggatcgaagtttagtaatttaggctacatcatagaacacaaaagcatgatttattagagaaacatctttatatatatcagttggtttgttagaaagacccaacacctttacctactgttgtcaatc

SEQ ID NO: 118490 - DNA, 310 bp, Glycine max
  unsure (1)..(310): unsure at all n locations
agcttgncgcaatttatttttcagcgggagggcgacacgtgacttctcggatgcgtgttccacgaaaggaatacgcgcaaagtcgccaccatcgtttatttgaggaaaacgtcatataagacgcgatctacgaacttttaagtgaaaggttcgggagttgtatttactcgcagggaaggtcttaacgccccacacgtccgtgccaagggacggcagcctttaatcgaatgttcaaacatgactttgattattcatgatcccatttatggccttatatcctttagtaccctgtttatatttttctcttttt

SEQ ID NO: 118491 - DNA, 304 bp, Glycine max
agcttgtgctattctattcttttgctggactgcgatcttacactaagctgttccgtatacctactattggttactctcttaattacaacgtcttcttttttgcaaacactgtactcaagggcccaaccttccttcttttaattgaaaggatcgggatttgctttttcactcagcaatggtctcaaaatctcaaacttttttgccttcgttccaacacctgtatttaactgttcgaacgtgattactagacacacatggaccctctttcgctcggtttcctaaaacaactgggaatatcttcttt

SEQ ID NO: 118492 - DNA, 305 bp, Glycine max
agcttgttgatgatgcttcaatagaggaaaagaaagagagagaaagagagaggggaagtacggaattgaaggaggaaaagggggagagaagttgaactttgagttgtgtctcacaagactctcattcatcaaagttacaacaagtattacacatgcttctatttatagactaggtagcttccttgagaagttttcttgagaagcttctttgagaaaacttccttgagaagctagaccttagctacacacacccctctaataactaagttcacctccttgagaagattcctaaagaagctagagct

SEQ ID NO: 118493 - DNA, 341 bp, Glycine max
  unsure (1)..(341): unsure at all n locations
gatagtggaactngacgaattattcaagaattgagcatagtttcaatggtagagacaaaccagtataaatattntgctntcatttatctctntatatatccgncttatctaaatgtatttgaaaactgctcttgaaatcatttgtgaacttggtattttttggtttcgaaaccatgatttgttaggtttcaaagttaaacctcagcttcatcttacataaatatatctggcaatattttcattgaaaacaggttttgggagaatttcattatatacaatntaacnccatccctcttctgtgtatttgccttacacgtatatatggttttcaattcccactc

SEQ ID NO: 118494 - DNA, 315 bp, Glycine max
tgccagcttgaatcactttttatgttctgaggatgtggtccttgatctatatcagtggtcaataaaacctttctgcttgacccgctatcattgctggaccttgaactattacacacacatttagccatacaagttgttaaggatgactttgatgaagaccagtcactgatagagctagcaggtgaaatactagaagaaagctttgtggctgacatcaagcttgaaagactataaatgtcaggttcaactttatttcttgaagcaattcttgaaggtgttttgacaactgagaaacatgaggttgtcttataactt

SEQ ID NO: 118495 - DNA, 370 bp, Glycine max
  unsure (1)..(370): unsure at all n locations
agtgcgtctattataaaaggtattatcttttggaaaagcccttgctgcttctgtcaaaaatgtatgcctgatccatctttctcaccttgcanagtccattgattaaagcattgtaagtgatcacatttggatgtacacccttctcatgcatctcaataaagtgcaaaatagcaagtttcagccttcccctaactgcatatgaatgaataagaacagtgtaagtgacaactgaaggaaatatcccnttgctcaacatctcaacgaacaatgctctagccttcctaagatgcccacccatcaagtgagcatggatgatgcttgtatatgctacatgatctggaacaagtccattgtagagcatcttcttcac

SEQ ID NO: 118496 - DNA, 326 bp, Glycine max
  unsure (1)..(326): unsure at all n locations
gacctgcagcatgcaagcttaatccttattttttttaaagnacacagatactcaagggtcttatttcttcttaattacaaatttttatgggcatcttttatctaacagtttgagtcaaaataggtaaacctaattttcctaaaaaaaggaaaaataccaatgaataaaaaaagaagcactttaaaccatgggttgaatttgaacatatccccaccaaagggtgccaatcaaaaacttgattccccacctcaattaccaatagctccaccaacattaccatcaagctcatgtgtgtccagcgaacttagcccagatgacaaccacaa

SEQ ID NO: 118497 - DNA, 450 bp, Glycine max
  unsure (1)..(450): unsure at all n locations
ctaagctatgctgtacattatatagacccctagaagcaaaccacatttgctattttatttgatctntcaagcaacagatacaatccanngtggaggaatcatccaaatgtgagatggacaagtcctacacaacaacaacagcctgtccctaccttccagaatgttgttggtccaagcaagccatatgttcctcctccaatgcaataacagtagcagaagtcacaacatagacaacaagcgactgaggctcctcctcaacctctcttagaagagttagtgaggcacataaccatcctatatatgtcaatttaataagagacaagagcctccattcagagtctgacatattaaatggagcacatggcttctctagtataccaagctcagttccaaaattctgacatattgcctcacagactgtgcacaatccgaangatgtgagtgccatca

SEQ ID NO: 118498 - DNA, 310 bp, Glycine max
gcttacatttgttattagtatcaaccaccgggtaaccggcggtgatggctttttgacgagctacagacaaaaatgcattcgtcattgattagcccggctagttgtcgcttttgccgtgactgctcttaccaccttttttacctgcttcagatgcgcgctgcgggtcattcttgaaattacccccgctgtgctgtccaccttttttacctgcttctgatgctctttcgcggtcttctgcaaaattgccggaaccgcctcgatggtttgccattactgacctccgtctgggtatagacatcatattgcatag

SEQ ID NO: 118499 - DNA, 196 bp, Glycine max
  unsure (1)..(196): unsure at all n locations
ggacagcacagcggaggtaatttcaagaatgacccgcaacgcgcattctaatcatgtaataaaagtggttagagcactcacngctaaggcgacaactatccgggctaatctatgacgaatgcatatattgtctgtagctcgtctaaaagccatcatcgtcggttacccagtggttatactgatacaaatgtagctt

SEQ ID NO: 118500 - DNA, 308 bp, Glycine max
agctaagcatgattttgtttttgctacctactcccattaaacaggagaaagaaatatcgtccccgtgctcatactaaacgtagggcttatcccagtaaatctttagtcaaaacgattttttttatagagaaatgttagggacattttctctcaaaagacttttttatgattgatgaaaatttattaaaatttattaattttttataggttctatttttcatttaataattttattttctgagttatattaaatgagaagtaaaattaactaaaattgattatttcccatcaattttaatcaatcatgg

SEQ ID NO: 118501 - DNA, 309 bp, Glycine max
agcttccattgttcaatttcgagcgtctcgatatcttatgcgcctgaatctgacctccgtgtgaaaagttatgaccatttgaatttctcgagagctttcgttgttcaattttgagtgtcttgatatattatacgcctgaatcggacctccgagtgaaacattatgaccatttgaatttctcgagagcttccgttgttcaatttcgagcgtttctatatgtgatgtgcctaaatctgacctccgtgagaaaagttatgaccatttgaatttctcgagagcttccgttgttcaatttcgagcgtcttgata

SEQ ID NO: 118502 - DNA, 300 bp, Glycine max
  unsure (1)..(300): unsure at all n locations
tcgctgagcaattcatatgggcgaagctattcactcggatgttcgattcaggcgcataatatatcgagacgctcgaaattgaacaatggaagctctcgagcgatacatatgatcataacttatcactatgatgtccgattcaggcgcataagatatcgagatgtgcgaaattgaacaacggaatctttcgagcaattcatatgggcatagcctattactctgatgttcgattcaggcgcataatatatatgagaagccngatattgaacaatggaatctcttgagcgatccatatgatca

SEQ ID NO: 118503 - DNA, 305 bp, Glycine max
agcttgccatttttttaagctcctaatatctcccacactttttggggtgggccattcttggatggccttgattttctcaaggtccacttggaccccatttctaccaactacaaaccctaataaaactatattatctacacaaaaagtacacttctctatatttgcatagagggtgtttttcctaaggactgaaagaacttgcctgagatgtcctaagtgatcatctaggctcctactgtacactaaaatatcatcaaaataaacaactacaaatctacctatgaaatcccttaagacatgatgca

SEQ ID NO: 118504 - DNA, 304 bp, Glycine max
ttccgtttttgtttttccccagtgaaaggatcaaattggatctaaaaaaaggcaaatttaatcatcctgcttaaacaaatgaaaaaactggggcaaataaaaggggaaggattagggaaaaacccgcgctgagacaccccttcttatagggacatttttcccaccaaacccaacaatgtcttttactcagtcaataacaaatctcctttttacccaccacccatttatccacaaggcgcctctttatatcaaccacaaagcctgtctaccgcacttccaatgacaaacaccccttttaccacaa

SEQ ID NO: 118505 - DNA, 306 bp, Glycine max
  unsure (1)..(306): unsure at all n locations
agctttangatttttctcttttctctttttttctctcaactgttcttcattcttcttcctcttttcacttttgttcttcccttttcttgcacaaatttcatgtctcttccaccaatgatgatcatggaatgctaaaaactcaatcaatcctagaatccattccgagcaaggctaaatttgagttttggtttagtatttcagttctgtgtgaatgttcatctttttctttaatcctattttttattttcatgaatatgttggcttagaattgaaaatgaattaagttagggattccttccctaattt

SEQ ID NO: 118506 - DNA, 297 bp, Glycine max
  unsure (1)..(297): unsure at all n locations
acaatagcatcatttcttgcactgaattgtngggagttggaagccatcttcttaatcaaattcctagcctcaacaagggtcatatcaccatggattccaccattggcagcatcaatcatacttctctccatgttgttaagtccctcatagaaatattgaagaaggagttgctcacatatctggtggtgaggacagctcgcgcacaatttcttgaatatatcccagtactcatacaagctntcttcactaagtatcctgatgcctgagatgtatnttctaatggcagtggtcctatat

SEQ ID NO: 118507 - DNA, 307 bp, Glycine max
agcttgatgcattttatctacaatatctttgaattgcattagtaggtcatccagattatacaatccttctatttcattgtgataataaggttgccattctgactcccattgataatctgcagaaaaatagtccctctcaaactgagttccttgttgttgcatggaataacaatcacctttagagctagcttggtacgtcatgaagtctgccaatacactttcaagatcaagtgctcttccttttgtcataataattgtacatggtcggttcctgtaacgacccacctcgtcgctacggtatccacac

SEQ ID NO: 118508 - DNA, 313 bp, Glycine max
agcttctaaagacttgtgaaatagtacttgggttgagtggagcctacatagactgagaatacgggtgaaaagcctgtagaggcttacacaataatggtgacggcctatacaggtaagcactcatactagtggaaagctagcagaggttagaaaacaatagtgaaggccatgtagaggctagaagaatattgagtagtgaaacctacagaggtttaaaatactggtggtgcctgtaaaggctgaagaagaatcctggaaaggttgaggatgtttgaggagatacagtacattgtatttggtgtctatgttaatg

SEQ ID NO: 118509 - DNA, 306 bp, Glycine max
agcttatgatcacatcgctgagggatctctatatctctccttaaaggtctaccagtgccatccttgcgctcgggttcttcgccacactgcccgtattcatttccacctgacatcaattatgtttgctcttagaagtttgacaatacatacatcaacactctttatggaattttggagagctaaaagaaacaaacaaaatatagcattccacccaatcttcaaatttgtatcttaacatagatcgatagttatcaagtaaatggtacaggtatgcaattcgtaagggtgagaagaagttcatcactt

SEQ ID NO: 118510 - DNA, 363 bp, Glycine max
ctctgaggcttggtattactaagtttgtaagccttatccataaacatcacatgagagtaagacctgcgccgtttctaagaaatcatatccacagcatacgtcacatatgtctatcacagcctattatttatcctgatcaacctaacaatataatcatcatctacctaaccgatactgactgaggaaatgagtatgattaatacattttctctgattttcccactctaatattctagtctataggaaaacatccctattcgatttacgccacagcctcataactgggctcacagtcaacaatctttttccacacacagaatttctcatacgcaaaacgactcagcattgcacggtaaacaacac

SEQ ID NO: 118511 - DNA, 307 bp, Glycine max
agcttgcttctacttataagataggagagatttaattatctatatgcaaatccgacatttaattataattaattcatataaatataaacaaggtgtttataactccttacaaatgtacaaagtgactttgtatatgagtatatgtgtaattttagatttatgtttcacaaagtttaagaaatatatattttttaaaaggaaactattacaacatattattttaagcacactatcattggataagagtgagaatatgttaggtcgaacaagactttgtttgacatgtttaaaaactcaaggtcaaagt

SEQ ID NO: 118512 - DNA, 228 bp, Glycine max
  unsure (1)..(228): unsure at all n locations
catattctctcagcgcatcagataaactaatagcatgcttatatcacatgttntcatcataataagtaaaacatgaatactatcaagatacattatcaaaccaatgtgaatatataactaatattcaaatatatgaaaatattgaatataattgacctaattatatactaaccttcatatgtcgccaccatttatctacatcatctttactaatttcactccaatcat

SEQ ID NO: 118513 - DNA, 308 bp, Glycine max
agcttggtcggtattttttataccatggggctgaatgtggcaaatgagaggagacctatgcaagaccttcgctgcgcctaacacacgtgcaagatcattctcctggagcatatttttcaatcctacgtgactactttattgttgggaacacaattactcgaaaacactctaccgttcataaagagtcatggacttttggtcaatgtatggaggctttcacaggttagtaacccataccacgctttgacgacacacatatgtaccggaaagactcgcaggacccttttaatggccacatctcacgatgg

SEQ ID NO: 118514 - DNA, 308 bp, Glycine max
agcttcaccttctggttctcctcatagttgatgcatgagaaaacatgctctattttcatctcccactccaagtaggcctccggatcattctttcctttaaatggaggaatgttgagtttaataccatcaattcggttttgtctaggaacaccatcattccctcttctcctcctttcttcttcattatgatctctattctccatttgatccatcctctcatggagcgcatcatctcgttgtttcattaacctctccaaatgttgcatcaaagcttgcatttggaattgcgaaagccccactccatcatt

SEQ ID NO: 118515 - DNA, 233 bp, Glycine max
aaacatactaaatggctgagtgtaactgaaattggtggcaaccaaaagtcacccccaacagccaacaagtcagccaccatatggtctcccaaaaagctgatgcctacgttgccaatagtgcccttatacaacttgaactaaagcccttttagttgattaactccaaacatatttttggtcagccaactctacaatgattgggccattatttatacaaactcaacactcctaaa

SEQ ID NO: 118516 - DNA, 310 bp, Glycine max
agcttcacggaatgcccaatagcttggtttcagatcgtgacccactatttattagcatattttggcaagatctatttcaattaagtggaaccaagctacgaatgagttatgcatatcacccacaatctgacggctagactgaggtaactaacaaggtcattgagcaatatcttcgtgcattcgtgcataccaagccatcttcttggggtaagcttttgatttgggctgagtgggcttacaatacctcaagacattcaacttctgctgcttctccttaccaaattagttatgggattcctcaatatattac

SEQ ID NO: 118517 - DNA, 311 bp, Glycine max
agcttagtaaagctaatttctaacaatctccccctttggcaaattttgtctaaaacatacttagacacttcctgagcaggtacgagcagttatgcaagtgggatcagcaactttcattatcagagtaatcaagcacagcggaaattctgcaagttgcaagtcgttttcaggatgtcaagacatctcacatgacatcagctttctgcttctgctccccctgtctccatgcttactgcagcatcttctaacagctactagtcttttccaggatgtcaatacatctcatgtgacatcagctttctgctcctgct

SEQ ID NO: 118518 - DNA, 245 bp, Glycine max
agtcaaacagaataatctcgaaatgtcaaagaattgggtgttgaaaaagcataacaagactttctgtgattggtttaaagatacaatctttgcagatgagaatgcttcagaaacattaagaaagctagcagatgggcctaaaagaaatgttataacctggcaaggatatgacaaaagtacaatgtagaacagtgtggtcaccctaagggctgaatcttaacactctgcaaggtactatgggcatt

SEQ ID NO: 118519 - DNA, 308 bp, Glycine max
agcttgcagactataccttcgactgaacacggccgtgtttctgtctaggcccggattcaaggcgggctgcagcaccggctccgcttccctaactgtactggaggcggttgcggtggctttatcctctatggtttttggagttttaacatgacctccaagatggaaaccatttgatcttttaaggccgatagatcggccttcatctgttcctacacgccctcttcattatccatttttctggatcaagtgttataggggtgccttggtgttttcttagttatgatgaaattcctaaagaaataaacaac

SEQ ID NO: 118520 - DNA, 335 bp, Glycine max
  unsure (1)..(335): unsure at all n locations
gtcactgggccctattacaatactctggcccacaatgaaataaacactgaacaacatanaattgcgaaatntccaaattagatattaactaaggtgagcgctactttatttgccctcttcaagtgcacaactaaaatccggattaagcccaatgtttcattcattcctgaaattagattataaacatcaaattagctaaatgagcccaaataataaaactgcctaattaattgacaattaagaccaatcaataattaatatggtgcaaaaagggtntaganaatagaagacaatgatggcacatcacacactttctctgattggttttttaacac

SEQ ID NO: 118521 - DNA, 307 bp, Glycine max
  unsure (1)..(307): unsure at all n locations
agcttgctttctttatcatagtnatccacgaggccataataccaactctggtccaatggccaaaagattttaattctccgattcagtacccaatatgcatccacatcacctaaaaggatttcataaaaatggcgcctcttccttgaattacccttgtttctatattgtttcctaggcctcaaaactctgacagcagtatcagctgatgctgattctgaacctaactgagaattcaaaccacggttaacaatactttgactagaagatcggaaaacagacaaaccatttgaacctttcatagaaaacc

SEQ ID NO: 118522 - DNA, 125 bp, Glycine max
aactcaacttcgcctctcaactacttgactacgtaacaatgactttatttatagatatgtcgacatgtcaacaacactagacgaatagaggcatataagtgtgagatatgttataagtacatcta

SEQ ID NO: 118523 - DNA, 310 bp, Glycine max
agctttttgagataaaaatgatagctttaaaagaaacaatgaacatgctgtgaaaaaaaatcgaaaaaaagcacatagagagggaaaacgaaacataacctttgagtttttcgttcggcatctccgtcatttccgtcctgcatttggagaacaacagcaccaaggcatcgtcttcgaatggtggtaggaaaaaaaaagagaatgaaagagagaatgagaatgagaaagggtggagagagtgaagtatagagaacggtggttggaaaaaaaaagagagaatgagaatgggaaacggtggagagagaattgg

SEQ ID NO: 118524 - DNA, 411 bp, Glycine max
  unsure (1)..(411): unsure at all n locations
ttatccccaagttcagaagggctactcctagaccactccttgaaacactccttctntactctaactttgctctgaacattntcattccaccaccacgattctttacccctaggtccaaaacctctagactcacccaacgtctctttagccactttaataatctcttgggacatcatgttccacatatcatatgcacttccttgtgattgtccacaccaaccctcccatatccttttgtggaagattccttgtttctcacccttcaagtgcccaccattgatccttggtgctaccagaggacatcatctctttgccctatctctaattctacatccataaccaaactctatgntgggtagcaagctctctctcggatactttacagtaagcatacttctatcgacttctgat

SEQ ID NO: 118525 - DNA, 309 bp, Glycine max
agcttgtagaatgtttttacatgatacatgtcagggtttggtttggttcaaggataaaagggatgccccacattatttccatgacacaaatgcaaaaatgatgatttggaaactttatgcaaaactggtcatgcatgcacctatgcggacactcaagtgtcaaatttttatggtcatgtgatgctagggctcaggatccatttcctctattttaatcaacccaatgtttccaacatatgttcttttatcaatttgtgcattcatccgagtccatttcgggcgtccggggaaatttcacagcattcaccc

SEQ ID NO: 118526 - DNA, 230 bp, Glycine max
  unsure (1)..(230): unsure at all n locations
tagagtgggttaccactattggtaaacccgcatacaaatcttcatagaggctatagatctacatatttgggaagccatctagataaggccttatattcacatcctggttgctggaaatgaaactatagagaagcctacacaagagtggagtgaggaagaaagaagattactgcantataagttatatagccaagaacataattacatctgcgctaggaatagatgaatac

SEQ ID NO: 118527 - DNA, 309 bp, Glycine max
agctttatgctgcacaattgctccaggttgctgcatggaagggcaaaggtctgtatggtggtcagcaaaggagcacacaaaccacaaactcttgcgacaggaacagatttctgattcaaggccagctgggttactaagttaaccaatgcatccagtttgccttcaagcttcttagtttcagatgatgcagatgggcttgtagctacctcatgcactcctctaatgactatggcatcatttctggcgctaaactgttgggagttggaagccatcttctcaattaaatttctggcttcagcaggagtcatg

SEQ ID NO: 118528 - DNA, 257 bp, Glycine max
  unsure (1)..(257): unsure at all n locations
ttatgatagttgaccctttgacaaagggattgccgctcaagacatttatagaacatgttgaanatatctgttattgatgatcattaagtgtaatttaccttatctatattactgacactcttagttcatttatgatatgtttctaattatttgttctctatgtttgcatgaatatttgtattagaataatgttagcaggttgtgttgtgaataaagacattatgtngtatcaattatgtactcctaactaatgatca

SEQ ID NO: 118529 - DNA, 303 bp, Glycine max
agcttcacaaccacctcttttctagtagtactgttgcggagggccatcccagctacgccatcgttccctgtgtttaaacataaattgttatataaggtcagattttttattcttatgataattactttataagaagacgagtcacagtaaaattataccttagtaattgactgatcatcatgtgagatcaaatataaaaataatttctttacacacaatgatgttcttccatactttcgcatatggtggttaatttaaaaattatgtttttttattattaatttaccctttatattggtagta

SEQ ID NO: 118530 - DNA, 305 bp, Glycine max
agctttgtccatattaatcactaaaaactgttttaaggtccaacgccttaaacgatcctctttgcttttatcggttaacatggaccgttcaaaagcataaaatcaacatgtaactttactgcttttgcaagaactacgtaggtctgagttcctcatcacaattgaggatacgtaggagcaaaagccccacttttgttgaccaccccaagagatcgttaatggtccaacgccttaccgtttctctcctttcaaaaacaagagatcgttaatggtccaatgccttaacatttctctcctttcaaaaa

SEQ ID NO: 118531 - DNA, 339 bp, Glycine max
  unsure (1)..(339): unsure at all n locations
agaggaagctctaatnganggaaagaatgagagggggggtgaggggcacacaatggaatgagataaagaaggagagaggttgaactttgaagtgtgtctcacaagtgtcacattcatcaaagttatgacaagtggtacacatgcttctatttatagccaggtcactaaccaaaagaaagcttccttgagaagctggagtttagctacagaccccatctaatagctaagctcacctccttgagaagattccttgagaggctagagcttatctacacacacacctctaatagctaagttcagcaccttgcgcaaatacatgattattcttatctacacaca

SEQ ID NO: 118532 - DNA, 253 bp, Glycine max
tgccactttaagaaaaagcctgatcactaatgggcacttccggcaatacccaaaaaaaactaaatgacaaaaaaccactgtttttcaagacatgaaattaacaaaaggataaaacctaaaaactacgtgtaatttaatggcacgtataggcacaaaattgatgcttacagataggagacccaccctgtgggttctaccatgatacataaaaacacataaatatatatatatatatataaacatatatcgtcga

SEQ ID NO: 118533 - DNA, 307 bp, Glycine max
aacttataatatgaatgttaaatctacataatcgagaggagaaatacatatattaattgcatgtacaaatatgtgaattatttgtgagcatgtttcatagctttgcccctgaatgattacatccatatatgtatattttgtgtgttctatttaagtataatggtgaaagttgtatttgtcatatcataaattgataattttgaattatatgataaatacctccatttgggatgaggaaaagattctggataccttcatctatgatagggaaggcaatgagatgtcattgattggaatatgagctcat

SEQ ID NO: 118534 - DNA, 362 bp, Glycine max
ctctaataaggatatgcaatgagacttggagtttctttctatctataaaacaggcatagcttgtggggtcaatatcacaacgaaatacggctcaatagtgacatttttgggcttctataatactctagtgctgcttttattataataatgtaaggtgaattagtattgtaataaagatcaatactggatattctttttattttcttgatatataccatctattatctcactctaaaaagtttttatcgctttaagatttacatcgtttaccatgttaacttcacctaagttcatgtatattgtgttaaaactattgtttagaaaacacatgatctatccatgtgtttttacacatatatcaa

SEQ ID NO: 118535 - DNA, 310 bp, Glycine max
agcttgccctcatttttaacaacattatcggaatccaatataccctccaagtatcgaacatcatcatcattcaacttttagaaccaaaaaatcttctctaagggtgtaagtttgagactccaatgttttaatttttatctcgatggtggtttctaaactttcaacgttgattgggatctttttagtacttcccattctccacgtactatgtaataccctataaaatgaaaaaaattcacaaacttttaagaggtatgttaatatttcttttttcccatgaaataaaaatattaaacaaatcatgtgaaac

SEQ ID NO: 118536 - DNA, 375 bp, Glycine max
  unsure (1)..(375): unsure at all n locations
atcttatggttgttgtgtttnactaaanatggagaagtgaaaaagagtgaagaagaagaaacaatgagaatggcgtcacacaggcgggtagtggagcctcactgctttgaggagtcacactttttatgttgtgaacgaccaaaggttccaagtatgtccaccaccatgcaccttttcactgtatgaactttttcacactattagaagccctttctagagcttctatgtcgtcttcattgctctctcattagaagatcctaagtccattgatgtgtcttatgcctacatctgagagatctaaagtgaggttaggtggtccaaatcctaattgggtcatcaaagtggatggtgttatgaacgtggagatgtgtgtca

SEQ ID NO: 118537 - DNA, 309 bp, Glycine max
agcttactttgtgtcattcctgcgaaggcaaacatagggaaagttagctttaccaatgggacgttactcttaaagcaaaaatggcatgttacctgcttccatcaatacaaaccttaatgtaaatttagagcaagcttatgcgcatatttccctacgaacgttcacttgcacaagacatcctattaactaagaaaaatgcacccatatacaatcaaggtagcttcattatctagagaatttacaatgtactcccaaagtggatttgttatttacatcatacacgccatcttgttaaaatttacacacatg

SEQ ID NO: 118538 - DNA, 308 bp, Glycine max
  unsure (1)..(308): unsure at all n locations
agcttttactcatttattccatcagntatcaaacccttcacgataaaatcgcctcttttcagattccttacaatgtcgcaagaatcagttccgtttgctgggaaatggcaccgtttttcagtcaggcctgatggagaaaaggtggttccagaaccacatggtgacgccgaacaaacagaaacctgcgaatcacaggtgatgatcccttttgcagtggaaaggacagtttacgctttcggtggacctctgcccgaccaagagtcactttcgagttcaatgaacaaggtttttccctgctacccaacttg

SEQ ID NO: 118539 - DNA, 308 bp, Glycine max
agcttgacttggtttgttgattttagccttagtttcaccttaattattagtcaatttggttaagaaagagaaatccctaagagaaaatgttcggttgattttccgctttattttactaaaagatgtttttttttattattatattattttttacctcttttttgatttccaacgtggttacggtacgaccgaacgatcggaattcattttaaccgaagtttacggataattcaattcaaacgatcggtggaaatttattttatttttaggttaagcgaaaaatgacttaagtaaaatggcttaagcac

SEQ ID NO: 118540 - DNA, 306 bp, Glycine max
agcttttgttacttcacccatatctggccatgacattaaccggacttaacaccactaacaacaatgtcaaggaattgttgtatcccaaatacaaaggcttctttgaatcaattttcaatgtatcatacataggggcatatgcttgctgaaaagactcttgtccaagatcacgaatcatatcctctaagcgatgtcccatttctacatcaaatggtttaaattgggaccccctctacatgtctatcaactgacaatgtcatatccacgctgtataattcttcttaatcccattacacaacatatgct

SEQ ID NO: 118541 - DNA, 461 bp, Glycine max
  unsure (1)..(461): unsure at all n locations
gctacgctttcatgctcagatgctgctattatggaatggtttgttggtggtcaccacaggagcatataccacagagtcttgcgacaggtacaaatttttgattcatggctagttaagataccaggttaaccaaagcgtctagtttaacttcaagcttcttagtttcagatgatgcagatgagtttgtggctacctcatgcactcctctaatgactatagcctcatttatggcgctaaactgttgggagtcggaagccatcttctcaataaattcctggcttatcaggggcatgtcttcagggcttaccactgcagcattatcatactttctcatgcactgatcctgataaaaattggaaaaactgtcataatctgtgggaggcactggcctagtnttaattctccagatcattagcttctcatgatgctgagctaatatttctatgtctgtctgaactgaa

SEQ ID NO: 118542 - DNA, 303 bp, Glycine max
agctttatttttttgtaagtaatacacgtgaggaggatattatgcccaagtttatcagaccgaaaccatgtttgcattagggaacctaaagaaggtatgggaattcaaggaacatatggatatcagatgaaatatcaacaggcaactaggcatgcataaagccatttggcttattgaaacagggatcttaactaaaccctcaaggtacgatttatgcataagtaaagctatctgacccaaatttgggtgaaaccgtgagacacatttttttttcgggaaatcccgtcaacattaacatggggt

SEQ ID NO: 118543 - DNA, 373 bp, Glycine max
atctgagcgcttagtctttggtagtaccggagtcaaggcagatgctttttttcttcgcgaaagaaccatgctcaccaaataaggtagaaagccctccttggactgatgctttttcgaaatccacgcgggtatttcatatacaatcatatttatttttacgtatactcattgtggctctgtcattatgacacacaataaacctcggtggacggtagtgcaacactgaaagtattatacacatatgcctgtgttcttagttctctttcttagcagagcgtgaattttatttttcttttagggttattcttcaccaggagccatttaaagtttgtacacaggatttttattgccaattgtttcactttgcttgtat

SEQ ID NO: 118544 - DNA, 325 bp, Glycine max
accttaaatctaagcttctgcctattagctaagttataactctatatggctttatctaatataacacttctctattctatgatgcatggtactatgacattctctatttttaatacaggtaaatctatgactctctttatttgacgctcttgagtcgttattaatataatatattaatgcttcgagacgtgatcgcgagacatctttcataagaatgcttcctaaggaagaactttcatctgacctacgaaacgtgaaagattaaagcaaacgcctgctatttactatcacatactattgacaaatttgacactgcaggagaaaa

SEQ ID NO: 118545 - DNA, 348 bp, Glycine max
  unsure (1)..(348): unsure at all n locations
ctctatctctaacaatttactcattgtgtttctttcatttgntcttagagttttgttggttaaggactggcatangagaacatcaaatggaggtatatgttgccctattttataatctccttttattctcatggntaatggttaatgtttgtgtttcatgttctgatatctcactatttgctttcaatgtttgatgctttatatatcttattttgaatttttaaatctatggttttgataggcctttcatttcatttattgtgtgtgaagaaaaaaaaagagaaaatttaaaagactacagagataagttgtttgctgagcaatgttgccgaaatttgttgttgttta

SEQ ID NO: 118546 - DNA, 366 bp, Glycine max
attgctatacatggattctggtattgtgccattctagttattatgatagatgtctaggtttgtcaagttatggtactcaagtatgaaactaggccaatcgccagtgaagacattgagatctaaagcaagatgagtttatgcaagcattccagagacatattcttacatgcgaatccaactacgaattagttcagccaggttttgttgatattaggcataaaggtgaatggtaatatacgaaaaatataactatatggtgtggtccacgttcgctgaggtatgtagtgagtataattgaattccttgttttttaaccaccatattgacgtctttggttctttgaccgcacaatgactacaattttca

SEQ ID NO: 118547 - DNA, 380 bp, Glycine max
agcttgagcttggttcaaccccgtaatccaatgaatggaaattctgatcgccaatacttcaacaacatctcatagggatgaatgactcgggcatactttaagcttatgcacggaaaatgtaattatgaaattgagatgcccgaagaaacaccatttcctagttaaccatgcattaggtaccatgttcaattattttgtttttaagtgaaacgggtttatgatcccaacatggttggctcctaacacatgaaactaagaatgtagtgtgaagtttcacgcttcccccttctttgtttttgttttgtagaagaaaacgcaaggatgagcaaacatgaaaacaaatggtatgcaattttgcagatcaaaaagtttgttgaacg

SEQ ID NO: 118548 - DNA, 339 bp, Glycine max
agcttgactttggtatagacatgattgatacatgatatggaacttgtaagattctatttgggcaagattggatgacggaaagtgtgattctcgaaatctgcacttatgcacaattttgctgtcaaataggtgcagcagaattttggctttgtgcagaaaaatgctatgtatttgctggtggtggaaagagtactgcagaatgagttctggatgtttgctagtagatcccaacggtccaaatgtagatttatgtactagagacttccatgtaaattttcgagtcgatccaacggctaagaaactggaacgaaggaattggtactggtgtcttaagtgaga

SEQ ID NO: 118549 - DNA, 305 bp, Glycine max
  unsure (1)..(305): unsure at all n locations
agcttgcatatnacatactcgtgacttgttggtctaagaatctcacgagcctacgtccataaacgacatgaagcaaatacggactgtctacacatctatactgagaaacttgacactcctaccgccgcattcttacttcctaaagctatgataacacatccgttcgttcccatcagcctttcataaacgactataccggagcggcgacaacagcatttgttaacctcgacaacgctgagggtggaacatcacatcaccaaaccttgcttgatggtctcgcggtcaacaaacctctgaccaggttg

SEQ ID NO: 118550 - DNA, 189 bp, Glycine max
  unsure (1)..(189): unsure at all n locations
ctcagcttccgntgctaatggctgtaatcgctgcccttanagacctctatctatgtggaggtctggccatgaacataaaccgcgcactattacaacgcgtgcaaatttaatgcttatgcacatcttgctcactatgatgaccgacgcaatcacctatcccttaatgctcttattttccagttatggaaa

SEQ ID NO: 118551 - DNA, 142 bp, Glycine max
ggtaaaatgggccatatacgaatgatgacacttgcatgtaaaagcatcagatgatgagactcattggaaagctaatatgaaagatgttgtatgtgcaggaatacgtcgtcaatctacagaattgtattgtttttaatcacat

SEQ ID NO: 118552 - DNA, 290 bp, Glycine max
tgttcttttggtggctggaacctccaatatcaccgctgcatgtggcataactcccttgatgatgaatggtccataccacttggacttgagcttacctggaaacaatctttatctagaattaaataaaaaataaacttgttgaacaagctgtgtcgcaacctacccttttacgggaggaagattgcatgggagtctccaccaacgtttattcaaggaaaatgttataaagaccacaaaggggtctatgaattttgaaaaaaagggttcgggagttgtttacccatatggaa

SEQ ID NO: 118553 - DNA, 443 bp, Glycine max
gacatataaaactcagctcacttggattgggacacatttaaactgattatgatgtctgatagaaagtgattgtctttttttttaattttccttttgcaagtgcgctgagaataaatgatgctgaatccttgtacaacatcttcatacttactaaacgaagaacggatcgaatggatcatatgttttcaaaatattaaaatcattaacttttatactcaatgctttcttcatgaagtaataggaggagattgtgggaggatataggagaatgccaggtttaacttggctatatgagctgtgttatacacaatttcttggaaactgtcgttcatgtgaaattatctgccacaccaagcacaaaatggaactacagttagaattgctaaactgtgatggaagccgatcaatgcttattttgccagcactgctggtattgaccctat

SEQ ID NO: 118554 - DNA, 308 bp, Glycine max
tggtgaacttgggtcggctttttgaattgtactgctttagacagattagtttcatttttggtaactcgttcgcaattttattatgacttgaattttctcttggttatcgtaactggtacacttgttatgcactacttggctctttcaattttgtgtggctgtaggaagaggaaataagaggttgacatgtttatgctcttcctaattgcgtaatgtcgtgaattcttgctaacttatgttgtgtacggaacttattacatgactgtacatccatgtaatggtttgtgaccgcttatgcccactcttgt

SEQ ID NO: 118555 - DNA, 402 bp, Glycine max
tgcttgtggggcttctatggaggctggatctatgagcttcaatggggaccttcaatggtgaatatccaccatggagatgcagcggacaacatacgagaagaggtgagaggaggggccttccatttaggaataagccctggaagaatgagcttcacctcccagatgagccttggataagaagcttggagaggatgcttctatggaggaaaagatagagggagagaaagacggacgggggagcacgaaattgaaggaagaaaaagggagagaagttgcactttgagttgtgtctcacatgactctcattcataaaagttactacaagtgttacacatgcttctatttatagactaggtagctaccttgagaagatttcttgagaaaactttcttgagcagcttt

SEQ ID NO: 118556 - DNA, 379 bp, Glycine max
agcttataataagaaagtgaaatcttattcttttaatgttggagatttagtttggaaggttatcctgcccatggatagtaaggatcgaaccttgggcaaatggtccccaaattgggaaagaccggttaaaataattcaaatctattcgaatggtgcttatgaattacaggaattaacccctcagaaacgtactttgagtataaatggtaaatatttgaaaaaatataaaccaacattgctcgaagttaaaataagcatataataggaagaaataatggaaacataaaaatggcgataacagtaaaattgccacgaaagggcatgtgtcaatattacatcgaaaagtaaaatcgaaatacagaattcgaaataaagaaat

SEQ ID NO: 118557 - DNA, 434 bp, Glycine max
actcagctggaacatttggtcagagatagaaactacgccatcttagttcaatgttagacaagtggcctcagatatcttatgaagggggggttgaattaagatatcacaaactatttccccaattcaaattctatttcactttctattcaagttacaaattccctttataatgaacttcttaaatattgattcaaatagaacaatctgaatataaatataaaacaataataaataaaagagtttatgggaagagaaagtgcaaacttagatttatactggttcggccacacccttgtgcctacgtccagtcgccaagcaacccgcttgagagttccactatcttgtaaaatccttttacaagttctaaacacacaatgacaatcattcctttgtgtttagaattcttttaccataagagaccctcggtctcttaa

SEQ ID NO: 118558 - DNA, 405 bp, Glycine max
ccggatccttaagtcacctgcggcatgcaagcttggaaaggatgcttgaatggttgattttatagagggagagaatgagagaggggggagcatgaaattgaaggaagaaaaagggagagaagttgaactttgatgtgtgtctcacaagactctcattcatcaaagttacaacaagtgttacacatgcttctatttatagactaggtatcttccttgagaagctctcttgagaaaacttccttgagaagctttcttgagaaaacttccttgagaagcttttttgagaaaacttccttgagaagctagagcttagctacacacacccctttcataactaagctcacctccttgagaagcttccttaagaagattcctaaagaagctagagcttaactacacatacct

SEQ ID NO: 118559 - DNA, 426 bp, Glycine max
  unsure (1)..(426): unsure at all n locations
ntgtagcataggaactaaagctggtgagctntggaagttctatcctccagntattgacgaaggagctagtgtggatgactaagggatgtcctccattctagccctttttcttggttccatctttaactaagaagaactcaaaattccttagaccaaaatcgttcaagttaaacaacaacaatagaggctaaaattaacaataggcgcttagagggatatagctcgctcagcgcgccctgagaaacataacatgtcggcttatcctaaaagttgccatgatgaaatgcgcttagcttatgtaaacttggcttagcgcaaggcttacaacacaaaatatggttgagttacctgtgcttagcgattcagcctcgcttagccacaggtagttcagcacaaggatgagtgttcatcctcanaagatgaact

SEQ ID NO: 118560 - DNA, 273 bp, Glycine max
  unsure (1)..(273): unsure at all n locations
gccagcttgagatgaggaagagtngaattgttttacttcctgcttttattggtgaccacaacagggtacctggagatatgtcgcgggggtcatgagacctttgggacgtcacggggggtgctattgccccaaaccaatctttaacaattccgacccaacccactcatatatccgtcaccgagaacctgtgatgtacctaaacaggcgagctcctggccgtctacagattataggtacaaataccactaatcacggaggcttgtggtggccgcc

SEQ ID NO: 118561 - DNA, 418 bp, Glycine max
tgaaggtgtgtagcccaccatctgttcatagtagaatactggtaatgcgtctactatcattatcattttttctctgtcattgaggtgccacttgagctgccaggtctctccacatttgggcgtattcttcgaaagatctgtgcccctttttgcacatgttctgttgttgcatcctatccggaaccatatcaaaattggactgatactgcctaatgaaggcaaccattaggtccttccaagagtggactcaagaaggttccatgttagtgtaccaggtaacagctaccctaataagattttcttggaaggaatgtatcagcagttcctcatcttttgcgcatgcccccatcttccgatatacatctttagatggtctttgggcaagtagttccctggacttgtcaaggtcagcaccttg

SEQ ID NO: 118562 - DNA, 232 bp, Glycine max
  unsure (1)..(232): unsure at all n locations
atgtgcttacctcaccacgcttgagcttactctttacagatgatgacattagatgatcgacgtgactcatgttcacttatatatactaaggatatgggttatataattaatatatttattgcctcagaagattctcatgagatccattaacatctaaacatttgtgactggaattattcttcaaatcctttattcatgatcatacnatgagagaagatactctacactctca

SEQ ID NO: 118563 - DNA, 288 bp, Glycine max
ttatgaactcttctggagacgcgaaccttgattatcatgtgctgtacaccattaccatctcttctgccttggggaacaagaaggcaccaaagccaaaccgtcggaattctctttgggactcactcctcccctttgcatcagaaccaatgactatccggctaaaactatatgtacgatcactcagtgaccgctcgttcgcgagggaataggatgtatgcacgggttgaagtctctcctacgagaaactctagtgagcagtgtgcttcttacaacactttcactttccct

SEQ ID NO: 118564 - DNA, 372 bp, Glycine max
agcttctatagaaggttccttcctaatttctctacaattgcatcacctctcaatgagctagtgaagaagaatgtggcatttacctggggtgaaaaacaagagcaagcctttgctttgctcaaagaaaagcttactaaggcacctgttctagctcttcctgacttttctaaaacttttgagctagaatgtgatgcctctggagtgggagttggagctgttttgttgcaaggtgggcaccctattgcttattttagtgaaaaacttcatggtgccacccttaactaccccacctatgataaagagctttatgccttaataagagcactccgaacttgggaacaatacctggtttccaaggaatttttcattcat

SEQ ID NO: 118565 - DNA, 429 bp, Glycine max
  unsure (1)..(429): unsure at all n locations
ntgaaggtgcgtagtccaccatcttttcattgttcaatactggtaatgtggctactatcattatcattgtttctccgtcattgaggtgccagttgagctgccaggttcttcacctttgggcgcattctttgaaacatccatgcccccttttttgcacatattttgtagttgcatcctatccaaatccattataccgacactgcctaacgaaggcaaccattatgtcctcccacgaatggactcgggaaggttccaagttagtgtaccaggtaacaactaccccagtaagactttctcgaaaggactgtatcaacaattcctcatcttttgcgtatgcgcccatcttccgaccatacatctttagatggttcttgcggcaagtaatccccttgtacttgtcaaagtccagcaccttgaacttgagagggg

SEQ ID NO: 118566 - DNA, 322 bp, Glycine max
attcctgactattctattgaaattccctacttaattttcctagatcaaatatttctttaattataaatttacctcgaattaataaaataagaagaagttacccttaaggaaatataaacacgacagaaagtaaaaaagattaagggaagagagaatgcaaaatcggatttatactggtttggccacaacccgtgcctacatccagtcctcaagcaaattccacttgagcgtttccaataaccttgtaaaatccctttacaatcaatgaaccaaaaaggacttccctcctttgtgttcagtggttacaccaagaggcaatctc

SEQ ID NO: 118567 - DNA, 429 bp, Glycine max
  unsure (1)..(429): unsure at all n locations
gctatanaatactcacgctccatggtgaatcaaaggtgattcaaggtgggttgatgattactatgatgatcacgaacgatgatggcgatggctcaaagatcaatcacagaacaactcaagagaatccaagatcaatcaagaacaattcaagagttcaagagtagaatcaagaagaaagtctatagtcaagaatcatgaatcaagattcaagggtcaagatctcaagaatcaagatcaagattctagactcaagattcaagaatcaagagaaggctcaatcaagataagtatgaaaagttttttctcaaaactttgaataacacatgaatttttgacgaaaccttttacccaagagtatttactctctggtgatcgattaccagtagcaaaatgagtttgaacaaagtttcagactgaatttacaacgtt

SEQ ID NO: 118568 - DNA, 332 bp, Glycine max
gttcatataaaccctcccctttaaatcaccattaaaaaagggttgtttcacatcctttgttgcactcaagtcaaatgaccactatgccaaatatacaaaaaaatctttcttatatactggagaaaaagtctatgtgtagtcaattccttctttttgagtaaaccccttagcaacaaatcttgcctatctttcaatgttgcctaatgaatcccttttggtcttaaagactcatttacagccaatggcctttaccccattaggcaactctacaaggttccaaactttgttactttgcatagaattcatctcatccttcatggaatcataccata

SEQ ID NO: 118569 - DNA, 441 bp, Glycine max
  unsure (1)..(441): unsure at all n locations
tcaagaattaatggcctcatcaaactacttgttcccctaatgtaattcaattaataggcctcccattgttaatggagtgggttaccactattggaaaacccgcatgcaaatcttcatagaggctatagatttaaacatttgggaagccatacaaatagggccttatattcccaccatggttgctagaaatacaacaatatataagcatatggaagattggagtgagaaagaaagaagactagtacaatataacttaaaagccaaaaacataattacatctgccctgngaatggatgaatactttagggtatcaaactgtaaaagtgaaaatatatgtgggataccctacaagtaacacatgaaggcacaacagatgttaaaagatctaggataaacacattaactcatgaatatgaactatntatgatgaatacaaatgaa

SEQ ID NO: 118570 - DNA, 411 bp, Glycine max
tcgttccgcgatccttaagtcacctgccgcatgcaagcttgactcacaccaaacatgagaggtgtagtatgtctttaacaaattccttcacagtgactacgcatagagataaatctagtaaaactacccatcatatctcccaacacccaatacccacgaaattatgtgaaaaagaaacctacccgtacctgaaatttgaagagcctcaacgtagagatgcgcttcacgactccgaaaatggcttcctattgcgatttggagcaaaagtggggagcaaaggttggagctgtcacggagcttcaatggtggaggaaacagggagaaaaaaccacttgagggaaagggaaaagcttctgaacttttggctgagtgaagagagaagacctggctctttaattgaagagactttcc

SEQ ID NO: 118571 - DNA, 437 bp, Glycine max
ccttaaaactcagcttgctatgaccatcttcaaatgtgaggccaccacttctttatctcccttataaataacattgcacgagctgattggtctatattgcctgatagacatgggttaaactaccttcaggattaaaatcaggctcatgtgattcataagctttatggacagagacggtcaatacagctttcttaacacgaagaacaattgaagacctcacactttcccatccggataaaaaaaataagggattgctatcgtctggccctagagctctaacggctctgatgctgaagacaaccgatttactcttctcattaagggggtcatttagaatgatagcaatatcttcttttgagaagctggggaaagctccaccatacaacctgacatatattggatgctcatccttaaacatacctgaaaagaaaggctta

SEQ ID NO: 118572 - DNA, 378 bp, Glycine max
agcttgtatttcacatactcgtgcctcgatggttaaaatatctaaggagcctatgtcaataaatgacatgaagtaataactaactgttttcagatctctttgatgaaacttgatatcacaactgctgcatcattattcctaaaagttataatctcacatctgtttgtttccatttgcctctcatttaggtctatcccggagcgtggacaacaattttggtttcccttgacaacgtaggagtttggaatatcagaacagaaaatcttgattcatggtatcttggttaacaaacatatgacagggttgtgaaaccagaggtcaataacaagactgacttgcccattccaaacaatgccctcttctgtggtgcccttaaca

SEQ ID NO: 118573 - DNA, 442 bp, Glycine max
  unsure (1)..(442): unsure at all n locations
ctaagcttaggttgctcattggctctagattgctgcaatgaaggacaatagatctgtatggtgatctgcaaaagaacatagaccacagactcttacaacaggtgcagatttctgatttatgccaagctaagttactaggttgaccaaggcatcaagtttcccttcaagctttttattttcagtagatgaagatgaatctgtggccacctcatggactcctctaaggacaataacatcatttcttgcactgaattgttgggagttggaagccatcttctcaatcaaattcctagcttcagcaggggttatatcaccaagagctccaccattggcagcatcaatcatactcctctccatgttgctaagtccctcatagaaatattgaagaaggagttgctcanaaatctggtgggggggacaacttgcacacaatttcttgaat

SEQ ID NO: 118574 - DNA, 401 bp, Glycine max
cttaagtcacctcccgctgcagctttcaaccatattagatgaactaagatctttatgtggaacttttgataactatgaccatattgacaacattttgagaagtttgtctagaaaatggagaccacaagttacagctttgagagccttgaagaaccttgacactatgtctcttgaagaacttgttggaaccataaaagttcatgaacaagagctttaacaagacaaaggagtcaaaagagaaaaatctttatctcttaatgcctagaaatcaaaatggttccatcatccaaagtgtcatcatccaaatcatcatccaaagccacgccgggagcactaaatatggagaactcctctgacgaagaaggatcagatgaaaatgatgagctaacatttatctcaag

SEQ ID NO: 118575 - DNA, 441 bp, Glycine max
  unsure (1)..(441): unsure at all n locations
tcaatcatatgaaattaaatcaattattcgggatgtgtcacatattctattgataagaaaattagaaaactcttaatttggttcaattaatatatgaaaacatttcggtgtgcaaagcttaacgtgaagtaattntaaatgaaatggtcatatatttttaccaatttcacagaaaaacgtttaactaagagatagtgtagctcagttggttgatagtgtgggtgaattgatgtaaaccactaagtatgaacagaaatatgtttatcggcttatgcatctgcgcccaatgctttctctgcaataaacaaaacagaaggttcagcgcgtcagccattttatgctaaactcgggctgaaattgttcccagtgtttagtgctagtagctacctttcttgccctaatttctatgctacatatatatatagagagagagacacacac

SEQ ID NO: 118576 - DNA, 348 bp, Glycine max
  unsure (1)..(348): unsure at all n locations
gttgattgatcgnacagntttccagaaaaggagaagggaagggcattgtttgattgtgtgctttgtcattcctgcaagcttgtttggcttgattacctgttcaaaaacagatattttaatgtatgattatgaggacagtgattttggaggcgtgcttagttcaaatttttgtttttgaaatctttattgaagctgttcaaaaacatatattttaatgtttgattttgtgtttatcttgaagctatttttgttctccctcagttgcgggtcgtgcaaaacactaaggtctcaaagatatacatttctgccttttaccttttctttattatcttttgaatgttttaaatg

SEQ ID NO: 118577 - DNA, 305 bp, Glycine max
tatgttcgtgagagcagatgaataggtggatgattattaataacctgatgctacaagacactggaacacaatgctctgagaggatgtgacattacggtataggttctatattaattgtctgaagatttagacggtcttgttttgagcagaattgaatctattatttatatggacagttcttattattctgttagaaaggtgaatgtgagccttctaccctcttgaaatgcttatatacaaatgtgtttctaaattctcttaatcaagttagatttcttattgagttgattataaacacatatgtg

SEQ ID NO: 118578 - DNA, 329 bp, Glycine max
agcttgtacagataggacaacaattttttttttttgtgcaacaaacaacctcggcgggagtgcataaaccgttgaacatgctccattattgtattttaatttcaatacaaccgtgaatataggtggcaaattacctttcctcccaactctttgctgatcacacggcgtttaacattacactggttatgaaattcgcgaatttagtttctgagttttggtactatcttatcccgagggagttaagaagcacattggtccccatatgattccatccaatatgggcttgtagtgaattatatcatgcccctttttaatccttatgccctgga

SEQ ID NO: 118579 - DNA, 370 bp, Glycine max
  unsure (1)..(370): unsure at all n locations
agcttnttgatataagacaatgatcattttcatttaatcacatgactaattatgataattaatcacattcttggtatgtgaaataaaatagtattcttattttatgagcaagttccacattcataaaataatactccatttttatattaattatattcttggtgctagtaaaaaatataataatatttcactaaaatatttatttgattaaattaaattctctaatttaattatcaaataaattattttcttttgtaaagattagaacactcgtttatatgtaaccccgtaggtttaatactaaactggtagtaaattaatcataattaatttactaattaaggaagacgtctagcagcagtccattaag

SEQ ID NO: 118580 - DNA, 425 bp, Glycine max
  unsure (1)..(425): unsure at all n locations
tgtatttttgagctcgatcgggcatctatcctggccgactccgactgtcatttttttcgatcaatatcggtgaataatatttttttgccgaggtgggctaatgttttcctggccgaataaatgggaacacgccagtttcggccgaaacgaaacatcggttgagctcgcacgaaaaaacctagccgacctacattgtaagttttttatgcaacaccgaaaaaaacaaaacttcccctgccataagaaaaaacattatcggccagcgagcgtttttttaaaaaaaaaattgggcaatgtcggctgaaaaatatcagtcggtgccatttcacgaccgatgtcggctattgagttttctattcaatccctgaatgaagattgcatgatgtcgattangaaatgtntgatcggcgtcatccggtgatact

SEQ ID NO: 118581 - DNA, 96 bp, Glycine max
tccacagaggaagaacgaatatcatttgttgaaaacggttttgaatttgaatttcgaacatccaatctattactttattgctgtaatcgaactcca

SEQ ID NO: 118582 - DNA, 381 bp, Glycine max
agcttcggaagaagtgatgatgttctttctttaaagacagagcttgaaagagcccgggtagtcaaagagaagttcaagtccatagccatcaaagtctgaagagagtatgatgaactaagggacgtcaatatggccaccgctgaagccttggaacgagaaaccaagaaaggaagaacacgaccaaaagaaagttttgaggggctttatagggcagcaatagtgagctcaagctccgaagaggtgaaaggaatcatcacgggtcaaaggcatgatcttgaaggacgagctaaaggcttgccttaggtcgaaaagaaatttgtcccaatagttaagcgagactaaagggaatatgtgggccatcatcgatgagtgcaaagagaa

SEQ ID NO: 118583 - DNA, 420 bp, Glycine max
  unsure (1)..(420): unsure at all n locations
tgccacccagctcgcccaggcgagctatgttgctttctcctgaagcaaccgccttctggaggaattttctataaggcccaagtgggtctggttgctatttgcacccccatttttactaaatactccccttgctcttttttggtgattctttttccgtaacgttatgaaactttacgaatttcgtaacgatgattgttttctttccgtaatgtagcaaaaccttacggattacgtaatcatcccctttttaccttccggagcgttacagaactttacggattgcgcactaacacttccttttaatttctggcatgtcacagaacttcacgaatngtgctacaatactttcttttgactttcggcatgtcacagaacttcacgaactgtctagcgatgggtgccaagtacctcgaagtggtc

SEQ ID NO: 118584 - DNA, 424 bp, Glycine max
  unsure (1)..(424): unsure at all n locations
tatactgagttcagcctaccatcctcagactgatggccacactgaacgaaccattcagtcattggaggaccttttaagagcatgtgtcttacagcaaaatggaagcttggagagttttcttacattgatagagtgcacttataataacagttttcactctaccattggcatgactccctatgaagctctgtatggtagaaggtgtaagacacccctatgttggttagagcccggagaaggcctcaccttatgaccagaagtggtacagcaaaccactaagaaagttaagttaatttacgaaaggatgagaactgctcagagtacgcaganaagttatcatgataagaggaagaaagatctggaattcgaggttggtgatcatgtattcttgagagtcactccatggactggcgttggtcgagca

SEQ ID NO: 118585 - DNA, 217 bp, Glycine max
aaaaaagctcacttgagccttttaaaaaaacctatttaactaattaataaggtatgtttgagcttataaaaaacctatcatttattcaaatataataaaaatttaatatacattttacacttatatatttaatatcttaattttttattaatacaggttaagtttttaggataaatgtactatttttttatttaatgttgacataaaatttattaat

SEQ ID NO: 118586 - DNA, 215 bp, Glycine max
  unsure (1)..(215): unsure at all n locations
tgctgttttaggttctcaaggtttggggtatacttggtggtattctccaccttcttttgtcttaacgagttctttangtacacgcaacggcttcctttctacagatttctgtaaaaggctatccttgagtatggtctgaccctcccaagtgtcttattatccttccttgtactatcaatatatatttgagctgggtccttctggggaggtaaggg

SEQ ID NO: 118587 - DNA, 391 bp, Glycine max
gcaagcttgccacccagctcgcccaggcgagctcatttttcccaagtgagctaggttgcttcctccagaaagcaccgccttttggaaaacttcctggaaggcccaaatgggcctggttgctatttgcatcccccctttttactaaatacacccccttacctttttttgctgattcttttttcgtaacgttatggaaacttacgaattatgtaacgatacttgttttcctttcgtaatgttacaaaaccttacggattacgtaatcatcccttttttgccttccggaatgttacggaactttacggattgtgcactaacacttccttttaatttccggcatgtcacggaacttcacggattgtgctacaatgctttcttttgatttccggca

SEQ ID NO: 118588 - DNA, 374 bp, Glycine max
  unsure (1)..(374): unsure at all n locations
agcttcgtcctcagatctctcttgttggactatgtttanttanacagccctccaaggtttagactaacttaactaaatttcatcctcacattactcttgatggactagactaagcttaaaaagcttacgaaagtttatactaattttacctaagctttgccctcaaatccctcttgttggactagacttataccaaatagcattattgtaacaaaatatttaaaacctaaacttattccgcaaatccctcatttaagactaaatttcaatcctgcttcattcaagttcttaggcaacagtacatttcccaatgctaaagtcacctaactatgcacacaaatggttgatcagaccaagagcattctaaattttta

SEQ ID NO: 118589 - DNA, 359 bp, Glycine max
  unsure (1)..(359): unsure at all n locations
tctaaactctatacaagaatgaagctctgataccacttgttatataagtggcctcagatatcttaagaagggggggggtgaattaaaatattccaaactacttccccaattaaaatctatttcactttcttttcaagttataaatacccttaacaatgaacttcttaaatattaattcaaataaaacaatttgaatatgaatataaagcaataataaacaaaggagattaagggaagagaaagggcgcactcagatttatactggttagggcacacccttgtgcctacgtncagtccccaagcaacccgcttgagagtaccactatcttgttaattccttttacaagttcctaacacac

SEQ ID NO: 118590 - DNA, 355 bp, Glycine max
agcttgcttgtggagcttctatggaggcttgattttcaatgaggtcctttaatggtgattttccaccatggagatgcagcggaagacaaaggagaagaggtaagaggcggcgccatccactatggaataagccatggaagaaggagcttcaccaccaaaatgagccttggataagaagcttggaaaggatgcttcaatggaggaaaagaaagagggagagaaagaaagaggggggagcacgaaattgaaggaagaaaaagggagagaagttgaactttgagttgtgtctcacaagactctcattcatcaaagttacaacaagtgttacacatgcttctatttatagactaggtag

SEQ ID NO: 118591 - DNA, 436 bp, Glycine max
  unsure (1)..(436): unsure at all n locations
tgcttgtggngcttctatggaggctggatcggtgagcttctatggggtccttcaatggtgattttacaccatggagatgcatctgaaagaaaacgaaaaaaggaaaccggaagcaccattcactatggaataagcccaggaaaaaggagcttcaccacccaaaatttccatggataaaaagcttgaagaggatgctttaatggaggaaaagaaagagagaaggggggaacacgaaattgaaggaataaaagaaggagagaagtggaactttgaagtgtatctcataagactttcattcatcaaagttacaacaagtgttatacatgcttctatttatagactagatagcttcctttgacagctttcatgagaaaacttnctttagaagcttctntgcgaaaacttccttgaaaagctagagcttagctaaacacac

SEQ ID NO: 118592 - DNA, 388 bp, Glycine max
gcaagcttatgctgaaaatagatacaaaaactttctcttctttagcagctaaattaaccacagcggagctattatgacctcttctgccacaaatacactcctctatggaggaacccccctcaccttagatggtccctgggtcatcaacaacaacaacagcctgctcctttcttcccaaatgctgctggcccaagcataacatacatttcttcaccgatccaacaactgcatcaacccctaacacaaccaacagttgaggcccctccacaaccttccctccaataacttgtgaggcaaatgactatgcataacatgcagttgcagcaagaaaccaaagcccttattcagagcttaaccaatcggatgggacaattggatacccaactga

SEQ ID NO: 118593 - DNA, 396 bp, Glycine max
tatttacaatagacctcctcaacctctgtttctaattctaccacagcacagcaattatgacctttgcagctacagatacaaccctggatggaggaatcaccctaacctcagatggtctagccctcagcaacaacaacagcagcctgctccttccttccaaaatgctgctggcccaaacagaccatacattcctccaccaatccaacgacggcaacaaccccagaaatagcccacagttgaggcccctccacaaccttccctcgaagaacttgtgaagcaaatgactatgcagaacatgcagtttcagcaagagaccaaagcctccattcagaacttaaccaatcagatgggacaattagctacccaattgaatcaacaacagtcccagaattctga

SEQ ID NO: 118594 - DNA, 385 bp, Glycine max
  unsure (1)..(385): unsure at all n locations
agcttantggctacgtgtaccgccttatctaattgcgttaacggtacagcgctcgcttcccgatctggcattgccagcgcaaaattgccccccatgcagatcaatgctcgagcctgccccgtacatattgcttgcatgctggcaattgcagcatgtccaggtgcatgaggtggggtgaagccatagcgctcacccagacgagccagaaactctgcagacggtttctcggtgataccgacggttcggtcgccctgtacattagagtgtccacgtagtgggcagatacccgcaccaggcttgccaatgttacctttcatcaacagcagattgaccagttgctgtacgttctgggtaccatgttcgtgctgagtgatccccattccgt

SEQ ID NO: 118595 - DNA, 438 bp, Glycine max
  unsure (1)..(438): unsure at all n locations
ntcgacgaaattggcgcacgccttcaaagctatagtgatcccaatcaggttgaattctatacttcgggccgcacttccaatgaagctgcctttctttatcagctttttgcccgtgaatacgggagcaataactttcccgactgctccaacatgtgccatgaaccgacaagcgtgggtttggcagcgagtatcggtgtatgtaaagggaccgtgttgctggaagactttgagaagtgcgatttagtcatttgcattgggcataaccctggtacaaaccaccctcgcatgctgacttcgttgcgcgctttagtgaaacggggagcgaaaatgatcgccatcaatcctctacaggaacgtggcctggagcgatttaccgcaccgcaaaacccgtttgaaatgctgacgaactctgagactcagttggccagtgcctactat

SEQ ID NO: 118596 - DNA, 386 bp, Glycine max
agcttgaagagcttcttgagtcttattctgttatgaagaatatgactgaagctatagaaatgtcaaagaactgtatacaggtgttggagctttgtgtcaagtgtaacagtcacatttctgaaggtcagttttattctgcattgaaaactttggatttagttgagaaaagttgcacgcagaatattcctgcaaaggctatcaaaatgctcatagagagtagaattcctgttataaaattgcacattgagaagaaagtatgcagtgaagttaatgaatggatggtcgagataaggagttctgctaaaaatattggggaaacagcaattggtcatgctgtgacagttcgtcaaatggacaaggaaatgcttcaacagcagacgaaggct

SEQ ID NO: 118597 - DNA, 375 bp, Glycine max
tctccttccttttcctataaataggggaaggagggattaactacaatgttcaaccctcctggtatctgagattcacttaaaattagctaggaaaattgtttctgtgaagaaaatccaagccgaggcgctttcatgacgtttctatgggtgatttcacaaagattttcgaccattcttcgtcgttcttcggcttcaattggtaagttcccgaaatcggacttttcaattcattctatgtacccttagtggtcctcatttgtttcgcgtgcttttatcttcatttcatatactatgcgtacccctttgtgacgtgctttagtcattgatttaagtcattttctcgcctaatcaagaataaaataaattgccactgat

SEQ ID NO: 118598 - DNA, 346 bp, Glycine max
cacctgcggctgcagcttgcaacagctagccagcttattttttgcttctccagaacaaccgcctttggaagaatatttggaaggccaaatgggcctgggtgctattagcacccacatttttactaaatacacccccttgcttttttatggtaattctttttccggtactttaccaaactttacgaattgtgtcacgatgcttgcttatttcccgtaatgataccaaacctttcggatcatgtaatcatcccctttttgccttgtcaaacagtacaaaactttatggattgcgcactaacactttctattaatttcaagcatatcacagaactctcccgattgcgcc

SEQ ID NO: 118599 - DNA, 430 bp, Glycine max
tgacttcggtttaggcatgattgatacatgattttttagttgtacgaattgatttgggcaagattggatgagacgaattgtgattttccaaatatgcacttatgcataattttgctgtcaaaataggtacaacagaatgttggctttgtgcacataaatgcttgtgtgtgtgtggctgtggaaagagtagtgcagaatgagttctggatgtttgctagtaaatcccaacggtcacaatgtaggcttatgtactagagacttccagtaacattttcgagtcgatccaacggttaatgaacctgaacgaaagaattgttactggggtctttacgtgagaaaagctgtgatttggttggtgttttggcagagtatatttcctttgctctattttgcttggctgtgatagcctgtgctcgctgaatgttgatta

SEQ ID NO: 118600 - DNA, 371 bp, Glycine max
agcttgagatgaagaagaggagatatgtttttcttcctgctttcatatggagaccacagagcgatacctgtagatatgtcgcgggggtcacgagaccttgtggacctcccgtggggtgctattgcccacaaccaaacttgaccaatcccaacccaacccgggcataatcggtcagtgagaacctgtgatgtacctaaacaggcgagcttctggcattcaaccgattaacggaacaaagactccaaaccaatgaggcttgtggtggctggccccctgcgaaacttgatcgaaatgcgagatacggcctctggtaatccatttccaagggtgggtaatcgattaccaggccttaaaatgaagatgggaggcta

SEQ ID NO: 118601 - DNA, 433 bp, Glycine max
  unsure (1)..(433): unsure at all n locations
tcctcatgaagcttcnttgagaagctagagatctatctttctacacccttctaataactaaatccacctgcttgaaataaaacatggataaaacaacacgataaagtagattaaacacaatgataattactaataatatttcagggtgtgacaactctcccacctttttagaaatttcgtccccaaaatttacctgactcaaacaatgatggatgagatgctcgcatctgactctctaattcccacgtggaatcttatcttgatgcacctccccagatcaccttgatcaacagaatctcttttgctcttaagtgctgagttcgtctatcctcgatcctcaagggtaatgtatcatatgtcaaattctacgtcagttgttcgacatccaatatgatcacatgacgtaatgctatttggatgccacaggaccgac

SEQ ID NO: 118602 - DNA, 385 bp, Glycine max
  unsure (1)..(385): unsure at all n locations
agcttataatttcaatattgaanaaacatactttgttgtcatccatattcccgatcagattggcgatgctatggccatctttcctgttattcgggcgcttgaattgcataaaattaagcatcttttaattgtaacgtcgacaattaatttagaagtctttaatgcgcttaaacttgaacagactaaattaacattagtcacaatgactatgcaggatcacgcaacattaaaagaaataaaagatttagcaaagaacataacacagcaatacggtacgccggatctttgcattgaggggatgcgtaaaaagaacctgaaaacgatgttatttatcagtcagttgaaagcaaaaacgaattttcaggttgttggtataaccatgaat

SEQ ID NO: 118603 - DNA, 429 bp, Glycine max
  unsure (1)..(429): unsure at all n locations
tggggttgcttatgcgacatgttataaaaacctgtgattttccgttataatttcttaaagagtgttccattcggggcactcttttttacattccctctacagaactagcccttctctcacagaaaatgaataaataaaaatgcggcaccgccagaatcgcgttcgatgtgactatgatcattttcggtgagtactgctttgatctaaaggctggttttctgtgatgattgaccagcctcagagtattgatgacaccaccgttcataacagatcggcattactatgcataagtactgtctcatattctcgccaaaacactttttaatgcctttgcgaattcatccagacttatattgtcaattntttgcccaacgacgactgactccgagacatcggccattgcgggccatcgcgttttgaatcagcata

SEQ ID NO: 118604 - DNA, 371 bp, Glycine max
agcttctcactaactgtattggtagataacttcgacaattcaagatatacaatagtcatcaggttctacaatctatctcaacaataatcaagcaagttgtcctacagttccaaaataaataatcactgtgaataccaaattttatcctggtagatactataacacctcaattttttaactaaaaatattgctttaaaatgttttaatttaatttattttagaaatacgtgtcactattttttaccactacttataaataataaaaacatcttccttcctatactatttttttaaaacaaaatgtgatagtcgaaaaatgctaaattgttgcctcgaattaaaataaatgcaaatgtagagaatttagtttc

SEQ ID NO: 118605 - DNA, 428 bp, Glycine max
tgcaagagagccagcatagccaaagctctggttgacttaatggtggcgaaaaaatgcatcctgatttcttgcacaacaacagttttgagatacatgatggtatatttgacagtctgaaggataatcagggaatcttaccttatgtgcacgagctttctgatatttctgtttatggcaatatgctaaaaggtcttgattcttctcagtattgtagttttgtgccaccaacattacctaagtgtaagcgtcttatagagtcaacaataccatttatcgattcctgtgatatgaaaaaatatgatttatattcatttgatcaaattcgagacaataattctaataagattgcacaatcatttggaatgcaagcaccccttgatcctggtcccttctcgcacagctcaatgtgttacagccattcactttca

SEQ ID NO: 118606 - DNA, 349 bp, Glycine max
taatagatggcatgtgccacttgtgcttttcctatctagtttgcacccttgaaaatcagaatctgaaaggtcaattatatttatgtaggtacctttgggataccgcagaccaacattggttgtgcccttaaggtacttaatgatccttttaacaactgttaagtgagattccttatgattagcctagtaccttcacacaagcaaacactaagaataatatctagttgacttgcagttaagtaaaaaactgaacaaatcatacctctataccttaactcatcaattgatttacctttctcatctaagtcaagataaattgatgttgccattggagttgatgtttctttgc

SEQ ID NO: 118607 - DNA, 449 bp, Glycine max
aaaactcagcttctcaggatgtgagcttagatatgagaggtgtgtgtgtagctaagcttctacttgtcaaagaaggaatgtcagagaaccttgttgaagacattttctcaataaagcttatcacggaagctacctatgctataaatagaagcatgagggacacttgttgtaactttgatgaatgagagtcttgtgagacacggcttgaagatcaacttctctcccttgatgttcctttcgtttcaggctccccccctctatatgtctatgcctctatcgtttcctccattgaagcatcctctgcaaacttcttatacaaggctcatcttcggggtgaagctccttctttcatggcttattccttaatggatggcgcctactctcacctcttctcctttgtattgcgctgcatgtgcattgtggagaaccgccattaaaggacctcattg

SEQ ID NO: 118608 - DNA, 345 bp, Glycine max
  unsure (1)..(345): unsure at all n locations
attttgnctttcttaatagaagattctttctcaattgatgtnccacccactcttattgtgtgtgactttatttgcagttatgggtgaaatttttggctgggtacgcctataaaaatgctgagtcctccacctgttttccgttgtggcaatgtagacatcaacttatacagacaaatggtctataagtcacttaatatactactgtgtcttatggtgttcatcatgataaattcatcagcaccaccttctggttggtcaccaatgtttgtcggagtgtccatcttgcttggtgagaaaaagactaccttgtaagatttttcatgctgacgtttattctcacactca

SEQ ID NO: 118609 - DNA, 351 bp, Glycine max
  unsure (1)..(351): unsure at all n locations
tgtattcaaatgggacatgtgaccatgattaagaactatctttataacttgatcgnttggatgtcctagcctgatacatcagattctgagctctatgctggagctattattgacagtttccattgtataagagaagtcagcatttgtaacaagggcagaagttgacatcagcatggaatgattgcctttaagctggaaattgtgaaatgaataaaggccgtcagcacccacaacttcttgaaggaggaccttatgtgtctcctgagatttcacaaaacaaatatgatgatgaaactcacaaaacacaaagctatctttggctaactgactcacaatttagatatttttcta

SEQ ID NO: 118610 - DNA, 321 bp, Glycine max
  unsure (1)..(321): unsure at all n locations
aggctngntcataagccttgtaccacgatattgtctcagacttttatcaaatataagccaatgactatgccttctttgcgagcttagggaagaacctatatatgatgctatcctaccatccttctttttcactgataacatgttggtggggctgcacatctctaacatgccatggcattatgttaggtttggcttaaatcccctgataagtgatcatgaacccgatgaactagcctcctcctacccctaaaatgctattttcaaggatgaggcgcatgccctatttgcgaaagtccccaaagacttcttccctgtccgcca

SEQ ID NO: 118611 - DNA, 328 bp, Glycine max
tatcaggaagctacctagcataatcatataagcatgtgatatacttgtttgaactttgatcaataataggattgagatacacaactcagagatctacttctctccctgtttttcctccaattacatgctaacccctctttctgtctatgcctctatgttttccgtcattgaagcaccctatccaaacttcttatacacagctcatcttggtggagaagctccttattcccttgttgaataactagtggatggtgcctattctcacctattctgctttgtattaccgtgcatctcccttgtggaagatcacactttaaagacctgattg

SEQ ID NO: 118612 - DNA, 318 bp, Glycine max
ctgcactatctatcctgttgaaatcttttttcaagaggggctcaggtggtttgtaatgggacaatgagaatggcgcttggtggagatagcgtgaaagaattgtggctatgggccaagtatcatttattttccattcattggattatcggagtgaactataacgagattagaatgttaaagttaatgagataagtgaaagttgatatttagtgaacggtcacaatagctattgcttggtaaacaaaacacaacataacacaaccgcagggtgggctgggtggagatgcacttcaaaagttgctcctctcctaacccaga

SEQ ID NO: 118613 - DNA, 435 bp, Glycine max
tgtagatcaggccatatattgatggcaactgagagtcatgtttttaactacactcttatcttagattatgaattataatggcactatcattccttctctcctgaatcgtgttccttaaattaagttggattaaatcctcgtttcggccttataacgcatgcttgaatctcagttcataatacgatgcacacattctaaagtaaagctaatggctctaaactcaattctctcggttgcaactgagaaacaaacatgcacatatttgctcatatttggcgttttagattttatatgaaaaaaccgggtcatggcggtcctaacattttatggatctaagtgagacaatcatcactccgagtcttttatgtctaagtattctaagtgtgtatcttctctaacatatcttgtctaagatctaatttatcatttggagcc

SEQ ID NO: 118614 - DNA, 82 bp, Glycine max
tgtatttgtcgtaatcttatgtcatagctgcttactgtgtgaaaggatattctttacagtcccccattatatgatccccatt

SEQ ID NO: 118615 - DNA, 391 bp, Glycine max
gatcttaagcaccgcggctgcaactgtaaaggtagacatgattcattgttcggtttggtttggctcacagataaaagggatgccccacattatttccatgacacaaatgctaaaatgatgatttggaaactttatgcaaaactggtcatgcatgcacctatgtggacactccagtgtcatatatttatggtcatgtgatgctagggctcaggattcatttcctctattttaatcaacccaacgtttccaaaatatgttcttttatcaatttgtgcattcatccgagtccattttgggcgtctgggaaaatcttcacagcattcacccttcaggtgtatacacattttttcaaaaactatttatgatcagtgaatttttttcaaagacaagt

SEQ ID NO: 118616 - DNA, 435 bp, Glycine max
taatacccaaaatcacatctacaggaccaaggttcttcatatcaaaatttctagacaagagagacttcacatcatttatgaattgcatattactaccaaatatcaatatgtcatccacatacaaacataaaatgacacatccattatcatcaaattgtttcacatacacacatttattagtattattgatttgaaaaccatactgtcgcaacctacccttcggcgggagggcgacgcgtaactcgttggtgcgtgttccaagaaaagaatacgcgcggagttgccaccaacgtttatttgaggaaaacgtcgaaaaaaccggaaaagacgtgatctacgaactttaagtgaaaggttcgggagttgtatttacgcacggcgaaggtattagcaccccacgcgtccgtcacaagagacggcaacctttaatcatat

SEQ ID NO: 118617 - DNA, 385 bp, Glycine max
agcttgtaggatagttggttcacggcaatgaccattatgcacacaacacatgctgatgcagtccttgccaacaacacatactcttcaaggacgaatctgaagtacaaagtttatcaattttatttcacagacttactcacttgacgataccaacactttgtgtcaacagtctgtaggatctctcatcataaacatagcatgtgttatccaatttatgtgtgtcagacaaagtactggaaataacactatcatcatgttaatagataactcactttataagaaaagtaaaatttctctgctgaaattcttgcaagctaatttgttcttctttagaatacctacaccagagaatagtagataagtaacttgtagttggaaaacagtg

SEQ ID NO: 118618 - DNA, 409 bp, Glycine max
  unsure (1)..(409): unsure at all n locations
tcangctgttcaattgcttcagattgttgcacataatgtaaaacgtctatgtggtggtcggcagaggagcataaaccacaaagtctggtgacaggtgcaaagttttgattcatggccagttgggttaccaggttaacaggttaaccaaggcatctagtttaccttcaagcttcttaatctcacctgatgaattcgtggctacttcatgcactcctctaatgataataacatcacttctggcactaaattgctgggagtttgaagccatcttctcaattaaatttctggcttcagcaagggtcatgtctccaatggctccaccactagcagcatctatcatacttctttccatgttgctgagtccttcataaaaatattggagaagatactactctgaaatctggtggtg

SEQ ID NO: 118619 - DNA, 377 bp, Glycine max
gcagctttgaccatatcctgactcttcatttatcttgacccagggtgagaatgtcaatccttaccctcggaagcacaaaaataatagaggggaaatttccaatcaaagaaaaagagaaggaaaatttccaatgaaagctcaaaaagaaaagaaggaaaattccccaatctaaaagtgggagaatgccaattaagaaaagaaggaaaattccccaatcatagagtgggagaaagcctatagaaaagaaaggaaaattccccatcaaagaatgggagaaagtcaaaaaggaagaacaagaaggaaaaaaagctcctcatcaaggatcaaaagaaaaccgaagaaatgttcacagaggtctttggacccgacaatatctg

SEQ ID NO: 118620 - DNA, 431 bp, Glycine max
  unsure (1)..(431): unsure at all n locations
tctaataatgaaagttaaaatattgaaccatgaactctgcttgcacgaatttggtaaggaaaacaagaagagaaagaagaataacactggcttagcgtagcgcgtgcttctgttggatcgcgggcttagcgcgcgtgttgcaggcttagcgcgttcttctgttggatggcaagcttagcgcgcgcttctgttggatcgcgggcttagtgcgtgacgcgcgctcacctatctttgaaaataataaaatggcagtatcataattaaattgtaagtttaaggatgggtgcaaagatggttttacccgaccgtctttgaatggctatactttntcttgttttttttctctctctctctctcttattgtatcgggcagcacaaacccttaatttctatctcactattctctctgtctctctctctctctctcttgc

SEQ ID NO: 118621 - DNA, 374 bp, Glycine max
  unsure (1)..(374): unsure at all n locations
agcttgcctaattaacctaaaattgagagaaaatgattattaaacacacaaaatggaagtactaagtatttattacctatacttaacagaaaatacttataacactacaaaataaccataaattggaagagcttgatacaatttacacaagttttatacacaaaagttagtcgtattcaccgactaacaactgcctaatgaaggaaaccattaagtccttccaagaatggactcangaaggttccaaattagtatatcaggtgacgacttccccaataagactttcctggaagaaatgcatcaataatttttcatctttcgtgtatgcccccattttcctgcagtacatcttcaagtgattcttaaggaaagtt

SEQ ID NO: 118622 - DNA, 436 bp, Glycine max
  unsure (1)..(436): unsure at all n locations
ntaaatgaactangttataagccttaatgggcaatcctcacctacttccacccatataagagctaaaaatgaaaaaaaaaagtatttaaaattgaaaaggtgcatacttagataactaaaaatgaataaaaactaataggaactaaaattgaaaaacacaaagttacaattattcgagaataaaaatgaaaaaaaaaacttaaaaagaccaaacacatatttaaatctcaaagggtgtaaattattttaaaatatcttataaaaagatacaaaggaaatatatacaactaagagagaaagaaagataagattgaacttgaaacataataaatgataggataaaagagataaatacacaatataatattatacaaattattgtacctatatcacttctcttatattgtgtgtgaatctctctcatctaccatatcat

SEQ ID NO: 118623 - DNA, 383 bp, Glycine max
agcttgatcaggacgaaaggcttttgcttcttctacgtgaagcgttatgggaaaataggagcaaatgtgcttgcatatgtatctgaaaatataaccattaacaaattgctcaaatagtgggcttcaaacatccaagtaaaactaaaaagattttaaaaaataagtagaaataaaaaaagcatataaaggtaaagttacttggacaatttatgaccaaaaatgctgttctcgtccacagggatgagcacgaacaccaagagcaaaccgaacaccctgaaatgcaaattgcaaaacccatttaacatcatgaacaaattgtaattaattaaacctgttcgtgttcgtcaaagagatgtaaaggatggaaatataaagtgggtttg

SEQ ID NO: 118624 - DNA, 392 bp, Glycine max
ctgctatacaaaagttaaagtattctaaatatccttaattattgaatgtcccatttttaaggtctaaaaaaatatcttgcccactctttgcgaattggttcaattgtctcaaattccaatggcgttcgatccttaaaaacctggcacataattataattaagttaatcacattaaataattgccagtctaataaattaatgaaatctgttcaattaaaaaagtgtattaccttcatccaatcattcttggtagcccctgagactataggcttcatccaatacatgattcaatgcctccactttgaaaatgactcaaaattcaatacgaaatttaattatatctcataattacaaattatgcaataaaatgtcattaattagattctagtaat

SEQ ID NO: 118625 - DNA, 372 bp, Glycine max
  unsure (1)..(372): unsure at all n locations
agcttgtagaatggctagacattatacatgtcanggtttggtttggttcaaggataaaagggatgccccacattatttccatgacacaaatgcaaaaatgatgatttggaaattttatgcaaaactggtcatgcatgcacctatgcggacactcaagtgtcaaatttttatggtcatgtgatgctagggttcaagattcatttcctctattttaatcaacccaatgtttccaaaatatgttcttttatcaatttgtgcattcctccgagtccatttcgggcgtccggggaaatttcacagcattcacccttcaggtgtagacacgtttttttcttcaaaaatcggttatgatcaatgaatgaatttttttca

SEQ ID NO: 118626 - DNA, 294 bp, Glycine max
tgtcatgactttgtgcgcattaaacaaaattttaaaaagaaaaagcaattactaacaacacatacatatggaatggttaatatccacattaaaaatttttattacaattaaggagataaacctaaatacattaatttgttataccgcagttacgtaggaaaattctaccataaaccttcatcatgatcattacgatttgcatgtacatcatcctcctatgttcttcattaatgggaggcttttgggggaaaaacaggcttctcattaaatcaggggtgaagaatcattgggaat

SEQ ID NO: 118627 - DNA, 357 bp, Glycine max
agcttccgttcctgagagcatttcttatttaagcacttcagcctttggtttcgtgtagctcaggaaaaacgacatttcttcttctttctttcatccaaagccatttttaaagttccaatcactttctccatcacccacaaccaccattagccaccacaaaccatcattgttctccattgaaaacccacaccgagaggaacccttcaaccgaagcagaatcttccaacttggcttgtggttttggtagagaacgaaaaccctaatctaacctttcattttctttcgaggtaaccatggttctatgcttgtttcttgtcagtttcatcttggctttgcatctcttctgactttggaact

SEQ ID NO: 118628 - DNA, 431 bp, Glycine max
  unsure (1)..(431): unsure at all n locations
ntgatggtgcgtagctcaccatcttttcatagtagaatactcggaatgtgtctactatcattatcatcatttttttttctccgtcattgaagtgccacttgagctgccaggtctctccacctttgggcgtattcttttgaaagattcgtgccacctttttgcacatgttctgtagttgcatcctatccgaagacattatactgacactgcctaacgaaggcaatcactaggtccttccaagaattgactcgggaaggttccaagttagtgtgccacgtaacagctaccccagtaagactttcttggaaggaatgtatcagcaattcctcatcttttgcgtatgcctccatcttccgataatacatctttagatggttcttggggcaagtagtccccttgtactcgtcaaagtcaagcaccttgaacttggg

SEQ ID NO: 118629 - DNA, 343 bp, Glycine max
gtctttttgaatagaagcctcttttttaattgatgctccacgcactcttattgtgtttcactttatttccaggtatgggtgaaatttttggctggctacgcgtataaatctgctgaatcctccacctgttttccgttgtggcaaggtagaatcaaaatcatccagacaaatggtctataagtcacttaaaatactactgtgtcttatggtgttcatcatgatatattcatcagcaccaccttctggttggtcaccaatgttcgtcggagtgtccagctgcattggtgaagaaaggtctcccttgtttgatttttcatgctgacgtttattctcacactcacgg

SEQ ID NO: 118630 - DNA, 434 bp, Glycine max
tgtattcaaatgggaaatgttacaatgattaagaacaattttataacatgatcgtttggatgtcctaacctgaaacaacagattttgagcctatgctagagctattattgacagtagcaattgaataagagaagtcagcatttgtaacaggggcagaagtagacatcagcagggaaggattgccttgaagctggagattgtgaaatgaataaaggccatcaacacccacaactccttgaaggaggaccttatgtgtctcctgagatttcacaagacagatatgaggatgaaactcacaaaacacaaagttatctttggcaaactgactcacaattaacaaatttttcgaaatagaaggaacatgtaacaatttgtgaagtttaaaggttataccagcgtcgttaggagaaataaatgttgaggaacaagtttta

SEQ ID NO: 118631 - DNA, 379 bp, Glycine max
agcttgcctaattaacctgaaattgagagaaaatgattattaaacacccaaaatggaagtactaaatatttattacctatacttaacagaaaatacttataacactacaaaataaccataaattggaagagtttgatacaatttacacaagttttatacacaaaagttagtcgtattcaccgactaacagacacccatatttcctactcccagtatctcttctaacaaaatctttcttcctaaacctatactgaccacccctctcacaaccaactaacacaaatgaagtccttcctctcatactagtgtttgtgtctgacctcataattaccgccacaaatccattttcataagcaactgattgagcccactgcaaaac

SEQ ID NO: 118632 - DNA, 433 bp, Glycine max
tgtagaatggctagacatgatacatgtcagggcttggtttggttcaagggtaaaagggatgccccacattatttccatgacacaaatgcaaaaatgatgatttggaaactttatgcaaaactggtcatgcatgcatctatgcggacactcaaatgtcaaatttttatggtcatgtgatgctagggctcgggattcatttcctctattttaatcaacccaatgtttccaaaatatgttcttttatcaatttgtacattcatccgagtccattttgggcgtttgggaaaatcttcacagcattcacccttcaggtgtagacacattttccaaaaactagttatgatcagtgaatttttttcaaagaaaagttggaaatcgtctcttttcaaaagcatgttggtttttcagcttgacaacttattatttttttttt

SEQ ID NO: 118633 - DNA, 411 bp, Glycine max
  unsure (1)..(411): unsure at all n locations
acccgcgatccttatagtcacctgccgcatgcaagctntgacaactcaaaagccacttggaggagtctgggttgattatcgtatatgttgtttgtgtatttgaaacaacttgaaggcagaagaaatatgttgttccaccaatgccatttctccccgcacccttgctaggggttcaaaatcatttaatttgtgtaattgattatggaagattaggataagaacttgataatttagttttttattcttttttgcgttttttctatatatatatatatatatatatatatatatatatatatatatatatatatttgaagcggaggaggaagtagtggtacgttctatatttataatttgaaaaaatattgtagactaaaaataatcataaattaattattttgaaatttaaaa

SEQ ID NO: 118634 - DNA, 427 bp, Glycine max
  unsure (1)..(427): unsure at all n locations
tacgattatntattggataattntcttacactctcaatttatttaagatgatcatatataataaatttagtaaaatttataataattattttaaaaatcattcatgattatgagttatcaaccatcacataaaggaacttgacaccacactttaactcaaagtcttaagattcatgtntatgaatcttctcctcgtgctcaactctttttcacttctacgactccacctcacacttgtactagatttggatcttttaattaagatttcagtttaaatttgtgttgataaaaaaatataattaagagaaaagattctattaaagctcaccaactagattttctaataaattagttatcaataaagttggtgattatatacttcctattaatggtatagtgacaanaaaaaatctcgggtagcagaaac

SEQ ID NO: 118635 - DNA, 412 bp, Glycine max
acccgcgatcctcttagtcacctgcggcatgcaagctttagatgaacggtgcatttaaatattggtggaagttatgctttagtaaaaggtaagatcaagcaacaatatataaaatatctagattcatttaaaatttagaatatggctgaataaataaaatttccaaaatcatacatgaattaagtatgggtggctcaattgttgggattcaattaatcaacctaatttgattctaatcatcaatcctaaccacatgctttctatttatgtataaagaaattactgcataaagatgaatagttctcatactcaaaatcatgatgaaaactaaatacgaaagcttacttggattagccataatggaatgatgaaagattgatggatcaagactggttttatgatcttccaaatg

SEQ ID NO: 118636 - DNA, 430 bp, Glycine max
  unsure (1)..(430): unsure at all n locations
tcattcccatgtcattatatgcctactaggactattgaccgccattgtcatcatacattcgtattgatgctatttntgtcatggagttctttcaattttagaaccatttacgatttcagaagtgtaataatgttaggcattgtacctttcttttttatacgaatgcttaattgtttttaaatgtaattttcttctctatattttttattatttgaaggagggcataaggcttgtgacatagatataaataataagaaaaacacatcaaaatacagaattaattaaaataattttattcaattaacataaaagagctcatgtgagtaaaatggtcacattcgctntactagtaatgtaacatcccattttttgtaaataaattaaaaaaggtttttttagtaaaaaaaagagtagaattctagaaaatggt

SEQ ID NO: 118637 - DNA, 384 bp, Glycine max
  unsure (1)..(384): unsure at all n locations
gcttattagtagaccctgngaatatattttctttacattttgggtcagaacagcatgtgcaaaaatgtaactgatgaataaaacacagaatgtgtgccaatgatataagcaatagtttaaatggtatttaatctgatgtgaaagccatacaaacaaaccttaacagcaccatcttagtctgtggaggcaagatagttctggatgtagttattccagcaaacacaactgagccttgatctgtttgacatctcaactacaggataatggatgtcaatggaatcattgaaaagtgcattgaactcaaatattttaattttctttgatatcccaacagcaacaaagtaatcttcatccctatcaaaactcagagagcatattacattt

SEQ ID NO: 118638 - DNA, 426 bp, Glycine max
cttgccacactagtacacgtattctggtgtagtttgtaacgagtcttatcatgcatccgcatgtatgtattcagtgagtgaactagtccattttgggatggactgcaggtttgcataaattatgagatatcattctatatatatatatatatcggcttgatgtgttctggacataggcctctatttctagcttctctaaactgtttcttcaggattgtattgcaatgttgaacaaaaatcaaaaagtctgaataagatgtattatactgaggtttcatctatcacatagggattgtacacgcgtggcacaggagctggatctgtcacgtgtatgtatataataataaatgtaatatgttaggtttcaaccccccaaaatgtaatgtattatactattataggcttatgaaatgcatatatatagat

SEQ ID NO: 118639 - DNA, 355 bp, Glycine max
cgctgcgctgctgaatcatggtttttttgatcgtgcggataagcctaatttagctcatatattattataaatgaatacgcttatttttgggagaaattccgtgtatttgacctgaattgtaaatttggactgaacaagcccgtgataatagattaataagataaatgaaatgaaataaaatataaatacaaatataataaggaatagatttggtgtcgttaggtttataatttaagtgctatattaatgaataatttggttactttatcacattttgttctattttattttagagaatctgagtctaaaaagaagacgatctgcacgataatgtatatcagaaaaaaatgttttt

SEQ ID NO: 118640 - DNA, 331 bp, Glycine max
acaacaaaactcagctggctcgatgggaatgagcggcgatacaaactattttcagattcctatcgatcggatgtcgcgaacctgaaacaacagattgtgagcctatgctagatctattattgacagcggccatcgactgcgagagagctgcgttcggcacaggggcagaactagacatcaccacggaacgactgccttgaagctggagattgtgaaatgaatatcggccatgtatacccacaactccttgaaggaggaccttatgcgtctgctgagatttcacaagacagatatgaggatgaaactcacactacacaaagtcatcctcggc

SEQ ID NO: 118641 - DNA, 311 bp, Glycine max
ctccataactaatgctggggggatcattcgtcggtcaacccttcctttttattattacaataattcaggtgaggaaaaagaaacattggatttgctctaaaatggaatgctctcttcctttgaaaggatacctataatataacacgggatatataaattggtgctcaaaaagtaaatatttggatttgctctacaatggaacccttcgccccctccgccgatcccttgtctgccgcgaccaccgtgaaggcggaggcgtatatcacggtggtggaaatcaacgagaaagtatgatttcgccatctatatcg

SEQ ID NO: 118642 - DNA, 436 bp, Glycine max
  unsure (1)..(436): unsure at all n locations
ntattccaacatgaaattgcttgaatctatttgctttctctctcactgtgacataacggtatgataagcttctatttgcccaatattgttcttgatctttccttgaagtaacctatacaaaattaacaactgccatttacattcttctttttgatttttttgaaaaatatgcccttatgcagtaatttatcacaaaattaatactcccgttaatctaatctagtgcatacttattccaaatatttatgatatttgttttataagcacttactggatgagtacagtaaagtaacccaatttgaattaacatcaattttataagaaattctcaaaatccatgctaaattttgtgaagtttataattatttatgacaagttagtgggtaataaacttcttaaacaaagttaaaatacataaatgtattttaatttatga

SEQ ID NO: 118643 - DNA, 382 bp, Glycine max
gcaagcatcctcgaggacataatctgataatgtcttttatttggaaagatagttttaccaagatatgtttctcttaaaacaaaaatggcatacaactcttcttcaataaacaccaacatcattggaaaattagagcaaactcatgcacattacttccttacgaacattacactcgcacaagatattcttctaactaaaaaaaatgcacccatgcacaaacaagacacctttgttacctagattatttatatgtacttccaaggtgtatttgctacctacataacatgcacttccttggctaaatttacatacatgcatacccaaagcattttggctaccaaaaattgcacacgtgcacaatttggtatttctatacctatgc

SEQ ID NO: 118644 - DNA, 401 bp, Glycine max
gacctataaaactcagcttctacgagattagaaccttcatttgaggaggaggattgattaccttcctatgtttataccttaggagtagttcactacctttagtcgggtagtgatctactatgatcctagatctttttttatattttgatgcaatttgttaactcgggttgtgtccaagtcatattggactataccaaacaattaaatccctaagactctgatgttaacaaagtataaattttatgtgttaacctttcatgcttaagatataggtttatctatctctatgagatacaagcaaaaagcatgagtagaaaggctctggatgatagccaaagtatcaatcattgaatgatattgcctcaaaatccagtcctaagaagacaagtgctttaacactt

SEQ ID NO: 118645 - DNA, 379 bp, Glycine max
  unsure (1)..(379): unsure at all n locations
agcttnttagtttcggattatgcaactgtttttgtagctacctcatgcactcctctaatgactataacatcatttctggcgctaaactgctgggagttggaaaccatcttctcaattaaatttctggcttcagcaggagtcatgtctccaagggctccaccactggaagcatctatcatacttctctccatattattgagtccttcataaaaatattggagaagctactccgaaatctaatggtgagggcaactggcacatagtttttttaaatctctcccagtattcatacaggctctctccactgagttgtctaatacctgagatatccttcctgatggctgtggtcctagaagcagggaaaattttttctaaaaat

SEQ ID NO: 118646 - DNA, 450 bp, Glycine max
  unsure (1)..(450): unsure at all n locations
ataaaactaagctanaatgaccctcanaatcacataatctcatttctaactaaattgtctctcttggccgcatatttctagggactactcatatgcttcattttgtgttttgtagagtcctattggtcctgcacaaggcagatagatcatgttagcacaaaatccaaaaacaagcaacaagtatcaattgagcgtaattatttgcctaagaccaaaactgagttaaggtgagaaaataagagtcaaagaggggtcaaataatctaagaagaataggaaaatactaaactaaaaatgtttaatcatcgcctctgctactgatgtatatattttcctttcccaacttctgaatagttaaactggatactaaatttatagtgaaatattcttagtaattagtgactattacacctaagtctagtaaattttaagtaattctcatgaattatat

SEQ ID NO: 118647 - DNA, 381 bp, Glycine max
agcttattcagaggataacttattattattcacagcctgtgagagatggctcataacaggccaatcatacctttggagcatattcttgagcacgtagcatggcctgaagctcaacttccattggtgagacccaatgaggctgccccttctgagcccgcaccagcacgggttgaaccaattccagctgagccatgatctccagtagtgaatccacctccttctcctgtgtttgaagaagttcccccatctccacctctgattatcatctccgatgcatcatcagatgaagctgctgcccctcctgattcaccagctgaagaaacagctgaccctcctactttcccaattggaggaattgccgatccttctgattcatcatct

SEQ ID NO: 118648 - DNA, 370 bp, Glycine max
agcttgtatgttagacctcgatcggtcatctttcctggccgacgccgactgtcatttttttcgatcaatatcggtgaataatatttttttgccgaggtgggctaatgttttcctggccgaataaatgggaacatgccagtttcggccgaaacgaaacatcggttgagctcgcacgaaaaaacctagccgacttacattgtaagttttttatgcaacaccgaaaaaaacaaaatttcccctgccgtaagaaaaaacattatcggccagcgagcgcgggacttgaaattcaagctccaaaaactaacccaaggcaacaagggggttgaagagtatttcaaggaaatggatgtgctcatgattcaagcaaata

SEQ ID NO: 118649 - DNA, 392 bp, Glycine max
tgagatgaggaagtgttgaagggtgaaactttctgcttttattgttgaccacaaagtggtacctggagatatgtcgcgggggtcacgagaccttggggacgtcaggtggggtgctatttgccaaaaccaagcttgaccaatcccgacccaacccgggcatagtcggtcagtgagaacctgtgatgtacctaaacaggcgagctcctggcagtcaacagataaaaggaacaaagaccacaaagcaaggaggcttgtggtggctggccagctgtgaactttgattgatatgtgggttatggcctctggtaatcgattaccaagggtgggtaatcgattacaaggcttaaaaatgaagacaagaggctaagatggtctcttggtaatcgatacca

SEQ ID NO: 118650 - DNA, 388 bp, Glycine max
agctttcataagtgaagttaggtgcagccatctctctaagagtcctctcacgaggtggagattgagccatgttctcaatatgaaaattagcaaccgaatgctcaaaatcagaatgttcagaatcaccagcaacaaaatgcttagaatgcacaaaatgatcaggatgcacactatgcctaaataatctatgaaaggttctatctatttcaggatcaaagggttgtaaatcacctggattgtccctagtcatgcactatatgcaacaaatcatgtatttctcaaacaagcaccaggggtaaaaaatgggtaaaactaggggtaaaactacaactatactcaaacgatatccaaatgagatgaaaatttgtgagcaacaccctaaaatcat

SEQ ID NO: 118651 - DNA, 445 bp, Glycine max
gacactataaaactcagcttcatcagtccttggtcttatcactaatctaacttattttattgttagtttagattactttttcttgaggacaaccaaagctttaaatttgggggagttttataattgttgtgcatgtttactttttgcacttaattttcacaacaattatcctaattcttctcatttattgcttagtttgatcacaataagttagaatttagtgttctattagagttttagctcaatgaagttaactttagtgaattttttagttgtgttttgtagagtcttagtgcatcaacaatgaaattgaagattttagaattgaagtggatcgctcagtgtgcctacacacgcttagtacgagaagcctaacttcgaaggccatgtggcaagtttctggaggctgttgggggaaatctgaaacttagtgtgcacttcacgc

SEQ ID NO: 118652 - DNA, 369 bp, Glycine max
  unsure (1)..(369): unsure at all n locations
angctgcctaattaacctgaaagtgagagtatttgattatttaacacacaaaatggaagtgctgagtatttattacctatacttaacagaaaatacttataacactacaagataaccatgaattggaagagtttgatacaatttacacaagttttatacacaaaagttagtcggattcaccgactaacaactcccctaaatttacagttttgcttgtcctcaagcaaaaagagaacaactcacttgtcctcaagtgacaataacatgcagtgactatgtacaaaggtgtatgcaacaaaagttagtgatttcatgataagagaatgaagtaaaatgccctgatcacttgtcattcacaaggtgtgcagt

SEQ ID NO: 118653 - DNA, 418 bp, Glycine max
cgccacccagctcgcttaggctagctaggttgctttctccatatgcaactgccttatggaagaattttctggaaagcccaaatgggcctggttgctatttgcccccccatttttactaaatacaccccttgctcttttttggcgattctttttccgtaacgttacgaaactttacgaatttcgtaacgatgcttgttttcagtccgtaatgttacaaaaccttacggattacgtcatcatacctttttttccttccagaatgttacggaactttacggattgcgcactaacacttactcataatttctggcatgttacggaacttcacggattgtgctacaatgctctcttttgacttccggcttgttacggaacttacgaattgcctaacgatggttgccaagtacctcgaagtgtc

SEQ ID NO: 118654 - DNA, 345 bp, Glycine max
gcagcttgggaggattgatgggaacccggtttttatataaactacgatatgggcttcgtgggagtacgtgagctcaattggaggtggccaacagggaatggtgggtttatgcgcgccattgggatgtggaaaaacttgttgtgcaccattcgccgaccgccacctattaccacatgtgatgggtaccccataatccttacagcttgagatgaggaaatgttgaaaggtgaaacttcctgcttttattgttgaccacaaagtggtacctggagatatgttgcgggggtaaggagaccttggggacgtcaggtggggtgctattgcccaaaaccaagcttgaccaat

SEQ ID NO: 118655 - DNA, 437 bp, Glycine max
  unsure (1)..(437): unsure at all n locations
tcaagctgacagagacttgagaagttngtataatctcacttgaagctgtgagttctcattaattaatagccaaaagatacattattgtaacaaataaatcttatttgatgttgtcaggcagaatttgaaatcacagaggcttctgtcagtaggacgaaaaggaagctacttcagaccgtgagcgatagatggaggcagtttaaatcagacctcacgaggaaatgggcccttgcagccgatcaagacggtgtggaggacactgtctgtgagaaatacgacatcatcaaggaaaaatgggcccagttttgccagactcgcagagacccttcttgggaggtatgttccttgccatttaagttgtctttcaaaaagaattaactcgttatacttcattatagcaatttgaaatattattggtttatttttgcaggaagtgc

SEQ ID NO: 118656 - DNA, 389 bp, Glycine max
  unsure (1)..(389): unsure at all n locations
tgccgcatgcaagcttnctcggggccatttcccgcgaatgtttatatttggaaagttagttttactagggggacactactcttaaaaaatggcatacaacctcctcccataaatacaaacatcaatgtaaatntaaagcaagcttatgcgcatatttccttacgaacgttcacttgcacaagacattctattaactaagaaaaatgcacccatatacaatcaaggcagcttcgttacctagattatttacatgtacttccaaggtgtatttgttacttacatcacacacatttcttttgctaaattcacatacatgcatactttaagcactttggctatcgaaaattgcatacgtgcacatcctggtatttctaatacctatacataca

SEQ ID NO: 118657 - DNA, 147 bp, Glycine max
ctggggctgagaaaaactatataacagcaccaaggttctatgtttatgaggcccctctctccctcacgggagactctgtctctcccccctctctccctagcgggagaattgtgtcgagcccctaacaccctagatgtaacgaaagaa

SEQ ID NO: 118658 - DNA, 373 bp, Glycine max
  unsure (1)..(373): unsure at all n locations
agcttccattgttcaatttcgagcgtctctatatcttatgcgcctgaatctgacctccgtgtgaaaagttatgaccatntgagtttctcgagagctgtcgttggataattttgagcgtcttgaaatattatgcgcctgagtcggacctccgagtgaaacattatgaccattaaaatttctcgagagcctccgctgttcaatttcgagcgcctctagatgtgatgcgccttaatctgacctccgtgagaaaagctatgaccatttgaattttttcagagcttccgtcgttcaattatcggcctctcgatatcttatgcgcctgaatgagacctccaagtgaaaaggtatgaccatttgaataactcaaaaactt

SEQ ID NO: 118659 - DNA, 398 bp, Glycine max
gatcttaagcaccgcggctgcaagctgccaccatggaactctttatcttcacactttttggggtgggccattcttggatggccttgattttctcagggtccacttggaccccatttctaccaactacaaaccctaagaaaactatattatctacacaaaaagtacacttctctatatttgcatagagggtgtttttcctaaggactgaaagaacttgcctgagatgtcctaagtgatcatctaggctcctactgtacactaaaatatcatcaaaataaacaactacaaatctacctatgaaatcccttaagacatgatgcataagcctcataaaggtgcttggtgcattagtgagcccaaaaggcatcactagccattcatacaaaccaaacttggtc

SEQ ID NO: 118660 - DNA, 317 bp, Glycine max
taaagcctgtgttcgtattcaaatgacatcattgtttcttaagttgttcttttatcaagtccatgcgaaaacatctggatgcatttggtatttgggaaagtccttcattgttcttattctcaatgttgtttttaaaaaaatccttttgttgtgttctgatccaaaaataagtttaaaaaatattggttgttgattctttccaaaacatgttatgttcaagaaaaattttctgtttgagtcccaaaaagagttataatctataactaaactaacaaaatatccaagcagacataaactagtcaaaataaactagcgta

SEQ ID NO: 118661 - DNA, 369 bp, Glycine max
  unsure (1)..(369): unsure at all n locations
agcttaccaccaagagagtgtcttttatttattcttanagaggaagcttcnatggaggaagaatatttaaatagggatagaaagtgtggtgtggaaattgaaagaaaatacggaaagaagttgaactttgaagtgtgtcttacaagtttcacattcatcaaagttgtgacaagtgttacacatgttcctatttatattctaggtcactaacttttgtgaatttcatttacatttcatgtgaatctaaaatgaatattccaagaatatgccaaaggcatcttaaagtattccctttatatgccacaagcatggaaaatgtgactctatcccatggaaagcttccttgagaagcaaggaaggtaccttcct

SEQ ID NO: 118662 - DNA, 413 bp, Glycine max
  unsure (1)..(413): unsure at all n locations
ntaaaccatttgggccaggtgatttgttggaatccatttgaaaaagagcattttgaacttatcagtagtaaaagaagaaaggagggagtttttatcagcatacgtcaagaggaacatgatttattactacatcaatttcaattggctcaccacaacacaatttgtcaaaataggttttggcaatgttacaaagttcaatattttatgttacaacataccgttatcacgagttagagaaacaatgttattcatcttctttctcgcgaaggaaactttgacttgacgtccctaagagttcatgtaagaggaaaacctctcaagcttagagatcagattatcggttaaagcattctcccatccttctttgattattgatggaaaaaagggttctaagagccatgtcgttntaaaac

SEQ ID NO: 118663 - DNA, 379 bp, Glycine max
catgcaagctggagaggatgcttcaatggttgtttatataaagggagagaaagagggagggggagcacgaaattgaatgaagaaacagggagagaagttgaactttgagttgtgtctcacaagactctcattcatcaaagttacaacaagtgttacacatgcttctatttatagactaggtagcttccttgagaagctttcttgagaaaacttccttgagaagcttctttgagaaaacttccttgagaagctagagcttagctacacacacccctctcataactaagctcacctccttgagaagcttccttaagaagattcctaaagaagcttgagcttaactacacctacctctctaatagctaaactcacctccttg

SEQ ID NO: 118664 - DNA, 435 bp, Glycine max
tctatataagctgaaccattttatcaataaacacatgttgagttttattcagaaaattagagtgtatctcttttatcttagtgagagtgattctcctaaattcttgagtgattcaagaacaccctggctgtatcaaaggactttcacaacctttgtgagttgccctcgctggaaagagtgattctttccttcctttcatcttcacccttgttctttcaaaccacaattccagaaaatccacctctgcccagaattatctcgtggccataactcccattttacgcactcaaattaagtgattcttgagcctaaattgactttaaaaacgagacctttcacctcgttttggaatcacctcatttggagccctgtagcttcagttattgccatttctatatttctgtccagccaccacttaacctacattttaccatc

SEQ ID NO: 118665 - DNA, 374 bp, Glycine max
agcttgtgcttttacgaaaaggtttatttttcaagttgaagtatggaagtaaccatcttgcaaaaattggggcaaaagatggatcatgttacatcgctgcttcgtctactgccaaacacatttagggttgtcaatgtccctgttacttccagtttcaccttgatggagatgtcatggaccatgttgaaaatataaattgattcaaccccatatcctgtgtaaaaattcgcaatacttcaactgtgcatcattcacatacatccatgcttttcattggttgcattgctcattgcgttctttccttgaaaaaaaaacttaatcattgttataaaaaaaaaaaaaacacgctttacggggcctttaccgaacccgtg

SEQ ID NO: 118666 - DNA, 435 bp, Glycine max
  unsure (1)..(435): unsure at all n locations
tgcttgtgaagcttctatggagactggatctttgagcttcaatgatgtccttcaatggtgattttccaccatggagatgcagcggaagataaagaaaaagaggtgagaggaggcgctatccactagcgaataagccatggaagaaggagcttccccaccaagagagtgccatggataagaagcttagagaggaaacttcaatggaggaaaagaaagagagagagagagagagagaggaggcggctagaaattgaaggaggaaaagagggagagaagttgaactttgaagtgtgtctcacaagactctcattcatcaaagttacaacaagtgttacacatgcttctanttatagcctggantagctccttgagaaacttctttgagaagctcccttgagaaactatcttgagaagaatttttgagaagcttccatg

SEQ ID NO: 118667 - DNA, 396 bp, Glycine max
  unsure (1)..(396): unsure at all n locations
acctgctgcatgcaagcttgtntaactgtcctgctgcatttcttttatttcccanctggaaagatgtatctcctccgatgaagaaacaatctatgctgcttctgcggcagacaatcttcaatagtaccatcccaaaactgtgaatgtcaagttttactgatactggtgcatccttctgccattcaggagtcaagtacttgcttgtcccatcatcctcttttctcattcttgaatggtcagactttagcagccttgccaatccaaaatcaaaaatctttgcagtccacgctccatccataagtatattccgaggatttatgttgcaatggataatacggacctcacactcttcatgtagatacagcactcctctggcaatgtctaatgcaattttca

SEQ ID NO: 118668 - DNA, 344 bp, Glycine max
ccgctcggagaatgaacttcaaactatacacctagagtatctatgtatccatatgtcacaccatacgtatagatatatatatatatatatatcgcccaaatccatcatataatcttgatgaaaaacaaatgaagatttcctttcttgagtataaaatatacgtggcatacatgagcgtgatcgatcttatccatacaccactttgtgtccatggaaaacatatgaattaatttcagaaaaaagagctataattgaacttgttcacaattctctttttcccccaccctttcagtacatgtcgtcactgatgagagaaaatccaaagaataaaacccccaaagatg

SEQ ID NO: 118669 - DNA, 378 bp, Glycine max
agcttgcacgagggtaagctattaataatactgttaaccaaagcattttaaattaattattgaacttggagaaaataaggacaaatgaatagggttaacttacaatttattacaataaaacataagtatccaatatcaatcatcatccaacaccaaattcaattaatgcataaaattaaatggtcccacaccataataaatataatctaaaagattctggcttttacaaattcactccaaggaaacccacataacatgacattagcatcaataaagcacaacaataaaatatcttttgcttgtgaaaaacaacagattaaatcaacaaaccacatgtttatttggaccaactacaaatgctataaaggataattctag

SEQ ID NO: 118670 - DNA, 422 bp, Glycine max
tggcattcaatgttaatgttaatgaaaatgttcaatataatatatataaacttccagcactgcagttatactgtacttgagctatatgttttattgctattattatggtaactctgaaatgcttttaatgcgtatgagtatactaactactaaactagaaaataattgttcttctacttttaagctttagtacacatacacgttcgattttgttgcatgtaatttttcttattaaggtgcatatatgtttgtttacatatagcccaagtacctgtaccagacagatccgaaaggaaccagagtcctttttgagatataaacattagcctccaagtgattggtagttttatattcaatgtcactttttggttgcaattcaacagagttatgctgtgttttaacctagtttgtagtaatgaact

SEQ ID NO: 118671 - DNA, 373 bp, Glycine max
agcttcattcctttttcactcatgtgtccaagtctttgatgccacatggttgaattattgacagcctcagtaactgctaccatatcctcatctgcaatcatgtaaagagatcctcgcttctttccacgagccacaatgagattgccttttgttaccttccaagctccatctccaaaagtggtgtgatgtccctcatcacccaacttccctatagatattaaatttctctttaaggcaggaatatgtctgacattgtgcgatgtccatagggatccactggaggtcttgatgttgatatcacctcttccgataatgtcaagagattttccatctgcaaggtaaacttttccaaatcttctataaacatagttag

SEQ ID NO: 118672 - DNA, 349 bp, Glycine max
atggcgattgagaagagtcatatgcgaaactttcgtcgtgcctaacacacatgcaaaatcattctcctggatcatattttcaaataatacatgacgattttattgttgggaacacagttagtcgcgaacaccatcagtttcatagagtgttttggacttttggtcaatgtaaggaggctttcaagttttgtaagccaatcatacaagttgacgacacacatttgtacggaaaatactgagggaccctcttaatggccacatcacaagatggaaatggtgatgtccttcctctagcattcgtcgtggtcgaaggtgagacgttaacaacgtggtcatggttttttggcac

SEQ ID NO: 118673 - DNA, 437 bp, Glycine max
tattaaaaataagctgcatagaacttattggtatgtcttatctcataagccatttttataagctcaaatatttcaaatgccccccaagagcatagtgttgttaagacaaacaattttcaaaatatgctcctcttaccactccctcaacaacttaaatgcaaattacaaccaacttctcaagacacaagcatggaaaatatattaaacaatgtggtaactttaaaactttgtgacagccaaggacaaatgtaccactaagaatatcttggttaagctatgcatacctcataataccctaacccagattacctctaaaatattaaccaattaaagcatcgtgcctaatctataactagaagaaaatgcttagggtattaagtcaacatactaaagacataaaccagaacatatacatgaataattacaagagaatatat

SEQ ID NO: 118674 - DNA, 384 bp, Glycine max
tgcaagcttaccttctggtcctcctcatagttgttgtatgagaaaacatgctctattttcatctcccactccaagtaagcctccggatcattctttcctttaaatggaggaatgttgagtttaataccatcaattcggttttgtctaggaacaccatcattccctcttctcctcctttcttcttcattatgatctctattctccatttgatccatcctctcatggagcgcatcatctcgttgtttcattaacctctccaaatgttgcatcaaagcttgcatttggaattgcgaaagccccactccatcattaggattagtacctgacatctcaaacaaacaaatcaaacgttacaagacaattattgttgttgtttgaatacct

SEQ ID NO: 118675 - DNA, 438 bp, Glycine max
  unsure (1)..(438): unsure at all n locations
taaaactaagctnacagcagattctagtaatgacccactaacctagaattattatttcttaatgccattaacctagggaattaaaacanactaaatggctgagtgtaactgaaattgttggcaaccaaaagtgacccccgacagccaacaagtgcagcaccatttggtctccctaaatgctgatgcctacgttgccaattgggcccttattacaacttgaactaaagcccttttagttgattaacccaaaacatattttcggtcagccgactttacaaggattgggccattatttagacaaactaaacactctaaaatggaaataaagtggtgtcatttagtcctccatttgggccatgatacaactcacaacctcggacttttatccttgaaacttgcgcttgtattcaaataatatggacagcacttgttgaagag

SEQ ID NO: 118676 - DNA, 373 bp, Glycine max
agcttcatatcttagtaattcgtggaatgctacttctgaataccaattggtatgcatggcaatatttccttgccccataaattaaatttcaggataataagtaaatagtttcattttgtcttttttaacaaaactcacttgacaaaataggaagttcacctatcggatctacttatcatttttatgtattcaactaatatattaacctagtaatccacataattatccatacattgtggtggatttaaggtgagtctatcaatatatttttttaaaacattttcattctccaaatttcaagttttcttttttggtatacaatggttattaaaaaccttagatcttgtgtatactctctaattaaggggtttga

SEQ ID NO: 118677 - DNA, 437 bp, Glycine max
  unsure (1)..(437): unsure at all n locations
tcttaatgttgtgttgttcattaaaatggtactgtctttttatcttatntcagcaagtntaatggtcgaatntatgacataagtcctcaggtgtttgcaaataaacactaattatnttttggtgcttgaatgcatatntttttttatggagcgtgttgttttgctcttgtaagccggtgttatgcgttcgagaaagctcatagactggatcctacttcaagtggtcgtggtgttcggcaattcaaaactgcccttcttcaacgtttggaaagagtaagcattcacatgttttgttttgtctgtacaagatacagttctaatgtttcttttccaataagctcttgtggtattgctatttcctcaacaataataagctactgcctattttattgctctatgcctcatgtcatgtagatngtttagtcttacactaatat

SEQ ID NO: 118678 - DNA, 380 bp, Glycine max
agcttagtaaagctaagcactaacaatcttcccctttggcaaattttgtctaaaacatacttagacacttcctgagcaggtacgagcagttatgcaagtgggatcagcaactttcattatcagagtaatcaagcacagcggaaattctgcaagttgcaagtcgttttcaggatgtcaagacatctcacatgacatcagctttctgcttctgctccccctgtctccatgcttactgcagcatcttctaacagctactagtcttttccaggatgtcaatacatctcatgtgacatcagctttctgctcctgctccccctgtctccatgcttactgcagcatcttctaacagctactagtcttttccaggatgtcaagacatc

SEQ ID NO: 118679 - DNA, 410 bp, Glycine max
  unsure (1)..(410): unsure at all n locations
aaaaactaagctacttgatgtcttgacaacataatgaagtttgccatacttagttaagcatgaagctttagtccaacagaataatccgaaaatgtcaaaaattgggtgttgaaaaagcataacaagactttctgtgattggtttaaagatacaatctttgcagatgagaatgcttcagaaacattaagaaagctagcagatgggcctaaaagaaatgttataacctggcaaggatatgacaaaagtacaatgtagaacagtggggtcaccctaagggctgaatcttaacactttgcaaggtactangggcattgcacangccgaaaggcatcctcctataggcaaaagtgccgaaggggcaggtgaatgtggtcttttcctgatcctcaggagcaatagtaatatgcata

SEQ ID NO: 118680 - DNA, 389 bp, Glycine max
gccgctgcagcttcccgatatatagagaatgttttattctatctgcagatatatcctcccaaacgtcaaattctccgcctatatattcaacctttccatcactggcacgtggagtgaatcttcctccatggtgcaatactaaagttatattgtcattcattctacacaatcaaaaaccacaaacatggtcagatattaagaaataaaaaaacctacctcaaaaagcgcgaagacattgacattgtcaaaaagcgcgaagacacaatcagaaaccaaaaacattgtcatctataaaaacagagcatcataaacgaaaataataaaggatcataaacctccctacgaagcgcgaagacaatgcagatgaaacccctcgaacatataaaacc

SEQ ID NO: 118681 - DNA, 373 bp, Glycine max
tattaatcgattacaggatactggttaacgattaccagagagtgaaaactctggttacttagaaaattttgagaaaagcttttcttgtaaaacaaaactgtgctatgtttggtttttgaaaaatttttttcaatacctcccttgggaaatcatcttctcttgaatcttgattcttcttgatgtcatttcttgaatcttcttgtgaaatcatcttctcttgaatcttgattcaatcttgatctttgaacttggtgactcaatcttgaaatcattctcttggactttttgtcatcatctctgtcatcatcaaaactacttgaatcaacttgattcatcatcatgaagcttgcttctacaaagacaacgattgata

SEQ ID NO: 118682 - DNA, 376 bp, Glycine max
gcttgagacgcatgtgaaccttttactcttcataacattcagcttgatcctttgtctacaatctccccctttttgatgatgacaatccctgaaatcaagacaagctatatacaagatgatagcacgttcacacaacccttactccccttatcttttggcatgtatgcctatgcctaactttaatgattataattgatttctaacccaagttctctccccctttggcaacatcaaaaagaactaagcaacacaatcaaaatttaaacagagccaaacattaaaccaaaataaatccatacattgtcataaccaaccaaagcatagtccagaaatataataatagtgcaagagtatgataactagtgcaacaaaaagc

SEQ ID NO: 118683 - DNA, 416 bp, Glycine max
  unsure (1)..(416): unsure at all n locations
gcgacacaagaaactcagcttccaccatctccgatatcttgaggatcatattattgctccccctgatttggnagcaaggttgtgatttggatccatgggactatcaattggtctacaatctgacataccactttctttaagtatgtctaacacatactctctttgtgagatgataataccatcttttgactgaacaacttcaattccaagaaaatacttaagttttcccaaattcttagtctgaaaatgactaaataaatgttcctacagttgagcaatttgttctgggtcatttcttacgatgactatatcatctacatagaccaccaagtgaacacatctactcgatgaggtatgacaataaaaaactgaatggtctacttcacttcatttcatcccaaaagcctgaacaactg

SEQ ID NO: 118684 - DNA, 380 bp, Glycine max
agctttgacacatttgggaaaatggtgtttttttctttcatatactaaggcatgcccacatacactcacaccacatagactacatctcaagcacgggtgtcagagttattagatcctatggcccaaaagccagctaaaccacaaatgaacactcttatagtcaaacttagcttacaagactatatttacaattggttttggcctcaaaatgcaaaattatggttgattttgataaactacaaaataatgcagcgctaactatgtataatgtgaatttttttacttaattactactttttgttttgtttgctatgctactaagttgaaatgttaaatgatagtaattatggaaaaaacaagtgaatgcaccctctggtttt

SEQ ID NO: 118685 - DNA, 426 bp, Glycine max
  unsure (1)..(426): unsure at all n locations
tcgagagcgtgaagaagacctgaccaagaagaaattttttattcctcgtcatccacatgaaccagagcgagtgcaagacccttcatggagaatgaggcgataacgacgcattcaggtttaggggtagtgtggtacttgaagaattgattgatttttgaaatccaccccaacggatcggatccatcaaatcttggggcttccagcttcatgcgaagaagatgggatgaagggctaataaggtatgggtttgcagaagaggatgaaggtgacggagatngtagttggctagtctctataactgtgatgcattggatgatttcgtctagataggtagtgatgtgaagctgattggaagctaatttcgcgatttcttcttcaatgcactctatattggaattcaagtgagtggattccttcatggtactc

SEQ ID NO: 118686 - DNA, 363 bp, Glycine max
  unsure (1)..(363): unsure at all n locations
agcttgtnacaaaaaaaagtattattttagtttgaaagtntatcatctcagttttccttatcaagtaaatggatcatttttaaggtccaacgccttaaaatgatcacctttcaagtaaaaagaatcgcttgattcacgcttaaaaaagaactacgtaggtttgatttcctcatcgatggagggtacgtaggagcaaaagccccgcttttgtcgacctcaaaaaataaaaagaaataaaagttaaggtaatacaatttccacaattctaaaaaataggttgttgtcctttgagacaaacgtgagaggtgctaataccttcctcaaacgtaaatacaactcccgaacttagaattttcttttgat

SEQ ID NO: 118687 - DNA, 430 bp, Glycine max
  unsure (1)..(430): unsure at all n locations
ataaaactcagcttggcaatanatcactcctactttatctctattatgctttgatgtagtctcgtcctttgtcacgggaagccggaaggtccatatcaccttcttaattgtacacatggggcactgcgcccccaaatgcgcgagtaagaagagataattttccgggctctcgtgtccgtaaaatgcattcatatcatgcatcgcataagcatctcttcataacatcataatggacatatcctgcatttgtccgttatcatattccagcctcaccttttgcatgagtcatggcatcatcatgcatatgcgtccaacaaactttgtgatctgcaaaattgcataccatctgttttcatgtttgctcatccttgcgttttcctctacaaaacaaaaacatagaacggggaagcgtgaaactcacactacattc

SEQ ID NO: 118688 - DNA, 400 bp, Glycine max
atccttatagtcacctgccgcatgcaagcttggcatagcacaaatgtgacttgttatgttgccttcattaattatgccaatttttctgctacaacgtcagattctttaccatatgagactttttatatatagttgagcaaatacaaaaaatagcatagcgtgttactattggcataatcaatattgtcctttaaaagatgcaactctcaccgatgttcaatgataacttggcgaagtagtttctacattctcccgggcattgatttcttcaataactttctcttttttacaaatggaaaattgtgtgttatgtagtcatcaatctttgttaatgtcatcaaatggaaaattgtgtgtgatgtaatcatcaatctggatttcctgcatattaatcacaata

SEQ ID NO: 118689 - DNA, 422 bp, Glycine max
  unsure (1)..(422): unsure at all n locations
ntaacctgttgcacatggcagaggaaggtgtgaagtgttaaataagacgcgacttcgacacagcacagggagagacacaaattcaacacatgagaagagacatgtgagagaaaaagtgagggaggagcaacttcaacacagccgaatgtggactctgttttgtgagaaagttgagccctaatcacgtgagagaaaacatgagagctgagacctaattgttcgggtccagccacaaatcaacattcttttgctgtgaatccagccacaagttcacgatttagactgatttcgaatgatccccgccgcatgacccaatcccaccaagaaactgttacagaaactagcgagcgcaatttggagaggtaagctcttatactcagatgcttttatgagttaacactctgagtttgacacaatgcatg

SEQ ID NO: 118690 - DNA, 432 bp, Glycine max
  unsure (1)..(432): unsure at all n locations
tgttaaaaatgaacaagaacaaggtacggatatgtatctgcttgaaagtgaaagtacataaaacaagtagggaccactaagggtgcataaaatgaattgaaagattcgatttcagaaacttaccggttgaagatcgaagaacaatgaagaacgatgaagaatttccacagaatcacttaccgaaacgtctcggaagcgttacggaagtgcctcggcttggattttcttcacggaaataatttttctcactaattttgagtgattccncaataccaaaagggctgaacccatttactctgcccccttcctctattaataggagaaaaaggggaggtggttgtcgcctagcttgcccaggcaagctgggttgcttccaccagaagccaccgtccttttttggaagattcaagaacgtccaagtgggccagatta

SEQ ID NO: 118691 - DNA, 372 bp, Glycine max
agcttgccaagaacacctcagatggtttttgacttgggcacgagagaggcctgtccagatcggagtttacaagcctgacgggagtcacattattctgtgcttacagctgcacgaatgtgcagaatggaatgcgaaaaagtcgatacctctaggactggggaaattgagcgcgatgattacaaggcctatctgagaattcaccagaaacagccatcatttattaacgtgagcaaaagcaagtctctatatcatcgtttctcgcaatcgcataccgtggagcccaccctatccattactgtttgattctaactcctgcaactgaaacgctatggctgtaccattgtgaaaggtgctggcgatgatcatgatctg

SEQ ID NO: 118692 - DNA, 276 bp, Glycine max
tgcacaatttatatcgataaccatctgctgaatgtattattcttacttcataacgtatggactcactttttcaatacaagactggcaaagatcacaggactgctgacaatctaataatttagacgcttcttgcttttgacacatcgcgataattcgcttgtggaccgcacgcttgattgccacatacaacgtgtgggacgagacgatatctggagagcacctttacgaatgattgctccatctacattgtttagtaatatcctggcaatgatgcat

SEQ ID NO: 118693 - DNA, 372 bp, Glycine max
agcttctatataagctgaaccattttatctataaacacaagttgagttttattcagaaaattagagtttatctcttttatcttagtgagagtgattctcctaaattcttgagtgattcaagaacaccttggctgtatcaaaggactttcacaacctttgtgtgttgccctcgctggaaagagtgattctttccttccattttatgccataacttccattttcattattacccttggttttttcaaccaccatttccgaaaatccaccttttgcccaaattattttgggggccttactttcattttacccactccaattaaatgaatcttggacctcaattggaatttaaaaccaaaacctttaccttgtttt

SEQ ID NO: 118694 - DNA, 420 bp, Glycine max
tcaacattcaacttcgagcgtctcgttatattatacgactcaattagacatccgagtaaaaagttattgtcgtttgaatttgctcagagcatcaaccttcaatttcgagcgtctcgatatatgacgggactcaatcagacatccgagtaaaaagatattgtcgtctgaattggctcagagcttctacattatatttcgagcgtctcgatatatgacgggactcaatcaggcatccgagttaaaagttattgtcgtttgaattggctgagagcttcaacattcaatttcgagcgtctcgatatgttacgggactcaatcagacatccgagtaaaaagttattgtcgtttgaattggctcagagcttcaacattcaatttcaagcgtctcgatatatgacgggactcaatcagacatccgag

SEQ ID NO: 118695 - DNA, 300 bp, Glycine max
  unsure (1)..(300): unsure at all n locations
ctgcagctgaaagnccataaaaaacttgatgtttcattaatcgcaggcactntagggcgaaagtactctctgggcactttggccttcccctaattccccccaagataagacccaagtattttttttttcccaaaccactttaggttttacaaataaaaatggtcgatagagttgaattctaatcactcaaagatgtttacacttaaagaccccgctgacgctcgatatcgtactctaaacgcgtaaatttcatttttaaaaaaaacttccttaattgattagaaaacgagagtaattttt

SEQ ID NO: 118696 - DNA, 449 bp, Glycine max
  unsure (1)..(449): unsure at all n locations
tatagaaanntacgctcttgcatgattagagatttctagagagagaaaggtccaagttctctatagttttgagagcttttgctatacaaagactggaagagaaatgaaagcgaagaagaagccatcctaagagcatgagatgagtctgtgagtgattgtgaggttctagaagtggaggagacatccccactacttgtatttcttcaatcctttatttttctcttctctttgttgtaaaggaagcttcccagatatggagagctaaatcccttgttggttcttccttgtcaggtacttgatgtaaatacttgtatatctatttaatgatgttttatgtgttctctgtgctatcagtatgtcatttcaatgtgctttggccttgatcatgtagatgcatgctttgttaggataattcaacagtggaaactggtttcattcttataacttga

SEQ ID NO: 118697 - DNA, 183 bp, Glycine max
ctcgtggtatcctgctgaagggctttagaagtagttgcactctcgaacaatcatccgagacacatttgtagaacgtgttgtatcacacacatgaacttctcctaggcgagtagcgcgttatctaacacgctttggagaacttggactgatgattgctcttccggtgctatcaaataatcttct

SEQ ID NO: 118698 - DNA, 325 bp, Glycine max
  unsure (1)..(325): unsure at all n locations
aactaagcttacatatattcaactacgaataagtaaatatcgtctcatattctttaatangtaatagggtcatcaactatctccacaacaacatcactttcggccactgcaacaactacatcttctactactataacaaattgatattggcttgacataaagcacctatgcagcagtagcgtcttcatgattgaagaatcatagctggaccgatgctctaaataaagaagacttgcctctcagacataatatgcgtataacaatatgacaatgccaaaagaactatatcgacgtcgcgcaggcaatgacagtgacaaactcttca

SEQ ID NO: 118699 - DNA, 352 bp, Glycine max
gcttgcctttagcgctagcaccggatttctttcttcctaagctgtaaccacactgtgtgtgaagactttatatttcggagcgcatgcactccgagtgttcagaacaattccccttgtgatagctaccgatgatgccattactgcacccactattatgtctatcctttgttcatgccgcatcccatgccttgcgagctccttggaatacctttgccttgcggacactgaaaccctctcgtatgaaaggtgtgaggctatcgaataatggcgctgctctcatggggtagccaagctgccttatggcgaggacgggattataataaatacaatccccctgttaccatacagggaa

SEQ ID NO: 118700 - DNA, 325 bp, Glycine max
ctaaaaactgggtaagaagacataatcctactaccgtctcggcttaggagttaaaatagattcacagtgcattttaatcaatggccaagtctttttccacgggatttttgcatccgcaagggatgcatagttatgagctctatacatgtaaattcttatgcaaattgcatccatagatcggttccctctcagagtatgaatgtttgactatggaaccattgtatggtctctttttgtattatcacgacctctgggacttcattctatatatataatattatctttattgataaaaaaaaaaagtggaaaaagctttttcctactg

SEQ ID NO: 118701 - DNA, 424 bp, Glycine max
  unsure (1)..(424): unsure at all n locations
gaactataaaactcagcttttgacaaccagagttgaagttttatcgtgagatttttgaaatatgactggtcaatatctagaatataccaaaagtgacaaattgacaatgttaacaatttaaaattatattaaagagttggtgaaaaataatgtttagattaacgtctgatttgtcatgagtaagatatagtcatacacttcaatcaattttggttaagtaagagaataactttattagcggtcaactttttcttttccaaattggcggccaacttttgttaatgatgaatccgtgatataacattttgagtctttgatgaacaaataaaacttatcgctaagatgcatgagatcaaaacatgagaaatgcactgagcacattctttttataaatntttttatgctctctttattattaatttaa

SEQ ID NO: 118702 - DNA, 377 bp, Glycine max
agctgtagcatattcagaccacaatatctttttactcggatgtccgattgtgtcctgtaatatattgacacgctccaaattgaaaacagaagcactgagaaaattccaatgacaataactttttacgtggatgtccaattgtgtcccgtaatatatcgagatgcttcaaattgaaaacagaagtgcctatcaaattcaaatgacaataactttttactccgatgtccgattgagtcctgaagtatatcgcgacactcgaatttgagaacaaaagctctgagcaaatcctaacgattataacttttaactcggatgtgggattgagtcccggtatacatttagatgctcaaaattgaaaacagatgttttgagcaaat

SEQ ID NO: 118703 - DNA, 407 bp, Glycine max
aatttcgagcgtctcgatatattactgtatcttttcggacatccgagttaatagtgattgtggtttgcaattgctatgagcttctgttaccaatatcgagcatctcgatatattacgggattcattcagatatcagagtaaaaagtaattgtcggttgaatttgctcagagcttctgttttgaattttgagcgtctcgatatattaccggacttaatccgacatccgagtaaatagttattgtggttgtgcaattgctatgagctcctattttcaatctcgagcatctcgatatattacgggattcattcagacattcgagttaaaagttatcgtcgttggaatttggtcacaggtctagtattcaatatcgagcgtctcgagttatactggactctatcggacctc

SEQ ID NO: 118704 - DNA, 378 bp, Glycine max
tgttggcaaaaaactttggagacaaaggacaagacattgttaccaacacgcttgaagaggtatcacaatgcggtggcataaacgagcaccgcaaccactccacgccaattcatccacaacaccacattaacaactaagcctttgccgaaaacacgatgaaaggatgagaaactaagacaatgccaatattttcagaagaatgaagaatgaaggggttagaatcatcaatggcagtcatggccatgagagagaaaaaaaagaaccaaccaggcatccgaaaggtccccttaaaaaaatgattcataaggaggtggcctatccagttatataaaaacttaatcatcaatgatattcatgggcctgagagaaatataaaaa

SEQ ID NO: 118705 - DNA, 381 bp, Glycine max
agcttagaaacagtatagtgttctctaattctactttcgatgctaataaactgtttgaagaagcaatattcctactatggtcttggcttaggagttttgagaaagatttcacagtgcattttaatcaatggtcaagtaattttccacaaagttttatgtatcagcaagggatgcatagttatgagctttatacatgtaaattcatatgcaaattgcatccatagattggttccctctcagaatatgaatgtctgactatggaaccatttgtatggtctctttttgtattatcagtacctctggtacttcattctatatatataatattatctttattgataaaaaaaaaaagtggaaaaggctttatcctactggaaggag

SEQ ID NO: 118706 - DNA, 439 bp, Glycine max
tggacaatctcaaagatatcaccatgttaactggatttattaggatgccatcacaacgttttacttcacacgcttccatgaacacataacaaaaaaggatctctgggctcagttcaagaaatggggggacgtgagggagattttcatccccaaagacaggaacaaaggtggaagacgatatggttttgtgaggtttaaaggggtatccgacgaactcagattagaaaaacagcttgataacatcatattagacggactcaagatgtatgttaatgtcccaaaatacgggagagggaaggtgagggtcgaggagcgtacctccaaacccggaatcttgaaggaagggcatagcaaggaaatgactgctgcgcgacatagagcaatgcagaacagcaaaagacatatgccaaggtggtctccgctacccaaagggatcacg

SEQ ID NO: 118707 - DNA, 380 bp, Glycine max
agcttcaccaaggttctcccccggtttcattctcaacgctccctgagcactccaccgataaccatcccattattcatcctttcgcaatcttggattggaaactggattcctcgtccaccccgccggtgaagcgtgtgctggtccagtgggatggtttacctccggaggaggcatcttgggaatcctgggatgagctacgcgttatccacaaccttgcggacaaggtcgttttcgacgaagggggtgttgatagtaacacagcaacagatcaacatcaacacattgatacaagcaggcccaagagagagtgtaagaaaccagcttacctgtaggattgcgtatagacgctttgcggtatcatagctttcatccctgacttt

SEQ ID NO: 118708 - DNA, 434 bp, Glycine max
gaaactaagcttcgttgagtgtatttgagttatggtcaagttttatgaaacttcatttggtccttcgaactaaaaaactattgggctaactacattcatattacaaaaaatatgcatttttaagtaagtcacatttttagaaaaggcaatactcatgcagattctcttgcctctcattcaactctagttaattatttctgttgatgggattacacttccgcttttatagcagcagaatacaacagaaataggacaagtctctgtaactatagattatcttgatagataggttaagcttttatgggttttgattgctttctcccaatgactttttgtacatctcatcccttttttttttattaatgatatttctttggcttgcgtttcctctcggcccccggatagtaatatcaacctagttgggattacttctc

SEQ ID NO: 118709 - DNA, 372 bp, Glycine max
  unsure (1)..(372): unsure at all n locations
agcttgaaagatatgtgattctctaatctctaatataagnttatgaaataaaagcaagtgtaaaaagtgaaggtgaagaataaaaaataaaaactgccatcatgcctataaccaaattgagttcttgcaaggaggtttttctttttatatttcctttcttttcatacacttttctcattgtaagcggcttaacttgatagcatcagtggtgccacctcttcttcaggtcattagtatttcactgtttttcaaatgattgcacctgaagccatttcagtactaatttgaagaaagtagaaatcatctaccaggttccgactacacattgaaaattttaagtcttgatgcgtaggttttaaaattaatattcac

SEQ ID NO: 118710 - DNA, 420 bp, Glycine max
  unsure (1)..(420): unsure at all n locations
nttgtaaaatgtttcctttctcaagtctatgctgaatgacctgcccgacctactggaggagctgctgctattgccatgctaattggtcctgatgctcccatttcttttgaaagcaaattgagaggaagtcatatgtctcatgtttacgatttttacaaacctaatcttgccagtgaatatccagtaagcttttgaatcccttttcatttctgtataacatttaccttttgggatcataaacatagaaaaacaacttgcaattattttcccttgtgatgatcaaaattatccttgcaagtttcactttatttttgtcttgatgtgacatgaaggatagcatttgattgttcacatccatttacttttacccataacctgctgatagagtttcaggatgccaactgcaataaattcacatat

SEQ ID NO: 118711 - DNA, 368 bp, Glycine max
agcttttgtcactccacccatatctggccatgacattaaccggacttaacaccactaacaacaatgtcaaggaattgttgtagcccaaatacaaaggcttctttgaatcaattttcaatgtatcatacataggggcatatgcttgctgaaaagactcttgtccaagatcacgaatcatatcctctaagcgatgtcccatttctacatcaaatggtttagattgggaccccctctacatgtctatcaactgacaatgtcatatccacgctgtataattcttcttaatcccattacacaacatatgctcccgtatgttgtcgagtatttgttgtctcttgttcaaacaatttatacaaggacaaaaaaat

SEQ ID NO: 118712 - DNA, 304 bp, Glycine max
tcaagctattcaattgctccagattgctgcatataatttaaatggcttgtatgggggtcaccagaggagcataaaccacagaatcttgcgacaggtacaaatttttgattcatggctagttaggataccaagttaaccaaggcgtctagtttaacttcaagcttcttagtttcagatgatgcagatgagtttgtggctacctcatgcactcctctaatgactatagcctcatttatggcgctaaactgttgggagtcggaagccatcttctcaattaaattcctggcttcagcaagggtcatgt

SEQ ID NO: 118713 - DNA, 185 bp, Glycine max
ttctccctctacctaaaagatcgctataaatgggagagaattttccacgacaggaacatgtttagtaggttccactcataacacttcttttacgctcagttatccatcgaagagaggcgctctcaccattagagctcagaaatctcctacacacacaattcaggctctccagtcgcaacccaccc

SEQ ID NO: 118714 - DNA, 259 bp, Glycine max
cacttgcaccatgagtacggatggatgactgtcttttattctaggcatgcatgtacataaattaaagtggaaatagtcatacgtgtttctataaatgctccccatcattgtatagaatattatacgcactttcttcaatgcgcacttgtatgaaacgatacattagctgatacataacttcctagagctgacacagaaagccgccatctttatctcatccccatctataatataatctaatgggtcactactaattttt

SEQ ID NO: 118715 - DNA, 128 bp, Glycine max
tctgtgttgaccatagagttgctctgtactactttcactattcaattaaaagggtaaactacaatttgatgtaaatcattgcataaactaaactaaactcaatggctaaaagttacgcagttcaatca

SEQ ID NO: 118716 - DNA, 265 bp, Glycine max
aacatggtgtaactctacttttagcaattttatccccagactaggttgtaacaacatttcaaaatctctctaccctcctcacaactaatgcaatacaccacttctaagaacaacatggaaatatataacatgtgtacttaaacttggacgcaagcaagtccataaaattgtacatgctctatatcctaccaatacttaatatacaatactggccacttctaaaaactaggtagcctctaactacaacttctatatcagaatttcc

SEQ ID NO: 118717 - DNA, 224 bp, Glycine max
cacctactggactctgacgattctatggctatgattcctgatccgaataaaaagaagagcttcctacatactgaagctcccaaagctgtaactaaagactctggaaaaaaaaaaaaaagaggcgaatgaggaaaggaaatacttaggtcaacttttcatcacaggcctctttttacgactctaaatttaactctgaatctaaatttgactctaactacttcccc

SEQ ID NO: 118718 - DNA, 139 bp, Glycine max
agacacctgctgatcaagacttacaccttgtagtgcctcctggaagatgatcttccttcttctcttcacctgtcttaaaccattccaaaatcactctgcacaatatatgtgccatactcctttaccctcaataagtgtc

SEQ ID NO: 118719 - DNA, 94 bp, Glycine max
gctataagccccactctggtttgaacttaagtcttactgacttttcccccttacatactcttaaatcgtgaatagcatacactactatcataaa

SEQ ID NO: 118720 - DNA, 253 bp, Glycine max
  unsure (1)..(253): unsure at all n locations
ctatcctgtttgctctgactgcgctgcttcttatgtctttgcaggcttattaaccttcantcaatgatatgtagctgccttttttatacaagctatgtctaatgaatttttttatttatttgagaggtatgctggctgattaatatagaaaaccatcnaatcagattattaatatttatcatacataaactctgtataatgccatccttcatatgactcatttgaaaataaagttttataaagatgatttaat

SEQ ID NO: 118721 - DNA, 362 bp, Glycine max
ctagctttcacggtcagctctacgtactttacgaccaagttaccagcgtttatggcaacacgaatttactactgatcactgctggctttacgtagcggaggctaattaacacgaacatctactttgtatcacacagccacatgacggcggtcattcttagacttaaagtgacaaatagctgtatttagtattacgcactgtctgcgtggtgtactacgtgatcatgacgggctgaatcgcgtatcaaccatttgccgatgacctttatctgtatgctagggatcacctaactgtcgacatgctcgtgtcaccgcgcgtttattgcaggcaataataacttctatgctcgacccttcaggtag

SEQ ID NO: 118722 - DNA, 172 bp, Glycine max
cgaggcctatcctttttcctggcctacgcgttcctgcgtcttaaaggccttgctttgttgtctcaactctcctctcagctctgctcaatgctggagtcataggcgacctcctaatttgagagtacatctattcgtctcttcattcactatgctggcatgcctgctctacacc

SEQ ID NO: 118723 - DNA, 222 bp, Glycine max
  unsure (1)..(222): unsure at all n locations
atagtatacattatatgcagctataagtatgaattgtcattaaaagtattactctcatcatctgagcctgaaatagctcatcatactgatcatgctcacttganatgactaaatcatacgaattaatattctctattcaatatcataatgcatatatattatatggaatacgacttctcatcatagttgtgaactgatgttatgatcttaattgtaaaactc

SEQ ID NO: 118724 - DNA, 176 bp, Glycine max
tctcccttaaacaataaaaaagttaattaaggctcttaacaaagataaataagacaatgaaacagtcatttggataataaaaaataaaacacctttaatcaggaattttaatttaaatcagatttcactaaaaaaaaaatactgactatagtgtaaaataccctatttcattgcct

SEQ ID NO: 118725 - DNA, 227 bp, Glycine max
gaattgactactgtgcattgtgacaaaagaaactgtacgccgcttggaccgctacccgggtgtacctctttgagagcaccccttgtgacggctatctacccctcttttaatataagcgtaataatgagttagaggtcaagatgttacccacgcttgatgcatccttcttgatttctcccttctttattatagcgcaacctaatctcactttcttctctttttctgtc

SEQ ID NO: 118726 - DNA, 117 bp, Glycine max
taattacaaaaccctatttatgtttctcaaataatgatccatcacaaaatgacctcatatcatcaatgttccataccacattatcatattatgattgagacctactgcgcaactacc

SEQ ID NO: 118727 - DNA, 145 bp, Glycine max
actggacctgtgactataaaagctggaccagtagtactctgctttttctcgtcggtccccttttagtgctttgttctctgagctcctcgactctatcatgctactcgtgggaactcttttcatggtatctatggagggctctcta

SEQ ID NO: 118728 - DNA, 196 bp, Glycine max
acggttcgatattaaagtctcggcttttcttcttcgacagcctttccaaagatataaagcgacgcaatcttcaggcatacattcggagcggttataagtggtttggacatgcgctcaattggcacccgctcaatcgttcttctagccgtctttccaacctttagctgaatatcatttgcatttgcacacatgctca

SEQ ID NO: 118729 - DNA, 97 bp, Glycine max
  unsure (1)..(97): unsure at all n locations
attccgctatcaaaataataattcactgacatcgatatacatcttantctgtaaagaatctacgtggcgtgctaaccgttatacaaaaacaatatat

SEQ ID NO: 118730 - DNA, 269 bp, Glycine max
ctgtaaggctcattaatgggggataaatcacctccataacattctttttatataaactacatgactctaaatattcaataacattgattgtttaacctatatcaaggataggagaaagccacttatttctgtttgccaccttgctctcatctcacaaccctgaagtcatattgaatctttcagttaaaccacgcatcttcttgtgtaaatcttcacagaaccacgctctatccttagatagaagagagatatcttttaaaaaaattcca

SEQ ID NO: 118731 - DNA, 172 bp, Glycine max
ctacgtacctctagtgcactaactttatggactaacttttcccagagtgaatttctttatcttaacgttactctgtatcttactttgtaggagaccttgtaccgagcccttacatgccacctaatatattgagaaatgtatgcaagttatagaaacgatagtggctttttat

SEQ ID NO: 118732 - DNA, 115 bp, Glycine max
gtgtctctacaccttggattttagccatgttgtgcttgccccctttactatctcctgctctttggatctttcgaccttgaattacattcgacaaatgttctttcgatgagcaaac

SEQ ID NO: 118733 - DNA, 222 bp, Glycine max
tatcattaatatccggaacagtaatcgatcgtccatctgtggctcgcatataccagttatacttattacacgcgacagcgtcgacaggcattgcacgactcatgtggtaggacaaacacgaactatgaaatattttgtttgcaatatgactgatttcatacgtgacttcactctgaactcaaagctgaatattgtaacacgactacctgcgtggcaataatg

SEQ ID NO: 118734 - DNA, 250 bp, Glycine max
ctatcttgatatcattcgtggtaatttgtaaataatcttttgtatatttaacttgggactacgagattagaagctttttacattcaaactataaaagtctatgtgtgggggatgtgaacctatttacgaattgttcgtttcttgcccagttttgataacaacaagtcccgcgcttttgtaatcgctaatgccatgtatgtgacactctgctatctgtctttttgaggggcccccccccagacggttcctt

SEQ ID NO: 118735 - DNA, 131 bp, Glycine max
ttggcacctgctcttagcatacattttgctatgggatgagctttatcatcactacaggtttacaagctcctggcctattctcttctgtgtatcttaaaatgaaagatgtcaattgtgggcactgccatttg

SEQ ID NO: 118736 - DNA, 265 bp, Glycine max
atcactaatatgcttacctgccagatatatgctctttagggggtaccatgaaccctgcatttaagcttatacttggagctaaaaggcttttcactgtgtaatccataaagctggaatggtgaaaagaattcattctaagcaactatcttgctggtggatcttggtaacgaaggaatttgggcctcagcctgagcacagtaaactgtacctacctattacttagaatcataagtcaactcaaagtccctatacttgcttgaagtca

SEQ ID NO: 118737 - DNA, 74 bp, Glycine max
ctactagcgtccattatgaacgaggccataattttcgataggcggacgcgttacttgcatttgacacatccctt

SEQ ID NO: 118738 - DNA, 95 bp, Glycine max
gcagtctgtgtgatcatcgacaataaatgctgactgcttgagcccattagctccaaggatagaagtcagtatgctagaaactcctatagattttg

SEQ ID NO: 118739 - DNA, 229 bp, Glycine max
cctggttactcacctgtggccatacgaagagcgaatggatttttttattcttgcatcgtagaaagagtgatctgcactctctctctacaaagatgatggtttgttaaatataaatctaactttctcagttctttaataagagaatgggagttagaatccagttactgtattactggtatcacatctgaactgtgtatgcaatattgcaacaacaaaatgactcgtgatg

SEQ ID NO: 118740 - DNA, 275 bp, Glycine max
  unsure (1)..(275): unsure at all n locations
atctactgcactngacatttctatgaagtggagtaaattactgcttgttctgattgatggctcttattaaagcagtgagttgctattaatagatcccgaaataacaacaatgatagagctcaaactattactgcatcactcaatagtagcagttgtgttagtaagaagaattagaattactttggtgccgcgtggtgatgtatatgatctgtttaacactatgagcttgtttgcgcatatcattctctanacatgctatggctgctaaacaaaaa

SEQ ID NO: 118741 - DNA, 343 bp, Glycine max
ttgcatgtcacaagagccaaagcgtcggcatattttgtaacatctggtgggggctggacttccatatggggcgagtgatcacgcgtaacaccatattgggatgaccccagccttatgacgacatctttcacgagatctgctattccccgatttgaggacagccaccacctcttgctttccagtattcatagcctgtctcatccagatcaggcggtgtgaacactggtccctctgcttgctccatgtggatcagaaaatatcaccctagatctcactcaatgattgctacagcctgctctgatcccaagtgtgatactgataccgatgactgatgtctttccgg

SEQ ID NO: 118742 - DNA, 289 bp, Glycine max
gagcaccaaattgggtgagaaaaataggagagaagttgatctgtgactcgtgtcctacaagactctgagtcatcaacattacaacaagtgttacacatgcatttatatatatactatggagcttacttgaaaagacccttgagaaaacttccttgagaagcatctctgagaaaacttgcttgagaagctagagcgtatttacactgccccctctcacagcgaagataacctgcttgataacgctcactaagaagattcctattgagactagagcgtagctacacatacc

SEQ ID NO: 118743 - DNA, 369 bp, Glycine max
tctccaaaaggaatagttatctccagttacctgtatatgtctacgaatctcgccagaaggccgcccttatctctcttggcaggtgccatgggataccgcccttccattacttatctgaagcattatctggactcttgtctctatcttttgcacacctactcttctcttcatctgaatgcttttcaactttactttttcttgactacatgtgtctttccgcacatatatgtctgcttctacggtcttatatactatttctctttgaccattaatggcttctccctcctatgaatcaatgactctgttaccttattcttatattgaacagtggcgtccttcaaagacgactagctcctttaaagcaacaac

SEQ ID NO: 118744 - DNA, 442 bp, Glycine max
atatatgaaagaataacatcattattaaatagatcacgccttttggttgataaatatcatgacatttaggtcataacttgacaaactattacttccctatgggaccaagtaataactcctttataacattgtctaagatgttatcactagtactcataaacatgtaattcatataagtcttcataatatgtaaaactaatgtcatgtttatcaatgtaaatcatgtccttaatttatgattctagagacgtaaaacttgcatgtgggaaaaagtcttaattagattcataactgaaccttatgataaaactatcaaattaagttccttttcttaattcatgtgggtagattaagaaatatagtttaatattgtatcctaagtgatttaacaaatataaaaaaaactagtgtgagataaaaactatatataactatcatcaat

SEQ ID NO: 118745 - DNA, 365 bp, Glycine max
tcaactagctgtgatagttacagttccaattacttttgttgtttcagatacatctctaaatgtatcttatttaagcaataattatcatagatgtccatgagggacagaagttgtaccttgtagtgaagtgcctcaaaacctttgagtaaaaattcctaactacgtaaataagtaaatatccatgaaactaaatgaaaatttacatcataatagattattagttaagtaagggcagagggttagtctacaaaatgacaagcatgcttacacacaacagtagttttcattatttcattatttcctctattctttcttattttttagttgaatggggtggagagaatctctaaatgctacagtagtga

SEQ ID NO: 118746 - DNA, 339 bp, Glycine max
tttgaaaagagatgataacccaggatgttatatggccaccgatgaagccttggaatgataaaccaagaatgcccgaaaggaagaacacgaccatagcccagatttgtgggctttacttggctacaattatgagctcaagctcccaatatgtgaaaggaatcatcacaggtcaaaggcatgatcttgaatgacgagcttaaggcttgccttaggtcgaaaagaaatttggaccaacagttaaacgagactgaatggaatatgttggccgtcatcgatgaatgcaataagaagctaaatctagctgcgactcacgagcaaaggctagaggatgagtacgcc

SEQ ID NO: 118747 - DNA, 363 bp, Glycine max
tataaagtccgatgctgagaccttcaacactcttttgaagaccccgataaactcggagcctggggagcactacattacttactccaaattctgtcattcacatctagatccctataagctggcttctatactttgccttccatggtgaggatttgtgcttaatgctgagagcgcgccttggaagctgattcagaaggacatgaccaccctagcccacacctggagtgttttatcatactccaacctcacccccacctgtcacacgtccgatcttaatatggacagggtgaggttagtctaccgactggtcatgaagatggatatggacttgggctcgctcatttcaggccaaatctcacagat

SEQ ID NO: 118748 - DNA, 439 bp, Glycine max
  unsure (1)..(439): unsure at all n locations
agatgagtttgtgagtgattgtgtgatcctataggcgaatgaaacatcctttccacttttattcttggaagcgttcatcttgatcttctctttgttgtaaagaagatttcctggtatggagagctaaatcctctgttggatcttccctgtaggtacctgaggtaaatatatttttatctatttaatgatgttgtgtgtgttctctgtgctatctgcttttcattccagtatgcctttaccttgatcacgtagatgcatgctttgttagggtcattcaatagtggagactggtctgactctaaagtccttgatagtacacggctaagttgtcgtactatcacgaggaatcanggtgcgataatttacttgtgtatgtgtgtcttaatgcgggcctggatgagtttagtcttacaagaagaatctgcggacgatgcttgat

SEQ ID NO: 118749 - DNA, 366 bp, Glycine max
tggtggccttttccttgatttagggcatctcttgtactttattcttcatatctagtttcacactcatattttcttcattttgatgtgtctaaaaaaacaaccttcttatcgatggttccttgactttgacagggaccatggcatccgtgttgtatgtaaagcgaaaagagctttcattggttgtcgtttggggtgaacaatcataagcctaaagtatgttggggagttcttccttccacagacccttggacttatcgagtcttgtgcacagggctttaaggatgacctcattggttgtctcttcctgtctggggatgttcgacagaagtcacaaagtgcttgaaatttctcgcagtggccttgcct

SEQ ID NO: 118750 - DNA, 334 bp, Glycine max
  unsure (1)..(334): unsure at all n locations
gagtgaaaaaaatgggttgtggcgggaggttttgatagggaaacatgaaattacaaatttggatagtcttgtatggggttgttgtgacaagaggggttcccaatggtggtgtgatatcttgagtaattgtgagatttataaaaatgggttagcatggtttcaaaaagggatcaaagaatagtagtggtagggaggcatgtgagtttttggaatgctaaatgggttggagaggaaactntgtgcactaccttcaacagactctttcttaattcaaataanaaaatagaaatattatgaaggtgggatcttttgtggaggagactgttgtttacat

SEQ ID NO: 118751 - DNA, 366 bp, Glycine max
tgtaactcttggcagtttctttaaaacttgtttcttaaaaagttgtgacttttgaaaaaatcttcagaaacaagtcacttgaagaattgtgacttttggaaatttatttttcaaaatcagtcactagtaatcgattaccattaaggtgtaatcaattacacattaactggtatgacttttcattttaaattttgaaaattaaaacgtttagaagctctggtaatcgattacaagtattgtgtaatcgattacacaagttgaaaatgtttaaacacaagttgtaactcttgacatttgaaatcttaatgttttaaaacactggtaatcgattactaccttttggtaatcgattaccagagaataaaa

SEQ ID NO: 118752 - DNA, 328 bp, Glycine max
acaatcggacatccgagacaaaagttatagtcgtttgaatttgctcagagcttctgttttcaattacgagcgtatcgatatattacgagactcaatcagacatccgtgtaaaaagatattgttgtctgatttttcccagagcttcagttttcaatttcgagcgtctcgatgtactacgggacacaatcagacatccgagtcaaaagttatcgtcgtttgaatttgctcaaagcatttgtttacaattacgagcgtatcgatatattacgggactcaatcggacatccaggtaaaacgttattgaccgttgatacttctcagagcttca

SEQ ID NO: 118753 - DNA, 365 bp, Glycine max
tgaacattatctccttttgggttcgcatgttcttttatgcacggaatccagtgatcatctcgattacaatgcacccaagagaccatatatctaacgctggttcaatctgaccaacgaccgattctggtgacatgtaaaaaggtgtccctctaaacttgaccttcccatactcagcatttgcatcttctctagtcttggacaacccaaaatcagcaatcttcagttgataccttgcatgatcatcagatgaaggaaagagaaggatgttgtccggtttgagatcacaatggacgactccttttcgatgaatgcaagaaagccctttgagaagcatacgagtgtagactcttacttcactatccgat

SEQ ID NO: 118754 - DNA, 320 bp, Glycine max
gaagcattggtgatcagaagtgccattccttggattatagggttgaaccaagctcatgcttttacaaaaaggttcatcaagtcaagttgaaatatggaagtaaccgtcttgcaaaattggggcaaaagatgaatcgagtcacatcactgcttcgtctactgccaaacatatttaggattggtgatgtccttgttacttccaggttcaccttgacaaagatgtcatggaccatgttgaaaatctaaattgattcaaccccatatactgtgtaaaaattcgcaatacttccactgtacatcattcgcatacattcatgcttt

SEQ ID NO: 118755 - DNA, 363 bp, Glycine max
tggtttcgggcaatagcaccccacctttcttcctcatagtctcctgacccccgcgacatatctccaggtaccactctgcggtgaacaataaaagcaagaagtttcacccttcaacacttactcatttcaagcctgtaagattatggggtacccatcacatgtggaactaggtggcggtcgggcgatggtgcacaacaaattttccacatccacaatgcgcgcataaacccaccatgccctgttgcccacctgcatctgagctcacgtactcccacgtagcccatatccttgtttcatctcaacacggggtccccatcaatcctgccaagcgtccacaacatgcaagcaaaacatcattcaaac

SEQ ID NO: 118756 - DNA, 337 bp, Glycine max
tctctggaacttggacctttctgtctctagaatctctagacatgaaaagctctgaattcccacccaaactcccttcacaaaatctgattttatgcttaaataggtggccttgatcatgctcatgcgcttagcgcaattctaaaccgcttagcgctcataagtgaatttcggcttaacacgcttatctcgcttagctaatggactgaagcggcgcgcttagagagatgaagcggtgcgctcaacaaacctggtcaactcattgtcttccgatatcttcctcgtgggaagaaaaagctcatgatgaatcaaccaatgatccaacgtggtttgatgataa

SEQ ID NO: 118757 - DNA, 377 bp, Glycine max
acatagaatactaagcttgaatgcactattcaatggagacgtctattacattttcagactgatcaacacttgcacagtggccaaagatgcatgggagatcctgaaaatcacttatgaaggaacctccaaagtgaagatttccagattgctactcttggctacaaaattcgaaaatctgataatgaatgacgaagagtgtattcatgacttccacatgaacattcttgaaattgccgatgcctgcactgccttgggagagaggataacatatgaaaagctggtgagaaagatcctcacatccttgcctaagagatttgacattaaagtcactgcaatagaggatgcccaagacattttcaacatgatagtatatgaac

SEQ ID NO: 118758 - DNA, 364 bp, Glycine max
tgtaggccttggatcttcttcatcaatggtttacttcgcttcttgaagatgaatggcagcagaatggagaaggaaggaagatgattggagatgccacttcaaggagaagatgggttaagaagaaactcaccaccataggaagccatgaataagagcttgaaggtaggagaagatgagtagagggaaagggagagaaggagcacaaaattttgtgcctcaaatgaggtatgaactttgaagtgtaattctcaaatgatcaaagttcaaaaaatgcacacaaatgacctctatttatagcctaagcgtcacacaaaattggagggaaatttgagtttctattcaaatttcacttgaatttatggag

SEQ ID NO: 118759 - DNA, 354 bp, Glycine max
tgtatcgattacacacatacttttttgatcctcagagaggccctcagaaaagattctcaacagtcacatctttttgcgtggttcttgaatggctaccaaaggcctatatataaagtcttatcctcttaaaaagcaaaatcgttttatcctcttacagattccttggccaaaactcttgtgattcaataaggaattatttgagtgctcaaatcgttcaatctatctctttcaagagagatttcttcttttcttcttcttcattctgaaaagggattaacagacccagggtctcttgttgtgaaagaattctaaacacaaaggaagggttgtccttgcgtgtttagaacttgtaaa

SEQ ID NO: 118760 - DNA, 399 bp, Glycine max
  unsure (1)..(399): unsure at all n locations
gaactagctcagcaaaggcctattatgagtgtagagtatctcattgtttaggtggnctggctnggagcccgaccttcttttgtgggggataatgaaagttttacagcccaggcacctcaacaacatgagctagaaccagaaaacgatcacttatctgaagccatcatccctggagctgttgatttttcaaaaagaaaagtagagacgagatccaataaggctgctcatcctggaccagtgctagtactagctgatgtaccatttctagggatggatccatcttcacctcagcatgcaggcgactcttccactcgtatcttagagatacctgagggccagaccacaccagtcttggctctnacacttctcctctactactccagtattgatctgacagat

SEQ ID NO: 118761 - DNA, 366 bp, Glycine max
tatgcacggaaaatgtgattatgaaattgatatttccttttaaacaccatttcctagtgaaccatgcattaagtaccatgttcaaatatttagttttgatgttgtgtgcgtttttttttttttagaaatgggtttatgatcccaacatggttggcttatggtgcctaacacatgcaactaagaatgtagtgtgaagtttcacgcatccccttttttggtcttgttttgaacaggaaaacgctaggatgagcaaacatgaaaacaaatggtgttcaattttgaagatcaaaaagtttgttgaacccatatgcttgatgatgccatgaattatgctaaatgtgtagctgtaatattattacatattaa

SEQ ID NO: 118762 - DNA, 442 bp, Glycine max
  unsure (1)..(442): unsure at all n locations
gctttaccctactgattcncagttatacactgttgaattttttattctgagacactcttgctttttggtttattattataattatggttttagtacaataattcccttttgctagttttatttatgggtagttagttggctcatcctgaagcattatgaacagtttgacttgttttttatgacatggcagtaaaacacttttatcattttgtgaaaatggttgtatgcttttattttgagtcgagtgcatgattgtgatggagtttgtgttcttcttcatgagtatgagcaagtgtgtatgttagacaaagaaagaacaagaatgtgaacttgccattagaattgttagtcagtagacagattgattgtgaaagaaaagctngaaccaaaaccggtgagagtgtgaccttaaactgtgagtgaacgactagctgtgaataat

SEQ ID NO: 118763 - DNA, 369 bp, Glycine max
tagaaaggaagcttcaatggaggaagagaatgttttttagagagagagagaggaagggcacgaaattgaaggagaaaaagagggagagaagttgaactttgaagagtgtctcacaagttttacattcatcaaagttatgacaagtgttacacgagtttctatttatagcctaggtcattaactaaatgaaagcttccttgagaagcttccttgtgaaacttcctttagaaaattccttgagaagctagagcttaactacacacacccctctaataactaagttcacctccttgagaagctatgatgtagctccatgtggagcttgtaggccttggatcttcttcatcaatggagtcctttgcttcttga

SEQ ID NO: 118764 - DNA, 439 bp, Glycine max
ctgcccgagctcgcttgaagtcctttggtatttgttgtcgattgggccatattttaattaagacccaatcaccaggttgataaactacctctatgcgttcgaaatctgcatagttcttcatgggctcttgagccttcacaagcttcttgtgtatagtttgaaaagtctcttccatgttacataacatttcttccacaacattcaatttggaagacctaacaatgtattctgaaaagttgaagggtttgcgaccgaagtttatctagtacggagttgttcttgtgcccatagtccaagatgagttgtgtgaccattcaacccaaggaagaagctttccccacattcccgaccgacaatggaaaaaggcacgcaagtattgcttaattacacaattcaagacctctatttggccatcactctatgggtgatacgctgagct

SEQ ID NO: 118765 - DNA, 362 bp, Glycine max
tgttcttgatttttccttagttctttaactttctttgaacaatatacttggccttcatttaactgtctttgcgcttggcggccacgctcaacaaagtattttcgacacctactgtacgttgatttgaccaatgctgttatgggaatgtttcgacaatccttcaaaaccttattgatacattctgaaaggttggttgtcatgtggccatatcgacgtccttctctatcataagccatcgtccatttttcctttgaaattcgatcaacccatgtggctatggctggactcagttcacgaaatttttgtaaattctgatcaaaaatgtgcttgcaaggagtgtaggctgcataaaaatagttatg

SEQ ID NO: 118766 - DNA, 358 bp, Glycine max
tgtcaaattgaatgatcaaccatgctcgtttcagtatagtacacagtctgtggaggggccatttcattctcgggcccgtactggcaacccagcatggccttcaaggagcatatcaaacccggagagagaaaggctcctgaatgatctgagagagaaagagagaacatgactggaaaataatgaaacgatacttagtaacatgatatcccacaagtgtgactgtaacccaaatgtgatctggcatcagaaaataacgccaacttttttgtcgttcaggctaagacagaacacatgtgtgtcaatctcgcatgaatgattttacatttaggtaagataatcaaatatcgcttgtaatatt

SEQ ID NO: 118767 - DNA, 395 bp, Glycine max
cagaacaattatgacctctccaacaacagatacaatcctggatggaggaatcaccctaatctcagatggtctagccctcaacaacaacaacagcagcctgctccttccttccaaaatgctgctggcccaagcagaccattcattcctccaccaatccaacaacagcaacagccccagaaacaacaaacagttgaggctcctccgcaaccttccctcgaagaacttgtgcgacaaatgactatgcaaaacatgcagtttaaacaagagaccagagcctctattcagagcttaactaatcagatgggacaattggctacacaattaaatcaacaacagtcccagaattctgacaagctgccctctcaatctgtcgcaaatccccaaaatgtcagtga

SEQ ID NO: 118768 - DNA, 366 bp, Glycine max
  unsure (1)..(366): unsure at all n locations
tccacaatatccaagcaattcaatttccatttattatgatctatcctaaaccaagaaaacagggcagaggcagaaaactctgcccaaaacacattcacatattacaactttccttactcaaataccccagtaacattctcttcgttccggttcgttaaccatcggatcaaattgaaagttttactggaggttcctagnacataaatctacattttgaccgttgggatctgctagaaaatgtctagaacccactatggactaccttttccataaccagcaatgcacaagcattttttgcacatgaacaaaattctgctgcacaaaatttgacagctttttgctgcacaatttggcagatttcgaaat

SEQ ID NO: 118769 - DNA, 404 bp, Glycine max
  unsure (1)..(404): unsure at all n locations
agcttaagctttctgtgtcttctttngaattttatcttgtgggagagaccccaaccaatgggtctatgttaactttttatgtgtatataaattgtcttgtactaccaacaaagttgtgacatcttcaaaagaagatgcttaattgtagatgattttgtctaacctagaagcagagacaaaggttcccatgggtgacctcttgcttagcacaagaaatgcgctaagtgcaattccaacccgagagggaattgtgctaagcacaagttttcgtgcttagcgcaagaggaattgcactcagcctgaattgttgcactcagtgcaaatcccaatccgagaggaattgcactaagcatgaaaagttgcgcttatcacctgtcgcaacctacgtcacgatgggacgatga

SEQ ID NO: 118770 - DNA, 365 bp, Glycine max
tcaacctttggtgctcatttctgctccaattcgtggaaggagagcattttcggggtcgtgaagtgcgtggctacgagtgggacttcgaaaatccaggtttgggtggacttctttccctcttgattttcgtgggtatggggttttgggagatatgaggggtagttttgttagttttctgctgtgtgatgattatttgtgaagacatttgttgaaagcttgtcgaaattgccatgtttgggtgagttagatatacccattctgttttagggtttttgtgatgatgtttgtgatgtttatatgctgaaattgctgatggaaatctgttagagacgaagggtagaactaacccaaggttagaaagtgag

SEQ ID NO: 118771 - DNA, 390 bp, Glycine max
agcttctcaaatttcgataagtactctgtttctgtgcctctgtgcgtaagcgtgaataaggcgccgcggcggtacgaatatattgatggagctaaacgagattctatggcctgtagaagagctggccatgaagtgatgaatgcattccggaacatccactgaaaccagcttaatgctgcgcccgtgaggttaaaagaagctaccatgatacgatgctgttccggagtaccatagtaataaaaaaactgtgagattttgaagatccagccaagtggatcatggccgtcgaaccgcgggacatcaagtttaaccggtggtcactgcgcggaagggggtggcggagcacaaaaagtcatgtgggagaggcgttcacagatgggtctgaactta

SEQ ID NO: 118772 - DNA, 360 bp, Glycine max
tatgatccttgctgagtgactcatgatagtctttttgtactacaattgttgttctttatacaaaccttgacttttctgaatacacttaagaaaactcattagcacacataaacttagaaggcttgtgatttttgtttagaatgtctatcataattaaaacaccaagggttattgacttaacatgaccctcctttttataattactttcattccattctctttccttatttactcacctctatagtgtaaattcaatcaaaccccaatccatctacaattgcttgaccttcttcaccatgagcaaccacgatgccaccaaccttcctctaccatgctattgtcgcttatgaccacaagcga

SEQ ID NO: 118773 - DNA, 394 bp, Glycine max
  unsure (1)..(394): unsure at all n locations
ctacgtcttatttgtcagngtatctctcccaagcctcttgggaagagaatatggatctatcaaatctggcttgggtaggtgtagagggtgctttcctcttcttatatgccatctgcnaaatataggacaaacacaagagattagtacaggttatgttcacaaaaacaaaaaaaataaaactgaaattttgactgggtgcttagcacaacatgctgagcttatcacgccttatgaaattttacttaagcgctaagcgcagcaagctggcgcttagctcgaagacacaactgagcttatcctaagtctaccattttcaaaaccggaaaggactggtgttggacaagtggcctcatatatcttaagaagggggggttgaattaagatattacaaact

SEQ ID NO: 118774 - DNA, 358 bp, Glycine max
ttagcatcgttaagggtaaagactctttctgtgccttcggatgtccagtttggtcattcaggcccccatcattttgctccttcttgggatatggacaatctctctgaatataccccttttgtctataattaaaataggtcacgtctttatcaacacaatttgaggagatgtaccttggcataccacatttgtaacaagtgacctgaatggggaaagtattgggtttgctaccactaccagccgcaaaccccacaacaaccgtcctctgattggtggggcagttaccatattgcttatgaggggtcgagtaccattttccccgatgttgaggtccattctttttgttcttcattggacc

SEQ ID NO: 118775 - DNA, 430 bp, Glycine max
  unsure (1)..(430): unsure at all n locations
agcttagactagtgtttcaagagaacattttattgtgaccttggcgcgagacgcagtangcatcaatgatcggtcatcttcgaatcatcgatctgtgaggctaacaacatcatctctcaacatcgttcaatcaatcctggagtagctggctacagaatgctctgattcatgtctcttcatatggctcaaggggtgtgatcaacatttgctctttcaagaaaagctctttgtgcaaaaactggggctatgcatctatttgcgttctcttcttgctttgccaaaagaacgaaagacagaccgcctgaattcttttgtgtctcttcttccttacaaaagattcataggactaaccgcctaagaattcgtttgattcttcccttccctctaagacaaagtttgaaggactaaccgctgagaatcttttggtccc

SEQ ID NO: 118776 - DNA, 356 bp, Glycine max
  unsure (1)..(356): unsure at all n locations
tagtagatgtgtgaaaagactggngtgtggttgttgtcagcccacccacggccattgtagtgaatactgatcatgatcgactaatcataaccttgactaaaaatgaagggatacttaagagtatttagacgcttatttggtttgacgactcattttcatagatgtctagcgactacatgatgcttgaatttacactcttcaattacaactgtttgattaatcattccgattttcatatgatgcatacactgtgtgaattgaaagctatgactttttattaggccacataagcagaatatctgggccaaagctttttccaaccaatacattttattgaatggaaaagcgcgatatgc

SEQ ID NO: 118777 - DNA, 368 bp, Glycine max
  unsure (1)..(368): unsure at all n locations
tcatgttgaccaaatagcttaggtctttttatataccgacgctagctattgtcgaattctagcttgggcactatacctgtggcacattactctgcaccaaaagagtgggaagacgcataaacatgtttctgcagcgaagtctatgcaagacaaacatcctgccagcgtctcacngtgcaccaagatgaattttattgtacctaccacatgcactgctaatagcacaagaccaacagaattagcactgaacttccaggacaatgcaacgctcccctgaacgaagccgnacgctactcaggctaacatgatgacgccgtctctcagaagtgatcctatgtcgctgacccaccaacagagacatcgcaaat

SEQ ID NO: 118778 - DNA, 388 bp, Glycine max
tcaagagaagggcttcttggttaaacactggactcaaaagattaaccgattttgggttcatttcaagaagcggatatgcttcttggttgatcactatactcaaaagactaaccgcttttgggttcattgcaagaagtgagtataacttcttggtttttatcactggacttaaaagactaaccgcttttgggttcattgcaagaagtgggtataacttcttggttgtaatcactgaacacaaaggagggaattcctttgtggttcatggcttgtcaaggattttacaaggatagtggaaatctcaaacgggttgcttggggactggatgtaagcactggttgcggcctaacaaagataaatctgggttgcagtctctctcccttatctc

SEQ ID NO: 118779 - DNA, 361 bp, Glycine max
ttaccaaatttggaatcacctcttgtggtttatgacagacattagtccctatatttttggcagacccacactcttttgtacagaatagagactttaaaatacttgatggcttcaacttttaaaatctcatcatgagtacaccattcaccacaaggtaaacaaagaccatgaattttattacattttgacgaataactatttgtgcatgaaagaacaatgtattcctgctccctaatcgaacccacttctcacgagatatttttaaccaaaaggtatcttcctgaaacaaaacattctcatactcatttaataattgatattgaacccttactaagtaagttgaatccgcctgctcaagagc

SEQ ID NO: 118780 - DNA, 357 bp, Glycine max
tcaatgttaatgtcacatcaagtaatgtctttaattgaatcaaattagggagatcatgatatggtattgtaagcgacatccttggccagaaggggtttcattgggatggcactaagcacatgatcacagttgagaatgaaaaatgcttggaatgaatattgcactgtaagtattctttactatattgctatttgttattcaaagcagattggatttgactttttctttttttcccatcgcataaattggctaaaccatttcgatttaaggtgcttcaaaactaggatgatatagtggatttgtgtgctaaagatagagtcactggtcatggagctggaactgctatggatgctgatg

SEQ ID NO: 118781 - DNA, 429 bp, Glycine max
  unsure (1)..(429): unsure at all n locations
ctgcagcttagctccttcactgcacaagctcttatatttgaagagttctctttggaaccttcacccgacaaagacactgacaaaaacttatcttctcctttntggacaaagtatggcaaactgggggcaagtaaatnttcttcccatcagaccttggatgcaactgtgatcgtatgcccatatcagctagatcttgacgggtattcaagccatccttcgtcttgccttgaatgttaatgagcatcccaatcacactgtcacaaacatttttctccacatgcataacatcaatacaatgtctaacgtcaagatcagaccagtatggaagatcaaagaaaatggacctcttcttccatatgcaactcttacttttatccttctttngngtctttccaagtacattattcaggtgttgaacccgctgatata

SEQ ID NO: 118782 - DNA, 369 bp, Glycine max
ttaatgccacttgtggaacacggggattctatgtcttcagagggggtggattaggatacaaaatattgccattacacatgctaattctctctttactagatctatggtgactccatctgcgctatacgaagcaatgcctaatctattcgatgctctttacaggtgcaaactaacactcaattgccatgacgtgaatgagattagggacgacagaatcgcaatctcagtttatactggtatggccatttgctgtgcctacgtctagatctcctgccatgcactcgaaatgtccacatgccttcgccctcactacttttgaaccacctctggataccttacccttgtgttcataatatcttcccaatcagc

SEQ ID NO: 118783 - DNA, 389 bp, Glycine max
  unsure (1)..(389): unsure at all n locations
attcaagacaaagaaattaaagatattcttgatggangatttatacagtctctatagtcttagaaaggggatattaaataggtagggaatttcaaattgaagtagcaaaaggtttggccaacaaatttaagttaaaaaagtttttttcaacaaatttactctctggtaatcgattaccagaggatgtaatctattaccagtggccaaaactgatttacaacagctattaaaatttgaattcaaaatttgcactgtgtaatcgattacacatatatggtaatcgattaccagcagtttctgaacgatttaattcaaattttaaagcttgtaatcgattacacatatactgtaatcgattaccatatgagtgtttagaaaacattctagca

SEQ ID NO: 118784 - DNA, 364 bp, Glycine max
tcttatccaaggctcatcttggtggtgaagctccttctttcatggcttattccctagtggatggcgcctcctctcacctcttctcctttgtcttccgctgcatctccatggtggaaaatcaccattaaaggacctcattgaagctcaaagatccagcctccatagaagccccacaagcaagcttccatcacctctctctgaggaatgaccatctcttgatggtcttgaagcgctgctgatgctctgctctccagaatcggtgcctgtcaaaatatgtgtcagctggctgggcagctctggagccttctccgacagtgtccttcctggacctctttgatggaagctttcttggggccatttcctg

SEQ ID NO: 118785 - DNA, 452 bp, Glycine max
tgcaagcttgaaaagcccgagtagtcaaagagatgttcaagtccatagtcttcttaattctgaagagagtatgatgaactaagggacgtcaatatggccaccgatgaagccttggaatgagaaaccaagaaggcccgaaaggaagaacacgaccaaaacaagttttgaggggctttatagggcagcaatagtgagctcaaactccgaagaggtgaaaggaatcatcacgggtcaaaggcatgatctggaaggacgagctaaaggcttgccttatgtcgaaaagaaatttgtcccaacagttaaagtgagactgaagggaatatgtgggccatcatcgatgagtgcaaagagaagctaaatctagcggcgactcacgagcaaaggctagaggatgagtacgccaagatatcagcagaaagcgaagcaagggagagggtaattgattcatggca

SEQ ID NO: 118786 - DNA, 362 bp, Glycine max
tcaacatcagaccacttccagggtgctggttcttcttcacatggacttgatggggcctatgcaagttgaaagccttggaggaaagaggtatgcctatgttgttgtggatgatttctccagatttacctgggtcaactttatcagagagaaatcagaaacctttgaagtatttaaagaggtgagcctaagacttcaaagagaaaaagactgtgtcatcaagagaatcaggagtgaccatggcagagaatttgaaaacagcaggttcactgaattctgcacatctgaaggcatcactcatgagttctctgcagccattacaccacaacagaatggcatagttgaaaggaaaaacaggactttgc

SEQ ID NO: 118787 - DNA, 367 bp, Glycine max
  unsure (1)..(367): unsure at all n locations
ttaggcacttctctttctctgtggaaatagctgaggaaaattagttccgtgaagaaaatccaagccgaggtgcttccgtaacgtttccgtgagtaattatgcgaagattctcgaccgttcttcaagattcatcgtccgttcttcgttttcttcagtcttcaacgggtaagtacctcaaaccaagcttttcaattcattctatgtacccgtggtggtccacattntgtttcatgtatttttattcttggtttcatttactttttatacccacttttgacgtgcttaagccatttatttaagtcatttctcgcttaatctaaaaataaaataaatttccaccgatcgtttgaattgtatcatcccgtaa

SEQ ID NO: 118788 - DNA, 361 bp, Glycine max
taacacctaggatcatgcctctttattgcttttctagaataagcacatagtgagtggccctcttccacaataacaggggtcttcaaaaatgtgttaagagtgtcctcatcaaacttaatcaaatgacctctcacctgcacttgcttaggtgttttgtcctcagggtcatagaggttggcgtagaactccttcacaatggcaacatcgatgctaccatcaatgaaatcagtcaattcctcatcccagtggtgtctcgctatctcatctaagaattcatcaaactctatggtataaacaaccatgttcctctcaagcaaaggcttcctaggcacaataacatctgcgtatctttcccaagcct

SEQ ID NO: 118789 - DNA, 403 bp, Glycine max
  unsure (1)..(403): unsure at all n locations
caaaagngcaagcaaatcagaagaagacatgctgcagngcttcattgactcaaaatacaaagatggtcgctcaacaacagaagctgaagtgactgggcttctcattgctgcactttttgccggtcaacacacaagctcgattacctccacctggactggggcatatctgctgtctaacaaccagtacctttcagctgtgcaggaggagcagaagatgttgatagaaaagcatggggacagagttgatcatgatgttttggctgaaatggatgtgctgtataggtgcatcaaagaagctttgagactccatcctcctctaatcatgctgatgagaagctcacacactgantttagtgtcacaacacgagaggggaaagagtatgacattccccaaggtcatata

SEQ ID NO: 118790 - DNA, 363 bp, Glycine max
tgatgtggagtttctggttgagaatgagttattgtgcatgaattacggagtgataaggaagtggcaactcttgttaatggtctatgcaaacatgttgtgacaaactcaacgtcttactatgaaacaataaataagctcaacgagcattacgtgagcaattggaaccacactgtggctgcattgaggttggtgtacttcaaagacctttggagggcaagttccactgtggtggggattgctgtgctcgttttcgctgtgttccaattcctacgtctagtgggtgttgtcttctactctcctacaatgtccaaaatgtaattactaaactcagtttggattattatgttaagagtttaatttaac

SEQ ID NO: 118791 - DNA, 409 bp, Glycine max
  unsure (1)..(409): unsure at all n locations
ttaattattatttgaatctctatcccctcactaacatatatgtgaggggtagatggtgacacatactccctaactcgtgcaagacctcaatatcgagggggtgttcaagagttcaataatatcgccttgcatgtcattttcgaccgatgtaaaatctgtgaattctattagtgcttgagcccagttatacagagaaatattgtgctggcagaatcatgttcaaggatgattntttcgctacttgcatgctcgcagaaggagcaattcaatctaatggcaatggtgttgtgggggatctataggggatgaaacaaacaactctataataaaatctagttctctgatcaattagcgatgagaagtgatgaattttacaacagctgaaaaaatgtctactcaaagggatcta

SEQ ID NO: 118792 - DNA, 365 bp, Glycine max
ttaagtgtggcaaagccttcaatagctatgtttctttatctcggagatactggtagagcaagaagctcatatagagcatggattacctgtgcagcctctggtgaagtacaacaatatggtggttatatcactgtcaatgaaactcaaagaagagcactgttctattggttttttgaggccactcacaaactataacaaaaacctgttctcttatggctcaatgggggtactttgtttttttatactaacccagcacttcatgtatatatttatatcgcaatcgtttttatttaatgttcactctcatgactaatacatgataacttaatgaaaggcaatggtaataactaatgaatttatctttt

SEQ ID NO: 118793 - DNA, 335 bp, Glycine max
  unsure (1)..(335): unsure at all n locations
gcttacttcttangttgggtggtgttgagggatcaccaataaggtatactctaattaaaaattaagatatgtgattttttccctagaggaaagaagggtgttgcacaatgccgataatgaagaagacatattataagaatgagataaggaggtatatataagtcactgtagtgggtgtaagatataattgtgaacatctaatggtggtgcatcgctatgagtggtccacgataaaattcatctataaaatgactattagtgagcataaagtattggaaaattttatttctactttttttttttcaataagcaaaagggattttatgtcttgtact

SEQ ID NO: 118794 - DNA, 358 bp, Glycine max
tgaccaggaattatttggatgggttttagttgttttcagggtgttcctggggcggagatgatggtactgcgggtgaaccagaagctgcagtttcttttggtgaggtagccatggaaaagcagagcgtttgaaatgggttcgtgaatctcagaaaactattgggaaatgctggtgaaaacacgaatgccaagcagatataaatttgaatgaagaatgtggaggggcgtgtgaagcaacggtcgaatttgctttgtagtgaacgtgctattaatgttaagtgattcgtttgggcacgttcagattgcagtagctgctataattcctctagcagacaaatgcccagcttgcccctcagttt

SEQ ID NO: 118795 - DNA, 319 bp, Glycine max
gcataacaagaatcaagccaagctattgtgcagcatcaatggggcaaacacaccaaaagatatgatgatggtggctcaaattatcacaaaggtaaacttatcactttcaaattgagctttcaaaactatcatgacatgtagaggaaaaacaaggatttcaaatcacaaaatgtcaagagacttttattttcagaacaatttcccattttttgaacatatcctataattcaaagaaaaatatgcaaagttgtacatgcaaacaaaattgacctaaaatattaaactagaaacccaacaaaactaacaaatttaacacaaa

SEQ ID NO: 118796 - DNA, 360 bp, Glycine max
tgtgcattcaatgtcctgatgagggtgttttatatgttctcaagattggactgatacatttgctgcccaagtttcatggtcttgctggtgaagatcctcataagcatcttaaggagttccatattgtttgttccaccatgaagccccctgatgtctaagaagatcatatctttctaaaggcttttcctcattctctggagggagtggcaaaagattggctatactaccttgctccctggtctattttcagctgggatgaccttaagagggtgttcttggagaaattcttccttgcatctaggaccactgcaatcagaaaagacattttaggcatcagaaaacttagtggagaaagcctgt

SEQ ID NO: 118797 - DNA, 307 bp, Glycine max
  unsure (1)..(307): unsure at all n locations
aacaaccttctggaggaatcttctggagggccaagtgggcctggttgctatttgcacccccatttttactaagtacacccccctgcctttttttttgtgattcttttttcgtaaagttatggaaacttacgaatttcgtaacgatacttgttttctttccgtaatgttacggaaccttgtggattacataatcatcccctttntgacttacggaacgttacggaacctcactaattgtgcaacgatgcttccatttgatntccggtgtgtcacggaaccttacggatngtgcatcaatattttcttt

SEQ ID NO: 118798 - DNA, 382 bp, Glycine max
ttttaatactcaagcttcagaccaaagcaattcaaaatctgttattttattcccctcaatttaatggattttcaaggtttgagaagtgaaattgagaatggggtaaatttggagcaaactctcacctcacacacatctataacatcaatttaaacttgttcaaactgaatttacacctcaaattccaccgaaccaaaatttgactcctcaacacccaattttaccctagaaatggctctttgttcactttggtcatttgtttttctctctagcacagcccaaactttctcgtaagtcctaaatgacatttcaagctaggattaactcactttaacctccaaataccactaaatccagatttggccttccaactctcaaaacc

SEQ ID NO: 118799 - DNA, 241 bp, Glycine max
tttttaatttcatttttcccacgcggttggaaacccatcaagaaactcacaacgattccatgctcgggttaggaacaacctacgactcattcttagaccggatagcgtctgtaatgactttttgatttatacttgacgctttagttactcttgaaacctaagaaaactttacgttctttgaactgagttctactcctgacggtctgggggttatcaagagccttttaacaagttaatttgg

SEQ ID NO: 118800 - DNA, 359 bp, Glycine max
  unsure (1)..(359): unsure at all n locations
ntgaaaaatgttgatattcaccttctcgcttatccaatctgctggcttcgcgagcgtccgctaagcacaacactcatgggctaagcacgaggaagactttggaagaagatgagctatacaggttcgctaagcgcactgcttcatctcactaagcgcactgcttcagttcatccgctaagcgagaaaggcacgcgctaagccgaaattcactaatgtgcgctaagcggttgatgtgccattattttctcctatttcttaaccctttttgcaccattttaattactgattagtcttaattgtcaaattaattatgcagttttatcatttgggcctactggattaattttgtgtttttaatt

SEQ ID NO: 118801 - DNA, 450 bp, Glycine max
  unsure (1)..(450): unsure at all n locations
catgatttacatctncctatttctcaagcaaattcttcttgatatcatcataatcttcatgatttacataactttgatgaatgagagtcttgtgagacatacttcaaagttccacttctctccctcttttattccttcaatttcgtgctcccccctctctatttctttccctctttcttttcctccattgaagcatcctctccaagcttcttatccaaggcttatcttggtggtgaagctccttcttccatggcttattccttaatggatggcgcctcctctcacctcctttcctttgtcttccgctgcatctccatggtggaaaatcaccattaaaggaccccattgaagctcaaagatccagcctccatagaagccccacaagcaagcttccatcagtgtgacaccctctaccccaacatatatataaataaataaaatatataaaaa

SEQ ID NO: 118802 - DNA, 445 bp, Glycine max
  unsure (1)..(445): unsure at all n locations
acttcttggatatgnnnnatgttattgttagatgttcaattttcttaaatacaacacatccataaagttgttaatcttgtgacctattaaagagcctgtactttgaggatcagtatagttgtagtttatttagtttgatagcaactataggatgcttgggaattttttagttgtgctcattccatgcaacttgtttccatttgaagtatatgatgaatttttgagcatgcataacatgcagctaggcatgaggaattatagtttgacatatagaaacctaaattcaatttgattctaattaatgtgagaaatggtgcaggcacgaggtagctggtgtagtgacagaggtgggaagcaaagtaaaaaagttcanagttggagacaaggttggtgtgggatgcttggttgattcctgccgcacctgccagaactgtgatgacaatct

SEQ ID NO: 118803 - DNA, 336 bp, Glycine max
tttcaagcttgaataatatgcttttttttgaagaccgatctcatgtttttttttcacttcattgccatatcacgaataggtttgatcttgaggaaaccaagatctaaaacacaaatgatttatcaattttaatatgagattaaaatccttctcccatgagaagatgtgcgcaagagctctcatgctcccttacattatggaagacatagtccaaagatatatgatcaaaaggtaacaatttcaagaaattctatgatttgtattttgaatctacatggacttgacaatcccccctcccaataactcgtcgatacaaaatatgaaatacaactttct

SEQ ID NO: 118804 - DNA, 454 bp, Glycine max
  unsure (1)..(454): unsure at all n locations
gcttaagcctaatgaatctagtcaaaccttatatgtcaaagntattatatgcagtttgtatgttctaatataaagaacttgtaaatcattacactccaatgtctccttggctagaaaattagtaatttacctgaaaccataaattggcacaatgctgcagatcattcgttaagataaagaaatgcttttcatattttgatatttcttgacttatctttaagatatggtaggatggcgtacctcatcaattcgtcgtcaacatgaacttccaaaggtatagacaaaccttttgataatagtcttccttaattctttacatggtttcagagactaaattctgttccttctcttgtgctaagccaatcttcttgtaattgatgagagatacccacacattgtttatgttgaaggagagactacggatgaaattcccaataaaacatctaatattgga

SEQ ID NO: 118805 - DNA, 361 bp, Glycine max
  unsure (1)..(361): unsure at all n locations
ttgactttagtcatcaaaagattataaatatgtgttcatggcatgaatcttaaaagaagagatcaatcatctatatttcaatcttctctcaacatcattcaatatctttcaactctttctatagaattttctgattcttttactcttcatctttctaaaagtgtttgttcaaaactttctcttcctagaaaactcctttgttcaaaaacttgtgctattcatctttttcattctcttctccctttgccaaaagaatgaaggactaaccgcctgagatatctnttgtttcccccttacaaagattcaaaggactaaccacctgaaaattctatgtcccaacacattggagggtacatccttt

SEQ ID NO: 118806 - DNA, 441 bp, Glycine max
  unsure (1)..(441): unsure at all n locations
ctgagttatcntatttgggttatgatgtttattctttatatggtgngaacgctttgtctgctaaaggattgcttggaactagcatgcaatggtgcatgtgcgcatatggtctgtgaaatgaaattatattttcccttctttctttattggtattgatgtgatttatgatatgcgggtgaaggacccatatcacatgcaacaccatataccacgccttcaataacagtatttactatttacagaaaaataaatatgatatgactagtgactttatgcgaaatctgctatgactgaaaacagaattagaaataatgatgtaaattctgaagaagaaatttccaatttgaaataaaataatgtcaaattcttttaatctcatcacaatcacaactaatctaactaggagatattaaaatgctctattgtcactccaaatggtag

SEQ ID NO: 118807 - DNA, 325 bp, Glycine max
aaacattaatagggtatcccacagatataatcctatcttagattggtgtatggattaaaagaaaaaaaagtgttattgcataaattgttgtatgaggacacgtccaaattaaccatgaaaagccaggatagtacaattgctcatgcccatgcttgtcattacccaatttctcctctgtctgatcctgttcatctgtgttgtgtaagaaataaaaaacttcctactgaatgagtgttatgtaaagttacattctgtaaagggttatgtaaagttatatatatagtaatcaaggaaaaatatgcaatgtactcgttggaccatgaac

SEQ ID NO: 118808 - DNA, 407 bp, Glycine max
  unsure (1)..(407): unsure at all n locations
acctgngctgcaagctggttgatttatataccccacctgacatccacaaggtctcctgacccccgcgacatatctccaggtaccactctgtggtcaacgaacaaaagttggaagactgactcttccacgcttcctcatatcaagcttattggattatggggcacccatcatatgtggtactaggtggctatctggcgatggcacaaatcaactctcccattttcacaaggcatgcataagcacaccatccccagttgcccacctttaaattgagctcacacacttctacgtagcccttatacttgttgctctcagcaccgagtccncatcaacccctccaagctttcacaatatccaaacaattcgattgcaattatcatgaaactacccttaaccaagaaaaacat

SEQ ID NO: 118809 - DNA, 362 bp, Glycine max
tgcaacaaggaagaaagagtgagaaattttattcaagcactgcagagttgtgattgtggatcaaatacttcagcattaagtagttgcatgttagtttgttattttctattaattgttcgaataagtttttttaggattagttgttttattttttgttacttagtagttgttatgttagtggtttattattgttatgttagtgttttgttattattacgttagtggtttgttattattatgttaatggtttgttattgctatgtaagtggtaagtaatgtcctatttgagcacaagttgtcatgttttacattgttccttcctaataacaatatgaatcttgtctctctatatcaaacaaaat

SEQ ID NO: 118810 - DNA, 444 bp, Glycine max
  unsure (1)..(444): unsure at all n locations
acctgatgcagcaagcttncntttatttttataaagagaattttgatgatttgttaaatacaagnaggggggatgtctcctccacctttataacctcacaatcactcacagactcatctcatgctctcaggatggcttcctcttcatgcttcattctcttccagtcttcgcacaacaaaagctctcaaaactctctagaacttggacctttctctctctagaaatctctaaacatgcaaaagcttcgatacaaaatgggagtactaagtacttattacctatatttaacaaaaagtaattacaacactacaaaataaccataaagggaaggagttagatacaattntcacagatttcttacacaaaagttagtcgtattcatcgactaacatatactggggagggtgagctccatgccaaaaccactgcttactaaagcaacct

SEQ ID NO: 118811 - DNA, 364 bp, Glycine max
ttatgcaagttaattttcaagaggcattttttttatgatcttttccgggcatatttgcgcaaaatctcttgaactatgaagatgttgtccatcatctgtatgttctctatgaaagcagtttgagtttccccaataatagtcttaagcactggggctatgcggttggccaaaattttagacacaatcttgtataacaaattacaggaagatatgggtctaaaatggttaacctgggaggcctgatcatgcttaggaataagcgcaataatagcatggttgagctgctttagaatttttccagttgtaaagaattcattaaccgctgcaaagatatcatcactaatgatattccaagccttcttga

SEQ ID NO: 118812 - DNA, 174 bp, Glycine max
ttaacttttttccttctctaccagaaaaaagaacgatgtgtttaaacatgaacgtgaacaaatatttgtaaagctgccggaaatgtacatgatgacatccacatcttgctaatttatataacctgtatagtctagagtatatattctttccttatctcttcctattatactgaa

SEQ ID NO: 118813 - DNA, 358 bp, Glycine max
ttagctttgaatttaggttttggttatcgataatcataaattgacagataatagatataaattaacaatttacacaatgtcagccttttaatcaccatttccctatgcagtttaactgtttaagccccctaggcccctacactacatctatctatccagcatttcaacaccgatatttggttactagtgggaattctttttcttggttgtcttagcgttcatcaaatcccatatgtttaatgattttctgacgaggtcagcttcagatcaggggtcaacattggaagtatctgggtcaatgagttcacatctaccctggctctgtgagctgatccatccactttaacttcgtagaact

SEQ ID NO: 118814 - DNA, 306 bp, Glycine max
gacatcaccgcatacagaaagttgcccacagagtgatgaatgttgtattttccatatcctctagtgccatctttatctaattatagtctgaaaacccatccatgaaagaaaaacagggcaaaattggtcgtgttatctactagcacatcgatgtgtggtaaaggaaagttatcctttggactgactcagtttaaatcccgatagtccacacacattcgtacctttccattcgttttagggactggcacgatattggtgacccattccgagttctgagcaacggccaagaaacccacattggattgc

SEQ ID NO: 118815 - DNA, 358 bp, Glycine max
tagaccgttgcctcacacgtctcgatttttttctttgcatggcttcatcgagcaagcacgtatcagtcgtttttgaattttttgaatatacctaagtttggtccctcccactactgcatagtagtgccttgcaaatttggaaggcacaactctcgcgtgtgtgaatattgttgactgagtcaaggtattcatcatctccgagctctttcactccgaacgtgcacagtctcctctctggcctctttcactccgaacacagtccaaagcttcgtctgtcctcgttcccgtaaggtttgaagtgtgccacaagctcggtcgccgttcgcagttgccattctctatctgacaggtgccttcg

SEQ ID NO: 118816 - DNA, 358 bp, Glycine max
tgagagaagcgaaatcggatctctcttttttttttgtgcaatatccagcagagaacaatctttctacaaagaaagggtcaagtgcttcttatgaataaaaatacagatcttatttattggtcataaaaatcatagataattgatgatcgaaaaaagcttttaaaatccttacatgcttcttcaaaatatcattcgtgacgtacatcatcaaatagaacaaaggtttaaaatagttgtgaatgctgtcagtaattaatatactcccttacattgaagtatgctacttcttttgttaagtatgctacgtatatatacattaatttcttgtaggagatgtacaagtataacttttggaata

SEQ ID NO: 118817 - DNA, 362 bp, Glycine max
  unsure (1)..(362): unsure at all n locations
tgtaattgtgtaagattttgagtatttggtgttgacattntntgcaaacccaaattgacagtatgatgacaatagagaatgaatgagaatcaacttattggtctgctgttatgatatgcaatctactgcatacattggtgtgtcaacccatcaatgtaaggggaaccatagtgaaggcaccatgggtggtaattcagagtttagctgctgaaatacctaattataggctagagtaagatgcaatgtactgaattattatttgagagtctgccaatgtaaggggaaatagagcgaagccaccatggacatgtttcttaaagggagtagcaatgttgtgaatcttacattgagcaaaataagat

SEQ ID NO: 118818 - DNA, 356 bp, Glycine max
cggtggtcttttcataaagatctactctcttgtttggaattctggacaagttagcttctttgctccttgttgaactggttccccggatgattccttcagcttgagccatgtgttaaattcctatcttggttgaatcctagcgatcctacttggttgtggccttggaatccagggtgattttgagctcccatgtgcttcacctccctggaagaatcttcttacgctatgcattgccttgactcgtgtgctacaccgcagatgtggcatccccctatttgcatgattgaaaggtaatagggacttactgcttgtatttgttgagggagcttgctgatgggctccgatagggcctttat

SEQ ID NO: 118819 - DNA, 401 bp, Glycine max
  unsure (1)..(401): unsure at all n locations
gctttgagccaaaatcctgactcaccatttttcttgacccacggttataatgtctatccttaccctcggaagcaaaaaaaaaaaaggaaaatttccaatcaaaggaaaaaagagaggaaaggaaattcccaatcaaagagtgggagaaagcaaaaagaaaagaaagaaaattcccaatcaaagaatgggagaaagaaaaaagagagaagaagaagaaagggaagaaagttcccgatcaaagaaaacaaaagaaatatgcagaaaggtctttggaccggacaatatctgaacaatacaaaattgtcaccaaatgaacaaaaagaaggaaaggaaaccacgacctanaatggtctttcccctttaattgccaaccaaaatcttgtgcgctagcgactnttttg

SEQ ID NO: 118820 - DNA, 369 bp, Glycine max
  unsure (1)..(369): unsure at all n locations
acagcttttggatcaaactcttctctattattnntttctttattgttctncattcttcttcctcttttcacttacattcttcctttttcttgcacaaatttcgttgctcttccacttgtaatgatcatggaaggctaaatactcaatcaatccagggatccactccaagcaaggctattaatttgagtttgggtttagtatttgtattttgagtgaatgttcattttttcttcaatcctattttcaattttcatgattatgaatatgtttaggattgaagatggattaggttatggattcatttcctaatttcaaaattgtttggatgatatttcaatcaatttagggattaactcgattgaactaact

SEQ ID NO: 118821 - DNA, 253 bp, Glycine max
  unsure (1)..(253): unsure at all n locations
ctgcagcttaaccttaggttttaccangngttcttcctattctatttattgtaggcataaataaangtatgggagaaaaagctattagcgctataaggaaatcgagtaaagaacctgctgattggctattacataaagacataccaaagcatacatgggctaggcacacatttgaccctcaatgtcagagtgacagtgtgacaaacaacttatgcgaagtgtgtactgcttttgttaggaccatatgaaatag

SEQ ID NO: 118822 - DNA, 362 bp, Glycine max
taatttccataatgccacttagacactttacttctctacccaccacctactccacaggcaatgaagatatttttgaaaacctctgtgattgcctactttctaaagaagtattgctcatgatggggctctctaaatctaatcaggctattatcacatgtacagggaatgaagatatttttgacaatctctctaagctacccaagcaatcttcttcccttcaaagctaccaccccaaacaaattgcctttgaatggcagatagcctattaatcactgctgtaggggccctgaaaaaagatgatgcaatcctaccccgcaagggcattggatataagactccaagaagattgagctagagatgca

SEQ ID NO: 118823 - DNA, 252 bp, Glycine max
  unsure (1)..(252): unsure at all n locations
cttcgncattggaagagcggtagacagactttgtggttgatttatggatggcctttgtggataactgggtggtggggtaaggaggaaggttgttattggctgagtaatgacattgttgggttggtgggaaaccttggccgtatatgaatggtagtcacagcatgagattctccctctttctcaccctcttcatttgccccagatgtattagttgtgctagaaggatgatcaaatttgcctctgttaggatac

SEQ ID NO: 118824 - DNA, 375 bp, Glycine max
gacacaagaaactcaagctttcttccatcatctgctacgacatatttttttaatgcaagttcacattcttgatttgtctttgttcgacatgcacatttgctcaacttcatgaattgaaacgcacattccatcaaaatcgtgcattcaatataaaacaaagtcatacacccatttttcacaaaaagataaaagtggttcattgacatgttatctaaaataagttaaaatgaacaaaatgcttgaggataagcatactaactattcatatatagaactagcgaggtatatagacataaaggaaatattatacgaaaaccaaaattataataataataaatcaaagagtgaaaagtgtcatcaggaattgaaactcct

SEQ ID NO: 118825 - DNA, 408 bp, Glycine max
  unsure (1)..(408): unsure at all n locations
cttgcaagccaagaagcccccttataggacaaatttttttcggttcaaatgaaactttaaatgattttatgttagctacttctctatttcacaagaccaccacggtcctacctctacatcgacaaggttttgcttcctacaccctcaaaagattccacacttatcatcatgatggcctattcatacttccacaagtaacggagcgttgcatagacaaaggcaaacaagacatacataaatagtgcaaaatttgtcatcgaaggaaagcaaatgcattgaagaaaaatataaattttcatagttgcaaagtctatacaaccaatatccagtggtgaagaaaagaataaaataaacaaaaggcaacctaaacttgggcttcatcaacaccctactcctncctagaaccct

SEQ ID NO: 118826 - DNA, 363 bp, Glycine max
tgtcgtatggttaagttattatcttgttggtttgttctaagttgttatattttctagtatgattagtcatttatgtatgttttatattacttacacactttggctttttgatgttgacaaaggggaagagaaaaatgggtattttaagaaatcaagatgttatatttttcaagatttaaaattaagcataaattcaaaaacaaagggtgagaatatggagaattaagtgagtgatcgactaggaaaaagaatgtgtatgtgtttcttgatttcagggttgtcatcatcaaaaagggggagattgtggaagcaatgccttccaaggttattttgatgatgccaaagaatcaagagtcaagcaaa

SEQ ID NO: 118827 - DNA, 440 bp, Glycine max
  unsure (1)..(440): unsure at all n locations
ttgagttttctaattagaanttttattataantnattcttagcctaaacagcgtaaacgaatgttcatgatacatatggaggtagttgttcgatggaaaatacacaagtactcagattttttttttcttttgattttgtgtttttattttggttttatgttcggcttcnagcaattctatcgaaatacatgttcaatgaatgctttatccatggcaatgggacgattttgaggcaagtgagctctttccatcgagctcttgtgaggacacatgaaaggtttaaatttaatgctgggtttagtagagatggggataaaatatntaaatttaaatttatactcagcggggttagtgaaactcacgaggaatttagcttcattttttaatttaattctatgtaacgtataaattatattgttattaaaagaaatatatataaa

SEQ ID NO: 118828 - DNA, 366 bp, Glycine max
  unsure (1)..(366): unsure at all n locations
agtgcaaatcaaatcactcctacatttcatttctattatgcattnnctttctttacccactcctcacgtttggttttttagggaaaaacaccataactaaacgcgccgcaagggatccctatcgcaccagatccaaatctagaacgatgggtgatcaagaggagacgcatgaacagatgaaagccgacatgtcggctctgaaagaacaaatggcctccatgatggaggccatgttaggtatgaagcagctcatggagaataacgcggccactgccgccgctgtcagttcggctgccgaagcatacccgactctcttggcaactacgcaccatccttcctcaaacatagtatgacgaggaatggaca

SEQ ID NO: 118829 - DNA, 397 bp, Glycine max
agcacgcatgatttattttcttccaccggtacatagtcaatcgtaaagctacgagacgacatcataatctttatgatgtacattcgcccgctttttgatgatgacaaccaccttgttgttaggagcaacaacaaagaaaagatatctatttgcgtatacgttacttccccttggtttttcaatgattgcttatatgagacagctggagattcatatttttgatatgtaaacaaatagtctcataaagaatagataattttgcttactatattatcttttatgtttttctccccctgtgtcgacttcaaaaactaatcatgaataaagaggagaaagatgtttgcacttgttgattacatacctatattcttatttggtatcttgctgattgcaatgc

SEQ ID NO: 118830 - DNA, 243 bp, Glycine max
gctgatgccttaaagtttgatgacatgtttcaagacgatatcaataaggaatactattttgaccgtaccttcaggatctggaacgacccattgtttcgtgtcacatgctgaactcaagtgatctgatgttacttgaaagtcctaccgaaattcatccaatgtgttgtgtgtgaaaaatacattcgaaaatatgttgtcaagtctgaatgaataatccttctagattatgattctaaactacta

SEQ ID NO: 118831 - DNA, 403 bp, Glycine max
  unsure (1)..(403): unsure at all n locations
agctngcctcattgtgatctaggaaggatttatcagctgattgaaccagntccgctcccgaatatgacagccaccgttttatgagcgctgagcaccagcagcgcttcgagggtatcaagggatggtcatttctccgggagcgacgcgtccagctcagggacgacgagtataccgacttccaggaggaggtagttcgccggcggtgggcatcactagttactcccatggccaagttcgacctaaacatagtcctcgagtattatgtcaatgcttggcctacagaggagggtgtgcgagatatgcgatcctgggtaaggggtcagtggatcccatttgatgcggatgctctcagccagttcttgggatatcctttagtgctggaggagggccatgagtgcgagta

SEQ ID NO: 118832 - DNA, 362 bp, Glycine max
gcttgtggagcttctatggaggctggatcttttgttcttcaatgaggtccttcaatggtgatttttcaccatggagatgcagcggaaggcaaaggagaagaggagaagggaggcgccatccactagggaataagccatggaagaaggagcttcaccaccaagatgagccttggataagaagcttggaaggatgcttcaatggaggaaaagaaagagggagagaaggagagaggagggagcacgaaattgaaggaataaaagagggggagaagtagaactttgaagtgtgtctcataagactttcattcatcaaagttacaacaagtgttacacatgcttctatttatagactaggtagcttc

SEQ ID NO: 118833 - DNA, 379 bp, Glycine max
  unsure (1)..(379): unsure at all n locations
gcttatcgttattgaaaaaatcttttttaggggatctctngaagtagagtatttgtttaagcatttccttgcacccttcttccaaaatttcaagtgtcatggttaaggattttaccctcttttcaaggtcaagacattctaacttgaattgccctgatttcttgcactcacaacaaatgattggacttttttctttcttatgaaaggatcttttggacgatccgttgaacttggaggatttcttgtttctccacatctttctgatctttcttgtgataagacttaattcatcatcttcttcattagagtcatcatccttaaattcttcttttaaagcatcattcacgacaaagactttggacgatgactctctggacac

SEQ ID NO: 118834 - DNA, 377 bp, Glycine max
tataaaatcctcaagcttggagaggatgcttcaatggaggatttctttttggagagaaagagagaggggggagcacgaatatgaaggaagaaaaagggagagaagttgaactttgagttgtgtctcacaagactctcattcatcaaagttacaacaagtgttacacatgcttctatttatagactaggtagcttccttgagaatctttcttgagaaaacttccttgagaaacttctttgagaaaacttccttgagaagctagagcttagatacacacacccctctcataactaagctcacctccttgagaagcttccttaagaagattcctaaagaagctagagcttagctacatatacctctctaatagctaagct

SEQ ID NO: 118835 - DNA, 370 bp, Glycine max
tttacggaccgaaaaggatgtcacaaaatgttgggagaaatatttatgctccaatactgtatgagagacctatatgttaacggtaatgggaatgtaattttattttttttgttataatgtgaatgaacgaatattattttaatggcctggaacgagattaataaaacaattatgaattattaatagtaataagtatgtataagtcgaatatctatttagaattaagtatatgatagatttgttagtcattaaagtgaccacaattataaggctatttaatttaaaattaatgattattctaattactcattgaatactagatgctaaattatatgattaatggtttatggataataaatgaattcattgt

SEQ ID NO: 118836 - DNA, 364 bp, Glycine max
gatctcatgtcagacaccctaatatcttttttttttaacaatcacaatttacttggtgcctacttatagttgaattataacatggaatatacttaaagtgcataaaaaagttaaataatgctcaaaataggcaatcctagcttaaatcttaccctttgcttgatgtcacccaaagtcaacaagttcagcttatagaattcctctctgaatgcaaccacaaacctatataaagtttaaaaaccaacaagaattagacaattagaatctgtttgatttgtataaatttaagggacaacaggatacatctactatattatagtattgtcacttttaaaggactaaagacgaattattgaccataatt

SEQ ID NO: 118837 - DNA, 320 bp, Glycine max
  unsure (1)..(320): unsure at all n locations
gaattntttagttngtgaatgtaccaaccttaaattgtggctcgtttccctctttgttttctgtaaaaaataaaataaaataaaaagtacctcagcaaaagatagtttatattataattaagggtcagtactagatgtactgaagtgtacaacatatagcataggcagtgagaaacactgcccaaataagactaaatacaatgacaggatatgtcatccccccctaagaaaattcctacctcatattagacaaccagtgattaaatagggtattaaaatccttctctatacaccttagccaagaccaagcatggaataat

SEQ ID NO: 118838 - DNA, 362 bp, Glycine max
  unsure (1)..(362): unsure at all n locations
tagccatgctgcttgaaatntaatttattaatggctgaacacttgctcttcaattggggcaaaccctccctttatggtgagaatcaatgtcctgggttaatcttatcactgtaatgccacaaaatcatagggaccattttctgcaacatggaatggaggtagcagatggagtcaggtccaaaacctggaaatgctggtggattgctttaacttggacaatatggcaccatagaaataaggtggtgttccaagatacaacttttcatggaaccaaactgttagaagatgccctattcctactatgattgtggatcaaagcaatggacaaggattttactcttcattttaaccaatggtcctct

SEQ ID NO: 118839 - DNA, 357 bp, Glycine max
  unsure (1)..(357): unsure at all n locations
tgtgtatttctagcatggaagttactgttcttgtcttttgctgtaccttcacactattcatagctcttagatctaaatcattgttaatattgttatatataaattgtagcttggctgcttctggttccttaaggagttaattatcaatccactattatttgttcttttttaggataactttggtagactgcatgatcggagcaaagaaacccctaaagtaatgaagcaacttggtcgtcttttcccaaacaaagtgacaatacagttgcctcaggtttgatgttagattaacttcaatatgaaatttattccattggtatatacagttcatgtatccatnttaaatcaacttgtaca

SEQ ID NO: 118840 - DNA, 385 bp, Glycine max
agcgactctatacaatactccagcttgaacaaagaaataaaatgactgccttactttctaaagacctccctagagaatggagaactcaaaaagacctttccttggataactgtctgaacatgcccttttgcgggctaacgaggcgaggctcaccggtgcgctttccaaatgaggaaaatgcgcggggtctccaccaacgttgatttgtggaaaacgtcggaaaaatcgaaggaaaccggtcataaagaatattccaagttcgggagttgaatttacgtttgaggaaggtattagcacctgtcacgtttgtctcaaaggacaacaacctattttttagaattgtgtgaaattgtgttaccttaacttctatttcttttttattttt

SEQ ID NO: 118841 - DNA, 413 bp, Glycine max
cgacaattacttttgactccgatgctttttgagcccttgtatatatcgagacgcgccaaattgaaaatggaacctctaagaaaagtcaaacgacaataactattaactcggatgtctgatcgagccctgtattatttgaagacgctcgaaattgaaaacagaagctctaagaaaagtcaaacgagaaaaacttttgactcggatgtccgattgagtcccgtaagatatcgagacgctcgtagttgaaaacggaagctctgagaaatattaaacgactataactcttaactttgatgtccgattgagtcctgtattatatcgagatcctcgaaatttaaaaacgaacctgtcagaaagttaaacgacataactttatctcgttggccgatgagctcttatatatcagaccttta

SEQ ID NO: 118842 - DNA, 365 bp, Glycine max
ttgagggtgcgcagcccaccatcttttcattgtagagttccgataatgtgtctaccatcacgattatcgtctccctttccattattgggggtaccacctgggccgccagatccctccaccttttgggcgtgttttttgaatgatccgtccccctttttgcacatgttctgtagttgcatcctatccagaaccatatcaaaattgtactgatactgcctaacaaaggcaaccattaggtccttccaagaatggactcgggaaggttccaagttagtgtaccaggtaacagctaccccagtaagactttcttggaaggaatgtatcagcaattcctcatcttttgcgtattcccccatcttctgaca

SEQ ID NO: 118843 - DNA, 453 bp, Glycine max
  unsure (1)..(453): unsure at all n locations
gcttcgnnctcagatccctctggtggtcttgtccaattgagatattcctcttaggtttagaccaacttaaactgagtttggtccacaaatccctcttgtaagactagactcagctcaagcaacttacgaaagtttagcctaatttagcctaagcttcgtctacaaatccctcttgtaagactgggcctagactaaacagcattattgtaacaacataattaaaaccaaaacttaatccgcagatccctcttgtaagactaagtttcgatcctgcttcaatcaagttctaaggcaatagtacatttcccaatgctaaagtcacctaactatgcacacaaatggatgatcagaccaaaagcatacaaacattaagcattgaaggaagcattgaacatagaaaacataatcaattagatattaggtatttacatcagttgttcattagaaatcccc

SEQ ID NO: 118844 - DNA, 362 bp, Glycine max
tcatcttcaacccaagaaggaagtgataatgttgtttcaaatgaaatagacaaagatgatgatctcagtctttttgtaaaaagattcaacaaatttctaagagtcagaggaaatcaaagaagatcaaatttcaaatcaaagaaaagggcagaagattcatcctctactccaaaatgttatgaatgcaatcaacctagacatctgagggttgattgcctaattttcaagaaaagaatagaaaaatctgaaaggaaagcttttaatgaaaagaaagctaagaaggcctacattacatggaatgacaatgatatggactcatctgaagattcagaaaacgaagttgtaaacctaagtccgatggc

SEQ ID NO: 118845 - DNA, 197 bp, Glycine max
  unsure (1)..(197): unsure at all n locations
cctatngtctcgcacagtctttattattgggagccaattcaatccttttgtttgactctcaaccacttatgatagccggcgatgatcccattactgcttcccctaagctctttgtccttcttttgtaccaccccccatgccttgggaccttctgaagtgtcttcacgttggtcttattgaagcctcatgaaatgaca

SEQ ID NO: 118846 - DNA, 365 bp, Glycine max
tgtgcacatctctctctatcgctcactcattctttatttttgcatatacttgctttatctcctaactcatatacttacttgagcatcagaatcttttattttacaggtcttccctcgtgtcctcttaacaaaggtgtctcctactcgacgtgtgaagtttaggagcccacttaggtcacatccatcttgatatgtcctagctctgaattttagaaagtagcaacacattatcgacctgtgaaaaatcaaaatgaatttataaaggttaatggagcaagaaagaaaaattcttgaaaggaaaagaaaaaacttttggtgatttggattggagaaggagttctgatactttttcttttttttttctt

SEQ ID NO: 118847 - DNA, 426 bp, Glycine max
  unsure (1)..(426): unsure at all n locations
tgcaagcttttcgattcattctatgtacccgtagttgtccacactgagttttttgcatttttattctcgnntggattactttttataccccctgttgacatgcttaagccattttacttaagtcatttctcgcttaacttaaaaacaaaataaatttccgccgaacgtttgaattgtattatccattaacttcggttaaaataaattccgaccgttcggtcgtgccgtaaccatgttggaaatcaaaaagaggtgaaaaaataatataatagtcaaaaagacatcttttagtaaaataaagcggaaaatcaatcggacgttttctctttgggatttctcattcttaatcgaattgattaataactaaagtgaaactaaaagctataancaattcgcctagtcaagctcgtccacaaaaataagctt

SEQ ID NO: 118848 - DNA, 364 bp, Glycine max
tgggacgataaatggaatggtagcccacctttcttgtttatgttattcgaccgactttgattaatagactctgaaattggttctcgaaatgcaatcccctctgatctttgcatcgacattctagatgttctctctaactccatttcctttctcacttcatcttccaactctcgtcgttgtgcaaaagccatctcacgagcaatgatttctctcctgattttttccttctctagctctcgccatattttctctttctccaactctcgttggaatacttcgttgacattgatcggcatgaccattgggaaaactcttggcgctgaaacattactaggaaagccacctgatgcaaagtcacaccctg

SEQ ID NO: 118849 - DNA, 379 bp, Glycine max
  unsure (1)..(379): unsure at all n locations
tccggatacgacagtcaccgctttatgagcgctgtacaccagcagcgcttcgaagccatcaagggatggtcgtttcttcgggagcgacgcgtccagctcagggacgacgagtatactgactttcaggaggaaatagggcgccggcggtgggcaccactggttactcctatggccaagtttgatccagaaatagtccttgagttttatgccaatgcttggccaacagaggagggcgtgcgtgacatgaggtcctgggttaggggtcagtggatcccgttcgatgccgacgctatcagccagctcctgggatatnccgatggtgtggaagagggccaggaatgcgagtatggccagaggaggaaccggtctgatgggttcg

SEQ ID NO: 118850 - DNA, 369 bp, Glycine max
  unsure (1)..(369): unsure at all n locations
tgactcacaccaaacatgacaagttnagcttgctttctacaaatttcttcacaaataactatcataaggcataaacctagtaaaactacccatcatatctgccaaaacccaatacccacgaaaatcatgggagaaagaagtccacccaaacctgaaatttcaaagtcccacatggagagatgcgcttcacgacttcgaaaatggcttcctttcgcgatttggagcaaaaatgatgaccaaaggttggagctttgatggagcttcaatggtggaggaagaagaagggatggcaacgtgagaaagagagagagagaggagctttctgaaatttttgggctgaatgagtgaggagagagaatgtggctttta

SEQ ID NO: 118851 - DNA, 387 bp, Glycine max
  unsure (1)..(387): unsure at all n locations
agctntaaaatttgttataatngctggttatctattaccatccatgngtaancgantacacattataaattttgaattcaaacttctagtgactattataaacattntcagctgctggtaatcgattaccggagagcaaatctcaatttgaaatgatagaattctntggtcaaaccttttgttttttcaatttggaaacttcttccaaaagattctagaaatcaacttgatcatatatcttgactttcttggattcttgtcttgaataaaacttagaagcacttgatcctttagcatcatcaagacatcaaaacatcttgcttctacatatgagtcatttgacttaatccatcaaaaaatccttcaactatttctcgtccttggaaa

SEQ ID NO: 118852 - DNA, 362 bp, Glycine max
tgtactttcaatgttctttcatatcttttgtttgacctttacatgaactgtgacagttttgtactttcgatgatgttcattcatttatagagttgtctaccattttcaatgtgctccaaagaaagaaattattatatacctaagctaaggaccttctataggtgtcatgaacattttttttttaaatgaattaggagttttttttttggttacaatcaatcaccatttggataatgtctcctacaaacaatcaaacatgcgcagcttctctaaagtctcttctaataaattgctgcctgtaaataaatagtacttatgacacaagaaaacaacataaaatttgcatttcaaacctgcactag

SEQ ID NO: 118853 - DNA, 439 bp, Glycine max
  unsure (1)..(439): unsure at all n locations
atgcaagctttaacctcattgtctctcacagnctttatatnnggtagctaatccaanccttgggtccggactctcagccacttatggtagccgccgatgatcccggtactgcttcccctaagctctctgtcctttcttcacaccgcatcacctgccttgcgaactccttggagtacctttgcattggggtcactgaaaccccgtgtcatgaaaggcgtgatgctttcgtctaatggcgctcctctcatggggtagccaagctgtcctatggcgaggacgggattataattaatacaacccctcgttccatcaagggaacatttggacatccttcgcatgaagatagaatcctgattcttccttccttctagcgagggaaccaattaacacacgcctctctatgctagccaagagtaggcccatttcgtctttttttttc

SEQ ID NO: 118854 - DNA, 362 bp, Glycine max
ggttcccaatgctctgttcaggctctccctaaatctagaggtaaacctatgatctctatcaaatactatgctagatggcacaccatgtaatctgacaatctccaaggaaaatctgatattaatgggaataaagtgagtagacttggtcagtttgtcaacaataacctaaagagaatctaaacctctaggggtcctaggtagtcctatagcaaaatccatggaaatattgtcccacttccaccggggtatctccaagggttgtaacttccctaaaggtctctgatgttctatcttagccttctgacagactaaacatgcatacacaaactcactaacctctctctttatgttgggccaccaaa

SEQ ID NO: 118855 - DNA, 360 bp, Glycine max
aatacataaattaaatggtgttgcatgtgtagttaagcttgatgttcttgtttatatttttttttcgttcattttcttgctttgcttttcgttgggttctaaatactcaacttggttttgtggggaattaagtggtgttgcatgtgtagttaaggttgatgttcctgttttcaatttattttgttgattctcttgctctggttttcgctgtgttctagatactcagcttgcgtttgtgacatgtggcttgctattttttgttgccttggttctgacatttcacttgcaatcttggtgtgacacaatggtaacatttcaattgcaattctgttggcatgcacatgtgtaattaacggtgat

SEQ ID NO: 118856 - DNA, 361 bp, Glycine max
tgtaggattatggggtacccgtcacatgttgttctaggtggcgatcgggcgatggtgcaaaacaactctccacatccacaaatcacgcatgaacccaccatccctagttgcccacccttaactgagctcacgtactcccacgtagcccttatcctcattcctctcaacaccaggtccccatcaatctctccaagcaatacaacatccaaacatcatgaactatcaaaaccaagcaaaaatagggcagaggcagaaaactctgcccaaaacacaaaccaataccacagtttttcttactcaaataccccagtaacattcccttcgttccaattcgttcaccgttggatcgactcgaaaatgt

SEQ ID NO: 118857 - DNA, 349 bp, Glycine max
agaaaaggacctcagtgtgaaaagatatgttcttattgatatgcccagagcaaccgttgtacattttccaaggtctatatatgagatgcgccataaactaacatccgggtgaaaagttatgagcataagaatttcaccatagcatttgttggacaatttcgagcctctcgtcataagatgcgccctaatcgaatatccgtgtgaaaacttatgggcataagaatttgtccataggatctgatgaagaattttgagcgtatagatatgagataagcctgaatcgaacctcccggtgaaaagttacgaccaataggatttgacaatatctttcgttggacaacttccagcg

SEQ ID NO: 118858 - DNA, 355 bp, Glycine max
tggaaaccttacattcgaccgataacaaattaaaggaaaggctgacgaatctattttactaacactttctctgtaatgaacttaaatctgtcggaaatgacacaatattgggaactcttagagaatgatggaaaaaagcttcaaagaaaagaaagtgtcgctaacatttcttaaatattggtatccataaatatgctcctgtgtatgtatctggtacctatacacatttgtgactggttggcgatgttgcttaaatgcaaattaatctaatattccgtaggaaaaagcacactaaaactaactgaattcttagctattcctgttcagattttagaacaatatctatatttgcctg

SEQ ID NO: 118859 - DNA, 363 bp, Glycine max
ttggcatctaagatatggccatttgtttatttttttctgaaattgctacactccaaagatacggtgcaggggctgcctaaaactggagagcttgagttgtgtgaaggttgcatttatgggaagcaatcaagaggatcatttccaacaggcaaagcatggagagcaagtgagtgccttgaacttcttcatgcagacttatgtggcccaatgaaaatagtctcactcgatggaagtaagtatttcttgctcatcacagatgattacagtagaatgagctgggtttattttcttaaagctaagtctgaagcatttgaaagctttaagattttcaaggctatggttgaaaaacagtctggcttgtat

SEQ ID NO: 118860 - DNA, 355 bp, Glycine max
  unsure (1)..(355): unsure at all n locations
ccccncgggccanncngcgaaggcaaacttttggaaagnnaannnngccagngggacacnacncnnaangcaaaaagggcatataacctccttcnatnnatccccanatnaaggtaaatttagagcaagctgaagcgcatatgcccatacgaaccctctctcgcacaagacattctatnaactaagaaaatgcacccatatacaatcaaggcagcttcgaaacctagattatttacacgtacttccaaggagtatttgttacttacatcacacacatctccttggctaaatttacatacatgcatactcaaagcattttgggatatcaaaaattgcacatgtgcacatcttggca

SEQ ID NO: 118861 - DNA, 281 bp, Glycine max
tttgcccacccaccataggaccctctccttttggacacatagaaatagaaacggggatgacaatcgcccaagaatggaagaaacccaaaactctcacccccgccttgcggcgcccatatctcgatcaagattgaggttctacaaccgaaggtgtgtggccaacaatcaacttttttctaaagcattttttcttatatggaacatgatgagggccagcgggtgtaatgtgacactattcgtatgtgtacttacgagtagcaaatacgacattaggaaaacta

SEQ ID NO: 118862 - DNA, 447 bp, Glycine max
  unsure (1)..(447): unsure at all n locations
acgatattcttntaacatataatggactattnggaaatattttctcttgttttcttgatcttgacttaaatcaacgttgaatagctttaatcttttggcatcatcagaatcttcatacaacatatgcacttacaatcaaatcccaagagactcatggaacattcaacaatttatactacaaagtcaatgtgaaaatcaagtaaattccaatgggcaacaattaagtaagctatcatatgaggtttgagagtaaaccactagaaaactagctagaatgaaagaagactctagatctcctcaacaatgattggcttatcaaaaagggtattagttgtgtaatgggacaacggttaagtaagctatcatatgaggggtagtagggacctctcattgagcataaatgaattaatatccagcaccatcatagaccattcagaacaaaagcct

SEQ ID NO: 118863 - DNA, 321 bp, Glycine max
  unsure (1)..(321): unsure at all n locations
ataactcatggggccatggggctctttctagaatgcatattgctaacnnnnncatgnagnnctagaagcacgttcttagtttggtcttggccaagaaatgcgaacagaggcgacgagaatcctcttctatataatacggaggccactaaggaataccngacaaancgcattagtaattttctggcttctaccttatctgtcgcgagtgtctcagggttcaagtacatgactatctcatttttccatcccaaaaggcctacttccgcttgcagacactattttctggatatgatgggtttgggaattgacatgagtgtgaaa

SEQ ID NO: 118864 - DNA, 442 bp, Glycine max
  unsure (1)..(442): unsure at all n locations
gcttatatatataacttatatatatacacttagaattctgnggtttgtgtctaatttctgngtaagctaggatatcattttctgtgaaaaggtatccctatctctattcctctagcatttctcttcctctaaaattgagaacaaattgtcaacatggaaaaagcaagaaggaaggttccacctgaacaatcttcctgctcaaaaacttgattcggagtaacttctcattacaccatattagctgttcttttctcaatttggacatgtttaccacccttgaaatcaatctcaaccccacccgagcaaccaattgctcatgatcaagttcatcctcatggtgcttttggaacttcttcactatgcaattcccggttctcactatgtccttgagccttctctccttctgcaacatgaaaaccaagattgtaagcaattgagagca

SEQ ID NO: 118865 - DNA, 364 bp, Glycine max
  unsure (1)..(364): unsure at all n locations
tttaaaaaaatgaagataaaaataaaatagtgttttttatatagatttctaaattatttaatatgaaatattcaaaatataaaataaaagtttcttgcccgtacaacaattctatttataataattctatttaattcaaataagattacatttaatagaagatacacatcatttaaacaaaaattaaagnttatagatggacaactagaaactaaggaagctatagctagctaagctactacatattaataaagaacaaaacattacaagaaaaggaaataattaaaaaaggtagataaagaaaaaagtgaggtgaaagtttcaaattttgtgtggttccaggcttgcaaaccaatcctccaga

SEQ ID NO: 118866 - DNA, 440 bp, Glycine max
  unsure (1)..(440): unsure at all n locations
gtgtaatcgattacactaatttggtaatcgattaccagtgtattgttttgtatatttaaaaaanatagaactcttcaaatggttttttgactttttcaaattggttttaagtttttctaaaagttataactcttctaaatggttgtcttgaccagacatgaagagtctataaaagcaaggctttgttttgcatttcaagaatcttgaacacttattcatacaatcctttacaagccttgaatctctttgaacttcttcttcttctttgtgccaaaagctttctgaagttttctggttttctaaaccttgaaaacttgtgctattcatcttttcattctcttctccctttgccaaanagaattcgccaaggactaaccgcctgaattctttttgtgtctctcttctcccttttccaaaagaacaaaggactaaccgcctga

SEQ ID NO: 118867 - DNA, 366 bp, Glycine max
  unsure (1)..(366): unsure at all n locations
tcgaccaaacctcaagaagtgagtcaatgttttctttattttctcctctaattgtgaatgtgcatacatataaccatgcatgtatgcttgttattacttacttgcactggtgtttgtttgttgaaaagttacaaaattgatgaggttgcttcacattgatcctggtcttggattatatatcactttttttgatggggtttgtataatttgtcttatccttttggggtttaatttgtctcaagttctagtttttactataagttggaccatgttagtgtgtccaattatccatgaatggtttatggttgttacttgcattagtgatngacgaatttacaatgatggggtggcttgaatgattctatt

SEQ ID NO: 118868 - DNA, 436 bp, Glycine max
  unsure (1)..(436): unsure at all n locations
agctttctattctaatttagaaatccatgattgttccctaatgnttttttttatgggattaagatggtcattgaccaatccctattttatgatttaacaaaattgcctagtgaaggtgtaccttttgagggtgcactaattgatgaatgaaaatttgatttctctgtgcatgatgctcgccggttagttcgcaccaaccaagcggatatgaccggaagacttcttgctggttcattggcttttgagagccgcatcctccattaccttattgttcgcatcttactccctagatcttcaaaccttgctctggtttctgaagaagatctcattgtcatgtgggcctttcataaaggtttacaaattgattgggcacaccttgttagatatcgcatgcataaggcattgcgattgaatgccccattgccttatcctcatc

SEQ ID NO: 118869 - DNA, 283 bp, Glycine max
ttaagtgcttagtcttatctctatatgctagtttctgttatctggtgtttttccttttgagtttgggatgaatgacccttttagaaagtcaacctctcgctgatcgaggccgtacccgaatcaaataaacatgaaaatgcagtaactaggaagtgatcctaggtcgtttcccaacgagcagtgacaagccaaatgttcataatatacttgcagtaacagtaacgatggggggagggggggtcccctataaaactaatattttttaactcaaagtacacctatc

SEQ ID NO: 118870 - DNA, 385 bp, Glycine max
  unsure (1)..(385): unsure at all n locations
tcttagctatnagcnggaaagggaaaattgctattttctattccttttcttactctttccatgtttgttgtattcatgttgctttgcattggttctttgtcatgtttcttttccagctgctggatgagagaaaaagaacaaatgtcttgcggtttcttgaagcaattaatcagtaaatctctctacatatntgcttcctcgtttctaattttgtgtaaatgtagtgttagtatgtgaaatggaaaatttatgtgctgcaactctgttntgccaaattgtaggaggcttgacatttcagatggattaattaatgctattaggctgctatgaagtggctagacgngcatgctnatatatatatatatatatatatatatatatatat

SEQ ID NO: 118871 - DNA, 362 bp, Glycine max
atatgatttatcaaaaggaaatgatttttctttatttagaagattgctcaaagatttggcggattttagaaaaatctttgataaaacgcctgtagaatctgacatgtgctaaaaaacttctgatgcctttgacatttgatggtggcggcgatttttcaatgacttccactttagctttgttgacttcaatgccatgcaccgagattttatgacctagcgcaatgccttcagtcaccatgaagtgacatttctcccaattgagtaccaggtttgtttcaacacaccgttttagtacagtggtgagattagacaaacatttatcaaaagaagatccataaacataaaagttgtccataaatact

SEQ ID NO: 118872 - DNA, 423 bp, Glycine max
  unsure (1)..(423): unsure at all n locations
agcttctaaactttatacaagaatgaaggtcngatccacttgttggacaagtggcctcagatatcttaagaagggggggttgaattaagatatcacaaactatttccccaattaaaattctatttcactttctattcaagctacaaattcccttaacaatgaacttcttaaattataattcaaatagaacaatctgaatataaatatgaaacaataataaataaaagagtttaagggaagagaaagtgcaaactcggatttatactggttcggccacacccttgtgcctacgtccagtccccaagcaacccgcttgagagttccactctcttggaaaatctttttacaagatctgaacacacatagactacccttccttcgtgttcagaattcttttacaacaagagaccctatgtctcttaa

SEQ ID NO: 118873 - DNA, 338 bp, Glycine max
  unsure (1)..(338): unsure at all n locations
aagatgtgttggacgatttattatttttaaggccgagaggatacttgggttgatgcatcatgtatcctcttcatcccaatcgaatactttatccagtatactagtcccgtaagccctttttggccttatccaaagagaaaggccttaagctgcannnccaaacagntactattaacttttttaacagttattctccttaactggnacgaagnaacaggnacatcgnagatgtagtgatgtaatgaatacatcacatgttggctcgacttcccacattgggtaccataacgtctcgtgattacagacgtagatccgtctaatcgaatggtgggtagagg

SEQ ID NO: 118874 - DNA, 393 bp, Glycine max
  unsure (1)..(393): unsure at all n locations
agctngaataatagtaaaaggaattcttaacctatgtagagatttgaacttntttttggtgtctaccatgatagggaccttattcagaaggtcagacaagccttacgtgtattcttttgggaaagattacacaaaaatgtgtaacattaaagataaagaaggcaggacatctgggttcacaggtttaagcatgaaacacactgcattcaaggaccagtaattataactttgctaaacagttggattttcaatcttgagtcgaatttcataaactctgacacagggaaatagtggattcctctacccccataatcttgagatatgcaacatcattgttctcagctcctcaagccattttatggtcgatgtccttgtgctgttcagtttgaaaca

SEQ ID NO: 118875 - DNA, 361 bp, Glycine max
tttcttttctttttttcacggtaggcatcattattattatctttaactaagacaaagttgaaggtgggcaatcatattcgcaatggcatccatctgggaagcatagtccaccagcagttgaatagaatccagtataattcacgcatgcatttgtgcaactcactatatcacatttatctgaattatgcaatagtaaactgcaagtgtgattcgcaaccgattgggtcaccatcaaaactgcaaaaatgaaataaggtcaaggaaatcaaatcaatgtgaaatgtaagtctaagtatgaattaagggaaaaagaagaatacttgaaaaaattgaaaagaataagcgccaataggaaacaggg

SEQ ID NO: 118876 - DNA, 353 bp, Glycine max
  unsure (1)..(353): unsure at all n locations
agaaacgcacacacacattntttcctagtcgatcactcacataaattctccccctttgtttttgaatgtatgcttatcttaaaaataaagtgattactcatgtgaattcttgatttaatcccatttctctccccctttggcatcaacaagaagccaaagtgcgtatcaaacttaaggtatacaaatataacttaaacatccatacaatgttcatgaaaaaaaatatcaaccaaatcatgaagcaagaagcaagaaccatgaaaaccatgaagcaacaaccatgaatagattaattataaactccacatagtcaaataacatacttaatattggtccaaacataccatgcaaat

SEQ ID NO: 118877 - DNA, 254 bp, Glycine max
  unsure (1)..(254): unsure at all n locations
aacncagcttctcttgtacaagcaaaagctttgttttgttttttaccccacgcaaatgccacattctttttaaccaaccctattagaggagatacaattgtcgacaaatcatgaacaaaaccttgtattaacagcttgctaaccgcaggaagctcctaatgaattccgacccctttaggtgtcacccctccttggatggccttggggaggnnaaggggccacatggaccccttttctaccaactacaaacccta

SEQ ID NO: 118878 - DNA, 364 bp, Glycine max
tatctcatgtcagacaccctaatatcttctgtttctatcgatcacaattcacttggagccaacgtaaagtggaccttaacaaggaatatacttaaagtgcataaaaaagtttaataatgctcaaaataggcaatcctagcttaaatcttaccctttccttgatgtcacccaaagtcagcaagtacagcttatagaattcctctctgaatgcaaccacaaacctatataaagtttagaaaccaacaagaataagacaattagaatctgtttgatttgtataaatttaagggacaacaagatacatctactatattatagtattttcacttttaaaggactaaagacgaattattgaccataattg

SEQ ID NO: 118879 - DNA, 307 bp, Glycine max
  unsure (1)..(307): unsure at all n locations
aatagacagaagaaaaagaagacgggntctaatgttcttgttggatcaagtggcctcataataatcaagaagggggggttgaattaattaataatgtgtgtggactaattaaaaaattaatcctcttaacgatactacatacatactcagctgttattactaagttaagaaagtagagaacagaaactcatacttaaccaaatgtaaaagcggctattataagacacagccgaaataaatagtgttggaagagtaaacaacctcacattatactggtttgtacaacccgtgcttcatttaaccccag

SEQ ID NO: 118880 - DNA, 361 bp, Glycine max
tggcagaagatctagacacttttttttgttttgtttcgctatacaagccattgacggcattgatgtgacatttgaagatgttgtacttgaaagcagtgatcaattgattaatggaagatcatttagtccatactttgttgagaatggagcttttcagaatgtgatgcctttttgcactatcaagaagcttgggaaggccaagcaagatttgattggaacaaacatgcagatgaccacattcacaaaagaactttcaacgggggtgggagtactaatagccaaaattaaagcagggccaaaaaaaagtacggttgcaattttgtggtagaatgtgaagccatcatattcaattttgctaggg

SEQ ID NO: 118881 - DNA, 359 bp, Glycine max
tcattggagcttgcaggcctaggatcttcttcatcaatggattcctttgcttcttggaagatgaatggcagcggaatggagaaggaagagagagaggagatgccacttcaaggagaagatgagtctagaagaagctcaccaccatatgaggccatggataataggtcggaggaagaaggagatgaatgaaaggagaggaagagaagagcacgaaattttatgctctaaaagagctctgaaatctgaagtttaatattcaaatgatcaaagttgaaaaaaaatgcacacacatgacctttatttatagcctaagtgtcacacaaaattggagggaaatatgaatttcaattcaaatttca

SEQ ID NO: 118882 - DNA, 262 bp, Glycine max
aataacaaagagaaagatcaaggaacttacttgtgctgcgatgattgatgagaacaaaaggatgcaaggaaaaagaaacaaaacgcacggagagcaatttgagggagagagggagcagaaagggcgcaaatttttggaaagtgggtgtaactgacattgcacccactaagaatgtttcgttctttttgcttatcggcgagggtcgctgagcgagaaggcgacacatttggtttctcaatttttcccgcttagcgggccgcgc

SEQ ID NO: 118883 - DNA, 382 bp, Glycine max
  unsure (1)..(382): unsure at all n locations
ctatannaatactcacaagcttattatangtaagtatacaaaatattttttttattggtttaatgattcatgaataattttcacaaataaattttggaagtgtgcattatgttcaacaaccatgcaacccaccataatttggattgtttcttgtctttccttgatgctttcatccatgatatttgagtccaagtggtatttttttccaatcaaagcaaagcacaaccaagtaccaatgaccaatgttgccatatactagaatgtaatctacaatacatgcaaagcaaaaaaagtatgtgtcattcaataaccttacattcaaatattgatgtcaaaaacataaaagaatggatgcacatgattaatattgttgtatagccaa

SEQ ID NO: 118884 - DNA, 432 bp, Glycine max
  unsure (1)..(432): unsure at all n locations
gctttggagaaccaagccaatcagaatgctatacgaaatatagattgtgttagattgttcaatggcggtaatgacggaccgaggaagaaccgggttgagggagtaaagctcaatgttcctcccttcaaaggtagaagtgatccagatgcctacctggactgggaaatgaagactgagcacgtatttgcctgcaatgactacactgatgcgcagaaagtcaagctagcagcagctgaattctccgactatgcccttgtttggtggcataaataccaaagagaaatgttgagagaggaacggcgagaggtagatacatggactgagatgaaaagggtgatgagaaaaaggtatgtgcccactagctataacagaaccatgcgacagaaactccaagggctgtcccaagggaatntaaccgtggaagaatattat

SEQ ID NO: 118885 - DNA, 357 bp, Glycine max
ctctcgatatgttatgcgtctgaatcggacttgttattttaaattatggccaatttaatttccgagagcttccgttgttcaatatgtagcatctcgatacgctttgtgcctgaatcggacatgcgagtgtaaagttctgaccatttgaatttctaggagagcttcccgttgttaaatgtctagcgtttcgatacgctatgcgcctacatcggacatgcgagtgaaaagttctgaccattttaattacacgagaaattccgttggtcaatttcgagcgtcttgatatgttatgcgcctgaatcggacatgcgcatctaaaggtatgaccattttaattgctagggagcatgtgatgtc

SEQ ID NO: 118886 - DNA, 457 bp, Glycine max
tgcaagcttcaggctgctcaattgctccaggttgctgcatggaagggcattggtctgtatggtggtcagtaaaggagcacaaaccacaaacccttgcgacaagtacaaatttctgattcaaggccagctgggttaccaagttgaccaacgcatccagtttgccttcaagcttcttagtttcagatgatgcagatgggtttgtagctacctcatgcactcctctaatgactatggcatcatttctggcactaaactgctgggagtgggaggccatcttctcaattaaatttctggcttcagcaggagtcatgtctccaagggctccaccactggcagcatctatcatacttctctccatattattgagtccttcataaaaatattggagaagaagctgttctgaaatctgatggtgggggcaactggcacatagtttcttaaatctctctcagtactc

SEQ ID NO: 118887 - DNA, 363 bp, Glycine max
  unsure (1)..(363): unsure at all n locations
tatntcattgtgttatgaagagaaattaattatttttgtctgtaatcgattaaatctacaaggtaatcgattaattcaatgaagtgatggattatattatctttttaatcgattaaagtgttcttcccaaaacctggaaacaactcaagaacaatgtaatcgattagatactaaaagtaattgattaaagtatttttgttcacttctgaaacacttatagaaagagaattaatcgattatatcacacgataatcgattaaagcagaggctcctgaataaatcagtcatagtcacaaaaacaattgtgtaattgattatgataaggttgtaatcgattaaaccgatgcgagacataactctaca

SEQ ID NO: 118888 - DNA, 429 bp, Glycine max
gcttcgcgaaatgattgcctcggcagtcgggtttgatcctgagcagtcgcagtttgtcgacggcaagattaccaacggtacccgaagcgccacgctacatgaagccaccgcaggcggcagactgacagcggaagagagcattgaattcggaacactgagcaaagagtaccagcagtcgacctttgccgggcattttgtggaggtcggcgtgcatagcgcgacgggagaagttcgggtccggcgtatgctcgctgtgtgtgctgcaggacgcatcctgaatccgaaaactgcgcgcagccaggtcattggcgcaatgactatgggcatgggcgcggcactgatggaggagctggcggtggatgaccgtttgggctacttcgttaatcacgatatggcggggtatgaggtggccgttcatgcggatatccc

SEQ ID NO: 118889 - DNA, 368 bp, Glycine max
tttgcagacgtaacgtgtgggttcgatagttgcttattgcgccgagataaaagggttttgcttctcgcgcggcctgcaacactggcagctcccggttgagatcatggcacagcaaaatgaccgccgtatcggtatcgatctgagcgctggctgaggccggaaaaagatcgaagatatggctgtcatagcctgtggctgctgcaagactcgcggttgcctgcgcctcaagagaacgtccgtaaatcatcagcctgacgcatggcctgaaccccacctcaaagccattgagattccagcccgtccgggtttgcgtgggcaggcacaccagcgattgtgcttgcggatcgtagcgcagccccaccggtttt

SEQ ID NO: 118890 - DNA, 456 bp, Glycine max
  unsure (1)..(456): unsure at all n locations
gcttgcccagagaaagagtccacggaggatatgcttaccacctcttaagactggaaagcggtttctaatgactcctctgcggcctccacataaggcatagaggatgggcagctcaccaagatgtcttcctcgcctaatacgatgaccagatgcccttccactacgaatttcaacttttggtggagtgtagagggaacaactcccactgagtggatccacggccgccccaacagacaactgtagggggggttaatatccattatttggaaggtaacttgacaagtgtgagggcctatctgtaccgggagatcgatctcccccttaacctctcggcgggtgccgtcgaaggcacgaaccaccattgaactcggctttaggtgggaagcattgaatggtaatttctccaaagtgctcttaggcatcacgtntaaactggaaccattatcgatgaacact

SEQ ID NO: 118891 - DNA, 365 bp, Glycine max
  unsure (1)..(365): unsure at all n locations
tgccacccagctcgcccaggcaagctcagctcgttctttcgagctaggttgcttcctccagaagcaaccgtcttctataggaatattctggaaggcccaagtggtcctggttgctatttgaacccccatttntactaaatacacccccttgctctttttggtgattctttttccgtaacgttacgaaattcgtaaaatttcataacgatgcttgttttgtttccataatgttatgaaaccttacagattatgcaatcatcccttttttgccttcagaaacgttatggaactttacggattgcgcactaacacttccttttaatttcctgcatgtcacggaactttacggattgtgctacaatgcc

SEQ ID NO: 118892 - DNA, 216 bp, Glycine max
  unsure (1)..(216): unsure at all n locations
attcttttngtggatcacttgtgctcaagttttcttccatgacagaagttatggccctgggaatctgttcatagcttacttgtggagtatcaagcgcctccatatatactgtgatcgaagcggacatacagcaggacaatgctcacatattctttctatcgagaacttgcacaagacattctatgagcgaatatatatgtcatgggccacaatcat

SEQ ID NO: 118893 - DNA, 364 bp, Glycine max
ggacacatagaaactcagctttaccttggactaggcctttttcatttttatggcggacacttggagaagagcaaacatggccttgttcgaattagaccataccaaaagtcctccaaaaccacttgaatgttccatgaccctattccaagcccttgacatacgctgagaagaaaaccaaatggttataacttttaacacatatttgacaaccaggcgcacaatccattgagacactccatacacaacacagatgctctggtcccattacgacaagtcctactttcgacatgggtgaactattgaggggcctgatctatccaaacgaatgactaaaaacaagccgtagatgacctaaatgcccatg

SEQ ID NO: 118894 - DNA, 439 bp, Glycine max
  unsure (1)..(439): unsure at all n locations
agcttgcatgatttacattctccccctntttctatcaaattcttaattcttcttgacatcatcaaaatcttcatcatcaataatcttaagagggataggcttaaaatacagaagaagcaacaacaatcaatttaacaatgttctttaaacatgcaagacacaattgattgcaaaaaattaaataagataagggaagagagaatgcaaacacagttttatactggttcggccacatcccgtgcctacgtccagtactcaagcaacccacttgagatttccactatctttgtaaaatccattacaaagtctgaaccacacagggacaacccatcccttgtgttcaggaatcctttacaacaagagactcacagtcccttaaccaatctcattgaataagaagaatggaagaagaattctctcttcaagagaagaatattac

SEQ ID NO: 118895 - DNA, 360 bp, Glycine max
tgtcactattgaatgggattttgtgtgtcttcttattaaagaaagaggtctcgggcttaggtctattgttcttatcaataatgcggcctcccttaaactttgctaaaattttgtccatgcagatgaggaatggacgcattttctgcaggccaattttctcaaaaacacaaaccatctatccttttacaagaaatcctcgctttggccttccctcaataggcactttgaggaggtttgttccaatattggttgggtccttagtgcaggagctttaactaacttttggaacaattattggtgctcgctctctcctttgtttgcagctctttaacctcccccccctcggtcagcaagttgtta

SEQ ID NO: 118896 - DNA, 388 bp, Glycine max
  unsure (1)..(388): unsure at all n locations
agcttaaggatggaacacttacttggtggttatgaacaataacgcaaaacggaatcaaaaaatgcgaaaaaggatgaccctaaggctgcaaactcgtcaatcccgtgggtatggcttttgaaaggggggaaaagaagtttttgaatgtaaaaacgtccccccttccgtcattcttataatttggtgcaggggtggctcgcccangcgagctaacctgcacttttttttttttttttttttttgaggggaacattaaccatgtcccctcccttctcatggattagcatcttgcctaacttgaacttacttaagttagaattaggcgctgattacttattatttttttactctttaaaacaaacaaatagtaaaagaaagctgccaaata

SEQ ID NO: 118897 - DNA, 362 bp, Glycine max
tgcaagattacttcagtttgatcaaaattgtttattttatgaaaatttattttaaccaaaatatgtaggcttttattattctttttattgcaaattatgggaatgcaatctttgttttgtagtgccataaccccacttgtttgttcttcaataaaattttgggctctgtttttctaaaaaattttgtagagaaagtctaccattttttctatttggtttaatctggttcccaaagtggaaatcctattattcataattttatttcctgaatcattttccttcttaaaattaggaaaatcagttttcaaagctgtttgtacgcaagttttgtaaaaattcttgtagcataaactacaatgaac

SEQ ID NO: 118898 - DNA, 333 bp, Glycine max
tggcgggcgggcgatggggctcaacaagtatttcacatccactaagcgcgcattaacccaccatcccctgttgcccacctgctactgagctcacgtactcccacgctacccatatcactcgatctctcaacaccggggactcattaatccttccaagcttggacaacatccgagcaaaacaacatttatacagcacaaactaccacattcttgaaaacagagcaaaggcagaatcgcagcttttctcacttatagaccccagtaacaattactctcctccaattcgtttaccgctggaacgacctcaaaattctactggaagtctgtagtact

SEQ ID NO: 118899 - DNA, 362 bp, Glycine max
tgagaccgaagcgacacaaaaactacgtatctttgacccctcaatttaatggattttcaacgtgtgagacacgagatggaaaatgaaggaaatatagagcagactctcaccttacacaagtctataacatcaattcaaacatgcccaaactggattgacacctaatatttcaccgaatcaaaatttgactccctaacacccaatattcaccctagaaatgactctatggccactcgggcatgtgaatctctcacttgcacaggccaagctcctctcatgagggctaaatgacataccaaactaggattaactcactctgacctcccaaggccgctaaatacagattagggccttcaactctg

SEQ ID NO: 118900 - DNA, 356 bp, Glycine max
attaccatatatggcgaatcgattacacagtgcaaatgttgaattctaattctaaaagctattgcatatcagctttggctcactggaaatagattacatactctggtgatcgactaccatagagtcaatctgttgaaaaagactctttaacttataattcttgggcaaaccatttgctacttcaataggaattccgcttctacttaatgtaccctatctaagatgctagagactgtcttgattatgcatcttgaatatctttgatttctttgtcgtgagaaaagcattaggatacatgtaatactttggcatgattaaaacatcaacttgatgcttgtgctacacatctccccttt

SEQ ID NO: 118901 - DNA, 347 bp, Glycine max
tctgttttcaggttcgagcggctcgatatattttcttactcaaggctacatccgaaggggaatgtactctcggttccctccgctccgaagttcacaactgaatctccagcgtctagaaatatcacgggacgacctcaaacgaccgagaaaaacgctactgcctttagaactcacaaacaacctgacatcccacggttgaccgagctcaatatctccaggactgactccacatctcgacataaaagctatggtctacccaatctgccgttagcgttaacatacaattctctgcgagcatctccatgcatttctggagctaaacgggcatcccacgattcagttcttga

SEQ ID NO: 118902 - DNA, 348 bp, Glycine max
  unsure (1)..(348): unsure at all n locations
aacgacaatatcttnttttttctacgnccgaccccacacccaagacggatccagacacncnaaccccccccccccaaccncngagccaanncaaacgacaanaaccnncgacccgaagggccgaacgagcccacaaagagaacgggacgcccgaaaccgaacggtaaagctcagagcaaatgcaaacgacaaaaacaattttctcgtatgtttgattgagtcccgtaatatatctagacgctcgaaattgaatgttgaacctatgagccaattcaaacgacaataactttttactcggatgtctgattgagtcccgtaacatatctagacgctcaaaattgaatgttg

SEQ ID NO: 118903 - DNA, 359 bp, Glycine max
tcaagacttggtttatgttaagtataaccatgctcttctagatcgctttgtgtgtcatgatgtgattgatcctattgctttaaatgatattgatgatagcaatgagtggttattggaagaatcggaaggagaagaagctggtactgatctggtttttgatgaggatgatgatttgaattggttagatgtgctgaggcaactggggctggtgaacctttacaaaacacaagagtcaaacacatataaacaagacagcagccgcacttgcacctacaatgaaaaaggaaaaaaagtggtggaagtggaagaagagaatggagatgagggggaagaagagtacaattataatgctagtgaga

SEQ ID NO: 118904 - DNA, 389 bp, Glycine max
  unsure (1)..(389): unsure at all n locations
ttaaacgcttcccagccttcgtgaaccgttggatcttcttgaaatttggtctgaaacttcacaagacacttgtccatgatctgaccgttgggatctttgagaagatgactggagtgtgctatgagcttccgttcccgagagcatgtattatttaagcatatcagcctttgctttcgtgtagcttaggaaagatgtcatttcttctccgttctttcttccaaagccatttctaaagtcccaagcactttctgcatcacccatagccaccattagccaccacaaaccatctgtgttctccattgaaaccccacaccgagaggaacccttcaaccgaagcggaatcttccaacttggcttgctgtttcggtagagaacanaaccctaatctg

SEQ ID NO: 118905 - DNA, 361 bp, Glycine max
tgcatgattcacattctccccctttgtcattcaaattcttttttgatatcatcaaaacctgcatgatttacattctccccctttttgatgatgacaaccacctgtaggttaggagcaacaagaaagaaaaaatatctatttgcatatagtttactcccccttggtttttcaatgtttgcttatatgagacaattgaagatttcatatttttcatatataaaaagttgtctcataaaaaatagatattttttcttactattttatcttttatcttttctctccccctttgtcaacatcaaaaacaaatcatgaatagagaggagaaaaaaaatgttaccacttgttgtaatgtatgagaatc

SEQ ID NO: 118906 - DNA, 178 bp, Glycine max
attttcgaatagctaatggttgaatttaagataaagatactctaaaaaaaaattaaatgttttcacggaatattcccctataagtcactttcttttgggacaaaaacaatggcattgcatatactatggataaatcctctccattcaaagcttacatgtcaccttatttctcaatgta

SEQ ID NO: 118907 - DNA, 194 bp, Glycine max
ttctctctcgctttctggaggtttcttgggcctcgaataccaaatattacagtggtgctttcattgagcatcaatggtggaatcaacgcgatctaatggatcagtatattgcctcgatgacgcaattgcaaaactcacagcttcacaactcgccatgaactcaaagatcgatgaatctctccaccgaatgtcgc

SEQ ID NO: 118908 - DNA, 285 bp, Glycine max
gtgaagatctacaaagacgtgagttcgtatcggaatccgttcttaaagcctgagatgaatgtgtgagtgattgtgatatcctataagggaaggagacatcctcaccacttgtgtttttgcaatttttcatcttgctcttctctttgttgtaaaagaagtttccggactatggaaagctaaatcctctattggatcttccctataagtacccgatgtaaatatatttctatctatgtaatgatgatctctgtgttctctgtgctatttgcttttctttcaagtgtg

SEQ ID NO: 118909 - DNA, 321 bp, Glycine max
gatcatctcgattagggtgcacccaaaagaccatatatctaacgctggttcaatctgaccaacgaccgattctggtgacatgtaaaaaagtgtccctctaaacttgaccttcccatactcaacatttgcatcttctctagtcttggacaacccaaaatcagcaatcttcagttgataccttgcatgatcatcagatgaaggaaagagaaggatgttgtccggcttgagatcacaatggacgactccttttcgatgaatgcaagaaagccctttgagaagcatacgaatgtagactcttacttcactatccgatattggccc

SEQ ID NO: 118910 - DNA, 293 bp, Glycine max
tatcggtttctttctggcttagcgcattgaaaaaatcattattctagtcgtttaaccaaacctgaattttaaccacgccaaggatcatggcgaggataataatgattaacaacactgaagttttattattcttacgcagccaaaatggcttcaacagacagagatactttgctatcaacatacgaagcgtaatgggaatggttatcattagcgaaaattgattgtgccatccaatgattatctatggcaatgatttactgatgaaatttatttaagtatcatttaacaatatg

SEQ ID NO: 118911 - DNA, 351 bp, Glycine max
  unsure (1)..(351): unsure at all n locations
tacacttgctagatagagcaaggcaggtgtgacaatgttttcaagatataccagagctgatgactttagtccacttacatgctaatgaggttaggtgatcttattggttcaagaatttaagtaacattgtattatgatatgctcaagttcattatcaagtaaggaaaggtggagagttgtcacttcatgaaactacaataatgttggtacaaggggcttaataattagcataggtcacagctgaataccagtctactctggaaaatagacaaatatttttggtattatcttggtnaatcatcaatttgatatgtttctacttatagcaaattctatttggatcattctttt

SEQ ID NO: 118912 - DNA, 394 bp, Glycine max
  unsure (1)..(394): unsure at all n locations
tcaatgtaggtcattcaaatgaaaggtctgtgggtataaaggattgacgttgaggctgctcccacgtatgatatctaaaatggactagcataacatattcctgtgtcagagctacttatgtaaaagattattttacaaaactcaaatggtaaaaacaacattcatggggcaaatagacaaagctgatacaactggtatccacaaatagaagaattcacacatcagttcacagagacgcatagagagaaaaatgaaccagctattatctattgattaccgaaaatagtgtctcagcactctnctctacaatgagtntccccanaaaatacctctgcaatatctactgcaccactatgtataataattaactactagctgcctaactcctagcttc

SEQ ID NO: 118913 - DNA, 400 bp, Glycine max
gggctgtcttcactttattgtctcaaccgcgagctttgactttctctcttacttcccgcgatgcttctattgatatctgcctgaatgggcttatatcctaaaccatacttcccacaatttcctttggcatttatcatgctaattatgccgtcgatgtctttgcctaaacgaattcctggttcgtaaccgttccccaacataactcgggccatcattactgctgcatcggacatgcaaggctgcccatataatgagtccacggatgaaatgcttaccacctcaaaagactggaaagcggtttctaatgactcctctgcggcttccacataatgcatataggatgggcagctcaccaagatgtcttcctcgcctgatacgatgaccagatgcccttccacta

SEQ ID NO: 118914 - DNA, 370 bp, Glycine max
cttttttgcacctatatcctgctcttatggacacttgattgaaatatggtgtgctatgatatgttgttgaacagtctgggtcaagaaaaataagctttcatgtcatacatttgcaagcaagttttaacgaagctaaatttatttgcccaactgaaaaaaatgcttgtgtattgttgctttggaaaattatatcttacttgattgatctaagttgtggtttactgatcatgctgcttaaaatattattggtcaagctgatcttaaccagactatctgtggatttactgttgaggaattgatttgaaatcaggataaaaagggaggaaaacatgttctgatcattttttgttactatgatgaggacacacaa

SEQ ID NO: 118915 - DNA, 253 bp, Glycine max
tgcattgtccgtctcccaatgatagtgtgatccttatattttgggagaaacgattatcatttacgactgatttttgcatgaatctctgaatatggactgtatgcatgaaatggaagatgatgaacggcatgtttgattgttctagccacttatccaaaaagctgaccatgtgcttgaatgatttataccttgcacccaacttgagctgaatgaattattgattgattgaaccctgaacctatacaacactatc

SEQ ID NO: 118916 - DNA, 341 bp, Glycine max
gcctttatctcgctgaggcttcattgggtgaacttccgctaacttcttcctcttctgtttcaaaattgttgacttatgctaagtgcatctgtgtgtgtagcctattctgcagaaaaaaatatattttttgtcttcgatactaatgccacactgccgtgcttaacgcttgagttaatttcataaggcgcgctaagctcatcatgctgcgctaagcgctcagctctatttttagtttaaatttttctattttcttgagaataagccagtactaatctattgtgttgtggcttatattctgcagatgggttctaggaaaagaaaagcaccctcacaccttccca

SEQ ID NO: 118917 - DNA, 319 bp, Glycine max
  unsure (1)..(319): unsure at all n locations
gcaagttaaaaaaactcttcanagtttaaatgttgtttctacttcaaaaccttgtgaacttcttcacattgatttatttggtccctctagaactatgagttttgggtggtaattactatgtgtcgcaacctacccttcggcgggagggcgacgcgagactcgcgggatgcgtgttccatgaaaggaatacgcgcatagtcgccaccaacatttatttgaggaaaacgtcggaaaaaccggaaaagatgcgatctacgaacttttaagtgaaaggttcgggagttgtatttacgcacggggaatgtattatcaccccaca

SEQ ID NO: 118918 - DNA, 253 bp, Glycine max
gaatatattcccttgatttctcctttgagccttgttccctttccttgtttttaaactcactacaagccttttatgaaaaaccatgatatcaccatattcttaatgaattttggagctttggaattgctttgggaataagtgtgggggggtgttgtctcattggataacttgttttgttggctatgcttcatgatgtattttgggccatacttgatgtacattgtatattgggtaaatgttggacatgccgaat

SEQ ID NO: 118919 - DNA, 177 bp, Glycine max
gattattggttaattataatcctgaataaaaatggagtggataatctaaaatatttagaagtttattttggttgatgaatcattttcacaaatgtatagtgactacctgaatgtttaatcttaattcttaaattttaactttttgattaatcattccgattttcatatgatacatct

SEQ ID NO: 118920 - DNA, 450 bp, Glycine max
  unsure (1)..(450): unsure at all n locations
tcaggttgctcaattgctccaagntgctgcatggaagggcaaaggtctgtatggtggtcagcagaggagcacataccactaacccttgcgacatgtacagatttctggttcaatgccagctgggttaccaagttaaccaatgcatccaattttccttcaagcttcttagtttcagatgatgcagctgggtttgtagctacctcatgcactcctctaatgactatagcatcatttctggcgctaaactgctgggagttggaagccatcttctcaattaaatttttggcttcaagggctccaccactggcagcatctatcatacttctctccatattactgagtccttcataaaaatattgtagaagcagctgctctgaaatctgatggtgagggcaactggcacatagttgtttaaatctcttccaatattcatacaagctctctccactg

SEQ ID NO: 118921 - DNA, 251 bp, Glycine max
  unsure (1)..(251): unsure at all n locations
cttatctcagctatgtaagcacatcagaatgcaaaaatgaatctattanggagatcatgatatggtattgtaagcgacatccttggccaaaaagggtttcattgggatggcactaagcacatgatcacagttgaaaatgaaaaatgcttggaatgaatattgcacttgtaggattctttactatattgctatttgttattcaaagcagattgganttgactttttctttttttcccatcgcataaattggc

SEQ ID NO: 118922 - DNA, 439 bp, Glycine max
  unsure (1)..(439): unsure at all n locations
gaatttctcaaatatctgttcttttcaacacttattgttctccttatgaagttgtttgtggttttaacccactaactccacttaatctcttgcctatgcctaatgtgtctgttgttaagcatatagaatgtcaagcaaatgcggactatgtgaagaaacttcatgagggagtcaaagatcaaattgagaagaaaaataatagctatgctaaacaagccaacaaagggagaaagaaggttgtcttcgaacccggagattgggtttgggtgcacatgagaaaagaaaagttaccggaacatatgaaatcaaagcttcaaccaatgggagatggaccatttccagtgcttgaaagaatcaatgacaatgcttacaaagttgatctgcaccgtgagtatcatgttattntcaaccctcaatgtctctgaactatacttttttg

SEQ ID NO: 118923 - DNA, 248 bp, Glycine max
cactcatcttaacatcacaccacttgcatgtgctggaactacttcacatggacttgattgtgcctatgcaagttgaaagccctggaggaaataggtatgcctatgttgttgtggatgatattcttcagatttacctgggtcaactgtatcagatagaaattcagaaacctttgaagtatttaaagaggtgagcctaagacttcaaagaaaaaaagactgtgtcatcaagaaaatcaagaatgaccatg

SEQ ID NO: 118924 - DNA, 259 bp, Glycine max
caatgataactgcactttctttatcagtactgttgcccgtgaatactggagcaataactttcccgactgctccaacatgtgccatgaaccgactagcgtgggtttggcagcgagtatcggtgtaagtaaaaggaccatgttgctggaagactttgataaatgcgatttattcatttgcattgggcataaccctggtacataccaccactccatgctgtacttcttgcgcgccttattgaaactgggagcgaatatgatc

SEQ ID NO: 118925 - DNA, 316 bp, Glycine max
tcgaagggaagagatagaccaatcacgagcacatagcatgttcttgaaagatgagttagctgcttgctcaatgcccaaaataaacttgcctcagtgtttatgcgagacagagaccaacatgttcgctatcgtcagcatgtaccaagaagaactaaatctagccactgcccacgagcacatagtggtggactagtatgcccaagtgtacacggaaaaggaggctagaggaagggtgatcgacgcgttacatcaagaggcaacaatatggatggaccgatttgctcttaccttgaacgggagtcaagagcttccccga

SEQ ID NO: 118926 - DNA, 273 bp, Glycine max
  unsure (1)..(273): unsure at all n locations
ngaccaggaattatttggatgggttggatgttgaattcatgttgttcctggtgcggagatgatggtactgcgggtgaaccataagctgcagtttcttttggtgaggtagccatggaaaagcaaagcgtttgaaatggtttcgtgaatctcagaaaactattgggaaatgctggtgaaaacacgaatgccaagcagatataaatttgaatgaagaatgtagaggggcgtgtgaagcaacggtcgaatttgctttgtagtgaacgtgctattaat

SEQ ID NO: 118927 - DNA, 305 bp, Glycine max
  unsure (1)..(305): unsure at all n locations
cttgaattcattctatgaacccttatgggttcattcntgctttgtatgtgttcatcttcatctcgtctactttcggtattctttttcttcgctttaaacgagttttgaccaatcgtttaaaccataatctcacttaatcgatgttaaaatgaatttcgaccaatcgtttgcgttgttatctcatttaattgcctttaaaataaaatccaaccaatcggttatattgtaacctcagttaatcatcaaaaaggaaagtttcaaccggacatttacctttgaaattctcttttaatgagttgagaaat

SEQ ID NO: 118928 - DNA, 233 bp, Glycine max
tcaagccgctcaattgcttcaagttgctgcatggaaaggcataagtcccgttggtggtcaacaatagagcattatccacatactcttgtgaccggtacaaatttctgattcaaagcccactgggttaccaatattaccaatgcatcttatttgcctttaatcttcttaatttcaaatgatgcatacgaatttgtagcttcctcatgcactcctctaatgactatgacatcatt

SEQ ID NO: 118929 - DNA, 337 bp, Glycine max
atctccctaagagttctctcacgatgtggaggatgttccacgttctcagtattaaaattagttttggtatgctcgaaatcagaatattcaaaatcaccactcacatattgctcagaatgctgataatgctcataatgacctagatgcacactatgcctaactaatctatgaaaggctctatctatttcacgatcaaagggttgcaaatcacctgtattgacccttgtcatgcactatatgcagcacataatgtgtgtcccaacagctgctaacaatggggtaaaactacgactatactcaaatgatatcaaaataagctgaaattttgtgaggaaca

SEQ ID NO: 118930 - DNA, 337 bp, Glycine max
tcatcttgctcatagttaacagctattataattgaattttaaaaactttttgagatgtaaatgagagagaatctgtaaaagttgaagtggtaaattaaatttacttatgtatgttagcttcgtatttacatctcccgtaagttgtttttgagaaggttatctaaacaaggcccaattgttatcatatcattttggtcctttattgtggctattcagatgtgtctgtcccaactttttctgagcttctctttgccttaaaaggagatgctagactgaacacaattattaagaagttctaaaaactaaaagtagcgctttattaaaagaaaagttaaaa

SEQ ID NO: 118931 - DNA, 164 bp, Glycine max
catatcgagcatgtcatgctttttttgcttaatcacatcggctaagaattaaacattcaaaataatttcacttttttcgggcttaaaattgaaaatactatgatcaaagtattgttccaccgctatttatatgaactgctgccgctgagacttaagatcccgta

SEQ ID NO: 118932 - DNA, 192 bp, Glycine max
tttacctatttttatcttcagccattggggccatgattttttttttttacttaaagacactttgttgtgggagtcagaaaaatccctatttagtctcctgaatgtgtgacaaccggtcacagttaaacacaattgcattctgaggccaccaattcaagctatttttgtttgcaccgtaaagggttgtctgag

SEQ ID NO: 118933 - DNA, 308 bp, Glycine max
tcttttatctccctcattgggctcggatattcttctttaagaaagaatgtgagttatccatcattggttttgtttgaacaccatattcctctttctgcttcttatattatgacttatctccattgatcacctctatgggcgcatattattgttattacctctcaatgtgctcaaactacttggaatgcgaagccccctctattttagatagtcctcctctaacaacaataaactacagacatttagtgtgttgatcctaccatcaggttaacatttgattttctagaaattttgctttacctcattcc

SEQ ID NO: 118934 - DNA, 420 bp, Glycine max
  unsure (1)..(420): unsure at all n locations
acagtcttttctccagagacttcttccaaaacttcatcacctagcgttaacaatattatactatgcgcacttttcattatcatattcttctatgcagatgttagctcggttggcaactttacttctcctttcaacgccaactcatatgcttgttgtgtgaagagagcgaacattntcacccgccatagatggcaattattgttactagtaaatttctcaacgtcaaactttgcagatgccatatctctgataccaattttttgtgacaaattttgtttgacatagaaatgtaattatacaaactattattattacaaagaagaatctctctcncgagaaaagaatagaattccaagaacaatttgtttgttttcttatctctagaagatactctaaagaattgatcatctatattttttt

SEQ ID NO: 118935 - DNA, 297 bp, Glycine max
acactatagaaatactaagcttagtggctacgtgtaccggcaaatcttattgcgtttactgtacagcgctcgcttcccgatctggcattgacagctcataattgtcccccatgcagatcaatgctcgagcctgccccgtacatattgcttgcatgctggctattgcatcatgtccaagtgcatgaggtggggtgaagccatatcgctcacccagacgagccataaactctgcagacggtttctcggtgataccgacagtgtcgtcgccctgtacattaaagtgtccacgtagtgggc

SEQ ID NO: 118936 - DNA, 254 bp, Glycine max
tctcgcattcacacctggtatgatctgatttctggctttcttatgcggtatcaatacaactctgacatggctcccgaccgaactcagctgcaaaacatgagtaaatgaaaacatgagtcttttaaagaatacactcagcgttggagggacctatcagcgcaagtggcccctcccatggtcgagagagaaatggttactatgatagtggataccttgcctgtattctactatgaaaaattaatgggcttcatgcc

SEQ ID NO: 118937 - DNA, 221 bp, Glycine max
gaacaattcacttgtgcgtaagtgataaagacagtgggcaatctaaacattatggtgtttgattgatcaaggacatcaaccatatgaactgaatatcatggaatgcctaaatcaatcacttatcacaagcatgcagttggtgaaagataggagcacaagttttatagtcacagctgaaataagctactaaacatgacagaaatcaaggaaggatcatcaac

SEQ ID NO: 118938 - DNA, 256 bp, Glycine max
atatactctttgaatgtggtgcttaaactgttgtgaacattccttggtttattatctatattttggtacaatttttgttctcactcccttaaattattgtgttggagaaactatttgttctttatgtcattgtttacatgttggcaaatccaatataagcttaatcggtggagccttaaaaaacatttaagtgatatggattattcaagtcttatgattttttggtattagtgagcagtctaagattgtatattgg

SEQ ID NO: 118939 - DNA, 255 bp, Glycine max
actataaaaaatgcccacaattcttttcttttattagaactcacaaaataaccatgctttgtctgcatcagggcaaaccaccaatgattgaaaggatggccaaatctcacaagttactcatacttcaatgtcttaaacatatgacagtaagaaaaagattcagtccaaagtcaaactttattaaaaaataccttttgactatcttgattaaaaaactgcaatgtctgctacgatgaccaatttaactaaatcaca

SEQ ID NO: 118940 - DNA, 228 bp, Glycine max
aaaatgtataaatagaagtttagttgcctacatcagcatggactaaacgattaagacttcataacattatttacaacgtcctaaactctggttaagggtgtaactcgaccccataaaatcaagccttgtaggtgattggccaagttttatgagggttacattgtccatatctttagtccatgtggaactaaacatgctccctcacactcagcacaatgaagatgctct

SEQ ID NO: 118941 - DNA, 113 bp, Glycine max
aaatcggtatgtatattgcaccatcctcttgataccggatgtatttaaatatggccgtttttattaatatttttcgtaatctctggttggtggtcggtgattcttcatcttta

SEQ ID NO: 118942 - DNA, 439 bp, Glycine max
  unsure (1)..(439): unsure at all n locations
tcagcgggttatcatgaataagcnacgacaaggggttatgtctaaattttgaacattatatatccagaaactattttaacataacaatttaaataaataggacatattataagaataaacataaggcttatattagttatattctataatcaaatattaattctttagtaacgggataactcttttgtttatgcaataatcgatgacaattgcaaaagtgtgacacacagagtgaagcttaacaatcattaagataggatctcaatatgctattttccttgagattcagatctcctaactcttcacttataatgagtttagagcacaacttcgacatgacatgaataccgttgcccacaaaattgggcttgaagggttgaaccacctangaatgttaggctattgcattatcatatataagttaattactctctctttt

SEQ ID NO: 118943 - DNA, 266 bp, Glycine max
tcacacaaatcgatttgtctcaaacacgagttttggatgacacaatctgaagcacttcctaactagattatttaaatgatgcatgttaatgtgtgcagtcctacgatgccacaaccaagaatcatttattgttcttaccaaacaaatcaactcatgaaatgatgcatgttcaacatgtaacatatatatatatatatatatatatatatatatatatatattacctattatccttcaatgtggaaaaccttacatggcttcactta

SEQ ID NO: 118944 - DNA, 181 bp, Glycine max
agatcattttgcgaaccaattatgcttaaactaagaatttagaagaatctttctcttattcaaccctgcaattacaagcaacacggtttcgtcccctaagataatggaatgtttcacgaggaaatgtactttaaattggacatacacacattcccttaatcatcataaactctagtatagc

SEQ ID NO: 118945 - DNA, 368 bp, Glycine max
agatgcagctgagctgtgctttttgccccttcttgatgatgaagctgaagctgatgcttatggcagcaaattggatgaagttgattaaacttttatatcatgcagaacagaattggctatgttttttcctcttttttcctttcagattgctctgacagtgtttaatggataattagctaattagctataatttcgtggttctatttgcgagttgttggttgtagcctattttttttagtaggatttccggcgttttctgaaattcatgataattttacggatggctttgctaactgaacagatcacatcttaattctgttataaaacatattattctttctaactaaaaacatgattgtgttatattg

SEQ ID NO: 118946 - DNA, 296 bp, Glycine max
  unsure (1)..(296): unsure at all n locations
tcaatctcagctgtactttcaatgtctttcatatctattagtttaccttttcatgaactgtgacagttgtgtactttcgataatgttcattcatttatagagttgtctaccattttcaatgtgctccaaagaaagaaattattatatacctaagctaaagaccttctattggtgtcatgaacattttttttttaaatgaattaagagttttntttttggttacaatcaatcacacattggataatgtctcctacaaacaatcaaacatgcgcagcttctctaaagtctcttctaat

SEQ ID NO: 118947 - DNA, 270 bp, Glycine max
atcgattcaatgatttggtatcgattaccagtgtgttgtgaccgtgaaattcaaatttgaatgtgaagagtcacatcccttcacaaaaaagctttgtgtaatccattacatcggtttggtaattgattaccagtgatagcttctgaacaaatcaaaagatgtaacttttccaatagttttcagtttttctaaaagttgtaacttttccaaatggtttttaagtttttgcaaaagttataacttttctaatggttctcttgaccatacatg

SEQ ID NO: 118948 - DNA, 178 bp, Glycine max
ctattgcttattttaatgaaaaaactcatattggcaccctcaattatcccaactatgattaagaaccttatcccattataaagagccctccaacttgggaacattacccttgttccaaagaatttgtcattcatagtgatcatcaatcactaaagtacattatatggcatagcaagtt

SEQ ID NO: 118949 - DNA, 379 bp, Glycine max
  unsure (1)..(379): unsure at all n locations
tctnnncccaatttctataaatatggggagatatgaagtatataaaggttcatccccttaagcacttctctctctttcgaatatgcttaagaatattgattccgtgaaaaaaatacaagccgatgcgctttcgttaacgtttcgtgagtgatttcgcgaaggttttcgaccgttcttcgacgttcttcatcgttcttcagtcttcaacgggtaagtacctcaaaccaagcttttcaattcattttatgtacccgtggtggtccacatttgggttcatgtatttttattctcgttttcattacttttatacccccttttgagtgcttaagcattttattaagtcattttcgcttacctaaaataaataatttcaccgatc

SEQ ID NO: 118950 - DNA, 302 bp, Glycine max
tctgcaatctggattgcatgtaatggttggaacactgtgtttgtttatagatgaaattcctttagtgcatagtatactgtaatggttacaaaactttgctcttttcactggatcattaatgtgtgggtctgttttcatttgaattcatgatgactgatgttgtgcttcctatttttgatcttgatatgaaattctttcaaatagcaattgttgggcgcccaaatgttggcaagtcaagccttcttaatgcatggagcaaagtatgtcacagtcattttacctatttattgaatcttttctgt

SEQ ID NO: 118951 - DNA, 250 bp, Glycine max
  unsure (1)..(250): unsure at all n locations
ctatgcttccatttttctgcatttttgttcactccctacaagtaagtgccacttcccttttatctttggctttccattgtagtattttaatgcattggttgcttgctttttgcaaattgcgtgagatgaattatgtgtgaattcatgcttgattggttgggttggggggctatangggatggccgtaggcctattttgaattctgagatgaatgggcatgtcacaattgccctattcctcatttttttca

SEQ ID NO: 118952 - DNA, 230 bp, Glycine max
tttcattgccctcatgtattaaaagtatatgaactatggacttaatttgacacattgtatctttgaacaaaaaccatattgtccctatgaataaactaccaatacaaattttatgggcttatatggcagcatattgtactcaaactcaaaaagtgaaagaattatcacggtcaaaggctgatcttaaggacactaaagctgccttagtcaaaataaattgtccaacatta

SEQ ID NO: 118953 - DNA, 274 bp, Glycine max
accttattctctaagttgtggatgaatggcacttgtttatgatgagaatgggaaggggggggggggcgcttttcattctacatatgttcgcttatgacctactgttctgaaatgctacttctacatcataactattgccttaatgactgtcactggactcttttacaaactctccaatgaacaaatgaatagagaataatactttatcttcttctccaaatatggttatggctttactaagataatgtgtgtgcactatgtcccaatccaagga

SEQ ID NO: 118954 - DNA, 310 bp, Glycine max
gagaaaattcatacaacaattaactttttcacagatatctgattgagtcatgtaatatttcgagacgctcgaaattgaattccgaagctttgatcaaattcaaacgacaattactttttaactcgatgtctgattgaatcccattatatatcgacaatctcgaaatagaatcctgatgctctgaacaaattcaaacgacaataactttttactcggatgtctgattgactcccgtaatatatcgagacgcttgaaattgaatacggaagctctgagcaaattcaaatgacaataacctttttactcgatg

SEQ ID NO: 118955 - DNA, 313 bp, Glycine max
gctctcgagaatctcaaatgttcattacttatcacacggaggttcgattcacgcgcattatatttcgagacgctcgatattgaacaacgaatgttgttgagaaattcaattggtcataacttgtcacacggatgtacgattcaagagcataatatatcaagattctcgaaattgaacaacgggagctctcgagaaattcaaatggtcataacctgtcacacggatgtctgattcaggcgcattatatatcgagacgcttgaaattgaaccacgaatgctctgcagaaattgcaatggttcataactgttacat

SEQ ID NO: 118956 - DNA, 419 bp, Glycine max
  unsure (1)..(419): unsure at all n locations
gacacttttatactcaagctcggtttgtggtacttaccagttgaagactgaagtaaatgtttatcgaacgatgaatgtcgataaacggttgaaaatcttcgcgtaattacccacagaaaacgttactgaagcgcctcggcttggattttcttcacggaaacaattttcctcagcaattttaagagaatacgaagtgtcaagaatgctgaacccctttcttcttcattcctccccctatttatagcaaaatatggggaggagcttgccacccatctcgcccatgtgagccatgttgcttcctccataatcaaccgccttctggatgaagaaactggaatgcccaagtgggcctgattgctatttacaccccctttttataaatgcaacccccttngctttgttttgtgaatctttttctg

SEQ ID NO: 118957 - DNA, 268 bp, Glycine max
tgacgattcattcacacttataccatattctgctatgaaatattaaatgtgtagtgggaatagataactaaactgacgaggtttaaggtgcaaaaatgaaactactttctcaccctacgaaagtttggaaaaaagcaacctgtgattgttatccgtcggatatgaagattaaaatatttaatggttgggaagtgtgaagggttaccggttgaaatattaaaaaattaaatggttgagatctgttgagggtagggtaaccggttgtaat

SEQ ID NO: 118958 - DNA, 243 bp, Glycine max
ttagcagctttcttttttttatccaggacaccatagtgcttatgtcagatttaatctcttaaagccccatgaagaacaactttgcatggatacctatggttcttcaattaaaaaaaaatttatgaattgtataatgattgtgaggtgcctaatagaagatgagggatcccccctctgtgtgaagaacaattcttctgtactctcaatcccatttgtgttaagggtttttcgttatggctggct

SEQ ID NO: 118959 - DNA, 260 bp, Glycine max
cttggattggcttgattttctcagggtccactttgaacccatttttacctactataaaccctaataaaactatattatctacacaaaaagtacacttctctatatttgcataaagggtgtttttcctaaagactgaaagaacttgcctgaaatgtcctaagtgatcatctatgctcctactgtacactataatatcatcaacataaacaactacaaatctacctatgaaatcccttaagacatgatgcataagcctcata

SEQ ID NO: 118960 - DNA, 314 bp, Glycine max
cagagagtagttcaggcttatcgcaacaagtgcgtttagcgcacttccaagaattaaaaaacagttagagattggcgcttaacgtatcctgtgcttaacgctccaactatgaaaatttctagaggagaagttgtgcttagcacatcatccacgctgagcccactgattaaggttcaattacagtgaagatgttgagcttagcacattgatgtgcggttagctgaactattcaaccaattgaaaaaagttttctaaagtcttttgtgtctatctcttcacacaagcttaaaacaccttggtcattactaaacaag

SEQ ID NO: 118961 - DNA, 251 bp, Glycine max
gcttcattgtctataaatagaagcatgtgtaacacttgttgttactttgatgaatgagagtctggtgagacaacacttaaacttccacttctctccctcttttatgtcttgaatttcgtgctcccccctctctgtgtctatacacctttattgtcctccattgaatcatgcttcctagcttcttatacaatgctcatcttggtggtgaagctgcttcttcgatggcttattaactattggatggcgcctac

SEQ ID NO: 118962 - DNA, 252 bp, Glycine max
  unsure (1)..(252): unsure at all n locations
ctngaatctctttgtacttcttcttcttctttgtaccaaattctttctgaagttttctggtgttctaaaccttgaaaacttgtgctattcatcttttcattctcttctccctttgccaaaaagaattcgccaatgacttaccgcctgaattctttttgtgtctctcttctcccttttccaaaagaacaaaggactaaccgcctgaattcttttgtgtctcccatctgccttgtcaaagaattcaaaacgaca

SEQ ID NO: 118963 - DNA, 361 bp, Glycine max
ttacggacacttaaaactaagcttcaattgcttggacaacaactctatttgggccaacaatgcatcttgtgatgaaagctccaataaactcttcttggtagggatatgaactttatcatgcaaaattgcgtggtcactatcagccatattttcaattaaatccatggcttcttcatgtgtcttcaacttaatttttcctcctgcaagcgtcgagtaactactttgactgcggccgttacccatcaatgaagatgttcagctttatatgctctgaaaaaccatgagtgggagttttccgcagcaagctatggaatcattctaatgcctcacttaaagattcatcgggaaaccgatggaatga

SEQ ID NO: 118964 - DNA, 256 bp, Glycine max
tctactcattaactgaatatctacactcaggctgtacacattatatatacaagcatgcatggagatattttctttgtaataactcatttacttttaggactatctatgcaagaatctgactttaatcggacccactatgcaaaaactttggagttttaaaaagggactcctgcgcaacaaaaacgaagactctgtactactttagaggctatactatttgactgtggcaaaagtacttgaaccttttgcagcttca

SEQ ID NO: 118965 - DNA, 390 bp, Glycine max
  unsure (1)..(390): unsure at all n locations
gctcaataactcttctnggtagggatatgaactttatcatgcaaaatngcgtggtcactagcagccatattntcaattaagtccatggcttcttcatgtgtcttcaacttaatttttccttctgcaagcgtcgagttactactttgactgcnggccgtacccatcaatgaagatgttcagctntataggctctgaaaaaccatgagtgggagttttccgcagcaagctatggaatcattctaatgcctcacttaaagaatcatcgngaaactgatggaatgaagaaaatgtagcttntccctctgcaggtttagactctaggaaatattnntttagaaacttctcaacaacctcatcccaagtctttaaactggtgcccttgaatgaatg

SEQ ID NO: 118966 - DNA, 122 bp, Glycine max
attataatatcgtgaatattgcctgacacctctgatatacaagaatttgaaatttactattctgccacttgtactatgattctctattaaatctttaattatactgtgactctctgaattta

SEQ ID NO: 118967 - DNA, 383 bp, Glycine max
  unsure (1)..(383): unsure at all n locations
tctagcttgatctcttgacttttcttttttgaccaaagcttctgaagtttctggtttctaaaccttcgaaacttgtgctattcatctnttcattctcttctccctttgccaaaaagaattcgccaaggactaaccgcctgaattctttttgtgtctctcttctcccttttccaaaagaacaaaggactaaccgcctgaattcttttgtgtctcccatctcccttgtcaaagaattcaaaacgacacagtctgagaattcttttgattcttccctttccctaatacaaaagtgttcaaaggactaaccgcctgagaattctttcgtatccncattcacaaagtatcaaagttntaacagcctgagatctttgtctcaacacatt

SEQ ID NO: 118968 - DNA, 166 bp, Glycine max
agagaatgagagataagagaccctcgaaataaagtctgtacctcaaccctctttatagactactaactttttatttattaaacataactaaggacacttgtattctttaataaataatgcactacacacatagtttctttcatgaagacgcgttcctttccacatg

SEQ ID NO: 118969 - DNA, 197 bp, Glycine max
acttctttaaagctcacaggaattctttactataaatcatacatatcctagacctatttgtgccccgctctaattatagcaaatttgtagctttattggatggacttgacgcctactcatgtacttcaacctcataacatatgtgcatacccttaactgtaacggccacaacttattttcaaataatctacttggta

SEQ ID NO: 118970 - DNA, 289 bp, Glycine max
actgtgtacttgtaataagctggaaacattaactcacttctccttttattctaattcggctcccctctctttcttccccttatgtcctcattgatcatctcaacttctatcaagctatctggggagaagctctctcatgctatactatgaggccctctctaccttttcttgcttcgtgattctggggaatacataaagactatgagccctacagctcatagggaataaccaaacttaaaaggctctaactcatatttttttactcctcatgtgtgtatttctctgatct

SEQ ID NO: 118971 - DNA, 353 bp, Glycine max
  unsure (1)..(353): unsure at all n locations
cactttcaaactgtttgacacttctgataatttgagagaatatatgtctnttactatcctctaatatntataaaaagatgtacatgacatagaattaatatgaatatttgacatcttaaagctttcatatttggttgcgtctaataagtagaagacttaaattgttaaaaaactctatcaatttaagaataaatgaaggaagttaaatagttatattgtataaaaaggtatataaggacgatagataagtatcaaataatctaatatatatctactgtatttaacaaaatatagatctatttaagtcatactaagcactcatacaaaggtgctataatgcccaaatatgttta

SEQ ID NO: 118972 - DNA, 216 bp, Glycine max
ttaaaaagttactctctatcactagaataacgcttcctatctaacgtttgcaacttatataaaagccccccatcagcgttgtccaatataccgtcttcaggctgtctcataccacttctgtaatactctctctaactttggccaaatgcatgtcctttgttttatcttctaccactatgagattgcttctacaagaggtcattatgccttttagtt

SEQ ID NO: 118973 - DNA, 432 bp, Glycine max
  unsure (1)..(432): unsure at all n locations
acttacatntactgtttctttatattagaataaaaatacctntgttntcaattcatgacacttaattctttntacaaaaactggcattttgaatgactcttttccaagtaaaacaagttccctgagttcaatactcggttcattccgttntaatcatttacttgacgaccaggtgcacttgccagtaagaattcacatccacaaaaaataagtagtagtaccaggatgtgaatagctggttacttcacccctaagttatttgggggcctatacaagccgagccaaggcctagaanaatgcctaaaatgacctttttgcccctctccttgggtatnttccgcatccttgaccaanacattgaatgatccttcgtctggcatggtaactggtgtcanacagcttatattgggctagcaggatcaacagatcaac

SEQ ID NO: 118974 - DNA, 235 bp, Glycine max
atagattcataaatagaatcatgacaaaaagaatcatagagaagcagaaaagatcatagaggagaaagaaaaagaagtctcggcagaacaatgcaagttacgcatttactcatgccaacaaagagaccactatgttctttccaactcccatttcgtacaacaaaaaccaatacacccaccaccaactcgggtttgctctttttatattggatttttgcatgactcgaagctagtt

SEQ ID NO: 118975 - DNA, 368 bp, Glycine max
  unsure (1)..(368): unsure at all n locations
gtgcgtatatcgcacttncaagaattaaaaaacagtaagagattggcgcttagcgtatcctgtgcttaacgctccaactatganatnttctagaggagaagttgtgcttagcacatcatccacgctgagcccactgattaaggttcaattacagtgaagatgttgagcttagcacattgatgtgcggnntagctgaactattcaaccaattgaaaaagttttctaagtctttttctgtctatctcttcacacaagcttaaaaccccttgttcattactaaacaagctgataatntaatcacaatcacaagcaagatgctctaacatgtagaagaaaacaaattcaaatgaaatgcaataaaaagtaga

SEQ ID NO: 118976 - DNA, 320 bp, Glycine max
tgctttactgtgacacttttgtacctgaatatgtcgcgggcagaacctgagacgtctggtgtgtttgccaaaccactgacatccgacccccggctatcgcatgaactgtagtcctacagcactctgcagcactatatagaaacaacccaacaggagttggtgctgcacttatttggatatggatgtgcttgatcatccagtggatcatacagctaatggcagagtaatgcttgaacatccaggtgtcttcctgctgacatcgaactaggccttgatcatccctgtcttacctagttgactgtactctccgctgtgtcatc

SEQ ID NO: 118977 - DNA, 398 bp, Glycine max
  unsure (1)..(398): unsure at all n locations
ccatggaagctcctaatatctcccacactntntgtggtgtgtccattcttggatggccttgattntctcagggtccacttggaccccatttctaccaactataaaccctaagaaaactatattatctacacaaaaagtacacttctctatatttgcatagagggtgtgtttcctaaggactgaaagaacttgcctgagatgtcctaagtgatcatctangctcctactgtacactanaatatcatcaacatanacaactacaaatctacctatgaaatcccttaagacatgatgcataagcctcataaaggtgcttggtgcattatgtgagcccaaaggcatcactatccattcatacaaaccaaacttggtcttgaaagcagttntccactcatcac

SEQ ID NO: 118978 - DNA, 258 bp, Glycine max
  unsure (1)..(258): unsure at all n locations
tgggactcattatataatgactatcaatgtatacatgtgtggatcgattatttataaataactaatataatgcttgatctaccagggacatataatgtatggcatacaacatccggtcatattatatgtatggtaggaagataacacagngaggctctttcttacactgcattatattagaaatatcantatcttaagatattgtatatggcttgaaaaaaataattgagataaatgataattcgctacttccttacg

SEQ ID NO: 118979 - DNA, 301 bp, Glycine max
  unsure (1)..(301): unsure at all n locations
agcaagtacaccatagtgctaatntcaagatagaagctctagaggcagcaagaggagcaactntgcggagaagcctanggttcttcaattagagagagattagtgagttgtagagtgattgtgaggtgctgagtaaaggaggagggatcccccttcttgtgtgaggaacaattattctgtactctcaatctcatttgtgttanggtttttctgtaatggctggctaaacaccctttttggngaattctaaggaacaactgatgtaattactttaatatctanataattgtgtttatgtgtc

SEQ ID NO: 118980 - DNA, 180 bp, Glycine max
acacctgtgagatactactaatgcacctacacacacggcgtctctcaaagtgtggcagcaacatcttctcacatcacacacacaccagacagcacgtgagtctccacctctcagactggagcagattcgactgcgtcacaaacgactcttaactacatcatgacatgtccatgatacacg

SEQ ID NO: 118981 - DNA, 370 bp, Glycine max
  unsure (1)..(370): unsure at all n locations
tcacaagatatcaagagcatcttcgtctaggtgatgttctnttgctttctctatcnttntgntcagtcagntgactntaattccttgttcttcatnatattctccttgtatatactccattgtattgtggttnggtgcttgttagaagtgattcaaaanaaataaaccgattaaatcttagatctacactcgttcatgcatttcgatggttcaaaatttatagatctactcttgaatcnatgttttgtgtgaatttaggttctatncatttcactcataatattcttgtgctgaaactctagatctaaatnttctttcanaatattgattatgtaaaaaaacacacaaatctaagtgtaaatcacttaat

SEQ ID NO: 118982 - DNA, 222 bp, Glycine max
  unsure (1)..(222): unsure at all n locations
tcaatgcatgcatcggatttctcatagaatagacttattagaccaaccggtataggctggcattacttgacattgttggtctgacaccaacatggatgacgatttaactgcttttgcctcattcggaatgtngtttaggctctagaccgggttcgaggaattttcctgagacgtgatgcacttcctggagttattattaccgacagagatttagcattgatg

SEQ ID NO: 118983 - DNA, 194 bp, Glycine max
ttattttttttgatgttatttattgctttgactcacattttttaaattttttttttttaagttctatttatttttattaacttttatgattttttctctttctttacattttttcttcttttctttttaactcattatctataatcctttttatttttcattttttttctttattttatttattcttctttttt

SEQ ID NO: 118984 - DNA, 219 bp, Glycine max
  unsure (1)..(219): unsure at all n locations
taaattactatactattatcaacaaagaattgactgaatcttgtacctatttggatgattgtccatgtngggtttaaatgtggtctcaatgtaatggacccaacgtaagaatttgacattcacatccatatatttctcatatagtccagataaggttagtggtcgcgcacgtaccacactgaatttaaccatggatttccatctttctttaatataatg

SEQ ID NO: 118985 - DNA, 319 bp, Glycine max
  unsure (1)..(319): unsure at all n locations
ctctaagctcgaatgacaaggaagcttcagaactaaatgatcaaacttatcatctctgagggtcgactcaggcgcataatatatcgagacgctcganattgaacaacgaatgtcggtgagaaattcaaatggtcagaacttgtcacacggatgtacgattcaagagcataatatattaagaatctcgaaattgaacaacggaagctctcgagaaatgcaaatgggcataaccttgcacacggatgtccgattcacgtgcatcatatatcgagacgctcgatattgaacaacgaatgctctcgagaaattcaaatggtca

SEQ ID NO: 118986 - DNA, 165 bp, Glycine max
gatatgaccgtgcttttggtctgctatttatctgaacaatgatggctgatgttacagatgataaatataactttgagaatttaaaatgtgaaatttaaaatggttttaactgacgctttttaaaaacaattgggtgcctaagttactaaattctgttgtgacaca

SEQ ID NO: 118987 - DNA, 435 bp, Glycine max
  unsure (1)..(435): unsure at all n locations
tgtaatatctcgagacgctcgaaattgaatactgaagctctgagcanattcaaacgacaataactntntactcngatgtctgcatgaatcccataatatatcgacaatctcgaaatagaatcttgatgctctgagcaaattcaaacgaacaataacttttactcggatgtctgattgacgtcctgtatatatcgagacgcttgaaatngaatacggaagctctgagcatattcaaatgacaataactttntactcggatgtctgattgagtcccgtaatatatcgacacgctcgaaattgaatgttgatgctctgaggatatacaaacgacaataactnnttactcggatgtccgatngagtcccgtaatatatcgagacgctcgaaatngaatgttgaagctctgagaatattcaacaacaataactttntact

SEQ ID NO: 118988 - DNA, 66 bp, Glycine max
aatatcaatgtacacaacctgtaatttaacactgcaagaaatagctcagctgatatcctctgacat

SEQ ID NO: 118989 - DNA, 362 bp, Glycine max
tggaattctcatccttcaagtattaaataaatacttgatttttacatatcacaccaaatgttatctataatcccatcttacgtagtatctaacgtcaagtatatgctaaactcatatatgtaaaaactgcaaaaaaatgatatatgtttcagacgcattagacgatcaaaaattgtatactattcgaattatataacttatgtataatctttaaataatcaaattaaaatatcatcttaaataattaaataaaacaatgttaattaaaaaaatcggtaataaatcattaaataatgttttttatatagatgcggcatccaaaaaaagatgaaagacttattcacatcactacgataattaat

SEQ ID NO: 118990 - DNA, 427 bp, Glycine max
  unsure (1)..(427): unsure at all n locations
agttatggaaattntntagaattatntatattcgagtcataatctcttagaattatttaattgaagtaataattgtttctgacttancaataattcgagtaataatctgttagaattatttgtgacttacaaataatttttttgtaaggaaatttgatagtgcagcaaatagattattaattttatcattacaaaatattaattgaagtataaatgttttttcacaaaaattaatactgaagtgtcatgggtcgacaggtgtacaaataatacatgtttccttatagtttttgaagtagaagaaattaatctgagttaagttaagctaacttaattagagatgcaccacaatacactattatttaaacactgtgtatataatatttaatttgtgatgagaatataatcatatacaggtgattcacga

SEQ ID NO: 118991 - DNA, 250 bp, Glycine max
actgatggtgccgcgagcgcacactgagatcgtggctctcgatcacctgtatcgaagctgcaacgatgtatcgtcggatggcctgttccaacagcagactgtggatcctgcacatgccacggttacgatctgccaaagcctgtgtgacgaactgtgacgcattaacgccatctgaagggcggaaaacatcacatggcttacgtcagtcgtgatacgaaaatgtgccgtccctgatgtgatctgagctgct

SEQ ID NO: 118992 - DNA, 230 bp, Glycine max
catcccaccaacgtacactcttggcctcacgctacgcccactacctactgtcttacgcggtccatatctcaagtcaaatcatatccaccactatgatacaactcaacagaagcaaattgcaacaactaaaccagttcactcaaacccatacattcctcttcatacgtaccgtgatcgaccgaaattatggaattcattcatatctcaatgtgacgtgatctctgcaatgt

SEQ ID NO: 118993 - DNA, 69 bp, Glycine max
aactcacactcctcacatcaaacagacataatttctcagctgaaacatatcaggcaatatacttattag

SEQ ID NO: 118994 - DNA, 289 bp, Glycine max
  unsure (1)..(289): unsure at all n locations
attctcttctagaggcatatagctacctcttcatgtattctcgaacacgtagttagtttgtcttggtcaagatatttgagcagaggtgaggagaattctctcctatataactcgttggccactaaggtatacttgacaactngcattcttaattntctgggctttcccttatctgttgcgagtgtctcatgtttcaagtacatgactatcttcattttccatcccaaaggggccttcttccacttgcagacacttttttctcgagatgatgggtttgggaattgaatgg

SEQ ID NO: 118995 - DNA, 146 bp, Glycine max
tgtacttatctactactagagactacattacacttcgctactacaatattgtgtgatagttacacatctctatcatacaactgtatatatttacctatatgaagagttgtaaaagatatcctttatttaatgtactctatctgcta

SEQ ID NO: 118996 - DNA, 357 bp, Glycine max
  unsure (1)..(357): unsure at all n locations
tactgtaatggttacaaaactttgctcttntcactggatcattaatgtgtgggtctgttttcatttgaattcatgatgactgatgttgcgcttcctatttttgatcttgatatgaaattctttcagatagcaattgttgggcgcccaaatgtttgcgagtcaagccttcttaatgcatggagcanagtatgtcacagtcattttaccttattattgaatcttttctgtagatcttagccttggtgttggtcaatgaataaaccatcacataatattttatcttaatcactttcaagccatatttcatttaagggcaaactccactcgtaatggtaatgctaaacatgtgttgttact

SEQ ID NO: 118997 - DNA, 159 bp, Glycine max
ctatcctacttctatctactactctgagaactaactctccaccttatctactaccctgcaaaactgaatcaaaaagtctctcaaatctaagccgatcagtaactttataatgcaatcacgcaacaagaaacttttatatacaaatagcgctatctacca

SEQ ID NO: 118998 - DNA, 404 bp, Glycine max
  unsure (1)..(404): unsure at all n locations
cacactctgatactaagctctccccatttcataattgggagaatgaagaaaaggttatccttagcctttcttcttcaattgctagaaatgtttcgtgaaaanatcagccgggcgcttcgtacgttcgtaggattccgaagttcacgtctcacgtcttatcgtcttagtctcaacggtagtacctaaccagctttcatcattatgcccgggggccacattgtcagatttatctcgttattacttatccccttgactctaaccttattagcatttcctaactaaataataattcaccacgtgatgatatcgtacttggtgaataattcaccgacgtctccgacccgtggaccaaagagtatatattatataaaattaaatcccttataaataacaaaatcatgacg

SEQ ID NO: 118999 - DNA, 135 bp, Glycine max
aattaactatacccccctttttttcctccatctaataaagcttcaattaagctctagtacctttatatggcaacagcaaagaacttactcaaatgccctactgccaaccctagttaaccgctttaatacacttga

SEQ ID NO: 119000 - DNA, 266 bp, Glycine max
  unsure (1)..(266): unsure at all n locations
tactaagctactaaggcacctgttctagctcttcctgactnttctaanacttttgtgctataatgtgatgcctctggagtgggagttggagctgtatcgttacaaggtgggcaccctatngcttattttagtgaanaacttcatagtgccaccctcaattatcccacctatgataaagaagcttatcccataataagagccctccatacttgtgaacattacctttgttccaaggaatttgtcattcatagtgatcatcaatcact

SEQ ID NO: 119001 - DNA, 367 bp, Glycine max
  unsure (1)..(367): unsure at all n locations
accagtgtggttgaacgttgaaattcnatttaaatgtgaagagtcacatcctttcacaaaaaagctttgtgtaatcgattacattggtttggtaattgattaccagtgatagtttctgaacaaaatcaaaagatgtaactcttccaatagttttcaagtttttctaaaagttgtaaccttttccanatgggttttaagtttttctaaaggttataacttttctaatggttctcttgaccatacatgaagattctatannagcaacactctgatttgcatttgatgaatttttttatttattcattcaacaattcttttgacaacaactntntcactttaatttctgaatctctttgaacttcttctt

SEQ ID NO: 119002 - DNA, 129 bp, Glycine max
cttctgatctgctgataactagagcctgatcttacatatcaacataacatttgcttctatagcattactatcataaatctacttctgctgaattttgaatacgtttattctctcagttaaaaacacatg

SEQ ID NO: 119003 - DNA, 524 bp, Glycine max
  unsure (1)..(524): unsure at all n locations
tactcagctcgtacttcaatgtctttctatctagagtagacctttacatgatactgtgacagtttgtacttttcgatatgttcattcatttatagagttgtctaccattttcaatgtgctccaaagaaagaaattattatatacctaagctaaggaccttctattggtgtcatgaacatttnttttttaaatgaattangagttttttttttggttacaatcaatcacccatttggataatgtctnctacaaacaatcaaacatgcgcagcttctctaaagtctcttctaataaatngctgcctgtaaataaatagtacttatgacacaagaaaacaacaaanaatttgcatttcanacctgcactagctaanaagcaaacactttatcttcagtatgggcaatatctccatagcatttctgttttaaacttccaaacatgatagatacagcacccncatgtcatcaactcanattggtcccgcacagtttatctttgcaagatggatgacttgttaaagtaaa

SEQ ID NO: 119004 - DNA, 253 bp, Glycine max
  unsure (1)..(253): unsure at all n locations
atacatgtgtcagctactgcaacaccacttttaaatttcatttgaagcttgacantatgtcatgaacangaccacacanagacaaacctttatggacatatattaacccaaacctctgcaaataaatatgtgacttcttaatactactcttcaaagttacattcaaaatatagatccactaactanctgtattaaaatgatatatccagtaggtaaaatcttcaattttatagtgaccatgacttaaactatt

SEQ ID NO: 119005 - DNA, 376 bp, Glycine max
  unsure (1)..(376): unsure at all n locations
ttctaaaataaagaaaaccctaaaacccaacccaactaaggcccaatgttataaagaagcctaanaccctgaccccacccaggcccaaaacattaaaanaaaattatcacccatctaanaacatatcatctcctctcaaacatttgaggacctgctacaagcattaagcaaccttgtccaccgacctccgacaaccaccttcctccaacgaccacccagagatgatcgtcatcagcgatctccagagtcagcccttctcccacacnctcaacctcagcattaagcaagtgagagaacganacagagaaagagtaatngagacacccaatctcaactatgtcagaaaagggtaccagcaacatactacgacaatagt

SEQ ID NO: 119006 - DNA, 225 bp, Glycine max
  unsure (1)..(225): unsure at all n locations
gtactttatcactgtgctgtaaccttactagcattctccttactaaacanatatattcgcgacgttgattgatatcttacttcgtaaataattccacgttcgcgagcgaacatgttgaatcaaagagtaaaatattatagtaaagacattttataaataagcgaaacatcgacgttctttggattctatctatcaatgatatacaaggaataatgtaataatcct

SEQ ID NO: 119007 - DNA, 466 bp, Glycine max
  unsure (1)..(466): unsure at all n locations
ctccgctggacattatggatggtgccaccaactggaatgttattcaccgactttgattatagactctggaatgggtctcgaaatgcatcccctctgatctttgcatcgacattctagatgttctctctaacttcatnttctttctcacttcatcttccaactctcgtcgttgtgcaaaagccatctcacgagcaatgnattctctcctgatgttttccttctctagctctcgccatattttctctttctccaactactcgtggaatacttcgttgacattgatcggcatgaccatggtgaaaactctnggcgctgaaacattactangaaagccacctgatgcaaagtcacaccctgaaaattggattgtaatagaatgaattggtgacaaagttttgtatttaacaaaanaacatatgggtatattgatgaaaggaacatatagaaatagaaagtgtaccatgta

SEQ ID NO: 119008 - DNA, 209 bp, Glycine max
  unsure (1)..(209): unsure at all n locations
gttgccattggacccagttaagtgtattcagaactctcatgcttaactttgctgtagaacagttcgccaagcaattattaacatctttgcttctataagaactcagctctcccaatgcaattactaatcgcactacctacataccactcatacacacactcaacanacctccctctacaactgctctgccataaataaatatctaaatg

SEQ ID NO: 119009 - DNA, 465 bp, Glycine max
  unsure (1)..(465): unsure at all n locations
tctcaggaggtgagcttagttatgagaggggtgtgtgtagctaatctctatctntccaagaaaagtttctcanagaagcttctcaaggaagttntctcaagaaagcttctcaaggaagctacctagtctagaaataaaagcatgtgtaacacttgttgtaactntgatgaatgaaagttntatgagatacacttcanagttccacttctctcccttttttattccttccatttcgtgctccccccttctctctttcttttcctccattanagcatcctctntaagattcttatccaaggcaattgttggtggtgaagctccttcttccttggcttattccctagtggatggtgtctcccctctcctattctcctttgcctttcgctgcatctccatggtgtaaaatcaccattaaagggacctcattgaactcatacatgtggagcttctatggaggctagatct

SEQ ID NO: 119010 - DNA, 265 bp, Glycine max
  unsure (1)..(265): unsure at all n locations
ttatatcctgtttatatacgcgatcaaatatgaactgagtagttacgctaacaatactgatgaaatatcttatcatatatgaattctatcacactcccgcagacgaagcgagaggtcgatgaacacgaacactatgactgtctcgaactggaccctggaccatggccactaattctttatgtttttcagaattcttgtaatatccagacggcttnccccgttgtagttgtactaatgagagactattgagtcataaatggattat

SEQ ID NO: 119011 - DNA, 123 bp, Glycine max
ggctcactttaagaaaaactgaggtgtattgctaagtgctgaggcgactagcttgtcgctgagaactatacgttttatagatccatccagtcgatccactctgttactctcctctaaatgaga

SEQ ID NO: 119012 - DNA, 334 bp, Glycine max
  unsure (1)..(334): unsure at all n locations
atctgattctgatgctgatatgttctcactggacgacgaggctgaagctgatgctgacgcagccaaatggaggacgttgataaatctttatatcatgcggcacggagttggctatgtttctctcttttttcctttcggattgctctgacagtgtntaatggataattagctaattagctataattcgtggtctattgcgagtgtggtcgagcttatttttagtggatcctgcgtttctgaatcatgatatttctggagcttgctactgacagacacacttatctgtataactataatcttttactaaacatatttgtgttattgcttgaaaatc

SEQ ID NO: 119013 - DNA, 283 bp, Glycine max
  unsure (1)..(283): unsure at all n locations
tgtcattgactagacaatgaaaatttaactcaatctctatcaggcccaccatattatgaataagtataccaaatacgaatattaattataaatattaatataattattactcacctacatatgctacattaacattatattattctataatacataataattattaaanaannttattcataactatcatgtaatgttacatcgcccattacaatattacctaaaattgtgagctattttggctctgactactaatttatttgcttttttctccactaatact

SEQ ID NO: 119014 - DNA, 384 bp, Glycine max
  unsure (1)..(384): unsure at all n locations
cacgttttcgtcccctaagaatatggaatggttcacgaggaaatgtactttaaatggcacatacacacanttccttaatcatcataaactctaggtatagcaagtngcaataacatcaagcctatattcatcactatggccaacactaacctaaacctcacaacaattctcattctactcatctctttagccctgcacaattacgactntatttgttcttaactgatataaatcaagatcatttgttaatgaagactatgatgtagtactgcactcatttgcctttaattcaaatcaccagtgcataactattgttaatntttggtgaggcacatactctaaatgcatttatctactgtcttcgtctacatacttatagatgat

SEQ ID NO: 119015 - DNA, 284 bp, Glycine max
  unsure (1)..(284): unsure at all n locations
tccacatttaacanatatatatatatatatatatatatatatatatatatattaccctattatctttcaatgtggaaaactntacatggcttcacttataagaacaaataatttttgtgaatttcaatttgagcccttgtcacaaatttgacttatgcttangaggttatgctntattccatccacatatagaacatttcttatttgagttntgtgttgatttccgatatttctctcccattattttcatgtatatctacaacgtgacgtatctcattttttac

SEQ ID NO: 119016 - DNA, 243 bp, Glycine max
tgaaaactaaggtggcagaagattgtacatataactgcgactattgcccactacgaatagtacgtccacattaggctaatgttctaatagaataatgaccatgtaatacatgcctccatgcaaactcaatcagagaaggtttaaatacaactgactaatgagcatgggttatgcataagctgtacctccgacatgattgccttcaaagcagctatggcacatgtcgttggacaatacataatc

SEQ ID NO: 119017 - DNA, 393 bp, Glycine max
  unsure (1)..(393): unsure at all n locations
taaacataagtcttatattagttatattttataatcaaatatatattcttagtaaccgtgataacttttttngttatgcaataagcgatgacaaattgcaatagtgtgacacacagagtgaagctaaacaatcataaagaaaggatctcaatatgctattttccttgagaatcagatctcctaactcttcacttataatggagttagagcacaacttcgacaagacatgaagaccgttgcccacaaaattgggcttgcaaggttagaacgcacttangattgttagtcttattggcattnatcataatataagttaattactcttctctttntggtaaataattcgaccatatgtatgaaaatgaaatagtatgattgcagtgcacaataagt

SEQ ID NO: 119018 - DNA, 196 bp, Glycine max
taccttgtatgtaagacattgaacgtcagcagctacactctatataagcgctctctcattcagtacaatcagtgcactcccatactactatgtacagcacactcactggagcactcattatataattccctcacaacaaactaactctatatacataccctcacatcacagccaagctctatacatagctctctct

SEQ ID NO: 119019 - DNA, 362 bp, Glycine max
  unsure (1)..(362): unsure at all n locations
tctcgcttaaagtcgattttttgattgttctctaaatatttaatttgactnnttgtataaatctgtatgtatatggatcttcactcttgatacatgttgtatttaagatatggtcacgttttatattaatatattatatccgtaatctctgtgttgtggtgcccgtgattctctcttcttttagaattcaaagttgtattactaacaactggtaggcaaagtagtagtttgactttgtgaccaactcanagatggtacangtatctaaagtatgtgaagtctaatgaccactatganaatactcatgaatgaaaatgacttttactcgagagaaagactaccatgtagaagagactcacact

SEQ ID NO: 119020 - DNA, 118 bp, Glycine max
cctaccagggcctacccctaagcgaaccttcaataaaagcccaggaaacatttaagatttaatcaacactctttttttttgtataccatttttcccagaaactatgctatgtatctaa

SEQ ID NO: 119021 - DNA, 390 bp, Glycine max
  unsure (1)..(390): unsure at all n locations
tgtcttatgaatccttcagtgcttgtgccacccgtgccccgaagacccctcattctatacatgaatgtgttggatgagtcgatgggatgtatgctggggcaacatgacgagtctgggaagaaagaaagggtcgtctacaacaactactctttgcttgaaaggacatgttgtgccttggtgtgggcaacccatcgtctaaggtagtacatgctaagctacaccacttagttggtatccaagatggatctagtcatgtagaaatgttgaaagcccgctctcaccagacggatcgctcggtggtaggtgttagagttagacatttgttatgtcacttaaaagacgataaagagaagcgccttggcagatnacctagcacagcagcccatcaat

SEQ ID NO: 119022 - DNA, 86 bp, Glycine max
gctacccctcttgtgtccgagtggttgacaaactagattagacttgagcatctggcaaatgcgacagatatgctcctatcgctctg

SEQ ID NO: 119023 - DNA, 460 bp, Glycine max
  unsure (1)..(460): unsure at all n locations
gttgttctttgcatgacaattaatgaaagctctcttctctttttcanaatgtataaatagaaatatagttgcttacatcagcatggactaaacgactaagatttcataacattatttacaacgtcttaaactctggttaanggtgtaactcgaccccataaaatcangcattgtaggtgaatggccaagttttatgaaggttacattggccatatctttagtccatgtggaactaaacatgctccctcacactcagcacaatgaagatgctctaaagaggccacagctaaggcgaggcatggtgactgcaattaangcggctntccaacacctttgcacttgttcagcttcaactcagctactcaacgacgccaaaatccacaccgcacactgcttctcttctcttaangngttgtatccatgcgtggtcttgatgatgagtgtgaacttctctctcaat

SEQ ID NO: 119024 - DNA, 244 bp, Glycine max
taaataccgctggcaatacataacatgctcaatcagaaaaaatctctcgcatcataccgtttactatactgcttaaaaaatgtgccatcttcgatgtgtatgagcatgtcacgtggtatacaacactgcagttatattgagtatcgaaataatcatcatgctgatttctactgccaccttttgctgttagtccacactttatcctctcctgtgcggcctcttggaattcacttctttatgtatt

SEQ ID NO: 119025 - DNA, 231 bp, Glycine max
  unsure (1)..(231): unsure at all n locations
tttcaaaaaaattacccatttctttgacatatcctatgattcanagaanaacatgcanagtcgtacatgcatacagaattgacccanaatattaaactaaaaatccgacgaaactaatcaacattaacaaattaacacaactaacatattaacaaaaccaacanaactaacananaccaaaaaacactccccccatacttaaacaacacattgtcctcaatgtagcacaat

SEQ ID NO: 119026 - DNA, 348 bp, Glycine max
  unsure (1)..(348): unsure at all n locations
tctgaagagagtatgatgaactaagggacgtcaatatggccaccgatgaagcctttgaatgagaaaccaagaaggcctgaaaggaanaacacgaccaanacaagttttgaggggctttatagggcagcaatagtgagctcaagctccgaagaggtgaatggaatcatcacgggtcaaaggcatgatcttgaaggacgagctaaangcttgccttangtcgaaaagaaatttgtccaacagttaagcgagactgaagggaatatgtgggccatcatcgatgagtgcaaagagaagctaaatctagcggcgactcacgagcaaaggctagaggatgagtacgccaagata

SEQ ID NO: 119027 - DNA, 114 bp, Glycine max
tgtcaatcatctatataaagttaaggtattatacatatagtcatacaacatcttatatatttaaatattttaaaatataatatataatatgatggataatacatatgatatttt

SEQ ID NO: 119028 - DNA, 406 bp, Glycine max
  unsure (1)..(406): unsure at all n locations
tattatctatatttnggtacaacttttcttctcactctcttaaattatcngtgtggagaaactatttgtcctttatgtcnatttttacatgttggcaaatccaataaaagcttaatcggtggagctttaaaaaacatttaagtgatatggattattcaagtcttatgattttttgtattaagtgagcagttaaaatgtatattgacctattattggtttgtgtgtattttattttattaggattgtatcttgtataataattttggctctaataataatttattcagtgggatgaaggtttttaatagattactaactctaataantctagttttttggtgaattagattaaatatatcattaatataagtattgttgagattagttatattgatgatatgtggtt

SEQ ID NO: 119029 - DNA, 307 bp, Glycine max
  unsure (1)..(307): unsure at all n locations
gagactcttcttaatgatgcacagaccanagttgcgtatgtaaaataattgtatgaccaagtgaaggtgcaaattgcaaagaagaatgaaagctatgccaagcaagcccaatagataaggaaggaagtggtacttgaacccggtgatgatcttggacatttgaggacaaatgttttccaagaaggagggaatgatgagaatcatgaaactggccaaatacaggctaaaggcccaagtggagaagaacgaaggcccaagtggagaaggacaaagcccccgagtggagaatgatgaatgcccaagtgga

SEQ ID NO: 119030 - DNA, 188 bp, Glycine max
  unsure (1)..(188): unsure at all n locations
tcaaagcaccctaccaactctcacatcacgtagtctgatatcatacatcgactcgttctcacaagagacgaacaatctaacgtaacattcaacaagcctggatcatctccatcacaatagagatntcttctttccttccataatcatgccaactctatgttgcagatcatcngcaccacacagttcca

SEQ ID NO: 119031 - DNA, 423 bp, Glycine max
  unsure (1)..(423): unsure at all n locations
actatatatgtgtgtgtcttcgtntatctctacctatntaanaatgtgataattcactgctcatgcgttgtttatatttggatcatgtgatgatcttaaaccttgtgcttgtgagagcaaatggctaggtgaattactctaagaaaccttatgatggaggactccgagacacnaatatttgataggatgtgacattggaacaagaagtttttatttaattgcatgacgtatcanacatgtcattttactttatttgataaacttgaacagtcttggtttaagtcataaatatttctaagaaatnttatttggtaacagtgaagcgaatgtgaacattacccacgtggactgattacgatttattgaataaatgacnaattagatttcgcatntatatatggctctttcattatatgatggtgg

SEQ ID NO: 119032 - DNA, 206 bp, Glycine max
cctaagctccatagtctcatgctcatagggagtactatactgtcactcataactcaaatagaacagttgtcacttgtagcctgattcattctattcaagcattcagaactttatgatagatatgcattacaacatactactggttggctaaactgaagcctctggttcaggatctagttgttttacttcaaaacccactatttttt

SEQ ID NO: 119033 - DNA, 236 bp, Glycine max
  unsure (1)..(236): unsure at all n locations
tcaaaacaaaatggtgttggattcatcaaggacatcaaccatatgaactgaatatcatggaatgcttaaatcaatcacttctcacaagcatgcagttnttcaaagataggagcacaagtattagagtcacagctgaaataagctagtaagcatgacagaaatcaaggaaggatcatcaaccanaacctcacagtcattatttcactcanactcaagtgttanggcttattcatcat

SEQ ID NO: 119034 - DNA, 164 bp, Glycine max
catactggaagtctttgggaattcaatcggcattaaaacaccttattagatgtaactaaaaaagggcaaatgggctgaagtaccatatacgcttagctttattgctccacatgttgagacgctcagttgcctgcaatcttattgtactacctgttccagcctaa

SEQ ID NO: 119035 - DNA, 119 bp, Glycine max
  unsure (1)..(119): unsure at all n locations
ataccgtcacttcaacaccttgcgtgcccaagtcgccgcaaacccctcacgatacccaccaatatgcacagcatcacccgagttttcggctcgcgccanggtctcttacacacaacact

SEQ ID NO: 119036 - DNA, 225 bp, Glycine max
  unsure (1)..(225): unsure at all n locations
actcaagtggtattctctatattngataaataaatcacctttgtatactttgataatgaatcnaaaactatcattcattcttcattcttatatctttgctaaacaaaattcgcatactttcttttgcggcaaaactttgaagatactagtntcatcaactatggacggctaatcatctatcaagacatctcatcatatgatgacttaatgtaaagatcgaccata

SEQ ID NO: 119037 - DNA, 91 bp, Glycine max
ctcagacgctttttactttgccgaatcgacatcttcactgtccgtctaacacacggtgccattcggagaagacgtgtgaattaaagcatac

SEQ ID NO: 119038 - DNA, 491 bp, Glycine max
  unsure (1)..(491): unsure at all n locations
tcacctagcgtaacaatgatatactatgccgccttntcattatcatattcttctatgcanatgtaagctcgggtggcaactntacttcttctttcaacgccaactcatatgctngttgtgtgaggagagcgagcatttcacccgccatagattgcaattnattntactagtaaaatttctcaacgtcaaaacttgcagatgccatagctctgatacccaatatttgtgacagaatgttgtttgacatagaaatttaatatacaaactataattataacaaagaagaatctctatcacgagaaaagaatagaaatacaaagaaaaatttatatgtattcttaatctctcagaagtatactctaaaggaatntgatcatccttatatattntntttctctnttctaatngagctcttacaatcaaatgcacctatntatattactatacatgttagggaatattggtacanaaggaaccttgtcgaatcatca

SEQ ID NO: 119039 - DNA, 394 bp, Glycine max
  unsure (1)..(394): unsure at all n locations
atattgacaggtgcagctatatttagatagacaatttcttttcatatcaagagtgatttagaaacagagtaacacaagaaccttggggtcctggctcatattttttcttaattccagtgtacagagtctaatagtgcatattatctaactacccttttgnttcttaccctctcattcatcacggaanaagaaatctaactaatccacataacttatgcagtgtatacagtcatttatacatcctaaccaaatgacagcagataacaattcaatttagacatcctaaccaaatgaaagcacaatacaataggtgatgcatcannaatanggagcttggtgtagtaaataccatgtcactntgaatagcaatacataaaataatatactatatcat

SEQ ID NO: 119040 - DNA, 229 bp, Glycine max
  unsure (1)..(229): unsure at all n locations
aagagtattcttccttctatatctcaccttgtcttcaaccacatccagaaatcacctctgcagaatatctgtgccatactccatntaccactaaataagtgatcttgacctaattgacttaaacgagactatcacctcgttgaatcacctcattggaccctgtactcagtatggccttctatatttgccagcaccattactacttacatccattatcatttatgcagaa

SEQ ID NO: 119041 - DNA, 516 bp, Glycine max
  unsure (1)..(516): unsure at all n locations
tcaccttgtggtcctcctcatagttggtgcatgagaaaacatgctcttatttcatctcccactccaagtaggcctccggatcattctttcctttaaagaaaggaatgttgagtnntaataccatcaattggttttgtctatgaacaccatcattccctcttctcctcctttcttcatcattatgatctctattctccatttgatccaacctctcatggagcgcatcatctcattgtttcattaacctctccaaatgttgcatcanagcttacatttggaattgcgaaagccccactccatcattattaggattagtaccttccatctcanacaaacaaatcaaacgtaacaagacaattatagttgttgtttgaatacctcacccactcaagtgtatcacacaattatgaattttctctaatgaannacattcttgcctttaccactctaattccccttgagttcttaggcaattcaagagattatggccacaacanagaacaattcaccaatatg

SEQ ID NO: 119042 - DNA, 368 bp, Glycine max
  unsure (1)..(368): unsure at all n locations
gcacgagttgagtgacattgaagttacatttatgtggagagccattaatgaagcanagcaattagtggagtggaatgagaggaaacaatatgccaaagtatttgattatgcacatgaattgttgaggagcaatcctggatcaacagttaagatcaacatagtggcaagtccaaaaggtccaccacaatttcagaggctatatnattgtcttgctagctgtataaacgggtttgatgctggatgtagaccattcataggtctagatggactgttcctatagagtgcatttggaggaaacttgctctctgctgttgggcttgatgtgcataaccacatcntctgtattgcttatgctgttgtggacattg

SEQ ID NO: 119043 - DNA, 280 bp, Glycine max
atgatttgatgattaatttctaccatctgattaacagaaaagcctgcatgtcaatataaacttctgtgtacatcttatggtgagtgtcaagatatatttgtagctgatattatatgcactaatactgcgatctgcatactgtctgggaatgtatcgtcacatccacactacaccgaactaagtgaagctggtgctataggactactacatatgctgctatgccttcatcgaactgctgcctgttatattgcaccgaccttggcccggcccacaatttttt

SEQ ID NO: 119044 - DNA, 205 bp, Glycine max
ggctagcacggtactttcgattgggaccttctgtatctattaggctcttctttctgctcggttctgaaaactgagacttgctaaactctctactcacactctatgatcaccaactagaggcctactctatttgtactctcatggctattcctgattctctgtgctagtgatatatttagtccgtactgttactatgttttgtaat

SEQ ID NO: 119045 - DNA, 421 bp, Glycine max
  unsure (1)..(421): unsure at all n locations
ggagatgtaaatgagagagattctgtaaaaagttgaagtgcataaattaatnttagcttatgtattttagcttcttattttcttctcctgtaagtagnttttgagaagtttatctaaacaaggcccaatttttatcaaatcattttgttcctttattgtggttattcagntgtgtctgtccccaacttttttgtgcttctctttgccttaaaggagatgctagactgaacacaattataaagaagttcaanaactaaaagtagctttataaaaagaaagtaaaaagtgagcttcacaaagctaatgttgagttttaccttagaagagagcaaaatanaactgatcaacattactaataagataaacttagtttatatactatgctgagaatgtattgattgaacagattgattgtatcatg

SEQ ID NO: 119046 - DNA, 223 bp, Glycine max
  unsure (1)..(223): unsure at all n locations
cccccttacactacttaactctatatcagacaactactcccctttaatactactctgaaactactactcccccttaactactccctacaactaatcaaagctctcaattaacccaatagtaacttcttaggcaacagcacaagnacattattcaaaacgcttctactgctaaacctagttaactagctctgttacacatgactacagctggtgagtcctctaa

SEQ ID NO: 119047 - DNA, 380 bp, Glycine max
  unsure (1)..(380): unsure at all n locations
tcagctctctaagtganatcaggtgcatccatctccctaagagtcctctctctaggtgganggtgagccatgttctcagtataaaaattagtagtggaatgctcaaaatcagaatattcagaatcaccctcaacagaatgctcagaatgctcanaatgcacagaatgaccaagatgcacactatgcctaactaatctatgaaaggttctatctatttcaggatcaaagggttgtaaatcacctggattgcccctagtcatgcactatatgcagcanataatgtgtttcccaacagctcctaacaagggggtaaaactacaactatactcaaatgatatcaaaataagctgaaattttgtgaggaacaccctaaaatcatg

SEQ ID NO: 119048 - DNA, 292 bp, Glycine max
ctctaatgactatgacatcatttcttgcgcttaactggtgggaggttgaagccatcttctcattcaagtttcttgctttagcaggagtcatgtctccaatggcgccaccactggcagcatctatcatacttctcatcatattactgagtccttcattaaaatattggagaagaagctgctccgaaatctgatggtgagggcaaccggcacatatgttttaaatctctccattattctataggtctctcacttgagtgctaatcctgaatatccttctgatggcgtggcctga

SEQ ID NO: 119049 - DNA, 452 bp, Glycine max
  unsure (1)..(452): unsure at all n locations
ctcaatccatctagcttgatcccttacctaggtatctgtgtgttatctatccgccttcgatctttcccttacgattgacatcttaacatattcttatcatgtaaatgatttcgaccatcgttgcgtgtatctcattattgctttaaataaatccaccatcgttatattgtaccctagtaatcatcaaaanggaaagtttcaccggacattttactttgaaaattctcttttaaatgagtgagaaataaccaagtgaaactaaggccaaaatcaactcacanattaagttttgcccgcanaaaggtcattngaaaccatttcaaggtgcaacgccttanacagtccttttactnttatcggtcaaaaagaactattntannaagcctaaatcaatacctcacataattntcttgctttcttaaagaactacgtaggtctgagttcctcatcgc

SEQ ID NO: 119050 - DNA, 120 bp, Glycine max
atcttagctccacatcagcaacacttaacagcattatacgcagaacaagcagcgaacttgcaacacacaaatacagttcaccaaaccatacatctcatcatgtacgtgacctcaattctg

SEQ ID NO: 119051 - DNA, 455 bp, Glycine max
  unsure (1)..(455): unsure at all n locations
ctaagcttcatcctcagatccctcttggtggactagacttagactaaacagcattatcatcacaacatattaagataactaanacttaatcctcagaatccctctggtggactaagtttcaatcctgcttctatcaagttctaaggcaaaatacattttccaatgctaaagtcacctaactagacatacaaatgggtgatcagaccaagagcatgcagaaattaagcattgaaagaagcattgaacacaggaaacacaatcaattagatattaaagtaattacatcagttgttccttagaaattcccaacaagagtgcttagccagccatacagaanaaccctaacacanatgagattaagagtagagaataattgttacttacacaagaagggggatccttccttctcttctcaacatctcacaatcactttcaactcactaatctctctctga

SEQ ID NO: 119052 - DNA, 268 bp, Glycine max
  unsure (1)..(268): unsure at all n locations
actctgtgtgttagatccaagtcttataataatgatttctagaagaggtccagccttaaacttaaaatgaaagagtttatcctggggtgaaatatgaacatatggggctgtatatgcacataattctttaaatacttatgactaagttgaaattatttctttttttcatagcaaggattatgctgctcgacaagtttgtccgtgattaccaaatctnatcagccacgtcatcatactatgccaattgtgtgtctaccaactcctttct

SEQ ID NO: 119053 - DNA, 245 bp, Glycine max
  unsure (1)..(245): unsure at all n locations
gagatgatggtactgcnggtgaaccagaagctgcagtttcttttggtgaggtagccatggaaaagcagagcgtttgaaatggtttcgtgaatctcacaatactattgggaaatgctggtgaaaacacgaatgcccagcagatataaatttgaatgaagaatgtataggggcgtgtgaagcaacggtcgaatttgctttgtagtgaacgtgctattaatggtaagtgattcgtttgggcacgttca

SEQ ID NO: 119054 - DNA, 258 bp, Glycine max
  unsure (1)..(258): unsure at all n locations
atgcattatgctctgaaangngacactctgcttcaagtctagcagtaattgataccgtcaatggcaaagatcatactctgtcctctgcacttagatggagctgtctcattacttgcaatttgcctgtaataatgtccccttctgtaatccacttacgctatcctctctcttatgtgtgtctgtttctgaaaaaaagactatttgttaaaagccctttgcctccacctctactattgggacagagccaaatagcctggc

SEQ ID NO: 119055 - DNA, 474 bp, Glycine max
  unsure (1)..(474): unsure at all n locations
tgttcttgatagagggagtagctgcttgctcanggggcaaaagaaacttgcctcagtggttatgcgagacagagaccaacatgttcgctatcgtcagcangtaccaagaagaactaaatctagccacggcccacgagcacanagtggtggacgagtatgcccaagtgtacacggaananggagctagaggaagggtgatcgacgcgttacatcaagaggcaacaatatggatgggaccgattgctcttaccttgaacgggagtcaagagcttccccgattgctagccaaggccaaagcaatggcagacacctactccgcccncgaggagatcccaagacttctcggctattgtcagcatatgatagaattaatggcccatataattagaaaccgctagcaagtttgtattgtcgctcagatcttgacttgttataaactttcttgaaataaatgagtntatcccatggttttac

SEQ ID NO: 119056 - DNA, 328 bp, Glycine max
tatcggaaatcaccgggctcgacgtcggatatatcaaatccacgtctagacacgcgcttgttttagctaacggagcctaaccacttcatatcatgccgggggccattgtcagatctattctgttcttactttatccactttgacggctaaccattattaagcattctcgctaactaaatatataattcaccgatcgtgatgatatcgtattcgtaaagattcacgtcgctgcgcaccgtgaataaaaaagtatatattataaaaacctttgaaaagccaacatggcctcttggatcttctatgatgcaaacaagacaggaccccccct

SEQ ID NO: 119057 - DNA, 481 bp, Glycine max
  unsure (1)..(481): unsure at all n locations
cacatagtgattccccctcttccacaataacaggggtcttcataaatgtgttaagagtgtcctcatcaaacttaatcaaatgacctctcacctgcacttgcttatggtgtctgtcctcacggtcatagaggttggcgtagaactccttcacaatggcaacatcgatgctaccatcaatgaaatcagtcaattcctcatcccagtggtgtctcgctatctcatctaagaattcatcanactctatggtataaacaaccatgttcctctcaagcaaaggcttcctaggcacaataacatctgcgtatctttcccaagcctcttgagaagtgaatctggatctgtcaaatctgacttgngtangcgtagaanggtgccttctttttctagaagccatctgccaaatataatacaaaacacacaagattagcatagagttggcacttagcgagcaatctggcgcttatcccttcacatattactc

SEQ ID NO: 119058 - DNA, 217 bp, Glycine max
cctacacggctcctgaaccattaaagacgctcctatttaattatctagccttgccgaaactgataaaccaagccaggaaccacaacattgaggtttagccatgactcactcaagtgagattcgtcagctatgagcactagctctagcaaaatgcacataggaatagattggctctctagcaaactatctcgcctcacagtagtatccaattccaaca

SEQ ID NO: 119059 - DNA, 431 bp, Glycine max
  unsure (1)..(431): unsure at all n locations
ctacttcacatggacttgatggtgcctatgcaagttgaaagccttggaggaaagaagtatgcctatngtgttgtggatgatntctccagaattacctgngtcaactntatcagagagaaatcagatacctttgaagtatttaaagaggtgagcctaagacttcaaagagaaaaagactgtgtcatcaagagaatcaggagtgaccatggcagagaanttgaaaacagcaggttcactgaattctgcacatctgaaggcatcactcatgagttctctgcagccattacaccacaacagaatggcatagttgaaaggaaaaacaggactttgcaagaggctgctagggtcatgcttcatgccaaagaactttcctataatctctgggctgaagccatgaacacagcatgctacatccacaacagagtcacact

SEQ ID NO: 119060 - DNA, 58 bp, Glycine max
attaaaggttaaagaggattaatgagacaaaggtgcagaattagtaaaagttttcaca

SEQ ID NO: 119061 - DNA, 493 bp, Glycine max
  unsure (1)..(493): unsure at all n locations
ctcatctaggtggtgaagctccttcttccatggcttattccctagtggatggcgcctcctctcacctcttctcctttgtcttccgctgcatctccatggtggaanatcaccattaaaggacctcattgaagctcatagatccagcctccatagaagccccacaagcaagcttccatcacctctctctgaggaatgaccatctcttgatgggcttgaagcgctgctgatgctctgctctccagaatcggtgcctgtcaaaatatgtgtcaactggctgggcagctctggagccttctccgacagtgtccttcctggacctctntgatggaagctctcttggggccatntcctgcgaaccacatttataaagtcagttcaccacatatatcattttatagcangaccaaggcaaaaccggatacaaactccccaacacacaacatcaatgtaatatagggcagctacacacacacgtcatttataacatacatgt

SEQ ID NO: 119062 - DNA, 257 bp, Glycine max
ccgggaatatttgtatttttgtaacagtgcatgctctcatccagaaacattcttcgggctctaaactcacatcacgtctgggttgactgtcgactaatattgtaagtgttgacttgatcaacatgaactactcatcctctgtcccgcttcttacatagctcatgactatcaaagcgtgggacttaccagggaaaatcaatgacaacattgtgggaaggtcatacctaccttctatatttttttagtcaaagaaacct

SEQ ID NO: 119063 - DNA, 390 bp, Glycine max
cccactaactccacttaatcatttgcctatgcctaatgtgtctgtttctaatcataaataaagtcaagcataagcggactatgtgaagaagcttcatgatggagtcaaagatcgacttgagaggaaacatagaagctatgcttatcaagccaacatagcgcagatagaaagttggcttcgaacccggagatcggttctggtgcacatgagaatagataagtactcgaacaaatgaattcttagcttaaccaagtgagatggaccttcaagtgctgatagatcatgacatgcttacaagttgactgccggtgagatatgtagttcacctcaatgtcttgactatctctttgacgtaagcgaaatccattgagacaaatctctcaaaggaag

SEQ ID NO: 119064 - DNA, 349 bp, Glycine max
  unsure (1)..(349): unsure at all n locations
aaatgcttggaatgaatattgcacttggtagattccttactatattgctatttggtattcaaagcagaatggatttgactttttctttttttccatcgcanttaatggcttaaccatttcgatntaaggtgcttcaaaactaggatgatatagtggatntgtgtgctanagatagagtcactggtcatggagctggaactgctatggatgctgatgaagcgatgagtagagaaacaaatgaagtggaattcatgggtttaggtgctgctgctactatagacttagaagattcangcgctaatacanaanggaaaaagaacaggttctcaacttcttctaccacacacat

SEQ ID NO: 119065 - DNA, 282 bp, Glycine max
  unsure (1)..(282): unsure at all n locations
tatgcatgttcttatgctgcaatactaatattcttatcattttagcactctgtgtaacttatgcncctattaaggaacacttataaagcgctataatcttcatatgctatctctcatgtatggcaccgacatatggtgcacactccaaataagtggtagcctattttagaaagtttgtacctgtcatctatgggaagtttacacttcactagagcatcttgacttcaccaagtagcttaggtatttagtgtacatggtccaaatgtgctttaatcacgagtg

SEQ ID NO: 119066 - DNA, 435 bp, Glycine max
  unsure (1)..(435): unsure at all n locations
tgtatggtggtcagcagatgagcacaaaccacanacccttgcgacaggtacagatntctgggtcaaggccagctgggttaccaagttaaccaatgcatccaattntccttcaagcttcttagtttcagatgatgcagctgggtttgtagctacctcatgcactcctctaatgactatagcatcatttctggcgctaaactgctgggagttggaagccatcttctcaattaaatttttggcttaagggctccaccactggcagcatctatcatacttctctccatattactgagtccttcataaaaatattgtagaagcagctgctctgaaatctgatggtganggcaactggcacatatgtttttaaatctctcccaatattcatacaggctctctccacttgagttgtctaatacctgagaatatccttcctga

SEQ ID NO: 119067 - DNA, 302 bp, Glycine max
  unsure (1)..(302): unsure at all n locations
tcattttcagagatgtatagtgactacatgatgtttaatttaattcttaaatttaacttttgataatcatccgatttcatatgatcattactgtgtgaatgaagctngacttttatatgcccataacaaatattggccaagcttttccaccatcatttatgatggaaacacagagctattgtcgtccctttacaatgttcataagaagtattgaaactgcccaaataaggatctgacatatgaaaggatggtgttggatgtctctccatcatactcgcattaacctttacatatgatgtatt

SEQ ID NO: 119068 - DNA, 166 bp, Glycine max
ttctgttgacacctgctctcatccaacactcgtctggattttcactgaaacttcacaaatccaagagcttctgttttacacatgctcctcctacgaccaaagcctttgttacaccattagcttctgccaagttcctcagtaacattaggtacctatttaaggacaa

SEQ ID NO: 119069 - DNA, 429 bp, Glycine max
  unsure (1)..(429): unsure at all n locations
aaagctcactacaagccttaaatgataaaccatgatatcaccatattcttaaggaatttnggagctttggaattgtcttgggaataagtgtgtggggggtttgtctcattgtgataacctcgtttgttggctatgcttcatgatgtattntgcgccatacttgatgtacattggatattggttaaatgttggacatgctgaatgaaatgcctgttctcaaaggctatatgagtaaaaaatatctgaaaaagattaagatagcattaaagtngaataagatcttaaatggcacaagaatgatgaaactcttggttctactctcttatgtttaaatttatctctacttctgtttatattcttagtttttcttaatatgcacttatgtcccattgcgtctctattcttttgtgattagccacttattccata

SEQ ID NO: 119070 - DNA, 118 bp, Glycine max
actcgggcttgttcatgtgttaaacagtactcctttcacaaatgcgcgcgacatataagcgagtctcggcctactgactaagacctccttattcttagactagagaattaaatgcatc

SEQ ID NO: 119071 - DNA, 359 bp, Glycine max
  unsure (1)..(359): unsure at all n locations
cttttgaacttctcacattgatntatntggtccctctagaactatgagttntgggtggtaattactatgtgtcgcaacctacccttcggcgggagggcgacgcgagactcgcgggatgcgtgttccatganaggaatacgcgcagagtcgccaccaacatttatttgangaaaacgtcngaaanaccgggaaagatgcgatctacgaacttttaagtgaaaggttcgggagttgtatttacgcacggngaatgtattagcaccccacacgtccgtcccaagggacggcagcctttaatcgaatgtgcaaacatgaccttgattntntatgttcccttttaagtccttacatcctntata

SEQ ID NO: 119072 - DNA, 152 bp, Glycine max
ccacgttatcgagtagctaccacttgtgctcaatctccgcctcaaatagcacctctcaggcctctcttcaatctgaaagaagagcctgctttcctagtcccctatccacaattccctctttccctagattctgaaagatgcctaagtacgag

SEQ ID NO: 119073 - DNA, 194 bp, Glycine max
atgacacttccattataatactctcttgtatataatacatctagtgctgaagatatatatattactatatatttttgataataaattctattaatatcataatatttgtacaagatggacctattaggttatctgagtcatactaaccgtgtaatatatatattattctataaggaaattacatatctacgtta

SEQ ID NO: 119074 - DNA, 371 bp, Glycine max
  unsure (1)..(371): unsure at all n locations
gaacatgtgagtagaagtatgactgattatgttagtcaattngcatattgatagtgaaggaatgcattgaccgtatcccagtgaaagtgtgatccttatatattgagagaaacgattatcatttactactgatttttgcatgaatctctgaagtatggactgaatgcatgaaatggacgatgatgaacgccatgtttgatggtcatagccacttanccaaaaagctgaccatgtgcttgaattgattatcccttgcacccagcttgagctgaatgaattattgattgattgaaccttgagcctatacaacattatctgctgctaccttgtcttaggttgtaagagagcatcatccacatgaagcttggttc

SEQ ID NO: 119075 - DNA, 269 bp, Glycine max
  unsure (1)..(269): unsure at all n locations
tcaaccgacgagcagacgttttgaactgtctcaacttttgagctatagtaatgagcacggtcggcttatcaattccttctaacacatctttaacgcacgggcatgtactatatgtcgatgattgagcttattaagttatactntatgttatttaaatactgctactacacattatgactttcatggattgatttgtctacccacttagtgcatcgtactagtctaatgtgcatcaccagattgactcaggagcaaacatatagtcagca

SEQ ID NO: 119076 - DNA, 318 bp, Glycine max
  unsure (1)..(318): unsure at all n locations
ttcgatatactgtaagtacgaatctgactatgtctggctagttcttgtgaacgcaccctcaangtgccttagctatcttcattcggaatatgcgaatatgattataaccctactgcttgaaataagtattttttcctttctttccttttgttgtttttgaaaacctgggattggaaacctgagaggtagccctgatattgtttgaaaacataaatctttggtaagtgggcttggcgaaataaactactaaaccacaagagtgggcagttgcacttcatctacttatatcaaaactgtaggcgtgtgttttttttaaaa

SEQ ID NO: 119077 - DNA, 352 bp, Glycine max
  unsure (1)..(352): unsure at all n locations
acacttgatnttgaaataatgtgtgatgctagtgattatgtngtangagcagttctgggtcaaaggaaaaataaagcttttcatgtcatacattatgcnaagcaggttttaaacgaagctcatattaattatgcaacaactgagaaagaatngcttgtagtattgtttgctttggaaaaattagatcttacttgataggatctaaggttgtggtttttactgatcatgctgctataaaatatttattggtcaaagctgattcttaacccagacatatctgttggatttaactgtgcanggaattgatttgggaatcaggataagaagggaggganaccatgtactgatcatc

SEQ ID NO: 119078 - DNA, 201 bp, Glycine max
gtggctgtggcctgctgtctctcagagttctctcgtggggtatacactattacggttctgagtattgcgctgctatatctgcaaccttggtatacgctactacgcactatgccatactcggtgtagagacatgactgtacataagaaaagcgtcagattctactccttgtaaggacgtcaacatttccaaatacatcctcc

SEQ ID NO: 119079 - DNA, 302 bp, Glycine max
  unsure (1)..(302): unsure at all n locations
tgcttctcttcatatctgcctgagtgggcttatagcctaaaccatacttcccacaatttcctttggcatttatcaagctagttatgccgccgttgtctttgcctaaacccattccgggttcgtaaccgttccccaacataactcgggccatcattactgctgcatcggacaggcaaggctgcccacagaatgagtccacggaggaaatgcttaccacctcanaagactggaaagcggtttctaatgactcctctgcggcttccacataaggcatagaggatgggcagctcaccaagatgtct

SEQ ID NO: 119080 - DNA, 437 bp, Glycine max
  unsure (1)..(437): unsure at all n locations
ccacgtatgatatctaanatggactagcataacatattcctgtgtcagagctacttatgtaaaggattnatttacaaaactcatatggtaaaaacaacattcanggggcaaatagacanagctgatacaactggtatccacatatagaagaattcacacaacagttcacagagacgcagagagagaaaaaggaaccagctattantctattgatactgaaaatagtgtctcagcactctcctctacaatgagtttccccanaanatacctctgcaatatctactgcaccactatttataataatttaactcctagctccctaactctagcttcctattccttctagaattcaagttagtactaggccccttattcctagcanaagcatagcaagaaataaatcattaccatctatctgcaaaaccaagatcatatat

SEQ ID NO: 119081 - DNA, 298 bp, Glycine max
accctacgtatgaccacatgtgtatataacatcgcctctatctctttttcctattacatatttttcgactctcctttatacctagactattccattacttttatgatattgtacatatcacattcattgggtcaatgaaacgaatataagttgtatcaagtgactgttgaacgcgttctgtttacatttttatctattacaatattaatgaagaaatgtactctatccaatattatcataacaattattttgtccattatttgaaaatccaaaatcttacaactttaactaatttaca

SEQ ID NO: 119082 - DNA, 471 bp, Glycine max
  unsure (1)..(471): unsure at all n locations
gacaatgtaaacaagatatacctgagctgaagaacttagtccacttgcatgctaatgaggtagttgattttatcggttcaagactctaagtaacactttattatgatatgctcaattcattatcggtagggaaagtggaagttgcactcatgaactacaatatgttggaccaggtgcttaataattagcanaggtcacagctgaataccagtctactctggaaaagacaatattttggatatcttggaataatcattgattgtctacttatagcnattctattggatcattttttaggactctattttattgaacatgtagacgatttttctaatgtgcanaatggttatccatataagtacaatattttctattgataagaacaatatatatttaattcctttgtgacatcaatatatatttaattcttgagtatttaaaatgtgcacatcaatatatatttaattcctt

SEQ ID NO: 119083 - DNA, 374 bp, Glycine max
  unsure (1)..(374): unsure at all n locations
atcggtttctttctggcttagcgcattgaaanaatcattattccagtcgttaaccagacctgaatttaaccacgccaggatcatggcgaggataataatgattaacaacactgaagttttattattcttacgcagccaanagggcttcaacagacagagatactntgctatcaacatacgaagcgtaatgggaatggttatcattagcgaanatngattgtgccatccaatgattatctatggcaatgaattactgatgaaattatttaagtatcatttaacaatatgaaatataaaggaatatttcattntcagtggttatgggtatgctattgataatcaaggatattgctaatgccctgatgcataccacg

SEQ ID NO: 119084 - DNA, 426 bp, Glycine max
  unsure (1)..(426): unsure at all n locations
ctcgattacaatgcacgcaagagaccatatatctaacgctggctcaatctgaccaacgaccgattctagtgacatgtaaataggtgtccctctatacttgaccctcccatacctcacatttgcatcttctctagtctcggacaacccataatcagcaatcgtcagttgatacctcgcttgatcatcatatgaaggatagagaatgattgttgcctggttngagatcacaatgaacgactctctttcgatgaatgcaagatnagccgctttgagatgcatacgagtgtagacctcttacttcactatctcgatatttggccgcttcttgtttactacaccaagataagaaccataaggagcacactctcatgaaagattgtatgtcacataatttctctcannagtgaattggtcaaatagcattga

SEQ ID NO: 119085 - DNA, 100 bp, Glycine max
cactggtcctatgctgagatgtgaaaaggtgtgtgagtttggactaatcatgtactgtggtggacaaggtccaggggattatatgaatataaggtctgtc

SEQ ID NO: 119086 - DNA, 345 bp, Glycine max
  unsure (1)..(345): unsure at all n locations
ctggtatgacttttcattttaaaattttgaaattaaaacggttagaagctctggtaatcgattaccagtattgtgtaatcgattacacaagttgaaaatggttaaacacaagttgtaactcttgacatttgaatcttaatgtttaaaacactggtaatcgatactaccttntgtaatcgataccagagaataaactcttgtaatgatttgtgaaacttcttgtctactcatgtttgaaaaactttttagtactatctgattgagcttcttgatcttgatcttaatcttanacttgatcttgatcttgcttgaacttggtactctgatcttgcatatcaaatacct

SEQ ID NO: 119087 - DNA, 434 bp, Glycine max
  unsure (1)..(434): unsure at all n locations
gttctagagagaganaggtccaagtttcatatagttctcggagaattttctgtgtgaagatctacagagacgtgagttcgaagcggaagccgttctgagagcttgagatgagtgtgtgagtgattgtgagatcctagaggggaaggagacatcctcaccacttgtgtttntgcagttnttcatcttgttcttctcttttgtgtaaaggaggtttccggactatggaaagctaaatcctctattggatcttccctataggtacctgatgtaaatatatttctatctatgtaatgatgttttttgtgtctctgtgctatctgcttttctttcaagtattgctttaccttgatcacgtagatgcatgctttgttanggtattcancagtgggaactggtctgattcttaagtccctgatagtatgggagtaagttgt

SEQ ID NO: 119088 - DNA, 234 bp, Glycine max
tatctatctttatctcacaaatactaaaactgtgtaatgagcgagcttaactactactatatagtctgtaagtattgtgagagtgaaatgaaagcaaaactttggttttttaattattattagataaaatttgcttatagtttgaattatttaatgaaaattattgctgattgtggctcaattttttttttttttttttttttttttttttctggcaatttccattttgcataa

SEQ ID NO: 119089 - DNA, 400 bp, Glycine max
  unsure (1)..(400): unsure at all n locations
gcatgaataanatacgttacgttcctcccttctctctcgctntctggaggtttcttgggcctcgaataccaagtataacagtggtgctttcattgagcatcaatggtggaatcaacgcgatctaagggatcagtagattgcctcgaggacgcaatngcaaaactcacagcttcacaactcgccatgaactcaaagatcgatgatctcctccaccgaatgtcgcaactcgaagtgaatcagcaacaaccgcaaatgccatcgtcttagtcggcatgacagacaccatcgcacagtccactgcaccgtatgaagctggacgttccgcgattcgatggcttcgatccaactgactggatcttcaaaatcacgcaatttttcgaatatcattcaacgtcggatc

SEQ ID NO: 119090 - DNA, 172 bp, Glycine max
  unsure (1)..(172): unsure at all n locations
ttatttcacgattttttttaattatattctcacttatgaatccatgctttctcctgaagaatagtctaaataatattgtcacatgaggacttcgagagaagtacacttgggtggtactcattacttatcttctaatttactacnattttgagcatatttatttaatcatact

SEQ ID NO: 119091 - DNA, 371 bp, Glycine max
  unsure (1)..(371): unsure at all n locations
cacgtccaatctcaaagaatgagtatgactgataaagggaagtgttcatgtactanntttattcaaatttattngcctctcttattntngaatagctaatgtttgaatntaagaaaaggatagtatagaagagaataaaaggtttccacggaatattcccctataggtcactttctctgtggacaaaaacacatggcattgcatatactatggataaatcctctccattcaaagcttacatgtcaccttattcttcaatgtaagacaccagtcctttaagatatagatgttgatcccataacagataagtcactaaagtctataaaagggtatctcatcgatgaagcaactgacgagcaagatagaacaag

SEQ ID NO: 119092 - DNA, 155 bp, Glycine max
tttttgaagcagattccaagcggctattttgaggaccaggaacgcctcaactaacaacttctcctttccttcttcccccacattttcataatttcaacttctttcacttttttgctacaccattccccctggcttatactctctcacatatggtt

SEQ ID NO: 119093 - DNA, 180 bp, Glycine max
  unsure (1)..(180): unsure at all n locations
attttgctttgtactccctgtttatggtgttttaacatgaattctttttatttaaaagggtataaaaaaaaatnttctacaattaacttatctttctcccttgcactcaaacatctatgaaggaaaatgtcctgtgatgttagatagtgtccaagcttaccatcttatttgtcacaaaca

SEQ ID NO: 119094 - DNA, 385 bp, Glycine max
  unsure (1)..(385): unsure at all n locations
tgcagctgctattacccgaattagagagatgagtttttctcccaaagggagactcagattaataactatacttacgaanaacttatacccttcaaataccctaattggagagttgatccattacacagtttatcacaaagtaggcgattcacgactatagaaactagtgataaacatctacgaggatgattgctccttcatatctactactagatactgatatatgatagggatgctttgacagatctagctgactgactcagagcatatctaagtgtaagagtattacattctaaatactacaccagagtgttataaaaatagatcaagtatagtacagggagagcatactggactgctaaattggcagagagcaacttatgtt

SEQ ID NO: 119095 - DNA, 275 bp, Glycine max
gttgaacgagaaactgtttcgcctaagatatatatgaatgcagacgatggactcaaccaattctttacacgccctgctcataagaaaaggatgaaaatgataggagaagcattatcttgatgtgtttaaccagctgtctgaaagaattgtaatagtaaatgctgcttgatagcctgcataataactgctatgagaagtaacgttttattttatgtgagtgtagactgttatttttgttgctttttcttttattacgttaaactaaacgctccttc

SEQ ID NO: 119096 - DNA, 359 bp, Glycine max
  unsure (1)..(359): unsure at all n locations
tttaatcctctgacacatcaaatctcattatcataatcttaagaaggataggcttaaaataccagaagaagcaacattctataatntaacaatgttctttaaacatgcaagacacatattgattgccaaatattaaataagataacggaagagagaatgcaaacacnagtttatactgggtcggccacatccctgcctacgtcaagtctcaagcacccactgagatttcacatcttgaaaatctatacaagactggcctccaggacaccattcttggtcacgatctttcactaaacatacaccctcttctacctactaatttacaatgtaatgattctctccacctacaatattctata

SEQ ID NO: 119097 - DNA, 403 bp, Glycine max
  unsure (1)..(403): unsure at all n locations
acataaggcatagaggatgggcagctcaccaagatgtcttcctcgcctaatacgatgaccagatgcccttccactacgaatntcaactttnggtggagtgtagagggaacaactcccactgagtggatccacggccgccccaacagacaactgtagggggggttaatatccattatttggaaggtaacttgacaagtgtgagggcctatctgtaccgggagatcgatctcccccttaacctctcggcgggtgccgtcgaaggcacgaaccaccatngaactcggctttaggtgggaagcattgaatggtaatttctccaaagtgctcttatgcatcacgtttaaactgtaaccattatcgatgaacactttggctacgatatgtgccatacacttgactgaca

SEQ ID NO: 119098 - DNA, 411 bp, Glycine max
  unsure (1)..(411): unsure at all n locations
ctgtatggtggtcagtagaggagcacaaaccacaaacccttgcgacaagtacaaatttctgattaatgtcagctgggttaccaagttgaccaacgcatccagtttgccttcaagcttcttagtttcagatgatgcagatgggtttgtagctacctcatgcactcctctaatgactatggcatcatttctggcactaaactgctgggagttggaggccatcttctcaattaaatntctggcttcagcaggagtcatgtctccaagggctccaccactggcagcatctatcatacttctctccatattattgagtccttcataanaatattggagaagaagctgttctgaaatctgatggtggcggaactggcacatangttcttaaatctctctcagtactcatacaggctc

SEQ ID NO: 119099 - DNA, 191 bp, Glycine max
actaggttgtatatgagggtttacttatgtaaggtcaacggacacaacagacataacaagatgtagtttgtcttgaacttagagtacgtttccaatgtagaagtcgaatactgcaacaggatgttaaggacaaacggaacattcataaactggacgtaaaggacaaacaatttttaaatttatgattttct

SEQ ID NO: 119100 - DNA, 311 bp, Glycine max
gtgatccagatgcctaccttgactgggaaatgaagactgagcacgtatttgccttgcatgactacactgatgcgcagaaagtcaagctagcagcagctgaattctccgactatgcccttttgttggtggcataaataccaaagagaaatgttgagagaggaacggcgagaggtagatacatggactgagatgaaaagggtgatgagaaaaaggtatgtgcccactagctataacagaaccatgcgacagaaactccaagggcttgtcccaagggaattaaccgtggaagaatattataaagagatggaaat

SEQ ID NO: 119101 - DNA, 186 bp, Glycine max
  unsure (1)..(186): unsure at all n locations
gtgatctcatagccgaagatgaatttccccttgcggacaatgacgtangcctcactgtcgagggagtggagtaacgctattttgaggaagaggttcgtggagaatgcgttgtgggccacaccaagtgtgatgtgtgtgcttgcgggttgtgctcttcttccgcaactctgattgtgagagaaaaca

SEQ ID NO: 119102 - DNA, 197 bp, Glycine max
gatgagaaaaagatcctcagaaacttaactcccttggctgtaaagtggagagatattagaggaaaaccaatttgttaaagttaacgagtattcagacagtgaaaagccctactttttactatgtccaatgagaatgattatcattcttatgaagattgggcaattctattatggatttttgtagcctacaacatcaa

SEQ ID NO: 119103 - DNA, 353 bp, Glycine max
  unsure (1)..(353): unsure at all n locations
cactcacataaattctccccctttggttttgaatttatgcttatcttaaaaataagttgattactcatgtgaattcttgatttaatcccatttctctccccctttggcatcaacaaagaagccaaagtgcgtatcaaacttaaggtatacaaatataacttanacatccatacaatgttcatgaaataaaaatatcaaccaaatcatgaagcaagaagcaagaaccatgataaccatgaagcaacaaccatgaatagattaattataaactccacatagtcaaataacatacttaatattggtccaaacataccatgcaaataaggaaatagcanatttgtcaaataccataa

SEQ ID NO: 119104 - DNA, 508 bp, Glycine max
  unsure (1)..(508): unsure at all n locations
atccttaagtcacctgcggcatgcaagcttctaaactntatacaagagtgaagctctgatacttcttgttggacaagtggcctcagatatcttaagaagggggggttgaattaagatatcacaaactattttcccaattaaaattctatttcactttctattcaagttacaaattcccttaacaatgaacttcttaaattataattcaaatagaacaatctgaatataaatatgaaacaataataaataaaagagtttaagggaagagaaagtgcaaactcggatttatactggttcggccacacccttgtgcctacgtccagtccccaagcaacccgcttgagagttccactatcttgtaaaatcnttttacaagttctgaacacacaaggacaacccttcctttgtgttcagaattcttttacaacaagagaccctatgtctcttaatccattagagaataagaacgaagagaagaatgactctctctcgaaagagatagatttta

SEQ ID NO: 119105 - DNA, 280 bp, Glycine max
  unsure (1)..(280): unsure at all n locations
ttttgagggtgcactaattngatcgaatgaatactccgatttctctgtgcatgaagctcgccggttagttcgcaccaaccaagcggattatgaccggaagacttcttgctggttcattggctatcgagagccgcatcctccattaccttattgntcgcatcttactccctagatcttcanaccttgctctggtttctgaagaagatctcatngtcatgtgggcctttcataatggcttacacaatgattgcgcacacctctgttagatatcggcttgcat

SEQ ID NO: 119106 - DNA, 479 bp, Glycine max
  unsure (1)..(479): unsure at all n locations
atcttaagtgacgccgctgcagcttgtgaatcgatacactaagttggtaatcttttaccagnngatgttctgaataaaaaaaatatgaactcttcaatggtttttgactttttcaaattggttttaagtttttctaanagttataactcttctaaatggttgtcttgaccagacatgaagagtctataaaagcaaggctttgttttgcatttcaagaatcttgaacacttattcatacaatcctttacaagccttgaatctctttgaacttcttcttcttctttgtgccaaaagctntctgaagttttctggttttctaaaccttgaaaacttgtgctattcatcttttcattctcttctccctttgccaaaaagaattcgccaaggactaaccgcctgaattctttttgtgtctctcttctcccttntccaanagaacaaaggactaaccgcctgaaattctttgtatctcccttctc

SEQ ID NO: 119107 - DNA, 227 bp, Glycine max
acctgaacaatcttcctgctcaaaaacttgattcggagtaacttctcattacaccatattagctgttcttttctcaatttggacatgtttaccacccttgaaatcaatctcaaccccacccgagcaaccaattgctcatgatcaagttcatcctcatggtgcttatggaacttcttcactatgcaattcccgggtctcactatgtccttgagccttctctccttctg

SEQ ID NO: 119108 - DNA, 352 bp, Glycine max
  unsure (1)..(352): unsure at all n locations
tcataccacacacgcacttacaatcaaaatccaagagactgatggaacattcaacaatttatactacaaagtcaatgcgaaaannaagnanatnncaatgggcaacaagttaagtaatgctatcatatgagggttcgagagtaaaccactagaaaactagctagaatgaaagaagactntagatntnntaagaatgattggcttatnaaagaggggtttagttgtntaatgggacaacggttaagtaagctatcatatgaaggttattacggacctctcattgagcataaatgaattaatatccaacaccatcatagaccattcaaaacaaaagcctaatacaatatatcca

SEQ ID NO: 119109 - DNA, 278 bp, Glycine max
  unsure (1)..(278): unsure at all n locations
atttctcaatcaaaacattctcaaacacttatattatgccaaacaatccactgcgaatcattttccatcaattcactggtcaaaccagctttntggtaccagccaaccactcaaagtgctgaatttaaataactgaaaagtaaaaaatgaattaaaatgttgaacatataatcataaataactgggaaataactaaaatgttcaagatcacaaatttaaatgtcctgcttctgtgcatgctcattataggccaacacctgagcaactggtgaatccta

SEQ ID NO: 119110 - DNA, 256 bp, Glycine max
  unsure (1)..(256): unsure at all n locations
tgagattgagacaaatgctagagaaaaagctactcttctcaagaactctcaggagtntgaaaaaaactaaaagatcttcaaataatttgaaggagctgaatgaacgtcatgattatcanaaggaaaaaagatatgatctatggagagaatgtgcacaataacacanatgatatatagatctcaaaatgtgtaacataatctttgggtggaatgggaagacacanaagatctgtgaaatcttgaatgatagcctttg

SEQ ID NO: 119111 - DNA, 235 bp, Glycine max
  unsure (1)..(235): unsure at all n locations
aaaaatttaggaagcctacactctttctanantttttgaaaactaaaatgtcgaagaccatttggactttaagatgaggaaaaacctcaagacaaaaggtgctacattttaatatgtatcataaatgtcctggatgattgtcctatccattggactgtgggagtgcttatcattatctattccgtgaaaaacacctatctactgatcttactatctgtaatttatacaaattata

SEQ ID NO: 119112 - DNA, 80 bp, Glycine max
cccaacggcggtctatgagttgtagtgtttgaatcagattccgcagtgacagtgctatttcatttgcagaaagcctagag

SEQ ID NO: 119113 - DNA, 318 bp, Glycine max
cctgaggtcctgttttaattttttttcgtcattatcttgctttgcttttcgtgggttctagatacctcacttggttttggggggaattaaatggtgttgcatgtgtagttaaagttgatgttccttgtttcaatttattttggtgattttcttgctttggtttcgctgtgttctaaatactcagcttgggtttgtgacatgtggctctgctatttttgtgccttggttctgacatttcacttgcaatcttggtgtgacacaatggtaacatttcagttgcaattttgttggcatgcacatgtgtaattaaggttgatg

SEQ ID NO: 119114 - DNA, 450 bp, Glycine max
agcttaacctcattgctctacagtcttatatttgtgagcaaatcacatcttgtgtccggactctcagccacttatggtagccgccgatgatcccgtacttgcttccctaagctctctgtcctttcttcacaccgcatcacctgccttgcgaactccttggagtacctttgcattggggtcactgaaaccccgtgtcatgaaaggcgtgatgctttcgtctaatggcgctcctctcatggggtagccaagctgtcttatggcgaggacgggattataattaatacaaccccttgttccatcaagggaacatttggacatccttcgcatgaagatagaatcctgattcttccttccttctagcgagggaaccaattaacaaacgcctctctatgctagccaagaagtggtcccatttcgtctcttttttttcgacgcacgagcggtgacctt

SEQ ID NO: 119115 - DNA, 423 bp, Glycine max
  unsure (1)..(423): unsure at all n locations
gtgtaatcgnatacacattantaaatttgaattcanatttctagtgactattataaacattttcagctgctggtaatcgattaccggagagcaaatctcaatttgaaatgatagaattctttggtcaaaccttntgttttttcaatttggaaacttcttccaaaagattctagaaatcaacttgatcatatatcttgactntcttggattcttgtcttgaataaaacttagaagcacttgatcctttagcatcatcaagacatcaaaacatcttgcttctacatatgagtcatttgacttaatccatcanaaaatccttcaactatntctcgtccttggaaaattcntttgcaagaataactgctttttcattcttctcactacgggctatgaaaacagaaacgattgtacctcaaagcctac

SEQ ID NO: 119116 - DNA, 299 bp, Glycine max
  unsure (1)..(299): unsure at all n locations
aggacacagatctgacttcagagaataggcgccggcggtggcaccactggttactcctatggccaaggttgatccagaaatagtccttgangtttatgccaatgctnggccaacagaggagggcgtgcgtgacatgaggtcctgngttaggggtcagtggatcccgttcgatgccgacgctatcagccagctcctgngatatccgatggtgttggaagagggccaggaatgcgagtatggccagaggaggaaccggtctgatgggttcgacgaggagggccatcgccagctgctatgta

SEQ ID NO: 119117 - DNA, 93 bp, Glycine max
ctaaaaaaaaagatttatttggtagaagagaaggtttataagttttttatttaaaagccagtttatgcaaggctttttggattctgcaaaaat

SEQ ID NO: 119118 - DNA, 462 bp, Glycine max
  unsure (1)..(462): unsure at all n locations
agctttcgattcattctatgtacccgtagtgtccttactgtgtntcgngcattattattctcgtttagttacttttatacccctgtgacatgctagccatttacttaagtcatttctcgcttaaccttaaaacaaaataaatctccgccgaacgtttgaattgtattatccattaacttcggttaaaataaattccgaccgttcggtcgtgccgtaaccatgttgganatcaaaaagagggtaaataataatatantagtcacaaagacatcttttagtaaaataaagcggaaaatcaatcggacgttttctctttgggatttctcattcttaatcgaattgattaataactaaagtgaaactaaaggctaaaatcaattcgcctagtcaagctcgtccacaaaaataggctgttgaagtttgtcatctcaatctctcactaagtaaaatggatcattttta

SEQ ID NO: 119119 - DNA, 423 bp, Glycine max
  unsure (1)..(423): unsure at all n locations
gtcacctgcggcatgcaagctntaacctcatcgtctcgcacagtctgtatatttgtgagccnatccaatccttgtgttctgactctcaaccacttatgatagccgccgatgatcccattacttgcttccctaagctctttgtccttcttttgtaccaccccccatgccttgcggaccttctgaagtgtctccacgttggtcttattgaagcctcatgaaatgacaggcgcgagcccatcctctagtggcgcccctttcatagggtagccaagttgtcttattgcaagaatgggattgtagctgatgcaacccctcgtcaccatcaagggaacaattggaaatcctccgcatgaaataagaactccagttcttccttccttccatcgagggaaccagttgacagatgctccttctttgttgcta

SEQ ID NO: 119120 - DNA, 65 bp, Glycine max
ttactggcttttttgtctagctttacttctgtattccactttctatggcccgactttttcagctc

SEQ ID NO: 119121 - DNA, 457 bp, Glycine max
  unsure (1)..(457): unsure at all n locations
atccttaagcaccgccgctgcagctcgtctagatcctcttgttgactttgccctattgagacagcccctctaggtntagaccaacttaaactgagtttggtccacacatccctcttgtagactagactcagctaagcaactacgaaatttagcctaatttagcctaagctncgtctacaaatccctcttgtaagactgggcctagactaaacagcattattgtaacaacataattaataccaaaacttaatccgcagatccctcttgtaagaactaagttcgatcctgcttcaatcaagttctaaggcaatagtacatttcccaatgctaaagtcacctaactatgcacacaaatggatgatcagaccataagcatcaaacattaagcattgaatgaagcattgaacatagaaaacataatcaattagatattacgtatttacattagtgtgtcatt

SEQ ID NO: 119122 - DNA, 347 bp, Glycine max
  unsure (1)..(347): unsure at all n locations
agctntaagaaaagtcaaccgacacttactttngactctgatgtccgattgagccctggaatatatcgagacgctccaaatgaaatggaacctctaagaaaagtcagacgactataacttttaactcggatgtctgatcgagccctgtattatatgaagacgctcgaaatttgataacagaagctctatgattagtctaacgagacaaacttttgactcggatgtccgattgtgtcccgtaggatattcagacgctctgtatttgaatacggaagctctgtggaaaatgaaacgacaataactttaaactcggatgtccgattgagccctgaattatatcgagacct

SEQ ID NO: 119123 - DNA, 158 bp, Glycine max
tcttctttgggacactggcgcgatctccttggggtttatatctcctttgagttgatgtcttcaacttaattcgtctcaaagcactagctcaatgctggagtcattgccgacatcctaatctgagagtccatctattggtccctttcaacatatgttga

SEQ ID NO: 119124 - DNA, 78 bp, Glycine max
  unsure (1)..(78): unsure at all n locations
aagagggagagaagtggaactttgaagtgtgtctcataagactntcaattcatcaaagtacaacaagtggtacacatg

SEQ ID NO: 119125 - DNA, 313 bp, Glycine max
  unsure (1)..(313): unsure at all n locations
tcggtcccctcttttgtttctgtaaaaantaaataaattaaaaggtcctcagccaaaggatagttatattataattaagggtcaagactagatgtactgaagtgacaacatatagcataggagtgagaacactgccaaataagacaaatccatgacggatatgcatccccccaagaaattctacctcaattaacaccgggataaataggattaaaatcttcttatcacttaccaaaccaacatgaatatgttatcatgattttcggatgaagagtggtatgaaacatgtgtttggctccaatgcataaaggta

SEQ ID NO: 119126 - DNA, 277 bp, Glycine max
  unsure (1)..(277): unsure at all n locations
gcctgattcttgcctcacacaagatggactttttcttttataaaggactttgacgaccgtgaactggaggatttctngtttctccacatctttctgatctctcttgtgataagaactagttcatcatcttcttcattagagtcatcatccttaaattcttcttctaaagcatcattcacgaacaagactttggacgatgactctntggacacagagttgcattttggtcgttgaatcataagggctagagaattccctctctttatttcttcatctt

SEQ ID NO: 119127 - DNA, 342 bp, Glycine max
  unsure (1)..(342): unsure at all n locations
atatgacagccacctgtttaggagcgctgaacaccagcagcgcttcgagggtatcaaaggatggtcatttctccgggagcgacgcgtccagctcaaggacgacgagtataccgacttccaggaggaggtagttcgccggcggtgggcatcactagttactcccatggccaagttcgacctagacatagtcctcgagtattatgtcaatgcttggcctacagaggagggtgtgcgagatatgcgatcctgngtaaggggtcagtggatcccatttgatgcggatgctctcagccagttcttgggatatcctttagtgctggaggagggccaggagtgcgagta

SEQ ID NO: 119128 - DNA, 489 bp, Glycine max
  unsure (1)..(489): unsure at all n locations
agctngcatgatntacattcntcccctttctcaagcatattcttaattcttcttgacatcatcaaaatcttcatgatttacatctctcccctttttgatgatgacaaccacctgtaggttaggagcaacaacaaagaaaaaatatctatttgcatatagtttactcccccttggttnttcaatgattgcttatatgagacagttgaagatttcatattnttcatatgtaaacaaattgtctcataaagaatagataatttttcttactaatttatcttttatctttttctccccctttgtcaacatcaaaaacaaatcatgaataaagaggagaaagatgttaccacttgttgattacatacatatantttatctgttatcttggtgattgcaatgcatgagaatcaagtgantaccaaaagcattaaaacaatcattcaatattaatcaagccaaaacaagtacaatagcacatcaatcaaacacaat

SEQ ID NO: 119129 - DNA, 449 bp, Glycine max
  unsure (1)..(449): unsure at all n locations
atcttaagcaccgagctgcagcttagttttcaattagatttttatttattactctacctaacggtacaatgtatatcatatgagatgtcatgaaaaccagactcaatttttttctttgatttgngttttattttggtttatgttcggcttcgagcaattctatcgaaatacatgttcaatgaatgctntagccatggcaatgggacgaatttgaggcaagtgagctctttccatcgagctcttgtgaggacacatganaggtttaaatttaatgctgggtttagtagagatggggatagaaaatttaaatntaaatntatactcagcggngttagtgaaactcacgaggaatttacttcaattttttaatntaattntatgtaanggataaattatattttaatttaaagaaatatataanaattaataanaaaatctttaaaataaag

SEQ ID NO: 119130 - DNA, 394 bp, Glycine max
  unsure (1)..(394): unsure at all n locations
cttaatcacctgggctcagcttgaagccagaacccacaatttttattccttaccagtcaagaacttaatgatttatgtactcttttattacagacacacgtctacttactcgacagtttgcttctacaccctcaaaagatccacacttatcatcatgatggcctattcatacttccacaagtaacggagcgttgcatagacaaaggcaaacaagacatacataaatagtgcaaaatttgtcatcgaaggaaagcaaatgcattgaagaaaaaatataaatttcatagttgcaaagtctatacaaccaanatccagtagtgaagaaaagaataaaataaacaaaaggcaacctatacttgngcttcatcaacaccctacttctncctagaaccct

SEQ ID NO: 119131 - DNA, 341 bp, Glycine max
atctcactggtgtagatactgtgtgttagttatttcaagaagttttgtgtataactcccttgcttgtgtgcaggaaaaatggtttagaataagtttttcaataaatactattcaacaagggattggatatgagtcctgacaatggatggttttgtagtgcttcaagggatggacagctccgtttggtccaatcaacacatcaataatgattaacatcaataatcattaacaataataaaatctgatgtgatttaactgtcctagtttcacttcaattcgcgatatcattgaatcctcatgtaaactatatctgcatgtcaggacatcagtgattcagtact

SEQ ID NO: 119132 - DNA, 407 bp, Glycine max
  unsure (1)..(407): unsure at all n locations
agcttttgctgcaaaattcctttntgttggtggtttttttttggnttgcgctaaaggtggtcttcgtcattggaagtgcggtagacagactntgtggttgatttagggatggctcattgtggataactgggtggtggggtaaggaggaaggttgttattggctgattaatgacattgttgggctggtgggaaacttgatcgtataagaatggtatttaacagcatggaattttcccttttatataccattttcatttgctcagatttatcattccacctatctggattatacaacttgtctactttcacatccatcttatcctcttctgaaatacactctcaacaccttcctcttttctaacaccaatattttatgttttcatctcttttctctcctattttgatac

SEQ ID NO: 119133 - DNA, 434 bp, Glycine max
  unsure (1)..(434): unsure at all n locations
agctntaaccttannggttttaccatgttgctcnctctatctctaacagngttatggcatataataaatntatgtttgaaaaagctattagtgctataaggaaatngagtaaagaacctgcttgatggctattacataaagacataccanagcatacatgggctaggcacacatttgaccctcaatgcaagagtgacaatgtaacaaacaacttctgcgaagtgtttaatgcttgggttgggacgataggaaatagactgtcctatcaatgatgtaatctataatttgtagattaatgacactttntgacaataggagagacaaggctgcaacttaccaatttactattacccctagggtcaaaagtgtcttggataaaattgtggaagatgggaggtattgtgttgtcacacatggtggcaatgatgagtatc

SEQ ID NO: 119134 - DNA, 380 bp, Glycine max
  unsure (1)..(380): unsure at all n locations
atcctctgagtcacctgcggctgcagctntgaccaatnctgactacataatcttttcaggtgagatgtcattctaccctcgagcaaaaaaaaaagatatttccatcaaagaaaattaatgaaaggaatcccaatcaaagagtgggagaaagcanaaagaaaagaaagataattcccaatcaaagaatgggagaatgaaaaaagagagaagaagaagaaagggaagatagttcccgatcaaagaaaacaaaagatatatgcagaaaggtctttggaccggacaatatctgaacaatacaaaattgtcaccaaatgaacaaaaagaaggaaaggaaaccacgacctanaatggtctttcccctttaattgccaaccaaaatc

SEQ ID NO: 119135 - DNA, 468 bp, Glycine max
  unsure (1)..(468): unsure at all n locations
agcttgatctaccaccaccgtcgccaccatcatcttagttttttctattattttaatattactagtactttngtttctagccgtgtatttggctatattatgacatttgaaccaattagtattttctttatttgcatggtatgattgaacaattatgaattatgttatatgactatgtggttttttatatatttgatctattcatgtttcttgcttcatgattggtttatattcttcaatgaatgtcttgtggatgattagtagtgtatgtatgttttataatgtatgtatgtnttatactcgttacacactttggatntttgttgatgccaaagggggagagaaatanggattaaatcaagaactcacataagtaattaacttaattcaagtaaagcataactcaaaaacaacggggagatatggaaaataagtgatgatcgatatgaaaagtgtggttgtgttctt

SEQ ID NO: 119136 - DNA, 406 bp, Glycine max
  unsure (1)..(406): unsure at all n locations
tttaatgatataagaagacacttacgagtgagacataagtctataagaaatttgatttctcatgtggcatttctttgacttgccggtcagaaaataatattgcggatccgcttacacaagggttgacgcgtcaacctgtacttgagtcgtcgagggggaatgggattanaacccattatttagttacaacaatggacacccgtcttcgtgtgattggtgatcccatgaatggagttcaacaggtaacaacgaaattgtctgttgacttaagtacaccactatgaaacttgacggatctgttccgttctcattcctatgacgaggtgtattataaatagcggtaatattcaacgttgacgcatttatatatatgtatccttggtaataaaaacctcttatgaatcca

SEQ ID NO: 119137 - DNA, 372 bp, Glycine max
  unsure (1)..(372): unsure at all n locations
agctgcagctgctctacactgtggatgtagccacaagtttngtatttcaggacatcaccgtatagcagaaaggtgccctcatagagatgaatgtagattttccatatcctctagcgccatctttatctaattataggccgaaaacccattcatgatagaaaaacatggcacaattggttctgttatctaccagcacatcgatgtgtggtaaggaaagttatctttggactgactcatttaaatcccgatagtacacacacattcgnaccttcccatccggtatatggactgccacgatattggtgacctcatccgagtactgagcatcggccacgaagccaacattgaattgatcttcacctcttcttttat

SEQ ID NO: 119138 - DNA, 481 bp, Glycine max
  unsure (1)..(481): unsure at all n locations
atcctctgagtcacctgccgcatgcaagctttggtttgggaaatagcaccccacctgacatcctttatgtctcctgacccccgcgacatatctccaggtaccactctgtggtcaacgaacaatagttggaagactgactcttccacgcttcctcatatcaagcttattggattatggggcacccatcatatgtggtactaggtggctatcgngcgatggcacaaatcaactctcccatttccacaagtcaggcataagcacaccatccccagttgcccacctttaaattgagctcacacacttctacgtagcccttatacttgtttctctcagcaccgagtccccatcaacccctccaagctttcacaatatccaaacaattcgattccattatcatgatactaccctaaccaagagaaacatagtggaggcagaatattctgcacatagctcatccatattccacagtttgttctactta

SEQ ID NO: 119139 - DNA, 417 bp, Glycine max
  unsure (1)..(417): unsure at all n locations
cgcagcttgagttatctatttggtgtatgatgtgaaagcttatatggngngaacgctcgccctgctaaaggatcgcttgtaactagcatgcaatggtgcatgtgcgcatatggtctgcgaaatgaaatatatcttcccttctttctttattgatattgatgtgatttatgatatgcgggtgaaggacccatatcacatgcaacaccatataccacgccttcataacagtatttactatatacagaaaaagaaatatgatatgactagtgactttatgcgatatctgctatgactgataacagaatctgaaatcatgatgtaaattctgaacagaatttcccattttgatataataataatgtcgaattcatttaatctcatcacaattcataacttatcttacataggacattattt

SEQ ID NO: 119140 - DNA, 409 bp, Glycine max
  unsure (1)..(409): unsure at all n locations
ttaagtcacctgccgctgcagcttagccaatgattagtcaaccaatatgtttagtagcagatcagnttgatgtctaatataagaacttgtaatcattacacttccatgtctccttggctagaaaattatgaatttacctgaaaccataaattggacaatgctgcagatcattctgtaagataaagaaacgctttcatattttgatattcttgacttatctttaagatatgcgaggatggcgtacctcatcaattcgtcgtcaacatgaacttccaaaggtatagacaaaccttttgataatagtcttccttaattctttacatggtttcagagactaaaatctgctccttctcttgtgctagtccaatctttcttgtaattgatgagagatacccacacattgtttatg

SEQ ID NO: 119141 - DNA, 418 bp, Glycine max
  unsure (1)..(418): unsure at all n locations
agctntacttcttggatatngtttatgttattgtgagatngtcaagcagcttaaatacaacacatccataaagttgttaatcttgtgacctattaaagagcctgtactttgaggatcagtatagttgtagtttatttagtttgatagcaactataagatgcttgngaattttttagttgtgctcattccatgcaacttgtttccatttgaagtatatgatgaatttttgagcatgcataacatgcagctaggcatgaggaattatagtttgacatatagaaacctaaattcaatttgattctaattaatgtgagaaatggtgcaggcacgaggtagctggtgtagtgacagaggtgggaagcaaagtataaaagctcatagttggagacaatgttggtgtgggatgcttggttgattc

SEQ ID NO: 119142 - DNA, 142 bp, Glycine max
acttgaactgcagtttataagacattaaatttattattgatctgctgcatccctcatactgatcaattgaacattttcctataaatctacagatcaatgagaccctatctctaatttatgctgctatacttgcaattcatac

SEQ ID NO: 119143 - DNA, 490 bp, Glycine max
  unsure (1)..(490): unsure at all n locations
gatcttaagcaccgcggctgcaagctgctgattacatctcctatttctaagcaaattcttctggatatcatcaaaatcttcatgatttacataactttgatgaatgagagtcttgtgagacatacttcannagtccacttctctccctcttttattccttcaatttcgtgctcccccctctctatttctttccctctttcttttcctccattgaagcatcctctccaagcttcttatccaaggcttatcttggtggtgaagctccttcttccatggcttattccttaatggatggcgcctcctctcacctcctttcctttgtcttccgctgcatctccatggtggaanatcaccattaaaggaccccattgaagctcanagatccagcctccatagaagccccacaagcaagcttccatcagtgtgacaccctctaccccacatatattaaataaatanatatattaaaattcggtaccaaattacacgg

SEQ ID NO: 119144 - DNA, 83 bp, Glycine max
taaggctggattctcttgcctgtcaaacttgtcaatataagctgtttgaaataaattgtgttccatctcactttttttagctc

SEQ ID NO: 119145 - DNA, 332 bp, Glycine max
  unsure (1)..(332): unsure at all n locations
gcatgtcattttcgaccgatggtaaatctgcgaattctagtagtgctcgagccaagttatacagagaaatattgtgccggcagaatcatgttcacggatgatttttctgctacttgcatgctcgcagcatgagcaatncaatcgaatggcaatggtgttgtgggggatctagacgggatgacaccaaaactctagaatacaatctacgtctctgatcaattagtgatgagaagtgatgaattttacataagctgacaaaatgcttactcaaagggatctatgcctctagcacggaccaaaatgatcgtgttggatatcacccttccacaaat

SEQ ID NO: 119146 - DNA, 454 bp, Glycine max
  unsure (1)..(454): unsure at all n locations
agctgctgaaatctttgcnagcatcataacatctcgcataagtgcaagcaaatcagaagaagacatgctgcagtgcttcattgactcaaaatacaaagatggtcgctcaacaacagaagctgaagtgactgggcttctcattgctcgcacttttgccggtcaacacacaagctcgattacctccacttggactggggcatatctgctgtctaacaaccagtacctttcagctgcgcaggatgagcagaagatgttgatagaaaagcatggggacagaagtgatcatgattgtttggctgaaatggatgtgctgtataggtgcatcaaagaagctttgagactccatcctcctctaatcatgctgatgagaagctcacacactgatcttagtgtcacaacacgagaggggatagagtatgacattcccaaggtgcatataattgccacatcacct

SEQ ID NO: 119147 - DNA, 312 bp, Glycine max
  unsure (1)..(312): unsure at all n locations
taccgtttccgtgagttattaatgcgaagattctcgaccgttcttcaagattcatcgtccgttctttcgttttcttcagtcttcaacgggtaagtacctcanaccaagcttttcaattcattctatgtacccgtggtggtccacanntttgttcatgtatttntattcttgttttcatttactttntatancccactttgacgttgcttaagccattatttaagtcatttctcgcttaatctanaaataaaataaattccaccgatcgttgaattgatcatccgtaattccgtaaaatgaatccgaccgtcg

SEQ ID NO: 119148 - DNA, 483 bp, Glycine max
  unsure (1)..(483): unsure at all n locations
atgcaatctgtattcaagacaaagagattaaagatattcattatgtatgatcaacacagtctctagagtcttagaaagggtatattaaataggtagggaatttcaaattgaagtagcaaaaggtctggccaagaaaattaagttaaataaagttttttcaacaaatttactctctggtaatcgattaccagaggatgtaatcgattaccagtggccaaaactgatttacaacagctattaaaatttgaattcaaaatttgcactgtgtaatcgattacacatatatggtaatcgattaccagcagtttctgaacgttntaattcaaattttaaagcttgaatcgattacacatatactgtaatcgattaccagaggagtttttcagaaaacattcttagcagtcacactcttttatctgtctcttaaatggccatcacgggcttatatatatgtgactcgagacacgaattaacaagagtttt

SEQ ID NO: 119149 - DNA, 329 bp, Glycine max
  unsure (1)..(329): unsure at all n locations
tgatgcaactgtgatcgtatgcccatatcagctagatcttgacgggtattcaagccatccttcgtcttgccttgaatgttaaggagcatcccaatcacactgtcacanacatattttctccacatgcataacatcaatacaatgtctaacgtcaagatcagaccagtatggaagatcaaagaaaatggacctcttcttccatatgcaactcttacttttatccttcttttgggtctttccaagtacattattcaggtgttgaacccgctgatatacctcctcagcagtcaatggtatcggcacaatatcatgcccttgacttcattaaa

SEQ ID NO: 119150 - DNA, 211 bp, Glycine max
  unsure (1)..(211): unsure at all n locations
ttgaagcaancaattacctcaattgtagcctactgtcctttccttatacctatctaggcatccctattggagctaatccaataagaagtctgatgtgggatcctctaatcgccaagtgtgagagataattacagagatggaagcacagacacatttcgttggaggggagagcgactctcataaaatctgtcataacatccactcctatata

SEQ ID NO: 119151 - DNA, 267 bp, Glycine max
cagaagtgagtataacttcttggtttcatcactggacttaaaagactacccgttttgggtcattggaaaagtgggtatacttcttgttgaaccactgacacaaggagggatcccttgggtcatggctgcaggatttcacgatagggaaactcaacggtcgctcgggatgatgatgcccggtgcggcgacaagaaaactggttgatcctcttccatacttttacttcttagcgtactttccagatatttcctctttgtattgttactg

SEQ ID NO: 119152 - DNA, 146 bp, Glycine max
gaagtcttgtcaaaccgggctacatcttgcgtccttcttcttgcaaaaacatgcagcggcgatctttggcttctcctacaagataaggcaccgctaagatcgtgtcttcctccttagcaagttgaagcaccgcgaaattttgttcc

SEQ ID NO: 119153 - DNA, 267 bp, Glycine max
  unsure (1)..(267): unsure at all n locations
gtgatgaatgcattccggaacatccactgaaaccagcttaatgctgcgccgncgaggttaatagaagctaccatgatacgatgctgttccggagtaccatagtaataaaaagactgtgagattttgaagatccagccaagtggatcatggccgtcaaaccgcgggacatcaacgttatccggtggtcactgcgcggacagggtggcggagataatacgtcatgtgggagaagcgtctacagatggcttcgaacttgatatccaaatc

SEQ ID NO: 119154 - DNA, 420 bp, Glycine max
  unsure (1)..(420): unsure at all n locations
agcttaagctntctgtgtcttctatgaataatgatcttgtggtatagaccccaaccaatggttctatgttaacttcttatgtgtatntaaattgtcttgtactaccaacaaagttgtgacatcttcaaaagaagatgcttaattgtagatgaatttgtctaacctagaagcagagacaaaggttcccatgggtgacctcttgcttagcacaagaaatgcgctaagtgcaattccaacccgagagggaattgtgctaagcacaagttntcttgcttagcgcaagaggaattgcactcagcctgaattgttgtctcagtgcatatcccaatccgagaggaattgcactaagcatgaatagttgcgcttatcacctgtcgcaatctacgtcacgatgggacgatgataggacataaataatag

SEQ ID NO: 119155 - DNA, 453 bp, Glycine max
ctcatagtcaacctgccgcatgcaagcttatgctgcaagcatatacaatagaccctactcattctctgcagcaaaatcaaccacaacagaccaatatgacctctccaacaacagatacaatcctggatggaggaatcacactaatctcagatggtctagccctcaacaacaacaacagcagcctgctccttccttccaaaatgctgctggcccaagcagaccattcattcctccaccaatccaacaacagcaacagccccagaaacaacaaacagttgaggctcctccccatccttccctcgaagaacttgtgcgacaaatgactatgcaaaacatgcagtttaaacaagagaccagagcctctattcagagcttaactaatcagatgggacaattggctacacaattaaatcaacaacagttccagaattatgacaagctgccctctcaatc

SEQ ID NO: 119156 - DNA, 453 bp, Glycine max
  unsure (1)..(453): unsure at all n locations
agcttgcccgagctcgcttgaggtccttggtatttgttngtcgatggggccatagtttaagtaagacccaatcaccaggttgataaactacctctatgcgttcgaaatctgcatagttcttcatggtctcttgagccttcacaagcttcttgtgtatagtttgaaaagtctcttccatgttacatagcatttcttcccacaacatcaatttggaagacctaacaatgtattctgaaaagttgaagggtttgcgaccgaagtttatctagtacggagttgttcttgtgcccatagtccaagatgagttgtgtgaccattcaacccaaggaagaagcttcctccacattcccgaccgacaatggaaaaaggcacgcaagtattgcttaattacacaattcaggacctctatttggccatcactctatgggtgatacgctgagctcatccgcagca

SEQ ID NO: 119157 - DNA, 339 bp, Glycine max
  unsure (1)..(339): unsure at all n locations
atgggggtagttagttgggctcatncctgaagcatttttgaaacagtttgactttgtnnttttatgacatgggggcagtaaaacacttttttatcattntgtggaaaatgggttgtatgctnnttattttgagttgagtgcatgattgtgatggagtttgtgttcttcttcatgagtntgagcaagtgtgtatgttagacaaagaaagaacaagaatgtgaacttgcaattagaattgttagtcagtagacagattgattgtgaaagaaaagcttgaaccanaaccggtgagagtgtgaccttaaactgtgagtgaacgactagctgtgaataataatc

SEQ ID NO: 119158 - DNA, 312 bp, Glycine max
tcagttcttataagttgcaggtccagttttttaccagcatacaagaacttctggagctctgtaactcttataatctggagtgagtactccccccttatacagtactctgaagatagactctggactgagctgattctatatgagctgcttgaacagaccgatgaagaaaatatgacccttccctagagctgtaactagtgaaatatgagaagagagctaattggctaggcgactaggattaagcaataaagccctgctattacttgccaatagaacattatatctatgatatgcccattgacatctttgtga

SEQ ID NO: 119159 - DNA, 393 bp, Glycine max
  unsure (1)..(393): unsure at all n locations
agcttgcagaactgctagcanagccattatgattgtgagcactcattggaaggtgtctgcttgtacccgacttctttgtggggaatatgaaagnttacagcccaggcaccctaacaacatgagctagaaccagagaacgatcacttatctgaagccatcatccttggagctgttgattcttcaaaaagaaaagtagagacgagatccaatanngctgctcatcctgnaccagtgctagtactagctgatgtaccatntctagggatggatccatcttcacctcagcatgcagccgactcttccactcgtatcttagagatacctgagggccagaccacaccagtcttggctctggacacttcntctctagctactccagtattgcatctgaca

SEQ ID NO: 119160 - DNA, 273 bp, Glycine max
aaaataatttcctgtaagcgcttatgcgtacctatatcagtatttcaaccatctcctttcacaaaaattaaaataaaccaaattacaatccaagaccaaaaatgaaggtcgtatgagttgtatcatcatgtagttgaatgtacgtacttcaattcccatcacaagttattaactgatcgatgatgacacatgcacactaacaagctgcattaagatgcacaatgcaaaacctttttactcttccattggatcggatgcaagtagttgactatg

SEQ ID NO: 119161 - DNA, 334 bp, Glycine max
ctgcttaatatggcatgtagagaatatgaatccttagacaatggtaaaaactccccttgagctgatacactgaagtgaaaatattaggaaggaagagacccaattttgctaatagttgactgaatgatttaatgaaagtaaaatcccaatactttttatctacgcccaattgagaagtgatttataatcactgatatgacaatttctatatatacaattacttgtcgcatatcagacactaatttatatggtaggttagatgagctaaatccaatgatttagtgatgggtctcagccctccttaataggtgtcccatcaaattccccactattc

SEQ ID NO: 119162 - DNA, 456 bp, Glycine max
  unsure (1)..(456): unsure at all n locations
atccttaagtcacctgcggcattgcaagcttaaagatgcccgagtcattcatgcgtatgagattgttgtgagcattggtgatcacaatgccattccttggattatagggttgaaccaagctcatgcttctacaaaaaggttcatcacgtcaagttgaaattggaataaccgtttgcaaattggggcaacgatgaatcgagtcacatcactgcttcgtctactgccaaacatatgtaggattggtgatgtccttcgtacttccagtttcaccttgacaaagatgtcatggaccatgttgaaaatctaaattgatccaaccccatatactgtgataaaattcgcaatacttcaactgtacatcattcgcatacatccatgctgttcatagagtgcattgctcatcgcattctttcctttgangataaaatacaataagataatatgaacttactcatt

SEQ ID NO: 119163 - DNA, 320 bp, Glycine max
gagactcatcatacatccgcgtaaaagctattgttgattgatttttccagagcttaacgttccatttcgagcgtctcgatatactacgggacacaatcagacctccgagtcaaaagtcatgccagtagatattgctcagagcatttgtttcaattacgagcgtatcgatatattactggactcaatcgcacatccgagtacaacgttatcgtcgttgattttctcaagcttcaggcttcatcccgagcgctcgaattctacgggaccaatcgacatccgagtaaaagtatcgccgttagattgctccagctttgttataa

SEQ ID NO: 119164 - DNA, 92 bp, Glycine max
tctccgatcggacttatcttcccaaacttttacctgtattacacacgttggctgaaagggcttaactactctccacatgtttttattgcacc

SEQ ID NO: 119165 - DNA, 274 bp, Glycine max
  unsure (1)..(274): unsure at all n locations
atcacagaatagtagtggtagggaggcatgtgagttcttggaatgctaaattgggtggagaggaaactttgtgcactaccttcaacagactctttcttaattcaaataanaaaatagaaatattatgaaggtgggatcttttgtggaggagactgttgtttacatgggaacaacctttagtgcaacaaataatagattntattgnggatcgttgtccaacaaanaatggaaatgatggatggatgtgatgtancaatgtggagaaaaatatgtc

SEQ ID NO: 119166 - DNA, 182 bp, Glycine max
tatattttatctattcatgatgttgtgtgggtctctgactatctgcttttcattcagtatgcctttaccttgatcacgtagatgcatgcgttgttagggtcattcaatagtggaagctggtctgactctaaagtccttgatagtacacggcttaagtcgtcgactatcacgaggaatcaggg

SEQ ID NO: 119167 - DNA, 402 bp, Glycine max
  unsure (1)..(402): unsure at all n locations
atcttaagcactgcagctgcagcttatttgaagaaactctatanattatcatgctatggtgagaaatatgacattagtcatacttgcaactatacttcctatggaccagtataactccttataacatgtctaggatgttatcactagtactcatanacatgtaantcatataagtcttcataatatgtaaaactaatgtcatgtttatcaatgtaaatcatgtcccttaattatgattctagagacgtaaaacttgcatgtgggaaaaagtcttaattagattcataactgaaccttatgataaaactatcaaattaagttccttttcttaattcatgtgggtagattaagaaattatagttaaatattcatcctacatcgattaacaaanataaaaaaaac

SEQ ID NO: 119168 - DNA, 435 bp, Glycine max
  unsure (1)..(435): unsure at all n locations
agcntttgggaagtngtggatagaaaaatatcttgttaaacatttgttgtccactcgcaaagcgcactcctcacgctaagcgccatcttcttcacgcgctaagcgagctgctgttcgcgctaagcgcattaacccctgatcattggctgtatggtcccgctaagcgcgtgacctgtgtgctaagcccaataaactctatgtccatntaattnttggaattaggctaagcgagtcatcttgctaagcgtgtaagtctggtctcgctaagcatgttgatgcgctaagcgctattcttctctgtctgattaatttcgagaattgggctaagcgagtgctctcgctaagccaaattccttctctatttggaatagcgctaagagagacagatgcactaagcacaggccactactgcatttaaggagcantttattctct

SEQ ID NO: 119169 - DNA, 369 bp, Glycine max
ctaagtcacctgcagctgcagcttctgccacagacacaccacgaattctatgttcatatcgcccgcaaagactgcgccaacttgtaacggtactgacatgacacatcgatcatggcatccataatccaatacttcgccgtgcacaaactgaatttatgtgcacgccaattgcaaaagcaataaacccagagcgtatctgttaacattgcaagggcaatgctgagaaacctcgtacccatatgattgccacgatactgtaagtaactcgtattgagctaaaagtccacatgcgggatgccacatcaaatgcctagtgctataggaagaagctgagatgagctgtcacacaacccattgccatgccagttg

SEQ ID NO: 119170 - DNA, 481 bp, Glycine max
  unsure (1)..(481): unsure at all n locations
agcttgttgcatactgaattagatacatatgctatcttgcttattttcatcatagctcgacataggtgacatatcatctttgcatggcttgtttgcacangaaaatagaagacttatatatgcacagacgctattccacaacaagaacaacatatgcactgagttgacgagatatgcnttatgctatgcatgaaagcaattttacaacgtttgctatgccatatatgaaaacactagttgaaatgatgtcgataacagggtcaacttttaagataaactttttcatacgatagtgatcttatgatgtagcatatatgtattaacaatggtttaccatatgaaggcctaacctattttctcaatgtggctcttcctcaagtggaatattgtatcatctactttgagaatgatatctatattagataagcagacatgcactaattacagtccagtatgacaagacatgattgtcatgacatgt

SEQ ID NO: 119171 - DNA, 436 bp, Glycine max
agctttctatgtggataagagagcttaaaaacttgtatgagagaaaaggttggttatcgattataaatgtcttaatcattttctcaaagatgataatgttccaatcccgaaggcttcttcactcccaaccttgatcagagaatcaaacttattttcaaagattgatttaaaattaggtctttggcaacttggcttaaaactcgaagatcagtataaaacataagatcagtataaaacagtcttttgtgttccgaatgctcagtaccaatggacagtccttccttttggtttaaaggtatcaccctttctcttccagaaagccatgactagatttgttagcctattttggaaaacatcatctgttacatagatgatatacctttttggtcaaaagacattgtctctcataaaaacttattcgaatcaattctttgag

SEQ ID NO: 119172 - DNA, 355 bp, Glycine max
  unsure (1)..(355): unsure at all n locations
agcttanggatggaatacttacttgttggtgatgaacattatcgcaaaacggaatcaaaaaatgcgaaaaaggatgaccctagggctgcaaattcgtcaatcccgtgggtatggcttttgaaaggggggaaaagaagtctttgaatgtaaaaacgccccccctttcgtcatttttataatttggtgcatgggtggctctcctatgtatctcacgctagcatacccgcgcttttttcttgcatgatttagatgtgattaggagggaaactataactttggcccatccattcatgtgacaacattatgccctataagaactttttaggttcatactaggttgtgagtccaacccaat

SEQ ID NO: 119173 - DNA, 440 bp, Glycine max
  unsure (1)..(440): unsure at all n locations
tagcttgctcttatgtaattgtatcttgatttttcttctgctcatgaaccaacaaagaactttggagcttgtcaagggagagagtgtcaacatcttcggattcttcaatggaacacacaacatagttgtacttnggtgccatggaacttaagatcttctcagctataacaacatattacatgtttacaccatggaatagcattatatgtgcagatgtcatggttcttgcaaaatagttgggtaccgatacatcactcttcatgtgtaacatttccaatgcctttctcatagcatgaagctgtgcactgctttgtactattagagcctagatattttttcttcattgaatcccaaatatctatggaagtttcttcgccaagaatggtttncaagatagaacgatcaatggcctgtaacaagttatgttttgttctttaatc

SEQ ID NO: 119174 - DNA, 263 bp, Glycine max
agcttagaacgcagaagaagcaacaactttctatttgataatgcgctagaaacaagcaaggcaaaatcgattgcaataacataaatgagataagggaagagagaatgcgaacacaagcttatactggatcggccactttccgtgcctacctacagaactccagcaacccacttgagagtaccactagctcgaagaattctttgacaaggtctaaacacacgaggacaacccctccctcgtgaatagagaatcttcacaacaag

SEQ ID NO: 119175 - DNA, 297 bp, Glycine max
  unsure (1)..(297): unsure at all n locations
agctngactgcgcaatcttgcatgccctcntttctgttcttgataggatcctgccgacctctacatacgaaacttccgcttgtacactattatgcttactatatggtgacgctactcactcgtgtgacatactcatgtttgaggacttctgagagcagtgcatcactaagtttgatgcctggctactgacatctagtttaagacatccactactgctgctaactattattttatgccacgcgaggagggtaatggtccaactttatgaattccactaccattcctgactgctaccta

SEQ ID NO: 119176 - DNA, 432 bp, Glycine max
  unsure (1)..(432): unsure at all n locations
agctngaaatcagattttgtgaagagagtttgttctgtgatttagagctttgcatgtctagggtttctagagagagaacggtccaagttccatagagtattgagagaatttgctgtgtgaagatttgcatagaccagagcttgaagcatgagccagtttgaaagcttgagatgagtttgtgagtgattgtgaaatcctatatgggaaggagacatcctcaccacttgttttatggcaatctctcatcttgttcttctctttattgaaaagaacgcttcctggtatggaaagttatatcctctgttggatcttccctgttggttcctgatgttaatatatttctatttatttaatgatgttatggtgttctttgtgctatctgcttttattccagtatgcctttaccttgatcacgtagatgcatgcttgtgc

SEQ ID NO: 119177 - DNA, 368 bp, Glycine max
  unsure (1)..(368): unsure at all n locations
agcttaaggtactagaatgggcatatattattccaactnagataattgcccttctaaatgtcttcctaatcaagggaagcttcccaatatcttcaagcatcaaatcaatacaatgagctgcacaaggagtccaataaatatgtttccttttgtcctctaacaacttaccccctaaaacataattgctcccattatcagttacaacttgaacaatgttctcttcttcaacttcctccacaatagcatcaagcaactcaaaaagcttttcacctgtcttacaaaatcagaaccatcaacagatttcaaaaacattgtaccaacttgaaagttaattaaaaaattaatgatgcatcttttgtttcgatcag

SEQ ID NO: 119178 - DNA, 450 bp, Glycine max
  unsure (1)..(450): unsure at all n locations
agtcacctgaggcactgcaagctttntgagaagcttgcttgagaagttttacttatctacacacactcctttaataactaagctcacctccttgagaaacttccttgagaagctttcttgagaagattcctagagaagctagatcttggctgcacacacccctctaatagctaagctcacctccttgagatgagaagctagagcttagctacacacaccctctataatagctaagctcacccccatgccaaaatacatgaaaatacaaaaaagtctctactataaagactactcaaaaagccttgaaatacaaggctaaaatcctatactactagaatggccaaaatacacggcccaaaaataggaaaaacatattctaatatttacaaagagtggacccaaccttgacccatgggttcagaaatctatcctaaggtttatgagaacctt

SEQ ID NO: 119179 - DNA, 448 bp, Glycine max
  unsure (1)..(448): unsure at all n locations
agcttgtagaatggctagacatgatacatgtcatggcttggtttggttcaaggataaaagggatgccccacattatttccatgacacaaatgcaaaaatgatgatttggaaattttatgcaaaactggtcatgcatgcacctatgcgaacgctcaagtgtcaaatttttatggtcatgtgatgctagggctcaggattcatttcctctattttagtcaacccaatgtttccaaaatatgttcttttatccatttgtgcattcatccaagtccatttcgggcgtccgggaaaatttcacagcattcacccttcaggtgtacacacattttttttttccaaaaactagctatgatcagcgaatntttcttcaaagaagagttggaagtcatctcttttcaaaagcatgttggttnttcagctagacaacttatttntctttnttctctct

SEQ ID NO: 119180 - DNA, 444 bp, Glycine max
  unsure (1)..(444): unsure at all n locations
agcttcccaaccaatctccgatatctttcaagatcttaataaggctccccttgattgggtagcaattnttgatttggatccatgggactatcaatcagtctacaatgtgacataccagtttcttgaagtatgtctaacgcatacttcctttgtgaaatgataatcccatcttttgactgagcaacttcaattccaagaaaatatttaagtttttccaaatccttagtctgaaaatgactaaataaatgttccttcagttgagcaatttttccttggtcatttcctttgatgactatatcatctacatagaccaccaagtaaacacatctactcgatgaggtatgacaataaaaaactgaatggtctgcttcacttcgtttcatcccaaaagcctgaacaactgagctaaatttttcaaaccaagctcgtggggattgtttgagt

SEQ ID NO: 119181 - DNA, 446 bp, Glycine max
  unsure (1)..(446): unsure at all n locations
agcttgatgaagaagctgccaaacaacggnggagaaaaatgttaaagttgaaagctctctggacgcgggaaaaatgtcaataactaaaggaagcacaatccacggtggagatcctatggtgatttttgtcctatttgtttattatgtactccaaaacacatctccttgatgtgaaattgttttcataaataaaagagaaatggtttatgttacctgttcagactttgtttcaaagtcttatgatgctttaagtttcttttctatcttatattctcttgcatctcggaagactgctaatgtactcttcaacaaaatactttaagttagttttcatcttttacgtttgtgattgcttgacatcatgcaacgggagagattgttgagtcaaaggatgcttacatctgaaagactaatcaagatccttaattattttgattagatgcaaa

SEQ ID NO: 119182 - DNA, 442 bp, Glycine max
  unsure (1)..(442): unsure at all n locations
agcttcaatgttggttgtgggtagtcttgtttatgggactntaacaaggtacaaattcattaattntggtcctagtaattatttttatgttgctttgtaatgatataggtcatataagagtatgacaatttttttttatgaaatttgtgaacgggctaagatataattccatgaatatagtaaattgtgttctaacattctcaaaanaaccaacatcatgcaaactaaatttgccaagaacatgagtaagatattagttatcacaccttaaatccatgggaattattggccgctcctttgttttattgtttgtttttttgctgcagaagccagattggcagttttagtcttcgtagttagcacatagtatagttnttgggctcatctttaacagatatctacaatcattgtcacttcaattcatggaaactttttcacacgc

SEQ ID NO: 119183 - DNA, 445 bp, Glycine max
agcttatgcaacatgaaattaggccatataaatcttcataaatgatagatagtgtgatcattctaccagtgcattaaaggcccctcccaatttatcactctgcactacttgttacatgtgttaggatttcgtttaatgaaagtactataggcaaaggtgctgaaaggcgtgcctaagccactgaggcatggtgcatgaagctttttttttattttttaatcattttatgcctgctatcttttcaatgagttgtgtctatcaagttaatagtgtgttgaacttatttatttatgcttggtattgtcgtgcattacagccttcggacattattttcttactttcaggttttgtttgtgacattggatgaatggtcaagtgatgaaataaatgcaatgaatgaagttggaggaaattcttctgctaattcaatttatgaggcttattt

SEQ ID NO: 119184 - DNA, 439 bp, Glycine max
agcatgcatttgaaattgcgaaagccttactctatcattaggattagtacctgacatctcaaacaaacaaatcagacataacaagacaattatagttgctgtttgaatacctcacccactcaagtgtatcacacaattatggcttttctctaatgaaacactcttgccttttaccactctaattccccttgagttcttacgcaattcaagagaatatggccacaacaaagaacaattcaccaatatgtgtaaggtaaggctaaagagacaaggaaaaggttaaccaagaaaaaggctaacaatgtttttaggcacaaatgaaggatataaaattcagaatttatgaattcaagtgacaatccttcatgcaaccaatatattaccttaaagagatttttttaaagttcttcagcataaccattcagcccatgtttttttt

SEQ ID NO: 119185 - DNA, 361 bp, Glycine max
tgaacactgctatataaatcacgcgtcccaagaaaccttcggcattttaaggatggacctcaccttggtcgggtccacctctatccctttctggtttatgaaaaagcccaacaatttttctgacttgaccccaaaagtacacttggtgggattcaatcttaatcggcacttatgcattctttcaaacaacttccgcaagttgacgagatggtcctttttagttttaaacttggcaatcatgtcatccacatatactttaatttctttgtccattatatcgcggaataatgctatcatagcctgctggtaggttgccccaacgttcttaaactcgaaagacattactttgtagcacaaacat

SEQ ID NO: 119186 - DNA, 448 bp, Glycine max
ctaagtcacctgcggcatgcaagcttcagccataagatgaagacactttaattattttttgttttctctaccagactccctcatgcaagagtcctccgggtttgacacatggacaatgcataggcctctttaagaatgcttttgatagacagtacactgacaagtgtttggtgtgtactaaggagaacatgtaggcaattggcgtatagtggttttttttgttacatacttgaaatgcttgagtatgaaaatatgcacataaaaaggatcctcagccttagtttgctgatatatatatataataattcatgatgaacgctacagcctatcctatggcgacagattacaggacagcttctaagagcttctacaaacaagctataaaacactacaagcttctacagcaagctagatatattaaacagtatcaaacatcaactttaacact

SEQ ID NO: 119187 - DNA, 353 bp, Glycine max
  unsure (1)..(353): unsure at all n locations
gagacgacccgccgcatgcaagctngcggnggtcatttagaagataatacctactttttttaaagctnaacggcgatttttataaaaccgcctntgatacaaatgttacgaaggcagttttataaaaaccgcctttgtgtgctagcctactactctggttattgaaaaaaaccgcgtatttgtaattactttcactacaagaaatataacctatgcctacggacgctttatggttcaaacataaataagtgtgtgtaaatctcaaaaatactgttacatacgactgactaatgtatgtaaaattcaaccactagttccaaccattatctggtgtagacaaagtcattcaaact

SEQ ID NO: 119188 - DNA, 392 bp, Glycine max
  unsure (1)..(392): unsure at all n locations
tcgcaancgattacacaatgatttttgagacagcaatcgatttatttaggagtctctgctttaatcaattaccatgtgatatactcgattacttctctttctataagtgtttcagaagtgatcaaaaacactttaatcgattatattgaggatctaatcaattacattgttcttgagaggtttccagtttttttggaagaacgcttttatcgtttgaaaagataatagaatcgattattcgctgaaataatcaattacattgtagacttaatcgactatagacggttattagtgttctccctatatatagtcaccttgtggcttacttcaattcacaagatcattaagtgtgatattgtgtgaactgatataagtgaatgatgaaaaaaaaa

SEQ ID NO: 119189 - DNA, 405 bp, Glycine max
  unsure (1)..(405): unsure at all n locations
agctctatttatntggaatctgtttgagaatgtttgttacacagcttcgctttaccatttggttcacacagctgccttagttgcctccccaattacaaaacaccctaatgttgtgagttcccatttcccaattatcctactttctcttcccttttgcccctttgaaaaaatatgctatttttctattatatggtcattttagtgtagagtgtgtgtgaaatgaaaacatctattttgtttgtgactcatcaagatatcattttcttttttgcagtttggaggccttctaacaacaggtatcttggctttctctgggacgtaagtgctatctctaccgttgctagttaaatgactacgtttctattgtaccatggaattctcttccacactattttatacgcttat

SEQ ID NO: 119190 - DNA, 266 bp, Glycine max
  unsure (1)..(266): unsure at all n locations
gcgagcgtaagacagccctagagatccacaacatgtatgtattattgcttcaacnccagacgatgtgcgaagctgggaacattattcacgagcgtggggattcaaaacacccataaccaagacactcgtatgcttgagagaaactcttgccttgtgatgaatgatgcacgcggaacctaccgtgctgatggacacacttgcattaccagttcatgacgagtgtaagcttgagaagtcccctataaaaagttcgaaatgccacacgg

SEQ ID NO: 119191 - DNA, 464 bp, Glycine max
atcttaagtcacctgcggcatgcaagcttgtcatcgtgagacatcaaaggttagattttttaataaatgtgggtaggaaaaattcaccaaattgatagagaataatctaaaatcatacatcttaggcaaataaggcatgctatcccccaacattattgcattttgattccatctttggacattcaaattgttggttatttttcctgttatcttttcctgtgccttagtctaaatttcaaacttacaattcggtatctctttcttcttttgcttctcctcatttcttaataattggatttgcatcacttaagtacaaccaaagtccctctggattcaacagttgaacttcaatttcaatctttactacttgtgataaaattaggacacttgtcaatctattaacaagttattggcgctgttgatggggactttggttttcgtactcggttgttacaaatcccaat

SEQ ID NO: 119192 - DNA, 443 bp, Glycine max
  unsure (1)..(443): unsure at all n locations
agctntagttagattggagattattttattttattcttcctttaaatataggcatttcctttgcccactttgacccgaattatcttgtaatatctcttacattgtattaattggagttaaatattcatggactnttcagatctgaagcagaatctgcatgattaaatgaatcggggtattgcctggcatcaagtcataccctggaatgaaataagacagataaaccttcgtcttaaattccttggtagttacataatacaattntagatattcattgaaaaaaatgttgactcgaaccttttctgaatgccaggaggattgcacaagttaaagagaaccaatgtcaaattgctgtagaagatgttatgtacttgctgatatattacaagttttctgagatcacggtccctatggttcctaagctatctatttgtctttataat

SEQ ID NO: 119193 - DNA, 429 bp, Glycine max
  unsure (1)..(429): unsure at all n locations
agctncatggatgaacaaagggtgttgaatgtattatataaaacgctcataagctcgaattagatcatgctcatgtcgtatgaacaacaaacaaataggtacactgaactcttacaatgtccacctatttgtgtatcattcccctccttccaattcctacatatggatctcattgacaactcttgagacattcttacatgacagttcacaaccatgtttcagaatatacatgctttcagctattattcaatatatcgaatagcataaacttgtggattaacctctttgtaaacatcaattggaagaggcaatctaagatatgcaatccattctgtatgtaatattaacttcatctttttagcacttttgctgctgacatacccttacttgtaaatgtaaataagtcttcagctaaataaaattaatatc

SEQ ID NO: 119194 - DNA, 292 bp, Glycine max
  unsure (1)..(292): unsure at all n locations
acccgcggcatgcaagctntaagagcaattcccttcttctttttttanttttcttcatgtngatttagtctctgcaactccatctcatgttcctataatattccacatagtgtagcaagagacataatagacaaatctctagattctgtgatggctgttacctttggttgccactctctacttagacatcttaatactttatttatgagatcctcgtttggaaaatatcttcctaaagatcaagaggataactatttgtggaaaccttttgctaattggatccttctttgcc

SEQ ID NO: 119195 - DNA, 413 bp, Glycine max
  unsure (1)..(413): unsure at all n locations
agagcgacctgcggcatgcaagcttctggaggaagctacatgattctgtctctatgaaaacaatgtccagccttcgttaaccgttggatcttctctgaattcggtctgcagctttacaagacacttgtccacgatccgaccgttgggatctgtgagaagatgtctatagtgtgctcgaagccttcgttcccgagagcattccttanttaagcatttcagccttcgctttcatgtagcttaggaaaaacgccatttcttctccttactttcttccgaagccatttctaacgttcctaacactttcttcatgacccacagccaccattagccaccacaaaccatcgttattctacattgtaaccccacacggagaggaacccttcaaccgaagctgaatccttcaacttggcttg

SEQ ID NO: 119196 - DNA, 432 bp, Glycine max
agcttgaaggtcttcttcacaaccttctgatttatggattggtccggtagatcttatatactctatctactcgatcacgagcagtgctctggaaatatgatgcctcaaattatttcttcacaaacctgactgaaagaagagtttatccaagtcaattagttgttgtgattatgaacagataatcatcgagtacttggaggttcctctattacaagttatattactggctcttttaagatagtagggccatttagtttggaaaaatgttctgttttcacttttaataacagaaaacatcactttattctcactctactatctggtttcaaaagtctggatatgaaataatgtacacagaacaccatttcatttctgatcgttgcttatgtaacaaatgttacattatcaaccgatcataaattatggtcagac

SEQ ID NO: 119197 - DNA, 465 bp, Glycine max
  unsure (1)..(465): unsure at all n locations
ttaagtcacctgcngcatgcaagctngagaggattgatggngacccggtgtttaaagtatctaggatatgggctacgtgggagtacgtgagctcacttggaggtgggcaacaggggatggtgggtttatgcgcgcattgtggatgtggaaagcttgttgtgcaccatcgcccgaccgccacctagtaccacatgtgatgggtaccccataatcctacaagcttgagatgaggaagtgttgaagggtgaaacttcctgcttttattgttgaccacagagtggtacctggagatatatcgcgggggtcaggagaccttggggacgtcaggtggggtgctattgcccaaaaccaagcttgaccaatcccgacccaacccgggcatagtcggtcagtgagaacctgtgatgtacctaagcaggcgagctcctggcagtcaacagataaaaggaaaacaagaccacaaag

SEQ ID NO: 119198 - DNA, 448 bp, Glycine max
  unsure (1)..(448): unsure at all n locations
agcttcaatgctccatgtacttctgccgcaatttcctgtgtgggacggcggtactttattgaaggtgctaaaggttgtaaaaattgttaattaattaatttcgttggtatatattaattaatttctcgtaatcatttgcaaaatttgaaatatttgtttaaaccttaaacataacaatgtttattttattccttactttaatcattgccattttattcactcatttcgaacatccaaccaatatattatatgtgaattctcttacactttaaaaaaataatctttgtgcactctgtcaattcccaattatatttattcaattaacattgtaaataattatatatttacaaatcatcaatagaaccatctttaatctgttaaaccatatatatttntgcatttggtaaaacaaggtttcaaaagtctgtactttatatctaatctatat

SEQ ID NO: 119199 - DNA, 437 bp, Glycine max
agcttagcaaataaagagatgcacgcttctttttgtcatctgattattccacgctttgtttatgacacattaaagtcccatccatcagaaaataaacaaatgaaaagggctaacgtgctaggggtcacagcaatggcaatattgttcttgctatgcagtggccttggctatgctgcttttggtgataacacacctgggaacatcttgactggatttaccgaacccttctggttggttgcactggggaacggattcatcgtaatccacatgattggagcatatcaggttcgatcattctctcactgaaacataattaagttactcatttttaattttgttcttgtaaaatatttttgtatttaatttgtaatttactgaaatatacactcttaattcggatcattatatctctgttcttgaataatgacttgaaataa

SEQ ID NO: 119200 - DNA, 411 bp, Glycine max
  unsure (1)..(411): unsure at all n locations
agcttgngcattcaatatcctgatgagggtgttccatatgttcttaagactggactaatacatttgctgcccaagtttcatggtcttgctggtgaagatcctcataagcatcttaaggagttccatattgtctattccaccatgaaagccccttatgtccgggaagatcatatctttctaaaagcttttccacattctctggagggagtggcgaaagattggctgtactaccttgctcccaggtccattatcagttgtgatgaccttaagagggtgttcttggagaaattcttccttgcatctaggaccactgccaccaganaaagacatttcaggcatcagacaacttattggagagagcttgtatgagtactgggaaagattcaagaaattgtgtgcaagctgtcctca

SEQ ID NO: 119201 - DNA, 442 bp, Glycine max
agcttaatatataaaaaaatcataactcaattcttacaatatattggcaaattattggctaatttatatactattttacaggtagagatatcaagccaaacatcaattaacattgctcattgatatgctaattaactaagaggagatataagataagtttaatggttaacggagaagagaagagaaaaaatatcactagatggattctctctagtataaaaagaaacatttgtccataaaaaaaatactatattagctaaaatatttttcaagccattttctttaaccaatccatacacggagaggctaagaacaaacttatgccaactcaatagcaagctccaagcaacaatgactgctctagtcactagcggcggtctaagagagagtgagaatgaaagagtatgagtgagaacaataacaaatgtggaaaggagatgga

SEQ ID NO: 119202 - DNA, 440 bp, Glycine max
agcttgaatcgatacacaagtctggtaactgattaccagaggagattttcagaaaattatttccaagggtcacaacttttcaaatggtttttacatggccatcaaaggtctatttatatgtgacttggaacacgaattcgctcaaagtttttcagaacaaaaagtcttatcctctcaaaaagcaaaatcattttatcctcttaagaattccttggccaatacacttgcaattcaataaggaattaattgagtgctcaattgtacaatctatctctttcaagagagatttattcttttctccattctatttctcaaaagggattaagagactgagggtctcttattgtaaagaaatctaaacacacaggaagggttgtccttgtgtggttcagaacttgtaaagggattttgctagatagtggaactctctagcgggttgc

SEQ ID NO: 119203 - DNA, 398 bp, Glycine max
  unsure (1)..(398): unsure at all n locations
ctttatattttttttactctactctagagccattctaagtttctctttgagtcctagcttgcttctatgtccttttttcattgctttaattgttgagaaattcttaaaaaattgtcttggtaaaactccattggtttagctctcatttcattttttttggtccttggacattgcttgtctctttgcttccttgtttgggggttgccatataaggaattggaacgaggattggtgccatcccttgaagaatttgagtcaagaagcaaggggccaaccaccttaagagctattggactaataagcactccaaattgagtgaatcaccaaagagagaacaaccaccgaaattcgcgaccgngttctaattttgaacttgcaattacttaccttattgcttc

SEQ ID NO: 119204 - DNA, 388 bp, Glycine max
  unsure (1)..(388): unsure at all n locations
agctngactntggnttagacatgatngattcattatntgggacttgtaggatttgatttgggccagattggatgaggggaagtgtgattttcgaaatctgcacttatgcagaattttgctgtcaaaataggtgcagcaggattttggctttgtgtaaaaaaatgcttgtgtgtggttggctgtggaaagagtactgcaaaatgagttctggatgtttgctagtagatcccaacggtcaaaatgtaggcttatgtactataaacttccagtagaaatttggagtcgatccaacggttaacgaattggatcgaaggaattgttactggtgtctttaagtgagaaaagctgtgaatttgggtggtggttttgagcagagttttctgccctt

SEQ ID NO: 119205 - DNA, 329 bp, Glycine max
  unsure (1)..(329): unsure at all n locations
agcttggaacgatcagaggtggtgtttcttttgatagaaaggtgttacattaatacactgaacatgaaagaagggacctatatgagacgaaaggcgacgcaaatgacgatgtgcctctatgtaataccttaagaggttctaacactagtcctcgcaatactggtagactactgacatgacatttatgccataagcattgctacatgatggacatgttacgtcgattgttacaccgccgcatatgcaaaggcgcagaacggtggcatctaagacgacggctctcaaaatagcgcctcaaanactctacaaatctaagacatgtgtttagg

SEQ ID NO: 119206 - DNA, 384 bp, Glycine max
  unsure (1)..(384): unsure at all n locations
agctngaagatggtcctgttaggtgggctattctctaaatactcaagatatctgagttaaaacagagtgttagaacactgtcattcttattacatgaaagaaacttgagcgaattgagtgaaccgtagcactgataagttagcaagtttacattgttttcgaacatactgtctaaacactcgttgagtgagtagaatacattatctatcaaatatctattgtttgttaaagccatgaataacttagtgacaaagaatatttaggtcttaatctcaggggaagattaatggtagtgtcaagatagcctagagagatctctgggttgcctgatgcgacatttagaatacttggctgttgtcatagatttgattattgaaaccattc

SEQ ID NO: 119207 - DNA, 423 bp, Glycine max
agcttacctatcatactcacggtgtaggtttagctttatagacaaatcttactggtatcgtatcaatgcaccccacaaaattgccttttaccatcaagaaaagggccatggtacgttagaggcttaaatctggcttctgtggtcattccaaatgaaacccatctttatcggtttgctaagtaaacccatcactatttatgtgaaaaggaaaaaggtttcaaattaacccatcactattcacgccttccctcatatatgcggggaatcattttgcattgctttgatttttaatgttacccgattaacaccgaatgaattatgtgaatggagaaagaaaaaagtaattaattacatcaaggtttatcaaaaaaccaactgcgttccttttattattacccttgttttatactataattaagaaaa

SEQ ID NO: 119208 - DNA, 397 bp, Glycine max
gctggcttagcgagcgtccgctaagcgcaagactcctgcgctcagctcgaggaagactctggaagaatatgagttgtacaggttcgctaagcgtaccgcttcatctcactaagcgcactacttcagttcatctgctaagcgagataggcgcgctaagccaaaaatcactaatatgtgctaagcggtccatacgtgcgctaagcgcacaagcaagaacaaggccacctatttaagcctgaaataagattttgtgaagagagttcggactgggattcagagctttgcatgtctatggtttttagagagagaaaggtccatgttccagagagttttgagagattttgctgtgtgaagatctgcagagaccagagcttgtagcatgagccgatttgagagc

SEQ ID NO: 119209 - DNA, 405 bp, Glycine max
agctcgagcatcgctaacgacggacgagagcttcgttacaactctgtggttcttctccatcaccaccatacctaggtatgtttcgcctccttcatgttgtctactccatctcgctgtctacttctgcatctaagctttctcgctctctatgttgaccattaaccttgaatcgagctatactccatctgagaatcggtttgtctaagctcgagcatcaggttagtcgcactcatacatagcgacaactctgtgctccttatacttcaccaccttacctaggtaagtttcgactaatcctgtataaatatgagatggcacacatgtaactcacacttaatgaagaaaacatggctaagggatctcatattaactcgagcatcaaaattgcttcgtattcattacaag

SEQ ID NO: 119210 - DNA, 376 bp, Glycine max
agcttgacctctgctctaacggcactatactccttctttcttgtctagcctgacgcatacacttgaaggtgagcgggccaaaggactctccctctgagctgttgcatattctgcaccatatgatgaatgttctctgtgtaaccctgctctgtgaactgtgttatcccatcatagactaccttagccgacgggtttatctgtttcagaatcagcagacaataaggttgaaatgtgaaaaaagacttaagctaaactttgtgaacctttactcccaacacatgatcaagtggtgtatgcactatgcatgatgaatgaagcctacatgagagactactatcataccaacggctataaggaggagccacctcatctaatt

SEQ ID NO: 119211 - DNA, 350 bp, Glycine max
agcttcgcgaggaggagaggtaactgtgcttgtccattcatgcataaacggaaaattgatgagaatgttacaaatgctggctcgcctgccctaaccagaagtacgcatctgaacttgggctcctgcaacttgaaaaatggtcttggctactagagaaactagtatgcaatagctgtattacaactcttagctaacaaggaacgaggaacagtgccccaatggacaaggcatactacatactcttcaagcccttaatattcaccacaatccaggcatggaatgtcgcaaaacctttcttttaatttattaacccttgacctgcatgacgagaaacttcaacgacaattacc

SEQ ID NO: 119212 - DNA, 443 bp, Glycine max
  unsure (1)..(443): unsure at all n locations
agcttgtatcatttcatcaagataattaanatcatatgttacctttatagaatgaaatttcatattgaataaaacaataaaatataagaaaaaaactagtcaataaaagataaaatatgatgacaacgaaaatattaaaggcaggtgagtcaaattataaaaaataggagataaaatgttaagaaatttcacattatttatctcgcaacttatatatttattagaaagttgattttaaatttaaatctaacataatattaaaacatatcttccatcttgatttttgtccattctaataagttcatctatttgacaagcatatgtgaagaaggatgttaagaactccctcatcacccacattaattntcaagattanttttaaaaaattatttggttatttctaattcttaaatatattaattaaatttttctctacatatttt

SEQ ID NO: 119213 - DNA, 432 bp, Glycine max
  unsure (1)..(432): unsure at all n locations
agcttggtagcttagcgaatgtttatttacctgcgattgaacatgaaatttcttaaatagagtatcatatcggggcactctattatacattccctctacaaaactaactcttctgtcacagaaaatgagataatataaatgcggcaccgccagaatcgcgttcgatgtgactatgatcatattcggtgagtactgctttgatctaaaggctggntttctgtgatgattgaccagcctcagagtattgatgacaccaccgttcataacagatcggcattactatgcataagtactgactcatattctcgccaaaacactatttaatgcctttgcgaattcatccagacttatattgtcaatattttgcccaacgacgactgactccgagacatcggccattgcgggccatcgcgtantgtaatcagcataaat

SEQ ID NO: 119214 - DNA, 435 bp, Glycine max
agcttcttagctcgcatcgggaactcctccaattcagcacccgtacatcctagagtgcccgcccccatccagagggaggccccccaagctccggctccaaccacgactcgcctggccggcaatgcccactttggtgccgattccaatgcgatgagaaacattcccctgaggccaattctagaattcaccccgatcccaatgacgtacgaagacctcttgccatccctcatcgccaccgaaaaatgcttggcccttaaatacaaggtccaacatttgatagacgccagatggctgacgtttcaagaggatcggcccaacatgaaaataaacccgctcgccaatcatagagggggagtagttaatgccgtcgagtcggataggccgcgcatgtccaaacctttaaagggtgtgatgacccccaagagggttatctac

SEQ ID NO: 119215 - DNA, 405 bp, Glycine max
agcttaagcgtttcttttgatccatcaatatttcttatcttgtcaggaatcctcgccataaaattacatagacctgccaattctaaataaaaaatgtaataaatccaaaaccatgcaaatgctatgtaaagaatgattgtcaatttaaaatagaaaataatgctgacaaaaaatagaacagcaacacagactcaaatgacacatgcaataacatttcaatcaatgacaaaataccataaaaactatgatactattcgttgaactactaagccaatacatgcaacaacctgaacaaaataaaaccaaatcagcaaatagcagagaagcaaaaacaaaaaatatatctctgaacaaataatattgcaaccatcaacaaacaaatagaaaggccgaaacaaacacaac

SEQ ID NO: 119216 - DNA, 350 bp, Glycine max
acgcttatttaattgcttacgcatacttgatttatatgaaatgcactaaggcagtggttattagatacttgaattgactaatgctctattcaaattatgtaattaggcatttactatattctcatggctcttgcgaaatatgcttatgaatttctaatttgttgtgcgcgtataatataaatatctatatatatgtatatgcacaatattacatctattcggatagtgacttgttctatatctatgctacatgtaaacatatttattaccctgtgagtcagatatattctattattataagacatttttactcatttgtcaacaaagtttgtagtacgtcacttgaacac

SEQ ID NO: 119217 - DNA, 442 bp, Glycine max
  unsure (1)..(442): unsure at all n locations
ttaatcgactgcagctgcaacttccttggtggataagatcattattcttttagtgtgtgctccttatcctccattgattatagacttaccttctcctccattgntgtctcttcacttttcttcatgtatctcctcacatgtcttgcgctgaatgtctgtaacatgattctttataattaccactaattatacttgctatcgaagctagattcgatttattatggttcaaatttcttgttcttgatcttgaaccatgaattatgttgagtttaggttcctttgagttctgatagctatgtttttttgtggctgaaaccttaaccatacaattcttatcataacattaatgtataataagacctaataaatctagagtgacacgttcccctattgtagctatagatggatcaactggcctcaaacacataaagagggggttgaa

SEQ ID NO: 119218 - DNA, 449 bp, Glycine max
  unsure (1)..(449): unsure at all n locations
agcttanaccaangaagtcgacatggcgtattatttattgagaaaggtcacaacaaatacacaatatcatgaccaataccattggcaaatggcacaaaaatggcttaagagcacacataagtaggccatatggtattgctagaaagaaagatgctaaataatcaaaggctaatacaagacaattaacaagtttgtagattcaagcaaagacaccatatgctaaatcttgccttctgaaggatgctcaaatcctgaatctacgatggcttgaagaagctttggtttcaacaacaagtcttgaaatctcgagctatggatgccaacataacccctgcaccacaaaaaatatacatgcaaaacgagaagatgtaaaatcaaaggttggcttgatacctaatcaatctattatcggaattataaaaagttgaatcaatacacatcacaaactg

SEQ ID NO: 119219 - DNA, 447 bp, Glycine max
  unsure (1)..(447): unsure at all n locations
agcttcctataagaagtgtttgagagtctgtattcttattgaagaacttattctttcctataattactttttcaggtgggatatgttgatgagtgacttggagtcggtacacacttatgatggacattgtggtgctgtttatggaacatacaatcctaagtatctaacttggtaatcgatgcatgttgccatcttcaaaattttaaggattnattgttggttatgataagaaaagaatatataggatacgctgataagagagcaaaaaaaatagtggaaaaatatacaagcataataagctcttatcaaataattaacgcacaatagataactcggtagatagtaatacaacaacaacaacgattgtgttatctcattggtgaggttggcaaggtgaaccacataatgaaattgagcttgatcaaaaaaacaaattcttataaatat

SEQ ID NO: 119220 - DNA, 375 bp, Glycine max
  unsure (1)..(375): unsure at all n locations
gagcttctaacanaganccgcgaagacagcggtttgtgtgatttcctcctagagaagcggtctagacgaacgctatcatgaggctgcgctcggtgaataacgctgtcccaagcttcagttaatacgctggatgcttctggaacttacgcttggagcatcacacgactaaggtgcacaatctcaccgtggagatctcttaatagatggattgagtgagcaccatgtttccgttccccacagcactgtttatgttagcactccagcctttgcttacgtgtaacatatgaaaaatgactttgcttctactttctttgttccaaaatcatgcttaaagtttccagcagtttatgcattttgcacagccactattatcca

SEQ ID NO: 119221 - DNA, 321 bp, Glycine max
agcttcacaatctagatgactcattacgcacatctcttttttcttcttcatcgtgccttctcgagacactaaaaaatatcagagacatggcgcttggcgatagtgcaccaagagaactttgcatccacatatatggtgtttaatactgcgtccctaggcgcatttagtacttgagctacgcctatgctgaatgtcactctcattaaatgtgttaacacccatggaagtgcatggaaagacctttttttgaagggggtggaaggatataatgataccggtcattaagaatattactagttcgagagttgacttacgcttgat

SEQ ID NO: 119222 - DNA, 385 bp, Glycine max
  unsure (1)..(385): unsure at all n locations
agcntnaaanatgagagtgagtattttttattgattagctagacgctttaaacacatcatcctcttactaatataccacttaatgtggtcgactctaacccacaaatgagagatttattcaccaacgatctcattccttcaatctctagcttaagcaaccaagcttcttttatttagtacctggatgtgtacctacttctttataaagattcagaggtctcaaaactattttgttatttaattctctaagcttgacatatatatatatatatatatatatatcgagccttcttttgcccgtacgtacgtanttttatcatcactatctggggcttcaaatattatcttacatatgtagagcattgaaccctcgttaaatgtgaaa

SEQ ID NO: 119223 - DNA, 451 bp, Glycine max
  unsure (1)..(451): unsure at all n locations
cgaccggatccttaagtcacctgcggcatgcaagcttctaattccaaactgtatgggttgtctcttatagattccataattaaaattgtttcagatatttagttttgattntgaatactatgttatcgtaaagtttgagttacatgcacttgcggccatctagtgatgtggcattacttaattatcaagtgaaagcttttaaaatcaaaggtgtttcccatgaagcacgaatcttcatctgagggtttgttgcaaatagtacctttcttggttccatacattttcacatttccaagaagagttttttggaggatggtgtattaagtgatgatgagaatatctgccatcaagcaagagcttagagtttctggatcaaatgccaacaactcagaatattgctgctgggaaggtgccacctgtggctatcatcatctctcatcagaatcttgga

SEQ ID NO: 119224 - DNA, 435 bp, Glycine max
  unsure (1)..(435): unsure at all n locations
agctngccaaagggttacatgtttctcatattttattcaagacaaagaaatcaaagatattcaagatggatgatcaagacagtttctagagtcttaggaagagtatattaaataggaagggaattccaattgaagaagcaaaaggtttggctaagaaatttaagttaaaaagtatttttcaagagatttactctctggtaatcgattaccataggatgtaatcgattactagtggccaaaactgatttacaacagctattaaaatttgaattcaaaatttgcactgtgtaatcgattacacatatatggtaatcaattaccagcagttattgaaccgtttaattcaaatttaaagcttgaatcgatacacatatactgtaatcgataccagaggagatttcagaaatattctaacagtcacgtcttttctttgtt

SEQ ID NO: 119225 - DNA, 421 bp, Glycine max
  unsure (1)..(421): unsure at all n locations
agcttggaatctataacacataatttttatatgtaatgccaatccgcatgtncagattgtcaatccatatatacgaattacaacttctttctaaaaaataaactaaaacatttttcaaattaatggcccatgctggattcaaacactaaagccatataccgagtcttattgggtttccattacacaaaagtgatattaagccttgattgtgccttattggatttcactcaaccattaatggaatttgttacactaatgccatattggaaggacatactctgtgcacctaacatttctattgcacacccaaacagtattttaaattccaaaagtatcatcgttatagaactccggattcccaaccataagagaaagcctacacattcttaatccataagagctagtttataaattaggaatc

SEQ ID NO: 119226 - DNA, 436 bp, Glycine max
  unsure (1)..(436): unsure at all n locations
caagcttttgaaaacaatctttgctatatgtaatcttttacagnaaactggtaatcgattaccagagagtaaaaactctttggtaaaaggttttgtgaaaacttcatgtgctactcaatattttgaaaaacttttttgtacttatcttgattgagccttttcttgattcttgaatcttcaacttgattattcttgattcttgattcttgaaacataaatcttgaaacttgattcttgaatcttgaaatcaaatttcctcttgattcttgaagtattcttgatttaatcttgaactcattctcttgggcgttttgtcatcatctctgttatcatcaaaactccttgaatcaatcttgattcaacatcatgaagcttgcatctacaatcttcccctttttgatgatgacaacacggacatgcagatattctcatagct

SEQ ID NO: 119227 - DNA, 412 bp, Glycine max
  unsure (1)..(412): unsure at all n locations
agcttgtcggagtacctgaagatgctattatgctcggcctattntcattttctttagctggggaggctaagagatggttgcattcattcaagggcaacagtttaaagacctgcgatgaagttgttgagaagtttctaaaaaaatatttcccagagtctagaaaaatattttgagtgaggcattaaaaagatttcgtagcttgctgtggaaaactcccactcatggtttttcagagcctatacagttggacatcttcattgatgggttacgactgcagtcaaagcaattactcgacacttctgcaggaggaaaaattaagttgataacacctgaagaagccatgggtaacctttacttacttgacacttagtgaggtgccaactcaattgcatgctagttaacctttaccttc

SEQ ID NO: 119228 - DNA, 285 bp, Glycine max
  unsure (1)..(285): unsure at all n locations
agctnttcgattcattctatgtacccgtagtgtgtccacattgtgtttcgtgccattttattctcgttttgtttactttttataccccctgttgacgtgcttaagcccattttcttaagtcatttctcgcttaacttaaaaataaaataaaatttcaccgaacggtttgaattgtattatccataacctcgggtaaaaataaatcccgaccggttcggccgggccgaaccacgttggaaatcaaaaagaaggtgaaaaatattttattatccaaaagaccttttt

SEQ ID NO: 119229 - DNA, 423 bp, Glycine max
  unsure (1)..(423): unsure at all n locations
agcttggaggggttgatggtgacccgatgctgatttttttaggataagggctacgtatgagtgcgtgagctcacttgaaaggtgggcaactggggatggtgtctttatgtttgatttgtggaagtgggagagtngatttgctccatctcccgatcgccacctagtaccacatatgacgggtgccccatactccaacacgcttgatgtaagaaagcgtggaagagccacgccttcctacttttgtttgttgatcacagagtggtacctgaagatatgtctcgggggtcaggaaaccttggggacgtcaggtggggtgctttttcccaaaaccaaccttgaccaatcccgacccaacccgggcttactcatttatggagaacctgtgacgtacctaaacaggtgagctcctgacagttataccat

SEQ ID NO: 119230 - DNA, 415 bp, Glycine max
caccgcagctgcagctttagtctcgcctgagaggagaatttgtttttcttatgcactcatctaattgaataacatcacttctggcactaaattgctgggagttggaagccatcttctcaattaaatttttggcttcagcaggggtcatgtctccaagggctccaccactggcaacatctatcatacttctctccatgttgctcagtccttcataaaaatattggaggagaagctgctcagaaatctggtggtgagggcaactagcacataattttttaaatctctcccagtattcatataggctttcttcactgagctgcctaatgcctgaaatatcctctctgatggtcgtggtcctggaagcagggaaaataatttctaagactactctcttgaggtcatcccacctcgtgat

SEQ ID NO: 119231 - DNA, 444 bp, Glycine max
  unsure (1)..(444): unsure at all n locations
agctcgtntctacaatctctccgcttttgatgatgacaaccctgaaatcgagaaatacatacacattctttttcctagtcgatcactcacttaattctccatattctccccctttgttttgagtttaagcttcacttgaaattaagttatattattatatgagttcttgatttaatccctatattctctccccctttggcataaagaaaaagccaaatagcataagaaatatataacatacataaattattataaagcataataccaaatgttaacacatatcactagacatatatcatcaaaacaattaagtgtaaaactcataacaattaagagtgagtaaatataatcatgttcaactatactaatcaaatattaaaagagatactcagtattcaaatgtcataaatattaatcatttgggtgagtcactagcatctatca

SEQ ID NO: 119232 - DNA, 429 bp, Glycine max
  unsure (1)..(429): unsure at all n locations
agcttcttggattaaataaactntgactagatcatgaccgactagctgagactaataaattcaagtaaaccaacaagcctatgcagaaactagtatcagtctcaatgaaaaattttccagcttcgtctagtatctccaaggtttttcctcagaaaaactctcacacagaggtagtcatacatgacatgggaccaatagggaagactacacatggtatggtacatgtccaagggaatcaatatagccttatttagtgtagttatcaaaatttggagcaaactaaagtcagggttagctgtagttaagttgggctccatgatctcctaggtcgaatttgcatgtatcctccacccgaggaacgagaaaggaatacttgcaaaaggaactctaacgctcaagtaagtatgtgagtgagttgagaatgaaatg

SEQ ID NO: 119233 - DNA, 473 bp, Glycine max
acctctaagtcacctgcggcatgcaagcttgtagccaatgatgagcatggaggagtttattatccaggtgacttggccaagaacccagccttctccttcgggagggggtgaggcctccgcaacccaagagcctatgccagaggaggacaagcccatccctcctaagccattcatttaaaagacagtcgcagagattgctcaggaggaggcaacatcaccagagcttgttcctcagtctcacccatcaccagctccagtccttgaagacccagagtcatctacactagcaccagtgcctgaccagcctgttgctcaagaccctccaattgcaccggcgttggatctgaacgagcatgcagaggatcatttgaaggatgattcatatgatctttattttcttgcattttgaacagttttattatcactttggtcttagtacattatattgttatgcgtcaatctttaatctccag

SEQ ID NO: 119234 - DNA, 396 bp, Glycine max
agcttgtgatctaataattgtgtgcaggagagtgcttttcttcaattactagagcaggtacacacatatgaagaccttgtctctttgagtgaaagaatagcagtttcatgaatctaaaccctccattctccgaaaacattagtttcaacaatataacaagtagttacatgaatcttcacctatctctggcaccatcttgaaaattaagaaaatataaggacttgttccctcatagtcactctgttggtaacaaacaatatatcaccttctaagatctagatgcctgataagagaaatagcacacgaattaattctttaatttcagcttctaggtggcgtaaattcaactgttatgagaattcttactcttagattctttttcctatcttcagaatc

SEQ ID NO: 119235 - DNA, 441 bp, Glycine max
  unsure (1)..(441): unsure at all n locations
agctngtgaactagcagatatatgcagaagagtgcttatgttcgatgacttnagcactcacacacatgtgaagaccttgtctctatgagtgaaagaatagtacgttcatgaatctgaaccctccattcaccacaatggttaggtcaacaatataacaaggagtgcctgaagcttcacctagtctctgtgaccattgtgacaataaagaaagtatgtgtacttgttccctcatagtcactctgttggaaacatgcgatatatcacctatctagttctagatgcctgatcagagagatagctaacgatatatttcttcaatatcagcttatagctgccttaattaccactttaacgagaatacttactttaaattgtgcgccgatcgtcaagatactccccgatatagagagcgagtcgacgctcactcttgagtttcaccat

SEQ ID NO: 119236 - DNA, 447 bp, Glycine max
  unsure (1)..(447): unsure at all n locations
agcttaatcaatggaacactgacggggagagattctttctgtactctactaggngcaatgagccttggcaccattactcgctacaccctacgtatgccgcatacaaaagttctgagaataaggatgctctattattcactcgatcatcaccaatagttatattgagataatggcctgagataaaataagaaagcgtctttatcattcatttgatgaacaagaggatgaaggttctttctttatagatgaacacacttaactcggtaagctcgctaatcgggcatgactacccctgcttataaacaacgacatgcgatgacagttctcagactgactgcttagcctactatgcctaccaagttttgtataaatctatttctcttccaacacactctcttttcccgcagaccattgtacctgtctcaaagaatcgaccatctcggactc

SEQ ID NO: 119237 - DNA, 276 bp, Glycine max
agcttggagatgcaatagagctaatgtttcttgttttagacaacccatattggcgacaattaacttagggtcttgtctttatgacattcaagttgaatgtgccaacctgctgctagtttgggcatttgcgcatgtgtataaagagatgcatgatgatttatatgaacgattcctcacctatatgacatgattaaactttgcgtgtatgtataactttctgagcttttaatcctgatgcaatggctactcgatgatatctccttcaatattaatgat

SEQ ID NO: 119238 - DNA, 435 bp, Glycine max
agcgtgcatgcatcagctgaggcatctccttatcacaaccatctgtatcatttaaattttatattaagttaaaagaaagaaaaagactaatgactgaaaaaaggtagtgcctcttccatctaataataataatcataatagcctttttaatatttattctaccttgctaggagtgcactggcgtccccactcccaaagataaaaatttgaaatgcccatttttattcagactttggaggttcatatatggtacgtcagcaagtaaaacagtacaagctggtgcatacataatcttttgaaagtggagtgaccctccaaatattctggttgtgttataagctcattatctcgaactagaagtcttgaactgtttacttgttcaaccgattcataagttcttattcaatatgatttttttaattgaagggaacaaaa

SEQ ID NO: 119239 - DNA, 434 bp, Glycine max
  unsure (1)..(434): unsure at all n locations
agcttctagcttcttgtataacagctttgcttcttattgggattnttctcggnatttgctccaaagctgctagatgacttctaatgtagctccatgtgaatcttgtaggccttggatcttcttcatcaatggatttctttgcttcttgaggtctgattgcagcggaatggaaaaggagaaagatgaatggagatgccacttcaagtagaagattagtctagaagaagctcaccaccataggaagccatggataagagcttgaaggtagaagaagatgaatgaagggaaaggaagagaagagcacggaatttagtgcctctaaagaagtatgaactttgaattttaattctcaaatgatcaaagttcaaaaaatgcacacaccaagcctctatttatagactaagtgtcacacaaaattatatggaaatttgaat

SEQ ID NO: 119240 - DNA, 431 bp, Glycine max
  unsure (1)..(431): unsure at all n locations
agcttgcctcanagaggtccaggaaggacatgtctgtcgaaggaactagttccgccccggagtacgacagtcaccgctttatgagcgttgtacaccagcagcgcttcgaagccatcaagggatggtcgtttctccgggagcgacgcgtccagctcagggacgacgagtatactgattttcaggaggaaatagggcgccggcggtgggcaccactggttactcctatggccaagtttgatccagaaatagtccttgaattttatgccaatgcttggccaacagaggagggcgtgcgtgacatgagatcctgngttaggggtcagtggatcccgttcgatgccgacgctatcagccagctcctgggatatccgatggtgttggaagagggccaggaatgcgagtatggccagaggaaggaaccgtctgatggg

SEQ ID NO: 119241 - DNA, 444 bp, Glycine max
  unsure (1)..(444): unsure at all n locations
agcttcgaagatgaacggaaatggcagccagtttatatagacgtgcggaggaagaaggaagagtaaaatagcaagaaggcgaaaaggtgtggactactangtgcgcttcatttttaaaattttaaataaggataattttgctcattcacataattgctggatgcaccagcaatattactgggtgcacctaacatgtcccatcttcattttggtaaaagactttcaatcgagcccaatgatgagtcatgacttctccatttggttgttttagtttttaggctaagaataacattcaaaagaagagatattcacacctatgtaacacctcccatgcaagcacacctaataaaacagacatgtgtcatatattaattaagaataatgtcacattaaactaattttaaaattagaaaatctgcaatgtgactgcctcccgcacctctc

SEQ ID NO: 119242 - DNA, 437 bp, Glycine max
  unsure (1)..(437): unsure at all n locations
agcttcgacaagtcaatcacttgcaacattctataattccaacctaactntcctcaaaatcttgaatttgtcatcaagtacatgtaattccagtttaactttaataagtacatacaaaatttattcataaattcattaatcaatacttaaattaaccacaatccaaaaatgctaaatcaagaatagatccaaattaactttaaaaagtttcataatttgaagacaaccctagtcaacattcgaaataccaaaaagtttaaaattaaaatattccacaaataactttccacgtttttcacaactctatatcctaatacattgttttccttacatcaaccaagttcccttcttttgtccaatctcaatcacaatttcatcaccttttgcttgtccataatcataagcaaacttcttccatcctttgtcaatattaataa

SEQ ID NO: 119243 - DNA, 429 bp, Glycine max
  unsure (1)..(429): unsure at all n locations
agcttaaaccatgttttggacctttcattatgtctacatntttnttctctcctcatctaataatgtgtgaccatttctatatttgtgatagcaacaatacaaaaattatcgcgatagctacagaacttgataccgttggtttatgatagcattattatttttttaaaaaactagcactaatttttttatacgcctattatgtgtaaaatcgatatattcaatcttcttatttatgaatctgctttactcataaaaatttcaattaaaaagtatattcttttaaaaatccctgatataaatntgcaaaataccagaataacatgtttgttgtcaattacatataaaatttttatccgtctgataaaatgcattttattcccctaattttaacttgatataccccctaaaaatgttgatatttaatttcca

SEQ ID NO: 119244 - DNA, 441 bp, Glycine max
  unsure (1)..(441): unsure at all n locations
agcttaagaaaaaaccctataaaagagcatgattcaagagaaaaagatgaggagaaagaagaggaacaagcacaacaacaatgggagaagtactcaacagtagaaaaacaacaagaaaatattctccaaatcaaaaaccttcctcatcaactgattatcaagaaaggaaggcaaggagaacatgaggaaaccttaagtgccattctttctttaatcacgagcatctttcttgaaatgatttggaatgtacttccaaactatatgaagttcatggaatttctagctaaaaggcgaaacttcaaggaagatgtgttctatgtgactttcatgccaccttgaaggtattaagctatgcgccaagctaatgacattaaaaaagcgcttcctgggagggtaacccagtttaatttctgctatntttggttttcatgcatatatcat

SEQ ID NO: 119245 - DNA, 462 bp, Glycine max
  unsure (1)..(462): unsure at all n locations
ntatattgcatcanaatgtgttgtcaagtctgtcaatgttgtgtcacgctttatcttaatacgcatgcatttcacaatgtgttgtcaattttgacaacgatgtatcatacatgcgtaatttattntacttgcaccaattaatttatttcttaacacaacaattaagtaataatttaggataaaaatatcacaacaatttatatcacatgaaattcgccaaaattgtcttctgcattggtaataatatttaagctagtgagaaaacacgcatgcacacaattcatgtatgacattacaacaaccactgctgcatgttcagtcttcatttaggtcaacatagtctcttttaacatcatgaagcttctctactgttgcattctactaatatatggagttggccactgcattgcctgaggatgagaattcttagaccataacaatgctagaggcggtaaaggacaa

SEQ ID NO: 119246 - DNA, 479 bp, Glycine max
  unsure (1)..(479): unsure at all n locations
gagtganctgatgcatgcaagcttgttaaagaacttagaanaagaaaaattttagcttgttctcacactggtcgcgtgtatgatatccactcgacaaggtatgaagtagaggagacctgcaatcctataacgcaacatggcggacaaaagtgagcagttaacttgaatgggcattgttgtcaatgcggaaagtattttgcgcttcactatccatgttcacacattatttgagcttgtggttacgtgagcatgaactactaccaatatatagatgttgtctacacaaatgagcatattttaaaagcttactccgcacaatggtggcctcttaggaatgaagtggcaatttctccttttgatgacgcatggacacttatccctgacccaactactaatcgtgcgaaaggtccgccataatcaacaatgataacgaatgagatgtgattgctcgtaccatctgtgcaccgacataaatgtag

SEQ ID NO: 119247 - DNA, 365 bp, Glycine max
ctatatgatgactctaacataaactagttgtgattctgggagacatatcaaagactatgctcgattgagcactgcgtacattaactatcctacatgatagtcaagactcttatactcataatacgaagatgacttgctattgtgatcaagtgagcatatctgggagcctgggacactactacccaatgggaatctataccatatggggtcctacgtaaccatgccattaaatccattgagatgtcatcccatctacactcaggtatctataaaggttgcaacttacacggaggattcgagagtgatatgtcatctgacggacacactacgcactccaggactaacttattaaccattataatcat

SEQ ID NO: 119248 - DNA, 428 bp, Glycine max
  unsure (1)..(428): unsure at all n locations
tgctcgctntgccaattctgcgaagaataagtgctctatgttctctcgctaagcgtatggctatcacgctgagcgcatgagtagttattggtaacgcgcgctaaacgctcagtctgattttcaggctcattctctgctatttaatttgaatgaatacctgtataatcttgagtgttgattcttctgtcttgcagatggctgtccataagacaaaagccccaactttagtgtctcatgccggttatgatagatcaagatctgtatcacaggaggctgacgactgtcactcatataatgggctngctaggaacattctaccacatagaaatgttaagctctatatcactgatgttgatgatttcagaagagagatgtttanaagagattgacttaacagctgaccaactatgctgatggaagcattgatg

SEQ ID NO: 119249 - DNA, 466 bp, Glycine max
  unsure (1)..(466): unsure at all n locations
ggtatgagtactgggaaagattcaagatattgtgtgcatgttgttttttccaccagatttctaagcaactccttcttcaatatttctatgagggacttagcaacatggagagaagtatgattgatgctagccagtggtggagctcttggtgatatgacccctgctgaagctaggaatttgattgagaagatgttttccaactcccaacaattcagtgcaagaaatgatgctattgttcttaaaggagtccatgaggtggccacagattcatcttcatctactgaaaataaaaagcttgaacgaaaacttgatgccttggtcaacctagttacccagcttgccatgaatcagagatctacacctgatgcaagagtctgtggtctatgttcttctgtagatcatcanttagatctttgtccttctgggcaacaacctagaagtaatgagcaacctgaagcttatgctg

SEQ ID NO: 119250 - DNA, 272 bp, Glycine max
ccttcgccttaacatatctagactagatatatctactgtgcgcataaattaagtcaatttgtctccaacgcctatacaaaccacatgcatgctcgaaacatgtatctttggtaccttaagcacacttgtggtacatgcactctttttgtagccaacttacacacaaaattacatgcatatgtggatgcatactgtggatcatgtcctgaaattagaatatcaaccactatctactataattttttagagaaatctttggttcctggagagac

SEQ ID NO: 119251 - DNA, 470 bp, Glycine max
catagatactcaagctgtcttgattttcctaagttcgtaacaagctttgtttttatacttgtccttcatttaactgtctttgggcttggcagccacgctcaacaaagtactttcgacacctactgtacgttgatttgaccaatgctgttatgggaatgttgcgacaatccttcaaaaccttattgatacattctgagaggttggttgtcatgtggccatatcgacgtccttctctatcataagtcatcgtccatttttccttggagattagatcaatccatgttgctatggctggactcatttgacgaacattttctaaattttgatcaaatatgtgcttgcaaggagtgtatgctgcataaaattagttatgaataacaattttcatgttatatgaaacttaaataacgtgaccatcaatatgagatttaccaatttctcaacattcgttttgttgcattttgaatttg

SEQ ID NO: 119252 - DNA, 355 bp, Glycine max
cttaggagcttgctagggagagcgtatcaacatctccggattctctaatggaacacacaacctatttgtactctggtgccatggaacgttagatcttctcagctactacaacattctacatgttgttaccatggaattgcatatcatttgcaaatgtcatggttcttgcaaaatagttggttacccattatcactttcatgtggacattttcatttctttctcaggctgaagctgtcacgcattgtcttcaaaccttgtatttttctcattgaacccaaatctttgaagttctttgccagattgttcaagaaaactatcatggccgtgacagtacttctgcctaaacttcactca

SEQ ID NO: 119253 - DNA, 468 bp, Glycine max
  unsure (1)..(468): unsure at all n locations
tgcaatctgggtcaatgtccggatacaactgatattcttcattccattatagcttggcatgagactatgtgaagacattaccaganatgtaaattatagttacaaataaaatcgataaatccaccatagttaggaatgtgccattcacctatcaaattgtagaagccggtcaatgcatttgaggagtgatgacaataagacaatactttgccaacaatttgagttagaaagatgcctaatactcaaaatcaggttgagtaatgttacaaaaattaagaatattatatcaatgataaatacaaatgaacaacgaataaaacaatatacatattacaaagcaagcaccctttgcatagtcgttataggaatggaaattcacaacttaaaatgaaacttcaaccaactataatatcaactgttctgtctagcacccacaaaacacatgtggcatctcacatggcactttgt

SEQ ID NO: 119254 - DNA, 185 bp, Glycine max
aacccaccattatgagccaactcatgactcactcctcccattcctatcctagtctatcaataccggcccttcatcctaagctcacacaccgaaattgaccatttcacactaacaacattaaacaggaatgcgaactcgccaacacaccaaaatacactatcctcaatcttcgacatttctcctca

SEQ ID NO: 119255 - DNA, 363 bp, Glycine max
  unsure (1)..(363): unsure at all n locations
tgtaatcgattacacacatactgtgatcgagtaccttatgtttatnttcagaanatattctcaatagtcacatctgtttatttggttcttgaatggctatcacaggcctatatatatgtgacttgagatacgaatntgccaagaanttttcagaacaaaaaggtcttatcctcttaaaaagcataatcgcttcatcctcttaaaaattccttggcccaaacacttgtgattcaataagtaattatttgagtgctcaaattgttcaatctatctctttcaagagagaatacttcttctctgcttctttattctgaaaaagaattaagagaccgacggtctcttgttgtgaagaaatcttaacac

SEQ ID NO: 119256 - DNA, 429 bp, Glycine max
  unsure (1)..(429): unsure at all n locations
ngccttgcccctngatatattagagaggactcatgctcactttaatgacaaattccttgggataaaggtagtgttgccatgtttccaaagcccgtactaaggcatacaactccttatcataagtttaatagttaagggtaggaccacttaacttttcactaaaataagcaattggatgaccttcttgcatcaaaacagccccaatcccaacatttgaagcatcacactcaatttcaaaagatttttgaaagtttggcaacgcaagtatgggggcattagttatgcttttgcttaagaacattgaaagcttcatcttgtttctctccccatttgaaactcacattctgtttcagcacttcattgagaggtgcttgcaatgcgcataaattctttaccaattgtatattaacacttgctaacacatgaaac

SEQ ID NO: 119257 - DNA, 347 bp, Glycine max
cctgccatctcaaacatacaaatcaaacgtcacacgacaattatagttgctgtttgaatacctcactcactcaagtgtattacacaattatggccacaacaaagaacaattcaccaatatgtgtaaggtaaggctagagagacaatgaaaaggctaaccaagataaaggctaacaatgtttttaggcacaaacgaaggaaattaaattcaaaatttacgaatctaagtgacaatccttcatgcaaccattatatgacctttaagagatgttttttaaagttcttcatgcttgaaccattcagcccaattttttttttgtaatttgcttatcgagattctttttttaa

SEQ ID NO: 119258 - DNA, 458 bp, Glycine max
  unsure (1)..(458): unsure at all n locations
tagcaattgttggaaacgacaagcatttgtatgactctatctctgttagtgaagaattcttcaacaagactaaaaatagtgatgaaaacttgtggaatggtaatctatagctaatttctttttttctctttgttatatctttttgctttttgtttaatacttttgttctctaacacgttgctaaaaactccatgcatttgctgtaacttcaactgatttcttgtgaacatgttccatttgttatatcaaggttgtatgaaataataactaataacgtctccccccccgcgaaaataagtagcagcgacagaagaagaaaacattaaactgaatggtaaaaaatgaaaagaaacgtgagatgcatatatttttacactntagcaatgaccacacttgagagattggacctattgttttaagcactagagagatcgagctattgcatcacttgcttaatg

SEQ ID NO: 119259 - DNA, 319 bp, Glycine max
tactaaccaacccatgtgaagtctatcaagattcaaggaaattgagacacaacctctgagtggctatatattgacacaatcctcgaatatacggagaagatggttgatgttatcgctgtaaattcaagttagcttagctaagctaaataagagttaagttactttgaccactttgacggttgttagctacatgtgcagtgtgtataaaaatagtagtgattttgaatgataagtatatgagagtgcccacgtttaattcacaattctaagattcctcctttttctaaatcaattctctcatcctctcttaatctctaac

SEQ ID NO: 119260 - DNA, 451 bp, Glycine max
  unsure (1)..(451): unsure at all n locations
taatacatctatatatggtctaaaacaagcttcctgtcttgttttccttagtntcatgggataatttcttcatttggttttgaggaaaaccccatggatcaatgcatataccacaaggtcagtgggagtaaaatatgtttccttgtattatatgtagatgatattttacttgcagccaatgatcggggtttgctacatgaggtgaaacaatttctctctaagaattttgacatgaaggatatgggtgatgcatcttatgtcatctgcattaagattcatagagatagatctcgatgtattttgggtctctcacacgatacctatattaacaaatatctagagagatttccgatgaaagattgttcaccaagtgttgctcccattgtgaacggtgataggcttaatttgaaccaatgtccaaagaatgatnttgagagggatcaatgaaaac

SEQ ID NO: 119261 - DNA, 447 bp, Glycine max
  unsure (1)..(447): unsure at all n locations
agccttaactataagctatagacatacctgatgatcttctatattatggaaccnggaagttcctttcccaacccctcagccaggtccataataagaacaaagtgctatctgtcagcctagtgatatcaaacgtttgattctggaaaatgatatcatttctgagcctccaaattgaacttgtagctgctatccaccacattgtccttcttgtgttagaaacctttgatgctgctgaggaatagtgctggagaaaattatccattggcctgcagtgaaacaccttgtcttcctttacccaagataggaattcccaccataaaggcatagttttgtcacatgtgaaaaacaagtgggattcagtctcatgttgactatggcagaagggacataaatcattattcacctgagggtcaatgtggtctctgagggttgagtatgcaacaacac

SEQ ID NO: 119262 - DNA, 411 bp, Glycine max
  unsure (1)..(411): unsure at all n locations
ctaagcttggatcagtttttcagtatatgagaggctttgttcataagcaaccaaagactnttaaggaagaaatgtcatatgcaatgccatataattttccaaaaggagacatattattaagaaatggagttggtaaacaattgataagtaaaacaacatgcaaagcaaaagaccaaaaaattggtggtaacttggactgaaaaagaaaggcttaaagtaacatttaataaatgttgatgttttctctccactattccattttgttgtggagtttcaaccctagaagtctggcgtattatactagtatcatgataaaactatttcatgataaactcaggaccattatctaaccgaatagttttcacttgagtatcaaattacttctcaacataagaaacaaaggcttctaaa

SEQ ID NO: 119263 - DNA, 340 bp, Glycine max
  unsure (1)..(340): unsure at all n locations
acggaggaaatcctatggtgattcttgccctatttgtttattatgtactacaaaacacatttccttgatgtgaaattggtntcataattaaaagatatatgcgttatgttacctgtcctactttgttacatatctatgatgctttaagctcttttactatcttatatctcttgcatctggcatgactgctaatgtactttccacaacatacttaagtgagactcatcttatcgcttgaattgcttgacatatccacggggaattgttgatcacggtgcttcattgatatactaacacacctttattcttgataatgtaagaaaccacgtattgcgcggat

SEQ ID NO: 119264 - DNA, 403 bp, Glycine max
tcatcgattatcacgaacgattcaacgatgttgtgatgattttcttttgatgacaaaaagctcataggtcaatctaagactgagttctggatgttcaacatagaatcaagaacgcttcaatattcaaggatcatgcttcgaagaatcacagagaacaagggagggtacattccttgtggatcttcgcttgtaaaaggatttttacatcgttgaaagaaatctcacggaccgcatgtcgcttgaggactggatgtaggcactagtctctgcctaaccattacaagaactattgtgtgtttgtctacttcttccctactcttatacttttcactgtgcactttaatattccgcctctacttttggcttagcttctcttctactccttattctcttaaccacataa

SEQ ID NO: 119265 - DNA, 452 bp, Glycine max
gacactatgatactcagcttgagcaagggacctgaagaatagagctgattgtggtagttaatagaaaaagtagatggagctaatgtatggggagcaagggcagctgatgtagatggggccttagatcttctagccctgaatttttgggtccctggaaaagtgactgaaggttcatccaggttccagcaattcttcttaatataagccaaattaatggctgggctgagtgactcaaaggtaagagaatctgagatgactcctcgggccttgcacaacgcagtaatcagggctggaaatccaagccgcgagaagttagactgagcaataagtgaaatctgaccacaaataagtgaacctaagtccatgttcatcttcattaatggcccgtacactaactttgccctatccagattaatatcagaagtctgtgtagaagcaagcttcatgatgat

SEQ ID NO: 119266 - DNA, 397 bp, Glycine max
  unsure (1)..(397): unsure at all n locations
ntgagcanaatcaaacaataataactttgtactcggaggtcctattgtgtcccgtagtatatcgagacgctcgaaattcagaacagatgctctgagaaaataaaacgataataactttttactccgatgtccgattgtgtcccgtagtatattgagacgctcgaaattcagaacagaagctcttagaaaaatcaatcgacaataactttttactcggatgtccgattgtgtcccgtagtatatcgagatgcttgaaattcataatataagctttaggcaaaatcaaacgataataactttttactcgtatgtccgattgtgtcccgtagtatatcgagacgctcaaaattcagaacagaagctcttagacaaatcaatcgacaataaccttttactc

SEQ ID NO: 119267 - DNA, 285 bp, Glycine max
ccaggcgttccaggaaacctacggcatttcacggaccgacgtcaccttgtcagagtccacctctatccctttctggcttatgataaagccaagctattttcctgacttgaccccaaatagacacttggtgggaatcaatcttaatcggcactaatgcatacatttgaacaacattcgcaagttgacgagaagttcctttgtaatttagacttggcaatctgtatccacatattctttcattttttgcccatacattgaggaataatgcttcataccctgctggca

SEQ ID NO: 119268 - DNA, 441 bp, Glycine max
  unsure (1)..(441): unsure at all n locations
tccacaacatccaaacaaaacaacattcagacagcacatgttattacagccaagcaaaacagagcataggcagacaactctgctcaacacatcaaccaaaatcacagcttttctcacttaaagaccccagtaacaattccttcgatccaattcgttaaccgttggatcgactccaaaattttaatggaagtctatagtgcataagcctacattgtgaccgttgggatcgactagcaaacatccaggactcattctgtactactctttccacagccaaccacacacaagcagtttctgcaccaagctaaaattctgctgcacctatnttgacagcaaaattctgcataagtgcagattttgaaaatcacacttcctctcatccaatcttgttcagatcgattcctacaagtcccaaatcatgtatcaaacatgtctaaacta

SEQ ID NO: 119269 - DNA, 344 bp, Glycine max
tgccagctttatggaccccattccaacagtcatcttgtattctttatgaggcatcttcgaaggccatgaagacaagttgaagcatccgaaatcaacacacattaagatagatctcttggtgagaaatctgtatttttagcttcaaatctttctgtgagagttacccacttatgtcttgtgctttcaaagcttctaatattcttagatagaagtgtaaaacttaattaccgagtcaaatccctcttgtgaggagaagatctgccatctgtgcagttgaatcacatatatacttattctgtaaagtctaccattggttggcagagaagaaatctatggtattgttg

SEQ ID NO: 119270 - DNA, 300 bp, Glycine max
taagagggaaagagggggataggaaaaggacccccccacagggaggaaaaggaggggaaggagggagagggaaaaaagggaaaaaagggaagagaagaggagaaagagagaggagaaaggagaaggggaaggaaggggaagaaaaggaggagggaggaagaaggagaggaaaagaaaggggaagaagggggaaagagagagaagaggagaagaggaaaagggagaagagggaagaaagaaaaggacggaggagggagggagaaagagagaaaaggaagacgaggggaaaagagggaaaag

SEQ ID NO: 119271 - DNA, 303 bp, Glycine max
agaaaaaaaaaggggggggtggagaaaaagagcccccacaaggagagaagagaatggagaggaggagggagaagagagggagagaggagagagggagggaaggaaggaggaagaggagggggagaaaaaagagaagaagaggggggggagggagggaagggaaaaaaaaggggggagggagaaggaaggaagaaagaggaggagagaaggaaagaggagaagaagagaggaaggaaggaagagagaggagagagaggagaggagaagcagggcaaagggaaggaagagaagggggagagggga

SEQ ID NO: 119272 - DNA, 470 bp, Glycine max
atactcaagcttcatggtgaatcaaaggtgattcataggtgttgtgattattactttgatgataacaaaagatgatgacaaaggtgatgacaaaaagctcaatgatcaatcaaagaacaactcaagtgaatcaagaacaattcaagagttcaagataagaatcaagaagaattcaagactcaagaagaaagtctagagtcaagaataaagattcatggttcaagatctcaagagtcaagatcaagattcaagactcaagattcaagaatcaagggaaagcttaatcaagataagtataaaaagtttttcccaaaaactgagtagcacatgattgttctcaaaacatgtgtaccaaagagtttttactctctgggtatcgattaccagaattctggaatcgattaccagtcgcaaaattggtttgaataagttctaaattgattgacaacgttcaataatttcaaatgtgg

SEQ ID NO: 119273 - DNA, 408 bp, Glycine max
tcagctttgagaaactacatgcgctgcctggtaaaacgctttcttttcttgtaacacgcggatcgtcttgaaattggttgcaacttacaagacacttttccatgatcggaccgttgggatctttgaaaagatgtctggagtgtgctagaagcttccgttcccgagagcatatcttatttaagcatttcatcctttgctttcttgtagcttacgaaaaacgtcatttcttcttctttatttcttccaaagccatttataaagttcctagatctttctccatcacccacagccaccattagccaccacaaaccatcttagctctacacacctagaggaacccttcaaccgaagcggaatttccaacttggcttgcggtatctgcagagaacgaaaccctaatctaacctc

SEQ ID NO: 119274 - DNA, 420 bp, Glycine max
actatacaataacactcggtatctaactatgaactccttctcatccatcacgctatcacggaactccttggtcttttcttctgaaaactcgacattctcgcatgctactacgcggatctcatctaactcactcagttgcaactttctttcctcaccagcttgatccatagagaaggtgcaggacctcactgcccagtatgctttgcgctcaatctccactggaagatgacatgcctttccaaatagaaatttgagcctgtccattggttagggggtgagatggagtggataccctgcgtatagccccatacttttctagcatggcatgcactgaattgctgcacaaacgggtccatggacactaacgactgtctacgcacctccaacctgcacaaatattagatcaaacaaatctgcaca

SEQ ID NO: 119275 - DNA, 392 bp, Glycine max
ctttccttgagcttcaagccttagccttgtggtgtgttcactatatttctcatgttgctccccctatctctaacatccctccttcgtctggaccgaacataaacatgtagctgctcagtgacactcctgactaatattaggcagtgctctgccagagtgtatgattcagttccagcagtgaccatcctcatgtagatcatgtgttccaaaatttttgctatcctttgccaagcattctacaacattgacaacaaagtaaaaaattattattggaatctcgacacaaaaaatgactaatagcgaattgaaataatattataccactgtatgtcgaggcatgtctacatcatcagttgcaggtgcaagtagttcagcataactgctctgtggac

SEQ ID NO: 119276 - DNA, 208 bp, Glycine max
ctgcagcttaaagcctagtgaccacaaatgttgttgtcttctttaacaacagagcggcaaggtgggtacattttttcagttgttgggataaaaacactatacaagacacttgtatgcgtgaagaaacactagccttgtgatgaatgatgcatggcaaacctaccatgctgatgtcacacttgcatacaagatcatgacagggttagct

SEQ ID NO: 119277 - DNA, 393 bp, Glycine max
ttttataacggtgaagagaaagtgatgagaaggatcaagatattaacacgacacatcgcatatatcgaaagaaaatacaaccttgccactacagagcttgaccatggagcagtgtcacatggtagcccacggatctttgcagaataaacagtcgacaataatggcttcagccactcgacctatcaatgcgcctgtctacaagataaccctcacctagtgggatggtacaaatcaacgttacagagatatacttctggaatcagaatatatctgtcaagtctgaatatgatcataatatatacgccatgtgtctaagtctaactaacagtatacgaagatctgactcaatgaacgagaacatgaacatgagcctttttgatgcattgatacagg

SEQ ID NO: 119278 - DNA, 338 bp, Glycine max
  unsure (1)..(338): unsure at all n locations
atactcagctccgcagtctaatttcttactgtgagcgcgctttattttttatatttnctgcccgctgccattaagaaaaacaacttataggtatctatagctcttatcattaagggatctgtgagttgagagaaatcacaatggatggagaaacatcatacacatgcaggttcaccaccaatttctgatggtgaggagtacgaattatgggctgcaaggatgactgctcatcttgaagctcttgatctttgggaggcagttgaagaatactatgatgctcctgaactacctcttgatcttacggtgcctcagattaagactctcacacaaaggaagac

SEQ ID NO: 119279 - DNA, 429 bp, Glycine max
  unsure (1)..(429): unsure at all n locations
agcttcatggattaacaaaggtgntgaatgtatattatttgccacangctgtattaatctgtgcattcgcagaaaacaaataaaggtacatgaaccttacatatccaccatttgtgttacttccccccttccaatcctacattggatctcacgacaacctcgagacatcttacatgacattcacaccacgttttagaatataatgctccagctatagttcaaatttccaaagcataacttgtggattacctcttctgtaacatcaattggaagaggctatctaagatatgcaatccattctttagtaaatattagcttcatctttttggcgactttggctgctgaccatacctatacttgttaaacgaatattattngccaatatataaaatgaattactcacctacacttgctagaagttttacttac

SEQ ID NO: 119280 - DNA, 286 bp, Glycine max
atagaagcacggagggggacgtgtcaagaggattgtcttttcataaagacaaacccgcttgccaatcatggatggggagctggtaatgccatctacgtgagtaggtcccatgggcccaaacttttgaaagacgttacgacctctagaaggtttatctactaagtctcactaaaggcaggcatgattccccgtggcgggcacagagaagattcatgtttaatcgcaaccggtgttctgtatgacatcgaaatttagtcagcggtgagatatctattacatcaaatga

SEQ ID NO: 119281 - DNA, 369 bp, Glycine max
ggcaacggaaacttttctctgtattacatcccgaaggataattcattctccctcactataatgacttcgcctcgtggtgcatcatctcacccatgctctgaaccagcgcttataaacgcccaagggtttagcgttgaccactgggatctggggttcatgacttttgctgaccctgtctgtaacttatccgccactaatgatggtgcatcttttcgttaagaatgagtttttcatgactttagctcacacctacacaatcggcatgcaatgtgaggagtactctccactattatagtcttatccgacgactattttattccatgtgagactttcacatgctcacctctacacatttcatcgacttatcct

SEQ ID NO: 119282 - DNA, 402 bp, Glycine max
  unsure (1)..(402): unsure at all n locations
tctgcctttntctgcttctagagcgcttttctctattattgtctatggctactctggaattttgtgccctggccattctgtacaagtgtgtacaagctaacatagaaggtgtaccctaattctacactagacaggctttaaatatgctctgaattcaaaactgtgcgcttagcgccaccctcacgcttagcgtgagtaaggggaattgggcttagcgccagtctcgcgcttagcctggctaaaggcacctgctgcgcttagtgcactaatctcgcgcttaatgcgcgactttgatactgatgctctgccagattctcctttgcgctaagcacgttgaagctgcgcttagcggtggtgtataccctaatttcatccaggaaccatgcgttgttgggatgcgac

SEQ ID NO: 119283 - DNA, 371 bp, Glycine max
  unsure (1)..(371): unsure at all n locations
agctgggctgctgcaagggggcttggaaagctcgtttttgcttngagctctgggaaagaaatggggtgaaaatggcttcacccctccctctagttaatattttacgtagacacgctcgtcctggcgagctgatgatactttacttctatttctttcgcaaatgatcttggctgaggtgtgattggtcattgtcatatatgtaacgctatcgttttcctctcaaaaaacctattatatcatattatctaatgcggatgttcgatataattcaatgaaatggacaagtctgatacaagaaattaaaaagcacagatagagatactaggctgactcctaggagcgcttctattacatcttttagccggactctg

SEQ ID NO: 119284 - DNA, 422 bp, Glycine max
  unsure (1)..(422): unsure at all n locations
gattancaaggtttgagaagtgaaaatgagaatggggtaaatttagagtaaactctcacctcacacaagtctataacatcgatctaaacttgctcaaactgattttatgcctcaaattccgccgaatcaaaatntgactcctcaacacccaattttaccctaggaatggctcttgccttcactttggtcatttgtttttctctcttgcacagtccaagctttctcataagtcctaaatgacatttcaaactaggatttactcactttaacctccatttaccactgaatcccgttttagcctttcaactctcaaagcctcactctttttctactcataacactacattctcactgtctaaccctaggttaactctacccttcatccctagcaattttccatcagcaatttcagcacataaaca

SEQ ID NO: 119285 - DNA, 446 bp, Glycine max
  unsure (1)..(446): unsure at all n locations
cttgagtttccttgttctgganacctttctcttctcatgttctcttttacccaatctccgggttcgaagacaaccttctttctccctttgttggcttgtttagcatagcttttatttttcctctcaatttgatctttgactctctcatgaagcttcttcacatagtccgcctttgcttgaccttctttatgcttaaaaacagaaacattaggcataggcaaaagatcaagaggagttagtgggttaaaaccataaaaaacttcaaaaggagaacaattagtggtgctatgaacagctctattgtaagcaaattcaacatggcgtaaacaagcttcccaagtttttaagttcttcctcaaaactgtcctaagcaaagttcccaaagtcctattaacaactttcgttggcccatcggtttgtgggtgacaagtggttgaaaataacaa

SEQ ID NO: 119286 - DNA, 395 bp, Glycine max
gcaacactactcgtgtgctctaaacgagagcattccccgcatccctcagaacgtcctcgacgctacagatggcaaaacatcgaagactgcatacctcccaacaattgctgaacaatccaaggaaaacacgagagagactctctcctggaatctcttcggaataggaggaacattctctcaaggctatcggctgcaatgcacgtattaacgtcatgaaatctgcgcaccacaattaatctgcaacaggtgaaaaaaatgttgacgcctatcttagacacagcagaccttatcaagtaaagactgaatatccagcaagcagcattccagagcggtcggagcataagacaacaaaggatcatctaattattgacccttcttccactccacactccact

SEQ ID NO: 119287 - DNA, 411 bp, Glycine max
tcagtccctgagacactgattcccagaagacaacagggggtgattattgtctgaaaccctagccctgcaacaagtcctatggaagtagacacggagatggacaagaaaatccgcggtattgtgagtagcattctgaaggatgcttctgtgcctgatgctgagaaagatgttccaacatcttccaccccagatgtttctgtgcctgatgtcaataaagatgttccaacatcctccgctccaaatgctgaagccctcccttcacccagtgaagaggaatcaacagaagaagaggatcaagcctcagaggagacccctgcaccaagggcaccagaacctgctccaggtaacctcattgacttggaagaagtctaatctgatgaagaacccattgccaacatggtggcactctgc

SEQ ID NO: 119288 - DNA, 367 bp, Glycine max
ctacattactcctcatgcttcacaccaagacgaaaaatgttctttgtcttcgaactgccacaccattctgagcctgagaaccatgcatactgtatcgggcaacaatcccatgttcttgaagaaattactcatatgaacctggtgcttgtccatcccctgagcatctaccatagaactccccacctctatctgatctcacgaacttaatttgtcatccacattgcttctcaactacagccttagaatctctaaaggcatctaaagcttcattcttataacgaacgacacagagatacatatatggagacaacccaactataaagggtatgaactatctcggactattaacatccatcgctggacaaca

SEQ ID NO: 119289 - DNA, 425 bp, Glycine max
  unsure (1)..(425): unsure at all n locations
atcttaacgcacctgcggctgcagcttatatccgctgtctaaattcagctcttatttnntgaattctctgtatagctaagctataaataatttaaattttcaaaaatagttgttaatagaagcatagtaaaaagttggcagacaataaagatactgtgcagtgtagggctctgaggtatctattgttgtcttttgtcatgaccttgtagcaagggacaaatgaaagaaaacttgcaggttctcgaaaatgaattttcaaggaggagaaatatttaaaggattttcaattgacagattaagtcaaatgactcttgcccttgacaactcacttttctcgcaaaaagacaacttttaagaatgataaaatgaggtcacatgaagtctgtactttttatttttgacttgaacacaatcaatcaaaatat

SEQ ID NO: 119290 - DNA, 429 bp, Glycine max
  unsure (1)..(429): unsure at all n locations
tttcttattggacaaatgaacactgattattgtgctttgtttcccgagnagtcctgaatgtacgatcatatatatattatccactgagctgtagaaaaatatctcatgtaggaattgtataaatttagaatgcatgagtaactagcggacaaatagttttaaaagacacaaggcaaaagctgttaattgaacttgagttagtgaactcgtgcgtacctgaatttcacattcaatgtattcgtcttgaggagttaaagagctgtgatggcatcgctcaatagttttggtaggcctgcaaattaagggaaactgattggtaatattagtcaaagcaaatacgtattgagaaatggtgcacttgtgtttacataganattaaatggtgaaaactatgatcatgaaattattttaacaaactacctgtttgaa

SEQ ID NO: 119291 - DNA, 471 bp, Glycine max
  unsure (1)..(471): unsure at all n locations
agcttctatataaactgaaccattttattatatacacaagnngagttttattcagaaaattagagtttatctcttttatcttagtgagagtgattctcctaaattcttgagtgattcaagaacaccttggctgtatcaaaggactttcacaacctttgtgtgttgccctcgctggaaagagtgattctttccttcctttcatcttcacccttgttctttcaaaccacaattccagaaaatccacctctgcccagaattatctcgtggccataactcccattttacgcactcaaattaagtgattcttgagcctaaattgaatttcaaaatgagagcttccacctcgttttggaatcacctcatttggagcccggtagcttccgttattgccatttctatatttctgtccagccaccacttaacctacgttttaccatcccattcatctcatttatgccaaaaaccacctta

SEQ ID NO: 119292 - DNA, 427 bp, Glycine max
ggacacatagatactcagctgaatcggacattcggtgaaagtttgatcatttgatttttcaagagcttccgtgttcaatttctagcctgtcgacatattatgcgccagaatagaacatccgtgtgaaaagttaagaccatttgaatttctcaagaacttccgttgttcaatttcgagcttcttgacatattatgtgcccgaatcggatatccgtgtgaaaagttatgaccatttgaatttcgcgagagtttccgatgtttaatttcgagcgtatcgatatattataagcctaaatcggacatccgtgtgaaaagttatgaccatttgaatgtctcgagagctttcgttgttcaatatcaagcttctcgacatattatgtgcctgaatcggacatccgcgtgaaaagtcatgaccatatgaatttctc

SEQ ID NO: 119293 - DNA, 335 bp, Glycine max
caaaaaggagaagggacttaaggaaggttataaagccctcataccttgaagactacatctgagagtagtttaggaagagggaaaataagaagatctgcatcaaatcctgcttgtgacattttggtccctcgtgggccatcttacaaagcaaatttcattactagaccattcatacgatagaattgacataatgtgtttacgaatttctataaaggctatgtacatatcagcacgcataaaaactaaaatctctttccttcctttgagaccccttcttctcttattctgaggtcgtggcctcacaccagctctggattttacctaacaaacactta

SEQ ID NO: 119294 - DNA, 464 bp, Glycine max
  unsure (1)..(464): unsure at all n locations
tgctatagtcatgcagtgctgtgcaagcgagctatttcttttttgcttggcaagcccttcacacatgttgggaatttgaagtgtgtgatcgactacctcatattttgggaatttaagaaagttatttttgaccatttttaacctctaaaaagttatcaaaaacattataatgattttttcaagcaaactgccacaaagattattttgaaataactaatattaattgtcacattattatttaatagagaaatataatgatagggatcaaaatcaaattaaaaaataaattaaagataaaaaacaatcaaataaaaatttaaaaataaaaacataatttatccataaaataatatatattctccgtcttgattgcatgtatctgttaagttaaaataatcatataccaatcgatgagtggttggtggtccataaaatattactantatgcctagctaatatcatta

SEQ ID NO: 119295 - DNA, 474 bp, Glycine max
gctcaatatataagaaaatcatatctcaattcttacaatatattggcaaattattggctaatttatatactattttacaggtagagatatcaagccaaacatcaattaacattgctcattgatatgctaattaactaagaggagatataagataagtttaatggttaacggagaagagaagagaaaaaatatcactagatggattctctctagtataaaaagaaacatttgtccataaaaaaaatactatattagctaaaatatttttcaagccattttctttaaccaatccatacacggagaggctaagaacaaacttatgccaactcaatagcaagctccaagcaacaatgactgctctagtcactagcggcggtctaagagagagtgagaatgaaagagtaagagtgagaacaataactaatgtggaaaggagatggagtatgagtaacgtctctctctgattttcatata

SEQ ID NO: 119296 - DNA, 462 bp, Glycine max
  unsure (1)..(462): unsure at all n locations
tatcttgacactgacaacgacagtggtagcgagactggttgtgagtggtagcgagaatgacaccggagctcgacacagaaagtataggacagagaggaagatgcataagtgcgagagctgaatgttgtgaaccgtgaatagaggagttgtgacggagaggatgatgtgagcgacacctgagctgcaacagagacaaagatacgcaagagagtgagtgaattagggtgtggagacaataatattttcaaaaatcaagttctttaacatcggtattcacaaaaaaactgatattaacgaagtgatgttaacgttaacatcgattnttctaaaaaaaccgatgttaacttatcatttaccaacattggttntttgaaaaaaccgatgttaaagaagtgatgttaacattaacatcagtttttctttttaaaanaaccgatgttaacttatcatttcccaacatcg

SEQ ID NO: 119297 - DNA, 437 bp, Glycine max
tattctgttgatgaatcaagaaagagaaattaaaatatcttattattggattaattctcttaactaataataaaaatatgcatttattatgtcatatatgtgagaagtagttatagaggtacctgaatatcaagaattgcttgccatggaaaaggaacaggagcatgtggattgtttaaaagaaagttgaacaatacaaaagtatccatgacaaagtaaaatgagaatagagagtcactgatacttgagatgactcactctatatatagtgagtcatgacatgaatttcaactatgcatttatctttcccatattaatgtaaatgaaagaaactacttttattgaactggttcatgaaacttaaggaagtgtgtatcacataaacaaattgctttaattgaggaacacaatctattgactctgcaaagttaaatgaa

SEQ ID NO: 119298 - DNA, 399 bp, Glycine max
  unsure (1)..(399): unsure at all n locations
nggacccttcatgcaagtgcttcccatatgcagcctgtcttctatatcaagggctagctcttcctgtttgtggatctctatcacgtcttgtttttgcactcttgttgtttatggaagcatgcttggtgtgtgtgtgtggcagatcgtgttacaaagcttttttgttatattttttaggtatatcatttgtatgtgtagatgcacattcaactaccatgttgtagtagttgttataaatggctactatgattgtctagtctaattcctaacattagattttctttntaaaaattccttatttcaacttgctcataaaatcttttccacaaaaattccttattatttaaatggtaattccttatttcaacttttgtgatgctcatgtgtgtgtgtgtgagt

SEQ ID NO: 119299 - DNA, 445 bp, Glycine max
  unsure (1)..(445): unsure at all n locations
gacctataaaactcagcttatggatatctctaaagaaatccagaaccctccgcacatcatgctngcacaatgactcaacatgtgcccactgattggatcgtggattctggtgctattcatcatatcaacaatgatctagataatctccacatcacaaattcataccatggccaagataaactcattgtaggagatggtattgctcttcccatagcacatattgataacacaattttacacactcaccacgtcttttntgtgacaatgttggtgcaacttatctatgtgcaaaccatgtgcttcactagcatatgaagcatatatctcatgactatcattttgttcacgaacaagtccaagtaggtcgacttcaagtgtcacatgtgtcagncaaagatcaatcgacagacattaatacaaaaaccgttggttgctacacattttt

SEQ ID NO: 119300 - DNA, 390 bp, Glycine max
cttgagcaaattcgaacgacaataactgtgtactcggatgtctgtattgttttccgtaatatatcgagacgctcgaactggaataccgaagctctgagataattcaaacgacaataactttttactctgatgtctgattcagtcccgtaatatatcgaaacgctcgatattgaatgttgaagctctgagcaacttcaaactacagtaactttttactcggatgtctgattgagtcccgtaatatatcgaaacgctcgatattgaatgttgaagctctgagcaaattcaaacgacaataactttttactcggatggctgattgagtccctcatatatcaagacgctctaactggaataccgtagctctgagcaaattcaaacgacaataac

SEQ ID NO: 119301 - DNA, 455 bp, Glycine max
  unsure (1)..(455): unsure at all n locations
agcttacctatcatactcacgtgtgtaggtcttgctctatatacaaatcttactggnatcgaatcaatgcaccccacaaaatngccttntacaatcaagttaggggccatggtacgtttgaggcttaaatctggcttcgctggtcattccaaatgaaacccatctttatcgttttgctaagtaaacccatcactatttaagtgaaaaggaaaaagttttccaaattaaacccatcactattcaggccttccctcatatatgcggggaatcattttgcattgctttgatttttaatgctaccggataaacacggaatgaattaggtgaatggagaaagaaaaaagtaaattaattacatcaaggtgtatcaaaacaaccaactgcattccctttatntnttacctttgttttatactattaattaaataaaaggttaaaatcaacctacacagagt

SEQ ID NO: 119302 - DNA, 442 bp, Glycine max
  unsure (1)..(442): unsure at all n locations
ntaaagaccgcagcttacatccttaatagggtgccaagttatttattaacaaaattccttatgaactttggactagcaaaaggccaagcattaaacacatgcatatttgagattttcaactaaggcacaatcttataggtcgtatgaaagaaagctggattcaagaacaattaactactattttgttggctatgtcgaacgctctcatgatataagttatacgatcccactttaagaaccttttttgaaacaagaaatgcgagatttattgagaaagttgaatttgggaaagaatgttgtctttcttgaataacctcttattgacagtgtgatgtaactctatatggagcttgtaagccttggatcttcttcattaatggagttctttgcttcttgaagatgaatgccagtggtatggagaaggacgaatgattattggaga

SEQ ID NO: 119303 - DNA, 411 bp, Glycine max
tatatactaaagtcaagagtattagatagaaagacatggttattcattcttatggaaataaacgtataatggatcatacaaactcaagaaactcaataacgtgtcattttactgttacaaagatcagaaattaagtctgatgggctgttcctgttattcatctagcgttttcatttctttcctttcaatggtttgcataccatctgtgctcttatattttctttgcattgataaaaataataaatctgtctcattgagatgaacatgtgactcattcctggtggtggacagaatatcaaagttaccgatgagaacgagcattaatattgatattgtagccaagcatcatcttctctcttggaagggttcactgagttgatttctagggatttgatattgatatttaccgac

SEQ ID NO: 119304 - DNA, 473 bp, Glycine max
  unsure (1)..(473): unsure at all n locations
ccccaagcacctgagcagcgctattgacagcatagcgagaagttattgatatttctcatgccaangaatgnattctagtatttaagcttgaattgtacattttcttattaatattgctttattattgaactcaaacaaaatttgatacttacaagcatatgtgtttgagcatctgcccaatgttggatacatggatggagaggattacatgggaggtgaccttctaaaaactaaatggaagctatatagaggcaccgggcgtgccctttcgatcaccgagaaatcgaatgagtatagatgaatgttgtcatctaatatccatataaggagcataacaatgtaaggcctttactagagcacacactatattttggctctactagacgtgagactaatgtgaaaccttatctttcagaaaagtgattgaggcagtttgggcatgtacaaatgatttcacacccgtcaccttccta

SEQ ID NO: 119305 - DNA, 461 bp, Glycine max
tgtatagttccctaatttatggttattgtggagtaaatcttgttaataaatcttgttttatggttaacgttgtctctagaacatttccattggatttaatgatgaaatttgtgcattttcaggtgaaaaagaggctaagttttgaattgcaaaaagtagcaattgggctaagctcagcagttgggctaagcgcttatccaccgcttagcgcataggataatctggcagagcatcagcatcaaagccgcgtgctaagtgcaagatcagtgtgctaagcgcagcaggtgccttcagccaggcttagcgcaatactggcgctaagcccaaggtcacgaattctgaacctatttaaagcttgttttgtgcagaattagggtacacaccttttgagacttggcacagaattttcagaggcattggtgcacagcactccatagtgcctatcttgggaaaagagccct

SEQ ID NO: 119306 - DNA, 382 bp, Glycine max
  unsure (1)..(382): unsure at all n locations
agctngaccactgcactaacggcactangctatctaactcctnttctaccctgaagcctactcttgaaggtaagctagcctcattactctccttttgatctttgcatattctgcaccaatgctgaatagtctctttgtacccctgctctgtgaactgtgcattccctatcatagtctcccaaaacagaatggtatcactgtttcagaatcatcagacaaagagtgaaatgtacaaaaagcttatgcatagctttggatcctttaccaccaaatcatgatcaagtgatgtataccatatgcattatgcatgacccctacctgacataaaacgatcataccagcatctatatggggcagccacctcatctaattaactggaacc

SEQ ID NO: 119307 - DNA, 467 bp, Glycine max
tgccattggacaaagactaaggattgtactgaacaaacttgttcattgtgcttggtaactgatgaggctgaagttggtgtatatagggtagaaggagctgatgaacataaccatcctacttcttcaagcactacatactcatgcaatggctctggctcaatgatgcatggaagctcatcatgctctcatgagaaccaaaagtattcaaaagttaaatcaaattgtgttgatagagggccaaaaatgattgtgaaagctagctacaggggtgatactattcgttacaagaatgatccatctgcaaggtggttccagctatataaagaagatgcgacatggttgaaattgcagaatggatcattccacctcagatatcttgatgatgaagaggaatgggagatgtaggtgaatgactcagattagcaagaatgtgcagaaatttaggatgacaatggaacacgttgtgt

SEQ ID NO: 119308 - DNA, 490 bp, Glycine max
cggatccttaagcacctgcggctgcagctttcagggtaaagataactgagcttgacctttcatgcatcaacttaaaattgatgtgaatgttacaaatgctggctcgtcttcccttcccagcatttcgtatctaaacttggcatcctgcaacttgaaaaactttcttggtttcttgagaaacttgtatgcaatagttgttttagatctttcagctaacaaggttctaggaacagtgccccattggatttggctactacataatcttcaagcccttaatatttcccacaatccgttcattgatttcgcaaaatctttctttcaatttattaacccttgaccttcataacaataaacttcaacaacaattacctatttttcctgaacaagagaattaattggatttctcaagcaaccaatttaactcttttatcacacaagatattggtcattagctgtctctgacatcttttctctctctttcaaacaatac

SEQ ID NO: 119309 - DNA, 450 bp, Glycine max
  unsure (1)..(450): unsure at all n locations
tgtaagtaactctatggacttaaactagctagctttttatggtctgagaagtcgaatttcttgcttctccaacttgggtttcaacattctatatntgatcactccttctttatccatcacacagttgattcccttactactcgtgtatgtagatgacatagtcattgttggaaattctatggatatgataacttcattcaagcagattttagataatcaatttgggcattcttaagttctttcttggtgctggtgttctcagtgccaaacctgcaagcaccccttctgaacctacctttgagacttcgccaagatgtcgctcctatacctgactttcacacgcccagatatattccatgttgaccaacaacttagtcaattttcagccgtccaacagtgagtcattatcaataagctcaacgcgtactttgggtatttgaaaaggaatcc

SEQ ID NO: 119310 - DNA, 441 bp, Glycine max
  unsure (1)..(441): unsure at all n locations
agctttgtcatcgcctaaaaaagttatttttttaatgttcaacgccttgaaatggncttttctgcttttattggttaagtgtagatctctaaaaagcctaaaatcaatatgtagacttgttacctctttcaaaaataaagaaatcattaatggtccaatgccttaatgttttctcacttttcaaaagaatcgaaagattgtctaatggtccaacgccttanatgacctttcattcaataaaaactaaaaaataacttaatcaaaacgctttgttcacaaaagaactacgtaggtctgattntctcatcacaattgaggaatacgtaggagcaaagggaaacgcccttgtcgaccacaaaaagataaaaacataaaaaggcataaaaaagacataagaacgtaaaaagggaaaagaatataaattgaaatcatatttgcaca

SEQ ID NO: 119311 - DNA, 436 bp, Glycine max
  unsure (1)..(436): unsure at all n locations
gatgtttatgggaagaggtctgttattcacnttttgtattaagagtagtgtcccactggtaaaactaactttccaaatgtttgccttcgcaggaaatggccccaaggaagcttgcctcaaagaggtctaggaaggacaaggcagccgaaggaactagttccgctccggagtatgacagtcaccgctttaagagcgccgtacaccagcagcgcttcgaggccatcaagggatggtcgtttctccgggagcgacgcgtccagctcaagacgttaaagaagcgctactaggaggcaacctagtaccttttaatatctgcctgctatatgtcacttcttatagtaggacgcacctagttgctcatgatcctgggaatttaactaaacaagcgcaagctcggaatgtagtcataccttacaaaacatatatatgtatgtta

SEQ ID NO: 119312 - DNA, 415 bp, Glycine max
  unsure (1)..(415): unsure at all n locations
agcttgngtntgcttatgcgacatgttatattaacctgtgattntccgctataatttcttaaagagtgttccattcggggcactcttttttacattccctctacagaactagcccttctctcacagaaaatgaataaataaaaatgcggcaccgccagaatcgcgttcgatgtgactatgatcattttcggtgagtactgctttgatctaaaggctggttttctgtgatgattgaccagcctcagagtattgatgacaccaccgttcataacagatcggcattactatgcataagtactgtctcatattctcgccaaaacactttttaatgcctttgcgaattcatccagacttatattgtcaattttttgcccaacgacgactgactccgagacatcggccattgcgggccatc

SEQ ID NO: 119313 - DNA, 366 bp, Glycine max
attcccgatcagacaggcaacgctatggccatcttacctgttattcgacgcgcatgaattgcataatactaagcatctcttaattgtaacgtcgacaatgaatttagaagtctttaatgcgcttaaacttgaacagactaaatcaacattagacacaacgactatgcaggatcacgcaacattaaaagaaataaatgattcagcacagaacataacacagcaatacggttcgccggatctttgcattgaggggatgcgtaaaaagaacctgacaacgaccgcatatatcagtcagttgaaagcaaaaacgaatttacatgttgtaggtataaccatgaattgctactccccttcgagcaagaacgc

SEQ ID NO: 119314 - DNA, 461 bp, Glycine max
  unsure (1)..(461): unsure at all n locations
agctntaaatagaatttcttttanaacaagttttcaatgtggaaatttgaggccaaacatttcatatatagaaatacagcaacagctttctacatcggttaaatggggttttctatatcaatttacgattgtcgtcatagactacatcataaaaaggggtatctattctatgatggtcgcacagatcgtcttagaatgtgtatatttctaagatggtcacgtcagaaggactgatgtacaaaacattttattctacgacgatcacatgcaatgatcgatgtagaatccttttaattatacgacagtcacttgtcaaggatcgatgtcgaaagtttttaattctacaacggtcttaccagaaccgatgtagaatgcattnttttttgtattttcgttgtggatattnntttttttgctattccagactcaaacgtcaaattgaagaataacaacaatgtcat

SEQ ID NO: 119315 - DNA, 473 bp, Glycine max
  unsure (1)..(473): unsure at all n locations
cggaccttaaaactcagcttcacaaggtgcattgttgaacatagacatggagagttttatttttgctatatcatatatagagtttattggtcaacaaattatcaatgaacttattcttcatgcatgtttaaattgtcctattatttatgtttgtatcaattactttaagtaaacaaagttttgcaattgttattcaattaaacattgatattattggtaacatgtttttatcttcattgaaggtatttgcattatcagttggtccttgcaagataaaatacaaagagattttcattcttatgcccacataatacaactccaacgaacacgagggcaatgaagctattgaattaatccacgagacanagtagtctattggaaccttacaatacagggtaaataattttttaataaatctatttaatttaatgaatttcgaaaaatataggttacttaaatttgctaactaacaa

SEQ ID NO: 119316 - DNA, 262 bp, Glycine max
cgaaacacgcccacttgctaacgaagttagtgcctccctctaaagatcccaaccttactaagctgcaaagacatcaagaaagccttacataggatatctatcaaaggcgacaatgaacatagaacattagaatgaagtcgcaccagagtcaacatcagaatgacgtgatcaaggattctaagaatatgaaccttagaatgatattccataaatagaacataatcaagacaagatagagtccgagatgactacctcataatga

SEQ ID NO: 119317 - DNA, 435 bp, Glycine max
  unsure (1)..(435): unsure at all n locations
ntgatgtaattatgcgggcaacccaaggtatgccacatgtttttcacttttagtgcacatgagcagtttttttactgatataataataattattattattatttgatggcattattattaaggtctatcttctttagctttcaatttcaataagttggaccatctttgtttgtgacataaatgggttccattttcttttgtgcctacctgccttatttagtccacgattttataggctagcttgtggaccaagaataaacaataaaatgtaaaaactagtaataagtaaactaaaaattgtaaaattttataacttatatttttatttttaatngattaaatttcaatatacagtaaatatatcaatgaaacacaagtcttgttagtgggtgtggaaaagaaaaatagaaaaagaatgtatgtangacaactctg

SEQ ID NO: 119318 - DNA, 206 bp, Glycine max
  unsure (1)..(206): unsure at all n locations
acacggaccaaaaaccgctaggaggaaactacttgatgggatgaattatatctcanaacggaatcaaaaaatgcgacaaaggatgaccctagggctgcaaattcgtcaatcccgtgggtatggcttttgaaaggggggaaaagacagttttgaatgtaaaaacgccccccctttcgtcattttcataactaggtgcacgggtggct

SEQ ID NO: 119319 - DNA, 460 bp, Glycine max
  unsure (1)..(460): unsure at all n locations
tgtaggattatggngtacccatcacatgtggtactatgtgtcggtcgggcgatggtgcacaacaagttttccacatccacaaagcgcgcataaacccaccatcccctgttgcccacctccaactgagctcacgtactcccacgtagcccatatcctcgttcctctcaacaccgggtccccatcaatcctcccaagctttcccaacatccaagtaatacaacattcagacaacacaaattatcatagccaagcaaaacagggcaaaggcagaaaactctgcccaaaacaccaaccaaaatcacagcttttctcacttaaagaccccagtaataattccttcgttccaattcgttaaccggtggatcgactcgaaaattttactggaagtctctagtacttaagcctacattgtgaaccgtgggatctactagtaaacatccagaactcattctatactact

SEQ ID NO: 119320 - DNA, 108 bp, Glycine max
gcagctgtgcccggctgaggtggagttttttttgtttttgtctcaccgcaacctttacttataaggatgagggcgagatgttgtatcctcgctaagctcgcgcttgac

SEQ ID NO: 119321 - DNA, 468 bp, Glycine max
acttagatactaagctgctaggggctactatggtgctggtcttgagcttcattttgtcctccaatggtgatcttgcaccatggagatgcagccgaagacacatgagaatacgtgagacgatgcgccatccactatggaataagccatggaagaatgagcttcaccaccactatgagccttggatcagaggcttggagatgatgcttcgacggaggataagaactagggagagaaagagagaggggtggggggggcagacgctcgaactttaaaaccgaagctcttagcaaattcgaaccagagtaacttttcactcggaagtccgattgagtcccgtaatatatcgacacgctcgatatttaacaccgaagctcgtatcaaattctaacgacaataacttgtcactcggaagtccgattgagtcctgtaatatatcgagacgctcgacaattaaaacttaggctccta

SEQ ID NO: 119322 - DNA, 430 bp, Glycine max
  unsure (1)..(430): unsure at all n locations
agcttctatagaagcgtggagagcctttaaacttattgaagaancaagccagtcctataaccactttttcatgtgggatatgttgatgagtgacttggagtcagtgcacacttatgatggacattgcggtgctcgatatggaacatacaatcctaagcatctaactcggtaatcgatgcatgctgccatcttccaaattttatagacgattcgctggttatgataagacatgaatatatgggatacgctgatacgagagctgaaaaaatagtggaaaaatatacaagcgttatacgctcttatcaaatagttaacgcacaatagataactctgtagatagtaatacaacagcaacaacgaatgtgttatctcataggtgagggtggcgaggtgaaccacataatgaaatcgagcttgatcaaaaaaacaa

SEQ ID NO: 119323 - DNA, 445 bp, Glycine max
  unsure (1)..(445): unsure at all n locations
tacctagtatattaggaatgacattatgattgttgagactttgtttttggcacaccgaaaaaattattggctgagtcgtggacaatgtcgctctctctaagaccattcgtggcactgccaactaattgagcacgcagactatcaaccacgaagtccccaggataaaacagtccagatcattgtataagattccgcctgcactgatggaaccttttctagaattacactctattgtatgacttgagaggtcactctagagccgcccgtgaatatgacttgataagtcactctaatagtccacctacaaagatgacttgaaaagtcactatgatagcctaccgataatatgacttagagagtcactcgttatgccaacggagaactatgacttataatgtcactcttatagtcaaccaaatatatgactntaataagccactcttat

SEQ ID NO: 119324 - DNA, 480 bp, Glycine max
  unsure (1)..(480): unsure at all n locations
agcttctcaaagaagccacgaggaagcttctttatgatgcctcttaatgaagctnctagagaaagctacaagaagctgcctcggtaaaaacgcttcccagccttcgttaaccgttggatcttctcgaactttcgtctgcagcttcacaagacaattgtgcacattctgaccgttgggatctttgagtagatgtctggagtgtgctcgatgcttccgttcccgagagcacttcttatttaagcacttcagcctttgctttcgtgtagcttaggaaaaatgtcttttcttcttctttctttcttccaaagtcatttctaaagttccaagcactttctccatcacccacagccaccattagccaccacaaaccatcattgttctccattgaaaacccacaccgagaggaacccttcaaccgaagcggaattttccaacttggcttgcggtttcgatagagaactgaaaccctaatctgacctt

SEQ ID NO: 119325 - DNA, 462 bp, Glycine max
  unsure (1)..(462): unsure at all n locations
gtacagtaaatgtcactctactccaagtttttaaaggatatgttatcttggaaacacaagtatattcaccaggaaaacattgttgtggaaggaaattgtagtgctgtgattcaaaagatccttccacccaagcataaagaccatgggagtgtaaccattcctttttcaattggagaagtcactgtgggaaaggctcttattgatttgggagccagtattaacttaatgtcactctctatgtgcagcaggttgggagagttggagatcatgcccactaggatgactttacaacttgctgactgctccattatcagaccatatggagtaattgaagatgtgttgatcagagtataacattttatcttcctggaagactttgtggacatggatattgtttggcttccaacangtgcaccggatcgcacaagtagtataaaatgtgtagaaccgagtatcgaacac

SEQ ID NO: 119326 - DNA, 420 bp, Glycine max
aattacactattgtttgagacaatgactgatttattcacgagtctctgctttaatcgattaccaagtggattaatcgattacttctctctcatttagatgttcagaggtgaacaagaacactttaatctattacttacagaatgtaaccgatcacattgttcttgagctatttctagatgttgggaagaacactttaatcgataacttagataatctaatcgattacttcattgaattaatagattactctgtcgatttaatcgattataggcggttataattgttttctctatacataaccagcatgtgttcactccaatacacccaatcaacacatccagagaatactctatatctcacaaatattattcttagcctctaaatgagcaagatctcgagctgtcattactgaataaaag

SEQ ID NO: 119327 - DNA, 465 bp, Glycine max
  unsure (1)..(465): unsure at all n locations
agcttctctaactgtaggacactctacgcctgtatttttctattttcttcgnacctacatggtcctttagctataagcaacatcattctttagtacaataatttaccagtgtttggtggcacccaatatagtttgtcgatactgtcacaacatgcccttttgtgggcgagcgaggcaaggctcatgggtgcgctcttcaaatgtggaaagatgcgcggagtcgccaccaatgtttatttgtggaaaacgtcggaaaaatcgaaggaaaccggtcataaagaatattccaagttcgggagttgtatttacgcttgaggaaggtattagcacctctcacgtttgtctcaaaggacaacagccttatttntcttatacttgcggaaattgtgtaccttaacttttattttttttatttttgaggcaacaaagcgggctccgctccacgaccctcctcgaagagaatca

SEQ ID NO: 119328 - DNA, 457 bp, Glycine max
  unsure (1)..(457): unsure at all n locations
tcaagaataatggcctcggcaacttcttattcccatattgtttttcataaataggcctcctatttttaatggagaaggttaccactactgggaaacccgaatgcaaatcttcattgaggcaatagacttaaacatttgggaagccataaaagtaggaccttatgtacccaccatggtggctggaaatgcaacaatagaaaaacctagagaagagtggactaaagatgaaagaatattagtgcagtacaatttaaaggctaaaaacatcattacttctaccctaggaatggatgaatactttagggtttcacattgtaagaatgataaggatatgtgggacactctacaagttacacatgagggaacaactgatgtcaaacgatctatgataaatactgtaactcatgagtatgaattatttaggatgaagaacaatganagtatacaagatatgaat

SEQ ID NO: 119329 - DNA, 465 bp, Glycine max
  unsure (1)..(465): unsure at all n locations
agcttgaaagcaaactggatgcatttgtcttttnggttacccagctggccttgaataagaaatctgtacctgtcgcaagggtttgtgagttgtgctcctctgctgaccaccatacagacctttgcccttccatgcagcaacctggagcaattgagcagcctgaagcttatgcagcaaatatatacaatagaccttctcaacctcagcagcaaaatcaaccacagcagagcaattatgacctttccagcaacagatacaaccctggatggaggaatcaccctaacctcagatggtccaaccctcagcaacaacaacagcagcctgctccttccttccaaatgctgctggcccaagcagaccatacattcctccaccaatccaacaacagcaacaaccccagaaacagccaacagttgatggccctccacaacctttcctcgaagaacttgtgtggcaatgactatg

SEQ ID NO: 119330 - DNA, 425 bp, Glycine max
  unsure (1)..(425): unsure at all n locations
ntaagaagcatgttacctaactggtaatcagtatatgctttctccagagatctatggcccaataaggtcagtataaaatgggaagaacctctaggtaaagaccactattcatttgaataatcctttgacatcatatgtgtctttgagccaaaccctcacttgagtgtcagagttccttttgctggtacctcttctcttgttttggactcacacacatcgaagatacaaagaagttacctatggaagaaccattcgacatagttagtaacccttcgatgaaaaagataatgtccaatctatttatgatagaaacatatatatatatatatatattatagtatttatatacatatacaaaagcgcgctaagcgcaattctaacccgagagggaattgcatgagtgcgaacaaatatcacgcctcagt

SEQ ID NO: 119331 - DNA, 466 bp, Glycine max
  unsure (1)..(466): unsure at all n locations
ttaagtcacctgaggcatgcaagcttctaattccaaacagagggtttgtttttcatgattccataatnaaaaccgtgtcagatatttagttttgattttgaatactatgttatcgtaaagttggagttacatgcacttgcggccatctagtgatgtggcattacttaattatcaagcgaaagcttttaaaatcaaaggtgttttccatgaagcacgaatcttcatctgagggtttgttgcaaatagtacctttcttggttccatacattttcacatttccaagaagagtcttttggaggatggtgtatcaagtgatgatgagaatatctgccatcaagcaagagctaagagtttctggatcaaatgccaacaactcagaatattgctgctgggaaggtgccacctgtggctatcatcatctctcatcagaatcttggaggtgatgtacagtcatatttcagtacac

SEQ ID NO: 119332 - DNA, 445 bp, Glycine max
  unsure (1)..(445): unsure at all n locations
tgaccatttgttgaaatttcttgtacaagctttatttagtggataactctgataaaatagtttcaactcaagacaaattgtagacatagctaaaaagtgaaaatgatcatgttggctgagaatgatggctctgaacttaatagtaggatttattaacttatagatggatgaaaagactaggtagatgctgagaactatttccctttggatgatctcctttctaaacttactcttttttcctctattatgaatgttgtttttcctctattcatttagttcattctttgctttcataattaatagttntgtcctttgtggatctttctaatatatatgactgangaatgaatttttgcattgacctattaaaaaatcatactaccattttcagctaccactattacgcctngatttattaatatcatgtgaaagtataatttggatg

SEQ ID NO: 119333 - DNA, 265 bp, Glycine max
gatattccttatggatgatcacgacagttcctagagtctcatgatcagcacattatataggaagcggaattccacactcgaagaagcgacaacgttccggctaacaaattcaacttaaaaagtctcctccaagagattcactctctgcgaatctattactataggacgtaatcgataactagtggccaaaactgatttacaacacctactaaaacctgaattcaaaactcgcactgcgtaatccattacacatatatggtaatca

SEQ ID NO: 119334 - DNA, 451 bp, Glycine max
tgtcttcaacaaacaaatcaaaatcaattgtctgatcttttttcctagctccggcttcctcttccccatatcaactatgcagcttgcggtcaacatgaatggccttcccaatattacagggatgtcagtatcttcagagatatccattaccacaaagtctgtcgggaagataaaatgttttactctgaccaacacatcttcaattactccatatggcctggtaatggagtgatcaactaattgtaaagtcatttgagtgagcattatttccaactctcccaatcttttgcacatggagagtgacatcaaattgatactggatcccaggtcaataagagcttttcccacattgacttctccaattgaacaaggaatagttacactcccaggatctttatgcttgggtggaaggatcttttggatcacaacacttgcagtttcttccactaag

SEQ ID NO: 119335 - DNA, 496 bp, Glycine max
  unsure (1)..(496): unsure at all n locations
atcctcagagacacctgacgcatgcaagctnggaatctataacacataatttgtnatgattttgtaatccgcatgttcagattgtcaatccatatatacgaattacaatttctttttaaaaaataaaaaaaaatattttacaaattaatggcccatgttggattcaaacactaaagccatataccgagtcttattgggtttccattacacaaaagtgattttatgccttgattgtgtcttattggatttcaatcaatcattattgtatatgttacactaatgtcatattggaaggtaattactttgtgcacctaacatttctcttgcacacccaacaaattattataaattccaaaagtatccctgctaataaacatacggattcgcaattcataagagtaagcttacacattcgtaattcataagagtaagtttataaattnggaatccgtaagagacttacanattcgtaatccgtaataatctgatatgaatt

SEQ ID NO: 119336 - DNA, 444 bp, Glycine max
  unsure (1)..(444): unsure at all n locations
tatgatactaagctccagtagagctngagttatagaggcaaaagtccaatgttctttacttcgaacttgtgagaagttaacttggtggtttttccaataactggatgtaatctcagtggttaagataaaaaagtataaattattgtgtctgatctttttattgctttttgtcctctttaattgatcaagggattgaattggttttaaatgattgatatatctcttactttgctaaaacatttttcattgtttgactgtgtttttggtaacattttatctatctaaacaaagactttccttcagactattttttttttgttttcaaaaggcttaaattttttttctaaaatcataattcaaccgcacttttgtgatatttgtctttacaattctatgttagcacatctatgtcatctgaaaatngctgacacatcacacatgtta

SEQ ID NO: 119337 - DNA, 419 bp, Glycine max
  unsure (1)..(419): unsure at all n locations
caaggcagcaggcgcacgcnagctgcagaaaaggctgcttttattttttgttgtngccgnnnagggataggacaacacccattggattatttggtggaaccgagctcatactgaaccgatagatgatgttcggttcggctagtaccggcgcgaaggacagtgattctttaagacacccgaaggcggccgagctgatggggaccattgaatgggatccatggttgtcgccttcaccagaggaacaacaatggttgcataaccatggataaatcttcgatagaaccctgtcaggccaaggaagcttcgtaaagccttcgtgaagcgcagtgtaggccactggtgaatcacggtgacctttgaggtcacacgctccacccctcgctgcaagacgacgtgtcccaagttttcacctgagactg

SEQ ID NO: 119338 - DNA, 396 bp, Glycine max
  unsure (1)..(396): unsure at all n locations
tatgaactagcatgtgaatgttccaataagatgatattctctaatgttataatggcatagttatgatctttcttaagactaattnttttatcgttaattgttaattattagtatttaattagtagagaaaatcaaatccattatatnttttttctttcttctttttatcatgcaaccaatcttataacttctaagaccgtggggtttgaactttttgtttttttgtttttttttttccataagacatgcaaaataggataccggtcataaggggatatcttgttcaccaaatcataggttatttaatttgtgttgtcatcattaacattaaagggatgattaatcttagcattaacaacatgataatttctatgcatttttttttctaccttttat

SEQ ID NO: 119339 - DNA, 450 bp, Glycine max
  unsure (1)..(450): unsure at all n locations
tgtntggtcacactcccacaagcatgagatagatgtgtatttgtagagctctttcttcagctattaatgaatttataagctatgcaaaacaaatcaataaaatcatgatagcaatgaaggattaagagacaaaatgcaagcccataacacatattatcatgtcacaaaaatgtatcttcaattctaaaacaaggggagttatgcttagtgggaagaaaaacgagagacattaaaaagaaagattaatcatgggggaacattgaaagtgtcaagattcttgtaacaagatggtcttgttctatgccaatcatagcatcctcctctcctatacaagatgaaccagacttgatgaagaatgaaattatactcatctataagcatacagggaaccaattatataatttaaaaggacacgagaagaaaaaaaaggatcttttctttagttgtcac

SEQ ID NO: 119340 - DNA, 384 bp, Glycine max
  unsure (1)..(384): unsure at all n locations
acgagaaaaccgccccttttcagaattctcacaatgtcgcaagaatcagttccgtttgctgggaaatggcaccgttatacagtcaggcctgatggagaaaaagtggtcccaaaaccacatggtgacgccgaacaaacagaaacctgggaatcagaggtgacgatcccttctgcagtggaaaggaccagttacatcttcggtggacctctgccagaccaggagtcactctcgaagtcaatgaacaaggtatttccctgctacccaactngcgaacctaggatctttgatagtgagccttacaacttcaattggttaagcaaaccccacaaactctntcgatccgcccccgcaatagcccatagggaatacataccttggcttgat

SEQ ID NO: 119341 - DNA, 320 bp, Glycine max
  unsure (1)..(320): unsure at all n locations
cggntntnagatntttaatgtgtaaattaatactgaatagtgactttagattntgaattttaaacttgggtttagatgttataagtatgttgtttacataaagtaacaaatagatgtgggaaccatcctccaccttactatgatagacacgtgaatcacaaggactcctgatgtacccataagaaaaaatgaactcatcaaatctctcgtacccctggcttggagattgcttcagcccatagagtgaccttttcaacctatagacantaattttcttcccttgcacctcaaaacattaaggttgttgcattagaatgtct

SEQ ID NO: 119342 - DNA, 244 bp, Glycine max
cggcgaggggcaaacaatttatattcacaattacgataacccccatccgctgtggcccacctccacagagctcacgtctccacgtaactattactcatccttcaacacgggtcctattcaattctccaacttccacacatccagggattcccctccatcttatggactcacaaaaccagcaaacacggcaggcaaaaacctgctcaaacactactcaaaatacagcttctacaatcaatcccca

SEQ ID NO: 119343 - DNA, 291 bp, Glycine max
  unsure (1)..(291): unsure at all n locations
tagtggatggtgccgactcttgacgtctttgctttgtcttccgatgcatntncatggtggaaaatcaccattaaaggacctcattgaagctcaaagatccagcctccatagaagccccacaagcaagcttccatcaagtggtaatcatagcacaagagcttcatgtaggtgcttctgaaaccttcattaattattcgctctaccttctcttccatcgttgttgcttcatttgtcttcatgtatctccctacatgtctggtgataaatgttgttaacatgattcttcatagt

SEQ ID NO: 119344 - DNA, 451 bp, Glycine max
  unsure (1)..(451): unsure at all n locations
agctacacaactctcggtatgggcagcgccttcttcttttattgtgcnnnacaganacatacaacgcagcgtcctgggttctgtctaatcttgatatcattctatgccatctaaccgagcttgttcattttaacataatcatggaatgttatgccttgcacaaagtccagctcttgtccatcgatataaggctggattttgtctttgacttagagtttcgcgcttttaatttctttagccagtcttngccatttgatcagcagctctgcattagtgtatctgcctcaagagtgaagcttccattactccttagtttgcgccactagaaatattcacctcatgaatcttctctcactgtcaccacacaaggaatgtgcgtgccctatctgcctgtaattgcacactttggcctcgaaacttattaatttgcctgtatgcaacgtcttcattt

SEQ ID NO: 119345 - DNA, 456 bp, Glycine max
  unsure (1)..(456): unsure at all n locations
agctctataaatgttggccttggacttntaaatttgaatatgtttataatatggatcttttcaactcgatatgggcttaacatgaaaaatctcatacaaattaggcaaaaaaaatcttatcttagaagaacaaattgaatctgaatttattttaccgatttgatataatcatctacctgtaccaagtttgcaacttgcctagcttggacttacttgctgaaatattggccttatgctttaaattttgaaacaaactaaatttggactttttaatccgatccaatcatgatctaatctaggcataatttgcaaaaacttgtataaattgtgttttgactaggtttgaccctaattatataggccaaaatttaatttgatttttttatgtcatactatagcttacaatccattgagctagtcacaactatattaatacaagtccacctattgcatata

SEQ ID NO: 119346 - DNA, 429 bp, Glycine max
agcttaaagtatgcccgagtcattcatcccttgatttgttgttgaagtattggcgatcagaattgccattccttggattatagggttgaaccaagctcatgcttttacaaaaaaggttcatcaagtcaagttgaaatatggaagtaaccgtcttgcaaaattggggcaaaagatgaatcgagtcacatcactgcttcgtctactgccaaacatatttaggattattgatgtccttgttacttccagtttcaccttgacaaagatgtcatggaccatgttgaaaatctaaattgattcaaccccatatcctgcgtaaaaattcgcaatacttcgactgtacatcattcgcatgcatccatgcttttcattggttgcattgctcattgcattctttccttgaaaaataaaataaaataaaatgaacttatc

SEQ ID NO: 119347 - DNA, 456 bp, Glycine max
taaatactcagctttctactgggtccattcaagctataagatctcgagtttctgtatattgaacaacaaaagctctcgagaagttcatatggtcataacttttacatggaggtcagattctggcaaataatatgtcgcgatgctcggagttgaaccacggaagctctcgagaaattcaaatggttataacttatcaaacggatgtccgattaaggtgcatcacatatagagacggtcgaaaatgaacaacggatgctctcgagaaattcaaagggtcataacatttcacactgaggtccgattcaggcttagaatatatcgaggcactcgacattgaacaacggaagctctaagatattctcatgtcataacttttacacggtagtcatactcggcccttaattgtcgagatgctcgaattaaccacggagctctcgagaattcaacggtcatact

SEQ ID NO: 119348 - DNA, 286 bp, Glycine max
actaatatacacactcccctccccttttttttgctgattcttttttcgcaacgttacggaattttacgatttccgtaacgatacttgtcttccttcccgaatgttacagaaccttatggattacgtaatcatcccttttttggctttcggaatgttacggaacctcacagattgtgtaacaatgcttccttttgatttccggcatggtacggaacttcacggatcgtgcaacaacgctctcttttgacttttggcacgttatgaaacttcacgtatagtgcacaat

SEQ ID NO: 119349 - DNA, 444 bp, Glycine max
  unsure (1)..(444): unsure at all n locations
tcttntggaccttgagcaagcagctgactcctctttcaatatcatgttatgcgctcgagactggactctctcttcccttcgaagcttgagctcactgttgctgccccatatagctccacgaaatctgtcacggacatgctcttccttgcgagccctctcggtttcttgttgaagggcttttgcgttagctgcattttcttcttgtaacccgacacactcttttccgacgtctgtatcgaccaactctaatttttctttggcgagacttgctattcctagttctgtatgtagagctcggacttcttcatcctcttctagagcttcgaagctttctttgtcaataatctttaactcggagagccaatctaaccctcgtgtacgaactttcagccattcatgataaccacctatgatgccattacgaatgcccctatattctttatc

SEQ ID NO: 119350 - DNA, 411 bp, Glycine max
  unsure (1)..(411): unsure at all n locations
agctnttataagctctgctgtggccatatctttatttgttgtggaatctcaacgcatcccctcactcctagattggacaaatggaatgtggagattggagaactgaatttttttattgcactaggagaactgctaggtcagttttgacacaaacaccggacacggcaccgctaatgtccaatatatatataaattcacattctagaaacaaagttgttaagcctaacaatttttatataataacgaccctgatggatagaatactaataaacatttcttaatagttaaaaaaatgctatgagccttgcaatatttataatataatttgtttttttttttgtgatgggattgtttgggaagtctttatccaagaataagtgctggctcagtctcttgacttatgctcaaact

SEQ ID NO: 119351 - DNA, 356 bp, Glycine max
  unsure (1)..(356): unsure at all n locations
ctgttcttccttttgaatttactttcanggaacgtcaaatgcatctgaacatattatggacgaggatttttctcctgtagacgtggatgtaaatntagtaaaaagcttactcgattccttttcttcccagcaagggcttcctggtccggcttccaatttgcttggcctcatgggggtgcaattgccacaagatggcaagaagggcaaatgaagatactgaaatatttttccaggtttttgatgttttgggattctccaacggtatagtctctggatggcatgtttcctagcttggttaccgatatcctttatccacattgtgtaggcacctgcttaacagagggcatatgtgaata

SEQ ID NO: 119352 - DNA, 455 bp, Glycine max
  unsure (1)..(455): unsure at all n locations
agcttggaattgcatttgggcacctatttttaatctcctatgctgnacctacatataagaaacagtcccactctcccaatnttacaaaatcatattcatacatcattggggcatttcaccgagcacttggtgagcgcatgtttggacataaattgcaagaggatggggacaatgtggcatgccccattgcttcagaatacagcatatgcctaaggccttctcattcaaatcctcaactcaagaaaacaagcataaaacaaaaccaaaactgccccacaaatataagcacattctcacaatttggagcaccaaaagatgaagaaaatataccaatgggaagctaaaaacatcaaggattgaatacttacttgtgggagtgaataataacaccaaaaatgaaagcaaaatgcaaccaatagtggcttgagggagcaagaaccgcaagcctttgtgag

SEQ ID NO: 119353 - DNA, 374 bp, Glycine max
aacgcgaacaatgaccattgtgcttgcttctcgcgatgctactaatcatgactgcctgacagggctaatagcctaaaccatacatcccacgattaccttgcgtatttactagaccagctatgccgccgatggtaactcctaaaaccaacccgggctcataaccgatgcccaacataactcgggccatcaataccgatgcatcggacagactaagctgcccaaagaaggagcccacggaggaaatgctgaccacctcaacagaccggaaagcagtttctaacgattctgctgcgcgctcacacataacgcatggaggacgggcagcttaccaagatactctcctcgcctgacacgatgaccacaagcccctctac

SEQ ID NO: 119354 - DNA, 348 bp, Glycine max
  unsure (1)..(348): unsure at all n locations
gcagcagcaactgaagcgcggttatattttttttttaaagcgcggggcgggggcaaaattgatgcccctacaaaatgttatgcaggggtataccaccaactgcttgcccttgatggcattaacgaggcaaggctccaagtcggctagattgtggaggggaacttcatgtgtctcccccatggattgagagacatgtgcatgatcaaattgatgttgctgcntctcaatgagtatgggagtggagttattgacattctcactaagagtgtaccccacattgagtggtgataattgggatgcatgccatatggcaatgccataccctatattcgtacgaggacacttgcg

SEQ ID NO: 119355 - DNA, 237 bp, Glycine max
agggacgaatgaggtgcaagtgaaacgggacttgcagtaaaattgcgggaccggtgagtcctgctctggaagcggacttaatgccaaatactgaaggggacgagctcttgacagctgagtcccctgattacacaccttaaggacccaggacgactcacgaaagctcaaccagaaattctacaggtgccttcagcttcacaatgacctgaaacgacttcgaagaatacgaccccaaga

SEQ ID NO: 119356 - DNA, 402 bp, Glycine max
  unsure (1)..(402): unsure at all n locations
tcatctctttatgattgattaanaattattagaaatcatattatttggtgaatttcacttctaaatcaagagagagagagagagaagggagagttattcaatgagaagtatgatctaccaaattgataatttctaataaatttcaaccaatatagagagagtgttagagaaagtatcactagcattcctccaatagccaatctatctctgcaatatgcgacaatgttggcttctctcatcttgatttccaataaaattcaacacactttttaatcaaaaaaattattcattaatttcttaactaatacacataacactagttaataaactagcatgaggtctcgagttcaagtcatgcagttgcattaaacactangaaggagaagctttgtgctcatagtg

SEQ ID NO: 119357 - DNA, 397 bp, Glycine max
  unsure (1)..(397): unsure at all n locations
agcttgtgatctaattaattttatgcaaatgtgtgcttatcttcaattactagagcagttacacacatatgaagaccttgtctctttgagtgaaagaatagtagtttcatgaatctaaaccctccattctccaaaatcattagtttcaacaatataacaagtagtttcatgaatcttcacctatctctgtcaccattntgaaaattaagaaaatataagtacttgttccctcatagtcactctgttggtaacaaacaatatatcaccttctaagttctagatgcctgataagagaaatagcaaacgatttaattctttaatttcagcttctagttgccttaatttcaacttttacgagaattcttactcttaaattctttcttctatcttcaaaata

SEQ ID NO: 119358 - DNA, 342 bp, Glycine max
  unsure (1)..(342): unsure at all n locations
ntaggttggacatgggaggagacaaaatcagtgaatatttttattggggatggtcacacaactgaaactagtggcatgtgtaaagaaattcaaattaagacaaagtcagggaagttcacactcgatgttgttttgttcaattgggaagatattgatgttattctgggtatgtcttggctgaaaactctaagggtaatgacggtggatcggaatagccaaataatgaagtttgatactgatctggggacgagaaccttgataggtgtcaatcaagaggagccattgactgccactctgtgtggggtacttgattaatgactagaactgaatgataatgggctg

SEQ ID NO: 119359 - DNA, 385 bp, Glycine max
actagagcagtgacacacatatgaagaccttgtctctttgagtgagagaatacgagtttcatgaatctaaaccctccattctccaaaatcattagtttcaacaatataacaagtagtttgatgaatcttcacctatctttgtgaccatattgaaaatcaagaaaatataagggcttgttccctcatagtcactctgtcgcgaacaaacaatatatcaccttctaagtgctagatgcctgatgagagaaatagcaaacgatttaactctttaatgtcagcttctagttgccttactttcaacctttaggagaattcttactcttagattctttctcctatcttcaacatactaaaccacagaagatatagagtagacacacacaca

SEQ ID NO: 119360 - DNA, 319 bp, Glycine max
ggaggagacagaagcaaagaagattctgttttttgatggtcacacaacagaaactagtggtatgtgtaaagaaattaaaattaagacaaagtcagggaagtgcacactcgatgttgcgtcgttcaatttggaagatattgatgtaattctggagatgtactggctgaaaactctaggggtaatgacggcggatcggaatagccaaataatgaagcgtgaaacacaaccgaggacgagaaccctgacaggagccatcaagaggagcctgagctggccactcagtgaggggacccgataaagacaacaacacaatgataat

SEQ ID NO: 119361 - DNA, 371 bp, Glycine max
  unsure (1)..(371): unsure at all n locations
acctcagagtcacctgcggcatgcaagcttcttgaaggttgcgcttagcagcacctatctcttattatatttcactaagtgttgggagcttagcgagtgaagctcgcttagctcagcggatgccacaaccaattgtgcttggctcatgaatgctcggcttatcgcgcgattatcaccaaaaaaaaaattggttaagttacctgggcttagcgattcaacctcgcttagccacaagtagttcagcaagaggatgagtgttcattctcaaaggatgaactcgcttagcgcggtaagcacgcttagcgagttcttcaaataatgcttacatacaatgagtattgatgaactcgcttantgcancctgcttgctt

SEQ ID NO: 119362 - DNA, 430 bp, Glycine max
  unsure (1)..(430): unsure at all n locations
ntctcgcttggggctaattataatcgagtgggttgaaattttgttatatgaaacagaagaaccaaaagccagtaacttcacaaagagagagcagagaaaattctatagtgcgttattactagtagtggaagaagaactgaaagcagaaagatcagtccaagtagaagtggcaccaccaccaccactccaatattgctcatttgtgttagggttattattgacccccaagaactgtctaggcaaaccaagttcctgatgatgatgatgacgattgtcttccattttcacagaagcaagctgagacataatgccagaagttgaaaccttaatgggagtgccaccatagccatcactgccactagcaccttcaaaagggtacaacccatgtgatgaagtagcttccaaaccagacaagaagggaaattggtga

SEQ ID NO: 119363 - DNA, 340 bp, Glycine max
aaacctttttgaacttatcttgattgagccctttcttgattcttaaatcctgagtcttgaatattgatcttgattcttcttgattcttgaattctgaaaacttgaaacttgaaacttctcttgaatctttctctagattcttgaatttcttgttgactaaatcttgaaatcattctcaagggctttttgtcatcatctttgttatcatctaaacaccttgaatcaatcttgattcattatcatgaagcaatgaagcttgtttctacacgtatcacaaacttttggtaaaaccaatatttaatcaatcacccttacacaaaaaccttttgttaaagtattt

SEQ ID NO: 119364 - DNA, 320 bp, Glycine max
tatcttacatgataatcgcatccttgtctccctgtatatgtctgaatgataatgtcatgaattgaaccctgaacttaaataattatctcctgataccttgtttagattctatgagagcatatggttcatgacaaaattactcttaatttgggggagactatttgaaaagaatgaaaagaaaaatgttaagcatcagctcacacaacaaataagttgtatgtttaactactaaaggatagaatagaataaactctgttgctacaataagggtcgaagcaacttgacaggaaaagatagtgagaaagctactggtctaatac

SEQ ID NO: 119365 - DNA, 396 bp, Glycine max
ccataaaactcagctggttaagacaattgcccaaatttggggagactttgtgtataaaatggtcaaaacagagcagcatatacacggttttttctatatatatatataaactggaagtacaaataaaggtgtttaagtgtgtgcgctgcaaatcaatgaaatgaagctaagtgcctaaaaagaggcaagtattggggtgggaatgaatgaaaagtaaaggtttatctattgatgaatgctctctattagtcatcttatatgactaacttttgtatagaaaacattttccaaaacttgtatagtttcccaatatatggttatttcataaaactttgtaaaatatcttgtttattgtaaagctttcttagaatattccattggattaaagatgaattt

SEQ ID NO: 119366 - DNA, 460 bp, Glycine max
  unsure (1)..(460): unsure at all n locations
ttaagtcaccgcagctgcagcttcagagagaatccctatcttcatatttacatcatcaccctccttttcaatggactctacagaggcattcttgttaacacagattatcattttgcaaatactgcttacaagcataagccatcgcttggaaacacaggcacatgcactcctgtcttccccagaaggcaaccatctaaagatctcaaagagacactcatctggcaaggcttcaacagaggttttcggctnttgctcaaaccattctccatcgaaaacgaatggagtgttgacacgcgatctctttcgaggaggaaagtatacatcaacttgagggccaagaggcaagataaaacttgctttcttggggatggcatatattgatcccatcgggcaaaattcgcaactctgagaacccaacatttcacaacgccgaaaacccaattcaccataacgtgctatt

SEQ ID NO: 119367 - DNA, 452 bp, Glycine max
  unsure (1)..(452): unsure at all n locations
tctaccagtttgagatagccaagaggttggagaaacagtttatacctctgatatagattgggaaattatcttctactagtatcgacaattaacacaacagtattatcaagaggctaaatggtgcacaaatttagaaagcaaaatcaaatagactaaagctttttaaatgattttgaaaaacccaaattcgccaattaaactcagataagaacctcaaatgaaaaactgctagttgcctaagaaaaataccaaagcatgggtcctaattaaacaaacagatagactaagtgtattagttttttcttcttcttaattttagcagttcactcacaattcacaaagcttattcgaaagcgggaagaganaaaagaaaatccataaaaaaactaaacccaagccgagaagcanagaagcaactcacggtttgcgaataatttnaaaaggagagtata

SEQ ID NO: 119368 - DNA, 428 bp, Glycine max
  unsure (1)..(428): unsure at all n locations
agcttgcctcanagaggtccaggaatgacatgtcggccgaaggaactagttccgccccggagtacgacagtcaccgctttatgagcgttgtacaccagcagcgcttcgaagccatcaagggatggtcgtttctccgggagcgacgcgtccagctcagggacgacgagtatactgattttcaggaggaaatanggcgccggcggtgggcaccactggttactcctatggccaagtttgatccagaaatagtccttgaattttatgccaatgcttggccaacagaggagggcgtgcgtgacatgagatcctgggttaggggtcagtggatcccgttcgatgccgacgctatcagccagctcctgngatatccgatggtgttggaagagggccaggaatgcgagtatggccagaggaggaaccggtctgat

SEQ ID NO: 119369 - DNA, 451 bp, Glycine max
  unsure (1)..(451): unsure at all n locations
tcctcggggccatttcctgcgaaggcaaacatttggaatgttagttntaccagtgggatactattcttaaaacaaaaatgacatacaacctcctcccataaatacaaacatcaatgtaaatttagaggaagcttatgcgcatatttccttacaaacgttctcttgcacaagacattctattaaccaaaaaaatgcacccatatacaatcaaggcagcttcgttacctagattatttacacgtacttccaaggtgtatttgttacttacatcacacacctccttggctaaattcacatacatgcatactcaaagcattttggggtaccaaaaattgcacatgtgcacatcttggtatttctaatacctatacatacacaaacttcatgatgaatcttgactatctacacaataaggtgctacattntatgctcttttaaagttttgctacta

SEQ ID NO: 119370 - DNA, 418 bp, Glycine max
  unsure (1)..(418): unsure at all n locations
taaaactaagcttgcagtatgtgcgtggttccgaattgtgtgtgactaacttttattaagtatgatgtgaaggcgacaagtttgaaaaagaattgaaagatgagatatgatatgaaatacctgacgcaattatatctactaaactgcttgaaaagctacacgcatattcactcaaaagtcgtggtggatgcctctgcctctgtgatctccttatatgtttagtgccatatctggagcaataggattcacgacaggttcaaaatcacagattccaacttctacgggttttgtatggatggtggcaggtgatgtgggttctattgtacgagtggatggaggcgtatgttgatgaatangtagtgaaatggctatttggcgatgtaaagtggatggtgtggaatgataagtctaagttgac

SEQ ID NO: 119371 - DNA, 449 bp, Glycine max
  unsure (1)..(449): unsure at all n locations
agcttcgacaagtcaatcacttgtatcattttataattccaacctaactttcctcanaatcttgaatttgtcatcaagtacatgtaattccagtttaactttaataagtacatacaaaatttattcataaattcattaatcaatacttaaattaaccacaatccaaaaatgctaaatcaagaatagatccaaattaactttaaaaagtttcattaattgaagacaaccctagtcaacattcgaaataccaaaaagtttaaaattaaaatattccacaaataactttccacgtttttcacaactctatatcctaatacattgttttccttacatcaaccaagttcccttcttttgtccaatctcaatcacaatttcatcaccttttgcttgccataatcataagcaaacttcttccatcctttgtcaatttaataaccttgtgatactca

SEQ ID NO: 119372 - DNA, 439 bp, Glycine max
  unsure (1)..(439): unsure at all n locations
tctaatttctatttctagaccaaaatccaattattaacttctataccattaatgagtttgctattatttgaccaaaggaatttctttgaattatccttattctttctagactttagcttaaaaacttaagagcttaaccatggttaggtatcccatggtaacatctcattntataccatttaaatagtctaaaaacactattcaatcacacaacaaagcaataaccttgtctaccacatacatatgaaaaattgggatgttacaattcatagttccagagatatacttctggaataggtatatattnttnagtaaaatctcacttagaaattaggacgggtgacacgaaacttataagacttttagagacgtctatcatatgcacatgtatgctagacgtatactcatcctagtcgtgctctatgatactatctgtacc

SEQ ID NO: 119373 - DNA, 266 bp, Glycine max
catattcatggacaagattctaaaggaaaaggaaaaggaagcaataaagatcctccagaagaagccaaatcaaatgatgaacttccaaaagaatggaaagcttcaaaagatcatccccttgacaacattattggtgatatctcaaaaggggcaacaactagacattctcttaaagatttatgcaataatatggctctggtgtctatgatcgaacctataaatataaatgaagccataatagatgaacattgaatagttgctatgca

SEQ ID NO: 119374 - DNA, 406 bp, Glycine max
  unsure (1)..(406): unsure at all n locations
taatttttctttccatngagaacaagggataactgaaaacaataaggatgaaacttagatacagctccttagttgcttttcttcaatcacaattggagtttcaactgagcaatttatggtgactctaatgcagatgtttattacgtagattatggcggtgaaacttccattctaattgcagaaaagcaccaaaagaacctaaggaactgtatataagttctgaccaaacaataaactcatagcaatgcacagaagtaacaagaagtttcccttttttctcttcagaaaaaggatattaattttctccttccaatgtccaaataatggcattatggcactacaaatgctagatttccacaacaaattttctttctaagaggtcatactggacgaaaaaagattcatt

SEQ ID NO: 119375 - DNA, 420 bp, Glycine max
  unsure (1)..(420): unsure at all n locations
tggaaaaagtttccatgttaggaaaaaacttgttcttgccttcacgtggacactaggaatgtagttcactttnttgcaaaattttaaggaaggcatgatggagtattctgtcttgaatggatatcaagtcagtttcccaaaaaatgaccatacaaggggttgtgtgtaagacaaaggagtgttcattcacaacatatgtatctagggttggtgagaccactacctttcaattgaaaacactaaaatcgacccacacacgtgccagagttttttaggataaaaatgtcagtccaaagtgggttgcaaaggtgctacttgacaagttcaaaacatctgaaaaggttcacaatatgaaagcatgcatttagtacttactccaagtgtgatgttgtcatgaacaacatgtgtgagtattttaat

SEQ ID NO: 119376 - DNA, 281 bp, Glycine max
cctttgccacctgaggctctaatatatgcttctggacttctggctttcttgtgaatggctttctaccttttgcgatctattactactcgtgcacttctttcttccacttgatcataaaagtgcagtttcctgccaatatgttggctcatctaactgaaatgactgccttcaagacacccataggaacttctatgggcttgtggcagccttatgccaaaacatattacctgtctctaatttctgttgctgacaactttttaaatctttgactcctgtagaat

SEQ ID NO: 119377 - DNA, 56 bp, Glycine max
cgtcgtcaacgtggcagaaaccggaagaaaaacaagaagtgccagcccttttaatt

SEQ ID NO: 119378 - DNA, 180 bp, Glycine max
gacttaatactattacaatgcctcccgagcaatgctattccgaaatatttcggccgtaactgaacatgtaacaatcctatgggaaagaaaataaaaagtgctaccacacaaacttgtgttaaacaaggaagacatataatctgtgtctaaagtcaagcactggagaaaatttggaactct

SEQ ID NO: 119379 - DNA, 161 bp, Glycine max
  unsure (1)..(161): unsure at all n locations
ccacattctgtagatgtgtacccattacaaaaatgtatcctggtacatactctaccatgtacagagtatgtctctangtactctaccgaaccctacagtctaatagctctcatatatgtactctatgcaatctgtacagtatcttttaaacactttttcct

SEQ ID NO: 119380 - DNA, 323 bp, Glycine max
tagttcacatataccaggggtcatgaatcttgcttctctgcgccgtttggaaataagaaatataagactgttcctctatacttgtggacaacattatccctctagtctaagctgtagagaatgaacaatattttaatcgctcagtgctattcagttagaaggtcttaatctttcctctcaatctaccaaagaaagatgccccctcgtccctgtgaggtgctctttttttctgcatgttacagagcgggccttgggaacacccggaaaattttttgcaaaaaactaactttgggttgggtcttcggggaatttgggggttttac

SEQ ID NO: 119381 - DNA, 262 bp, Glycine max
cctctactttggtattctaggctctgattactgttctgaatagaaggaggcctcttgatactaggactcccaatctgtaactaagactttggaaaaaaagggaggagattgttctagacatgtcttctttccctttctttcatctctttttttatttttctttactcttctccctttttcccttttccctatcttttttctccgtcttaatctcttatttttcttcctcctttccccttttttttcattctcctttctattt

SEQ ID NO: 119382 - DNA, 227 bp, Glycine max
tgatgttgccattattcttcgccacttaaactcccttcattcatattatctatggattacaccttgacctgttgctatgcaagtggaagtgatccatgtaaatcaaagcaggccttataatctcctaaaacactaacaacaactgcccaatttcctttcattgactcaaatagaattcatgactaaaccagttatctctgtgagatatcccaagaacaaggccaatg

SEQ ID NO: 119383 - DNA, 306 bp, Glycine max
gccttatgtctccctccttcaactgactcatgtgtgcccataactcacgaattgcacggcatctcttctgcagcctctggttttgtgaagctttggtacacatttcttttgacccaccacctttaacgctgacgacactgaattaatggcagctgttactactcgttttaatcgactctatctcttaagccaactttttgaatatcttactgaaacaatcaccccgggcaactttccttataaacacatagctgatatgcctaacttatttctaccgctctcctatgctgtgtatctaacttcccc

SEQ ID NO: 119384 - DNA, 357 bp, Glycine max
  unsure (1)..(357): unsure at all n locations
tgcagctaagttgccgatcttcatctgtagagttgtgaagattgcgncataatgcatccttgatatagggtgaccagctctgcttacaanaggtctcagtcagtgaatatgagtaccgctgcaaatgggcaaaataatcagccatactgctcgcactgcaactattagatatgagtctgtcttcagtcactgcaaatgctgccttaaacaattacacccttctgtaatcaaatcatgctatcctctctgctatgtgtgtatgtctctgaaaaaaaagattaaaagcctcgctcactctcaatgacaggcaaaagcaggctaaacgctaccaacaaaagcgggttcccttagacttcc

SEQ ID NO: 119385 - DNA, 262 bp, Glycine max
  unsure (1)..(262): unsure at all n locations
gcttatctgngccattagctataatctcaacctgaatgacacaaacttcaaataaggctactttcatgagtcgatctgcaataatgtccatctcgataacccgaactctcaaaatcaatggtatacttatcaacgtgtcgataanggcatcacattaagaggtcgatataacacggtgctctcaaaattaaggcatactttacactagtcattcagctaaatttgagcctcaaatgacaacgactctaaaattaatggctac

SEQ ID NO: 119386 - DNA, 259 bp, Glycine max
cttagtctgcgtgcactcctttgttccttctctagggctcgtataattggctggttgtatctgatcttttctcaacactgatttaaatatgatgttgctgccagcacctgcacgatagtgattgttcattagttgccttattttcgcgcttgcatgtcaccttgtttgtctgctaaggactcaatcttgttcgcctaaatacctaatttgttctgcgccacagatggcggcctttcgctgaaatgcacttggctgaaac

SEQ ID NO: 119387 - DNA, 241 bp, Glycine max
  unsure (1)..(241): unsure at all n locations
cttttcaactcgatatgggcttaacactgaaaatctcatacanattatgcaataaaaatcttatcttagaagaacacaatgaatctgaatttatcttaccgatttgatattatcatctacctgtaccaagtttgcaacttgcctagcttggacttacttgctgaaatatttgccttatagcttanattntgtaacanactaaatttggactctttaatccgatccaatcatgatctaatct

SEQ ID NO: 119388 - DNA, 152 bp, Glycine max
catctctatcacatacataacccctcgtgtgcactcactactactctcacgtcctatctgtcttcacacggccttatctccacttccactcagtatccatcatatatggctcaacaacaacaggaagcaaacttgcaaaaactaaatcagtt

SEQ ID NO: 119389 - DNA, 296 bp, Glycine max
tcatactgatagggactcgatctgaatttaacttgcttaatgtatagatgtgttactaagaacaataatgtggaacctctcacttcttgatgacacggatacaagctctgtgtccctaaaaagactctaatttctccctggtggaatgctagctaaggacttacttactattttctgcctaaatagtgtgctaatgctcttatttctcaaagtgttgctgctgttactctgtcaaatgtcagaccatgacctatgagggtgatctgaaagactgtgagtactctcttatttcttgt

SEQ ID NO: 119390 - DNA, 154 bp, Glycine max
agaagacttcctcctacctttgtcaaaaaataaaactctaaaaaaaaaattgtaattaacctgatcctttgttgtaaggtgggaaccaccaacaaaaaaccattaacaactgtgatgtaaaaaaaaaggccctgtgatagacgtctaacaaaac

SEQ ID NO: 119391 - DNA, 321 bp, Glycine max
atgtcataagaattctatgttaggctgttgactctaacaattttcgtatgtatttaattatagaaaaacaatctttattttctttttttatagcacatcttactctaacggggttactttgtttgttttttctaaatcaaagaccggaagggatttgtccaactagtattattggtgctcttaataaggtatatttacataaacagaattcagcatttttcacatatgcttgaacaacgttttaacaattatacattccattctctgattttgaaaataatattgagtggtcaacaaccttaaacctttaggatatttgac

SEQ ID NO: 119392 - DNA, 238 bp, Glycine max
  unsure (1)..(238): unsure at all n locations
atatcaactatgcagcttgcggtcaacatgaatggccttcccaatattacagggatgtcagtatcttcagagatatccattaccacaaagtctgtcgggaagaataaatgtntactctgaccaacacatcttcaattactccatatggcctggtaatggagtgatcaactaattgtaagtcattngagtgagcattatttccaactcttccaatcttttgcacatggagagtgacatc

SEQ ID NO: 119393 - DNA, 352 bp, Glycine max
  unsure (1)..(352): unsure at all n locations
agtgaatatgatcatgctggctgagaatgatggctctgaacttaatattacgatttattaacttatatatggatgataagactatgtagatgctgagaagctattccctttggatgatctcctttctaaacatactcatttttcctctattatgaatggtgatntcctctattcatatagttcactctctgctttcataactaatagttgtgtcctttgtggattgtatctatatatatgactgagaatgacgtttttgcatggacctatataaaaatcatactaccatttcagctccactataacgcctgattattaattcatgtgaagataactctgatacgattattat

SEQ ID NO: 119394 - DNA, 94 bp, Glycine max
agatgctatataagtgctaaccagggcccgtacaacgcttacaactgattatacttactaaacatttattttttaatcacatctaacttttcca

SEQ ID NO: 119395 - DNA, 224 bp, Glycine max
acatccttgtgacgcgtatcggttgttatatcaggtatactttttttgcagacaacctatatctaatatgtctgctgattttaagggaacattatcaactatacatcatctatgatataatcttgaataacattagcgttatgtttttatacatggtactcatcccatacctcagactatttaaaatttacttaaacaactactgctatataaaaaagaaaact

SEQ ID NO: 119396 - DNA, 197 bp, Glycine max
  unsure (1)..(197): unsure at all n locations
acatgtccttctctaaacgttcgtggactgtcaatatcggcagcagctataacctcaagtcccaggataaacagtctaacattgataagattccctgcactgaggacctttctagattacccctcttgttgactgaagagtactctagacccgcgaaatatactngtatgtactcttatttcaccgaaaagatgact

SEQ ID NO: 119397 - DNA, 61 bp, Glycine max
ttcaatgtgagatctactcggaagactattgaacctttaccattctatctagtgctgtcta

SEQ ID NO: 119398 - DNA, 124 bp, Glycine max
tcacagccgcataaccacatcctgtgccactcaatgactacgtctccactagccaatctcgtcttaacacggtccataatctccagcttccacatcaatatacaacatcaacacacaatatata

SEQ ID NO: 119399 - DNA, 284 bp, Glycine max
ttgatagattctatcctgttgtgaaagtatactctattgtattggataataatatttttatttatttatatacttattggaggcagttattttgtctgtatatattaacttgagtagttattttatataacatgtctatcgtagatattgagtagtactgagactaattggctggattacgaatattggctaacttgggagtgatatgaaaccacggttccttaaatttgtaggtaaggatggtgtgggacaagttatttccacgtccactgaaaagggggggg

SEQ ID NO: 119400 - DNA, 65 bp, Glycine max
ctaataactgattgtcaatctttactacttgttagtcatatagagacccaggtagttatactagt

SEQ ID NO: 119401 - DNA, 321 bp, Glycine max
gccagtttacttaggccatacgttttatgaataaatatatatatattgaggcctattataggcatcttttacttcattaaaagtggacatttgtggaataagggtcatttcttgtgctacctgcttataatcacattatagctactgggccagataacataaagaaaacgtatagtaactaaattaaactttaactattttattttatgataattcatatcggaattatcagaaccctttgtatggtggaaaaaaataaaaaagtttgagacattgtattgaggcatggaaatttggcaattaaaaaaataaatgaaaaat

SEQ ID NO: 119402 - DNA, 271 bp, Glycine max
tttattacatgctctaactcaataaagggatatcttatgcacaaacctaaagtgtatttaatgtcctccaagacgtgccaaactttttcacatccccagacatgtaacttaattcacacctccaggccttcaagtttatttcacgctcccaccaggaacatttttgattgggtgaaatttttgcctcaccccacccaataggatacccaggccataatatttaaaataacggtttttttttaaaatatgtaattcccattttgcccctccc

SEQ ID NO: 119403 - DNA, 368 bp, Glycine max
tcatgactatcttcatgcatgttaaatgcctatattatgttgataatacttaagtaacaagtctgcattgtattaattaacattattattggaacagttttatctattgaagattgcttataatggcctgcagataaaacaagaatttattctatcgcactatacactcacaacacaggaatgactttgatatccacaacagttgctttggactacatacaggaaatattttataattttaattatgactcaaaatatgtacttaattgcactacagtttttggacatgggtgatgctcatccctatgcataatattaatcatctgtactaactaacacctaagttagctttattctaccattaatca

SEQ ID NO: 119404 - DNA, 126 bp, Glycine max
gtgttcactgttaaacggattcgttattaaatgtctcggcctttcttcttcaaacctttcaaagataaaagcgcccaccgcgaatacttgggagttcaaggtttggagcccatggacccctaaagt

SEQ ID NO: 119405 - DNA, 100 bp, Glycine max
acttatattgaaacactgtgctctatccacatgcagctgcatttctgttcgcctgatgctaatactcttatgacgcacattataaacttagccttactga

SEQ ID NO: 119406 - DNA, 144 bp, Glycine max
cacgctaatgcttttgttatggtaggaatttaaagccaaatatgtacttgtcctttcaataaaacatatggcatgctatgttctcttaaaaacaaatgctatgccaccctatacttctataaaaaaaactataacctttacaaa

SEQ ID NO: 119407 - DNA, 126 bp, Glycine max
agacgctctcagaattgatgcaggtgtctccataactgtcactaatttgttaactgtatgtgaacttccagtggcgcctgtgtccacccctattccacgctgtcaattttatatcctgcttcaact

SEQ ID NO: 119408 - DNA, 104 bp, Glycine max
agttatgctctctttaacatgcagttattattctctactctacttacttcttataagcgatgagtgcaggtgcttaatcttctgcctgcctcatattaaaagac

SEQ ID NO: 119409 - DNA, 314 bp, Glycine max
ctagtttagcactgttcttttgatgagacaaattgaacctgtacttctttgctgatgtgctgtctggggcttgagagaggctctaatataaaggccctactgtaacctcatggatcaaaacacccatggcgttattgatcatacactttgtcatttgacaagcttttgaggtggcccaatgcaatttctgttaattagatttctgaagtgtttagaccctttggcaccccccagccctattcctttgactacattttctcctccccaccagatctcaccatattttccttctccctctagtattgtgccactcc

SEQ ID NO: 119410 - DNA, 232 bp, Glycine max
tttggacttgatcttgaaatacacttaattagactattgagataatttggctcttttccttcctcactactttcacctatgttttcattctatggggaactttttcttatttcctgaggctttcaaacttctcattcatcgtgctgattcatacaagaccttatagaatctgctcactcttaacttgatggataagcttcgcaggagcttgctcttcttgtgcatcttatct

SEQ ID NO: 119411 - DNA, 137 bp, Glycine max
atctctatctcatttgcatatgtattttctattcgtattaccactatactgctgttcatacaagaataatattaggtcgaaaaaaaaattctatgttttttttaaaaccttctaaaatcttttctaaatttcagcct

SEQ ID NO: 119412 - DNA, 321 bp, Glycine max
  unsure (1)..(321): unsure at all n locations
gctatctggacactgacancgacagtggtagcgagactggccgtgagtggtagcgagaatgacaccggagctcgcacagaaagataggacagagaggaagatgcataagtgcgagagctgaatgtngtgaaccgtgaatagaggagttgtgacggagaggatgatgtgagcgacacctgagctgcaacagagacaaagatacgcaagagagtgagtgaattatggtgtggagacaataatattntcaaaaatcaagttctttaacatcggtattcacaacaaaactgatattaacgaagtgatgttaacgttaacatcgat

SEQ ID NO: 119413 - DNA, 147 bp, Glycine max
tctctggcctctctcttgagcggctcacccctgataccacaacttaaaaactgagaaatccccaccctcaatacctttggcccctttcctggggaaaatcctaactctggtgggattaaaaccttttactatctaaaaaaccccttt

SEQ ID NO: 119414 - DNA, 424 bp, Glycine max
  unsure (1)..(424): unsure at all n locations
agaccataaactcagctgttctctgcaggcttgagctgcttatcatgcagtgcttgcagctcttacacatgngggaagtgaagtggtgatcgactcctatatctcggaattaaaaagaattttgccattttaccttaaaagtataaaacatatatattttcagcaactgccaagatatttgaaaaacaatattaatgccattattattataaaaaatatgatgggataaatcaataaatataattaaataacacatcattaaattaaataaactattatctaatatttatttcgctgatgatgttttagtaaataacttcaacatagggtgggcataaatattagcatactttatcagagacgataattaatgatagccgaaaaatgttattatatatacgatagatattatatatatgatgta

SEQ ID NO: 119415 - DNA, 286 bp, Glycine max
gctgcagcttttaatgacattatataccagtggttattaaaataattatttttattatgaaggatctctaattctgagtgatcaagacacctgctgttcaagacttacaccttgtgtgtgctcctgaaaggatttcttcttattacctgtcttaacaaatcaaatccttgcaatatttgctatcattccctaataggatttgcctatgattaaaaactcactgttgatactattgaccgactctttgctttttttgcaccctactcttactctttctttgcaacct

SEQ ID NO: 119416 - DNA, 156 bp, Glycine max
  unsure (1)..(156): unsure at all n locations
ttctcagaacttccgttgtcaatatcgagcttcctgacatattatgtgcccgaatcggatatccgtgtgagaagttatgaccatttgatattcgcgagagtnntccgatgtctaactatcgagcgtatcgatatattataagcctgaatcggacat

SEQ ID NO: 119417 - DNA, 83 bp, Glycine max
ttgagttgtctactatataattcaatgtgtatgagcttaaagtgcgacataatctgccggtggcttgagatcatgtgcttgct

SEQ ID NO: 119418 - DNA, 432 bp, Glycine max
  unsure (1)..(432): unsure at all n locations
actcctcatgcttctcaccatgtctaataagggtcgatttcttcgttctgtcacaccattctgatcccgagaaccaggcatagtgtatagtcaacaatcccatgatcttgaagacattctcanatgaacctggtgcttgtccatcctctgtgtatccaccatagtactcccacctctatctgatctacgacttatttgtttcacattgtttcactcagcctaaaacttaaggctctaagcttcttcttagatgaagagtgagatctattcggaatatcatctataggtataatatttgacatttgctcatgttgccaatagcggtgatgatctaaaatagaactccttgccctttaactcgagttgtacgttaagcactcacatctaaatcacaatccagactagactctcttactatcctgatttcataaa

SEQ ID NO: 119419 - DNA, 139 bp, Glycine max
tctggctgccatgaataacgttctgcgactagaaaaaaattttgatgtgatgtaactttcagtttgtcatgcatacgctaacctccattttgcaggaaagtatttctatttactcatagtgttcgacactcaggtggta

SEQ ID NO: 119420 - DNA, 119 bp, Glycine max
gattgttctttgcagcactttatacctatgcttaatagatatcttactcttcccgatcgttacttcacttaagctctttttataaactatttctttactagtacttcctctccacattt

SEQ ID NO: 119421 - DNA, 252 bp, Glycine max
aggcctaaactactgtcctgatgaacttcttttggaccaccacttggtaagacactttcccttgtgctgttcaacataattccctatcgacacgactctataactttaatttcgcttgctgctcttatctaaaagactctctagcaaatcaagagttggtaacctaaactcaaggacatatgggttacacttatgacaattacggggacagctccagttagtttctaacggcagcaagccaagtttacactt

SEQ ID NO: 119422 - DNA, 220 bp, Glycine max
ggtccctctggcccgtgaggcgatttactctcctcttttaaatttaatcaccttttttttagcatttttggggttgaaaaagatgccccgatctgacaacctttttaaacaacattctttaatgtgtgcttcattgtaagataattttctctcaaatttttatattagaaaattttgaaataattttggtacaaagagccaggaatatttcttttattaa

SEQ ID NO: 119423 - DNA, 306 bp, Glycine max
cctcccttaatttaccgaccgctcccgcactatgatttattattttgaaaacttcaagtggtgcatggaatttaaaattttttgaaaatcttaccaaaactagcatttgaattcaggatgacagtaacaaattaaacagttgaactgcgctcagagctttactttaccgccgggacacgacactgttacctttcccccctactgacaaaggttctaaatgacatccagacttttcttccgccaggcaccatggggtgctctaatactttatccgttggacaaaaacatcttgttacactaagacat

SEQ ID NO: 119424 - DNA, 136 bp, Glycine max
aaagaaggcactcccaactctatacacagttgtttgactagaaacattttctttttcagcattacgcaaatttctgaccgcacataccccaacatgtttctgaccccacggagaccttcacgaacgatcttcactg

SEQ ID NO: 119425 - DNA, 209 bp, Glycine max
gatctgttatgcatcgtgctgatgactgaatggtcacggtgaaattattcacaatattacaagtcgtgagcacatgaggagagacattattctcatcgaatagagcctaagcctacctgtatccttacaggaacgtccaagccacccctgaggcgcgaacattgtctcaacacccatctgagccctcaggagagaactcaatgtattgc

SEQ ID NO: 119426 - DNA, 52 bp, Glycine max
tgctgtcagcttctccctgtctactgtcttcgaatgctgtaaatactcgtgt

SEQ ID NO: 119427 - DNA, 341 bp, Glycine max
ctcagctttgagctcattctacttggctccttattcttatattctgctgtgtattaaaaacacaatagttctagctcttataaggactggattgagaatacaggaggaaactatccacagtcccacattttatggagatacaatatggctgcagtgatgtctttaacttgatttggagatgaaacttagtctgatcttatctcggctcaaaatccaaagaacaagtagtaatgcttttcgtcaattttcaatataccattccacatgatttaacattagtgaaactagtcatccatgccattaacactaaaatcatagtcctacacgtgtcatagagttga

SEQ ID NO: 119428 - DNA, 357 bp, Glycine max
  unsure (1)..(357): unsure at all n locations
ctcagctgagaccagccaacctattttctatgtcaaggccaaagtttcaatagggtgattagatattgaagagaaagatcaagagaagaacacanacgttgcaattcggaaagaacatacaaccttgccacacagtagtatgtccaaacagcatgtgcactccanagtccaaggataatagcagaaattccaatgacaataatggcaaatgcaattggacctatcagtgcacctgccagaaagagaccaccaccttgtcatgaatgtaaccagtaactctatttatcacattatatattagcagacagattctgctaagtctgagtatgaatattatatatctntcatgtgtctaag

SEQ ID NO: 119429 - DNA, 283 bp, Glycine max
tatattgttttgaatttgttttttgtatggatttgagttagggatattatatagtagttttctacgtgatataaatgagttatgaatagtggtattacggaagatgctcaaaaatgctgcatgtgggggtgggaacggtacattttaagtgtgtgtaatgtctgaaaagttgttaatgaaatataaatgaactatatattggtgtgacttaatatatagagtatataaaggaggtaattgtaaaaaaaaaaaggtggatttagaagtttttttaaaaaggaat

SEQ ID NO: 119430 - DNA, 136 bp, Glycine max
  unsure (1)..(136): unsure at all n locations
tatctctaacatccctccttcgtctggaccgaacatcatacatgtgctgctcagtgacacttctgactaatattacgcagtgctcggtcagagtgtatgattcagttncagcagtgaccatcctcatgttgatcat

SEQ ID NO: 119431 - DNA, 146 bp, Glycine max
gttgtgttacatcccttgacatccttttgaccatgtattgacctttatatcctggatccatcttcttttaggtcaaagacaaaccttatcattttgagactacatactgtctgaagtcatttttgaaccttatcttgaaaatatac

SEQ ID NO: 119432 - DNA, 430 bp, Glycine max
  unsure (1)..(430): unsure at all n locations
gtaccgttgatcgctcgaatttgtttgcactccaagaccttttcatgatcgaccgtgggactttgaaagatgctggagtgtctagaacttccgtcccgagagcatatttantaagcatttcagccttgtttcgtgtactacgaaaacgtctttttttcttatttttcacagccttataagttcagaacttctcatcccccagcaccttaccccacaacatcgtgtctcacacgaaagacccttcaccaagcgatcttcacttgctgcggtcggagagacaaacctatctaccttcgttcttcgagaaccatgttacctgttttgtagttcattgctttatcttctgcttgaaccgctgttgctatcttcttgaaacttgagaaaacttgaacgatcttctaatctgtattcgacccctgaccatccatgc

SEQ ID NO: 119433 - DNA, 160 bp, Glycine max
ggttaaaccttagacgatttaaccttcagtcagctttaaccttggacatccggttaaacgcttatctctcaaaaaactctcgcctttgtcaactaattgggaattaaatcttactacactgtagagtaatcacctgccccttttggtacaatcttaataa

SEQ ID NO: 119434 - DNA, 79 bp, Glycine max
cactggtgaccttcataaatattatatgtgtggccttttaagggattatgacttgcatacaaattttctgcgtatggcg

SEQ ID NO: 119435 - DNA, 128 bp, Glycine max
aactagcttggcatcaacaaatacttatttcgaggcgatgatccgattatcagagctcaattgaaacgagccatattatcaaagaaaaactttactcgatgtcataagaccgaatatatgaacactca

SEQ ID NO: 119436 - DNA, 150 bp, Glycine max
tgtgtgtaacgcctacctatagattaggggaacagtgactaaccgggggatcggattacaatctcaaagttgaagtccctcggtttgaagcgaaaccgggtaactattttgtggtggctcggcccttaaccggggggtttaaaaaaattt

SEQ ID NO: 119437 - DNA, 117 bp, Glycine max
cataaatcctctcggcactgcacttgtacgggatacactgatacgatattgtagaacgatgcctccgtctcttgtagtctcacaacaatacgccgtcaatgcttgcgatctgtattg

SEQ ID NO: 119438 - DNA, 130 bp, Glycine max
tgtgctatttagcctgacccttcatcactaaacttttccaagccttttttgctaggttctagcgaactgtgagcatgcttgtcctgcctaattacgattgacagttagttttttaattcggttcttttct

SEQ ID NO: 119439 - DNA, 109 bp, Glycine max
ttacagcacaaacaacaatgctatacttgtcaccatcaccaaatacagctttctacttaaagacccagtacaatccttcgatccattcgtaaccgtggatcgactcaaa

SEQ ID NO: 119440 - DNA, 201 bp, Glycine max
ctcttaacatacaaacatttggaactcctaggtccattgttttaaaactcttcacttcctgttagataaattgcccaacatcatgagagtaaaagaaggacaaaagtacgtttgcatagaaaatcattatcgactcttcccattactaaatttaatttactacccccatttttaattgacaatctttttttaaaaaaaagg

SEQ ID NO: 119441 - DNA, 128 bp, Glycine max
  unsure (1)..(128): unsure at all n locations
gacatagaagctgaagtgaggcaacccctgatccacctaatccacctctcatgaaatcccattattctgagcatatatagaagaanatgccaagaaacagaatcgtaggccttctcaaagtcactttg

SEQ ID NO: 119442 - DNA, 62 bp, Glycine max
  unsure (1)..(62): unsure at all n locations
ggctaattttacctgatttggtctganaggacgagtctcagtcacattttttattaccaata

SEQ ID NO: 119443 - DNA, 184 bp, Glycine max
tctgcattatagaaaatgtgactgataatttagtctatagatagtctgcacttaagtgtctctggcgggttaaatatcgtttatgaatttgaggcaattatccatctagtccctttttaacaacttattcctatttacaaatgaggatgctgtgatgtggaaacttctgtcacaatctttgctt

SEQ ID NO: 119444 - DNA, 447 bp, Glycine max
  unsure (1)..(447): unsure at all n locations
aactcagctacatgtgaacacagcattttacctacttgtaggaaattttcactactatatgtgtacactgggatgtatcatactattctctttctcttgtatactttgcttctgtaatactttgtctctacacgtgctaaactccatgcattgtgaactcactgattctcgtaantgtccattgtatataagttgataaatatactatacgttcctcncgcgaatagtacacgacgagagaacattatcgatggtaaatgaaaaaacggagatgcttttttcccttacattgacccctgaaatggactttgtttaaccctaaaattgctttgctcctgctatggatcgtgaagcgatcatttaattaattgttctggtatgtcaaactgctgacaccattgttagtgtctatcgaaatcaactgcttacaacttttttgattgaaat

SEQ ID NO: 119445 - DNA, 157 bp, Glycine max
gcccgtactaaggcgtactactccttatcataggtataatagttaacggtacgaccacttaacttcttactaaaataagcaattggatgaccttcttgcattataacagacgcattcccaacatctgaagcatcacactcaatttcaaaagaatttt

SEQ ID NO: 119446 - DNA, 53 bp, Glycine max
ctcgctgcggccttcagttggaccttctgttcatggcgctcttctgtctgtct

SEQ ID NO: 119447 - DNA, 156 bp, Glycine max
ggccttatctcagcttttgctaatggtgcagtgcagcggacctttctatccagcttacaaggtgcattgcacagatatctcgatttttatgacattatattttaccacaatagtatattagataaattccaacattattccatgaatcccaaatgc

SEQ ID NO: 119448 - DNA, 399 bp, Glycine max
  unsure (1)..(399): unsure at all n locations
tctgagtcacctgcggcatgcaagcttaagaaaanactctatataagagcatgagtctttatataaatatgacgagaaagaagaggaacccgcacaacatcaatgggagaactactcaacagtacaaaaacaacaagaaaatattctccaaatcaaaaaccttgctcatcaactgattatcaagaaaggaaggcaaggagaacatgaggataccttaagtgccattctctctttaatcaccagcatctttcttgaaaagatttggaatgtactctcaaactatatgaagctcatggaatttctaactaaaatgcgaaacttcaaggaagatgtgttctatgtgactttcatgccaccttgaaggtattaagctattcgctcagctaatgacattaaaaa

SEQ ID NO: 119449 - DNA, 370 bp, Glycine max
tcccgtcgtcatgaagtatgagcataaatgtgatttctatactcaataaaaataaagagaaaacaaattaagaattttgttttctagaactttaataagattatacatgtcagtttaaaaaaattatattatcattcaattataacttattatataagataaatgtgttattctctaaaatacttatattaaagtaatttaaataacggtttatcattaaatttaagaatgtataatagtgccgatattaattaaatatgataccgggaattaatattgtgaccgtttaatggcaccatactcctttttgaataggaacctatgaagtcgtcttatacatcgagactgtagactgtattggtctataatg

SEQ ID NO: 119450 - DNA, 414 bp, Glycine max
  unsure (1)..(414): unsure at all n locations
gaccatctctatatttgtgatagcaacaataccaaaagtattgcgatagctacagaactttgatanccgctgggttatgatagcattattatttttttaaaaaactagcactaattnctttatacgcctattatgtgtaaaatcgatatattccatcttcttattatgaatctgtttactcataaaaanttcaattaaaagtatattcttttaaaaatccctgatataaatttgccaaataccacaataacatgtttggtgtcaattacatatatatttcttattccgctgataaaaagcattttattccctcattcttaactcgaaataaccccctaanatgttcgatatttcattctccatcctaatttggagaaaaaggggctcaatacactcttgcctctcttcactttt

SEQ ID NO: 119451 - DNA, 486 bp, Glycine max
  unsure (1)..(486): unsure at all n locations
ctgcagcttcacaagtaatcacttgcacattctaaaattccaacctatctttcctcaaaancttgaatttgtcatcaaggacatgtaattccacgttaactttaataagtacctacaaaatttattcataaattcattaatcaatacttaaattaaccacaatccaaaaatgcctaatcaagaatagatccaaattaactttaaaaagtttcataatttgaagacaaccctagtcaacattcgaaataccaaaaagtttaaaattaaaatattccacaaataactttccacgtntttcacaactctatatcctaatacattggtttccttacatcaaccaagttcccttcttttgtcaatctcaatcacaatntcatcaccttttgcttgggcataatcataagcaaactttctccatcctttggcaattntaataacctggtgatactcatttctcaacacagaatatgtaggtacatttttagt

SEQ ID NO: 119452 - DNA, 279 bp, Glycine max
  unsure (1)..(279): unsure at all n locations
actaagcttctanttctatttctagaccataatccaattattaacatctagaccatttatgtagttgctatttattgaccaaaggatttccttgaattatccttattctttctagaccttaacttaaaaacttaagatgcttaccatggttttgtattccatggtaacatctcatttttattcatttaaatagtctataaacactattcattcacacatcaaaacattatccttgtctaccacatacatatgaaaaattgggatgttacaattcatagt

SEQ ID NO: 119453 - DNA, 179 bp, Glycine max
aagtcactgcagctgcagcttaaatgaacgaatggcgcagaggattatatgtctgatgaagacagaagagaagaaaagcaagaacgcgaataggtgtggactactacgtgcgcctcataattaaaatatcaacaaaggagaatttctgcccactcacataaatagctggacgcaccatt

SEQ ID NO: 119454 - DNA, 423 bp, Glycine max
tttaatctcagcttaggtggtcatgggacgacacacattactcggatgttctgttctctgatggtctcaccaccgaaactattggcatgtgtgacgatatgggaactaatacaaattcacgtacatacacactcgatggtgctcgttcaattggtgacatatacgagcgcatgctgattatatgattgacgttaatacgaccacgggtggtgacgagagattggaattgtcaatatgaagttgaaacagaactgaggacgagaacctggtgaatgagtaatcaagacgagcgctttgtggccactctgtgggggtctcgataaatacagaacagatgagaatgggctgtgcagtgagcaacattgagctcttgagatattctaccagtttgatatgtcttgtggacccaatggattacttctg

SEQ ID NO: 119455 - DNA, 261 bp, Glycine max
tatcacgtttttctattattatataacggattacaaattaggtggttagtgtgtgtgcccaatcaatgattgaactattgccttaaaatgcagtttggtggggattgatgatagtaaggttttcattgtgaatgctcttattaacaatttattgacaactttgtgtaaaaaatttccaaaacttgtatagttcccattatggtatttgtacatatgtgaattaatttgtttattgtaaacttatttaaaatttcattgatt

SEQ ID NO: 119456 - DNA, 308 bp, Glycine max
  unsure (1)..(308): unsure at all n locations
agctaggagatgcaatagtgctaacgtttcttgttttatttaatccatattgccgacaattaactgggggtcttgtctatatgatatttaagcttaatgagccaacctgctcctagtttggtcttngtgcaatgtgtaaaaagatatgcatggggattaataggaacgattcaacacctataggatatgaagagacctttggcgttttgctaaactactgagtcctgaatctgatgcaacgctaactctatgatccctactccaatatcaatgatctagagtcctcgacaatagagggtttttgcata

SEQ ID NO: 119457 - DNA, 391 bp, Glycine max
tactcagctatctacctatctatctccagatgtctgtgcgaagattgtatatatatatttcatgaagttctaactcaagatgtgttctttgttgcatgggcattatgcaatcactctatgtctagcattgattttattaatatgtccctacctttgatgtctactaaaaattatcctctctcaagcgacttatccctaaaactgatgcatataaaaccgtcgatgtatttctactaatgattaccctgtttcaagcgcctatccccttaagatgatgcaaggatgaagcatataatacatttgttggcattttatgccttccaagccctaactataggggtttagccttccattgcatgagagacttttaacttgatgggggtgaatggat

SEQ ID NO: 119458 - DNA, 359 bp, Glycine max
  unsure (1)..(359): unsure at all n locations
agcttaatgaatggagcactgaccgngtgcgactcttcctggactctactaggggcagggagccttggcaccgttaatcgctacactctactgttgccgcatacaaaagtgcatagaacaaggatgctctgttattcgcgcgattatcaccaatagttatattggaatagtggcctgagataaaataatcaagcgtctcttattctccatttgatgaacaagaggatgagagttctttctttatagatgaactcgcttagcgcggtaagctcgcttatcgggcttgaatacccctgcttatatacagcgacatgcgatgacagctctcagactgacatgctagcctactctgcctacca

SEQ ID NO: 119459 - DNA, 434 bp, Glycine max
  unsure (1)..(434): unsure at all n locations
gcaagcttgagatctaagtaaatatacgcagatgagtgtacatctttgatggctanagcacttacacacatgtgaagaccttgtctctntgagtgaaagaatagtagtatcatgaatctaaaccctccattctccacaatggttacgtcagcaatataacaagtagnttcatgaatcttcacctgtctctgtcaccattttgataattaagagaatatgtgtacttgttccctcatagccactctgttggagacatgcgatatatcaccttctatgttctagatgcctgatctgagaaattgccatcgatataattctctaatatcagcttcaagattgcttattctcaactattaggacgatgattactctaaaatctatgactatcttctaatactcctccattaagagttcagtagacgctccccttcagt

SEQ ID NO: 119460 - DNA, 273 bp, Glycine max
  unsure (1)..(273): unsure at all n locations
gaaggaggaaaaaaggttttttttttgaaaaaaaaaaaagganatataaaaaaaaaaaaaaaagaatgaaaaagaagtagacaatagaaaatggaaggaggaataaaagagaaagaaagaagaagaaggagaagaagaaaaagagaagaagaggaaagagaaggagaaaaagagaaaaggagaaaaaggaagaggagggaaaaaaagagaaagaagaagaaaaaaagaaggaagaggaaaatgaaaaagaaaaaagaagagaagaaaaagaag

SEQ ID NO: 119461 - DNA, 398 bp, Glycine max
taagctcatctcttatgatgattaaaatattagaaatacaaattttttgagatttcttctaatcaagagaagagagagataaggagagtcatcaatgaaacttgatctaccaattgatatttctatccatctcaccaatatagaagagtgctgagaaagttccctagcattctccaatatccaatcttctctgaatatgcgcaatgttggctctctcatctgtttgcaataaatttacacccctttgatcaaaaatattcttgatttctaactatcacatacactgtttatatctacttgagtctcagtcactctgcgtgctgtacacagatgaagcttgcgctatcgacctcctgccaatagatgtttacaacatccttggtttaataaagtttaac

SEQ ID NO: 119462 - DNA, 294 bp, Glycine max
  unsure (1)..(294): unsure at all n locations
gcaaaaatgacgcccctccaaagtgttttgcaggggtataccaccaactgcttgcccttcagtggcattttcgaggcaaggctcgaaatcggctagattgtggtggggaatttcatgtgtctcccccatggattgagagacatgtgcatgatcagattgagggtgttggctctccatgagtatgggagtggagttattgacattctcactangagtgtacgccacattgagtggttgtatagtgggaggcaggccatatggcaatgccataccctaatttcgtccgaggacact

SEQ ID NO: 119463 - DNA, 386 bp, Glycine max
  unsure (1)..(386): unsure at all n locations
tataatcgcggatgagtatgctcaattatatgccgcaatagatgcttgatgataggtgatcgactctttacaccataaggcaacccatgtggatggatacggttgctctaaccttgtacgggagtcaagaactctcactattgtttccaatgccatggcgattgcatacacctactctgtccccaagagattcatgggcttctcggctattgtcagcatatgatagacttaatggcccacataattagaaatcgttatgaaacatgtgtgggtcttacaccatgactgaatacgacttcctctttgaatantttaagttggcccatgtttctactgcaaaagctcgtgcaatatatcactcctacattcatctcaccatgcatttc

SEQ ID NO: 119464 - DNA, 477 bp, Glycine max
  unsure (1)..(477): unsure at all n locations
agcttcttggattaaataaaacttgactagatcaagatcctactagctgagactaataaattcaaggtaaccaacaagcctatgcagaaactagtatcagtctcaatgaaaaattttccagcttcgtctagtatctccaaggtttttcctcacaaaaactctcacacagaggtagtcatacatgacatgggaccaatagggaaaactacacatggtatggtacatgtccaaaggaatcaatatagccttatttagtgtagttatcaaaatttgagcaaactaaagtcacggttagctgtagttaagttgggctccatgatctcctangtcgaatttgcatgtatcctccacccgaggaacgagaaaggaatacttgcaaaaggaactctaacgctcaagtaagtatgtgagtgagttgagaatgaaatgaaaagtaaaggtanaacttgatatttataacattggatggcggtcatg

SEQ ID NO: 119465 - DNA, 394 bp, Glycine max
  unsure (1)..(394): unsure at all n locations
tgggaggcaagggactaaaaactgtacttataagtatgaactggtgaatgccaaactgacgtatctcattgaaggaccatataattttgtgtccttcctttattggttttaccagaacaaagggttggaaatttgttttaaaatcttatatctggttttgtttaactacaattttttctaatggcggataaagttgatcatatcttctttattgtttaaagtttaactgcattatacgataatgacataatggaacttgttatatcgttgaattgaagccttttgagaccatatactttgggtcacctgatagttcttttggtgcaccatataaatagtttcttcaatgtcaccatttatatacacaatcgngacatccatctgatgtaactct

SEQ ID NO: 119466 - DNA, 175 bp, Glycine max
caaccaccgcgctgcactgaatgattggccctattaactcttctgtcctctaaaaaacagcacttccatttacatatctgcatctcctggggattatcgaaatttggagccatgttgacttattgcaagatggacagtgtttcccatgttcaagctcagagctaagctttttatt

SEQ ID NO: 119467 - DNA, 86 bp, Glycine max
ctctgctgactgagcccgcgaatgtggtgggtggcttttttttttttgtccttaaaaacgtatcctaaacgatattttggctccgt

SEQ ID NO: 119468 - DNA, 455 bp, Glycine max
  unsure (1)..(455): unsure at all n locations
tgatgacaacccttgtatcgagaaatacatacacattctntttcctagtcgatcactcacttaattcttcatattctccccctttggtttgagtttaggcttcacttgaaattaagttattttattatatgagttcttgatctaatccctattttctctccccctttggcataaagaaaaagcccaaaagcataagaaatatataacatacataaattattataaagcctaataccaaatggtaacacatatcactagacatatatcatcaaaacaattaagtgtaaaactcataacaattaagagtaagtaaatataatcatggtcaattatactaatcacatattaaacgaaatactaagtattcaaatgtcataaatataaatcatttggttaagtcactagcatctatcagtcctaattctcttctagtggtgtagaagaatctttgtgta

SEQ ID NO: 119469 - DNA, 488 bp, Glycine max
attcattctttgtgttacgagcctacatcatattgttggattattgatgtttctgtcacaatcaagcgattattgatgtctccatatgggtgtacattgtggaagataagcttccaagcttattttgatgatgccaaagactcaagtcaagaatcaagattcaagcaagtttcaagaatcaaagagtcattcaatcaagaatcaagattcaagtgaaggttcaagagaagactcaagatatgcaagaacctcaagaatagcattaaaagaatttttcaatgaataatagcacaatctgttcaaaataatctttcaaagaaaaatcttgtacctgagtgtttactctctggtaatcgattaccagaatgctgtaatcgattaccattatgcccaatatagttttataactgatttacaaagtagtaatcgattaccatgggcatgtagttgattaccaatggtgttgaattgtgaatgtcaaatttcaa

SEQ ID NO: 119470 - DNA, 481 bp, Glycine max
  unsure (1)..(481): unsure at all n locations
gtcacctgcggcatgcaagcttcttagtctcgcctgatgaggatgaatttgttgtntacttcatgcactcatctaattgcaataacatcacttctggcactaaattgctgggagttggaagccatcttctcaattaaatctttggcttcagcaggggtcatgtctccaagggctccaccactggcaacatctatcatacttctctccatgttgctcagtccttcatanaaatattggaggagaagctgctcatatatctggtggtgagggcaactagcacataattttttaaatctctcccagtattcatataggctttctccactgagctgcctaatgcctgaaatatcctttctgatggtcgtggtcctggaagcagggaaaataatttctaagaatactctcttgaggtcatcccaactcgtgatggaccttggagcaaggtaatatagccagtcctttgccactccctctaaagaat

SEQ ID NO: 119471 - DNA, 447 bp, Glycine max
acactattaatctctgcttctccccaatgttctataatagggggagaagtgaagtatatattggttcatccacttacgcacttctttctctctcgaaatatctgatgaaaattatttccgtgaagaatattcaatccgaggcgcttgtgtaacgttttcgtatcgtttctgtgagtgatttcgcgaaagatattgaccgttcttcgaacgtcttcattcattcttcatcgttcttcattctccaccgggttagtacctcaaaccaatctgtttaattcattctatgttcccgtggagggccataattggtttcatgtattattattctcagtttcatgtacttgttattaccccatttgacgtgcttaagccattgatttaagacattttctcgctttatctaaaaattacataaatattcaccgatcgtttgaatcgttcatccgt

SEQ ID NO: 119472 - DNA, 448 bp, Glycine max
  unsure (1)..(448): unsure at all n locations
agctnggaggggttgatggngacccgatgctgattgtatctattataanggctacctacgagtgcgtgagctcacttgaaaggtgggcaactgcggatggtgtctttatgtctgatttgtggaagtgggagagttgatttgctccatctcccgatcgccacctagtaccacatatgacgggtgccccatactccaacaagcttgatgtaagaaagcgtggaagagacaatcttcctacttttgtttgctgatcacagagtggtacctgaagatatgttcgcggggtcaggagaccttggggacgtcaggtggtgtgctgatttccaaaaccaagcttgaccaatcccgacccaacccgggcataatcagttagtgagaacctgtgacgtacctaaacaggtgagctcctgacagttaaccaataaaagaacaaagttcacaaagcaag

SEQ ID NO: 119473 - DNA, 313 bp, Glycine max
tcattcatgacccgtgtgtgccacatggtgtttgtgtttcttattcttgctacatttaccttttatacccccttctgactagcttaagccattttacttatatccattcttgcttaacctaaaataataataaattccaccgatcgcttgattgaatatccgttaacttcgtgtaaaatgtaatccgactggacggtcgtgccataaccacgtttggtaatcaataagagacaaaaattagatacattggtatcatgaaaatttctcttagtaaaaagaagcgaaaaacaatcggacattgtctctttggaat

SEQ ID NO: 119474 - DNA, 461 bp, Glycine max
  unsure (1)..(461): unsure at all n locations
agctngtaggattatggggtatccatcaaatgttgtactatgtggcggtcggncgatggtgcaaaacaattctncatatccacaaattacgtataaacccaccatccgctgttgcccaccttcaactgagctcacgtacttccacgtaacccttatcctcgttctctaacaccgggtccccattcaatgcttccaagcttccacaacatccaggtaattccacatccaatcatcatggactcacaaaaccaagcaaaacagggcacaggcagaaaactctgcccacaacacaactcataatcacagcttttcacatacaaataccgcagtaacgtttccttcgttccaaattcgtaacccgtggatcgactcgacaattatactggcagtctctactacataagtctacatcttgaccgttgggatctgctagcaaatgttcagaaaccgatatgtactac

SEQ ID NO: 119475 - DNA, 460 bp, Glycine max
  unsure (1)..(460): unsure at all n locations
acctgcggcatgcaagctntntgaaaacaatctntgctataggtaatcgattacagtaaacttgttatccactaccaaagagtaaaaactctttggtaaaaggttttgtgaaaacttcatgtgctactcaatattttgaaaaacttctttgtacttatcttgattgagccttttcttgattcttgaatcttcaacttgattattcttgattcttgattcttgaaacataaatcttgaaactcgattcttgaatcctgaaatcaaatttcctcttgattcttgaagtatctcttgatttaatcttgaactcattctctggggcgttntgtcatcatctttggtatcatcaaaacatcttgaatcaatcttgattcaacatcatgaagcttgctttacaatctcccnctttttatgatgaaacagggacatgcagatatctcatactaggttcctaccctac

SEQ ID NO: 119476 - DNA, 442 bp, Glycine max
  unsure (1)..(442): unsure at all n locations
ctgcagctttcattattcttgacccgtagggttcctatgtgtttttgcattatatactcggtttgttactttttataccccctgttgacgtgcttaagccatntttcttaagtcatttctcgcttaacttaaaaataaaataaatttccaccgaacgtttgaattgtattatccattaacttcggttaaaataaattccgaccgttcggtcgtgccgtaaccacgttggaaatcaaaaagagggtaaaaataatataataatcacaaagacatctcttagtaaaataaagcggaatatcaagtggacggtttctctttgggattctcattcttaatcgaactggataataactaaagggaaactaaagggctaaatcaatttgcctaggtcagctcgtccatataacataggctttgaagtttgtcatttattctctcacta

SEQ ID NO: 119477 - DNA, 362 bp, Glycine max
tgaatggttcgttcagtctgaccatctgtttgatgatgataagctgaactaagcttcaactttgtccccaaggcttcatgtagactcgtccaaaatcgcgaagtgaacctctgatccctgtcagatacaatactataatgaattccatgcaaccttactacttccttgatgtacaactccacgagtttctccattctatactgcatattcactgggataaaatgagcagatttggtgagtcgatctactatgacccacacagcatcatgttcacgactagtcttgggtaaactagatacaaaatccatagatatgctctcccatttccattccggaatcttcaatggcttatatcttccgat

SEQ ID NO: 119478 - DNA, 460 bp, Glycine max
  unsure (1)..(460): unsure at all n locations
atgtttctntaacatattcaacaaacattagccatggtgaacatgcaatttcaaacttcttatggcaatcatcgaactgatgctcaatacgacaatcaaccaaactctctcatgcatccatgacatattcccattgcatttttgaccaattagagaattacactttgtcttgagattctggtngatatgaaacgtacacaacaagttagcacactcatggaatacaatttcactacattcatcaatgctaggtctctgtcggtcacaataagtccaaggagggcatcacgtcttagaaaaagacctcgaaaccattctagagcccataccacattattaacacgttcaccctccatatatgcaaaaccaacagagactgtcatccccgttggtgtgacaccaacaaattcaagtaacgggagttngtacctgtntgttttgtatgtactatctatcaaaa

SEQ ID NO: 119479 - DNA, 406 bp, Glycine max
  unsure (1)..(406): unsure at all n locations
agcttctctaactgtaggacactctacgccagtatctgttctatatttctatctacctacatgagactctagctataagcaacatcattctttattacgataatgtaccagagatggtggcacccaatataggtgtcgatactgccacaacatgcccttttgtgggcgagcgaggcaaggctcatgggcgcgcttttcaaaagtggaaagatgcgcggagatcccatccatgtttatttgtggaaaacgtcggaaggatcgaaggacaccggtcataaagaatattccaagctcgggagttgtatttacgcttgaggaaggtattagcacctctcacgtttgtctcaaaggacaacagccttatntttttttagaattgtggaaattgtgttaccttaactcttat

SEQ ID NO: 119480 - DNA, 465 bp, Glycine max
  unsure (1)..(465): unsure at all n locations
agctngtanagnncgagctcgtatcnaaataatcttttatattagcctcataaccagtcacactattgtttgataccatgactgctttattcaagagtctctgctttaatcgattaccaagtggataaatcgattacttctctctcaattagatgtgtcgaggtgaacaagaacactttaatcaattacttatagaatttaaatgattgcattgttcttgagtgattactatattgtgggaagaacactttaatcgataacttagataatctgatcgattgcttcatcgaactcctagattactttgtagatgtaatcgatgatccgcgggtgtaattgttttctctataaataaccaggttgtgttcactctcatacacacaatctgcacattcagagaatactctatatctcanacatatcatcttaccgctctaatgaccaagatctcgagctgctttagtg

SEQ ID NO: 119481 - DNA, 314 bp, Glycine max
  unsure (1)..(314): unsure at all n locations
ctgatcttcatacctatctcctgctctctcttccacatatcaactatgcatgctgcggtcaacatgaatggccttcccaatattacaaggatgtcagtatcttcagagatatccattaccacaatatctgtccggaagataaaatggtntactctgaccaacacatcttcattttctccatatggcctggttatggagtgtcaactaattgttagtcatgtgagtgagcattattccaaactctccaatctttgcacatggagagtgacatcaaattgatacttgatccactgtcaataataacttttcccaca

SEQ ID NO: 119482 - DNA, 465 bp, Glycine max
  unsure (1)..(465): unsure at all n locations
ctgcagctttaattcaaactgatgggtggctctttttatttcataatnaaaaccgcntcagatatgtagtcttgaatttgaatactatgctatcgtaaagnttgagttacatgcacttgcggccatctagtgatgtggcattacttaattatcaagtgaaagcttttaaaatcaaaggtgtttcccatgaagcacgaatcttcatctgagggtttggtgcaaatagtacctctctttggtccatacattttcacatttccaagaagagtttttcggaggatggtgtattaagtgatgatgagaatatctgccatcaagcaagagcttagagtctctggatcaaatgccaacaactcagaatatcgcttgtgggaaggtgccacctgtggctatcatcatctctcatcagaatcttggaggtgatgtaagttcaattttcagtacaccttacaaggcaatcatatg

SEQ ID NO: 119483 - DNA, 451 bp, Glycine max
cttgacacatttagtatgaataatttcttgtaacaagctaatatttattggataactctgataaaatagtttcaactcaatacatattgtatacatagcttaaaagtgaaaatgatcatgttggctgagaatgatggctctgaacttaatagtatgatctattaactgatagatggatgaaaagactatgtagatgctgagaactatttccctttggatgatctcctttctaaactgactcttatttcctctattatgaatgttgttgttcctctattcatttagttcattctttagcttcataattaatagttttgacctttgtggatttttctaatatatatgactgagaatgaatttttgcattgacctattaaatatcatactaccattttcgcttccactgtacgcactgattataatatcatgtgagtataatttgaagaagata

SEQ ID NO: 119484 - DNA, 424 bp, Glycine max
  unsure (1)..(424): unsure at all n locations
aaacacatcatcctcttacttatataccctntaattcggctgcttctaacccacaaatgtgagatttattcaccaacaatctcattccttcaatctctagcttaagcaaccaagcttcttttatttattatctggattcgtacctacttctcttttaaagtttcagaggtctcaaatctatttttttatttaactttttaagcttgacatatatatatatatatatatatatattgagccttctcttgcgcgtacgctcccgtatcttttcttcactattttgggcttcaaattttatcttagatatgttngaacattgaacccttgtttaaatgtgacaaagtgaatgtgttagcgagctttcaacttaagtggttcgtatgtcaaataaaattcattgaaactctgactaatgattatctac

SEQ ID NO: 119485 - DNA, 417 bp, Glycine max
  unsure (1)..(417): unsure at all n locations
cctcctattctaacggagaaggttaccactactgggaataccctatgcatattctcattgaggcaatatactctatcatttgggaagccactaaagttcgaccttatgtacccaccatggtggcttgttatgcgacattagaataacctatataagagtggactaccgatgaaagattattagtgctgtacaatttacaggctgtaaacatgattacttccaccctatgaatggatgattacgttangagttcacataagaagaatgataatgatatgtgggacactctacaagttacacatgatggaacatctgatgtagcacgatctatgatagatactgtaactcatgagtatgaattattgatgatgaagaacaatgtgagcctcaggatgtgaataagagaatcacacatat

SEQ ID NO: 119486 - DNA, 440 bp, Glycine max
agcttagaccaatgaattcaacatggtgtataatttattgagacaggcaacaaacaatacacaatatcatgaccaataccattggcaaatggcacaaatatggcttaagagcacacataagtaggccatatggtattggtagaaagaaagatgctaaataatcagagtctaatacaagacaattaacaagtttgtagattcaagcaaagacaccatatgctaaatcttgccttctgaaggatgctcaaatcctgaatctacgatggcttgaacaagctttggtgtcaacaacaacgactgaaatctagagctatggatgacaacataacccctgcaccactaaaaatatacatgcaatacgagaagatgtaaaatcaaaggttggcttgaaacctaatccacttattatccgaattatgagatagttgaatcaatacaca

SEQ ID NO: 119487 - DNA, 338 bp, Glycine max
cactctaagagagccttttgttgtttttattaacctcatcctctatatcactatgttataatgcttatgatcacattcatttgcttgtactcatggtcaaaacgagcaccttatgtctatatttttcgaatagaatctttcttatatacaggtaataaagtctctatgttagcgatttcctcttttgagaaatccctacattgatcttgcgtatttctctattgctgcctaggaatcctactgatctttatgacattaacatccaatgtgcttttccgattagatactctacaggctcaaactcattctctgatggtattatctcatactctggatca

SEQ ID NO: 119488 - DNA, 460 bp, Glycine max
agcttctcacagaagccacgaagaagcttctggtgtattcctcttaatgaagcgtctagagaaagctacaagaagctgtctctgtaaaaacgcttgccagccttcgttaaccggtggatcttctcgaactttcgtctgcagcttcacaagacaattgtgcacattctgaccgttgggatctctgagtagatgtctggagtgtgctcgatgcttccgttcccgagagcacttcttatgtaagcactctcagcctttgctttcgtgtagcttaggagaaatgccttttcttcttctttctttcttccaaagtcatttctaaagttccaagcactttctccatcacccacagccaccattagccaccacaaaccatcattggtctccattgaaaacgcacaccgagaggaacccttcaaccgaagcggaattttcaacttggcttgcggtctcgatagagaac

SEQ ID NO: 119489 - DNA, 423 bp, Glycine max
  unsure (1)..(423): unsure at all n locations
agcttcctataagaagtgtttgagagtctttatattatattgaagaacttattctttcctataattactttttcaggtgggatatgttgatgagtgacttggagtcggtacacacttatgatggacattngtggtgctgttatggaacatacaatcctaagtatctaacttggtaatcgatgcatgttgccatcttcaaaatnttaaggattatttgttggttatgataagaaaagaatatataggatacgctgataagagagcaaaataaatagtggaaaaatatacaagcataataagctcttatcaaataattaacgcacaatagataactcggtagatagtaatacaacaacaacaacgattgtgttatctcattggtgaggtcggccaggtgaaccacataatgaaattgagcttgat

SEQ ID NO: 119490 - DNA, 382 bp, Glycine max
actttatactaagctcattgttataagaagaatcatatggtgttatcattgttatggcaaaccaaaataattatggctgaatcgtggacaatgtcgctttctctaagacatttcttgtcactgccaaaagattgtgcatgcggacatttatccacgatattcccatgatataaacaggccagatcattgtatgagattccccctgcactgttggaaccttttctataatttcaccctctgtatgactcgatatgcactctatacctcccgatatatgacctgataggcactctatttgtaaccgataaaatgacttgaatagcactattttgcctactcaattataacttttattctctcttttaccatcagaaattatact

SEQ ID NO: 119491 - DNA, 479 bp, Glycine max
  unsure (1)..(479): unsure at all n locations
tgcagctaagcgttctttgatccataatagacctaatcttgtcaggtatcctcgccataaaattacatagacctgccaattctaaataaaaaatgttataaatccaaaaccatgccaatgctatgtaaagaatgactgtcaatttagaataaaaaataatgcctgacaaaaatagaacagcaacacagacttcaatgacacatgcaataacatttcaatcaatgacaaaataccattaaaactatgatactatcgtngaactactaagccaatacatgcaacaacctgaactaaaaaaaaccaaatcagctnatagcagagaagcaaaaacaaaaaatatatctctgaacaaataatattgcaccatcaacaaacagatagaaaggccgaaaacaaacacaacaaagttcagcttttggaaacagaataccacccatccttaaaccacacatgcataagatttcatcgatgccacatac

SEQ ID NO: 119492 - DNA, 402 bp, Glycine max
  unsure (1)..(402): unsure at all n locations
cctccattgatnctaagctttaccttctncttcattgttgattcttcacttttcttcatgtatctcctcacatgtcttgtgctgaatggtgttaacatgatcttttataatttccactaattaaacttgctatagaagctagatgtgatttttcatggttcacatttcttggtcttgttcttgaaccatgaattatgttgaagataggttcctttgagtcctgattgctatgttttttgtggctgaacattaaccataaattcttacaaaaacattaagtagaataaacctaaaaactataggacatgttcccttttgagatttgtcgatcactggcccaaataataaaagggggtgaataatattctaaccttactaataaaattactctctaggctttac

SEQ ID NO: 119493 - DNA, 459 bp, Glycine max
  unsure (1)..(459): unsure at all n locations
tactattatacatatgtcatccataaagcgctatatgaagccttcgntattctctgcaactgttaacaacgcaagggaatgcaaatatcaaagttatccaagttacatacataatatggttcactctgtcttgtaaatgatgtatttgaaacacgtaatgatggttaacattgtttcttatagtggttatgttaatagttaacctaaccatgtgcttctgcttgactggagtatttgatattgataagaaaaatgcattatccatatgttataatcattggaacatctttcaataaactattttagacgatcattcttttgatgattggtacatagttgtatgattcatactttatcggtaaatatgatattcaccatactgcatgtttatagcaaatatcgaacgtcataagttaggtgttgattaatataacatcgctaagatggtctcctgtatat

SEQ ID NO: 119494 - DNA, 408 bp, Glycine max
  unsure (1)..(408): unsure at all n locations
tttatctagcttgacattactgtccttattaactgtcttcggcttgctgtcacatcaactatgtctctgacacctactgtttgtgatttaccaacgctgtattggtattgtccattatccctcaaaccctattgatacattctgaaagttggttggatgtggcatattcacctccttcttatcataagcatcttccattttcctttgatatgcgatcatccattgtggtatgctggactaattgacaaaattttctaattttgatataaaaaaaatgctcgcaggagtgtcgccgattaattagttatgacacaatttaagttttatgaacttaattacgtgaccataaatatgnatctaacccatttcttcaatattcttttgtcgcatattggattgcattgaaat

SEQ ID NO: 119495 - DNA, 471 bp, Glycine max
  unsure (1)..(471): unsure at all n locations
agcttgagcatcgctttcgtcgcactcgttcttttttctactctgnggntcttctccttcaccaccatacctaggtatgtctcgcctccttcatgttgtcttctccttctcgctgtcttcttctccatctaagctttcttgctctctttgttgtccatttaccttgaatctgtctattctacatctgagaatcgctttgtctaagctcgagcatcgtgttcgtcgcactcaagcatcgtgacaactctgtgcttcttctccttcaccaccttacctaggtatgcttcgcctaatcctgtataaatatttgattgcattcatgtatcgcacacttagtgaacgaaacatggctagggtatctcatatttaactcgagcatcataattgctttgtattcattacaatgataacacacttaaggaataactggctctntacggctgttacttaatacatcattcattacttctc

SEQ ID NO: 119496 - DNA, 367 bp, Glycine max
  unsure (1)..(367): unsure at all n locations
agcttgngtttgcttatgcgacatgttataaacacctgtgattntccgttgtaatttcttaaagagagttccattcggagcactcttttttacgttccctatacagaactaaccctcttgtcacagaaaatgaataaataaaaatgcggcaccgccagaatcgcgttcgatgtgactatgatcattttcggtgagtactcgcctgatctaaaggctggtcttttgtgatgattgcccagcctcagagtattgatgacaccaccgttcataacagatcgggattactatgcataagtacttgctcatatcctcgccaaaacactttttaatgcctttggaattcatccagacttatattgcaattttt

SEQ ID NO: 119497 - DNA, 272 bp, Glycine max
  unsure (1)..(272): unsure at all n locations
aacttctgaattcgtcccgaacgataaactatcatctttaatgtacgtcaacaataattcaaacttaatgcgcttaactgaacactaaantacatagtcacaatgacatcggacacacagcttaaaaaattatattcccattactacacactttcatcccagacttgctgagggagcctaaagacctaaacatgtttttagcattgaaacaaccaatttatttggggataactaatgtttacctttcaaaaccttcattgacaaaatcgctc

SEQ ID NO: 119498 - DNA, 503 bp, Glycine max
  unsure (1)..(503): unsure at all n locations
agtcacctgcggcatgcaagcttgtatcatttcatcaagataattaanaacatatgttacctttatagaatgaaatttcaaattgaataaaacaataaaatataagaaaaaaactagtcaataaaagataaaatatgatgacaacgaanatattaaaggcaggtgagtcaaattataaaaaataggagataaaatgttaagaaatttcacattatttatctcgcaacttatatatttattagaaagttgattttaaatttaaatctaacataatattaaaacatatcttccatcttgattnttgtccattctaataagttcatctatttgacaagcatatgtgaagaaggatgttaagaactccctcatcacccacattaattntcaagattattttaaaannatatttgttatntntaattcttaaatatatttaataattttttctctacatnatttaacttaattattctctctagataagcaattaaataaataaaaaa

SEQ ID NO: 119499 - DNA, 484 bp, Glycine max
  unsure (1)..(484): unsure at all n locations
gacactatattactctgctgtgctctctgtacatccngaatgatttatttcatatgtattcttgtggataaaatcactnttgaatttaaattatgataaaatttcttcggttggttttattacttttgcaggaattgataaagttcttaatgatgcatggggggacaaagcacatggctgtaatagattcaattattgctgatacaatatctccaaggtctgagggatctcaatggtttagtacagaagatgcagaggatatatcatacttatatctagaggttatattttctctgagttcaattatattggagtctgtctttatgatttangagtaaagtaatatatagtggtttctctttctgtttgtttgtattcattagttatcttcttatgattcaactagttaatattagaataattataaccttgcgctttgtggtatgtactgttatctatgctatagtgatctgcctataaatat

SEQ ID NO: 119500 - DNA, 473 bp, Glycine max
  unsure (1)..(473): unsure at all n locations
agcttctcgaggtttaaagttaactgagcttgttttattatgcatcaacttaanaatgatgtgaatggtacaaatgctggctcgtcttccctctccagcatttcgtatctaaacttggcatcctgcaacttgaaaaactttcttggcttcttgagaaacttgtatgcaatagctgctttacatccttcagctaacaaggatctangaacagtgccccattgcatttggctactacataatcttcaagcccttaatatctcccacaatccgttcattgatctcgcaaaatctttcttcaatttattaacccttgaccttcataacaataaacttcaacaacaattacctatctttcctgaccaagaaaantaattggatttctcaagcaaccaatttaactcttttatcacacaagagattgctcattatctgtccctgacatctattctctctctttaaacaatactttggat

SEQ ID NO: 119501 - DNA, 439 bp, Glycine max
  unsure (1)..(439): unsure at all n locations
acacttaatactcagctgttagtactcttggacttaactagctagccgcagacggtttgactatttgaatatcttgctactacaactggtgttacatcattctatactcatcactcactttttatccatcacacaattgtatcccttactactcgtgtatgtagaagacatacacattgttggaaattctatggatatgataacttcattcaagcagattttagatcatcaatgtgtgcattcttaagttctttcttggtgctggcgttctcagtgccaatcctgtcatcaccccttttgatcctaacttgtaacttcgcaagatgtcgctcctatacctgactgtcacacgcccatatatatcccattgttgaccatcnactcaatcaattgtcaaccctcccaacagtgagtcattatcaataaagccaacgcgttc

SEQ ID NO: 119502 - DNA, 185 bp, Glycine max
ctgaacaaacttgttctatgtgcttggtgactgatgaggcacaagttggtgtatatatggtagaaagatctgatgaacattaccatcctacttcttcattcactacatactaatgcaacggctctggctcgatgatgcatggaagctcatcatgctcccatgacaaccatatgtattcataagtt

SEQ ID NO: 119503 - DNA, 269 bp, Glycine max
actgcggctcactgagtgcctgaagtttttattctaacacaaaaattgagtaaacacaggttaacactgcattttatagagaaaaaactgacaattatgaactacactgctaattacaagttccattgattcgagcatactgtttaaacactctttgagtgattagaatacattctctatcaaatatctattgttcgtaaaagccatgaataacttagggacaaagaataattaggtcttaatctcaagggaagattaatggtagtgtc

SEQ ID NO: 119504 - DNA, 426 bp, Glycine max
  unsure (1)..(426): unsure at all n locations
gggcttcatggatgctggatctttgagcttctatgttttctntttatggtgattttacaccatggatatgcagcgttatacaaaggataaaatgtgagacgtggcgccattcactatggaattatccatgaaagaatgagctctaccaccaagatgagccttggataagaagcttggagaggatgcttcaatggatgaaaagaatgagggagagatagagagaagtgggagctcgaatttgaatgaagataatgggatagaagttgaactctgatttgcgtcttacaagactcttattcatcatagttacaacatgtgttacacatgtttctatttatagactatgtagcttccttgagaagcttctttgagataacttccttgagatgctagagcttagcttcacactaccctctatttacttag

SEQ ID NO: 119505 - DNA, 225 bp, Glycine max
  unsure (1)..(225): unsure at all n locations
agctntggaaagggttgttnttcatctcctcgctatgccaatctgctggcttagcgagcgtccgctaagcgcaagactcctgggctaagcacgaggaagactctggaagaatatgagttgtacaggttcgctaagcgtaccgctttatctcactaagcgcactacttcagttcatctgctaagcgagaaaggcgcgctaagccaaaaatcactaatatgtgctaa

SEQ ID NO: 119506 - DNA, 457 bp, Glycine max
  unsure (1)..(457): unsure at all n locations
agcttacctatcatactcacgttttttgtcaagttctatagacaaatcttactggtatcgtatcaatgcaccccacataattgccttttacaatcaagttaggggccatggtacgtatgaggcttanatctggcttcgctggtcattccaaatgaaacccatctttatcgttttgctaagtaaacccatcactatttaggtgaaaaggaaaaagttttccaaattaaacccatcactattcaggccttccctcatatatgcggagaatcattttgcattgctttgattnttaatgttaccggataaacacggaatgaattacgtgaatggagaaagaanaaagtaaattaattacatcaaggtttatcacaacaaccaactgcattcccttttatttttacctttgttttatactattaataaataacaggttaaatcaaccacaaagagtgtattt

SEQ ID NO: 119507 - DNA, 481 bp, Glycine max
gaccgcagcttacatccttaatagggtgccaagtaaagtctttaacaaaattccttatgaacattggactagctaaaggccaatcattaaacacatgcatatttgatattctcaactaaggcacaatcttatacgtcgtatgaaagaaagctggattcaagaacaattaactactattttgatggctatgtcaaacgctctcatgatataagttttacgatcccactttaagaacctcttttgaaacaagatatgcgagatttattgagatagttgaatttgggaaagaatgatgtctctcttgaataacctcttattgacagtgtgatgtagctctatatggagcttgtaagccttggatcttcttcatcaatggagttctttgcttcttgaagatgaatgccagtggaatggagaacgaagaatgatgattggagatgccacttcaatgaatagatgaatcatgaagatgctcaccacc

SEQ ID NO: 119508 - DNA, 207 bp, Glycine max
  unsure (1)..(207): unsure at all n locations
gctgaggttgtgagtctttttttatagttnttttactctactctagagccattctaagtttctctttgagtcctaacttgcttctatgtccttttttcattgctttaattggtgagtaatccttaaaaaattgtctttgtaaaactccattggtttaactttcatttcattttttttggtctttgggcattgcttgtctctttggtt

SEQ ID NO: 119509 - DNA, 408 bp, Glycine max
ctttaaactctgcttaatctgggctatcaaacctaagtttactacctttggtgcacgtcatattactctatataatgatgcatacctgactataaacccctttacttcaacattttgcttgcataaccttgttggagattacacaatagtgctaacttgctccaccacggacactcaaaaagcaataactaatcccttatcctcttattgcaacaaaaaaatattagaatcgtactataatctataataggaaacaatatgtctgagatactaatattttacaaacaattgatttatcatacaaagtgacccaatctaactccatagtaggaagctaacttgaaaatataataaacataagctaacattgtgattatgcacctgactcaaatactattcaaatcaata

SEQ ID NO: 119510 - DNA, 96 bp, Glycine max
tttctttgcttttcaaacggatcaactgatgccaccttgctattaaacaggacttgttatcttgctaggcttctaagattcccctgacccctgttt

SEQ ID NO: 119511 - DNA, 474 bp, Glycine max
  unsure (1)..(474): unsure at all n locations
agcttcaatgctccatgtacttctgccgctattttctgtgggacggcggtactctattgaaggtgctaaagggtgtaaaaattgttaattaattaatctcgctggtatatattaattaatttctcgtaatcatttgcaaaatttgaaatatatgtttaaaccttaaacataacaatgtttattttattccttactttaatcattgccattttattcactcatttcgaacatccaaccaatatattatatgtgaattctcttacactntaaaaaaataatctttgtgcactctgtcaattcccaattatatttattcaattaacattgtaaataattatatatttacaaatcatcaatagaaccatctgtaatctgttaaaccatatatanttttgcatttggtaaaacaaggtttcaaaagtctgtacttatatnttaatctatatttcttattcatcctattaataaaatcat

SEQ ID NO: 119512 - DNA, 434 bp, Glycine max
  unsure (1)..(434): unsure at all n locations
gacacccaaggacacttagtagagaatcttggacttgatcttgaattagtgggctgaaccatagctaatattcactaatcataattcngtgaaatttgggctcaaatgtttgctcacaaattcaaattcaaattcaagtgaaatttgatagaaattcaaattttccctcaaattggggtgacacttaggctataaataaatgccttggtgtgcatttttttggaaccttgatcttttgagattacaactcaaagttagacctcatttgaggcataaaattcgtgctccttctttcctctccttcactcatctctcctaccttatgctcttatcatttctatggggtgagctcttcttactcatcttctcttgagtgcatctcaataaccttctcatctcatccgtgcattgtattaatagcaaagactcgtgtg

SEQ ID NO: 119513 - DNA, 456 bp, Glycine max
  unsure (1)..(456): unsure at all n locations
agcttgagaggattgatggggacccggngttgagatatacgttgatatgggctacgngggagcacgngagctcacttggaggtgggcaacaggggatggtgggtttatgcgcgcattgtggatgtggaaagcttgttgtgcaccatcgcccgaccgccacctagtaccacatgtgatgggtaccctataatcctacaagcttgagatgaagaagtgttgaagggtgaaacttcctgcttttattgttgaccacagagtggtacctggagatatatcgcgggggtcaggagaccttggggacgtcaggtggggtgctattgcccaaaaccaagcttgaccaatcccgacccaacccgggcatagtcggtcagtgagaacctgtgatgtacctaagcaggcgagctcctggcagtcaacagattaaaggaaaacaagaccacacagcaaggaggcttg

SEQ ID NO: 119514 - DNA, 252 bp, Glycine max
  unsure (1)..(252): unsure at all n locations
aactcaatncttacaatatattgtctaattatcggctaaattatatactattttacaggtagagatatcaagcgcaacatcaattaaccttggttattgatatgctcattcacttagagggaaatatagaattagttaatgggtaacggagaaaaaaaaaaaaaaaatatcccttgatgggatctctctaacataaaaagaacatttgcccataaaaaaatactatattagctaaatatttttcaagcattt

SEQ ID NO: 119515 - DNA, 326 bp, Glycine max
gcttctatggaggctggatctttgagcttaatgtggtccttttatggtgatattccaccatggagatgcatcggaagacaaacgaaaagatgtgagatgaggcgccatccatttaggaatatgccatggatgaatgagcttcaccaccaatatgagccttggataagaaacttggaatgatgcgtcaatggaggaaaagaaagatggagagaaagagagatggtggagcacgaaattgaaggaataaaagatggagagaagtggaactttgttgtatgtctcacaagactctcatgtatcaaagttacaacaagtggtacacatgc

SEQ ID NO: 119516 - DNA, 503 bp, Glycine max
  unsure (1)..(503): unsure at all n locations
atccnttgagtcacctgcggcatgcaagcttgtgcattcaatatcctgatgagggtgtttatatgttcttaagactggactaatacatttgctgcccaagtttcatggtcttgctggtgaagatcctcataaacatcttaaggagttccatattgtctattccaccatganagccccttatgtgcgggaagatcatatttttctaaaagctcttccacattctctggagggagtggcgaaagattggctgtactaccttgctcccaggtccattatcagttgtgatgaccctaagagggtgttctnggagaaattcttccttgtatctatgaccactgccaccagacaaagacacttcacgcatcagacaacttattggagagagcttgtatgagtactgggaaagattcaagaaattgtgtgcaagctgccctcaccaccagatgtctgagccactccttctgcaatatttctatgacggacttagcaacatggagaggagt

SEQ ID NO: 119517 - DNA, 326 bp, Glycine max
ttattcatgctttgttagacacattaatcccatcatcaaaataaaaaaaaaaggctacctctagggtcacacatggcatatgtcttgctatgcagggcctggctatgctgctttggtgatacacacctgcgacatctgactgattaccaaccttctggtggtgcctgggaaggatatcaatcaatgatgacatatagttcatatcttcactgaacaaaaaagtactattttaatttcgcctgaaaaattctggatttaattggatttatgaatatacgctttaatccgtatcattatattcctggtcttgaataatgacttgatat

SEQ ID NO: 119518 - DNA, 316 bp, Glycine max
tctcagcttgtatcgattctacatactgtatttgttaccagatgagtttttcatataacattctcaacagtcacatatctttatctgattctcaagtggccatcaaaagcttatatatatgtgacttgagacaccaattttatatgagatttgtagaacacaaaggtcttatcctcctaacaagcaaaatttgtttatcctctttcaattccctggccaaaacacttgtgattccataaggaattatttgagtgctcacattgttcaatctatctcttgtcaagagagatatctttttctcttcttctttattcta

SEQ ID NO: 119519 - DNA, 447 bp, Glycine max
  unsure (1)..(447): unsure at all n locations
agcttgtaatcgattacacaagtctggtaaccgattaccatatgagattttcacaaaattatttccaagggtcacaacttttcagatggtgtttacatggccatcaaaggtctatttatatgtgacttggaacacgaattcgctcaaaggttttcagaacaaatagtcttatcctcttcgaaaagcgaatcattttatcctcttaagaattccttggccaatacacttgcaattcataaggaattaattgagtgctcaattgtacactctatctctttcaagagagatttattcttttctccattctatttctcagaaaggattaagagactgacggtctcttattgtaagaaatctaacacaaaggaagggtgtccttgtgtggtcaaaacttgtaagggattntgcagatagtggactctcaagcggttgcttgggactgacgta

SEQ ID NO: 119520 - DNA, 440 bp, Glycine max
tgtgattcatcatatattacatctctgttgataagaactttcttttccgagggggactagatcctatatcctttcaccccatcaccataacccatgaatagaccctttcttgatctatgtaccagctttacttcattgacatgataataagcattgcagccaaatactcttaggtttgagtaatttgttggttggtcattccagaattcaataagagttttaagttctattatagtataggatgttctatcgatcagaatacaggctgtattgatagcattctcccaataacttctgttgagaccagcattagacaataggcatcttgttctttccaaaagtgatttggtcattctttcatcaactcacatttgctgaggagtgtccctacaataagtttctaacaatcccttcatctctgcagaaattggtaaattatg

SEQ ID NO: 119521 - DNA, 380 bp, Glycine max
tatactcagctgtacatactcctcatgcttctcaccatgtctaataaggttctttttcttctttctgacacaccattctgatccagtaatcaatcatagtgtattgggcaacaatcccatgtacttgaataatattcgcaaatgaacctgttgcttgtacatcctctgtgtatctaccatagtactgcacacctctatctgatctcacgatcttaatttgttttacacattgcttctcaacttcagcctttatatactttaaggcatctaaagcttcatgcttagaatgaagtaagtagagatacatatatcgtgaataatcatccttaaaaggtatgaaatatctccgactatatgcatccatgtctggacaacatatg

SEQ ID NO: 119522 - DNA, 146 bp, Glycine max
agctatgagaatctctccacaacgctatgtccgagtgcagagtgtcccaagaagctacatactctgtctataacataacttgccgcgctccttgaagatcatgacgctacatattgcctctcaatgctgactgtatgcttaccatc

SEQ ID NO: 119523 - DNA, 292 bp, Glycine max
  unsure (1)..(292): unsure at all n locations
ctatactaatctctagattctgtgatggcgtgtaccttttgttggcactctctacttagacatcttaatactttatttatgagatcctcgttcggaaatattctccncaaagatgcgagatgatcaactatatgtgggaactctttttgcatatcctgcatacctatcagtcgtcttcatcctaaataattcatactcacgagttcaagtttcatgctagatcgtctacatatgttgtgcctccatgtgtacttgtagatgtcccacattccttatcctcttacaattgaac

SEQ ID NO: 119524 - DNA, 475 bp, Glycine max
  unsure (1)..(475): unsure at all n locations
agcttcttgaggaagctacatgaagctgcctcgatgaattcaatgtccagcctttcgtaaccgttggatcttctcggaattcggtctgcagctttaccagacacttgtccacgatccgaccggtgggatctgtgagaagatgtctagagtgtgctcgaagccttcgttcccgagagcattccttatttaagcatttcagccttttgctttcatgtagcttaagaaaaaacgccattttttccctttttttcttncaaaggcatttctaacgtcgcaaacactttcttcatgacccacagccaccattagccaccacaaaccatcgttattctacattgaaaccccacacggagaggaacccttcaaccgagcggaatcttccacttggcttgcggttcgatagagaacgaaacctaatctgacctttcgtttcatagaggtaccatcattcgcactttttttgtagttcatctat

SEQ ID NO: 119525 - DNA, 456 bp, Glycine max
  unsure (1)..(456): unsure at all n locations
tttatctagctttcctttttgcttaagcttttcctaatagcactatgtttctctggatttgtgcctgccattctgtacaatgtgtatatactacatagtaggtgtaccctaattctacccaagacagcttaaattagctctgaattcaaaacgttgcgcttagcgccaccctcacgcttatcgtgagtaaggagaaattgggcttaacgccattctcgcgcttatcctgtcaaatgcacctgctgcgcttattgcactaatctcgcgctaatgcgcgacttgatactgatgctctgcagattctctttgcgctaatcacgttgaactgcgctaccgtggtgtataccctatttcatccggaaccatccgttgtgtgatgcgaccctctnttaccacttcgaggtacttggacccatcgtaggcaattctgatattcgtgacatgccgaagtaaaaa

SEQ ID NO: 119526 - DNA, 493 bp, Glycine max
  unsure (1)..(493): unsure at all n locations
atcctctnagtcacctgcggcatgtcaagcttaaaagtccttagtgatccacaatatgtatgtatgtatgcattaactaacatgatgtgcaaagntgggaacattattttcagctgttgggattaaaaacactcataaccaagacacttgtatgcttgagagaaacactagccttgtgatgaatgatgcatggtaaacctaccatgctgatggtcacacttgcattacgagatcatgacaagtgtaagcttgagaagtagttattaaaaggtttgaaatgatacgcggttatctcatggattgtaattggtatatttagaacttgtcataatttttcttttgcttgaggacaagctaatatttcaatttaggggagtttgataactgcaaaatntacgtttaatcgatagtcaaattacacaagaatggttaaatctcctctactctactgtttgtttttaagagaataacaaggattttaatatcattttag

SEQ ID NO: 119527 - DNA, 246 bp, Glycine max
gaaggaaaagaagaaaaaaaggagaaagaaaggatggaaagatagaaagagaaggatagagaagaaaaaaggtgagaagaaagaggaaataggggaaaagagtaaaggaggagaggagaagaatagagagaaaatgagggagaaaaagaggaaatggaggaagaaggagaatgaaaataaagaaaagaaagaaaaaaaaaaaagaaaaaaaaagggggaaagaggagaaaaaaagagaaaggggga

SEQ ID NO: 119528 - DNA, 458 bp, Glycine max
  unsure (1)..(458): unsure at all n locations
agcttatttatatggaatctggtggggaagggttggcacacagcttctctttacctatttggtcacacagctgccttaattgcctnctcaattacaaaacaccctaatgctgtgagttcccatttcccaattatcctactttctctttccttttgcccctttgaaaaaatatgctattcttctattatatggtcattttagtgtagagtgtttgtgaaatgaaaacatctatttgttttttgactcatcaagttactattttctttcttgcagtttggaggccttctaacaactggtatcttggctttctctgggacgtaagtgctatctctaccgatgctgtttaaatgacttacgttttattgtaccatggaattctcttccaactatttttatgcttattttggaactgattaactttattttctatttgggaggggggttaattcttaacagcg

SEQ ID NO: 119529 - DNA, 442 bp, Glycine max
  unsure (1)..(442): unsure at all n locations
agctntanttagatctgagatcatntaattttagtctttcttctaaatataggcatttcctttgcccactctgacccgaattatcttgtaatatctcttacattgctttaatcggagttaaatattcatggacttttcagatctgaagcagtatctgcatgattaaatgaatcggcgtattgcctggcatcaagtcataccctggaatgaaataagacagataaaccttcgtcttaaattccttggtagtcacataatacaattctagatattcattgaaaaaaatgttgacttgaaccttttctgaatgccaggaggatcgcacaagtaaaagagaaccaatgtcaaattgctgtagaagatgttatgtacttgctgatcttttacaagttttctgagatcaggttccctatggttccaagctttctagttgtctttataa

SEQ ID NO: 119530 - DNA, 239 bp, Glycine max
  unsure (1)..(239): unsure at all n locations
tggtgtgaccctatctcacatgagaatgctcatttanntgtgtttgcatttattttcttagtatgatagcaactgttctgatcgttcattaattgatctggagcactactttctgaaagtgataccatacccaagtgtaatcatgcctctacaatcattacaaaaagtttcaaaatgttatgatcacatgaactattattttcaagtgatttattgtttatatgtcagatatatgccct

SEQ ID NO: 119531 - DNA, 468 bp, Glycine max
agcttgtcatcgtgagacatcaaaggctattatttattattgtgggtaggaaacattcaccaaattgatagagaaaaatctaaaatcatacatcttaggcgaataaggcatgctagcccccaacattattgcattttgattccatctttggacattcaaattgttgtttatttttcctgttatcttttcctttgccttagtctaaatcttaaacttacaattcggcatctctttcttcttttgtttctcctcatttcttaataattggatttgcatcacttaaatacaaacaaagttcgtctggattcaacagttgaacttcaaattcaattcttactacttgtgataacattaggacacttgtcaatctattaacaactgttttggcgctgttgatggaggactttggttctcgtaccttggttgttacaaatcccaatctgagagcaatcattctttatttttcat

SEQ ID NO: 119532 - DNA, 481 bp, Glycine max
gacacattaaactaagctttgagtctaattcttcttatgctactttattctttttatttttgcctgctgatatcaaaaacaacaacatatatgtatctagagctctcatcattaagggatctgtgagttgagagaaatcacaatggatggagaaacatcatacacatgatgttcaccaccaatttttgatggtgaggattactaattatgggctgcattgatgactgctcatcttgaagctttggatctttgggaggcagttgaagataactatgatgttcctgaactacctttagatctaacggtgcctcatatgatgattcacagagaacggattaccaaataggctatggctaaaatttgacttttctctgctgtatcaaaattatttctacaagaattatgaacatcaagtatgccaaacagatatgggattatctcagatcagaatatcaaggctgtgaaagaactaaatgcatgc

SEQ ID NO: 119533 - DNA, 307 bp, Glycine max
ggaccttaagcgactgggctgcagcttatggtaacaagtttgatgaaatttatgtctagctgataatcgccttcaaaaacaaaaggtactgaacttccattccccatttgtgttcttccccccttccaatcctacattggatctcatgaccaccttgagacatcttacatgagattcacaccatgtttcacaatataatgcttcagctatatttcaatttcgaaagcataacctggtggatacctctttgaaacatcaatgggaagggcaatctaagatatgcaatcctttctttagtaaactttag

SEQ ID NO: 119534 - DNA, 412 bp, Glycine max
  unsure (1)..(412): unsure at all n locations
gaacctatttttctattgacaaggcatttntctcttttggtgaaaagacattgaagagaaagatcaagataataacacaaacgttgcaatttggtaagataatacaaccttgccacacagttgtatgtccaaacagcatgtgcacttcaaagtccaaggataatagcagaatttccaatgacatataatggcaatatgcaatatggacctatcattgcacctgccataatgaaacaacaccttgtcatgaatgtaccagaaactttatttatcaaattatatattatcagacagattcatgtaagtctgaatatgattattatatgattttcatgtggcgtagtctaaccgtagaatataagaacgatacggacagaacgatagaataatatgataatgaaccttttatgat

SEQ ID NO: 119535 - DNA, 347 bp, Glycine max
cctttattctagcctatctcggtttatagctaaatgggagattgttctcacttatctattaaaggaaaggatatttatttgatataggatagtcctttagttaaagcacacatagcatgtagtttaattctaggtcaatttttaagtatttagtagaatctattaaataaatatatggatcacattaatctagatgttattgggaggtataattttcgagtattgtatgaaataactatgttttgtttaaaatatgatctatagtaggggttgaaaaacccttaaaattattattatataaagagcaaatatttcaggtataattgaatgttatatatacattaatg

SEQ ID NO: 119536 - DNA, 461 bp, Glycine max
  unsure (1)..(461): unsure at all n locations
gctgcctagtaaagtgttgtattgcgttgatctattacagtcttatcgtaatcgactacacaattatatttgagacagcaattgatttatttacgagtctctgctttaatcaattaccatgtgatatactcgattacttctttttctataagtgtttcagaagtgatcaaaaacactctaatcgattatattgaggatctaatcaattacattgttcttgagagggttctcagttttntggaagaacgctctaatcgcttgaaaagaaatataatcgattattcgttgaaataatcaattacattgtagatttaatcgattatagacgggtatagttggtttctctatatatagtcaccttgtgttctcacttcaatacacaagatcattaagtgtgaaattgtgtgagctgatataagtgaaagaaaaaagaaaaatgcttagacacagtgactcacaac

SEQ ID NO: 119537 - DNA, 509 bp, Glycine max
  unsure (1)..(509): unsure at all n locations
acactttattactcatgcttctatagataactacatgcagctgcctcggtataaacgctgccctgtcttcgttaaccgttggatcgtctcgaaatttggtttgcaacttcacaagacacttttccatgatcggaccgttgggatcnttgaaaagatgtctggagtgtgctanaagcttccgttcccgagagcatatcttatttaagcatttcagcacttgctttcgtgtagcttatgaaaaacgtcatttcttcttctgtatttcttccaaagccatttataaagttccaagaactgtctccatcacccacagccaccattagccaccacataccatcgttgttctccacaccgagaggaacccttcaaccgaagcggaatcttccaacttggcttgcggnttcggtagagaacgataccctaatctaaccttctcgtttctttcgaggtaaccatggatctacgcttgcttcttgttagtatcatcttgtcttttcatcttgtctgac

SEQ ID NO: 119538 - DNA, 391 bp, Glycine max
cttcatggtgaatcataggtgatacacagggggtcttgatatatctttgatgataacaaaagatgatgacaaaggtgatgactaatagctcattgatcactcatagaacatctctagtgaatcaagaacaattcaagagttcaagattagaatcaagaagatatcatgactcaagaagaaagtttatagtcatgaataaagattcatgggtcaagatctcatgaatcaagatcatgattcatgactcatgattcaagattcaagggaaagtgtatcaagatatgtataaatagttgttcccaaaaactgagtttcacatgtattgtctttaatcatgcttaccatagagattgactctctggtaattgtataccatatttctgctatcgat

SEQ ID NO: 119539 - DNA, 286 bp, Glycine max
  unsure (1)..(286): unsure at all n locations
ctgctcaggaccctactctacatgtatcggacnngggatgtgngttttaggttcactgggcgggnctctacacccatcatcttttgctctaatgaaaatcattctttctaaggactactttattgaggtcgccatgggcatgacccaatatttgtactcaactagtgcctctactagcgatgtataagctgccctttagcaaaggtaatctatatcaaacataggcctgttgcacaacttattgacaaaacggccaatcttgaaggcggtcactatgtgatgcatt

SEQ ID NO: 119540 - DNA, 466 bp, Glycine max
  unsure (1)..(466): unsure at all n locations
agctngatgaagaagctgccaaacaacggtggagttaaatgtttttntgaaagctctctggacgcggganaaatgtcaataactaaaggaagcacaatccacgggggagatcctatggtgatttttgtcctatctgtttattatgtactccaaaacacatctccttgatgtgaaattgttttcataaataaaagagaaataggttatgttacctgttcagactttgtttcaaagtcttatgatgctttaagtttcttttctatcttatattctcttgcatctggtaagactgctaatgtacttttcaacacaatactttaagttagttttcatcttttacgtttgtaattgtttacatcatcaaacggtgagatngttgagtcaaaggatgcttacatctgaaagactaatcaagatccttaattattctgattagatgcaaagaaataccaagggtatatgttgt

SEQ ID NO: 119541 - DNA, 451 bp, Glycine max
  unsure (1)..(451): unsure at all n locations
agcttcccaaccaatctccgatatctttcaagatctgattattgctccccttgattgggtagcaattnttgaattggatccatgggactatcaatcagtctacaatgtgacataccagtttcttgaagtatgtctaacgcatacttcctttgtgagatgataatcccatcttttgactgagcaacttcaattccaagaaaatatttaaggttttccaaatccttagtctgaaaatgactaaataaatggtccttcagttgagcaatttttccttggtcatttcctttgatgactatatcatctacatagaccaccaagtaaacacatctactcgatgacgtatgacaataaaaaactgaatggtctggttcacttcgtttcattccaaaagcctgaacaactgagctatatntttcaaccaagctcgtggggattgtttgagtccataaag

SEQ ID NO: 119542 - DNA, 325 bp, Glycine max
ctctgctcaacacatctaccaaatcacagcttgtctcacttatagaccccatgttacaattccgtcgatccaagtcggttaccgttgatcgactccaaattttaatggaaggctatagtgcaaagcctacatgtgaccgttggatcgactacatacatctggactcatttgtctactcttcacagccaccaacacaagcatttctgaccagctaaatttgctgactatttgacacaaatctgctagtgcaatttgaaatacacttctctatcatcttgtcaatgattctcaagtccaatatgttcaacagttaaactaagcaact

SEQ ID NO: 119543 - DNA, 439 bp, Glycine max
gtcacctgcggcatgcagctatgcaacatgatataggccaacttattttatatatgatagatagcgtgatcactctaccagtgcattaaaggcctccttcccaattatcactctgcactacttgttacatgtgttaggatttcgcttatatgaaagtactatatgcaaaggtgctgaaaggcgtgcctaaaccactgaggcatggagcatgaagctttttttttatttattaatcattctatgcctgctatcttttcaatgagtcgcgtctatcaagataatagtgtgttgaacttatatatttatgcttggtattgtcgcgcattacagccttcggacattattctcttactttcacgtcttgtttgtgacattggatgaatggtcaagtgatgaaatacatgcaatgaatgaagttggaggaaattcctctgctatt

SEQ ID NO: 119544 - DNA, 374 bp, Glycine max
  unsure (1)..(374): unsure at all n locations
agctngaagaaaggctcgtaggtagcagataactatgatattaaccttgctatataantcacgcgtgccaagaaacctcgggcaatttaaggatggacgtcaccttgtcggggtccacctctatccctttctggtttatgataaaaccaagcaattttcctgacttgaccctcaaagtacacttggtgggattcaatcttagtcggcacttatgcattctttcgaacaacttccgcaagttgacgagatgttcctctttattttagacttggcaatcatgtcatccacatatactttaatttctttgtccattatatcgtggaataatgctatcatagcctgctggtagggtagcccagcgttcttaagctcga

SEQ ID NO: 119545 - DNA, 99 bp, Glycine max
tcagcttatgattaatcaagaatgatccaaagatgttgtgatgattactcttgtgttgactaaaagctcacatgtcattctaagaatgagttcaatatg

SEQ ID NO: 119546 - DNA, 408 bp, Glycine max
actacctgaataattcctggattccctttgttccttgatcactttactggatttgatactcactactagccttatgttataaaaccttgatattaccatatccttaatgaatactggagctccggaattgttctgggaataaatgtgcgggagttattgttaaattggacaacgtagtatcgatggctgatactacatgatgtattgttggccacacttgatgtgcattgtatattggttaactgtttgacatgcagaatgataagttgttttcaaatgctatagagttaaaaataaaataataatgcataaagattagtcgactaataatagataataaaagcttctaagtggagtgaatatgaccttaactggcacaaaatgatgaaactcttggactactctcat

SEQ ID NO: 119547 - DNA, 448 bp, Glycine max
  unsure (1)..(448): unsure at all n locations
agctngtagaatggctagacatgatacatgtcatgtgcttggttggntcaaggataaaagggatgctccacattatttccatgacacaaatgcaaaaatgatgatttggaaattttatgcaaaactggtcatgcatgcacctatgcgaacgctcaagtgtcaaatttttatggtcatgtgatgctagggctcaagattcatttcctctattttagtcaacccaatgtttccaaaatatgttcttttatccatttgtgcattcatccaagtccatttcgggcgtccgggaaaatttcacagcattcacccttcaggtgtacacacattnttnttttccaaaaactagctatgatcagcgaatttttcttcaaagaaaagttggaagtcatctcttctcataagcatgttggttttcagctagacaactcattttctttatcctctcttt

SEQ ID NO: 119548 - DNA, 319 bp, Glycine max
caccgattccatagcgtggtacatcatttgtgttctttgccatcaaacgatggttattcctcaaacagagacaggggcagctgagggatgatgaattattgcacttccttggaggaggctgagccatacaactatgatcggcgaactcgtgatctatccatcattattgcgttgtaggatgctattattctggtatttcccttgtgatctgacattatctgcttccaaatattattgtcattgtgatagaactgcacatgcagatatctgtcgcattgtgagtaatttaccgctgttggatatggtcgtacttacttta

SEQ ID NO: 119549 - DNA, 90 bp, Glycine max
ttgtgaagagccgaggataatttctggtacatttgtaattggagctgatgtacaatatgcgagattatatgttttcttcgaaaggtatga

SEQ ID NO: 119550 - DNA, 272 bp, Glycine max
  unsure (1)..(272): unsure at all n locations
agcttctatgagaagcttccttgataagttagacttacctacacacacttctttaataactaagctcacctccatgagaaactttcttgagaagctttcttgacaagattcctagagaagctagatcttggctgccacacccctctaatagctaagctcaccttcttgagatgagaagctagagcttagctacacacaccccgctttatagcttatctcacccccatgccaaagtacgtgaagatacaaanaagtctctactataaagacta

SEQ ID NO: 119551 - DNA, 424 bp, Glycine max
tctacaagcttctctgtgtctctgtattcttatccatccacacccatatatgtgctgatttatcgttgcatgtgcattccatcggttgaatattactcaccttatgttttatcatcttgcatattgactaatacttctgtgatctatctaccagggaggaacatctctccctcccttttacatattacgtactcgagtgtacctttctcatacaatgtttggtggtcgtctcgaatatttacctttaactgctcccggctccttatactgatgcaccttccatatcacgatgacctactcatgctggttcacatgaagggattcgtcgcatactcttatcctcaattgcactgtgtcctatcgtaagatgatcgtaccttgtgcattatgcacttaatcacttggcttggctaggttttctttg

SEQ ID NO: 119552 - DNA, 366 bp, Glycine max
  unsure (1)..(366): unsure at all n locations
taatacaatgagctgcacaaagagtccaataaatatgttttcttttgtcctctaacaacttaccccctaaaacataattggtcccattatcaagtacaacttgaacaatgttctcttctttaacttgcttcacaatagcatcaagcaactcaaaaagctttgcacctgtctttacaaaatcagagccatcaacagatttcagaaacattggaccaacttgaaagttagataaaaaattaatgatgcatctttgtttccgaacagntcatgcatcagacataatagtacaacattgctccttgtggcccttcatcacatttcagtgtattcaactatcttcttcangagtggaactctgatgtcatg

SEQ ID NO: 119553 - DNA, 102 bp, Glycine max
  unsure (1)..(102): unsure at all n locations
caagcacctgngctgcagctgaatagattggaaaaggtggctggatttgagcttgatgctagggtttagagaagaaagccagttctcaagtttggagatttg

SEQ ID NO: 119554 - DNA, 177 bp, Glycine max
tctaagcttgaatgcagtccaactctttactaatctgtttaggcgtatatggtatccttgttcgtgctcgtgtgcttagcgcacttattgaccgcttatcgcacattattgatatttgtgttatcacgtgccctttcctcgtagtggatgaatgaagcggtgcgcttattgagatga

SEQ ID NO: 119555 - DNA, 438 bp, Glycine max
tgctgtgtggtactggaaagattaagatattgtgtgcatgtttgtcctctccaccatatttctaagcaactccttcttcaatatttctatgaaggacttatcaacatggtgagaagtatgactgattcgtacctgtggttgatctcttggtgatattacccctgctgaagcttggaatttgatcgagatgatgtattccaactcacaaaatttcagttgcaaaaatgatgctattgttctaaatgatttcatgatgtggccacatattcatcttcatctacttgaaaataaaatgctgtatgtaaacgtgatgccttggtctacctatttacccatctgtgcatgaatcttatatctactcctgatgcattagtcagtggtccatgttcttctgtaatcatcattatatcttggtccttgttgcaactatccttaatc

SEQ ID NO: 119556 - DNA, 372 bp, Glycine max
  unsure (1)..(372): unsure at all n locations
agcttagaatgcanaagaagcaacaacaatgaatctaatattgtttatttacttgcaaggccaaagtgattgcaataacataaatgagatacgggaatacagaatgcaaacacaactttatacttggatcgggcacttcccgtgcctacatccagaactcaagccacccactctgatattccactagctttgaaattccttttacaagttctaaacacacaaggacaacccttcctttgtgtttagagattcttctcaacaagagactcacagtntcttaatgccttagagaatgagaagaagaagatgaacggatctctctatacagagatggattttatcaattgagcactcaattaattccttaatgaa

SEQ ID NO: 119557 - DNA, 474 bp, Glycine max
tgctcgctatgcacattctgcgaataatagatgctctatgttctctcgcttagcgtatggctatcacgcttagcgcatgattatttatttgtaatgcgcgctaatcgctcattatgattatcagcctatatcctgcttttgaatttgaataaataactgtataatcttgtgtgtccattcttctgtatagtatatgtgcttccattagacaaaagccactactttattgtctcatgccgggtttgatagatcaagtattgatcacacgaagcttacgactgtcactcagataatgtgcttgctaggaacattctaccacaaagaaatgtcaagctctatatcactgagttcgatgattacagaagagatatgattataagatattgtcataatcagctgaccaacttggctgtaggaatcatagacgtggcacttgtgatggaatgctatgctatcctatatgctcatgatgac

SEQ ID NO: 119558 - DNA, 465 bp, Glycine max
  unsure (1)..(465): unsure at all n locations
agctngctcttctgtaattgtatcttgattcatcttctgctcatgaaccaacaaagaaacttggagcttgtcaagggagagtgtatcaacatcttcggattcttcaatggaacacacaacatagttgtactttggtgccatggaacttaagatcttctcagctataacaacatcttccatgttttcaccatggaattgcattntatttgcaattgtcatggttcttgcaaaatagttggttaccgattcatcactcttcatgtgtaacatttccaattcctttctcaaggcttgaagctgtgcacgctntgttctattagagccttgatattttttcttcattgaatcccaaatatctttggaagtttctttgccaagaattgtttccaagatagagcgatcaatggcctggaacaagtaattntntgcctttaaatctntcaacttcattccctccaactcctt

SEQ ID NO: 119559 - DNA, 471 bp, Glycine max
cttaatgcaatctgtgtcaatgtccggatacaactgatagtcaacattccattatagcttggcatgagactagtagaagacattaccagaaatgtaaattatagttacaaataaaattgataaatccaccatagtaaggaatgtgccattcacctatcatattgtagaagccggtcaatgcatctgatgactgatgacaataagacaattcttttgcaacaatttgagttagaaagaagcctaatactcaaaatcaaggtgagtaatgttacaaaaattaagactattatatcaatgattaatacaaatgaacaacgaataaataaattacatattacaaatcatgcaccctttgcatagtcgtttaggaatggaaattcacaactcaaatgaaacttaaccaactaattataactgactgtctacacccaaaacacatgtggatccaatggactttgtacactgtatcct

SEQ ID NO: 119560 - DNA, 429 bp, Glycine max
  unsure (1)..(429): unsure at all n locations
agcttattgatccaggatcttacagatgactcgttgtcatgctttngtacttaactatatctagactagatatatgttactgtgtgcataaattaagtcaatntgtctcccacccctatacaaaccacatgcatgctgcaaacatgttactctggtaccttaagcacactgttggtcaaagtactctttttagagccaactcagacacaaaattacatgcatatgtggatgcagattggggatcatgtcctgaaattagaatatcaaccactagcttctatatttttttaggaaattccttggtttcctggaaagacaaaagatagtaaacaggtcctcaacaaaagcagaatacaggtcctttggcttgctctagtgaaattacatggattccaaatttgcttactgatttcaatatcacaacttctt

SEQ ID NO: 119561 - DNA, 456 bp, Glycine max
  unsure (1)..(456): unsure at all n locations
cacaaaaactaagctgttctgattttcctagttctntacaagctntgaacaatatacttgttcttcatttaactgtctttgggcttggcagccacgctcaacaaagtactttcgacacctactgtacgttgatttgaccaatgctgttatgggaatgttgcgacaatccatcaaaaccttattgatacattctgagaaggttggtgtnatgtggccatatcgacgtccttctctatcataagtcatctgncatttttccttggaaattagatcaatccatgttgctatggctggactcatttgacgaaattttctaaatttgatcaaaattgcttgcaggagtgtggctgataatatagtttgaatacaattgtagtattatgaaacttaataacgtgacatatatataaatctacccatttctcacattctttgttgcatattaattgcatgaat

SEQ ID NO: 119562 - DNA, 370 bp, Glycine max
  unsure (1)..(370): unsure at all n locations
agcttagggatggaatacttacttgntggtgatgatcanaagcgcataacggaatcaaaaaatgcgaanaaggatgaccctagggctgcaaattcgtcaatcccgtgggtatggcttttgaaaggggggaaaagaagttttgaatgtaaaaacgccccccctttcgtcatttttataatttggtgcaggggtggctcgcccagctagcccaggcgagctaacctgcacttttntnnttttttntntncnnnnnccgcttgaggggaacataatccatgtccccttcctttnatgaatagcatcgcgcctaacttgaacttacttaggttacaattaagcggtgatacttaatctattctaccctttcctt

SEQ ID NO: 119563 - DNA, 418 bp, Glycine max
aagctgtcagtggctagacatgatacatgtacggctcggtctggttcattggtattacggatgccccacattattttcatgactctaatgcaaacatgatgatgtcgacacacttatgcataactggtcatgcatgcatctatgcgagcactcaattggcaaattattatggccatgtgatgccatggctcatgatcatttccctatctaaacaacccgatgtttgacaaaatatgtaacttatatcaatatagtgcattcatgcgagtccatttgcggcagtcgcgatatttacaacattcacccttcaggtgtagacacattttccaaatattggctatgatcaatgaattttctcatagaaaagtggaaccatgtctttcataagcatgtaggtttttatctagcaacttatttt

SEQ ID NO: 119564 - DNA, 466 bp, Glycine max
  unsure (1)..(466): unsure at all n locations
agctntctatgtggataaaagagctntaaaactgttaggagtgttattgttggntatcgattataaatgtcttaatcattttctcaaagatgatcagtttccaatcccgaaggcttcttcactcccaaccttgatcagagaatcaaacttattttcaaaggttgatctaaaattaagtttttggcaacttggcttaaaactagaagatcagtataaaacagaagatcagtataaaacagtcttttgtgttccgaatgctcagtaccaatggacagctcttccttttggtttaaaggtatcaccctctctcttccagaaagccatgactagatttttagcctattttggaaacatcattgtcacatagatgatatccttttctgttcaaaagacattgtctctcataaaaacttatcgaatcacatctttgagatagccaatcagtatggcatcatgctctcagaaa

SEQ ID NO: 119565 - DNA, 430 bp, Glycine max
aagcttcttgcatatgaattgatcatatgcttcttgcatatttcaacataactgacataggttcatattcttttgcatgctcttttgcacagaaaatagaagcttatagtgcaagagctatttccaacaaaacaaatagcaatgattgacagttagcttagctataatgaagcaatttacaagtttgtctgcatatagaaacactagtgaaatgattcgataacagggtaacttttaagataaacttttcatacatagtgatttatgattagataatagtattaaaatggtttaccatatcaatgcataacctattttctcaacttggcttttccttaagtggaattatctatcatctactatgagactgatatctacaatacataatcagacatgcctataatacagctcgatctgaccaaacaaattt

SEQ ID NO: 119566 - DNA, 90 bp, Glycine max
gtgattagaagtgagacattgtttcttcatgggaatggaactactgcataagtttgtcctcggaacttaaaggaaaactcagctatttat

SEQ ID NO: 119567 - DNA, 392 bp, Glycine max
tgtatgtataccatgatttgatgatgtcaaagaagaatctaacaaggctgcttcatatgataagcatttgcttcaagaataatttaaagatgcttcaacaaacaaagtcttgtttcaagattcactaaagaccaagccttgccttaaaacaacgtgctttcaagacatgcaatgctctggtaatcgattaccagaaagtgtaatcgattaccagaagacagggttgagaaatagctggtgaaaaaggttcttgaattgaattttcaacatgtaatcgattaccatatgtttgtaatcgattaccagcaacggaactttggaaattcaaattcaattcataactcttcaaattataactgtgtaatcgattatacaaacattggtatcgatta

SEQ ID NO: 119568 - DNA, 335 bp, Glycine max
  unsure (1)..(335): unsure at all n locations
tcgtatccctgtttgtatggcaaggactcctcgtggtaagagcttgtctataagtgtgtcacctgatgtttctccgaaacgtatcataaggggaagaagtttcaatgaacgatactcttatgctataatgtatatgactccctctcagtctccccctatgatatcataccgctatagtggctatagtggacgatatgaccgtgacatgtaaactgacaaagttgcatataatttctaattagtcaacatcctantgtggtattgagaatgatgttaaatataatacattttacactctctgctttcagatattcaagttacagaaggtactcccc

SEQ ID NO: 119569 - DNA, 328 bp, Glycine max
  unsure (1)..(328): unsure at all n locations
aaatcgaagaagagagtgccaaggggctgaacccttttcttcttcacttcctcccctatttatagcaaaataggggaggtggttgccgcccagttcgcccatgcgagccatgttgcttcctccagaagcaacagccttctggaggaatattctggagggcccaagtgggcctgggtgctatttgcacccncatttntactaactacacccacatctggcttttggtgattccttgtttcgtannagtacggaaacttacgaatttcgtaacgatactggttntctttccgtaatgttacggaaccttgcgggatacataatcattccc

SEQ ID NO: 119570 - DNA, 420 bp, Glycine max
  unsure (1)..(420): unsure at all n locations
tctgaagaaggcataacatgagcttatgattggattacatcgtctgttacctacaaataataaaaattataacaacatcactatttgtgaaccataacataattaacattcgattaaacaaaatgtattacatacttctccaaatctatgtatgtattgcttccaaaaagagaaacagtagtagatttcatggtttacgctttggtactaatgtcaagaagaagttaaagagggatatatgagaacgagacatagtgaggttgtgagttagtgtatatgatggcaatacatgcattgtatntatagaaaaaaactaacaataaattgattcattcgatgggatcttggtcgttgaatttgtcggtgggatcttaactgttcaacgtgtgttgctccaatcgatgatatctanngtcgtca

SEQ ID NO: 119571 - DNA, 324 bp, Glycine max
  unsure (1)..(324): unsure at all n locations
ttatgacgaactatcccggcaagacgatgaggaatgagatacccatcttggccccctgctccacctcaaagatccgtgcccccatgaactaccccaactgaacataatccgccatatcccggcctcacccacacccgtaaaagaatctgttcccttcgcggaagataagggaaagattgaggcgctngaagagaggttacgagcagtcgatggccttggcaattacccattctcggatttagcggatntatgtctcgtgcccaacatcgtcatccctcccaagttcaaagtaccagactttgacaaatacaaagggacaacatg

SEQ ID NO: 119572 - DNA, 437 bp, Glycine max
  unsure (1)..(437): unsure at all n locations
tcgcccacatcgtcaaatntcagctactagagcttcttattcatatatgaccaagcatttgtatggcccatttcaaatcctctctcacatacttacagatngcagcttccagaagggtcgtgtatccatctggttttctattgctccactcttaaaccctttcattcttcgaccattgacaacccactggctttgccttcatagcacatcaacaataatcctattatcataccactgtcatttctaggaactcgttgggagatgggagaaggtgaacctcaattgcaagtactagtgcaatgagaagtgctacttccaaacgaaaccacatgggagatatgngccagtttgaaagctactcaccaccttgaggacaaggtgtngctagatgggctggggaatgataggcccaagactgaaaatggngaagacactcg

SEQ ID NO: 119573 - DNA, 407 bp, Glycine max
  unsure (1)..(407): unsure at all n locations
gttacttgtaaggtgcatttggcttaacagttggttnttcattcctcagaatagtactctcggaatgttattcataggaatctattaaacctgcatttggttaacttgacttttccttgggaatattgtaagctatttccataaatctccctattgtttgtttgagacaacattcttgtttatattccaaaagtatccctaataaccaatctatcagatccaactcggaggaaaacactgttgagtatttaccaccacatttcccaataatcttatgaataatcttcaagcatgacagccacatttccctttcattcttgattagtgttgtaatcgttgttgttataggtttaattgatgcagcacctgtgggcatggaaaatntagtgaaactacaatggaatggg

SEQ ID NO: 119574 - DNA, 444 bp, Glycine max
  unsure (1)..(444): unsure at all n locations
atgataatatcttgtattcatcattcttataaaataaaaaaatattaattatttttctaagattgagtatattattaaaaataagagataggattaataaatcactcaatgataatgatgctttaaacagaaagaaagtatttttttcacagcagcaaataaagtattataataataaacactaatccctaattgtgagaatggttaggaaaaaaaattattcattacaaganaatataaaatgatgatttaatatttattcgctgaatggtgaanaatatctcataaaatatacttattaaatatttattagacattgttataataaataatatatacatcttctgaataaatggttctgtatgtaaatcttgtattcttataataattaaatcaaatatattaatataaacttcattatttgacgatatactatctatcata

SEQ ID NO: 119575 - DNA, 411 bp, Glycine max
  unsure (1)..(411): unsure at all n locations
atcattggttcctttaaatggaggaatgttgagtttaataccatcaattcggttttgtctaagaacaccatcattccctcttctcctcctttcttcttcaatatgatctctattctccatttgatccaacctctcatggagcgcatcatctcgttgtttcattaacctctccaaatgttgcatcaaagtttgcatttggaattgcgaaagccccactccatcattatgattagtacctgacatctcanacaaacaaatcatacgcaacaagacaatatagttgctatttgaatacctcacccactcaagtgtatcacacaattatggctgttctctaatgaaatactctngccttttaccactctaattccncttgagttcttatgcaattcaagagattatggccacaac

SEQ ID NO: 119576 - DNA, 205 bp, Glycine max
attcttcagaaacaagcactttaagaatcgagacttgtggaatatatttctcgaaatcagtcactcgtaatcgattgccatcaatgtataatcgattacacatcaacagatgtgactcttcatgtttaaatttgaaaatcacaacgtttagaaactcgggtatcgattcaagtattgtgtaatcgattacacaagttctaaataa

SEQ ID NO: 119577 - DNA, 429 bp, Glycine max
agaagaaaatattggccgttcctgatcaatcagttgcgacattttagataaatatctatgactttcacgctcagataactacaatgcactgttttctctcgaatataatatagaaaatatatttatacgataaaattgggcaatattcttttattgtgatacaagtgaaataatatatgagaagagggagaagcatgaaacaaaacggcacgttggtgaaataatagagagaagtgtgaagaagaaaaataagtatgtaaaaaaatatgataaaagcttatggataatggtactaaaacaagaaaaattccaatgatactgctaatgcaccacgtactctttatggatcattcgcacgctacttaataatgtatgttttaaaataaaagaaatattagatataatatacgttatgcattcttattaatt

SEQ ID NO: 119578 - DNA, 303 bp, Glycine max
accttctcctacattggtgtgtcttcatgtttctctatgtatctgctcacatgtctcgtgctgaatgtggtttacatgattttttagaatttccaccaattgaacttgctgtacaagctagatctgattttcaatggttcaaatttcttgttcttgttcttgaaccatgaattgtgttgagtttacgttcctttgagctttgtattgctattcttgtggctgtagaatgaaccataaaactcttacaaaaacatttaagttgaataaaacctcaaaaatctatagtgacatgttcactgatca

SEQ ID NO: 119579 - DNA, 279 bp, Glycine max
  unsure (1)..(279): unsure at all n locations
taagtgcatataaggctacagacgtcttataattgatacatactgacattngtgggccatttcatacaccttcgtggaatggtcaacaatattttatcattcatagacgattactccagatatgcatatgtgtttcttatacatgaaaagtcacaatctctggatgtgttcaatacatttaaagtagaatgtgaaaatcaactcaacaaaagaatatagtgcgttagatctaactgtggtggtgaatactatggcagatatgacggttcatgtgaacaa

SEQ ID NO: 119580 - DNA, 446 bp, Glycine max
  unsure (1)..(446): unsure at all n locations
catcctactangacgactgaataactgggcaaatgaagatggtgagaaagatggagaaacccatgctgtgactgccattcctatacggccaagtttcccaccatacccaacaatgtcattactcagtcaataacaaacctcctccttacccaccacccagttatccacaatggccatccctaaatcaaccacaaagcctgtctaccgcacttccaatgacgaagaccacctttagcacataccataataaaacaccaacaaataggatatttgcagcaaaaggcctgtatggttcaccccaaattccgttgtcatatgctaaactngatcccatatccactcaataattcaatggtagccataaccccaaccaatgttcctcaacactncattttctgatgatacgactcgaacgcaacgtgtacttatcgtggaagagccctggg

SEQ ID NO: 119581 - DNA, 332 bp, Glycine max
  unsure (1)..(332): unsure at all n locations
ttctntgtgggtngatgggttctgtcgtgcataatgttatgatcattggctgacatattctcaattagctcaattgcttctnttgtggtcttcagctctatttttcctccagtataagcatctatcaattgcttggtttgtggtctcatcccatctataaacatattcaatngaattggctcggaaaacccatgggtgggagttcttctcaataaacactttaacctctccaatgcttcactcagagattcatcanggaactgatgaaatgaagagatagcagctttcccttccgcaatcttggaacttgggatgtatttctttagaaattt

SEQ ID NO: 119582 - DNA, 364 bp, Glycine max
agattcatttgtttgtttacacattgaccaactttcaatcgtcttataaacagatatacaatcccaacacgtagtcttttctctcaagatattcaaagtgttttcaagctattcaaaactttataagcatttatagacaacttatttacaaaaagaaattgaatttgagcgtttcaattggttcttcatgtcttcaaagcttttggtatttatagaccttcttcaacaaatgtttgttgtctctaaataacaagatttcttttctttatcttgcggctgaagaatatggccattggagcatttaatgttggcattaaatacacatacttcttcatactataactcgactcttcttggatatcat

SEQ ID NO: 119583 - DNA, 479 bp, Glycine max
  unsure (1)..(479): unsure at all n locations
ngcattatcatggaatattacttattatgttcagatactgttgataaatattgaatggtttattccgataggtactctatttgtcatcctatatttattgcacctctcctgtccctatataaataaaatatactatctaattatgaagtatttaaatttgatttaattctatttttataattatctttacaaatttaaacaatataaacagattctgaattgattaaattggctcatttttataattatctgatttaattgttattatatatgttccaatcatgtactatgttagattaactttatatattattatgtctctgtttctaaatataatactctttgtttcaaatttatttgtcctttgttataggattggtttcaagttatattctgcatgtaattattttaacacaaataccttagttactttacaataaatgttatgtattaaaaaaataaatatattatctctctta

SEQ ID NO: 119584 - DNA, 391 bp, Glycine max
taaagatgtatgcaataatatgacttttgtatccatgattgaacctaaaaatataaaagaagccatagtagatgataattggatcattgccatgcaagatgaactaaaccaatttgaaagaaacaatgtatggaaattagtagaaaaacctgaaaattatcctgtcataggaactaaatgggttgttagaaataaattagatgaacatggtataattattagaaataaagccaggttagtagcaaaagggtataatcaagaagagggaatagactatgaagaaacatatgctcctgttgaagattagaagccattataatgcttttggcatatgcatccataatgtgacttaaactttatcaaatggatgttgtgagtgcctttctaaatg

SEQ ID NO: 119585 - DNA, 283 bp, Glycine max
ggagcatgctcagatatataaggcaattttggttttgcattctcgcttgataacgttgaattatgggtgtgtatgggatggccctatgcctataatgcattgttgaacaatgggacatgccacattgtccccgctctcttgctatcgtctcctgaacgcacgcacaccaagtgttcggtgaaatgcctctatggcattatcgcgtgactttcgctatgaaacaacccatggtgcattttggtttgacacaatgcctgcttattgaatatgtattcattcttga

SEQ ID NO: 119586 - DNA, 414 bp, Glycine max
  unsure (1)..(414): unsure at all n locations
attttacacttatggtagtgaataggaaagcatttgcatcgttagatgttatttttgtttgcttatatgagttgtcccctatttcaagtaaaagcacgtggaagttgatttaaaaaatttaaaactaatgcaaaaattaattatgtaataaaatatattaaataactaatttattattgttctatatgtcgctattgtttgtctgttgcagagacgtgtcatttactttggttatacaccatgggggttcctttgttaaagacaaatttatagaatataagaaacatgatgttgatgcatataagataatgcaagatgttgacactcgatcatattttaaaggagttgagttgtngaaagagttatgctacgattgtagcaactataggttgtggtctgatgcaatcctacccc

SEQ ID NO: 119587 - DNA, 427 bp, Glycine max
  unsure (1)..(427): unsure at all n locations
ctggatcttcttatcaatggattccgtttattcttgangtctgattgtagtggaatggagaacgagaaagatgaatggagacaccacttcaagtagaagatgagtctagaagaagcttaccaccatatgaagccatggataagagcttgaaggtagaagaagatgaatgaagggagaggaagagaagaacatgaaatttagtgcctctaaagagatctgaatnttgtagtgtaattttcaaatgatcaaagttgaaaaaatgcacactgttcacttccggcaagtgcaccggatcgcgcaagttgtataaacggaaagaaccaagtatcgaactctcanggaacttgtgttacttggtaaagctattttaatgaataggtgtctagtgtgaaaagagatgtgtttactatgaacaagtgtgtaaact

SEQ ID NO: 119588 - DNA, 480 bp, Glycine max
ctaagcttcgtcagcattcatgaaaaccatgttatttctttctagttagtgataaagctaaacgaaaaattagggaactaagaaaaactaaatccttaattgaatgagtaagagacaaccatagtgaattactaaacaataatggtgagttacttaagatcattccagaaactccccaaacttctgaaaatacatccaaaatggttacaagaagtacctccaaataaattaatgttattaatgaagatagtaaccaaaactcagaaaatgcaattgagataggatcagtatcagaaaagaatataaatccaattaattccaaacactggaaaacaccctctaaattatattatcaacgttcaactgcccctgaccttctattagaagaaagaggtgataaacaatttaagagtttagtgcaacaacatctatgaatggacatagatgacaaatggagataacatcatgatacactcaaca

SEQ ID NO: 119589 - DNA, 251 bp, Glycine max
tctcagctgacaactagaatcagtgtcatatgccgtttcttgttgacttcaccacttttatctatgacaattgtgtgtggctgatcatattccgcttgtctgtctcatgaaatggaggagattgtaaatccactgcctttgcggtcttgatgatgatcatgatgatattatgcaatttttgcacatgggcttttctagatataattcaagacaatgcttctatattgacaatctccatcctctagatgatc

SEQ ID NO: 119590 - DNA, 473 bp, Glycine max
  unsure (1)..(473): unsure at all n locations
gtagtagatatgtaaatcctatgttacacaccataagtttctatgggattagggaaatgtcagttccaagccaaatagtacatgctagtatcgaacaacttatgtgtgtaatatgcaatttagttcaatatatgcaaattcagatgcagaagtctttcgatataaaggagatgagattaaatcaatatatggttgtattatgtgtttccaacagataccaaaaaacattntattagaggtgcttggaccttccaaagttttcaatgaagttatcaagaaaataatcaactcaactgtagctgaatacgtggagaaggtattttgccatatgctaaatctagtatttcctaattgtgttccttctagcaaattatgcagctaatagataaaaaagaaagggcagaaataatgtatattctataatggagagtgagaaagatccatctacatcaatggaatcctcaactactctg

SEQ ID NO: 119591 - DNA, 440 bp, Glycine max
ataacgaggaattcttagatactttgtcgtattacgtacatgttggtaacttagttgaatgtgactgatagacatttccatccgtaattttcgaccgataatggatctttactgacgaattatccatcagtaattgttgctacgaatcatcaatgttgcacttgggcttcattgggccttaataagtcataactgttacacttgagtcttattgagccataatcaatcatcagttttacacttggaccttatcaaaacttaaccattcattatggttacacttgagtcttattgatcattggtcaatcattagtactacacttacaccttattataacgtggtcaatcatcaatgtttcacttagaccccacatcgacactaatcaatgataagtgttatacttgatcactattgggtcttagtcaatcattaagtgtat

SEQ ID NO: 119592 - DNA, 177 bp, Glycine max
gaggcacctgttgaaattgaatggtcaagaatatttatcacccctgtagagctaaatgctttctggggaaaaatacggtgtcaatgacgaaaatgtgttctatggtaatgtcccatacctaactttgaatccaaaaaccagatgctgcaccaacccctacacctaaagccttcaatt

SEQ ID NO: 119593 - DNA, 306 bp, Glycine max
  unsure (1)..(306): unsure at all n locations
gtttcttacatggtgtgaattcagaggtggagtagtagtagcaatccatgtcattggtgtaagactgatcttccacacctttgntcctctccctcatggctttcttcagatggaggagcttcanaagtaaagtggaaaaatatgggaaggggttttggtttggtttactttaatttaactctgagagaaagagaaagaaaaaaagggacaccaaataatacttggcttgtagaagcagcttcctctatgaagctatgagtaaaaagtagagaattttgaatgtgaatgaatgaatgaataaagaga

SEQ ID NO: 119594 - DNA, 412 bp, Glycine max
  unsure (1)..(412): unsure at all n locations
caagaatgaagctctgataccactttgtttacatgtggcctcaaatatcttaagaagggngtgtgaattaatatattccaaactgtttcccctaattaaaaatctatttcacttttgtatttactcaagctatgaattcccttaatgacaatcttctaaatattaattcaaacaaagcaccttgaatatgaatatatagcaataataaataaaggagatcaagggaagagaaaatgcaaactcatttatatactggttcggccacacccttgtgcctacgtccagtccccaatcaacccgcttgagagttccactatcttgttaattcctttcacaagatctatacacacaaggactatccttcctttgtgtttagatatcccttacaacaagagactcacattctcttaat

SEQ ID NO: 119595 - DNA, 372 bp, Glycine max
  unsure (1)..(372): unsure at all n locations
gtctacaccttcacaactaatgctgttgggactgttggctcttaatatggtatcaatgcctcttgatcaatgctcgagtaggggtagaaatataacgcaataaaaggctcttgcatgaagaatcatgtctgaaaatgacgaatcatgtcagaaattccaactaatataatgagcttttgggattgtaggttcttgatctggcaaattgtgggatctatgcataggatatgttataaaaataggtcccatatcaatgggatcanatacagcagtatacatgtccccaacatactcatatatgtgttctattaacccaaactaaaccattgatgatggttgaaccctaaatatatccaggatgttgggaacaaa

SEQ ID NO: 119596 - DNA, 376 bp, Glycine max
tgtcaatccttaccctcggtagcgaatagaattgaatggaaatttccaatcaaagaatagataagatagaaaattccccaatcatagagtgggagaaagcataatgatatgaaagaaaattcccaatcaaagaatgggagaaagtataaaggaagaagaaaaatgaaagatagctcctgatcatggatcgaaggaaaacagatgaaatgtgcaaaaaggtctttggaccggacaatatctgaacaatacataattgtcaccaaatgaacaaatagaatgaaaggaaaccacgacctaaaatggtcttctcactttgattaccaaccaaaatcccgtgcgctatcgactttttcgccccgcactatacataaaacag

SEQ ID NO: 119597 - DNA, 473 bp, Glycine max
  unsure (1)..(473): unsure at all n locations
aatggcaatttgattgtcatacttcgatcaacatttacagagatgaatgactcgggaatacgcatgctatgcatggaaaatgtaattatgagattgagatgcccgaagaaacatcttttcctatttaaccacgcattatgtaccatgctcaatcattttgttttgtgtgaaacgggtttatgatcccaacatgattggctcatggtatcgaacatatgcaactaagaatgtagcgtgaatttccatgctgtcctttttttggttntttttacagaggaaaatgcaaggatcatgcatgagtaaacatgataacaaaaagtatgcagtttgtagaacaaaaagtatgtggaacgcatctgcatgatgatgcaatgactcatgcacaatgtgatgctggaatatgatatcggatatatgcaggaacgatattatgatgcatgaagagatgctatgtatgcatgtatgaatcatta

SEQ ID NO: 119598 - DNA, 483 bp, Glycine max
  unsure (1)..(483): unsure at all n locations
taagctgaatttcattttagaccaaatccaatattttcatctaggtcattaataagctgttcattatttgactagagaatattctttgaattatccctattctttctagactttagcttataaacttaaaagtttaaccatgcctaagtatcctatggtagcattnttttctttaccatctcaacagtttgaaaacactacccaatcagacgacaaagaaataacattgtcttgcacacacatggaaaattgggatgttacaaaaagccacacgagagaatcatatcttgattcgttcgtttcaagtaaatttcaagggcaaattttcttttaaggaaagggaaagtgtaacattctttttttaaagaaatatatttataaaaatatattacgttttattaaatattgtttgttggtggttcttgtgaataatactaacaataataataaaattatgttgggtaaatgttgttgagcttaatt

SEQ ID NO: 119599 - DNA, 241 bp, Glycine max
catccctcctcgttcagtggatctccaaattggctttgctcacaagacattgtccgactgccgtgggtcttggaatagttgagtggccgaaactcagcctgatgcatttctttaacatgaaccttagatatgttttttggaaaccgattggggtgttagattctagcattatttcgttgtcatttatattgaccttgttgatttatttctcacctaataatttggctttgcaatatggcta

SEQ ID NO: 119600 - DNA, 304 bp, Glycine max
catcttcaccactagtatatttgcacatctccatcgtgctcttctctatgttcgtaagaaagctgtctggtatggaaagctaaatcctttgtggatcttgcctgtatgcaccctgtgtaaatatatatctatctatctaatgatgatgtgcgtgtactctgagctatatgcctttcattccaatatgcctttaccttgatcacctatatgcatgctctgttatggtcattcaatagtggatactggtctgacgctaaattccttgatagtgcagggctgagttgtcgtgctttcacgacgaatc

SEQ ID NO: 119601 - DNA, 237 bp, Glycine max
tccacactaccaagcaacatctttttttcccatagctgagttttatggtcccctcaatactgaacacatttggctctgactccatctatgaaacaattttttgatatatttcaactggccattgtgtgacatgccaattctcttaaacaatatgataatcaaatattgtgactgtaacaagaagtctatataaaaattttatagttcttctcttgtgaaccaatatgaaactgcttg

SEQ ID NO: 119602 - DNA, 439 bp, Glycine max
  unsure (1)..(439): unsure at all n locations
tgaccactgatgttattttttcttgaaacacagtcgatcaaatgctttgttctttttctttttgaaactatttttgctgtactcgtgtgtttacggcatgctcaccaaatgtgtagcacgaataatttctgattgaatggtctttgaagtccaaactcatgagcgtatgtcgcttgatcatacaaaccaatggctcgcacccatattccactggaagcatagatgtaattacgagatgatgaaggacaaagatgtcaatattatctatgttatttagcattgtaactatgtgttacaataatggcataaacttgaaaatgctgatgagtcattagagacatctaacaacagctttcaaaattgccccatgtgtggtgtcgtttgtcaatgttangattcgcaagtgattctcctcaaatttcagtcaatctgcatcaat

SEQ ID NO: 119603 - DNA, 427 bp, Glycine max
  unsure (1)..(427): unsure at all n locations
gacatatcatgaaatacaaaaaaaaagtttctttacaaagactactcanaatgcctcgaaatacaatgctaataccatatactactagaatgaccaatatacattgcctaaacgaaggaaaaaacatattctaatatttagaaagataagcgggctcatacttagcccatgggctcaaaatctaccctaatgctcatgataaccctatggccttcccttggatttctggcccaatctacttggagtcttctatccaatgcccttgcggggtatgattgcatcattccctccaccttggaaaggatttgacctcaaattccgaggttcttcatactctgggctccttccctcaacacctgtataaagaacaaaaacatatgtattaatggtgtttgtgtatgtgaataaaggaaggtctgaaaaccca

SEQ ID NO: 119604 - DNA, 417 bp, Glycine max
  unsure (1)..(417): unsure at all n locations
gagagactatatgtcctttgatggaagctaatatcctttccttgatagcttctatattcttattccaacaagaatcgtgtgaagaattcactcttgattcgctcccatgaggttagactatggtgtggttgagaattgagccattcaagtgcactttcccctaatggataaggaaaaagtaccatcttcatgtgattgtctttgatttcggatattcttactaatatgcatatttgttggaatcgcataatgtgggtgattaagcatccttatcttattattttgctatgcttcttagcttattcgacctgtctttgaatcctattttctcaccctaattcaatttggtcttatgcaataatcgncttaattgaaattgtcgctattattcgcattgacctactgttctatcttcct

SEQ ID NO: 119605 - DNA, 448 bp, Glycine max
  unsure (1)..(448): unsure at all n locations
ctggattcagctaatgactactttccttatcacccttatgttcaatatgttggatttgccctgaattttctcctttgaaaactcatttatttggaaatccttcccaagacaccattgaaccactgatggaggctttggaggaagattataaagatggaaataagataaatgaatcaaggtagtttattgaaggagtattggatcttgaaaagagaatcaatagactagatacatcgacttagaaattaaatataacaaattttgtcattgttgaacaaattattagcttataaaccaaatctttaccatttgttaatatgttttccttatttctgatacgagcataataaaatgacatgaatgttcaaaaaatcaaactacaacatgatcttgtaggatttagcaatatgtttgtntgtgtatgaaaggtatgtnattttataatatc

SEQ ID NO: 119606 - DNA, 477 bp, Glycine max
  unsure (1)..(477): unsure at all n locations
gtccacggaggaaatgcttaccacctcataagactggatagcggtttctaatgattcctctgctgcttccacataatgcatatatgatgggcagctcaccaagatgtctttctcgcctgatacgatgaccatatacccttccactacgaatttcaactnttggtggactgttgagggaacaactcctactgagtggatccatgggcgccccaacagacagctgtanggagggttaatatccattatttggaaagtaacttgacaggtgtgagggcctatctgtactgtgagatcgatctctcccctaacctctcggcgggtgccgtcgaatgcacgaaccaccattgaactcggttttaagtgggaggcattgaatggtaatttctccaaagtgctcttatgcatcacgtntaaactggaaccattatcgatgatcactntggctatgatatggtccatacacttgactgatacgtg

SEQ ID NO: 119607 - DNA, 380 bp, Glycine max
  unsure (1)..(380): unsure at all n locations
cccacgccgtcacanacccactctctatcgcggcccacggttccacaacggcacattccgatgtaatggcatcgaacccgccaagcatgccgttacacacgtcaatcacgttccagtggccagccaataaccgcttgctgaacaacgtcgtcagatccgcagtgctcccagccaatgtcgtcgtgacagctgtcctccctatagcgctccattgaccataataccctccacttccataccccttggctattgtcagaaacgaaccatggttgaagccgtaccagccgaaccatatcaataacgaaccaagcacaactaaagacgcgctgtggccacgtaaagcaaccgaccggtccgaacggtcgaaccggtcgattctc

SEQ ID NO: 119608 - DNA, 414 bp, Glycine max
tcatgatgatgaatcaagctgtctcacgtagttttgttgttatcatatattgtgacaatctgccaaagagaatgatgtcaagattgagtcagcaagttcaagatcaagattagtttcaagtttgatgatatgaaaccgagaagattcctgaatcatgagaagtttgatttcaagattcaagagaagatgaattcaagattcaagagaagagatcaagaatacttcacaagggaagtattgaaaatatgtttcaaaaaacaaacatagcacagttttgtttttcaaaagagttttttgctcaaaattgtctaagttaccagagttgttactctgtgataatcgattaccagtttcctgtagtcgattaccaatagcaaagtttgatttcacaagctgtgaactgaatctgcaacg

SEQ ID NO: 119609 - DNA, 260 bp, Glycine max
ctattatccggtgagctgtgtgaatcttaactgtgagataacgactagcatcaagtactgatttttgcatgaatgtctgaatgctgaatggatacatgatgtggaaatgatgaaatacatgtcgaatctatgttgctactgagccatatagctaccttgcatgattaatgaagtatacccttgcgcgcagcgagcctagtatgagtgaacactatcctgaaccctatctgaagtaaatcaatgatatcatgccttgttat

SEQ ID NO: 119610 - DNA, 462 bp, Glycine max
  unsure (1)..(462): unsure at all n locations
tactgaaggaaaatctatgttcataatgtgtacagaggaataaaaaggggtctatttgcatataaattatattaaaaatgataagactttaaacatgtacctattaatcagctcttgaatttcaaaaaattcttcaatagtgtgaagattctatgtgtgtccacaccgagactaacctctattatcaactactttgatgagcagaatagaaaaaatttagaaaacaaaccttanaatattntggtgcttgtgtactgagtgaagaggaagaaaaaatgataagtgtttttcaacgtgcaaagaatataataatattctacttataaaattaatgaattattngatcaaattaaattctctaatttaatcatcanatattaaaatagtttctttaatagacattagagcattcgtttgtatatgaccccatatgttcaatactaagccaataatatattaatc

SEQ ID NO: 119611 - DNA, 277 bp, Glycine max
  unsure (1)..(277): unsure at all n locations
cactcgcatctttttatgtggttcttgaatggctatcacatgcctatatatatgtgacctgagacatgaatctgacaatgagtgtcttgaacaacaacgtcctatcctgttaanaataatgatcgccttatgctcttacagattccttggccacaacacttgtgattcaataaggaattatgtgagtgctcaaattgatcaatctatctctttcaagagagatttcttcttttcttcgtctccattctgaatagggattaaaagaccgagggtctct

SEQ ID NO: 119612 - DNA, 451 bp, Glycine max
  unsure (1)..(451): unsure at all n locations
cacacacttctctatagactaagtcacctnnctgagatgagaagctagagcttagctacacacnccctataatagctaagctcacccccatgacatataaacatgaaaatccaaaaaaaagtcctactacaatgactactcataatgccccgatatacaatgctaataccctatactaccagaatggccaaaatacaaggcccaaacgaatgaaaaacctattctaatatttacaaagaatccaaccttgacccatgggctcaaaaatctaccctaaggttcatgataaccctatggccttctttagtagttctagcccaagcctcttggagtcttctatctaatacaactggggggtaggattgcatcangcttggtgggcctcgactcacctaatatatagtgactattatngataatgtccaagaagatcctttaaccattaaatatt

SEQ ID NO: 119613 - DNA, 190 bp, Glycine max
  unsure (1)..(190): unsure at all n locations
ccctacaacactgatccatgaaatggatatgtaaaggcggcagatcaatgancgcgatctatcgctgaaaatcaaaggcttgcatctcggaggatgtaaacgcctaaaccattgagattagccccgaaccgtctcagacattaaggaacggatccgtgtgagcccgcctgaatcggcctaacgaaacacg

SEQ ID NO: 119614 - DNA, 484 bp, Glycine max
ctacttgcctggttgatgtatctattctgagtttacacacactgttctgatgcttacttcttctgtaactccactagatcatatgtttgattttcaactaaggagtgcatttcttctttcatgacttgcatccatttctcattatcatctatctaatcacttcctggatactctgatgttccccatcatcagtgagattgacatattcatcagagaaatacctctttgatggttgtctgactcttactgatcgcctcacttgggattcatctttcgtctggacagtctccattggtgattcttccatcatctaagttggatgctccatctgactctactccatctggtcaggttgttctatccgaagaggttgctttgtctaattggtttctatcatctgagtgggttctccctctttttgaaaagttattccactaagtttctattatgggctgtgacttctcagaatcgttgatatcatgta

SEQ ID NO: 119615 - DNA, 382 bp, Glycine max
  unsure (1)..(382): unsure at all n locations
aaataaaatgaacatactatntcataatagtggaatgtgtagaacacatcaatatttgttgtgaattctcatacaatcttaatgtttttttttactacttttgtaaggcaagatgagaaatttaacaattataaattaaacttgactaatatgacaatctaaatgacatgtttatgctaagatgaccattcaaatgaaaattaaatttataatcatcattaaaagagtaaaatttcttaagtgctatgtttgccaaatatgttcgaaaaataaagaacatttatgaaaagaatatggattgctaacaaatattgatcattctagtatagatataatattgtataaataaataagtccgcataaaggatattgaatttgttga

SEQ ID NO: 119616 - DNA, 359 bp, Glycine max
gacacttatatactcagccttgacctctgtgtgatggagtatgagaattgaactatttcttatccatcgaatataaaactcatacatcgcggtaatatctaattgcaataggggtggctagtttaggactctgaactaaatgtcaagaagaaaggcggctagaggagtacaatatggcgatccctttaacaagaattcctggtgagtatccatttaacaagaatatttaccattcaactcaatcctcacgtatttaaaaattatactatgcctgtgttctatcagtaaatatcttttttgttggaacatcttcccttgaagctattttcaagcatttaaaaatgggcatttcttataat

SEQ ID NO: 119617 - DNA, 368 bp, Glycine max
  unsure (1)..(368): unsure at all n locations
ttatgggaggatgtacatgccatntttgctttaagagtaatgtcccactaaaactaactttccaaatgtttgccttcgcatgaatggccccgatgaagcttgcctcatagatgtccatgaatgacaaggcggccgaatgaactatttccgccccggagtacgacagtcaccgctttatgagcattgtgcaccatcagcgcttcgaagccatcaagggatggtcgtttctccgggagcgacgcgtccatctcatggacgactagtatactgatttccatgatgaaatatggcgccggcggtgggcaccactggttactcccatggccaagtttgatccataaatagtccttgagttttatgccaatgct

SEQ ID NO: 119618 - DNA, 416 bp, Glycine max
gcttttatagttggcttacctttatctttaaagacttttaaaagctggagctgggcctttatagtaaacaagccgagccgagtcgagccttacataggccgatccaaatgcccttgacaagctactcggctcatttccacccctatctgccgtcatgtccgcaacataatcatacattgtagcggtagtggcatgtgtgtcctccatcgtctcctctggtgtcacctctggcactggctgcgactcctgagctgtatgagcctcaccttcccccgcaggagaatgctggactcctggtcatgccacttgggccatgaaatcctccatgctgatgatgggccgatgctgagccaaatcgtgaatgctctgcattactaggcataagccatggtgaaggctctacaacatcggcacca

SEQ ID NO: 119619 - DNA, 379 bp, Glycine max
  unsure (1)..(379): unsure at all n locations
ctcaaaccaaatatcacagctttttctcacttaaagaccccagtaacatgtgcttcgttccaattcgttaaccggtggatcgactcanaaagtttactggaagtctctagtacataagcatacattgtgaccgttgggatctagtagcatacatccagaactcattctgcactactctgtccacaaccaacataacatagcatttttctgcacttatgcaaaattctgctgcacaatttcacagcaaaattctgcataaagtgcagatttcgaaaaccacactgtctctcaccaatcttgcccaaatcaaatcctacaagtcccaaatcatgtatcaatcatgtctaaaccanagtcaagcttctaaacacagcaacac

SEQ ID NO: 119620 - DNA, 396 bp, Glycine max
  unsure (1)..(396): unsure at all n locations
aattatgctgacattcattgagctccttattggggttgtggttattgtgggtgtagctcgctacatcattaaagggtattccgccactggtgtgttatttgtcggtggcctgttattgctgattatcagtgccattatggggcacaaagtgttaccgtccagccaggcttcaacatgctacagcgccacggatatcgttgaatacgttaaaatattactaatgagccgcggcggcgacctcggcatgatgattatgatgctgtgtggatttgccgcttacatgacccatatcggcgcgaatgatatggtggtcaagctggcgtcaaaaccatngcagtatattaactccccttacctgctgatgatngccgccctatttgtcgcctgtctgatgtc

SEQ ID NO: 119621 - DNA, 193 bp, Glycine max
attgtgatttgatatatatatagatcttatatatgccaattgtgtttacttttttattatgtgggtaatacttttttgtataattttaacaatgcctatacaacatgtattatgatataacaactaactacactaaacctatatcaagttttaaaacactatgacattttaataaactaaccaatttatctaa

SEQ ID NO: 119622 - DNA, 487 bp, Glycine max
  unsure (1)..(487): unsure at all n locations
taacactgttataatatgtcgacatatctttttacaagagtttaacttcataagaaatgttctaacgttagacttttctccttactcctacatgaacatgcatgatgcacatatgaaatgatagagactaagatgcaacacacaatacatcaatcaacataaatgccactcaagagagttggacatgtaaaagacaaaaacttcttcaaacttcaaggctaagtcttcatgttgctccacctatctctaacaacaactntntctctatagtgcgtcactccttgtaagttaaatccacttgataattttcacttttgttccaattcttccttatagtatcagtttttgttctcattcaaagcaagaaactatgattgaaactttcaacaatggtggtaggtgagtaactggataatgttgattcgatgttaataaaaagtctagattcacctttattttgaaatttcaagagatattatcagttatc

SEQ ID NO: 119623 - DNA, 285 bp, Glycine max
atgctgcgactgtcattcctacatgaccaaactgtccaccagcccaacaatgtcattactcagccaatattatctcctctccttacccaccacccatttatccacatatgccatccctaaatcaaccacataacccacctaccacacatcccatgctatacaccacctttagctcaaaccatatcaccaaccatataggaattttgcagcaaaaagcctgtacgattcaccccaaattccggtgtcgtatgctaactcgctcccatatctactcgacaattcaat

SEQ ID NO: 119624 - DNA, 347 bp, Glycine max
  unsure (1)..(347): unsure at all n locations
caaactaaatggctgagtgtaactgaaatntgttggcatccaatagtcacccncaacatccaacaagtcatccaccatgttgtctccaaaaagctgatgcctatgttgccaattgggcccttattacaactagaactaaagcccttttatttgattaacccaaaacatatttgtggtcagccaactttacaaagattgtgccattatttagacaaactaaacactctaaaattgaaataaagtggtgtcatttagtcctccatttgggccatgatacaactcacaaccttggacttttctccttgaaacttgtgcttgtattcatataatatggacagcacttgttg

SEQ ID NO: 119625 - DNA, 334 bp, Glycine max
  unsure (1)..(334): unsure at all n locations
ggaaaattgtattatgcatttgatatcaaagagaatgaagacatggttctaatttctgcagagcaattgagagtgaaagacaagtctataaaaactatggcacaagctgcacaacaacactctctgttggaggaagagcttaaacaacataagaaaaagctcgaggaatcatctgagggtcaactaatcttggaaatcaatngctgcagatggaatacaccgtacaatatgatagaagtgcatctaatgtgccatcattttctttattntctaaaccctttttgcacatgtaattactgattgtcttaatggcaattaatcaggcagtttatta

SEQ ID NO: 119626 - DNA, 289 bp, Glycine max
taggtggactacttgaaggggttttttttccaacccccacgaaggatattaaatcctactagaccttcccaggacctttcgcgaactcctatcttttccgacatgtgtaccttgtcacttgggataaaatctggatacgatgattgaacttatacttttatctaaggtaggcacccccctcttacggtaattgttgctattgaccccatcactccttcaagtattgggggactctcttctggtatccatgaggactcttaccatcattgttcctgccgccggaaatcct

SEQ ID NO: 119627 - DNA, 329 bp, Glycine max
  unsure (1)..(329): unsure at all n locations
gaaaatgctcatgcattttcattcacatgcatatttgntatcttgtgacatggacatgatcgctttaatcgatggtcaaatacttgcgccgatccaagacagacatgaatcgaggtaagtggtagcgtggccatgttgtactacgcaatgtcctttctttgtttcaggtgctcggggacagtacgagtagacgctatgcctacaatcatcatgtcgtcgccccgcgtccggctccagacgatcaataatcactactggaaggccgcctagtatcctttaaatntctgcctgttatcattggtatttctctaaggtgatgatcggatatg

SEQ ID NO: 119628 - DNA, 321 bp, Glycine max
tcacgttgagattatgcacttttggacttatgaaatgtgaattgacttgatttatgtttgcttaacttttatgtagttatgctttgtctttgcatatagaatttttcccaactatgcaaatgaagccaaaccctcaatgttcaaatgtagcttggttggaaagacaagtaagttgtttatgtttgaaaaattgtaaaataatggcaggaaagtcgtttacaaattacaaccatgtcctaattacacaattttgatgtcatcaattaattcattgttccttccaactatgaaattatacatgttatgcaggaagagtacatg

SEQ ID NO: 119629 - DNA, 470 bp, Glycine max
ctttacggacacttagatactaagctttcattattttgactcggtggtcacatggtttcggcattttattctcgtttggttactttttataccccctggtgacgtgcttaagccattttacttaagtcatttctcgcttaacttaaaaataaaataaatttccaccgaacgtttgaattgtattatccattaacttcggttaaaataaattccgaccgttcggtcgtgccgtaaccacgttggaaatcaaaaagaggtaaaaaataatataataatcaaaaagacatcttttagtaaaataaagcggaaaatcaatcggacgttttctctttgggatttctcattcttaatcgaattgattaataactaaagtgaaactaaaggctaaaatcaattcgcctagtcaagctcgtccataaaaatagggctttgaagtttgcatttcattttctcactaagaaaatggatca

SEQ ID NO: 119630 - DNA, 430 bp, Glycine max
atgatgacaaagatgatgacaaaaagctcaaaagttaagatcacttcatgataacaaagatgatgacattcaagattgagttcaagattaagtcaagaacactttaaggatcaagaggaaatgtgatttcaagaatcaagtttcaagattcaagaataatcaagatcaagattcaagactcaaagattcaagaatcaagagaagacttaatcaagataagtattaaaaagtgtttcaaaacattgagaagcacaagaagtttgttacaaaatcattaccaaagagttgtactctctggtaatcgattactagattatagtaattgattaccagtggtttaaaaatgttcagatttaataattaaaatgaagagcacatctgtggtgtgtatcgatacccttatggtatcgatactatgactttttcgaaa

SEQ ID NO: 119631 - DNA, 308 bp, Glycine max
gtggattgatattgtgtcaatttacacacatctatagctcatatcctttatatgttcaagcctaagctttatacttgaattaagaatgtctttaaactctgaccactatggaaatcataatggcttttttaacatttactatatgatgttaccaacgtcttcattcttactagttcatctactaatttgtgaaactgcatggagctgttactatcatttaataatgcaactgaacaaaaaccattgagaataatcttttacagggtagaatgatctattctgatattggtcttgtgacgaacaagaat

SEQ ID NO: 119632 - DNA, 322 bp, Glycine max
  unsure (1)..(322): unsure at all n locations
atactaagtatgtattacctatactcaatagaatatacttataacactacaaaataaccataaatgtggagagtgtgatacaatttatacaagttttatacacaaaagttagtcgttgtcaccgactaacaaaattcaaattctaattcaagtgaaatttgaatagaaagtttagaccttgtgtgtgcactttgtgtgacacttaagttataaatagaggtcttgtgtgtgcatttttcaaatttgatgaattaagaaattagacttcanagttcagacctcattctccttcttctctctctgaaatttgtgttaccctttt

SEQ ID NO: 119633 - DNA, 381 bp, Glycine max
  unsure (1)..(381): unsure at all n locations
tgtgatatcttgtggtgtcaccctgatgcactgaagttagtcaatgcatgtaatttggtgtttntgataaacagtacctacaaaacaaacatgtacagactctcactgcttgattttgttggggtgacaccaactgtgatgacattctttgccgtgtttgcatatctggagggtgaacgtcataataatgtggtttgggatttaaaacgcttttgaggtatatttttaagatgtgatgtccttcctcgagttattgtcactgacaaagacctaacattgatgaatgtagttgaaaattgatttcctgagtgtacaaatttgttgtgcaactttcacacaaacataaatgtgaaggccaaatgtaaattgtaactggtcaaa

SEQ ID NO: 119634 - DNA, 452 bp, Glycine max
  unsure (1)..(452): unsure at all n locations
ctttgtaatactcattataccaaccatctcaatagttcaagtaactaaccccatatcagaacatccttgctgaatcaccaattatatagaacattatcacacataatcaatggcaacacttgttacttatcagtcatgcctacattgtccttgttaccaaataacagtcaaaatgctcatagacacttaaaaatgttcaaaaagaacaaacataaaagaaagaaaagaatgtaactttacttaccatggatgtggtgggagagaacaagagctggcataaggagacaacatcaaatgatgtgcaacaacacacagcaactgaggttgttcttcatcatcatatgctatgctatgtatgaatgtatggtgaaccaacaaanaaaaaaaaaaagagttttgctttatcagcaatgtgatacatagtgagtggagaaaaggggcatctcaagttg

SEQ ID NO: 119635 - DNA, 448 bp, Glycine max
  unsure (1)..(448): unsure at all n locations
tctaagcatcggatagctacttcagttgcccatctgcttgtttatgatagacagtgctcatcttcaattgggtgcctggtctcctgaacaattccttccaaaagagactcatgaaaagtctgtctgtgtcagatactattaatgcagggaaaccatgcagtctcaccacttctttaatgaataactcatctacttccttatcttatctgtataagggtgacttaatgcaaaaaatgagcatacttagtcagcatatacactaacactaatatagtgtccttcccttgagcttctaatatacctccaatgaaatccatggagatatcagtccacaccttatttggaatatgcaagggttgcagcaaccctacatgggctaatgtactggccttatntctctgccatatttcacatgtagcaacatattcccttatagttgtcttcattc

SEQ ID NO: 119636 - DNA, 383 bp, Glycine max
  unsure (1)..(383): unsure at all n locations
ntctctcttataatgtgttgtcgctggtattccataccgtcgcaatattattatcttgagtgatgatacctctagaaaacagccatgtgagatatggatcgttgggagtagttattatagacccctagatattatcctataggtccctaaaatatgggcacgaatcgaacacgctgcgtgccttttaaacactgtcatacatataacccaaatgtcatgtacgcctctgttgataattatttgtggatattgccatactctgtgcatccccgtgttatgcttttgcgcgtctacatcatgtcgtcacgcacgcgttgtgtgtnggtctcgtcttttatcatgggaagccggaagatccatatcaccttcttatactgcacaca

SEQ ID NO: 119637 - DNA, 73 bp, Glycine max
taattgaacttctagagaagcctcttatgaagcttcagagaaaactacatggagcttgcttcggaaaaatgct

SEQ ID NO: 119638 - DNA, 397 bp, Glycine max
  unsure (1)..(397): unsure at all n locations
nntctctctgtatatgtgctgtcgctggtattccataccgacgcaatatttatatcttgagtgatgatacctctagaagacagccatgtgagatatggatcgtctcgagtagttattagagacctctatatattatcctatatgtccctataataagggcactaagcgaacactctgcggcctttgaaacactgtcatacatataacccagatgtcatgacagcctctgatgtataatatatatgtggatattcgccatactcgtgtgcatcccccgtgttatgcttttgcgcgtctacatcatgttgcaacacacgcgatgcgtgtatggcctcgtctatattcataggaaccctgaacatccatatcatcgtcttaaactgacacatggggcact

SEQ ID NO: 119639 - DNA, 241 bp, Glycine max
  unsure (1)..(241): unsure at all n locations
agcttgtgccgcgttttgccgtaacaatacctgcgatcgcgggcttcgatccgcgacatttaacaattcggtgaaacccncttgctgtatcactaggctttgcttccatgaaaacgtatttttgctcgtcgtgtacgtgctgcgaaatgtcctgtactgtgcacttagaagctttgccctctcgttaagaaatttagaacttcacaagtctagcaagtatataaattccaaggacagagat

SEQ ID NO: 119640 - DNA, 311 bp, Glycine max
actcagctctagcatggtagcactcagtggccatctgctgaggatatatactttgctatcttcatcggtgcctggctcctgaacattccttccaaaagagactcatgaaaagtctgtctctgtcagatactattaaagcagggataccatgcagtcttactcacttcttaatgaataactcagctactttctttacttagctgtataaaggtgactcagtgcataacattagcatactctagtcacatatacactaacactaatatagtagcctttccttgaacgtctaatcaacactccaatgaatatca

SEQ ID NO: 119641 - DNA, 328 bp, Glycine max
taaagagagaagggggagcacgtaattgaatgataaaaaagggagagaaggtgtactttgaggtgtgtctcaaagactccattcatcaagtacaacagtgtaccatggcttttataatatgtagcttctcagaagcttttgaaaaatttcttggagctttttgaaaactcttggagctagactactaccacccctctataactactacctcttgaagctcttaaaattctaaaaataagtactccatcctttatactactactctggaggagtgaattctccccccttaactagtacctgaaaaagaatcaaaagctctcaatctaag

SEQ ID NO: 119642 - DNA, 397 bp, Glycine max
ctcagcttatgacagaacaagttgaactatatatgcagagctattggtatactcattataccaaccatctcaaaagtacaagtaactaaccccagatcagaacaaccttgcagaatcaccaaaaatagagaacataaacacacataatcaagggcaacacttgttacttatcatcatgcctacattgtccttgtaaccaaataacagtcaaaatgctcatagacacttaaaaatgttcaaaaagaataaacatataagaaagaaaagaatgtaactttacttaccatggatgtggtgggagagaacaagagctggcaaaatgagacaacaacacaagaagtgcaacaacacacagcaactgaggttggtcttcatcatcatatgctatgctatgtat

SEQ ID NO: 119643 - DNA, 422 bp, Glycine max
  unsure (1)..(422): unsure at all n locations
agcttactgaccacncactgtctatatgcttggttgttgttcacttctctgcagcaattatggttatgcttaaatgtctttatctgaaaagaggttctaacttcattcttcgcacagtagatttcccaatcacaaaatgccttctttgcatttgctctancctttgttatcattcttcttccacttgaactccctgcccatcaatatgctatactccctcgaggcagattaaattatctagagaccaactccatctctattcaactctgtcaccactcactattgatatttgggaaactcacatctatctatatactactatgggaataagtcttgatatacatctgctacttagctcactcatcacaacagagaatataacactacattgctatactgcactctttctctatatacacatt

SEQ ID NO: 119644 - DNA, 479 bp, Glycine max
  unsure (1)..(479): unsure at all n locations
tcttgaacgagatcagtatattcattggcacanattaaaggacgaatacgtggtttgtgatatcttntggtgtcaccctgatgcagtgaagttagtcaatgcatgtaatttggtggttttgataaacagtacctacaaaacaaacaggtacagactctcactgcttgatttgttggggtgacaccaactgggatgacattctttgccggttttgcatatctggagggtgaacgtcttaataatgtggtttgggatttagaacgcttttgaggtatanttttaagatgtgatgtccttcctcgagttattgtcactgacaaagacctaacattgatgaatgtagtgaaaattgtatttcctgagtgtacanaatttgttgtgcagctttcacacaaacaagaatgtgaaggccaaatgtaaattgttaattggtaaaaaaatgcttgggatatgtatgaatgccagngaactcttgtgat

SEQ ID NO: 119645 - DNA, 337 bp, Glycine max
  unsure (1)..(337): unsure at all n locations
gctgcagcttgagtctcctagttacatagcgatatgttagtatctctttcaaatcgacgatgcccactcttttcctccatnttcgattgtctctcttctccttccaaaaccctgtttttattctgccaactaccaaacttatcttaaaaaaacgatgaatctagatcatttccgctggatccgtcttgaattgaagcaccgggtttgaaactcaattacgaggcttttcaccgttgggatttatgagcaaatgttggaactgagagaaataccattcactttgtgactgtgtatttctcggcaaaacccagagttgtctccgtaaaaatacgatcgt

SEQ ID NO: 119646 - DNA, 457 bp, Glycine max
  unsure (1)..(457): unsure at all n locations
tctaagctgcctataacctgaaatggataaatgattataatcgcaaatttgataatctaagttgtattacctatctcaatagagaatcttatacactacaaataaccataatttgggagtttgatacaattatacaagtttatacacaaaagttagtcgtttcaccgactaacagaattcaaattctaattcaagtgaaatttgaatagaaagtatagaccttgtgtgtgcatttngtgtgacacttaagttataaatagaggtcttgtgtcgtgcattttcaaatttgatgatttaagaaattagacttcaaagttcagacctcattctccttcttctctctctgaaatttgtgttccactttttccctctccctgcactcatcttgtcctaccttcaaacttttatccatggcttcctatggtagtgagcttggtcttgacttatcttcatcttg

SEQ ID NO: 119647 - DNA, 304 bp, Glycine max
  unsure (1)..(304): unsure at all n locations
atttattctgataacagtaatgttgaacgctctggagcaactcaaggactgagtgacatcagattttctcttatgaccgaaaaagtactagttagctggataattagaggaactttcaatgcgatgttngagtcttttattgaaccctatacatggaaactatatatactttcgataagaaaaattatgatactaggatagtgggtttatatagcaagctgggtatttatagtaaaaattggaaactaacaagaatcgtggatgactattcgaaacatattgttggtattctagtattagaata

SEQ ID NO: 119648 - DNA, 254 bp, Glycine max
  unsure (1)..(254): unsure at all n locations
cgtgctctgaganatatagtnggcatcttatctctataaaatatatatctttagtttcataattcatacaggcgacgcccttattggtattgactctgattctatctctataaagacctcacaatatgttgtcggacttgatatacgctacacattctccaagacaatccgaaggctcattatctctttatatgctcacgctatatgctttatacgttgagttaaagaatgatctttgagcctcttgaccacta

SEQ ID NO: 119649 - DNA, 320 bp, Glycine max
  unsure (1)..(320): unsure at all n locations
tataatagagcatgtgtacactggtgtacttgatgaatgagagcttggagaataactcaagntcacctctctccttttcttcttcaattttgctcccctctctcttctctcctcttcttttctcattgagcatctctcaacttttatcaagctatctggtgggaactcttttcatggtattcctagggagggcctcttacctctcttgctccgtgattcatgggaatacataagactataactaaatagctctaaccccagcactcatagggataaccaactcagaggcctaactctatntgtactcctcatggtctatt

SEQ ID NO: 119650 - DNA, 269 bp, Glycine max
  unsure (1)..(269): unsure at all n locations
actaatattcatatatgatataacatgcaatggttttagaactatgctaagttaatatgatagctgcacatcttttttgggtctcttatctgtgatgatgaaatgcgattattgcacctattaccttaaacaaaattgtggtcctnctttttcactttcattgtctatacctaanaagatcaaaggtatagacaaatatgacatattngcatttattatcatcatcttcatatttgcattaattatcatcatcatcttcacaaaatact

SEQ ID NO: 119651 - DNA, 368 bp, Glycine max
  unsure (1)..(368): unsure at all n locations
tatgcacccgtagtggtccacattgcgtntcgtgcgttntattctcgtcttgttactatntataccccctgttgacgtgcttaagccattatacttaagtcatttctcgcttaacttataaataaaataaatttccaccgaacgtgtgaattgcattatccataacttcggttaaaataaattccgaccgctcggtcgtgccgtaaccacgttggaaatcataaagaggtataaaataatatagtactcaaaagacatcttttataaaataagcggaaagtaatcggacgttctcttgggatactcatcttattcaatgataatactaaaggaactaaagctaaataattctctagccagctcgtcat

SEQ ID NO: 119652 - DNA, 456 bp, Glycine max
agcacaagtattgttgtcatgactgaagctattatttcttttcatccccgagaatctcacgttgagattatgcgcttttggacttctgacatgtcaattggcttgatctatgttagcttactttatatgtagtcatgctatgtccttggcatatagaatctccccaactatgcgaatgaagccaaaccctcaatgttcaaatgtagcttgcttggaaagacaagtaagttgtttatgtctgacaatatttaacataatggcacgaaagtcgattacaaattacaaccgtgtcctagttacacaaaatggatgtcatcagttaattcatagctccgtccaactctgaagttatacatgttatgctggaagagtcatgcttgctaaccagcaacgagatgctgcagccatacgaaaatggaagttgaacaccatctactgatgatgtgccacttcatg

SEQ ID NO: 119653 - DNA, 368 bp, Glycine max
gcgtgtcgatatattactgggacttcaatcgggacattccgaattcataagttattgccggttgaaattgatgtgagacctccttttctaattgtagcgtctggattatattatgggacttcatccgacatctgacttgaaagtttttgcggtttaattctaggggcatctggtctgaattcgaatggctcgatcattatgggactcaatggacatcgaagaaaagtttttcgttgaattgctcagatttgtttaaatggacattcatgttacggactattgactacataaatgtatgtgttgattgccaacttcgtttaattgacgttcatttacggactatggctccagaaatattgtatgattgt

SEQ ID NO: 119654 - DNA, 439 bp, Glycine max
  unsure (1)..(439): unsure at all n locations
gctcatgcatangcatgcacatgctattattgtatcttgtgaccaggacaagatcgctntaagcgatagtcatatactgcgccgaatccaagacagacatgaatcgacgtaagtggtagcgtggccatgatgcactacgcaatagctcttcttgctttcatgtgctcagggacagtacgagtagacgctaagcctacaatcagcatgtcgtcgcctcgcgtccggctccatacgatcaagaagcactactggaatgccgcctaggatcctttaaatttctgcctgttaacattgttatatctctaatgtgatgatcggatatgcctaacttatcctatgaggcttcctgtaatgagcatcgacccataaaaacacattgtcttcgcacattttctaaaacatgcacaggtgtagctcgctaggcgagctgagctctcct

SEQ ID NO: 119655 - DNA, 352 bp, Glycine max
  unsure (1)..(352): unsure at all n locations
cttagaaaattttggctaaagaagggactctagacaatccctttaatggctgtggtatctaccccaaattgaacggagtacttttttataattgtactcagcacttcatggtggttagggatgcatcaacatataaaattcttaacacttttttgtgagcttccttgtgagacaaagataccattctctggttggctcacttncattgccaggaatatgacatgaagtccatatctgtcatatcagattcacgagacatggacgtctttgaagtcttcaaacaaatttggggtattgtccgttaagataaggtcatncanncataagacaataagtaagacattaccattat

SEQ ID NO: 119656 - DNA, 198 bp, Glycine max
  unsure (1)..(198): unsure at all n locations
ctctcacttgagggtctctaggagtataactcatgtgcatgttctatactagagatttgccaaacttgatgacgagagtgaaagactcatcttcatccgttatgatataagctcaaacgtgtacaagttcgtcaaccccantcattagaagatggtagtcgccgagatcggtgttcgcaaagaaggacaatgggaatt

SEQ ID NO: 119657 - DNA, 172 bp, Glycine max
tcttgctactcatatatacaatccgaagatctgcctaactgcaagacgtatataaagcttgactggatgaaaagatcgtatcacctccagaactgtggatgatttgtaactcacactgtctgttaaacgtcctcttatctctatgcgacatcatataattaatgcttgacct

SEQ ID NO: 119658 - DNA, 204 bp, Glycine max
tagtgaccttgaaactcagctttaaggggcgacatacttgagagagtgcggtcactaatctctgctccacagaagtatcttatgagcctctcaagaagttcctcaaggaagctctctgcgaacacctattcttctttcgaaacatggtacacttgttgtgacttggtgatgaagtctagtgaacacagactggagtcaacttct

SEQ ID NO: 119659 - DNA, 474 bp, Glycine max
aagaggtgcataaacattgcgcctcaattgtcaagtctatagaatctcaatggggtgatcaagtggcaaagatggaagcagatattgttacttataagtctacactgaccaacaaagaataagatataagggagcttcagatggaattggaaaattgttatatgcatttgatatcaaagagaatgaagacatggttctaatttctgcagagcaattgagagtgaaagacaagtctataaaaactatggcacaagctgcacaacaacactctctgttggaggaagagcttaaacaacaaaagataaagctcgaggaatcatctgatggtcaactaatcttggaagacaattgctgcagatggaatacaccgtacaatatgaaagaagtgcagctaatgtgccatcattttcttctattttctaaaccctctttgcaccattttaattactgattggtcttaattgtcaattaatc

SEQ ID NO: 119660 - DNA, 226 bp, Glycine max
  unsure (1)..(226): unsure at all n locations
atcttgcttttcaatattcatagntgcttccatcaagaanttggtggtctggtcacttgtccgccttctttctccatgttcatcagaaatttatctcctagatctcactcagntgattcgagtgcctgctctgataccaattgaaattctgataccangggacagatgtcgtaccggatgtcacgacatcacgcttcagaacatgcagaatatatgtgtccgtatg

SEQ ID NO: 119661 - DNA, 481 bp, Glycine max
  unsure (1)..(481): unsure at all n locations
ntacagcagaatttagtaatgacccactaacctagaattaaataacttaatgccattaacctagggaattaaaacaaactaaatggctgagtgtaactgatattgttggcaaccaaaagtcacccccaacagccaacaagtcagccaccatttggtctcccaaaaggctgtgcctaggttgccaattgggcccttattacaacttgaactaaagcccttttagttgattaacccannaacatattttggtcagccaactntacaaggattgggccattatgtagacaaactaaacactctaaaattgaaataaagtggtgtcatttagtcctccatttgggccatgatacaactcacaaccttggactnttctccttgaaacttgngcttgtattcaaatagtatggacagcacttgttgaagagcgtccttggctttccttgctctagcccttgcataggtcctcaagtccttaagggat

SEQ ID NO: 119662 - DNA, 170 bp, Glycine max
tgactatgcaaaacttgcggtttcaacaagagaccatagcctccattctgagcgtatccaatctgatggaacaatgagttacccaattgtatcaacaacagtaccagaatgttgacaagctgacttctcaagttgtccagaatcccaaaaatggcaatgccatttgattg

SEQ ID NO: 119663 - DNA, 340 bp, Glycine max
catgcttaatattacttgttcttttatataacttgctcacttattagaggaggatgtaatgttcgtctattgggtctgtgcatatattttacgtcgtactatttaaatagttatatggtttggcaatggtaaatagactatgtggctgcacatatttgggacatatcatatccgactttgtattgtgacaaagattgcacttatgcatttatcatatgtgatattgatcacagtggtaatgtttcattctttataacatgatggagataaaattgatatgttatgtgataaatgagagggtggctgacctgggcgagttagttattggcactgcttgatt

SEQ ID NO: 119664 - DNA, 423 bp, Glycine max
atttaatcatcctgcgtggacgaatgagaacactggtgcaaatgacgagggtgagaatgaaatagaaacccatgctgcgactgtcattcctacatgaccaaactttccacagcccaacaatgtcattactcaatcaatattatctcctctccttacccaccacccagttatccacaaaggccatccctatatcaaccacagaacccacctaccacacaaccaatgctaaacaccacctttagctcacaccataacaccaaccatattggaatgttgcacaaatagcctgtacgattcaccccaaattccggtgtctgatgctaacttgctcccatatctactcgacaattcaatggatgctataaccatagccaagtaaatggtcacaccaaattccattgagcattgtatggccttgaacat

SEQ ID NO: 119665 - DNA, 315 bp, Glycine max
  unsure (1)..(315): unsure at all n locations
tttctagcttactaacccatattaaataatttcaaattagggactatactaattatttcaactgtngctcatatggcgggtgatttgtgcatgttaatctgcctcatgagaatttgtatttcatcgtgatcagcatgacaatgaaaacactattatngtgttgtcgaccaatggccacaataaagacgggccaccctgactatgatatatagttacttatgttggctttctttcacaacaaatatngttgttaattggttaatttctatgtagtngttgggtattcatgtttttcctggtatggattcttcaact

SEQ ID NO: 119666 - DNA, 443 bp, Glycine max
  unsure (1)..(443): unsure at all n locations
taacacagctggggtaatcaatgattgtgcgactattatcaattaacacanagagttttaacttcagaagagattttctgactctagaacatgtctccttactcctacatgaacatgcatgatgcacatatgatatgatagagactatgatgcaacacacgatacacaatcaacataaatgccactcatgagagttggacatgtaatagacaataacttcttcaaacttcaaggctaagtcttcatgttgctccacctatctctaacaacaacgttttctctatagtgcgtcactccttgtaaggtaaactcacttgataatcttccttcttcgtccaattttttcttatagtatcgttgtttgttctcattcaaagcaagatactatgattgatactttcaacaatggtggtaggagaagtactggataatgttgatctgat

SEQ ID NO: 119667 - DNA, 149 bp, Glycine max
gctcggccgtcaccattctatggtgaagttatatcaattttgccatcatcgcttatatcactattaggcgtacaccggcgttaaggcccatactgcttaaaaataccccccctgcatctcgagatgtgtaatataacatctgcactgga

SEQ ID NO: 119668 - DNA, 362 bp, Glycine max
  unsure (1)..(362): unsure at all n locations
ctggtgtgttnattgtcggtggcctcgtattgctgnatatcagtgccatatggggcacatagtgttaccgtccagccaggcttcaacaggctacagcgccacggatatcgttgaatacgttaaaatattactaatgagccgcggcggcgacctcngcatgatgattatgatgctgtgtggatntgccgcttacatgacccatatcggcgcgaatgatatggtggtcaagctggcgtcaaaaccattgcagtatattaacctantcttacctgctgatgattgccgcctantttgtcgcctgtctgatgtctctggccgtctcttccgcaaccggtctgngtgttttgctgatggcaacccta

SEQ ID NO: 119669 - DNA, 322 bp, Glycine max
  unsure (1)..(322): unsure at all n locations
cattttcttcgttccaattcgttaaccggtggatcgactcanaagtttactggaagtctctagtacataagcatacattttgaccgttgggatctattagcaaacatccagaactcattctgcactactctttccacaaccaacaaaacatagcattgttctgcacttatgcataattctgctgcacaattgcacagcaaatttctgcataaagtgcagattttgataacacacttcgctcaccaatcttgcccaatcaaatctacaagttcaaatcatgtataatatgtctatccaaagcaagcttataacacagcacaca

SEQ ID NO: 119670 - DNA, 321 bp, Glycine max
  unsure (1)..(321): unsure at all n locations
tttccctattggtcttgtgcctcaatctgatgggggtcggactattccaaccagtcaccctattggactctgctaaagattggtatctacaaatataactacttatcggccatcttctttttacatgcattactcaacacttctgagcctaaagggtttataatntgctaccaagcattctggctggcttgctaccatgaatgacgaactcacgggcttacactccaacaagacttgtggacntngttcctcgaccacctaacacctaacattgtggctccannatgggtatccgcactaaggatctttctaatggctcta

SEQ ID NO: 119671 - DNA, 251 bp, Glycine max
  unsure (1)..(251): unsure at all n locations
ctaagctaacagctttttatagttggcttgacctttatctaaaaagctnttaaaaagctngagcttggcctttatagtaaacaagccgagccgagtcgagccttacatatgccgagccaaaggcccttgacaagctactcggctcatttccacccctagctgccgtcatgtcgcaacataatcaacatttgtagcggtagtggcaggtgtgtcctccaccgtctcctctggtgtcacctctggcactggct

SEQ ID NO: 119672 - DNA, 494 bp, Glycine max
  unsure (1)..(494): unsure at all n locations
ttacgnaaaggttcatcaagtcaagtttaagtatggaagtaaccatcttgcaaaaattggggcaaaagatggatcgagttacatcgctgcttcgtctactgccaaacacatttaggactgtcgatgtccctgttacttccaatttcaccttacgaaatgtcatggaccatgttgaaaatctaaaattgagtcaaccccatgtcttgcataaaaaatcacaatacttcaaactgtgcatcattcacatacatccatccttttcattggttgcattgctcattgcattctttccttgaaaaaatgaacttaatcattattatcaaaaagaaaaaaacacgctttacggcgcccttaccgaacctgtgctagagctagagtaatgggtgaagtagaggaggtgcaagagcaaatgaatgccgacacggaggccttgaaagagaaaatggccacaatgatggaaaaagacgtcttgatattcttcaagaaaggttatc

SEQ ID NO: 119673 - DNA, 426 bp, Glycine max
  unsure (1)..(426): unsure at all n locations
ttacattgatggttgtatttatgggaggatgttacatgtccattttgctctaagagtaatgtcccactaaaactaactttccatatgtttgccttcgcacgaatggccccgangaagcttgtctcatagatgtccattaatgacaatgcggtcgaaagaacagttccgccccggagtacgacagtcaccgctttatgagcattgtgcaccatcagcgcttcgaagccatcaagggatggtcgtttcttctggagcgacgcgtccaactcanggacgacgagtatactgatttcctagaggaaataaggcgcctgcggtgggcaccactgggtactcccatggccaagtttgatccagacatagtccttgagtcttatgccaatgcttggccaacagatgaaggcgtgcgtgacatgagatcctgtg

SEQ ID NO: 119674 - DNA, 447 bp, Glycine max
  unsure (1)..(447): unsure at all n locations
cctgcggctgcagcttatcttnttaccacacaagcacaactacattctattcttttcccgcacttggcattactctgacctctgtctatctatgagcctgaaatggcggaagaagaacatcctataacgacacttggagactatcttgcacatgttgtgcacaggcacttttataggatgcgctatctcggctattaaagggtgtagtggtcaatctataattaagatngctcccttcaattggtcttaacacatctctcgatttcatgtaaaaaaagttaatggaccggatggggtaatgctcaccactacttactaatatattcacacaaaaaaaccactacttattaatatctgaaagtgtttaactatacattgtcattcaatattggtacttttaggtacactcattagattaagtaacataaaaaatacactaattagaaa

SEQ ID NO: 119675 - DNA, 429 bp, Glycine max
atggagtatgagaatagaactattcaatatctacttgttatccaactcacacatccgggtgatatttaatagcaacacgggcggctagtctacgactctgaactaaatgtcaagacgaaacgcggctagacgagtacaatagggcgatccctttacaacaatacctgacgagtatccatttaacaagaatatataccatctcaactcaatcctcacgtatataaaaattatactatgcctgtgatctatcagtgaatattctcttatgtaggaacatctgtcccttgaagctgtttacttgcacttaaaagtgggccatttttattatagaagatataatactgtatcatcagtccttgcaaatatccaaattctcctttaattctctcttcttagggccacacggaaacacaattattgatctatttt

SEQ ID NO: 119676 - DNA, 291 bp, Glycine max
  unsure (1)..(291): unsure at all n locations
agcttgtgtngatctcatatgggtggatcattctcgcttaatatagtgatcctgactggtctccctatgatttcacttagtgagagtgacctgacttacccattgtgaggcatgtcttgtcatgtactcctagacgtccgatgaggttttcactaaaaaacgtgtccattgcatgtatacttgagtctaatgtatttgttgcataatgtttgtgtctgaccttcattgagttaacaattgccgattgatgttattttttggaatgtgtgaactcgagtgagtgtgaataat

SEQ ID NO: 119677 - DNA, 481 bp, Glycine max
  unsure (1)..(481): unsure at all n locations
ggcttctacatatacttccataagaatataattttgtgttattagataatataaataaacatgaacatactatctcataatagtggaatgtgtagaacacgtcaatattngntgtgaattctcatacaatcataatgtttttatttactactcttgtaaggcaagaggagaatttaacaattataaattaaacttgactaatatgacaatttaaatgacatgtttatgctaagatgaccattcaaatgaaaattaaatntataatcatcattaacagagtaaaatttcttaagtgctatgtttgccatatatgtttgaaaaaaaaagaacatttatgaaaagaatatggatcgtaaacaaaatattgatcattctagtatagatataatattctataaataaatacgtcggcataaggtatattgaatttgttgaacatcaatcttagaattaaaggtaagatgatgtatgtccctagaac

SEQ ID NO: 119678 - DNA, 402 bp, Glycine max
  unsure (1)..(402): unsure at all n locations
cttagcactgcgctcagttaatctatngtggtaaactaaatacaatcaattaggaaagaaatgatatcgtaccacagtaagaattcgtcttattaagacgaacatgaattgagtgtttatttacctctcgcgataaccttactactccttttagaggtacgactgacgtactacaaagatggtcaacaactatatcgaccttacnctgctaccggatgatcgtgtgtcatcctttctctatttgttaccctttcggcaccactttacatactgattaaccttaatggcaaataattatgcagtttatcatttggcctactgactaatttgtgttttaattaattccgagaatatagcaatgggcttgaatccggaattgggcttggacttgaagatctcccc

SEQ ID NO: 119679 - DNA, 486 bp, Glycine max
  unsure (1)..(486): unsure at all n locations
tgtacctgggggttgagttgntatcttcattcttagagttgagcacccacttgtttcttgatgctttccttccttctggtaactccactagatcatatgtttgattctcaactagggagtgcatttcttctttcatgacttgcatccatttctcattatcatctatctcatcacttcctggaaactctgaggttccccatcatcagtgagattgacatattcatcagagaaatacctctttgatggttgtctgactcttactgatcgcctcacttgggattcatctttcgtctggacagtctccattgttgattcttccatcatgctaagtggatgctccatctgactctactccatctggtcaggttgttctatccgaggaggttagcttgtctaatnggtgtctatcatctgagtgggttctccctctttttgaagagtctatccccttaagtttctcattatgggctntgacttctcagatcg

SEQ ID NO: 119680 - DNA, 320 bp, Glycine max
  unsure (1)..(320): unsure at all n locations
atcctcagagtcacctgcggctgcagcttgannacttgacaggaatgtagctctgatactctcttgttagacacgaggcctcagatatcttaagaagggcgggttgaattaagatattccaaactggttcccctaattaaaaatctatctcactttggactcaattatgaattcccttagtgacatctcttaaatattaattcaaaggaagcaacttgaatatgaatataaagcaataattaataagcgagactaagggaagagataatgcaaactcagttttatactggttcggacacacccttgtgcctacgtccagt

SEQ ID NO: 119681 - DNA, 361 bp, Glycine max
  unsure (1)..(361): unsure at all n locations
cgacacttagatactcagcttattctnttgtatagacgagaagttctggactcattacgttgtctatatcacaaatcttggggtggatccaagtgctccgatcatacatcctcatactcatgactcggtggcatactcaccggagatatttctacgaagttatatcctagaaacaccagaccctacaacactgatccggaaatggatatgaaaggcggcggacaatgaagtctacaatctgctagaagatcaatagctccatctcgaggcatgtaaacgcttaatcctgagaaaaactcccaccgctcataataaggaacggtccgggctgcacccccttaatccgcctaacaaacacggc

SEQ ID NO: 119682 - DNA, 430 bp, Glycine max
  unsure (1)..(430): unsure at all n locations
aatcgggaggtaaatccaaatgtaacaactgaaaaagacaaaacagaggaagcanggttagaatagttgaagccatgctcgagaaccataaaaaaagattaatttccaagtcagaaaaattgaatgtcatacgaaaacaacagtccaaataattgatatagttcctaatctagaataatttagacatgtcgaatggaaattaaataatttttgtgcagcgtaatctaatgtattcatattttattcagaagttcctagatggaactaaattaaccgcatgcattgaaaacattaactgagagagaagaanaacccgataaggattccgcaatcaagtgaggaaattngcaatgtagataataaatttcatcatagaatcagaaatagaagtcaaaatcggaaagaatagtctagaaaattactttgtttg

SEQ ID NO: 119683 - DNA, 444 bp, Glycine max
  unsure (1)..(444): unsure at all n locations
ctaacgaagctaaagcttagctacacacacctctctaatagctaagttcacctccttgagatgagaagctagagcttagctacacacccnctataatagctaagctcacccccatgacaaanaaacatgagaatacaaaaaaaagtcctactacaatgactactcaaaatgccccgaaatacaaggctaaaaccctatactaccagaatggccaaaatacaaggcccaaacgaaggaaaaacctattctaatatntacaaagaatccaaccttgacccatgggctcaaaaatctaccctaaggttcatgagaaccctagggccttctttagtagttctagcccaagcctcttggagtcttctatcntaatacacttgggggtaggattgcatcangcttggtgggcctcgactcacctaatatatagtgactattattgataat

SEQ ID NO: 119684 - DNA, 170 bp, Glycine max
cttagcacggctgactgaacggaataacacttcccctcctgtgacctccagtgaaagaatacttcccggggaaggacatgagctaagaggagttccctcttcatgcaatatcctggtcgggtgatcacatttttgtgtatcaacactctttaagtattgccaggtggctt

SEQ ID NO: 119685 - DNA, 319 bp, Glycine max
  unsure (1)..(319): unsure at all n locations
tgtaatcgagtacacacatactgtgatcaggtaccatatcttatttttgttaaatattctcagcagacacatctgtttatgtggttcttgaatggctatcacaggcctatatatatgtgacttgagacatgaatttgacatgagtgtttttgaacaataaggtctatactgttagcaagaaaatcgntctatactcttacaaattccttgtgcaaaacacttgtgattcaataatgaattatttgagagctcaaattgctcagtctagttctatcgagagagatgtcttcgtatcttctgtttcattctcgaaaaggga

SEQ ID NO: 119686 - DNA, 287 bp, Glycine max
  unsure (1)..(287): unsure at all n locations
tttgctactggtaatcatacaacaaactgantatcgattccagagagtaaaactcttggtaacatgttttgaaaaaatcatgtgctactcatttttgaaaaaaactttatacttatcttgattaagccttctcctgattcttgaatcttgagtcttgaatctcgatcttgattcttgagatcttgaaccttgaatcttgattcttgactcttaactttctttttgagtctngaattcttcttgaatattatcttgaactcttgaatggttcttgattcacttgagtt

SEQ ID NO: 119687 - DNA, 459 bp, Glycine max
  unsure (1)..(459): unsure at all n locations
ctatgttcataatgtgtacagatgaataaaaaggggtctatttgcatataaattatatataaattgataagactntaaacatgtacctattaatcagctcttgaatttcaaaaaattcttcaatagtgtgaagattcttgtgtgtccacaccgagactaacctctattatcaactactttgatgagcagaatagatgagatttagaacacaaaccttaaaataatttggtgctcgtgtactgagtgaagaggaagacaatatgataagtggttttcaacgcgcaaagaatataataatattctacttatataattaatgaagatattgatcaaattaaattctctaatttaatcatcaaatattaaaatagtttctttaatagacattagagcattcgtttgtatatgaccccatacgttcaatactaagccaataatatattaatcaaattaatatac

SEQ ID NO: 119688 - DNA, 488 bp, Glycine max
  unsure (1)..(488): unsure at all n locations
gagatcgagtgtggatattacgggcgtgagtgattatgttatctcgcctgacacgaatatagcgaacgggaaactaattgctatcaaccggcgagctgagtgaatcttaactgtgagagaacgactagcgtcaagtactgatttttgcatgaatctctgaatgtctatggatacatgatgtggaaatgatgaaatccatgtcgaatatattttgcttctgagctccatagctaccttgcatgattaatggaagtaaaccccctgcacggcagcgagcccaagaatgagtgaacactatcctgaacactagctgacgtatataattatatcataccttgttataagatttagaagagcatcgtcttgatggaaagttctatgttcataattgtggatggggggtgattttattatagcatgacanataattatatcatcatcctgtcacttgtggaaaactacaggaaatggcataaccttgcttctct

SEQ ID NO: 119689 - DNA, 76 bp, Glycine max
aacggtgccaaagtaggtctgttaaaatcaatgactgccttacttgaccttctactggcggcaagtcatactgggc

SEQ ID NO: 119690 - DNA, 398 bp, Glycine max
  unsure (1)..(398): unsure at all n locations
ctacaatccctctggtatacacaattgtctggtattcatcatcagcatntctagtgaatttcagcatgaagaagtctcattgttgacctgccaatggaaatcatttgattttcttcataggacaaatattaagatgtaaattactaaaatttattaattgaatccaagacttgtcatcttcaaacttcctcatctgccacaagcaaagatgggtgttgctatcttgccaaacacacaacgagtctctaaaaactccatatattgtatcaaaaaagcaataatcgtccgaaagaaacagtgatatgcaagtcttcttctccaggtcaacagaaataattacgaattcagaatgaatggtttcttttcccttaataacaacccaattaatggtttcactc

SEQ ID NO: 119691 - DNA, 491 bp, Glycine max
  unsure (1)..(491): unsure at all n locations
taatccctttgaaataacggtgagagagttgccctgtattcatctattgactactttccttagcacccttatgttcaatatgttggatntgccctgaattntctccttcgcaaactatcttatttggaaatcctttccaagacaccattgaaccactgatggaggctttgacgacgactatatagatggagataagatcaatgaatcaaggcagtttattgaatgagtcttggatcttgaaaagagaatcaatatactagatgcatcgacctagacattaaatataacatattttgtcattgttgaacaaattattagcttataaaccaaatctttaccattagttactatggtttccttatttctgatacgagcataatataatgacatgaatgttcaaataatcatactacaacatgatcttgttcgaattagcaatatgttctgttgtgtatgaaaggtatgtcattttataatatctctcgacatca

SEQ ID NO: 119692 - DNA, 268 bp, Glycine max
  unsure (1)..(268): unsure at all n locations
tcctgagtatgacagtcaccgctctaggagcgctgtacaccancagcgcttcgaggccattaagggatggtcggttctccgggagcgacgcgttcagctcatggacaccaatctctgatttccaagaggaaatatggcgccgggggtaacatcatagtactccatggtcagtcgatcggaatatctgagtctatgctgctggcaacaagaggggcggaagaatctggtaggtaggatccgtgagcgccttcgcactctggttcgtggt

SEQ ID NO: 119693 - DNA, 462 bp, Glycine max
  unsure (1)..(462): unsure at all n locations
ntataccttactcatgcatcagagagagacatagacgcctattgtcgtaagctagttctcctctccatgatagcatctatatatatattccaccaacacattattgtagaattcatctttgatcttctcccatgatgttatactatagtgtggttgagaattgagccatacagtgcactcccccctaatggaaaggcgaaaactagcatcttcatgtgattgtctatgatttcggatattcttactaacatgcataattgttggaattccgtcaggtgggcgatcatacattttagcttattattatctattcttctaacttatttgaccttctttgaaattatttctcacctaatcaatctcggcataggcaaatattgggctaattgaaatcgtgctcatttcgacatagactactaacctatctgcttgtgcaaaactcatatctcaattatcgaacac

SEQ ID NO: 119694 - DNA, 345 bp, Glycine max
  unsure (1)..(345): unsure at all n locations
atatggaagtgagggacaaggttaaactccttccatatangacctantgagctagtccaactttgtataagagtggagcaacaacttaaaagaaagccttcttcaaaatcttatggctntcactcttatccaaggaaggaccaagccaaaggaattttgggggctgcaccttcaaaatccaaggaagggtagggtatgaccatagagaaatacacccctaagactaggttccggagaaagactagcaacattaaatgcttcaaatatcttgagagaggtcacattgcctctcaatgccccacanagaaaaccatgtatatgaggtgtcaagaaaattatagtagt

SEQ ID NO: 119695 - DNA, 492 bp, Glycine max
  unsure (1)..(492): unsure at all n locations
tacccccatgacacaatacatgagaatacagatatagaaagtctctactactaagactactcaaaatgcctcgaaatacaaggcttaaaccatatactactagaatgaccaaaatacaaggcctatacgaatgaataaacatattctaatatttataaagataagcgggctcaacttatcccatgggctcaaaatctaccctaaagctcatgagaaccctagggcctctccttggatttttggctcactctacttggagtcttctatccaatgcccttgcgtggtaggaatgcatcattccctccaccttggaaaggattcgacctcaaattccgagggtcttcatactctgggctccttccctcaacacctgtaaacagaacaaatacatatgtattagtggtgtctggtatgttgaagtaaggtaaggtctgaaaacccatctcctgngcatcttcccatgaaagaacatggtttctcaccaactccatg

SEQ ID NO: 119696 - DNA, 400 bp, Glycine max
  unsure (1)..(400): unsure at all n locations
ctcttgctacatgtgcagatntctgattcttggcatgctgagttactatggtgaccaacgcatcangttttcccttagcttttattttcagcagatgaagatggatccgtggccacctcatggactnctctaaagacaataacatcatttcttgcactgaattattgcgagtgggaagccatcttctcaatcaaattcctagcctcaacaggattcatatcaccaatggctccaccactggcagcatcaatcatacttctctccatgtttctaagtcccttatagaaatattgcagaaggagttgctcanacatctggtggtgagggcagctngcacataatttcttgaatctctcctagtactcatacaagctctcttcactaagtagcatgatgcctg

SEQ ID NO: 119697 - DNA, 470 bp, Glycine max
  unsure (1)..(470): unsure at all n locations
gataaacatgagctcacatgaatgtctatatctttacttgtaaacacagtcgatcaactgcctttttctttttcttcttgaactattttacgctatactgcgggttatacagcatcctcaccaaatgtgtagcacgagtaatttctgattgaatggtcttgaagtccaaactcaagagcgtatgtcgcttgatcanacaaaccaatggcttgcacccatattccactggaagcaaagatgtaattacgagaggatgaatgacaaagatgtcaaattatctattttatttagcattgtactatggttacaataatgcataaacttgaaaatcctgatgagtcattagagacatctaacaacagctttcaaaattgccccatgtgtggtgtcgtttgtcaatgttaggattcgcatgtgattctcctcaaatatcagtcagtctgcatcaattagactgtgcaccttacgct

SEQ ID NO: 119698 - DNA, 410 bp, Glycine max
  unsure (1)..(410): unsure at all n locations
agcttgcttatttactcgagacagactatatatgcactcttgataaattaaactcttattctaaactgcaattaatcgatatatcataatcctgcctctgataaagcttgctgaaaagggaggctacttcaatctattaccatagttgacttactaannntaaaaacagataaatgagactgctgactctgatttataaaagattatgacatgatgaggaaaaatgtatgaaagctctangaataatagtactatgtctaaaaaaacaattatgttaaaatgatatgatataatatttattaaaaaatagagagattatgctatctgaaatattttactatgttgattcagcaagcttataacatctcatacttatactattagactattatactaatctcataaaaatt

SEQ ID NO: 119699 - DNA, 346 bp, Glycine max
  unsure (1)..(346): unsure at all n locations
tgtgtgaagatctgcagagaccagagcttgacacaagagccagtttgagagcttgagatgagtctgagagagattgcgagatcctanaggtgatggagactctgcaccacttgtctatttgcactctctcatctggttcttctctatgttcttaagaaggcttgctggtgtgcgaaagctacatcctttgtggatcttccctgtaggcacctgatgtcaatatatatctatctatttaatgatgatctgtgtgtgctctgagctatctgctcttcattgcagtatgcctatacctggagcacgtatatgcatgctttgcttggtcatttcatagtggaactggtct

SEQ ID NO: 119700 - DNA, 339 bp, Glycine max
  unsure (1)..(339): unsure at all n locations
ttgtgatgacaattcacaatntatttngaagagaccagcaatgacatcttatctggcagtcaaagactggtaaagatggcattccatcggttntaatggcatcccagattttggatcttgtgtcatttagtttaatttgactctaacattaactagtttgttatttaacctgctatgtttattaactattaagaaatacattagagccattacatgcaatcactctttcataaaaaaaaatccactttgttctnttgctcatccctatgggggcataatagaattcccaaattgtaggggtttcggattatcagatntaaaaaatgcttaacctgacta

SEQ ID NO: 119701 - DNA, 482 bp, Glycine max
  unsure (1)..(482): unsure at all n locations
tctcaagaagccattacgaagcttcttgatgaagcctcttaatgaatgttcttgaggaagctacatgagctgtctcgtgaaaaacgatgcccagcctccgtttacagttgtatctactcgaaattnggtctatagcttcacaagacaattgtccacgatctgccgttgggatcgttgagaagatgtctggagtgtgcgcgaagcttccgttcctgagagcatttctcatttaagcatttcagcctttgctttcatgtagcttatgaaaaacaccatttcttcttctttctttcttccaaagccatttctaacgtcccaagcattttctccatcacccacagccaccattatccaccacaaaccgtcgttgttctccgttgaaccgctcactgagaggaacccttcgatcgaagcggtatctttcaacttggctcttggttcgggagagaacgaaactctagtccgactcttcatttccttcc

SEQ ID NO: 119702 - DNA, 488 bp, Glycine max
  unsure (1)..(488): unsure at all n locations
atgatgcagatgggtttgtagctacctcatgcactcctctaatgactatggcatcatttctggcgctaaactgctgggagttggaagccatcttctcaattaaatntctggctttagcaggagtcatgtctccaagggctccaccactggcagcatctatcatactctctccatattactgagtccttcataaaaatattggagaagaagctgttctgaaatctgatggtgggggcaactggcacatagtttcttaaatctctcccaatactcatacaggctctctccactgagttgtctaatacctgagatatccttcctgatggctgtggtcctggaagcanggaaaaatatctctatgaatactctcttaaggtcatcccagctcgtgatggaccttggagcaaggtaatacagccagtcctttgccactccctctaatgaatgaggaaaagcctctataaatatgtgatcctctcggacatctg

SEQ ID NO: 119703 - DNA, 253 bp, Glycine max
catctaggtcattaattagttgaccattattcgactagagaattatctttgaattatccttattctttctagactttagcttaaaaacttaaaagtttaaccatgcctaagtatcctatggtagcattttgtttattacattctaacagtttgaatacactacccaatcagacgacaaagaaattacattgtcttgcacacacatggaaaattgggatggttcaaatagccacacgagagaatcatattttga

SEQ ID NO: 119704 - DNA, 242 bp, Glycine max
  unsure (1)..(242): unsure at all n locations
cacacctaccaacgaaggagcgacaaccacgacgtatgtgcactctttattttcctttttaaaatgaattttanggtcattgtgattcaaaagtatatatatatatatggcaagtgaatgtctgggagagtcctttaccggagactaacaacattcatctcggtcgattaaagaatatgaaagttggaatgcttcatatctcaatgtattctttagttattaatctttggttttcaaatttt

SEQ ID NO: 119705 - DNA, 402 bp, Glycine max
  unsure (1)..(402): unsure at all n locations
tcacagagatgaatgactcgggaatacgcatgctatgcatggaaaatgatatcatgagattgagatgcccgaagaaacatcttttcctaagtaaccacgcattatgtaccatgctcatcatcttgttttgtgtgaaacgggtttatgatcccaacatgattggctcatggtatcgaacatatgcaactataaatgtagcgtgaatttcatgctgccctcttttggtttttttcataggaaatgcatgatatgcatggtaaactganaaccaaagtatcatgttgtaaacataagtatgttagcgcatctgcatgatgatgcatgactatcaaaagtgatctggaattgatacggaaaatgcggaacatttatgagcctgatagatcttatggatgctgatta

SEQ ID NO: 119706 - DNA, 291 bp, Glycine max
tctcagctgtttcacttgataactctctttaaatgtcgcaaatatatctgttctcactcatattagtctgcaacatatcttttttccaggatgggaccactctcggggaagtcctttcaacttttttattgcatcccttagagattcttgacattgctagctttctctagcaccctcccactcccttcaatatcataaaacttatggaagtggagtgaatacactctaagcataatgtgtcctcataaccatgaaaggacttggctccatagaacaacatgatgcttgcaa

SEQ ID NO: 119707 - DNA, 416 bp, Glycine max
  unsure (1)..(416): unsure at all n locations
gaaaactctttctaggaacttttaaagtaagttcagccaatgtcagagatcacccgaccactgcactggctcaacaaaggcaagatataaacggtatataaacaaaactttaacaaaaatgaaaattagtaaattactgtggtgctgtttactttcagaaaatgtatcgcagttttatttttatttttaacttcaattacaaaaatgccaccttttttcactttgtttcctgttctcaaatatttctataggaaatagtgaaacaactttttattgttttcactgtttgtaacaaaaactttggaaaacaagatacatagtgtaaagagttgaaaatgggtaattaaaagtaaaaataaattaatgaaaacaaaacattntctgaattttctcaaaccaaacaacacctatatttt

SEQ ID NO: 119708 - DNA, 394 bp, Glycine max
  unsure (1)..(394): unsure at all n locations
tataatatatcaccatttacatgtcntcaccttcacaactaaggctgttgggactgttggttcttaatatggtatcaatgcctcttctatcaagggctcgagttggggtagaaatataacgcaacaacaagctcttgcataggaatcatgtcagaaaatgatgaatcatgtcacagattccaactaatataatgagcttttggactgtaggctcttgatctgtcacacttgtgggatcttatgcatatgaaatgttatagagacagaggtcccagagcatcgggatcaaatactgcatgtaacatgtcccccaacaactcaaatatggtttctcaataaccccacactagaaccacgtaatgatggtgtgaaccctagatagagtcatggatgt

SEQ ID NO: 119709 - DNA, 334 bp, Glycine max
tctacactatgtacaaaaatgaagctctgataccactagttatacatgtggcctctctattcttacgaaggcgggttgatattaaatattccaaactgtatcccctacttaaaaatctatttgactcgtttctgtactcaagctatgaatctccttaatgacaatgtgttgatattaattccaacttagcacctggaatatgaatataatagcatctatattacgagataacggaagagacaatgcaaactcaactttatactcggtatcggtcactacgcttgtgcctacgtcctattccaaccacaccgcttgagagttccactatcattgc

SEQ ID NO: 119710 - DNA, 467 bp, Glycine max
  unsure (1)..(467): unsure at all n locations
cctcaattagtggatttcaaggtttaagaagtgaanatgagaatggngttattttggagcaaactctcatctcaaacaagtctataacattaatctaaactcactcaaactggttttacacgacactccaccgaatcaaaatttgacctctcaacacccaatttaccctagaaatggctcttgctttcactttggtcactcatnttccncatntgctcagcccaagctttcccacaagtcctaaataacattgtaaactaggattanatcactttaacctccaattaccactaaatccagaattagctgttcaaaccctcaaagcatcacacttttccactcatatcactacattcacaccttgtaaccctaggttaactctacccttcatctctatcnagtttctatcagaaaattcaacacacaaacatcacanaacatcatcatagaaccctaaaactgaatgg

SEQ ID NO: 119711 - DNA, 466 bp, Glycine max
  unsure (1)..(466): unsure at all n locations
tgaccaaacggtcctggagacaataagcacatataccaacagaagaatatgatgaagaagggtgtttcttacatggtgtgaattcagaggtggagtagtagtagcaatccatgtcattggtgtaagactgatcttccacacctttgttcctctccctcatggctttcttcaatggaggagcttcanaagtaaagtgaaataatatgggaaggggcttttggtttggtttagcttagtctagctctgagagatagagatagataaaaagggacaccaaataatacttggcttgtagaagcagcttcctctatgaagctatgagtaaaaagtagagaattttgaatgtgaatgaatgaatgaataaagagagagaggaagcgcaaaggcgtttcctttacgtattctttgcaggaaaaaacagtgataggaaggaatataaagagagataaaataataaaggagtgat

SEQ ID NO: 119712 - DNA, 346 bp, Glycine max
  unsure (1)..(346): unsure at all n locations
atcttcttcataatggagtccttcgcttcttgattatcaatgacagnggcatgcataatgaagaaaggtgattggagatgcctcttcaaggagaagagagtcactaacaagttcaccaccataggaagccatggataatagctagaacgatggataaatgactggagggagagggagagaacgtgcaccaaatntatgcctcgaatgatgtctacacattgaagtggactctctaaatgatcaacgtataatcattgcacactaaatgcctctatctatagcctacttgtcgctcgaaatcggagcgaaattgaatttaattcacatttcccttgaattcaatttg

SEQ ID NO: 119713 - DNA, 318 bp, Glycine max
cttagcaccgccgctgcagctgctggtaactatgtcatatttagactgagatcattggcaaatggtgaggcatgtgatctaaattgccttatgcaaatttgctgcaattgtcagcgaattttgcttttcaaaatgtcgatttctggtgggaagatatacaattggtctggacttctacagatccacggcacatgtgcttatgacttagacttccataaatttcgagtcgaccacggtaacgaatggacaatagatgttcttgggatttatgtaaaactggattggtgggttttggcaagtttgcttgccatttctgct

SEQ ID NO: 119714 - DNA, 449 bp, Glycine max
tttgaagcccaaccgaatgaagatggttatgttgtttgtgttaaatgagactgtctcaacccaacctaatcacaattgctgtgtgccaaagtcatgtcattatattagatattctgggacaaatggaagagtagaaaacacaataatatgggtttacacggaaaaggtatattttgtccaaatataagggaggcactgcgtaagaatctgaatggtcacaaaacatattatacacccaccgttcgtgtatataattgttttttggggtaaaaaaatctgtgagtacaatgaaacgaataagggggttgctatggatgaatgtctcctaaacctaactttgtaatcctaaaaatccaagaatgtggcatccaacccattacatcctagaaggccttcaaatcatttcggtggtcttgctgttgatatgaaataaatgcaatgttgaactg

SEQ ID NO: 119715 - DNA, 290 bp, Glycine max
  unsure (1)..(290): unsure at all n locations
atattactcgngtgctcttaaccaagagtctcatatcatatttcgaagcacaatacccctcaaattgcagaaatgacagtgattattcatcatagaaatgtaggacaatggatatttcataggcctttgaccaaaatcaaattaccgcaacctcttaatgggtattattggctaacataccttatggaacactggaaggtggggtaggatatgggatttaagtgtcacttgtgaaaactctaaatgatagtagaaggtaatgatgtattgagacaatgtggagtaaaaaa

SEQ ID NO: 119716 - DNA, 482 bp, Glycine max
  unsure (1)..(482): unsure at all n locations
ctaggatataataatgtataattagaatgattattatatttatatatataatattaacgatggaatttcttatgaatacttctgtcggtaattacttacatgttggtaacttagttgattgttactgatagacattcccatccgtaattttcgaccgataatggtctttactgacgaattatccatcagntaattttgctacgaatcatcaatgttgcacttgggcttcattgtgccttaataagtcataactgttacacttgagtcttattgagccataatcaatcatcagttttacacttggaccttatcataacttaaccattcattanggttacacttgagtcttattgatcattggtcaatcattagtactacacttacaccttattagaacttggtcaatcatcaatgtttcacttagaccccacatcgacactaatcaatgataagtgttatactngatccttattgggtcttag

SEQ ID NO: 119717 - DNA, 411 bp, Glycine max
tataggaccttaactgctaacacaatgctaacatggcaactgctgttaatatgaagcctcaacaagatcaggccgatgctatctgcgcgcgcaatctatgtggcgcatcacaccaactgattgagacgatggatggctcagatgctcacagcagctaactcattacttcaaagagagctttcaaaactatcatgacatgtcgaggacgagtgactatgtcatgtcacaaaatgtcacatactttgatttacagaccatatacgcatttcgtgtacttatcctggagctaagcatgaacatgcaagtagtacagcgcacggaattgctcaaaatattatctatatatccgacgactctatcaacattaagatcttaacacatctgacatattaggcgctccaacaaatctag

SEQ ID NO: 119718 - DNA, 119 bp, Glycine max
taggattaactattaggatttactaggagtactatgaaccacaactaccggatgatccaaaacaaatgttgtgcataatgtgcagaacacacgtttaagacaggaggcactattttcac

SEQ ID NO: 119719 - DNA, 476 bp, Glycine max
  unsure (1)..(476): unsure at all n locations
atcctatgttacacaccatagtttactatgggattagggaaatgtcagttccaagccaaatagtacatgctagtatcgaacaacttatgtgtgtaatatgcaatttagttcaatatatgcaaattcagatgcagaagtctttcgatataaaggagatgagattaatcaatatatggttgtattatgtgtttccaacagataccaaaaaacattttattagaggtgcttggaccttccaaagttttcaatgaagttatcaagaaaataatcaactcaactgtagctgaatacgtggagaaggtatttgccatatgctaaatctagtatttcctaattttgttccttctagcanattatgcagctaatagataaaaaagaaagggcaganataatgtattatttataatggagagtgagaaagatccatctacatcaatggaatcctcaactactctgaataaacctgtccgtattct

SEQ ID NO: 119720 - DNA, 56 bp, Glycine max
cttcacaactggtagccggtgcagacagttttaaaaagggtaatcatcacatcgtg

SEQ ID NO: 119721 - DNA, 428 bp, Glycine max
ctcagctcgtcgagcttccagttgaaaccatgtgtaacctgtcaattagtgatattgctaacgaaaaacttggaactacgataactaaatcctttattgacagagtcggagacaaccatagtgaattactatacagagttggtagttcacttgagatcattccagagacttccaaacctttgataatacatcctaaattgtatcaagatgttcctccaaatagatatttgttttatgaagacagtatcacaacttcaacatgtaatgttaatggattgtacctaaagattataatccattatttcatacactggaaacctccttatctatatttaactgctatctgccttgtccttattaaaagaagagggtaaataattatgagttttggccaccatttttgatggacattatgcccaggatttaac

SEQ ID NO: 119722 - DNA, 438 bp, Glycine max
  unsure (1)..(438): unsure at all n locations
accggacttagcacgcgctcagcttacaccctccggcgcttactttaccatctgaatgagacctcggtatcctctcctacactgtggttacattagtcaagacacccagagatcagcttgacacaagaatcaactctaacgctgagatcactctacacactagagatcaacttgtcacacataggtccaacacttgatgttacgggagcatcaaggtggctcacaaaagactcaagtcccaagaactcactaactaactcttcaatcccggacttggtacagaactcgtgcagcctacatgattatattgcaatctgcggttctgggctgcaacttcttgatgctggaggagatctatcttcttctgannaaatctgcagctaaagaactaaagataactttggatctgttagttgaaatcttaatcttaatctttaa

SEQ ID NO: 119723 - DNA, 476 bp, Glycine max
  unsure (1)..(476): unsure at all n locations
actcagctcgaggcctggatctcttcataatggattccgtngattcttgatgtctgatcgtagcggaatggagaaggagaaagatgaatggagacaccacttcaagtataagatgagtctagaagaagcttaccaccatatgaagccatggataagagcttgaaggtagaagaagtgaatgaagggagaggaagagaagaacatgaaatttagtgcctctaaagagatctgaattttgtagtgtaatcttcaaatgatcaaagttgaaaaaatgcacactgttcactttcggcaagtgcaccggatcgcgcaagtagtatataacggaaagaaccaagtatcgaactctcagggaacttgtgttacttgtgaaagctatattaatgaataagtgtctagtgtgaaaagagatgtgtctactatgaacaagtgtgtaaactaactattatcagggaaaatcatgtgagtaatgatgt

SEQ ID NO: 119724 - DNA, 409 bp, Glycine max
  unsure (1)..(409): unsure at all n locations
cactacaaaataacccatatattggaagaagttgatacattntacacaagttttatacacaaagttatcgtattaaccgactaacaactcccccaaatttaacaatttgcttgtcctcaaggaaaaagagaacaactcacttgccctcaagtgacaataacatgcagtgactatgtacaaaggtgtatgcaacanaagttactgattgcatgataagagaaagaagcattatgtactcatcacttgtctttcacaaaatatgcagctattcaaagtgaagaataaaatgtaagctgtactattagatgaagttaatcataagacagatattaaggaaagtagcttaaaccacagtctcacggctactgtttcactcaagcacaatnggttaagctattcattaataaca

SEQ ID NO: 119725 - DNA, 428 bp, Glycine max
  unsure (1)..(428): unsure at all n locations
attttacctttatggtagtgaaaaggatagcatntgcatcgttagatgtntattttggttgcttatatgagttgtcccctatttcaagtaaaagcacgtggaagttgatttaataaatttaaaactaatgcaaaaattaattatttaataaatatattaaataactaatgtaattattttctatatgtcgttattgtttgtctgtcgcagagacgtgtcatttacttnggttatacaccatggnggttcctttgttaaagacatatttatagaatataagaaacatgatgttgatgcatataagaaaatgcaagatgttgacactcgatcatattttaaaggagttgagttgttgaaagagttaggctacgattgtagcaactataggttgtggtctgatgcaatcctaccccgcaagggcattaaat

SEQ ID NO: 119726 - DNA, 407 bp, Glycine max
  unsure (1)..(407): unsure at all n locations
ngctagcttgtcatcggagtattcagatctcctgttggtgctctagattgcgggagtatgctcagatatatatggcaattatggtttgctatcttgcttgataatgttgaactaagggtgtgtatgggatggccctatgcctataatgctattgtgaacaatgggacatccacactgaccccgctctcttgctattgacgcctgaacgcacgcacaccaagtgtgcggtgaaatgccacaatggcaatagcgcgagactnttgtatgaaacaacccatggagcatgttggtatgacacattgcctctttgggaattgtattcattcttggacaggctagagtacttgccccgcatatatatcctaggcctaggaactaaaatttgatgcacaaagaacacaagagga

SEQ ID NO: 119727 - DNA, 257 bp, Glycine max
  unsure (1)..(257): unsure at all n locations
tctaagcttangagatctctcctcgcaacactattggtgagatctcacaatgtgtgacaactggacattctcttaaagatatatgcaataatatgacttctgtatccatgattgaacctcaaaatataagaagaaccattgtcgatgataattggatcattgccttgctagaaaactaaaccaattttgaaaatacaatgtttggaaattaatatgaaaaccctgaaattatcctgtcatatgaactaaatgggttt

SEQ ID NO: 119728 - DNA, 446 bp, Glycine max
  unsure (1)..(446): unsure at all n locations
accatgctacagctgccccggccaagctgtcttgaaagatatggaccaacaatctttcgtccgcagaatacgcccccatcttccggcaatacattcggagatgcccctttggacatgtcgtccctttgtacttatcaaagtctggtactttgacttgggagggatgacgatgttgggcacaagacataaatccgccaaatccgagaatgggtaattgccaaggccctcgactgctcttaacctctcttcaagcgcctcaatctttcccttatctctcgcgaagggaacagattcttttacgggtgtgggtgagaccgggatatggcggactatgttcggctggtgtagttcatgcggggatggatctttgaggtggagcatggtgccaagatgggtatctccttccncatcgtcttacccgggatagtcttcataaggtgggagtt

SEQ ID NO: 119729 - DNA, 256 bp, Glycine max
tttcttgaatggagagacatttgtccccactgaggttgaatggaggaaaaaattgtttaggtgaaaggtatattgggtgaacatctcaggagtggccagaattcatgagttctaatactcttgggacaacgaagggctatgatcatgttctattatagtaggggggggatgttttcgcatctagggcaactctatggggatgacttgctcatagcatcttaagacaagtctgaaattcagaatttgaagcactact

SEQ ID NO: 119730 - DNA, 334 bp, Glycine max
ctctatctgtcatcctatatttattgcacctctcctgtccctatataaataaaaatactatcaattatgaatattaaattgattaatttatttaatttcttacaattaacataaacagatctgaatgataatggctcatttataataccgatcaatttatcaatatgtccatcatgtactatgtagataacttatatataatatgctttcggctaatatatactctttttgcatttatttgctcttctatagatcgttccaggtatatttgataatattttaacacaatccttattacttacataatgtatgttataaaataatatatatcttc

SEQ ID NO: 119731 - DNA, 289 bp, Glycine max
acagatctacaatcccaacacgtagtcttgtctctacagagaatctaagaagtcttcaagctattcaaaacttatcagcatctatagacaacttatttacaacaaagaggttgaattcgagcggctcaaatgtgtcttcatgtctctaagctttggattatagaccttttcacaatgttgtgcttaatacagatctttcttatctgcggtgaaaaatggcatagagcttatgttgctacataccatcttgtcaactagactcgactttttggtatctgttgacacccag

SEQ ID NO: 119732 - DNA, 238 bp, Glycine max
  unsure (1)..(238): unsure at all n locations
atttcgggcgtctgggaaaatcttcacagcattcacccttcaggtgtatacacatttttttcaaaaactagttatgatccagtgaatttttcaaagaaaagttggaagtcatctcttttcaaaagcattgtggtttttcagtttgaaaacttatttttcttttttctccttcttctttntttttatcattatcattttgttaattctttttcttggttggtttcttttttcccccttt

SEQ ID NO: 119733 - DNA, 491 bp, Glycine max
  unsure (1)..(491): unsure at all n locations
nttctntgtgggttgatgggttctgtcgtgcaaaatggaatgatcattggctgacatattctcaattagcctcaatggcttcttttgggtcttcagctnntattttcctccagtagaagcatctagcaattgcttggtttgtggtctcagcccatctataaacatattcaattgattggcttcgaaaacccatgggtgggagttcttctcaataaacctttgaacctctccaatgcttcactcagagattcatcanggaactgatgaaatgaagagatagcagcttttcccttccgcagtcttggactttgngatgtatntctttagaaatnttcaacaacttcttcccaggttntcagactattacccttaaatgagtgaagccacctcttggcctctcctgccaatgagaatgagaataggctgagtctaataacttcatccagcacaccagtaatcttnaatagtgtgcatatttcaatgaacgtttc

SEQ ID NO: 119734 - DNA, 493 bp, Glycine max
  unsure (1)..(493): unsure at all n locations
ntgcggatntggtcttcgccagtgaanggatcgatgttggtccgataagaggcatatntgatcatcctactaggacgactgagaaaactgtggcaaatgaagaaggtgagatagagggagaaacccatgctgtgactgccattcctataccgccaagttttccaccatacccaacatgtcattactcattccataacagacctcctccttacccaccacccagttatccacaaagccatccctatatcaaccacatagcctgtctaccgcacttccatgacgaaaaccacctttagcacaaaccatataaaaacaccaccatgatggaattttgcagtaaaaggcctgtatggttcaccccaaattccgttgtcatatgctaaacttgtatcccatatccactcaataattcaatggaagccataaccccaaccaaggttcctcaacctccatttttctgaggatacgactcgaacgcaacgtgtacttatcg

SEQ ID NO: 119735 - DNA, 366 bp, Glycine max
ctgcagctataagctatatattgtgagaagaaaatattattcttgaaattaatacggagttgagtttttaaaggatgttgttaattttaaaagaaaaaaaaaatggcgaaactcggttttgagggacagatctcttaccggacatcttttatatttcttagtgatagaaaaatggtagggttgagaacaataaagagcggaagacttaaacgatagggccactttgaatataatgtggccctgaaaaaactggctgagaccacgggagcccacacacctttatctatagcaggttagaggatatgatgccccttatagagtgaagcattcctttccagtcacatacactacacctcacaaaccaca

SEQ ID NO: 119736 - DNA, 215 bp, Glycine max
acacatcaaactaagcttatgttgtgagaacgcttaaggcaacagatcaaggcaagatatttggcatataagctcagacgtctaaaattgtacatcagacatttggggccatttatacaccttctcggaatggtcaacaatatttatcattcatagacgattactccagatatcatatccgttcttatacatgaaaagtcacaatctctggatgt

SEQ ID NO: 119737 - DNA, 454 bp, Glycine max
  unsure (1)..(454): unsure at all n locations
gtcacctgacgctgcagcttaagaatatggcctaacaaacttcttatnttcagatgganattcaatcaatagaccttcaatctttaatggagagggttaccattactggaaaaccgaatgcaaatttttattgaggcaatagacttaaatatttgggaagccatagaaatagggcttatatcccaccacagtagaaagaaccacaatagatgggagcacaacaagtggaagcacaacaatataaaaacctaaagatagatggtctgaagaggatagaagatgagtacaatataatttaaaagccaaaaacataattacatctgccctgagaatggatgaatatntcagggtttcaaattgtagagtgctaaggaaatgtgggacactttatcagtaacacatgaaggcacaacagatggttaaagatctaggataaacacattaactcatgaaa

SEQ ID NO: 119738 - DNA, 406 bp, Glycine max
  unsure (1)..(406): unsure at all n locations
agtggtaatcagatcacaagagcttcaagtatgtgctacttaaaccttcattaattntcagctgtaccttctcctccattggtgtctcttcattattctctatgtatctcctcacatgtcttgtgctgaatgtggctaacatgatttattagagattccaccaataaacttgctatagaagctagatttgattttcaatggttcacatatcttgttcttgttcttgaaccatgaattgtgttgagtttaagttcctttgagttttgtatcgctatttttgtggctgaagaatgaaccataaaactcttacaaatacattaaagtagaataaaacctcacaaatctatagtgacatgttcactgatcaaggccgtacccgaatatataaacattaaaatgcagatct

SEQ ID NO: 119739 - DNA, 74 bp, Glycine max
ataaatgacctcattgaccttatgaagcgcacctggcttgaatcccgctaacctgctttcatcacctagaaata

SEQ ID NO: 119740 - DNA, 422 bp, Glycine max
  unsure (1)..(422): unsure at all n locations
tctcacctcttctactttgtcttctgctgcatctccatggtggaaaaccaccattaaaggacctcattgaagctcanagatccagcctcataaagctncacaagcaagcttccatcacttttgtaagctttccttgccccttgatatatttgagggactcatggtcactatgaatgaaaaattccttgggataaaggtagtgttgccatgttttcaaagcccgtactaaggcatacaactccttatcataagttgaatagttaagggtaggacaacttaacttttcactanaataagcaattggatgaccttcttgcatcanaacagccctaatcccaatatttgaagcatcacactcaatntcaaaagatttttgaaagtctggcaacgcaagtatgggggcattagttagcttatgctta

SEQ ID NO: 119741 - DNA, 440 bp, Glycine max
cacatatcatagaaagcagctttatcttattctcatggctccactatcgctcatacaacgaatttcaagctattcatcactcacaactaacatgatgtccaatctctgaacttcatctcacgccatgaagtctaaaatgcataattagatcacaaggactcttcaggcttgtaagaggcttgctacaaaaaaattgggtttctaggattcaaagctgagatcatagacagctcaaatcctagacttatccatatatttcttacaatacaaatcaccttatttactaccactttacatttaattgtcattgactttattacaactacacacatctcctttgattactctattctatcatcacacatcttattcgttagagtgatgatctgtacctctactatacttcctatcacacctccatattgagtaattctcttgac

SEQ ID NO: 119742 - DNA, 256 bp, Glycine max
  unsure (1)..(256): unsure at all n locations
gatggtctgaagagatgaagacagtcaatcaatttaaagccaaaaacataattacatctgccctgggaatggatgaatatttcagggtttcaaattgtaagagtgctaaggaaatgtgggacactctacaattaacacatgaaggtacaacagatgttaaaagatctaggataaacacattaactcatgaatatgaactanttaggatgaatgcaaatgaaagcattcaagacatgcaanagagggtcacacatat

SEQ ID NO: 119743 - DNA, 247 bp, Glycine max
  unsure (1)..(247): unsure at all n locations
atactaagcttgttcttntntataaatgagaagttctagactcattacgttatctaataacctttgggtggatccaagtgctccgatcatccatttgcatactcatgttntggtggcatactcaccgctgtttatttcaacgggaatttcatcataactaagaaaacaccaaggcaccctataacactcgatccagaaaaatggataatgaagagggcgtgcaggaacagatgaaggccgatctatc

SEQ ID NO: 119744 - DNA, 506 bp, Glycine max
  unsure (1)..(506): unsure at all n locations
atcctctnagtcacctgcagctgcagcttagtacctcaaatgattattctctcttatgttctggaacacaaataaacaatgcagcgttttcacaatccagtaccgttagatacctgtacttcttcataaggattcttctcacataggattctgattattcatctcttacaatatgcgagatcaatgctagagctttgaacactttttatctaatcgatggcaccaaatgctattgatagccgaccgataatcccactctctgacagattctcattctctctggctagatgacaaaaacttaaatctacacaactttaaggatcctgtctcgttctaaatcatgaacacgacaaagattatgtctctcatcaccagtcaatgatgatacttgaaccaaagctttgtgaatcaactctcttaaatattgttctgcaacttactctacagttgtaacagcttcaaattcgatgacttcctcagctacccattgtcgaatcaatcttaca

SEQ ID NO: 119745 - DNA, 428 bp, Glycine max
gcttctatgagtctactttctgcgctgcacgatcaattttttaagaagaaatatcggtcgatcctgatcaatcagttgcgacattatatataagttgctatgacattgacgctcagataactacaatggattgattgctctcgaatataatatagaattatatttatacgagagaattgggcgatattcttttattgtgatacaagtgaaataatattggagaagatggagaaggttaaaacaaaaccgcatgctggcgaaatagtatagagatgtgtagaagaagaaaaaaagagtatgtaaagaaatatgataaaagcttattggtaatgttactaaagaaagaaaaattcgaatgaaactggtaatgcccacgtactctatatggatcattcgacctcctttaaaatgtatttttaaataaagaa

SEQ ID NO: 119746 - DNA, 371 bp, Glycine max
gaattgagagacagaatcatacatgcctacattagtcaatccctaaatatacatatacatagcatgcagttatcaccaggcttaaatcttagcgcaactctacatcttagcatacttggagtaccaaattctgacgattcaatgaagccgtctcatactggttctgaacaagatgctatgtctcccggacatgtataataagtaaatattgtgtctcaatggtctgagggtatatgttctcgcatatttgccataatctttgtgggtctaacggataatggggaacaatgcagattaaaactctgattgacttgcttaaaatacagagaaaatcatttatgttatgacaatttgtgacatcaaaaaataga

SEQ ID NO: 119747 - DNA, 121 bp, Glycine max
tagatatctgtctactaaaagcagccttctttttttcaatccattaatcccgtaagctgcatggccacttacaaaggctttgatgtagatccttaaaagcgacctctttgtgcttgaaatc

SEQ ID NO: 119748 - DNA, 253 bp, Glycine max
  unsure (1)..(253): unsure at all n locations
ttttttttctaataagacttcatggtgatttccctggaatgcgcggaagcaaagaaatatgagagggaagcccatctctatggaataacctacgtagatgagnnaccccataactgcttgataaanacttgaaggatgcttatggggaaaaaaaaaaacggggagccaattgaagataaagaggaaaagtggtctctgaagtgtactcataagacatttttcatccaaggtacacaagtgttacacatacttc

SEQ ID NO: 119749 - DNA, 250 bp, Glycine max
tactcagcttcgccccattgacaaatatcagctactgtatcatactattcaatattcgcccaccatctgcatggcccattccatatcctctctcacatactcacagattgcagctaccataggggtcgtgtatccatctagttctctattgctccactctaaacccagtattcctcgaccattgacaacccactggcttttccttcatagcacatcaacattaatcctattatcataccactgccatttc

SEQ ID NO: 119750 - DNA, 390 bp, Glycine max
  unsure (1)..(390): unsure at all n locations
gaatcaaaacgttctgtaactgttggtaatctattaccatacatgtgtaatcaattacacattgtaagatttgaattcatatttctaatgactattgtaaatattttcagctgctggtaatcgattacaatcctcatgtaattgattactgccttaaaaatattcagaatcattttaaaaaactatttaggaagtgttttggccactggtaatcgattaccacagagtaattctcttgtaaatacattgtcgcttaaattcattggccaaacctcttgttgntcaacttggaatcccttcctaatcactagagatcttcttgatgatgtatcttgaatttcttggatctttgtcttgaattaaacttgagaagcgcatgatcacatggca

SEQ ID NO: 119751 - DNA, 404 bp, Glycine max
tccggacttcacccgccgtgccaccccggattattaatccaagcctctactttcgaggggcaactcccaccttatgacgactatcccgggcaagacgatgaggaaggagatacccatcttggccccctgctccacctcatagatccgttccccatgaactaccccaactgatcataatccgccatatcccggcctcacccacacccgtaaaagaatctgttcccttcgcggaagataatggaaagattgaggcgcttgaagagaggttacgagcagtcgagggccttggcaattacccattctcggattagcggattatgtctcgacccaacatcgtcatcctcccaagtcaaagaccagacttgacaatacaaaggacaacatgtccaaaagcatctcggatg

SEQ ID NO: 119752 - DNA, 442 bp, Glycine max
  unsure (1)..(442): unsure at all n locations
atccttaagtcactgagctgcagcttctagtagatctttcttacaaattctcttctgaagtgaagcttgtaggctttaacttaagatcttcataggcatcacacgtttgagtggaaatttctaaagaattggctatcttttcttggttcccttgaagttatttataaccttttaaaaactttgaagtcttttctaaaattttgttacgctttggacagaatggatgagttggagagaagttcatgatgctgctatttaaagagtttcaaggttatttangtttacctcttcattngattcttctgatgttgtgtttgccatccgatagagggtggcttcagtcatccaagaggttgccatcagatcgttttgagccttagaattagcanannaatttgtttaggcatctgtcccaaagttntgggaattcattcaatgatca

SEQ ID NO: 119753 - DNA, 394 bp, Glycine max
  unsure (1)..(394): unsure at all n locations
gggttcgaggtacttacccgttgaagatcgaagaacgatgaagaactaatgaagaacgtcgaagaacgggtgaaacctttgcgatattcctcacggaaaacgttacggaaacgtttcggaagcgcctcggcttagaatttcttcacggaaacaatttttccaagcaaaatcgaaagagagagaagtgccaaaggggctgaacccttttcttcttcacttcctcccctatntatagcaaaatangggaggtggttgccgcccagttcgcccaggcgagccaggttgcttcctccagaagcaacagctctctggaggaatattctggagggcccaagtgggcctgggttgctattgcaccccacattttactaactacacccncatctgccttttt

SEQ ID NO: 119754 - DNA, 383 bp, Glycine max
  unsure (1)..(383): unsure at all n locations
tgagcagaagctctggtagagtcaccttgataagcattatccgaagttcagntaaagcaccaagcacagtcaatcgccgcagttattctatgagtcgcagccttgtttgtaaggcaaggactcctcatggtatgagcttgtctagaagtgtgtctcctgatgctctcccaaacgtatcataacgggaagaggtttcaatgaacgatactcttatgctagaaagtttaggactccctctcagtctccgcatatgagatcataccgttatagtgtctatagtgtacgaagtgaccgtgacaggataactgacgaagttgcataaaatttctaattatccacatccaatgtggtatgaaaatgagttaaataaaatacatttacac

SEQ ID NO: 119755 - DNA, 394 bp, Glycine max
  unsure (1)..(394): unsure at all n locations
gattcangcgcataatatatcaagacgctagaaatttatctactaaagctcttgagcaattcagatggtcataacgtttcactcggaggtccgattcaggcgcataataaatctagacgctagaaattgaacaacggaagctctcatgaaattcatatggacataacttttcacacggaggtcagattcaggcgcataatataacgagaccctcaaaattgaacaacggaagctctcgagaaattcaaatgctcatagcttctaactcggaggtccgattcaagcgcataatatatcgagacgctcgaattaaccaaggaagctctcagataataaatggcataactttaactctgatgacgattcatgccatatttatcgagacacttaaatg

SEQ ID NO: 119756 - DNA, 135 bp, Glycine max
actcatacaacagggagatggctgatggagctttaagagaaagacacacatctggaatgcttaggcctaactgtgatatggaaaccacctccctctgagaatgtatcgcctgcacccatatgacaagtgagaaca

SEQ ID NO: 119757 - DNA, 507 bp, Glycine max
  unsure (1)..(507): unsure at all n locations
gatccttaagtcacctgaggcatgcaagcttatgggtctgggaaatggatgaagtgacttnttttacatcattaatagntactaggataattattaaggagggttaatttccatatacctattaaatgaccaataaattgcagacacatggcaggcaacatttttcactaacagtcaacatccaatttttgcaccggggacttagatagtcaatttgaagaaaaaaaaggactctgacactgaattaaaaaaataggaagactgatttaatgagttgggaaaaatagggggactatttttgcaattaagtaaaaaaaaaaaagaattacattctctgggagaggcacactatggagctccatttgaatatttgaattgttcttgaagttgaagcaccccaatttttagccataaaatatgtgctttgattntcttccctncatgtatgaataagggatactntacaatgatatttacaaatattttatatggtattacacaattgaa

SEQ ID NO: 119758 - DNA, 322 bp, Glycine max
aatttgaatataacgttgtgcagatgtgtttagctcatgattaattttgtggttgaagttaaaattcgttaagatagagtctacctgaatcttagttgaagcttgatttttagctgaagctaaactttggtagtattgagtatgcacgaatgtagttgtagccactatttttactcaagcttaaatttgacgaactggaatctgctcgaattgaacttcaactaaattttctgacttaagctatattgaggtattgtgcttgttttcaattatacttattagtttccattccattccatggcacgtagagattctatgattt

SEQ ID NO: 119759 - DNA, 470 bp, Glycine max
  unsure (1)..(470): unsure at all n locations
agcttgtacgaatgtgttggagatgctgcatntttatttttattattattatctagggtgaaagtgtgaaacgatgaggactgaggaggagttacttgattgaacggtaaacacaggcatgcagaataaagaaaaataaaagaagaaagtggtttctacaagcggtggcagcgtgcatgagttatggttgcattgcatggcatattagtgcagtgttcccttgctttctctttcttctagtttcgctggccttttgttctcacccatccaccgcttataaagctttaaataagtactattacactacttttactttgttttttgtttttaattcgcttggctttatctttaagaanaatngacaaggggccttctcatttgtcattcgggttagctgaaatctgagatntataactattccatgctgccgtaaaaagtaatttatttttatatataaaatcatctatata

SEQ ID NO: 119760 - DNA, 254 bp, Glycine max
  unsure (1)..(254): unsure at all n locations
ngtttgtttcaagatcaacaggtgcactgacctatatacactcattgtatccaatcacatgcatcatcattgacaaaataaatatgaagataaaaacaaaaatggcatttcatatgcttgctaatgctatgtatacctgacaaaatgtgaaatcatcatcagtgtccatggtagagtgttgatataagatcgattacgtttcatcagcagctgcaattgaatctcgtaataatcaatgtaatttaatatatgat

SEQ ID NO: 119761 - DNA, 494 bp, Glycine max
  unsure (1)..(494): unsure at all n locations
atccttgagtcacctgaggcatgcaagctntactatgcaaagaatatccaaggaaaattccttcatcttacttagcatcaaattttccaaagttttcttttccattgtttaatacaaaacatttacaaccaaaaacatgaagatgtgaaatgtttggttttctaccattgaaagttcatatggggttttctttaaaatgtgtcttattaaagccctattcatgatatagcatgcagtattaacggcttcggcccaaaaatattttggaagaggagtatcatttaataaggttctagcaatttcttccaaagacctatttttcctttcaacaactccattttgttgatgggttcttggtgcagaaaaagtatgttcaatgccatgcttttcacaaaataaatcaaattctttattttcaaattcaaccccatgatcactcctaatagatactaatttgagattttcttatgttgaaaactttgcaagttctaaat

SEQ ID NO: 119762 - DNA, 204 bp, Glycine max
tggatattatgtaaacaactaattataccttgacattgggtttgtctccttgaagaatctgccagcacttgtctatcgaattgtatatgaaataggaccggatgattacttaattgttacttgcagtcatattaagatatgtgacctcgccttgattttctctatatgttagataaatcgcttggtaatatctaataaaaaaat

SEQ ID NO: 119763 - DNA, 440 bp, Glycine max
  unsure (1)..(440): unsure at all n locations
atcttaagcaccgcggctgcagcttgccatggggtggagacctcatgctcttctatggagtcgaagtccaggctggaggagtctgagctgcggctgttcatggagatagaggttaataggaagcttgaagaggagctgctgatgtacaagaaggagactgtggaacagcatgaaaagggctttcacaaggtcgctaggtaggtcgggttctttgtcaaggcccttaacttgggtctttttgaccctttcaaggacatgaaggacggtgttctgcttgacgaggaagatattgctgctgaggatgaggctggtgaggagcaaggcgatgattccaatgtttaggttgccttttgtttatttccttctttgttggattttggctacaatggctatgtaattatgacaatntttctttcttctgataatgaatctgctttcct

SEQ ID NO: 119764 - DNA, 498 bp, Glycine max
  unsure (1)..(498): unsure at all n locations
acgcacacttaaatactcaagcttaatgctcttaagcaaaagttaaccaatgcccncatacttgctttgaccaaattttcanaatattttgaaattgaatgtgatgcttcaaatgttgggattggggctgtattgttacaagaaggtcatccaattgcttattttagtgaaaaattaagtggtcctacccttaactattttacttatgataaggagttgtatgccttagtgagagcgctgaatacatggcaacactatctttatcccaaggagtttgtgatccatattgaccatgagtccctataatacttaaaaggacaaggtaagctaaataaaatgcatgccacatgggtggaatttctggagcaatttacctatgttactaaacatataaagggaaaaggaaatatatgtgtggatgccttgtcaaggagacactttttgcttctatgctntgaacacaatgatatggattgattgctcgaacgaaatgtatga

SEQ ID NO: 119765 - DNA, 363 bp, Glycine max
  unsure (1)..(363): unsure at all n locations
agcttgtagacatacataaaaacgttggaactgtggtggatcattgggaatatgaatacaggcagacttaaatgtcgaccccgggctacgcctgagttactcatgagcataatcctaaaccttcgcgaattgctgtgtaacatgagcttccagcaacttgtgtgctcattctaatgacctangaagctggggggcagtaattagctctgcacattcctgctttaagtatgcccaggcttgcatatatgcgattgtcggctgctgcctaatcttcgcctaaagcttcctatagatccactctatctttgctgatgtgccatcgacagctctagcgcatgagtgtgaactatagaatgctctgac

SEQ ID NO: 119766 - DNA, 473 bp, Glycine max
acactttatactcagctatgccatattgccgaaataagcctgttgccatttggtttcatttctgcatcatatgtaccccacacaatgtggcaagagcttacctagacgatgcacacaatcttgacaggtgataccgtaaagttcttctctctcctgacatgtgttagacacacactatcgcattccttatagcatatctactgtccgtagattggatctggatctcatcttatgttataactactcatgtctcacacgaaatgcatgacgacatttgactatacacgacataatgtgattcgtttaatgccttatcactattcatagataccgtgtaaacgctgcagacataagaaacacttccttcgacgaattaagatgaatcatattacaactatcttgtgatggacattgtgatatacataacgacgtgaactcactctatctcattcgtctacatgcgaagccatttc

SEQ ID NO: 119767 - DNA, 413 bp, Glycine max
ttaatcacctgcggctgcagctgtaatgattatactgccaatgtgttgttttttctttatcacacagcatcaattgctaatctttgagaacatattattattattatcgcttactgcataaaactagaaattgctgttaagtgttgcaaaatgaaggtcgaatggaaccaccaaatgggactttgatttcctttgagactaatgcatgctaaattgaaatcagaggataagggtatcccaattcttattcaccaaaaagcaattgttatgattagaacttcgaagttatgcttgatatcttattagaattgggggaagatggtcttgaatctgattgatcgtgaattaaatttgtgttattatataatactcacgaagtgaagactgaatatcgattagtgctatatcaatgc

SEQ ID NO: 119768 - DNA, 381 bp, Glycine max
tgcccagtatcttagcaacaatgtcctttcgtttctcacacttttctttgatgagcgcatcttttcctgagactcttgcttcaattgtgggacgtatattgataggtatatctgagtcatcaacaacagtaccaatattgtatttgttcgttttgaagcatactgcatattctacttttctctttttgctctcttcctctaaatcctttacacgcttctgaatatatttcacataatcgatagcatctttaatgacagaagccttattcgtctaacataatatatgtgtcatttttttatctatatatggacaggcttatatgattacatggttcgaattacatgaattttaaacaatgttgtgatgaattatcttttatt

SEQ ID NO: 119769 - DNA, 292 bp, Glycine max
  unsure (1)..(292): unsure at all n locations
agctttnagtattgatcgacgaagcttttattctttctgacacccaagaagataatgggaggcgtcctgtactttgagagagggtcatgcggttatgacaagcatcttgtcgcatagaagaagccatcgatgtacttatcatgggctgctgggactgctcatcgtgacgatcctccatgagcacccttactatggagatgctgctgccttttcagaactcaaatcattcgccttagaagtgtgtgtcatattgcaggatggggataccttggacgtgctggaagagatggta

SEQ ID NO: 119770 - DNA, 166 bp, Glycine max
tgtgcttggcgaatgaaccatcagtcttctaccaccttcttgttttcttgcttgattgttgcatacactgcactgtagaatctagactatatgtcactgataattaatccatgggattaagaatatgattgagcacatgtgacctatacatatctattcgtaccat

SEQ ID NO: 119771 - DNA, 445 bp, Glycine max
  unsure (1)..(445): unsure at all n locations
gcttgtgcttgattctctaggttattgtagcattaaatgcacatccttcttgatgcaacacaattactctgattggcttttgtgtanaatacttcagtataaaaccacttttccttggtcaaagcatgtttctcacatctgaatgcgtcttttgatgttgntctaacaatattttaactttagtttcatttattattcataggattcgacaaatcataggagaatgtctctccaaaatgaatctcagacacagaacaataaataaagtgcgaaatatcattntttaatgatgtatcaggtcatgactntggcctatcttcatctaatacttttgacgcatgatgtatacaacatgatctgatatcgcataagatacaaactttaaccccttgatttatttgcatcgaatcaaaataattaagagtattgatttatcttaagacat

SEQ ID NO: 119772 - DNA, 450 bp, Glycine max
gtcatcaaatgttgtttttattgttcttccttgtgttgtaacttattctatattttgaaacttatatgttttgaactttgctcgttgttctacagcaccccaaccaacgtgcaagatgagtaatctctgattgaacggtcttggaagtcaacactcatgggcgcatgttgcttgatcaatacataccattggcttacacccacattccggtgaaagttgaataagcaaacatgcgtttgtgagacgatgagggacaaagatatcaactttatccatttcatttaacattgtagctgtggtttacaataatggcataaacttggaaaccctgatgagtcattatggacacctaacaacagctttcaaaattgccccatgtgtggcatctcttgtcaatgtcatgatttacacgcaattctgctcaaatttatccagcccgatcaattatac

SEQ ID NO: 119773 - DNA, 463 bp, Glycine max
  unsure (1)..(463): unsure at all n locations
agcttataagaacaaaattgccttaatcatttctcaatatgcatgcgaattaggacgcatcaacaagaatcaagccaaggctattgtgcaagcaatcaatggggcaaaacacaccaaatgattataatgatgaatggctcaaattctcacaaaggtaaaatcatcactttcaaattgagctttcaaaactatcatgacatgtagagaagaatcaaggatttcaagtcacaaaatgtcaagaacttttattttcaaaacaattacccatttcttgaacatatcctataattcaaagaanaacatgcaaagtcgtacgtgcacacaaaattgacccaaaatattaaactgaaaatccgacgaaactaacaacattaacaaattaacacaactaacaaattaacaaaaccaacataactagcaaaaccaaagaacacttccncncccncatacttaaacaacacat

SEQ ID NO: 119774 - DNA, 423 bp, Glycine max
actttaaactaagctcgctgattacatctccctctttctcaagcaaattcttctttatatcatcaaaatcttcatgatttacaggatattcaagtattttagttttcatctttcattttctttattattcgaaattctaaatttactaacaataaaacctaatttattgttggcaaagctgaatttgatatccctgaagcatttgccatttggaccaagaagaaaatacttcagactgccgaggagcggtggagacagtttaaatctgatttgaccaggaaatggacacttgtatccgacaatgacagtgttgatgcactgtttgtgaaaaaacgacatttgcaagagaaatggcccattttgtctatccgcattaacccccatgggaagatgtcgttggcttttattgattcacttaaatta

SEQ ID NO: 119775 - DNA, 408 bp, Glycine max
  unsure (1)..(408): unsure at all n locations
aaaatattttttgcaaaatatataatataattgcttaataaatagggaaaatgatgtattgtgtggattaaatgttgtgggacactaaattttcactaactaagtggaaaaaaaaaataataaaacaaactttgaccataagtcaaagatgttggtcttggcaaattgatctagagggggtgaatagatctttttaaaatctttattaacttttcaaaagcctttgaaacttttcacaccttttttttataagatcaatttaaaatcaatttatcattgtaattagattggaaaacccttttagattatgtaatgcaagatcaattaaacaaagattgaatcacacatatctagttgtacgaatgtngttaaaaaaaagaaagattaagaacacaaacaatttataat

SEQ ID NO: 119776 - DNA, 500 bp, Glycine max
  unsure (1)..(500): unsure at all n locations
acacttagatactaagcttatgatgatgaatcaagtacgattcaagtagttttgatgatgaataaaaagcccaaaagaatgatgtcaagattgaatcaacaagttcaagatcaagattaaagaaaagacatcaagaagaatcaagattcaagagaagatgaattcaagatttaagagaagaaaccaagaagcaacatgtcaagacttcacaagggaagtattgaaaaagatttttcaaaaaccaaacatagcacagttttggtttacaagaaaagttgttccaaatttttctaagtttctagagtattttctctctggtaatcgattaccaattacctgtaatcgattaccagtggtaaagtttgatgtcaaaagactttaactgaatgtgtaacgttccaaatgttgtntaaatggtgtgatcgattacaatatattggtaatcgattactagtatatctgaacgttaaaattcaaattcaattgtgaagagtcacata

SEQ ID NO: 119777 - DNA, 356 bp, Glycine max
  unsure (1)..(356): unsure at all n locations
gagctnttcatcttacagacagcagataagaatgtttattcggataaccactcgggtatttccgcccgtcagcgtgactcaaatttaagtaagacagatcttgtgggcgcggaagatgacgtaaatctccgcgtgtcaacgggctcgtcggccacgattgacgaagggcgcaaaagacgacgttagtctctacgtgctatcatggcttttcgtcttacagacagcataaaagaatgtttattcggatgaccactcgggtatttcctcacgtcagcgtgactcatatgtgagtatgacagatcttgtgagcgcggaagatgacggaaatctccgcgtgttaactggcttgtcggccg

SEQ ID NO: 119778 - DNA, 235 bp, Glycine max
ttcgaggtacttacccgttgaagatggaagaacgaatgttgttcgtctaagaacggttgaaacctttgcgaaattcctcacggaaaacgttacggaaacgtgtcggaagcgcctcggcttatattttcttcacggaaatatattttccaagcatattcgaaagagagagaagtgccaaaggggctgaaccactttgttcttcacttcctcccctatgtatagcaaaatatgggag

SEQ ID NO: 119779 - DNA, 195 bp, Glycine max
gtgctacccccctgatacaagcatgacctatacctacccatatccgaccataccaaccatgtgagaacctgtgatgtacctaaccatgctagctcctcccacacagctttgaacagaagccatacctaaatgcaagagacgctagtgagctggctagccagctgtgaacattgacagatatatgggataccgaca

SEQ ID NO: 119780 - DNA, 348 bp, Glycine max
cttgcatagtcgaaggatacatgctgaagttactcttgttttatatccatgatggtgtctaatggcccactattcgatagactagacgctcgtgctactaatatatacgatccgacggtcccgtttactgcaagacgcccattacccttgtcctggatgcatggctcgtattctaccccattatctggtgatgccttataagctacgcacgctgtaaaacatcatattttatccttgcgtcgtcctttgtttggactttgacctgttgcgctatagaacccatattagcgaacgctttatgctgatcgctgtggataaattcagcaccatggttctcactctaccatg

SEQ ID NO: 119781 - DNA, 429 bp, Glycine max
  unsure (1)..(429): unsure at all n locations
agcttgacagcgtcagaatgtatgggtcctgctttattcttttctcaacacaactttcaaccatttttataatgtcccggagtccatgacaccaccatatggaatgatttcgttaggactaggactattagattggaatatttctttttgttctctattttattttcacatgctccacaggatttttttttcatccctattatatntttcgtttccttatagtcatgctgttagattacatatgttaaatttaatgaaaaatttataggggccaaaatagaaatatcaaattatagatagagaccaaagaattaagctgaaaaataaaacattaaccactacaaatgcactagtgattagaaaanaanaactcataaatgaatctttctctttttactttataaaaaatcaatcttatacatatacctt

SEQ ID NO: 119782 - DNA, 372 bp, Glycine max
ctttatctagcttcaaaaaatcaaacacatgtaattggtcttccacccaattacactgagaatataacatgttgattggtaatatgggaggagtgatgttttgaatttttttctgttgtctatgaaaataatctgttgggatgggtctgggaaatacactatgcagcacagagaagaattttgctcccatgcatcaagtaggggaaattattaataaatttcttcaaattaatactatatttagcaattaaattatataatacttttaacacataaaaaatacctttgtaaataagtcttttatttttttgctcaaagtcaatcatttcactatctgttgaatacatgttttctttacctattgtctcttca

SEQ ID NO: 119783 - DNA, 346 bp, Glycine max
agcttggcatacacgaggccatattatgtttatattgatgatgcatatataccgatggtgaggtgggtcctgcctgaaccttaagtctcattcaagtgcttgttgccgccgtgggtaattaatgtgtattaacgagtcactcaagtattgatggtgaagggaacaagtgtatgaacaccgcgctcatgcctttcactgctaatgaagcatgcacgtctactagtgtctgatttttgaagggagttgctaagttggtatacacttacgattactttgatctttataagcagagagcagattacatcttaaggatacccgctgttatgtggatcctaatttctttact

SEQ ID NO: 119784 - DNA, 263 bp, Glycine max
  unsure (1)..(263): unsure at all n locations
acacatgaatactagctttagggtttgacacttagggtatgagactcgctgntttggttaccgcaatcgaccaataggctatggtattagacaaattggctttggtattaacacataaggtgcttgactaatcgggtcagagtattcgactgataagattatcntagcgaaaatacgatgattgtacttgaccataggtcaagggttcgcattcataatcccttgccaacaatgctggggcttcgacataattctatatatac

SEQ ID NO: 119785 - DNA, 354 bp, Glycine max
tctaactgtatcgtgaactagagctgtatggaattttgtgtttgaaaatcacaaatgatgagaaaatctatatatacatcttagcaattagctgctaccccacattatgctttgatcatcttggactggatttgaaattaaaaacccatagttataggcttttataacatacactccactgatcttgtaaaaatatggttaaaattgactgctacattacatttaaaaaatatttccttttatcattaaatatttgtaaacttgcttataattttatatattttatattttatattgtatttattatttaacaatttaattaatttatattataaacttttcttttttttaaac

SEQ ID NO: 119786 - DNA, 449 bp, Glycine max
  unsure (1)..(449): unsure at all n locations
agcttgccaagttggttgctgatttaaatgccttattgaaagagtcggagtccaggctgaaggattccgagttgcgggtggctaatgagagggaggccagcaaggagcttgaggaggaaatgataatgcacaagaaggaagttgtggagcagcatgaaaaaggctttcaaatggtcaccaggcaggtcatgttctttgccaagaaccttgacttatgtctttttgaccctctcaaggacgtgaaggatgattttttgcttgacgaggacgatattgttgctgangaggaggctggagaggagtatggtgctaatgatgccaatgtttaggctattttctatttattttattcttttcttcgttggtggaatttggccgnataggcctcgtaattatgacaattnngtcttctttttcttttgataatgaatctatcttcctttgttgat

SEQ ID NO: 119787 - DNA, 171 bp, Glycine max
cacttatatactcatgcttataggaagctcaatggggaagagaatgagagttaatattgtatgagagaaagagagagagacagagagagagatagagacagagattaagataaagtggtgtgggaatgaacgaaatatatggaaagaagttgaacttcaatagtctgtctc

SEQ ID NO: 119788 - DNA, 342 bp, Glycine max
  unsure (1)..(342): unsure at all n locations
cttaagtcaccgcggctgcagcttttcgctgtaaantcacttctttttttttgttttggtngcgctaaaaggggtgttcttatttgaagtgcagtatacacactttgtggtatatttatggatggcctttgtggataactgggtggtggtgaaagaggtgtgttgttattgactgagcaatgacattgttgggtttggtgggatacttggccgtatatgaatggcattcacaacatgggtttctccctcatcctcaccctctttatttgccccagtattctaagtcgtcctagtatgatgataaaatttgcctctttacatacccacatcgatccttttact

SEQ ID NO: 119789 - DNA, 326 bp, Glycine max
tctaagcttaccaccaaaaaggccttggatagatgctttatatttgctcaatggcggaagaaatgagagagagaatatgaggggggatgcatgggaattgttggagattaatgagagaagttgaactttgaagtgtgtctcacatgtctctcattcatcgaagctatgaaaagtgttacatatgtttctatttatagcttagcacatgggaagcttccttgagaagcttggaaggttacttacttgggaagctatatgaagaaagcttccttgagatactaaagggtggctactcacaccccttcaacagtttatctctccccatg

SEQ ID NO: 119790 - DNA, 379 bp, Glycine max
  unsure (1)..(379): unsure at all n locations
agcttagcagttgaagtaccatgaaattaaaattcatgcanggtacaaccaccttatcatcaaagtttacagcagaaagagaatatagtcgaaaatggtacccaaaaaaatctactgttaaaaaactatacaaaaagggaagaaaaaaaggagaatatcttcgcatctcgatctacatatgcaacaccaaactcagagatctcctaagccaaaatccaccctccataaataatcaacaacaaaaaaaaagagaaggatcttgagggagggagagagagagagagattgggaatgcaacagaagaaagagttcttacctgagattaatgaatgaattaaaagcgccgaaagctatgagggagggttctttggttggtgtc

SEQ ID NO: 119791 - DNA, 418 bp, Glycine max
gtcataattaaaattgctcaaagaacatatattaactaatatttgatcattattgacgtgttgtgaattatgcctcaaggatctaactccaaacaaattcaggtatgaggtatgaattaacaaatcttcgaactaaatattctacctcaaatatgattatgaagattgaagaattccttagctacaaacaattctctaccctaaacccaacacttagatagggtatatataacgcaaaataagcatacttaatcttacctcaagagtcaagatgaacgttctcatctgtcacatataaaactaaaacatcgcttctattcttggagttcaaattcttacgattatgatcttaattcctcttaaaaaatattaacttatgtcaattcaaatatgcatatgtatacagatcttatgactt

SEQ ID NO: 119792 - DNA, 458 bp, Glycine max
  unsure (1)..(458): unsure at all n locations
agcttgccactgcagcagttaagtgaacaaatgaagtgtccacagtcattggatggttgcttggtagaggtacatgctaataactaataagatttcctgtgcagggtatcattgtttttgcatgactgatggctaccttggggctggagattttggttgaatctgcctcaagtgttattttgaaggtaattgagataatcttttgttgttgtttgtttattatatacctaaatttgggttgaagactagttattcaacatgtggattatctaccataataagtgattttatcatttgagcaaatgatattatcatttgaccttgcttttgctttgattccgctcctaaagttcagtagcagcaaagtgactagcagcacaagcattgaagaggtgtgtttcctcctttgttgtggattcatgaactatangttaatacatgaaacttgaaaatgttct

SEQ ID NO: 119793 - DNA, 465 bp, Glycine max
  unsure (1)..(465): unsure at all n locations
ctttacgtgacacttgatactaagcctgtaaggatggattgaatgaatgtaaaagtatcttgaaaatcaaatcaaagccttgcttttatagactcttcatgtctggcaaagaagaccatttagaagagttataaattttagaaaaacttaaaacccatttgaaaaagtcaaaaccttttttgaagagttacatcttttgattttttcaaaaatagtcactagtaatcgattatcaaatcagtgtaatcgattacacaaagcttttgagtgaaaggatgtgactcttcacatttaaatttgaatttcaacgttcaagggcactggtaatcgattaccaaaacattgtaatcgattacagccttttgaaaataattggaacgttgtaaattcaatttgaaaacattttcaaactcattttgctactggtgatcgattacaacaatacggtnatcaattaccagagag

SEQ ID NO: 119794 - DNA, 459 bp, Glycine max
  unsure (1)..(459): unsure at all n locations
ttaagtcaccgcngctgcagcttggganannattgaagatatttgtctttttattcctaactcccttgagtgacatttgtattggttgttatcttgtgtgttgcgtcttaatacatatcgtatctattatgcatccttcatcatcataggaagtgtgaataaaagtttctatgttagaaaggtttcttcaagaggcaaaacttttgttttcatcgattacagggttgtcataatcgattacaacaagttgtttgaagcttggagagttgatcttatatcggtttaatcgattacagtagtctcataatcgattaccctgctgtttgagacaatgactgattgattangagtccctactttaattgattaccaagtggtttaattgattacttctctttcatttagtagtccagaagttaacaagaacactttaatctattacattgaggatctaattga

SEQ ID NO: 119795 - DNA, 456 bp, Glycine max
tggtgaggttcgttgaaaaccatggaaggtgcagtttgtgttactatcctacacatgccgacaagagaagggttgccttagaaaggaaggaaagaagcctagcccatttactatggcggtgaccacagatggagagggtccctatctgccacattatcaaaagttttgtcagcacggggtggatgcatgaaaatcatgatgttgtgctagatggagaaattgacaaagagtatgaaagttgggtgcatccgtgctcctcgagtttcaaattgaagaattagtggatcgtggagcgacccgagatttcagtgtctaatacaatgttatccagttgtttgaaccttattgttgggcctatgctgtatggtctacttcttgtgttggcattaccttttctctaatgttcccacaattatatatattcaactgtcgcaacctacccttctgtgggtaggc

SEQ ID NO: 119796 - DNA, 463 bp, Glycine max
  unsure (1)..(463): unsure at all n locations
agctngcgccgccagcaccacatccnctgaagtctgtgcgagattaatcgccgccggggaggcacaaatggcagcagctgcgccacgactgataccaacgtttaccatcaccggaaatagggttgccatcagcaaaacacccataccggttgcggaagagacggccagagacatcagacaggcgacaaaataggcggcaatcatcagcaggtaaggggagttaatatactgcaatggttttgacgccagcttgaccaccatatcattcgcgccgatatgggtcatgtaagcggcaaatccacacagcatcataatcatcatgccgaggtcgccgccgcggctcattagtaatattttaacgtattcaacgatatccgtggcgctgtancctgttgatcctgcgtgacggaacactttgtgcccatatggcctgatatcgcaatacaggccccgacaatacaca

SEQ ID NO: 119797 - DNA, 393 bp, Glycine max
tttttattatttactgtgtggcctggagacatgtaatattatgctgacattcattgagctccttattggggttgtggttattgtgggtgtagctcgctacatcattaaagggtattccgccactggtgtgttatttgtcggtggcctgttattgctgattatcagtgccattatggggcacaaagtgttaccgtccatccaagcttcaacatgctacagcgccactgatatcgttgaatacattaaaatattactaatgagccgcggcggcgacctcggcatgatgattatgatgctgtgtggatgtgccgcttacatgacccatatcgtcgcgaatgatttggtggtcaagctggcgtcataaacattgatgtatattaactccactttact

SEQ ID NO: 119798 - DNA, 439 bp, Glycine max
gcttgtcaactatgtggagcctaatccaactgtcttttttagggctatataaggcattttcaaaggttacgatacacaagttgaatcattccaaatctgtaatactgtgtgctagatctcttagtgtgaaatctattgtttagcttcaaccctctctgagaatgacccactctagtattttgcattataatcttgaaataatcttcaatagaagtgagagattcagttcctaagtggaatccctcttgtgaggagaaaatctatcatttgtctaattgaatcatagaccctcttttttgtagaaagtccaatagtggctgacggtgaggaaatctaatggtgaagctgaaatccaatggtttgctggtccaattgtgaactaattgcgctaatgaattctcatctttaagggagaggactaaatgtagcccaaggttga

SEQ ID NO: 119799 - DNA, 235 bp, Glycine max
gatggaacacttacttggtggtgatgaacaaaagcgctattctgtatcaatatatgcgataaaggatgaccctatggctgctaactcgtcaatcccgtgggtatggcttttgaaaggggggaaaagaagtttttgaatgttaaaacgccgcccctttcgtcattcttataatttggtgcatgggtggctcgcccactctagctaacctgcattctttttttttttttttatggga

SEQ ID NO: 119800 - DNA, 449 bp, Glycine max
  unsure (1)..(449): unsure at all n locations
agtcacctgangcatgcaagctgggtatgaaccatttgttggagatgatatttcttatagtatacatgttataaatntaatattggaaaaaatccttgaacaactcaacagtaaaatataatacaattgcttaggtgatttttattatatttttattatttaataattataaataaaaataaaattattttttaaagaaacaaaactaaaaaatgagtgagttctctattagtctctcctactcagctccgctcacctttcctgttcgactcatctttgtttcctcttcctcttctctacttcctgcatctacttgttttttaattctcttcatttcctctttgcctcgtttcttgtttttgtgtgtgttagtgttgttaagcttgggttntattttaacttctatttcatgcttactctaacctagtggcaattaagtttgtcgttga

SEQ ID NO: 119801 - DNA, 403 bp, Glycine max
actaagcttatactcactctctgtatttgactctggccattcttcatttttaatcaagcgtagccctcacaatgttacatatgactgtggttatgggaaatacacgtgtttatgaatcaatttacctatcacagaattggaatatgtgctcatgtattaccaatgcgtatggtgccctgatctacattaacattatttactcggcaattactgcaatgattgccggatgattttattaaattgggtttatgacatgacacactaatatgtaggtttataattctagttgatcgacgcattcttaattttagtctgggataaattatataactgtattgacttatatattatgtaatatatttcttaatatatagaaccacgactattattagtttctatttaa

SEQ ID NO: 119802 - DNA, 430 bp, Glycine max
  unsure (1)..(430): unsure at all n locations
gcagctganatgtaaaagccgttattgttttttgtggactccgaaaaggcttacgattcaatctcatggtcctttcttgactatatgctcgaaagaatgggatcttgtccaaagtggagacaatggatttcagcatgtctcacaacagctaccatatcagttntagttaatggcagaccctcaaaggagtttgtcccttctaggggcttgaggaaaggggaccctctagccccattgttattgggataatgttgtggtttggaaggctttgctgagaggtttcgaaatggtatcacgcttgaggattaattatgccaagagccagtttggagttatacggggagatgttaattggatcaatgcagcagctcaaaccttgaattgtagtgctttagaaacccctttcagctacttggngattcctataggg

SEQ ID NO: 119803 - DNA, 420 bp, Glycine max
  unsure (1)..(420): unsure at all n locations
tgttaagcatccacatgagttgtcggaggcaggtggtgttcttttctacaacgacacatgcggtttcaaggaggatgtcctgtgcccactatccataggagaactctaaagggaaggcagcgtcgacgccggtaatggatggagggtggggttgatagggatagtagtgcctggaagaagacgaggataagtcttcttcatccatgaaaaaagttgaagcattcttcgtcatcttgttgtgggtagggatagacttgttcttgtttggaggatcgacagctgctgcttgtggtggagttgttgagggattgatgatcttgatcaccttggtatacacacatatatctattctgaatgtccattcaaagttggtaatttgtagaattaatttgatattaactngcttgcttgcgagtattt

SEQ ID NO: 119804 - DNA, 400 bp, Glycine max
gatcttaagtcactgcagctgcaacttataaacaaattgcccattattttctttttcatgtgaatcacgaagcatcaactagaatcaagccaacgctattgtgcaagcaatctatggggcacaacacaccatatgattatgatgatggatggctcaaattctcacaaaggtaaactcatcactttcaaatagagctttcaaaactatcatgacatgtagaggagaatcaaggatttcaagtcacaaaatgtcaagaacttttattttcaaaacaattacccatttcttgagcatatcctataattcatagaaaaatatgcaatgtcgtacatgcacacaaaattgacccaaaatattaaactaataatccgacgatactaacaacattaacaaactaaca

SEQ ID NO: 119805 - DNA, 269 bp, Glycine max
  unsure (1)..(269): unsure at all n locations
aaaaagaatgtgtatgtgtttcttgattccanggttgtcatcatcaaaaatggggagattgtataaacaagcttcatgatgatgaatccagtcgatcaattagttttcatgatgacaaatatgatgacacatatcctaatcaatgatttcaagattgagtcaacatgttcctgatctatactaatttcacatgtcatcagaataaatcattaagattcacctactactattagttttatctctcattcaatagaatatatttcattatt

SEQ ID NO: 119806 - DNA, 184 bp, Glycine max
cactacggacacatagatactcagctgtgtacctggaagagaagtatcagatacctggttctgcttctcttgtccttgatgaatgcttcctgtggttactccactagaccatatggttgattgtcaactagggagtgctttacttctttcatgtacacgcatacagtgaccatatatcatctat

SEQ ID NO: 119807 - DNA, 441 bp, Glycine max
ttaagtcacctgcggcatgcaagcttgtaaactctctgggatcataatcattctatattctcttagatccaatgtttctaagttgtgcaacacgcctattgattctggaagatctactatctttgaatttctgaagcttaagtacgtcaaaagggataaatccccataattttccgtgagcggaacataattatacagcgaattgcgttcaaaatgaagtacccttaataacctgtagtttgtaggcattctcttcaccgaggattctgataattcttcatcactaacaacatgaagtgatcgaatgtttgagtttccaacacttcccaccaatatgttggaatcggatgctattgttaggcgacgaatcatcccacttcttggcgagttctcacgctcacttgcagaatggcaaaagcttaaatcttcatgtttctcacg

SEQ ID NO: 119808 - DNA, 183 bp, Glycine max
  unsure (1)..(183): unsure at all n locations
aaagagaaattacaatatagcatgggtcgcaacaaggaagtcatgaattcatattcttctattaanataaaatcttaaatatatacaatatttgctaaaaattttgaatctttaaaaatgtgatattttcttttctcctcgaggagaacctaccatttaaatgatgccaaaattcattaaaac

SEQ ID NO: 119809 - DNA, 448 bp, Glycine max
  unsure (1)..(448): unsure at all n locations
cattcaacacagatttctatggnggaggtgtactctaacataagaagattgcgtggattaaatgggatacaatgtgtcttccataagacaaggagggcatatgcatcaagactcttaacatagcattgcttggtaaatggagatgggatctttttcggcatcatggggaattatgggcaaggattctggagtctaaatatggtgactggagatgcctggctgaaggaacaagatgcagcaaggattctattttggggcaggacctaatggcaactcttaatcaatcacaacagggcactgcttttcaaaatgtaacacgttggagtgtatgatgtggtgataaggccagattctgggaggattgctggactgctgatgaagtatctttaatgataaaatatcctaagctgtaccgcatttcctgtcatcaaaagcacctcattcagca

SEQ ID NO: 119810 - DNA, 462 bp, Glycine max
  unsure (1)..(462): unsure at all n locations
catgcaagcnttcttgagaagctagagcttatctacactctcccatctaaaagctaagctcacactcttgacnaaatacatgacaatacaaataaaagtccctactacaaagactactcaaaatgccctgaaatacaaggctaaaaccctatactactagaatggccaaaatacaaggcccaaaagaaggaaaaacctattctaatatttacaaagaagagtggatccaaccttgatccatgggctaaaaaatctaccctaaggttcataagaaccctagggccttctttagtagctctagcccaagcctcttggagtcttctatccaatacccttgnggggtaggattgcatcacatagtgtgcatcctagtcattctgtgcattttgagcatcttggtgagggtgattctgaatatttngattttgagcataccactactaattttcatactgagaacat

SEQ ID NO: 119811 - DNA, 277 bp, Glycine max
tggttcgagttacttacccgttgaagatcgatgaacgattatgatcgaatgaagaacgtcgaagaacggtcgaaaccttcccgaaattactcacggaaacgttatggaaacgtttcggaagcgcctcggcttggattttcttcacggaaacaatttttccaagctaattagaaagagagagaagtgcctaatgggctgaaccctttttcaattcactgtttcccctatttatagaaaattgtgggataaactcggcacccatcttcgctatgggatc

SEQ ID NO: 119812 - DNA, 399 bp, Glycine max
gatccttaagcgaccccgctgcaactatgctgctatattacaatagacctccttatcctcagcagcaagatcaaccacagcaaaataattatgacctctccagcaacagatacaaccctggatggaggaatcaccctaatctcaaatggtctagccctcagcaacaacaacagcagcctgctccttccttccaaaatgttgctggcccaagcagaccatacattcctccaccaatccaacaacagcaacagccccagaaacaaccaacaattaaggctcctccacaaccttccctcgaagaacttgtgaggcaaatgactatgcagaacatgcagtttcaacaagagaccagagcctccattcagagcttaaccaatcagatgggacaatgggctacac

SEQ ID NO: 119813 - DNA, 466 bp, Glycine max
  unsure (1)..(466): unsure at all n locations
tctatactgtgtacaagaatgaagctctgataccacttgtttgtcttgtggcctcagatatcttaagaaggggggttgaattaagatattccaaactgtttcccctaattaaaaatctatnttgctttttactcaagttatgaattcccttaatgacaatcttcttaaatattatttcaaacaaagcaacttgaatatgaatataaagcaataataaataaaggagattaagggaagagaaaatgcaaactcagttttatactggttcggccacacccttgtgcctacgtccagtccccaatcaacccgcttgagagttccactatcttgtaaattccttgtacaagttctaaacacacaatgacaatccttcctttgtgtttagagatcctttcaacaagagactcacagtctcttaatcccttagagaatgagaagaagataaggaacaaatctctctatatag

SEQ ID NO: 119814 - DNA, 410 bp, Glycine max
  unsure (1)..(410): unsure at all n locations
agcttgaaggtaatctntatgccttggttaactcttgttacctaactggccatgaatcaaaaatctgcacctgtcgccaaactctgtggtttatgctcctctgccgaccaccacacagacctttgcccttctatgcaacaatctgaagtaattgaatagcctgaagcttatgctgcaaacatctacaatagacctcctcaacctcagcatcaaaattagccacaacagaacaattatgacctctcctgcaataggtacaatcccgggtggaggaatcatcccaaccttagatggtcgaatccttcacaacagcagcaacaacaacaatagccttattttccgaatgctgctggccaagcagaccatacgttcctccaccaatccaataacaacaacaacaacaacaacca

SEQ ID NO: 119815 - DNA, 326 bp, Glycine max
tgaccagcgctgacttccaaaatttttaagaaaactgcacagatttggttcatccaactacgatctttaatgagcaaagcgaatccttgattaagagggtagatattgattttcacctgtgattactccatcaatttgtacttttcaacgagattcagaacttgacacatccatttgatgcaccttttcaaaacatgttcttgggagtcttaaaaatgcaacataaatgattgagctctgaatgctcagactaataatatgaaacacttgggttgggccattaatatggaatgcagtgcattttgaatgaatatccttgcttttta

SEQ ID NO: 119816 - DNA, 442 bp, Glycine max
cgcttgtgtctaggaggatatccatgtcttctgttacattcatcttcaatgagatttatgaatccacaatgtgtacaaaccttgcttcatctctcatcagaactccctgtgtcagagcctccttagctacttcttcctttactataagtataatttggaggaaaaccatttttcctgtaacatctatccactgagtgattatccttaccacagcaggtacatgattttgatggaagttagcttgctgcattgatgagactagtgtttcccatcagatcactaatatcgatatgtctttcttgtcggacaacatatgagaaaacctttgctatgctagggtatggatccatcatcagtacatcagatctggcagtgccaaaatgatcatttaacacctcaagaaagtgcataacttgatccttttcttcctttcttatcattc

SEQ ID NO: 119817 - DNA, 247 bp, Glycine max
  unsure (1)..(247): unsure at all n locations
tctcgccacctaatgttgtagtaattggctgactgtgggctctgtgtttattgtctntacctctttcacttttattcctctaggacttcagatacttccttaaaattattaacgatataactcatgcttgataagtacttaccatggagcatactttgtcaattatttatatcttatactctctggattctataattctgttcatataaaagaaatatatttcgctctcgctgcaactagataaatg

SEQ ID NO: 119818 - DNA, 442 bp, Glycine max
gatcttaatcgacgctgctgcaactttctttacaatcaatctggctattgactttcttttctaattgcaagcttacattcttgatctttctttgtctagcatacacacttgctcaaactcatgataaaacacaatcttcattccaatcatgcattcaatccataatcaccatttcaaaactataccaaaactgcaatttcaaggagtcaagttaaactattctatatacatcaggaattgcatactactatccataatcaaaagtataaacccatatcacaaaaaagggtactaaaggcataattataataatcataattgtcatcaaaacaaaagaaagaatttaaaattcatgtgacaggtcctgtgactgagtatcctcatcctgagtgcctcctcatctatagatgagcacatgagtggcggaggagtggagtcaatc

SEQ ID NO: 119819 - DNA, 246 bp, Glycine max
tactcaagcttaaatttgagtaaaacattcagaaactgcgtggctatcgttttccatatatgtgtaatcgattacacagtgcaaactgtgaattcaaattttaatagctattgtaaatcatgtttggccactggtgatcgattaccaaagagttaatttggtgataaagactgtgtaacttaaaattcttgtgccaaccttttgctactacatttggaattacctcccgatttaatttactctttc

SEQ ID NO: 119820 - DNA, 429 bp, Glycine max
  unsure (1)..(429): unsure at all n locations
agctttgcatttgcatgatgtaccctaccaatgatgacacccttaaacataccacatacgccataagttactgatcatcaaagagaggaggtagtgaggaagatgtaggtggtatatgactcactacccattttggtggtcgtagaggataagcgaaccatcataatggaagtacgaataatccaccatgactatttgttgagtatttactaattttatgacaaaatttatatgaagttggattgcatgtttagatataggttgacatatgttatatcttcttggaagcatgagctccaatggagatcctataatgactagcaactggaatcgaanaaggaaggaatgagatgggaaatagaggtgcgagagaagtggtgaatgctagaggatgagaattaaaagaatatatgttggactaatttggga

SEQ ID NO: 119821 - DNA, 322 bp, Glycine max
cttcttgaaagcaggaatgtagcttccttgtgaagctagatgaataaagctttcttgagaaactagaaggggctactcataccgctccaatatctaatctcacccccatggcaaaatacaatgggaagtttccttatgaagcaagaaagatagcttccttgaaaagctaaaatggggctactcacaccccctcaataacttttctctccactgccataataaatacgatattctattttattaatatctgaattacattatattactatctttatatattagatattctattcatacttatttcttctatcataaaattata

SEQ ID NO: 119822 - DNA, 433 bp, Glycine max
gaacaactcaatttcatttgttgatttctcttatacaatgtccacaaagaactcatcttgttgatgaaattcaattctaaacgtgttgcaacaatgttgatcttcatgtcatgttcattttgcacatcttcatgtgcaacattcttcttgttctttagctgctgattacttctcatgacttgaagttgtctcttcatctaatgagtgtgttgacttcttcattgaagtacacaaccgaagacactttgagctttcaagcctatcatccttttgagtgagtcatggcacccttgagtttacttgttgttctgcatagaacttatcttttcaaaatacacttatagcaactcattagtacgcataaactcataatgcttatgatttgtgttcagaaagtgtgtcataagtaaaacacaaatgttctggactcatc

SEQ ID NO: 119823 - DNA, 376 bp, Glycine max
  unsure (1)..(376): unsure at all n locations
tgcccatgatgatggcgtccttactgtcatatgattcccctctagtgcaaaacattctatgaataactgcaaccttctgcttattagaacactgagctaatgaaatctagtgaagatctgacactattatccatactctacgagatagtccgagctcggccattcagactagctaaactttcactgttgataaactaatgcgatatagatcatngtctacgaaagacttctgtaagttctcggtaaattcaatgactgtccccatgcgtttgtaattccatctacttccgtatgacctgtctggcctatgcttcgtaaatggaacatgatgctccaagtccattctgtctcataaaacatgggtctatggtagttt

SEQ ID NO: 119824 - DNA, 429 bp, Glycine max
  unsure (1)..(429): unsure at all n locations
agcttctatataagctgacaccatttatcaatattcactatttgagncntattcaacaaattagagtgtatctcttttatcttagtgagagtgattctcctaaattcttgagtgattcaagaacacccaggctgtatcaaaggactttcacaacctttgtgtgttgccctcgctggaaagagtgattctttccttcctttcatattcacccttgttctttcaaaccacaattccagaaaattcacctctgcccagaattatctcgtggccataactcccattttatgcactcaaattaagtgattcttgagcctaaactgaatttcaaaacgagacctttcacctcggtttggaatcacctcatttggagccccgtagcttcagttattgccatttctatatttgttgccagccaccacttaacctacg

SEQ ID NO: 119825 - DNA, 281 bp, Glycine max
tcatggtgtcataaaggtgtgccgttctaccaaagtatcattagttcactaagcactttttttttattaaaaatatttgtcttgatcccagttttgtcaaatctgaaatccctattcatcattaaatttcatgcccaagcaatagctatcttgtaagggagttaagcacataagttcctcaacatgacattcttaaaaagatggaagcttgatgaattctttctttatgatttactatatgctatagaaaaaaataacatgcttttatatcaacaatctat

SEQ ID NO: 119826 - DNA, 381 bp, Glycine max
tcggaccttagcgacgcggctgcagctgtaggttaagtctacgattgtctcgtgttcttgcaacaattgttagacgtggctatacgagacatcttgccaaacaaagtcaggttaacgataactcgcatgtgctttttcttccattctatatgtagcaaagtcattgatccagtcatgtttgatgagttggaaaatgaggccgcaattatactgtgccagttggagatgtattttccccctgctttctttgacatcatgattcacttgattgtgcatctggtcaaagaaatcaaatgttgtggtcctgtttatctacggtggatgtactcggttgagcgatacatgaagatcttataagggtatacagagaatctatatcgt

SEQ ID NO: 119827 - DNA, 173 bp, Glycine max
tatgtgagattatgctctgcatgcatttccttccctctatatattatggactcttacactcctattacttgctgactcccttctatattcactcggccttttctgggagcccgtgattatactcacccttgattagttaatgacataccccacgtccgcataatcacggttgg

SEQ ID NO: 119828 - DNA, 311 bp, Glycine max
  unsure (1)..(311): unsure at all n locations
agctngctctaaatttacattgatgtttgtatttatggngggaggttgtattgccatttttgtttaagagtagtgtcccactggtaaaactaactttccaaatgtttgccttcgcaggaaatggccccgaggaagcttgcctcanagaggtccaggaaggacaaggcagccaaaggaactagttccgctccggagtatgacagtcaccgctttaggagcgctgtacaccagcagcgcttcgaggccatcaagggatggtcgtttctccgggagcgacgcgtccagctcagggacgacgagtatactgattt

SEQ ID NO: 119829 - DNA, 465 bp, Glycine max
  unsure (1)..(465): unsure at all n locations
gagaggatgcttcaatggaggataagaaagagggagagaaagagagaggggggagcacgaaattgaaggaagataaagggagagaagttgaactttgagttgtgtgtcactagactctcattcatcaaagttacaacaagtgttacacatacttctatttatagactatgtagcttccttgagaagctttcttgagaaaaattccttgcgaagcttctttgagaaaacttccttgagaagctagagcttagctacacacacccctctcataactaagctcaccttcttgagaagcttccttaagaagattcctaaagaagctagagcttagctacacatacctctctaatagccaagctcacctccttgagatgagaatcaagagcttagctacacacccnctataatagctaagctcacccccatgacaaaatacatantaatacaaaataaattccctactac

SEQ ID NO: 119830 - DNA, 430 bp, Glycine max
  unsure (1)..(430): unsure at all n locations
gctaacaactntagttcattgagtttcaactattattgctctataactcanattgcaagccatattcataccaaataaaaatggtccaaaagccttcacaataatacaatgtttaagtcttcttgaaagtactttcagaaaattttctttatcatttcagagcaaagcagcacaagtagcaagaattgtcgatgcaagataaaaatcattacaattaattttcatagtaccttatagaagtttcttccaccttccaaaaatttcatattaccattatatcattcttaatatcatgagtaaacttaattctacttatattatgtacatcacttcaaatactcggaactagatttaaagtggttgttcacttattactgaagatgaattcatttatttttgaccaataccattaacaataattctaaacata

SEQ ID NO: 119831 - DNA, 284 bp, Glycine max
  unsure (1)..(284): unsure at all n locations
gacactatgaaactaagcttaagtaagtccttattattctcatatcttgtcatgctcctctcaagataagtacagaacatgaccactggatcccaactaatgtttggtgtacattggagcacatctcgcactactacatgatggccttttccccagtgtttccgaaagtgttcaaaatgattgcaactgatgtccaaaattgtatgataaaataagtaattatcattggaatcctctctntgagctgcttccggtaactgcatgtatctgctaattttatgatc

SEQ ID NO: 119832 - DNA, 463 bp, Glycine max
  unsure (1)..(463): unsure at all n locations
agcttatccttgtgttgntgcatgtgtggatcattcctatggtgatctcgnatttgacatacgtgggggagaaaatggataggaggtgaccccatgtctttgcaaacttcatgaatatactgttgaccaactaagagtttatctagtttatccatagtgtggtttatgtttatatgcatgtattgaggagatttgagttactatgatgtcgtatatatatcatgtgatgttttatgttgatgttgtgcttcaacctttagcctttgaggtgtgaaaagtttacaaatactttaataaataaattaattgaagaattttaaatgaattaaagtaaactcttctacttaagttagttcctagattcatgtaacgccggtgggtctgtacaaagtgcagcggatctcacgcttaagcatggctatgtatccacataattgtgaacctttgtgatattgctccatga

SEQ ID NO: 119833 - DNA, 422 bp, Glycine max
  unsure (1)..(422): unsure at all n locations
agctntntcgctgcgaaattccttccttggtgttgtgttggttcgtgctaaaggtggtgtttgtcattggaagtgcggtaggtacgctntgtggttgattctagggatggcctttgtggataactgggtggtaggtaagaaggagggttgttattggctaagtaatgacattgttgggttgatgggaaacttggccgtataggaatggtagtcacaagatgggtttctccctcatcctcaccctcttcatttgccccacttttcttattcatcaaaataggatgattaaatgttcctcttttcagacccacttcgatcctttcgctggcgaagaccaaatctgtaaaacttgaatgtgtgtaacccagccattttcatagtagaacaccggtaacgtgcatctatcattgtgataatctctt

SEQ ID NO: 119834 - DNA, 401 bp, Glycine max
  unsure (1)..(401): unsure at all n locations
gtgcgcagccaccatctnttatagtagagtacctattttgtgtctaccatcacgattatcgtctccctttccattattgngggtaccacctgtgccgtcatatccctacaccttttgggcgtgttctttgaatgatccgtccccctttgtgcaaatgttctgtagttgcatcctatccagaaccatatcaaaattgtattgatactgcctaacaaatgacaccattatgtccttccaagaatggactctggaagattccaagttagtgtaccatgtaacagctaccccatttagactttcttggaaggaatgtattagcaattccatatcttttgcgtattcccccatcttctgacaatacatctttaaatggttcttgggacaagtagtccccttgttct

SEQ ID NO: 119835 - DNA, 256 bp, Glycine max
agcttatgtaatggctcaacgaatggatctcttgagcctcagtctatacaccacgcaaaggacaaacgtcaagaatgtctacaatacatagagacatgggtcaaaggaatcacattgacaaatgtacttaggaccttacttggatcattaagagaaatgcatgtcattactgcgaaaaaagatgcattataagtacctaattatagtttctcgattatggcacattggcatctatagtctgtgtcataagacaata

SEQ ID NO: 119836 - DNA, 284 bp, Glycine max
tacggacactatagatactaagcttgagatctacatatgtgattttcgcgacgacacatcatagttataggtaaattacgagtctatgctgctgcatgtgaacacatttatgtatcataccaatgagagattacattttgaaataatacaattgtaaggaacgttctacaatattaagaatcaatatagctgacagaatactataattgggaggctgggtctagcgaaaaatagtctcgcacagcctcatgaaccaatgttcgttcgaattccagccgggagat

SEQ ID NO: 119837 - DNA, 388 bp, Glycine max
  unsure (1)..(388): unsure at all n locations
ttatactttttctatcgttttttatngtgntaaatctcctgatatgtgcacattctctttttgaaagaaggaattctttatagaaatatcttaaatttggtgaattaagttaattgggcgacggaagcctttgtgtattgtatgaaatgtgggatcgactctccatctaaattttaagtttggatgatagtggaaatgccactaagaaggccaacacctaccatcgaatgagcgacaacaacgacgtatgtgcaactcttttattatccttttttaaaatgacattttaggttcattgtgattcaaagtatatattatatatggaagtgaatgtctggagagtcctttaccagagactaacacattcatctcggtcgattaagaaatg

SEQ ID NO: 119838 - DNA, 421 bp, Glycine max
ttcaaccccataacccaaggaatggcaatgttgattgctctttcttcgacaacatttcacagagatgaatgactcgggaatacgcatgctatgcatggaaaatgtaattatgagattgagatgcccgaagaaacatcttttcctattttaccacgcattatgtaccatgctcaatcattttgttttgtgtgaaacgggtttatgatcccaacatgattggctcatggtatctaacatttcgcaactaaataatgtatcttaattattcatgcatgtcatatttgttaatattattacaaactaaatgtaatgatctgctctgaatgattttaatataattttgtgtacaaaattatattatatatgaatcattattttataaaattatttatctattggcttatattcattacaattatat

SEQ ID NO: 119839 - DNA, 440 bp, Glycine max
  unsure (1)..(440): unsure at all n locations
agcttanggatggaatacttacttgttggtgattatcttaagcgcaaaacggaatcaaaaaatgcgaaaaaggatgaccctagggctgcaaattcatcaatcccgttggtatggcttttgaaaggggggaaaagaagtttttgaatgtaaaaacgccccccccttttcgtcatttttataatttggtgcaagggtggctcgcccaggcgagcccagctcgcccaggcgagctaacctgcacttttttttttttttttttttttgaggggaacattaaccatgtcccctcccttctcatggattaacattttgcctaacttgaacttacttaggttagaattaggcgttgattacttattntattattacccttttcctttttaaaacaaacaaatagtaaaagaaagctgcgaaatacaaaggatacggagcttgcttgc

SEQ ID NO: 119840 - DNA, 295 bp, Glycine max
gatgatatggtcttcaccgacaaaaggatcaaagtgagtctgtttaataagaaaatttagtcatcctgcttggacgaatgagaaaactggggcaaattaagagggtgagaatgagggacaagcccatgctgtgactgccattcctatacatccaagtttcccaccaacccaacaatgtcattactcatccaataacaaaccttcttcataccacccgccatattttccctagtccattcttaaatctaactatcattctagtgttagaataatatattcaatacttttgtattct

SEQ ID NO: 119841 - DNA, 485 bp, Glycine max
  unsure (1)..(485): unsure at all n locations
ggatccttaagtcacctgcggcatgcaagctngaagaatgtttatcttctacatgttctcttctctcttgagngacataggnatggattattatactgagcgttgcatcttactttatatcttattatatgtgcatcatgcatcatcatgtaggagtaagatgaaaagttctatagctagaaaatttcttcagtgtttaaaactctctattttaatcaatcacagactaattgtaatcgagtacacaagtctttatagctcgcaaagaagtctctcatatcgatttaatcgattacagggtaatcgtaatcaattacacatattcttttgagacaatgattggtttttctggagtctctgcttaatcaattaccaggtgatgtaatctattattcctctcttaaagtgtttcaaagtgatcataacactttaatcgactacctcataatctaatcattacttggtcttgaaagttcttattttgg

SEQ ID NO: 119842 - DNA, 460 bp, Glycine max
tgctcaactggataagatttggggttgactggtgttatttggagactactatcaatattgtgtataatacaatgattgtgtcgtcttaacattggcttaagcatgataaatacttctcaagatgtctgacatcaatatacaatagtaggtttgcttatagtttactaagaaaaggaatgaagaaaattatcattcattttggaaactctaaatattacagcattgtagaacgttggcaacaagggtgctattgacaaggtaaaataaatttctatattatgtttttatctaagatgatgtagttcgcactttgcatactacgtgtagtttgcatgcatacaaaatggttactggttatgatataccaatacaaacttcttacattgtgacttgatgcatgcattgtacttgcttacattgatatggttgaacttatattcttggattctcctccaagttt

SEQ ID NO: 119843 - DNA, 393 bp, Glycine max
  unsure (1)..(393): unsure at all n locations
agcttatgcgcatatttccctacaatcgttctcttgccccagacattctattaaccgaaaaaaaatgcacccatatacaatcaaggcagctntgttacctagattatttacacgtacttccaaggtgtatttgttacttacatcacacacatctccttggctaaattcacatacatgcatactccaagcattttggggtaccaaaaattgcacatgtgcacatcttggtatttctaatacctatacatacacaaacttcatgatgaatcttgactatctacacaataaggtgctacatttcatgccttttttcaagtttttgctacctaaagccgcatgcaaattcaagcatantttcctttgctgactaanattggattcaaattatatata

SEQ ID NO: 119844 - DNA, 362 bp, Glycine max
  unsure (1)..(362): unsure at all n locations
tcaactcttgccannatgccgaataataataatatatatctctatcgaaaaataaactttattcccttgggcagcatcaatctatgccctttaatggtattagtaaggcaagtttggatttattatgcaattattatgtttttcttttctaaagatagaactcattatcatccattagttctgatcaaatacgcttttgggtattggccgataaggatggacaataatcttaacattaaacataaaccaataaattaaagtggagacaacatttacttatttgctcaattataatacacgtgtggtggtaaattcctatctaaacattaatagcataaactattatatttaataatttttat

SEQ ID NO: 119845 - DNA, 347 bp, Glycine max
taatgacagaattctcccactgagattctaactcatgttgctctctcttggaaagctttaacttgtcttcaagaatatcccttgtgtcctcgtaaagcttcagagatgaccattgaagtggagcccactcaatagaccaactttataagcagaaataggtgacaactatcaagacatgacaactagtaaagtcatcttaggaacctttctgatgagcattccaaagatacatcacaatggcgattctgatgttagctaagacaggatccataatgaagtacatccctttgatgaaggacaattgatatggctatctgaagtaacataactccatcatacttaacaca

SEQ ID NO: 119846 - DNA, 346 bp, Glycine max
  unsure (1)..(346): unsure at all n locations
agcttgctctaccgtanaagaacaatgacatgttgctctttttagaaaaccgcgcgatgtcggcagcaatgtatcacactgtgctattcaaccaccgacgctggctactgttgtttctattccacccttgaataatgctcggacaatgaggacatgtactcgttcgatcggagacctgcggccattgcttttttcgagacctcccaatcgtcctctttttctggcagtcaaacggtggaatctatctcaatcaatatcacaggatcatggcttatgactatgtgggctacaccctccgaggctgatgatatgtgactatgcgaccgacggacgatacacttgtcca

SEQ ID NO: 119847 - DNA, 291 bp, Glycine max
  unsure (1)..(291): unsure at all n locations
ttacggacacttaaatactaagctatagcttattacacgactgtaactctgttaccagttgtctgacttattgcctcanatttcttaagagcgggggttggattgttatatcgctgaccatatccacacgacaatatctatttcacactgatagtgcagactgacatacctgccttatataatggacaccttgaatttgtgatgccgatactacgatgctgtatataacgacaatagactttttcaccgatgagtttttgggtcgataaatttctcaatacgatttatact

SEQ ID NO: 119848 - DNA, 357 bp, Glycine max
agcttagccctagaggggatgtgtatttttattgtcttggagaggattaataacaatgcctataggttggaccttccagaaaagtatggagtcagcaccacttttaacatttatgatttaattactttagtaggtggatctgatattgaggaagaggaaccaatagatttgaggtcaaatccttctcaagggggaggggatgatgcaatcctctctaggaagggaccagttaccaaagccatgagcaagaggctccaagatgattgtgctagagctactaaagaaagccctatggttctcatgaaccttaaggtatatctttgagcccatgggtcaagggttgatccactcttcttt

SEQ ID NO: 119849 - DNA, 384 bp, Glycine max
tgagatgaggaagtgttgaagggtgaaacttcctgctgttattgttgaccacagagtggtacctggagatatgtcgcgggggtcaggagaccttgtggacgtcaggtggggtgctattgcccaaaaccatgcttgaccaatcccgacccaacccgggcatagttggtcagtgagaacctgtgatgtacctaagcaggcgagctcctggcagtcaacagataaattgaacatagaccacatagcattgaggcttgtggtggctggccagctgtgaaacttgattgatatgtgagatatggtctctggtaatcgattaccaatggtgggtagtcgattacaatgcttaataatgaagacaggagactaatatggtctttggaatct

SEQ ID NO: 119850 - DNA, 447 bp, Glycine max
  unsure (1)..(447): unsure at all n locations
agcttgtaatactttgngtgggaaatgatagtgttatctctcttggatatcaaccttgtgctacaacaattgcagcaaggcccactatccacaatgagagaacaatttttggttaaaaccttgcatcttgtatgaaagatgttctctctttgggtttgggttaggtcacaagattgactcctaaggagccttctcactattagaagatcaccttcttcataggggtaaacctcttcaatatgctcatcacccttggcttcgccctcacttccagttgaggaaggagaagaagtagcctcctcttggctaccatagatgccttaacccctcatgatcatggttttctttgtggggcattgagaagaaatgtggcctttcccaatacatttgaagcacttgatgttactagttttatcttgtgaactagcctttggagtgatttcctct

SEQ ID NO: 119851 - DNA, 421 bp, Glycine max
tacggacacttaaatactaagctgcaatctcccacatctctgcattggaagcacaattttcatattgcgagaaatacctgccgacacgttgaacttactacaattgaatactgagagagagtccaacccttttagcagtacttcttctcccaaaaattgaggacattcatcaatttcaagtatggaaaggcttgggaacatgattttgccctcctcccttgataaccttttaaactttggcagaccacggaaggtcagatcttctatggccctgaaaactacttccccattgctggattcctcatcatagaggtattctacattattcatgtgtgatgctcttagaatctttagagaaggcaatttccctaatggtggaagttgtacacagttttcgcaattcataagtattataatgata

SEQ ID NO: 119852 - DNA, 452 bp, Glycine max
  unsure (1)..(452): unsure at all n locations
agcttggcgagagtacatctgtctctaattcctttattgtcatgtatgcaaagngtggagcagtggaagaagcgtaccatgtgtttagcggtatgaaagggaagaatgtgatttccgggaatgtcatgattcttgggcttgcatcgcacggtaatggagaagaggcgttaacacttttcgcgaagatgttacaacagaatgtggagagaccgaatgatgttacgttcttgggggtgttaagtgcttgtagccatggaggattggttgatgaaagtagacgatgtattgatattatgggcagggactataacatccaacccacaataaagcactatgggtgcgtggtggaccttttgggtcgagctggtttagttgaggatgcatacaatntgataaagaacatgccaatagagtgcaatgcagttgtatgganggactttgtagctgcgtgt

SEQ ID NO: 119853 - DNA, 392 bp, Glycine max
  unsure (1)..(392): unsure at all n locations
cacaaggtgggtatatatagagaaaactattataatcgtttgtaattgattagattgaaaatgtaattgattatctcgtgaaagtaatcaattctatttcccactctatagattaaagtattctttccaaaatctggaaaacattcaagaacaatgtaatcgattacaatcttaatttaatcgatcaaagtgttcttgatcacttctctaaacactttcaagagcaatgtaatcgattattatatcctcataatcgattaattggtagaacccggaaaatatacgtggcctattanagaactatgtcattgattacaaatacatggtaattgattaaacaaaagctatgatctctttgcaaggtcttaacacttatgtaatcgattacacat

SEQ ID NO: 119854 - DNA, 415 bp, Glycine max
  unsure (1)..(415): unsure at all n locations
agcttatgcgcatgtntccttacgaacgttcattttctgaatacatcctattaaccgaaaaaatgcacccatatacaatcaatgcagctctgttacctagattatttacacgtacttccaatgtgtatttgttacttacatcacacacatcttcttggctaaattcacatacatgcatactccaagcattttggggtacccaaaaattgcacatgtgcacattttggtatttccaatacctatacatacacaaactncatgatgaatcttgactatctacacaataaggtgctacatttcatgccctttttaagtttttgctacctaaagccgcatgcaaattcaagcatatcttcctttgctgactanaattggatacaaattatatatatattttattggagatatgcttttt

SEQ ID NO: 119855 - DNA, 241 bp, Glycine max
  unsure (1)..(241): unsure at all n locations
tctngatcaatacaattctctaaccattccaatccatgcaaatcatgctattgctcattcaaatcattctcaaacactcatttcataccaaagctatccactgcatatcattgtcaatcaattcgcaattcatacacgcttttggtacatgcaaacaactcaaaatgctgaaattataaataactgaaacataataaatgaatttaaactaaatgaccatgaatcattaaatatctgaatt

SEQ ID NO: 119856 - DNA, 406 bp, Glycine max
  unsure (1)..(406): unsure at all n locations
agcttgaatgcaaactggatgcgctggacaacttgttttcccatctggccttgaatcagaaatctgtacctgtcgcaagggtttgaggattgtgctcctctgatgaccaccatacagaccttngcccttccatgcagcaacctggagcaattgagcagcctgaagcttatgctgcaaatatttacaatagacctcctcaacctcagcagcaaaatcaactacagcagagcaattatgacctttccagcaacagatacaaccctggatggaggaatcaccctaacctgagatggtccagccctcagcaacaacaacagcagcctgctccttccttccaaaatgttgctggcccaagcagaccatacattccttcaccaatccatcaacagcaacaaccctagaaaca

SEQ ID NO: 119857 - DNA, 191 bp, Glycine max
tcacgttgcttattgattccatattgctgcgaagaaagactttgttctatatggtgatctgcagaagaacatagaccacatactcttgcaacatgtgtagatttatgattcatggcaagctgagttactatgttgaccaaggcatcaagttttcctttcaactttttatattcacaagatgaagataaatc

SEQ ID NO: 119858 - DNA, 464 bp, Glycine max
  unsure (1)..(464): unsure at all n locations
gagcttatcaagctcttacagatccaactgcctatgtatttgatatattantatgcctttcattttagaggcacacaagtacttcgttgagtacatcgccaaagcttatcaagctcttacagatccaacagctcgtgaaaattatgaaaaatatggccattctgatggcaggcaggtaataaaacagacgactatgaaaaaatgccaagtggcctgttatctttttgttttcatgctggtgaaatatgcatgatattttattgtagggattccaaatgggtatagctcttcctcaattcctgctaaatattgatggggcatctggcggaatacttctgcattggattgttggagtgtgtattctcttgccgctggtcattgctgttgttgatctctccagatcatcaaagtatacctgcaacttgtgatgcataaacactttcactgactatacttatgaagct

SEQ ID NO: 119859 - DNA, 225 bp, Glycine max
ctctagccatcataaccatctcatgctgaacttcatccatcttgtaacaaatattccggtcaagtgagtgcttttctgcatcaaacaaatcaaatgtgatcttttgatcatctattcccatttgcatattacctttccccatatccaccacataattggcagttaacatgaatggacaacccaagatgagtgggatttcaacatcctcttctatatccatgatca

SEQ ID NO: 119860 - DNA, 448 bp, Glycine max
  unsure (1)..(448): unsure at all n locations
cgccagctttggtaccaaactctaaagggaaattttcttttgattgaacgnagaatngagactttagaaattttaagcctttgtctaagaaaacaaagttattgtctgaagaaaaactttatgagacaaataaaaaattttcaccgaaacactttcagacgatggaaatagattttgcaaaaaaaaaaagagttttccaaagcaaaataaaattcagatgctacgtcagtttaagcagaataataatgaaaacatatgagacatgaagatttatattggttcatttctaccattgagactacgtctagttcttgacaaaccacaaaattccactaacttcaacaagttataagtactagtcattggcacgtttgactctacaacacaaggtgtacaccaagcttgttcaacccattattctttgcctaccaaccactatggctctata

SEQ ID NO: 119861 - DNA, 307 bp, Glycine max
gtgctttctaagatggtgcatatgtaatcaccatcatcttatcttcttatctaaaagtcaacaaacattagttacaattgcaacacaactgatttaaaaaccaatttgaaagacaactgatacatctagagagtcttacagccaagatccgatagtactatgtggactaaataacaatcatcatatagaactatgttatcattacctacactacatgcaaccctaaaaagcatgggttgtaaataagtgagccaacactacgtgatttgaatcttcctgcttcaataacatgagatctgcaattata

SEQ ID NO: 119862 - DNA, 349 bp, Glycine max
agcttgatctgcagatgtccagtgctatgtttgtcatccgcgcacttaacacgacgtattcatattcaatatcagtatttttctaacatagacttggattagcatgaagacaagtccacttagcgaggtctgcaaatcataaaagctgcaactctcgctgggatctgggccggcttagctataatgatgcatcttaagtacagaagagcatgcgcttagctgataaggactcacttatcactcacattgccgcatggaattcagcttagctgacatgattggcgcttatcttcatgaacctcagttatagcccgaaagaattgagctcggcggcaatgcctaatgctta

SEQ ID NO: 119863 - DNA, 232 bp, Glycine max
  unsure (1)..(232): unsure at all n locations
agcttacacagtttgcactgcgacacatgtgattgcgtttgtaatatcacnaactatgtatctgtgggagtatatgactaggagatggactctttcctgttgaagcataacaaatgggcatgtgtttagatatataccttactaagagtcgaacacatatgtagctgtatcgagagtcggttcgaccatgtagtcttttataacatgtcgaggcatcatatgacacatgatg

SEQ ID NO: 119864 - DNA, 460 bp, Glycine max
  unsure (1)..(460): unsure at all n locations
agcttattccanacttaagagagtngatgttttttgtttttctctntcagatacaaatattcaatctctgttttattcaccttccaacttttccactgctcttaccatccttgatctttattcaaataagctcacatcctcaacatttcaactgttgtcaaactttagccttaatcttcaggagctttatcttggtcataataacattgttttgtcatctcctctctgcccaaactttccggctcttgttatccttgacctttcctataataatatgacatcatcagtctttcaaggtagtttcaacttcagctcanaacttcaaaatctttatttgtataattgtagtcttacggatggaagttctcttatgtcatcttctttcattatgagttcttcatcttctctagtatcccttgatctctcctcaaatcagttgacatcatcaactatattttac

SEQ ID NO: 119865 - DNA, 181 bp, Glycine max
caaactttctaaccatgccaatgttgttatgtttaaatcatgaagaggcgttgaacgagtttctggcaaagcttaagtggttgtggctagtggtggtctatattatctcaagtgacgacacttgtataaaatctgatgctaaagttagttgtgagctctggaaaagaagaaattataaaaa

SEQ ID NO: 119866 - DNA, 414 bp, Glycine max
  unsure (1)..(414): unsure at all n locations
caaaagatacaaacaactttagggaaagcatggagaacagatagataattcttcagaaatttccactcaatcatgtgatcaagttaaagacaacaaagctttaccttgaaaatgaggaaatttataaataaagacctaatctattggaacatctttagatgttgaaaaatcaactagaaggcttacataatgaatatatcacactcaataaacttcatgattgcctaaataaggaaatgtgtcatctattgaaagaatgctcataatttcataagaactatgaaaatntagaggcaagtaaacataacttatgggttgaatgtgaataatataagacaagcctgaaattctcatatgataaacttgaacagtatgaggttctccataagcaaccttaagatgttgtacacttca

SEQ ID NO: 119867 - DNA, 411 bp, Glycine max
aacgtcaatcctgcatctgtgataggatcaagcccccataaagaaaagtttcatagttatcttggggttgtggcacgagaaaaaattcctattgtcccctccaattggaatcttgtcctggactctttaaagaacctaatatgggatgatattttggtaagtgcatttaagtacatgtatgtataacattgtctttaactcagtttaaaaattaatcattcacttactgctacataacaattgtgatgtgcacggcaaatttgacatccctgaatgtgatcatgcgataaataacgcgatgtcaacaatctcatctatatggacgtatttttactcttactcgacatattaattgttatgcctccttttagtgtcaatatacacgaccactgtgaatttgtcttctcctct

SEQ ID NO: 119868 - DNA, 413 bp, Glycine max
  unsure (1)..(413): unsure at all n locations
atccttaagtcacctgcggcatgcaagcttncttaagaagattcctaaagaagcttgttcttaactacacatacctctctaatagctaagctcacctccttgagatgagaagctagagcttagctacacaccccctataatagctaagctcacccccatgacaaaaaacatgaaaatacaaaaaaaaaagtccttaatacaaagactacttaaaatgccccaaaatacaaggctaaaaccctatactactagaatggccaaaatacaaggcccagacgaaggaaatacctattctaatatttacaaagataagcgggctcatacttagcccatgggctcgaaatctaccctaaggctcatgagaaccctaaggcctttccttggatctctaacccaatctacttggagtcttc

SEQ ID NO: 119869 - DNA, 304 bp, Glycine max
atgttggacttggacctcgcctaagcgttgtattatgctcatgcaagagatttgcaaatatgatggcacacaacaagatgcaagaagatgaaagttgggaagaaaaagaactccttgcggtggaaatggtgatttttaagtagtgtcacaccccataatgtcataacaatgataaactggagggaatactagactcgaaaagtccacctaatcttaccagttgtcaaactataccaattatatccaaagggctaaatggtcgataatgggtcacatttatatttcttggtcgaatttttgtata

SEQ ID NO: 119870 - DNA, 472 bp, Glycine max
  unsure (1)..(472): unsure at all n locations
cacctgaggcatgcacgcttgtatataagctgaaccattctatcaatcttcacttgttgagtgctattcagaacaatagagtttatctctttttatcttaccgagagtgattctcctaaattcttgagagattcaagaacaccctggctgtatcaaaggactttcacaacctttgtgtgttgccctcgctggaaagagtgattctttccttcctttcatcttcacccttgttctttcaaaccacaattccagaaaattcacctctgcccagaattatctcgtggccataactcccattttacgcactcaaattaagtgattcttgagcctaaattgaatttcaaaacgagacctttcacctcgttttggaatcacctcatttggagccctgtagcttcagttattgtcatttctatatttctgtccagccaccacttaacctacattntaccatcccattcatccattttat

SEQ ID NO: 119871 - DNA, 310 bp, Glycine max
tgcattgttcaatgtcgagcgtctcgatatatcatgcgcctgtatctgttcttcgagtgaaaagtaacgaccatttgaatttctcgagagctttcaccgttcaatctcgagcgtatcgatatattatgcgcctgaataggacctccgagtgaaaagttatgaccatttgaattgctcaagagcttgcattgttcaatttgaagcgtctcgatatattatgtgcctgaatcggacctacgagtgaaaagttatgaccatttgaattgctcgagagctgccattgttcaatttttagcattccgatatatta

SEQ ID NO: 119872 - DNA, 385 bp, Glycine max
  unsure (1)..(385): unsure at all n locations
gatccttaatcacctgaggcatgcaagcttgtgnaatggctagacatgatacatgtcttggctttggttgttttaaggataacagggatgccccacattatttccatgacacaaatgcaatatatgatgattcggatactctatgcagaactggtcatgcatgcacctatgcggacactcagatgtcgaaatattatggtcatgtgatgctagggctcaagattcatttcctgtattttaaccaacccaatgtttccaaaatatgttcttttatcaatgggcgcattcatccgaggccatttcgggcgtctgggaaaatcttcacaacattcacgctccagggcgttacacatattttgaaaaactagtatgatcagggaatttt

SEQ ID NO: 119873 - DNA, 415 bp, Glycine max
  unsure (1)..(415): unsure at all n locations
agctngagcaacattggcttgtggttctagagtattgtgtgtcaaacctgctacgaggaattggggttaaaattacgttgagaaatttcaatgagattgatggaagcaattgctttcttgcaagacttttcaacgtgagtctcctgagcaagaaaaagagttttgacttcatcgattgtgagaggctcaaacctacaactaataagcgtaaccagtgactcaaattcatacggtagtccatcaagaatgatatcaacatgttcataagccggaacaaattctccgatagatgaaagcgaatcaatcaaggtctgaactcgaatgagatattcagaaattgaacaattatacagcaaaatattacgaagttcattacgaagctgcttcttcttcgcacaaattatagattgaaagt

SEQ ID NO: 119874 - DNA, 324 bp, Glycine max
ggtaagaagaatagcattctaccatgtgtttattgaagccttgtcttcctcttccatagcctctacctctgaaacttgcacaccctcgttctcatcctttagattggtctccacgagtcaccttcaaagcatgtttttcttcagcattgtaacttatgagttgttcatgccctattaaagtgctctgcatttcgttgattgataaagttcttatatcctcggattctcctatgaatcctacattattattgaattgtgatatgtatactctaacaatgtttcatctcttgctactctgccgctctctttattgctgattatatt

SEQ ID NO: 119875 - DNA, 355 bp, Glycine max
agcttatcgagctccatattgtcgatagacactctcttattcttgtaattctatgaaatatattaatctacgtgatgctatgtaagtccttaataataatggaccgtactgttttacttttcaaacttgcaataaatgaatatgtttgatttcatctgtctcattacaagtaaaaaccatgatcatgctttaccacgaccatgctttttgtattattctccatacctgatgagaccaaaaccgcttaaggagtattgagaccactgatactatagatgcaggacatgaactcgttgaaccgataaaggtgtccaatccctgtgtatatattatatgttgactccatgaaataata

SEQ ID NO: 119876 - DNA, 135 bp, Glycine max
gtgttgaatgcattaatatgaaacagagcattgtcattaaattatgcgcatataatgctacagacatcttataattgatacataccgacatctgtgggccatttcatacaccttggtggaatggtcaacaatatt

SEQ ID NO: 119877 - DNA, 489 bp, Glycine max
  unsure (1)..(489): unsure at all n locations
tcttaagtcacctgcggcatgcaagcttcttgaacgggatgaatatattcattgtcttatataaaggatgaagacatggcacatgatatcttttggtgtcaccctgatgcagtaaagttagtcaatgcatgtaatttgatgtttttgatagacagtacctacaaaacaaataggtatagactcccactacttgatcttgttggggtgacaccaacagggatgacattctctactggttttgcatatctggagggcgaatggcttaataatgtggtatgggcattagaacggttctgagttatatttttaatacgtgatgccctccctggagttattgtcattgacagagacctatcattgatgaatgcaatgagaactgtatttcctgagtgtacaaanttggtgtgcaactctacataaacaagaatgtcaggcaaaattgaatcattaattggtcaaacaatgcttggaatatgcatggatgctggg

SEQ ID NO: 119878 - DNA, 456 bp, Glycine max
gtaccaagtaaaacaagttccgcgagagttcgacactctgtttttcttaccattttataatacttgcatgatccggtgcacttgttggctatcaaacaatcaagcatggcatctgtgaaagagcaatctgcaatggtacaaaggatagtaaaagtgccacgatctttgctcttctatggcaaggaggatgatggaatggtaacaacaatcttgctttgtataattgcaaaaacatttctgcccaacttcactttcccatcccctattagcttcctattatgagtacataataggaaaatttctgcccaacaatcttgccttgtataattaccttctgttaatttaagtaataagtcaaggaatctgctttggggcataatgtattatggaactatataatatttgcaccaacatttatggcttcgaaactctctgcacttctctatgttatatcac

SEQ ID NO: 119879 - DNA, 313 bp, Glycine max
  unsure (1)..(313): unsure at all n locations
gtctactatggttgatattatttccttctccgacatcgcaggaagcactagggctggcagatccctccaactgttggcgtatcctttgaaagatccacgccccctttttgcacatgttctgaacttgcgtgctatgtgaagccatcatactgacactgcctgaataacgctaccattatgtcattccaagaatggactcgggaatgctccatgttagaggaccctgtgacagctgcacgagctagactttcttagaatgaatgtaccagccattcctcatcctttgcgtatgcccacagctntacacaataca

SEQ ID NO: 119880 - DNA, 106 bp, Glycine max
taaaaaaaaaaaaaaaaatgtctctgcacgacaaacacgagacacgaaaagaaaaaattttttcaaagaacggagggaaccagcgaaagcagaaaggagaggcaag

SEQ ID NO: 119881 - DNA, 392 bp, Glycine max
  unsure (1)..(392): unsure at all n locations
agcttaagaattttggcctcaacaaacttcngttcttttnttgaaacncaaccaacaaacctccaatctttaatggagatggttaccactactggaaacctgaatgcatatctttattgaggcaatagacttaaatatctgggaagccatagaaatagggccttatatacccaccacagcagaaagaaccacaatagatgggagcacaactagcgaaagcatagcaatagagaaacctacagatagatggtctgaagaggatagaagacgagttcaatacaatttaaaagccaaaaacataattacatctgccctgagaatggatgaatatttcacggtttcaaattgtaagagtgctaatgaaatgtgggacactctacaattaacacatg

SEQ ID NO: 119882 - DNA, 289 bp, Glycine max
aaggggaagatagagaataagtgaaggagaggaaagaaagaggaggaggaaagggaaaaatggaagaagaaaaaagaggaaagaagaaagaaaagaaaagggagaggaagaggggatgaaaagaaaatgggaagaaagaagaaggaagggaagagagaaagaaggaaagagaaagggaggaagaaggaggaaaggggaaaagaaggaagaaggaaaggggaagaaaagaggaaggagagaggaaggaggagagagagggaagaaaagagaggaaaagaaagaaagagaa

SEQ ID NO: 119883 - DNA, 248 bp, Glycine max
tatatgtcgacaggccacgataccaatgggatgacatgttgggtgctattgccagcaccaactaggactgtccctactcatcccgtgcatgttgagactagtaaaacctgtgatgtacctaaacaggcgagcttctgactgacaaccattaaaagatcacacaccacacagcaatgaagctaatgtggccactggccaactaaagatcctcgaatgtatcatgaagatggtctctagtaaaccattcc

SEQ ID NO: 119884 - DNA, 248 bp, Glycine max
cgtgctgatttaatctaaagacatgagatcatgattttctttgtgtgccatacgatgacgtgagaaagaaatgtgagcaaatataaacgggcactccttacaaccgacaaaggcccataatcaaagtctgaaaccacaggacactgttagacttgtacagggccactgagtgtcttgccggcgcaaaccctgcttacaatacatgacatcataacacagatgagcgatgtgtaaaattacctatgtca

SEQ ID NO: 119885 - DNA, 188 bp, Glycine max
gggtgctatcgcccaaatcctgcctcgaccaataccgacccaacccgggcatagtcggccaatgagaacctgtgatgcacctaaacgtgcgagctcctggcagtcaactgatcaaaggactacaagaccacatactagcgggcttgagatggctggacaactgtgaattacgcgtactatgcggatag

SEQ ID NO: 119886 - DNA, 267 bp, Glycine max
  unsure (1)..(267): unsure at all n locations
cacttcaatactaactgtggcgatatgcgggcgattctgcatgtaatgtgtttctttcaacggtctcattcttgccattaagcgacntagacgatttgatctgtattaacatacccgattgtcaagttgctatagagctggccttgaccaattgtgctcattatgtcgacattacctttattttctatgctttatcctgcgaagccaatgatcgaaccgacttgaagctagatgtgtgtcacgatagattgaaagcctttggtatgt

SEQ ID NO: 119887 - DNA, 390 bp, Glycine max
agtgacctgcggctgcagctttaagaagctcatgagctgctctgtaatctctgctcaaccttcattaaccggtggatcttctcgaaactttgtctgcaacttcacaaaacattttaccatgatcggaccgttgcgatctttgcgaagatgtctggagtgtactagaagcctcttaatgaagcttctggaggaagcctcttaatgaagcttctagagaaaactacatgaagctgcctcggtagaaacgctgcccagccttcgttaaccgttggatcttcttgaaatttggtttgcaacttcacaagacactttaccatgatttaaccgttgggatcgttgagaaaatatctgtagtgtgctatatgcttccgttcccgagagcatctctca

SEQ ID NO: 119888 - DNA, 244 bp, Glycine max
gtcaccgacccatactggtcattcaccagaacatcaaaattgaaggcatcgatccaaatagtcaccatcaaacctaattatctactatgaatcccccataccccaactggtaagcatataacagcgactatgcatggtcaatacaaacacttcaggcccttcaagaaatgggtctggccaaactgtcacaattgtccaataagacttgggcaaacatggcctcagattctgatgatgatcctaa

SEQ ID NO: 119889 - DNA, 97 bp, Glycine max
atccttcagtcacctgcggctgcagcttatggtgatcacatggaatctacttctttttatttttgatgaccacatccactatgatgacaatcattca

SEQ ID NO: 119890 - DNA, 178 bp, Glycine max
tattacatcgtgcacctgactaatattccatgaatatgctatatccttacatgacagagtaccacctttgatcttcaatcggggatattggatgcaaattactgatacacagtggtttgtatgtatactacacctataagaacactacaaattactctgatagcttatgatacctttg

SEQ ID NO: 119891 - DNA, 360 bp, Glycine max
  unsure (1)..(360): unsure at all n locations
ttaagtcacctgcggcgtgcaagcttanggtggcaactctgagtgctgatgcacatttttcttacaaggatggtgtaacgggtgtagtgactgtctgcttaactggaactgacaatctgacaaggatgctctctcaagcctttgtactagctccccacgacaaacgctacttcgctttgaatgatgttttgaaatatgatgatgagtataagtcacgtgatgtcgagtatgtgcctgcaaacgatgctgctgatgaaagcgctccaacagacgctgtcgtacccgagcctggttaatcatgacatctgctggttatatatcatacgcattcctggcgtaggccatttgcttcctataaca

SEQ ID NO: 119892 - DNA, 221 bp, Glycine max
cgtgagacatcatgggcaagtattttaacagatgtgtggtttgttacattcaccaaatcgatagagataaacctaatatcatacatgttatgcatatgatgctggctatgccccatcattatcacattcctgatcctatttcttttatctttcatttttatcttatatttcctatgttatctttgcttatctttatctgtatcatgtatttttcttatctc

SEQ ID NO: 119893 - DNA, 467 bp, Glycine max
  unsure (1)..(467): unsure at all n locations
gtcacctgcggcatgcaagcttgagaatggaggatcgccttgactgtccgtacttatgcaatcatgaaacacagcaccatactcctgaatggaggacaaatgaacaaccctaagcaatatcattcatgtggctcccaccaaggctgagaatggatgattgccttgacggtcctcacttacgcaatcatggaacacaaatccaaactcgaaaatggaagacacatgaacaaccctaaccaataacattcatgtggctccgaaaaagggtgagaatggatcattgccttgagggtcctcagttaggcaatcatggaacacaactccgaactcgataatggaggacacatgaacatccctaagcaatctcattcatgcggctctgaaaaagggagataatggacgattgccttgagggttctcacttaggcaatcatggaacacagctnccaacttctatatggaggaca

SEQ ID NO: 119894 - DNA, 344 bp, Glycine max
tgatcgtatgccttatggactgtgaatacaggaaatgctgtttgttctactgtgcatcagacgatggaccactgtcaacaatacacttgttgcgatcctgcccctctagatcattgaataggagactgcattaagattggcccttatatgcattagaacgccctgtgtgtctgatgagccctatggttgatttctaatctctttgcgccaagttggtcccaagttctctgatgcatacactcactatgatgtcagttatctggtccttgatttccggctccatactgtatgcaagtatgctattaattatgattttcttccaggaattttcggcacaatacact

SEQ ID NO: 119895 - DNA, 337 bp, Glycine max
agcttcattcttaacctgaataagatgatttgttatttgttcaaaatatgaaacttgctgatcagggagctaacaaaaattttcatgcacgtggaccttcttctagtagctctgacttgcggcaacctcctatccatcatccatttacacatagagcaattcccaacaaaaatatggaagaagtggaaaaggagatcctagagaccttcacgaaaggataggtgaacatacctctacttgatgccatcaagcaaatcccaagatatgccaagttactaaatgagctgtgcacccacagaacgaagctcataggctgtgaaacgattatcatgagtac

SEQ ID NO: 119896 - DNA, 477 bp, Glycine max
  unsure (1)..(477): unsure at all n locations
atccttaagtcacctgcggcatgcaagcttctatataagctgaaccatgttatcatatacacgagttgagttntattcagaacattagagattatctcttttatcttagtgagagtgattctcctaaattcttgagtgattcaagaacaccctggctgtatcaaaggactttttcacaacctttgtgtgtcgccctcgctggaaaaagtgattctttccttgatatcatctccacccttgttctttcaaaccacaattgcagaaaatccacctctgcccaaaattatctcgtgaccataactcccattgtacacactcaaattaagtgattcttgagcctaaattgaatttcaaaacgagacctttcacctcgttttggaatcaccatcttcggagccatgtatcttccgttattgccatttctatatttctgtccgtgcaccacttaacctacgttttaccattccattcattctt

SEQ ID NO: 119897 - DNA, 260 bp, Glycine max
tgttgtgcaccatcgcccgaccgccacctagtatccacatgttatgggtaccccataatcctacaagcttgagatgatgaagtgttgaaaggtgaaacttcctgcttttattgttgaccacagagtggtgcctggagatatgtcactgtggtcagtaaaactttgtgacgtcatgtggtgtgctattgcccataaccaagcttgaccaatcccgacccaacccgggcataatctgtcattgagaacctgtgatgtaccta

SEQ ID NO: 119898 - DNA, 426 bp, Glycine max
  unsure (1)..(426): unsure at all n locations
agcttccttaagaagattcctaatgaatctagttcttagctacacatacctctctaatagctaagctcacctncttgagatgagaagctagagcttagctacacaccccctataatagctaagctcacccccatgacaaanaacatgaaaataaaaaaaaagtgcttactacaaagactactcaaaataccccgaaatacaaggctaaaaccctatactactagaatggtcaaaatacaaggcccagacgaaggagaaacctattctaatatttacaaagataagcgggctcatagttagcccatgggctcaaaatctaccctaaggctcatgagaaccctagggccttccttgggatctctagcccaatctacttggagtcttctacccaatgcccttgcagggtaggatcgcatcagagtctat

SEQ ID NO: 119899 - DNA, 307 bp, Glycine max
  unsure (1)..(307): unsure at all n locations
gtatgcaatggagcataagatacaagtatcatctattgtattctgtttggtcaaaagagcttgtgtatgtacaatcatggccttcatcatgtcctcatttatacatttcattctaaaattcagagattcatgcaaagatcattactcacagntagtcgttcactcacggtttaagttcacactctcaccagttctggttcaagcttttctttcacaatcaatctgtctactgactaacaattctaattgcaagtacacactcttgctatttctttgtctaacatactcacatcttctcaaattcatg

SEQ ID NO: 119900 - DNA, 434 bp, Glycine max
agctttgtagtctataaaagctttaagatgtttgtgttaagattgtcaaaaaataagaaaatattatgagacaaaacgaacaagtgatataacgatgttagtctactagataaaggaaacttaaacaaattgaataaatcttagttttgccaagttaactagtttcattgtatttaagtttattgtgtaaacactcattgagtgattagaatataatttctatcaaacatatactgtttgtgaaagcgaaaagtaacttggtgataaagaatacttatgtcttaatctcatagaaagattaagtgtaatgtcaaaagtggcctagaaagtacttggtgtaaccagaagtgacatagaaaacacttgattggaatcaaatatttgattagtgaaacccttcaagggttaaaggagaacttaacgtagcacaaaag

SEQ ID NO: 119901 - DNA, 345 bp, Glycine max
  unsure (1)..(345): unsure at all n locations
cggaacttaaaactaagcttataaccatgcgtgtaaggttctgcctatatggtatctctntaaacaaaacctgtcaaatgctgtccaattagtgcttgttcatgcaccatatggactcttgtgcttctataaccacccccagaaaaccttactttcttcattatttttattaaaagaaatggagatgggtctccatattccttatctcctactatgcaatatgcatgtgatttttttcaatatattctatttctacttaatatactatcaatatattctgtttatttttaaatactattattgtaactcttctaaatcagtctttatgtatcaattcatattttg

SEQ ID NO: 119902 - DNA, 195 bp, Glycine max
ccccgggacgggaaaaaaagcccccaccacagcacacaaagccacgacgggggaaaaaaaacaaccacagaaaacgcagaagggggggcggaacaaaaaaagcccggagcggcgcaaagagagcggacaccagcaaaaagggggaggacgcaaaaaaaggaaagagggaaaccaacgggggacggaaaaaaagaa

SEQ ID NO: 119903 - DNA, 140 bp, Glycine max
tatgggatggatgatccgcccccccccccattatgtattttaatttatgaagaagtggacaggttaactcccccccaaaaggaaaaaagaagctataaaaattaagtgtatagatttagaaagatagtgttaaaaaaaag

SEQ ID NO: 119904 - DNA, 209 bp, Glycine max
aagaagagctcatgatactgagagctccccaaactgtaactgagactatggaaaaagaaaaaagggccattagaagaggaatactttggtcaactattaatccagtacgcttatacgacttaacttgaaccttaatttaaattgaatattccccttaatatccctaatctaatcaacgctccctctttttaccttaaaagtgtttccct

SEQ ID NO: 119905 - DNA, 69 bp, Glycine max
gagctgcagctggttctcttttatctaaatacggtgatctttgtgtgcttctgttactcctcttaatta

SEQ ID NO: 119906 - DNA, 127 bp, Glycine max
acgagactcgtttctaccaggacttttttttggcgtttggcatggggttgcaacactgcattaccacgctatgctggactttgactaaagactcgctccataagacaaccatcagggttgggtgcct

SEQ ID NO: 119907 - DNA, 233 bp, Glycine max
tgtgagttaatcatttgggcacttttccatattcttgtgtccacacgtctaacgaggaaaattatcaccttacttaggtatatatctagaacatattggagagtgcaactctacatattcttagacgaagaatagagaattataatattatgatgtggatttataatcttagatgttcaactttagatgattcaaaagctagttgtattaagcaaaactaacagttaaaatat

SEQ ID NO: 119908 - DNA, 126 bp, Glycine max
cgtactacaaataaataacggattaacctcatcaaggatgtacagctaaaactattcataagcaccctacgaaggcgctaggtataacaaatatcaatgaacctacacagccctcagactaatcaa

SEQ ID NO: 119909 - DNA, 61 bp, Glycine max
tttgtaactagagaatatatggtgtagcactaagaactgttgaattaataacaatctgagt

SEQ ID NO: 119910 - DNA, 228 bp, Glycine max
  unsure (1)..(228): unsure at all n locations
catcacaagcgctcgagcacctcgctgatatctctcttcttctctctcacaatgtaagtgaatctgataacagggtgtgacccctctcttagccccatgtcattatagaaaatggggggaggtgctttgcgacangtgttctatgaacttctgatggccatgtgangacccccctaatgaatttacctcatttagttttgtcattctttaaatgcggaacctacgacc

SEQ ID NO: 119911 - DNA, 244 bp, Glycine max
agcaatatgttaccctttacaaagactttcatggagatagggcaaactcctttctactatgcatttccttatggttctcaaaggactgtcacatgctggagtagacttggacatcaacttggacatctttcctctatatggacggagcacatgtcaggacatgatggggcctggtgaacaaaacacatgatatttttttagtcccaaatttcagcttttgtagttaaagcttgacgattaattt

SEQ ID NO: 119912 - DNA, 347 bp, Glycine max
agctcaacatgctaataccatgacaaagctacatcaacaaagcataacaatagaagatacaaattcgttcatgagactttacaacacttggacaatacacccactctattgtataacagatctacaacacttgaattaagattggtttgagaatttagaaggcctcaaaataaagaaatttgggaccgtataagtgtacagtgggtgccgatcgactctatagaatgcatggacaaagtgtattggccgaagaaacacgactaagtagatccaatcttagggaaattatctgtagctagtactataaaaaataaatttatagtcaaaataattctgactggtcaata

SEQ ID NO: 119913 - DNA, 138 bp, Glycine max
gggagggtttggggatttttttgaactgtttatcactgagtcaaatttcactgcaatttacttctaaggggtgatataaaaacaataaggcaaataaaggcctaaagcttaagttaaagccttaagttaaattctaat

SEQ ID NO: 119914 - DNA, 269 bp, Glycine max
ttcttgctgaacaatatggctgatgtgaagctgttgaatagaacttgagaatttaaatggaaattcaaatggttttaattaagcttttaaaacaatggggctaagttcaaattgtgtgaacctaaagtatggcttggtcaaactaactcaacttttgcctccaagatcgatttgactctttcaaggattaggacttgtgtcctgctcagtctgtgttctgtattggacaaccgggaacttggtgttgttaagttttctcaatttctcag

SEQ ID NO: 119915 - DNA, 200 bp, Glycine max
atcgaggattgcgatgttctttacaatcgagactatgacattatcaatgccagatgacgtgcttgccgttatatgtatggatatactctcatcgagagccttgcgatttctgtttcttgcgtaactcgtcttgctcacgcgatcgtctgggaactccccactgataggattccgcaaatttccccggactccgacgcgtg

SEQ ID NO: 119916 - DNA, 196 bp, Glycine max
agaaaaattcattctggaatgctgttgcatctaatttcagtatttttttcacctattctttaactactgttgatgatatttactatgtggtacattgacataactgtctttaatgtgaattgtttatctgatgagaaaataactttcggttgatgggtgtatatctaaagatgtgtgtttgagctgaaaattgatg

SEQ ID NO: 119917 - DNA, 162 bp, Glycine max
  unsure (1)..(162): unsure at all n locations
ttcatgacatatcaatggattggcactgatcagcaaatgaaaccagcacttctaggataggccatatccagatctggacattacttgagcattaagactctggacagtgacataactgctgttacttgagcagaactccaaatctgcanacgattacacttt

SEQ ID NO: 119918 - DNA, 361 bp, Glycine max
agctcaagacgagtcactttttaatagccaaattactgtttataccaacagtttgatacaagaaaccctgtttaatccactagggcccaagcaaagagagataaagatgtgtgttttgaaagtatcgacattgaaaattaataaaagtaaataagttgagtgaatactgatgaaaaattatattgtcattcatacacgtcgtgtcgatatttaaatataataaaataatattatatatggatgatattgatttaataccttatattattttctcaagaataaattctatgtatagtatttaatatataactgatctgctaattgattaattactgaccatttggatactgccttttatata

SEQ ID NO: 119919 - DNA, 348 bp, Glycine max
tgacgcaacccctctatagatgtctgctctaacactttaactacaacaatatgtgtgatctaccccaggatacatatgccacaaacattccattttagtagttaaacagaaagtacctaaagtacatgttagcaacaagaaaatcaatagatcatacatctctcacaatatacttaaattttaagttttctacctcccatttttttattgttcaattttttacaaataagcaatttctgtactaaattataagtttatgcaaataagtgtcctttccagggtactacgctttccaatacttgcagcgtaacctgtacttgaacaatgagagtgaaggatcggtaaggc
